United States Patent Application Publication US 2007/0042381 A1 - sequence listing, part 75

SEQ ID NO: 3420130 - RNA, 20 nt, Human
acauauuuguuaaauauuua

SEQ ID NO: 3420131 - RNA, 19 nt, Human
acauauuuuauuaagaacu

SEQ ID NO: 3420132 - RNA, 21 nt, Human
acauauuuuuuauaucuggaa

SEQ ID NO: 3420133 - RNA, 17 nt, Human
acaucaaaccuuugagu

SEQ ID NO: 3420134 - RNA, 20 nt, Human
acaucaaacucaaugcuuua

SEQ ID NO: 3420135 - RNA, 12 nt, Human
acaucaaagagg

SEQ ID NO: 3420136 - RNA, 18 nt, Human
acaucaaauaagaaauaa

SEQ ID NO: 3420137 - RNA, 13 nt, Human
acaucaacagaua

SEQ ID NO: 3420138 - RNA, 14 nt, Human
acaucaaucuuuaa

SEQ ID NO: 3420139 - RNA, 14 nt, Human
acaucaauguucau

SEQ ID NO: 3420140 - RNA, 16 nt, Human
acaucaauguucauug

SEQ ID NO: 3420141 - RNA, 13 nt, Human
acaucacacacac

SEQ ID NO: 3420142 - RNA, 14 nt, Human
acaucacagcagcc

SEQ ID NO: 3420143 - RNA, 16 nt, Human
acaucacagcccagcc

SEQ ID NO: 3420144 - RNA, 14 nt, Human
acaucacagggugg

SEQ ID NO: 3420145 - RNA, 21 nt, Human
acaucaccgacgcgucuccug

SEQ ID NO: 3420146 - RNA, 19 nt, Human
acaucacucucaccuucca

SEQ ID NO: 3420147 - RNA, 23 nt, Human
acaucacugaaaccuuuaagaaa

SEQ ID NO: 3420148 - RNA, 14 nt, Human
acaucacugcuuga

SEQ ID NO: 3420149 - RNA, 21 nt, Human
acaucacugcuugaugaagca

SEQ ID NO: 3420150 - RNA, 12 nt, Human
acaucacuggca

SEQ ID NO: 3420151 - RNA, 14 nt, Human
acaucacuggcaug

SEQ ID NO: 3420152 - RNA, 15 nt, Human
acaucacuuguacaa

SEQ ID NO: 3420153 - RNA, 19 nt, Human
acaucacuuguacaaaaua

SEQ ID NO: 3420154 - RNA, 22 nt, Human
acaucagagugacauccaggag

SEQ ID NO: 3420155 - RNA, 12 nt, Human
acaucagcaaac

SEQ ID NO: 3420156 - RNA, 13 nt, Human
acaucagcaaaca

SEQ ID NO: 3420157 - RNA, 17 nt, Human
acaucagcacgauuucu

SEQ ID NO: 3420158 - RNA, 21 nt, Human
acaucagcacgauuucuguuu

SEQ ID NO: 3420159 - RNA, 22 nt, Human
acaucagcacgauuucuguuua

SEQ ID NO: 3420160 - RNA, 12 nt, Human
acaucagccagc

SEQ ID NO: 3420161 - RNA, 13 nt, Human
acaucagccagcu

SEQ ID NO: 3420162 - RNA, 16 nt, Human
acaucagccagcugcc

SEQ ID NO: 3420163 - RNA, 12 nt, Human
acaucagcuuga

SEQ ID NO: 3420164 - RNA, 21 nt, Human
acaucagcuugaccaguauaa

SEQ ID NO: 3420165 - RNA, 20 nt, Human
acaucagguuaggcaguaua

SEQ ID NO: 3420166 - RNA, 16 nt, Human
acaucagguuuuuccc

SEQ ID NO: 3420167 - RNA, 20 nt, Human
acaucaguuacucugaaggg

SEQ ID NO: 3420168 - RNA, 15 nt, Human
acaucaguuuuaacg

SEQ ID NO: 3420169 - RNA, 13 nt, Human
acaucaucuguaa

SEQ ID NO: 3420170 - RNA, 14 nt, Human
acaucaugaauuua

SEQ ID NO: 3420171 - RNA, 15 nt, Human
acaucauuacuauaa

SEQ ID NO: 3420172 - RNA, 21 nt, Human
acaucauuucuuuuugggaga

SEQ ID NO: 3420173 - RNA, 12 nt, Human
acaucauuuugu

SEQ ID NO: 3420174 - RNA, 22 nt, Human
acauccaaggagaaacagagac

SEQ ID NO: 3420175 - RNA, 23 nt, Human
acauccaaggagaaacagagaca

SEQ ID NO: 3420176 - RNA, 19 nt, Human
acauccacagucuccccca

SEQ ID NO: 3420177 - RNA, 13 nt, Human
acauccacucucu

SEQ ID NO: 3420178 - RNA, 19 nt, Human
acauccacucucucuuguu

SEQ ID NO: 3420179 - RNA, 22 nt, Human
acauccacucucucuuguucuu

SEQ ID NO: 3420180 - RNA, 13 nt, Human
acauccauaaaga

SEQ ID NO: 3420181 - RNA, 15 nt, Human
acauccauaaagaag

SEQ ID NO: 3420182 - RNA, 17 nt, Human
acauccauaaagaagca

SEQ ID NO: 3420183 - RNA, 11 nt, Human
acauccauguc

SEQ ID NO: 3420184 - RNA, 18 nt, Human
acauccauguuuguaaaa

SEQ ID NO: 3420185 - RNA, 18 nt, Human
acauccauucccaagaaa

SEQ ID NO: 3420186 - RNA, 20 nt, Human
acaucccacucacaacagcu

SEQ ID NO: 3420187 - RNA, 20 nt, Human
acaucccauguaacagaaag

SEQ ID NO: 3420188 - RNA, 14 nt, Human
acauccccacccuu

SEQ ID NO: 3420189 - RNA, 16 nt, Human
acauccccgcuggcug

SEQ ID NO: 3420190 - RNA, 18 nt, Human
acaucccgggacgcagca

SEQ ID NO: 3420191 - RNA, 23 nt, Human
acaucccuacaaaaaauuagaaa

SEQ ID NO: 3420192 - RNA, 15 nt, Human
acaucccucucugcu

SEQ ID NO: 3420193 - RNA, 16 nt, Human
acaucccucucugcug

SEQ ID NO: 3420194 - RNA, 15 nt, Human
acaucccugccagcu

SEQ ID NO: 3420195 - RNA, 14 nt, Human
acaucccugggccu

SEQ ID NO: 3420196 - RNA, 15 nt, Human
acaucccugggccug

SEQ ID NO: 3420197 - RNA, 17 nt, Human
acaucccugggccugcu

SEQ ID NO: 3420198 - RNA, 18 nt, Human
acaucccugggccugcug

SEQ ID NO: 3420199 - RNA, 19 nt, Human
acaucccugggccugcugc

SEQ ID NO: 3420200 - RNA, 16 nt, Human
acauccgccuuuugua

SEQ ID NO: 3420201 - RNA, 21 nt, Human
acauccgcgugugccugugug

SEQ ID NO: 3420202 - RNA, 23 nt, Human
acauccgcgugugccugugugcg

SEQ ID NO: 3420203 - RNA, 14 nt, Human
acauccuccgucca

SEQ ID NO: 3420204 - RNA, 17 nt, Human
acauccuccguccagcc

SEQ ID NO: 3420205 - RNA, 15 nt, Human
acauccuccucccac

SEQ ID NO: 3420206 - RNA, 18 nt, Human
acauccugccagccccac

SEQ ID NO: 3420207 - RNA, 23 nt, Human
acauccugucaucugagaaugaa

SEQ ID NO: 3420208 - RNA, 14 nt, Human
aauguaauuugugu

SEQ ID NO: 3420209 - RNA, 16 nt, Human
aauguaauuuguguaa

SEQ ID NO: 3420210 - RNA, 15 nt, Human
aauguacaacuuuuu

SEQ ID NO: 3420211 - RNA, 22 nt, Human
aauguacacacugguacuuaga

SEQ ID NO: 3420212 - RNA, 15 nt, Human
aauguacagacauau

SEQ ID NO: 3420213 - RNA, 21 nt, Human
aauguacagacauauuuaacu

SEQ ID NO: 3420214 - RNA, 14 nt, Human
aauguacauguauu

SEQ ID NO: 3420215 - RNA, 16 nt, Human
aauguacauguauuaa

SEQ ID NO: 3420216 - RNA, 15 nt, Human
aauguacauuaauua

SEQ ID NO: 3420217 - RNA, 21 nt, Human
aauguaccuucuuucacucug

SEQ ID NO: 3420218 - RNA, 19 nt, Human
aauguacugauuucaguaa

SEQ ID NO: 3420219 - RNA, 14 nt, Human
aauguacugcauau

SEQ ID NO: 3420220 - RNA, 21 nt, Human
aauguagaguuuuuaaacauc

SEQ ID NO: 3420221 - RNA, 16 nt, Human
aauguagauaaguguu

SEQ ID NO: 3420222 - RNA, 12 nt, Human
aauguagauuuu

SEQ ID NO: 3420223 - RNA, 13 nt, Human
aauguagccaugg

SEQ ID NO: 3420224 - RNA, 14 nt, Human
aauguaggcuggcu

SEQ ID NO: 3420225 - RNA, 16 nt, Human
aauguaggcuuaguuu

SEQ ID NO: 3420226 - RNA, 19 nt, Human
aauguaggcuuaguuugug

SEQ ID NO: 3420227 - RNA, 15 nt, Human
aauguaguugaugua

SEQ ID NO: 3420228 - RNA, 18 nt, Human
aauguaguugauguaucc

SEQ ID NO: 3420229 - RNA, 19 nt, Human
aauguauacuauaguacca

SEQ ID NO: 3420230 - RNA, 13 nt, Human
aauguauaguaaa

SEQ ID NO: 3420231 - RNA, 14 nt, Human
aauguauauaaaaa

SEQ ID NO: 3420232 - RNA, 21 nt, Human
aauguauauacacauauaccu

SEQ ID NO: 3420233 - RNA, 13 nt, Human
aauguauauauuu

SEQ ID NO: 3420234 - RNA, 16 nt, Human
aauguaucauagaaau

SEQ ID NO: 3420235 - RNA, 21 nt, Human
aauguaucccuucucacagca

SEQ ID NO: 3420236 - RNA, 14 nt, Human
aauguaucuaagaa

SEQ ID NO: 3420237 - RNA, 13 nt, Human
aauguaucuguga

SEQ ID NO: 3420238 - RNA, 13 nt, Human
aauguaucuuauu

SEQ ID NO: 3420239 - RNA, 19 nt, Human
aauguaugcauguugucua

SEQ ID NO: 3420240 - RNA, 14 nt, Human
aauguauguaaaua

SEQ ID NO: 3420241 - RNA, 18 nt, Human
aauguaugugcacuguca

SEQ ID NO: 3420242 - RNA, 19 nt, Human
aauguauguguaaguauuc

SEQ ID NO: 3420243 - RNA, 23 nt, Human
aauguauuaagcccacaguauau

SEQ ID NO: 3420244 - RNA, 14 nt, Human
aauguauuauucug

SEQ ID NO: 3420245 - RNA, 16 nt, Human
aauguauucauauuug

SEQ ID NO: 3420246 - RNA, 23 nt, Human
aauguauuguaccuuuuaacacc

SEQ ID NO: 3420247 - RNA, 13 nt, Human
aauguauuuguuc

SEQ ID NO: 3420248 - RNA, 13 nt, Human
aauguauuuuaug

SEQ ID NO: 3420249 - RNA, 21 nt, Human
aauguauuuuauuguaacaga

SEQ ID NO: 3420250 - RNA, 23 nt, Human
aauguauuuuauuguaacagaca

SEQ ID NO: 3420251 - RNA, 23 nt, Human
aauguauuuucuucaccucugcu

SEQ ID NO: 3420252 - RNA, 14 nt, Human
aauguauuuuucua

SEQ ID NO: 3420253 - RNA, 18 nt, Human
aaugucaaaaauauuuag

SEQ ID NO: 3420254 - RNA, 15 nt, Human
aaugucaaaugugaa

SEQ ID NO: 3420255 - RNA, 15 nt, Human
aaugucacaggcagg

SEQ ID NO: 3420256 - RNA, 15 nt, Human
aaugucaccaccuuc

SEQ ID NO: 3420257 - RNA, 16 nt, Human
aaugucaccaccuucc

SEQ ID NO: 3420258 - RNA, 22 nt, Human
aaugucacguacugucugauug

SEQ ID NO: 3420259 - RNA, 19 nt, Human
aaugucacuuuuugaggca

SEQ ID NO: 3420260 - RNA, 20 nt, Human
aaugucacuuuuugaggcaa

SEQ ID NO: 3420261 - RNA, 13 nt, Human
aaugucagaaaaa

SEQ ID NO: 3420262 - RNA, 19 nt, Human
aaugucagaaaccaguuau

SEQ ID NO: 3420263 - RNA, 18 nt, Human
aaugucagauacaaugua

SEQ ID NO: 3420264 - RNA, 21 nt, Human
aaugucagauacaauguauuu

SEQ ID NO: 3420265 - RNA, 16 nt, Human
aaugucagauuccuuu

SEQ ID NO: 3420266 - RNA, 20 nt, Human
aaugucagauuccuuucccu

SEQ ID NO: 3420267 - RNA, 16 nt, Human
aaugucaguaugugga

SEQ ID NO: 3420268 - RNA, 13 nt, Human
aaugucaguauuu

SEQ ID NO: 3420269 - RNA, 16 nt, Human
aaugucagugugacug

SEQ ID NO: 3420270 - RNA, 18 nt, Human
aaugucaguucugauaug

SEQ ID NO: 3420271 - RNA, 23 nt, Human
aaugucaguucugauauggaagc

SEQ ID NO: 3420272 - RNA, 20 nt, Human
aaugucaguuguuauuuauu

SEQ ID NO: 3420273 - RNA, 16 nt, Human
aaugucaugcugccuu

SEQ ID NO: 3420274 - RNA, 14 nt, Human
aaugucauugaaaa

SEQ ID NO: 3420275 - RNA, 19 nt, Human
aaugucauuuugguacuuu

SEQ ID NO: 3420276 - RNA, 22 nt, Human
aauguccaguaagaucacuguu

SEQ ID NO: 3420277 - RNA, 18 nt, Human
aauguccuccagaagccu

SEQ ID NO: 3420278 - RNA, 16 nt, Human
aauguccugccuuuua

SEQ ID NO: 3420279 - RNA, 15 nt, Human
aaugucuaaaauugu

SEQ ID NO: 3420280 - RNA, 20 nt, Human
aaugucuaauguauuuuauu

SEQ ID NO: 3420281 - RNA, 20 nt, Human
aaugucucuuuaaugucaca

SEQ ID NO: 3420282 - RNA, 21 nt, Human
aaugucugcagcccugagaaa

SEQ ID NO: 3420283 - RNA, 20 nt, Human
aaugucuggagaccaccagg

SEQ ID NO: 3420284 - RNA, 12 nt, Human
aaugucugugcu

SEQ ID NO: 3420285 - RNA, 13 nt, Human
aaugucugugcua

SEQ ID NO: 3420286 - RNA, 18 nt, Human
aaugucuucaaggcuuca

SEQ ID NO: 3420287 - RNA, 12 nt, Human
aaugucuucaua

SEQ ID NO: 3420288 - RNA, 22 nt, Human
aaugucuucuguauucacuuau

SEQ ID NO: 3420289 - RNA, 15 nt, Human
aaugucuugagcucu

SEQ ID NO: 3420290 - RNA, 20 nt, Human
aaugucuugaugcaugcacu

SEQ ID NO: 3420291 - RNA, 19 nt, Human
aaugucuugcuguugacau

SEQ ID NO: 3420292 - RNA, 22 nt, Human
aaugucuugcuguugacauauu

SEQ ID NO: 3420293 - RNA, 23 nt, Human
aaugucuugcuguugacauauuu

SEQ ID NO: 3420294 - RNA, 16 nt, Human
aaugucuuguuaauau

SEQ ID NO: 3420295 - RNA, 17 nt, Human
aaugucuuguuaauauu

SEQ ID NO: 3420296 - RNA, 21 nt, Human
aaugucuuguuaauauucuuu

SEQ ID NO: 3420297 - RNA, 21 nt, Human
aaugucuuuaaugcaauauac

SEQ ID NO: 3420298 - RNA, 17 nt, Human
aaugugaaaagaaaaau

SEQ ID NO: 3420299 - RNA, 15 nt, Human
aaugugaaacuggau

SEQ ID NO: 3420300 - RNA, 17 nt, Human
aaugugaacuagcugga

SEQ ID NO: 3420301 - RNA, 17 nt, Human
aaugugaacuuguagcu

SEQ ID NO: 3420302 - RNA, 22 nt, Human
aaugugaacuuguagcuguaaa

SEQ ID NO: 3420303 - RNA, 24 nt, Human
acagaguggucuuucuggagaggu

SEQ ID NO: 3420304 - RNA, 20 nt, Human
acagaguguagccagguccc

SEQ ID NO: 3420305 - RNA, 17 nt, Human
acagagugugcuggagg

SEQ ID NO: 3420306 - RNA, 19 nt, Human
acagagugugcuggaggac

SEQ ID NO: 3420307 - RNA, 18 nt, Human
acagaguguggacucugg

SEQ ID NO: 3420308 - RNA, 19 nt, Human
acagaguuguuacauuuuu

SEQ ID NO: 3420309 - RNA, 18 nt, Human
acagaguuuucacucuua

SEQ ID NO: 3420310 - RNA, 13 nt, Human
acagauaaaaagu

SEQ ID NO: 3420311 - RNA, 13 nt, Human
acagauaaagauu

SEQ ID NO: 3420312 - RNA, 15 nt, Human
acagauaauaauggg

SEQ ID NO: 3420313 - RNA, 20 nt, Human
acagauagauauaugcucug

SEQ ID NO: 3420314 - RNA, 13 nt, Human
acagauaguugug

SEQ ID NO: 3420315 - RNA, 19 nt, Human
acagauauacuuuguggac

SEQ ID NO: 3420316 - RNA, 12 nt, Human
acagauauauuu

SEQ ID NO: 3420317 - RNA, 15 nt, Human
acagaucaagcugug

SEQ ID NO: 3420318 - RNA, 16 nt, Human
acagaucaagcuguga

SEQ ID NO: 3420319 - RNA, 18 nt, Human
acagaucaagcugugaga

SEQ ID NO: 3420320 - RNA, 17 nt, Human
acagauccccaagccug

SEQ ID NO: 3420321 - RNA, 23 nt, Human
acagaucgaaccguuuugaagcu

SEQ ID NO: 3420322 - RNA, 17 nt, Human
acagaucuccuggcaaa

SEQ ID NO: 3420323 - RNA, 22 nt, Human
acagaucucugcuuuggaaauc

SEQ ID NO: 3420324 - RNA, 21 nt, Human
acagaucuggaaccucagccu

SEQ ID NO: 3420325 - RNA, 20 nt, Human
acagaugaaacacaaacaau

SEQ ID NO: 3420326 - RNA, 19 nt, Human
acagaugaacucuuucugg

SEQ ID NO: 3420327 - RNA, 14 nt, Human
acagaugaauguau

SEQ ID NO: 3420328 - RNA, 18 nt, Human
acagaugaccccugccca

SEQ ID NO: 3420329 - RNA, 13 nt, Human
acagaugagucac

SEQ ID NO: 3420330 - RNA, 19 nt, Human
acagaugaugagaauuucu

SEQ ID NO: 3420331 - RNA, 17 nt, Human
acagaugcaaugugcua

SEQ ID NO: 3420332 - RNA, 20 nt, Human
acagaugcaaugugcuacug

SEQ ID NO: 3420333 - RNA, 18 nt, Human
acagaugccccagagcug

SEQ ID NO: 3420334 - RNA, 12 nt, Human
acagaugccucc

SEQ ID NO: 3420335 - RNA, 19 nt, Human
acagaugccuuuuuuguag

SEQ ID NO: 3420336 - RNA, 12 nt, Human
acagaugcucca

SEQ ID NO: 3420337 - RNA, 21 nt, Human
acagaugcuuuucugucucug

SEQ ID NO: 3420338 - RNA, 16 nt, Human
acagauggauuugccu

SEQ ID NO: 3420339 - RNA, 16 nt, Human
acagaugggcaaauua

SEQ ID NO: 3420340 - RNA, 16 nt, Human
acagauguccaucaga

SEQ ID NO: 3420341 - RNA, 21 nt, Human
acagauguucgguuuuuuucc

SEQ ID NO: 3420342 - RNA, 12 nt, Human
acagauguugaa

SEQ ID NO: 3420343 - RNA, 13 nt, Human
acagauuaauauu

SEQ ID NO: 3420344 - RNA, 17 nt, Human
acagauucacacugucu

SEQ ID NO: 3420345 - RNA, 19 nt, Human
acagauucacacugucugg

SEQ ID NO: 3420346 - RNA, 15 nt, Human
acagauucagucuug

SEQ ID NO: 3420347 - RNA, 18 nt, Human
acagauucagucuugccu

SEQ ID NO: 3420348 - RNA, 21 nt, Human
acagauucuuucaguucuuug

SEQ ID NO: 3420349 - RNA, 12 nt, Human
acagauugaauu

SEQ ID NO: 3420350 - RNA, 16 nt, Human
acagauugcugcuucu

SEQ ID NO: 3420351 - RNA, 17 nt, Human
acagauuggauuuuaug

SEQ ID NO: 3420352 - RNA, 13 nt, Human
acagauuguuucu

SEQ ID NO: 3420353 - RNA, 16 nt, Human
accagagaccguccuc

SEQ ID NO: 3420354 - RNA, 20 nt, Human
accagagcaaccucucacuc

SEQ ID NO: 3420355 - RNA, 12 nt, Human
aauuauguaaau

SEQ ID NO: 3420356 - RNA, 13 nt, Human
aauuauguagcuc

SEQ ID NO: 3420357 - RNA, 22 nt, Human
aauuauguagcucuuugucagg

SEQ ID NO: 3420358 - RNA, 18 nt, Human
aauuauguauguuuacau

SEQ ID NO: 3420359 - RNA, 21 nt, Human
aauuauguauguuuacauauc

SEQ ID NO: 3420360 - RNA, 15 nt, Human
aauuaugugacauuu

SEQ ID NO: 3420361 - RNA, 14 nt, Human
aauuauguuaaacu

SEQ ID NO: 3420362 - RNA, 15 nt, Human
aauuauguuaaacua

SEQ ID NO: 3420363 - RNA, 17 nt, Human
aauuauguuauugaaaa

SEQ ID NO: 3420364 - RNA, 19 nt, Human
aauuauguuauugaaaaaa

SEQ ID NO: 3420365 - RNA, 18 nt, Human
aauuauguuuauauaaau

SEQ ID NO: 3420366 - RNA, 19 nt, Human
aauuauuaacuacauuuau

SEQ ID NO: 3420367 - RNA, 20 nt, Human
aauuauuaacuacauuuaug

SEQ ID NO: 3420368 - RNA, 14 nt, Human
aauuauuacagugu

SEQ ID NO: 3420369 - RNA, 20 nt, Human
aauuauuaguuuacaucauu

SEQ ID NO: 3420370 - RNA, 17 nt, Human
aauuauuauaaaaauau

SEQ ID NO: 3420371 - RNA, 16 nt, Human
aauuauuauuuggccc

SEQ ID NO: 3420372 - RNA, 14 nt, Human
aauuauucaauuua

SEQ ID NO: 3420373 - RNA, 17 nt, Human
aauuauucaguuaagaa

SEQ ID NO: 3420374 - RNA, 20 nt, Human
aauuauucuauaauuuccau

SEQ ID NO: 3420375 - RNA, 18 nt, Human
aauuauugauauauauua

SEQ ID NO: 3420376 - RNA, 12 nt, Human
aauuauugguaa

SEQ ID NO: 3420377 - RNA, 10 nt, Human
aauuauuguu

SEQ ID NO: 3420378 - RNA, 21 nt, Human
aauuauuuauuaaaugcccag

SEQ ID NO: 3420379 - RNA, 22 nt, Human
aauuauuuauuaaaugcccagc

SEQ ID NO: 3420380 - RNA, 20 nt, Human
aauuauuuauuuauggagga

SEQ ID NO: 3420381 - RNA, 19 nt, Human
aauuauuucacaaauaaua

SEQ ID NO: 3420382 - RNA, 17 nt, Human
aauuauuucagaaaugu

SEQ ID NO: 3420383 - RNA, 22 nt, Human
aauuauuucaugauuagaaauu

SEQ ID NO: 3420384 - RNA, 12 nt, Human
aauuauuugcau

SEQ ID NO: 3420385 - RNA, 19 nt, Human
aauuauuuguguaauagaa

SEQ ID NO: 3420386 - RNA, 18 nt, Human
aauuauuuuaaacaaaau

SEQ ID NO: 3420387 - RNA, 18 nt, Human
aauuauuuuaaauuauaa

SEQ ID NO: 3420388 - RNA, 18 nt, Human
aauuauuuuggauuuugu

SEQ ID NO: 3420389 - RNA, 19 nt, Human
aauuauuuugguacuuuua

SEQ ID NO: 3420390 - RNA, 20 nt, Human
aauuauuuugguacuuuuau

SEQ ID NO: 3420391 - RNA, 16 nt, Human
aauuauuuuuuuucuu

SEQ ID NO: 3420392 - RNA, 19 nt, Human
aauuauuuuuuuucuuuua

SEQ ID NO: 3420393 - RNA, 15 nt, Human
aauucaaaaaguguu

SEQ ID NO: 3420394 - RNA, 14 nt, Human
aauucaaaaaugua

SEQ ID NO: 3420395 - RNA, 16 nt, Human
aauucaaaaauguaca

SEQ ID NO: 3420396 - RNA, 17 nt, Human
aauucaaaaauguacaa

SEQ ID NO: 3420397 - RNA, 16 nt, Human
aauucaaaaguuccaa

SEQ ID NO: 3420398 - RNA, 13 nt, Human
aauucaaagcaug

SEQ ID NO: 3420399 - RNA, 19 nt, Human
aauucaaagcauggacauu

SEQ ID NO: 3420400 - RNA, 22 nt, Human
aauucaaagcuguguguuugga

SEQ ID NO: 3420401 - RNA, 21 nt, Human
aauucaacguuaauaauucug

SEQ ID NO: 3420402 - RNA, 12 nt, Human
aauucaacuuaa

SEQ ID NO: 3420403 - RNA, 21 nt, Human
aauucaacuuaacuaucaucu

SEQ ID NO: 3420404 - RNA, 15 nt, Human
aauucaacuuuguaa

SEQ ID NO: 3420405 - RNA, 17 nt, Human
aauucaaggaauuucuu

SEQ ID NO: 3420406 - RNA, 15 nt, Human
aauucaauacaaaca

SEQ ID NO: 3420407 - RNA, 16 nt, Human
aauucaauaguaauau

SEQ ID NO: 3420408 - RNA, 19 nt, Human
aauucaauuguaaauugaa

SEQ ID NO: 3420409 - RNA, 23 nt, Human
aauucaauuguaaauugaaucag

SEQ ID NO: 3420410 - RNA, 17 nt, Human
aauucaauuuggauuua

SEQ ID NO: 3420411 - RNA, 15 nt, Human
aauucaauuuuaaag

SEQ ID NO: 3420412 - RNA, 17 nt, Human
aauucacaaaguaauuu

SEQ ID NO: 3420413 - RNA, 15 nt, Human
aauucacaagcugcc

SEQ ID NO: 3420414 - RNA, 21 nt, Human
aauucacaucuaaccucaucu

SEQ ID NO: 3420415 - RNA, 22 nt, Human
aauucacaucuaaccucaucuu

SEQ ID NO: 3420416 - RNA, 21 nt, Human
aauucacaugaugcacuucaa

SEQ ID NO: 3420417 - RNA, 18 nt, Human
aauucaccacagacuuua

SEQ ID NO: 3420418 - RNA, 20 nt, Human
aauucacucaagcacugaua

SEQ ID NO: 3420419 - RNA, 23 nt, Human
aauucacucugaguguuuuauga

SEQ ID NO: 3420420 - RNA, 15 nt, Human
aauucacuuaggguc

SEQ ID NO: 3420421 - RNA, 23 nt, Human
aauucacuuagggucgagcaucc

SEQ ID NO: 3420422 - RNA, 16 nt, Human
aauucacuuucauuuu

SEQ ID NO: 3420423 - RNA, 16 nt, Human
aauucagacaucugag

SEQ ID NO: 3420424 - RNA, 20 nt, Human
aauucaggcauauuuuaacu

SEQ ID NO: 3420425 - RNA, 16 nt, Human
aauucaguauguuuua

SEQ ID NO: 3420426 - RNA, 23 nt, Human
aauucaguauguuuuacacugua

SEQ ID NO: 3420427 - RNA, 23 nt, Human
aauucagugaugugccuaaauaa

SEQ ID NO: 3420428 - RNA, 16 nt, Human
aauucagugcuguacu

SEQ ID NO: 3420429 - RNA, 17 nt, Human
aauucaguguauuucag

SEQ ID NO: 3420430 - RNA, 14 nt, Human
aauucaguuucaua

SEQ ID NO: 3420431 - RNA, 13 nt, Human
aauucauauucuu

SEQ ID NO: 3420432 - RNA, 16 nt, Human
aauucauauuuaugaa

SEQ ID NO: 3420433 - RNA, 17 nt, Human
aauucauucuggucucu

SEQ ID NO: 3420434 - RNA, 18 nt, Human
aauucauuuuuuaaauuc

SEQ ID NO: 3420435 - RNA, 14 nt, Human
aauuccaaaggaau

SEQ ID NO: 3420436 - RNA, 13 nt, Human
aauuccaaagucu

SEQ ID NO: 3420437 - RNA, 12 nt, Human
aauuccaaggag

SEQ ID NO: 3420438 - RNA, 16 nt, Human
aauuccaauaugauga

SEQ ID NO: 3420439 - RNA, 17 nt, Human
aauuccaauuauaugag

SEQ ID NO: 3420440 - RNA, 20 nt, Human
aauuccacaccuuuuauuga

SEQ ID NO: 3420441 - RNA, 13 nt, Human
aauuccacuggac

SEQ ID NO: 3420442 - RNA, 14 nt, Human
aauuccacugucaa

SEQ ID NO: 3420443 - RNA, 22 nt, Human
aauuccacugucaagaaagagc

SEQ ID NO: 3420444 - RNA, 20 nt, Human
aauuccagaaaggauauuua

SEQ ID NO: 3420445 - RNA, 14 nt, Human
aauuccagaaugaa

SEQ ID NO: 3420446 - RNA, 22 nt, Human
aauuccauauauccuuuucuuc

SEQ ID NO: 3420447 - RNA, 21 nt, Human
aauucccagcugucuguguca

SEQ ID NO: 3420448 - RNA, 19 nt, Human
aauucccauuuugcaaaau

SEQ ID NO: 3420449 - RNA, 22 nt, Human
aauucccauuuugcaaaauuuc

SEQ ID NO: 3420450 - RNA, 14 nt, Human
aauuccccacccug

SEQ ID NO: 3420451 - RNA, 16 nt, Human
aauucccucucucuga

SEQ ID NO: 3420452 - RNA, 13 nt, Human
aauucccugcugu

SEQ ID NO: 3420453 - RNA, 20 nt, Human
aauucccuggccuuucauau

SEQ ID NO: 3420454 - RNA, 14 nt, Human
aauucccuggggaa

SEQ ID NO: 3420455 - RNA, 15 nt, Human
aauuccuaaaauuau

SEQ ID NO: 3420456 - RNA, 21 nt, Human
aauuccuauauccugugacug

SEQ ID NO: 3420457 - RNA, 15 nt, Human
aauuccuauugugau

SEQ ID NO: 3420458 - RNA, 14 nt, Human
aauuccucugggaa

SEQ ID NO: 3420459 - RNA, 17 nt, Human
aauuccucuuugcuuug

SEQ ID NO: 3420460 - RNA, 18 nt, Human
aauuccucuuugcuuugc

SEQ ID NO: 3420461 - RNA, 19 nt, Human
aauuccucuuugcuuugcu

SEQ ID NO: 3420462 - RNA, 21 nt, Human
aauuccugguuugaagaaaua

SEQ ID NO: 3420463 - RNA, 17 nt, Human
aauuccuguagcaucuu

SEQ ID NO: 3420464 - RNA, 22 nt, Human
aauuccuguuuuuauuauuaac

SEQ ID NO: 3420465 - RNA, 13 nt, Human
aauuccuuagcuu

SEQ ID NO: 3420466 - RNA, 23 nt, Human
aauuccuuagcuuagaccucagc

SEQ ID NO: 3420467 - RNA, 21 nt, Human
aauuccuuggcaugccuucca

SEQ ID NO: 3420468 - RNA, 23 nt, Human
aauucgaaccaggaaauggaacc

SEQ ID NO: 3420469 - RNA, 18 nt, Human
aauucgcugcaaccuguu

SEQ ID NO: 3420470 - RNA, 13 nt, Human
aauucguguguuu

SEQ ID NO: 3420471 - RNA, 22 nt, Human
aauucguguguuuuuuuaugaa

SEQ ID NO: 3420472 - RNA, 18 nt, Human
aauucuaaauaaaauaua

SEQ ID NO: 3420473 - RNA, 19 nt, Human
aauucuaaaugaauguuua

SEQ ID NO: 3420474 - RNA, 15 nt, Human
aauucuaaucuaaca

SEQ ID NO: 3420475 - RNA, 23 nt, Human
aauucuaccaaggucuucuuaau

SEQ ID NO: 3420476 - RNA, 22 nt, Human
aauucuagcuuugagcuuaaga

SEQ ID NO: 3420477 - RNA, 12 nt, Human
aauucuagugcu

SEQ ID NO: 3420478 - RNA, 17 nt, Human
aauucuagugcugcuga

SEQ ID NO: 3420479 - RNA, 21 nt, Human
aauucuagugcugcugaagau

SEQ ID NO: 3420480 - RNA, 16 nt, Human
aauucuauaaggccau

SEQ ID NO: 3420481 - RNA, 15 nt, Human
aauucuauuaaagug

SEQ ID NO: 3420482 - RNA, 22 nt, Human
aauucucaaccuaccaccccuu

SEQ ID NO: 3420483 - RNA, 19 nt, Human
aauucucagaaucucaaau

SEQ ID NO: 3420484 - RNA, 18 nt, Human
aauucucauuaaaagaau

SEQ ID NO: 3420485 - RNA, 14 nt, Human
aauucuccacugug

SEQ ID NO: 3420486 - RNA, 14 nt, Human
aauucuccugccuc

SEQ ID NO: 3420487 - RNA, 15 nt, Human
aauucuccugccuca

SEQ ID NO: 3420488 - RNA, 13 nt, Human
aauucuccuggag

SEQ ID NO: 3420489 - RNA, 15 nt, Human
aauucuccuggaggu

SEQ ID NO: 3420490 - RNA, 21 nt, Human
aauucugaaguuauauuuccu

SEQ ID NO: 3420491 - RNA, 16 nt, Human
aauucugaauuugcaa

SEQ ID NO: 3420492 - RNA, 18 nt, Human
aauucugaauuugcaaag

SEQ ID NO: 3420493 - RNA, 15 nt, Human
aauucugauugauuu

SEQ ID NO: 3420494 - RNA, 11 nt, Human
aauucugauuu

SEQ ID NO: 3420495 - RNA, 13 nt, Human
aauucugauuucu

SEQ ID NO: 3420496 - RNA, 15 nt, Human
aauucugauuucuuu

SEQ ID NO: 3420497 - RNA, 16 nt, Human
aauucugauuucuuuu

SEQ ID NO: 3420498 - RNA, 15 nt, Human
acaucaauguucauu

SEQ ID NO: 3420499 - RNA, 15 nt, Human
acaucacaggguggg

SEQ ID NO: 3420500 - RNA, 18 nt, Human
acaucacagggugggccu

SEQ ID NO: 3420501 - RNA, 22 nt, Human
acaucaccgacgcgucuccugu

SEQ ID NO: 3420502 - RNA, 16 nt, Human
acaucacucugcugcu

SEQ ID NO: 3420503 - RNA, 19 nt, Human
acaucacucugcugcuuag

SEQ ID NO: 3420504 - RNA, 23 nt, Human
acaucacuggcauggugguuggg

SEQ ID NO: 3420505 - RNA, 16 nt, Human
acaucacuuguacaaa

SEQ ID NO: 3420506 - RNA, 11 nt, Human
acaucagaaag

SEQ ID NO: 3420507 - RNA, 20 nt, Human
acaucagaaauaauaaaaaa

SEQ ID NO: 3420508 - RNA, 15 nt, Human
acaucagcacgauuu

SEQ ID NO: 3420509 - RNA, 19 nt, Human
acaucagcacgauuucugu

SEQ ID NO: 3420510 - RNA, 20 nt, Human
acaucagcacgauuucuguu

SEQ ID NO: 3420511 - RNA, 14 nt, Human
acaucaggaguuca

SEQ ID NO: 3420512 - RNA, 15 nt, Human
acaucagguuuuucc

SEQ ID NO: 3420513 - RNA, 15 nt, Human
acaucaguaauguau

SEQ ID NO: 3420514 - RNA, 15 nt, Human
acaucaguuacucug

SEQ ID NO: 3420515 - RNA, 18 nt, Human
acaucaguuacucugaag

SEQ ID NO: 3420516 - RNA, 11 nt, Human
acaucaguucc

SEQ ID NO: 3420517 - RNA, 19 nt, Human
acaucaucaaggcacugcc

SEQ ID NO: 3420518 - RNA, 19 nt, Human
acaucaucuguaagcuguu

SEQ ID NO: 3420519 - RNA, 15 nt, Human
acaucaugaauuuua

SEQ ID NO: 3420520 - RNA, 21 nt, Human
acaucauuacuauaagaacuu

SEQ ID NO: 3420521 - RNA, 13 nt, Human
acaucauuccuuu

SEQ ID NO: 3420522 - RNA, 15 nt, Human
acaucauucuugaga

SEQ ID NO: 3420523 - RNA, 17 nt, Human
acaucauuuuguuuucc

SEQ ID NO: 3420524 - RNA, 21 nt, Human
acauccaaaauaguuaagaca

SEQ ID NO: 3420525 - RNA, 17 nt, Human
acauccaaagcagacag

SEQ ID NO: 3420526 - RNA, 18 nt, Human
acauccaaagcagacagc

SEQ ID NO: 3420527 - RNA, 13 nt, Human
acauccaaggaga

SEQ ID NO: 3420528 - RNA, 12 nt, Human
acauccacccca

SEQ ID NO: 3420529 - RNA, 19 nt, Human
acauccaggcaauggccua

SEQ ID NO: 3420530 - RNA, 19 nt, Human
acauccauaaagaagcaau

SEQ ID NO: 3420531 - RNA, 13 nt, Human
acauccauuccca

SEQ ID NO: 3420532 - RNA, 17 nt, Human
acauccauucccaagaa

SEQ ID NO: 3420533 - RNA, 20 nt, Human
acauccauucccaagaaaug

SEQ ID NO: 3420534 - RNA, 14 nt, Human
acaucccagcccaa

SEQ ID NO: 3420535 - RNA, 18 nt, Human
acaucccauguaacagaa

SEQ ID NO: 3420536 - RNA, 17 nt, Human
acauccccgcuggcugg

SEQ ID NO: 3420537 - RNA, 12 nt, Human
acauccccugcu

SEQ ID NO: 3420538 - RNA, 21 nt, Human
acaucccugggccugcugcug

SEQ ID NO: 3420539 - RNA, 20 nt, Human
acauccgccuuuuguauaca

SEQ ID NO: 3420540 - RNA, 22 nt, Human
acauccgcgugugccugugugc

SEQ ID NO: 3420541 - RNA, 18 nt, Human
acauccggggccagcucc

SEQ ID NO: 3420542 - RNA, 21 nt, Human
acauccuccacguucugcuca

SEQ ID NO: 3420543 - RNA, 13 nt, Human
acauccuggguaa

SEQ ID NO: 3420544 - RNA, 16 nt, Human
acauccuguauaagca

SEQ ID NO: 3420545 - RNA, 17 nt, Human
acauccuguauaagcac

SEQ ID NO: 3420546 - RNA, 16 nt, Human
acauccuguguuucua

SEQ ID NO: 3420547 - RNA, 23 nt, Human
acauccuguguuucuagggaaau

SEQ ID NO: 3420548 - RNA, 14 nt, Human
acauccuuccuucc

SEQ ID NO: 3420549 - RNA, 15 nt, Human
acauccuuccuuccc

SEQ ID NO: 3420550 - RNA, 15 nt, Human
acauccuuguggcac

SEQ ID NO: 3420551 - RNA, 20 nt, Human
acauccuuguggcacauuuu

SEQ ID NO: 3420552 - RNA, 19 nt, Human
acauccuuugcagggcagc

SEQ ID NO: 3420553 - RNA, 21 nt, Human
acauccuuugcagggcagccc

SEQ ID NO: 3420554 - RNA, 15 nt, Human
acaucggaaaaauaa

SEQ ID NO: 3420555 - RNA, 15 nt, Human
acaucuaagccugaa

SEQ ID NO: 3420556 - RNA, 18 nt, Human
acaucuaauaaguauaua

SEQ ID NO: 3420557 - RNA, 17 nt, Human
acaucuacaaaacauua

SEQ ID NO: 3420558 - RNA, 14 nt, Human
acaucuaugauaua

SEQ ID NO: 3420559 - RNA, 18 nt, Human
acaucuauuuuggauugu

SEQ ID NO: 3420560 - RNA, 22 nt, Human
acaucucagacccuuuagccaa

SEQ ID NO: 3420561 - RNA, 11 nt, Human
acaucucagag

SEQ ID NO: 3420562 - RNA, 24 nt, Human
acaucucaucaugucuauugucca

SEQ ID NO: 3420563 - RNA, 16 nt, Human
acaucucauccaucaa

SEQ ID NO: 3420564 - RNA, 15 nt, Human
acaucuccuuagaaa

SEQ ID NO: 3420565 - RNA, 12 nt, Human
acaucucucccc

SEQ ID NO: 3420566 - RNA, 21 nt, Human
acaucucuccccaacccuagg

SEQ ID NO: 3420567 - RNA, 23 nt, Human
acaucucuuccuccgaggccagu

SEQ ID NO: 3420568 - RNA, 14 nt, Human
acaucucuuugaau

SEQ ID NO: 3420569 - RNA, 17 nt, Human
acaucucuuugaauuuu

SEQ ID NO: 3420570 - RNA, 20 nt, Human
acaucucuuugaugucauau

SEQ ID NO: 3420571 - RNA, 18 nt, Human
acaucugaccuggcaucu

SEQ ID NO: 3420572 - RNA, 12 nt, Human
acaucugccuua

SEQ ID NO: 3420573 - RNA, 23 nt, Human
acaucugccuuaaaaccaaagag

SEQ ID NO: 3420574 - RNA, 18 nt, Human
acaucuggcuuauuuuaa

SEQ ID NO: 3420575 - RNA, 19 nt, Human
acaucuggcuuauuuuaau

SEQ ID NO: 3420576 - RNA, 20 nt, Human
acaucuggcuuauuuuaaug

SEQ ID NO: 3420577 - RNA, 15 nt, Human
acaucuguccuguga

SEQ ID NO: 3420578 - RNA, 13 nt, Human
acaucuucaaagc

SEQ ID NO: 3420579 - RNA, 23 nt, Human
acaucuugaucugcucagcccug

SEQ ID NO: 3420580 - RNA, 19 nt, Human
acaucuugcucugcugaca

SEQ ID NO: 3420581 - RNA, 21 nt, Human
acaucuugcucugcugacaga

SEQ ID NO: 3420582 - RNA, 13 nt, Human
acaucuuggcaca

SEQ ID NO: 3420583 - RNA, 14 nt, Human
acaucuuggcaggg

SEQ ID NO: 3420584 - RNA, 19 nt, Human
acaucuuggucagauuuga

SEQ ID NO: 3420585 - RNA, 20 nt, Human
acaucuuuaaggggaggaac

SEQ ID NO: 3420586 - RNA, 13 nt, Human
acaucuuuauccg

SEQ ID NO: 3420587 - RNA, 18 nt, Human
acaucuuuauugaaauuc

SEQ ID NO: 3420588 - RNA, 19 nt, Human
acaucuuuauugaaauucu

SEQ ID NO: 3420589 - RNA, 20 nt, Human
acaucuuucacacuuccacc

SEQ ID NO: 3420590 - RNA, 15 nt, Human
acaucuuucacauug

SEQ ID NO: 3420591 - RNA, 18 nt, Human
acaucuuuuaagacaaau

SEQ ID NO: 3420592 - RNA, 20 nt, Human
acaucuuuuacauucugcaa

SEQ ID NO: 3420593 - RNA, 18 nt, Human
acaucuuuuuaaagcuua

SEQ ID NO: 3420594 - RNA, 22 nt, Human
acaucuuuuuaaagcuuaucca

SEQ ID NO: 3420595 - RNA, 19 nt, Human
acaucuuuuuucacaaauu

SEQ ID NO: 3420596 - RNA, 23 nt, Human
acaugaaaaaaggacaauuucaa

SEQ ID NO: 3420597 - RNA, 16 nt, Human
acaugaaaacacauuu

SEQ ID NO: 3420598 - RNA, 18 nt, Human
acaugaaaacacauuuuu

SEQ ID NO: 3420599 - RNA, 22 nt, Human
acaugaaaacacauuuuucuua

SEQ ID NO: 3420600 - RNA, 23 nt, Human
acaugaaaacacauuuuucuuag

SEQ ID NO: 3420601 - RNA, 18 nt, Human
acaugaaaccuacacacu

SEQ ID NO: 3420602 - RNA, 17 nt, Human
acaugaaaggacccugu

SEQ ID NO: 3420603 - RNA, 13 nt, Human
acaugaaaugaua

SEQ ID NO: 3420604 - RNA, 18 nt, Human
acaugaaauuuuuguaaa

SEQ ID NO: 3420605 - RNA, 19 nt, Human
acaugaaauuuuuguaaau

SEQ ID NO: 3420606 - RNA, 19 nt, Human
acaugaacuuagauuuuac

SEQ ID NO: 3420607 - RNA, 13 nt, Human
acaugaagaagcu

SEQ ID NO: 3420608 - RNA, 20 nt, Human
acaugaagaccuuuuucugc

SEQ ID NO: 3420609 - RNA, 13 nt, Human
acaugaagcuguu

SEQ ID NO: 3420610 - RNA, 16 nt, Human
acaugaagcuucaugc

SEQ ID NO: 3420611 - RNA, 15 nt, Human
acaugaagguaaaua

SEQ ID NO: 3420612 - RNA, 21 nt, Human
acaugaagguaaauaaaaaga

SEQ ID NO: 3420613 - RNA, 22 nt, Human
acaugaagguaaauaaaaagaa

SEQ ID NO: 3420614 - RNA, 15 nt, Human
acaugaauacaaauu

SEQ ID NO: 3420615 - RNA, 20 nt, Human
acaugaauauuuaguguuca

SEQ ID NO: 3420616 - RNA, 15 nt, Human
acaugaaugcacacu

SEQ ID NO: 3420617 - RNA, 19 nt, Human
acaugaauuauuacagugu

SEQ ID NO: 3420618 - RNA, 18 nt, Human
acaugaauugcauuuuac

SEQ ID NO: 3420619 - RNA, 14 nt, Human
acaugacacagcuu

SEQ ID NO: 3420620 - RNA, 14 nt, Human
acaugacacugacc

SEQ ID NO: 3420621 - RNA, 15 nt, Human
acaugacacugaccu

SEQ ID NO: 3420622 - RNA, 16 nt, Human
acaugacacugaccuu

SEQ ID NO: 3420623 - RNA, 18 nt, Human
acaugacauuuaccagca

SEQ ID NO: 3420624 - RNA, 13 nt, Human
acaugagaacaga

SEQ ID NO: 3420625 - RNA, 13 nt, Human
acaugagcaucag

SEQ ID NO: 3420626 - RNA, 22 nt, Human
acaugagcuauuuccauuccag

SEQ ID NO: 3420627 - RNA, 17 nt, Human
acaugaggaacuguaga

SEQ ID NO: 3420628 - RNA, 18 nt, Human
acaugaggaacuguagau

SEQ ID NO: 3420629 - RNA, 21 nt, Human
acaugaggacucuauucuuua

SEQ ID NO: 3420630 - RNA, 22 nt, Human
acaugaggacucuauucuuuaa

SEQ ID NO: 3420631 - RNA, 23 nt, Human
acaugagguacugagagugaaca

SEQ ID NO: 3420632 - RNA, 13 nt, Human
acaugagucccag

SEQ ID NO: 3420633 - RNA, 18 nt, Human
acaugagucccaguggga

SEQ ID NO: 3420634 - RNA, 19 nt, Human
acaugauccugcaauucca

SEQ ID NO: 3420635 - RNA, 20 nt, Human
acaugaucuguuuuucacca

SEQ ID NO: 3420636 - RNA, 15 nt, Human
acaugaucuucuuua

SEQ ID NO: 3420637 - RNA, 17 nt, Human
acaugaucuucuuuaua

SEQ ID NO: 3420638 - RNA, 19 nt, Human
acaugauuccagccaucac

SEQ ID NO: 3420639 - RNA, 14 nt, Human
acaugauuccuucc

SEQ ID NO: 3420640 - RNA, 15 nt, Human
acaugauuccuuccu

SEQ ID NO: 3420641 - RNA, 22 nt, Human
acaugauuccuuccuguucuga

SEQ ID NO: 3420642 - RNA, 13 nt, Human
acauuaacaggca

SEQ ID NO: 3420643 - RNA, 11 nt, Human
acauuaacagu

SEQ ID NO: 3420644 - RNA, 12 nt, Human
acauuaacaguu

SEQ ID NO: 3420645 - RNA, 18 nt, Human
acauuaacaguuuuccau

SEQ ID NO: 3420646 - RNA, 20 nt, Human
acauuaacaguuuuccauga

SEQ ID NO: 3420647 - RNA, 14 nt, Human
acauuaagaaaauc

SEQ ID NO: 3420648 - RNA, 20 nt, Human
acauuaagauugaggccugc

SEQ ID NO: 3420649 - RNA, 19 nt, Human
acauuaagcaucacaaaug

SEQ ID NO: 3420650 - RNA, 17 nt, Human
acauuaagccuuccaca

SEQ ID NO: 3420651 - RNA, 22 nt, Human
acauuaauguuaauucagcacu

SEQ ID NO: 3420652 - RNA, 22 nt, Human
acauuaauguugauuucuaguu

SEQ ID NO: 3420653 - RNA, 23 nt, Human
acauuaauguugauuucuaguua

SEQ ID NO: 3420654 - RNA, 16 nt, Human
acauuaccuuacugug

SEQ ID NO: 3420655 - RNA, 19 nt, Human
acauuaccuuacuguggag

SEQ ID NO: 3420656 - RNA, 15 nt, Human
acauuacugaaaacu

SEQ ID NO: 3420657 - RNA, 14 nt, Human
acauuagaagacaa

SEQ ID NO: 3420658 - RNA, 20 nt, Human
acauuagaagacaauugaca

SEQ ID NO: 3420659 - RNA, 18 nt, Human
acauuagcaguuugcuuu

SEQ ID NO: 3420660 - RNA, 19 nt, Human
acauuaggaaaaguugcua

SEQ ID NO: 3420661 - RNA, 16 nt, Human
acauuaguaaaugucu

SEQ ID NO: 3420662 - RNA, 21 nt, Human
acauuaguaaaugucuuugua

SEQ ID NO: 3420663 - RNA, 23 nt, Human
acauuaguaaaugucuuuguaag

SEQ ID NO: 3420664 - RNA, 24 nt, Human
acauuaguaaaugucuuuguaagu

SEQ ID NO: 3420665 - RNA, 23 nt, Human
acauuaguacuuuauagaagaau

SEQ ID NO: 3420666 - RNA, 18 nt, Human
acauuaguucuauuucua

SEQ ID NO: 3420667 - RNA, 19 nt, Human
acauuaguucuauuucuau

SEQ ID NO: 3420668 - RNA, 11 nt, Human
acauuauaaac

SEQ ID NO: 3420669 - RNA, 12 nt, Human
aauucuguuucu

SEQ ID NO: 3420670 - RNA, 21 nt, Human
aauucuguuuuagguuaaaaa

SEQ ID NO: 3420671 - RNA, 19 nt, Human
aauucuguuuuuaaugcua

SEQ ID NO: 3420672 - RNA, 13 nt, Human
aauucuuacaugu

SEQ ID NO: 3420673 - RNA, 19 nt, Human
aauucuuaugccauauaau

SEQ ID NO: 3420674 - RNA, 15 nt, Human
aauucuuaugcuuau

SEQ ID NO: 3420675 - RNA, 19 nt, Human
aauucuuauuccauauuag

SEQ ID NO: 3420676 - RNA, 12 nt, Human
aauucuuauuuu

SEQ ID NO: 3420677 - RNA, 13 nt, Human
aauucuuauuuug

SEQ ID NO: 3420678 - RNA, 19 nt, Human
aauucuuauuuuuuaaaaa

SEQ ID NO: 3420679 - RNA, 22 nt, Human
aauucuucaccuaagucucugu

SEQ ID NO: 3420680 - RNA, 11 nt, Human
aauucuucagu

SEQ ID NO: 3420681 - RNA, 20 nt, Human
aauucuucaguugguugugu

SEQ ID NO: 3420682 - RNA, 22 nt, Human
aauucuucuccacuuucuagcc

SEQ ID NO: 3420683 - RNA, 13 nt, Human
aauucuucugaac

SEQ ID NO: 3420684 - RNA, 18 nt, Human
aauucuucugaacucaaa

SEQ ID NO: 3420685 - RNA, 23 nt, Human
aauucuucugaacucaaacugag

SEQ ID NO: 3420686 - RNA, 21 nt, Human
aauucuugaaggaaaaugaua

SEQ ID NO: 3420687 - RNA, 13 nt, Human
aauucuugcauau

SEQ ID NO: 3420688 - RNA, 19 nt, Human
aauucuugguugaggaaac

SEQ ID NO: 3420689 - RNA, 20 nt, Human
aauucuugguugaggaaaca

SEQ ID NO: 3420690 - RNA, 14 nt, Human
aauucuuguauauu

SEQ ID NO: 3420691 - RNA, 16 nt, Human
aauucuuguauauuau

SEQ ID NO: 3420692 - RNA, 22 nt, Human
aauucuuuaaaauuacaacuaa

SEQ ID NO: 3420693 - RNA, 19 nt, Human
aauucuuuaaugauuccua

SEQ ID NO: 3420694 - RNA, 13 nt, Human
aauucuuuauaca

SEQ ID NO: 3420695 - RNA, 16 nt, Human
aauucuuuauuucugu

SEQ ID NO: 3420696 - RNA, 20 nt, Human
aauucuuuauuucugucauu

SEQ ID NO: 3420697 - RNA, 13 nt, Human
aauucuuucaagu

SEQ ID NO: 3420698 - RNA, 22 nt, Human
aauucuuugaccuguugggagu

SEQ ID NO: 3420699 - RNA, 18 nt, Human
aauucuuugcaaaaaucc

SEQ ID NO: 3420700 - RNA, 17 nt, Human
aauucuuuugaauuguu

SEQ ID NO: 3420701 - RNA, 18 nt, Human
aauucuuuuuuaaauuuu

SEQ ID NO: 3420702 - RNA, 22 nt, Human
aauucuuuuuuauuaaucacug

SEQ ID NO: 3420703 - RNA, 22 nt, Human
aauugaaaggcauucucugaag

SEQ ID NO: 3420704 - RNA, 13 nt, Human
aauugaaauguaa

SEQ ID NO: 3420705 - RNA, 16 nt, Human
aauugaaauguaaggc

SEQ ID NO: 3420706 - RNA, 24 nt, Human
aauugaaauguaaggcuguguaag

SEQ ID NO: 3420707 - RNA, 23 nt, Human
aauugaagagagauauaucugaa

SEQ ID NO: 3420708 - RNA, 13 nt, Human
aauugaaggaaag

SEQ ID NO: 3420709 - RNA, 22 nt, Human
aauugaaguguauaauauaaaa

SEQ ID NO: 3420710 - RNA, 20 nt, Human
aauugaaguuucaaguuuua

SEQ ID NO: 3420711 - RNA, 14 nt, Human
aauugaauaauggu

SEQ ID NO: 3420712 - RNA, 16 nt, Human
aauugaauacuuugaa

SEQ ID NO: 3420713 - RNA, 15 nt, Human
aauugaauauuauuc

SEQ ID NO: 3420714 - RNA, 19 nt, Human
aauugaauggucagcguug

SEQ ID NO: 3420715 - RNA, 21 nt, Human
aauugaauuuaacaaugcgaa

SEQ ID NO: 3420716 - RNA, 21 nt, Human
aauugacagaucaagcuguga

SEQ ID NO: 3420717 - RNA, 13 nt, Human
aauugacccacaa

SEQ ID NO: 3420718 - RNA, 22 nt, Human
aauugacccacaagaaaugaaa

SEQ ID NO: 3420719 - RNA, 14 nt, Human
aauugacugucacu

SEQ ID NO: 3420720 - RNA, 14 nt, Human
aauugacuuauuua

SEQ ID NO: 3420721 - RNA, 23 nt, Human
aauugagaaaaauauauacuaaa

SEQ ID NO: 3420722 - RNA, 15 nt, Human
aauugagaaggaaaa

SEQ ID NO: 3420723 - RNA, 15 nt, Human
aauugagauuagagg

SEQ ID NO: 3420724 - RNA, 18 nt, Human
aauugaggacacugauau

SEQ ID NO: 3420725 - RNA, 19 nt, Human
aauugaggacuauggaaau

SEQ ID NO: 3420726 - RNA, 17 nt, Human
aauugaggggauuaaua

SEQ ID NO: 3420727 - RNA, 18 nt, Human
aauugaguugcacuuauu

SEQ ID NO: 3420728 - RNA, 17 nt, Human
aauugaguuuucagugg

SEQ ID NO: 3420729 - RNA, 21 nt, Human
aauugaucauagguauuucaa

SEQ ID NO: 3420730 - RNA, 17 nt, Human
aauugaucgacuugcca

SEQ ID NO: 3420731 - RNA, 14 nt, Human
aauugauguugaug

SEQ ID NO: 3420732 - RNA, 16 nt, Human
aauugauguugaugca

SEQ ID NO: 3420733 - RNA, 14 nt, Human
aauugauuauucug

SEQ ID NO: 3420734 - RNA, 22 nt, Human
aauugauuauucugauuccacu

SEQ ID NO: 3420735 - RNA, 23 nt, Human
aauugauuauucugauuccacuu

SEQ ID NO: 3420736 - RNA, 19 nt, Human
aauugauugggcacaucau

SEQ ID NO: 3420737 - RNA, 15 nt, Human
aauugauuucaagac

SEQ ID NO: 3420738 - RNA, 19 nt, Human
aauugauuucccuucuucu

SEQ ID NO: 3420739 - RNA, 22 nt, Human
aauugauuucuuuucuuccugg

SEQ ID NO: 3420740 - RNA, 14 nt, Human
aauugauuugcauu

SEQ ID NO: 3420741 - RNA, 22 nt, Human
aauugauuugcauugaacacaa

SEQ ID NO: 3420742 - RNA, 23 nt, Human
aauugauuugcauugaacacaaa

SEQ ID NO: 3420743 - RNA, 21 nt, Human
aauugcacaauauugaacuuu

SEQ ID NO: 3420744 - RNA, 18 nt, Human
aauugcacagaaguccug

SEQ ID NO: 3420745 - RNA, 15 nt, Human
aauugcacucuaaaa

SEQ ID NO: 3420746 - RNA, 14 nt, Human
aauugcacuuuuaa

SEQ ID NO: 3420747 - RNA, 14 nt, Human
aauugcagaacuaa

SEQ ID NO: 3420748 - RNA, 13 nt, Human
aauugcagacugu

SEQ ID NO: 3420749 - RNA, 16 nt, Human
aauugcaugcugcuuu

SEQ ID NO: 3420750 - RNA, 17 nt, Human
aauugcaugcugcuuua

SEQ ID NO: 3420751 - RNA, 21 nt, Human
aauugcaugcugcuuuaauug

SEQ ID NO: 3420752 - RNA, 22 nt, Human
aauugcauggguuuuguaggua

SEQ ID NO: 3420753 - RNA, 21 nt, Human
aauugcauugacuuuccccac

SEQ ID NO: 3420754 - RNA, 23 nt, Human
aauugcauugacuuuccccacca

SEQ ID NO: 3420755 - RNA, 20 nt, Human
aauugcauuuuuuaaaacaa

SEQ ID NO: 3420756 - RNA, 14 nt, Human
aauugccaaagcug

SEQ ID NO: 3420757 - RNA, 16 nt, Human
aauugccauauugcac

SEQ ID NO: 3420758 - RNA, 23 nt, Human
aauugccugacgaacuccuugau

SEQ ID NO: 3420759 - RNA, 19 nt, Human
aauugccuuucuguguuua

SEQ ID NO: 3420760 - RNA, 14 nt, Human
aauugcucaaguuc

SEQ ID NO: 3420761 - RNA, 22 nt, Human
aauugcucacaguuauuacaua

SEQ ID NO: 3420762 - RNA, 20 nt, Human
aauugcuccuaagcuucaaa

SEQ ID NO: 3420763 - RNA, 12 nt, Human
aauugcuccuug

SEQ ID NO: 3420764 - RNA, 21 nt, Human
aauugcugaagggcauucuuu

SEQ ID NO: 3420765 - RNA, 19 nt, Human
aauugcugacuguagcuuu

SEQ ID NO: 3420766 - RNA, 12 nt, Human
aauugcugugcc

SEQ ID NO: 3420767 - RNA, 22 nt, Human
aauugcugugccucccaaaauu

SEQ ID NO: 3420768 - RNA, 13 nt, Human
aauugcuguguau

SEQ ID NO: 3420769 - RNA, 16 nt, Human
aauugcuguugaaagc

SEQ ID NO: 3420770 - RNA, 18 nt, Human
aauugcuguugaaagcaa

SEQ ID NO: 3420771 - RNA, 20 nt, Human
aauugcuuacauuuuuacaa

SEQ ID NO: 3420772 - RNA, 21 nt, Human
aauugcuuacauuuuuacaau

SEQ ID NO: 3420773 - RNA, 17 nt, Human
aauugcuugaaagaaaa

SEQ ID NO: 3420774 - RNA, 16 nt, Human
aauugcuuguuugcuu

SEQ ID NO: 3420775 - RNA, 11 nt, Human
aauugcuuuga

SEQ ID NO: 3420776 - RNA, 19 nt, Human
aauuggaaaagacuaagau

SEQ ID NO: 3420777 - RNA, 16 nt, Human
aauuggaacaaaguga

SEQ ID NO: 3420778 - RNA, 17 nt, Human
aauuggaacaaagugaa

SEQ ID NO: 3420779 - RNA, 18 nt, Human
aauuggaaugcacucaga

SEQ ID NO: 3420780 - RNA, 23 nt, Human
aauuggacagauugccuguuucu

SEQ ID NO: 3420781 - RNA, 19 nt, Human
aauuggacuuucaaaauua

SEQ ID NO: 3420782 - RNA, 15 nt, Human
aauuggagcucgugg

SEQ ID NO: 3420783 - RNA, 16 nt, Human
aauuggcauuaaaacu

SEQ ID NO: 3420784 - RNA, 21 nt, Human
aauuggguggggggcuucaua

SEQ ID NO: 3420785 - RNA, 22 nt, Human
accagggccagaaguagcuuug

SEQ ID NO: 3420786 - RNA, 19 nt, Human
accagggccugagccaagc

SEQ ID NO: 3420787 - RNA, 16 nt, Human
accagggccuuuucug

SEQ ID NO: 3420788 - RNA, 23 nt, Human
accagggccuuuucuggcaccgc

SEQ ID NO: 3420789 - RNA, 17 nt, Human
accaggggcaggcacag

SEQ ID NO: 3420790 - RNA, 20 nt, Human
accaggggcaggcacagcac

SEQ ID NO: 3420791 - RNA, 21 nt, Human
accaggguuggcaccuucccc

SEQ ID NO: 3420792 - RNA, 19 nt, Human
accagguccaaugagcuuu

SEQ ID NO: 3420793 - RNA, 19 nt, Human
accaggucuccuccaccgc

SEQ ID NO: 3420794 - RNA, 20 nt, Human
accaggucuccuccaccgcc

SEQ ID NO: 3420795 - RNA, 13 nt, Human
accaggugccuuu

SEQ ID NO: 3420796 - RNA, 23 nt, Human
accaggugccuuucaaauuuaga

SEQ ID NO: 3420797 - RNA, 19 nt, Human
accagguguucuacacuca

SEQ ID NO: 3420798 - RNA, 14 nt, Human
accagguugaaaga

SEQ ID NO: 3420799 - RNA, 15 nt, Human
accaguaaaguguaa

SEQ ID NO: 3420800 - RNA, 18 nt, Human
accaguacauucucaguu

SEQ ID NO: 3420801 - RNA, 16 nt, Human
accaguauaaaauuac

SEQ ID NO: 3420802 - RNA, 14 nt, Human
accaguauuguaca

SEQ ID NO: 3420803 - RNA, 11 nt, Human
accaguauuua

SEQ ID NO: 3420804 - RNA, 18 nt, Human
accaguauuuagaagcca

SEQ ID NO: 3420805 - RNA, 19 nt, Human
accaguauuuagaagccaa

SEQ ID NO: 3420806 - RNA, 19 nt, Human
accagucaucagcuauuca

SEQ ID NO: 3420807 - RNA, 15 nt, Human
accagucauuuuuca

SEQ ID NO: 3420808 - RNA, 15 nt, Human
accagucccagagca

SEQ ID NO: 3420809 - RNA, 14 nt, Human
accagucugaaguu

SEQ ID NO: 3420810 - RNA, 19 nt, Human
accagucugaaguuucauu

SEQ ID NO: 3420811 - RNA, 21 nt, Human
accagucugaaguuucauuua

SEQ ID NO: 3420812 - RNA, 19 nt, Human
accagucuuuaaaggccca

SEQ ID NO: 3420813 - RNA, 20 nt, Human
accagucuuuaaaggcccag

SEQ ID NO: 3420814 - RNA, 22 nt, Human
accagucuuuaaaggcccagcc

SEQ ID NO: 3420815 - RNA, 18 nt, Human
accagugaaccaaagaga

SEQ ID NO: 3420816 - RNA, 19 nt, Human
accagugaauuuuugcaau

SEQ ID NO: 3420817 - RNA, 17 nt, Human
accagugcaacagcacu

SEQ ID NO: 3420818 - RNA, 20 nt, Human
accagugcaggcuggccagc

SEQ ID NO: 3420819 - RNA, 23 nt, Human
accagugccucucccugcugcuc

SEQ ID NO: 3420820 - RNA, 21 nt, Human
accaguguagccuugcccgga

SEQ ID NO: 3420821 - RNA, 18 nt, Human
accaguguuguggauuua

SEQ ID NO: 3420822 - RNA, 17 nt, Human
accaguuaugugaauga

SEQ ID NO: 3420823 - RNA, 15 nt, Human
accaguucugggcaa

SEQ ID NO: 3420824 - RNA, 21 nt, Human
accaguugcacuuggccucug

SEQ ID NO: 3420825 - RNA, 21 nt, Human
accaguugcagucacucuagu

SEQ ID NO: 3420826 - RNA, 13 nt, Human
accaguugccuuu

SEQ ID NO: 3420827 - RNA, 14 nt, Human
accaguugccuuuu

SEQ ID NO: 3420828 - RNA, 15 nt, Human
accaguugccuuuua

SEQ ID NO: 3420829 - RNA, 20 nt, Human
accaguuuaaccugaugcag

SEQ ID NO: 3420830 - RNA, 21 nt, Human
accaguuuaaccugaugcagu

SEQ ID NO: 3420831 - RNA, 13 nt, Human
accauaacccagg

SEQ ID NO: 3420832 - RNA, 18 nt, Human
accauaagcuacugccau

SEQ ID NO: 3420833 - RNA, 16 nt, Human
accauaccuuccuucc

SEQ ID NO: 3420834 - RNA, 13 nt, Human
accauacuaauua

SEQ ID NO: 3420835 - RNA, 23 nt, Human
accauaguaccauuuauacaaau

SEQ ID NO: 3420836 - RNA, 14 nt, Human
accauauagcaaaa

SEQ ID NO: 3420837 - RNA, 12 nt, Human
accauaugaauu

SEQ ID NO: 3420838 - RNA, 19 nt, Human
accauaugcccacauuuag

SEQ ID NO: 3420839 - RNA, 20 nt, Human
accauauuaccacagacaua

SEQ ID NO: 3420840 - RNA, 13 nt, Human
accauauuuagca

SEQ ID NO: 3420841 - RNA, 20 nt, Human
accauauuuauccauuugua

SEQ ID NO: 3420842 - RNA, 14 nt, Human
accaucaagccacc

SEQ ID NO: 3420843 - RNA, 15 nt, Human
accaucaagccacca

SEQ ID NO: 3420844 - RNA, 15 nt, Human
accaucacagcuugu

SEQ ID NO: 3420845 - RNA, 16 nt, Human
accaucacagcuuguu

SEQ ID NO: 3420846 - RNA, 17 nt, Human
accaucaugucuggcua

SEQ ID NO: 3420847 - RNA, 23 nt, Human
accaucauugaaaucuuuuugcu

SEQ ID NO: 3420848 - RNA, 15 nt, Human
accauccaccaggcc

SEQ ID NO: 3420849 - RNA, 12 nt, Human
accauccccucc

SEQ ID NO: 3420850 - RNA, 21 nt, Human
accaucccugaaggccccgcc

SEQ ID NO: 3420851 - RNA, 19 nt, Human
accaucccuuuuugaagug

SEQ ID NO: 3420852 - RNA, 13 nt, Human
accauccuggcug

SEQ ID NO: 3420853 - RNA, 13 nt, Human
accaucucaggcc

SEQ ID NO: 3420854 - RNA, 15 nt, Human
accaucucaggccac

SEQ ID NO: 3420855 - RNA, 14 nt, Human
accaucucuuuacc

SEQ ID NO: 3420856 - RNA, 13 nt, Human
accaucugcuguc

SEQ ID NO: 3420857 - RNA, 14 nt, Human
accaucugcugucu

SEQ ID NO: 3420858 - RNA, 16 nt, Human
accaucuggccuggcc

SEQ ID NO: 3420859 - RNA, 23 nt, Human
accaugaagucucuaacaaugua

SEQ ID NO: 3420860 - RNA, 17 nt, Human
accaugacgcaaagaga

SEQ ID NO: 3420861 - RNA, 20 nt, Human
accaugagaagagggccugu

SEQ ID NO: 3420862 - RNA, 22 nt, Human
accaugaguggcauggccacca

SEQ ID NO: 3420863 - RNA, 17 nt, Human
aauuuuguaauuuucuu

SEQ ID NO: 3420864 - RNA, 13 nt, Human
aauuuuguacaaa

SEQ ID NO: 3420865 - RNA, 14 nt, Human
aauuuuguacaaau

SEQ ID NO: 3420866 - RNA, 16 nt, Human
aauuuuguaugaaaaa

SEQ ID NO: 3420867 - RNA, 16 nt, Human
aauuuuguauguuaaa

SEQ ID NO: 3420868 - RNA, 16 nt, Human
aauuuuguauuuucca

SEQ ID NO: 3420869 - RNA, 22 nt, Human
aauuuugucugccccaaguuuu

SEQ ID NO: 3420870 - RNA, 13 nt, Human
aauuuugugaagc

SEQ ID NO: 3420871 - RNA, 18 nt, Human
aauuuugugaagcaaaau

SEQ ID NO: 3420872 - RNA, 14 nt, Human
aauuuuguguaaga

SEQ ID NO: 3420873 - RNA, 22 nt, Human
aauuuuguguaagaaauacaga

SEQ ID NO: 3420874 - RNA, 20 nt, Human
aauuuuguucuaguuuucag

SEQ ID NO: 3420875 - RNA, 14 nt, Human
aauuuuguuucugu

SEQ ID NO: 3420876 - RNA, 16 nt, Human
aauuuuguuucuguac

SEQ ID NO: 3420877 - RNA, 19 nt, Human
aauuuuguuuucuugauuu

SEQ ID NO: 3420878 - RNA, 12 nt, Human
aauuuuuaaaaa

SEQ ID NO: 3420879 - RNA, 13 nt, Human
aauuuuuaaagua

SEQ ID NO: 3420880 - RNA, 20 nt, Human
aauuuuuaaaguauauauuu

SEQ ID NO: 3420881 - RNA, 14 nt, Human
aauuuuuaagagaa

SEQ ID NO: 3420882 - RNA, 17 nt, Human
aauuuuuaagcugcaaa

SEQ ID NO: 3420883 - RNA, 14 nt, Human
aauuuuuacagaau

SEQ ID NO: 3420884 - RNA, 20 nt, Human
aauuuuuacccuaaugucuu

SEQ ID NO: 3420885 - RNA, 16 nt, Human
aauuuuuaggaaguuu

SEQ ID NO: 3420886 - RNA, 13 nt, Human
aauuuuuaugugu

SEQ ID NO: 3420887 - RNA, 14 nt, Human
aauuuuuauuucuu

SEQ ID NO: 3420888 - RNA, 18 nt, Human
aauuuuuauuuucacccu

SEQ ID NO: 3420889 - RNA, 16 nt, Human
aauuuuuauuuuucua

SEQ ID NO: 3420890 - RNA, 19 nt, Human
aauuuuucagaugcuucug

SEQ ID NO: 3420891 - RNA, 21 nt, Human
aauuuuucagcucucuguaua

SEQ ID NO: 3420892 - RNA, 13 nt, Human
aauuuuucauauu

SEQ ID NO: 3420893 - RNA, 20 nt, Human
aauuuuucauugauaugaaa

SEQ ID NO: 3420894 - RNA, 14 nt, Human
aauuuuuccaacua

SEQ ID NO: 3420895 - RNA, 12 nt, Human
aauuuuucugca

SEQ ID NO: 3420896 - RNA, 16 nt, Human
aauuuuucugcacuga

SEQ ID NO: 3420897 - RNA, 23 nt, Human
aauuuuucugcacugagcagagu

SEQ ID NO: 3420898 - RNA, 12 nt, Human
aauuuuucugua

SEQ ID NO: 3420899 - RNA, 13 nt, Human
aauuuuucuguau

SEQ ID NO: 3420900 - RNA, 21 nt, Human
aauuuuucuguauagacagga

SEQ ID NO: 3420901 - RNA, 21 nt, Human
aauuuuucuuauuucauuucu

SEQ ID NO: 3420902 - RNA, 13 nt, Human
aauuuuucuucuu

SEQ ID NO: 3420903 - RNA, 13 nt, Human
aauuuuugauacu

SEQ ID NO: 3420904 - RNA, 17 nt, Human
aauuuuugccuucauua

SEQ ID NO: 3420905 - RNA, 23 nt, Human
aauuuuuggauugacaguaacuu

SEQ ID NO: 3420906 - RNA, 16 nt, Human
aauuuuugguugaaua

SEQ ID NO: 3420907 - RNA, 14 nt, Human
aauuuuuguaauuu

SEQ ID NO: 3420908 - RNA, 13 nt, Human
aauuuuuguagua

SEQ ID NO: 3420909 - RNA, 17 nt, Human
aauuuuuuauucuugug

SEQ ID NO: 3420910 - RNA, 16 nt, Human
aauuuuuugguacaaa

SEQ ID NO: 3420911 - RNA, 19 nt, Human
aauuuuuuguucuucagag

SEQ ID NO: 3420912 - RNA, 20 nt, Human
aauuuuuuguucuucagaga

SEQ ID NO: 3420913 - RNA, 20 nt, Human
aauuuuuuuaaccaaaggug

SEQ ID NO: 3420914 - RNA, 18 nt, Human
aauuuuuuuaauuuugua

SEQ ID NO: 3420915 - RNA, 20 nt, Human
aauuuuuuuagaaagcauuu

SEQ ID NO: 3420916 - RNA, 22 nt, Human
aauuuuuuuaucgucacugcuu

SEQ ID NO: 3420917 - RNA, 15 nt, Human
aauuuuuuuauuacu

SEQ ID NO: 3420918 - RNA, 16 nt, Human
aauuuuuuuauuguuu

SEQ ID NO: 3420919 - RNA, 19 nt, Human
aauuuuuuuauuguuuaaa

SEQ ID NO: 3420920 - RNA, 19 nt, Human
aauuuuuuucaauauuuau

SEQ ID NO: 3420921 - RNA, 16 nt, Human
aauuuuuuuguaauaa

SEQ ID NO: 3420922 - RNA, 12 nt, Human
aauuuuuuuuac

SEQ ID NO: 3420923 - RNA, 16 nt, Human
aauuuuuuuuacauuu

SEQ ID NO: 3420924 - RNA, 15 nt, Human
aauuuuuuuuaguau

SEQ ID NO: 3420925 - RNA, 20 nt, Human
aauuuuuuuuaguauuuauu

SEQ ID NO: 3420926 - RNA, 13 nt, Human
aauuuuuuuucau

SEQ ID NO: 3420927 - RNA, 23 nt, Human
aauuuuuuuucauguuuuaacaa

SEQ ID NO: 3420928 - RNA, 17 nt, Human
acaaaaaaaaaguuuua

SEQ ID NO: 3420929 - RNA, 22 nt, Human
acaaaaaaaaaguuuuauuuuu

SEQ ID NO: 3420930 - RNA, 17 nt, Human
acccuagcccucucccu

SEQ ID NO: 3420931 - RNA, 17 nt, Human
acccuagccuugcuugu

SEQ ID NO: 3420932 - RNA, 18 nt, Human
acccuagguucccuguuc

SEQ ID NO: 3420933 - RNA, 19 nt, Human
acccuagguucccuguucu

SEQ ID NO: 3420934 - RNA, 23 nt, Human
acccuagguucccuguucuuccu

SEQ ID NO: 3420935 - RNA, 21 nt, Human
acccuaguuaguguuuugccu

SEQ ID NO: 3420936 - RNA, 14 nt, Human
acccuaucuccuga

SEQ ID NO: 3420937 - RNA, 13 nt, Human
acccuauugcugc

SEQ ID NO: 3420938 - RNA, 21 nt, Human
acccucaaccucuucuggcuc

SEQ ID NO: 3420939 - RNA, 17 nt, Human
acccucacucugccagg

SEQ ID NO: 3420940 - RNA, 18 nt, Human
acccucacucugccaggg

SEQ ID NO: 3420941 - RNA, 21 nt, Human
acccucacucugccagggcag

SEQ ID NO: 3420942 - RNA, 15 nt, Human
acccucacuggcucu

SEQ ID NO: 3420943 - RNA, 18 nt, Human
acccucagagccaccccu

SEQ ID NO: 3420944 - RNA, 16 nt, Human
acccucagcaccccuu

SEQ ID NO: 3420945 - RNA, 19 nt, Human
acccucagcaccccuucca

SEQ ID NO: 3420946 - RNA, 22 nt, Human
acccucagcaccccuuccaugu

SEQ ID NO: 3420947 - RNA, 19 nt, Human
acccucaggcauaggccug

SEQ ID NO: 3420948 - RNA, 21 nt, Human
acccucaggggaaaacuguua

SEQ ID NO: 3420949 - RNA, 19 nt, Human
acccucagugagcauggua

SEQ ID NO: 3420950 - RNA, 15 nt, Human
acccucaucugucug

SEQ ID NO: 3420951 - RNA, 16 nt, Human
acccucaucugucugg

SEQ ID NO: 3420952 - RNA, 13 nt, Human
acccucaucuuuc

SEQ ID NO: 3420953 - RNA, 14 nt, Human
acccucaucuuucu

SEQ ID NO: 3420954 - RNA, 19 nt, Human
acccucaucuuucuuccaa

SEQ ID NO: 3420955 - RNA, 22 nt, Human
acccucaugcugccaauauccu

SEQ ID NO: 3420956 - RNA, 13 nt, Human
acccucaugcugu

SEQ ID NO: 3420957 - RNA, 16 nt, Human
acccucauuguguuuc

SEQ ID NO: 3420958 - RNA, 22 nt, Human
acccuccaaauggagaagcugc

SEQ ID NO: 3420959 - RNA, 11 nt, Human
acccuccaagg

SEQ ID NO: 3420960 - RNA, 12 nt, Human
acccuccaaggc

SEQ ID NO: 3420961 - RNA, 13 nt, Human
acccuccacccug

SEQ ID NO: 3420962 - RNA, 14 nt, Human
acccuccacccugu

SEQ ID NO: 3420963 - RNA, 20 nt, Human
acccuccaccgcagaaggaa

SEQ ID NO: 3420964 - RNA, 21 nt, Human
acccuccaccgcagaaggaag

SEQ ID NO: 3420965 - RNA, 15 nt, Human
acccuccacucuccu

SEQ ID NO: 3420966 - RNA, 14 nt, Human
acccucccaccccc

SEQ ID NO: 3420967 - RNA, 16 nt, Human
acccucccagaccugc

SEQ ID NO: 3420968 - RNA, 15 nt, Human
acccucccagcucug

SEQ ID NO: 3420969 - RNA, 22 nt, Human
acccuccccaaaggcuuugccc

SEQ ID NO: 3420970 - RNA, 10 nt, Human
acccuccccc

SEQ ID NO: 3420971 - RNA, 13 nt, Human
acccuccccuccc

SEQ ID NO: 3420972 - RNA, 19 nt, Human
acccuccccucucuugcac

SEQ ID NO: 3420973 - RNA, 21 nt, Human
acccuccccuucccagggcaa

SEQ ID NO: 3420974 - RNA, 12 nt, Human
acccucccucag

SEQ ID NO: 3420975 - RNA, 20 nt, Human
acccucccucagccccucuu

SEQ ID NO: 3420976 - RNA, 23 nt, Human
acccucccucagccccucuugcc

SEQ ID NO: 3420977 - RNA, 11 nt, Human
acccucccucc

SEQ ID NO: 3420978 - RNA, 17 nt, Human
acccucccucccuaccc

SEQ ID NO: 3420979 - RNA, 23 nt, Human
acccucccucuacugggagccua

SEQ ID NO: 3420980 - RNA, 13 nt, Human
acccucccugcug

SEQ ID NO: 3420981 - RNA, 15 nt, Human
acccucccugcuguc

SEQ ID NO: 3420982 - RNA, 15 nt, Human
acccucccuguucau

SEQ ID NO: 3420983 - RNA, 22 nt, Human
acccuccgccuucacuccggug

SEQ ID NO: 3420984 - RNA, 16 nt, Human
acccuccugucuuccc

SEQ ID NO: 3420985 - RNA, 20 nt, Human
acccuccugucuucccaggg

SEQ ID NO: 3420986 - RNA, 20 nt, Human
acccuccuguugcacccagc

SEQ ID NO: 3420987 - RNA, 21 nt, Human
acccuccuguugcacccagcc

SEQ ID NO: 3420988 - RNA, 24 nt, Human
acccuccuguugcacccagcccug

SEQ ID NO: 3420989 - RNA, 22 nt, Human
acccucgcuggcccccacuggc

SEQ ID NO: 3420990 - RNA, 20 nt, Human
acccucgggcccaccuggcc

SEQ ID NO: 3420991 - RNA, 17 nt, Human
acccucguggacaccug

SEQ ID NO: 3420992 - RNA, 19 nt, Human
acccucguggacaccugcc

SEQ ID NO: 3420993 - RNA, 14 nt, Human
acccucguggccuu

SEQ ID NO: 3420994 - RNA, 23 nt, Human
acccucuaaccucgcccucuccu

SEQ ID NO: 3420995 - RNA, 15 nt, Human
acccucuccacccca

SEQ ID NO: 3420996 - RNA, 14 nt, Human
acccucugaaauac

SEQ ID NO: 3420997 - RNA, 22 nt, Human
acccucugaaugguccaggguu

SEQ ID NO: 3420998 - RNA, 13 nt, Human
acccucugagcuu

SEQ ID NO: 3420999 - RNA, 18 nt, Human
acccucugagcuuugcau

SEQ ID NO: 3421000 - RNA, 21 nt, Human
acccucugagcuuugcauguu

SEQ ID NO: 3421001 - RNA, 17 nt, Human
acccucugccaccagag

SEQ ID NO: 3421002 - RNA, 20 nt, Human
acccucugccaccagagacc

SEQ ID NO: 3421003 - RNA, 15 nt, Human
acccucugcugaaga

SEQ ID NO: 3421004 - RNA, 17 nt, Human
acccucugcugaagacu

SEQ ID NO: 3421005 - RNA, 23 nt, Human
acccucugggaaccucccagagg

SEQ ID NO: 3421006 - RNA, 21 nt, Human
acccucuguuccuucccugug

SEQ ID NO: 3421007 - RNA, 13 nt, Human
acccucuucaugg

SEQ ID NO: 3421008 - RNA, 18 nt, Human
acccucuugcccauccug

SEQ ID NO: 3421009 - RNA, 11 nt, Human
acccugaaaug

SEQ ID NO: 3421010 - RNA, 23 nt, Human
acccugaacaacgagccuuuuca

SEQ ID NO: 3421011 - RNA, 12 nt, Human
acccugaagggg

SEQ ID NO: 3421012 - RNA, 17 nt, Human
acccugaaggggccaug

SEQ ID NO: 3421013 - RNA, 21 nt, Human
acccugaaugguuccaugccu

SEQ ID NO: 3421014 - RNA, 21 nt, Human
acccugacaaauuuuaauuau

SEQ ID NO: 3421015 - RNA, 16 nt, Human
acccugagccccuucc

SEQ ID NO: 3421016 - RNA, 13 nt, Human
acccugaggccca

SEQ ID NO: 3421017 - RNA, 23 nt, Human
acccugaggcccagagggccugc

SEQ ID NO: 3421018 - RNA, 21 nt, Human
acaaacuuuaggguaaaaauu

SEQ ID NO: 3421019 - RNA, 22 nt, Human
acaaacuuuaggguaaaaauug

SEQ ID NO: 3421020 - RNA, 19 nt, Human
acaaacuuugcaucucagu

SEQ ID NO: 3421021 - RNA, 17 nt, Human
acaaagaaacaaagaug

SEQ ID NO: 3421022 - RNA, 12 nt, Human
acaaagaaauau

SEQ ID NO: 3421023 - RNA, 22 nt, Human
acaaagaaauccggagaagcug

SEQ ID NO: 3421024 - RNA, 15 nt, Human
acaaagaagacaugu

SEQ ID NO: 3421025 - RNA, 19 nt, Human
acaaagaagacauguuuua

SEQ ID NO: 3421026 - RNA, 21 nt, Human
acaaagaagacauguuuuaga

SEQ ID NO: 3421027 - RNA, 14 nt, Human
acaaagaauuuaaa

SEQ ID NO: 3421028 - RNA, 17 nt, Human
acaaagacaaaagucug

SEQ ID NO: 3421029 - RNA, 15 nt, Human
acaaagacauugauu

SEQ ID NO: 3421030 - RNA, 14 nt, Human
acaaagagaaaaag

SEQ ID NO: 3421031 - RNA, 20 nt, Human
acaaagagaaaaagaaaugc

SEQ ID NO: 3421032 - RNA, 17 nt, Human
acaaagagacaaagcuu

SEQ ID NO: 3421033 - RNA, 16 nt, Human
acaaagaguucaagaa

SEQ ID NO: 3421034 - RNA, 19 nt, Human
acaaagaguucaagaaaua

SEQ ID NO: 3421035 - RNA, 23 nt, Human
acaaagaguucuggaaaagaacu

SEQ ID NO: 3421036 - RNA, 14 nt, Human
acaaagauaucuuu

SEQ ID NO: 3421037 - RNA, 17 nt, Human
acaaagauaucuuuucu

SEQ ID NO: 3421038 - RNA, 16 nt, Human
acaaagcacaguguua

SEQ ID NO: 3421039 - RNA, 17 nt, Human
acaaagcacuagagaau

SEQ ID NO: 3421040 - RNA, 21 nt, Human
acaaagcagaauaguauuuuu

SEQ ID NO: 3421041 - RNA, 14 nt, Human
acaaagcagccacg

SEQ ID NO: 3421042 - RNA, 17 nt, Human
acaaagccaacagucaa

SEQ ID NO: 3421043 - RNA, 15 nt, Human
acaaagcccuuuuau

SEQ ID NO: 3421044 - RNA, 18 nt, Human
acaaagccuuaucaagug

SEQ ID NO: 3421045 - RNA, 19 nt, Human
acaaagccuuaucaagugu

SEQ ID NO: 3421046 - RNA, 23 nt, Human
acaaagccuuaucaagugucuuc

SEQ ID NO: 3421047 - RNA, 16 nt, Human
acaaagcugcuaaauc

SEQ ID NO: 3421048 - RNA, 14 nt, Human
acaaagcuguuaaa

SEQ ID NO: 3421049 - RNA, 17 nt, Human
acaaagcuguuaaacug

SEQ ID NO: 3421050 - RNA, 19 nt, Human
acaaagcuguuaaacuguu

SEQ ID NO: 3421051 - RNA, 19 nt, Human
acaaagcuuagcaggagag

SEQ ID NO: 3421052 - RNA, 20 nt, Human
acaaagcuucuaucccagga

SEQ ID NO: 3421053 - RNA, 23 nt, Human
acaaagcuucuaucccaggaggu

SEQ ID NO: 3421054 - RNA, 11 nt, Human
acaaaggaaaa

SEQ ID NO: 3421055 - RNA, 22 nt, Human
acaaaggaugcccaaagaugca

SEQ ID NO: 3421056 - RNA, 18 nt, Human
acaaaggcaaagggucca

SEQ ID NO: 3421057 - RNA, 14 nt, Human
acaaaggccaaacu

SEQ ID NO: 3421058 - RNA, 16 nt, Human
acaaaggcuguauuca

SEQ ID NO: 3421059 - RNA, 17 nt, Human
acaaaggggaaagaaca

SEQ ID NO: 3421060 - RNA, 18 nt, Human
acaaaggggaaagaacau

SEQ ID NO: 3421061 - RNA, 18 nt, Human
acaaaggguuuuaaugua

SEQ ID NO: 3421062 - RNA, 22 nt, Human
acaaaggugaaaauuguuugua

SEQ ID NO: 3421063 - RNA, 14 nt, Human
acaaagguuuaaau

SEQ ID NO: 3421064 - RNA, 16 nt, Human
acaaagguuuaaauga

SEQ ID NO: 3421065 - RNA, 14 nt, Human
acaaaguaauuccu

SEQ ID NO: 3421066 - RNA, 16 nt, Human
acaaaguauuaagcau

SEQ ID NO: 3421067 - RNA, 18 nt, Human
acaaaguauuaagcauau

SEQ ID NO: 3421068 - RNA, 16 nt, Human
acaaagucuuuggggu

SEQ ID NO: 3421069 - RNA, 14 nt, Human
acaaagugccaaag

SEQ ID NO: 3421070 - RNA, 16 nt, Human
acaaagugccaaagaa

SEQ ID NO: 3421071 - RNA, 23 nt, Human
acaaagugccaaagaaagugguc

SEQ ID NO: 3421072 - RNA, 14 nt, Human
acaaaguguauuca

SEQ ID NO: 3421073 - RNA, 12 nt, Human
acaaagugugua

SEQ ID NO: 3421074 - RNA, 22 nt, Human
acccuguacuguucugugucuu

SEQ ID NO: 3421075 - RNA, 21 nt, Human
acccugucucuacuaaaaaua

SEQ ID NO: 3421076 - RNA, 20 nt, Human
acccugugcagaagggagcu

SEQ ID NO: 3421077 - RNA, 19 nt, Human
acccugugcugguguccug

SEQ ID NO: 3421078 - RNA, 14 nt, Human
acccuguggcccug

SEQ ID NO: 3421079 - RNA, 17 nt, Human
acccuguggucuuccuc

SEQ ID NO: 3421080 - RNA, 18 nt, Human
acccuguuccugcugcug

SEQ ID NO: 3421081 - RNA, 18 nt, Human
acccuguuccuggagguc

SEQ ID NO: 3421082 - RNA, 15 nt, Human
acccuuaacccaagg

SEQ ID NO: 3421083 - RNA, 17 nt, Human
acccuuaacccaaggag

SEQ ID NO: 3421084 - RNA, 18 nt, Human
acccuuaccccuuagccu

SEQ ID NO: 3421085 - RNA, 19 nt, Human
acccuuaccccuuagccuc

SEQ ID NO: 3421086 - RNA, 22 nt, Human
acccuuacuggcuuaccuccuc

SEQ ID NO: 3421087 - RNA, 12 nt, Human
acccuuagaaaa

SEQ ID NO: 3421088 - RNA, 15 nt, Human
acccuuauaaaaucc

SEQ ID NO: 3421089 - RNA, 18 nt, Human
acccuucaucuuccugug

SEQ ID NO: 3421090 - RNA, 20 nt, Human
acccuucaucuuccuguguc

SEQ ID NO: 3421091 - RNA, 21 nt, Human
acccuucaucuuccugugucc

SEQ ID NO: 3421092 - RNA, 21 nt, Human
acccuucccaaucagcacuga

SEQ ID NO: 3421093 - RNA, 22 nt, Human
acccuucccaaucagcacugaa

SEQ ID NO: 3421094 - RNA, 23 nt, Human
acccuucccaaucagcacugaaa

SEQ ID NO: 3421095 - RNA, 13 nt, Human
acccuucccugca

SEQ ID NO: 3421096 - RNA, 15 nt, Human
acccuucccugcacu

SEQ ID NO: 3421097 - RNA, 17 nt, Human
acccuuccugagcuuua

SEQ ID NO: 3421098 - RNA, 17 nt, Human
acccuucucccacucuc

SEQ ID NO: 3421099 - RNA, 18 nt, Human
acccuucucccacucucc

SEQ ID NO: 3421100 - RNA, 21 nt, Human
acccuucugugcccagcucag

SEQ ID NO: 3421101 - RNA, 13 nt, Human
acccuucuuuucu

SEQ ID NO: 3421102 - RNA, 13 nt, Human
acccuugaaaaga

SEQ ID NO: 3421103 - RNA, 15 nt, Human
acccuugagcccucc

SEQ ID NO: 3421104 - RNA, 20 nt, Human
acccuugccgucuaccugag

SEQ ID NO: 3421105 - RNA, 12 nt, Human
acccuuggccug

SEQ ID NO: 3421106 - RNA, 17 nt, Human
acccuuggccugucuca

SEQ ID NO: 3421107 - RNA, 17 nt, Human
acccuugggccagaagu

SEQ ID NO: 3421108 - RNA, 15 nt, Human
acccuugugguccca

SEQ ID NO: 3421109 - RNA, 16 nt, Human
acccuuguggucccac

SEQ ID NO: 3421110 - RNA, 19 nt, Human
acccuuguggucccacccc

SEQ ID NO: 3421111 - RNA, 23 nt, Human
acccuuguggucccaccccacac

SEQ ID NO: 3421112 - RNA, 20 nt, Human
acccuuuccuccuuuaucac

SEQ ID NO: 3421113 - RNA, 18 nt, Human
acccuuucuacuuccaag

SEQ ID NO: 3421114 - RNA, 17 nt, Human
acccuuucuucagcucu

SEQ ID NO: 3421115 - RNA, 20 nt, Human
acccuuugaauuggacaaua

SEQ ID NO: 3421116 - RNA, 22 nt, Human
acccuuugcugugaggcugucc

SEQ ID NO: 3421117 - RNA, 23 nt, Human
acccuuuggggggggcccgccug

SEQ ID NO: 3421118 - RNA, 17 nt, Human
acccuuuggggguugaa

SEQ ID NO: 3421119 - RNA, 12 nt, Human
acccuuuuccag

SEQ ID NO: 3421120 - RNA, 15 nt, Human
acccuuuuccauuuu

SEQ ID NO: 3421121 - RNA, 10 nt, Human
acccuuuucu

SEQ ID NO: 3421122 - RNA, 14 nt, Human
acccuuuuggcccc

SEQ ID NO: 3421123 - RNA, 21 nt, Human
acccuuuuggguuucugcccu

SEQ ID NO: 3421124 - RNA, 17 nt, Human
acccuuuuucuccagcu

SEQ ID NO: 3421125 - RNA, 21 nt, Human
accgaacugauguaaguaaac

SEQ ID NO: 3421126 - RNA, 21 nt, Human
accgaacugggcauauuucua

SEQ ID NO: 3421127 - RNA, 23 nt, Human
accgaaguggacuggccccuggg

SEQ ID NO: 3421128 - RNA, 15 nt, Human
accgaaugugucuuu

SEQ ID NO: 3421129 - RNA, 22 nt, Human
accgaaugugucuuuagauagc

SEQ ID NO: 3421130 - RNA, 15 nt, Human
accgacuagacacac

SEQ ID NO: 3421131 - RNA, 17 nt, Human
accgacuagccaggaag

SEQ ID NO: 3421132 - RNA, 15 nt, Human
accgagcaaagauca

SEQ ID NO: 3421133 - RNA, 17 nt, Human
accgagcaaagaucaaa

SEQ ID NO: 3421134 - RNA, 15 nt, Human
accgaggacaugaaa

SEQ ID NO: 3421135 - RNA, 13 nt, Human
accgaggcaggga

SEQ ID NO: 3421136 - RNA, 17 nt, Human
accgaggcgcgggggcc

SEQ ID NO: 3421137 - RNA, 14 nt, Human
accgaggggccuuu

SEQ ID NO: 3421138 - RNA, 15 nt, Human
accgaggggccuuug

SEQ ID NO: 3421139 - RNA, 21 nt, Human
accgaggggccuuuguucugg

SEQ ID NO: 3421140 - RNA, 21 nt, Human
accgagucucuucuccacugg

SEQ ID NO: 3421141 - RNA, 24 nt, Human
accgagucucuucuccacuggaug

SEQ ID NO: 3421142 - RNA, 20 nt, Human
accgaugcaaacauuggaag

SEQ ID NO: 3421143 - RNA, 15 nt, Human
accgaugcuccagcc

SEQ ID NO: 3421144 - RNA, 23 nt, Human
accgaugcuccagccaaccccug

SEQ ID NO: 3421145 - RNA, 15 nt, Human
accgaugcuuuacca

SEQ ID NO: 3421146 - RNA, 22 nt, Human
accgauucaucucucagaaggg

SEQ ID NO: 3421147 - RNA, 24 nt, Human
accgauucuuuggaguugucacau

SEQ ID NO: 3421148 - RNA, 18 nt, Human
accgcacagcucaggagg

SEQ ID NO: 3421149 - RNA, 14 nt, Human
accgcagaaggaag

SEQ ID NO: 3421150 - RNA, 12 nt, Human
accgcagacagg

SEQ ID NO: 3421151 - RNA, 20 nt, Human
accgcagacaggaccaggga

SEQ ID NO: 3421152 - RNA, 16 nt, Human
accgcaggaagcugcu

SEQ ID NO: 3421153 - RNA, 21 nt, Human
accgcagucgucgcacagucu

SEQ ID NO: 3421154 - RNA, 21 nt, Human
accgccacacacacaggagca

SEQ ID NO: 3421155 - RNA, 20 nt, Human
accgccagauggggccucug

SEQ ID NO: 3421156 - RNA, 13 nt, Human
accgccagcucug

SEQ ID NO: 3421157 - RNA, 21 nt, Human
accgccagcucuguucuuccu

SEQ ID NO: 3421158 - RNA, 19 nt, Human
accgcccccugucucucag

SEQ ID NO: 3421159 - RNA, 16 nt, Human
accgcccuuuuccccu

SEQ ID NO: 3421160 - RNA, 19 nt, Human
accgccuccuacagcccac

SEQ ID NO: 3421161 - RNA, 16 nt, Human
accgcgacuaauuuca

SEQ ID NO: 3421162 - RNA, 19 nt, Human
accgcgucuacccugggau

SEQ ID NO: 3421163 - RNA, 13 nt, Human
accgcguuguaaa

SEQ ID NO: 3421164 - RNA, 13 nt, Human
accgcuaaaagaa

SEQ ID NO: 3421165 - RNA, 16 nt, Human
accgcuaaaagaaacu

SEQ ID NO: 3421166 - RNA, 17 nt, Human
accgcuacaccacucug

SEQ ID NO: 3421167 - RNA, 12 nt, Human
accgcuccaggu

SEQ ID NO: 3421168 - RNA, 19 nt, Human
accgcuccccagcccaggg

SEQ ID NO: 3421169 - RNA, 16 nt, Human
accgcucucuuuucug

SEQ ID NO: 3421170 - RNA, 21 nt, Human
accgcuuguggggacccaggc

SEQ ID NO: 3421171 - RNA, 16 nt, Human
accgcuuuggccugag

SEQ ID NO: 3421172 - RNA, 17 nt, Human
accgcuuuggccugagu

SEQ ID NO: 3421173 - RNA, 16 nt, Human
accggaagcuccuggu

SEQ ID NO: 3421174 - RNA, 15 nt, Human
accggaccagccugg

SEQ ID NO: 3421175 - RNA, 12 nt, Human
accggaccaucu

SEQ ID NO: 3421176 - RNA, 15 nt, Human
accggacuuuucugc

SEQ ID NO: 3421177 - RNA, 16 nt, Human
accggacuuuucugca

SEQ ID NO: 3421178 - RNA, 13 nt, Human
acaacggaggccu

SEQ ID NO: 3421179 - RNA, 14 nt, Human
acaacgugcauugu

SEQ ID NO: 3421180 - RNA, 18 nt, Human
acaacgugcauugugcuu

SEQ ID NO: 3421181 - RNA, 22 nt, Human
acaacgugcucuuuguuuugug

SEQ ID NO: 3421182 - RNA, 19 nt, Human
acaacuaggcuucagcaua

SEQ ID NO: 3421183 - RNA, 15 nt, Human
acaacuauuuucaga

SEQ ID NO: 3421184 - RNA, 16 nt, Human
acaacuauuuuuccaa

SEQ ID NO: 3421185 - RNA, 17 nt, Human
acaacucacuccuuuua

SEQ ID NO: 3421186 - RNA, 14 nt, Human
acaacucauacacu

SEQ ID NO: 3421187 - RNA, 13 nt, Human
acaacugaguccu

SEQ ID NO: 3421188 - RNA, 14 nt, Human
acaacugaguccuu

SEQ ID NO: 3421189 - RNA, 18 nt, Human
acaacugcaauaacuucu

SEQ ID NO: 3421190 - RNA, 20 nt, Human
acaacugcaauaacuucuga

SEQ ID NO: 3421191 - RNA, 16 nt, Human
acaacuggcaggcagg

SEQ ID NO: 3421192 - RNA, 19 nt, Human
acaacugucuaacuuuaga

SEQ ID NO: 3421193 - RNA, 14 nt, Human
acaacuuaguguaa

SEQ ID NO: 3421194 - RNA, 14 nt, Human
acaacuucuuugua

SEQ ID NO: 3421195 - RNA, 24 nt, Human
acaacuugcacguauuuuaauagc

SEQ ID NO: 3421196 - RNA, 22 nt, Human
acaacuugucuauuaccuguua

SEQ ID NO: 3421197 - RNA, 13 nt, Human
acaacuuugccag

SEQ ID NO: 3421198 - RNA, 15 nt, Human
acaacuuuuaaccaa

SEQ ID NO: 3421199 - RNA, 16 nt, Human
acaagaaaaauaaaga

SEQ ID NO: 3421200 - RNA, 18 nt, Human
acaagaaaaauaaagaaa

SEQ ID NO: 3421201 - RNA, 10 nt, Human
acaagaaaau

SEQ ID NO: 3421202 - RNA, 13 nt, Human
acaagaaaaucag

SEQ ID NO: 3421203 - RNA, 20 nt, Human
acaagaaacucaaugcacaa

SEQ ID NO: 3421204 - RNA, 15 nt, Human
acaagaaaguuuccc

SEQ ID NO: 3421205 - RNA, 16 nt, Human
acaagaaaugaaagca

SEQ ID NO: 3421206 - RNA, 15 nt, Human
acaagaacugaaacc

SEQ ID NO: 3421207 - RNA, 14 nt, Human
acaagaagaagggc

SEQ ID NO: 3421208 - RNA, 19 nt, Human
acaagaagaauuugaagac

SEQ ID NO: 3421209 - RNA, 18 nt, Human
acaagaagcauuuuguaa

SEQ ID NO: 3421210 - RNA, 20 nt, Human
acaagaagccacagaccuag

SEQ ID NO: 3421211 - RNA, 17 nt, Human
acaagaaucacuugaac

SEQ ID NO: 3421212 - RNA, 14 nt, Human
acaagaauggauca

SEQ ID NO: 3421213 - RNA, 23 nt, Human
acaagaauggaucacaagaugga

SEQ ID NO: 3421214 - RNA, 14 nt, Human
acaagacacaguga

SEQ ID NO: 3421215 - RNA, 15 nt, Human
acaagacccccagca

SEQ ID NO: 3421216 - RNA, 19 nt, Human
acaagaccccgucucaaaa

SEQ ID NO: 3421217 - RNA, 13 nt, Human
acaagacugcaca

SEQ ID NO: 3421218 - RNA, 14 nt, Human
acaagacuucagua

SEQ ID NO: 3421219 - RNA, 16 nt, Human
acacuacaccacacac

SEQ ID NO: 3421220 - RNA, 14 nt, Human
acacuacacccagc

SEQ ID NO: 3421221 - RNA, 17 nt, Human
acacuacacccagcaau

SEQ ID NO: 3421222 - RNA, 21 nt, Human
acacuagccagacacucugcu

SEQ ID NO: 3421223 - RNA, 20 nt, Human
acacuagcccaaugaaauga

SEQ ID NO: 3421224 - RNA, 20 nt, Human
acacuagucugugugcugug

SEQ ID NO: 3421225 - RNA, 17 nt, Human
acacuauaucuguauau

SEQ ID NO: 3421226 - RNA, 19 nt, Human
acacuaugguauuugagug

SEQ ID NO: 3421227 - RNA, 22 nt, Human
acacuaugguauuugaguguuu

SEQ ID NO: 3421228 - RNA, 16 nt, Human
acacuauucacuaaaa

SEQ ID NO: 3421229 - RNA, 15 nt, Human
acccuggggaaggag

SEQ ID NO: 3421230 - RNA, 16 nt, Human
acccuggggagaaagu

SEQ ID NO: 3421231 - RNA, 14 nt, Human
acccuggggccuga

SEQ ID NO: 3421232 - RNA, 18 nt, Human
acccugggggcacaggag

SEQ ID NO: 3421233 - RNA, 22 nt, Human
acccugggggcacaggaggcag

SEQ ID NO: 3421234 - RNA, 18 nt, Human
acccugggugggcucugu

SEQ ID NO: 3421235 - RNA, 19 nt, Human
acccugggugggcucugug

SEQ ID NO: 3421236 - RNA, 23 nt, Human
acccuggguguccccgcugcugu

SEQ ID NO: 3421237 - RNA, 20 nt, Human
acccuggugaggaagcucca

SEQ ID NO: 3421238 - RNA, 15 nt, Human
acccuggugggccaa

SEQ ID NO: 3421239 - RNA, 16 nt, Human
acccuguaccucaucc

SEQ ID NO: 3421240 - RNA, 18 nt, Human
acccuguauauagcccag

SEQ ID NO: 3421241 - RNA, 20 nt, Human
acccuguauauagcccagcc

SEQ ID NO: 3421242 - RNA, 18 nt, Human
acccugucaaacauuagu

SEQ ID NO: 3421243 - RNA, 16 nt, Human
acccugucccccagcu

SEQ ID NO: 3421244 - RNA, 20 nt, Human
acccugucccccagcucugg

SEQ ID NO: 3421245 - RNA, 14 nt, Human
acccugucucuacu

SEQ ID NO: 3421246 - RNA, 21 nt, Human
acccugucugccccgcccuca

SEQ ID NO: 3421247 - RNA, 22 nt, Human
acccugucuguagagggcccug

SEQ ID NO: 3421248 - RNA, 19 nt, Human
acccugugacauggugccu

SEQ ID NO: 3421249 - RNA, 21 nt, Human
acccugugacauggugccuga

SEQ ID NO: 3421250 - RNA, 15 nt, Human
acccugugcuggugu

SEQ ID NO: 3421251 - RNA, 16 nt, Human
acccuguggcccuggc

SEQ ID NO: 3421252 - RNA, 15 nt, Human
acccuguuccugcug

SEQ ID NO: 3421253 - RNA, 12 nt, Human
acccuguugcua

SEQ ID NO: 3421254 - RNA, 14 nt, Human
acccuguuuccuga

SEQ ID NO: 3421255 - RNA, 15 nt, Human
acccuguuuccugag

SEQ ID NO: 3421256 - RNA, 18 nt, Human
acccuguuuggauuuuua

SEQ ID NO: 3421257 - RNA, 23 nt, Human
acccuuaaacaguugcacagcau

SEQ ID NO: 3421258 - RNA, 14 nt, Human
acccuuaacccaag

SEQ ID NO: 3421259 - RNA, 16 nt, Human
acccuuaacccaagga

SEQ ID NO: 3421260 - RNA, 23 nt, Human
acccuuaacccaaggagcacagg

SEQ ID NO: 3421261 - RNA, 16 nt, Human
acccuuaagucacccu

SEQ ID NO: 3421262 - RNA, 18 nt, Human
acccuuacagccucugac

SEQ ID NO: 3421263 - RNA, 18 nt, Human
acccuuaccaugugccug

SEQ ID NO: 3421264 - RNA, 13 nt, Human
acccuuagaaaau

SEQ ID NO: 3421265 - RNA, 23 nt, Human
acccuuaucaccagcugccucuu

SEQ ID NO: 3421266 - RNA, 15 nt, Human
acccuucaucuuccu

SEQ ID NO: 3421267 - RNA, 13 nt, Human
acccuucccaauc

SEQ ID NO: 3421268 - RNA, 16 nt, Human
acccuucccugcacua

SEQ ID NO: 3421269 - RNA, 14 nt, Human
acccuucucccacu

SEQ ID NO: 3421270 - RNA, 20 nt, Human
acccuucucccacucuccua

SEQ ID NO: 3421271 - RNA, 15 nt, Human
acccuucuccucuug

SEQ ID NO: 3421272 - RNA, 17 nt, Human
acccuucuccucuugua

SEQ ID NO: 3421273 - RNA, 19 nt, Human
acccuucuccucuuguaaa

SEQ ID NO: 3421274 - RNA, 23 nt, Human
acccuucuccucuuguaaauaaa

SEQ ID NO: 3421275 - RNA, 18 nt, Human
acccuucuggaaacugug

SEQ ID NO: 3421276 - RNA, 13 nt, Human
acccuucuuucca

SEQ ID NO: 3421277 - RNA, 20 nt, Human
acccuucuuuccauuucucu

SEQ ID NO: 3421278 - RNA, 14 nt, Human
acccuucuuuccuc

SEQ ID NO: 3421279 - RNA, 12 nt, Human
acccuucuuuuc

SEQ ID NO: 3421280 - RNA, 17 nt, Human
acccuugccgucuaccu

SEQ ID NO: 3421281 - RNA, 16 nt, Human
acccuugcugugaauu

SEQ ID NO: 3421282 - RNA, 18 nt, Human
acccuuggacuugaggau

SEQ ID NO: 3421283 - RNA, 21 nt, Human
acccuuggaggcugucuucuc

SEQ ID NO: 3421284 - RNA, 17 nt, Human
acccuuggcuugcccac

SEQ ID NO: 3421285 - RNA, 20 nt, Human
acccuuguggucccacccca

SEQ ID NO: 3421286 - RNA, 14 nt, Human
acccuuuauuugaa

SEQ ID NO: 3421287 - RNA, 21 nt, Human
acccuuuccagguucugaaag

SEQ ID NO: 3421288 - RNA, 20 nt, Human
acccuuucccccuucucuua

SEQ ID NO: 3421289 - RNA, 15 nt, Human
acccuuuccuuccuu

SEQ ID NO: 3421290 - RNA, 17 nt, Human
acccuuuccuuccuucc

SEQ ID NO: 3421291 - RNA, 23 nt, Human
acccuuugcugugaggcuguccu

SEQ ID NO: 3421292 - RNA, 12 nt, Human
acccuuugguuu

SEQ ID NO: 3421293 - RNA, 23 nt, Human
acccuuugguuuuuuucuucugu

SEQ ID NO: 3421294 - RNA, 17 nt, Human
acccuuuuaaaguugau

SEQ ID NO: 3421295 - RNA, 19 nt, Human
acccuuuuccuuugugguu

SEQ ID NO: 3421296 - RNA, 20 nt, Human
accgaaaacguggcugcuuc

SEQ ID NO: 3421297 - RNA, 22 nt, Human
accgaaaacguggcugcuucaa

SEQ ID NO: 3421298 - RNA, 13 nt, Human
accgaagcccaga

SEQ ID NO: 3421299 - RNA, 21 nt, Human
accgaaguggacuggccccug

SEQ ID NO: 3421300 - RNA, 13 nt, Human
accgaauaaaugu

SEQ ID NO: 3421301 - RNA, 19 nt, Human
accgaaugugucuuuagau

SEQ ID NO: 3421302 - RNA, 17 nt, Human
accgacgcgucuccugu

SEQ ID NO: 3421303 - RNA, 23 nt, Human
accgagaguagccgagagccugc

SEQ ID NO: 3421304 - RNA, 23 nt, Human
accgagccucugucacugcaggc

SEQ ID NO: 3421305 - RNA, 17 nt, Human
accgaggagggagaguc

SEQ ID NO: 3421306 - RNA, 21 nt, Human
accgaggagggagagucuccc

SEQ ID NO: 3421307 - RNA, 16 nt, Human
accgaggcgcgggggc

SEQ ID NO: 3421308 - RNA, 19 nt, Human
accgaggggcucaggaaaa

SEQ ID NO: 3421309 - RNA, 18 nt, Human
accgaguagaaaauguga

SEQ ID NO: 3421310 - RNA, 20 nt, Human
accgaguagaaaaugugacc

SEQ ID NO: 3421311 - RNA, 16 nt, Human
accgagucucuucucc

SEQ ID NO: 3421312 - RNA, 18 nt, Human
accgagucucuucuccac

SEQ ID NO: 3421313 - RNA, 14 nt, Human
accgagugaaccua

SEQ ID NO: 3421314 - RNA, 12 nt, Human
accgcacagcuc

SEQ ID NO: 3421315 - RNA, 14 nt, Human
accgcacagcucag

SEQ ID NO: 3421316 - RNA, 13 nt, Human
accgcagaaggaa

SEQ ID NO: 3421317 - RNA, 15 nt, Human
accgcagaaggaagg

SEQ ID NO: 3421318 - RNA, 16 nt, Human
accgcagacaggacca

SEQ ID NO: 3421319 - RNA, 17 nt, Human
accgcagacaggaccag

SEQ ID NO: 3421320 - RNA, 12 nt, Human
accgcaggaagc

SEQ ID NO: 3421321 - RNA, 13 nt, Human
accgcaggaagcu

SEQ ID NO: 3421322 - RNA, 14 nt, Human
accgcaggaagcug

SEQ ID NO: 3421323 - RNA, 19 nt, Human
accgcaggaagcugcuccg

SEQ ID NO: 3421324 - RNA, 23 nt, Human
accgcagucgucgcacagucucu

SEQ ID NO: 3421325 - RNA, 14 nt, Human
accgcaugcccccu

SEQ ID NO: 3421326 - RNA, 22 nt, Human
accgcaugcccccucgugccag

SEQ ID NO: 3421327 - RNA, 17 nt, Human
accgccagauggggccu

SEQ ID NO: 3421328 - RNA, 14 nt, Human
accgccagcucugu

SEQ ID NO: 3421329 - RNA, 23 nt, Human
accgcccagcggcuugccugccu

SEQ ID NO: 3421330 - RNA, 15 nt, Human
accgccccuggccgc

SEQ ID NO: 3421331 - RNA, 16 nt, Human
accgccccuggccgcg

SEQ ID NO: 3421332 - RNA, 11 nt, Human
accgcccgucu

SEQ ID NO: 3421333 - RNA, 13 nt, Human
accgcccgucugu

SEQ ID NO: 3421334 - RNA, 18 nt, Human
accgcccuuuuccccuac

SEQ ID NO: 3421335 - RNA, 18 nt, Human
accgccgacuuuguaccc

SEQ ID NO: 3421336 - RNA, 18 nt, Human
accgccggccagcuggga

SEQ ID NO: 3421337 - RNA, 20 nt, Human
accgccuccccaccuccagg

SEQ ID NO: 3421338 - RNA, 21 nt, Human
accgccuccccaccuccaggc

SEQ ID NO: 3421339 - RNA, 16 nt, Human
accgccugucucuuua

SEQ ID NO: 3421340 - RNA, 15 nt, Human
accgccuugcccagc

SEQ ID NO: 3421341 - RNA, 16 nt, Human
accgccuugcccagcc

SEQ ID NO: 3421342 - RNA, 16 nt, Human
accgcgcccagccuca

SEQ ID NO: 3421343 - RNA, 19 nt, Human
accgcgggugugggaaagc

SEQ ID NO: 3421344 - RNA, 17 nt, Human
accgcgucuacccuggg

SEQ ID NO: 3421345 - RNA, 15 nt, Human
accgcguuguaaaau

SEQ ID NO: 3421346 - RNA, 18 nt, Human
accgcguuguaaaauaua

SEQ ID NO: 3421347 - RNA, 19 nt, Human
accgcuacaccacucuggc

SEQ ID NO: 3421348 - RNA, 19 nt, Human
accgcucaccuagagccag

SEQ ID NO: 3421349 - RNA, 17 nt, Human
accgcuccccagcccag

SEQ ID NO: 3421350 - RNA, 22 nt, Human
accgcucucuuuucuguacuuc

SEQ ID NO: 3421351 - RNA, 13 nt, Human
accgcugaauaug

SEQ ID NO: 3421352 - RNA, 17 nt, Human
accgcugauucucaggg

SEQ ID NO: 3421353 - RNA, 20 nt, Human
accgcugccuaaguggcugc

SEQ ID NO: 3421354 - RNA, 16 nt, Human
accgcuuccggcuccu

SEQ ID NO: 3421355 - RNA, 18 nt, Human
accgcuuguggggaccca

SEQ ID NO: 3421356 - RNA, 13 nt, Human
accgcuuuggccu

SEQ ID NO: 3421357 - RNA, 24 nt, Human
accggagugucuggaauuguggcu

SEQ ID NO: 3421358 - RNA, 14 nt, Human
accggauccugggu

SEQ ID NO: 3421359 - RNA, 14 nt, Human
accggauggcggac

SEQ ID NO: 3421360 - RNA, 18 nt, Human
accggccgauggagacac

SEQ ID NO: 3421361 - RNA, 16 nt, Human
accggccugccaggag

SEQ ID NO: 3421362 - RNA, 20 nt, Human
accggcugcuuuucccuaag

SEQ ID NO: 3421363 - RNA, 12 nt, Human
accgggcacuca

SEQ ID NO: 3421364 - RNA, 23 nt, Human
accucagccaugaggaguugcug

SEQ ID NO: 3421365 - RNA, 15 nt, Human
accucagccuagacc

SEQ ID NO: 3421366 - RNA, 15 nt, Human
accucagccuccugu

SEQ ID NO: 3421367 - RNA, 20 nt, Human
accucagccugcacaguguc

SEQ ID NO: 3421368 - RNA, 15 nt, Human
accucagccuggcca

SEQ ID NO: 3421369 - RNA, 21 nt, Human
accucagccuggccagacaca

SEQ ID NO: 3421370 - RNA, 15 nt, Human
accucagccugggcg

SEQ ID NO: 3421371 - RNA, 16 nt, Human
accucagccugugcug

SEQ ID NO: 3421372 - RNA, 19 nt, Human
accucagccugugcugccc

SEQ ID NO: 3421373 - RNA, 14 nt, Human
accucagccuugga

SEQ ID NO: 3421374 - RNA, 15 nt, Human
accucaggcagcuca

SEQ ID NO: 3421375 - RNA, 13 nt, Human
accucaggccagg

SEQ ID NO: 3421376 - RNA, 20 nt, Human
accucaggccaggugcagug

SEQ ID NO: 3421377 - RNA, 13 nt, Human
accucaggccugg

SEQ ID NO: 3421378 - RNA, 22 nt, Human
accucaggccugggggcugggc

SEQ ID NO: 3421379 - RNA, 19 nt, Human
accucaggcuuccuuggca

SEQ ID NO: 3421380 - RNA, 12 nt, Human
accucagggcac

SEQ ID NO: 3421381 - RNA, 13 nt, Human
accucagggcucc

SEQ ID NO: 3421382 - RNA, 23 nt, Human
accucagguaaucgaccugccuc

SEQ ID NO: 3421383 - RNA, 18 nt, Human
accucaggugagaagcag

SEQ ID NO: 3421384 - RNA, 23 nt, Human
accugcugagggaccagccaaga

SEQ ID NO: 3421385 - RNA, 13 nt, Human
accugcugaugug

SEQ ID NO: 3421386 - RNA, 15 nt, Human
accugcugcuucucc

SEQ ID NO: 3421387 - RNA, 17 nt, Human
accugcugcuucuccaa

SEQ ID NO: 3421388 - RNA, 13 nt, Human
accugcuggcccc

SEQ ID NO: 3421389 - RNA, 15 nt, Human
accugcuggccccuc

SEQ ID NO: 3421390 - RNA, 17 nt, Human
accugcuggccccucac

SEQ ID NO: 3421391 - RNA, 19 nt, Human
accugcuggccccucaccu

SEQ ID NO: 3421392 - RNA, 17 nt, Human
accugcuggguaaacug

SEQ ID NO: 3421393 - RNA, 20 nt, Human
accugcugugauacgaugcu

SEQ ID NO: 3421394 - RNA, 21 nt, Human
accugcuucucugcccagcuu

SEQ ID NO: 3421395 - RNA, 21 nt, Human
accugcuuggguggagaagcc

SEQ ID NO: 3421396 - RNA, 23 nt, Human
accugcuuggguggagaagccau

SEQ ID NO: 3421397 - RNA, 16 nt, Human
accugcuuuucaaugu

SEQ ID NO: 3421398 - RNA, 18 nt, Human
accuggaacuuggggagu

SEQ ID NO: 3421399 - RNA, 23 nt, Human
accuggaagcauuuguuucuacu

SEQ ID NO: 3421400 - RNA, 17 nt, Human
accuggaauauauaacc

SEQ ID NO: 3421401 - RNA, 17 nt, Human
accuggacacaggccug

SEQ ID NO: 3421402 - RNA, 20 nt, Human
accuggaccccugcauugga

SEQ ID NO: 3421403 - RNA, 22 nt, Human
accuggacuuaagcaucuggcu

SEQ ID NO: 3421404 - RNA, 23 nt, Human
accuggagagccagaaccuggag

SEQ ID NO: 3421405 - RNA, 13 nt, Human
accuggagagcua

SEQ ID NO: 3421406 - RNA, 23 nt, Human
accuggagagcuagaaccuggag

SEQ ID NO: 3421407 - RNA, 15 nt, Human
accuggagccccugg

SEQ ID NO: 3421408 - RNA, 17 nt, Human
accuggagccccugggu

SEQ ID NO: 3421409 - RNA, 14 nt, Human
accuggagggaaga

SEQ ID NO: 3421410 - RNA, 13 nt, Human
accuggagggcua

SEQ ID NO: 3421411 - RNA, 22 nt, Human
accuggaggggcuagaaccuag

SEQ ID NO: 3421412 - RNA, 23 nt, Human
accuggcaagcuagaaccuggag

SEQ ID NO: 3421413 - RNA, 18 nt, Human
accuggccaccugaggug

SEQ ID NO: 3421414 - RNA, 21 nt, Human
accuggccaccugaggugggc

SEQ ID NO: 3421415 - RNA, 21 nt, Human
accuggccccaugucucucag

SEQ ID NO: 3421416 - RNA, 15 nt, Human
accuggcccucucug

SEQ ID NO: 3421417 - RNA, 19 nt, Human
accuggcccugcuuccugc

SEQ ID NO: 3421418 - RNA, 13 nt, Human
accuggcccuggg

SEQ ID NO: 3421419 - RNA, 16 nt, Human
accuggcccuggggcc

SEQ ID NO: 3421420 - RNA, 16 nt, Human
accuggccucugcacu

SEQ ID NO: 3421421 - RNA, 18 nt, Human
accuggccucugcacucc

SEQ ID NO: 3421422 - RNA, 20 nt, Human
accuggccucugcacucccc

SEQ ID NO: 3421423 - RNA, 23 nt, Human
accuggccucugcacuccccugc

SEQ ID NO: 3421424 - RNA, 15 nt, Human
accuggcucucaccu

SEQ ID NO: 3421425 - RNA, 17 nt, Human
accuggcucucaccucu

SEQ ID NO: 3421426 - RNA, 15 nt, Human
accuggcuuguuuau

SEQ ID NO: 3421427 - RNA, 20 nt, Human
accuggcuuguuuauuuugu

SEQ ID NO: 3421428 - RNA, 15 nt, Human
accugggacagggag

SEQ ID NO: 3421429 - RNA, 16 nt, Human
accugggacagggagc

SEQ ID NO: 3421430 - RNA, 17 nt, Human
accugggauuauauauc

SEQ ID NO: 3421431 - RNA, 18 nt, Human
accugggcaccuggggag

SEQ ID NO: 3421432 - RNA, 19 nt, Human
accugggcaccuggggagu

SEQ ID NO: 3421433 - RNA, 21 nt, Human
accugggcauacuaauaaagu

SEQ ID NO: 3421434 - RNA, 16 nt, Human
accugggcccuggggc

SEQ ID NO: 3421435 - RNA, 19 nt, Human
accugggcccuggggccug

SEQ ID NO: 3421436 - RNA, 23 nt, Human
accugggcccuggggccuguacu

SEQ ID NO: 3421437 - RNA, 21 nt, Human
accugggcucucgcggccucu

SEQ ID NO: 3421438 - RNA, 15 nt, Human
accuggggaguggga

SEQ ID NO: 3421439 - RNA, 14 nt, Human
accuggggcacagu

SEQ ID NO: 3421440 - RNA, 20 nt, Human
accuggggcacaguccagga

SEQ ID NO: 3421441 - RNA, 22 nt, Human
accuggggcacaguccaggaac

SEQ ID NO: 3421442 - RNA, 16 nt, Human
accuggguccaaauaa

SEQ ID NO: 3421443 - RNA, 21 nt, Human
accuggguccaaauaaaaacu

SEQ ID NO: 3421444 - RNA, 16 nt, Human
accuggguugcagaca

SEQ ID NO: 3421445 - RNA, 18 nt, Human
accugguacccuccuggc

SEQ ID NO: 3421446 - RNA, 17 nt, Human
accugguccacagggca

SEQ ID NO: 3421447 - RNA, 18 nt, Human
accugguccacagggcac

SEQ ID NO: 3421448 - RNA, 14 nt, Human
accuggucucuccu

SEQ ID NO: 3421449 - RNA, 14 nt, Human
accuggugcuggau

SEQ ID NO: 3421450 - RNA, 22 nt, Human
accuggugcuggauauuuucaa

SEQ ID NO: 3421451 - RNA, 20 nt, Human
accuguaaaacuuuauuuua

SEQ ID NO: 3421452 - RNA, 15 nt, Human
accuguaacuuuugu

SEQ ID NO: 3421453 - RNA, 15 nt, Human
accuguaagugucuu

SEQ ID NO: 3421454 - RNA, 15 nt, Human
accuguaauaaauau

SEQ ID NO: 3421455 - RNA, 18 nt, Human
accuguaauaaauaugag

SEQ ID NO: 3421456 - RNA, 21 nt, Human
accuguaauaaauaugagugc

SEQ ID NO: 3421457 - RNA, 23 nt, Human
accuguaauaaauaugagugcca

SEQ ID NO: 3421458 - RNA, 11 nt, Human
accuguaauca

SEQ ID NO: 3421459 - RNA, 16 nt, Human
accuguaaucccagca

SEQ ID NO: 3421460 - RNA, 17 nt, Human
accuguaaucccagcac

SEQ ID NO: 3421461 - RNA, 15 nt, Human
accuguaaugacagg

SEQ ID NO: 3421462 - RNA, 16 nt, Human
accuguacacugacuu

SEQ ID NO: 3421463 - RNA, 18 nt, Human
accuguagucccagcuac

SEQ ID NO: 3421464 - RNA, 20 nt, Human
accuguauaacccuguuaca

SEQ ID NO: 3421465 - RNA, 23 nt, Human
accuguauaaguggaggcacuuu

SEQ ID NO: 3421466 - RNA, 11 nt, Human
accuguaucuu

SEQ ID NO: 3421467 - RNA, 17 nt, Human
accuguauuuaaaaaua

SEQ ID NO: 3421468 - RNA, 14 nt, Human
accuguauuuaagc

SEQ ID NO: 3421469 - RNA, 21 nt, Human
accuguauuuaagcaaauacu

SEQ ID NO: 3421470 - RNA, 24 nt, Human
accugucaaacaaagccagaagcu

SEQ ID NO: 3421471 - RNA, 19 nt, Human
accugucaccgugagcagc

SEQ ID NO: 3421472 - RNA, 17 nt, Human
accugucaugccccccu

SEQ ID NO: 3421473 - RNA, 11 nt, Human
accuguccaau

SEQ ID NO: 3421474 - RNA, 15 nt, Human
accugucccaccuca

SEQ ID NO: 3421475 - RNA, 21 nt, Human
accuguccccacccuccacuc

SEQ ID NO: 3421476 - RNA, 22 nt, Human
accuguccccacccuccacuca

SEQ ID NO: 3421477 - RNA, 12 nt, Human
accugucuccuu

SEQ ID NO: 3421478 - RNA, 22 nt, Human
accugucuccuuucaccccagg

SEQ ID NO: 3421479 - RNA, 17 nt, Human
accugucuccuuucuca

SEQ ID NO: 3421480 - RNA, 13 nt, Human
accugucugcucc

SEQ ID NO: 3421481 - RNA, 14 nt, Human
accugucugcucca

SEQ ID NO: 3421482 - RNA, 19 nt, Human
accugucugcuccagcucu

SEQ ID NO: 3421483 - RNA, 21 nt, Human
accugucuugccuuuuucauu

SEQ ID NO: 3421484 - RNA, 17 nt, Human
accugugagcccagcug

SEQ ID NO: 3421485 - RNA, 19 nt, Human
accugugaugaggggagga

SEQ ID NO: 3421486 - RNA, 22 nt, Human
accugugcuucgggcccuuccc

SEQ ID NO: 3421487 - RNA, 23 nt, Human
accugugcuucgggcccuuccca

SEQ ID NO: 3421488 - RNA, 20 nt, Human
accuguggaacauaaaaagg

SEQ ID NO: 3421489 - RNA, 10 nt, Human
accuguggau

SEQ ID NO: 3421490 - RNA, 15 nt, Human
accuguggcucuaca

SEQ ID NO: 3421491 - RNA, 13 nt, Human
accugugggugua

SEQ ID NO: 3421492 - RNA, 13 nt, Human
accugugucacua

SEQ ID NO: 3421493 - RNA, 11 nt, Human
accugugugcu

SEQ ID NO: 3421494 - RNA, 16 nt, Human
accuguguggacagga

SEQ ID NO: 3421495 - RNA, 20 nt, Human
accugugugguacucugaaa

SEQ ID NO: 3421496 - RNA, 22 nt, Human
accugugugguacucugaaaca

SEQ ID NO: 3421497 - RNA, 17 nt, Human
accuguguuucuugccu

SEQ ID NO: 3421498 - RNA, 21 nt, Human
accuguguuucuugccucauu

SEQ ID NO: 3421499 - RNA, 17 nt, Human
accuguuaccuacuuug

SEQ ID NO: 3421500 - RNA, 17 nt, Human
accuguuagcagacagg

SEQ ID NO: 3421501 - RNA, 20 nt, Human
accuguucagugucccgggc

SEQ ID NO: 3421502 - RNA, 14 nt, Human
accuguugagcauc

SEQ ID NO: 3421503 - RNA, 20 nt, Human
accuguugagcaucacagaa

SEQ ID NO: 3421504 - RNA, 21 nt, Human
accuguugcuuacaauuuuuu

SEQ ID NO: 3421505 - RNA, 14 nt, Human
accuguugguucca

SEQ ID NO: 3421506 - RNA, 15 nt, Human
accuguuuaaauugc

SEQ ID NO: 3421507 - RNA, 16 nt, Human
accuguuuuuaagcug

SEQ ID NO: 3421508 - RNA, 15 nt, Human
accucugaagucucu

SEQ ID NO: 3421509 - RNA, 15 nt, Human
accucugacagcagc

SEQ ID NO: 3421510 - RNA, 20 nt, Human
accucugacagcagcaucuc

SEQ ID NO: 3421511 - RNA, 23 nt, Human
accucugauuuauuuuguaugaa

SEQ ID NO: 3421512 - RNA, 21 nt, Human
accucugcacuacugacaugu

SEQ ID NO: 3421513 - RNA, 21 nt, Human
accucugcagcaauaaagcag

SEQ ID NO: 3421514 - RNA, 13 nt, Human
accucugccucaa

SEQ ID NO: 3421515 - RNA, 12 nt, Human
accucugccuga

SEQ ID NO: 3421516 - RNA, 19 nt, Human
accucugcuucccagguuc

SEQ ID NO: 3421517 - RNA, 19 nt, Human
accucugcuuuuaucucag

SEQ ID NO: 3421518 - RNA, 14 nt, Human
accucuggacuggc

SEQ ID NO: 3421519 - RNA, 15 nt, Human
accucuggacuggcu

SEQ ID NO: 3421520 - RNA, 19 nt, Human
accucuggacuggcuagag

SEQ ID NO: 3421521 - RNA, 13 nt, Human
accucuggcugac

SEQ ID NO: 3421522 - RNA, 16 nt, Human
accucuggcugacuaa

SEQ ID NO: 3421523 - RNA, 21 nt, Human
accucuguauuugaaucagcc

SEQ ID NO: 3421524 - RNA, 13 nt, Human
accucugucucau

SEQ ID NO: 3421525 - RNA, 15 nt, Human
accucugucucaucc

SEQ ID NO: 3421526 - RNA, 23 nt, Human
accucugucucauccuccuggaa

SEQ ID NO: 3421527 - RNA, 19 nt, Human
accucugucuuggcuuuca

SEQ ID NO: 3421528 - RNA, 18 nt, Human
accucugugaccucaggc

SEQ ID NO: 3421529 - RNA, 21 nt, Human
accucugugaggaaagcacac

SEQ ID NO: 3421530 - RNA, 15 nt, Human
accucugugugcucc

SEQ ID NO: 3421531 - RNA, 15 nt, Human
accucuguucagugu

SEQ ID NO: 3421532 - RNA, 17 nt, Human
accucuguucaguguaa

SEQ ID NO: 3421533 - RNA, 18 nt, Human
accucuguucaguguaaa

SEQ ID NO: 3421534 - RNA, 19 nt, Human
accucuguucaguguaaau

SEQ ID NO: 3421535 - RNA, 16 nt, Human
accucuguuguccucc

SEQ ID NO: 3421536 - RNA, 22 nt, Human
accucuguuguccuccccuugg

SEQ ID NO: 3421537 - RNA, 16 nt, Human
accucuuaauauucug

SEQ ID NO: 3421538 - RNA, 14 nt, Human
accucuuagcugag

SEQ ID NO: 3421539 - RNA, 15 nt, Human
acacuauuuuaugca

SEQ ID NO: 3421540 - RNA, 17 nt, Human
acacucaaaucaagaaa

SEQ ID NO: 3421541 - RNA, 15 nt, Human
acacucaagaagcag

SEQ ID NO: 3421542 - RNA, 16 nt, Human
acacucaagaagcagg

SEQ ID NO: 3421543 - RNA, 17 nt, Human
acacucaagaagcaggc

SEQ ID NO: 3421544 - RNA, 22 nt, Human
acacucacauuuauucugcuca

SEQ ID NO: 3421545 - RNA, 18 nt, Human
acacucaccucuaaaaca

SEQ ID NO: 3421546 - RNA, 21 nt, Human
acacucacuccugagaccccu

SEQ ID NO: 3421547 - RNA, 16 nt, Human
acacucagaagccugg

SEQ ID NO: 3421548 - RNA, 19 nt, Human
acacucagaagccuggggg

SEQ ID NO: 3421549 - RNA, 19 nt, Human
acacucagaccugaauucu

SEQ ID NO: 3421550 - RNA, 13 nt, Human
acacucagcacaa

SEQ ID NO: 3421551 - RNA, 20 nt, Human
acacucagcacccccuucuc

SEQ ID NO: 3421552 - RNA, 19 nt, Human
acacucaugcauuguccuc

SEQ ID NO: 3421553 - RNA, 16 nt, Human
acacucauucauuacu

SEQ ID NO: 3421554 - RNA, 21 nt, Human
acacucauugaccugaggccc

SEQ ID NO: 3421555 - RNA, 23 nt, Human
acacucauugaccugaggcccuu

SEQ ID NO: 3421556 - RNA, 14 nt, Human
acacuccaagauau

SEQ ID NO: 3421557 - RNA, 16 nt, Human
acacuccaagauaugg

SEQ ID NO: 3421558 - RNA, 15 nt, Human
acacuccaauuaagg

SEQ ID NO: 3421559 - RNA, 12 nt, Human
acacuccagccu

SEQ ID NO: 3421560 - RNA, 14 nt, Human
acacuccagccuga

SEQ ID NO: 3421561 - RNA, 14 nt, Human
acacuccagugaga

SEQ ID NO: 3421562 - RNA, 21 nt, Human
acacuccagugccagcaauga

SEQ ID NO: 3421563 - RNA, 15 nt, Human
acacuccccgaaguc

SEQ ID NO: 3421564 - RNA, 15 nt, Human
acacuccccugcacu

SEQ ID NO: 3421565 - RNA, 17 nt, Human
acacuccccugcacugg

SEQ ID NO: 3421566 - RNA, 14 nt, Human
acacucccuugggc

SEQ ID NO: 3421567 - RNA, 20 nt, Human
acacuccuagagaacgcagc

SEQ ID NO: 3421568 - RNA, 12 nt, Human
acacuccucugc

SEQ ID NO: 3421569 - RNA, 14 nt, Human
acacuccucugcgu

SEQ ID NO: 3421570 - RNA, 11 nt, Human
acacuccuuca

SEQ ID NO: 3421571 - RNA, 13 nt, Human
acacuccuucaca

SEQ ID NO: 3421572 - RNA, 20 nt, Human
acacucucaaagcaaauaau

SEQ ID NO: 3421573 - RNA, 12 nt, Human
acacucuccugg

SEQ ID NO: 3421574 - RNA, 21 nt, Human
acacucuccugggccccuccc

SEQ ID NO: 3421575 - RNA, 15 nt, Human
acacucuccuugcag

SEQ ID NO: 3421576 - RNA, 20 nt, Human
acacucugaauuccaaguag

SEQ ID NO: 3421577 - RNA, 13 nt, Human
acacucugagacu

SEQ ID NO: 3421578 - RNA, 13 nt, Human
acacucugcucug

SEQ ID NO: 3421579 - RNA, 12 nt, Human
acacucugcugu

SEQ ID NO: 3421580 - RNA, 16 nt, Human
acacucuuuguaagag

SEQ ID NO: 3421581 - RNA, 21 nt, Human
acacucuuuugcuuuauucca

SEQ ID NO: 3421582 - RNA, 21 nt, Human
acacugaaagcucuguugcaa

SEQ ID NO: 3421583 - RNA, 17 nt, Human
acacugaaaguuuugua

SEQ ID NO: 3421584 - RNA, 12 nt, Human
acacugaaauaa

SEQ ID NO: 3421585 - RNA, 18 nt, Human
acacugaaauauacacac

SEQ ID NO: 3421586 - RNA, 21 nt, Human
acacugaaauauacacacagc

SEQ ID NO: 3421587 - RNA, 22 nt, Human
acacugaaauauacacacagca

SEQ ID NO: 3421588 - RNA, 12 nt, Human
acacugaagaag

SEQ ID NO: 3421589 - RNA, 20 nt, Human
acacugaauuuuuaugugug

SEQ ID NO: 3421590 - RNA, 22 nt, Human
acacugacaccuuugcaggcau

SEQ ID NO: 3421591 - RNA, 22 nt, Human
acacugaccuuggagagacaca

SEQ ID NO: 3421592 - RNA, 22 nt, Human
acacugagaauguaagaacuac

SEQ ID NO: 3421593 - RNA, 14 nt, Human
acacugagcuguca

SEQ ID NO: 3421594 - RNA, 14 nt, Human
acacugaggcaggg

SEQ ID NO: 3421595 - RNA, 16 nt, Human
acacugaggcagggaa

SEQ ID NO: 3421596 - RNA, 17 nt, Human
acacugaggcagggaag

SEQ ID NO: 3421597 - RNA, 21 nt, Human
acacugauuuccccuuuugca

SEQ ID NO: 3421598 - RNA, 16 nt, Human
acacugcaaucauaug

SEQ ID NO: 3421599 - RNA, 16 nt, Human
acacugcaggcaucac

SEQ ID NO: 3421600 - RNA, 15 nt, Human
acacugcauguuugu

SEQ ID NO: 3421601 - RNA, 21 nt, Human
acacugccaacugaucuguua

SEQ ID NO: 3421602 - RNA, 16 nt, Human
acacugccugccuuaa

SEQ ID NO: 3421603 - RNA, 16 nt, Human
acacugccuguauacu

SEQ ID NO: 3421604 - RNA, 19 nt, Human
acacugccuguauacuuua

SEQ ID NO: 3421605 - RNA, 19 nt, Human
acacugccuuuuuauuuau

SEQ ID NO: 3421606 - RNA, 21 nt, Human
acacugcgcuuuauuuucuua

SEQ ID NO: 3421607 - RNA, 18 nt, Human
acacugcuaggugggcca

SEQ ID NO: 3421608 - RNA, 13 nt, Human
acacugcucuaac

SEQ ID NO: 3421609 - RNA, 17 nt, Human
acacugcucuaacagcc

SEQ ID NO: 3421610 - RNA, 16 nt, Human
acacuggacuccggcc

SEQ ID NO: 3421611 - RNA, 19 nt, Human
acacuggaggagagaagaa

SEQ ID NO: 3421612 - RNA, 17 nt, Human
acacuggcuaaagauaa

SEQ ID NO: 3421613 - RNA, 21 nt, Human
acacuggcucacccaguccug

SEQ ID NO: 3421614 - RNA, 14 nt, Human
acacuggcugccag

SEQ ID NO: 3421615 - RNA, 16 nt, Human
acacuggcugccagcu

SEQ ID NO: 3421616 - RNA, 14 nt, Human
acacugggaaacag

SEQ ID NO: 3421617 - RNA, 19 nt, Human
acacugggacuugcaaaaa

SEQ ID NO: 3421618 - RNA, 20 nt, Human
acacugggagaaaugaaaaa

SEQ ID NO: 3421619 - RNA, 17 nt, Human
acacuggggacuuggcc

SEQ ID NO: 3421620 - RNA, 19 nt, Human
acacugguauuccugccuc

SEQ ID NO: 3421621 - RNA, 15 nt, Human
acacuggucugcugu

SEQ ID NO: 3421622 - RNA, 17 nt, Human
acacugguucucaauga

SEQ ID NO: 3421623 - RNA, 18 nt, Human
acacugguucucaaugaa

SEQ ID NO: 3421624 - RNA, 22 nt, Human
acacuguaguaaauaaugcuuu

SEQ ID NO: 3421625 - RNA, 18 nt, Human
acacuguauguuauagaa

SEQ ID NO: 3421626 - RNA, 19 nt, Human
acacugugacacacuacac

SEQ ID NO: 3421627 - RNA, 15 nt, Human
acacugugcccuggu

SEQ ID NO: 3421628 - RNA, 13 nt, Human
acacugugcuaua

SEQ ID NO: 3421629 - RNA, 17 nt, Human
acacuguggguguguga

SEQ ID NO: 3421630 - RNA, 18 nt, Human
acacuguguacugcaguu

SEQ ID NO: 3421631 - RNA, 11 nt, Human
acacugugucc

SEQ ID NO: 3421632 - RNA, 18 nt, Human
acacuguguccuggugcu

SEQ ID NO: 3421633 - RNA, 16 nt, Human
acacuguuagaacacu

SEQ ID NO: 3421634 - RNA, 20 nt, Human
acacuguuagaacacuauuu

SEQ ID NO: 3421635 - RNA, 22 nt, Human
acacuguuagaacacuauuuuc

SEQ ID NO: 3421636 - RNA, 14 nt, Human
acacuguucucugc

SEQ ID NO: 3421637 - RNA, 15 nt, Human
acacuguucucugcc

SEQ ID NO: 3421638 - RNA, 14 nt, Human
acacuguucugaaa

SEQ ID NO: 3421639 - RNA, 20 nt, Human
acacuguucugaaagugacu

SEQ ID NO: 3421640 - RNA, 12 nt, Human
acacuguucuua

SEQ ID NO: 3421641 - RNA, 21 nt, Human
acacuguucuuagcucaauga

SEQ ID NO: 3421642 - RNA, 23 nt, Human
acacuguucuuagcucaaugagc

SEQ ID NO: 3421643 - RNA, 17 nt, Human
acacuguugauaaaaac

SEQ ID NO: 3421644 - RNA, 19 nt, Human
acacuguugauaaaaacuc

SEQ ID NO: 3421645 - RNA, 18 nt, Human
acacuguuucaaacuuua

SEQ ID NO: 3421646 - RNA, 15 nt, Human
acacuuaaaaauggu

SEQ ID NO: 3421647 - RNA, 16 nt, Human
acacuuaacagaugca

SEQ ID NO: 3421648 - RNA, 23 nt, Human
acacuuaagguugggugcugcua

SEQ ID NO: 3421649 - RNA, 14 nt, Human
acacuuaauacuac

SEQ ID NO: 3421650 - RNA, 16 nt, Human
acacuuacacuuuaug

SEQ ID NO: 3421651 - RNA, 20 nt, Human
acacuuauuggaacucugcu

SEQ ID NO: 3421652 - RNA, 18 nt, Human
acacuucaaggugacaga

SEQ ID NO: 3421653 - RNA, 21 nt, Human
acgccugagcccagggaggcc

SEQ ID NO: 3421654 - RNA, 13 nt, Human
acgccugaggaac

SEQ ID NO: 3421655 - RNA, 15 nt, Human
acgccugaggcaauu

SEQ ID NO: 3421656 - RNA, 19 nt, Human
acgccugcaaacgcugccu

SEQ ID NO: 3421657 - RNA, 22 nt, Human
acgccugcaaacgcugccugcc

SEQ ID NO: 3421658 - RNA, 23 nt, Human
acgccugcaaacgcugccugccc

SEQ ID NO: 3421659 - RNA, 15 nt, Human
acgccugccuccccu

SEQ ID NO: 3421660 - RNA, 17 nt, Human
acgccugcuugucccug

SEQ ID NO: 3421661 - RNA, 11 nt, Human
acgccuggcua

SEQ ID NO: 3421662 - RNA, 14 nt, Human
acgccuuccccuca

SEQ ID NO: 3421663 - RNA, 17 nt, Human
acgccuuccccucagcc

SEQ ID NO: 3421664 - RNA, 19 nt, Human
acgcgaaaccaauuccuca

SEQ ID NO: 3421665 - RNA, 23 nt, Human
acgcgaaaguaucaccagggugc

SEQ ID NO: 3421666 - RNA, 22 nt, Human
acgcgcagaugugcagcagauu

SEQ ID NO: 3421667 - RNA, 18 nt, Human
acgcgccccccucccaga

SEQ ID NO: 3421668 - RNA, 16 nt, Human
acgcgcgcgcacacac

SEQ ID NO: 3421669 - RNA, 18 nt, Human
acgcgguacaaaggaaaa

SEQ ID NO: 3421670 - RNA, 12 nt, Human
acgcguauuuac

SEQ ID NO: 3421671 - RNA, 14 nt, Human
acgcguugaaauug

SEQ ID NO: 3421672 - RNA, 20 nt, Human
acgcguugaaauuguaauua

SEQ ID NO: 3421673 - RNA, 18 nt, Human
acgcuaaagagcccuugc

SEQ ID NO: 3421674 - RNA, 21 nt, Human
acgcuaaagagcccuugccuc

SEQ ID NO: 3421675 - RNA, 18 nt, Human
acgcuacccgggaagggg

SEQ ID NO: 3421676 - RNA, 20 nt, Human
acgcuaccucucugucccuu

SEQ ID NO: 3421677 - RNA, 13 nt, Human
acgcuccaaaguc

SEQ ID NO: 3421678 - RNA, 16 nt, Human
acgcuccagcugcccc

SEQ ID NO: 3421679 - RNA, 18 nt, Human
acgcuccccgccuguucc

SEQ ID NO: 3421680 - RNA, 20 nt, Human
acgcuccuuucugaucuuca

SEQ ID NO: 3421681 - RNA, 14 nt, Human
acgcucucuggccu

SEQ ID NO: 3421682 - RNA, 14 nt, Human
acgcugagccaccu

SEQ ID NO: 3421683 - RNA, 15 nt, Human
acgcugccugcccac

SEQ ID NO: 3421684 - RNA, 17 nt, Human
acgcugcucugccccag

SEQ ID NO: 3421685 - RNA, 23 nt, Human
acgcuggaccuugaacuggguac

SEQ ID NO: 3421686 - RNA, 18 nt, Human
acgcuggagugcagugag

SEQ ID NO: 3421687 - RNA, 20 nt, Human
acgcugguagagauggagga

SEQ ID NO: 3421688 - RNA, 11 nt, Human
acgcugucucc

SEQ ID NO: 3421689 - RNA, 12 nt, Human
acgcugucucca

SEQ ID NO: 3421690 - RNA, 17 nt, Human
acgcugucuccagaccc

SEQ ID NO: 3421691 - RNA, 20 nt, Human
acgcugucuccagaccccca

SEQ ID NO: 3421692 - RNA, 19 nt, Human
acgcugugcugcccugccc

SEQ ID NO: 3421693 - RNA, 21 nt, Human
acgcuuaaaggugucuuccuc

SEQ ID NO: 3421694 - RNA, 14 nt, Human
acgcuuaaauacag

SEQ ID NO: 3421695 - RNA, 16 nt, Human
acgcuucacagugauc

SEQ ID NO: 3421696 - RNA, 13 nt, Human
acgcuucugaaug

SEQ ID NO: 3421697 - RNA, 18 nt, Human
acgcuucugaaugcugcu

SEQ ID NO: 3421698 - RNA, 13 nt, Human
acgcuucuucuuu

SEQ ID NO: 3421699 - RNA, 21 nt, Human
acgcuuguagaacucacucug

SEQ ID NO: 3421700 - RNA, 23 nt, Human
acgcuuguagaacucacucuggg

SEQ ID NO: 3421701 - RNA, 22 nt, Human
acgcuuuuaaugaaaaggaauc

SEQ ID NO: 3421702 - RNA, 15 nt, Human
acggaaagugcuguc

SEQ ID NO: 3421703 - RNA, 22 nt, Human
acggaagaagagaucaggaaga

SEQ ID NO: 3421704 - RNA, 19 nt, Human
acggaaggaccuauguuug

SEQ ID NO: 3421705 - RNA, 20 nt, Human
acggaauaagagaccuguuu

SEQ ID NO: 3421706 - RNA, 15 nt, Human
acggaauaguuggcu

SEQ ID NO: 3421707 - RNA, 23 nt, Human
acggaccaaagggagucugccag

SEQ ID NO: 3421708 - RNA, 15 nt, Human
acggacgcuggcucc

SEQ ID NO: 3421709 - RNA, 13 nt, Human
acggagagcgccu

SEQ ID NO: 3421710 - RNA, 20 nt, Human
acggagcccagcccucccca

SEQ ID NO: 3421711 - RNA, 18 nt, Human
acggagccccaggccucu

SEQ ID NO: 3421712 - RNA, 19 nt, Human
acggagcggauugcaaagc

SEQ ID NO: 3421713 - RNA, 21 nt, Human
acggagcggauugcaaagcaa

SEQ ID NO: 3421714 - RNA, 17 nt, Human
acggaggagaauuaagu

SEQ ID NO: 3421715 - RNA, 20 nt, Human
acggaggccugcgacccugg

SEQ ID NO: 3421716 - RNA, 21 nt, Human
acggagucccaccuuggcugc

SEQ ID NO: 3421717 - RNA, 16 nt, Human
acggaucagaaauaca

SEQ ID NO: 3421718 - RNA, 20 nt, Human
acggauccauguagcaggac

SEQ ID NO: 3421719 - RNA, 16 nt, Human
acggaugauuggauua

SEQ ID NO: 3421720 - RNA, 14 nt, Human
acggaugauuucua

SEQ ID NO: 3421721 - RNA, 13 nt, Human
acggauuauuuuu

SEQ ID NO: 3421722 - RNA, 17 nt, Human
acggauuauuuuuucag

SEQ ID NO: 3421723 - RNA, 20 nt, Human
acggauuauuuuuucagacc

SEQ ID NO: 3421724 - RNA, 12 nt, Human
acggauuccaaa

SEQ ID NO: 3421725 - RNA, 14 nt, Human
acggauuuucaguu

SEQ ID NO: 3421726 - RNA, 15 nt, Human
acggcacuguggccu

SEQ ID NO: 3421727 - RNA, 21 nt, Human
acggcaggacaacgaggaagc

SEQ ID NO: 3421728 - RNA, 22 nt, Human
acggcaggacaacgaggaagcc

SEQ ID NO: 3421729 - RNA, 18 nt, Human
acggcaggcucacugcca

SEQ ID NO: 3421730 - RNA, 20 nt, Human
acggcaggcucacugccagg

SEQ ID NO: 3421731 - RNA, 16 nt, Human
acggccaagaauguac

SEQ ID NO: 3421732 - RNA, 19 nt, Human
acggccacacagcugccgg

SEQ ID NO: 3421733 - RNA, 20 nt, Human
acggccacacagcugccggu

SEQ ID NO: 3421734 - RNA, 18 nt, Human
acggccacaucaaagagg

SEQ ID NO: 3421735 - RNA, 13 nt, Human
acggccaggccag

SEQ ID NO: 3421736 - RNA, 16 nt, Human
acggccaggccagagg

SEQ ID NO: 3421737 - RNA, 15 nt, Human
acggccaucucuuug

SEQ ID NO: 3421738 - RNA, 12 nt, Human
acggcccugcaa

SEQ ID NO: 3421739 - RNA, 13 nt, Human
acggcccugcaau

SEQ ID NO: 3421740 - RNA, 15 nt, Human
acggccgcuccaggg

SEQ ID NO: 3421741 - RNA, 16 nt, Human
acggcgcccccagugu

SEQ ID NO: 3421742 - RNA, 19 nt, Human
acggcucgauuucuccagg

SEQ ID NO: 3421743 - RNA, 19 nt, Human
acggcucuagguggggcgg

SEQ ID NO: 3421744 - RNA, 19 nt, Human
acuacaugugguuuauaga

SEQ ID NO: 3421745 - RNA, 20 nt, Human
acuacauuagguugugaaug

SEQ ID NO: 3421746 - RNA, 22 nt, Human
acuacauugaguagacacauuu

SEQ ID NO: 3421747 - RNA, 14 nt, Human
acuacauuuuuuca

SEQ ID NO: 3421748 - RNA, 15 nt, Human
acuaccaaaggacac

SEQ ID NO: 3421749 - RNA, 21 nt, Human
acuacccacguucucacaccc

SEQ ID NO: 3421750 - RNA, 22 nt, Human
acuacccagguuaagaaaauaa

SEQ ID NO: 3421751 - RNA, 19 nt, Human
acuacccauagacaugaaa

SEQ ID NO: 3421752 - RNA, 20 nt, Human
acuacccaucgguguccauu

SEQ ID NO: 3421753 - RNA, 16 nt, Human
acuacccuuaauuacu

SEQ ID NO: 3421754 - RNA, 19 nt, Human
acuaccuccucagggaugg

SEQ ID NO: 3421755 - RNA, 14 nt, Human
acuaccuggcugcg

SEQ ID NO: 3421756 - RNA, 22 nt, Human
acuaccuguaaugacaggccug

SEQ ID NO: 3421757 - RNA, 13 nt, Human
acuaccugucaag

SEQ ID NO: 3421758 - RNA, 13 nt, Human
acuacgccuggcu

SEQ ID NO: 3421759 - RNA, 18 nt, Human
acuacggaauaguuggcu

SEQ ID NO: 3421760 - RNA, 20 nt, Human
acuacgggggggagaaggaa

SEQ ID NO: 3421761 - RNA, 15 nt, Human
acuacguuaagggaa

SEQ ID NO: 3421762 - RNA, 19 nt, Human
acuacuagaugucuuuagg

SEQ ID NO: 3421763 - RNA, 19 nt, Human
acuacuaguuuuuacuuuu

SEQ ID NO: 3421764 - RNA, 13 nt, Human
acuacuauucaaa

SEQ ID NO: 3421765 - RNA, 16 nt, Human
acuacucaaagcaaaa

SEQ ID NO: 3421766 - RNA, 21 nt, Human
acuacucauacuuaagcaaaa

SEQ ID NO: 3421767 - RNA, 14 nt, Human
acuacuccucugca

SEQ ID NO: 3421768 - RNA, 13 nt, Human
acuacucugugcc

SEQ ID NO: 3421769 - RNA, 22 nt, Human
acuacugccuuuagaaaauaua

SEQ ID NO: 3421770 - RNA, 18 nt, Human
acuacugggacucuucag

SEQ ID NO: 3421771 - RNA, 13 nt, Human
acuacuggguguc

SEQ ID NO: 3421772 - RNA, 20 nt, Human
acuacugggugucauuucau

SEQ ID NO: 3421773 - RNA, 21 nt, Human
acuacugggugucauuucauu

SEQ ID NO: 3421774 - RNA, 18 nt, Human
acuacuguggaaaaauau

SEQ ID NO: 3421775 - RNA, 16 nt, Human
acuacuguguuccugg

SEQ ID NO: 3421776 - RNA, 18 nt, Human
acuacuguguuccuggca

SEQ ID NO: 3421777 - RNA, 21 nt, Human
acuacuguguuccuggcaaua

SEQ ID NO: 3421778 - RNA, 20 nt, Human
acuacuuuaauaaagaauua

SEQ ID NO: 3421779 - RNA, 15 nt, Human
acuagaacacagaaa

SEQ ID NO: 3421780 - RNA, 15 nt, Human
acuagaaccuggagg

SEQ ID NO: 3421781 - RNA, 13 nt, Human
acuagaacucucc

SEQ ID NO: 3421782 - RNA, 15 nt, Human
acuagaauuuauuca

SEQ ID NO: 3421783 - RNA, 15 nt, Human
acuagacaagccaga

SEQ ID NO: 3421784 - RNA, 21 nt, Human
acuagacaagccagaacuuga

SEQ ID NO: 3421785 - RNA, 18 nt, Human
acuagacaccaaaguucu

SEQ ID NO: 3421786 - RNA, 16 nt, Human
acuagacauucugucg

SEQ ID NO: 3421787 - RNA, 11 nt, Human
acuagagaaac

SEQ ID NO: 3421788 - RNA, 20 nt, Human
acuagagaaugcacagauau

SEQ ID NO: 3421789 - RNA, 23 nt, Human
acuagagaaugcacagauauacu

SEQ ID NO: 3421790 - RNA, 16 nt, Human
acuagagauauuuugu

SEQ ID NO: 3421791 - RNA, 17 nt, Human
acuagagauauuuugua

SEQ ID NO: 3421792 - RNA, 21 nt, Human
acuagagauauuuuguaaaau

SEQ ID NO: 3421793 - RNA, 18 nt, Human
acuagagggaccucuccc

SEQ ID NO: 3421794 - RNA, 14 nt, Human
acuagaggugagaa

SEQ ID NO: 3421795 - RNA, 21 nt, Human
acuagaggugagaaauuuaaa

SEQ ID NO: 3421796 - RNA, 15 nt, Human
acuagagucugaaca

SEQ ID NO: 3421797 - RNA, 14 nt, Human
acguauuuuaaaag

SEQ ID NO: 3421798 - RNA, 14 nt, Human
acgucaaacaugaa

SEQ ID NO: 3421799 - RNA, 18 nt, Human
acgucagauguuuaaaac

SEQ ID NO: 3421800 - RNA, 20 nt, Human
acgucagauguuuaaaacac

SEQ ID NO: 3421801 - RNA, 13 nt, Human
acgucccccuggg

SEQ ID NO: 3421802 - RNA, 16 nt, Human
acguccugccaccugg

SEQ ID NO: 3421803 - RNA, 21 nt, Human
acgucuauuucaucagaacag

SEQ ID NO: 3421804 - RNA, 13 nt, Human
acgucugacaggc

SEQ ID NO: 3421805 - RNA, 12 nt, Human
acgucugugcca

SEQ ID NO: 3421806 - RNA, 14 nt, Human
acgucuuaaauauu

SEQ ID NO: 3421807 - RNA, 15 nt, Human
acgucuuucuuuuuu

SEQ ID NO: 3421808 - RNA, 19 nt, Human
acgugacacaaacacacac

SEQ ID NO: 3421809 - RNA, 21 nt, Human
acgugacacaaacacacacaa

SEQ ID NO: 3421810 - RNA, 17 nt, Human
acgugacagugccuggg

SEQ ID NO: 3421811 - RNA, 15 nt, Human
acgugacccucugcu

SEQ ID NO: 3421812 - RNA, 14 nt, Human
acgugacugcccca

SEQ ID NO: 3421813 - RNA, 18 nt, Human
acgugacugccccaacuc

SEQ ID NO: 3421814 - RNA, 21 nt, Human
acgugacuguggcacacgccu

SEQ ID NO: 3421815 - RNA, 16 nt, Human
acgugagaucauucac

SEQ ID NO: 3421816 - RNA, 23 nt, Human
acgugagccagguaaugagggac

SEQ ID NO: 3421817 - RNA, 11 nt, Human
acgugaguccu

SEQ ID NO: 3421818 - RNA, 19 nt, Human
acgugcaauuuguuugugc

SEQ ID NO: 3421819 - RNA, 22 nt, Human
acgugcaauuuguuugugcuuc

SEQ ID NO: 3421820 - RNA, 20 nt, Human
acgugcaccuguacucagga

SEQ ID NO: 3421821 - RNA, 12 nt, Human
acgugcauugug

SEQ ID NO: 3421822 - RNA, 17 nt, Human
acgugccuuuugcaccc

SEQ ID NO: 3421823 - RNA, 22 nt, Human
acgugccuuuugcaccccuccc

SEQ ID NO: 3421824 - RNA, 18 nt, Human
acguggaaccucugucuc

SEQ ID NO: 3421825 - RNA, 18 nt, Human
acguggagagcuggugcc

SEQ ID NO: 3421826 - RNA, 19 nt, Human
acguggagagcuggugccc

SEQ ID NO: 3421827 - RNA, 22 nt, Human
acguggagcgggguaugaagag

SEQ ID NO: 3421828 - RNA, 13 nt, Human
acguggcaccucc

SEQ ID NO: 3421829 - RNA, 15 nt, Human
acguggcaccuccuc

SEQ ID NO: 3421830 - RNA, 18 nt, Human
acguggcacuauauucug

SEQ ID NO: 3421831 - RNA, 19 nt, Human
acguggcucagccagcacu

SEQ ID NO: 3421832 - RNA, 15 nt, Human
acguggcucugcugg

SEQ ID NO: 3421833 - RNA, 14 nt, Human
acguggcugcuuca

SEQ ID NO: 3421834 - RNA, 17 nt, Human
acguggcugcuucaagg

SEQ ID NO: 3421835 - RNA, 23 nt, Human
acguggcugcuucaaggauccug

SEQ ID NO: 3421836 - RNA, 23 nt, Human
acgugggaguucagcugcuucuc

SEQ ID NO: 3421837 - RNA, 19 nt, Human
acgugggcaaacaggcagu

SEQ ID NO: 3421838 - RNA, 16 nt, Human
acgugggcuccccucu

SEQ ID NO: 3421839 - RNA, 23 nt, Human
acgugggcugggcccacaaaggc

SEQ ID NO: 3421840 - RNA, 14 nt, Human
acguggggcagcac

SEQ ID NO: 3421841 - RNA, 19 nt, Human
acguggggcagcacagaga

SEQ ID NO: 3421842 - RNA, 22 nt, Human
acgugggucuucagggggccag

SEQ ID NO: 3421843 - RNA, 11 nt, Human
acguguagugu

SEQ ID NO: 3421844 - RNA, 20 nt, Human
acguguaguguccauuuugu

SEQ ID NO: 3421845 - RNA, 13 nt, Human
acguguauguuuu

SEQ ID NO: 3421846 - RNA, 19 nt, Human
acgugucuuccacuuugca

SEQ ID NO: 3421847 - RNA, 12 nt, Human
acgugugauuuu

SEQ ID NO: 3421848 - RNA, 11 nt, Human
acguguuuaaa

SEQ ID NO: 3421849 - RNA, 21 nt, Human
acguuaagggaaggaacucug

SEQ ID NO: 3421850 - RNA, 17 nt, Human
acguuagaccacaaaua

SEQ ID NO: 3421851 - RNA, 18 nt, Human
acguuagaccacaaauag

SEQ ID NO: 3421852 - RNA, 11 nt, Human
acguuccagcc

SEQ ID NO: 3421853 - RNA, 12 nt, Human
acguuccagccg

SEQ ID NO: 3421854 - RNA, 12 nt, Human
acguuggugacg

SEQ ID NO: 3421855 - RNA, 15 nt, Human
acguugugcauuugg

SEQ ID NO: 3421856 - RNA, 14 nt, Human
acguuuaaagugua

SEQ ID NO: 3421857 - RNA, 22 nt, Human
acguuuaaaguucuguguauuu

SEQ ID NO: 3421858 - RNA, 16 nt, Human
acguuuacuuaucuua

SEQ ID NO: 3421859 - RNA, 22 nt, Human
acguuuagcugacaaaauacuu

SEQ ID NO: 3421860 - RNA, 14 nt, Human
acguuuauaaacag

SEQ ID NO: 3421861 - RNA, 21 nt, Human
acguuuauaaacagaaaugga

SEQ ID NO: 3421862 - RNA, 10 nt, Human
acguuucuuu

SEQ ID NO: 3421863 - RNA, 20 nt, Human
acguuucuuuaaccuuguau

SEQ ID NO: 3421864 - RNA, 22 nt, Human
acguuugaagacauugcaccag

SEQ ID NO: 3421865 - RNA, 16 nt, Human
acguuuucuaauugcu

SEQ ID NO: 3421866 - RNA, 22 nt, Human
acguuuuuguaaauuaaucuuu

SEQ ID NO: 3421867 - RNA, 15 nt, Human
acuaaaaacaaaccc

SEQ ID NO: 3421868 - RNA, 16 nt, Human
acuaaaacuacaaaaa

SEQ ID NO: 3421869 - RNA, 17 nt, Human
acuaaaagacauuuguu

SEQ ID NO: 3421870 - RNA, 16 nt, Human
acuaaaagauauaagu

SEQ ID NO: 3421871 - RNA, 19 nt, Human
acuaaaagauauaagugcu

SEQ ID NO: 3421872 - RNA, 12 nt, Human
acuaaaagaucg

SEQ ID NO: 3421873 - RNA, 15 nt, Human
acuaaaauaauuuug

SEQ ID NO: 3421874 - RNA, 12 nt, Human
acuaaaauauau

SEQ ID NO: 3421875 - RNA, 14 nt, Human
acuaaaauaugucu

SEQ ID NO: 3421876 - RNA, 14 nt, Human
acuaaaauguucua

SEQ ID NO: 3421877 - RNA, 18 nt, Human
acuaaacauaugauuuca

SEQ ID NO: 3421878 - RNA, 20 nt, Human
acuaaacuacauuguucuua

SEQ ID NO: 3421879 - RNA, 16 nt, Human
acuaaacucucuuugg

SEQ ID NO: 3421880 - RNA, 13 nt, Human
acuaaacuuaauu

SEQ ID NO: 3421881 - RNA, 18 nt, Human
acuaaacuuggugcuuau

SEQ ID NO: 3421882 - RNA, 19 nt, Human
acuaaacuuggugcuuauu

SEQ ID NO: 3421883 - RNA, 22 nt, Human
acuaaacuuggugcuuauugau

SEQ ID NO: 3421884 - RNA, 23 nt, Human
acuaaacuuggugcuuauugaua

SEQ ID NO: 3421885 - RNA, 16 nt, Human
acuaaacuuucacacc

SEQ ID NO: 3421886 - RNA, 19 nt, Human
acuaaacuuuuuuucugua

SEQ ID NO: 3421887 - RNA, 22 nt, Human
acuaaacuuuuuuucuguacca

SEQ ID NO: 3421888 - RNA, 15 nt, Human
acuaaagaaagauua

SEQ ID NO: 3421889 - RNA, 20 nt, Human
acuaaagaagaucuguaauu

SEQ ID NO: 3421890 - RNA, 14 nt, Human
acuaaagagagaau

SEQ ID NO: 3421891 - RNA, 21 nt, Human
acuaaagagagaauguagaua

SEQ ID NO: 3421892 - RNA, 19 nt, Human
acuaaagcaauagaaacaa

SEQ ID NO: 3421893 - RNA, 20 nt, Human
acuaaaguuguacuuuaaaa

SEQ ID NO: 3421894 - RNA, 19 nt, Human
acuaaauaagaaaauaaca

SEQ ID NO: 3421895 - RNA, 18 nt, Human
acuaaauacuugcuccau

SEQ ID NO: 3421896 - RNA, 15 nt, Human
acuaaauagcaugua

SEQ ID NO: 3421897 - RNA, 15 nt, Human
acuaaaugccuaguu

SEQ ID NO: 3421898 - RNA, 20 nt, Human
acuaaaugccuaguuuuuag

SEQ ID NO: 3421899 - RNA, 13 nt, Human
acuaaauguuaaa

SEQ ID NO: 3421900 - RNA, 18 nt, Human
acuaaauguuaaagaugu

SEQ ID NO: 3421901 - RNA, 19 nt, Human
acuaaauguuaaagaugua

SEQ ID NO: 3421902 - RNA, 12 nt, Human
acuaaauuuaaa

SEQ ID NO: 3421903 - RNA, 19 nt, Human
acuaaauuuaaauuuaaag

SEQ ID NO: 3421904 - RNA, 22 nt, Human
acuaaauuuaaauuuaaagaua

SEQ ID NO: 3421905 - RNA, 13 nt, Human
acuaugaaucuau

SEQ ID NO: 3421906 - RNA, 15 nt, Human
acuaugauuauuaac

SEQ ID NO: 3421907 - RNA, 19 nt, Human
acuaugauuuaauuugaaa

SEQ ID NO: 3421908 - RNA, 15 nt, Human
acuaugauuuggaaa

SEQ ID NO: 3421909 - RNA, 20 nt, Human
acuaugcauggugccccagg

SEQ ID NO: 3421910 - RNA, 21 nt, Human
acuaugcauggugccccagga

SEQ ID NO: 3421911 - RNA, 22 nt, Human
acuaugcauggugccccaggac

SEQ ID NO: 3421912 - RNA, 23 nt, Human
acuaugcauggugccccaggacc

SEQ ID NO: 3421913 - RNA, 19 nt, Human
acuaugccugugucuucuc

SEQ ID NO: 3421914 - RNA, 13 nt, Human
acuauggaaaauc

SEQ ID NO: 3421915 - RNA, 21 nt, Human
acuauggaaaaucagcugcuc

SEQ ID NO: 3421916 - RNA, 19 nt, Human
acuauggagccuggcacag

SEQ ID NO: 3421917 - RNA, 23 nt, Human
acuauggagccuggcacaggacu

SEQ ID NO: 3421918 - RNA, 24 nt, Human
acuauggauaaacuaaacacguga

SEQ ID NO: 3421919 - RNA, 22 nt, Human
acuauggcccuggccuagcaua

SEQ ID NO: 3421920 - RNA, 22 nt, Human
acuaugguagccagaugauaaa

SEQ ID NO: 3421921 - RNA, 17 nt, Human
acuauguaaaaauaacc

SEQ ID NO: 3421922 - RNA, 12 nt, Human
acuauguaaacu

SEQ ID NO: 3421923 - RNA, 22 nt, Human
acuauguacaauauuuuaagca

SEQ ID NO: 3421924 - RNA, 15 nt, Human
acuauguauauacau

SEQ ID NO: 3421925 - RNA, 18 nt, Human
acuauguguuuuucucau

SEQ ID NO: 3421926 - RNA, 17 nt, Human
acuauguugcccaggca

SEQ ID NO: 3421927 - RNA, 19 nt, Human
acuauguugcccaggcagg

SEQ ID NO: 3421928 - RNA, 23 nt, Human
acuauguugcccaggcaggucuu

SEQ ID NO: 3421929 - RNA, 22 nt, Human
acuauuaaaaagguuuacagaa

SEQ ID NO: 3421930 - RNA, 20 nt, Human
acuauuaagcaguaaaaacu

SEQ ID NO: 3421931 - RNA, 22 nt, Human
acuauuaagcaguaaaaacugu

SEQ ID NO: 3421932 - RNA, 22 nt, Human
acuauuaggugcaauuucaagg

SEQ ID NO: 3421933 - RNA, 21 nt, Human
acuauuauaauuuaaugcaug

SEQ ID NO: 3421934 - RNA, 18 nt, Human
acuauuauccccauuucu

SEQ ID NO: 3421935 - RNA, 20 nt, Human
acuauuauuauagguaauca

SEQ ID NO: 3421936 - RNA, 16 nt, Human
acuauucaaacagucu

SEQ ID NO: 3421937 - RNA, 21 nt, Human
acuauucaaacagucucagga

SEQ ID NO: 3421938 - RNA, 18 nt, Human
acuauucauuaaauguuu

SEQ ID NO: 3421939 - RNA, 20 nt, Human
acuauucauuaaauguuuga

SEQ ID NO: 3421940 - RNA, 20 nt, Human
acuauuccccagcagggucu

SEQ ID NO: 3421941 - RNA, 16 nt, Human
acaugucuccuauccu

SEQ ID NO: 3421942 - RNA, 18 nt, Human
acaugucuguucuacaua

SEQ ID NO: 3421943 - RNA, 15 nt, Human
acaugucuuaaugaa

SEQ ID NO: 3421944 - RNA, 20 nt, Human
acaugucuuaaugaaguuug

SEQ ID NO: 3421945 - RNA, 21 nt, Human
acaugucuuaaugaaguuuga

SEQ ID NO: 3421946 - RNA, 13 nt, Human
acaugucuuccau

SEQ ID NO: 3421947 - RNA, 23 nt, Human
acaugucuuuucuugcaugaggc

SEQ ID NO: 3421948 - RNA, 18 nt, Human
acaugugaaaagaauaga

SEQ ID NO: 3421949 - RNA, 14 nt, Human
acaugugacacaua

SEQ ID NO: 3421950 - RNA, 21 nt, Human
acaugugacauuuauauauug

SEQ ID NO: 3421951 - RNA, 15 nt, Human
acaugugauacauuu

SEQ ID NO: 3421952 - RNA, 18 nt, Human
acaugugcacaugcacgu

SEQ ID NO: 3421953 - RNA, 19 nt, Human
acaugugccgaaugugcag

SEQ ID NO: 3421954 - RNA, 18 nt, Human
acauguggaaagugaauu

SEQ ID NO: 3421955 - RNA, 19 nt, Human
acauguggaaagugaauuu

SEQ ID NO: 3421956 - RNA, 19 nt, Human
acauguggcuccucccagc

SEQ ID NO: 3421957 - RNA, 20 nt, Human
acauguggcuugaauuaaga

SEQ ID NO: 3421958 - RNA, 16 nt, Human
acauguggggccaggu

SEQ ID NO: 3421959 - RNA, 13 nt, Human
acaugugguuuau

SEQ ID NO: 3421960 - RNA, 20 nt, Human
acauguguagccugugcaug

SEQ ID NO: 3421961 - RNA, 13 nt, Human
acaugugucaagc

SEQ ID NO: 3421962 - RNA, 19 nt, Human
acaugugucaagcugcuug

SEQ ID NO: 3421963 - RNA, 17 nt, Human
acauguguguauauaug

SEQ ID NO: 3421964 - RNA, 17 nt, Human
acauguguuggcagccu

SEQ ID NO: 3421965 - RNA, 16 nt, Human
acugaaaaccucuccu

SEQ ID NO: 3421966 - RNA, 17 nt, Human
acugaaaagaaggaaag

SEQ ID NO: 3421967 - RNA, 19 nt, Human
acugaaaagaaggaaagau

SEQ ID NO: 3421968 - RNA, 13 nt, Human
acugaaaagagag

SEQ ID NO: 3421969 - RNA, 17 nt, Human
acugaaaagagagcaga

SEQ ID NO: 3421970 - RNA, 18 nt, Human
acugaaaauauuguuuua

SEQ ID NO: 3421971 - RNA, 22 nt, Human
acugaaaauucgaaccaggaaa

SEQ ID NO: 3421972 - RNA, 18 nt, Human
acugaaacagauuucaua

SEQ ID NO: 3421973 - RNA, 17 nt, Human
acugaaacauggcugug

SEQ ID NO: 3421974 - RNA, 16 nt, Human
acugaaaggcuuuuca

SEQ ID NO: 3421975 - RNA, 14 nt, Human
acugaaagugguuu

SEQ ID NO: 3421976 - RNA, 17 nt, Human
acugaaaguguuuccuu

SEQ ID NO: 3421977 - RNA, 15 nt, Human
acugaaaguuuugua

SEQ ID NO: 3421978 - RNA, 16 nt, Human
acugaaauauacacac

SEQ ID NO: 3421979 - RNA, 21 nt, Human
acugaaaugccuuacuuugua

SEQ ID NO: 3421980 - RNA, 23 nt, Human
acugaaaugccuuacuuuguaug

SEQ ID NO: 3421981 - RNA, 13 nt, Human
acugaacaaaaaa

SEQ ID NO: 3421982 - RNA, 22 nt, Human
acugaacaccauugaaggcuua

SEQ ID NO: 3421983 - RNA, 20 nt, Human
acugaacaucugaguccugg

SEQ ID NO: 3421984 - RNA, 18 nt, Human
acugaaccacuuguagau

SEQ ID NO: 3421985 - RNA, 21 nt, Human
acugaaccacuuguagauuug

SEQ ID NO: 3421986 - RNA, 19 nt, Human
acugaaccggcuuuaccaa

SEQ ID NO: 3421987 - RNA, 20 nt, Human
acugaacucugacaacagac

SEQ ID NO: 3421988 - RNA, 13 nt, Human
acugaacuuugaa

SEQ ID NO: 3421989 - RNA, 15 nt, Human
acugaagaggaggag

SEQ ID NO: 3421990 - RNA, 18 nt, Human
acugaagauagaagaaaa

SEQ ID NO: 3421991 - RNA, 19 nt, Human
acugaagauagaagaaaaa

SEQ ID NO: 3421992 - RNA, 21 nt, Human
acugaagauagaagaaaaaag

SEQ ID NO: 3421993 - RNA, 23 nt, Human
acugaagauagaagaaaaaagaa

SEQ ID NO: 3421994 - RNA, 16 nt, Human
acugaagccugcagga

SEQ ID NO: 3421995 - RNA, 18 nt, Human
acugaaggaaaaacacaa

SEQ ID NO: 3421996 - RNA, 22 nt, Human
acugaaggaaaaacacaagcaa

SEQ ID NO: 3421997 - RNA, 17 nt, Human
acugaaggccuggccca

SEQ ID NO: 3421998 - RNA, 20 nt, Human
acugaaggcuaaaaagcaac

SEQ ID NO: 3421999 - RNA, 16 nt, Human
acugaaggugauucac

SEQ ID NO: 3422000 - RNA, 20 nt, Human
acugaaguaaaacaaacaau

SEQ ID NO: 3422001 - RNA, 14 nt, Human
acugaagucugaaa

SEQ ID NO: 3422002 - RNA, 15 nt, Human
acugaagucugaaau

SEQ ID NO: 3422003 - RNA, 13 nt, Human
acugaagugcuua

SEQ ID NO: 3422004 - RNA, 16 nt, Human
acugaaguuucacaug

SEQ ID NO: 3422005 - RNA, 19 nt, Human
acugaaguuucacaugagc

SEQ ID NO: 3422006 - RNA, 18 nt, Human
acugaauaccacucugua

SEQ ID NO: 3422007 - RNA, 19 nt, Human
acugaauaccacucuguaa

SEQ ID NO: 3422008 - RNA, 21 nt, Human
acugaauauuuauauuucacu

SEQ ID NO: 3422009 - RNA, 14 nt, Human
acugaaucuguaca

SEQ ID NO: 3422010 - RNA, 15 nt, Human
acugaaucuguacag

SEQ ID NO: 3422011 - RNA, 21 nt, Human
acugaaugaaacccccacaca

SEQ ID NO: 3422012 - RNA, 14 nt, Human
acugaaugucauug

SEQ ID NO: 3422013 - RNA, 21 nt, Human
acugaauuaaucaucuauaaa

SEQ ID NO: 3422014 - RNA, 19 nt, Human
acugaauuauaagaggcug

SEQ ID NO: 3422015 - RNA, 23 nt, Human
acugaauuauaagaggcugauaa

SEQ ID NO: 3422016 - RNA, 17 nt, Human
acugaauuguccccagu

SEQ ID NO: 3422017 - RNA, 15 nt, Human
acugaauuuguacuu

SEQ ID NO: 3422018 - RNA, 16 nt, Human
acugaauuuuuuugua

SEQ ID NO: 3422019 - RNA, 18 nt, Human
acugaauuuuuuuguaau

SEQ ID NO: 3422020 - RNA, 20 nt, Human
acugacaagcuccauuuaaa

SEQ ID NO: 3422021 - RNA, 14 nt, Human
acugacacaaagga

SEQ ID NO: 3422022 - RNA, 21 nt, Human
acugacacaggaaaccaacac

SEQ ID NO: 3422023 - RNA, 16 nt, Human
acugacacccauguuu

SEQ ID NO: 3422024 - RNA, 21 nt, Human
acugacacccauguuucucug

SEQ ID NO: 3422025 - RNA, 18 nt, Human
acugacagccucccaccc

SEQ ID NO: 3422026 - RNA, 15 nt, Human
acugacauuucuucu

SEQ ID NO: 3422027 - RNA, 14 nt, Human
acugaccagaacua

SEQ ID NO: 3422028 - RNA, 14 nt, Human
acugaccagacaag

SEQ ID NO: 3422029 - RNA, 14 nt, Human
acugaccagcagcu

SEQ ID NO: 3422030 - RNA, 14 nt, Human
acugaccagccucc

SEQ ID NO: 3422031 - RNA, 16 nt, Human
acugaccauccacucu

SEQ ID NO: 3422032 - RNA, 15 nt, Human
acugacccacagccu

SEQ ID NO: 3422033 - RNA, 15 nt, Human
acugacccuggggcu

SEQ ID NO: 3422034 - RNA, 17 nt, Human
acugacccuggggcugg

SEQ ID NO: 3422035 - RNA, 13 nt, Human
acugacccuucca

SEQ ID NO: 3422036 - RNA, 19 nt, Human
acugacccuuccagacaua

SEQ ID NO: 3422037 - RNA, 21 nt, Human
acugaccugucaugccccccu

SEQ ID NO: 3422038 - RNA, 20 nt, Human
acugaccuuggagagacaca

SEQ ID NO: 3422039 - RNA, 13 nt, Human
acugacggacuca

SEQ ID NO: 3422040 - RNA, 18 nt, Human
acugacuaucauaaaauc

SEQ ID NO: 3422041 - RNA, 17 nt, Human
acugacucuuaagaaga

SEQ ID NO: 3422042 - RNA, 20 nt, Human
acugacucuuaagaagacug

SEQ ID NO: 3422043 - RNA, 15 nt, Human
acugacugcagggac

SEQ ID NO: 3422044 - RNA, 22 nt, Human
acugacugucgggcuuuaaaaa

SEQ ID NO: 3422045 - RNA, 16 nt, Human
acugagacaaugccuu

SEQ ID NO: 3422046 - RNA, 22 nt, Human
acugagacagcccgggcucugc

SEQ ID NO: 3422047 - RNA, 16 nt, Human
acugagaccaaggcuu

SEQ ID NO: 3422048 - RNA, 16 nt, Human
acugagagaucugcug

SEQ ID NO: 3422049 - RNA, 15 nt, Human
acugagagccuuuuu

SEQ ID NO: 3422050 - RNA, 18 nt, Human
acugagauaccagcgagg

SEQ ID NO: 3422051 - RNA, 20 nt, Human
acugagauccuuccuuuuga

SEQ ID NO: 3422052 - RNA, 21 nt, Human
acugagcaacgcuauuccagc

SEQ ID NO: 3422053 - RNA, 22 nt, Human
acugagcaacgcuauuccagcu

SEQ ID NO: 3422054 - RNA, 15 nt, Human
acugagcacuguuuu

SEQ ID NO: 3422055 - RNA, 16 nt, Human
acugagcagugauauu

SEQ ID NO: 3422056 - RNA, 15 nt, Human
acugagcauaagucc

SEQ ID NO: 3422057 - RNA, 15 nt, Human
acugagcccccccaa

SEQ ID NO: 3422058 - RNA, 22 nt, Human
acugagcccccccaacacugug

SEQ ID NO: 3422059 - RNA, 13 nt, Human
acugagcuccucu

SEQ ID NO: 3422060 - RNA, 19 nt, Human
acugagcuccucugggcag

SEQ ID NO: 3422061 - RNA, 13 nt, Human
acugagcuuggaa

SEQ ID NO: 3422062 - RNA, 17 nt, Human
acugaggaauuucaccu

SEQ ID NO: 3422063 - RNA, 19 nt, Human
acugaggaauuucaccugu

SEQ ID NO: 3422064 - RNA, 16 nt, Human
acugaggaauuuucuu

SEQ ID NO: 3422065 - RNA, 15 nt, Human
acugaggauauucag

SEQ ID NO: 3422066 - RNA, 23 nt, Human
acugaggauauucagauguaugu

SEQ ID NO: 3422067 - RNA, 12 nt, Human
acugaggcaggg

SEQ ID NO: 3422068 - RNA, 15 nt, Human
acugaggcagggaag

SEQ ID NO: 3422069 - RNA, 21 nt, Human
acugaggccuaaaaguaaaca

SEQ ID NO: 3422070 - RNA, 20 nt, Human
acugaggccugagacccagg

SEQ ID NO: 3422071 - RNA, 21 nt, Human
acugagggaccaacugggccc

SEQ ID NO: 3422072 - RNA, 12 nt, Human
acugagggcagu

SEQ ID NO: 3422073 - RNA, 23 nt, Human
acugagggcagucgauagagcug

SEQ ID NO: 3422074 - RNA, 12 nt, Human
acugagggccac

SEQ ID NO: 3422075 - RNA, 22 nt, Human
acugagggccacacuauuacca

SEQ ID NO: 3422076 - RNA, 16 nt, Human
acugagggggccugga

SEQ ID NO: 3422077 - RNA, 18 nt, Human
acugagggggccuggaug

SEQ ID NO: 3422078 - RNA, 20 nt, Human
acugaggggggauccaguuu

SEQ ID NO: 3422079 - RNA, 21 nt, Human
acugaggggucuccaggagga

SEQ ID NO: 3422080 - RNA, 20 nt, Human
acugaguaagaaaugcugcc

SEQ ID NO: 3422081 - RNA, 21 nt, Human
acugaguacguugugcauuug

SEQ ID NO: 3422082 - RNA, 20 nt, Human
acugaguagcucuccugacu

SEQ ID NO: 3422083 - RNA, 15 nt, Human
acugaguuacauugu

SEQ ID NO: 3422084 - RNA, 17 nt, Human
acugauaguguccaaau

SEQ ID NO: 3422085 - RNA, 23 nt, Human
acauugagcugauauaaauucug

SEQ ID NO: 3422086 - RNA, 14 nt, Human
acauugcaauagaa

SEQ ID NO: 3422087 - RNA, 15 nt, Human
acauugcaauagaaa

SEQ ID NO: 3422088 - RNA, 18 nt, Human
acauugcaucaaagcauc

SEQ ID NO: 3422089 - RNA, 14 nt, Human
acauugcauucuau

SEQ ID NO: 3422090 - RNA, 17 nt, Human
acauugcauucuauugc

SEQ ID NO: 3422091 - RNA, 19 nt, Human
acauugcauucuauugccu

SEQ ID NO: 3422092 - RNA, 23 nt, Human
acauugccaaaaaggauacauaa

SEQ ID NO: 3422093 - RNA, 12 nt, Human
acauugccuuug

SEQ ID NO: 3422094 - RNA, 18 nt, Human
acauugccuuugaauguu

SEQ ID NO: 3422095 - RNA, 18 nt, Human
acauugcuuuacugucaa

SEQ ID NO: 3422096 - RNA, 21 nt, Human
acauugcuuuacugucaaaau

SEQ ID NO: 3422097 - RNA, 23 nt, Human
acauugcuuugaccacucuuccu

SEQ ID NO: 3422098 - RNA, 15 nt, Human
acauugcuuuuaaaa

SEQ ID NO: 3422099 - RNA, 17 nt, Human
acauugcuuuuaaaacu

SEQ ID NO: 3422100 - RNA, 12 nt, Human
acauugcuuuuc

SEQ ID NO: 3422101 - RNA, 15 nt, Human
acauuggaaagcaca

SEQ ID NO: 3422102 - RNA, 12 nt, Human
acauuggaagca

SEQ ID NO: 3422103 - RNA, 23 nt, Human
acauuggaagcagguuaaauguu

SEQ ID NO: 3422104 - RNA, 21 nt, Human
acauuggcaccuaauccaggc

SEQ ID NO: 3422105 - RNA, 22 nt, Human
acauuggcaccuaauccaggca

SEQ ID NO: 3422106 - RNA, 17 nt, Human
acauugggaaaucuuau

SEQ ID NO: 3422107 - RNA, 20 nt, Human
acauugggucuauuccagcu

SEQ ID NO: 3422108 - RNA, 23 nt, Human
acauugggucuauuccagcucau

SEQ ID NO: 3422109 - RNA, 14 nt, Human
acauugguguugua

SEQ ID NO: 3422110 - RNA, 14 nt, Human
acauugguucuugu

SEQ ID NO: 3422111 - RNA, 18 nt, Human
acauugguucuuguauua

SEQ ID NO: 3422112 - RNA, 22 nt, Human
acauugguucuuguauuaagaa

SEQ ID NO: 3422113 - RNA, 22 nt, Human
acauugguucuuucauuugcuu

SEQ ID NO: 3422114 - RNA, 19 nt, Human
acauuguaaauaguauuug

SEQ ID NO: 3422115 - RNA, 13 nt, Human
acauugucaauaa

SEQ ID NO: 3422116 - RNA, 17 nt, Human
acauugucauuuauaua

SEQ ID NO: 3422117 - RNA, 23 nt, Human
acauuguccccaaugaauauacu

SEQ ID NO: 3422118 - RNA, 13 nt, Human
acauugucucccg

SEQ ID NO: 3422119 - RNA, 16 nt, Human
acauugucucccgccc

SEQ ID NO: 3422120 - RNA, 19 nt, Human
acauugucuccuauauauu

SEQ ID NO: 3422121 - RNA, 22 nt, Human
acauugugauguauauuccuuu

SEQ ID NO: 3422122 - RNA, 17 nt, Human
acauuguggcacauucu

SEQ ID NO: 3422123 - RNA, 12 nt, Human
acauugugucua

SEQ ID NO: 3422124 - RNA, 13 nt, Human
acugauucuucag

SEQ ID NO: 3422125 - RNA, 22 nt, Human
acugauucuucagcaaaaauau

SEQ ID NO: 3422126 - RNA, 14 nt, Human
acugauuucaguaa

SEQ ID NO: 3422127 - RNA, 12 nt, Human
acugauuucccc

SEQ ID NO: 3422128 - RNA, 22 nt, Human
acugauuugacauagucuggcu

SEQ ID NO: 3422129 - RNA, 23 nt, Human
acugauuugggcugaauguaugu

SEQ ID NO: 3422130 - RNA, 14 nt, Human
acugauuuuuguaa

SEQ ID NO: 3422131 - RNA, 16 nt, Human
acugauuuuuuuuucc

SEQ ID NO: 3422132 - RNA, 18 nt, Human
acugcaaaucaggcuuuu

SEQ ID NO: 3422133 - RNA, 20 nt, Human
acugcaaaucaggcuuuugu

SEQ ID NO: 3422134 - RNA, 22 nt, Human
acugcaaaugucaucagaacuu

SEQ ID NO: 3422135 - RNA, 17 nt, Human
acugcaaccuccaccuc

SEQ ID NO: 3422136 - RNA, 22 nt, Human
acugcaaccuccgccucuuggg

SEQ ID NO: 3422137 - RNA, 15 nt, Human
acugcaaccuucacc

SEQ ID NO: 3422138 - RNA, 23 nt, Human
acugcaaccuucgccaccugggu

SEQ ID NO: 3422139 - RNA, 17 nt, Human
acugcaagaggcuccug

SEQ ID NO: 3422140 - RNA, 17 nt, Human
acugcaagucacaaagg

SEQ ID NO: 3422141 - RNA, 18 nt, Human
acugcaagucacaaagga

SEQ ID NO: 3422142 - RNA, 15 nt, Human
acugcaauagagacu

SEQ ID NO: 3422143 - RNA, 17 nt, Human
acugcaauuaaagugau

SEQ ID NO: 3422144 - RNA, 19 nt, Human
acugcacagagcucuccag

SEQ ID NO: 3422145 - RNA, 20 nt, Human
acugcacagcggccccugca

SEQ ID NO: 3422146 - RNA, 22 nt, Human
acugcacagcggccccugcauc

SEQ ID NO: 3422147 - RNA, 18 nt, Human
acugcacagcguccuguc

SEQ ID NO: 3422148 - RNA, 23 nt, Human
acugcacaugauuucacaaauau

SEQ ID NO: 3422149 - RNA, 14 nt, Human
acugcacccaggag

SEQ ID NO: 3422150 - RNA, 15 nt, Human
acugcacccccuccu

SEQ ID NO: 3422151 - RNA, 17 nt, Human
acugcacccccuccugc

SEQ ID NO: 3422152 - RNA, 19 nt, Human
acugcacguggcuucugau

SEQ ID NO: 3422153 - RNA, 14 nt, Human
acugcacuccagcc

SEQ ID NO: 3422154 - RNA, 15 nt, Human
acugcacuccagccu

SEQ ID NO: 3422155 - RNA, 19 nt, Human
acugcacuccagccugggg

SEQ ID NO: 3422156 - RNA, 13 nt, Human
acugcacuguuuu

SEQ ID NO: 3422157 - RNA, 12 nt, Human
acugcagaacag

SEQ ID NO: 3422158 - RNA, 21 nt, Human
acugcagaauacaguaagcug

SEQ ID NO: 3422159 - RNA, 12 nt, Human
acugcagcaccu

SEQ ID NO: 3422160 - RNA, 22 nt, Human
acugcagcaccuccaggccugu

SEQ ID NO: 3422161 - RNA, 19 nt, Human
acugcagccucaaccuccu

SEQ ID NO: 3422162 - RNA, 23 nt, Human
acugcaggccccgcuuguccagc

SEQ ID NO: 3422163 - RNA, 17 nt, Human
acugcaggcccuggccu

SEQ ID NO: 3422164 - RNA, 23 nt, Human
acugcagggaaaauuauuugcau

SEQ ID NO: 3422165 - RNA, 13 nt, Human
acugcagggccag

SEQ ID NO: 3422166 - RNA, 15 nt, Human
acugcagggccagga

SEQ ID NO: 3422167 - RNA, 16 nt, Human
acugcagggccaggac

SEQ ID NO: 3422168 - RNA, 15 nt, Human
acugcaggggccgag

SEQ ID NO: 3422169 - RNA, 18 nt, Human
acugcagguuggacccca

SEQ ID NO: 3422170 - RNA, 19 nt, Human
acugcagguuggaccccag

SEQ ID NO: 3422171 - RNA, 21 nt, Human
acugcagugaaagacaagcug

SEQ ID NO: 3422172 - RNA, 16 nt, Human
acugcauacuuuuuaa

SEQ ID NO: 3422173 - RNA, 18 nt, Human
acugcauacuuuuuaaau

SEQ ID NO: 3422174 - RNA, 20 nt, Human
acugcauacuuuuuaaaugu

SEQ ID NO: 3422175 - RNA, 23 nt, Human
acugcauacuuuuuaaauguaaa

SEQ ID NO: 3422176 - RNA, 21 nt, Human
acugcaucuugguuauuucug

SEQ ID NO: 3422177 - RNA, 17 nt, Human
acugcauggaccuaaca

SEQ ID NO: 3422178 - RNA, 21 nt, Human
acugcauggagacgcauuucg

SEQ ID NO: 3422179 - RNA, 17 nt, Human
acugcaugguaauuuau

SEQ ID NO: 3422180 - RNA, 20 nt, Human
acugcauuauucucuuuuau

SEQ ID NO: 3422181 - RNA, 17 nt, Human
acugcauuauuugagaa

SEQ ID NO: 3422182 - RNA, 23 nt, Human
acugcauucuucugagcacuguu

SEQ ID NO: 3422183 - RNA, 16 nt, Human
acugcauucuucugau

SEQ ID NO: 3422184 - RNA, 18 nt, Human
acugccaaaaugcucuag

SEQ ID NO: 3422185 - RNA, 21 nt, Human
acugccaaagggaaauaucau

SEQ ID NO: 3422186 - RNA, 18 nt, Human
acugccaagacugcugug

SEQ ID NO: 3422187 - RNA, 12 nt, Human
acugccaagcca

SEQ ID NO: 3422188 - RNA, 17 nt, Human
acugccacaaggaagaa

SEQ ID NO: 3422189 - RNA, 17 nt, Human
acugccacuuugcacau

SEQ ID NO: 3422190 - RNA, 18 nt, Human
acugccacuuugcacauu

SEQ ID NO: 3422191 - RNA, 20 nt, Human
acugccacuuugcacauuuu

SEQ ID NO: 3422192 - RNA, 15 nt, Human
acugccagaugcuga

SEQ ID NO: 3422193 - RNA, 17 nt, Human
acugccagaugcugaug

SEQ ID NO: 3422194 - RNA, 19 nt, Human
acugccagcagcagcaggu

SEQ ID NO: 3422195 - RNA, 16 nt, Human
acugccagcucuuccu

SEQ ID NO: 3422196 - RNA, 17 nt, Human
acugccagcucuuccua

SEQ ID NO: 3422197 - RNA, 15 nt, Human
acugccaggagggac

SEQ ID NO: 3422198 - RNA, 21 nt, Human
acugccaggagggacaaagga

SEQ ID NO: 3422199 - RNA, 17 nt, Human
acugccaggccagccuc

SEQ ID NO: 3422200 - RNA, 19 nt, Human
acugccaggccagccuccg

SEQ ID NO: 3422201 - RNA, 18 nt, Human
acugccaggcucucuuug

SEQ ID NO: 3422202 - RNA, 14 nt, Human
acugccauaaaaca

SEQ ID NO: 3422203 - RNA, 16 nt, Human
acugccauauuaaauu

SEQ ID NO: 3422204 - RNA, 15 nt, Human
acugccaucaaacug

SEQ ID NO: 3422205 - RNA, 19 nt, Human
acugccauccuggcccagg

SEQ ID NO: 3422206 - RNA, 21 nt, Human
acugccauguacuaguuuuag

SEQ ID NO: 3422207 - RNA, 13 nt, Human
acugcccaccccc

SEQ ID NO: 3422208 - RNA, 14 nt, Human
acugcccacccccu

SEQ ID NO: 3422209 - RNA, 16 nt, Human
acugcccacccccuca

SEQ ID NO: 3422210 - RNA, 23 nt, Human
acugcccagcggacaguggcagg

SEQ ID NO: 3422211 - RNA, 19 nt, Human
acugcccaggccugccugu

SEQ ID NO: 3422212 - RNA, 21 nt, Human
acugccccaacuccuggaagc

SEQ ID NO: 3422213 - RNA, 20 nt, Human
acugcccccucugcccugcg

SEQ ID NO: 3422214 - RNA, 17 nt, Human
acugcccccugcugcca

SEQ ID NO: 3422215 - RNA, 15 nt, Human
acugcccgagcuggu

SEQ ID NO: 3422216 - RNA, 21 nt, Human
acugcccgagcuggugcauua

SEQ ID NO: 3422217 - RNA, 22 nt, Human
acugcccgagcuggugcauuac

SEQ ID NO: 3422218 - RNA, 16 nt, Human
acugcccgcacacccu

SEQ ID NO: 3422219 - RNA, 22 nt, Human
acugcccggcacagaugcucca

SEQ ID NO: 3422220 - RNA, 11 nt, Human
acugcccuggu

SEQ ID NO: 3422221 - RNA, 22 nt, Human
acugccgcaagucugcagcccg

SEQ ID NO: 3422222 - RNA, 20 nt, Human
acugccgugcauuagcacag

SEQ ID NO: 3422223 - RNA, 14 nt, Human
acugccuaagcccu

SEQ ID NO: 3422224 - RNA, 16 nt, Human
acugccuagaaacaac

SEQ ID NO: 3422225 - RNA, 22 nt, Human
acugccuagaaacaacacugua

SEQ ID NO: 3422226 - RNA, 16 nt, Human
acugccucagguuccu

SEQ ID NO: 3422227 - RNA, 19 nt, Human
acugccucgaaacacagaa

SEQ ID NO: 3422228 - RNA, 15 nt, Human
acugccccaacuccu

SEQ ID NO: 3422229 - RNA, 19 nt, Human
acugccccccaugaggaag

SEQ ID NO: 3422230 - RNA, 14 nt, Human
acugcccccucugc

SEQ ID NO: 3422231 - RNA, 15 nt, Human
acugcccccucugcc

SEQ ID NO: 3422232 - RNA, 17 nt, Human
acugcccccucugcccu

SEQ ID NO: 3422233 - RNA, 19 nt, Human
acugcccccucugcccugc

SEQ ID NO: 3422234 - RNA, 19 nt, Human
acugcccccugcugccaug

SEQ ID NO: 3422235 - RNA, 23 nt, Human
acugccccgugcagacuggaggg

SEQ ID NO: 3422236 - RNA, 19 nt, Human
acugcccgagcuggugcau

SEQ ID NO: 3422237 - RNA, 20 nt, Human
acugcccgagcuggugcauu

SEQ ID NO: 3422238 - RNA, 15 nt, Human
acugcccggcagggu

SEQ ID NO: 3422239 - RNA, 17 nt, Human
acugcccggggcagcug

SEQ ID NO: 3422240 - RNA, 21 nt, Human
acugcccucuguucaguaaca

SEQ ID NO: 3422241 - RNA, 22 nt, Human
acugcccucuguucaguaacag

SEQ ID NO: 3422242 - RNA, 13 nt, Human
acugcccugucua

SEQ ID NO: 3422243 - RNA, 19 nt, Human
acugccgaccgaggcugga

SEQ ID NO: 3422244 - RNA, 22 nt, Human
acugccgaccgaggcuggagcu

SEQ ID NO: 3422245 - RNA, 20 nt, Human
acugccgucagugcugugcu

SEQ ID NO: 3422246 - RNA, 15 nt, Human
acugccuaagcccuc

SEQ ID NO: 3422247 - RNA, 14 nt, Human
acugccuacugcau

SEQ ID NO: 3422248 - RNA, 13 nt, Human
acugccuagaaac

SEQ ID NO: 3422249 - RNA, 14 nt, Human
acugccuagaaaca

SEQ ID NO: 3422250 - RNA, 19 nt, Human
acugccuagaaacaacacu

SEQ ID NO: 3422251 - RNA, 20 nt, Human
acugccuagaaacaacacug

SEQ ID NO: 3422252 - RNA, 15 nt, Human
acugccucagguucc

SEQ ID NO: 3422253 - RNA, 13 nt, Human
acugccuccccca

SEQ ID NO: 3422254 - RNA, 18 nt, Human
acugccucccccaggguc

SEQ ID NO: 3422255 - RNA, 12 nt, Human
acugccucuccc

SEQ ID NO: 3422256 - RNA, 14 nt, Human
acugccucucccuc

SEQ ID NO: 3422257 - RNA, 17 nt, Human
acugccucucccuggcc

SEQ ID NO: 3422258 - RNA, 14 nt, Human
acugccucugccac

SEQ ID NO: 3422259 - RNA, 18 nt, Human
acugccucugccuuagag

SEQ ID NO: 3422260 - RNA, 9 nt, Human
acugccugc

SEQ ID NO: 3422261 - RNA, 12 nt, Human
acugccugccca

SEQ ID NO: 3422262 - RNA, 14 nt, Human
acugccugcccacc

SEQ ID NO: 3422263 - RNA, 19 nt, Human
acugccugcccacccgugg

SEQ ID NO: 3422264 - RNA, 15 nt, Human
acugccugccuuaag

SEQ ID NO: 3422265 - RNA, 14 nt, Human
acugccugcuuggg

SEQ ID NO: 3422266 - RNA, 14 nt, Human
acugccuuaaaacu

SEQ ID NO: 3422267 - RNA, 16 nt, Human
acugccuucgcuucuu

SEQ ID NO: 3422268 - RNA, 17 nt, Human
acugccuucgcuucuug

SEQ ID NO: 3422269 - RNA, 23 nt, Human
acugccuucgcuucuugccucug

SEQ ID NO: 3422270 - RNA, 22 nt, Human
acugccuucucaacuccaaacu

SEQ ID NO: 3422271 - RNA, 21 nt, Human
acugccuugaaccugugagua

SEQ ID NO: 3422272 - RNA, 21 nt, Human
acugccuugaauauccccucc

SEQ ID NO: 3422273 - RNA, 19 nt, Human
acugccuuuagaaaauaua

SEQ ID NO: 3422274 - RNA, 11 nt, Human
acugccuuuga

SEQ ID NO: 3422275 - RNA, 22 nt, Human
acugcgaagacccucuugccca

SEQ ID NO: 3422276 - RNA, 19 nt, Human
acugcgaucuucagagcag

SEQ ID NO: 3422277 - RNA, 23 nt, Human
acugcggagaaccuugugccugg

SEQ ID NO: 3422278 - RNA, 21 nt, Human
acugcgggaugguccuggggc

SEQ ID NO: 3422279 - RNA, 18 nt, Human
acugcggggcuuggcuga

SEQ ID NO: 3422280 - RNA, 16 nt, Human
acugcuaaauaaaauu

SEQ ID NO: 3422281 - RNA, 20 nt, Human
acugcuaaauaaaauuuguu

SEQ ID NO: 3422282 - RNA, 16 nt, Human
acugcuaagaauauuu

SEQ ID NO: 3422283 - RNA, 21 nt, Human
acugcuaaggauuagucccug

SEQ ID NO: 3422284 - RNA, 20 nt, Human
acugcuaaguauuucccagc

SEQ ID NO: 3422285 - RNA, 14 nt, Human
acugcuacagcaau

SEQ ID NO: 3422286 - RNA, 19 nt, Human
acugcuaccuuucaaagcu

SEQ ID NO: 3422287 - RNA, 18 nt, Human
acugcuaggcgagugcca

SEQ ID NO: 3422288 - RNA, 22 nt, Human
acugcuaggcgagugccaggac

SEQ ID NO: 3422289 - RNA, 22 nt, Human
acugcuaggugggccagccccu

SEQ ID NO: 3422290 - RNA, 19 nt, Human
acugcuaguguucugucua

SEQ ID NO: 3422291 - RNA, 21 nt, Human
acugcuauuuuucauccuaaa

SEQ ID NO: 3422292 - RNA, 18 nt, Human
acugcucaagaagacaug

SEQ ID NO: 3422293 - RNA, 18 nt, Human
acugcucaggcugcagcu

SEQ ID NO: 3422294 - RNA, 23 nt, Human
acugcucaucauuccuugagaaa

SEQ ID NO: 3422295 - RNA, 15 nt, Human
acugcucccaccucc

SEQ ID NO: 3422296 - RNA, 18 nt, Human
acugcuccccagcccugg

SEQ ID NO: 3422297 - RNA, 19 nt, Human
acugcuccccagcccuggc

SEQ ID NO: 3422298 - RNA, 18 nt, Human
acugcucccugaagccag

SEQ ID NO: 3422299 - RNA, 20 nt, Human
acugcucccugaagccagcc

SEQ ID NO: 3422300 - RNA, 14 nt, Human
acugcuccguggag

SEQ ID NO: 3422301 - RNA, 13 nt, Human
acugcuccugagc

SEQ ID NO: 3422302 - RNA, 19 nt, Human
acugcuccugagcccccag

SEQ ID NO: 3422303 - RNA, 13 nt, Human
acugcucucaccu

SEQ ID NO: 3422304 - RNA, 21 nt, Human
acugcucuccuccaccucaac

SEQ ID NO: 3422305 - RNA, 12 nt, Human
acugcucugaug

SEQ ID NO: 3422306 - RNA, 18 nt, Human
acugcugcaaggccuuuc

SEQ ID NO: 3422307 - RNA, 12 nt, Human
acugcugccacu

SEQ ID NO: 3422308 - RNA, 17 nt, Human
acugcugcccagccucc

SEQ ID NO: 3422309 - RNA, 21 nt, Human
acugcugcccagccuccaagc

SEQ ID NO: 3422310 - RNA, 12 nt, Human
acugcugcccca

SEQ ID NO: 3422311 - RNA, 14 nt, Human
acugcugcugccug

SEQ ID NO: 3422312 - RNA, 18 nt, Human
acugcugcugccuggcca

SEQ ID NO: 3422313 - RNA, 14 nt, Human
acugcugcuucucc

SEQ ID NO: 3422314 - RNA, 12 nt, Human
acugcugcuuuu

SEQ ID NO: 3422315 - RNA, 21 nt, Human
acugcuggagaggccccagcc

SEQ ID NO: 3422316 - RNA, 13 nt, Human
acugcuggcugcc

SEQ ID NO: 3422317 - RNA, 19 nt, Human
acugcuggguggcccaucc

SEQ ID NO: 3422318 - RNA, 20 nt, Human
acugcuggguggcccauccc

SEQ ID NO: 3422319 - RNA, 22 nt, Human
acugcuguaaauaaaugcuuua

SEQ ID NO: 3422320 - RNA, 16 nt, Human
acugcugugaacaagu

SEQ ID NO: 3422321 - RNA, 15 nt, Human
accacucuggcagcc

SEQ ID NO: 3422322 - RNA, 17 nt, Human
accacugaaaaaauaua

SEQ ID NO: 3422323 - RNA, 22 nt, Human
accacugcaaguccuuuuguaa

SEQ ID NO: 3422324 - RNA, 18 nt, Human
accacugcacucuagccu

SEQ ID NO: 3422325 - RNA, 15 nt, Human
accacugcucugaug

SEQ ID NO: 3422326 - RNA, 14 nt, Human
accacuggccacca

SEQ ID NO: 3422327 - RNA, 16 nt, Human
accacuggccaccagg

SEQ ID NO: 3422328 - RNA, 17 nt, Human
accacuggccaccaggc

SEQ ID NO: 3422329 - RNA, 19 nt, Human
accacuggccaccaggcug

SEQ ID NO: 3422330 - RNA, 21 nt, Human
accacuggccaccaggcuggc

SEQ ID NO: 3422331 - RNA, 19 nt, Human
accacuguaaaaugaaauu

SEQ ID NO: 3422332 - RNA, 17 nt, Human
accacuguuucuugcuu

SEQ ID NO: 3422333 - RNA, 18 nt, Human
accacuguuucuugcuug

SEQ ID NO: 3422334 - RNA, 18 nt, Human
accacuuaaaaaaugucc

SEQ ID NO: 3422335 - RNA, 13 nt, Human
accacuucacuga

SEQ ID NO: 3422336 - RNA, 14 nt, Human
accacuuccagggg

SEQ ID NO: 3422337 - RNA, 13 nt, Human
accacuucgaaac

SEQ ID NO: 3422338 - RNA, 17 nt, Human
accacuucuuuuauaac

SEQ ID NO: 3422339 - RNA, 13 nt, Human
accacuuguagau

SEQ ID NO: 3422340 - RNA, 14 nt, Human
accacuuguagauu

SEQ ID NO: 3422341 - RNA, 22 nt, Human
accacuuuccuuuucuauuccu

SEQ ID NO: 3422342 - RNA, 21 nt, Human
accacuuuuguucuugguuug

SEQ ID NO: 3422343 - RNA, 22 nt, Human
accacuuuuguucuugguuugu

SEQ ID NO: 3422344 - RNA, 14 nt, Human
accacuuuuugcag

SEQ ID NO: 3422345 - RNA, 17 nt, Human
accagaaaagcccaagu

SEQ ID NO: 3422346 - RNA, 16 nt, Human
accagaaaaugagggc

SEQ ID NO: 3422347 - RNA, 24 nt, Human
accagaaagcaguugagacaagaa

SEQ ID NO: 3422348 - RNA, 13 nt, Human
accagaacaaggu

SEQ ID NO: 3422349 - RNA, 19 nt, Human
accagaaccagucuuucaa

SEQ ID NO: 3422350 - RNA, 14 nt, Human
accagaagccaaag

SEQ ID NO: 3422351 - RNA, 13 nt, Human
accagaagggaaa

SEQ ID NO: 3422352 - RNA, 16 nt, Human
accagaagggaaacag

SEQ ID NO: 3422353 - RNA, 21 nt, Human
accagaauugugcaaauggaa

SEQ ID NO: 3422354 - RNA, 16 nt, Human
accagacaagcuguug

SEQ ID NO: 3422355 - RNA, 23 nt, Human
accagacaaggaaauacccuucu

SEQ ID NO: 3422356 - RNA, 16 nt, Human
accagacacccaggac

SEQ ID NO: 3422357 - RNA, 17 nt, Human
accagacacccaggacu

SEQ ID NO: 3422358 - RNA, 17 nt, Human
accagacaccuugacag

SEQ ID NO: 3422359 - RNA, 22 nt, Human
accagacaccuugacagggcac

SEQ ID NO: 3422360 - RNA, 23 nt, Human
accagacaccuugacagggcaca

SEQ ID NO: 3422361 - RNA, 16 nt, Human
accagacagaggguca

SEQ ID NO: 3422362 - RNA, 19 nt, Human
accagacagagggucacag

SEQ ID NO: 3422363 - RNA, 22 nt, Human
accagacagagggucacagugu

SEQ ID NO: 3422364 - RNA, 11 nt, Human
accagacaggu

SEQ ID NO: 3422365 - RNA, 15 nt, Human
accagacggggcugg

SEQ ID NO: 3422366 - RNA, 16 nt, Human
accagacucuugccug

SEQ ID NO: 3422367 - RNA, 16 nt, Human
accagacugcagguug

SEQ ID NO: 3422368 - RNA, 18 nt, Human
accagacuuuuuuaaaca

SEQ ID NO: 3422369 - RNA, 15 nt, Human
accagagagaguugu

SEQ ID NO: 3422370 - RNA, 15 nt, Human
accagagcacuguau

SEQ ID NO: 3422371 - RNA, 20 nt, Human
accagagcauuuccaacacc

SEQ ID NO: 3422372 - RNA, 14 nt, Human
accagagcccaccu

SEQ ID NO: 3422373 - RNA, 23 nt, Human
acuggacucaggaugcccagggc

SEQ ID NO: 3422374 - RNA, 14 nt, Human
acuggacuccggcc

SEQ ID NO: 3422375 - RNA, 19 nt, Human
acuggacucuucaaaaacu

SEQ ID NO: 3422376 - RNA, 14 nt, Human
acuggagaaaaugg

SEQ ID NO: 3422377 - RNA, 15 nt, Human
acuggagaaaaugga

SEQ ID NO: 3422378 - RNA, 17 nt, Human
acuggagaagucuuaga

SEQ ID NO: 3422379 - RNA, 17 nt, Human
acuggagaggcuagaac

SEQ ID NO: 3422380 - RNA, 12 nt, Human
acuggagcacaa

SEQ ID NO: 3422381 - RNA, 15 nt, Human
acuggagcaccaggc

SEQ ID NO: 3422382 - RNA, 16 nt, Human
acuggagcaccaggca

SEQ ID NO: 3422383 - RNA, 15 nt, Human
acuggagcagaaggg

SEQ ID NO: 3422384 - RNA, 17 nt, Human
acuggagcaucugacuc

SEQ ID NO: 3422385 - RNA, 15 nt, Human
acuggagcucaucug

SEQ ID NO: 3422386 - RNA, 16 nt, Human
acuggaggagagaaga

SEQ ID NO: 3422387 - RNA, 14 nt, Human
acuggaggucacau

SEQ ID NO: 3422388 - RNA, 19 nt, Human
acuggaggucacauucagg

SEQ ID NO: 3422389 - RNA, 18 nt, Human
acuggagguugaagccaa

SEQ ID NO: 3422390 - RNA, 17 nt, Human
acuggaguccagucucu

SEQ ID NO: 3422391 - RNA, 14 nt, Human
acuggaguggagca

SEQ ID NO: 3422392 - RNA, 16 nt, Human
acuggaguuacauuaa

SEQ ID NO: 3422393 - RNA, 19 nt, Human
acuggaguucuaugcucuc

SEQ ID NO: 3422394 - RNA, 22 nt, Human
acuggaugaaauaacuccuucu

SEQ ID NO: 3422395 - RNA, 13 nt, Human
acuggaugaagau

SEQ ID NO: 3422396 - RNA, 14 nt, Human
acuggaugaagauu

SEQ ID NO: 3422397 - RNA, 18 nt, Human
acuggaugcagaaacagu

SEQ ID NO: 3422398 - RNA, 13 nt, Human
acuggauuuguug

SEQ ID NO: 3422399 - RNA, 22 nt, Human
acuggcaaaaggaucuuugugg

SEQ ID NO: 3422400 - RNA, 16 nt, Human
acuggcaaacuucaga

SEQ ID NO: 3422401 - RNA, 20 nt, Human
acuggcaaacuucagacuga

SEQ ID NO: 3422402 - RNA, 21 nt, Human
acuggcaaacuucagacugaa

SEQ ID NO: 3422403 - RNA, 13 nt, Human
acuggcaaagcag

SEQ ID NO: 3422404 - RNA, 19 nt, Human
acuggcaauugucuauuua

SEQ ID NO: 3422405 - RNA, 13 nt, Human
acuggcacaguuu

SEQ ID NO: 3422406 - RNA, 14 nt, Human
acuggcagccccag

SEQ ID NO: 3422407 - RNA, 16 nt, Human
acuggcagccccagca

SEQ ID NO: 3422408 - RNA, 21 nt, Human
acuggcaucugacacaaaaaa

SEQ ID NO: 3422409 - RNA, 17 nt, Human
acuggccaagcugaggu

SEQ ID NO: 3422410 - RNA, 22 nt, Human
acuggccaccaggcuggcgcag

SEQ ID NO: 3422411 - RNA, 22 nt, Human
acuggccagggccacgcuccag

SEQ ID NO: 3422412 - RNA, 13 nt, Human
acuggccaucucc

SEQ ID NO: 3422413 - RNA, 14 nt, Human
acuggccaucucca

SEQ ID NO: 3422414 - RNA, 21 nt, Human
acuggccauggccugcaaacu

SEQ ID NO: 3422415 - RNA, 19 nt, Human
acuggccccggaucagagc

SEQ ID NO: 3422416 - RNA, 20 nt, Human
acuggccccggaucagagca

SEQ ID NO: 3422417 - RNA, 15 nt, Human
acuggccccuggguc

SEQ ID NO: 3422418 - RNA, 23 nt, Human
acuggccggucugcaagucagag

SEQ ID NO: 3422419 - RNA, 23 nt, Human
acuggccucugcugauccuccca

SEQ ID NO: 3422420 - RNA, 18 nt, Human
acuggccugacuuggggg

SEQ ID NO: 3422421 - RNA, 22 nt, Human
acuggccugcacggugggccuu

SEQ ID NO: 3422422 - RNA, 15 nt, Human
acuggcguggauuaa

SEQ ID NO: 3422423 - RNA, 20 nt, Human
acuggcguggauuaaacuua

SEQ ID NO: 3422424 - RNA, 21 nt, Human
acuggcuagaguccucacucc

SEQ ID NO: 3422425 - RNA, 13 nt, Human
acuggcucuccaa

SEQ ID NO: 3422426 - RNA, 15 nt, Human
acuggcucuccuggc

SEQ ID NO: 3422427 - RNA, 17 nt, Human
acuggcucuccuggccc

SEQ ID NO: 3422428 - RNA, 15 nt, Human
acuggcucucuccag

SEQ ID NO: 3422429 - RNA, 16 nt, Human
acuggcuguccuuucc

SEQ ID NO: 3422430 - RNA, 17 nt, Human
acuggcugugggcuccc

SEQ ID NO: 3422431 - RNA, 21 nt, Human
acuggcugugggcucccuucc

SEQ ID NO: 3422432 - RNA, 22 nt, Human
acuggcugugggcucccuuccu

SEQ ID NO: 3422433 - RNA, 20 nt, Human
acuggcuuugucccacagcu

SEQ ID NO: 3422434 - RNA, 14 nt, Human
acuggcuuuuauua

SEQ ID NO: 3422435 - RNA, 19 nt, Human
acuggcuuuuauuaaugca

SEQ ID NO: 3422436 - RNA, 19 nt, Human
acugggaaccccuuuccca

SEQ ID NO: 3422437 - RNA, 19 nt, Human
acugggaagauaggcucug

SEQ ID NO: 3422438 - RNA, 11 nt, Human
acugggaaggc

SEQ ID NO: 3422439 - RNA, 20 nt, Human
acugggaaggcuugggauuu

SEQ ID NO: 3422440 - RNA, 15 nt, Human
acugggaccaggcac

SEQ ID NO: 3422441 - RNA, 22 nt, Human
acugggagaggugccagcaacu

SEQ ID NO: 3422442 - RNA, 21 nt, Human
acugggagcccccagccuguc

SEQ ID NO: 3422443 - RNA, 12 nt, Human
acugggagccua

SEQ ID NO: 3422444 - RNA, 20 nt, Human
acugggaggccgaggcaggg

SEQ ID NO: 3422445 - RNA, 14 nt, Human
acugggaggggaga

SEQ ID NO: 3422446 - RNA, 17 nt, Human
acugggaucacaggugu

SEQ ID NO: 3422447 - RNA, 16 nt, Human
acugggaugagccgcu

SEQ ID NO: 3422448 - RNA, 13 nt, Human
acugggcccugcc

SEQ ID NO: 3422449 - RNA, 16 nt, Human
acugggcccugccucu

SEQ ID NO: 3422450 - RNA, 21 nt, Human
acugggccuguugcccuuucu

SEQ ID NO: 3422451 - RNA, 20 nt, Human
acugggccuuagugggccag

SEQ ID NO: 3422452 - RNA, 14 nt, Human
acugggcugaggga

SEQ ID NO: 3422453 - RNA, 21 nt, Human
acugggcuuggggaccagagc

SEQ ID NO: 3422454 - RNA, 15 nt, Human
acuggggacuuggcc

SEQ ID NO: 3422455 - RNA, 17 nt, Human
acuggggagcccgucuc

SEQ ID NO: 3422456 - RNA, 15 nt, Human
acuggggagucuuug

SEQ ID NO: 3422457 - RNA, 21 nt, Human
acuggggauugggugggcagg

SEQ ID NO: 3422458 - RNA, 21 nt, Human
acuggggccuacagcuuugau

SEQ ID NO: 3422459 - RNA, 15 nt, Human
acuggggcucagagc

SEQ ID NO: 3422460 - RNA, 14 nt, Human
acuggggcugaagg

SEQ ID NO: 3422461 - RNA, 15 nt, Human
acuggggcuggcaca

SEQ ID NO: 3422462 - RNA, 22 nt, Human
acuggggcuggggaaggaagcc

SEQ ID NO: 3422463 - RNA, 13 nt, Human
acuggggggcuug

SEQ ID NO: 3422464 - RNA, 20 nt, Human
acugggguccuggggccucg

SEQ ID NO: 3422465 - RNA, 21 nt, Human
acuggggugggaggucuugcu

SEQ ID NO: 3422466 - RNA, 15 nt, Human
acugggguugagggc

SEQ ID NO: 3422467 - RNA, 21 nt, Human
acuggguaaaugcaaaguucu

SEQ ID NO: 3422468 - RNA, 22 nt, Human
acuggguggggugaggaccacu

SEQ ID NO: 3422469 - RNA, 14 nt, Human
acugggugucauuu

SEQ ID NO: 3422470 - RNA, 17 nt, Human
acugggugucauuucau

SEQ ID NO: 3422471 - RNA, 21 nt, Human
acugggugucauuucauucca

SEQ ID NO: 3422472 - RNA, 14 nt, Human
acuggguuccugca

SEQ ID NO: 3422473 - RNA, 14 nt, Human
acuggguuucuagc

SEQ ID NO: 3422474 - RNA, 20 nt, Human
acuggguuucucuguauagu

SEQ ID NO: 3422475 - RNA, 19 nt, Human
acuggguuuggaccccagc

SEQ ID NO: 3422476 - RNA, 18 nt, Human
acugguaggaaacuaggu

SEQ ID NO: 3422477 - RNA, 20 nt, Human
acugguaggaacuugagaac

SEQ ID NO: 3422478 - RNA, 18 nt, Human
acugguagguugggacac

SEQ ID NO: 3422479 - RNA, 18 nt, Human
acugguauuccugccucc

SEQ ID NO: 3422480 - RNA, 13 nt, Human
acugguccaucug

SEQ ID NO: 3422481 - RNA, 14 nt, Human
accagggguuucuc

SEQ ID NO: 3422482 - RNA, 16 nt, Human
accagggguuucucgc

SEQ ID NO: 3422483 - RNA, 14 nt, Human
accaggguuuaguu

SEQ ID NO: 3422484 - RNA, 18 nt, Human
accagguccaaugagcuu

SEQ ID NO: 3422485 - RNA, 21 nt, Human
accagguccaaugagcuuucu

SEQ ID NO: 3422486 - RNA, 17 nt, Human
accagguccagaugugc

SEQ ID NO: 3422487 - RNA, 16 nt, Human
accaggucuuggagcu

SEQ ID NO: 3422488 - RNA, 22 nt, Human
accaggucuuggagcugagccu

SEQ ID NO: 3422489 - RNA, 22 nt, Human
accaggugccuuucaaauuuag

SEQ ID NO: 3422490 - RNA, 14 nt, Human
accaggugggagcg

SEQ ID NO: 3422491 - RNA, 22 nt, Human
accaggugggagcguuuuguug

SEQ ID NO: 3422492 - RNA, 20 nt, Human
accagguguucuacacucau

SEQ ID NO: 3422493 - RNA, 23 nt, Human
accagguguucuacacucaucuu

SEQ ID NO: 3422494 - RNA, 19 nt, Human
accagguuuuguuccgccc

SEQ ID NO: 3422495 - RNA, 20 nt, Human
accaguaggggcuuauaaua

SEQ ID NO: 3422496 - RNA, 18 nt, Human
accaguauuuaacuucug

SEQ ID NO: 3422497 - RNA, 14 nt, Human
accaguauuuagaa

SEQ ID NO: 3422498 - RNA, 16 nt, Human
accaguauuuuugcug

SEQ ID NO: 3422499 - RNA, 18 nt, Human
accaguauuuuugcugcu

SEQ ID NO: 3422500 - RNA, 21 nt, Human
accaguauuuuugcugcuucu

SEQ ID NO: 3422501 - RNA, 23 nt, Human
accaguauuuuugcugcuucuga

SEQ ID NO: 3422502 - RNA, 14 nt, Human
accagucacaugac

SEQ ID NO: 3422503 - RNA, 14 nt, Human
accagucauuuuuc

SEQ ID NO: 3422504 - RNA, 21 nt, Human
accagucuuuaaaggcccagc

SEQ ID NO: 3422505 - RNA, 20 nt, Human
accagucuuucaacucauug

SEQ ID NO: 3422506 - RNA, 14 nt, Human
accagugaaccaaa

SEQ ID NO: 3422507 - RNA, 18 nt, Human
accagugaauuuuugcaa

SEQ ID NO: 3422508 - RNA, 22 nt, Human
accagugcaggcuggccagccg

SEQ ID NO: 3422509 - RNA, 14 nt, Human
accagugccaagga

SEQ ID NO: 3422510 - RNA, 17 nt, Human
accagugccaaggaccu

SEQ ID NO: 3422511 - RNA, 22 nt, Human
accagugcccaaagucugugug

SEQ ID NO: 3422512 - RNA, 12 nt, Human
accagugccuua

SEQ ID NO: 3422513 - RNA, 13 nt, Human
accaguguccccu

SEQ ID NO: 3422514 - RNA, 20 nt, Human
accaguguccccuccacugu

SEQ ID NO: 3422515 - RNA, 13 nt, Human
accaguuaauuuu

SEQ ID NO: 3422516 - RNA, 14 nt, Human
accaguuaauuuuu

SEQ ID NO: 3422517 - RNA, 22 nt, Human
acuguaagaauaauuuauagua

SEQ ID NO: 3422518 - RNA, 21 nt, Human
acuguaagacucauucccuag

SEQ ID NO: 3422519 - RNA, 16 nt, Human
acuguaauaaagauga

SEQ ID NO: 3422520 - RNA, 18 nt, Human
acuguaauaauaccucaa

SEQ ID NO: 3422521 - RNA, 23 nt, Human
acuguaaugaaccgcugaauaug

SEQ ID NO: 3422522 - RNA, 16 nt, Human
acuguaauuauuugaa

SEQ ID NO: 3422523 - RNA, 17 nt, Human
acuguaauuuuauauga

SEQ ID NO: 3422524 - RNA, 15 nt, Human
acuguacaaaguaga

SEQ ID NO: 3422525 - RNA, 17 nt, Human
acuguacaauaaaaaca

SEQ ID NO: 3422526 - RNA, 15 nt, Human
acuguacacacuuua

SEQ ID NO: 3422527 - RNA, 17 nt, Human
acuguacacacuuuauu

SEQ ID NO: 3422528 - RNA, 15 nt, Human
acuguacacauaagc

SEQ ID NO: 3422529 - RNA, 20 nt, Human
acuguacagacagaaaaaac

SEQ ID NO: 3422530 - RNA, 11 nt, Human
acuguacagug

SEQ ID NO: 3422531 - RNA, 16 nt, Human
acuguacagugucuuu

SEQ ID NO: 3422532 - RNA, 15 nt, Human
acuguacauaaacaa

SEQ ID NO: 3422533 - RNA, 16 nt, Human
acuguacaugaaaaca

SEQ ID NO: 3422534 - RNA, 12 nt, Human
acuguacaugug

SEQ ID NO: 3422535 - RNA, 15 nt, Human
acuguacauuuaaaa

SEQ ID NO: 3422536 - RNA, 16 nt, Human
acuguacccaaaugga

SEQ ID NO: 3422537 - RNA, 22 nt, Human
acuguacuaauucuuacacugc

SEQ ID NO: 3422538 - RNA, 15 nt, Human
acuguacuucacugu

SEQ ID NO: 3422539 - RNA, 23 nt, Human
acuguacuugcucuugaugccug

SEQ ID NO: 3422540 - RNA, 16 nt, Human
acuguacuuugauuca

SEQ ID NO: 3422541 - RNA, 15 nt, Human
acuguagaaaugaug

SEQ ID NO: 3422542 - RNA, 20 nt, Human
acuguagaaugauuucaugc

SEQ ID NO: 3422543 - RNA, 23 nt, Human
acuguagauaauuaaccaaggua

SEQ ID NO: 3422544 - RNA, 17 nt, Human
acuguagauugcuucug

SEQ ID NO: 3422545 - RNA, 18 nt, Human
acuguagauugcuucugu

SEQ ID NO: 3422546 - RNA, 20 nt, Human
acuguagauugcuucuguag

SEQ ID NO: 3422547 - RNA, 15 nt, Human
acuguagcuuuggaa

SEQ ID NO: 3422548 - RNA, 18 nt, Human
acuguagcuuugugaaau

SEQ ID NO: 3422549 - RNA, 19 nt, Human
acuguaggaagaguagcau

SEQ ID NO: 3422550 - RNA, 20 nt, Human
acuguaguaaauaaugcuuu

SEQ ID NO: 3422551 - RNA, 22 nt, Human
acuguaguaaauaaugcuuuga

SEQ ID NO: 3422552 - RNA, 13 nt, Human
acuguagucucag

SEQ ID NO: 3422553 - RNA, 13 nt, Human
acuguaguucuaa

SEQ ID NO: 3422554 - RNA, 20 nt, Human
acuguaguuuuucuucaaca

SEQ ID NO: 3422555 - RNA, 16 nt, Human
acuguauagacaguuu

SEQ ID NO: 3422556 - RNA, 17 nt, Human
acuguauagacaguuug

SEQ ID NO: 3422557 - RNA, 13 nt, Human
acuguauauaaag

SEQ ID NO: 3422558 - RNA, 15 nt, Human
acuguauauuuguau

SEQ ID NO: 3422559 - RNA, 18 nt, Human
acuguauauuuuaagaag

SEQ ID NO: 3422560 - RNA, 14 nt, Human
acuguaucauuuuc

SEQ ID NO: 3422561 - RNA, 16 nt, Human
acuguaucauuuucuu

SEQ ID NO: 3422562 - RNA, 15 nt, Human
acuguaucuguguag

SEQ ID NO: 3422563 - RNA, 19 nt, Human
acuguaugaucaaauguuu

SEQ ID NO: 3422564 - RNA, 21 nt, Human
acuguaugaucaaauguuuaa

SEQ ID NO: 3422565 - RNA, 16 nt, Human
acuguauguuauagaa

SEQ ID NO: 3422566 - RNA, 21 nt, Human
acuguauguuauagaacuuca

SEQ ID NO: 3422567 - RNA, 13 nt, Human
acuguauuaagag

SEQ ID NO: 3422568 - RNA, 17 nt, Human
acuguauuugugacuaa

SEQ ID NO: 3422569 - RNA, 22 nt, Human
acuguauuugugacuaauugua

SEQ ID NO: 3422570 - RNA, 15 nt, Human
acugucaaaauaauu

SEQ ID NO: 3422571 - RNA, 19 nt, Human
acugucaaaauaauuuuau

SEQ ID NO: 3422572 - RNA, 16 nt, Human
acugucaaagaaucaa

SEQ ID NO: 3422573 - RNA, 22 nt, Human
acugucaaaugaugugcaaaac

SEQ ID NO: 3422574 - RNA, 22 nt, Human
acugucaaggcugcuuagaauc

SEQ ID NO: 3422575 - RNA, 14 nt, Human
acugucacccucca

SEQ ID NO: 3422576 - RNA, 15 nt, Human
acugucacccuccac

SEQ ID NO: 3422577 - RNA, 23 nt, Human
acugucacucauugcugagccuc

SEQ ID NO: 3422578 - RNA, 24 nt, Human
acugucacucauugcugagccucu

SEQ ID NO: 3422579 - RNA, 16 nt, Human
acugucacuguuucuc

SEQ ID NO: 3422580 - RNA, 15 nt, Human
acugucacuuugcuc

SEQ ID NO: 3422581 - RNA, 19 nt, Human
acugucacuuugcucuggg

SEQ ID NO: 3422582 - RNA, 16 nt, Human
acugucagccgggccc

SEQ ID NO: 3422583 - RNA, 18 nt, Human
acugucagccgggcccug

SEQ ID NO: 3422584 - RNA, 21 nt, Human
acugucagcuccccucggaga

SEQ ID NO: 3422585 - RNA, 22 nt, Human
acugucagcuccccucggagaa

SEQ ID NO: 3422586 - RNA, 13 nt, Human
acugucauagaaa

SEQ ID NO: 3422587 - RNA, 15 nt, Human
acugucaugcuucau

SEQ ID NO: 3422588 - RNA, 15 nt, Human
acuguccccuugaag

SEQ ID NO: 3422589 - RNA, 23 nt, Human
acugucccucaaaugacccaaag

SEQ ID NO: 3422590 - RNA, 13 nt, Human
acugucccuccug

SEQ ID NO: 3422591 - RNA, 17 nt, Human
acuguccuacccacccu

SEQ ID NO: 3422592 - RNA, 21 nt, Human
acuguccucuuucagaaaaca

SEQ ID NO: 3422593 - RNA, 17 nt, Human
acuguccugcuccacag

SEQ ID NO: 3422594 - RNA, 20 nt, Human
acuguccugcuccacagugu

SEQ ID NO: 3422595 - RNA, 18 nt, Human
acuguccugggcgcccug

SEQ ID NO: 3422596 - RNA, 19 nt, Human
acuguccugggcgcccugg

SEQ ID NO: 3422597 - RNA, 20 nt, Human
acuguccugggcgcccugga

SEQ ID NO: 3422598 - RNA, 22 nt, Human
acuguccugggcgcccuggaag

SEQ ID NO: 3422599 - RNA, 23 nt, Human
acuguccugggcgcccuggaagc

SEQ ID NO: 3422600 - RNA, 15 nt, Human
acuguccuguccugc

SEQ ID NO: 3422601 - RNA, 21 nt, Human
acuguccuuuccuuggcuuua

SEQ ID NO: 3422602 - RNA, 16 nt, Human
acugucggaggaaaga

SEQ ID NO: 3422603 - RNA, 19 nt, Human
acugucggaggaaagacaa

SEQ ID NO: 3422604 - RNA, 19 nt, Human
acugucuagcacuuccuug

SEQ ID NO: 3422605 - RNA, 13 nt, Human
acugucuauuucu

SEQ ID NO: 3422606 - RNA, 16 nt, Human
acugucuauuucugcu

SEQ ID NO: 3422607 - RNA, 18 nt, Human
acugucuauuucugcuga

SEQ ID NO: 3422608 - RNA, 23 nt, Human
acugucuauuucugcugaauuuu

SEQ ID NO: 3422609 - RNA, 20 nt, Human
acugucucaagagggcacug

SEQ ID NO: 3422610 - RNA, 12 nt, Human
acugucucacug

SEQ ID NO: 3422611 - RNA, 17 nt, Human
acugucucucaugaacc

SEQ ID NO: 3422612 - RNA, 20 nt, Human
acugucugagaguuuaguug

SEQ ID NO: 3422613 - RNA, 19 nt, Human
acugucuggccccccuggu

SEQ ID NO: 3422614 - RNA, 22 nt, Human
acugucuggccccccugguccc

SEQ ID NO: 3422615 - RNA, 20 nt, Human
acugucuggggagcgggucu

SEQ ID NO: 3422616 - RNA, 18 nt, Human
acugucugguuuuaacaa

SEQ ID NO: 3422617 - RNA, 12 nt, Human
acugucugucug

SEQ ID NO: 3422618 - RNA, 15 nt, Human
acugucugugaacag

SEQ ID NO: 3422619 - RNA, 11 nt, Human
acugucuuaau

SEQ ID NO: 3422620 - RNA, 18 nt, Human
acugucuuccucaaaaua

SEQ ID NO: 3422621 - RNA, 22 nt, Human
acugucuuuggaaaaauguuug

SEQ ID NO: 3422622 - RNA, 22 nt, Human
acugucuuuuuucuaaaguaaa

SEQ ID NO: 3422623 - RNA, 16 nt, Human
acugugaagagaacca

SEQ ID NO: 3422624 - RNA, 16 nt, Human
acugugaaggacccuu

SEQ ID NO: 3422625 - RNA, 13 nt, Human
acugugacaggca

SEQ ID NO: 3422626 - RNA, 16 nt, Human
acugugacaggcagca

SEQ ID NO: 3422627 - RNA, 19 nt, Human
acugugacaggcagcagag

SEQ ID NO: 3422628 - RNA, 14 nt, Human
acugugacaucucu

SEQ ID NO: 3422629 - RNA, 16 nt, Human
acugugaccaaguaua

SEQ ID NO: 3422630 - RNA, 19 nt, Human
acugugacccccagcuccg

SEQ ID NO: 3422631 - RNA, 21 nt, Human
acugugacccccagcuccggc

SEQ ID NO: 3422632 - RNA, 12 nt, Human
acugugaccugu

SEQ ID NO: 3422633 - RNA, 21 nt, Human
acugugaugaagccgaccuua

SEQ ID NO: 3422634 - RNA, 22 nt, Human
acugugaugccacacagagugg

SEQ ID NO: 3422635 - RNA, 15 nt, Human
acugugcacaucugu

SEQ ID NO: 3422636 - RNA, 21 nt, Human
acugugcagagucuagaaguu

SEQ ID NO: 3422637 - RNA, 22 nt, Human
acugugcaggugcuauuguuac

SEQ ID NO: 3422638 - RNA, 23 nt, Human
acugugcaggugcuauuguuacu

SEQ ID NO: 3422639 - RNA, 14 nt, Human
accauuucagagag

SEQ ID NO: 3422640 - RNA, 16 nt, Human
accauuuccccagggc

SEQ ID NO: 3422641 - RNA, 13 nt, Human
accauuuguaaua

SEQ ID NO: 3422642 - RNA, 14 nt, Human
accauuuguaauaa

SEQ ID NO: 3422643 - RNA, 18 nt, Human
accauuuguaauaaagua

SEQ ID NO: 3422644 - RNA, 15 nt, Human
accauuuguuaauau

SEQ ID NO: 3422645 - RNA, 22 nt, Human
accauuuugggguacccacugc

SEQ ID NO: 3422646 - RNA, 23 nt, Human
accauuuuuuaauuuacuuguuu

SEQ ID NO: 3422647 - RNA, 14 nt, Human
acccaaaagagaaa

SEQ ID NO: 3422648 - RNA, 16 nt, Human
acccaaaagagaaaaa

SEQ ID NO: 3422649 - RNA, 13 nt, Human
acccaaaaggcag

SEQ ID NO: 3422650 - RNA, 15 nt, Human
acccaaaaggcagaa

SEQ ID NO: 3422651 - RNA, 15 nt, Human
acccaaaccuggaga

SEQ ID NO: 3422652 - RNA, 13 nt, Human
acccaaagcagug

SEQ ID NO: 3422653 - RNA, 16 nt, Human
acccaaagcugagccu

SEQ ID NO: 3422654 - RNA, 20 nt, Human
acccaaauguucaucaauga

SEQ ID NO: 3422655 - RNA, 21 nt, Human
acccaaauguucaucaaugaa

SEQ ID NO: 3422656 - RNA, 12 nt, Human
acccaaccacuc

SEQ ID NO: 3422657 - RNA, 22 nt, Human
acccaacccuaucuccugacag

SEQ ID NO: 3422658 - RNA, 16 nt, Human
acccaacgcuccaaag

SEQ ID NO: 3422659 - RNA, 13 nt, Human
acccaagcuccuc

SEQ ID NO: 3422660 - RNA, 15 nt, Human
acccaagcuuagaac

SEQ ID NO: 3422661 - RNA, 14 nt, Human
agaaauuggcugga

SEQ ID NO: 3422662 - RNA, 15 nt, Human
agaaauuggcuggau

SEQ ID NO: 3422663 - RNA, 14 nt, Human
agaaauugguaccu

SEQ ID NO: 3422664 - RNA, 21 nt, Human
agaaauugguaccuugcacac

SEQ ID NO: 3422665 - RNA, 17 nt, Human
agaaauuuaauucaugu

SEQ ID NO: 3422666 - RNA, 22 nt, Human
agaaauuuaauucauguuucuu

SEQ ID NO: 3422667 - RNA, 16 nt, Human
agaaauuuacuauaua

SEQ ID NO: 3422668 - RNA, 17 nt, Human
agaaauuuacuauauau

SEQ ID NO: 3422669 - RNA, 17 nt, Human
agaaauuuauaaacuuu

SEQ ID NO: 3422670 - RNA, 15 nt, Human
agaaauuuauuuccu

SEQ ID NO: 3422671 - RNA, 14 nt, Human
agaaauuuccagag

SEQ ID NO: 3422672 - RNA, 21 nt, Human
agaaauuucugugaaaccugu

SEQ ID NO: 3422673 - RNA, 16 nt, Human
agaaauuuuguaagaa

SEQ ID NO: 3422674 - RNA, 15 nt, Human
agaaauuuuuaucag

SEQ ID NO: 3422675 - RNA, 17 nt, Human
agaaauuuuuaucaguu

SEQ ID NO: 3422676 - RNA, 13 nt, Human
agaaauuuuuauu

SEQ ID NO: 3422677 - RNA, 22 nt, Human
agaaauuuuucagaugcuucug

SEQ ID NO: 3422678 - RNA, 23 nt, Human
agaaauuuuucagaugcuucugg

SEQ ID NO: 3422679 - RNA, 23 nt, Human
agaacaaaaaaaucugcagaagg

SEQ ID NO: 3422680 - RNA, 19 nt, Human
agaacaaagcuguuaaacu

SEQ ID NO: 3422681 - RNA, 20 nt, Human
agaacaaaggggcuuaauua

SEQ ID NO: 3422682 - RNA, 12 nt, Human
agaacaaauauu

SEQ ID NO: 3422683 - RNA, 12 nt, Human
agaacaaaugaa

SEQ ID NO: 3422684 - RNA, 15 nt, Human
agaacaaaugaagac

SEQ ID NO: 3422685 - RNA, 19 nt, Human
agaacaagguaguuuuuac

SEQ ID NO: 3422686 - RNA, 15 nt, Human
agaacaauuuucuug

SEQ ID NO: 3422687 - RNA, 22 nt, Human
agaacacaaagcggggggaggg

SEQ ID NO: 3422688 - RNA, 17 nt, Human
agaacaccaagacuuga

SEQ ID NO: 3422689 - RNA, 17 nt, Human
acuugcgagaaauucgu

SEQ ID NO: 3422690 - RNA, 20 nt, Human
acuugcgguuccggcaugga

SEQ ID NO: 3422691 - RNA, 15 nt, Human
acuugcucuggaccu

SEQ ID NO: 3422692 - RNA, 17 nt, Human
acuugcucuggaccugc

SEQ ID NO: 3422693 - RNA, 19 nt, Human
acuugcucuggaccugccc

SEQ ID NO: 3422694 - RNA, 18 nt, Human
acuugcucuugaugccug

SEQ ID NO: 3422695 - RNA, 22 nt, Human
acuugcugcaguaugaaaauaa

SEQ ID NO: 3422696 - RNA, 15 nt, Human
acuugcugcuauuuu

SEQ ID NO: 3422697 - RNA, 14 nt, Human
acuugcugugacuu

SEQ ID NO: 3422698 - RNA, 14 nt, Human
acuugcuuaaaugu

SEQ ID NO: 3422699 - RNA, 15 nt, Human
acuugcuuaaaugug

SEQ ID NO: 3422700 - RNA, 14 nt, Human
acuugcuuuuaaaa

SEQ ID NO: 3422701 - RNA, 15 nt, Human
acuuggaaauauuaa

SEQ ID NO: 3422702 - RNA, 19 nt, Human
acuuggaaauauuaaaaga

SEQ ID NO: 3422703 - RNA, 23 nt, Human
acuuggaagcacaccaaucuuac

SEQ ID NO: 3422704 - RNA, 18 nt, Human
acuuggaauuuguaaccu

SEQ ID NO: 3422705 - RNA, 14 nt, Human
acuuggagccaagg

SEQ ID NO: 3422706 - RNA, 19 nt, Human
acuuggagccaaggguuca

SEQ ID NO: 3422707 - RNA, 14 nt, Human
acuuggagccccag

SEQ ID NO: 3422708 - RNA, 11 nt, Human
acuuggagccg

SEQ ID NO: 3422709 - RNA, 20 nt, Human
acuuggaggguugguccucu

SEQ ID NO: 3422710 - RNA, 15 nt, Human
acuuggaguuugcau

SEQ ID NO: 3422711 - RNA, 14 nt, Human
acuuggaugaguuu

SEQ ID NO: 3422712 - RNA, 13 nt, Human
acuuggauucucu

SEQ ID NO: 3422713 - RNA, 16 nt, Human
acuuggauucuuucca

SEQ ID NO: 3422714 - RNA, 18 nt, Human
acuuggauucuuuccauu

SEQ ID NO: 3422715 - RNA, 14 nt, Human
acuuggcagccuug

SEQ ID NO: 3422716 - RNA, 19 nt, Human
acuuggccaagcagggagg

SEQ ID NO: 3422717 - RNA, 18 nt, Human
acuuggcucgaaucucug

SEQ ID NO: 3422718 - RNA, 21 nt, Human
acuuggcucgaaucucugugc

SEQ ID NO: 3422719 - RNA, 23 nt, Human
acuuggcucgaaucucugugccu

SEQ ID NO: 3422720 - RNA, 16 nt, Human
acuuggcugcaggaau

SEQ ID NO: 3422721 - RNA, 13 nt, Human
acuuggcuggugu

SEQ ID NO: 3422722 - RNA, 23 nt, Human
acuuggcuggugugguacagaga

SEQ ID NO: 3422723 - RNA, 16 nt, Human
acuugggaggcugagg

SEQ ID NO: 3422724 - RNA, 13 nt, Human
acuugggcacccc

SEQ ID NO: 3422725 - RNA, 23 nt, Human
acuugggcacccccagccugggc

SEQ ID NO: 3422726 - RNA, 17 nt, Human
acuugggccauagcucc

SEQ ID NO: 3422727 - RNA, 18 nt, Human
acuugggccauagcuccu

SEQ ID NO: 3422728 - RNA, 18 nt, Human
acuuggggcacagggaga

SEQ ID NO: 3422729 - RNA, 21 nt, Human
acuugggggcucagcaaggcc

SEQ ID NO: 3422730 - RNA, 23 nt, Human
acuuggggggcugaggugggagg

SEQ ID NO: 3422731 - RNA, 16 nt, Human
acuugggugacggcag

SEQ ID NO: 3422732 - RNA, 18 nt, Human
acuuggucacagccaggc

SEQ ID NO: 3422733 - RNA, 19 nt, Human
acuuggucugccaggcccc

SEQ ID NO: 3422734 - RNA, 13 nt, Human
acuuggucuguga

SEQ ID NO: 3422735 - RNA, 21 nt, Human
acuuggucugugagaugcuag

SEQ ID NO: 3422736 - RNA, 13 nt, Human
acuuggugcuggg

SEQ ID NO: 3422737 - RNA, 21 nt, Human
acuugguguccuuucccucca

SEQ ID NO: 3422738 - RNA, 16 nt, Human
acuugguucugcuuca

SEQ ID NO: 3422739 - RNA, 18 nt, Human
acuugguuggguccucac

SEQ ID NO: 3422740 - RNA, 20 nt, Human
acuugguugguaggguggga

SEQ ID NO: 3422741 - RNA, 17 nt, Human
acuugguuuuaugguua

SEQ ID NO: 3422742 - RNA, 20 nt, Human
acuuguaaaggaauuuaaaa

SEQ ID NO: 3422743 - RNA, 15 nt, Human
acuuguaaauacacc

SEQ ID NO: 3422744 - RNA, 12 nt, Human
acuuguaaauau

SEQ ID NO: 3422745 - RNA, 16 nt, Human
acuuguaaauauaaag

SEQ ID NO: 3422746 - RNA, 17 nt, Human
acuuguaaauauaaaga

SEQ ID NO: 3422747 - RNA, 14 nt, Human
acuuguaaguugcu

SEQ ID NO: 3422748 - RNA, 18 nt, Human
acuuguaauuuuuuuaau

SEQ ID NO: 3422749 - RNA, 16 nt, Human
acuuguagcuguaaaa

SEQ ID NO: 3422750 - RNA, 14 nt, Human
acuuguaggauaag

SEQ ID NO: 3422751 - RNA, 14 nt, Human
acuuguauaaaugu

SEQ ID NO: 3422752 - RNA, 19 nt, Human
acuuguauaaauguauaua

SEQ ID NO: 3422753 - RNA, 18 nt, Human
acuuguauauucuauuuu

SEQ ID NO: 3422754 - RNA, 19 nt, Human
acuuguauauuuguacaaa

SEQ ID NO: 3422755 - RNA, 18 nt, Human
acuuguauuaaagacaga

SEQ ID NO: 3422756 - RNA, 13 nt, Human
acuuguauuaugu

SEQ ID NO: 3422757 - RNA, 13 nt, Human
acuugucaaagaa

SEQ ID NO: 3422758 - RNA, 18 nt, Human
acuugucacugacacaaa

SEQ ID NO: 3422759 - RNA, 16 nt, Human
acuugucacuugcaug

SEQ ID NO: 3422760 - RNA, 19 nt, Human
acuugucaggagugugugu

SEQ ID NO: 3422761 - RNA, 21 nt, Human
acuugucaggaguguguguga

SEQ ID NO: 3422762 - RNA, 13 nt, Human
acuugucauguga

SEQ ID NO: 3422763 - RNA, 22 nt, Human
acuuguccccaaauccgaaccu

SEQ ID NO: 3422764 - RNA, 18 nt, Human
acuuguccuagcacagau

SEQ ID NO: 3422765 - RNA, 15 nt, Human
acuugucggcuccag

SEQ ID NO: 3422766 - RNA, 20 nt, Human
acuugucuaaauaaguuugc

SEQ ID NO: 3422767 - RNA, 20 nt, Human
acuugucucuucaucuaaua

SEQ ID NO: 3422768 - RNA, 23 nt, Human
acuugucuuucugggguuuuucu

SEQ ID NO: 3422769 - RNA, 20 nt, Human
acuugucuuuggacccugag

SEQ ID NO: 3422770 - RNA, 21 nt, Human
acuugucuuuggacccugagg

SEQ ID NO: 3422771 - RNA, 10 nt, Human
acuugugaau

SEQ ID NO: 3422772 - RNA, 15 nt, Human
acuugugaauaaaga

SEQ ID NO: 3422773 - RNA, 14 nt, Human
acuugugacuuuug

SEQ ID NO: 3422774 - RNA, 19 nt, Human
acuugugacuuuugcuuua

SEQ ID NO: 3422775 - RNA, 23 nt, Human
acuugugacuuuugcuuuaauuc

SEQ ID NO: 3422776 - RNA, 20 nt, Human
acuugugauuauuuauuauu

SEQ ID NO: 3422777 - RNA, 20 nt, Human
acuugugcccucccuguccu

SEQ ID NO: 3422778 - RNA, 22 nt, Human
acuugugcugaucgugcuaaau

SEQ ID NO: 3422779 - RNA, 15 nt, Human
acuugugcuuugcuc

SEQ ID NO: 3422780 - RNA, 15 nt, Human
acuuguggacuaaaa

SEQ ID NO: 3422781 - RNA, 18 nt, Human
acuuguggacuaaaagau

SEQ ID NO: 3422782 - RNA, 16 nt, Human
acuugugguuuucaaa

SEQ ID NO: 3422783 - RNA, 23 nt, Human
acuugugucccaugaucccugug

SEQ ID NO: 3422784 - RNA, 14 nt, Human
acuugugucucugu

SEQ ID NO: 3422785 - RNA, 22 nt, Human
acuugugucucugugcuuuuaa

SEQ ID NO: 3422786 - RNA, 22 nt, Human
acuugugugugggcugugagug

SEQ ID NO: 3422787 - RNA, 10 nt, Human
acuuguguuu

SEQ ID NO: 3422788 - RNA, 16 nt, Human
acuuguguuuugcaag

SEQ ID NO: 3422789 - RNA, 15 nt, Human
acuuguuagaucuag

SEQ ID NO: 3422790 - RNA, 23 nt, Human
acuuguuagaucuaguucacucu

SEQ ID NO: 3422791 - RNA, 16 nt, Human
acuuguuauugugaau

SEQ ID NO: 3422792 - RNA, 17 nt, Human
acuuguuauugugaaug

SEQ ID NO: 3422793 - RNA, 19 nt, Human
acuuguuauugugaaugau

SEQ ID NO: 3422794 - RNA, 21 nt, Human
acuuguucaaaauauguucuu

SEQ ID NO: 3422795 - RNA, 15 nt, Human
acuuguuccagcucu

SEQ ID NO: 3422796 - RNA, 16 nt, Human
acuuguuccagcucuu

SEQ ID NO: 3422797 - RNA, 14 nt, Human
acuuguugaauuua

SEQ ID NO: 3422798 - RNA, 20 nt, Human
acuuguugaggguauguuuu

SEQ ID NO: 3422799 - RNA, 23 nt, Human
acuuguuggcguaggcuacagag

SEQ ID NO: 3422800 - RNA, 13 nt, Human
acuuguuguuuaa

SEQ ID NO: 3422801 - RNA, 20 nt, Human
acuuguuguuuaauguuuaa

SEQ ID NO: 3422802 - RNA, 13 nt, Human
acuuguuuccaau

SEQ ID NO: 3422803 - RNA, 12 nt, Human
acuuguuucuau

SEQ ID NO: 3422804 - RNA, 19 nt, Human
acuuguuuuggauggcuug

SEQ ID NO: 3422805 - RNA, 20 nt, Human
acuuguuuuggauggcuugu

SEQ ID NO: 3422806 - RNA, 20 nt, Human
agaacucgguguccccacca

SEQ ID NO: 3422807 - RNA, 23 nt, Human
agaacucugccugcccuuugucc

SEQ ID NO: 3422808 - RNA, 20 nt, Human
agaacucuggcuuuuggaag

SEQ ID NO: 3422809 - RNA, 20 nt, Human
agaacucugggcugccaugu

SEQ ID NO: 3422810 - RNA, 12 nt, Human
agaacucuuccu

SEQ ID NO: 3422811 - RNA, 16 nt, Human
agaacugaaaacauaa

SEQ ID NO: 3422812 - RNA, 15 nt, Human
agaacugaaaagaga

SEQ ID NO: 3422813 - RNA, 23 nt, Human
agaacugaaccggcuuuaccaaa

SEQ ID NO: 3422814 - RNA, 22 nt, Human
agaacugagcuccucugggcag

SEQ ID NO: 3422815 - RNA, 16 nt, Human
agaacugcaggcccug

SEQ ID NO: 3422816 - RNA, 21 nt, Human
agaacugcauauguuucgcug

SEQ ID NO: 3422817 - RNA, 16 nt, Human
agaacugcauggaccu

SEQ ID NO: 3422818 - RNA, 23 nt, Human
agaacugcauggaccuaacauuc

SEQ ID NO: 3422819 - RNA, 14 nt, Human
agaacugccauuau

SEQ ID NO: 3422820 - RNA, 17 nt, Human
agaacugccauuauuuu

SEQ ID NO: 3422821 - RNA, 23 nt, Human
agaacugccauuauuuucuguca

SEQ ID NO: 3422822 - RNA, 16 nt, Human
agaacuggacucagga

SEQ ID NO: 3422823 - RNA, 18 nt, Human
agaacuggguaaaugcaa

SEQ ID NO: 3422824 - RNA, 16 nt, Human
agaacugucggaggaa

SEQ ID NO: 3422825 - RNA, 19 nt, Human
agaacuguguuucaaguuc

SEQ ID NO: 3422826 - RNA, 15 nt, Human
agaacuucagaaaga

SEQ ID NO: 3422827 - RNA, 24 nt, Human
agaacuuccccauacaaauaagca

SEQ ID NO: 3422828 - RNA, 15 nt, Human
agaacuugcugccuc

SEQ ID NO: 3422829 - RNA, 17 nt, Human
agaacuuguuuaauaaa

SEQ ID NO: 3422830 - RNA, 15 nt, Human
agaacuuugagcuac

SEQ ID NO: 3422831 - RNA, 12 nt, Human
agaacuuuguau

SEQ ID NO: 3422832 - RNA, 13 nt, Human
agaacuuuguaua

SEQ ID NO: 3422833 - RNA, 17 nt, Human
agaacuuuguauaguua

SEQ ID NO: 3422834 - RNA, 20 nt, Human
agaacuuuuucuuuucccuc

SEQ ID NO: 3422835 - RNA, 13 nt, Human
agaacuuuuuuaa

SEQ ID NO: 3422836 - RNA, 22 nt, Human
agaacuuuuuuaaauaaacuuu

SEQ ID NO: 3422837 - RNA, 21 nt, Human
agaagaaaaaaacgaaaacag

SEQ ID NO: 3422838 - RNA, 14 nt, Human
agaagaaaaaagaa

SEQ ID NO: 3422839 - RNA, 17 nt, Human
agaagaaaaaagaaugu

SEQ ID NO: 3422840 - RNA, 15 nt, Human
agaagaaaacaucua

SEQ ID NO: 3422841 - RNA, 13 nt, Human
agaagaaaagaga

SEQ ID NO: 3422842 - RNA, 19 nt, Human
agaagaaaagguucuuacu

SEQ ID NO: 3422843 - RNA, 20 nt, Human
agaagaaaauggaaccaggc

SEQ ID NO: 3422844 - RNA, 22 nt, Human
agaagaaaauggaaccaggcuu

SEQ ID NO: 3422845 - RNA, 16 nt, Human
agaagaaaauucuccu

SEQ ID NO: 3422846 - RNA, 19 nt, Human
agaagaaaauugcugugcc

SEQ ID NO: 3422847 - RNA, 15 nt, Human
agaagaaagaacuau

SEQ ID NO: 3422848 - RNA, 18 nt, Human
acuuuauagaagaaugca

SEQ ID NO: 3422849 - RNA, 19 nt, Human
acuuuauaguuguuuuaua

SEQ ID NO: 3422850 - RNA, 19 nt, Human
acuuuaucaaugugucuuu

SEQ ID NO: 3422851 - RNA, 14 nt, Human
acuuuaucaauuaa

SEQ ID NO: 3422852 - RNA, 15 nt, Human
acuuuaucacuuaaa

SEQ ID NO: 3422853 - RNA, 13 nt, Human
acuuuaucaugaa

SEQ ID NO: 3422854 - RNA, 22 nt, Human
acuuuauccucauuccauaaau

SEQ ID NO: 3422855 - RNA, 23 nt, Human
acuuuaugccggaugugcuuuuc

SEQ ID NO: 3422856 - RNA, 18 nt, Human
acuuuauguuugucuuuu

SEQ ID NO: 3422857 - RNA, 21 nt, Human
acuuuauucuugaaagaagaa

SEQ ID NO: 3422858 - RNA, 17 nt, Human
acuuuauugccaaaacc

SEQ ID NO: 3422859 - RNA, 13 nt, Human
acuuuauuuacuu

SEQ ID NO: 3422860 - RNA, 20 nt, Human
acuuucaaucuucaauccuu

SEQ ID NO: 3422861 - RNA, 15 nt, Human
acuuucacauagaug

SEQ ID NO: 3422862 - RNA, 20 nt, Human
acuuucacauagaugucccu

SEQ ID NO: 3422863 - RNA, 21 nt, Human
acuuucacauagaugucccuu

SEQ ID NO: 3422864 - RNA, 21 nt, Human
acuuucacuauaaugugaaau

SEQ ID NO: 3422865 - RNA, 15 nt, Human
acuuucagcugucuu

SEQ ID NO: 3422866 - RNA, 16 nt, Human
acuuucaguaaacaua

SEQ ID NO: 3422867 - RNA, 17 nt, Human
acuuucaguaaacauaa

SEQ ID NO: 3422868 - RNA, 19 nt, Human
acuuucauccugacucugc

SEQ ID NO: 3422869 - RNA, 18 nt, Human
acuuucauuccuucagau

SEQ ID NO: 3422870 - RNA, 13 nt, Human
acuuucauugcca

SEQ ID NO: 3422871 - RNA, 16 nt, Human
acuuucauugccagug

SEQ ID NO: 3422872 - RNA, 21 nt, Human
acuuucauugccagugucuuu

SEQ ID NO: 3422873 - RNA, 23 nt, Human
acuuucauuuuuuuccaggcugg

SEQ ID NO: 3422874 - RNA, 19 nt, Human
acuuuccaauucuccuuua

SEQ ID NO: 3422875 - RNA, 18 nt, Human
acuuuccacccccucccu

SEQ ID NO: 3422876 - RNA, 17 nt, Human
acuuuccacuucuuccu

SEQ ID NO: 3422877 - RNA, 19 nt, Human
acuuuccccaccagaugcu

SEQ ID NO: 3422878 - RNA, 19 nt, Human
acuuuccccauacucuguc

SEQ ID NO: 3422879 - RNA, 14 nt, Human
acuuucccuugcuu

SEQ ID NO: 3422880 - RNA, 17 nt, Human
acuuuccuccuggcaga

SEQ ID NO: 3422881 - RNA, 18 nt, Human
acuuuccuggaugucuga

SEQ ID NO: 3422882 - RNA, 23 nt, Human
acuuuccuggaugucugaacuuu

SEQ ID NO: 3422883 - RNA, 18 nt, Human
acuuuccuuuccccagcc

SEQ ID NO: 3422884 - RNA, 22 nt, Human
acuuucuauagcagauugugua

SEQ ID NO: 3422885 - RNA, 17 nt, Human
acuuucuauccucugua

SEQ ID NO: 3422886 - RNA, 13 nt, Human
acuuucucaguuu

SEQ ID NO: 3422887 - RNA, 18 nt, Human
acuuucucuaauaauaaa

SEQ ID NO: 3422888 - RNA, 21 nt, Human
acuuucucuaauaauaaauag

SEQ ID NO: 3422889 - RNA, 23 nt, Human
acuuucucuaauaauaaauaguu

SEQ ID NO: 3422890 - RNA, 19 nt, Human
acuuucucuucauacuuuu

SEQ ID NO: 3422891 - RNA, 15 nt, Human
acuuucucuuguaaa

SEQ ID NO: 3422892 - RNA, 14 nt, Human
acuuucugaaauaa

SEQ ID NO: 3422893 - RNA, 20 nt, Human
acuuucugaaauaacauggc

SEQ ID NO: 3422894 - RNA, 14 nt, Human
acuuucuguaaacu

SEQ ID NO: 3422895 - RNA, 19 nt, Human
acuuucuguuaaaaugcau

SEQ ID NO: 3422896 - RNA, 22 nt, Human
acuuucuguuaaaaugcaugau

SEQ ID NO: 3422897 - RNA, 23 nt, Human
acuuucuguuggauuccaugcua

SEQ ID NO: 3422898 - RNA, 17 nt, Human
acuuucuucaaaauaua

SEQ ID NO: 3422899 - RNA, 16 nt, Human
acuuucuucuucccau

SEQ ID NO: 3422900 - RNA, 18 nt, Human
acuuucuuuaaauuaugu

SEQ ID NO: 3422901 - RNA, 13 nt, Human
acuuucuuucuca

SEQ ID NO: 3422902 - RNA, 16 nt, Human
acuuucuuucucacua

SEQ ID NO: 3422903 - RNA, 17 nt, Human
acuuucuuucuguaggu

SEQ ID NO: 3422904 - RNA, 20 nt, Human
acuuucuuuucgccguggcu

SEQ ID NO: 3422905 - RNA, 18 nt, Human
acuuucuuuuuguagcug

SEQ ID NO: 3422906 - RNA, 17 nt, Human
acuuucuuuuuugauau

SEQ ID NO: 3422907 - RNA, 23 nt, Human
acuuucuuuuuugauauagaagu

SEQ ID NO: 3422908 - RNA, 10 nt, Human
acuuugaaau

SEQ ID NO: 3422909 - RNA, 17 nt, Human
acuuugaaauaccucau

SEQ ID NO: 3422910 - RNA, 17 nt, Human
acuuugaaauguguuuc

SEQ ID NO: 3422911 - RNA, 12 nt, Human
acuuugaaggac

SEQ ID NO: 3422912 - RNA, 18 nt, Human
acuuugaauaaagaauac

SEQ ID NO: 3422913 - RNA, 21 nt, Human
acuuugaauaaagaauacuug

SEQ ID NO: 3422914 - RNA, 23 nt, Human
acuuugaauaaagaauacuugaa

SEQ ID NO: 3422915 - RNA, 18 nt, Human
acuuugacacuuuucaua

SEQ ID NO: 3422916 - RNA, 14 nt, Human
acuuugacaguguu

SEQ ID NO: 3422917 - RNA, 20 nt, Human
acuuugaccuaaauuauuua

SEQ ID NO: 3422918 - RNA, 12 nt, Human
acuuugaccucu

SEQ ID NO: 3422919 - RNA, 13 nt, Human
acuuugaccucug

SEQ ID NO: 3422920 - RNA, 15 nt, Human
acuuugacuuuuugc

SEQ ID NO: 3422921 - RNA, 17 nt, Human
acuuugagaucuaaaaa

SEQ ID NO: 3422922 - RNA, 21 nt, Human
acuuugagaucuaaaaauaac

SEQ ID NO: 3422923 - RNA, 17 nt, Human
acuuugaguuaagucua

SEQ ID NO: 3422924 - RNA, 19 nt, Human
acuuugaugucauguguuc

SEQ ID NO: 3422925 - RNA, 18 nt, Human
acuuugauucacauguuu

SEQ ID NO: 3422926 - RNA, 21 nt, Human
acuuugcacacuuuggcccag

SEQ ID NO: 3422927 - RNA, 18 nt, Human
acuuugcacugauauauc

SEQ ID NO: 3422928 - RNA, 13 nt, Human
acuuugcauuguc

SEQ ID NO: 3422929 - RNA, 23 nt, Human
acuuugccagcuuuuccucccuu

SEQ ID NO: 3422930 - RNA, 15 nt, Human
acuuugccuccugug

SEQ ID NO: 3422931 - RNA, 15 nt, Human
acuuugcuccucaca

SEQ ID NO: 3422932 - RNA, 15 nt, Human
acuuugcugauuucc

SEQ ID NO: 3422933 - RNA, 20 nt, Human
acuuugcugauuuccccucu

SEQ ID NO: 3422934 - RNA, 14 nt, Human
acuuugcuugcuuu

SEQ ID NO: 3422935 - RNA, 18 nt, Human
acuuugcuuuaauauaaa

SEQ ID NO: 3422936 - RNA, 15 nt, Human
acuuuggaaaaugca

SEQ ID NO: 3422937 - RNA, 23 nt, Human
acuuuggaaagacuuuuccaacc

SEQ ID NO: 3422938 - RNA, 14 nt, Human
acuuuggaaagagu

SEQ ID NO: 3422939 - RNA, 19 nt, Human
acuuuggaaaguagaaaag

SEQ ID NO: 3422940 - RNA, 15 nt, Human
acuuuggaaccagac

SEQ ID NO: 3422941 - RNA, 21 nt, Human
acuuuggaaccagacucuugc

SEQ ID NO: 3422942 - RNA, 17 nt, Human
acuuuggaaguuugugu

SEQ ID NO: 3422943 - RNA, 18 nt, Human
acuuuggaaguuuguguu

SEQ ID NO: 3422944 - RNA, 15 nt, Human
acuuuggaauacauu

SEQ ID NO: 3422945 - RNA, 12 nt, Human
acuuuggauaau

SEQ ID NO: 3422946 - RNA, 17 nt, Human
acuuuggcugcaugcga

SEQ ID NO: 3422947 - RNA, 22 nt, Human
acuuuggcuuauaauucuuuca

SEQ ID NO: 3422948 - RNA, 14 nt, Human
acuuugggaggcca

SEQ ID NO: 3422949 - RNA, 15 nt, Human
acuuugggaggccaa

SEQ ID NO: 3422950 - RNA, 10 nt, Human
agaagccugc

SEQ ID NO: 3422951 - RNA, 12 nt, Human
agaagccugggg

SEQ ID NO: 3422952 - RNA, 19 nt, Human
agaagccugggggccuggc

SEQ ID NO: 3422953 - RNA, 21 nt, Human
agaagccugggggccuggcug

SEQ ID NO: 3422954 - RNA, 19 nt, Human
agaagccuguaacacuccu

SEQ ID NO: 3422955 - RNA, 20 nt, Human
agaagccuguaacacuccuc

SEQ ID NO: 3422956 - RNA, 11 nt, Human
agaagccuuca

SEQ ID NO: 3422957 - RNA, 21 nt, Human
agaagccuucaagcucugagg

SEQ ID NO: 3422958 - RNA, 17 nt, Human
agaagccuucagcucca

SEQ ID NO: 3422959 - RNA, 16 nt, Human
agaagcggauuuccag

SEQ ID NO: 3422960 - RNA, 15 nt, Human
agaagcggcuggcag

SEQ ID NO: 3422961 - RNA, 16 nt, Human
agaagcggcuggcagc

SEQ ID NO: 3422962 - RNA, 23 nt, Human
agaagcgggacgagacccuacag

SEQ ID NO: 3422963 - RNA, 18 nt, Human
agaagcuaaaaccugagc

SEQ ID NO: 3422964 - RNA, 17 nt, Human
agaagcucagcugcauu

SEQ ID NO: 3422965 - RNA, 14 nt, Human
agaagcuccaggua

SEQ ID NO: 3422966 - RNA, 18 nt, Human
agaagcucccaggaacaa

SEQ ID NO: 3422967 - RNA, 13 nt, Human
agaagcuccccca

SEQ ID NO: 3422968 - RNA, 17 nt, Human
agaagcuccucucccca

SEQ ID NO: 3422969 - RNA, 20 nt, Human
agaagcuccucuccccagcc

SEQ ID NO: 3422970 - RNA, 23 nt, Human
agaagcuccucuccccagcccag

SEQ ID NO: 3422971 - RNA, 20 nt, Human
agaagcucuuacucuuuccu

SEQ ID NO: 3422972 - RNA, 19 nt, Human
agaagcugcauccagaggc

SEQ ID NO: 3422973 - RNA, 13 nt, Human
agaagcugcucca

SEQ ID NO: 3422974 - RNA, 18 nt, Human
agaagcugcuccaggccu

SEQ ID NO: 3422975 - RNA, 20 nt, Human
agaagcugcuccaggccugc

SEQ ID NO: 3422976 - RNA, 23 nt, Human
agaagcugcuccaggccugcagc

SEQ ID NO: 3422977 - RNA, 14 nt, Human
agaagcugcugacc

SEQ ID NO: 3422978 - RNA, 13 nt, Human
agaagcuggagga

SEQ ID NO: 3422979 - RNA, 16 nt, Human
agaagcuggaggacua

SEQ ID NO: 3422980 - RNA, 19 nt, Human
agaagcuguuguacauuua

SEQ ID NO: 3422981 - RNA, 22 nt, Human
agaagcuguuguacauuuauga

SEQ ID NO: 3422982 - RNA, 17 nt, Human
agaagcuuaggcagggc

SEQ ID NO: 3422983 - RNA, 16 nt, Human
agaagcuucagaaguu

SEQ ID NO: 3422984 - RNA, 16 nt, Human
agaagcuucuaauaaa

SEQ ID NO: 3422985 - RNA, 16 nt, Human
agaagcuuuauuucua

SEQ ID NO: 3422986 - RNA, 18 nt, Human
agaaggaaaaauguguaa

SEQ ID NO: 3422987 - RNA, 21 nt, Human
agaaggaaaauuuuagcgugc

SEQ ID NO: 3422988 - RNA, 17 nt, Human
agaaggaaauugagauu

SEQ ID NO: 3422989 - RNA, 14 nt, Human
agaaggaagacuuu

SEQ ID NO: 3422990 - RNA, 21 nt, Human
agaaggaaggcagggaggagg

SEQ ID NO: 3422991 - RNA, 17 nt, Human
agaaggaagugaagagg

SEQ ID NO: 3422992 - RNA, 16 nt, Human
agaaggagacaggcag

SEQ ID NO: 3422993 - RNA, 14 nt, Human
agaaggagagaaag

SEQ ID NO: 3422994 - RNA, 18 nt, Human
agaaggaggagagggaaa

SEQ ID NO: 3422995 - RNA, 20 nt, Human
agaaggagucagaaacuguu

SEQ ID NO: 3422996 - RNA, 13 nt, Human
agaaggaugaugu

SEQ ID NO: 3422997 - RNA, 20 nt, Human
agaaggcaaaugacuuugga

SEQ ID NO: 3422998 - RNA, 22 nt, Human
agaaggcaaguuucuagcuaga

SEQ ID NO: 3422999 - RNA, 14 nt, Human
agaaggcaauauua

SEQ ID NO: 3423000 - RNA, 13 nt, Human
agaaggcagcagg

SEQ ID NO: 3423001 - RNA, 13 nt, Human
agaaggccaagaa

SEQ ID NO: 3423002 - RNA, 17 nt, Human
agaaggccaagaggcug

SEQ ID NO: 3423003 - RNA, 11 nt, Human
agaaggcucuu

SEQ ID NO: 3423004 - RNA, 16 nt, Human
agaagggaaacaguca

SEQ ID NO: 3423005 - RNA, 12 nt, Human
agaagggaaagc

SEQ ID NO: 3423006 - RNA, 19 nt, Human
agaagggagcuagccagag

SEQ ID NO: 3423007 - RNA, 23 nt, Human
agaagggagggcagagcuggugc

SEQ ID NO: 3423008 - RNA, 21 nt, Human
agaagggauaacccuacaccc

SEQ ID NO: 3423009 - RNA, 23 nt, Human
acuuuucaaggcuuauauucaac

SEQ ID NO: 3423010 - RNA, 22 nt, Human
acuuuucaccuccuucaauucc

SEQ ID NO: 3423011 - RNA, 20 nt, Human
acuuuucauaaccuagccuu

SEQ ID NO: 3423012 - RNA, 17 nt, Human
acuuuucauaucauuuc

SEQ ID NO: 3423013 - RNA, 19 nt, Human
acuuuucauauuugcacua

SEQ ID NO: 3423014 - RNA, 17 nt, Human
acuuuuccaauauguga

SEQ ID NO: 3423015 - RNA, 20 nt, Human
acuuuuccaauaugugauuu

SEQ ID NO: 3423016 - RNA, 19 nt, Human
acuuuuccaguauuuuagu

SEQ ID NO: 3423017 - RNA, 22 nt, Human
acuuuuccauguaucuaccuca

SEQ ID NO: 3423018 - RNA, 15 nt, Human
acuuuuccuuaccuu

SEQ ID NO: 3423019 - RNA, 22 nt, Human
acuuuuccuugcauacaaacaa

SEQ ID NO: 3423020 - RNA, 18 nt, Human
acuuuuccuuugaauccu

SEQ ID NO: 3423021 - RNA, 11 nt, Human
acuuuucugua

SEQ ID NO: 3423022 - RNA, 17 nt, Human
acuuuucuguaauucag

SEQ ID NO: 3423023 - RNA, 16 nt, Human
acuuuucuuaaaccuu

SEQ ID NO: 3423024 - RNA, 18 nt, Human
acuuuucuucuauugccu

SEQ ID NO: 3423025 - RNA, 12 nt, Human
acuuuugacaaa

SEQ ID NO: 3423026 - RNA, 20 nt, Human
acuuuugagugugugugugc

SEQ ID NO: 3423027 - RNA, 18 nt, Human
acuuuuggaaccaugccu

SEQ ID NO: 3423028 - RNA, 21 nt, Human
acuuuuggaaucuagaagaaa

SEQ ID NO: 3423029 - RNA, 22 nt, Human
acuuuugguuaagucuguuuua

SEQ ID NO: 3423030 - RNA, 21 nt, Human
acuuuuguaaagaaauuuacu

SEQ ID NO: 3423031 - RNA, 12 nt, Human
acuuuuguaaga

SEQ ID NO: 3423032 - RNA, 17 nt, Human
acuuuuguaagacaaag

SEQ ID NO: 3423033 - RNA, 13 nt, Human
acuuuuguacauc

SEQ ID NO: 3423034 - RNA, 18 nt, Human
acuuuuguacugaauuuu

SEQ ID NO: 3423035 - RNA, 18 nt, Human
acuuuuguguaaugaaaa

SEQ ID NO: 3423036 - RNA, 12 nt, Human
acuuuuguucuu

SEQ ID NO: 3423037 - RNA, 15 nt, Human
acuuuuguucuuggu

SEQ ID NO: 3423038 - RNA, 21 nt, Human
acuuuuuaaaaucuuuucuau

SEQ ID NO: 3423039 - RNA, 18 nt, Human
acuuuuuaauucaccaaa

SEQ ID NO: 3423040 - RNA, 15 nt, Human
acuuuuuaguaauuu

SEQ ID NO: 3423041 - RNA, 12 nt, Human
acuuuuuauaua

SEQ ID NO: 3423042 - RNA, 13 nt, Human
acuuuuuauauau

SEQ ID NO: 3423043 - RNA, 15 nt, Human
acuuuuuauauucuc

SEQ ID NO: 3423044 - RNA, 16 nt, Human
acuuuuuauauucuca

SEQ ID NO: 3423045 - RNA, 15 nt, Human
acuuuuuauugauuu

SEQ ID NO: 3423046 - RNA, 13 nt, Human
acuuuuuauugcc

SEQ ID NO: 3423047 - RNA, 12 nt, Human
acuuuuucugau

SEQ ID NO: 3423048 - RNA, 15 nt, Human
acuuuuucuuuaugu

SEQ ID NO: 3423049 - RNA, 18 nt, Human
acuuuuucuuuuguaagu

SEQ ID NO: 3423050 - RNA, 12 nt, Human
acuuuuugcagc

SEQ ID NO: 3423051 - RNA, 17 nt, Human
acuuuuugcagcuuucu

SEQ ID NO: 3423052 - RNA, 13 nt, Human
acuuuuugcauuu

SEQ ID NO: 3423053 - RNA, 18 nt, Human
acuuuuugguuugcagau

SEQ ID NO: 3423054 - RNA, 18 nt, Human
acuuuuuguucugguccu

SEQ ID NO: 3423055 - RNA, 14 nt, Human
acuuuuuuaaauaa

SEQ ID NO: 3423056 - RNA, 17 nt, Human
acuuuuuuaaauaaacu

SEQ ID NO: 3423057 - RNA, 18 nt, Human
acuuuuuuaaauaaacuu

SEQ ID NO: 3423058 - RNA, 16 nt, Human
acuuuuuuaaauauuu

SEQ ID NO: 3423059 - RNA, 21 nt, Human
acuuuuuugaaauaauaaauc

SEQ ID NO: 3423060 - RNA, 18 nt, Human
acuuuuuugaaaucagua

SEQ ID NO: 3423061 - RNA, 22 nt, Human
acuuuuuuggggauaugcuuag

SEQ ID NO: 3423062 - RNA, 22 nt, Human
acuuuuuugguacuauaaaagc

SEQ ID NO: 3423063 - RNA, 14 nt, Human
acuuuuuuucaaug

SEQ ID NO: 3423064 - RNA, 19 nt, Human
acuuuuuuucuauauuauu

SEQ ID NO: 3423065 - RNA, 20 nt, Human
acuuuuuuucuguaccaguu

SEQ ID NO: 3423066 - RNA, 21 nt, Human
acuuuuuuucuguaccaguua

SEQ ID NO: 3423067 - RNA, 23 nt, Human
acuuuuuuucuguaccaguuaau

SEQ ID NO: 3423068 - RNA, 13 nt, Human
acuuuuuuuguau

SEQ ID NO: 3423069 - RNA, 16 nt, Human
acuuuuuuuguaugug

SEQ ID NO: 3423070 - RNA, 17 nt, Human
acuuuuuuuguaugugu

SEQ ID NO: 3423071 - RNA, 15 nt, Human
acuuuuuuuugagaa

SEQ ID NO: 3423072 - RNA, 18 nt, Human
acuuuuuuuuuauuuuau

SEQ ID NO: 3423073 - RNA, 22 nt, Human
acuuuuuuuuuuuaagaguaaa

SEQ ID NO: 3423074 - RNA, 14 nt, Human
agaaaaaaaaaaga

SEQ ID NO: 3423075 - RNA, 15 nt, Human
agaaaaaaaaaugcc

SEQ ID NO: 3423076 - RNA, 23 nt, Human
agaaaaaaaaaugccauaauaca

SEQ ID NO: 3423077 - RNA, 17 nt, Human
agaaaaaaaauaacaca

SEQ ID NO: 3423078 - RNA, 16 nt, Human
agaaaaaaauguauuu

SEQ ID NO: 3423079 - RNA, 19 nt, Human
agaaaaaaaugucaaaagu

SEQ ID NO: 3423080 - RNA, 16 nt, Human
agaaaaaaauugaaau

SEQ ID NO: 3423081 - RNA, 18 nt, Human
agaaaaaaauugaaaugu

SEQ ID NO: 3423082 - RNA, 12 nt, Human
agaaaaaagaag

SEQ ID NO: 3423083 - RNA, 14 nt, Human
agaaaaaagaaugu

SEQ ID NO: 3423084 - RNA, 16 nt, Human
agaaaaaagaauguca

SEQ ID NO: 3423085 - RNA, 10 nt, Human
agaaaaaagu

SEQ ID NO: 3423086 - RNA, 12 nt, Human
agaaaaaaguug

SEQ ID NO: 3423087 - RNA, 15 nt, Human
agaaaaaauaaaugg

SEQ ID NO: 3423088 - RNA, 16 nt, Human
agaaaaaauaaaugga

SEQ ID NO: 3423089 - RNA, 13 nt, Human
agaaaaaauaaua

SEQ ID NO: 3423090 - RNA, 22 nt, Human
agaaaaaauacauuuuauauua

SEQ ID NO: 3423091 - RNA, 23 nt, Human
agaaaaaauauuuuccugccagg

SEQ ID NO: 3423092 - RNA, 14 nt, Human
agaaaaacaggcac

SEQ ID NO: 3423093 - RNA, 13 nt, Human
agaaaaagaaaaa

SEQ ID NO: 3423094 - RNA, 14 nt, Human
agaaaaagaaaugc

SEQ ID NO: 3423095 - RNA, 18 nt, Human
agaaaaagaacaugcagu

SEQ ID NO: 3423096 - RNA, 18 nt, Human
agaaguugauauagaaca

SEQ ID NO: 3423097 - RNA, 13 nt, Human
agaaguugauaug

SEQ ID NO: 3423098 - RNA, 19 nt, Human
agaaguuguggauuucagu

SEQ ID NO: 3423099 - RNA, 15 nt, Human
agaaguuuagauuuu

SEQ ID NO: 3423100 - RNA, 17 nt, Human
agaaguuuauucucauu

SEQ ID NO: 3423101 - RNA, 18 nt, Human
agaaguuucccuuccucc

SEQ ID NO: 3423102 - RNA, 21 nt, Human
agaaguuucugccgcagcccu

SEQ ID NO: 3423103 - RNA, 16 nt, Human
agaaguuucuggcccu

SEQ ID NO: 3423104 - RNA, 13 nt, Human
agaaguuucuguc

SEQ ID NO: 3423105 - RNA, 19 nt, Human
agaaguuucuuuaaagacg

SEQ ID NO: 3423106 - RNA, 22 nt, Human
agaaguuugagaucagccuggg

SEQ ID NO: 3423107 - RNA, 16 nt, Human
agaaguuugcacuauc

SEQ ID NO: 3423108 - RNA, 22 nt, Human
agaaguuuggcugcugucauaa

SEQ ID NO: 3423109 - RNA, 19 nt, Human
agaaguuuguccauuugua

SEQ ID NO: 3423110 - RNA, 21 nt, Human
agaaguuuguccauuuguaaa

SEQ ID NO: 3423111 - RNA, 22 nt, Human
agaaguuuguccauuuguaaaa

SEQ ID NO: 3423112 - RNA, 16 nt, Human
agaaguuuuguacaga

SEQ ID NO: 3423113 - RNA, 14 nt, Human
agaaguuuuuguac

SEQ ID NO: 3423114 - RNA, 17 nt, Human
agaaguuuuuguacugu

SEQ ID NO: 3423115 - RNA, 22 nt, Human
agaaguuuuuguacuguaaaga

SEQ ID NO: 3423116 - RNA, 15 nt, Human
agaauaaaagaaauu

SEQ ID NO: 3423117 - RNA, 13 nt, Human
agaauaaaauguu

SEQ ID NO: 3423118 - RNA, 16 nt, Human
agaauaaaauguugaa

SEQ ID NO: 3423119 - RNA, 20 nt, Human
agaauaaaauguugaaaagu

SEQ ID NO: 3423120 - RNA, 13 nt, Human
agaauaaaauugu

SEQ ID NO: 3423121 - RNA, 12 nt, Human
agaauaaaauuu

SEQ ID NO: 3423122 - RNA, 17 nt, Human
agaauaaacauuuguua

SEQ ID NO: 3423123 - RNA, 14 nt, Human
agaauaaagcaauu

SEQ ID NO: 3423124 - RNA, 16 nt, Human
agaauaaagcaauuuu

SEQ ID NO: 3423125 - RNA, 23 nt, Human
agaauaaagcaauuuuccuugaa

SEQ ID NO: 3423126 - RNA, 13 nt, Human
agaauaaaggcag

SEQ ID NO: 3423127 - RNA, 15 nt, Human
agaauaaaggcaguu

SEQ ID NO: 3423128 - RNA, 20 nt, Human
agaauaaagguaugaaaggg

SEQ ID NO: 3423129 - RNA, 15 nt, Human
agaauaaauugauuu

SEQ ID NO: 3423130 - RNA, 15 nt, Human
agaauaagaaaacaa

SEQ ID NO: 3423131 - RNA, 20 nt, Human
agaauaagaaaacaaucaca

SEQ ID NO: 3423132 - RNA, 18 nt, Human
agaauaagaauuugcaua

SEQ ID NO: 3423133 - RNA, 22 nt, Human
agaauaagagagucauaaaccu

SEQ ID NO: 3423134 - RNA, 15 nt, Human
agaauaaggcaggca

SEQ ID NO: 3423135 - RNA, 15 nt, Human
agaauaagucauguu

SEQ ID NO: 3423136 - RNA, 18 nt, Human
agaauaagucauguuccu

SEQ ID NO: 3423137 - RNA, 20 nt, Human
agaauaaguuauugcaguuu

SEQ ID NO: 3423138 - RNA, 12 nt, Human
agaauaauaaau

SEQ ID NO: 3423139 - RNA, 16 nt, Human
agaauaauaaauauuu

SEQ ID NO: 3423140 - RNA, 17 nt, Human
agaauaaucaaauacau

SEQ ID NO: 3423141 - RNA, 17 nt, Human
agaauaaucacgcuuuc

SEQ ID NO: 3423142 - RNA, 21 nt, Human
agaauaaucacgcuuuccuga

SEQ ID NO: 3423143 - RNA, 15 nt, Human
agaauaaugaaugga

SEQ ID NO: 3423144 - RNA, 22 nt, Human
agaauaaugugggaagaaacaa

SEQ ID NO: 3423145 - RNA, 15 nt, Human
agaauaauucuuuga

SEQ ID NO: 3423146 - RNA, 13 nt, Human
agaauaauuuaua

SEQ ID NO: 3423147 - RNA, 16 nt, Human
agaauacaaacauauu

SEQ ID NO: 3423148 - RNA, 12 nt, Human
agaauacagaaa

SEQ ID NO: 3423149 - RNA, 22 nt, Human
agaauacaguaagcugcucuau

SEQ ID NO: 3423150 - RNA, 16 nt, Human
agaauaccacaucaaa

SEQ ID NO: 3423151 - RNA, 17 nt, Human
agaauacugauggaauu

SEQ ID NO: 3423152 - RNA, 21 nt, Human
agaauacugauggaauuuuuu

SEQ ID NO: 3423153 - RNA, 13 nt, Human
agaauagcaucug

SEQ ID NO: 3423154 - RNA, 21 nt, Human
agaauagcaucuguacaaagg

SEQ ID NO: 3423155 - RNA, 22 nt, Human
agaauagcaucuguacaaaggg

SEQ ID NO: 3423156 - RNA, 15 nt, Human
agaauagcauguugu

SEQ ID NO: 3423157 - RNA, 20 nt, Human
agaauagccuagauaugaau

SEQ ID NO: 3423158 - RNA, 22 nt, Human
agaauauaacaugaaaugauag

SEQ ID NO: 3423159 - RNA, 14 nt, Human
agaauauaauuauc

SEQ ID NO: 3423160 - RNA, 13 nt, Human
agaauauauacau

SEQ ID NO: 3423161 - RNA, 14 nt, Human
agaauauauuuauu

SEQ ID NO: 3423162 - RNA, 11 nt, Human
agaauaucugg

SEQ ID NO: 3423163 - RNA, 13 nt, Human
agaauaugaaaca

SEQ ID NO: 3423164 - RNA, 20 nt, Human
agaauaugcaucuuaaaaug

SEQ ID NO: 3423165 - RNA, 13 nt, Human
agaauaugucugc

SEQ ID NO: 3423166 - RNA, 21 nt, Human
agaauauuagcuuuacuguuu

SEQ ID NO: 3423167 - RNA, 23 nt, Human
agaauauuagcuuuacuguuugu

SEQ ID NO: 3423168 - RNA, 23 nt, Human
agaauauucagacaaaauggaua

SEQ ID NO: 3423169 - RNA, 13 nt, Human
agaauauugcaaa

SEQ ID NO: 3423170 - RNA, 16 nt, Human
agaauauugcaaaaua

SEQ ID NO: 3423171 - RNA, 19 nt, Human
agaauauuuauuaccucug

SEQ ID NO: 3423172 - RNA, 20 nt, Human
agaauauuuuaaguauugca

SEQ ID NO: 3423173 - RNA, 21 nt, Human
agaauauuuuuauauuuccuu

SEQ ID NO: 3423174 - RNA, 15 nt, Human
agaaucacaggcugg

SEQ ID NO: 3423175 - RNA, 19 nt, Human
agaaucaccuaauuaauuu

SEQ ID NO: 3423176 - RNA, 17 nt, Human
agaaucagaucauuuca

SEQ ID NO: 3423177 - RNA, 21 nt, Human
agaaucagucuauccacagag

SEQ ID NO: 3423178 - RNA, 19 nt, Human
agaaucagucuugcagcug

SEQ ID NO: 3423179 - RNA, 14 nt, Human
agaaucauacuuag

SEQ ID NO: 3423180 - RNA, 13 nt, Human
agaaucauguuuc

SEQ ID NO: 3423181 - RNA, 14 nt, Human
agaaucauguuucu

SEQ ID NO: 3423182 - RNA, 21 nt, Human
agaaucauuauuuauuaaauu

SEQ ID NO: 3423183 - RNA, 13 nt, Human
agaaucauugcuu

SEQ ID NO: 3423184 - RNA, 14 nt, Human
agaaucauugcuua

SEQ ID NO: 3423185 - RNA, 14 nt, Human
agaauccaaacuug

SEQ ID NO: 3423186 - RNA, 22 nt, Human
agaauccacauuucuaaaaucu

SEQ ID NO: 3423187 - RNA, 17 nt, Human
agaaucccaaauuugau

SEQ ID NO: 3423188 - RNA, 23 nt, Human
agaaucccagccggccaauggaa

SEQ ID NO: 3423189 - RNA, 14 nt, Human
agaaucccuguuca

SEQ ID NO: 3423190 - RNA, 22 nt, Human
agaaucccuuaacaguuguauu

SEQ ID NO: 3423191 - RNA, 21 nt, Human
agaauccuaggcuccacccca

SEQ ID NO: 3423192 - RNA, 17 nt, Human
agaauccuuuuguagaa

SEQ ID NO: 3423193 - RNA, 22 nt, Human
agaaucgaugggggaugcuuca

SEQ ID NO: 3423194 - RNA, 16 nt, Human
agaaucuaaagccagu

SEQ ID NO: 3423195 - RNA, 21 nt, Human
agaaucuaacugguggacaug

SEQ ID NO: 3423196 - RNA, 18 nt, Human
agaaucuauauuuaacaa

SEQ ID NO: 3423197 - RNA, 12 nt, Human
agaaucuauuuu

SEQ ID NO: 3423198 - RNA, 15 nt, Human
agaaucuauuuucua

SEQ ID NO: 3423199 - RNA, 17 nt, Human
agaaucugcaauucaaa

SEQ ID NO: 3423200 - RNA, 20 nt, Human
agaaucuugguuugccuucc

SEQ ID NO: 3423201 - RNA, 12 nt, Human
agaaucuuuccu

SEQ ID NO: 3423202 - RNA, 14 nt, Human
agaaugaaaaauga

SEQ ID NO: 3423203 - RNA, 22 nt, Human
agaaugaaaaaugaaagaugau

SEQ ID NO: 3423204 - RNA, 12 nt, Human
agaaugaaagag

SEQ ID NO: 3423205 - RNA, 19 nt, Human
agaaugaaagaguaaagga

SEQ ID NO: 3423206 - RNA, 18 nt, Human
agaaugaaagggcccaga

SEQ ID NO: 3423207 - RNA, 16 nt, Human
agaaugaaauacuguu

SEQ ID NO: 3423208 - RNA, 19 nt, Human
agaaugaaauacuguuuga

SEQ ID NO: 3423209 - RNA, 20 nt, Human
agaaugaaauacuguuugag

SEQ ID NO: 3423210 - RNA, 22 nt, Human
agaaugaagguuuuuguaaaga

SEQ ID NO: 3423211 - RNA, 12 nt, Human
agaaugaccuug

SEQ ID NO: 3423212 - RNA, 21 nt, Human
agaaugacuauauaauuuauu

SEQ ID NO: 3423213 - RNA, 14 nt, Human
agaaugagacaucc

SEQ ID NO: 3423214 - RNA, 17 nt, Human
agaaugagagacacacu

SEQ ID NO: 3423215 - RNA, 14 nt, Human
agaaugaggcugcu

SEQ ID NO: 3423216 - RNA, 22 nt, Human
agacaggcaagcaccuccugcc

SEQ ID NO: 3423217 - RNA, 23 nt, Human
agacaggcaagcaccuccugccu

SEQ ID NO: 3423218 - RNA, 22 nt, Human
agacaggcccaagagaugaaga

SEQ ID NO: 3423219 - RNA, 23 nt, Human
agacaggcccaagagaugaagag

SEQ ID NO: 3423220 - RNA, 20 nt, Human
agacaggcucuuagcagcuu

SEQ ID NO: 3423221 - RNA, 23 nt, Human
agacaggguuucaccauguugcc

SEQ ID NO: 3423222 - RNA, 16 nt, Human
agacaggguuuggcug

SEQ ID NO: 3423223 - RNA, 18 nt, Human
agacagguuuucacauaa

SEQ ID NO: 3423224 - RNA, 21 nt, Human
agacagguuuucacauaaaug

SEQ ID NO: 3423225 - RNA, 22 nt, Human
agacagguuuucacauaaaugc

SEQ ID NO: 3423226 - RNA, 17 nt, Human
agacaguaaguaucuuc

SEQ ID NO: 3423227 - RNA, 22 nt, Human
agacaguaaguaucuucguucu

SEQ ID NO: 3423228 - RNA, 14 nt, Human
agacaguauacagu

SEQ ID NO: 3423229 - RNA, 17 nt, Human
agacaguauacaguccu

SEQ ID NO: 3423230 - RNA, 21 nt, Human
agacaguauacaguccugugg

SEQ ID NO: 3423231 - RNA, 17 nt, Human
agacagucaaggagugg

SEQ ID NO: 3423232 - RNA, 18 nt, Human
agacagucacaaauuucu

SEQ ID NO: 3423233 - RNA, 17 nt, Human
agacagucccugccaau

SEQ ID NO: 3423234 - RNA, 19 nt, Human
agacagugauauuggaacu

SEQ ID NO: 3423235 - RNA, 12 nt, Human
agacagugaucu

SEQ ID NO: 3423236 - RNA, 17 nt, Human
agacagugaucuccaua

SEQ ID NO: 3423237 - RNA, 20 nt, Human
agacagugaucuccauaugu

SEQ ID NO: 3423238 - RNA, 13 nt, Human
agacaguuucuua

SEQ ID NO: 3423239 - RNA, 14 nt, Human
agacaguuucuuag

SEQ ID NO: 3423240 - RNA, 22 nt, Human
accuuagcuggcauuacagcug

SEQ ID NO: 3423241 - RNA, 16 nt, Human
accuuaggcagggaag

SEQ ID NO: 3423242 - RNA, 22 nt, Human
accuuaggcccggagcugcccc

SEQ ID NO: 3423243 - RNA, 21 nt, Human
accuuaggccuuccucucucc

SEQ ID NO: 3423244 - RNA, 17 nt, Human
accuuagugcaguuauu

SEQ ID NO: 3423245 - RNA, 21 nt, Human
accuuagugcaguuauuugcu

SEQ ID NO: 3423246 - RNA, 14 nt, Human
accuuaguggcuuu

SEQ ID NO: 3423247 - RNA, 14 nt, Human
accuuaguguuucu

SEQ ID NO: 3423248 - RNA, 19 nt, Human
accuuaguguuucugugca

SEQ ID NO: 3423249 - RNA, 21 nt, Human
accuuaguguuucugugcaug

SEQ ID NO: 3423250 - RNA, 22 nt, Human
accuuaguguuucugugcaugg

SEQ ID NO: 3423251 - RNA, 19 nt, Human
accuuaucacugcauuauu

SEQ ID NO: 3423252 - RNA, 18 nt, Human
accuuauccugcauuguu

SEQ ID NO: 3423253 - RNA, 11 nt, Human
accuuaucugu

SEQ ID NO: 3423254 - RNA, 23 nt, Human
accuuaucugugcgugaaacaca

SEQ ID NO: 3423255 - RNA, 11 nt, Human
accuuaucuua

SEQ ID NO: 3423256 - RNA, 16 nt, Human
accuuauuuuuuccca

SEQ ID NO: 3423257 - RNA, 19 nt, Human
accuucaaacuagggccaa

SEQ ID NO: 3423258 - RNA, 17 nt, Human
accuucaauaaaguauc

SEQ ID NO: 3423259 - RNA, 17 nt, Human
accuucaauuccugggc

SEQ ID NO: 3423260 - RNA, 23 nt, Human
accuucacacacagacuguuguc

SEQ ID NO: 3423261 - RNA, 18 nt, Human
accuucacucuaagaugu

SEQ ID NO: 3423262 - RNA, 22 nt, Human
accuucacucuaagauguuaua

SEQ ID NO: 3423263 - RNA, 17 nt, Human
accuucagacuuugcuu

SEQ ID NO: 3423264 - RNA, 16 nt, Human
accuucagcucacgcu

SEQ ID NO: 3423265 - RNA, 20 nt, Human
accuucauucugagaccaaa

SEQ ID NO: 3423266 - RNA, 15 nt, Human
accuucauuucaugu

SEQ ID NO: 3423267 - RNA, 17 nt, Human
accuuccaagagccuga

SEQ ID NO: 3423268 - RNA, 12 nt, Human
accuuccaccca

SEQ ID NO: 3423269 - RNA, 23 nt, Human
accuuccagaaauacuacugugu

SEQ ID NO: 3423270 - RNA, 17 nt, Human
accuuccagucaggaug

SEQ ID NO: 3423271 - RNA, 14 nt, Human
accuucccaaacgc

SEQ ID NO: 3423272 - RNA, 11 nt, Human
accuucccagc

SEQ ID NO: 3423273 - RNA, 13 nt, Human
accuucccagcuc

SEQ ID NO: 3423274 - RNA, 19 nt, Human
accuucccagcucucccuc

SEQ ID NO: 3423275 - RNA, 17 nt, Human
accuucccaugcccugg

SEQ ID NO: 3423276 - RNA, 16 nt, Human
accuuccucacuucca

SEQ ID NO: 3423277 - RNA, 14 nt, Human
accuuccucaucua

SEQ ID NO: 3423278 - RNA, 24 nt, Human
accuuccuucccugggcugugcua

SEQ ID NO: 3423279 - RNA, 12 nt, Human
accuuccuuccu

SEQ ID NO: 3423280 - RNA, 14 nt, Human
accuuccuuccugu

SEQ ID NO: 3423281 - RNA, 17 nt, Human
accuucgccaccugggu

SEQ ID NO: 3423282 - RNA, 14 nt, Human
accuucgggcugug

SEQ ID NO: 3423283 - RNA, 16 nt, Human
accuucgggcugugcc

SEQ ID NO: 3423284 - RNA, 18 nt, Human
accuucgggcugugcccg

SEQ ID NO: 3423285 - RNA, 18 nt, Human
accuucuagucuuggcca

SEQ ID NO: 3423286 - RNA, 15 nt, Human
accuucuccccagcu

SEQ ID NO: 3423287 - RNA, 22 nt, Human
accuucuccccagcucccagga

SEQ ID NO: 3423288 - RNA, 22 nt, Human
accuucucuauggggcauccuc

SEQ ID NO: 3423289 - RNA, 22 nt, Human
accuucucuggagccaagucca

SEQ ID NO: 3423290 - RNA, 23 nt, Human
accuucugcccauccugucuguu

SEQ ID NO: 3423291 - RNA, 12 nt, Human
accuucugccuu

SEQ ID NO: 3423292 - RNA, 22 nt, Human
accuucuggccucccacagacu

SEQ ID NO: 3423293 - RNA, 19 nt, Human
accuucuggcuuccuucuc

SEQ ID NO: 3423294 - RNA, 16 nt, Human
accuucuguggcucac

SEQ ID NO: 3423295 - RNA, 15 nt, Human
accuucuuauuauau

SEQ ID NO: 3423296 - RNA, 19 nt, Human
accuucuucaggcugccua

SEQ ID NO: 3423297 - RNA, 18 nt, Human
accuugaaaaaaaacagu

SEQ ID NO: 3423298 - RNA, 15 nt, Human
accuugaaugaugcc

SEQ ID NO: 3423299 - RNA, 17 nt, Human
accuugaaugcugccag

SEQ ID NO: 3423300 - RNA, 15 nt, Human
accuugacagggcac

SEQ ID NO: 3423301 - RNA, 19 nt, Human
accuugacuguugauguac

SEQ ID NO: 3423302 - RNA, 17 nt, Human
accuugacuugauuagu

SEQ ID NO: 3423303 - RNA, 19 nt, Human
accuugaggagucuugugu

SEQ ID NO: 3423304 - RNA, 22 nt, Human
accuugaggucuuuugacaugu

SEQ ID NO: 3423305 - RNA, 17 nt, Human
accuugaugagcugugc

SEQ ID NO: 3423306 - RNA, 23 nt, Human
accuugauuggggaauuaaaagu

SEQ ID NO: 3423307 - RNA, 16 nt, Human
accuugcaacacacag

SEQ ID NO: 3423308 - RNA, 19 nt, Human
accuugcaacacacagaca

SEQ ID NO: 3423309 - RNA, 15 nt, Human
accuugcaacuucau

SEQ ID NO: 3423310 - RNA, 17 nt, Human
accuugccaauuaguaa

SEQ ID NO: 3423311 - RNA, 20 nt, Human
accuugcuaauuuucucaaa

SEQ ID NO: 3423312 - RNA, 11 nt, Human
accuugcuguc

SEQ ID NO: 3423313 - RNA, 14 nt, Human
accuugcuguccug

SEQ ID NO: 3423314 - RNA, 17 nt, Human
accuugcuguccugauc

SEQ ID NO: 3423315 - RNA, 23 nt, Human
accuugcuguccugaucugugau

SEQ ID NO: 3423316 - RNA, 12 nt, Human
accuugcuucuu

SEQ ID NO: 3423317 - RNA, 13 nt, Human
accuugcuuuugc

SEQ ID NO: 3423318 - RNA, 19 nt, Human
accuuggacauccuccucc

SEQ ID NO: 3423319 - RNA, 14 nt, Human
accuuggcaccaga

SEQ ID NO: 3423320 - RNA, 16 nt, Human
accuuggcaccagaca

SEQ ID NO: 3423321 - RNA, 18 nt, Human
accuuggcaccagacacc

SEQ ID NO: 3423322 - RNA, 16 nt, Human
accuuggccugggccg

SEQ ID NO: 3423323 - RNA, 17 nt, Human
accuuggcuuggcccug

SEQ ID NO: 3423324 - RNA, 17 nt, Human
accuuggguuagaccua

SEQ ID NO: 3423325 - RNA, 23 nt, Human
accuugguguaguugaacugaua

SEQ ID NO: 3423326 - RNA, 13 nt, Human
accuugguuccug

SEQ ID NO: 3423327 - RNA, 12 nt, Human
accuuguaaaag

SEQ ID NO: 3423328 - RNA, 15 nt, Human
accuuguaaaagaca

SEQ ID NO: 3423329 - RNA, 14 nt, Human
accuuguaauguaa

SEQ ID NO: 3423330 - RNA, 18 nt, Human
accuugucauuuuggucu

SEQ ID NO: 3423331 - RNA, 14 nt, Human
accuugugccuggc

SEQ ID NO: 3423332 - RNA, 20 nt, Human
accuuguggcaagccccugc

SEQ ID NO: 3423333 - RNA, 12 nt, Human
accuugugucug

SEQ ID NO: 3423334 - RNA, 21 nt, Human
accuugugucuguacacgugu

SEQ ID NO: 3423335 - RNA, 16 nt, Human
accuuguuacuucuga

SEQ ID NO: 3423336 - RNA, 21 nt, Human
accuuguucacacucucacau

SEQ ID NO: 3423337 - RNA, 22 nt, Human
accuuguugcaugauguauuuu

SEQ ID NO: 3423338 - RNA, 16 nt, Human
accuuguuggagccug

SEQ ID NO: 3423339 - RNA, 18 nt, Human
accuuguuggagccugca

SEQ ID NO: 3423340 - RNA, 19 nt, Human
accuuguuggagccugcag

SEQ ID NO: 3423341 - RNA, 13 nt, Human
accuuuacuuuag

SEQ ID NO: 3423342 - RNA, 15 nt, Human
accuuuauuaaaauc

SEQ ID NO: 3423343 - RNA, 18 nt, Human
accuuuauuaaaaucuua

SEQ ID NO: 3423344 - RNA, 14 nt, Human
accuuuauucuuuu

SEQ ID NO: 3423345 - RNA, 17 nt, Human
accuuuauuuuagaauu

SEQ ID NO: 3423346 - RNA, 14 nt, Human
accuuucaaagcuu

SEQ ID NO: 3423347 - RNA, 17 nt, Human
accuuucaaauuucaca

SEQ ID NO: 3423348 - RNA, 23 nt, Human
accuuucaauaggaaaaacugau

SEQ ID NO: 3423349 - RNA, 15 nt, Human
accuuucacauagag

SEQ ID NO: 3423350 - RNA, 18 nt, Human
accuuucaccuuugugua

SEQ ID NO: 3423351 - RNA, 17 nt, Human
accuuucagcugugaac

SEQ ID NO: 3423352 - RNA, 11 nt, Human
accuuucauac

SEQ ID NO: 3423353 - RNA, 18 nt, Human
accuuucccucacccccu

SEQ ID NO: 3423354 - RNA, 19 nt, Human
accuuucccucacccccuc

SEQ ID NO: 3423355 - RNA, 15 nt, Human
accuuucuaguugaa

SEQ ID NO: 3423356 - RNA, 13 nt, Human
accuuucucucuc

SEQ ID NO: 3423357 - RNA, 20 nt, Human
accuuugaguagauccauuu

SEQ ID NO: 3423358 - RNA, 23 nt, Human
accuuugcacaggaugcuggccu

SEQ ID NO: 3423359 - RNA, 18 nt, Human
accuuuggagcaaagcug

SEQ ID NO: 3423360 - RNA, 15 nt, Human
accuuuggcuuaauu

SEQ ID NO: 3423361 - RNA, 18 nt, Human
accuuuggcuuaauucca

SEQ ID NO: 3423362 - RNA, 17 nt, Human
accuuuguacagcccag

SEQ ID NO: 3423363 - RNA, 17 nt, Human
accuuuguccccaccgc

SEQ ID NO: 3423364 - RNA, 13 nt, Human
accuuugugcccu

SEQ ID NO: 3423365 - RNA, 18 nt, Human
accuuugugcccuaucac

SEQ ID NO: 3423366 - RNA, 19 nt, Human
accuuuuaaaguguuucag

SEQ ID NO: 3423367 - RNA, 20 nt, Human
accuuuuaaauccuguugaa

SEQ ID NO: 3423368 - RNA, 12 nt, Human
accuuuuaacac

SEQ ID NO: 3423369 - RNA, 21 nt, Human
accuuuuaacaccugaugugu

SEQ ID NO: 3423370 - RNA, 14 nt, Human
accuuuuaacucac

SEQ ID NO: 3423371 - RNA, 11 nt, Human
accuuuuacug

SEQ ID NO: 3423372 - RNA, 13 nt, Human
accuuuuacugug

SEQ ID NO: 3423373 - RNA, 15 nt, Human
accuuuuauccacuu

SEQ ID NO: 3423374 - RNA, 20 nt, Human
accuuuuauguaguaauuga

SEQ ID NO: 3423375 - RNA, 14 nt, Human
accuuuuauuacau

SEQ ID NO: 3423376 - RNA, 18 nt, Human
agacaauaugugagugcc

SEQ ID NO: 3423377 - RNA, 19 nt, Human
agacaaucauguacagaaa

SEQ ID NO: 3423378 - RNA, 13 nt, Human
agacaaucuucug

SEQ ID NO: 3423379 - RNA, 13 nt, Human
agacaaugacuua

SEQ ID NO: 3423380 - RNA, 17 nt, Human
agacaaugacuuacugu

SEQ ID NO: 3423381 - RNA, 19 nt, Human
agacaaugacuuacuguac

SEQ ID NO: 3423382 - RNA, 20 nt, Human
agacaaugcaccuagcugug

SEQ ID NO: 3423383 - RNA, 16 nt, Human
agacaaugcagaugcc

SEQ ID NO: 3423384 - RNA, 22 nt, Human
agacaaugcagaugccagagca

SEQ ID NO: 3423385 - RNA, 20 nt, Human
agagaagucacagggcagua

SEQ ID NO: 3423386 - RNA, 14 nt, Human
agagaagugacagg

SEQ ID NO: 3423387 - RNA, 20 nt, Human
agagaagugacagggaagcu

SEQ ID NO: 3423388 - RNA, 17 nt, Human
agagaagugccccugcu

SEQ ID NO: 3423389 - RNA, 15 nt, Human
agagaauaugucugc

SEQ ID NO: 3423390 - RNA, 20 nt, Human
agagaaucaacauuucucaa

SEQ ID NO: 3423391 - RNA, 15 nt, Human
agagaaucauacuua

SEQ ID NO: 3423392 - RNA, 23 nt, Human
agagaaucccuagucuucaagca

SEQ ID NO: 3423393 - RNA, 10 nt, Human
agagaaugag

SEQ ID NO: 3423394 - RNA, 17 nt, Human
agagaauggaaaacaga

SEQ ID NO: 3423395 - RNA, 16 nt, Human
agagaaugucugaucu

SEQ ID NO: 3423396 - RNA, 13 nt, Human
agagaauguuaua

SEQ ID NO: 3423397 - RNA, 21 nt, Human
agagaauguuauagugaauua

SEQ ID NO: 3423398 - RNA, 12 nt, Human
agagaauuggcu

SEQ ID NO: 3423399 - RNA, 14 nt, Human
agagaauuggcuca

SEQ ID NO: 3423400 - RNA, 19 nt, Human
agagaauuguuugaacccg

SEQ ID NO: 3423401 - RNA, 22 nt, Human
agagaauuucuaccauuucaga

SEQ ID NO: 3423402 - RNA, 20 nt, Human
agagacaaacaccucccagg

SEQ ID NO: 3423403 - RNA, 20 nt, Human
agagacaaacuguaaaaaau

SEQ ID NO: 3423404 - RNA, 15 nt, Human
agagacaaguaauuu

SEQ ID NO: 3423405 - RNA, 20 nt, Human
agagacaaguaauuucagug

SEQ ID NO: 3423406 - RNA, 16 nt, Human
agagacacaagccuuc

SEQ ID NO: 3423407 - RNA, 13 nt, Human
agagacaccugca

SEQ ID NO: 3423408 - RNA, 14 nt, Human
agagacaccugcac

SEQ ID NO: 3423409 - RNA, 18 nt, Human
agagacaccugcaccucc

SEQ ID NO: 3423410 - RNA, 22 nt, Human
agagacaccugcaccucccccc

SEQ ID NO: 3423411 - RNA, 22 nt, Human
agagacacuguugauaaaaacu

SEQ ID NO: 3423412 - RNA, 21 nt, Human
agagacagaaagcagaacagu

SEQ ID NO: 3423413 - RNA, 14 nt, Human
agagacagaagcag

SEQ ID NO: 3423414 - RNA, 15 nt, Human
agagacagaagcagg

SEQ ID NO: 3423415 - RNA, 19 nt, Human
agagacagacuugagaacu

SEQ ID NO: 3423416 - RNA, 23 nt, Human
agagacagauaccuccaacccug

SEQ ID NO: 3423417 - RNA, 14 nt, Human
agagacaggagggc

SEQ ID NO: 3423418 - RNA, 12 nt, Human
agagacaggcag

SEQ ID NO: 3423419 - RNA, 22 nt, Human
agagacaggcaggugaucugcu

SEQ ID NO: 3423420 - RNA, 13 nt, Human
agagacaucagcc

SEQ ID NO: 3423421 - RNA, 23 nt, Human
agagacauuaacucauuagacug

SEQ ID NO: 3423422 - RNA, 19 nt, Human
agagaccacccauaucaug

SEQ ID NO: 3423423 - RNA, 19 nt, Human
agagaccagggcuccagcc

SEQ ID NO: 3423424 - RNA, 21 nt, Human
agagaccaucccugaaggccc

SEQ ID NO: 3423425 - RNA, 21 nt, Human
agagacccaaggaggaaaaac

SEQ ID NO: 3423426 - RNA, 17 nt, Human
acuacaaagguuuaaau

SEQ ID NO: 3423427 - RNA, 20 nt, Human
acuacaaagguuuaaaugaa

SEQ ID NO: 3423428 - RNA, 11 nt, Human
acuacaaauca

SEQ ID NO: 3423429 - RNA, 16 nt, Human
acuacaaccaauggaa

SEQ ID NO: 3423430 - RNA, 16 nt, Human
acuacaauauguacau

SEQ ID NO: 3423431 - RNA, 20 nt, Human
acuacaauauguacauuucu

SEQ ID NO: 3423432 - RNA, 17 nt, Human
acuacaauuuaaagcaa

SEQ ID NO: 3423433 - RNA, 22 nt, Human
acuacaauuuaaagcaaaggag

SEQ ID NO: 3423434 - RNA, 20 nt, Human
acuacacaucccuaaugugu

SEQ ID NO: 3423435 - RNA, 15 nt, Human
acuacacauucaaua

SEQ ID NO: 3423436 - RNA, 18 nt, Human
acuacacauuuuuaaauu

SEQ ID NO: 3423437 - RNA, 15 nt, Human
acuacaccacacaca

SEQ ID NO: 3423438 - RNA, 23 nt, Human
acuacaccauguuugagcucaga

SEQ ID NO: 3423439 - RNA, 14 nt, Human
acuacaccuggcug

SEQ ID NO: 3423440 - RNA, 15 nt, Human
acuacacuccagccu

SEQ ID NO: 3423441 - RNA, 19 nt, Human
acuacacuccagccugagc

SEQ ID NO: 3423442 - RNA, 18 nt, Human
acuacagacauuaaauaa

SEQ ID NO: 3423443 - RNA, 16 nt, Human
acuacagaccugcuuu

SEQ ID NO: 3423444 - RNA, 18 nt, Human
acuacagaccugcuuuuu

SEQ ID NO: 3423445 - RNA, 19 nt, Human
acuacagcuggggugcagg

SEQ ID NO: 3423446 - RNA, 21 nt, Human
acuacagcuggggugcaggga

SEQ ID NO: 3423447 - RNA, 11 nt, Human
acuacaggcac

SEQ ID NO: 3423448 - RNA, 15 nt, Human
acuacaggcacccac

SEQ ID NO: 3423449 - RNA, 18 nt, Human
acuacagggccgccggca

SEQ ID NO: 3423450 - RNA, 23 nt, Human
acuacaggugugagucaccaagc

SEQ ID NO: 3423451 - RNA, 16 nt, Human
acuacagucuaaagcu

SEQ ID NO: 3423452 - RNA, 15 nt, Human
acuacaguuuguuag

SEQ ID NO: 3423453 - RNA, 16 nt, Human
acuacauaaacugacu

SEQ ID NO: 3423454 - RNA, 17 nt, Human
acuacauaaacugacuu

SEQ ID NO: 3423455 - RNA, 17 nt, Human
acuacaucgcccuccac

SEQ ID NO: 3423456 - RNA, 18 nt, Human
acuacaugugguuuauag

SEQ ID NO: 3423457 - RNA, 18 nt, Human
acuacauuagguugugaa

SEQ ID NO: 3423458 - RNA, 19 nt, Human
acuacauuagguugugaau

SEQ ID NO: 3423459 - RNA, 13 nt, Human
acuacauucauuu

SEQ ID NO: 3423460 - RNA, 12 nt, Human
acuacauucugu

SEQ ID NO: 3423461 - RNA, 13 nt, Human
acuacauuuauga

SEQ ID NO: 3423462 - RNA, 15 nt, Human
acuacauuuuaacau

SEQ ID NO: 3423463 - RNA, 13 nt, Human
acuacauuuuuuc

SEQ ID NO: 3423464 - RNA, 21 nt, Human
acuaccaagaggcccugucug

SEQ ID NO: 3423465 - RNA, 15 nt, Human
acuacccauagacau

SEQ ID NO: 3423466 - RNA, 14 nt, Human
acuaccccuugauu

SEQ ID NO: 3423467 - RNA, 15 nt, Human
acuacccuuaauuac

SEQ ID NO: 3423468 - RNA, 23 nt, Human
acuaccgaaugugucuuuagaua

SEQ ID NO: 3423469 - RNA, 14 nt, Human
acuaccuccucagg

SEQ ID NO: 3423470 - RNA, 15 nt, Human
acuaccuccucaggg

SEQ ID NO: 3423471 - RNA, 14 nt, Human
acuaccuccucucc

SEQ ID NO: 3423472 - RNA, 17 nt, Human
acuaccuccucuccuga

SEQ ID NO: 3423473 - RNA, 23 nt, Human
acuaccuguauuuaaaaauagaa

SEQ ID NO: 3423474 - RNA, 12 nt, Human
acuaccugugua

SEQ ID NO: 3423475 - RNA, 15 nt, Human
acuaccuuaucacug

SEQ ID NO: 3423476 - RNA, 19 nt, Human
acuacuaauagaauaaagg

SEQ ID NO: 3423477 - RNA, 18 nt, Human
acuacucaaagcaaaagu

SEQ ID NO: 3423478 - RNA, 12 nt, Human
acuacucagcau

SEQ ID NO: 3423479 - RNA, 17 nt, Human
acuacucagcauggaaa

SEQ ID NO: 3423480 - RNA, 17 nt, Human
acuacucagggaaugaa

SEQ ID NO: 3423481 - RNA, 14 nt, Human
acuacucuuugauu

SEQ ID NO: 3423482 - RNA, 15 nt, Human
acuacucuuugauuu

SEQ ID NO: 3423483 - RNA, 18 nt, Human
acuacugacauguggggc

SEQ ID NO: 3423484 - RNA, 15 nt, Human
acuacugcagcaccu

SEQ ID NO: 3423485 - RNA, 21 nt, Human
acuacugccuuuagaaaauau

SEQ ID NO: 3423486 - RNA, 20 nt, Human
acuacugcuaccacaacuau

SEQ ID NO: 3423487 - RNA, 16 nt, Human
acuacugggugucauu

SEQ ID NO: 3423488 - RNA, 21 nt, Human
acuacuguggaaaaauauuua

SEQ ID NO: 3423489 - RNA, 17 nt, Human
acuacuuagcauccuaa

SEQ ID NO: 3423490 - RNA, 22 nt, Human
acuacuuagcauccuaagaaau

SEQ ID NO: 3423491 - RNA, 23 nt, Human
acuacuucuuuuuucaaaagaaa

SEQ ID NO: 3423492 - RNA, 19 nt, Human
acuacuugauggucagaca

SEQ ID NO: 3423493 - RNA, 21 nt, Human
acuacuugauggucagacaca

SEQ ID NO: 3423494 - RNA, 17 nt, Human
acuacuugggagcaccg

SEQ ID NO: 3423495 - RNA, 13 nt, Human
acuacuuugccuu

SEQ ID NO: 3423496 - RNA, 16 nt, Human
acuacuuugcugcuaa

SEQ ID NO: 3423497 - RNA, 18 nt, Human
acuagaaagugaauaaaa

SEQ ID NO: 3423498 - RNA, 19 nt, Human
acuagaaagugaauaaaaa

SEQ ID NO: 3423499 - RNA, 15 nt, Human
acuagaaaucugcca

SEQ ID NO: 3423500 - RNA, 23 nt, Human
acuagaaccuggagggcuagaac

SEQ ID NO: 3423501 - RNA, 16 nt, Human
acuagaacucuccauc

SEQ ID NO: 3423502 - RNA, 23 nt, Human
acuagaagggccaguccugccug

SEQ ID NO: 3423503 - RNA, 17 nt, Human
acuagaauucuagugcu

SEQ ID NO: 3423504 - RNA, 19 nt, Human
acuagaauucuagugcugc

SEQ ID NO: 3423505 - RNA, 20 nt, Human
acuagaauucuagugcugcu

SEQ ID NO: 3423506 - RNA, 23 nt, Human
acuagaauucuagugcugcugaa

SEQ ID NO: 3423507 - RNA, 17 nt, Human
acuagacaagccagaac

SEQ ID NO: 3423508 - RNA, 20 nt, Human
acuagacaccaaaguucuaa

SEQ ID NO: 3423509 - RNA, 16 nt, Human
acuagaccuccagcug

SEQ ID NO: 3423510 - RNA, 19 nt, Human
acuagacucccaagcugga

SEQ ID NO: 3423511 - RNA, 11 nt, Human
acuagacucuu

SEQ ID NO: 3423512 - RNA, 20 nt, Human
acuagacuugaggaaaccag

SEQ ID NO: 3423513 - RNA, 12 nt, Human
acuagagaaacc

SEQ ID NO: 3423514 - RNA, 19 nt, Human
acuagagcagcccuggagu

SEQ ID NO: 3423515 - RNA, 15 nt, Human
acuagagcuuucuuu

SEQ ID NO: 3423516 - RNA, 21 nt, Human
acuagaggaaaccaguuuggu

SEQ ID NO: 3423517 - RNA, 15 nt, Human
acuagaggcagggag

SEQ ID NO: 3423518 - RNA, 19 nt, Human
acuagagggaccucuccca

SEQ ID NO: 3423519 - RNA, 18 nt, Human
acuagaggugagaaauuu

SEQ ID NO: 3423520 - RNA, 20 nt, Human
acuagagucugaacagcugu

SEQ ID NO: 3423521 - RNA, 13 nt, Human
acuagaugaugga

SEQ ID NO: 3423522 - RNA, 13 nt, Human
acuagauuacauu

SEQ ID NO: 3423523 - RNA, 13 nt, Human
acuagcaaaauaa

SEQ ID NO: 3423524 - RNA, 17 nt, Human
acuagcauaucugccuu

SEQ ID NO: 3423525 - RNA, 16 nt, Human
acuagccaaaccucac

SEQ ID NO: 3423526 - RNA, 18 nt, Human
acuagccaaaccucacca

SEQ ID NO: 3423527 - RNA, 15 nt, Human
acuagcccaaugaaa

SEQ ID NO: 3423528 - RNA, 21 nt, Human
acuagccccuguggagacugg

SEQ ID NO: 3423529 - RNA, 18 nt, Human
acuagcccuccuuuuucc

SEQ ID NO: 3423530 - RNA, 20 nt, Human
agagauggccugagaagaga

SEQ ID NO: 3423531 - RNA, 23 nt, Human
agagauggcuuacaaaaagaaau

SEQ ID NO: 3423532 - RNA, 19 nt, Human
agagaugggaaugaggugg

SEQ ID NO: 3423533 - RNA, 16 nt, Human
agagaugggacuggga

SEQ ID NO: 3423534 - RNA, 15 nt, Human
agagaugggagcucc

SEQ ID NO: 3423535 - RNA, 17 nt, Human
agagaugggagcuccuc

SEQ ID NO: 3423536 - RNA, 24 nt, Human
agagaugggagcuccucuccugga

SEQ ID NO: 3423537 - RNA, 23 nt, Human
agagauguccauuuuuacaaguu

SEQ ID NO: 3423538 - RNA, 14 nt, Human
agagaugugcaccc

SEQ ID NO: 3423539 - RNA, 12 nt, Human
agagaugugugu

SEQ ID NO: 3423540 - RNA, 17 nt, Human
agagauguguguugaua

SEQ ID NO: 3423541 - RNA, 21 nt, Human
agagauguuuuuaaaaguuuc

SEQ ID NO: 3423542 - RNA, 19 nt, Human
agagauuaccuccugagaa

SEQ ID NO: 3423543 - RNA, 13 nt, Human
agagauugcuaau

SEQ ID NO: 3423544 - RNA, 21 nt, Human
agagauuggaaugggcagcuc

SEQ ID NO: 3423545 - RNA, 16 nt, Human
agagauuuaauuaauc

SEQ ID NO: 3423546 - RNA, 18 nt, Human
agagauuuauauaaaugu

SEQ ID NO: 3423547 - RNA, 21 nt, Human
agagauuuauauaaauguaaa

SEQ ID NO: 3423548 - RNA, 22 nt, Human
agagauuuggggcuaaagacug

SEQ ID NO: 3423549 - RNA, 14 nt, Human
agagcaaaauugau

SEQ ID NO: 3423550 - RNA, 14 nt, Human
agagcaaagugacc

SEQ ID NO: 3423551 - RNA, 24 nt, Human
agagcaaccccuggaccccagccu

SEQ ID NO: 3423552 - RNA, 18 nt, Human
agagcaagaccccaucuc

SEQ ID NO: 3423553 - RNA, 14 nt, Human
agagcaagacucug

SEQ ID NO: 3423554 - RNA, 21 nt, Human
agagcaagacucugucuaaaa

SEQ ID NO: 3423555 - RNA, 18 nt, Human
agagcaagcuuuuuuauu

SEQ ID NO: 3423556 - RNA, 14 nt, Human
agagcaagucugca

SEQ ID NO: 3423557 - RNA, 14 nt, Human
agagcaagucugga

SEQ ID NO: 3423558 - RNA, 13 nt, Human
agagcacaaacau

SEQ ID NO: 3423559 - RNA, 15 nt, Human
agagcacagcccucc

SEQ ID NO: 3423560 - RNA, 16 nt, Human
agagcaccccucucug

SEQ ID NO: 3423561 - RNA, 19 nt, Human
agagcaccuaguccaguga

SEQ ID NO: 3423562 - RNA, 14 nt, Human
agagcaccuuccuc

SEQ ID NO: 3423563 - RNA, 21 nt, Human
agagcaccuuccucacuucca

SEQ ID NO: 3423564 - RNA, 20 nt, Human
agagcacgccuguacuagag

SEQ ID NO: 3423565 - RNA, 12 nt, Human
agagcacugcca

SEQ ID NO: 3423566 - RNA, 12 nt, Human
agagcacugcuc

SEQ ID NO: 3423567 - RNA, 20 nt, Human
agagcacuggguugcagggg

SEQ ID NO: 3423568 - RNA, 17 nt, Human
agagcacuguauacccc

SEQ ID NO: 3423569 - RNA, 22 nt, Human
agagcacuuaagagaauauuuu

SEQ ID NO: 3423570 - RNA, 17 nt, Human
agagcagaaauucuguu

SEQ ID NO: 3423571 - RNA, 22 nt, Human
agagcagaaauucuguuuuuaa

SEQ ID NO: 3423572 - RNA, 20 nt, Human
agagcagaacggagccccag

SEQ ID NO: 3423573 - RNA, 17 nt, Human
agagcagacuacagcug

SEQ ID NO: 3423574 - RNA, 12 nt, Human
agagcagagacc

SEQ ID NO: 3423575 - RNA, 18 nt, Human
agagcagagaccaucccu

SEQ ID NO: 3423576 - RNA, 20 nt, Human
agagcagagaccaucccuga

SEQ ID NO: 3423577 - RNA, 12 nt, Human
agagcagcaagg

SEQ ID NO: 3423578 - RNA, 22 nt, Human
agagcagcaccuccucagccug

SEQ ID NO: 3423579 - RNA, 13 nt, Human
agagcagccagga

SEQ ID NO: 3423580 - RNA, 12 nt, Human
agagcagccugu

SEQ ID NO: 3423581 - RNA, 13 nt, Human
agagcagcuucug

SEQ ID NO: 3423582 - RNA, 20 nt, Human
agagcagcuuuaaacucagg

SEQ ID NO: 3423583 - RNA, 18 nt, Human
agagcaggaagcauucag

SEQ ID NO: 3423584 - RNA, 15 nt, Human
agagcaggacuccag

SEQ ID NO: 3423585 - RNA, 17 nt, Human
agagcaggacuccaggc

SEQ ID NO: 3423586 - RNA, 18 nt, Human
acuauauagagauguuuu

SEQ ID NO: 3423587 - RNA, 19 nt, Human
acuauauauauaugccuuu

SEQ ID NO: 3423588 - RNA, 13 nt, Human
acuauauauguga

SEQ ID NO: 3423589 - RNA, 19 nt, Human
acuauaucuguuuuacugc

SEQ ID NO: 3423590 - RNA, 13 nt, Human
acuauaugcaaac

SEQ ID NO: 3423591 - RNA, 13 nt, Human
acuauaugugaau

SEQ ID NO: 3423592 - RNA, 18 nt, Human
acuauauuaucaugcaaa

SEQ ID NO: 3423593 - RNA, 16 nt, Human
acuauauucuggccag

SEQ ID NO: 3423594 - RNA, 22 nt, Human
acuauauuugggccugcuccag

SEQ ID NO: 3423595 - RNA, 23 nt, Human
acuauauuugggccugcuccaga

SEQ ID NO: 3423596 - RNA, 15 nt, Human
acuauauuuugucau

SEQ ID NO: 3423597 - RNA, 16 nt, Human
acuauauuuugucaua

SEQ ID NO: 3423598 - RNA, 18 nt, Human
acuaucauaguuaacaua

SEQ ID NO: 3423599 - RNA, 22 nt, Human
acuaucaugucaaacgugaaaa

SEQ ID NO: 3423600 - RNA, 22 nt, Human
acuauccauaguggacauuguu

SEQ ID NO: 3423601 - RNA, 20 nt, Human
acuaucccaacagucauguu

SEQ ID NO: 3423602 - RNA, 16 nt, Human
acuaucccggcugccc

SEQ ID NO: 3423603 - RNA, 18 nt, Human
acuaucccggcugcccuu

SEQ ID NO: 3423604 - RNA, 17 nt, Human
acuaucuacucuccuca

SEQ ID NO: 3423605 - RNA, 19 nt, Human
acuaucuacucuccucauc

SEQ ID NO: 3423606 - RNA, 17 nt, Human
acuaucucauuuccaag

SEQ ID NO: 3423607 - RNA, 12 nt, Human
acuaucugggug

SEQ ID NO: 3423608 - RNA, 20 nt, Human
acuaucuuacuauuucacaa

SEQ ID NO: 3423609 - RNA, 16 nt, Human
acuaugaaaagcuaga

SEQ ID NO: 3423610 - RNA, 19 nt, Human
acuaugaaaagcuagaauu

SEQ ID NO: 3423611 - RNA, 22 nt, Human
acuaugaacugaaggcagcaug

SEQ ID NO: 3423612 - RNA, 23 nt, Human
acuaugaaugggcaaaacugaau

SEQ ID NO: 3423613 - RNA, 22 nt, Human
acuaugacauaaaaacaacuuu

SEQ ID NO: 3423614 - RNA, 15 nt, Human
acuaugacugcuccc

SEQ ID NO: 3423615 - RNA, 16 nt, Human
acuaugauuuggaaaa

SEQ ID NO: 3423616 - RNA, 16 nt, Human
acuaugcacaauuuaa

SEQ ID NO: 3423617 - RNA, 12 nt, Human
acuaugccugug

SEQ ID NO: 3423618 - RNA, 19 nt, Human
acuaugcguggcuggaacc

SEQ ID NO: 3423619 - RNA, 18 nt, Human
acuaugcguuuuuauaaa

SEQ ID NO: 3423620 - RNA, 20 nt, Human
acuauggaaaaucagcugcu

SEQ ID NO: 3423621 - RNA, 20 nt, Human
acuauggagugcaccaaaga

SEQ ID NO: 3423622 - RNA, 15 nt, Human
acuaugguauuugag

SEQ ID NO: 3423623 - RNA, 21 nt, Human
acuauggugccaauggaaccu

SEQ ID NO: 3423624 - RNA, 11 nt, Human
acuauguaaac

SEQ ID NO: 3423625 - RNA, 14 nt, Human
acuauguaacaugu

SEQ ID NO: 3423626 - RNA, 16 nt, Human
acuauguacaauauuu

SEQ ID NO: 3423627 - RNA, 18 nt, Human
acuauguacaauauuuua

SEQ ID NO: 3423628 - RNA, 12 nt, Human
acuauguaucaa

SEQ ID NO: 3423629 - RNA, 13 nt, Human
acuauguugauaa

SEQ ID NO: 3423630 - RNA, 14 nt, Human
acuauguugcccag

SEQ ID NO: 3423631 - RNA, 22 nt, Human
acuauguuuuaucguccaguga

SEQ ID NO: 3423632 - RNA, 21 nt, Human
acuauuaagaggcagaaaauu

SEQ ID NO: 3423633 - RNA, 17 nt, Human
acuauuauaauuuaaug

SEQ ID NO: 3423634 - RNA, 21 nt, Human
acuauuauguuguuagagaaa

SEQ ID NO: 3423635 - RNA, 22 nt, Human
acuauucaggagaguagaacag

SEQ ID NO: 3423636 - RNA, 14 nt, Human
acuauucaguugug

SEQ ID NO: 3423637 - RNA, 19 nt, Human
acuauucauuaaauguuug

SEQ ID NO: 3423638 - RNA, 21 nt, Human
acuauuccccagcagggucuu

SEQ ID NO: 3423639 - RNA, 16 nt, Human
acuauucgaaugaaaa

SEQ ID NO: 3423640 - RNA, 18 nt, Human
acuauucugagaugacua

SEQ ID NO: 3423641 - RNA, 19 nt, Human
acuauucugagaugacuau

SEQ ID NO: 3423642 - RNA, 15 nt, Human
acuauucugauuaca

SEQ ID NO: 3423643 - RNA, 21 nt, Human
acuauucugauuacacaaaac

SEQ ID NO: 3423644 - RNA, 22 nt, Human
acuauucuugauguaaaaucuu

SEQ ID NO: 3423645 - RNA, 18 nt, Human
acuauugaaguugcagau

SEQ ID NO: 3423646 - RNA, 14 nt, Human
acuauugagucuuc

SEQ ID NO: 3423647 - RNA, 15 nt, Human
acuauugcauuuaua

SEQ ID NO: 3423648 - RNA, 17 nt, Human
acuauugcuugcacaaa

SEQ ID NO: 3423649 - RNA, 19 nt, Human
acuauuggagggugggaga

SEQ ID NO: 3423650 - RNA, 14 nt, Human
acuauuuaacugac

SEQ ID NO: 3423651 - RNA, 16 nt, Human
acuauuuaacugacua

SEQ ID NO: 3423652 - RNA, 17 nt, Human
acuauuuaagaugugaa

SEQ ID NO: 3423653 - RNA, 18 nt, Human
acuauuuaagaugugaaa

SEQ ID NO: 3423654 - RNA, 20 nt, Human
acuauuuaagaugugaaaau

SEQ ID NO: 3423655 - RNA, 21 nt, Human
acuauuuaagaugugaaaauu

SEQ ID NO: 3423656 - RNA, 21 nt, Human
acuauuuaguuuuuguaauuu

SEQ ID NO: 3423657 - RNA, 23 nt, Human
acuauuuaguuuuuguaauuuau

SEQ ID NO: 3423658 - RNA, 18 nt, Human
acuauuugaugagucuua

SEQ ID NO: 3423659 - RNA, 13 nt, Human
acuauuuuaugca

SEQ ID NO: 3423660 - RNA, 19 nt, Human
acuauuuucagaaucugaa

SEQ ID NO: 3423661 - RNA, 12 nt, Human
acuauuuuuacu

SEQ ID NO: 3423662 - RNA, 21 nt, Human
acuauuuuuauuuuuaaauua

SEQ ID NO: 3423663 - RNA, 18 nt, Human
acuauuuuucagaaucuc

SEQ ID NO: 3423664 - RNA, 21 nt, Human
acuauuuuuguuuuuauuaaa

SEQ ID NO: 3423665 - RNA, 18 nt, Human
acucaaaagcugggcagg

SEQ ID NO: 3423666 - RNA, 15 nt, Human
acucaaaauauuugu

SEQ ID NO: 3423667 - RNA, 19 nt, Human
acucaaaauauuuguacau

SEQ ID NO: 3423668 - RNA, 13 nt, Human
acucaaacacaga

SEQ ID NO: 3423669 - RNA, 20 nt, Human
acucaaaccaaaucacugaa

SEQ ID NO: 3423670 - RNA, 17 nt, Human
acucaaacucuuaaaac

SEQ ID NO: 3423671 - RNA, 21 nt, Human
acucaaacugaggaauuucac

SEQ ID NO: 3423672 - RNA, 21 nt, Human
acucaaacugccuuggcuuca

SEQ ID NO: 3423673 - RNA, 22 nt, Human
acucaaacuucuggcucccucu

SEQ ID NO: 3423674 - RNA, 19 nt, Human
agagcgagagaucaaagau

SEQ ID NO: 3423675 - RNA, 18 nt, Human
agagcgccgugaguucuc

SEQ ID NO: 3423676 - RNA, 22 nt, Human
agagcgccgugaguucucaggg

SEQ ID NO: 3423677 - RNA, 15 nt, Human
agagcgccugccccu

SEQ ID NO: 3423678 - RNA, 20 nt, Human
agagcgcgccccuagccggu

SEQ ID NO: 3423679 - RNA, 19 nt, Human
agagcggaggcugugugcc

SEQ ID NO: 3423680 - RNA, 20 nt, Human
agagcguggcugugcucuca

SEQ ID NO: 3423681 - RNA, 23 nt, Human
agagcuaagggugggugcucaga

SEQ ID NO: 3423682 - RNA, 14 nt, Human
agagcuacguauuu

SEQ ID NO: 3423683 - RNA, 16 nt, Human
agagcuacguauuuaa

SEQ ID NO: 3423684 - RNA, 16 nt, Human
agagcuacuugggcca

SEQ ID NO: 3423685 - RNA, 17 nt, Human
agagcuagaacauggag

SEQ ID NO: 3423686 - RNA, 18 nt, Human
agagcuagaacauggaga

SEQ ID NO: 3423687 - RNA, 19 nt, Human
agagcuagaacauggagag

SEQ ID NO: 3423688 - RNA, 19 nt, Human
agagcuagaaccuggagag

SEQ ID NO: 3423689 - RNA, 18 nt, Human
agagcuagaaccuggagg

SEQ ID NO: 3423690 - RNA, 21 nt, Human
agagcuagcgcugccgcaccc

SEQ ID NO: 3423691 - RNA, 18 nt, Human
agagcuaggagcaaagcc

SEQ ID NO: 3423692 - RNA, 19 nt, Human
agagcuaggagcaaagccu

SEQ ID NO: 3423693 - RNA, 20 nt, Human
agagcuaggagcaaagccug

SEQ ID NO: 3423694 - RNA, 13 nt, Human
agagcuauacagu

SEQ ID NO: 3423695 - RNA, 19 nt, Human
agagcuauacaguuuuccu

SEQ ID NO: 3423696 - RNA, 14 nt, Human
agagcuauugccaa

SEQ ID NO: 3423697 - RNA, 21 nt, Human
agagcucaagggacaaggaca

SEQ ID NO: 3423698 - RNA, 10 nt, Human
agagcucagg

SEQ ID NO: 3423699 - RNA, 20 nt, Human
agagcuccccuacggaccag

SEQ ID NO: 3423700 - RNA, 20 nt, Human
agagcucccggcguggugga

SEQ ID NO: 3423701 - RNA, 23 nt, Human
agagcuccuccuugucuuggcag

SEQ ID NO: 3423702 - RNA, 22 nt, Human
agagcucucucuacagagagga

SEQ ID NO: 3423703 - RNA, 12 nt, Human
agagcugaacag

SEQ ID NO: 3423704 - RNA, 21 nt, Human
agagcugaagaguugccccgu

SEQ ID NO: 3423705 - RNA, 20 nt, Human
agagcugaagguuguggccu

SEQ ID NO: 3423706 - RNA, 23 nt, Human
agagcugacacaggaugaaggca

SEQ ID NO: 3423707 - RNA, 11 nt, Human
agagcugaggc

SEQ ID NO: 3423708 - RNA, 17 nt, Human
agagcugauccagagca

SEQ ID NO: 3423709 - RNA, 18 nt, Human
agagcugauccagagcac

SEQ ID NO: 3423710 - RNA, 21 nt, Human
agagcugauccagagcacaga

SEQ ID NO: 3423711 - RNA, 17 nt, Human
agagcugauggagaagg

SEQ ID NO: 3423712 - RNA, 18 nt, Human
agagcugccaccugccug

SEQ ID NO: 3423713 - RNA, 16 nt, Human
agagcugccaucgcug

SEQ ID NO: 3423714 - RNA, 21 nt, Human
agagcugcccuccuuguccac

SEQ ID NO: 3423715 - RNA, 13 nt, Human
agagcugcccucu

SEQ ID NO: 3423716 - RNA, 23 nt, Human
agagcugcucuggaaaaugugac

SEQ ID NO: 3423717 - RNA, 22 nt, Human
agagcuggagaugaggccagac

SEQ ID NO: 3423718 - RNA, 12 nt, Human
agagcuggagcc

SEQ ID NO: 3423719 - RNA, 19 nt, Human
agagcuggagccuggugcc

SEQ ID NO: 3423720 - RNA, 12 nt, Human
agagcugggagg

SEQ ID NO: 3423721 - RNA, 15 nt, Human
agagcuggugcggcu

SEQ ID NO: 3423722 - RNA, 21 nt, Human
agagcuggugcggcuggccau

SEQ ID NO: 3423723 - RNA, 15 nt, Human
agagcuggugucuga

SEQ ID NO: 3423724 - RNA, 22 nt, Human
agagcugguugggaagacaugg

SEQ ID NO: 3423725 - RNA, 13 nt, Human
agagcuguacauu

SEQ ID NO: 3423726 - RNA, 14 nt, Human
agagcuguggagga

SEQ ID NO: 3423727 - RNA, 22 nt, Human
agagcugugggcaaaagagugu

SEQ ID NO: 3423728 - RNA, 19 nt, Human
agagcuguucacagccaga

SEQ ID NO: 3423729 - RNA, 15 nt, Human
agagcuuaacagugu

SEQ ID NO: 3423730 - RNA, 21 nt, Human
agagcuuaaugauaauauugu

SEQ ID NO: 3423731 - RNA, 12 nt, Human
agagcuuagaaa

SEQ ID NO: 3423732 - RNA, 18 nt, Human
agagcuuagccuggagca

SEQ ID NO: 3423733 - RNA, 14 nt, Human
agagcuuagggucu

SEQ ID NO: 3423734 - RNA, 13 nt, Human
agagcuucccuga

SEQ ID NO: 3423735 - RNA, 15 nt, Human
agagcuucuggcacu

SEQ ID NO: 3423736 - RNA, 20 nt, Human
agagcuucuguugcugccuc

SEQ ID NO: 3423737 - RNA, 15 nt, Human
agagcuuuuaaaaau

SEQ ID NO: 3423738 - RNA, 16 nt, Human
agagcuuuuaaaaaug

SEQ ID NO: 3423739 - RNA, 12 nt, Human
agaggaaaaccc

SEQ ID NO: 3423740 - RNA, 18 nt, Human
agaggaaaacccucaagg

SEQ ID NO: 3423741 - RNA, 21 nt, Human
agaggaaaaguaaggugcagu

SEQ ID NO: 3423742 - RNA, 20 nt, Human
agaggaaaaugaauaauaca

SEQ ID NO: 3423743 - RNA, 17 nt, Human
agaggaaaguacauuuu

SEQ ID NO: 3423744 - RNA, 14 nt, Human
acucaccaucugug

SEQ ID NO: 3423745 - RNA, 12 nt, Human
acucacccaagc

SEQ ID NO: 3423746 - RNA, 17 nt, Human
acucacccaugugccaa

SEQ ID NO: 3423747 - RNA, 18 nt, Human
acucacccaugugccaag

SEQ ID NO: 3423748 - RNA, 21 nt, Human
acucacccaugugccaaggug

SEQ ID NO: 3423749 - RNA, 12 nt, Human
acucaccccagc

SEQ ID NO: 3423750 - RNA, 17 nt, Human
acucaccccagccccaa

SEQ ID NO: 3423751 - RNA, 15 nt, Human
acucaccucugccuc

SEQ ID NO: 3423752 - RNA, 19 nt, Human
acucaccugccccucaacu

SEQ ID NO: 3423753 - RNA, 21 nt, Human
acucaccugccccucaacucu

SEQ ID NO: 3423754 - RNA, 23 nt, Human
acucaccuggggcugcuggccug

SEQ ID NO: 3423755 - RNA, 12 nt, Human
acucaccuucua

SEQ ID NO: 3423756 - RNA, 21 nt, Human
acucaccuugaacaccacgcu

SEQ ID NO: 3423757 - RNA, 15 nt, Human
acucacuaggccccc

SEQ ID NO: 3423758 - RNA, 16 nt, Human
acucacuccugagacc

SEQ ID NO: 3423759 - RNA, 21 nt, Human
acucacuccugagaccccugg

SEQ ID NO: 3423760 - RNA, 13 nt, Human
acucacucuaaag

SEQ ID NO: 3423761 - RNA, 13 nt, Human
acucacucugggc

SEQ ID NO: 3423762 - RNA, 14 nt, Human
acucacucugggcu

SEQ ID NO: 3423763 - RNA, 13 nt, Human
acucacugaagcc

SEQ ID NO: 3423764 - RNA, 18 nt, Human
acucacugaagccugcgu

SEQ ID NO: 3423765 - RNA, 14 nt, Human
acucacugucaaug

SEQ ID NO: 3423766 - RNA, 14 nt, Human
acucacuuuuccca

SEQ ID NO: 3423767 - RNA, 18 nt, Human
acucacuuuucccacucc

SEQ ID NO: 3423768 - RNA, 18 nt, Human
acucagaaacuccaugau

SEQ ID NO: 3423769 - RNA, 13 nt, Human
acucagaaagcca

SEQ ID NO: 3423770 - RNA, 14 nt, Human
acucagaagccuga

SEQ ID NO: 3423771 - RNA, 14 nt, Human
acucagaauauugc

SEQ ID NO: 3423772 - RNA, 17 nt, Human
acucagaauuauuuuua

SEQ ID NO: 3423773 - RNA, 18 nt, Human
acucagaauuauuuuuaa

SEQ ID NO: 3423774 - RNA, 15 nt, Human
acucagaccagagaa

SEQ ID NO: 3423775 - RNA, 21 nt, Human
acucagagaaaaaugcucccc

SEQ ID NO: 3423776 - RNA, 17 nt, Human
acucagagacaugcaga

SEQ ID NO: 3423777 - RNA, 20 nt, Human
acucagagacaugcagagau

SEQ ID NO: 3423778 - RNA, 14 nt, Human
acucagagcucucu

SEQ ID NO: 3423779 - RNA, 19 nt, Human
acucagauccagggacaga

SEQ ID NO: 3423780 - RNA, 17 nt, Human
acucagauccuccucau

SEQ ID NO: 3423781 - RNA, 16 nt, Human
acucagaucugucuga

SEQ ID NO: 3423782 - RNA, 22 nt, Human
acucagauggaaccgcaggaag

SEQ ID NO: 3423783 - RNA, 22 nt, Human
acucagaugucucuggcgugug

SEQ ID NO: 3423784 - RNA, 15 nt, Human
acucagcacaaggcc

SEQ ID NO: 3423785 - RNA, 21 nt, Human
acucagcaccacucaagacca

SEQ ID NO: 3423786 - RNA, 13 nt, Human
acucagcagcccu

SEQ ID NO: 3423787 - RNA, 14 nt, Human
acucagcagcccuc

SEQ ID NO: 3423788 - RNA, 18 nt, Human
acucagcagcccuccuca

SEQ ID NO: 3423789 - RNA, 21 nt, Human
acucagcagcccuccucaccc

SEQ ID NO: 3423790 - RNA, 11 nt, Human
acucagcaugg

SEQ ID NO: 3423791 - RNA, 14 nt, Human
acucagccaagcac

SEQ ID NO: 3423792 - RNA, 15 nt, Human
acucagccaagcaca

SEQ ID NO: 3423793 - RNA, 16 nt, Human
acucagccaagcacag

SEQ ID NO: 3423794 - RNA, 18 nt, Human
acucagccaagcacagug

SEQ ID NO: 3423795 - RNA, 18 nt, Human
acucagccacccugaguu

SEQ ID NO: 3423796 - RNA, 14 nt, Human
acucagccccuagg

SEQ ID NO: 3423797 - RNA, 16 nt, Human
acucagccccuaggag

SEQ ID NO: 3423798 - RNA, 21 nt, Human
acucagcccucauuggcucuu

SEQ ID NO: 3423799 - RNA, 15 nt, Human
acucagcccugggcc

SEQ ID NO: 3423800 - RNA, 16 nt, Human
acucagcccugggccc

SEQ ID NO: 3423801 - RNA, 22 nt, Human
acucagcccugggccccaccac

SEQ ID NO: 3423802 - RNA, 12 nt, Human
acucagccugca

SEQ ID NO: 3423803 - RNA, 15 nt, Human
acucagccugcaguu

SEQ ID NO: 3423804 - RNA, 16 nt, Human
acucagccugcaguua

SEQ ID NO: 3423805 - RNA, 17 nt, Human
acucagccugcaguuaa

SEQ ID NO: 3423806 - RNA, 14 nt, Human
acucagcuccccag

SEQ ID NO: 3423807 - RNA, 11 nt, Human
acucagcucug

SEQ ID NO: 3423808 - RNA, 19 nt, Human
acucagcucugacauucug

SEQ ID NO: 3423809 - RNA, 22 nt, Human
acucagcucuuggcuccacugg

SEQ ID NO: 3423810 - RNA, 17 nt, Human
acucagcuguccugcag

SEQ ID NO: 3423811 - RNA, 18 nt, Human
acucagcuguccugcagc

SEQ ID NO: 3423812 - RNA, 14 nt, Human
acucaggacuccag

SEQ ID NO: 3423813 - RNA, 16 nt, Human
acucaggagccuguga

SEQ ID NO: 3423814 - RNA, 13 nt, Human
acucaggaggcug

SEQ ID NO: 3423815 - RNA, 14 nt, Human
acucaggaggcuga

SEQ ID NO: 3423816 - RNA, 17 nt, Human
acucaggaggcugaggc

SEQ ID NO: 3423817 - RNA, 17 nt, Human
acucaggaugcccaggg

SEQ ID NO: 3423818 - RNA, 17 nt, Human
acucaggauuuaaaaac

SEQ ID NO: 3423819 - RNA, 23 nt, Human
acucaggccuccaucuucucaug

SEQ ID NO: 3423820 - RNA, 18 nt, Human
agaugcuccaagauucua

SEQ ID NO: 3423821 - RNA, 19 nt, Human
agaugcuccagcaacacag

SEQ ID NO: 3423822 - RNA, 13 nt, Human
agaugcuccaggg

SEQ ID NO: 3423823 - RNA, 23 nt, Human
agaugcugacuguacuccuccca

SEQ ID NO: 3423824 - RNA, 11 nt, Human
agaugcugaug

SEQ ID NO: 3423825 - RNA, 14 nt, Human
agaugcugauguuc

SEQ ID NO: 3423826 - RNA, 18 nt, Human
agaugcugauguucagug

SEQ ID NO: 3423827 - RNA, 20 nt, Human
agaugcugauguucagugua

SEQ ID NO: 3423828 - RNA, 11 nt, Human
agaugcuggag

SEQ ID NO: 3423829 - RNA, 16 nt, Human
agaugcuggagaagag

SEQ ID NO: 3423830 - RNA, 18 nt, Human
agaugcuggagaagagag

SEQ ID NO: 3423831 - RNA, 22 nt, Human
agaugcuguaacuuaaaauagg

SEQ ID NO: 3423832 - RNA, 16 nt, Human
agaugcugugagucuu

SEQ ID NO: 3423833 - RNA, 20 nt, Human
agaugcugugccccuggccu

SEQ ID NO: 3423834 - RNA, 16 nt, Human
agaugcuguguauaug

SEQ ID NO: 3423835 - RNA, 18 nt, Human
agaugcuguguauauggu

SEQ ID NO: 3423836 - RNA, 18 nt, Human
agaugcuucucacugcca

SEQ ID NO: 3423837 - RNA, 12 nt, Human
agaugcuucugg

SEQ ID NO: 3423838 - RNA, 15 nt, Human
agaugcuucugggag

SEQ ID NO: 3423839 - RNA, 16 nt, Human
agaugcuuuucugucu

SEQ ID NO: 3423840 - RNA, 19 nt, Human
agaugcuuuucugucucug

SEQ ID NO: 3423841 - RNA, 17 nt, Human
agauggaaaaacuugug

SEQ ID NO: 3423842 - RNA, 12 nt, Human
agauggaagcuu

SEQ ID NO: 3423843 - RNA, 23 nt, Human
agauggaaguugcagugagcuga

SEQ ID NO: 3423844 - RNA, 12 nt, Human
agauggacacac

SEQ ID NO: 3423845 - RNA, 13 nt, Human
agauggaguuucu

SEQ ID NO: 3423846 - RNA, 17 nt, Human
agauggauucucagaua

SEQ ID NO: 3423847 - RNA, 18 nt, Human
agauggauucuccacuca

SEQ ID NO: 3423848 - RNA, 22 nt, Human
agauggcacagggcaugaaaug

SEQ ID NO: 3423849 - RNA, 21 nt, Human
agauggcauaaccugucucac

SEQ ID NO: 3423850 - RNA, 17 nt, Human
agauggcauccugugaa

SEQ ID NO: 3423851 - RNA, 20 nt, Human
agauggccagccccuuagac

SEQ ID NO: 3423852 - RNA, 15 nt, Human
agauggcccucuggu

SEQ ID NO: 3423853 - RNA, 19 nt, Human
agauggccugagaagagag

SEQ ID NO: 3423854 - RNA, 17 nt, Human
agauggcucccaggggc

SEQ ID NO: 3423855 - RNA, 22 nt, Human
agauggcugacuuugcucuuuc

SEQ ID NO: 3423856 - RNA, 14 nt, Human
agauggcugugccu

SEQ ID NO: 3423857 - RNA, 19 nt, Human
agauggcugugccucugcc

SEQ ID NO: 3423858 - RNA, 20 nt, Human
agauggcugugccucugccu

SEQ ID NO: 3423859 - RNA, 21 nt, Human
agauggcugugccucugccug

SEQ ID NO: 3423860 - RNA, 22 nt, Human
agauggcugugccucugccugu

SEQ ID NO: 3423861 - RNA, 23 nt, Human
agauggcugugccucugccuguc

SEQ ID NO: 3423862 - RNA, 14 nt, Human
agaugggaaugaag

SEQ ID NO: 3423863 - RNA, 15 nt, Human
agaugggaaugaagc

SEQ ID NO: 3423864 - RNA, 16 nt, Human
agaugggaaugaagcu

SEQ ID NO: 3423865 - RNA, 18 nt, Human
agaugggaaugagguggg

SEQ ID NO: 3423866 - RNA, 19 nt, Human
agaugggacugggagggcc

SEQ ID NO: 3423867 - RNA, 20 nt, Human
agaugggaggaaagagagca

SEQ ID NO: 3423868 - RNA, 22 nt, Human
agaugggcauggggugggccuc

SEQ ID NO: 3423869 - RNA, 16 nt, Human
agaugggcuuguuuuc

SEQ ID NO: 3423870 - RNA, 17 nt, Human
agaugggcuuguuuucu

SEQ ID NO: 3423871 - RNA, 17 nt, Human
agauggggauaaaauga

SEQ ID NO: 3423872 - RNA, 15 nt, Human
agauggggccucugu

SEQ ID NO: 3423873 - RNA, 15 nt, Human
agaugggggaaagca

SEQ ID NO: 3423874 - RNA, 16 nt, Human
agaugggggaaagcaa

SEQ ID NO: 3423875 - RNA, 15 nt, Human
agaugggggcaagaa

SEQ ID NO: 3423876 - RNA, 22 nt, Human
agaugggggcagggcugugcuu

SEQ ID NO: 3423877 - RNA, 19 nt, Human
agauggggucuguaaaauc

SEQ ID NO: 3423878 - RNA, 17 nt, Human
agaugggucuggcugag

SEQ ID NO: 3423879 - RNA, 21 nt, Human
agauggucacgcaccugggug

SEQ ID NO: 3423880 - RNA, 15 nt, Human
agauggucauccaga

SEQ ID NO: 3423881 - RNA, 11 nt, Human
agaugguggau

SEQ ID NO: 3423882 - RNA, 12 nt, Human
agauggugggau

SEQ ID NO: 3423883 - RNA, 22 nt, Human
agaugguguggguguccugccu

SEQ ID NO: 3423884 - RNA, 15 nt, Human
agaugguuaaacauu

SEQ ID NO: 3423885 - RNA, 14 nt, Human
agaugguucuagca

SEQ ID NO: 3423886 - RNA, 17 nt, Human
agaugguuuccacauuu

SEQ ID NO: 3423887 - RNA, 17 nt, Human
agauguaaaagguauua

SEQ ID NO: 3423888 - RNA, 20 nt, Human
agauguaagagcuuuacaaa

SEQ ID NO: 3423889 - RNA, 22 nt, Human
agauguaauuguuugucuuuaa

SEQ ID NO: 3423890 - RNA, 17 nt, Human
agauguaauuuugugua

SEQ ID NO: 3423891 - RNA, 19 nt, Human
agauguagauaaacucaga

SEQ ID NO: 3423892 - RNA, 22 nt, Human
agauguagccccucuccuggaa

SEQ ID NO: 3423893 - RNA, 17 nt, Human
agauguaugaaggcuuu

SEQ ID NO: 3423894 - RNA, 13 nt, Human
agauguaugcaca

SEQ ID NO: 3423895 - RNA, 18 nt, Human
agauguaugcacacacau

SEQ ID NO: 3423896 - RNA, 18 nt, Human
agaugucagccgagccgg

SEQ ID NO: 3423897 - RNA, 13 nt, Human
agaugucaucaga

SEQ ID NO: 3423898 - RNA, 23 nt, Human
agauguccaucagaugacaagaa

SEQ ID NO: 3423899 - RNA, 21 nt, Human
agaugucccuugaugcacaga

SEQ ID NO: 3423900 - RNA, 22 nt, Human
agaugucccuuucuuggccagu

SEQ ID NO: 3423901 - RNA, 18 nt, Human
agaugucuaauaguuauu

SEQ ID NO: 3423902 - RNA, 19 nt, Human
agaugucuucguacaguuc

SEQ ID NO: 3423903 - RNA, 18 nt, Human
agaugucuucugccuguu

SEQ ID NO: 3423904 - RNA, 21 nt, Human
agaugugaaaauaucugcuca

SEQ ID NO: 3423905 - RNA, 13 nt, Human
agaugugaaaauu

SEQ ID NO: 3423906 - RNA, 17 nt, Human
agaugugauaaggauca

SEQ ID NO: 3423907 - RNA, 18 nt, Human
agaugugauauucuaaga

SEQ ID NO: 3423908 - RNA, 19 nt, Human
agaugugauauucuaagac

SEQ ID NO: 3423909 - RNA, 13 nt, Human
agaugugcaccca

SEQ ID NO: 3423910 - RNA, 15 nt, Human
agaugugcagcagau

SEQ ID NO: 3423911 - RNA, 22 nt, Human
agaugugcagcagauuggaagg

SEQ ID NO: 3423912 - RNA, 19 nt, Human
agaugugcagcauuucacu

SEQ ID NO: 3423913 - RNA, 17 nt, Human
agauguggaaaagccaa

SEQ ID NO: 3423914 - RNA, 16 nt, Human
agauguggagccaggc

SEQ ID NO: 3423915 - RNA, 21 nt, Human
agaugugguugcauaagguuu

SEQ ID NO: 3423916 - RNA, 18 nt, Human
agauguguucacaaugga

SEQ ID NO: 3423917 - RNA, 23 nt, Human
agauguuacaaguuuauauauau

SEQ ID NO: 3423918 - RNA, 14 nt, Human
agauguucgguuuu

SEQ ID NO: 3423919 - RNA, 21 nt, Human
agauguucuaagucuuuccau

SEQ ID NO: 3423920 - RNA, 15 nt, Human
agauguucuacuuug

SEQ ID NO: 3423921 - RNA, 12 nt, Human
agauguucucua

SEQ ID NO: 3423922 - RNA, 17 nt, Human
agauguucucuaucauu

SEQ ID NO: 3423923 - RNA, 19 nt, Human
agauguucucuaucauuua

SEQ ID NO: 3423924 - RNA, 21 nt, Human
agauguugaagaauacaguua

SEQ ID NO: 3423925 - RNA, 16 nt, Human
agauguugauuuuuac

SEQ ID NO: 3423926 - RNA, 23 nt, Human
agauguugauuuuuacuguguuu

SEQ ID NO: 3423927 - RNA, 17 nt, Human
agauguugccauguguu

SEQ ID NO: 3423928 - RNA, 12 nt, Human
agauguugcuaa

SEQ ID NO: 3423929 - RNA, 17 nt, Human
agauguuugauagauuu

SEQ ID NO: 3423930 - RNA, 19 nt, Human
agauguuugucagauauga

SEQ ID NO: 3423931 - RNA, 23 nt, Human
agauguuuuagaguuaacaauga

SEQ ID NO: 3423932 - RNA, 22 nt, Human
agauguuuugguagauuaaaua

SEQ ID NO: 3423933 - RNA, 14 nt, Human
agauguuuuuaugu

SEQ ID NO: 3423934 - RNA, 16 nt, Human
agauuaaaaauuauag

SEQ ID NO: 3423935 - RNA, 16 nt, Human
agauuaaacuucauau

SEQ ID NO: 3423936 - RNA, 20 nt, Human
agauuaaccuucucuguccg

SEQ ID NO: 3423937 - RNA, 15 nt, Human
agauuaagagcaaau

SEQ ID NO: 3423938 - RNA, 17 nt, Human
agauuaauacucuauuu

SEQ ID NO: 3423939 - RNA, 17 nt, Human
agauuaauggcacugau

SEQ ID NO: 3423940 - RNA, 22 nt, Human
agauuacccaaaaacugucuuu

SEQ ID NO: 3423941 - RNA, 21 nt, Human
agauuacccccucauuguuua

SEQ ID NO: 3423942 - RNA, 19 nt, Human
agauuagaaaaauuccuaa

SEQ ID NO: 3423943 - RNA, 16 nt, Human
agauuagaauucugua

SEQ ID NO: 3423944 - RNA, 21 nt, Human
agauuagagaguguugaaacg

SEQ ID NO: 3423945 - RNA, 21 nt, Human
agauuagagccuguaaacuuu

SEQ ID NO: 3423946 - RNA, 14 nt, Human
agauuagcucugga

SEQ ID NO: 3423947 - RNA, 21 nt, Human
agaugcugauguucaguguaa

SEQ ID NO: 3423948 - RNA, 22 nt, Human
agaugcugauguucaguguaau

SEQ ID NO: 3423949 - RNA, 19 nt, Human
agaugcuggagaagagagg

SEQ ID NO: 3423950 - RNA, 20 nt, Human
agaugcuggagaagagagga

SEQ ID NO: 3423951 - RNA, 21 nt, Human
agaugcuggaugucugccaau

SEQ ID NO: 3423952 - RNA, 15 nt, Human
agaugcuggcccagg

SEQ ID NO: 3423953 - RNA, 19 nt, Human
agaugcuggcccagggccc

SEQ ID NO: 3423954 - RNA, 23 nt, Human
agaugcuggcccagggcccagag

SEQ ID NO: 3423955 - RNA, 18 nt, Human
agaugcuggcuugggcag

SEQ ID NO: 3423956 - RNA, 15 nt, Human
agaugcugguuuucu

SEQ ID NO: 3423957 - RNA, 20 nt, Human
agaugcuguaacuuaaaaua

SEQ ID NO: 3423958 - RNA, 20 nt, Human
agaugcugugagucuuuggu

SEQ ID NO: 3423959 - RNA, 19 nt, Human
agaugcuguguauauggua

SEQ ID NO: 3423960 - RNA, 16 nt, Human
agaugcuucugggaga

SEQ ID NO: 3423961 - RNA, 22 nt, Human
agaugcuugcggcaaaaggaaa

SEQ ID NO: 3423962 - RNA, 11 nt, Human
agaugcuuuua

SEQ ID NO: 3423963 - RNA, 20 nt, Human
agaugcuuuuaacagagucu

SEQ ID NO: 3423964 - RNA, 16 nt, Human
agauuauuuuauuaug

SEQ ID NO: 3423965 - RNA, 17 nt, Human
agauuauuuuggaaagu

SEQ ID NO: 3423966 - RNA, 19 nt, Human
agauucaaagguucuaggu

SEQ ID NO: 3423967 - RNA, 21 nt, Human
agauucaaagguucuagguuu

SEQ ID NO: 3423968 - RNA, 14 nt, Human
agauucaaggcccc

SEQ ID NO: 3423969 - RNA, 13 nt, Human
agauucacacugu

SEQ ID NO: 3423970 - RNA, 16 nt, Human
agauucaccuguaaaa

SEQ ID NO: 3423971 - RNA, 22 nt, Human
agauucauauuuacuucuuaua

SEQ ID NO: 3423972 - RNA, 20 nt, Human
agauucauuuuuaaucauga

SEQ ID NO: 3423973 - RNA, 18 nt, Human
agauuccagagaguggcu

SEQ ID NO: 3423974 - RNA, 19 nt, Human
agauuccauugguccaaga

SEQ ID NO: 3423975 - RNA, 21 nt, Human
agauuccauugguccaagauu

SEQ ID NO: 3423976 - RNA, 14 nt, Human
agauucccaggagu

SEQ ID NO: 3423977 - RNA, 15 nt, Human
agauucccaggaguu

SEQ ID NO: 3423978 - RNA, 17 nt, Human
agauucccaggaguucu

SEQ ID NO: 3423979 - RNA, 21 nt, Human
agauuccccauugccuccucc

SEQ ID NO: 3423980 - RNA, 22 nt, Human
agauuccccauugccuccuccu

SEQ ID NO: 3423981 - RNA, 24 nt, Human
agauuccccauugccuccuccuuc

SEQ ID NO: 3423982 - RNA, 20 nt, Human
agauuccggauccuaagcau

SEQ ID NO: 3423983 - RNA, 15 nt, Human
agauuccuucccaug

SEQ ID NO: 3423984 - RNA, 17 nt, Human
agauuccuucccaugga

SEQ ID NO: 3423985 - RNA, 13 nt, Human
agauucuaaagau

SEQ ID NO: 3423986 - RNA, 15 nt, Human
agauucuaaagauuc

SEQ ID NO: 3423987 - RNA, 18 nt, Human
agauucuaaagauucuau

SEQ ID NO: 3423988 - RNA, 21 nt, Human
agauucuaaagauucuauagu

SEQ ID NO: 3423989 - RNA, 12 nt, Human
agauucuaaagg

SEQ ID NO: 3423990 - RNA, 10 nt, Human
agauucuaac

SEQ ID NO: 3423991 - RNA, 12 nt, Human
agauucuagauc

SEQ ID NO: 3423992 - RNA, 14 nt, Human
agauucuagaucag

SEQ ID NO: 3423993 - RNA, 20 nt, Human
agauucuaggaccugugucc

SEQ ID NO: 3423994 - RNA, 19 nt, Human
agauucuauaguucuagac

SEQ ID NO: 3423995 - RNA, 15 nt, Human
agauucuccugugcu

SEQ ID NO: 3423996 - RNA, 17 nt, Human
agauucucugugucuaa

SEQ ID NO: 3423997 - RNA, 20 nt, Human
agauucucugugucuaagau

SEQ ID NO: 3423998 - RNA, 22 nt, Human
agauucucugugucuaagauuc

SEQ ID NO: 3423999 - RNA, 21 nt, Human
agauucugauuugccacugau

SEQ ID NO: 3424000 - RNA, 14 nt, Human
agauucugauuuua

SEQ ID NO: 3424001 - RNA, 21 nt, Human
agauucuggacagucagcucu

SEQ ID NO: 3424002 - RNA, 21 nt, Human
agauucuuuuaaauuagaaaa

SEQ ID NO: 3424003 - RNA, 13 nt, Human
agauucuuuuucu

SEQ ID NO: 3424004 - RNA, 19 nt, Human
agauugaaaacuuuucuca

SEQ ID NO: 3424005 - RNA, 20 nt, Human
agauugaaaacuuuucucag

SEQ ID NO: 3424006 - RNA, 16 nt, Human
agauugaaaaggaaga

SEQ ID NO: 3424007 - RNA, 19 nt, Human
agauugaaguaaacugcag

SEQ ID NO: 3424008 - RNA, 22 nt, Human
agauugaauauuuaucuagaga

SEQ ID NO: 3424009 - RNA, 17 nt, Human
agauugacuaacucaaa

SEQ ID NO: 3424010 - RNA, 19 nt, Human
agauugacuaacucaaaua

SEQ ID NO: 3424011 - RNA, 21 nt, Human
agauugacuaacucaaauaca

SEQ ID NO: 3424012 - RNA, 15 nt, Human
agauugagaaggaga

SEQ ID NO: 3424013 - RNA, 16 nt, Human
agauugagaaggagag

SEQ ID NO: 3424014 - RNA, 18 nt, Human
agauugagagaagagaca

SEQ ID NO: 3424015 - RNA, 13 nt, Human
agauugagagaau

SEQ ID NO: 3424016 - RNA, 17 nt, Human
agauugagauguguuca

SEQ ID NO: 3424017 - RNA, 13 nt, Human
agauugaggccug

SEQ ID NO: 3424018 - RNA, 19 nt, Human
agauugaggccugcccuca

SEQ ID NO: 3424019 - RNA, 23 nt, Human
agauugaguauaaaaacuugaaa

SEQ ID NO: 3424020 - RNA, 18 nt, Human
agauugauaucuauaaaa

SEQ ID NO: 3424021 - RNA, 19 nt, Human
agauugauaucuauaaaau

SEQ ID NO: 3424022 - RNA, 22 nt, Human
agauugauaucuauaaaauaga

SEQ ID NO: 3424023 - RNA, 16 nt, Human
agauugauuguauugu

SEQ ID NO: 3424024 - RNA, 16 nt, Human
agauugcaacaggcug

SEQ ID NO: 3424025 - RNA, 20 nt, Human
agauugcaacaggcugggcu

SEQ ID NO: 3424026 - RNA, 16 nt, Human
agauugcaccacugca

SEQ ID NO: 3424027 - RNA, 15 nt, Human
agauugcaugugacu

SEQ ID NO: 3424028 - RNA, 18 nt, Human
agauugcaugugacucug

SEQ ID NO: 3424029 - RNA, 19 nt, Human
agauugcaugugacucuga

SEQ ID NO: 3424030 - RNA, 13 nt, Human
agauugcuaauug

SEQ ID NO: 3424031 - RNA, 16 nt, Human
agauugcuaauugcug

SEQ ID NO: 3424032 - RNA, 18 nt, Human
agauugcuaauugcuguu

SEQ ID NO: 3424033 - RNA, 13 nt, Human
agauugcugaaau

SEQ ID NO: 3424034 - RNA, 14 nt, Human
agauugcugcuucu

SEQ ID NO: 3424035 - RNA, 14 nt, Human
agauugcuucugua

SEQ ID NO: 3424036 - RNA, 21 nt, Human
agauuggaaggagacacagau

SEQ ID NO: 3424037 - RNA, 23 nt, Human
agauuggagaaacccuugaaaag

SEQ ID NO: 3424038 - RNA, 17 nt, Human
agauuggaucaaguauu

SEQ ID NO: 3424039 - RNA, 23 nt, Human
agauuggauuuuauguugacauu

SEQ ID NO: 3424040 - RNA, 15 nt, Human
agauuggcauggcuu

SEQ ID NO: 3424041 - RNA, 14 nt, Human
agauuggcucacac

SEQ ID NO: 3424042 - RNA, 19 nt, Human
agauuggcucacacugaga

SEQ ID NO: 3424043 - RNA, 20 nt, Human
agauugguguuuuuuucuau

SEQ ID NO: 3424044 - RNA, 14 nt, Human
agauuguauugcug

SEQ ID NO: 3424045 - RNA, 15 nt, Human
agauuguauugcugu

SEQ ID NO: 3424046 - RNA, 20 nt, Human
agauugugccacugcucucc

SEQ ID NO: 3424047 - RNA, 15 nt, Human
agauuguguaacaau

SEQ ID NO: 3424048 - RNA, 15 nt, Human
agauuguuaaaauaa

SEQ ID NO: 3424049 - RNA, 16 nt, Human
agauuguuguuugcca

SEQ ID NO: 3424050 - RNA, 12 nt, Human
agauuguuugca

SEQ ID NO: 3424051 - RNA, 19 nt, Human
agauuuaaacucugaauuu

SEQ ID NO: 3424052 - RNA, 20 nt, Human
agauuuaaacucugaauuua

SEQ ID NO: 3424053 - RNA, 22 nt, Human
agauuuaauuaaucaugaaugu

SEQ ID NO: 3424054 - RNA, 14 nt, Human
agauuuaugcauau

SEQ ID NO: 3424055 - RNA, 16 nt, Human
agauuuauuaaagaaa

SEQ ID NO: 3424056 - RNA, 20 nt, Human
agauuuauuuuucaguucca

SEQ ID NO: 3424057 - RNA, 17 nt, Human
agauuucaagaaaaaau

SEQ ID NO: 3424058 - RNA, 19 nt, Human
agauuucaagaaaaaauaa

SEQ ID NO: 3424059 - RNA, 17 nt, Human
agauuucacucuccuug

SEQ ID NO: 3424060 - RNA, 15 nt, Human
agauuucauccagaa

SEQ ID NO: 3424061 - RNA, 22 nt, Human
agauuucauccagaagucaaca

SEQ ID NO: 3424062 - RNA, 13 nt, Human
agauuucaucugc

SEQ ID NO: 3424063 - RNA, 18 nt, Human
agauuucaucugcucucc

SEQ ID NO: 3424064 - RNA, 23 nt, Human
agauuuccagucuccaccaggaa

SEQ ID NO: 3424065 - RNA, 16 nt, Human
agauuuccuucuuuuu

SEQ ID NO: 3424066 - RNA, 16 nt, Human
agauuucuaaauaaaa

SEQ ID NO: 3424067 - RNA, 15 nt, Human
agauuucucuuugaa

SEQ ID NO: 3424068 - RNA, 22 nt, Human
agauuucuuaaauaaugcuuca

SEQ ID NO: 3424069 - RNA, 12 nt, Human
agauuugaccuc

SEQ ID NO: 3424070 - RNA, 15 nt, Human
agauuugcacaaaaa

SEQ ID NO: 3424071 - RNA, 17 nt, Human
agauuugcccauuuaca

SEQ ID NO: 3424072 - RNA, 20 nt, Human
agauuugcccauuuacacuu

SEQ ID NO: 3424073 - RNA, 13 nt, Human
agauuugugaacu

SEQ ID NO: 3424074 - RNA, 19 nt, Human
agauuugugugcaucaggc

SEQ ID NO: 3424075 - RNA, 13 nt, Human
agauuuguguuau

SEQ ID NO: 3424076 - RNA, 13 nt, Human
agauuuguuuugu

SEQ ID NO: 3424077 - RNA, 17 nt, Human
agauuuguuuuuaaacu

SEQ ID NO: 3424078 - RNA, 19 nt, Human
agauuuguuuuuaaacugu

SEQ ID NO: 3424079 - RNA, 23 nt, Human
agauuuguuuuuaaacuguacag

SEQ ID NO: 3424080 - RNA, 17 nt, Human
agauuuuaaaaagucuu

SEQ ID NO: 3424081 - RNA, 20 nt, Human
agauuuuaaaacuucaucug

SEQ ID NO: 3424082 - RNA, 13 nt, Human
agauuuuaaauuc

SEQ ID NO: 3424083 - RNA, 19 nt, Human
agauuuuaaauucacaaua

SEQ ID NO: 3424084 - RNA, 17 nt, Human
agauuuuacaaaagaug

SEQ ID NO: 3424085 - RNA, 18 nt, Human
agauuuuacaaaagaugu

SEQ ID NO: 3424086 - RNA, 20 nt, Human
agauuuuacaugaaguauuu

SEQ ID NO: 3424087 - RNA, 14 nt, Human
agauuuuagguguu

SEQ ID NO: 3424088 - RNA, 13 nt, Human
agauuuuaguuuu

SEQ ID NO: 3424089 - RNA, 14 nt, Human
agauuuuauagugu

SEQ ID NO: 3424090 - RNA, 14 nt, Human
agauuuuauuaugu

SEQ ID NO: 3424091 - RNA, 15 nt, Human
agauuuuauuaugua

SEQ ID NO: 3424092 - RNA, 22 nt, Human
agauuuuauuauguaaauccca

SEQ ID NO: 3424093 - RNA, 12 nt, Human
agauuuucagaa

SEQ ID NO: 3424094 - RNA, 23 nt, Human
agauuuuccacaagauucccaga

SEQ ID NO: 3424095 - RNA, 17 nt, Human
agauuuuccucuuguga

SEQ ID NO: 3424096 - RNA, 16 nt, Human
agauuuuccugaaaac

SEQ ID NO: 3424097 - RNA, 14 nt, Human
agauuuuccugugg

SEQ ID NO: 3424098 - RNA, 16 nt, Human
agauuuucugcuacuu

SEQ ID NO: 3424099 - RNA, 19 nt, Human
agauuuucugcuacuuugc

SEQ ID NO: 3424100 - RNA, 13 nt, Human
agauuuucuuuaa

SEQ ID NO: 3424101 - RNA, 17 nt, Human
agauuuucuuuaaaaga

SEQ ID NO: 3424102 - RNA, 13 nt, Human
agauuuugaaaac

SEQ ID NO: 3424103 - RNA, 21 nt, Human
agauuuugaaaacuacauuuu

SEQ ID NO: 3424104 - RNA, 23 nt, Human
agauuuugaaaacuacauuuuaa

SEQ ID NO: 3424105 - RNA, 12 nt, Human
agauuuugaaug

SEQ ID NO: 3424106 - RNA, 19 nt, Human
agauuaugagacacaggau

SEQ ID NO: 3424107 - RNA, 20 nt, Human
agauuauggagcuuuuuucc

SEQ ID NO: 3424108 - RNA, 14 nt, Human
agauucaaagguuc

SEQ ID NO: 3424109 - RNA, 18 nt, Human
agcagcaaggucuugcuc

SEQ ID NO: 3424110 - RNA, 23 nt, Human
agcagcaaggucuugcucuccua

SEQ ID NO: 3424111 - RNA, 20 nt, Human
agcagcaccuccucagccug

SEQ ID NO: 3424112 - RNA, 14 nt, Human
agcagcaccugccc

SEQ ID NO: 3424113 - RNA, 20 nt, Human
agcagcaccugcccuaccug

SEQ ID NO: 3424114 - RNA, 13 nt, Human
agcagcagcaggu

SEQ ID NO: 3424115 - RNA, 23 nt, Human
agcagcagugaaaacaagugcug

SEQ ID NO: 3424116 - RNA, 14 nt, Human
agcagcaucuucug

SEQ ID NO: 3424117 - RNA, 14 nt, Human
agcagcauuuuuau

SEQ ID NO: 3424118 - RNA, 20 nt, Human
agcagccaagcuccuuggga

SEQ ID NO: 3424119 - RNA, 22 nt, Human
agcagccaagcuccuugggagg

SEQ ID NO: 3424120 - RNA, 15 nt, Human
agcagccacauuccu

SEQ ID NO: 3424121 - RNA, 20 nt, Human
agcagccaccccaugcuggc

SEQ ID NO: 3424122 - RNA, 22 nt, Human
agcagccaccccaugcuggccu

SEQ ID NO: 3424123 - RNA, 10 nt, Human
agcagccacg

SEQ ID NO: 3424124 - RNA, 13 nt, Human
agcagccacgagg

SEQ ID NO: 3424125 - RNA, 21 nt, Human
agcagccagccaaacacacag

SEQ ID NO: 3424126 - RNA, 14 nt, Human
agcagccagcccug

SEQ ID NO: 3424127 - RNA, 22 nt, Human
agcagccagcccugccuggagg

SEQ ID NO: 3424128 - RNA, 15 nt, Human
agcagccagccguga

SEQ ID NO: 3424129 - RNA, 18 nt, Human
agcagcccaagcuucccu

SEQ ID NO: 3424130 - RNA, 14 nt, Human
agcagcccccagcu

SEQ ID NO: 3424131 - RNA, 14 nt, Human
agcagcccuccuca

SEQ ID NO: 3424132 - RNA, 17 nt, Human
agcagcccuccucaccc

SEQ ID NO: 3424133 - RNA, 23 nt, Human
agcagcccuccucaccccgucug

SEQ ID NO: 3424134 - RNA, 17 nt, Human
agcagcccugccccaca

SEQ ID NO: 3424135 - RNA, 16 nt, Human
agcagcccuggaguca

SEQ ID NO: 3424136 - RNA, 16 nt, Human
agcagcccuuggccag

SEQ ID NO: 3424137 - RNA, 20 nt, Human
agcagccucgccccuggcag

SEQ ID NO: 3424138 - RNA, 22 nt, Human
agcagccucgccccuggcagag

SEQ ID NO: 3424139 - RNA, 18 nt, Human
agcagccucuccccaggu

SEQ ID NO: 3424140 - RNA, 14 nt, Human
agcagccucugaag

SEQ ID NO: 3424141 - RNA, 13 nt, Human
agcagccugagca

SEQ ID NO: 3424142 - RNA, 22 nt, Human
agcagccugcuucccaccuccc

SEQ ID NO: 3424143 - RNA, 16 nt, Human
agcagccuggagcccu

SEQ ID NO: 3424144 - RNA, 13 nt, Human
agcagccuggcuc

SEQ ID NO: 3424145 - RNA, 15 nt, Human
agcagccuggcuccc

SEQ ID NO: 3424146 - RNA, 17 nt, Human
agcagccuggcuccccu

SEQ ID NO: 3424147 - RNA, 19 nt, Human
agcagccuggcuccccugg

SEQ ID NO: 3424148 - RNA, 21 nt, Human
agcagccuggcuccccugggg

SEQ ID NO: 3424149 - RNA, 22 nt, Human
agcagccuuucucucuuuauac

SEQ ID NO: 3424150 - RNA, 14 nt, Human
agcagcgagccugc

SEQ ID NO: 3424151 - RNA, 23 nt, Human
agcagcgguuuggggagcagaga

SEQ ID NO: 3424152 - RNA, 13 nt, Human
agcagcguuucua

SEQ ID NO: 3424153 - RNA, 18 nt, Human
agcagcuaaauuuucuga

SEQ ID NO: 3424154 - RNA, 18 nt, Human
agcagcugccaggagcac

SEQ ID NO: 3424155 - RNA, 22 nt, Human
agcagcugguaaucuugcucug

SEQ ID NO: 3424156 - RNA, 18 nt, Human
agcagcuuagacuaaggc

SEQ ID NO: 3424157 - RNA, 12 nt, Human
agcagcuuccag

SEQ ID NO: 3424158 - RNA, 14 nt, Human
agcagcuuccagau

SEQ ID NO: 3424159 - RNA, 17 nt, Human
agcagcuucugccacuu

SEQ ID NO: 3424160 - RNA, 21 nt, Human
agcagcuuuuuuuuccccccu

SEQ ID NO: 3424161 - RNA, 12 nt, Human
agcaggaagcuc

SEQ ID NO: 3424162 - RNA, 17 nt, Human
agcaggaaggccugggu

SEQ ID NO: 3424163 - RNA, 21 nt, Human
agcaggaauauaugugugccu

SEQ ID NO: 3424164 - RNA, 18 nt, Human
agcaggaccucccuuccg

SEQ ID NO: 3424165 - RNA, 14 nt, Human
agcaggacuccagg

SEQ ID NO: 3424166 - RNA, 23 nt, Human
agcaggacugaauuguccccagu

SEQ ID NO: 3424167 - RNA, 12 nt, Human
agcaggagacga

SEQ ID NO: 3424168 - RNA, 16 nt, Human
agcaggagaggagagc

SEQ ID NO: 3424169 - RNA, 17 nt, Human
agcaggagaggagagcc

SEQ ID NO: 3424170 - RNA, 21 nt, Human
agcaggagaggagagccagag

SEQ ID NO: 3424171 - RNA, 23 nt, Human
agcaggagaggagagccagagaa

SEQ ID NO: 3424172 - RNA, 19 nt, Human
agcaggagauugagaagga

SEQ ID NO: 3424173 - RNA, 21 nt, Human
agcaggagauugagaaggaga

SEQ ID NO: 3424174 - RNA, 23 nt, Human
agcaggaggccccuggcccagcg

SEQ ID NO: 3424175 - RNA, 21 nt, Human
agcaggaguggugcagacaga

SEQ ID NO: 3424176 - RNA, 16 nt, Human
agcaggcacauggagg

SEQ ID NO: 3424177 - RNA, 20 nt, Human
agcaggcacuugauuccuug

SEQ ID NO: 3424178 - RNA, 10 nt, Human
agcaggcagc

SEQ ID NO: 3424179 - RNA, 11 nt, Human
agcaggcagcc

SEQ ID NO: 3424180 - RNA, 12 nt, Human
agcaggcagcca

SEQ ID NO: 3424181 - RNA, 14 nt, Human
agcaggcagccagc

SEQ ID NO: 3424182 - RNA, 16 nt, Human
agcaggcagcgccaag

SEQ ID NO: 3424183 - RNA, 17 nt, Human
agcaggccaaggucuga

SEQ ID NO: 3424184 - RNA, 23 nt, Human
agcaggccacacuucaaacuacu

SEQ ID NO: 3424185 - RNA, 23 nt, Human
agcaggccagguccagagagacc

SEQ ID NO: 3424186 - RNA, 14 nt, Human
agcaggcccaccua

SEQ ID NO: 3424187 - RNA, 17 nt, Human
agcaggcccaccuaccu

SEQ ID NO: 3424188 - RNA, 16 nt, Human
agcaggccuguugcuu

SEQ ID NO: 3424189 - RNA, 19 nt, Human
agcaggcgugaccugccag

SEQ ID NO: 3424190 - RNA, 21 nt, Human
agcaggcguucagcucacugu

SEQ ID NO: 3424191 - RNA, 17 nt, Human
agcaggcuacugucagc

SEQ ID NO: 3424192 - RNA, 19 nt, Human
agcaggcuacugucagcuc

SEQ ID NO: 3424193 - RNA, 13 nt, Human
agcaggcucucag

SEQ ID NO: 3424194 - RNA, 15 nt, Human
agcaggcucucaggc

SEQ ID NO: 3424195 - RNA, 17 nt, Human
agcaggcucucaggcca

SEQ ID NO: 3424196 - RNA, 19 nt, Human
agcaggcucucaggccagc

SEQ ID NO: 3424197 - RNA, 20 nt, Human
agcaggcuggcagcucucca

SEQ ID NO: 3424198 - RNA, 22 nt, Human
agcaggcuggcagcucuccagu

SEQ ID NO: 3424199 - RNA, 16 nt, Human
agcagggaaggccuga

SEQ ID NO: 3424200 - RNA, 16 nt, Human
agcagggaauuucuau

SEQ ID NO: 3424201 - RNA, 11 nt, Human
agcagggagga

SEQ ID NO: 3424202 - RNA, 20 nt, Human
agcagggagggcuucugcca

SEQ ID NO: 3424203 - RNA, 20 nt, Human
agcagggauuaaccucugca

SEQ ID NO: 3424204 - RNA, 19 nt, Human
agcagggcauggcugggaa

SEQ ID NO: 3424205 - RNA, 22 nt, Human
agcagggccggggaacuggcca

SEQ ID NO: 3424206 - RNA, 23 nt, Human
agcagggcuacccugagcugagg

SEQ ID NO: 3424207 - RNA, 23 nt, Human
agcagggcucugccccagaggcc

SEQ ID NO: 3424208 - RNA, 16 nt, Human
agcagggcugcuguga

SEQ ID NO: 3424209 - RNA, 18 nt, Human
agcagggucgggaaaggc

SEQ ID NO: 3424210 - RNA, 17 nt, Human
agcagggucugggcagg

SEQ ID NO: 3424211 - RNA, 16 nt, Human
agcagggucuuuucau

SEQ ID NO: 3424212 - RNA, 14 nt, Human
agcagguaccacug

SEQ ID NO: 3424213 - RNA, 17 nt, Human
agcagguagccugcugg

SEQ ID NO: 3424214 - RNA, 18 nt, Human
agcagguagccugcuggu

SEQ ID NO: 3424215 - RNA, 19 nt, Human
agcaggugauuggaccagg

SEQ ID NO: 3424216 - RNA, 20 nt, Human
agcaggugauuggaccaggc

SEQ ID NO: 3424217 - RNA, 13 nt, Human
agcaggugcugac

SEQ ID NO: 3424218 - RNA, 13 nt, Human
agcaggugguccu

SEQ ID NO: 3424219 - RNA, 20 nt, Human
agcaggugguccugagaccu

SEQ ID NO: 3424220 - RNA, 20 nt, Human
agcagguuaaauguuuugua

SEQ ID NO: 3424221 - RNA, 17 nt, Human
agcagguucccaagcuc

SEQ ID NO: 3424222 - RNA, 21 nt, Human
agcaguaaaagaugaaguuuu

SEQ ID NO: 3424223 - RNA, 17 nt, Human
agcaguaaauuugcuag

SEQ ID NO: 3424224 - RNA, 17 nt, Human
agcaguaacugacaacu

SEQ ID NO: 3424225 - RNA, 17 nt, Human
agcaguaccagcgcucu

SEQ ID NO: 3424226 - RNA, 22 nt, Human
agcaguagaaauaauaugcauu

SEQ ID NO: 3424227 - RNA, 18 nt, Human
agcaguagacauuuuaac

SEQ ID NO: 3424228 - RNA, 14 nt, Human
agcaguauauguua

SEQ ID NO: 3424229 - RNA, 20 nt, Human
agcaguauauguuaauuugu

SEQ ID NO: 3424230 - RNA, 15 nt, Human
agcaguauauuagua

SEQ ID NO: 3424231 - RNA, 16 nt, Human
agcaguaucaugaagc

SEQ ID NO: 3424232 - RNA, 11 nt, Human
agcaguauuuu

SEQ ID NO: 3424233 - RNA, 17 nt, Human
agcagucaggaaagaga

SEQ ID NO: 3424234 - RNA, 18 nt, Human
agcagucaggaaagagaa

SEQ ID NO: 3424235 - RNA, 13 nt, Human
agcaguccaugca

SEQ ID NO: 3424236 - RNA, 18 nt, Human
agcaguccccuucccucc

SEQ ID NO: 3424237 - RNA, 22 nt, Human
agcaguccccuucccuccaaga

SEQ ID NO: 3424238 - RNA, 19 nt, Human
agcaguccugccucagccu

SEQ ID NO: 3424239 - RNA, 14 nt, Human
agcagucgugccug

SEQ ID NO: 3424240 - RNA, 16 nt, Human
agcagucgugccugug

SEQ ID NO: 3424241 - RNA, 21 nt, Human
agcagucgugccuguguccau

SEQ ID NO: 3424242 - RNA, 23 nt, Human
agcagucuacccaccucagccuc

SEQ ID NO: 3424243 - RNA, 13 nt, Human
agcagucugccug

SEQ ID NO: 3424244 - RNA, 23 nt, Human
agcagugauauucuuuguuaauu

SEQ ID NO: 3424245 - RNA, 15 nt, Human
agcagugcaggcaca

SEQ ID NO: 3424246 - RNA, 13 nt, Human
agcagugcccagg

SEQ ID NO: 3424247 - RNA, 14 nt, Human
agcagugcccaggu

SEQ ID NO: 3424248 - RNA, 17 nt, Human
agcagugccuuccauaa

SEQ ID NO: 3424249 - RNA, 12 nt, Human
agcagugcuuuu

SEQ ID NO: 3424250 - RNA, 22 nt, Human
agcaguggcaggcagaggccca

SEQ ID NO: 3424251 - RNA, 12 nt, Human
agcaguggccuu

SEQ ID NO: 3424252 - RNA, 12 nt, Human
agcaguggcugg

SEQ ID NO: 3424253 - RNA, 21 nt, Human
agcauugauauuugugcauuu

SEQ ID NO: 3424254 - RNA, 22 nt, Human
agcauugccauucccugccugg

SEQ ID NO: 3424255 - RNA, 13 nt, Human
agcauugccuggc

SEQ ID NO: 3424256 - RNA, 21 nt, Human
agcauugccuggccuuccugu

SEQ ID NO: 3424257 - RNA, 15 nt, Human
agcauugcugguucu

SEQ ID NO: 3424258 - RNA, 15 nt, Human
agcauugcuuucuga

SEQ ID NO: 3424259 - RNA, 16 nt, Human
agcauugcuuucugaa

SEQ ID NO: 3424260 - RNA, 23 nt, Human
agcauugcuuuuauuuugaaaag

SEQ ID NO: 3424261 - RNA, 20 nt, Human
agcauuggggauguuuuucu

SEQ ID NO: 3424262 - RNA, 16 nt, Human
agcauuguaaaauaau

SEQ ID NO: 3424263 - RNA, 22 nt, Human
agcauuguaaaauuauuucaug

SEQ ID NO: 3424264 - RNA, 18 nt, Human
agcauuguaaaugugcuu

SEQ ID NO: 3424265 - RNA, 15 nt, Human
agcauuguagugcuu

SEQ ID NO: 3424266 - RNA, 18 nt, Human
agcauuguagugcuuuga

SEQ ID NO: 3424267 - RNA, 13 nt, Human
agcauugugagua

SEQ ID NO: 3424268 - RNA, 20 nt, Human
agcauuguggcugucagcag

SEQ ID NO: 3424269 - RNA, 21 nt, Human
agcauuguuugcuuauuguuc

SEQ ID NO: 3424270 - RNA, 15 nt, Human
agcauuuacuuugaa

SEQ ID NO: 3424271 - RNA, 16 nt, Human
agcauuuagcuggcca

SEQ ID NO: 3424272 - RNA, 20 nt, Human
agcauuuaguccaaugucuu

SEQ ID NO: 3424273 - RNA, 12 nt, Human
agcauuuaucau

SEQ ID NO: 3424274 - RNA, 15 nt, Human
agcauuuaucauucu

SEQ ID NO: 3424275 - RNA, 13 nt, Human
agcauuucauucu

SEQ ID NO: 3424276 - RNA, 20 nt, Human
agcauuucauucuucucuag

SEQ ID NO: 3424277 - RNA, 21 nt, Human
agcauuuccaacaccacagac

SEQ ID NO: 3424278 - RNA, 23 nt, Human
agcauuuccaacaccacagacac

SEQ ID NO: 3424279 - RNA, 22 nt, Human
agcauuucugaaguggacucuu

SEQ ID NO: 3424280 - RNA, 11 nt, Human
agcauuugaau

SEQ ID NO: 3424281 - RNA, 14 nt, Human
agcauuugaaugca

SEQ ID NO: 3424282 - RNA, 16 nt, Human
agcauuugacuuucug

SEQ ID NO: 3424283 - RNA, 21 nt, Human
agcauuugacuuucugucugu

SEQ ID NO: 3424284 - RNA, 16 nt, Human
agcauuugauaaugau

SEQ ID NO: 3424285 - RNA, 14 nt, Human
agcauuuggugcuu

SEQ ID NO: 3424286 - RNA, 15 nt, Human
agcauuuggugcuug

SEQ ID NO: 3424287 - RNA, 13 nt, Human
agcauuuuaaaca

SEQ ID NO: 3424288 - RNA, 15 nt, Human
agcauuuuaaacaaa

SEQ ID NO: 3424289 - RNA, 17 nt, Human
agcauuuuaaacaaaau

SEQ ID NO: 3424290 - RNA, 20 nt, Human
agcauuuuaaacaaaauaga

SEQ ID NO: 3424291 - RNA, 12 nt, Human
agcauuuuccuc

SEQ ID NO: 3424292 - RNA, 18 nt, Human
agcauuuuccucugcuuu

SEQ ID NO: 3424293 - RNA, 22 nt, Human
agcauuuuccucugcuuugaaa

SEQ ID NO: 3424294 - RNA, 15 nt, Human
agcauuuucugcauc

SEQ ID NO: 3424295 - RNA, 15 nt, Human
agcauuuugcuaaau

SEQ ID NO: 3424296 - RNA, 17 nt, Human
agcauuuuguaaguuga

SEQ ID NO: 3424297 - RNA, 13 nt, Human
agcauuuuguaau

SEQ ID NO: 3424298 - RNA, 23 nt, Human
agcauuuuucaauauauugaacu

SEQ ID NO: 3424299 - RNA, 15 nt, Human
agcauuuuuuaaaaa

SEQ ID NO: 3424300 - RNA, 15 nt, Human
agcauuuuuuaaccu

SEQ ID NO: 3424301 - RNA, 17 nt, Human
agccaaaauguaggcuu

SEQ ID NO: 3424302 - RNA, 23 nt, Human
agccaaaaugugagugguugaau

SEQ ID NO: 3424303 - RNA, 15 nt, Human
agccaaacccugucu

SEQ ID NO: 3424304 - RNA, 16 nt, Human
agccaaacccugucug

SEQ ID NO: 3424305 - RNA, 13 nt, Human
agccaaacccuug

SEQ ID NO: 3424306 - RNA, 19 nt, Human
agccaaacccuugucagug

SEQ ID NO: 3424307 - RNA, 15 nt, Human
agccaaaccucacca

SEQ ID NO: 3424308 - RNA, 21 nt, Human
agccaaaccucaccaacuccu

SEQ ID NO: 3424309 - RNA, 14 nt, Human
agccaaacucugcc

SEQ ID NO: 3424310 - RNA, 17 nt, Human
agccaaagaaaugaaca

SEQ ID NO: 3424311 - RNA, 15 nt, Human
agccaaagauaaucu

SEQ ID NO: 3424312 - RNA, 12 nt, Human
agccaaagccaa

SEQ ID NO: 3424313 - RNA, 18 nt, Human
agccaaagcuaggccugg

SEQ ID NO: 3424314 - RNA, 20 nt, Human
agcagcuaccagguguucua

SEQ ID NO: 3424315 - RNA, 19 nt, Human
agcagcucaaaggcacagu

SEQ ID NO: 3424316 - RNA, 12 nt, Human
agcagcucaggc

SEQ ID NO: 3424317 - RNA, 14 nt, Human
agcagcucaggcac

SEQ ID NO: 3424318 - RNA, 21 nt, Human
agcagcucaggcacacuucuu

SEQ ID NO: 3424319 - RNA, 15 nt, Human
agcagcucuugcuaa

SEQ ID NO: 3424320 - RNA, 16 nt, Human
agcagcucuugcuaau

SEQ ID NO: 3424321 - RNA, 23 nt, Human
agcagcucuugcuaaucaguguc

SEQ ID NO: 3424322 - RNA, 19 nt, Human
agcagcugacuuucaaagu

SEQ ID NO: 3424323 - RNA, 11 nt, Human
agcagcugagc

SEQ ID NO: 3424324 - RNA, 13 nt, Human
agcagcugagcag

SEQ ID NO: 3424325 - RNA, 16 nt, Human
agcagcugagcagggc

SEQ ID NO: 3424326 - RNA, 19 nt, Human
agcagcugagcagggccgg

SEQ ID NO: 3424327 - RNA, 10 nt, Human
agcagcugga

SEQ ID NO: 3424328 - RNA, 14 nt, Human
agcagcuuauuguu

SEQ ID NO: 3424329 - RNA, 18 nt, Human
agcagcuucaccagagca

SEQ ID NO: 3424330 - RNA, 16 nt, Human
agcagcuucugccacu

SEQ ID NO: 3424331 - RNA, 15 nt, Human
agcaggaaaugaaaa

SEQ ID NO: 3424332 - RNA, 21 nt, Human
agcaggaaaugaaaaugucuu

SEQ ID NO: 3424333 - RNA, 23 nt, Human
agcaggaaaugaaaaugucuugu

SEQ ID NO: 3424334 - RNA, 21 nt, Human
agcaggaagcauucagagagc

SEQ ID NO: 3424335 - RNA, 14 nt, Human
agcaggaagcucag

SEQ ID NO: 3424336 - RNA, 15 nt, Human
agcaggaagcucaga

SEQ ID NO: 3424337 - RNA, 20 nt, Human
agcaggaauauaugugugcc

SEQ ID NO: 3424338 - RNA, 17 nt, Human
agcaggaaugggaagga

SEQ ID NO: 3424339 - RNA, 14 nt, Human
agcaggaccucccu

SEQ ID NO: 3424340 - RNA, 16 nt, Human
agcaggaccucccuuc

SEQ ID NO: 3424341 - RNA, 17 nt, Human
agcaggaccucccuucc

SEQ ID NO: 3424342 - RNA, 22 nt, Human
agcaggaccucugaaacccugg

SEQ ID NO: 3424343 - RNA, 22 nt, Human
agcaggacuccaggcccaaggc

SEQ ID NO: 3424344 - RNA, 22 nt, Human
agcaggacugaugucuccuaag

SEQ ID NO: 3424345 - RNA, 22 nt, Human
agcaggagaggagagccagaga

SEQ ID NO: 3424346 - RNA, 15 nt, Human
agcaggagauugaga

SEQ ID NO: 3424347 - RNA, 16 nt, Human
agcaggaggaggugcc

SEQ ID NO: 3424348 - RNA, 10 nt, Human
agcaggaggc

SEQ ID NO: 3424349 - RNA, 20 nt, Human
agcaggaggccccuggccca

SEQ ID NO: 3424350 - RNA, 15 nt, Human
agcaggaggcuggga

SEQ ID NO: 3424351 - RNA, 14 nt, Human
agcaggagggggga

SEQ ID NO: 3424352 - RNA, 16 nt, Human
agcaggaggggggagg

SEQ ID NO: 3424353 - RNA, 21 nt, Human
agcaggaggggggagggaagg

SEQ ID NO: 3424354 - RNA, 18 nt, Human
agcaggaguggugcagac

SEQ ID NO: 3424355 - RNA, 21 nt, Human
agcaggauaguugcuccgccu

SEQ ID NO: 3424356 - RNA, 19 nt, Human
agcaggcacgggugguccc

SEQ ID NO: 3424357 - RNA, 20 nt, Human
agcaggcacggguggucccc

SEQ ID NO: 3424358 - RNA, 16 nt, Human
agcaggccaaggucug

SEQ ID NO: 3424359 - RNA, 13 nt, Human
agcaggccacacu

SEQ ID NO: 3424360 - RNA, 24 nt, Human
agcaggccacacuucaaacuacuu

SEQ ID NO: 3424361 - RNA, 23 nt, Human
agcaggcccaccuaccuucaaag

SEQ ID NO: 3424362 - RNA, 15 nt, Human
agcaggccuguugcu

SEQ ID NO: 3424363 - RNA, 21 nt, Human
agcaggccuugcgcuguugcg

SEQ ID NO: 3424364 - RNA, 16 nt, Human
agcaggcuacacugac

SEQ ID NO: 3424365 - RNA, 14 nt, Human
agcaggcuacuguc

SEQ ID NO: 3424366 - RNA, 22 nt, Human
agcaggcucucaggccagcugc

SEQ ID NO: 3424367 - RNA, 23 nt, Human
agcaggcucucaggccagcugcu

SEQ ID NO: 3424368 - RNA, 13 nt, Human
agcaggcugccag

SEQ ID NO: 3424369 - RNA, 14 nt, Human
agcaggcugccagu

SEQ ID NO: 3424370 - RNA, 17 nt, Human
agcaggcugccagugcc

SEQ ID NO: 3424371 - RNA, 18 nt, Human
agcaggcugccagugccu

SEQ ID NO: 3424372 - RNA, 22 nt, Human
agcaggcugccagugccugggu

SEQ ID NO: 3424373 - RNA, 24 nt, Human
agcaggcuggcagcucuccaguca

SEQ ID NO: 3424374 - RNA, 20 nt, Human
agcagggaaaauauauaucu

SEQ ID NO: 3424375 - RNA, 21 nt, Human
agcagggaaaaugcagcaggg

SEQ ID NO: 3424376 - RNA, 14 nt, Human
agcagggaaacagc

SEQ ID NO: 3424377 - RNA, 14 nt, Human
agcagggaaggccu

SEQ ID NO: 3424378 - RNA, 15 nt, Human
agcagggaaggccug

SEQ ID NO: 3424379 - RNA, 17 nt, Human
agcagggaaggccugac

SEQ ID NO: 3424380 - RNA, 22 nt, Human
agcagggaugcccuggaggugg

SEQ ID NO: 3424381 - RNA, 21 nt, Human
agcagggauuaaccucugcac

SEQ ID NO: 3424382 - RNA, 22 nt, Human
agcagggauuaaccucugcacu

SEQ ID NO: 3424383 - RNA, 14 nt, Human
agcagggccgggga

SEQ ID NO: 3424384 - RNA, 23 nt, Human
agcagggccggggaacuggccaa

SEQ ID NO: 3424385 - RNA, 21 nt, Human
agcaggggcuacaagagggaa

SEQ ID NO: 3424386 - RNA, 22 nt, Human
agcagggguccuuggugugacc

SEQ ID NO: 3424387 - RNA, 21 nt, Human
agcaggguagucugguuucua

SEQ ID NO: 3424388 - RNA, 20 nt, Human
agcagggucuuuucaucugg

SEQ ID NO: 3424389 - RNA, 20 nt, Human
agcagguccccagcuuuggc

SEQ ID NO: 3424390 - RNA, 15 nt, Human
agcaggugcugcuac

SEQ ID NO: 3424391 - RNA, 17 nt, Human
agcaggugcugcuaccc

SEQ ID NO: 3424392 - RNA, 18 nt, Human
agcaggugcugcuacccu

SEQ ID NO: 3424393 - RNA, 19 nt, Human
agcagguggcaucucuaau

SEQ ID NO: 3424394 - RNA, 17 nt, Human
agcaggugggaaauggu

SEQ ID NO: 3424395 - RNA, 21 nt, Human
agcaggugguccugagaccug

SEQ ID NO: 3424396 - RNA, 18 nt, Human
agcagguuaaauguuuug

SEQ ID NO: 3424397 - RNA, 23 nt, Human
agcaucuccugaggaucagaaag

SEQ ID NO: 3424398 - RNA, 14 nt, Human
agcaucucuaccuu

SEQ ID NO: 3424399 - RNA, 15 nt, Human
agcaucucuaccuuc

SEQ ID NO: 3424400 - RNA, 17 nt, Human
agcaucucuaccuucuc

SEQ ID NO: 3424401 - RNA, 22 nt, Human
agcaucucuaccuucuccccag

SEQ ID NO: 3424402 - RNA, 23 nt, Human
agcaucucuaccuucuccccagc

SEQ ID NO: 3424403 - RNA, 17 nt, Human
agcaucucuugaggcca

SEQ ID NO: 3424404 - RNA, 17 nt, Human
agcaucugcauugccca

SEQ ID NO: 3424405 - RNA, 13 nt, Human
agcaucuggcucu

SEQ ID NO: 3424406 - RNA, 16 nt, Human
agcaucuggcucuaau

SEQ ID NO: 3424407 - RNA, 18 nt, Human
agcaucuggcucuaauuc

SEQ ID NO: 3424408 - RNA, 18 nt, Human
agcaucugggccuuggcc

SEQ ID NO: 3424409 - RNA, 22 nt, Human
agcaucugggccuuggccugga

SEQ ID NO: 3424410 - RNA, 23 nt, Human
agcaucugggccuuggccuggag

SEQ ID NO: 3424411 - RNA, 18 nt, Human
agcaucuucacuucuaaa

SEQ ID NO: 3424412 - RNA, 20 nt, Human
agcaucuucacuucuaaaug

SEQ ID NO: 3424413 - RNA, 13 nt, Human
agcaugaaaaagc

SEQ ID NO: 3424414 - RNA, 17 nt, Human
agcaugaaaaugugugu

SEQ ID NO: 3424415 - RNA, 21 nt, Human
agcaugaaaggcuuuuaaauu

SEQ ID NO: 3424416 - RNA, 15 nt, Human
agcaugaaaugugaa

SEQ ID NO: 3424417 - RNA, 17 nt, Human
agcaugaaaugugaauu

SEQ ID NO: 3424418 - RNA, 16 nt, Human
agcaugaacagugcac

SEQ ID NO: 3424419 - RNA, 12 nt, Human
agcaugaagaca

SEQ ID NO: 3424420 - RNA, 22 nt, Human
agcaugaagauaaacacagcug

SEQ ID NO: 3424421 - RNA, 22 nt, Human
agcaugaaugguauggaacucu

SEQ ID NO: 3424422 - RNA, 20 nt, Human
agcaugaauuuuuuucaucu

SEQ ID NO: 3424423 - RNA, 20 nt, Human
agcaugacaagccccaggca

SEQ ID NO: 3424424 - RNA, 21 nt, Human
agcaugacagaaaauauguau

SEQ ID NO: 3424425 - RNA, 23 nt, Human
agcaugacagaaaauauguauua

SEQ ID NO: 3424426 - RNA, 23 nt, Human
agcaugaccugugaccagcacug

SEQ ID NO: 3424427 - RNA, 20 nt, Human
agcaugagagggaugaggca

SEQ ID NO: 3424428 - RNA, 23 nt, Human
agcaugaggcagcacgugcacaa

SEQ ID NO: 3424429 - RNA, 14 nt, Human
agcaugcacaaagu

SEQ ID NO: 3424430 - RNA, 16 nt, Human
agcaugcacaaagugu

SEQ ID NO: 3424431 - RNA, 19 nt, Human
agcaugcacaaaguguauu

SEQ ID NO: 3424432 - RNA, 21 nt, Human
agcaugcacaaaguguauuca

SEQ ID NO: 3424433 - RNA, 15 nt, Human
agcaugcaucuguuu

SEQ ID NO: 3424434 - RNA, 16 nt, Human
agcaugccaacaagaa

SEQ ID NO: 3424435 - RNA, 14 nt, Human
agcauggacauuua

SEQ ID NO: 3424436 - RNA, 20 nt, Human
agcauggacauuuagaagaa

SEQ ID NO: 3424437 - RNA, 14 nt, Human
agcauggagcuggc

SEQ ID NO: 3424438 - RNA, 18 nt, Human
agcauggcacucccucca

SEQ ID NO: 3424439 - RNA, 15 nt, Human
agcauggcuauuuua

SEQ ID NO: 3424440 - RNA, 17 nt, Human
agcauggcuauuuuaua

SEQ ID NO: 3424441 - RNA, 12 nt, Human
agcauggcugcc

SEQ ID NO: 3424442 - RNA, 13 nt, Human
agcauggcuguga

SEQ ID NO: 3424443 - RNA, 17 nt, Human
agcauggucccugccuu

SEQ ID NO: 3424444 - RNA, 16 nt, Human
agcauggugcaugccg

SEQ ID NO: 3424445 - RNA, 13 nt, Human
agcauguaauggu

SEQ ID NO: 3424446 - RNA, 12 nt, Human
agcauguacagu

SEQ ID NO: 3424447 - RNA, 15 nt, Human
agcauguacaguguu

SEQ ID NO: 3424448 - RNA, 20 nt, Human
agcauguacggauuuucagu

SEQ ID NO: 3424449 - RNA, 18 nt, Human
agcauguauaguugcuuu

SEQ ID NO: 3424450 - RNA, 18 nt, Human
agcauguggcauguucau

SEQ ID NO: 3424451 - RNA, 17 nt, Human
agcauguguuaaucuua

SEQ ID NO: 3424452 - RNA, 22 nt, Human
agcauguguuaaucuuaaugua

SEQ ID NO: 3424453 - RNA, 16 nt, Human
agcauguguugaaaaa

SEQ ID NO: 3424454 - RNA, 17 nt, Human
agcauguugcugaggag

SEQ ID NO: 3424455 - RNA, 12 nt, Human
agcauguuuaga

SEQ ID NO: 3424456 - RNA, 13 nt, Human
agcauguuuagac

SEQ ID NO: 3424457 - RNA, 18 nt, Human
agcauguuuagacuuuaa

SEQ ID NO: 3424458 - RNA, 17 nt, Human
agcauguuucauguuuu

SEQ ID NO: 3424459 - RNA, 17 nt, Human
agcauguuugcugaaca

SEQ ID NO: 3424460 - RNA, 20 nt, Human
agcauguuugcugaacaccu

SEQ ID NO: 3424461 - RNA, 16 nt, Human
agcauguuuugcaugu

SEQ ID NO: 3424462 - RNA, 17 nt, Human
agcauuacgugagccag

SEQ ID NO: 3424463 - RNA, 15 nt, Human
agcauuacucuugua

SEQ ID NO: 3424464 - RNA, 21 nt, Human
agcauuacucuuguaagauuu

SEQ ID NO: 3424465 - RNA, 21 nt, Human
agcauuauaaucaccagggcc

SEQ ID NO: 3424466 - RNA, 15 nt, Human
agcauuaugcaauua

SEQ ID NO: 3424467 - RNA, 15 nt, Human
agcauucagagagca

SEQ ID NO: 3424468 - RNA, 20 nt, Human
agcauuccagccccucuggu

SEQ ID NO: 3424469 - RNA, 14 nt, Human
agcauuccagucag

SEQ ID NO: 3424470 - RNA, 19 nt, Human
agcauucccagguaggcca

SEQ ID NO: 3424471 - RNA, 21 nt, Human
agcauuccuucuuugauaaug

SEQ ID NO: 3424472 - RNA, 23 nt, Human
agcauuccuucuuugauaauguu

SEQ ID NO: 3424473 - RNA, 14 nt, Human
agcauucggaggga

SEQ ID NO: 3424474 - RNA, 22 nt, Human
agcauucucacuccuaccuggu

SEQ ID NO: 3424475 - RNA, 17 nt, Human
agcauucuccccagugu

SEQ ID NO: 3424476 - RNA, 14 nt, Human
agcauucuggcagu

SEQ ID NO: 3424477 - RNA, 17 nt, Human
agcauucuggcaguuuu

SEQ ID NO: 3424478 - RNA, 12 nt, Human
agcauucugucu

SEQ ID NO: 3424479 - RNA, 16 nt, Human
acugugccaugugcca

SEQ ID NO: 3424480 - RNA, 13 nt, Human
acugugcccuggu

SEQ ID NO: 3424481 - RNA, 15 nt, Human
acugugcccuggugg

SEQ ID NO: 3424482 - RNA, 23 nt, Human
acugugccuuugaguuuccucag

SEQ ID NO: 3424483 - RNA, 23 nt, Human
acugugccuuugcaaaucagugu

SEQ ID NO: 3424484 - RNA, 22 nt, Human
acugugcgucuugguguaauuu

SEQ ID NO: 3424485 - RNA, 23 nt, Human
acugugcguggggcucccgccuc

SEQ ID NO: 3424486 - RNA, 18 nt, Human
acugugcuggagccacua

SEQ ID NO: 3424487 - RNA, 12 nt, Human
acugugcuuucu

SEQ ID NO: 3424488 - RNA, 14 nt, Human
acugugcuuucuau

SEQ ID NO: 3424489 - RNA, 16 nt, Human
acuguggaaaaauauu

SEQ ID NO: 3424490 - RNA, 17 nt, Human
acuguggaaaaauauuu

SEQ ID NO: 3424491 - RNA, 19 nt, Human
acuguggaaaaauauuuaa

SEQ ID NO: 3424492 - RNA, 17 nt, Human
acuguggagacugcucc

SEQ ID NO: 3424493 - RNA, 16 nt, Human
acuguggaggaaggau

SEQ ID NO: 3424494 - RNA, 21 nt, Human
acuguggauacccuuacccuu

SEQ ID NO: 3424495 - RNA, 15 nt, Human
acuguggccuugguc

SEQ ID NO: 3424496 - RNA, 12 nt, Human
acuguggcugcu

SEQ ID NO: 3424497 - RNA, 14 nt, Human
acugugggcaauuu

SEQ ID NO: 3424498 - RNA, 13 nt, Human
acuguggguagac

SEQ ID NO: 3424499 - RNA, 20 nt, Human
acugugggugugugacucuu

SEQ ID NO: 3424500 - RNA, 23 nt, Human
acuguggguuuguggggggaggc

SEQ ID NO: 3424501 - RNA, 12 nt, Human
acuguggugacu

SEQ ID NO: 3424502 - RNA, 15 nt, Human
acuguguaacugccc

SEQ ID NO: 3424503 - RNA, 23 nt, Human
acuguguacaguaaauggcuuau

SEQ ID NO: 3424504 - RNA, 16 nt, Human
acuguguacauaacug

SEQ ID NO: 3424505 - RNA, 23 nt, Human
acuguguacauaaugcuuaauuu

SEQ ID NO: 3424506 - RNA, 19 nt, Human
acuguguauauuugauuua

SEQ ID NO: 3424507 - RNA, 18 nt, Human
acuguguauguacauaua

SEQ ID NO: 3424508 - RNA, 20 nt, Human
acuguguauguacauauaua

SEQ ID NO: 3424509 - RNA, 15 nt, Human
acuguguauuccaag

SEQ ID NO: 3424510 - RNA, 21 nt, Human
acuguguccaggugguacuuu

SEQ ID NO: 3424511 - RNA, 21 nt, Human
acugugucccucucucuggaa

SEQ ID NO: 3424512 - RNA, 22 nt, Human
acugugucccucucucuggaaa

SEQ ID NO: 3424513 - RNA, 14 nt, Human
acuguguccuggug

SEQ ID NO: 3424514 - RNA, 20 nt, Human
acugugugcucaggagcccu

SEQ ID NO: 3424515 - RNA, 17 nt, Human
acuguguguaauuguuc

SEQ ID NO: 3424516 - RNA, 18 nt, Human
acugugugugcccucugg

SEQ ID NO: 3424517 - RNA, 20 nt, Human
acugugugugcccucugggc

SEQ ID NO: 3424518 - RNA, 21 nt, Human
acugugugugcccucugggcu

SEQ ID NO: 3424519 - RNA, 22 nt, Human
acugugugugcccucugggcuc

SEQ ID NO: 3424520 - RNA, 22 nt, Human
acugugugugugaaugaacacu

SEQ ID NO: 3424521 - RNA, 19 nt, Human
acuguguguugccacagga

SEQ ID NO: 3424522 - RNA, 22 nt, Human
acuguguguugccacaggacac

SEQ ID NO: 3424523 - RNA, 15 nt, Human
acuguguuccuggca

SEQ ID NO: 3424524 - RNA, 12 nt, Human
acuguguuccuu

SEQ ID NO: 3424525 - RNA, 17 nt, Human
acuguguuguauuaaca

SEQ ID NO: 3424526 - RNA, 17 nt, Human
acuguguuuuauaaaau

SEQ ID NO: 3424527 - RNA, 20 nt, Human
acuguuaaauugcuguguau

SEQ ID NO: 3424528 - RNA, 16 nt, Human
acuguuaacuuauuca

SEQ ID NO: 3424529 - RNA, 14 nt, Human
acuguuaagaagca

SEQ ID NO: 3424530 - RNA, 15 nt, Human
acuguuacaguaaug

SEQ ID NO: 3424531 - RNA, 20 nt, Human
acuguuacaguaaugucaua

SEQ ID NO: 3424532 - RNA, 20 nt, Human
acuguuaccuaaaguauuuu

SEQ ID NO: 3424533 - RNA, 16 nt, Human
acuguuacugggcccu

SEQ ID NO: 3424534 - RNA, 15 nt, Human
acuguuagaacacua

SEQ ID NO: 3424535 - RNA, 19 nt, Human
acuguuagaacacuauuuu

SEQ ID NO: 3424536 - RNA, 23 nt, Human
acuguuagaacacuauuuucaga

SEQ ID NO: 3424537 - RNA, 15 nt, Human
acuguuagaauguaa

SEQ ID NO: 3424538 - RNA, 14 nt, Human
acuguuagcacugu

SEQ ID NO: 3424539 - RNA, 15 nt, Human
acuguuagcacuguu

SEQ ID NO: 3424540 - RNA, 17 nt, Human
acuguuagcacuguuga

SEQ ID NO: 3424541 - RNA, 19 nt, Human
agccccgacuccagccagc

SEQ ID NO: 3424542 - RNA, 14 nt, Human
agccccgaggccuu

SEQ ID NO: 3424543 - RNA, 22 nt, Human
agccccgaggccuucucugaag

SEQ ID NO: 3424544 - RNA, 23 nt, Human
agccccgcagaccuccccagccc

SEQ ID NO: 3424545 - RNA, 19 nt, Human
agccccgcccucuuccuga

SEQ ID NO: 3424546 - RNA, 21 nt, Human
agccccggcccugggcucgga

SEQ ID NO: 3424547 - RNA, 24 nt, Human
agccccggggugaguccauucucc

SEQ ID NO: 3424548 - RNA, 18 nt, Human
agccccgugggguuccuc

SEQ ID NO: 3424549 - RNA, 15 nt, Human
agccccuacugcugu

SEQ ID NO: 3424550 - RNA, 23 nt, Human
agccccuacugcugugaacccug

SEQ ID NO: 3424551 - RNA, 12 nt, Human
agccccuagaaa

SEQ ID NO: 3424552 - RNA, 23 nt, Human
agccccuagaaacccaagcuccu

SEQ ID NO: 3424553 - RNA, 16 nt, Human
agccccuagcccagga

SEQ ID NO: 3424554 - RNA, 16 nt, Human
agccccucccaagcug

SEQ ID NO: 3424555 - RNA, 19 nt, Human
agccccucccaagcuggcu

SEQ ID NO: 3424556 - RNA, 13 nt, Human
agccccuccccca

SEQ ID NO: 3424557 - RNA, 20 nt, Human
agccccucccccaucuccca

SEQ ID NO: 3424558 - RNA, 21 nt, Human
agccccucccccaucucccac

SEQ ID NO: 3424559 - RNA, 16 nt, Human
agccccucccuccucu

SEQ ID NO: 3424560 - RNA, 18 nt, Human
agccccucccuccucuga

SEQ ID NO: 3424561 - RNA, 12 nt, Human
agccccuccucu

SEQ ID NO: 3424562 - RNA, 19 nt, Human
agccccuccucugccaccu

SEQ ID NO: 3424563 - RNA, 20 nt, Human
agccccuccucugccaccuc

SEQ ID NO: 3424564 - RNA, 12 nt, Human
agccccucuggu

SEQ ID NO: 3424565 - RNA, 13 nt, Human
agccccucugguc

SEQ ID NO: 3424566 - RNA, 21 nt, Human
agccccucuggucgcuccugc

SEQ ID NO: 3424567 - RNA, 17 nt, Human
agccccucuuggagaag

SEQ ID NO: 3424568 - RNA, 18 nt, Human
agccccucuuggagaagu

SEQ ID NO: 3424569 - RNA, 14 nt, Human
agccccugaaagcc

SEQ ID NO: 3424570 - RNA, 20 nt, Human
agccccugauccugugaagu

SEQ ID NO: 3424571 - RNA, 14 nt, Human
agccccugccauug

SEQ ID NO: 3424572 - RNA, 12 nt, Human
agccccugcccc

SEQ ID NO: 3424573 - RNA, 21 nt, Human
agccccugccccagcccaagu

SEQ ID NO: 3424574 - RNA, 13 nt, Human
agccccugccccu

SEQ ID NO: 3424575 - RNA, 19 nt, Human
agccccugccccucaugcc

SEQ ID NO: 3424576 - RNA, 18 nt, Human
agccccuggaugcagccu

SEQ ID NO: 3424577 - RNA, 22 nt, Human
agccccuggaugcagccucaca

SEQ ID NO: 3424578 - RNA, 14 nt, Human
agccccugggccca

SEQ ID NO: 3424579 - RNA, 22 nt, Human
agccccugggguggccaccagu

SEQ ID NO: 3424580 - RNA, 14 nt, Human
agccccuuagcccc

SEQ ID NO: 3424581 - RNA, 13 nt, Human
agccccuucccca

SEQ ID NO: 3424582 - RNA, 15 nt, Human
agccccuuccccaug

SEQ ID NO: 3424583 - RNA, 16 nt, Human
agccccuucucagaau

SEQ ID NO: 3424584 - RNA, 18 nt, Human
agccccuucucagaaucu

SEQ ID NO: 3424585 - RNA, 15 nt, Human
agccccuucugaccc

SEQ ID NO: 3424586 - RNA, 16 nt, Human
agccccuucugaccca

SEQ ID NO: 3424587 - RNA, 17 nt, Human
agccccuugagaaaccu

SEQ ID NO: 3424588 - RNA, 23 nt, Human
agccccuugcucuccccugcccu

SEQ ID NO: 3424589 - RNA, 14 nt, Human
agccccuuuccaaa

SEQ ID NO: 3424590 - RNA, 16 nt, Human
agccccuuuccaaaau

SEQ ID NO: 3424591 - RNA, 23 nt, Human
agccccuuucccuuguagcuccu

SEQ ID NO: 3424592 - RNA, 15 nt, Human
agcccgaauacaaac

SEQ ID NO: 3424593 - RNA, 15 nt, Human
agcccgcacccccac

SEQ ID NO: 3424594 - RNA, 19 nt, Human
agcccgcacccccacccuu

SEQ ID NO: 3424595 - RNA, 14 nt, Human
agcccgcaucagcu

SEQ ID NO: 3424596 - RNA, 20 nt, Human
agcccgcaugcagcagcuug

SEQ ID NO: 3424597 - RNA, 19 nt, Human
agcccgccaagguagccau

SEQ ID NO: 3424598 - RNA, 21 nt, Human
agcccgccugccaguccuagc

SEQ ID NO: 3424599 - RNA, 23 nt, Human
agcccgcuaggcucgccuucccu

SEQ ID NO: 3424600 - RNA, 20 nt, Human
agcccggaccuuggcagccc

SEQ ID NO: 3424601 - RNA, 20 nt, Human
agcccggccugcucccagca

SEQ ID NO: 3424602 - RNA, 16 nt, Human
agcccggcgccccugc

SEQ ID NO: 3424603 - RNA, 18 nt, Human
agcccggcgccccugcca

SEQ ID NO: 3424604 - RNA, 21 nt, Human
agcccggcgccccugccaccu

SEQ ID NO: 3424605 - RNA, 13 nt, Human
agcccggcugguu

SEQ ID NO: 3424606 - RNA, 13 nt, Human
agcccgggcucug

SEQ ID NO: 3424607 - RNA, 18 nt, Human
agcccgggcucugccucc

SEQ ID NO: 3424608 - RNA, 21 nt, Human
agcccgggcucugccucccau

SEQ ID NO: 3424609 - RNA, 14 nt, Human
agcccgggcugccu

SEQ ID NO: 3424610 - RNA, 17 nt, Human
agcccgggcugccuggg

SEQ ID NO: 3424611 - RNA, 20 nt, Human
agcccgggcugccugggcug

SEQ ID NO: 3424612 - RNA, 15 nt, Human
agcccgguaagagca

SEQ ID NO: 3424613 - RNA, 19 nt, Human
agcccuaaaaauccagacu

SEQ ID NO: 3424614 - RNA, 22 nt, Human
agcccuaaaauuccacugcguu

SEQ ID NO: 3424615 - RNA, 18 nt, Human
agcccuaaccccuuccag

SEQ ID NO: 3424616 - RNA, 21 nt, Human
agcccuacucccugcagaugc

SEQ ID NO: 3424617 - RNA, 22 nt, Human
agcccuagagccugccuggagc

SEQ ID NO: 3424618 - RNA, 17 nt, Human
agcccuaggguggagag

SEQ ID NO: 3424619 - RNA, 20 nt, Human
agcccuaggguggagagcca

SEQ ID NO: 3424620 - RNA, 13 nt, Human
agcccuauggaug

SEQ ID NO: 3424621 - RNA, 14 nt, Human
agcccucaaaguga

SEQ ID NO: 3424622 - RNA, 16 nt, Human
agcccucaauugugaa

SEQ ID NO: 3424623 - RNA, 22 nt, Human
agcccucaccccugguucucau

SEQ ID NO: 3424624 - RNA, 23 nt, Human
agcccucaccccugguucucauc

SEQ ID NO: 3424625 - RNA, 24 nt, Human
agcccucagaacccuuggcuugcc

SEQ ID NO: 3424626 - RNA, 13 nt, Human
agcccucccacuu

SEQ ID NO: 3424627 - RNA, 19 nt, Human
agcccuccccauggagcca

SEQ ID NO: 3424628 - RNA, 21 nt, Human
agcccuccccauggagccagc

SEQ ID NO: 3424629 - RNA, 12 nt, Human
agcccucccugc

SEQ ID NO: 3424630 - RNA, 22 nt, Human
agcccucccugccccucccuuc

SEQ ID NO: 3424631 - RNA, 16 nt, Human
agcccucccuguccuc

SEQ ID NO: 3424632 - RNA, 17 nt, Human
agcccucccuguccucc

SEQ ID NO: 3424633 - RNA, 24 nt, Human
agcccuccgccauucucaagcccu

SEQ ID NO: 3424634 - RNA, 15 nt, Human
agcccuccgccuuca

SEQ ID NO: 3424635 - RNA, 13 nt, Human
agcccuccucacc

SEQ ID NO: 3424636 - RNA, 13 nt, Human
agcccuccuucca

SEQ ID NO: 3424637 - RNA, 14 nt, Human
agcccucgucuccc

SEQ ID NO: 3424638 - RNA, 19 nt, Human
agcccucucacuguguccc

SEQ ID NO: 3424639 - RNA, 13 nt, Human
agcccucucccuc

SEQ ID NO: 3424640 - RNA, 15 nt, Human
agcccucuuccauca

SEQ ID NO: 3424641 - RNA, 17 nt, Human
agcccucuuccaucaug

SEQ ID NO: 3424642 - RNA, 15 nt, Human
agcccugacccugug

SEQ ID NO: 3424643 - RNA, 21 nt, Human
agcccugacccuguggaagca

SEQ ID NO: 3424644 - RNA, 18 nt, Human
agcccugaggaggccuug

SEQ ID NO: 3424645 - RNA, 23 nt, Human
agcccugaguuccuagccaccgc

SEQ ID NO: 3424646 - RNA, 22 nt, Human
agcccugccccacaccuccucu

SEQ ID NO: 3424647 - RNA, 18 nt, Human
agcccugccucuccgccc

SEQ ID NO: 3424648 - RNA, 12 nt, Human
agcccugccugg

SEQ ID NO: 3424649 - RNA, 16 nt, Human
agcccugccuggagga

SEQ ID NO: 3424650 - RNA, 21 nt, Human
agcccugccuggaggaccuga

SEQ ID NO: 3424651 - RNA, 14 nt, Human
agcccugcucccuc

SEQ ID NO: 3424652 - RNA, 13 nt, Human
agcccugcuggcc

SEQ ID NO: 3424653 - RNA, 17 nt, Human
agcccugcuuugggcug

SEQ ID NO: 3424654 - RNA, 19 nt, Human
agcccugcuuugggcugcc

SEQ ID NO: 3424655 - RNA, 20 nt, Human
agcccugcuuugggcugccc

SEQ ID NO: 3424656 - RNA, 20 nt, Human
agcccuggagccaacugcug

SEQ ID NO: 3424657 - RNA, 16 nt, Human
agcccuggaggugcca

SEQ ID NO: 3424658 - RNA, 21 nt, Human
agcccuggcaggaugacccug

SEQ ID NO: 3424659 - RNA, 22 nt, Human
agcccuggcaugucaacagcgu

SEQ ID NO: 3424660 - RNA, 14 nt, Human
agcccuggccagag

SEQ ID NO: 3424661 - RNA, 15 nt, Human
agcccuggccagagg

SEQ ID NO: 3424662 - RNA, 17 nt, Human
agcccuggccagaggcu

SEQ ID NO: 3424663 - RNA, 21 nt, Human
agcccuggcugaaggacugug

SEQ ID NO: 3424664 - RNA, 13 nt, Human
agcccugggaccg

SEQ ID NO: 3424665 - RNA, 21 nt, Human
agcccugggccccaccaccua

SEQ ID NO: 3424666 - RNA, 15 nt, Human
agcccuggggcuggg

SEQ ID NO: 3424667 - RNA, 18 nt, Human
agcccuggggcugggccc

SEQ ID NO: 3424668 - RNA, 16 nt, Human
agcccuggucucagca

SEQ ID NO: 3424669 - RNA, 16 nt, Human
agcccugguggcagug

SEQ ID NO: 3424670 - RNA, 21 nt, Human
agcccugguggcagugggagc

SEQ ID NO: 3424671 - RNA, 20 nt, Human
agcccugucagcaugaauuu

SEQ ID NO: 3424672 - RNA, 16 nt, Human
agcccugucagugcag

SEQ ID NO: 3424673 - RNA, 16 nt, Human
agcccuguccuggugg

SEQ ID NO: 3424674 - RNA, 18 nt, Human
agcccugucgagacacuu

SEQ ID NO: 3424675 - RNA, 21 nt, Human
agcccugucgagacacuugcc

SEQ ID NO: 3424676 - RNA, 11 nt, Human
agcccugucuc

SEQ ID NO: 3424677 - RNA, 18 nt, Human
agcccuguggaugagccc

SEQ ID NO: 3424678 - RNA, 19 nt, Human
agcccuguggaugagcccu

SEQ ID NO: 3424679 - RNA, 14 nt, Human
agcccuguugugcc

SEQ ID NO: 3424680 - RNA, 12 nt, Human
agccucuggcua

SEQ ID NO: 3424681 - RNA, 13 nt, Human
agccucuggcuag

SEQ ID NO: 3424682 - RNA, 13 nt, Human
agccucugggccc

SEQ ID NO: 3424683 - RNA, 23 nt, Human
agccucugggucagugguccaca

SEQ ID NO: 3424684 - RNA, 22 nt, Human
agccucugucacugcaggcacu

SEQ ID NO: 3424685 - RNA, 14 nt, Human
acuuuaauuuaugu

SEQ ID NO: 3424686 - RNA, 20 nt, Human
acuuuacacucggcuuugga

SEQ ID NO: 3424687 - RNA, 15 nt, Human
acuuuacagaaaugg

SEQ ID NO: 3424688 - RNA, 16 nt, Human
acuuuaccacccccac

SEQ ID NO: 3424689 - RNA, 13 nt, Human
acuuuacccaccu

SEQ ID NO: 3424690 - RNA, 18 nt, Human
agccuguuccccucacug

SEQ ID NO: 3424691 - RNA, 22 nt, Human
agccuguugggaucgcauugca

SEQ ID NO: 3424692 - RNA, 15 nt, Human
agccuguuuaagaga

SEQ ID NO: 3424693 - RNA, 18 nt, Human
agccuguuucuuccuguu

SEQ ID NO: 3424694 - RNA, 20 nt, Human
agccuguuuuaaguucugga

SEQ ID NO: 3424695 - RNA, 18 nt, Human
agccuguuuuguuggaag

SEQ ID NO: 3424696 - RNA, 14 nt, Human
agccuuagggaagc

SEQ ID NO: 3424697 - RNA, 15 nt, Human
agccuuagggaagcu

SEQ ID NO: 3424698 - RNA, 14 nt, Human
agccuuaucaagug

SEQ ID NO: 3424699 - RNA, 17 nt, Human
agccuuaucaagugucu

SEQ ID NO: 3424700 - RNA, 14 nt, Human
agccuucaagcucu

SEQ ID NO: 3424701 - RNA, 14 nt, Human
agccuuccacccag

SEQ ID NO: 3424702 - RNA, 15 nt, Human
agccuuccacccagg

SEQ ID NO: 3424703 - RNA, 12 nt, Human
agccuuccaggg

SEQ ID NO: 3424704 - RNA, 14 nt, Human
agccuuccaggggu

SEQ ID NO: 3424705 - RNA, 16 nt, Human
agccuuccaggggugg

SEQ ID NO: 3424706 - RNA, 18 nt, Human
agccuuccagggguggga

SEQ ID NO: 3424707 - RNA, 21 nt, Human
agccuuccccuuauccucccu

SEQ ID NO: 3424708 - RNA, 23 nt, Human
agccuuccccuuauccucccugu

SEQ ID NO: 3424709 - RNA, 19 nt, Human
agccuuccucugcagcuga

SEQ ID NO: 3424710 - RNA, 12 nt, Human
agccuucucugu

SEQ ID NO: 3424711 - RNA, 20 nt, Human
agccuucucuguucauuucc

SEQ ID NO: 3424712 - RNA, 19 nt, Human
agccuucugagcuggccuc

SEQ ID NO: 3424713 - RNA, 15 nt, Human
agccuucugaugucu

SEQ ID NO: 3424714 - RNA, 20 nt, Human
agccuucuuccaucccagga

SEQ ID NO: 3424715 - RNA, 15 nt, Human
agccuucuuugcuug

SEQ ID NO: 3424716 - RNA, 16 nt, Human
agccuucuuuuucugg

SEQ ID NO: 3424717 - RNA, 18 nt, Human
agccuucuuuuucuggac

SEQ ID NO: 3424718 - RNA, 13 nt, Human
agccuugaacuuu

SEQ ID NO: 3424719 - RNA, 22 nt, Human
agccuugaacuuugaccucugc

SEQ ID NO: 3424720 - RNA, 19 nt, Human
agccuugaccauucuccac

SEQ ID NO: 3424721 - RNA, 22 nt, Human
agccuugaccauucuccaccug

SEQ ID NO: 3424722 - RNA, 16 nt, Human
agccuugagcccuggc

SEQ ID NO: 3424723 - RNA, 17 nt, Human
agccuugagcccuggcu

SEQ ID NO: 3424724 - RNA, 15 nt, Human
agccuugccagagau

SEQ ID NO: 3424725 - RNA, 22 nt, Human
agccuugccuaaauuuaaugcu

SEQ ID NO: 3424726 - RNA, 16 nt, Human
agccuuggauguauau

SEQ ID NO: 3424727 - RNA, 16 nt, Human
agccuuggcaucuaga

SEQ ID NO: 3424728 - RNA, 19 nt, Human
agccuuggccucuuuccuc

SEQ ID NO: 3424729 - RNA, 20 nt, Human
agccuuggggcugaugcagu

SEQ ID NO: 3424730 - RNA, 19 nt, Human
agccuugguguccaccugg

SEQ ID NO: 3424731 - RNA, 22 nt, Human
agccuugguguccaccuggccc

SEQ ID NO: 3424732 - RNA, 18 nt, Human
agccuuguaauucuaaau

SEQ ID NO: 3424733 - RNA, 21 nt, Human
agccuugugaugucauacaga

SEQ ID NO: 3424734 - RNA, 21 nt, Human
agccuugugggugugagcagc

SEQ ID NO: 3424735 - RNA, 19 nt, Human
agccuuguguauauuugua

SEQ ID NO: 3424736 - RNA, 17 nt, Human
agccuugugucuacaga

SEQ ID NO: 3424737 - RNA, 23 nt, Human
agccuugugucuacagagaaccu

SEQ ID NO: 3424738 - RNA, 14 nt, Human
agccuuuaaugcau

SEQ ID NO: 3424739 - RNA, 16 nt, Human
agccuuuaccugugaa

SEQ ID NO: 3424740 - RNA, 18 nt, Human
agccuuuaccugugaagu

SEQ ID NO: 3424741 - RNA, 19 nt, Human
agccuuuaccuuuuaugca

SEQ ID NO: 3424742 - RNA, 22 nt, Human
agccuuuacugacccuggggcu

SEQ ID NO: 3424743 - RNA, 16 nt, Human
agccuuuacuguuuga

SEQ ID NO: 3424744 - RNA, 19 nt, Human
agccuuuacuguuugauau

SEQ ID NO: 3424745 - RNA, 18 nt, Human
agccuuuaguaucagugu

SEQ ID NO: 3424746 - RNA, 14 nt, Human
agccuuuccauaag

SEQ ID NO: 3424747 - RNA, 22 nt, Human
agccuuuccauaaggaauguag

SEQ ID NO: 3424748 - RNA, 19 nt, Human
agccuuucuuuucuuucuu

SEQ ID NO: 3424749 - RNA, 16 nt, Human
agccuuugccuccccg

SEQ ID NO: 3424750 - RNA, 18 nt, Human
agccuuuggcucuggaga

SEQ ID NO: 3424751 - RNA, 21 nt, Human
agccuuuggcucuggagacag

SEQ ID NO: 3424752 - RNA, 19 nt, Human
agccuuugguucuggccag

SEQ ID NO: 3424753 - RNA, 23 nt, Human
agccuuuguugaacuguuagaau

SEQ ID NO: 3424754 - RNA, 15 nt, Human
agccuuuuaacugug

SEQ ID NO: 3424755 - RNA, 18 nt, Human
agccuuuucccucuuugg

SEQ ID NO: 3424756 - RNA, 19 nt, Human
agccuuuuuaaaacacaug

SEQ ID NO: 3424757 - RNA, 20 nt, Human
agccuuuuuaaaacacaugu

SEQ ID NO: 3424758 - RNA, 21 nt, Human
agccuuuuuaaaacacauguu

SEQ ID NO: 3424759 - RNA, 19 nt, Human
agccuuuuuuccccagacu

SEQ ID NO: 3424760 - RNA, 12 nt, Human
agcgaaacuccg

SEQ ID NO: 3424761 - RNA, 22 nt, Human
agcgaacccuuuauuugaacaa

SEQ ID NO: 3424762 - RNA, 12 nt, Human
agcgaagggagu

SEQ ID NO: 3424763 - RNA, 20 nt, Human
agcgaaugcuaggucucgga

SEQ ID NO: 3424764 - RNA, 16 nt, Human
agcgaauuuuaaaaga

SEQ ID NO: 3424765 - RNA, 17 nt, Human
agcgacaacagauugga

SEQ ID NO: 3424766 - RNA, 13 nt, Human
agcgacagugaga

SEQ ID NO: 3424767 - RNA, 19 nt, Human
agcgacauagcccaucccu

SEQ ID NO: 3424768 - RNA, 20 nt, Human
agcgaccaccccugccucca

SEQ ID NO: 3424769 - RNA, 17 nt, Human
agcgaccgcccccuccu

SEQ ID NO: 3424770 - RNA, 19 nt, Human
agcgacuccguuggccacu

SEQ ID NO: 3424771 - RNA, 20 nt, Human
agcgacuccguuggccacuc

SEQ ID NO: 3424772 - RNA, 21 nt, Human
agcgacuccguuggccacucc

SEQ ID NO: 3424773 - RNA, 13 nt, Human
agcgagcccuggu

SEQ ID NO: 3424774 - RNA, 19 nt, Human
agcgagcgcccagcuccug

SEQ ID NO: 3424775 - RNA, 17 nt, Human
agcgauauacagaugaa

SEQ ID NO: 3424776 - RNA, 20 nt, Human
agcgauauacagaugaaaau

SEQ ID NO: 3424777 - RNA, 13 nt, Human
agcgaucucuccu

SEQ ID NO: 3424778 - RNA, 18 nt, Human
agcgaugaauuuggagac

SEQ ID NO: 3424779 - RNA, 23 nt, Human
agcgauuauuaucuaaagugugu

SEQ ID NO: 3424780 - RNA, 20 nt, Human
agcgauucccucucccaggc

SEQ ID NO: 3424781 - RNA, 22 nt, Human
agcgauucccucucccaggccc

SEQ ID NO: 3424782 - RNA, 23 nt, Human
agcgauucccucucccaggcccc

SEQ ID NO: 3424783 - RNA, 14 nt, Human
agcgauucuccugc

SEQ ID NO: 3424784 - RNA, 19 nt, Human
agcgauucucuugccucag

SEQ ID NO: 3424785 - RNA, 15 nt, Human
agcgauucuucugcu

SEQ ID NO: 3424786 - RNA, 19 nt, Human
agcgauucuucugcuucag

SEQ ID NO: 3424787 - RNA, 13 nt, Human
agcgcacagcugc

SEQ ID NO: 3424788 - RNA, 18 nt, Human
agcgcaccugcccccugg

SEQ ID NO: 3424789 - RNA, 21 nt, Human
agcgccaagcaaccugggucc

SEQ ID NO: 3424790 - RNA, 15 nt, Human
agcgccaagugcgug

SEQ ID NO: 3424791 - RNA, 13 nt, Human
agcgccagccuca

SEQ ID NO: 3424792 - RNA, 18 nt, Human
agcgccagccugucccau

SEQ ID NO: 3424793 - RNA, 20 nt, Human
agcgcccacuagacccacug

SEQ ID NO: 3424794 - RNA, 14 nt, Human
agcgcccaguuggg

SEQ ID NO: 3424795 - RNA, 14 nt, Human
agcgcccgcugggc

SEQ ID NO: 3424796 - RNA, 15 nt, Human
agcgcccgcugggcu

SEQ ID NO: 3424797 - RNA, 12 nt, Human
agcgcccugcag

SEQ ID NO: 3424798 - RNA, 19 nt, Human
agcgcccugcagacccugc

SEQ ID NO: 3424799 - RNA, 20 nt, Human
agcgcccugcagacccugcc

SEQ ID NO: 3424800 - RNA, 18 nt, Human
agcgcccuggcccccaca

SEQ ID NO: 3424801 - RNA, 15 nt, Human
agcgcccuuccucuc

SEQ ID NO: 3424802 - RNA, 19 nt, Human
agcgccgugaguucucagg

SEQ ID NO: 3424803 - RNA, 20 nt, Human
agcgccgugaguucucaggg

SEQ ID NO: 3424804 - RNA, 21 nt, Human
agcgccgugaguucucagggc

SEQ ID NO: 3424805 - RNA, 21 nt, Human
agcgccuaguggggucucccu

SEQ ID NO: 3424806 - RNA, 23 nt, Human
agcgccuaguggggucucccucu

SEQ ID NO: 3424807 - RNA, 18 nt, Human
agcgccuccauccaaggc

SEQ ID NO: 3424808 - RNA, 19 nt, Human
agcgccucccuccacccca

SEQ ID NO: 3424809 - RNA, 18 nt, Human
agcgccugccccucccag

SEQ ID NO: 3424810 - RNA, 13 nt, Human
agcgccuggccua

SEQ ID NO: 3424811 - RNA, 15 nt, Human
agcgccugugcacac

SEQ ID NO: 3424812 - RNA, 16 nt, Human
agcgccugugcacaca

SEQ ID NO: 3424813 - RNA, 17 nt, Human
agcgccugugcacacac

SEQ ID NO: 3424814 - RNA, 17 nt, Human
agcgccuuucccaacuc

SEQ ID NO: 3424815 - RNA, 20 nt, Human
agcgccuuucccaacucuag

SEQ ID NO: 3424816 - RNA, 22 nt, Human
agcgcgccacucgcuuccccca

SEQ ID NO: 3424817 - RNA, 17 nt, Human
agcgcggacgugcuggg

SEQ ID NO: 3424818 - RNA, 15 nt, Human
agcgcguugccuguc

SEQ ID NO: 3424819 - RNA, 19 nt, Human
agcgcuagaggaagcagcc

SEQ ID NO: 3424820 - RNA, 18 nt, Human
agcgcuaucuucacauag

SEQ ID NO: 3424821 - RNA, 11 nt, Human
agcgcucccuu

SEQ ID NO: 3424822 - RNA, 22 nt, Human
agcgcugacgugucaggaaaac

SEQ ID NO: 3424823 - RNA, 18 nt, Human
agcgcugccgcaccccag

SEQ ID NO: 3424824 - RNA, 20 nt, Human
agcgcugccgcaccccagag

SEQ ID NO: 3424825 - RNA, 21 nt, Human
agcgcugccgcaccccagagu

SEQ ID NO: 3424826 - RNA, 22 nt, Human
agcgcuggccgggaccccgagc

SEQ ID NO: 3424827 - RNA, 13 nt, Human
agcggaaagcagc

SEQ ID NO: 3424828 - RNA, 15 nt, Human
agcggacaguggcag

SEQ ID NO: 3424829 - RNA, 19 nt, Human
agcgaguggagucugccac

SEQ ID NO: 3424830 - RNA, 19 nt, Human
agcgaucucuccacugugc

SEQ ID NO: 3424831 - RNA, 18 nt, Human
agcgauggucucagaaac

SEQ ID NO: 3424832 - RNA, 16 nt, Human
agcgauguaugcagcu

SEQ ID NO: 3424833 - RNA, 19 nt, Human
agcgauucccucucccagg

SEQ ID NO: 3424834 - RNA, 14 nt, Human
agcgcacagcugcu

SEQ ID NO: 3424835 - RNA, 17 nt, Human
agcgcaccugcccccug

SEQ ID NO: 3424836 - RNA, 19 nt, Human
agcgcaccugcccccuggu

SEQ ID NO: 3424837 - RNA, 21 nt, Human
agcgcaccugcccccuggugg

SEQ ID NO: 3424838 - RNA, 14 nt, Human
agcgcacucuucau

SEQ ID NO: 3424839 - RNA, 11 nt, Human
agcgcagcccg

SEQ ID NO: 3424840 - RNA, 19 nt, Human
agcgcagguuuaguuuacu

SEQ ID NO: 3424841 - RNA, 18 nt, Human
agcgccaagcaaccuggg

SEQ ID NO: 3424842 - RNA, 20 nt, Human
agcgccaagugcgugccgug

SEQ ID NO: 3424843 - RNA, 21 nt, Human
agcgccaggcugaccacagca

SEQ ID NO: 3424844 - RNA, 22 nt, Human
agcgcccaaaggacgcacugag

SEQ ID NO: 3424845 - RNA, 11 nt, Human
agcgccccucc

SEQ ID NO: 3424846 - RNA, 15 nt, Human
agcgccccucccuag

SEQ ID NO: 3424847 - RNA, 16 nt, Human
agcgcccgcugggcug

SEQ ID NO: 3424848 - RNA, 14 nt, Human
agcgcccugcagac

SEQ ID NO: 3424849 - RNA, 16 nt, Human
agcgcccugcagaccc

SEQ ID NO: 3424850 - RNA, 17 nt, Human
agcgcccugcagacccu

SEQ ID NO: 3424851 - RNA, 20 nt, Human
agcgcccuggcccccacaug

SEQ ID NO: 3424852 - RNA, 12 nt, Human
agcgcccuuccu

SEQ ID NO: 3424853 - RNA, 13 nt, Human
agcgcccuuccuc

SEQ ID NO: 3424854 - RNA, 16 nt, Human
agcgcccuuccucucc

SEQ ID NO: 3424855 - RNA, 24 nt, Human
agcgccgugaguucucagggcucc

SEQ ID NO: 3424856 - RNA, 18 nt, Human
agcgccuccaacccuagc

SEQ ID NO: 3424857 - RNA, 19 nt, Human
agcgccuccaacccuagca

SEQ ID NO: 3424858 - RNA, 22 nt, Human
agcgccuccaacccuagcaaaa

SEQ ID NO: 3424859 - RNA, 23 nt, Human
agcgccuccaacccuagcaaaag

SEQ ID NO: 3424860 - RNA, 20 nt, Human
agcgccuccauccaaggcca

SEQ ID NO: 3424861 - RNA, 15 nt, Human
agcgccucccuccac

SEQ ID NO: 3424862 - RNA, 20 nt, Human
agcgccucccuccaccccag

SEQ ID NO: 3424863 - RNA, 19 nt, Human
agcgccugccccucccaga

SEQ ID NO: 3424864 - RNA, 12 nt, Human
agcgcgccacuc

SEQ ID NO: 3424865 - RNA, 19 nt, Human
agcgcgccacucgcuuccc

SEQ ID NO: 3424866 - RNA, 15 nt, Human
agcgcggcccucccg

SEQ ID NO: 3424867 - RNA, 20 nt, Human
agcgcuagaggaagcagcca

SEQ ID NO: 3424868 - RNA, 18 nt, Human
agcgcuaucucccugccu

SEQ ID NO: 3424869 - RNA, 22 nt, Human
agcgcucagaacaguaucuuug

SEQ ID NO: 3424870 - RNA, 20 nt, Human
agcgcuccugccgcagagcu

SEQ ID NO: 3424871 - RNA, 14 nt, Human
agcgcucuggugcu

SEQ ID NO: 3424872 - RNA, 23 nt, Human
agcgcuugggcgccgugcugggc

SEQ ID NO: 3424873 - RNA, 16 nt, Human
agcgcuuucuggaaaa

SEQ ID NO: 3424874 - RNA, 14 nt, Human
agcggaaagcagcu

SEQ ID NO: 3424875 - RNA, 17 nt, Human
agcggaaagcagcucaa

SEQ ID NO: 3424876 - RNA, 17 nt, Human
agcggacaguggcagga

SEQ ID NO: 3424877 - RNA, 20 nt, Human
agcggacaguggcaggacag

SEQ ID NO: 3424878 - RNA, 20 nt, Human
agcggagaaaggaagggcug

SEQ ID NO: 3424879 - RNA, 18 nt, Human
agcggagacggaguccca

SEQ ID NO: 3424880 - RNA, 17 nt, Human
agcggagucuguccugu

SEQ ID NO: 3424881 - RNA, 18 nt, Human
agcggaugauucuucaag

SEQ ID NO: 3424882 - RNA, 16 nt, Human
agcggauugcaaagca

SEQ ID NO: 3424883 - RNA, 15 nt, Human
agcggcaucaggcuu

SEQ ID NO: 3424884 - RNA, 14 nt, Human
agcggccccuccca

SEQ ID NO: 3424885 - RNA, 19 nt, Human
agaaaguugcacggcugcu

SEQ ID NO: 3424886 - RNA, 20 nt, Human
agaaaguugcacggcugcug

SEQ ID NO: 3424887 - RNA, 20 nt, Human
agaaaguuuccccaccagug

SEQ ID NO: 3424888 - RNA, 13 nt, Human
agaaauaaaagug

SEQ ID NO: 3424889 - RNA, 14 nt, Human
agaaauaaaccuua

SEQ ID NO: 3424890 - RNA, 18 nt, Human
agaaauaaaguuugcuua

SEQ ID NO: 3424891 - RNA, 15 nt, Human
agaaauaaauagcua

SEQ ID NO: 3424892 - RNA, 21 nt, Human
agaaauaagugguuauuucuc

SEQ ID NO: 3424893 - RNA, 13 nt, Human
agaaauaauaaua

SEQ ID NO: 3424894 - RNA, 16 nt, Human
agaaauaauagaaaug

SEQ ID NO: 3424895 - RNA, 20 nt, Human
agaaauaaugcuacaauuuu

SEQ ID NO: 3424896 - RNA, 18 nt, Human
agaaauaccaaaauuauu

SEQ ID NO: 3424897 - RNA, 16 nt, Human
agaaauacuguacaau

SEQ ID NO: 3424898 - RNA, 18 nt, Human
agaaauagacaguauauu

SEQ ID NO: 3424899 - RNA, 18 nt, Human
agaaauauaauaaaaugu

SEQ ID NO: 3424900 - RNA, 15 nt, Human
agaaauauauauaca

SEQ ID NO: 3424901 - RNA, 18 nt, Human
agaaauauauauacauau

SEQ ID NO: 3424902 - RNA, 19 nt, Human
agaaauauauauacauaug

SEQ ID NO: 3424903 - RNA, 15 nt, Human
agaaauaucugugaa

SEQ ID NO: 3424904 - RNA, 17 nt, Human
agaaauaucugugaaau

SEQ ID NO: 3424905 - RNA, 13 nt, Human
agaaauaucuuca

SEQ ID NO: 3424906 - RNA, 16 nt, Human
agaaauaugauuuuau

SEQ ID NO: 3424907 - RNA, 16 nt, Human
agaaauauggaacuua

SEQ ID NO: 3424908 - RNA, 22 nt, Human
agaaauauggaacuuacauugu

SEQ ID NO: 3424909 - RNA, 15 nt, Human
agaaauaugugagau

SEQ ID NO: 3424910 - RNA, 19 nt, Human
agaaauauuuuaaaaucag

SEQ ID NO: 3424911 - RNA, 14 nt, Human
agaaaucauagcug

SEQ ID NO: 3424912 - RNA, 16 nt, Human
agaaaucauguccaua

SEQ ID NO: 3424913 - RNA, 13 nt, Human
agaaaucauguua

SEQ ID NO: 3424914 - RNA, 18 nt, Human
agaaaucauguuaugaua

SEQ ID NO: 3424915 - RNA, 21 nt, Human
agaaauccauaucuuaaagaa

SEQ ID NO: 3424916 - RNA, 21 nt, Human
agaaaucccccuuucucuaau

SEQ ID NO: 3424917 - RNA, 19 nt, Human
agaaaucccuguuuaauau

SEQ ID NO: 3424918 - RNA, 18 nt, Human
agaaauccugcaaugaaa

SEQ ID NO: 3424919 - RNA, 15 nt, Human
agaaaucuaaaaaac

SEQ ID NO: 3424920 - RNA, 15 nt, Human
agaaaucuaagcugu

SEQ ID NO: 3424921 - RNA, 17 nt, Human
agaaaucuggcuucugg

SEQ ID NO: 3424922 - RNA, 22 nt, Human
agaaaucuggucuuguuagaaa

SEQ ID NO: 3424923 - RNA, 12 nt, Human
agaaaugaaaaa

SEQ ID NO: 3424924 - RNA, 13 nt, Human
agaaaugaaaaaa

SEQ ID NO: 3424925 - RNA, 23 nt, Human
agaaaugaaaaaauauauaucaa

SEQ ID NO: 3424926 - RNA, 13 nt, Human
agaaaugaaauuu

SEQ ID NO: 3424927 - RNA, 14 nt, Human
agaaaugcaaaaau

SEQ ID NO: 3424928 - RNA, 13 nt, Human
agaaaugcacaau

SEQ ID NO: 3424929 - RNA, 23 nt, Human
agaaaugcauaugucacuagaau

SEQ ID NO: 3424930 - RNA, 15 nt, Human
agaaaugcauauugu

SEQ ID NO: 3424931 - RNA, 15 nt, Human
agaaaugcugcccau

SEQ ID NO: 3424932 - RNA, 14 nt, Human
agaaaugcugccug

SEQ ID NO: 3424933 - RNA, 23 nt, Human
agaaaugcugccugccugucugu

SEQ ID NO: 3424934 - RNA, 17 nt, Human
agaaaugcugcuggcca

SEQ ID NO: 3424935 - RNA, 23 nt, Human
agaaaugggaaaugccuaagaag

SEQ ID NO: 3424936 - RNA, 18 nt, Human
agaaaugguuguauuaga

SEQ ID NO: 3424937 - RNA, 19 nt, Human
agaaaugguuguauuagau

SEQ ID NO: 3424938 - RNA, 23 nt, Human
agaaaugguuguauuagauguuc

SEQ ID NO: 3424939 - RNA, 21 nt, Human
agaaauguaaugcgauuuuau

SEQ ID NO: 3424940 - RNA, 22 nt, Human
agaaauguaaugcgauuuuauu

SEQ ID NO: 3424941 - RNA, 15 nt, Human
agaaauguacagcaa

SEQ ID NO: 3424942 - RNA, 16 nt, Human
agaaaugucuuaauuu

SEQ ID NO: 3424943 - RNA, 13 nt, Human
agaaauuaacuua

SEQ ID NO: 3424944 - RNA, 13 nt, Human
agaaauuaaguau

SEQ ID NO: 3424945 - RNA, 18 nt, Human
agaaauuaccuguggaua

SEQ ID NO: 3424946 - RNA, 12 nt, Human
agaaauuagaaa

SEQ ID NO: 3424947 - RNA, 14 nt, Human
agaaauuagccggg

SEQ ID NO: 3424948 - RNA, 22 nt, Human
agaaauuagggcucuaauuucc

SEQ ID NO: 3424949 - RNA, 22 nt, Human
agaaauuaugugccagauuuau

SEQ ID NO: 3424950 - RNA, 23 nt, Human
agaaauucccuggaccagaugcu

SEQ ID NO: 3424951 - RNA, 19 nt, Human
agaaauuccuguagcaucu

SEQ ID NO: 3424952 - RNA, 23 nt, Human
agaaauucguguguuuuuuuaug

SEQ ID NO: 3424953 - RNA, 21 nt, Human
agaaauucuguuaaaaucuau

SEQ ID NO: 3424954 - RNA, 18 nt, Human
agaaauugguaccuugca

SEQ ID NO: 3424955 - RNA, 19 nt, Human
agaaauugguaccuugcac

SEQ ID NO: 3424956 - RNA, 14 nt, Human
agaaauuguauauu

SEQ ID NO: 3424957 - RNA, 21 nt, Human
agaaauuguauauuguaauuu

SEQ ID NO: 3424958 - RNA, 13 nt, Human
agaaauuuaaacu

SEQ ID NO: 3424959 - RNA, 16 nt, Human
agaaauuuaaacuaua

SEQ ID NO: 3424960 - RNA, 17 nt, Human
agaaauuuaauucagaa

SEQ ID NO: 3424961 - RNA, 21 nt, Human
agaaauuuaauucauguuucu

SEQ ID NO: 3424962 - RNA, 13 nt, Human
agaaauuuacuau

SEQ ID NO: 3424963 - RNA, 16 nt, Human
agaaauuuauaaacuu

SEQ ID NO: 3424964 - RNA, 23 nt, Human
agaaauuuauuuccuaguucugu

SEQ ID NO: 3424965 - RNA, 19 nt, Human
agaaauuucagguuguugg

SEQ ID NO: 3424966 - RNA, 17 nt, Human
agaaauuucugugaaac

SEQ ID NO: 3424967 - RNA, 15 nt, Human
agaaauuugauuucu

SEQ ID NO: 3424968 - RNA, 22 nt, Human
agaaauuuuacaauaggugcuu

SEQ ID NO: 3424969 - RNA, 13 nt, Human
agaaauuuucaag

SEQ ID NO: 3424970 - RNA, 17 nt, Human
agaaauuuuucagaugc

SEQ ID NO: 3424971 - RNA, 18 nt, Human
agaaauuuuucagaugcu

SEQ ID NO: 3424972 - RNA, 13 nt, Human
agaacaaagcugu

SEQ ID NO: 3424973 - RNA, 18 nt, Human
agcuacagugcauaguug

SEQ ID NO: 3424974 - RNA, 15 nt, Human
agcuacauaauuuag

SEQ ID NO: 3424975 - RNA, 16 nt, Human
agcuacaucuacuuaa

SEQ ID NO: 3424976 - RNA, 17 nt, Human
agcuacccacuauccuu

SEQ ID NO: 3424977 - RNA, 15 nt, Human
agcuacccuuuuccu

SEQ ID NO: 3424978 - RNA, 16 nt, Human
agcuaccucaaacuuc

SEQ ID NO: 3424979 - RNA, 19 nt, Human
agcuaccuguguggacagg

SEQ ID NO: 3424980 - RNA, 21 nt, Human
agcuacucaagaggcugaggc

SEQ ID NO: 3424981 - RNA, 15 nt, Human
agcuacucagaagcc

SEQ ID NO: 3424982 - RNA, 19 nt, Human
agcuacucagaagccugag

SEQ ID NO: 3424983 - RNA, 21 nt, Human
agcuacucagaagccugaggc

SEQ ID NO: 3424984 - RNA, 18 nt, Human
agcuacucaggaggcuga

SEQ ID NO: 3424985 - RNA, 23 nt, Human
agcuacucgggaggcugaggcac

SEQ ID NO: 3424986 - RNA, 23 nt, Human
agcuacucuccccacgagggcug

SEQ ID NO: 3424987 - RNA, 20 nt, Human
agcuacugauuuccuuugga

SEQ ID NO: 3424988 - RNA, 16 nt, Human
agcuacugccauccug

SEQ ID NO: 3424989 - RNA, 19 nt, Human
agcuacugcggaaaaggaa

SEQ ID NO: 3424990 - RNA, 17 nt, Human
agcuacuuaagagaaau

SEQ ID NO: 3424991 - RNA, 22 nt, Human
agcuacuugggaagcugaggcg

SEQ ID NO: 3424992 - RNA, 17 nt, Human
agcuacuugggaggcug

SEQ ID NO: 3424993 - RNA, 21 nt, Human
agcuacuugggaggcugaggc

SEQ ID NO: 3424994 - RNA, 13 nt, Human
agcuacuugggcc

SEQ ID NO: 3424995 - RNA, 19 nt, Human
agcuacuugggccauagcu

SEQ ID NO: 3424996 - RNA, 11 nt, Human
agcuagaaaug

SEQ ID NO: 3424997 - RNA, 12 nt, Human
agcuagaaauga

SEQ ID NO: 3424998 - RNA, 15 nt, Human
agcuagaaccuggag

SEQ ID NO: 3424999 - RNA, 18 nt, Human
agcuagaaccuggagagc

SEQ ID NO: 3425000 - RNA, 16 nt, Human
agcuagaaccuggagg

SEQ ID NO: 3425001 - RNA, 15 nt, Human
agcuagaaggccaca

SEQ ID NO: 3425002 - RNA, 22 nt, Human
agcuagaagugggccaggacag

SEQ ID NO: 3425003 - RNA, 20 nt, Human
agcuagaauugaguguuuaa

SEQ ID NO: 3425004 - RNA, 13 nt, Human
agcuagaauuuga

SEQ ID NO: 3425005 - RNA, 15 nt, Human
agcuagacacaugaa

SEQ ID NO: 3425006 - RNA, 13 nt, Human
agcuagacuggug

SEQ ID NO: 3425007 - RNA, 20 nt, Human
agcuagcaaaagaaguaaca

SEQ ID NO: 3425008 - RNA, 23 nt, Human
agcuagcaaaagaaguaacaaga

SEQ ID NO: 3425009 - RNA, 14 nt, Human
agcuagcgcugccg

SEQ ID NO: 3425010 - RNA, 16 nt, Human
agcuagcgcugccgca

SEQ ID NO: 3425011 - RNA, 20 nt, Human
agcuagcgcugccgcacccc

SEQ ID NO: 3425012 - RNA, 15 nt, Human
agcuagcuccccucc

SEQ ID NO: 3425013 - RNA, 21 nt, Human
agcuagcuccccuccucuccc

SEQ ID NO: 3425014 - RNA, 15 nt, Human
agcuagcuuuuagga

SEQ ID NO: 3425015 - RNA, 17 nt, Human
agcuaggaaaagaaauc

SEQ ID NO: 3425016 - RNA, 16 nt, Human
agcuaggaacaaaucu

SEQ ID NO: 3425017 - RNA, 17 nt, Human
agcuaggagcaaagccu

SEQ ID NO: 3425018 - RNA, 21 nt, Human
agcuaggagcaaagccuguuc

SEQ ID NO: 3425019 - RNA, 20 nt, Human
agcuaggugacauauacaua

SEQ ID NO: 3425020 - RNA, 19 nt, Human
agcuagucuuuugcuuuug

SEQ ID NO: 3425021 - RNA, 19 nt, Human
agcuaguguaccuccucuc

SEQ ID NO: 3425022 - RNA, 18 nt, Human
agcuaguucguagcuuuc

SEQ ID NO: 3425023 - RNA, 15 nt, Human
agcuaguugaauacu

SEQ ID NO: 3425024 - RNA, 22 nt, Human
agcuaguugaauacuugaacca

SEQ ID NO: 3425025 - RNA, 12 nt, Human
agcuaguuuucu

SEQ ID NO: 3425026 - RNA, 18 nt, Human
agcuauaaaaugaauaca

SEQ ID NO: 3425027 - RNA, 16 nt, Human
agcuauaaauuauauu

SEQ ID NO: 3425028 - RNA, 18 nt, Human
agcuauaauuauuauuca

SEQ ID NO: 3425029 - RNA, 19 nt, Human
agcuauacaguuuuccuaa

SEQ ID NO: 3425030 - RNA, 15 nt, Human
agcuauaccugugcc

SEQ ID NO: 3425031 - RNA, 13 nt, Human
agcuauaggaaau

SEQ ID NO: 3425032 - RNA, 17 nt, Human
agcuauauaagacaaga

SEQ ID NO: 3425033 - RNA, 15 nt, Human
agcuauauccaugua

SEQ ID NO: 3425034 - RNA, 15 nt, Human
agcuauaucuauaua

SEQ ID NO: 3425035 - RNA, 22 nt, Human
agcuauauuuaaguauucaaga

SEQ ID NO: 3425036 - RNA, 14 nt, Human
agcuaucaggaaca

SEQ ID NO: 3425037 - RNA, 18 nt, Human
agcuaucaguaggcuaau

SEQ ID NO: 3425038 - RNA, 20 nt, Human
agcuaucauugcuuccuccu

SEQ ID NO: 3425039 - RNA, 16 nt, Human
agcuauccuggcucuu

SEQ ID NO: 3425040 - RNA, 18 nt, Human
agcuaucuaaaguuuguu

SEQ ID NO: 3425041 - RNA, 15 nt, Human
agcuaucuaggugga

SEQ ID NO: 3425042 - RNA, 18 nt, Human
agcuaucuagguggaguu

SEQ ID NO: 3425043 - RNA, 22 nt, Human
agcuaucuggucaaccuccugg

SEQ ID NO: 3425044 - RNA, 19 nt, Human
agaacccagcccacccccg

SEQ ID NO: 3425045 - RNA, 13 nt, Human
agaacccagggcu

SEQ ID NO: 3425046 - RNA, 18 nt, Human
agaacccagggcucugcc

SEQ ID NO: 3425047 - RNA, 20 nt, Human
agaacccagggcucugcccc

SEQ ID NO: 3425048 - RNA, 21 nt, Human
agaacccagggcucugcccca

SEQ ID NO: 3425049 - RNA, 22 nt, Human
agaaccccuggcuccaggccag

SEQ ID NO: 3425050 - RNA, 18 nt, Human
agaaccgagcaaagauca

SEQ ID NO: 3425051 - RNA, 20 nt, Human
agaaccgagcaaagaucaaa

SEQ ID NO: 3425052 - RNA, 19 nt, Human
agaaccguagaugauuuca

SEQ ID NO: 3425053 - RNA, 16 nt, Human
agaaccuaacuguauc

SEQ ID NO: 3425054 - RNA, 20 nt, Human
agaaccuaacuguaucuuga

SEQ ID NO: 3425055 - RNA, 21 nt, Human
agaaccuaacuguaucuugag

SEQ ID NO: 3425056 - RNA, 19 nt, Human
agaaccuaauucaauucaa

SEQ ID NO: 3425057 - RNA, 16 nt, Human
agaaccuagaagggcu

SEQ ID NO: 3425058 - RNA, 14 nt, Human
agaaccucuucccc

SEQ ID NO: 3425059 - RNA, 12 nt, Human
agaaccuggagg

SEQ ID NO: 3425060 - RNA, 17 nt, Human
agaaccuggagggcugg

SEQ ID NO: 3425061 - RNA, 17 nt, Human
agaaccuggaguuccug

SEQ ID NO: 3425062 - RNA, 12 nt, Human
agaaccuggccu

SEQ ID NO: 3425063 - RNA, 21 nt, Human
agaaccuggguugcagacagg

SEQ ID NO: 3425064 - RNA, 17 nt, Human
agaaccuguagagcuag

SEQ ID NO: 3425065 - RNA, 13 nt, Human
agaaccuguccuu

SEQ ID NO: 3425066 - RNA, 14 nt, Human
agaaccuguccuug

SEQ ID NO: 3425067 - RNA, 12 nt, Human
agaaccuucucu

SEQ ID NO: 3425068 - RNA, 17 nt, Human
agaaccuugugccuggc

SEQ ID NO: 3425069 - RNA, 22 nt, Human
agaacgcagcccuagagccugc

SEQ ID NO: 3425070 - RNA, 21 nt, Human
agaacggagccccaggccucu

SEQ ID NO: 3425071 - RNA, 17 nt, Human
agaacggggcucuucuc

SEQ ID NO: 3425072 - RNA, 20 nt, Human
agaacggggcucuucucauu

SEQ ID NO: 3425073 - RNA, 22 nt, Human
agaacguauugguccagcuugc

SEQ ID NO: 3425074 - RNA, 18 nt, Human
agaacguggcucugcugg

SEQ ID NO: 3425075 - RNA, 19 nt, Human
agaacguggcucugcuggc

SEQ ID NO: 3425076 - RNA, 13 nt, Human
agaacguggucag

SEQ ID NO: 3425077 - RNA, 12 nt, Human
agaacuaaacuc

SEQ ID NO: 3425078 - RNA, 20 nt, Human
agaacuaaagguggccacaa

SEQ ID NO: 3425079 - RNA, 12 nt, Human
agaacuaaaugu

SEQ ID NO: 3425080 - RNA, 15 nt, Human
agaacuaaauguucu

SEQ ID NO: 3425081 - RNA, 20 nt, Human
agaacuaccuggauuuguau

SEQ ID NO: 3425082 - RNA, 17 nt, Human
agaacuagaauuugauu

SEQ ID NO: 3425083 - RNA, 20 nt, Human
agaacuagugguggcucuga

SEQ ID NO: 3425084 - RNA, 19 nt, Human
agaacuauaugugaauccu

SEQ ID NO: 3425085 - RNA, 13 nt, Human
agaacuaucuuca

SEQ ID NO: 3425086 - RNA, 23 nt, Human
agaacuauugugcucagagacac

SEQ ID NO: 3425087 - RNA, 20 nt, Human
agaacucaaacuucuggcuc

SEQ ID NO: 3425088 - RNA, 19 nt, Human
agaacucaaauggggccag

SEQ ID NO: 3425089 - RNA, 20 nt, Human
agaacucaaauggggccaga

SEQ ID NO: 3425090 - RNA, 19 nt, Human
agaacucacucugggcugu

SEQ ID NO: 3425091 - RNA, 20 nt, Human
agaacucacucugggcugua

SEQ ID NO: 3425092 - RNA, 15 nt, Human
agaacucaucacugu

SEQ ID NO: 3425093 - RNA, 15 nt, Human
agaacucaugugauu

SEQ ID NO: 3425094 - RNA, 18 nt, Human
agaacucaugugauuuac

SEQ ID NO: 3425095 - RNA, 16 nt, Human
agaacucccuuucaac

SEQ ID NO: 3425096 - RNA, 14 nt, Human
agaacuccuagggu

SEQ ID NO: 3425097 - RNA, 11 nt, Human
agaacuccuga

SEQ ID NO: 3425098 - RNA, 20 nt, Human
agaacucgcgcucaguaaac

SEQ ID NO: 3425099 - RNA, 18 nt, Human
agaacucgguguccccac

SEQ ID NO: 3425100 - RNA, 19 nt, Human
agaacucgguguccccacc

SEQ ID NO: 3425101 - RNA, 13 nt, Human
agaacucucugga

SEQ ID NO: 3425102 - RNA, 16 nt, Human
agaacucucuggaagc

SEQ ID NO: 3425103 - RNA, 21 nt, Human
agaacucucuggaagccccug

SEQ ID NO: 3425104 - RNA, 14 nt, Human
agaacucugggcug

SEQ ID NO: 3425105 - RNA, 13 nt, Human
agaacugaaaaca

SEQ ID NO: 3425106 - RNA, 19 nt, Human
agaacugaaaacauaaaaa

SEQ ID NO: 3425107 - RNA, 21 nt, Human
agaacugaaaacauaaaaagu

SEQ ID NO: 3425108 - RNA, 13 nt, Human
agaacugaaaaga

SEQ ID NO: 3425109 - RNA, 17 nt, Human
agaacugaaaagagagc

SEQ ID NO: 3425110 - RNA, 16 nt, Human
agaacugaaaggcuuu

SEQ ID NO: 3425111 - RNA, 21 nt, Human
agaacugaauuuugucuuuau

SEQ ID NO: 3425112 - RNA, 12 nt, Human
agaacugagcuc

SEQ ID NO: 3425113 - RNA, 17 nt, Human
agaacugaugacacuga

SEQ ID NO: 3425114 - RNA, 17 nt, Human
agaacugcacaugaaga

SEQ ID NO: 3425115 - RNA, 19 nt, Human
agaacugcacaugaagaaa

SEQ ID NO: 3425116 - RNA, 20 nt, Human
agaacugcacaugaagaaau

SEQ ID NO: 3425117 - RNA, 12 nt, Human
agaacugcaggc

SEQ ID NO: 3425118 - RNA, 11 nt, Human
agaagcugcug

SEQ ID NO: 3425119 - RNA, 13 nt, Human
agaagcugcugac

SEQ ID NO: 3425120 - RNA, 23 nt, Human
agaagcuguuguacauuuaugau

SEQ ID NO: 3425121 - RNA, 12 nt, Human
agaagcuucuaa

SEQ ID NO: 3425122 - RNA, 22 nt, Human
agaagcuucuaauaaauuauac

SEQ ID NO: 3425123 - RNA, 22 nt, Human
agaagcuuuugaauaaaaacuu

SEQ ID NO: 3425124 - RNA, 17 nt, Human
agaaggaaaaaugugua

SEQ ID NO: 3425125 - RNA, 16 nt, Human
agaaggaaaaggcagg

SEQ ID NO: 3425126 - RNA, 15 nt, Human
agaaggaaagauggu

SEQ ID NO: 3425127 - RNA, 19 nt, Human
agaaggaaagaugguuaaa

SEQ ID NO: 3425128 - RNA, 22 nt, Human
agaaggaaggagacucaccucu

SEQ ID NO: 3425129 - RNA, 11 nt, Human
agaaggaaugu

SEQ ID NO: 3425130 - RNA, 14 nt, Human
agaaggaaugucuu

SEQ ID NO: 3425131 - RNA, 17 nt, Human
agaaggagacagagcug

SEQ ID NO: 3425132 - RNA, 22 nt, Human
agaaggaggagagggaaaaugu

SEQ ID NO: 3425133 - RNA, 23 nt, Human
agaaggaggagagggaaaauguu

SEQ ID NO: 3425134 - RNA, 16 nt, Human
agaaggaucuucaucu

SEQ ID NO: 3425135 - RNA, 21 nt, Human
agaaggaugaaugagguccca

SEQ ID NO: 3425136 - RNA, 16 nt, Human
agaaggauguacauuu

SEQ ID NO: 3425137 - RNA, 19 nt, Human
agaaggcaaaaauaguuug

SEQ ID NO: 3425138 - RNA, 14 nt, Human
agaaggccacaugu

SEQ ID NO: 3425139 - RNA, 12 nt, Human
agaaggcucuuc

SEQ ID NO: 3425140 - RNA, 12 nt, Human
agaagggaaaca

SEQ ID NO: 3425141 - RNA, 14 nt, Human
agaagggaaacagu

SEQ ID NO: 3425142 - RNA, 14 nt, Human
agaagggagaagaa

SEQ ID NO: 3425143 - RNA, 15 nt, Human
agaagggagaagaaa

SEQ ID NO: 3425144 - RNA, 16 nt, Human
agaagggagaagaaag

SEQ ID NO: 3425145 - RNA, 13 nt, Human
agaagggagaagg

SEQ ID NO: 3425146 - RNA, 14 nt, Human
agaagggagaagga

SEQ ID NO: 3425147 - RNA, 15 nt, Human
agaagggagggcaga

SEQ ID NO: 3425148 - RNA, 20 nt, Human
agaagggccaguccugccug

SEQ ID NO: 3425149 - RNA, 13 nt, Human
agaagggcuagaa

SEQ ID NO: 3425150 - RNA, 21 nt, Human
agaagggcuagaaccuggagg

SEQ ID NO: 3425151 - RNA, 15 nt, Human
agaagggcugcauga

SEQ ID NO: 3425152 - RNA, 16 nt, Human
agaagggcugcaugau

SEQ ID NO: 3425153 - RNA, 21 nt, Human
agaagggcugcuucccugaag

SEQ ID NO: 3425154 - RNA, 16 nt, Human
agaaggggaagcacuc

SEQ ID NO: 3425155 - RNA, 19 nt, Human
agaaggggacugccaccuc

SEQ ID NO: 3425156 - RNA, 20 nt, Human
agaaggggacugccaccucc

SEQ ID NO: 3425157 - RNA, 19 nt, Human
agaagggggucaaagcaag

SEQ ID NO: 3425158 - RNA, 21 nt, Human
agaagggggucaaagcaagga

SEQ ID NO: 3425159 - RNA, 20 nt, Human
agaaggggguggugucucca

SEQ ID NO: 3425160 - RNA, 16 nt, Human
agaaggguuauauuuu

SEQ ID NO: 3425161 - RNA, 19 nt, Human
agaaggguuauauuuuacu

SEQ ID NO: 3425162 - RNA, 23 nt, Human
agaagguauuaagauuauaauug

SEQ ID NO: 3425163 - RNA, 14 nt, Human
agaaggugggagga

SEQ ID NO: 3425164 - RNA, 20 nt, Human
agaagguggggguuggcugg

SEQ ID NO: 3425165 - RNA, 23 nt, Human
agaagguggggguuggcugggua

SEQ ID NO: 3425166 - RNA, 17 nt, Human
agaagguuuguguuuuu

SEQ ID NO: 3425167 - RNA, 19 nt, Human
agaagguuuguguuuuucu

SEQ ID NO: 3425168 - RNA, 20 nt, Human
agaagguuuguguuuuucug

SEQ ID NO: 3425169 - RNA, 22 nt, Human
agaaguaacuggugauauaucu

SEQ ID NO: 3425170 - RNA, 14 nt, Human
agaaguaacuuacu

SEQ ID NO: 3425171 - RNA, 16 nt, Human
agaaguaccagacuag

SEQ ID NO: 3425172 - RNA, 17 nt, Human
agaaguagaaaucauag

SEQ ID NO: 3425173 - RNA, 19 nt, Human
agaaguagauuaagagcca

SEQ ID NO: 3425174 - RNA, 16 nt, Human
agaaguagccacagua

SEQ ID NO: 3425175 - RNA, 18 nt, Human
agaaguaggggaagaaua

SEQ ID NO: 3425176 - RNA, 23 nt, Human
agaaguagugucuggaucaguaa

SEQ ID NO: 3425177 - RNA, 16 nt, Human
agaaguauaaagaauu

SEQ ID NO: 3425178 - RNA, 13 nt, Human
agaaguauacaua

SEQ ID NO: 3425179 - RNA, 14 nt, Human
agaaguauuuuuag

SEQ ID NO: 3425180 - RNA, 15 nt, Human
agaagucaacauccu

SEQ ID NO: 3425181 - RNA, 14 nt, Human
agaagucacagggc

SEQ ID NO: 3425182 - RNA, 19 nt, Human
agaagucacagggcaguac

SEQ ID NO: 3425183 - RNA, 21 nt, Human
agaagucacagggcaguaccu

SEQ ID NO: 3425184 - RNA, 20 nt, Human
agaagucacauuccugaaca

SEQ ID NO: 3425185 - RNA, 13 nt, Human
agaagucaugaag

SEQ ID NO: 3425186 - RNA, 22 nt, Human
agaaguccuguaugucugucau

SEQ ID NO: 3425187 - RNA, 15 nt, Human
agaaguccuuauguu

SEQ ID NO: 3425188 - RNA, 17 nt, Human
agaaguccuuauguuaa

SEQ ID NO: 3425189 - RNA, 14 nt, Human
agaagucucagcua

SEQ ID NO: 3425190 - RNA, 15 nt, Human
agaagucucuuccag

SEQ ID NO: 3425191 - RNA, 13 nt, Human
agaagucuucaug

SEQ ID NO: 3425192 - RNA, 18 nt, Human
agaagucuucaugaaaug

SEQ ID NO: 3425193 - RNA, 16 nt, Human
agaagugaaugcuggg

SEQ ID NO: 3425194 - RNA, 17 nt, Human
agaagugaaugcuggga

SEQ ID NO: 3425195 - RNA, 21 nt, Human
agaagugaaugcugggacuca

SEQ ID NO: 3425196 - RNA, 17 nt, Human
agaagugacagggaagc

SEQ ID NO: 3425197 - RNA, 23 nt, Human
agaagugacagggaagcuacagg

SEQ ID NO: 3425198 - RNA, 16 nt, Human
agaagugacauugcau

SEQ ID NO: 3425199 - RNA, 23 nt, Human
agaagugacgguuccuacacagg

SEQ ID NO: 3425200 - RNA, 18 nt, Human
agaagugagaauaggcag

SEQ ID NO: 3425201 - RNA, 14 nt, Human
agaagugagcaaaa

SEQ ID NO: 3425202 - RNA, 23 nt, Human
agaagugagcuuugcugcuacag

SEQ ID NO: 3425203 - RNA, 18 nt, Human
agcuaucuucauguaaau

SEQ ID NO: 3425204 - RNA, 20 nt, Human
agcuaucuucauguaaauug

SEQ ID NO: 3425205 - RNA, 17 nt, Human
agcuaugcaaaaagcua

SEQ ID NO: 3425206 - RNA, 15 nt, Human
agcuaugcuguaucu

SEQ ID NO: 3425207 - RNA, 20 nt, Human
agcuauggacagcauugcca

SEQ ID NO: 3425208 - RNA, 19 nt, Human
agcuaugggagccccaggg

SEQ ID NO: 3425209 - RNA, 20 nt, Human
agcuauggugagaugcagcu

SEQ ID NO: 3425210 - RNA, 17 nt, Human
agcuaugucaagaggcu

SEQ ID NO: 3425211 - RNA, 20 nt, Human
agcuaugucccaggaaucag

SEQ ID NO: 3425212 - RNA, 22 nt, Human
agcuauguuauauugaaaaaau

SEQ ID NO: 3425213 - RNA, 13 nt, Human
agcuauuaaaacu

SEQ ID NO: 3425214 - RNA, 14 nt, Human
agcuauuaaaacuc

SEQ ID NO: 3425215 - RNA, 19 nt, Human
agcuauucaguaauaacuc

SEQ ID NO: 3425216 - RNA, 21 nt, Human
agcuauucaguugguaagcuu

SEQ ID NO: 3425217 - RNA, 21 nt, Human
agcuauuccuuucccuuccuc

SEQ ID NO: 3425218 - RNA, 22 nt, Human
agcuauuccuuucccuuccucu

SEQ ID NO: 3425219 - RNA, 23 nt, Human
agcuauugauauaaauaaaacau

SEQ ID NO: 3425220 - RNA, 14 nt, Human
agcuauuucaucua

SEQ ID NO: 3425221 - RNA, 17 nt, Human
agcuauuugauguaaua

SEQ ID NO: 3425222 - RNA, 10 nt, Human
agcuauuuuu

SEQ ID NO: 3425223 - RNA, 16 nt, Human
agcuauuuuuacuaga

SEQ ID NO: 3425224 - RNA, 22 nt, Human
agcuauuuuuauuuguuugugc

SEQ ID NO: 3425225 - RNA, 13 nt, Human
agcuauuuuucua

SEQ ID NO: 3425226 - RNA, 14 nt, Human
agcuauuuuucuaa

SEQ ID NO: 3425227 - RNA, 20 nt, Human
agcuauuuuucuaacuacaa

SEQ ID NO: 3425228 - RNA, 20 nt, Human
agcucaaagguuuggaagga

SEQ ID NO: 3425229 - RNA, 16 nt, Human
agcucaaaugaaaugu

SEQ ID NO: 3425230 - RNA, 14 nt, Human
agcucaacucucuu

SEQ ID NO: 3425231 - RNA, 19 nt, Human
agcucaaggaaaggccuga

SEQ ID NO: 3425232 - RNA, 14 nt, Human
agcucaaugagcau

SEQ ID NO: 3425233 - RNA, 15 nt, Human
agcucaaugagcaug

SEQ ID NO: 3425234 - RNA, 23 nt, Human
agcucaaugagcauguuuagacu

SEQ ID NO: 3425235 - RNA, 13 nt, Human
agcucaaugcagu

SEQ ID NO: 3425236 - RNA, 14 nt, Human
agcucacaaggcag

SEQ ID NO: 3425237 - RNA, 18 nt, Human
agcucacaaggcagcaag

SEQ ID NO: 3425238 - RNA, 16 nt, Human
agcucacacaugagau

SEQ ID NO: 3425239 - RNA, 20 nt, Human
agcucacaguuccucgcccu

SEQ ID NO: 3425240 - RNA, 21 nt, Human
agcucacaguuccucgcccug

SEQ ID NO: 3425241 - RNA, 14 nt, Human
agcucaccagcccc

SEQ ID NO: 3425242 - RNA, 16 nt, Human
agcucaccagccccag

SEQ ID NO: 3425243 - RNA, 23 nt, Human
agcucaccagccccagugcccac

SEQ ID NO: 3425244 - RNA, 14 nt, Human
agcucaccccccac

SEQ ID NO: 3425245 - RNA, 17 nt, Human
agcucaccccccacacu

SEQ ID NO: 3425246 - RNA, 12 nt, Human
agcucaccucuc

SEQ ID NO: 3425247 - RNA, 18 nt, Human
agcucaccucucccuugg

SEQ ID NO: 3425248 - RNA, 17 nt, Human
agcucaccuguugcuua

SEQ ID NO: 3425249 - RNA, 21 nt, Human
agcucaccuguugcuuacaau

SEQ ID NO: 3425250 - RNA, 15 nt, Human
agcucacgcuucaca

SEQ ID NO: 3425251 - RNA, 16 nt, Human
agcucacgucacacuu

SEQ ID NO: 3425252 - RNA, 20 nt, Human
agcucacguccugagaaagc

SEQ ID NO: 3425253 - RNA, 13 nt, Human
agcucacuucugg

SEQ ID NO: 3425254 - RNA, 15 nt, Human
agcucagaacccagg

SEQ ID NO: 3425255 - RNA, 22 nt, Human
agcucagaauccaagugaacac

SEQ ID NO: 3425256 - RNA, 16 nt, Human
agcucagagagggcag

SEQ ID NO: 3425257 - RNA, 14 nt, Human
agcucagagagggu

SEQ ID NO: 3425258 - RNA, 17 nt, Human
agcucagcacugccugc

SEQ ID NO: 3425259 - RNA, 14 nt, Human
agcucagcccaccc

SEQ ID NO: 3425260 - RNA, 15 nt, Human
agcucagcccacccc

SEQ ID NO: 3425261 - RNA, 19 nt, Human
agcucagcccaccccccuc

SEQ ID NO: 3425262 - RNA, 22 nt, Human
agcucagcccaccccccucauu

SEQ ID NO: 3425263 - RNA, 12 nt, Human
agcuuccagcag

SEQ ID NO: 3425264 - RNA, 14 nt, Human
agcuuccaggaaaa

SEQ ID NO: 3425265 - RNA, 20 nt, Human
agcuucccccccaccacagg

SEQ ID NO: 3425266 - RNA, 16 nt, Human
agcuuccgagaauagc

SEQ ID NO: 3425267 - RNA, 20 nt, Human
agcuuccuguccccaucugu

SEQ ID NO: 3425268 - RNA, 22 nt, Human
agcuuccuuaaguauaucaugu

SEQ ID NO: 3425269 - RNA, 12 nt, Human
agcuuccuucag

SEQ ID NO: 3425270 - RNA, 13 nt, Human
agcuuccuucaga

SEQ ID NO: 3425271 - RNA, 15 nt, Human
agcuuccuucagaga

SEQ ID NO: 3425272 - RNA, 18 nt, Human
agcuuccuucagagagca

SEQ ID NO: 3425273 - RNA, 19 nt, Human
agcuuccuucagagagcag

SEQ ID NO: 3425274 - RNA, 14 nt, Human
agcuuccuuggcuu

SEQ ID NO: 3425275 - RNA, 23 nt, Human
agcuuccuuuguuuuuuuuuccu

SEQ ID NO: 3425276 - RNA, 17 nt, Human
agcuucuaucccaggag

SEQ ID NO: 3425277 - RNA, 17 nt, Human
agcuucuauuagccagu

SEQ ID NO: 3425278 - RNA, 19 nt, Human
agcuucucauccugcaggc

SEQ ID NO: 3425279 - RNA, 21 nt, Human
agcuucuccugugugauugac

SEQ ID NO: 3425280 - RNA, 13 nt, Human
agcuucucuguga

SEQ ID NO: 3425281 - RNA, 14 nt, Human
agcuucucugugaa

SEQ ID NO: 3425282 - RNA, 14 nt, Human
agcuucucuuuaac

SEQ ID NO: 3425283 - RNA, 18 nt, Human
agcuucucuuuaacucag

SEQ ID NO: 3425284 - RNA, 18 nt, Human
agcuucugaccucagcau

SEQ ID NO: 3425285 - RNA, 17 nt, Human
agcuucugccacauaaa

SEQ ID NO: 3425286 - RNA, 13 nt, Human
agcuucugccacu

SEQ ID NO: 3425287 - RNA, 19 nt, Human
agcuucugcccccugcaga

SEQ ID NO: 3425288 - RNA, 16 nt, Human
agcuucugcugggcug

SEQ ID NO: 3425289 - RNA, 18 nt, Human
agcuucugcugggcuggg

SEQ ID NO: 3425290 - RNA, 17 nt, Human
agcuucugcuuuucugc

SEQ ID NO: 3425291 - RNA, 19 nt, Human
agcuucugcuuuucugccc

SEQ ID NO: 3425292 - RNA, 20 nt, Human
agcuucugcuuuucugcccu

SEQ ID NO: 3425293 - RNA, 21 nt, Human
agcuucugggguccccagggc

SEQ ID NO: 3425294 - RNA, 14 nt, Human
agcuucugguacuc

SEQ ID NO: 3425295 - RNA, 16 nt, Human
agcuucugguacucuc

SEQ ID NO: 3425296 - RNA, 21 nt, Human
agcuucugguacucuccuaga

SEQ ID NO: 3425297 - RNA, 14 nt, Human
agcuucugucucca

SEQ ID NO: 3425298 - RNA, 19 nt, Human
agcuucuguugcugccuca

SEQ ID NO: 3425299 - RNA, 20 nt, Human
agcuucuuaauauaacugcc

SEQ ID NO: 3425300 - RNA, 23 nt, Human
agcuucuuaauauaacugccuua

SEQ ID NO: 3425301 - RNA, 13 nt, Human
agcuucuuaauua

SEQ ID NO: 3425302 - RNA, 19 nt, Human
agcuucuuaauuaauuuga

SEQ ID NO: 3425303 - RNA, 18 nt, Human
agcuucuuguuuccuugu

SEQ ID NO: 3425304 - RNA, 22 nt, Human
agcuugaaaguuuucagaaccu

SEQ ID NO: 3425305 - RNA, 19 nt, Human
agcuugaaggaucuguuuu

SEQ ID NO: 3425306 - RNA, 19 nt, Human
agcuugaccgugaggccag

SEQ ID NO: 3425307 - RNA, 20 nt, Human
agcuugaccugaggcugugg

SEQ ID NO: 3425308 - RNA, 13 nt, Human
agcuugacuccca

SEQ ID NO: 3425309 - RNA, 21 nt, Human
agcuugagccgggccccuggg

SEQ ID NO: 3425310 - RNA, 23 nt, Human
agcuugagccgggccccugggcu

SEQ ID NO: 3425311 - RNA, 24 nt, Human
agcuugagccgggccccugggcuu

SEQ ID NO: 3425312 - RNA, 14 nt, Human
agcuugaggguugg

SEQ ID NO: 3425313 - RNA, 22 nt, Human
agcuugauguuggaucucaaga

SEQ ID NO: 3425314 - RNA, 14 nt, Human
agcuugcacauuug

SEQ ID NO: 3425315 - RNA, 16 nt, Human
agcuugccagaugcug

SEQ ID NO: 3425316 - RNA, 18 nt, Human
agcuugccccggccccgg

SEQ ID NO: 3425317 - RNA, 20 nt, Human
agcuugcccuggugccucac

SEQ ID NO: 3425318 - RNA, 22 nt, Human
agcuugcgcauucucauggaga

SEQ ID NO: 3425319 - RNA, 19 nt, Human
agcuugcucuucaguggga

SEQ ID NO: 3425320 - RNA, 16 nt, Human
agcuugcugcccuagg

SEQ ID NO: 3425321 - RNA, 23 nt, Human
agcuuggaaacuggaugagguca

SEQ ID NO: 3425322 - RNA, 14 nt, Human
agcuuggcagccga

SEQ ID NO: 3425323 - RNA, 17 nt, Human
agcuuggcagccgagcu

SEQ ID NO: 3425324 - RNA, 12 nt, Human
agcuugggaaug

SEQ ID NO: 3425325 - RNA, 14 nt, Human
agcuugggaaugga

SEQ ID NO: 3425326 - RNA, 15 nt, Human
agcuugggagagccc

SEQ ID NO: 3425327 - RNA, 19 nt, Human
agcuugggagagccccugg

SEQ ID NO: 3425328 - RNA, 18 nt, Human
agcuugggaggcuucccc

SEQ ID NO: 3425329 - RNA, 17 nt, Human
agcuugggcagaucucc

SEQ ID NO: 3425330 - RNA, 21 nt, Human
agcuugggcagaucucccaca

SEQ ID NO: 3425331 - RNA, 16 nt, Human
agcuugggcccagcug

SEQ ID NO: 3425332 - RNA, 19 nt, Human
agcuugggcccagcugggc

SEQ ID NO: 3425333 - RNA, 20 nt, Human
agcuugggcccagcugggcu

SEQ ID NO: 3425334 - RNA, 23 nt, Human
agcuuggggacaggggcaggagg

SEQ ID NO: 3425335 - RNA, 17 nt, Human
agcuuggggcaacauug

SEQ ID NO: 3425336 - RNA, 23 nt, Human
agcuuggggccaccaaagcugcc

SEQ ID NO: 3425337 - RNA, 15 nt, Human
agcuuggggccaggg

SEQ ID NO: 3425338 - RNA, 16 nt, Human
agcuuggggccaggga

SEQ ID NO: 3425339 - RNA, 18 nt, Human
agcuuguaaauagcucag

SEQ ID NO: 3425340 - RNA, 19 nt, Human
agcuuguaaauagcucagg

SEQ ID NO: 3425341 - RNA, 16 nt, Human
agcuuguagccagccg

SEQ ID NO: 3425342 - RNA, 18 nt, Human
agcuuguauaguguaaaa

SEQ ID NO: 3425343 - RNA, 21 nt, Human
agcuuguauaguguaaaauaa

SEQ ID NO: 3425344 - RNA, 12 nt, Human
agcuuguauuuu

SEQ ID NO: 3425345 - RNA, 23 nt, Human
agcuuguccaacccgaggcccgc

SEQ ID NO: 3425346 - RNA, 17 nt, Human
agcuuguggagccccac

SEQ ID NO: 3425347 - RNA, 20 nt, Human
agcuuguguauccauuauca

SEQ ID NO: 3425348 - RNA, 16 nt, Human
agcuuguuauuuauaa

SEQ ID NO: 3425349 - RNA, 16 nt, Human
agcuuguuuacaugcu

SEQ ID NO: 3425350 - RNA, 23 nt, Human
agcuuguuuuggacuuuguuaca

SEQ ID NO: 3425351 - RNA, 22 nt, Human
agcuuguuuuguuucauccugu

SEQ ID NO: 3425352 - RNA, 15 nt, Human
agcuuuaaaagaaaa

SEQ ID NO: 3425353 - RNA, 21 nt, Human
agcuuuaaugauaugcuugua

SEQ ID NO: 3425354 - RNA, 21 nt, Human
agcuuuacaugcaauuuauua

SEQ ID NO: 3425355 - RNA, 13 nt, Human
agcuuuagacccu

SEQ ID NO: 3425356 - RNA, 12 nt, Human
agcuuuaugauu

SEQ ID NO: 3425357 - RNA, 18 nt, Human
agcuuuaugauuuucaua

SEQ ID NO: 3425358 - RNA, 16 nt, Human
agcuuuauguaauaau

SEQ ID NO: 3425359 - RNA, 22 nt, Human
agcuuuauguaauaaugugaau

SEQ ID NO: 3425360 - RNA, 13 nt, Human
agcuuuauuucua

SEQ ID NO: 3425361 - RNA, 14 nt, Human
agcuuuauuucuag

SEQ ID NO: 3425362 - RNA, 19 nt, Human
agcuuuauuuuuuaaguau

SEQ ID NO: 3425363 - RNA, 16 nt, Human
agcuuucagaauaugu

SEQ ID NO: 3425364 - RNA, 15 nt, Human
agcuuuccccagccc

SEQ ID NO: 3425365 - RNA, 22 nt, Human
agcuuuccccaugucucgacuc

SEQ ID NO: 3425366 - RNA, 12 nt, Human
agcuuucccugc

SEQ ID NO: 3425367 - RNA, 23 nt, Human
agcuuuccugccccaggccugaa

SEQ ID NO: 3425368 - RNA, 23 nt, Human
agcuuucuagaaguuucccuucc

SEQ ID NO: 3425369 - RNA, 21 nt, Human
agcuuucucugcuucagcuug

SEQ ID NO: 3425370 - RNA, 15 nt, Human
agcuuucugaacagc

SEQ ID NO: 3425371 - RNA, 16 nt, Human
agcuuucugaacagcu

SEQ ID NO: 3425372 - RNA, 19 nt, Human
agcuuucugaacagcuggu

SEQ ID NO: 3425373 - RNA, 22 nt, Human
agcuuucugaacagcuggugua

SEQ ID NO: 3425374 - RNA, 23 nt, Human
agcuuucugagcaagaggauuuu

SEQ ID NO: 3425375 - RNA, 13 nt, Human
agcuuucugccac

SEQ ID NO: 3425376 - RNA, 14 nt, Human
agcuuucuuucaca

SEQ ID NO: 3425377 - RNA, 17 nt, Human
agcuuugacacuggaau

SEQ ID NO: 3425378 - RNA, 20 nt, Human
agcuuugacucaggagccug

SEQ ID NO: 3425379 - RNA, 21 nt, Human
agcuuugcuaccaaagcaccu

SEQ ID NO: 3425380 - RNA, 18 nt, Human
agcuuugcucuuugguag

SEQ ID NO: 3425381 - RNA, 23 nt, Human
agcuuugcucuuugguagaaaag

SEQ ID NO: 3425382 - RNA, 12 nt, Human
agcuuugcugcu

SEQ ID NO: 3425383 - RNA, 22 nt, Human
agcuuuggaaguuuagcucuga

SEQ ID NO: 3425384 - RNA, 23 nt, Human
agcuuuggaaguuuagcucugag

SEQ ID NO: 3425385 - RNA, 21 nt, Human
agcuuuggacacacacagcuu

SEQ ID NO: 3425386 - RNA, 23 nt, Human
agcuuuggacacacacagcuucu

SEQ ID NO: 3425387 - RNA, 21 nt, Human
agcuuuggacgcacacagcuu

SEQ ID NO: 3425388 - RNA, 21 nt, Human
agcuuuggcuaugagggccuu

SEQ ID NO: 3425389 - RNA, 23 nt, Human
agcuuuggggugucuuuuuuugg

SEQ ID NO: 3425390 - RNA, 17 nt, Human
agcuuuggugcaauggc

SEQ ID NO: 3425391 - RNA, 21 nt, Human
agcuuuguccccugcuucaga

SEQ ID NO: 3425392 - RNA, 15 nt, Human
agcuuugucguauuu

SEQ ID NO: 3425393 - RNA, 21 nt, Human
agcuuuguguuugguuuacau

SEQ ID NO: 3425394 - RNA, 23 nt, Human
agcuuuguguuugguuuacauuu

SEQ ID NO: 3425395 - RNA, 21 nt, Human
agcuuuuaugugaaacauguu

SEQ ID NO: 3425396 - RNA, 12 nt, Human
agcuuuucaaac

SEQ ID NO: 3425397 - RNA, 16 nt, Human
agcuuuucaaacaaga

SEQ ID NO: 3425398 - RNA, 18 nt, Human
agcuuuucccaaaagccc

SEQ ID NO: 3425399 - RNA, 17 nt, Human
agcuuuucuauuuuaau

SEQ ID NO: 3425400 - RNA, 12 nt, Human
agcuuuugaugu

SEQ ID NO: 3425401 - RNA, 13 nt, Human
agcuuuugcuuuu

SEQ ID NO: 3425402 - RNA, 17 nt, Human
agcuuuuuaaaacauua

SEQ ID NO: 3425403 - RNA, 17 nt, Human
agcuuuuuaauuaagca

SEQ ID NO: 3425404 - RNA, 17 nt, Human
agcuuuuuaauuguugu

SEQ ID NO: 3425405 - RNA, 23 nt, Human
agacauuucuuuucuuuuuacau

SEQ ID NO: 3425406 - RNA, 12 nt, Human
agacuaaaugaa

SEQ ID NO: 3425407 - RNA, 17 nt, Human
agacuaagaaauauucc

SEQ ID NO: 3425408 - RNA, 19 nt, Human
agacuaagaaauauuccaa

SEQ ID NO: 3425409 - RNA, 16 nt, Human
agacuaagccagcacc

SEQ ID NO: 3425410 - RNA, 19 nt, Human
agacuaauuccugcccugc

SEQ ID NO: 3425411 - RNA, 20 nt, Human
aggaccuguauuuaagcaaa

SEQ ID NO: 3425412 - RNA, 21 nt, Human
aggaccuguauuuaagcaaau

SEQ ID NO: 3425413 - RNA, 14 nt, Human
aggacgcacugagc

SEQ ID NO: 3425414 - RNA, 16 nt, Human
aggacgccacucauuu

SEQ ID NO: 3425415 - RNA, 17 nt, Human
aggacgccacucauuuc

SEQ ID NO: 3425416 - RNA, 18 nt, Human
aggacgccacucauuuca

SEQ ID NO: 3425417 - RNA, 19 nt, Human
aggacgccacucauuucau

SEQ ID NO: 3425418 - RNA, 20 nt, Human
aggacgcucucuggccuucg

SEQ ID NO: 3425419 - RNA, 14 nt, Human
aggacgcuucugaa

SEQ ID NO: 3425420 - RNA, 19 nt, Human
aggacggggccggccaggu

SEQ ID NO: 3425421 - RNA, 20 nt, Human
aggacggggccggccaggug

SEQ ID NO: 3425422 - RNA, 22 nt, Human
aggacggggccggccagguggg

SEQ ID NO: 3425423 - RNA, 14 nt, Human
aggacuaaccaugu

SEQ ID NO: 3425424 - RNA, 16 nt, Human
aggacuaggguccugg

SEQ ID NO: 3425425 - RNA, 18 nt, Human
aggacuaggguccugggg

SEQ ID NO: 3425426 - RNA, 20 nt, Human
aggacuauauuugggccugc

SEQ ID NO: 3425427 - RNA, 17 nt, Human
aggacucagcuccccag

SEQ ID NO: 3425428 - RNA, 20 nt, Human
aggacucagcuccccagagu

SEQ ID NO: 3425429 - RNA, 11 nt, Human
aggacuccagc

SEQ ID NO: 3425430 - RNA, 19 nt, Human
aggacuccaggcagcagac

SEQ ID NO: 3425431 - RNA, 17 nt, Human
aggacuccccaggccag

SEQ ID NO: 3425432 - RNA, 12 nt, Human
aggacucccucc

SEQ ID NO: 3425433 - RNA, 13 nt, Human
aggacucccuccu

SEQ ID NO: 3425434 - RNA, 15 nt, Human
aggacucccuccuca

SEQ ID NO: 3425435 - RNA, 18 nt, Human
aggacucccuccucaccu

SEQ ID NO: 3425436 - RNA, 23 nt, Human
aggacucccuccucaccucugga

SEQ ID NO: 3425437 - RNA, 15 nt, Human
aggacuccuccccac

SEQ ID NO: 3425438 - RNA, 22 nt, Human
aggacuccuccccacccuccug

SEQ ID NO: 3425439 - RNA, 23 nt, Human
aggacuccuccccacccuccugg

SEQ ID NO: 3425440 - RNA, 21 nt, Human
aggacuccuccuuuuuccaug

SEQ ID NO: 3425441 - RNA, 17 nt, Human
aggacuccugaaaaaaa

SEQ ID NO: 3425442 - RNA, 15 nt, Human
aggacucgcuuguaa

SEQ ID NO: 3425443 - RNA, 13 nt, Human
aggacucugaggc

SEQ ID NO: 3425444 - RNA, 17 nt, Human
aggacucugaggcucuu

SEQ ID NO: 3425445 - RNA, 15 nt, Human
aggacucugcccaga

SEQ ID NO: 3425446 - RNA, 22 nt, Human
aggacugacugaggcaguuuga

SEQ ID NO: 3425447 - RNA, 21 nt, Human
aggacugcacagcguccuguc

SEQ ID NO: 3425448 - RNA, 16 nt, Human
aggacugcaccauugc

SEQ ID NO: 3425449 - RNA, 21 nt, Human
aggacugcaccauugcugcuc

SEQ ID NO: 3425450 - RNA, 18 nt, Human
aggacugggagcccccag

SEQ ID NO: 3425451 - RNA, 11 nt, Human
aggacugggcc

SEQ ID NO: 3425452 - RNA, 16 nt, Human
aggacuguauuuguga

SEQ ID NO: 3425453 - RNA, 14 nt, Human
aggacuguccccuu

SEQ ID NO: 3425454 - RNA, 21 nt, Human
aggacuguccccuugaaggag

SEQ ID NO: 3425455 - RNA, 14 nt, Human
aggacugugaugcc

SEQ ID NO: 3425456 - RNA, 20 nt, Human
aggacugugaugcccugccc

SEQ ID NO: 3425457 - RNA, 21 nt, Human
aggacugugaugcccugcccu

SEQ ID NO: 3425458 - RNA, 22 nt, Human
aggacuguuuuuuccugagcuu

SEQ ID NO: 3425459 - RNA, 18 nt, Human
aggacuuaacggcuccag

SEQ ID NO: 3425460 - RNA, 20 nt, Human
aggacuuaacggcuccagga

SEQ ID NO: 3425461 - RNA, 20 nt, Human
aggacuuccccggagggcug

SEQ ID NO: 3425462 - RNA, 22 nt, Human
aggacuuccuguccagcuccaa

SEQ ID NO: 3425463 - RNA, 23 nt, Human
aggacuucuuuaauuuuggaauu

SEQ ID NO: 3425464 - RNA, 13 nt, Human
aggacuugaaaga

SEQ ID NO: 3425465 - RNA, 13 nt, Human
aggacuugcccuc

SEQ ID NO: 3425466 - RNA, 23 nt, Human
aggacuugcccucgugguggaaa

SEQ ID NO: 3425467 - RNA, 14 nt, Human
aggacuuguuagau

SEQ ID NO: 3425468 - RNA, 18 nt, Human
aggacuuugaggcaagug

SEQ ID NO: 3425469 - RNA, 23 nt, Human
aggacuuugaggcaagugugggc

SEQ ID NO: 3425470 - RNA, 17 nt, Human
aggagaaacacuugaac

SEQ ID NO: 3425471 - RNA, 20 nt, Human
aggagaaacacuugaaccug

SEQ ID NO: 3425472 - RNA, 14 nt, Human
aggagaaacagaga

SEQ ID NO: 3425473 - RNA, 16 nt, Human
aggagaaacagagaca

SEQ ID NO: 3425474 - RNA, 17 nt, Human
aggagaaacuggaacuc

SEQ ID NO: 3425475 - RNA, 19 nt, Human
aggagaaccaaaucuggaa

SEQ ID NO: 3425476 - RNA, 15 nt, Human
aggagaaccacuaca

SEQ ID NO: 3425477 - RNA, 21 nt, Human
aggagaacucauguuauuuuu

SEQ ID NO: 3425478 - RNA, 20 nt, Human
aggagaagaaggaaaugaau

SEQ ID NO: 3425479 - RNA, 13 nt, Human
aggagaagccagg

SEQ ID NO: 3425480 - RNA, 19 nt, Human
aggagaagcucagcugcau

SEQ ID NO: 3425481 - RNA, 13 nt, Human
aggagaagcugca

SEQ ID NO: 3425482 - RNA, 17 nt, Human
aggagaagcugcaucca

SEQ ID NO: 3425483 - RNA, 12 nt, Human
aggagaaggaag

SEQ ID NO: 3425484 - RNA, 16 nt, Human
aggagaauccaagcga

SEQ ID NO: 3425485 - RNA, 20 nt, Human
aggagaaucgcuugaaccca

SEQ ID NO: 3425486 - RNA, 20 nt, Human
aggagaauggugugaacccg

SEQ ID NO: 3425487 - RNA, 13 nt, Human
aggagacacaggg

SEQ ID NO: 3425488 - RNA, 18 nt, Human
aggagacaguucaagaaa

SEQ ID NO: 3425489 - RNA, 14 nt, Human
aggagaccaaggcg

SEQ ID NO: 3425490 - RNA, 13 nt, Human
aggagacucaccu

SEQ ID NO: 3425491 - RNA, 19 nt, Human
aggagacucaccucugccu

SEQ ID NO: 3425492 - RNA, 21 nt, Human
aggagacucaccucugccuca

SEQ ID NO: 3425493 - RNA, 20 nt, Human
aggagacuguuuggaaauug

SEQ ID NO: 3425494 - RNA, 14 nt, Human
aggagacuuguagu

SEQ ID NO: 3425495 - RNA, 14 nt, Human
aggagagaaaauau

SEQ ID NO: 3425496 - RNA, 12 nt, Human
aggagagaagaa

SEQ ID NO: 3425497 - RNA, 14 nt, Human
aggagagaagaaug

SEQ ID NO: 3425498 - RNA, 21 nt, Human
aggagagaaggggaggagggc

SEQ ID NO: 3425499 - RNA, 11 nt, Human
aggagagaccg

SEQ ID NO: 3425500 - RNA, 23 nt, Human
aggagagacucccaugaagccuu

SEQ ID NO: 3425501 - RNA, 11 nt, Human
aggagagagaa

SEQ ID NO: 3425502 - RNA, 14 nt, Human
aggagagagaaagc

SEQ ID NO: 3425503 - RNA, 18 nt, Human
aggagagagaaagccagg

SEQ ID NO: 3425504 - RNA, 13 nt, Human
aggagagaggcag

SEQ ID NO: 3425505 - RNA, 14 nt, Human
aggagagaggcaga

SEQ ID NO: 3425506 - RNA, 14 nt, Human
aggagagaguugaa

SEQ ID NO: 3425507 - RNA, 19 nt, Human
aggagagauagccuguggc

SEQ ID NO: 3425508 - RNA, 11 nt, Human
aggagagcagc

SEQ ID NO: 3425509 - RNA, 14 nt, Human
aggagagccugcug

SEQ ID NO: 3425510 - RNA, 15 nt, Human
aggagagccugcugc

SEQ ID NO: 3425511 - RNA, 22 nt, Human
aggagaggaaacuacugccuuu

SEQ ID NO: 3425512 - RNA, 12 nt, Human
aggagaggaaag

SEQ ID NO: 3425513 - RNA, 14 nt, Human
aggagaggagagag

SEQ ID NO: 3425514 - RNA, 13 nt, Human
aggagaggagagc

SEQ ID NO: 3425515 - RNA, 13 nt, Human
aggagaggaugag

SEQ ID NO: 3425516 - RNA, 18 nt, Human
aggagaggaugagagccc

SEQ ID NO: 3425517 - RNA, 23 nt, Human
aggagaggaugagagcccagagg

SEQ ID NO: 3425518 - RNA, 18 nt, Human
aggagagggaaaauguuu

SEQ ID NO: 3425519 - RNA, 20 nt, Human
aggagaggugauaaugaaug

SEQ ID NO: 3425520 - RNA, 17 nt, Human
aggagagucccagagca

SEQ ID NO: 3425521 - RNA, 21 nt, Human
aggagagucccagagcaggag

SEQ ID NO: 3425522 - RNA, 12 nt, Human
aggagauaaauc

SEQ ID NO: 3425523 - RNA, 20 nt, Human
aggagauaauuacugccuug

SEQ ID NO: 3425524 - RNA, 19 nt, Human
aggagauaucugagggagg

SEQ ID NO: 3425525 - RNA, 20 nt, Human
aggagauaucugagggagga

SEQ ID NO: 3425526 - RNA, 22 nt, Human
aggagauccagggcaaggccau

SEQ ID NO: 3425527 - RNA, 15 nt, Human
aggagaugcugugcc

SEQ ID NO: 3425528 - RNA, 20 nt, Human
aggagauucugccuuugcca

SEQ ID NO: 3425529 - RNA, 22 nt, Human
aggagauucugccuuugccagg

SEQ ID NO: 3425530 - RNA, 21 nt, Human
aggagauugagaaggagagaa

SEQ ID NO: 3425531 - RNA, 17 nt, Human
aggagauuggaaggaac

SEQ ID NO: 3425532 - RNA, 14 nt, Human
aggagauuuuccuu

SEQ ID NO: 3425533 - RNA, 15 nt, Human
aggagauuuuccuuc

SEQ ID NO: 3425534 - RNA, 18 nt, Human
aggagauuuuccuuccua

SEQ ID NO: 3425535 - RNA, 15 nt, Human
aggagcaaaggcuga

SEQ ID NO: 3425536 - RNA, 19 nt, Human
aggagcaaauguuucugca

SEQ ID NO: 3425537 - RNA, 16 nt, Human
aggagcacaagccaca

SEQ ID NO: 3425538 - RNA, 15 nt, Human
aggagcacacccagc

SEQ ID NO: 3425539 - RNA, 15 nt, Human
aggagcacaggcagc

SEQ ID NO: 3425540 - RNA, 22 nt, Human
aggagcacaggcagcuggauga

SEQ ID NO: 3425541 - RNA, 15 nt, Human
aggagcacagguccc

SEQ ID NO: 3425542 - RNA, 20 nt, Human
aggagcagcuucaguuguuu

SEQ ID NO: 3425543 - RNA, 16 nt, Human
aggagcaggcacgggu

SEQ ID NO: 3425544 - RNA, 19 nt, Human
aggagcaguaucaugaagc

SEQ ID NO: 3425545 - RNA, 16 nt, Human
aggagcagugcaggca

SEQ ID NO: 3425546 - RNA, 20 nt, Human
aggagcauccaccuccuucu

SEQ ID NO: 3425547 - RNA, 15 nt, Human
aggagccagacagac

SEQ ID NO: 3425548 - RNA, 16 nt, Human
aggagccagacagacc

SEQ ID NO: 3425549 - RNA, 19 nt, Human
aggagccaggcaacuucag

SEQ ID NO: 3425550 - RNA, 10 nt, Human
aggagcccag

SEQ ID NO: 3425551 - RNA, 16 nt, Human
aggccauucugccgcc

SEQ ID NO: 3425552 - RNA, 14 nt, Human
aggccauucuuucc

SEQ ID NO: 3425553 - RNA, 19 nt, Human
aggccauucuuucccaaca

SEQ ID NO: 3425554 - RNA, 15 nt, Human
aggcccaaagccucg

SEQ ID NO: 3425555 - RNA, 19 nt, Human
aggcccaaccaccagauga

SEQ ID NO: 3425556 - RNA, 14 nt, Human
aggcccaaccuccu

SEQ ID NO: 3425557 - RNA, 11 nt, Human
aggcccacaca

SEQ ID NO: 3425558 - RNA, 12 nt, Human
aggcccacacac

SEQ ID NO: 3425559 - RNA, 14 nt, Human
aggcccacccugcu

SEQ ID NO: 3425560 - RNA, 22 nt, Human
aggcccacccugcuuggcccag

SEQ ID NO: 3425561 - RNA, 13 nt, Human
aggcccacucagg

SEQ ID NO: 3425562 - RNA, 15 nt, Human
aggcccagagggccu

SEQ ID NO: 3425563 - RNA, 10 nt, Human
aggcccagca

SEQ ID NO: 3425564 - RNA, 23 nt, Human
aggcccagcgcggacauccccug

SEQ ID NO: 3425565 - RNA, 17 nt, Human
aggcccaggcugccguc

SEQ ID NO: 3425566 - RNA, 15 nt, Human
aggcccaggcuggga

SEQ ID NO: 3425567 - RNA, 17 nt, Human
aggcccaguucacccug

SEQ ID NO: 3425568 - RNA, 16 nt, Human
aggcccaugggaggcu

SEQ ID NO: 3425569 - RNA, 18 nt, Human
aggcccaugguugagaaa

SEQ ID NO: 3425570 - RNA, 21 nt, Human
aggccccaaaaccacagcccu

SEQ ID NO: 3425571 - RNA, 15 nt, Human
aggccccaacccugu

SEQ ID NO: 3425572 - RNA, 16 nt, Human
aggccccaauacccca

SEQ ID NO: 3425573 - RNA, 19 nt, Human
aggccccaauaccccaugg

SEQ ID NO: 3425574 - RNA, 14 nt, Human
aggccccacugaug

SEQ ID NO: 3425575 - RNA, 22 nt, Human
aggccccagagacucagaggga

SEQ ID NO: 3425576 - RNA, 13 nt, Human
aggccccagccuc

SEQ ID NO: 3425577 - RNA, 13 nt, Human
aggccccaggaag

SEQ ID NO: 3425578 - RNA, 20 nt, Human
aggccccaugaccuccagcu

SEQ ID NO: 3425579 - RNA, 13 nt, Human
aggcccccaagcc

SEQ ID NO: 3425580 - RNA, 13 nt, Human
aggcccccaccac

SEQ ID NO: 3425581 - RNA, 14 nt, Human
aggcccccaccaca

SEQ ID NO: 3425582 - RNA, 18 nt, Human
aggcccccaccacacauc

SEQ ID NO: 3425583 - RNA, 21 nt, Human
aggcccccaccacacauccca

SEQ ID NO: 3425584 - RNA, 23 nt, Human
aggcccccaccacacaucccagc

SEQ ID NO: 3425585 - RNA, 20 nt, Human
aggcccccacuugccucuuc

SEQ ID NO: 3425586 - RNA, 17 nt, Human
aggcccccagcccaggg

SEQ ID NO: 3425587 - RNA, 19 nt, Human
aggcccccagcccagggcu

SEQ ID NO: 3425588 - RNA, 15 nt, Human
aggcccccugccugc

SEQ ID NO: 3425589 - RNA, 17 nt, Human
aggccccgaggacccag

SEQ ID NO: 3425590 - RNA, 20 nt, Human
aggccccgaggacccagacc

SEQ ID NO: 3425591 - RNA, 14 nt, Human
aggccccgcccagg

SEQ ID NO: 3425592 - RNA, 20 nt, Human
aggccccgcuuguccagcgc

SEQ ID NO: 3425593 - RNA, 15 nt, Human
aggccccugccaccc

SEQ ID NO: 3425594 - RNA, 17 nt, Human
aggccccugccacccug

SEQ ID NO: 3425595 - RNA, 21 nt, Human
aggccccugccacccugggga

SEQ ID NO: 3425596 - RNA, 13 nt, Human
aggccccuggagg

SEQ ID NO: 3425597 - RNA, 19 nt, Human
aggccccuggaggcugccu

SEQ ID NO: 3425598 - RNA, 20 nt, Human
aggccccuggaggcugccuc

SEQ ID NO: 3425599 - RNA, 21 nt, Human
aggccccuggaggcugccucc

SEQ ID NO: 3425600 - RNA, 22 nt, Human
aggccccuggaggcugccuccc

SEQ ID NO: 3425601 - RNA, 21 nt, Human
aggccccugucucagggugag

SEQ ID NO: 3425602 - RNA, 20 nt, Human
aggccccuucucucccugcc

SEQ ID NO: 3425603 - RNA, 13 nt, Human
aggcccggcucca

SEQ ID NO: 3425604 - RNA, 17 nt, Human
aggcccggcuccaggcu

SEQ ID NO: 3425605 - RNA, 20 nt, Human
aggcccggcuccaggcuccu

SEQ ID NO: 3425606 - RNA, 14 nt, Human
aggcccgucugucc

SEQ ID NO: 3425607 - RNA, 16 nt, Human
aggcccuccacaccug

SEQ ID NO: 3425608 - RNA, 22 nt, Human
aggcccucccuguuccccagag

SEQ ID NO: 3425609 - RNA, 22 nt, Human
aggcccuccucccucccagcuc

SEQ ID NO: 3425610 - RNA, 17 nt, Human
aggcccucgggcccagc

SEQ ID NO: 3425611 - RNA, 18 nt, Human
aggcccucgggcccagcc

SEQ ID NO: 3425612 - RNA, 19 nt, Human
aggcccucgggcccagccc

SEQ ID NO: 3425613 - RNA, 17 nt, Human
aggcccucugcccacuc

SEQ ID NO: 3425614 - RNA, 19 nt, Human
aggcccucugcccacuccc

SEQ ID NO: 3425615 - RNA, 20 nt, Human
aggcccucugcccacucccu

SEQ ID NO: 3425616 - RNA, 21 nt, Human
aggcccucugcccacucccug

SEQ ID NO: 3425617 - RNA, 18 nt, Human
agagcaggcacauggagg

SEQ ID NO: 3425618 - RNA, 21 nt, Human
agagcaggccaggcgcggugg

SEQ ID NO: 3425619 - RNA, 17 nt, Human
agagcaggcuggcagcu

SEQ ID NO: 3425620 - RNA, 24 nt, Human
agagcagggauuaaccucugcacu

SEQ ID NO: 3425621 - RNA, 17 nt, Human
agagcaggugagauggg

SEQ ID NO: 3425622 - RNA, 18 nt, Human
agagcaggugcuggcucu

SEQ ID NO: 3425623 - RNA, 19 nt, Human
agagcagugguaagaauag

SEQ ID NO: 3425624 - RNA, 23 nt, Human
agagcauaauuuaaaaauauauu

SEQ ID NO: 3425625 - RNA, 16 nt, Human
agagcaucaugccucu

SEQ ID NO: 3425626 - RNA, 20 nt, Human
agagcaucaugccucugagg

SEQ ID NO: 3425627 - RNA, 22 nt, Human
agagcaucaugccucugaggcc

SEQ ID NO: 3425628 - RNA, 23 nt, Human
agagcauccugcuucuaccaugu

SEQ ID NO: 3425629 - RNA, 23 nt, Human
agagcauuauaaucaccagggcc

SEQ ID NO: 3425630 - RNA, 21 nt, Human
agagcauuccagucaggcucu

SEQ ID NO: 3425631 - RNA, 19 nt, Human
agagcauugaauuggagag

SEQ ID NO: 3425632 - RNA, 11 nt, Human
agagccacaca

SEQ ID NO: 3425633 - RNA, 16 nt, Human
agagccacccuguguu

SEQ ID NO: 3425634 - RNA, 10 nt, Human
agagccagag

SEQ ID NO: 3425635 - RNA, 13 nt, Human
agagccagagaag

SEQ ID NO: 3425636 - RNA, 13 nt, Human
agagccaggagaa

SEQ ID NO: 3425637 - RNA, 18 nt, Human
agagccaggagaagcuca

SEQ ID NO: 3425638 - RNA, 23 nt, Human
agagccaggggggugaggagcug

SEQ ID NO: 3425639 - RNA, 20 nt, Human
agagccauacauaaaagaaa

SEQ ID NO: 3425640 - RNA, 19 nt, Human
agagccauauaaguuugaa

SEQ ID NO: 3425641 - RNA, 19 nt, Human
agagccauggacucuacac

SEQ ID NO: 3425642 - RNA, 17 nt, Human
agagcccacgcccccac

SEQ ID NO: 3425643 - RNA, 14 nt, Human
agagcccagccauu

SEQ ID NO: 3425644 - RNA, 15 nt, Human
agagcccagcuccaa

SEQ ID NO: 3425645 - RNA, 13 nt, Human
agagcccaggagc

SEQ ID NO: 3425646 - RNA, 19 nt, Human
agagcccaggagcuccccu

SEQ ID NO: 3425647 - RNA, 14 nt, Human
agagccccacacgg

SEQ ID NO: 3425648 - RNA, 17 nt, Human
agagccccacacggagg

SEQ ID NO: 3425649 - RNA, 21 nt, Human
agagccccacucucagaggcc

SEQ ID NO: 3425650 - RNA, 22 nt, Human
agagccccacucucagaggccc

SEQ ID NO: 3425651 - RNA, 13 nt, Human
agagccccagcug

SEQ ID NO: 3425652 - RNA, 16 nt, Human
agagccccagcugaca

SEQ ID NO: 3425653 - RNA, 15 nt, Human
agagccccuccucca

SEQ ID NO: 3425654 - RNA, 15 nt, Human
agagccccuggggcc

SEQ ID NO: 3425655 - RNA, 19 nt, Human
agagccccuggggccuaga

SEQ ID NO: 3425656 - RNA, 18 nt, Human
agagcccugaggccuaga

SEQ ID NO: 3425657 - RNA, 22 nt, Human
agagcccugaggccuagacucu

SEQ ID NO: 3425658 - RNA, 14 nt, Human
agagcccugcuccc

SEQ ID NO: 3425659 - RNA, 14 nt, Human
agagcccuugccuc

SEQ ID NO: 3425660 - RNA, 13 nt, Human
agagccgggaagc

SEQ ID NO: 3425661 - RNA, 22 nt, Human
agagccggggugggguggcugc

SEQ ID NO: 3425662 - RNA, 23 nt, Human
agagccggggugggguggcugca

SEQ ID NO: 3425663 - RNA, 14 nt, Human
agagccguaaaaac

SEQ ID NO: 3425664 - RNA, 16 nt, Human
agagccguggucccug

SEQ ID NO: 3425665 - RNA, 22 nt, Human
agagccucccucaauucccccu

SEQ ID NO: 3425666 - RNA, 13 nt, Human
agagccugaggga

SEQ ID NO: 3425667 - RNA, 14 nt, Human
agagccugagggau

SEQ ID NO: 3425668 - RNA, 13 nt, Human
agagccugaucuc

SEQ ID NO: 3425669 - RNA, 14 nt, Human
agagccugaucucu

SEQ ID NO: 3425670 - RNA, 14 nt, Human
agagccugcaggau

SEQ ID NO: 3425671 - RNA, 19 nt, Human
agagccugcaggugcugcu

SEQ ID NO: 3425672 - RNA, 12 nt, Human
agagccugcccc

SEQ ID NO: 3425673 - RNA, 16 nt, Human
agagccugccccagcg

SEQ ID NO: 3425674 - RNA, 17 nt, Human
agagccugccccagcgc

SEQ ID NO: 3425675 - RNA, 13 nt, Human
agagccugcuccc

SEQ ID NO: 3425676 - RNA, 16 nt, Human
agagccugcuccccca

SEQ ID NO: 3425677 - RNA, 18 nt, Human
agagccugcucccccacc

SEQ ID NO: 3425678 - RNA, 19 nt, Human
agagccugcucccccaccc

SEQ ID NO: 3425679 - RNA, 15 nt, Human
agagccugcugcaug

SEQ ID NO: 3425680 - RNA, 19 nt, Human
agagccugcuggcacccac

SEQ ID NO: 3425681 - RNA, 24 nt, Human
agagccugcuggcacccaccgugg

SEQ ID NO: 3425682 - RNA, 12 nt, Human
agagccuggggc

SEQ ID NO: 3425683 - RNA, 23 nt, Human
agagccuggggcucuaacgccug

SEQ ID NO: 3425684 - RNA, 16 nt, Human
agagccuuaaaacauc

SEQ ID NO: 3425685 - RNA, 14 nt, Human
agagccuucagccu

SEQ ID NO: 3425686 - RNA, 13 nt, Human
agagccuuccacc

SEQ ID NO: 3425687 - RNA, 22 nt, Human
agagccuuccacccaggggcag

SEQ ID NO: 3425688 - RNA, 13 nt, Human
agagccuuccagg

SEQ ID NO: 3425689 - RNA, 15 nt, Human
agagccuuccagggg

SEQ ID NO: 3425690 - RNA, 22 nt, Human
agagccuuccaggggugggaca

SEQ ID NO: 3425691 - RNA, 11 nt, Human
agagccuugcg

SEQ ID NO: 3425692 - RNA, 17 nt, Human
agagccuugguguccac

SEQ ID NO: 3425693 - RNA, 19 nt, Human
agagccuugguguccaccu

SEQ ID NO: 3425694 - RNA, 20 nt, Human
agagccuugguguccaccug

SEQ ID NO: 3425695 - RNA, 15 nt, Human
agagccuuuugugca

SEQ ID NO: 3425696 - RNA, 23 nt, Human
agaggauuuuagcuaggauuuga

SEQ ID NO: 3425697 - RNA, 20 nt, Human
agaggauuuuuuucugagcg

SEQ ID NO: 3425698 - RNA, 16 nt, Human
agaggcaagcugaaau

SEQ ID NO: 3425699 - RNA, 22 nt, Human
agaggcaagcugaaauuuuaga

SEQ ID NO: 3425700 - RNA, 18 nt, Human
agaggcaauggcuccuuc

SEQ ID NO: 3425701 - RNA, 17 nt, Human
agaggcaccaggaagcc

SEQ ID NO: 3425702 - RNA, 18 nt, Human
agaggcagaaaauugcac

SEQ ID NO: 3425703 - RNA, 13 nt, Human
agaggcagagaaa

SEQ ID NO: 3425704 - RNA, 18 nt, Human
agaggcagagaaagaaga

SEQ ID NO: 3425705 - RNA, 14 nt, Human
agaggcagcccagg

SEQ ID NO: 3425706 - RNA, 21 nt, Human
agaggcagccccauucugccu

SEQ ID NO: 3425707 - RNA, 22 nt, Human
agaggcagccccauucugccug

SEQ ID NO: 3425708 - RNA, 17 nt, Human
agaggcagggaggggac

SEQ ID NO: 3425709 - RNA, 22 nt, Human
agaggcaggggcuugcuuugca

SEQ ID NO: 3425710 - RNA, 16 nt, Human
agaggccaaacaggcc

SEQ ID NO: 3425711 - RNA, 18 nt, Human
agaggccaaaggcuggug

SEQ ID NO: 3425712 - RNA, 14 nt, Human
agaggccagccugg

SEQ ID NO: 3425713 - RNA, 14 nt, Human
agaggccauggagg

SEQ ID NO: 3425714 - RNA, 16 nt, Human
agaggccauggcagaa

SEQ ID NO: 3425715 - RNA, 22 nt, Human
agaggccauguuccaauaaaca

SEQ ID NO: 3425716 - RNA, 20 nt, Human
agaggcccagauauuagaaa

SEQ ID NO: 3425717 - RNA, 17 nt, Human
agaggcccaggcugccg

SEQ ID NO: 3425718 - RNA, 20 nt, Human
agaggccccaauaccccaug

SEQ ID NO: 3425719 - RNA, 13 nt, Human
agaggccccagcc

SEQ ID NO: 3425720 - RNA, 13 nt, Human
agaggcccuggau

SEQ ID NO: 3425721 - RNA, 17 nt, Human
agaggcccuuugcuguc

SEQ ID NO: 3425722 - RNA, 17 nt, Human
agaggccguggcugcug

SEQ ID NO: 3425723 - RNA, 19 nt, Human
agaggccugaaauccuggu

SEQ ID NO: 3425724 - RNA, 13 nt, Human
agaggccugagga

SEQ ID NO: 3425725 - RNA, 22 nt, Human
agaggccugaggaugagcugga

SEQ ID NO: 3425726 - RNA, 20 nt, Human
agaggccugccuccagggcu

SEQ ID NO: 3425727 - RNA, 19 nt, Human
agaggccugggcugggaaa

SEQ ID NO: 3425728 - RNA, 20 nt, Human
agaggccuguuuggccucuc

SEQ ID NO: 3425729 - RNA, 21 nt, Human
agaggccuuuaguuauaaagg

SEQ ID NO: 3425730 - RNA, 21 nt, Human
agaggcgcaugaauuugugaa

SEQ ID NO: 3425731 - RNA, 14 nt, Human
agaggcgggccagc

SEQ ID NO: 3425732 - RNA, 16 nt, Human
agaggcgggccagcca

SEQ ID NO: 3425733 - RNA, 17 nt, Human
agaggcgggccagccag

SEQ ID NO: 3425734 - RNA, 18 nt, Human
agaggcgggccagccagg

SEQ ID NO: 3425735 - RNA, 15 nt, Human
agaggcuaaaauguu

SEQ ID NO: 3425736 - RNA, 17 nt, Human
agaggcuagcuucugcu

SEQ ID NO: 3425737 - RNA, 19 nt, Human
agaggcuagcuucugcuuu

SEQ ID NO: 3425738 - RNA, 17 nt, Human
agaggcuaugugagcac

SEQ ID NO: 3425739 - RNA, 13 nt, Human
agaggcugaggca

SEQ ID NO: 3425740 - RNA, 21 nt, Human
agaggcugaggcuggcacagg

SEQ ID NO: 3425741 - RNA, 13 nt, Human
agaggcugcagaa

SEQ ID NO: 3425742 - RNA, 12 nt, Human
agaggcugcccc

SEQ ID NO: 3425743 - RNA, 19 nt, Human
agaggcugccccucucacc

SEQ ID NO: 3425744 - RNA, 19 nt, Human
agaggcuggccucuacauc

SEQ ID NO: 3425745 - RNA, 14 nt, Human
agaggcuggguuca

SEQ ID NO: 3425746 - RNA, 14 nt, Human
agaggcuggugcug

SEQ ID NO: 3425747 - RNA, 22 nt, Human
agaggcuguucccaccaggcug

SEQ ID NO: 3425748 - RNA, 12 nt, Human
agaggcuucucc

SEQ ID NO: 3425749 - RNA, 19 nt, Human
agaggcuucuccgccagcc

SEQ ID NO: 3425750 - RNA, 20 nt, Human
agaggcuucuccgccagccu

SEQ ID NO: 3425751 - RNA, 14 nt, Human
agaggcuuguuuac

SEQ ID NO: 3425752 - RNA, 14 nt, Human
agagggaagaaaag

SEQ ID NO: 3425753 - RNA, 15 nt, Human
agagggaaugugaaa

SEQ ID NO: 3425754 - RNA, 21 nt, Human
agagggacagcccacugagaa

SEQ ID NO: 3425755 - RNA, 20 nt, Human
agagggacggccaagaaugu

SEQ ID NO: 3425756 - RNA, 14 nt, Human
agagggagaagaag

SEQ ID NO: 3425757 - RNA, 16 nt, Human
agagggagaagcauga

SEQ ID NO: 3425758 - RNA, 19 nt, Human
agagggagaagcaugaaaa

SEQ ID NO: 3425759 - RNA, 16 nt, Human
agagggaggcaagccc

SEQ ID NO: 3425760 - RNA, 18 nt, Human
agagggaggcaagcccug

SEQ ID NO: 3425761 - RNA, 13 nt, Human
agagggaggggcc

SEQ ID NO: 3425762 - RNA, 20 nt, Human
agagggaggggccuaggccu

SEQ ID NO: 3425763 - RNA, 15 nt, Human
agagggagugacaga

SEQ ID NO: 3425764 - RNA, 23 nt, Human
agagggaugaggugcugggaggg

SEQ ID NO: 3425765 - RNA, 14 nt, Human
agagggcagaggcu

SEQ ID NO: 3425766 - RNA, 23 nt, Human
agagggcaugcgcacaaggcuga

SEQ ID NO: 3425767 - RNA, 14 nt, Human
agagggcccaggca

SEQ ID NO: 3425768 - RNA, 16 nt, Human
agagggcccaggcagg

SEQ ID NO: 3425769 - RNA, 17 nt, Human
agagggccgggcagagg

SEQ ID NO: 3425770 - RNA, 18 nt, Human
agagggccgggcagaggg

SEQ ID NO: 3425771 - RNA, 19 nt, Human
agagggccugugggagccu

SEQ ID NO: 3425772 - RNA, 12 nt, Human
agagggcuggag

SEQ ID NO: 3425773 - RNA, 17 nt, Human
agagggcuggaggccca

SEQ ID NO: 3425774 - RNA, 18 nt, Human
agagggcuggaggcccag

SEQ ID NO: 3425775 - RNA, 19 nt, Human
agagggcuggaggcccagg

SEQ ID NO: 3425776 - RNA, 12 nt, Human
agagggcuuccu

SEQ ID NO: 3425777 - RNA, 21 nt, Human
aggcccucuggaguggccacu

SEQ ID NO: 3425778 - RNA, 22 nt, Human
aggcccugcacuguccugcucc

SEQ ID NO: 3425779 - RNA, 12 nt, Human
aggcccugccca

SEQ ID NO: 3425780 - RNA, 19 nt, Human
aggcccugcuccugcagca

SEQ ID NO: 3425781 - RNA, 16 nt, Human
aggcccugcugaguca

SEQ ID NO: 3425782 - RNA, 14 nt, Human
aggcccugcugccc

SEQ ID NO: 3425783 - RNA, 15 nt, Human
aggcccugcugccca

SEQ ID NO: 3425784 - RNA, 23 nt, Human
aggcccuggaucagcguggccuu

SEQ ID NO: 3425785 - RNA, 22 nt, Human
aggcccuggugcgaauggacuu

SEQ ID NO: 3425786 - RNA, 14 nt, Human
aggcccugucugua

SEQ ID NO: 3425787 - RNA, 13 nt, Human
aggcccugugccc

SEQ ID NO: 3425788 - RNA, 16 nt, Human
aggcccuuauuuucaa

SEQ ID NO: 3425789 - RNA, 20 nt, Human
aggcccuuauuuucaagaaa

SEQ ID NO: 3425790 - RNA, 18 nt, Human
aggcccuuccucuccacu

SEQ ID NO: 3425791 - RNA, 19 nt, Human
aggcccuucucuccagccc

SEQ ID NO: 3425792 - RNA, 20 nt, Human
aggcccuucucuccagcccc

SEQ ID NO: 3425793 - RNA, 23 nt, Human
aggcccuucucuccagccccugg

SEQ ID NO: 3425794 - RNA, 21 nt, Human
aggcccuuugaagccucagcu

SEQ ID NO: 3425795 - RNA, 18 nt, Human
aggccgaagaaggguccu

SEQ ID NO: 3425796 - RNA, 22 nt, Human
aggccgaagaaggguccuuccc

SEQ ID NO: 3425797 - RNA, 15 nt, Human
aggccgaagcucugg

SEQ ID NO: 3425798 - RNA, 19 nt, Human
aggccgaagcucuggcuga

SEQ ID NO: 3425799 - RNA, 24 nt, Human
aggccgaagcucuggcugaacccu

SEQ ID NO: 3425800 - RNA, 21 nt, Human
aggccgcagcucuugcccuuc

SEQ ID NO: 3425801 - RNA, 18 nt, Human
aggccgcgcguccagcug

SEQ ID NO: 3425802 - RNA, 19 nt, Human
aggccgcgcguccagcugc

SEQ ID NO: 3425803 - RNA, 14 nt, Human
aggccgcuagaggc

SEQ ID NO: 3425804 - RNA, 20 nt, Human
aggccgcuagaggccugagg

SEQ ID NO: 3425805 - RNA, 21 nt, Human
aggccggcagccccagccugc

SEQ ID NO: 3425806 - RNA, 22 nt, Human
aggccggcagccccagccugcu

SEQ ID NO: 3425807 - RNA, 15 nt, Human
aggccggccagccuc

SEQ ID NO: 3425808 - RNA, 16 nt, Human
aggccggccagccuca

SEQ ID NO: 3425809 - RNA, 21 nt, Human
aggccggcuugccacaccccc

SEQ ID NO: 3425810 - RNA, 14 nt, Human
aggccgggaaaaag

SEQ ID NO: 3425811 - RNA, 21 nt, Human
aggccgggccgaauccccucc

SEQ ID NO: 3425812 - RNA, 15 nt, Human
aggccggggccgggu

SEQ ID NO: 3425813 - RNA, 19 nt, Human
aggccggggccggguacug

SEQ ID NO: 3425814 - RNA, 17 nt, Human
aggccguccucccgggc

SEQ ID NO: 3425815 - RNA, 22 nt, Human
aggccguccucccgggcccucc

SEQ ID NO: 3425816 - RNA, 21 nt, Human
aggccgugacgucuggguggc

SEQ ID NO: 3425817 - RNA, 18 nt, Human
aggccguugcugacuuag

SEQ ID NO: 3425818 - RNA, 22 nt, Human
aggccuacaugcuuugugaaca

SEQ ID NO: 3425819 - RNA, 23 nt, Human
aggccuacaugcuuugugaacaa

SEQ ID NO: 3425820 - RNA, 15 nt, Human
aggccuagaggccug

SEQ ID NO: 3425821 - RNA, 15 nt, Human
aggccuaggauucua

SEQ ID NO: 3425822 - RNA, 17 nt, Human
aggccuagucagccaca

SEQ ID NO: 3425823 - RNA, 19 nt, Human
aggccucaacuccucccau

SEQ ID NO: 3425824 - RNA, 20 nt, Human
aggccucaacuccucccaua

SEQ ID NO: 3425825 - RNA, 17 nt, Human
aggccucaccucuaccc

SEQ ID NO: 3425826 - RNA, 16 nt, Human
aggccucagccagaga

SEQ ID NO: 3425827 - RNA, 13 nt, Human
aggccucagugga

SEQ ID NO: 3425828 - RNA, 15 nt, Human
aggccucaguggacu

SEQ ID NO: 3425829 - RNA, 15 nt, Human
aggccuccagcucag

SEQ ID NO: 3425830 - RNA, 18 nt, Human
aggccuccaucuucucau

SEQ ID NO: 3425831 - RNA, 16 nt, Human
aggccucccacaguga

SEQ ID NO: 3425832 - RNA, 18 nt, Human
aggccucccacagugacu

SEQ ID NO: 3425833 - RNA, 15 nt, Human
aggccucccugccag

SEQ ID NO: 3425834 - RNA, 17 nt, Human
aggccucccugccagua

SEQ ID NO: 3425835 - RNA, 12 nt, Human
aggccucugggc

SEQ ID NO: 3425836 - RNA, 18 nt, Human
aggccucugggccuccuc

SEQ ID NO: 3425837 - RNA, 15 nt, Human
aggccucuguguccu

SEQ ID NO: 3425838 - RNA, 23 nt, Human
aggccucuguguccuucccugca

SEQ ID NO: 3425839 - RNA, 18 nt, Human
aggccucuuggaccucug

SEQ ID NO: 3425840 - RNA, 14 nt, Human
agaguaauggguuu

SEQ ID NO: 3425841 - RNA, 17 nt, Human
agaguaauggguuucau

SEQ ID NO: 3425842 - RNA, 17 nt, Human
agaguacuuugguuucu

SEQ ID NO: 3425843 - RNA, 14 nt, Human
agaguagaaauaaa

SEQ ID NO: 3425844 - RNA, 15 nt, Human
agaguagaauugcau

SEQ ID NO: 3425845 - RNA, 17 nt, Human
agaguagaauugcauug

SEQ ID NO: 3425846 - RNA, 13 nt, Human
agaguagacauuu

SEQ ID NO: 3425847 - RNA, 12 nt, Human
agaguagcaagu

SEQ ID NO: 3425848 - RNA, 23 nt, Human
agaguagcaaguucuagagaaga

SEQ ID NO: 3425849 - RNA, 19 nt, Human
agaguagccgagagccugc

SEQ ID NO: 3425850 - RNA, 18 nt, Human
agaguauauuauguauuu

SEQ ID NO: 3425851 - RNA, 22 nt, Human
agaguaugugccaggaaacucu

SEQ ID NO: 3425852 - RNA, 16 nt, Human
agaguauugagauacu

SEQ ID NO: 3425853 - RNA, 15 nt, Human
agaguauuuuugaca

SEQ ID NO: 3425854 - RNA, 14 nt, Human
agagucacaagccu

SEQ ID NO: 3425855 - RNA, 15 nt, Human
agagucacuggaaca

SEQ ID NO: 3425856 - RNA, 16 nt, Human
agagucagcagaacug

SEQ ID NO: 3425857 - RNA, 15 nt, Human
agagucagcucucug

SEQ ID NO: 3425858 - RNA, 18 nt, Human
agagucagcucucugccc

SEQ ID NO: 3425859 - RNA, 13 nt, Human
agagucauauuuu

SEQ ID NO: 3425860 - RNA, 21 nt, Human
agagucaucuccaucagcugu

SEQ ID NO: 3425861 - RNA, 21 nt, Human
agaguccaagguuuaaagagu

SEQ ID NO: 3425862 - RNA, 15 nt, Human
agaguccaggcccca

SEQ ID NO: 3425863 - RNA, 23 nt, Human
agaguccaucagccuccauccua

SEQ ID NO: 3425864 - RNA, 15 nt, Human
agagucccacugccu

SEQ ID NO: 3425865 - RNA, 19 nt, Human
agagucccacugccucagg

SEQ ID NO: 3425866 - RNA, 21 nt, Human
agagucccacugccucagguu

SEQ ID NO: 3425867 - RNA, 15 nt, Human
agaguccccccacuc

SEQ ID NO: 3425868 - RNA, 12 nt, Human
agaguccuauuu

SEQ ID NO: 3425869 - RNA, 12 nt, Human
agaguccucuga

SEQ ID NO: 3425870 - RNA, 14 nt, Human
agaguccugcacag

SEQ ID NO: 3425871 - RNA, 17 nt, Human
agagucuaaagauggag

SEQ ID NO: 3425872 - RNA, 13 nt, Human
agagucuagauuc

SEQ ID NO: 3425873 - RNA, 23 nt, Human
agagucuagauucaaagguucua

SEQ ID NO: 3425874 - RNA, 17 nt, Human
agagucuauugucuccu

SEQ ID NO: 3425875 - RNA, 18 nt, Human
agagucucacuccccucc

SEQ ID NO: 3425876 - RNA, 12 nt, Human
agagucugaaca

SEQ ID NO: 3425877 - RNA, 17 nt, Human
agagucugaacagcugu

SEQ ID NO: 3425878 - RNA, 22 nt, Human
agagucugagggcuuguaguuc

SEQ ID NO: 3425879 - RNA, 23 nt, Human
agagucugagggcuuguaguucu

SEQ ID NO: 3425880 - RNA, 23 nt, Human
agagucuggauaacuuccacagg

SEQ ID NO: 3425881 - RNA, 23 nt, Human
agagucuggugaagcucacuucu

SEQ ID NO: 3425882 - RNA, 21 nt, Human
agagucuuccacuucaaugca

SEQ ID NO: 3425883 - RNA, 18 nt, Human
agagucuugcagugauua

SEQ ID NO: 3425884 - RNA, 15 nt, Human
agagugagacccugu

SEQ ID NO: 3425885 - RNA, 18 nt, Human
agagugagacucagucuu

SEQ ID NO: 3425886 - RNA, 15 nt, Human
agagugagacucugu

SEQ ID NO: 3425887 - RNA, 22 nt, Human
agagugagagacauuaacucau

SEQ ID NO: 3425888 - RNA, 16 nt, Human
agagugagcuacagag

SEQ ID NO: 3425889 - RNA, 14 nt, Human
agagugcaaaacau

SEQ ID NO: 3425890 - RNA, 17 nt, Human
agagugcgccgagucug

SEQ ID NO: 3425891 - RNA, 21 nt, Human
agagugcuguccgguggagau

SEQ ID NO: 3425892 - RNA, 22 nt, Human
agaguggaaugcuuccuagaag

SEQ ID NO: 3425893 - RNA, 13 nt, Human
agaguggaggugg

SEQ ID NO: 3425894 - RNA, 21 nt, Human
agaguggccccaccuggcccu

SEQ ID NO: 3425895 - RNA, 11 nt, Human
agaguggccug

SEQ ID NO: 3425896 - RNA, 14 nt, Human
agaguggccuggcc

SEQ ID NO: 3425897 - RNA, 16 nt, Human
agaguggccuggccag

SEQ ID NO: 3425898 - RNA, 13 nt, Human
agaguggcuccuc

SEQ ID NO: 3425899 - RNA, 15 nt, Human
agaguggcuccuccc

SEQ ID NO: 3425900 - RNA, 14 nt, Human
agaguggcuggggc

SEQ ID NO: 3425901 - RNA, 19 nt, Human
agaguggggauaugauuua

SEQ ID NO: 3425902 - RNA, 14 nt, Human
agaguggggguggg

SEQ ID NO: 3425903 - RNA, 15 nt, Human
agagugguauuugca

SEQ ID NO: 3425904 - RNA, 18 nt, Human
agaguggucuuucuggag

SEQ ID NO: 3425905 - RNA, 11 nt, Human
agaguguaaaa

SEQ ID NO: 3425906 - RNA, 12 nt, Human
agaguguagaag

SEQ ID NO: 3425907 - RNA, 13 nt, Human
agaguguagaagc

SEQ ID NO: 3425908 - RNA, 18 nt, Human
agaguguagacuguggcu

SEQ ID NO: 3425909 - RNA, 15 nt, Human
agagugucaaccaga

SEQ ID NO: 3425910 - RNA, 20 nt, Human
agagugucaaccagacagag

SEQ ID NO: 3425911 - RNA, 22 nt, Human
agagugucuucacggcaggaca

SEQ ID NO: 3425912 - RNA, 19 nt, Human
agagugugaaauagacauu

SEQ ID NO: 3425913 - RNA, 11 nt, Human
agagugugacc

SEQ ID NO: 3425914 - RNA, 21 nt, Human
agagugugaccaaaaguuaca

SEQ ID NO: 3425915 - RNA, 14 nt, Human
agagugugccugaa

SEQ ID NO: 3425916 - RNA, 17 nt, Human
agaguguggcaaaauaa

SEQ ID NO: 3425917 - RNA, 17 nt, Human
agaguguggccuucgga

SEQ ID NO: 3425918 - RNA, 13 nt, Human
agaguguugaaac

SEQ ID NO: 3425919 - RNA, 23 nt, Human
agaguuaaauagaguauaugcac

SEQ ID NO: 3425920 - RNA, 16 nt, Human
agaguuaacaaugaua

SEQ ID NO: 3425921 - RNA, 12 nt, Human
agaguuaagaag

SEQ ID NO: 3425922 - RNA, 13 nt, Human
agaguuaagaagc

SEQ ID NO: 3425923 - RNA, 17 nt, Human
agaguuaagaagcuguu

SEQ ID NO: 3425924 - RNA, 20 nt, Human
agaguuaagaagcuguugua

SEQ ID NO: 3425925 - RNA, 21 nt, Human
agaguuaagaagcuguuguac

SEQ ID NO: 3425926 - RNA, 13 nt, Human
agaguuaagaaug

SEQ ID NO: 3425927 - RNA, 14 nt, Human
agaguuaaucaacu

SEQ ID NO: 3425928 - RNA, 19 nt, Human
agaguuaaucaacugaaag

SEQ ID NO: 3425929 - RNA, 13 nt, Human
agaguuagacugu

SEQ ID NO: 3425930 - RNA, 21 nt, Human
agaguuagguuuaacauaaag

SEQ ID NO: 3425931 - RNA, 19 nt, Human
agaguuaguuucuuuggga

SEQ ID NO: 3425932 - RNA, 20 nt, Human
agaguucaauggcugcugaa

SEQ ID NO: 3425933 - RNA, 18 nt, Human
agaguucagggaagauaa

SEQ ID NO: 3425934 - RNA, 13 nt, Human
agaguuccagagg

SEQ ID NO: 3425935 - RNA, 19 nt, Human
agaguucuauacuguaaag

SEQ ID NO: 3425936 - RNA, 14 nt, Human
agaguugaagacag

SEQ ID NO: 3425937 - RNA, 19 nt, Human
aggcuaaaauguuuucagc

SEQ ID NO: 3425938 - RNA, 19 nt, Human
aggcuaaggcguggagcug

SEQ ID NO: 3425939 - RNA, 20 nt, Human
aggcuaaggcguggagcugc

SEQ ID NO: 3425940 - RNA, 14 nt, Human
aggcuaaugucaaa

SEQ ID NO: 3425941 - RNA, 23 nt, Human
aggcuaauguuggcagaugcagc

SEQ ID NO: 3425942 - RNA, 12 nt, Human
aggcuacagaga

SEQ ID NO: 3425943 - RNA, 16 nt, Human
aggcuacagagaagcc

SEQ ID NO: 3425944 - RNA, 18 nt, Human
aggcuacagagaagccuu

SEQ ID NO: 3425945 - RNA, 14 nt, Human
aggcuacagggcca

SEQ ID NO: 3425946 - RNA, 16 nt, Human
aggcuaccuuauugua

SEQ ID NO: 3425947 - RNA, 13 nt, Human
aggcuacucaccu

SEQ ID NO: 3425948 - RNA, 21 nt, Human
aggcuagaaccaccugccuau

SEQ ID NO: 3425949 - RNA, 20 nt, Human
aggcuagagugcaguggcau

SEQ ID NO: 3425950 - RNA, 17 nt, Human
aggcuagauguauguac

SEQ ID NO: 3425951 - RNA, 15 nt, Human
aggcuagcuucugcu

SEQ ID NO: 3425952 - RNA, 15 nt, Human
aggcuagggugggga

SEQ ID NO: 3425953 - RNA, 16 nt, Human
aggcuaggguggggag

SEQ ID NO: 3425954 - RNA, 19 nt, Human
aggcuaggguggggagaga

SEQ ID NO: 3425955 - RNA, 23 nt, Human
aggcuagguggguugaaagccaa

SEQ ID NO: 3425956 - RNA, 18 nt, Human
aggcuaguccggacccac

SEQ ID NO: 3425957 - RNA, 22 nt, Human
aggcuauggacagggcaugcca

SEQ ID NO: 3425958 - RNA, 17 nt, Human
aggcuauguauaaaaua

SEQ ID NO: 3425959 - RNA, 17 nt, Human
aggcuaugugauuacaa

SEQ ID NO: 3425960 - RNA, 16 nt, Human
aggcuauuauuuucac

SEQ ID NO: 3425961 - RNA, 15 nt, Human
aggcuauuccugaga

SEQ ID NO: 3425962 - RNA, 20 nt, Human
aggcuauuccugagagcugc

SEQ ID NO: 3425963 - RNA, 16 nt, Human
aggcuauuuguaaauc

SEQ ID NO: 3425964 - RNA, 15 nt, Human
aggcucaaacaauga

SEQ ID NO: 3425965 - RNA, 16 nt, Human
aggcucacccccuucu

SEQ ID NO: 3425966 - RNA, 21 nt, Human
aggcucacccccuucuccauc

SEQ ID NO: 3425967 - RNA, 12 nt, Human
aggcucacugcc

SEQ ID NO: 3425968 - RNA, 24 nt, Human
aggcucacugccaggccagccucc

SEQ ID NO: 3425969 - RNA, 13 nt, Human
aggcucagagaug

SEQ ID NO: 3425970 - RNA, 18 nt, Human
aggcucagaggguguccu

SEQ ID NO: 3425971 - RNA, 19 nt, Human
aggcucagaggguguccug

SEQ ID NO: 3425972 - RNA, 15 nt, Human
aggcucauuuacugu

SEQ ID NO: 3425973 - RNA, 11 nt, Human
aggcuccacuu

SEQ ID NO: 3425974 - RNA, 22 nt, Human
aggcuccacuuggucugugaga

SEQ ID NO: 3425975 - RNA, 16 nt, Human
aggcuccagagggcac

SEQ ID NO: 3425976 - RNA, 19 nt, Human
aggcuccaggagcagccac

SEQ ID NO: 3425977 - RNA, 13 nt, Human
aggcuccaggcag

SEQ ID NO: 3425978 - RNA, 14 nt, Human
aggcuccaggcagc

SEQ ID NO: 3425979 - RNA, 14 nt, Human
aggcuccauuagga

SEQ ID NO: 3425980 - RNA, 15 nt, Human
aggcuccccugagga

SEQ ID NO: 3425981 - RNA, 13 nt, Human
aggcuccugccac

SEQ ID NO: 3425982 - RNA, 13 nt, Human
aggcuccugcccc

SEQ ID NO: 3425983 - RNA, 12 nt, Human
aggcuccugucc

SEQ ID NO: 3425984 - RNA, 19 nt, Human
aggcuccugugcuacuuug

SEQ ID NO: 3425985 - RNA, 23 nt, Human
aggcuccuuaggguuuucucucu

SEQ ID NO: 3425986 - RNA, 14 nt, Human
aggggcaucugccc

SEQ ID NO: 3425987 - RNA, 21 nt, Human
aggggcauguauuggccugga

SEQ ID NO: 3425988 - RNA, 23 nt, Human
aggggccaaauauauucucuuug

SEQ ID NO: 3425989 - RNA, 17 nt, Human
aggggccagaagaugaa

SEQ ID NO: 3425990 - RNA, 22 nt, Human
aggggccagaggaacuguccag

SEQ ID NO: 3425991 - RNA, 24 nt, Human
aggcugccugagucgugaccugcu

SEQ ID NO: 3425992 - RNA, 17 nt, Human
aggcugcggccccuccc

SEQ ID NO: 3425993 - RNA, 17 nt, Human
aggcugcucagggcugg

SEQ ID NO: 3425994 - RNA, 17 nt, Human
aggcugcucggggugca

SEQ ID NO: 3425995 - RNA, 21 nt, Human
aggcugcucggggugcacagg

SEQ ID NO: 3425996 - RNA, 13 nt, Human
aggcugcuggagg

SEQ ID NO: 3425997 - RNA, 15 nt, Human
aggcugcuggaggaa

SEQ ID NO: 3425998 - RNA, 12 nt, Human
aggcugcuggcg

SEQ ID NO: 3425999 - RNA, 19 nt, Human
aggcugcuggcgccucugc

SEQ ID NO: 3426000 - RNA, 22 nt, Human
aggcugcuggggccucagacga

SEQ ID NO: 3426001 - RNA, 22 nt, Human
aggcugcuuagaauccaaacuu

SEQ ID NO: 3426002 - RNA, 18 nt, Human
aggcugcuuuccaaagcc

SEQ ID NO: 3426003 - RNA, 18 nt, Human
aggcuggaagauagcugu

SEQ ID NO: 3426004 - RNA, 17 nt, Human
aggcuggaaggaggaag

SEQ ID NO: 3426005 - RNA, 21 nt, Human
aggcuggacuccagaucugca

SEQ ID NO: 3426006 - RNA, 20 nt, Human
aggcuggagaagcucaccca

SEQ ID NO: 3426007 - RNA, 17 nt, Human
aggcuggagcuggcguc

SEQ ID NO: 3426008 - RNA, 15 nt, Human
aggcuggaggaaggg

SEQ ID NO: 3426009 - RNA, 14 nt, Human
aggcuggaggcagg

SEQ ID NO: 3426010 - RNA, 16 nt, Human
aggcuggaggcagggc

SEQ ID NO: 3426011 - RNA, 23 nt, Human
aggcuggaguugucacugcuuuu

SEQ ID NO: 3426012 - RNA, 23 nt, Human
aggcuggaucuuggagaauguga

SEQ ID NO: 3426013 - RNA, 15 nt, Human
aggcuggcagcucuc

SEQ ID NO: 3426014 - RNA, 17 nt, Human
aggcuggcagcucucca

SEQ ID NO: 3426015 - RNA, 19 nt, Human
aggcuggcagcucuccagu

SEQ ID NO: 3426016 - RNA, 15 nt, Human
aggcuggccagcccc

SEQ ID NO: 3426017 - RNA, 18 nt, Human
aggcuggccagccgcucu

SEQ ID NO: 3426018 - RNA, 15 nt, Human
aggcuggccagucca

SEQ ID NO: 3426019 - RNA, 18 nt, Human
aggcuggccaguccaggc

SEQ ID NO: 3426020 - RNA, 19 nt, Human
aggcuggccaguccaggcu

SEQ ID NO: 3426021 - RNA, 12 nt, Human
aggcuggcccug

SEQ ID NO: 3426022 - RNA, 16 nt, Human
aggcuggcccugcccu

SEQ ID NO: 3426023 - RNA, 18 nt, Human
aggcuggcccugcccugg

SEQ ID NO: 3426024 - RNA, 14 nt, Human
aggcuggccucaga

SEQ ID NO: 3426025 - RNA, 15 nt, Human
aggcuggccucagac

SEQ ID NO: 3426026 - RNA, 18 nt, Human
aggcuggcgagagucugg

SEQ ID NO: 3426027 - RNA, 19 nt, Human
aggcuggcgcagccaaggc

SEQ ID NO: 3426028 - RNA, 22 nt, Human
aggcuggcgcagccaaggccga

SEQ ID NO: 3426029 - RNA, 17 nt, Human
aggcuggcgugcagugg

SEQ ID NO: 3426030 - RNA, 13 nt, Human
aggcuggcuggcc

SEQ ID NO: 3426031 - RNA, 14 nt, Human
aggcuggcuugucc

SEQ ID NO: 3426032 - RNA, 19 nt, Human
aggcuggcuuucagaguag

SEQ ID NO: 3426033 - RNA, 18 nt, Human
aggcugggacgcucugcu

SEQ ID NO: 3426034 - RNA, 13 nt, Human
aggcugggccaag

SEQ ID NO: 3426035 - RNA, 22 nt, Human
aggcugggccauguccaaagag

SEQ ID NO: 3426036 - RNA, 14 nt, Human
aggcugggcccaga

SEQ ID NO: 3426037 - RNA, 18 nt, Human
aggcugggcucccuuccc

SEQ ID NO: 3426038 - RNA, 18 nt, Human
aggcugggcugggcacug

SEQ ID NO: 3426039 - RNA, 19 nt, Human
aggcugggcugggcacugc

SEQ ID NO: 3426040 - RNA, 22 nt, Human
aggcugggcuucaguggcagcu

SEQ ID NO: 3426041 - RNA, 16 nt, Human
aggcuggggaaguccu

SEQ ID NO: 3426042 - RNA, 18 nt, Human
aggcuggggaaguccucu

SEQ ID NO: 3426043 - RNA, 16 nt, Human
aggcuggggcugaccu

SEQ ID NO: 3426044 - RNA, 15 nt, Human
aggcugggugacaga

SEQ ID NO: 3426045 - RNA, 17 nt, Human
aggcugggugcccacag

SEQ ID NO: 3426046 - RNA, 17 nt, Human
aggcuggguucugaucc

SEQ ID NO: 3426047 - RNA, 21 nt, Human
aggcugguacaacggaggccu

SEQ ID NO: 3426048 - RNA, 17 nt, Human
aggcuggucuaaaacuc

SEQ ID NO: 3426049 - RNA, 11 nt, Human
aggcuggucuu

SEQ ID NO: 3426050 - RNA, 15 nt, Human
aggcuggucuugaag

SEQ ID NO: 3426051 - RNA, 22 nt, Human
aggcuggugcuguggccagggu

SEQ ID NO: 3426052 - RNA, 15 nt, Human
aggcugguggcccag

SEQ ID NO: 3426053 - RNA, 12 nt, Human
aggcugguggga

SEQ ID NO: 3426054 - RNA, 18 nt, Human
aggcuggugggaggggcg

SEQ ID NO: 3426055 - RNA, 22 nt, Human
aggcugguucggauuuggggug

SEQ ID NO: 3426056 - RNA, 12 nt, Human
aggcuguaacua

SEQ ID NO: 3426057 - RNA, 13 nt, Human
aggcuguauccca

SEQ ID NO: 3426058 - RNA, 20 nt, Human
aggcuguaucccaugagccu

SEQ ID NO: 3426059 - RNA, 20 nt, Human
aggcugucaauuacaggaag

SEQ ID NO: 3426060 - RNA, 21 nt, Human
aggcuguccuuacccaucugc

SEQ ID NO: 3426061 - RNA, 15 nt, Human
aggcugucuggccag

SEQ ID NO: 3426062 - RNA, 17 nt, Human
aggcugucuggccaggc

SEQ ID NO: 3426063 - RNA, 20 nt, Human
aggcugucuucucaggcucu

SEQ ID NO: 3426064 - RNA, 23 nt, Human
aggcugucuucucaggcucugcc

SEQ ID NO: 3426065 - RNA, 24 nt, Human
aggcugugcucccugguucugaug

SEQ ID NO: 3426066 - RNA, 20 nt, Human
aggcugugcugcccugaaga

SEQ ID NO: 3426067 - RNA, 18 nt, Human
aggcuguggaccauggag

SEQ ID NO: 3426068 - RNA, 14 nt, Human
aggcuguggcuggu

SEQ ID NO: 3426069 - RNA, 18 nt, Human
aggcugugggccucaagg

SEQ ID NO: 3426070 - RNA, 16 nt, Human
aggcuguggucacagc

SEQ ID NO: 3426071 - RNA, 17 nt, Human
aggcuguguaagauuug

SEQ ID NO: 3426072 - RNA, 19 nt, Human
aggcuguguaagauuuguu

SEQ ID NO: 3426073 - RNA, 21 nt, Human
aggcuguguuuggcuuucagg

SEQ ID NO: 3426074 - RNA, 18 nt, Human
aggcuguucugcacugaa

SEQ ID NO: 3426075 - RNA, 20 nt, Human
aggcuguucugcacugaaaa

SEQ ID NO: 3426076 - RNA, 19 nt, Human
aggcuguugaauggaauuu

SEQ ID NO: 3426077 - RNA, 12 nt, Human
aggcuguuugcu

SEQ ID NO: 3426078 - RNA, 14 nt, Human
aggcuguuugcuuc

SEQ ID NO: 3426079 - RNA, 17 nt, Human
aggcuguuuuugggugc

SEQ ID NO: 3426080 - RNA, 21 nt, Human
aggcuuaauaaaaaugacaga

SEQ ID NO: 3426081 - RNA, 17 nt, Human
aggcuuaccaaaguauu

SEQ ID NO: 3426082 - RNA, 12 nt, Human
aggcuuagaccc

SEQ ID NO: 3426083 - RNA, 22 nt, Human
aggcuuagacccucaugcugcc

SEQ ID NO: 3426084 - RNA, 23 nt, Human
aggcuuagacccucaugcugcca

SEQ ID NO: 3426085 - RNA, 21 nt, Human
aggcuuagucacugagacagc

SEQ ID NO: 3426086 - RNA, 22 nt, Human
aggcuuagucacugagacagcc

SEQ ID NO: 3426087 - RNA, 14 nt, Human
aggcuuauaaaaca

SEQ ID NO: 3426088 - RNA, 16 nt, Human
aggcuuauaaaacaga

SEQ ID NO: 3426089 - RNA, 16 nt, Human
aggcuuauauucaacc

SEQ ID NO: 3426090 - RNA, 18 nt, Human
aggcuuauauucaaccau

SEQ ID NO: 3426091 - RNA, 22 nt, Human
aggcuuauauuuguguaauuuu

SEQ ID NO: 3426092 - RNA, 19 nt, Human
aggcuucaaaauguuaucu

SEQ ID NO: 3426093 - RNA, 13 nt, Human
aggcuuccagaga

SEQ ID NO: 3426094 - RNA, 10 nt, Human
aggcuuccug

SEQ ID NO: 3426095 - RNA, 22 nt, Human
aggcuuccugcaauuuucuaag

SEQ ID NO: 3426096 - RNA, 21 nt, Human
aggcuuccuucauuuccuccg

SEQ ID NO: 3426097 - RNA, 22 nt, Human
aggcuucuccaauucugcccaa

SEQ ID NO: 3426098 - RNA, 19 nt, Human
aggcuucuccgccagccuc

SEQ ID NO: 3426099 - RNA, 21 nt, Human
aggcuucuccgccagccuccu

SEQ ID NO: 3426100 - RNA, 16 nt, Human
aggcuucucuguucua

SEQ ID NO: 3426101 - RNA, 21 nt, Human
aggcuucugcuggggccuggg

SEQ ID NO: 3426102 - RNA, 20 nt, Human
aggcuucuguuccucucuuu

SEQ ID NO: 3426103 - RNA, 16 nt, Human
aggcuucuucagauca

SEQ ID NO: 3426104 - RNA, 13 nt, Human
aggcuugaagcug

SEQ ID NO: 3426105 - RNA, 15 nt, Human
aggcuugccugcagg

SEQ ID NO: 3426106 - RNA, 16 nt, Human
aggcuugccugcaggc

SEQ ID NO: 3426107 - RNA, 17 nt, Human
aggcuugccugcaggca

SEQ ID NO: 3426108 - RNA, 20 nt, Human
aggcuugcugagaggggcug

SEQ ID NO: 3426109 - RNA, 15 nt, Human
aggcuugcugcagau

SEQ ID NO: 3426110 - RNA, 21 nt, Human
aggcuugggauuugcugugua

SEQ ID NO: 3426111 - RNA, 17 nt, Human
aggcuuggggcuggaga

SEQ ID NO: 3426112 - RNA, 14 nt, Human
aggcuugguuccuu

SEQ ID NO: 3426113 - RNA, 20 nt, Human
aggcuugucagagcugggag

SEQ ID NO: 3426114 - RNA, 16 nt, Human
aggcuuguugugcuuu

SEQ ID NO: 3426115 - RNA, 22 nt, Human
aggcuuguuuaccuuucucucu

SEQ ID NO: 3426116 - RNA, 19 nt, Human
aggcuuuacuuagcuuauc

SEQ ID NO: 3426117 - RNA, 21 nt, Human
aggcuuuacuuagcuuaucaa

SEQ ID NO: 3426118 - RNA, 18 nt, Human
aggcuuuaguguauuuau

SEQ ID NO: 3426119 - RNA, 19 nt, Human
aggcuuucacuauuuccuu

SEQ ID NO: 3426120 - RNA, 23 nt, Human
aggcuuucccacuucccacccug

SEQ ID NO: 3426121 - RNA, 13 nt, Human
aggcuuucucuac

SEQ ID NO: 3426122 - RNA, 19 nt, Human
aggcuuugauuaguuuucu

SEQ ID NO: 3426123 - RNA, 13 nt, Human
aggcuuuguguug

SEQ ID NO: 3426124 - RNA, 17 nt, Human
aggcuuuguguuguaau

SEQ ID NO: 3426125 - RNA, 22 nt, Human
aggcuuuuguuuccuuuuucag

SEQ ID NO: 3426126 - RNA, 21 nt, Human
aggcuuuuuuaucaugugaaa

SEQ ID NO: 3426127 - RNA, 16 nt, Human
agggaaaacauuccau

SEQ ID NO: 3426128 - RNA, 22 nt, Human
agggaaaagauaaagaccagaa

SEQ ID NO: 3426129 - RNA, 15 nt, Human
aggguccccaccugg

SEQ ID NO: 3426130 - RNA, 23 nt, Human
agggucccccacucuaaagcaaa

SEQ ID NO: 3426131 - RNA, 15 nt, Human
agggucccucugugu

SEQ ID NO: 3426132 - RNA, 12 nt, Human
agggucccuggu

SEQ ID NO: 3426133 - RNA, 17 nt, Human
agggucccugguggcag

SEQ ID NO: 3426134 - RNA, 18 nt, Human
aggguccucuacuucagg

SEQ ID NO: 3426135 - RNA, 19 nt, Human
aggguccugcagccugcag

SEQ ID NO: 3426136 - RNA, 20 nt, Human
aggguccuggcuccugaggg

SEQ ID NO: 3426137 - RNA, 12 nt, Human
aggguccugggg

SEQ ID NO: 3426138 - RNA, 16 nt, Human
agggucuagggagaga

SEQ ID NO: 3426139 - RNA, 21 nt, Human
agggucucacucugucgccca

SEQ ID NO: 3426140 - RNA, 12 nt, Human
agggucucuacc

SEQ ID NO: 3426141 - RNA, 21 nt, Human
agggucucuagugcugugaaa

SEQ ID NO: 3426142 - RNA, 16 nt, Human
agggucucucccucag

SEQ ID NO: 3426143 - RNA, 17 nt, Human
agggucugcucuuucuc

SEQ ID NO: 3426144 - RNA, 22 nt, Human
agggucugcucuuucucugcca

SEQ ID NO: 3426145 - RNA, 15 nt, Human
agggucuggagaagc

SEQ ID NO: 3426146 - RNA, 19 nt, Human
agggucuguuuggacugca

SEQ ID NO: 3426147 - RNA, 15 nt, Human
agggucuucccuacc

SEQ ID NO: 3426148 - RNA, 17 nt, Human
agggucuucccuaccuc

SEQ ID NO: 3426149 - RNA, 14 nt, Human
agggucuugggaaa

SEQ ID NO: 3426150 - RNA, 15 nt, Human
agauuagaagcugaa

SEQ ID NO: 3426151 - RNA, 15 nt, Human
agauuagaauucugu

SEQ ID NO: 3426152 - RNA, 22 nt, Human
agauuagaauucuguauagauu

SEQ ID NO: 3426153 - RNA, 14 nt, Human
agauuagagggagg

SEQ ID NO: 3426154 - RNA, 18 nt, Human
agauuagagggagguguu

SEQ ID NO: 3426155 - RNA, 16 nt, Human
agauuagaucuuuuaa

SEQ ID NO: 3426156 - RNA, 15 nt, Human
agauuagcucuggac

SEQ ID NO: 3426157 - RNA, 18 nt, Human
agauuauaauaaauauau

SEQ ID NO: 3426158 - RNA, 17 nt, Human
agauuauacagaauugu

SEQ ID NO: 3426159 - RNA, 14 nt, Human
agauuauagauucu

SEQ ID NO: 3426160 - RNA, 17 nt, Human
agauuauagauucuaaa

SEQ ID NO: 3426161 - RNA, 18 nt, Human
agauuauagauucuaaag

SEQ ID NO: 3426162 - RNA, 19 nt, Human
agauuauagauucuaaaga

SEQ ID NO: 3426163 - RNA, 20 nt, Human
agauuauagauucuaaagau

SEQ ID NO: 3426164 - RNA, 15 nt, Human
agauuauaucaaagu

SEQ ID NO: 3426165 - RNA, 16 nt, Human
agauuauauugagaca

SEQ ID NO: 3426166 - RNA, 21 nt, Human
agauuauauugagacaaaaau

SEQ ID NO: 3426167 - RNA, 12 nt, Human
agauuauuuaca

SEQ ID NO: 3426168 - RNA, 14 nt, Human
agauuauuuacaag

SEQ ID NO: 3426169 - RNA, 19 nt, Human
agauuauuuacaagaagaa

SEQ ID NO: 3426170 - RNA, 20 nt, Human
agauuauuuuggaaaguuuu

SEQ ID NO: 3426171 - RNA, 16 nt, Human
agauuauuuuuuauga

SEQ ID NO: 3426172 - RNA, 16 nt, Human
agauucaaagguucua

SEQ ID NO: 3426173 - RNA, 23 nt, Human
agauucaauauugaauuuuuccu

SEQ ID NO: 3426174 - RNA, 21 nt, Human
agauucaaugccccugaauuu

SEQ ID NO: 3426175 - RNA, 15 nt, Human
agauucaccuguaaa

SEQ ID NO: 3426176 - RNA, 17 nt, Human
agauucaccuguaaaac

SEQ ID NO: 3426177 - RNA, 22 nt, Human
agauucacuuaacaaacaaauu

SEQ ID NO: 3426178 - RNA, 16 nt, Human
agauucagguaauaca

SEQ ID NO: 3426179 - RNA, 20 nt, Human
agauucagguaauacaaacu

SEQ ID NO: 3426180 - RNA, 19 nt, Human
agauucagguauguugccu

SEQ ID NO: 3426181 - RNA, 15 nt, Human
agauucagucuugcc

SEQ ID NO: 3426182 - RNA, 15 nt, Human
agauucauccauuua

SEQ ID NO: 3426183 - RNA, 20 nt, Human
agauuccauugguccaagau

SEQ ID NO: 3426184 - RNA, 23 nt, Human
agauuccauugguccaagauucc

SEQ ID NO: 3426185 - RNA, 13 nt, Human
agauucccagaga

SEQ ID NO: 3426186 - RNA, 16 nt, Human
agauucccagagcaaa

SEQ ID NO: 3426187 - RNA, 12 nt, Human
agauucccagga

SEQ ID NO: 3426188 - RNA, 13 nt, Human
agauucccaggag

SEQ ID NO: 3426189 - RNA, 22 nt, Human
agauucccaggaguucugcuca

SEQ ID NO: 3426190 - RNA, 23 nt, Human
agauuccccauugccuccuccuu

SEQ ID NO: 3426191 - RNA, 16 nt, Human
agauuccggauccuaa

SEQ ID NO: 3426192 - RNA, 18 nt, Human
agauuccggauccuaagc

SEQ ID NO: 3426193 - RNA, 16 nt, Human
agauucgcuuuccaug

SEQ ID NO: 3426194 - RNA, 16 nt, Human
agauucuaaagauucu

SEQ ID NO: 3426195 - RNA, 17 nt, Human
agauucuaaagauucua

SEQ ID NO: 3426196 - RNA, 21 nt, Human
agauucuauguuaauauuuua

SEQ ID NO: 3426197 - RNA, 13 nt, Human
agauucucaaagg

SEQ ID NO: 3426198 - RNA, 17 nt, Human
agauucucccuugcucu

SEQ ID NO: 3426199 - RNA, 23 nt, Human
agauucucuggcuguaaggcucu

SEQ ID NO: 3426200 - RNA, 16 nt, Human
agauucucugugucua

SEQ ID NO: 3426201 - RNA, 23 nt, Human
agauucucugugucuaagauucu

SEQ ID NO: 3426202 - RNA, 17 nt, Human
agauucugaaacauugc

SEQ ID NO: 3426203 - RNA, 20 nt, Human
agauucugaccuuaaaugca

SEQ ID NO: 3426204 - RNA, 19 nt, Human
agauucugccuuugccagg

SEQ ID NO: 3426205 - RNA, 19 nt, Human
agauucugugaucuuuuaa

SEQ ID NO: 3426206 - RNA, 21 nt, Human
agauucugugaucuuuuaaag

SEQ ID NO: 3426207 - RNA, 19 nt, Human
agauucuucccauucucca

SEQ ID NO: 3426208 - RNA, 22 nt, Human
agauucuucccauucuccauuu

SEQ ID NO: 3426209 - RNA, 16 nt, Human
agauucuucuguguuu

SEQ ID NO: 3426210 - RNA, 20 nt, Human
agauucuuucaguucuuugg

SEQ ID NO: 3426211 - RNA, 14 nt, Human
agauucuuuccuga

SEQ ID NO: 3426212 - RNA, 16 nt, Human
agauucuuuccugagg

SEQ ID NO: 3426213 - RNA, 19 nt, Human
agauucuuuccugaggcug

SEQ ID NO: 3426214 - RNA, 22 nt, Human
agauucuuuuaaauuagaaaau

SEQ ID NO: 3426215 - RNA, 15 nt, Human
agauugaaaaggaag

SEQ ID NO: 3426216 - RNA, 18 nt, Human
agauugaaaaucuugugu

SEQ ID NO: 3426217 - RNA, 15 nt, Human
agauugacgacaagu

SEQ ID NO: 3426218 - RNA, 13 nt, Human
agauugagaaaug

SEQ ID NO: 3426219 - RNA, 16 nt, Human
agauugagaaaugugu

SEQ ID NO: 3426220 - RNA, 18 nt, Human
agauugagaaggagagaa

SEQ ID NO: 3426221 - RNA, 19 nt, Human
agauugagagaagagacaa

SEQ ID NO: 3426222 - RNA, 15 nt, Human
agauugagagaauuu

SEQ ID NO: 3426223 - RNA, 22 nt, Human
agauugaggccugcccucaggg

SEQ ID NO: 3426224 - RNA, 22 nt, Human
agauugaguaagauuuacccag

SEQ ID NO: 3426225 - RNA, 22 nt, Human
agauugaguauaaaaacuugaa

SEQ ID NO: 3426226 - RNA, 20 nt, Human
agauugauaucuauaaaaua

SEQ ID NO: 3426227 - RNA, 14 nt, Human
agauugauuguauu

SEQ ID NO: 3426228 - RNA, 21 nt, Human
agauugcaacaggcugggcuu

SEQ ID NO: 3426229 - RNA, 23 nt, Human
agauugcaacaggcugggcuuca

SEQ ID NO: 3426230 - RNA, 16 nt, Human
agauugcagaaaauuc

SEQ ID NO: 3426231 - RNA, 18 nt, Human
agauugcagaaaauucug

SEQ ID NO: 3426232 - RNA, 19 nt, Human
agauugcagaaaauucugu

SEQ ID NO: 3426233 - RNA, 23 nt, Human
agauugcagaaaauucugugccu

SEQ ID NO: 3426234 - RNA, 23 nt, Human
agauugcaugugacucugaagcu

SEQ ID NO: 3426235 - RNA, 21 nt, Human
agauugcgccauugcacucca

SEQ ID NO: 3426236 - RNA, 22 nt, Human
agauugcuguguguugccuggg

SEQ ID NO: 3426237 - RNA, 15 nt, Human
agauugcuuaaaaua

SEQ ID NO: 3426238 - RNA, 23 nt, Human
agauugcuuugauuaauccagaa

SEQ ID NO: 3426239 - RNA, 16 nt, Human
agauuggaaggagaca

SEQ ID NO: 3426240 - RNA, 22 nt, Human
agauuggaaggagacacagaug

SEQ ID NO: 3426241 - RNA, 21 nt, Human
agauuggugggauuuuuuguu

SEQ ID NO: 3426242 - RNA, 15 nt, Human
agauugguuuuccug

SEQ ID NO: 3426243 - RNA, 22 nt, Human
agauuguaaaccgcuuuggccu

SEQ ID NO: 3426244 - RNA, 18 nt, Human
agauugugaauaaugauu

SEQ ID NO: 3426245 - RNA, 18 nt, Human
agauugugggggaaaaau

SEQ ID NO: 3426246 - RNA, 23 nt, Human
agauuguuguuugccauacuuug

SEQ ID NO: 3426247 - RNA, 19 nt, Human
agauuguuuaucuagaugu

SEQ ID NO: 3426248 - RNA, 22 nt, Human
agauuguuuaucuagauguaaa

SEQ ID NO: 3426249 - RNA, 18 nt, Human
agauuguuucuauacaaa

SEQ ID NO: 3426250 - RNA, 19 nt, Human
agauuuaagcacaaacuuu

SEQ ID NO: 3426251 - RNA, 16 nt, Human
agauuuaauauuacag

SEQ ID NO: 3426252 - RNA, 20 nt, Human
agauuuaaucugccaagggc

SEQ ID NO: 3426253 - RNA, 13 nt, Human
agauuuaauuaau

SEQ ID NO: 3426254 - RNA, 16 nt, Human
agauuuaauuugccaa

SEQ ID NO: 3426255 - RNA, 17 nt, Human
agauuuaauuugccaaa

SEQ ID NO: 3426256 - RNA, 16 nt, Human
agauuuacacugggag

SEQ ID NO: 3426257 - RNA, 16 nt, Human
agauuuaccacuugug

SEQ ID NO: 3426258 - RNA, 19 nt, Human
agauuuaguguaauaagac

SEQ ID NO: 3426259 - RNA, 16 nt, Human
agauuuaucaaaucag

SEQ ID NO: 3426260 - RNA, 14 nt, Human
agauuuauuaaaga

SEQ ID NO: 3426261 - RNA, 15 nt, Human
agauuuauuaaagaa

SEQ ID NO: 3426262 - RNA, 19 nt, Human
agauuuauuaaagaaaaaa

SEQ ID NO: 3426263 - RNA, 15 nt, Human
agauuuauuccuuug

SEQ ID NO: 3426264 - RNA, 15 nt, Human
agauuuauuuuguua

SEQ ID NO: 3426265 - RNA, 21 nt, Human
agauuuauuuuucaguuccaa

SEQ ID NO: 3426266 - RNA, 19 nt, Human
agauuuauuuuuuggacuu

SEQ ID NO: 3426267 - RNA, 17 nt, Human
agauuucagucuuuucc

SEQ ID NO: 3426268 - RNA, 19 nt, Human
agauuucauaguucagaau

SEQ ID NO: 3426269 - RNA, 19 nt, Human
agauuucaucugcucuccu

SEQ ID NO: 3426270 - RNA, 20 nt, Human
agauuucaucugcucuccuu

SEQ ID NO: 3426271 - RNA, 15 nt, Human
agauuuccagucucc

SEQ ID NO: 3426272 - RNA, 22 nt, Human
agguuuuguuugcuaucuuaau

SEQ ID NO: 3426273 - RNA, 14 nt, Human
agguuuuuaagccu

SEQ ID NO: 3426274 - RNA, 13 nt, Human
agguuuuucaauu

SEQ ID NO: 3426275 - RNA, 15 nt, Human
agguuuuucaauuaa

SEQ ID NO: 3426276 - RNA, 23 nt, Human
agguuuuucaauuaaacggauua

SEQ ID NO: 3426277 - RNA, 15 nt, Human
agguuuuuguaaaga

SEQ ID NO: 3426278 - RNA, 22 nt, Human
agguuuuuguaaagauuucugu

SEQ ID NO: 3426279 - RNA, 19 nt, Human
agguuuuuguagugauuuu

SEQ ID NO: 3426280 - RNA, 14 nt, Human
agguuuuuuuaaug

SEQ ID NO: 3426281 - RNA, 18 nt, Human
agguuuuuuuccuucuga

SEQ ID NO: 3426282 - RNA, 19 nt, Human
agguuuuuuuccuucugaa

SEQ ID NO: 3426283 - RNA, 22 nt, Human
agguuuuuuugucaacauugug

SEQ ID NO: 3426284 - RNA, 17 nt, Human
agguuuuuuuucaguug

SEQ ID NO: 3426285 - RNA, 16 nt, Human
agguuuuuuuuucuca

SEQ ID NO: 3426286 - RNA, 20 nt, Human
aguaaaaaaugguguuuuau

SEQ ID NO: 3426287 - RNA, 15 nt, Human
aguaaaaauaaaauu

SEQ ID NO: 3426288 - RNA, 12 nt, Human
aguaaaaauaca

SEQ ID NO: 3426289 - RNA, 13 nt, Human
aguaaaaauacaa

SEQ ID NO: 3426290 - RNA, 15 nt, Human
aguaaaaauuaaaaa

SEQ ID NO: 3426291 - RNA, 14 nt, Human
aguaaaacacagag

SEQ ID NO: 3426292 - RNA, 15 nt, Human
aguaaaaccacagca

SEQ ID NO: 3426293 - RNA, 11 nt, Human
aguaaaagaaa

SEQ ID NO: 3426294 - RNA, 13 nt, Human
aguaaaagaaacc

SEQ ID NO: 3426295 - RNA, 20 nt, Human
aguaaaagaaaccacuucug

SEQ ID NO: 3426296 - RNA, 20 nt, Human
aguaaaauaaauauugucuu

SEQ ID NO: 3426297 - RNA, 18 nt, Human
aguaaaauuauacugugu

SEQ ID NO: 3426298 - RNA, 18 nt, Human
aguaaaauucaguuuuuu

SEQ ID NO: 3426299 - RNA, 16 nt, Human
aguaaaauugccauau

SEQ ID NO: 3426300 - RNA, 19 nt, Human
aguaaaauugccauauugc

SEQ ID NO: 3426301 - RNA, 21 nt, Human
aguaaaauugccauauugcac

SEQ ID NO: 3426302 - RNA, 15 nt, Human
aguaaaauuuauuuc

SEQ ID NO: 3426303 - RNA, 16 nt, Human
aguaaaauuuauuuca

SEQ ID NO: 3426304 - RNA, 17 nt, Human
aguaaaauuuauuucau

SEQ ID NO: 3426305 - RNA, 23 nt, Human
aguaaaccacugaaaaaauauau

SEQ ID NO: 3426306 - RNA, 14 nt, Human
aguaaacgggaaca

SEQ ID NO: 3426307 - RNA, 19 nt, Human
aguaaacgggaacaugccc

SEQ ID NO: 3426308 - RNA, 16 nt, Human
aguaaacuaaugaguu

SEQ ID NO: 3426309 - RNA, 19 nt, Human
aguaaacuaaugaguuucu

SEQ ID NO: 3426310 - RNA, 16 nt, Human
aguaaacuauuuaucu

SEQ ID NO: 3426311 - RNA, 15 nt, Human
aguaaagaaaugaca

SEQ ID NO: 3426312 - RNA, 20 nt, Human
aguaaagaaauuuaaaagac

SEQ ID NO: 3426313 - RNA, 14 nt, Human
aguaaagagaaacu

SEQ ID NO: 3426314 - RNA, 13 nt, Human
aguaaagccauua

SEQ ID NO: 3426315 - RNA, 16 nt, Human
aguaaagucaaggaga

SEQ ID NO: 3426316 - RNA, 22 nt, Human
aguaaaguguaacauaugcaaa

SEQ ID NO: 3426317 - RNA, 14 nt, Human
aguaaauaaauugu

SEQ ID NO: 3426318 - RNA, 16 nt, Human
aguaaauaaauuguuu

SEQ ID NO: 3426319 - RNA, 21 nt, Human
aguaaauauugaggcuuugug

SEQ ID NO: 3426320 - RNA, 19 nt, Human
aguaaaucacgcuuuuuga

SEQ ID NO: 3426321 - RNA, 14 nt, Human
aguaaaucucuucu

SEQ ID NO: 3426322 - RNA, 15 nt, Human
aguaaaucuuuuaca

SEQ ID NO: 3426323 - RNA, 20 nt, Human
aguaaaugggggugcauuug

SEQ ID NO: 3426324 - RNA, 12 nt, Human
aguaaauguagu

SEQ ID NO: 3426325 - RNA, 15 nt, Human
aguaaauguaguuca

SEQ ID NO: 3426326 - RNA, 15 nt, Human
aguaaaugucuuugu

SEQ ID NO: 3426327 - RNA, 17 nt, Human
aguaaaugucuuuguaa

SEQ ID NO: 3426328 - RNA, 15 nt, Human
aguaaauuauagcuc

SEQ ID NO: 3426329 - RNA, 13 nt, Human
aguaacacuaaua

SEQ ID NO: 3426330 - RNA, 16 nt, Human
aguaacacuaauauau

SEQ ID NO: 3426331 - RNA, 23 nt, Human
aguaacacuaauauauuuaaaaa

SEQ ID NO: 3426332 - RNA, 23 nt, Human
aguaacaggaaaccacuuaucac

SEQ ID NO: 3426333 - RNA, 22 nt, Human
aguaacaucaaagauuagguga

SEQ ID NO: 3426334 - RNA, 18 nt, Human
aguaaccacagaaaagca

SEQ ID NO: 3426335 - RNA, 23 nt, Human
aguaaccaucacugguugcacuu

SEQ ID NO: 3426336 - RNA, 21 nt, Human
aguaacccccuuaaauuuaau

SEQ ID NO: 3426337 - RNA, 18 nt, Human
aguaacgcgucuuccuga

SEQ ID NO: 3426338 - RNA, 19 nt, Human
aguaacgcgucuuccugag

SEQ ID NO: 3426339 - RNA, 22 nt, Human
aguaacgggucguaaugacuua

SEQ ID NO: 3426340 - RNA, 19 nt, Human
aguaacuacaguuagggcu

SEQ ID NO: 3426341 - RNA, 22 nt, Human
aguaacucauaaucuauaaaca

SEQ ID NO: 3426342 - RNA, 14 nt, Human
aguaacucaucugu

SEQ ID NO: 3426343 - RNA, 17 nt, Human
aguaacucauugcucug

SEQ ID NO: 3426344 - RNA, 22 nt, Human
aguaacucauuuguuaaaauua

SEQ ID NO: 3426345 - RNA, 14 nt, Human
aguaacugacaacu

SEQ ID NO: 3426346 - RNA, 23 nt, Human
aguaacugucaggcugaaaacaa

SEQ ID NO: 3426347 - RNA, 13 nt, Human
aggggcaggcaca

SEQ ID NO: 3426348 - RNA, 19 nt, Human
aggggcaggcccugcacug

SEQ ID NO: 3426349 - RNA, 12 nt, Human
aggggcaggcug

SEQ ID NO: 3426350 - RNA, 18 nt, Human
aggggcagucuggagggg

SEQ ID NO: 3426351 - RNA, 20 nt, Human
aggggcagucuggaggggca

SEQ ID NO: 3426352 - RNA, 17 nt, Human
aggggcaucugccccuc

SEQ ID NO: 3426353 - RNA, 19 nt, Human
aggggcaucugccccuccc

SEQ ID NO: 3426354 - RNA, 22 nt, Human
aggggcaucugccccuccccca

SEQ ID NO: 3426355 - RNA, 20 nt, Human
aggggcauguauuggccugg

SEQ ID NO: 3426356 - RNA, 22 nt, Human
aggggccaaauauauucucuuu

SEQ ID NO: 3426357 - RNA, 22 nt, Human
aggggcccaaauucuuucagug

SEQ ID NO: 3426358 - RNA, 22 nt, Human
aggggcccaaggcggccccucc

SEQ ID NO: 3426359 - RNA, 21 nt, Human
aggggcccacagggaacccug

SEQ ID NO: 3426360 - RNA, 22 nt, Human
aggggccccccugcccuguggg

SEQ ID NO: 3426361 - RNA, 19 nt, Human
aggggccccucucagcccu

SEQ ID NO: 3426362 - RNA, 20 nt, Human
aggggccccugcuucuccag

SEQ ID NO: 3426363 - RNA, 21 nt, Human
aggggccccugcuucuccagc

SEQ ID NO: 3426364 - RNA, 19 nt, Human
aggggcccgcuugccucgg

SEQ ID NO: 3426365 - RNA, 20 nt, Human
aggggcccgcuugccucggc

SEQ ID NO: 3426366 - RNA, 14 nt, Human
aggggcccguggga

SEQ ID NO: 3426367 - RNA, 20 nt, Human
aggggcccguugucucccug

SEQ ID NO: 3426368 - RNA, 12 nt, Human
aggggcccugca

SEQ ID NO: 3426369 - RNA, 12 nt, Human
aggggcccuggu

SEQ ID NO: 3426370 - RNA, 17 nt, Human
aggggccgaugcccaga

SEQ ID NO: 3426371 - RNA, 14 nt, Human
aggggccggcccug

SEQ ID NO: 3426372 - RNA, 19 nt, Human
aggggccuaggccucagcc

SEQ ID NO: 3426373 - RNA, 21 nt, Human
aggggccucuuaugggcuggg

SEQ ID NO: 3426374 - RNA, 20 nt, Human
aggggccugccaccuggacc

SEQ ID NO: 3426375 - RNA, 14 nt, Human
aggggccuggagau

SEQ ID NO: 3426376 - RNA, 18 nt, Human
aggggccuggagauccuc

SEQ ID NO: 3426377 - RNA, 12 nt, Human
aggggccuggca

SEQ ID NO: 3426378 - RNA, 17 nt, Human
aggggccuuagggcacu

SEQ ID NO: 3426379 - RNA, 19 nt, Human
aggggccuuagggcacugg

SEQ ID NO: 3426380 - RNA, 20 nt, Human
aggggccuuagggcacuggg

SEQ ID NO: 3426381 - RNA, 20 nt, Human
aggggcgcucgcuuccgcau

SEQ ID NO: 3426382 - RNA, 13 nt, Human
aggggcgcuggcc

SEQ ID NO: 3426383 - RNA, 14 nt, Human
aggggcgcuggccc

SEQ ID NO: 3426384 - RNA, 17 nt, Human
aggggcgcuggcccagc

SEQ ID NO: 3426385 - RNA, 18 nt, Human
aggggcgcuggcccagcc

SEQ ID NO: 3426386 - RNA, 19 nt, Human
aggggcgcuggcccagccg

SEQ ID NO: 3426387 - RNA, 21 nt, Human
aggggcgcuggcccagccggc

SEQ ID NO: 3426388 - RNA, 14 nt, Human
aggggcggcaggag

SEQ ID NO: 3426389 - RNA, 18 nt, Human
aggggcgggacccaggca

SEQ ID NO: 3426390 - RNA, 18 nt, Human
aggggcggugcccacacc

SEQ ID NO: 3426391 - RNA, 16 nt, Human
aggggcgucuguuccc

SEQ ID NO: 3426392 - RNA, 21 nt, Human
aggggcgucuguucccccuuc

SEQ ID NO: 3426393 - RNA, 22 nt, Human
aggggcguggagggcguggagg

SEQ ID NO: 3426394 - RNA, 15 nt, Human
aggggcuacaagagg

SEQ ID NO: 3426395 - RNA, 13 nt, Human
aggggcucccucc

SEQ ID NO: 3426396 - RNA, 13 nt, Human
aggggcuccugga

SEQ ID NO: 3426397 - RNA, 14 nt, Human
aggggcuccuggaa

SEQ ID NO: 3426398 - RNA, 11 nt, Human
aggggcucugc

SEQ ID NO: 3426399 - RNA, 20 nt, Human
aggggcugaaagaacaugga

SEQ ID NO: 3426400 - RNA, 17 nt, Human
aggggcugcccgcuccc

SEQ ID NO: 3426401 - RNA, 19 nt, Human
aggggcugcccgcucccag

SEQ ID NO: 3426402 - RNA, 22 nt, Human
aggggcugcugaccuccacagc

SEQ ID NO: 3426403 - RNA, 14 nt, Human
aggggcuggggacu

SEQ ID NO: 3426404 - RNA, 21 nt, Human
aggggcuggggacuugugucu

SEQ ID NO: 3426405 - RNA, 21 nt, Human
aggggcuuauaauaaaggacu

SEQ ID NO: 3426406 - RNA, 15 nt, Human
aggggcuucaggucc

SEQ ID NO: 3426407 - RNA, 20 nt, Human
aggggcuuucuggagaggag

SEQ ID NO: 3426408 - RNA, 18 nt, Human
agggggaagaagcagaga

SEQ ID NO: 3426409 - RNA, 19 nt, Human
agggggaagaagcagagag

SEQ ID NO: 3426410 - RNA, 22 nt, Human
agggggaaggugggguccugga

SEQ ID NO: 3426411 - RNA, 16 nt, Human
agggggaauggcagca

SEQ ID NO: 3426412 - RNA, 22 nt, Human
agggggacugcugcugccuggc

SEQ ID NO: 3426413 - RNA, 16 nt, Human
agggggagagggcugc

SEQ ID NO: 3426414 - RNA, 23 nt, Human
agggggagccgguaacuguccug

SEQ ID NO: 3426415 - RNA, 23 nt, Human
agggggaugccacuccucccucc

SEQ ID NO: 3426416 - RNA, 12 nt, Human
aguaauuucagu

SEQ ID NO: 3426417 - RNA, 19 nt, Human
aguaauuucaguguaaagu

SEQ ID NO: 3426418 - RNA, 14 nt, Human
aguaauuucuucuc

SEQ ID NO: 3426419 - RNA, 15 nt, Human
aguaauuuguagauu

SEQ ID NO: 3426420 - RNA, 22 nt, Human
aguacaaaugccuuaaaaugga

SEQ ID NO: 3426421 - RNA, 16 nt, Human
aguacacaauaagcaa

SEQ ID NO: 3426422 - RNA, 17 nt, Human
aguacacaauaagcaaa

SEQ ID NO: 3426423 - RNA, 16 nt, Human
aguacaccccaccucu

SEQ ID NO: 3426424 - RNA, 14 nt, Human
aguacacucugcug

SEQ ID NO: 3426425 - RNA, 16 nt, Human
aguacagagaagccau

SEQ ID NO: 3426426 - RNA, 17 nt, Human
aguacaggcagcacaga

SEQ ID NO: 3426427 - RNA, 19 nt, Human
aguacaggcagcacagaga

SEQ ID NO: 3426428 - RNA, 23 nt, Human
aguacagguaaggugagggaaua

SEQ ID NO: 3426429 - RNA, 13 nt, Human
aguacaguggugc

SEQ ID NO: 3426430 - RNA, 22 nt, Human
aguacauaaaggugguaugugu

SEQ ID NO: 3426431 - RNA, 17 nt, Human
aguacauauuuauuuuc

SEQ ID NO: 3426432 - RNA, 22 nt, Human
aguacauauuuauuuucuuuug

SEQ ID NO: 3426433 - RNA, 13 nt, Human
aguacauucucag

SEQ ID NO: 3426434 - RNA, 17 nt, Human
aguacauucucaguuuu

SEQ ID NO: 3426435 - RNA, 20 nt, Human
aguacauucucaguuuuucu

SEQ ID NO: 3426436 - RNA, 19 nt, Human
aguacauuuaaauuuuuug

SEQ ID NO: 3426437 - RNA, 13 nt, Human
aguacauuuaaua

SEQ ID NO: 3426438 - RNA, 21 nt, Human
aguacauuuaauacagcagug

SEQ ID NO: 3426439 - RNA, 16 nt, Human
aguacauuuggagaca

SEQ ID NO: 3426440 - RNA, 19 nt, Human
aguacauuuggagacacaa

SEQ ID NO: 3426441 - RNA, 20 nt, Human
aguacauuuuuugaaaugcu

SEQ ID NO: 3426442 - RNA, 22 nt, Human
aguacauuuuuugaaaugcuga

SEQ ID NO: 3426443 - RNA, 15 nt, Human
aguaccaaucauuuu

SEQ ID NO: 3426444 - RNA, 15 nt, Human
aguaccacucaggcc

SEQ ID NO: 3426445 - RNA, 14 nt, Human
aguaccagacuaga

SEQ ID NO: 3426446 - RNA, 23 nt, Human
aguaccaguaggggcuuauaaua

SEQ ID NO: 3426447 - RNA, 19 nt, Human
aguaccauaguaccauuua

SEQ ID NO: 3426448 - RNA, 21 nt, Human
aguaccauaguaccauuuaua

SEQ ID NO: 3426449 - RNA, 12 nt, Human
aguaccauuuaa

SEQ ID NO: 3426450 - RNA, 18 nt, Human
aguacccaucuaguacuu

SEQ ID NO: 3426451 - RNA, 18 nt, Human
aguacccucucagcucca

SEQ ID NO: 3426452 - RNA, 21 nt, Human
aguaccuagcuggcucuguga

SEQ ID NO: 3426453 - RNA, 17 nt, Human
aguaccugaaaaaaugc

SEQ ID NO: 3426454 - RNA, 19 nt, Human
aguaccugagggucuguag

SEQ ID NO: 3426455 - RNA, 22 nt, Human
aguaccugagggucuguagguu

SEQ ID NO: 3426456 - RNA, 12 nt, Human
aguaccuggagg

SEQ ID NO: 3426457 - RNA, 14 nt, Human
aguaccuggaggag

SEQ ID NO: 3426458 - RNA, 15 nt, Human
aguaccuggaggagg

SEQ ID NO: 3426459 - RNA, 13 nt, Human
aguaccugggcaa

SEQ ID NO: 3426460 - RNA, 20 nt, Human
aguaccuuaucaaaguagca

SEQ ID NO: 3426461 - RNA, 20 nt, Human
aguaccuucagauccuaccc

SEQ ID NO: 3426462 - RNA, 14 nt, Human
aguaccuugcuucu

SEQ ID NO: 3426463 - RNA, 18 nt, Human
aguacgugcuaacaggcu

SEQ ID NO: 3426464 - RNA, 15 nt, Human
aguacguuauuguug

SEQ ID NO: 3426465 - RNA, 17 nt, Human
aguacguugugcauuug

SEQ ID NO: 3426466 - RNA, 18 nt, Human
aguacguugugcauuugg

SEQ ID NO: 3426467 - RNA, 14 nt, Human
aguacuaagaguau

SEQ ID NO: 3426468 - RNA, 19 nt, Human
aguacuacaguccucccau

SEQ ID NO: 3426469 - RNA, 19 nt, Human
aguacuagagauauuuugu

SEQ ID NO: 3426470 - RNA, 15 nt, Human
aguacuccacacugc

SEQ ID NO: 3426471 - RNA, 16 nt, Human
aguacuccacacugca

SEQ ID NO: 3426472 - RNA, 19 nt, Human
aguacuccacacugcacaa

SEQ ID NO: 3426473 - RNA, 18 nt, Human
aguacuccugcaaaauuu

SEQ ID NO: 3426474 - RNA, 19 nt, Human
aguacugagcagugauauu

SEQ ID NO: 3426475 - RNA, 20 nt, Human
aguacuggcugauggaguaa

SEQ ID NO: 3426476 - RNA, 21 nt, Human
aguacugguaagauuguuauu

SEQ ID NO: 3426477 - RNA, 22 nt, Human
aguacugugggcaauuuagaaa

SEQ ID NO: 3426478 - RNA, 21 nt, Human
aguacuguuuaccauuuuuca

SEQ ID NO: 3426479 - RNA, 17 nt, Human
aguacuucagcaagaga

SEQ ID NO: 3426480 - RNA, 21 nt, Human
aguacuucagcaagagagaac

SEQ ID NO: 3426481 - RNA, 17 nt, Human
aguacuucuccacccug

SEQ ID NO: 3426482 - RNA, 21 nt, Human
aguacuucuccacccugcucu

SEQ ID NO: 3426483 - RNA, 22 nt, Human
aguacuucuccacccugcucuc

SEQ ID NO: 3426484 - RNA, 18 nt, Human
aguacuucuucuguaaua

SEQ ID NO: 3426485 - RNA, 22 nt, Human
aguacuugaguguaauguuugu

SEQ ID NO: 3426486 - RNA, 14 nt, Human
aguacuugucauau

SEQ ID NO: 3426487 - RNA, 15 nt, Human
aguacuugucauaug

SEQ ID NO: 3426488 - RNA, 18 nt, Human
aguacuugugaaacacag

SEQ ID NO: 3426489 - RNA, 18 nt, Human
aguacuuuauagaagaau

SEQ ID NO: 3426490 - RNA, 19 nt, Human
aguacuuuauagaagaaug

SEQ ID NO: 3426491 - RNA, 17 nt, Human
aguacuuuggaggcccc

SEQ ID NO: 3426492 - RNA, 19 nt, Human
aguacuuuggaggccccua

SEQ ID NO: 3426493 - RNA, 22 nt, Human
aguacuuuggaggccccuaugu

SEQ ID NO: 3426494 - RNA, 19 nt, Human
aguacuuuuggcauuuuac

SEQ ID NO: 3426495 - RNA, 15 nt, Human
aguacuuuuuuaaau

SEQ ID NO: 3426496 - RNA, 12 nt, Human
aguagaaaaugu

SEQ ID NO: 3426497 - RNA, 19 nt, Human
aguagaaauaaaagugaau

SEQ ID NO: 3426498 - RNA, 12 nt, Human
aguagaaaucau

SEQ ID NO: 3426499 - RNA, 13 nt, Human
aguagaacagaua

SEQ ID NO: 3426500 - RNA, 19 nt, Human
agcagcuaucucucaguga

SEQ ID NO: 3426501 - RNA, 15 nt, Human
agcagcucaaaggca

SEQ ID NO: 3426502 - RNA, 20 nt, Human
agcagcucaaaggcacagug

SEQ ID NO: 3426503 - RNA, 22 nt, Human
agcagcuccuuccuagccuugc

SEQ ID NO: 3426504 - RNA, 22 nt, Human
agcagcugaaauaugcuggcug

SEQ ID NO: 3426505 - RNA, 23 nt, Human
agcagcugaaauaugcuggcugg

SEQ ID NO: 3426506 - RNA, 18 nt, Human
agcagcugaacagccaaa

SEQ ID NO: 3426507 - RNA, 21 nt, Human
agcagcugccaggagcacggc

SEQ ID NO: 3426508 - RNA, 13 nt, Human
agcagcuggacua

SEQ ID NO: 3426509 - RNA, 22 nt, Human
agcagcuuauaaugggcucucc

SEQ ID NO: 3426510 - RNA, 15 nt, Human
agcagcuuauuguuu

SEQ ID NO: 3426511 - RNA, 15 nt, Human
agcagcuucaccaga

SEQ ID NO: 3426512 - RNA, 16 nt, Human
agcagcuucaccagag

SEQ ID NO: 3426513 - RNA, 16 nt, Human
agcagcuuccagauug

SEQ ID NO: 3426514 - RNA, 22 nt, Human
agcagcuucugccacuucccag

SEQ ID NO: 3426515 - RNA, 17 nt, Human
agcagcuugcugcaccc

SEQ ID NO: 3426516 - RNA, 16 nt, Human
agcagcuuuaaacaaa

SEQ ID NO: 3426517 - RNA, 19 nt, Human
agcagcuuuaaacucaggg

SEQ ID NO: 3426518 - RNA, 20 nt, Human
agcagcuuuaaacucaggga

SEQ ID NO: 3426519 - RNA, 22 nt, Human
agcagcuuuaaacucagggaca

SEQ ID NO: 3426520 - RNA, 20 nt, Human
agcaggaagcugugagagca

SEQ ID NO: 3426521 - RNA, 13 nt, Human
agcaggacaugga

SEQ ID NO: 3426522 - RNA, 15 nt, Human
agcaggacuccaggc

SEQ ID NO: 3426523 - RNA, 15 nt, Human
agcaggagagaaauu

SEQ ID NO: 3426524 - RNA, 19 nt, Human
agcaggagaggagagccag

SEQ ID NO: 3426525 - RNA, 20 nt, Human
agcaggagaggagagccaga

SEQ ID NO: 3426526 - RNA, 18 nt, Human
agcaggagauugagaagg

SEQ ID NO: 3426527 - RNA, 20 nt, Human
agcaggagauugagaaggag

SEQ ID NO: 3426528 - RNA, 14 nt, Human
agcaggagggacag

SEQ ID NO: 3426529 - RNA, 19 nt, Human
agcaggagggacagucuca

SEQ ID NO: 3426530 - RNA, 13 nt, Human
agcaggaguggug

SEQ ID NO: 3426531 - RNA, 22 nt, Human
agcaggauaguugcuccgccuc

SEQ ID NO: 3426532 - RNA, 14 nt, Human
agcaggcacaugga

SEQ ID NO: 3426533 - RNA, 19 nt, Human
agcaggcacauggaggagc

SEQ ID NO: 3426534 - RNA, 15 nt, Human
agcaggcagccagca

SEQ ID NO: 3426535 - RNA, 17 nt, Human
agcaggcagccagcauc

SEQ ID NO: 3426536 - RNA, 19 nt, Human
agcaggcagccagcaucug

SEQ ID NO: 3426537 - RNA, 13 nt, Human
agcaggcagccuu

SEQ ID NO: 3426538 - RNA, 14 nt, Human
agcaggcagcgcca

SEQ ID NO: 3426539 - RNA, 18 nt, Human
agcaggccagguccagag

SEQ ID NO: 3426540 - RNA, 23 nt, Human
agcaggcccaugggaggcuggag

SEQ ID NO: 3426541 - RNA, 18 nt, Human
agcaggccuguugcuuuu

SEQ ID NO: 3426542 - RNA, 13 nt, Human
agcaggccuugcg

SEQ ID NO: 3426543 - RNA, 21 nt, Human
agcaggcgcugugcuaucaug

SEQ ID NO: 3426544 - RNA, 22 nt, Human
agcaggcuacacugacacuggu

SEQ ID NO: 3426545 - RNA, 20 nt, Human
agcaggcuacugucagcucc

SEQ ID NO: 3426546 - RNA, 14 nt, Human
agcaggcucucagg

SEQ ID NO: 3426547 - RNA, 16 nt, Human
agcaggcucucaggcc

SEQ ID NO: 3426548 - RNA, 18 nt, Human
agcaggcucucaggccag

SEQ ID NO: 3426549 - RNA, 13 nt, Human
agcaggcuggcag

SEQ ID NO: 3426550 - RNA, 14 nt, Human
agcaggcuggcagc

SEQ ID NO: 3426551 - RNA, 15 nt, Human
agcaggcugugaguu

SEQ ID NO: 3426552 - RNA, 13 nt, Human
agcagggaaacag

SEQ ID NO: 3426553 - RNA, 16 nt, Human
agcagggacuguaaac

SEQ ID NO: 3426554 - RNA, 17 nt, Human
agcagggaugcccugga

SEQ ID NO: 3426555 - RNA, 24 nt, Human
agcagggaugcccuggagguggcu

SEQ ID NO: 3426556 - RNA, 13 nt, Human
agcagggcucagc

SEQ ID NO: 3426557 - RNA, 22 nt, Human
agcagggcucagcggggacagc

SEQ ID NO: 3426558 - RNA, 16 nt, Human
agcagggcucugcccc

SEQ ID NO: 3426559 - RNA, 16 nt, Human
agcaggggcguggagg

SEQ ID NO: 3426560 - RNA, 18 nt, Human
aguagcuugcucccugug

SEQ ID NO: 3426561 - RNA, 17 nt, Human
aguaggaagacuuugga

SEQ ID NO: 3426562 - RNA, 19 nt, Human
aguaggaagacuuuggaaa

SEQ ID NO: 3426563 - RNA, 23 nt, Human
aguaggacuccuuauuuggcgug

SEQ ID NO: 3426564 - RNA, 18 nt, Human
aguagggcuuaguguuuu

SEQ ID NO: 3426565 - RNA, 19 nt, Human
aguagggguaccacugaau

SEQ ID NO: 3426566 - RNA, 13 nt, Human
aguaggugcuuga

SEQ ID NO: 3426567 - RNA, 20 nt, Human
aguagguuggaagcuagcuc

SEQ ID NO: 3426568 - RNA, 23 nt, Human
aguagguuggaagcuagcucccc

SEQ ID NO: 3426569 - RNA, 13 nt, Human
aguaguaaaaauu

SEQ ID NO: 3426570 - RNA, 20 nt, Human
aguaguaaaagaagaaauag

SEQ ID NO: 3426571 - RNA, 17 nt, Human
aguaguaccaaaugcuu

SEQ ID NO: 3426572 - RNA, 19 nt, Human
aguaguaccaaaugcuuua

SEQ ID NO: 3426573 - RNA, 18 nt, Human
aguaguacuucuucugua

SEQ ID NO: 3426574 - RNA, 22 nt, Human
aguaguacuucuucuguaauau

SEQ ID NO: 3426575 - RNA, 12 nt, Human
aguagucauuuc

SEQ ID NO: 3426576 - RNA, 14 nt, Human
aguagucauuucau

SEQ ID NO: 3426577 - RNA, 13 nt, Human
aguaguccuguga

SEQ ID NO: 3426578 - RNA, 19 nt, Human
aguagugaagacuccagaa

SEQ ID NO: 3426579 - RNA, 20 nt, Human
aguagugagaagaauauugu

SEQ ID NO: 3426580 - RNA, 13 nt, Human
aguaguuauauaa

SEQ ID NO: 3426581 - RNA, 12 nt, Human
aguaguuaucau

SEQ ID NO: 3426582 - RNA, 14 nt, Human
aguaguuaucaugu

SEQ ID NO: 3426583 - RNA, 23 nt, Human
aguaguuaucauguuaguaauac

SEQ ID NO: 3426584 - RNA, 17 nt, Human
aguaguucuguauuuga

SEQ ID NO: 3426585 - RNA, 14 nt, Human
aguaguuugcauuu

SEQ ID NO: 3426586 - RNA, 18 nt, Human
aguaguuugcauuucaga

SEQ ID NO: 3426587 - RNA, 12 nt, Human
aguaguuuguau

SEQ ID NO: 3426588 - RNA, 13 nt, Human
aguauaaaauagu

SEQ ID NO: 3426589 - RNA, 13 nt, Human
aguauaaacaaag

SEQ ID NO: 3426590 - RNA, 14 nt, Human
aguauaaagaauag

SEQ ID NO: 3426591 - RNA, 14 nt, Human
aguauaaauuugug

SEQ ID NO: 3426592 - RNA, 17 nt, Human
aguauaaccauaugaua

SEQ ID NO: 3426593 - RNA, 19 nt, Human
aguauaaccauaugauacu

SEQ ID NO: 3426594 - RNA, 21 nt, Human
aguauaaccauaugauacuau

SEQ ID NO: 3426595 - RNA, 13 nt, Human
aguauaagaaaug

SEQ ID NO: 3426596 - RNA, 19 nt, Human
aguauaagacuacugaauc

SEQ ID NO: 3426597 - RNA, 13 nt, Human
aguauaauuaaca

SEQ ID NO: 3426598 - RNA, 12 nt, Human
aguauacaagau

SEQ ID NO: 3426599 - RNA, 15 nt, Human
aguauacaauauaua

SEQ ID NO: 3426600 - RNA, 21 nt, Human
aguauacaauauauaaaaaua

SEQ ID NO: 3426601 - RNA, 21 nt, Human
aguauacaguucaauaaacuu

SEQ ID NO: 3426602 - RNA, 15 nt, Human
aguauagaaaaucuu

SEQ ID NO: 3426603 - RNA, 13 nt, Human
aguauaucuggac

SEQ ID NO: 3426604 - RNA, 15 nt, Human
aguauaucuggacaa

SEQ ID NO: 3426605 - RNA, 12 nt, Human
aguauaugugag

SEQ ID NO: 3426606 - RNA, 14 nt, Human
aguauauuauguau

SEQ ID NO: 3426607 - RNA, 18 nt, Human
aguauauuguugaagaga

SEQ ID NO: 3426608 - RNA, 18 nt, Human
aguauauuuauagucaca

SEQ ID NO: 3426609 - RNA, 18 nt, Human
aguauauuuauauaauua

SEQ ID NO: 3426610 - RNA, 13 nt, Human
aguauauuuuauu

SEQ ID NO: 3426611 - RNA, 19 nt, Human
aguauauuuuauuucaaug

SEQ ID NO: 3426612 - RNA, 16 nt, Human
aguaucaaguauagaa

SEQ ID NO: 3426613 - RNA, 17 nt, Human
aguaucaaguauagaaa

SEQ ID NO: 3426614 - RNA, 19 nt, Human
aguaucaauccuuguucag

SEQ ID NO: 3426615 - RNA, 14 nt, Human
aguaucagaauuga

SEQ ID NO: 3426616 - RNA, 18 nt, Human
aguaucagagauguccau

SEQ ID NO: 3426617 - RNA, 17 nt, Human
aguaucaguguuuuaaa

SEQ ID NO: 3426618 - RNA, 20 nt, Human
aguaucaguguuuuaaauuc

SEQ ID NO: 3426619 - RNA, 20 nt, Human
aguaucaucagauagcaucu

SEQ ID NO: 3426620 - RNA, 11 nt, Human
aguaucaugca

SEQ ID NO: 3426621 - RNA, 12 nt, Human
aguaucaugcau

SEQ ID NO: 3426622 - RNA, 14 nt, Human
aguaucaugcauuc

SEQ ID NO: 3426623 - RNA, 19 nt, Human
aguaucauggaaauauuau

SEQ ID NO: 3426624 - RNA, 11 nt, Human
aguauccaggc

SEQ ID NO: 3426625 - RNA, 23 nt, Human
aguauccaggcuuuguacagagu

SEQ ID NO: 3426626 - RNA, 13 nt, Human
aguauccuccagg

SEQ ID NO: 3426627 - RNA, 21 nt, Human
aguauccuccagguuuuucaa

SEQ ID NO: 3426628 - RNA, 20 nt, Human
aguauccugagagcccagaa

SEQ ID NO: 3426629 - RNA, 15 nt, Human
aguaucggcacugua

SEQ ID NO: 3426630 - RNA, 19 nt, Human
aguaucuccucgcaagcug

SEQ ID NO: 3426631 - RNA, 22 nt, Human
aguaucucggaccuuucagcug

SEQ ID NO: 3426632 - RNA, 14 nt, Human
aguaucuucaugua

SEQ ID NO: 3426633 - RNA, 12 nt, Human
aguaugaaaaua

SEQ ID NO: 3426634 - RNA, 19 nt, Human
aguaugaaaauggaaauuu

SEQ ID NO: 3426635 - RNA, 22 nt, Human
aguaugaauuauucaauuuauu

SEQ ID NO: 3426636 - RNA, 20 nt, Human
aguaugacgcugauacauaa

SEQ ID NO: 3426637 - RNA, 23 nt, Human
aguaugaggcauuuguuugaacu

SEQ ID NO: 3426638 - RNA, 21 nt, Human
aguaugcauuauuaaauugua

SEQ ID NO: 3426639 - RNA, 16 nt, Human
aguaugcuugcucuaa

SEQ ID NO: 3426640 - RNA, 20 nt, Human
aguaugcuuggacugaaggg

SEQ ID NO: 3426641 - RNA, 15 nt, Human
aguauggccuguguc

SEQ ID NO: 3426642 - RNA, 18 nt, Human
aguauggggguuguaaau

SEQ ID NO: 3426643 - RNA, 19 nt, Human
aguauggggguuguaaauu

SEQ ID NO: 3426644 - RNA, 18 nt, Human
aguauggguuagggaaaa

SEQ ID NO: 3426645 - RNA, 13 nt, Human
aguaugguacauu

SEQ ID NO: 3426646 - RNA, 23 nt, Human
aguaugguacauuuuucaacuuu

SEQ ID NO: 3426647 - RNA, 15 nt, Human
aguaugguggcuggg

SEQ ID NO: 3426648 - RNA, 13 nt, Human
aguauguaugugu

SEQ ID NO: 3426649 - RNA, 14 nt, Human
aguauguucaaagu

SEQ ID NO: 3426650 - RNA, 18 nt, Human
aguauguucuaaccuuua

SEQ ID NO: 3426651 - RNA, 22 nt, Human
aguauguucuaaccuuuacaug

SEQ ID NO: 3426652 - RNA, 17 nt, Human
aguauguuuuacacugu

SEQ ID NO: 3426653 - RNA, 16 nt, Human
aguauguuuuagcaug

SEQ ID NO: 3426654 - RNA, 15 nt, Human
aguauuaaaacauug

SEQ ID NO: 3426655 - RNA, 22 nt, Human
aguauuaaaacauuggauuauc

SEQ ID NO: 3426656 - RNA, 23 nt, Human
aguauuaaaacauuggauuaucc

SEQ ID NO: 3426657 - RNA, 15 nt, Human
aguauuaaagggggg

SEQ ID NO: 3426658 - RNA, 18 nt, Human
aguauuagaauaccacag

SEQ ID NO: 3426659 - RNA, 13 nt, Human
aguauuauaaauu

SEQ ID NO: 3426660 - RNA, 13 nt, Human
agguauggcucug

SEQ ID NO: 3426661 - RNA, 19 nt, Human
agguauuaaaacuaaauuu

SEQ ID NO: 3426662 - RNA, 13 nt, Human
agguauuaagauu

SEQ ID NO: 3426663 - RNA, 14 nt, Human
agguauuacacucu

SEQ ID NO: 3426664 - RNA, 13 nt, Human
agguauuauacau

SEQ ID NO: 3426665 - RNA, 17 nt, Human
agguauucgugcagcau

SEQ ID NO: 3426666 - RNA, 18 nt, Human
agguauucguuaucuaau

SEQ ID NO: 3426667 - RNA, 14 nt, Human
agguauuuaucuuu

SEQ ID NO: 3426668 - RNA, 14 nt, Human
agguauuucaaaac

SEQ ID NO: 3426669 - RNA, 14 nt, Human
agguauuuugaaua

SEQ ID NO: 3426670 - RNA, 17 nt, Human
aggucaacagagaaggc

SEQ ID NO: 3426671 - RNA, 19 nt, Human
aggucaacagagaaggcag

SEQ ID NO: 3426672 - RNA, 21 nt, Human
aggucaaggccugucccuggc

SEQ ID NO: 3426673 - RNA, 20 nt, Human
aggucaagggcuuacuauuu

SEQ ID NO: 3426674 - RNA, 17 nt, Human
aggucaaguaagaagac

SEQ ID NO: 3426675 - RNA, 23 nt, Human
aggucaauacaguacaggcagca

SEQ ID NO: 3426676 - RNA, 22 nt, Human
aggucacacgaccggggccagc

SEQ ID NO: 3426677 - RNA, 23 nt, Human
aggucacacgaccggggccagca

SEQ ID NO: 3426678 - RNA, 23 nt, Human
aggucacacgaggggccccgugu

SEQ ID NO: 3426679 - RNA, 21 nt, Human
aggucacucuuccugcaagga

SEQ ID NO: 3426680 - RNA, 17 nt, Human
aggucacuggcucucca

SEQ ID NO: 3426681 - RNA, 18 nt, Human
aggucacuggcucuccaa

SEQ ID NO: 3426682 - RNA, 19 nt, Human
aggucacuggcucuccaag

SEQ ID NO: 3426683 - RNA, 20 nt, Human
aggucacuggcucuccaagu

SEQ ID NO: 3426684 - RNA, 13 nt, Human
aggucagagccug

SEQ ID NO: 3426685 - RNA, 14 nt, Human
aggucagagccugc

SEQ ID NO: 3426686 - RNA, 15 nt, Human
aggucagagccugca

SEQ ID NO: 3426687 - RNA, 17 nt, Human
aggucagagccugcagu

SEQ ID NO: 3426688 - RNA, 18 nt, Human
aggucagagccugcaguu

SEQ ID NO: 3426689 - RNA, 21 nt, Human
aggucagcacaucucaacagg

SEQ ID NO: 3426690 - RNA, 15 nt, Human
aggucagcaugucua

SEQ ID NO: 3426691 - RNA, 15 nt, Human
aggucagcucagagc

SEQ ID NO: 3426692 - RNA, 16 nt, Human
aggucagcuugcugcc

SEQ ID NO: 3426693 - RNA, 21 nt, Human
aggucaggaguuagaggccag

SEQ ID NO: 3426694 - RNA, 15 nt, Human
aggucaggaguuccu

SEQ ID NO: 3426695 - RNA, 15 nt, Human
aggucaggaguucga

SEQ ID NO: 3426696 - RNA, 14 nt, Human
aggucaggcccugg

SEQ ID NO: 3426697 - RNA, 15 nt, Human
aggucaggcccugga

SEQ ID NO: 3426698 - RNA, 16 nt, Human
aggucagggagugcug

SEQ ID NO: 3426699 - RNA, 17 nt, Human
aggucaggggugacaca

SEQ ID NO: 3426700 - RNA, 22 nt, Human
aggucaggggugacacagacuc

SEQ ID NO: 3426701 - RNA, 23 nt, Human
aggucaucuccuuucauccccac

SEQ ID NO: 3426702 - RNA, 15 nt, Human
aggucauggccacac

SEQ ID NO: 3426703 - RNA, 16 nt, Human
aggucauggccacacu

SEQ ID NO: 3426704 - RNA, 18 nt, Human
aggucauggccacacugu

SEQ ID NO: 3426705 - RNA, 17 nt, Human
agccauguuuaagauuu

SEQ ID NO: 3426706 - RNA, 14 nt, Human
aguaagaggcugga

SEQ ID NO: 3426707 - RNA, 14 nt, Human
aguaagagguguua

SEQ ID NO: 3426708 - RNA, 12 nt, Human
aguaagauugau

SEQ ID NO: 3426709 - RNA, 22 nt, Human
aguaagauugauaucuauaaaa

SEQ ID NO: 3426710 - RNA, 12 nt, Human
aguaagccucau

SEQ ID NO: 3426711 - RNA, 21 nt, Human
aguaagccucaucaucagagc

SEQ ID NO: 3426712 - RNA, 22 nt, Human
aguaagcggcucaagcccagga

SEQ ID NO: 3426713 - RNA, 18 nt, Human
aguaagcugcucuauugu

SEQ ID NO: 3426714 - RNA, 12 nt, Human
aguaaggcugug

SEQ ID NO: 3426715 - RNA, 14 nt, Human
aguaaguaauuaug

SEQ ID NO: 3426716 - RNA, 20 nt, Human
aguaaguaauuaugcacuaa

SEQ ID NO: 3426717 - RNA, 17 nt, Human
aguaaguaccacucagg

SEQ ID NO: 3426718 - RNA, 23 nt, Human
aguaaguaucuucguucuuguua

SEQ ID NO: 3426719 - RNA, 15 nt, Human
aguaagucucaaggu

SEQ ID NO: 3426720 - RNA, 23 nt, Human
aguaagucuugccuauauuuucc

SEQ ID NO: 3426721 - RNA, 13 nt, Human
aguaagugccuuc

SEQ ID NO: 3426722 - RNA, 16 nt, Human
aguaagugccuuccau

SEQ ID NO: 3426723 - RNA, 23 nt, Human
aguaagugggguugcaaccacug

SEQ ID NO: 3426724 - RNA, 15 nt, Human
aguaaguuaauguau

SEQ ID NO: 3426725 - RNA, 17 nt, Human
aguaaguucagcacuug

SEQ ID NO: 3426726 - RNA, 16 nt, Human
aguaauaaaacaucuu

SEQ ID NO: 3426727 - RNA, 23 nt, Human
aguaauaaaauucaacaaacauu

SEQ ID NO: 3426728 - RNA, 19 nt, Human
aguaauaaaugaaugucac

SEQ ID NO: 3426729 - RNA, 13 nt, Human
aguaauacaaacu

SEQ ID NO: 3426730 - RNA, 13 nt, Human
aguaauagagcaa

SEQ ID NO: 3426731 - RNA, 19 nt, Human
aguaauaggagcuuccagc

SEQ ID NO: 3426732 - RNA, 20 nt, Human
aguaauauaauggaagagaa

SEQ ID NO: 3426733 - RNA, 17 nt, Human
aguaauauauuuaaagg

SEQ ID NO: 3426734 - RNA, 14 nt, Human
aguaauaugcacac

SEQ ID NO: 3426735 - RNA, 18 nt, Human
aguaauaugcacacauuu

SEQ ID NO: 3426736 - RNA, 20 nt, Human
aguaauaugcacacauuuuu

SEQ ID NO: 3426737 - RNA, 14 nt, Human
aguaaucaauaaag

SEQ ID NO: 3426738 - RNA, 18 nt, Human
aguaaucaauaaagaaaa

SEQ ID NO: 3426739 - RNA, 22 nt, Human
aguaaucaaucuacucaaagca

SEQ ID NO: 3426740 - RNA, 17 nt, Human
aguaaucaucuaaguca

SEQ ID NO: 3426741 - RNA, 15 nt, Human
aguaauccaagcaaa

SEQ ID NO: 3426742 - RNA, 22 nt, Human
aguaaucccgccaccuaucucg

SEQ ID NO: 3426743 - RNA, 12 nt, Human
aguaauccugua

SEQ ID NO: 3426744 - RNA, 13 nt, Human
aguaaucuguaca

SEQ ID NO: 3426745 - RNA, 13 nt, Human
aguaaucuguaua

SEQ ID NO: 3426746 - RNA, 14 nt, Human
aguaaucuguauaa

SEQ ID NO: 3426747 - RNA, 15 nt, Human
aguaaucuguauaau

SEQ ID NO: 3426748 - RNA, 23 nt, Human
aguaaucuguauaauacuuugua

SEQ ID NO: 3426749 - RNA, 13 nt, Human
aguaaucugugua

SEQ ID NO: 3426750 - RNA, 15 nt, Human
aguaaugaaauggag

SEQ ID NO: 3426751 - RNA, 22 nt, Human
aguaaugaauuuuuaugauauu

SEQ ID NO: 3426752 - RNA, 14 nt, Human
aguaaugaguuuaa

SEQ ID NO: 3426753 - RNA, 17 nt, Human
aguaaugauaacuggaa

SEQ ID NO: 3426754 - RNA, 19 nt, Human
aguaaugcuacgugugauu

SEQ ID NO: 3426755 - RNA, 15 nt, Human
aguaaugguguagaa

SEQ ID NO: 3426756 - RNA, 18 nt, Human
aguaauguggaagaaaau

SEQ ID NO: 3426757 - RNA, 13 nt, Human
aguaauuaucggg

SEQ ID NO: 3426758 - RNA, 15 nt, Human
aguaauucaagaaaa

SEQ ID NO: 3426759 - RNA, 19 nt, Human
aguaauucaagaaaacaac

SEQ ID NO: 3426760 - RNA, 20 nt, Human
aguaauugacaugugccagg

SEQ ID NO: 3426761 - RNA, 17 nt, Human
aguaauugcauuugcuu

SEQ ID NO: 3426762 - RNA, 12 nt, Human
aguaauuggaaa

SEQ ID NO: 3426763 - RNA, 22 nt, Human
aguaauugguccgaucuuugac

SEQ ID NO: 3426764 - RNA, 12 nt, Human
aguaauugugaa

SEQ ID NO: 3426765 - RNA, 23 nt, Human
aguaauuuagaaaucauuuugca

SEQ ID NO: 3426766 - RNA, 13 nt, Human
aguaauuucagug

SEQ ID NO: 3426767 - RNA, 14 nt, Human
aguaauuucagugu

SEQ ID NO: 3426768 - RNA, 14 nt, Human
aguaauuucuuuuu

SEQ ID NO: 3426769 - RNA, 21 nt, Human
aguaauuucuuuuuuuccuuu

SEQ ID NO: 3426770 - RNA, 21 nt, Human
aguaauuuguuuaaaaaguaa

SEQ ID NO: 3426771 - RNA, 13 nt, Human
aguacaaaugccu

SEQ ID NO: 3426772 - RNA, 21 nt, Human
aguacaaaugccuuaaaaugg

SEQ ID NO: 3426773 - RNA, 14 nt, Human
aguacaaauuauaa

SEQ ID NO: 3426774 - RNA, 17 nt, Human
aguacaaauuauaaaaa

SEQ ID NO: 3426775 - RNA, 19 nt, Human
aguacaaugugacuuugaa

SEQ ID NO: 3426776 - RNA, 17 nt, Human
aguacaauguguuuuuc

SEQ ID NO: 3426777 - RNA, 18 nt, Human
aguacaauguguuuuucu

SEQ ID NO: 3426778 - RNA, 20 nt, Human
aguacaauguguuuuucucc

SEQ ID NO: 3426779 - RNA, 18 nt, Human
aguacacaauaagcaaaa

SEQ ID NO: 3426780 - RNA, 20 nt, Human
aguacacagcaccagaaugu

SEQ ID NO: 3426781 - RNA, 19 nt, Human
aguacaccacaagggucac

SEQ ID NO: 3426782 - RNA, 17 nt, Human
aguacacucugcuguuu

SEQ ID NO: 3426783 - RNA, 20 nt, Human
aguacacuguuucaaacuuu

SEQ ID NO: 3426784 - RNA, 23 nt, Human
aguacacuguuucaaacuuuacu

SEQ ID NO: 3426785 - RNA, 19 nt, Human
aguacacuuuuaugagcuu

SEQ ID NO: 3426786 - RNA, 16 nt, Human
aguacagaauuugaau

SEQ ID NO: 3426787 - RNA, 12 nt, Human
aguacagagaag

SEQ ID NO: 3426788 - RNA, 13 nt, Human
aguacagagaagc

SEQ ID NO: 3426789 - RNA, 14 nt, Human
aguacagagaagcc

SEQ ID NO: 3426790 - RNA, 20 nt, Human
aguacagagaagccaucacc

SEQ ID NO: 3426791 - RNA, 21 nt, Human
aguacagugguucuacaaucu

SEQ ID NO: 3426792 - RNA, 17 nt, Human
aguacauauuaggaaaa

SEQ ID NO: 3426793 - RNA, 15 nt, Human
aguacauuuaaauuu

SEQ ID NO: 3426794 - RNA, 12 nt, Human
aguacauuuaau

SEQ ID NO: 3426795 - RNA, 13 nt, Human
aguacauuuuuug

SEQ ID NO: 3426796 - RNA, 16 nt, Human
aguaccagccccaccc

SEQ ID NO: 3426797 - RNA, 14 nt, Human
aguaccagcgcucu

SEQ ID NO: 3426798 - RNA, 15 nt, Human
aguaccaucugaaua

SEQ ID NO: 3426799 - RNA, 23 nt, Human
aguaccauuuaauggggaggaca

SEQ ID NO: 3426800 - RNA, 15 nt, Human
aguacccaaaagcuc

SEQ ID NO: 3426801 - RNA, 21 nt, Human
aguacccaaaagcucagccag

SEQ ID NO: 3426802 - RNA, 13 nt, Human
aguacccaccuga

SEQ ID NO: 3426803 - RNA, 15 nt, Human
aguacccaccugagc

SEQ ID NO: 3426804 - RNA, 16 nt, Human
aguacccaccugagcu

SEQ ID NO: 3426805 - RNA, 12 nt, Human
aguacccugguu

SEQ ID NO: 3426806 - RNA, 18 nt, Human
aguacccugguugugugu

SEQ ID NO: 3426807 - RNA, 19 nt, Human
aguacccugguuguguguc

SEQ ID NO: 3426808 - RNA, 12 nt, Human
aguaccuccugu

SEQ ID NO: 3426809 - RNA, 14 nt, Human
aguaccugaaaagu

SEQ ID NO: 3426810 - RNA, 18 nt, Human
aguaccugggcaagcugg

SEQ ID NO: 3426811 - RNA, 19 nt, Human
aguaccugggcaagcuggc

SEQ ID NO: 3426812 - RNA, 13 nt, Human
aguaccuuugcuc

SEQ ID NO: 3426813 - RNA, 16 nt, Human
aguaccuuugcucuug

SEQ ID NO: 3426814 - RNA, 21 nt, Human
aguaccuuugcucuugcagag

SEQ ID NO: 3426815 - RNA, 15 nt, Human
aguaccuuugucaca

SEQ ID NO: 3426816 - RNA, 14 nt, Human
aguacguugugcau

SEQ ID NO: 3426817 - RNA, 22 nt, Human
aguacuacaguccucccaucuc

SEQ ID NO: 3426818 - RNA, 21 nt, Human
aguacuagagauauuuuguaa

SEQ ID NO: 3426819 - RNA, 14 nt, Human
aguacuauaauuua

SEQ ID NO: 3426820 - RNA, 14 nt, Human
aguacuauaucugu

SEQ ID NO: 3426821 - RNA, 22 nt, Human
aguacuauaucuguuuuacugc

SEQ ID NO: 3426822 - RNA, 12 nt, Human
aguacuauguau

SEQ ID NO: 3426823 - RNA, 14 nt, Human
aguacuauguauca

SEQ ID NO: 3426824 - RNA, 14 nt, Human
aguacuccacacug

SEQ ID NO: 3426825 - RNA, 18 nt, Human
aguacuccacacugcaca

SEQ ID NO: 3426826 - RNA, 19 nt, Human
aguacuccugcaaaauuuu

SEQ ID NO: 3426827 - RNA, 19 nt, Human
aguacuccuuaagaacaca

SEQ ID NO: 3426828 - RNA, 23 nt, Human
aguacugguaagauuguuauuaa

SEQ ID NO: 3426829 - RNA, 23 nt, Human
aguacuguaauaauaccucaaug

SEQ ID NO: 3426830 - RNA, 21 nt, Human
aguacugugggcaauuuagaa

SEQ ID NO: 3426831 - RNA, 23 nt, Human
aguacugugggcaauuuagaaaa

SEQ ID NO: 3426832 - RNA, 16 nt, Human
aguacuguguacagaa

SEQ ID NO: 3426833 - RNA, 17 nt, Human
aguacuguuuaccauuu

SEQ ID NO: 3426834 - RNA, 18 nt, Human
aguacuucagcaagagag

SEQ ID NO: 3426835 - RNA, 22 nt, Human
aguacuucagcaagagagaacc

SEQ ID NO: 3426836 - RNA, 19 nt, Human
aguacuugaaaucuaggau

SEQ ID NO: 3426837 - RNA, 17 nt, Human
aguacuuguaguuccac

SEQ ID NO: 3426838 - RNA, 17 nt, Human
aguacuugucauaugua

SEQ ID NO: 3426839 - RNA, 20 nt, Human
aguacuugugaaacacagcu

SEQ ID NO: 3426840 - RNA, 22 nt, Human
aguacuugugaaacacagcugu

SEQ ID NO: 3426841 - RNA, 23 nt, Human
aguacuugugaaacacagcuguu

SEQ ID NO: 3426842 - RNA, 16 nt, Human
aguacuuuauagaaga

SEQ ID NO: 3426843 - RNA, 16 nt, Human
aguacuuugugcauuc

SEQ ID NO: 3426844 - RNA, 20 nt, Human
aguagaaagacagagcuggg

SEQ ID NO: 3426845 - RNA, 18 nt, Human
aguagaaaggccuuuaaa

SEQ ID NO: 3426846 - RNA, 15 nt, Human
aguagaacuuuguau

SEQ ID NO: 3426847 - RNA, 20 nt, Human
aguagaagauuugaugcugg

SEQ ID NO: 3426848 - RNA, 17 nt, Human
aguagaagucuuagaug

SEQ ID NO: 3426849 - RNA, 20 nt, Human
aguagaagucuuagauguau

SEQ ID NO: 3426850 - RNA, 13 nt, Human
aguauuauaugua

SEQ ID NO: 3426851 - RNA, 17 nt, Human
aguauuaucaaagggau

SEQ ID NO: 3426852 - RNA, 23 nt, Human
aguauucaagaaagccagucuua

SEQ ID NO: 3426853 - RNA, 14 nt, Human
aguauucauucugc

SEQ ID NO: 3426854 - RNA, 23 nt, Human
aguauuccaccuuaaauuaaaca

SEQ ID NO: 3426855 - RNA, 20 nt, Human
aguauuccauugugugagug

SEQ ID NO: 3426856 - RNA, 16 nt, Human
aguauucuaauaagcu

SEQ ID NO: 3426857 - RNA, 21 nt, Human
aguauucuaauaagcuaguug

SEQ ID NO: 3426858 - RNA, 23 nt, Human
aguauucuaauaagcuaguugaa

SEQ ID NO: 3426859 - RNA, 15 nt, Human
aguauucucauucuu

SEQ ID NO: 3426860 - RNA, 16 nt, Human
aguauucucauucuuc

SEQ ID NO: 3426861 - RNA, 13 nt, Human
agucuguugugug

SEQ ID NO: 3426862 - RNA, 16 nt, Human
agucuguuguguguca

SEQ ID NO: 3426863 - RNA, 12 nt, Human
agucuguuuuau

SEQ ID NO: 3426864 - RNA, 13 nt, Human
agucuguuuuaug

SEQ ID NO: 3426865 - RNA, 14 nt, Human
agucuguuuuauga

SEQ ID NO: 3426866 - RNA, 13 nt, Human
agucuuaagaacu

SEQ ID NO: 3426867 - RNA, 16 nt, Human
agucuuacgaauacuu

SEQ ID NO: 3426868 - RNA, 23 nt, Human
agucuuaucugagcugagccagg

SEQ ID NO: 3426869 - RNA, 18 nt, Human
agucuuaugcuuccagaa

SEQ ID NO: 3426870 - RNA, 23 nt, Human
agucuucaagcagauuggagaaa

SEQ ID NO: 3426871 - RNA, 17 nt, Human
agucuucacucucugaa

SEQ ID NO: 3426872 - RNA, 15 nt, Human
agucuuccaauuaau

SEQ ID NO: 3426873 - RNA, 22 nt, Human
agucuuccaauuaaugcuuuuu

SEQ ID NO: 3426874 - RNA, 21 nt, Human
agucuuccacaaagaaaauuc

SEQ ID NO: 3426875 - RNA, 16 nt, Human
agucuuccaccuggaa

SEQ ID NO: 3426876 - RNA, 17 nt, Human
agucuuccaccuggaag

SEQ ID NO: 3426877 - RNA, 22 nt, Human
agucuucccuagggcugggugu

SEQ ID NO: 3426878 - RNA, 13 nt, Human
agucuucccugau

SEQ ID NO: 3426879 - RNA, 20 nt, Human
agucuucucauagcauuaac

SEQ ID NO: 3426880 - RNA, 17 nt, Human
agucuucugacaaacug

SEQ ID NO: 3426881 - RNA, 16 nt, Human
agucuugcagugauua

SEQ ID NO: 3426882 - RNA, 18 nt, Human
agucuugccuauauuuuc

SEQ ID NO: 3426883 - RNA, 15 nt, Human
agucuuggcucacug

SEQ ID NO: 3426884 - RNA, 23 nt, Human
agucuugguuucucucuacagug

SEQ ID NO: 3426885 - RNA, 16 nt, Human
agucuuguauuaaguu

SEQ ID NO: 3426886 - RNA, 18 nt, Human
agucuuguauuaaguugu

SEQ ID NO: 3426887 - RNA, 16 nt, Human
agucuugucucagauu

SEQ ID NO: 3426888 - RNA, 20 nt, Human
agucuugugacuagugcuga

SEQ ID NO: 3426889 - RNA, 21 nt, Human
agucuugugacuagugcugaa

SEQ ID NO: 3426890 - RNA, 23 nt, Human
agucuugugacuagugcugaagc

SEQ ID NO: 3426891 - RNA, 20 nt, Human
agucuuuaaaggcccagccc

SEQ ID NO: 3426892 - RNA, 21 nt, Human
agucuuuaaaggcccagcccc

SEQ ID NO: 3426893 - RNA, 21 nt, Human
agucuuuaggucuuuguaaga

SEQ ID NO: 3426894 - RNA, 17 nt, Human
agucuuucauggcugcu

SEQ ID NO: 3426895 - RNA, 15 nt, Human
agucuuucucuuucc

SEQ ID NO: 3426896 - RNA, 20 nt, Human
agucuuucucuuucccuggu

SEQ ID NO: 3426897 - RNA, 23 nt, Human
agucuuucucuuucccugguccc

SEQ ID NO: 3426898 - RNA, 14 nt, Human
agucuuuguacaga

SEQ ID NO: 3426899 - RNA, 13 nt, Human
agucuuuuaaaaa

SEQ ID NO: 3426900 - RNA, 13 nt, Human
agucuuuugcuuu

SEQ ID NO: 3426901 - RNA, 22 nt, Human
agucuuuugcuuuugcccauuu

SEQ ID NO: 3426902 - RNA, 11 nt, Human
agucuuuuguc

SEQ ID NO: 3426903 - RNA, 22 nt, Human
agucuuuuguucgcauggucac

SEQ ID NO: 3426904 - RNA, 19 nt, Human
agucuuuuucuguuguaac

SEQ ID NO: 3426905 - RNA, 21 nt, Human
agucuuuuucuguuguaacuu

SEQ ID NO: 3426906 - RNA, 20 nt, Human
agugaaaaaggaggaagaga

SEQ ID NO: 3426907 - RNA, 14 nt, Human
agugaaaaaugaga

SEQ ID NO: 3426908 - RNA, 20 nt, Human
agugaaaacaagugcuggca

SEQ ID NO: 3426909 - RNA, 12 nt, Human
agugaaaacuag

SEQ ID NO: 3426910 - RNA, 14 nt, Human
agugaaaauaggua

SEQ ID NO: 3426911 - RNA, 22 nt, Human
agugaaaaucuuggagacccug

SEQ ID NO: 3426912 - RNA, 21 nt, Human
agugaaacugcuuguuuccua

SEQ ID NO: 3426913 - RNA, 24 nt, Human
agugaaacugcuuguuuccuagca

SEQ ID NO: 3426914 - RNA, 15 nt, Human
agugaaacuuuucua

SEQ ID NO: 3426915 - RNA, 15 nt, Human
agugaaagaaaauaa

SEQ ID NO: 3426916 - RNA, 17 nt, Human
agugaaagaaaauaaca

SEQ ID NO: 3426917 - RNA, 17 nt, Human
agugaaagacaagcugc

SEQ ID NO: 3426918 - RNA, 15 nt, Human
agugaaauaaugugu

SEQ ID NO: 3426919 - RNA, 14 nt, Human
agugaaauuucuag

SEQ ID NO: 3426920 - RNA, 17 nt, Human
agugaaauuucuagccu

SEQ ID NO: 3426921 - RNA, 16 nt, Human
agugaacaaauuuaca

SEQ ID NO: 3426922 - RNA, 17 nt, Human
agugaacacuagccaga

SEQ ID NO: 3426923 - RNA, 13 nt, Human
agugaaccaucau

SEQ ID NO: 3426924 - RNA, 13 nt, Human
agugaagacagaa

SEQ ID NO: 3426925 - RNA, 15 nt, Human
agugaagacuccaga

SEQ ID NO: 3426926 - RNA, 16 nt, Human
agugaagacuggaagc

SEQ ID NO: 3426927 - RNA, 19 nt, Human
agugaagagggagaaggga

SEQ ID NO: 3426928 - RNA, 16 nt, Human
agugaagaggggcagc

SEQ ID NO: 3426929 - RNA, 21 nt, Human
agugaagaggggcagcccuug

SEQ ID NO: 3426930 - RNA, 23 nt, Human
agugaagggaagagacagcccag

SEQ ID NO: 3426931 - RNA, 23 nt, Human
agugaagguuuacaauuuacaaa

SEQ ID NO: 3426932 - RNA, 13 nt, Human
agugaauaaacuu

SEQ ID NO: 3426933 - RNA, 14 nt, Human
agugaauaaacuuc

SEQ ID NO: 3426934 - RNA, 16 nt, Human
agugaauaaacuucag

SEQ ID NO: 3426935 - RNA, 17 nt, Human
agugaauaaacuucagc

SEQ ID NO: 3426936 - RNA, 17 nt, Human
agugaauaaaugucuug

SEQ ID NO: 3426937 - RNA, 17 nt, Human
agugaauaaccugagga

SEQ ID NO: 3426938 - RNA, 14 nt, Human
agugaaugaaagau

SEQ ID NO: 3426939 - RNA, 17 nt, Human
agugaaugccagugugc

SEQ ID NO: 3426940 - RNA, 14 nt, Human
agugaaugcuggga

SEQ ID NO: 3426941 - RNA, 17 nt, Human
agugaauguaggcuggc

SEQ ID NO: 3426942 - RNA, 19 nt, Human
agugaauuaguuuuaaaau

SEQ ID NO: 3426943 - RNA, 15 nt, Human
agugaauucccucac

SEQ ID NO: 3426944 - RNA, 16 nt, Human
agugaauucccucacu

SEQ ID NO: 3426945 - RNA, 17 nt, Human
agugaauucccucacuc

SEQ ID NO: 3426946 - RNA, 23 nt, Human
agugaauucccucacucgucucc

SEQ ID NO: 3426947 - RNA, 15 nt, Human
agugaauuugaauga

SEQ ID NO: 3426948 - RNA, 19 nt, Human
agugaauuugaaugaaaaa

SEQ ID NO: 3426949 - RNA, 14 nt, Human
agugaauuugccug

SEQ ID NO: 3426950 - RNA, 16 nt, Human
agugaauuuuucucua

SEQ ID NO: 3426951 - RNA, 24 nt, Human
agugacaaauaaauuaggaccaag

SEQ ID NO: 3426952 - RNA, 15 nt, Human
agugacaaggcccca

SEQ ID NO: 3426953 - RNA, 21 nt, Human
agugacaaggccccagagacu

SEQ ID NO: 3426954 - RNA, 18 nt, Human
agugacacagcagcuuca

SEQ ID NO: 3426955 - RNA, 23 nt, Human
agugacacagcagcuucaccaga

SEQ ID NO: 3426956 - RNA, 15 nt, Human
agugacacuucagag

SEQ ID NO: 3426957 - RNA, 16 nt, Human
agugacagacaggcuc

SEQ ID NO: 3426958 - RNA, 21 nt, Human
agugacagaccacaucuuuau

SEQ ID NO: 3426959 - RNA, 16 nt, Human
agugacagaggcagcc

SEQ ID NO: 3426960 - RNA, 11 nt, Human
agugacagcua

SEQ ID NO: 3426961 - RNA, 22 nt, Human
agugacaucucuuugaugucau

SEQ ID NO: 3426962 - RNA, 18 nt, Human
agugaccauacuaauuau

SEQ ID NO: 3426963 - RNA, 14 nt, Human
agugaccccugccu

SEQ ID NO: 3426964 - RNA, 14 nt, Human
agugacccugcucu

SEQ ID NO: 3426965 - RNA, 17 nt, Human
agugaccugaggaagcg

SEQ ID NO: 3426966 - RNA, 14 nt, Human
agugaccuguuuau

SEQ ID NO: 3426967 - RNA, 16 nt, Human
agugacuaguacaaau

SEQ ID NO: 3426968 - RNA, 17 nt, Human
agugacuaguacaaauu

SEQ ID NO: 3426969 - RNA, 22 nt, Human
agugacuaugaacuucucucag

SEQ ID NO: 3426970 - RNA, 18 nt, Human
agugacuccaagaacaau

SEQ ID NO: 3426971 - RNA, 18 nt, Human
agugacucuauauagcug

SEQ ID NO: 3426972 - RNA, 19 nt, Human
agugacugaacgauccuuc

SEQ ID NO: 3426973 - RNA, 20 nt, Human
agugacuguaucuguguaga

SEQ ID NO: 3426974 - RNA, 20 nt, Human
agugacuguggccauggucc

SEQ ID NO: 3426975 - RNA, 20 nt, Human
agugacuguucaagagcaca

SEQ ID NO: 3426976 - RNA, 14 nt, Human
agugagaaaaagcu

SEQ ID NO: 3426977 - RNA, 19 nt, Human
agugagaaaaagcuccugu

SEQ ID NO: 3426978 - RNA, 20 nt, Human
agugagaagcuuugcccucc

SEQ ID NO: 3426979 - RNA, 16 nt, Human
agugagacaaaauuuu

SEQ ID NO: 3426980 - RNA, 14 nt, Human
agugagacagcucu

SEQ ID NO: 3426981 - RNA, 20 nt, Human
agugagaccuuccuuuuacu

SEQ ID NO: 3426982 - RNA, 13 nt, Human
agugagacucugu

SEQ ID NO: 3426983 - RNA, 17 nt, Human
agugagacucugucuca

SEQ ID NO: 3426984 - RNA, 22 nt, Human
agugagacucugucucaaaaaa

SEQ ID NO: 3426985 - RNA, 13 nt, Human
agugagagacauu

SEQ ID NO: 3426986 - RNA, 21 nt, Human
agugagagacauuaacucauu

SEQ ID NO: 3426987 - RNA, 13 nt, Human
agugagagagaca

SEQ ID NO: 3426988 - RNA, 18 nt, Human
agugagagagacaagaag

SEQ ID NO: 3426989 - RNA, 21 nt, Human
agugagagaguggcuggggca

SEQ ID NO: 3426990 - RNA, 14 nt, Human
agugagagcagaug

SEQ ID NO: 3426991 - RNA, 23 nt, Human
agugagagcgugcuccagccugg

SEQ ID NO: 3426992 - RNA, 14 nt, Human
agugagagcugggu

SEQ ID NO: 3426993 - RNA, 19 nt, Human
agugagauagcauugugaa

SEQ ID NO: 3426994 - RNA, 16 nt, Human
agucacugccugcaga

SEQ ID NO: 3426995 - RNA, 12 nt, Human
agucacugcucu

SEQ ID NO: 3426996 - RNA, 21 nt, Human
agucacuggagguugaagcca

SEQ ID NO: 3426997 - RNA, 22 nt, Human
agucacuggagguugaagccaa

SEQ ID NO: 3426998 - RNA, 23 nt, Human
agucacugugagcucccaggugc

SEQ ID NO: 3426999 - RNA, 16 nt, Human
agucacuuauuucaua

SEQ ID NO: 3427000 - RNA, 12 nt, Human
agucagaacagc

SEQ ID NO: 3427001 - RNA, 22 nt, Human
agucagaacagcagacucagcu

SEQ ID NO: 3427002 - RNA, 23 nt, Human
agucagacuggauaguccgucuc

SEQ ID NO: 3427003 - RNA, 19 nt, Human
agucagagacagauaccuc

SEQ ID NO: 3427004 - RNA, 14 nt, Human
agucagaggauggc

SEQ ID NO: 3427005 - RNA, 19 nt, Human
agucagaggauggccagug

SEQ ID NO: 3427006 - RNA, 20 nt, Human
agucagaucugccuaaggac

SEQ ID NO: 3427007 - RNA, 21 nt, Human
agucagaucugccuaaggacu

SEQ ID NO: 3427008 - RNA, 22 nt, Human
agucagaucugccuaaggacuu

SEQ ID NO: 3427009 - RNA, 23 nt, Human
agucagaucugccuaaggacuuc

SEQ ID NO: 3427010 - RNA, 22 nt, Human
agucagauggaaaauucauuuu

SEQ ID NO: 3427011 - RNA, 11 nt, Human
agucagccucu

SEQ ID NO: 3427012 - RNA, 20 nt, Human
agucagcucuucaucugccc

SEQ ID NO: 3427013 - RNA, 19 nt, Human
agucagcuuugccuuccac

SEQ ID NO: 3427014 - RNA, 12 nt, Human
agucaggaaagg

SEQ ID NO: 3427015 - RNA, 17 nt, Human
agucaggcccaggcacu

SEQ ID NO: 3427016 - RNA, 17 nt, Human
agucaggcucucugggc

SEQ ID NO: 3427017 - RNA, 19 nt, Human
agucagggaccccugcccu

SEQ ID NO: 3427018 - RNA, 16 nt, Human
agucagggcccagagg

SEQ ID NO: 3427019 - RNA, 20 nt, Human
agucagggcccagaggcuga

SEQ ID NO: 3427020 - RNA, 18 nt, Human
agugaggcauugcacagg

SEQ ID NO: 3427021 - RNA, 18 nt, Human
agugaggccacugaagag

SEQ ID NO: 3427022 - RNA, 13 nt, Human
agugaggcucugc

SEQ ID NO: 3427023 - RNA, 21 nt, Human
agugaggcucugcccuugguu

SEQ ID NO: 3427024 - RNA, 19 nt, Human
agugagggagggcugucau

SEQ ID NO: 3427025 - RNA, 24 nt, Human
agugagggguaaaagcugaucugg

SEQ ID NO: 3427026 - RNA, 15 nt, Human
agugagggucagaga

SEQ ID NO: 3427027 - RNA, 21 nt, Human
agugaggguuucugagcugcu

SEQ ID NO: 3427028 - RNA, 22 nt, Human
agugaggugugucacaaugaga

SEQ ID NO: 3427029 - RNA, 20 nt, Human
agugaguaauuuuggauuuu

SEQ ID NO: 3427030 - RNA, 17 nt, Human
agugagucucucugggc

SEQ ID NO: 3427031 - RNA, 13 nt, Human
agugagugagccu

SEQ ID NO: 3427032 - RNA, 19 nt, Human
agugagugugcugcuguaa

SEQ ID NO: 3427033 - RNA, 19 nt, Human
agugaguuggguguauugu

SEQ ID NO: 3427034 - RNA, 21 nt, Human
agugaguuggguguauugugc

SEQ ID NO: 3427035 - RNA, 19 nt, Human
agugaguuuuuuagugcgu

SEQ ID NO: 3427036 - RNA, 21 nt, Human
agugauaacuccuaagaggag

SEQ ID NO: 3427037 - RNA, 15 nt, Human
agugauagucuuuug

SEQ ID NO: 3427038 - RNA, 14 nt, Human
agugauauaaauca

SEQ ID NO: 3427039 - RNA, 15 nt, Human
agugauauggagcaa

SEQ ID NO: 3427040 - RNA, 14 nt, Human
agugauauggcaga

SEQ ID NO: 3427041 - RNA, 18 nt, Human
agugauauucuuuguuaa

SEQ ID NO: 3427042 - RNA, 14 nt, Human
agugauauuucucu

SEQ ID NO: 3427043 - RNA, 17 nt, Human
agugaucaauaaaaugu

SEQ ID NO: 3427044 - RNA, 16 nt, Human
agugaucacagcagcu

SEQ ID NO: 3427045 - RNA, 13 nt, Human
agugauccuccca

SEQ ID NO: 3427046 - RNA, 18 nt, Human
agugauccucccaccuca

SEQ ID NO: 3427047 - RNA, 19 nt, Human
agugauccucccaccucag

SEQ ID NO: 3427048 - RNA, 22 nt, Human
agugauccucccaccucagccu

SEQ ID NO: 3427049 - RNA, 16 nt, Human
agugauccuuacaagu

SEQ ID NO: 3427050 - RNA, 13 nt, Human
agugaucuccaua

SEQ ID NO: 3427051 - RNA, 14 nt, Human
agugaucuccauau

SEQ ID NO: 3427052 - RNA, 17 nt, Human
agugaugcuaaaaccug

SEQ ID NO: 3427053 - RNA, 18 nt, Human
agugauggagcagagcaa

SEQ ID NO: 3427054 - RNA, 18 nt, Human
agugauguaauuaugguu

SEQ ID NO: 3427055 - RNA, 16 nt, Human
agugauguaccaugaa

SEQ ID NO: 3427056 - RNA, 19 nt, Human
agugaugucacuagggcag

SEQ ID NO: 3427057 - RNA, 18 nt, Human
agugauuaaggucucucu

SEQ ID NO: 3427058 - RNA, 19 nt, Human
agugauuaaggucucucuu

SEQ ID NO: 3427059 - RNA, 14 nt, Human
agugauuacuguca

SEQ ID NO: 3427060 - RNA, 21 nt, Human
agugauucucaugccucagcc

SEQ ID NO: 3427061 - RNA, 18 nt, Human
agugauucuccugccuca

SEQ ID NO: 3427062 - RNA, 19 nt, Human
agugauucuccugccucag

SEQ ID NO: 3427063 - RNA, 20 nt, Human
agugauucuccugccucagc

SEQ ID NO: 3427064 - RNA, 13 nt, Human
agugauugcagcu

SEQ ID NO: 3427065 - RNA, 18 nt, Human
agugcaaauugucacagg

SEQ ID NO: 3427066 - RNA, 21 nt, Human
agugcaaauugucacaggaca

SEQ ID NO: 3427067 - RNA, 17 nt, Human
agugcaacacugaagcu

SEQ ID NO: 3427068 - RNA, 18 nt, Human
agugcaaccacacaccuc

SEQ ID NO: 3427069 - RNA, 14 nt, Human
agugcaaccucugc

SEQ ID NO: 3427070 - RNA, 15 nt, Human
agugcaaccucugcu

SEQ ID NO: 3427071 - RNA, 21 nt, Human
agugcaauaaaucugacccag

SEQ ID NO: 3427072 - RNA, 14 nt, Human
agugcacaaaauga

SEQ ID NO: 3427073 - RNA, 17 nt, Human
agugcacaaaaugaaug

SEQ ID NO: 3427074 - RNA, 16 nt, Human
agugcacacagaaaua

SEQ ID NO: 3427075 - RNA, 20 nt, Human
agugcacacagaaauauaua

SEQ ID NO: 3427076 - RNA, 14 nt, Human
agugcacagcuguc

SEQ ID NO: 3427077 - RNA, 15 nt, Human
agugcacagcugucc

SEQ ID NO: 3427078 - RNA, 12 nt, Human
agugcacaugaa

SEQ ID NO: 3427079 - RNA, 16 nt, Human
agugcaccaaagagaa

SEQ ID NO: 3427080 - RNA, 18 nt, Human
agugcaccaaagagaaug

SEQ ID NO: 3427081 - RNA, 13 nt, Human
agugcacccacuc

SEQ ID NO: 3427082 - RNA, 17 nt, Human
agugcacccacucugcu

SEQ ID NO: 3427083 - RNA, 16 nt, Human
agugcacuugcuggaa

SEQ ID NO: 3427084 - RNA, 18 nt, Human
agugcacuugcuggaaga

SEQ ID NO: 3427085 - RNA, 23 nt, Human
agugcagaauguaagugggccca

SEQ ID NO: 3427086 - RNA, 21 nt, Human
agugcagccaaguagccucuc

SEQ ID NO: 3427087 - RNA, 24 nt, Human
agugcagcccguguggccccuuca

SEQ ID NO: 3427088 - RNA, 17 nt, Human
agugcagccguuugaga

SEQ ID NO: 3427089 - RNA, 18 nt, Human
agugcagccguuugagaa

SEQ ID NO: 3427090 - RNA, 20 nt, Human
agugcagcugauuuuaacaa

SEQ ID NO: 3427091 - RNA, 12 nt, Human
agugcaggccca

SEQ ID NO: 3427092 - RNA, 14 nt, Human
agugcaggcuggcc

SEQ ID NO: 3427093 - RNA, 14 nt, Human
agugcaguauagaa

SEQ ID NO: 3427094 - RNA, 23 nt, Human
agugcaguggcgcgaucucagcu

SEQ ID NO: 3427095 - RNA, 23 nt, Human
agugcaguggugcgaucauggcu

SEQ ID NO: 3427096 - RNA, 21 nt, Human
agugcauaguuguagacaaag

SEQ ID NO: 3427097 - RNA, 14 nt, Human
agugcauauuccuu

SEQ ID NO: 3427098 - RNA, 16 nt, Human
agugcauauuccuuuc

SEQ ID NO: 3427099 - RNA, 18 nt, Human
agugcauauuccuuucua

SEQ ID NO: 3427100 - RNA, 19 nt, Human
agugcauauuccuuucuau

SEQ ID NO: 3427101 - RNA, 16 nt, Human
agugcauauuuaucca

SEQ ID NO: 3427102 - RNA, 14 nt, Human
agugcaucuacuug

SEQ ID NO: 3427103 - RNA, 22 nt, Human
agugcaugcucucugcagccag

SEQ ID NO: 3427104 - RNA, 16 nt, Human
agugcaugguggccag

SEQ ID NO: 3427105 - RNA, 19 nt, Human
agugcaugguggccagagg

SEQ ID NO: 3427106 - RNA, 15 nt, Human
agugcauuguuucug

SEQ ID NO: 3427107 - RNA, 17 nt, Human
agugcauuguuucugug

SEQ ID NO: 3427108 - RNA, 16 nt, Human
agugcauuucugaaua

SEQ ID NO: 3427109 - RNA, 21 nt, Human
agugcauuugugcuagaaauu

SEQ ID NO: 3427110 - RNA, 16 nt, Human
agugccaaaaacaaca

SEQ ID NO: 3427111 - RNA, 12 nt, Human
agugccaaagaa

SEQ ID NO: 3427112 - RNA, 14 nt, Human
agugccaaaugcuc

SEQ ID NO: 3427113 - RNA, 16 nt, Human
agugccaacaauccua

SEQ ID NO: 3427114 - RNA, 16 nt, Human
agugccaacuguggcu

SEQ ID NO: 3427115 - RNA, 19 nt, Human
agugccaagcacagugccu

SEQ ID NO: 3427116 - RNA, 22 nt, Human
agugccaaggaccuccucuucc

SEQ ID NO: 3427117 - RNA, 17 nt, Human
agugccacuguuguuuu

SEQ ID NO: 3427118 - RNA, 18 nt, Human
agugccagaggugggcag

SEQ ID NO: 3427119 - RNA, 21 nt, Human
agugccagaggugggcaggug

SEQ ID NO: 3427120 - RNA, 23 nt, Human
agugccaggacuccccaggccag

SEQ ID NO: 3427121 - RNA, 20 nt, Human
agugccagucuugugucugc

SEQ ID NO: 3427122 - RNA, 16 nt, Human
agugccauuaacaaau

SEQ ID NO: 3427123 - RNA, 14 nt, Human
agugccauugucuu

SEQ ID NO: 3427124 - RNA, 18 nt, Human
agugccauugucuuuaua

SEQ ID NO: 3427125 - RNA, 19 nt, Human
agugcccaccaacauccca

SEQ ID NO: 3427126 - RNA, 13 nt, Human
agugcccaggugg

SEQ ID NO: 3427127 - RNA, 13 nt, Human
agugcccauuccu

SEQ ID NO: 3427128 - RNA, 13 nt, Human
agugccccaccug

SEQ ID NO: 3427129 - RNA, 17 nt, Human
agugccccaccugccac

SEQ ID NO: 3427130 - RNA, 19 nt, Human
agugccccauucuuuugua

SEQ ID NO: 3427131 - RNA, 20 nt, Human
agugccccgucuacagcucc

SEQ ID NO: 3427132 - RNA, 12 nt, Human
agugccccugcu

SEQ ID NO: 3427133 - RNA, 14 nt, Human
agugccccugcugc

SEQ ID NO: 3427134 - RNA, 14 nt, Human
agugcccuccagcc

SEQ ID NO: 3427135 - RNA, 15 nt, Human
agugcccuccagccc

SEQ ID NO: 3427136 - RNA, 16 nt, Human
agugcccuccaggaua

SEQ ID NO: 3427137 - RNA, 19 nt, Human
agugcccucucccacccuc

SEQ ID NO: 3427138 - RNA, 20 nt, Human
agucuugugcuuuuccuauu

SEQ ID NO: 3427139 - RNA, 19 nt, Human
agucuuuaaaggcccagcc

SEQ ID NO: 3427140 - RNA, 13 nt, Human
agucuuuaauaaa

SEQ ID NO: 3427141 - RNA, 14 nt, Human
agucuuuaauaaau

SEQ ID NO: 3427142 - RNA, 18 nt, Human
agucuuuagcuauuacug

SEQ ID NO: 3427143 - RNA, 15 nt, Human
agucuuuaggucuuu

SEQ ID NO: 3427144 - RNA, 16 nt, Human
agucuuucaagaauga

SEQ ID NO: 3427145 - RNA, 18 nt, Human
agucuuucacauuuaaau

SEQ ID NO: 3427146 - RNA, 20 nt, Human
agucuuucuuagugccugug

SEQ ID NO: 3427147 - RNA, 16 nt, Human
agucuuucuucuucaa

SEQ ID NO: 3427148 - RNA, 17 nt, Human
agucuuugaagcugaaa

SEQ ID NO: 3427149 - RNA, 12 nt, Human
agucuuuggggu

SEQ ID NO: 3427150 - RNA, 15 nt, Human
agucuuugguucuaa

SEQ ID NO: 3427151 - RNA, 22 nt, Human
agucuuuguaaguaaacugccc

SEQ ID NO: 3427152 - RNA, 19 nt, Human
agucuuuuaaaaaguauug

SEQ ID NO: 3427153 - RNA, 20 nt, Human
agucuuuuaaaaaguauugc

SEQ ID NO: 3427154 - RNA, 13 nt, Human
agucuuuuccaug

SEQ ID NO: 3427155 - RNA, 15 nt, Human
agucuuuuccaugaa

SEQ ID NO: 3427156 - RNA, 18 nt, Human
agucuuuugcuuuuggca

SEQ ID NO: 3427157 - RNA, 19 nt, Human
agucuuuugcuuuuggcaa

SEQ ID NO: 3427158 - RNA, 17 nt, Human
agucuuuuguucgcaug

SEQ ID NO: 3427159 - RNA, 13 nt, Human
agucuuuuucugu

SEQ ID NO: 3427160 - RNA, 14 nt, Human
agucuuuuucuguu

SEQ ID NO: 3427161 - RNA, 18 nt, Human
agucuuuuucuguuguaa

SEQ ID NO: 3427162 - RNA, 20 nt, Human
agucuuuuucuguuguaacu

SEQ ID NO: 3427163 - RNA, 17 nt, Human
agucuuuuuuuuuuaag

SEQ ID NO: 3427164 - RNA, 11 nt, Human
agugaaaaagg

SEQ ID NO: 3427165 - RNA, 17 nt, Human
agugaaaaaggaggaag

SEQ ID NO: 3427166 - RNA, 23 nt, Human
agugaaaaaggaggaagagaaaa

SEQ ID NO: 3427167 - RNA, 19 nt, Human
agugaaaacaagugcuggc

SEQ ID NO: 3427168 - RNA, 15 nt, Human
agugaaaacuuugua

SEQ ID NO: 3427169 - RNA, 14 nt, Human
agugaaaauauagc

SEQ ID NO: 3427170 - RNA, 20 nt, Human
agugaaaccuuuagggcagc

SEQ ID NO: 3427171 - RNA, 22 nt, Human
agugaaaccuuuagggcagcuu

SEQ ID NO: 3427172 - RNA, 20 nt, Human
agugaaacucguuaauuugu

SEQ ID NO: 3427173 - RNA, 21 nt, Human
agugaaagugaggaaauaaag

SEQ ID NO: 3427174 - RNA, 12 nt, Human
agugaaauaaca

SEQ ID NO: 3427175 - RNA, 14 nt, Human
agugaaauaacaaa

SEQ ID NO: 3427176 - RNA, 20 nt, Human
agugaaauaacaaaauggac

SEQ ID NO: 3427177 - RNA, 19 nt, Human
agugaaauaauguguaguu

SEQ ID NO: 3427178 - RNA, 15 nt, Human
agugaaauggauacu

SEQ ID NO: 3427179 - RNA, 21 nt, Human
agugaacaaauuuacagagac

SEQ ID NO: 3427180 - RNA, 22 nt, Human
agugaacaaauuuacagagaca

SEQ ID NO: 3427181 - RNA, 18 nt, Human
agugaacacauuguguca

SEQ ID NO: 3427182 - RNA, 21 nt, Human
agugaaccaucauuauaaacg

SEQ ID NO: 3427183 - RNA, 22 nt, Human
agugaaccucaccccgaggccc

SEQ ID NO: 3427184 - RNA, 20 nt, Human
agugaacuacgcuugcucau

SEQ ID NO: 3427185 - RNA, 18 nt, Human
agugaacuuaguccuguu

SEQ ID NO: 3427186 - RNA, 16 nt, Human
agugaacuugggccac

SEQ ID NO: 3427187 - RNA, 16 nt, Human
agugaagaaaagugaa

SEQ ID NO: 3427188 - RNA, 22 nt, Human
agugaagaaaagugaaugcuca

SEQ ID NO: 3427189 - RNA, 12 nt, Human
agugaagaauac

SEQ ID NO: 3427190 - RNA, 16 nt, Human
agugaagacaaugacu

SEQ ID NO: 3427191 - RNA, 14 nt, Human
agugaagacagaag

SEQ ID NO: 3427192 - RNA, 15 nt, Human
agugaagacagaagu

SEQ ID NO: 3427193 - RNA, 16 nt, Human
agugaagacuccagaa

SEQ ID NO: 3427194 - RNA, 13 nt, Human
agugaagaggggc

SEQ ID NO: 3427195 - RNA, 17 nt, Human
agugaagaggggcagcc

SEQ ID NO: 3427196 - RNA, 19 nt, Human
agugaagaggggcagcccu

SEQ ID NO: 3427197 - RNA, 17 nt, Human
agugaaggccacagcaa

SEQ ID NO: 3427198 - RNA, 15 nt, Human
agugaaggcuucucu

SEQ ID NO: 3427199 - RNA, 21 nt, Human
agugaaggcuucucucugugg

SEQ ID NO: 3427200 - RNA, 18 nt, Human
agugaagguuuacaauuu

SEQ ID NO: 3427201 - RNA, 14 nt, Human
agugaaguugcugc

SEQ ID NO: 3427202 - RNA, 15 nt, Human
agugaaguugcugcu

SEQ ID NO: 3427203 - RNA, 19 nt, Human
agugaaguugcuucuucua

SEQ ID NO: 3427204 - RNA, 15 nt, Human
agugaauaaaaauua

SEQ ID NO: 3427205 - RNA, 13 nt, Human
agugaauaaaugu

SEQ ID NO: 3427206 - RNA, 16 nt, Human
agugaauacugcuaca

SEQ ID NO: 3427207 - RNA, 20 nt, Human
agugaauacugcuacagcaa

SEQ ID NO: 3427208 - RNA, 15 nt, Human
agugaauaugccugu

SEQ ID NO: 3427209 - RNA, 20 nt, Human
agugaaucacguaaagcuag

SEQ ID NO: 3427210 - RNA, 13 nt, Human
agugaaugaaaca

SEQ ID NO: 3427211 - RNA, 15 nt, Human
agugaaugaaagauu

SEQ ID NO: 3427212 - RNA, 18 nt, Human
agugaaugcucaaguuuu

SEQ ID NO: 3427213 - RNA, 15 nt, Human
agugaaugcugggac

SEQ ID NO: 3427214 - RNA, 19 nt, Human
agugaaugcugggacucag

SEQ ID NO: 3427215 - RNA, 16 nt, Human
agugaauguaggcugg

SEQ ID NO: 3427216 - RNA, 14 nt, Human
agugaauuugaaug

SEQ ID NO: 3427217 - RNA, 17 nt, Human
agugaauuuuucucuaa

SEQ ID NO: 3427218 - RNA, 16 nt, Human
agugaauuuuugcaau

SEQ ID NO: 3427219 - RNA, 20 nt, Human
agugacaaggccccagagac

SEQ ID NO: 3427220 - RNA, 18 nt, Human
agugacacuucagagagc

SEQ ID NO: 3427221 - RNA, 20 nt, Human
agugacacuucagagagcug

SEQ ID NO: 3427222 - RNA, 21 nt, Human
agccuggaccucugacagcag

SEQ ID NO: 3427223 - RNA, 19 nt, Human
agccuggagacccacccca

SEQ ID NO: 3427224 - RNA, 11 nt, Human
agccuggaggc

SEQ ID NO: 3427225 - RNA, 10 nt, Human
agccuggaug

SEQ ID NO: 3427226 - RNA, 13 nt, Human
agccuggaugcca

SEQ ID NO: 3427227 - RNA, 13 nt, Human
agccuggcacagg

SEQ ID NO: 3427228 - RNA, 19 nt, Human
agccuggcacaggacugau

SEQ ID NO: 3427229 - RNA, 20 nt, Human
agccuggccacgcagccagg

SEQ ID NO: 3427230 - RNA, 12 nt, Human
agccuggccaga

SEQ ID NO: 3427231 - RNA, 12 nt, Human
agccuggcccag

SEQ ID NO: 3427232 - RNA, 13 nt, Human
agccuggcccagc

SEQ ID NO: 3427233 - RNA, 17 nt, Human
agccuggcccagcuccc

SEQ ID NO: 3427234 - RNA, 18 nt, Human
agccuggcccagcucccc

SEQ ID NO: 3427235 - RNA, 16 nt, Human
agccuggcccauagaa

SEQ ID NO: 3427236 - RNA, 16 nt, Human
agccuggccccauggu

SEQ ID NO: 3427237 - RNA, 13 nt, Human
agccuggccuccu

SEQ ID NO: 3427238 - RNA, 15 nt, Human
agccuggccuccugc

SEQ ID NO: 3427239 - RNA, 16 nt, Human
agccuggccuccugcc

SEQ ID NO: 3427240 - RNA, 17 nt, Human
agccuggccuccugccu

SEQ ID NO: 3427241 - RNA, 18 nt, Human
agccuggccuccugccuc

SEQ ID NO: 3427242 - RNA, 20 nt, Human
agccuggcuccaaacccucg

SEQ ID NO: 3427243 - RNA, 22 nt, Human
agccuggcuccaaacccucgag

SEQ ID NO: 3427244 - RNA, 12 nt, Human
agccuggcuccc

SEQ ID NO: 3427245 - RNA, 20 nt, Human
agccuggcucccacaggcag

SEQ ID NO: 3427246 - RNA, 21 nt, Human
agccuggcucccacaggcagc

SEQ ID NO: 3427247 - RNA, 17 nt, Human
agccuggcucccaggac

SEQ ID NO: 3427248 - RNA, 11 nt, Human
agccuggcucu

SEQ ID NO: 3427249 - RNA, 15 nt, Human
agccuggcuucugga

SEQ ID NO: 3427250 - RNA, 21 nt, Human
agccuggcuucuggagcccuu

SEQ ID NO: 3427251 - RNA, 17 nt, Human
agccugggaaagccccu

SEQ ID NO: 3427252 - RNA, 14 nt, Human
agccugggaggcac

SEQ ID NO: 3427253 - RNA, 20 nt, Human
agccugggauaggggcagag

SEQ ID NO: 3427254 - RNA, 19 nt, Human
agccugggauuucuaugca

SEQ ID NO: 3427255 - RNA, 20 nt, Human
agccugggcagcauagcaag

SEQ ID NO: 3427256 - RNA, 18 nt, Human
agccugggcccaucuccc

SEQ ID NO: 3427257 - RNA, 12 nt, Human
agccugggcccc

SEQ ID NO: 3427258 - RNA, 22 nt, Human
agccugggccuauggagagccc

SEQ ID NO: 3427259 - RNA, 23 nt, Human
agccugggccuauggagagcccu

SEQ ID NO: 3427260 - RNA, 15 nt, Human
agccugggcgacaga

SEQ ID NO: 3427261 - RNA, 17 nt, Human
agccuggggccuggcag

SEQ ID NO: 3427262 - RNA, 16 nt, Human
agccuggggcucuaac

SEQ ID NO: 3427263 - RNA, 18 nt, Human
agccugggggccuggcug

SEQ ID NO: 3427264 - RNA, 19 nt, Human
agccugggggccuggcugg

SEQ ID NO: 3427265 - RNA, 23 nt, Human
agccugggggccuggcuggcuga

SEQ ID NO: 3427266 - RNA, 19 nt, Human
agccugggguggggucaug

SEQ ID NO: 3427267 - RNA, 20 nt, Human
agccugggguggggucaugc

SEQ ID NO: 3427268 - RNA, 14 nt, Human
agccugggugacaa

SEQ ID NO: 3427269 - RNA, 22 nt, Human
agccugggugacagagcaagug

SEQ ID NO: 3427270 - RNA, 20 nt, Human
agccugguaggaaagggcaa

SEQ ID NO: 3427271 - RNA, 11 nt, Human
agccuggugcc

SEQ ID NO: 3427272 - RNA, 16 nt, Human
agccuggugcugcugc

SEQ ID NO: 3427273 - RNA, 11 nt, Human
agccugguggg

SEQ ID NO: 3427274 - RNA, 19 nt, Human
agccuguaacacuccucug

SEQ ID NO: 3427275 - RNA, 18 nt, Human
agccuguaagccugcaag

SEQ ID NO: 3427276 - RNA, 21 nt, Human
agccugucagauccaggagcu

SEQ ID NO: 3427277 - RNA, 11 nt, Human
agccuguccug

SEQ ID NO: 3427278 - RNA, 12 nt, Human
agccuguccugu

SEQ ID NO: 3427279 - RNA, 16 nt, Human
agccugucucuuccau

SEQ ID NO: 3427280 - RNA, 15 nt, Human
agccugugaacccag

SEQ ID NO: 3427281 - RNA, 18 nt, Human
agccugugaacccaggac

SEQ ID NO: 3427282 - RNA, 19 nt, Human
agccugugaacccaggaca

SEQ ID NO: 3427283 - RNA, 21 nt, Human
agccugugcauguaugucuug

SEQ ID NO: 3427284 - RNA, 23 nt, Human
agugagcggugcuguccucaggu

SEQ ID NO: 3427285 - RNA, 16 nt, Human
agugagcuacagagcc

SEQ ID NO: 3427286 - RNA, 17 nt, Human
agugagcucuaugggca

SEQ ID NO: 3427287 - RNA, 13 nt, Human
agugagcugggca

SEQ ID NO: 3427288 - RNA, 21 nt, Human
agugagcugggcaugguacca

SEQ ID NO: 3427289 - RNA, 17 nt, Human
agugagcuguaggugug

SEQ ID NO: 3427290 - RNA, 14 nt, Human
agugagcuuugcug

SEQ ID NO: 3427291 - RNA, 20 nt, Human
agugagcuuugcugcuacag

SEQ ID NO: 3427292 - RNA, 17 nt, Human
agugaggaaaucaaagu

SEQ ID NO: 3427293 - RNA, 22 nt, Human
agugaggaaggcaggaagagag

SEQ ID NO: 3427294 - RNA, 20 nt, Human
agugaggaauaguugagccc

SEQ ID NO: 3427295 - RNA, 22 nt, Human
agugaggcauugcacagggaga

SEQ ID NO: 3427296 - RNA, 12 nt, Human
agugaggccacu

SEQ ID NO: 3427297 - RNA, 13 nt, Human
agugaggcccagg

SEQ ID NO: 3427298 - RNA, 17 nt, Human
agugaggcucugcccuu

SEQ ID NO: 3427299 - RNA, 20 nt, Human
agugaggcucugcccuuggu

SEQ ID NO: 3427300 - RNA, 13 nt, Human
agugagggucaga

SEQ ID NO: 3427301 - RNA, 16 nt, Human
agugagggucagagag

SEQ ID NO: 3427302 - RNA, 17 nt, Human
agugaggguuucugagc

SEQ ID NO: 3427303 - RNA, 20 nt, Human
agugaggguuucugagcugc

SEQ ID NO: 3427304 - RNA, 16 nt, Human
agugagguccuggggg

SEQ ID NO: 3427305 - RNA, 17 nt, Human
agugagguccugggggc

SEQ ID NO: 3427306 - RNA, 14 nt, Human
agugaggugcccag

SEQ ID NO: 3427307 - RNA, 15 nt, Human
agugaggugcccagc

SEQ ID NO: 3427308 - RNA, 16 nt, Human
agugaggugugucaca

SEQ ID NO: 3427309 - RNA, 15 nt, Human
agugagucgaggaca

SEQ ID NO: 3427310 - RNA, 24 nt, Human
agugagucucucugggccuuagga

SEQ ID NO: 3427311 - RNA, 14 nt, Human
agugagugagccug

SEQ ID NO: 3427312 - RNA, 14 nt, Human
agugaguggcccuu

SEQ ID NO: 3427313 - RNA, 17 nt, Human
agugagugugcugcugu

SEQ ID NO: 3427314 - RNA, 16 nt, Human
agugaguguggcuccc

SEQ ID NO: 3427315 - RNA, 22 nt, Human
agugaguuacagcgagaggcag

SEQ ID NO: 3427316 - RNA, 20 nt, Human
agugaguuggguguauugug

SEQ ID NO: 3427317 - RNA, 18 nt, Human
agugauaacuccuaagag

SEQ ID NO: 3427318 - RNA, 20 nt, Human
agugauagagcuaacccuua

SEQ ID NO: 3427319 - RNA, 17 nt, Human
agugauagucuuuugcu

SEQ ID NO: 3427320 - RNA, 20 nt, Human
agugauagucuuuugcuuuu

SEQ ID NO: 3427321 - RNA, 17 nt, Human
agugauauggagcaaga

SEQ ID NO: 3427322 - RNA, 17 nt, Human
agugauauggcagaaga

SEQ ID NO: 3427323 - RNA, 22 nt, Human
agugauauggcagaagacacca

SEQ ID NO: 3427324 - RNA, 15 nt, Human
agugauauuacauuu

SEQ ID NO: 3427325 - RNA, 17 nt, Human
agugauauucuuuguua

SEQ ID NO: 3427326 - RNA, 20 nt, Human
agugauauucuuuguuaauu

SEQ ID NO: 3427327 - RNA, 22 nt, Human
agugauauuucucuaguaguua

SEQ ID NO: 3427328 - RNA, 16 nt, Human
agugaucaauaaaaug

SEQ ID NO: 3427329 - RNA, 14 nt, Human
agugaucacagcag

SEQ ID NO: 3427330 - RNA, 14 nt, Human
agugauccucccac

SEQ ID NO: 3427331 - RNA, 23 nt, Human
agugauccucccaccucagccuc

SEQ ID NO: 3427332 - RNA, 20 nt, Human
agugaucugaacagaaauac

SEQ ID NO: 3427333 - RNA, 20 nt, Human
agugaucuuuuguucccauc

SEQ ID NO: 3427334 - RNA, 21 nt, Human
agugaugcugugcuaugaauu

SEQ ID NO: 3427335 - RNA, 14 nt, Human
agugauggagcaga

SEQ ID NO: 3427336 - RNA, 13 nt, Human
agugauggucaga

SEQ ID NO: 3427337 - RNA, 14 nt, Human
agugauguuuuuau

SEQ ID NO: 3427338 - RNA, 13 nt, Human
agugauuaccagg

SEQ ID NO: 3427339 - RNA, 15 nt, Human
agugauuaccaggga

SEQ ID NO: 3427340 - RNA, 18 nt, Human
agugauuaccagggacug

SEQ ID NO: 3427341 - RNA, 18 nt, Human
agugauucucaugccuca

SEQ ID NO: 3427342 - RNA, 20 nt, Human
agugauugcagcuuuauguu

SEQ ID NO: 3427343 - RNA, 17 nt, Human
agugauugggacagagg

SEQ ID NO: 3427344 - RNA, 15 nt, Human
agugauuguuggcac

SEQ ID NO: 3427345 - RNA, 15 nt, Human
agugauuucuagaaa

SEQ ID NO: 3427346 - RNA, 16 nt, Human
agugauuuuuauccaa

SEQ ID NO: 3427347 - RNA, 12 nt, Human
agugcaaaaggc

SEQ ID NO: 3427348 - RNA, 21 nt, Human
agugcaaagauuugcuuuaau

SEQ ID NO: 3427349 - RNA, 16 nt, Human
agugcaacacuggucu

SEQ ID NO: 3427350 - RNA, 20 nt, Human
agugcaacagcacuggcucu

SEQ ID NO: 3427351 - RNA, 13 nt, Human
agugcaaccucug

SEQ ID NO: 3427352 - RNA, 16 nt, Human
agugcaaccucugcuu

SEQ ID NO: 3427353 - RNA, 15 nt, Human
agugcaagccccugc

SEQ ID NO: 3427354 - RNA, 17 nt, Human
agugcaagccccugcuc

SEQ ID NO: 3427355 - RNA, 20 nt, Human
agugcaauaaaucugaccca

SEQ ID NO: 3427356 - RNA, 14 nt, Human
agugcaauauauuu

SEQ ID NO: 3427357 - RNA, 16 nt, Human
agugcaauauauuuug

SEQ ID NO: 3427358 - RNA, 21 nt, Human
agugcaauauauuuuguaugc

SEQ ID NO: 3427359 - RNA, 13 nt, Human
agugcacaaaaug

SEQ ID NO: 3427360 - RNA, 15 nt, Human
agugcacaaaaugaa

SEQ ID NO: 3427361 - RNA, 17 nt, Human
agugcacacagaaauau

SEQ ID NO: 3427362 - RNA, 19 nt, Human
agugcacacagaaauauau

SEQ ID NO: 3427363 - RNA, 12 nt, Human
agugcacagcug

SEQ ID NO: 3427364 - RNA, 20 nt, Human
agugcaccaaagagaaugcc

SEQ ID NO: 3427365 - RNA, 12 nt, Human
agugcacugauu

SEQ ID NO: 3427366 - RNA, 14 nt, Human
agugcacuuucuaa

SEQ ID NO: 3427367 - RNA, 12 nt, Human
agugcagaacug

SEQ ID NO: 3427368 - RNA, 19 nt, Human
agugcagaaugcuccucca

SEQ ID NO: 3427369 - RNA, 14 nt, Human
agugcagaauguaa

SEQ ID NO: 3427370 - RNA, 22 nt, Human
agugcagaauguaagugggccc

SEQ ID NO: 3427371 - RNA, 21 nt, Human
agugcagaccccuuggccagc

SEQ ID NO: 3427372 - RNA, 17 nt, Human
agugcagagccuucuca

SEQ ID NO: 3427373 - RNA, 18 nt, Human
agugcagagccuucucag

SEQ ID NO: 3427374 - RNA, 19 nt, Human
agugcagagccuucucaga

SEQ ID NO: 3427375 - RNA, 16 nt, Human
agugcagcagggcagu

SEQ ID NO: 3427376 - RNA, 23 nt, Human
agugcagcccguguggccccuuc

SEQ ID NO: 3427377 - RNA, 17 nt, Human
agugcagcugaaauuga

SEQ ID NO: 3427378 - RNA, 14 nt, Human
agugcagcugauuu

SEQ ID NO: 3427379 - RNA, 19 nt, Human
agugcaggcccacccugcu

SEQ ID NO: 3427380 - RNA, 15 nt, Human
agugcaguauagaau

SEQ ID NO: 3427381 - RNA, 23 nt, Human
agugcaguccugaucagagccgu

SEQ ID NO: 3427382 - RNA, 23 nt, Human
agugcaguggcaucaucucagcu

SEQ ID NO: 3427383 - RNA, 15 nt, Human
agcgacagugagacu

SEQ ID NO: 3427384 - RNA, 17 nt, Human
agcgacagugagacucu

SEQ ID NO: 3427385 - RNA, 20 nt, Human
agcgacaucucugacuuucu

SEQ ID NO: 3427386 - RNA, 14 nt, Human
agcgaccgcccccu

SEQ ID NO: 3427387 - RNA, 16 nt, Human
agcgacuccguuggcc

SEQ ID NO: 3427388 - RNA, 17 nt, Human
agcgacuccguuggcca

SEQ ID NO: 3427389 - RNA, 23 nt, Human
agcgaggcacccuuacuggcuua

SEQ ID NO: 3427390 - RNA, 14 nt, Human
agcgagggcagcug

SEQ ID NO: 3427391 - RNA, 17 nt, Human
agcgagggcagcugcua

SEQ ID NO: 3427392 - RNA, 18 nt, Human
agcgaggucaacagagaa

SEQ ID NO: 3427393 - RNA, 21 nt, Human
agcgaguggagucugccaccc

SEQ ID NO: 3427394 - RNA, 14 nt, Human
agcgaguuguggaa

SEQ ID NO: 3427395 - RNA, 15 nt, Human
agcgauauacagaug

SEQ ID NO: 3427396 - RNA, 16 nt, Human
agcgaucucuccacug

SEQ ID NO: 3427397 - RNA, 17 nt, Human
agcgaucucuccuggcc

SEQ ID NO: 3427398 - RNA, 18 nt, Human
agcgaucucuccuggccu

SEQ ID NO: 3427399 - RNA, 19 nt, Human
agcgaucucuccuggccua

SEQ ID NO: 3427400 - RNA, 19 nt, Human
agcgaugaauuuggagacu

SEQ ID NO: 3427401 - RNA, 19 nt, Human
agcgauuauuaucuaaagu

SEQ ID NO: 3427402 - RNA, 21 nt, Human
agcgauucccucucccaggcc

SEQ ID NO: 3427403 - RNA, 22 nt, Human
agcgauucuucugcuucagccu

SEQ ID NO: 3427404 - RNA, 19 nt, Human
agcgcagcagcccuccccg

SEQ ID NO: 3427405 - RNA, 21 nt, Human
agcgcagccgccuucacagca

SEQ ID NO: 3427406 - RNA, 14 nt, Human
agcgcaguuuuuuu

SEQ ID NO: 3427407 - RNA, 16 nt, Human
agcgccaagcaaccug

SEQ ID NO: 3427408 - RNA, 12 nt, Human
agcgccaggcug

SEQ ID NO: 3427409 - RNA, 16 nt, Human
agcgccccucccuagu

SEQ ID NO: 3427410 - RNA, 19 nt, Human
agcgcccgcugggcugagc

SEQ ID NO: 3427411 - RNA, 13 nt, Human
agcgcccugcaga

SEQ ID NO: 3427412 - RNA, 18 nt, Human
agcgcccugcagacccug

SEQ ID NO: 3427413 - RNA, 21 nt, Human
agcgcccugcagacccugccc

SEQ ID NO: 3427414 - RNA, 23 nt, Human
agcgcccugcagacccugcccuu

SEQ ID NO: 3427415 - RNA, 13 nt, Human
agcgcccuggccc

SEQ ID NO: 3427416 - RNA, 14 nt, Human
agcgcccuggcccc

SEQ ID NO: 3427417 - RNA, 14 nt, Human
agcgcccuuccucu

SEQ ID NO: 3427418 - RNA, 17 nt, Human
agcgccgugaguucuca

SEQ ID NO: 3427419 - RNA, 22 nt, Human
agcgccgugaguucucagggcu

SEQ ID NO: 3427420 - RNA, 23 nt, Human
agcgccuccauccaaggccaggu

SEQ ID NO: 3427421 - RNA, 12 nt, Human
agcgccucccuc

SEQ ID NO: 3427422 - RNA, 13 nt, Human
agcgccucccucc

SEQ ID NO: 3427423 - RNA, 22 nt, Human
agcgccucccuccaccccagga

SEQ ID NO: 3427424 - RNA, 23 nt, Human
agcgccucccuccaccccaggac

SEQ ID NO: 3427425 - RNA, 15 nt, Human
agcgccugccccucc

SEQ ID NO: 3427426 - RNA, 11 nt, Human
agcgccuggcc

SEQ ID NO: 3427427 - RNA, 20 nt, Human
agcgcgccacucgcuucccc

SEQ ID NO: 3427428 - RNA, 15 nt, Human
agcgcgccccuagcc

SEQ ID NO: 3427429 - RNA, 14 nt, Human
aguuuaauugacuu

SEQ ID NO: 3427430 - RNA, 17 nt, Human
aguuuacaaguguauau

SEQ ID NO: 3427431 - RNA, 21 nt, Human
aguuuacaaguguauaucaga

SEQ ID NO: 3427432 - RNA, 13 nt, Human
aguuuacaguaaa

SEQ ID NO: 3427433 - RNA, 14 nt, Human
aguuuacaguaaau

SEQ ID NO: 3427434 - RNA, 16 nt, Human
aguuuacaguaaauaa

SEQ ID NO: 3427435 - RNA, 15 nt, Human
aguuuacauuguaaa

SEQ ID NO: 3427436 - RNA, 17 nt, Human
aguuuacauuguaaaua

SEQ ID NO: 3427437 - RNA, 13 nt, Human
aguuuacauuuuu

SEQ ID NO: 3427438 - RNA, 13 nt, Human
aguuuaccauuug

SEQ ID NO: 3427439 - RNA, 16 nt, Human
aguuuaccauuuguaa

SEQ ID NO: 3427440 - RNA, 21 nt, Human
aguuuacccaugaagauuggu

SEQ ID NO: 3427441 - RNA, 20 nt, Human
aguuuaccucuuuaaaaaca

SEQ ID NO: 3427442 - RNA, 14 nt, Human
aguuuaccuuguau

SEQ ID NO: 3427443 - RNA, 20 nt, Human
aguuuaccuuguauacugua

SEQ ID NO: 3427444 - RNA, 15 nt, Human
aguuuacuauuuuac

SEQ ID NO: 3427445 - RNA, 15 nt, Human
aguuuacugagaaug

SEQ ID NO: 3427446 - RNA, 22 nt, Human
aguuuagaggaaaaaaaugacu

SEQ ID NO: 3427447 - RNA, 21 nt, Human
aguuuagggaacaauuuggca

SEQ ID NO: 3427448 - RNA, 24 nt, Human
aguuuagggaacaauuuggcaauu

SEQ ID NO: 3427449 - RNA, 13 nt, Human
aguuuaggguggg

SEQ ID NO: 3427450 - RNA, 14 nt, Human
aguuuagggugggg

SEQ ID NO: 3427451 - RNA, 22 nt, Human
aguuuagugugguuuucuguuu

SEQ ID NO: 3427452 - RNA, 21 nt, Human
aguuuauaaaagacugucuua

SEQ ID NO: 3427453 - RNA, 15 nt, Human
aguuuauacaguaca

SEQ ID NO: 3427454 - RNA, 16 nt, Human
aguuuauacucaccuu

SEQ ID NO: 3427455 - RNA, 19 nt, Human
aguuuaucaguaaauaacu

SEQ ID NO: 3427456 - RNA, 16 nt, Human
aguuuaucauucaagu

SEQ ID NO: 3427457 - RNA, 19 nt, Human
aguuuaugcagugcugcuu

SEQ ID NO: 3427458 - RNA, 12 nt, Human
aguuuauguuuu

SEQ ID NO: 3427459 - RNA, 14 nt, Human
aguuuauguuuugg

SEQ ID NO: 3427460 - RNA, 16 nt, Human
aguuuauuccagagcu

SEQ ID NO: 3427461 - RNA, 15 nt, Human
aguuuauucucauuu

SEQ ID NO: 3427462 - RNA, 23 nt, Human
aguuuauuuguugagagugugac

SEQ ID NO: 3427463 - RNA, 20 nt, Human
aguuuauuuuuaaagauaga

SEQ ID NO: 3427464 - RNA, 15 nt, Human
aguuucaaaaaucug

SEQ ID NO: 3427465 - RNA, 14 nt, Human
aguuucaacaugaa

SEQ ID NO: 3427466 - RNA, 15 nt, Human
aguuucaaccaugaa

SEQ ID NO: 3427467 - RNA, 18 nt, Human
aguuucaaguuuuaaagu

SEQ ID NO: 3427468 - RNA, 15 nt, Human
aguuucaauaaaguu

SEQ ID NO: 3427469 - RNA, 18 nt, Human
aguuucaauaaaguuuga

SEQ ID NO: 3427470 - RNA, 23 nt, Human
aguuucaauaaaguuugaucuuc

SEQ ID NO: 3427471 - RNA, 12 nt, Human
aguuucaaugug

SEQ ID NO: 3427472 - RNA, 16 nt, Human
aguuucaauucagugc

SEQ ID NO: 3427473 - RNA, 15 nt, Human
aguuucagauauaua

SEQ ID NO: 3427474 - RNA, 17 nt, Human
aguuucagauauauauc

SEQ ID NO: 3427475 - RNA, 14 nt, Human
aguuucaggugaca

SEQ ID NO: 3427476 - RNA, 20 nt, Human
aguuucaggugacaugugaa

SEQ ID NO: 3427477 - RNA, 21 nt, Human
aguuucaggugacaugugaaa

SEQ ID NO: 3427478 - RNA, 18 nt, Human
aguuucagguguuuaguu

SEQ ID NO: 3427479 - RNA, 18 nt, Human
aguuucaguuuguuggaa

SEQ ID NO: 3427480 - RNA, 16 nt, Human
aguuucauaauugugu

SEQ ID NO: 3427481 - RNA, 15 nt, Human
aguuucauguacaag

SEQ ID NO: 3427482 - RNA, 20 nt, Human
aguuucauucuccugccugu

SEQ ID NO: 3427483 - RNA, 13 nt, Human
aguuucauuuaug

SEQ ID NO: 3427484 - RNA, 15 nt, Human
aguuuccaagcaaau

SEQ ID NO: 3427485 - RNA, 18 nt, Human
aguuuccaagcaaauguu

SEQ ID NO: 3427486 - RNA, 22 nt, Human
aguuuccaagcaaauguuacau

SEQ ID NO: 3427487 - RNA, 18 nt, Human
aguuuccaauuauuugac

SEQ ID NO: 3427488 - RNA, 20 nt, Human
aguuuccauagcaacaggaa

SEQ ID NO: 3427489 - RNA, 22 nt, Human
aguuuccccaccagugaaugaa

SEQ ID NO: 3427490 - RNA, 16 nt, Human
aguuuccuaaucagaa

SEQ ID NO: 3427491 - RNA, 18 nt, Human
aguuuccuuggcuggugc

SEQ ID NO: 3427492 - RNA, 19 nt, Human
aguuuccuuggcuggugca

SEQ ID NO: 3427493 - RNA, 23 nt, Human
aguuuccuuuucugucucucucu

SEQ ID NO: 3427494 - RNA, 12 nt, Human
aguuuccuuuuu

SEQ ID NO: 3427495 - RNA, 18 nt, Human
aguuuccuuuuuaauaug

SEQ ID NO: 3427496 - RNA, 18 nt, Human
aguuucuaagauucuaaa

SEQ ID NO: 3427497 - RNA, 11 nt, Human
aguuucuaagg

SEQ ID NO: 3427498 - RNA, 23 nt, Human
aguuucuaagguccgguguucua

SEQ ID NO: 3427499 - RNA, 15 nt, Human
aguuucucagauccu

SEQ ID NO: 3427500 - RNA, 21 nt, Human
aguuucucagcucccauuucu

SEQ ID NO: 3427501 - RNA, 14 nt, Human
aguuucugaguuuu

SEQ ID NO: 3427502 - RNA, 20 nt, Human
aguuucugaguuuuaccaaa

SEQ ID NO: 3427503 - RNA, 15 nt, Human
aguuucugccgcagc

SEQ ID NO: 3427504 - RNA, 17 nt, Human
aguuucugccgcagccc

SEQ ID NO: 3427505 - RNA, 17 nt, Human
aguuucuguccugcugg

SEQ ID NO: 3427506 - RNA, 23 nt, Human
aguuucugucguuaaaaacagau

SEQ ID NO: 3427507 - RNA, 16 nt, Human
aguuucuguucugugg

SEQ ID NO: 3427508 - RNA, 19 nt, Human
aguuucuguucuguggaaa

SEQ ID NO: 3427509 - RNA, 15 nt, Human
aguuucuuagacuuu

SEQ ID NO: 3427510 - RNA, 15 nt, Human
aguuucuuagcuuuu

SEQ ID NO: 3427511 - RNA, 13 nt, Human
aguuucuugcuug

SEQ ID NO: 3427512 - RNA, 16 nt, Human
aguuucuugguaaagu

SEQ ID NO: 3427513 - RNA, 12 nt, Human
aguuugaaauaa

SEQ ID NO: 3427514 - RNA, 13 nt, Human
aguuugaaauaag

SEQ ID NO: 3427515 - RNA, 22 nt, Human
aguuugaaauucugaauuugca

SEQ ID NO: 3427516 - RNA, 22 nt, Human
aguuugaaucuauuuaucuuca

SEQ ID NO: 3427517 - RNA, 18 nt, Human
aguuugagaucagccugg

SEQ ID NO: 3427518 - RNA, 19 nt, Human
aguuugagaucagccuggg

SEQ ID NO: 3427519 - RNA, 20 nt, Human
aguuugagaucagccugggc

SEQ ID NO: 3427520 - RNA, 16 nt, Human
aguuugagcugccuuc

SEQ ID NO: 3427521 - RNA, 23 nt, Human
aguuugagcugccuucccuagcu

SEQ ID NO: 3427522 - RNA, 19 nt, Human
aguuugaggaaauuugcag

SEQ ID NO: 3427523 - RNA, 18 nt, Human
aguuugaggauuaguuua

SEQ ID NO: 3427524 - RNA, 19 nt, Human
aguuugauaaauaguguua

SEQ ID NO: 3427525 - RNA, 16 nt, Human
aguuugaucuuccucu

SEQ ID NO: 3427526 - RNA, 18 nt, Human
aguuugaugaggcccucc

SEQ ID NO: 3427527 - RNA, 20 nt, Human
aguuugaugucauuaaugug

SEQ ID NO: 3427528 - RNA, 18 nt, Human
aguuugauuaaauucuug

SEQ ID NO: 3427529 - RNA, 20 nt, Human
aguuugauuaaauucuugca

SEQ ID NO: 3427530 - RNA, 14 nt, Human
aguuugauuauuca

SEQ ID NO: 3427531 - RNA, 10 nt, Human
aguuugcacu

SEQ ID NO: 3427532 - RNA, 23 nt, Human
aguuugcacucaaaucuuaagaa

SEQ ID NO: 3427533 - RNA, 20 nt, Human
aguuugcacuguaugcugga

SEQ ID NO: 3427534 - RNA, 13 nt, Human
aguuugcagaaaa

SEQ ID NO: 3427535 - RNA, 21 nt, Human
aguuugcagaaaagcaccugc

SEQ ID NO: 3427536 - RNA, 16 nt, Human
aguuugcauuucagaa

SEQ ID NO: 3427537 - RNA, 23 nt, Human
aguuugcauuucagaaagccuuu

SEQ ID NO: 3427538 - RNA, 13 nt, Human
aguuugccagaag

SEQ ID NO: 3427539 - RNA, 23 nt, Human
aguuugcuagcagaaaucuagaa

SEQ ID NO: 3427540 - RNA, 14 nt, Human
aguuugcuauuaga

SEQ ID NO: 3427541 - RNA, 14 nt, Human
aguuugcuuagaaa

SEQ ID NO: 3427542 - RNA, 14 nt, Human
aguuuggauaugua

SEQ ID NO: 3427543 - RNA, 23 nt, Human
agcuacagagccgagcaauauuu

SEQ ID NO: 3427544 - RNA, 14 nt, Human
agcuacaggaagca

SEQ ID NO: 3427545 - RNA, 12 nt, Human
agcuacagguua

SEQ ID NO: 3427546 - RNA, 13 nt, Human
agcuaccaugaca

SEQ ID NO: 3427547 - RNA, 17 nt, Human
agcuacccaaaagagaa

SEQ ID NO: 3427548 - RNA, 17 nt, Human
agcuacccgcagaguuc

SEQ ID NO: 3427549 - RNA, 20 nt, Human
agcuacccuuuuucuccagc

SEQ ID NO: 3427550 - RNA, 14 nt, Human
agcuaccucaacca

SEQ ID NO: 3427551 - RNA, 20 nt, Human
agcuaccuguguggacagga

SEQ ID NO: 3427552 - RNA, 16 nt, Human
agcuacguauuuaaua

SEQ ID NO: 3427553 - RNA, 15 nt, Human
agcuacguuuacuca

SEQ ID NO: 3427554 - RNA, 14 nt, Human
agcuacuaaaauca

SEQ ID NO: 3427555 - RNA, 16 nt, Human
agcuacuaaaaucagu

SEQ ID NO: 3427556 - RNA, 19 nt, Human
agcuacuaauuuuaaaaug

SEQ ID NO: 3427557 - RNA, 15 nt, Human
agcuacuagcaaaau

SEQ ID NO: 3427558 - RNA, 14 nt, Human
agcuacucagaagc

SEQ ID NO: 3427559 - RNA, 20 nt, Human
agcuacucagaagccugagg

SEQ ID NO: 3427560 - RNA, 15 nt, Human
agcuacucaggaggc

SEQ ID NO: 3427561 - RNA, 18 nt, Human
agcuacuccggaggcuga

SEQ ID NO: 3427562 - RNA, 19 nt, Human
agcuacuccggaggcugag

SEQ ID NO: 3427563 - RNA, 19 nt, Human
agcuacucgggaagcugag

SEQ ID NO: 3427564 - RNA, 22 nt, Human
agcuacucuccccacgagggcu

SEQ ID NO: 3427565 - RNA, 13 nt, Human
agcuacugccauc

SEQ ID NO: 3427566 - RNA, 14 nt, Human
agcuacugccaucc

SEQ ID NO: 3427567 - RNA, 22 nt, Human
agcuacugccauccuggcccag

SEQ ID NO: 3427568 - RNA, 23 nt, Human
agcuacugccgucagugcugugc

SEQ ID NO: 3427569 - RNA, 15 nt, Human
agcuacugugugugu

SEQ ID NO: 3427570 - RNA, 19 nt, Human
agcuacugugugugugaau

SEQ ID NO: 3427571 - RNA, 18 nt, Human
agcuacuuaagagaaaug

SEQ ID NO: 3427572 - RNA, 18 nt, Human
agcuacuugggaggcuga

SEQ ID NO: 3427573 - RNA, 16 nt, Human
agcuacuugguuugug

SEQ ID NO: 3427574 - RNA, 11 nt, Human
auaauaaaaau

SEQ ID NO: 3427575 - RNA, 19 nt, Human
auaauaaaaauauauuuuc

SEQ ID NO: 3427576 - RNA, 14 nt, Human
auaauaaaaggaaa

SEQ ID NO: 3427577 - RNA, 15 nt, Human
auaauaaaaggaaaa

SEQ ID NO: 3427578 - RNA, 20 nt, Human
auaauaaaaggaaaagcaaa

SEQ ID NO: 3427579 - RNA, 12 nt, Human
auaauaaaauag

SEQ ID NO: 3427580 - RNA, 16 nt, Human
auaauaaagcuacuga

SEQ ID NO: 3427581 - RNA, 13 nt, Human
auaauaaaggacu

SEQ ID NO: 3427582 - RNA, 13 nt, Human
auaauaaauaguu

SEQ ID NO: 3427583 - RNA, 13 nt, Human
auaauaaauauau

SEQ ID NO: 3427584 - RNA, 13 nt, Human
auaauaagcuaaa

SEQ ID NO: 3427585 - RNA, 18 nt, Human
auaauaaggaaaaguuua

SEQ ID NO: 3427586 - RNA, 12 nt, Human
auaauaauacaa

SEQ ID NO: 3427587 - RNA, 14 nt, Human
auaauaaucucagu

SEQ ID NO: 3427588 - RNA, 22 nt, Human
auaauaauuuuuauauuuaauu

SEQ ID NO: 3427589 - RNA, 13 nt, Human
auaauacaaaagg

SEQ ID NO: 3427590 - RNA, 12 nt, Human
auaauacaccac

SEQ ID NO: 3427591 - RNA, 20 nt, Human
auaauacaccacuacauucu

SEQ ID NO: 3427592 - RNA, 21 nt, Human
auaauacaccacuacauucug

SEQ ID NO: 3427593 - RNA, 23 nt, Human
auaauacaccacuacauucuguu

SEQ ID NO: 3427594 - RNA, 19 nt, Human
auaauacacuugcccugcu

SEQ ID NO: 3427595 - RNA, 12 nt, Human
auaauaccucaa

SEQ ID NO: 3427596 - RNA, 15 nt, Human
auaauaccuuagaag

SEQ ID NO: 3427597 - RNA, 12 nt, Human
agcucuuccugg

SEQ ID NO: 3427598 - RNA, 21 nt, Human
agcucuuccuuacucccaggc

SEQ ID NO: 3427599 - RNA, 16 nt, Human
agcucuucuccccagg

SEQ ID NO: 3427600 - RNA, 17 nt, Human
agcucuucuccccaggu

SEQ ID NO: 3427601 - RNA, 20 nt, Human
agcucuucuccccaggugug

SEQ ID NO: 3427602 - RNA, 20 nt, Human
agcucuucugccggcccugg

SEQ ID NO: 3427603 - RNA, 13 nt, Human
agcucuugcuaau

SEQ ID NO: 3427604 - RNA, 20 nt, Human
agcucuugcuaaucaguguc

SEQ ID NO: 3427605 - RNA, 16 nt, Human
agcucuuggcuccacu

SEQ ID NO: 3427606 - RNA, 17 nt, Human
agcucuugugaggaaag

SEQ ID NO: 3427607 - RNA, 21 nt, Human
agcucuugugaggaaagucau

SEQ ID NO: 3427608 - RNA, 18 nt, Human
agcucuuguugagccgug

SEQ ID NO: 3427609 - RNA, 14 nt, Human
agcucuuugucagg

SEQ ID NO: 3427610 - RNA, 16 nt, Human
agcucuuugucaggga

SEQ ID NO: 3427611 - RNA, 15 nt, Human
agcucuuuuccuaga

SEQ ID NO: 3427612 - RNA, 17 nt, Human
agcucuuuuugugaagu

SEQ ID NO: 3427613 - RNA, 21 nt, Human
agcucuuuuuuguuuguuucu

SEQ ID NO: 3427614 - RNA, 19 nt, Human
agcugaaaaaucacauccu

SEQ ID NO: 3427615 - RNA, 23 nt, Human
agcugaaaaaucacauccuggcc

SEQ ID NO: 3427616 - RNA, 13 nt, Human
agcugaaaugcug

SEQ ID NO: 3427617 - RNA, 16 nt, Human
agcugaaaugcugcau

SEQ ID NO: 3427618 - RNA, 19 nt, Human
agcugaaauugaaaaguua

SEQ ID NO: 3427619 - RNA, 13 nt, Human
agcugaaauuuua

SEQ ID NO: 3427620 - RNA, 20 nt, Human
agcugaaauuuuagaaauau

SEQ ID NO: 3427621 - RNA, 17 nt, Human
agcugaacacauuucuu

SEQ ID NO: 3427622 - RNA, 19 nt, Human
agcugaacacauuucuuuu

SEQ ID NO: 3427623 - RNA, 19 nt, Human
agcugaacccauuuugagu

SEQ ID NO: 3427624 - RNA, 13 nt, Human
agcugaagagcug

SEQ ID NO: 3427625 - RNA, 19 nt, Human
agcugaagaguugccccgu

SEQ ID NO: 3427626 - RNA, 15 nt, Human
agcugaauacauucu

SEQ ID NO: 3427627 - RNA, 17 nt, Human
agcugaaugccuccugu

SEQ ID NO: 3427628 - RNA, 22 nt, Human
agcugaaugccuccugugggga

SEQ ID NO: 3427629 - RNA, 16 nt, Human
agcugaauguuuuucu

SEQ ID NO: 3427630 - RNA, 17 nt, Human
agcugaauguuuuucua

SEQ ID NO: 3427631 - RNA, 18 nt, Human
agcugaauguuuuucuaa

SEQ ID NO: 3427632 - RNA, 16 nt, Human
agcugacaaaauuuug

SEQ ID NO: 3427633 - RNA, 19 nt, Human
agcugacacaaaccugccu

SEQ ID NO: 3427634 - RNA, 22 nt, Human
agcugacacaaaccugccuggg

SEQ ID NO: 3427635 - RNA, 13 nt, Human
agcugacaguccu

SEQ ID NO: 3427636 - RNA, 14 nt, Human
agcugacaguccuc

SEQ ID NO: 3427637 - RNA, 16 nt, Human
agcugacaucuugaau

SEQ ID NO: 3427638 - RNA, 16 nt, Human
agcugacauugccaaa

SEQ ID NO: 3427639 - RNA, 16 nt, Human
agcugaccagccguga

SEQ ID NO: 3427640 - RNA, 16 nt, Human
agcugacccagccccu

SEQ ID NO: 3427641 - RNA, 12 nt, Human
agcugaccucug

SEQ ID NO: 3427642 - RNA, 15 nt, Human
agcugaccucuguug

SEQ ID NO: 3427643 - RNA, 17 nt, Human
agcugacgaggcugggc

SEQ ID NO: 3427644 - RNA, 18 nt, Human
agcugacgaggcugggcc

SEQ ID NO: 3427645 - RNA, 20 nt, Human
agcugacgaggcugggccaa

SEQ ID NO: 3427646 - RNA, 23 nt, Human
agcugacuaaacuuuuuuucugu

SEQ ID NO: 3427647 - RNA, 20 nt, Human
agcugacuugcacagggauu

SEQ ID NO: 3427648 - RNA, 14 nt, Human
agcugacuuggcug

SEQ ID NO: 3427649 - RNA, 21 nt, Human
agcugacuuuucuguccgagc

SEQ ID NO: 3427650 - RNA, 17 nt, Human
agcugagaacuccugac

SEQ ID NO: 3427651 - RNA, 11 nt, Human
agcugagaaga

SEQ ID NO: 3427652 - RNA, 21 nt, Human
agcugagaagacucaaguccc

SEQ ID NO: 3427653 - RNA, 16 nt, Human
agcugagaauagaagg

SEQ ID NO: 3427654 - RNA, 17 nt, Human
agcugagaauagaagga

SEQ ID NO: 3427655 - RNA, 22 nt, Human
agcugagaucgugccacugcac

SEQ ID NO: 3427656 - RNA, 20 nt, Human
agcugagcaaaucaccacaa

SEQ ID NO: 3427657 - RNA, 14 nt, Human
agcugagcaggugu

SEQ ID NO: 3427658 - RNA, 12 nt, Human
agcugagccagg

SEQ ID NO: 3427659 - RNA, 21 nt, Human
agcugagccugcagggaagcc

SEQ ID NO: 3427660 - RNA, 23 nt, Human
agcugagccugcagggaagcccc

SEQ ID NO: 3427661 - RNA, 15 nt, Human
agcugagcgccagga

SEQ ID NO: 3427662 - RNA, 19 nt, Human
agcugagcucacaaggcag

SEQ ID NO: 3427663 - RNA, 13 nt, Human
agcugaggccaca

SEQ ID NO: 3427664 - RNA, 13 nt, Human
agcugaggggggc

SEQ ID NO: 3427665 - RNA, 23 nt, Human
agcugaggggggccgugcccagg

SEQ ID NO: 3427666 - RNA, 15 nt, Human
agcugaggugcccag

SEQ ID NO: 3427667 - RNA, 16 nt, Human
agcugaggugcccagg

SEQ ID NO: 3427668 - RNA, 17 nt, Human
agcugaggugcccagga

SEQ ID NO: 3427669 - RNA, 15 nt, Human
agcugagugaaaaau

SEQ ID NO: 3427670 - RNA, 16 nt, Human
agcugauacuucauuu

SEQ ID NO: 3427671 - RNA, 21 nt, Human
agcugauacuucauuuaaaaa

SEQ ID NO: 3427672 - RNA, 19 nt, Human
agcugauauaaauucugug

SEQ ID NO: 3427673 - RNA, 20 nt, Human
agcugaucauaagugaauuu

SEQ ID NO: 3427674 - RNA, 13 nt, Human
agcugauccagag

SEQ ID NO: 3427675 - RNA, 15 nt, Human
agcugauccagagca

SEQ ID NO: 3427676 - RNA, 22 nt, Human
agcugaugaaacucacaaauga

SEQ ID NO: 3427677 - RNA, 22 nt, Human
agcugaugaacuuauucuguag

SEQ ID NO: 3427678 - RNA, 15 nt, Human
agcugaugacucaag

SEQ ID NO: 3427679 - RNA, 20 nt, Human
agcugauguguugccacuuu

SEQ ID NO: 3427680 - RNA, 21 nt, Human
agcugauuacugucaauaaac

SEQ ID NO: 3427681 - RNA, 15 nt, Human
agcugauuuuaacaa

SEQ ID NO: 3427682 - RNA, 16 nt, Human
agcugauuuuaacaau

SEQ ID NO: 3427683 - RNA, 16 nt, Human
agcugcaaaaauaauc

SEQ ID NO: 3427684 - RNA, 14 nt, Human
agcugcaaaggaca

SEQ ID NO: 3427685 - RNA, 11 nt, Human
agcugcaaagu

SEQ ID NO: 3427686 - RNA, 12 nt, Human
agcugcaaagug

SEQ ID NO: 3427687 - RNA, 16 nt, Human
agcugcaaaucugaug

SEQ ID NO: 3427688 - RNA, 15 nt, Human
agcugcacagggcag

SEQ ID NO: 3427689 - RNA, 20 nt, Human
agcugcacagggcagcuggg

SEQ ID NO: 3427690 - RNA, 22 nt, Human
agcugcacagggcagcugggcc

SEQ ID NO: 3427691 - RNA, 24 nt, Human
agcugcacagggcagcugggccca

SEQ ID NO: 3427692 - RNA, 14 nt, Human
agcugcaccagagc

SEQ ID NO: 3427693 - RNA, 15 nt, Human
agcugcaccagagca

SEQ ID NO: 3427694 - RNA, 22 nt, Human
agcugcacccucaggcaggugg

SEQ ID NO: 3427695 - RNA, 18 nt, Human
agcugcaccugccagccu

SEQ ID NO: 3427696 - RNA, 17 nt, Human
agcugcacugaugcugc

SEQ ID NO: 3427697 - RNA, 19 nt, Human
agcugcacugaugcugccc

SEQ ID NO: 3427698 - RNA, 22 nt, Human
agcugcacugaugcugccccuc

SEQ ID NO: 3427699 - RNA, 18 nt, Human
agcugcagagacagagag

SEQ ID NO: 3427700 - RNA, 16 nt, Human
agcugcagagccaccc

SEQ ID NO: 3427701 - RNA, 19 nt, Human
agcugcagauaaguggccu

SEQ ID NO: 3427702 - RNA, 14 nt, Human
agcugcagcuuccu

SEQ ID NO: 3427703 - RNA, 17 nt, Human
agcugcagcuuccuguc

SEQ ID NO: 3427704 - RNA, 22 nt, Human
agcugcauccuccaagaaucua

SEQ ID NO: 3427705 - RNA, 23 nt, Human
agcugcauguggcuuuuuuaaaa

SEQ ID NO: 3427706 - RNA, 16 nt, Human
agcugccaagccccau

SEQ ID NO: 3427707 - RNA, 14 nt, Human
agcugccagagaag

SEQ ID NO: 3427708 - RNA, 14 nt, Human
agcugccagccgag

SEQ ID NO: 3427709 - RNA, 14 nt, Human
agcugcccagaguu

SEQ ID NO: 3427710 - RNA, 22 nt, Human
agcugcccauuucgugagcccc

SEQ ID NO: 3427711 - RNA, 14 nt, Human
agcugccccagcca

SEQ ID NO: 3427712 - RNA, 15 nt, Human
agcugccccagccag

SEQ ID NO: 3427713 - RNA, 20 nt, Human
agcugcccccagagccacag

SEQ ID NO: 3427714 - RNA, 21 nt, Human
agcugcccccagagccacagu

SEQ ID NO: 3427715 - RNA, 18 nt, Human
agcugcccccgcucaugg

SEQ ID NO: 3427716 - RNA, 16 nt, Human
agcugccccggccccu

SEQ ID NO: 3427717 - RNA, 19 nt, Human
agcugccccggccccuccc

SEQ ID NO: 3427718 - RNA, 15 nt, Human
agcugccccucucug

SEQ ID NO: 3427719 - RNA, 15 nt, Human
auaauucucauuaaa

SEQ ID NO: 3427720 - RNA, 22 nt, Human
auaauucucauuaaaagaauau

SEQ ID NO: 3427721 - RNA, 19 nt, Human
auaauucugaaguuauauu

SEQ ID NO: 3427722 - RNA, 20 nt, Human
auaauucugaguuuuguguu

SEQ ID NO: 3427723 - RNA, 22 nt, Human
auaauucuguacauagccuaua

SEQ ID NO: 3427724 - RNA, 13 nt, Human
auaauucuuauuu

SEQ ID NO: 3427725 - RNA, 16 nt, Human
auaauucuuugauuau

SEQ ID NO: 3427726 - RNA, 19 nt, Human
auaauucuuuuuuauuaau

SEQ ID NO: 3427727 - RNA, 22 nt, Human
auaauugacaggcgaaagaaaa

SEQ ID NO: 3427728 - RNA, 15 nt, Human
auaauugaucaaauu

SEQ ID NO: 3427729 - RNA, 13 nt, Human
auaauugcaucua

SEQ ID NO: 3427730 - RNA, 19 nt, Human
auaauugcaucuagguaau

SEQ ID NO: 3427731 - RNA, 17 nt, Human
auaauugccaaaaagug

SEQ ID NO: 3427732 - RNA, 18 nt, Human
auaauuggauuuccuaau

SEQ ID NO: 3427733 - RNA, 19 nt, Human
auaauugggucauagaaau

SEQ ID NO: 3427734 - RNA, 23 nt, Human
auaauuguaucagaggccuauaa

SEQ ID NO: 3427735 - RNA, 21 nt, Human
auaauugugauuagacagaac

SEQ ID NO: 3427736 - RNA, 18 nt, Human
auaauugugugauauuuc

SEQ ID NO: 3427737 - RNA, 22 nt, Human
auaauugugugauauuucagaa

SEQ ID NO: 3427738 - RNA, 23 nt, Human
auaauugugugauauuucagaaa

SEQ ID NO: 3427739 - RNA, 19 nt, Human
auaauuguugaaauuuugc

SEQ ID NO: 3427740 - RNA, 20 nt, Human
auaauuguugaaauuuugca

SEQ ID NO: 3427741 - RNA, 21 nt, Human
auaauuguugaaauuuugcaa

SEQ ID NO: 3427742 - RNA, 14 nt, Human
auaauuguugcaua

SEQ ID NO: 3427743 - RNA, 18 nt, Human
auaauuguuguucuguua

SEQ ID NO: 3427744 - RNA, 21 nt, Human
auaauuguuuuaucugaauuu

SEQ ID NO: 3427745 - RNA, 19 nt, Human
auaauuguuuuuuaucuuu

SEQ ID NO: 3427746 - RNA, 21 nt, Human
auaauuguuuuuuaucuuuuc

SEQ ID NO: 3427747 - RNA, 17 nt, Human
auaauuuaaaaauauau

SEQ ID NO: 3427748 - RNA, 21 nt, Human
auaauuuacugugacuuuauu

SEQ ID NO: 3427749 - RNA, 15 nt, Human
auaauuuaguuguuu

SEQ ID NO: 3427750 - RNA, 18 nt, Human
auaauuuaguuguuucua

SEQ ID NO: 3427751 - RNA, 20 nt, Human
auaauuuaguuguuucuaga

SEQ ID NO: 3427752 - RNA, 19 nt, Human
auaauuuauacaggucaua

SEQ ID NO: 3427753 - RNA, 21 nt, Human
auaauuuauacaggucauauu

SEQ ID NO: 3427754 - RNA, 20 nt, Human
auaauuuauuuccacuaaaa

SEQ ID NO: 3427755 - RNA, 13 nt, Human
auaauuucagggu

SEQ ID NO: 3427756 - RNA, 22 nt, Human
auaauuuccauuuacuuaagac

SEQ ID NO: 3427757 - RNA, 16 nt, Human
agcugcgguccaccca

SEQ ID NO: 3427758 - RNA, 17 nt, Human
agcugcgguccacccag

SEQ ID NO: 3427759 - RNA, 19 nt, Human
agcugcgguccacccagga

SEQ ID NO: 3427760 - RNA, 21 nt, Human
agcugcgguccacccaggagc

SEQ ID NO: 3427761 - RNA, 11 nt, Human
agcugcuacaa

SEQ ID NO: 3427762 - RNA, 13 nt, Human
agcugcuacaaag

SEQ ID NO: 3427763 - RNA, 16 nt, Human
agcugcuacaaagaag

SEQ ID NO: 3427764 - RNA, 15 nt, Human
agcugcuauagccug

SEQ ID NO: 3427765 - RNA, 21 nt, Human
agcugcuauagccuggggugg

SEQ ID NO: 3427766 - RNA, 18 nt, Human
agcugcuauccccaucuc

SEQ ID NO: 3427767 - RNA, 22 nt, Human
agcugcuauccccaucucccug

SEQ ID NO: 3427768 - RNA, 21 nt, Human
agcugcuauuuauuuuccuaa

SEQ ID NO: 3427769 - RNA, 23 nt, Human
agcugcucacuaccuccucaggg

SEQ ID NO: 3427770 - RNA, 21 nt, Human
agcugcucagggaaaagcagc

SEQ ID NO: 3427771 - RNA, 14 nt, Human
agcugcuccccacg

SEQ ID NO: 3427772 - RNA, 17 nt, Human
agcugcuccccacguca

SEQ ID NO: 3427773 - RNA, 13 nt, Human
agcugcuccccag

SEQ ID NO: 3427774 - RNA, 13 nt, Human
agcugcuccccuc

SEQ ID NO: 3427775 - RNA, 19 nt, Human
agcugcuccgaggacccag

SEQ ID NO: 3427776 - RNA, 22 nt, Human
agcugcuccuagagggaggggc

SEQ ID NO: 3427777 - RNA, 21 nt, Human
agcugcucugaaaucuccuuu

SEQ ID NO: 3427778 - RNA, 23 nt, Human
agcugcucugaauuaguccuugc

SEQ ID NO: 3427779 - RNA, 18 nt, Human
agcugcucugagccacag

SEQ ID NO: 3427780 - RNA, 14 nt, Human
agcugcucuggaaa

SEQ ID NO: 3427781 - RNA, 16 nt, Human
agcugcucugucuucu

SEQ ID NO: 3427782 - RNA, 14 nt, Human
agcugcugaaacaa

SEQ ID NO: 3427783 - RNA, 16 nt, Human
agcugcugaaacaaca

SEQ ID NO: 3427784 - RNA, 12 nt, Human
agcugcugacag

SEQ ID NO: 3427785 - RNA, 21 nt, Human
agcugcugagccgcagagaag

SEQ ID NO: 3427786 - RNA, 12 nt, Human
agcugcugucuu

SEQ ID NO: 3427787 - RNA, 15 nt, Human
agcugcuuccagugu

SEQ ID NO: 3427788 - RNA, 23 nt, Human
agcugcuuggaccucgugcuuua

SEQ ID NO: 3427789 - RNA, 19 nt, Human
agcugcuuucuguugucau

SEQ ID NO: 3427790 - RNA, 21 nt, Human
agcugcuuuguuaccuuaaaa

SEQ ID NO: 3427791 - RNA, 22 nt, Human
agcugcuuuguuaccuuaaaac

SEQ ID NO: 3427792 - RNA, 23 nt, Human
agcugcuuuuuuugaaacuuuga

SEQ ID NO: 3427793 - RNA, 13 nt, Human
agcuggaaaagua

SEQ ID NO: 3427794 - RNA, 21 nt, Human
agcuggaauuuuuuauucuug

SEQ ID NO: 3427795 - RNA, 23 nt, Human
agcuggaauuuuuuauucuugug

SEQ ID NO: 3427796 - RNA, 22 nt, Human
agcuggacagaggggacucugg

SEQ ID NO: 3427797 - RNA, 19 nt, Human
agcuggacucugcauccca

SEQ ID NO: 3427798 - RNA, 16 nt, Human
agcuggagaggagccc

SEQ ID NO: 3427799 - RNA, 18 nt, Human
agcuggagaggagcccug

SEQ ID NO: 3427800 - RNA, 19 nt, Human
agcuggagccuggugcccu

SEQ ID NO: 3427801 - RNA, 13 nt, Human
agcuggaggacua

SEQ ID NO: 3427802 - RNA, 23 nt, Human
agcuggauuggguuaugaauauu

SEQ ID NO: 3427803 - RNA, 18 nt, Human
agcuggccccgccgccug

SEQ ID NO: 3427804 - RNA, 15 nt, Human
agcuggcccgugaca

SEQ ID NO: 3427805 - RNA, 23 nt, Human
agcuggccgaggguccuggcucc

SEQ ID NO: 3427806 - RNA, 16 nt, Human
agcuggccgugggccu

SEQ ID NO: 3427807 - RNA, 17 nt, Human
agcuggccgugggccug

SEQ ID NO: 3427808 - RNA, 14 nt, Human
agcuggccucuacc

SEQ ID NO: 3427809 - RNA, 16 nt, Human
agcuggccucucuagc

SEQ ID NO: 3427810 - RNA, 15 nt, Human
agcuggcgucugucu

SEQ ID NO: 3427811 - RNA, 18 nt, Human
agcuggcgucugucuuca

SEQ ID NO: 3427812 - RNA, 14 nt, Human
agcuggcucaccuu

SEQ ID NO: 3427813 - RNA, 15 nt, Human
agcuggcuccagccu

SEQ ID NO: 3427814 - RNA, 18 nt, Human
agcuggcucugugagggu

SEQ ID NO: 3427815 - RNA, 21 nt, Human
agcuggcugggguggccugug

SEQ ID NO: 3427816 - RNA, 23 nt, Human
agcuggcugggguggccugugug

SEQ ID NO: 3427817 - RNA, 15 nt, Human
agcugggaaagcaua

SEQ ID NO: 3427818 - RNA, 15 nt, Human
agcugggacuacagg

SEQ ID NO: 3427819 - RNA, 13 nt, Human
agcugggaggcaa

SEQ ID NO: 3427820 - RNA, 22 nt, Human
agcugggaucacauguggacuu

SEQ ID NO: 3427821 - RNA, 17 nt, Human
agcugggauguuucugu

SEQ ID NO: 3427822 - RNA, 18 nt, Human
agcugggcagaaggccaa

SEQ ID NO: 3427823 - RNA, 13 nt, Human
agcugggccccag

SEQ ID NO: 3427824 - RNA, 14 nt, Human
agcugggccccagc

SEQ ID NO: 3427825 - RNA, 16 nt, Human
agcugggcccgacaug

SEQ ID NO: 3427826 - RNA, 22 nt, Human
agcugggcccgacauggcuccg

SEQ ID NO: 3427827 - RNA, 15 nt, Human
agcuggggaugucuc

SEQ ID NO: 3427828 - RNA, 20 nt, Human
agcuggggccaggcuggguc

SEQ ID NO: 3427829 - RNA, 16 nt, Human
agcuggggcgugggga

SEQ ID NO: 3427830 - RNA, 20 nt, Human
agcugggggugggccaggcu

SEQ ID NO: 3427831 - RNA, 21 nt, Human
agcugggggugggccaggcug

SEQ ID NO: 3427832 - RNA, 18 nt, Human
agcuggggugcagggaug

SEQ ID NO: 3427833 - RNA, 20 nt, Human
agcuggguaaucgauggggg

SEQ ID NO: 3427834 - RNA, 15 nt, Human
agcugggucaggcag

SEQ ID NO: 3427835 - RNA, 19 nt, Human
agcuggguggcacugccau

SEQ ID NO: 3427836 - RNA, 20 nt, Human
agcuggguggcacugccaug

SEQ ID NO: 3427837 - RNA, 17 nt, Human
agcugggugucaagagg

SEQ ID NO: 3427838 - RNA, 20 nt, Human
agcuggguuggaaaacagua

SEQ ID NO: 3427839 - RNA, 20 nt, Human
agcugguaaucuugcucugc

SEQ ID NO: 3427840 - RNA, 15 nt, Human
agcugguaguuagua

SEQ ID NO: 3427841 - RNA, 22 nt, Human
agcugguaguuaguagcauguu

SEQ ID NO: 3427842 - RNA, 19 nt, Human
agcuggucccacucagucc

SEQ ID NO: 3427843 - RNA, 10 nt, Human
agcuggugca

SEQ ID NO: 3427844 - RNA, 17 nt, Human
agcuggugcauuacaga

SEQ ID NO: 3427845 - RNA, 19 nt, Human
agcuggugcggcuggccau

SEQ ID NO: 3427846 - RNA, 20 nt, Human
agcuggugggugaaagaaau

SEQ ID NO: 3427847 - RNA, 21 nt, Human
agcuggugguaucugaguuga

SEQ ID NO: 3427848 - RNA, 12 nt, Human
agcuggugguuu

SEQ ID NO: 3427849 - RNA, 16 nt, Human
agcuggugguuucacg

SEQ ID NO: 3427850 - RNA, 13 nt, Human
agcugguguagcu

SEQ ID NO: 3427851 - RNA, 18 nt, Human
agcugguguagcuacaga

SEQ ID NO: 3427852 - RNA, 17 nt, Human
agcugguuagaaaugca

SEQ ID NO: 3427853 - RNA, 20 nt, Human
agcugguuuaauguuuuggc

SEQ ID NO: 3427854 - RNA, 21 nt, Human
agcugguuuccucauuccuga

SEQ ID NO: 3427855 - RNA, 18 nt, Human
agcuguaaaacgcuguca

SEQ ID NO: 3427856 - RNA, 14 nt, Human
agcuguaaaccaga

SEQ ID NO: 3427857 - RNA, 17 nt, Human
agcuguaaaccagagag

SEQ ID NO: 3427858 - RNA, 17 nt, Human
agcuguaagaagagacu

SEQ ID NO: 3427859 - RNA, 22 nt, Human
agcuguaagaagagacugggaa

SEQ ID NO: 3427860 - RNA, 23 nt, Human
agcuguaagaagagacugggaag

SEQ ID NO: 3427861 - RNA, 17 nt, Human
agcuguacaaauauaag

SEQ ID NO: 3427862 - RNA, 20 nt, Human
auacagucccuaaagaaaaa

SEQ ID NO: 3427863 - RNA, 17 nt, Human
auacagugcagagccuu

SEQ ID NO: 3427864 - RNA, 23 nt, Human
auacagugcagagccuucucaga

SEQ ID NO: 3427865 - RNA, 23 nt, Human
auacaguguuauuuucuuugaaa

SEQ ID NO: 3427866 - RNA, 22 nt, Human
auacaguuaggcaccagaagaa

SEQ ID NO: 3427867 - RNA, 15 nt, Human
auacaguucaauaaa

SEQ ID NO: 3427868 - RNA, 21 nt, Human
auacaguucggugagcuacaa

SEQ ID NO: 3427869 - RNA, 15 nt, Human
auacaguuuuaaaga

SEQ ID NO: 3427870 - RNA, 23 nt, Human
auacaguuuuaaagaaucauuau

SEQ ID NO: 3427871 - RNA, 19 nt, Human
auacaguuuuaugcucuuu

SEQ ID NO: 3427872 - RNA, 20 nt, Human
auacaguuuuaugcucuuuu

SEQ ID NO: 3427873 - RNA, 16 nt, Human
auacaguuuucagaaa

SEQ ID NO: 3427874 - RNA, 17 nt, Human
auacaguuuucagaaaa

SEQ ID NO: 3427875 - RNA, 15 nt, Human
auacaguuuuccuaa

SEQ ID NO: 3427876 - RNA, 12 nt, Human
auacauaauggg

SEQ ID NO: 3427877 - RNA, 17 nt, Human
auacauacagaauuacu

SEQ ID NO: 3427878 - RNA, 15 nt, Human
auacauacuaugaaa

SEQ ID NO: 3427879 - RNA, 16 nt, Human
auacauaucgcugacu

SEQ ID NO: 3427880 - RNA, 14 nt, Human
auacauaucuuuau

SEQ ID NO: 3427881 - RNA, 16 nt, Human
auacauaucuuuauua

SEQ ID NO: 3427882 - RNA, 15 nt, Human
auacauauggauguu

SEQ ID NO: 3427883 - RNA, 18 nt, Human
auacauauggauguuacu

SEQ ID NO: 3427884 - RNA, 18 nt, Human
auacaucacguuaaagua

SEQ ID NO: 3427885 - RNA, 12 nt, Human
auacaucacugc

SEQ ID NO: 3427886 - RNA, 13 nt, Human
auacaucacugcu

SEQ ID NO: 3427887 - RNA, 18 nt, Human
auacaucacugcuugaug

SEQ ID NO: 3427888 - RNA, 22 nt, Human
auacaucacugcuugaugaagc

SEQ ID NO: 3427889 - RNA, 15 nt, Human
auacauccuggguaa

SEQ ID NO: 3427890 - RNA, 16 nt, Human
auacauccuggguaau

SEQ ID NO: 3427891 - RNA, 18 nt, Human
auacauccuggguaauga

SEQ ID NO: 3427892 - RNA, 15 nt, Human
auacaugacacugaa

SEQ ID NO: 3427893 - RNA, 16 nt, Human
auacaugacacugaaa

SEQ ID NO: 3427894 - RNA, 19 nt, Human
auacaugaugauuucagaa

SEQ ID NO: 3427895 - RNA, 15 nt, Human
auacaugcauauaau

SEQ ID NO: 3427896 - RNA, 15 nt, Human
auacaugcugcuaau

SEQ ID NO: 3427897 - RNA, 22 nt, Human
auacauguaauucuaccaaggu

SEQ ID NO: 3427898 - RNA, 20 nt, Human
auacauguguguauauaugu

SEQ ID NO: 3427899 - RNA, 23 nt, Human
auacauguguguauauaugugua

SEQ ID NO: 3427900 - RNA, 14 nt, Human
auacauuaaagcag

SEQ ID NO: 3427901 - RNA, 21 nt, Human
auacauuaguaaaugucuuug

SEQ ID NO: 3427902 - RNA, 22 nt, Human
auacauuauauuucuauuuuau

SEQ ID NO: 3427903 - RNA, 21 nt, Human
auacauucaaauuugucuggu

SEQ ID NO: 3427904 - RNA, 13 nt, Human
auacauucuagau

SEQ ID NO: 3427905 - RNA, 16 nt, Human
auacauucuuuuugcu

SEQ ID NO: 3427906 - RNA, 21 nt, Human
auacauucuuuuugcucuaaa

SEQ ID NO: 3427907 - RNA, 19 nt, Human
auacauugaauuagaaaca

SEQ ID NO: 3427908 - RNA, 14 nt, Human
auacauuguacgaa

SEQ ID NO: 3427909 - RNA, 21 nt, Human
auacauuguacgaagaguauu

SEQ ID NO: 3427910 - RNA, 15 nt, Human
auacauuuaaaacuu

SEQ ID NO: 3427911 - RNA, 20 nt, Human
auacauuuauaauguuugcu

SEQ ID NO: 3427912 - RNA, 23 nt, Human
auacauuuauaauguuugcuauu

SEQ ID NO: 3427913 - RNA, 20 nt, Human
auacauuucuccuuugauaa

SEQ ID NO: 3427914 - RNA, 12 nt, Human
auacauuuguau

SEQ ID NO: 3427915 - RNA, 16 nt, Human
auacauuuucuaagaa

SEQ ID NO: 3427916 - RNA, 20 nt, Human
aguuuucccuugaggaaaca

SEQ ID NO: 3427917 - RNA, 10 nt, Human
aguuuuccua

SEQ ID NO: 3427918 - RNA, 16 nt, Human
aguuuuccuaugcuuu

SEQ ID NO: 3427919 - RNA, 22 nt, Human
aguuuuccuucucaucugugau

SEQ ID NO: 3427920 - RNA, 21 nt, Human
aguuuucucuuuguggggcuu

SEQ ID NO: 3427921 - RNA, 13 nt, Human
aguuuucugagaa

SEQ ID NO: 3427922 - RNA, 19 nt, Human
aguuuucugagaaagacua

SEQ ID NO: 3427923 - RNA, 23 nt, Human
aguuuucugagaaagacuauuca

SEQ ID NO: 3427924 - RNA, 13 nt, Human
aguuuucuggcug

SEQ ID NO: 3427925 - RNA, 13 nt, Human
aguuuucuuguug

SEQ ID NO: 3427926 - RNA, 21 nt, Human
aguuuucuuguugcuuuguug

SEQ ID NO: 3427927 - RNA, 16 nt, Human
aguuuucuuuuaauuu

SEQ ID NO: 3427928 - RNA, 14 nt, Human
aguuuugaaaagcu

SEQ ID NO: 3427929 - RNA, 18 nt, Human
aguuuugaagauucuaug

SEQ ID NO: 3427930 - RNA, 14 nt, Human
aguuuugacaagcu

SEQ ID NO: 3427931 - RNA, 18 nt, Human
aguuuugacaucagccag

SEQ ID NO: 3427932 - RNA, 18 nt, Human
aguuuugauauuucuagc

SEQ ID NO: 3427933 - RNA, 20 nt, Human
aguuuugaugacuggcauuu

SEQ ID NO: 3427934 - RNA, 21 nt, Human
aguuuugaugacuggcauuuu

SEQ ID NO: 3427935 - RNA, 17 nt, Human
aguuuuggaugcagugc

SEQ ID NO: 3427936 - RNA, 20 nt, Human
aguuuugggaaguuaaaggg

SEQ ID NO: 3427937 - RNA, 22 nt, Human
aguuuugguugcuuuaauauca

SEQ ID NO: 3427938 - RNA, 16 nt, Human
aguuuuguaaaagaaa

SEQ ID NO: 3427939 - RNA, 22 nt, Human
aguuuuguaaaagaaaucaugu

SEQ ID NO: 3427940 - RNA, 12 nt, Human
aguuuuguaaau

SEQ ID NO: 3427941 - RNA, 15 nt, Human
aguuuugugaaauuu

SEQ ID NO: 3427942 - RNA, 21 nt, Human
aguuuugugaaauuuuucaua

SEQ ID NO: 3427943 - RNA, 14 nt, Human
aguuuuguugcccc

SEQ ID NO: 3427944 - RNA, 13 nt, Human
aguuuuguuguac

SEQ ID NO: 3427945 - RNA, 16 nt, Human
aguuuuguuuggacca

SEQ ID NO: 3427946 - RNA, 15 nt, Human
aguuuuuaaacauca

SEQ ID NO: 3427947 - RNA, 18 nt, Human
aguuuuuaguaaucugua

SEQ ID NO: 3427948 - RNA, 23 nt, Human
aguuuuuauggcuuuugugcauu

SEQ ID NO: 3427949 - RNA, 15 nt, Human
aguuuuuauugcuug

SEQ ID NO: 3427950 - RNA, 9 nt, Human
aguuuuuca

SEQ ID NO: 3427951 - RNA, 17 nt, Human
aguuuuucagaaagcau

SEQ ID NO: 3427952 - RNA, 23 nt, Human
aguuuuucaggagcgcaagauag

SEQ ID NO: 3427953 - RNA, 20 nt, Human
aguuuuucauaagauauuuu

SEQ ID NO: 3427954 - RNA, 20 nt, Human
aguuuuucauuaaauaaauu

SEQ ID NO: 3427955 - RNA, 22 nt, Human
aguuuuucccagcuacaccuuu

SEQ ID NO: 3427956 - RNA, 13 nt, Human
aguuuuuccugga

SEQ ID NO: 3427957 - RNA, 16 nt, Human
aguuuuucuguauuuu

SEQ ID NO: 3427958 - RNA, 17 nt, Human
aguuuuugguugggaau

SEQ ID NO: 3427959 - RNA, 16 nt, Human
aguuuuuguaauuuau

SEQ ID NO: 3427960 - RNA, 12 nt, Human
aguuuuuguacu

SEQ ID NO: 3427961 - RNA, 19 nt, Human
aguuuuuguacuguaaaga

SEQ ID NO: 3427962 - RNA, 12 nt, Human
aguuuuuguucu

SEQ ID NO: 3427963 - RNA, 16 nt, Human
aguuuuuguuuggaga

SEQ ID NO: 3427964 - RNA, 21 nt, Human
aguuuuuuacuuuuguuuauu

SEQ ID NO: 3427965 - RNA, 17 nt, Human
aguuuuuucucuugggc

SEQ ID NO: 3427966 - RNA, 18 nt, Human
aguuuuuucucuugggcu

SEQ ID NO: 3427967 - RNA, 15 nt, Human
aguuuuuuguaccaa

SEQ ID NO: 3427968 - RNA, 12 nt, Human
aguuuuuuugcu

SEQ ID NO: 3427969 - RNA, 19 nt, Human
aguuuuuuuuuucuugucu

SEQ ID NO: 3427970 - RNA, 13 nt, Human
auaaaaaaaagaa

SEQ ID NO: 3427971 - RNA, 15 nt, Human
auaaaaaaaaugaaa

SEQ ID NO: 3427972 - RNA, 19 nt, Human
auaaaaaaacaaucauuug

SEQ ID NO: 3427973 - RNA, 15 nt, Human
auaaaaaaacagcuu

SEQ ID NO: 3427974 - RNA, 11 nt, Human
auaaaaaauaa

SEQ ID NO: 3427975 - RNA, 13 nt, Human
auaaaaaauaugu

SEQ ID NO: 3427976 - RNA, 13 nt, Human
auaaaaaaucaug

SEQ ID NO: 3427977 - RNA, 14 nt, Human
auaaaaaaugacaa

SEQ ID NO: 3427978 - RNA, 12 nt, Human
auaaaaaauggu

SEQ ID NO: 3427979 - RNA, 17 nt, Human
auaaaaaccaagaagau

SEQ ID NO: 3427980 - RNA, 16 nt, Human
auaaaaacuaaauugu

SEQ ID NO: 3427981 - RNA, 21 nt, Human
auaaaaacucaggcaaagaaa

SEQ ID NO: 3427982 - RNA, 20 nt, Human
auaaaaacuugaaaauauau

SEQ ID NO: 3427983 - RNA, 14 nt, Human
auaaaaagaaaggc

SEQ ID NO: 3427984 - RNA, 22 nt, Human
auaaaaagaucacuuucucagu

SEQ ID NO: 3427985 - RNA, 12 nt, Human
auaaaaagcuga

SEQ ID NO: 3427986 - RNA, 14 nt, Human
auaaaaaggacauc

SEQ ID NO: 3427987 - RNA, 19 nt, Human
auaaaaaggacaucagcaa

SEQ ID NO: 3427988 - RNA, 11 nt, Human
auaaaaaggca

SEQ ID NO: 3427989 - RNA, 10 nt, Human
auaaaaaguu

SEQ ID NO: 3427990 - RNA, 23 nt, Human
auaaaaauauauauagugcuaua

SEQ ID NO: 3427991 - RNA, 23 nt, Human
auaaaaauauuguguugugaaug

SEQ ID NO: 3427992 - RNA, 13 nt, Human
auaaaaaugacag

SEQ ID NO: 3427993 - RNA, 16 nt, Human
auaaaaaugaucuaaa

SEQ ID NO: 3427994 - RNA, 17 nt, Human
auaaaaaugaucuaaac

SEQ ID NO: 3427995 - RNA, 14 nt, Human
auaaaaauucugaa

SEQ ID NO: 3427996 - RNA, 13 nt, Human
auaaaacaaaggg

SEQ ID NO: 3427997 - RNA, 16 nt, Human
auaaaacaggucaaua

SEQ ID NO: 3427998 - RNA, 16 nt, Human
auaaaacaucuuucca

SEQ ID NO: 3427999 - RNA, 23 nt, Human
auaaaacauuuuaaauggacaga

SEQ ID NO: 3428000 - RNA, 18 nt, Human
auaaaaccccaucucuac

SEQ ID NO: 3428001 - RNA, 11 nt, Human
auaaaaccuuu

SEQ ID NO: 3428002 - RNA, 21 nt, Human
auaaaaccuuucaaauuucac

SEQ ID NO: 3428003 - RNA, 17 nt, Human
auaaaacugaugugaaa

SEQ ID NO: 3428004 - RNA, 15 nt, Human
auaaaagaaaaaaua

SEQ ID NO: 3428005 - RNA, 12 nt, Human
auaaaagaaaau

SEQ ID NO: 3428006 - RNA, 22 nt, Human
auaaaagaaaugcacaaugucu

SEQ ID NO: 3428007 - RNA, 16 nt, Human
auaaaagacagugaaa

SEQ ID NO: 3428008 - RNA, 15 nt, Human
auaauguaagcucua

SEQ ID NO: 3428009 - RNA, 18 nt, Human
auaauguauucauauuug

SEQ ID NO: 3428010 - RNA, 15 nt, Human
auaaugucucuguga

SEQ ID NO: 3428011 - RNA, 19 nt, Human
auaaugucucugugagacu

SEQ ID NO: 3428012 - RNA, 16 nt, Human
auaaugucuuguuaau

SEQ ID NO: 3428013 - RNA, 19 nt, Human
auaaugugaaacuggauua

SEQ ID NO: 3428014 - RNA, 12 nt, Human
auaaugugaaau

SEQ ID NO: 3428015 - RNA, 15 nt, Human
auaaugugaaaugua

SEQ ID NO: 3428016 - RNA, 21 nt, Human
auaaugugggaagaaacaaac

SEQ ID NO: 3428017 - RNA, 20 nt, Human
auaauguguaguucauguaa

SEQ ID NO: 3428018 - RNA, 18 nt, Human
auaauguuaaccaaggaa

SEQ ID NO: 3428019 - RNA, 14 nt, Human
auaauguucugcua

SEQ ID NO: 3428020 - RNA, 12 nt, Human
auaauguuguca

SEQ ID NO: 3428021 - RNA, 19 nt, Human
auaauguuuaauauugaga

SEQ ID NO: 3428022 - RNA, 16 nt, Human
auaauguuuauuaaau

SEQ ID NO: 3428023 - RNA, 15 nt, Human
auaauuaaagugucc

SEQ ID NO: 3428024 - RNA, 20 nt, Human
auaauuaaaguguccauuga

SEQ ID NO: 3428025 - RNA, 12 nt, Human
auaauuaacacu

SEQ ID NO: 3428026 - RNA, 17 nt, Human
auaauuaacauguuaaa

SEQ ID NO: 3428027 - RNA, 20 nt, Human
auaauuaacauguuaaacca

SEQ ID NO: 3428028 - RNA, 21 nt, Human
auaauuaacauguuaaaccau

SEQ ID NO: 3428029 - RNA, 22 nt, Human
auaauuaacauguuaaaccaug

SEQ ID NO: 3428030 - RNA, 20 nt, Human
auaauuaaccaagguagaau

SEQ ID NO: 3428031 - RNA, 14 nt, Human
auaauuacuauguc

SEQ ID NO: 3428032 - RNA, 19 nt, Human
auaauuagauccauuaauu

SEQ ID NO: 3428033 - RNA, 23 nt, Human
auaauuauaugcuauuucuauau

SEQ ID NO: 3428034 - RNA, 17 nt, Human
auaauuauccagaguuu

SEQ ID NO: 3428035 - RNA, 16 nt, Human
auaauuaucggaagca

SEQ ID NO: 3428036 - RNA, 19 nt, Human
auaauuaucggaagcagug

SEQ ID NO: 3428037 - RNA, 16 nt, Human
auaauuaugacaguua

SEQ ID NO: 3428038 - RNA, 16 nt, Human
auaauuauuuauuuaa

SEQ ID NO: 3428039 - RNA, 17 nt, Human
auaauuauuuauuuaau

SEQ ID NO: 3428040 - RNA, 13 nt, Human
auaauucacucaa

SEQ ID NO: 3428041 - RNA, 18 nt, Human
auaauucaguauguuuua

SEQ ID NO: 3428042 - RNA, 23 nt, Human
auaauucaguauguuuuacacug

SEQ ID NO: 3428043 - RNA, 12 nt, Human
auaauucuaaag

SEQ ID NO: 3428044 - RNA, 23 nt, Human
auaauucucauuaaaagaauauc

SEQ ID NO: 3428045 - RNA, 17 nt, Human
auaauucugaaguuaua

SEQ ID NO: 3428046 - RNA, 14 nt, Human
auaauucuguacau

SEQ ID NO: 3428047 - RNA, 19 nt, Human
auaauucuuauuuugugga

SEQ ID NO: 3428048 - RNA, 19 nt, Human
auaauucuuucaauacaga

SEQ ID NO: 3428049 - RNA, 23 nt, Human
auaauucuuucaauacagauaua

SEQ ID NO: 3428050 - RNA, 21 nt, Human
auaauucuuuuuuauuaauca

SEQ ID NO: 3428051 - RNA, 22 nt, Human
auaauucuuuuuuauuaaucac

SEQ ID NO: 3428052 - RNA, 15 nt, Human
auaauugaaguguau

SEQ ID NO: 3428053 - RNA, 19 nt, Human
auaauugaguuuucagugg

SEQ ID NO: 3428054 - RNA, 13 nt, Human
auaauugcauuca

SEQ ID NO: 3428055 - RNA, 14 nt, Human
auaauugcauucau

SEQ ID NO: 3428056 - RNA, 16 nt, Human
auaauugcauugacuu

SEQ ID NO: 3428057 - RNA, 21 nt, Human
auaauugccaaaaagugaaau

SEQ ID NO: 3428058 - RNA, 23 nt, Human
auaauugccaaaaagugaaauaa

SEQ ID NO: 3428059 - RNA, 16 nt, Human
auaauugcuauuuauu

SEQ ID NO: 3428060 - RNA, 13 nt, Human
auaauuguacaaa

SEQ ID NO: 3428061 - RNA, 19 nt, Human
auaauuguacaaaauuaag

SEQ ID NO: 3428062 - RNA, 15 nt, Human
auaauuguauauaug

SEQ ID NO: 3428063 - RNA, 17 nt, Human
auaauuguaucagaggc

SEQ ID NO: 3428064 - RNA, 20 nt, Human
auaauuguaucguauagcug

SEQ ID NO: 3428065 - RNA, 22 nt, Human
auaauuguaucguauagcugua

SEQ ID NO: 3428066 - RNA, 14 nt, Human
auaauugugugaua

SEQ ID NO: 3428067 - RNA, 17 nt, Human
auaauugugugauauuu

SEQ ID NO: 3428068 - RNA, 19 nt, Human
auaauugugugauauuuca

SEQ ID NO: 3428069 - RNA, 15 nt, Human
auaauuguucucaga

SEQ ID NO: 3428070 - RNA, 23 nt, Human
auaauuguucucagaaucccuua

SEQ ID NO: 3428071 - RNA, 12 nt, Human
auaauuguugaa

SEQ ID NO: 3428072 - RNA, 15 nt, Human
auaauuguugaaauu

SEQ ID NO: 3428073 - RNA, 23 nt, Human
auaauuguuguucuguuaacuga

SEQ ID NO: 3428074 - RNA, 19 nt, Human
auaauuuaaaaauauauuu

SEQ ID NO: 3428075 - RNA, 23 nt, Human
auaauuuaccuaagauuacaaau

SEQ ID NO: 3428076 - RNA, 18 nt, Human
auaauuuaccugaagucu

SEQ ID NO: 3428077 - RNA, 14 nt, Human
auaauuuagauggu

SEQ ID NO: 3428078 - RNA, 17 nt, Human
auaauuuaguuucauau

SEQ ID NO: 3428079 - RNA, 20 nt, Human
auaauuuaguuucauauaaa

SEQ ID NO: 3428080 - RNA, 12 nt, Human
auaauuucuaau

SEQ ID NO: 3428081 - RNA, 18 nt, Human
auaauuucuuacuaaaca

SEQ ID NO: 3428082 - RNA, 17 nt, Human
auaauuugaauuuuaug

SEQ ID NO: 3428083 - RNA, 19 nt, Human
auaauuuguacauauguaa

SEQ ID NO: 3428084 - RNA, 13 nt, Human
auaauuuguuucc

SEQ ID NO: 3428085 - RNA, 15 nt, Human
auaauuuuaaacaaa

SEQ ID NO: 3428086 - RNA, 12 nt, Human
auaauuuuaaau

SEQ ID NO: 3428087 - RNA, 13 nt, Human
auaauuuuaaaug

SEQ ID NO: 3428088 - RNA, 14 nt, Human
auaauuuuaaauuc

SEQ ID NO: 3428089 - RNA, 12 nt, Human
auaauuuuccuu

SEQ ID NO: 3428090 - RNA, 13 nt, Human
auaauuuuccuuu

SEQ ID NO: 3428091 - RNA, 19 nt, Human
auaauuuuccuuuaauaug

SEQ ID NO: 3428092 - RNA, 17 nt, Human
auaauuuucuucaugca

SEQ ID NO: 3428093 - RNA, 22 nt, Human
auaauuuucuucaugcaaugac

SEQ ID NO: 3428094 - RNA, 22 nt, Human
auaauuuugcuggaauuccuaa

SEQ ID NO: 3428095 - RNA, 13 nt, Human
auaauuuugugaa

SEQ ID NO: 3428096 - RNA, 14 nt, Human
auaauuuugugaag

SEQ ID NO: 3428097 - RNA, 15 nt, Human
auaauuuugugaagc

SEQ ID NO: 3428098 - RNA, 15 nt, Human
auaauuuuuaaagua

SEQ ID NO: 3428099 - RNA, 19 nt, Human
auaauuuuuaaaguauaua

SEQ ID NO: 3428100 - RNA, 17 nt, Human
auaauuuuuauauuuaa

SEQ ID NO: 3428101 - RNA, 23 nt, Human
auaauuuuuauauuuaauuauua

SEQ ID NO: 3428102 - RNA, 16 nt, Human
auaauuuuuuauucaa

SEQ ID NO: 3428103 - RNA, 17 nt, Human
auaauuuuuuauucaag

SEQ ID NO: 3428104 - RNA, 22 nt, Human
auaauuuuuuguaaugugugaa

SEQ ID NO: 3428105 - RNA, 23 nt, Human
auaauuuuuuuauuacugauuuu

SEQ ID NO: 3428106 - RNA, 21 nt, Human
auaauuuuuuucaauauuuau

SEQ ID NO: 3428107 - RNA, 22 nt, Human
auaauuuuuuucaauauuuauu

SEQ ID NO: 3428108 - RNA, 18 nt, Human
auacaaaaauacucagau

SEQ ID NO: 3428109 - RNA, 13 nt, Human
auacaaaaggcuc

SEQ ID NO: 3428110 - RNA, 16 nt, Human
auacaaacaagcauau

SEQ ID NO: 3428111 - RNA, 16 nt, Human
auacaaacaaucucuu

SEQ ID NO: 3428112 - RNA, 19 nt, Human
auacaaacauauuuguuaa

SEQ ID NO: 3428113 - RNA, 17 nt, Human
auacaaacugguauucu

SEQ ID NO: 3428114 - RNA, 11 nt, Human
auacaaagcau

SEQ ID NO: 3428115 - RNA, 18 nt, Human
auacaaagcgugcacaag

SEQ ID NO: 3428116 - RNA, 15 nt, Human
auacaaaugcaucuu

SEQ ID NO: 3428117 - RNA, 14 nt, Human
auacaaauggauuu

SEQ ID NO: 3428118 - RNA, 17 nt, Human
auacaaauuaaaaagau

SEQ ID NO: 3428119 - RNA, 18 nt, Human
auacaaauuaauuuuacu

SEQ ID NO: 3428120 - RNA, 17 nt, Human
auacaaauuagaaaaug

SEQ ID NO: 3428121 - RNA, 23 nt, Human
auacaaauugguugguuuugacu

SEQ ID NO: 3428122 - RNA, 17 nt, Human
auauaaguuugaaggaa

SEQ ID NO: 3428123 - RNA, 19 nt, Human
auauaaguuugaaggaaac

SEQ ID NO: 3428124 - RNA, 21 nt, Human
auauaauaaagcuacugauuu

SEQ ID NO: 3428125 - RNA, 12 nt, Human
auauaauaaagu

SEQ ID NO: 3428126 - RNA, 20 nt, Human
auauaauauauauauauauc

SEQ ID NO: 3428127 - RNA, 23 nt, Human
auauaauauauauauauaucagu

SEQ ID NO: 3428128 - RNA, 21 nt, Human
auauaaugguuucaaagauuc

SEQ ID NO: 3428129 - RNA, 14 nt, Human
auauaauuauaugu

SEQ ID NO: 3428130 - RNA, 15 nt, Human
auauaauuauauguu

SEQ ID NO: 3428131 - RNA, 14 nt, Human
auauaauuaucgga

SEQ ID NO: 3428132 - RNA, 14 nt, Human
auauaauuauguua

SEQ ID NO: 3428133 - RNA, 19 nt, Human
auauaauuauguuauugaa

SEQ ID NO: 3428134 - RNA, 16 nt, Human
auauaauuccuguuuu

SEQ ID NO: 3428135 - RNA, 14 nt, Human
auauaauucuguaa

SEQ ID NO: 3428136 - RNA, 14 nt, Human
auauaauucuguac

SEQ ID NO: 3428137 - RNA, 21 nt, Human
auauaauuuuuuuauguuuug

SEQ ID NO: 3428138 - RNA, 21 nt, Human
auauacaacaccaaaaaauau

SEQ ID NO: 3428139 - RNA, 16 nt, Human
auauacaauaacauaa

SEQ ID NO: 3428140 - RNA, 14 nt, Human
auauacaauaaugg

SEQ ID NO: 3428141 - RNA, 15 nt, Human
auauacaauaaugga

SEQ ID NO: 3428142 - RNA, 20 nt, Human
auauacaauaauggaaaaaa

SEQ ID NO: 3428143 - RNA, 17 nt, Human
auauacacacacaaaga

SEQ ID NO: 3428144 - RNA, 20 nt, Human
auauacacacacaaagagag

SEQ ID NO: 3428145 - RNA, 13 nt, Human
auauacacacagc

SEQ ID NO: 3428146 - RNA, 16 nt, Human
auauacacauauaccu

SEQ ID NO: 3428147 - RNA, 13 nt, Human
auauacacgaaua

SEQ ID NO: 3428148 - RNA, 20 nt, Human
auauacacgaauagacauca

SEQ ID NO: 3428149 - RNA, 13 nt, Human
auauacagaggaa

SEQ ID NO: 3428150 - RNA, 15 nt, Human
auauacagaugaaaa

SEQ ID NO: 3428151 - RNA, 16 nt, Human
auauacaguaacuuua

SEQ ID NO: 3428152 - RNA, 14 nt, Human
auauacauaacagg

SEQ ID NO: 3428153 - RNA, 19 nt, Human
auauauuguuaaucucugu

SEQ ID NO: 3428154 - RNA, 21 nt, Human
auauauuuaaagggaaauuga

SEQ ID NO: 3428155 - RNA, 12 nt, Human
auauauuuauaa

SEQ ID NO: 3428156 - RNA, 15 nt, Human
auauauuuauaacuc

SEQ ID NO: 3428157 - RNA, 16 nt, Human
auauauuuauuuaaag

SEQ ID NO: 3428158 - RNA, 19 nt, Human
auauauuucuaaauguuug

SEQ ID NO: 3428159 - RNA, 14 nt, Human
auauauuucuuugu

SEQ ID NO: 3428160 - RNA, 17 nt, Human
auauauuuguguauuua

SEQ ID NO: 3428161 - RNA, 22 nt, Human
auauauuuguguauuuaacagg

SEQ ID NO: 3428162 - RNA, 12 nt, Human
auauauuuuaag

SEQ ID NO: 3428163 - RNA, 18 nt, Human
auauauuuuauuuuuaga

SEQ ID NO: 3428164 - RNA, 15 nt, Human
auauauuuucuguuu

SEQ ID NO: 3428165 - RNA, 16 nt, Human
auauauuuuguaugca

SEQ ID NO: 3428166 - RNA, 19 nt, Human
auauauuuugugugaaauu

SEQ ID NO: 3428167 - RNA, 20 nt, Human
auauauuuugugugaaauug

SEQ ID NO: 3428168 - RNA, 14 nt, Human
auauauuuuuaaga

SEQ ID NO: 3428169 - RNA, 14 nt, Human
auauauuuuuauau

SEQ ID NO: 3428170 - RNA, 18 nt, Human
auauauuuuuauauuuac

SEQ ID NO: 3428171 - RNA, 20 nt, Human
auauauuuuuauauuuacua

SEQ ID NO: 3428172 - RNA, 17 nt, Human
auauauuuuuuaauuug

SEQ ID NO: 3428173 - RNA, 19 nt, Human
auauauuuuuuaauuugau

SEQ ID NO: 3428174 - RNA, 14 nt, Human
auauauuuuuugua

SEQ ID NO: 3428175 - RNA, 17 nt, Human
auaucaaaagacacagg

SEQ ID NO: 3428176 - RNA, 16 nt, Human
auaucaaauauauuca

SEQ ID NO: 3428177 - RNA, 21 nt, Human
auaucaaaugcaguauauuuc

SEQ ID NO: 3428178 - RNA, 19 nt, Human
auaucaaauuaauugugug

SEQ ID NO: 3428179 - RNA, 14 nt, Human
auaucacacacauu

SEQ ID NO: 3428180 - RNA, 18 nt, Human
auaucacauguuuucucu

SEQ ID NO: 3428181 - RNA, 16 nt, Human
auaucacccagacaua

SEQ ID NO: 3428182 - RNA, 19 nt, Human
auaucacccagacauaaag

SEQ ID NO: 3428183 - RNA, 14 nt, Human
auaucagcaagucu

SEQ ID NO: 3428184 - RNA, 20 nt, Human
auaucagccugagucuccug

SEQ ID NO: 3428185 - RNA, 21 nt, Human
auaucagccugagucuccugu

SEQ ID NO: 3428186 - RNA, 16 nt, Human
auaucagugacaguug

SEQ ID NO: 3428187 - RNA, 18 nt, Human
auaucaguuacucagccc

SEQ ID NO: 3428188 - RNA, 19 nt, Human
auaucaguuacucagcccu

SEQ ID NO: 3428189 - RNA, 21 nt, Human
auaucaguuacucagcccugg

SEQ ID NO: 3428190 - RNA, 12 nt, Human
auaucaguuuga

SEQ ID NO: 3428191 - RNA, 13 nt, Human
auaucauauguau

SEQ ID NO: 3428192 - RNA, 20 nt, Human
auaucaucagcauaccuuua

SEQ ID NO: 3428193 - RNA, 16 nt, Human
auaucaucuaccuaga

SEQ ID NO: 3428194 - RNA, 20 nt, Human
auaucaucuaccuagauuua

SEQ ID NO: 3428195 - RNA, 21 nt, Human
auaucaugagugaauaaaugu

SEQ ID NO: 3428196 - RNA, 22 nt, Human
auaucaugcuuuaaaguguaau

SEQ ID NO: 3428197 - RNA, 13 nt, Human
auaucauucuaaa

SEQ ID NO: 3428198 - RNA, 15 nt, Human
auaucauucuaaaga

SEQ ID NO: 3428199 - RNA, 23 nt, Human
auaucauuuauuuuuuacauuau

SEQ ID NO: 3428200 - RNA, 12 nt, Human
auaucauuucuu

SEQ ID NO: 3428201 - RNA, 21 nt, Human
auauccaggucaacagaauga

SEQ ID NO: 3428202 - RNA, 18 nt, Human
auauccauguacuguagu

SEQ ID NO: 3428203 - RNA, 18 nt, Human
auauccauucuuucugau

SEQ ID NO: 3428204 - RNA, 13 nt, Human
auauccccugcua

SEQ ID NO: 3428205 - RNA, 15 nt, Human
auaucccuacaugua

SEQ ID NO: 3428206 - RNA, 16 nt, Human
auaucccuacauguau

SEQ ID NO: 3428207 - RNA, 16 nt, Human
auaucccuuaaugaaa

SEQ ID NO: 3428208 - RNA, 11 nt, Human
auaucccuucc

SEQ ID NO: 3428209 - RNA, 13 nt, Human
auaucccuuccag

SEQ ID NO: 3428210 - RNA, 12 nt, Human
auauccuaauaa

SEQ ID NO: 3428211 - RNA, 14 nt, Human
auauccuaauaaaa

SEQ ID NO: 3428212 - RNA, 19 nt, Human
auauccuaggagguaauga

SEQ ID NO: 3428213 - RNA, 20 nt, Human
auauccucugcuuaaaaacu

SEQ ID NO: 3428214 - RNA, 12 nt, Human
auauccugccuc

SEQ ID NO: 3428215 - RNA, 18 nt, Human
auauccuuaucagagcua

SEQ ID NO: 3428216 - RNA, 15 nt, Human
auauccuuucuaaca

SEQ ID NO: 3428217 - RNA, 17 nt, Human
auaucgacuuguuuuug

SEQ ID NO: 3428218 - RNA, 18 nt, Human
auaucggcucacaaagag

SEQ ID NO: 3428219 - RNA, 21 nt, Human
auaucuaaaauauuauuuuau

SEQ ID NO: 3428220 - RNA, 14 nt, Human
auaucuaaaguuau

SEQ ID NO: 3428221 - RNA, 15 nt, Human
auaucuaaaguuaua

SEQ ID NO: 3428222 - RNA, 20 nt, Human
auaucuaaaguuauauuuca

SEQ ID NO: 3428223 - RNA, 18 nt, Human
auaucuaaaucuguccaa

SEQ ID NO: 3428224 - RNA, 13 nt, Human
auaucuaaauuga

SEQ ID NO: 3428225 - RNA, 14 nt, Human
auaucuaaauugaa

SEQ ID NO: 3428226 - RNA, 17 nt, Human
auaucuaaauugaauaa

SEQ ID NO: 3428227 - RNA, 18 nt, Human
auaucuaaauugaauaau

SEQ ID NO: 3428228 - RNA, 14 nt, Human
auaucuaauauaua

SEQ ID NO: 3428229 - RNA, 17 nt, Human
auaucuaauauauauga

SEQ ID NO: 3428230 - RNA, 18 nt, Human
auaucuaauauauaugaa

SEQ ID NO: 3428231 - RNA, 20 nt, Human
auaucuaauuauuuugcagu

SEQ ID NO: 3428232 - RNA, 23 nt, Human
auaucuagguuuaugacaguaau

SEQ ID NO: 3428233 - RNA, 17 nt, Human
auaucuaguaugaaauu

SEQ ID NO: 3428234 - RNA, 17 nt, Human
auaucuauaaacacugu

SEQ ID NO: 3428235 - RNA, 21 nt, Human
auaucuauauauaauucugua

SEQ ID NO: 3428236 - RNA, 18 nt, Human
auaucuauauauauaauu

SEQ ID NO: 3428237 - RNA, 16 nt, Human
auaucuaucuauuuga

SEQ ID NO: 3428238 - RNA, 13 nt, Human
auaucuaucuuau

SEQ ID NO: 3428239 - RNA, 17 nt, Human
auaucuauguuuuacca

SEQ ID NO: 3428240 - RNA, 13 nt, Human
auaucuccugaaa

SEQ ID NO: 3428241 - RNA, 17 nt, Human
auaucuccuuuguauuc

SEQ ID NO: 3428242 - RNA, 18 nt, Human
auaucugaacauuuacua

SEQ ID NO: 3428243 - RNA, 18 nt, Human
auaucugaggaauucugu

SEQ ID NO: 3428244 - RNA, 23 nt, Human
auaucugccuuuauuguguuugu

SEQ ID NO: 3428245 - RNA, 20 nt, Human
auaucuggccuaaaaucuug

SEQ ID NO: 3428246 - RNA, 19 nt, Human
auaucuggccucugcuuuc

SEQ ID NO: 3428247 - RNA, 17 nt, Human
auaucugggauucuacu

SEQ ID NO: 3428248 - RNA, 15 nt, Human
auaucuguaauggua

SEQ ID NO: 3428249 - RNA, 12 nt, Human
auaucuguaugu

SEQ ID NO: 3428250 - RNA, 13 nt, Human
auaucuguaugua

SEQ ID NO: 3428251 - RNA, 18 nt, Human
auaucuguggucuucaaa

SEQ ID NO: 3428252 - RNA, 16 nt, Human
auaucuguuuuacugc

SEQ ID NO: 3428253 - RNA, 19 nt, Human
auaucuuaaagaaacagcu

SEQ ID NO: 3428254 - RNA, 18 nt, Human
auaucuucguuaguaauc

SEQ ID NO: 3428255 - RNA, 17 nt, Human
auaucuugcgaauccaa

SEQ ID NO: 3428256 - RNA, 18 nt, Human
auaucuugcgaauccaag

SEQ ID NO: 3428257 - RNA, 23 nt, Human
auaucuugcuugaacuuacaggu

SEQ ID NO: 3428258 - RNA, 19 nt, Human
auaucuuggacaaaucaca

SEQ ID NO: 3428259 - RNA, 23 nt, Human
auaucuuugugauaauuuaagag

SEQ ID NO: 3428260 - RNA, 18 nt, Human
auaucuuuuauguuugaa

SEQ ID NO: 3428261 - RNA, 15 nt, Human
auaucuuuucuuuag

SEQ ID NO: 3428262 - RNA, 21 nt, Human
auaucuuuucuuuagagaacu

SEQ ID NO: 3428263 - RNA, 14 nt, Human
auaucuuuugaccu

SEQ ID NO: 3428264 - RNA, 21 nt, Human
auaucuuuuuauugaugugca

SEQ ID NO: 3428265 - RNA, 14 nt, Human
auaugaaaaauaug

SEQ ID NO: 3428266 - RNA, 17 nt, Human
auaugaaaaauaugaua

SEQ ID NO: 3428267 - RNA, 16 nt, Human
auaugaaaaaugagau

SEQ ID NO: 3428268 - RNA, 16 nt, Human
auaugaaaacuaaguu

SEQ ID NO: 3428269 - RNA, 15 nt, Human
auaugaaaacuauac

SEQ ID NO: 3428270 - RNA, 17 nt, Human
auaugaaaacuauacaa

SEQ ID NO: 3428271 - RNA, 16 nt, Human
auaugaaaauacaacu

SEQ ID NO: 3428272 - RNA, 17 nt, Human
auaugaacauacaaaug

SEQ ID NO: 3428273 - RNA, 18 nt, Human
auaugaacauacaaaugc

SEQ ID NO: 3428274 - RNA, 20 nt, Human
auaugaacauauuguugaaa

SEQ ID NO: 3428275 - RNA, 15 nt, Human
auaugaagacauaaa

SEQ ID NO: 3428276 - RNA, 16 nt, Human
auaugaagacauaaac

SEQ ID NO: 3428277 - RNA, 16 nt, Human
auaugaauauauagug

SEQ ID NO: 3428278 - RNA, 13 nt, Human
auaugaaucugcu

SEQ ID NO: 3428279 - RNA, 14 nt, Human
auaugaauuguaca

SEQ ID NO: 3428280 - RNA, 21 nt, Human
auaugaauuuaaauauaauuc

SEQ ID NO: 3428281 - RNA, 14 nt, Human
auaugacaaauguu

SEQ ID NO: 3428282 - RNA, 21 nt, Human
auaugacagcugucccuguca

SEQ ID NO: 3428283 - RNA, 20 nt, Human
auaugacucacaugaugcau

SEQ ID NO: 3428284 - RNA, 21 nt, Human
auaugacuguuuuucggacag

SEQ ID NO: 3428285 - RNA, 22 nt, Human
auaugagcuuccuucugugaaa

SEQ ID NO: 3428286 - RNA, 20 nt, Human
auaugaguauacaauauaua

SEQ ID NO: 3428287 - RNA, 13 nt, Human
auaccaaacaugc

SEQ ID NO: 3428288 - RNA, 17 nt, Human
auaccaaagcacauuuu

SEQ ID NO: 3428289 - RNA, 17 nt, Human
auaccaaguauuuauua

SEQ ID NO: 3428290 - RNA, 12 nt, Human
auaccaauaaag

SEQ ID NO: 3428291 - RNA, 16 nt, Human
auaccacccaaugcug

SEQ ID NO: 3428292 - RNA, 18 nt, Human
auaccacucuguaauugc

SEQ ID NO: 3428293 - RNA, 17 nt, Human
auaccacucuuuaccuu

SEQ ID NO: 3428294 - RNA, 21 nt, Human
auaccacucuuuaccuuuauu

SEQ ID NO: 3428295 - RNA, 17 nt, Human
auaccacuuuuguucuu

SEQ ID NO: 3428296 - RNA, 18 nt, Human
auaccacuuuuguucuug

SEQ ID NO: 3428297 - RNA, 17 nt, Human
auaccagccaguaaaug

SEQ ID NO: 3428298 - RNA, 16 nt, Human
auaucuguaaugguac

SEQ ID NO: 3428299 - RNA, 15 nt, Human
auaucuguauauaaa

SEQ ID NO: 3428300 - RNA, 20 nt, Human
auaucuguauuuaauuuuga

SEQ ID NO: 3428301 - RNA, 24 nt, Human
auaucuguauuuaauuuugacacu

SEQ ID NO: 3428302 - RNA, 13 nt, Human
auaucugugaaau

SEQ ID NO: 3428303 - RNA, 16 nt, Human
auaucuguuagaugcu

SEQ ID NO: 3428304 - RNA, 12 nt, Human
auaucuucacaa

SEQ ID NO: 3428305 - RNA, 14 nt, Human
auaucuucauuucu

SEQ ID NO: 3428306 - RNA, 18 nt, Human
auaucuucauuucuaaau

SEQ ID NO: 3428307 - RNA, 23 nt, Human
auaucuucguuaguaaucuguau

SEQ ID NO: 3428308 - RNA, 20 nt, Human
auaucuuggacaaaucacau

SEQ ID NO: 3428309 - RNA, 21 nt, Human
auaucuuggcagguaggaaua

SEQ ID NO: 3428310 - RNA, 23 nt, Human
auaucuuggccuaaaccucaguu

SEQ ID NO: 3428311 - RNA, 16 nt, Human
auaucuuuauuaauca

SEQ ID NO: 3428312 - RNA, 12 nt, Human
auaucuuucugc

SEQ ID NO: 3428313 - RNA, 16 nt, Human
auaucuuugugauaau

SEQ ID NO: 3428314 - RNA, 12 nt, Human
auaucuuuuaug

SEQ ID NO: 3428315 - RNA, 22 nt, Human
auaucuuuucuuuagagaacug

SEQ ID NO: 3428316 - RNA, 23 nt, Human
auaucuuuucuuuagagaacuga

SEQ ID NO: 3428317 - RNA, 15 nt, Human
auaucuuuuuauuga

SEQ ID NO: 3428318 - RNA, 16 nt, Human
auaucuuuuuauugau

SEQ ID NO: 3428319 - RNA, 22 nt, Human
auaucuuuuuauugaugugcaa

SEQ ID NO: 3428320 - RNA, 20 nt, Human
auaugaaaaaaaugcauuuu

SEQ ID NO: 3428321 - RNA, 18 nt, Human
auaugaaaaauaugauau

SEQ ID NO: 3428322 - RNA, 15 nt, Human
auaugaaaaaugaga

SEQ ID NO: 3428323 - RNA, 13 nt, Human
auaugaaagcuga

SEQ ID NO: 3428324 - RNA, 16 nt, Human
auaugaacauacaaau

SEQ ID NO: 3428325 - RNA, 17 nt, Human
auaugaacuuaacaugc

SEQ ID NO: 3428326 - RNA, 15 nt, Human
auaugaauuguacag

SEQ ID NO: 3428327 - RNA, 17 nt, Human
auaugaauuuaaauaua

SEQ ID NO: 3428328 - RNA, 18 nt, Human
auaugacaaauguuucua

SEQ ID NO: 3428329 - RNA, 23 nt, Human
auaugaccaaauaucaccaggac

SEQ ID NO: 3428330 - RNA, 13 nt, Human
auaugaccucaug

SEQ ID NO: 3428331 - RNA, 20 nt, Human
auaugacggaagaacauaga

SEQ ID NO: 3428332 - RNA, 15 nt, Human
auaugagaagaauag

SEQ ID NO: 3428333 - RNA, 23 nt, Human
auaugaggaugcagagucagcag

SEQ ID NO: 3428334 - RNA, 14 nt, Human
auaugaguauacaa

SEQ ID NO: 3428335 - RNA, 15 nt, Human
auaugaguauacaau

SEQ ID NO: 3428336 - RNA, 18 nt, Human
auaugaguauacaauaua

SEQ ID NO: 3428337 - RNA, 14 nt, Human
auaugauauguaaa

SEQ ID NO: 3428338 - RNA, 16 nt, Human
auaugauauguaaaca

SEQ ID NO: 3428339 - RNA, 14 nt, Human
auaugaucuguuuu

SEQ ID NO: 3428340 - RNA, 16 nt, Human
auaugaugacuguuuu

SEQ ID NO: 3428341 - RNA, 21 nt, Human
auaugauguuaaaaaaauaag

SEQ ID NO: 3428342 - RNA, 21 nt, Human
auaugauuaaaaauaucaaau

SEQ ID NO: 3428343 - RNA, 22 nt, Human
auaugauuaaaaauaucaaauu

SEQ ID NO: 3428344 - RNA, 16 nt, Human
auaugauuuaaaacau

SEQ ID NO: 3428345 - RNA, 22 nt, Human
aggagccucacuggggcagaca

SEQ ID NO: 3428346 - RNA, 14 nt, Human
aggagccugcccag

SEQ ID NO: 3428347 - RNA, 16 nt, Human
aggagccuguccugcc

SEQ ID NO: 3428348 - RNA, 19 nt, Human
aggagccuguccugccugu

SEQ ID NO: 3428349 - RNA, 21 nt, Human
aggagccuguccugccugugg

SEQ ID NO: 3428350 - RNA, 11 nt, Human
aggagccugug

SEQ ID NO: 3428351 - RNA, 13 nt, Human
aggagccugugaa

SEQ ID NO: 3428352 - RNA, 16 nt, Human
aggagccuuuuuaaaa

SEQ ID NO: 3428353 - RNA, 12 nt, Human
aggagcuaaggc

SEQ ID NO: 3428354 - RNA, 19 nt, Human
aggagcuaaggcucuauga

SEQ ID NO: 3428355 - RNA, 20 nt, Human
aggagcuaaggcucuaugag

SEQ ID NO: 3428356 - RNA, 22 nt, Human
aggagcuacccuuuuccuuugu

SEQ ID NO: 3428357 - RNA, 14 nt, Human
aggagcuaccugug

SEQ ID NO: 3428358 - RNA, 15 nt, Human
aggagcuaccugugu

SEQ ID NO: 3428359 - RNA, 23 nt, Human
aggagcuaccuguguggacagga

SEQ ID NO: 3428360 - RNA, 12 nt, Human
aggagcuccccu

SEQ ID NO: 3428361 - RNA, 17 nt, Human
aggagcuccccucccca

SEQ ID NO: 3428362 - RNA, 20 nt, Human
aggagcuccccuccccaacu

SEQ ID NO: 3428363 - RNA, 17 nt, Human
aggagcucuucaggccu

SEQ ID NO: 3428364 - RNA, 19 nt, Human
aggagcucuucaggccucc

SEQ ID NO: 3428365 - RNA, 15 nt, Human
aggagcugagaauag

SEQ ID NO: 3428366 - RNA, 17 nt, Human
aggagcugagaauagaa

SEQ ID NO: 3428367 - RNA, 21 nt, Human
aggagcugcccagaguugcug

SEQ ID NO: 3428368 - RNA, 17 nt, Human
aggagcugccuggaccc

SEQ ID NO: 3428369 - RNA, 18 nt, Human
aggagcugccuggacccg

SEQ ID NO: 3428370 - RNA, 19 nt, Human
aggagcugccuuggcucag

SEQ ID NO: 3428371 - RNA, 11 nt, Human
aggagcugcua

SEQ ID NO: 3428372 - RNA, 19 nt, Human
aggagcugcuauagccugg

SEQ ID NO: 3428373 - RNA, 20 nt, Human
aggagcugcuauagccuggg

SEQ ID NO: 3428374 - RNA, 13 nt, Human
aggagcugcuggc

SEQ ID NO: 3428375 - RNA, 21 nt, Human
aggagcugcuggcuugcagug

SEQ ID NO: 3428376 - RNA, 15 nt, Human
aggagcugggagccg

SEQ ID NO: 3428377 - RNA, 12 nt, Human
aggagcugggga

SEQ ID NO: 3428378 - RNA, 20 nt, Human
aggagcuuaccucccaccuu

SEQ ID NO: 3428379 - RNA, 20 nt, Human
aggagcuuccuguccuccca

SEQ ID NO: 3428380 - RNA, 20 nt, Human
aggagcuucuggggucccca

SEQ ID NO: 3428381 - RNA, 19 nt, Human
aggagcuucuuguuuccuu

SEQ ID NO: 3428382 - RNA, 18 nt, Human
aggagcuuugacucagga

SEQ ID NO: 3428383 - RNA, 14 nt, Human
aggaggaauacuga

SEQ ID NO: 3428384 - RNA, 22 nt, Human
aggaggaaucaugucaggccug

SEQ ID NO: 3428385 - RNA, 12 nt, Human
aggaggacccag

SEQ ID NO: 3428386 - RNA, 13 nt, Human
aggaggacccagg

SEQ ID NO: 3428387 - RNA, 16 nt, Human
aggaggacccagggcu

SEQ ID NO: 3428388 - RNA, 17 nt, Human
aggaggacccagggcuc

SEQ ID NO: 3428389 - RNA, 22 nt, Human
aggaggagccuguccugccugu

SEQ ID NO: 3428390 - RNA, 14 nt, Human
aggaggaggagggu

SEQ ID NO: 3428391 - RNA, 15 nt, Human
aggaggaugggcucg

SEQ ID NO: 3428392 - RNA, 15 nt, Human
aggaggaugucccug

SEQ ID NO: 3428393 - RNA, 21 nt, Human
aggaggaugucccugggccag

SEQ ID NO: 3428394 - RNA, 14 nt, Human
aggaggcagcagga

SEQ ID NO: 3428395 - RNA, 15 nt, Human
aggaggcagcaggac

SEQ ID NO: 3428396 - RNA, 20 nt, Human
aggaggcagcuguugcagug

SEQ ID NO: 3428397 - RNA, 14 nt, Human
aggaggcaggaccu

SEQ ID NO: 3428398 - RNA, 22 nt, Human
aggaggcaggcauggcccuggg

SEQ ID NO: 3428399 - RNA, 17 nt, Human
aggaggcaugccucuga

SEQ ID NO: 3428400 - RNA, 16 nt, Human
aggaggccaccucucc

SEQ ID NO: 3428401 - RNA, 20 nt, Human
aggaggccaccucuccaagg

SEQ ID NO: 3428402 - RNA, 14 nt, Human
aggaggccacguga

SEQ ID NO: 3428403 - RNA, 13 nt, Human
aggaggccaggcc

SEQ ID NO: 3428404 - RNA, 16 nt, Human
aggaggccaggcucag

SEQ ID NO: 3428405 - RNA, 17 nt, Human
aggaggccccuggccca

SEQ ID NO: 3428406 - RNA, 16 nt, Human
aggaggccggggccgg

SEQ ID NO: 3428407 - RNA, 20 nt, Human
aggaggccuugggcucugcu

SEQ ID NO: 3428408 - RNA, 23 nt, Human
aggaggcgcacuuuccuccuggc

SEQ ID NO: 3428409 - RNA, 21 nt, Human
aggaggcgucucgggagagga

SEQ ID NO: 3428410 - RNA, 23 nt, Human
aggaggcuaugcucaggggcccu

SEQ ID NO: 3428411 - RNA, 17 nt, Human
aggaggcuccagagggc

SEQ ID NO: 3428412 - RNA, 16 nt, Human
aggaggcugaggcaga

SEQ ID NO: 3428413 - RNA, 19 nt, Human
aggaggcugaggcaggagg

SEQ ID NO: 3428414 - RNA, 13 nt, Human
aggaggcugaggg

SEQ ID NO: 3428415 - RNA, 16 nt, Human
aggaggcuggcaggua

SEQ ID NO: 3428416 - RNA, 22 nt, Human
aggaggcugggacgcucugcug

SEQ ID NO: 3428417 - RNA, 15 nt, Human
aggagggaaaccuuu

SEQ ID NO: 3428418 - RNA, 13 nt, Human
aggagggagaggg

SEQ ID NO: 3428419 - RNA, 14 nt, Human
aggagggagaggga

SEQ ID NO: 3428420 - RNA, 14 nt, Human
aggagggaggggga

SEQ ID NO: 3428421 - RNA, 23 nt, Human
aggagggagguauucgugcagca

SEQ ID NO: 3428422 - RNA, 16 nt, Human
aggagggcaagggcca

SEQ ID NO: 3428423 - RNA, 15 nt, Human
aggagggcaggcauc

SEQ ID NO: 3428424 - RNA, 14 nt, Human
aggagggcauccau

SEQ ID NO: 3428425 - RNA, 20 nt, Human
aggagggcccuaccugauug

SEQ ID NO: 3428426 - RNA, 17 nt, Human
aggagggcgugacucac

SEQ ID NO: 3428427 - RNA, 16 nt, Human
aggagggcguucuuag

SEQ ID NO: 3428428 - RNA, 18 nt, Human
aggaggggaagaggccug

SEQ ID NO: 3428429 - RNA, 17 nt, Human
aggaggggauagagaga

SEQ ID NO: 3428430 - RNA, 23 nt, Human
aggaggggccccccugcccugug

SEQ ID NO: 3428431 - RNA, 20 nt, Human
aggaggggcccguugucucc

SEQ ID NO: 3428432 - RNA, 16 nt, Human
aggaggggggagggaa

SEQ ID NO: 3428433 - RNA, 20 nt, Human
aggagggggucguggagagc

SEQ ID NO: 3428434 - RNA, 18 nt, Human
aggagggucaggaaggau

SEQ ID NO: 3428435 - RNA, 14 nt, Human
aggagggugggaag

SEQ ID NO: 3428436 - RNA, 21 nt, Human
aggagggugggggagggaggu

SEQ ID NO: 3428437 - RNA, 22 nt, Human
aggagguaaugaccaugaaaga

SEQ ID NO: 3428438 - RNA, 23 nt, Human
aggagguccuuaggccucugaga

SEQ ID NO: 3428439 - RNA, 15 nt, Human
aggaggucucuaaga

SEQ ID NO: 3428440 - RNA, 14 nt, Human
aggaggugagggau

SEQ ID NO: 3428441 - RNA, 15 nt, Human
aggaggugccaacag

SEQ ID NO: 3428442 - RNA, 14 nt, Human
aggagguggcagcc

SEQ ID NO: 3428443 - RNA, 18 nt, Human
aucaucaguggagccaug

SEQ ID NO: 3428444 - RNA, 15 nt, Human
aucaucaguguagaa

SEQ ID NO: 3428445 - RNA, 16 nt, Human
aucaucaguguagaac

SEQ ID NO: 3428446 - RNA, 19 nt, Human
aucaucauaguaaaagaaa

SEQ ID NO: 3428447 - RNA, 13 nt, Human
aucaucauggcca

SEQ ID NO: 3428448 - RNA, 16 nt, Human
aucaucauuauuauua

SEQ ID NO: 3428449 - RNA, 14 nt, Human
aucauccacacaug

SEQ ID NO: 3428450 - RNA, 15 nt, Human
aucauccuaagcuau

SEQ ID NO: 3428451 - RNA, 13 nt, Human
aucauccucuggc

SEQ ID NO: 3428452 - RNA, 21 nt, Human
aucauccuuuagguaagaagu

SEQ ID NO: 3428453 - RNA, 18 nt, Human
aucauccuuuccagcaug

SEQ ID NO: 3428454 - RNA, 20 nt, Human
aucaucgaaaauucauuuca

SEQ ID NO: 3428455 - RNA, 16 nt, Human
aucaucgccagaggug

SEQ ID NO: 3428456 - RNA, 20 nt, Human
aucaucgccagaggugcuuc

SEQ ID NO: 3428457 - RNA, 16 nt, Human
aucaucuauaaagaag

SEQ ID NO: 3428458 - RNA, 15 nt, Human
aucaucuauagaaag

SEQ ID NO: 3428459 - RNA, 19 nt, Human
aucaucuauuuugaugcag

SEQ ID NO: 3428460 - RNA, 21 nt, Human
aucaucuauuuugaugcagca

SEQ ID NO: 3428461 - RNA, 23 nt, Human
aucaucuauuuugaugcagcauu

SEQ ID NO: 3428462 - RNA, 20 nt, Human
aucaucuccugccuuccucc

SEQ ID NO: 3428463 - RNA, 16 nt, Human
aucaucuguaagcugu

SEQ ID NO: 3428464 - RNA, 17 nt, Human
aucaucuguaagcuguu

SEQ ID NO: 3428465 - RNA, 13 nt, Human
aucaucuguguga

SEQ ID NO: 3428466 - RNA, 19 nt, Human
aucaucugugugaaaaugg

SEQ ID NO: 3428467 - RNA, 21 nt, Human
aucaucuugaacauuaaucca

SEQ ID NO: 3428468 - RNA, 23 nt, Human
aucaugaaacuuguuucacugaa

SEQ ID NO: 3428469 - RNA, 11 nt, Human
aucaugaagcc

SEQ ID NO: 3428470 - RNA, 14 nt, Human
aucaugaagccugu

SEQ ID NO: 3428471 - RNA, 19 nt, Human
aucaugaaucuuuguuuca

SEQ ID NO: 3428472 - RNA, 15 nt, Human
aucaugaauguguaa

SEQ ID NO: 3428473 - RNA, 18 nt, Human
aucaugcacacaauuaga

SEQ ID NO: 3428474 - RNA, 14 nt, Human
aucaugcauagagu

SEQ ID NO: 3428475 - RNA, 22 nt, Human
aucaugcaucuuacugaaggua

SEQ ID NO: 3428476 - RNA, 22 nt, Human
aucaugcauuguugaggugguc

SEQ ID NO: 3428477 - RNA, 16 nt, Human
aucaugccucugaggc

SEQ ID NO: 3428478 - RNA, 17 nt, Human
aucaugccucugaggcc

SEQ ID NO: 3428479 - RNA, 20 nt, Human
aucaugccucugaggccagc

SEQ ID NO: 3428480 - RNA, 22 nt, Human
aucaugccucugaggccagccu

SEQ ID NO: 3428481 - RNA, 23 nt, Human
aucaugccucugaggccagccug

SEQ ID NO: 3428482 - RNA, 19 nt, Human
aucaugcuggaaccugcaa

SEQ ID NO: 3428483 - RNA, 22 nt, Human
aucaugcuggaaccugcaaaaa

SEQ ID NO: 3428484 - RNA, 15 nt, Human
aucauggaaauauua

SEQ ID NO: 3428485 - RNA, 12 nt, Human
aucauggaguga

SEQ ID NO: 3428486 - RNA, 20 nt, Human
aucauggauucauuacagcu

SEQ ID NO: 3428487 - RNA, 14 nt, Human
aucauggccagcug

SEQ ID NO: 3428488 - RNA, 22 nt, Human
aucauggcuaagcuuaaaaaaa

SEQ ID NO: 3428489 - RNA, 20 nt, Human
aucauggcucacugcagccu

SEQ ID NO: 3428490 - RNA, 15 nt, Human
aucauggugaaaagc

SEQ ID NO: 3428491 - RNA, 17 nt, Human
aucaugguguaauaaga

SEQ ID NO: 3428492 - RNA, 14 nt, Human
aucauguaaagaaa

SEQ ID NO: 3428493 - RNA, 14 nt, Human
aucauguaaauuac

SEQ ID NO: 3428494 - RNA, 18 nt, Human
aucauguacuuuuuagua

SEQ ID NO: 3428495 - RNA, 18 nt, Human
aucaugucaggccugugu

SEQ ID NO: 3428496 - RNA, 14 nt, Human
aucaugucuauugu

SEQ ID NO: 3428497 - RNA, 18 nt, Human
aucaugugcgucagucca

SEQ ID NO: 3428498 - RNA, 17 nt, Human
aucauguggccccaccc

SEQ ID NO: 3428499 - RNA, 19 nt, Human
aucauguuaauccuagcug

SEQ ID NO: 3428500 - RNA, 19 nt, Human
aucauguugaucauguacu

SEQ ID NO: 3428501 - RNA, 21 nt, Human
aucauguuguuaaaauuauga

SEQ ID NO: 3428502 - RNA, 18 nt, Human
aucauguuuacagaggac

SEQ ID NO: 3428503 - RNA, 16 nt, Human
aucauguuucuuugau

SEQ ID NO: 3428504 - RNA, 16 nt, Human
aucauguuugcucucc

SEQ ID NO: 3428505 - RNA, 21 nt, Human
aucauuaaaagaacauaaguu

SEQ ID NO: 3428506 - RNA, 22 nt, Human
aucauuacccuucccugcacua

SEQ ID NO: 3428507 - RNA, 23 nt, Human
aucauuaccuuuuaccagcuuuu

SEQ ID NO: 3428508 - RNA, 11 nt, Human
aucauuagaac

SEQ ID NO: 3428509 - RNA, 16 nt, Human
aucauuaggugugacu

SEQ ID NO: 3428510 - RNA, 18 nt, Human
aggauauauuuucacuuu

SEQ ID NO: 3428511 - RNA, 23 nt, Human
aggauauccuuaucagagcuaag

SEQ ID NO: 3428512 - RNA, 15 nt, Human
aggauaucuucucca

SEQ ID NO: 3428513 - RNA, 17 nt, Human
aggauaugccugcucuu

SEQ ID NO: 3428514 - RNA, 16 nt, Human
aggauauggacacugg

SEQ ID NO: 3428515 - RNA, 18 nt, Human
aggauauggacacuggug

SEQ ID NO: 3428516 - RNA, 21 nt, Human
aggauauguucacaccuagcg

SEQ ID NO: 3428517 - RNA, 17 nt, Human
aggauauuuaagaaaau

SEQ ID NO: 3428518 - RNA, 18 nt, Human
aggauauuuaagaaaaua

SEQ ID NO: 3428519 - RNA, 19 nt, Human
aggauauuuugucaccaga

SEQ ID NO: 3428520 - RNA, 12 nt, Human
aggaucagaaag

SEQ ID NO: 3428521 - RNA, 17 nt, Human
aggaucaugguguaaua

SEQ ID NO: 3428522 - RNA, 21 nt, Human
aggaucauuuguuggaaugaa

SEQ ID NO: 3428523 - RNA, 20 nt, Human
aggauccuauucucaccagg

SEQ ID NO: 3428524 - RNA, 21 nt, Human
aggauccuauucucaccagga

SEQ ID NO: 3428525 - RNA, 22 nt, Human
aggauccuauucucaccaggaa

SEQ ID NO: 3428526 - RNA, 13 nt, Human
aggauccugagcc

SEQ ID NO: 3428527 - RNA, 16 nt, Human
aggaucuagaaugugu

SEQ ID NO: 3428528 - RNA, 18 nt, Human
aggaucuauuuuuggagg

SEQ ID NO: 3428529 - RNA, 19 nt, Human
aggaucuauuuuuggaggu

SEQ ID NO: 3428530 - RNA, 21 nt, Human
aggaucuauuuuuggagguuu

SEQ ID NO: 3428531 - RNA, 18 nt, Human
aggaucucaccaggcagc

SEQ ID NO: 3428532 - RNA, 13 nt, Human
aggaucucucagg

SEQ ID NO: 3428533 - RNA, 14 nt, Human
aggaucucucagga

SEQ ID NO: 3428534 - RNA, 18 nt, Human
aggaucucuugagccugg

SEQ ID NO: 3428535 - RNA, 21 nt, Human
aggaucucuugagccugggag

SEQ ID NO: 3428536 - RNA, 14 nt, Human
aggaucuggagaac

SEQ ID NO: 3428537 - RNA, 15 nt, Human
aggaucuuuguggcc

SEQ ID NO: 3428538 - RNA, 17 nt, Human
aggaucuuuguggccaa

SEQ ID NO: 3428539 - RNA, 18 nt, Human
aggaucuuuugaacccag

SEQ ID NO: 3428540 - RNA, 19 nt, Human
aggaugaaugaggucccag

SEQ ID NO: 3428541 - RNA, 12 nt, Human
aggaugaaugua

SEQ ID NO: 3428542 - RNA, 23 nt, Human
aggaugacaaaauucuuucuggu

SEQ ID NO: 3428543 - RNA, 16 nt, Human
aggaugagagcccaga

SEQ ID NO: 3428544 - RNA, 19 nt, Human
aggaugagcucuacccagg

SEQ ID NO: 3428545 - RNA, 22 nt, Human
aggaugagggaaaagaaaaaga

SEQ ID NO: 3428546 - RNA, 23 nt, Human
aggaugaugucuuuuuauuaaaa

SEQ ID NO: 3428547 - RNA, 19 nt, Human
aggaugcccaaagaugcag

SEQ ID NO: 3428548 - RNA, 14 nt, Human
aggaugcccagggc

SEQ ID NO: 3428549 - RNA, 17 nt, Human
aggaugcuaaaccuuag

SEQ ID NO: 3428550 - RNA, 17 nt, Human
aggaugcuaacaucuaa

SEQ ID NO: 3428551 - RNA, 19 nt, Human
aggaugcuaacaucuaaaa

SEQ ID NO: 3428552 - RNA, 22 nt, Human
aggaugcuaacaucuaaaaaua

SEQ ID NO: 3428553 - RNA, 12 nt, Human
aggaugcuggcc

SEQ ID NO: 3428554 - RNA, 15 nt, Human
aggaugcuggguggc

SEQ ID NO: 3428555 - RNA, 21 nt, Human
aggaugcuugauuccaguggu

SEQ ID NO: 3428556 - RNA, 13 nt, Human
aggaugcuuggga

SEQ ID NO: 3428557 - RNA, 15 nt, Human
aggaugcuuguacau

SEQ ID NO: 3428558 - RNA, 16 nt, Human
aggaugcuuguacaua

SEQ ID NO: 3428559 - RNA, 21 nt, Human
aggaugcuuguacauaaugcg

SEQ ID NO: 3428560 - RNA, 17 nt, Human
aggauggagagagggga

SEQ ID NO: 3428561 - RNA, 15 nt, Human
aggauggcaggacgu

SEQ ID NO: 3428562 - RNA, 15 nt, Human
aggauggccaguguc

SEQ ID NO: 3428563 - RNA, 13 nt, Human
aggauggccuggc

SEQ ID NO: 3428564 - RNA, 12 nt, Human
aggaugggaagg

SEQ ID NO: 3428565 - RNA, 22 nt, Human
aggaugggucugguuugcagag

SEQ ID NO: 3428566 - RNA, 18 nt, Human
aggauggucuuacagcag

SEQ ID NO: 3428567 - RNA, 23 nt, Human
aggaugguucccuugaugaagaa

SEQ ID NO: 3428568 - RNA, 19 nt, Human
aggauguaaacagugccug

SEQ ID NO: 3428569 - RNA, 21 nt, Human
aggauguaaacagugccugcu

SEQ ID NO: 3428570 - RNA, 22 nt, Human
aggauguacaaggacagccccu

SEQ ID NO: 3428571 - RNA, 15 nt, Human
aggauguagcuuuuc

SEQ ID NO: 3428572 - RNA, 20 nt, Human
aggauguauauuuuauauaa

SEQ ID NO: 3428573 - RNA, 21 nt, Human
aggauguauauuuuauauaaa

SEQ ID NO: 3428574 - RNA, 18 nt, Human
aggaugucacagggccaa

SEQ ID NO: 3428575 - RNA, 20 nt, Human
aggaugucccugggccaggg

SEQ ID NO: 3428576 - RNA, 17 nt, Human
aggaugucucaaacuuc

SEQ ID NO: 3428577 - RNA, 14 nt, Human
aggaugugggcagc

SEQ ID NO: 3428578 - RNA, 18 nt, Human
aggauguucugggacaca

SEQ ID NO: 3428579 - RNA, 14 nt, Human
aggauguugaaaaa

SEQ ID NO: 3428580 - RNA, 17 nt, Human
aggauuaguuuagaaca

SEQ ID NO: 3428581 - RNA, 14 nt, Human
aggauuauuggaaa

SEQ ID NO: 3428582 - RNA, 18 nt, Human
aggauucacaccccaccu

SEQ ID NO: 3428583 - RNA, 19 nt, Human
aggauucacaccccaccug

SEQ ID NO: 3428584 - RNA, 20 nt, Human
aggauucacaccccaccugc

SEQ ID NO: 3428585 - RNA, 22 nt, Human
aggauucacaccccaccugcgc

SEQ ID NO: 3428586 - RNA, 15 nt, Human
aggauuccucuuuuc

SEQ ID NO: 3428587 - RNA, 23 nt, Human
aucagaguagaaauaaaagugaa

SEQ ID NO: 3428588 - RNA, 13 nt, Human
aucagauacauca

SEQ ID NO: 3428589 - RNA, 20 nt, Human
aucagaugcuccaagauucu

SEQ ID NO: 3428590 - RNA, 22 nt, Human
aucagaugcuccaagauucuag

SEQ ID NO: 3428591 - RNA, 15 nt, Human
aucagauugcaugug

SEQ ID NO: 3428592 - RNA, 16 nt, Human
aucagauugcauguga

SEQ ID NO: 3428593 - RNA, 21 nt, Human
aucagcaaaccggggccuacu

SEQ ID NO: 3428594 - RNA, 14 nt, Human
aucagcaaagaaaa

SEQ ID NO: 3428595 - RNA, 23 nt, Human
aucagcaaagaaaaaaaaaaaag

SEQ ID NO: 3428596 - RNA, 16 nt, Human
aucagcacgauuucug

SEQ ID NO: 3428597 - RNA, 18 nt, Human
aucagcacgauuucuguu

SEQ ID NO: 3428598 - RNA, 15 nt, Human
aucagcacugaaaau

SEQ ID NO: 3428599 - RNA, 16 nt, Human
aucagccaaguuuuau

SEQ ID NO: 3428600 - RNA, 19 nt, Human
aucagccaaguuuuauaau

SEQ ID NO: 3428601 - RNA, 15 nt, Human
aucagccacauucua

SEQ ID NO: 3428602 - RNA, 13 nt, Human
aucagccagacau

SEQ ID NO: 3428603 - RNA, 14 nt, Human
aucagccagcugcc

SEQ ID NO: 3428604 - RNA, 13 nt, Human
aucagccagugac

SEQ ID NO: 3428605 - RNA, 20 nt, Human
aucagcccaacgggaagcaa

SEQ ID NO: 3428606 - RNA, 16 nt, Human
aucagccccacccugg

SEQ ID NO: 3428607 - RNA, 12 nt, Human
aucagccugagu

SEQ ID NO: 3428608 - RNA, 17 nt, Human
aucagccugagucuccu

SEQ ID NO: 3428609 - RNA, 18 nt, Human
aucagccugcuccagcug

SEQ ID NO: 3428610 - RNA, 21 nt, Human
aucagccugggcaaugugaua

SEQ ID NO: 3428611 - RNA, 14 nt, Human
aucagccugucucu

SEQ ID NO: 3428612 - RNA, 18 nt, Human
aucagccugucucuucca

SEQ ID NO: 3428613 - RNA, 15 nt, Human
aucagcguggccuug

SEQ ID NO: 3428614 - RNA, 18 nt, Human
aucagcuacuuaagagaa

SEQ ID NO: 3428615 - RNA, 19 nt, Human
aucagcuacuuaagagaaa

SEQ ID NO: 3428616 - RNA, 20 nt, Human
aucagcuacuuaagagaaau

SEQ ID NO: 3428617 - RNA, 22 nt, Human
aucagcuacuuaagagaaaugg

SEQ ID NO: 3428618 - RNA, 15 nt, Human
aucagcuccuuccug

SEQ ID NO: 3428619 - RNA, 13 nt, Human
aucagcugcuacu

SEQ ID NO: 3428620 - RNA, 13 nt, Human
aucagcugcuuug

SEQ ID NO: 3428621 - RNA, 22 nt, Human
aucagcuggucaaacaaacucu

SEQ ID NO: 3428622 - RNA, 13 nt, Human
aucagcuuauugu

SEQ ID NO: 3428623 - RNA, 13 nt, Human
aucaggaacguuu

SEQ ID NO: 3428624 - RNA, 14 nt, Human
aucaggaagagaag

SEQ ID NO: 3428625 - RNA, 17 nt, Human
aucaggaagagaaggag

SEQ ID NO: 3428626 - RNA, 19 nt, Human
aucaggaagagaaggagca

SEQ ID NO: 3428627 - RNA, 23 nt, Human
aucaggagaaagcuugguucugu

SEQ ID NO: 3428628 - RNA, 13 nt, Human
aucaggaugaacc

SEQ ID NO: 3428629 - RNA, 15 nt, Human
aucaggcacagguca

SEQ ID NO: 3428630 - RNA, 13 nt, Human
aucaggccaggcc

SEQ ID NO: 3428631 - RNA, 16 nt, Human
aucaggccaggcccuc

SEQ ID NO: 3428632 - RNA, 20 nt, Human
aucaggccaggcccucugcc

SEQ ID NO: 3428633 - RNA, 21 nt, Human
aucaggccaggcccucugccc

SEQ ID NO: 3428634 - RNA, 23 nt, Human
aucaggccaggcccucugcccac

SEQ ID NO: 3428635 - RNA, 13 nt, Human
aucaggccauugu

SEQ ID NO: 3428636 - RNA, 19 nt, Human
aucaggccuagaggccuga

SEQ ID NO: 3428637 - RNA, 16 nt, Human
aucaggccugccagac

SEQ ID NO: 3428638 - RNA, 14 nt, Human
aucaggcucccagg

SEQ ID NO: 3428639 - RNA, 17 nt, Human
aucagggccuggggccu

SEQ ID NO: 3428640 - RNA, 19 nt, Human
aucagggccuggggccuga

SEQ ID NO: 3428641 - RNA, 21 nt, Human
aucagggggaagaagcagaga

SEQ ID NO: 3428642 - RNA, 17 nt, Human
aucaggguuaguauugu

SEQ ID NO: 3428643 - RNA, 20 nt, Human
aucagguccucagagaauuu

SEQ ID NO: 3428644 - RNA, 13 nt, Human
aucagguccugcu

SEQ ID NO: 3428645 - RNA, 19 nt, Human
aucagguccugcucagcag

SEQ ID NO: 3428646 - RNA, 19 nt, Human
aucaggugcugccauccag

SEQ ID NO: 3428647 - RNA, 22 nt, Human
aucagguuaggcaguauaaaga

SEQ ID NO: 3428648 - RNA, 21 nt, Human
aucaguaaaauuauacugugu

SEQ ID NO: 3428649 - RNA, 13 nt, Human
aucaguaaacacu

SEQ ID NO: 3428650 - RNA, 17 nt, Human
aucaguaagagguguua

SEQ ID NO: 3428651 - RNA, 23 nt, Human
aucaguaagagguguuauuugga

SEQ ID NO: 3428652 - RNA, 15 nt, Human
aucaguaauauuuau

SEQ ID NO: 3428653 - RNA, 19 nt, Human
aucaguaguuugcauuuca

SEQ ID NO: 3428654 - RNA, 21 nt, Human
aucaguaguuugcauuucaga

SEQ ID NO: 3428655 - RNA, 15 nt, Human
aucaguauugaagca

SEQ ID NO: 3428656 - RNA, 13 nt, Human
aucagucaagcug

SEQ ID NO: 3428657 - RNA, 13 nt, Human
aucaguccccucc

SEQ ID NO: 3428658 - RNA, 15 nt, Human
aucaguccccuccca

SEQ ID NO: 3428659 - RNA, 16 nt, Human
aucagucccuauguau

SEQ ID NO: 3428660 - RNA, 21 nt, Human
aucagucccuauguauuugca

SEQ ID NO: 3428661 - RNA, 16 nt, Human
aucaguccuagaaugu

SEQ ID NO: 3428662 - RNA, 16 nt, Human
aucagucucagaaugu

SEQ ID NO: 3428663 - RNA, 20 nt, Human
aucagugcucgagacacagu

SEQ ID NO: 3428664 - RNA, 16 nt, Human
aucaguggacagucug

SEQ ID NO: 3428665 - RNA, 15 nt, Human
aucaguggauuuccc

SEQ ID NO: 3428666 - RNA, 16 nt, Human
aucaguggauuuccca

SEQ ID NO: 3428667 - RNA, 22 nt, Human
aucaguggcauggcuccagucu

SEQ ID NO: 3428668 - RNA, 17 nt, Human
aucagugggauuuggua

SEQ ID NO: 3428669 - RNA, 18 nt, Human
aucagugggcaggauaaa

SEQ ID NO: 3428670 - RNA, 22 nt, Human
aucagugggcaggauaaacuga

SEQ ID NO: 3428671 - RNA, 15 nt, Human
aucagugucucacac

SEQ ID NO: 3428672 - RNA, 14 nt, Human
aucagugugccccc

SEQ ID NO: 3428673 - RNA, 15 nt, Human
aucagugugcccccc

SEQ ID NO: 3428674 - RNA, 22 nt, Human
aucagugugccccccauccugg

SEQ ID NO: 3428675 - RNA, 13 nt, Human
aucaguguuaaaa

SEQ ID NO: 3428676 - RNA, 19 nt, Human
aucaguguuuuaaauucug

SEQ ID NO: 3428677 - RNA, 12 nt, Human
aucaguuaacua

SEQ ID NO: 3428678 - RNA, 21 nt, Human
aucaguuacacaugaucauaa

SEQ ID NO: 3428679 - RNA, 15 nt, Human
aucaguuacucagcc

SEQ ID NO: 3428680 - RNA, 17 nt, Human
aucaguuacucagcccu

SEQ ID NO: 3428681 - RNA, 18 nt, Human
aucaguuacucagcccug

SEQ ID NO: 3428682 - RNA, 22 nt, Human
aucaguuauacaguuauaaaau

SEQ ID NO: 3428683 - RNA, 21 nt, Human
aucaguucauuagaaauauuu

SEQ ID NO: 3428684 - RNA, 17 nt, Human
aucaguuccuuugugug

SEQ ID NO: 3428685 - RNA, 21 nt, Human
aucaguugcaauaauacuucu

SEQ ID NO: 3428686 - RNA, 14 nt, Human
aucauaaacugugu

SEQ ID NO: 3428687 - RNA, 14 nt, Human
aucauaaagucagu

SEQ ID NO: 3428688 - RNA, 17 nt, Human
aucauaagauauuuuuc

SEQ ID NO: 3428689 - RNA, 19 nt, Human
aucauacuccuaugcuuua

SEQ ID NO: 3428690 - RNA, 17 nt, Human
aucauagauuucugauu

SEQ ID NO: 3428691 - RNA, 19 nt, Human
aucauagauuucugauuuu

SEQ ID NO: 3428692 - RNA, 21 nt, Human
aucauaggaagggaccaaggc

SEQ ID NO: 3428693 - RNA, 22 nt, Human
aucauaggaagggaccaaggca

SEQ ID NO: 3428694 - RNA, 23 nt, Human
aucauaggcaccuuuuacuguga

SEQ ID NO: 3428695 - RNA, 12 nt, Human
aucauaguacag

SEQ ID NO: 3428696 - RNA, 23 nt, Human
aucauaguggcuuaaaacaacac

SEQ ID NO: 3428697 - RNA, 16 nt, Human
aucauaguuuuauuua

SEQ ID NO: 3428698 - RNA, 17 nt, Human
aucauaguuuuauuuau

SEQ ID NO: 3428699 - RNA, 19 nt, Human
aucauaguuuuauuuauau

SEQ ID NO: 3428700 - RNA, 23 nt, Human
aucauaguuuuauuuauauuuau

SEQ ID NO: 3428701 - RNA, 14 nt, Human
aucauauaaauaga

SEQ ID NO: 3428702 - RNA, 13 nt, Human
aucauauaaauau

SEQ ID NO: 3428703 - RNA, 13 nt, Human
aucauaugauucu

SEQ ID NO: 3428704 - RNA, 13 nt, Human
aucauaugugauc

SEQ ID NO: 3428705 - RNA, 18 nt, Human
aucauaugugaucugucu

SEQ ID NO: 3428706 - RNA, 22 nt, Human
aucauaugugaucugucuugua

SEQ ID NO: 3428707 - RNA, 21 nt, Human
aucauauugguauucacuaau

SEQ ID NO: 3428708 - RNA, 12 nt, Human
aucaucaagaag

SEQ ID NO: 3428709 - RNA, 20 nt, Human
aucaucaagaagggcugcau

SEQ ID NO: 3428710 - RNA, 22 nt, Human
aucaucagcauaccuuuauugu

SEQ ID NO: 3428711 - RNA, 13 nt, Human
aucaucagggccu

SEQ ID NO: 3428712 - RNA, 15 nt, Human
aucaucaguauugaa

SEQ ID NO: 3428713 - RNA, 12 nt, Human
aucucucauccu

SEQ ID NO: 3428714 - RNA, 21 nt, Human
aucucucauccuccaguaccu

SEQ ID NO: 3428715 - RNA, 17 nt, Human
aucucuccacuuucagc

SEQ ID NO: 3428716 - RNA, 18 nt, Human
aucucuccacuuucagcu

SEQ ID NO: 3428717 - RNA, 14 nt, Human
aucucuccuggccu

SEQ ID NO: 3428718 - RNA, 22 nt, Human
aucucucgugauugauaagaac

SEQ ID NO: 3428719 - RNA, 21 nt, Human
aucucucuacuccuaccucag

SEQ ID NO: 3428720 - RNA, 22 nt, Human
aucucucuacuccuaccucagc

SEQ ID NO: 3428721 - RNA, 23 nt, Human
aucucucuacuccuaccucagcc

SEQ ID NO: 3428722 - RNA, 22 nt, Human
aucucucugaauccuaagggcu

SEQ ID NO: 3428723 - RNA, 15 nt, Human
aucucucugcagcug

SEQ ID NO: 3428724 - RNA, 17 nt, Human
aucucucuuuaauauaa

SEQ ID NO: 3428725 - RNA, 13 nt, Human
aucucugaaagca

SEQ ID NO: 3428726 - RNA, 16 nt, Human
aucucugaaugcccca

SEQ ID NO: 3428727 - RNA, 21 nt, Human
aucucugcaaucuucucagaa

SEQ ID NO: 3428728 - RNA, 17 nt, Human
aucucugcuuuggaaau

SEQ ID NO: 3428729 - RNA, 21 nt, Human
aucucugucccauucccuggg

SEQ ID NO: 3428730 - RNA, 20 nt, Human
aucucugucuaccaucuccc

SEQ ID NO: 3428731 - RNA, 17 nt, Human
aucuggcuccuuuacaa

SEQ ID NO: 3428732 - RNA, 19 nt, Human
aucuggcuccuuuacaaaa

SEQ ID NO: 3428733 - RNA, 21 nt, Human
aucuggcuccuuuacaaaaga

SEQ ID NO: 3428734 - RNA, 22 nt, Human
aucuggcugcaguuuugcuauc

SEQ ID NO: 3428735 - RNA, 16 nt, Human
aucugggaacucccaa

SEQ ID NO: 3428736 - RNA, 20 nt, Human
aucugggaacucccaagaac

SEQ ID NO: 3428737 - RNA, 15 nt, Human
aucugggaagcuauu

SEQ ID NO: 3428738 - RNA, 16 nt, Human
aucugggacccuuucc

SEQ ID NO: 3428739 - RNA, 20 nt, Human
aucugggaguccccuuuucu

SEQ ID NO: 3428740 - RNA, 15 nt, Human
aucugggcacugaag

SEQ ID NO: 3428741 - RNA, 12 nt, Human
aucugggccugg

SEQ ID NO: 3428742 - RNA, 10 nt, Human
aucugggcuu

SEQ ID NO: 3428743 - RNA, 20 nt, Human
aucugggcuuccuggagcag

SEQ ID NO: 3428744 - RNA, 18 nt, Human
aucuggggagcaggcagc

SEQ ID NO: 3428745 - RNA, 19 nt, Human
aucuggggagcaggcagcc

SEQ ID NO: 3428746 - RNA, 21 nt, Human
aucuggggagcaggcagccag

SEQ ID NO: 3428747 - RNA, 22 nt, Human
aucuggggagcaggcagccagc

SEQ ID NO: 3428748 - RNA, 23 nt, Human
aucuggggcagcacccuauaaau

SEQ ID NO: 3428749 - RNA, 18 nt, Human
aucugggggaguggaaua

SEQ ID NO: 3428750 - RNA, 14 nt, Human
aucuggguagcugu

SEQ ID NO: 3428751 - RNA, 17 nt, Human
aucuggguagcuguaag

SEQ ID NO: 3428752 - RNA, 22 nt, Human
aucugggugcaugaucuugagc

SEQ ID NO: 3428753 - RNA, 19 nt, Human
aucugguagaagggaaagc

SEQ ID NO: 3428754 - RNA, 14 nt, Human
aucuggucauuugg

SEQ ID NO: 3428755 - RNA, 17 nt, Human
aucuggucccuugcagc

SEQ ID NO: 3428756 - RNA, 14 nt, Human
aucugguccuaccc

SEQ ID NO: 3428757 - RNA, 21 nt, Human
aucugguccuacccauccccg

SEQ ID NO: 3428758 - RNA, 19 nt, Human
aucuggucuuguuagaaaa

SEQ ID NO: 3428759 - RNA, 21 nt, Human
aucuggucuuguuagaaaaca

SEQ ID NO: 3428760 - RNA, 10 nt, Human
aucuggugac

SEQ ID NO: 3428761 - RNA, 16 nt, Human
aucuggugacuuuccu

SEQ ID NO: 3428762 - RNA, 17 nt, Human
aucuggugacuuuccuc

SEQ ID NO: 3428763 - RNA, 14 nt, Human
aucuggugauuucu

SEQ ID NO: 3428764 - RNA, 18 nt, Human
aucugguggucagcccua

SEQ ID NO: 3428765 - RNA, 20 nt, Human
aucugguggucagcccuagg

SEQ ID NO: 3428766 - RNA, 17 nt, Human
aucugguuaggauggca

SEQ ID NO: 3428767 - RNA, 22 nt, Human
aucugguuugacuccgcuggag

SEQ ID NO: 3428768 - RNA, 20 nt, Human
aucuguaacagguauuuugu

SEQ ID NO: 3428769 - RNA, 16 nt, Human
aucuguaagcucuuug

SEQ ID NO: 3428770 - RNA, 15 nt, Human
aucuguaagcuguuu

SEQ ID NO: 3428771 - RNA, 13 nt, Human
aucuguacaauga

SEQ ID NO: 3428772 - RNA, 15 nt, Human
aucuguacaaugaac

SEQ ID NO: 3428773 - RNA, 11 nt, Human
aucuguacauu

SEQ ID NO: 3428774 - RNA, 15 nt, Human
aucuguacauuuugu

SEQ ID NO: 3428775 - RNA, 15 nt, Human
aucuguacguaagaa

SEQ ID NO: 3428776 - RNA, 12 nt, Human
aucuguagauac

SEQ ID NO: 3428777 - RNA, 22 nt, Human
aucuguagauacuagcuaucua

SEQ ID NO: 3428778 - RNA, 21 nt, Human
aucuguagcuauaaugagcau

SEQ ID NO: 3428779 - RNA, 21 nt, Human
aucuguauaaguaagaaaaua

SEQ ID NO: 3428780 - RNA, 18 nt, Human
aucuguauacccucuguu

SEQ ID NO: 3428781 - RNA, 16 nt, Human
aucuguauauaaaaua

SEQ ID NO: 3428782 - RNA, 13 nt, Human
aucuguaucucuc

SEQ ID NO: 3428783 - RNA, 14 nt, Human
aucuguaucucucu

SEQ ID NO: 3428784 - RNA, 18 nt, Human
aucuguauuuaauuuuga

SEQ ID NO: 3428785 - RNA, 17 nt, Human
aucugucaaaacacugu

SEQ ID NO: 3428786 - RNA, 12 nt, Human
aucugucauuug

SEQ ID NO: 3428787 - RNA, 22 nt, Human
aucugucauuugagcagggcuc

SEQ ID NO: 3428788 - RNA, 18 nt, Human
aucuguccaaaggaggcu

SEQ ID NO: 3428789 - RNA, 18 nt, Human
aucuguccucagccuugc

SEQ ID NO: 3428790 - RNA, 20 nt, Human
aucugucucccaguuaugaa

SEQ ID NO: 3428791 - RNA, 23 nt, Human
aucugucugcuggucacuucuuc

SEQ ID NO: 3428792 - RNA, 16 nt, Human
aucugucugguggccc

SEQ ID NO: 3428793 - RNA, 13 nt, Human
aucugucuuguaa

SEQ ID NO: 3428794 - RNA, 14 nt, Human
aucugucuuguaau

SEQ ID NO: 3428795 - RNA, 22 nt, Human
aucugucuuguaauauuuugua

SEQ ID NO: 3428796 - RNA, 18 nt, Human
aucugugaaaggaaagag

SEQ ID NO: 3428797 - RNA, 23 nt, Human
aucugugaaaggaaagagggagg

SEQ ID NO: 3428798 - RNA, 16 nt, Human
aucugugaaauaucau

SEQ ID NO: 3428799 - RNA, 18 nt, Human
aucugugaacuugaaauu

SEQ ID NO: 3428800 - RNA, 11 nt, Human
aucugugaaua

SEQ ID NO: 3428801 - RNA, 17 nt, Human
aucugugaauugagcug

SEQ ID NO: 3428802 - RNA, 17 nt, Human
aucugugauaauuuucu

SEQ ID NO: 3428803 - RNA, 16 nt, Human
aucugugcacugccca

SEQ ID NO: 3428804 - RNA, 16 nt, Human
aucugugcauucuccu

SEQ ID NO: 3428805 - RNA, 21 nt, Human
aucugugcccagagaugggac

SEQ ID NO: 3428806 - RNA, 12 nt, Human
aucugugcccca

SEQ ID NO: 3428807 - RNA, 23 nt, Human
aucugugccccaugccuguccag

SEQ ID NO: 3428808 - RNA, 23 nt, Human
aucugugccuuuuuuauaucuug

SEQ ID NO: 3428809 - RNA, 16 nt, Human
aucugugcgugaaaca

SEQ ID NO: 3428810 - RNA, 18 nt, Human
aucugugcgugaaacaca

SEQ ID NO: 3428811 - RNA, 22 nt, Human
aucugugggcauggucaaaggc

SEQ ID NO: 3428812 - RNA, 16 nt, Human
aucuguggucuucaaa

SEQ ID NO: 3428813 - RNA, 15 nt, Human
aucuguguacaaaga

SEQ ID NO: 3428814 - RNA, 16 nt, Human
aucuguguacaaagaa

SEQ ID NO: 3428815 - RNA, 13 nt, Human
aucugugucuugu

SEQ ID NO: 3428816 - RNA, 15 nt, Human
aucugugucuuguuu

SEQ ID NO: 3428817 - RNA, 13 nt, Human
aucugugugaaaa

SEQ ID NO: 3428818 - RNA, 16 nt, Human
aucuguguuuuugaaa

SEQ ID NO: 3428819 - RNA, 23 nt, Human
aucuguuauagguccuuuagaaa

SEQ ID NO: 3428820 - RNA, 14 nt, Human
aucuguucuaacau

SEQ ID NO: 3428821 - RNA, 20 nt, Human
aucuguucugggcucuuucc

SEQ ID NO: 3428822 - RNA, 18 nt, Human
aucuguugcaaacucagc

SEQ ID NO: 3428823 - RNA, 19 nt, Human
aucuguugcaagccccucu

SEQ ID NO: 3428824 - RNA, 17 nt, Human
aucuguuuacaguguuc

SEQ ID NO: 3428825 - RNA, 13 nt, Human
aucuguuucccag

SEQ ID NO: 3428826 - RNA, 14 nt, Human
aucuguuugagaaa

SEQ ID NO: 3428827 - RNA, 15 nt, Human
aucuguuugagaaag

SEQ ID NO: 3428828 - RNA, 14 nt, Human
aucuguuuuaaauu

SEQ ID NO: 3428829 - RNA, 21 nt, Human
aucuguuuuauaccuugcuua

SEQ ID NO: 3428830 - RNA, 19 nt, Human
aucuguuuugaaggcaaaa

SEQ ID NO: 3428831 - RNA, 18 nt, Human
aucuguuuuuaaaaauca

SEQ ID NO: 3428832 - RNA, 20 nt, Human
aucuguuuuuaaaaaucaua

SEQ ID NO: 3428833 - RNA, 18 nt, Human
aucuguuuuuacguaugu

SEQ ID NO: 3428834 - RNA, 22 nt, Human
aucuguuuuuguuuauuucauu

SEQ ID NO: 3428835 - RNA, 13 nt, Human
aucuuaaaaacaa

SEQ ID NO: 3428836 - RNA, 14 nt, Human
aucuuaaaaacaac

SEQ ID NO: 3428837 - RNA, 21 nt, Human
aucuuaaaaacaacgaaagaa

SEQ ID NO: 3428838 - RNA, 19 nt, Human
aucuuaaaagcuaucuuca

SEQ ID NO: 3428839 - RNA, 20 nt, Human
aucuuaaaagcuaucuucau

SEQ ID NO: 3428840 - RNA, 14 nt, Human
aucuuaacucuuug

SEQ ID NO: 3428841 - RNA, 13 nt, Human
aucuuaauacugu

SEQ ID NO: 3428842 - RNA, 17 nt, Human
aucuuaauguauaucgu

SEQ ID NO: 3428843 - RNA, 18 nt, Human
aucuuaauguaucaaacu

SEQ ID NO: 3428844 - RNA, 16 nt, Human
aucuuaauuauuguac

SEQ ID NO: 3428845 - RNA, 12 nt, Human
aucuuaauuuug

SEQ ID NO: 3428846 - RNA, 22 nt, Human
aucuuaauuuugguuguauucu

SEQ ID NO: 3428847 - RNA, 14 nt, Human
aucuuacaaagugu

SEQ ID NO: 3428848 - RNA, 22 nt, Human
aucuuacaaaguguauuuuaua

SEQ ID NO: 3428849 - RNA, 13 nt, Human
aucuuacagcugg

SEQ ID NO: 3428850 - RNA, 16 nt, Human
aucuuacuauuucaca

SEQ ID NO: 3428851 - RNA, 20 nt, Human
aucuuagauucucugugucu

SEQ ID NO: 3428852 - RNA, 15 nt, Human
aucuuagcugccaag

SEQ ID NO: 3428853 - RNA, 20 nt, Human
aucuuaggggagagcuuucu

SEQ ID NO: 3428854 - RNA, 15 nt, Human
aucuuagggugaacc

SEQ ID NO: 3428855 - RNA, 14 nt, Human
aucuuaguuuggau

SEQ ID NO: 3428856 - RNA, 23 nt, Human
aucuuaguuuggauucuuaugua

SEQ ID NO: 3428857 - RNA, 16 nt, Human
aucuuauaauuuaaaa

SEQ ID NO: 3428858 - RNA, 23 nt, Human
aucuuauaauuuaaaauaugcuc

SEQ ID NO: 3428859 - RNA, 16 nt, Human
aucuuauacuguacaa

SEQ ID NO: 3428860 - RNA, 15 nt, Human
aucuuauaguucuag

SEQ ID NO: 3428861 - RNA, 18 nt, Human
aucuuaucauggucucag

SEQ ID NO: 3428862 - RNA, 21 nt, Human
aucuuaucucagauauuugca

SEQ ID NO: 3428863 - RNA, 20 nt, Human
aucuuauucauuuucucuaa

SEQ ID NO: 3428864 - RNA, 16 nt, Human
aucuuauuuucaugua

SEQ ID NO: 3428865 - RNA, 19 nt, Human
aucuucaaaaguaaugccu

SEQ ID NO: 3428866 - RNA, 23 nt, Human
aucuucaaaaguaaugccucugu

SEQ ID NO: 3428867 - RNA, 24 nt, Human
aucuucaaaaguaaugccucuguc

SEQ ID NO: 3428868 - RNA, 18 nt, Human
aucuucaaagccuucucc

SEQ ID NO: 3428869 - RNA, 14 nt, Human
aucuucaacaaauu

SEQ ID NO: 3428870 - RNA, 21 nt, Human
aucuucacaauggugcucauu

SEQ ID NO: 3428871 - RNA, 14 nt, Human
aucuucagagcagg

SEQ ID NO: 3428872 - RNA, 12 nt, Human
aucuucagcuuc

SEQ ID NO: 3428873 - RNA, 13 nt, Human
aucuucagcuucu

SEQ ID NO: 3428874 - RNA, 15 nt, Human
aucuucagcuucuuc

SEQ ID NO: 3428875 - RNA, 16 nt, Human
aucuucaguugucucu

SEQ ID NO: 3428876 - RNA, 15 nt, Human
augaggucagacuag

SEQ ID NO: 3428877 - RNA, 16 nt, Human
augaggucagagccug

SEQ ID NO: 3428878 - RNA, 19 nt, Human
augaggucagagccugcag

SEQ ID NO: 3428879 - RNA, 22 nt, Human
augaggucagagccugcaguua

SEQ ID NO: 3428880 - RNA, 14 nt, Human
augaggucccaggc

SEQ ID NO: 3428881 - RNA, 15 nt, Human
augaggucugaaaug

SEQ ID NO: 3428882 - RNA, 15 nt, Human
augaggugcugggag

SEQ ID NO: 3428883 - RNA, 16 nt, Human
augaggugcugggagg

SEQ ID NO: 3428884 - RNA, 18 nt, Human
augaggugcugggaggga

SEQ ID NO: 3428885 - RNA, 14 nt, Human
augagguucucucu

SEQ ID NO: 3428886 - RNA, 18 nt, Human
augaguaacuauuauuau

SEQ ID NO: 3428887 - RNA, 19 nt, Human
augaguauuaguucccugu

SEQ ID NO: 3428888 - RNA, 16 nt, Human
augagucaaugugcag

SEQ ID NO: 3428889 - RNA, 15 nt, Human
augagucccaguggg

SEQ ID NO: 3428890 - RNA, 20 nt, Human
augaguccuugaaaauauuu

SEQ ID NO: 3428891 - RNA, 19 nt, Human
augaguccuugauuucaaa

SEQ ID NO: 3428892 - RNA, 21 nt, Human
augaguccuugauuucaaagu

SEQ ID NO: 3428893 - RNA, 15 nt, Human
augagugaauaaaug

SEQ ID NO: 3428894 - RNA, 21 nt, Human
augaguggaaauuaagacuuu

SEQ ID NO: 3428895 - RNA, 16 nt, Human
augaguguaacaagaa

SEQ ID NO: 3428896 - RNA, 17 nt, Human
augaguguaacaagaaa

SEQ ID NO: 3428897 - RNA, 22 nt, Human
augaguguaacaagaaaggaga

SEQ ID NO: 3428898 - RNA, 16 nt, Human
augaguuacugugcau

SEQ ID NO: 3428899 - RNA, 23 nt, Human
augaguuagaauaauaaauauuu

SEQ ID NO: 3428900 - RNA, 17 nt, Human
augaguuaugaguuauu

SEQ ID NO: 3428901 - RNA, 13 nt, Human
augaguugcaguu

SEQ ID NO: 3428902 - RNA, 13 nt, Human
augaguuuaaaaa

SEQ ID NO: 3428903 - RNA, 13 nt, Human
augaguuucacag

SEQ ID NO: 3428904 - RNA, 13 nt, Human
augaguuuuuccc

SEQ ID NO: 3428905 - RNA, 13 nt, Human
augaguuuuugau

SEQ ID NO: 3428906 - RNA, 15 nt, Human
augauaaaaaauuuu

SEQ ID NO: 3428907 - RNA, 15 nt, Human
augauaaaacacaaa

SEQ ID NO: 3428908 - RNA, 14 nt, Human
augauaaagagaca

SEQ ID NO: 3428909 - RNA, 20 nt, Human
augauaaagagacagugaua

SEQ ID NO: 3428910 - RNA, 15 nt, Human
augauaacacuauuu

SEQ ID NO: 3428911 - RNA, 14 nt, Human
augauaacagaacu

SEQ ID NO: 3428912 - RNA, 14 nt, Human
augauaacuggaaa

SEQ ID NO: 3428913 - RNA, 15 nt, Human
augauaacuggaaac

SEQ ID NO: 3428914 - RNA, 15 nt, Human
augauacauccaaag

SEQ ID NO: 3428915 - RNA, 19 nt, Human
augauacuaauaaacuaau

SEQ ID NO: 3428916 - RNA, 21 nt, Human
augauacuaucauacuacuga

SEQ ID NO: 3428917 - RNA, 18 nt, Human
augauacucauuucuuau

SEQ ID NO: 3428918 - RNA, 16 nt, Human
augauacuucgacacu

SEQ ID NO: 3428919 - RNA, 17 nt, Human
augauaguaagaaaagu

SEQ ID NO: 3428920 - RNA, 14 nt, Human
augauaucccugau

SEQ ID NO: 3428921 - RNA, 12 nt, Human
augauaugcauu

SEQ ID NO: 3428922 - RNA, 19 nt, Human
augauauuccauaguauau

SEQ ID NO: 3428923 - RNA, 23 nt, Human
augauauugcugaagaaucuacu

SEQ ID NO: 3428924 - RNA, 15 nt, Human
augaucaaaaauaau

SEQ ID NO: 3428925 - RNA, 16 nt, Human
augaucaaauguuuaa

SEQ ID NO: 3428926 - RNA, 20 nt, Human
augaucaaauguuuaaucau

SEQ ID NO: 3428927 - RNA, 20 nt, Human
augaucaauuauaguuucug

SEQ ID NO: 3428928 - RNA, 19 nt, Human
augaucacuuaucaguuug

SEQ ID NO: 3428929 - RNA, 21 nt, Human
augauccaacuaaugccuuac

SEQ ID NO: 3428930 - RNA, 15 nt, Human
augauccaagcaaga

SEQ ID NO: 3428931 - RNA, 17 nt, Human
augauccaagcaagacu

SEQ ID NO: 3428932 - RNA, 13 nt, Human
augaucccugugu

SEQ ID NO: 3428933 - RNA, 20 nt, Human
augaucccuguguugucucu

SEQ ID NO: 3428934 - RNA, 19 nt, Human
aucucccagauaaugugaa

SEQ ID NO: 3428935 - RNA, 20 nt, Human
aucucccagauaaugugaaa

SEQ ID NO: 3428936 - RNA, 19 nt, Human
aucucccauuuuggaauuu

SEQ ID NO: 3428937 - RNA, 23 nt, Human
aucuccccuugcacuaaaguaug

SEQ ID NO: 3428938 - RNA, 15 nt, Human
aucucccgcugcugc

SEQ ID NO: 3428939 - RNA, 14 nt, Human
aucucccucccaca

SEQ ID NO: 3428940 - RNA, 20 nt, Human
aucucccugagaugggcuuc

SEQ ID NO: 3428941 - RNA, 12 nt, Human
aucucccugccg

SEQ ID NO: 3428942 - RNA, 19 nt, Human
aucucccugccgccucaau

SEQ ID NO: 3428943 - RNA, 16 nt, Human
aucucccugccuccug

SEQ ID NO: 3428944 - RNA, 13 nt, Human
aucucccugccug

SEQ ID NO: 3428945 - RNA, 15 nt, Human
aucucccugccuggc

SEQ ID NO: 3428946 - RNA, 17 nt, Human
aucucccugccuggccc

SEQ ID NO: 3428947 - RNA, 14 nt, Human
aucucccuggugcu

SEQ ID NO: 3428948 - RNA, 18 nt, Human
aucucccuggugcuuaug

SEQ ID NO: 3428949 - RNA, 23 nt, Human
aucucccuggugcuuaugcucuu

SEQ ID NO: 3428950 - RNA, 12 nt, Human
aucucccuuccu

SEQ ID NO: 3428951 - RNA, 22 nt, Human
aucuccggcucccagccucagc

SEQ ID NO: 3428952 - RNA, 20 nt, Human
aucuccuauaaucugucaaa

SEQ ID NO: 3428953 - RNA, 20 nt, Human
aucuccucgcaagcugggua

SEQ ID NO: 3428954 - RNA, 12 nt, Human
aucuccugaaaa

SEQ ID NO: 3428955 - RNA, 17 nt, Human
aucuccugacagaaggu

SEQ ID NO: 3428956 - RNA, 18 nt, Human
aucuccugacagaaggug

SEQ ID NO: 3428957 - RNA, 20 nt, Human
aucuccugaggaucagaaag

SEQ ID NO: 3428958 - RNA, 22 nt, Human
aucuccugaggaucagaaagua

SEQ ID NO: 3428959 - RNA, 17 nt, Human
aucuccugccuuccucc

SEQ ID NO: 3428960 - RNA, 20 nt, Human
aucuccugccuuccuccugg

SEQ ID NO: 3428961 - RNA, 19 nt, Human
aucuccugucuuuucaggu

SEQ ID NO: 3428962 - RNA, 18 nt, Human
aucuccugugcaugggug

SEQ ID NO: 3428963 - RNA, 16 nt, Human
aucuccuuagaaaagc

SEQ ID NO: 3428964 - RNA, 17 nt, Human
aucucgcucccucccag

SEQ ID NO: 3428965 - RNA, 19 nt, Human
aucucgcucccucccagga

SEQ ID NO: 3428966 - RNA, 15 nt, Human
aucucggcucagugc

SEQ ID NO: 3428967 - RNA, 15 nt, Human
aucucgugggagagc

SEQ ID NO: 3428968 - RNA, 17 nt, Human
aucucguuucaaaaaca

SEQ ID NO: 3428969 - RNA, 18 nt, Human
aucucuaacagcucagga

SEQ ID NO: 3428970 - RNA, 13 nt, Human
aucucuaauaugg

SEQ ID NO: 3428971 - RNA, 22 nt, Human
aucucuaauauggcaaaaaugg

SEQ ID NO: 3428972 - RNA, 15 nt, Human
aucucuaauuggaag

SEQ ID NO: 3428973 - RNA, 23 nt, Human
aucucuaauuggaagaaauuccu

SEQ ID NO: 3428974 - RNA, 18 nt, Human
aucucuacuaaaaauaca

SEQ ID NO: 3428975 - RNA, 15 nt, Human
aucucuagaauuuua

SEQ ID NO: 3428976 - RNA, 16 nt, Human
aucucuagaauuuuaa

SEQ ID NO: 3428977 - RNA, 14 nt, Human
aucucuaggaaguc

SEQ ID NO: 3428978 - RNA, 15 nt, Human
aucucucaaaacuug

SEQ ID NO: 3428979 - RNA, 14 nt, Human
aucucucaaaucug

SEQ ID NO: 3428980 - RNA, 15 nt, Human
aucucucaaaucugu

SEQ ID NO: 3428981 - RNA, 17 nt, Human
aucucucagaagggagg

SEQ ID NO: 3428982 - RNA, 14 nt, Human
aucucucaggagca

SEQ ID NO: 3428983 - RNA, 21 nt, Human
aucucucaggagcacaggcag

SEQ ID NO: 3428984 - RNA, 20 nt, Human
aucucuccacuuucagcugu

SEQ ID NO: 3428985 - RNA, 21 nt, Human
aucucuccacuuucagcuguc

SEQ ID NO: 3428986 - RNA, 11 nt, Human
aucucucccuc

SEQ ID NO: 3428987 - RNA, 12 nt, Human
aucucuccucca

SEQ ID NO: 3428988 - RNA, 12 nt, Human
aucucuccuggc

SEQ ID NO: 3428989 - RNA, 13 nt, Human
aucucuccuggcc

SEQ ID NO: 3428990 - RNA, 22 nt, Human
aucucuccuggccuauccgcug

SEQ ID NO: 3428991 - RNA, 20 nt, Human
aucucucgguuccacguccc

SEQ ID NO: 3428992 - RNA, 15 nt, Human
aucucucucuguugu

SEQ ID NO: 3428993 - RNA, 21 nt, Human
aucucucucuguuguguucgu

SEQ ID NO: 3428994 - RNA, 14 nt, Human
aucucucugcagcu

SEQ ID NO: 3428995 - RNA, 17 nt, Human
aucucucugcagcugcc

SEQ ID NO: 3428996 - RNA, 13 nt, Human
aucucucuggccc

SEQ ID NO: 3428997 - RNA, 14 nt, Human
aucucucuggcccu

SEQ ID NO: 3428998 - RNA, 15 nt, Human
aucucucuucuuuuc

SEQ ID NO: 3428999 - RNA, 13 nt, Human
aucucugaagcau

SEQ ID NO: 3429000 - RNA, 17 nt, Human
aucucugaagcauguuu

SEQ ID NO: 3429001 - RNA, 19 nt, Human
aucucugaagcauguuuca

SEQ ID NO: 3429002 - RNA, 20 nt, Human
aucucugaagcauguuucau

SEQ ID NO: 3429003 - RNA, 23 nt, Human
aucucugacuuucuuuagucuuu

SEQ ID NO: 3429004 - RNA, 23 nt, Human
aucucugauucccugauuuaaua

SEQ ID NO: 3429005 - RNA, 18 nt, Human
aucucugcaaucuucuca

SEQ ID NO: 3429006 - RNA, 23 nt, Human
aucucugggcuggaugagcuccc

SEQ ID NO: 3429007 - RNA, 21 nt, Human
aucucugggggcugaggagca

SEQ ID NO: 3429008 - RNA, 20 nt, Human
aucucugucccauucccugg

SEQ ID NO: 3429009 - RNA, 17 nt, Human
aucucugucuaccaucu

SEQ ID NO: 3429010 - RNA, 18 nt, Human
aucucugugccuucgucu

SEQ ID NO: 3429011 - RNA, 15 nt, Human
aucucugugugcaca

SEQ ID NO: 3429012 - RNA, 19 nt, Human
aucucugugugcacaaaua

SEQ ID NO: 3429013 - RNA, 13 nt, Human
aucucuguuaugu

SEQ ID NO: 3429014 - RNA, 19 nt, Human
aucucuguuauguacugua

SEQ ID NO: 3429015 - RNA, 23 nt, Human
aucucuuaaauuggguucaugau

SEQ ID NO: 3429016 - RNA, 21 nt, Human
aucucuuaagacagcaugugu

SEQ ID NO: 3429017 - RNA, 19 nt, Human
aucucuuagcuccccucca

SEQ ID NO: 3429018 - RNA, 22 nt, Human
aucucuuagcuccccuccaacc

SEQ ID NO: 3429019 - RNA, 18 nt, Human
aucucuuaucuuacgaaa

SEQ ID NO: 3429020 - RNA, 16 nt, Human
aucucuuauuuuacaa

SEQ ID NO: 3429021 - RNA, 18 nt, Human
aucugggggccucuucug

SEQ ID NO: 3429022 - RNA, 18 nt, Human
aucuggguagcuguaagg

SEQ ID NO: 3429023 - RNA, 14 nt, Human
aucuggguccuugc

SEQ ID NO: 3429024 - RNA, 18 nt, Human
aucugggucucuaaucug

SEQ ID NO: 3429025 - RNA, 15 nt, Human
aucugggugacugag

SEQ ID NO: 3429026 - RNA, 21 nt, Human
aucugggugcaugaucuugag

SEQ ID NO: 3429027 - RNA, 22 nt, Human
aucugguaccaguugaaauuuu

SEQ ID NO: 3429028 - RNA, 23 nt, Human
aucugguagaagggaaagcccau

SEQ ID NO: 3429029 - RNA, 17 nt, Human
aucugguccuacccauc

SEQ ID NO: 3429030 - RNA, 14 nt, Human
aucuggugaucucc

SEQ ID NO: 3429031 - RNA, 15 nt, Human
aucuggugauuucua

SEQ ID NO: 3429032 - RNA, 17 nt, Human
aucuggugauuucuagc

SEQ ID NO: 3429033 - RNA, 15 nt, Human
aucugguggucagcc

SEQ ID NO: 3429034 - RNA, 21 nt, Human
aucugguucauucuucagaua

SEQ ID NO: 3429035 - RNA, 15 nt, Human
aucugguuuucucuc

SEQ ID NO: 3429036 - RNA, 15 nt, Human
aucugguuuugcuau

SEQ ID NO: 3429037 - RNA, 15 nt, Human
aucuguaaaucuaca

SEQ ID NO: 3429038 - RNA, 17 nt, Human
aucuguaagaguguuua

SEQ ID NO: 3429039 - RNA, 12 nt, Human
aucuguaagcug

SEQ ID NO: 3429040 - RNA, 14 nt, Human
aucuguaagcuguu

SEQ ID NO: 3429041 - RNA, 18 nt, Human
aucuguaaugguacugac

SEQ ID NO: 3429042 - RNA, 23 nt, Human
aucuguacaaaggggaaagaaca

SEQ ID NO: 3429043 - RNA, 21 nt, Human
aucuguacauuuuguuguaaa

SEQ ID NO: 3429044 - RNA, 23 nt, Human
aucuguacuugguccaacugcaa

SEQ ID NO: 3429045 - RNA, 15 nt, Human
aucuguagggcugga

SEQ ID NO: 3429046 - RNA, 17 nt, Human
aucuguagggcuggacc

SEQ ID NO: 3429047 - RNA, 18 nt, Human
aucuguagggcuggaccu

SEQ ID NO: 3429048 - RNA, 19 nt, Human
aucuguauaaguaagaaaa

SEQ ID NO: 3429049 - RNA, 23 nt, Human
aucuguauaaguaagaaaauauu

SEQ ID NO: 3429050 - RNA, 18 nt, Human
aucuguauaauacuuugu

SEQ ID NO: 3429051 - RNA, 14 nt, Human
aucuguauauacaa

SEQ ID NO: 3429052 - RNA, 20 nt, Human
aucuguauauacaauaacau

SEQ ID NO: 3429053 - RNA, 17 nt, Human
aucuguaucuuuucucu

SEQ ID NO: 3429054 - RNA, 23 nt, Human
aucuguauguauuagugauauuu

SEQ ID NO: 3429055 - RNA, 17 nt, Human
aucuguauuuaauuuug

SEQ ID NO: 3429056 - RNA, 18 nt, Human
aucugucaaaacacugug

SEQ ID NO: 3429057 - RNA, 19 nt, Human
aucugucaaaacacugugg

SEQ ID NO: 3429058 - RNA, 20 nt, Human
aucugucaaaacacugugga

SEQ ID NO: 3429059 - RNA, 22 nt, Human
aucugucaaaacacuguggaac

SEQ ID NO: 3429060 - RNA, 23 nt, Human
aucugucaagugggaucugucac

SEQ ID NO: 3429061 - RNA, 18 nt, Human
aucugucacaccagccau

SEQ ID NO: 3429062 - RNA, 17 nt, Human
aucugucauuugagcag

SEQ ID NO: 3429063 - RNA, 19 nt, Human
aucuguccaaaggaggcug

SEQ ID NO: 3429064 - RNA, 23 nt, Human
aucuguccaaaggaggcuggcag

SEQ ID NO: 3429065 - RNA, 18 nt, Human
aucugucccccuuuagau

SEQ ID NO: 3429066 - RNA, 16 nt, Human
aucugucccugccuca

SEQ ID NO: 3429067 - RNA, 16 nt, Human
aucuguccucagccuu

SEQ ID NO: 3429068 - RNA, 17 nt, Human
aucugucuaaagauaga

SEQ ID NO: 3429069 - RNA, 18 nt, Human
aucugucuauauuuuauu

SEQ ID NO: 3429070 - RNA, 18 nt, Human
aucugucucccaguuaug

SEQ ID NO: 3429071 - RNA, 19 nt, Human
aucugucugccaaccuaaa

SEQ ID NO: 3429072 - RNA, 23 nt, Human
aucugucugccaaccuaaaacuc

SEQ ID NO: 3429073 - RNA, 14 nt, Human
aucugucugguggc

SEQ ID NO: 3429074 - RNA, 15 nt, Human
aucugucuguggcaa

SEQ ID NO: 3429075 - RNA, 15 nt, Human
aucugucuuguaaua

SEQ ID NO: 3429076 - RNA, 16 nt, Human
aucugucuuguaauau

SEQ ID NO: 3429077 - RNA, 21 nt, Human
aucugucuuguaauauuuugu

SEQ ID NO: 3429078 - RNA, 13 nt, Human
aucugucuuucca

SEQ ID NO: 3429079 - RNA, 20 nt, Human
aucugucuuuccacucugga

SEQ ID NO: 3429080 - RNA, 12 nt, Human
aucugugaaaua

SEQ ID NO: 3429081 - RNA, 17 nt, Human
aucugugaaauaucauc

SEQ ID NO: 3429082 - RNA, 21 nt, Human
aucugugaugacauucccugc

SEQ ID NO: 3429083 - RNA, 14 nt, Human
aucugugaugggag

SEQ ID NO: 3429084 - RNA, 17 nt, Human
aucugugcccagagaug

SEQ ID NO: 3429085 - RNA, 15 nt, Human
aucugugcuuuccag

SEQ ID NO: 3429086 - RNA, 16 nt, Human
aucugugcuuuccagc

SEQ ID NO: 3429087 - RNA, 18 nt, Human
aucuguguacaaagaaau

SEQ ID NO: 3429088 - RNA, 13 nt, Human
aucuguguccugg

SEQ ID NO: 3429089 - RNA, 12 nt, Human
aucugugucuug

SEQ ID NO: 3429090 - RNA, 15 nt, Human
aucugugugaaaaug

SEQ ID NO: 3429091 - RNA, 20 nt, Human
aucugugugaaacuuucauu

SEQ ID NO: 3429092 - RNA, 21 nt, Human
aucuguguuuuugaaauauua

SEQ ID NO: 3429093 - RNA, 22 nt, Human
augauccggauuuaauuugaua

SEQ ID NO: 3429094 - RNA, 23 nt, Human
augaucuaccagccucccuauuu

SEQ ID NO: 3429095 - RNA, 17 nt, Human
augaucuaggaagacuu

SEQ ID NO: 3429096 - RNA, 16 nt, Human
augaucuagguuuaac

SEQ ID NO: 3429097 - RNA, 17 nt, Human
augaucuagguuuaacu

SEQ ID NO: 3429098 - RNA, 14 nt, Human
augaucucucugaa

SEQ ID NO: 3429099 - RNA, 22 nt, Human
augaucucuucuuuuggcuucc

SEQ ID NO: 3429100 - RNA, 14 nt, Human
augaucugaaaaau

SEQ ID NO: 3429101 - RNA, 13 nt, Human
augaucugauuga

SEQ ID NO: 3429102 - RNA, 23 nt, Human
augaucugugccuuuuuuauauc

SEQ ID NO: 3429103 - RNA, 18 nt, Human
augaucuucuuuauaauu

SEQ ID NO: 3429104 - RNA, 23 nt, Human
augaucuugaguauaagaaaugc

SEQ ID NO: 3429105 - RNA, 17 nt, Human
augaucuuugcagacag

SEQ ID NO: 3429106 - RNA, 13 nt, Human
augaugaaaauau

SEQ ID NO: 3429107 - RNA, 19 nt, Human
augaugaaaauauuuaaag

SEQ ID NO: 3429108 - RNA, 23 nt, Human
augaugaaaugaggucagagccu

SEQ ID NO: 3429109 - RNA, 22 nt, Human
augaugacgacgacaacgauga

SEQ ID NO: 3429110 - RNA, 21 nt, Human
augaugaucuuuaaaauacac

SEQ ID NO: 3429111 - RNA, 15 nt, Human
augaugaugggaauu

SEQ ID NO: 3429112 - RNA, 18 nt, Human
augaugaugggaauugug

SEQ ID NO: 3429113 - RNA, 14 nt, Human
augaugauuucaga

SEQ ID NO: 3429114 - RNA, 22 nt, Human
augaugcagucuccucuuuaaa

SEQ ID NO: 3429115 - RNA, 17 nt, Human
augaugccaaccucugg

SEQ ID NO: 3429116 - RNA, 12 nt, Human
augaugccacac

SEQ ID NO: 3429117 - RNA, 24 nt, Human
augaugccacaccaagcugugcca

SEQ ID NO: 3429118 - RNA, 17 nt, Human
augaugcuauuugcaau

SEQ ID NO: 3429119 - RNA, 21 nt, Human
augaugcuuuuacugaacuuu

SEQ ID NO: 3429120 - RNA, 20 nt, Human
augauggcccauucuacuug

SEQ ID NO: 3429121 - RNA, 16 nt, Human
augaugggucaguugu

SEQ ID NO: 3429122 - RNA, 16 nt, Human
augauggucacuuaaa

SEQ ID NO: 3429123 - RNA, 16 nt, Human
augauggugcugaccu

SEQ ID NO: 3429124 - RNA, 14 nt, Human
augaugguucacgu

SEQ ID NO: 3429125 - RNA, 17 nt, Human
augaugguuuuaaacuu

SEQ ID NO: 3429126 - RNA, 14 nt, Human
augauguacagauu

SEQ ID NO: 3429127 - RNA, 16 nt, Human
augauguauuuuugua

SEQ ID NO: 3429128 - RNA, 14 nt, Human
augauguguuguga

SEQ ID NO: 3429129 - RNA, 17 nt, Human
augauguuaguuuuccu

SEQ ID NO: 3429130 - RNA, 18 nt, Human
augauguugaauauuugu

SEQ ID NO: 3429131 - RNA, 11 nt, Human
augauguuugc

SEQ ID NO: 3429132 - RNA, 14 nt, Human
augauguuugccca

SEQ ID NO: 3429133 - RNA, 24 nt, Human
augauguuuuccaugaguccccug

SEQ ID NO: 3429134 - RNA, 17 nt, Human
augauuaaaaauaucaa

SEQ ID NO: 3429135 - RNA, 16 nt, Human
augauuaaaaugguga

SEQ ID NO: 3429136 - RNA, 18 nt, Human
augauuaaauaagauucu

SEQ ID NO: 3429137 - RNA, 18 nt, Human
augauuaaguaaugauaa

SEQ ID NO: 3429138 - RNA, 14 nt, Human
augauuagcaaguu

SEQ ID NO: 3429139 - RNA, 21 nt, Human
augauucaacagguuuuccug

SEQ ID NO: 3429140 - RNA, 13 nt, Human
augauucaagcca

SEQ ID NO: 3429141 - RNA, 14 nt, Human
augauucaggugca

SEQ ID NO: 3429142 - RNA, 15 nt, Human
augauucauguuaua

SEQ ID NO: 3429143 - RNA, 13 nt, Human
augauucauuuua

SEQ ID NO: 3429144 - RNA, 13 nt, Human
augauuccuuccu

SEQ ID NO: 3429145 - RNA, 12 nt, Human
augauugaaaau

SEQ ID NO: 3429146 - RNA, 13 nt, Human
augauugaagaaa

SEQ ID NO: 3429147 - RNA, 12 nt, Human
augauugcagaa

SEQ ID NO: 3429148 - RNA, 19 nt, Human
augauugcagaauuguuua

SEQ ID NO: 3429149 - RNA, 14 nt, Human
augauugcuuuuaa

SEQ ID NO: 3429150 - RNA, 13 nt, Human
augauuggauuau

SEQ ID NO: 3429151 - RNA, 14 nt, Human
augauuggauuauu

SEQ ID NO: 3429152 - RNA, 15 nt, Human
augauuggauuauuc

SEQ ID NO: 3429153 - RNA, 14 nt, Human
augauuguaaaaua

SEQ ID NO: 3429154 - RNA, 13 nt, Human
augauuuaaaaca

SEQ ID NO: 3429155 - RNA, 14 nt, Human
augauuuaaaacau

SEQ ID NO: 3429156 - RNA, 16 nt, Human
augauuuaauaaaaua

SEQ ID NO: 3429157 - RNA, 20 nt, Human
augauuuauaguuuguacau

SEQ ID NO: 3429158 - RNA, 13 nt, Human
augauuucacaaa

SEQ ID NO: 3429159 - RNA, 15 nt, Human
augauuucacaaaua

SEQ ID NO: 3429160 - RNA, 18 nt, Human
augauuucacaaauauua

SEQ ID NO: 3429161 - RNA, 20 nt, Human
augauuucacuagaaaagcu

SEQ ID NO: 3429162 - RNA, 15 nt, Human
augauuucagaaaca

SEQ ID NO: 3429163 - RNA, 20 nt, Human
augauuucaugcuaucucug

SEQ ID NO: 3429164 - RNA, 16 nt, Human
augauuucauguacug

SEQ ID NO: 3429165 - RNA, 13 nt, Human
augauuucauuca

SEQ ID NO: 3429166 - RNA, 16 nt, Human
augcugcaacaaaaug

SEQ ID NO: 3429167 - RNA, 18 nt, Human
augcugcaggacuugaga

SEQ ID NO: 3429168 - RNA, 14 nt, Human
augcugccaaauuu

SEQ ID NO: 3429169 - RNA, 14 nt, Human
augcugccaauauc

SEQ ID NO: 3429170 - RNA, 18 nt, Human
augcugccaauauccuaa

SEQ ID NO: 3429171 - RNA, 20 nt, Human
augcugccaauauccuaaua

SEQ ID NO: 3429172 - RNA, 16 nt, Human
augcugccccugccuu

SEQ ID NO: 3429173 - RNA, 12 nt, Human
augcugccucca

SEQ ID NO: 3429174 - RNA, 12 nt, Human
augcugccugag

SEQ ID NO: 3429175 - RNA, 14 nt, Human
augcugccugccug

SEQ ID NO: 3429176 - RNA, 15 nt, Human
augcugccugccugu

SEQ ID NO: 3429177 - RNA, 22 nt, Human
augcugccuucccaugaaucug

SEQ ID NO: 3429178 - RNA, 21 nt, Human
augcugcuacuuaauuccuuu

SEQ ID NO: 3429179 - RNA, 23 nt, Human
augcugcucauccccaccugucu

SEQ ID NO: 3429180 - RNA, 13 nt, Human
augcugcugcccc

SEQ ID NO: 3429181 - RNA, 22 nt, Human
augcugcugccccugcacagca

SEQ ID NO: 3429182 - RNA, 13 nt, Human
augcugcuggcca

SEQ ID NO: 3429183 - RNA, 14 nt, Human
augcugcuggccaa

SEQ ID NO: 3429184 - RNA, 13 nt, Human
augcugcugggga

SEQ ID NO: 3429185 - RNA, 14 nt, Human
augcugcuggggaa

SEQ ID NO: 3429186 - RNA, 16 nt, Human
augcugcuggggaaga

SEQ ID NO: 3429187 - RNA, 17 nt, Human
augcugcuggggaagac

SEQ ID NO: 3429188 - RNA, 18 nt, Human
augcugcuggggaagaca

SEQ ID NO: 3429189 - RNA, 19 nt, Human
augcugcuggggaagacag

SEQ ID NO: 3429190 - RNA, 19 nt, Human
augcugcuuuaauugugaa

SEQ ID NO: 3429191 - RNA, 21 nt, Human
augcugcuuuaauugugaauu

SEQ ID NO: 3429192 - RNA, 13 nt, Human
augcugcuuuccc

SEQ ID NO: 3429193 - RNA, 20 nt, Human
augcugcuuuccccuguggg

SEQ ID NO: 3429194 - RNA, 21 nt, Human
augcugcuuuucuuuucuaac

SEQ ID NO: 3429195 - RNA, 13 nt, Human
augcugcuuuuuc

SEQ ID NO: 3429196 - RNA, 18 nt, Human
augcuggaaccugcaaaa

SEQ ID NO: 3429197 - RNA, 23 nt, Human
augcuggaaccugcaaaaaauac

SEQ ID NO: 3429198 - RNA, 21 nt, Human
augcuggacaggucugggaga

SEQ ID NO: 3429199 - RNA, 21 nt, Human
augcuggacggcauuccugcu

SEQ ID NO: 3429200 - RNA, 22 nt, Human
augcuggacggcauuccugcuu

SEQ ID NO: 3429201 - RNA, 16 nt, Human
augcuggagaagagag

SEQ ID NO: 3429202 - RNA, 18 nt, Human
augcuggagaagagagga

SEQ ID NO: 3429203 - RNA, 11 nt, Human
augcuggagcc

SEQ ID NO: 3429204 - RNA, 12 nt, Human
augcuggagccu

SEQ ID NO: 3429205 - RNA, 18 nt, Human
augcuggagccuguguaa

SEQ ID NO: 3429206 - RNA, 19 nt, Human
augcuggaugcuccuucca

SEQ ID NO: 3429207 - RNA, 19 nt, Human
augcuggaugucugccaau

SEQ ID NO: 3429208 - RNA, 23 nt, Human
augcuggcauuugcaccuaccuc

SEQ ID NO: 3429209 - RNA, 23 nt, Human
augcuggccagccuggggccugg

SEQ ID NO: 3429210 - RNA, 15 nt, Human
augcuggcccagggc

SEQ ID NO: 3429211 - RNA, 16 nt, Human
augcuggcccagggcc

SEQ ID NO: 3429212 - RNA, 20 nt, Human
augcuggccgaagauuucau

SEQ ID NO: 3429213 - RNA, 18 nt, Human
augcuggcucccagggcc

SEQ ID NO: 3429214 - RNA, 16 nt, Human
augcuggcuggccuug

SEQ ID NO: 3429215 - RNA, 18 nt, Human
augcuggcuguuggcugg

SEQ ID NO: 3429216 - RNA, 19 nt, Human
augcuggcuguuggcuggg

SEQ ID NO: 3429217 - RNA, 9 nt, Human
augcuggga

SEQ ID NO: 3429218 - RNA, 10 nt, Human
augcugggac

SEQ ID NO: 3429219 - RNA, 15 nt, Human
augcugggcucccgu

SEQ ID NO: 3429220 - RNA, 14 nt, Human
augcugggcugggu

SEQ ID NO: 3429221 - RNA, 19 nt, Human
augcuggguuggugcacag

SEQ ID NO: 3429222 - RNA, 12 nt, Human
augcuguacauc

SEQ ID NO: 3429223 - RNA, 13 nt, Human
augcuguacccag

SEQ ID NO: 3429224 - RNA, 16 nt, Human
augcuguacccaguuu

SEQ ID NO: 3429225 - RNA, 18 nt, Human
augcuguaggugguaugu

SEQ ID NO: 3429226 - RNA, 22 nt, Human
augcuguauuuuaaaagaauga

SEQ ID NO: 3429227 - RNA, 18 nt, Human
augcuguauuuucuuuuu

SEQ ID NO: 3429228 - RNA, 19 nt, Human
augcugucuggcacagccu

SEQ ID NO: 3429229 - RNA, 22 nt, Human
augcugucuggcacagccugca

SEQ ID NO: 3429230 - RNA, 13 nt, Human
augcugugaaauu

SEQ ID NO: 3429231 - RNA, 14 nt, Human
augcugugccccug

SEQ ID NO: 3429232 - RNA, 22 nt, Human
augcugugcccuaaaguguauu

SEQ ID NO: 3429233 - RNA, 21 nt, Human
augcuguggcaugggugaaga

SEQ ID NO: 3429234 - RNA, 23 nt, Human
augcuguguauaugguauauaua

SEQ ID NO: 3429235 - RNA, 23 nt, Human
augcuguucaugaaagauucaau

SEQ ID NO: 3429236 - RNA, 19 nt, Human
augcuguucucuucuucau

SEQ ID NO: 3429237 - RNA, 15 nt, Human
augcuguugauugcu

SEQ ID NO: 3429238 - RNA, 18 nt, Human
augcuguugauugcuaaa

SEQ ID NO: 3429239 - RNA, 22 nt, Human
augcuguugauugcuaaaugua

SEQ ID NO: 3429240 - RNA, 14 nt, Human
augcuguugccuca

SEQ ID NO: 3429241 - RNA, 15 nt, Human
augcuuaaaagguug

SEQ ID NO: 3429242 - RNA, 21 nt, Human
augcuuaaagaauucaaauuu

SEQ ID NO: 3429243 - RNA, 13 nt, Human
augcuuaaauuuu

SEQ ID NO: 3429244 - RNA, 14 nt, Human
augcuuaauuucua

SEQ ID NO: 3429245 - RNA, 23 nt, Human
augcuuacugauauauuuuacaa

SEQ ID NO: 3429246 - RNA, 15 nt, Human
augcuuaguaaugcu

SEQ ID NO: 3429247 - RNA, 23 nt, Human
augcuuagucccucaugcaaauc

SEQ ID NO: 3429248 - RNA, 13 nt, Human
augcuuauuccau

SEQ ID NO: 3429249 - RNA, 15 nt, Human
augcuuauuccauga

SEQ ID NO: 3429250 - RNA, 17 nt, Human
augcuuauuccaugacu

SEQ ID NO: 3429251 - RNA, 23 nt, Human
augcuuauuccaugacugcuugc

SEQ ID NO: 3429252 - RNA, 18 nt, Human
augcuucaugaaaauccu

SEQ ID NO: 3429253 - RNA, 22 nt, Human
augcuucaugaaaauccuacca

SEQ ID NO: 3429254 - RNA, 12 nt, Human
augcuucaugug

SEQ ID NO: 3429255 - RNA, 20 nt, Human
augcuucauucaauauugac

SEQ ID NO: 3429256 - RNA, 21 nt, Human
augcuucauuuguaugucaaa

SEQ ID NO: 3429257 - RNA, 17 nt, Human
augcuuccuagaaguua

SEQ ID NO: 3429258 - RNA, 21 nt, Human
augcuuccuagaaguuacuga

SEQ ID NO: 3429259 - RNA, 13 nt, Human
augcuuccuugcc

SEQ ID NO: 3429260 - RNA, 16 nt, Human
augcuuccuugccuga

SEQ ID NO: 3429261 - RNA, 23 nt, Human
augcuucuaaguaaauacaauuu

SEQ ID NO: 3429262 - RNA, 22 nt, Human
augcuucucaucuugugaaaug

SEQ ID NO: 3429263 - RNA, 14 nt, Human
augcuucuucagag

SEQ ID NO: 3429264 - RNA, 17 nt, Human
augcuucuucagagacu

SEQ ID NO: 3429265 - RNA, 22 nt, Human
augcuucuucagagacuccugc

SEQ ID NO: 3429266 - RNA, 12 nt, Human
augcuucuugga

SEQ ID NO: 3429267 - RNA, 14 nt, Human
augcuucuuucaaa

SEQ ID NO: 3429268 - RNA, 16 nt, Human
augcuugaaugccacg

SEQ ID NO: 3429269 - RNA, 11 nt, Human
augcuugccua

SEQ ID NO: 3429270 - RNA, 23 nt, Human
augcuugccuagggccuggucca

SEQ ID NO: 3429271 - RNA, 18 nt, Human
augcuugggaagacuccu

SEQ ID NO: 3429272 - RNA, 20 nt, Human
augcuuguaacaagaaaaca

SEQ ID NO: 3429273 - RNA, 19 nt, Human
augcuugugaaaauguguu

SEQ ID NO: 3429274 - RNA, 13 nt, Human
augcuuuaaacau

SEQ ID NO: 3429275 - RNA, 19 nt, Human
augcuuuauuaauguuuuc

SEQ ID NO: 3429276 - RNA, 16 nt, Human
augcuuuauuuguaaa

SEQ ID NO: 3429277 - RNA, 21 nt, Human
augcuuuauuuguaaauuuag

SEQ ID NO: 3429278 - RNA, 21 nt, Human
augcuuucagauuaaaauugu

SEQ ID NO: 3429279 - RNA, 20 nt, Human
augcuuuccaaaccuuaucu

SEQ ID NO: 3429280 - RNA, 15 nt, Human
augcuuuccauauuu

SEQ ID NO: 3429281 - RNA, 22 nt, Human
augcuuucugaagcuuuaccag

SEQ ID NO: 3429282 - RNA, 19 nt, Human
augcuuugaaauugaaccu

SEQ ID NO: 3429283 - RNA, 21 nt, Human
augcuuugaaguacaauugug

SEQ ID NO: 3429284 - RNA, 16 nt, Human
augcuuugaucccuuc

SEQ ID NO: 3429285 - RNA, 14 nt, Human
augcuuugcuuugu

SEQ ID NO: 3429286 - RNA, 22 nt, Human
augcuuugucuucagccucucc

SEQ ID NO: 3429287 - RNA, 17 nt, Human
augcuuuuaaaaaucua

SEQ ID NO: 3429288 - RNA, 17 nt, Human
augcuuuuacugaacuu

SEQ ID NO: 3429289 - RNA, 19 nt, Human
augcuuuucugucucugcc

SEQ ID NO: 3429290 - RNA, 22 nt, Human
augcuuuuuauuauuauuauuu

SEQ ID NO: 3429291 - RNA, 19 nt, Human
augcuuuuuauuucugcau

SEQ ID NO: 3429292 - RNA, 16 nt, Human
augcuuuuugaauguu

SEQ ID NO: 3429293 - RNA, 14 nt, Human
auggaaaaaaugau

SEQ ID NO: 3429294 - RNA, 18 nt, Human
aggucaggggugacacag

SEQ ID NO: 3429295 - RNA, 20 nt, Human
aggucaggggugacacagac

SEQ ID NO: 3429296 - RNA, 21 nt, Human
aggucauacaauccauucuua

SEQ ID NO: 3429297 - RNA, 22 nt, Human
aggucauacuaucuacucuccu

SEQ ID NO: 3429298 - RNA, 16 nt, Human
aggucauauuaauaua

SEQ ID NO: 3429299 - RNA, 18 nt, Human
aggucauauuaauauauu

SEQ ID NO: 3429300 - RNA, 19 nt, Human
aggucauggccacacugug

SEQ ID NO: 3429301 - RNA, 21 nt, Human
aggucauggccacacugugac

SEQ ID NO: 3429302 - RNA, 20 nt, Human
aggucauuuuuuuuaagaaa

SEQ ID NO: 3429303 - RNA, 22 nt, Human
aggucauuuuuuuuaagaaaaa

SEQ ID NO: 3429304 - RNA, 14 nt, Human
agguccaagauacc

SEQ ID NO: 3429305 - RNA, 14 nt, Human
agguccaauucucg

SEQ ID NO: 3429306 - RNA, 16 nt, Human
agguccaauuuguaaa

SEQ ID NO: 3429307 - RNA, 18 nt, Human
agguccacaggucuagac

SEQ ID NO: 3429308 - RNA, 14 nt, Human
agguccagcccauc

SEQ ID NO: 3429309 - RNA, 16 nt, Human
agguccagcccuggcu

SEQ ID NO: 3429310 - RNA, 22 nt, Human
agguugaagaccuaaccagggc

SEQ ID NO: 3429311 - RNA, 14 nt, Human
agguugaagcacca

SEQ ID NO: 3429312 - RNA, 12 nt, Human
agguugaagcca

SEQ ID NO: 3429313 - RNA, 17 nt, Human
agguugagcucuucuua

SEQ ID NO: 3429314 - RNA, 18 nt, Human
augcaaauccuaugugau

SEQ ID NO: 3429315 - RNA, 19 nt, Human
augcaaauccuaugugauu

SEQ ID NO: 3429316 - RNA, 23 nt, Human
augcaaaugagcucugaaaucuu

SEQ ID NO: 3429317 - RNA, 16 nt, Human
augcaacaggcacuca

SEQ ID NO: 3429318 - RNA, 16 nt, Human
augcaaccaagucaca

SEQ ID NO: 3429319 - RNA, 17 nt, Human
augcaagcagaggacca

SEQ ID NO: 3429320 - RNA, 22 nt, Human
augcaagcagaggaccagggcc

SEQ ID NO: 3429321 - RNA, 13 nt, Human
augcaagcaguuu

SEQ ID NO: 3429322 - RNA, 16 nt, Human
augcaagcaguuucaa

SEQ ID NO: 3429323 - RNA, 13 nt, Human
augcaaggaagga

SEQ ID NO: 3429324 - RNA, 15 nt, Human
augcaaggaccagga

SEQ ID NO: 3429325 - RNA, 21 nt, Human
augcaaggcacuguacuaggc

SEQ ID NO: 3429326 - RNA, 18 nt, Human
augcaagggacugugugu

SEQ ID NO: 3429327 - RNA, 14 nt, Human
augcaaggucauuu

SEQ ID NO: 3429328 - RNA, 16 nt, Human
augcaaguauucucau

SEQ ID NO: 3429329 - RNA, 16 nt, Human
augcaauaaaauuauu

SEQ ID NO: 3429330 - RNA, 18 nt, Human
augcaauaaaauuuaaaa

SEQ ID NO: 3429331 - RNA, 21 nt, Human
augcaauauacuggaaagcuu

SEQ ID NO: 3429332 - RNA, 15 nt, Human
augcaauauaucuaa

SEQ ID NO: 3429333 - RNA, 14 nt, Human
augcaauauuugua

SEQ ID NO: 3429334 - RNA, 14 nt, Human
augcaauccuuaca

SEQ ID NO: 3429335 - RNA, 15 nt, Human
augcaauccuuacaa

SEQ ID NO: 3429336 - RNA, 19 nt, Human
augcaauccuuacaaauga

SEQ ID NO: 3429337 - RNA, 12 nt, Human
augcaaugagau

SEQ ID NO: 3429338 - RNA, 18 nt, Human
augcaaugccucuggaau

SEQ ID NO: 3429339 - RNA, 16 nt, Human
augcaaugugcuacug

SEQ ID NO: 3429340 - RNA, 21 nt, Human
augcaauuagguuuuuccuua

SEQ ID NO: 3429341 - RNA, 16 nt, Human
augcaauucaucccag

SEQ ID NO: 3429342 - RNA, 19 nt, Human
augcaauuuauuaaaauga

SEQ ID NO: 3429343 - RNA, 20 nt, Human
augcaauuuugcauuugaau

SEQ ID NO: 3429344 - RNA, 22 nt, Human
augcacaaauucugucucugga

SEQ ID NO: 3429345 - RNA, 16 nt, Human
augcacaagaauggau

SEQ ID NO: 3429346 - RNA, 15 nt, Human
augcacacaaaacaa

SEQ ID NO: 3429347 - RNA, 23 nt, Human
augcacacauuuuuuaaaugcac

SEQ ID NO: 3429348 - RNA, 16 nt, Human
augcacagagaagcug

SEQ ID NO: 3429349 - RNA, 17 nt, Human
augcacagagaagcugg

SEQ ID NO: 3429350 - RNA, 16 nt, Human
augcacagaguuguua

SEQ ID NO: 3429351 - RNA, 13 nt, Human
augcacagauaua

SEQ ID NO: 3429352 - RNA, 22 nt, Human
augcacagauauacuuugugga

SEQ ID NO: 3429353 - RNA, 15 nt, Human
augcacaguauuugu

SEQ ID NO: 3429354 - RNA, 21 nt, Human
augcacaguauuuguaauuaa

SEQ ID NO: 3429355 - RNA, 19 nt, Human
augcacauauggacucugc

SEQ ID NO: 3429356 - RNA, 21 nt, Human
augcacauauggacucugcac

SEQ ID NO: 3429357 - RNA, 17 nt, Human
augcacaugaacuuaga

SEQ ID NO: 3429358 - RNA, 13 nt, Human
augcacauuucau

SEQ ID NO: 3429359 - RNA, 17 nt, Human
augcaccaaaucaucuc

SEQ ID NO: 3429360 - RNA, 15 nt, Human
augcaccaccaagcc

SEQ ID NO: 3429361 - RNA, 21 nt, Human
augcaccaccaagccaaggga

SEQ ID NO: 3429362 - RNA, 14 nt, Human
augcaccagcccuu

SEQ ID NO: 3429363 - RNA, 22 nt, Human
augcaccagcccuuagcaggga

SEQ ID NO: 3429364 - RNA, 20 nt, Human
augcaccugcaaucccagcu

SEQ ID NO: 3429365 - RNA, 18 nt, Human
augcacggccucgcgucu

SEQ ID NO: 3429366 - RNA, 20 nt, Human
augcacuaagucucuuuuuu

SEQ ID NO: 3429367 - RNA, 16 nt, Human
augcacuaugaggaau

SEQ ID NO: 3429368 - RNA, 17 nt, Human
augcacugacccuucca

SEQ ID NO: 3429369 - RNA, 18 nt, Human
augcacugugaaggaccc

SEQ ID NO: 3429370 - RNA, 19 nt, Human
augcacugugaaggacccu

SEQ ID NO: 3429371 - RNA, 22 nt, Human
augcacuguucccccugugcag

SEQ ID NO: 3429372 - RNA, 15 nt, Human
augcacuuaaagaag

SEQ ID NO: 3429373 - RNA, 19 nt, Human
augcacuuaaagaaguauu

SEQ ID NO: 3429374 - RNA, 19 nt, Human
augcacuuauaauuuuccu

SEQ ID NO: 3429375 - RNA, 12 nt, Human
augcacuuugcu

SEQ ID NO: 3429376 - RNA, 13 nt, Human
augcacuuugcuu

SEQ ID NO: 3429377 - RNA, 21 nt, Human
augcacuuugcuuuaauauaa

SEQ ID NO: 3429378 - RNA, 12 nt, Human
augcacuuuguu

SEQ ID NO: 3429379 - RNA, 15 nt, Human
augcacuuuguucug

SEQ ID NO: 3429380 - RNA, 16 nt, Human
augcacuuuguucugg

SEQ ID NO: 3429381 - RNA, 16 nt, Human
augcagaaagcauccc

SEQ ID NO: 3429382 - RNA, 18 nt, Human
augcagaacaaaugaaga

SEQ ID NO: 3429383 - RNA, 19 nt, Human
augcagaacaaaugaagac

SEQ ID NO: 3429384 - RNA, 12 nt, Human
augcagaauguu

SEQ ID NO: 3429385 - RNA, 20 nt, Human
augcagaauguuuuuaaaau

SEQ ID NO: 3429386 - RNA, 20 nt, Human
augcagagagccauuuugug

SEQ ID NO: 3429387 - RNA, 17 nt, Human
augcagagguccacaac

SEQ ID NO: 3429388 - RNA, 22 nt, Human
augcagauuuugcccuugacaa

SEQ ID NO: 3429389 - RNA, 16 nt, Human
augcagcaaaauguga

SEQ ID NO: 3429390 - RNA, 16 nt, Human
augcagcaaggcccug

SEQ ID NO: 3429391 - RNA, 19 nt, Human
augcagcaaggcccugcug

SEQ ID NO: 3429392 - RNA, 21 nt, Human
augcagcaaggcccugcugcc

SEQ ID NO: 3429393 - RNA, 22 nt, Human
augcagcccaugcccaccugcc

SEQ ID NO: 3429394 - RNA, 21 nt, Human
augcagcccauuucuccagaa

SEQ ID NO: 3429395 - RNA, 18 nt, Human
augcagccgccuuccuug

SEQ ID NO: 3429396 - RNA, 13 nt, Human
augcagcucaacu

SEQ ID NO: 3429397 - RNA, 15 nt, Human
augcagcucuuccug

SEQ ID NO: 3429398 - RNA, 21 nt, Human
augcagcuuauacgaaauaau

SEQ ID NO: 3429399 - RNA, 14 nt, Human
augcagcuuugcaa

SEQ ID NO: 3429400 - RNA, 18 nt, Human
augcagggauugcugcca

SEQ ID NO: 3429401 - RNA, 22 nt, Human
augcagggauugcugccacuuu

SEQ ID NO: 3429402 - RNA, 19 nt, Human
augcagggccucacacggu

SEQ ID NO: 3429403 - RNA, 17 nt, Human
augcaggggcaaacacc

SEQ ID NO: 3429404 - RNA, 18 nt, Human
augcaggugaaacccagu

SEQ ID NO: 3429405 - RNA, 10 nt, Human
augcaggugg

SEQ ID NO: 3429406 - RNA, 15 nt, Human
augcaguauugagca

SEQ ID NO: 3429407 - RNA, 21 nt, Human
augcagucuccucuuuaaaac

SEQ ID NO: 3429408 - RNA, 18 nt, Human
augcagucuguccaggcu

SEQ ID NO: 3429409 - RNA, 16 nt, Human
augcagugaauuguga

SEQ ID NO: 3429410 - RNA, 18 nt, Human
augcagugauauggcaga

SEQ ID NO: 3429411 - RNA, 21 nt, Human
augcagugauauggcagaaga

SEQ ID NO: 3429412 - RNA, 17 nt, Human
augcagugccuuucuuc

SEQ ID NO: 3429413 - RNA, 23 nt, Human
augcagugcucgcuguugcugaa

SEQ ID NO: 3429414 - RNA, 14 nt, Human
augcagugcugcuu

SEQ ID NO: 3429415 - RNA, 19 nt, Human
augcaguuacaaauuauaa

SEQ ID NO: 3429416 - RNA, 18 nt, Human
augcaguucugaagaaga

SEQ ID NO: 3429417 - RNA, 14 nt, Human
augcaguugucucu

SEQ ID NO: 3429418 - RNA, 15 nt, Human
augcaguugucucug

SEQ ID NO: 3429419 - RNA, 14 nt, Human
augcaguuugaaau

SEQ ID NO: 3429420 - RNA, 17 nt, Human
augcaguuugaaauucu

SEQ ID NO: 3429421 - RNA, 15 nt, Human
augcaguuuuccuua

SEQ ID NO: 3429422 - RNA, 21 nt, Human
augcauaaauaugcagugaua

SEQ ID NO: 3429423 - RNA, 22 nt, Human
augcauaacugacaaaucaagu

SEQ ID NO: 3429424 - RNA, 15 nt, Human
augcauaauucacau

SEQ ID NO: 3429425 - RNA, 13 nt, Human
augcauacacaca

SEQ ID NO: 3429426 - RNA, 14 nt, Human
augcauacacacac

SEQ ID NO: 3429427 - RNA, 22 nt, Human
augcauacacacacacacacag

SEQ ID NO: 3429428 - RNA, 15 nt, Human
augcauacuucaaaa

SEQ ID NO: 3429429 - RNA, 16 nt, Human
augcauacuucaaaag

SEQ ID NO: 3429430 - RNA, 17 nt, Human
augcauacuucaaaagu

SEQ ID NO: 3429431 - RNA, 18 nt, Human
augcauacuucaaaagua

SEQ ID NO: 3429432 - RNA, 20 nt, Human
augcauacuucaaaaguauu

SEQ ID NO: 3429433 - RNA, 22 nt, Human
augcauacuucaaaaguauuuu

SEQ ID NO: 3429434 - RNA, 17 nt, Human
augcauagguuuagcag

SEQ ID NO: 3429435 - RNA, 21 nt, Human
augcauagguuuagcaguaua

SEQ ID NO: 3429436 - RNA, 19 nt, Human
augcauauaaugaauaaau

SEQ ID NO: 3429437 - RNA, 21 nt, Human
augcauauaaugaauaaauca

SEQ ID NO: 3429438 - RNA, 17 nt, Human
augcauauccugagcca

SEQ ID NO: 3429439 - RNA, 18 nt, Human
augcauauccugagccau

SEQ ID NO: 3429440 - RNA, 20 nt, Human
augcauauuauuuuauguug

SEQ ID NO: 3429441 - RNA, 13 nt, Human
augcauauuguau

SEQ ID NO: 3429442 - RNA, 12 nt, Human
augcauauuugu

SEQ ID NO: 3429443 - RNA, 16 nt, Human
augcaucaauccugug

SEQ ID NO: 3429444 - RNA, 14 nt, Human
augcaucagaaagg

SEQ ID NO: 3429445 - RNA, 18 nt, Human
augcaucauucuuguuaa

SEQ ID NO: 3429446 - RNA, 17 nt, Human
augcaucauuucaggag

SEQ ID NO: 3429447 - RNA, 17 nt, Human
augcaucccacugcuga

SEQ ID NO: 3429448 - RNA, 19 nt, Human
augcauccuuugcacuguc

SEQ ID NO: 3429449 - RNA, 20 nt, Human
augcaucuggcucaccgggu

SEQ ID NO: 3429450 - RNA, 15 nt, Human
augcaucuguccuca

SEQ ID NO: 3429451 - RNA, 12 nt, Human
augcaucuguuu

SEQ ID NO: 3429452 - RNA, 14 nt, Human
augcaucuuacuga

SEQ ID NO: 3429453 - RNA, 12 nt, Human
augcaugaacaa

SEQ ID NO: 3429454 - RNA, 20 nt, Human
augcaugaaguaauaugcac

SEQ ID NO: 3429455 - RNA, 21 nt, Human
agucaccccaaguagucugcu

SEQ ID NO: 3429456 - RNA, 17 nt, Human
agucaccccggccaccu

SEQ ID NO: 3429457 - RNA, 19 nt, Human
agucaccccggccaccugc

SEQ ID NO: 3429458 - RNA, 19 nt, Human
agucacccuaccugugccu

SEQ ID NO: 3429459 - RNA, 23 nt, Human
agucacccuagcccucucccucu

SEQ ID NO: 3429460 - RNA, 17 nt, Human
agucaccuucccuugcc

SEQ ID NO: 3429461 - RNA, 21 nt, Human
agucaccuucccuugccacuu

SEQ ID NO: 3429462 - RNA, 19 nt, Human
agucaccuuuuaaauccug

SEQ ID NO: 3429463 - RNA, 20 nt, Human
agucaccuuuuaaauccugu

SEQ ID NO: 3429464 - RNA, 17 nt, Human
agucacucaauuguuuu

SEQ ID NO: 3429465 - RNA, 20 nt, Human
agucacucgauaauaaagua

SEQ ID NO: 3429466 - RNA, 17 nt, Human
agucacucuagucaaug

SEQ ID NO: 3429467 - RNA, 17 nt, Human
agucacucuuaugcugu

SEQ ID NO: 3429468 - RNA, 23 nt, Human
agucacugauguacaauuaaaaa

SEQ ID NO: 3429469 - RNA, 18 nt, Human
agucacugccacuuugca

SEQ ID NO: 3429470 - RNA, 14 nt, Human
agucacugccucuc

SEQ ID NO: 3429471 - RNA, 14 nt, Human
agucacugccugca

SEQ ID NO: 3429472 - RNA, 19 nt, Human
agucacuuacuauuguugc

SEQ ID NO: 3429473 - RNA, 20 nt, Human
agucacuugaugugccauuu

SEQ ID NO: 3429474 - RNA, 21 nt, Human
agucacuugaugugccauuuu

SEQ ID NO: 3429475 - RNA, 19 nt, Human
agucacuuuuuuuuuccaa

SEQ ID NO: 3429476 - RNA, 17 nt, Human
agucagaaaacuuuaaa

SEQ ID NO: 3429477 - RNA, 17 nt, Human
agucagaaacuguuucu

SEQ ID NO: 3429478 - RNA, 15 nt, Human
agucagaacagcaga

SEQ ID NO: 3429479 - RNA, 17 nt, Human
agucagaacagcagacu

SEQ ID NO: 3429480 - RNA, 19 nt, Human
agucagaauuagcugcuuc

SEQ ID NO: 3429481 - RNA, 15 nt, Human
agucagagacagaua

SEQ ID NO: 3429482 - RNA, 17 nt, Human
agucagagacagauacc

SEQ ID NO: 3429483 - RNA, 22 nt, Human
agucagagccccuacagcauug

SEQ ID NO: 3429484 - RNA, 23 nt, Human
agucagagccccuacagcauugu

SEQ ID NO: 3429485 - RNA, 17 nt, Human
agucagaggauggccag

SEQ ID NO: 3429486 - RNA, 20 nt, Human
agucagauggaaaauucauu

SEQ ID NO: 3429487 - RNA, 23 nt, Human
agucagauggaaaauucauuuuu

SEQ ID NO: 3429488 - RNA, 17 nt, Human
agucagauucuugcauc

SEQ ID NO: 3429489 - RNA, 14 nt, Human
agucagcagaacug

SEQ ID NO: 3429490 - RNA, 21 nt, Human
agucagccgacaacuauuucg

SEQ ID NO: 3429491 - RNA, 16 nt, Human
agucagccucucuccc

SEQ ID NO: 3429492 - RNA, 18 nt, Human
agucagcucucugcccug

SEQ ID NO: 3429493 - RNA, 18 nt, Human
agucagcuuucaucuuug

SEQ ID NO: 3429494 - RNA, 15 nt, Human
agucaggaaagagaa

SEQ ID NO: 3429495 - RNA, 16 nt, Human
agucagggaccccugc

SEQ ID NO: 3429496 - RNA, 14 nt, Human
agucagggcccaga

SEQ ID NO: 3429497 - RNA, 17 nt, Human
agucaggggcagcugac

SEQ ID NO: 3429498 - RNA, 21 nt, Human
agucagucaugauggcaccac

SEQ ID NO: 3429499 - RNA, 23 nt, Human
agucagucgccuuucagcaggca

SEQ ID NO: 3429500 - RNA, 21 nt, Human
agucaguugcucaaaaagaaa

SEQ ID NO: 3429501 - RNA, 14 nt, Human
agucaguuugcagu

SEQ ID NO: 3429502 - RNA, 20 nt, Human
agucauaaaauguaucuucc

SEQ ID NO: 3429503 - RNA, 13 nt, Human
agucauaauugca

SEQ ID NO: 3429504 - RNA, 17 nt, Human
agucauaccaaugaaaa

SEQ ID NO: 3429505 - RNA, 18 nt, Human
agucauauaaaagcuaug

SEQ ID NO: 3429506 - RNA, 21 nt, Human
agucauauuuugauuauugua

SEQ ID NO: 3429507 - RNA, 18 nt, Human
agucaucaucagggccug

SEQ ID NO: 3429508 - RNA, 19 nt, Human
agucaucaucagggccugg

SEQ ID NO: 3429509 - RNA, 22 nt, Human
agucaucaucagggccuggggc

SEQ ID NO: 3429510 - RNA, 19 nt, Human
agucaucuugcuaccagua

SEQ ID NO: 3429511 - RNA, 19 nt, Human
agucaucuuguaauuucca

SEQ ID NO: 3429512 - RNA, 14 nt, Human
agucaugaagccca

SEQ ID NO: 3429513 - RNA, 21 nt, Human
agucaugaagcccaagugaaa

SEQ ID NO: 3429514 - RNA, 14 nt, Human
agucaugagcugag

SEQ ID NO: 3429515 - RNA, 17 nt, Human
agucaugaucucccugc

SEQ ID NO: 3429516 - RNA, 18 nt, Human
agucaugaucucccugcc

SEQ ID NO: 3429517 - RNA, 12 nt, Human
auggaguauucu

SEQ ID NO: 3429518 - RNA, 20 nt, Human
auggaguccagggaagagaa

SEQ ID NO: 3429519 - RNA, 15 nt, Human
auggagucuugcucu

SEQ ID NO: 3429520 - RNA, 22 nt, Human
auggagugacggucccacacug

SEQ ID NO: 3429521 - RNA, 18 nt, Human
auggagugcuguuuuguu

SEQ ID NO: 3429522 - RNA, 20 nt, Human
auggagugcuguuuuguuau

SEQ ID NO: 3429523 - RNA, 17 nt, Human
auggaguggcagcccag

SEQ ID NO: 3429524 - RNA, 20 nt, Human
auggaguggcagcccagcca

SEQ ID NO: 3429525 - RNA, 22 nt, Human
auggaguggcagcccagccagc

SEQ ID NO: 3429526 - RNA, 18 nt, Human
auggaguguguauuguuc

SEQ ID NO: 3429527 - RNA, 19 nt, Human
auggaguuaacaucaugaa

SEQ ID NO: 3429528 - RNA, 17 nt, Human
auggaguuaacggguga

SEQ ID NO: 3429529 - RNA, 21 nt, Human
auggaguuaacgggugaauaa

SEQ ID NO: 3429530 - RNA, 13 nt, Human
auggaguuucuaa

SEQ ID NO: 3429531 - RNA, 20 nt, Human
auggauaaaauaaugcugca

SEQ ID NO: 3429532 - RNA, 22 nt, Human
auggauaaugccggugagaaua

SEQ ID NO: 3429533 - RNA, 13 nt, Human
auggauacuacau

SEQ ID NO: 3429534 - RNA, 23 nt, Human
auggauauuagucauagaagaac

SEQ ID NO: 3429535 - RNA, 18 nt, Human
auggauauuauuagaaau

SEQ ID NO: 3429536 - RNA, 16 nt, Human
auggaucacaagaugg

SEQ ID NO: 3429537 - RNA, 22 nt, Human
auggauccccagugaaaacuag

SEQ ID NO: 3429538 - RNA, 14 nt, Human
auggaucccgaaga

SEQ ID NO: 3429539 - RNA, 15 nt, Human
auggaugauuuaagu

SEQ ID NO: 3429540 - RNA, 22 nt, Human
auggaugcaaaguacaaugugu

SEQ ID NO: 3429541 - RNA, 13 nt, Human
auggaugccaaua

SEQ ID NO: 3429542 - RNA, 23 nt, Human
auggaugccaauauuaaaucugc

SEQ ID NO: 3429543 - RNA, 14 nt, Human
auggauggcuucua

SEQ ID NO: 3429544 - RNA, 19 nt, Human
auggaugggggaacucaga

SEQ ID NO: 3429545 - RNA, 18 nt, Human
auggauguccccagcaga

SEQ ID NO: 3429546 - RNA, 20 nt, Human
auggauuaaauuuaauucuu

SEQ ID NO: 3429547 - RNA, 13 nt, Human
auggauucuaaaa

SEQ ID NO: 3429548 - RNA, 22 nt, Human
auggauuguuaauuucaguccu

SEQ ID NO: 3429549 - RNA, 15 nt, Human
auggauuuccagcca

SEQ ID NO: 3429550 - RNA, 14 nt, Human
auggauuuguuaca

SEQ ID NO: 3429551 - RNA, 17 nt, Human
auggauuuguuacagcc

SEQ ID NO: 3429552 - RNA, 20 nt, Human
auggauuuucuauuguuacu

SEQ ID NO: 3429553 - RNA, 16 nt, Human
auggauuuuucuuuaa

SEQ ID NO: 3429554 - RNA, 14 nt, Human
auggcaaaaauggc

SEQ ID NO: 3429555 - RNA, 14 nt, Human
auggcaacaaacug

SEQ ID NO: 3429556 - RNA, 15 nt, Human
auggcaacagaucug

SEQ ID NO: 3429557 - RNA, 16 nt, Human
auggcaacagaucugg

SEQ ID NO: 3429558 - RNA, 17 nt, Human
auggcaacagaucugga

SEQ ID NO: 3429559 - RNA, 24 nt, Human
auggcaacagaucuggaaccucag

SEQ ID NO: 3429560 - RNA, 16 nt, Human
auggcaaccauuauaa

SEQ ID NO: 3429561 - RNA, 23 nt, Human
auggcaaguuuuccauauuuuua

SEQ ID NO: 3429562 - RNA, 23 nt, Human
auggcaauucuuugaccucaacc

SEQ ID NO: 3429563 - RNA, 23 nt, Human
auggcacagcccaaagaaggaaa

SEQ ID NO: 3429564 - RNA, 19 nt, Human
auggcacagggcaugaaau

SEQ ID NO: 3429565 - RNA, 20 nt, Human
auggcacagggcaugaaaug

SEQ ID NO: 3429566 - RNA, 20 nt, Human
auggcacuuagcuaucagaa

SEQ ID NO: 3429567 - RNA, 16 nt, Human
auggcacuugcaucug

SEQ ID NO: 3429568 - RNA, 13 nt, Human
auggcagaagaca

SEQ ID NO: 3429569 - RNA, 17 nt, Human
auggcagaagacaccag

SEQ ID NO: 3429570 - RNA, 13 nt, Human
auggcagaaggca

SEQ ID NO: 3429571 - RNA, 20 nt, Human
auggcagaaggcaaacccau

SEQ ID NO: 3429572 - RNA, 21 nt, Human
auggcagaaggcaaacccauc

SEQ ID NO: 3429573 - RNA, 22 nt, Human
auggcagaguuuguguguuguc

SEQ ID NO: 3429574 - RNA, 13 nt, Human
auggcagcagggg

SEQ ID NO: 3429575 - RNA, 14 nt, Human
auggcagcugccac

SEQ ID NO: 3429576 - RNA, 20 nt, Human
auggcaggacgugggcuggg

SEQ ID NO: 3429577 - RNA, 16 nt, Human
auggcaggauggccug

SEQ ID NO: 3429578 - RNA, 16 nt, Human
auggcagggggcugcu

SEQ ID NO: 3429579 - RNA, 17 nt, Human
auggcagggggcugcug

SEQ ID NO: 3429580 - RNA, 18 nt, Human
auggcaguguuccuauuu

SEQ ID NO: 3429581 - RNA, 15 nt, Human
auggcaguuauauuu

SEQ ID NO: 3429582 - RNA, 17 nt, Human
auggcauaaccugucuc

SEQ ID NO: 3429583 - RNA, 18 nt, Human
auggcauauuuuucacau

SEQ ID NO: 3429584 - RNA, 23 nt, Human
auggcauauuuuucacauaucua

SEQ ID NO: 3429585 - RNA, 20 nt, Human
auggcaucuucgucuucacu

SEQ ID NO: 3429586 - RNA, 15 nt, Human
auggcaugagaaaua

SEQ ID NO: 3429587 - RNA, 17 nt, Human
auggcaugagaaauaca

SEQ ID NO: 3429588 - RNA, 18 nt, Human
auggcaugagaaauacaa

SEQ ID NO: 3429589 - RNA, 19 nt, Human
auggcaugagaaauacaaa

SEQ ID NO: 3429590 - RNA, 13 nt, Human
auggcauuugcag

SEQ ID NO: 3429591 - RNA, 17 nt, Human
auggcauuugcagauuu

SEQ ID NO: 3429592 - RNA, 17 nt, Human
auggccagccccuuaga

SEQ ID NO: 3429593 - RNA, 19 nt, Human
auggccagccccuuagaca

SEQ ID NO: 3429594 - RNA, 22 nt, Human
auggccaggaaguagcacaggc

SEQ ID NO: 3429595 - RNA, 19 nt, Human
auggccaggauccucuccu

SEQ ID NO: 3429596 - RNA, 19 nt, Human
auggccagguggccacucc

SEQ ID NO: 3429597 - RNA, 22 nt, Human
auggccauggaguguacaagua

SEQ ID NO: 3429598 - RNA, 23 nt, Human
augggggaaagcaaagcacagag

SEQ ID NO: 3429599 - RNA, 18 nt, Human
augggggaaauggugccu

SEQ ID NO: 3429600 - RNA, 19 nt, Human
augggggagucugaagcag

SEQ ID NO: 3429601 - RNA, 14 nt, Human
augggggaugcuuc

SEQ ID NO: 3429602 - RNA, 22 nt, Human
auggggggccaacaccagggau

SEQ ID NO: 3429603 - RNA, 15 nt, Human
augggggguauauuu

SEQ ID NO: 3429604 - RNA, 17 nt, Human
auggggucuguaaaauc

SEQ ID NO: 3429605 - RNA, 18 nt, Human
auggggucuguaaaaucu

SEQ ID NO: 3429606 - RNA, 18 nt, Human
auggggugggccucuggu

SEQ ID NO: 3429607 - RNA, 19 nt, Human
auggggugggguagggcug

SEQ ID NO: 3429608 - RNA, 18 nt, Human
auggguaauauaaagugu

SEQ ID NO: 3429609 - RNA, 12 nt, Human
augggucacagg

SEQ ID NO: 3429610 - RNA, 14 nt, Human
augggucagagcua

SEQ ID NO: 3429611 - RNA, 17 nt, Human
augggucuggcugagcu

SEQ ID NO: 3429612 - RNA, 20 nt, Human
augggugcaaggaaaauuag

SEQ ID NO: 3429613 - RNA, 17 nt, Human
augggugcccacagugu

SEQ ID NO: 3429614 - RNA, 12 nt, Human
augggugugugu

SEQ ID NO: 3429615 - RNA, 13 nt, Human
auggguguguguu

SEQ ID NO: 3429616 - RNA, 15 nt, Human
auggguuauguguau

SEQ ID NO: 3429617 - RNA, 14 nt, Human
auggguugcauuug

SEQ ID NO: 3429618 - RNA, 23 nt, Human
augguaaaaguuacuuauucuag

SEQ ID NO: 3429619 - RNA, 14 nt, Human
augguaaaauugca

SEQ ID NO: 3429620 - RNA, 15 nt, Human
augguaaaauuuugu

SEQ ID NO: 3429621 - RNA, 20 nt, Human
augguaacugcuuucuguuc

SEQ ID NO: 3429622 - RNA, 16 nt, Human
augguaagagaaaaga

SEQ ID NO: 3429623 - RNA, 15 nt, Human
augguaaucauauua

SEQ ID NO: 3429624 - RNA, 20 nt, Human
augguaaucuuuaccuguau

SEQ ID NO: 3429625 - RNA, 23 nt, Human
augguaaucuuuaccuguauaca

SEQ ID NO: 3429626 - RNA, 14 nt, Human
augguaauuguugc

SEQ ID NO: 3429627 - RNA, 20 nt, Human
augguaauuuauaguuuaua

SEQ ID NO: 3429628 - RNA, 12 nt, Human
augguacauuuu

SEQ ID NO: 3429629 - RNA, 20 nt, Human
augguaccaaucaugaaucu

SEQ ID NO: 3429630 - RNA, 19 nt, Human
augguacuagggggaagug

SEQ ID NO: 3429631 - RNA, 23 nt, Human
augguacuguacagcuggcucua

SEQ ID NO: 3429632 - RNA, 18 nt, Human
augguagaaaaauuucac

SEQ ID NO: 3429633 - RNA, 18 nt, Human
augguagcauuuuaaaca

SEQ ID NO: 3429634 - RNA, 23 nt, Human
augguagcauuuuaaacaaaaua

SEQ ID NO: 3429635 - RNA, 19 nt, Human
augguagccagaugauaaa

SEQ ID NO: 3429636 - RNA, 17 nt, Human
augguaggaacugcugg

SEQ ID NO: 3429637 - RNA, 19 nt, Human
augguaggaagaagcucuc

SEQ ID NO: 3429638 - RNA, 18 nt, Human
augguaguuucugugguu

SEQ ID NO: 3429639 - RNA, 15 nt, Human
augguaguuuuacag

SEQ ID NO: 3429640 - RNA, 21 nt, Human
augguaguuuuacaguguuuc

SEQ ID NO: 3429641 - RNA, 14 nt, Human
augguaguuuuuuc

SEQ ID NO: 3429642 - RNA, 19 nt, Human
augguaguuuuuucaucuu

SEQ ID NO: 3429643 - RNA, 17 nt, Human
augguauaaguaacuuu

SEQ ID NO: 3429644 - RNA, 16 nt, Human
augguauuugagacau

SEQ ID NO: 3429645 - RNA, 20 nt, Human
auggucaacacuuaaggguu

SEQ ID NO: 3429646 - RNA, 16 nt, Human
auggucacacacugau

SEQ ID NO: 3429647 - RNA, 17 nt, Human
auggucacgcaccuggg

SEQ ID NO: 3429648 - RNA, 20 nt, Human
auggucacguuuggugcuuc

SEQ ID NO: 3429649 - RNA, 21 nt, Human
auggucacguuuggugcuucu

SEQ ID NO: 3429650 - RNA, 24 nt, Human
auggucacguuuggugcuucucag

SEQ ID NO: 3429651 - RNA, 16 nt, Human
auggucagcguugcau

SEQ ID NO: 3429652 - RNA, 19 nt, Human
auggucagcguugcauguc

SEQ ID NO: 3429653 - RNA, 19 nt, Human
augguccaggagaaggcca

SEQ ID NO: 3429654 - RNA, 15 nt, Human
augguccauagcacu

SEQ ID NO: 3429655 - RNA, 18 nt, Human
auggucccauccaggcag

SEQ ID NO: 3429656 - RNA, 13 nt, Human
augguccccaugg

SEQ ID NO: 3429657 - RNA, 19 nt, Human
augguccgugcuaaggacu

SEQ ID NO: 3429658 - RNA, 18 nt, Human
augguccuaaaagcaaaa

SEQ ID NO: 3429659 - RNA, 20 nt, Human
augguccuaaaagcaaaaua

SEQ ID NO: 3429660 - RNA, 12 nt, Human
augguccugggg

SEQ ID NO: 3429661 - RNA, 23 nt, Human
auggucgagaaagaggcaccagg

SEQ ID NO: 3429662 - RNA, 16 nt, Human
auggucgcccaggaga

SEQ ID NO: 3429663 - RNA, 13 nt, Human
auggucuggucua

SEQ ID NO: 3429664 - RNA, 19 nt, Human
auggugaaaccccgucucu

SEQ ID NO: 3429665 - RNA, 23 nt, Human
auggugacuuccucgccucuccc

SEQ ID NO: 3429666 - RNA, 18 nt, Human
auggugagaugcagcugg

SEQ ID NO: 3429667 - RNA, 19 nt, Human
auggugagaugcagcugga

SEQ ID NO: 3429668 - RNA, 15 nt, Human
auggugagcagcgga

SEQ ID NO: 3429669 - RNA, 13 nt, Human
auggugauguuga

SEQ ID NO: 3429670 - RNA, 16 nt, Human
auggugauuuuaaaug

SEQ ID NO: 3429671 - RNA, 19 nt, Human
auggugauuuuaaaugugu

SEQ ID NO: 3429672 - RNA, 17 nt, Human
auggugccccaggacca

SEQ ID NO: 3429673 - RNA, 18 nt, Human
auggugccccaggaccag

SEQ ID NO: 3429674 - RNA, 21 nt, Human
auggugccccaggaccagcuc

SEQ ID NO: 3429675 - RNA, 14 nt, Human
auggugccucugga

SEQ ID NO: 3429676 - RNA, 14 nt, Human
auggugccuucauu

SEQ ID NO: 3429677 - RNA, 20 nt, Human
auggugcuacgccugcaugu

SEQ ID NO: 3429678 - RNA, 15 nt, Human
auggugcucaccaug

SEQ ID NO: 3429679 - RNA, 14 nt, Human
auggugcugaccuc

SEQ ID NO: 3429680 - RNA, 12 nt, Human
auggugcugaga

SEQ ID NO: 3429681 - RNA, 14 nt, Human
augugcaaaugcaa

SEQ ID NO: 3429682 - RNA, 16 nt, Human
augugcaaguguaugc

SEQ ID NO: 3429683 - RNA, 13 nt, Human
augugcaauagaa

SEQ ID NO: 3429684 - RNA, 18 nt, Human
augugcaauugauuucuu

SEQ ID NO: 3429685 - RNA, 19 nt, Human
augugcacaucuguuuugu

SEQ ID NO: 3429686 - RNA, 18 nt, Human
augugcacugucacuuug

SEQ ID NO: 3429687 - RNA, 13 nt, Human
augugcagcagau

SEQ ID NO: 3429688 - RNA, 20 nt, Human
augugcagcagauuggaagg

SEQ ID NO: 3429689 - RNA, 20 nt, Human
augugcauuuuugugaaaug

SEQ ID NO: 3429690 - RNA, 21 nt, Human
augugcauuuuugugaaauga

SEQ ID NO: 3429691 - RNA, 17 nt, Human
augugccaaucaauagc

SEQ ID NO: 3429692 - RNA, 16 nt, Human
augugccacauuuucu

SEQ ID NO: 3429693 - RNA, 21 nt, Human
augugccagggcaaugaugaa

SEQ ID NO: 3429694 - RNA, 13 nt, Human
augugcccuccug

SEQ ID NO: 3429695 - RNA, 18 nt, Human
augugcccuccugaggga

SEQ ID NO: 3429696 - RNA, 18 nt, Human
augugccgaaugugcagg

SEQ ID NO: 3429697 - RNA, 19 nt, Human
augugccuauugcuagagc

SEQ ID NO: 3429698 - RNA, 15 nt, Human
augugccugauccag

SEQ ID NO: 3429699 - RNA, 19 nt, Human
augugccugcaccaggaga

SEQ ID NO: 3429700 - RNA, 20 nt, Human
augugcgugugugcaagugu

SEQ ID NO: 3429701 - RNA, 21 nt, Human
augugcuacaggggccagaag

SEQ ID NO: 3429702 - RNA, 19 nt, Human
augugcuauuaauauuugu

SEQ ID NO: 3429703 - RNA, 20 nt, Human
augugcucuccaaauuuuuu

SEQ ID NO: 3429704 - RNA, 13 nt, Human
augugcugcuuug

SEQ ID NO: 3429705 - RNA, 11 nt, Human
augugcugugu

SEQ ID NO: 3429706 - RNA, 14 nt, Human
augugcuguguaaa

SEQ ID NO: 3429707 - RNA, 16 nt, Human
augugcuguguaaagu

SEQ ID NO: 3429708 - RNA, 17 nt, Human
augugcuguguaaaguu

SEQ ID NO: 3429709 - RNA, 16 nt, Human
augugcuuaacaggga

SEQ ID NO: 3429710 - RNA, 21 nt, Human
augugcuuaacagggaacgug

SEQ ID NO: 3429711 - RNA, 17 nt, Human
augugcuuuucuccaau

SEQ ID NO: 3429712 - RNA, 15 nt, Human
auguggaacugcugc

SEQ ID NO: 3429713 - RNA, 23 nt, Human
auguggaacugcugccacugagg

SEQ ID NO: 3429714 - RNA, 16 nt, Human
auguggaagugugggu

SEQ ID NO: 3429715 - RNA, 15 nt, Human
auguggaauauaaag

SEQ ID NO: 3429716 - RNA, 17 nt, Human
auguggaauauaaagau

SEQ ID NO: 3429717 - RNA, 23 nt, Human
auguggagcacaaaagccucuca

SEQ ID NO: 3429718 - RNA, 16 nt, Human
auguggagccaggcgu

SEQ ID NO: 3429719 - RNA, 17 nt, Human
auguggauuuuuuccua

SEQ ID NO: 3429720 - RNA, 18 nt, Human
auguggcaaggaaaaaca

SEQ ID NO: 3429721 - RNA, 23 nt, Human
auguggcaauaaauuuuuuuuaa

SEQ ID NO: 3429722 - RNA, 16 nt, Human
auguggcagcugucuc

SEQ ID NO: 3429723 - RNA, 14 nt, Human
auguggccccaccc

SEQ ID NO: 3429724 - RNA, 20 nt, Human
auguggccccugaacaagaa

SEQ ID NO: 3429725 - RNA, 13 nt, Human
auguggcccuggc

SEQ ID NO: 3429726 - RNA, 19 nt, Human
auguggcccuggccugcug

SEQ ID NO: 3429727 - RNA, 22 nt, Human
auguggcccuggcugccggcac

SEQ ID NO: 3429728 - RNA, 16 nt, Human
auguggccgaggacuu

SEQ ID NO: 3429729 - RNA, 17 nt, Human
auguggccgaggacuuu

SEQ ID NO: 3429730 - RNA, 18 nt, Human
auguggccgaggacuuug

SEQ ID NO: 3429731 - RNA, 19 nt, Human
auguggccuaaaaaugcaa

SEQ ID NO: 3429732 - RNA, 19 nt, Human
auguggccuguggccugug

SEQ ID NO: 3429733 - RNA, 20 nt, Human
auguggccuuugaauucugu

SEQ ID NO: 3429734 - RNA, 13 nt, Human
auguggcuggaag

SEQ ID NO: 3429735 - RNA, 20 nt, Human
augugggaagaaacaaaccc

SEQ ID NO: 3429736 - RNA, 13 nt, Human
augugggcacugg

SEQ ID NO: 3429737 - RNA, 20 nt, Human
augugggcuaguugggcuuc

SEQ ID NO: 3429738 - RNA, 13 nt, Human
auguggggccagg

SEQ ID NO: 3429739 - RNA, 16 nt, Human
auguggggccagguca

SEQ ID NO: 3429740 - RNA, 17 nt, Human
augugggggucugugug

SEQ ID NO: 3429741 - RNA, 14 nt, Human
augugggucuucca

SEQ ID NO: 3429742 - RNA, 15 nt, Human
augugggucuuccag

SEQ ID NO: 3429743 - RNA, 16 nt, Human
auuaaucaguucauua

SEQ ID NO: 3429744 - RNA, 16 nt, Human
auuaaucuuaguguau

SEQ ID NO: 3429745 - RNA, 20 nt, Human
auuaaugacacuugucccca

SEQ ID NO: 3429746 - RNA, 12 nt, Human
auuaaugcacuu

SEQ ID NO: 3429747 - RNA, 15 nt, Human
auuaaugccugcuuu

SEQ ID NO: 3429748 - RNA, 18 nt, Human
auuaaugccuuuaaagua

SEQ ID NO: 3429749 - RNA, 15 nt, Human
auuaaugcuaagggc

SEQ ID NO: 3429750 - RNA, 16 nt, Human
auuaauguacuuguuu

SEQ ID NO: 3429751 - RNA, 20 nt, Human
auuaaugucaguauuucaac

SEQ ID NO: 3429752 - RNA, 18 nt, Human
auuaauguuaauucagca

SEQ ID NO: 3429753 - RNA, 22 nt, Human
auuaauguuucuaucugauuuu

SEQ ID NO: 3429754 - RNA, 16 nt, Human
auuaauuaaacauugu

SEQ ID NO: 3429755 - RNA, 14 nt, Human
auuaauuaaaugca

SEQ ID NO: 3429756 - RNA, 15 nt, Human
auuaauuaauuugga

SEQ ID NO: 3429757 - RNA, 16 nt, Human
auuaauuaucgugucu

SEQ ID NO: 3429758 - RNA, 20 nt, Human
auuaauuccuguuugucuac

SEQ ID NO: 3429759 - RNA, 14 nt, Human
auuaauucuauaag

SEQ ID NO: 3429760 - RNA, 14 nt, Human
auuaauucucuuuc

SEQ ID NO: 3429761 - RNA, 14 nt, Human
auuaauugcugcaa

SEQ ID NO: 3429762 - RNA, 12 nt, Human
auuaauugcuuu

SEQ ID NO: 3429763 - RNA, 21 nt, Human
auuaauuggcagcagauuuua

SEQ ID NO: 3429764 - RNA, 12 nt, Human
auuaauugucuu

SEQ ID NO: 3429765 - RNA, 11 nt, Human
auuaauugugu

SEQ ID NO: 3429766 - RNA, 16 nt, Human
auuaauuuaugcagaa

SEQ ID NO: 3429767 - RNA, 21 nt, Human
auuaauuucugccauuucaug

SEQ ID NO: 3429768 - RNA, 22 nt, Human
auuaauuucugccauuucaugu

SEQ ID NO: 3429769 - RNA, 14 nt, Human
auuaauuucuucac

SEQ ID NO: 3429770 - RNA, 18 nt, Human
auuaauuugauuaacaaa

SEQ ID NO: 3429771 - RNA, 15 nt, Human
auuaauuugcaucug

SEQ ID NO: 3429772 - RNA, 21 nt, Human
auuaauuuggagcacaaaauu

SEQ ID NO: 3429773 - RNA, 13 nt, Human
auuaauuuuacuc

SEQ ID NO: 3429774 - RNA, 18 nt, Human
auuaauuuuuuuauuguu

SEQ ID NO: 3429775 - RNA, 19 nt, Human
auuaauuuuuuuauuguuu

SEQ ID NO: 3429776 - RNA, 13 nt, Human
auuacaaaaacaa

SEQ ID NO: 3429777 - RNA, 15 nt, Human
auuacaaaguuaaaa

SEQ ID NO: 3429778 - RNA, 24 nt, Human
auuacaaaguuaaaauuguuauca

SEQ ID NO: 3429779 - RNA, 16 nt, Human
auuacaaaucagaagu

SEQ ID NO: 3429780 - RNA, 18 nt, Human
auuacaaaucagaaguca

SEQ ID NO: 3429781 - RNA, 19 nt, Human
auuacaaaucagaagucau

SEQ ID NO: 3429782 - RNA, 17 nt, Human
auuacaacucuauuuaa

SEQ ID NO: 3429783 - RNA, 18 nt, Human
auuacaacugaccaaguu

SEQ ID NO: 3429784 - RNA, 19 nt, Human
auuacaaguauuuuuaauu

SEQ ID NO: 3429785 - RNA, 14 nt, Human
auuacaauauuugu

SEQ ID NO: 3429786 - RNA, 17 nt, Human
auuacaauggaaacaau

SEQ ID NO: 3429787 - RNA, 18 nt, Human
auuacaauuuuaucuguu

SEQ ID NO: 3429788 - RNA, 13 nt, Human
auuacacaaaaca

SEQ ID NO: 3429789 - RNA, 14 nt, Human
auuacacaaaacaa

SEQ ID NO: 3429790 - RNA, 15 nt, Human
auuacacauuuguac

SEQ ID NO: 3429791 - RNA, 21 nt, Human
auuacaccagccucgucuuca

SEQ ID NO: 3429792 - RNA, 13 nt, Human
auuacagaaauuu

SEQ ID NO: 3429793 - RNA, 18 nt, Human
auuacagagaggagaaac

SEQ ID NO: 3429794 - RNA, 19 nt, Human
auuacagagaggagaaaca

SEQ ID NO: 3429795 - RNA, 19 nt, Human
auuacagaugggcaaauua

SEQ ID NO: 3429796 - RNA, 17 nt, Human
auuacaggaaguacugg

SEQ ID NO: 3429797 - RNA, 22 nt, Human
auuacaggcaccugccaccaug

SEQ ID NO: 3429798 - RNA, 22 nt, Human
auuacaggugugaaccaccaca

SEQ ID NO: 3429799 - RNA, 15 nt, Human
auuacaguauaauua

SEQ ID NO: 3429800 - RNA, 16 nt, Human
auuacaguauaauuaa

SEQ ID NO: 3429801 - RNA, 15 nt, Human
auuacagugccuaaa

SEQ ID NO: 3429802 - RNA, 14 nt, Human
auuacauaaauaaa

SEQ ID NO: 3429803 - RNA, 15 nt, Human
auuacauaauuuagu

SEQ ID NO: 3429804 - RNA, 21 nt, Human
auuacauauuugcauauguau

SEQ ID NO: 3429805 - RNA, 17 nt, Human
auuacauccuuguggca

SEQ ID NO: 3429806 - RNA, 15 nt, Human
auuacaucuuucaca

SEQ ID NO: 3429807 - RNA, 22 nt, Human
auuacauuccuugauaauguug

SEQ ID NO: 3429808 - RNA, 18 nt, Human
auuacauuuccaaaugaa

SEQ ID NO: 3429809 - RNA, 15 nt, Human
auuacauuuguaauu

SEQ ID NO: 3429810 - RNA, 19 nt, Human
auuaccaauaggcaaauua

SEQ ID NO: 3429811 - RNA, 22 nt, Human
auuaccaauaggcaaauuaauc

SEQ ID NO: 3429812 - RNA, 14 nt, Human
auuaccacugaaga

SEQ ID NO: 3429813 - RNA, 18 nt, Human
auuaccagcaagaauaaa

SEQ ID NO: 3429814 - RNA, 21 nt, Human
auuaccaguggcguuguugca

SEQ ID NO: 3429815 - RNA, 13 nt, Human
auuaccauggaga

SEQ ID NO: 3429816 - RNA, 15 nt, Human
auuaccauggagaca

SEQ ID NO: 3429817 - RNA, 14 nt, Human
auuaccauuuguua

SEQ ID NO: 3429818 - RNA, 18 nt, Human
auuacccccuccuucaga

SEQ ID NO: 3429819 - RNA, 20 nt, Human
auuacccccuccuucagaca

SEQ ID NO: 3429820 - RNA, 21 nt, Human
auuacccccuccuucagacac

SEQ ID NO: 3429821 - RNA, 16 nt, Human
auuacccuucuuucca

SEQ ID NO: 3429822 - RNA, 16 nt, Human
auuaccgcguuguaaa

SEQ ID NO: 3429823 - RNA, 19 nt, Human
auuaccgcguuguaaaaua

SEQ ID NO: 3429824 - RNA, 13 nt, Human
auuaccucugaua

SEQ ID NO: 3429825 - RNA, 19 nt, Human
auuaccuggauguucuuuu

SEQ ID NO: 3429826 - RNA, 16 nt, Human
auuaccuguggauauu

SEQ ID NO: 3429827 - RNA, 19 nt, Human
auuaccuguggauauuugu

SEQ ID NO: 3429828 - RNA, 21 nt, Human
auuaccuuuuaccagcuuuua

SEQ ID NO: 3429829 - RNA, 17 nt, Human
auuacgaaguucaagau

SEQ ID NO: 3429830 - RNA, 15 nt, Human
auuacgauaaggaag

SEQ ID NO: 3429831 - RNA, 17 nt, Human
auuacgauaaggaagaa

SEQ ID NO: 3429832 - RNA, 19 nt, Human
auuacgauaaggaagaaac

SEQ ID NO: 3429833 - RNA, 18 nt, Human
auuacguacuaaggauac

SEQ ID NO: 3429834 - RNA, 13 nt, Human
auuacgugagcca

SEQ ID NO: 3429835 - RNA, 16 nt, Human
auuacgugagccaggu

SEQ ID NO: 3429836 - RNA, 14 nt, Human
auuacuaacuucua

SEQ ID NO: 3429837 - RNA, 16 nt, Human
auuacuaacuucuaaa

SEQ ID NO: 3429838 - RNA, 22 nt, Human
auuacuaacuucuaaaacugua

SEQ ID NO: 3429839 - RNA, 12 nt, Human
auuacuaauuuu

SEQ ID NO: 3429840 - RNA, 20 nt, Human
auuacuacaaaauuugaaau

SEQ ID NO: 3429841 - RNA, 21 nt, Human
auuacuagacugccacaagga

SEQ ID NO: 3429842 - RNA, 15 nt, Human
auuacucugaaauug

SEQ ID NO: 3429843 - RNA, 12 nt, Human
auuacucuugua

SEQ ID NO: 3429844 - RNA, 18 nt, Human
auuacucuuguaagauuu

SEQ ID NO: 3429845 - RNA, 19 nt, Human
auuacucuuguaagauuuu

SEQ ID NO: 3429846 - RNA, 22 nt, Human
auuacucuuguaagauuuugaa

SEQ ID NO: 3429847 - RNA, 13 nt, Human
auuacucuuucuc

SEQ ID NO: 3429848 - RNA, 15 nt, Human
auuacugacauuucu

SEQ ID NO: 3429849 - RNA, 13 nt, Human
auuacugccauuc

SEQ ID NO: 3429850 - RNA, 15 nt, Human
auuacugccuugaaa

SEQ ID NO: 3429851 - RNA, 16 nt, Human
auuacugcuaaguauu

SEQ ID NO: 3429852 - RNA, 21 nt, Human
auuacugcuaaguauuuccca

SEQ ID NO: 3429853 - RNA, 18 nt, Human
auuacugcuuuaaucaga

SEQ ID NO: 3429854 - RNA, 17 nt, Human
auuacuggaucucuuaa

SEQ ID NO: 3429855 - RNA, 19 nt, Human
auuacuggaucucuuaaga

SEQ ID NO: 3429856 - RNA, 22 nt, Human
auuacuggccuuuuucauuuau

SEQ ID NO: 3429857 - RNA, 17 nt, Human
auuacuggcguggauua

SEQ ID NO: 3429858 - RNA, 18 nt, Human
auuacuggcguggauuaa

SEQ ID NO: 3429859 - RNA, 23 nt, Human
auuacuggcguggauuaaacuua

SEQ ID NO: 3429860 - RNA, 12 nt, Human
auuacugggccu

SEQ ID NO: 3429861 - RNA, 14 nt, Human
auuacugggccuua

SEQ ID NO: 3429862 - RNA, 15 nt, Human
auuacuguaagaaaa

SEQ ID NO: 3429863 - RNA, 18 nt, Human
auuacugucugguuuuaa

SEQ ID NO: 3429864 - RNA, 19 nt, Human
auuacuguugauaauucuu

SEQ ID NO: 3429865 - RNA, 20 nt, Human
auuacuguugauaauucuua

SEQ ID NO: 3429866 - RNA, 17 nt, Human
auuacuguuuauuacuu

SEQ ID NO: 3429867 - RNA, 18 nt, Human
auuacuguuuauuucugu

SEQ ID NO: 3429868 - RNA, 24 nt, Human
auuacuuacguauguuuguacuug

SEQ ID NO: 3429869 - RNA, 23 nt, Human
auuacuuaucauccacauuguuu

SEQ ID NO: 3429870 - RNA, 15 nt, Human
auuacuuaucccugc

SEQ ID NO: 3429871 - RNA, 19 nt, Human
auuacuuauuuuugacagu

SEQ ID NO: 3429872 - RNA, 17 nt, Human
auuacuuccaugaauuu

SEQ ID NO: 3429873 - RNA, 14 nt, Human
auuacuucugcuac

SEQ ID NO: 3429874 - RNA, 19 nt, Human
auuacuugauuaagauuuu

SEQ ID NO: 3429875 - RNA, 15 nt, Human
auuacuuguaaauau

SEQ ID NO: 3429876 - RNA, 15 nt, Human
auuacuuguugccua

SEQ ID NO: 3429877 - RNA, 18 nt, Human
auuacuuguugccuauaa

SEQ ID NO: 3429878 - RNA, 15 nt, Human
auuacuuuaacaugc

SEQ ID NO: 3429879 - RNA, 23 nt, Human
auuacuuuaccacccccacaccu

SEQ ID NO: 3429880 - RNA, 23 nt, Human
auuacuuuaucacuuuuugaacu

SEQ ID NO: 3429881 - RNA, 23 nt, Human
auuacuuuggggcuaauuuaaca

SEQ ID NO: 3429882 - RNA, 14 nt, Human
auuacuuugugaau

SEQ ID NO: 3429883 - RNA, 14 nt, Human
auuacuuuugcugu

SEQ ID NO: 3429884 - RNA, 21 nt, Human
auuagaaaaauagcaacuugu

SEQ ID NO: 3429885 - RNA, 21 nt, Human
auuagaaaauauucucuauuu

SEQ ID NO: 3429886 - RNA, 19 nt, Human
auuagaaaauguuauuuaa

SEQ ID NO: 3429887 - RNA, 15 nt, Human
auuagaaauaaagca

SEQ ID NO: 3429888 - RNA, 12 nt, Human
aaaacuucuuuu

SEQ ID NO: 3429889 - RNA, 15 nt, Human
aaaacuugugcuaua

SEQ ID NO: 3429890 - RNA, 15 nt, Human
aaaacuuuaaaccug

SEQ ID NO: 3429891 - RNA, 23 nt, Human
aaaacuuuauuuuauauaauaaa

SEQ ID NO: 3429892 - RNA, 20 nt, Human
aaaacuuuccucgccugaca

SEQ ID NO: 3429893 - RNA, 24 nt, Human
aaaacuuugacgagucaccuucca

SEQ ID NO: 3429894 - RNA, 13 nt, Human
aaaacuuuuauaa

SEQ ID NO: 3429895 - RNA, 22 nt, Human
aaaacuuuuauaaauuaaauau

SEQ ID NO: 3429896 - RNA, 15 nt, Human
aaaacuuuucucaga

SEQ ID NO: 3429897 - RNA, 17 nt, Human
aaaagaaaaaaaaaaga

SEQ ID NO: 3429898 - RNA, 17 nt, Human
aaaagaaaaaaaaagaa

SEQ ID NO: 3429899 - RNA, 21 nt, Human
aaaagaaaaaccacucccagu

SEQ ID NO: 3429900 - RNA, 11 nt, Human
aaaagaaaaag

SEQ ID NO: 3429901 - RNA, 12 nt, Human
aaaagaaaauaa

SEQ ID NO: 3429902 - RNA, 14 nt, Human
aaaagaaaauaaaa

SEQ ID NO: 3429903 - RNA, 16 nt, Human
auguuuauuacaguau

SEQ ID NO: 3429904 - RNA, 18 nt, Human
auguuuauuacaguauaa

SEQ ID NO: 3429905 - RNA, 19 nt, Human
auguuuauuacaguauaau

SEQ ID NO: 3429906 - RNA, 14 nt, Human
auguuuauuccuug

SEQ ID NO: 3429907 - RNA, 17 nt, Human
auguuuauucuucuaga

SEQ ID NO: 3429908 - RNA, 17 nt, Human
auguuuauuuacuaauu

SEQ ID NO: 3429909 - RNA, 21 nt, Human
auguuuauuuauucugcauuu

SEQ ID NO: 3429910 - RNA, 23 nt, Human
auguuuauuucauaaagaauugu

SEQ ID NO: 3429911 - RNA, 21 nt, Human
auguuucaaacauauauaaca

SEQ ID NO: 3429912 - RNA, 21 nt, Human
auguuucaagaggagccccca

SEQ ID NO: 3429913 - RNA, 21 nt, Human
auguuucacaccggaagguuu

SEQ ID NO: 3429914 - RNA, 15 nt, Human
auguuuccagacuuc

SEQ ID NO: 3429915 - RNA, 19 nt, Human
auguuuccagcagaagaca

SEQ ID NO: 3429916 - RNA, 18 nt, Human
auguuuccagcauuccca

SEQ ID NO: 3429917 - RNA, 19 nt, Human
auguuuccagcauucccag

SEQ ID NO: 3429918 - RNA, 15 nt, Human
auguuuccauaguuu

SEQ ID NO: 3429919 - RNA, 14 nt, Human
auguuuccuucccu

SEQ ID NO: 3429920 - RNA, 12 nt, Human
auguuucucugg

SEQ ID NO: 3429921 - RNA, 19 nt, Human
auguuucucuggccccaag

SEQ ID NO: 3429922 - RNA, 23 nt, Human
auguuucucuuugauuauuugca

SEQ ID NO: 3429923 - RNA, 21 nt, Human
auguuucuggguccugaagaa

SEQ ID NO: 3429924 - RNA, 15 nt, Human
auguuucuucuaggu

SEQ ID NO: 3429925 - RNA, 13 nt, Human
auguuucuuugau

SEQ ID NO: 3429926 - RNA, 21 nt, Human
auguuucuuuuguauguaaau

SEQ ID NO: 3429927 - RNA, 22 nt, Human
auguuugaaaugaggucuguuu

SEQ ID NO: 3429928 - RNA, 18 nt, Human
auguuugaauuuuucucu

SEQ ID NO: 3429929 - RNA, 18 nt, Human
auguuugaggagcauguu

SEQ ID NO: 3429930 - RNA, 19 nt, Human
auguuugaggagcauguuu

SEQ ID NO: 3429931 - RNA, 17 nt, Human
auguuugcaccuuucua

SEQ ID NO: 3429932 - RNA, 13 nt, Human
auguuugcauaua

SEQ ID NO: 3429933 - RNA, 14 nt, Human
auguuugcauauaa

SEQ ID NO: 3429934 - RNA, 15 nt, Human
auguuugcauauaag

SEQ ID NO: 3429935 - RNA, 15 nt, Human
auguuugccuucugc

SEQ ID NO: 3429936 - RNA, 19 nt, Human
auguuugcucagaacacau

SEQ ID NO: 3429937 - RNA, 22 nt, Human
auguuugcucagcuucuccaac

SEQ ID NO: 3429938 - RNA, 18 nt, Human
auguuugcuucauaaaug

SEQ ID NO: 3429939 - RNA, 20 nt, Human
auguuugcuucauaaaugaa

SEQ ID NO: 3429940 - RNA, 17 nt, Human
auguuuggcauguaaau

SEQ ID NO: 3429941 - RNA, 13 nt, Human
auguuuggcucug

SEQ ID NO: 3429942 - RNA, 19 nt, Human
auguuuggcucugcuuuua

SEQ ID NO: 3429943 - RNA, 10 nt, Human
auguuugugg

SEQ ID NO: 3429944 - RNA, 18 nt, Human
auguuuguggccucagaa

SEQ ID NO: 3429945 - RNA, 14 nt, Human
auguuuguuaaaaa

SEQ ID NO: 3429946 - RNA, 17 nt, Human
auguuuguuaaaaauaa

SEQ ID NO: 3429947 - RNA, 19 nt, Human
auguuuuaauuccaugaau

SEQ ID NO: 3429948 - RNA, 19 nt, Human
auguuuuagaguuaacaau

SEQ ID NO: 3429949 - RNA, 12 nt, Human
auguuuuagcau

SEQ ID NO: 3429950 - RNA, 17 nt, Human
auguuuuauauagcaag

SEQ ID NO: 3429951 - RNA, 23 nt, Human
auguuuuauuucauugguuaauu

SEQ ID NO: 3429952 - RNA, 16 nt, Human
auguuuucaaaaggua

SEQ ID NO: 3429953 - RNA, 22 nt, Human
auguuuucaaaagguauuauac

SEQ ID NO: 3429954 - RNA, 13 nt, Human
auguuuucaaaug

SEQ ID NO: 3429955 - RNA, 15 nt, Human
auguuuucaaaugga

SEQ ID NO: 3429956 - RNA, 15 nt, Human
auguuuucaaauguu

SEQ ID NO: 3429957 - RNA, 19 nt, Human
auguuuuccagcuccucau

SEQ ID NO: 3429958 - RNA, 20 nt, Human
auguuuuccauuguuugaaa

SEQ ID NO: 3429959 - RNA, 21 nt, Human
auguuuucugaaaauauaacc

SEQ ID NO: 3429960 - RNA, 12 nt, Human
auguuuugacau

SEQ ID NO: 3429961 - RNA, 14 nt, Human
auguuuugacauuu

SEQ ID NO: 3429962 - RNA, 18 nt, Human
auguuuugauaaaguagu

SEQ ID NO: 3429963 - RNA, 17 nt, Human
auguuuugguccacuuu

SEQ ID NO: 3429964 - RNA, 21 nt, Human
auguuuuguaaacuuugaaau

SEQ ID NO: 3429965 - RNA, 16 nt, Human
auguuuuguauacaaa

SEQ ID NO: 3429966 - RNA, 17 nt, Human
auguuuugugacuauau

SEQ ID NO: 3429967 - RNA, 21 nt, Human
auguuuugugacuauauagag

SEQ ID NO: 3429968 - RNA, 15 nt, Human
auguuuugugcauuu

SEQ ID NO: 3429969 - RNA, 23 nt, Human
auguuuugugcauuuguaaaugc

SEQ ID NO: 3429970 - RNA, 16 nt, Human
auguuuuguuucugaa

SEQ ID NO: 3429971 - RNA, 19 nt, Human
auguuuuguuucugaaaau

SEQ ID NO: 3429972 - RNA, 16 nt, Human
auguuuuuaaaaguuu

SEQ ID NO: 3429973 - RNA, 22 nt, Human
auguuuuuaaaaguuucaaugu

SEQ ID NO: 3429974 - RNA, 14 nt, Human
auguuuuuaaaauc

SEQ ID NO: 3429975 - RNA, 17 nt, Human
auguuuuuaaaaucuua

SEQ ID NO: 3429976 - RNA, 20 nt, Human
auguuuuuauaaaaauaaau

SEQ ID NO: 3429977 - RNA, 21 nt, Human
auguuuuuauaaaaauaaaua

SEQ ID NO: 3429978 - RNA, 20 nt, Human
auguuuuuaugauaucccug

SEQ ID NO: 3429979 - RNA, 13 nt, Human
auguuuuucaguu

SEQ ID NO: 3429980 - RNA, 19 nt, Human
auguuuuucaguucaaagu

SEQ ID NO: 3429981 - RNA, 17 nt, Human
auguuuuucuucucccu

SEQ ID NO: 3429982 - RNA, 18 nt, Human
auguuuuucuucucccuc

SEQ ID NO: 3429983 - RNA, 21 nt, Human
auguuuuugaaggcagaaagc

SEQ ID NO: 3429984 - RNA, 14 nt, Human
auuaaaaaaaaaga

SEQ ID NO: 3429985 - RNA, 14 nt, Human
auuaaaaaaaacaa

SEQ ID NO: 3429986 - RNA, 23 nt, Human
auuaaaaaaaacaaaaagaacaa

SEQ ID NO: 3429987 - RNA, 22 nt, Human
auuaaaaaacuucauguaauuu

SEQ ID NO: 3429988 - RNA, 17 nt, Human
auuaaaaaagauaaaca

SEQ ID NO: 3429989 - RNA, 17 nt, Human
auuaaaaaauuuccagu

SEQ ID NO: 3429990 - RNA, 16 nt, Human
auuaaaaacuaguagu

SEQ ID NO: 3429991 - RNA, 19 nt, Human
auuaaaaagauucuuuuuc

SEQ ID NO: 3429992 - RNA, 18 nt, Human
auuaaaaagguuuacaga

SEQ ID NO: 3429993 - RNA, 18 nt, Human
auuaaaaagucuuuuaaa

SEQ ID NO: 3429994 - RNA, 15 nt, Human
auuaaaaaguuaauc

SEQ ID NO: 3429995 - RNA, 12 nt, Human
auuaaaaauaua

SEQ ID NO: 3429996 - RNA, 17 nt, Human
auuaaaaauauaaaacu

SEQ ID NO: 3429997 - RNA, 17 nt, Human
auuaaaaauaucaaauu

SEQ ID NO: 3429998 - RNA, 14 nt, Human
auuaaaaauaugga

SEQ ID NO: 3429999 - RNA, 21 nt, Human
auuaaaaauauggaacuucua

SEQ ID NO: 3430000 - RNA, 21 nt, Human
auuaaaaaugguaaaauugca

SEQ ID NO: 3430001 - RNA, 14 nt, Human
auuaaaacaauauu

SEQ ID NO: 3430002 - RNA, 18 nt, Human
auuaaaacaauauuguuu

SEQ ID NO: 3430003 - RNA, 22 nt, Human
auuaaaacagcugcauuagaaa

SEQ ID NO: 3430004 - RNA, 20 nt, Human
auuaaaacauuggauuaucc

SEQ ID NO: 3430005 - RNA, 13 nt, Human
auuaaaacucagc

SEQ ID NO: 3430006 - RNA, 15 nt, Human
auuaaaacucagccu

SEQ ID NO: 3430007 - RNA, 22 nt, Human
auuaaaacugaagucugaaauu

SEQ ID NO: 3430008 - RNA, 13 nt, Human
auuaaaacugcuu

SEQ ID NO: 3430009 - RNA, 15 nt, Human
auuaaaagaauauuu

SEQ ID NO: 3430010 - RNA, 11 nt, Human
auuaaaagacu

SEQ ID NO: 3430011 - RNA, 15 nt, Human
auuaaaagacucauc

SEQ ID NO: 3430012 - RNA, 15 nt, Human
auuaaaagcaaauca

SEQ ID NO: 3430013 - RNA, 16 nt, Human
auuaaaagcaaaucau

SEQ ID NO: 3430014 - RNA, 12 nt, Human
auuaaaagucac

SEQ ID NO: 3430015 - RNA, 13 nt, Human
auuaaaagucaca

SEQ ID NO: 3430016 - RNA, 22 nt, Human
auuaaaagucacaauguucuuu

SEQ ID NO: 3430017 - RNA, 15 nt, Human
auuaaaaguuugaaa

SEQ ID NO: 3430018 - RNA, 13 nt, Human
auuaaaauauaau

SEQ ID NO: 3430019 - RNA, 13 nt, Human
auuaaaauaugca

SEQ ID NO: 3430020 - RNA, 16 nt, Human
auuaaaauccucaauc

SEQ ID NO: 3430021 - RNA, 15 nt, Human
auuaaaaucuuaaac

SEQ ID NO: 3430022 - RNA, 18 nt, Human
auuaaaaugaugaaggaa

SEQ ID NO: 3430023 - RNA, 19 nt, Human
auuaaaaugauuguaaaau

SEQ ID NO: 3430024 - RNA, 20 nt, Human
auuaaaaugauuguaaaaua

SEQ ID NO: 3430025 - RNA, 12 nt, Human
auuaaaauggau

SEQ ID NO: 3430026 - RNA, 15 nt, Human
auuaaaauguaugca

SEQ ID NO: 3430027 - RNA, 14 nt, Human
auuaaaauucugaa

SEQ ID NO: 3430028 - RNA, 13 nt, Human
auuaaacaaaguu

SEQ ID NO: 3430029 - RNA, 15 nt, Human
auuaaacaauuuauu

SEQ ID NO: 3430030 - RNA, 20 nt, Human
auuaaacaauuuauuuuauu

SEQ ID NO: 3430031 - RNA, 19 nt, Human
auuaaacagaugaugagaa

SEQ ID NO: 3430032 - RNA, 19 nt, Human
auuaaacagaugugaauau

SEQ ID NO: 3430033 - RNA, 19 nt, Human
auuccauugccuagcucuu

SEQ ID NO: 3430034 - RNA, 17 nt, Human
auuccauuuaucuuucu

SEQ ID NO: 3430035 - RNA, 17 nt, Human
auucccaacuagacauu

SEQ ID NO: 3430036 - RNA, 21 nt, Human
auucccaacuagacauuacca

SEQ ID NO: 3430037 - RNA, 15 nt, Human
auucccaagaaaugc

SEQ ID NO: 3430038 - RNA, 22 nt, Human
auucccaagcucuagugggaag

SEQ ID NO: 3430039 - RNA, 16 nt, Human
auucccaagcucugcu

SEQ ID NO: 3430040 - RNA, 17 nt, Human
auucccaagcucugcuc

SEQ ID NO: 3430041 - RNA, 18 nt, Human
auucccaagcucugcucc

SEQ ID NO: 3430042 - RNA, 19 nt, Human
auucccaagcucugcuccu

SEQ ID NO: 3430043 - RNA, 15 nt, Human
auucccaccaagguc

SEQ ID NO: 3430044 - RNA, 23 nt, Human
auucccagagacaggaaaauccu

SEQ ID NO: 3430045 - RNA, 17 nt, Human
auucccagagcaaaaua

SEQ ID NO: 3430046 - RNA, 12 nt, Human
auucccagccca

SEQ ID NO: 3430047 - RNA, 11 nt, Human
auucccaggag

SEQ ID NO: 3430048 - RNA, 12 nt, Human
auucccaggagu

SEQ ID NO: 3430049 - RNA, 23 nt, Human
auucccagguaggccaagguguc

SEQ ID NO: 3430050 - RNA, 15 nt, Human
auucccaucugucac

SEQ ID NO: 3430051 - RNA, 15 nt, Human
auucccaucuuuacu

SEQ ID NO: 3430052 - RNA, 23 nt, Human
auucccauuuugcaaaauuucca

SEQ ID NO: 3430053 - RNA, 16 nt, Human
auuccccacccucccc

SEQ ID NO: 3430054 - RNA, 19 nt, Human
auuccccaggaggccagcc

SEQ ID NO: 3430055 - RNA, 22 nt, Human
auuccccaggaggccagccuug

SEQ ID NO: 3430056 - RNA, 23 nt, Human
auucccccuggccaccacccccc

SEQ ID NO: 3430057 - RNA, 21 nt, Human
auuccccuaucucuagaauuu

SEQ ID NO: 3430058 - RNA, 14 nt, Human
auuccccuuccugu

SEQ ID NO: 3430059 - RNA, 21 nt, Human
auucccuaucuuuuaguuuua

SEQ ID NO: 3430060 - RNA, 22 nt, Human
auucccuaucuuuuaguuuuag

SEQ ID NO: 3430061 - RNA, 14 nt, Human
auucccuccugcua

SEQ ID NO: 3430062 - RNA, 16 nt, Human
auucccucucaucuca

SEQ ID NO: 3430063 - RNA, 14 nt, Human
auucccucucccag

SEQ ID NO: 3430064 - RNA, 14 nt, Human
auucccucucucug

SEQ ID NO: 3430065 - RNA, 15 nt, Human
auucccucucucuga

SEQ ID NO: 3430066 - RNA, 19 nt, Human
auucccugagucaccagga

SEQ ID NO: 3430067 - RNA, 19 nt, Human
auucccuggccuuucauau

SEQ ID NO: 3430068 - RNA, 14 nt, Human
auucccugggaucu

SEQ ID NO: 3430069 - RNA, 19 nt, Human
auucccuguacaauauuua

SEQ ID NO: 3430070 - RNA, 21 nt, Human
auucccuguacaauauuuaaa

SEQ ID NO: 3430071 - RNA, 18 nt, Human
auucccuucaaugcaaaa

SEQ ID NO: 3430072 - RNA, 19 nt, Human
auucccuucaucuggaacc

SEQ ID NO: 3430073 - RNA, 15 nt, Human
auucccuuccugcca

SEQ ID NO: 3430074 - RNA, 19 nt, Human
auucccuuccugccagccc

SEQ ID NO: 3430075 - RNA, 23 nt, Human
auucccuuuucaccuuuucagga

SEQ ID NO: 3430076 - RNA, 22 nt, Human
auuccggaaacuaguguacauu

SEQ ID NO: 3430077 - RNA, 15 nt, Human
auuccggauccuaag

SEQ ID NO: 3430078 - RNA, 16 nt, Human
auuccguagccagcug

SEQ ID NO: 3430079 - RNA, 12 nt, Human
auuccgucacca

SEQ ID NO: 3430080 - RNA, 20 nt, Human
auuccguuuacauuuuagac

SEQ ID NO: 3430081 - RNA, 19 nt, Human
auuccuaaaauuauggaaa

SEQ ID NO: 3430082 - RNA, 17 nt, Human
auuccuaaagaaaaaua

SEQ ID NO: 3430083 - RNA, 21 nt, Human
auuccuaacuaucacugguuu

SEQ ID NO: 3430084 - RNA, 14 nt, Human
auuccuaagaauca

SEQ ID NO: 3430085 - RNA, 22 nt, Human
auuccuacaauauauauucugg

SEQ ID NO: 3430086 - RNA, 24 nt, Human
auuccuagaaacugacacaugcug

SEQ ID NO: 3430087 - RNA, 19 nt, Human
auuccuauauccugugacu

SEQ ID NO: 3430088 - RNA, 18 nt, Human
auuccuauugugauuuga

SEQ ID NO: 3430089 - RNA, 20 nt, Human
auuccuauugugauuugacu

SEQ ID NO: 3430090 - RNA, 22 nt, Human
auuccuauugugcaauguaaau

SEQ ID NO: 3430091 - RNA, 17 nt, Human
auuccucaugaauguaa

SEQ ID NO: 3430092 - RNA, 22 nt, Human
auuccucaugaauguaaauuug

SEQ ID NO: 3430093 - RNA, 11 nt, Human
auuccuccagg

SEQ ID NO: 3430094 - RNA, 20 nt, Human
auuccucuacuaacaaucag

SEQ ID NO: 3430095 - RNA, 17 nt, Human
auuccucuuugcuuugc

SEQ ID NO: 3430096 - RNA, 15 nt, Human
auuccucuuuucucu

SEQ ID NO: 3430097 - RNA, 15 nt, Human
auuccugaagaacca

SEQ ID NO: 3430098 - RNA, 17 nt, Human
auuccugaaugaaauau

SEQ ID NO: 3430099 - RNA, 22 nt, Human
auuccugaccuccgccauccac

SEQ ID NO: 3430100 - RNA, 22 nt, Human
auuccugacgagauaagcaguu

SEQ ID NO: 3430101 - RNA, 20 nt, Human
auuccugagauuuccuccug

SEQ ID NO: 3430102 - RNA, 22 nt, Human
auuccugagauuuccuccuggc

SEQ ID NO: 3430103 - RNA, 19 nt, Human
auuccugauaugauuuaaa

SEQ ID NO: 3430104 - RNA, 20 nt, Human
auuccugauaugauuuaaaa

SEQ ID NO: 3430105 - RNA, 17 nt, Human
auuccugcagccuggag

SEQ ID NO: 3430106 - RNA, 15 nt, Human
auuccugcauuugug

SEQ ID NO: 3430107 - RNA, 15 nt, Human
auuccugccugucuc

SEQ ID NO: 3430108 - RNA, 17 nt, Human
auuccugggaaauauuc

SEQ ID NO: 3430109 - RNA, 22 nt, Human
auuccugggaaauauucccuag

SEQ ID NO: 3430110 - RNA, 10 nt, Human
auuccugggc

SEQ ID NO: 3430111 - RNA, 18 nt, Human
auuccuguagcaucuucu

SEQ ID NO: 3430112 - RNA, 18 nt, Human
auuccuguauguugucca

SEQ ID NO: 3430113 - RNA, 19 nt, Human
aguuucuaaacuggagacu

SEQ ID NO: 3430114 - RNA, 16 nt, Human
aguuucuagcuagaaa

SEQ ID NO: 3430115 - RNA, 22 nt, Human
aguuucucagauccuuguuuca

SEQ ID NO: 3430116 - RNA, 16 nt, Human
aguuucucagcuccca

SEQ ID NO: 3430117 - RNA, 21 nt, Human
aguuucuccaagcaggacaug

SEQ ID NO: 3430118 - RNA, 17 nt, Human
aguuucugaguuuuacc

SEQ ID NO: 3430119 - RNA, 18 nt, Human
aguuucugaguuuuacca

SEQ ID NO: 3430120 - RNA, 19 nt, Human
aguuucugccgcagcccug

SEQ ID NO: 3430121 - RNA, 20 nt, Human
aguuucugucguuaaaaaca

SEQ ID NO: 3430122 - RNA, 23 nt, Human
aguuucugugguuggcugggaaa

SEQ ID NO: 3430123 - RNA, 17 nt, Human
aguuucuguucugugga

SEQ ID NO: 3430124 - RNA, 21 nt, Human
aguuucuguucuguggaaagu

SEQ ID NO: 3430125 - RNA, 18 nt, Human
aguuucuguuugauucuu

SEQ ID NO: 3430126 - RNA, 17 nt, Human
aguuucuuagcuuuuua

SEQ ID NO: 3430127 - RNA, 16 nt, Human
aguuucuucaaucuga

SEQ ID NO: 3430128 - RNA, 21 nt, Human
aguuucuucugcgccucaggc

SEQ ID NO: 3430129 - RNA, 20 nt, Human
aguuucuuuauuuuguguaa

SEQ ID NO: 3430130 - RNA, 22 nt, Human
aguuucuuuauuuuguguaaaa

SEQ ID NO: 3430131 - RNA, 18 nt, Human
aguuucuuuccugccuuc

SEQ ID NO: 3430132 - RNA, 19 nt, Human
aguuucuuuccugccuucu

SEQ ID NO: 3430133 - RNA, 14 nt, Human
aguuugaaauucug

SEQ ID NO: 3430134 - RNA, 15 nt, Human
aguuugaaauucuga

SEQ ID NO: 3430135 - RNA, 23 nt, Human
aguuugaaauucugaauuugcaa

SEQ ID NO: 3430136 - RNA, 15 nt, Human
aguuugaagaccgcc

SEQ ID NO: 3430137 - RNA, 16 nt, Human
aguuugaaggaaacag

SEQ ID NO: 3430138 - RNA, 21 nt, Human
aguuugaaggaggugagggau

SEQ ID NO: 3430139 - RNA, 14 nt, Human
aguuugaggaaauu

SEQ ID NO: 3430140 - RNA, 20 nt, Human
aguuugaggaaauuugcagc

SEQ ID NO: 3430141 - RNA, 14 nt, Human
aguuugaggcugca

SEQ ID NO: 3430142 - RNA, 16 nt, Human
aguuugauaaauagug

SEQ ID NO: 3430143 - RNA, 17 nt, Human
aguuugauauuaaagga

SEQ ID NO: 3430144 - RNA, 22 nt, Human
aguuugaucuuccucugcuaaa

SEQ ID NO: 3430145 - RNA, 17 nt, Human
aguuugaugaggcccuc

SEQ ID NO: 3430146 - RNA, 16 nt, Human
aguuugauuaaauucu

SEQ ID NO: 3430147 - RNA, 22 nt, Human
aguuugcacucaaaucuuaaga

SEQ ID NO: 3430148 - RNA, 14 nt, Human
aguuugcagaaaag

SEQ ID NO: 3430149 - RNA, 23 nt, Human
aguuugcagaaaagcaccugccg

SEQ ID NO: 3430150 - RNA, 20 nt, Human
aguuugcauuccugauauga

SEQ ID NO: 3430151 - RNA, 15 nt, Human
aguuugcauuucaga

SEQ ID NO: 3430152 - RNA, 17 nt, Human
aguuugcauuucagaaa

SEQ ID NO: 3430153 - RNA, 11 nt, Human
aguuugcugua

SEQ ID NO: 3430154 - RNA, 11 nt, Human
aguuugcuuag

SEQ ID NO: 3430155 - RNA, 12 nt, Human
aguuuggccaga

SEQ ID NO: 3430156 - RNA, 22 nt, Human
aguuuggccgggugcgguggcu

SEQ ID NO: 3430157 - RNA, 21 nt, Human
aguuugggaucccugucuuuc

SEQ ID NO: 3430158 - RNA, 20 nt, Human
aguuuggggguuuugcuguu

SEQ ID NO: 3430159 - RNA, 18 nt, Human
aguuuggguaaaauacuu

SEQ ID NO: 3430160 - RNA, 14 nt, Human
aguuuggucuggac

SEQ ID NO: 3430161 - RNA, 15 nt, Human
aguuuggucuggacu

SEQ ID NO: 3430162 - RNA, 20 nt, Human
aguuugguucacuuacagau

SEQ ID NO: 3430163 - RNA, 16 nt, Human
aguuugguuucuagca

SEQ ID NO: 3430164 - RNA, 15 nt, Human
aguuuguacaugcau

SEQ ID NO: 3430165 - RNA, 17 nt, Human
aguuuguagguaaaaug

SEQ ID NO: 3430166 - RNA, 13 nt, Human
aguuuguauauac

SEQ ID NO: 3430167 - RNA, 22 nt, Human
aguuuguaugccaagugagaag

SEQ ID NO: 3430168 - RNA, 18 nt, Human
aguuugucacaugaaaca

SEQ ID NO: 3430169 - RNA, 15 nt, Human
aguuuguccauuugu

SEQ ID NO: 3430170 - RNA, 17 nt, Human
aguuugucgcucaugug

SEQ ID NO: 3430171 - RNA, 19 nt, Human
aguuugucgcucaugugug

SEQ ID NO: 3430172 - RNA, 19 nt, Human
aguuugucuauuuuaaaau

SEQ ID NO: 3430173 - RNA, 19 nt, Human
aguuugugcugguguaugu

SEQ ID NO: 3430174 - RNA, 16 nt, Human
aguuugugugucuuaa

SEQ ID NO: 3430175 - RNA, 16 nt, Human
aguuuguguguugucu

SEQ ID NO: 3430176 - RNA, 22 nt, Human
auugggaguccaggcacaggau

SEQ ID NO: 3430177 - RNA, 16 nt, Human
auugggauuuucuaca

SEQ ID NO: 3430178 - RNA, 17 nt, Human
auugggcaagugauuga

SEQ ID NO: 3430179 - RNA, 20 nt, Human
auugggcagcgcccuuccuc

SEQ ID NO: 3430180 - RNA, 20 nt, Human
auuggggauucuuaaaguug

SEQ ID NO: 3430181 - RNA, 22 nt, Human
auuggggauucuuaaaguugaa

SEQ ID NO: 3430182 - RNA, 14 nt, Human
auuggggcucccag

SEQ ID NO: 3430183 - RNA, 20 nt, Human
auuggggcucccagccaggc

SEQ ID NO: 3430184 - RNA, 23 nt, Human
auuggggcucccagccaggcccu

SEQ ID NO: 3430185 - RNA, 17 nt, Human
auugggggaggaaaagu

SEQ ID NO: 3430186 - RNA, 19 nt, Human
auugggggggccaaaagga

SEQ ID NO: 3430187 - RNA, 17 nt, Human
auuggguuaugaauauu

SEQ ID NO: 3430188 - RNA, 22 nt, Human
auuggguucaugaugcagucuc

SEQ ID NO: 3430189 - RNA, 18 nt, Human
auugguaccuugcacaca

SEQ ID NO: 3430190 - RNA, 17 nt, Human
auugguaucaagaaagu

SEQ ID NO: 3430191 - RNA, 18 nt, Human
auugguauucacuaaucu

SEQ ID NO: 3430192 - RNA, 14 nt, Human
auugguccagcuug

SEQ ID NO: 3430193 - RNA, 15 nt, Human
auugguccagcuugc

SEQ ID NO: 3430194 - RNA, 17 nt, Human
auugguccagcuugcuc

SEQ ID NO: 3430195 - RNA, 21 nt, Human
auugguggcagauuuuacaaa

SEQ ID NO: 3430196 - RNA, 16 nt, Human
auugguggcuuuccuu

SEQ ID NO: 3430197 - RNA, 17 nt, Human
auuggugguucucagca

SEQ ID NO: 3430198 - RNA, 12 nt, Human
auugguguugac

SEQ ID NO: 3430199 - RNA, 18 nt, Human
auugguguugucauugua

SEQ ID NO: 3430200 - RNA, 16 nt, Human
auugguucccuuugcu

SEQ ID NO: 3430201 - RNA, 15 nt, Human
auugguuuaaagaaa

SEQ ID NO: 3430202 - RNA, 18 nt, Human
auugguuuaaagaaagug

SEQ ID NO: 3430203 - RNA, 14 nt, Human
auugguuucucuuc

SEQ ID NO: 3430204 - RNA, 17 nt, Human
auugguuucucuucucc

SEQ ID NO: 3430205 - RNA, 21 nt, Human
auugguuuuaauugaaggaaa

SEQ ID NO: 3430206 - RNA, 15 nt, Human
auugguuuuaugaug

SEQ ID NO: 3430207 - RNA, 15 nt, Human
auugguuuuccugug

SEQ ID NO: 3430208 - RNA, 14 nt, Human
auuguaaaacaggu

SEQ ID NO: 3430209 - RNA, 23 nt, Human
auuguaaaagcauuuuguaauaa

SEQ ID NO: 3430210 - RNA, 15 nt, Human
auuguaaaauuguau

SEQ ID NO: 3430211 - RNA, 17 nt, Human
auuguaaaauuguauag

SEQ ID NO: 3430212 - RNA, 17 nt, Human
auuguaaacaaacucuu

SEQ ID NO: 3430213 - RNA, 19 nt, Human
auuguaaaccgcuuuggcc

SEQ ID NO: 3430214 - RNA, 12 nt, Human
auuguaaaguaa

SEQ ID NO: 3430215 - RNA, 16 nt, Human
auuguaaauacaaguu

SEQ ID NO: 3430216 - RNA, 23 nt, Human
auuguaaauacaaguucuauuua

SEQ ID NO: 3430217 - RNA, 16 nt, Human
auuguaaauauguuuu

SEQ ID NO: 3430218 - RNA, 15 nt, Human
auuguaaauuuuaga

SEQ ID NO: 3430219 - RNA, 18 nt, Human
auuguaacagacauuguu

SEQ ID NO: 3430220 - RNA, 16 nt, Human
auuguaacguugcugu

SEQ ID NO: 3430221 - RNA, 18 nt, Human
auuguaacguugcugugg

SEQ ID NO: 3430222 - RNA, 15 nt, Human
auuguaacuguucuu

SEQ ID NO: 3430223 - RNA, 21 nt, Human
auuguaagaaauacuguacaa

SEQ ID NO: 3430224 - RNA, 19 nt, Human
auuguaagcguauggcuuu

SEQ ID NO: 3430225 - RNA, 23 nt, Human
auuguaauaggcguaacuaauuu

SEQ ID NO: 3430226 - RNA, 13 nt, Human
auuguaaucacug

SEQ ID NO: 3430227 - RNA, 16 nt, Human
auuguaaucugaauaa

SEQ ID NO: 3430228 - RNA, 15 nt, Human
auuguaauguuacug

SEQ ID NO: 3430229 - RNA, 17 nt, Human
auuguaauguuacugau

SEQ ID NO: 3430230 - RNA, 16 nt, Human
auuguaauuauaucug

SEQ ID NO: 3430231 - RNA, 17 nt, Human
auuguaauuauaucuga

SEQ ID NO: 3430232 - RNA, 21 nt, Human
auuguaauuauaucugaggaa

SEQ ID NO: 3430233 - RNA, 18 nt, Human
auuguacaaaauuaagca

SEQ ID NO: 3430234 - RNA, 17 nt, Human
auuguacaaaguauuaa

SEQ ID NO: 3430235 - RNA, 22 nt, Human
auuguacaaaguauuaagcaua

SEQ ID NO: 3430236 - RNA, 14 nt, Human
auuguacagcuguu

SEQ ID NO: 3430237 - RNA, 20 nt, Human
auuguacagcuguuuaagau

SEQ ID NO: 3430238 - RNA, 16 nt, Human
auuguacaguuuguuu

SEQ ID NO: 3430239 - RNA, 21 nt, Human
auuguacaguuuguuuacaca

SEQ ID NO: 3430240 - RNA, 15 nt, Human
auuguacaguuuuua

SEQ ID NO: 3430241 - RNA, 20 nt, Human
auuguacauauuuguggaau

SEQ ID NO: 3430242 - RNA, 19 nt, Human
auuguaccucucuuauaga

SEQ ID NO: 3430243 - RNA, 14 nt, Human
auuguaccuuuuaa

SEQ ID NO: 3430244 - RNA, 22 nt, Human
auuguaccuuuuaacaccugau

SEQ ID NO: 3430245 - RNA, 15 nt, Human
auuguacguuuaaag

SEQ ID NO: 3430246 - RNA, 19 nt, Human
auuguacguuuaaagugua

SEQ ID NO: 3430247 - RNA, 18 nt, Human
auuguacuaccuguguau

SEQ ID NO: 3430248 - RNA, 18 nt, Human
auuguacucaauggauuu

SEQ ID NO: 3430249 - RNA, 15 nt, Human
auuguacuuugugcu

SEQ ID NO: 3430250 - RNA, 17 nt, Human
auuguagagccagaggu

SEQ ID NO: 3430251 - RNA, 18 nt, Human
auuguagagccagagguc

SEQ ID NO: 3430252 - RNA, 15 nt, Human
auuguagcauuucuu

SEQ ID NO: 3430253 - RNA, 20 nt, Human
auuguagcgucuuucuuuuu

SEQ ID NO: 3430254 - RNA, 15 nt, Human
auuguaggugcaaga

SEQ ID NO: 3430255 - RNA, 14 nt, Human
auuguaguuaauga

SEQ ID NO: 3430256 - RNA, 14 nt, Human
auuguauaaaaaua

SEQ ID NO: 3430257 - RNA, 17 nt, Human
auuguauaaaaauagaa

SEQ ID NO: 3430258 - RNA, 21 nt, Human
auuguauaaacuaucaguuug

SEQ ID NO: 3430259 - RNA, 16 nt, Human
auuguauaacagguua

SEQ ID NO: 3430260 - RNA, 17 nt, Human
auuguauaacagguuau

SEQ ID NO: 3430261 - RNA, 18 nt, Human
auuguauaacagguuauu

SEQ ID NO: 3430262 - RNA, 17 nt, Human
auuguauauuacaauga

SEQ ID NO: 3430263 - RNA, 19 nt, Human
auuguauauuacaaugauc

SEQ ID NO: 3430264 - RNA, 13 nt, Human
auuguauauucac

SEQ ID NO: 3430265 - RNA, 14 nt, Human
auuguauauucacu

SEQ ID NO: 3430266 - RNA, 13 nt, Human
auuguauauugua

SEQ ID NO: 3430267 - RNA, 17 nt, Human
auuguauauuguaauuu

SEQ ID NO: 3430268 - RNA, 18 nt, Human
auuguauauuuuuaucua

SEQ ID NO: 3430269 - RNA, 19 nt, Human
auuguauauuuuuaucuau

SEQ ID NO: 3430270 - RNA, 14 nt, Human
auuguaucagaggc

SEQ ID NO: 3430271 - RNA, 15 nt, Human
auuguaucagaggcc

SEQ ID NO: 3430272 - RNA, 17 nt, Human
auuguaucguauagcug

SEQ ID NO: 3430273 - RNA, 18 nt, Human
auuguaucuagugcagcu

SEQ ID NO: 3430274 - RNA, 21 nt, Human
auuguaucuagugcagcugau

SEQ ID NO: 3430275 - RNA, 13 nt, Human
auuguaugaugug

SEQ ID NO: 3430276 - RNA, 12 nt, Human
auuguauugcug

SEQ ID NO: 3430277 - RNA, 14 nt, Human
auuguauugcuguc

SEQ ID NO: 3430278 - RNA, 13 nt, Human
auuguauuguuag

SEQ ID NO: 3430279 - RNA, 11 nt, Human
auuguauuuau

SEQ ID NO: 3430280 - RNA, 15 nt, Human
auuguauuuaugugu

SEQ ID NO: 3430281 - RNA, 18 nt, Human
auuguauuuauucaauaa

SEQ ID NO: 3430282 - RNA, 19 nt, Human
auuguauuuauucaauaaa

SEQ ID NO: 3430283 - RNA, 14 nt, Human
auuguauuuuagua

SEQ ID NO: 3430284 - RNA, 21 nt, Human
auugucaaugcuggagaaaaa

SEQ ID NO: 3430285 - RNA, 19 nt, Human
auugucaccugcuucucug

SEQ ID NO: 3430286 - RNA, 21 nt, Human
auugucaccugcuucucugcc

SEQ ID NO: 3430287 - RNA, 13 nt, Human
auugucacuuuuu

SEQ ID NO: 3430288 - RNA, 13 nt, Human
auugucagcuacu

SEQ ID NO: 3430289 - RNA, 15 nt, Human
auugucauuaaaggu

SEQ ID NO: 3430290 - RNA, 12 nt, Human
auugucccucug

SEQ ID NO: 3430291 - RNA, 23 nt, Human
auugucccucugccccauccucc

SEQ ID NO: 3430292 - RNA, 21 nt, Human
auuguccuauuaguguuauau

SEQ ID NO: 3430293 - RNA, 22 nt, Human
auugucgaaaagagucuuccaa

SEQ ID NO: 3430294 - RNA, 12 nt, Human
auugucucagag

SEQ ID NO: 3430295 - RNA, 10 nt, Human
auugucuccc

SEQ ID NO: 3430296 - RNA, 19 nt, Human
auugucucguuugugauuc

SEQ ID NO: 3430297 - RNA, 14 nt, Human
auugucuguaaauc

SEQ ID NO: 3430298 - RNA, 15 nt, Human
auugucugugaagug

SEQ ID NO: 3430299 - RNA, 16 nt, Human
auugucuuaauauugu

SEQ ID NO: 3430300 - RNA, 15 nt, Human
auugucuuaauggau

SEQ ID NO: 3430301 - RNA, 17 nt, Human
auugucuuaauggauga

SEQ ID NO: 3430302 - RNA, 19 nt, Human
auugucuuaauggaugaaa

SEQ ID NO: 3430303 - RNA, 21 nt, Human
auugucuuaauggaugaaauc

SEQ ID NO: 3430304 - RNA, 18 nt, Human
auugucuucggaaaccuu

SEQ ID NO: 3430305 - RNA, 20 nt, Human
auugucuucggaaaccuugg

SEQ ID NO: 3430306 - RNA, 18 nt, Human
auugucuuuugucaugug

SEQ ID NO: 3430307 - RNA, 17 nt, Human
auugugaaccaaugcaa

SEQ ID NO: 3430308 - RNA, 19 nt, Human
auugugaauugauaauaaa

SEQ ID NO: 3430309 - RNA, 15 nt, Human
auugugaccaaguua

SEQ ID NO: 3430310 - RNA, 16 nt, Human
auugugaccaaguuau

SEQ ID NO: 3430311 - RNA, 21 nt, Human
auugugaugguucguucuguu

SEQ ID NO: 3430312 - RNA, 22 nt, Human
auugugauuagacagaacaccu

SEQ ID NO: 3430313 - RNA, 14 nt, Human
auugugauuugacu

SEQ ID NO: 3430314 - RNA, 18 nt, Human
auugugauuugacuguuu

SEQ ID NO: 3430315 - RNA, 17 nt, Human
auugugcaauguaaaua

SEQ ID NO: 3430316 - RNA, 16 nt, Human
auugugcaauguguau

SEQ ID NO: 3430317 - RNA, 18 nt, Human
auugugcaauguguauaa

SEQ ID NO: 3430318 - RNA, 19 nt, Human
auugugcacauacuugaga

SEQ ID NO: 3430319 - RNA, 16 nt, Human
auugugccaauaugua

SEQ ID NO: 3430320 - RNA, 13 nt, Human
auugugccccugc

SEQ ID NO: 3430321 - RNA, 19 nt, Human
auacagauuuugauagcaa

SEQ ID NO: 3430322 - RNA, 22 nt, Human
auacagauuuugauagcaaagc

SEQ ID NO: 3430323 - RNA, 13 nt, Human
auacagcagcaag

SEQ ID NO: 3430324 - RNA, 20 nt, Human
auacagcagcaagaaaaaaa

SEQ ID NO: 3430325 - RNA, 18 nt, Human
auacagccaaagauaauc

SEQ ID NO: 3430326 - RNA, 13 nt, Human
auacagcucagaa

SEQ ID NO: 3430327 - RNA, 20 nt, Human
auacagcuguauugucugaa

SEQ ID NO: 3430328 - RNA, 19 nt, Human
auacaggaaaagcugcuga

SEQ ID NO: 3430329 - RNA, 22 nt, Human
auacaggaaaagcugcugacag

SEQ ID NO: 3430330 - RNA, 23 nt, Human
auacaggaaaagcugcugacagu

SEQ ID NO: 3430331 - RNA, 15 nt, Human
auacaggaaacaguu

SEQ ID NO: 3430332 - RNA, 15 nt, Human
auacaggaacaacau

SEQ ID NO: 3430333 - RNA, 21 nt, Human
auacaggaugaugacuaugga

SEQ ID NO: 3430334 - RNA, 17 nt, Human
auacaggauuauuuuga

SEQ ID NO: 3430335 - RNA, 18 nt, Human
auacaggggaauauuuua

SEQ ID NO: 3430336 - RNA, 21 nt, Human
auacaggucauauuaauauau

SEQ ID NO: 3430337 - RNA, 16 nt, Human
auacaguacaggcagc

SEQ ID NO: 3430338 - RNA, 19 nt, Human
auacaguagugagaagaau

SEQ ID NO: 3430339 - RNA, 20 nt, Human
auacaguagugagaagaaua

SEQ ID NO: 3430340 - RNA, 14 nt, Human
auacaguauucugu

SEQ ID NO: 3430341 - RNA, 20 nt, Human
auacagucucugagaacugg

SEQ ID NO: 3430342 - RNA, 22 nt, Human
auacagucuuccacaaagaaaa

SEQ ID NO: 3430343 - RNA, 13 nt, Human
auacagugcagag

SEQ ID NO: 3430344 - RNA, 21 nt, Human
auacagugcagagccuucuca

SEQ ID NO: 3430345 - RNA, 18 nt, Human
auacaguuacucagaauu

SEQ ID NO: 3430346 - RNA, 20 nt, Human
auacaguuguuggccuccgg

SEQ ID NO: 3430347 - RNA, 21 nt, Human
auacaguuuauuuuuaaagau

SEQ ID NO: 3430348 - RNA, 17 nt, Human
auacaguuuuaaagaau

SEQ ID NO: 3430349 - RNA, 21 nt, Human
auacaguuuuaugcucuuuuu

SEQ ID NO: 3430350 - RNA, 22 nt, Human
auacaguuuucagaaaaagaaa

SEQ ID NO: 3430351 - RNA, 17 nt, Human
auugacauugaaaucua

SEQ ID NO: 3430352 - RNA, 13 nt, Human
auugacauuugua

SEQ ID NO: 3430353 - RNA, 16 nt, Human
auugaccaagaacugc

SEQ ID NO: 3430354 - RNA, 17 nt, Human
auugaccaagaacugca

SEQ ID NO: 3430355 - RNA, 18 nt, Human
auugaccaagaacugcau

SEQ ID NO: 3430356 - RNA, 20 nt, Human
auugaccaagaacugcaugg

SEQ ID NO: 3430357 - RNA, 14 nt, Human
auugaccaucugcu

SEQ ID NO: 3430358 - RNA, 22 nt, Human
auugaccauuuuuuaauuuacu

SEQ ID NO: 3430359 - RNA, 18 nt, Human
auugacccacaagaaaug

SEQ ID NO: 3430360 - RNA, 12 nt, Human
auugaccugcuc

SEQ ID NO: 3430361 - RNA, 21 nt, Human
auugaccugcuccgcugcucc

SEQ ID NO: 3430362 - RNA, 22 nt, Human
auugacgacaagugcugaacag

SEQ ID NO: 3430363 - RNA, 22 nt, Human
auugacgguuuuuuauuauugu

SEQ ID NO: 3430364 - RNA, 19 nt, Human
auugacuaacucaaauaca

SEQ ID NO: 3430365 - RNA, 21 nt, Human
auugacuaucaaacugaagcc

SEQ ID NO: 3430366 - RNA, 16 nt, Human
auugacucuggguccu

SEQ ID NO: 3430367 - RNA, 22 nt, Human
auugacucuggguccuuccuga

SEQ ID NO: 3430368 - RNA, 14 nt, Human
auugacucuugagu

SEQ ID NO: 3430369 - RNA, 15 nt, Human
auugacucuugaguu

SEQ ID NO: 3430370 - RNA, 19 nt, Human
auugacucuugaguuguuu

SEQ ID NO: 3430371 - RNA, 11 nt, Human
auugacuucuu

SEQ ID NO: 3430372 - RNA, 15 nt, Human
auugacuuuuauaaa

SEQ ID NO: 3430373 - RNA, 13 nt, Human
auugacuuuuuau

SEQ ID NO: 3430374 - RNA, 18 nt, Human
auugagaaagagcacuua

SEQ ID NO: 3430375 - RNA, 21 nt, Human
auugagaaagagcacuuaaga

SEQ ID NO: 3430376 - RNA, 14 nt, Human
auugagaacugcau

SEQ ID NO: 3430377 - RNA, 18 nt, Human
auugagaagaaaaacuca

SEQ ID NO: 3430378 - RNA, 20 nt, Human
auugagaaguuuuguacaga

SEQ ID NO: 3430379 - RNA, 14 nt, Human
auugagacaaaaau

SEQ ID NO: 3430380 - RNA, 15 nt, Human
auugagacaaaaauu

SEQ ID NO: 3430381 - RNA, 16 nt, Human
auugagacaaaaauua

SEQ ID NO: 3430382 - RNA, 22 nt, Human
auugagaccgugaagauacuuu

SEQ ID NO: 3430383 - RNA, 18 nt, Human
auugagaccuacaggcug

SEQ ID NO: 3430384 - RNA, 22 nt, Human
auugagagaauggaaaacagac

SEQ ID NO: 3430385 - RNA, 17 nt, Human
auugagagagaugugua

SEQ ID NO: 3430386 - RNA, 20 nt, Human
auugagaguaacuuaaguua

SEQ ID NO: 3430387 - RNA, 17 nt, Human
auugagaugauuaaaau

SEQ ID NO: 3430388 - RNA, 19 nt, Human
auugagauuagagggaggu

SEQ ID NO: 3430389 - RNA, 20 nt, Human
auugagcagaauucauucau

SEQ ID NO: 3430390 - RNA, 21 nt, Human
auugagccuaaaaauaaagca

SEQ ID NO: 3430391 - RNA, 22 nt, Human
auugagccuaaaaauaaagcac

SEQ ID NO: 3430392 - RNA, 19 nt, Human
auugagcugauauaaauuc

SEQ ID NO: 3430393 - RNA, 22 nt, Human
auugagcugauauaaauucugu

SEQ ID NO: 3430394 - RNA, 17 nt, Human
auugagcugcagaaacg

SEQ ID NO: 3430395 - RNA, 21 nt, Human
auugagcuggaccucaccaag

SEQ ID NO: 3430396 - RNA, 20 nt, Human
auugaggaaaaauaugugaa

SEQ ID NO: 3430397 - RNA, 12 nt, Human
auugaggaagag

SEQ ID NO: 3430398 - RNA, 22 nt, Human
auugaggccaagaauauugcaa

SEQ ID NO: 3430399 - RNA, 12 nt, Human
auugaggccugc

SEQ ID NO: 3430400 - RNA, 19 nt, Human
auugaggcuuuguguugua

SEQ ID NO: 3430401 - RNA, 20 nt, Human
auugaguaaugguguagaac

SEQ ID NO: 3430402 - RNA, 22 nt, Human
auugaguaaugguguagaacac

SEQ ID NO: 3430403 - RNA, 15 nt, Human
auugaguauuguuua

SEQ ID NO: 3430404 - RNA, 22 nt, Human
auugaguucuuccuguaaucuu

SEQ ID NO: 3430405 - RNA, 16 nt, Human
auugauaagagggcac

SEQ ID NO: 3430406 - RNA, 22 nt, Human
auugauaagagggcacacacug

SEQ ID NO: 3430407 - RNA, 16 nt, Human
auugauaaguucauac

SEQ ID NO: 3430408 - RNA, 12 nt, Human
auugauaauaaa

SEQ ID NO: 3430409 - RNA, 21 nt, Human
auugauacucuuucuaaugcu

SEQ ID NO: 3430410 - RNA, 16 nt, Human
auugauaugaaaaaua

SEQ ID NO: 3430411 - RNA, 13 nt, Human
auugauauuguga

SEQ ID NO: 3430412 - RNA, 16 nt, Human
auugauauuugugcau

SEQ ID NO: 3430413 - RNA, 19 nt, Human
auugauauuugugcauuuu

SEQ ID NO: 3430414 - RNA, 22 nt, Human
auugauauuugugcauuuucua

SEQ ID NO: 3430415 - RNA, 17 nt, Human
auugaucaaauucauuu

SEQ ID NO: 3430416 - RNA, 20 nt, Human
auugaucauuuuccccccac

SEQ ID NO: 3430417 - RNA, 22 nt, Human
auugauccagaaagaaaacuug

SEQ ID NO: 3430418 - RNA, 17 nt, Human
auugaugaaaagauuua

SEQ ID NO: 3430419 - RNA, 20 nt, Human
auugaugcaugcuauucaca

SEQ ID NO: 3430420 - RNA, 17 nt, Human
auugaugugcaaaaauu

SEQ ID NO: 3430421 - RNA, 19 nt, Human
auugauguguuuauuuaua

SEQ ID NO: 3430422 - RNA, 16 nt, Human
auugauguugaugcaa

SEQ ID NO: 3430423 - RNA, 13 nt, Human
auugauguuuuca

SEQ ID NO: 3430424 - RNA, 17 nt, Human
auugauguuuucauaga

SEQ ID NO: 3430425 - RNA, 12 nt, Human
auugauuagaaa

SEQ ID NO: 3430426 - RNA, 22 nt, Human
auugauuauucugauuccacuu

SEQ ID NO: 3430427 - RNA, 14 nt, Human
auugauugcuuuuu

SEQ ID NO: 3430428 - RNA, 13 nt, Human
auugauugggaaa

SEQ ID NO: 3430429 - RNA, 23 nt, Human
auugauugggaaaacauuugcug

SEQ ID NO: 3430430 - RNA, 23 nt, Human
auugauugggcacaucauuucaa

SEQ ID NO: 3430431 - RNA, 16 nt, Human
auugauuucaagaccu

SEQ ID NO: 3430432 - RNA, 14 nt, Human
auugauuugauugg

SEQ ID NO: 3430433 - RNA, 20 nt, Human
auugauuugcauugaacaca

SEQ ID NO: 3430434 - RNA, 15 nt, Human
auugauuuuaaaaug

SEQ ID NO: 3430435 - RNA, 12 nt, Human
auugauuuugaa

SEQ ID NO: 3430436 - RNA, 19 nt, Human
auugauuuuuauaaauacu

SEQ ID NO: 3430437 - RNA, 14 nt, Human
auugcaaaauacau

SEQ ID NO: 3430438 - RNA, 17 nt, Human
auugcaaaauacaugaa

SEQ ID NO: 3430439 - RNA, 18 nt, Human
auugcaaaauacaugaag

SEQ ID NO: 3430440 - RNA, 19 nt, Human
auugcaaaauagcauuugu

SEQ ID NO: 3430441 - RNA, 13 nt, Human
auugcaaagcaaa

SEQ ID NO: 3430442 - RNA, 23 nt, Human
auugcaaagguuccaacuguaua

SEQ ID NO: 3430443 - RNA, 13 nt, Human
auugcaacaaaau

SEQ ID NO: 3430444 - RNA, 16 nt, Human
auugcaacaaaauaca

SEQ ID NO: 3430445 - RNA, 15 nt, Human
auugcaauaaaguau

SEQ ID NO: 3430446 - RNA, 17 nt, Human
auugcaauaaaguauaa

SEQ ID NO: 3430447 - RNA, 19 nt, Human
auugcaaucuauaauauuu

SEQ ID NO: 3430448 - RNA, 13 nt, Human
auugcacaauauu

SEQ ID NO: 3430449 - RNA, 16 nt, Human
auugcacagaaguccu

SEQ ID NO: 3430450 - RNA, 14 nt, Human
auugcacagggaga

SEQ ID NO: 3430451 - RNA, 18 nt, Human
auugcacaugucuuaaug

SEQ ID NO: 3430452 - RNA, 20 nt, Human
auugcacaugucuuaaugaa

SEQ ID NO: 3430453 - RNA, 15 nt, Human
auugcacauuguaaa

SEQ ID NO: 3430454 - RNA, 17 nt, Human
auugcacccagcccaga

SEQ ID NO: 3430455 - RNA, 19 nt, Human
auugcacguggccucuuga

SEQ ID NO: 3430456 - RNA, 20 nt, Human
auugcacuccagccugggug

SEQ ID NO: 3430457 - RNA, 20 nt, Human
auugcacucuaaaagguuca

SEQ ID NO: 3430458 - RNA, 22 nt, Human
auugcagaacuaaacucauuua

SEQ ID NO: 3430459 - RNA, 16 nt, Human
auugcagaauuguuua

SEQ ID NO: 3430460 - RNA, 20 nt, Human
auugcagaauuguuuagauu

SEQ ID NO: 3430461 - RNA, 14 nt, Human
auugcagcuuuaug

SEQ ID NO: 3430462 - RNA, 17 nt, Human
auugcagcuuuauguuc

SEQ ID NO: 3430463 - RNA, 14 nt, Human
auugcaggauggug

SEQ ID NO: 3430464 - RNA, 23 nt, Human
auagugcucgcuuucuauguagu

SEQ ID NO: 3430465 - RNA, 17 nt, Human
auagugcuuaaaaauca

SEQ ID NO: 3430466 - RNA, 18 nt, Human
auaguggaaaaacacaug

SEQ ID NO: 3430467 - RNA, 16 nt, Human
auagugggaccacaua

SEQ ID NO: 3430468 - RNA, 16 nt, Human
auaguggggagacuuc

SEQ ID NO: 3430469 - RNA, 21 nt, Human
auagugggguuccaugaguua

SEQ ID NO: 3430470 - RNA, 18 nt, Human
auagugguucuuggaaaa

SEQ ID NO: 3430471 - RNA, 18 nt, Human
auaguguaacuugcuuaa

SEQ ID NO: 3430472 - RNA, 23 nt, Human
auaguguaacuugcuuaaauuuc

SEQ ID NO: 3430473 - RNA, 20 nt, Human
auaguguaggcuuuacuuag

SEQ ID NO: 3430474 - RNA, 12 nt, Human
auagugucuuug

SEQ ID NO: 3430475 - RNA, 15 nt, Human
auaguguguucugau

SEQ ID NO: 3430476 - RNA, 20 nt, Human
auaguguuaaucaauuuaaa

SEQ ID NO: 3430477 - RNA, 17 nt, Human
auaguguuauugagaga

SEQ ID NO: 3430478 - RNA, 21 nt, Human
auaguuaaauguuaccucuga

SEQ ID NO: 3430479 - RNA, 17 nt, Human
auaguuacuguaaaaug

SEQ ID NO: 3430480 - RNA, 18 nt, Human
auaguuacuguaaaaugc

SEQ ID NO: 3430481 - RNA, 13 nt, Human
auaguuacugugu

SEQ ID NO: 3430482 - RNA, 17 nt, Human
auaguuacuguguaaac

SEQ ID NO: 3430483 - RNA, 17 nt, Human
auaguuacuguguaauu

SEQ ID NO: 3430484 - RNA, 18 nt, Human
auaguuacuguguaauua

SEQ ID NO: 3430485 - RNA, 16 nt, Human
auaguuacuguuguga

SEQ ID NO: 3430486 - RNA, 16 nt, Human
auaguuagcuaauaaa

SEQ ID NO: 3430487 - RNA, 23 nt, Human
auaguuaggauagcauuuuugau

SEQ ID NO: 3430488 - RNA, 15 nt, Human
auaguuauguaaaua

SEQ ID NO: 3430489 - RNA, 16 nt, Human
auaguuauguaaauaa

SEQ ID NO: 3430490 - RNA, 18 nt, Human
auaguuauguaaauaauu

SEQ ID NO: 3430491 - RNA, 21 nt, Human
auaguucagaauuuaguguau

SEQ ID NO: 3430492 - RNA, 22 nt, Human
auaguucccuagucuauucauu

SEQ ID NO: 3430493 - RNA, 18 nt, Human
auaguuccuaagaagcuu

SEQ ID NO: 3430494 - RNA, 15 nt, Human
auaguuccugcuaaa

SEQ ID NO: 3430495 - RNA, 12 nt, Human
auaguucuagac

SEQ ID NO: 3430496 - RNA, 13 nt, Human
auaguucuagaca

SEQ ID NO: 3430497 - RNA, 20 nt, Human
auaguugagccagcagacau

SEQ ID NO: 3430498 - RNA, 22 nt, Human
auaguugagccagcagacauug

SEQ ID NO: 3430499 - RNA, 13 nt, Human
auaguugagcccc

SEQ ID NO: 3430500 - RNA, 18 nt, Human
auaguugcauagcaguau

SEQ ID NO: 3430501 - RNA, 20 nt, Human
auaguugcauagcaguauau

SEQ ID NO: 3430502 - RNA, 12 nt, Human
auaguugcuuuu

SEQ ID NO: 3430503 - RNA, 20 nt, Human
auaguugcuuuugaaggaau

SEQ ID NO: 3430504 - RNA, 21 nt, Human
auaguugcuuuugaaggaaua

SEQ ID NO: 3430505 - RNA, 23 nt, Human
auaguuggaggugauuccaguga

SEQ ID NO: 3430506 - RNA, 22 nt, Human
auaguuggcuaggaccccucca

SEQ ID NO: 3430507 - RNA, 13 nt, Human
auaguuguaacua

SEQ ID NO: 3430508 - RNA, 14 nt, Human
auaguuuacaugua

SEQ ID NO: 3430509 - RNA, 15 nt, Human
auaguuuacuauuuu

SEQ ID NO: 3430510 - RNA, 21 nt, Human
auaguuucagauauauaucau

SEQ ID NO: 3430511 - RNA, 13 nt, Human
auaguuucugagg

SEQ ID NO: 3430512 - RNA, 14 nt, Human
auaguuucugaggc

SEQ ID NO: 3430513 - RNA, 13 nt, Human
auaguuucuuuau

SEQ ID NO: 3430514 - RNA, 22 nt, Human
auaguuucuuuauuuuguguaa

SEQ ID NO: 3430515 - RNA, 23 nt, Human
auaguuuggauauguaaaacauu

SEQ ID NO: 3430516 - RNA, 14 nt, Human
auaguuuggcauuu

SEQ ID NO: 3430517 - RNA, 18 nt, Human
auaguuuggcauuugcac

SEQ ID NO: 3430518 - RNA, 15 nt, Human
auaguuuuacuuuua

SEQ ID NO: 3430519 - RNA, 21 nt, Human
auaguuuuacuuuuaaacugu

SEQ ID NO: 3430520 - RNA, 22 nt, Human
auaguuuuacuuuuaaacugug

SEQ ID NO: 3430521 - RNA, 20 nt, Human
auaguuuucauccauaacug

SEQ ID NO: 3430522 - RNA, 19 nt, Human
auaguuuuuaagguuauuu

SEQ ID NO: 3430523 - RNA, 16 nt, Human
auauaaaaaaucaugc

SEQ ID NO: 3430524 - RNA, 13 nt, Human
auauaaaaacaaa

SEQ ID NO: 3430525 - RNA, 18 nt, Human
auauaaaaagaaaagaua

SEQ ID NO: 3430526 - RNA, 17 nt, Human
auauaaaaauauauaua

SEQ ID NO: 3430527 - RNA, 16 nt, Human
auauaaaagacugacc

SEQ ID NO: 3430528 - RNA, 18 nt, Human
auauaaaagaucuugcag

SEQ ID NO: 3430529 - RNA, 20 nt, Human
auauaaaaggcaaaugugua

SEQ ID NO: 3430530 - RNA, 24 nt, Human
auauaaaauaaauauauauaaacc

SEQ ID NO: 3430531 - RNA, 19 nt, Human
auauaaaauggcaacaaac

SEQ ID NO: 3430532 - RNA, 12 nt, Human
auauaaaauuau

SEQ ID NO: 3430533 - RNA, 16 nt, Human
auauaaagacguuuua

SEQ ID NO: 3430534 - RNA, 19 nt, Human
auauaaagcaucuaaacuu

SEQ ID NO: 3430535 - RNA, 15 nt, Human
auauaaaguauucuu

SEQ ID NO: 3430536 - RNA, 20 nt, Human
auauaaaguauucuuuuucu

SEQ ID NO: 3430537 - RNA, 13 nt, Human
auauaaaguuuua

SEQ ID NO: 3430538 - RNA, 19 nt, Human
auauaaaguuuuauauauu

SEQ ID NO: 3430539 - RNA, 17 nt, Human
auauaaauaaauauaua

SEQ ID NO: 3430540 - RNA, 15 nt, Human
auauaaauagaaugu

SEQ ID NO: 3430541 - RNA, 19 nt, Human
auauaaauagaauguaaau

SEQ ID NO: 3430542 - RNA, 17 nt, Human
auauaaauauauauaaa

SEQ ID NO: 3430543 - RNA, 16 nt, Human
auauaaauauauuauu

SEQ ID NO: 3430544 - RNA, 12 nt, Human
auauaaaugcaa

SEQ ID NO: 3430545 - RNA, 14 nt, Human
auauaaaugcaaau

SEQ ID NO: 3430546 - RNA, 15 nt, Human
auauaaaugcaaaua

SEQ ID NO: 3430547 - RNA, 23 nt, Human
auauaaaugcaaauaacaaaugc

SEQ ID NO: 3430548 - RNA, 22 nt, Human
auauaaaugcuuuuaaaaaucu

SEQ ID NO: 3430549 - RNA, 15 nt, Human
auauaaauggcuggu

SEQ ID NO: 3430550 - RNA, 13 nt, Human
auauaaaugggaa

SEQ ID NO: 3430551 - RNA, 18 nt, Human
auauaaaugggaacauuu

SEQ ID NO: 3430552 - RNA, 21 nt, Human
auauaaaugggaacauuuauu

SEQ ID NO: 3430553 - RNA, 12 nt, Human
auauaaaugugu

SEQ ID NO: 3430554 - RNA, 16 nt, Human
auauaaauguguguau

SEQ ID NO: 3430555 - RNA, 12 nt, Human
auauaaauucug

SEQ ID NO: 3430556 - RNA, 14 nt, Human
auuugugugcuaaa

SEQ ID NO: 3430557 - RNA, 15 nt, Human
auuugugugcuaaac

SEQ ID NO: 3430558 - RNA, 20 nt, Human
auuugugugcuaaacgugua

SEQ ID NO: 3430559 - RNA, 20 nt, Human
auuuguguggagucauuucu

SEQ ID NO: 3430560 - RNA, 22 nt, Human
auuuguguugaagagguuuuaa

SEQ ID NO: 3430561 - RNA, 14 nt, Human
auuuguuaaaauac

SEQ ID NO: 3430562 - RNA, 15 nt, Human
auuuguuaaauauuu

SEQ ID NO: 3430563 - RNA, 12 nt, Human
auuuguuaaugg

SEQ ID NO: 3430564 - RNA, 23 nt, Human
auuuguuaauuuagaaaacuuua

SEQ ID NO: 3430565 - RNA, 14 nt, Human
auuuguuacagcca

SEQ ID NO: 3430566 - RNA, 21 nt, Human
auuuguuaguuccuguaugaa

SEQ ID NO: 3430567 - RNA, 21 nt, Human
auuuguuauggcagaugacaa

SEQ ID NO: 3430568 - RNA, 15 nt, Human
auuuguuauucuuaa

SEQ ID NO: 3430569 - RNA, 18 nt, Human
auuuguuauuuguacagu

SEQ ID NO: 3430570 - RNA, 17 nt, Human
auuuguuauuuucagua

SEQ ID NO: 3430571 - RNA, 17 nt, Human
auuuguuauuuugcaac

SEQ ID NO: 3430572 - RNA, 21 nt, Human
auuuguucauagacccucuca

SEQ ID NO: 3430573 - RNA, 22 nt, Human
auuuguucauagacccucucaa

SEQ ID NO: 3430574 - RNA, 15 nt, Human
auuuguucauguuug

SEQ ID NO: 3430575 - RNA, 13 nt, Human
auuuguucucugu

SEQ ID NO: 3430576 - RNA, 16 nt, Human
auuuguucugggagua

SEQ ID NO: 3430577 - RNA, 16 nt, Human
auuuguucuucaagaa

SEQ ID NO: 3430578 - RNA, 17 nt, Human
auuuguucuuguauuua

SEQ ID NO: 3430579 - RNA, 14 nt, Human
auuuguugaaauua

SEQ ID NO: 3430580 - RNA, 16 nt, Human
auuuguugaaauuaug

SEQ ID NO: 3430581 - RNA, 18 nt, Human
auuuguugaaauuaugua

SEQ ID NO: 3430582 - RNA, 19 nt, Human
auuuguugacaaaauuuuc

SEQ ID NO: 3430583 - RNA, 13 nt, Human
auuuguugagagu

SEQ ID NO: 3430584 - RNA, 22 nt, Human
auuuguugagagugugaccaaa

SEQ ID NO: 3430585 - RNA, 14 nt, Human
auuuguuggaauga

SEQ ID NO: 3430586 - RNA, 15 nt, Human
auuuguuggaaugaa

SEQ ID NO: 3430587 - RNA, 13 nt, Human
auuuguuuaugua

SEQ ID NO: 3430588 - RNA, 14 nt, Human
auuuguuugaacug

SEQ ID NO: 3430589 - RNA, 23 nt, Human
auuuguuugaacugauaaagaug

SEQ ID NO: 3430590 - RNA, 18 nt, Human
auuuguuuugacggauga

SEQ ID NO: 3430591 - RNA, 21 nt, Human
auuuguuuuguguuguuugaa

SEQ ID NO: 3430592 - RNA, 15 nt, Human
auuuguuuuguuuac

SEQ ID NO: 3430593 - RNA, 18 nt, Human
auuuguuuuguuuacaga

SEQ ID NO: 3430594 - RNA, 14 nt, Human
auuuguuuuucuca

SEQ ID NO: 3430595 - RNA, 15 nt, Human
auuuguuuuucucac

SEQ ID NO: 3430596 - RNA, 18 nt, Human
auuuuaaaaaagccuucc

SEQ ID NO: 3430597 - RNA, 16 nt, Human
auuuuaaaaaaugguc

SEQ ID NO: 3430598 - RNA, 23 nt, Human
auuuuaaaaaguccauaccuuau

SEQ ID NO: 3430599 - RNA, 21 nt, Human
auuuuaaaaagucuucacucu

SEQ ID NO: 3430600 - RNA, 17 nt, Human
auuuuaaaaauacauau

SEQ ID NO: 3430601 - RNA, 16 nt, Human
auuuuaaaaauggugg

SEQ ID NO: 3430602 - RNA, 23 nt, Human
auuuuaaaaauguuaaaauguau

SEQ ID NO: 3430603 - RNA, 13 nt, Human
auuuuaaaacaau

SEQ ID NO: 3430604 - RNA, 23 nt, Human
auuuuaaaacuucaucugucugu

SEQ ID NO: 3430605 - RNA, 16 nt, Human
auuuuaaaagaaugau

SEQ ID NO: 3430606 - RNA, 17 nt, Human
auuuuaaaagaaugauu

SEQ ID NO: 3430607 - RNA, 18 nt, Human
auuuuaaaagaaugauua

SEQ ID NO: 3430608 - RNA, 20 nt, Human
auuuuaaaagauaaauauua

SEQ ID NO: 3430609 - RNA, 17 nt, Human
auauuguguugugaaug

SEQ ID NO: 3430610 - RNA, 13 nt, Human
auauuguguuugu

SEQ ID NO: 3430611 - RNA, 21 nt, Human
auauuguguuuguguauuuac

SEQ ID NO: 3430612 - RNA, 14 nt, Human
auauuguuaaucuc

SEQ ID NO: 3430613 - RNA, 15 nt, Human
auauuguucaaacaa

SEQ ID NO: 3430614 - RNA, 14 nt, Human
auauuguuccuaag

SEQ ID NO: 3430615 - RNA, 21 nt, Human
auauuguugacaacugugacu

SEQ ID NO: 3430616 - RNA, 20 nt, Human
auauuguugcauugcuuuuu

SEQ ID NO: 3430617 - RNA, 18 nt, Human
auauuguuguauaauuuc

SEQ ID NO: 3430618 - RNA, 12 nt, Human
auauuguuucua

SEQ ID NO: 3430619 - RNA, 14 nt, Human
auauuguuugguaa

SEQ ID NO: 3430620 - RNA, 16 nt, Human
auauuguuugguaaau

SEQ ID NO: 3430621 - RNA, 17 nt, Human
auauuguuuucagugua

SEQ ID NO: 3430622 - RNA, 13 nt, Human
auauuguuuuucu

SEQ ID NO: 3430623 - RNA, 14 nt, Human
auauuuaaaaauaa

SEQ ID NO: 3430624 - RNA, 14 nt, Human
auauuuaaaaaugu

SEQ ID NO: 3430625 - RNA, 15 nt, Human
auauuuaaaaauguc

SEQ ID NO: 3430626 - RNA, 16 nt, Human
auauuuaaaaaugucu

SEQ ID NO: 3430627 - RNA, 20 nt, Human
auuuggagacacaacuauuu

SEQ ID NO: 3430628 - RNA, 21 nt, Human
auuuggagacacaacuauuuu

SEQ ID NO: 3430629 - RNA, 17 nt, Human
auuuggagacucugugg

SEQ ID NO: 3430630 - RNA, 17 nt, Human
auuuggagagaaauauu

SEQ ID NO: 3430631 - RNA, 19 nt, Human
auuuggagggaagcucuug

SEQ ID NO: 3430632 - RNA, 23 nt, Human
auuuggagggaagcucuuggagc

SEQ ID NO: 3430633 - RNA, 15 nt, Human
auuuggagggccugg

SEQ ID NO: 3430634 - RNA, 20 nt, Human
auuuggauuuaaaagccugc

SEQ ID NO: 3430635 - RNA, 16 nt, Human
auuuggcaucccuggg

SEQ ID NO: 3430636 - RNA, 18 nt, Human
auuuggcauuccccacuu

SEQ ID NO: 3430637 - RNA, 19 nt, Human
auuuggcauuuauuuguga

SEQ ID NO: 3430638 - RNA, 19 nt, Human
auuuggccugcacuaauuu

SEQ ID NO: 3430639 - RNA, 19 nt, Human
auuugggaaacuugucacu

SEQ ID NO: 3430640 - RNA, 18 nt, Human
auuugggaagugaagacu

SEQ ID NO: 3430641 - RNA, 16 nt, Human
auuugggacccugcuu

SEQ ID NO: 3430642 - RNA, 22 nt, Human
auuugggagaagggcagaguua

SEQ ID NO: 3430643 - RNA, 19 nt, Human
auuugggccugcuccagac

SEQ ID NO: 3430644 - RNA, 21 nt, Human
auuugggccugcuccagaccu

SEQ ID NO: 3430645 - RNA, 18 nt, Human
auuugggcugaauguaug

SEQ ID NO: 3430646 - RNA, 19 nt, Human
auuugggcugaauguaugu

SEQ ID NO: 3430647 - RNA, 22 nt, Human
auuugggcugaauguauguaaa

SEQ ID NO: 3430648 - RNA, 15 nt, Human
auuuggggcuuccaa

SEQ ID NO: 3430649 - RNA, 21 nt, Human
auuuggggcuugcaugccaaa

SEQ ID NO: 3430650 - RNA, 21 nt, Human
auuugggguagcuagaggaac

SEQ ID NO: 3430651 - RNA, 15 nt, Human
auuugggguauuuau

SEQ ID NO: 3430652 - RNA, 23 nt, Human
auuugguaaggggaauugaggac

SEQ ID NO: 3430653 - RNA, 18 nt, Human
auuugguucuaggccggg

SEQ ID NO: 3430654 - RNA, 18 nt, Human
auuugguuuagaacauaa

SEQ ID NO: 3430655 - RNA, 12 nt, Human
auuugguuuuca

SEQ ID NO: 3430656 - RNA, 14 nt, Human
auuugguuuucaca

SEQ ID NO: 3430657 - RNA, 17 nt, Human
auuugguuuucacauug

SEQ ID NO: 3430658 - RNA, 21 nt, Human
auuugguuuucacauuggaaa

SEQ ID NO: 3430659 - RNA, 22 nt, Human
auuuguaaaaacagcauugcuu

SEQ ID NO: 3430660 - RNA, 22 nt, Human
auuuguaaaaugacaaucaugu

SEQ ID NO: 3430661 - RNA, 17 nt, Human
auuuguaaagcuauuua

SEQ ID NO: 3430662 - RNA, 19 nt, Human
auuuguaaagcuauuuaug

SEQ ID NO: 3430663 - RNA, 13 nt, Human
auuuguaaauuua

SEQ ID NO: 3430664 - RNA, 22 nt, Human
auuuguaaguuuaugucuaaag

SEQ ID NO: 3430665 - RNA, 18 nt, Human
auuuguaauaaaguauau

SEQ ID NO: 3430666 - RNA, 22 nt, Human
auuuguaauagauguuugauag

SEQ ID NO: 3430667 - RNA, 23 nt, Human
auuuguaaugucuugagcucuau

SEQ ID NO: 3430668 - RNA, 13 nt, Human
auuuguaauuaaa

SEQ ID NO: 3430669 - RNA, 19 nt, Human
auuuguaauuaaaagcaaa

SEQ ID NO: 3430670 - RNA, 21 nt, Human
auuuguaauuaaaagcaaauc

SEQ ID NO: 3430671 - RNA, 23 nt, Human
auuuguaauugcuuacauuuuua

SEQ ID NO: 3430672 - RNA, 18 nt, Human
auuuguacauauguaaaa

SEQ ID NO: 3430673 - RNA, 21 nt, Human
auuuguacauauguaaaauaa

SEQ ID NO: 3430674 - RNA, 18 nt, Human
auuuguacuacaguucuu

SEQ ID NO: 3430675 - RNA, 19 nt, Human
auuuguacuauuuaacuga

SEQ ID NO: 3430676 - RNA, 20 nt, Human
auuuguacuauuuaacugac

SEQ ID NO: 3430677 - RNA, 23 nt, Human
auuuguacugaaaaaugguaauu

SEQ ID NO: 3430678 - RNA, 22 nt, Human
auuuguaguggaaacauuuaua

SEQ ID NO: 3430679 - RNA, 18 nt, Human
auuuguaguguuggagaa

SEQ ID NO: 3430680 - RNA, 19 nt, Human
auuuguaguguuggagaag

SEQ ID NO: 3430681 - RNA, 22 nt, Human
auuuguaguguuggagaagaac

SEQ ID NO: 3430682 - RNA, 15 nt, Human
auuuguauaaaauaa

SEQ ID NO: 3430683 - RNA, 21 nt, Human
auuuguauaaaauaauuuuua

SEQ ID NO: 3430684 - RNA, 14 nt, Human
auuuguauaaaaug

SEQ ID NO: 3430685 - RNA, 15 nt, Human
auuuguauauauaca

SEQ ID NO: 3430686 - RNA, 16 nt, Human
auuuguauaugguauu

SEQ ID NO: 3430687 - RNA, 19 nt, Human
auuuguaucucugaagcau

SEQ ID NO: 3430688 - RNA, 14 nt, Human
auuuguaugauauu

SEQ ID NO: 3430689 - RNA, 16 nt, Human
auuuguauuuauucuu

SEQ ID NO: 3430690 - RNA, 21 nt, Human
auuuguauuuuuuugcaagug

SEQ ID NO: 3430691 - RNA, 17 nt, Human
auuugucauuuucauua

SEQ ID NO: 3430692 - RNA, 21 nt, Human
auuugucauuuucauuagcaa

SEQ ID NO: 3430693 - RNA, 14 nt, Human
auuugucauuuuga

SEQ ID NO: 3430694 - RNA, 20 nt, Human
auuuguccucuuuacaugaa

SEQ ID NO: 3430695 - RNA, 18 nt, Human
auuugucgauauuuccau

SEQ ID NO: 3430696 - RNA, 17 nt, Human
auuugucuauucuccag

SEQ ID NO: 3430697 - RNA, 21 nt, Human
auuugucuuuuuguuguaaaa

SEQ ID NO: 3430698 - RNA, 17 nt, Human
auuugugaacucagcca

SEQ ID NO: 3430699 - RNA, 20 nt, Human
auuugugaacucagccaagc

SEQ ID NO: 3430700 - RNA, 15 nt, Human
auuugugacaaaaaa

SEQ ID NO: 3430701 - RNA, 15 nt, Human
auuugugauacaaug

SEQ ID NO: 3430702 - RNA, 17 nt, Human
auuugugauacaaugcu

SEQ ID NO: 3430703 - RNA, 15 nt, Human
auuugugauagcacu

SEQ ID NO: 3430704 - RNA, 17 nt, Human
auuugugauagcacuuu

SEQ ID NO: 3430705 - RNA, 18 nt, Human
auuugugauagcacuuuc

SEQ ID NO: 3430706 - RNA, 19 nt, Human
auuugugcccccaaccauu

SEQ ID NO: 3430707 - RNA, 18 nt, Human
auuugugcuauaguauuu

SEQ ID NO: 3430708 - RNA, 18 nt, Human
auuuguggaaaauaacuc

SEQ ID NO: 3430709 - RNA, 11 nt, Human
auuuguggaau

SEQ ID NO: 3430710 - RNA, 20 nt, Human
auuuguggugauauagaauu

SEQ ID NO: 3430711 - RNA, 15 nt, Human
auuuguggugauuug

SEQ ID NO: 3430712 - RNA, 14 nt, Human
auuuguguauuuaa

SEQ ID NO: 3430713 - RNA, 13 nt, Human
auuuguguguuac

SEQ ID NO: 3430714 - RNA, 17 nt, Human
auuuguguguuacaaug

SEQ ID NO: 3430715 - RNA, 18 nt, Human
auuuguguguucacuaaa

SEQ ID NO: 3430716 - RNA, 18 nt, Human
auuuguguugaagagguu

SEQ ID NO: 3430717 - RNA, 14 nt, Human
auuuguuaaaauua

SEQ ID NO: 3430718 - RNA, 17 nt, Human
auuuguuaaauauuuac

SEQ ID NO: 3430719 - RNA, 18 nt, Human
auuuguuaaauauuuaca

SEQ ID NO: 3430720 - RNA, 18 nt, Human
auuuguuaauaguuccug

SEQ ID NO: 3430721 - RNA, 19 nt, Human
auuuguuaauuuagaaaac

SEQ ID NO: 3430722 - RNA, 22 nt, Human
auuuguuaguuccuguaugaaa

SEQ ID NO: 3430723 - RNA, 17 nt, Human
auuuguuauuuguacag

SEQ ID NO: 3430724 - RNA, 18 nt, Human
auuuguucacugaaggug

SEQ ID NO: 3430725 - RNA, 13 nt, Human
auuuguucauauu

SEQ ID NO: 3430726 - RNA, 13 nt, Human
auuuguucauguu

SEQ ID NO: 3430727 - RNA, 16 nt, Human
auuuguucauguuugg

SEQ ID NO: 3430728 - RNA, 14 nt, Human
auuuguucccaaga

SEQ ID NO: 3430729 - RNA, 19 nt, Human
auuuguucuauagcuuuuc

SEQ ID NO: 3430730 - RNA, 14 nt, Human
auuuguuuaaaagg

SEQ ID NO: 3430731 - RNA, 15 nt, Human
auuuguuuaaaagga

SEQ ID NO: 3430732 - RNA, 16 nt, Human
auuuguuuaaaaggau

SEQ ID NO: 3430733 - RNA, 14 nt, Human
auuuguuuaaagua

SEQ ID NO: 3430734 - RNA, 18 nt, Human
auuuguuucuuucucuga

SEQ ID NO: 3430735 - RNA, 13 nt, Human
auuuguuugaacu

SEQ ID NO: 3430736 - RNA, 20 nt, Human
auuuguuugaacugauaaag

SEQ ID NO: 3430737 - RNA, 22 nt, Human
auuuguuugaacugauaaagau

SEQ ID NO: 3430738 - RNA, 17 nt, Human
auuuguuugugcuucua

SEQ ID NO: 3430739 - RNA, 17 nt, Human
auuuguuuguuuuccuu

SEQ ID NO: 3430740 - RNA, 18 nt, Human
auuuguuuuagaaugaug

SEQ ID NO: 3430741 - RNA, 14 nt, Human
auuuguuuucaugg

SEQ ID NO: 3430742 - RNA, 15 nt, Human
auuuguuuucauggu

SEQ ID NO: 3430743 - RNA, 16 nt, Human
auuuguuuuuaaacug

SEQ ID NO: 3430744 - RNA, 20 nt, Human
auuuguuuuuaaacuguaca

SEQ ID NO: 3430745 - RNA, 22 nt, Human
auuuguuuuuaaacuguacagu

SEQ ID NO: 3430746 - RNA, 16 nt, Human
auuuguuuuucauuca

SEQ ID NO: 3430747 - RNA, 14 nt, Human
auuuuaaaaaaggg

SEQ ID NO: 3430748 - RNA, 16 nt, Human
auuuuaaaaacauaga

SEQ ID NO: 3430749 - RNA, 19 nt, Human
auuuuaaaaagauuuguuu

SEQ ID NO: 3430750 - RNA, 14 nt, Human
auuuuaaaaauaca

SEQ ID NO: 3430751 - RNA, 22 nt, Human
auuuuaaaaauacagauagaua

SEQ ID NO: 3430752 - RNA, 22 nt, Human
auuuuaaaaauacauaucgcug

SEQ ID NO: 3430753 - RNA, 21 nt, Human
auauuuucaugcuguucauga

SEQ ID NO: 3430754 - RNA, 21 nt, Human
auauuuuccuaguagaucuau

SEQ ID NO: 3430755 - RNA, 13 nt, Human
auauuuuccuaua

SEQ ID NO: 3430756 - RNA, 19 nt, Human
auauuuuccuauauuacgg

SEQ ID NO: 3430757 - RNA, 19 nt, Human
auauuuuccugauagcaua

SEQ ID NO: 3430758 - RNA, 13 nt, Human
auauuuucuauuu

SEQ ID NO: 3430759 - RNA, 16 nt, Human
auauuuucucuaggaa

SEQ ID NO: 3430760 - RNA, 15 nt, Human
auauuuucugugugu

SEQ ID NO: 3430761 - RNA, 17 nt, Human
auauuuucuguguguuc

SEQ ID NO: 3430762 - RNA, 22 nt, Human
auauuuucuguguguuccuggc

SEQ ID NO: 3430763 - RNA, 13 nt, Human
auauuuucuguuu

SEQ ID NO: 3430764 - RNA, 19 nt, Human
auauuuucuuccaagcaaa

SEQ ID NO: 3430765 - RNA, 23 nt, Human
auauuuucuuccaagcaaaggug

SEQ ID NO: 3430766 - RNA, 13 nt, Human
auauuuucuuucu

SEQ ID NO: 3430767 - RNA, 19 nt, Human
auauuuugaaucaauaaua

SEQ ID NO: 3430768 - RNA, 16 nt, Human
auauuuugaucuucaa

SEQ ID NO: 3430769 - RNA, 17 nt, Human
auauuuugaucuucaac

SEQ ID NO: 3430770 - RNA, 17 nt, Human
auauuuugauuauugua

SEQ ID NO: 3430771 - RNA, 12 nt, Human
auauuuugcagu

SEQ ID NO: 3430772 - RNA, 19 nt, Human
auauuuuguaaaauguauu

SEQ ID NO: 3430773 - RNA, 14 nt, Human
auauuuuguauaua

SEQ ID NO: 3430774 - RNA, 21 nt, Human
auauuuugucauaucaaauaa

SEQ ID NO: 3430775 - RNA, 13 nt, Human
auauuuuguguga

SEQ ID NO: 3430776 - RNA, 19 nt, Human
auauuuuuaaaaaaugaaa

SEQ ID NO: 3430777 - RNA, 20 nt, Human
auauuuuuaaaauauuuauu

SEQ ID NO: 3430778 - RNA, 15 nt, Human
auauuuuuaaagauc

SEQ ID NO: 3430779 - RNA, 16 nt, Human
auauuuuuaagauaau

SEQ ID NO: 3430780 - RNA, 19 nt, Human
auauuuuuaauaaaaguug

SEQ ID NO: 3430781 - RNA, 15 nt, Human
auauuuuuaauuaaa

SEQ ID NO: 3430782 - RNA, 20 nt, Human
auauuuuuauaauaaacaua

SEQ ID NO: 3430783 - RNA, 14 nt, Human
auauuuuuauagac

SEQ ID NO: 3430784 - RNA, 21 nt, Human
auauuuuuauauuuccuuuau

SEQ ID NO: 3430785 - RNA, 15 nt, Human
auauuuuuaucuaua

SEQ ID NO: 3430786 - RNA, 16 nt, Human
auauuuuuaucuauau

SEQ ID NO: 3430787 - RNA, 12 nt, Human
auauuuuucaca

SEQ ID NO: 3430788 - RNA, 15 nt, Human
auauuuuucacauau

SEQ ID NO: 3430789 - RNA, 11 nt, Human
caaagccagaa

SEQ ID NO: 3430790 - RNA, 20 nt, Human
caaagccagcguccuccucu

SEQ ID NO: 3430791 - RNA, 22 nt, Human
caaagccagcguccuccucugu

SEQ ID NO: 3430792 - RNA, 14 nt, Human
caaagccagggucu

SEQ ID NO: 3430793 - RNA, 15 nt, Human
caaagccagggucuc

SEQ ID NO: 3430794 - RNA, 22 nt, Human
caaagccagggucucucccuca

SEQ ID NO: 3430795 - RNA, 18 nt, Human
caaagccaggucccucuc

SEQ ID NO: 3430796 - RNA, 21 nt, Human
caaagccaggucccucucauu

SEQ ID NO: 3430797 - RNA, 13 nt, Human
caaagcccagcuu

SEQ ID NO: 3430798 - RNA, 16 nt, Human
caaagccccaugcugg

SEQ ID NO: 3430799 - RNA, 18 nt, Human
caaagcccccagagccca

SEQ ID NO: 3430800 - RNA, 19 nt, Human
caaagcccccagagcccag

SEQ ID NO: 3430801 - RNA, 22 nt, Human
caaagcccccagagcccaggcu

SEQ ID NO: 3430802 - RNA, 22 nt, Human
caaagccuguucauggcagaug

SEQ ID NO: 3430803 - RNA, 18 nt, Human
caaagccuuaucaagugu

SEQ ID NO: 3430804 - RNA, 21 nt, Human
caaagccuugugucuacagag

SEQ ID NO: 3430805 - RNA, 23 nt, Human
caaagccuugugucuacagagaa

SEQ ID NO: 3430806 - RNA, 16 nt, Human
caaagcggggggaggg

SEQ ID NO: 3430807 - RNA, 17 nt, Human
caaagcuaggccuggcc

SEQ ID NO: 3430808 - RNA, 19 nt, Human
caaagcuaggccuggccag

SEQ ID NO: 3430809 - RNA, 18 nt, Human
caaagcucaaauaaaaau

SEQ ID NO: 3430810 - RNA, 23 nt, Human
caaagcucuauuaagauuuccaa

SEQ ID NO: 3430811 - RNA, 19 nt, Human
caaagcucuguggccacau

SEQ ID NO: 3430812 - RNA, 22 nt, Human
caaagcugagccugcagggaag

SEQ ID NO: 3430813 - RNA, 15 nt, Human
caaagcugcccacug

SEQ ID NO: 3430814 - RNA, 20 nt, Human
caaagcugcccacuguuucu

SEQ ID NO: 3430815 - RNA, 17 nt, Human
caaagcugcuaaaucuc

SEQ ID NO: 3430816 - RNA, 16 nt, Human
caaagcuguuaaacug

SEQ ID NO: 3430817 - RNA, 19 nt, Human
caaagcuguuaaacuguua

SEQ ID NO: 3430818 - RNA, 17 nt, Human
caaagcuguucuuccug

SEQ ID NO: 3430819 - RNA, 16 nt, Human
caaagcuuccauucca

SEQ ID NO: 3430820 - RNA, 20 nt, Human
caaagcuuccauuccacauc

SEQ ID NO: 3430821 - RNA, 19 nt, Human
caaagcuuggaagagccug

SEQ ID NO: 3430822 - RNA, 21 nt, Human
caaagcuuggaagagccugca

SEQ ID NO: 3430823 - RNA, 22 nt, Human
caaagcuuuccugccccaggcc

SEQ ID NO: 3430824 - RNA, 15 nt, Human
caaagcuuuccugga

SEQ ID NO: 3430825 - RNA, 17 nt, Human
caaagcuuuugcauauu

SEQ ID NO: 3430826 - RNA, 14 nt, Human
caaagcuuuuugaa

SEQ ID NO: 3430827 - RNA, 20 nt, Human
caaagcuuuuugaaaaccaa

SEQ ID NO: 3430828 - RNA, 18 nt, Human
caaaggaaaaagcacaag

SEQ ID NO: 3430829 - RNA, 23 nt, Human
caaaggaagcuuucucugcuuca

SEQ ID NO: 3430830 - RNA, 16 nt, Human
caaaggaccucagcug

SEQ ID NO: 3430831 - RNA, 18 nt, Human
caaaggacuugacuugca

SEQ ID NO: 3430832 - RNA, 16 nt, Human
caaaggagccugugaa

SEQ ID NO: 3430833 - RNA, 23 nt, Human
caaaggagccugugaacccagga

SEQ ID NO: 3430834 - RNA, 19 nt, Human
caaaggagcucgaaggaua

SEQ ID NO: 3430835 - RNA, 16 nt, Human
caaaggaguagaaaga

SEQ ID NO: 3430836 - RNA, 13 nt, Human
caaaggauacugu

SEQ ID NO: 3430837 - RNA, 17 nt, Human
caaaggaugugauauau

SEQ ID NO: 3430838 - RNA, 21 nt, Human
caaaggaugugauauauaagu

SEQ ID NO: 3430839 - RNA, 20 nt, Human
caaaggauuaauugcugcaa

SEQ ID NO: 3430840 - RNA, 23 nt, Human
caaaggcacauggaauauauuuu

SEQ ID NO: 3430841 - RNA, 13 nt, Human
caaaggccaaacu

SEQ ID NO: 3430842 - RNA, 16 nt, Human
caaaggccaaacugcu

SEQ ID NO: 3430843 - RNA, 18 nt, Human
caaaggccagaccugcag

SEQ ID NO: 3430844 - RNA, 22 nt, Human
caaaggccagaccugcagacgc

SEQ ID NO: 3430845 - RNA, 19 nt, Human
caaaggccauggagagcug

SEQ ID NO: 3430846 - RNA, 21 nt, Human
caaaggccauggagagcugga

SEQ ID NO: 3430847 - RNA, 23 nt, Human
caaaggccuaauucuaugccugu

SEQ ID NO: 3430848 - RNA, 23 nt, Human
caaaggcgcagugcuucucuaca

SEQ ID NO: 3430849 - RNA, 14 nt, Human
caaaggcugagaac

SEQ ID NO: 3430850 - RNA, 23 nt, Human
caaaggcugagaacacugugaaa

SEQ ID NO: 3430851 - RNA, 15 nt, Human
caaaggcugguggca

SEQ ID NO: 3430852 - RNA, 15 nt, Human
caaaggcuuugcccu

SEQ ID NO: 3430853 - RNA, 21 nt, Human
caaagggcacagcaucuguag

SEQ ID NO: 3430854 - RNA, 12 nt, Human
caaagggccagg

SEQ ID NO: 3430855 - RNA, 12 nt, Human
caaagggcccag

SEQ ID NO: 3430856 - RNA, 14 nt, Human
caaagggcccagau

SEQ ID NO: 3430857 - RNA, 21 nt, Human
caaagggccugcccagacaag

SEQ ID NO: 3430858 - RNA, 17 nt, Human
caaaggggaaagaacau

SEQ ID NO: 3430859 - RNA, 19 nt, Human
caaaggggaucauaaaguu

SEQ ID NO: 3430860 - RNA, 22 nt, Human
caaagggggaggagaagaaaau

SEQ ID NO: 3430861 - RNA, 17 nt, Human
caaaggguccagaagga

SEQ ID NO: 3430862 - RNA, 18 nt, Human
caaagggugaaaauuauu

SEQ ID NO: 3430863 - RNA, 14 nt, Human
caaagguauaauuu

SEQ ID NO: 3430864 - RNA, 13 nt, Human
caaaggugaagga

SEQ ID NO: 3430865 - RNA, 18 nt, Human
caaaggugaaggaauaua

SEQ ID NO: 3430866 - RNA, 19 nt, Human
caaaggugaaggaauauau

SEQ ID NO: 3430867 - RNA, 12 nt, Human
caaagguucuag

SEQ ID NO: 3430868 - RNA, 23 nt, Human
caaagguuuaaaugaacaagaga

SEQ ID NO: 3430869 - RNA, 21 nt, Human
caaaguaaaacuugcugccug

SEQ ID NO: 3430870 - RNA, 20 nt, Human
caaaguacaauguguuuuuc

SEQ ID NO: 3430871 - RNA, 16 nt, Human
caaaguacacuguuuc

SEQ ID NO: 3430872 - RNA, 17 nt, Human
caaaguacagguacuuu

SEQ ID NO: 3430873 - RNA, 21 nt, Human
caaaguacagguacuuugucu

SEQ ID NO: 3430874 - RNA, 11 nt, Human
caaaguacugu

SEQ ID NO: 3430875 - RNA, 12 nt, Human
caaaguacugua

SEQ ID NO: 3430876 - RNA, 13 nt, Human
caaaguacuguaa

SEQ ID NO: 3430877 - RNA, 20 nt, Human
caaaguauaaauuuguguaa

SEQ ID NO: 3430878 - RNA, 13 nt, Human
caaaguauaacca

SEQ ID NO: 3430879 - RNA, 23 nt, Human
caaaguaugugguuuuguaauuu

SEQ ID NO: 3430880 - RNA, 15 nt, Human
caaaguauuaagcau

SEQ ID NO: 3430881 - RNA, 21 nt, Human
caaaguauuaagcauauauuu

SEQ ID NO: 3430882 - RNA, 18 nt, Human
caaaguauuguaaauuau

SEQ ID NO: 3430883 - RNA, 22 nt, Human
caaaguauuguaaauuauauuu

SEQ ID NO: 3430884 - RNA, 22 nt, Human
caaagucaggaaucaucaggaa

SEQ ID NO: 3430885 - RNA, 23 nt, Human
caaagucauaauugcauugacuu

SEQ ID NO: 3430886 - RNA, 18 nt, Human
caaagucaugauguuuuu

SEQ ID NO: 3430887 - RNA, 20 nt, Human
caaagucaugcaaaggcugg

SEQ ID NO: 3430888 - RNA, 14 nt, Human
caaaguccuuuuuu

SEQ ID NO: 3430889 - RNA, 17 nt, Human
caaaguccuuuuuuucc

SEQ ID NO: 3430890 - RNA, 16 nt, Human
caaagucuaaaguuua

SEQ ID NO: 3430891 - RNA, 17 nt, Human
caaagucuaaaguuuac

SEQ ID NO: 3430892 - RNA, 14 nt, Human
caaagucuccagcc

SEQ ID NO: 3430893 - RNA, 20 nt, Human
caaagucugcucucauauaa

SEQ ID NO: 3430894 - RNA, 13 nt, Human
caaagucugugug

SEQ ID NO: 3430895 - RNA, 20 nt, Human
caaagucuuaaaauaacuua

SEQ ID NO: 3430896 - RNA, 22 nt, Human
caaagucuuaaaauaacuuaua

SEQ ID NO: 3430897 - RNA, 19 nt, Human
caaacaguagguuggcagu

SEQ ID NO: 3430898 - RNA, 16 nt, Human
caaacagucucaggaa

SEQ ID NO: 3430899 - RNA, 22 nt, Human
caaacaugaaguguguuuccuu

SEQ ID NO: 3430900 - RNA, 19 nt, Human
caaacaugagguucucucu

SEQ ID NO: 3430901 - RNA, 20 nt, Human
caaacaugggguuggcuggg

SEQ ID NO: 3430902 - RNA, 13 nt, Human
caaacauguauuu

SEQ ID NO: 3430903 - RNA, 19 nt, Human
caaacauuaauguugauuu

SEQ ID NO: 3430904 - RNA, 20 nt, Human
caaacauuaauguugauuuc

SEQ ID NO: 3430905 - RNA, 16 nt, Human
caaacauuaguacuuu

SEQ ID NO: 3430906 - RNA, 17 nt, Human
caaacauuaguacuuua

SEQ ID NO: 3430907 - RNA, 11 nt, Human
caaacauugug

SEQ ID NO: 3430908 - RNA, 18 nt, Human
caaacauuguguugacau

SEQ ID NO: 3430909 - RNA, 19 nt, Human
caaacauuguguugacauu

SEQ ID NO: 3430910 - RNA, 19 nt, Human
caaacauuuucucuuagaa

SEQ ID NO: 3430911 - RNA, 20 nt, Human
caaacauuuucucuuagaaa

SEQ ID NO: 3430912 - RNA, 15 nt, Human
caaacauuuugaaag

SEQ ID NO: 3430913 - RNA, 20 nt, Human
caaacauuuugaaagucugu

SEQ ID NO: 3430914 - RNA, 17 nt, Human
caaaccaaaucacugaa

SEQ ID NO: 3430915 - RNA, 14 nt, Human
caaaccacaacuga

SEQ ID NO: 3430916 - RNA, 15 nt, Human
caaaccacaacugac

SEQ ID NO: 3430917 - RNA, 14 nt, Human
caaaccacacugga

SEQ ID NO: 3430918 - RNA, 15 nt, Human
caaaccacacuggac

SEQ ID NO: 3430919 - RNA, 22 nt, Human
caaaccaccagaagcccagaau

SEQ ID NO: 3430920 - RNA, 14 nt, Human
caaaccaggacccu

SEQ ID NO: 3430921 - RNA, 16 nt, Human
caaaccaucauugaaa

SEQ ID NO: 3430922 - RNA, 17 nt, Human
caaaccaucauugaaau

SEQ ID NO: 3430923 - RNA, 19 nt, Human
caaaccaucauugaaaucu

SEQ ID NO: 3430924 - RNA, 20 nt, Human
caaacccagacggcuccacu

SEQ ID NO: 3430925 - RNA, 17 nt, Human
caaaccccacccuaguu

SEQ ID NO: 3430926 - RNA, 19 nt, Human
caaacccccauucuguccu

SEQ ID NO: 3430927 - RNA, 16 nt, Human
caaacccccuuugugc

SEQ ID NO: 3430928 - RNA, 18 nt, Human
caaaccccgaccaccugc

SEQ ID NO: 3430929 - RNA, 21 nt, Human
caaaccccgaccaccugccca

SEQ ID NO: 3430930 - RNA, 20 nt, Human
caaacccuagccuugcuugu

SEQ ID NO: 3430931 - RNA, 21 nt, Human
caaacccugucaaacauuagu

SEQ ID NO: 3430932 - RNA, 23 nt, Human
caaaccgccagcgaacuugacaa

SEQ ID NO: 3430933 - RNA, 15 nt, Human
caaaccuaauugcac

SEQ ID NO: 3430934 - RNA, 13 nt, Human
caaaccucaccaa

SEQ ID NO: 3430935 - RNA, 21 nt, Human
caaaccuccaaaacuccugcc

SEQ ID NO: 3430936 - RNA, 15 nt, Human
caaaccuccucuucu

SEQ ID NO: 3430937 - RNA, 14 nt, Human
caaaccucuguuca

SEQ ID NO: 3430938 - RNA, 15 nt, Human
caaaccucuguucag

SEQ ID NO: 3430939 - RNA, 19 nt, Human
caaaccugaccccugcuca

SEQ ID NO: 3430940 - RNA, 16 nt, Human
caaaccugccuggguu

SEQ ID NO: 3430941 - RNA, 17 nt, Human
caaaccuuaucuccaca

SEQ ID NO: 3430942 - RNA, 21 nt, Human
caaaccuuaucuccacaaccu

SEQ ID NO: 3430943 - RNA, 15 nt, Human
caaaccuuuaacuaa

SEQ ID NO: 3430944 - RNA, 20 nt, Human
caaaccuuuauuuuagaauu

SEQ ID NO: 3430945 - RNA, 14 nt, Human
caaaccuuugagua

SEQ ID NO: 3430946 - RNA, 15 nt, Human
caaaccuuugaguag

SEQ ID NO: 3430947 - RNA, 23 nt, Human
caaacgcccuuuccuccucaggc

SEQ ID NO: 3430948 - RNA, 13 nt, Human
caaacgcuaaaga

SEQ ID NO: 3430949 - RNA, 22 nt, Human
caaacgcuaaagagcccuugcc

SEQ ID NO: 3430950 - RNA, 23 nt, Human
caaacgcuaaagagcccuugccu

SEQ ID NO: 3430951 - RNA, 12 nt, Human
caaacgcugccu

SEQ ID NO: 3430952 - RNA, 13 nt, Human
caaacgcugccug

SEQ ID NO: 3430953 - RNA, 14 nt, Human
caaacgguacacag

SEQ ID NO: 3430954 - RNA, 14 nt, Human
caaacguauguaaa

SEQ ID NO: 3430955 - RNA, 20 nt, Human
caaacuaacaggcuuaguga

SEQ ID NO: 3430956 - RNA, 18 nt, Human
caaacuaaggugcuaaau

SEQ ID NO: 3430957 - RNA, 20 nt, Human
caaacuacagaccugcuuuu

SEQ ID NO: 3430958 - RNA, 22 nt, Human
caaacuacagaccugcuuuuug

SEQ ID NO: 3430959 - RNA, 16 nt, Human
caaacuacugaaugaa

SEQ ID NO: 3430960 - RNA, 23 nt, Human
caaacuacugaaugaagcaguau

SEQ ID NO: 3430961 - RNA, 14 nt, Human
caaacuacuugauu

SEQ ID NO: 3430962 - RNA, 16 nt, Human
caaacuacuugauuuu

SEQ ID NO: 3430963 - RNA, 13 nt, Human
caaacuagggcca

SEQ ID NO: 3430964 - RNA, 14 nt, Human
caaacuauuucuua

SEQ ID NO: 3430965 - RNA, 23 nt, Human
caaacucaaugcuuuauuuguaa

SEQ ID NO: 3430966 - RNA, 14 nt, Human
caaacucagccuca

SEQ ID NO: 3430967 - RNA, 23 nt, Human
caaacucauaacagucuuacugc

SEQ ID NO: 3430968 - RNA, 18 nt, Human
caaacuccugaccucagg

SEQ ID NO: 3430969 - RNA, 13 nt, Human
caaacucugcugu

SEQ ID NO: 3430970 - RNA, 16 nt, Human
caaacugaaaagcuga

SEQ ID NO: 3430971 - RNA, 22 nt, Human
caaacugaaugaaacccccaca

SEQ ID NO: 3430972 - RNA, 16 nt, Human
caaacugacucuuaag

SEQ ID NO: 3430973 - RNA, 17 nt, Human
caaacugacucuuaaga

SEQ ID NO: 3430974 - RNA, 21 nt, Human
caaacugacucuuaagaagac

SEQ ID NO: 3430975 - RNA, 13 nt, Human
caaacugcaauag

SEQ ID NO: 3430976 - RNA, 20 nt, Human
caaacugcaauagagacugu

SEQ ID NO: 3430977 - RNA, 14 nt, Human
caaacugcacauga

SEQ ID NO: 3430978 - RNA, 13 nt, Human
caaacugcaugcc

SEQ ID NO: 3430979 - RNA, 14 nt, Human
caaacugcaugccc

SEQ ID NO: 3430980 - RNA, 16 nt, Human
caaacugcaugcccag

SEQ ID NO: 3430981 - RNA, 18 nt, Human
caaacugcaugcccagag

SEQ ID NO: 3430982 - RNA, 17 nt, Human
caaacugccuaagcccu

SEQ ID NO: 3430983 - RNA, 22 nt, Human
caaacugcuggacgucuuucuu

SEQ ID NO: 3430984 - RNA, 21 nt, Human
caaacugcuucccuuacuuug

SEQ ID NO: 3430985 - RNA, 17 nt, Human
caaacuggagucuggag

SEQ ID NO: 3430986 - RNA, 16 nt, Human
caaacugggaaccccu

SEQ ID NO: 3430987 - RNA, 22 nt, Human
caaacugggaaccccuuuccca

SEQ ID NO: 3430988 - RNA, 16 nt, Human
caaacuggggccucca

SEQ ID NO: 3430989 - RNA, 21 nt, Human
caaacuggggccuccagaacu

SEQ ID NO: 3430990 - RNA, 19 nt, Human
caaacugguauucuguucu

SEQ ID NO: 3430991 - RNA, 16 nt, Human
caaacugguuauuuaa

SEQ ID NO: 3430992 - RNA, 12 nt, Human
caaacuguaaaa

SEQ ID NO: 3430993 - RNA, 20 nt, Human
caaacuguaaauaaaaagaa

SEQ ID NO: 3430994 - RNA, 14 nt, Human
auccaaaagaaaaa

SEQ ID NO: 3430995 - RNA, 15 nt, Human
auccaaaagaaaaac

SEQ ID NO: 3430996 - RNA, 19 nt, Human
auccaaaauguguauuucu

SEQ ID NO: 3430997 - RNA, 19 nt, Human
auccaaaguccccauucag

SEQ ID NO: 3430998 - RNA, 16 nt, Human
auccaacuccagcaac

SEQ ID NO: 3430999 - RNA, 18 nt, Human
auccaagcaaaugugaau

SEQ ID NO: 3431000 - RNA, 12 nt, Human
auccaagccucc

SEQ ID NO: 3431001 - RNA, 23 nt, Human
auccaagcuuuuuuaaaguaaaa

SEQ ID NO: 3431002 - RNA, 14 nt, Human
auccaaggagaaac

SEQ ID NO: 3431003 - RNA, 12 nt, Human
auccaaguggcc

SEQ ID NO: 3431004 - RNA, 14 nt, Human
auccaaguuaaaug

SEQ ID NO: 3431005 - RNA, 16 nt, Human
auccaaguuaaaugua

SEQ ID NO: 3431006 - RNA, 21 nt, Human
auccaaguuaaauguagaguu

SEQ ID NO: 3431007 - RNA, 24 nt, Human
auccaauauuuucuuuaaugcuuu

SEQ ID NO: 3431008 - RNA, 13 nt, Human
auccaaucaaucu

SEQ ID NO: 3431009 - RNA, 18 nt, Human
auccaaucaaucuugcau

SEQ ID NO: 3431010 - RNA, 14 nt, Human
auccaauccucacu

SEQ ID NO: 3431011 - RNA, 20 nt, Human
auccaaucuaaccacaucaa

SEQ ID NO: 3431012 - RNA, 22 nt, Human
auccaaugcucaagaaacaacu

SEQ ID NO: 3431013 - RNA, 20 nt, Human
auccaauggguuuuucccug

SEQ ID NO: 3431014 - RNA, 12 nt, Human
auccaauguuag

SEQ ID NO: 3431015 - RNA, 23 nt, Human
auccaauguuagagacuuuuuuc

SEQ ID NO: 3431016 - RNA, 22 nt, Human
auccaauuagcuuauguuaacu

SEQ ID NO: 3431017 - RNA, 15 nt, Human
auccacacacagagg

SEQ ID NO: 3431018 - RNA, 13 nt, Human
auccacagagagu

SEQ ID NO: 3431019 - RNA, 15 nt, Human
auccacaugaaaaua

SEQ ID NO: 3431020 - RNA, 18 nt, Human
auccacauguuucagagc

SEQ ID NO: 3431021 - RNA, 13 nt, Human
auccacauuguuu

SEQ ID NO: 3431022 - RNA, 14 nt, Human
auccaccaccuccc

SEQ ID NO: 3431023 - RNA, 16 nt, Human
auccacccauauguua

SEQ ID NO: 3431024 - RNA, 23 nt, Human
auccaccccaauccucccagaaa

SEQ ID NO: 3431025 - RNA, 20 nt, Human
auccacccgccucagccucc

SEQ ID NO: 3431026 - RNA, 15 nt, Human
auccaccuccuucuc

SEQ ID NO: 3431027 - RNA, 16 nt, Human
auccacucccaggcag

SEQ ID NO: 3431028 - RNA, 19 nt, Human
auccacucuacccucccac

SEQ ID NO: 3431029 - RNA, 23 nt, Human
auccacucuacccucccaccccc

SEQ ID NO: 3431030 - RNA, 18 nt, Human
auccacucugcaggaaau

SEQ ID NO: 3431031 - RNA, 19 nt, Human
auccacucugccugcuuac

SEQ ID NO: 3431032 - RNA, 23 nt, Human
auccacuuuaucuugaauaaugu

SEQ ID NO: 3431033 - RNA, 12 nt, Human
auccacuuugca

SEQ ID NO: 3431034 - RNA, 18 nt, Human
auccagaaaacugugauu

SEQ ID NO: 3431035 - RNA, 15 nt, Human
auccagaaagaaaaa

SEQ ID NO: 3431036 - RNA, 18 nt, Human
auccagaaagaaaacuug

SEQ ID NO: 3431037 - RNA, 18 nt, Human
auccagacaucaugaauu

SEQ ID NO: 3431038 - RNA, 21 nt, Human
auccagacaucaugaauuuua

SEQ ID NO: 3431039 - RNA, 16 nt, Human
auccagacucagagcu

SEQ ID NO: 3431040 - RNA, 22 nt, Human
auccagaguuuagaggaaaaaa

SEQ ID NO: 3431041 - RNA, 23 nt, Human
auccccucuccccccccccucca

SEQ ID NO: 3431042 - RNA, 18 nt, Human
auccccuggacugggagg

SEQ ID NO: 3431043 - RNA, 18 nt, Human
auccccuuccuaccaccc

SEQ ID NO: 3431044 - RNA, 21 nt, Human
auccccuucucaucacucccc

SEQ ID NO: 3431045 - RNA, 20 nt, Human
auccccuucuccccugcacu

SEQ ID NO: 3431046 - RNA, 21 nt, Human
auccccuucuccccugcacug

SEQ ID NO: 3431047 - RNA, 22 nt, Human
auccccuucuccccugcacugu

SEQ ID NO: 3431048 - RNA, 23 nt, Human
auccccuucuccccugcacugua

SEQ ID NO: 3431049 - RNA, 16 nt, Human
auccccuugaacucuu

SEQ ID NO: 3431050 - RNA, 21 nt, Human
auccccuugaggucucagccc

SEQ ID NO: 3431051 - RNA, 22 nt, Human
auccccuugaggucucagcccc

SEQ ID NO: 3431052 - RNA, 13 nt, Human
aucccgagucugg

SEQ ID NO: 3431053 - RNA, 16 nt, Human
aucccgagucugggac

SEQ ID NO: 3431054 - RNA, 17 nt, Human
aucccgcucuuuuccua

SEQ ID NO: 3431055 - RNA, 15 nt, Human
aucccggaggaaauc

SEQ ID NO: 3431056 - RNA, 20 nt, Human
aucccgugcaaaacaugcua

SEQ ID NO: 3431057 - RNA, 13 nt, Human
aucccguguucuc

SEQ ID NO: 3431058 - RNA, 16 nt, Human
aucccuaaugcugcag

SEQ ID NO: 3431059 - RNA, 22 nt, Human
aucccuacccccuaagagccau

SEQ ID NO: 3431060 - RNA, 15 nt, Human
aucccuacuguaauu

SEQ ID NO: 3431061 - RNA, 22 nt, Human
aucccuagacuuuaggcuuuca

SEQ ID NO: 3431062 - RNA, 22 nt, Human
aucccuaggucuugggagcucu

SEQ ID NO: 3431063 - RNA, 21 nt, Human
aucccuagucuucaagcagau

SEQ ID NO: 3431064 - RNA, 14 nt, Human
aucccuaugcugcc

SEQ ID NO: 3431065 - RNA, 16 nt, Human
aucccucaccuucuga

SEQ ID NO: 3431066 - RNA, 16 nt, Human
aucccuccccaguuca

SEQ ID NO: 3431067 - RNA, 13 nt, Human
aucccucccucca

SEQ ID NO: 3431068 - RNA, 14 nt, Human
aucccucccuccac

SEQ ID NO: 3431069 - RNA, 16 nt, Human
aucccucccuccaccu

SEQ ID NO: 3431070 - RNA, 17 nt, Human
aucccucccuccaccuc

SEQ ID NO: 3431071 - RNA, 23 nt, Human
aucccucccuccaccucccugca

SEQ ID NO: 3431072 - RNA, 13 nt, Human
aucccuccuguug

SEQ ID NO: 3431073 - RNA, 15 nt, Human
aucccuccuuaagag

SEQ ID NO: 3431074 - RNA, 20 nt, Human
aucccucgauauuuuuaaag

SEQ ID NO: 3431075 - RNA, 21 nt, Human
aucccucuacagagcuucccu

SEQ ID NO: 3431076 - RNA, 14 nt, Human
aucccucucuggau

SEQ ID NO: 3431077 - RNA, 20 nt, Human
aucccugaaucccccuugcc

SEQ ID NO: 3431078 - RNA, 20 nt, Human
aucccugaggcuggacucca

SEQ ID NO: 3431079 - RNA, 15 nt, Human
aucccugaucccuuc

SEQ ID NO: 3431080 - RNA, 14 nt, Human
aucccugccagcuc

SEQ ID NO: 3431081 - RNA, 12 nt, Human
aucccugcucac

SEQ ID NO: 3431082 - RNA, 15 nt, Human
aucccugcucacugc

SEQ ID NO: 3431083 - RNA, 11 nt, Human
aucccuggccc

SEQ ID NO: 3431084 - RNA, 16 nt, Human
aucccugggccugcug

SEQ ID NO: 3431085 - RNA, 12 nt, Human
aucccugugagg

SEQ ID NO: 3431086 - RNA, 12 nt, Human
aucccuguucau

SEQ ID NO: 3431087 - RNA, 17 nt, Human
aucccuguuuaauauuu

SEQ ID NO: 3431088 - RNA, 20 nt, Human
aucccuguuuaauauuuaaa

SEQ ID NO: 3431089 - RNA, 21 nt, Human
aucccuuccuuuuagccuagu

SEQ ID NO: 3431090 - RNA, 16 nt, Human
aucccuucucacagca

SEQ ID NO: 3431091 - RNA, 22 nt, Human
aucccuugaccaggccugggcc

SEQ ID NO: 3431092 - RNA, 17 nt, Human
aucccuuggacauuuua

SEQ ID NO: 3431093 - RNA, 13 nt, Human
aucccuuuauuac

SEQ ID NO: 3431094 - RNA, 22 nt, Human
aucccuuuauuacccccuccuu

SEQ ID NO: 3431095 - RNA, 14 nt, Human
aucccuuuucuuga

SEQ ID NO: 3431096 - RNA, 15 nt, Human
aucccuuuuucaaug

SEQ ID NO: 3431097 - RNA, 22 nt, Human
aucccuuuuucauaaauuauuu

SEQ ID NO: 3431098 - RNA, 19 nt, Human
auccgaaccuccucuguga

SEQ ID NO: 3431099 - RNA, 13 nt, Human
auccgccagggcc

SEQ ID NO: 3431100 - RNA, 15 nt, Human
auccgccagggccca

SEQ ID NO: 3431101 - RNA, 16 nt, Human
auccgcccgccucggc

SEQ ID NO: 3431102 - RNA, 15 nt, Human
auccgcgugugccug

SEQ ID NO: 3431103 - RNA, 16 nt, Human
auccgcgugugccugu

SEQ ID NO: 3431104 - RNA, 13 nt, Human
auccgcucucuuc

SEQ ID NO: 3431105 - RNA, 17 nt, Human
auccggggccagcuccg

SEQ ID NO: 3431106 - RNA, 16 nt, Human
auccguaguucccuga

SEQ ID NO: 3431107 - RNA, 20 nt, Human
auccgugccucuuuuuaaag

SEQ ID NO: 3431108 - RNA, 23 nt, Human
auccguguugcagguucauggau

SEQ ID NO: 3431109 - RNA, 19 nt, Human
auccuaaaacaaaagcuca

SEQ ID NO: 3431110 - RNA, 23 nt, Human
auccuaaaacaaaagcucaucca

SEQ ID NO: 3431111 - RNA, 13 nt, Human
auccuaaagaaca

SEQ ID NO: 3431112 - RNA, 14 nt, Human
auccuaagaaauau

SEQ ID NO: 3431113 - RNA, 12 nt, Human
auccuaagcuau

SEQ ID NO: 3431114 - RNA, 22 nt, Human
auccuaagggucgaaagcucua

SEQ ID NO: 3431115 - RNA, 15 nt, Human
auccuaauaaaaagg

SEQ ID NO: 3431116 - RNA, 18 nt, Human
auccuaauaaaaagguga

SEQ ID NO: 3431117 - RNA, 21 nt, Human
auccuaaugacuucuaaaaau

SEQ ID NO: 3431118 - RNA, 16 nt, Human
auccuaauuucuccuc

SEQ ID NO: 3431119 - RNA, 19 nt, Human
auccuaauuucuccucccu

SEQ ID NO: 3431120 - RNA, 23 nt, Human
auccuaauuucuccucccuuccu

SEQ ID NO: 3431121 - RNA, 18 nt, Human
auccuacaagacacagug

SEQ ID NO: 3431122 - RNA, 14 nt, Human
auccuaccaaccuc

SEQ ID NO: 3431123 - RNA, 15 nt, Human
auccuaccaaccucu

SEQ ID NO: 3431124 - RNA, 21 nt, Human
auccuaccacaaugcagugcc

SEQ ID NO: 3431125 - RNA, 14 nt, Human
auccuacccccugu

SEQ ID NO: 3431126 - RNA, 23 nt, Human
auccuagagauuugguguacaau

SEQ ID NO: 3431127 - RNA, 16 nt, Human
auccuagauccuaagg

SEQ ID NO: 3431128 - RNA, 15 nt, Human
auccuagcugugugc

SEQ ID NO: 3431129 - RNA, 16 nt, Human
auccuaggcugacacc

SEQ ID NO: 3431130 - RNA, 13 nt, Human
auccuagggccug

SEQ ID NO: 3431131 - RNA, 20 nt, Human
auccuagucauucuucccua

SEQ ID NO: 3431132 - RNA, 13 nt, Human
auccuaguuccac

SEQ ID NO: 3431133 - RNA, 15 nt, Human
auccuaguuccacca

SEQ ID NO: 3431134 - RNA, 18 nt, Human
auccuauauagaaugcug

SEQ ID NO: 3431135 - RNA, 16 nt, Human
auccuaucucuccaac

SEQ ID NO: 3431136 - RNA, 21 nt, Human
auccuaugcaugguuucagca

SEQ ID NO: 3431137 - RNA, 17 nt, Human
auccuaugugauuuuaa

SEQ ID NO: 3431138 - RNA, 20 nt, Human
auccuauguuuuuguucaaa

SEQ ID NO: 3431139 - RNA, 13 nt, Human
auccuauucuuuc

SEQ ID NO: 3431140 - RNA, 19 nt, Human
auccucaaacacugcaggc

SEQ ID NO: 3431141 - RNA, 21 nt, Human
auccucaaacacugcaggcau

SEQ ID NO: 3431142 - RNA, 16 nt, Human
auccucaaagaaagug

SEQ ID NO: 3431143 - RNA, 21 nt, Human
auccucaaagaaaguguauug

SEQ ID NO: 3431144 - RNA, 15 nt, Human
auccucaauccagcu

SEQ ID NO: 3431145 - RNA, 19 nt, Human
auccucaguuuuugugaaa

SEQ ID NO: 3431146 - RNA, 17 nt, Human
auccucauacccacccc

SEQ ID NO: 3431147 - RNA, 22 nt, Human
auccucauacccacccccaccc

SEQ ID NO: 3431148 - RNA, 21 nt, Human
auccucauauggcccaguguc

SEQ ID NO: 3431149 - RNA, 13 nt, Human
auccuccagcagg

SEQ ID NO: 3431150 - RNA, 11 nt, Human
auccuccagcu

SEQ ID NO: 3431151 - RNA, 13 nt, Human
auccuccaggugc

SEQ ID NO: 3431152 - RNA, 15 nt, Human
auccuccagguuuuu

SEQ ID NO: 3431153 - RNA, 20 nt, Human
auccuccagguuuuucaauu

SEQ ID NO: 3431154 - RNA, 15 nt, Human
auccuccccuggacu

SEQ ID NO: 3431155 - RNA, 15 nt, Human
auccucccuguaacu

SEQ ID NO: 3431156 - RNA, 16 nt, Human
auccuccguccagccg

SEQ ID NO: 3431157 - RNA, 21 nt, Human
caagaugggcaucuuuuguau

SEQ ID NO: 3431158 - RNA, 13 nt, Human
caagaugucuguc

SEQ ID NO: 3431159 - RNA, 14 nt, Human
caagauuaaaugua

SEQ ID NO: 3431160 - RNA, 23 nt, Human
caagauucccagagacaggaaaa

SEQ ID NO: 3431161 - RNA, 13 nt, Human
caagauucccagg

SEQ ID NO: 3431162 - RNA, 19 nt, Human
caagauucccaggaguucu

SEQ ID NO: 3431163 - RNA, 18 nt, Human
caagauucuagaugauua

SEQ ID NO: 3431164 - RNA, 17 nt, Human
caagauucugaaacauu

SEQ ID NO: 3431165 - RNA, 16 nt, Human
caagauugagcucucu

SEQ ID NO: 3431166 - RNA, 19 nt, Human
caagauugagcucucugcc

SEQ ID NO: 3431167 - RNA, 16 nt, Human
caagauugcuuaaaau

SEQ ID NO: 3431168 - RNA, 16 nt, Human
caagauugucauuagu

SEQ ID NO: 3431169 - RNA, 15 nt, Human
caagauuguguccca

SEQ ID NO: 3431170 - RNA, 16 nt, Human
caagauuuagaaaaaa

SEQ ID NO: 3431171 - RNA, 16 nt, Human
caagauuuccuugugc

SEQ ID NO: 3431172 - RNA, 18 nt, Human
caagauuuuccacaagau

SEQ ID NO: 3431173 - RNA, 19 nt, Human
caagauuuuccucuuguga

SEQ ID NO: 3431174 - RNA, 16 nt, Human
caagauuuuccuuuuu

SEQ ID NO: 3431175 - RNA, 17 nt, Human
caagauuuuccuuuuuu

SEQ ID NO: 3431176 - RNA, 22 nt, Human
caagauuuuccuuuuuuauaca

SEQ ID NO: 3431177 - RNA, 16 nt, Human
caagauuuuuuaauug

SEQ ID NO: 3431178 - RNA, 14 nt, Human
caagcaaaaucaug

SEQ ID NO: 3431179 - RNA, 23 nt, Human
caagcaaaaucauggaaugguua

SEQ ID NO: 3431180 - RNA, 22 nt, Human
caagcaaccuggguccaaauaa

SEQ ID NO: 3431181 - RNA, 13 nt, Human
caagcaagaaaca

SEQ ID NO: 3431182 - RNA, 15 nt, Human
caagcaauccuccug

SEQ ID NO: 3431183 - RNA, 17 nt, Human
caagcaauccuccugag

SEQ ID NO: 3431184 - RNA, 17 nt, Human
caagcacagcagccugg

SEQ ID NO: 3431185 - RNA, 14 nt, Human
caagcacagucagg

SEQ ID NO: 3431186 - RNA, 13 nt, Human
caagagaagcauu

SEQ ID NO: 3431187 - RNA, 13 nt, Human
caagagacaugcu

SEQ ID NO: 3431188 - RNA, 13 nt, Human
caagagagaaaga

SEQ ID NO: 3431189 - RNA, 14 nt, Human
caagagagaaagaa

SEQ ID NO: 3431190 - RNA, 21 nt, Human
caagagagaaccuaacuguau

SEQ ID NO: 3431191 - RNA, 21 nt, Human
caagagagcagcaaggucuug

SEQ ID NO: 3431192 - RNA, 24 nt, Human
caagagagggccaugcaauucauc

SEQ ID NO: 3431193 - RNA, 16 nt, Human
caagagauaagucuuu

SEQ ID NO: 3431194 - RNA, 18 nt, Human
caagagauauuuugggca

SEQ ID NO: 3431195 - RNA, 14 nt, Human
caagagauugcuaa

SEQ ID NO: 3431196 - RNA, 15 nt, Human
caagagauugcuaau

SEQ ID NO: 3431197 - RNA, 14 nt, Human
caagagcacacuug

SEQ ID NO: 3431198 - RNA, 14 nt, Human
caagagcagccugu

SEQ ID NO: 3431199 - RNA, 16 nt, Human
caagagcagccugugg

SEQ ID NO: 3431200 - RNA, 17 nt, Human
caagagcagccuguggc

SEQ ID NO: 3431201 - RNA, 18 nt, Human
caagagcagccuguggca

SEQ ID NO: 3431202 - RNA, 21 nt, Human
caagagcagccuguggcaucu

SEQ ID NO: 3431203 - RNA, 20 nt, Human
caagagcaucaugccucuga

SEQ ID NO: 3431204 - RNA, 19 nt, Human
caagagcccagcagggccu

SEQ ID NO: 3431205 - RNA, 16 nt, Human
caagagcccaggccuc

SEQ ID NO: 3431206 - RNA, 17 nt, Human
caagagcccccuugaca

SEQ ID NO: 3431207 - RNA, 19 nt, Human
caagagccugaucucuucc

SEQ ID NO: 3431208 - RNA, 23 nt, Human
caagagccugaucucuuccuguu

SEQ ID NO: 3431209 - RNA, 14 nt, Human
caagagccuuaaaa

SEQ ID NO: 3431210 - RNA, 15 nt, Human
caagagccuuaaaac

SEQ ID NO: 3431211 - RNA, 17 nt, Human
caagagccuuaaaacau

SEQ ID NO: 3431212 - RNA, 18 nt, Human
caagagccuuggugucca

SEQ ID NO: 3431213 - RNA, 23 nt, Human
caagagccuugguguccaccugg

SEQ ID NO: 3431214 - RNA, 19 nt, Human
caagagcuacauaauuuag

SEQ ID NO: 3431215 - RNA, 16 nt, Human
caagagcugcccuccu

SEQ ID NO: 3431216 - RNA, 18 nt, Human
caagagcugcccuccuug

SEQ ID NO: 3431217 - RNA, 18 nt, Human
caaucaagucuguuuacu

SEQ ID NO: 3431218 - RNA, 21 nt, Human
caaucaauaaacagcagguga

SEQ ID NO: 3431219 - RNA, 16 nt, Human
caaucaaucuugcaug

SEQ ID NO: 3431220 - RNA, 11 nt, Human
caaucacuguc

SEQ ID NO: 3431221 - RNA, 15 nt, Human
caaucacuguccucc

SEQ ID NO: 3431222 - RNA, 20 nt, Human
caaucagagaccaggcccug

SEQ ID NO: 3431223 - RNA, 13 nt, Human
caaucagcacuga

SEQ ID NO: 3431224 - RNA, 15 nt, Human
caaucagcacugaaa

SEQ ID NO: 3431225 - RNA, 17 nt, Human
caaucagcacugaaaau

SEQ ID NO: 3431226 - RNA, 17 nt, Human
caaucagccuaguugau

SEQ ID NO: 3431227 - RNA, 16 nt, Human
caaucagcuccuuccu

SEQ ID NO: 3431228 - RNA, 11 nt, Human
caaucagcugc

SEQ ID NO: 3431229 - RNA, 13 nt, Human
caaucagcugcuu

SEQ ID NO: 3431230 - RNA, 17 nt, Human
caaucaguagcuuaaga

SEQ ID NO: 3431231 - RNA, 21 nt, Human
caaucaguagcuuaagaaaaa

SEQ ID NO: 3431232 - RNA, 22 nt, Human
caaucaguagcuuaagaaaaaa

SEQ ID NO: 3431233 - RNA, 15 nt, Human
caaucaguauaauuc

SEQ ID NO: 3431234 - RNA, 22 nt, Human
caaucaguccccucccaucugg

SEQ ID NO: 3431235 - RNA, 17 nt, Human
caaucaugaaauaugca

SEQ ID NO: 3431236 - RNA, 18 nt, Human
caaucauugcugaaaaug

SEQ ID NO: 3431237 - RNA, 22 nt, Human
caaucauuguacaguuuguuua

SEQ ID NO: 3431238 - RNA, 19 nt, Human
caaucauuguuuugaauau

SEQ ID NO: 3431239 - RNA, 13 nt, Human
caaucauuucuca

SEQ ID NO: 3431240 - RNA, 17 nt, Human
caaucauuucucacugu

SEQ ID NO: 3431241 - RNA, 18 nt, Human
caaucauuucucacugug

SEQ ID NO: 3431242 - RNA, 17 nt, Human
caaucauuuuaauuauu

SEQ ID NO: 3431243 - RNA, 17 nt, Human
caauccagcgguucuca

SEQ ID NO: 3431244 - RNA, 20 nt, Human
caauccagguacgcacagac

SEQ ID NO: 3431245 - RNA, 23 nt, Human
caauccagguacgcacagacagg

SEQ ID NO: 3431246 - RNA, 17 nt, Human
caauccauaacuuuagu

SEQ ID NO: 3431247 - RNA, 15 nt, Human
caauccauguaaggu

SEQ ID NO: 3431248 - RNA, 12 nt, Human
caaucccagcua

SEQ ID NO: 3431249 - RNA, 17 nt, Human
caaucccagcuaccuca

SEQ ID NO: 3431250 - RNA, 16 nt, Human
caauccccagcccuuu

SEQ ID NO: 3431251 - RNA, 15 nt, Human
caauccccucauuca

SEQ ID NO: 3431252 - RNA, 12 nt, Human
caauccccuccu

SEQ ID NO: 3431253 - RNA, 16 nt, Human
caauccccuccuuggg

SEQ ID NO: 3431254 - RNA, 17 nt, Human
caauccuaacacauuau

SEQ ID NO: 3431255 - RNA, 19 nt, Human
caauccuaauuucuccucc

SEQ ID NO: 3431256 - RNA, 13 nt, Human
caauccuccugag

SEQ ID NO: 3431257 - RNA, 13 nt, Human
caauccucuaagc

SEQ ID NO: 3431258 - RNA, 12 nt, Human
caauccugcccc

SEQ ID NO: 3431259 - RNA, 13 nt, Human
caauccuuacaaa

SEQ ID NO: 3431260 - RNA, 14 nt, Human
caauccuuuauuau

SEQ ID NO: 3431261 - RNA, 15 nt, Human
caaucuaaccacauc

SEQ ID NO: 3431262 - RNA, 14 nt, Human
caaucuauuauuuc

SEQ ID NO: 3431263 - RNA, 13 nt, Human
caaucuauuuauu

SEQ ID NO: 3431264 - RNA, 17 nt, Human
caaucugacauucucag

SEQ ID NO: 3431265 - RNA, 19 nt, Human
caaucuggggaaauaauaa

SEQ ID NO: 3431266 - RNA, 16 nt, Human
caaucuguaaacugug

SEQ ID NO: 3431267 - RNA, 18 nt, Human
caaucuguaaacugugua

SEQ ID NO: 3431268 - RNA, 14 nt, Human
caaucugucaguuc

SEQ ID NO: 3431269 - RNA, 12 nt, Human
caaucugugggc

SEQ ID NO: 3431270 - RNA, 18 nt, Human
caaucuucaauccuugaa

SEQ ID NO: 3431271 - RNA, 21 nt, Human
caaucuuccuguuuaaaaaac

SEQ ID NO: 3431272 - RNA, 15 nt, Human
caaucuuuaaaccaa

SEQ ID NO: 3431273 - RNA, 18 nt, Human
caaucuuuagaaaaggca

SEQ ID NO: 3431274 - RNA, 14 nt, Human
caaucuuugaaaga

SEQ ID NO: 3431275 - RNA, 19 nt, Human
caaucuuugaaagacuucc

SEQ ID NO: 3431276 - RNA, 16 nt, Human
caaucuuuuuuacucu

SEQ ID NO: 3431277 - RNA, 20 nt, Human
caaugaaaagucguuuucca

SEQ ID NO: 3431278 - RNA, 21 nt, Human
caaugaaaugaauuaaagugg

SEQ ID NO: 3431279 - RNA, 23 nt, Human
caaugaaaugaauuaaaguggac

SEQ ID NO: 3431280 - RNA, 17 nt, Human
caaugaacaucccuuuu

SEQ ID NO: 3431281 - RNA, 20 nt, Human
caaugaacccccaugaugua

SEQ ID NO: 3431282 - RNA, 21 nt, Human
caaugaagccagcucacagug

SEQ ID NO: 3431283 - RNA, 20 nt, Human
caaugaaggaaauaaaaaag

SEQ ID NO: 3431284 - RNA, 13 nt, Human
caaugaaguugaa

SEQ ID NO: 3431285 - RNA, 20 nt, Human
caaugaauaaaaacucaagg

SEQ ID NO: 3431286 - RNA, 22 nt, Human
caaugaaugaaugaauggcuaa

SEQ ID NO: 3431287 - RNA, 21 nt, Human
caaugacacagucuuggcuca

SEQ ID NO: 3431288 - RNA, 15 nt, Human
caaugacaucuucaa

SEQ ID NO: 3431289 - RNA, 13 nt, Human
caaugacaugaau

SEQ ID NO: 3431290 - RNA, 14 nt, Human
caaugacaugaauu

SEQ ID NO: 3431291 - RNA, 11 nt, Human
caaugacuacu

SEQ ID NO: 3431292 - RNA, 20 nt, Human
caaugacugugcuacugucu

SEQ ID NO: 3431293 - RNA, 21 nt, Human
caaugacugugcuacugucuu

SEQ ID NO: 3431294 - RNA, 19 nt, Human
caaugagacuugccuuccu

SEQ ID NO: 3431295 - RNA, 13 nt, Human
caaugagagcaua

SEQ ID NO: 3431296 - RNA, 19 nt, Human
caaugagauagaagauguu

SEQ ID NO: 3431297 - RNA, 19 nt, Human
caaugagaucauugugaag

SEQ ID NO: 3431298 - RNA, 14 nt, Human
caaugagcuuucug

SEQ ID NO: 3431299 - RNA, 20 nt, Human
caaugauaguaagaaaagug

SEQ ID NO: 3431300 - RNA, 22 nt, Human
caaugaucuagguuuaacucag

SEQ ID NO: 3431301 - RNA, 21 nt, Human
caaugaugaaugagaaucuac

SEQ ID NO: 3431302 - RNA, 21 nt, Human
caaugauggcaauuuuguaac

SEQ ID NO: 3431303 - RNA, 24 nt, Human
caaugauggcaauuuuguaacgaa

SEQ ID NO: 3431304 - RNA, 14 nt, Human
caaugauguccaga

SEQ ID NO: 3431305 - RNA, 20 nt, Human
caaugauuauuuucauuaca

SEQ ID NO: 3431306 - RNA, 15 nt, Human
caaugauuguuaauu

SEQ ID NO: 3431307 - RNA, 14 nt, Human
caaugcaaaccauc

SEQ ID NO: 3431308 - RNA, 18 nt, Human
caaugcaaaccaucauug

SEQ ID NO: 3431309 - RNA, 22 nt, Human
caaugcaaaccaucauugaaau

SEQ ID NO: 3431310 - RNA, 18 nt, Human
caaugcaagacgcccucu

SEQ ID NO: 3431311 - RNA, 23 nt, Human
caaugcaccuaaagaaaaacaaa

SEQ ID NO: 3431312 - RNA, 17 nt, Human
caaugcacuuuguucug

SEQ ID NO: 3431313 - RNA, 22 nt, Human
caaugcacuuuguucuggcucu

SEQ ID NO: 3431314 - RNA, 13 nt, Human
caaugcagaacuc

SEQ ID NO: 3431315 - RNA, 13 nt, Human
caaugcagcaagg

SEQ ID NO: 3431316 - RNA, 22 nt, Human
caaugcagcaaggcccugcugc

SEQ ID NO: 3431317 - RNA, 20 nt, Human
caaugcaugcagccacugug

SEQ ID NO: 3431318 - RNA, 15 nt, Human
caaugccacagcccu

SEQ ID NO: 3431319 - RNA, 17 nt, Human
caaugccacagcccugu

SEQ ID NO: 3431320 - RNA, 19 nt, Human
caaugccacagcccuguca

SEQ ID NO: 3431321 - RNA, 15 nt, Human
caaugccacauacuu

SEQ ID NO: 3431322 - RNA, 19 nt, Human
caaugccacauacuugcag

SEQ ID NO: 3431323 - RNA, 20 nt, Human
caaugccauccucaaacacu

SEQ ID NO: 3431324 - RNA, 12 nt, Human
caaugccucgac

SEQ ID NO: 3431325 - RNA, 13 nt, Human
caaugcugauguc

SEQ ID NO: 3431326 - RNA, 14 nt, Human
caaugcugauuugg

SEQ ID NO: 3431327 - RNA, 12 nt, Human
caaugcuggcug

SEQ ID NO: 3431328 - RNA, 21 nt, Human
caaugcuggcuguuggcuggg

SEQ ID NO: 3431329 - RNA, 17 nt, Human
caaugcuguauuuuaaa

SEQ ID NO: 3431330 - RNA, 18 nt, Human
caaugcuucuagaguuuu

SEQ ID NO: 3431331 - RNA, 17 nt, Human
aucugggggaguggaau

SEQ ID NO: 3431332 - RNA, 15 nt, Human
aucuggguagcugua

SEQ ID NO: 3431333 - RNA, 17 nt, Human
aucuggguucacugcaa

SEQ ID NO: 3431334 - RNA, 17 nt, Human
aucugguagauuuuuaa

SEQ ID NO: 3431335 - RNA, 20 nt, Human
aucugguagggggaaaaugu

SEQ ID NO: 3431336 - RNA, 18 nt, Human
aucugguauuaaaugcca

SEQ ID NO: 3431337 - RNA, 14 nt, Human
aucugguuuugcua

SEQ ID NO: 3431338 - RNA, 14 nt, Human
aucuguaaacugug

SEQ ID NO: 3431339 - RNA, 17 nt, Human
aucuguaaacuguguau

SEQ ID NO: 3431340 - RNA, 16 nt, Human
aucuguaaaucuacac

SEQ ID NO: 3431341 - RNA, 11 nt, Human
aucuguaacag

SEQ ID NO: 3431342 - RNA, 23 nt, Human
aucuguaacagguauuuuguuuc

SEQ ID NO: 3431343 - RNA, 17 nt, Human
aucuguaagcuguuugg

SEQ ID NO: 3431344 - RNA, 19 nt, Human
aucuguaaguaacuucaca

SEQ ID NO: 3431345 - RNA, 22 nt, Human
aucuguacauuuuguuguaaaa

SEQ ID NO: 3431346 - RNA, 16 nt, Human
aucuguaccucugccu

SEQ ID NO: 3431347 - RNA, 17 nt, Human
aucuguacuucuucgau

SEQ ID NO: 3431348 - RNA, 20 nt, Human
aucuguauaaguaagaaaau

SEQ ID NO: 3431349 - RNA, 24 nt, Human
aucuguauaauacuuuguauacaa

SEQ ID NO: 3431350 - RNA, 17 nt, Human
aucuguauauaaaauau

SEQ ID NO: 3431351 - RNA, 19 nt, Human
aucuguauauaaaauauuu

SEQ ID NO: 3431352 - RNA, 15 nt, Human
aucuguaucucucuc

SEQ ID NO: 3431353 - RNA, 15 nt, Human
aucugucaaaacacu

SEQ ID NO: 3431354 - RNA, 21 nt, Human
aucugucaagaguaguuauau

SEQ ID NO: 3431355 - RNA, 22 nt, Human
aucugucaagaguaguuauaua

SEQ ID NO: 3431356 - RNA, 13 nt, Human
aucuguccaagga

SEQ ID NO: 3431357 - RNA, 14 nt, Human
aucuguccaaggaa

SEQ ID NO: 3431358 - RNA, 15 nt, Human
aucugucccccuuua

SEQ ID NO: 3431359 - RNA, 22 nt, Human
aucugucugccaaccuaaaacu

SEQ ID NO: 3431360 - RNA, 11 nt, Human
aucugucugcu

SEQ ID NO: 3431361 - RNA, 14 nt, Human
aucugucugcuggu

SEQ ID NO: 3431362 - RNA, 17 nt, Human
aucugucuuuccacucu

SEQ ID NO: 3431363 - RNA, 21 nt, Human
aucugucuuuccacucuggau

SEQ ID NO: 3431364 - RNA, 11 nt, Human
aucugugaaau

SEQ ID NO: 3431365 - RNA, 21 nt, Human
aucugugaaaugcuggcauuu

SEQ ID NO: 3431366 - RNA, 19 nt, Human
aucugugaacuugaaauuu

SEQ ID NO: 3431367 - RNA, 21 nt, Human
aucugugaaguaguucuguuu

SEQ ID NO: 3431368 - RNA, 12 nt, Human
aucugugaauaa

SEQ ID NO: 3431369 - RNA, 13 nt, Human
aucugugaauaag

SEQ ID NO: 3431370 - RNA, 16 nt, Human
aucugugaauucagau

SEQ ID NO: 3431371 - RNA, 22 nt, Human
aucugugaggggcucucucaug

SEQ ID NO: 3431372 - RNA, 22 nt, Human
aucugugcaaauccuugauacu

SEQ ID NO: 3431373 - RNA, 13 nt, Human
aucugugccccau

SEQ ID NO: 3431374 - RNA, 15 nt, Human
aucugugccccaugc

SEQ ID NO: 3431375 - RNA, 16 nt, Human
aucugugcuguuucaa

SEQ ID NO: 3431376 - RNA, 21 nt, Human
aucugugcuguuucaaaguuc

SEQ ID NO: 3431377 - RNA, 18 nt, Human
caaugugaacuuuauuaa

SEQ ID NO: 3431378 - RNA, 14 nt, Human
caaugugaaucaga

SEQ ID NO: 3431379 - RNA, 18 nt, Human
caaugugaaucagacccu

SEQ ID NO: 3431380 - RNA, 17 nt, Human
caaugugaccaggggug

SEQ ID NO: 3431381 - RNA, 17 nt, Human
caaugugauaaaacccc

SEQ ID NO: 3431382 - RNA, 13 nt, Human
caaugugcagugu

SEQ ID NO: 3431383 - RNA, 13 nt, Human
caaugugccccca

SEQ ID NO: 3431384 - RNA, 23 nt, Human
caaugugcuacugauuguuucau

SEQ ID NO: 3431385 - RNA, 13 nt, Human
caaugugcucucg

SEQ ID NO: 3431386 - RNA, 21 nt, Human
caauguggccuaaaaaugcaa

SEQ ID NO: 3431387 - RNA, 16 nt, Human
caauguguauaaacaa

SEQ ID NO: 3431388 - RNA, 20 nt, Human
caauguguauaaacaagaaa

SEQ ID NO: 3431389 - RNA, 21 nt, Human
caauguguauaaacaagaaaa

SEQ ID NO: 3431390 - RNA, 15 nt, Human
caauguguauaaauu

SEQ ID NO: 3431391 - RNA, 16 nt, Human
caauguguauaaauug

SEQ ID NO: 3431392 - RNA, 17 nt, Human
caauguguauaaauugu

SEQ ID NO: 3431393 - RNA, 22 nt, Human
caaugugugccgagcccuugcc

SEQ ID NO: 3431394 - RNA, 19 nt, Human
caauguguggcugaagacu

SEQ ID NO: 3431395 - RNA, 15 nt, Human
caauguguguauaug

SEQ ID NO: 3431396 - RNA, 16 nt, Human
caauguguguauaugg

SEQ ID NO: 3431397 - RNA, 20 nt, Human
caauguguugauacauuccc

SEQ ID NO: 3431398 - RNA, 16 nt, Human
caauguguuuuucucc

SEQ ID NO: 3431399 - RNA, 20 nt, Human
caauguuaaauuaauuauaa

SEQ ID NO: 3431400 - RNA, 14 nt, Human
caauguuaaggaaa

SEQ ID NO: 3431401 - RNA, 24 nt, Human
caauguuaaggaaacucuuaucuc

SEQ ID NO: 3431402 - RNA, 15 nt, Human
caauguuagccucaa

SEQ ID NO: 3431403 - RNA, 22 nt, Human
caauguuagccucaauuucuga

SEQ ID NO: 3431404 - RNA, 12 nt, Human
caauguucauug

SEQ ID NO: 3431405 - RNA, 18 nt, Human
caauguucauuguaaugu

SEQ ID NO: 3431406 - RNA, 22 nt, Human
caauguucauuguaauguuacu

SEQ ID NO: 3431407 - RNA, 23 nt, Human
caauguucauuguaauguuacug

SEQ ID NO: 3431408 - RNA, 14 nt, Human
caauguucucucuu

SEQ ID NO: 3431409 - RNA, 14 nt, Human
caauguucuuuaua

SEQ ID NO: 3431410 - RNA, 16 nt, Human
caauguucuuuauaua

SEQ ID NO: 3431411 - RNA, 14 nt, Human
caauguuguagugu

SEQ ID NO: 3431412 - RNA, 17 nt, Human
caauguuguuuuaagac

SEQ ID NO: 3431413 - RNA, 16 nt, Human
caauguuuaaaaaagu

SEQ ID NO: 3431414 - RNA, 20 nt, Human
caauguuuaaaaaaguuuaa

SEQ ID NO: 3431415 - RNA, 21 nt, Human
caauguuuaaaaaaguuuaaa

SEQ ID NO: 3431416 - RNA, 18 nt, Human
caauguuucuuuuaucac

SEQ ID NO: 3431417 - RNA, 18 nt, Human
caauguuuuuaaaaaucu

SEQ ID NO: 3431418 - RNA, 22 nt, Human
caauuaaaaauugucuucaugu

SEQ ID NO: 3431419 - RNA, 12 nt, Human
caauuaaacgga

SEQ ID NO: 3431420 - RNA, 20 nt, Human
caauuaaacggauuauuuuu

SEQ ID NO: 3431421 - RNA, 18 nt, Human
caauuaaagaaauaauuu

SEQ ID NO: 3431422 - RNA, 14 nt, Human
caauuaaaggcaaa

SEQ ID NO: 3431423 - RNA, 12 nt, Human
caauuaaaugua

SEQ ID NO: 3431424 - RNA, 23 nt, Human
caauuaaggauuuuaugcuuuaa

SEQ ID NO: 3431425 - RNA, 15 nt, Human
caauuaauuccuuca

SEQ ID NO: 3431426 - RNA, 18 nt, Human
caauuaauuccuucagca

SEQ ID NO: 3431427 - RNA, 23 nt, Human
caauuaauugcuauuguguuauu

SEQ ID NO: 3431428 - RNA, 19 nt, Human
caauuaauuuuuuuauugu

SEQ ID NO: 3431429 - RNA, 20 nt, Human
caauuaauuuuuuuauuguu

SEQ ID NO: 3431430 - RNA, 15 nt, Human
caauuacauguuugg

SEQ ID NO: 3431431 - RNA, 17 nt, Human
caauuaccagaaagaua

SEQ ID NO: 3431432 - RNA, 23 nt, Human
caauuaggcagacucuuuaugcu

SEQ ID NO: 3431433 - RNA, 18 nt, Human
caauuaguaacauucaug

SEQ ID NO: 3431434 - RNA, 21 nt, Human
caauuauaagaggauaugaac

SEQ ID NO: 3431435 - RNA, 15 nt, Human
caauuauaguuucug

SEQ ID NO: 3431436 - RNA, 23 nt, Human
caauuauaucaguccucuuucaa

SEQ ID NO: 3431437 - RNA, 14 nt, Human
caauuaugaaaaua

SEQ ID NO: 3431438 - RNA, 16 nt, Human
caauuaugaagauuua

SEQ ID NO: 3431439 - RNA, 15 nt, Human
caauuauguuaaacu

SEQ ID NO: 3431440 - RNA, 14 nt, Human
caauuauugauaua

SEQ ID NO: 3431441 - RNA, 20 nt, Human
caauuauugauauauauuau

SEQ ID NO: 3431442 - RNA, 14 nt, Human
caauucaaaaaugu

SEQ ID NO: 3431443 - RNA, 15 nt, Human
caauucaaaaguucc

SEQ ID NO: 3431444 - RNA, 14 nt, Human
caauucaacacucc

SEQ ID NO: 3431445 - RNA, 17 nt, Human
caauucaacccuuugcc

SEQ ID NO: 3431446 - RNA, 13 nt, Human
caauucagacagg

SEQ ID NO: 3431447 - RNA, 14 nt, Human
caauucagacaggc

SEQ ID NO: 3431448 - RNA, 15 nt, Human
caauucagacaggca

SEQ ID NO: 3431449 - RNA, 21 nt, Human
caauucagugcuguacuugau

SEQ ID NO: 3431450 - RNA, 15 nt, Human
caauuccaacaguuu

SEQ ID NO: 3431451 - RNA, 18 nt, Human
caauuccaacaguuuaau

SEQ ID NO: 3431452 - RNA, 18 nt, Human
caauuccaugcuauaaaa

SEQ ID NO: 3431453 - RNA, 18 nt, Human
caauucccaccuaugagu

SEQ ID NO: 3431454 - RNA, 17 nt, Human
caauuccccucugcugc

SEQ ID NO: 3431455 - RNA, 21 nt, Human
caauuccguagccagcugcuc

SEQ ID NO: 3431456 - RNA, 22 nt, Human
caauuccgucuucuuaaucuga

SEQ ID NO: 3431457 - RNA, 14 nt, Human
caauuccucuggga

SEQ ID NO: 3431458 - RNA, 15 nt, Human
caauuccucugggaa

SEQ ID NO: 3431459 - RNA, 12 nt, Human
caauuccugggc

SEQ ID NO: 3431460 - RNA, 14 nt, Human
caauucuccugccu

SEQ ID NO: 3431461 - RNA, 19 nt, Human
caauucuccugccuuugcc

SEQ ID NO: 3431462 - RNA, 20 nt, Human
caauucuccugccuuugccu

SEQ ID NO: 3431463 - RNA, 17 nt, Human
caauucucgagcuuggg

SEQ ID NO: 3431464 - RNA, 14 nt, Human
caauucuguuuuua

SEQ ID NO: 3431465 - RNA, 19 nt, Human
caauucuuacaaacaugug

SEQ ID NO: 3431466 - RNA, 20 nt, Human
caauucuucccuaucuuugc

SEQ ID NO: 3431467 - RNA, 15 nt, Human
caauucuugccaaau

SEQ ID NO: 3431468 - RNA, 13 nt, Human
caauucuuuauac

SEQ ID NO: 3431469 - RNA, 22 nt, Human
caauugaaagugggcaaaagcu

SEQ ID NO: 3431470 - RNA, 22 nt, Human
caauugaaggaucaucugaagg

SEQ ID NO: 3431471 - RNA, 23 nt, Human
caauugaaguaaaauguggcagg

SEQ ID NO: 3431472 - RNA, 18 nt, Human
caauugaaguaaacuuuu

SEQ ID NO: 3431473 - RNA, 21 nt, Human
caauugaauuaaauuaggaau

SEQ ID NO: 3431474 - RNA, 21 nt, Human
caauugacaacaguuacauaa

SEQ ID NO: 3431475 - RNA, 22 nt, Human
caauugacaacaguuacauaau

SEQ ID NO: 3431476 - RNA, 19 nt, Human
augaaguuuccuuggcugg

SEQ ID NO: 3431477 - RNA, 14 nt, Human
augaaguuuuacau

SEQ ID NO: 3431478 - RNA, 19 nt, Human
augaaguuuuuuuuauaca

SEQ ID NO: 3431479 - RNA, 17 nt, Human
augaauaaagacaccua

SEQ ID NO: 3431480 - RNA, 18 nt, Human
augaauaaugccuuugua

SEQ ID NO: 3431481 - RNA, 19 nt, Human
augaauaaugccuuuguaa

SEQ ID NO: 3431482 - RNA, 20 nt, Human
augaauaauggaaaaugcca

SEQ ID NO: 3431483 - RNA, 15 nt, Human
augaauaauuuccca

SEQ ID NO: 3431484 - RNA, 22 nt, Human
augaauaauuucccaauuagga

SEQ ID NO: 3431485 - RNA, 20 nt, Human
augaauacaaacaauggaaa

SEQ ID NO: 3431486 - RNA, 21 nt, Human
augaauacauuuccaaaaugg

SEQ ID NO: 3431487 - RNA, 17 nt, Human
augaauacgagcaagcu

SEQ ID NO: 3431488 - RNA, 12 nt, Human
augaauacuuug

SEQ ID NO: 3431489 - RNA, 16 nt, Human
augaauauaaugaaug

SEQ ID NO: 3431490 - RNA, 18 nt, Human
augaauaucauacaaauc

SEQ ID NO: 3431491 - RNA, 22 nt, Human
augaauaucuauuaauauaugu

SEQ ID NO: 3431492 - RNA, 21 nt, Human
augaauauuuaguguucauaa

SEQ ID NO: 3431493 - RNA, 13 nt, Human
augaauauuuuga

SEQ ID NO: 3431494 - RNA, 21 nt, Human
augaaucaaaagugccucaag

SEQ ID NO: 3431495 - RNA, 12 nt, Human
augaaucaaugg

SEQ ID NO: 3431496 - RNA, 17 nt, Human
augaaucacuguuuuua

SEQ ID NO: 3431497 - RNA, 15 nt, Human
augaaucgcuucucu

SEQ ID NO: 3431498 - RNA, 14 nt, Human
augaaucuaagcag

SEQ ID NO: 3431499 - RNA, 18 nt, Human
augaaucuauuauacugu

SEQ ID NO: 3431500 - RNA, 23 nt, Human
augaaucuauuauacuguauuaa

SEQ ID NO: 3431501 - RNA, 17 nt, Human
augaaucugcucacuuu

SEQ ID NO: 3431502 - RNA, 17 nt, Human
augaaugaaacauuuug

SEQ ID NO: 3431503 - RNA, 15 nt, Human
augaaugagucuguu

SEQ ID NO: 3431504 - RNA, 15 nt, Human
augaaugcacacuag

SEQ ID NO: 3431505 - RNA, 15 nt, Human
augaaugcuuaaaga

SEQ ID NO: 3431506 - RNA, 23 nt, Human
augaauggagauuugaaggucug

SEQ ID NO: 3431507 - RNA, 21 nt, Human
augaauguaaauuuguacuau

SEQ ID NO: 3431508 - RNA, 16 nt, Human
augaauguaucaggaa

SEQ ID NO: 3431509 - RNA, 16 nt, Human
augaauguaugugcac

SEQ ID NO: 3431510 - RNA, 18 nt, Human
augaauguaugugcacug

SEQ ID NO: 3431511 - RNA, 16 nt, Human
augaaugucaguguga

SEQ ID NO: 3431512 - RNA, 16 nt, Human
augaauuaaauaaacc

SEQ ID NO: 3431513 - RNA, 15 nt, Human
augaauuaaguuuuu

SEQ ID NO: 3431514 - RNA, 22 nt, Human
augaauuacauuuguauaaaau

SEQ ID NO: 3431515 - RNA, 21 nt, Human
augaauuaguuuuauaugcuu

SEQ ID NO: 3431516 - RNA, 23 nt, Human
augaauuauccuauuucaguacu

SEQ ID NO: 3431517 - RNA, 17 nt, Human
augaauuauuacagugu

SEQ ID NO: 3431518 - RNA, 17 nt, Human
augaauucuuaugcuua

SEQ ID NO: 3431519 - RNA, 11 nt, Human
augaauuuaaa

SEQ ID NO: 3431520 - RNA, 18 nt, Human
augaauuuuagcuuuugu

SEQ ID NO: 3431521 - RNA, 23 nt, Human
augacaaaaucaucuuugugaag

SEQ ID NO: 3431522 - RNA, 16 nt, Human
augacaaaauucuuuc

SEQ ID NO: 3431523 - RNA, 20 nt, Human
augacaaagcagauucagaa

SEQ ID NO: 3431524 - RNA, 13 nt, Human
augacaaauguuu

SEQ ID NO: 3431525 - RNA, 15 nt, Human
augacaaauguuucu

SEQ ID NO: 3431526 - RNA, 17 nt, Human
augacaacuacagaaaa

SEQ ID NO: 3431527 - RNA, 16 nt, Human
augacaacuucuaauu

SEQ ID NO: 3431528 - RNA, 20 nt, Human
augacaacuucuaauugcca

SEQ ID NO: 3431529 - RNA, 21 nt, Human
augacaagaaaggcugcugua

SEQ ID NO: 3431530 - RNA, 13 nt, Human
augacaagauggu

SEQ ID NO: 3431531 - RNA, 17 nt, Human
augacaagaugguacaa

SEQ ID NO: 3431532 - RNA, 16 nt, Human
augacaagccccaggc

SEQ ID NO: 3431533 - RNA, 19 nt, Human
augacaagugagacaaaaa

SEQ ID NO: 3431534 - RNA, 14 nt, Human
augacaaugaugau

SEQ ID NO: 3431535 - RNA, 14 nt, Human
augacacaugcaag

SEQ ID NO: 3431536 - RNA, 22 nt, Human
augacacaugcaaggucauuuu

SEQ ID NO: 3431537 - RNA, 16 nt, Human
augacacuagaaaacu

SEQ ID NO: 3431538 - RNA, 23 nt, Human
augacacucauauaauuauaugu

SEQ ID NO: 3431539 - RNA, 21 nt, Human
augacacugagaacagaucuc

SEQ ID NO: 3431540 - RNA, 16 nt, Human
augacacuguucagga

SEQ ID NO: 3431541 - RNA, 18 nt, Human
augacagaaaauauguau

SEQ ID NO: 3431542 - RNA, 19 nt, Human
augacagaaaauauguauu

SEQ ID NO: 3431543 - RNA, 15 nt, Human
augacagccugcagc

SEQ ID NO: 3431544 - RNA, 15 nt, Human
augacagcugucccu

SEQ ID NO: 3431545 - RNA, 16 nt, Human
augacagcugucccug

SEQ ID NO: 3431546 - RNA, 17 nt, Human
augacagcugucccugu

SEQ ID NO: 3431547 - RNA, 20 nt, Human
augacaggcauccaaggaag

SEQ ID NO: 3431548 - RNA, 22 nt, Human
augacaggccugaagauauuac

SEQ ID NO: 3431549 - RNA, 16 nt, Human
augacagguaaauuaa

SEQ ID NO: 3431550 - RNA, 12 nt, Human
augacaguaauu

SEQ ID NO: 3431551 - RNA, 20 nt, Human
augacaguaauuguguuuac

SEQ ID NO: 3431552 - RNA, 23 nt, Human
augacaguaguaccaaaugcuuu

SEQ ID NO: 3431553 - RNA, 21 nt, Human
augacaguccgucaaaacaga

SEQ ID NO: 3431554 - RNA, 22 nt, Human
augacaguccgucaaaacagau

SEQ ID NO: 3431555 - RNA, 18 nt, Human
augacauaacagugcagg

SEQ ID NO: 3431556 - RNA, 14 nt, Human
augacaucacuugu

SEQ ID NO: 3431557 - RNA, 18 nt, Human
augacaucacuuguacaa

SEQ ID NO: 3431558 - RNA, 19 nt, Human
augacaucacuuguacaaa

SEQ ID NO: 3431559 - RNA, 16 nt, Human
augacaucucaggggc

SEQ ID NO: 3431560 - RNA, 24 nt, Human
augacaucuucaaagcuugaagau

SEQ ID NO: 3431561 - RNA, 12 nt, Human
augacaugaauu

SEQ ID NO: 3431562 - RNA, 15 nt, Human
augacaugaauuuua

SEQ ID NO: 3431563 - RNA, 14 nt, Human
augacaugcacuga

SEQ ID NO: 3431564 - RNA, 23 nt, Human
augacaugcacugacccuuccag

SEQ ID NO: 3431565 - RNA, 23 nt, Human
augacauguuauauauuuuuugu

SEQ ID NO: 3431566 - RNA, 14 nt, Human
augacauucccugc

SEQ ID NO: 3431567 - RNA, 18 nt, Human
augacauuuauuuuucau

SEQ ID NO: 3431568 - RNA, 23 nt, Human
augaccaaauaucaccaggacug

SEQ ID NO: 3431569 - RNA, 20 nt, Human
augaccagaagggaaacagu

SEQ ID NO: 3431570 - RNA, 21 nt, Human
augaccagaugcgucccaaga

SEQ ID NO: 3431571 - RNA, 14 nt, Human
augacccaccccug

SEQ ID NO: 3431572 - RNA, 12 nt, Human
augacccagugg

SEQ ID NO: 3431573 - RNA, 11 nt, Human
augaccccucc

SEQ ID NO: 3431574 - RNA, 14 nt, Human
augaccccugccca

SEQ ID NO: 3431575 - RNA, 12 nt, Human
augaccuccagc

SEQ ID NO: 3431576 - RNA, 16 nt, Human
cacagcuuagauuuca

SEQ ID NO: 3431577 - RNA, 18 nt, Human
cacagcuucagccaggag

SEQ ID NO: 3431578 - RNA, 19 nt, Human
cacagcuugaccugaggcu

SEQ ID NO: 3431579 - RNA, 20 nt, Human
cacagcuuguuuuggacuuu

SEQ ID NO: 3431580 - RNA, 19 nt, Human
cacaggaaccacaagacug

SEQ ID NO: 3431581 - RNA, 20 nt, Human
cacaggaaccacaagacugc

SEQ ID NO: 3431582 - RNA, 16 nt, Human
cacaggacacagucag

SEQ ID NO: 3431583 - RNA, 17 nt, Human
cacaggacacagucaga

SEQ ID NO: 3431584 - RNA, 20 nt, Human
cacaggacaugcgguagcca

SEQ ID NO: 3431585 - RNA, 17 nt, Human
cacaggacauuucucua

SEQ ID NO: 3431586 - RNA, 19 nt, Human
cacaggacccccuuccccu

SEQ ID NO: 3431587 - RNA, 15 nt, Human
cacaggacccucgcc

SEQ ID NO: 3431588 - RNA, 15 nt, Human
cacaggacucugccu

SEQ ID NO: 3431589 - RNA, 15 nt, Human
cacaggagcauuugg

SEQ ID NO: 3431590 - RNA, 14 nt, Human
cacaggagcuaccu

SEQ ID NO: 3431591 - RNA, 19 nt, Human
cacaggaggcaagcaagcu

SEQ ID NO: 3431592 - RNA, 15 nt, Human
cacaggaggcaggca

SEQ ID NO: 3431593 - RNA, 19 nt, Human
cacaggaggcaggcauggc

SEQ ID NO: 3431594 - RNA, 12 nt, Human
cacaggaggggg

SEQ ID NO: 3431595 - RNA, 22 nt, Human
cacaggaguguccucuucccuc

SEQ ID NO: 3431596 - RNA, 23 nt, Human
cacaggauccuauucucaccagg

SEQ ID NO: 3431597 - RNA, 19 nt, Human
cacaggauggucucugcca

SEQ ID NO: 3431598 - RNA, 17 nt, Human
cacaggcaacugaggca

SEQ ID NO: 3431599 - RNA, 22 nt, Human
cacaggcaacugaggcagacag

SEQ ID NO: 3431600 - RNA, 16 nt, Human
cacaggcagccagugc

SEQ ID NO: 3431601 - RNA, 17 nt, Human
cacaggcagccagugcc

SEQ ID NO: 3431602 - RNA, 19 nt, Human
cacaggcagccagugcccu

SEQ ID NO: 3431603 - RNA, 20 nt, Human
cacaggcagccagugcccug

SEQ ID NO: 3431604 - RNA, 23 nt, Human
cacaggcagccagugcccugagc

SEQ ID NO: 3431605 - RNA, 12 nt, Human
cacaggcagcuu

SEQ ID NO: 3431606 - RNA, 13 nt, Human
cacaggcagcuuu

SEQ ID NO: 3431607 - RNA, 10 nt, Human
cacaggcagg

SEQ ID NO: 3431608 - RNA, 17 nt, Human
cacaggcauuuccuggg

SEQ ID NO: 3431609 - RNA, 19 nt, Human
cacaggcauuuccugggug

SEQ ID NO: 3431610 - RNA, 15 nt, Human
cacaggccacccugu

SEQ ID NO: 3431611 - RNA, 12 nt, Human
cacaggcccccu

SEQ ID NO: 3431612 - RNA, 21 nt, Human
cacaggcccccuugagugggg

SEQ ID NO: 3431613 - RNA, 22 nt, Human
cacaggcccccuugaguggggu

SEQ ID NO: 3431614 - RNA, 14 nt, Human
cacaggcccggcuc

SEQ ID NO: 3431615 - RNA, 16 nt, Human
cacaggcccggcucca

SEQ ID NO: 3431616 - RNA, 19 nt, Human
cacaggcccggcuccaggc

SEQ ID NO: 3431617 - RNA, 19 nt, Human
cacaggcccuuuccucagg

SEQ ID NO: 3431618 - RNA, 11 nt, Human
cacaggccucc

SEQ ID NO: 3431619 - RNA, 14 nt, Human
cacaggccucccug

SEQ ID NO: 3431620 - RNA, 15 nt, Human
caauuguguagccuu

SEQ ID NO: 3431621 - RNA, 16 nt, Human
caauuguguagccuuu

SEQ ID NO: 3431622 - RNA, 20 nt, Human
caauuguuuguucuguuuuc

SEQ ID NO: 3431623 - RNA, 17 nt, Human
caauuuaaaauauagau

SEQ ID NO: 3431624 - RNA, 18 nt, Human
caauuuaaacccauuuua

SEQ ID NO: 3431625 - RNA, 12 nt, Human
caauuuaaagca

SEQ ID NO: 3431626 - RNA, 11 nt, Human
caauuuaaaug

SEQ ID NO: 3431627 - RNA, 13 nt, Human
caauuuaaauguu

SEQ ID NO: 3431628 - RNA, 23 nt, Human
caauuuaaguguuggaaaaaauu

SEQ ID NO: 3431629 - RNA, 20 nt, Human
caauuuacaaaguguguauu

SEQ ID NO: 3431630 - RNA, 23 nt, Human
caauuuauuaaaaugauuguaaa

SEQ ID NO: 3431631 - RNA, 13 nt, Human
caauuuauuuuau

SEQ ID NO: 3431632 - RNA, 14 nt, Human
caauuuauuuuauu

SEQ ID NO: 3431633 - RNA, 22 nt, Human
caauuucacgacacacuuugau

SEQ ID NO: 3431634 - RNA, 14 nt, Human
caauuucagacucc

SEQ ID NO: 3431635 - RNA, 12 nt, Human
caauuucccccu

SEQ ID NO: 3431636 - RNA, 15 nt, Human
caauuuccuuuauau

SEQ ID NO: 3431637 - RNA, 16 nt, Human
caauuucuacuuugaa

SEQ ID NO: 3431638 - RNA, 20 nt, Human
caauuucuguguugccaagc

SEQ ID NO: 3431639 - RNA, 19 nt, Human
caauuugauacauaauaaa

SEQ ID NO: 3431640 - RNA, 13 nt, Human
caauuugaugugg

SEQ ID NO: 3431641 - RNA, 15 nt, Human
caauuugcacauuaa

SEQ ID NO: 3431642 - RNA, 22 nt, Human
caauuugcacauuaaaugacuc

SEQ ID NO: 3431643 - RNA, 19 nt, Human
caauuugggagauauauuu

SEQ ID NO: 3431644 - RNA, 18 nt, Human
caauuugggcuuccuguu

SEQ ID NO: 3431645 - RNA, 22 nt, Human
caauuugucauuuugaagcuaa

SEQ ID NO: 3431646 - RNA, 23 nt, Human
caauuugucauuuugaagcuaau

SEQ ID NO: 3431647 - RNA, 16 nt, Human
caauuuguuugugcuu

SEQ ID NO: 3431648 - RNA, 13 nt, Human
caauuuuaaacau

SEQ ID NO: 3431649 - RNA, 15 nt, Human
caauuuuaaacauau

SEQ ID NO: 3431650 - RNA, 22 nt, Human
caauuuuaacacacauaaagga

SEQ ID NO: 3431651 - RNA, 22 nt, Human
caauuuuauaaggacuuccuga

SEQ ID NO: 3431652 - RNA, 20 nt, Human
caauuuucacuguguccagg

SEQ ID NO: 3431653 - RNA, 19 nt, Human
caauuuucagauuugcaca

SEQ ID NO: 3431654 - RNA, 21 nt, Human
caauuuuccuucagauauuuu

SEQ ID NO: 3431655 - RNA, 17 nt, Human
caauuuuccuugaagcc

SEQ ID NO: 3431656 - RNA, 13 nt, Human
caauuuucuccca

SEQ ID NO: 3431657 - RNA, 17 nt, Human
caauuuucucccaggaa

SEQ ID NO: 3431658 - RNA, 19 nt, Human
caauuuucuggaauacaug

SEQ ID NO: 3431659 - RNA, 13 nt, Human
caauuuuguuucu

SEQ ID NO: 3431660 - RNA, 16 nt, Human
caauuuuguuucugua

SEQ ID NO: 3431661 - RNA, 17 nt, Human
caauuuuguuucuguac

SEQ ID NO: 3431662 - RNA, 13 nt, Human
caauuuuuaaugg

SEQ ID NO: 3431663 - RNA, 22 nt, Human
caauuuuuaauggcagcagaaa

SEQ ID NO: 3431664 - RNA, 14 nt, Human
caauuuuucugcac

SEQ ID NO: 3431665 - RNA, 18 nt, Human
caauuuuucugcacugag

SEQ ID NO: 3431666 - RNA, 16 nt, Human
caauuuuugccuucau

SEQ ID NO: 3431667 - RNA, 19 nt, Human
caauuuuugucucagaagu

SEQ ID NO: 3431668 - RNA, 21 nt, Human
caauuuuuuaagugaaaauau

SEQ ID NO: 3431669 - RNA, 17 nt, Human
caauuuuuuguucuuca

SEQ ID NO: 3431670 - RNA, 21 nt, Human
caauuuuuuuaauuuuguauu

SEQ ID NO: 3431671 - RNA, 22 nt, Human
caauuuuuuuaauuuuguauuu

SEQ ID NO: 3431672 - RNA, 22 nt, Human
cacaaaaaaaauuuaaaaaaau

SEQ ID NO: 3431673 - RNA, 12 nt, Human
cacaaaaaagaa

SEQ ID NO: 3431674 - RNA, 13 nt, Human
cacaaaaaagaag

SEQ ID NO: 3431675 - RNA, 13 nt, Human
cacaaaacaaagc

SEQ ID NO: 3431676 - RNA, 15 nt, Human
cacaaaacaacccua

SEQ ID NO: 3431677 - RNA, 16 nt, Human
cacaaaacccagaccu

SEQ ID NO: 3431678 - RNA, 16 nt, Human
cacaaaaguuucucuu

SEQ ID NO: 3431679 - RNA, 23 nt, Human
cacaaacacauuguuauuuucag

SEQ ID NO: 3431680 - RNA, 13 nt, Human
cacaaacagaggc

SEQ ID NO: 3431681 - RNA, 15 nt, Human
cacaaacagaggccg

SEQ ID NO: 3431682 - RNA, 17 nt, Human
cacaaaccuucugccuu

SEQ ID NO: 3431683 - RNA, 22 nt, Human
cacaaacucuaucggagaacau

SEQ ID NO: 3431684 - RNA, 19 nt, Human
cacaaagaaaauuccuaua

SEQ ID NO: 3431685 - RNA, 20 nt, Human
cacaaagaaaauuccuauaa

SEQ ID NO: 3431686 - RNA, 23 nt, Human
cacaaagaaccaccaggaaagca

SEQ ID NO: 3431687 - RNA, 15 nt, Human
cacaaagacccuggc

SEQ ID NO: 3431688 - RNA, 18 nt, Human
cacaaagcacaguuugaa

SEQ ID NO: 3431689 - RNA, 11 nt, Human
cacaaagccca

SEQ ID NO: 3431690 - RNA, 18 nt, Human
cacaaagcggggggaggg

SEQ ID NO: 3431691 - RNA, 19 nt, Human
cacaaagcggggggagggu

SEQ ID NO: 3431692 - RNA, 13 nt, Human
cacaaagcuuuug

SEQ ID NO: 3431693 - RNA, 18 nt, Human
cacaaaggaccucagcug

SEQ ID NO: 3431694 - RNA, 13 nt, Human
cacaaaggagagc

SEQ ID NO: 3431695 - RNA, 18 nt, Human
cacaaaggccaaacugcu

SEQ ID NO: 3431696 - RNA, 17 nt, Human
cacaaagguagcuuuuc

SEQ ID NO: 3431697 - RNA, 16 nt, Human
cacaaagguauaauuu

SEQ ID NO: 3431698 - RNA, 14 nt, Human
cacaaauauuaaaa

SEQ ID NO: 3431699 - RNA, 23 nt, Human
cacaaauauuauuuguguuuccu

SEQ ID NO: 3431700 - RNA, 13 nt, Human
cacaaauauuuau

SEQ ID NO: 3431701 - RNA, 14 nt, Human
cacaaaugacuuua

SEQ ID NO: 3431702 - RNA, 15 nt, Human
cacaaaugacuuuau

SEQ ID NO: 3431703 - RNA, 20 nt, Human
cacaaaugacuuuauuauuu

SEQ ID NO: 3431704 - RNA, 20 nt, Human
cacaaauuucacuuauaccu

SEQ ID NO: 3431705 - RNA, 17 nt, Human
cacaacaaaaauuugaa

SEQ ID NO: 3431706 - RNA, 16 nt, Human
cacaacccccagcucc

SEQ ID NO: 3431707 - RNA, 17 nt, Human
cacaacccccagcuccc

SEQ ID NO: 3431708 - RNA, 18 nt, Human
cacaacccccagcucccg

SEQ ID NO: 3431709 - RNA, 14 nt, Human
cacaaccugaaccu

SEQ ID NO: 3431710 - RNA, 23 nt, Human
cacaaccuucuguggcucacaga

SEQ ID NO: 3431711 - RNA, 11 nt, Human
cacaacuagga

SEQ ID NO: 3431712 - RNA, 18 nt, Human
cacaacuaguuuuguuua

SEQ ID NO: 3431713 - RNA, 23 nt, Human
cacaacucacuccuuuuaaagaa

SEQ ID NO: 3431714 - RNA, 16 nt, Human
cacaacugacacagga

SEQ ID NO: 3431715 - RNA, 18 nt, Human
cacaacugacacaggaaa

SEQ ID NO: 3431716 - RNA, 19 nt, Human
cacaacugcaauaacuucu

SEQ ID NO: 3431717 - RNA, 23 nt, Human
cacaacuuaaaaagucugcauua

SEQ ID NO: 3431718 - RNA, 15 nt, Human
cacaacuuuuaacca

SEQ ID NO: 3431719 - RNA, 15 nt, Human
cacaagaaaugaaag

SEQ ID NO: 3431720 - RNA, 14 nt, Human
cacaagaaauuuga

SEQ ID NO: 3431721 - RNA, 20 nt, Human
cacaagaaauuugauuucua

SEQ ID NO: 3431722 - RNA, 23 nt, Human
cacaagaauggaucacaagaugg

SEQ ID NO: 3431723 - RNA, 23 nt, Human
cacaagacccaaaaggcagaagc

SEQ ID NO: 3431724 - RNA, 21 nt, Human
cacaagagcccagcagggccu

SEQ ID NO: 3431725 - RNA, 20 nt, Human
cacaagagcccaggccuccu

SEQ ID NO: 3431726 - RNA, 15 nt, Human
cacaagauugguguu

SEQ ID NO: 3431727 - RNA, 17 nt, Human
cacaagauugguguuuu

SEQ ID NO: 3431728 - RNA, 22 nt, Human
cacaagauugguguuuuuuucu

SEQ ID NO: 3431729 - RNA, 23 nt, Human
cacaagauugguguuuuuuucua

SEQ ID NO: 3431730 - RNA, 22 nt, Human
cacaagcagagugcacagcugu

SEQ ID NO: 3431731 - RNA, 21 nt, Human
cacaagccacaagucuuccag

SEQ ID NO: 3431732 - RNA, 12 nt, Human
cacaagccacag

SEQ ID NO: 3431733 - RNA, 15 nt, Human
cacaagccacagaag

SEQ ID NO: 3431734 - RNA, 15 nt, Human
cacaagcccacagca

SEQ ID NO: 3431735 - RNA, 20 nt, Human
cacaagccucugcccaggca

SEQ ID NO: 3431736 - RNA, 14 nt, Human
cacaagccuucggc

SEQ ID NO: 3431737 - RNA, 17 nt, Human
cacaagcuccaagcucc

SEQ ID NO: 3431738 - RNA, 17 nt, Human
cacaagcugcacccuca

SEQ ID NO: 3431739 - RNA, 16 nt, Human
cacaagcuggaagcac

SEQ ID NO: 3431740 - RNA, 14 nt, Human
cacaaggacuuccu

SEQ ID NO: 3431741 - RNA, 13 nt, Human
cacauagauuaau

SEQ ID NO: 3431742 - RNA, 18 nt, Human
cacauagauuaauggcac

SEQ ID NO: 3431743 - RNA, 13 nt, Human
cacauagcugucu

SEQ ID NO: 3431744 - RNA, 16 nt, Human
cacauaguuuuucagu

SEQ ID NO: 3431745 - RNA, 14 nt, Human
cacauauacacaca

SEQ ID NO: 3431746 - RNA, 16 nt, Human
cacauauacacacaca

SEQ ID NO: 3431747 - RNA, 22 nt, Human
cacauauaccuauaaugugugu

SEQ ID NO: 3431748 - RNA, 15 nt, Human
cacauauccaggcac

SEQ ID NO: 3431749 - RNA, 18 nt, Human
cacauauccaggcaccag

SEQ ID NO: 3431750 - RNA, 19 nt, Human
cacauauccaggcaccagg

SEQ ID NO: 3431751 - RNA, 23 nt, Human
cacauaucuaguaugaaauuaua

SEQ ID NO: 3431752 - RNA, 13 nt, Human
cacauaugagggg

SEQ ID NO: 3431753 - RNA, 19 nt, Human
cacauaugcaccuuguguc

SEQ ID NO: 3431754 - RNA, 21 nt, Human
cacauaugcaccuugugucug

SEQ ID NO: 3431755 - RNA, 23 nt, Human
cacauauuugaagggucuuucuc

SEQ ID NO: 3431756 - RNA, 14 nt, Human
cacauauuuuaaaa

SEQ ID NO: 3431757 - RNA, 17 nt, Human
cacauauuuuaaaauuu

SEQ ID NO: 3431758 - RNA, 14 nt, Human
cacauauuuuucca

SEQ ID NO: 3431759 - RNA, 14 nt, Human
cacaucaaaccuuu

SEQ ID NO: 3431760 - RNA, 20 nt, Human
cacaucagcacgauuucugu

SEQ ID NO: 3431761 - RNA, 22 nt, Human
cacaucagcacgauuucuguuu

SEQ ID NO: 3431762 - RNA, 14 nt, Human
cacaucaucuguaa

SEQ ID NO: 3431763 - RNA, 15 nt, Human
cacaucaucuguaag

SEQ ID NO: 3431764 - RNA, 18 nt, Human
cacauccaacuccagcaa

SEQ ID NO: 3431765 - RNA, 23 nt, Human
augcuggcuggccuuguggucca

SEQ ID NO: 3431766 - RNA, 20 nt, Human
augcuggcuguuggcugggg

SEQ ID NO: 3431767 - RNA, 12 nt, Human
augcugggcugg

SEQ ID NO: 3431768 - RNA, 21 nt, Human
augcugggcuggcucccucuu

SEQ ID NO: 3431769 - RNA, 22 nt, Human
augcuggggcaagucccugacu

SEQ ID NO: 3431770 - RNA, 11 nt, Human
augcuggguug

SEQ ID NO: 3431771 - RNA, 21 nt, Human
augcugguuuuccuaaaugca

SEQ ID NO: 3431772 - RNA, 13 nt, Human
augcugguuuuuc

SEQ ID NO: 3431773 - RNA, 20 nt, Human
augcuguaacuuaaaauagg

SEQ ID NO: 3431774 - RNA, 16 nt, Human
augcuguacauacuuu

SEQ ID NO: 3431775 - RNA, 23 nt, Human
augcuguacaucuauuuuggauu

SEQ ID NO: 3431776 - RNA, 20 nt, Human
augcuguagacaucuguccu

SEQ ID NO: 3431777 - RNA, 14 nt, Human
augcuguauuuuaa

SEQ ID NO: 3431778 - RNA, 22 nt, Human
augcugucaacuaugauauggu

SEQ ID NO: 3431779 - RNA, 19 nt, Human
augcugucccuuacgugag

SEQ ID NO: 3431780 - RNA, 22 nt, Human
augcugucuacacuaagagaga

SEQ ID NO: 3431781 - RNA, 17 nt, Human
augcugucuggcacagc

SEQ ID NO: 3431782 - RNA, 17 nt, Human
augcugugccccuggcc

SEQ ID NO: 3431783 - RNA, 17 nt, Human
augcugugcuaugaauu

SEQ ID NO: 3431784 - RNA, 14 nt, Human
augcuguguaagcu

SEQ ID NO: 3431785 - RNA, 14 nt, Human
augcugugugacuc

SEQ ID NO: 3431786 - RNA, 19 nt, Human
augcuguucaugaaagauu

SEQ ID NO: 3431787 - RNA, 18 nt, Human
augcuguucucuucuuca

SEQ ID NO: 3431788 - RNA, 11 nt, Human
augcuguugau

SEQ ID NO: 3431789 - RNA, 17 nt, Human
augcuguugauugcuaa

SEQ ID NO: 3431790 - RNA, 19 nt, Human
augcuguugauugcuaaau

SEQ ID NO: 3431791 - RNA, 21 nt, Human
augcuguugauugcuaaaugu

SEQ ID NO: 3431792 - RNA, 23 nt, Human
augcuguugauugcuaaauguaa

SEQ ID NO: 3431793 - RNA, 15 nt, Human
augcuguugccucau

SEQ ID NO: 3431794 - RNA, 16 nt, Human
augcuuaaaauaagca

SEQ ID NO: 3431795 - RNA, 17 nt, Human
augcuuaaaauaagcag

SEQ ID NO: 3431796 - RNA, 20 nt, Human
cacaguacagcaugugccuu

SEQ ID NO: 3431797 - RNA, 16 nt, Human
cacaguacauaauaca

SEQ ID NO: 3431798 - RNA, 23 nt, Human
cacaguacauaauacacuugccc

SEQ ID NO: 3431799 - RNA, 16 nt, Human
cacaguagagccagcu

SEQ ID NO: 3431800 - RNA, 13 nt, Human
cacaguagucuug

SEQ ID NO: 3431801 - RNA, 16 nt, Human
cacaguagucuugaug

SEQ ID NO: 3431802 - RNA, 14 nt, Human
cacaguauuuguaa

SEQ ID NO: 3431803 - RNA, 15 nt, Human
cacagucacugcucu

SEQ ID NO: 3431804 - RNA, 13 nt, Human
cacaguccaggaa

SEQ ID NO: 3431805 - RNA, 18 nt, Human
cacaguccaggaacaagc

SEQ ID NO: 3431806 - RNA, 17 nt, Human
cacagucccacugugca

SEQ ID NO: 3431807 - RNA, 13 nt, Human
cacaguccuuacc

SEQ ID NO: 3431808 - RNA, 15 nt, Human
cacaguccuuaccag

SEQ ID NO: 3431809 - RNA, 22 nt, Human
cacaguccuuaccagcagagca

SEQ ID NO: 3431810 - RNA, 20 nt, Human
cacagucuccggccucucca

SEQ ID NO: 3431811 - RNA, 22 nt, Human
cacagugaaggcuguccuuacc

SEQ ID NO: 3431812 - RNA, 17 nt, Human
cacagugacccuuccca

SEQ ID NO: 3431813 - RNA, 18 nt, Human
cacagugacucgggcucc

SEQ ID NO: 3431814 - RNA, 19 nt, Human
cacagugacucgggcuccu

SEQ ID NO: 3431815 - RNA, 21 nt, Human
cacagugacucgggcuccugu

SEQ ID NO: 3431816 - RNA, 19 nt, Human
cacagugagucgaggacag

SEQ ID NO: 3431817 - RNA, 22 nt, Human
cacagugagucgaggacaggga

SEQ ID NO: 3431818 - RNA, 14 nt, Human
cacagugauuuuuu

SEQ ID NO: 3431819 - RNA, 17 nt, Human
cacagugcaucucagcc

SEQ ID NO: 3431820 - RNA, 18 nt, Human
cacagugcucuuuucucc

SEQ ID NO: 3431821 - RNA, 13 nt, Human
cacagugcugucu

SEQ ID NO: 3431822 - RNA, 22 nt, Human
cacagugcuuuccguggcacug

SEQ ID NO: 3431823 - RNA, 22 nt, Human
cacaguggaaagacagcuucuc

SEQ ID NO: 3431824 - RNA, 13 nt, Human
cacaguggaacca

SEQ ID NO: 3431825 - RNA, 13 nt, Human
cacagugggaacu

SEQ ID NO: 3431826 - RNA, 19 nt, Human
cacagugggaacucugaca

SEQ ID NO: 3431827 - RNA, 19 nt, Human
cacagugggagccagggcu

SEQ ID NO: 3431828 - RNA, 17 nt, Human
cacagugguggcagggc

SEQ ID NO: 3431829 - RNA, 15 nt, Human
cacaguguaccauua

SEQ ID NO: 3431830 - RNA, 17 nt, Human
cacaguguaccauuaaa

SEQ ID NO: 3431831 - RNA, 18 nt, Human
cacaguguaccauuaaaa

SEQ ID NO: 3431832 - RNA, 16 nt, Human
cacagugucugggcug

SEQ ID NO: 3431833 - RNA, 17 nt, Human
cacagugucugggcuga

SEQ ID NO: 3431834 - RNA, 13 nt, Human
cacagugugaaua

SEQ ID NO: 3431835 - RNA, 14 nt, Human
cacagugugauuuu

SEQ ID NO: 3431836 - RNA, 17 nt, Human
cacaguguuggcgagag

SEQ ID NO: 3431837 - RNA, 13 nt, Human
cacaguuauuaca

SEQ ID NO: 3431838 - RNA, 13 nt, Human
cacaguuccccua

SEQ ID NO: 3431839 - RNA, 22 nt, Human
cacaguuccucgcccugggucu

SEQ ID NO: 3431840 - RNA, 18 nt, Human
cacaguucuuugggccag

SEQ ID NO: 3431841 - RNA, 23 nt, Human
cacaguucuuugggccagacaug

SEQ ID NO: 3431842 - RNA, 12 nt, Human
cacaguugccac

SEQ ID NO: 3431843 - RNA, 17 nt, Human
cacaguugccaccaccu

SEQ ID NO: 3431844 - RNA, 18 nt, Human
cacaguugcucuaugcuu

SEQ ID NO: 3431845 - RNA, 17 nt, Human
cacaguuggcuggauga

SEQ ID NO: 3431846 - RNA, 21 nt, Human
cacaguuggugggguccugcc

SEQ ID NO: 3431847 - RNA, 13 nt, Human
cacaguuugaaau

SEQ ID NO: 3431848 - RNA, 15 nt, Human
cacaguuugaaauaa

SEQ ID NO: 3431849 - RNA, 20 nt, Human
cacaguuuucugagaaagac

SEQ ID NO: 3431850 - RNA, 20 nt, Human
cacaguuuugguugcuuuaa

SEQ ID NO: 3431851 - RNA, 23 nt, Human
cacaguuuugguugcuuuaauau

SEQ ID NO: 3431852 - RNA, 17 nt, Human
cacaguuuuuccuggaa

SEQ ID NO: 3431853 - RNA, 18 nt, Human
cacauaaaggauaaacuu

SEQ ID NO: 3431854 - RNA, 15 nt, Human
cacauaaaugcagcc

SEQ ID NO: 3431855 - RNA, 18 nt, Human
cacauaaaugcagcccau

SEQ ID NO: 3431856 - RNA, 13 nt, Human
cacauaacagaau

SEQ ID NO: 3431857 - RNA, 22 nt, Human
cacauaagccaaaacugagcau

SEQ ID NO: 3431858 - RNA, 19 nt, Human
cacauaagcucagaaucca

SEQ ID NO: 3431859 - RNA, 21 nt, Human
cacauaagggguuugccauuu

SEQ ID NO: 3431860 - RNA, 18 nt, Human
cacauaauuaaagugucc

SEQ ID NO: 3431861 - RNA, 22 nt, Human
cacauaauucaggaagcagcuu

SEQ ID NO: 3431862 - RNA, 14 nt, Human
cacauaauuuuucu

SEQ ID NO: 3431863 - RNA, 20 nt, Human
cacauacacccaaacacuua

SEQ ID NO: 3431864 - RNA, 19 nt, Human
cacauacccucuucaugga

SEQ ID NO: 3431865 - RNA, 16 nt, Human
cacauacuugagacug

SEQ ID NO: 3431866 - RNA, 21 nt, Human
cacauagaaaguaaauaaaag

SEQ ID NO: 3431867 - RNA, 16 nt, Human
cacauagacugugcgc

SEQ ID NO: 3431868 - RNA, 17 nt, Human
cacauagcccacuuaca

SEQ ID NO: 3431869 - RNA, 20 nt, Human
cacauagcccacuuacauuu

SEQ ID NO: 3431870 - RNA, 23 nt, Human
cacauagcuacccaaaagagaaa

SEQ ID NO: 3431871 - RNA, 16 nt, Human
cacauagcugucuaga

SEQ ID NO: 3431872 - RNA, 21 nt, Human
cacauagugaugguuccccug

SEQ ID NO: 3431873 - RNA, 14 nt, Human
cacauauaccuaua

SEQ ID NO: 3431874 - RNA, 23 nt, Human
cacauauaccuauaaugugugua

SEQ ID NO: 3431875 - RNA, 22 nt, Human
cacauaugcaccuugugucugu

SEQ ID NO: 3431876 - RNA, 13 nt, Human
cacauauugauuu

SEQ ID NO: 3431877 - RNA, 17 nt, Human
cacauauuucagugagg

SEQ ID NO: 3431878 - RNA, 16 nt, Human
cacauauuugaagggu

SEQ ID NO: 3431879 - RNA, 15 nt, Human
cacauauuuuaaaau

SEQ ID NO: 3431880 - RNA, 18 nt, Human
cacaucaaauaagaaaua

SEQ ID NO: 3431881 - RNA, 15 nt, Human
cacaucagaaaggaa

SEQ ID NO: 3431882 - RNA, 21 nt, Human
cacaucagcacgauuucuguu

SEQ ID NO: 3431883 - RNA, 24 nt, Human
cacaucagcuccacuuucagugaa

SEQ ID NO: 3431884 - RNA, 21 nt, Human
cacauccaggcaauggccuaa

SEQ ID NO: 3431885 - RNA, 21 nt, Human
cacauccauucccaagaaaug

SEQ ID NO: 3431886 - RNA, 21 nt, Human
cacauccauuucaucuauuuc

SEQ ID NO: 3431887 - RNA, 23 nt, Human
cacauccauuucaucuauuucug

SEQ ID NO: 3431888 - RNA, 16 nt, Human
cacauccccgcuggcu

SEQ ID NO: 3431889 - RNA, 12 nt, Human
cacaucccuggg

SEQ ID NO: 3431890 - RNA, 22 nt, Human
cacaucccugggccugcugcug

SEQ ID NO: 3431891 - RNA, 18 nt, Human
cacauccgcgugugccug

SEQ ID NO: 3431892 - RNA, 19 nt, Human
cacauccgcgugugccugu

SEQ ID NO: 3431893 - RNA, 20 nt, Human
cacauccggaggagaagaag

SEQ ID NO: 3431894 - RNA, 14 nt, Human
cacauccuccgucc

SEQ ID NO: 3431895 - RNA, 18 nt, Human
cacauccuccguccagcc

SEQ ID NO: 3431896 - RNA, 19 nt, Human
cacauccuugacuuuuuag

SEQ ID NO: 3431897 - RNA, 13 nt, Human
cacaucucaacag

SEQ ID NO: 3431898 - RNA, 13 nt, Human
cacaucucuaucu

SEQ ID NO: 3431899 - RNA, 11 nt, Human
cacaucucugc

SEQ ID NO: 3431900 - RNA, 12 nt, Human
cacaucugccuu

SEQ ID NO: 3431901 - RNA, 12 nt, Human
cacaucuguguc

SEQ ID NO: 3431902 - RNA, 13 nt, Human
cacaucuugcucu

SEQ ID NO: 3431903 - RNA, 16 nt, Human
cacaucuugcucugcu

SEQ ID NO: 3431904 - RNA, 17 nt, Human
cacaucuugcucugcug

SEQ ID NO: 3431905 - RNA, 21 nt, Human
cacaucuugcucugcugacag

SEQ ID NO: 3431906 - RNA, 21 nt, Human
cacaucuuucacacuuccacc

SEQ ID NO: 3431907 - RNA, 14 nt, Human
cacaucuuuccugu

SEQ ID NO: 3431908 - RNA, 13 nt, Human
cacaugaagaaau

SEQ ID NO: 3431909 - RNA, 21 nt, Human
caccacgauguggcccuggcc

SEQ ID NO: 3431910 - RNA, 22 nt, Human
caccacgggacaucacagggug

SEQ ID NO: 3431911 - RNA, 15 nt, Human
caccacgguggucac

SEQ ID NO: 3431912 - RNA, 18 nt, Human
caccacuacauucuguua

SEQ ID NO: 3431913 - RNA, 19 nt, Human
caccacuacauucuguuaa

SEQ ID NO: 3431914 - RNA, 20 nt, Human
caccacuaggacucugaggc

SEQ ID NO: 3431915 - RNA, 16 nt, Human
caccacucaagaccaa

SEQ ID NO: 3431916 - RNA, 19 nt, Human
caccacuggccaccaggcu

SEQ ID NO: 3431917 - RNA, 13 nt, Human
caccagaagccca

SEQ ID NO: 3431918 - RNA, 14 nt, Human
caccagaagcccag

SEQ ID NO: 3431919 - RNA, 14 nt, Human
caccagacacccag

SEQ ID NO: 3431920 - RNA, 17 nt, Human
caccagacacccaggac

SEQ ID NO: 3431921 - RNA, 18 nt, Human
caccagacacccaggacu

SEQ ID NO: 3431922 - RNA, 17 nt, Human
caccagacggggcugga

SEQ ID NO: 3431923 - RNA, 20 nt, Human
caccagagaccguccucacc

SEQ ID NO: 3431924 - RNA, 21 nt, Human
caccagagaccguccucaccc

SEQ ID NO: 3431925 - RNA, 12 nt, Human
caccagagcaga

SEQ ID NO: 3431926 - RNA, 21 nt, Human
caccagagcauuuccaacacc

SEQ ID NO: 3431927 - RNA, 20 nt, Human
caccagagcccaccuuggcu

SEQ ID NO: 3431928 - RNA, 16 nt, Human
caccagaggcugcaga

SEQ ID NO: 3431929 - RNA, 23 nt, Human
caccagaggcugcagaaggccaa

SEQ ID NO: 3431930 - RNA, 13 nt, Human
caccagaugcuga

SEQ ID NO: 3431931 - RNA, 23 nt, Human
caccagaugcugaaaauguccuu

SEQ ID NO: 3431932 - RNA, 15 nt, Human
caccagcaucaccug

SEQ ID NO: 3431933 - RNA, 18 nt, Human
caccagcaucaccugccu

SEQ ID NO: 3431934 - RNA, 14 nt, Human
caccagcauuccuu

SEQ ID NO: 3431935 - RNA, 15 nt, Human
caccagcauuccuuu

SEQ ID NO: 3431936 - RNA, 21 nt, Human
caccagccaggcucugugcug

SEQ ID NO: 3431937 - RNA, 14 nt, Human
caccagcccagaag

SEQ ID NO: 3431938 - RNA, 21 nt, Human
caccagcccauggcccugugc

SEQ ID NO: 3431939 - RNA, 16 nt, Human
caccagccccaaucca

SEQ ID NO: 3431940 - RNA, 13 nt, Human
caccagccccagu

SEQ ID NO: 3431941 - RNA, 18 nt, Human
caccagccccagugccca

SEQ ID NO: 3431942 - RNA, 14 nt, Human
caccagccccugcc

SEQ ID NO: 3431943 - RNA, 21 nt, Human
caccagccccugccccagccc

SEQ ID NO: 3431944 - RNA, 19 nt, Human
caccagcccuuagcaggga

SEQ ID NO: 3431945 - RNA, 16 nt, Human
caccagccggggaaga

SEQ ID NO: 3431946 - RNA, 10 nt, Human
caccagcugc

SEQ ID NO: 3431947 - RNA, 15 nt, Human
caccagcugcaaagu

SEQ ID NO: 3431948 - RNA, 14 nt, Human
caccagcugccucu

SEQ ID NO: 3431949 - RNA, 17 nt, Human
caccagcugccucuucu

SEQ ID NO: 3431950 - RNA, 14 nt, Human
caccagcugugucc

SEQ ID NO: 3431951 - RNA, 19 nt, Human
caccagcuucuccaggcuc

SEQ ID NO: 3431952 - RNA, 12 nt, Human
caccaggaaugu

SEQ ID NO: 3431953 - RNA, 17 nt, Human
caccaggagaaccacua

SEQ ID NO: 3431954 - RNA, 19 nt, Human
caccaggagaaccacuaca

SEQ ID NO: 3431955 - RNA, 22 nt, Human
caccaggauagagacuggaaca

SEQ ID NO: 3431956 - RNA, 15 nt, Human
caccaggauggcccu

SEQ ID NO: 3431957 - RNA, 20 nt, Human
caccaggcacgaacccaccu

SEQ ID NO: 3431958 - RNA, 24 nt, Human
caccaggcacgaacccaccugcug

SEQ ID NO: 3431959 - RNA, 13 nt, Human
caccaggcagccu

SEQ ID NO: 3431960 - RNA, 15 nt, Human
caccaggccaccucc

SEQ ID NO: 3431961 - RNA, 18 nt, Human
caccugcugagagaccca

SEQ ID NO: 3431962 - RNA, 19 nt, Human
caccugcugagagacccaa

SEQ ID NO: 3431963 - RNA, 17 nt, Human
caccugcugauguggca

SEQ ID NO: 3431964 - RNA, 14 nt, Human
caccugcuggcccc

SEQ ID NO: 3431965 - RNA, 22 nt, Human
caccugcuggccccucaccugg

SEQ ID NO: 3431966 - RNA, 19 nt, Human
caccugcuucucugcccag

SEQ ID NO: 3431967 - RNA, 22 nt, Human
caccuggaagcauuuguuucua

SEQ ID NO: 3431968 - RNA, 21 nt, Human
caccuggccaccugagguggg

SEQ ID NO: 3431969 - RNA, 11 nt, Human
caccuggcccc

SEQ ID NO: 3431970 - RNA, 14 nt, Human
caccuggccccaug

SEQ ID NO: 3431971 - RNA, 16 nt, Human
caccuggccccauguc

SEQ ID NO: 3431972 - RNA, 20 nt, Human
caccuggccccaugucucuc

SEQ ID NO: 3431973 - RNA, 22 nt, Human
caccuggccccaugucucucag

SEQ ID NO: 3431974 - RNA, 11 nt, Human
caccuggcccu

SEQ ID NO: 3431975 - RNA, 19 nt, Human
caccuggcccucucugaag

SEQ ID NO: 3431976 - RNA, 22 nt, Human
caccuggcccugcuuccugcuu

SEQ ID NO: 3431977 - RNA, 12 nt, Human
caccuggccucu

SEQ ID NO: 3431978 - RNA, 13 nt, Human
caccuggccucug

SEQ ID NO: 3431979 - RNA, 15 nt, Human
caccuggccucugca

SEQ ID NO: 3431980 - RNA, 17 nt, Human
caccuggcucucaccuc

SEQ ID NO: 3431981 - RNA, 23 nt, Human
caccuggcucuguggcgagccau

SEQ ID NO: 3431982 - RNA, 20 nt, Human
caccuggcugagguuccucu

SEQ ID NO: 3431983 - RNA, 21 nt, Human
caccuggcugagguuccucug

SEQ ID NO: 3431984 - RNA, 23 nt, Human
caccuggcugagguuccucugcc

SEQ ID NO: 3431985 - RNA, 21 nt, Human
caccuggcuuguuuauuuugu

SEQ ID NO: 3431986 - RNA, 20 nt, Human
caccugggauuacaagcaug

SEQ ID NO: 3431987 - RNA, 11 nt, Human
caccugggcac

SEQ ID NO: 3431988 - RNA, 12 nt, Human
caccugggcacc

SEQ ID NO: 3431989 - RNA, 21 nt, Human
caccugggcccuggggccugu

SEQ ID NO: 3431990 - RNA, 22 nt, Human
caccugggcccuggggccugua

SEQ ID NO: 3431991 - RNA, 18 nt, Human
caccugggcgucaucugg

SEQ ID NO: 3431992 - RNA, 16 nt, Human
caccugggcuuaagaa

SEQ ID NO: 3431993 - RNA, 19 nt, Human
caccugggcuuaagaaauc

SEQ ID NO: 3431994 - RNA, 14 nt, Human
caccuggggagugg

SEQ ID NO: 3431995 - RNA, 15 nt, Human
caccuggggcaguca

SEQ ID NO: 3431996 - RNA, 20 nt, Human
caccuggggcagucaccugc

SEQ ID NO: 3431997 - RNA, 18 nt, Human
caccuggggugugggagg

SEQ ID NO: 3431998 - RNA, 15 nt, Human
caccugguggccucu

SEQ ID NO: 3431999 - RNA, 11 nt, Human
caccugguugc

SEQ ID NO: 3432000 - RNA, 17 nt, Human
caccuguaaaacuuuau

SEQ ID NO: 3432001 - RNA, 15 nt, Human
caccuguaaaccuga

SEQ ID NO: 3432002 - RNA, 20 nt, Human
caccuguaaugugcgaggga

SEQ ID NO: 3432003 - RNA, 22 nt, Human
caccuguacucaggaggcugag

SEQ ID NO: 3432004 - RNA, 18 nt, Human
caccuguacucuuccgaa

SEQ ID NO: 3432005 - RNA, 16 nt, Human
caccuguacuggagag

SEQ ID NO: 3432006 - RNA, 17 nt, Human
caccuguacuggagagc

SEQ ID NO: 3432007 - RNA, 20 nt, Human
caccuguagucccagcuacu

SEQ ID NO: 3432008 - RNA, 13 nt, Human
caccugucaaaca

SEQ ID NO: 3432009 - RNA, 20 nt, Human
caccugucaaacaaagccag

SEQ ID NO: 3432010 - RNA, 13 nt, Human
caccugucccacc

SEQ ID NO: 3432011 - RNA, 14 nt, Human
caccugucccaccu

SEQ ID NO: 3432012 - RNA, 15 nt, Human
caccugucccaccuc

SEQ ID NO: 3432013 - RNA, 22 nt, Human
caccuguccccacccuccacuc

SEQ ID NO: 3432014 - RNA, 23 nt, Human
caccugucugcuccagcucuggc

SEQ ID NO: 3432015 - RNA, 16 nt, Human
caccugucugucuguc

SEQ ID NO: 3432016 - RNA, 10 nt, Human
caccuguggg

SEQ ID NO: 3432017 - RNA, 19 nt, Human
caccuguugcuuacaauuu

SEQ ID NO: 3432018 - RNA, 19 nt, Human
caccuguuuuuaagcuguu

SEQ ID NO: 3432019 - RNA, 16 nt, Human
caccuuagacaguccc

SEQ ID NO: 3432020 - RNA, 21 nt, Human
caccuuagacagucccugcca

SEQ ID NO: 3432021 - RNA, 20 nt, Human
caccuuagaccaccaagccu

SEQ ID NO: 3432022 - RNA, 13 nt, Human
caccuuagcuggc

SEQ ID NO: 3432023 - RNA, 13 nt, Human
caccuuaggcagg

SEQ ID NO: 3432024 - RNA, 15 nt, Human
caccuuaguggcuuu

SEQ ID NO: 3432025 - RNA, 19 nt, Human
caccuucaccuucauccau

SEQ ID NO: 3432026 - RNA, 19 nt, Human
caccuucaguuuuuguguu

SEQ ID NO: 3432027 - RNA, 15 nt, Human
caccuucauuuugag

SEQ ID NO: 3432028 - RNA, 18 nt, Human
caccuuccagcuccugua

SEQ ID NO: 3432029 - RNA, 12 nt, Human
caccuucccagc

SEQ ID NO: 3432030 - RNA, 14 nt, Human
caccuucccaugcc

SEQ ID NO: 3432031 - RNA, 14 nt, Human
caccuucccuugcc

SEQ ID NO: 3432032 - RNA, 21 nt, Human
caccuucccuugccacuuugc

SEQ ID NO: 3432033 - RNA, 14 nt, Human
caccuuccucacuu

SEQ ID NO: 3432034 - RNA, 20 nt, Human
caccuuccucacuuccauac

SEQ ID NO: 3432035 - RNA, 21 nt, Human
caccuucguuuacuaugccug

SEQ ID NO: 3432036 - RNA, 22 nt, Human
caccuucguuuacuaugccugu

SEQ ID NO: 3432037 - RNA, 21 nt, Human
caccuucuagucuuggccagc

SEQ ID NO: 3432038 - RNA, 21 nt, Human
caccuucuauagcaucacuua

SEQ ID NO: 3432039 - RNA, 14 nt, Human
caccuucucacaug

SEQ ID NO: 3432040 - RNA, 16 nt, Human
caccuugacagggcac

SEQ ID NO: 3432041 - RNA, 22 nt, Human
caccuugcagcucuccccuucu

SEQ ID NO: 3432042 - RNA, 14 nt, Human
caccuugcggggau

SEQ ID NO: 3432043 - RNA, 18 nt, Human
caccuuggacauccuccu

SEQ ID NO: 3432044 - RNA, 22 nt, Human
caccuuggacauccuccuccca

SEQ ID NO: 3432045 - RNA, 17 nt, Human
caccuuggcaccagaca

SEQ ID NO: 3432046 - RNA, 14 nt, Human
caccuuggcucaag

SEQ ID NO: 3432047 - RNA, 15 nt, Human
caccuuggcucaagu

SEQ ID NO: 3432048 - RNA, 14 nt, Human
caccuuggcugcag

SEQ ID NO: 3432049 - RNA, 18 nt, Human
caccuuggcugcagggag

SEQ ID NO: 3432050 - RNA, 13 nt, Human
caccuugugccug

SEQ ID NO: 3432051 - RNA, 18 nt, Human
caccuugugccuggggug

SEQ ID NO: 3432052 - RNA, 23 nt, Human
caccuugugcuggggacaggucc

SEQ ID NO: 3432053 - RNA, 14 nt, Human
caccuuguggcaag

SEQ ID NO: 3432054 - RNA, 16 nt, Human
caccuggcccugcuuc

SEQ ID NO: 3432055 - RNA, 17 nt, Human
caccuggcccuggggcc

SEQ ID NO: 3432056 - RNA, 15 nt, Human
caccuggcucugugg

SEQ ID NO: 3432057 - RNA, 22 nt, Human
caccuggcugagguuccucugc

SEQ ID NO: 3432058 - RNA, 22 nt, Human
caccuggcuuguuuauuuugug

SEQ ID NO: 3432059 - RNA, 21 nt, Human
caccugggacagggagcagcc

SEQ ID NO: 3432060 - RNA, 19 nt, Human
caccugggcaccuggggag

SEQ ID NO: 3432061 - RNA, 17 nt, Human
caccugggcccuggggc

SEQ ID NO: 3432062 - RNA, 18 nt, Human
caccugggcccuggggcc

SEQ ID NO: 3432063 - RNA, 23 nt, Human
caccugggcccuggggccuguac

SEQ ID NO: 3432064 - RNA, 19 nt, Human
caccuggggcagucaccug

SEQ ID NO: 3432065 - RNA, 14 nt, Human
caccuggggcugcu

SEQ ID NO: 3432066 - RNA, 22 nt, Human
caccuggggugugggaggcccg

SEQ ID NO: 3432067 - RNA, 15 nt, Human
caccugguggccaug

SEQ ID NO: 3432068 - RNA, 17 nt, Human
caccugguggccaugcu

SEQ ID NO: 3432069 - RNA, 21 nt, Human
caccugguuccggaauccugu

SEQ ID NO: 3432070 - RNA, 23 nt, Human
caccugguuccggaauccugucc

SEQ ID NO: 3432071 - RNA, 18 nt, Human
caccuguaaucccagcac

SEQ ID NO: 3432072 - RNA, 15 nt, Human
caccuguacucagga

SEQ ID NO: 3432073 - RNA, 23 nt, Human
caccuguacucaggaggcugagg

SEQ ID NO: 3432074 - RNA, 17 nt, Human
caccuguacucuuccga

SEQ ID NO: 3432075 - RNA, 21 nt, Human
caccugucaaacaaagccaga

SEQ ID NO: 3432076 - RNA, 23 nt, Human
caccugucaaacaaagccagaag

SEQ ID NO: 3432077 - RNA, 14 nt, Human
caccugucaggccu

SEQ ID NO: 3432078 - RNA, 14 nt, Human
caccugucccagaa

SEQ ID NO: 3432079 - RNA, 15 nt, Human
caccugucccagaaa

SEQ ID NO: 3432080 - RNA, 20 nt, Human
caccuguccccacccuccac

SEQ ID NO: 3432081 - RNA, 17 nt, Human
caccugucucagccucc

SEQ ID NO: 3432082 - RNA, 19 nt, Human
caccugucucagccuccca

SEQ ID NO: 3432083 - RNA, 12 nt, Human
caccugucuguc

SEQ ID NO: 3432084 - RNA, 22 nt, Human
caccugucugucugucuguccc

SEQ ID NO: 3432085 - RNA, 19 nt, Human
caccugugaguuuaaagca

SEQ ID NO: 3432086 - RNA, 20 nt, Human
caccugugaguuuaaagcaa

SEQ ID NO: 3432087 - RNA, 20 nt, Human
caccuguggguguagccagg

SEQ ID NO: 3432088 - RNA, 22 nt, Human
caccuguggguguagccaggua

SEQ ID NO: 3432089 - RNA, 11 nt, Human
caccuguuacu

SEQ ID NO: 3432090 - RNA, 16 nt, Human
caccuuaaauuaaaca

SEQ ID NO: 3432091 - RNA, 18 nt, Human
caccuuaaauuaaacaau

SEQ ID NO: 3432092 - RNA, 17 nt, Human
caccuuaccaacuuucu

SEQ ID NO: 3432093 - RNA, 14 nt, Human
caccuuagacaguc

SEQ ID NO: 3432094 - RNA, 18 nt, Human
caccuuagacagucccug

SEQ ID NO: 3432095 - RNA, 18 nt, Human
caccuuagaccaccaagc

SEQ ID NO: 3432096 - RNA, 21 nt, Human
caccuuagaccaccaagccuu

SEQ ID NO: 3432097 - RNA, 23 nt, Human
caccuuagaccaccaagccuuga

SEQ ID NO: 3432098 - RNA, 17 nt, Human
caccuuaggcagggaag

SEQ ID NO: 3432099 - RNA, 15 nt, Human
caccuuaucuuaaag

SEQ ID NO: 3432100 - RNA, 19 nt, Human
caccuucaauuccugggcc

SEQ ID NO: 3432101 - RNA, 22 nt, Human
caccuucauuuugaggggagga

SEQ ID NO: 3432102 - RNA, 13 nt, Human
caccuucccagcu

SEQ ID NO: 3432103 - RNA, 21 nt, Human
caccuucccagcucucccucu

SEQ ID NO: 3432104 - RNA, 15 nt, Human
caccuucccuugcca

SEQ ID NO: 3432105 - RNA, 22 nt, Human
caccuugaagaaccucucacuu

SEQ ID NO: 3432106 - RNA, 16 nt, Human
caccuugcaacacaca

SEQ ID NO: 3432107 - RNA, 18 nt, Human
caccuugcaacacacaga

SEQ ID NO: 3432108 - RNA, 21 nt, Human
caccuugcaacacacagacac

SEQ ID NO: 3432109 - RNA, 15 nt, Human
caccuugcagcucuc

SEQ ID NO: 3432110 - RNA, 13 nt, Human
caccuugccuugc

SEQ ID NO: 3432111 - RNA, 23 nt, Human
caccuugcuccuccuucugcugc

SEQ ID NO: 3432112 - RNA, 19 nt, Human
caccuugcuuuuuuacuua

SEQ ID NO: 3432113 - RNA, 17 nt, Human
caccuuggacauccucc

SEQ ID NO: 3432114 - RNA, 21 nt, Human
caccuuggacauccuccuccc

SEQ ID NO: 3432115 - RNA, 13 nt, Human
caccuuggcugca

SEQ ID NO: 3432116 - RNA, 15 nt, Human
caccuuggcugcagg

SEQ ID NO: 3432117 - RNA, 14 nt, Human
caccuugguuccug

SEQ ID NO: 3432118 - RNA, 19 nt, Human
caccuuguuggagccugca

SEQ ID NO: 3432119 - RNA, 14 nt, Human
caccuuuauuaaaa

SEQ ID NO: 3432120 - RNA, 18 nt, Human
caccuuuauuaaaaucuu

SEQ ID NO: 3432121 - RNA, 17 nt, Human
caccuuucagcccacgu

SEQ ID NO: 3432122 - RNA, 14 nt, Human
caccuuugaagaag

SEQ ID NO: 3432123 - RNA, 19 nt, Human
caccuuuggaaagcucuga

SEQ ID NO: 3432124 - RNA, 13 nt, Human
caccuuuguagca

SEQ ID NO: 3432125 - RNA, 14 nt, Human
caccuuuguagcac

SEQ ID NO: 3432126 - RNA, 14 nt, Human
caccuuugucccca

SEQ ID NO: 3432127 - RNA, 14 nt, Human
caccuuuguguauu

SEQ ID NO: 3432128 - RNA, 20 nt, Human
caccuuuguuuuuuguugga

SEQ ID NO: 3432129 - RNA, 13 nt, Human
caccuuuuaaauc

SEQ ID NO: 3432130 - RNA, 15 nt, Human
caccuuuuaaauccu

SEQ ID NO: 3432131 - RNA, 18 nt, Human
caccuuuuaacucaccuc

SEQ ID NO: 3432132 - RNA, 14 nt, Human
caccuuuuacugug

SEQ ID NO: 3432133 - RNA, 14 nt, Human
caccuuuuuuccua

SEQ ID NO: 3432134 - RNA, 16 nt, Human
cacgaacccaccugcu

SEQ ID NO: 3432135 - RNA, 21 nt, Human
cacgaagguaaaaaguauuuu

SEQ ID NO: 3432136 - RNA, 15 nt, Human
cacgacacugcagcc

SEQ ID NO: 3432137 - RNA, 18 nt, Human
cacgaccggggccagcac

SEQ ID NO: 3432138 - RNA, 17 nt, Human
cacgaccuaggcaguag

SEQ ID NO: 3432139 - RNA, 19 nt, Human
cacgaccucggcucacugc

SEQ ID NO: 3432140 - RNA, 13 nt, Human
cacgacugucucc

SEQ ID NO: 3432141 - RNA, 16 nt, Human
cacgacugucuccaug

SEQ ID NO: 3432142 - RNA, 16 nt, Human
cacgagaccccggcuu

SEQ ID NO: 3432143 - RNA, 13 nt, Human
cacgagagcccgg

SEQ ID NO: 3432144 - RNA, 17 nt, Human
cacgagcaggcuacugu

SEQ ID NO: 3432145 - RNA, 20 nt, Human
cacgagcaggcuacugucag

SEQ ID NO: 3432146 - RNA, 12 nt, Human
cacgagccaccu

SEQ ID NO: 3432147 - RNA, 22 nt, Human
cacgaggaaucugugggucugg

SEQ ID NO: 3432148 - RNA, 23 nt, Human
cacgaggaaucugugggucuggg

SEQ ID NO: 3432149 - RNA, 21 nt, Human
cacgagggcuggcuggccuca

SEQ ID NO: 3432150 - RNA, 22 nt, Human
cacgagggcuggcuggccucac

SEQ ID NO: 3432151 - RNA, 15 nt, Human
cacgauccugccacc

SEQ ID NO: 3432152 - RNA, 14 nt, Human
cacgauguggcccu

SEQ ID NO: 3432153 - RNA, 21 nt, Human
cacgauguggcccuggccugc

SEQ ID NO: 3432154 - RNA, 15 nt, Human
cacgauucauuuuug

SEQ ID NO: 3432155 - RNA, 21 nt, Human
cacgauuuucuccagcucaga

SEQ ID NO: 3432156 - RNA, 22 nt, Human
cacgcacacacacacacaggag

SEQ ID NO: 3432157 - RNA, 19 nt, Human
cacgcaccucccauccuaa

SEQ ID NO: 3432158 - RNA, 23 nt, Human
cacgcacuggguugcgggacaga

SEQ ID NO: 3432159 - RNA, 21 nt, Human
cacgcagccaggacaccgggc

SEQ ID NO: 3432160 - RNA, 16 nt, Human
cacgcaggaacuccca

SEQ ID NO: 3432161 - RNA, 17 nt, Human
cacgcaggaacucccag

SEQ ID NO: 3432162 - RNA, 23 nt, Human
auguagcaaacccugucaaacau

SEQ ID NO: 3432163 - RNA, 19 nt, Human
auguagcacauaaacuuug

SEQ ID NO: 3432164 - RNA, 19 nt, Human
auguagccccucuccugga

SEQ ID NO: 3432165 - RNA, 16 nt, Human
auguagcguguuuaca

SEQ ID NO: 3432166 - RNA, 21 nt, Human
auguagcguguuuacaugugu

SEQ ID NO: 3432167 - RNA, 22 nt, Human
auguagcguguuuacaugugua

SEQ ID NO: 3432168 - RNA, 22 nt, Human
auguagcucugcaucuccuguc

SEQ ID NO: 3432169 - RNA, 22 nt, Human
auguagcucuuugucagggagu

SEQ ID NO: 3432170 - RNA, 16 nt, Human
auguaggaaaaaaaua

SEQ ID NO: 3432171 - RNA, 23 nt, Human
auguaggagcugccuuggcucag

SEQ ID NO: 3432172 - RNA, 16 nt, Human
auguagguaugaauaa

SEQ ID NO: 3432173 - RNA, 12 nt, Human
auguagguccuc

SEQ ID NO: 3432174 - RNA, 21 nt, Human
auguagguccucagaaagugu

SEQ ID NO: 3432175 - RNA, 17 nt, Human
auguaguaacacuaaua

SEQ ID NO: 3432176 - RNA, 20 nt, Human
auguaguaacacuaauauau

SEQ ID NO: 3432177 - RNA, 16 nt, Human
auguaguaauugacau

SEQ ID NO: 3432178 - RNA, 18 nt, Human
auguaguaauugacaugu

SEQ ID NO: 3432179 - RNA, 23 nt, Human
auguaguaucaaauauuagaugu

SEQ ID NO: 3432180 - RNA, 21 nt, Human
auguaguauuuuuuguauaau

SEQ ID NO: 3432181 - RNA, 22 nt, Human
auguaguauuuuuuguauaauu

SEQ ID NO: 3432182 - RNA, 17 nt, Human
auguaguucugcuccag

SEQ ID NO: 3432183 - RNA, 15 nt, Human
auguaguugauguau

SEQ ID NO: 3432184 - RNA, 14 nt, Human
auguaguuugagga

SEQ ID NO: 3432185 - RNA, 19 nt, Human
auguaguuugaggaaauuu

SEQ ID NO: 3432186 - RNA, 24 nt, Human
auguaguuugaggaaauuugcagc

SEQ ID NO: 3432187 - RNA, 14 nt, Human
auguauaaaauaca

SEQ ID NO: 3432188 - RNA, 21 nt, Human
auguauaaagcaacuguuaug

SEQ ID NO: 3432189 - RNA, 22 nt, Human
auguauaaagcaacuguuauga

SEQ ID NO: 3432190 - RNA, 12 nt, Human
auguauaaauau

SEQ ID NO: 3432191 - RNA, 16 nt, Human
auguauaaauauacag

SEQ ID NO: 3432192 - RNA, 17 nt, Human
auguauaaauauacagu

SEQ ID NO: 3432193 - RNA, 20 nt, Human
auguauaacuuuaacuucug

SEQ ID NO: 3432194 - RNA, 23 nt, Human
auguauaauauuuuuaauuaaau

SEQ ID NO: 3432195 - RNA, 21 nt, Human
auguauaauucaaagcaccaa

SEQ ID NO: 3432196 - RNA, 15 nt, Human
auguauacugccacu

SEQ ID NO: 3432197 - RNA, 14 nt, Human
cacugccugcuccc

SEQ ID NO: 3432198 - RNA, 20 nt, Human
cacugccugcucccauccug

SEQ ID NO: 3432199 - RNA, 12 nt, Human
cacugccuuuuu

SEQ ID NO: 3432200 - RNA, 22 nt, Human
cacugcgaagacccucuugccc

SEQ ID NO: 3432201 - RNA, 20 nt, Human
cacugcggggcuuggcugag

SEQ ID NO: 3432202 - RNA, 21 nt, Human
cacugcggggcuuggcugaga

SEQ ID NO: 3432203 - RNA, 18 nt, Human
cacugcuaagaauauuug

SEQ ID NO: 3432204 - RNA, 21 nt, Human
cacugcuaggcgagugccagg

SEQ ID NO: 3432205 - RNA, 22 nt, Human
cacugcucccuaagccagccug

SEQ ID NO: 3432206 - RNA, 14 nt, Human
cacugcucccugaa

SEQ ID NO: 3432207 - RNA, 18 nt, Human
cacugcucccugaagcca

SEQ ID NO: 3432208 - RNA, 17 nt, Human
cacugcuccguggagga

SEQ ID NO: 3432209 - RNA, 15 nt, Human
cacugcucuaacagc

SEQ ID NO: 3432210 - RNA, 18 nt, Human
cacugcucuaacagcccu

SEQ ID NO: 3432211 - RNA, 15 nt, Human
cacugcucucaccuu

SEQ ID NO: 3432212 - RNA, 23 nt, Human
cacugcucucaccuugguuccug

SEQ ID NO: 3432213 - RNA, 17 nt, Human
cacugcucuccagccug

SEQ ID NO: 3432214 - RNA, 19 nt, Human
cacugcugcaaggccuuuc

SEQ ID NO: 3432215 - RNA, 15 nt, Human
cacugcugcccagcc

SEQ ID NO: 3432216 - RNA, 23 nt, Human
cacugcugcuucuccauggccac

SEQ ID NO: 3432217 - RNA, 13 nt, Human
cacugcugggugg

SEQ ID NO: 3432218 - RNA, 14 nt, Human
cacugcuggguggc

SEQ ID NO: 3432219 - RNA, 17 nt, Human
cacugcuggguggccca

SEQ ID NO: 3432220 - RNA, 20 nt, Human
cacugcuggguggcccaucc

SEQ ID NO: 3432221 - RNA, 22 nt, Human
cacugcuggguggcccaucccc

SEQ ID NO: 3432222 - RNA, 11 nt, Human
cacugcuguga

SEQ ID NO: 3432223 - RNA, 22 nt, Human
cacugcuuccagugaggcucug

SEQ ID NO: 3432224 - RNA, 20 nt, Human
cacugcuugaacuaggcuga

SEQ ID NO: 3432225 - RNA, 19 nt, Human
cacugcuugaugaagcaag

SEQ ID NO: 3432226 - RNA, 12 nt, Human
cacuggaaaggg

SEQ ID NO: 3432227 - RNA, 19 nt, Human
cacuggaaaggggagagcc

SEQ ID NO: 3432228 - RNA, 22 nt, Human
cacuggaaaggggagagccugc

SEQ ID NO: 3432229 - RNA, 13 nt, Human
cacuggaacucag

SEQ ID NO: 3432230 - RNA, 15 nt, Human
cacuggaccccagca

SEQ ID NO: 3432231 - RNA, 17 nt, Human
cacuggaccccagcaag

SEQ ID NO: 3432232 - RNA, 15 nt, Human
cacuggacuccggcc

SEQ ID NO: 3432233 - RNA, 16 nt, Human
cacuggacugaccugg

SEQ ID NO: 3432234 - RNA, 12 nt, Human
cacuggagcaca

SEQ ID NO: 3432235 - RNA, 13 nt, Human
cacuggagcacaa

SEQ ID NO: 3432236 - RNA, 17 nt, Human
cacuggagcaccaggca

SEQ ID NO: 3432237 - RNA, 14 nt, Human
cacuggagcagaag

SEQ ID NO: 3432238 - RNA, 19 nt, Human
cacuggagcagaaggggag

SEQ ID NO: 3432239 - RNA, 20 nt, Human
cacuggagccaucucuuccu

SEQ ID NO: 3432240 - RNA, 12 nt, Human
cacuggagccca

SEQ ID NO: 3432241 - RNA, 15 nt, Human
cacuggagcccagga

SEQ ID NO: 3432242 - RNA, 19 nt, Human
cacuggaggagagaagaau

SEQ ID NO: 3432243 - RNA, 18 nt, Human
cacuggagugcagggagg

SEQ ID NO: 3432244 - RNA, 19 nt, Human
cacuggaguggcucgccag

SEQ ID NO: 3432245 - RNA, 22 nt, Human
cacuggaguuacauuaauguua

SEQ ID NO: 3432246 - RNA, 21 nt, Human
cacuggaugggcugcagcaga

SEQ ID NO: 3432247 - RNA, 20 nt, Human
cacuggcaaacagggccucu

SEQ ID NO: 3432248 - RNA, 22 nt, Human
cacuggcaaacagggccucugc

SEQ ID NO: 3432249 - RNA, 18 nt, Human
cacuggcaaugguaguuu

SEQ ID NO: 3432250 - RNA, 19 nt, Human
cacuggcagacuguguaaa

SEQ ID NO: 3432251 - RNA, 13 nt, Human
cacuggcagcccc

SEQ ID NO: 3432252 - RNA, 17 nt, Human
cacuggcagccccagca

SEQ ID NO: 3432253 - RNA, 12 nt, Human
cacuggccacca

SEQ ID NO: 3432254 - RNA, 14 nt, Human
cacuggccaccagg

SEQ ID NO: 3432255 - RNA, 19 nt, Human
cacuggccaccaggcuggc

SEQ ID NO: 3432256 - RNA, 20 nt, Human
cacuggccaccaggcuggcg

SEQ ID NO: 3432257 - RNA, 24 nt, Human
cacuggccaccaggcuggcgcagc

SEQ ID NO: 3432258 - RNA, 14 nt, Human
cacuggccaucccu

SEQ ID NO: 3432259 - RNA, 17 nt, Human
cacuggccaucuccacc

SEQ ID NO: 3432260 - RNA, 13 nt, Human
cacuggccccuca

SEQ ID NO: 3432261 - RNA, 17 nt, Human
cacuggccccugagauc

SEQ ID NO: 3432262 - RNA, 20 nt, Human
cacuggccggagucagugcc

SEQ ID NO: 3432263 - RNA, 21 nt, Human
cacuggccuucugaugaaaug

SEQ ID NO: 3432264 - RNA, 14 nt, Human
cacuggcucaccca

SEQ ID NO: 3432265 - RNA, 11 nt, Human
cacuggcucuc

SEQ ID NO: 3432266 - RNA, 15 nt, Human
cacuggcucuccaag

SEQ ID NO: 3432267 - RNA, 16 nt, Human
cacuggcucuccaagu

SEQ ID NO: 3432268 - RNA, 18 nt, Human
cacuggcucuccaagugc

SEQ ID NO: 3432269 - RNA, 21 nt, Human
cacuggcucuccaagugccag

SEQ ID NO: 3432270 - RNA, 14 nt, Human
cacuggcugccagc

SEQ ID NO: 3432271 - RNA, 15 nt, Human
cacuggcugccagcu

SEQ ID NO: 3432272 - RNA, 13 nt, Human
cacuggcugccuc

SEQ ID NO: 3432273 - RNA, 22 nt, Human
cacuggcugccuccacucccac

SEQ ID NO: 3432274 - RNA, 18 nt, Human
cacuggcugugggcuccc

SEQ ID NO: 3432275 - RNA, 20 nt, Human
cacuggcugugggcucccuu

SEQ ID NO: 3432276 - RNA, 18 nt, Human
cacugggaaacagaggcu

SEQ ID NO: 3432277 - RNA, 20 nt, Human
cacugggagaggugccagca

SEQ ID NO: 3432278 - RNA, 14 nt, Human
cacugggaggccag

SEQ ID NO: 3432279 - RNA, 15 nt, Human
cacugggcacaacug

SEQ ID NO: 3432280 - RNA, 15 nt, Human
cacugggcucccggg

SEQ ID NO: 3432281 - RNA, 20 nt, Human
cacugggcuuggggaccaga

SEQ ID NO: 3432282 - RNA, 17 nt, Human
cacuggggauugggccc

SEQ ID NO: 3432283 - RNA, 23 nt, Human
cacuggggauugggccccugcca

SEQ ID NO: 3432284 - RNA, 21 nt, Human
cacuggggcagacaauaaacc

SEQ ID NO: 3432285 - RNA, 13 nt, Human
cacuggggcaggg

SEQ ID NO: 3432286 - RNA, 15 nt, Human
cacuggggcaggggc

SEQ ID NO: 3432287 - RNA, 16 nt, Human
cacuggggccuacagc

SEQ ID NO: 3432288 - RNA, 18 nt, Human
cacuggggcucagagccg

SEQ ID NO: 3432289 - RNA, 19 nt, Human
cacuggggcucagagccgg

SEQ ID NO: 3432290 - RNA, 13 nt, Human
cacuggggcuggc

SEQ ID NO: 3432291 - RNA, 14 nt, Human
cacugggggagggg

SEQ ID NO: 3432292 - RNA, 18 nt, Human
cacugggguccuggggcc

SEQ ID NO: 3432293 - RNA, 20 nt, Human
cacugggguccuggggccuc

SEQ ID NO: 3432294 - RNA, 13 nt, Human
cacuggggugccg

SEQ ID NO: 3432295 - RNA, 15 nt, Human
cacuggggugccgcc

SEQ ID NO: 3432296 - RNA, 21 nt, Human
cacuggggugccgccugcccg

SEQ ID NO: 3432297 - RNA, 18 nt, Human
cacuggguggggugagga

SEQ ID NO: 3432298 - RNA, 21 nt, Human
cacuggguggggugaggacca

SEQ ID NO: 3432299 - RNA, 23 nt, Human
cacuggguggggugaggaccacu

SEQ ID NO: 3432300 - RNA, 15 nt, Human
cacugggugguggcc

SEQ ID NO: 3432301 - RNA, 17 nt, Human
cacugggugguggccug

SEQ ID NO: 3432302 - RNA, 19 nt, Human
cacugguagguugggacac

SEQ ID NO: 3432303 - RNA, 20 nt, Human
cacugguauuccugccucca

SEQ ID NO: 3432304 - RNA, 22 nt, Human
cacugguccccaacaaugugag

SEQ ID NO: 3432305 - RNA, 20 nt, Human
cacuggucuguuugcauuug

SEQ ID NO: 3432306 - RNA, 13 nt, Human
cacuggugacaug

SEQ ID NO: 3432307 - RNA, 17 nt, Human
cacuggugccaugucag

SEQ ID NO: 3432308 - RNA, 23 nt, Human
cacugguggcccgacagccuggc

SEQ ID NO: 3432309 - RNA, 14 nt, Human
cacugguuugaaga

SEQ ID NO: 3432310 - RNA, 14 nt, Human
cacugguuugguuc

SEQ ID NO: 3432311 - RNA, 15 nt, Human
cacugguuuuaaaua

SEQ ID NO: 3432312 - RNA, 13 nt, Human
cacuguaaaauga

SEQ ID NO: 3432313 - RNA, 16 nt, Human
cacuguaaaaugaaau

SEQ ID NO: 3432314 - RNA, 22 nt, Human
cacuguaagacucauucccuag

SEQ ID NO: 3432315 - RNA, 20 nt, Human
cacuguacaagguaccccuu

SEQ ID NO: 3432316 - RNA, 19 nt, Human
cacuguacuugcucuugau

SEQ ID NO: 3432317 - RNA, 17 nt, Human
cacuguagcucuaaaau

SEQ ID NO: 3432318 - RNA, 19 nt, Human
cacuguagcucuaaaaucu

SEQ ID NO: 3432319 - RNA, 20 nt, Human
cacuguaguaaauaaugcuu

SEQ ID NO: 3432320 - RNA, 22 nt, Human
cacuguaguaaauaaugcuuug

SEQ ID NO: 3432321 - RNA, 12 nt, Human
cacgcaggagca

SEQ ID NO: 3432322 - RNA, 19 nt, Human
cacgcaggagcacacccag

SEQ ID NO: 3432323 - RNA, 14 nt, Human
cacgccacugcacu

SEQ ID NO: 3432324 - RNA, 19 nt, Human
cacgccagauucuuuccug

SEQ ID NO: 3432325 - RNA, 20 nt, Human
cacgccagauucuuuccuga

SEQ ID NO: 3432326 - RNA, 14 nt, Human
cacgcccaugugug

SEQ ID NO: 3432327 - RNA, 17 nt, Human
cacgcccccacugguga

SEQ ID NO: 3432328 - RNA, 23 nt, Human
cacgcccccacuggugacauguc

SEQ ID NO: 3432329 - RNA, 21 nt, Human
cacgcccgggguggccacagc

SEQ ID NO: 3432330 - RNA, 15 nt, Human
cacgcccguccugcc

SEQ ID NO: 3432331 - RNA, 20 nt, Human
cacgcccucauuacggcucc

SEQ ID NO: 3432332 - RNA, 15 nt, Human
cacgcccuccccucc

SEQ ID NO: 3432333 - RNA, 21 nt, Human
cacgcccuccccuccccugcu

SEQ ID NO: 3432334 - RNA, 21 nt, Human
cacgccgggaaccaagcagga

SEQ ID NO: 3432335 - RNA, 15 nt, Human
cacgccuagccucac

SEQ ID NO: 3432336 - RNA, 14 nt, Human
cacgccucccacug

SEQ ID NO: 3432337 - RNA, 16 nt, Human
cacgccucccacuggg

SEQ ID NO: 3432338 - RNA, 17 nt, Human
cacgccucccacugggg

SEQ ID NO: 3432339 - RNA, 14 nt, Human
cacgccuguaaucc

SEQ ID NO: 3432340 - RNA, 17 nt, Human
cacgccuguaaucccag

SEQ ID NO: 3432341 - RNA, 23 nt, Human
cacugucccucaaaugacccaaa

SEQ ID NO: 3432342 - RNA, 15 nt, Human
cacugucccuccugg

SEQ ID NO: 3432343 - RNA, 16 nt, Human
cacugucccuccuggu

SEQ ID NO: 3432344 - RNA, 17 nt, Human
cacugucccuugccuca

SEQ ID NO: 3432345 - RNA, 16 nt, Human
cacuguccuauuauau

SEQ ID NO: 3432346 - RNA, 12 nt, Human
cacuguccugcu

SEQ ID NO: 3432347 - RNA, 20 nt, Human
cacuguccugcuccacagug

SEQ ID NO: 3432348 - RNA, 21 nt, Human
cacuguccugcuccacagugu

SEQ ID NO: 3432349 - RNA, 16 nt, Human
cacuguccugggcgcc

SEQ ID NO: 3432350 - RNA, 19 nt, Human
cacuguccugggcgcccug

SEQ ID NO: 3432351 - RNA, 23 nt, Human
cacuguccugggcgcccuggaag

SEQ ID NO: 3432352 - RNA, 11 nt, Human
cacugucugag

SEQ ID NO: 3432353 - RNA, 13 nt, Human
cacugucuuuccu

SEQ ID NO: 3432354 - RNA, 14 nt, Human
cacugugaaggacc

SEQ ID NO: 3432355 - RNA, 15 nt, Human
cacugugaaggaccc

SEQ ID NO: 3432356 - RNA, 22 nt, Human
cacugugacccccagcuccggc

SEQ ID NO: 3432357 - RNA, 17 nt, Human
cacugugagcucccagg

SEQ ID NO: 3432358 - RNA, 22 nt, Human
cacugugcaggugcuauuguua

SEQ ID NO: 3432359 - RNA, 13 nt, Human
cacugugcccugg

SEQ ID NO: 3432360 - RNA, 16 nt, Human
cacugugcccuggugg

SEQ ID NO: 3432361 - RNA, 21 nt, Human
cacugugccuuugcaaaucag

SEQ ID NO: 3432362 - RNA, 16 nt, Human
cacugugcucagggcu

SEQ ID NO: 3432363 - RNA, 13 nt, Human
cacugugcugagu

SEQ ID NO: 3432364 - RNA, 19 nt, Human
cacuguggaacuaauaaau

SEQ ID NO: 3432365 - RNA, 20 nt, Human
cacuguggaacuaauaaaua

SEQ ID NO: 3432366 - RNA, 21 nt, Human
cacuguggaacugcuauuuuc

SEQ ID NO: 3432367 - RNA, 24 nt, Human
cacuguggacuuggucaccagcuc

SEQ ID NO: 3432368 - RNA, 15 nt, Human
cacugugggugugug

SEQ ID NO: 3432369 - RNA, 16 nt, Human
cacuguggguguguga

SEQ ID NO: 3432370 - RNA, 13 nt, Human
cacuguguauauu

SEQ ID NO: 3432371 - RNA, 16 nt, Human
cacuguguauauuuga

SEQ ID NO: 3432372 - RNA, 18 nt, Human
cacuguguauauuugauu

SEQ ID NO: 3432373 - RNA, 20 nt, Human
cacuguguauauuugauuua

SEQ ID NO: 3432374 - RNA, 15 nt, Human
cacugugugcuauuu

SEQ ID NO: 3432375 - RNA, 15 nt, Human
cacuguguuccuucc

SEQ ID NO: 3432376 - RNA, 16 nt, Human
cacuguuagaacacua

SEQ ID NO: 3432377 - RNA, 23 nt, Human
cacuguuagaacacuauuuucag

SEQ ID NO: 3432378 - RNA, 19 nt, Human
cacuguuauuuucagcaug

SEQ ID NO: 3432379 - RNA, 14 nt, Human
cacuguucccucug

SEQ ID NO: 3432380 - RNA, 23 nt, Human
cacuguucuauucaucucaagga

SEQ ID NO: 3432381 - RNA, 14 nt, Human
cacuguucucugcc

SEQ ID NO: 3432382 - RNA, 19 nt, Human
cacuguucucugcccucca

SEQ ID NO: 3432383 - RNA, 19 nt, Human
cacuguucugaaagugacu

SEQ ID NO: 3432384 - RNA, 14 nt, Human
cacuguugaaaauu

SEQ ID NO: 3432385 - RNA, 16 nt, Human
cacuguugauaaaaac

SEQ ID NO: 3432386 - RNA, 14 nt, Human
cacuguugauguau

SEQ ID NO: 3432387 - RNA, 16 nt, Human
cacuguugauguaucu

SEQ ID NO: 3432388 - RNA, 18 nt, Human
cacuguugauguaucuga

SEQ ID NO: 3432389 - RNA, 15 nt, Human
cacuguugcccaggc

SEQ ID NO: 3432390 - RNA, 19 nt, Human
cacuguugcccaggcuggc

SEQ ID NO: 3432391 - RNA, 21 nt, Human
cacuguuuaaguacuguuuac

SEQ ID NO: 3432392 - RNA, 12 nt, Human
cacuguuuagau

SEQ ID NO: 3432393 - RNA, 23 nt, Human
cacuguuuagauuugccauagag

SEQ ID NO: 3432394 - RNA, 21 nt, Human
cacuguuuauacacuguguaa

SEQ ID NO: 3432395 - RNA, 18 nt, Human
cacuguuucucugcuguu

SEQ ID NO: 3432396 - RNA, 17 nt, Human
cacuguuucucuugagc

SEQ ID NO: 3432397 - RNA, 19 nt, Human
cacuguuucuugcuuguac

SEQ ID NO: 3432398 - RNA, 22 nt, Human
cacuguuuguuuacaaaaucag

SEQ ID NO: 3432399 - RNA, 21 nt, Human
cacuguuuuuagacaccuuca

SEQ ID NO: 3432400 - RNA, 13 nt, Human
cacuguuuuucca

SEQ ID NO: 3432401 - RNA, 16 nt, Human
cacuguuuuuccauag

SEQ ID NO: 3432402 - RNA, 17 nt, Human
cacuuaaaaugugcagu

SEQ ID NO: 3432403 - RNA, 17 nt, Human
cacuuaaagaaguauuu

SEQ ID NO: 3432404 - RNA, 15 nt, Human
cacuuaaauaucaau

SEQ ID NO: 3432405 - RNA, 12 nt, Human
cacuuaacaaac

SEQ ID NO: 3432406 - RNA, 23 nt, Human
cacuuaaccaagacaaaaagcca

SEQ ID NO: 3432407 - RNA, 15 nt, Human
cacuuaagagaauau

SEQ ID NO: 3432408 - RNA, 17 nt, Human
cacuuaaggcacucugu

SEQ ID NO: 3432409 - RNA, 22 nt, Human
cacuuaaguuaguuccacugag

SEQ ID NO: 3432410 - RNA, 14 nt, Human
cacuuaauguaugu

SEQ ID NO: 3432411 - RNA, 14 nt, Human
cacuuaauucuguu

SEQ ID NO: 3432412 - RNA, 21 nt, Human
cacuuacagauaggccuucuu

SEQ ID NO: 3432413 - RNA, 23 nt, Human
cacuuacagauaggccuucuugu

SEQ ID NO: 3432414 - RNA, 19 nt, Human
cacuuacauauauuuuuaa

SEQ ID NO: 3432415 - RNA, 14 nt, Human
cacuuaccuucaau

SEQ ID NO: 3432416 - RNA, 22 nt, Human
cacuuaccuucaauaaaguauc

SEQ ID NO: 3432417 - RNA, 21 nt, Human
cacuuacugguaggaccaagc

SEQ ID NO: 3432418 - RNA, 16 nt, Human
cacuuacuguuucugu

SEQ ID NO: 3432419 - RNA, 15 nt, Human
cacuuaggcuuugua

SEQ ID NO: 3432420 - RNA, 14 nt, Human
cacuuauagccucu

SEQ ID NO: 3432421 - RNA, 16 nt, Human
cacuuauagccucugu

SEQ ID NO: 3432422 - RNA, 22 nt, Human
cacuuauauguucuaauuaaua

SEQ ID NO: 3432423 - RNA, 15 nt, Human
cacuuaucccucucc

SEQ ID NO: 3432424 - RNA, 16 nt, Human
cacuuaucccucucca

SEQ ID NO: 3432425 - RNA, 16 nt, Human
cacuuaucugaucaga

SEQ ID NO: 3432426 - RNA, 21 nt, Human
cacuuaugaaugauuugcaua

SEQ ID NO: 3432427 - RNA, 23 nt, Human
cacuuauguuacugguguccagc

SEQ ID NO: 3432428 - RNA, 17 nt, Human
cacuuauucucaagaag

SEQ ID NO: 3432429 - RNA, 15 nt, Human
cacuuauugaauaua

SEQ ID NO: 3432430 - RNA, 14 nt, Human
cacuuauugcuuug

SEQ ID NO: 3432431 - RNA, 15 nt, Human
cacuuauugcuuuga

SEQ ID NO: 3432432 - RNA, 16 nt, Human
cacuuauuguaaauuu

SEQ ID NO: 3432433 - RNA, 20 nt, Human
cacuuauuuaugaaccugcc

SEQ ID NO: 3432434 - RNA, 16 nt, Human
cacuucaaacuacuuu

SEQ ID NO: 3432435 - RNA, 17 nt, Human
cacuucaaggugacaga

SEQ ID NO: 3432436 - RNA, 22 nt, Human
cacuucaaggugacagaaggac

SEQ ID NO: 3432437 - RNA, 19 nt, Human
cacuucaauaauuguccau

SEQ ID NO: 3432438 - RNA, 15 nt, Human
cacuucaaugcacau

SEQ ID NO: 3432439 - RNA, 13 nt, Human
cacuucacagagu

SEQ ID NO: 3432440 - RNA, 18 nt, Human
cacuucacuccagccugg

SEQ ID NO: 3432441 - RNA, 20 nt, Human
cacuucaggcucuucuccuu

SEQ ID NO: 3432442 - RNA, 23 nt, Human
cacuucaggcucuucuccuuuca

SEQ ID NO: 3432443 - RNA, 19 nt, Human
cacuucagggcuuuacucc

SEQ ID NO: 3432444 - RNA, 22 nt, Human
cacuucaggguucuccucuccc

SEQ ID NO: 3432445 - RNA, 20 nt, Human
cacuucagguauaccucacu

SEQ ID NO: 3432446 - RNA, 15 nt, Human
cacuucauaauccag

SEQ ID NO: 3432447 - RNA, 15 nt, Human
cacuucaucuucuca

SEQ ID NO: 3432448 - RNA, 22 nt, Human
cacuucauucuugaaagcugug

SEQ ID NO: 3432449 - RNA, 19 nt, Human
cacuuccaaaauucuuauu

SEQ ID NO: 3432450 - RNA, 14 nt, Human
cacuuccaccagcc

SEQ ID NO: 3432451 - RNA, 16 nt, Human
cacuuccaccagccug

SEQ ID NO: 3432452 - RNA, 20 nt, Human
cacuuccauaaucuggacuc

SEQ ID NO: 3432453 - RNA, 13 nt, Human
cacuuccauggga

SEQ ID NO: 3432454 - RNA, 14 nt, Human
cacuucccacccug

SEQ ID NO: 3432455 - RNA, 19 nt, Human
cacuucccucaucucuccu

SEQ ID NO: 3432456 - RNA, 15 nt, Human
cacuucccucuguuu

SEQ ID NO: 3432457 - RNA, 10 nt, Human
cacuucccug

SEQ ID NO: 3432458 - RNA, 15 nt, Human
cacuucccugacacu

SEQ ID NO: 3432459 - RNA, 20 nt, Human
cacuucccugacacugcggg

SEQ ID NO: 3432460 - RNA, 15 nt, Human
cacuucccugcugcc

SEQ ID NO: 3432461 - RNA, 17 nt, Human
cacuuccuacaagagca

SEQ ID NO: 3432462 - RNA, 14 nt, Human
cacuuccuguccag

SEQ ID NO: 3432463 - RNA, 15 nt, Human
cacuuccuuuuaacu

SEQ ID NO: 3432464 - RNA, 21 nt, Human
cacuucgggaggucgaggcag

SEQ ID NO: 3432465 - RNA, 19 nt, Human
cacuucguucgcagagcuu

SEQ ID NO: 3432466 - RNA, 17 nt, Human
cacuucuaaauagcaau

SEQ ID NO: 3432467 - RNA, 18 nt, Human
cacuucuaaaugaagugc

SEQ ID NO: 3432468 - RNA, 23 nt, Human
cacuucuaaguugaguauauuau

SEQ ID NO: 3432469 - RNA, 20 nt, Human
cacuucuaggguaugggaaa

SEQ ID NO: 3432470 - RNA, 21 nt, Human
cacuucucacaucuuaugcua

SEQ ID NO: 3432471 - RNA, 16 nt, Human
cacuucucaucacaca

SEQ ID NO: 3432472 - RNA, 20 nt, Human
cacuucucaucacacacaug

SEQ ID NO: 3432473 - RNA, 16 nt, Human
cacuucugaccacacu

SEQ ID NO: 3432474 - RNA, 23 nt, Human
cacuucuggauauagcuagguga

SEQ ID NO: 3432475 - RNA, 20 nt, Human
cacuucugggcuucaucugg

SEQ ID NO: 3432476 - RNA, 19 nt, Human
cacuucuggucaaucaaca

SEQ ID NO: 3432477 - RNA, 14 nt, Human
cacuucuguccugu

SEQ ID NO: 3432478 - RNA, 21 nt, Human
cacuucugugagacccccaca

SEQ ID NO: 3432479 - RNA, 12 nt, Human
cacuucuuccuu

SEQ ID NO: 3432480 - RNA, 15 nt, Human
cacuacaccacacac

SEQ ID NO: 3432481 - RNA, 21 nt, Human
cacuacaccacacacaacagc

SEQ ID NO: 3432482 - RNA, 14 nt, Human
cacuacacccagca

SEQ ID NO: 3432483 - RNA, 15 nt, Human
cacuacacccagcaa

SEQ ID NO: 3432484 - RNA, 17 nt, Human
cacuacacccagcaaua

SEQ ID NO: 3432485 - RNA, 18 nt, Human
cacuggaggcaugugaug

SEQ ID NO: 3432486 - RNA, 18 nt, Human
cacuggagguugaagcca

SEQ ID NO: 3432487 - RNA, 21 nt, Human
cacuggagguugaagccaagu

SEQ ID NO: 3432488 - RNA, 16 nt, Human
cacuggaguccagucu

SEQ ID NO: 3432489 - RNA, 16 nt, Human
cacuggagugcaggga

SEQ ID NO: 3432490 - RNA, 17 nt, Human
cacuggagugcagggag

SEQ ID NO: 3432491 - RNA, 20 nt, Human
cacuggagugcagggaggag

SEQ ID NO: 3432492 - RNA, 20 nt, Human
cacuggaguggcucgccagg

SEQ ID NO: 3432493 - RNA, 21 nt, Human
cacuggaguggcucgccaggc

SEQ ID NO: 3432494 - RNA, 15 nt, Human
cacuggaugcagaaa

SEQ ID NO: 3432495 - RNA, 17 nt, Human
cacuggcaaacagggcc

SEQ ID NO: 3432496 - RNA, 18 nt, Human
cacuggcaaacagggccu

SEQ ID NO: 3432497 - RNA, 21 nt, Human
cacuggcagacuguguaaaau

SEQ ID NO: 3432498 - RNA, 19 nt, Human
cacuggcagccccagcacc

SEQ ID NO: 3432499 - RNA, 16 nt, Human
cacuggcaucuuugcu

SEQ ID NO: 3432500 - RNA, 19 nt, Human
cacuggcauugucccugug

SEQ ID NO: 3432501 - RNA, 10 nt, Human
cacuggccac

SEQ ID NO: 3432502 - RNA, 15 nt, Human
cacuggccaccaggc

SEQ ID NO: 3432503 - RNA, 17 nt, Human
cacuggccaccaggcug

SEQ ID NO: 3432504 - RNA, 14 nt, Human
cacuggccccaccc

SEQ ID NO: 3432505 - RNA, 16 nt, Human
cacuggccccacccuc

SEQ ID NO: 3432506 - RNA, 23 nt, Human
cacuggccuucugaugaaauguu

SEQ ID NO: 3432507 - RNA, 15 nt, Human
cacuggcucacccag

SEQ ID NO: 3432508 - RNA, 14 nt, Human
cacuggcucuccaa

SEQ ID NO: 3432509 - RNA, 22 nt, Human
cacuggcucuccaagugccaga

SEQ ID NO: 3432510 - RNA, 17 nt, Human
cacuggcucuccuggcc

SEQ ID NO: 3432511 - RNA, 21 nt, Human
cacuggcucuccuggcccugg

SEQ ID NO: 3432512 - RNA, 15 nt, Human
cacuggcucucucca

SEQ ID NO: 3432513 - RNA, 16 nt, Human
cacuggcucucuccag

SEQ ID NO: 3432514 - RNA, 18 nt, Human
cacuggcugccagcuauu

SEQ ID NO: 3432515 - RNA, 20 nt, Human
cacuggcugccagcuauuuu

SEQ ID NO: 3432516 - RNA, 14 nt, Human
cacuggcugccucc

SEQ ID NO: 3432517 - RNA, 15 nt, Human
cacuggcugccucca

SEQ ID NO: 3432518 - RNA, 23 nt, Human
cacuggcugccuccacucccacu

SEQ ID NO: 3432519 - RNA, 22 nt, Human
cacuggcugucaguaugacauu

SEQ ID NO: 3432520 - RNA, 17 nt, Human
cacuggcugugggcucc

SEQ ID NO: 3432521 - RNA, 16 nt, Human
cacugggagaggugcc

SEQ ID NO: 3432522 - RNA, 23 nt, Human
cacugggagaggugccagcaacu

SEQ ID NO: 3432523 - RNA, 12 nt, Human
cacugggaucac

SEQ ID NO: 3432524 - RNA, 22 nt, Human
cacugggaucacaggugucagc

SEQ ID NO: 3432525 - RNA, 23 nt, Human
cacugggaugagccgcugugagc

SEQ ID NO: 3432526 - RNA, 19 nt, Human
auuaaaaacuaguaguucu

SEQ ID NO: 3432527 - RNA, 17 nt, Human
auuaaaaagauucuuuu

SEQ ID NO: 3432528 - RNA, 22 nt, Human
auuaaaaagauucuuuuucuga

SEQ ID NO: 3432529 - RNA, 13 nt, Human
auuaaaaaguuaa

SEQ ID NO: 3432530 - RNA, 13 nt, Human
auuaaaaauauaa

SEQ ID NO: 3432531 - RNA, 20 nt, Human
auuaaaaaucucaaauuucu

SEQ ID NO: 3432532 - RNA, 22 nt, Human
auuaaaaaucucaaauuucuaa

SEQ ID NO: 3432533 - RNA, 23 nt, Human
auuaaaaaucucaaauuucuaaa

SEQ ID NO: 3432534 - RNA, 17 nt, Human
auuaaaaaugguaaaau

SEQ ID NO: 3432535 - RNA, 18 nt, Human
auuaaaaaugguaaaauu

SEQ ID NO: 3432536 - RNA, 19 nt, Human
auuaaaaaugguaaaauug

SEQ ID NO: 3432537 - RNA, 20 nt, Human
auuaaaacaauauuguuucu

SEQ ID NO: 3432538 - RNA, 21 nt, Human
auuaaaacaauauuguuucua

SEQ ID NO: 3432539 - RNA, 23 nt, Human
auuaaaacacaacaucuuuuucu

SEQ ID NO: 3432540 - RNA, 13 nt, Human
auuaaaacauugg

SEQ ID NO: 3432541 - RNA, 14 nt, Human
auuaaaacauugga

SEQ ID NO: 3432542 - RNA, 11 nt, Human
auuaaaaccac

SEQ ID NO: 3432543 - RNA, 17 nt, Human
auuaaaacuaaauuuca

SEQ ID NO: 3432544 - RNA, 15 nt, Human
auuaaaacugaauug

SEQ ID NO: 3432545 - RNA, 16 nt, Human
auuaaaacugcuuuuu

SEQ ID NO: 3432546 - RNA, 22 nt, Human
auuaaaacuuaaccgcaucaga

SEQ ID NO: 3432547 - RNA, 13 nt, Human
auuaaaacuucuu

SEQ ID NO: 3432548 - RNA, 14 nt, Human
auuaaaacuucuua

SEQ ID NO: 3432549 - RNA, 22 nt, Human
auuaaaacuucuuaaauaucuu

SEQ ID NO: 3432550 - RNA, 12 nt, Human
auuaaaagacuc

SEQ ID NO: 3432551 - RNA, 13 nt, Human
auuaaaagacuca

SEQ ID NO: 3432552 - RNA, 14 nt, Human
auuaaaagacucau

SEQ ID NO: 3432553 - RNA, 22 nt, Human
auuaaaagcaaaucauuuguuu

SEQ ID NO: 3432554 - RNA, 18 nt, Human
auuaaaauauaaucucua

SEQ ID NO: 3432555 - RNA, 12 nt, Human
auuaaaauauuu

SEQ ID NO: 3432556 - RNA, 14 nt, Human
auuaaaauauuuca

SEQ ID NO: 3432557 - RNA, 21 nt, Human
auuaaaauggugacuuaaucc

SEQ ID NO: 3432558 - RNA, 11 nt, Human
auuaaaaugua

SEQ ID NO: 3432559 - RNA, 17 nt, Human
auuaaaauguaugcaug

SEQ ID NO: 3432560 - RNA, 17 nt, Human
auuaaaauucugaauuu

SEQ ID NO: 3432561 - RNA, 13 nt, Human
auuaaaauuguug

SEQ ID NO: 3432562 - RNA, 16 nt, Human
auuaaacaauuuauuu

SEQ ID NO: 3432563 - RNA, 17 nt, Human
auuaaacaauuuauuuu

SEQ ID NO: 3432564 - RNA, 19 nt, Human
auuaaacaauuuauuuuau

SEQ ID NO: 3432565 - RNA, 14 nt, Human
auuaaacagaugau

SEQ ID NO: 3432566 - RNA, 14 nt, Human
auuaaacaugacuc

SEQ ID NO: 3432567 - RNA, 14 nt, Human
auuaaaccaucucc

SEQ ID NO: 3432568 - RNA, 18 nt, Human
auuaaaccaucucccugg

SEQ ID NO: 3432569 - RNA, 16 nt, Human
auuaaaccugucucca

SEQ ID NO: 3432570 - RNA, 21 nt, Human
auuaaacgauuuuuaaaaugu

SEQ ID NO: 3432571 - RNA, 22 nt, Human
auuaaacgauuuuuaaaaugua

SEQ ID NO: 3432572 - RNA, 13 nt, Human
auuaaacggauua

SEQ ID NO: 3432573 - RNA, 21 nt, Human
auuaaacuuaaucuaaaugga

SEQ ID NO: 3432574 - RNA, 12 nt, Human
auuaaacuuaug

SEQ ID NO: 3432575 - RNA, 21 nt, Human
auuaaacuuccaaagaaaguu

SEQ ID NO: 3432576 - RNA, 18 nt, Human
auuaaagaaaaaaaugua

SEQ ID NO: 3432577 - RNA, 22 nt, Human
auuaaagaaaaaaauguauuuu

SEQ ID NO: 3432578 - RNA, 18 nt, Human
auuaaagaaaauaaaauu

SEQ ID NO: 3432579 - RNA, 15 nt, Human
auuaaagaauaugaa

SEQ ID NO: 3432580 - RNA, 23 nt, Human
auuaaagcagucacuuuuccugu

SEQ ID NO: 3432581 - RNA, 12 nt, Human
auuaaagccaug

SEQ ID NO: 3432582 - RNA, 16 nt, Human
auuaaagccauguuua

SEQ ID NO: 3432583 - RNA, 17 nt, Human
auuaaagccauguuuau

SEQ ID NO: 3432584 - RNA, 18 nt, Human
auuaaagcuaaaguaucu

SEQ ID NO: 3432585 - RNA, 18 nt, Human
auuaaaggaagcacucug

SEQ ID NO: 3432586 - RNA, 19 nt, Human
auuaaaggcauaaaugacu

SEQ ID NO: 3432587 - RNA, 13 nt, Human
auuaaagucagaa

SEQ ID NO: 3432588 - RNA, 17 nt, Human
auuaaagugcuaagguu

SEQ ID NO: 3432589 - RNA, 23 nt, Human
auuaaagugcuaagguucuaagg

SEQ ID NO: 3432590 - RNA, 20 nt, Human
auuaaaguguccauugacau

SEQ ID NO: 3432591 - RNA, 22 nt, Human
auuaaaguguccauugacaugu

SEQ ID NO: 3432592 - RNA, 12 nt, Human
auuaaaguucua

SEQ ID NO: 3432593 - RNA, 19 nt, Human
auuaaaguucuagugaccg

SEQ ID NO: 3432594 - RNA, 14 nt, Human
auuaaaguuucaaa

SEQ ID NO: 3432595 - RNA, 18 nt, Human
auuaaaguuucaaaaauc

SEQ ID NO: 3432596 - RNA, 21 nt, Human
auuaaaguuucaaaaaucuga

SEQ ID NO: 3432597 - RNA, 16 nt, Human
auuaaaguuugcuugu

SEQ ID NO: 3432598 - RNA, 19 nt, Human
auuaaauaaaaucaauuuu

SEQ ID NO: 3432599 - RNA, 15 nt, Human
auuaaauaagauucu

SEQ ID NO: 3432600 - RNA, 16 nt, Human
auuaaauacaaaacuu

SEQ ID NO: 3432601 - RNA, 19 nt, Human
auuaaauacagacacuaag

SEQ ID NO: 3432602 - RNA, 19 nt, Human
auuaaauacauauggaugu

SEQ ID NO: 3432603 - RNA, 23 nt, Human
auuaaauacauauggauguuacu

SEQ ID NO: 3432604 - RNA, 22 nt, Human
auuaaauauagauuagaaaaau

SEQ ID NO: 3432605 - RNA, 15 nt, Human
auuaaauauauguau

SEQ ID NO: 3432606 - RNA, 19 nt, Human
auuaaauauauguauguaa

SEQ ID NO: 3432607 - RNA, 20 nt, Human
auuaaauauguuagcaaaga

SEQ ID NO: 3432608 - RNA, 13 nt, Human
auuaaaugaauau

SEQ ID NO: 3432609 - RNA, 16 nt, Human
auuaaaugcccagccc

SEQ ID NO: 3432610 - RNA, 17 nt, Human
auuaaaugcccagcccc

SEQ ID NO: 3432611 - RNA, 21 nt, Human
auuaaauguagcuucagucau

SEQ ID NO: 3432612 - RNA, 14 nt, Human
auuaaaugucuuau

SEQ ID NO: 3432613 - RNA, 13 nt, Human
auuaaauuaagac

SEQ ID NO: 3432614 - RNA, 12 nt, Human
auuaaauuacau

SEQ ID NO: 3432615 - RNA, 14 nt, Human
auuaaauuacauuu

SEQ ID NO: 3432616 - RNA, 15 nt, Human
auuaaauuacauuug

SEQ ID NO: 3432617 - RNA, 12 nt, Human
auuaaauuaccu

SEQ ID NO: 3432618 - RNA, 18 nt, Human
auuaaauuaguuugugaa

SEQ ID NO: 3432619 - RNA, 14 nt, Human
auuaaauucacaaa

SEQ ID NO: 3432620 - RNA, 18 nt, Human
auuaaauucacaaacuuu

SEQ ID NO: 3432621 - RNA, 14 nt, Human
auuaaauucugagc

SEQ ID NO: 3432622 - RNA, 14 nt, Human
auuaaauucuugca

SEQ ID NO: 3432623 - RNA, 20 nt, Human
auuaaauucuugcaaaguau

SEQ ID NO: 3432624 - RNA, 15 nt, Human
auuaaauuguaaaac

SEQ ID NO: 3432625 - RNA, 18 nt, Human
auuaaauuuaauucuuca

SEQ ID NO: 3432626 - RNA, 21 nt, Human
auuaaauuuguugacaaaauu

SEQ ID NO: 3432627 - RNA, 18 nt, Human
auuaaauuuugaguucua

SEQ ID NO: 3432628 - RNA, 16 nt, Human
auuaaauuuuuccuua

SEQ ID NO: 3432629 - RNA, 18 nt, Human
auuaaauuuuuuguugac

SEQ ID NO: 3432630 - RNA, 18 nt, Human
auuacauuuauuuaucca

SEQ ID NO: 3432631 - RNA, 17 nt, Human
auuacauuuccaaauga

SEQ ID NO: 3432632 - RNA, 22 nt, Human
auuacauuuccaaaugaaugac

SEQ ID NO: 3432633 - RNA, 18 nt, Human
auuacauuuguaauuuaa

SEQ ID NO: 3432634 - RNA, 13 nt, Human
auuacauuuguau

SEQ ID NO: 3432635 - RNA, 16 nt, Human
auuacauuuguauaaa

SEQ ID NO: 3432636 - RNA, 17 nt, Human
auuacauuuguauaaaa

SEQ ID NO: 3432637 - RNA, 20 nt, Human
auuacauuuguauaaaauaa

SEQ ID NO: 3432638 - RNA, 12 nt, Human
auuaccaaaaua

SEQ ID NO: 3432639 - RNA, 16 nt, Human
auuaccaaccuguuac

SEQ ID NO: 3432640 - RNA, 19 nt, Human
auuaccacagacauacuaa

SEQ ID NO: 3432641 - RNA, 15 nt, Human
auuaccaccaucccg

SEQ ID NO: 3432642 - RNA, 19 nt, Human
auuaccacugaagauagaa

SEQ ID NO: 3432643 - RNA, 20 nt, Human
auuaccagacgguucaccag

SEQ ID NO: 3432644 - RNA, 23 nt, Human
auuaccaguaaaguguaacauau

SEQ ID NO: 3432645 - RNA, 23 nt, Human
auuaccagucuuuaaaggcccag

SEQ ID NO: 3432646 - RNA, 20 nt, Human
auuaccaugagaagagggcc

SEQ ID NO: 3432647 - RNA, 15 nt, Human
auuaccauguaaugg

SEQ ID NO: 3432648 - RNA, 20 nt, Human
auuaccgcguuguaaaauau

SEQ ID NO: 3432649 - RNA, 14 nt, Human
auuaccuaaugaaa

SEQ ID NO: 3432650 - RNA, 13 nt, Human
auuaccuccugag

SEQ ID NO: 3432651 - RNA, 22 nt, Human
auuaccuuuuaccagcuuuuaa

SEQ ID NO: 3432652 - RNA, 20 nt, Human
auuacgauaaggaagaaaca

SEQ ID NO: 3432653 - RNA, 16 nt, Human
auuacggcuccucucu

SEQ ID NO: 3432654 - RNA, 15 nt, Human
auuacguaugucugg

SEQ ID NO: 3432655 - RNA, 21 nt, Human
auuacuacaaaauuugaaauu

SEQ ID NO: 3432656 - RNA, 18 nt, Human
auuacuaugacugcuccc

SEQ ID NO: 3432657 - RNA, 19 nt, Human
auuacucaaaguaaaagcg

SEQ ID NO: 3432658 - RNA, 17 nt, Human
auuacucaguaauuugu

SEQ ID NO: 3432659 - RNA, 21 nt, Human
auuacuccuauuuuuguaaac

SEQ ID NO: 3432660 - RNA, 15 nt, Human
auuacucuuguaaga

SEQ ID NO: 3432661 - RNA, 13 nt, Human
auuacugacauuu

SEQ ID NO: 3432662 - RNA, 16 nt, Human
auuacugacauuucuu

SEQ ID NO: 3432663 - RNA, 21 nt, Human
auuacugacauuucuucuagu

SEQ ID NO: 3432664 - RNA, 17 nt, Human
auuacugcuaaguauuu

SEQ ID NO: 3432665 - RNA, 19 nt, Human
auuacugcuaaguauuucc

SEQ ID NO: 3432666 - RNA, 23 nt, Human
auuacugcuaaguauuucccagc

SEQ ID NO: 3432667 - RNA, 20 nt, Human
auuacugcuuuaaucagaaa

SEQ ID NO: 3432668 - RNA, 21 nt, Human
auuacuggcguggauuaaacu

SEQ ID NO: 3432669 - RNA, 22 nt, Human
auuacuggcguggauuaaacuu

SEQ ID NO: 3432670 - RNA, 13 nt, Human
auuacugggccuu

SEQ ID NO: 3432671 - RNA, 23 nt, Human
auuacugggccuuagugggccag

SEQ ID NO: 3432672 - RNA, 16 nt, Human
auuacuguaagaaaau

SEQ ID NO: 3432673 - RNA, 13 nt, Human
auuacugucaaua

SEQ ID NO: 3432674 - RNA, 16 nt, Human
auuacugucaauaaac

SEQ ID NO: 3432675 - RNA, 20 nt, Human
auuacuguuuauuacuucca

SEQ ID NO: 3432676 - RNA, 17 nt, Human
auuacuguuuauuucug

SEQ ID NO: 3432677 - RNA, 13 nt, Human
auuacuguuugga

SEQ ID NO: 3432678 - RNA, 20 nt, Human
auuacuguuugucuucuccc

SEQ ID NO: 3432679 - RNA, 22 nt, Human
auuacuguuugucuucucccca

SEQ ID NO: 3432680 - RNA, 23 nt, Human
auuacuguuugucuucuccccag

SEQ ID NO: 3432681 - RNA, 12 nt, Human
auuacuuaaaaa

SEQ ID NO: 3432682 - RNA, 13 nt, Human
auuacuuagagga

SEQ ID NO: 3432683 - RNA, 15 nt, Human
auuacuuaguauugc

SEQ ID NO: 3432684 - RNA, 19 nt, Human
auuacuuaucauccacauu

SEQ ID NO: 3432685 - RNA, 22 nt, Human
auuacuucacuauacaaacaaa

SEQ ID NO: 3432686 - RNA, 15 nt, Human
auuacuuccaugaau

SEQ ID NO: 3432687 - RNA, 16 nt, Human
auuacuuccaugaauu

SEQ ID NO: 3432688 - RNA, 12 nt, Human
auuacuucugcu

SEQ ID NO: 3432689 - RNA, 13 nt, Human
auuacuucugcua

SEQ ID NO: 3432690 - RNA, 22 nt, Human
cacugggcuuggggaccagagc

SEQ ID NO: 3432691 - RNA, 16 nt, Human
cacuggggaaaacucc

SEQ ID NO: 3432692 - RNA, 21 nt, Human
cacuggggaaauaacagcugu

SEQ ID NO: 3432693 - RNA, 20 nt, Human
cacuggggacuuggccucuc

SEQ ID NO: 3432694 - RNA, 21 nt, Human
cacuggggagcccgucucagu

SEQ ID NO: 3432695 - RNA, 22 nt, Human
cacuggggagcccgucucagug

SEQ ID NO: 3432696 - RNA, 15 nt, Human
cacuggggauugggc

SEQ ID NO: 3432697 - RNA, 12 nt, Human
cacuggggcuca

SEQ ID NO: 3432698 - RNA, 16 nt, Human
cacuggggcucagagc

SEQ ID NO: 3432699 - RNA, 17 nt, Human
cacuggggcucagagcc

SEQ ID NO: 3432700 - RNA, 22 nt, Human
cacuggggcucagagccggggu

SEQ ID NO: 3432701 - RNA, 16 nt, Human
cacuggggcuggcaca

SEQ ID NO: 3432702 - RNA, 19 nt, Human
cacugggguccagggagca

SEQ ID NO: 3432703 - RNA, 19 nt, Human
cacugggguccuggggccu

SEQ ID NO: 3432704 - RNA, 20 nt, Human
cacuggggugccgccugccc

SEQ ID NO: 3432705 - RNA, 15 nt, Human
cacugggugggguga

SEQ ID NO: 3432706 - RNA, 19 nt, Human
cacuggguggggugaggac

SEQ ID NO: 3432707 - RNA, 18 nt, Human
cacugggugguggccugg

SEQ ID NO: 3432708 - RNA, 21 nt, Human
cacuggguugcgggacagagu

SEQ ID NO: 3432709 - RNA, 23 nt, Human
cacuggucacggauuugugucug

SEQ ID NO: 3432710 - RNA, 14 nt, Human
cacuggucugcugu

SEQ ID NO: 3432711 - RNA, 16 nt, Human
cacuggucugcuguuc

SEQ ID NO: 3432712 - RNA, 21 nt, Human
cacugguggcccgacagccug

SEQ ID NO: 3432713 - RNA, 19 nt, Human
cacuggugugaccugaggg

SEQ ID NO: 3432714 - RNA, 20 nt, Human
cacuggugugaccugagggc

SEQ ID NO: 3432715 - RNA, 23 nt, Human
cacuggugugagggccccugccu

SEQ ID NO: 3432716 - RNA, 12 nt, Human
cacugguucuca

SEQ ID NO: 3432717 - RNA, 12 nt, Human
cacugguuuuaa

SEQ ID NO: 3432718 - RNA, 17 nt, Human
cacuguaaaaugaaauu

SEQ ID NO: 3432719 - RNA, 13 nt, Human
cacuguaaaaugu

SEQ ID NO: 3432720 - RNA, 14 nt, Human
cacuguacacauaa

SEQ ID NO: 3432721 - RNA, 17 nt, Human
cacuguaccauauagca

SEQ ID NO: 3432722 - RNA, 14 nt, Human
cacuguacuaaccu

SEQ ID NO: 3432723 - RNA, 20 nt, Human
cacuguacuugcucuugaug

SEQ ID NO: 3432724 - RNA, 21 nt, Human
cacuguagcauuacagugggu

SEQ ID NO: 3432725 - RNA, 14 nt, Human
cacuguaguucuaa

SEQ ID NO: 3432726 - RNA, 15 nt, Human
cacuguaguucuaag

SEQ ID NO: 3432727 - RNA, 16 nt, Human
cacuguaguucuaaga

SEQ ID NO: 3432728 - RNA, 15 nt, Human
cacuguauaaauagg

SEQ ID NO: 3432729 - RNA, 16 nt, Human
cacuguauaaauagga

SEQ ID NO: 3432730 - RNA, 23 nt, Human
cacuguauuacauaaauaaauua

SEQ ID NO: 3432731 - RNA, 21 nt, Human
cacugucaccacccugcucau

SEQ ID NO: 3432732 - RNA, 16 nt, Human
cacugucacccuccac

SEQ ID NO: 3432733 - RNA, 22 nt, Human
cacugucacuguuucucugcug

SEQ ID NO: 3432734 - RNA, 22 nt, Human
cacugucagcagggacuguaaa

SEQ ID NO: 3432735 - RNA, 16 nt, Human
cacugucaugcuucau

SEQ ID NO: 3432736 - RNA, 13 nt, Human
cacugucccuccu

SEQ ID NO: 3432737 - RNA, 12 nt, Human
cacugucccuug

SEQ ID NO: 3432738 - RNA, 18 nt, Human
cacugucccuugccucaa

SEQ ID NO: 3432739 - RNA, 17 nt, Human
cacuguccuccaagcca

SEQ ID NO: 3432740 - RNA, 18 nt, Human
cacuguccuccaagccag

SEQ ID NO: 3432741 - RNA, 15 nt, Human
cacuguccugggccu

SEQ ID NO: 3432742 - RNA, 21 nt, Human
cacuguccugggcgcccugga

SEQ ID NO: 3432743 - RNA, 10 nt, Human
cacugucuga

SEQ ID NO: 3432744 - RNA, 13 nt, Human
cacugucugagag

SEQ ID NO: 3432745 - RNA, 13 nt, Human
cacugucugucug

SEQ ID NO: 3432746 - RNA, 18 nt, Human
cacugucugucuggucca

SEQ ID NO: 3432747 - RNA, 21 nt, Human
cacugucuuauggauucauuu

SEQ ID NO: 3432748 - RNA, 14 nt, Human
cacugucuugaaga

SEQ ID NO: 3432749 - RNA, 19 nt, Human
cacugucuuuaauucugua

SEQ ID NO: 3432750 - RNA, 13 nt, Human
cacugugacacac

SEQ ID NO: 3432751 - RNA, 16 nt, Human
cacugugacacacuac

SEQ ID NO: 3432752 - RNA, 17 nt, Human
cacugugacacacuaca

SEQ ID NO: 3432753 - RNA, 14 nt, Human
cacugugaccccca

SEQ ID NO: 3432754 - RNA, 19 nt, Human
cacugugacccccagcucc

SEQ ID NO: 3432755 - RNA, 14 nt, Human
cacugugccaugug

SEQ ID NO: 3432756 - RNA, 15 nt, Human
cacugugccaugugc

SEQ ID NO: 3432757 - RNA, 12 nt, Human
cacugugcccug

SEQ ID NO: 3432758 - RNA, 14 nt, Human
cacugugcccuggu

SEQ ID NO: 3432759 - RNA, 13 nt, Human
cacugugccucag

SEQ ID NO: 3432760 - RNA, 21 nt, Human
cacugugccucagagaccagg

SEQ ID NO: 3432761 - RNA, 22 nt, Human
cacugugccucagagaccaggg

SEQ ID NO: 3432762 - RNA, 22 nt, Human
cacugugcgucuugguguaauu

SEQ ID NO: 3432763 - RNA, 22 nt, Human
cacugugcguggggcucccgcc

SEQ ID NO: 3432764 - RNA, 14 nt, Human
cacugugcuauaaa

SEQ ID NO: 3432765 - RNA, 13 nt, Human
cacugugcucagg

SEQ ID NO: 3432766 - RNA, 14 nt, Human
cacugugcuguugu

SEQ ID NO: 3432767 - RNA, 15 nt, Human
cacugugcuguuguu

SEQ ID NO: 3432768 - RNA, 19 nt, Human
cacugugcuguuguuauga

SEQ ID NO: 3432769 - RNA, 14 nt, Human
cacugugggaaggc

SEQ ID NO: 3432770 - RNA, 17 nt, Human
cacugugggaaggccag

SEQ ID NO: 3432771 - RNA, 21 nt, Human
cacugugggaaggccagcugc

SEQ ID NO: 3432772 - RNA, 16 nt, Human
cacugugggacucuuc

SEQ ID NO: 3432773 - RNA, 19 nt, Human
cacuguggguagacacaca

SEQ ID NO: 3432774 - RNA, 19 nt, Human
cacugugggugugugacuc

SEQ ID NO: 3432775 - RNA, 16 nt, Human
cagauauauuuuucac

SEQ ID NO: 3432776 - RNA, 20 nt, Human
cagauaucuuggacaaauca

SEQ ID NO: 3432777 - RNA, 18 nt, Human
cagauaugauauguaaac

SEQ ID NO: 3432778 - RNA, 17 nt, Human
cagauaugauucaaaug

SEQ ID NO: 3432779 - RNA, 16 nt, Human
cagauauuuauauuuu

SEQ ID NO: 3432780 - RNA, 21 nt, Human
cagauauuuauauuuuuauuu

SEQ ID NO: 3432781 - RNA, 11 nt, Human
cagauauuuuu

SEQ ID NO: 3432782 - RNA, 20 nt, Human
cagauauuuuuucagaaaua

SEQ ID NO: 3432783 - RNA, 23 nt, Human
cagaucaauggcgcagugccucu

SEQ ID NO: 3432784 - RNA, 22 nt, Human
cagaucacagcuucagccagga

SEQ ID NO: 3432785 - RNA, 14 nt, Human
cagaucacgagguc

SEQ ID NO: 3432786 - RNA, 13 nt, Human
cagaucacuacug

SEQ ID NO: 3432787 - RNA, 16 nt, Human
cagaucacuacugcag

SEQ ID NO: 3432788 - RNA, 18 nt, Human
cagaucacugaauuuaua

SEQ ID NO: 3432789 - RNA, 13 nt, Human
cagaucacugcca

SEQ ID NO: 3432790 - RNA, 23 nt, Human
cagaucauagauuucugauuuua

SEQ ID NO: 3432791 - RNA, 18 nt, Human
cagaucaucuuggaacug

SEQ ID NO: 3432792 - RNA, 16 nt, Human
cagaucauuaucagcc

SEQ ID NO: 3432793 - RNA, 12 nt, Human
cagauccagccu

SEQ ID NO: 3432794 - RNA, 14 nt, Human
cagauccaggagcu

SEQ ID NO: 3432795 - RNA, 19 nt, Human
cagauccaggagcuccagu

SEQ ID NO: 3432796 - RNA, 23 nt, Human
cagauccagggacagaggcccca

SEQ ID NO: 3432797 - RNA, 13 nt, Human
cagauccuccuca

SEQ ID NO: 3432798 - RNA, 19 nt, Human
cagauccucucuggggcug

SEQ ID NO: 3432799 - RNA, 12 nt, Human
cagauccuggaa

SEQ ID NO: 3432800 - RNA, 13 nt, Human
cagauccuggaaa

SEQ ID NO: 3432801 - RNA, 14 nt, Human
cagauccuggaaau

SEQ ID NO: 3432802 - RNA, 15 nt, Human
cagauccuuguuuca

SEQ ID NO: 3432803 - RNA, 18 nt, Human
cagauccuuguuucaaac

SEQ ID NO: 3432804 - RNA, 18 nt, Human
cagaucggaucuguugca

SEQ ID NO: 3432805 - RNA, 21 nt, Human
cagaucuagucaaucaagucu

SEQ ID NO: 3432806 - RNA, 14 nt, Human
cagaucuccaaagc

SEQ ID NO: 3432807 - RNA, 16 nt, Human
cagaucugccuaagga

SEQ ID NO: 3432808 - RNA, 21 nt, Human
cagaucugccuaaggacuucu

SEQ ID NO: 3432809 - RNA, 14 nt, Human
cagaucuggaaccu

SEQ ID NO: 3432810 - RNA, 23 nt, Human
cagaucuggaaccucagccuggc

SEQ ID NO: 3432811 - RNA, 23 nt, Human
cagaucuguauauuuuuuucuaa

SEQ ID NO: 3432812 - RNA, 14 nt, Human
cagaucugugcccc

SEQ ID NO: 3432813 - RNA, 18 nt, Human
cagaucugugccccaugc

SEQ ID NO: 3432814 - RNA, 21 nt, Human
cagaucugugccccaugccug

SEQ ID NO: 3432815 - RNA, 23 nt, Human
cagaucugugccccaugccuguc

SEQ ID NO: 3432816 - RNA, 18 nt, Human
cagaucuuggacucauga

SEQ ID NO: 3432817 - RNA, 20 nt, Human
cagaucuuggacucaugagg

SEQ ID NO: 3432818 - RNA, 15 nt, Human
cagaucuuucagaaa

SEQ ID NO: 3432819 - RNA, 17 nt, Human
cagaucuuucagaaaua

SEQ ID NO: 3432820 - RNA, 19 nt, Human
cagaugaaugauaaacucu

SEQ ID NO: 3432821 - RNA, 18 nt, Human
cagaugaccccuccccua

SEQ ID NO: 3432822 - RNA, 14 nt, Human
cagaugacuagaaa

SEQ ID NO: 3432823 - RNA, 14 nt, Human
cagaugagaacaaa

SEQ ID NO: 3432824 - RNA, 15 nt, Human
cagaugagaacaaag

SEQ ID NO: 3432825 - RNA, 18 nt, Human
cagaugagaacaaagcug

SEQ ID NO: 3432826 - RNA, 20 nt, Human
cagaugagcagaagcucucg

SEQ ID NO: 3432827 - RNA, 14 nt, Human
cagaugagucacac

SEQ ID NO: 3432828 - RNA, 23 nt, Human
cagaugaugccaaccucuggagc

SEQ ID NO: 3432829 - RNA, 16 nt, Human
cagaugauucuauguc

SEQ ID NO: 3432830 - RNA, 18 nt, Human
cagaugauuuccccccuc

SEQ ID NO: 3432831 - RNA, 23 nt, Human
cagaugcaaagaggcaagaggcu

SEQ ID NO: 3432832 - RNA, 15 nt, Human
cagaugcaaugugcu

SEQ ID NO: 3432833 - RNA, 14 nt, Human
cagaugcaccagcc

SEQ ID NO: 3432834 - RNA, 17 nt, Human
cagaugcaccagcccuu

SEQ ID NO: 3432835 - RNA, 16 nt, Human
cagaugcagcucaaga

SEQ ID NO: 3432836 - RNA, 14 nt, Human
cagaugcagcucuu

SEQ ID NO: 3432837 - RNA, 15 nt, Human
cagaugcagcucuuc

SEQ ID NO: 3432838 - RNA, 14 nt, Human
cagaugcagggcag

SEQ ID NO: 3432839 - RNA, 17 nt, Human
cagaugcagggcaguca

SEQ ID NO: 3432840 - RNA, 18 nt, Human
cagaugccacccuagcca

SEQ ID NO: 3432841 - RNA, 22 nt, Human
cagaugcccagagggcccaggc

SEQ ID NO: 3432842 - RNA, 17 nt, Human
cagaugccccuuucugg

SEQ ID NO: 3432843 - RNA, 19 nt, Human
cagaugcccgagggagggg

SEQ ID NO: 3432844 - RNA, 14 nt, Human
cagaugccuccacc

SEQ ID NO: 3432845 - RNA, 22 nt, Human
cagaugccuccaccccccagaa

SEQ ID NO: 3432846 - RNA, 12 nt, Human
cagaugccuccu

SEQ ID NO: 3432847 - RNA, 17 nt, Human
cagaugccuccuuccuc

SEQ ID NO: 3432848 - RNA, 20 nt, Human
cagaugcgucccaagauguu

SEQ ID NO: 3432849 - RNA, 21 nt, Human
cagaugcgucccaagauguug

SEQ ID NO: 3432850 - RNA, 21 nt, Human
cagaugcuaaaaucccuggau

SEQ ID NO: 3432851 - RNA, 23 nt, Human
cagaugcuagcgcguugccuguc

SEQ ID NO: 3432852 - RNA, 14 nt, Human
cagaugcucugaga

SEQ ID NO: 3432853 - RNA, 17 nt, Human
cagaugcugauguucag

SEQ ID NO: 3432854 - RNA, 18 nt, Human
cagaugcugauguucagu

SEQ ID NO: 3432855 - RNA, 20 nt, Human
cagaugcugauguucagugu

SEQ ID NO: 3432856 - RNA, 21 nt, Human
cagaugcugauguucagugua

SEQ ID NO: 3432857 - RNA, 19 nt, Human
cagauggaaaauucauuuu

SEQ ID NO: 3432858 - RNA, 19 nt, Human
cagauggaaugcuguguua

SEQ ID NO: 3432859 - RNA, 21 nt, Human
cagauggauuugccugugcca

SEQ ID NO: 3432860 - RNA, 19 nt, Human
cagauggcagcuuuuaaaa

SEQ ID NO: 3432861 - RNA, 16 nt, Human
cagauggccagccccu

SEQ ID NO: 3432862 - RNA, 13 nt, Human
cagauggcccgga

SEQ ID NO: 3432863 - RNA, 21 nt, Human
cagauggcccggaugcugcuu

SEQ ID NO: 3432864 - RNA, 22 nt, Human
cagaugggaggaaagagagcag

SEQ ID NO: 3432865 - RNA, 23 nt, Human
cagaugggaggaaagagagcagg

SEQ ID NO: 3432866 - RNA, 23 nt, Human
cagaugggcauaugugucagugg

SEQ ID NO: 3432867 - RNA, 14 nt, Human
cagauggggccucu

SEQ ID NO: 3432868 - RNA, 14 nt, Human
cagauguaauguuu

SEQ ID NO: 3432869 - RNA, 15 nt, Human
cagauguaggaggga

SEQ ID NO: 3432870 - RNA, 17 nt, Human
cagauguaggagggacu

SEQ ID NO: 3432871 - RNA, 18 nt, Human
cagauguaggagggacug

SEQ ID NO: 3432872 - RNA, 16 nt, Human
cagauguccaucagau

SEQ ID NO: 3432873 - RNA, 19 nt, Human
cagauguccaucagaugac

SEQ ID NO: 3432874 - RNA, 21 nt, Human
cagauguccaucagaugacaa

SEQ ID NO: 3432875 - RNA, 22 nt, Human
cagaugucccuugaugcacaga

SEQ ID NO: 3432876 - RNA, 19 nt, Human
cagauguccuaauggugau

SEQ ID NO: 3432877 - RNA, 22 nt, Human
cagauguccuaauggugaugca

SEQ ID NO: 3432878 - RNA, 16 nt, Human
cagaugucuucugccu

SEQ ID NO: 3432879 - RNA, 16 nt, Human
cagaugugaugcuuga

SEQ ID NO: 3432880 - RNA, 20 nt, Human
cagaugugcagcagauugga

SEQ ID NO: 3432881 - RNA, 18 nt, Human
cagaugugcuauaaucug

SEQ ID NO: 3432882 - RNA, 22 nt, Human
cagaugugcuauaaucuguuuu

SEQ ID NO: 3432883 - RNA, 17 nt, Human
cagauguggagccaggc

SEQ ID NO: 3432884 - RNA, 18 nt, Human
cagauguggagccaggcg

SEQ ID NO: 3432885 - RNA, 23 nt, Human
cagauguggcuacugacauaucu

SEQ ID NO: 3432886 - RNA, 15 nt, Human
cagauguuaaaauaa

SEQ ID NO: 3432887 - RNA, 21 nt, Human
cagauguuaaaauaaaugguu

SEQ ID NO: 3432888 - RNA, 18 nt, Human
cagauguuuccagacuuc

SEQ ID NO: 3432889 - RNA, 18 nt, Human
cagauguuuuacgucugg

SEQ ID NO: 3432890 - RNA, 12 nt, Human
cagauuaauauu

SEQ ID NO: 3432891 - RNA, 18 nt, Human
cagauuauucacugauuu

SEQ ID NO: 3432892 - RNA, 15 nt, Human
cagauucagaaauga

SEQ ID NO: 3432893 - RNA, 13 nt, Human
cagauucaggcau

SEQ ID NO: 3432894 - RNA, 16 nt, Human
cagauucagucuugcc

SEQ ID NO: 3432895 - RNA, 23 nt, Human
cagauuccaggcgaugugcaagu

SEQ ID NO: 3432896 - RNA, 19 nt, Human
cagauucccagagcaaaau

SEQ ID NO: 3432897 - RNA, 17 nt, Human
cagauuccccuguguca

SEQ ID NO: 3432898 - RNA, 12 nt, Human
cagauuccuucc

SEQ ID NO: 3432899 - RNA, 15 nt, Human
cagaauucucuaguu

SEQ ID NO: 3432900 - RNA, 18 nt, Human
cagaauucucuaguuuga

SEQ ID NO: 3432901 - RNA, 16 nt, Human
cagaauugaaacacuu

SEQ ID NO: 3432902 - RNA, 17 nt, Human
cagaauugugucugcag

SEQ ID NO: 3432903 - RNA, 18 nt, Human
cagaauuuaguguaucca

SEQ ID NO: 3432904 - RNA, 14 nt, Human
cagaauuucccaaa

SEQ ID NO: 3432905 - RNA, 17 nt, Human
cagaauuucccaaagca

SEQ ID NO: 3432906 - RNA, 18 nt, Human
cagaauuucccaaagcag

SEQ ID NO: 3432907 - RNA, 16 nt, Human
cagaauuuggaaaucc

SEQ ID NO: 3432908 - RNA, 22 nt, Human
cagaauuuguguugaaggaacu

SEQ ID NO: 3432909 - RNA, 15 nt, Human
cagaauuuuaggaac

SEQ ID NO: 3432910 - RNA, 22 nt, Human
cagaauuuuauacuuucccuac

SEQ ID NO: 3432911 - RNA, 23 nt, Human
cagaauuuuauacuuucccuacc

SEQ ID NO: 3432912 - RNA, 19 nt, Human
cagacaaaaacagccucac

SEQ ID NO: 3432913 - RNA, 21 nt, Human
cagacaaaaacagccucacag

SEQ ID NO: 3432914 - RNA, 22 nt, Human
cagacaaaaacagccucacaga

SEQ ID NO: 3432915 - RNA, 21 nt, Human
cagacaaaguaauuccucuca

SEQ ID NO: 3432916 - RNA, 13 nt, Human
cagacaacagaag

SEQ ID NO: 3432917 - RNA, 15 nt, Human
cagacaacagaaguc

SEQ ID NO: 3432918 - RNA, 22 nt, Human
cagacaacagaagucaugaagc

SEQ ID NO: 3432919 - RNA, 17 nt, Human
cagacucucagcccaga

SEQ ID NO: 3432920 - RNA, 18 nt, Human
cagacucucagcccagaa

SEQ ID NO: 3432921 - RNA, 12 nt, Human
cagacucucugu

SEQ ID NO: 3432922 - RNA, 14 nt, Human
cagacucuggucuu

SEQ ID NO: 3432923 - RNA, 18 nt, Human
cagacucuugccuguuuc

SEQ ID NO: 3432924 - RNA, 19 nt, Human
cagacucuuuaugcuugca

SEQ ID NO: 3432925 - RNA, 22 nt, Human
cagacucuuucgauacccagga

SEQ ID NO: 3432926 - RNA, 20 nt, Human
cagacugaacuuaccgugag

SEQ ID NO: 3432927 - RNA, 23 nt, Human
cagacugacaguuuacagacgcu

SEQ ID NO: 3432928 - RNA, 16 nt, Human
cagacugaucaggacc

SEQ ID NO: 3432929 - RNA, 13 nt, Human
cagacugcaccca

SEQ ID NO: 3432930 - RNA, 21 nt, Human
cagacugcagguuggacccca

SEQ ID NO: 3432931 - RNA, 18 nt, Human
cagacugcauguaguugg

SEQ ID NO: 3432932 - RNA, 19 nt, Human
cagacugcuaguguucugu

SEQ ID NO: 3432933 - RNA, 20 nt, Human
cagacugcugggacuggcca

SEQ ID NO: 3432934 - RNA, 23 nt, Human
cagacuggcacaguuuucugaga

SEQ ID NO: 3432935 - RNA, 16 nt, Human
cagacuggccugagga

SEQ ID NO: 3432936 - RNA, 16 nt, Human
cagacuggggcauccu

SEQ ID NO: 3432937 - RNA, 18 nt, Human
cagacuggggcauccugu

SEQ ID NO: 3432938 - RNA, 20 nt, Human
cagacuggugagcagacugg

SEQ ID NO: 3432939 - RNA, 23 nt, Human
cagacugguugaguucagguagc

SEQ ID NO: 3432940 - RNA, 14 nt, Human
cagacuguguauuc

SEQ ID NO: 3432941 - RNA, 18 nt, Human
cagacuguugucccugca

SEQ ID NO: 3432942 - RNA, 13 nt, Human
cagacuucuccag

SEQ ID NO: 3432943 - RNA, 15 nt, Human
cagacuucuccagac

SEQ ID NO: 3432944 - RNA, 19 nt, Human
cagacuugccaugugacuc

SEQ ID NO: 3432945 - RNA, 11 nt, Human
cagacuuguug

SEQ ID NO: 3432946 - RNA, 20 nt, Human
cagacuuugcuucccauugu

SEQ ID NO: 3432947 - RNA, 23 nt, Human
cagacuuuggaaaaugcauugua

SEQ ID NO: 3432948 - RNA, 17 nt, Human
cagagaaaccagcuucc

SEQ ID NO: 3432949 - RNA, 19 nt, Human
cagagaaaccagcuuccuu

SEQ ID NO: 3432950 - RNA, 21 nt, Human
cagagaaaccagcuuccuuca

SEQ ID NO: 3432951 - RNA, 19 nt, Human
cagagaaacuuaagcaaag

SEQ ID NO: 3432952 - RNA, 20 nt, Human
cagagaaacuuaagcaaagg

SEQ ID NO: 3432953 - RNA, 15 nt, Human
cagagaaagaagaga

SEQ ID NO: 3432954 - RNA, 18 nt, Human
cagagaaagaagagacag

SEQ ID NO: 3432955 - RNA, 19 nt, Human
cagagaaagaagagacagg

SEQ ID NO: 3432956 - RNA, 23 nt, Human
cagagaaagaagagacaggaggg

SEQ ID NO: 3432957 - RNA, 13 nt, Human
cagagaaagagga

SEQ ID NO: 3432958 - RNA, 18 nt, Human
cagagaaagaggaagcuu

SEQ ID NO: 3432959 - RNA, 15 nt, Human
cagagaaagggacaa

SEQ ID NO: 3432960 - RNA, 11 nt, Human
cagagaaccca

SEQ ID NO: 3432961 - RNA, 21 nt, Human
cagagaacuaacacuauuuua

SEQ ID NO: 3432962 - RNA, 13 nt, Human
cagagaagaaaga

SEQ ID NO: 3432963 - RNA, 14 nt, Human
cagagaagccagcu

SEQ ID NO: 3432964 - RNA, 15 nt, Human
cagagaagccagcuu

SEQ ID NO: 3432965 - RNA, 16 nt, Human
cagagaagccagcuug

SEQ ID NO: 3432966 - RNA, 12 nt, Human
cagagaagccau

SEQ ID NO: 3432967 - RNA, 13 nt, Human
cagagaagccauc

SEQ ID NO: 3432968 - RNA, 18 nt, Human
cagagaagccaucaccuc

SEQ ID NO: 3432969 - RNA, 15 nt, Human
cagagaagccuucaa

SEQ ID NO: 3432970 - RNA, 17 nt, Human
cagagaagccuucaagc

SEQ ID NO: 3432971 - RNA, 22 nt, Human
cagagaagccuucaagcucuga

SEQ ID NO: 3432972 - RNA, 19 nt, Human
cagagaagcggauuuccag

SEQ ID NO: 3432973 - RNA, 21 nt, Human
cagagaagcuauaaauuccuc

SEQ ID NO: 3432974 - RNA, 23 nt, Human
cagagaagcuauaaauuccucuu

SEQ ID NO: 3432975 - RNA, 13 nt, Human
cagagaagcuggg

SEQ ID NO: 3432976 - RNA, 20 nt, Human
cagagaaggcaggaaugugu

SEQ ID NO: 3432977 - RNA, 13 nt, Human
cagagaagugaca

SEQ ID NO: 3432978 - RNA, 14 nt, Human
cagagaagugacag

SEQ ID NO: 3432979 - RNA, 23 nt, Human
cagagaagugacagggaagcuac

SEQ ID NO: 3432980 - RNA, 24 nt, Human
cagagaagugacagggaagcuaca

SEQ ID NO: 3432981 - RNA, 22 nt, Human
cagagaauauaacaugaaauga

SEQ ID NO: 3432982 - RNA, 18 nt, Human
cagagaauaucaagauga

SEQ ID NO: 3432983 - RNA, 16 nt, Human
cagagaauaugucugc

SEQ ID NO: 3432984 - RNA, 21 nt, Human
cagagaaugaaagggcccaga

SEQ ID NO: 3432985 - RNA, 14 nt, Human
cagagaauucuuag

SEQ ID NO: 3432986 - RNA, 15 nt, Human
cagagaauuucuacc

SEQ ID NO: 3432987 - RNA, 16 nt, Human
cagagaauuucuacca

SEQ ID NO: 3432988 - RNA, 22 nt, Human
cagagacaacagguaaaacagg

SEQ ID NO: 3432989 - RNA, 20 nt, Human
cagagacaaggagggcacag

SEQ ID NO: 3432990 - RNA, 13 nt, Human
cagagacaccugc

SEQ ID NO: 3432991 - RNA, 17 nt, Human
cagagacaccugcaccu

SEQ ID NO: 3432992 - RNA, 14 nt, Human
cagagacagagagg

SEQ ID NO: 3432993 - RNA, 16 nt, Human
cagagacagauaccuc

SEQ ID NO: 3432994 - RNA, 19 nt, Human
cagagacagauaccuccaa

SEQ ID NO: 3432995 - RNA, 20 nt, Human
cagagacagauaccuccaac

SEQ ID NO: 3432996 - RNA, 13 nt, Human
cagagacaggaaa

SEQ ID NO: 3432997 - RNA, 15 nt, Human
cagagacaggaaaau

SEQ ID NO: 3432998 - RNA, 22 nt, Human
cagagacaggaagucuucaggg

SEQ ID NO: 3432999 - RNA, 14 nt, Human
cagagacaggccca

SEQ ID NO: 3433000 - RNA, 19 nt, Human
cagagacaggcccaagaga

SEQ ID NO: 3433001 - RNA, 20 nt, Human
cagagacauacuugaagggc

SEQ ID NO: 3433002 - RNA, 21 nt, Human
cagagacauacuugaagggcc

SEQ ID NO: 3433003 - RNA, 14 nt, Human
cagagacaugcaga

SEQ ID NO: 3433004 - RNA, 17 nt, Human
cagagacaugcagagau

SEQ ID NO: 3433005 - RNA, 23 nt, Human
cagagaccaagauggcccauccu

SEQ ID NO: 3433006 - RNA, 15 nt, Human
cagagaccaggcccu

SEQ ID NO: 3433007 - RNA, 16 nt, Human
cagagaccaggcccug

SEQ ID NO: 3433008 - RNA, 22 nt, Human
cagagaccaggcccuggcuaag

SEQ ID NO: 3433009 - RNA, 16 nt, Human
cagagaccaggcugug

SEQ ID NO: 3433010 - RNA, 12 nt, Human
cagagaccaggg

SEQ ID NO: 3433011 - RNA, 15 nt, Human
cagagaccagggcuc

SEQ ID NO: 3433012 - RNA, 20 nt, Human
cagagaccaucccugaaggc

SEQ ID NO: 3433013 - RNA, 21 nt, Human
cagagaccaucccugaaggcc

SEQ ID NO: 3433014 - RNA, 14 nt, Human
cagagaccauugca

SEQ ID NO: 3433015 - RNA, 19 nt, Human
cagagacccucugccacca

SEQ ID NO: 3433016 - RNA, 17 nt, Human
cagagaccguccucacc

SEQ ID NO: 3433017 - RNA, 20 nt, Human
cagagaccguccucaccccu

SEQ ID NO: 3433018 - RNA, 19 nt, Human
cagagacucagggccccag

SEQ ID NO: 3433019 - RNA, 20 nt, Human
cagagacucagggccccagc

SEQ ID NO: 3433020 - RNA, 14 nt, Human
cagagacuccugca

SEQ ID NO: 3433021 - RNA, 18 nt, Human
cagagacuccugcaggca

SEQ ID NO: 3433022 - RNA, 19 nt, Human
cagagacuccugcaggcag

SEQ ID NO: 3433023 - RNA, 20 nt, Human
cagagacuccugcaggcagc

SEQ ID NO: 3433024 - RNA, 11 nt, Human
cagagagaaac

SEQ ID NO: 3433025 - RNA, 15 nt, Human
cagagagaagagccc

SEQ ID NO: 3433026 - RNA, 18 nt, Human
cagagagaagagccccac

SEQ ID NO: 3433027 - RNA, 14 nt, Human
cagagagaagccug

SEQ ID NO: 3433028 - RNA, 18 nt, Human
cagagagacagacuugag

SEQ ID NO: 3433029 - RNA, 14 nt, Human
cagagagaccgagg

SEQ ID NO: 3433030 - RNA, 15 nt, Human
cagagagagagaaag

SEQ ID NO: 3433031 - RNA, 17 nt, Human
cagagagagagaaagag

SEQ ID NO: 3433032 - RNA, 12 nt, Human
cagagagagugu

SEQ ID NO: 3433033 - RNA, 20 nt, Human
cagagagccauuuugugaau

SEQ ID NO: 3433034 - RNA, 21 nt, Human
cagagagccauuuugugaaug

SEQ ID NO: 3433035 - RNA, 20 nt, Human
cagagagccuggugcugcug

SEQ ID NO: 3433036 - RNA, 21 nt, Human
cagagagcggucucaggcugg

SEQ ID NO: 3433037 - RNA, 22 nt, Human
cagagagcggucucaggcuggu

SEQ ID NO: 3433038 - RNA, 21 nt, Human
cagagaggaaauucuccacug

SEQ ID NO: 3433039 - RNA, 15 nt, Human
cagagaggaaucaga

SEQ ID NO: 3433040 - RNA, 17 nt, Human
cagagaggacgugggcg

SEQ ID NO: 3433041 - RNA, 21 nt, Human
cagagaggacgugggcggcag

SEQ ID NO: 3433042 - RNA, 18 nt, Human
cagagagggugacaagau

SEQ ID NO: 3433043 - RNA, 13 nt, Human
cagagaggguggg

SEQ ID NO: 3433044 - RNA, 20 nt, Human
cagagaggguggugaccucu

SEQ ID NO: 3433045 - RNA, 22 nt, Human
cagagaggguggugaccucugc

SEQ ID NO: 3433046 - RNA, 23 nt, Human
cagagaggguggugaccucugcc

SEQ ID NO: 3433047 - RNA, 19 nt, Human
cagagaggucaagcccagg

SEQ ID NO: 3433048 - RNA, 21 nt, Human
cagagaggucaagcccaggag

SEQ ID NO: 3433049 - RNA, 18 nt, Human
cagagagguuugcagucc

SEQ ID NO: 3433050 - RNA, 14 nt, Human
cagagagucccacu

SEQ ID NO: 3433051 - RNA, 20 nt, Human
cagagagucccacugccuca

SEQ ID NO: 3433052 - RNA, 22 nt, Human
cagagagucccacugccucagg

SEQ ID NO: 3433053 - RNA, 16 nt, Human
cagagaguccucugga

SEQ ID NO: 3433054 - RNA, 15 nt, Human
cagagaguccugugc

SEQ ID NO: 3433055 - RNA, 23 nt, Human
cagagagugagagacauuaacuc

SEQ ID NO: 3433056 - RNA, 18 nt, Human
cagagaguggcuccuccc

SEQ ID NO: 3433057 - RNA, 14 nt, Human
cagagaugccucca

SEQ ID NO: 3433058 - RNA, 15 nt, Human
cagagaugccuccac

SEQ ID NO: 3433059 - RNA, 21 nt, Human
cagagaugccuccaccgcugc

SEQ ID NO: 3433060 - RNA, 21 nt, Human
cagagauggagguucucucgg

SEQ ID NO: 3433061 - RNA, 18 nt, Human
cagagaugucaucagagc

SEQ ID NO: 3433062 - RNA, 18 nt, Human
cagcaccguucugugcac

SEQ ID NO: 3433063 - RNA, 15 nt, Human
cagcuacuugggagg

SEQ ID NO: 3433064 - RNA, 16 nt, Human
cagcuacuugggaggc

SEQ ID NO: 3433065 - RNA, 17 nt, Human
cagcuacuuuaacacca

SEQ ID NO: 3433066 - RNA, 17 nt, Human
cagcuauaccugugccu

SEQ ID NO: 3433067 - RNA, 19 nt, Human
cagcuaucgaacuucacaa

SEQ ID NO: 3433068 - RNA, 13 nt, Human
cagcuaugcuggu

SEQ ID NO: 3433069 - RNA, 15 nt, Human
cagcuaugggagccc

SEQ ID NO: 3433070 - RNA, 18 nt, Human
cagcuaugggagccccag

SEQ ID NO: 3433071 - RNA, 23 nt, Human
cagcuaugggagccccagggucu

SEQ ID NO: 3433072 - RNA, 18 nt, Human
cagcuauugauauaaaua

SEQ ID NO: 3433073 - RNA, 14 nt, Human
cagcuauuuuguga

SEQ ID NO: 3433074 - RNA, 16 nt, Human
cagcuauuuuuacuag

SEQ ID NO: 3433075 - RNA, 15 nt, Human
cagcucaaaggcaca

SEQ ID NO: 3433076 - RNA, 19 nt, Human
cagcucaaaggcacaguga

SEQ ID NO: 3433077 - RNA, 13 nt, Human
cagcucaagucuu

SEQ ID NO: 3433078 - RNA, 20 nt, Human
cagcucacccagccccaggg

SEQ ID NO: 3433079 - RNA, 14 nt, Human
cagcucaccccugg

SEQ ID NO: 3433080 - RNA, 13 nt, Human
cagcucacgcuuc

SEQ ID NO: 3433081 - RNA, 13 nt, Human
cagcucacugcaa

SEQ ID NO: 3433082 - RNA, 15 nt, Human
cagcucagaaccaca

SEQ ID NO: 3433083 - RNA, 13 nt, Human
cagcucagaaccc

SEQ ID NO: 3433084 - RNA, 19 nt, Human
cagcucagagaggguggga

SEQ ID NO: 3433085 - RNA, 20 nt, Human
cagcucagcacugccugcuc

SEQ ID NO: 3433086 - RNA, 13 nt, Human
cagcucagcgcca

SEQ ID NO: 3433087 - RNA, 18 nt, Human
cagcucagcgccagccug

SEQ ID NO: 3433088 - RNA, 13 nt, Human
cagcucaggaucu

SEQ ID NO: 3433089 - RNA, 14 nt, Human
cagcucaggggcag

SEQ ID NO: 3433090 - RNA, 15 nt, Human
cagcucaggggcagc

SEQ ID NO: 3433091 - RNA, 18 nt, Human
cagcucagucccaucaga

SEQ ID NO: 3433092 - RNA, 12 nt, Human
cagcucagugag

SEQ ID NO: 3433093 - RNA, 22 nt, Human
cagcucauccaugccucagaag

SEQ ID NO: 3433094 - RNA, 17 nt, Human
cagcucaugcccccuuu

SEQ ID NO: 3433095 - RNA, 16 nt, Human
cagcucauuaaacuuu

SEQ ID NO: 3433096 - RNA, 22 nt, Human
cagcucauuauaaugucauuaa

SEQ ID NO: 3433097 - RNA, 17 nt, Human
cagcuccaaccugcaaa

SEQ ID NO: 3433098 - RNA, 23 nt, Human
cagcuccaaccugcaaagaucug

SEQ ID NO: 3433099 - RNA, 18 nt, Human
cagcuccagcucaccagc

SEQ ID NO: 3433100 - RNA, 21 nt, Human
cagcuccagguggcucugagg

SEQ ID NO: 3433101 - RNA, 16 nt, Human
cagcuccaguuggagu

SEQ ID NO: 3433102 - RNA, 12 nt, Human
cagcucccacaa

SEQ ID NO: 3433103 - RNA, 19 nt, Human
cagcucccacaagccucug

SEQ ID NO: 3433104 - RNA, 23 nt, Human
cagcucccaccccacccccuuca

SEQ ID NO: 3433105 - RNA, 23 nt, Human
cagcucccauaaccgcugauucu

SEQ ID NO: 3433106 - RNA, 14 nt, Human
cagcucccauuucu

SEQ ID NO: 3433107 - RNA, 19 nt, Human
cagcucccauuucuacucu

SEQ ID NO: 3433108 - RNA, 12 nt, Human
cagcuccccaag

SEQ ID NO: 3433109 - RNA, 15 nt, Human
cagcuccccagaguc

SEQ ID NO: 3433110 - RNA, 14 nt, Human
cagcucccccuccc

SEQ ID NO: 3433111 - RNA, 15 nt, Human
cagcucccccucccu

SEQ ID NO: 3433112 - RNA, 13 nt, Human
cagcucccccugu

SEQ ID NO: 3433113 - RNA, 15 nt, Human
cagcucccccugucc

SEQ ID NO: 3433114 - RNA, 16 nt, Human
cagcuccccucggaga

SEQ ID NO: 3433115 - RNA, 17 nt, Human
cagcuccccucggagaa

SEQ ID NO: 3433116 - RNA, 20 nt, Human
cagcuccccucggagaagag

SEQ ID NO: 3433117 - RNA, 23 nt, Human
cagcucccgcuccgggcuccgac

SEQ ID NO: 3433118 - RNA, 20 nt, Human
cagcucccuaggagaccaag

SEQ ID NO: 3433119 - RNA, 16 nt, Human
auugcauucuauugcc

SEQ ID NO: 3433120 - RNA, 17 nt, Human
auugcauucuauugccu

SEQ ID NO: 3433121 - RNA, 22 nt, Human
auugcauucuauugccuucuuu

SEQ ID NO: 3433122 - RNA, 14 nt, Human
auugcauugacuuu

SEQ ID NO: 3433123 - RNA, 16 nt, Human
auugcauuugcuuuug

SEQ ID NO: 3433124 - RNA, 19 nt, Human
auugcauuuuuuaaaacaa

SEQ ID NO: 3433125 - RNA, 15 nt, Human
auugccaaaaaggau

SEQ ID NO: 3433126 - RNA, 20 nt, Human
auugccaaaaagugaaauaa

SEQ ID NO: 3433127 - RNA, 22 nt, Human
auugccaaaacccagcugcacc

SEQ ID NO: 3433128 - RNA, 22 nt, Human
auugccaagcucaggaccaggc

SEQ ID NO: 3433129 - RNA, 14 nt, Human
auugccaccaggag

SEQ ID NO: 3433130 - RNA, 12 nt, Human
auugccaccucu

SEQ ID NO: 3433131 - RNA, 16 nt, Human
auugccagugucuuuc

SEQ ID NO: 3433132 - RNA, 18 nt, Human
auugccagugucuuucuu

SEQ ID NO: 3433133 - RNA, 16 nt, Human
auugccauauugcaca

SEQ ID NO: 3433134 - RNA, 17 nt, Human
auugccauauugcacau

SEQ ID NO: 3433135 - RNA, 19 nt, Human
auugccauauugcacaugu

SEQ ID NO: 3433136 - RNA, 17 nt, Human
auugcccacgcuggagu

SEQ ID NO: 3433137 - RNA, 16 nt, Human
auugcccagucuuuca

SEQ ID NO: 3433138 - RNA, 18 nt, Human
auugcccauccaucugcu

SEQ ID NO: 3433139 - RNA, 16 nt, Human
auugcccaugauauaa

SEQ ID NO: 3433140 - RNA, 19 nt, Human
auugcccaugauauaacuu

SEQ ID NO: 3433141 - RNA, 21 nt, Human
auugccuaagaauaaacauuu

SEQ ID NO: 3433142 - RNA, 18 nt, Human
auugccuauuucaguggc

SEQ ID NO: 3433143 - RNA, 15 nt, Human
auugccucacuucag

SEQ ID NO: 3433144 - RNA, 14 nt, Human
auugccucugagag

SEQ ID NO: 3433145 - RNA, 15 nt, Human
auugccugcagagag

SEQ ID NO: 3433146 - RNA, 16 nt, Human
auugccugcagagaga

SEQ ID NO: 3433147 - RNA, 17 nt, Human
auugccugcagagagaa

SEQ ID NO: 3433148 - RNA, 20 nt, Human
auugccuucucaccagcugc

SEQ ID NO: 3433149 - RNA, 21 nt, Human
auugccuucucaccagcugca

SEQ ID NO: 3433150 - RNA, 22 nt, Human
auugccuucucaccagcugcaa

SEQ ID NO: 3433151 - RNA, 15 nt, Human
auugccuucuuugaa

SEQ ID NO: 3433152 - RNA, 19 nt, Human
auugccuucuuugaagaag

SEQ ID NO: 3433153 - RNA, 21 nt, Human
auugccuucuuugaagaaggu

SEQ ID NO: 3433154 - RNA, 16 nt, Human
auugccuuugaauguu

SEQ ID NO: 3433155 - RNA, 17 nt, Human
auugccuuuuaauuuuu

SEQ ID NO: 3433156 - RNA, 13 nt, Human
auugcgagagaug

SEQ ID NO: 3433157 - RNA, 19 nt, Human
auugcgccauugcacucca

SEQ ID NO: 3433158 - RNA, 16 nt, Human
auugcuaaauguaaca

SEQ ID NO: 3433159 - RNA, 17 nt, Human
auugcuaaauguaacag

SEQ ID NO: 3433160 - RNA, 14 nt, Human
auugcuaauguugc

SEQ ID NO: 3433161 - RNA, 15 nt, Human
auugcuaauguugcu

SEQ ID NO: 3433162 - RNA, 14 nt, Human
auugcuaauugcug

SEQ ID NO: 3433163 - RNA, 16 nt, Human
auugcuaauugcuguu

SEQ ID NO: 3433164 - RNA, 23 nt, Human
auugcuacuuccugccuggucuc

SEQ ID NO: 3433165 - RNA, 16 nt, Human
auugcuagauaaaagc

SEQ ID NO: 3433166 - RNA, 13 nt, Human
auugcuaguauuu

SEQ ID NO: 3433167 - RNA, 19 nt, Human
auugcuaguauuugaauua

SEQ ID NO: 3433168 - RNA, 23 nt, Human
auugcuaucuggaggccuuccag

SEQ ID NO: 3433169 - RNA, 15 nt, Human
auugcuauuguguua

SEQ ID NO: 3433170 - RNA, 23 nt, Human
auugcucaaguucauugaugacc

SEQ ID NO: 3433171 - RNA, 16 nt, Human
auugcugaaaauggua

SEQ ID NO: 3433172 - RNA, 22 nt, Human
auugcugagagaaauauggaac

SEQ ID NO: 3433173 - RNA, 23 nt, Human
auugcugagagaaauauggaacu

SEQ ID NO: 3433174 - RNA, 14 nt, Human
auugcugagccucu

SEQ ID NO: 3433175 - RNA, 16 nt, Human
auugcugagccucugc

SEQ ID NO: 3433176 - RNA, 15 nt, Human
auugcugauggugca

SEQ ID NO: 3433177 - RNA, 23 nt, Human
auugcugcaaggacauucuugua

SEQ ID NO: 3433178 - RNA, 20 nt, Human
auugcugccccaucagugcu

SEQ ID NO: 3433179 - RNA, 21 nt, Human
auugcugccccaucagugcuc

SEQ ID NO: 3433180 - RNA, 12 nt, Human
auugcugcuuga

SEQ ID NO: 3433181 - RNA, 17 nt, Human
auugcugcuuguacacu

SEQ ID NO: 3433182 - RNA, 22 nt, Human
auugcuguaggaucuaaggcug

SEQ ID NO: 3433183 - RNA, 17 nt, Human
auugcugucugcagccu

SEQ ID NO: 3433184 - RNA, 18 nt, Human
auugcugugcuuuaugga

SEQ ID NO: 3433185 - RNA, 19 nt, Human
auugcuguguccaacucca

SEQ ID NO: 3433186 - RNA, 17 nt, Human
auugcugugugucccag

SEQ ID NO: 3433187 - RNA, 20 nt, Human
auugcuguuaugucuguuua

SEQ ID NO: 3433188 - RNA, 17 nt, Human
auugcuguugaaagcaa

SEQ ID NO: 3433189 - RNA, 18 nt, Human
auugcuguugaaagcaaa

SEQ ID NO: 3433190 - RNA, 22 nt, Human
auugcuguugaaagcaaaaaug

SEQ ID NO: 3433191 - RNA, 15 nt, Human
auugcuguugcuuga

SEQ ID NO: 3433192 - RNA, 19 nt, Human
auugcuguuguccaacuau

SEQ ID NO: 3433193 - RNA, 16 nt, Human
auugcuuacauuuuua

SEQ ID NO: 3433194 - RNA, 16 nt, Human
auugcuuaguaaaauu

SEQ ID NO: 3433195 - RNA, 19 nt, Human
auugcuuauuauguaggua

SEQ ID NO: 3433196 - RNA, 20 nt, Human
auugcuuauuuauuguauuc

SEQ ID NO: 3433197 - RNA, 20 nt, Human
auugcuucacaacccaucua

SEQ ID NO: 3433198 - RNA, 19 nt, Human
auugcuuccuccuccccaa

SEQ ID NO: 3433199 - RNA, 13 nt, Human
auugcuucuguag

SEQ ID NO: 3433200 - RNA, 15 nt, Human
auugcuucuguagua

SEQ ID NO: 3433201 - RNA, 16 nt, Human
auugcuugaaagaaaa

SEQ ID NO: 3433202 - RNA, 14 nt, Human
auugcuugcacaaa

SEQ ID NO: 3433203 - RNA, 13 nt, Human
auugcuuuauaaa

SEQ ID NO: 3433204 - RNA, 14 nt, Human
auugcuuuccacug

SEQ ID NO: 3433205 - RNA, 18 nt, Human
auugcuuuggucauauga

SEQ ID NO: 3433206 - RNA, 21 nt, Human
auugcuuuguauuguauauua

SEQ ID NO: 3433207 - RNA, 13 nt, Human
auugcuuuuaaaa

SEQ ID NO: 3433208 - RNA, 15 nt, Human
auuguauauuacaau

SEQ ID NO: 3433209 - RNA, 18 nt, Human
auuguauauuacaaugau

SEQ ID NO: 3433210 - RNA, 21 nt, Human
auuguaucagaggccuauaau

SEQ ID NO: 3433211 - RNA, 14 nt, Human
auuguaucuagugc

SEQ ID NO: 3433212 - RNA, 16 nt, Human
auuguaucuagugcag

SEQ ID NO: 3433213 - RNA, 17 nt, Human
auuguaugaaguuugaa

SEQ ID NO: 3433214 - RNA, 15 nt, Human
auuguauguggucau

SEQ ID NO: 3433215 - RNA, 16 nt, Human
auuguauuuauucaau

SEQ ID NO: 3433216 - RNA, 14 nt, Human
auuguauuuauucc

SEQ ID NO: 3433217 - RNA, 15 nt, Human
auuguauuuuaguau

SEQ ID NO: 3433218 - RNA, 17 nt, Human
auugucaccugcuucuc

SEQ ID NO: 3433219 - RNA, 14 nt, Human
auugucagauauuu

SEQ ID NO: 3433220 - RNA, 19 nt, Human
auugucagcuacuaaugau

SEQ ID NO: 3433221 - RNA, 21 nt, Human
auugucauaucagcacauauu

SEQ ID NO: 3433222 - RNA, 15 nt, Human
auugucaucaggaga

SEQ ID NO: 3433223 - RNA, 13 nt, Human
auugucauuaaag

SEQ ID NO: 3433224 - RNA, 14 nt, Human
auugucauuaguga

SEQ ID NO: 3433225 - RNA, 15 nt, Human
auugucauuccugua

SEQ ID NO: 3433226 - RNA, 13 nt, Human
auuguccagagcu

SEQ ID NO: 3433227 - RNA, 19 nt, Human
auuguccccgacccuugcc

SEQ ID NO: 3433228 - RNA, 20 nt, Human
auuguccccgacccuugccg

SEQ ID NO: 3433229 - RNA, 18 nt, Human
auugucccuggcuuccuu

SEQ ID NO: 3433230 - RNA, 14 nt, Human
auuguccuauuagu

SEQ ID NO: 3433231 - RNA, 15 nt, Human
auuguccuuuugcaa

SEQ ID NO: 3433232 - RNA, 16 nt, Human
auuguccuuuugcaaa

SEQ ID NO: 3433233 - RNA, 17 nt, Human
auuguccuuuugcaaag

SEQ ID NO: 3433234 - RNA, 18 nt, Human
auuguccuuuugcaaaga

SEQ ID NO: 3433235 - RNA, 15 nt, Human
auugucgcuauugau

SEQ ID NO: 3433236 - RNA, 22 nt, Human
auugucguauaggcauguaaac

SEQ ID NO: 3433237 - RNA, 12 nt, Human
auugucuauuua

SEQ ID NO: 3433238 - RNA, 13 nt, Human
auugucuauuuau

SEQ ID NO: 3433239 - RNA, 19 nt, Human
auugucucccgccccccac

SEQ ID NO: 3433240 - RNA, 16 nt, Human
auugucucccuuccag

SEQ ID NO: 3433241 - RNA, 15 nt, Human
auugucuccuugagu

SEQ ID NO: 3433242 - RNA, 16 nt, Human
auugucugaacuugca

SEQ ID NO: 3433243 - RNA, 18 nt, Human
auugucugaacuugcauu

SEQ ID NO: 3433244 - RNA, 23 nt, Human
auugucuucggaaaccuuggugu

SEQ ID NO: 3433245 - RNA, 14 nt, Human
auugucuuguucug

SEQ ID NO: 3433246 - RNA, 20 nt, Human
auugucuuuauaugaacaua

SEQ ID NO: 3433247 - RNA, 18 nt, Human
auugucuuuggugcuuuu

SEQ ID NO: 3433248 - RNA, 15 nt, Human
auugugaaauuauuc

SEQ ID NO: 3433249 - RNA, 16 nt, Human
auugugaacauuugug

SEQ ID NO: 3433250 - RNA, 17 nt, Human
auugugaauaaugauuu

SEQ ID NO: 3433251 - RNA, 14 nt, Human
auugugaauugaua

SEQ ID NO: 3433252 - RNA, 23 nt, Human
auugugaucagaccauaauguua

SEQ ID NO: 3433253 - RNA, 19 nt, Human
auugugauguauauuccuu

SEQ ID NO: 3433254 - RNA, 14 nt, Human
auugugaugugucc

SEQ ID NO: 3433255 - RNA, 15 nt, Human
auugugauguguccu

SEQ ID NO: 3433256 - RNA, 16 nt, Human
auugugauuggccugu

SEQ ID NO: 3433257 - RNA, 14 nt, Human
auugugauuucccg

SEQ ID NO: 3433258 - RNA, 23 nt, Human
auugugauuucccguggccccag

SEQ ID NO: 3433259 - RNA, 19 nt, Human
auugugauuugacuguuuu

SEQ ID NO: 3433260 - RNA, 17 nt, Human
auugugcaauguguaua

SEQ ID NO: 3433261 - RNA, 20 nt, Human
auugugcaguacuuugugca

SEQ ID NO: 3433262 - RNA, 19 nt, Human
auugugccaauauguauug

SEQ ID NO: 3433263 - RNA, 23 nt, Human
auugugcgcuaaacuuuucugau

SEQ ID NO: 3433264 - RNA, 13 nt, Human
auugugcuagugc

SEQ ID NO: 3433265 - RNA, 12 nt, Human
auugugcugcca

SEQ ID NO: 3433266 - RNA, 13 nt, Human
auugugcugccau

SEQ ID NO: 3433267 - RNA, 20 nt, Human
auugugcuucacaguagagc

SEQ ID NO: 3433268 - RNA, 12 nt, Human
auugugcuucuc

SEQ ID NO: 3433269 - RNA, 19 nt, Human
auugugcuucuccccagaa

SEQ ID NO: 3433270 - RNA, 20 nt, Human
auugugcuucuccccagaau

SEQ ID NO: 3433271 - RNA, 14 nt, Human
auuguggaauguug

SEQ ID NO: 3433272 - RNA, 15 nt, Human
auuguggaauguugg

SEQ ID NO: 3433273 - RNA, 20 nt, Human
auuguggaauguuggauaag

SEQ ID NO: 3433274 - RNA, 18 nt, Human
auuguggauaacaaagau

SEQ ID NO: 3433275 - RNA, 18 nt, Human
auuguggcuauccugauu

SEQ ID NO: 3433276 - RNA, 14 nt, Human
auugugggaagggg

SEQ ID NO: 3433277 - RNA, 16 nt, Human
auugugggcauaaacu

SEQ ID NO: 3433278 - RNA, 20 nt, Human
auuguggggaugaugaaaua

SEQ ID NO: 3433279 - RNA, 22 nt, Human
auugugguaggccuuuuaacau

SEQ ID NO: 3433280 - RNA, 14 nt, Human
auuguggugccaca

SEQ ID NO: 3433281 - RNA, 23 nt, Human
auugugguuauuuuuauacagua

SEQ ID NO: 3433282 - RNA, 15 nt, Human
auuguguagccuuuu

SEQ ID NO: 3433283 - RNA, 17 nt, Human
auugugucagacuguuu

SEQ ID NO: 3433284 - RNA, 13 nt, Human
auugugucuuuug

SEQ ID NO: 3433285 - RNA, 18 nt, Human
cagcaaaaccauugcuuc

SEQ ID NO: 3433286 - RNA, 22 nt, Human
cagcaaaaugugaaugggaaaa

SEQ ID NO: 3433287 - RNA, 21 nt, Human
cagcaaacacuccacccucca

SEQ ID NO: 3433288 - RNA, 16 nt, Human
cagcaaacagaucacu

SEQ ID NO: 3433289 - RNA, 14 nt, Human
cagcaaaccaagag

SEQ ID NO: 3433290 - RNA, 24 nt, Human
cagcaaaccauuuuuaaaguagaa

SEQ ID NO: 3433291 - RNA, 16 nt, Human
cagcaaaccggggccu

SEQ ID NO: 3433292 - RNA, 20 nt, Human
cagcaaagaggacucgcuug

SEQ ID NO: 3433293 - RNA, 12 nt, Human
cagcaaagcccc

SEQ ID NO: 3433294 - RNA, 22 nt, Human
cagcaaagccccaugcuggagc

SEQ ID NO: 3433295 - RNA, 23 nt, Human
cagcaaagcccccagagcccagg

SEQ ID NO: 3433296 - RNA, 18 nt, Human
cagcaaauccuuugugaa

SEQ ID NO: 3433297 - RNA, 22 nt, Human
cagcaaaugcaaaaacucuuug

SEQ ID NO: 3433298 - RNA, 19 nt, Human
cagcaaauuaauuggcagc

SEQ ID NO: 3433299 - RNA, 14 nt, Human
cagcaaauuuauaa

SEQ ID NO: 3433300 - RNA, 16 nt, Human
cagcaaauuuauaauu

SEQ ID NO: 3433301 - RNA, 17 nt, Human
cagcaaauuuauaauuu

SEQ ID NO: 3433302 - RNA, 14 nt, Human
cagcaaauuuucag

SEQ ID NO: 3433303 - RNA, 19 nt, Human
cagcaacaauaaauagaca

SEQ ID NO: 3433304 - RNA, 23 nt, Human
cagcaacacaaagcuuuugcaua

SEQ ID NO: 3433305 - RNA, 19 nt, Human
cagcaacacagccugggcc

SEQ ID NO: 3433306 - RNA, 13 nt, Human
cagcaacagaaaa

SEQ ID NO: 3433307 - RNA, 17 nt, Human
cagcaacagaaaaaugg

SEQ ID NO: 3433308 - RNA, 12 nt, Human
cagcaaccccag

SEQ ID NO: 3433309 - RNA, 18 nt, Human
cagcaacgaucacaaaug

SEQ ID NO: 3433310 - RNA, 23 nt, Human
cagcaacgaucacaaaugacuuu

SEQ ID NO: 3433311 - RNA, 23 nt, Human
cagcaacgcaggcccccaggugc

SEQ ID NO: 3433312 - RNA, 17 nt, Human
cagcaacgcuuguagaa

SEQ ID NO: 3433313 - RNA, 20 nt, Human
cagcaacggggaggccaagu

SEQ ID NO: 3433314 - RNA, 15 nt, Human
cagcaacugaauaaa

SEQ ID NO: 3433315 - RNA, 22 nt, Human
cagcaacuuguccuagcacaga

SEQ ID NO: 3433316 - RNA, 18 nt, Human
cagcaacuugucuuuuuc

SEQ ID NO: 3433317 - RNA, 19 nt, Human
cagcaacuugucuuuuucu

SEQ ID NO: 3433318 - RNA, 14 nt, Human
cagcaagaaaaaaa

SEQ ID NO: 3433319 - RNA, 19 nt, Human
cagcaagaaaaaaaaaugc

SEQ ID NO: 3433320 - RNA, 15 nt, Human
cagcaagaauauugu

SEQ ID NO: 3433321 - RNA, 19 nt, Human
cagcaagcccuacagagcu

SEQ ID NO: 3433322 - RNA, 18 nt, Human
cagcaaggagauuuacaa

SEQ ID NO: 3433323 - RNA, 15 nt, Human
cagcaaggcaccugc

SEQ ID NO: 3433324 - RNA, 17 nt, Human
cagcaaggccaccucuu

SEQ ID NO: 3433325 - RNA, 21 nt, Human
cagcaaggccaccucuuccug

SEQ ID NO: 3433326 - RNA, 23 nt, Human
cagcaaggccaccucuuccuggc

SEQ ID NO: 3433327 - RNA, 20 nt, Human
cagcaaggggcucugcccuc

SEQ ID NO: 3433328 - RNA, 23 nt, Human
cagcaagggugaugggaaagcau

SEQ ID NO: 3433329 - RNA, 16 nt, Human
cagcaaggucuugcuc

SEQ ID NO: 3433330 - RNA, 15 nt, Human
cagcaagucaggguu

SEQ ID NO: 3433331 - RNA, 14 nt, Human
cagcaagucucuuu

SEQ ID NO: 3433332 - RNA, 12 nt, Human
cagcaagugaga

SEQ ID NO: 3433333 - RNA, 17 nt, Human
cagcaagugagagcugg

SEQ ID NO: 3433334 - RNA, 19 nt, Human
cagcaagugagagcugggu

SEQ ID NO: 3433335 - RNA, 22 nt, Human
cagcaagugguccuagaggccc

SEQ ID NO: 3433336 - RNA, 15 nt, Human
cagcaagugugaaua

SEQ ID NO: 3433337 - RNA, 13 nt, Human
cagcaauaaagca

SEQ ID NO: 3433338 - RNA, 20 nt, Human
cagcaauauauuaccagcaa

SEQ ID NO: 3433339 - RNA, 23 nt, Human
cagcaauauauuaccagcaagaa

SEQ ID NO: 3433340 - RNA, 15 nt, Human
cagcaauauguaaau

SEQ ID NO: 3433341 - RNA, 19 nt, Human
cagcaaugacaucucaggg

SEQ ID NO: 3433342 - RNA, 22 nt, Human
cagcaaugauguccagaagaau

SEQ ID NO: 3433343 - RNA, 22 nt, Human
cagcaauuacaacggagucaaa

SEQ ID NO: 3433344 - RNA, 19 nt, Human
cagcaauuaugaaaauaau

SEQ ID NO: 3433345 - RNA, 14 nt, Human
cagcaauuuaaaug

SEQ ID NO: 3433346 - RNA, 15 nt, Human
cagcaauuuaaaugu

SEQ ID NO: 3433347 - RNA, 16 nt, Human
cagcacaaacacaagg

SEQ ID NO: 3433348 - RNA, 20 nt, Human
cagcacaaauuaguuauaua

SEQ ID NO: 3433349 - RNA, 19 nt, Human
cagcacacagggcagugag

SEQ ID NO: 3433350 - RNA, 13 nt, Human
cagcacacucagc

SEQ ID NO: 3433351 - RNA, 13 nt, Human
cagcacagagagg

SEQ ID NO: 3433352 - RNA, 19 nt, Human
cagcacagauaaaaagugg

SEQ ID NO: 3433353 - RNA, 19 nt, Human
caggcaccuuaguggcuuu

SEQ ID NO: 3433354 - RNA, 16 nt, Human
caggcacgaacccacc

SEQ ID NO: 3433355 - RNA, 17 nt, Human
caggcacgaacccaccu

SEQ ID NO: 3433356 - RNA, 19 nt, Human
caggcacgaacccaccugc

SEQ ID NO: 3433357 - RNA, 14 nt, Human
caggcacgguuugg

SEQ ID NO: 3433358 - RNA, 23 nt, Human
caggcacuagccuuuggcucugg

SEQ ID NO: 3433359 - RNA, 21 nt, Human
caggcacugcaaaccgccacc

SEQ ID NO: 3433360 - RNA, 22 nt, Human
caggcacugcccugguggcccu

SEQ ID NO: 3433361 - RNA, 18 nt, Human
caggcacugggcaugagg

SEQ ID NO: 3433362 - RNA, 21 nt, Human
caggcacuuaagcacaagcag

SEQ ID NO: 3433363 - RNA, 12 nt, Human
caggcacuuggc

SEQ ID NO: 3433364 - RNA, 16 nt, Human
caggcacuuggcagcc

SEQ ID NO: 3433365 - RNA, 12 nt, Human
caggcagaaaga

SEQ ID NO: 3433366 - RNA, 16 nt, Human
caggcagacacggauc

SEQ ID NO: 3433367 - RNA, 14 nt, Human
caggcagaggccca

SEQ ID NO: 3433368 - RNA, 17 nt, Human
caggcagaggcccaggc

SEQ ID NO: 3433369 - RNA, 18 nt, Human
caggcagaggcccaggcu

SEQ ID NO: 3433370 - RNA, 20 nt, Human
caggcagaggcccaggcugc

SEQ ID NO: 3433371 - RNA, 18 nt, Human
caggcagauacaggaaaa

SEQ ID NO: 3433372 - RNA, 14 nt, Human
caggcagauccagg

SEQ ID NO: 3433373 - RNA, 17 nt, Human
caggcagauccaggacu

SEQ ID NO: 3433374 - RNA, 19 nt, Human
caggcagaucugugcccca

SEQ ID NO: 3433375 - RNA, 22 nt, Human
caggcagaucugugccccaugc

SEQ ID NO: 3433376 - RNA, 14 nt, Human
caggcagcagagac

SEQ ID NO: 3433377 - RNA, 13 nt, Human
caggcagcauuua

SEQ ID NO: 3433378 - RNA, 16 nt, Human
caggcagccagcaucu

SEQ ID NO: 3433379 - RNA, 14 nt, Human
caggcagccaggcc

SEQ ID NO: 3433380 - RNA, 15 nt, Human
caggcagccagugcc

SEQ ID NO: 3433381 - RNA, 16 nt, Human
caggcagccucugggg

SEQ ID NO: 3433382 - RNA, 16 nt, Human
caggcagccucuguca

SEQ ID NO: 3433383 - RNA, 21 nt, Human
caggcagccucugucaggccu

SEQ ID NO: 3433384 - RNA, 22 nt, Human
caggcagccucugucaggccuu

SEQ ID NO: 3433385 - RNA, 13 nt, Human
caggcagccugga

SEQ ID NO: 3433386 - RNA, 12 nt, Human
caggcagcgaug

SEQ ID NO: 3433387 - RNA, 21 nt, Human
caggcagcgauggucucagaa

SEQ ID NO: 3433388 - RNA, 15 nt, Human
caggcagcgccaagc

SEQ ID NO: 3433389 - RNA, 22 nt, Human
caggcagcucauaagagccaca

SEQ ID NO: 3433390 - RNA, 23 nt, Human
caggcagcucauaagagccacag

SEQ ID NO: 3433391 - RNA, 22 nt, Human
caggcagcuuuuucucucccac

SEQ ID NO: 3433392 - RNA, 14 nt, Human
caggcaggagcccu

SEQ ID NO: 3433393 - RNA, 12 nt, Human
caggcaggcugu

SEQ ID NO: 3433394 - RNA, 13 nt, Human
caggcaggcugug

SEQ ID NO: 3433395 - RNA, 19 nt, Human
caggcaggcugugcgcuga

SEQ ID NO: 3433396 - RNA, 12 nt, Human
caggcagggaga

SEQ ID NO: 3433397 - RNA, 16 nt, Human
caggcagggcaggacc

SEQ ID NO: 3433398 - RNA, 22 nt, Human
caggcagggcaggaccagccca

SEQ ID NO: 3433399 - RNA, 14 nt, Human
caggcagggcucuc

SEQ ID NO: 3433400 - RNA, 16 nt, Human
caggcagggcucuccu

SEQ ID NO: 3433401 - RNA, 17 nt, Human
caggcagggcugacucu

SEQ ID NO: 3433402 - RNA, 23 nt, Human
caggcagggcugacucuaggugc

SEQ ID NO: 3433403 - RNA, 18 nt, Human
caggcaggggcccugcag

SEQ ID NO: 3433404 - RNA, 20 nt, Human
caggcaggggcccugcagcu

SEQ ID NO: 3433405 - RNA, 13 nt, Human
caggcaggggccu

SEQ ID NO: 3433406 - RNA, 21 nt, Human
caggcaggggccuccaugggc

SEQ ID NO: 3433407 - RNA, 14 nt, Human
caggcagguccagg

SEQ ID NO: 3433408 - RNA, 15 nt, Human
caggcagguccaggg

SEQ ID NO: 3433409 - RNA, 13 nt, Human
caggcaggucuug

SEQ ID NO: 3433410 - RNA, 23 nt, Human
caggcaggucuugaacuccuggc

SEQ ID NO: 3433411 - RNA, 16 nt, Human
caggcaggugccugga

SEQ ID NO: 3433412 - RNA, 18 nt, Human
caggcagucgggggcugg

SEQ ID NO: 3433413 - RNA, 19 nt, Human
caggcagucgggggcuggc

SEQ ID NO: 3433414 - RNA, 20 nt, Human
caggcagucgggggcuggcc

SEQ ID NO: 3433415 - RNA, 17 nt, Human
caggcaguuggccagag

SEQ ID NO: 3433416 - RNA, 17 nt, Human
caggcauagaggcuucu

SEQ ID NO: 3433417 - RNA, 14 nt, Human
caggcauaggccug

SEQ ID NO: 3433418 - RNA, 16 nt, Human
caggcauaggccuggg

SEQ ID NO: 3433419 - RNA, 19 nt, Human
caggcauaggccugggugc

SEQ ID NO: 3433420 - RNA, 15 nt, Human
caggcaucacagcua

SEQ ID NO: 3433421 - RNA, 15 nt, Human
caggcaucugauuug

SEQ ID NO: 3433422 - RNA, 20 nt, Human
caggcaugaacauguacugu

SEQ ID NO: 3433423 - RNA, 14 nt, Human
caggcaugccugug

SEQ ID NO: 3433424 - RNA, 15 nt, Human
caggcauggcccugg

SEQ ID NO: 3433425 - RNA, 15 nt, Human
caggcaugggccacc

SEQ ID NO: 3433426 - RNA, 17 nt, Human
caggcaugguggcccac

SEQ ID NO: 3433427 - RNA, 18 nt, Human
caggcauguucucugagg

SEQ ID NO: 3433428 - RNA, 15 nt, Human
caggcauuccccagg

SEQ ID NO: 3433429 - RNA, 20 nt, Human
caggcauuccccaggaggcc

SEQ ID NO: 3433430 - RNA, 24 nt, Human
caggcauuccccaggaggccagcc

SEQ ID NO: 3433431 - RNA, 14 nt, Human
caggcauugaggaa

SEQ ID NO: 3433432 - RNA, 19 nt, Human
caggcauugccaagggcuu

SEQ ID NO: 3433433 - RNA, 15 nt, Human
caggcauuggauauu

SEQ ID NO: 3433434 - RNA, 16 nt, Human
caggcauuuagcccuc

SEQ ID NO: 3433435 - RNA, 18 nt, Human
caggcauuuccugggugg

SEQ ID NO: 3433436 - RNA, 23 nt, Human
caggcauuugacugaagaugcag

SEQ ID NO: 3433437 - RNA, 13 nt, Human
caggcauuuguuc

SEQ ID NO: 3433438 - RNA, 19 nt, Human
caggccaagagcagaggca

SEQ ID NO: 3433439 - RNA, 13 nt, Human
caggccacaagac

SEQ ID NO: 3433440 - RNA, 18 nt, Human
caggccacaagacccuug

SEQ ID NO: 3433441 - RNA, 20 nt, Human
caggccacaagacccuugug

SEQ ID NO: 3433442 - RNA, 18 nt, Human
caggccacacuucaaacu

SEQ ID NO: 3433443 - RNA, 12 nt, Human
caggccaccucc

SEQ ID NO: 3433444 - RNA, 15 nt, Human
caggccaccucccca

SEQ ID NO: 3433445 - RNA, 16 nt, Human
caggccaccuccccag

SEQ ID NO: 3433446 - RNA, 21 nt, Human
caggccaccugcccccuucuc

SEQ ID NO: 3433447 - RNA, 23 nt, Human
caggccaccugcccccuucuccc

SEQ ID NO: 3433448 - RNA, 17 nt, Human
caggccaccuggcucuc

SEQ ID NO: 3433449 - RNA, 13 nt, Human
caggccagaggga

SEQ ID NO: 3433450 - RNA, 13 nt, Human
caggccagccucc

SEQ ID NO: 3433451 - RNA, 15 nt, Human
caggccagcugccuc

SEQ ID NO: 3433452 - RNA, 13 nt, Human
caggccagcugcu

SEQ ID NO: 3433453 - RNA, 21 nt, Human
caggccagcugcuugggcuuc

SEQ ID NO: 3433454 - RNA, 13 nt, Human
caggccagcugug

SEQ ID NO: 3433455 - RNA, 15 nt, Human
caggccaggacucug

SEQ ID NO: 3433456 - RNA, 19 nt, Human
caggccaggacucugcagc

SEQ ID NO: 3433457 - RNA, 15 nt, Human
caggccaggcccucu

SEQ ID NO: 3433458 - RNA, 16 nt, Human
caggccaggcccucug

SEQ ID NO: 3433459 - RNA, 20 nt, Human
caggccaggcccucugccca

SEQ ID NO: 3433460 - RNA, 18 nt, Human
caggccaggcuccuuccu

SEQ ID NO: 3433461 - RNA, 21 nt, Human
caggccagggggccagucccu

SEQ ID NO: 3433462 - RNA, 12 nt, Human
caggccaggucc

SEQ ID NO: 3433463 - RNA, 15 nt, Human
caggccaggugcagu

SEQ ID NO: 3433464 - RNA, 16 nt, Human
caggccaggugcagug

SEQ ID NO: 3433465 - RNA, 16 nt, Human
caggccaguaagggaa

SEQ ID NO: 3433466 - RNA, 22 nt, Human
caggccaguaagggaaauagaa

SEQ ID NO: 3433467 - RNA, 15 nt, Human
caggccaucagaggc

SEQ ID NO: 3433468 - RNA, 18 nt, Human
caggccauccggccccca

SEQ ID NO: 3433469 - RNA, 16 nt, Human
caggccaucuuccagg

SEQ ID NO: 3433470 - RNA, 21 nt, Human
caggccauuccccgucucugg

SEQ ID NO: 3433471 - RNA, 19 nt, Human
caggcccaaagccucgaca

SEQ ID NO: 3433472 - RNA, 22 nt, Human
caggcccaacugugagcaagga

SEQ ID NO: 3433473 - RNA, 19 nt, Human
caggcccaagagaugaaga

SEQ ID NO: 3433474 - RNA, 14 nt, Human
caggcccacccugc

SEQ ID NO: 3433475 - RNA, 24 nt, Human
caggcccacccugcuuggcccagg

SEQ ID NO: 3433476 - RNA, 12 nt, Human
caggcccaccua

SEQ ID NO: 3433477 - RNA, 16 nt, Human
caggcccacugugccu

SEQ ID NO: 3433478 - RNA, 10 nt, Human
caggcccagc

SEQ ID NO: 3433479 - RNA, 17 nt, Human
caggcccaggcuccaga

SEQ ID NO: 3433480 - RNA, 23 nt, Human
caggccccaaaaccacagcccug

SEQ ID NO: 3433481 - RNA, 13 nt, Human
caggccccaggaa

SEQ ID NO: 3433482 - RNA, 16 nt, Human
caggccccaggaagcc

SEQ ID NO: 3433483 - RNA, 18 nt, Human
caggccccaggcagggcc

SEQ ID NO: 3433484 - RNA, 14 nt, Human
caggccccaugacc

SEQ ID NO: 3433485 - RNA, 13 nt, Human
caggcccccacca

SEQ ID NO: 3433486 - RNA, 16 nt, Human
caggcccccaccacac

SEQ ID NO: 3433487 - RNA, 22 nt, Human
caggcccccaccacacauccca

SEQ ID NO: 3433488 - RNA, 23 nt, Human
caggcccccaccacacaucccag

SEQ ID NO: 3433489 - RNA, 19 nt, Human
caggcccccaggugccagu

SEQ ID NO: 3433490 - RNA, 14 nt, Human
caggccccccuguc

SEQ ID NO: 3433491 - RNA, 16 nt, Human
auuucagagaggccuu

SEQ ID NO: 3433492 - RNA, 16 nt, Human
auuucagauguaaugu

SEQ ID NO: 3433493 - RNA, 18 nt, Human
auuucagauguaauguuu

SEQ ID NO: 3433494 - RNA, 16 nt, Human
auuucagcagcugcag

SEQ ID NO: 3433495 - RNA, 22 nt, Human
auuucaggggucgucaccaccu

SEQ ID NO: 3433496 - RNA, 15 nt, Human
auuucagggugcagc

SEQ ID NO: 3433497 - RNA, 21 nt, Human
auuucagguuuuguaaagaug

SEQ ID NO: 3433498 - RNA, 16 nt, Human
caggcuggcgcagcca

SEQ ID NO: 3433499 - RNA, 16 nt, Human
caggcuggcuccagau

SEQ ID NO: 3433500 - RNA, 18 nt, Human
caggcugggaacucaucu

SEQ ID NO: 3433501 - RNA, 19 nt, Human
cagcgcuggguccacccca

SEQ ID NO: 3433502 - RNA, 21 nt, Human
cagcggaaagcccugugcucc

SEQ ID NO: 3433503 - RNA, 15 nt, Human
cagcggccccuccca

SEQ ID NO: 3433504 - RNA, 17 nt, Human
cagcggccccucccaca

SEQ ID NO: 3433505 - RNA, 17 nt, Human
cagcggccccuugacuc

SEQ ID NO: 3433506 - RNA, 17 nt, Human
cagcggcuggaauuggg

SEQ ID NO: 3433507 - RNA, 17 nt, Human
cagcggcuggugcaggg

SEQ ID NO: 3433508 - RNA, 22 nt, Human
cagcgggaauggcagcugccac

SEQ ID NO: 3433509 - RNA, 16 nt, Human
cagcggggacagcucc

SEQ ID NO: 3433510 - RNA, 18 nt, Human
cagcggggacagcuccuu

SEQ ID NO: 3433511 - RNA, 19 nt, Human
cagcggggacagcuccuuc

SEQ ID NO: 3433512 - RNA, 16 nt, Human
cagcggggaggggagg

SEQ ID NO: 3433513 - RNA, 14 nt, Human
cagcggggcgaagc

SEQ ID NO: 3433514 - RNA, 21 nt, Human
cagcgggggaggcccgcagag

SEQ ID NO: 3433515 - RNA, 15 nt, Human
cagcguaaaauggug

SEQ ID NO: 3433516 - RNA, 17 nt, Human
cagcgucccuagcagug

SEQ ID NO: 3433517 - RNA, 13 nt, Human
cagcgucccuggc

SEQ ID NO: 3433518 - RNA, 15 nt, Human
cagcgucccuggcgc

SEQ ID NO: 3433519 - RNA, 18 nt, Human
cagcguccuccucuguga

SEQ ID NO: 3433520 - RNA, 15 nt, Human
cagcguccuguccac

SEQ ID NO: 3433521 - RNA, 19 nt, Human
cagcgugcuuuaaaaaaua

SEQ ID NO: 3433522 - RNA, 14 nt, Human
cagcguugcauguc

SEQ ID NO: 3433523 - RNA, 18 nt, Human
cagcuaaauuuucugaaa

SEQ ID NO: 3433524 - RNA, 18 nt, Human
cagcuaacauggaaguac

SEQ ID NO: 3433525 - RNA, 20 nt, Human
cagcuaacauggaaguacua

SEQ ID NO: 3433526 - RNA, 12 nt, Human
cagcuaagaaaa

SEQ ID NO: 3433527 - RNA, 13 nt, Human
cagcuaagaaccu

SEQ ID NO: 3433528 - RNA, 13 nt, Human
cagcuaagcucac

SEQ ID NO: 3433529 - RNA, 14 nt, Human
cagcuaagcucacg

SEQ ID NO: 3433530 - RNA, 22 nt, Human
cagcuaaggaggggaaaaaaau

SEQ ID NO: 3433531 - RNA, 19 nt, Human
cagcuaagggaagacauuu

SEQ ID NO: 3433532 - RNA, 23 nt, Human
cagcuaagggaagacauuucuuu

SEQ ID NO: 3433533 - RNA, 21 nt, Human
cagcuaagggguggggcugcg

SEQ ID NO: 3433534 - RNA, 12 nt, Human
cagcuacaacag

SEQ ID NO: 3433535 - RNA, 16 nt, Human
cagcuacacagagcuu

SEQ ID NO: 3433536 - RNA, 15 nt, Human
cagcuacagcuuucu

SEQ ID NO: 3433537 - RNA, 18 nt, Human
cagcuaccagguguucua

SEQ ID NO: 3433538 - RNA, 17 nt, Human
cagcuacccuguguaua

SEQ ID NO: 3433539 - RNA, 21 nt, Human
cagcuacucagaagccugagg

SEQ ID NO: 3433540 - RNA, 12 nt, Human
cagcuacucagg

SEQ ID NO: 3433541 - RNA, 15 nt, Human
cagcuacuccggagg

SEQ ID NO: 3433542 - RNA, 24 nt, Human
cagcuacucgggaggcugaggcag

SEQ ID NO: 3433543 - RNA, 23 nt, Human
cagcuacucuccccacgagggcu

SEQ ID NO: 3433544 - RNA, 19 nt, Human
cagcuacugauuuuuguga

SEQ ID NO: 3433545 - RNA, 20 nt, Human
cagcuacuuaagagaaaugg

SEQ ID NO: 3433546 - RNA, 18 nt, Human
cagcuacuugggaggcug

SEQ ID NO: 3433547 - RNA, 17 nt, Human
cagcuacuugguuugug

SEQ ID NO: 3433548 - RNA, 19 nt, Human
cagcuacuugguuuguguu

SEQ ID NO: 3433549 - RNA, 21 nt, Human
cagcuagcaaaagaaguaaca

SEQ ID NO: 3433550 - RNA, 17 nt, Human
cagcuaggaacaaaucu

SEQ ID NO: 3433551 - RNA, 19 nt, Human
cagcuaggaacaaaucuuc

SEQ ID NO: 3433552 - RNA, 21 nt, Human
cagcuaggaacaaaucuuccu

SEQ ID NO: 3433553 - RNA, 19 nt, Human
cagcuagugacccacaugc

SEQ ID NO: 3433554 - RNA, 20 nt, Human
cagcuagugacccacaugcc

SEQ ID NO: 3433555 - RNA, 24 nt, Human
cagcuaucgaacuucacaacuagg

SEQ ID NO: 3433556 - RNA, 17 nt, Human
cagcuaucucucaguga

SEQ ID NO: 3433557 - RNA, 18 nt, Human
cagcuaucucucagugaa

SEQ ID NO: 3433558 - RNA, 13 nt, Human
cagcuaugcaaaa

SEQ ID NO: 3433559 - RNA, 21 nt, Human
cagcuaugggagccccagggu

SEQ ID NO: 3433560 - RNA, 20 nt, Human
cagcuauguuauauugaaaa

SEQ ID NO: 3433561 - RNA, 15 nt, Human
cagcucaagagaucc

SEQ ID NO: 3433562 - RNA, 22 nt, Human
cagcucaagagaucccaaguag

SEQ ID NO: 3433563 - RNA, 19 nt, Human
cagcucaagucuucccuga

SEQ ID NO: 3433564 - RNA, 15 nt, Human
cagcucaccagcccc

SEQ ID NO: 3433565 - RNA, 16 nt, Human
cagcucaccagcccca

SEQ ID NO: 3433566 - RNA, 17 nt, Human
cagcucaccagccccag

SEQ ID NO: 3433567 - RNA, 18 nt, Human
cagcucaccccccacacu

SEQ ID NO: 3433568 - RNA, 13 nt, Human
cagcucaccucuc

SEQ ID NO: 3433569 - RNA, 16 nt, Human
cagcucaccucucccu

SEQ ID NO: 3433570 - RNA, 17 nt, Human
cagcucacgucacacuu

SEQ ID NO: 3433571 - RNA, 12 nt, Human
cagcucacugca

SEQ ID NO: 3433572 - RNA, 12 nt, Human
cagcucagaacc

SEQ ID NO: 3433573 - RNA, 15 nt, Human
cagcucagaacccag

SEQ ID NO: 3433574 - RNA, 17 nt, Human
cagcucagaacccaggg

SEQ ID NO: 3433575 - RNA, 19 nt, Human
cagcucagaacccagggcu

SEQ ID NO: 3433576 - RNA, 21 nt, Human
cagcucagaacccagggcucu

SEQ ID NO: 3433577 - RNA, 21 nt, Human
cagcucagaaguuucuucuuu

SEQ ID NO: 3433578 - RNA, 12 nt, Human
cagcucagagag

SEQ ID NO: 3433579 - RNA, 17 nt, Human
cagcucagagagggugg

SEQ ID NO: 3433580 - RNA, 15 nt, Human
cagcucagcacugcc

SEQ ID NO: 3433581 - RNA, 10 nt, Human
cagcucagga

SEQ ID NO: 3433582 - RNA, 13 nt, Human
cagcucaggacag

SEQ ID NO: 3433583 - RNA, 16 nt, Human
cagcucaggacagaug

SEQ ID NO: 3433584 - RNA, 23 nt, Human
cagcucaggcacacuucuucuug

SEQ ID NO: 3433585 - RNA, 18 nt, Human
cagcucaggggcagcuca

SEQ ID NO: 3433586 - RNA, 12 nt, Human
cagcucaguccc

SEQ ID NO: 3433587 - RNA, 14 nt, Human
cagcucauaagagc

SEQ ID NO: 3433588 - RNA, 14 nt, Human
cagcuccaaccugc

SEQ ID NO: 3433589 - RNA, 20 nt, Human
cagcuccaaccugcaaagau

SEQ ID NO: 3433590 - RNA, 18 nt, Human
cagcuccaagaccuguug

SEQ ID NO: 3433591 - RNA, 15 nt, Human
cagcuccacccuggc

SEQ ID NO: 3433592 - RNA, 23 nt, Human
cagcuccacucugacuggcacag

SEQ ID NO: 3433593 - RNA, 20 nt, Human
cagcuccagccccuuuccaa

SEQ ID NO: 3433594 - RNA, 22 nt, Human
cagcuccagccccuuuccaaaa

SEQ ID NO: 3433595 - RNA, 13 nt, Human
cagcuccagcuca

SEQ ID NO: 3433596 - RNA, 14 nt, Human
cagcuccagcucac

SEQ ID NO: 3433597 - RNA, 17 nt, Human
cagcuccagcucaccag

SEQ ID NO: 3433598 - RNA, 17 nt, Human
cagcuccagguggcucu

SEQ ID NO: 3433599 - RNA, 21 nt, Human
cagcucccaaggcucugagca

SEQ ID NO: 3433600 - RNA, 12 nt, Human
cagcucccaccc

SEQ ID NO: 3433601 - RNA, 19 nt, Human
cagcucccaccccaccccc

SEQ ID NO: 3433602 - RNA, 11 nt, Human
cagcucccagg

SEQ ID NO: 3433603 - RNA, 10 nt, Human
cagcuccccc

SEQ ID NO: 3433604 - RNA, 12 nt, Human
cagcucccccgg

SEQ ID NO: 3433605 - RNA, 16 nt, Human
cagcucccccucccuc

SEQ ID NO: 3433606 - RNA, 20 nt, Human
cagcucccccucccuccccu

SEQ ID NO: 3433607 - RNA, 14 nt, Human
cagcucccccuguc

SEQ ID NO: 3433608 - RNA, 16 nt, Human
cagcucccccuguccc

SEQ ID NO: 3433609 - RNA, 17 nt, Human
cagcucccccugucccc

SEQ ID NO: 3433610 - RNA, 18 nt, Human
cagcucccccuguccccu

SEQ ID NO: 3433611 - RNA, 19 nt, Human
cagcucccccuguccccuc

SEQ ID NO: 3433612 - RNA, 22 nt, Human
cagcuccccucggagaagagcu

SEQ ID NO: 3433613 - RNA, 20 nt, Human
cagcucccgcuccgggcucc

SEQ ID NO: 3433614 - RNA, 21 nt, Human
cagcucccucaaagaggcagu

SEQ ID NO: 3433615 - RNA, 13 nt, Human
cagcucccugcca

SEQ ID NO: 3433616 - RNA, 20 nt, Human
cagcucccuggcuucugugg

SEQ ID NO: 3433617 - RNA, 14 nt, Human
cagcucccuucucu

SEQ ID NO: 3433618 - RNA, 15 nt, Human
cagcucccuucucug

SEQ ID NO: 3433619 - RNA, 14 nt, Human
cagcucccuucugu

SEQ ID NO: 3433620 - RNA, 17 nt, Human
cagcuccgccucugucc

SEQ ID NO: 3433621 - RNA, 13 nt, Human
cagcuccuaaccc

SEQ ID NO: 3433622 - RNA, 14 nt, Human
cagcuccucccaca

SEQ ID NO: 3433623 - RNA, 22 nt, Human
cagcuccucccuuguucucuaa

SEQ ID NO: 3433624 - RNA, 19 nt, Human
cagcuccuccgugcuuccu

SEQ ID NO: 3433625 - RNA, 14 nt, Human
cagcuccucugucu

SEQ ID NO: 3433626 - RNA, 19 nt, Human
cagcuccugaccaguugca

SEQ ID NO: 3433627 - RNA, 22 nt, Human
cagcuccugaccaguugcaguc

SEQ ID NO: 3433628 - RNA, 13 nt, Human
cagcuccuuccug

SEQ ID NO: 3433629 - RNA, 20 nt, Human
cagcuccuugggaggaagca

SEQ ID NO: 3433630 - RNA, 19 nt, Human
cagcucgaauuaagaauau

SEQ ID NO: 3433631 - RNA, 14 nt, Human
cagcucgauccaaa

SEQ ID NO: 3433632 - RNA, 14 nt, Human
cagcucggcucagc

SEQ ID NO: 3433633 - RNA, 13 nt, Human
cagcucggggagc

SEQ ID NO: 3433634 - RNA, 16 nt, Human
cagcucgguacccggg

SEQ ID NO: 3433635 - RNA, 15 nt, Human
cagcucuaauaaaac

SEQ ID NO: 3433636 - RNA, 15 nt, Human
cagcucuacccugca

SEQ ID NO: 3433637 - RNA, 12 nt, Human
cagcucucagcc

SEQ ID NO: 3433638 - RNA, 17 nt, Human
cagcucucaucugaggc

SEQ ID NO: 3433639 - RNA, 23 nt, Human
cagcucucaugcugccccugccu

SEQ ID NO: 3433640 - RNA, 13 nt, Human
cagcucuccaguc

SEQ ID NO: 3433641 - RNA, 14 nt, Human
cagcucuccaguca

SEQ ID NO: 3433642 - RNA, 15 nt, Human
cagcucucccucugg

SEQ ID NO: 3433643 - RNA, 17 nt, Human
cagcucucccucuggcc

SEQ ID NO: 3433644 - RNA, 14 nt, Human
cagggcacagggcc

SEQ ID NO: 3433645 - RNA, 21 nt, Human
cagggcacagggccuggccca

SEQ ID NO: 3433646 - RNA, 22 nt, Human
cagggcacagggccuggcccau

SEQ ID NO: 3433647 - RNA, 22 nt, Human
cagggcacccuguggcccuggc

SEQ ID NO: 3433648 - RNA, 15 nt, Human
cagggcacugcugcu

SEQ ID NO: 3433649 - RNA, 14 nt, Human
cagggcacuucaca

SEQ ID NO: 3433650 - RNA, 18 nt, Human
cagggcacuucacagagu

SEQ ID NO: 3433651 - RNA, 15 nt, Human
cagggcagagccggg

SEQ ID NO: 3433652 - RNA, 13 nt, Human
cagggcagccagg

SEQ ID NO: 3433653 - RNA, 23 nt, Human
cagggcagccagggagagcccag

SEQ ID NO: 3433654 - RNA, 15 nt, Human
cagggcagcgccagg

SEQ ID NO: 3433655 - RNA, 15 nt, Human
cagggcagcugggcc

SEQ ID NO: 3433656 - RNA, 17 nt, Human
cagggcaggaccagccc

SEQ ID NO: 3433657 - RNA, 13 nt, Human
cagggcagggccc

SEQ ID NO: 3433658 - RNA, 17 nt, Human
cagggcagggcucugau

SEQ ID NO: 3433659 - RNA, 21 nt, Human
cagggcagucauuggcugucu

SEQ ID NO: 3433660 - RNA, 21 nt, Human
cagggcaucuccaggaaggcg

SEQ ID NO: 3433661 - RNA, 13 nt, Human
cagggcaucuccu

SEQ ID NO: 3433662 - RNA, 14 nt, Human
cagggcaucuccug

SEQ ID NO: 3433663 - RNA, 16 nt, Human
auuuggauaucuguua

SEQ ID NO: 3433664 - RNA, 20 nt, Human
auuuggaucucuucuuaaug

SEQ ID NO: 3433665 - RNA, 14 nt, Human
auuuggaugcagag

SEQ ID NO: 3433666 - RNA, 23 nt, Human
auuuggauuuaaaagccugcuca

SEQ ID NO: 3433667 - RNA, 17 nt, Human
auuuggcaucccugggc

SEQ ID NO: 3433668 - RNA, 16 nt, Human
auuuggccugcacuaa

SEQ ID NO: 3433669 - RNA, 16 nt, Human
auuuggcuuaaauaua

SEQ ID NO: 3433670 - RNA, 19 nt, Human
auuuggcuugacaaaggca

SEQ ID NO: 3433671 - RNA, 23 nt, Human
auuugggaagguuuguguuuucu

SEQ ID NO: 3433672 - RNA, 22 nt, Human
auuugggacccugcuuuagagc

SEQ ID NO: 3433673 - RNA, 18 nt, Human
auuugggagaagggcaga

SEQ ID NO: 3433674 - RNA, 19 nt, Human
auuugggagacaugugaca

SEQ ID NO: 3433675 - RNA, 14 nt, Human
auuugggcagagag

SEQ ID NO: 3433676 - RNA, 17 nt, Human
auuugggcugaauguau

SEQ ID NO: 3433677 - RNA, 14 nt, Human
auuuggggacagau

SEQ ID NO: 3433678 - RNA, 22 nt, Human
auuuggggacagauucagucuu

SEQ ID NO: 3433679 - RNA, 23 nt, Human
auuugggguagcuagaggaacca

SEQ ID NO: 3433680 - RNA, 12 nt, Human
auuuggggugga

SEQ ID NO: 3433681 - RNA, 17 nt, Human
auuugggguugcaucag

SEQ ID NO: 3433682 - RNA, 22 nt, Human
auuugggguugcaucagaaaug

SEQ ID NO: 3433683 - RNA, 23 nt, Human
auuugggguugcaucagaaaugu

SEQ ID NO: 3433684 - RNA, 16 nt, Human
auuuggguccaggagg

SEQ ID NO: 3433685 - RNA, 16 nt, Human
auuugggugguaagag

SEQ ID NO: 3433686 - RNA, 17 nt, Human
auuuggguucugccugc

SEQ ID NO: 3433687 - RNA, 23 nt, Human
auuuggucaagauuuugaaugcu

SEQ ID NO: 3433688 - RNA, 15 nt, Human
auuuggugaauuuga

SEQ ID NO: 3433689 - RNA, 19 nt, Human
auuuggugaauuugaaucu

SEQ ID NO: 3433690 - RNA, 17 nt, Human
auuuggugguuucagaa

SEQ ID NO: 3433691 - RNA, 20 nt, Human
auuuggugguuucagaaaug

SEQ ID NO: 3433692 - RNA, 21 nt, Human
auuuggugguuucagaaaugu

SEQ ID NO: 3433693 - RNA, 21 nt, Human
auuugguucauuaauucuaua

SEQ ID NO: 3433694 - RNA, 20 nt, Human
auuugguuuggccaucucug

SEQ ID NO: 3433695 - RNA, 14 nt, Human
auuugguuuuccug

SEQ ID NO: 3433696 - RNA, 23 nt, Human
auuuguaaaaacagcauugcuuu

SEQ ID NO: 3433697 - RNA, 23 nt, Human
auuuguaaaagaacaguaaacau

SEQ ID NO: 3433698 - RNA, 15 nt, Human
auuuguaaaaugaca

SEQ ID NO: 3433699 - RNA, 19 nt, Human
auuuguaaaaugacaauca

SEQ ID NO: 3433700 - RNA, 15 nt, Human
auuuguaaauauuaa

SEQ ID NO: 3433701 - RNA, 16 nt, Human
auuuguaaccucagcu

SEQ ID NO: 3433702 - RNA, 21 nt, Human
auuuguaaccucagcucuggg

SEQ ID NO: 3433703 - RNA, 14 nt, Human
auuuguaaguuuau

SEQ ID NO: 3433704 - RNA, 17 nt, Human
auuuguaaguuucaggu

SEQ ID NO: 3433705 - RNA, 22 nt, Human
auuuguaauuaaaagcaaauca

SEQ ID NO: 3433706 - RNA, 16 nt, Human
auuuguaauuaaauua

SEQ ID NO: 3433707 - RNA, 15 nt, Human
auuuguaauugcuua

SEQ ID NO: 3433708 - RNA, 19 nt, Human
auuuguaauugcuuacauu

SEQ ID NO: 3433709 - RNA, 13 nt, Human
auuuguaauuuaa

SEQ ID NO: 3433710 - RNA, 19 nt, Human
auuuguacagaauuuugga

SEQ ID NO: 3433711 - RNA, 18 nt, Human
auuuguacaguucaguuc

SEQ ID NO: 3433712 - RNA, 16 nt, Human
auuuguacauauguaa

SEQ ID NO: 3433713 - RNA, 18 nt, Human
auuuguacuauuuaacug

SEQ ID NO: 3433714 - RNA, 22 nt, Human
auuuguacuguuuaauguucug

SEQ ID NO: 3433715 - RNA, 15 nt, Human
auuuguacuuucugu

SEQ ID NO: 3433716 - RNA, 20 nt, Human
auuuguacuuucuguuaaaa

SEQ ID NO: 3433717 - RNA, 22 nt, Human
auuuguacuuucuguuaaaaug

SEQ ID NO: 3433718 - RNA, 24 nt, Human
auuuguacuuucuguuaaaaugca

SEQ ID NO: 3433719 - RNA, 22 nt, Human
auuuguaggaaggucucauucu

SEQ ID NO: 3433720 - RNA, 19 nt, Human
auuuguaggggaacucauu

SEQ ID NO: 3433721 - RNA, 15 nt, Human
auuuguaucacaaau

SEQ ID NO: 3433722 - RNA, 23 nt, Human
auuuguaucucugaagcauguuu

SEQ ID NO: 3433723 - RNA, 18 nt, Human
auuuguauguugugaaga

SEQ ID NO: 3433724 - RNA, 16 nt, Human
auuuguauuuugugug

SEQ ID NO: 3433725 - RNA, 17 nt, Human
auuugucaaugacaguu

SEQ ID NO: 3433726 - RNA, 20 nt, Human
auuugucaauuuaugaauau

SEQ ID NO: 3433727 - RNA, 19 nt, Human
auuugucaugcugggauuu

SEQ ID NO: 3433728 - RNA, 14 nt, Human
auuugucauuuuca

SEQ ID NO: 3433729 - RNA, 15 nt, Human
auuugucauuuucau

SEQ ID NO: 3433730 - RNA, 15 nt, Human
auuuguccaauucuc

SEQ ID NO: 3433731 - RNA, 20 nt, Human
auuugucucugucacccuug

SEQ ID NO: 3433732 - RNA, 21 nt, Human
auuugucugaaacauuucaua

SEQ ID NO: 3433733 - RNA, 15 nt, Human
auuugucuugccuua

SEQ ID NO: 3433734 - RNA, 14 nt, Human
auuugucuuuuugu

SEQ ID NO: 3433735 - RNA, 22 nt, Human
auuugucuuuuuguuguaaaac

SEQ ID NO: 3433736 - RNA, 17 nt, Human
auuugugacaaaaaauu

SEQ ID NO: 3433737 - RNA, 19 nt, Human
auuugugacuaauuguaua

SEQ ID NO: 3433738 - RNA, 20 nt, Human
auuugugacuaauuguauaa

SEQ ID NO: 3433739 - RNA, 12 nt, Human
auuugugagacu

SEQ ID NO: 3433740 - RNA, 14 nt, Human
auuugugauacaau

SEQ ID NO: 3433741 - RNA, 17 nt, Human
auuugugauauauguau

SEQ ID NO: 3433742 - RNA, 14 nt, Human
auuugugccagaau

SEQ ID NO: 3433743 - RNA, 14 nt, Human
auuugugccagagg

SEQ ID NO: 3433744 - RNA, 20 nt, Human
auuugugcuagaaauuuuca

SEQ ID NO: 3433745 - RNA, 21 nt, Human
auuugugcuauaguauuugau

SEQ ID NO: 3433746 - RNA, 12 nt, Human
auuuguggaaua

SEQ ID NO: 3433747 - RNA, 21 nt, Human
auuuguggguuuuuauuuccu

SEQ ID NO: 3433748 - RNA, 16 nt, Human
auuuguguaauaaagu

SEQ ID NO: 3433749 - RNA, 21 nt, Human
auuuguguaauaaaguguuuu

SEQ ID NO: 3433750 - RNA, 22 nt, Human
auuuguguaauaaaguguuuuc

SEQ ID NO: 3433751 - RNA, 13 nt, Human
auuuguguaauag

SEQ ID NO: 3433752 - RNA, 17 nt, Human
auuugugucacaaagaa

SEQ ID NO: 3433753 - RNA, 12 nt, Human
auuugugugugu

SEQ ID NO: 3433754 - RNA, 15 nt, Human
auuugugugugugca

SEQ ID NO: 3433755 - RNA, 20 nt, Human
auuugugugugugcaagugu

SEQ ID NO: 3433756 - RNA, 22 nt, Human
auuuguguguuauaccuugauu

SEQ ID NO: 3433757 - RNA, 22 nt, Human
auuuguguguucacuaaacucu

SEQ ID NO: 3433758 - RNA, 22 nt, Human
auuuguguguuuuuagcuguga

SEQ ID NO: 3433759 - RNA, 15 nt, Human
auuuguguugaagag

SEQ ID NO: 3433760 - RNA, 15 nt, Human
auuuguguugaagga

SEQ ID NO: 3433761 - RNA, 19 nt, Human
auuuguguugaaggaacuu

SEQ ID NO: 3433762 - RNA, 21 nt, Human
auuuguguuuuaauuuaaaca

SEQ ID NO: 3433763 - RNA, 21 nt, Human
auuuguuaaaauuaucaauau

SEQ ID NO: 3433764 - RNA, 15 nt, Human
auuuguuauggcaga

SEQ ID NO: 3433765 - RNA, 17 nt, Human
auuuguuauucuuaaga

SEQ ID NO: 3433766 - RNA, 19 nt, Human
auuuguuauuuguacaguu

SEQ ID NO: 3433767 - RNA, 23 nt, Human
auuuguucacugaaggugauuca

SEQ ID NO: 3433768 - RNA, 14 nt, Human
auuuguucauguuu

SEQ ID NO: 3433769 - RNA, 17 nt, Human
auuuguucccaagagca

SEQ ID NO: 3433770 - RNA, 14 nt, Human
auuuguucucuguc

SEQ ID NO: 3433771 - RNA, 16 nt, Human
auuuguucuuguauuu

SEQ ID NO: 3433772 - RNA, 18 nt, Human
auuuguugauucucucca

SEQ ID NO: 3433773 - RNA, 11 nt, Human
auuuguugcau

SEQ ID NO: 3433774 - RNA, 13 nt, Human
auuuguuggaaug

SEQ ID NO: 3433775 - RNA, 20 nt, Human
auuuguuguucuuucagaaa

SEQ ID NO: 3433776 - RNA, 16 nt, Human
auuuguuuaaaaagua

SEQ ID NO: 3433777 - RNA, 20 nt, Human
auuuguuuaugguaaaaaau

SEQ ID NO: 3433778 - RNA, 22 nt, Human
auuuguuuaugguaaaaaauuu

SEQ ID NO: 3433779 - RNA, 17 nt, Human
auuuguuuauguaauuu

SEQ ID NO: 3433780 - RNA, 18 nt, Human
auuuguuuauguaauuuc

SEQ ID NO: 3433781 - RNA, 23 nt, Human
auuuguuuauuuuuauauagcuu

SEQ ID NO: 3433782 - RNA, 16 nt, Human
auuuguuuccagcaug

SEQ ID NO: 3433783 - RNA, 13 nt, Human
auuuguuucuacu

SEQ ID NO: 3433784 - RNA, 20 nt, Human
auuuguuucuuucucugagg

SEQ ID NO: 3433785 - RNA, 16 nt, Human
auuuguuugaacugau

SEQ ID NO: 3433786 - RNA, 12 nt, Human
auuuguuugcau

SEQ ID NO: 3433787 - RNA, 21 nt, Human
auuuguuugguuauagugcaa

SEQ ID NO: 3433788 - RNA, 22 nt, Human
auuuuuuuuuccuucagugccu

SEQ ID NO: 3433789 - RNA, 19 nt, Human
auuuuuuuuuuaaauuauu

SEQ ID NO: 3433790 - RNA, 18 nt, Human
auuuuuuuuuuuugaaaa

SEQ ID NO: 3433791 - RNA, 16 nt, Human
caaaaaaaaaguuuua

SEQ ID NO: 3433792 - RNA, 17 nt, Human
caaaaaaaaaguuuuau

SEQ ID NO: 3433793 - RNA, 18 nt, Human
caaaaaaaauuagccggg

SEQ ID NO: 3433794 - RNA, 15 nt, Human
caaaaaaaauuuaaa

SEQ ID NO: 3433795 - RNA, 16 nt, Human
caaaaaaacacuaguu

SEQ ID NO: 3433796 - RNA, 17 nt, Human
caaaaaaaccacaaagg

SEQ ID NO: 3433797 - RNA, 15 nt, Human
caaaaaaaguuguau

SEQ ID NO: 3433798 - RNA, 16 nt, Human
caaaaaaauccagaaa

SEQ ID NO: 3433799 - RNA, 18 nt, Human
caaaaaacaauauuuauu

SEQ ID NO: 3433800 - RNA, 22 nt, Human
caaaaaacaauauuuauuguau

SEQ ID NO: 3433801 - RNA, 23 nt, Human
caaaaaacaauauuuauuguauu

SEQ ID NO: 3433802 - RNA, 11 nt, Human
caaaaaacuac

SEQ ID NO: 3433803 - RNA, 21 nt, Human
caaaaaacucgaggacuguau

SEQ ID NO: 3433804 - RNA, 14 nt, Human
caaaaaacugcagu

SEQ ID NO: 3433805 - RNA, 16 nt, Human
caaaaaauuagccggg

SEQ ID NO: 3433806 - RNA, 10 nt, Human
caaaaacaaa

SEQ ID NO: 3433807 - RNA, 14 nt, Human
caaaaacacagcaa

SEQ ID NO: 3433808 - RNA, 17 nt, Human
caaaaacacagcaaggg

SEQ ID NO: 3433809 - RNA, 20 nt, Human
caaaaacacaguguuuuugu

SEQ ID NO: 3433810 - RNA, 15 nt, Human
caaaaacagccucac

SEQ ID NO: 3433811 - RNA, 22 nt, Human
caaaaacagguauauacuuuga

SEQ ID NO: 3433812 - RNA, 20 nt, Human
caaaaacauggccuuugcuu

SEQ ID NO: 3433813 - RNA, 23 nt, Human
caaaaacauguaugugcauuuca

SEQ ID NO: 3433814 - RNA, 12 nt, Human
caaaaaccaaau

SEQ ID NO: 3433815 - RNA, 18 nt, Human
caaaaaccaguauuguac

SEQ ID NO: 3433816 - RNA, 21 nt, Human
caaaaacccagcaacagaaaa

SEQ ID NO: 3433817 - RNA, 14 nt, Human
caaaaacuauuugg

SEQ ID NO: 3433818 - RNA, 13 nt, Human
caaaaacuguuuu

SEQ ID NO: 3433819 - RNA, 13 nt, Human
caaaaacuuguua

SEQ ID NO: 3433820 - RNA, 22 nt, Human
caaaaagaaaaaaaaaaagaaa

SEQ ID NO: 3433821 - RNA, 20 nt, Human
caaaaagaaaagaaaauuuu

SEQ ID NO: 3433822 - RNA, 16 nt, Human
caaaaagaaaugacua

SEQ ID NO: 3433823 - RNA, 13 nt, Human
caaaaagaacaaa

SEQ ID NO: 3433824 - RNA, 21 nt, Human
caaaaagacacuugauacuug

SEQ ID NO: 3433825 - RNA, 15 nt, Human
caaaaagaccagacu

SEQ ID NO: 3433826 - RNA, 22 nt, Human
caaaaagauaccuuaaaauuug

SEQ ID NO: 3433827 - RNA, 23 nt, Human
caaaaagauaccuuaaaauuuga

SEQ ID NO: 3433828 - RNA, 15 nt, Human
caaaaagcaaaauca

SEQ ID NO: 3433829 - RNA, 14 nt, Human
caaaaagcuucccc

SEQ ID NO: 3433830 - RNA, 15 nt, Human
caaaaagcuucugug

SEQ ID NO: 3433831 - RNA, 14 nt, Human
caaaaauacucuaa

SEQ ID NO: 3433832 - RNA, 15 nt, Human
caaaaauacucuaau

SEQ ID NO: 3433833 - RNA, 17 nt, Human
caaaaauacucuaauuc

SEQ ID NO: 3433834 - RNA, 18 nt, Human
caaaaauacucuaauucu

SEQ ID NO: 3433835 - RNA, 20 nt, Human
caaaaauacucuaauucuaa

SEQ ID NO: 3433836 - RNA, 14 nt, Human
caaaaauagcuaaa

SEQ ID NO: 3433837 - RNA, 15 nt, Human
caaaaauauaaaaua

SEQ ID NO: 3433838 - RNA, 15 nt, Human
caaaaauauaacuua

SEQ ID NO: 3433839 - RNA, 17 nt, Human
caaaaauaucccuuccg

SEQ ID NO: 3433840 - RNA, 15 nt, Human
caaaaauauuuuaug

SEQ ID NO: 3433841 - RNA, 17 nt, Human
caaaaauauuuuaugau

SEQ ID NO: 3433842 - RNA, 16 nt, Human
caaaaaucagccagac

SEQ ID NO: 3433843 - RNA, 15 nt, Human
caaaaauccaaauau

SEQ ID NO: 3433844 - RNA, 15 nt, Human
caaaaaucugaagau

SEQ ID NO: 3433845 - RNA, 16 nt, Human
caaaaaucugccuggg

SEQ ID NO: 3433846 - RNA, 17 nt, Human
caaaaaugaacugaagu

SEQ ID NO: 3433847 - RNA, 13 nt, Human
caaaaaugcuaau

SEQ ID NO: 3433848 - RNA, 14 nt, Human
caaaaaugcuaaua

SEQ ID NO: 3433849 - RNA, 14 nt, Human
caaaaauguacaaa

SEQ ID NO: 3433850 - RNA, 22 nt, Human
caaaaauguacaaaauaaaguu

SEQ ID NO: 3433851 - RNA, 20 nt, Human
caaaaauuagccgggcgugg

SEQ ID NO: 3433852 - RNA, 11 nt, Human
caaaaauuauc

SEQ ID NO: 3433853 - RNA, 19 nt, Human
caaaaauuaucuauuugua

SEQ ID NO: 3433854 - RNA, 19 nt, Human
caaaaauucaacucagacu

SEQ ID NO: 3433855 - RNA, 16 nt, Human
caaaaauucucaguuc

SEQ ID NO: 3433856 - RNA, 14 nt, Human
caaaaauuuuguga

SEQ ID NO: 3433857 - RNA, 16 nt, Human
caaaaauuuugugaca

SEQ ID NO: 3433858 - RNA, 17 nt, Human
caaaaauuuugugacau

SEQ ID NO: 3433859 - RNA, 15 nt, Human
caaaaauuuuuggau

SEQ ID NO: 3433860 - RNA, 22 nt, Human
caaaaauuuuuggauugacagu

SEQ ID NO: 3433861 - RNA, 18 nt, Human
caaaacaaaaauuaggua

SEQ ID NO: 3433862 - RNA, 22 nt, Human
caaaacaaaaauuagguauuuu

SEQ ID NO: 3433863 - RNA, 13 nt, Human
caaaacaaaacaa

SEQ ID NO: 3433864 - RNA, 16 nt, Human
caaaacaaaacaaaac

SEQ ID NO: 3433865 - RNA, 12 nt, Human
caggaggccagc

SEQ ID NO: 3433866 - RNA, 14 nt, Human
caggaggccagccu

SEQ ID NO: 3433867 - RNA, 16 nt, Human
caggaggccagccuug

SEQ ID NO: 3433868 - RNA, 17 nt, Human
caggaggccagccuuga

SEQ ID NO: 3433869 - RNA, 18 nt, Human
caggaggccaggccggcg

SEQ ID NO: 3433870 - RNA, 22 nt, Human
caggaggcgcccuuggcuucug

SEQ ID NO: 3433871 - RNA, 13 nt, Human
caggaggcugagg

SEQ ID NO: 3433872 - RNA, 17 nt, Human
caggaggcugaggcaga

SEQ ID NO: 3433873 - RNA, 20 nt, Human
caggaggcugaggcaggagg

SEQ ID NO: 3433874 - RNA, 18 nt, Human
caggaggcuggaggaagg

SEQ ID NO: 3433875 - RNA, 21 nt, Human
caggaggcuuggaaagcauca

SEQ ID NO: 3433876 - RNA, 21 nt, Human
caggagggacaaaggagccug

SEQ ID NO: 3433877 - RNA, 19 nt, Human
caggagggacagucucacc

SEQ ID NO: 3433878 - RNA, 15 nt, Human
caggagggagcagag

SEQ ID NO: 3433879 - RNA, 22 nt, Human
caggagggagcauagaaggcag

SEQ ID NO: 3433880 - RNA, 12 nt, Human
caggagggaggg

SEQ ID NO: 3433881 - RNA, 22 nt, Human
caggagggauuggccgcuuggc

SEQ ID NO: 3433882 - RNA, 16 nt, Human
caggagggcaagggcc

SEQ ID NO: 3433883 - RNA, 17 nt, Human
caggagggcaagggcca

SEQ ID NO: 3433884 - RNA, 19 nt, Human
caggagggcaagggccaug

SEQ ID NO: 3433885 - RNA, 18 nt, Human
caggagggcacuggagcu

SEQ ID NO: 3433886 - RNA, 21 nt, Human
caggagggcggccuccuucug

SEQ ID NO: 3433887 - RNA, 22 nt, Human
caggagggcguucuuaggcugc

SEQ ID NO: 3433888 - RNA, 24 nt, Human
caggaggggaacacugcccucgca

SEQ ID NO: 3433889 - RNA, 22 nt, Human
caggaggggagugaggcaggug

SEQ ID NO: 3433890 - RNA, 20 nt, Human
caggagggggucguggagag

SEQ ID NO: 3433891 - RNA, 15 nt, Human
caggagguggagguu

SEQ ID NO: 3433892 - RNA, 17 nt, Human
caggagguuggagggaa

SEQ ID NO: 3433893 - RNA, 14 nt, Human
caggaguaaaagag

SEQ ID NO: 3433894 - RNA, 20 nt, Human
caggaguaaaagagucaagu

SEQ ID NO: 3433895 - RNA, 20 nt, Human
caggaguagcugagcucaca

SEQ ID NO: 3433896 - RNA, 22 nt, Human
caggaguagugaagacuccaga

SEQ ID NO: 3433897 - RNA, 17 nt, Human
caggagucccaaggaaa

SEQ ID NO: 3433898 - RNA, 18 nt, Human
caggagucccaaggaaag

SEQ ID NO: 3433899 - RNA, 13 nt, Human
caggagucccugg

SEQ ID NO: 3433900 - RNA, 14 nt, Human
caggagucccuggu

SEQ ID NO: 3433901 - RNA, 22 nt, Human
caggagucucugguagccugca

SEQ ID NO: 3433902 - RNA, 18 nt, Human
caggaguggguggggagu

SEQ ID NO: 3433903 - RNA, 17 nt, Human
caggaguuagaggccag

SEQ ID NO: 3433904 - RNA, 20 nt, Human
caggaguuagaggccagccu

SEQ ID NO: 3433905 - RNA, 21 nt, Human
caggaguuagaggccagccug

SEQ ID NO: 3433906 - RNA, 21 nt, Human
caggaguucaauaaaugucug

SEQ ID NO: 3433907 - RNA, 15 nt, Human
caggaguucugcuca

SEQ ID NO: 3433908 - RNA, 22 nt, Human
caggaguucugcucauucuaau

SEQ ID NO: 3433909 - RNA, 21 nt, Human
caggaguuuaagaccagccug

SEQ ID NO: 3433910 - RNA, 21 nt, Human
caggaguuugagaccagccug

SEQ ID NO: 3433911 - RNA, 13 nt, Human
caggaguuuggcc

SEQ ID NO: 3433912 - RNA, 17 nt, Human
caggaguuuggccagaa

SEQ ID NO: 3433913 - RNA, 18 nt, Human
caggauaauaaaguguuu

SEQ ID NO: 3433914 - RNA, 15 nt, Human
caggauacuggcaca

SEQ ID NO: 3433915 - RNA, 20 nt, Human
caggauacuggcacagaggu

SEQ ID NO: 3433916 - RNA, 16 nt, Human
caggauagagacugga

SEQ ID NO: 3433917 - RNA, 18 nt, Human
caggauagauaacucuuu

SEQ ID NO: 3433918 - RNA, 19 nt, Human
caggauagauaacucuuug

SEQ ID NO: 3433919 - RNA, 15 nt, Human
caggauaguugcucc

SEQ ID NO: 3433920 - RNA, 14 nt, Human
caggauauauuuua

SEQ ID NO: 3433921 - RNA, 21 nt, Human
caggauauucucacagcucca

SEQ ID NO: 3433922 - RNA, 12 nt, Human
caggaucagcca

SEQ ID NO: 3433923 - RNA, 13 nt, Human
caggaucagucug

SEQ ID NO: 3433924 - RNA, 15 nt, Human
caggaucaguuaacu

SEQ ID NO: 3433925 - RNA, 18 nt, Human
caggaucaugguguaaua

SEQ ID NO: 3433926 - RNA, 13 nt, Human
caggauccagccu

SEQ ID NO: 3433927 - RNA, 14 nt, Human
caggauccagccuc

SEQ ID NO: 3433928 - RNA, 12 nt, Human
caggaucuauuu

SEQ ID NO: 3433929 - RNA, 18 nt, Human
caggaucuauuuuuggag

SEQ ID NO: 3433930 - RNA, 14 nt, Human
caggaugaagcauu

SEQ ID NO: 3433931 - RNA, 17 nt, Human
caggaugaccuggauaa

SEQ ID NO: 3433932 - RNA, 20 nt, Human
caggaugacgguauuaugcu

SEQ ID NO: 3433933 - RNA, 11 nt, Human
caggccagccu

SEQ ID NO: 3433934 - RNA, 21 nt, Human
caggccagccuccgagaggga

SEQ ID NO: 3433935 - RNA, 23 nt, Human
caggccagccuccgagagggaga

SEQ ID NO: 3433936 - RNA, 17 nt, Human
caggccagcugcuuggg

SEQ ID NO: 3433937 - RNA, 19 nt, Human
caggccagcugcuugggcu

SEQ ID NO: 3433938 - RNA, 13 nt, Human
caggccaggacuc

SEQ ID NO: 3433939 - RNA, 16 nt, Human
caggccaggacucugc

SEQ ID NO: 3433940 - RNA, 17 nt, Human
caggccaggacucugca

SEQ ID NO: 3433941 - RNA, 18 nt, Human
caggccaggacucugcag

SEQ ID NO: 3433942 - RNA, 14 nt, Human
caggccaggccacc

SEQ ID NO: 3433943 - RNA, 18 nt, Human
caggccaggccaccagga

SEQ ID NO: 3433944 - RNA, 14 nt, Human
caggccaggccagc

SEQ ID NO: 3433945 - RNA, 12 nt, Human
caggccaggccc

SEQ ID NO: 3433946 - RNA, 13 nt, Human
caggccaggcccu

SEQ ID NO: 3433947 - RNA, 14 nt, Human
caggccaggcccuc

SEQ ID NO: 3433948 - RNA, 21 nt, Human
caggccaggcccucugcccac

SEQ ID NO: 3433949 - RNA, 12 nt, Human
caggccaggcuc

SEQ ID NO: 3433950 - RNA, 16 nt, Human
caggccagguccagag

SEQ ID NO: 3433951 - RNA, 21 nt, Human
caggccaucaucaguggagcc

SEQ ID NO: 3433952 - RNA, 15 nt, Human
caggccaucuuccag

SEQ ID NO: 3433953 - RNA, 18 nt, Human
caggccauuccccgucuc

SEQ ID NO: 3433954 - RNA, 20 nt, Human
caggccauugugaaccaaug

SEQ ID NO: 3433955 - RNA, 17 nt, Human
caggcccaaggcucccg

SEQ ID NO: 3433956 - RNA, 13 nt, Human
caggcccacagua

SEQ ID NO: 3433957 - RNA, 13 nt, Human
caggcccacccug

SEQ ID NO: 3433958 - RNA, 14 nt, Human
caggcccacucagg

SEQ ID NO: 3433959 - RNA, 19 nt, Human
caggcccacugugccucag

SEQ ID NO: 3433960 - RNA, 12 nt, Human
caggcccagcau

SEQ ID NO: 3433961 - RNA, 16 nt, Human
caggcccagccgaccc

SEQ ID NO: 3433962 - RNA, 20 nt, Human
caggcccagccgacccccuc

SEQ ID NO: 3433963 - RNA, 12 nt, Human
caggccccaagg

SEQ ID NO: 3433964 - RNA, 15 nt, Human
caggccccaggaaag

SEQ ID NO: 3433965 - RNA, 17 nt, Human
caggccccaggaagccg

SEQ ID NO: 3433966 - RNA, 18 nt, Human
caggccccaugaccucca

SEQ ID NO: 3433967 - RNA, 19 nt, Human
caggccccaugaccuccag

SEQ ID NO: 3433968 - RNA, 13 nt, Human
caggcccccaagc

SEQ ID NO: 3433969 - RNA, 15 nt, Human
caggcccccaagccu

SEQ ID NO: 3433970 - RNA, 17 nt, Human
caggcccccaagccugc

SEQ ID NO: 3433971 - RNA, 18 nt, Human
caggcccccaagccugca

SEQ ID NO: 3433972 - RNA, 17 nt, Human
caggcccccaccacaca

SEQ ID NO: 3433973 - RNA, 18 nt, Human
caggcccccaccacacau

SEQ ID NO: 3433974 - RNA, 20 nt, Human
caggcccccaccacacaucc

SEQ ID NO: 3433975 - RNA, 15 nt, Human
caggcccccaccacu

SEQ ID NO: 3433976 - RNA, 18 nt, Human
caggcccccaccuggcuc

SEQ ID NO: 3433977 - RNA, 19 nt, Human
caggcccccaccuggcuca

SEQ ID NO: 3433978 - RNA, 17 nt, Human
caggcccccgccuuggc

SEQ ID NO: 3433979 - RNA, 17 nt, Human
caggccccgaggaccca

SEQ ID NO: 3433980 - RNA, 21 nt, Human
caggccccgaggacccagacc

SEQ ID NO: 3433981 - RNA, 23 nt, Human
caggccccgaggacccagaccca

SEQ ID NO: 3433982 - RNA, 19 nt, Human
caggccccgcuuguccagc

SEQ ID NO: 3433983 - RNA, 16 nt, Human
caggccccuggaggcu

SEQ ID NO: 3433984 - RNA, 23 nt, Human
caggccccuggaggcugccuccc

SEQ ID NO: 3433985 - RNA, 18 nt, Human
caggcccggcuccaggcu

SEQ ID NO: 3433986 - RNA, 15 nt, Human
caggcccggggcugg

SEQ ID NO: 3433987 - RNA, 17 nt, Human
caggcccgucuguccau

SEQ ID NO: 3433988 - RNA, 23 nt, Human
caggcccgucuguccaucugccc

SEQ ID NO: 3433989 - RNA, 15 nt, Human
caggcccucugccca

SEQ ID NO: 3433990 - RNA, 17 nt, Human
caggcccucugcccacu

SEQ ID NO: 3433991 - RNA, 11 nt, Human
caggcccugca

SEQ ID NO: 3433992 - RNA, 15 nt, Human
caggcccugcacugu

SEQ ID NO: 3433993 - RNA, 19 nt, Human
caggcccugcacuguccug

SEQ ID NO: 3433994 - RNA, 16 nt, Human
caggcccugcuccugc

SEQ ID NO: 3433995 - RNA, 17 nt, Human
caggcccugcuccugca

SEQ ID NO: 3433996 - RNA, 19 nt, Human
caggcccugcuccugcagc

SEQ ID NO: 3433997 - RNA, 22 nt, Human
caggcccugcuccugcagcaug

SEQ ID NO: 3433998 - RNA, 15 nt, Human
caggcccuggccucc

SEQ ID NO: 3433999 - RNA, 17 nt, Human
caggcccuggccucccc

SEQ ID NO: 3434000 - RNA, 17 nt, Human
caggcccuuccucucca

SEQ ID NO: 3434001 - RNA, 14 nt, Human
caggccgcagcucu

SEQ ID NO: 3434002 - RNA, 15 nt, Human
caggccgcagcucuu

SEQ ID NO: 3434003 - RNA, 22 nt, Human
caggccgcagcucuugcccuuc

SEQ ID NO: 3434004 - RNA, 16 nt, Human
caggccgccccagccu

SEQ ID NO: 3434005 - RNA, 21 nt, Human
caggccgccccagccucugag

SEQ ID NO: 3434006 - RNA, 14 nt, Human
caggccgcccugcg

SEQ ID NO: 3434007 - RNA, 17 nt, Human
caggccggcagccccag

SEQ ID NO: 3434008 - RNA, 22 nt, Human
caggccggcagccccagccugc

SEQ ID NO: 3434009 - RNA, 13 nt, Human
caggccggccagc

SEQ ID NO: 3434010 - RNA, 16 nt, Human
caggccggccagccuc

SEQ ID NO: 3434011 - RNA, 20 nt, Human
caggccggcgagcccugugg

SEQ ID NO: 3434012 - RNA, 20 nt, Human
caggccggcuugccacaccc

SEQ ID NO: 3434013 - RNA, 13 nt, Human
caggccgggaaaa

SEQ ID NO: 3434014 - RNA, 13 nt, Human
caggccgggcaga

SEQ ID NO: 3434015 - RNA, 13 nt, Human
caggccgggccug

SEQ ID NO: 3434016 - RNA, 17 nt, Human
caggccgggccuguaca

SEQ ID NO: 3434017 - RNA, 19 nt, Human
caggccgggguggagcaug

SEQ ID NO: 3434018 - RNA, 20 nt, Human
caggccgggguggagcaugg

SEQ ID NO: 3434019 - RNA, 18 nt, Human
caggccgugacgucuggg

SEQ ID NO: 3434020 - RNA, 19 nt, Human
caggccgugacgucugggu

SEQ ID NO: 3434021 - RNA, 20 nt, Human
caggccgugacgucugggug

SEQ ID NO: 3434022 - RNA, 17 nt, Human
caggccuacuccugucu

SEQ ID NO: 3434023 - RNA, 20 nt, Human
caggccuacuccugucuucu

SEQ ID NO: 3434024 - RNA, 20 nt, Human
caggccuagaggccugacug

SEQ ID NO: 3434025 - RNA, 17 nt, Human
caggccucaccucuacc

SEQ ID NO: 3434026 - RNA, 16 nt, Human
caggccucagggcucc

SEQ ID NO: 3434027 - RNA, 15 nt, Human
caggccuccagcuca

SEQ ID NO: 3434028 - RNA, 17 nt, Human
caggccuccagcucagc

SEQ ID NO: 3434029 - RNA, 16 nt, Human
caggccucccugccag

SEQ ID NO: 3434030 - RNA, 23 nt, Human
cagugccgccgccucgcccaccg

SEQ ID NO: 3434031 - RNA, 13 nt, Human
cagugccugcuga

SEQ ID NO: 3434032 - RNA, 21 nt, Human
cagugccuggauccccucugu

SEQ ID NO: 3434033 - RNA, 18 nt, Human
cagugccugggaauguau

SEQ ID NO: 3434034 - RNA, 22 nt, Human
cagugccuggguggaugggcca

SEQ ID NO: 3434035 - RNA, 17 nt, Human
cagugccuuaccuccug

SEQ ID NO: 3434036 - RNA, 18 nt, Human
cagugccuuaccuccugc

SEQ ID NO: 3434037 - RNA, 20 nt, Human
cagugccuuaccuccugccc

SEQ ID NO: 3434038 - RNA, 19 nt, Human
cagugccuuauggaacacu

SEQ ID NO: 3434039 - RNA, 23 nt, Human
cagugccuuauggaacacucuga

SEQ ID NO: 3434040 - RNA, 14 nt, Human
cagugccuuccaua

SEQ ID NO: 3434041 - RNA, 22 nt, Human
cagugccuuccuguuuuucaca

SEQ ID NO: 3434042 - RNA, 21 nt, Human
cagugccuuggggaauuuccu

SEQ ID NO: 3434043 - RNA, 23 nt, Human
cagugccuuucuucucuccagug

SEQ ID NO: 3434044 - RNA, 24 nt, Human
cagugcgcgugcacguggagagcu

SEQ ID NO: 3434045 - RNA, 21 nt, Human
cagugcgggaggaauuucuga

SEQ ID NO: 3434046 - RNA, 16 nt, Human
cagugcuaaaaauggg

SEQ ID NO: 3434047 - RNA, 16 nt, Human
cagugcuagugagcug

SEQ ID NO: 3434048 - RNA, 23 nt, Human
cagugcuauuuugugcccacugu

SEQ ID NO: 3434049 - RNA, 20 nt, Human
cagugcucgcuguugcugaa

SEQ ID NO: 3434050 - RNA, 21 nt, Human
cagugcucgcuguugcugaau

SEQ ID NO: 3434051 - RNA, 16 nt, Human
cagugcugaucuaaaa

SEQ ID NO: 3434052 - RNA, 22 nt, Human
cagugcugccuguccccaugcu

SEQ ID NO: 3434053 - RNA, 18 nt, Human
cagugcugggauuacagg

SEQ ID NO: 3434054 - RNA, 19 nt, Human
cagugcuguccaugcuucu

SEQ ID NO: 3434055 - RNA, 22 nt, Human
cagugcuguccaugcuucucau

SEQ ID NO: 3434056 - RNA, 15 nt, Human
cagugcuguggccug

SEQ ID NO: 3434057 - RNA, 17 nt, Human
cagugcuguggccuggg

SEQ ID NO: 3434058 - RNA, 19 nt, Human
cagugcuguggccugggca

SEQ ID NO: 3434059 - RNA, 20 nt, Human
cagugcuguggccugggcaa

SEQ ID NO: 3434060 - RNA, 12 nt, Human
cagugcugugug

SEQ ID NO: 3434061 - RNA, 24 nt, Human
cagugcuuagcaaaaaauaaugac

SEQ ID NO: 3434062 - RNA, 17 nt, Human
cagugcuucagccugag

SEQ ID NO: 3434063 - RNA, 18 nt, Human
cagugcuucagccugagg

SEQ ID NO: 3434064 - RNA, 19 nt, Human
cagugcuucagccugaggc

SEQ ID NO: 3434065 - RNA, 17 nt, Human
cagugcuucucuacaga

SEQ ID NO: 3434066 - RNA, 17 nt, Human
cagugcuugccacagag

SEQ ID NO: 3434067 - RNA, 17 nt, Human
cagugcuuggcccagga

SEQ ID NO: 3434068 - RNA, 18 nt, Human
cagugcuuggcccaggag

SEQ ID NO: 3434069 - RNA, 19 nt, Human
cagugcuuggcccaggagu

SEQ ID NO: 3434070 - RNA, 20 nt, Human
cagugcuuuuaagugaaaau

SEQ ID NO: 3434071 - RNA, 18 nt, Human
caguggaaccguugccaa

SEQ ID NO: 3434072 - RNA, 13 nt, Human
caguggacaccag

SEQ ID NO: 3434073 - RNA, 22 nt, Human
caguggacaccaggagucccug

SEQ ID NO: 3434074 - RNA, 21 nt, Human
caguggaccgcccuuuucccc

SEQ ID NO: 3434075 - RNA, 22 nt, Human
caguggaccgcccuuuuccccu

SEQ ID NO: 3434076 - RNA, 19 nt, Human
caguggacuuuccaccccc

SEQ ID NO: 3434077 - RNA, 13 nt, Human
cagggguugcagu

SEQ ID NO: 3434078 - RNA, 22 nt, Human
cagggguugcagugagcggaga

SEQ ID NO: 3434079 - RNA, 21 nt, Human
caggguaacugugcugaaugc

SEQ ID NO: 3434080 - RNA, 14 nt, Human
caggguagaaaaag

SEQ ID NO: 3434081 - RNA, 19 nt, Human
caggguagaaaaaggagcu

SEQ ID NO: 3434082 - RNA, 16 nt, Human
caggguaggcuggagu

SEQ ID NO: 3434083 - RNA, 13 nt, Human
caggguaugaaga

SEQ ID NO: 3434084 - RNA, 17 nt, Human
caggguaugaagagugu

SEQ ID NO: 3434085 - RNA, 18 nt, Human
cauaggucacuggcucuc

SEQ ID NO: 3434086 - RNA, 21 nt, Human
cauaggucugaaauuuuucuu

SEQ ID NO: 3434087 - RNA, 22 nt, Human
cauagguucacaccauuuuguu

SEQ ID NO: 3434088 - RNA, 21 nt, Human
cauaguaacuucuuauggaau

SEQ ID NO: 3434089 - RNA, 21 nt, Human
cauaguaaguucagcacuugu

SEQ ID NO: 3434090 - RNA, 16 nt, Human
cauaguaccauuuaua

SEQ ID NO: 3434091 - RNA, 20 nt, Human
cauaguaccauuuauacaaa

SEQ ID NO: 3434092 - RNA, 22 nt, Human
cauaguaccauuuauacaaauu

SEQ ID NO: 3434093 - RNA, 20 nt, Human
cauaguaguaugaugauaca

SEQ ID NO: 3434094 - RNA, 17 nt, Human
cauaguaguuuuuacag

SEQ ID NO: 3434095 - RNA, 17 nt, Human
cauaguauauuaaaaau

SEQ ID NO: 3434096 - RNA, 16 nt, Human
cauaguaugguggcug

SEQ ID NO: 3434097 - RNA, 18 nt, Human
cauaguauucaugacuau

SEQ ID NO: 3434098 - RNA, 18 nt, Human
cauaguauuccauugugu

SEQ ID NO: 3434099 - RNA, 18 nt, Human
cauagugaccggcugcuu

SEQ ID NO: 3434100 - RNA, 22 nt, Human
cauagugaccggcugcuuuucc

SEQ ID NO: 3434101 - RNA, 21 nt, Human
cauagugagaccccugucucc

SEQ ID NO: 3434102 - RNA, 18 nt, Human
cauagugaugguuccccu

SEQ ID NO: 3434103 - RNA, 19 nt, Human
cauagugaugguuccccug

SEQ ID NO: 3434104 - RNA, 19 nt, Human
cauagugcauuguuucugu

SEQ ID NO: 3434105 - RNA, 19 nt, Human
cauagugcuaacaugaaga

SEQ ID NO: 3434106 - RNA, 19 nt, Human
cauaguggugggcaccuau

SEQ ID NO: 3434107 - RNA, 15 nt, Human
cauaguuacuguaaa

SEQ ID NO: 3434108 - RNA, 21 nt, Human
cauaguuacuguaaaaugcaa

SEQ ID NO: 3434109 - RNA, 13 nt, Human
cauaguuacugug

SEQ ID NO: 3434110 - RNA, 16 nt, Human
cauaguuacuguguaa

SEQ ID NO: 3434111 - RNA, 12 nt, Human
cauaguucagaa

SEQ ID NO: 3434112 - RNA, 21 nt, Human
cauaguucugagcugccagug

SEQ ID NO: 3434113 - RNA, 21 nt, Human
cauaguuguagacaaaguaca

SEQ ID NO: 3434114 - RNA, 14 nt, Human
cauaguuuggcauu

SEQ ID NO: 3434115 - RNA, 15 nt, Human
cauaguuuggcauuu

SEQ ID NO: 3434116 - RNA, 14 nt, Human
cauaguuuuaaacu

SEQ ID NO: 3434117 - RNA, 18 nt, Human
cauaguuuuaaacucauu

SEQ ID NO: 3434118 - RNA, 16 nt, Human
cauaguuuuucagucu

SEQ ID NO: 3434119 - RNA, 15 nt, Human
cauauaaaauaaugc

SEQ ID NO: 3434120 - RNA, 21 nt, Human
cauauaaaauaaugcaaagaa

SEQ ID NO: 3434121 - RNA, 19 nt, Human
cauauaaacaucacacaca

SEQ ID NO: 3434122 - RNA, 20 nt, Human
cauauaaauagaauguaaau

SEQ ID NO: 3434123 - RNA, 17 nt, Human
cauauaaauugucuuaa

SEQ ID NO: 3434124 - RNA, 20 nt, Human
cauauaacuuauauuguaag

SEQ ID NO: 3434125 - RNA, 23 nt, Human
cauauaacuuauauuguaagaaa

SEQ ID NO: 3434126 - RNA, 20 nt, Human
cauauaagacaaauauuccu

SEQ ID NO: 3434127 - RNA, 19 nt, Human
cauauaagggaaguaguua

SEQ ID NO: 3434128 - RNA, 15 nt, Human
cauauaaguuugaag

SEQ ID NO: 3434129 - RNA, 22 nt, Human
cauauaaguuugaaggaaacag

SEQ ID NO: 3434130 - RNA, 14 nt, Human
cauauaauauaugu

SEQ ID NO: 3434131 - RNA, 16 nt, Human
cauauaauauauguuu

SEQ ID NO: 3434132 - RNA, 19 nt, Human
cauauaauauauguuuuaa

SEQ ID NO: 3434133 - RNA, 14 nt, Human
cauauaaugaauaa

SEQ ID NO: 3434134 - RNA, 16 nt, Human
cauauaaugaauaaau

SEQ ID NO: 3434135 - RNA, 18 nt, Human
cauauacaacaccaaaaa

SEQ ID NO: 3434136 - RNA, 22 nt, Human
cauauacaacaccaaaaaauau

SEQ ID NO: 3434137 - RNA, 23 nt, Human
cauauacaacaccaaaaaauauc

SEQ ID NO: 3434138 - RNA, 13 nt, Human
cauauacacacac

SEQ ID NO: 3434139 - RNA, 15 nt, Human
cauauacacacacac

SEQ ID NO: 3434140 - RNA, 17 nt, Human
cauauacagcucagaag

SEQ ID NO: 3434141 - RNA, 15 nt, Human
cauauaccuauaaug

SEQ ID NO: 3434142 - RNA, 18 nt, Human
cauauaccuauaaugugu

SEQ ID NO: 3434143 - RNA, 21 nt, Human
cauauaccuauaaugugugua

SEQ ID NO: 3434144 - RNA, 22 nt, Human
cauauaccuauaauguguguau

SEQ ID NO: 3434145 - RNA, 18 nt, Human
cauauacuguucuucauu

SEQ ID NO: 3434146 - RNA, 21 nt, Human
cauauacuguucuucauuuua

SEQ ID NO: 3434147 - RNA, 19 nt, Human
cauauagccauugaucaua

SEQ ID NO: 3434148 - RNA, 14 nt, Human
cauauaguguacag

SEQ ID NO: 3434149 - RNA, 13 nt, Human
cauauauaacaau

SEQ ID NO: 3434150 - RNA, 19 nt, Human
cauauauaacagauacauu

SEQ ID NO: 3434151 - RNA, 20 nt, Human
cauauauacacacacaaaga

SEQ ID NO: 3434152 - RNA, 21 nt, Human
cauauauagacagcuuugacu

SEQ ID NO: 3434153 - RNA, 17 nt, Human
cauauauauacuauuaa

SEQ ID NO: 3434154 - RNA, 11 nt, Human
cauauauauau

SEQ ID NO: 3434155 - RNA, 13 nt, Human
cauauauauaugu

SEQ ID NO: 3434156 - RNA, 17 nt, Human
cauauauaucuaucuua

SEQ ID NO: 3434157 - RNA, 17 nt, Human
cauauaugaggacuugu

SEQ ID NO: 3434158 - RNA, 21 nt, Human
cauauauguguccauuuccuu

SEQ ID NO: 3434159 - RNA, 22 nt, Human
cauauauuggguuccauucuca

SEQ ID NO: 3434160 - RNA, 13 nt, Human
cauauauuuguau

SEQ ID NO: 3434161 - RNA, 21 nt, Human
cauauauuuuuauauuuacua

SEQ ID NO: 3434162 - RNA, 14 nt, Human
cauaucacacacau

SEQ ID NO: 3434163 - RNA, 17 nt, Human
cauaucauccacacaug

SEQ ID NO: 3434164 - RNA, 20 nt, Human
cauaucauccacacaugaau

SEQ ID NO: 3434165 - RNA, 18 nt, Human
cauauccauagugacuuu

SEQ ID NO: 3434166 - RNA, 18 nt, Human
cauauccccucucccccc

SEQ ID NO: 3434167 - RNA, 13 nt, Human
cauaucccuucca

SEQ ID NO: 3434168 - RNA, 17 nt, Human
cauaucccuuccagaug

SEQ ID NO: 3434169 - RNA, 17 nt, Human
cauauccguauauaucc

SEQ ID NO: 3434170 - RNA, 15 nt, Human
cauauccugagccau

SEQ ID NO: 3434171 - RNA, 11 nt, Human
cauauccugcc

SEQ ID NO: 3434172 - RNA, 14 nt, Human
cauauccugccuca

SEQ ID NO: 3434173 - RNA, 22 nt, Human
cauauccuggugccccccaccc

SEQ ID NO: 3434174 - RNA, 18 nt, Human
cauaucggcucacaaaga

SEQ ID NO: 3434175 - RNA, 11 nt, Human
cauaucuaacc

SEQ ID NO: 3434176 - RNA, 20 nt, Human
cauaucucuuaucuuacgaa

SEQ ID NO: 3434177 - RNA, 20 nt, Human
cauaucuuaaagaaacagcu

SEQ ID NO: 3434178 - RNA, 23 nt, Human
cauaucuuaaagaaacagcuuuc

SEQ ID NO: 3434179 - RNA, 22 nt, Human
cauaucuugcgaauccaagcuc

SEQ ID NO: 3434180 - RNA, 23 nt, Human
cauaucuugcgaauccaagcucc

SEQ ID NO: 3434181 - RNA, 14 nt, Human
cauaucuuuauuaa

SEQ ID NO: 3434182 - RNA, 11 nt, Human
cauaugaaaaa

SEQ ID NO: 3434183 - RNA, 22 nt, Human
cauaugaaaaaaaugcauuuua

SEQ ID NO: 3434184 - RNA, 16 nt, Human
cauaugaaaggugcca

SEQ ID NO: 3434185 - RNA, 13 nt, Human
cauaugaaauccu

SEQ ID NO: 3434186 - RNA, 19 nt, Human
cauaugacauucaugccug

SEQ ID NO: 3434187 - RNA, 21 nt, Human
cauaugacauucaugccuggc

SEQ ID NO: 3434188 - RNA, 17 nt, Human
cauaugaguguggaagc

SEQ ID NO: 3434189 - RNA, 15 nt, Human
cauaugaucugucug

SEQ ID NO: 3434190 - RNA, 21 nt, Human
cauaugauguacauguacuga

SEQ ID NO: 3434191 - RNA, 16 nt, Human
cauaugcaccuugugu

SEQ ID NO: 3434192 - RNA, 18 nt, Human
cauaugcaccuugugucu

SEQ ID NO: 3434193 - RNA, 19 nt, Human
cauaugcaccuugugucug

SEQ ID NO: 3434194 - RNA, 23 nt, Human
cauaugcaccuugugucuguaca

SEQ ID NO: 3434195 - RNA, 22 nt, Human
cauaugccugggcagaaggaag

SEQ ID NO: 3434196 - RNA, 17 nt, Human
cauaugcuaccaccagc

SEQ ID NO: 3434197 - RNA, 18 nt, Human
cauaugcuaccaccagcu

SEQ ID NO: 3434198 - RNA, 20 nt, Human
cauaugcuaccaccagcugu

SEQ ID NO: 3434199 - RNA, 15 nt, Human
cauaugcuucuuuaa

SEQ ID NO: 3434200 - RNA, 15 nt, Human
cauauggacucugca

SEQ ID NO: 3434201 - RNA, 17 nt, Human
cauauggacucugcaca

SEQ ID NO: 3434202 - RNA, 20 nt, Human
cauauggacucugcacauga

SEQ ID NO: 3434203 - RNA, 18 nt, Human
cauauggauccacuggcu

SEQ ID NO: 3434204 - RNA, 15 nt, Human
cauauggcccagugu

SEQ ID NO: 3434205 - RNA, 17 nt, Human
cauauggguuagauguu

SEQ ID NO: 3434206 - RNA, 15 nt, Human
cauauguacauaaau

SEQ ID NO: 3434207 - RNA, 16 nt, Human
cauauguacauaaauu

SEQ ID NO: 3434208 - RNA, 20 nt, Human
cauauguagacuauauacau

SEQ ID NO: 3434209 - RNA, 17 nt, Human
cauauguauuccugauc

SEQ ID NO: 3434210 - RNA, 18 nt, Human
cauauguuaagcagcuaa

SEQ ID NO: 3434211 - RNA, 17 nt, Human
cauauguugaauacuuu

SEQ ID NO: 3434212 - RNA, 19 nt, Human
cauauuaagaaugaucuga

SEQ ID NO: 3434213 - RNA, 21 nt, Human
cauauuaaguaagucucaagg

SEQ ID NO: 3434214 - RNA, 19 nt, Human
cauauuacaauauuugugu

SEQ ID NO: 3434215 - RNA, 16 nt, Human
cauauuaccacagaca

SEQ ID NO: 3434216 - RNA, 22 nt, Human
cauauuaccacagacauacuaa

SEQ ID NO: 3434217 - RNA, 19 nt, Human
cauauuacuguacauggga

SEQ ID NO: 3434218 - RNA, 12 nt, Human
cauauuagaaaa

SEQ ID NO: 3434219 - RNA, 19 nt, Human
cauauuagaaaacuuuguu

SEQ ID NO: 3434220 - RNA, 16 nt, Human
cauccucaaacacugc

SEQ ID NO: 3434221 - RNA, 19 nt, Human
cauccucaaacacugcagg

SEQ ID NO: 3434222 - RNA, 19 nt, Human
cauccucagaugcucaaag

SEQ ID NO: 3434223 - RNA, 15 nt, Human
cauccucauacccac

SEQ ID NO: 3434224 - RNA, 14 nt, Human
cauccuccaagaau

SEQ ID NO: 3434225 - RNA, 12 nt, Human
cauccuccagcc

SEQ ID NO: 3434226 - RNA, 14 nt, Human
cauccuccagcuuc

SEQ ID NO: 3434227 - RNA, 13 nt, Human
cauccuccccuuc

SEQ ID NO: 3434228 - RNA, 14 nt, Human
cauccuccccuucc

SEQ ID NO: 3434229 - RNA, 19 nt, Human
cauccuccccuucccugca

SEQ ID NO: 3434230 - RNA, 20 nt, Human
cauccuccgccucccggguu

SEQ ID NO: 3434231 - RNA, 20 nt, Human
cauccuccguccagccgcca

SEQ ID NO: 3434232 - RNA, 11 nt, Human
cauccuccuca

SEQ ID NO: 3434233 - RNA, 12 nt, Human
cauccuccucag

SEQ ID NO: 3434234 - RNA, 13 nt, Human
cauccuccuccca

SEQ ID NO: 3434235 - RNA, 17 nt, Human
cauccuccuccuuccua

SEQ ID NO: 3434236 - RNA, 16 nt, Human
cauccuccuggaaccu

SEQ ID NO: 3434237 - RNA, 23 nt, Human
cauccuccuggaaccuugcuguc

SEQ ID NO: 3434238 - RNA, 11 nt, Human
cauccucucca

SEQ ID NO: 3434239 - RNA, 17 nt, Human
cauccucuggagccagc

SEQ ID NO: 3434240 - RNA, 20 nt, Human
cauccucuuccauauggauc

SEQ ID NO: 3434241 - RNA, 20 nt, Human
cauccucuuucucuuuucua

SEQ ID NO: 3434242 - RNA, 15 nt, Human
cauccugaacagcau

SEQ ID NO: 3434243 - RNA, 16 nt, Human
cauccugacucugccc

SEQ ID NO: 3434244 - RNA, 12 nt, Human
cauccugagccc

SEQ ID NO: 3434245 - RNA, 20 nt, Human
cauccugagccccgcccucu

SEQ ID NO: 3434246 - RNA, 16 nt, Human
cauccugccuucaugg

SEQ ID NO: 3434247 - RNA, 12 nt, Human
cauccuggaaua

SEQ ID NO: 3434248 - RNA, 15 nt, Human
cauccuggcacccgg

SEQ ID NO: 3434249 - RNA, 22 nt, Human
cauccuggcacccggccccugc

SEQ ID NO: 3434250 - RNA, 23 nt, Human
cauccuggcacccggccccugcu

SEQ ID NO: 3434251 - RNA, 16 nt, Human
cauccuggcccaucag

SEQ ID NO: 3434252 - RNA, 23 nt, Human
cauccuggccuggcacaucagaa

SEQ ID NO: 3434253 - RNA, 11 nt, Human
cauccuggcug

SEQ ID NO: 3434254 - RNA, 13 nt, Human
caacaucuuuucu

SEQ ID NO: 3434255 - RNA, 15 nt, Human
caacaugcacugaug

SEQ ID NO: 3434256 - RNA, 22 nt, Human
caacaugcuucaugaaaauccu

SEQ ID NO: 3434257 - RNA, 15 nt, Human
caacauggugucugg

SEQ ID NO: 3434258 - RNA, 16 nt, Human
caacauggugucugga

SEQ ID NO: 3434259 - RNA, 20 nt, Human
caacauguagcugaguuuaa

SEQ ID NO: 3434260 - RNA, 23 nt, Human
caacauguauaauauuuuuaauu

SEQ ID NO: 3434261 - RNA, 17 nt, Human
caacauguggcuccucc

SEQ ID NO: 3434262 - RNA, 18 nt, Human
caacauguggcuccuccc

SEQ ID NO: 3434263 - RNA, 21 nt, Human
caacauguggcuccucccagc

SEQ ID NO: 3434264 - RNA, 21 nt, Human
caacauguguacuuaauuucu

SEQ ID NO: 3434265 - RNA, 18 nt, Human
caacauguuacugaccag

SEQ ID NO: 3434266 - RNA, 15 nt, Human
caacauguuauuugu

SEQ ID NO: 3434267 - RNA, 22 nt, Human
caacauugcuggcuggaaggga

SEQ ID NO: 3434268 - RNA, 22 nt, Human
caacauuucuauagccaaaaau

SEQ ID NO: 3434269 - RNA, 14 nt, Human
caacauuucucaau

SEQ ID NO: 3434270 - RNA, 16 nt, Human
caacauuucucaauaa

SEQ ID NO: 3434271 - RNA, 21 nt, Human
caacauuuugagaacaaagau

SEQ ID NO: 3434272 - RNA, 22 nt, Human
caaccaagaauguuaugugcaa

SEQ ID NO: 3434273 - RNA, 20 nt, Human
caaccaagucaugugcauuu

SEQ ID NO: 3434274 - RNA, 13 nt, Human
caaccacaaaacu

SEQ ID NO: 3434275 - RNA, 16 nt, Human
caaccaccuuucagau

SEQ ID NO: 3434276 - RNA, 21 nt, Human
caaccacuaagaauucaaacu

SEQ ID NO: 3434277 - RNA, 17 nt, Human
caaccacuguaaaauga

SEQ ID NO: 3434278 - RNA, 21 nt, Human
caaccacuguaaaaugaaauu

SEQ ID NO: 3434279 - RNA, 12 nt, Human
caaccagaccug

SEQ ID NO: 3434280 - RNA, 22 nt, Human
caaccagcaucccuugaccagg

SEQ ID NO: 3434281 - RNA, 15 nt, Human
caaccagcuaagaaa

SEQ ID NO: 3434282 - RNA, 17 nt, Human
caaccagggagcugcag

SEQ ID NO: 3434283 - RNA, 14 nt, Human
caaccauccaauua

SEQ ID NO: 3434284 - RNA, 15 nt, Human
caaccauggacuuua

SEQ ID NO: 3434285 - RNA, 22 nt, Human
caaccaugucauuucagaaguu

SEQ ID NO: 3434286 - RNA, 22 nt, Human
caaccauuauaaccuuaauuua

SEQ ID NO: 3434287 - RNA, 13 nt, Human
caaccauuccaga

SEQ ID NO: 3434288 - RNA, 16 nt, Human
caaccauuccagacug

SEQ ID NO: 3434289 - RNA, 14 nt, Human
caaccauuccccau

SEQ ID NO: 3434290 - RNA, 13 nt, Human
caaccauuuccuc

SEQ ID NO: 3434291 - RNA, 17 nt, Human
caacccaaaccuggaga

SEQ ID NO: 3434292 - RNA, 16 nt, Human
caacccagccgcugcc

SEQ ID NO: 3434293 - RNA, 17 nt, Human
caacccagccgcugccc

SEQ ID NO: 3434294 - RNA, 22 nt, Human
caacccaggagcauccaccucc

SEQ ID NO: 3434295 - RNA, 19 nt, Human
caacccaucuaccccugga

SEQ ID NO: 3434296 - RNA, 17 nt, Human
caaccccaagccagccc

SEQ ID NO: 3434297 - RNA, 14 nt, Human
caacccccacccca

SEQ ID NO: 3434298 - RNA, 13 nt, Human
caacccccagcac

SEQ ID NO: 3434299 - RNA, 15 nt, Human
caaccccccagcacu

SEQ ID NO: 3434300 - RNA, 19 nt, Human
caaccccccagcacugagg

SEQ ID NO: 3434301 - RNA, 17 nt, Human
caaccccucgcccaguc

SEQ ID NO: 3434302 - RNA, 21 nt, Human
caaccccucgcccagucccag

SEQ ID NO: 3434303 - RNA, 22 nt, Human
caaccccuguggagcccgcacc

SEQ ID NO: 3434304 - RNA, 20 nt, Human
caaccccuuaagcccuggcc

SEQ ID NO: 3434305 - RNA, 21 nt, Human
caaccccuuaagcccuggccc

SEQ ID NO: 3434306 - RNA, 19 nt, Human
caaccccuucgcuccugug

SEQ ID NO: 3434307 - RNA, 21 nt, Human
caaccccuucgcuccuguguc

SEQ ID NO: 3434308 - RNA, 22 nt, Human
caacccgucuggcccaccaggg

SEQ ID NO: 3434309 - RNA, 16 nt, Human
caacccgugccaaguc

SEQ ID NO: 3434310 - RNA, 23 nt, Human
caacccgugccaaguccaggucc

SEQ ID NO: 3434311 - RNA, 16 nt, Human
caacccguggaggcug

SEQ ID NO: 3434312 - RNA, 18 nt, Human
caacccguggaggcugcu

SEQ ID NO: 3434313 - RNA, 20 nt, Human
caacccuaucuccugacaga

SEQ ID NO: 3434314 - RNA, 21 nt, Human
caacccucagagccaccccua

SEQ ID NO: 3434315 - RNA, 11 nt, Human
caacccucagg

SEQ ID NO: 3434316 - RNA, 14 nt, Human
caacccucccucag

SEQ ID NO: 3434317 - RNA, 19 nt, Human
caacccucccucagccccu

SEQ ID NO: 3434318 - RNA, 20 nt, Human
caacccucccucagccccuc

SEQ ID NO: 3434319 - RNA, 22 nt, Human
caacccuccuaucaccuccccu

SEQ ID NO: 3434320 - RNA, 13 nt, Human
caacccugccccu

SEQ ID NO: 3434321 - RNA, 23 nt, Human
caacccuggagaguucaauggcu

SEQ ID NO: 3434322 - RNA, 11 nt, Human
caacccugucu

SEQ ID NO: 3434323 - RNA, 12 nt, Human
caacccugucug

SEQ ID NO: 3434324 - RNA, 17 nt, Human
caacccuguuuccugag

SEQ ID NO: 3434325 - RNA, 17 nt, Human
caacccuguuuuauacu

SEQ ID NO: 3434326 - RNA, 19 nt, Human
caacccuguuuuauacugu

SEQ ID NO: 3434327 - RNA, 15 nt, Human
caacccuuaccccuu

SEQ ID NO: 3434328 - RNA, 20 nt, Human
caacccuuaccccuuagccu

SEQ ID NO: 3434329 - RNA, 18 nt, Human
caacccuucccucaccuu

SEQ ID NO: 3434330 - RNA, 21 nt, Human
caaccgcuucccuauuuauuu

SEQ ID NO: 3434331 - RNA, 15 nt, Human
caaccguggcccuuc

SEQ ID NO: 3434332 - RNA, 22 nt, Human
caaccguggcccuuccuggaca

SEQ ID NO: 3434333 - RNA, 13 nt, Human
caaccuaaauuug

SEQ ID NO: 3434334 - RNA, 18 nt, Human
caaccuaccaccccuucc

SEQ ID NO: 3434335 - RNA, 21 nt, Human
caaccuaccaccccuuccugu

SEQ ID NO: 3434336 - RNA, 18 nt, Human
caaccucaacugccuacu

SEQ ID NO: 3434337 - RNA, 17 nt, Human
caaccucagggcuccca

SEQ ID NO: 3434338 - RNA, 18 nt, Human
caaccucagggcucccag

SEQ ID NO: 3434339 - RNA, 19 nt, Human
caaccucagggcucccagg

SEQ ID NO: 3434340 - RNA, 18 nt, Human
caaccucaguaauuuaga

SEQ ID NO: 3434341 - RNA, 18 nt, Human
caaccucauccuccuucu

SEQ ID NO: 3434342 - RNA, 14 nt, Human
caaccuccaccucc

SEQ ID NO: 3434343 - RNA, 16 nt, Human
caaccucccaacccag

SEQ ID NO: 3434344 - RNA, 16 nt, Human
caaccucccucuuguu

SEQ ID NO: 3434345 - RNA, 19 nt, Human
caaccucccucuuguuuug

SEQ ID NO: 3434346 - RNA, 15 nt, Human
caaccuccugggcua

SEQ ID NO: 3434347 - RNA, 13 nt, Human
caaccucgcucca

SEQ ID NO: 3434348 - RNA, 21 nt, Human
caaccucgcuccaacuccaac

SEQ ID NO: 3434349 - RNA, 18 nt, Human
caaccucuucuggcucaa

SEQ ID NO: 3434350 - RNA, 16 nt, Human
caaccugaaccuagga

SEQ ID NO: 3434351 - RNA, 24 nt, Human
caaccugaauacccuuuucugacc

SEQ ID NO: 3434352 - RNA, 20 nt, Human
caaccugaccaacauggaga

SEQ ID NO: 3434353 - RNA, 17 nt, Human
caaccugauugugucuc

SEQ ID NO: 3434354 - RNA, 15 nt, Human
caaccugcucuccuc

SEQ ID NO: 3434355 - RNA, 18 nt, Human
caaccugcucuccucuug

SEQ ID NO: 3434356 - RNA, 11 nt, Human
caaccuggaga

SEQ ID NO: 3434357 - RNA, 14 nt, Human
caaccuggguccaa

SEQ ID NO: 3434358 - RNA, 18 nt, Human
caaccuggguccaaauaa

SEQ ID NO: 3434359 - RNA, 19 nt, Human
caaccuggguccaaauaaa

SEQ ID NO: 3434360 - RNA, 21 nt, Human
caaccuguaaauuauuuuaaa

SEQ ID NO: 3434361 - RNA, 14 nt, Human
caaccugugaucaa

SEQ ID NO: 3434362 - RNA, 20 nt, Human
caaccuguuaccuacuuuga

SEQ ID NO: 3434363 - RNA, 20 nt, Human
caaccuguucugcuuuccuc

SEQ ID NO: 3434364 - RNA, 23 nt, Human
caaccuuacuuacagcauaaggg

SEQ ID NO: 3434365 - RNA, 19 nt, Human
caaggccgaagcucuggcu

SEQ ID NO: 3434366 - RNA, 21 nt, Human
caaggccgaagcucuggcuga

SEQ ID NO: 3434367 - RNA, 19 nt, Human
caaggccgcuguucaccca

SEQ ID NO: 3434368 - RNA, 13 nt, Human
caaggccucccac

SEQ ID NO: 3434369 - RNA, 14 nt, Human
caaggccucccaca

SEQ ID NO: 3434370 - RNA, 16 nt, Human
caaggccugcucccug

SEQ ID NO: 3434371 - RNA, 21 nt, Human
caaggccugguguuucuugau

SEQ ID NO: 3434372 - RNA, 12 nt, Human
caaggccuuaag

SEQ ID NO: 3434373 - RNA, 18 nt, Human
caaggccuuccccuggca

SEQ ID NO: 3434374 - RNA, 15 nt, Human
caaggccuuucugug

SEQ ID NO: 3434375 - RNA, 15 nt, Human
caaggcgcuaacuug

SEQ ID NO: 3434376 - RNA, 13 nt, Human
caaggcggccccu

SEQ ID NO: 3434377 - RNA, 14 nt, Human
caaggcggccccuc

SEQ ID NO: 3434378 - RNA, 16 nt, Human
caaggcggccccuccc

SEQ ID NO: 3434379 - RNA, 19 nt, Human
caaggcgggagcaucucuu

SEQ ID NO: 3434380 - RNA, 13 nt, Human
caaggcggugcuu

SEQ ID NO: 3434381 - RNA, 16 nt, Human
caaggcggugcuugau

SEQ ID NO: 3434382 - RNA, 21 nt, Human
caaggcgguggacuugaacuu

SEQ ID NO: 3434383 - RNA, 19 nt, Human
caaggcuagaucaugaaga

SEQ ID NO: 3434384 - RNA, 14 nt, Human
caaggcuaugugau

SEQ ID NO: 3434385 - RNA, 19 nt, Human
caaggcuccugaucauucu

SEQ ID NO: 3434386 - RNA, 20 nt, Human
caaggcugaccaagagagaa

SEQ ID NO: 3434387 - RNA, 17 nt, Human
caaggcugauuaaacca

SEQ ID NO: 3434388 - RNA, 15 nt, Human
caaggcugcagugag

SEQ ID NO: 3434389 - RNA, 22 nt, Human
caaggcugcagugagccgagau

SEQ ID NO: 3434390 - RNA, 13 nt, Human
caaggcuggcagg

SEQ ID NO: 3434391 - RNA, 17 nt, Human
caaggcugugcucccug

SEQ ID NO: 3434392 - RNA, 15 nt, Human
caaggcuguggacca

SEQ ID NO: 3434393 - RNA, 22 nt, Human
caaggcuuagacccucaugcug

SEQ ID NO: 3434394 - RNA, 17 nt, Human
caaggcuuauauucaac

SEQ ID NO: 3434395 - RNA, 15 nt, Human
caaggcuucagucuc

SEQ ID NO: 3434396 - RNA, 15 nt, Human
caaggcuuucucuac

SEQ ID NO: 3434397 - RNA, 12 nt, Human
caagggaaaggg

SEQ ID NO: 3434398 - RNA, 16 nt, Human
caagggaaaggggugc

SEQ ID NO: 3434399 - RNA, 20 nt, Human
caagggaaaggggugcuuuu

SEQ ID NO: 3434400 - RNA, 16 nt, Human
caagggaaccuguguc

SEQ ID NO: 3434401 - RNA, 18 nt, Human
caagggaauguaacugcu

SEQ ID NO: 3434402 - RNA, 14 nt, Human
caagggaggcccag

SEQ ID NO: 3434403 - RNA, 14 nt, Human
caagggaggcugcu

SEQ ID NO: 3434404 - RNA, 17 nt, Human
caagggaggcugcugcu

SEQ ID NO: 3434405 - RNA, 19 nt, Human
caagggcaaaaagucuaca

SEQ ID NO: 3434406 - RNA, 17 nt, Human
caagggcaaaauuccca

SEQ ID NO: 3434407 - RNA, 14 nt, Human
caagggcagaaagu

SEQ ID NO: 3434408 - RNA, 20 nt, Human
caagggccaugcugaaggga

SEQ ID NO: 3434409 - RNA, 15 nt, Human
caagggccuggccug

SEQ ID NO: 3434410 - RNA, 16 nt, Human
caagggcgcaagagua

SEQ ID NO: 3434411 - RNA, 14 nt, Human
caagggcuccccac

SEQ ID NO: 3434412 - RNA, 17 nt, Human
caagggcuccccacugc

SEQ ID NO: 3434413 - RNA, 19 nt, Human
caagggcuccccacugccu

SEQ ID NO: 3434414 - RNA, 21 nt, Human
caagggcuuacacguggagga

SEQ ID NO: 3434415 - RNA, 18 nt, Human
caagggcuucugcacccu

SEQ ID NO: 3434416 - RNA, 23 nt, Human
caaggggaauguuugccucugcc

SEQ ID NO: 3434417 - RNA, 18 nt, Human
caaggggcagucuggagg

SEQ ID NO: 3434418 - RNA, 19 nt, Human
caaggggcagucuggaggg

SEQ ID NO: 3434419 - RNA, 18 nt, Human
caaggggcccaaauucuu

SEQ ID NO: 3434420 - RNA, 14 nt, Human
caaggggccugagc

SEQ ID NO: 3434421 - RNA, 22 nt, Human
caaggggcuucagguccaggcu

SEQ ID NO: 3434422 - RNA, 18 nt, Human
caagggucaggccuuuga

SEQ ID NO: 3434423 - RNA, 16 nt, Human
caagggucuagggaga

SEQ ID NO: 3434424 - RNA, 18 nt, Human
caaggguuaaggccugaa

SEQ ID NO: 3434425 - RNA, 15 nt, Human
caagguaaaauucua

SEQ ID NO: 3434426 - RNA, 17 nt, Human
caagguaaaauucuaaa

SEQ ID NO: 3434427 - RNA, 22 nt, Human
caagguaauuucuugugccucu

SEQ ID NO: 3434428 - RNA, 14 nt, Human
caagguacucuggu

SEQ ID NO: 3434429 - RNA, 16 nt, Human
caagguacucugguga

SEQ ID NO: 3434430 - RNA, 20 nt, Human
caagguagaaugaccuugua

SEQ ID NO: 3434431 - RNA, 16 nt, Human
caagguagcccuggcc

SEQ ID NO: 3434432 - RNA, 21 nt, Human
caagguagcccuggccagagg

SEQ ID NO: 3434433 - RNA, 23 nt, Human
caagguaggguaggcagccugag

SEQ ID NO: 3434434 - RNA, 19 nt, Human
caaggucacuguuuccugg

SEQ ID NO: 3434435 - RNA, 22 nt, Human
caaggucauggccacacuguga

SEQ ID NO: 3434436 - RNA, 23 nt, Human
caaggucauggccacacugugac

SEQ ID NO: 3434437 - RNA, 15 nt, Human
caaggucauuucuuc

SEQ ID NO: 3434438 - RNA, 14 nt, Human
caaggucuuugguu

SEQ ID NO: 3434439 - RNA, 21 nt, Human
caaggugacagaaggaccagc

SEQ ID NO: 3434440 - RNA, 14 nt, Human
caagguggagugga

SEQ ID NO: 3434441 - RNA, 21 nt, Human
caagguggaguggaugccuca

SEQ ID NO: 3434442 - RNA, 22 nt, Human
caaggugggccuugcuaccuca

SEQ ID NO: 3434443 - RNA, 12 nt, Human
caaggugggcug

SEQ ID NO: 3434444 - RNA, 16 nt, Human
caaggugggcugagcc

SEQ ID NO: 3434445 - RNA, 19 nt, Human
caaggugggcugagcccug

SEQ ID NO: 3434446 - RNA, 23 nt, Human
caagguggucugcucgggcccag

SEQ ID NO: 3434447 - RNA, 20 nt, Human
caagguguccuacagaaaaa

SEQ ID NO: 3434448 - RNA, 21 nt, Human
caagguuauaauuuuuuuuaa

SEQ ID NO: 3434449 - RNA, 17 nt, Human
caagguuauaugaauau

SEQ ID NO: 3434450 - RNA, 21 nt, Human
caagguuauaugcacuuucuc

SEQ ID NO: 3434451 - RNA, 16 nt, Human
caagguuccacagagu

SEQ ID NO: 3434452 - RNA, 13 nt, Human
caagguucugggu

SEQ ID NO: 3434453 - RNA, 13 nt, Human
caagguuggagcc

SEQ ID NO: 3434454 - RNA, 14 nt, Human
caagguuggagccc

SEQ ID NO: 3434455 - RNA, 22 nt, Human
caagguuuaaacuucucugaag

SEQ ID NO: 3434456 - RNA, 21 nt, Human
caagguuuaaagagucuagau

SEQ ID NO: 3434457 - RNA, 22 nt, Human
caagguuuaaagagucuagauu

SEQ ID NO: 3434458 - RNA, 17 nt, Human
caagguuuaaguuauua

SEQ ID NO: 3434459 - RNA, 17 nt, Human
caagguuuaggcuggug

SEQ ID NO: 3434460 - RNA, 14 nt, Human
caaguaacaaaaau

SEQ ID NO: 3434461 - RNA, 14 nt, Human
caaguaagaagaca

SEQ ID NO: 3434462 - RNA, 20 nt, Human
caaguaagagacucagccug

SEQ ID NO: 3434463 - RNA, 21 nt, Human
caaguaagagacucagccugc

SEQ ID NO: 3434464 - RNA, 15 nt, Human
caaguaagaggcugg

SEQ ID NO: 3434465 - RNA, 19 nt, Human
caguggugcgaucuggguu

SEQ ID NO: 3434466 - RNA, 19 nt, Human
caguggugguuuucuguuc

SEQ ID NO: 3434467 - RNA, 13 nt, Human
cagugguugcugu

SEQ ID NO: 3434468 - RNA, 14 nt, Human
cagugguugcuguu

SEQ ID NO: 3434469 - RNA, 22 nt, Human
cagugguuugagacacugguuu

SEQ ID NO: 3434470 - RNA, 15 nt, Human
caguguaaagugugu

SEQ ID NO: 3434471 - RNA, 17 nt, Human
caguguaaauaguuacu

SEQ ID NO: 3434472 - RNA, 19 nt, Human
caguguaaauaguuacucc

SEQ ID NO: 3434473 - RNA, 16 nt, Human
caguguaauuucuuug

SEQ ID NO: 3434474 - RNA, 18 nt, Human
caguguacagucuuguau

SEQ ID NO: 3434475 - RNA, 20 nt, Human
caguguacauaguguaaugu

SEQ ID NO: 3434476 - RNA, 15 nt, Human
caguguaccauuaaa

SEQ ID NO: 3434477 - RNA, 14 nt, Human
caguguacccccgc

SEQ ID NO: 3434478 - RNA, 18 nt, Human
caguguacccccgcccag

SEQ ID NO: 3434479 - RNA, 19 nt, Human
caguguacccccgcccagg

SEQ ID NO: 3434480 - RNA, 22 nt, Human
caguguacccccgcccaggcug

SEQ ID NO: 3434481 - RNA, 13 nt, Human
caguguagauuuu

SEQ ID NO: 3434482 - RNA, 14 nt, Human
caguguagccccaa

SEQ ID NO: 3434483 - RNA, 22 nt, Human
caguguagccccaagaaggcug

SEQ ID NO: 3434484 - RNA, 15 nt, Human
caguguaguuaauuu

SEQ ID NO: 3434485 - RNA, 17 nt, Human
caguguauggaaauaaa

SEQ ID NO: 3434486 - RNA, 14 nt, Human
caguguauguagaa

SEQ ID NO: 3434487 - RNA, 15 nt, Human
caguguauuuguauu

SEQ ID NO: 3434488 - RNA, 16 nt, Human
cagugucaaauaaaca

SEQ ID NO: 3434489 - RNA, 18 nt, Human
cagugucaaguugugcuu

SEQ ID NO: 3434490 - RNA, 14 nt, Human
cagugucaaugcag

SEQ ID NO: 3434491 - RNA, 11 nt, Human
cagugucauuu

SEQ ID NO: 3434492 - RNA, 20 nt, Human
cagugucauuuaugaaaaga

SEQ ID NO: 3434493 - RNA, 17 nt, Human
caguguccaaagcaggg

SEQ ID NO: 3434494 - RNA, 20 nt, Human
caguguccauggacucagaa

SEQ ID NO: 3434495 - RNA, 15 nt, Human
caguguccccuccac

SEQ ID NO: 3434496 - RNA, 18 nt, Human
caguguccuccccucaag

SEQ ID NO: 3434497 - RNA, 16 nt, Human
caguguccugagcuca

SEQ ID NO: 3434498 - RNA, 19 nt, Human
caguguccugagcucagcg

SEQ ID NO: 3434499 - RNA, 22 nt, Human
caguguccugagcucagcgugg

SEQ ID NO: 3434500 - RNA, 20 nt, Human
caguguccuuagaacauuuu

SEQ ID NO: 3434501 - RNA, 12 nt, Human
cagugucucaca

SEQ ID NO: 3434502 - RNA, 18 nt, Human
cagugucucacacuggcg

SEQ ID NO: 3434503 - RNA, 20 nt, Human
cagugucucacagcccugcu

SEQ ID NO: 3434504 - RNA, 18 nt, Human
cagugucugggcugacug

SEQ ID NO: 3434505 - RNA, 13 nt, Human
cagugucuguguu

SEQ ID NO: 3434506 - RNA, 13 nt, Human
cagugucuuccau

SEQ ID NO: 3434507 - RNA, 14 nt, Human
cagugucuuccaua

SEQ ID NO: 3434508 - RNA, 22 nt, Human
cagugucuuccauaauguauaa

SEQ ID NO: 3434509 - RNA, 17 nt, Human
cagugucuuccuguggg

SEQ ID NO: 3434510 - RNA, 13 nt, Human
cauuccugccugu

SEQ ID NO: 3434511 - RNA, 19 nt, Human
cauuccuggaaaccacagu

SEQ ID NO: 3434512 - RNA, 20 nt, Human
cauuccugguacccagccau

SEQ ID NO: 3434513 - RNA, 24 nt, Human
cauuccugguacccagccaucugc

SEQ ID NO: 3434514 - RNA, 12 nt, Human
cauuccuguucc

SEQ ID NO: 3434515 - RNA, 11 nt, Human
cauuccuucuc

SEQ ID NO: 3434516 - RNA, 13 nt, Human
cauuccuucuuuu

SEQ ID NO: 3434517 - RNA, 17 nt, Human
cauucgcgcucugcuca

SEQ ID NO: 3434518 - RNA, 21 nt, Human
cauucgggccccaccugcagc

SEQ ID NO: 3434519 - RNA, 22 nt, Human
cauucgggccccaccugcagcu

SEQ ID NO: 3434520 - RNA, 23 nt, Human
cauucgggccccaccugcagcuc

SEQ ID NO: 3434521 - RNA, 17 nt, Human
cauaucuaguaugaaau

SEQ ID NO: 3434522 - RNA, 13 nt, Human
cauaucuaucaga

SEQ ID NO: 3434523 - RNA, 23 nt, Human
cauaucucuuaucuuacgaaaaa

SEQ ID NO: 3434524 - RNA, 12 nt, Human
cauaucugccuu

SEQ ID NO: 3434525 - RNA, 18 nt, Human
cauaucuuaaagaaacag

SEQ ID NO: 3434526 - RNA, 19 nt, Human
cauaugaaaggugccaugg

SEQ ID NO: 3434527 - RNA, 21 nt, Human
cauaugaaaggugccauggaa

SEQ ID NO: 3434528 - RNA, 14 nt, Human
cauaugacaaaugu

SEQ ID NO: 3434529 - RNA, 18 nt, Human
cauaugaccucaugcauc

SEQ ID NO: 3434530 - RNA, 22 nt, Human
cauaugacucacaugaugcaua

SEQ ID NO: 3434531 - RNA, 22 nt, Human
cauaugagccgugaacugugca

SEQ ID NO: 3434532 - RNA, 22 nt, Human
cauaugaguaagggcacugacg

SEQ ID NO: 3434533 - RNA, 14 nt, Human
cauaugagugugga

SEQ ID NO: 3434534 - RNA, 23 nt, Human
cauaugaguuucauagcuaagaa

SEQ ID NO: 3434535 - RNA, 20 nt, Human
cauaugauuucacuagaaaa

SEQ ID NO: 3434536 - RNA, 14 nt, Human
cauaugcaaacaua

SEQ ID NO: 3434537 - RNA, 20 nt, Human
cauaugcaccuugugucugu

SEQ ID NO: 3434538 - RNA, 15 nt, Human
cauaugccugggcag

SEQ ID NO: 3434539 - RNA, 22 nt, Human
cauaugcuaccaccagcugugu

SEQ ID NO: 3434540 - RNA, 23 nt, Human
cauaugcuguauauccuuucuaa

SEQ ID NO: 3434541 - RNA, 18 nt, Human
cauauggacucugcacau

SEQ ID NO: 3434542 - RNA, 17 nt, Human
cauauggauccacuggc

SEQ ID NO: 3434543 - RNA, 18 nt, Human
cauauggauuuucuauug

SEQ ID NO: 3434544 - RNA, 20 nt, Human
cauauggauuuucuauuguu

SEQ ID NO: 3434545 - RNA, 21 nt, Human
cauauguaccauguacaugaa

SEQ ID NO: 3434546 - RNA, 16 nt, Human
cauauguauacaugug

SEQ ID NO: 3434547 - RNA, 16 nt, Human
cauaugucacuagaau

SEQ ID NO: 3434548 - RNA, 17 nt, Human
cauaugugaauauggac

SEQ ID NO: 3434549 - RNA, 14 nt, Human
cauaugugaucugu

SEQ ID NO: 3434550 - RNA, 15 nt, Human
cauauguuacacuaa

SEQ ID NO: 3434551 - RNA, 16 nt, Human
cauauguugaauacuu

SEQ ID NO: 3434552 - RNA, 19 nt, Human
cauauguugaauacuuuuu

SEQ ID NO: 3434553 - RNA, 15 nt, Human
cauauuaagaaugau

SEQ ID NO: 3434554 - RNA, 19 nt, Human
cauauuaauauauuuccau

SEQ ID NO: 3434555 - RNA, 17 nt, Human
cauauuaccacagacau

SEQ ID NO: 3434556 - RNA, 13 nt, Human
cauauuagaaaac

SEQ ID NO: 3434557 - RNA, 16 nt, Human
cauauuagaaaacuuu

SEQ ID NO: 3434558 - RNA, 23 nt, Human
cauauuagcgacaacagauugga

SEQ ID NO: 3434559 - RNA, 20 nt, Human
cauauuaggaaaauaugggu

SEQ ID NO: 3434560 - RNA, 21 nt, Human
cauauuauaaaggauaaagaa

SEQ ID NO: 3434561 - RNA, 23 nt, Human
cauauuauaucagacugcuuuga

SEQ ID NO: 3434562 - RNA, 13 nt, Human
cauauuaugucuu

SEQ ID NO: 3434563 - RNA, 14 nt, Human
cauauucauucaug

SEQ ID NO: 3434564 - RNA, 22 nt, Human
cauauuccugcagccuggaggc

SEQ ID NO: 3434565 - RNA, 17 nt, Human
cauauucuaaaaccauu

SEQ ID NO: 3434566 - RNA, 18 nt, Human
cauauucuguuggccagu

SEQ ID NO: 3434567 - RNA, 16 nt, Human
cauauugaugaaaaga

SEQ ID NO: 3434568 - RNA, 21 nt, Human
cauauugauuuccguuaaaau

SEQ ID NO: 3434569 - RNA, 18 nt, Human
cauauugcacaugucuua

SEQ ID NO: 3434570 - RNA, 21 nt, Human
cauauugcacaugucuuaaug

SEQ ID NO: 3434571 - RNA, 21 nt, Human
cauauugcugagagaaauaug

SEQ ID NO: 3434572 - RNA, 14 nt, Human
cauauuguacacuu

SEQ ID NO: 3434573 - RNA, 18 nt, Human
cauauugugauucugccu

SEQ ID NO: 3434574 - RNA, 21 nt, Human
cauauugugccaauauguauu

SEQ ID NO: 3434575 - RNA, 16 nt, Human
cauauuuaauguuuua

SEQ ID NO: 3434576 - RNA, 18 nt, Human
cauauuuaauguuuuaaa

SEQ ID NO: 3434577 - RNA, 17 nt, Human
cauauuuaauuugaagg

SEQ ID NO: 3434578 - RNA, 17 nt, Human
cauauuuaccucagccu

SEQ ID NO: 3434579 - RNA, 17 nt, Human
cauauuuacuaccuuau

SEQ ID NO: 3434580 - RNA, 20 nt, Human
cauauuuacuucuuauacau

SEQ ID NO: 3434581 - RNA, 17 nt, Human
cauauuuauaaaaauaa

SEQ ID NO: 3434582 - RNA, 22 nt, Human
cauauuuauccaaaauguguau

SEQ ID NO: 3434583 - RNA, 17 nt, Human
cauauuuauccauuugu

SEQ ID NO: 3434584 - RNA, 14 nt, Human
cauauuuauuuucu

SEQ ID NO: 3434585 - RNA, 22 nt, Human
cauauuucccaugauuucaugu

SEQ ID NO: 3434586 - RNA, 14 nt, Human
cauauuucuuuggc

SEQ ID NO: 3434587 - RNA, 13 nt, Human
cauauuugcacua

SEQ ID NO: 3434588 - RNA, 13 nt, Human
cauauuuggaaga

SEQ ID NO: 3434589 - RNA, 15 nt, Human
cauauuuggaagaaa

SEQ ID NO: 3434590 - RNA, 13 nt, Human
cauauuuguaaaa

SEQ ID NO: 3434591 - RNA, 14 nt, Human
cauauuuguaaaau

SEQ ID NO: 3434592 - RNA, 15 nt, Human
cauauuuguaaaaug

SEQ ID NO: 3434593 - RNA, 20 nt, Human
cauauuuguacuuucuguua

SEQ ID NO: 3434594 - RNA, 14 nt, Human
cauauuuguuaaau

SEQ ID NO: 3434595 - RNA, 19 nt, Human
cauauuuguuaaauauuua

SEQ ID NO: 3434596 - RNA, 21 nt, Human
cauauuuguuaaauauuuaca

SEQ ID NO: 3434597 - RNA, 19 nt, Human
cauauuuuaaaauuuguuc

SEQ ID NO: 3434598 - RNA, 16 nt, Human
cauauuuuaaacagag

SEQ ID NO: 3434599 - RNA, 16 nt, Human
cauauuuuaauuucaa

SEQ ID NO: 3434600 - RNA, 23 nt, Human
cauauuuuaauuucaagcuuauu

SEQ ID NO: 3434601 - RNA, 22 nt, Human
cauauuuuacuuggaaauauua

SEQ ID NO: 3434602 - RNA, 17 nt, Human
cauauuuuauucuuuua

SEQ ID NO: 3434603 - RNA, 12 nt, Human
cauauuuucaug

SEQ ID NO: 3434604 - RNA, 19 nt, Human
cauauuuugauuauuguau

SEQ ID NO: 3434605 - RNA, 20 nt, Human
cauauuuugauuauuguauu

SEQ ID NO: 3434606 - RNA, 15 nt, Human
caucaaaaaaggcag

SEQ ID NO: 3434607 - RNA, 18 nt, Human
caucaaaaacuuuggagu

SEQ ID NO: 3434608 - RNA, 19 nt, Human
caucaaaagacaauucuuu

SEQ ID NO: 3434609 - RNA, 19 nt, Human
caucaaaauauuucaguga

SEQ ID NO: 3434610 - RNA, 15 nt, Human
caucaaaaugcuuuu

SEQ ID NO: 3434611 - RNA, 11 nt, Human
caucaaagagg

SEQ ID NO: 3434612 - RNA, 16 nt, Human
caucaaauggaagaca

SEQ ID NO: 3434613 - RNA, 13 nt, Human
caucaacaaaaau

SEQ ID NO: 3434614 - RNA, 15 nt, Human
caucaacaaaaauug

SEQ ID NO: 3434615 - RNA, 14 nt, Human
caucaacaucuugg

SEQ ID NO: 3434616 - RNA, 16 nt, Human
caucaacuaaaguugu

SEQ ID NO: 3434617 - RNA, 22 nt, Human
caucaacuaaaguuguacuuua

SEQ ID NO: 3434618 - RNA, 22 nt, Human
caucaagaauggggaucacaga

SEQ ID NO: 3434619 - RNA, 16 nt, Human
caucaagacuggaagg

SEQ ID NO: 3434620 - RNA, 16 nt, Human
caucaagacuuugcua

SEQ ID NO: 3434621 - RNA, 22 nt, Human
caucaagacuuugcuaaagaca

SEQ ID NO: 3434622 - RNA, 20 nt, Human
caucaaggacacgggccugu

SEQ ID NO: 3434623 - RNA, 21 nt, Human
caucaaggacacgggccuguc

SEQ ID NO: 3434624 - RNA, 17 nt, Human
caucaaggggucacuua

SEQ ID NO: 3434625 - RNA, 22 nt, Human
caucaagucuuucacauuuaaa

SEQ ID NO: 3434626 - RNA, 21 nt, Human
caucaaguuauugacaaacuc

SEQ ID NO: 3434627 - RNA, 23 nt, Human
caucaaguuauugacaaacucuc

SEQ ID NO: 3434628 - RNA, 16 nt, Human
caucaauccugauucc

SEQ ID NO: 3434629 - RNA, 18 nt, Human
caucaauguucauuguaa

SEQ ID NO: 3434630 - RNA, 14 nt, Human
caucacaagaacac

SEQ ID NO: 3434631 - RNA, 17 nt, Human
caucacaccugcccuaa

SEQ ID NO: 3434632 - RNA, 14 nt, Human
caucacacugggug

SEQ ID NO: 3434633 - RNA, 12 nt, Human
caucacagcagc

SEQ ID NO: 3434634 - RNA, 16 nt, Human
caucacagcagccucc

SEQ ID NO: 3434635 - RNA, 13 nt, Human
caucacagcccag

SEQ ID NO: 3434636 - RNA, 16 nt, Human
caucacagcccagccc

SEQ ID NO: 3434637 - RNA, 17 nt, Human
caucacagcccagcccg

SEQ ID NO: 3434638 - RNA, 14 nt, Human
caucacagcuuguu

SEQ ID NO: 3434639 - RNA, 15 nt, Human
caucacagcuuguuu

SEQ ID NO: 3434640 - RNA, 13 nt, Human
caucacagggcag

SEQ ID NO: 3434641 - RNA, 18 nt, Human
caucacagggugggccuc

SEQ ID NO: 3434642 - RNA, 12 nt, Human
caucacccgcua

SEQ ID NO: 3434643 - RNA, 22 nt, Human
caucaccgacgcgucuccuguu

SEQ ID NO: 3434644 - RNA, 21 nt, Human
caucaccuacucacacaggca

SEQ ID NO: 3434645 - RNA, 12 nt, Human
caucaccucagg

SEQ ID NO: 3434646 - RNA, 15 nt, Human
caucaccucaggcca

SEQ ID NO: 3434647 - RNA, 14 nt, Human
caucaccuccacca

SEQ ID NO: 3434648 - RNA, 13 nt, Human
caucaccucugua

SEQ ID NO: 3434649 - RNA, 18 nt, Human
caucaccuuagaccacca

SEQ ID NO: 3434650 - RNA, 17 nt, Human
caucaccuuaggcaggg

SEQ ID NO: 3434651 - RNA, 23 nt, Human
caucaccuuaggcagggaagugu

SEQ ID NO: 3434652 - RNA, 19 nt, Human
caucacguuagcuguccca

SEQ ID NO: 3434653 - RNA, 21 nt, Human
caucacuauccaugcaccaaa

SEQ ID NO: 3434654 - RNA, 16 nt, Human
cacacuuccuguccag

SEQ ID NO: 3434655 - RNA, 18 nt, Human
cacacuugagaggaugaa

SEQ ID NO: 3434656 - RNA, 21 nt, Human
cacacuugagaggaugaaugu

SEQ ID NO: 3434657 - RNA, 18 nt, Human
cacacuugucggcuccag

SEQ ID NO: 3434658 - RNA, 22 nt, Human
cacacuugucggcuccaguccc

SEQ ID NO: 3434659 - RNA, 21 nt, Human
cacacuugugugugggcugug

SEQ ID NO: 3434660 - RNA, 15 nt, Human
cacacuuguuccagc

SEQ ID NO: 3434661 - RNA, 18 nt, Human
cacacuuguuccagcucu

SEQ ID NO: 3434662 - RNA, 18 nt, Human
cacacuuuggcccagggu

SEQ ID NO: 3434663 - RNA, 17 nt, Human
cacacuuuuuaagaaau

SEQ ID NO: 3434664 - RNA, 15 nt, Human
cacagaaaacuagaa

SEQ ID NO: 3434665 - RNA, 23 nt, Human
cacagaaaagaaaguucaugcuu

SEQ ID NO: 3434666 - RNA, 16 nt, Human
cacagaaaauauacug

SEQ ID NO: 3434667 - RNA, 17 nt, Human
cacagaaaauauacugu

SEQ ID NO: 3434668 - RNA, 22 nt, Human
cacagaaaauauacuguaaaga

SEQ ID NO: 3434669 - RNA, 18 nt, Human
cacagaaaauggaagaca

SEQ ID NO: 3434670 - RNA, 19 nt, Human
cacagaaaauggaagacag

SEQ ID NO: 3434671 - RNA, 23 nt, Human
cacagaaaauggaagacagcucu

SEQ ID NO: 3434672 - RNA, 21 nt, Human
cacagaaacacaauauuuugu

SEQ ID NO: 3434673 - RNA, 15 nt, Human
cacagaaagacugag

SEQ ID NO: 3434674 - RNA, 18 nt, Human
cacagaaagacugagcuc

SEQ ID NO: 3434675 - RNA, 18 nt, Human
cacagaaagagagcacug

SEQ ID NO: 3434676 - RNA, 23 nt, Human
cacagaaagccuaucaaagaccu

SEQ ID NO: 3434677 - RNA, 15 nt, Human
cacagaaauauauau

SEQ ID NO: 3434678 - RNA, 20 nt, Human
cacagaaauauauauacaua

SEQ ID NO: 3434679 - RNA, 21 nt, Human
cacagaaauauauauacauau

SEQ ID NO: 3434680 - RNA, 17 nt, Human
cacagaaaugagaucag

SEQ ID NO: 3434681 - RNA, 13 nt, Human
cacagaaaugcug

SEQ ID NO: 3434682 - RNA, 17 nt, Human
cacagaaaugcugcugg

SEQ ID NO: 3434683 - RNA, 19 nt, Human
cacagaagaggcugguucu

SEQ ID NO: 3434684 - RNA, 16 nt, Human
cacagaagcacaugca

SEQ ID NO: 3434685 - RNA, 18 nt, Human
cacagaagccaggagcaa

SEQ ID NO: 3434686 - RNA, 12 nt, Human
cacagaaguccu

SEQ ID NO: 3434687 - RNA, 13 nt, Human
cacagaaguccug

SEQ ID NO: 3434688 - RNA, 14 nt, Human
cacagaaguccugu

SEQ ID NO: 3434689 - RNA, 19 nt, Human
cacagaaugcaaccaaguc

SEQ ID NO: 3434690 - RNA, 17 nt, Human
cacagacacacacacgc

SEQ ID NO: 3434691 - RNA, 13 nt, Human
cacagacaggacc

SEQ ID NO: 3434692 - RNA, 22 nt, Human
cacagacaggaccccugcaguu

SEQ ID NO: 3434693 - RNA, 18 nt, Human
cacagacauacuaaccag

SEQ ID NO: 3434694 - RNA, 16 nt, Human
cacagacccugcccug

SEQ ID NO: 3434695 - RNA, 17 nt, Human
cacagacccugcccugu

SEQ ID NO: 3434696 - RNA, 18 nt, Human
cacagacccugcccugug

SEQ ID NO: 3434697 - RNA, 22 nt, Human
caucccucccuccaccucccug

SEQ ID NO: 3434698 - RNA, 16 nt, Human
caucccuccuuaagag

SEQ ID NO: 3434699 - RNA, 19 nt, Human
caucccugaaggccccgcc

SEQ ID NO: 3434700 - RNA, 20 nt, Human
caucccuggcccccucccug

SEQ ID NO: 3434701 - RNA, 21 nt, Human
caucccuggcccccucccugg

SEQ ID NO: 3434702 - RNA, 12 nt, Human
caucccugggcc

SEQ ID NO: 3434703 - RNA, 18 nt, Human
caucccuuaccugggaaa

SEQ ID NO: 3434704 - RNA, 16 nt, Human
caucccuucucuucca

SEQ ID NO: 3434705 - RNA, 16 nt, Human
caucccuuugcccaga

SEQ ID NO: 3434706 - RNA, 13 nt, Human
caucccuuuuuga

SEQ ID NO: 3434707 - RNA, 16 nt, Human
cauccgaggcaggguc

SEQ ID NO: 3434708 - RNA, 20 nt, Human
cauccgcaggugcugguccc

SEQ ID NO: 3434709 - RNA, 15 nt, Human
cauccgccagggccc

SEQ ID NO: 3434710 - RNA, 20 nt, Human
cauccgcgugugccugugug

SEQ ID NO: 3434711 - RNA, 15 nt, Human
cauccggcagccugg

SEQ ID NO: 3434712 - RNA, 14 nt, Human
cauccggggccagc

SEQ ID NO: 3434713 - RNA, 17 nt, Human
cauccgugagcagugug

SEQ ID NO: 3434714 - RNA, 21 nt, Human
cauccgugccucuuuuuaaag

SEQ ID NO: 3434715 - RNA, 16 nt, Human
cauccuaaaagccacc

SEQ ID NO: 3434716 - RNA, 21 nt, Human
cauccuaacuccaugucucug

SEQ ID NO: 3434717 - RNA, 16 nt, Human
cauccuaagaaauaug

SEQ ID NO: 3434718 - RNA, 21 nt, Human
cauccuacaacucacauuaga

SEQ ID NO: 3434719 - RNA, 19 nt, Human
cauccuacaagacacagug

SEQ ID NO: 3434720 - RNA, 15 nt, Human
cauccuaccaaugca

SEQ ID NO: 3434721 - RNA, 19 nt, Human
cauccuaccaaugcaugca

SEQ ID NO: 3434722 - RNA, 15 nt, Human
cauccuacccccugu

SEQ ID NO: 3434723 - RNA, 18 nt, Human
cauccuacccccugugcc

SEQ ID NO: 3434724 - RNA, 23 nt, Human
cauccuacccucgggcccaccug

SEQ ID NO: 3434725 - RNA, 14 nt, Human
cauccuacccuuuu

SEQ ID NO: 3434726 - RNA, 15 nt, Human
cauccuaccgucuuu

SEQ ID NO: 3434727 - RNA, 18 nt, Human
cauccucaaacacugcag

SEQ ID NO: 3434728 - RNA, 18 nt, Human
cauccuccacguucugcu

SEQ ID NO: 3434729 - RNA, 12 nt, Human
cauccuccagcu

SEQ ID NO: 3434730 - RNA, 13 nt, Human
cauccuccagcuu

SEQ ID NO: 3434731 - RNA, 13 nt, Human
cauccuccagggc

SEQ ID NO: 3434732 - RNA, 16 nt, Human
cauccuccucagaucu

SEQ ID NO: 3434733 - RNA, 16 nt, Human
cauccuccucccaccc

SEQ ID NO: 3434734 - RNA, 20 nt, Human
cauccuccuccgauuucuaa

SEQ ID NO: 3434735 - RNA, 16 nt, Human
cauccuccuccuuccu

SEQ ID NO: 3434736 - RNA, 22 nt, Human
cauccuccuggaaccuugcugu

SEQ ID NO: 3434737 - RNA, 15 nt, Human
cauccucuguacaga

SEQ ID NO: 3434738 - RNA, 18 nt, Human
cauccucuguacagagcc

SEQ ID NO: 3434739 - RNA, 19 nt, Human
cauccucuguacagagccc

SEQ ID NO: 3434740 - RNA, 21 nt, Human
cauccucuguacagagcccac

SEQ ID NO: 3434741 - RNA, 15 nt, Human
cauccucuucugcuu

SEQ ID NO: 3434742 - RNA, 18 nt, Human
cauccucuucugcuuagg

SEQ ID NO: 3434743 - RNA, 15 nt, Human
cauccucuuuuucca

SEQ ID NO: 3434744 - RNA, 19 nt, Human
cauccugacucugcccccu

SEQ ID NO: 3434745 - RNA, 20 nt, Human
cauccugacucugcccccug

SEQ ID NO: 3434746 - RNA, 22 nt, Human
cauccugacucugcccccugcu

SEQ ID NO: 3434747 - RNA, 19 nt, Human
cauccugagccccgcccuc

SEQ ID NO: 3434748 - RNA, 21 nt, Human
cauccugagccccgcccucuu

SEQ ID NO: 3434749 - RNA, 12 nt, Human
cauccugcagcc

SEQ ID NO: 3434750 - RNA, 12 nt, Human
cauccugcaggc

SEQ ID NO: 3434751 - RNA, 17 nt, Human
cauccugccagccccac

SEQ ID NO: 3434752 - RNA, 20 nt, Human
cauccugccuuagagccagg

SEQ ID NO: 3434753 - RNA, 22 nt, Human
cauccugcugcccuuaggccac

SEQ ID NO: 3434754 - RNA, 12 nt, Human
cauccuggccca

SEQ ID NO: 3434755 - RNA, 13 nt, Human
cauccuggcccau

SEQ ID NO: 3434756 - RNA, 19 nt, Human
cauccuggcccaucagugu

SEQ ID NO: 3434757 - RNA, 21 nt, Human
cauccuggccuggcacaucag

SEQ ID NO: 3434758 - RNA, 15 nt, Human
cauccuggcugcggc

SEQ ID NO: 3434759 - RNA, 14 nt, Human
cauccuggcuggag

SEQ ID NO: 3434760 - RNA, 15 nt, Human
cauccugucccacca

SEQ ID NO: 3434761 - RNA, 12 nt, Human
cauccugugaag

SEQ ID NO: 3434762 - RNA, 17 nt, Human
cauccuuagcaacagcc

SEQ ID NO: 3434763 - RNA, 20 nt, Human
cauccuuauccuucaucuuu

SEQ ID NO: 3434764 - RNA, 22 nt, Human
cauccuucaagaacucugggcu

SEQ ID NO: 3434765 - RNA, 23 nt, Human
cauccuucaagaacucugggcug

SEQ ID NO: 3434766 - RNA, 23 nt, Human
cauccuucaucuggauuccagag

SEQ ID NO: 3434767 - RNA, 17 nt, Human
cauccuuccuucccacc

SEQ ID NO: 3434768 - RNA, 15 nt, Human
cauccuucugccuuu

SEQ ID NO: 3434769 - RNA, 19 nt, Human
cauccuuggucuuuguauc

SEQ ID NO: 3434770 - RNA, 20 nt, Human
cauccuuggucuuuguaucu

SEQ ID NO: 3434771 - RNA, 22 nt, Human
cauccuugucuuauucccuucc

SEQ ID NO: 3434772 - RNA, 21 nt, Human
cauccuuuaggguucugccuc

SEQ ID NO: 3434773 - RNA, 17 nt, Human
cauccuuucacuucuuu

SEQ ID NO: 3434774 - RNA, 14 nt, Human
cauccuuuccagca

SEQ ID NO: 3434775 - RNA, 16 nt, Human
cauccuuugcagggca

SEQ ID NO: 3434776 - RNA, 13 nt, Human
caucgaaugugua

SEQ ID NO: 3434777 - RNA, 18 nt, Human
caucgcaccauucugacu

SEQ ID NO: 3434778 - RNA, 19 nt, Human
caucgcaccauucugacuc

SEQ ID NO: 3434779 - RNA, 21 nt, Human
caucgccaacuaagcgaggca

SEQ ID NO: 3434780 - RNA, 16 nt, Human
caucgccgggacucca

SEQ ID NO: 3434781 - RNA, 15 nt, Human
caucgcuggccccuu

SEQ ID NO: 3434782 - RNA, 14 nt, Human
caucggaaaaauaa

SEQ ID NO: 3434783 - RNA, 19 nt, Human
caucggacaagacccccag

SEQ ID NO: 3434784 - RNA, 21 nt, Human
caucggacaagacccccagca

SEQ ID NO: 3434785 - RNA, 14 nt, Human
caucggccuagggc

SEQ ID NO: 3434786 - RNA, 17 nt, Human
caucgguccugucuccc

SEQ ID NO: 3434787 - RNA, 22 nt, Human
caucgguccugucuccccucug

SEQ ID NO: 3434788 - RNA, 21 nt, Human
caucggugaaacuaacagaua

SEQ ID NO: 3434789 - RNA, 18 nt, Human
caucguaggugauuugaa

SEQ ID NO: 3434790 - RNA, 16 nt, Human
caucgucauuugcugu

SEQ ID NO: 3434791 - RNA, 20 nt, Human
caucgugaaacccugucucu

SEQ ID NO: 3434792 - RNA, 16 nt, Human
caucgugaagaagccu

SEQ ID NO: 3434793 - RNA, 13 nt, Human
caucuaaaaauau

SEQ ID NO: 3434794 - RNA, 14 nt, Human
caucuaaaaauaua

SEQ ID NO: 3434795 - RNA, 21 nt, Human
caucuaaaaauauacauguuu

SEQ ID NO: 3434796 - RNA, 17 nt, Human
caucuaaacuuuaauau

SEQ ID NO: 3434797 - RNA, 20 nt, Human
caucuaaacuuuaauaugua

SEQ ID NO: 3434798 - RNA, 13 nt, Human
cacaucucugaaa

SEQ ID NO: 3434799 - RNA, 13 nt, Human
cacaucugcauuu

SEQ ID NO: 3434800 - RNA, 13 nt, Human
cacaucugccuua

SEQ ID NO: 3434801 - RNA, 16 nt, Human
cacaucugugucuugu

SEQ ID NO: 3434802 - RNA, 17 nt, Human
cacaucugugucuuguu

SEQ ID NO: 3434803 - RNA, 18 nt, Human
cacaucugugucuuguuu

SEQ ID NO: 3434804 - RNA, 14 nt, Human
cacaucuuccacag

SEQ ID NO: 3434805 - RNA, 22 nt, Human
cacaucuucccuagaggguucc

SEQ ID NO: 3434806 - RNA, 20 nt, Human
cacaucuugaucugcucagc

SEQ ID NO: 3434807 - RNA, 18 nt, Human
cacaucuugcucugcuga

SEQ ID NO: 3434808 - RNA, 22 nt, Human
cacaucuugcucugcugacaga

SEQ ID NO: 3434809 - RNA, 23 nt, Human
cacaucuugcucugcugacagac

SEQ ID NO: 3434810 - RNA, 13 nt, Human
cacaucuuggcac

SEQ ID NO: 3434811 - RNA, 22 nt, Human
cacaucuuuaucuguucuugcu

SEQ ID NO: 3434812 - RNA, 22 nt, Human
cacaugaagaaauacugcacuu

SEQ ID NO: 3434813 - RNA, 24 nt, Human
cacaugaaucccacccacauguga

SEQ ID NO: 3434814 - RNA, 23 nt, Human
cacaugaccugaucacuagccug

SEQ ID NO: 3434815 - RNA, 16 nt, Human
cacaugagauaauaug

SEQ ID NO: 3434816 - RNA, 13 nt, Human
cacaugagcauca

SEQ ID NO: 3434817 - RNA, 18 nt, Human
cacaugagcuauuuccau

SEQ ID NO: 3434818 - RNA, 18 nt, Human
cacaugagucccaguggg

SEQ ID NO: 3434819 - RNA, 17 nt, Human
cacaugauccugcaauu

SEQ ID NO: 3434820 - RNA, 17 nt, Human
cacaugcaaggucauuu

SEQ ID NO: 3434821 - RNA, 19 nt, Human
cacaugcaaggucauuuuu

SEQ ID NO: 3434822 - RNA, 17 nt, Human
cacaugcauacacacac

SEQ ID NO: 3434823 - RNA, 18 nt, Human
cacaugcccuaaugucug

SEQ ID NO: 3434824 - RNA, 20 nt, Human
cacaugcccuaaugucugua

SEQ ID NO: 3434825 - RNA, 19 nt, Human
cacaugccucucucaggcc

SEQ ID NO: 3434826 - RNA, 16 nt, Human
cacaugcugagucucc

SEQ ID NO: 3434827 - RNA, 21 nt, Human
cacaugcugagucucccaagg

SEQ ID NO: 3434828 - RNA, 23 nt, Human
cacaugcuggacaggucugggag

SEQ ID NO: 3434829 - RNA, 20 nt, Human
cacaugcuucccuuuccuga

SEQ ID NO: 3434830 - RNA, 21 nt, Human
cacaugcuugaugguuuaugu

SEQ ID NO: 3434831 - RNA, 23 nt, Human
cacauggccccucccccugccag

SEQ ID NO: 3434832 - RNA, 15 nt, Human
cacauggccuaugca

SEQ ID NO: 3434833 - RNA, 12 nt, Human
cacauggcuucc

SEQ ID NO: 3434834 - RNA, 23 nt, Human
cacaugucaccguggaccuuccu

SEQ ID NO: 3434835 - RNA, 21 nt, Human
cacaugucagcaaguccuaag

SEQ ID NO: 3434836 - RNA, 22 nt, Human
cacauguccaagaagcccagga

SEQ ID NO: 3434837 - RNA, 12 nt, Human
cacauguccagu

SEQ ID NO: 3434838 - RNA, 14 nt, Human
cacaugucuuaaug

SEQ ID NO: 3434839 - RNA, 15 nt, Human
cacaugucuuaauga

SEQ ID NO: 3434840 - RNA, 23 nt, Human
cacaugucuuaaugaaguuugaa

SEQ ID NO: 3434841 - RNA, 15 nt, Human
cacaugucuuguaca

SEQ ID NO: 3434842 - RNA, 20 nt, Human
cacaugucuuguacaugugu

SEQ ID NO: 3434843 - RNA, 14 nt, Human
cacaugugcacaug

SEQ ID NO: 3434844 - RNA, 15 nt, Human
cacaugugcacaugc

SEQ ID NO: 3434845 - RNA, 17 nt, Human
cacaugugcacaugcac

SEQ ID NO: 3434846 - RNA, 19 nt, Human
cacauguguccaucccagc

SEQ ID NO: 3434847 - RNA, 16 nt, Human
cacauguuuucaaaug

SEQ ID NO: 3434848 - RNA, 20 nt, Human
cacauuaaaaaaugaaauau

SEQ ID NO: 3434849 - RNA, 15 nt, Human
cacauuaaaugacuc

SEQ ID NO: 3434850 - RNA, 23 nt, Human
cacauuaagccuuccacacucac

SEQ ID NO: 3434851 - RNA, 18 nt, Human
cacauuaauggucuaaaa

SEQ ID NO: 3434852 - RNA, 22 nt, Human
cacauuaauggucuaaaaauaa

SEQ ID NO: 3434853 - RNA, 20 nt, Human
cacauuacuagaguuggcau

SEQ ID NO: 3434854 - RNA, 15 nt, Human
cacauuagaauuagu

SEQ ID NO: 3434855 - RNA, 20 nt, Human
cacauuagauuuuauuuuac

SEQ ID NO: 3434856 - RNA, 19 nt, Human
cacauuaggcauugagacu

SEQ ID NO: 3434857 - RNA, 20 nt, Human
cacauuaucgggagcagugu

SEQ ID NO: 3434858 - RNA, 19 nt, Human
cacauucaacccuggagag

SEQ ID NO: 3434859 - RNA, 16 nt, Human
cacauucaauaagcau

SEQ ID NO: 3434860 - RNA, 17 nt, Human
cacauuccccuggggac

SEQ ID NO: 3434861 - RNA, 20 nt, Human
cacauucuggcucagggagg

SEQ ID NO: 3434862 - RNA, 15 nt, Human
cacauucuuauaaau

SEQ ID NO: 3434863 - RNA, 23 nt, Human
cacauucuuauaaauaugaagcu

SEQ ID NO: 3434864 - RNA, 13 nt, Human
cacauucuuguuu

SEQ ID NO: 3434865 - RNA, 23 nt, Human
cacauugagcugauauaaauucu

SEQ ID NO: 3434866 - RNA, 17 nt, Human
cacauugagcugugcaa

SEQ ID NO: 3434867 - RNA, 14 nt, Human
cacauugcauucua

SEQ ID NO: 3434868 - RNA, 17 nt, Human
cacauuguuauuuucag

SEQ ID NO: 3434869 - RNA, 18 nt, Human
cacauuguuugcugcuau

SEQ ID NO: 3434870 - RNA, 17 nt, Human
cacauuuagucucuuua

SEQ ID NO: 3434871 - RNA, 17 nt, Human
cacauuuauucugcuca

SEQ ID NO: 3434872 - RNA, 18 nt, Human
cacauuuauucugcucac

SEQ ID NO: 3434873 - RNA, 17 nt, Human
cacauuucacugucugu

SEQ ID NO: 3434874 - RNA, 18 nt, Human
cacauuuccccagaccug

SEQ ID NO: 3434875 - RNA, 13 nt, Human
cacauuucuuuuu

SEQ ID NO: 3434876 - RNA, 17 nt, Human
cacauuugauucugugu

SEQ ID NO: 3434877 - RNA, 17 nt, Human
cacauuuggaauacuuu

SEQ ID NO: 3434878 - RNA, 19 nt, Human
cacauuuggaauacuuuuu

SEQ ID NO: 3434879 - RNA, 17 nt, Human
cacauuugucuucuuuc

SEQ ID NO: 3434880 - RNA, 15 nt, Human
cacauuuuauuuuau

SEQ ID NO: 3434881 - RNA, 16 nt, Human
cacauuuucagccaaa

SEQ ID NO: 3434882 - RNA, 21 nt, Human
cacauuuucuuaauccagucu

SEQ ID NO: 3434883 - RNA, 13 nt, Human
cacauuuuguaua

SEQ ID NO: 3434884 - RNA, 15 nt, Human
cacauuuuguauaau

SEQ ID NO: 3434885 - RNA, 23 nt, Human
cacauuuuuauaccuguuuaaau

SEQ ID NO: 3434886 - RNA, 14 nt, Human
cacauuuuucagau

SEQ ID NO: 3434887 - RNA, 18 nt, Human
cacauuuuucagauauaa

SEQ ID NO: 3434888 - RNA, 18 nt, Human
cacauuuuuuuuuuuaau

SEQ ID NO: 3434889 - RNA, 20 nt, Human
caccaaaaaaauccagaaac

SEQ ID NO: 3434890 - RNA, 12 nt, Human
caccaaaaaaua

SEQ ID NO: 3434891 - RNA, 15 nt, Human
caccaaaacugcucc

SEQ ID NO: 3434892 - RNA, 16 nt, Human
caccaaacauacuaga

SEQ ID NO: 3434893 - RNA, 13 nt, Human
caccaaagagaau

SEQ ID NO: 3434894 - RNA, 17 nt, Human
caccaaagagaaugccc

SEQ ID NO: 3434895 - RNA, 15 nt, Human
caccaaagaugcagc

SEQ ID NO: 3434896 - RNA, 18 nt, Human
caccaaagcugcccacug

SEQ ID NO: 3434897 - RNA, 14 nt, Human
caccaaaucaaaau

SEQ ID NO: 3434898 - RNA, 15 nt, Human
caccaacaccacggu

SEQ ID NO: 3434899 - RNA, 20 nt, Human
caccaacauacucccaucug

SEQ ID NO: 3434900 - RNA, 23 nt, Human
caccaacauacucccaucuguga

SEQ ID NO: 3434901 - RNA, 15 nt, Human
caccaacccucaggg

SEQ ID NO: 3434902 - RNA, 16 nt, Human
caccaacgucugugcc

SEQ ID NO: 3434903 - RNA, 17 nt, Human
caccaacgucugugcca

SEQ ID NO: 3434904 - RNA, 14 nt, Human
caccaacucuugca

SEQ ID NO: 3434905 - RNA, 14 nt, Human
caccaagcacagca

SEQ ID NO: 3434906 - RNA, 15 nt, Human
cauggcauccuccag

SEQ ID NO: 3434907 - RNA, 19 nt, Human
cauggcaugcuuaaauuuu

SEQ ID NO: 3434908 - RNA, 22 nt, Human
cauggcaugggggccucagggc

SEQ ID NO: 3434909 - RNA, 13 nt, Human
cauggccagcagc

SEQ ID NO: 3434910 - RNA, 14 nt, Human
cauggccagcagca

SEQ ID NO: 3434911 - RNA, 20 nt, Human
cauggccagcagcaccugcc

SEQ ID NO: 3434912 - RNA, 23 nt, Human
cauggccagcagcaccugcccua

SEQ ID NO: 3434913 - RNA, 16 nt, Human
cauggccagcuaauuu

SEQ ID NO: 3434914 - RNA, 21 nt, Human
cauggccagcuggaggcaggg

SEQ ID NO: 3434915 - RNA, 16 nt, Human
cauggccccucugacc

SEQ ID NO: 3434916 - RNA, 18 nt, Human
cauggccccucugaccug

SEQ ID NO: 3434917 - RNA, 14 nt, Human
cauggcccucccag

SEQ ID NO: 3434918 - RNA, 15 nt, Human
cauggcccugagcga

SEQ ID NO: 3434919 - RNA, 16 nt, Human
cauggcccugccaugc

SEQ ID NO: 3434920 - RNA, 12 nt, Human
cauggcccuggg

SEQ ID NO: 3434921 - RNA, 14 nt, Human
cauggcccuggggu

SEQ ID NO: 3434922 - RNA, 16 nt, Human
cauggccggcuuucag

SEQ ID NO: 3434923 - RNA, 20 nt, Human
cauggccggcuuucaggagc

SEQ ID NO: 3434924 - RNA, 22 nt, Human
cauggccggcuuucaggagcuc

SEQ ID NO: 3434925 - RNA, 22 nt, Human
cauggccucuucagaucucuaa

SEQ ID NO: 3434926 - RNA, 16 nt, Human
cauggccugcaaacug

SEQ ID NO: 3434927 - RNA, 19 nt, Human
cauggccuuaugaggcagg

SEQ ID NO: 3434928 - RNA, 19 nt, Human
cauggcgaaaacaucuccu

SEQ ID NO: 3434929 - RNA, 21 nt, Human
cauggcgaaaacaucuccuua

SEQ ID NO: 3434930 - RNA, 14 nt, Human
cauggcgugucccu

SEQ ID NO: 3434931 - RNA, 22 nt, Human
cauggcuaaggcaccagccggg

SEQ ID NO: 3434932 - RNA, 15 nt, Human
cauggcuauuuuaua

SEQ ID NO: 3434933 - RNA, 17 nt, Human
cauggcugagcugccca

SEQ ID NO: 3434934 - RNA, 22 nt, Human
cauggcuggagcuagaauuuga

SEQ ID NO: 3434935 - RNA, 21 nt, Human
cauggcugggaacugcagacc

SEQ ID NO: 3434936 - RNA, 20 nt, Human
cauggcuguguuugcagccu

SEQ ID NO: 3434937 - RNA, 17 nt, Human
cauggcuuaaugcuucu

SEQ ID NO: 3434938 - RNA, 18 nt, Human
cauggcuuaaugcuucuu

SEQ ID NO: 3434939 - RNA, 20 nt, Human
cauggcuuaauguuuauucc

SEQ ID NO: 3434940 - RNA, 13 nt, Human
cauggcuuccucc

SEQ ID NO: 3434941 - RNA, 20 nt, Human
caugggaaaguauucucuuu

SEQ ID NO: 3434942 - RNA, 17 nt, Human
caccacacccagcccac

SEQ ID NO: 3434943 - RNA, 16 nt, Human
caccacacccagccuc

SEQ ID NO: 3434944 - RNA, 17 nt, Human
caccacacccagccuca

SEQ ID NO: 3434945 - RNA, 14 nt, Human
caccacagacacac

SEQ ID NO: 3434946 - RNA, 19 nt, Human
caccacagacacacacacg

SEQ ID NO: 3434947 - RNA, 21 nt, Human
caccacaggcccuuuccucag

SEQ ID NO: 3434948 - RNA, 23 nt, Human
caccacauaaggucagcucagag

SEQ ID NO: 3434949 - RNA, 13 nt, Human
caccaccaagcca

SEQ ID NO: 3434950 - RNA, 15 nt, Human
caccaccaggucucc

SEQ ID NO: 3434951 - RNA, 11 nt, Human
caccacccaaa

SEQ ID NO: 3434952 - RNA, 18 nt, Human
caccaccccaacaaacca

SEQ ID NO: 3434953 - RNA, 14 nt, Human
caccaccccuacca

SEQ ID NO: 3434954 - RNA, 23 nt, Human
caccacccgcuuucuugcugguu

SEQ ID NO: 3434955 - RNA, 17 nt, Human
caccacccuccuuccca

SEQ ID NO: 3434956 - RNA, 20 nt, Human
caccacccugcucauccacu

SEQ ID NO: 3434957 - RNA, 22 nt, Human
caccaccuaggccacuccucca

SEQ ID NO: 3434958 - RNA, 13 nt, Human
caccaccucccuc

SEQ ID NO: 3434959 - RNA, 12 nt, Human
caccaccucucc

SEQ ID NO: 3434960 - RNA, 14 nt, Human
caccaccuucccag

SEQ ID NO: 3434961 - RNA, 15 nt, Human
caccaccuucccagc

SEQ ID NO: 3434962 - RNA, 19 nt, Human
caccaccuucccagcucuc

SEQ ID NO: 3434963 - RNA, 22 nt, Human
caccaccuucccagcucucccu

SEQ ID NO: 3434964 - RNA, 22 nt, Human
caccacgauguggcccuggccu

SEQ ID NO: 3434965 - RNA, 15 nt, Human
caccacgucacuuca

SEQ ID NO: 3434966 - RNA, 16 nt, Human
caccacuacauucugu

SEQ ID NO: 3434967 - RNA, 17 nt, Human
caccacuacauucuguu

SEQ ID NO: 3434968 - RNA, 20 nt, Human
caccacuacauucuguuaau

SEQ ID NO: 3434969 - RNA, 21 nt, Human
caccacuauaaaaugucuuca

SEQ ID NO: 3434970 - RNA, 18 nt, Human
caccacucaaaggccaga

SEQ ID NO: 3434971 - RNA, 16 nt, Human
caccacuccauuccca

SEQ ID NO: 3434972 - RNA, 12 nt, Human
caccacucuggc

SEQ ID NO: 3434973 - RNA, 15 nt, Human
caccacucuggcagc

SEQ ID NO: 3434974 - RNA, 19 nt, Human
caccacucuggcagccaca

SEQ ID NO: 3434975 - RNA, 13 nt, Human
caccacuggccac

SEQ ID NO: 3434976 - RNA, 15 nt, Human
caccacuggccacca

SEQ ID NO: 3434977 - RNA, 18 nt, Human
caccacuggccaccaggc

SEQ ID NO: 3434978 - RNA, 15 nt, Human
caccagaagcccaga

SEQ ID NO: 3434979 - RNA, 15 nt, Human
caccagacacccagg

SEQ ID NO: 3434980 - RNA, 16 nt, Human
caccagacacccagga

SEQ ID NO: 3434981 - RNA, 16 nt, Human
caccagagaccguccu

SEQ ID NO: 3434982 - RNA, 19 nt, Human
caccagagaccguccucac

SEQ ID NO: 3434983 - RNA, 18 nt, Human
caccagagcaaccucuca

SEQ ID NO: 3434984 - RNA, 16 nt, Human
caccagagcagaugca

SEQ ID NO: 3434985 - RNA, 17 nt, Human
caccagagcagaugcag

SEQ ID NO: 3434986 - RNA, 19 nt, Human
caccagagcagaugcagag

SEQ ID NO: 3434987 - RNA, 20 nt, Human
caccagagcagaugcagaga

SEQ ID NO: 3434988 - RNA, 15 nt, Human
caccagagcccaccu

SEQ ID NO: 3434989 - RNA, 21 nt, Human
caccagaggcugcagaaggcc

SEQ ID NO: 3434990 - RNA, 13 nt, Human
caccagaucugau

SEQ ID NO: 3434991 - RNA, 15 nt, Human
caccagaugugacag

SEQ ID NO: 3434992 - RNA, 12 nt, Human
caccagcagccu

SEQ ID NO: 3434993 - RNA, 20 nt, Human
caccagcaucaccugccugu

SEQ ID NO: 3434994 - RNA, 11 nt, Human
caccagccagc

SEQ ID NO: 3434995 - RNA, 12 nt, Human
caccagccagcg

SEQ ID NO: 3434996 - RNA, 13 nt, Human
caccagccaggcu

SEQ ID NO: 3434997 - RNA, 20 nt, Human
caccagccaggcucugugcu

SEQ ID NO: 3434998 - RNA, 17 nt, Human
caccagccccagugccc

SEQ ID NO: 3434999 - RNA, 13 nt, Human
caccagccccugc

SEQ ID NO: 3435000 - RNA, 15 nt, Human
caccagcccggccug

SEQ ID NO: 3435001 - RNA, 19 nt, Human
caccagcccggccugcucc

SEQ ID NO: 3435002 - RNA, 21 nt, Human
caccagcguuugaggggcugg

SEQ ID NO: 3435003 - RNA, 12 nt, Human
caccagcuccuc

SEQ ID NO: 3435004 - RNA, 14 nt, Human
caccagcugcaaag

SEQ ID NO: 3435005 - RNA, 18 nt, Human
caccagcugcaaaguguu

SEQ ID NO: 3435006 - RNA, 22 nt, Human
caccagcuguguccggcccagu

SEQ ID NO: 3435007 - RNA, 17 nt, Human
caccagcuucuccaggc

SEQ ID NO: 3435008 - RNA, 13 nt, Human
caccaggaagccg

SEQ ID NO: 3435009 - RNA, 17 nt, Human
caccaggaauguuaaag

SEQ ID NO: 3435010 - RNA, 16 nt, Human
caccaggagaaccacu

SEQ ID NO: 3435011 - RNA, 23 nt, Human
caccaggcacgaacccaccugcu

SEQ ID NO: 3435012 - RNA, 15 nt, Human
caccaggcagccucu

SEQ ID NO: 3435013 - RNA, 16 nt, Human
caccaggccccccugu

SEQ ID NO: 3435014 - RNA, 14 nt, Human
caccaggcugcuca

SEQ ID NO: 3435015 - RNA, 15 nt, Human
caccaggcuggcgca

SEQ ID NO: 3435016 - RNA, 22 nt, Human
caccaggcuggcgcagccaagg

SEQ ID NO: 3435017 - RNA, 16 nt, Human
caccaggcugugggcc

SEQ ID NO: 3435018 - RNA, 17 nt, Human
caccaggcugugggccu

SEQ ID NO: 3435019 - RNA, 18 nt, Human
caccaggcugugggccuc

SEQ ID NO: 3435020 - RNA, 20 nt, Human
caccaggcuugccugcaggc

SEQ ID NO: 3435021 - RNA, 13 nt, Human
caccagggaagau

SEQ ID NO: 3435022 - RNA, 21 nt, Human
caccagggaaggggacaagga

SEQ ID NO: 3435023 - RNA, 17 nt, Human
caccagggcaucucugg

SEQ ID NO: 3435024 - RNA, 22 nt, Human
caccagggccaaaagcuucccu

SEQ ID NO: 3435025 - RNA, 16 nt, Human
caccagggccagccuc

SEQ ID NO: 3435026 - RNA, 17 nt, Human
caccagggccagccucu

SEQ ID NO: 3435027 - RNA, 16 nt, Human
caccaggggcaggcac

SEQ ID NO: 3435028 - RNA, 20 nt, Human
caccaggggcaggcacagca

SEQ ID NO: 3435029 - RNA, 22 nt, Human
caccaggguccuuuugacacug

SEQ ID NO: 3435030 - RNA, 22 nt, Human
caccaggguugaccccagagga

SEQ ID NO: 3435031 - RNA, 23 nt, Human
caccaggguugaccccagaggau

SEQ ID NO: 3435032 - RNA, 22 nt, Human
caccaggucucccgggaagcca

SEQ ID NO: 3435033 - RNA, 22 nt, Human
caccaguacauucucaguuuuu

SEQ ID NO: 3435034 - RNA, 20 nt, Human
caccagucccuguccggaau

SEQ ID NO: 3435035 - RNA, 14 nt, Human
caccagugaccugg

SEQ ID NO: 3435036 - RNA, 13 nt, Human
caccagugccucu

SEQ ID NO: 3435037 - RNA, 13 nt, Human
caccagugucccc

SEQ ID NO: 3435038 - RNA, 14 nt, Human
caccaguguccccu

SEQ ID NO: 3435039 - RNA, 17 nt, Human
caccaguguccuccccu

SEQ ID NO: 3435040 - RNA, 18 nt, Human
caccaguguccuccccuc

SEQ ID NO: 3435041 - RNA, 23 nt, Human
caccaguguccuccccucaagga

SEQ ID NO: 3435042 - RNA, 18 nt, Human
caccagugugggguucug

SEQ ID NO: 3435043 - RNA, 23 nt, Human
caccagugugggguucugcuggg

SEQ ID NO: 3435044 - RNA, 21 nt, Human
caccaguguguggcuuucaga

SEQ ID NO: 3435045 - RNA, 16 nt, Human
caccauaccuuugcua

SEQ ID NO: 3435046 - RNA, 23 nt, Human
caccauacgagcaccuccagccu

SEQ ID NO: 3435047 - RNA, 15 nt, Human
caccauaugaauugu

SEQ ID NO: 3435048 - RNA, 21 nt, Human
caccauauuggccagucuggu

SEQ ID NO: 3435049 - RNA, 15 nt, Human
caccaucaagccacc

SEQ ID NO: 3435050 - RNA, 16 nt, Human
caccaucaagccacca

SEQ ID NO: 3435051 - RNA, 24 nt, Human
caccaucaagccaccaacauacuc

SEQ ID NO: 3435052 - RNA, 22 nt, Human
caccaucacagcuuguuuugga

SEQ ID NO: 3435053 - RNA, 18 nt, Human
caccaucaugucuggcua

SEQ ID NO: 3435054 - RNA, 13 nt, Human
caccauccccucc

SEQ ID NO: 3435055 - RNA, 18 nt, Human
caccauccgccagggccc

SEQ ID NO: 3435056 - RNA, 15 nt, Human
caccauccugcagcc

SEQ ID NO: 3435057 - RNA, 20 nt, Human
caccauccugcagccuccuc

SEQ ID NO: 3435058 - RNA, 21 nt, Human
caccauccugcagccuccucc

SEQ ID NO: 3435059 - RNA, 13 nt, Human
caccaucucaggc

SEQ ID NO: 3435060 - RNA, 18 nt, Human
caccaucucaggccaccu

SEQ ID NO: 3435061 - RNA, 19 nt, Human
caccaucucaggccaccug

SEQ ID NO: 3435062 - RNA, 10 nt, Human
caccaucugc

SEQ ID NO: 3435063 - RNA, 19 nt, Human
caccaucugcugucuuuuc

SEQ ID NO: 3435064 - RNA, 11 nt, Human
caccaugaaac

SEQ ID NO: 3435065 - RNA, 15 nt, Human
caccaugauuccuuu

SEQ ID NO: 3435066 - RNA, 16 nt, Human
caccauggccagccaa

SEQ ID NO: 3435067 - RNA, 20 nt, Human
caccauguugcccaggcugg

SEQ ID NO: 3435068 - RNA, 20 nt, Human
caccauguuggccaggcugg

SEQ ID NO: 3435069 - RNA, 20 nt, Human
caccauguuggccaggcuug

SEQ ID NO: 3435070 - RNA, 14 nt, Human
caccauuauaauga

SEQ ID NO: 3435071 - RNA, 20 nt, Human
cauguuguaaugcugcacuu

SEQ ID NO: 3435072 - RNA, 19 nt, Human
cauguugucuaagaaauug

SEQ ID NO: 3435073 - RNA, 13 nt, Human
cauguugugccuc

SEQ ID NO: 3435074 - RNA, 20 nt, Human
cauguugugccucccuggug

SEQ ID NO: 3435075 - RNA, 18 nt, Human
cauguuguuaaaauuaug

SEQ ID NO: 3435076 - RNA, 14 nt, Human
cauguuuaaaccug

SEQ ID NO: 3435077 - RNA, 11 nt, Human
cauguuuaaga

SEQ ID NO: 3435078 - RNA, 16 nt, Human
cauguuuaagauuuaa

SEQ ID NO: 3435079 - RNA, 15 nt, Human
cauguuuagacuuua

SEQ ID NO: 3435080 - RNA, 13 nt, Human
cauguuuauaaau

SEQ ID NO: 3435081 - RNA, 15 nt, Human
cauguuuaucugcuu

SEQ ID NO: 3435082 - RNA, 13 nt, Human
cauguuuaugaaa

SEQ ID NO: 3435083 - RNA, 14 nt, Human
cauguuuaugaaaa

SEQ ID NO: 3435084 - RNA, 13 nt, Human
cauguuuauuaca

SEQ ID NO: 3435085 - RNA, 18 nt, Human
cauguuuauuuuucuugu

SEQ ID NO: 3435086 - RNA, 20 nt, Human
cauguuuauuuuucuugucu

SEQ ID NO: 3435087 - RNA, 21 nt, Human
ccacuaagaauucaaacuggg

SEQ ID NO: 3435088 - RNA, 13 nt, Human
ccacuaagcagag

SEQ ID NO: 3435089 - RNA, 18 nt, Human
ccacuaagcagaggaggg

SEQ ID NO: 3435090 - RNA, 19 nt, Human
ccacuaagcagaggagggg

SEQ ID NO: 3435091 - RNA, 22 nt, Human
ccacuaagcagaggaggggccg

SEQ ID NO: 3435092 - RNA, 14 nt, Human
ccacuacaccuggc

SEQ ID NO: 3435093 - RNA, 15 nt, Human
ccacuacaccuggcu

SEQ ID NO: 3435094 - RNA, 16 nt, Human
ccacuacaccuggcug

SEQ ID NO: 3435095 - RNA, 14 nt, Human
ccacuacacuccag

SEQ ID NO: 3435096 - RNA, 22 nt, Human
ccacuacaugcagcccaugccc

SEQ ID NO: 3435097 - RNA, 11 nt, Human
ccacuacauuc

SEQ ID NO: 3435098 - RNA, 18 nt, Human
ccacuacauucuguuaau

SEQ ID NO: 3435099 - RNA, 22 nt, Human
ccacuacggaauaguuggcuag

SEQ ID NO: 3435100 - RNA, 16 nt, Human
ccacuacucaaaaauu

SEQ ID NO: 3435101 - RNA, 14 nt, Human
ccacuacugcagca

SEQ ID NO: 3435102 - RNA, 20 nt, Human
ccacuacugcagcaccucca

SEQ ID NO: 3435103 - RNA, 16 nt, Human
ccacuagccucagggg

SEQ ID NO: 3435104 - RNA, 18 nt, Human
ccacuaggacucugaggc

SEQ ID NO: 3435105 - RNA, 21 nt, Human
ccacuaggcugggugcccaca

SEQ ID NO: 3435106 - RNA, 16 nt, Human
ccacuagugcaaauca

SEQ ID NO: 3435107 - RNA, 20 nt, Human
ccacuauaaaaugucuucaa

SEQ ID NO: 3435108 - RNA, 16 nt, Human
ccacuauccuucguga

SEQ ID NO: 3435109 - RNA, 15 nt, Human
ccacucaaaggccag

SEQ ID NO: 3435110 - RNA, 15 nt, Human
ccacucaagaccaaa

SEQ ID NO: 3435111 - RNA, 23 nt, Human
ccacucaagaccaaauggaaaca

SEQ ID NO: 3435112 - RNA, 16 nt, Human
ccacucaagccaagca

SEQ ID NO: 3435113 - RNA, 21 nt, Human
ccacucacaugacacccguga

SEQ ID NO: 3435114 - RNA, 16 nt, Human
ccacucaccagugucc

SEQ ID NO: 3435115 - RNA, 12 nt, Human
ccacucaccccg

SEQ ID NO: 3435116 - RNA, 22 nt, Human
ccacucacgaauauuaugccca

SEQ ID NO: 3435117 - RNA, 18 nt, Human
ccacucagccccuaggag

SEQ ID NO: 3435118 - RNA, 14 nt, Human
ccacucagcuuccu

SEQ ID NO: 3435119 - RNA, 13 nt, Human
ccacucaggaggc

SEQ ID NO: 3435120 - RNA, 18 nt, Human
ccacucaggcauuugacu

SEQ ID NO: 3435121 - RNA, 18 nt, Human
ccacucaguccauagcag

SEQ ID NO: 3435122 - RNA, 22 nt, Human
ccacuccagaccccuggcuuuu

SEQ ID NO: 3435123 - RNA, 18 nt, Human
ccacuccagcgcugagug

SEQ ID NO: 3435124 - RNA, 20 nt, Human
ccacuccagcuccuucgcuu

SEQ ID NO: 3435125 - RNA, 12 nt, Human
ccacucccacuu

SEQ ID NO: 3435126 - RNA, 14 nt, Human
ccacucccaggcag

SEQ ID NO: 3435127 - RNA, 17 nt, Human
cauuucccaucugcacc

SEQ ID NO: 3435128 - RNA, 23 nt, Human
cauuuccccucugcacccagaac

SEQ ID NO: 3435129 - RNA, 22 nt, Human
cauuuccguaauucuuauucca

SEQ ID NO: 3435130 - RNA, 15 nt, Human
cauuuccuaaauaua

SEQ ID NO: 3435131 - RNA, 17 nt, Human
cauuuccuauguaacug

SEQ ID NO: 3435132 - RNA, 14 nt, Human
cauuuccucagacu

SEQ ID NO: 3435133 - RNA, 18 nt, Human
cauuuccucgcagccucu

SEQ ID NO: 3435134 - RNA, 13 nt, Human
cauuuccugacag

SEQ ID NO: 3435135 - RNA, 19 nt, Human
cauuuccugagaccacaga

SEQ ID NO: 3435136 - RNA, 19 nt, Human
cauuuccugcccuuccuca

SEQ ID NO: 3435137 - RNA, 20 nt, Human
cauuuccugcccuuccucag

SEQ ID NO: 3435138 - RNA, 23 nt, Human
cauuuccugcccuuccucaguuu

SEQ ID NO: 3435139 - RNA, 12 nt, Human
cauuuccugggu

SEQ ID NO: 3435140 - RNA, 14 nt, Human
cauuuccugggugg

SEQ ID NO: 3435141 - RNA, 13 nt, Human
cauuuccuguguc

SEQ ID NO: 3435142 - RNA, 16 nt, Human
cauuuccuucaaggca

SEQ ID NO: 3435143 - RNA, 21 nt, Human
cauuucgguggcuagucaagc

SEQ ID NO: 3435144 - RNA, 12 nt, Human
cauuucuaaaau

SEQ ID NO: 3435145 - RNA, 23 nt, Human
cauuucuaaaggccucuuccuug

SEQ ID NO: 3435146 - RNA, 19 nt, Human
cauuucuaacucugaugua

SEQ ID NO: 3435147 - RNA, 20 nt, Human
cauuucuaacucugauguaa

SEQ ID NO: 3435148 - RNA, 19 nt, Human
cauuucuaauuauguagcu

SEQ ID NO: 3435149 - RNA, 16 nt, Human
cauuucuaauuccugu

SEQ ID NO: 3435150 - RNA, 17 nt, Human
cauuucuacucucccau

SEQ ID NO: 3435151 - RNA, 22 nt, Human
cauuucuacucucccauggcuu

SEQ ID NO: 3435152 - RNA, 18 nt, Human
cauuucuacugugacuga

SEQ ID NO: 3435153 - RNA, 20 nt, Human
cauuucuagcgcauggccug

SEQ ID NO: 3435154 - RNA, 14 nt, Human
cauuucuauaaaua

SEQ ID NO: 3435155 - RNA, 12 nt, Human
cauuucuauuaa

SEQ ID NO: 3435156 - RNA, 14 nt, Human
cauuucuauuuauu

SEQ ID NO: 3435157 - RNA, 23 nt, Human
cauuucuauuuauuuacugagcu

SEQ ID NO: 3435158 - RNA, 12 nt, Human
cauuucucacug

SEQ ID NO: 3435159 - RNA, 17 nt, Human
cauuucucauguugaaa

SEQ ID NO: 3435160 - RNA, 14 nt, Human
cauuucucuggggu

SEQ ID NO: 3435161 - RNA, 15 nt, Human
cauuucucuuacugc

SEQ ID NO: 3435162 - RNA, 13 nt, Human
cauuucugaggug

SEQ ID NO: 3435163 - RNA, 21 nt, Human
cauuucugaggugcacuggga

SEQ ID NO: 3435164 - RNA, 22 nt, Human
cauuucugaguuucauucuccu

SEQ ID NO: 3435165 - RNA, 19 nt, Human
cauuucugauacuuucugu

SEQ ID NO: 3435166 - RNA, 11 nt, Human
cauuucugauu

SEQ ID NO: 3435167 - RNA, 17 nt, Human
cauuucuguaaauacca

SEQ ID NO: 3435168 - RNA, 23 nt, Human
cauuucuugugauguuuugagag

SEQ ID NO: 3435169 - RNA, 18 nt, Human
cauuucuuugugcuuugg

SEQ ID NO: 3435170 - RNA, 15 nt, Human
cauuucuuuucuuuu

SEQ ID NO: 3435171 - RNA, 17 nt, Human
cauuucuuuucuuuuua

SEQ ID NO: 3435172 - RNA, 20 nt, Human
cauuucuuuucuuuuuacau

SEQ ID NO: 3435173 - RNA, 15 nt, Human
cauuucuuuuuggga

SEQ ID NO: 3435174 - RNA, 19 nt, Human
cauuugaaaauuuugaugu

SEQ ID NO: 3435175 - RNA, 19 nt, Human
cauuugaaaccccuguagg

SEQ ID NO: 3435176 - RNA, 21 nt, Human
cauuugaaaccccuguaggcc

SEQ ID NO: 3435177 - RNA, 11 nt, Human
cauuugaaaga

SEQ ID NO: 3435178 - RNA, 10 nt, Human
cauuugaaug

SEQ ID NO: 3435179 - RNA, 12 nt, Human
cauuugaaugca

SEQ ID NO: 3435180 - RNA, 23 nt, Human
cauuugacugaagaugcagcuca

SEQ ID NO: 3435181 - RNA, 16 nt, Human
cauuugagcagggcuc

SEQ ID NO: 3435182 - RNA, 18 nt, Human
cauuugaggucuguucuu

SEQ ID NO: 3435183 - RNA, 22 nt, Human
cauuugaggucuguucuuucca

SEQ ID NO: 3435184 - RNA, 14 nt, Human
cauuugagucucuu

SEQ ID NO: 3435185 - RNA, 22 nt, Human
cauuugaguuauuuuaauuauc

SEQ ID NO: 3435186 - RNA, 22 nt, Human
cauuugauaaaguaaggcaugg

SEQ ID NO: 3435187 - RNA, 14 nt, Human
cauuugauaaugau

SEQ ID NO: 3435188 - RNA, 16 nt, Human
cauuugauaaugauaa

SEQ ID NO: 3435189 - RNA, 23 nt, Human
cauuugauaaugauaaaacaccu

SEQ ID NO: 3435190 - RNA, 19 nt, Human
cauuugaugcaugucuuuu

SEQ ID NO: 3435191 - RNA, 20 nt, Human
cauuugaugcaugucuuuua

SEQ ID NO: 3435192 - RNA, 19 nt, Human
cauuugcaauaacagcugc

SEQ ID NO: 3435193 - RNA, 21 nt, Human
cauuugcacuggaguucuaug

SEQ ID NO: 3435194 - RNA, 14 nt, Human
cauuugcagggucc

SEQ ID NO: 3435195 - RNA, 19 nt, Human
cauuugcaggguccucuuc

SEQ ID NO: 3435196 - RNA, 18 nt, Human
cauuugccuauucccaca

SEQ ID NO: 3435197 - RNA, 16 nt, Human
cauuugccuugcagaa

SEQ ID NO: 3435198 - RNA, 22 nt, Human
cauuugccuugcagaacugcca

SEQ ID NO: 3435199 - RNA, 20 nt, Human
cauuugcgcacaacuuaaaa

SEQ ID NO: 3435200 - RNA, 22 nt, Human
cauuugcguuccaugaugcugg

SEQ ID NO: 3435201 - RNA, 20 nt, Human
cauuugcuaacuagcuugga

SEQ ID NO: 3435202 - RNA, 19 nt, Human
cauuugcucuucagaugcc

SEQ ID NO: 3435203 - RNA, 20 nt, Human
cauuugcucuucagaugcca

SEQ ID NO: 3435204 - RNA, 22 nt, Human
cauuugcucuucagaugccacu

SEQ ID NO: 3435205 - RNA, 11 nt, Human
cauuugcugaa

SEQ ID NO: 3435206 - RNA, 15 nt, Human
cauuugcuguuuuaa

SEQ ID NO: 3435207 - RNA, 16 nt, Human
cauuugcuuuuucacc

SEQ ID NO: 3435208 - RNA, 19 nt, Human
cauuugcuuuuugugauau

SEQ ID NO: 3435209 - RNA, 15 nt, Human
cauuuggaggcaauc

SEQ ID NO: 3435210 - RNA, 17 nt, Human
cauuuggagggccuggg

SEQ ID NO: 3435211 - RNA, 21 nt, Human
cauuuggcagggguggcugcc

SEQ ID NO: 3435212 - RNA, 20 nt, Human
cauuuggcuuuccagucaua

SEQ ID NO: 3435213 - RNA, 23 nt, Human
cauuugggaguuuuuaugagaaa

SEQ ID NO: 3435214 - RNA, 12 nt, Human
cauuugggcaga

SEQ ID NO: 3435215 - RNA, 22 nt, Human
cauuugggguagcuagaggaac

SEQ ID NO: 3435216 - RNA, 17 nt, Human
cauuuggguccaggagg

SEQ ID NO: 3435217 - RNA, 21 nt, Human
cauuuggugguuucagaaaug

SEQ ID NO: 3435218 - RNA, 22 nt, Human
cauuuggugguuucagaaaugu

SEQ ID NO: 3435219 - RNA, 23 nt, Human
cauuuggugguuucagaaaugug

SEQ ID NO: 3435220 - RNA, 20 nt, Human
cauuugguucauuaauucua

SEQ ID NO: 3435221 - RNA, 13 nt, Human
cauuuguaaaacu

SEQ ID NO: 3435222 - RNA, 18 nt, Human
cauuuguaaaugcugugu

SEQ ID NO: 3435223 - RNA, 13 nt, Human
cauuuguaauaaa

SEQ ID NO: 3435224 - RNA, 16 nt, Human
cauuuguaauaaagua

SEQ ID NO: 3435225 - RNA, 18 nt, Human
cauuuguaauaaaguaua

SEQ ID NO: 3435226 - RNA, 14 nt, Human
cauuuguaauuuaa

SEQ ID NO: 3435227 - RNA, 13 nt, Human
cauuuguagguag

SEQ ID NO: 3435228 - RNA, 16 nt, Human
cauuuguauaaaauaa

SEQ ID NO: 3435229 - RNA, 19 nt, Human
cauuuguauaaaauaauuu

SEQ ID NO: 3435230 - RNA, 12 nt, Human
cauuuguauauu

SEQ ID NO: 3435231 - RNA, 23 nt, Human
cauuuuuuuucuuugaauaaaug

SEQ ID NO: 3435232 - RNA, 22 nt, Human
cauuuuuuuuuuuaauuuugua

SEQ ID NO: 3435233 - RNA, 23 nt, Human
ccaaaaaagcuguauuuugaaaa

SEQ ID NO: 3435234 - RNA, 19 nt, Human
ccaaaaaauaucuaguaau

SEQ ID NO: 3435235 - RNA, 17 nt, Human
ccaaaaaaugcuugcuu

SEQ ID NO: 3435236 - RNA, 11 nt, Human
ccaaaaacaaa

SEQ ID NO: 3435237 - RNA, 16 nt, Human
ccaaaaaccaguauug

SEQ ID NO: 3435238 - RNA, 12 nt, Human
ccaaaaauagcu

SEQ ID NO: 3435239 - RNA, 19 nt, Human
ccaaaaauguguaagaaca

SEQ ID NO: 3435240 - RNA, 13 nt, Human
ccaaaaauuauua

SEQ ID NO: 3435241 - RNA, 14 nt, Human
ccaaaacaauguuu

SEQ ID NO: 3435242 - RNA, 22 nt, Human
ccaaaacauuccguuuacauuu

SEQ ID NO: 3435243 - RNA, 21 nt, Human
ccaaaaccgccagcucuguuc

SEQ ID NO: 3435244 - RNA, 14 nt, Human
ccaaaacuccugcc

SEQ ID NO: 3435245 - RNA, 17 nt, Human
ccaaaacucuccucugc

SEQ ID NO: 3435246 - RNA, 12 nt, Human
ccaaaagaaaaa

SEQ ID NO: 3435247 - RNA, 15 nt, Human
ccaaaagaaacugac

SEQ ID NO: 3435248 - RNA, 16 nt, Human
ccaaaaggaaaaagcu

SEQ ID NO: 3435249 - RNA, 23 nt, Human
ccaaaagguuuaagaaauagaau

SEQ ID NO: 3435250 - RNA, 18 nt, Human
ccaaaaguggccucuuug

SEQ ID NO: 3435251 - RNA, 21 nt, Human
ccaaaaguggccucuuugucu

SEQ ID NO: 3435252 - RNA, 20 nt, Human
ccaaaaguuacauguuugca

SEQ ID NO: 3435253 - RNA, 17 nt, Human
ccaaaaguuuuccugag

SEQ ID NO: 3435254 - RNA, 16 nt, Human
ccaaaauaagaaaaga

SEQ ID NO: 3435255 - RNA, 18 nt, Human
ccaaaauaagaaaagaug

SEQ ID NO: 3435256 - RNA, 22 nt, Human
ccaaaauaaugucuuguuaaua

SEQ ID NO: 3435257 - RNA, 15 nt, Human
ccaaaaugacaucuu

SEQ ID NO: 3435258 - RNA, 16 nt, Human
ccaaaaugacaucuuu

SEQ ID NO: 3435259 - RNA, 19 nt, Human
ccaaaaugacaucuuuuua

SEQ ID NO: 3435260 - RNA, 22 nt, Human
ccaaaaugcucuagugccuucu

SEQ ID NO: 3435261 - RNA, 15 nt, Human
ccaaaaugugccuau

SEQ ID NO: 3435262 - RNA, 17 nt, Human
ccaaaauguugcugaaa

SEQ ID NO: 3435263 - RNA, 17 nt, Human
ccaaacacacagaaggg

SEQ ID NO: 3435264 - RNA, 20 nt, Human
ccaaacaccuuccagcuccu

SEQ ID NO: 3435265 - RNA, 13 nt, Human
ccaaacagcaaac

SEQ ID NO: 3435266 - RNA, 23 nt, Human
ccaaacagcaaaccaagagauug

SEQ ID NO: 3435267 - RNA, 16 nt, Human
ccaaacagcugccucu

SEQ ID NO: 3435268 - RNA, 16 nt, Human
ccaaacaggcccuccu

SEQ ID NO: 3435269 - RNA, 17 nt, Human
ccaaacauaugcacauu

SEQ ID NO: 3435270 - RNA, 19 nt, Human
ccaaacauccuacaagaca

SEQ ID NO: 3435271 - RNA, 14 nt, Human
ccaaacauguauuu

SEQ ID NO: 3435272 - RNA, 12 nt, Human
ccaaacauuaau

SEQ ID NO: 3435273 - RNA, 15 nt, Human
ccaaacauuaauguu

SEQ ID NO: 3435274 - RNA, 21 nt, Human
ccaaacauuaauguugauuuc

SEQ ID NO: 3435275 - RNA, 14 nt, Human
ccaaaccacuuuuu

SEQ ID NO: 3435276 - RNA, 16 nt, Human
ccaaacccaugaggca

SEQ ID NO: 3435277 - RNA, 16 nt, Human
ccaaacccccauucug

SEQ ID NO: 3435278 - RNA, 14 nt, Human
ccaaaccuagcccc

SEQ ID NO: 3435279 - RNA, 16 nt, Human
ccaaaccucaccaacu

SEQ ID NO: 3435280 - RNA, 18 nt, Human
ccaaaccuucacacacag

SEQ ID NO: 3435281 - RNA, 17 nt, Human
ccaaacucaccugcccc

SEQ ID NO: 3435282 - RNA, 17 nt, Human
ccaaacugauccaguau

SEQ ID NO: 3435283 - RNA, 12 nt, Human
ccaaacugccua

SEQ ID NO: 3435284 - RNA, 19 nt, Human
ccaaacugccuaagcccuc

SEQ ID NO: 3435285 - RNA, 13 nt, Human
ccaaacugcugga

SEQ ID NO: 3435286 - RNA, 16 nt, Human
ccaaacuuggauuuuu

SEQ ID NO: 3435287 - RNA, 17 nt, Human
ccaaagaaaugaacauu

SEQ ID NO: 3435288 - RNA, 23 nt, Human
ccaaagaaaugaacauuccaagg

SEQ ID NO: 3435289 - RNA, 14 nt, Human
ccaaagaacagccu

SEQ ID NO: 3435290 - RNA, 15 nt, Human
ccaaagaaccaaaga

SEQ ID NO: 3435291 - RNA, 20 nt, Human
cacgcugucuccagaccccc

SEQ ID NO: 3435292 - RNA, 23 nt, Human
cacgcugucuccagacccccacc

SEQ ID NO: 3435293 - RNA, 16 nt, Human
cacgcugugggcaggu

SEQ ID NO: 3435294 - RNA, 19 nt, Human
cacgcuugcguaugucugu

SEQ ID NO: 3435295 - RNA, 18 nt, Human
cacgcuuucagcgaauga

SEQ ID NO: 3435296 - RNA, 14 nt, Human
cacgcuuucuagcu

SEQ ID NO: 3435297 - RNA, 22 nt, Human
cacggaagagccuugcggaagg

SEQ ID NO: 3435298 - RNA, 20 nt, Human
cacggaccaaagggagucug

SEQ ID NO: 3435299 - RNA, 19 nt, Human
cacggacgcuggcucccca

SEQ ID NO: 3435300 - RNA, 20 nt, Human
cacggagauaugaagagcaa

SEQ ID NO: 3435301 - RNA, 16 nt, Human
cacggagccacuccuc

SEQ ID NO: 3435302 - RNA, 22 nt, Human
cacggagcggauugcaaagcaa

SEQ ID NO: 3435303 - RNA, 23 nt, Human
cacggauccauguagcaggacug

SEQ ID NO: 3435304 - RNA, 13 nt, Human
cacggaucugaga

SEQ ID NO: 3435305 - RNA, 14 nt, Human
cacggaucugagaa

SEQ ID NO: 3435306 - RNA, 17 nt, Human
cacggcaaaggaagacg

SEQ ID NO: 3435307 - RNA, 21 nt, Human
cacggcaggacaacgaggaag

SEQ ID NO: 3435308 - RNA, 22 nt, Human
cacggcaggacaacgaggaagc

SEQ ID NO: 3435309 - RNA, 15 nt, Human
cacggccaacaaagc

SEQ ID NO: 3435310 - RNA, 17 nt, Human
cacggccaacaaagcug

SEQ ID NO: 3435311 - RNA, 19 nt, Human
cacggccacaucaaagagg

SEQ ID NO: 3435312 - RNA, 14 nt, Human
cacggccgcuccag

SEQ ID NO: 3435313 - RNA, 17 nt, Human
cacggccgcuccagggg

SEQ ID NO: 3435314 - RNA, 20 nt, Human
cacggccuuucuagccuggc

SEQ ID NO: 3435315 - RNA, 20 nt, Human
cacggcuaagaggcugcuga

SEQ ID NO: 3435316 - RNA, 19 nt, Human
cacggcucacugcagccuc

SEQ ID NO: 3435317 - RNA, 22 nt, Human
cacggcuccucgagaucccaac

SEQ ID NO: 3435318 - RNA, 19 nt, Human
cacggcucuguccccagcc

SEQ ID NO: 3435319 - RNA, 18 nt, Human
cacgggacggaagugcuu

SEQ ID NO: 3435320 - RNA, 15 nt, Human
cacgggagauuucuu

SEQ ID NO: 3435321 - RNA, 15 nt, Human
cacgggcagccuggc

SEQ ID NO: 3435322 - RNA, 18 nt, Human
cacgggcagccuggcucc

SEQ ID NO: 3435323 - RNA, 14 nt, Human
cacgggccugucca

SEQ ID NO: 3435324 - RNA, 17 nt, Human
cacgggccuguccacag

SEQ ID NO: 3435325 - RNA, 22 nt, Human
cacgggggcagcugauacaaau

SEQ ID NO: 3435326 - RNA, 15 nt, Human
cacgggguauuuuag

SEQ ID NO: 3435327 - RNA, 21 nt, Human
cacggguaaaucuaguaccau

SEQ ID NO: 3435328 - RNA, 14 nt, Human
cacggguggucccc

SEQ ID NO: 3435329 - RNA, 16 nt, Human
cacggucuucccucuu

SEQ ID NO: 3435330 - RNA, 15 nt, Human
cacggugccuuuuuu

SEQ ID NO: 3435331 - RNA, 17 nt, Human
cacggugccuuuuuuca

SEQ ID NO: 3435332 - RNA, 19 nt, Human
cacguaaugaaacuuggau

SEQ ID NO: 3435333 - RNA, 14 nt, Human
cacguacacacaca

SEQ ID NO: 3435334 - RNA, 20 nt, Human
cacguaguagggucaggcca

SEQ ID NO: 3435335 - RNA, 21 nt, Human
cacguaguagggucaggccac

SEQ ID NO: 3435336 - RNA, 23 nt, Human
cacguaguagggucaggccacgg

SEQ ID NO: 3435337 - RNA, 17 nt, Human
cacgucaucuaguuuua

SEQ ID NO: 3435338 - RNA, 16 nt, Human
cacguccucgcucccg

SEQ ID NO: 3435339 - RNA, 13 nt, Human
cacguccugagaa

SEQ ID NO: 3435340 - RNA, 14 nt, Human
cacguccugucagu

SEQ ID NO: 3435341 - RNA, 19 nt, Human
cacguccugucagugccgc

SEQ ID NO: 3435342 - RNA, 23 nt, Human
cacgucuauuucaucagaacagc

SEQ ID NO: 3435343 - RNA, 16 nt, Human
cacgucugacccucuc

SEQ ID NO: 3435344 - RNA, 15 nt, Human
cacgucuuccuucug

SEQ ID NO: 3435345 - RNA, 23 nt, Human
cacgucuuccuucugccugagcu

SEQ ID NO: 3435346 - RNA, 13 nt, Human
cacgugacagccg

SEQ ID NO: 3435347 - RNA, 20 nt, Human
cacgugagaaucccuggcaa

SEQ ID NO: 3435348 - RNA, 18 nt, Human
cacguggcauguggccug

SEQ ID NO: 3435349 - RNA, 20 nt, Human
cacguggcauguggccugug

SEQ ID NO: 3435350 - RNA, 22 nt, Human
cacguggcauguggccuguggc

SEQ ID NO: 3435351 - RNA, 17 nt, Human
cacguggccucuugagc

SEQ ID NO: 3435352 - RNA, 18 nt, Human
cacgugguaaaacacuug

SEQ ID NO: 3435353 - RNA, 23 nt, Human
cacgugguuggggcccugcccug

SEQ ID NO: 3435354 - RNA, 14 nt, Human
cacgugucuuccac

SEQ ID NO: 3435355 - RNA, 19 nt, Human
cacguguggaccccugcgg

SEQ ID NO: 3435356 - RNA, 16 nt, Human
cacgugugugacucag

SEQ ID NO: 3435357 - RNA, 16 nt, Human
cacguguuugugcugu

SEQ ID NO: 3435358 - RNA, 22 nt, Human
cacguguuuuauuccuguaugu

SEQ ID NO: 3435359 - RNA, 19 nt, Human
cacguucucacacccaccg

SEQ ID NO: 3435360 - RNA, 16 nt, Human
cacguugccucuacuu

SEQ ID NO: 3435361 - RNA, 12 nt, Human
cacguuucuaaa

SEQ ID NO: 3435362 - RNA, 14 nt, Human
cacguuucuaaagg

SEQ ID NO: 3435363 - RNA, 14 nt, Human
cacguuuugaaaua

SEQ ID NO: 3435364 - RNA, 15 nt, Human
cacguuuuguuuugu

SEQ ID NO: 3435365 - RNA, 21 nt, Human
cacuaaacuuggugcuuauug

SEQ ID NO: 3435366 - RNA, 21 nt, Human
cacuaaagcaugaaaugugaa

SEQ ID NO: 3435367 - RNA, 22 nt, Human
cacuaaagcaugaaaugugaau

SEQ ID NO: 3435368 - RNA, 15 nt, Human
cacuaaagccagccu

SEQ ID NO: 3435369 - RNA, 12 nt, Human
cacuaaauguua

SEQ ID NO: 3435370 - RNA, 20 nt, Human
cacuaaauguuaaagaugua

SEQ ID NO: 3435371 - RNA, 23 nt, Human
cacuaaauguuaaagauguagca

SEQ ID NO: 3435372 - RNA, 16 nt, Human
cacuaacaugauuugg

SEQ ID NO: 3435373 - RNA, 16 nt, Human
cacuaaccacgcugga

SEQ ID NO: 3435374 - RNA, 16 nt, Human
cacuaacgaaauauca

SEQ ID NO: 3435375 - RNA, 13 nt, Human
cacucugugccca

SEQ ID NO: 3435376 - RNA, 18 nt, Human
cacucugugcccaugggc

SEQ ID NO: 3435377 - RNA, 20 nt, Human
cacucuguuauuuagacuca

SEQ ID NO: 3435378 - RNA, 12 nt, Human
cacucuguuccu

SEQ ID NO: 3435379 - RNA, 14 nt, Human
cacucuuaugcugu

SEQ ID NO: 3435380 - RNA, 21 nt, Human
cacucuuaugcuguacccagu

SEQ ID NO: 3435381 - RNA, 17 nt, Human
cacucuuauugcccacg

SEQ ID NO: 3435382 - RNA, 11 nt, Human
cacucuuccag

SEQ ID NO: 3435383 - RNA, 21 nt, Human
cacucuuccagaaucccaaga

SEQ ID NO: 3435384 - RNA, 17 nt, Human
cacucuugaaaaaugca

SEQ ID NO: 3435385 - RNA, 14 nt, Human
cacucuuggagccu

SEQ ID NO: 3435386 - RNA, 21 nt, Human
cacucuuguuucucccgugcu

SEQ ID NO: 3435387 - RNA, 19 nt, Human
cacucuuuaccuuuauuga

SEQ ID NO: 3435388 - RNA, 16 nt, Human
cacucuuuauagugca

SEQ ID NO: 3435389 - RNA, 16 nt, Human
cacucuuucuccugcu

SEQ ID NO: 3435390 - RNA, 14 nt, Human
cacucuuucuuuca

SEQ ID NO: 3435391 - RNA, 15 nt, Human
cacucuuucuuucaa

SEQ ID NO: 3435392 - RNA, 13 nt, Human
cacugaaaaaaua

SEQ ID NO: 3435393 - RNA, 14 nt, Human
cacugaaaaacaac

SEQ ID NO: 3435394 - RNA, 14 nt, Human
cacugaaaaauuau

SEQ ID NO: 3435395 - RNA, 21 nt, Human
cacugaaaagguucuucaucc

SEQ ID NO: 3435396 - RNA, 22 nt, Human
cacugaaaagguucuucauccc

SEQ ID NO: 3435397 - RNA, 13 nt, Human
cacugaaaguuuu

SEQ ID NO: 3435398 - RNA, 16 nt, Human
cacugaaaguuuugua

SEQ ID NO: 3435399 - RNA, 21 nt, Human
cacugaaaguuuuguaaaaga

SEQ ID NO: 3435400 - RNA, 23 nt, Human
cacugaaaguuuuguaaaagaaa

SEQ ID NO: 3435401 - RNA, 16 nt, Human
cacugaaauaugugaa

SEQ ID NO: 3435402 - RNA, 17 nt, Human
cacugaaaucugucaag

SEQ ID NO: 3435403 - RNA, 21 nt, Human
cacugaaaugccuuacuuugu

SEQ ID NO: 3435404 - RNA, 12 nt, Human
cacugaagagga

SEQ ID NO: 3435405 - RNA, 13 nt, Human
cacugaagaggag

SEQ ID NO: 3435406 - RNA, 16 nt, Human
cacugaagaggaggag

SEQ ID NO: 3435407 - RNA, 14 nt, Human
cacugaagaguaug

SEQ ID NO: 3435408 - RNA, 17 nt, Human
cacugaagauagaagaa

SEQ ID NO: 3435409 - RNA, 13 nt, Human
cacugaagcuggg

SEQ ID NO: 3435410 - RNA, 17 nt, Human
cacugaagcugggauuc

SEQ ID NO: 3435411 - RNA, 14 nt, Human
cacugaauauuuau

SEQ ID NO: 3435412 - RNA, 15 nt, Human
cacugaaucuguaca

SEQ ID NO: 3435413 - RNA, 16 nt, Human
cacugaaucuguacag

SEQ ID NO: 3435414 - RNA, 15 nt, Human
cacugaauuaaucau

SEQ ID NO: 3435415 - RNA, 13 nt, Human
cacugacacaaag

SEQ ID NO: 3435416 - RNA, 22 nt, Human
cacugacaccuuugcaggcaug

SEQ ID NO: 3435417 - RNA, 11 nt, Human
cacugacagau

SEQ ID NO: 3435418 - RNA, 14 nt, Human
cacugacagccucc

SEQ ID NO: 3435419 - RNA, 23 nt, Human
cacugacauuguuggccaaagcc

SEQ ID NO: 3435420 - RNA, 13 nt, Human
cacugaccagaac

SEQ ID NO: 3435421 - RNA, 23 nt, Human
cacugaccauccacucuacccuc

SEQ ID NO: 3435422 - RNA, 19 nt, Human
cacugacccacagccucug

SEQ ID NO: 3435423 - RNA, 22 nt, Human
cacugaccuuggagagacacag

SEQ ID NO: 3435424 - RNA, 15 nt, Human
cacugacuacuggcu

SEQ ID NO: 3435425 - RNA, 19 nt, Human
cacugacuacuggcucuca

SEQ ID NO: 3435426 - RNA, 12 nt, Human
cacugacucugg

SEQ ID NO: 3435427 - RNA, 16 nt, Human
cacugacugcagggac

SEQ ID NO: 3435428 - RNA, 14 nt, Human
cacugacugggacc

SEQ ID NO: 3435429 - RNA, 19 nt, Human
cacugagaagauugugaau

SEQ ID NO: 3435430 - RNA, 18 nt, Human
cacugagaauguaagaac

SEQ ID NO: 3435431 - RNA, 23 nt, Human
cacugagacagcccgggcucugc

SEQ ID NO: 3435432 - RNA, 19 nt, Human
cacugagauaccagcgagg

SEQ ID NO: 3435433 - RNA, 14 nt, Human
cacugagcaaagca

SEQ ID NO: 3435434 - RNA, 16 nt, Human
cacugagcacuguuuu

SEQ ID NO: 3435435 - RNA, 16 nt, Human
cacugagcccccccaa

SEQ ID NO: 3435436 - RNA, 13 nt, Human
cacugaggaagaa

SEQ ID NO: 3435437 - RNA, 14 nt, Human
cacugaggaagaac

SEQ ID NO: 3435438 - RNA, 15 nt, Human
cacugaggaagaacg

SEQ ID NO: 3435439 - RNA, 17 nt, Human
cacugaggaagaacggg

SEQ ID NO: 3435440 - RNA, 15 nt, Human
cacugaggaccagcc

SEQ ID NO: 3435441 - RNA, 16 nt, Human
cacugaggcagggaag

SEQ ID NO: 3435442 - RNA, 20 nt, Human
cacugaggggggauccaguu

SEQ ID NO: 3435443 - RNA, 22 nt, Human
cacugaguuuuccauggcagga

SEQ ID NO: 3435444 - RNA, 16 nt, Human
cacugauauauuuaaa

SEQ ID NO: 3435445 - RNA, 17 nt, Human
cacugaugcuguucucu

SEQ ID NO: 3435446 - RNA, 15 nt, Human
cacugaugcuuagau

SEQ ID NO: 3435447 - RNA, 19 nt, Human
cacugauggaaacaaagug

SEQ ID NO: 3435448 - RNA, 19 nt, Human
cacugauggacaaggaggu

SEQ ID NO: 3435449 - RNA, 19 nt, Human
cacugauguuguguuuuua

SEQ ID NO: 3435450 - RNA, 16 nt, Human
cacugauuuggagaua

SEQ ID NO: 3435451 - RNA, 13 nt, Human
cacugcaacauga

SEQ ID NO: 3435452 - RNA, 17 nt, Human
cacugcaaccuccaccu

SEQ ID NO: 3435453 - RNA, 14 nt, Human
cacugcaaccuccg

SEQ ID NO: 3435454 - RNA, 19 nt, Human
cacugcaagagccuuggug

SEQ ID NO: 3435455 - RNA, 18 nt, Human
cacugcaaucauauguga

SEQ ID NO: 3435456 - RNA, 19 nt, Human
cacugcaauccugucuuuc

SEQ ID NO: 3435457 - RNA, 18 nt, Human
cacugcacaauaacuccu

SEQ ID NO: 3435458 - RNA, 19 nt, Human
cacugcacagagcucucca

SEQ ID NO: 3435459 - RNA, 19 nt, Human
cacugcacagugcaucuca

SEQ ID NO: 3435460 - RNA, 22 nt, Human
cacugcacagugcaucucagcc

SEQ ID NO: 3435461 - RNA, 15 nt, Human
cacugcaccaccgag

SEQ ID NO: 3435462 - RNA, 14 nt, Human
cacugcacccccuc

SEQ ID NO: 3435463 - RNA, 16 nt, Human
cacugcacccccuccu

SEQ ID NO: 3435464 - RNA, 14 nt, Human
cacugcaccgggcc

SEQ ID NO: 3435465 - RNA, 16 nt, Human
cacugcaccgggccac

SEQ ID NO: 3435466 - RNA, 19 nt, Human
cacugcaccgggccacaga

SEQ ID NO: 3435467 - RNA, 18 nt, Human
cacugcacguuuucaucu

SEQ ID NO: 3435468 - RNA, 15 nt, Human
cacugcacuccagcc

SEQ ID NO: 3435469 - RNA, 16 nt, Human
cacugcacuccagccu

SEQ ID NO: 3435470 - RNA, 18 nt, Human
cacugcacuccagccugg

SEQ ID NO: 3435471 - RNA, 18 nt, Human
cacugcacucuagccgga

SEQ ID NO: 3435472 - RNA, 19 nt, Human
cacugcagccucaaccucc

SEQ ID NO: 3435473 - RNA, 22 nt, Human
cacugcagccucaaccuccugg

SEQ ID NO: 3435474 - RNA, 23 nt, Human
cacugcagccucaaccuccuggg

SEQ ID NO: 3435475 - RNA, 23 nt, Human
cacugcagccuccgcuucccugg

SEQ ID NO: 3435476 - RNA, 14 nt, Human
cacugcagccucga

SEQ ID NO: 3435477 - RNA, 22 nt, Human
cacugcagccucgaacuccugg

SEQ ID NO: 3435478 - RNA, 16 nt, Human
cacugcaggccccgcu

SEQ ID NO: 3435479 - RNA, 13 nt, Human
cacugcaggggcc

SEQ ID NO: 3435480 - RNA, 18 nt, Human
cacugcaugagcuuuuau

SEQ ID NO: 3435481 - RNA, 19 nt, Human
cacugcauggcucccacag

SEQ ID NO: 3435482 - RNA, 11 nt, Human
cacugccacac

SEQ ID NO: 3435483 - RNA, 12 nt, Human
cacugccacugg

SEQ ID NO: 3435484 - RNA, 12 nt, Human
cacugccagcag

SEQ ID NO: 3435485 - RNA, 13 nt, Human
cacugccagcagc

SEQ ID NO: 3435486 - RNA, 20 nt, Human
cacugccagcagcagcaggu

SEQ ID NO: 3435487 - RNA, 22 nt, Human
cacugccagcagcagcagguga

SEQ ID NO: 3435488 - RNA, 22 nt, Human
cacugccagcauuucccuuccu

SEQ ID NO: 3435489 - RNA, 16 nt, Human
cacugccaggagggac

SEQ ID NO: 3435490 - RNA, 22 nt, Human
cacugccaggagggacaaagga

SEQ ID NO: 3435491 - RNA, 21 nt, Human
cacugccaggccagccuccga

SEQ ID NO: 3435492 - RNA, 21 nt, Human
cacugccauaaaacauuaaga

SEQ ID NO: 3435493 - RNA, 18 nt, Human
cacugccauaugauuuac

SEQ ID NO: 3435494 - RNA, 17 nt, Human
cacugccaucugaugcc

SEQ ID NO: 3435495 - RNA, 19 nt, Human
cacugccaugcagggccuc

SEQ ID NO: 3435496 - RNA, 12 nt, Human
ccacagcccugu

SEQ ID NO: 3435497 - RNA, 16 nt, Human
ccacagcccugucagc

SEQ ID NO: 3435498 - RNA, 20 nt, Human
ccacagcccuuuugucucug

SEQ ID NO: 3435499 - RNA, 18 nt, Human
ccacagcgagggcagcug

SEQ ID NO: 3435500 - RNA, 20 nt, Human
ccacagcgagggcagcugcu

SEQ ID NO: 3435501 - RNA, 19 nt, Human
ccacagcgcuggccgggac

SEQ ID NO: 3435502 - RNA, 23 nt, Human
ccacagcgcuggccgggaccccg

SEQ ID NO: 3435503 - RNA, 15 nt, Human
ccacagcuccuuuuc

SEQ ID NO: 3435504 - RNA, 16 nt, Human
ccacagcuccuuuucc

SEQ ID NO: 3435505 - RNA, 16 nt, Human
ccacagcugagaaugu

SEQ ID NO: 3435506 - RNA, 14 nt, Human
ccacagcugccucu

SEQ ID NO: 3435507 - RNA, 12 nt, Human
ccacagcugcug

SEQ ID NO: 3435508 - RNA, 13 nt, Human
ccacagcugcugg

SEQ ID NO: 3435509 - RNA, 16 nt, Human
ccacagcugcuggaga

SEQ ID NO: 3435510 - RNA, 11 nt, Human
ccacagcuucc

SEQ ID NO: 3435511 - RNA, 14 nt, Human
ccacaggaaagugu

SEQ ID NO: 3435512 - RNA, 20 nt, Human
ccacaggaaccacaagacug

SEQ ID NO: 3435513 - RNA, 22 nt, Human
ccacaggaggcaagcaagcucu

SEQ ID NO: 3435514 - RNA, 18 nt, Human
ccacaggcaugucccaug

SEQ ID NO: 3435515 - RNA, 16 nt, Human
ccacaggcccuuccuc

SEQ ID NO: 3435516 - RNA, 17 nt, Human
ccacaggcccuuccucu

SEQ ID NO: 3435517 - RNA, 23 nt, Human
ccacaggcccuuccucuccacug

SEQ ID NO: 3435518 - RNA, 21 nt, Human
ccacaggcccuuuccucaggc

SEQ ID NO: 3435519 - RNA, 22 nt, Human
ccacaggcccuuuccucaggca

SEQ ID NO: 3435520 - RNA, 15 nt, Human
ccacaggccucccug

SEQ ID NO: 3435521 - RNA, 16 nt, Human
cacugcccgagcuggu

SEQ ID NO: 3435522 - RNA, 17 nt, Human
cacugcccgcacacccu

SEQ ID NO: 3435523 - RNA, 18 nt, Human
cacugcccgcacacccuc

SEQ ID NO: 3435524 - RNA, 19 nt, Human
cacugcccugguggcccuc

SEQ ID NO: 3435525 - RNA, 13 nt, Human
cacugcccuucuc

SEQ ID NO: 3435526 - RNA, 12 nt, Human
cacugccucagg

SEQ ID NO: 3435527 - RNA, 13 nt, Human
cacugccucaggu

SEQ ID NO: 3435528 - RNA, 14 nt, Human
cacugccucagguu

SEQ ID NO: 3435529 - RNA, 16 nt, Human
cacugccucagguucc

SEQ ID NO: 3435530 - RNA, 17 nt, Human
cacugccucagguuccu

SEQ ID NO: 3435531 - RNA, 23 nt, Human
cacugccucgggaaccucacucu

SEQ ID NO: 3435532 - RNA, 12 nt, Human
cacugccucugc

SEQ ID NO: 3435533 - RNA, 10 nt, Human
cacugccugc

SEQ ID NO: 3435534 - RNA, 22 nt, Human
cacugccugcagaggucugugc

SEQ ID NO: 3435535 - RNA, 23 nt, Human
cacugccugcagaggucugugcu

SEQ ID NO: 3435536 - RNA, 16 nt, Human
cacugccugccuuaag

SEQ ID NO: 3435537 - RNA, 13 nt, Human
cacugccugcucc

SEQ ID NO: 3435538 - RNA, 12 nt, Human
cacugccugggc

SEQ ID NO: 3435539 - RNA, 19 nt, Human
cacugccugggcugacccc

SEQ ID NO: 3435540 - RNA, 22 nt, Human
cacugccuucgauacaccgggc

SEQ ID NO: 3435541 - RNA, 15 nt, Human
cacugcgccacugcu

SEQ ID NO: 3435542 - RNA, 18 nt, Human
cacugcgcuuuauuuucu

SEQ ID NO: 3435543 - RNA, 19 nt, Human
cacugcggggcuuggcuga

SEQ ID NO: 3435544 - RNA, 17 nt, Human
cacugcuaggugggcca

SEQ ID NO: 3435545 - RNA, 19 nt, Human
cacugcucaagaagacaug

SEQ ID NO: 3435546 - RNA, 22 nt, Human
cacugcucaagaagacauggag

SEQ ID NO: 3435547 - RNA, 13 nt, Human
cacugcucacacu

SEQ ID NO: 3435548 - RNA, 11 nt, Human
cacugcucccu

SEQ ID NO: 3435549 - RNA, 21 nt, Human
cacugcucccuaagccagccu

SEQ ID NO: 3435550 - RNA, 23 nt, Human
cacugcucccuaagccagccugg

SEQ ID NO: 3435551 - RNA, 19 nt, Human
cacugcucccugaagccag

SEQ ID NO: 3435552 - RNA, 20 nt, Human
cacugcucccugaagccagc

SEQ ID NO: 3435553 - RNA, 21 nt, Human
cacugcucccugaagccagcc

SEQ ID NO: 3435554 - RNA, 22 nt, Human
cacugcucccugaagccagccu

SEQ ID NO: 3435555 - RNA, 13 nt, Human
cacugcucucacc

SEQ ID NO: 3435556 - RNA, 20 nt, Human
cacugcugauauuuucucua

SEQ ID NO: 3435557 - RNA, 18 nt, Human
cacugcugcaaggccuuu

SEQ ID NO: 3435558 - RNA, 17 nt, Human
cacugcuggagaggccc

SEQ ID NO: 3435559 - RNA, 12 nt, Human
cacugcuggcug

SEQ ID NO: 3435560 - RNA, 13 nt, Human
cacugcuggcugc

SEQ ID NO: 3435561 - RNA, 16 nt, Human
cacugcuggcugccuu

SEQ ID NO: 3435562 - RNA, 21 nt, Human
cacugcuggcugccuuagaac

SEQ ID NO: 3435563 - RNA, 17 nt, Human
cacugcugugaacaagu

SEQ ID NO: 3435564 - RNA, 18 nt, Human
cacugcuguuauauuuca

SEQ ID NO: 3435565 - RNA, 13 nt, Human
cacugcuuaacuu

SEQ ID NO: 3435566 - RNA, 15 nt, Human
cacugcuuccaguga

SEQ ID NO: 3435567 - RNA, 19 nt, Human
cacugcuuccagugaggcu

SEQ ID NO: 3435568 - RNA, 15 nt, Human
cacugcuugaggaaa

SEQ ID NO: 3435569 - RNA, 18 nt, Human
cacugcuuuuggccugga

SEQ ID NO: 3435570 - RNA, 18 nt, Human
cacuggaaaggggagagc

SEQ ID NO: 3435571 - RNA, 23 nt, Human
cacuggaaaggggagagccugcu

SEQ ID NO: 3435572 - RNA, 17 nt, Human
cacuggaacacuaauga

SEQ ID NO: 3435573 - RNA, 19 nt, Human
cacuggacuccggcccucc

SEQ ID NO: 3435574 - RNA, 17 nt, Human
cacuggacugaccuggu

SEQ ID NO: 3435575 - RNA, 10 nt, Human
cacuggagca

SEQ ID NO: 3435576 - RNA, 11 nt, Human
cacuggagccc

SEQ ID NO: 3435577 - RNA, 20 nt, Human
cacuggagguugaagccaag

SEQ ID NO: 3435578 - RNA, 23 nt, Human
cacuggagugcagggaggagagg

SEQ ID NO: 3435579 - RNA, 23 nt, Human
cacuggaugcaaagaaaaucaga

SEQ ID NO: 3435580 - RNA, 14 nt, Human
cacuggcauugucc

SEQ ID NO: 3435581 - RNA, 22 nt, Human
cacuggcauugucccugugccu

SEQ ID NO: 3435582 - RNA, 16 nt, Human
cacuggccaccaggcu

SEQ ID NO: 3435583 - RNA, 21 nt, Human
cacuggccaccaggcuggcgc

SEQ ID NO: 3435584 - RNA, 22 nt, Human
cacuggccaccaggcuggcgca

SEQ ID NO: 3435585 - RNA, 13 nt, Human
cacuggccccacc

SEQ ID NO: 3435586 - RNA, 22 nt, Human
cacuggccccuagaaucagccu

SEQ ID NO: 3435587 - RNA, 20 nt, Human
cacuggccuucugaugaaau

SEQ ID NO: 3435588 - RNA, 13 nt, Human
cacuggcgaggag

SEQ ID NO: 3435589 - RNA, 23 nt, Human
cacuggcgcaucauaugcaguga

SEQ ID NO: 3435590 - RNA, 23 nt, Human
cacuggcguagaaguuuuuguac

SEQ ID NO: 3435591 - RNA, 17 nt, Human
cacuggcucacccaguc

SEQ ID NO: 3435592 - RNA, 12 nt, Human
cacuggcucucc

SEQ ID NO: 3435593 - RNA, 17 nt, Human
cacuggcucuccaagug

SEQ ID NO: 3435594 - RNA, 15 nt, Human
cacuggcucuccugg

SEQ ID NO: 3435595 - RNA, 17 nt, Human
cacuggcucucuccagg

SEQ ID NO: 3435596 - RNA, 18 nt, Human
cacuggcucucuccagga

SEQ ID NO: 3435597 - RNA, 21 nt, Human
cacuggcugagcggaugcauc

SEQ ID NO: 3435598 - RNA, 16 nt, Human
cacuggcugccuccac

SEQ ID NO: 3435599 - RNA, 18 nt, Human
cacuggcugccuccacuc

SEQ ID NO: 3435600 - RNA, 20 nt, Human
cacuggcugccuccacuccc

SEQ ID NO: 3435601 - RNA, 21 nt, Human
cacuggcugccuccacuccca

SEQ ID NO: 3435602 - RNA, 13 nt, Human
cacuggcuguggg

SEQ ID NO: 3435603 - RNA, 13 nt, Human
cacugggaaacag

SEQ ID NO: 3435604 - RNA, 19 nt, Human
cacugggagaaaugaaaaa

SEQ ID NO: 3435605 - RNA, 18 nt, Human
cacugggaggcuccccuu

SEQ ID NO: 3435606 - RNA, 20 nt, Human
cacugggaggcuccccuucu

SEQ ID NO: 3435607 - RNA, 11 nt, Human
cacugggccaa

SEQ ID NO: 3435608 - RNA, 20 nt, Human
cacugggccaauucaauaca

SEQ ID NO: 3435609 - RNA, 16 nt, Human
cacugggcucccgggc

SEQ ID NO: 3435610 - RNA, 23 nt, Human
cacugggcuuggggaccagagcu

SEQ ID NO: 3435611 - RNA, 16 nt, Human
cacuggggauugggcc

SEQ ID NO: 3435612 - RNA, 14 nt, Human
cacuggggcacuug

SEQ ID NO: 3435613 - RNA, 19 nt, Human
cacuggggcaggggccggg

SEQ ID NO: 3435614 - RNA, 15 nt, Human
cacugggggagggga

SEQ ID NO: 3435615 - RNA, 15 nt, Human
cacugggguccuggg

SEQ ID NO: 3435616 - RNA, 22 nt, Human
cacugggugcccaagcucagaa

SEQ ID NO: 3435617 - RNA, 22 nt, Human
cacugggugguggccugguccc

SEQ ID NO: 3435618 - RNA, 15 nt, Human
cacuggguugacuuu

SEQ ID NO: 3435619 - RNA, 21 nt, Human
cacugguacuuagaguuucug

SEQ ID NO: 3435620 - RNA, 22 nt, Human
cacugguacuuagaguuucugu

SEQ ID NO: 3435621 - RNA, 20 nt, Human
cacugguagaccaaaauaaa

SEQ ID NO: 3435622 - RNA, 21 nt, Human
cacugguagguugggacacca

SEQ ID NO: 3435623 - RNA, 22 nt, Human
cacugguagguugggacaccag

SEQ ID NO: 3435624 - RNA, 16 nt, Human
cacugguauuccugcc

SEQ ID NO: 3435625 - RNA, 15 nt, Human
cacuggucugcuguc

SEQ ID NO: 3435626 - RNA, 13 nt, Human
cacugguggcccg

SEQ ID NO: 3435627 - RNA, 22 nt, Human
cacugguggggauaggccagcc

SEQ ID NO: 3435628 - RNA, 15 nt, Human
cacugguugcacuua

SEQ ID NO: 3435629 - RNA, 18 nt, Human
cacugguuuguucccugu

SEQ ID NO: 3435630 - RNA, 12 nt, Human
cacuguaaaaug

SEQ ID NO: 3435631 - RNA, 18 nt, Human
cacuguaaaaugaaauua

SEQ ID NO: 3435632 - RNA, 20 nt, Human
cacuguacccagucucaaag

SEQ ID NO: 3435633 - RNA, 15 nt, Human
cacuguacuugcucu

SEQ ID NO: 3435634 - RNA, 18 nt, Human
cacuguagaaugauuuca

SEQ ID NO: 3435635 - RNA, 19 nt, Human
cacuguaguaaauaaugcu

SEQ ID NO: 3435636 - RNA, 20 nt, Human
cacuguaguucuaagacuca

SEQ ID NO: 3435637 - RNA, 17 nt, Human
cacuguauaaauaggag

SEQ ID NO: 3435638 - RNA, 15 nt, Human
cacuguaugagugga

SEQ ID NO: 3435639 - RNA, 20 nt, Human
cacuguauguuauagaacuu

SEQ ID NO: 3435640 - RNA, 18 nt, Human
cacuguauuacauaaaua

SEQ ID NO: 3435641 - RNA, 17 nt, Human
cacuguauuuguaucuc

SEQ ID NO: 3435642 - RNA, 14 nt, Human
cacugucaagauga

SEQ ID NO: 3435643 - RNA, 20 nt, Human
cacugucacccuccaccucu

SEQ ID NO: 3435644 - RNA, 16 nt, Human
cacugucacuuugcuc

SEQ ID NO: 3435645 - RNA, 20 nt, Human
cacugucacuuugcucuggg

SEQ ID NO: 3435646 - RNA, 15 nt, Human
cacugucaggaagaa

SEQ ID NO: 3435647 - RNA, 14 nt, Human
cacugucccuccug

SEQ ID NO: 3435648 - RNA, 22 nt, Human
cacuguccuccacacaagggaa

SEQ ID NO: 3435649 - RNA, 11 nt, Human
cacuguccugc

SEQ ID NO: 3435650 - RNA, 13 nt, Human
cacuguccugcuc

SEQ ID NO: 3435651 - RNA, 16 nt, Human
cacuguccugcuccac

SEQ ID NO: 3435652 - RNA, 14 nt, Human
cacuguccugggcg

SEQ ID NO: 3435653 - RNA, 12 nt, Human
cacugucucagu

SEQ ID NO: 3435654 - RNA, 18 nt, Human
cacugucugagaguuuag

SEQ ID NO: 3435655 - RNA, 10 nt, Human
cacugucugu

SEQ ID NO: 3435656 - RNA, 14 nt, Human
cacugucuucuuca

SEQ ID NO: 3435657 - RNA, 18 nt, Human
cacugucuuuaauucugu

SEQ ID NO: 3435658 - RNA, 13 nt, Human
cacugugaagagc

SEQ ID NO: 3435659 - RNA, 12 nt, Human
cacugugacaca

SEQ ID NO: 3435660 - RNA, 15 nt, Human
cacugugacacacua

SEQ ID NO: 3435661 - RNA, 16 nt, Human
ccaggcauugccaagg

SEQ ID NO: 3435662 - RNA, 20 nt, Human
ccaggcauuuagcccucaca

SEQ ID NO: 3435663 - RNA, 13 nt, Human
ccaggccaccucc

SEQ ID NO: 3435664 - RNA, 12 nt, Human
ccaggccagagg

SEQ ID NO: 3435665 - RNA, 14 nt, Human
ccaggccagaggga

SEQ ID NO: 3435666 - RNA, 23 nt, Human
ccagagaacccagcccacccccg

SEQ ID NO: 3435667 - RNA, 23 nt, Human
ccagagaagcaucggagggaauu

SEQ ID NO: 3435668 - RNA, 20 nt, Human
ccagagaagccccuucccca

SEQ ID NO: 3435669 - RNA, 18 nt, Human
ccagagaagugacaggga

SEQ ID NO: 3435670 - RNA, 20 nt, Human
ccagagaagugacagggaag

SEQ ID NO: 3435671 - RNA, 14 nt, Human
ccagagacaggaaa

SEQ ID NO: 3435672 - RNA, 22 nt, Human
ccagagacauacuugaagggcc

SEQ ID NO: 3435673 - RNA, 19 nt, Human
ccagagaccguccucaccc

SEQ ID NO: 3435674 - RNA, 21 nt, Human
ccagagaccguccucaccccu

SEQ ID NO: 3435675 - RNA, 19 nt, Human
ccagagacggaagccuuuu

SEQ ID NO: 3435676 - RNA, 14 nt, Human
ccagagacuuuagg

SEQ ID NO: 3435677 - RNA, 16 nt, Human
ccagagagaagagccc

SEQ ID NO: 3435678 - RNA, 20 nt, Human
ccagagagaagagccccacu

SEQ ID NO: 3435679 - RNA, 18 nt, Human
ccagagagcaacucugag

SEQ ID NO: 3435680 - RNA, 20 nt, Human
ccagagagcaacucugagau

SEQ ID NO: 3435681 - RNA, 19 nt, Human
ccagagagcccgaggaggu

SEQ ID NO: 3435682 - RNA, 20 nt, Human
ccagagagcccgaggaggug

SEQ ID NO: 3435683 - RNA, 21 nt, Human
ccagagagccuggugcugcug

SEQ ID NO: 3435684 - RNA, 16 nt, Human
ccagagaggaaucaga

SEQ ID NO: 3435685 - RNA, 13 nt, Human
ccagagagggugg

SEQ ID NO: 3435686 - RNA, 14 nt, Human
ccagagaggguggu

SEQ ID NO: 3435687 - RNA, 21 nt, Human
ccagagaggguggugaccucu

SEQ ID NO: 3435688 - RNA, 15 nt, Human
ccagagaguccucug

SEQ ID NO: 3435689 - RNA, 13 nt, Human
ccagagauccaaa

SEQ ID NO: 3435690 - RNA, 20 nt, Human
ccagagauccaaaagaagcc

SEQ ID NO: 3435691 - RNA, 16 nt, Human
ccagagaugccuccac

SEQ ID NO: 3435692 - RNA, 18 nt, Human
ccagagaugccuccaccg

SEQ ID NO: 3435693 - RNA, 23 nt, Human
ccagagaugccuccaccgcugcc

SEQ ID NO: 3435694 - RNA, 16 nt, Human
ccagagaugggacugg

SEQ ID NO: 3435695 - RNA, 15 nt, Human
ccagagauucauuuu

SEQ ID NO: 3435696 - RNA, 17 nt, Human
ccagagauucauuuucu

SEQ ID NO: 3435697 - RNA, 20 nt, Human
ccagagcaagcuuuuuuauu

SEQ ID NO: 3435698 - RNA, 12 nt, Human
ccagagcacugu

SEQ ID NO: 3435699 - RNA, 17 nt, Human
ccagagcagaugcagag

SEQ ID NO: 3435700 - RNA, 14 nt, Human
ccagagcaggaagc

SEQ ID NO: 3435701 - RNA, 21 nt, Human
ccagagcauuacgugagccag

SEQ ID NO: 3435702 - RNA, 21 nt, Human
ccagagcauuccagucaggcu

SEQ ID NO: 3435703 - RNA, 13 nt, Human
ccagagccacaca

SEQ ID NO: 3435704 - RNA, 19 nt, Human
ccagagccacacaugggca

SEQ ID NO: 3435705 - RNA, 13 nt, Human
ccagagccacagu

SEQ ID NO: 3435706 - RNA, 23 nt, Human
ccagagccaggggggugaggagc

SEQ ID NO: 3435707 - RNA, 15 nt, Human
ccagagccauggacu

SEQ ID NO: 3435708 - RNA, 14 nt, Human
ccagagccccacac

SEQ ID NO: 3435709 - RNA, 23 nt, Human
ccagagccccacagccccaucug

SEQ ID NO: 3435710 - RNA, 22 nt, Human
ccagagcccccgggaagggcgc

SEQ ID NO: 3435711 - RNA, 20 nt, Human
ccagagccucaaaugagaaa

SEQ ID NO: 3435712 - RNA, 16 nt, Human
ccagagccuggggcuc

SEQ ID NO: 3435713 - RNA, 22 nt, Human
ccagagcggaggcugugugccu

SEQ ID NO: 3435714 - RNA, 12 nt, Human
ccagagcugcca

SEQ ID NO: 3435715 - RNA, 22 nt, Human
cagaaaguaauuucuucucaaa

SEQ ID NO: 3435716 - RNA, 12 nt, Human
cagaaagugccu

SEQ ID NO: 3435717 - RNA, 19 nt, Human
cagaaagugccugacacac

SEQ ID NO: 3435718 - RNA, 16 nt, Human
cagaaagugccuuuca

SEQ ID NO: 3435719 - RNA, 19 nt, Human
cagaaagugccuuucagga

SEQ ID NO: 3435720 - RNA, 22 nt, Human
cagaaaguggccaugccacccu

SEQ ID NO: 3435721 - RNA, 23 nt, Human
cagaaaguggccaugccacccug

SEQ ID NO: 3435722 - RNA, 17 nt, Human
cagaaaguggugcucag

SEQ ID NO: 3435723 - RNA, 21 nt, Human
cagaaaguggugcucaguugu

SEQ ID NO: 3435724 - RNA, 16 nt, Human
cagaaagugugcuuua

SEQ ID NO: 3435725 - RNA, 11 nt, Human
cagaaaguuau

SEQ ID NO: 3435726 - RNA, 16 nt, Human
cagaaaguuauugaua

SEQ ID NO: 3435727 - RNA, 19 nt, Human
cagaaauacagauaaauga

SEQ ID NO: 3435728 - RNA, 23 nt, Human
cagaaauacagauuuugauagca

SEQ ID NO: 3435729 - RNA, 19 nt, Human
cagaaauacauauuuccaa

SEQ ID NO: 3435730 - RNA, 20 nt, Human
cagaaauauaacacauuuuu

SEQ ID NO: 3435731 - RNA, 21 nt, Human
cagaaauauaacacauuuuuu

SEQ ID NO: 3435732 - RNA, 22 nt, Human
cagaaauauauauacauaugua

SEQ ID NO: 3435733 - RNA, 21 nt, Human
cagaaaugcugccugccuguc

SEQ ID NO: 3435734 - RNA, 17 nt, Human
cagaaaugcugcuggcc

SEQ ID NO: 3435735 - RNA, 23 nt, Human
cagaaauggugagauguauguuu

SEQ ID NO: 3435736 - RNA, 16 nt, Human
cagaaauuagccgggc

SEQ ID NO: 3435737 - RNA, 16 nt, Human
cagaaauucaauuugg

SEQ ID NO: 3435738 - RNA, 20 nt, Human
cagaaauucaauuuggauuu

SEQ ID NO: 3435739 - RNA, 19 nt, Human
cagaaauucuguuuuuaaa

SEQ ID NO: 3435740 - RNA, 20 nt, Human
cagaaauucuguuuuuaaaa

SEQ ID NO: 3435741 - RNA, 20 nt, Human
cagaaauuggaacagaaugu

SEQ ID NO: 3435742 - RNA, 11 nt, Human
cagaaauuggu

SEQ ID NO: 3435743 - RNA, 15 nt, Human
cagaaauugguaccu

SEQ ID NO: 3435744 - RNA, 17 nt, Human
cagaaauugguaccuug

SEQ ID NO: 3435745 - RNA, 21 nt, Human
cagaaauuguauauuguaauu

SEQ ID NO: 3435746 - RNA, 22 nt, Human
cagaaauuuaauucauguuucu

SEQ ID NO: 3435747 - RNA, 23 nt, Human
cagaaauuuaauucauguuucuu

SEQ ID NO: 3435748 - RNA, 12 nt, Human
cagaacaaauga

SEQ ID NO: 3435749 - RNA, 16 nt, Human
cagaacaaaugaagac

SEQ ID NO: 3435750 - RNA, 15 nt, Human
cagaacacauaauuc

SEQ ID NO: 3435751 - RNA, 19 nt, Human
cagaacacauuucaaauga

SEQ ID NO: 3435752 - RNA, 16 nt, Human
cagaacagcuucaggu

SEQ ID NO: 3435753 - RNA, 18 nt, Human
cagaacagcuucagguua

SEQ ID NO: 3435754 - RNA, 18 nt, Human
cagaacagcuucauguuc

SEQ ID NO: 3435755 - RNA, 13 nt, Human
cagaacaggguca

SEQ ID NO: 3435756 - RNA, 14 nt, Human
cagaacagggucau

SEQ ID NO: 3435757 - RNA, 20 nt, Human
cagaacagguguuggugaca

SEQ ID NO: 3435758 - RNA, 14 nt, Human
cagaacaguaucuu

SEQ ID NO: 3435759 - RNA, 14 nt, Human
cagaacaguaugaa

SEQ ID NO: 3435760 - RNA, 11 nt, Human
cagaacaguga

SEQ ID NO: 3435761 - RNA, 12 nt, Human
cagaacagugau

SEQ ID NO: 3435762 - RNA, 17 nt, Human
cagaacagugguggcaa

SEQ ID NO: 3435763 - RNA, 19 nt, Human
cagaacaguuaagcagccg

SEQ ID NO: 3435764 - RNA, 22 nt, Human
cagaacaguuaagcagccgcca

SEQ ID NO: 3435765 - RNA, 16 nt, Human
cagaacaguuuguaca

SEQ ID NO: 3435766 - RNA, 16 nt, Human
cagaacauagacagaa

SEQ ID NO: 3435767 - RNA, 19 nt, Human
cagaacauagacagaagaa

SEQ ID NO: 3435768 - RNA, 21 nt, Human
cagaacauagacagaagaaac

SEQ ID NO: 3435769 - RNA, 16 nt, Human
cagaacaucauuagaa

SEQ ID NO: 3435770 - RNA, 16 nt, Human
cagaaccaaagcucaa

SEQ ID NO: 3435771 - RNA, 16 nt, Human
cagaaccacacuugaa

SEQ ID NO: 3435772 - RNA, 14 nt, Human
cagaaccacagggc

SEQ ID NO: 3435773 - RNA, 12 nt, Human
cagaacccaggg

SEQ ID NO: 3435774 - RNA, 20 nt, Human
cagaacccagggcucugccc

SEQ ID NO: 3435775 - RNA, 23 nt, Human
cagaaccccuacaugaaacagaa

SEQ ID NO: 3435776 - RNA, 22 nt, Human
cagaacccuggugaggaagcuc

SEQ ID NO: 3435777 - RNA, 22 nt, Human
cagaacccuuggagccaaugga

SEQ ID NO: 3435778 - RNA, 14 nt, Human
cagaacccuuggcu

SEQ ID NO: 3435779 - RNA, 12 nt, Human
cagaaccucuuc

SEQ ID NO: 3435780 - RNA, 13 nt, Human
cagaaccuggagg

SEQ ID NO: 3435781 - RNA, 20 nt, Human
cagaaccuggagggcuagaa

SEQ ID NO: 3435782 - RNA, 14 nt, Human
cagaaccuguccuu

SEQ ID NO: 3435783 - RNA, 21 nt, Human
cagaacucaaauggggccaga

SEQ ID NO: 3435784 - RNA, 21 nt, Human
cagaacucgguguccccacca

SEQ ID NO: 3435785 - RNA, 13 nt, Human
cagaacucugugu

SEQ ID NO: 3435786 - RNA, 19 nt, Human
cagaacucuuaaaaauguu

SEQ ID NO: 3435787 - RNA, 22 nt, Human
cagaacucuuccuccaaggaca

SEQ ID NO: 3435788 - RNA, 15 nt, Human
cagaacucuuucaaa

SEQ ID NO: 3435789 - RNA, 22 nt, Human
cagaacugaaccggcuuuacca

SEQ ID NO: 3435790 - RNA, 13 nt, Human
cagaacugagcuc

SEQ ID NO: 3435791 - RNA, 24 nt, Human
cagaacugagcuccucugggcagg

SEQ ID NO: 3435792 - RNA, 21 nt, Human
cagaacugccauuauuuucug

SEQ ID NO: 3435793 - RNA, 16 nt, Human
cagaacugugccacaa

SEQ ID NO: 3435794 - RNA, 16 nt, Human
cagaacuucagaaaga

SEQ ID NO: 3435795 - RNA, 14 nt, Human
cagaacuucccuga

SEQ ID NO: 3435796 - RNA, 15 nt, Human
cagaacuugaaugug

SEQ ID NO: 3435797 - RNA, 16 nt, Human
cagaacuugaaugugu

SEQ ID NO: 3435798 - RNA, 17 nt, Human
cagaacuugcugcuguc

SEQ ID NO: 3435799 - RNA, 18 nt, Human
cagaacuugcugcugucu

SEQ ID NO: 3435800 - RNA, 22 nt, Human
cagaagaaaauagaauugacau

SEQ ID NO: 3435801 - RNA, 14 nt, Human
cagaagaaacaagg

SEQ ID NO: 3435802 - RNA, 16 nt, Human
cagaagaaaggaacau

SEQ ID NO: 3435803 - RNA, 15 nt, Human
cagaagaaauaaaua

SEQ ID NO: 3435804 - RNA, 17 nt, Human
cagaagaaauaaauaua

SEQ ID NO: 3435805 - RNA, 17 nt, Human
cagaagaagagaagcug

SEQ ID NO: 3435806 - RNA, 19 nt, Human
cagaagaagagaagcugcu

SEQ ID NO: 3435807 - RNA, 21 nt, Human
cagaagaagagaagcugcuga

SEQ ID NO: 3435808 - RNA, 15 nt, Human
cagaagaaggcagca

SEQ ID NO: 3435809 - RNA, 15 nt, Human
cagaagaauauucag

SEQ ID NO: 3435810 - RNA, 23 nt, Human
cccaccgggcugggagcucugca

SEQ ID NO: 3435811 - RNA, 18 nt, Human
cccaccgguccagcuggc

SEQ ID NO: 3435812 - RNA, 17 nt, Human
cccaccguccgcccugc

SEQ ID NO: 3435813 - RNA, 19 nt, Human
cccaccguccgcccugcuc

SEQ ID NO: 3435814 - RNA, 19 nt, Human
cccaccguggaggaggaag

SEQ ID NO: 3435815 - RNA, 20 nt, Human
cccaccguggaggaggaagg

SEQ ID NO: 3435816 - RNA, 12 nt, Human
cccaccucagcc

SEQ ID NO: 3435817 - RNA, 14 nt, Human
cccaccucagccuc

SEQ ID NO: 3435818 - RNA, 12 nt, Human
cccaccuccagc

SEQ ID NO: 3435819 - RNA, 13 nt, Human
cccaccuccagcc

SEQ ID NO: 3435820 - RNA, 18 nt, Human
cccaccuccagcccggga

SEQ ID NO: 3435821 - RNA, 14 nt, Human
cccaccuccaggcu

SEQ ID NO: 3435822 - RNA, 19 nt, Human
cccaccucccccacuccca

SEQ ID NO: 3435823 - RNA, 13 nt, Human
cccaccucccugc

SEQ ID NO: 3435824 - RNA, 16 nt, Human
cccaccucccugccca

SEQ ID NO: 3435825 - RNA, 17 nt, Human
cccaccucucucacucc

SEQ ID NO: 3435826 - RNA, 15 nt, Human
cccaccucugugacc

SEQ ID NO: 3435827 - RNA, 13 nt, Human
cccaccugagcuu

SEQ ID NO: 3435828 - RNA, 16 nt, Human
cccaccugcagcuccc

SEQ ID NO: 3435829 - RNA, 20 nt, Human
cccaccugcagggcugcccu

SEQ ID NO: 3435830 - RNA, 23 nt, Human
cccaccugccacuaggcugggug

SEQ ID NO: 3435831 - RNA, 12 nt, Human
cccaccuggcca

SEQ ID NO: 3435832 - RNA, 16 nt, Human
cccaccuggccucugc

SEQ ID NO: 3435833 - RNA, 21 nt, Human
cccaccuggccucugcacucc

SEQ ID NO: 3435834 - RNA, 22 nt, Human
cccaccugucaaacaaagccag

SEQ ID NO: 3435835 - RNA, 23 nt, Human
cccaccugucaaacaaagccaga

SEQ ID NO: 3435836 - RNA, 19 nt, Human
cccaccuucaauuccuggg

SEQ ID NO: 3435837 - RNA, 17 nt, Human
cccaccuuggcugcagg

SEQ ID NO: 3435838 - RNA, 20 nt, Human
cccaccuuguuggagccugc

SEQ ID NO: 3435839 - RNA, 17 nt, Human
cccacgaaacugcccug

SEQ ID NO: 3435840 - RNA, 20 nt, Human
cccacgacugcccggcaggg

SEQ ID NO: 3435841 - RNA, 21 nt, Human
cccacgacugcccggcagggu

SEQ ID NO: 3435842 - RNA, 17 nt, Human
cccacgagaccccggcu

SEQ ID NO: 3435843 - RNA, 19 nt, Human
cccacgcccccacugguga

SEQ ID NO: 3435844 - RNA, 22 nt, Human
cccacgcccucauuacggcucc

SEQ ID NO: 3435845 - RNA, 15 nt, Human
cccacgcucaccccc

SEQ ID NO: 3435846 - RNA, 13 nt, Human
cccacgcuucucu

SEQ ID NO: 3435847 - RNA, 22 nt, Human
cccacggaaaaugccaaucucu

SEQ ID NO: 3435848 - RNA, 16 nt, Human
cccacggccgcuccag

SEQ ID NO: 3435849 - RNA, 19 nt, Human
cccacggcuaagaggcugc

SEQ ID NO: 3435850 - RNA, 15 nt, Human
cccacgucagcuggg

SEQ ID NO: 3435851 - RNA, 13 nt, Human
cccacguccuguc

SEQ ID NO: 3435852 - RNA, 17 nt, Human
cccacguccugucagug

SEQ ID NO: 3435853 - RNA, 12 nt, Human
cccacgugggag

SEQ ID NO: 3435854 - RNA, 16 nt, Human
cccacguucucacacc

SEQ ID NO: 3435855 - RNA, 17 nt, Human
cccacguucucacaccc

SEQ ID NO: 3435856 - RNA, 21 nt, Human
cccacguucucacacccaccg

SEQ ID NO: 3435857 - RNA, 18 nt, Human
cccacguucucucugccu

SEQ ID NO: 3435858 - RNA, 16 nt, Human
cccacucaagccaagc

SEQ ID NO: 3435859 - RNA, 19 nt, Human
cccacuccaucugguagaa

SEQ ID NO: 3435860 - RNA, 17 nt, Human
cccacuccccaccuuca

SEQ ID NO: 3435861 - RNA, 12 nt, Human
cccacucccugc

SEQ ID NO: 3435862 - RNA, 19 nt, Human
cccacuccggcccuccaga

SEQ ID NO: 3435863 - RNA, 19 nt, Human
cccacuccuaggacauguu

SEQ ID NO: 3435864 - RNA, 12 nt, Human
cccacuccugcu

SEQ ID NO: 3435865 - RNA, 21 nt, Human
cccacucgugauaagucaaca

SEQ ID NO: 3435866 - RNA, 11 nt, Human
cccacucucag

SEQ ID NO: 3435867 - RNA, 13 nt, Human
cccacucucauuc

SEQ ID NO: 3435868 - RNA, 19 nt, Human
cccacucucauuccccagg

SEQ ID NO: 3435869 - RNA, 12 nt, Human
cccacucuccua

SEQ ID NO: 3435870 - RNA, 15 nt, Human
cccacucugcucuga

SEQ ID NO: 3435871 - RNA, 16 nt, Human
cccacugcacacaccu

SEQ ID NO: 3435872 - RNA, 18 nt, Human
cccacugcacccccuccu

SEQ ID NO: 3435873 - RNA, 19 nt, Human
cccacugcaggccccgcuu

SEQ ID NO: 3435874 - RNA, 23 nt, Human
cccacugcaggccccgcuugucc

SEQ ID NO: 3435875 - RNA, 14 nt, Human
cccacugccuuuga

SEQ ID NO: 3435876 - RNA, 22 nt, Human
cccacugcuuuuggucugugug

SEQ ID NO: 3435877 - RNA, 13 nt, Human
cccacuggagcag

SEQ ID NO: 3435878 - RNA, 22 nt, Human
cccacuggagcagaaggggaga

SEQ ID NO: 3435879 - RNA, 23 nt, Human
cccacuggcugugggcucccuuc

SEQ ID NO: 3435880 - RNA, 23 nt, Human
cccacuguacuugcucuugaugc

SEQ ID NO: 3435881 - RNA, 17 nt, Human
cccacuguaugauuuau

SEQ ID NO: 3435882 - RNA, 14 nt, Human
cccacuguccuggg

SEQ ID NO: 3435883 - RNA, 23 nt, Human
cccacuguccugggcgcccugga

SEQ ID NO: 3435884 - RNA, 15 nt, Human
cccacugugccucag

SEQ ID NO: 3435885 - RNA, 23 nt, Human
cccacuguuucucuugagcuggc

SEQ ID NO: 3435886 - RNA, 17 nt, Human
cccacuucccugacacu

SEQ ID NO: 3435887 - RNA, 18 nt, Human
cccacuucucaucacaca

SEQ ID NO: 3435888 - RNA, 22 nt, Human
cccacuucucaucacacacaug

SEQ ID NO: 3435889 - RNA, 23 nt, Human
cccacuucucaucacacacaugg

SEQ ID NO: 3435890 - RNA, 12 nt, Human
cccacuucugcc

SEQ ID NO: 3435891 - RNA, 14 nt, Human
cccacuucugccag

SEQ ID NO: 3435892 - RNA, 21 nt, Human
cccacuugccucuuccuugaa

SEQ ID NO: 3435893 - RNA, 22 nt, Human
cccacuugucacugacacaaag

SEQ ID NO: 3435894 - RNA, 14 nt, Human
cccacuuguccuua

SEQ ID NO: 3435895 - RNA, 21 nt, Human
cccacuuugcuguuccuuacu

SEQ ID NO: 3435896 - RNA, 20 nt, Human
cccagaaaaaaaaaaacuua

SEQ ID NO: 3435897 - RNA, 20 nt, Human
cccagaaaagaaagcuacag

SEQ ID NO: 3435898 - RNA, 15 nt, Human
cccagaaaaggacag

SEQ ID NO: 3435899 - RNA, 16 nt, Human
cccagaaaaggacaga

SEQ ID NO: 3435900 - RNA, 17 nt, Human
cccagaaaaggacagaa

SEQ ID NO: 3435901 - RNA, 14 nt, Human
cccagaaccugucc

SEQ ID NO: 3435902 - RNA, 15 nt, Human
cccagaaccuguccu

SEQ ID NO: 3435903 - RNA, 17 nt, Human
cccagaaccuguccuug

SEQ ID NO: 3435904 - RNA, 14 nt, Human
cccagaacucugcc

SEQ ID NO: 3435905 - RNA, 15 nt, Human
cccagaacuucccug

SEQ ID NO: 3435906 - RNA, 19 nt, Human
cccagaacuucccugauug

SEQ ID NO: 3435907 - RNA, 16 nt, Human
cccagaagaaaauucu

SEQ ID NO: 3435908 - RNA, 22 nt, Human
cccagaauaaguuauugcaguu

SEQ ID NO: 3435909 - RNA, 12 nt, Human
cccagaaucaaa

SEQ ID NO: 3435910 - RNA, 15 nt, Human
cccagaaucccagcc

SEQ ID NO: 3435911 - RNA, 16 nt, Human
cccagaaucccagccg

SEQ ID NO: 3435912 - RNA, 19 nt, Human
cccagaaucccagccggcc

SEQ ID NO: 3435913 - RNA, 20 nt, Human
cccagaaugagacauccagc

SEQ ID NO: 3435914 - RNA, 18 nt, Human
cccagaaugucagauucc

SEQ ID NO: 3435915 - RNA, 21 nt, Human
cccagaaugucagauuccuuu

SEQ ID NO: 3435916 - RNA, 20 nt, Human
cccagacacaucgcacugug

SEQ ID NO: 3435917 - RNA, 23 nt, Human
cccagacacaucgcacuguggau

SEQ ID NO: 3435918 - RNA, 19 nt, Human
cccagacagacaucucugc

SEQ ID NO: 3435919 - RNA, 14 nt, Human
cccagacagcuccc

SEQ ID NO: 3435920 - RNA, 17 nt, Human
cccagacauaaaggaaa

SEQ ID NO: 3435921 - RNA, 13 nt, Human
cccagacccagug

SEQ ID NO: 3435922 - RNA, 13 nt, Human
cccagaccccgac

SEQ ID NO: 3435923 - RNA, 19 nt, Human
cccagaccccucuggccag

SEQ ID NO: 3435924 - RNA, 21 nt, Human
cccagaccuguuagcagacag

SEQ ID NO: 3435925 - RNA, 23 nt, Human
ccaggagcuccaguguccugagc

SEQ ID NO: 3435926 - RNA, 17 nt, Human
ccaggagcugcucacua

SEQ ID NO: 3435927 - RNA, 21 nt, Human
ccaggagcugggcagaaggcc

SEQ ID NO: 3435928 - RNA, 21 nt, Human
ccaggagcuucuuguuuccuu

SEQ ID NO: 3435929 - RNA, 18 nt, Human
ccaggaggacccagggcu

SEQ ID NO: 3435930 - RNA, 21 nt, Human
ccaggaggacccagggcucug

SEQ ID NO: 3435931 - RNA, 20 nt, Human
ccaggaggcagggaggcagc

SEQ ID NO: 3435932 - RNA, 16 nt, Human
ccaggaggcugaggug

SEQ ID NO: 3435933 - RNA, 22 nt, Human
ccaggagggacaaaggagccug

SEQ ID NO: 3435934 - RNA, 23 nt, Human
ccaggagggacaaaggagccugu

SEQ ID NO: 3435935 - RNA, 15 nt, Human
ccaggagggaggcag

SEQ ID NO: 3435936 - RNA, 20 nt, Human
ccaggaggggaacacugccc

SEQ ID NO: 3435937 - RNA, 18 nt, Human
ccaggaggugccacugga

SEQ ID NO: 3435938 - RNA, 19 nt, Human
ccaggagucccacuccaag

SEQ ID NO: 3435939 - RNA, 21 nt, Human
ccaggaguguggccacguggg

SEQ ID NO: 3435940 - RNA, 20 nt, Human
ccaggaguucgaggcugcag

SEQ ID NO: 3435941 - RNA, 15 nt, Human
ccaggaguucugcuc

SEQ ID NO: 3435942 - RNA, 16 nt, Human
ccaggaguucugcuca

SEQ ID NO: 3435943 - RNA, 23 nt, Human
ccaggaguuuaagaccagccugg

SEQ ID NO: 3435944 - RNA, 22 nt, Human
ccaggaguuugaggcugcagcg

SEQ ID NO: 3435945 - RNA, 15 nt, Human
ccaggauacuggcac

SEQ ID NO: 3435946 - RNA, 23 nt, Human
ccaggauagugggcaccccacug

SEQ ID NO: 3435947 - RNA, 16 nt, Human
ccaggauauauuuuau

SEQ ID NO: 3435948 - RNA, 15 nt, Human
ccaggaucauggugu

SEQ ID NO: 3435949 - RNA, 17 nt, Human
ccaggaucaugguguaa

SEQ ID NO: 3435950 - RNA, 23 nt, Human
ccaggaucaugguguaauaagac

SEQ ID NO: 3435951 - RNA, 18 nt, Human
ccaggaucccaagccucc

SEQ ID NO: 3435952 - RNA, 19 nt, Human
ccaggaucccaagccuccu

SEQ ID NO: 3435953 - RNA, 22 nt, Human
ccaggaucccaagccuccugcu

SEQ ID NO: 3435954 - RNA, 18 nt, Human
cagagaggacuguaggga

SEQ ID NO: 3435955 - RNA, 20 nt, Human
cagagaggacuguagggagg

SEQ ID NO: 3435956 - RNA, 18 nt, Human
cagagaggagaaacacau

SEQ ID NO: 3435957 - RNA, 21 nt, Human
cagagaggagaaacacaucuu

SEQ ID NO: 3435958 - RNA, 15 nt, Human
cagagaggcuguggu

SEQ ID NO: 3435959 - RNA, 16 nt, Human
cagagaggcugugguu

SEQ ID NO: 3435960 - RNA, 21 nt, Human
cagagagggagagcagagaaa

SEQ ID NO: 3435961 - RNA, 12 nt, Human
cagagagggcag

SEQ ID NO: 3435962 - RNA, 16 nt, Human
cagagagggcaggcau

SEQ ID NO: 3435963 - RNA, 21 nt, Human
cagagagggcaggcaugaagu

SEQ ID NO: 3435964 - RNA, 15 nt, Human
cagagagggggccac

SEQ ID NO: 3435965 - RNA, 20 nt, Human
cagagagggggccaccuccc

SEQ ID NO: 3435966 - RNA, 12 nt, Human
cagagagggugg

SEQ ID NO: 3435967 - RNA, 23 nt, Human
cagagagguuugcagucccaagc

SEQ ID NO: 3435968 - RNA, 18 nt, Human
cagagagucccacugccu

SEQ ID NO: 3435969 - RNA, 14 nt, Human
cagagaguccucug

SEQ ID NO: 3435970 - RNA, 15 nt, Human
cagagaguccucugg

SEQ ID NO: 3435971 - RNA, 14 nt, Human
cagagaguggcucc

SEQ ID NO: 3435972 - RNA, 15 nt, Human
cagagauaggccugu

SEQ ID NO: 3435973 - RNA, 19 nt, Human
cagagauccaaaagaagcc

SEQ ID NO: 3435974 - RNA, 23 nt, Human
cagagauccaaaagaagccccca

SEQ ID NO: 3435975 - RNA, 21 nt, Human
cagagaugcaccaccaagcca

SEQ ID NO: 3435976 - RNA, 19 nt, Human
cagagaugccuccaccgcu

SEQ ID NO: 3435977 - RNA, 23 nt, Human
cagagaugccucccugagcuaga

SEQ ID NO: 3435978 - RNA, 15 nt, Human
cagagaugggacugg

SEQ ID NO: 3435979 - RNA, 19 nt, Human
cagagaugggacugggagg

SEQ ID NO: 3435980 - RNA, 22 nt, Human
cagagaugggacugggagggcc

SEQ ID NO: 3435981 - RNA, 23 nt, Human
cagagaugggacugggagggccc

SEQ ID NO: 3435982 - RNA, 22 nt, Human
cagagauguccauuuuuacaag

SEQ ID NO: 3435983 - RNA, 21 nt, Human
cagagauucauuuucuagaua

SEQ ID NO: 3435984 - RNA, 17 nt, Human
cagagauugaacuccaa

SEQ ID NO: 3435985 - RNA, 21 nt, Human
cagagauuggaaugggcagcu

SEQ ID NO: 3435986 - RNA, 23 nt, Human
cagagauuggaaugggcagcuca

SEQ ID NO: 3435987 - RNA, 16 nt, Human
cagagauuucucauug

SEQ ID NO: 3435988 - RNA, 15 nt, Human
cagagcaaccucuca

SEQ ID NO: 3435989 - RNA, 22 nt, Human
cagagcaacgaccagggccgag

SEQ ID NO: 3435990 - RNA, 18 nt, Human
cagagcaagauccugucu

SEQ ID NO: 3435991 - RNA, 16 nt, Human
cagagcaagucugcag

SEQ ID NO: 3435992 - RNA, 16 nt, Human
cagagcaccugcuguc

SEQ ID NO: 3435993 - RNA, 18 nt, Human
cagagcaccuuagacagu

SEQ ID NO: 3435994 - RNA, 22 nt, Human
cagagcaccuuagacagucccu

SEQ ID NO: 3435995 - RNA, 23 nt, Human
cagagcaccuuugcacaggaugc

SEQ ID NO: 3435996 - RNA, 22 nt, Human
cagagcacuagguucaauuccc

SEQ ID NO: 3435997 - RNA, 14 nt, Human
cagagcagagacca

SEQ ID NO: 3435998 - RNA, 13 nt, Human
cagagcagaugca

SEQ ID NO: 3435999 - RNA, 19 nt, Human
cagagcagaugcagagagc

SEQ ID NO: 3436000 - RNA, 13 nt, Human
cagagcagcagug

SEQ ID NO: 3436001 - RNA, 20 nt, Human
cagagcagcagugaaaacaa

SEQ ID NO: 3436002 - RNA, 21 nt, Human
cagagcaggaagcauucagag

SEQ ID NO: 3436003 - RNA, 14 nt, Human
cagagcaggaggcc

SEQ ID NO: 3436004 - RNA, 19 nt, Human
cagagcaggaggccccugg

SEQ ID NO: 3436005 - RNA, 15 nt, Human
cagagcaggggcagg

SEQ ID NO: 3436006 - RNA, 12 nt, Human
cagagcagucug

SEQ ID NO: 3436007 - RNA, 15 nt, Human
cagagcagugggccu

SEQ ID NO: 3436008 - RNA, 18 nt, Human
cagagcauuccagucagg

SEQ ID NO: 3436009 - RNA, 22 nt, Human
cagagcauuccagucaggcucu

SEQ ID NO: 3436010 - RNA, 21 nt, Human
cagagccaaggggcuucaggu

SEQ ID NO: 3436011 - RNA, 15 nt, Human
cagagccacacaugg

SEQ ID NO: 3436012 - RNA, 13 nt, Human
cagagccaggaag

SEQ ID NO: 3436013 - RNA, 23 nt, Human
cagagccaggaagaucccccaga

SEQ ID NO: 3436014 - RNA, 11 nt, Human
cagagccaugg

SEQ ID NO: 3436015 - RNA, 15 nt, Human
cagagcccaccuugg

SEQ ID NO: 3436016 - RNA, 19 nt, Human
cagagcccaccuuggcuca

SEQ ID NO: 3436017 - RNA, 16 nt, Human
cagagcccacgccccc

SEQ ID NO: 3436018 - RNA, 21 nt, Human
cagagcccacgcccccacugg

SEQ ID NO: 3436019 - RNA, 14 nt, Human
cagagcccaggcuc

SEQ ID NO: 3436020 - RNA, 13 nt, Human
cagagccccacac

SEQ ID NO: 3436021 - RNA, 15 nt, Human
cagagccccacagcc

SEQ ID NO: 3436022 - RNA, 21 nt, Human
cagagccccuacagcauuguu

SEQ ID NO: 3436023 - RNA, 22 nt, Human
cagagccccuccuccagccccu

SEQ ID NO: 3436024 - RNA, 20 nt, Human
cagagccguaaaaacugaag

SEQ ID NO: 3436025 - RNA, 14 nt, Human
cagagccucgcucu

SEQ ID NO: 3436026 - RNA, 13 nt, Human
cagagccugcccc

SEQ ID NO: 3436027 - RNA, 19 nt, Human
cagagccugccccagcgcu

SEQ ID NO: 3436028 - RNA, 12 nt, Human
cagagccugggg

SEQ ID NO: 3436029 - RNA, 19 nt, Human
cagagccuucucagaagca

SEQ ID NO: 3436030 - RNA, 20 nt, Human
cagagccuucucagaagcac

SEQ ID NO: 3436031 - RNA, 13 nt, Human
cagagcgcacagg

SEQ ID NO: 3436032 - RNA, 15 nt, Human
cagagcgcacaggga

SEQ ID NO: 3436033 - RNA, 19 nt, Human
cagagcgccgugaguucuc

SEQ ID NO: 3436034 - RNA, 19 nt, Human
cagagcggaggcugugugc

SEQ ID NO: 3436035 - RNA, 15 nt, Human
cagagcgugagcuga

SEQ ID NO: 3436036 - RNA, 19 nt, Human
cagagcgugagcugagcag

SEQ ID NO: 3436037 - RNA, 21 nt, Human
cagagcguggcugugcucuca

SEQ ID NO: 3436038 - RNA, 18 nt, Human
cagagcuaaacuccuucc

SEQ ID NO: 3436039 - RNA, 16 nt, Human
cagagcuaucauuaug

SEQ ID NO: 3436040 - RNA, 12 nt, Human
cagagcucacaa

SEQ ID NO: 3436041 - RNA, 23 nt, Human
cagagcuccuccuugucuuggca

SEQ ID NO: 3436042 - RNA, 21 nt, Human
cagagcucuggagccaccugu

SEQ ID NO: 3436043 - RNA, 21 nt, Human
cagagcugaagaguugccccg

SEQ ID NO: 3436044 - RNA, 20 nt, Human
cagagcugauggagaaggaa

SEQ ID NO: 3436045 - RNA, 13 nt, Human
cagagcugccacc

SEQ ID NO: 3436046 - RNA, 16 nt, Human
cagagcugccaccugc

SEQ ID NO: 3436047 - RNA, 15 nt, Human
cagagcugcccucuc

SEQ ID NO: 3436048 - RNA, 17 nt, Human
cagagcugcccucuccu

SEQ ID NO: 3436049 - RNA, 22 nt, Human
cagagcugcggugucucccugc

SEQ ID NO: 3436050 - RNA, 18 nt, Human
cagagcuggcucugagcg

SEQ ID NO: 3436051 - RNA, 15 nt, Human
cagagcugggaggca

SEQ ID NO: 3436052 - RNA, 20 nt, Human
cagagcugggaggcauggcc

SEQ ID NO: 3436053 - RNA, 23 nt, Human
cagagcugggaggcauggcccug

SEQ ID NO: 3436054 - RNA, 20 nt, Human
cagagcuggggcugagggau

SEQ ID NO: 3436055 - RNA, 12 nt, Human
cagagcugggug

SEQ ID NO: 3436056 - RNA, 17 nt, Human
cagagcugguggaccca

SEQ ID NO: 3436057 - RNA, 20 nt, Human
cagagcugguggacccaggg

SEQ ID NO: 3436058 - RNA, 21 nt, Human
cagagcugguggacccaggga

SEQ ID NO: 3436059 - RNA, 12 nt, Human
cagagcugugga

SEQ ID NO: 3436060 - RNA, 21 nt, Human
cagagcuguuuauggccucag

SEQ ID NO: 3436061 - RNA, 22 nt, Human
cagagcuguuuauggccucagc

SEQ ID NO: 3436062 - RNA, 20 nt, Human
cagagcuucuuccaggugcc

SEQ ID NO: 3436063 - RNA, 19 nt, Human
cagagcuuggacuggaugc

SEQ ID NO: 3436064 - RNA, 15 nt, Human
cagagcuuuggucug

SEQ ID NO: 3436065 - RNA, 17 nt, Human
cagagcuuuggucugug

SEQ ID NO: 3436066 - RNA, 23 nt, Human
cagaggaaacaauauuuauaaag

SEQ ID NO: 3436067 - RNA, 19 nt, Human
cagaggaaagcaaaggaga

SEQ ID NO: 3436068 - RNA, 20 nt, Human
cagaggaaagcaaaggagau

SEQ ID NO: 3436069 - RNA, 20 nt, Human
cagaggaacuguccagagag

SEQ ID NO: 3436070 - RNA, 12 nt, Human
cagaggaagagc

SEQ ID NO: 3436071 - RNA, 18 nt, Human
cagaggaaggggccagag

SEQ ID NO: 3436072 - RNA, 18 nt, Human
cagaggaauccuggcagc

SEQ ID NO: 3436073 - RNA, 22 nt, Human
cagaggacaccuguacuggaga

SEQ ID NO: 3436074 - RNA, 13 nt, Human
cagaggaccagca

SEQ ID NO: 3436075 - RNA, 14 nt, Human
cagaggacugugau

SEQ ID NO: 3436076 - RNA, 13 nt, Human
cagaggagagagg

SEQ ID NO: 3436077 - RNA, 21 nt, Human
cagaggagagauagccugugg

SEQ ID NO: 3436078 - RNA, 23 nt, Human
cagaggagagucccagagcagga

SEQ ID NO: 3436079 - RNA, 20 nt, Human
cagaggagccaccaguucuc

SEQ ID NO: 3436080 - RNA, 15 nt, Human
cagaggagccuuuuu

SEQ ID NO: 3436081 - RNA, 22 nt, Human
cagaggagggcagcagaagggg

SEQ ID NO: 3436082 - RNA, 20 nt, Human
cagaggaggggccgcugcca

SEQ ID NO: 3436083 - RNA, 17 nt, Human
cagaggaguacagguga

SEQ ID NO: 3436084 - RNA, 23 nt, Human
cagaggaugagcucuacccaggg

SEQ ID NO: 3436085 - RNA, 20 nt, Human
cagaggcagccccauucugc

SEQ ID NO: 3436086 - RNA, 23 nt, Human
cagaggcagccccauucugccug

SEQ ID NO: 3436087 - RNA, 22 nt, Human
ccagggugagagcugcucugga

SEQ ID NO: 3436088 - RNA, 15 nt, Human
ccagggugcccagaa

SEQ ID NO: 3436089 - RNA, 14 nt, Human
ccaggguuccccca

SEQ ID NO: 3436090 - RNA, 22 nt, Human
ccaggguugaucacacucuggg

SEQ ID NO: 3436091 - RNA, 21 nt, Human
ccaggguuggcaccuuccccc

SEQ ID NO: 3436092 - RNA, 16 nt, Human
ccagguaaugagggac

SEQ ID NO: 3436093 - RNA, 14 nt, Human
ccagguacgcacag

SEQ ID NO: 3436094 - RNA, 14 nt, Human
ccagguagcuggga

SEQ ID NO: 3436095 - RNA, 15 nt, Human
ccagguaucuccagg

SEQ ID NO: 3436096 - RNA, 17 nt, Human
ccagguauggcucugca

SEQ ID NO: 3436097 - RNA, 14 nt, Human
cccaugggcaggag

SEQ ID NO: 3436098 - RNA, 23 nt, Human
cccauggguuguguguuuauuuc

SEQ ID NO: 3436099 - RNA, 19 nt, Human
cccauguauggccaggaag

SEQ ID NO: 3436100 - RNA, 23 nt, Human
cccauguauuuaucucuauuuaa

SEQ ID NO: 3436101 - RNA, 16 nt, Human
cccaugucucgacuca

SEQ ID NO: 3436102 - RNA, 16 nt, Human
cccaugucucucagaa

SEQ ID NO: 3436103 - RNA, 22 nt, Human
cccaugucuuucuccaaaguua

SEQ ID NO: 3436104 - RNA, 19 nt, Human
cccaugugccugcaccagg

SEQ ID NO: 3436105 - RNA, 22 nt, Human
cccaugugccugcaccaggaga

SEQ ID NO: 3436106 - RNA, 23 nt, Human
cccauguggugaugauguguaua

SEQ ID NO: 3436107 - RNA, 19 nt, Human
cccaugugugagugugugc

SEQ ID NO: 3436108 - RNA, 21 nt, Human
cccauuaaggggaagaaugaa

SEQ ID NO: 3436109 - RNA, 16 nt, Human
cccauuaggacaauca

SEQ ID NO: 3436110 - RNA, 20 nt, Human
cccauuaugcgcuguggcca

SEQ ID NO: 3436111 - RNA, 14 nt, Human
cccauucccuggga

SEQ ID NO: 3436112 - RNA, 19 nt, Human
cccauucccugggaucugg

SEQ ID NO: 3436113 - RNA, 16 nt, Human
cccauucucaucugca

SEQ ID NO: 3436114 - RNA, 18 nt, Human
cccauucugcccuguggg

SEQ ID NO: 3436115 - RNA, 13 nt, Human
cccauucugccug

SEQ ID NO: 3436116 - RNA, 14 nt, Human
cccauucugccugc

SEQ ID NO: 3436117 - RNA, 20 nt, Human
cccauucugccugcccaggc

SEQ ID NO: 3436118 - RNA, 11 nt, Human
cccauucuuug

SEQ ID NO: 3436119 - RNA, 21 nt, Human
cccauugcaucaccucuguaa

SEQ ID NO: 3436120 - RNA, 12 nt, Human
cccauugcuguu

SEQ ID NO: 3436121 - RNA, 15 nt, Human
cccauugucccucug

SEQ ID NO: 3436122 - RNA, 15 nt, Human
cccauuguggcuccu

SEQ ID NO: 3436123 - RNA, 20 nt, Human
cccauuuaaauuuuuuuccu

SEQ ID NO: 3436124 - RNA, 15 nt, Human
cccauuuauccaccu

SEQ ID NO: 3436125 - RNA, 18 nt, Human
cccauuuauccaccucca

SEQ ID NO: 3436126 - RNA, 20 nt, Human
cccauuucgugagccccauc

SEQ ID NO: 3436127 - RNA, 21 nt, Human
cccauuucuaaaggccucuuc

SEQ ID NO: 3436128 - RNA, 15 nt, Human
cccauuucucacuga

SEQ ID NO: 3436129 - RNA, 14 nt, Human
cccauuucuccaga

SEQ ID NO: 3436130 - RNA, 15 nt, Human
cccauuucuccagaa

SEQ ID NO: 3436131 - RNA, 14 nt, Human
cccauuuggagggc

SEQ ID NO: 3436132 - RNA, 13 nt, Human
cccauuugggcag

SEQ ID NO: 3436133 - RNA, 20 nt, Human
cccauuugggcagagaggcu

SEQ ID NO: 3436134 - RNA, 18 nt, Human
cccauuuugagugacucg

SEQ ID NO: 3436135 - RNA, 19 nt, Human
cccauuuugcaaaauuucc

SEQ ID NO: 3436136 - RNA, 20 nt, Human
cccauuuuuauaucgaucuc

SEQ ID NO: 3436137 - RNA, 12 nt, Human
cccauuuuuccc

SEQ ID NO: 3436138 - RNA, 12 nt, Human
cccauuuuuccu

SEQ ID NO: 3436139 - RNA, 19 nt, Human
ccccaaaacaaagucuuug

SEQ ID NO: 3436140 - RNA, 22 nt, Human
ccccaaaacucuccucugcugc

SEQ ID NO: 3436141 - RNA, 18 nt, Human
ccccaaacaccuuccagc

SEQ ID NO: 3436142 - RNA, 17 nt, Human
ccaugugccugcaccag

SEQ ID NO: 3436143 - RNA, 20 nt, Human
ccaugugccugcaccaggag

SEQ ID NO: 3436144 - RNA, 20 nt, Human
ccauguggaaggcaagccag

SEQ ID NO: 3436145 - RNA, 21 nt, Human
ccauguggaaggcaagccagg

SEQ ID NO: 3436146 - RNA, 12 nt, Human
ccauguggacuu

SEQ ID NO: 3436147 - RNA, 18 nt, Human
ccauguggugaugaugug

SEQ ID NO: 3436148 - RNA, 17 nt, Human
ccaugugguggcacagg

SEQ ID NO: 3436149 - RNA, 17 nt, Human
ccauguguccugguucc

SEQ ID NO: 3436150 - RNA, 11 nt, Human
ccaugugugag

SEQ ID NO: 3436151 - RNA, 18 nt, Human
ccaugugugagugugugc

SEQ ID NO: 3436152 - RNA, 21 nt, Human
ccauguuaaguccucccugac

SEQ ID NO: 3436153 - RNA, 22 nt, Human
ccauguuaauuucaugugucaa

SEQ ID NO: 3436154 - RNA, 18 nt, Human
ccauguuagccaggcugg

SEQ ID NO: 3436155 - RNA, 17 nt, Human
ccauguuccaauaaaca

SEQ ID NO: 3436156 - RNA, 17 nt, Human
ccauguucugcccccag

SEQ ID NO: 3436157 - RNA, 20 nt, Human
ccauguucugcccccagccc

SEQ ID NO: 3436158 - RNA, 22 nt, Human
ccauguucugucccuugccccc

SEQ ID NO: 3436159 - RNA, 17 nt, Human
ccauguugccugucuuu

SEQ ID NO: 3436160 - RNA, 18 nt, Human
ccauguuggccaggcugc

SEQ ID NO: 3436161 - RNA, 20 nt, Human
ccauguuggccaggcugcuc

SEQ ID NO: 3436162 - RNA, 19 nt, Human
ccauguuggccaggcuggu

SEQ ID NO: 3436163 - RNA, 13 nt, Human
ccauguuggcuag

SEQ ID NO: 3436164 - RNA, 18 nt, Human
ccauguuggucaggcugg

SEQ ID NO: 3436165 - RNA, 19 nt, Human
ccauguuggucaggcuggu

SEQ ID NO: 3436166 - RNA, 16 nt, Human
ccauguuguaaugcug

SEQ ID NO: 3436167 - RNA, 17 nt, Human
ccauguuguaaugcugc

SEQ ID NO: 3436168 - RNA, 15 nt, Human
ccauguuuaagauuu

SEQ ID NO: 3436169 - RNA, 16 nt, Human
ccauguuuaagauuua

SEQ ID NO: 3436170 - RNA, 13 nt, Human
ccauguuuauuac

SEQ ID NO: 3436171 - RNA, 20 nt, Human
ccauguuuauuacaguauaa

SEQ ID NO: 3436172 - RNA, 12 nt, Human
ccauguuucugu

SEQ ID NO: 3436173 - RNA, 21 nt, Human
ccauguuugagcucagacccc

SEQ ID NO: 3436174 - RNA, 14 nt, Human
ccauguuuguaaaa

SEQ ID NO: 3436175 - RNA, 15 nt, Human
ccauguuuguaaaac

SEQ ID NO: 3436176 - RNA, 20 nt, Human
ccauuaaaacugaagucuga

SEQ ID NO: 3436177 - RNA, 23 nt, Human
ccauuaaacgauuuuuaaaaugu

SEQ ID NO: 3436178 - RNA, 20 nt, Human
ccauuaaagaauaugaaaca

SEQ ID NO: 3436179 - RNA, 22 nt, Human
ccauuaaagucgagcuuuucua

SEQ ID NO: 3436180 - RNA, 14 nt, Human
ccauuaaagucuga

SEQ ID NO: 3436181 - RNA, 15 nt, Human
ccauuaaagucugaa

SEQ ID NO: 3436182 - RNA, 16 nt, Human
ccauuaaagucugaau

SEQ ID NO: 3436183 - RNA, 15 nt, Human
ccauuaaaugaauau

SEQ ID NO: 3436184 - RNA, 16 nt, Human
ccauuaaaugaauauu

SEQ ID NO: 3436185 - RNA, 17 nt, Human
ccauuaaaugaauauuu

SEQ ID NO: 3436186 - RNA, 23 nt, Human
ccauuaaccagggcaccaagccc

SEQ ID NO: 3436187 - RNA, 16 nt, Human
ccauuaaucauuuccc

SEQ ID NO: 3436188 - RNA, 18 nt, Human
ccauuaaucauuucccca

SEQ ID NO: 3436189 - RNA, 12 nt, Human
ccauuaauuuaa

SEQ ID NO: 3436190 - RNA, 22 nt, Human
ccauuacagagguauuaaaacu

SEQ ID NO: 3436191 - RNA, 16 nt, Human
ccauuaccauguaaug

SEQ ID NO: 3436192 - RNA, 13 nt, Human
ccauuaucaugug

SEQ ID NO: 3436193 - RNA, 15 nt, Human
ccauuaucaugugua

SEQ ID NO: 3436194 - RNA, 16 nt, Human
ccauuaucauguguaa

SEQ ID NO: 3436195 - RNA, 14 nt, Human
ccauuaucccugaa

SEQ ID NO: 3436196 - RNA, 22 nt, Human
ccauuauucaaaguugccuaaa

SEQ ID NO: 3436197 - RNA, 12 nt, Human
ccauuauuuucu

SEQ ID NO: 3436198 - RNA, 13 nt, Human
ccauuauuuucug

SEQ ID NO: 3436199 - RNA, 19 nt, Human
ccauucacaauaaaagcuu

SEQ ID NO: 3436200 - RNA, 14 nt, Human
ccauucauuccauu

SEQ ID NO: 3436201 - RNA, 16 nt, Human
ccauuccagaauaucu

SEQ ID NO: 3436202 - RNA, 16 nt, Human
ccauucccccagugcg

SEQ ID NO: 3436203 - RNA, 20 nt, Human
ccauucccugccuggggcgg

SEQ ID NO: 3436204 - RNA, 13 nt, Human
ccauuccugaaga

SEQ ID NO: 3436205 - RNA, 24 nt, Human
ccauuccuggagcccgaggcacca

SEQ ID NO: 3436206 - RNA, 22 nt, Human
ccauuccugggaaauauucccu

SEQ ID NO: 3436207 - RNA, 20 nt, Human
ccauuccugguacccagcca

SEQ ID NO: 3436208 - RNA, 21 nt, Human
ccauuccugguacccagccau

SEQ ID NO: 3436209 - RNA, 18 nt, Human
ccauucgcgcucugcuca

SEQ ID NO: 3436210 - RNA, 20 nt, Human
ccauucguacauaauacuga

SEQ ID NO: 3436211 - RNA, 13 nt, Human
ccauucuacuugc

SEQ ID NO: 3436212 - RNA, 18 nt, Human
ccauucuacuugcucugg

SEQ ID NO: 3436213 - RNA, 19 nt, Human
ccauucuacuugcucugga

SEQ ID NO: 3436214 - RNA, 22 nt, Human
ccauucuacuugcucuggaccu

SEQ ID NO: 3436215 - RNA, 12 nt, Human
ccauucuaugug

SEQ ID NO: 3436216 - RNA, 15 nt, Human
ccauucuccacagca

SEQ ID NO: 3436217 - RNA, 15 nt, Human
ccauucuccaccugc

SEQ ID NO: 3436218 - RNA, 18 nt, Human
ccauucuccaccugccag

SEQ ID NO: 3436219 - RNA, 11 nt, Human
ccauucuccca

SEQ ID NO: 3436220 - RNA, 22 nt, Human
ccauucucccagguaccagcug

SEQ ID NO: 3436221 - RNA, 23 nt, Human
ccauucucccagguaccagcugc

SEQ ID NO: 3436222 - RNA, 18 nt, Human
ccauucucccucuuguuu

SEQ ID NO: 3436223 - RNA, 20 nt, Human
ccauucucucuccuguccaa

SEQ ID NO: 3436224 - RNA, 17 nt, Human
ccauucugaccauuuca

SEQ ID NO: 3436225 - RNA, 20 nt, Human
ccauucugacucgguuucuc

SEQ ID NO: 3436226 - RNA, 20 nt, Human
ccauucugccuccauucuga

SEQ ID NO: 3436227 - RNA, 16 nt, Human
ccauucugccugccca

SEQ ID NO: 3436228 - RNA, 18 nt, Human
ccauucugccugcccagg

SEQ ID NO: 3436229 - RNA, 14 nt, Human
ccauucugcuccuu

SEQ ID NO: 3436230 - RNA, 16 nt, Human
ccauucugcuccuucc

SEQ ID NO: 3436231 - RNA, 19 nt, Human
ccauucuguccuaccuuua

SEQ ID NO: 3436232 - RNA, 12 nt, Human
ccauucuuuccc

SEQ ID NO: 3436233 - RNA, 13 nt, Human
ccauucuuugcuu

SEQ ID NO: 3436234 - RNA, 20 nt, Human
ccauucuuugcuugaacaca

SEQ ID NO: 3436235 - RNA, 15 nt, Human
ccauucuuuuguaau

SEQ ID NO: 3436236 - RNA, 19 nt, Human
ccauucuuuuuuucuuggc

SEQ ID NO: 3436237 - RNA, 19 nt, Human
ccauugaagccgacucugg

SEQ ID NO: 3436238 - RNA, 12 nt, Human
ccauugaaggcu

SEQ ID NO: 3436239 - RNA, 22 nt, Human
ccauugagaccgugaagauacu

SEQ ID NO: 3436240 - RNA, 20 nt, Human
ccauugcaucaccucuguaa

SEQ ID NO: 3436241 - RNA, 13 nt, Human
ccauugccuccuc

SEQ ID NO: 3436242 - RNA, 12 nt, Human
cccaaccccuga

SEQ ID NO: 3436243 - RNA, 14 nt, Human
cccaaccccugagg

SEQ ID NO: 3436244 - RNA, 23 nt, Human
cccaaccccuuaagcccuggccc

SEQ ID NO: 3436245 - RNA, 22 nt, Human
cccaacccguggaggcugcucg

SEQ ID NO: 3436246 - RNA, 23 nt, Human
cccaacccguggaggcugcucgg

SEQ ID NO: 3436247 - RNA, 14 nt, Human
cccaacccugcccc

SEQ ID NO: 3436248 - RNA, 15 nt, Human
cccaacccuucccca

SEQ ID NO: 3436249 - RNA, 13 nt, Human
cccaacccuucuu

SEQ ID NO: 3436250 - RNA, 15 nt, Human
cccaacccuucuuca

SEQ ID NO: 3436251 - RNA, 13 nt, Human
cccaaccucagca

SEQ ID NO: 3436252 - RNA, 14 nt, Human
cccaaccucuuccu

SEQ ID NO: 3436253 - RNA, 21 nt, Human
cccaaccucuuccuccugaca

SEQ ID NO: 3436254 - RNA, 19 nt, Human
cccaaccugcucuccucuu

SEQ ID NO: 3436255 - RNA, 15 nt, Human
cccaaccuuucccuc

SEQ ID NO: 3436256 - RNA, 16 nt, Human
cccaaccuuucccuca

SEQ ID NO: 3436257 - RNA, 15 nt, Human
cccaacgcacaggaa

SEQ ID NO: 3436258 - RNA, 20 nt, Human
cccaacuacuaucucagaga

SEQ ID NO: 3436259 - RNA, 17 nt, Human
cccaacucaccccagcc

SEQ ID NO: 3436260 - RNA, 13 nt, Human
cccaacuccagaa

SEQ ID NO: 3436261 - RNA, 12 nt, Human
cccaacuccugg

SEQ ID NO: 3436262 - RNA, 15 nt, Human
cccaacuccuuccag

SEQ ID NO: 3436263 - RNA, 18 nt, Human
cccaacuccuuccagcua

SEQ ID NO: 3436264 - RNA, 15 nt, Human
cccaacucuccccug

SEQ ID NO: 3436265 - RNA, 15 nt, Human
cccaacucuccugga

SEQ ID NO: 3436266 - RNA, 12 nt, Human
cccaacugacca

SEQ ID NO: 3436267 - RNA, 21 nt, Human
cccaacugcaagucacaaagg

SEQ ID NO: 3436268 - RNA, 20 nt, Human
cccaacuucucuugcuuucu

SEQ ID NO: 3436269 - RNA, 18 nt, Human
cccaacuugccuuugaag

SEQ ID NO: 3436270 - RNA, 20 nt, Human
cccaagaauagaugcugacu

SEQ ID NO: 3436271 - RNA, 14 nt, Human
cccaagaaugcaag

SEQ ID NO: 3436272 - RNA, 20 nt, Human
cccaagacagaugccccaga

SEQ ID NO: 3436273 - RNA, 17 nt, Human
cccaagaccuaaggguu

SEQ ID NO: 3436274 - RNA, 20 nt, Human
cccaagacucccaugaggga

SEQ ID NO: 3436275 - RNA, 22 nt, Human
cccaagacuugguguccuuucc

SEQ ID NO: 3436276 - RNA, 14 nt, Human
cccaagagaacucg

SEQ ID NO: 3436277 - RNA, 17 nt, Human
cccaagagaugaagagu

SEQ ID NO: 3436278 - RNA, 18 nt, Human
cccaagagcaucaugccu

SEQ ID NO: 3436279 - RNA, 23 nt, Human
cccaagaggucaaggcugcagug

SEQ ID NO: 3436280 - RNA, 20 nt, Human
cccaagaugggcaucuuuug

SEQ ID NO: 3436281 - RNA, 22 nt, Human
cccaagaugggcaucuuuugua

SEQ ID NO: 3436282 - RNA, 21 nt, Human
cccaagauugagcucucugcc

SEQ ID NO: 3436283 - RNA, 20 nt, Human
cccaagcaccugggauuaca

SEQ ID NO: 3436284 - RNA, 16 nt, Human
cccaagccaaaaaccu

SEQ ID NO: 3436285 - RNA, 23 nt, Human
cccaagcccgacuugcuguuuug

SEQ ID NO: 3436286 - RNA, 23 nt, Human
cccaagccuacuuuugccauuga

SEQ ID NO: 3436287 - RNA, 16 nt, Human
cccaagccuggcaagg

SEQ ID NO: 3436288 - RNA, 17 nt, Human
cccaagcggugucucuc

SEQ ID NO: 3436289 - RNA, 12 nt, Human
cccaagcucugc

SEQ ID NO: 3436290 - RNA, 13 nt, Human
cccaagcucugcu

SEQ ID NO: 3436291 - RNA, 22 nt, Human
cccaagcuggagugcaguggug

SEQ ID NO: 3436292 - RNA, 22 nt, Human
cccaagcugggccccagcccac

SEQ ID NO: 3436293 - RNA, 19 nt, Human
cccaagcuguuuucuucua

SEQ ID NO: 3436294 - RNA, 14 nt, Human
cccaagcuuagaac

SEQ ID NO: 3436295 - RNA, 22 nt, Human
cccaaggaaagccccagcacua

SEQ ID NO: 3436296 - RNA, 15 nt, Human
cccaaggacugaggg

SEQ ID NO: 3436297 - RNA, 19 nt, Human
cccaaggcccccugccugc

SEQ ID NO: 3436298 - RNA, 22 nt, Human
cccaaggcccccugccugcccu

SEQ ID NO: 3436299 - RNA, 19 nt, Human
cccaaggcucccggaauuc

SEQ ID NO: 3436300 - RNA, 15 nt, Human
cccaaggcugcgucu

SEQ ID NO: 3436301 - RNA, 18 nt, Human
cccaagggaggcugcugc

SEQ ID NO: 3436302 - RNA, 14 nt, Human
cccaagggccuggc

SEQ ID NO: 3436303 - RNA, 19 nt, Human
cccaagggccuggccugag

SEQ ID NO: 3436304 - RNA, 12 nt, Human
cccaaggggcag

SEQ ID NO: 3436305 - RNA, 15 nt, Human
cccaagguuggagcc

SEQ ID NO: 3436306 - RNA, 13 nt, Human
ccccagccccggg

SEQ ID NO: 3436307 - RNA, 23 nt, Human
ccccagccccgguggcugggcag

SEQ ID NO: 3436308 - RNA, 23 nt, Human
ccccagccccucccccaucuccc

SEQ ID NO: 3436309 - RNA, 13 nt, Human
ccccagcccugcu

SEQ ID NO: 3436310 - RNA, 16 nt, Human
ccccagcccugcuggg

SEQ ID NO: 3436311 - RNA, 13 nt, Human
ccccagcccuggc

SEQ ID NO: 3436312 - RNA, 23 nt, Human
ccccagccuaugagcauccugag

SEQ ID NO: 3436313 - RNA, 19 nt, Human
ccccagccugcgccugcug

SEQ ID NO: 3436314 - RNA, 13 nt, Human
ccccagccugcua

SEQ ID NO: 3436315 - RNA, 22 nt, Human
ccccagccuggcccagcucccc

SEQ ID NO: 3436316 - RNA, 20 nt, Human
ccccagcgcugacgugucag

SEQ ID NO: 3436317 - RNA, 21 nt, Human
ccccagcuaagaaccuggaac

SEQ ID NO: 3436318 - RNA, 22 nt, Human
ccccagcuacccuuuuucucca

SEQ ID NO: 3436319 - RNA, 16 nt, Human
ccccagcucaggggca

SEQ ID NO: 3436320 - RNA, 11 nt, Human
ccccagcuccc

SEQ ID NO: 3436321 - RNA, 14 nt, Human
ccccagcucccacc

SEQ ID NO: 3436322 - RNA, 13 nt, Human
ccccagcucccag

SEQ ID NO: 3436323 - RNA, 13 nt, Human
ccccagcucugcu

SEQ ID NO: 3436324 - RNA, 14 nt, Human
ccccagcucugcuu

SEQ ID NO: 3436325 - RNA, 17 nt, Human
ccccagcucuggcuucc

SEQ ID NO: 3436326 - RNA, 14 nt, Human
ccccagcucuggug

SEQ ID NO: 3436327 - RNA, 22 nt, Human
ccccagcucuggugagucuugg

SEQ ID NO: 3436328 - RNA, 12 nt, Human
ccccagcuggcc

SEQ ID NO: 3436329 - RNA, 13 nt, Human
ccccagcugggag

SEQ ID NO: 3436330 - RNA, 14 nt, Human
ccccagcugggagg

SEQ ID NO: 3436331 - RNA, 15 nt, Human
ccccagcugggaggc

SEQ ID NO: 3436332 - RNA, 22 nt, Human
ccccagcugggaggcaagaggg

SEQ ID NO: 3436333 - RNA, 21 nt, Human
ccccagcugugagccuuggcu

SEQ ID NO: 3436334 - RNA, 14 nt, Human
ccccagcuuccagc

SEQ ID NO: 3436335 - RNA, 19 nt, Human
ccccagcuuccagcaggag

SEQ ID NO: 3436336 - RNA, 12 nt, Human
ccccaggaagcc

SEQ ID NO: 3436337 - RNA, 18 nt, Human
ccccaggaagcccaggag

SEQ ID NO: 3436338 - RNA, 13 nt, Human
ccccaggacaggc

SEQ ID NO: 3436339 - RNA, 13 nt, Human
ccccaggaccaga

SEQ ID NO: 3436340 - RNA, 16 nt, Human
ccccaggaccagcuca

SEQ ID NO: 3436341 - RNA, 18 nt, Human
ccccaggaccagcucagg

SEQ ID NO: 3436342 - RNA, 20 nt, Human
ccccaggaccuggcugccau

SEQ ID NO: 3436343 - RNA, 12 nt, Human
ccccaggacgcc

SEQ ID NO: 3436344 - RNA, 23 nt, Human
ccccaggacgccacucauuucau

SEQ ID NO: 3436345 - RNA, 14 nt, Human
ccccaggaggccag

SEQ ID NO: 3436346 - RNA, 22 nt, Human
ccccaggaggccagccuugacc

SEQ ID NO: 3436347 - RNA, 21 nt, Human
ccccaggcccacucagggguc

SEQ ID NO: 3436348 - RNA, 19 nt, Human
ccccaggccccaggaagcc

SEQ ID NO: 3436349 - RNA, 20 nt, Human
ccccaggccccgaggaccca

SEQ ID NO: 3436350 - RNA, 18 nt, Human
ccccaggcucguggacug

SEQ ID NO: 3436351 - RNA, 16 nt, Human
ccccagggaagcagca

SEQ ID NO: 3436352 - RNA, 20 nt, Human
ccccagggaagcagcagccu

SEQ ID NO: 3436353 - RNA, 12 nt, Human
ccccagggcaca

SEQ ID NO: 3436354 - RNA, 16 nt, Human
ccccagggcacaggag

SEQ ID NO: 3436355 - RNA, 18 nt, Human
ccccagggcacaggagcu

SEQ ID NO: 3436356 - RNA, 19 nt, Human
ccccagggcacaggagcua

SEQ ID NO: 3436357 - RNA, 23 nt, Human
ccccagggcacaggagcuaccug

SEQ ID NO: 3436358 - RNA, 22 nt, Human
ccccagggcacuucacagagug

SEQ ID NO: 3436359 - RNA, 15 nt, Human
ccccagggcagccag

SEQ ID NO: 3436360 - RNA, 16 nt, Human
ccccagggcagccagg

SEQ ID NO: 3436361 - RNA, 22 nt, Human
ccccagggcuguaacugccagg

SEQ ID NO: 3436362 - RNA, 16 nt, Human
ccccaggggaaaauga

SEQ ID NO: 3436363 - RNA, 19 nt, Human
ccccaggggaaagaugagc

SEQ ID NO: 3436364 - RNA, 23 nt, Human
ccccagguaggggccccucucag

SEQ ID NO: 3436365 - RNA, 21 nt, Human
ccccagguccagcucuggagg

SEQ ID NO: 3436366 - RNA, 13 nt, Human
ccccaguaaaauu

SEQ ID NO: 3436367 - RNA, 18 nt, Human
ccccaguaagccacugcc

SEQ ID NO: 3436368 - RNA, 14 nt, Human
ccccaguacacagg

SEQ ID NO: 3436369 - RNA, 17 nt, Human
ccccagucagccucucu

SEQ ID NO: 3436370 - RNA, 15 nt, Human
ccccagugacagcua

SEQ ID NO: 3436371 - RNA, 21 nt, Human
ccccaguuccuguggcucccu

SEQ ID NO: 3436372 - RNA, 22 nt, Human
ccccaguuccuguggcucccuc

SEQ ID NO: 3436373 - RNA, 15 nt, Human
ccccaguucgccugg

SEQ ID NO: 3436374 - RNA, 17 nt, Human
ccccaguucugcuccuc

SEQ ID NO: 3436375 - RNA, 19 nt, Human
ccccaguucugcuccucuc

SEQ ID NO: 3436376 - RNA, 20 nt, Human
ccccaguucugcuccucucc

SEQ ID NO: 3436377 - RNA, 15 nt, Human
ccccauacuccuaug

SEQ ID NO: 3436378 - RNA, 20 nt, Human
ccccaucagugcucccucac

SEQ ID NO: 3436379 - RNA, 16 nt, Human
ccccauccuccagcuu

SEQ ID NO: 3436380 - RNA, 17 nt, Human
ccccauccuccagcuuc

SEQ ID NO: 3436381 - RNA, 18 nt, Human
ccccauccuccccuuccc

SEQ ID NO: 3436382 - RNA, 14 nt, Human
ccccauccucugua

SEQ ID NO: 3436383 - RNA, 14 nt, Human
ccccauccuggccc

SEQ ID NO: 3436384 - RNA, 23 nt, Human
ccccaucgccagcugaugacuca

SEQ ID NO: 3436385 - RNA, 17 nt, Human
ccccaucucaggccaga

SEQ ID NO: 3436386 - RNA, 19 nt, Human
ccccaucuccccucagcuc

SEQ ID NO: 3436387 - RNA, 18 nt, Human
cccaggaaaggcuccagg

SEQ ID NO: 3436388 - RNA, 18 nt, Human
cccaggaauggagccugc

SEQ ID NO: 3436389 - RNA, 20 nt, Human
cccaggaauggagccugcac

SEQ ID NO: 3436390 - RNA, 16 nt, Human
cccaggacaagcaugg

SEQ ID NO: 3436391 - RNA, 19 nt, Human
cccaggacaccacacccag

SEQ ID NO: 3436392 - RNA, 22 nt, Human
cccaggacaccacacccagccu

SEQ ID NO: 3436393 - RNA, 10 nt, Human
cccaggacag

SEQ ID NO: 3436394 - RNA, 15 nt, Human
cccaggaccaagcca

SEQ ID NO: 3436395 - RNA, 16 nt, Human
cccaggaccacaggcu

SEQ ID NO: 3436396 - RNA, 12 nt, Human
cccaggaccagc

SEQ ID NO: 3436397 - RNA, 15 nt, Human
cccaggaccagcugg

SEQ ID NO: 3436398 - RNA, 18 nt, Human
cccaggaccagcuggggc

SEQ ID NO: 3436399 - RNA, 22 nt, Human
cccaggaccagcuggggcgugg

SEQ ID NO: 3436400 - RNA, 12 nt, Human
cccaggacccca

SEQ ID NO: 3436401 - RNA, 12 nt, Human
cccaggacccug

SEQ ID NO: 3436402 - RNA, 13 nt, Human
cccaggacccuga

SEQ ID NO: 3436403 - RNA, 23 nt, Human
cccaggacccugaaggggccaug

SEQ ID NO: 3436404 - RNA, 23 nt, Human
cccaggacgccacucauuucauc

SEQ ID NO: 3436405 - RNA, 18 nt, Human
cccaggacgcuucugaau

SEQ ID NO: 3436406 - RNA, 20 nt, Human
cccaggacgcuucugaaugc

SEQ ID NO: 3436407 - RNA, 17 nt, Human
cccaggacggggccggc

SEQ ID NO: 3436408 - RNA, 15 nt, Human
cccaggacucugacc

SEQ ID NO: 3436409 - RNA, 17 nt, Human
cccaggagacaguucaa

SEQ ID NO: 3436410 - RNA, 13 nt, Human
cccaggagagaga

SEQ ID NO: 3436411 - RNA, 20 nt, Human
cccaggagagagaaagccag

SEQ ID NO: 3436412 - RNA, 19 nt, Human
cccaggagagccagcccuc

SEQ ID NO: 3436413 - RNA, 21 nt, Human
cccaggagagccagcccuccc

SEQ ID NO: 3436414 - RNA, 22 nt, Human
cccaggagagccagcccucccu

SEQ ID NO: 3436415 - RNA, 14 nt, Human
cccaggagccucac

SEQ ID NO: 3436416 - RNA, 17 nt, Human
cccaggagcugcccaga

SEQ ID NO: 3436417 - RNA, 15 nt, Human
cccaggaggcaggga

SEQ ID NO: 3436418 - RNA, 13 nt, Human
cccaggaggccag

SEQ ID NO: 3436419 - RNA, 13 nt, Human
cccaggaggcuga

SEQ ID NO: 3436420 - RNA, 18 nt, Human
cccaggagggagggggcu

SEQ ID NO: 3436421 - RNA, 20 nt, Human
cccaggaggggaacacugcc

SEQ ID NO: 3436422 - RNA, 23 nt, Human
cccaggagguggagguugcagug

SEQ ID NO: 3436423 - RNA, 22 nt, Human
cccaggaguggaggaggccugg

SEQ ID NO: 3436424 - RNA, 14 nt, Human
cccaggaguucugc

SEQ ID NO: 3436425 - RNA, 23 nt, Human
cccaggaguucugcucauucuaa

SEQ ID NO: 3436426 - RNA, 17 nt, Human
cccaggaguuuggccag

SEQ ID NO: 3436427 - RNA, 19 nt, Human
cccaggaguuuggccagaa

SEQ ID NO: 3436428 - RNA, 15 nt, Human
cccaggauauauuuu

SEQ ID NO: 3436429 - RNA, 23 nt, Human
cccaggaucagauugcaugugac

SEQ ID NO: 3436430 - RNA, 13 nt, Human
cccaggcaaggcu

SEQ ID NO: 3436431 - RNA, 12 nt, Human
cccaggcacugc

SEQ ID NO: 3436432 - RNA, 13 nt, Human
cccaggcaggcug

SEQ ID NO: 3436433 - RNA, 17 nt, Human
cccaggcagggagacgg

SEQ ID NO: 3436434 - RNA, 23 nt, Human
cccaggcagggccaacccuucuc

SEQ ID NO: 3436435 - RNA, 11 nt, Human
cccaggcaggu

SEQ ID NO: 3436436 - RNA, 13 nt, Human
cccaggcaggucu

SEQ ID NO: 3436437 - RNA, 23 nt, Human
cccaggcaggucuugaacuccug

SEQ ID NO: 3436438 - RNA, 15 nt, Human
cccaggcauucccca

SEQ ID NO: 3436439 - RNA, 20 nt, Human
cccaggcauuccccaggagg

SEQ ID NO: 3436440 - RNA, 23 nt, Human
cccaggcauuccccaggaggcca

SEQ ID NO: 3436441 - RNA, 17 nt, Human
cccaggccaggacucug

SEQ ID NO: 3436442 - RNA, 19 nt, Human
cccaggccaggacucugca

SEQ ID NO: 3436443 - RNA, 20 nt, Human
cccaggccaggacucugcag

SEQ ID NO: 3436444 - RNA, 13 nt, Human
cccaggccaggcc

SEQ ID NO: 3436445 - RNA, 22 nt, Human
cccaggccaggccaccaggaug

SEQ ID NO: 3436446 - RNA, 19 nt, Human
cccaggccaggcuccuucc

SEQ ID NO: 3436447 - RNA, 21 nt, Human
cccaggccaggcuccuuccug

SEQ ID NO: 3436448 - RNA, 13 nt, Human
cccaggcccacuc

SEQ ID NO: 3436449 - RNA, 22 nt, Human
cccaggccccugccacccuggg

SEQ ID NO: 3436450 - RNA, 23 nt, Human
cccaggccccuggaggcugccuc

SEQ ID NO: 3436451 - RNA, 18 nt, Human
cccaggccgagaagccag

SEQ ID NO: 3436452 - RNA, 14 nt, Human
cccaggccgcagcu

SEQ ID NO: 3436453 - RNA, 17 nt, Human
cccaggccggccagccu

SEQ ID NO: 3436454 - RNA, 23 nt, Human
cccaggccggccagccucacccu

SEQ ID NO: 3436455 - RNA, 15 nt, Human
cccaggccguggcug

SEQ ID NO: 3436456 - RNA, 15 nt, Human
cccaggccugccugu

SEQ ID NO: 3436457 - RNA, 23 nt, Human
cccaggcgggagcgguggcccug

SEQ ID NO: 3436458 - RNA, 17 nt, Human
cccaggcucggccugcc

SEQ ID NO: 3436459 - RNA, 19 nt, Human
cccaggcucggccugcccc

SEQ ID NO: 3436460 - RNA, 12 nt, Human
cccaggcugccg

SEQ ID NO: 3436461 - RNA, 18 nt, Human
cccaggcuggagugcagu

SEQ ID NO: 3436462 - RNA, 19 nt, Human
cccaggcuggagugcagug

SEQ ID NO: 3436463 - RNA, 13 nt, Human
cccaggcuggcca

SEQ ID NO: 3436464 - RNA, 22 nt, Human
cccaggcuggccagccccacag

SEQ ID NO: 3436465 - RNA, 21 nt, Human
cccaggcuggcgugcaguggu

SEQ ID NO: 3436466 - RNA, 13 nt, Human
cccaggcugggaa

SEQ ID NO: 3436467 - RNA, 20 nt, Human
cccagggaagcagcagccuc

SEQ ID NO: 3436468 - RNA, 15 nt, Human
cccagggaaguuuug

SEQ ID NO: 3436469 - RNA, 19 nt, Human
cccagggacaccagccagg

SEQ ID NO: 3436470 - RNA, 21 nt, Human
cccagggacaccagccaggcu

SEQ ID NO: 3436471 - RNA, 17 nt, Human
cccagggaccgaaaagu

SEQ ID NO: 3436472 - RNA, 21 nt, Human
cccagggagcggaaagcagcu

SEQ ID NO: 3436473 - RNA, 15 nt, Human
cccagggcaagcucc

SEQ ID NO: 3436474 - RNA, 20 nt, Human
cccagggcaagcuccgcagg

SEQ ID NO: 3436475 - RNA, 23 nt, Human
cccagggcaaggguuaaggccug

SEQ ID NO: 3436476 - RNA, 14 nt, Human
cccagggcacagga

SEQ ID NO: 3436477 - RNA, 18 nt, Human
cccagggcacaggagcua

SEQ ID NO: 3436478 - RNA, 13 nt, Human
cccagggcacccu

SEQ ID NO: 3436479 - RNA, 18 nt, Human
cccagggcacuucacaga

SEQ ID NO: 3436480 - RNA, 20 nt, Human
cccagggcacuucacagagu

SEQ ID NO: 3436481 - RNA, 22 nt, Human
cccagggcacuucacagagugu

SEQ ID NO: 3436482 - RNA, 13 nt, Human
cccagggcagcca

SEQ ID NO: 3436483 - RNA, 17 nt, Human
cccagggcaucugggag

SEQ ID NO: 3436484 - RNA, 17 nt, Human
cccagggcaucuugcug

SEQ ID NO: 3436485 - RNA, 18 nt, Human
cccagggccacucugccu

SEQ ID NO: 3436486 - RNA, 15 nt, Human
cccagggccagggcc

SEQ ID NO: 3436487 - RNA, 22 nt, Human
cccagggccagggcccugcaga

SEQ ID NO: 3436488 - RNA, 22 nt, Human
cccagggcccagagcccagcuc

SEQ ID NO: 3436489 - RNA, 15 nt, Human
cccagggccugagcc

SEQ ID NO: 3436490 - RNA, 14 nt, Human
cccagggccugcag

SEQ ID NO: 3436491 - RNA, 19 nt, Human
cccagggccugcaggaccu

SEQ ID NO: 3436492 - RNA, 15 nt, Human
cccagggcuacccuc

SEQ ID NO: 3436493 - RNA, 14 nt, Human
cccagggcuccugc

SEQ ID NO: 3436494 - RNA, 16 nt, Human
cccagggcugggagga

SEQ ID NO: 3436495 - RNA, 21 nt, Human
cccagggcugggaggaaggac

SEQ ID NO: 3436496 - RNA, 23 nt, Human
cccagggcuguaacugccaggcu

SEQ ID NO: 3436497 - RNA, 18 nt, Human
cccaggggacaagggauu

SEQ ID NO: 3436498 - RNA, 17 nt, Human
cccaggggaccacaccu

SEQ ID NO: 3436499 - RNA, 24 nt, Human
cccaggggagagggucuggagaag

SEQ ID NO: 3436500 - RNA, 22 nt, Human
cccaggggcauguauuggccug

SEQ ID NO: 3436501 - RNA, 12 nt, Human
cccaggggccgg

SEQ ID NO: 3436502 - RNA, 22 nt, Human
cccagggggcuuccugagggga

SEQ ID NO: 3436503 - RNA, 18 nt, Human
cccaggggucccagccac

SEQ ID NO: 3436504 - RNA, 19 nt, Human
cccaggggucccagccacc

SEQ ID NO: 3436505 - RNA, 20 nt, Human
cccaggggucccagccaccc

SEQ ID NO: 3436506 - RNA, 14 nt, Human
cccaggggucuccc

SEQ ID NO: 3436507 - RNA, 17 nt, Human
cccaggggucucccugg

SEQ ID NO: 3436508 - RNA, 20 nt, Human
cccaggggucucccuggcuc

SEQ ID NO: 3436509 - RNA, 18 nt, Human
cagccucccgaguagcug

SEQ ID NO: 3436510 - RNA, 21 nt, Human
cagccucccuauuuuuuuucu

SEQ ID NO: 3436511 - RNA, 23 nt, Human
cagccucccucugaccugcaggc

SEQ ID NO: 3436512 - RNA, 18 nt, Human
cagccucccugaagccuu

SEQ ID NO: 3436513 - RNA, 21 nt, Human
cagccucccugucggccuggu

SEQ ID NO: 3436514 - RNA, 19 nt, Human
cagccuccgagagggagag

SEQ ID NO: 3436515 - RNA, 20 nt, Human
cagccuccgagagggagaga

SEQ ID NO: 3436516 - RNA, 21 nt, Human
cagccuccgcuucccugguuc

SEQ ID NO: 3436517 - RNA, 17 nt, Human
cagccuccucaucuggg

SEQ ID NO: 3436518 - RNA, 12 nt, Human
cagccuccucug

SEQ ID NO: 3436519 - RNA, 14 nt, Human
cagccuccucugga

SEQ ID NO: 3436520 - RNA, 21 nt, Human
cagccuccucuggacggcagg

SEQ ID NO: 3436521 - RNA, 17 nt, Human
cagccuccucugucugc

SEQ ID NO: 3436522 - RNA, 15 nt, Human
cagccuccugaguag

SEQ ID NO: 3436523 - RNA, 21 nt, Human
cagccucgaacuccugggcuc

SEQ ID NO: 3436524 - RNA, 23 nt, Human
cagccucgaacuccugggcucaa

SEQ ID NO: 3436525 - RNA, 21 nt, Human
cagccucgcaggccucccugc

SEQ ID NO: 3436526 - RNA, 20 nt, Human
cagccucgccccuggcagag

SEQ ID NO: 3436527 - RNA, 20 nt, Human
cagccucuagggaccccucc

SEQ ID NO: 3436528 - RNA, 21 nt, Human
cagccucuagggaccccuccu

SEQ ID NO: 3436529 - RNA, 15 nt, Human
cagccucucagugcc

SEQ ID NO: 3436530 - RNA, 18 nt, Human
cccaugcaagcagaggac

SEQ ID NO: 3436531 - RNA, 12 nt, Human
cccaugcacugu

SEQ ID NO: 3436532 - RNA, 19 nt, Human
cccaugcacugugaaggac

SEQ ID NO: 3436533 - RNA, 20 nt, Human
cccaugcacugugaaggacc

SEQ ID NO: 3436534 - RNA, 14 nt, Human
cccaugcaggcccu

SEQ ID NO: 3436535 - RNA, 19 nt, Human
cccaugcaggcccuuugaa

SEQ ID NO: 3436536 - RNA, 14 nt, Human
cccaugcccaccug

SEQ ID NO: 3436537 - RNA, 18 nt, Human
cccaugcccaccugccca

SEQ ID NO: 3436538 - RNA, 14 nt, Human
cccaugccugucca

SEQ ID NO: 3436539 - RNA, 19 nt, Human
cccaugccuguccagccug

SEQ ID NO: 3436540 - RNA, 14 nt, Human
cccaugccuguggc

SEQ ID NO: 3436541 - RNA, 18 nt, Human
cccaugccuguggcugcg

SEQ ID NO: 3436542 - RNA, 12 nt, Human
cccaugcugccc

SEQ ID NO: 3436543 - RNA, 13 nt, Human
cccaugcuggagc

SEQ ID NO: 3436544 - RNA, 18 nt, Human
cccaugcuguccauccau

SEQ ID NO: 3436545 - RNA, 20 nt, Human
cccauggacacuccagugcc

SEQ ID NO: 3436546 - RNA, 15 nt, Human
cccauggacaggcug

SEQ ID NO: 3436547 - RNA, 14 nt, Human
cccauggagcccca

SEQ ID NO: 3436548 - RNA, 16 nt, Human
cccauggagccccagc

SEQ ID NO: 3436549 - RNA, 14 nt, Human
cccauggcccugag

SEQ ID NO: 3436550 - RNA, 22 nt, Human
cccaugggaagacgaggcccuc

SEQ ID NO: 3436551 - RNA, 21 nt, Human
cccaugggagggagcugagaa

SEQ ID NO: 3436552 - RNA, 15 nt, Human
cccaugggcacugcu

SEQ ID NO: 3436553 - RNA, 21 nt, Human
cccaugggcacugcugggugg

SEQ ID NO: 3436554 - RNA, 17 nt, Human
cccaugggcucugacag

SEQ ID NO: 3436555 - RNA, 19 nt, Human
cccauggggagggauucug

SEQ ID NO: 3436556 - RNA, 22 nt, Human
cccauggguuguguguuuauuu

SEQ ID NO: 3436557 - RNA, 17 nt, Human
cccauggugcuaggaag

SEQ ID NO: 3436558 - RNA, 17 nt, Human
cccauguaacagaaagg

SEQ ID NO: 3436559 - RNA, 14 nt, Human
cccauguagccccc

SEQ ID NO: 3436560 - RNA, 15 nt, Human
cccauguagcccccu

SEQ ID NO: 3436561 - RNA, 23 nt, Human
cccauguagcccccuggccucug

SEQ ID NO: 3436562 - RNA, 17 nt, Human
cccaugucuacacagau

SEQ ID NO: 3436563 - RNA, 14 nt, Human
cccaugugagcugc

SEQ ID NO: 3436564 - RNA, 18 nt, Human
cccauguucugcccccag

SEQ ID NO: 3436565 - RNA, 19 nt, Human
cccauguucugcccccagc

SEQ ID NO: 3436566 - RNA, 21 nt, Human
cccauguucugucccuugccc

SEQ ID NO: 3436567 - RNA, 14 nt, Human
cccauguuguaaug

SEQ ID NO: 3436568 - RNA, 18 nt, Human
cccauguuguaaugcugc

SEQ ID NO: 3436569 - RNA, 19 nt, Human
cccauguuguaaugcugca

SEQ ID NO: 3436570 - RNA, 20 nt, Human
cccauguuguaaugcugcac

SEQ ID NO: 3436571 - RNA, 13 nt, Human
cccauguuucaaa

SEQ ID NO: 3436572 - RNA, 15 nt, Human
cccauguuucucugg

SEQ ID NO: 3436573 - RNA, 18 nt, Human
cccauuagaccaagcuug

SEQ ID NO: 3436574 - RNA, 15 nt, Human
cccauucaagauucc

SEQ ID NO: 3436575 - RNA, 12 nt, Human
cccauuccaggc

SEQ ID NO: 3436576 - RNA, 20 nt, Human
cccauuccaggcagccucug

SEQ ID NO: 3436577 - RNA, 14 nt, Human
cccauuccccagcc

SEQ ID NO: 3436578 - RNA, 12 nt, Human
cccauucccgca

SEQ ID NO: 3436579 - RNA, 16 nt, Human
cccauucccgcagugg

SEQ ID NO: 3436580 - RNA, 12 nt, Human
cccauuccugaa

SEQ ID NO: 3436581 - RNA, 18 nt, Human
cccauucuacuugcucug

SEQ ID NO: 3436582 - RNA, 22 nt, Human
cccauucuacuugcucuggacc

SEQ ID NO: 3436583 - RNA, 24 nt, Human
cccauucuacuugcucuggaccug

SEQ ID NO: 3436584 - RNA, 21 nt, Human
cccauucugccuccauucuga

SEQ ID NO: 3436585 - RNA, 21 nt, Human
cccauucugccugcccaggcc

SEQ ID NO: 3436586 - RNA, 22 nt, Human
cccauucugccugcccaggccc

SEQ ID NO: 3436587 - RNA, 12 nt, Human
cccauucugucc

SEQ ID NO: 3436588 - RNA, 17 nt, Human
cccauucuuuuguaauu

SEQ ID NO: 3436589 - RNA, 22 nt, Human
cccauucuuuuguaauuuaaau

SEQ ID NO: 3436590 - RNA, 17 nt, Human
cccauugguguugucau

SEQ ID NO: 3436591 - RNA, 20 nt, Human
cccauugucccucugcccca

SEQ ID NO: 3436592 - RNA, 22 nt, Human
cccauuguggucacaggaagua

SEQ ID NO: 3436593 - RNA, 12 nt, Human
cccauuuagaau

SEQ ID NO: 3436594 - RNA, 22 nt, Human
cccauuuagaauggugauuuua

SEQ ID NO: 3436595 - RNA, 18 nt, Human
cccauuucacaccugaaa

SEQ ID NO: 3436596 - RNA, 19 nt, Human
cccauuucgugagccccau

SEQ ID NO: 3436597 - RNA, 12 nt, Human
cccauuucuacu

SEQ ID NO: 3436598 - RNA, 16 nt, Human
cccauuucuauuuauu

SEQ ID NO: 3436599 - RNA, 20 nt, Human
cccauuucuauuuauuuacu

SEQ ID NO: 3436600 - RNA, 17 nt, Human
cccauuucuccagaacc

SEQ ID NO: 3436601 - RNA, 18 nt, Human
cccauuucuccagaaccc

SEQ ID NO: 3436602 - RNA, 18 nt, Human
cccauuugugccagagga

SEQ ID NO: 3436603 - RNA, 20 nt, Human
cccauuuuagucacuuuuuu

SEQ ID NO: 3436604 - RNA, 17 nt, Human
cccauuuugaaucacau

SEQ ID NO: 3436605 - RNA, 12 nt, Human
cccauuuugcaa

SEQ ID NO: 3436606 - RNA, 13 nt, Human
cccauuuuuccuu

SEQ ID NO: 3436607 - RNA, 18 nt, Human
ccccaaaacaaagucuuu

SEQ ID NO: 3436608 - RNA, 16 nt, Human
ccccaaaaccacagcc

SEQ ID NO: 3436609 - RNA, 19 nt, Human
ccccaaaaccacagcccug

SEQ ID NO: 3436610 - RNA, 22 nt, Human
ccccaaaaccacagcccuguca

SEQ ID NO: 3436611 - RNA, 18 nt, Human
ccccaaaacucuccucug

SEQ ID NO: 3436612 - RNA, 20 nt, Human
ccccaaaacucuccucugcu

SEQ ID NO: 3436613 - RNA, 13 nt, Human
ccccaaaauuagc

SEQ ID NO: 3436614 - RNA, 19 nt, Human
ccccaaacgggcugcccug

SEQ ID NO: 3436615 - RNA, 23 nt, Human
ccccaaaggaagcuuucucugcu

SEQ ID NO: 3436616 - RNA, 18 nt, Human
ccccaaauaagaagggau

SEQ ID NO: 3436617 - RNA, 11 nt, Human
ccccaaauccg

SEQ ID NO: 3436618 - RNA, 19 nt, Human
ccccaaauccgaaccuccu

SEQ ID NO: 3436619 - RNA, 17 nt, Human
ccccaacacugugcccu

SEQ ID NO: 3436620 - RNA, 16 nt, Human
ccccaacaugcacuga

SEQ ID NO: 3436621 - RNA, 13 nt, Human
ccccaaccccagc

SEQ ID NO: 3436622 - RNA, 13 nt, Human
ccccaacccccac

SEQ ID NO: 3436623 - RNA, 23 nt, Human
ccccaacccccagcacccgggcu

SEQ ID NO: 3436624 - RNA, 14 nt, Human
ccccaaccccugag

SEQ ID NO: 3436625 - RNA, 17 nt, Human
ccccaaccccugaggaa

SEQ ID NO: 3436626 - RNA, 20 nt, Human
ccccaacccguggaggcugc

SEQ ID NO: 3436627 - RNA, 15 nt, Human
ccccaacccugcccc

SEQ ID NO: 3436628 - RNA, 14 nt, Human
ccccaaccucaggg

SEQ ID NO: 3436629 - RNA, 20 nt, Human
ccccaaccucagggcuccca

SEQ ID NO: 3436630 - RNA, 16 nt, Human
ccccaaccugcucucc

SEQ ID NO: 3436631 - RNA, 21 nt, Human
ccccaaccugcucuccucuuc

SEQ ID NO: 3436632 - RNA, 15 nt, Human
ccccaaccuuucccu

SEQ ID NO: 3436633 - RNA, 20 nt, Human
ccccaacuacccccagcugu

SEQ ID NO: 3436634 - RNA, 13 nt, Human
ccccaacuccugg

SEQ ID NO: 3436635 - RNA, 16 nt, Human
ccccaacuccuuccag

SEQ ID NO: 3436636 - RNA, 17 nt, Human
ccccaacuccuuccagc

SEQ ID NO: 3436637 - RNA, 17 nt, Human
ccccaacucugagccca

SEQ ID NO: 3436638 - RNA, 17 nt, Human
ccccaagacucccauga

SEQ ID NO: 3436639 - RNA, 13 nt, Human
ccccaagcgcccu

SEQ ID NO: 3436640 - RNA, 15 nt, Human
ccccaaggggcaguc

SEQ ID NO: 3436641 - RNA, 15 nt, Human
ccccaauaauugcag

SEQ ID NO: 3436642 - RNA, 12 nt, Human
ccccacaacuuu

SEQ ID NO: 3436643 - RNA, 12 nt, Human
ccccacacacac

SEQ ID NO: 3436644 - RNA, 16 nt, Human
ccccacaccucaguuc

SEQ ID NO: 3436645 - RNA, 14 nt, Human
ccccacaccuggcc

SEQ ID NO: 3436646 - RNA, 12 nt, Human
ccccacacuccu

SEQ ID NO: 3436647 - RNA, 14 nt, Human
ccccacacuucccu

SEQ ID NO: 3436648 - RNA, 12 nt, Human
ccccacagcccc

SEQ ID NO: 3436649 - RNA, 17 nt, Human
ccccacagcgucccugg

SEQ ID NO: 3436650 - RNA, 18 nt, Human
ccccacagcgucccuggc

SEQ ID NO: 3436651 - RNA, 13 nt, Human
ccccaccacacau

SEQ ID NO: 3436652 - RNA, 14 nt, Human
ccccaccacacauc

SEQ ID NO: 3436653 - RNA, 12 nt, Human
ccccaccaccua

SEQ ID NO: 3436654 - RNA, 17 nt, Human
ccccaccacuucuuuua

SEQ ID NO: 3436655 - RNA, 18 nt, Human
ccccaccagccucaccag

SEQ ID NO: 3436656 - RNA, 15 nt, Human
ccccaccaucugcug

SEQ ID NO: 3436657 - RNA, 18 nt, Human
ccccaccaucugcugucu

SEQ ID NO: 3436658 - RNA, 19 nt, Human
ccccaccaucugcugucuu

SEQ ID NO: 3436659 - RNA, 20 nt, Human
ccccacccaagggccuggcc

SEQ ID NO: 3436660 - RNA, 21 nt, Human
ccccacccaagggccuggccu

SEQ ID NO: 3436661 - RNA, 12 nt, Human
ccccacccagga

SEQ ID NO: 3436662 - RNA, 13 nt, Human
ccccacccaggag

SEQ ID NO: 3436663 - RNA, 20 nt, Human
ccccaccccagggcagccag

SEQ ID NO: 3436664 - RNA, 13 nt, Human
ccccaccccauuu

SEQ ID NO: 3436665 - RNA, 14 nt, Human
ccccacccccaagg

SEQ ID NO: 3436666 - RNA, 13 nt, Human
ccccacccccagc

SEQ ID NO: 3436667 - RNA, 16 nt, Human
ccccacccccagcuca

SEQ ID NO: 3436668 - RNA, 17 nt, Human
ccccacccccagcucaa

SEQ ID NO: 3436669 - RNA, 17 nt, Human
ccccaccccccaggccu

SEQ ID NO: 3436670 - RNA, 12 nt, Human
ccccacccccuu

SEQ ID NO: 3436671 - RNA, 17 nt, Human
ccccacccccuucagug

SEQ ID NO: 3436672 - RNA, 21 nt, Human
ccccacccccuucagugccca

SEQ ID NO: 3436673 - RNA, 13 nt, Human
ccccaccccuacc

SEQ ID NO: 3436674 - RNA, 13 nt, Human
ccccaccccugcc

SEQ ID NO: 3436675 - RNA, 19 nt, Human
cagcggccccucccacaca

SEQ ID NO: 3436676 - RNA, 22 nt, Human
cccggccggccacccaggaggc

SEQ ID NO: 3436677 - RNA, 18 nt, Human
cccggccugcucccagca

SEQ ID NO: 3436678 - RNA, 23 nt, Human
cccggcgccccgcaccuguacag

SEQ ID NO: 3436679 - RNA, 16 nt, Human
cccggcgccuggccuc

SEQ ID NO: 3436680 - RNA, 20 nt, Human
cccggcgccuggccuccagg

SEQ ID NO: 3436681 - RNA, 21 nt, Human
cccggcgccuggccuccaggc

SEQ ID NO: 3436682 - RNA, 21 nt, Human
cccggcuaugggggcacugag

SEQ ID NO: 3436683 - RNA, 18 nt, Human
cccggcuccuggucaccu

SEQ ID NO: 3436684 - RNA, 22 nt, Human
cccggcuccuggucaccuagga

SEQ ID NO: 3436685 - RNA, 22 nt, Human
cccggcucgagcaguccugccu

SEQ ID NO: 3436686 - RNA, 16 nt, Human
cccggcucugugggug

SEQ ID NO: 3436687 - RNA, 21 nt, Human
cccggcugcagaggccagagg

SEQ ID NO: 3436688 - RNA, 12 nt, Human
cccggcugcccu

SEQ ID NO: 3436689 - RNA, 13 nt, Human
cccggcugcccuu

SEQ ID NO: 3436690 - RNA, 22 nt, Human
cccgggaaccuccccagccugc

SEQ ID NO: 3436691 - RNA, 23 nt, Human
cccgggaaccuccccagccugcg

SEQ ID NO: 3436692 - RNA, 18 nt, Human
cccgggaagggggcuggg

SEQ ID NO: 3436693 - RNA, 22 nt, Human
cccgggaagggggcugggacau

SEQ ID NO: 3436694 - RNA, 23 nt, Human
cccgggacgcagggguugcagug

SEQ ID NO: 3436695 - RNA, 23 nt, Human
cccgggacucacuggcagcccca

SEQ ID NO: 3436696 - RNA, 13 nt, Human
cccgggacucugc

SEQ ID NO: 3436697 - RNA, 13 nt, Human
cccgggagccuag

SEQ ID NO: 3436698 - RNA, 19 nt, Human
cccgggagcugcugcccug

SEQ ID NO: 3436699 - RNA, 13 nt, Human
cccgggaggggcc

SEQ ID NO: 3436700 - RNA, 15 nt, Human
cccgggaggggcccg

SEQ ID NO: 3436701 - RNA, 22 nt, Human
cccgggaggggcccgcuugccu

SEQ ID NO: 3436702 - RNA, 23 nt, Human
cccgggaggggcccgcuugccuc

SEQ ID NO: 3436703 - RNA, 12 nt, Human
cccgggcagggc

SEQ ID NO: 3436704 - RNA, 13 nt, Human
cccgggcagggcu

SEQ ID NO: 3436705 - RNA, 12 nt, Human
cccgggcccaga

SEQ ID NO: 3436706 - RNA, 11 nt, Human
cccgggcccca

SEQ ID NO: 3436707 - RNA, 17 nt, Human
cccgggcccucccuugg

SEQ ID NO: 3436708 - RNA, 18 nt, Human
cccgggcccucccuugga

SEQ ID NO: 3436709 - RNA, 20 nt, Human
cccgggcucagggaccacag

SEQ ID NO: 3436710 - RNA, 16 nt, Human
cccgggcucucugcug

SEQ ID NO: 3436711 - RNA, 14 nt, Human
cccgggcucugccu

SEQ ID NO: 3436712 - RNA, 13 nt, Human
cccgggcugccug

SEQ ID NO: 3436713 - RNA, 15 nt, Human
cccgggcugccuggg

SEQ ID NO: 3436714 - RNA, 15 nt, Human
cccggggacccugug

SEQ ID NO: 3436715 - RNA, 16 nt, Human
cccggggacccuguga

SEQ ID NO: 3436716 - RNA, 20 nt, Human
cccggggcagcugccagaga

SEQ ID NO: 3436717 - RNA, 18 nt, Human
cccggggcagggcagccg

SEQ ID NO: 3436718 - RNA, 14 nt, Human
cccggggccagcac

SEQ ID NO: 3436719 - RNA, 15 nt, Human
cccggggcccagggc

SEQ ID NO: 3436720 - RNA, 18 nt, Human
cccgggguccuguggcag

SEQ ID NO: 3436721 - RNA, 22 nt, Human
cccgggguccuguggcaggcag

SEQ ID NO: 3436722 - RNA, 23 nt, Human
cccggggugagggggggcucccu

SEQ ID NO: 3436723 - RNA, 16 nt, Human
cccgggguggccacag

SEQ ID NO: 3436724 - RNA, 22 nt, Human
cccggguuuggcgggccaagga

SEQ ID NO: 3436725 - RNA, 20 nt, Human
cccggugggacccccguggg

SEQ ID NO: 3436726 - RNA, 19 nt, Human
cccgucaggacguugagga

SEQ ID NO: 3436727 - RNA, 18 nt, Human
cccgucauguuccucaaa

SEQ ID NO: 3436728 - RNA, 16 nt, Human
cccgucccauauccug

SEQ ID NO: 3436729 - RNA, 17 nt, Human
cccgucgacguagaacc

SEQ ID NO: 3436730 - RNA, 12 nt, Human
cccgucucagug

SEQ ID NO: 3436731 - RNA, 15 nt, Human
cccugugauggggcc

SEQ ID NO: 3436732 - RNA, 17 nt, Human
cccugugauggggcccu

SEQ ID NO: 3436733 - RNA, 22 nt, Human
cccugugcaaccucuuggccug

SEQ ID NO: 3436734 - RNA, 12 nt, Human
cccugugccccc

SEQ ID NO: 3436735 - RNA, 22 nt, Human
cccugugccuaacaccagcguu

SEQ ID NO: 3436736 - RNA, 17 nt, Human
cccugugccuccucccu

SEQ ID NO: 3436737 - RNA, 24 nt, Human
cccugugccuuggugugcuguauc

SEQ ID NO: 3436738 - RNA, 20 nt, Human
cccugugccuugucacgcca

SEQ ID NO: 3436739 - RNA, 14 nt, Human
cccugugcuggugu

SEQ ID NO: 3436740 - RNA, 15 nt, Human
cccugugcugguguc

SEQ ID NO: 3436741 - RNA, 22 nt, Human
cccugugcugguguccugacca

SEQ ID NO: 3436742 - RNA, 19 nt, Human
cccuguggaugcugcugcc

SEQ ID NO: 3436743 - RNA, 14 nt, Human
cccuguggcccugg

SEQ ID NO: 3436744 - RNA, 12 nt, Human
cccugugggacc

SEQ ID NO: 3436745 - RNA, 14 nt, Human
cccuguggggaucu

SEQ ID NO: 3436746 - RNA, 15 nt, Human
cccuguggggaucuc

SEQ ID NO: 3436747 - RNA, 13 nt, Human
cccugugugaaug

SEQ ID NO: 3436748 - RNA, 17 nt, Human
cccuguguugucucuag

SEQ ID NO: 3436749 - RNA, 18 nt, Human
cccuguguugucucuaga

SEQ ID NO: 3436750 - RNA, 23 nt, Human
cccuguguugucucuagagcagg

SEQ ID NO: 3436751 - RNA, 16 nt, Human
cccuguuacaaagcug

SEQ ID NO: 3436752 - RNA, 21 nt, Human
cccuguuauuuucaaguagcu

SEQ ID NO: 3436753 - RNA, 13 nt, Human
cccuguucacucu

SEQ ID NO: 3436754 - RNA, 14 nt, Human
cccuguuccugcug

SEQ ID NO: 3436755 - RNA, 15 nt, Human
cccuguuccugcugc

SEQ ID NO: 3436756 - RNA, 16 nt, Human
cccuguuccugcugcu

SEQ ID NO: 3436757 - RNA, 15 nt, Human
cccuguuccuggagg

SEQ ID NO: 3436758 - RNA, 11 nt, Human
cccuguucuaa

SEQ ID NO: 3436759 - RNA, 12 nt, Human
cccuguucuaag

SEQ ID NO: 3436760 - RNA, 23 nt, Human
cccuguucuaagggggaggggaa

SEQ ID NO: 3436761 - RNA, 20 nt, Human
cccuguucuuccuccagcug

SEQ ID NO: 3436762 - RNA, 20 nt, Human
cccuguugacgaagucucuu

SEQ ID NO: 3436763 - RNA, 16 nt, Human
cccuguuuaauauuua

SEQ ID NO: 3436764 - RNA, 17 nt, Human
cccuguuuaauauuuaa

SEQ ID NO: 3436765 - RNA, 18 nt, Human
cccuguuuaauauuuaaa

SEQ ID NO: 3436766 - RNA, 19 nt, Human
cccuguuucaaucacuguc

SEQ ID NO: 3436767 - RNA, 14 nt, Human
cccuguuuccugag

SEQ ID NO: 3436768 - RNA, 19 nt, Human
cccuguuuguuucugaaag

SEQ ID NO: 3436769 - RNA, 22 nt, Human
cccuguuuucccacgaggaauc

SEQ ID NO: 3436770 - RNA, 14 nt, Human
cccuguuuucugag

SEQ ID NO: 3436771 - RNA, 16 nt, Human
cccuguuuucugagcc

SEQ ID NO: 3436772 - RNA, 17 nt, Human
cccuguuuucugagccc

SEQ ID NO: 3436773 - RNA, 20 nt, Human
cccuguuuucugagcccggg

SEQ ID NO: 3436774 - RNA, 13 nt, Human
cccuuaaaauuua

SEQ ID NO: 3436775 - RNA, 22 nt, Human
cccuuaaacaguugcacagcau

SEQ ID NO: 3436776 - RNA, 15 nt, Human
cccuuaacccaagga

SEQ ID NO: 3436777 - RNA, 17 nt, Human
cccuuaacccaaggagc

SEQ ID NO: 3436778 - RNA, 22 nt, Human
cccuuaacccaaggagcacagg

SEQ ID NO: 3436779 - RNA, 18 nt, Human
cccuuaauuacuuaaaaa

SEQ ID NO: 3436780 - RNA, 20 nt, Human
cccuuaauuacuuaaaaaaa

SEQ ID NO: 3436781 - RNA, 16 nt, Human
cccuuacacguaccuc

SEQ ID NO: 3436782 - RNA, 15 nt, Human
cccuuacagccucug

SEQ ID NO: 3436783 - RNA, 18 nt, Human
cccuuacagccucugacu

SEQ ID NO: 3436784 - RNA, 19 nt, Human
cccuuacagccucugacuu

SEQ ID NO: 3436785 - RNA, 17 nt, Human
cccuuaccccuuagccu

SEQ ID NO: 3436786 - RNA, 21 nt, Human
cccuuacccuuuccuccuuua

SEQ ID NO: 3436787 - RNA, 19 nt, Human
cccuuaccucggugccuuc

SEQ ID NO: 3436788 - RNA, 17 nt, Human
cccuuaccugccaggaa

SEQ ID NO: 3436789 - RNA, 20 nt, Human
cccuuaccugccaggaagcc

SEQ ID NO: 3436790 - RNA, 15 nt, Human
cccuuacgugagucc

SEQ ID NO: 3436791 - RNA, 21 nt, Human
cccuuacuggcuuaccuccuc

SEQ ID NO: 3436792 - RNA, 16 nt, Human
cccuuagaaaaugugu

SEQ ID NO: 3436793 - RNA, 15 nt, Human
cccuuagacagaggc

SEQ ID NO: 3436794 - RNA, 16 nt, Human
cccuuagacagaggcc

SEQ ID NO: 3436795 - RNA, 21 nt, Human
cccuuagacagaggcccucaa

SEQ ID NO: 3436796 - RNA, 14 nt, Human
cccuuagcagggaa

SEQ ID NO: 3436797 - RNA, 23 nt, Human
cccuuagcagggaaacagcuaau

SEQ ID NO: 3436798 - RNA, 14 nt, Human
cccuuagccucccu

SEQ ID NO: 3436799 - RNA, 23 nt, Human
cccuuagucccccaacucugagc

SEQ ID NO: 3436800 - RNA, 19 nt, Human
cccuuaugcgguuaauuuu

SEQ ID NO: 3436801 - RNA, 16 nt, Human
cccuuauuacacggaa

SEQ ID NO: 3436802 - RNA, 18 nt, Human
cccuucaaccauucccca

SEQ ID NO: 3436803 - RNA, 19 nt, Human
cccuucacaccauaacuag

SEQ ID NO: 3436804 - RNA, 12 nt, Human
cccuucagcccc

SEQ ID NO: 3436805 - RNA, 21 nt, Human
cccuucaguacccucucagcu

SEQ ID NO: 3436806 - RNA, 13 nt, Human
cccuucagugccc

SEQ ID NO: 3436807 - RNA, 17 nt, Human
cccuucagugcccacca

SEQ ID NO: 3436808 - RNA, 14 nt, Human
cccuucaucuggaa

SEQ ID NO: 3436809 - RNA, 15 nt, Human
cccuucaucuuccug

SEQ ID NO: 3436810 - RNA, 17 nt, Human
cccuucaucuuccugug

SEQ ID NO: 3436811 - RNA, 20 nt, Human
cccuucaucuuccugugucc

SEQ ID NO: 3436812 - RNA, 19 nt, Human
cccuucauugauuuccugu

SEQ ID NO: 3436813 - RNA, 11 nt, Human
cccuucauuug

SEQ ID NO: 3436814 - RNA, 20 nt, Human
cccuuccaaauaauaaaguc

SEQ ID NO: 3436815 - RNA, 19 nt, Human
cccuuccaccugcucugcu

SEQ ID NO: 3436816 - RNA, 13 nt, Human
cccuuccacugag

SEQ ID NO: 3436817 - RNA, 16 nt, Human
cccuuccacugagggc

SEQ ID NO: 3436818 - RNA, 14 nt, Human
cccuuccacugccu

SEQ ID NO: 3436819 - RNA, 16 nt, Human
cccuuccacugccucu

SEQ ID NO: 3436820 - RNA, 18 nt, Human
cccuuccacugccucugc

SEQ ID NO: 3436821 - RNA, 24 nt, Human
caggaucagauugcaugugacucu

SEQ ID NO: 3436822 - RNA, 14 nt, Human
caggaucagucuga

SEQ ID NO: 3436823 - RNA, 15 nt, Human
caggaucauggugua

SEQ ID NO: 3436824 - RNA, 16 nt, Human
caggaucaugguguaa

SEQ ID NO: 3436825 - RNA, 23 nt, Human
caggaucaugguguaauaagaca

SEQ ID NO: 3436826 - RNA, 15 nt, Human
caggauccagccuca

SEQ ID NO: 3436827 - RNA, 13 nt, Human
caggauccaggcc

SEQ ID NO: 3436828 - RNA, 22 nt, Human
caggauccccaaggcacuugag

SEQ ID NO: 3436829 - RNA, 23 nt, Human
caggaucgcaagagccauguaga

SEQ ID NO: 3436830 - RNA, 18 nt, Human
caggaucucuuagcauuu

SEQ ID NO: 3436831 - RNA, 18 nt, Human
caggaugaugacuaugga

SEQ ID NO: 3436832 - RNA, 19 nt, Human
caggaugcccacggcugga

SEQ ID NO: 3436833 - RNA, 19 nt, Human
caggaugcccagggccacu

SEQ ID NO: 3436834 - RNA, 13 nt, Human
caggaugcugggu

SEQ ID NO: 3436835 - RNA, 15 nt, Human
caggaugcugggugg

SEQ ID NO: 3436836 - RNA, 15 nt, Human
caggauggaggggug

SEQ ID NO: 3436837 - RNA, 22 nt, Human
caggauggaggggugguccuga

SEQ ID NO: 3436838 - RNA, 21 nt, Human
caggauggcaaccagaccauu

SEQ ID NO: 3436839 - RNA, 16 nt, Human
caggauggccuggcca

SEQ ID NO: 3436840 - RNA, 19 nt, Human
caggaugggggcuggccuc

SEQ ID NO: 3436841 - RNA, 15 nt, Human
caggaugguguuacu

SEQ ID NO: 3436842 - RNA, 21 nt, Human
caggaugguguuacugcaguu

SEQ ID NO: 3436843 - RNA, 22 nt, Human
caggaugguguuacugcaguug

SEQ ID NO: 3436844 - RNA, 21 nt, Human
caggaugguucccuugaugaa

SEQ ID NO: 3436845 - RNA, 19 nt, Human
caggauguacaaggacagc

SEQ ID NO: 3436846 - RNA, 18 nt, Human
caggauguguuugcuuuc

SEQ ID NO: 3436847 - RNA, 17 nt, Human
caggauucagccggagg

SEQ ID NO: 3436848 - RNA, 22 nt, Human
caggauuccucuuuucucugcc

SEQ ID NO: 3436849 - RNA, 18 nt, Human
caggauucuuccucccuc

SEQ ID NO: 3436850 - RNA, 15 nt, Human
caggauugaagagca

SEQ ID NO: 3436851 - RNA, 16 nt, Human
caggauugcgagagau

SEQ ID NO: 3436852 - RNA, 19 nt, Human
caggauugcgagagaugug

SEQ ID NO: 3436853 - RNA, 20 nt, Human
caggauuggggaagagagcc

SEQ ID NO: 3436854 - RNA, 24 nt, Human
caggauuggggaagagagccugca

SEQ ID NO: 3436855 - RNA, 19 nt, Human
caggauuuaaaaacuggaa

SEQ ID NO: 3436856 - RNA, 20 nt, Human
caggauuuaaaaacuggaac

SEQ ID NO: 3436857 - RNA, 21 nt, Human
caggauuucgugggucuguuu

SEQ ID NO: 3436858 - RNA, 12 nt, Human
caggauuucuaa

SEQ ID NO: 3436859 - RNA, 21 nt, Human
caggauuugaacucagaucug

SEQ ID NO: 3436860 - RNA, 14 nt, Human
caggauuugcacag

SEQ ID NO: 3436861 - RNA, 22 nt, Human
caggauuuuaacaaaagcaaga

SEQ ID NO: 3436862 - RNA, 23 nt, Human
caggcaaacauuuucucuuagaa

SEQ ID NO: 3436863 - RNA, 17 nt, Human
caggcaaagaaaaugaa

SEQ ID NO: 3436864 - RNA, 13 nt, Human
caggcaaaucagu

SEQ ID NO: 3436865 - RNA, 16 nt, Human
caggcaacugaggcag

SEQ ID NO: 3436866 - RNA, 17 nt, Human
caggcaacugaggcaga

SEQ ID NO: 3436867 - RNA, 19 nt, Human
caggcaacugaggcagaca

SEQ ID NO: 3436868 - RNA, 20 nt, Human
caggcaacuucaguccuggg

SEQ ID NO: 3436869 - RNA, 21 nt, Human
caggcaacuucaguccuggga

SEQ ID NO: 3436870 - RNA, 15 nt, Human
caggcaagcaccucc

SEQ ID NO: 3436871 - RNA, 21 nt, Human
caggcaaggggaaucuggagg

SEQ ID NO: 3436872 - RNA, 17 nt, Human
caggcaaggucuggccu

SEQ ID NO: 3436873 - RNA, 12 nt, Human
caggcaauuccg

SEQ ID NO: 3436874 - RNA, 24 nt, Human
caggcaauucuccugccuuugccu

SEQ ID NO: 3436875 - RNA, 19 nt, Human
caggcacacaaggggcccu

SEQ ID NO: 3436876 - RNA, 16 nt, Human
caggcacagcugaguu

SEQ ID NO: 3436877 - RNA, 12 nt, Human
caggcacaggau

SEQ ID NO: 3436878 - RNA, 13 nt, Human
caggcacaggcag

SEQ ID NO: 3436879 - RNA, 12 nt, Human
caggcacagguc

SEQ ID NO: 3436880 - RNA, 13 nt, Human
caggcacagguca

SEQ ID NO: 3436881 - RNA, 20 nt, Human
caggcaccaggacuagggcu

SEQ ID NO: 3436882 - RNA, 16 nt, Human
caggcaccagucccug

SEQ ID NO: 3436883 - RNA, 13 nt, Human
caggcaccgagaa

SEQ ID NO: 3436884 - RNA, 16 nt, Human
caggcaccucacagaa

SEQ ID NO: 3436885 - RNA, 20 nt, Human
caggcaccucacagaaauga

SEQ ID NO: 3436886 - RNA, 14 nt, Human
caggcaccucuucc

SEQ ID NO: 3436887 - RNA, 19 nt, Human
caggcaccuguagucccag

SEQ ID NO: 3436888 - RNA, 17 nt, Human
caggcacgggugguccc

SEQ ID NO: 3436889 - RNA, 22 nt, Human
caggcacuagccuuuggcucug

SEQ ID NO: 3436890 - RNA, 15 nt, Human
caggcacugcccugg

SEQ ID NO: 3436891 - RNA, 22 nt, Human
cccuucuugcugcccugcccca

SEQ ID NO: 3436892 - RNA, 21 nt, Human
cccuucuuggugcuuacacau

SEQ ID NO: 3436893 - RNA, 17 nt, Human
cccuucuuuccacagaa

SEQ ID NO: 3436894 - RNA, 14 nt, Human
cccuucuuuccucu

SEQ ID NO: 3436895 - RNA, 15 nt, Human
cccuucuuuuaugag

SEQ ID NO: 3436896 - RNA, 22 nt, Human
cccuucuuuuaugagcagaagg

SEQ ID NO: 3436897 - RNA, 17 nt, Human
cccuugacaacuggcag

SEQ ID NO: 3436898 - RNA, 18 nt, Human
cccuugacaacuggcagg

SEQ ID NO: 3436899 - RNA, 15 nt, Human
cccuugacaccgggg

SEQ ID NO: 3436900 - RNA, 12 nt, Human
cccuugaccugc

SEQ ID NO: 3436901 - RNA, 15 nt, Human
cccuugaccugcuga

SEQ ID NO: 3436902 - RNA, 17 nt, Human
cccuugacuuugcuccu

SEQ ID NO: 3436903 - RNA, 13 nt, Human
cccuugagaccuc

SEQ ID NO: 3436904 - RNA, 14 nt, Human
cccuugagaccuca

SEQ ID NO: 3436905 - RNA, 14 nt, Human
cccuugagcccucc

SEQ ID NO: 3436906 - RNA, 17 nt, Human
cccuugagcccucuaug

SEQ ID NO: 3436907 - RNA, 18 nt, Human
cccuugagcuccccaaaa

SEQ ID NO: 3436908 - RNA, 20 nt, Human
cccuugagcuccccaaaaac

SEQ ID NO: 3436909 - RNA, 22 nt, Human
cccuugaggaaacaacagcuuu

SEQ ID NO: 3436910 - RNA, 15 nt, Human
cccuugaggucucag

SEQ ID NO: 3436911 - RNA, 16 nt, Human
cccuugaugcacagag

SEQ ID NO: 3436912 - RNA, 19 nt, Human
cccuugaugcacagagaag

SEQ ID NO: 3436913 - RNA, 22 nt, Human
cccuugcacuaaaguauguaaa

SEQ ID NO: 3436914 - RNA, 21 nt, Human
cccuugcaguucagcaccacc

SEQ ID NO: 3436915 - RNA, 18 nt, Human
cccuugccagcugcugag

SEQ ID NO: 3436916 - RNA, 21 nt, Human
cccuugccagcugcugagccg

SEQ ID NO: 3436917 - RNA, 14 nt, Human
cccuugcccagggc

SEQ ID NO: 3436918 - RNA, 21 nt, Human
cccuugcccagggcucagccu

SEQ ID NO: 3436919 - RNA, 15 nt, Human
cccuugccccccugg

SEQ ID NO: 3436920 - RNA, 22 nt, Human
cccuugccccccuggccucccc

SEQ ID NO: 3436921 - RNA, 12 nt, Human
cccuugcccuga

SEQ ID NO: 3436922 - RNA, 21 nt, Human
cccuugcccugaccucccagc

SEQ ID NO: 3436923 - RNA, 17 nt, Human
cccuugcccuugcccug

SEQ ID NO: 3436924 - RNA, 21 nt, Human
cccuugcccuugcccugaccu

SEQ ID NO: 3436925 - RNA, 18 nt, Human
cccuugccgucuaccuga

SEQ ID NO: 3436926 - RNA, 23 nt, Human
cccuugccuccccauuucccauc

SEQ ID NO: 3436927 - RNA, 15 nt, Human
cccuugccugugcca

SEQ ID NO: 3436928 - RNA, 18 nt, Human
cccuugcucuccccugcc

SEQ ID NO: 3436929 - RNA, 13 nt, Human
cccuugcuggccc

SEQ ID NO: 3436930 - RNA, 16 nt, Human
cccuugcuggccccag

SEQ ID NO: 3436931 - RNA, 15 nt, Human
cccuugcugugaauu

SEQ ID NO: 3436932 - RNA, 22 nt, Human
cccuugcuugccugcagggcca

SEQ ID NO: 3436933 - RNA, 18 nt, Human
cccuugcuuuucccucuu

SEQ ID NO: 3436934 - RNA, 21 nt, Human
cccuugcuuuucccucuuuuc

SEQ ID NO: 3436935 - RNA, 13 nt, Human
cccuuggaaaccu

SEQ ID NO: 3436936 - RNA, 17 nt, Human
cccuuggaaaccugccc

SEQ ID NO: 3436937 - RNA, 18 nt, Human
cccuuggaaaccugcccu

SEQ ID NO: 3436938 - RNA, 12 nt, Human
cccuuggaagag

SEQ ID NO: 3436939 - RNA, 14 nt, Human
cccuuggacacgcu

SEQ ID NO: 3436940 - RNA, 16 nt, Human
cccuuggacacgcuca

SEQ ID NO: 3436941 - RNA, 14 nt, Human
cccuuggacauuuu

SEQ ID NO: 3436942 - RNA, 13 nt, Human
cccuuggaggcca

SEQ ID NO: 3436943 - RNA, 17 nt, Human
cccuuggaggcugucuu

SEQ ID NO: 3436944 - RNA, 11 nt, Human
cccuuggccag

SEQ ID NO: 3436945 - RNA, 16 nt, Human
cccuuggccugucuca

SEQ ID NO: 3436946 - RNA, 12 nt, Human
cccuuggcucuc

SEQ ID NO: 3436947 - RNA, 14 nt, Human
cccuuggcugggac

SEQ ID NO: 3436948 - RNA, 18 nt, Human
cccuugggcggcugagag

SEQ ID NO: 3436949 - RNA, 15 nt, Human
cccuugggcucugau

SEQ ID NO: 3436950 - RNA, 16 nt, Human
cccuuggugcccuccu

SEQ ID NO: 3436951 - RNA, 23 nt, Human
cccuugguuaggcauugugggaa

SEQ ID NO: 3436952 - RNA, 18 nt, Human
cccuuguauccccugcag

SEQ ID NO: 3436953 - RNA, 22 nt, Human
cccuugucggccccaccagugc

SEQ ID NO: 3436954 - RNA, 23 nt, Human
cccuugucugagaugcugguaau

SEQ ID NO: 3436955 - RNA, 17 nt, Human
cccuugugcguggguga

SEQ ID NO: 3436956 - RNA, 23 nt, Human
cccuugugcgugggugaagccgc

SEQ ID NO: 3436957 - RNA, 16 nt, Human
cccuuguggucccacc

SEQ ID NO: 3436958 - RNA, 18 nt, Human
cccuuguggucccacccc

SEQ ID NO: 3436959 - RNA, 12 nt, Human
cccuugugugug

SEQ ID NO: 3436960 - RNA, 13 nt, Human
cccuuguucucua

SEQ ID NO: 3436961 - RNA, 20 nt, Human
cccuuguuuggggcaggagu

SEQ ID NO: 3436962 - RNA, 20 nt, Human
cccuuucacaggcagccagu

SEQ ID NO: 3436963 - RNA, 12 nt, Human
cccuuucccacc

SEQ ID NO: 3436964 - RNA, 14 nt, Human
cccuuucccacccc

SEQ ID NO: 3436965 - RNA, 17 nt, Human
caggccaagaaacgucu

SEQ ID NO: 3436966 - RNA, 18 nt, Human
caggccaagagcagaggc

SEQ ID NO: 3436967 - RNA, 23 nt, Human
caggccaagagcagaggcagcga

SEQ ID NO: 3436968 - RNA, 20 nt, Human
caggccaaggucugagccac

SEQ ID NO: 3436969 - RNA, 17 nt, Human
caggccacaagacccuu

SEQ ID NO: 3436970 - RNA, 15 nt, Human
caggccaccaggaug

SEQ ID NO: 3436971 - RNA, 15 nt, Human
caggccacccugugc

SEQ ID NO: 3436972 - RNA, 17 nt, Human
caggccacccugugcag

SEQ ID NO: 3436973 - RNA, 16 nt, Human
caggccaccugccccc

SEQ ID NO: 3436974 - RNA, 19 nt, Human
caggccaccugcccccuuc

SEQ ID NO: 3436975 - RNA, 22 nt, Human
caggccaccugcccccuucucc

SEQ ID NO: 3436976 - RNA, 13 nt, Human
caggccagagcca

SEQ ID NO: 3436977 - RNA, 15 nt, Human
caggccagccuccga

SEQ ID NO: 3436978 - RNA, 16 nt, Human
caggccagccuccgag

SEQ ID NO: 3436979 - RNA, 12 nt, Human
caggccagcugu

SEQ ID NO: 3436980 - RNA, 20 nt, Human
caggccaggacucugcagcc

SEQ ID NO: 3436981 - RNA, 21 nt, Human
caggccaggacucugcagccu

SEQ ID NO: 3436982 - RNA, 23 nt, Human
caggccaggacucugcagccuca

SEQ ID NO: 3436983 - RNA, 12 nt, Human
caggccaggcau

SEQ ID NO: 3436984 - RNA, 11 nt, Human
caggccaggcc

SEQ ID NO: 3436985 - RNA, 16 nt, Human
caggccaggccaccag

SEQ ID NO: 3436986 - RNA, 17 nt, Human
caggccaggcccucugc

SEQ ID NO: 3436987 - RNA, 19 nt, Human
caggccaggcccucugccc

SEQ ID NO: 3436988 - RNA, 17 nt, Human
caggccagggggccagu

SEQ ID NO: 3436989 - RNA, 23 nt, Human
caggccaguaagggaaauagaaa

SEQ ID NO: 3436990 - RNA, 14 nt, Human
caggccaucuucca

SEQ ID NO: 3436991 - RNA, 19 nt, Human
caggccaucuuccaggugg

SEQ ID NO: 3436992 - RNA, 15 nt, Human
caggccauugugaac

SEQ ID NO: 3436993 - RNA, 23 nt, Human
caggcccaaauuaucaagcuaau

SEQ ID NO: 3436994 - RNA, 16 nt, Human
caggcccaaggcuccc

SEQ ID NO: 3436995 - RNA, 23 nt, Human
caggcccacccugcuuggcccag

SEQ ID NO: 3436996 - RNA, 23 nt, Human
caggcccaccuaccuucaaagcu

SEQ ID NO: 3436997 - RNA, 13 nt, Human
caggcccacucag

SEQ ID NO: 3436998 - RNA, 20 nt, Human
caggcccagcauugcugguu

SEQ ID NO: 3436999 - RNA, 22 nt, Human
caggcccagcauugcugguucu

SEQ ID NO: 3437000 - RNA, 19 nt, Human
caggcccagccgacccccu

SEQ ID NO: 3437001 - RNA, 21 nt, Human
caggcccagccgacccccucu

SEQ ID NO: 3437002 - RNA, 22 nt, Human
caggcccagccgacccccucuc

SEQ ID NO: 3437003 - RNA, 21 nt, Human
caggcccaugggaggcuggag

SEQ ID NO: 3437004 - RNA, 14 nt, Human
caggccccaggaag

SEQ ID NO: 3437005 - RNA, 15 nt, Human
caggccccaggaagc

SEQ ID NO: 3437006 - RNA, 17 nt, Human
caggccccaugaccucc

SEQ ID NO: 3437007 - RNA, 20 nt, Human
caggccccaugaccuccagc

SEQ ID NO: 3437008 - RNA, 19 nt, Human
caggcccccaagccugcag

SEQ ID NO: 3437009 - RNA, 17 nt, Human
caggcccccaccuggcu

SEQ ID NO: 3437010 - RNA, 21 nt, Human
caggcccccagaaccccuggc

SEQ ID NO: 3437011 - RNA, 20 nt, Human
caggcccccaggugccaguu

SEQ ID NO: 3437012 - RNA, 18 nt, Human
caggccccgaggacccag

SEQ ID NO: 3437013 - RNA, 20 nt, Human
caggccccgaggacccagac

SEQ ID NO: 3437014 - RNA, 22 nt, Human
caggccccgaggacccagaccc

SEQ ID NO: 3437015 - RNA, 17 nt, Human
caggccccgcuugucca

SEQ ID NO: 3437016 - RNA, 21 nt, Human
caggccccgugaggcaauggg

SEQ ID NO: 3437017 - RNA, 15 nt, Human
caggccccugccacc

SEQ ID NO: 3437018 - RNA, 17 nt, Human
caggccccugccacccu

SEQ ID NO: 3437019 - RNA, 13 nt, Human
caggccccuggag

SEQ ID NO: 3437020 - RNA, 14 nt, Human
caggccccuggagg

SEQ ID NO: 3437021 - RNA, 19 nt, Human
caggccccuggaggcugcc

SEQ ID NO: 3437022 - RNA, 22 nt, Human
caggccccuuuucacucccucc

SEQ ID NO: 3437023 - RNA, 19 nt, Human
caggcccggcuccaggcuc

SEQ ID NO: 3437024 - RNA, 16 nt, Human
caggcccggggcuggc

SEQ ID NO: 3437025 - RNA, 11 nt, Human
caggcccuccu

SEQ ID NO: 3437026 - RNA, 18 nt, Human
caggcccuccucccuccc

SEQ ID NO: 3437027 - RNA, 14 nt, Human
caggcccuccucuc

SEQ ID NO: 3437028 - RNA, 12 nt, Human
caggcccugcac

SEQ ID NO: 3437029 - RNA, 14 nt, Human
caggcccugcacug

SEQ ID NO: 3437030 - RNA, 16 nt, Human
caggcccugcacuguc

SEQ ID NO: 3437031 - RNA, 20 nt, Human
caggcccugcacuguccugc

SEQ ID NO: 3437032 - RNA, 22 nt, Human
caggcccugcacuguccugcuc

SEQ ID NO: 3437033 - RNA, 17 nt, Human
caggcccugcaguguuc

SEQ ID NO: 3437034 - RNA, 13 nt, Human
caggcccugcucc

SEQ ID NO: 3437035 - RNA, 14 nt, Human
caggcccugcuccu

SEQ ID NO: 3437036 - RNA, 10 nt, Human
caggcccugg

SEQ ID NO: 3437037 - RNA, 11 nt, Human
caggcccuggc

SEQ ID NO: 3437038 - RNA, 21 nt, Human
caggcccuuauuuucaagaaa

SEQ ID NO: 3437039 - RNA, 19 nt, Human
caggcccuuccucuccacu

SEQ ID NO: 3437040 - RNA, 23 nt, Human
caggcccuuccucuccacugccu

SEQ ID NO: 3437041 - RNA, 16 nt, Human
caggcccuuuccucag

SEQ ID NO: 3437042 - RNA, 19 nt, Human
caggcccuuugaagccuca

SEQ ID NO: 3437043 - RNA, 13 nt, Human
caggccgcagcuc

SEQ ID NO: 3437044 - RNA, 21 nt, Human
caggccggcagccccagccug

SEQ ID NO: 3437045 - RNA, 23 nt, Human
caggccggcagccccagccugcu

SEQ ID NO: 3437046 - RNA, 22 nt, Human
caggccggugugggcugugucg

SEQ ID NO: 3437047 - RNA, 15 nt, Human
caggccguggcugcc

SEQ ID NO: 3437048 - RNA, 17 nt, Human
caggccguggcugccca

SEQ ID NO: 3437049 - RNA, 15 nt, Human
caggccuacuccugu

SEQ ID NO: 3437050 - RNA, 16 nt, Human
caggccuacuccuguc

SEQ ID NO: 3437051 - RNA, 19 nt, Human
caggccuacuccugucuuc

SEQ ID NO: 3437052 - RNA, 19 nt, Human
caggccucaccucuaccca

SEQ ID NO: 3437053 - RNA, 21 nt, Human
caggccucaccucuacccaaa

SEQ ID NO: 3437054 - RNA, 14 nt, Human
caggccucagggcu

SEQ ID NO: 3437055 - RNA, 14 nt, Human
caggccuccagcuc

SEQ ID NO: 3437056 - RNA, 18 nt, Human
cccucugguuugccggug

SEQ ID NO: 3437057 - RNA, 17 nt, Human
cccucuguccaccagcc

SEQ ID NO: 3437058 - RNA, 20 nt, Human
cccucuguccaggcacugag

SEQ ID NO: 3437059 - RNA, 20 nt, Human
cccucuguguauuugcuuuu

SEQ ID NO: 3437060 - RNA, 17 nt, Human
cccucuguucaguaaca

SEQ ID NO: 3437061 - RNA, 22 nt, Human
cccucuucccugguaagaaaaa

SEQ ID NO: 3437062 - RNA, 14 nt, Human
cccucuuccuacug

SEQ ID NO: 3437063 - RNA, 23 nt, Human
cccucuuccucuugacccugcac

SEQ ID NO: 3437064 - RNA, 11 nt, Human
cccucuuccug

SEQ ID NO: 3437065 - RNA, 12 nt, Human
cccucuuccuga

SEQ ID NO: 3437066 - RNA, 13 nt, Human
cccucuuccuucc

SEQ ID NO: 3437067 - RNA, 20 nt, Human
cccucuucuuucagacuugc

SEQ ID NO: 3437068 - RNA, 24 nt, Human
cccucuucuuucagacuugccaug

SEQ ID NO: 3437069 - RNA, 16 nt, Human
cccucuugcccauccu

SEQ ID NO: 3437070 - RNA, 17 nt, Human
cccucuugcccauccug

SEQ ID NO: 3437071 - RNA, 13 nt, Human
cccucuugcccca

SEQ ID NO: 3437072 - RNA, 23 nt, Human
cccucuuggagaagucucagcua

SEQ ID NO: 3437073 - RNA, 17 nt, Human
cccucuugucuccccug

SEQ ID NO: 3437074 - RNA, 13 nt, Human
cccucuuucucuu

SEQ ID NO: 3437075 - RNA, 15 nt, Human
cccucuuucucuuuc

SEQ ID NO: 3437076 - RNA, 18 nt, Human
cccucuuucucuuucuuc

SEQ ID NO: 3437077 - RNA, 14 nt, Human
cccucuuugcugca

SEQ ID NO: 3437078 - RNA, 17 nt, Human
cccucuuuggcuccccu

SEQ ID NO: 3437079 - RNA, 21 nt, Human
cccucuuuucuuacuccuccu

SEQ ID NO: 3437080 - RNA, 22 nt, Human
cccucuuuucuuacuccuccuc

SEQ ID NO: 3437081 - RNA, 15 nt, Human
cccugaaagcccuga

SEQ ID NO: 3437082 - RNA, 18 nt, Human
cccugaaagcccugagcu

SEQ ID NO: 3437083 - RNA, 11 nt, Human
cccugaaaugu

SEQ ID NO: 3437084 - RNA, 14 nt, Human
cccugaacaagaau

SEQ ID NO: 3437085 - RNA, 17 nt, Human
cccugaagccagccuuc

SEQ ID NO: 3437086 - RNA, 19 nt, Human
cccugaagcugugcggagc

SEQ ID NO: 3437087 - RNA, 12 nt, Human
cccugaaggccc

SEQ ID NO: 3437088 - RNA, 14 nt, Human
cccugaaggccccg

SEQ ID NO: 3437089 - RNA, 16 nt, Human
cccugaaggccccgcc

SEQ ID NO: 3437090 - RNA, 15 nt, Human
cccugaaucccccuu

SEQ ID NO: 3437091 - RNA, 22 nt, Human
cccugacaacacucauugaccu

SEQ ID NO: 3437092 - RNA, 15 nt, Human
cccugacccugcaga

SEQ ID NO: 3437093 - RNA, 12 nt, Human
cccugacccugu

SEQ ID NO: 3437094 - RNA, 16 nt, Human
cccugacccuguauau

SEQ ID NO: 3437095 - RNA, 11 nt, Human
cccugaccucc

SEQ ID NO: 3437096 - RNA, 18 nt, Human
cccugaccucccagcccu

SEQ ID NO: 3437097 - RNA, 19 nt, Human
cccugaccucccagcccua

SEQ ID NO: 3437098 - RNA, 20 nt, Human
cccugaccucccagcccuau

SEQ ID NO: 3437099 - RNA, 17 nt, Human
cccugaccucccucuaa

SEQ ID NO: 3437100 - RNA, 13 nt, Human
cccugacucucug

SEQ ID NO: 3437101 - RNA, 17 nt, Human
cccugacucucugugac

SEQ ID NO: 3437102 - RNA, 18 nt, Human
cccugacucucugugacc

SEQ ID NO: 3437103 - RNA, 9 nt, Human
cccugacug

SEQ ID NO: 3437104 - RNA, 20 nt, Human
cccugacugggggcagacau

SEQ ID NO: 3437105 - RNA, 16 nt, Human
cccugagaagcugcuc

SEQ ID NO: 3437106 - RNA, 20 nt, Human
cccugagacaaauggaggcc

SEQ ID NO: 3437107 - RNA, 23 nt, Human
cccugagacaaauggaggccugu

SEQ ID NO: 3437108 - RNA, 18 nt, Human
cccugagaucagaguccu

SEQ ID NO: 3437109 - RNA, 16 nt, Human
cccugagauccccuga

SEQ ID NO: 3437110 - RNA, 22 nt, Human
cagggucccugguggcagcuca

SEQ ID NO: 3437111 - RNA, 23 nt, Human
ccuauaccccuuacuuagcaugc

SEQ ID NO: 3437112 - RNA, 22 nt, Human
ccuauacugcuuggagcugagc

SEQ ID NO: 3437113 - RNA, 19 nt, Human
ccuauacuguaguauucuu

SEQ ID NO: 3437114 - RNA, 15 nt, Human
ccuauauauuucuau

SEQ ID NO: 3437115 - RNA, 22 nt, Human
ccuauaugagaagaauagccua

SEQ ID NO: 3437116 - RNA, 13 nt, Human
ccuauauuuacag

SEQ ID NO: 3437117 - RNA, 16 nt, Human
ccuaucaccuauuucc

SEQ ID NO: 3437118 - RNA, 15 nt, Human
ccuaucaccuccccu

SEQ ID NO: 3437119 - RNA, 17 nt, Human
ccuaucaccuccccucc

SEQ ID NO: 3437120 - RNA, 17 nt, Human
ccuaucagaaguuucuc

SEQ ID NO: 3437121 - RNA, 20 nt, Human
ccuaucagugugccccccau

SEQ ID NO: 3437122 - RNA, 13 nt, Human
ccuaucauuuauu

SEQ ID NO: 3437123 - RNA, 15 nt, Human
ccuaucccucuccua

SEQ ID NO: 3437124 - RNA, 13 nt, Human
ccuauccuuggca

SEQ ID NO: 3437125 - RNA, 14 nt, Human
ccuauccuuggcac

SEQ ID NO: 3437126 - RNA, 13 nt, Human
ccuaucuccugac

SEQ ID NO: 3437127 - RNA, 18 nt, Human
ccuaucucgugggagagc

SEQ ID NO: 3437128 - RNA, 12 nt, Human
ccuaucugggcu

SEQ ID NO: 3437129 - RNA, 19 nt, Human
ccuaucugggcuuccugga

SEQ ID NO: 3437130 - RNA, 12 nt, Human
ccuaucuucaua

SEQ ID NO: 3437131 - RNA, 18 nt, Human
ccuaucuuuuaguuuuag

SEQ ID NO: 3437132 - RNA, 15 nt, Human
ccuaugaucccagca

SEQ ID NO: 3437133 - RNA, 14 nt, Human
ccuaugauguauac

SEQ ID NO: 3437134 - RNA, 14 nt, Human
ccuaugcaauaaaa

SEQ ID NO: 3437135 - RNA, 14 nt, Human
ccuaugcaauauau

SEQ ID NO: 3437136 - RNA, 22 nt, Human
ccuaugcaauauaucuaaauug

SEQ ID NO: 3437137 - RNA, 20 nt, Human
ccuaugcacauauggacucu

SEQ ID NO: 3437138 - RNA, 21 nt, Human
ccuaugcaugguguagaugcc

SEQ ID NO: 3437139 - RNA, 22 nt, Human
ccuaugcaugguuucagcacua

SEQ ID NO: 3437140 - RNA, 20 nt, Human
ccuaugcugccuaggcugac

SEQ ID NO: 3437141 - RNA, 12 nt, Human
ccuaugcuuuga

SEQ ID NO: 3437142 - RNA, 11 nt, Human
ccuauggaaac

SEQ ID NO: 3437143 - RNA, 14 nt, Human
ccuauggagagccc

SEQ ID NO: 3437144 - RNA, 15 nt, Human
ccuauggagagcccu

SEQ ID NO: 3437145 - RNA, 18 nt, Human
ccuauggcuggccacugc

SEQ ID NO: 3437146 - RNA, 21 nt, Human
ccuauggcuggccacugcaca

SEQ ID NO: 3437147 - RNA, 18 nt, Human
ccuaugggagucaagugu

SEQ ID NO: 3437148 - RNA, 22 nt, Human
ccuauguccuaaggacacacua

SEQ ID NO: 3437149 - RNA, 22 nt, Human
ccuaugugauuuuaacucuguc

SEQ ID NO: 3437150 - RNA, 22 nt, Human
ccuauguugauccauccagcuu

SEQ ID NO: 3437151 - RNA, 16 nt, Human
ccuauuaucccagcug

SEQ ID NO: 3437152 - RNA, 18 nt, Human
ccuauuaucccagcugcc

SEQ ID NO: 3437153 - RNA, 21 nt, Human
ccuauucaguucccagaauca

SEQ ID NO: 3437154 - RNA, 21 nt, Human
ccuauucccacaccuccacag

SEQ ID NO: 3437155 - RNA, 13 nt, Human
ccuauucucacca

SEQ ID NO: 3437156 - RNA, 22 nt, Human
ccuauugcuagagcuccucccu

SEQ ID NO: 3437157 - RNA, 15 nt, Human
ccuauugugauuuga

SEQ ID NO: 3437158 - RNA, 17 nt, Human
ccuauugugauuugacu

SEQ ID NO: 3437159 - RNA, 18 nt, Human
ccuauugugauuugacug

SEQ ID NO: 3437160 - RNA, 19 nt, Human
ccuauugugcaauguaaau

SEQ ID NO: 3437161 - RNA, 22 nt, Human
ccuauuucaaaaauuuggaauu

SEQ ID NO: 3437162 - RNA, 23 nt, Human
ccuauuucaguguuaccugugug

SEQ ID NO: 3437163 - RNA, 15 nt, Human
ccuauuuccccaccc

SEQ ID NO: 3437164 - RNA, 16 nt, Human
ccuauuucucuuucuu

SEQ ID NO: 3437165 - RNA, 12 nt, Human
ccuauuugugug

SEQ ID NO: 3437166 - RNA, 15 nt, Human
ccuauuuuaauaaac

SEQ ID NO: 3437167 - RNA, 23 nt, Human
ccucaaaauuuaacaguuaccug

SEQ ID NO: 3437168 - RNA, 15 nt, Human
ccucaaacacugcag

SEQ ID NO: 3437169 - RNA, 17 nt, Human
ccucaaacacugcaggc

SEQ ID NO: 3437170 - RNA, 22 nt, Human
ccucaaacaguagguuggcagu

SEQ ID NO: 3437171 - RNA, 14 nt, Human
ccucaaagaggcag

SEQ ID NO: 3437172 - RNA, 18 nt, Human
ccucaaagcuuccauucc

SEQ ID NO: 3437173 - RNA, 17 nt, Human
ccucaaauccaggaccc

SEQ ID NO: 3437174 - RNA, 23 nt, Human
ccucaaauccaggacccugccag

SEQ ID NO: 3437175 - RNA, 19 nt, Human
ccucaaaugaugugccugc

SEQ ID NO: 3437176 - RNA, 17 nt, Human
ccucaaauuacuuugug

SEQ ID NO: 3437177 - RNA, 16 nt, Human
ccucaaauuuuuugac

SEQ ID NO: 3437178 - RNA, 22 nt, Human
ccucaacaagggagagaccuca

SEQ ID NO: 3437179 - RNA, 23 nt, Human
ccucaaccccuccccuccauccc

SEQ ID NO: 3437180 - RNA, 16 nt, Human
ccucaacccucccuca

SEQ ID NO: 3437181 - RNA, 18 nt, Human
ccucaacccucccucagc

SEQ ID NO: 3437182 - RNA, 20 nt, Human
ccucaaccucuucuggcuca

SEQ ID NO: 3437183 - RNA, 20 nt, Human
ccucaaccuguaaauuauuu

SEQ ID NO: 3437184 - RNA, 23 nt, Human
ccucaaccuguaaauuauuuuaa

SEQ ID NO: 3437185 - RNA, 19 nt, Human
ccucaacguugcuccccau

SEQ ID NO: 3437186 - RNA, 16 nt, Human
ccucaacuccucccau

SEQ ID NO: 3437187 - RNA, 16 nt, Human
ccucaacucugcugag

SEQ ID NO: 3437188 - RNA, 18 nt, Human
ccucaacucugcugaggg

SEQ ID NO: 3437189 - RNA, 18 nt, Human
ccucaagccaauccccuc

SEQ ID NO: 3437190 - RNA, 22 nt, Human
ccucaaggacaaagucuccagc

SEQ ID NO: 3437191 - RNA, 12 nt, Human
ccucaaggacuu

SEQ ID NO: 3437192 - RNA, 19 nt, Human
ccucaaggacuugaaagca

SEQ ID NO: 3437193 - RNA, 15 nt, Human
ccucaaggccuccca

SEQ ID NO: 3437194 - RNA, 16 nt, Human
ccucaaggccucccac

SEQ ID NO: 3437195 - RNA, 19 nt, Human
ccucaaggccucccacagu

SEQ ID NO: 3437196 - RNA, 16 nt, Human
ccucaaguaaacuccc

SEQ ID NO: 3437197 - RNA, 20 nt, Human
ccucaagucacucccaagcc

SEQ ID NO: 3437198 - RNA, 18 nt, Human
ccucaagugauccuccca

SEQ ID NO: 3437199 - RNA, 19 nt, Human
ccucaagugauccucccac

SEQ ID NO: 3437200 - RNA, 18 nt, Human
ccucaauagaucuccagc

SEQ ID NO: 3437201 - RNA, 23 nt, Human
ccucaaugccaguaacgcgucuu

SEQ ID NO: 3437202 - RNA, 22 nt, Human
ccucaaugugaaucagacccua

SEQ ID NO: 3437203 - RNA, 22 nt, Human
ccucacaaguggguacccccag

SEQ ID NO: 3437204 - RNA, 12 nt, Human
ccucacacuggg

SEQ ID NO: 3437205 - RNA, 13 nt, Human
ccucacagccucu

SEQ ID NO: 3437206 - RNA, 18 nt, Human
ccucacagccucugaccc

SEQ ID NO: 3437207 - RNA, 21 nt, Human
ccucacagccucugaccccuc

SEQ ID NO: 3437208 - RNA, 15 nt, Human
ccucacaggccccag

SEQ ID NO: 3437209 - RNA, 19 nt, Human
ccucacagucccacugugc

SEQ ID NO: 3437210 - RNA, 20 nt, Human
ccucacaguccuuaccagca

SEQ ID NO: 3437211 - RNA, 23 nt, Human
ccucacaguccuuaccagcagag

SEQ ID NO: 3437212 - RNA, 15 nt, Human
ccucaccacccacuu

SEQ ID NO: 3437213 - RNA, 14 nt, Human
ccucaccaggggca

SEQ ID NO: 3437214 - RNA, 20 nt, Human
ccucaccaggggcaggcaca

SEQ ID NO: 3437215 - RNA, 19 nt, Human
ccucacccaccccugcaca

SEQ ID NO: 3437216 - RNA, 15 nt, Human
ccucaccccacugug

SEQ ID NO: 3437217 - RNA, 24 nt, Human
ccucaccccacuuaucccucucca

SEQ ID NO: 3437218 - RNA, 16 nt, Human
ccucacccccucccac

SEQ ID NO: 3437219 - RNA, 17 nt, Human
ccucacccccucccacc

SEQ ID NO: 3437220 - RNA, 20 nt, Human
ccucacccccucccaccccc

SEQ ID NO: 3437221 - RNA, 17 nt, Human
ccucacccccuccuuca

SEQ ID NO: 3437222 - RNA, 20 nt, Human
ccucaccccgaggcccugca

SEQ ID NO: 3437223 - RNA, 21 nt, Human
ccucaccccgaggcccugcau

SEQ ID NO: 3437224 - RNA, 22 nt, Human
ccucaccccgaggcccugcaug

SEQ ID NO: 3437225 - RNA, 17 nt, Human
ccucaccccgucugggg

SEQ ID NO: 3437226 - RNA, 19 nt, Human
ccucaccccguuacagcuc

SEQ ID NO: 3437227 - RNA, 16 nt, Human
ccucaccccugcccug

SEQ ID NO: 3437228 - RNA, 19 nt, Human
ccucaccccuguccucacu

SEQ ID NO: 3437229 - RNA, 22 nt, Human
ccucaccccuguccucacugcu

SEQ ID NO: 3437230 - RNA, 21 nt, Human
ccucacccgaggcugcccacu

SEQ ID NO: 3437231 - RNA, 23 nt, Human
ccucacccugagccccuuccuug

SEQ ID NO: 3437232 - RNA, 14 nt, Human
ccucacccuggggc

SEQ ID NO: 3437233 - RNA, 22 nt, Human
ccucaccuaauaggcugggaga

SEQ ID NO: 3437234 - RNA, 19 nt, Human
ccucaccucaugcccaccc

SEQ ID NO: 3437235 - RNA, 14 nt, Human
ccucaccucuaccc

SEQ ID NO: 3437236 - RNA, 18 nt, Human
ccucaccucuggacuggc

SEQ ID NO: 3437237 - RNA, 16 nt, Human
ccucaccugagagcca

SEQ ID NO: 3437238 - RNA, 18 nt, Human
ccucaccugggcaccugg

SEQ ID NO: 3437239 - RNA, 19 nt, Human
ccucaccuugcaacacaca

SEQ ID NO: 3437240 - RNA, 21 nt, Human
ccucaccuuggcaccagacac

SEQ ID NO: 3437241 - RNA, 17 nt, Human
ccucaccuuucccaucu

SEQ ID NO: 3437242 - RNA, 14 nt, Human
ccucacgcaccucc

SEQ ID NO: 3437243 - RNA, 17 nt, Human
ccucacucagcaccacu

SEQ ID NO: 3437244 - RNA, 18 nt, Human
ccucacucagcaccacuc

SEQ ID NO: 3437245 - RNA, 14 nt, Human
ccucacucccuucu

SEQ ID NO: 3437246 - RNA, 23 nt, Human
ccucacucggguuucucuguggc

SEQ ID NO: 3437247 - RNA, 13 nt, Human
ccucacucucagg

SEQ ID NO: 3437248 - RNA, 14 nt, Human
ccucacucucagga

SEQ ID NO: 3437249 - RNA, 19 nt, Human
ccucacucugccagggcag

SEQ ID NO: 3437250 - RNA, 19 nt, Human
ccucacugcucccugaagc

SEQ ID NO: 3437251 - RNA, 15 nt, Human
ccucacuggccaucc

SEQ ID NO: 3437252 - RNA, 22 nt, Human
ccucacuggccaucccucgugg

SEQ ID NO: 3437253 - RNA, 16 nt, Human
ccggcagggcgggcag

SEQ ID NO: 3437254 - RNA, 23 nt, Human
ccggcagggcgggcagagggcug

SEQ ID NO: 3437255 - RNA, 18 nt, Human
ccggcaggguccuagaaa

SEQ ID NO: 3437256 - RNA, 20 nt, Human
ccggcaugagacucagugca

SEQ ID NO: 3437257 - RNA, 21 nt, Human
ccggcaugagacucagugcag

SEQ ID NO: 3437258 - RNA, 22 nt, Human
ccggcaugagacucagugcaga

SEQ ID NO: 3437259 - RNA, 18 nt, Human
ccggcauggacaauggac

SEQ ID NO: 3437260 - RNA, 16 nt, Human
ccggccaauggaaacc

SEQ ID NO: 3437261 - RNA, 13 nt, Human
ccggccaccucug

SEQ ID NO: 3437262 - RNA, 14 nt, Human
ccggccaccucugc

SEQ ID NO: 3437263 - RNA, 17 nt, Human
ccggccaccugcggugc

SEQ ID NO: 3437264 - RNA, 18 nt, Human
ccggccaccugcggugcu

SEQ ID NO: 3437265 - RNA, 18 nt, Human
ccggccaggugccuccug

SEQ ID NO: 3437266 - RNA, 20 nt, Human
ccggccaguggcggaaguga

SEQ ID NO: 3437267 - RNA, 14 nt, Human
ccggcccaguuuug

SEQ ID NO: 3437268 - RNA, 13 nt, Human
ccggccccagcca

SEQ ID NO: 3437269 - RNA, 14 nt, Human
ccggccccagccag

SEQ ID NO: 3437270 - RNA, 16 nt, Human
ccggccccagccagag

SEQ ID NO: 3437271 - RNA, 18 nt, Human
ccggccccaguacacagg

SEQ ID NO: 3437272 - RNA, 19 nt, Human
ccggccccggccccagcca

SEQ ID NO: 3437273 - RNA, 18 nt, Human
ccggcccgcgccacagga

SEQ ID NO: 3437274 - RNA, 13 nt, Human
ccggccucuccag

SEQ ID NO: 3437275 - RNA, 23 nt, Human
cagggucccugguggcagcucac

SEQ ID NO: 3437276 - RNA, 14 nt, Human
caggguccugcuau

SEQ ID NO: 3437277 - RNA, 23 nt, Human
caggguccuuuugacacugcucu

SEQ ID NO: 3437278 - RNA, 17 nt, Human
cagggucucacucuguc

SEQ ID NO: 3437279 - RNA, 18 nt, Human
cagggucucacucugucg

SEQ ID NO: 3437280 - RNA, 19 nt, Human
cagggucuccagaaagccc

SEQ ID NO: 3437281 - RNA, 22 nt, Human
cagggucucuagugcugugaaa

SEQ ID NO: 3437282 - RNA, 18 nt, Human
cagggucucugcugccgc

SEQ ID NO: 3437283 - RNA, 17 nt, Human
cagggucugcucuuucu

SEQ ID NO: 3437284 - RNA, 23 nt, Human
cagggucugcucuuucucugcca

SEQ ID NO: 3437285 - RNA, 14 nt, Human
cagggucugggcag

SEQ ID NO: 3437286 - RNA, 15 nt, Human
cagggucugugugaa

SEQ ID NO: 3437287 - RNA, 23 nt, Human
cagggucugugugaaugugggca

SEQ ID NO: 3437288 - RNA, 21 nt, Human
cagggucuuuucaucugggaa

SEQ ID NO: 3437289 - RNA, 19 nt, Human
cagggugacggugacaaag

SEQ ID NO: 3437290 - RNA, 15 nt, Human
cagggugaugccagg

SEQ ID NO: 3437291 - RNA, 18 nt, Human
cagggugaugccagguuc

SEQ ID NO: 3437292 - RNA, 17 nt, Human
caggguggacuuagaaa

SEQ ID NO: 3437293 - RNA, 22 nt, Human
caggguggacuuagaaagcagg

SEQ ID NO: 3437294 - RNA, 20 nt, Human
cagggugggccucggccccu

SEQ ID NO: 3437295 - RNA, 16 nt, Human
cagggugggcuugugg

SEQ ID NO: 3437296 - RNA, 22 nt, Human
caggguggucucuucuuggggc

SEQ ID NO: 3437297 - RNA, 17 nt, Human
caggguggugcugggac

SEQ ID NO: 3437298 - RNA, 17 nt, Human
cagggugucuccugaag

SEQ ID NO: 3437299 - RNA, 19 nt, Human
caggguguggcccugccau

SEQ ID NO: 3437300 - RNA, 16 nt, Human
caggguguggggccau

SEQ ID NO: 3437301 - RNA, 17 nt, Human
caggguguggggccaug

SEQ ID NO: 3437302 - RNA, 22 nt, Human
caggguguggggccaugccucc

SEQ ID NO: 3437303 - RNA, 17 nt, Human
caggguucuccucuccc

SEQ ID NO: 3437304 - RNA, 21 nt, Human
caggguugaucacacucuggg

SEQ ID NO: 3437305 - RNA, 13 nt, Human
caggguuggcacc

SEQ ID NO: 3437306 - RNA, 20 nt, Human
caggguuggcaccuuccccc

SEQ ID NO: 3437307 - RNA, 14 nt, Human
caggguuggccccu

SEQ ID NO: 3437308 - RNA, 17 nt, Human
caggguuggccccugcc

SEQ ID NO: 3437309 - RNA, 15 nt, Human
caggguugggcccag

SEQ ID NO: 3437310 - RNA, 15 nt, Human
caggguuggugugcu

SEQ ID NO: 3437311 - RNA, 19 nt, Human
caggguuucaccauguugc

SEQ ID NO: 3437312 - RNA, 20 nt, Human
caggguuucaccauguuggc

SEQ ID NO: 3437313 - RNA, 19 nt, Human
caggguuucgagaagcugc

SEQ ID NO: 3437314 - RNA, 22 nt, Human
caggguuuggcugugucuaaac

SEQ ID NO: 3437315 - RNA, 15 nt, Human
caggguuuuaacuuu

SEQ ID NO: 3437316 - RNA, 14 nt, Human
cagguaaaacaggg

SEQ ID NO: 3437317 - RNA, 17 nt, Human
cagguaaauuaagacau

SEQ ID NO: 3437318 - RNA, 15 nt, Human
cagguaacaggcaga

SEQ ID NO: 3437319 - RNA, 17 nt, Human
cagguaacaggcagaua

SEQ ID NO: 3437320 - RNA, 18 nt, Human
cagguaaucgaccugccu

SEQ ID NO: 3437321 - RNA, 19 nt, Human
cagguaaucgaccugccuc

SEQ ID NO: 3437322 - RNA, 20 nt, Human
cagguaaucgaccugccucg

SEQ ID NO: 3437323 - RNA, 23 nt, Human
cagguaaugagggacuggaacca

SEQ ID NO: 3437324 - RNA, 13 nt, Human
cagguaaugugaa

SEQ ID NO: 3437325 - RNA, 15 nt, Human
cagguaccagcugcg

SEQ ID NO: 3437326 - RNA, 15 nt, Human
cagguaccaguucuu

SEQ ID NO: 3437327 - RNA, 15 nt, Human
cagguaccccagcuc

SEQ ID NO: 3437328 - RNA, 17 nt, Human
cagguacgcacagacag

SEQ ID NO: 3437329 - RNA, 18 nt, Human
cagguacgcacagacagg

SEQ ID NO: 3437330 - RNA, 21 nt, Human
cagguacuuguaaauuauuaa

SEQ ID NO: 3437331 - RNA, 23 nt, Human
cagguacuuugucuaagaaacau

SEQ ID NO: 3437332 - RNA, 22 nt, Human
cagguagaauuaucuaauuuau

SEQ ID NO: 3437333 - RNA, 18 nt, Human
cagguagaggugcaugcc

SEQ ID NO: 3437334 - RNA, 12 nt, Human
cagguagccagg

SEQ ID NO: 3437335 - RNA, 14 nt, Human
cagguagcugcccc

SEQ ID NO: 3437336 - RNA, 23 nt, Human
cagguagcugccccuggcucuga

SEQ ID NO: 3437337 - RNA, 13 nt, Human
cagguaggaauau

SEQ ID NO: 3437338 - RNA, 20 nt, Human
cagguaggaauauuauauuu

SEQ ID NO: 3437339 - RNA, 23 nt, Human
cagguaggaggcaaauaucuuga

SEQ ID NO: 3437340 - RNA, 22 nt, Human
cagguaggccaagguguccuac

SEQ ID NO: 3437341 - RNA, 22 nt, Human
cagguaguacuaagaguaugug

SEQ ID NO: 3437342 - RNA, 18 nt, Human
cagguaguugcaauugaa

SEQ ID NO: 3437343 - RNA, 15 nt, Human
cagguauccaaaaau

SEQ ID NO: 3437344 - RNA, 16 nt, Human
cagguaucuccaggau

SEQ ID NO: 3437345 - RNA, 16 nt, Human
cagguauggcucugca

SEQ ID NO: 3437346 - RNA, 17 nt, Human
cagguauuaaucuugga

SEQ ID NO: 3437347 - RNA, 18 nt, Human
cagguauuauuaucuuua

SEQ ID NO: 3437348 - RNA, 13 nt, Human
caggucaacagaa

SEQ ID NO: 3437349 - RNA, 15 nt, Human
caggucaacagaaug

SEQ ID NO: 3437350 - RNA, 19 nt, Human
caggucaacagaaugaaaa

SEQ ID NO: 3437351 - RNA, 23 nt, Human
caggucaauacaguacaggcagc

SEQ ID NO: 3437352 - RNA, 17 nt, Human
caggucacacgaggggc

SEQ ID NO: 3437353 - RNA, 15 nt, Human
caggucagccacugu

SEQ ID NO: 3437354 - RNA, 21 nt, Human
caggucaggggugacacagac

SEQ ID NO: 3437355 - RNA, 23 nt, Human
caggucaggggugacacagacuc

SEQ ID NO: 3437356 - RNA, 21 nt, Human
caggucauauuaauauauuuc

SEQ ID NO: 3437357 - RNA, 14 nt, Human
cagguccaaugagc

SEQ ID NO: 3437358 - RNA, 22 nt, Human
cagguccaaugagcuuucugaa

SEQ ID NO: 3437359 - RNA, 22 nt, Human
cagguccacggucuguucuuga

SEQ ID NO: 3437360 - RNA, 16 nt, Human
cagguccagagagacc

SEQ ID NO: 3437361 - RNA, 19 nt, Human
cagguccagcucuggaggg

SEQ ID NO: 3437362 - RNA, 12 nt, Human
cagguccccaga

SEQ ID NO: 3437363 - RNA, 13 nt, Human
caggucccuaaua

SEQ ID NO: 3437364 - RNA, 20 nt, Human
cagguccucaguguccucag

SEQ ID NO: 3437365 - RNA, 15 nt, Human
cagguccugcucagc

SEQ ID NO: 3437366 - RNA, 17 nt, Human
cagguccugcucagcag

SEQ ID NO: 3437367 - RNA, 13 nt, Human
cagguccuggugg

SEQ ID NO: 3437368 - RNA, 16 nt, Human
caggucgggcgcagga

SEQ ID NO: 3437369 - RNA, 22 nt, Human
caggucgggcucagcucuggcu

SEQ ID NO: 3437370 - RNA, 12 nt, Human
caggucuagacu

SEQ ID NO: 3437371 - RNA, 22 nt, Human
caggucucccacgugggagaca

SEQ ID NO: 3437372 - RNA, 14 nt, Human
caggucuccucuua

SEQ ID NO: 3437373 - RNA, 17 nt, Human
caggucuccucuuaaaa

SEQ ID NO: 3437374 - RNA, 22 nt, Human
caggucuccucuuaaaaaauaa

SEQ ID NO: 3437375 - RNA, 22 nt, Human
caggucuugaacuccuggccuc

SEQ ID NO: 3437376 - RNA, 19 nt, Human
caggucuuggagcugagcc

SEQ ID NO: 3437377 - RNA, 21 nt, Human
caggucuuggagcugagccuc

SEQ ID NO: 3437378 - RNA, 23 nt, Human
caggucuuggagcugagccucuc

SEQ ID NO: 3437379 - RNA, 21 nt, Human
caggucuuuccuaaggcugca

SEQ ID NO: 3437380 - RNA, 14 nt, Human
caggugaaggaggc

SEQ ID NO: 3437381 - RNA, 14 nt, Human
caggugacauguga

SEQ ID NO: 3437382 - RNA, 16 nt, Human
caggugacaugugaaa

SEQ ID NO: 3437383 - RNA, 23 nt, Human
caggugaccaaaauccccuucuc

SEQ ID NO: 3437384 - RNA, 18 nt, Human
caggugaccuucugggaa

SEQ ID NO: 3437385 - RNA, 21 nt, Human
caggugaggucuguuccuuuu

SEQ ID NO: 3437386 - RNA, 22 nt, Human
caggugaguccuagagcuacag

SEQ ID NO: 3437387 - RNA, 16 nt, Human
caggugauccacccac

SEQ ID NO: 3437388 - RNA, 17 nt, Human
caggugauccacccacc

SEQ ID NO: 3437389 - RNA, 22 nt, Human
caggugauccacccaccucagc

SEQ ID NO: 3437390 - RNA, 15 nt, Human
caggugcaaccaggg

SEQ ID NO: 3437391 - RNA, 15 nt, Human
caggugcacagacgu

SEQ ID NO: 3437392 - RNA, 23 nt, Human
caggugcacagacgucccuccac

SEQ ID NO: 3437393 - RNA, 15 nt, Human
caggugcagaggaag

SEQ ID NO: 3437394 - RNA, 23 nt, Human
caggugcagagguacccugggug

SEQ ID NO: 3437395 - RNA, 17 nt, Human
caggugcagccagaggc

SEQ ID NO: 3437396 - RNA, 17 nt, Human
cagugaaaaacuauuaa

SEQ ID NO: 3437397 - RNA, 16 nt, Human
cagugaaaacaagugc

SEQ ID NO: 3437398 - RNA, 15 nt, Human
cagugaaaauguaag

SEQ ID NO: 3437399 - RNA, 16 nt, Human
cagugaaagaaaauaa

SEQ ID NO: 3437400 - RNA, 13 nt, Human
cagugaagacaga

SEQ ID NO: 3437401 - RNA, 15 nt, Human
cagugaaguugcugc

SEQ ID NO: 3437402 - RNA, 16 nt, Human
cagugaaguugcugcu

SEQ ID NO: 3437403 - RNA, 19 nt, Human
cagugaaguugcugcuucu

SEQ ID NO: 3437404 - RNA, 17 nt, Human
cagugaaugauucagug

SEQ ID NO: 3437405 - RNA, 18 nt, Human
cagugaaugauucagugu

SEQ ID NO: 3437406 - RNA, 12 nt, Human
cagugaauucuu

SEQ ID NO: 3437407 - RNA, 16 nt, Human
cagugacagacaggcu

SEQ ID NO: 3437408 - RNA, 17 nt, Human
cagugacagacaggcuc

SEQ ID NO: 3437409 - RNA, 18 nt, Human
cagugacagaguucacua

SEQ ID NO: 3437410 - RNA, 20 nt, Human
cagugacagaguucacuaua

SEQ ID NO: 3437411 - RNA, 12 nt, Human
cagugacagcua

SEQ ID NO: 3437412 - RNA, 15 nt, Human
cagugacagcuagga

SEQ ID NO: 3437413 - RNA, 15 nt, Human
cagugacaugagacu

SEQ ID NO: 3437414 - RNA, 16 nt, Human
cagugacccuggcucc

SEQ ID NO: 3437415 - RNA, 17 nt, Human
cagugacccuggcuccu

SEQ ID NO: 3437416 - RNA, 24 nt, Human
cagugacccuucccaaucagcacu

SEQ ID NO: 3437417 - RNA, 18 nt, Human
cagugaccucucucucug

SEQ ID NO: 3437418 - RNA, 17 nt, Human
cagugaccugaggaagc

SEQ ID NO: 3437419 - RNA, 19 nt, Human
cagugaccugcuggguaaa

SEQ ID NO: 3437420 - RNA, 17 nt, Human
cagugacgugcaccugu

SEQ ID NO: 3437421 - RNA, 16 nt, Human
cagugacuccaggaga

SEQ ID NO: 3437422 - RNA, 16 nt, Human
cagugacucgggcucc

SEQ ID NO: 3437423 - RNA, 17 nt, Human
cagugacucgggcuccu

SEQ ID NO: 3437424 - RNA, 22 nt, Human
cagugacucgggcuccugugcc

SEQ ID NO: 3437425 - RNA, 19 nt, Human
cagugagaaaaagcuccug

SEQ ID NO: 3437426 - RNA, 21 nt, Human
cagugagaaaaagcuccuguc

SEQ ID NO: 3437427 - RNA, 22 nt, Human
cagugagagaguggcuggggca

SEQ ID NO: 3437428 - RNA, 14 nt, Human
cagugagaugaggg

SEQ ID NO: 3437429 - RNA, 18 nt, Human
cagugagauuacagagga

SEQ ID NO: 3437430 - RNA, 17 nt, Human
cagugagcagagaucac

SEQ ID NO: 3437431 - RNA, 17 nt, Human
cagugaggcccagggag

SEQ ID NO: 3437432 - RNA, 21 nt, Human
cagugaggcccagggagaggc

SEQ ID NO: 3437433 - RNA, 15 nt, Human
cagugaggcucugcc

SEQ ID NO: 3437434 - RNA, 16 nt, Human
cagugaggcugcaccc

SEQ ID NO: 3437435 - RNA, 23 nt, Human
cagugagggguauaucugggcug

SEQ ID NO: 3437436 - RNA, 23 nt, Human
cagugaggguaaguauuuuccug

SEQ ID NO: 3437437 - RNA, 17 nt, Human
cagugagucgaggacag

SEQ ID NO: 3437438 - RNA, 18 nt, Human
cagugagucgaggacagg

SEQ ID NO: 3437439 - RNA, 15 nt, Human
cagugagugagccug

SEQ ID NO: 3437440 - RNA, 16 nt, Human
cagugagugagccugg

SEQ ID NO: 3437441 - RNA, 21 nt, Human
cagugagugagccuggcucuu

SEQ ID NO: 3437442 - RNA, 22 nt, Human
cagugaguuacagcgagaggca

SEQ ID NO: 3437443 - RNA, 23 nt, Human
cagugaguuacagcgagaggcag

SEQ ID NO: 3437444 - RNA, 21 nt, Human
cagugauauggcagaagacac

SEQ ID NO: 3437445 - RNA, 22 nt, Human
cagugauauggcagaagacacc

SEQ ID NO: 3437446 - RNA, 14 nt, Human
cagugauauucuuu

SEQ ID NO: 3437447 - RNA, 16 nt, Human
cagugaucuccauaug

SEQ ID NO: 3437448 - RNA, 21 nt, Human
cagugaucuccauauguuaca

SEQ ID NO: 3437449 - RNA, 23 nt, Human
cagugauguaccaugaaacaaag

SEQ ID NO: 3437450 - RNA, 20 nt, Human
cagugauucgagcuauauuu

SEQ ID NO: 3437451 - RNA, 13 nt, Human
cagugauuuuuau

SEQ ID NO: 3437452 - RNA, 20 nt, Human
cagugcaaaugcaugcuucu

SEQ ID NO: 3437453 - RNA, 15 nt, Human
cagugcaacacuggu

SEQ ID NO: 3437454 - RNA, 11 nt, Human
cagugcaagag

SEQ ID NO: 3437455 - RNA, 23 nt, Human
cagugcaagagacucuggccucc

SEQ ID NO: 3437456 - RNA, 14 nt, Human
cagugcacaugaac

SEQ ID NO: 3437457 - RNA, 17 nt, Human
cagugcaccugucauau

SEQ ID NO: 3437458 - RNA, 15 nt, Human
cagugcagaauguaa

SEQ ID NO: 3437459 - RNA, 20 nt, Human
cagugcagagccuucucaga

SEQ ID NO: 3437460 - RNA, 12 nt, Human
cagugcaggcac

SEQ ID NO: 3437461 - RNA, 22 nt, Human
cagugcaggcuggccagccgcu

SEQ ID NO: 3437462 - RNA, 20 nt, Human
cagugcagggcaaaauauuc

SEQ ID NO: 3437463 - RNA, 23 nt, Human
cagugcauaguuguagacaaagu

SEQ ID NO: 3437464 - RNA, 17 nt, Human
cagugcaucucagccca

SEQ ID NO: 3437465 - RNA, 16 nt, Human
cagugcaugcuguccc

SEQ ID NO: 3437466 - RNA, 23 nt, Human
cagugcaugcugucccuuacgug

SEQ ID NO: 3437467 - RNA, 18 nt, Human
cagugcaugguggccaga

SEQ ID NO: 3437468 - RNA, 15 nt, Human
cagugccaaaaacaa

SEQ ID NO: 3437469 - RNA, 17 nt, Human
cagugccaacuguggcu

SEQ ID NO: 3437470 - RNA, 18 nt, Human
ccuagucucccucacagc

SEQ ID NO: 3437471 - RNA, 14 nt, Human
ccuagucucuauca

SEQ ID NO: 3437472 - RNA, 15 nt, Human
ccuagucucuaucau

SEQ ID NO: 3437473 - RNA, 21 nt, Human
ccuagucucuaucauuaaagu

SEQ ID NO: 3437474 - RNA, 12 nt, Human
ccuagugaaccu

SEQ ID NO: 3437475 - RNA, 18 nt, Human
ccuagugaaccucacccc

SEQ ID NO: 3437476 - RNA, 18 nt, Human
ccuaguggcuguccagug

SEQ ID NO: 3437477 - RNA, 13 nt, Human
ccuaguggcuugu

SEQ ID NO: 3437478 - RNA, 15 nt, Human
ccuaguggcuugucc

SEQ ID NO: 3437479 - RNA, 16 nt, Human
ccuaguggcuuguccu

SEQ ID NO: 3437480 - RNA, 19 nt, Human
ccuaguggggucucccucu

SEQ ID NO: 3437481 - RNA, 21 nt, Human
ccuaguggggucucccucucc

SEQ ID NO: 3437482 - RNA, 22 nt, Human
ccuaguucccucugcucagcca

SEQ ID NO: 3437483 - RNA, 17 nt, Human
ccuaguucuagaaaaac

SEQ ID NO: 3437484 - RNA, 22 nt, Human
ccuaguuggugagaaaccugua

SEQ ID NO: 3437485 - RNA, 15 nt, Human
ccuaguuuccucucc

SEQ ID NO: 3437486 - RNA, 17 nt, Human
ccuaguuuccucuccuu

SEQ ID NO: 3437487 - RNA, 15 nt, Human
ccuaguuugaccuca

SEQ ID NO: 3437488 - RNA, 16 nt, Human
ccuaguuugugagaaa

SEQ ID NO: 3437489 - RNA, 15 nt, Human
ccuaguuuuccuacu

SEQ ID NO: 3437490 - RNA, 19 nt, Human
ccuaguuuucuccucccag

SEQ ID NO: 3437491 - RNA, 20 nt, Human
ccuaguuuucuccucccagg

SEQ ID NO: 3437492 - RNA, 20 nt, Human
ccuaguuuucuuuccuccuu

SEQ ID NO: 3437493 - RNA, 23 nt, Human
ccuauaaaacaggucaauacagu

SEQ ID NO: 3437494 - RNA, 19 nt, Human
ccuauaacuugaugcaugu

SEQ ID NO: 3437495 - RNA, 15 nt, Human
ccuauaaucugucaa

SEQ ID NO: 3437496 - RNA, 13 nt, Human
ccuauaaugcugg

SEQ ID NO: 3437497 - RNA, 18 nt, Human
ccuauaccuguguuucuu

SEQ ID NO: 3437498 - RNA, 23 nt, Human
ccuauacugcuuggagcugagca

SEQ ID NO: 3437499 - RNA, 14 nt, Human
ccuauagucccagc

SEQ ID NO: 3437500 - RNA, 15 nt, Human
ccuauagucccagcu

SEQ ID NO: 3437501 - RNA, 18 nt, Human
ccuauagucccagcuacu

SEQ ID NO: 3437502 - RNA, 16 nt, Human
ccuauauaguuuauug

SEQ ID NO: 3437503 - RNA, 16 nt, Human
ccuauauccugugacu

SEQ ID NO: 3437504 - RNA, 18 nt, Human
ccuauaugauuuauaguu

SEQ ID NO: 3437505 - RNA, 24 nt, Human
ccuauauuuacagugaaaauguaa

SEQ ID NO: 3437506 - RNA, 20 nt, Human
ccuaucacccaacgcuccaa

SEQ ID NO: 3437507 - RNA, 17 nt, Human
ccuaucaccuauuucca

SEQ ID NO: 3437508 - RNA, 20 nt, Human
ccuaucagaguugcugcaaa

SEQ ID NO: 3437509 - RNA, 18 nt, Human
ccuaucagugugcccccc

SEQ ID NO: 3437510 - RNA, 14 nt, Human
ccuaucauguuaac

SEQ ID NO: 3437511 - RNA, 12 nt, Human
ccuauccaccca

SEQ ID NO: 3437512 - RNA, 16 nt, Human
ccuauccacccagccc

SEQ ID NO: 3437513 - RNA, 18 nt, Human
ccuauccacccagcccau

SEQ ID NO: 3437514 - RNA, 21 nt, Human
ccuauccacccagcccauucu

SEQ ID NO: 3437515 - RNA, 14 nt, Human
ccuaucccauccca

SEQ ID NO: 3437516 - RNA, 14 nt, Human
ccuaucccucuccu

SEQ ID NO: 3437517 - RNA, 15 nt, Human
ccuauccgcugccag

SEQ ID NO: 3437518 - RNA, 13 nt, Human
ccuauccugcugu

SEQ ID NO: 3437519 - RNA, 19 nt, Human
ccuauccuuggcaccaaag

SEQ ID NO: 3437520 - RNA, 22 nt, Human
ccuaucgcccccuacgcgccuu

SEQ ID NO: 3437521 - RNA, 18 nt, Human
ccuaucuaacccucccau

SEQ ID NO: 3437522 - RNA, 20 nt, Human
ccuaucuccagcggcccugu

SEQ ID NO: 3437523 - RNA, 15 nt, Human
ccuaucuccugacag

SEQ ID NO: 3437524 - RNA, 16 nt, Human
ccuaucucgugggaga

SEQ ID NO: 3437525 - RNA, 20 nt, Human
ccuaucucgugggagagcca

SEQ ID NO: 3437526 - RNA, 22 nt, Human
ccuaucuguuuacaguguuccg

SEQ ID NO: 3437527 - RNA, 12 nt, Human
ccuaucuuugcc

SEQ ID NO: 3437528 - RNA, 15 nt, Human
ccuaucuuugccacc

SEQ ID NO: 3437529 - RNA, 17 nt, Human
ccuaugacuugggcacc

SEQ ID NO: 3437530 - RNA, 22 nt, Human
ccuaugacuugggcacccccag

SEQ ID NO: 3437531 - RNA, 21 nt, Human
ccuaugagcauccugagcccc

SEQ ID NO: 3437532 - RNA, 17 nt, Human
ccuaugauauuuucugu

SEQ ID NO: 3437533 - RNA, 13 nt, Human
ccuaugaucccag

SEQ ID NO: 3437534 - RNA, 22 nt, Human
ccuaugauguauacugccacua

SEQ ID NO: 3437535 - RNA, 21 nt, Human
ccuaugcacauauggacucug

SEQ ID NO: 3437536 - RNA, 18 nt, Human
ccuaugcaugguuucagc

SEQ ID NO: 3437537 - RNA, 23 nt, Human
ccuaugcaugguuucagcacuag

SEQ ID NO: 3437538 - RNA, 12 nt, Human
ccuauggaaacc

SEQ ID NO: 3437539 - RNA, 14 nt, Human
ccuauggaauuuau

SEQ ID NO: 3437540 - RNA, 17 nt, Human
ccucacuauucaaguau

SEQ ID NO: 3437541 - RNA, 19 nt, Human
ccucacucccuucuaccug

SEQ ID NO: 3437542 - RNA, 12 nt, Human
ccucacuccugu

SEQ ID NO: 3437543 - RNA, 22 nt, Human
ccucacucggguuucucugugg

SEQ ID NO: 3437544 - RNA, 19 nt, Human
ccucacucgucucccccaa

SEQ ID NO: 3437545 - RNA, 12 nt, Human
ccucacucugcc

SEQ ID NO: 3437546 - RNA, 23 nt, Human
ccucacucugcuaccuugcccca

SEQ ID NO: 3437547 - RNA, 17 nt, Human
ccucacucuggccucag

SEQ ID NO: 3437548 - RNA, 15 nt, Human
ccucacucuugccaa

SEQ ID NO: 3437549 - RNA, 16 nt, Human
ccucacucuugccaac

SEQ ID NO: 3437550 - RNA, 17 nt, Human
ccucacugaaugccuca

SEQ ID NO: 3437551 - RNA, 18 nt, Human
ccucacugcccgcacacc

SEQ ID NO: 3437552 - RNA, 22 nt, Human
ccucacugcccgcacacccuca

SEQ ID NO: 3437553 - RNA, 21 nt, Human
ccucacugcucccugaagcca

SEQ ID NO: 3437554 - RNA, 17 nt, Human
ccucacuggccaucccu

SEQ ID NO: 3437555 - RNA, 13 nt, Human
ccucacuggcucu

SEQ ID NO: 3437556 - RNA, 18 nt, Human
ccucacuggcucuccugg

SEQ ID NO: 3437557 - RNA, 20 nt, Human
ccucacugggguccuggggc

SEQ ID NO: 3437558 - RNA, 14 nt, Human
ccucacuggguggg

SEQ ID NO: 3437559 - RNA, 21 nt, Human
ccucacuggguggggugagga

SEQ ID NO: 3437560 - RNA, 20 nt, Human
ccucacuguauccagguucc

SEQ ID NO: 3437561 - RNA, 16 nt, Human
ccucacuguugaauuu

SEQ ID NO: 3437562 - RNA, 19 nt, Human
ccucacuuccauacagcuc

SEQ ID NO: 3437563 - RNA, 22 nt, Human
ccucacuuggucugccaggccc

SEQ ID NO: 3437564 - RNA, 19 nt, Human
ccucagaaacacuggggcu

SEQ ID NO: 3437565 - RNA, 22 nt, Human
ccucagaacccuuggcuugccc

SEQ ID NO: 3437566 - RNA, 15 nt, Human
ccucagacucuaaga

SEQ ID NO: 3437567 - RNA, 19 nt, Human
ccucagacucuaagaaaga

SEQ ID NO: 3437568 - RNA, 21 nt, Human
ccucagacucuaagaaagaac

SEQ ID NO: 3437569 - RNA, 12 nt, Human
ccucagacugca

SEQ ID NO: 3437570 - RNA, 20 nt, Human
ccucagacugcacccaggag

SEQ ID NO: 3437571 - RNA, 17 nt, Human
ccucagacuuaccagga

SEQ ID NO: 3437572 - RNA, 19 nt, Human
ccucagagaccagggcucc

SEQ ID NO: 3437573 - RNA, 17 nt, Human
ccucagaguccaggccc

SEQ ID NO: 3437574 - RNA, 14 nt, Human
ccucagagugcaag

SEQ ID NO: 3437575 - RNA, 21 nt, Human
ccucagauggcagcuuuuaaa

SEQ ID NO: 3437576 - RNA, 16 nt, Human
ccucagaugucccuug

SEQ ID NO: 3437577 - RNA, 16 nt, Human
ccucagauuccuuccc

SEQ ID NO: 3437578 - RNA, 17 nt, Human
ccucagauuccuuccca

SEQ ID NO: 3437579 - RNA, 22 nt, Human
ccucagauuccuucccauggag

SEQ ID NO: 3437580 - RNA, 13 nt, Human
ccucagcaccccu

SEQ ID NO: 3437581 - RNA, 18 nt, Human
ccucagcaccccuuccau

SEQ ID NO: 3437582 - RNA, 22 nt, Human
ccucagcaccccuuccaugugg

SEQ ID NO: 3437583 - RNA, 14 nt, Human
ccucagcauccugg

SEQ ID NO: 3437584 - RNA, 16 nt, Human
ccucagccacacccag

SEQ ID NO: 3437585 - RNA, 19 nt, Human
ccucagccacacccaggca

SEQ ID NO: 3437586 - RNA, 15 nt, Human
ccucagccagagaag

SEQ ID NO: 3437587 - RNA, 17 nt, Human
ccucagccagagaagcu

SEQ ID NO: 3437588 - RNA, 23 nt, Human
ccucagccauucacugcccccag

SEQ ID NO: 3437589 - RNA, 18 nt, Human
ccucagccccgcguggaa

SEQ ID NO: 3437590 - RNA, 16 nt, Human
ccucagccccucuugc

SEQ ID NO: 3437591 - RNA, 13 nt, Human
ccucagcccugac

SEQ ID NO: 3437592 - RNA, 23 nt, Human
ccucagccgacugcacagcggcc

SEQ ID NO: 3437593 - RNA, 19 nt, Human
ccucagccucccaaagugc

SEQ ID NO: 3437594 - RNA, 14 nt, Human
ccucagccuccuga

SEQ ID NO: 3437595 - RNA, 18 nt, Human
ccucagccuccugaguag

SEQ ID NO: 3437596 - RNA, 19 nt, Human
ccucagccugaaccccagg

SEQ ID NO: 3437597 - RNA, 12 nt, Human
ccucagccuggc

SEQ ID NO: 3437598 - RNA, 16 nt, Human
ccucagccuggccaga

SEQ ID NO: 3437599 - RNA, 17 nt, Human
ccucagccuggccagac

SEQ ID NO: 3437600 - RNA, 16 nt, Human
ccucagccugugcugc

SEQ ID NO: 3437601 - RNA, 12 nt, Human
ccucagccuuaa

SEQ ID NO: 3437602 - RNA, 19 nt, Human
ccucagccuugccagagau

SEQ ID NO: 3437603 - RNA, 21 nt, Human
ccucagccuugccagagaucc

SEQ ID NO: 3437604 - RNA, 20 nt, Human
ccucagcucccacaagccuc

SEQ ID NO: 3437605 - RNA, 19 nt, Human
ccucagcucggcucagcuc

SEQ ID NO: 3437606 - RNA, 14 nt, Human
ccucagcucuggga

SEQ ID NO: 3437607 - RNA, 14 nt, Human
ccucagcugaaugc

SEQ ID NO: 3437608 - RNA, 16 nt, Human
ccucagcugccucacu

SEQ ID NO: 3437609 - RNA, 16 nt, Human
ccucaggaaagaauag

SEQ ID NO: 3437610 - RNA, 18 nt, Human
ccucaggaaagaauagaa

SEQ ID NO: 3437611 - RNA, 16 nt, Human
ccucaggaaugggcug

SEQ ID NO: 3437612 - RNA, 13 nt, Human
ccucaggaccagg

SEQ ID NO: 3437613 - RNA, 17 nt, Human
ccucaggacccucgcug

SEQ ID NO: 3437614 - RNA, 18 nt, Human
ccucaggacccucgcugg

SEQ ID NO: 3437615 - RNA, 21 nt, Human
ccucaggacccucgcuggccc

SEQ ID NO: 3437616 - RNA, 22 nt, Human
ccucaggacccucgcuggcccc

SEQ ID NO: 3437617 - RNA, 22 nt, Human
ccucaggcaaucugcccgccug

SEQ ID NO: 3437618 - RNA, 15 nt, Human
ccucaggcacacagc

SEQ ID NO: 3437619 - RNA, 16 nt, Human
ccucaggcacacagcu

SEQ ID NO: 3437620 - RNA, 17 nt, Human
ccucaggcacacagcua

SEQ ID NO: 3437621 - RNA, 20 nt, Human
ccucaggcacacagcuacuc

SEQ ID NO: 3437622 - RNA, 18 nt, Human
ccucaggcacuagccuuu

SEQ ID NO: 3437623 - RNA, 22 nt, Human
ccucaggcacuagccuuuggcu

SEQ ID NO: 3437624 - RNA, 13 nt, Human
ccucaggcagcuc

SEQ ID NO: 3437625 - RNA, 15 nt, Human
ccucaggcagcucaa

SEQ ID NO: 3437626 - RNA, 15 nt, Human
ccucaggcaggaagg

SEQ ID NO: 3437627 - RNA, 18 nt, Human
ccucaggcauaggccugg

SEQ ID NO: 3437628 - RNA, 12 nt, Human
ccucaggcugcu

SEQ ID NO: 3437629 - RNA, 17 nt, Human
ccucaggcuuccuuggc

SEQ ID NO: 3437630 - RNA, 22 nt, Human
ccucagggacagagacaccugc

SEQ ID NO: 3437631 - RNA, 16 nt, Human
ccucagggacucaggu

SEQ ID NO: 3437632 - RNA, 23 nt, Human
ccucagggagcagggaaggccug

SEQ ID NO: 3437633 - RNA, 14 nt, Human
ccucagggcaaagc

SEQ ID NO: 3437634 - RNA, 22 nt, Human
ccucagggcaaagccagguccc

SEQ ID NO: 3437635 - RNA, 19 nt, Human
ccucagggcagccugccug

SEQ ID NO: 3437636 - RNA, 14 nt, Human
ccucugcuaaauug

SEQ ID NO: 3437637 - RNA, 22 nt, Human
ccucugcuaaauugauguugau

SEQ ID NO: 3437638 - RNA, 21 nt, Human
ccucugcuacguuccuauugu

SEQ ID NO: 3437639 - RNA, 23 nt, Human
ccucugcucaccgcccaucaggg

SEQ ID NO: 3437640 - RNA, 13 nt, Human
ccucugcucccca

SEQ ID NO: 3437641 - RNA, 13 nt, Human
ccucugcuccugg

SEQ ID NO: 3437642 - RNA, 22 nt, Human
ccucugcuccuggagccuuuga

SEQ ID NO: 3437643 - RNA, 21 nt, Human
ccucugcucugaggcuuccag

SEQ ID NO: 3437644 - RNA, 17 nt, Human
ccucugcugaccugcug

SEQ ID NO: 3437645 - RNA, 18 nt, Human
ccucugcugauccuccca

SEQ ID NO: 3437646 - RNA, 14 nt, Human
ccucugcugccaug

SEQ ID NO: 3437647 - RNA, 15 nt, Human
ccucugcugccaugg

SEQ ID NO: 3437648 - RNA, 15 nt, Human
ccucugcugcuggcu

SEQ ID NO: 3437649 - RNA, 16 nt, Human
ccucuggaaagcaaag

SEQ ID NO: 3437650 - RNA, 16 nt, Human
ccucuggaauugcuca

SEQ ID NO: 3437651 - RNA, 23 nt, Human
ccucuggacggcaggcucacugc

SEQ ID NO: 3437652 - RNA, 17 nt, Human
ccucuggacuggcuaga

SEQ ID NO: 3437653 - RNA, 19 nt, Human
ccucuggaggccucugggc

SEQ ID NO: 3437654 - RNA, 20 nt, Human
ccucuggaggccucugggcc

SEQ ID NO: 3437655 - RNA, 21 nt, Human
ccucuggauuaggucucuguu

SEQ ID NO: 3437656 - RNA, 12 nt, Human
ccucuggccagg

SEQ ID NO: 3437657 - RNA, 15 nt, Human
ccucuggccaggaug

SEQ ID NO: 3437658 - RNA, 15 nt, Human
ccucuggcccugccu

SEQ ID NO: 3437659 - RNA, 16 nt, Human
ccucuggcucuacaca

SEQ ID NO: 3437660 - RNA, 23 nt, Human
ccucugggaaaugagaaggcagc

SEQ ID NO: 3437661 - RNA, 13 nt, Human
ccucugggaaccu

SEQ ID NO: 3437662 - RNA, 15 nt, Human
ccucugggaaccucc

SEQ ID NO: 3437663 - RNA, 21 nt, Human
ccucugggaaccucccagagg

SEQ ID NO: 3437664 - RNA, 14 nt, Human
ccucugggcacugg

SEQ ID NO: 3437665 - RNA, 17 nt, Human
ccucuggggcucuaggg

SEQ ID NO: 3437666 - RNA, 20 nt, Human
ccucugggggguggccaggc

SEQ ID NO: 3437667 - RNA, 20 nt, Human
ccucugggucagugguccac

SEQ ID NO: 3437668 - RNA, 18 nt, Human
ccucuguacagagcccac

SEQ ID NO: 3437669 - RNA, 14 nt, Human
ccucugucaggccu

SEQ ID NO: 3437670 - RNA, 15 nt, Human
ccucugucagucaca

SEQ ID NO: 3437671 - RNA, 19 nt, Human
ccucugucagucacagcca

SEQ ID NO: 3437672 - RNA, 16 nt, Human
ccucugucauaucuuc

SEQ ID NO: 3437673 - RNA, 19 nt, Human
ccucugucauaucuucaca

SEQ ID NO: 3437674 - RNA, 14 nt, Human
ccucuguccagggc

SEQ ID NO: 3437675 - RNA, 23 nt, Human
ccucuguccagggcccugagcuc

SEQ ID NO: 3437676 - RNA, 15 nt, Human
ccucugucuagcaug

SEQ ID NO: 3437677 - RNA, 20 nt, Human
ccucugucuagcaugccaac

SEQ ID NO: 3437678 - RNA, 21 nt, Human
ccucugucuagcaugccaaca

SEQ ID NO: 3437679 - RNA, 11 nt, Human
ccucugucuca

SEQ ID NO: 3437680 - RNA, 20 nt, Human
ccucugucucauccuccugg

SEQ ID NO: 3437681 - RNA, 18 nt, Human
ccucugucucgagcgccc

SEQ ID NO: 3437682 - RNA, 21 nt, Human
ccucugucucgagcgcccugc

SEQ ID NO: 3437683 - RNA, 22 nt, Human
ccucugucucgagcgcccugca

SEQ ID NO: 3437684 - RNA, 17 nt, Human
ccucucuaaccuccuuu

SEQ ID NO: 3437685 - RNA, 20 nt, Human
ccucucuaaccuccuuuacc

SEQ ID NO: 3437686 - RNA, 15 nt, Human
ccucucuacagucuc

SEQ ID NO: 3437687 - RNA, 12 nt, Human
ccucucucacuc

SEQ ID NO: 3437688 - RNA, 14 nt, Human
ccucucucccaguc

SEQ ID NO: 3437689 - RNA, 12 nt, Human
ccucucucccuc

SEQ ID NO: 3437690 - RNA, 16 nt, Human
ccucucucccucuccc

SEQ ID NO: 3437691 - RNA, 18 nt, Human
cauagauaaaacaucuuu

SEQ ID NO: 3437692 - RNA, 23 nt, Human
cauagaucagcaaaccggggccu

SEQ ID NO: 3437693 - RNA, 18 nt, Human
cauagauguuuugguaga

SEQ ID NO: 3437694 - RNA, 17 nt, Human
cauagauuaauggcacu

SEQ ID NO: 3437695 - RNA, 15 nt, Human
cauagauucaccugu

SEQ ID NO: 3437696 - RNA, 16 nt, Human
cauagauucaccugua

SEQ ID NO: 3437697 - RNA, 22 nt, Human
cauagauucaccuguaaaacuu

SEQ ID NO: 3437698 - RNA, 22 nt, Human
cauagauuuauuuuucaguucc

SEQ ID NO: 3437699 - RNA, 15 nt, Human
cauagauuucugauu

SEQ ID NO: 3437700 - RNA, 14 nt, Human
cauagcacuucccc

SEQ ID NO: 3437701 - RNA, 19 nt, Human
cauagcagagaaugaaagg

SEQ ID NO: 3437702 - RNA, 14 nt, Human
cauagcauaggaca

SEQ ID NO: 3437703 - RNA, 15 nt, Human
cauagcauuaacuaa

SEQ ID NO: 3437704 - RNA, 23 nt, Human
cauagcauuaacuaaucuauugg

SEQ ID NO: 3437705 - RNA, 17 nt, Human
cauagccauaaaugaug

SEQ ID NO: 3437706 - RNA, 16 nt, Human
cauagcccagacacag

SEQ ID NO: 3437707 - RNA, 18 nt, Human
cauagcccagacacagaa

SEQ ID NO: 3437708 - RNA, 19 nt, Human
cauagcccauguuaagucc

SEQ ID NO: 3437709 - RNA, 15 nt, Human
cauagcccucacccu

SEQ ID NO: 3437710 - RNA, 19 nt, Human
cauagccuaaucccugggc

SEQ ID NO: 3437711 - RNA, 12 nt, Human
cauagccuauau

SEQ ID NO: 3437712 - RNA, 13 nt, Human
cauagccuauauu

SEQ ID NO: 3437713 - RNA, 23 nt, Human
cauagcggacuccuccuuucucc

SEQ ID NO: 3437714 - RNA, 22 nt, Human
cauagcuaagaaauaaaacugu

SEQ ID NO: 3437715 - RNA, 20 nt, Human
cauagcuccugcuccacagc

SEQ ID NO: 3437716 - RNA, 12 nt, Human
cauagcucuggg

SEQ ID NO: 3437717 - RNA, 18 nt, Human
cauagcuuauuauugaag

SEQ ID NO: 3437718 - RNA, 13 nt, Human
cauagcuuccaug

SEQ ID NO: 3437719 - RNA, 23 nt, Human
cauaggacucaaaguuucagaga

SEQ ID NO: 3437720 - RNA, 19 nt, Human
cauaggaguuuggaggaag

SEQ ID NO: 3437721 - RNA, 14 nt, Human
cauaggcccacaca

SEQ ID NO: 3437722 - RNA, 17 nt, Human
cauaggcccacacacag

SEQ ID NO: 3437723 - RNA, 15 nt, Human
cauaggccugggugc

SEQ ID NO: 3437724 - RNA, 17 nt, Human
cauaggccugggugcug

SEQ ID NO: 3437725 - RNA, 18 nt, Human
cauaggccugggugcugg

SEQ ID NO: 3437726 - RNA, 19 nt, Human
cauaggucacuggcucucc

SEQ ID NO: 3437727 - RNA, 21 nt, Human
cauaggucacuggcucuccaa

SEQ ID NO: 3437728 - RNA, 20 nt, Human
cauaggugauccauguaacu

SEQ ID NO: 3437729 - RNA, 23 nt, Human
cauagguuaaaaaaaaaagucac

SEQ ID NO: 3437730 - RNA, 15 nt, Human
cauaguaaauguagu

SEQ ID NO: 3437731 - RNA, 15 nt, Human
cauaguaacugacau

SEQ ID NO: 3437732 - RNA, 23 nt, Human
cauaguaacuucuuauggaauug

SEQ ID NO: 3437733 - RNA, 16 nt, Human
cauaguagaacgcuau

SEQ ID NO: 3437734 - RNA, 19 nt, Human
cauaguauauuaaaaaugg

SEQ ID NO: 3437735 - RNA, 19 nt, Human
cauaguauccauauuuuau

SEQ ID NO: 3437736 - RNA, 20 nt, Human
cauaguauccauauuuuauu

SEQ ID NO: 3437737 - RNA, 19 nt, Human
cauaguaugguggcugggu

SEQ ID NO: 3437738 - RNA, 20 nt, Human
cauaguaugguggcuggguu

SEQ ID NO: 3437739 - RNA, 13 nt, Human
cauagucacaugg

SEQ ID NO: 3437740 - RNA, 13 nt, Human
cauagucccugcc

SEQ ID NO: 3437741 - RNA, 22 nt, Human
cauagugaugguuccccuguuc

SEQ ID NO: 3437742 - RNA, 11 nt, Human
cauagugcugg

SEQ ID NO: 3437743 - RNA, 13 nt, Human
cauaguguaaugu

SEQ ID NO: 3437744 - RNA, 20 nt, Human
cauaguuaaagaagacauuu

SEQ ID NO: 3437745 - RNA, 13 nt, Human
cauaguuacugua

SEQ ID NO: 3437746 - RNA, 17 nt, Human
cauaguuacuguaaaau

SEQ ID NO: 3437747 - RNA, 19 nt, Human
cauaguuacuguguaaacu

SEQ ID NO: 3437748 - RNA, 13 nt, Human
cauaguucagaau

SEQ ID NO: 3437749 - RNA, 20 nt, Human
cauaguucugagcugccagu

SEQ ID NO: 3437750 - RNA, 20 nt, Human
cauaguuguagacaaaguac

SEQ ID NO: 3437751 - RNA, 15 nt, Human
cauaguuucuuuauu

SEQ ID NO: 3437752 - RNA, 17 nt, Human
cauaguuucuuuauuuu

SEQ ID NO: 3437753 - RNA, 16 nt, Human
cauaguuuggcauuug

SEQ ID NO: 3437754 - RNA, 16 nt, Human
cauaguuuuauuuaua

SEQ ID NO: 3437755 - RNA, 17 nt, Human
cauaguuuuuacugaac

SEQ ID NO: 3437756 - RNA, 19 nt, Human
cauauaaacuuuuuaaaga

SEQ ID NO: 3437757 - RNA, 12 nt, Human
cauauaaaguau

SEQ ID NO: 3437758 - RNA, 13 nt, Human
cauauaaauagaa

SEQ ID NO: 3437759 - RNA, 17 nt, Human
cauauaaauagaaugua

SEQ ID NO: 3437760 - RNA, 22 nt, Human
cauauaaauagaauguaaaugu

SEQ ID NO: 3437761 - RNA, 22 nt, Human
cauauaacuuauauuguaagaa

SEQ ID NO: 3437762 - RNA, 14 nt, Human
cauauaaguuugaa

SEQ ID NO: 3437763 - RNA, 24 nt, Human
cauauaaguuugaaggaaacaguu

SEQ ID NO: 3437764 - RNA, 20 nt, Human
cauauaauauauguuuuaaa

SEQ ID NO: 3437765 - RNA, 22 nt, Human
cauauaauauauguuuuaaaua

SEQ ID NO: 3437766 - RNA, 17 nt, Human
cauauaauguuguuauu

SEQ ID NO: 3437767 - RNA, 20 nt, Human
cauauacaacaccaaaaaau

SEQ ID NO: 3437768 - RNA, 17 nt, Human
cauauaccagcaauaua

SEQ ID NO: 3437769 - RNA, 19 nt, Human
cauauaccuauaaugugug

SEQ ID NO: 3437770 - RNA, 23 nt, Human
cauauaccuauaauguguguaug

SEQ ID NO: 3437771 - RNA, 16 nt, Human
cauauagacacauaca

SEQ ID NO: 3437772 - RNA, 22 nt, Human
cauauagcaaaacuuuuaaacu

SEQ ID NO: 3437773 - RNA, 22 nt, Human
cauauaguauguaaccuguuuu

SEQ ID NO: 3437774 - RNA, 20 nt, Human
cauauauaacagauacauuu

SEQ ID NO: 3437775 - RNA, 18 nt, Human
cauauauaacuagcuaga

SEQ ID NO: 3437776 - RNA, 22 nt, Human
cauauauacacacacaaagaga

SEQ ID NO: 3437777 - RNA, 16 nt, Human
cauauauacaggcaua

SEQ ID NO: 3437778 - RNA, 20 nt, Human
cauauauagacagcuuugac

SEQ ID NO: 3437779 - RNA, 16 nt, Human
cauauauauauauaac

SEQ ID NO: 3437780 - RNA, 14 nt, Human
cauauauauaugug

SEQ ID NO: 3437781 - RNA, 15 nt, Human
cauauauauaugugu

SEQ ID NO: 3437782 - RNA, 23 nt, Human
cauauauauguuuuaagaggcag

SEQ ID NO: 3437783 - RNA, 20 nt, Human
cauauauccuuuucuucuau

SEQ ID NO: 3437784 - RNA, 23 nt, Human
cauauauccuuuucuucuaugua

SEQ ID NO: 3437785 - RNA, 22 nt, Human
cauauauggggggccaacacca

SEQ ID NO: 3437786 - RNA, 22 nt, Human
cauauauuuuuaaaaaaugaaa

SEQ ID NO: 3437787 - RNA, 20 nt, Human
cauauauuuuuauauuuacu

SEQ ID NO: 3437788 - RNA, 16 nt, Human
cauaucagucucugag

SEQ ID NO: 3437789 - RNA, 18 nt, Human
cauaucauccacacauga

SEQ ID NO: 3437790 - RNA, 15 nt, Human
cauaucauuucuuaa

SEQ ID NO: 3437791 - RNA, 16 nt, Human
cauauccaaguuugaa

SEQ ID NO: 3437792 - RNA, 16 nt, Human
cauauccaccaccucc

SEQ ID NO: 3437793 - RNA, 18 nt, Human
cauauccccuauuuaaca

SEQ ID NO: 3437794 - RNA, 23 nt, Human
cauauccugagccaucggugaaa

SEQ ID NO: 3437795 - RNA, 17 nt, Human
cauaucgcugacuucau

SEQ ID NO: 3437796 - RNA, 14 nt, Human
cauaucuacagaua

SEQ ID NO: 3437797 - RNA, 18 nt, Human
cauaucuaguaugaaauu

SEQ ID NO: 3437798 - RNA, 17 nt, Human
cauaucuaucagaguau

SEQ ID NO: 3437799 - RNA, 11 nt, Human
cauaucugccu

SEQ ID NO: 3437800 - RNA, 13 nt, Human
cauaucugccuuu

SEQ ID NO: 3437801 - RNA, 21 nt, Human
cauaucuugcgaauccaagcu

SEQ ID NO: 3437802 - RNA, 16 nt, Human
cauaucuuuauuaauc

SEQ ID NO: 3437803 - RNA, 17 nt, Human
cauaucuuuauuaauca

SEQ ID NO: 3437804 - RNA, 15 nt, Human
cauaugaaaggagag

SEQ ID NO: 3437805 - RNA, 20 nt, Human
cauaugaaaggugccaugga

SEQ ID NO: 3437806 - RNA, 17 nt, Human
cauaugaaauuuaauau

SEQ ID NO: 3437807 - RNA, 15 nt, Human
cauaugaauuguaca

SEQ ID NO: 3437808 - RNA, 16 nt, Human
cauaugaauuguacag

SEQ ID NO: 3437809 - RNA, 17 nt, Human
cauaugacaaauguuuc

SEQ ID NO: 3437810 - RNA, 22 nt, Human
cauaugacauucaugccuggcu

SEQ ID NO: 3437811 - RNA, 16 nt, Human
cauaugaccucaugca

SEQ ID NO: 3437812 - RNA, 20 nt, Human
cauaugacucacaugaugca

SEQ ID NO: 3437813 - RNA, 19 nt, Human
cauaugaguguggaagccg

SEQ ID NO: 3437814 - RNA, 13 nt, Human
cauaugaucuguu

SEQ ID NO: 3437815 - RNA, 17 nt, Human
cauaugauguacaugua

SEQ ID NO: 3437816 - RNA, 14 nt, Human
cauaugauucugcu

SEQ ID NO: 3437817 - RNA, 15 nt, Human
cauaugauucugcuu

SEQ ID NO: 3437818 - RNA, 14 nt, Human
cauaugauuuacau

SEQ ID NO: 3437819 - RNA, 17 nt, Human
cauaugcaccuuguguc

SEQ ID NO: 3437820 - RNA, 18 nt, Human
cauaugcaguguucuaca

SEQ ID NO: 3437821 - RNA, 20 nt, Human
cauaugcccacauuuagucu

SEQ ID NO: 3437822 - RNA, 13 nt, Human
cauaugccugggc

SEQ ID NO: 3437823 - RNA, 21 nt, Human
cauaugcuaccaccagcugug

SEQ ID NO: 3437824 - RNA, 14 nt, Human
cauauggauaaaua

SEQ ID NO: 3437825 - RNA, 12 nt, Human
cauauggauguu

SEQ ID NO: 3437826 - RNA, 15 nt, Human
cauauggauguuacu

SEQ ID NO: 3437827 - RNA, 20 nt, Human
cauauggcccagugucaagu

SEQ ID NO: 3437828 - RNA, 17 nt, Human
ccucuggucgcuccugc

SEQ ID NO: 3437829 - RNA, 19 nt, Human
ccucuggucgcuccugccc

SEQ ID NO: 3437830 - RNA, 16 nt, Human
ccucugguuuggggcg

SEQ ID NO: 3437831 - RNA, 21 nt, Human
ccucugguuuggggcgaggca

SEQ ID NO: 3437832 - RNA, 23 nt, Human
ccucugguuuggggcgaggcaga

SEQ ID NO: 3437833 - RNA, 14 nt, Human
ccucuguacagagc

SEQ ID NO: 3437834 - RNA, 15 nt, Human
ccucuguacagagcc

SEQ ID NO: 3437835 - RNA, 18 nt, Human
ccucugucagucacagcc

SEQ ID NO: 3437836 - RNA, 17 nt, Human
ccucuguccaggcacug

SEQ ID NO: 3437837 - RNA, 19 nt, Human
ccucuguccccuucucuca

SEQ ID NO: 3437838 - RNA, 21 nt, Human
ccucuguccccuucucucauc

SEQ ID NO: 3437839 - RNA, 11 nt, Human
ccucuguccug

SEQ ID NO: 3437840 - RNA, 17 nt, Human
ccucuguccugcuucug

SEQ ID NO: 3437841 - RNA, 15 nt, Human
ccucugucucauccu

SEQ ID NO: 3437842 - RNA, 23 nt, Human
ccucugucucauccuccuggaac

SEQ ID NO: 3437843 - RNA, 15 nt, Human
ccucugucucgagcg

SEQ ID NO: 3437844 - RNA, 19 nt, Human
ccucugucucgagcgcccu

SEQ ID NO: 3437845 - RNA, 20 nt, Human
ccucugucucgagcgcccug

SEQ ID NO: 3437846 - RNA, 22 nt, Human
ccucugucugcccuucacccca

SEQ ID NO: 3437847 - RNA, 16 nt, Human
ccucugucuucuggac

SEQ ID NO: 3437848 - RNA, 19 nt, Human
ccucugugaccaaugucuu

SEQ ID NO: 3437849 - RNA, 15 nt, Human
ccucugugcugugug

SEQ ID NO: 3437850 - RNA, 19 nt, Human
ccucugugucacuggcugc

SEQ ID NO: 3437851 - RNA, 18 nt, Human
ccucuguuguccuccccu

SEQ ID NO: 3437852 - RNA, 21 nt, Human
ccucuguuucucuuuccuugg

SEQ ID NO: 3437853 - RNA, 21 nt, Human
ccucuguuugacaaaccucua

SEQ ID NO: 3437854 - RNA, 17 nt, Human
ccucuuaaagcugccug

SEQ ID NO: 3437855 - RNA, 23 nt, Human
ccugcccaugucgcgcucagcau

SEQ ID NO: 3437856 - RNA, 21 nt, Human
ccugcccauucugcccugugg

SEQ ID NO: 3437857 - RNA, 20 nt, Human
ccugccccaaucccuuuauu

SEQ ID NO: 3437858 - RNA, 12 nt, Human
ccugccccagcc

SEQ ID NO: 3437859 - RNA, 13 nt, Human
ccugccccagccc

SEQ ID NO: 3437860 - RNA, 18 nt, Human
ccugccccagcccaaguc

SEQ ID NO: 3437861 - RNA, 18 nt, Human
ccugccccaggccugaaa

SEQ ID NO: 3437862 - RNA, 15 nt, Human
ccugcccccaaucca

SEQ ID NO: 3437863 - RNA, 15 nt, Human
ccugcccccacaccu

SEQ ID NO: 3437864 - RNA, 18 nt, Human
ccugcccccacaccuggc

SEQ ID NO: 3437865 - RNA, 19 nt, Human
ccugcccccacaccuggcc

SEQ ID NO: 3437866 - RNA, 22 nt, Human
ccugcccccagaccuuuuaucc

SEQ ID NO: 3437867 - RNA, 13 nt, Human
ccugcccccagcc

SEQ ID NO: 3437868 - RNA, 15 nt, Human
ccugcccccagcccc

SEQ ID NO: 3437869 - RNA, 17 nt, Human
ccugcccccagccccgg

SEQ ID NO: 3437870 - RNA, 12 nt, Human
ccugcccccagg

SEQ ID NO: 3437871 - RNA, 15 nt, Human
ccugcccccaggacu

SEQ ID NO: 3437872 - RNA, 17 nt, Human
ccugcccccaggacugg

SEQ ID NO: 3437873 - RNA, 19 nt, Human
ccugcccccaggacugggc

SEQ ID NO: 3437874 - RNA, 20 nt, Human
ccugcccccaggacugggcc

SEQ ID NO: 3437875 - RNA, 14 nt, Human
ccugccccccagcc

SEQ ID NO: 3437876 - RNA, 18 nt, Human
ccugccccccagccucug

SEQ ID NO: 3437877 - RNA, 22 nt, Human
ccugccccccagccucuggcau

SEQ ID NO: 3437878 - RNA, 20 nt, Human
ccugcccccgcauccccugc

SEQ ID NO: 3437879 - RNA, 22 nt, Human
ccugcccccgcauccccugccu

SEQ ID NO: 3437880 - RNA, 20 nt, Human
ccugcccccugcaggaagga

SEQ ID NO: 3437881 - RNA, 12 nt, Human
ccugcccccugg

SEQ ID NO: 3437882 - RNA, 16 nt, Human
ccugcccccuggugga

SEQ ID NO: 3437883 - RNA, 12 nt, Human
ccugcccccuuc

SEQ ID NO: 3437884 - RNA, 13 nt, Human
ccugcccccuucu

SEQ ID NO: 3437885 - RNA, 17 nt, Human
ccugcccccuucuccca

SEQ ID NO: 3437886 - RNA, 20 nt, Human
ccugcccccuucucccacac

SEQ ID NO: 3437887 - RNA, 21 nt, Human
ccugcccccuucucccacacu

SEQ ID NO: 3437888 - RNA, 16 nt, Human
ccugccccucagagac

SEQ ID NO: 3437889 - RNA, 15 nt, Human
ccugccccucccuuc

SEQ ID NO: 3437890 - RNA, 18 nt, Human
ccugccccucccuucaac

SEQ ID NO: 3437891 - RNA, 18 nt, Human
ccugccccuccucucugc

SEQ ID NO: 3437892 - RNA, 21 nt, Human
ccugccccuccucucugcccu

SEQ ID NO: 3437893 - RNA, 16 nt, Human
ccugccccucucccgc

SEQ ID NO: 3437894 - RNA, 18 nt, Human
ccugccccucuuucucuu

SEQ ID NO: 3437895 - RNA, 20 nt, Human
ccugccccucuuucucuuuc

SEQ ID NO: 3437896 - RNA, 14 nt, Human
ccugccccuguucu

SEQ ID NO: 3437897 - RNA, 16 nt, Human
ccugccccuuccuuua

SEQ ID NO: 3437898 - RNA, 19 nt, Human
ccugccccuucuacacucu

SEQ ID NO: 3437899 - RNA, 20 nt, Human
ccugccccuucuacacucuc

SEQ ID NO: 3437900 - RNA, 22 nt, Human
ccugccccuucuacacucuccu

SEQ ID NO: 3437901 - RNA, 15 nt, Human
ccugcccgcacagca

SEQ ID NO: 3437902 - RNA, 16 nt, Human
ccugcccgcacagcag

SEQ ID NO: 3437903 - RNA, 20 nt, Human
ccugcccgcacagcagccug

SEQ ID NO: 3437904 - RNA, 18 nt, Human
ccugcccgcagaccucug

SEQ ID NO: 3437905 - RNA, 15 nt, Human
ccugcccguaaacac

SEQ ID NO: 3437906 - RNA, 23 nt, Human
ccugcccguaaacacgccugcaa

SEQ ID NO: 3437907 - RNA, 20 nt, Human
ccugcccgucucucucccau

SEQ ID NO: 3437908 - RNA, 20 nt, Human
ccugcccuacagaggucucu

SEQ ID NO: 3437909 - RNA, 18 nt, Human
ccugcccuagagcacacu

SEQ ID NO: 3437910 - RNA, 22 nt, Human
ccugcccuagagcacacuguag

SEQ ID NO: 3437911 - RNA, 13 nt, Human
ccugcccucaagg

SEQ ID NO: 3437912 - RNA, 18 nt, Human
ccugcccucaagggugug

SEQ ID NO: 3437913 - RNA, 15 nt, Human
ccugcccucagggau

SEQ ID NO: 3437914 - RNA, 19 nt, Human
ccugcccucaucucucucc

SEQ ID NO: 3437915 - RNA, 21 nt, Human
ccugcccucauggccccucug

SEQ ID NO: 3437916 - RNA, 15 nt, Human
ccugcccuccccaga

SEQ ID NO: 3437917 - RNA, 12 nt, Human
ccugcccucgug

SEQ ID NO: 3437918 - RNA, 14 nt, Human
ccugcccucguggc

SEQ ID NO: 3437919 - RNA, 23 nt, Human
ccugcccucguggccagcccggc

SEQ ID NO: 3437920 - RNA, 13 nt, Human
ccugcccugagga

SEQ ID NO: 3437921 - RNA, 11 nt, Human
ccugcccugca

SEQ ID NO: 3437922 - RNA, 12 nt, Human
ccugcccugcca

SEQ ID NO: 3437923 - RNA, 15 nt, Human
ccugcccugccccca

SEQ ID NO: 3437924 - RNA, 14 nt, Human
ccugcccugccuga

SEQ ID NO: 3437925 - RNA, 20 nt, Human
ccugcccugcugccgccucc

SEQ ID NO: 3437926 - RNA, 12 nt, Human
ccugcccuggaa

SEQ ID NO: 3437927 - RNA, 14 nt, Human
ccugcccugggagg

SEQ ID NO: 3437928 - RNA, 22 nt, Human
ccugcccugguuuccugcccug

SEQ ID NO: 3437929 - RNA, 21 nt, Human
ccugcccuuaccugccaggaa

SEQ ID NO: 3437930 - RNA, 17 nt, Human
ccugcccuucagcaucc

SEQ ID NO: 3437931 - RNA, 17 nt, Human
ccugcccuugucugaga

SEQ ID NO: 3437932 - RNA, 20 nt, Human
ccugcccuuuuuucugccuc

SEQ ID NO: 3437933 - RNA, 16 nt, Human
ccugccgacacgcucc

SEQ ID NO: 3437934 - RNA, 14 nt, Human
ccugccgagagucc

SEQ ID NO: 3437935 - RNA, 23 nt, Human
ccugccgagaguccaucagccuc

SEQ ID NO: 3437936 - RNA, 15 nt, Human
ccugccgcagagcug

SEQ ID NO: 3437937 - RNA, 14 nt, Human
ccugccgccucaau

SEQ ID NO: 3437938 - RNA, 13 nt, Human
ccugccggcuccu

SEQ ID NO: 3437939 - RNA, 20 nt, Human
ccugccgguaaacacgccug

SEQ ID NO: 3437940 - RNA, 22 nt, Human
ccugccgguaaacacgccugca

SEQ ID NO: 3437941 - RNA, 23 nt, Human
ccugccgucaccaccaccccuac

SEQ ID NO: 3437942 - RNA, 15 nt, Human
ccugccuagcacuca

SEQ ID NO: 3437943 - RNA, 19 nt, Human
ccugccuauuaucugucag

SEQ ID NO: 3437944 - RNA, 22 nt, Human
ccugccucaccagcccuggcaa

SEQ ID NO: 3437945 - RNA, 15 nt, Human
ccugccucagccucc

SEQ ID NO: 3437946 - RNA, 17 nt, Human
ccugccucagccucccg

SEQ ID NO: 3437947 - RNA, 19 nt, Human
ccugccucagccucccgag

SEQ ID NO: 3437948 - RNA, 18 nt, Human
ccugccuccacccucuga

SEQ ID NO: 3437949 - RNA, 15 nt, Human
ccugccuccaggaac

SEQ ID NO: 3437950 - RNA, 20 nt, Human
ccugccuccaggaaccacac

SEQ ID NO: 3437951 - RNA, 15 nt, Human
ccugccuccagggcu

SEQ ID NO: 3437952 - RNA, 17 nt, Human
ccugccuccagggcugg

SEQ ID NO: 3437953 - RNA, 16 nt, Human
ccugccuccccugccu

SEQ ID NO: 3437954 - RNA, 15 nt, Human
ccugccuccccugug

SEQ ID NO: 3437955 - RNA, 17 nt, Human
ccugccuccccugugca

SEQ ID NO: 3437956 - RNA, 22 nt, Human
ccugccucccgcccccuuggcu

SEQ ID NO: 3437957 - RNA, 13 nt, Human
ccugccuccugcc

SEQ ID NO: 3437958 - RNA, 20 nt, Human
ccugccuccugccugccccu

SEQ ID NO: 3437959 - RNA, 22 nt, Human
ccugccuccuuugugaggaagc

SEQ ID NO: 3437960 - RNA, 23 nt, Human
ccugccucucaucaacugaauga

SEQ ID NO: 3437961 - RNA, 17 nt, Human
ccugccucuccgccccu

SEQ ID NO: 3437962 - RNA, 22 nt, Human
ccugccucuccgccccugagcc

SEQ ID NO: 3437963 - RNA, 14 nt, Human
ccugccucucugca

SEQ ID NO: 3437964 - RNA, 14 nt, Human
ccugccucuuaaau

SEQ ID NO: 3437965 - RNA, 21 nt, Human
ccugccucuuaaauaaaccuu

SEQ ID NO: 3437966 - RNA, 20 nt, Human
ccugccugagggccccucug

SEQ ID NO: 3437967 - RNA, 22 nt, Human
ccugccugagggccccucugcc

SEQ ID NO: 3437968 - RNA, 12 nt, Human
ccugccugccau

SEQ ID NO: 3437969 - RNA, 13 nt, Human
ccugccugccaug

SEQ ID NO: 3437970 - RNA, 14 nt, Human
ccugccugcccugu

SEQ ID NO: 3437971 - RNA, 12 nt, Human
ccugccugcugg

SEQ ID NO: 3437972 - RNA, 22 nt, Human
cauccccaaaacaaagucuuug

SEQ ID NO: 3437973 - RNA, 22 nt, Human
cauccccacguggacaagaaag

SEQ ID NO: 3437974 - RNA, 15 nt, Human
cauccccauccucca

SEQ ID NO: 3437975 - RNA, 18 nt, Human
cauccccccucaccaggg

SEQ ID NO: 3437976 - RNA, 12 nt, Human
caucccccugcc

SEQ ID NO: 3437977 - RNA, 14 nt, Human
cauccccucccauc

SEQ ID NO: 3437978 - RNA, 22 nt, Human
cauccccuugaggucucagccc

SEQ ID NO: 3437979 - RNA, 18 nt, Human
caucccgcucuuuuccua

SEQ ID NO: 3437980 - RNA, 17 nt, Human
caucccggaggaaaucu

SEQ ID NO: 3437981 - RNA, 20 nt, Human
caucccgugcaaaacaugcu

SEQ ID NO: 3437982 - RNA, 21 nt, Human
caucccgugcaaaacaugcua

SEQ ID NO: 3437983 - RNA, 17 nt, Human
caucccguguucuccuu

SEQ ID NO: 3437984 - RNA, 21 nt, Human
caucccguguucuccuuuucc

SEQ ID NO: 3437985 - RNA, 19 nt, Human
caucccuaccgacccaggg

SEQ ID NO: 3437986 - RNA, 13 nt, Human
caucccucccucc

SEQ ID NO: 3437987 - RNA, 23 nt, Human
caucccucccuccaccucccugc

SEQ ID NO: 3437988 - RNA, 14 nt, Human
caucccuccuuaag

SEQ ID NO: 3437989 - RNA, 17 nt, Human
caucccugaaggccccg

SEQ ID NO: 3437990 - RNA, 18 nt, Human
caucccugaggagccagg

SEQ ID NO: 3437991 - RNA, 22 nt, Human
caucccugaggcuggacuccag

SEQ ID NO: 3437992 - RNA, 15 nt, Human
caucccugccagcuc

SEQ ID NO: 3437993 - RNA, 21 nt, Human
caucccugccagcucuucugc

SEQ ID NO: 3437994 - RNA, 13 nt, Human
caucccugccugg

SEQ ID NO: 3437995 - RNA, 14 nt, Human
caucccugccuggu

SEQ ID NO: 3437996 - RNA, 14 nt, Human
caucccugggccug

SEQ ID NO: 3437997 - RNA, 15 nt, Human
caucccugggccugc

SEQ ID NO: 3437998 - RNA, 19 nt, Human
caucccugggccugcugcu

SEQ ID NO: 3437999 - RNA, 17 nt, Human
caucccugggccuuggg

SEQ ID NO: 3438000 - RNA, 21 nt, Human
caucccugggccuugggcucc

SEQ ID NO: 3438001 - RNA, 13 nt, Human
caucccugugagg

SEQ ID NO: 3438002 - RNA, 18 nt, Human
caucccuucucuuccagg

SEQ ID NO: 3438003 - RNA, 23 nt, Human
caucccuucucuuccaggcagcc

SEQ ID NO: 3438004 - RNA, 19 nt, Human
caucccuugaccaggccug

SEQ ID NO: 3438005 - RNA, 20 nt, Human
caucccuugaccaggccugg

SEQ ID NO: 3438006 - RNA, 19 nt, Human
caucccuuugaaacaagau

SEQ ID NO: 3438007 - RNA, 15 nt, Human
caucccuuuuucaau

SEQ ID NO: 3438008 - RNA, 18 nt, Human
caucccuuuuugaagugu

SEQ ID NO: 3438009 - RNA, 20 nt, Human
caucccuuuuugaaguguag

SEQ ID NO: 3438010 - RNA, 19 nt, Human
ccucuuaaagcugccugua

SEQ ID NO: 3438011 - RNA, 22 nt, Human
ccucuuaaagcugccuguaguu

SEQ ID NO: 3438012 - RNA, 23 nt, Human
ccucuuaaagcugccuguaguua

SEQ ID NO: 3438013 - RNA, 21 nt, Human
ccucuuaauguaugauuacau

SEQ ID NO: 3438014 - RNA, 20 nt, Human
ccucuuagacuucugcuuuc

SEQ ID NO: 3438015 - RNA, 22 nt, Human
ccucuuagacuucugcuuucca

SEQ ID NO: 3438016 - RNA, 15 nt, Human
ccucuuaugggcugg

SEQ ID NO: 3438017 - RNA, 20 nt, Human
ccucuuauguaccucuuuua

SEQ ID NO: 3438018 - RNA, 13 nt, Human
ccucuucaaauua

SEQ ID NO: 3438019 - RNA, 13 nt, Human
ccucuucaccccc

SEQ ID NO: 3438020 - RNA, 17 nt, Human
ccucuucaccccggcag

SEQ ID NO: 3438021 - RNA, 20 nt, Human
ccucuucaccccggcaggcc

SEQ ID NO: 3438022 - RNA, 21 nt, Human
ccucuucaccccggcaggccc

SEQ ID NO: 3438023 - RNA, 12 nt, Human
ccucuuccaguc

SEQ ID NO: 3438024 - RNA, 14 nt, Human
ccucuuccagucuu

SEQ ID NO: 3438025 - RNA, 18 nt, Human
ccucuuccaucauguccc

SEQ ID NO: 3438026 - RNA, 12 nt, Human
ccucuuccccac

SEQ ID NO: 3438027 - RNA, 16 nt, Human
ccucuucccccaagau

SEQ ID NO: 3438028 - RNA, 21 nt, Human
ccucuucccugguaagaaaaa

SEQ ID NO: 3438029 - RNA, 14 nt, Human
ccucuuccuacccu

SEQ ID NO: 3438030 - RNA, 10 nt, Human
ccucuuccuc

SEQ ID NO: 3438031 - RNA, 15 nt, Human
ccucuuccucccuca

SEQ ID NO: 3438032 - RNA, 11 nt, Human
ccucuuccucu

SEQ ID NO: 3438033 - RNA, 20 nt, Human
ccucuuccucuugacccugc

SEQ ID NO: 3438034 - RNA, 20 nt, Human
ccucuuccugacgaaacugg

SEQ ID NO: 3438035 - RNA, 15 nt, Human
ccucuuccugccuag

SEQ ID NO: 3438036 - RNA, 16 nt, Human
ccucuuccuugcugug

SEQ ID NO: 3438037 - RNA, 13 nt, Human
ccucuucggcccu

SEQ ID NO: 3438038 - RNA, 16 nt, Human
ccucuucggcccucag

SEQ ID NO: 3438039 - RNA, 21 nt, Human
ccucuucuacucacuuuuccc

SEQ ID NO: 3438040 - RNA, 23 nt, Human
ccucuucuacucacuuuucccac

SEQ ID NO: 3438041 - RNA, 19 nt, Human
ccucuucucgugccucccc

SEQ ID NO: 3438042 - RNA, 14 nt, Human
ccucuucucuuccu

SEQ ID NO: 3438043 - RNA, 16 nt, Human
ccucuucucuuccugu

SEQ ID NO: 3438044 - RNA, 17 nt, Human
ccucuucucuuccugua

SEQ ID NO: 3438045 - RNA, 15 nt, Human
ccucuucuggcucaa

SEQ ID NO: 3438046 - RNA, 20 nt, Human
ccucuucugucccuguuaga

SEQ ID NO: 3438047 - RNA, 12 nt, Human
ccucuucuuacu

SEQ ID NO: 3438048 - RNA, 14 nt, Human
ccucuucuuacuug

SEQ ID NO: 3438049 - RNA, 22 nt, Human
ccucuucuuucagacuugccau

SEQ ID NO: 3438050 - RNA, 15 nt, Human
ccucuugaccaggcu

SEQ ID NO: 3438051 - RNA, 15 nt, Human
ccucuugagcagugg

SEQ ID NO: 3438052 - RNA, 13 nt, Human
ccucuugagccuu

SEQ ID NO: 3438053 - RNA, 12 nt, Human
ccucuugccccc

SEQ ID NO: 3438054 - RNA, 18 nt, Human
ccucuugcggucccuucu

SEQ ID NO: 3438055 - RNA, 12 nt, Human
ccucuugcucaa

SEQ ID NO: 3438056 - RNA, 15 nt, Human
ccucuuggaccucug

SEQ ID NO: 3438057 - RNA, 20 nt, Human
ccucuuggagaagucucagc

SEQ ID NO: 3438058 - RNA, 22 nt, Human
ccucuuggggaguuuagggugg

SEQ ID NO: 3438059 - RNA, 17 nt, Human
ccucuuguaaauaaagc

SEQ ID NO: 3438060 - RNA, 18 nt, Human
ccucuuguaaauaaagcc

SEQ ID NO: 3438061 - RNA, 15 nt, Human
ccucuuguuuuguuu

SEQ ID NO: 3438062 - RNA, 11 nt, Human
ccucuuuaaaa

SEQ ID NO: 3438063 - RNA, 15 nt, Human
ccucuuuaaaacaaa

SEQ ID NO: 3438064 - RNA, 12 nt, Human
ccucuuuaagag

SEQ ID NO: 3438065 - RNA, 19 nt, Human
ccucuuuagaguuagacug

SEQ ID NO: 3438066 - RNA, 16 nt, Human
ccucuuucagaaaaca

SEQ ID NO: 3438067 - RNA, 17 nt, Human
ccucuuucagaaaacag

SEQ ID NO: 3438068 - RNA, 16 nt, Human
ccucuuucagcuccug

SEQ ID NO: 3438069 - RNA, 16 nt, Human
ccucuuucccucccuu

SEQ ID NO: 3438070 - RNA, 15 nt, Human
ccucuuuccucucuu

SEQ ID NO: 3438071 - RNA, 12 nt, Human
ccucuuucucuu

SEQ ID NO: 3438072 - RNA, 15 nt, Human
ccucuuugagugaag

SEQ ID NO: 3438073 - RNA, 14 nt, Human
ccucuuugcuuugc

SEQ ID NO: 3438074 - RNA, 19 nt, Human
ccucuuuggucuacacugu

SEQ ID NO: 3438075 - RNA, 22 nt, Human
ccucuuuggucuacacugugcu

SEQ ID NO: 3438076 - RNA, 14 nt, Human
ccucuuugucuaaa

SEQ ID NO: 3438077 - RNA, 19 nt, Human
ccucuuugucuaaaacaau

SEQ ID NO: 3438078 - RNA, 22 nt, Human
ccucuuugucugcgugggucag

SEQ ID NO: 3438079 - RNA, 18 nt, Human
ccucuuuuaccugcugcu

SEQ ID NO: 3438080 - RNA, 17 nt, Human
ccucuuuuagucauuuu

SEQ ID NO: 3438081 - RNA, 14 nt, Human
ccucuuuucucugc

SEQ ID NO: 3438082 - RNA, 11 nt, Human
ccucuuuucuu

SEQ ID NO: 3438083 - RNA, 12 nt, Human
ccucuuuugugc

SEQ ID NO: 3438084 - RNA, 20 nt, Human
ccucuuuuuccaucauaauu

SEQ ID NO: 3438085 - RNA, 17 nt, Human
ccugaaaacacugugca

SEQ ID NO: 3438086 - RNA, 13 nt, Human
ccugaaaacccag

SEQ ID NO: 3438087 - RNA, 21 nt, Human
ccugaaaagauguugugucuu

SEQ ID NO: 3438088 - RNA, 22 nt, Human
ccugaaaagguuuaugaaaaag

SEQ ID NO: 3438089 - RNA, 20 nt, Human
ccugaaacgcuccuuugugu

SEQ ID NO: 3438090 - RNA, 15 nt, Human
ccugaaacuuauuuu

SEQ ID NO: 3438091 - RNA, 16 nt, Human
ccugaaacuuauuuuu

SEQ ID NO: 3438092 - RNA, 13 nt, Human
ccugaaagaggaa

SEQ ID NO: 3438093 - RNA, 19 nt, Human
ccugaaagaggcugaggcc

SEQ ID NO: 3438094 - RNA, 22 nt, Human
ccugaaagaggcugaggccugg

SEQ ID NO: 3438095 - RNA, 13 nt, Human
ccugaaagcccug

SEQ ID NO: 3438096 - RNA, 18 nt, Human
ccugaaagcccugagcuu

SEQ ID NO: 3438097 - RNA, 18 nt, Human
ccugaaauagugguucuu

SEQ ID NO: 3438098 - RNA, 12 nt, Human
ccugaaaugugu

SEQ ID NO: 3438099 - RNA, 14 nt, Human
ccugaaauuucacc

SEQ ID NO: 3438100 - RNA, 13 nt, Human
ccugaacaagaau

SEQ ID NO: 3438101 - RNA, 16 nt, Human
ccugaacaagaauugg

SEQ ID NO: 3438102 - RNA, 19 nt, Human
ccugaacacuuauugcuuu

SEQ ID NO: 3438103 - RNA, 23 nt, Human
ccugaacagcauggcacucccuc

SEQ ID NO: 3438104 - RNA, 18 nt, Human
ccugaacauccuuccuuc

SEQ ID NO: 3438105 - RNA, 14 nt, Human
ccugaaccaugugg

SEQ ID NO: 3438106 - RNA, 22 nt, Human
ccugaaccgcacagcucaggag

SEQ ID NO: 3438107 - RNA, 17 nt, Human
ccugaacugaacaccau

SEQ ID NO: 3438108 - RNA, 14 nt, Human
ccugaagaacagua

SEQ ID NO: 3438109 - RNA, 18 nt, Human
ccugaagaauuaagauac

SEQ ID NO: 3438110 - RNA, 15 nt, Human
ccugaagacugagga

SEQ ID NO: 3438111 - RNA, 18 nt, Human
ccugaagaggcgggccag

SEQ ID NO: 3438112 - RNA, 20 nt, Human
ccugaagaggcgggccagcc

SEQ ID NO: 3438113 - RNA, 22 nt, Human
ccugaagaggcgggccagccag

SEQ ID NO: 3438114 - RNA, 23 nt, Human
ccugaagaggcgggccagccagg

SEQ ID NO: 3438115 - RNA, 17 nt, Human
ccugaagaugggagccu

SEQ ID NO: 3438116 - RNA, 17 nt, Human
ccugaagccagccuucu

SEQ ID NO: 3438117 - RNA, 18 nt, Human
ccugcgucuuccgccccu

SEQ ID NO: 3438118 - RNA, 16 nt, Human
ccugcguggcugaccc

SEQ ID NO: 3438119 - RNA, 19 nt, Human
ccugcguggcugacccccc

SEQ ID NO: 3438120 - RNA, 23 nt, Human
ccugcguggcugaccccccucag

SEQ ID NO: 3438121 - RNA, 13 nt, Human
ccugcguggggac

SEQ ID NO: 3438122 - RNA, 19 nt, Human
ccugcguugguccagagcg

SEQ ID NO: 3438123 - RNA, 18 nt, Human
ccugcuaacggugcucag

SEQ ID NO: 3438124 - RNA, 19 nt, Human
ccugcuaacggugcucagg

SEQ ID NO: 3438125 - RNA, 19 nt, Human
ccugcuacaacuucagcag

SEQ ID NO: 3438126 - RNA, 20 nt, Human
ccugcuacaacuucagcagu

SEQ ID NO: 3438127 - RNA, 20 nt, Human
ccugcuacaccuauuauccc

SEQ ID NO: 3438128 - RNA, 15 nt, Human
ccugcuacugccaac

SEQ ID NO: 3438129 - RNA, 15 nt, Human
ccugcuaggccagag

SEQ ID NO: 3438130 - RNA, 16 nt, Human
ccugcuaggccagagc

SEQ ID NO: 3438131 - RNA, 17 nt, Human
ccugcuaggccagagcc

SEQ ID NO: 3438132 - RNA, 18 nt, Human
ccugcuauuucccaagcu

SEQ ID NO: 3438133 - RNA, 20 nt, Human
ccugcuauuucccaagcugg

SEQ ID NO: 3438134 - RNA, 21 nt, Human
ccugcuauuucccaagcugga

SEQ ID NO: 3438135 - RNA, 22 nt, Human
ccugcucagcagugagagcaga

SEQ ID NO: 3438136 - RNA, 16 nt, Human
ccugcucagcccugca

SEQ ID NO: 3438137 - RNA, 13 nt, Human
ccugcucauccac

SEQ ID NO: 3438138 - RNA, 23 nt, Human
ccugcucauuaugccacuuccuu

SEQ ID NO: 3438139 - RNA, 14 nt, Human
ccugcuccagaccu

SEQ ID NO: 3438140 - RNA, 15 nt, Human
ccugcuccagaccug

SEQ ID NO: 3438141 - RNA, 12 nt, Human
ccugcucccagc

SEQ ID NO: 3438142 - RNA, 14 nt, Human
ccugcucccagcag

SEQ ID NO: 3438143 - RNA, 15 nt, Human
ccugcucccauccug

SEQ ID NO: 3438144 - RNA, 14 nt, Human
ccugcucccccacc

SEQ ID NO: 3438145 - RNA, 23 nt, Human
ccugcucccccacccccucccca

SEQ ID NO: 3438146 - RNA, 22 nt, Human
ccugcucccuccgggucuuccu

SEQ ID NO: 3438147 - RNA, 18 nt, Human
ccugcucccucucccccu

SEQ ID NO: 3438148 - RNA, 14 nt, Human
ccugcuccgcugcu

SEQ ID NO: 3438149 - RNA, 21 nt, Human
ccugcuccgcugcuccuuggc

SEQ ID NO: 3438150 - RNA, 18 nt, Human
ccugcuccucccuggcug

SEQ ID NO: 3438151 - RNA, 19 nt, Human
ccugcuccucccuggcugc

SEQ ID NO: 3438152 - RNA, 22 nt, Human
ccugcuccucccuggcugcccu

SEQ ID NO: 3438153 - RNA, 17 nt, Human
ccugcuccugcagcaug

SEQ ID NO: 3438154 - RNA, 18 nt, Human
ccugcuccuucccaggag

SEQ ID NO: 3438155 - RNA, 15 nt, Human
ccugcucgcucccug

SEQ ID NO: 3438156 - RNA, 18 nt, Human
ccugcucguccccaagug

SEQ ID NO: 3438157 - RNA, 17 nt, Human
ccugcucuagugggaca

SEQ ID NO: 3438158 - RNA, 19 nt, Human
ccugcucuagugggacagc

SEQ ID NO: 3438159 - RNA, 23 nt, Human
ccugcucuccaagucucaguggc

SEQ ID NO: 3438160 - RNA, 21 nt, Human
ccugcucuccgaccagacacc

SEQ ID NO: 3438161 - RNA, 15 nt, Human
ccugcucuccucuuc

SEQ ID NO: 3438162 - RNA, 21 nt, Human
ccugcucuccucuugccacug

SEQ ID NO: 3438163 - RNA, 22 nt, Human
ccugcucuccucuugccacugc

SEQ ID NO: 3438164 - RNA, 14 nt, Human
ccugcucucuaccc

SEQ ID NO: 3438165 - RNA, 16 nt, Human
ccugcucucuacccag

SEQ ID NO: 3438166 - RNA, 17 nt, Human
ccugcucucuacccagc

SEQ ID NO: 3438167 - RNA, 12 nt, Human
ccugcucugcuc

SEQ ID NO: 3438168 - RNA, 21 nt, Human
ccugcugaagguggggauugc

SEQ ID NO: 3438169 - RNA, 13 nt, Human
ccugcugaccugu

SEQ ID NO: 3438170 - RNA, 18 nt, Human
ccugcugagcucugagag

SEQ ID NO: 3438171 - RNA, 24 nt, Human
ccugcugagcucugagaggcccug

SEQ ID NO: 3438172 - RNA, 21 nt, Human
ccugcugagggaccagccaag

SEQ ID NO: 3438173 - RNA, 20 nt, Human
ccugcugagucccaggcuga

SEQ ID NO: 3438174 - RNA, 17 nt, Human
ccugcugauguggcaac

SEQ ID NO: 3438175 - RNA, 21 nt, Human
ccugcugauguggcaacugcu

SEQ ID NO: 3438176 - RNA, 12 nt, Human
ccugcugcacca

SEQ ID NO: 3438177 - RNA, 18 nt, Human
ccugcugcaccaacccag

SEQ ID NO: 3438178 - RNA, 20 nt, Human
ccugcugcaccaacccagcc

SEQ ID NO: 3438179 - RNA, 21 nt, Human
ccugcugcaccaacccagccg

SEQ ID NO: 3438180 - RNA, 14 nt, Human
ccugcugcagaggg

SEQ ID NO: 3438181 - RNA, 16 nt, Human
ccugcugcagaggggc

SEQ ID NO: 3438182 - RNA, 15 nt, Human
ccugcugcaggggcu

SEQ ID NO: 3438183 - RNA, 17 nt, Human
ccugcugcaggggcucu

SEQ ID NO: 3438184 - RNA, 21 nt, Human
ccugcugcaguugccagucac

SEQ ID NO: 3438185 - RNA, 16 nt, Human
ccugcugcaugcccuc

SEQ ID NO: 3438186 - RNA, 23 nt, Human
ccugcugcaugcccucucaggcc

SEQ ID NO: 3438187 - RNA, 20 nt, Human
ccugcugccuccccaacccu

SEQ ID NO: 3438188 - RNA, 23 nt, Human
ccugcugccuccccaacccugcc

SEQ ID NO: 3438189 - RNA, 22 nt, Human
ccugcugccuucugacggcccu

SEQ ID NO: 3438190 - RNA, 17 nt, Human
ccugcugcucccucaga

SEQ ID NO: 3438191 - RNA, 13 nt, Human
ccugcugcuccua

SEQ ID NO: 3438192 - RNA, 15 nt, Human
ccugcugcuccuagg

SEQ ID NO: 3438193 - RNA, 20 nt, Human
ccugcugcugacccagccug

SEQ ID NO: 3438194 - RNA, 15 nt, Human
ccugcugcugagaac

SEQ ID NO: 3438195 - RNA, 22 nt, Human
ccugcugcugagaaccuggccu

SEQ ID NO: 3438196 - RNA, 15 nt, Human
ccugcugcuggugca

SEQ ID NO: 3438197 - RNA, 22 nt, Human
ccugcugcugucaccucuccca

SEQ ID NO: 3438198 - RNA, 19 nt, Human
ccugcugcugucugggugc

SEQ ID NO: 3438199 - RNA, 12 nt, Human
ccugcugcuucu

SEQ ID NO: 3438200 - RNA, 12 nt, Human
ccugcuggaagc

SEQ ID NO: 3438201 - RNA, 13 nt, Human
ccugcuggaagcc

SEQ ID NO: 3438202 - RNA, 14 nt, Human
ccugcuggaagccc

SEQ ID NO: 3438203 - RNA, 16 nt, Human
ccugcuggaagcccag

SEQ ID NO: 3438204 - RNA, 12 nt, Human
ccugcuggaggc

SEQ ID NO: 3438205 - RNA, 13 nt, Human
ccugcuggaggcc

SEQ ID NO: 3438206 - RNA, 15 nt, Human
ccugcuggaggccuc

SEQ ID NO: 3438207 - RNA, 17 nt, Human
ccugcuggaggccucag

SEQ ID NO: 3438208 - RNA, 21 nt, Human
ccugcuggaggccucaggugc

SEQ ID NO: 3438209 - RNA, 13 nt, Human
ccugcuggaucuc

SEQ ID NO: 3438210 - RNA, 15 nt, Human
ccugcuggaucuccc

SEQ ID NO: 3438211 - RNA, 22 nt, Human
ccugcuggaucucccagggcua

SEQ ID NO: 3438212 - RNA, 15 nt, Human
ccugcuggccccuca

SEQ ID NO: 3438213 - RNA, 17 nt, Human
ccugcuggcucuucugc

SEQ ID NO: 3438214 - RNA, 19 nt, Human
ccugcuggcucuucugccc

SEQ ID NO: 3438215 - RNA, 12 nt, Human
ccugcugggcuc

SEQ ID NO: 3438216 - RNA, 23 nt, Human
ccuguagagugggagcugagugg

SEQ ID NO: 3438217 - RNA, 13 nt, Human
ccuguagcaguga

SEQ ID NO: 3438218 - RNA, 13 nt, Human
ccuguagcaucuu

SEQ ID NO: 3438219 - RNA, 15 nt, Human
ccuguagcaucuucu

SEQ ID NO: 3438220 - RNA, 23 nt, Human
ccuguagcccacucugcucgccu

SEQ ID NO: 3438221 - RNA, 24 nt, Human
ccuguagcccacucugcucgccuu

SEQ ID NO: 3438222 - RNA, 22 nt, Human
ccuguagccccagugacagcua

SEQ ID NO: 3438223 - RNA, 19 nt, Human
ccuguagccuucuguagga

SEQ ID NO: 3438224 - RNA, 14 nt, Human
ccuguagucccagc

SEQ ID NO: 3438225 - RNA, 18 nt, Human
ccuguagucccagccacu

SEQ ID NO: 3438226 - RNA, 13 nt, Human
ccuguaguccuag

SEQ ID NO: 3438227 - RNA, 15 nt, Human
ccuguaguuaggaaa

SEQ ID NO: 3438228 - RNA, 22 nt, Human
ccuguaguuaggaaauaaaacc

SEQ ID NO: 3438229 - RNA, 23 nt, Human
ccuguaguuaggaaauaaaaccu

SEQ ID NO: 3438230 - RNA, 20 nt, Human
ccuguaguugcguggacucu

SEQ ID NO: 3438231 - RNA, 17 nt, Human
ccuguaguuuuauuuua

SEQ ID NO: 3438232 - RNA, 13 nt, Human
ccuguauaagcac

SEQ ID NO: 3438233 - RNA, 23 nt, Human
ccuguauaaguggaggcacuuua

SEQ ID NO: 3438234 - RNA, 14 nt, Human
ccuguauacagugc

SEQ ID NO: 3438235 - RNA, 12 nt, Human
ccuguauacuuu

SEQ ID NO: 3438236 - RNA, 13 nt, Human
ccuguauacuuua

SEQ ID NO: 3438237 - RNA, 23 nt, Human
ccuguauauagcccagccaggcc

SEQ ID NO: 3438238 - RNA, 20 nt, Human
ccuguauauuuguaaagcua

SEQ ID NO: 3438239 - RNA, 22 nt, Human
ccuguaugucaauaaacaacag

SEQ ID NO: 3438240 - RNA, 16 nt, Human
ccuguaugucugucau

SEQ ID NO: 3438241 - RNA, 19 nt, Human
ccuguaugucugucauugu

SEQ ID NO: 3438242 - RNA, 16 nt, Human
ccuguauucagacaga

SEQ ID NO: 3438243 - RNA, 22 nt, Human
ccuguauucucaaacacaguua

SEQ ID NO: 3438244 - RNA, 18 nt, Human
ccuguauuuaaaaauaga

SEQ ID NO: 3438245 - RNA, 14 nt, Human
ccuguauuuaagca

SEQ ID NO: 3438246 - RNA, 19 nt, Human
ccuguauuuaagcaaauac

SEQ ID NO: 3438247 - RNA, 19 nt, Human
ccuguauuuguucccaaga

SEQ ID NO: 3438248 - RNA, 22 nt, Human
ccuguauuuguucccaagagca

SEQ ID NO: 3438249 - RNA, 17 nt, Human
ccuguauuuucuuucuc

SEQ ID NO: 3438250 - RNA, 18 nt, Human
ccugucaaacaaagccag

SEQ ID NO: 3438251 - RNA, 19 nt, Human
ccugucaaacaaagccaga

SEQ ID NO: 3438252 - RNA, 22 nt, Human
ccugucaaacaaagccagaagc

SEQ ID NO: 3438253 - RNA, 23 nt, Human
ccugucaaacaaagccagaagcu

SEQ ID NO: 3438254 - RNA, 21 nt, Human
ccugucacauugcauucuauu

SEQ ID NO: 3438255 - RNA, 14 nt, Human
ccugucaccaagcu

SEQ ID NO: 3438256 - RNA, 12 nt, Human
ccugucaccucu

SEQ ID NO: 3438257 - RNA, 12 nt, Human
ccugucagcaug

SEQ ID NO: 3438258 - RNA, 13 nt, Human
ccugucagcauga

SEQ ID NO: 3438259 - RNA, 17 nt, Human
ccugucagcaugaauuu

SEQ ID NO: 3438260 - RNA, 14 nt, Human
ccugucagugcagc

SEQ ID NO: 3438261 - RNA, 20 nt, Human
caugauggcaacagaucugg

SEQ ID NO: 3438262 - RNA, 23 nt, Human
caugaugguuauuuucuuuucuu

SEQ ID NO: 3438263 - RNA, 17 nt, Human
caugauguuucuuccac

SEQ ID NO: 3438264 - RNA, 17 nt, Human
caugauguuugcccaaa

SEQ ID NO: 3438265 - RNA, 20 nt, Human
caugauguuuuuaaaaucuu

SEQ ID NO: 3438266 - RNA, 21 nt, Human
caugauuagcagaagaaagga

SEQ ID NO: 3438267 - RNA, 22 nt, Human
caugauuagcagaagaaaggaa

SEQ ID NO: 3438268 - RNA, 13 nt, Human
caugauucauuuu

SEQ ID NO: 3438269 - RNA, 14 nt, Human
caugauuccuuccu

SEQ ID NO: 3438270 - RNA, 21 nt, Human
caugauucgcccaaagccaga

SEQ ID NO: 3438271 - RNA, 14 nt, Human
caugauucuauuua

SEQ ID NO: 3438272 - RNA, 20 nt, Human
caugauugcagaauuguuua

SEQ ID NO: 3438273 - RNA, 15 nt, Human
caugauuucacaaau

SEQ ID NO: 3438274 - RNA, 22 nt, Human
caugauuuuaaguuucucugca

SEQ ID NO: 3438275 - RNA, 16 nt, Human
caugcaaaauauguuu

SEQ ID NO: 3438276 - RNA, 17 nt, Human
caugcaaaauauguuua

SEQ ID NO: 3438277 - RNA, 22 nt, Human
caugcaaaugagcucugaaauc

SEQ ID NO: 3438278 - RNA, 14 nt, Human
caugcaaaugcugu

SEQ ID NO: 3438279 - RNA, 22 nt, Human
caugcaaaugcuguauucuucu

SEQ ID NO: 3438280 - RNA, 20 nt, Human
caugcaagaacucaucacug

SEQ ID NO: 3438281 - RNA, 14 nt, Human
caugcaagcagagg

SEQ ID NO: 3438282 - RNA, 17 nt, Human
caugcaagcagaggacc

SEQ ID NO: 3438283 - RNA, 23 nt, Human
caugcaagggaugaauuguaaaa

SEQ ID NO: 3438284 - RNA, 14 nt, Human
caugcaaggggaaa

SEQ ID NO: 3438285 - RNA, 16 nt, Human
caugcaauacauacca

SEQ ID NO: 3438286 - RNA, 17 nt, Human
caugcaauucaucccag

SEQ ID NO: 3438287 - RNA, 12 nt, Human
caugcacaaauu

SEQ ID NO: 3438288 - RNA, 14 nt, Human
caugcacacucaug

SEQ ID NO: 3438289 - RNA, 19 nt, Human
caugcacacucaugugcaa

SEQ ID NO: 3438290 - RNA, 14 nt, Human
caugcacagcugua

SEQ ID NO: 3438291 - RNA, 14 nt, Human
caugcacaguauuu

SEQ ID NO: 3438292 - RNA, 19 nt, Human
caugcaccugcaaucccag

SEQ ID NO: 3438293 - RNA, 20 nt, Human
caugcaccugcaaucccagc

SEQ ID NO: 3438294 - RNA, 16 nt, Human
caugcacucagcucuu

SEQ ID NO: 3438295 - RNA, 12 nt, Human
caugcacugacc

SEQ ID NO: 3438296 - RNA, 19 nt, Human
caugcacugacccuuccag

SEQ ID NO: 3438297 - RNA, 22 nt, Human
caugcacugacccuuccagaca

SEQ ID NO: 3438298 - RNA, 14 nt, Human
caugcacugauguu

SEQ ID NO: 3438299 - RNA, 13 nt, Human
caugcacugugaa

SEQ ID NO: 3438300 - RNA, 14 nt, Human
caugcacugugaag

SEQ ID NO: 3438301 - RNA, 16 nt, Human
caugcacugugaagga

SEQ ID NO: 3438302 - RNA, 20 nt, Human
caugcacugugaaggacccu

SEQ ID NO: 3438303 - RNA, 16 nt, Human
caugcacuuaaagaag

SEQ ID NO: 3438304 - RNA, 20 nt, Human
caugcagaacaaaugaagac

SEQ ID NO: 3438305 - RNA, 19 nt, Human
caugcagacaugagugcgu

SEQ ID NO: 3438306 - RNA, 13 nt, Human
caugcagagcgcc

SEQ ID NO: 3438307 - RNA, 13 nt, Human
caugcagcagcuu

SEQ ID NO: 3438308 - RNA, 16 nt, Human
caugcagcagcuugcu

SEQ ID NO: 3438309 - RNA, 17 nt, Human
caugcagcagcuugcug

SEQ ID NO: 3438310 - RNA, 14 nt, Human
caugcagcaucuaa

SEQ ID NO: 3438311 - RNA, 20 nt, Human
caugcagcccaugcccaccu

SEQ ID NO: 3438312 - RNA, 23 nt, Human
caugcagcccaugcccaccugcc

SEQ ID NO: 3438313 - RNA, 15 nt, Human
caugcagccgugauc

SEQ ID NO: 3438314 - RNA, 21 nt, Human
caugcagccgugaucaaggga

SEQ ID NO: 3438315 - RNA, 20 nt, Human
caugcagcugcacccucccu

SEQ ID NO: 3438316 - RNA, 18 nt, Human
caugcagggggcuccugg

SEQ ID NO: 3438317 - RNA, 19 nt, Human
caugcagggggcuccuggg

SEQ ID NO: 3438318 - RNA, 12 nt, Human
caugcaguuuga

SEQ ID NO: 3438319 - RNA, 20 nt, Human
caugcaguuugaaauucuga

SEQ ID NO: 3438320 - RNA, 12 nt, Human
caugcauaaaua

SEQ ID NO: 3438321 - RNA, 16 nt, Human
caugcauacacacaca

SEQ ID NO: 3438322 - RNA, 15 nt, Human
caugcauacuucaaa

SEQ ID NO: 3438323 - RNA, 16 nt, Human
caugcauacuucaaaa

SEQ ID NO: 3438324 - RNA, 14 nt, Human
caugcauauaauga

SEQ ID NO: 3438325 - RNA, 18 nt, Human
caugcauauaaugaauaa

SEQ ID NO: 3438326 - RNA, 20 nt, Human
caugcauauaaugaauaaau

SEQ ID NO: 3438327 - RNA, 22 nt, Human
caugcauauaaugaauaaauca

SEQ ID NO: 3438328 - RNA, 22 nt, Human
caugcaucuguuuauucuauag

SEQ ID NO: 3438329 - RNA, 14 nt, Human
caugcaucuuacug

SEQ ID NO: 3438330 - RNA, 15 nt, Human
caugcaugacagccu

SEQ ID NO: 3438331 - RNA, 19 nt, Human
caugcaugcaaaugagcuc

SEQ ID NO: 3438332 - RNA, 16 nt, Human
caugcauguccuguaa

SEQ ID NO: 3438333 - RNA, 20 nt, Human
caugcauuacugcaugcacu

SEQ ID NO: 3438334 - RNA, 22 nt, Human
caugcauuguugagguggucug

SEQ ID NO: 3438335 - RNA, 20 nt, Human
caugcauuuugcagcaguga

SEQ ID NO: 3438336 - RNA, 22 nt, Human
caugccaacaagaaugcauuga

SEQ ID NO: 3438337 - RNA, 21 nt, Human
caugccagcuacuuccuccuc

SEQ ID NO: 3438338 - RNA, 13 nt, Human
caugccagcuggc

SEQ ID NO: 3438339 - RNA, 16 nt, Human
caugccagcuggccuu

SEQ ID NO: 3438340 - RNA, 18 nt, Human
caugccaggcuaauuuuu

SEQ ID NO: 3438341 - RNA, 14 nt, Human
caugccaggggccu

SEQ ID NO: 3438342 - RNA, 19 nt, Human
caugccaguaacaggcuca

SEQ ID NO: 3438343 - RNA, 17 nt, Human
caugccauuuguacuga

SEQ ID NO: 3438344 - RNA, 16 nt, Human
caugcccacccccugc

SEQ ID NO: 3438345 - RNA, 17 nt, Human
caugcccacccccugcc

SEQ ID NO: 3438346 - RNA, 19 nt, Human
caugcccacccccugcccu

SEQ ID NO: 3438347 - RNA, 13 nt, Human
caugcccaccugc

SEQ ID NO: 3438348 - RNA, 16 nt, Human
caugcccaccugccca

SEQ ID NO: 3438349 - RNA, 17 nt, Human
caugcccaccugcccau

SEQ ID NO: 3438350 - RNA, 16 nt, Human
caugcccagagaccca

SEQ ID NO: 3438351 - RNA, 19 nt, Human
caugcccagagacccagcg

SEQ ID NO: 3438352 - RNA, 17 nt, Human
caugcccauauuuuacu

SEQ ID NO: 3438353 - RNA, 18 nt, Human
caugccccggccaccucu

SEQ ID NO: 3438354 - RNA, 20 nt, Human
caugccccggccaccucugc

SEQ ID NO: 3438355 - RNA, 21 nt, Human
caugccccggccaccucugcg

SEQ ID NO: 3438356 - RNA, 16 nt, Human
caugccccuggcuggg

SEQ ID NO: 3438357 - RNA, 21 nt, Human
caugcccggcuaauuuuugua

SEQ ID NO: 3438358 - RNA, 20 nt, Human
caugcccggucccaccccuc

SEQ ID NO: 3438359 - RNA, 20 nt, Human
caugcccucccuucucccug

SEQ ID NO: 3438360 - RNA, 23 nt, Human
caugcccucccuucucccuggau

SEQ ID NO: 3438361 - RNA, 13 nt, Human
caugcccuccucu

SEQ ID NO: 3438362 - RNA, 20 nt, Human
caugcccuccucucccauug

SEQ ID NO: 3438363 - RNA, 15 nt, Human
caugcccucucaggc

SEQ ID NO: 3438364 - RNA, 19 nt, Human
caugcccugugcaaccucu

SEQ ID NO: 3438365 - RNA, 15 nt, Human
caugccgggugcagc

SEQ ID NO: 3438366 - RNA, 16 nt, Human
caugccucagaagugc

SEQ ID NO: 3438367 - RNA, 11 nt, Human
caugccucagc

SEQ ID NO: 3438368 - RNA, 16 nt, Human
caugccucagcccuga

SEQ ID NO: 3438369 - RNA, 15 nt, Human
caugccuccucagga

SEQ ID NO: 3438370 - RNA, 19 nt, Human
caugccucucucaggccaa

SEQ ID NO: 3438371 - RNA, 21 nt, Human
caugccugagagacauggcuu

SEQ ID NO: 3438372 - RNA, 21 nt, Human
caugccuggauggggcugcac

SEQ ID NO: 3438373 - RNA, 13 nt, Human
caugccuggcuuc

SEQ ID NO: 3438374 - RNA, 14 nt, Human
caugccuguggcug

SEQ ID NO: 3438375 - RNA, 23 nt, Human
caugccugugugacaucaguggc

SEQ ID NO: 3438376 - RNA, 19 nt, Human
caugccuuccagcacccug

SEQ ID NO: 3438377 - RNA, 20 nt, Human
caugccuugugcuguuaaua

SEQ ID NO: 3438378 - RNA, 13 nt, Human
caugccuuuguaa

SEQ ID NO: 3438379 - RNA, 23 nt, Human
caugcgcccccuccgcccugcca

SEQ ID NO: 3438380 - RNA, 23 nt, Human
ccuggcacagugucugggcugac

SEQ ID NO: 3438381 - RNA, 21 nt, Human
ccuggcacccggccccugcug

SEQ ID NO: 3438382 - RNA, 23 nt, Human
ccuggcacccggccccugcuggu

SEQ ID NO: 3438383 - RNA, 22 nt, Human
ccuggcacgguggcucaggccu

SEQ ID NO: 3438384 - RNA, 22 nt, Human
ccuggcacuauaauguaagcuc

SEQ ID NO: 3438385 - RNA, 13 nt, Human
ccuggcacugcuu

SEQ ID NO: 3438386 - RNA, 16 nt, Human
ccuggcacugcuucca

SEQ ID NO: 3438387 - RNA, 20 nt, Human
ccuggcacugcuuccaguga

SEQ ID NO: 3438388 - RNA, 12 nt, Human
ccuggcacugga

SEQ ID NO: 3438389 - RNA, 16 nt, Human
ccuggcacuggacccc

SEQ ID NO: 3438390 - RNA, 14 nt, Human
ccuggcagcccaga

SEQ ID NO: 3438391 - RNA, 12 nt, Human
ccuggcagccgu

SEQ ID NO: 3438392 - RNA, 22 nt, Human
ccuggcagccgugccuucagcu

SEQ ID NO: 3438393 - RNA, 14 nt, Human
ccuggcagcucagc

SEQ ID NO: 3438394 - RNA, 21 nt, Human
ccuggcagcucuggacagccc

SEQ ID NO: 3438395 - RNA, 22 nt, Human
ccuggcaggaugacccugcgaa

SEQ ID NO: 3438396 - RNA, 12 nt, Human
ccuggcaggcag

SEQ ID NO: 3438397 - RNA, 14 nt, Human
ccuggcaggcaggg

SEQ ID NO: 3438398 - RNA, 21 nt, Human
ccuggcaggcugucuggccag

SEQ ID NO: 3438399 - RNA, 20 nt, Human
ccuggcagggaggucaggcc

SEQ ID NO: 3438400 - RNA, 22 nt, Human
ccuggcagggaggucaggcccu

SEQ ID NO: 3438401 - RNA, 21 nt, Human
ccuggcagguuagaaccuaga

SEQ ID NO: 3438402 - RNA, 21 nt, Human
ccuggcagguuguuagaaaaa

SEQ ID NO: 3438403 - RNA, 23 nt, Human
ccuggcaucgcaccauucugacu

SEQ ID NO: 3438404 - RNA, 14 nt, Human
ccuggcaugggaau

SEQ ID NO: 3438405 - RNA, 11 nt, Human
ccuuuccuguc

SEQ ID NO: 3438406 - RNA, 14 nt, Human
ccuuuccuguccca

SEQ ID NO: 3438407 - RNA, 24 nt, Human
ccuuuccuguguguacucugucca

SEQ ID NO: 3438408 - RNA, 11 nt, Human
ccuuuccuguu

SEQ ID NO: 3438409 - RNA, 15 nt, Human
ccuuuccuguucagc

SEQ ID NO: 3438410 - RNA, 12 nt, Human
ccuuuccuuccu

SEQ ID NO: 3438411 - RNA, 13 nt, Human
ccuuuccuuccua

SEQ ID NO: 3438412 - RNA, 21 nt, Human
ccuuuccuuccuucccuggcu

SEQ ID NO: 3438413 - RNA, 14 nt, Human
ccuuucgaggccug

SEQ ID NO: 3438414 - RNA, 15 nt, Human
ccuuucgaggccuga

SEQ ID NO: 3438415 - RNA, 17 nt, Human
ccuuucggauccaggga

SEQ ID NO: 3438416 - RNA, 21 nt, Human
ccuuucggauccagggaggcu

SEQ ID NO: 3438417 - RNA, 18 nt, Human
ccuuucuaucguucucuc

SEQ ID NO: 3438418 - RNA, 18 nt, Human
ccuuucuccagccagcaa

SEQ ID NO: 3438419 - RNA, 17 nt, Human
ccuuucucccaggccag

SEQ ID NO: 3438420 - RNA, 18 nt, Human
ccuuucuccccugccccc

SEQ ID NO: 3438421 - RNA, 14 nt, Human
ccuuucuccuuugu

SEQ ID NO: 3438422 - RNA, 15 nt, Human
ccuuucuccuuugua

SEQ ID NO: 3438423 - RNA, 17 nt, Human
ccuuucucgauuuuauc

SEQ ID NO: 3438424 - RNA, 16 nt, Human
ccuuucucuuucucuc

SEQ ID NO: 3438425 - RNA, 18 nt, Human
ccuuucucuuucucucuu

SEQ ID NO: 3438426 - RNA, 22 nt, Human
ccuuucucuuucucucuucccu

SEQ ID NO: 3438427 - RNA, 16 nt, Human
ccuuucugaucuucac

SEQ ID NO: 3438428 - RNA, 15 nt, Human
ccuuucugccgaccc

SEQ ID NO: 3438429 - RNA, 17 nt, Human
ccuuucugccgaccccu

SEQ ID NO: 3438430 - RNA, 19 nt, Human
ccuuucuggcagguccucc

SEQ ID NO: 3438431 - RNA, 16 nt, Human
ccuuucuguaccauuu

SEQ ID NO: 3438432 - RNA, 14 nt, Human
ccuuucugugcccu

SEQ ID NO: 3438433 - RNA, 11 nt, Human
ccuuucuuccu

SEQ ID NO: 3438434 - RNA, 12 nt, Human
ccuuucuuccuc

SEQ ID NO: 3438435 - RNA, 13 nt, Human
ccuguguggagag

SEQ ID NO: 3438436 - RNA, 16 nt, Human
ccuguguggagaggga

SEQ ID NO: 3438437 - RNA, 19 nt, Human
ccuguguggagagggaaug

SEQ ID NO: 3438438 - RNA, 20 nt, Human
ccugugugguuuaguguaaa

SEQ ID NO: 3438439 - RNA, 21 nt, Human
ccugugugugaaaggaagcuc

SEQ ID NO: 3438440 - RNA, 19 nt, Human
ccuguguuucuugccucau

SEQ ID NO: 3438441 - RNA, 20 nt, Human
ccuguuaaaagaugaaaaua

SEQ ID NO: 3438442 - RNA, 22 nt, Human
ccuguuaccuaauuagagcaga

SEQ ID NO: 3438443 - RNA, 14 nt, Human
ccuguuacuuaccu

SEQ ID NO: 3438444 - RNA, 22 nt, Human
ccuguuagcuccucacuguggu

SEQ ID NO: 3438445 - RNA, 13 nt, Human
ccuguuauuuuca

SEQ ID NO: 3438446 - RNA, 14 nt, Human
ccuguucacaccag

SEQ ID NO: 3438447 - RNA, 16 nt, Human
ccuguucagcuccagc

SEQ ID NO: 3438448 - RNA, 19 nt, Human
ccuguucagcuccagcuca

SEQ ID NO: 3438449 - RNA, 19 nt, Human
ccuguucagugucccgggc

SEQ ID NO: 3438450 - RNA, 11 nt, Human
ccuguucaguu

SEQ ID NO: 3438451 - RNA, 19 nt, Human
ccuguucaguuacagaaag

SEQ ID NO: 3438452 - RNA, 22 nt, Human
ccuguucaugccgacgcuugca

SEQ ID NO: 3438453 - RNA, 12 nt, Human
ccuguuccccuc

SEQ ID NO: 3438454 - RNA, 17 nt, Human
ccuguuccccucacugg

SEQ ID NO: 3438455 - RNA, 13 nt, Human
ccuguuccccucu

SEQ ID NO: 3438456 - RNA, 16 nt, Human
ccuguuccccucuccc

SEQ ID NO: 3438457 - RNA, 17 nt, Human
ccuguuccccucucccu

SEQ ID NO: 3438458 - RNA, 14 nt, Human
ccuguucugaacug

SEQ ID NO: 3438459 - RNA, 17 nt, Human
ccuguucuggcagaguu

SEQ ID NO: 3438460 - RNA, 22 nt, Human
ccuguugaaaagccauguuuaa

SEQ ID NO: 3438461 - RNA, 20 nt, Human
ccuguugacgaagucucuuu

SEQ ID NO: 3438462 - RNA, 22 nt, Human
ccuguugauuaauuucugccau

SEQ ID NO: 3438463 - RNA, 13 nt, Human
ccuguugcuaagc

SEQ ID NO: 3438464 - RNA, 12 nt, Human
ccuguugcuuuu

SEQ ID NO: 3438465 - RNA, 23 nt, Human
ccuguuggacccgcucuggacca

SEQ ID NO: 3438466 - RNA, 20 nt, Human
ccuguugggccaggagccuc

SEQ ID NO: 3438467 - RNA, 16 nt, Human
ccuguuuaaaaaacca

SEQ ID NO: 3438468 - RNA, 15 nt, Human
ccuguuuaagagaca

SEQ ID NO: 3438469 - RNA, 16 nt, Human
ccuguuuaauauuuaa

SEQ ID NO: 3438470 - RNA, 21 nt, Human
ccuguuuauucauaugcauau

SEQ ID NO: 3438471 - RNA, 23 nt, Human
ccuguuucaaguucacaccugca

SEQ ID NO: 3438472 - RNA, 15 nt, Human
ccuguuucccaggcc

SEQ ID NO: 3438473 - RNA, 13 nt, Human
ccuguuucugaaa

SEQ ID NO: 3438474 - RNA, 19 nt, Human
ccuguuucugaaaagaaau

SEQ ID NO: 3438475 - RNA, 12 nt, Human
ccuguuucuucc

SEQ ID NO: 3438476 - RNA, 13 nt, Human
ccuguuuggauuu

SEQ ID NO: 3438477 - RNA, 22 nt, Human
ccuguuugggaagagcuuagaa

SEQ ID NO: 3438478 - RNA, 21 nt, Human
ccuguuugggccccucuccca

SEQ ID NO: 3438479 - RNA, 13 nt, Human
ccuguuuucugag

SEQ ID NO: 3438480 - RNA, 17 nt, Human
ccuguuuucugagcccg

SEQ ID NO: 3438481 - RNA, 16 nt, Human
ccuguuuugagcccug

SEQ ID NO: 3438482 - RNA, 18 nt, Human
ccuguuuuuaagcuguuu

SEQ ID NO: 3438483 - RNA, 19 nt, Human
ccuguuuuuaagcuguuuc

SEQ ID NO: 3438484 - RNA, 20 nt, Human
ccuguuuuucacauuuuccu

SEQ ID NO: 3438485 - RNA, 16 nt, Human
ccuguuuuucugggug

SEQ ID NO: 3438486 - RNA, 13 nt, Human
ccuuaaaaaucac

SEQ ID NO: 3438487 - RNA, 13 nt, Human
ccuuaaaacuagg

SEQ ID NO: 3438488 - RNA, 23 nt, Human
ccuuaaaacuaggcauuuguaaa

SEQ ID NO: 3438489 - RNA, 19 nt, Human
ccuuaaaagccaucaugua

SEQ ID NO: 3438490 - RNA, 18 nt, Human
ccuuaaaauuugaaacau

SEQ ID NO: 3438491 - RNA, 23 nt, Human
ccuuaaacagggcaucuccagga

SEQ ID NO: 3438492 - RNA, 19 nt, Human
ccuuaaacaguugcacagc

SEQ ID NO: 3438493 - RNA, 16 nt, Human
ccuuaacaguuguauu

SEQ ID NO: 3438494 - RNA, 15 nt, Human
ccuuaacccaaggag

SEQ ID NO: 3438495 - RNA, 20 nt, Human
ccuuaacccaaggagcacag

SEQ ID NO: 3438496 - RNA, 23 nt, Human
ccuuaacuggagccccaucagcu

SEQ ID NO: 3438497 - RNA, 19 nt, Human
ccuuaagaacacaaagcgg

SEQ ID NO: 3438498 - RNA, 14 nt, Human
ccuuaagcccuggc

SEQ ID NO: 3438499 - RNA, 13 nt, Human
ccuuaaggcucuu

SEQ ID NO: 3438500 - RNA, 16 nt, Human
ccuuaaggcucuuuug

SEQ ID NO: 3438501 - RNA, 18 nt, Human
ccuuaaggcucuuuugua

SEQ ID NO: 3438502 - RNA, 19 nt, Human
ccuuaagugaggaaaucaa

SEQ ID NO: 3438503 - RNA, 20 nt, Human
ccuuaagugaggaaaucaaa

SEQ ID NO: 3438504 - RNA, 19 nt, Human
ccuuaauauuucuucaaau

SEQ ID NO: 3438505 - RNA, 23 nt, Human
ccuuaaucagguccucagagaau

SEQ ID NO: 3438506 - RNA, 13 nt, Human
ccuuaauuacuua

SEQ ID NO: 3438507 - RNA, 17 nt, Human
ccuuaauucacucccac

SEQ ID NO: 3438508 - RNA, 23 nt, Human
ccuuaauuuccuuuuugacacug

SEQ ID NO: 3438509 - RNA, 17 nt, Human
ccuuacaaaugauugcu

SEQ ID NO: 3438510 - RNA, 21 nt, Human
ccuuacaaaugauugcuuuua

SEQ ID NO: 3438511 - RNA, 14 nt, Human
ccuuacacaauggu

SEQ ID NO: 3438512 - RNA, 22 nt, Human
ccuuacaccucguuagggaaga

SEQ ID NO: 3438513 - RNA, 22 nt, Human
ccuuacacguaccucucaucag

SEQ ID NO: 3438514 - RNA, 13 nt, Human
ccuuacacuuacu

SEQ ID NO: 3438515 - RNA, 16 nt, Human
ccuuacacuuacuguu

SEQ ID NO: 3438516 - RNA, 18 nt, Human
ccuuacagccucugacuu

SEQ ID NO: 3438517 - RNA, 21 nt, Human
ccuuacaguaggagcccagcu

SEQ ID NO: 3438518 - RNA, 15 nt, Human
ccuuaccaacuuucu

SEQ ID NO: 3438519 - RNA, 13 nt, Human
ccuuaccagcaga

SEQ ID NO: 3438520 - RNA, 16 nt, Human
ccuuaccagcagagca

SEQ ID NO: 3438521 - RNA, 15 nt, Human
ccuuaccaugugccu

SEQ ID NO: 3438522 - RNA, 21 nt, Human
ccuuaccaugugccugaucca

SEQ ID NO: 3438523 - RNA, 23 nt, Human
ccuuaccccacaacgugcaacug

SEQ ID NO: 3438524 - RNA, 19 nt, Human
ccuuaccccaguuuuuuga

SEQ ID NO: 3438525 - RNA, 13 nt, Human
ccuuaccccugcc

SEQ ID NO: 3438526 - RNA, 15 nt, Human
ccuuacccucauguu

SEQ ID NO: 3438527 - RNA, 21 nt, Human
ccuuacccugccccagcuggg

SEQ ID NO: 3438528 - RNA, 13 nt, Human
ccuuacccuggga

SEQ ID NO: 3438529 - RNA, 20 nt, Human
ccuuaccuccugcccaggag

SEQ ID NO: 3438530 - RNA, 20 nt, Human
ccuuaccucggugccuuccu

SEQ ID NO: 3438531 - RNA, 14 nt, Human
ccuuaccugccagg

SEQ ID NO: 3438532 - RNA, 18 nt, Human
ccuuacgaucaggcacag

SEQ ID NO: 3438533 - RNA, 14 nt, Human
ccuuacuaauuaua

SEQ ID NO: 3438534 - RNA, 14 nt, Human
ccuuacuccugugg

SEQ ID NO: 3438535 - RNA, 19 nt, Human
ccuuacuccugugggagcc

SEQ ID NO: 3438536 - RNA, 20 nt, Human
ccuuacuccugugggagccu

SEQ ID NO: 3438537 - RNA, 17 nt, Human
ccuuacucuucuugaaa

SEQ ID NO: 3438538 - RNA, 16 nt, Human
ccuuacuucuugcccu

SEQ ID NO: 3438539 - RNA, 17 nt, Human
ccuuacuuuuuauauau

SEQ ID NO: 3438540 - RNA, 19 nt, Human
ccuuagaaauguaaacugc

SEQ ID NO: 3438541 - RNA, 21 nt, Human
ccuuagaaauguaaacugcca

SEQ ID NO: 3438542 - RNA, 23 nt, Human
ccuuagaaauguaaacugccaua

SEQ ID NO: 3438543 - RNA, 18 nt, Human
ccuuagaaccuuucuuac

SEQ ID NO: 3438544 - RNA, 21 nt, Human
ccuuagaagguauuaagauua

SEQ ID NO: 3438545 - RNA, 17 nt, Human
ccuuagaagucacacag

SEQ ID NO: 3438546 - RNA, 14 nt, Human
ccuuagaaguggaa

SEQ ID NO: 3438547 - RNA, 18 nt, Human
ccuuagacagucccugcc

SEQ ID NO: 3438548 - RNA, 21 nt, Human
ccuuagacagucccugccaau

SEQ ID NO: 3438549 - RNA, 17 nt, Human
ccuuagagccaggcaca

SEQ ID NO: 3438550 - RNA, 18 nt, Human
ccuuuuuuaagauuuuuc

SEQ ID NO: 3438551 - RNA, 19 nt, Human
ccuuuuuuaagauuuuucu

SEQ ID NO: 3438552 - RNA, 20 nt, Human
ccuuuuuuaagauuuuucuc

SEQ ID NO: 3438553 - RNA, 21 nt, Human
ccuuuuuuagaguugauacua

SEQ ID NO: 3438554 - RNA, 12 nt, Human
ccuuuuuuauac

SEQ ID NO: 3438555 - RNA, 17 nt, Human
ccuuuuuuauacauaaa

SEQ ID NO: 3438556 - RNA, 22 nt, Human
ccuuuuuuauaucuuggcaggu

SEQ ID NO: 3438557 - RNA, 12 nt, Human
ccuuuuuucaaa

SEQ ID NO: 3438558 - RNA, 18 nt, Human
ccuuuuuuccuuuccacc

SEQ ID NO: 3438559 - RNA, 13 nt, Human
ccuuuuuugauca

SEQ ID NO: 3438560 - RNA, 14 nt, Human
ccuuuuuuguaguu

SEQ ID NO: 3438561 - RNA, 23 nt, Human
ccuuuuuuguuuuuucaaaauag

SEQ ID NO: 3438562 - RNA, 14 nt, Human
ccuuuuuuuccuuu

SEQ ID NO: 3438563 - RNA, 16 nt, Human
ccuuuuuuuccuuuuu

SEQ ID NO: 3438564 - RNA, 20 nt, Human
ccuuuuuuugauauaugaaa

SEQ ID NO: 3438565 - RNA, 17 nt, Human
ccuuuuuuuuuuuucca

SEQ ID NO: 3438566 - RNA, 18 nt, Human
cgaaaacguggcugcuuc

SEQ ID NO: 3438567 - RNA, 22 nt, Human
cgaaaaguuggugucaaugaau

SEQ ID NO: 3438568 - RNA, 17 nt, Human
cgaaacacagaaaccuu

SEQ ID NO: 3438569 - RNA, 22 nt, Human
cgaaacucuaaguguuugcugc

SEQ ID NO: 3438570 - RNA, 13 nt, Human
cgaaacugcucua

SEQ ID NO: 3438571 - RNA, 13 nt, Human
cgaaacuggaagu

SEQ ID NO: 3438572 - RNA, 12 nt, Human
cgaaagagagag

SEQ ID NO: 3438573 - RNA, 20 nt, Human
cgaaaggaugaaagugacca

SEQ ID NO: 3438574 - RNA, 23 nt, Human
cgaaaggauguaaacagugccug

SEQ ID NO: 3438575 - RNA, 22 nt, Human
cgaaagggacuuggaagcuccg

SEQ ID NO: 3438576 - RNA, 16 nt, Human
cgaaaguuaguaggau

SEQ ID NO: 3438577 - RNA, 11 nt, Human
cgaaauaacaa

SEQ ID NO: 3438578 - RNA, 15 nt, Human
cgaaauaucaaaguc

SEQ ID NO: 3438579 - RNA, 13 nt, Human
cgaaauguuauuu

SEQ ID NO: 3438580 - RNA, 18 nt, Human
cgaacacccucgaagcgc

SEQ ID NO: 3438581 - RNA, 22 nt, Human
cgaacauggaacucauuccugc

SEQ ID NO: 3438582 - RNA, 21 nt, Human
cgaacauguuuuucuucuccc

SEQ ID NO: 3438583 - RNA, 18 nt, Human
cgaacccacacugcaaca

SEQ ID NO: 3438584 - RNA, 14 nt, Human
cgaacccaccugcu

SEQ ID NO: 3438585 - RNA, 14 nt, Human
cgaacuccugaccu

SEQ ID NO: 3438586 - RNA, 15 nt, Human
cgaacuccuugauuu

SEQ ID NO: 3438587 - RNA, 13 nt, Human
cgaacuggcgccu

SEQ ID NO: 3438588 - RNA, 21 nt, Human
cgaacugggcauauuucuaau

SEQ ID NO: 3438589 - RNA, 14 nt, Human
cgaacuucacaacu

SEQ ID NO: 3438590 - RNA, 20 nt, Human
cauguuucuuugaucaugaa

SEQ ID NO: 3438591 - RNA, 20 nt, Human
cauguuucuuuguaaugaaa

SEQ ID NO: 3438592 - RNA, 19 nt, Human
cauguuugagcucagaccc

SEQ ID NO: 3438593 - RNA, 20 nt, Human
cauguuugagcucagacccc

SEQ ID NO: 3438594 - RNA, 23 nt, Human
cauguuugagcucagacccccac

SEQ ID NO: 3438595 - RNA, 21 nt, Human
cauguuugcaccuuucuaguu

SEQ ID NO: 3438596 - RNA, 18 nt, Human
cauguuugccuagacagc

SEQ ID NO: 3438597 - RNA, 22 nt, Human
cauguuuggaaggggucuguag

SEQ ID NO: 3438598 - RNA, 22 nt, Human
cauguuuggugcauagaacugg

SEQ ID NO: 3438599 - RNA, 15 nt, Human
cauguuuuaaaugua

SEQ ID NO: 3438600 - RNA, 23 nt, Human
cauguuuuaaauguacaguuugg

SEQ ID NO: 3438601 - RNA, 14 nt, Human
cauguuuuaacaaa

SEQ ID NO: 3438602 - RNA, 15 nt, Human
cauguuuuaacaaaa

SEQ ID NO: 3438603 - RNA, 17 nt, Human
cauguuuuaacaaaaac

SEQ ID NO: 3438604 - RNA, 20 nt, Human
cauguuuucaaauggaguug

SEQ ID NO: 3438605 - RNA, 15 nt, Human
cauguuuucaacugc

SEQ ID NO: 3438606 - RNA, 16 nt, Human
cauguuuugcauguaa

SEQ ID NO: 3438607 - RNA, 11 nt, Human
cauguuuuggu

SEQ ID NO: 3438608 - RNA, 17 nt, Human
cauguuuuguauacaaa

SEQ ID NO: 3438609 - RNA, 19 nt, Human
cauguuuuguauacaaaua

SEQ ID NO: 3438610 - RNA, 20 nt, Human
cauguuuuguauacaaauau

SEQ ID NO: 3438611 - RNA, 14 nt, Human
cauguuuugugacu

SEQ ID NO: 3438612 - RNA, 20 nt, Human
cauguuuuucuucucccuca

SEQ ID NO: 3438613 - RNA, 23 nt, Human
cauguuuuuguuuucuuugaaug

SEQ ID NO: 3438614 - RNA, 21 nt, Human
cauuaaaaaaucaguuguaca

SEQ ID NO: 3438615 - RNA, 12 nt, Human
cauuaaaacaau

SEQ ID NO: 3438616 - RNA, 21 nt, Human
cauuaaaacugaagucugaaa

SEQ ID NO: 3438617 - RNA, 22 nt, Human
cauuaaaacugaagucugaaau

SEQ ID NO: 3438618 - RNA, 14 nt, Human
cauuaaaagaaaau

SEQ ID NO: 3438619 - RNA, 20 nt, Human
cauuaaaagaaaauaaaaaa

SEQ ID NO: 3438620 - RNA, 11 nt, Human
cauuaaaauau

SEQ ID NO: 3438621 - RNA, 16 nt, Human
cauuaaaauaugcacu

SEQ ID NO: 3438622 - RNA, 18 nt, Human
cauuaaaauaugcacuaa

SEQ ID NO: 3438623 - RNA, 10 nt, Human
cauuaaacug

SEQ ID NO: 3438624 - RNA, 11 nt, Human
cauuaaacuuu

SEQ ID NO: 3438625 - RNA, 19 nt, Human
cauuaaacuuuuuuaacca

SEQ ID NO: 3438626 - RNA, 14 nt, Human
cauuaaagaagacc

SEQ ID NO: 3438627 - RNA, 13 nt, Human
cauuaaagcaguc

SEQ ID NO: 3438628 - RNA, 12 nt, Human
cauuaaagccau

SEQ ID NO: 3438629 - RNA, 17 nt, Human
cauuaaagguacuuugc

SEQ ID NO: 3438630 - RNA, 13 nt, Human
cauuaaagucaga

SEQ ID NO: 3438631 - RNA, 14 nt, Human
cauuaaaugaauau

SEQ ID NO: 3438632 - RNA, 15 nt, Human
cauuaaaugaauauu

SEQ ID NO: 3438633 - RNA, 22 nt, Human
cauuaaaugaauauuuugauaa

SEQ ID NO: 3438634 - RNA, 12 nt, Human
cauuaaauguuu

SEQ ID NO: 3438635 - RNA, 13 nt, Human
cauuaaauguuug

SEQ ID NO: 3438636 - RNA, 21 nt, Human
cauuaaauucacaaacuuuua

SEQ ID NO: 3438637 - RNA, 15 nt, Human
cauuaacaaauaaaa

SEQ ID NO: 3438638 - RNA, 16 nt, Human
cauuaacaaauaaaaa

SEQ ID NO: 3438639 - RNA, 13 nt, Human
cauuaacaguuuu

SEQ ID NO: 3438640 - RNA, 17 nt, Human
cauuaaccgaugcuuua

SEQ ID NO: 3438641 - RNA, 20 nt, Human
cauuaaccgaugcuuuacca

SEQ ID NO: 3438642 - RNA, 17 nt, Human
cauuaacuuagcaugug

SEQ ID NO: 3438643 - RNA, 11 nt, Human
cauuaagaaaa

SEQ ID NO: 3438644 - RNA, 12 nt, Human
cauuaagaaaau

SEQ ID NO: 3438645 - RNA, 13 nt, Human
cauuaagaaaauc

SEQ ID NO: 3438646 - RNA, 19 nt, Human
cauuaaggggaagaaugaa

SEQ ID NO: 3438647 - RNA, 21 nt, Human
cauuaaguaaucaauaaagaa

SEQ ID NO: 3438648 - RNA, 15 nt, Human
cauuaauagcagccu

SEQ ID NO: 3438649 - RNA, 16 nt, Human
cauuaauauuugcuga

SEQ ID NO: 3438650 - RNA, 18 nt, Human
cauuaaucaaucaucugu

SEQ ID NO: 3438651 - RNA, 23 nt, Human
cauuaaucaaucaucugugugaa

SEQ ID NO: 3438652 - RNA, 19 nt, Human
cauuaaugccugcuuuuug

SEQ ID NO: 3438653 - RNA, 13 nt, Human
cauuaauguuaau

SEQ ID NO: 3438654 - RNA, 16 nt, Human
cauuaauguugauuuc

SEQ ID NO: 3438655 - RNA, 12 nt, Human
cauuaauguuuc

SEQ ID NO: 3438656 - RNA, 16 nt, Human
cauuacaaauugcuua

SEQ ID NO: 3438657 - RNA, 22 nt, Human
cauuacaacugaccaaguuucu

SEQ ID NO: 3438658 - RNA, 20 nt, Human
cauuacaagccuggaaaaaa

SEQ ID NO: 3438659 - RNA, 22 nt, Human
cauuacagggcacaggccaugg

SEQ ID NO: 3438660 - RNA, 20 nt, Human
cauuacauuccuugauaaug

SEQ ID NO: 3438661 - RNA, 23 nt, Human
cauuaccagacgguucaccagcc

SEQ ID NO: 3438662 - RNA, 13 nt, Human
cauuacccuuccc

SEQ ID NO: 3438663 - RNA, 15 nt, Human
cauuacccuucccug

SEQ ID NO: 3438664 - RNA, 22 nt, Human
cauuaccucagugagaagccag

SEQ ID NO: 3438665 - RNA, 13 nt, Human
cauuaccuuacug

SEQ ID NO: 3438666 - RNA, 16 nt, Human
cauuacggcuccucuc

SEQ ID NO: 3438667 - RNA, 16 nt, Human
cauuacgugagccagg

SEQ ID NO: 3438668 - RNA, 23 nt, Human
cauuacucuuguaagauuuugaa

SEQ ID NO: 3438669 - RNA, 17 nt, Human
cauuacugaaaacuuca

SEQ ID NO: 3438670 - RNA, 13 nt, Human
cauuacugcaugc

SEQ ID NO: 3438671 - RNA, 13 nt, Human
cauuacugggccu

SEQ ID NO: 3438672 - RNA, 20 nt, Human
cauuacuguuuaagacacuu

SEQ ID NO: 3438673 - RNA, 23 nt, Human
cauuacuugauuaagauuuuaca

SEQ ID NO: 3438674 - RNA, 21 nt, Human
cauuacuuuaccacccccaca

SEQ ID NO: 3438675 - RNA, 14 nt, Human
cauuagaaaaagag

SEQ ID NO: 3438676 - RNA, 19 nt, Human
cauuagaaaaauagcaacu

SEQ ID NO: 3438677 - RNA, 17 nt, Human
cauuagaaauagacagu

SEQ ID NO: 3438678 - RNA, 18 nt, Human
cauuagaaauuagcugug

SEQ ID NO: 3438679 - RNA, 15 nt, Human
cauuagacuccuccu

SEQ ID NO: 3438680 - RNA, 12 nt, Human
cauuagagcagg

SEQ ID NO: 3438681 - RNA, 13 nt, Human
cauuagagcaggc

SEQ ID NO: 3438682 - RNA, 16 nt, Human
cauuagcaaaaaaagu

SEQ ID NO: 3438683 - RNA, 23 nt, Human
cauuagcacagauuuuaauuguc

SEQ ID NO: 3438684 - RNA, 12 nt, Human
cauuagccaagg

SEQ ID NO: 3438685 - RNA, 17 nt, Human
cauuagccugaguagaa

SEQ ID NO: 3438686 - RNA, 18 nt, Human
cauuagccugaguagaaa

SEQ ID NO: 3438687 - RNA, 22 nt, Human
cauuaggacaaucaguccccuc

SEQ ID NO: 3438688 - RNA, 15 nt, Human
cauuaggauggcuag

SEQ ID NO: 3438689 - RNA, 23 nt, Human
cauuaguaaaugucuuuguaagu

SEQ ID NO: 3438690 - RNA, 20 nt, Human
cauuaguacuuuauagaaga

SEQ ID NO: 3438691 - RNA, 22 nt, Human
cauuaguacuuuauagaagaau

SEQ ID NO: 3438692 - RNA, 21 nt, Human
cauuagucauguuuaucugcu

SEQ ID NO: 3438693 - RNA, 22 nt, Human
cauuagucauguuuaucugcuu

SEQ ID NO: 3438694 - RNA, 21 nt, Human
cauuagugagacauauuuaca

SEQ ID NO: 3438695 - RNA, 15 nt, Human
cgcuaccucucuguc

SEQ ID NO: 3438696 - RNA, 17 nt, Human
cgcuaccucucuguccc

SEQ ID NO: 3438697 - RNA, 17 nt, Human
cgcuacuauaaagagaa

SEQ ID NO: 3438698 - RNA, 15 nt, Human
cgcuagcaguggcag

SEQ ID NO: 3438699 - RNA, 23 nt, Human
cgcuaggcucgccuucccuccug

SEQ ID NO: 3438700 - RNA, 21 nt, Human
cgcuagguagagucugagggc

SEQ ID NO: 3438701 - RNA, 21 nt, Human
cgcuaucucccugccuccugc

SEQ ID NO: 3438702 - RNA, 17 nt, Human
cgcuauugucaccaggg

SEQ ID NO: 3438703 - RNA, 22 nt, Human
cgcucaccuuuguuuagaacac

SEQ ID NO: 3438704 - RNA, 18 nt, Human
cgcucagcaugcauccuu

SEQ ID NO: 3438705 - RNA, 12 nt, Human
cgcucagcccuc

SEQ ID NO: 3438706 - RNA, 19 nt, Human
cgcucagggccaugcugag

SEQ ID NO: 3438707 - RNA, 18 nt, Human
cgcucaugggccccucug

SEQ ID NO: 3438708 - RNA, 18 nt, Human
cgcucauucagcaucuga

SEQ ID NO: 3438709 - RNA, 23 nt, Human
cgcuccaccagcaucaccugccu

SEQ ID NO: 3438710 - RNA, 16 nt, Human
cgcuccagcugccccg

SEQ ID NO: 3438711 - RNA, 10 nt, Human
cgcuccaggu

SEQ ID NO: 3438712 - RNA, 14 nt, Human
cgcucccagugucu

SEQ ID NO: 3438713 - RNA, 17 nt, Human
cgcuccccacucugcuc

SEQ ID NO: 3438714 - RNA, 13 nt, Human
cgcucccucccag

SEQ ID NO: 3438715 - RNA, 20 nt, Human
cgcucccucccaggacucug

SEQ ID NO: 3438716 - RNA, 23 nt, Human
cgcuccgggcuuucacggaaacu

SEQ ID NO: 3438717 - RNA, 22 nt, Human
cgcuccucccucugaggcugua

SEQ ID NO: 3438718 - RNA, 14 nt, Human
cgcuccugcagccc

SEQ ID NO: 3438719 - RNA, 14 nt, Human
cgcuccugucugcc

SEQ ID NO: 3438720 - RNA, 16 nt, Human
cgcuccugucugccag

SEQ ID NO: 3438721 - RNA, 20 nt, Human
cgcuccugucugccagccag

SEQ ID NO: 3438722 - RNA, 13 nt, Human
cgcuccugugucu

SEQ ID NO: 3438723 - RNA, 21 nt, Human
cgcucgccccaccggcgcgcu

SEQ ID NO: 3438724 - RNA, 16 nt, Human
cgcucggaggccccaa

SEQ ID NO: 3438725 - RNA, 19 nt, Human
cgcucggaggccccaaagg

SEQ ID NO: 3438726 - RNA, 14 nt, Human
cgcucucuccaggc

SEQ ID NO: 3438727 - RNA, 14 nt, Human
cgcucucuggccuu

SEQ ID NO: 3438728 - RNA, 15 nt, Human
cgcucucuggccuuc

SEQ ID NO: 3438729 - RNA, 12 nt, Human
cgcucucuuccu

SEQ ID NO: 3438730 - RNA, 16 nt, Human
cgcucucuuccugccc

SEQ ID NO: 3438731 - RNA, 19 nt, Human
cgcucucuuuucuguacuu

SEQ ID NO: 3438732 - RNA, 15 nt, Human
cgcucugcucagugg

SEQ ID NO: 3438733 - RNA, 15 nt, Human
cgcucugcuggccug

SEQ ID NO: 3438734 - RNA, 20 nt, Human
cgcucugucgcccaggcugg

SEQ ID NO: 3438735 - RNA, 24 nt, Human
cgcucuucgcgcccgccccugcag

SEQ ID NO: 3438736 - RNA, 15 nt, Human
cgcugacuacagggc

SEQ ID NO: 3438737 - RNA, 14 nt, Human
cgcugagccaccug

SEQ ID NO: 3438738 - RNA, 20 nt, Human
cgcugauacauaacuaaauu

SEQ ID NO: 3438739 - RNA, 12 nt, Human
cgcugaugcugg

SEQ ID NO: 3438740 - RNA, 17 nt, Human
cgcugaugcugggcugg

SEQ ID NO: 3438741 - RNA, 19 nt, Human
cgcugaugcugggcugggu

SEQ ID NO: 3438742 - RNA, 16 nt, Human
cgcugauucucagggu

SEQ ID NO: 3438743 - RNA, 23 nt, Human
cgcugauucucagggucucugcu

SEQ ID NO: 3438744 - RNA, 16 nt, Human
cgcugccacccaccuc

SEQ ID NO: 3438745 - RNA, 15 nt, Human
cgcugccagcucugu

SEQ ID NO: 3438746 - RNA, 14 nt, Human
cgcugccccaucuc

SEQ ID NO: 3438747 - RNA, 21 nt, Human
cgcugccccaucuccccucag

SEQ ID NO: 3438748 - RNA, 16 nt, Human
cgcugccccuggcagc

SEQ ID NO: 3438749 - RNA, 18 nt, Human
cgcugccccuggcagccc

SEQ ID NO: 3438750 - RNA, 20 nt, Human
cgcugccccuggcagccccu

SEQ ID NO: 3438751 - RNA, 20 nt, Human
cgcugcccggcgcccucugu

SEQ ID NO: 3438752 - RNA, 13 nt, Human
cgcugccugugug

SEQ ID NO: 3438753 - RNA, 21 nt, Human
cgcugcuccacgcgcuucgac

SEQ ID NO: 3438754 - RNA, 12 nt, Human
cgcugcuccuug

SEQ ID NO: 3438755 - RNA, 20 nt, Human
cgcugcucuuaugccauuug

SEQ ID NO: 3438756 - RNA, 20 nt, Human
cgcugcugcgcccugggcuc

SEQ ID NO: 3438757 - RNA, 18 nt, Human
cgcuggagguggggccug

SEQ ID NO: 3438758 - RNA, 12 nt, Human
cgcuggccccca

SEQ ID NO: 3438759 - RNA, 13 nt, Human
cgcuggcccccac

SEQ ID NO: 3438760 - RNA, 18 nt, Human
cgcuggcccccacuggcu

SEQ ID NO: 3438761 - RNA, 19 nt, Human
cgcuggcccccacuggcug

SEQ ID NO: 3438762 - RNA, 22 nt, Human
cgcuggccccuuugggcccugc

SEQ ID NO: 3438763 - RNA, 18 nt, Human
cgcuggccgggaccccga

SEQ ID NO: 3438764 - RNA, 23 nt, Human
cgcuggccgggaccccgagccug

SEQ ID NO: 3438765 - RNA, 20 nt, Human
cgcuggcugggggccucacu

SEQ ID NO: 3438766 - RNA, 14 nt, Human
cgcugggcacuucc

SEQ ID NO: 3438767 - RNA, 15 nt, Human
cgcugggcacuuccc

SEQ ID NO: 3438768 - RNA, 20 nt, Human
cgcugggcacuucccugcug

SEQ ID NO: 3438769 - RNA, 21 nt, Human
cgcugggcacuucccugcugc

SEQ ID NO: 3438770 - RNA, 17 nt, Human
cgcuggggccaguuggu

SEQ ID NO: 3438771 - RNA, 19 nt, Human
cgcugggugguacccucug

SEQ ID NO: 3438772 - RNA, 13 nt, Human
cgcuggugcugag

SEQ ID NO: 3438773 - RNA, 22 nt, Human
cgcuguaugaaaggagagagca

SEQ ID NO: 3438774 - RNA, 16 nt, Human
cgcuguccuuucuaga

SEQ ID NO: 3438775 - RNA, 17 nt, Human
cgcuguccuuucuagag

SEQ ID NO: 3438776 - RNA, 14 nt, Human
cgcugucuccagac

SEQ ID NO: 3438777 - RNA, 20 nt, Human
cgcugugcuaucaugaugga

SEQ ID NO: 3438778 - RNA, 13 nt, Human
cgcugugcugccc

SEQ ID NO: 3438779 - RNA, 13 nt, Human
cgcuguugcugaa

SEQ ID NO: 3438780 - RNA, 14 nt, Human
cgcuguugcugaau

SEQ ID NO: 3438781 - RNA, 20 nt, Human
cgcuguuggggcugcucaug

SEQ ID NO: 3438782 - RNA, 21 nt, Human
cgcuguuuuuguugugugugc

SEQ ID NO: 3438783 - RNA, 17 nt, Human
cgcuuaaaggugucuuc

SEQ ID NO: 3438784 - RNA, 18 nt, Human
cgcuucccuccugcccgc

SEQ ID NO: 3438785 - RNA, 22 nt, Human
cgcuucccugguucaagcgauu

SEQ ID NO: 3438786 - RNA, 17 nt, Human
cgcuuccggcuccugug

SEQ ID NO: 3438787 - RNA, 12 nt, Human
cgcuucucugug

SEQ ID NO: 3438788 - RNA, 12 nt, Human
cgcuucugacug

SEQ ID NO: 3438789 - RNA, 15 nt, Human
cgcuucuugccucug

SEQ ID NO: 3438790 - RNA, 18 nt, Human
cgcuucuugccucugugc

SEQ ID NO: 3438791 - RNA, 19 nt, Human
cgcuucuugccucugugcu

SEQ ID NO: 3438792 - RNA, 22 nt, Human
cgcuucuugccucugugcugug

SEQ ID NO: 3438793 - RNA, 18 nt, Human
cgcuugccucggcuccug

SEQ ID NO: 3438794 - RNA, 16 nt, Human
cauuucuugggcccuc

SEQ ID NO: 3438795 - RNA, 19 nt, Human
cauuucuuuucuuuuuaca

SEQ ID NO: 3438796 - RNA, 22 nt, Human
cauuugaaaauuuugauguuuu

SEQ ID NO: 3438797 - RNA, 14 nt, Human
cauuugaaagaaag

SEQ ID NO: 3438798 - RNA, 18 nt, Human
cauuugaaagaaaggacu

SEQ ID NO: 3438799 - RNA, 18 nt, Human
cauuugaaguguaccugu

SEQ ID NO: 3438800 - RNA, 21 nt, Human
cauuugaauaaagccugcuuu

SEQ ID NO: 3438801 - RNA, 11 nt, Human
cauuugaaugc

SEQ ID NO: 3438802 - RNA, 13 nt, Human
cauuugaaugcau

SEQ ID NO: 3438803 - RNA, 18 nt, Human
cauuugaaugcauuuugu

SEQ ID NO: 3438804 - RNA, 12 nt, Human
cauuugagaaau

SEQ ID NO: 3438805 - RNA, 18 nt, Human
cauuugagaaaugcauau

SEQ ID NO: 3438806 - RNA, 23 nt, Human
cauuugagaaaugcauauuguau

SEQ ID NO: 3438807 - RNA, 20 nt, Human
cauuugagcagggcucagcg

SEQ ID NO: 3438808 - RNA, 23 nt, Human
cauuugaggauuuagaaguguca

SEQ ID NO: 3438809 - RNA, 17 nt, Human
cauuugauaaugauaaa

SEQ ID NO: 3438810 - RNA, 11 nt, Human
cauuugauacc

SEQ ID NO: 3438811 - RNA, 17 nt, Human
cauuugauaccccuggg

SEQ ID NO: 3438812 - RNA, 17 nt, Human
cauuugaucuguugcaa

SEQ ID NO: 3438813 - RNA, 15 nt, Human
cauuugaugcuaaau

SEQ ID NO: 3438814 - RNA, 16 nt, Human
cauuugaugcuaaaua

SEQ ID NO: 3438815 - RNA, 16 nt, Human
cauuugauuuuucuaa

SEQ ID NO: 3438816 - RNA, 22 nt, Human
cauuugcaagggaaaagucucu

SEQ ID NO: 3438817 - RNA, 16 nt, Human
cauuugcaauaacagc

SEQ ID NO: 3438818 - RNA, 20 nt, Human
cauuugcaauaacagcugca

SEQ ID NO: 3438819 - RNA, 20 nt, Human
cauuugcacuggaguucuau

SEQ ID NO: 3438820 - RNA, 20 nt, Human
cauuugcaggguccucuucu

SEQ ID NO: 3438821 - RNA, 22 nt, Human
cauuugcaggguccucuucugg

SEQ ID NO: 3438822 - RNA, 14 nt, Human
cauuugcauuuguu

SEQ ID NO: 3438823 - RNA, 12 nt, Human
cauuugccuugc

SEQ ID NO: 3438824 - RNA, 15 nt, Human
cauuugccuugcaga

SEQ ID NO: 3438825 - RNA, 23 nt, Human
cauuugcgcacaacuuaaaaagu

SEQ ID NO: 3438826 - RNA, 15 nt, Human
cauuugcuacuguug

SEQ ID NO: 3438827 - RNA, 22 nt, Human
cauuugcuacuguuguaagaau

SEQ ID NO: 3438828 - RNA, 13 nt, Human
cauuugcucaugg

SEQ ID NO: 3438829 - RNA, 18 nt, Human
cauuugcucauggaauug

SEQ ID NO: 3438830 - RNA, 13 nt, Human
cauuugcuccuuu

SEQ ID NO: 3438831 - RNA, 12 nt, Human
cauuugcucuuc

SEQ ID NO: 3438832 - RNA, 14 nt, Human
cauuugcuggagcu

SEQ ID NO: 3438833 - RNA, 16 nt, Human
cauuugcuguuuuaaa

SEQ ID NO: 3438834 - RNA, 17 nt, Human
cauuugcuguuuuaaac

SEQ ID NO: 3438835 - RNA, 14 nt, Human
cauuugcuuuggaa

SEQ ID NO: 3438836 - RNA, 13 nt, Human
cauuugcuuuuug

SEQ ID NO: 3438837 - RNA, 11 nt, Human
cauuuggaaau

SEQ ID NO: 3438838 - RNA, 18 nt, Human
cauuuggaaaucuuuaaa

SEQ ID NO: 3438839 - RNA, 15 nt, Human
cauuuggaauacuuu

SEQ ID NO: 3438840 - RNA, 16 nt, Human
cauuuuuuucuaccua

SEQ ID NO: 3438841 - RNA, 23 nt, Human
cauuuuuuucuaccuauaacacu

SEQ ID NO: 3438842 - RNA, 14 nt, Human
cauuuuuuugcaug

SEQ ID NO: 3438843 - RNA, 21 nt, Human
cauuuuuuuucagcagacuau

SEQ ID NO: 3438844 - RNA, 17 nt, Human
cauuuuuuuuuuaaauc

SEQ ID NO: 3438845 - RNA, 17 nt, Human
cauuuuuuuuuuuaauu

SEQ ID NO: 3438846 - RNA, 21 nt, Human
cauuuuuuuuuuuguuucuga

SEQ ID NO: 3438847 - RNA, 13 nt, Human
ccaaaaaaauaag

SEQ ID NO: 3438848 - RNA, 18 nt, Human
ccaaaaaaauaaggugua

SEQ ID NO: 3438849 - RNA, 23 nt, Human
ccaaaaaauaucuaguaauauau

SEQ ID NO: 3438850 - RNA, 23 nt, Human
ccaaaaagaaucugcauuuagca

SEQ ID NO: 3438851 - RNA, 17 nt, Human
ccaaaaagaccagacua

SEQ ID NO: 3438852 - RNA, 19 nt, Human
ccaaaaagauuuucagaaa

SEQ ID NO: 3438853 - RNA, 13 nt, Human
ccaaaaagcacau

SEQ ID NO: 3438854 - RNA, 23 nt, Human
ccaaaaagguugcuguuucacaa

SEQ ID NO: 3438855 - RNA, 16 nt, Human
ccaaaaagugaaauaa

SEQ ID NO: 3438856 - RNA, 16 nt, Human
ccaaaaauaaauauau

SEQ ID NO: 3438857 - RNA, 18 nt, Human
ccaaaacaaacaaacaga

SEQ ID NO: 3438858 - RNA, 16 nt, Human
ccaaaacaagccuggu

SEQ ID NO: 3438859 - RNA, 11 nt, Human
ccaaaacugcu

SEQ ID NO: 3438860 - RNA, 19 nt, Human
ccaaaagauugcugaaauu

SEQ ID NO: 3438861 - RNA, 23 nt, Human
ccaaaagauugcugaaauuuuau

SEQ ID NO: 3438862 - RNA, 14 nt, Human
ccaaaagcacuuac

SEQ ID NO: 3438863 - RNA, 15 nt, Human
ccaaaagcaguaaau

SEQ ID NO: 3438864 - RNA, 15 nt, Human
ccaaaaggaaaaagc

SEQ ID NO: 3438865 - RNA, 21 nt, Human
ccaaaagucaaaaggugccug

SEQ ID NO: 3438866 - RNA, 15 nt, Human
ccaaaaguggccucu

SEQ ID NO: 3438867 - RNA, 17 nt, Human
ccaaaauaagaaaagau

SEQ ID NO: 3438868 - RNA, 20 nt, Human
ccaaaaucauaagauauuuu

SEQ ID NO: 3438869 - RNA, 21 nt, Human
ccaaaauguuggucauuuuau

SEQ ID NO: 3438870 - RNA, 23 nt, Human
ccaaaauuagccaguaauccugu

SEQ ID NO: 3438871 - RNA, 13 nt, Human
ccaaacaauuauu

SEQ ID NO: 3438872 - RNA, 15 nt, Human
ccaaacacacagaag

SEQ ID NO: 3438873 - RNA, 13 nt, Human
ccaaacacaggca

SEQ ID NO: 3438874 - RNA, 19 nt, Human
ccaaacaccuuccagcucc

SEQ ID NO: 3438875 - RNA, 12 nt, Human
ccaaacagcaaa

SEQ ID NO: 3438876 - RNA, 22 nt, Human
ccaaacagcaaaccaagagauu

SEQ ID NO: 3438877 - RNA, 16 nt, Human
ccaaacagccacacug

SEQ ID NO: 3438878 - RNA, 18 nt, Human
ccaaacaggcccuccucc

SEQ ID NO: 3438879 - RNA, 13 nt, Human
ccaaacagugaca

SEQ ID NO: 3438880 - RNA, 20 nt, Human
ccaaacauccuacaagacac

SEQ ID NO: 3438881 - RNA, 15 nt, Human
ccaaacauguauuua

SEQ ID NO: 3438882 - RNA, 18 nt, Human
ccaaacauuaauguugau

SEQ ID NO: 3438883 - RNA, 14 nt, Human
ccaaaccaccuucc

SEQ ID NO: 3438884 - RNA, 11 nt, Human
ccaaaccacuu

SEQ ID NO: 3438885 - RNA, 15 nt, Human
ccaaaccccggggcu

SEQ ID NO: 3438886 - RNA, 12 nt, Human
ccaaacccuagg

SEQ ID NO: 3438887 - RNA, 17 nt, Human
ccaaaccgccagcgaac

SEQ ID NO: 3438888 - RNA, 13 nt, Human
ccaaaccggcagg

SEQ ID NO: 3438889 - RNA, 16 nt, Human
ccaaaccggcaggugc

SEQ ID NO: 3438890 - RNA, 13 nt, Human
ccaaaccucacca

SEQ ID NO: 3438891 - RNA, 19 nt, Human
ccaaaccuccaaaacuccu

SEQ ID NO: 3438892 - RNA, 17 nt, Human
ccaaaccucuguucagu

SEQ ID NO: 3438893 - RNA, 20 nt, Human
ccaaaccucuguucagugua

SEQ ID NO: 3438894 - RNA, 15 nt, Human
ccaaaccugacagau

SEQ ID NO: 3438895 - RNA, 14 nt, Human
ccaaaccuggagau

SEQ ID NO: 3438896 - RNA, 21 nt, Human
ccaaaccuucacacacagacu

SEQ ID NO: 3438897 - RNA, 15 nt, Human
ccaaacgcugagcca

SEQ ID NO: 3438898 - RNA, 20 nt, Human
ccaaacgcugagccaccugc

SEQ ID NO: 3438899 - RNA, 16 nt, Human
ccaaacuacugaauga

SEQ ID NO: 3438900 - RNA, 14 nt, Human
ccaaacugccuaag

SEQ ID NO: 3438901 - RNA, 24 nt, Human
ccaaacugcuggacgucuuucuuu

SEQ ID NO: 3438902 - RNA, 20 nt, Human
ccaaagaaaugaacauucca

SEQ ID NO: 3438903 - RNA, 19 nt, Human
ccaaagaaccaaagaagaa

SEQ ID NO: 3438904 - RNA, 14 nt, Human
ccaaagaaugaauu

SEQ ID NO: 3438905 - RNA, 18 nt, Human
ccaaagaauguuagagca

SEQ ID NO: 3438906 - RNA, 14 nt, Human
ccaaagacaaauag

SEQ ID NO: 3438907 - RNA, 15 nt, Human
ccaaagacaaauagu

SEQ ID NO: 3438908 - RNA, 20 nt, Human
ccaaagagacuggagcaucu

SEQ ID NO: 3438909 - RNA, 15 nt, Human
ccaaagagccuggag

SEQ ID NO: 3438910 - RNA, 22 nt, Human
ccaaagagccuggagaagcuga

SEQ ID NO: 3438911 - RNA, 12 nt, Human
ccaaagaggcug

SEQ ID NO: 3438912 - RNA, 14 nt, Human
ccaaagaggcugcc

SEQ ID NO: 3438913 - RNA, 17 nt, Human
ccaaagaggcugccccu

SEQ ID NO: 3438914 - RNA, 20 nt, Human
ccaaagaggcugccccucuc

SEQ ID NO: 3438915 - RNA, 19 nt, Human
ccaaagagggcuuccucua

SEQ ID NO: 3438916 - RNA, 9 nt, Human
ccaaagagu

SEQ ID NO: 3438917 - RNA, 14 nt, Human
ccaaagaugcagcc

SEQ ID NO: 3438918 - RNA, 16 nt, Human
ccaaagcaagcaagag

SEQ ID NO: 3438919 - RNA, 13 nt, Human
ccaaagcacauuu

SEQ ID NO: 3438920 - RNA, 13 nt, Human
ccaaagcagacag

SEQ ID NO: 3438921 - RNA, 16 nt, Human
ccaaagcagggucugg

SEQ ID NO: 3438922 - RNA, 13 nt, Human
ccaaagcauggac

SEQ ID NO: 3438923 - RNA, 14 nt, Human
ccaaagccaaugug

SEQ ID NO: 3438924 - RNA, 20 nt, Human
ccaaagccaccucugucauu

SEQ ID NO: 3438925 - RNA, 15 nt, Human
ccaaagccagaacca

SEQ ID NO: 3438926 - RNA, 15 nt, Human
ccaaagcuaggccug

SEQ ID NO: 3438927 - RNA, 20 nt, Human
ccaaagcugagccugcaggg

SEQ ID NO: 3438928 - RNA, 20 nt, Human
ccaaagcugcccacuguuuc

SEQ ID NO: 3438929 - RNA, 21 nt, Human
ccaaagcuguuggucuguccc

SEQ ID NO: 3438930 - RNA, 15 nt, Human
ccaaagcuuuccugc

SEQ ID NO: 3438931 - RNA, 16 nt, Human
ccaaagcuuuccugcc

SEQ ID NO: 3438932 - RNA, 19 nt, Human
ccaaagcuuuccugcccca

SEQ ID NO: 3438933 - RNA, 17 nt, Human
ccaaaggaaaaagcaca

SEQ ID NO: 3438934 - RNA, 20 nt, Human
ccaaaggaaaaugucuguaa

SEQ ID NO: 3438935 - RNA, 18 nt, Human
ccaaaggaagucuaggag

SEQ ID NO: 3438936 - RNA, 21 nt, Human
ccaaaggacgcacugagcaac

SEQ ID NO: 3438937 - RNA, 21 nt, Human
ccaaaggacuccacccauccu

SEQ ID NO: 3438938 - RNA, 16 nt, Human
ccaaaggaugugauau

SEQ ID NO: 3438939 - RNA, 22 nt, Human
ccaaaggcauuuuauugcuuga

SEQ ID NO: 3438940 - RNA, 14 nt, Human
ccaaaggcccccua

SEQ ID NO: 3438941 - RNA, 12 nt, Human
ccaaaggcuggu

SEQ ID NO: 3438942 - RNA, 18 nt, Human
ccaaaggggaccuggaag

SEQ ID NO: 3438943 - RNA, 21 nt, Human
ccaaagggugaagcuauuuau

SEQ ID NO: 3438944 - RNA, 14 nt, Human
ccaaaguauuguac

SEQ ID NO: 3438945 - RNA, 17 nt, Human
ccaaagucauaauugca

SEQ ID NO: 3438946 - RNA, 19 nt, Human
ccaaagucauaauugcauu

SEQ ID NO: 3438947 - RNA, 21 nt, Human
ccaaagugccggugagaccca

SEQ ID NO: 3438948 - RNA, 14 nt, Human
ccaaagugcuggga

SEQ ID NO: 3438949 - RNA, 18 nt, Human
ccaaagugcugggauuaa

SEQ ID NO: 3438950 - RNA, 22 nt, Human
ccaaagugcugggauuacaggg

SEQ ID NO: 3438951 - RNA, 16 nt, Human
ccaaaguucaacuugg

SEQ ID NO: 3438952 - RNA, 12 nt, Human
ccaaaguucuaa

SEQ ID NO: 3438953 - RNA, 15 nt, Human
ccaaaguuguuguaa

SEQ ID NO: 3438954 - RNA, 18 nt, Human
ccaaauaaaguuaaaagu

SEQ ID NO: 3438955 - RNA, 16 nt, Human
ccaaauaacuucaguc

SEQ ID NO: 3438956 - RNA, 18 nt, Human
ccaaauaacuucaguccu

SEQ ID NO: 3438957 - RNA, 13 nt, Human
ccaaauaauaaag

SEQ ID NO: 3438958 - RNA, 21 nt, Human
ccaaauaauauguuuccuucc

SEQ ID NO: 3438959 - RNA, 15 nt, Human
ccaaauaaugucucu

SEQ ID NO: 3438960 - RNA, 17 nt, Human
ccaaauaaugucucugu

SEQ ID NO: 3438961 - RNA, 23 nt, Human
cgaagcccagagggucugggggc

SEQ ID NO: 3438962 - RNA, 15 nt, Human
cgaagcucagcccac

SEQ ID NO: 3438963 - RNA, 16 nt, Human
cgaagcucagcccacc

SEQ ID NO: 3438964 - RNA, 12 nt, Human
cgaagcucuggc

SEQ ID NO: 3438965 - RNA, 20 nt, Human
cgaagcucuggcugaacccu

SEQ ID NO: 3438966 - RNA, 23 nt, Human
cgaaggcagugcaagagacucug

SEQ ID NO: 3438967 - RNA, 12 nt, Human
cgaaggccucug

SEQ ID NO: 3438968 - RNA, 13 nt, Human
cgaaggugcugga

SEQ ID NO: 3438969 - RNA, 22 nt, Human
cgaaguggacuggccccugggu

SEQ ID NO: 3438970 - RNA, 14 nt, Human
cgaaguugaugcaa

SEQ ID NO: 3438971 - RNA, 17 nt, Human
cgaauagacaucaaacu

SEQ ID NO: 3438972 - RNA, 13 nt, Human
cgaauagcuggga

SEQ ID NO: 3438973 - RNA, 17 nt, Human
cgaauauugagcaauau

SEQ ID NO: 3438974 - RNA, 21 nt, Human
cgaaucacgaggucaggaguu

SEQ ID NO: 3438975 - RNA, 18 nt, Human
cgaauccccucccuguca

SEQ ID NO: 3438976 - RNA, 16 nt, Human
cgaaucucugugccuu

SEQ ID NO: 3438977 - RNA, 15 nt, Human
cgaaugaaaagacaa

SEQ ID NO: 3438978 - RNA, 22 nt, Human
cgaaugaaaauaacugaauuug

SEQ ID NO: 3438979 - RNA, 12 nt, Human
cgaauggacuuu

SEQ ID NO: 3438980 - RNA, 13 nt, Human
cgaaugugcaggu

SEQ ID NO: 3438981 - RNA, 15 nt, Human
cgaauguguacaacu

SEQ ID NO: 3438982 - RNA, 19 nt, Human
cgaaugugucuuuagauag

SEQ ID NO: 3438983 - RNA, 14 nt, Human
cgaauugagcacaa

SEQ ID NO: 3438984 - RNA, 20 nt, Human
cgaauuucugugcccuccug

SEQ ID NO: 3438985 - RNA, 17 nt, Human
cgaauuuuucagaugau

SEQ ID NO: 3438986 - RNA, 15 nt, Human
cguuuaaaguucugu

SEQ ID NO: 3438987 - RNA, 17 nt, Human
cguuuaagccaaaacaa

SEQ ID NO: 3438988 - RNA, 18 nt, Human
cguuuaagccaaaacaau

SEQ ID NO: 3438989 - RNA, 22 nt, Human
cguuuaagccaaaacaauguuu

SEQ ID NO: 3438990 - RNA, 20 nt, Human
cguuuacuuaucuuaugcca

SEQ ID NO: 3438991 - RNA, 18 nt, Human
cguuuagaccaaggaaca

SEQ ID NO: 3438992 - RNA, 18 nt, Human
cguuuauaaacagaaaug

SEQ ID NO: 3438993 - RNA, 15 nt, Human
cguuuauuuucaaga

SEQ ID NO: 3438994 - RNA, 13 nt, Human
cguuucaaaaaca

SEQ ID NO: 3438995 - RNA, 15 nt, Human
cguuucaaaaacaca

SEQ ID NO: 3438996 - RNA, 12 nt, Human
cguuuccuaccg

SEQ ID NO: 3438997 - RNA, 18 nt, Human
cguuucuccaccuagacu

SEQ ID NO: 3438998 - RNA, 12 nt, Human
cguuucuucccu

SEQ ID NO: 3438999 - RNA, 13 nt, Human
cguuucuucccug

SEQ ID NO: 3439000 - RNA, 22 nt, Human
cguuucuuuaaccuuguauaaa

SEQ ID NO: 3439001 - RNA, 19 nt, Human
cguuuggaagauccuguga

SEQ ID NO: 3439002 - RNA, 15 nt, Human
cguuuguaugugugu

SEQ ID NO: 3439003 - RNA, 15 nt, Human
cguuuguuuguuuug

SEQ ID NO: 3439004 - RNA, 17 nt, Human
cguuuguuuguuuuguu

SEQ ID NO: 3439005 - RNA, 14 nt, Human
cguuuuauuguguu

SEQ ID NO: 3439006 - RNA, 14 nt, Human
cguuuuccccauga

SEQ ID NO: 3439007 - RNA, 16 nt, Human
cguuuuccccaugaca

SEQ ID NO: 3439008 - RNA, 15 nt, Human
cguuuucuaauugcu

SEQ ID NO: 3439009 - RNA, 13 nt, Human
cguuuugaagcua

SEQ ID NO: 3439010 - RNA, 20 nt, Human
cguuuugaagcuacugugug

SEQ ID NO: 3439011 - RNA, 15 nt, Human
cguuuuggaagcucu

SEQ ID NO: 3439012 - RNA, 23 nt, Human
cguuuugugugguggcaccuccu

SEQ ID NO: 3439013 - RNA, 15 nt, Human
cguuuuuguauuuuc

SEQ ID NO: 3439014 - RNA, 17 nt, Human
cuaaaaaacagaggcca

SEQ ID NO: 3439015 - RNA, 22 nt, Human
cuaaaaaacauaaauuucuuua

SEQ ID NO: 3439016 - RNA, 22 nt, Human
cuaaaaaagauauauuaaaaau

SEQ ID NO: 3439017 - RNA, 11 nt, Human
cuaaaaacaua

SEQ ID NO: 3439018 - RNA, 15 nt, Human
cuaaaaaguauaaaa

SEQ ID NO: 3439019 - RNA, 18 nt, Human
cuaaaaagucagauguuu

SEQ ID NO: 3439020 - RNA, 14 nt, Human
cuaaaaauaaagca

SEQ ID NO: 3439021 - RNA, 15 nt, Human
cuaaaaauaaagcac

SEQ ID NO: 3439022 - RNA, 22 nt, Human
cuaaaaauaacuguaauuauuu

SEQ ID NO: 3439023 - RNA, 23 nt, Human
cuaaaaauaacuguaauuauuug

SEQ ID NO: 3439024 - RNA, 13 nt, Human
cuaaaaauacaaa

SEQ ID NO: 3439025 - RNA, 21 nt, Human
cuaaaaauauacauguuuaug

SEQ ID NO: 3439026 - RNA, 22 nt, Human
cuaaaaauauuauaacuuaaaa

SEQ ID NO: 3439027 - RNA, 23 nt, Human
cuaaaaaugagcuugauuaaauc

SEQ ID NO: 3439028 - RNA, 22 nt, Human
cuaaaaaugggacuucuuuuca

SEQ ID NO: 3439029 - RNA, 17 nt, Human
cuaaaaccauuccauuu

SEQ ID NO: 3439030 - RNA, 22 nt, Human
cuaaaacuaaauagcauguauu

SEQ ID NO: 3439031 - RNA, 22 nt, Human
cuaaaacuguacuuugauucac

SEQ ID NO: 3439032 - RNA, 13 nt, Human
cuaaaagaaacuu

SEQ ID NO: 3439033 - RNA, 14 nt, Human
cuaaaagacauuug

SEQ ID NO: 3439034 - RNA, 17 nt, Human
cuaaaagacauuuguua

SEQ ID NO: 3439035 - RNA, 16 nt, Human
cuaaaagauauaagug

SEQ ID NO: 3439036 - RNA, 13 nt, Human
cuaaaagauccuu

SEQ ID NO: 3439037 - RNA, 12 nt, Human
cuaaaagcaaaa

SEQ ID NO: 3439038 - RNA, 13 nt, Human
cuaaaaguaaaca

SEQ ID NO: 3439039 - RNA, 13 nt, Human
cuaaaagucuucg

SEQ ID NO: 3439040 - RNA, 20 nt, Human
cuaaaagugggcuugauucu

SEQ ID NO: 3439041 - RNA, 12 nt, Human
cuaaaaguguca

SEQ ID NO: 3439042 - RNA, 13 nt, Human
cuaaaagugucac

SEQ ID NO: 3439043 - RNA, 23 nt, Human
cuaaaaguucauaacagugccau

SEQ ID NO: 3439044 - RNA, 14 nt, Human
cuaaaauaaagaaa

SEQ ID NO: 3439045 - RNA, 22 nt, Human
cuaaaauaaagaaauagaacaa

SEQ ID NO: 3439046 - RNA, 22 nt, Human
cuaaaauaagggcagagucaca

SEQ ID NO: 3439047 - RNA, 15 nt, Human
cuaaaauaauuuugu

SEQ ID NO: 3439048 - RNA, 13 nt, Human
cuaaaauagccac

SEQ ID NO: 3439049 - RNA, 21 nt, Human
cuaaaauauuuaugaagaaaa

SEQ ID NO: 3439050 - RNA, 22 nt, Human
cuaaaauauuuaugaagaaaau

SEQ ID NO: 3439051 - RNA, 13 nt, Human
cuaaaaucaugaa

SEQ ID NO: 3439052 - RNA, 17 nt, Human
cuaaaaucuuauaguuc

SEQ ID NO: 3439053 - RNA, 22 nt, Human
cuaaaaugugauguucuaaggc

SEQ ID NO: 3439054 - RNA, 23 nt, Human
cuaaaaugugauguucuaaggcu

SEQ ID NO: 3439055 - RNA, 21 nt, Human
cuaaaauuguuuuuuguugua

SEQ ID NO: 3439056 - RNA, 21 nt, Human
cuaaaauuugcccucccaucc

SEQ ID NO: 3439057 - RNA, 15 nt, Human
cuaaaauuuuuuccu

SEQ ID NO: 3439058 - RNA, 21 nt, Human
cuaaacaagaaucagucuauc

SEQ ID NO: 3439059 - RNA, 22 nt, Human
cuaaacaagauuuuaaagacau

SEQ ID NO: 3439060 - RNA, 23 nt, Human
cuaaacaagauuuuaaagacaug

SEQ ID NO: 3439061 - RNA, 17 nt, Human
cuaaacacgugacacaa

SEQ ID NO: 3439062 - RNA, 18 nt, Human
cuaaacacugcgcuuuau

SEQ ID NO: 3439063 - RNA, 14 nt, Human
cuaaacagacucau

SEQ ID NO: 3439064 - RNA, 12 nt, Human
cuaaacagauau

SEQ ID NO: 3439065 - RNA, 13 nt, Human
cuaaacagauaua

SEQ ID NO: 3439066 - RNA, 13 nt, Human
cuaaacaucauuc

SEQ ID NO: 3439067 - RNA, 23 nt, Human
cuaaacaucauucauuuuuguug

SEQ ID NO: 3439068 - RNA, 12 nt, Human
cuaaacauccau

SEQ ID NO: 3439069 - RNA, 16 nt, Human
cuaaaccaaggacuga

SEQ ID NO: 3439070 - RNA, 17 nt, Human
cuaaaccaaggacugag

SEQ ID NO: 3439071 - RNA, 19 nt, Human
cuaaaccaaggacugagca

SEQ ID NO: 3439072 - RNA, 23 nt, Human
cuaaaccaaggacugagcacccu

SEQ ID NO: 3439073 - RNA, 13 nt, Human
cuaaaccucaguu

SEQ ID NO: 3439074 - RNA, 18 nt, Human
cuaaaccuuaguacugag

SEQ ID NO: 3439075 - RNA, 20 nt, Human
cuaaacgagucaauccccuc

SEQ ID NO: 3439076 - RNA, 14 nt, Human
cuaaacguguaugu

SEQ ID NO: 3439077 - RNA, 19 nt, Human
cuaaacguguauguuuuuc

SEQ ID NO: 3439078 - RNA, 15 nt, Human
cuaaacuaggcuccu

SEQ ID NO: 3439079 - RNA, 15 nt, Human
cuaaacuccuuccug

SEQ ID NO: 3439080 - RNA, 13 nt, Human
cuaaacugccccc

SEQ ID NO: 3439081 - RNA, 20 nt, Human
cuaaacuuggugcuuauuga

SEQ ID NO: 3439082 - RNA, 13 nt, Human
cuaaacuuucaca

SEQ ID NO: 3439083 - RNA, 13 nt, Human
cuaaagaaaaaca

SEQ ID NO: 3439084 - RNA, 20 nt, Human
cuaaagaaaaacaaacucgu

SEQ ID NO: 3439085 - RNA, 16 nt, Human
cuaaagaagaucugua

SEQ ID NO: 3439086 - RNA, 20 nt, Human
cuaaagagcccuugccuccc

SEQ ID NO: 3439087 - RNA, 22 nt, Human
cuaaagagcccuugccucccca

SEQ ID NO: 3439088 - RNA, 23 nt, Human
cuaaagagcccuugccuccccau

SEQ ID NO: 3439089 - RNA, 19 nt, Human
cuaaagaguuuauuuuaag

SEQ ID NO: 3439090 - RNA, 15 nt, Human
cuaaagauaauauua

SEQ ID NO: 3439091 - RNA, 17 nt, Human
cuaaagauggaguuucu

SEQ ID NO: 3439092 - RNA, 14 nt, Human
cuaaagauucuaua

SEQ ID NO: 3439093 - RNA, 17 nt, Human
cuaaagauucuauaguu

SEQ ID NO: 3439094 - RNA, 22 nt, Human
cuaaagauucuauaguucuaga

SEQ ID NO: 3439095 - RNA, 23 nt, Human
cuaaagauucuauaguucuagac

SEQ ID NO: 3439096 - RNA, 20 nt, Human
cuaaagcaauaaugguccca

SEQ ID NO: 3439097 - RNA, 14 nt, Human
cuaaagcaauagaa

SEQ ID NO: 3439098 - RNA, 22 nt, Human
cuaaagcaugaaaugugaauuu

SEQ ID NO: 3439099 - RNA, 16 nt, Human
cuaaagccucaaaaca

SEQ ID NO: 3439100 - RNA, 11 nt, Human
cuaaagcugcc

SEQ ID NO: 3439101 - RNA, 14 nt, Human
cuaaaggaaaaaac

SEQ ID NO: 3439102 - RNA, 19 nt, Human
cuaaaggaaaucaaaugaa

SEQ ID NO: 3439103 - RNA, 16 nt, Human
cuaaaggaguuuaugu

SEQ ID NO: 3439104 - RNA, 17 nt, Human
cuaaaggauagaucaaa

SEQ ID NO: 3439105 - RNA, 19 nt, Human
cuaaaggauagaucaaagu

SEQ ID NO: 3439106 - RNA, 19 nt, Human
cuaaagguccacaggucua

SEQ ID NO: 3439107 - RNA, 20 nt, Human
cuaaaggucccaaggcaagg

SEQ ID NO: 3439108 - RNA, 23 nt, Human
cuaaagguggccacaaauucuuu

SEQ ID NO: 3439109 - RNA, 23 nt, Human
cuaaaguaaaaacaaagaaauua

SEQ ID NO: 3439110 - RNA, 21 nt, Human
cuaaaguaaaaagggaauuau

SEQ ID NO: 3439111 - RNA, 20 nt, Human
cuaaaguauguaaaguaugu

SEQ ID NO: 3439112 - RNA, 14 nt, Human
cuaaagugcuggga

SEQ ID NO: 3439113 - RNA, 16 nt, Human
cuaaagugcugggauu

SEQ ID NO: 3439114 - RNA, 20 nt, Human
cuaaagugcugggauuacag

SEQ ID NO: 3439115 - RNA, 20 nt, Human
cuaaaguguauuuucagagc

SEQ ID NO: 3439116 - RNA, 10 nt, Human
cuaaaguuau

SEQ ID NO: 3439117 - RNA, 13 nt, Human
cuaaaguuauauu

SEQ ID NO: 3439118 - RNA, 15 nt, Human
cuaaaguuauauuuc

SEQ ID NO: 3439119 - RNA, 17 nt, Human
cuaaaguucuaagauuc

SEQ ID NO: 3439120 - RNA, 19 nt, Human
cuaaaguucuaagauucug

SEQ ID NO: 3439121 - RNA, 20 nt, Human
cuaaaguucuaagauucuga

SEQ ID NO: 3439122 - RNA, 20 nt, Human
cuaaaguuguacuuuaaaaa

SEQ ID NO: 3439123 - RNA, 21 nt, Human
cuaaaguuuacaguaaauaaa

SEQ ID NO: 3439124 - RNA, 24 nt, Human
cuaaaguuuacaguaaauaaauug

SEQ ID NO: 3439125 - RNA, 22 nt, Human
cuaaauaaaaguuuuacaaagg

SEQ ID NO: 3439126 - RNA, 21 nt, Human
cuaaauaaaaugcuagguucu

SEQ ID NO: 3439127 - RNA, 23 nt, Human
cuaaauaaagcuugcaacaaaau

SEQ ID NO: 3439128 - RNA, 18 nt, Human
cuaaauaaguuauaaaga

SEQ ID NO: 3439129 - RNA, 21 nt, Human
cuaaauaaucuuacucuagau

SEQ ID NO: 3439130 - RNA, 18 nt, Human
cuaagaagcuucuaauaa

SEQ ID NO: 3439131 - RNA, 16 nt, Human
cuaagaauaaacauuu

SEQ ID NO: 3439132 - RNA, 20 nt, Human
cuaagaauaaacauuuguua

SEQ ID NO: 3439133 - RNA, 15 nt, Human
cuaagaauaauaaaa

SEQ ID NO: 3439134 - RNA, 17 nt, Human
cuaagaauacagcuuuc

SEQ ID NO: 3439135 - RNA, 22 nt, Human
cuaagacacaaaugcaugaaca

SEQ ID NO: 3439136 - RNA, 23 nt, Human
cuaagacacaaaugcaugaacaa

SEQ ID NO: 3439137 - RNA, 14 nt, Human
cuaagacuacagca

SEQ ID NO: 3439138 - RNA, 13 nt, Human
cuaagacuauaua

SEQ ID NO: 3439139 - RNA, 22 nt, Human
cuaagacuccucggccuggcuc

SEQ ID NO: 3439140 - RNA, 17 nt, Human
cuaagagaaguagaaau

SEQ ID NO: 3439141 - RNA, 16 nt, Human
cuaagagaaguuauuu

SEQ ID NO: 3439142 - RNA, 22 nt, Human
cuaagagaaguuauuuucuaca

SEQ ID NO: 3439143 - RNA, 16 nt, Human
cuaagagagcaccugg

SEQ ID NO: 3439144 - RNA, 20 nt, Human
cuaagagccauuuaggggcc

SEQ ID NO: 3439145 - RNA, 18 nt, Human
cuaagaggaaaguacauu

SEQ ID NO: 3439146 - RNA, 23 nt, Human
cuaagaggcugcccuccugugcu

SEQ ID NO: 3439147 - RNA, 14 nt, Human
cuaagaggcugcug

SEQ ID NO: 3439148 - RNA, 18 nt, Human
cuaagaguguccuaggag

SEQ ID NO: 3439149 - RNA, 16 nt, Human
cuaagauaguaacaau

SEQ ID NO: 3439150 - RNA, 20 nt, Human
cuaagaucgguuaacaaaua

SEQ ID NO: 3439151 - RNA, 17 nt, Human
cuaagaucuuagauucu

SEQ ID NO: 3439152 - RNA, 18 nt, Human
cuaagaugacauugcuaa

SEQ ID NO: 3439153 - RNA, 23 nt, Human
cuaagaugugauauucuaagacu

SEQ ID NO: 3439154 - RNA, 18 nt, Human
cuaagauguguucuuauu

SEQ ID NO: 3439155 - RNA, 20 nt, Human
cuaagauguuauauuuuucu

SEQ ID NO: 3439156 - RNA, 15 nt, Human
cuaagauuaauagca

SEQ ID NO: 3439157 - RNA, 21 nt, Human
cuaagauuacaaaucagaagu

SEQ ID NO: 3439158 - RNA, 13 nt, Human
cuaagauucuaaa

SEQ ID NO: 3439159 - RNA, 13 nt, Human
cuaagauucuaga

SEQ ID NO: 3439160 - RNA, 16 nt, Human
cuaagauucuagauca

SEQ ID NO: 3439161 - RNA, 11 nt, Human
cuaagauucug

SEQ ID NO: 3439162 - RNA, 14 nt, Human
cuaagauucuuuua

SEQ ID NO: 3439163 - RNA, 13 nt, Human
cuaagcagaaagu

SEQ ID NO: 3439164 - RNA, 14 nt, Human
cuaagcagaaagug

SEQ ID NO: 3439165 - RNA, 16 nt, Human
cuaagcagaaagugcc

SEQ ID NO: 3439166 - RNA, 22 nt, Human
cuaagcagaaagugccuuucag

SEQ ID NO: 3439167 - RNA, 20 nt, Human
cuaagcagaggaggggccgc

SEQ ID NO: 3439168 - RNA, 19 nt, Human
cuaagcagcauuucugaag

SEQ ID NO: 3439169 - RNA, 21 nt, Human
cuaagcauaaaagaugaaaga

SEQ ID NO: 3439170 - RNA, 21 nt, Human
cuaagcauagcaaacagagga

SEQ ID NO: 3439171 - RNA, 15 nt, Human
cuaagcauugccugg

SEQ ID NO: 3439172 - RNA, 20 nt, Human
cuaagccacucuuccaaagg

SEQ ID NO: 3439173 - RNA, 16 nt, Human
cuaagccagcugcccc

SEQ ID NO: 3439174 - RNA, 16 nt, Human
cuaagcccaugggaca

SEQ ID NO: 3439175 - RNA, 15 nt, Human
cuaagccccagcaag

SEQ ID NO: 3439176 - RNA, 16 nt, Human
cuaagccccagcaagc

SEQ ID NO: 3439177 - RNA, 14 nt, Human
cuaagcccccgcug

SEQ ID NO: 3439178 - RNA, 18 nt, Human
cuaagcccccgcuguaau

SEQ ID NO: 3439179 - RNA, 22 nt, Human
cuaagcccccgcuguaaugaaa

SEQ ID NO: 3439180 - RNA, 12 nt, Human
cuaagcccuguc

SEQ ID NO: 3439181 - RNA, 14 nt, Human
cuaagccuccuuuu

SEQ ID NO: 3439182 - RNA, 22 nt, Human
cggcaggcucacugccaggcca

SEQ ID NO: 3439183 - RNA, 15 nt, Human
cggcaggggccugga

SEQ ID NO: 3439184 - RNA, 18 nt, Human
cggcaggggccuggagau

SEQ ID NO: 3439185 - RNA, 19 nt, Human
cggcaggggccuggagauc

SEQ ID NO: 3439186 - RNA, 16 nt, Human
cggcaguucugggugc

SEQ ID NO: 3439187 - RNA, 22 nt, Human
cggcaugggaaagccaccucuc

SEQ ID NO: 3439188 - RNA, 12 nt, Human
cggccaagaaug

SEQ ID NO: 3439189 - RNA, 13 nt, Human
cggccaagaaugu

SEQ ID NO: 3439190 - RNA, 15 nt, Human
cggccaauggaaacc

SEQ ID NO: 3439191 - RNA, 15 nt, Human
cggccacacagcugc

SEQ ID NO: 3439192 - RNA, 17 nt, Human
cggccacacagcugccg

SEQ ID NO: 3439193 - RNA, 16 nt, Human
cggccacuggccaucu

SEQ ID NO: 3439194 - RNA, 22 nt, Human
cggccagccccggcccugggcu

SEQ ID NO: 3439195 - RNA, 22 nt, Human
cggccagccccuggccccagga

SEQ ID NO: 3439196 - RNA, 20 nt, Human
cggccaggccagagggagug

SEQ ID NO: 3439197 - RNA, 17 nt, Human
cggccagggagaagcuc

SEQ ID NO: 3439198 - RNA, 13 nt, Human
cggccaggugggc

SEQ ID NO: 3439199 - RNA, 16 nt, Human
cggcccaagcccgacu

SEQ ID NO: 3439200 - RNA, 17 nt, Human
cggcccaauccaaggug

SEQ ID NO: 3439201 - RNA, 17 nt, Human
cggcccagcccggcucc

SEQ ID NO: 3439202 - RNA, 17 nt, Human
cggcccaggauggcuuu

SEQ ID NO: 3439203 - RNA, 17 nt, Human
cggccccaccagugccu

SEQ ID NO: 3439204 - RNA, 22 nt, Human
cggccccagcaccucagccugc

SEQ ID NO: 3439205 - RNA, 12 nt, Human
cggccccagcca

SEQ ID NO: 3439206 - RNA, 14 nt, Human
cggccccagcuucu

SEQ ID NO: 3439207 - RNA, 21 nt, Human
cggcccccagagcgccccucc

SEQ ID NO: 3439208 - RNA, 17 nt, Human
cggcccccaugcaaggu

SEQ ID NO: 3439209 - RNA, 14 nt, Human
cggccccucccccu

SEQ ID NO: 3439210 - RNA, 15 nt, Human
cggccccucccgccc

SEQ ID NO: 3439211 - RNA, 22 nt, Human
cggccccugcauccccuuggcu

SEQ ID NO: 3439212 - RNA, 13 nt, Human
cggccccugcugg

SEQ ID NO: 3439213 - RNA, 17 nt, Human
cggcccgccucuccucg

SEQ ID NO: 3439214 - RNA, 17 nt, Human
cggcccgcgccacagga

SEQ ID NO: 3439215 - RNA, 18 nt, Human
cggcccuaccagcgcccg

SEQ ID NO: 3439216 - RNA, 14 nt, Human
cggcccuagcccag

SEQ ID NO: 3439217 - RNA, 18 nt, Human
cggcccucaucuaugagg

SEQ ID NO: 3439218 - RNA, 13 nt, Human
cggcccuccagag

SEQ ID NO: 3439219 - RNA, 20 nt, Human
cggcccuccagagccccaca

SEQ ID NO: 3439220 - RNA, 17 nt, Human
cggcccugcagccagcu

SEQ ID NO: 3439221 - RNA, 19 nt, Human
cggcccugcagccagcuca

SEQ ID NO: 3439222 - RNA, 22 nt, Human
cggcccugggcucggaggcugc

SEQ ID NO: 3439223 - RNA, 11 nt, Human
cggcccugggg

SEQ ID NO: 3439224 - RNA, 15 nt, Human
cggccgcauucccug

SEQ ID NO: 3439225 - RNA, 18 nt, Human
cggccgcauucccugagu

SEQ ID NO: 3439226 - RNA, 15 nt, Human
cggccgcuccagggg

SEQ ID NO: 3439227 - RNA, 14 nt, Human
cggccggccagccc

SEQ ID NO: 3439228 - RNA, 19 nt, Human
cggccgucuucacucgccc

SEQ ID NO: 3439229 - RNA, 20 nt, Human
cggccuagggcccccacagu

SEQ ID NO: 3439230 - RNA, 19 nt, Human
cggccuaugacuugggcac

SEQ ID NO: 3439231 - RNA, 12 nt, Human
cggccucagagu

SEQ ID NO: 3439232 - RNA, 14 nt, Human
cggccuccauccug

SEQ ID NO: 3439233 - RNA, 18 nt, Human
cggccucuaaccccaggc

SEQ ID NO: 3439234 - RNA, 17 nt, Human
cggccucuucucucaga

SEQ ID NO: 3439235 - RNA, 18 nt, Human
cggccucuucucucagac

SEQ ID NO: 3439236 - RNA, 19 nt, Human
cggccucuucucucagacc

SEQ ID NO: 3439237 - RNA, 14 nt, Human
cggccugccaggag

SEQ ID NO: 3439238 - RNA, 22 nt, Human
cggccugccaggaggacccagg

SEQ ID NO: 3439239 - RNA, 15 nt, Human
cggccugguguucug

SEQ ID NO: 3439240 - RNA, 21 nt, Human
cggccuguccuccaacaccaa

SEQ ID NO: 3439241 - RNA, 16 nt, Human
cggccuugcugggggc

SEQ ID NO: 3439242 - RNA, 13 nt, Human
cggcgccaccauc

SEQ ID NO: 3439243 - RNA, 15 nt, Human
cggcggaaagccugu

SEQ ID NO: 3439244 - RNA, 13 nt, Human
cggcggagcuggc

SEQ ID NO: 3439245 - RNA, 21 nt, Human
cggcggagcuggccccgccgc

SEQ ID NO: 3439246 - RNA, 15 nt, Human
cggcggucccagcuc

SEQ ID NO: 3439247 - RNA, 16 nt, Human
cggcguacaggcuggc

SEQ ID NO: 3439248 - RNA, 15 nt, Human
cggcucacugcagcc

SEQ ID NO: 3439249 - RNA, 16 nt, Human
cggcucacugcagccu

SEQ ID NO: 3439250 - RNA, 19 nt, Human
cggcucacugcagccucaa

SEQ ID NO: 3439251 - RNA, 21 nt, Human
cggcucacugcauccuccgcc

SEQ ID NO: 3439252 - RNA, 19 nt, Human
cggcucagugcaaccucug

SEQ ID NO: 3439253 - RNA, 15 nt, Human
cggcuccacuaggac

SEQ ID NO: 3439254 - RNA, 14 nt, Human
cggcuccaggcucc

SEQ ID NO: 3439255 - RNA, 13 nt, Human
cggcucccagccu

SEQ ID NO: 3439256 - RNA, 20 nt, Human
cggcuccccauguguccugg

SEQ ID NO: 3439257 - RNA, 12 nt, Human
cggcuccuggac

SEQ ID NO: 3439258 - RNA, 13 nt, Human
cggcuccugugcu

SEQ ID NO: 3439259 - RNA, 14 nt, Human
cggcuccugugcuu

SEQ ID NO: 3439260 - RNA, 20 nt, Human
cggcucggaggaagccccca

SEQ ID NO: 3439261 - RNA, 16 nt, Human
cggcucuuuccuugcu

SEQ ID NO: 3439262 - RNA, 22 nt, Human
cggcugaccaugcucaucugcu

SEQ ID NO: 3439263 - RNA, 11 nt, Human
cggcugagagc

SEQ ID NO: 3439264 - RNA, 14 nt, Human
cggcugagagcccc

SEQ ID NO: 3439265 - RNA, 17 nt, Human
cggcugagagccccagc

SEQ ID NO: 3439266 - RNA, 18 nt, Human
cggcugagagccccagcu

SEQ ID NO: 3439267 - RNA, 19 nt, Human
cggcugagagccccagcug

SEQ ID NO: 3439268 - RNA, 20 nt, Human
cggcugagagccccagcuga

SEQ ID NO: 3439269 - RNA, 12 nt, Human
cggcugcagagg

SEQ ID NO: 3439270 - RNA, 15 nt, Human
cggcugcagaggcca

SEQ ID NO: 3439271 - RNA, 18 nt, Human
cggcugcagcucacccag

SEQ ID NO: 3439272 - RNA, 15 nt, Human
cggcuggacuuggag

SEQ ID NO: 3439273 - RNA, 17 nt, Human
cggcuggagaccaugca

SEQ ID NO: 3439274 - RNA, 14 nt, Human
cggcuggcagccca

SEQ ID NO: 3439275 - RNA, 13 nt, Human
cggcuggccaugg

SEQ ID NO: 3439276 - RNA, 19 nt, Human
ccaccgccuugcccagccu

SEQ ID NO: 3439277 - RNA, 15 nt, Human
ccaccgcuccccagc

SEQ ID NO: 3439278 - RNA, 17 nt, Human
ccaccgcuccccagccc

SEQ ID NO: 3439279 - RNA, 21 nt, Human
ccaccgcuccccagcccaggg

SEQ ID NO: 3439280 - RNA, 13 nt, Human
ccaccgcugccua

SEQ ID NO: 3439281 - RNA, 14 nt, Human
ccaccgcugccuaa

SEQ ID NO: 3439282 - RNA, 14 nt, Human
ccaccgggccacuc

SEQ ID NO: 3439283 - RNA, 21 nt, Human
ccaccgggccacuccuuccug

SEQ ID NO: 3439284 - RNA, 22 nt, Human
ccaccgggccacuccuuccugc

SEQ ID NO: 3439285 - RNA, 15 nt, Human
ccaccguccgcccug

SEQ ID NO: 3439286 - RNA, 16 nt, Human
ccaccguccgcccugc

SEQ ID NO: 3439287 - RNA, 19 nt, Human
ccaccguccgcccugcucc

SEQ ID NO: 3439288 - RNA, 13 nt, Human
ccaccguggagga

SEQ ID NO: 3439289 - RNA, 14 nt, Human
ccaccuagaacacu

SEQ ID NO: 3439290 - RNA, 21 nt, Human
ccaccuagacuguaaaccucu

SEQ ID NO: 3439291 - RNA, 15 nt, Human
ccaccuaguggcugu

SEQ ID NO: 3439292 - RNA, 18 nt, Human
ccaccuaucucgugggag

SEQ ID NO: 3439293 - RNA, 21 nt, Human
ccaccuaucucgugggagagc

SEQ ID NO: 3439294 - RNA, 18 nt, Human
ccaccucacuccuguuac

SEQ ID NO: 3439295 - RNA, 18 nt, Human
ccaccucagaccccgggg

SEQ ID NO: 3439296 - RNA, 12 nt, Human
ccaccucagccu

SEQ ID NO: 3439297 - RNA, 16 nt, Human
ccaccucagccuccug

SEQ ID NO: 3439298 - RNA, 22 nt, Human
ccaccuccagcccgggagccua

SEQ ID NO: 3439299 - RNA, 14 nt, Human
ccaccuccaguccc

SEQ ID NO: 3439300 - RNA, 24 nt, Human
ccaccuccagucccccuauccuug

SEQ ID NO: 3439301 - RNA, 17 nt, Human
ccaccuccccacgcccu

SEQ ID NO: 3439302 - RNA, 18 nt, Human
ccaccuccccacgcccuc

SEQ ID NO: 3439303 - RNA, 13 nt, Human
ccaccuccccagg

SEQ ID NO: 3439304 - RNA, 16 nt, Human
ccaccuccccccacaa

SEQ ID NO: 3439305 - RNA, 17 nt, Human
ccaccuccccuauccac

SEQ ID NO: 3439306 - RNA, 19 nt, Human
ccaccuccccuauccaccc

SEQ ID NO: 3439307 - RNA, 18 nt, Human
ccaccuccccuugccagc

SEQ ID NO: 3439308 - RNA, 19 nt, Human
ccaccuccccuugccagcu

SEQ ID NO: 3439309 - RNA, 20 nt, Human
ccaccucccucaaccucauc

SEQ ID NO: 3439310 - RNA, 15 nt, Human
ccaccucccugccca

SEQ ID NO: 3439311 - RNA, 17 nt, Human
ccaccucccugcccagg

SEQ ID NO: 3439312 - RNA, 14 nt, Human
ccaccucccugccu

SEQ ID NO: 3439313 - RNA, 18 nt, Human
ccaccucccugccuccag

SEQ ID NO: 3439314 - RNA, 23 nt, Human
ccaccuccuaaaaggcccagaga

SEQ ID NO: 3439315 - RNA, 20 nt, Human
ccaccucgcagguucaagca

SEQ ID NO: 3439316 - RNA, 15 nt, Human
ccaccucuaacagca

SEQ ID NO: 3439317 - RNA, 21 nt, Human
ccaccucuaacagcaccaaau

SEQ ID NO: 3439318 - RNA, 14 nt, Human
ccaccucucaauau

SEQ ID NO: 3439319 - RNA, 12 nt, Human
ccaccucucccu

SEQ ID NO: 3439320 - RNA, 16 nt, Human
ccaccucucccugacc

SEQ ID NO: 3439321 - RNA, 17 nt, Human
ccaccucucccugaccc

SEQ ID NO: 3439322 - RNA, 18 nt, Human
ccaccucucccugacccu

SEQ ID NO: 3439323 - RNA, 20 nt, Human
ccaccucucucacuccuuga

SEQ ID NO: 3439324 - RNA, 15 nt, Human
ccaccucucuuuuuc

SEQ ID NO: 3439325 - RNA, 13 nt, Human
ccaccucugcgga

SEQ ID NO: 3439326 - RNA, 22 nt, Human
ccaccucugcggaccccagcug

SEQ ID NO: 3439327 - RNA, 17 nt, Human
ccaccucuuccuggccg

SEQ ID NO: 3439328 - RNA, 18 nt, Human
ccaccucuucucuuccug

SEQ ID NO: 3439329 - RNA, 20 nt, Human
ccaccucuucucuuccugua

SEQ ID NO: 3439330 - RNA, 23 nt, Human
ccaccugacacaccaggcgcuaa

SEQ ID NO: 3439331 - RNA, 20 nt, Human
ccaccugagcuuuggacaca

SEQ ID NO: 3439332 - RNA, 14 nt, Human
ccaccugagguggg

SEQ ID NO: 3439333 - RNA, 20 nt, Human
ccaccugaggugggcccagg

SEQ ID NO: 3439334 - RNA, 21 nt, Human
ccaccugaggugggcccagga

SEQ ID NO: 3439335 - RNA, 15 nt, Human
ccaccugcagcuccc

SEQ ID NO: 3439336 - RNA, 17 nt, Human
ccaccugcagcucccuc

SEQ ID NO: 3439337 - RNA, 17 nt, Human
ccaccugcagggcugcc

SEQ ID NO: 3439338 - RNA, 11 nt, Human
cuaagccugug

SEQ ID NO: 3439339 - RNA, 15 nt, Human
cuaagccuguggcug

SEQ ID NO: 3439340 - RNA, 22 nt, Human
cuaagcggaccagccucccugu

SEQ ID NO: 3439341 - RNA, 15 nt, Human
cuaagcuaacccccu

SEQ ID NO: 3439342 - RNA, 22 nt, Human
cuaagcuaggaaugaaauccug

SEQ ID NO: 3439343 - RNA, 19 nt, Human
cuaagcuauucaguaauaa

SEQ ID NO: 3439344 - RNA, 14 nt, Human
cuaagcugcagcuu

SEQ ID NO: 3439345 - RNA, 17 nt, Human
cuaagcugcagcuuccu

SEQ ID NO: 3439346 - RNA, 15 nt, Human
cuaagcuuaaaaaaa

SEQ ID NO: 3439347 - RNA, 17 nt, Human
cuaagcuuaaaaaaaac

SEQ ID NO: 3439348 - RNA, 19 nt, Human
cuaagcuuugccagcugcu

SEQ ID NO: 3439349 - RNA, 20 nt, Human
cuaagcuuugccagcugcug

SEQ ID NO: 3439350 - RNA, 21 nt, Human
cuaaggacaagguaaggaggg

SEQ ID NO: 3439351 - RNA, 12 nt, Human
cuaaggacacac

SEQ ID NO: 3439352 - RNA, 13 nt, Human
cuaaggacacacu

SEQ ID NO: 3439353 - RNA, 19 nt, Human
cuaaggaccugaaauucca

SEQ ID NO: 3439354 - RNA, 22 nt, Human
cuaaggaccugaaauuccaaag

SEQ ID NO: 3439355 - RNA, 11 nt, Human
cuaaggaccuu

SEQ ID NO: 3439356 - RNA, 14 nt, Human
cuaaggacuucuuu

SEQ ID NO: 3439357 - RNA, 16 nt, Human
cuaaggacuucuuuaa

SEQ ID NO: 3439358 - RNA, 22 nt, Human
cuaaggacuucuuuaauuuugg

SEQ ID NO: 3439359 - RNA, 16 nt, Human
cuaaggacuuguuaga

SEQ ID NO: 3439360 - RNA, 20 nt, Human
cuaaggauagcaccgcuuuu

SEQ ID NO: 3439361 - RNA, 12 nt, Human
cuaaggaucucu

SEQ ID NO: 3439362 - RNA, 17 nt, Human
cuaaggaucucucagga

SEQ ID NO: 3439363 - RNA, 23 nt, Human
cuaaggaucucucaggagcacag

SEQ ID NO: 3439364 - RNA, 20 nt, Human
cuaaggcaucuaucugugcu

SEQ ID NO: 3439365 - RNA, 21 nt, Human
cuaaggccuaggauucuaaaa

SEQ ID NO: 3439366 - RNA, 22 nt, Human
cuaaggcguggagcugccugau

SEQ ID NO: 3439367 - RNA, 16 nt, Human
cuaaggcuccuguuuu

SEQ ID NO: 3439368 - RNA, 19 nt, Human
cuaaggcucuaugagucua

SEQ ID NO: 3439369 - RNA, 20 nt, Human
cuaaggcucuaugagucuag

SEQ ID NO: 3439370 - RNA, 23 nt, Human
cuaaggcucuaugagucuagaug

SEQ ID NO: 3439371 - RNA, 13 nt, Human
cuaaggcucugag

SEQ ID NO: 3439372 - RNA, 23 nt, Human
cuaaggcucugagagucuagauu

SEQ ID NO: 3439373 - RNA, 14 nt, Human
cuaaggcugaacuu

SEQ ID NO: 3439374 - RNA, 15 nt, Human
cuaaggcuguuugcu

SEQ ID NO: 3439375 - RNA, 17 nt, Human
cuaaggcuguuugcuuc

SEQ ID NO: 3439376 - RNA, 18 nt, Human
cuaagggaagacauuucu

SEQ ID NO: 3439377 - RNA, 17 nt, Human
cuaagggagagugguau

SEQ ID NO: 3439378 - RNA, 13 nt, Human
cuaaggggcccgg

SEQ ID NO: 3439379 - RNA, 18 nt, Human
cuaaggggcccggccagc

SEQ ID NO: 3439380 - RNA, 18 nt, Human
cuaagggggaggggaagu

SEQ ID NO: 3439381 - RNA, 19 nt, Human
cuaagggggaggggaaguc

SEQ ID NO: 3439382 - RNA, 23 nt, Human
cuaagggucgaaagcucuagaau

SEQ ID NO: 3439383 - RNA, 19 nt, Human
cuaagggugggugcucaga

SEQ ID NO: 3439384 - RNA, 21 nt, Human
cuaagggugggugcucagaau

SEQ ID NO: 3439385 - RNA, 22 nt, Human
cuaagggugggugcucagaaua

SEQ ID NO: 3439386 - RNA, 18 nt, Human
cuaaggguguaaguaauu

SEQ ID NO: 3439387 - RNA, 21 nt, Human
cuaagguccgguguucuaaga

SEQ ID NO: 3439388 - RNA, 23 nt, Human
cuaaggucuuggaacuugccugc

SEQ ID NO: 3439389 - RNA, 11 nt, Human
cuaagguucua

SEQ ID NO: 3439390 - RNA, 14 nt, Human
cuaagguucuaagg

SEQ ID NO: 3439391 - RNA, 15 nt, Human
cuaagguucuaaggc

SEQ ID NO: 3439392 - RNA, 14 nt, Human
cuaaguaaaaccac

SEQ ID NO: 3439393 - RNA, 19 nt, Human
cuaaguaaaaccacagcag

SEQ ID NO: 3439394 - RNA, 20 nt, Human
cuaaguaaaaccacagcagu

SEQ ID NO: 3439395 - RNA, 19 nt, Human
cuaaguaaauacaauuuuu

SEQ ID NO: 3439396 - RNA, 18 nt, Human
cuaaguaaaucucuucug

SEQ ID NO: 3439397 - RNA, 13 nt, Human
cuaaguacuguaa

SEQ ID NO: 3439398 - RNA, 22 nt, Human
cuaaguacuguaauaauaccuc

SEQ ID NO: 3439399 - RNA, 18 nt, Human
cuaaguaucaaguauaga

SEQ ID NO: 3439400 - RNA, 12 nt, Human
cuaaguauuaaa

SEQ ID NO: 3439401 - RNA, 17 nt, Human
cuaaguauuucccagca

SEQ ID NO: 3439402 - RNA, 17 nt, Human
cuaagucaacuuagcau

SEQ ID NO: 3439403 - RNA, 12 nt, Human
cuaagucaguac

SEQ ID NO: 3439404 - RNA, 14 nt, Human
cuaagucauucaua

SEQ ID NO: 3439405 - RNA, 16 nt, Human
cuaagucccugccccc

SEQ ID NO: 3439406 - RNA, 15 nt, Human
cuaaguccuuuaugu

SEQ ID NO: 3439407 - RNA, 12 nt, Human
cuaagucucugu

SEQ ID NO: 3439408 - RNA, 20 nt, Human
cuaagugaaauaagccagac

SEQ ID NO: 3439409 - RNA, 16 nt, Human
cuaagugauauaaauc

SEQ ID NO: 3439410 - RNA, 20 nt, Human
cuaagugauccucccaccuc

SEQ ID NO: 3439411 - RNA, 17 nt, Human
cuaagugcuaagugcuu

SEQ ID NO: 3439412 - RNA, 20 nt, Human
cuaagugggcauugccaugu

SEQ ID NO: 3439413 - RNA, 15 nt, Human
cuaaguuaauuuaaa

SEQ ID NO: 3439414 - RNA, 20 nt, Human
cuaaguuauaguauaucugg

SEQ ID NO: 3439415 - RNA, 18 nt, Human
cuaaguucacauuagaau

SEQ ID NO: 3439416 - RNA, 18 nt, Human
cuaaguuccacugagcuc

SEQ ID NO: 3439417 - RNA, 15 nt, Human
cuaaguucuuagaua

SEQ ID NO: 3439418 - RNA, 19 nt, Human
cuaaguugaguauauuaua

SEQ ID NO: 3439419 - RNA, 22 nt, Human
cuaaguugaguauauuauaaua

SEQ ID NO: 3439420 - RNA, 23 nt, Human
cuaaaguacugagcagugauauu

SEQ ID NO: 3439421 - RNA, 19 nt, Human
cuaaaguauuuuuauaaau

SEQ ID NO: 3439422 - RNA, 19 nt, Human
cuaaaguguauuuuuuuac

SEQ ID NO: 3439423 - RNA, 19 nt, Human
cuaaaguguguuguugcuu

SEQ ID NO: 3439424 - RNA, 16 nt, Human
cuaaaguuauauuuca

SEQ ID NO: 3439425 - RNA, 13 nt, Human
cuaaaguucuaag

SEQ ID NO: 3439426 - RNA, 15 nt, Human
cuaaaguuguacuuu

SEQ ID NO: 3439427 - RNA, 19 nt, Human
cuaaaguuguacuuuaaaa

SEQ ID NO: 3439428 - RNA, 13 nt, Human
cuaaaguuuacag

SEQ ID NO: 3439429 - RNA, 14 nt, Human
cuaaaguuuacagu

SEQ ID NO: 3439430 - RNA, 18 nt, Human
cuaaaguuuacaguaaau

SEQ ID NO: 3439431 - RNA, 15 nt, Human
cuaaauaaaauauaa

SEQ ID NO: 3439432 - RNA, 19 nt, Human
cuaaauaaaauauaauugu

SEQ ID NO: 3439433 - RNA, 13 nt, Human
cuaaauaaaaugc

SEQ ID NO: 3439434 - RNA, 22 nt, Human
cuaaauaaacacauagauucac

SEQ ID NO: 3439435 - RNA, 16 nt, Human
cuaaauaaagauauug

SEQ ID NO: 3439436 - RNA, 19 nt, Human
cuaaauaccucaaucaguc

SEQ ID NO: 3439437 - RNA, 17 nt, Human
cuaaauacuugcuccau

SEQ ID NO: 3439438 - RNA, 14 nt, Human
cuaaauagcaugua

SEQ ID NO: 3439439 - RNA, 17 nt, Human
cuaaauagcauguauug

SEQ ID NO: 3439440 - RNA, 22 nt, Human
cuaaauagcauguauugugucu

SEQ ID NO: 3439441 - RNA, 17 nt, Human
cuaaauauauuuuaaga

SEQ ID NO: 3439442 - RNA, 15 nt, Human
cuaaauauuuccuua

SEQ ID NO: 3439443 - RNA, 15 nt, Human
cuaaaucagagacaa

SEQ ID NO: 3439444 - RNA, 19 nt, Human
cuaaauccauuuggaaauc

SEQ ID NO: 3439445 - RNA, 20 nt, Human
cuaaauccauuuggaaaucu

SEQ ID NO: 3439446 - RNA, 16 nt, Human
cuaaaucuauuuauua

SEQ ID NO: 3439447 - RNA, 18 nt, Human
cuaaaucuguaagcucuu

SEQ ID NO: 3439448 - RNA, 14 nt, Human
cuaaaugaauguuu

SEQ ID NO: 3439449 - RNA, 19 nt, Human
cuaaaugccuaauaaacaa

SEQ ID NO: 3439450 - RNA, 20 nt, Human
cuaaaugccuaguuuuuagu

SEQ ID NO: 3439451 - RNA, 15 nt, Human
cuaaauggaaccacu

SEQ ID NO: 3439452 - RNA, 19 nt, Human
cuaaauggucgcccaggag

SEQ ID NO: 3439453 - RNA, 21 nt, Human
cuaaauggucgcccaggagac

SEQ ID NO: 3439454 - RNA, 14 nt, Human
cuaaauguaacagu

SEQ ID NO: 3439455 - RNA, 18 nt, Human
cuaaaugugcaauagaag

SEQ ID NO: 3439456 - RNA, 21 nt, Human
cuaaauguggagaaacuguag

SEQ ID NO: 3439457 - RNA, 17 nt, Human
cuaaauguuaaagaugu

SEQ ID NO: 3439458 - RNA, 15 nt, Human
cuaaauuaacuuuuu

SEQ ID NO: 3439459 - RNA, 15 nt, Human
cuaaauuauuuacug

SEQ ID NO: 3439460 - RNA, 23 nt, Human
cuaaauuauuuacugcaaaaaga

SEQ ID NO: 3439461 - RNA, 15 nt, Human
cuaaauucuuuauuu

SEQ ID NO: 3439462 - RNA, 19 nt, Human
cuaaauucuuuauuucugu

SEQ ID NO: 3439463 - RNA, 12 nt, Human
cuaaauugaaua

SEQ ID NO: 3439464 - RNA, 14 nt, Human
cuaaauugauguug

SEQ ID NO: 3439465 - RNA, 18 nt, Human
cuaaauuguaaacuccug

SEQ ID NO: 3439466 - RNA, 23 nt, Human
cuaaauuugaauguuaagcagau

SEQ ID NO: 3439467 - RNA, 15 nt, Human
cuaaauuugauacuu

SEQ ID NO: 3439468 - RNA, 16 nt, Human
cuaaauuugauacuua

SEQ ID NO: 3439469 - RNA, 18 nt, Human
cuaaauuugauacuuaua

SEQ ID NO: 3439470 - RNA, 21 nt, Human
cuaaauuugauacuuauauuu

SEQ ID NO: 3439471 - RNA, 14 nt, Human
cuaaauuuuaaagc

SEQ ID NO: 3439472 - RNA, 20 nt, Human
cuaaauuuuauaucuuguag

SEQ ID NO: 3439473 - RNA, 17 nt, Human
cuaaauuuuccuguccu

SEQ ID NO: 3439474 - RNA, 19 nt, Human
cuaaauuuuccuguccucu

SEQ ID NO: 3439475 - RNA, 13 nt, Human
cuaaauuuucuga

SEQ ID NO: 3439476 - RNA, 16 nt, Human
cuaacacacagcuccc

SEQ ID NO: 3439477 - RNA, 14 nt, Human
cuaacacagcaugu

SEQ ID NO: 3439478 - RNA, 17 nt, Human
cuaacacauuaucggga

SEQ ID NO: 3439479 - RNA, 13 nt, Human
cuaacaccagcgu

SEQ ID NO: 3439480 - RNA, 21 nt, Human
cuaacaccagcguuugagggg

SEQ ID NO: 3439481 - RNA, 20 nt, Human
cuaacacucagaagccuggg

SEQ ID NO: 3439482 - RNA, 20 nt, Human
cuaacacuggcauguucaaa

SEQ ID NO: 3439483 - RNA, 14 nt, Human
cuaacacuggcccc

SEQ ID NO: 3439484 - RNA, 14 nt, Human
cuaacacuuacccc

SEQ ID NO: 3439485 - RNA, 23 nt, Human
cuaacacuuaccccauggcugca

SEQ ID NO: 3439486 - RNA, 12 nt, Human
cuaacagcccuc

SEQ ID NO: 3439487 - RNA, 15 nt, Human
cuaacaggggcuggu

SEQ ID NO: 3439488 - RNA, 19 nt, Human
cuaacauaccguuuauaau

SEQ ID NO: 3439489 - RNA, 12 nt, Human
cuaacauauaau

SEQ ID NO: 3439490 - RNA, 15 nt, Human
cuaacaugaagaccu

SEQ ID NO: 3439491 - RNA, 15 nt, Human
cuaacauuauauugc

SEQ ID NO: 3439492 - RNA, 17 nt, Human
cuaacauuauuacuuuu

SEQ ID NO: 3439493 - RNA, 18 nt, Human
cuaacauuuuaaauaaaa

SEQ ID NO: 3439494 - RNA, 22 nt, Human
cuaaccaaaucucucaaaucug

SEQ ID NO: 3439495 - RNA, 10 nt, Human
cuaaccaagu

SEQ ID NO: 3439496 - RNA, 15 nt, Human
cuaaccacacagccu

SEQ ID NO: 3439497 - RNA, 13 nt, Human
cuaaccacaucaa

SEQ ID NO: 3439498 - RNA, 16 nt, Human
cuaaccagcagaaaug

SEQ ID NO: 3439499 - RNA, 12 nt, Human
cuaaccagggcc

SEQ ID NO: 3439500 - RNA, 19 nt, Human
cuaaccccaacgcacagga

SEQ ID NO: 3439501 - RNA, 13 nt, Human
cuaaccccuucca

SEQ ID NO: 3439502 - RNA, 14 nt, Human
cuaaccccuuccag

SEQ ID NO: 3439503 - RNA, 13 nt, Human
cuaaccccuuucc

SEQ ID NO: 3439504 - RNA, 20 nt, Human
cuaacccucccauggcaccu

SEQ ID NO: 3439505 - RNA, 13 nt, Human
cuaaccucgcccu

SEQ ID NO: 3439506 - RNA, 17 nt, Human
cuaaccucgcccucucc

SEQ ID NO: 3439507 - RNA, 21 nt, Human
cuaaccugccgagaguccauc

SEQ ID NO: 3439508 - RNA, 12 nt, Human
cuaaccuguguc

SEQ ID NO: 3439509 - RNA, 22 nt, Human
cuaaccuuauccugcauuguua

SEQ ID NO: 3439510 - RNA, 12 nt, Human
cuaaccuugaau

SEQ ID NO: 3439511 - RNA, 13 nt, Human
cuaaccuuuacau

SEQ ID NO: 3439512 - RNA, 13 nt, Human
cuaacgccugagc

SEQ ID NO: 3439513 - RNA, 20 nt, Human
cuaacgccugagcccaggga

SEQ ID NO: 3439514 - RNA, 16 nt, Human
cuaacggugcucaggg

SEQ ID NO: 3439515 - RNA, 17 nt, Human
cuaacggugcucagggg

SEQ ID NO: 3439516 - RNA, 23 nt, Human
cuaacuacaaagguuuaaaugaa

SEQ ID NO: 3439517 - RNA, 23 nt, Human
cuaacuagacaccaaaguucuaa

SEQ ID NO: 3439518 - RNA, 15 nt, Human
cuaacucaccuaacu

SEQ ID NO: 3439519 - RNA, 17 nt, Human
cuaacucauacugugcu

SEQ ID NO: 3439520 - RNA, 14 nt, Human
cuaacuccagugaa

SEQ ID NO: 3439521 - RNA, 14 nt, Human
cuaacuccugagaa

SEQ ID NO: 3439522 - RNA, 14 nt, Human
cuaacucugaugua

SEQ ID NO: 3439523 - RNA, 15 nt, Human
cuaacucugauguaa

SEQ ID NO: 3439524 - RNA, 21 nt, Human
cuaacucugauguaaaugaag

SEQ ID NO: 3439525 - RNA, 14 nt, Human
cuaacuggacuggu

SEQ ID NO: 3439526 - RNA, 15 nt, Human
cuaacuguacauuuc

SEQ ID NO: 3439527 - RNA, 13 nt, Human
cuaacuguaucuu

SEQ ID NO: 3439528 - RNA, 21 nt, Human
cuaacuuacaaagauucucua

SEQ ID NO: 3439529 - RNA, 15 nt, Human
cuaacuucaccauau

SEQ ID NO: 3439530 - RNA, 18 nt, Human
cuaacuucuaaaacugua

SEQ ID NO: 3439531 - RNA, 18 nt, Human
cuaacuugcuuaaaugug

SEQ ID NO: 3439532 - RNA, 20 nt, Human
cuaacuuggagccccagugc

SEQ ID NO: 3439533 - RNA, 20 nt, Human
cuaacuuuagaagugcauuu

SEQ ID NO: 3439534 - RNA, 23 nt, Human
cuaacuuuagaagugcauuucug

SEQ ID NO: 3439535 - RNA, 15 nt, Human
cuaagaaaagauuuu

SEQ ID NO: 3439536 - RNA, 20 nt, Human
cuaagaaaagauuuuaauca

SEQ ID NO: 3439537 - RNA, 13 nt, Human
cuaagaaacauug

SEQ ID NO: 3439538 - RNA, 19 nt, Human
cuaagaaacauuggaagca

SEQ ID NO: 3439539 - RNA, 22 nt, Human
cuaagaaacauuggaagcaggu

SEQ ID NO: 3439540 - RNA, 14 nt, Human
cuaagaaacuuuug

SEQ ID NO: 3439541 - RNA, 15 nt, Human
cuaagaaagaacacg

SEQ ID NO: 3439542 - RNA, 16 nt, Human
cuaagaaagaggagug

SEQ ID NO: 3439543 - RNA, 19 nt, Human
cuaagaaagaggagugcuu

SEQ ID NO: 3439544 - RNA, 21 nt, Human
cuaagaaagaggagugcuugu

SEQ ID NO: 3439545 - RNA, 20 nt, Human
cuaagaaauaugcacaauag

SEQ ID NO: 3439546 - RNA, 21 nt, Human
cuaagaaaucaaguaaugaau

SEQ ID NO: 3439547 - RNA, 21 nt, Human
cuaagaaauugaauacuuuga

SEQ ID NO: 3439548 - RNA, 17 nt, Human
cuagcacaauuugcacu

SEQ ID NO: 3439549 - RNA, 16 nt, Human
cuagcacagcucccuu

SEQ ID NO: 3439550 - RNA, 14 nt, Human
cuagcacaugcuuc

SEQ ID NO: 3439551 - RNA, 18 nt, Human
cuagcaccugccagggag

SEQ ID NO: 3439552 - RNA, 17 nt, Human
cuagcacucacaugcug

SEQ ID NO: 3439553 - RNA, 18 nt, Human
cuagcacucauuuucuau

SEQ ID NO: 3439554 - RNA, 15 nt, Human
cuagcacuggccugc

SEQ ID NO: 3439555 - RNA, 16 nt, Human
cuagcacuggccugca

SEQ ID NO: 3439556 - RNA, 19 nt, Human
cuagcagagcaggggcagg

SEQ ID NO: 3439557 - RNA, 12 nt, Human
cuagcagcaccg

SEQ ID NO: 3439558 - RNA, 20 nt, Human
cuagcagcaccguucugugc

SEQ ID NO: 3439559 - RNA, 12 nt, Human
cuagcagcaggg

SEQ ID NO: 3439560 - RNA, 20 nt, Human
cuagcagcccacccugcugc

SEQ ID NO: 3439561 - RNA, 17 nt, Human
cuagcagugaacuauuu

SEQ ID NO: 3439562 - RNA, 13 nt, Human
cuagcaguggcag

SEQ ID NO: 3439563 - RNA, 17 nt, Human
cuagcauaucugccuuu

SEQ ID NO: 3439564 - RNA, 18 nt, Human
cuagcauaucugccuuua

SEQ ID NO: 3439565 - RNA, 16 nt, Human
cuagcaucucaugagu

SEQ ID NO: 3439566 - RNA, 20 nt, Human
cuaagacucaaauguucuaa

SEQ ID NO: 3439567 - RNA, 18 nt, Human
cuaagacuuacucuaaga

SEQ ID NO: 3439568 - RNA, 19 nt, Human
cuaagacuuacucuaagau

SEQ ID NO: 3439569 - RNA, 22 nt, Human
cuaagacuuacucuaagaucuu

SEQ ID NO: 3439570 - RNA, 23 nt, Human
cuaagacuuacucuaagaucuua

SEQ ID NO: 3439571 - RNA, 13 nt, Human
cuaagacuuccua

SEQ ID NO: 3439572 - RNA, 11 nt, Human
cuaagagaagu

SEQ ID NO: 3439573 - RNA, 15 nt, Human
cuaagagaaguagaa

SEQ ID NO: 3439574 - RNA, 21 nt, Human
cuaagagaaguuguaaaguau

SEQ ID NO: 3439575 - RNA, 15 nt, Human
cuaagagaaugaauu

SEQ ID NO: 3439576 - RNA, 15 nt, Human
cuaagagagaaugag

SEQ ID NO: 3439577 - RNA, 16 nt, Human
cuaagagauucugauu

SEQ ID NO: 3439578 - RNA, 11 nt, Human
cuaagagccau

SEQ ID NO: 3439579 - RNA, 18 nt, Human
cuaagagcuagcgcugcc

SEQ ID NO: 3439580 - RNA, 19 nt, Human
cuaagagcuagcgcugccg

SEQ ID NO: 3439581 - RNA, 20 nt, Human
cuaagagcuagcgcugccgc

SEQ ID NO: 3439582 - RNA, 18 nt, Human
cuaagaggcugcccuccu

SEQ ID NO: 3439583 - RNA, 13 nt, Human
cuaagagggaggg

SEQ ID NO: 3439584 - RNA, 15 nt, Human
cuaagagggagggag

SEQ ID NO: 3439585 - RNA, 23 nt, Human
cuaagagggagggagggcuccag

SEQ ID NO: 3439586 - RNA, 23 nt, Human
cuaagauauacuuguuuuuguaa

SEQ ID NO: 3439587 - RNA, 12 nt, Human
cuaagaucuuag

SEQ ID NO: 3439588 - RNA, 14 nt, Human
cuaagaucuuagau

SEQ ID NO: 3439589 - RNA, 16 nt, Human
cuaagaucuuagauuc

SEQ ID NO: 3439590 - RNA, 18 nt, Human
cuaagaugugauauucua

SEQ ID NO: 3439591 - RNA, 21 nt, Human
cuaagaugugauauucuaaga

SEQ ID NO: 3439592 - RNA, 14 nt, Human
cuaagauguuauau

SEQ ID NO: 3439593 - RNA, 18 nt, Human
cuaagauguuauauuuuu

SEQ ID NO: 3439594 - RNA, 17 nt, Human
cuaagauguucacugug

SEQ ID NO: 3439595 - RNA, 23 nt, Human
cuaagauuacaaaucagaaguca

SEQ ID NO: 3439596 - RNA, 15 nt, Human
cuaagauucuaaagg

SEQ ID NO: 3439597 - RNA, 16 nt, Human
cuaagauucuaaaggu

SEQ ID NO: 3439598 - RNA, 18 nt, Human
cuaagauucuaaaggucc

SEQ ID NO: 3439599 - RNA, 13 nt, Human
cuaagauucuaau

SEQ ID NO: 3439600 - RNA, 12 nt, Human
cuaagauucuag

SEQ ID NO: 3439601 - RNA, 14 nt, Human
cuaagauucuagau

SEQ ID NO: 3439602 - RNA, 15 nt, Human
cuaagauucuagauc

SEQ ID NO: 3439603 - RNA, 12 nt, Human
cuaagauucuuu

SEQ ID NO: 3439604 - RNA, 23 nt, Human
cuaagauucuuuuaaauuagaaa

SEQ ID NO: 3439605 - RNA, 18 nt, Human
cuaagcaaaaugugauau

SEQ ID NO: 3439606 - RNA, 15 nt, Human
cuaagcaagcuaacc

SEQ ID NO: 3439607 - RNA, 13 nt, Human
cuaagcaauuucu

SEQ ID NO: 3439608 - RNA, 15 nt, Human
cuaagcaauuucuug

SEQ ID NO: 3439609 - RNA, 20 nt, Human
cuaagcacgggccauaugaa

SEQ ID NO: 3439610 - RNA, 17 nt, Human
cuaagcagaaagugccu

SEQ ID NO: 3439611 - RNA, 23 nt, Human
cuaagcagaaagugccuuucagg

SEQ ID NO: 3439612 - RNA, 14 nt, Human
cuaagcagaggagg

SEQ ID NO: 3439613 - RNA, 19 nt, Human
cuaagcagaggaggggccg

SEQ ID NO: 3439614 - RNA, 17 nt, Human
cuaagcagcauuucuga

SEQ ID NO: 3439615 - RNA, 14 nt, Human
cuaagcaucuaagu

SEQ ID NO: 3439616 - RNA, 11 nt, Human
cuaagccaagg

SEQ ID NO: 3439617 - RNA, 14 nt, Human
cuaagccaagggcc

SEQ ID NO: 3439618 - RNA, 18 nt, Human
cuaagccaagggccucuu

SEQ ID NO: 3439619 - RNA, 19 nt, Human
cuaagccagcaccggacca

SEQ ID NO: 3439620 - RNA, 14 nt, Human
cuaagccagccugg

SEQ ID NO: 3439621 - RNA, 22 nt, Human
cuaagccagcugcccccagagc

SEQ ID NO: 3439622 - RNA, 20 nt, Human
cuaagccugaaggggcgucu

SEQ ID NO: 3439623 - RNA, 13 nt, Human
cuaagccuguggc

SEQ ID NO: 3439624 - RNA, 16 nt, Human
cuaagccuuuccauaa

SEQ ID NO: 3439625 - RNA, 14 nt, Human
cuaagcuaggaaug

SEQ ID NO: 3439626 - RNA, 13 nt, Human
cuaagcugcagcu

SEQ ID NO: 3439627 - RNA, 16 nt, Human
cuaagcugcagcuucc

SEQ ID NO: 3439628 - RNA, 22 nt, Human
cuaagcuuugccagcugcugcu

SEQ ID NO: 3439629 - RNA, 15 nt, Human
cuaaggaaccuuccu

SEQ ID NO: 3439630 - RNA, 23 nt, Human
cuaaggaagaucacuuugcucug

SEQ ID NO: 3439631 - RNA, 19 nt, Human
cuaaggacauuucccaggg

SEQ ID NO: 3439632 - RNA, 20 nt, Human
cuaaggaccugaaauuccaa

SEQ ID NO: 3439633 - RNA, 17 nt, Human
cuaaggacuuguuagau

SEQ ID NO: 3439634 - RNA, 20 nt, Human
cuaaggaggggaaaaaaaug

SEQ ID NO: 3439635 - RNA, 18 nt, Human
cuaaggaucucucaggag

SEQ ID NO: 3439636 - RNA, 20 nt, Human
cuaaggaucucucaggagca

SEQ ID NO: 3439637 - RNA, 17 nt, Human
cuaaggaugcuaaaccu

SEQ ID NO: 3439638 - RNA, 18 nt, Human
cuaaggaugcuaaaccuu

SEQ ID NO: 3439639 - RNA, 18 nt, Human
cuaaggaugucacagggc

SEQ ID NO: 3439640 - RNA, 23 nt, Human
cuaaggccauggcaucccuuuuu

SEQ ID NO: 3439641 - RNA, 19 nt, Human
cuaaggccgaagaaggguc

SEQ ID NO: 3439642 - RNA, 14 nt, Human
cuaaggccuaggau

SEQ ID NO: 3439643 - RNA, 20 nt, Human
cuaaggccuaggauucuaaa

SEQ ID NO: 3439644 - RNA, 22 nt, Human
cuaaggccuaggauucuaaaau

SEQ ID NO: 3439645 - RNA, 20 nt, Human
cuaaggcguggagcugccug

SEQ ID NO: 3439646 - RNA, 22 nt, Human
cuaaggcucuaugagucuagau

SEQ ID NO: 3439647 - RNA, 15 nt, Human
cuaaggcucugagag

SEQ ID NO: 3439648 - RNA, 20 nt, Human
cuaaggcucugagagucuag

SEQ ID NO: 3439649 - RNA, 15 nt, Human
cuaagggaagacauu

SEQ ID NO: 3439650 - RNA, 22 nt, Human
cuaagggagagugguauuugca

SEQ ID NO: 3439651 - RNA, 11 nt, Human
cuaagggggag

SEQ ID NO: 3439652 - RNA, 18 nt, Human
cuaagggucgaaagcucu

SEQ ID NO: 3439653 - RNA, 22 nt, Human
cuaagggucgaaagcucuagaa

SEQ ID NO: 3439654 - RNA, 14 nt, Human
cuaagggugggugc

SEQ ID NO: 3439655 - RNA, 19 nt, Human
cuaagguccgguguucuaa

SEQ ID NO: 3439656 - RNA, 13 nt, Human
cuaagguccuaag

SEQ ID NO: 3439657 - RNA, 21 nt, Human
cuaaggucuuggaacuugccu

SEQ ID NO: 3439658 - RNA, 15 nt, Human
cuaaggugcuaaauc

SEQ ID NO: 3439659 - RNA, 15 nt, Human
cuaaggugugcucug

SEQ ID NO: 3439660 - RNA, 23 nt, Human
cuaaguaaaaccacagcaguuga

SEQ ID NO: 3439661 - RNA, 14 nt, Human
cuaaguaaauacaa

SEQ ID NO: 3439662 - RNA, 17 nt, Human
cuaaguaaauacaauuu

SEQ ID NO: 3439663 - RNA, 18 nt, Human
cuaaguaaauacaauuuu

SEQ ID NO: 3439664 - RNA, 17 nt, Human
cuaaguaaauaggaauu

SEQ ID NO: 3439665 - RNA, 17 nt, Human
cuaaguaaaucucuucu

SEQ ID NO: 3439666 - RNA, 14 nt, Human
cuaaguauuuccca

SEQ ID NO: 3439667 - RNA, 15 nt, Human
cuaagucaguaccca

SEQ ID NO: 3439668 - RNA, 15 nt, Human
cuaagucauguaugu

SEQ ID NO: 3439669 - RNA, 23 nt, Human
cuaaguccaguccaguccuaucu

SEQ ID NO: 3439670 - RNA, 17 nt, Human
cuaagucucuuuuuuac

SEQ ID NO: 3439671 - RNA, 14 nt, Human
cuaagucuuuccau

SEQ ID NO: 3439672 - RNA, 14 nt, Human
cuaagugaaaaggu

SEQ ID NO: 3439673 - RNA, 23 nt, Human
cuaagugaaauaagccagacauc

SEQ ID NO: 3439674 - RNA, 19 nt, Human
cuaagugaaauuucuagcc

SEQ ID NO: 3439675 - RNA, 18 nt, Human
cuaagugaggaugaaaaa

SEQ ID NO: 3439676 - RNA, 17 nt, Human
cuaagugcuuauuacau

SEQ ID NO: 3439677 - RNA, 14 nt, Human
cuaagugugaacug

SEQ ID NO: 3439678 - RNA, 17 nt, Human
cuaaguguuucauaaau

SEQ ID NO: 3439679 - RNA, 18 nt, Human
cuaaguucuuagauaucu

SEQ ID NO: 3439680 - RNA, 21 nt, Human
cuaaguugaguauauuauaau

SEQ ID NO: 3439681 - RNA, 15 nt, Human
cuaaguuucuaagau

SEQ ID NO: 3439682 - RNA, 18 nt, Human
cuaaguuucuaagauucu

SEQ ID NO: 3439683 - RNA, 19 nt, Human
cuaaguuucuaagauucua

SEQ ID NO: 3439684 - RNA, 21 nt, Human
cuaaguuucuaagauucuaaa

SEQ ID NO: 3439685 - RNA, 23 nt, Human
cuaaguuucuaagauucuaaagg

SEQ ID NO: 3439686 - RNA, 21 nt, Human
cuaaguuuuaggguacaugug

SEQ ID NO: 3439687 - RNA, 20 nt, Human
cuaaguuuuuauggcuuuug

SEQ ID NO: 3439688 - RNA, 23 nt, Human
cuaaguuuuuauggcuuuugugc

SEQ ID NO: 3439689 - RNA, 20 nt, Human
cuaauaaaaagcuuuugucu

SEQ ID NO: 3439690 - RNA, 22 nt, Human
cuaauaaaaagcuuuugucuac

SEQ ID NO: 3439691 - RNA, 13 nt, Human
cuaauaaaaaggu

SEQ ID NO: 3439692 - RNA, 19 nt, Human
cuaauaaaaaggugaccau

SEQ ID NO: 3439693 - RNA, 11 nt, Human
cuaauaaaacu

SEQ ID NO: 3439694 - RNA, 11 nt, Human
cuaauaaaaua

SEQ ID NO: 3439695 - RNA, 16 nt, Human
cuaauaaaauaucauu

SEQ ID NO: 3439696 - RNA, 17 nt, Human
cuaauaaaauaucauuc

SEQ ID NO: 3439697 - RNA, 18 nt, Human
cuaauaaaauaucauuca

SEQ ID NO: 3439698 - RNA, 21 nt, Human
cuaauaaaauaucauucagca

SEQ ID NO: 3439699 - RNA, 13 nt, Human
cuaauaaaauauu

SEQ ID NO: 3439700 - RNA, 15 nt, Human
cuaauaaaauauuuu

SEQ ID NO: 3439701 - RNA, 16 nt, Human
cuaauaaaauauuuuc

SEQ ID NO: 3439702 - RNA, 19 nt, Human
cuaauaaaauauuuucugu

SEQ ID NO: 3439703 - RNA, 23 nt, Human
cuaauaaaauauuuucugugugu

SEQ ID NO: 3439704 - RNA, 15 nt, Human
cuaauaaacuaauaa

SEQ ID NO: 3439705 - RNA, 21 nt, Human
cuaauaaacuaauaauugcag

SEQ ID NO: 3439706 - RNA, 11 nt, Human
cuaauaaauac

SEQ ID NO: 3439707 - RNA, 12 nt, Human
cuaauaaauuau

SEQ ID NO: 3439708 - RNA, 17 nt, Human
cuaggcugggugcccac

SEQ ID NO: 3439709 - RNA, 18 nt, Human
cuaggcugggugcccaca

SEQ ID NO: 3439710 - RNA, 20 nt, Human
cuaggcugggugcccacagc

SEQ ID NO: 3439711 - RNA, 13 nt, Human
cuagcacaugccc

SEQ ID NO: 3439712 - RNA, 16 nt, Human
cuagcacaugcuucaa

SEQ ID NO: 3439713 - RNA, 22 nt, Human
cuagcaccauuuuaagucccug

SEQ ID NO: 3439714 - RNA, 15 nt, Human
cuagcacucacaugc

SEQ ID NO: 3439715 - RNA, 13 nt, Human
cuagcacuggccu

SEQ ID NO: 3439716 - RNA, 17 nt, Human
cuagcacuuugggaggc

SEQ ID NO: 3439717 - RNA, 21 nt, Human
cuagcagcaccguucugugca

SEQ ID NO: 3439718 - RNA, 22 nt, Human
cuagcagcaccguucugugcac

SEQ ID NO: 3439719 - RNA, 22 nt, Human
cuagcagcagggagggcuucug

SEQ ID NO: 3439720 - RNA, 23 nt, Human
cuagcagcccacccugcugcugg

SEQ ID NO: 3439721 - RNA, 16 nt, Human
cuagcaguaaaagaug

SEQ ID NO: 3439722 - RNA, 22 nt, Human
cuagcagugaugaaaaugaauc

SEQ ID NO: 3439723 - RNA, 18 nt, Human
cuagcaguggcaggcaga

SEQ ID NO: 3439724 - RNA, 18 nt, Human
cuagcauacguacacauu

SEQ ID NO: 3439725 - RNA, 23 nt, Human
cuagcauacguacacauuuuauu

SEQ ID NO: 3439726 - RNA, 16 nt, Human
cuagcaugaagacaga

SEQ ID NO: 3439727 - RNA, 13 nt, Human
cuagcaugccaac

SEQ ID NO: 3439728 - RNA, 23 nt, Human
cuagcauuguaaaauuauuucau

SEQ ID NO: 3439729 - RNA, 19 nt, Human
cuagcauuucccaacacaa

SEQ ID NO: 3439730 - RNA, 18 nt, Human
cuagccaaaccucaccaa

SEQ ID NO: 3439731 - RNA, 20 nt, Human
cuagccaaaccucaccaacu

SEQ ID NO: 3439732 - RNA, 23 nt, Human
cuagccaaaugguuuaacuucug

SEQ ID NO: 3439733 - RNA, 21 nt, Human
cuagccaccaacucuugcagg

SEQ ID NO: 3439734 - RNA, 18 nt, Human
cuagccaccgccuccuac

SEQ ID NO: 3439735 - RNA, 18 nt, Human
cuagccagccccucuucc

SEQ ID NO: 3439736 - RNA, 22 nt, Human
cuagccaggaaguacuuccacc

SEQ ID NO: 3439737 - RNA, 15 nt, Human
cuagccauuccuggu

SEQ ID NO: 3439738 - RNA, 12 nt, Human
cuagcccacccu

SEQ ID NO: 3439739 - RNA, 15 nt, Human
cuagcccacccugcu

SEQ ID NO: 3439740 - RNA, 18 nt, Human
cuagcccacccugcugcc

SEQ ID NO: 3439741 - RNA, 21 nt, Human
cuagcccacccugcugccuuc

SEQ ID NO: 3439742 - RNA, 19 nt, Human
cuagcccagcgcucugccu

SEQ ID NO: 3439743 - RNA, 18 nt, Human
cuagcccaggagagagaa

SEQ ID NO: 3439744 - RNA, 19 nt, Human
cuagcccaggagagagaaa

SEQ ID NO: 3439745 - RNA, 14 nt, Human
cuagcccauggacu

SEQ ID NO: 3439746 - RNA, 19 nt, Human
cuagcccauggacuucaca

SEQ ID NO: 3439747 - RNA, 16 nt, Human
cuagcccgaauacaaa

SEQ ID NO: 3439748 - RNA, 19 nt, Human
cuagcccuccuuuuuccaa

SEQ ID NO: 3439749 - RNA, 16 nt, Human
cuagcccucucccucu

SEQ ID NO: 3439750 - RNA, 16 nt, Human
cuagccgaccucagcc

SEQ ID NO: 3439751 - RNA, 18 nt, Human
cuagccgaccucagccuu

SEQ ID NO: 3439752 - RNA, 19 nt, Human
cuagccgaccucagccuuc

SEQ ID NO: 3439753 - RNA, 20 nt, Human
cuagccgaccucagccuucc

SEQ ID NO: 3439754 - RNA, 19 nt, Human
cuagccgguuccugucccu

SEQ ID NO: 3439755 - RNA, 16 nt, Human
cuagccuauguggauu

SEQ ID NO: 3439756 - RNA, 18 nt, Human
cuagccuauuuaccugca

SEQ ID NO: 3439757 - RNA, 13 nt, Human
cuagccucagggg

SEQ ID NO: 3439758 - RNA, 22 nt, Human
cuagccuuagaagucacacagu

SEQ ID NO: 3439759 - RNA, 19 nt, Human
cuagccuuauccucugauc

SEQ ID NO: 3439760 - RNA, 15 nt, Human
cuagccuuuggcucu

SEQ ID NO: 3439761 - RNA, 20 nt, Human
cuagccuuuggcucuggaga

SEQ ID NO: 3439762 - RNA, 17 nt, Human
ccaggacugggccacuu

SEQ ID NO: 3439763 - RNA, 21 nt, Human
ccaggacuuauuuaaacucug

SEQ ID NO: 3439764 - RNA, 11 nt, Human
ccaggagaagc

SEQ ID NO: 3439765 - RNA, 17 nt, Human
ccaggagaagcucagcu

SEQ ID NO: 3439766 - RNA, 20 nt, Human
ccaggagaaggccaauuccu

SEQ ID NO: 3439767 - RNA, 16 nt, Human
ccaggagacagacaga

SEQ ID NO: 3439768 - RNA, 14 nt, Human
ccaggagagagaaa

SEQ ID NO: 3439769 - RNA, 22 nt, Human
ccaggagagcuuagggucucag

SEQ ID NO: 3439770 - RNA, 23 nt, Human
ccaggagagcuuagggucucagg

SEQ ID NO: 3439771 - RNA, 19 nt, Human
ccaggagcaaauguuucug

SEQ ID NO: 3439772 - RNA, 17 nt, Human
ccaggagcacggcucug

SEQ ID NO: 3439773 - RNA, 22 nt, Human
ccaggagcacggcucugucccc

SEQ ID NO: 3439774 - RNA, 20 nt, Human
ccaggagcauccaccuccuu

SEQ ID NO: 3439775 - RNA, 23 nt, Human
ccaggagcauccaccuccuucuc

SEQ ID NO: 3439776 - RNA, 12 nt, Human
ccaggagcccau

SEQ ID NO: 3439777 - RNA, 15 nt, Human
ccaggagccccgagg

SEQ ID NO: 3439778 - RNA, 14 nt, Human
ccaggagccuccug

SEQ ID NO: 3439779 - RNA, 18 nt, Human
ccaggagccuccugcccu

SEQ ID NO: 3439780 - RNA, 19 nt, Human
ccaggagccuccugcccuu

SEQ ID NO: 3439781 - RNA, 12 nt, Human
ccaggagcucca

SEQ ID NO: 3439782 - RNA, 13 nt, Human
ccaggagcuccag

SEQ ID NO: 3439783 - RNA, 21 nt, Human
ccaggagcuccaguguccuga

SEQ ID NO: 3439784 - RNA, 14 nt, Human
ccaggagcuccccu

SEQ ID NO: 3439785 - RNA, 13 nt, Human
ccaggagcucuuc

SEQ ID NO: 3439786 - RNA, 23 nt, Human
ccaggagcugggcagaaggccaa

SEQ ID NO: 3439787 - RNA, 15 nt, Human
ccaggagcugucacc

SEQ ID NO: 3439788 - RNA, 14 nt, Human
ccaggaggacccag

SEQ ID NO: 3439789 - RNA, 12 nt, Human
ccaggaggccag

SEQ ID NO: 3439790 - RNA, 13 nt, Human
ccaggaggccagc

SEQ ID NO: 3439791 - RNA, 14 nt, Human
ccaggaggccagcc

SEQ ID NO: 3439792 - RNA, 18 nt, Human
ccaggaggccagccuuga

SEQ ID NO: 3439793 - RNA, 15 nt, Human
ccaggaggcugaggu

SEQ ID NO: 3439794 - RNA, 16 nt, Human
ccaggagggacaaagg

SEQ ID NO: 3439795 - RNA, 21 nt, Human
ccaggagggacaaaggagccu

SEQ ID NO: 3439796 - RNA, 17 nt, Human
ccaggagggagcagagg

SEQ ID NO: 3439797 - RNA, 15 nt, Human
ccaggagggcacugg

SEQ ID NO: 3439798 - RNA, 17 nt, Human
ccaggagggcacuggag

SEQ ID NO: 3439799 - RNA, 19 nt, Human
ccaggagggcacuggagcu

SEQ ID NO: 3439800 - RNA, 17 nt, Human
ccaggagggcauccaua

SEQ ID NO: 3439801 - RNA, 20 nt, Human
ccaggagggcauccauacca

SEQ ID NO: 3439802 - RNA, 17 nt, Human
ccaggaggggaacacug

SEQ ID NO: 3439803 - RNA, 21 nt, Human
ccaggagguuuuuuugucaac

SEQ ID NO: 3439804 - RNA, 19 nt, Human
ccaggaguggguggggagu

SEQ ID NO: 3439805 - RNA, 17 nt, Human
ccaggaguuugagacca

SEQ ID NO: 3439806 - RNA, 20 nt, Human
ccaggaguuugaggcugcag

SEQ ID NO: 3439807 - RNA, 21 nt, Human
ccaggaguuugaggcugcagc

SEQ ID NO: 3439808 - RNA, 15 nt, Human
ccaggaguuuggcca

SEQ ID NO: 3439809 - RNA, 18 nt, Human
ccaggaguuuggccagaa

SEQ ID NO: 3439810 - RNA, 21 nt, Human
ccaggauacuggcacagaggu

SEQ ID NO: 3439811 - RNA, 18 nt, Human
ccaggauagagacuggaa

SEQ ID NO: 3439812 - RNA, 21 nt, Human
ccaggaucagauugcauguga

SEQ ID NO: 3439813 - RNA, 14 nt, Human
ccaggaucauggug

SEQ ID NO: 3439814 - RNA, 20 nt, Human
ccaggaucaugguguaauaa

SEQ ID NO: 3439815 - RNA, 17 nt, Human
ccaggauccagaagggg

SEQ ID NO: 3439816 - RNA, 18 nt, Human
ccaggaucguuuuuuccc

SEQ ID NO: 3439817 - RNA, 20 nt, Human
ccaggaugagcaucccagga

SEQ ID NO: 3439818 - RNA, 22 nt, Human
ccaggauggaggggugguccug

SEQ ID NO: 3439819 - RNA, 17 nt, Human
ccaggauggcgcaggaa

SEQ ID NO: 3439820 - RNA, 20 nt, Human
ccaggauuauugucaaagaa

SEQ ID NO: 3439821 - RNA, 21 nt, Human
ccaggcaacuucaguccuggg

SEQ ID NO: 3439822 - RNA, 17 nt, Human
ccaggcaacuugggaac

SEQ ID NO: 3439823 - RNA, 12 nt, Human
ccaggcaaggcu

SEQ ID NO: 3439824 - RNA, 16 nt, Human
ccaggcaaggcugugg

SEQ ID NO: 3439825 - RNA, 14 nt, Human
ccaggcacagcuga

SEQ ID NO: 3439826 - RNA, 15 nt, Human
ccaggcacagcugag

SEQ ID NO: 3439827 - RNA, 23 nt, Human
ccaggcacagcugaguuaugaug

SEQ ID NO: 3439828 - RNA, 13 nt, Human
ccaggcacaggau

SEQ ID NO: 3439829 - RNA, 14 nt, Human
ccaggcacaggcag

SEQ ID NO: 3439830 - RNA, 15 nt, Human
ccaggcacaggcagg

SEQ ID NO: 3439831 - RNA, 20 nt, Human
ccaggcacaggcagggcagg

SEQ ID NO: 3439832 - RNA, 17 nt, Human
ccaggcaccaaaagaag

SEQ ID NO: 3439833 - RNA, 19 nt, Human
ccaggcacccagcuuuguc

SEQ ID NO: 3439834 - RNA, 17 nt, Human
ccaggcacccccuggag

SEQ ID NO: 3439835 - RNA, 19 nt, Human
ccaggcacccccuggagag

SEQ ID NO: 3439836 - RNA, 14 nt, Human
ccaggcacccuucu

SEQ ID NO: 3439837 - RNA, 16 nt, Human
ccaggcaccucuuccu

SEQ ID NO: 3439838 - RNA, 20 nt, Human
ccaggcacgaacccaccugc

SEQ ID NO: 3439839 - RNA, 22 nt, Human
ccaggcacgaacccaccugcug

SEQ ID NO: 3439840 - RNA, 23 nt, Human
ccaggcagaucugugccccaugc

SEQ ID NO: 3439841 - RNA, 12 nt, Human
ccaggcagccuc

SEQ ID NO: 3439842 - RNA, 17 nt, Human
ccaggcagccucugggg

SEQ ID NO: 3439843 - RNA, 23 nt, Human
ccaggcagccucugucaggccuu

SEQ ID NO: 3439844 - RNA, 21 nt, Human
ccaggcaggcuaaggcgugga

SEQ ID NO: 3439845 - RNA, 10 nt, Human
ccaggcaggg

SEQ ID NO: 3439846 - RNA, 23 nt, Human
ccaggcagggccaacccuucucc

SEQ ID NO: 3439847 - RNA, 14 nt, Human
ccaggcagguagcc

SEQ ID NO: 3439848 - RNA, 17 nt, Human
ccaggcaggugccugga

SEQ ID NO: 3439849 - RNA, 17 nt, Human
ccaggcagucgggggcu

SEQ ID NO: 3439850 - RNA, 20 nt, Human
ccaggcagucgggggcuggc

SEQ ID NO: 3439851 - RNA, 22 nt, Human
ccaggcagucgggggcuggccu

SEQ ID NO: 3439852 - RNA, 23 nt, Human
ccaggcagucgggggcuggccua

SEQ ID NO: 3439853 - RNA, 18 nt, Human
ccaggcauuccccaggag

SEQ ID NO: 3439854 - RNA, 15 nt, Human
cucacucccuuccca

SEQ ID NO: 3439855 - RNA, 23 nt, Human
cucacucccuucuaccugccacu

SEQ ID NO: 3439856 - RNA, 15 nt, Human
cucacuccuaccugg

SEQ ID NO: 3439857 - RNA, 16 nt, Human
cucacuccuaccuggu

SEQ ID NO: 3439858 - RNA, 17 nt, Human
cucacuccuaccuggua

SEQ ID NO: 3439859 - RNA, 20 nt, Human
cucacuccuguuacuuaccu

SEQ ID NO: 3439860 - RNA, 13 nt, Human
cucacuccuugaa

SEQ ID NO: 3439861 - RNA, 13 nt, Human
cucacuccuuuua

SEQ ID NO: 3439862 - RNA, 19 nt, Human
cucacuccuuuuaaagaaa

SEQ ID NO: 3439863 - RNA, 12 nt, Human
cucacucucagg

SEQ ID NO: 3439864 - RNA, 13 nt, Human
cucacucucagga

SEQ ID NO: 3439865 - RNA, 17 nt, Human
cucacucugcuaccuug

SEQ ID NO: 3439866 - RNA, 11 nt, Human
cucacucuggg

SEQ ID NO: 3439867 - RNA, 14 nt, Human
cucacucugggcug

SEQ ID NO: 3439868 - RNA, 11 nt, Human
cucacucuguc

SEQ ID NO: 3439869 - RNA, 12 nt, Human
cucacucugucg

SEQ ID NO: 3439870 - RNA, 15 nt, Human
cucacucuguuuccu

SEQ ID NO: 3439871 - RNA, 14 nt, Human
cucacucuugccaa

SEQ ID NO: 3439872 - RNA, 16 nt, Human
cucacucuugccaacc

SEQ ID NO: 3439873 - RNA, 17 nt, Human
cucacugaaaacaucug

SEQ ID NO: 3439874 - RNA, 19 nt, Human
cucacugaaaacaucugga

SEQ ID NO: 3439875 - RNA, 23 nt, Human
cucacugaaacauggcuguguuu

SEQ ID NO: 3439876 - RNA, 12 nt, Human
cucacugaagcc

SEQ ID NO: 3439877 - RNA, 15 nt, Human
cucacugagcacugu

SEQ ID NO: 3439878 - RNA, 16 nt, Human
cucacugagcacuguu

SEQ ID NO: 3439879 - RNA, 17 nt, Human
cucacugagcacuguuu

SEQ ID NO: 3439880 - RNA, 18 nt, Human
cucacugagcacuguuuu

SEQ ID NO: 3439881 - RNA, 15 nt, Human
cucacugcagccuca

SEQ ID NO: 3439882 - RNA, 16 nt, Human
cucacugcagccucga

SEQ ID NO: 3439883 - RNA, 20 nt, Human
cucacugcauccuccgccuc

SEQ ID NO: 3439884 - RNA, 19 nt, Human
cucacugccaggccagccu

SEQ ID NO: 3439885 - RNA, 20 nt, Human
cucacugccaggccagccuc

SEQ ID NO: 3439886 - RNA, 21 nt, Human
cucacugccaggccagccucc

SEQ ID NO: 3439887 - RNA, 19 nt, Human
cucacugccaugccagcuu

SEQ ID NO: 3439888 - RNA, 18 nt, Human
cucacugcccgcacaccc

SEQ ID NO: 3439889 - RNA, 14 nt, Human
cucacugcucaaga

SEQ ID NO: 3439890 - RNA, 16 nt, Human
cucacugcucaagaag

SEQ ID NO: 3439891 - RNA, 19 nt, Human
cucacugcucaagaagaca

SEQ ID NO: 3439892 - RNA, 15 nt, Human
cucacugcucccuga

SEQ ID NO: 3439893 - RNA, 17 nt, Human
cucacugcucccugaag

SEQ ID NO: 3439894 - RNA, 13 nt, Human
cucacuggcagcc

SEQ ID NO: 3439895 - RNA, 18 nt, Human
cucacuggcagccccagc

SEQ ID NO: 3439896 - RNA, 21 nt, Human
cucacuggccaucccucgugg

SEQ ID NO: 3439897 - RNA, 15 nt, Human
cucacuggcucuccu

SEQ ID NO: 3439898 - RNA, 17 nt, Human
cucacuggcucuccugg

SEQ ID NO: 3439899 - RNA, 18 nt, Human
cucacuggcucuccuggc

SEQ ID NO: 3439900 - RNA, 21 nt, Human
cucacuggcucuccuggcccu

SEQ ID NO: 3439901 - RNA, 12 nt, Human
cucacugggugg

SEQ ID NO: 3439902 - RNA, 13 nt, Human
cucacuggguggg

SEQ ID NO: 3439903 - RNA, 12 nt, Human
cucacugucuga

SEQ ID NO: 3439904 - RNA, 13 nt, Human
cucacugucugag

SEQ ID NO: 3439905 - RNA, 20 nt, Human
cucacugugguaaaugccac

SEQ ID NO: 3439906 - RNA, 22 nt, Human
cucacugugguaaaugccacac

SEQ ID NO: 3439907 - RNA, 19 nt, Human
cucacugugucacccaggc

SEQ ID NO: 3439908 - RNA, 21 nt, Human
cucacuguucuauucaucuca

SEQ ID NO: 3439909 - RNA, 14 nt, Human
cucacuguugccca

SEQ ID NO: 3439910 - RNA, 15 nt, Human
cucacuguugcccag

SEQ ID NO: 3439911 - RNA, 21 nt, Human
cucacuuaucccaagagaaug

SEQ ID NO: 3439912 - RNA, 14 nt, Human
cucacuucacccug

SEQ ID NO: 3439913 - RNA, 12 nt, Human
cucacuucaggu

SEQ ID NO: 3439914 - RNA, 20 nt, Human
cucacuucugggcuucaucu

SEQ ID NO: 3439915 - RNA, 21 nt, Human
cucacuuggugauauguccua

SEQ ID NO: 3439916 - RNA, 22 nt, Human
cucacuuuuaaugaacaaaugg

SEQ ID NO: 3439917 - RNA, 18 nt, Human
cucacuuuucccacucca

SEQ ID NO: 3439918 - RNA, 21 nt, Human
cucacuuuucccacuccaagc

SEQ ID NO: 3439919 - RNA, 14 nt, Human
cucacuuuucucca

SEQ ID NO: 3439920 - RNA, 13 nt, Human
cucacuuuuucau

SEQ ID NO: 3439921 - RNA, 19 nt, Human
cucagaaaacaaggaugaa

SEQ ID NO: 3439922 - RNA, 17 nt, Human
cucagaaagccaacaug

SEQ ID NO: 3439923 - RNA, 15 nt, Human
cucagaaagugccug

SEQ ID NO: 3439924 - RNA, 16 nt, Human
cucagaaagugccuga

SEQ ID NO: 3439925 - RNA, 17 nt, Human
cucagaacacauucuuu

SEQ ID NO: 3439926 - RNA, 14 nt, Human
cucagaaccacagc

SEQ ID NO: 3439927 - RNA, 14 nt, Human
cuaggugacagagu

SEQ ID NO: 3439928 - RNA, 18 nt, Human
cuaggugacagagugaga

SEQ ID NO: 3439929 - RNA, 15 nt, Human
cuaggugacauauac

SEQ ID NO: 3439930 - RNA, 16 nt, Human
cuaggugacauauaca

SEQ ID NO: 3439931 - RNA, 22 nt, Human
cuaggugcccuuggaggccagc

SEQ ID NO: 3439932 - RNA, 15 nt, Human
cuaggugggccagcc

SEQ ID NO: 3439933 - RNA, 18 nt, Human
cuaggugggccagccccu

SEQ ID NO: 3439934 - RNA, 19 nt, Human
cuaggugggccagccccuc

SEQ ID NO: 3439935 - RNA, 21 nt, Human
cuaggugggccagccccuccc

SEQ ID NO: 3439936 - RNA, 19 nt, Human
cuagguggguugaaagcca

SEQ ID NO: 3439937 - RNA, 17 nt, Human
cuagguguuuuguucac

SEQ ID NO: 3439938 - RNA, 13 nt, Human
cuagguucuaaaa

SEQ ID NO: 3439939 - RNA, 19 nt, Human
cuagguuuaacucagauca

SEQ ID NO: 3439940 - RNA, 22 nt, Human
cuagguuuaacucagaucacua

SEQ ID NO: 3439941 - RNA, 14 nt, Human
cuagguuuuuuccu

SEQ ID NO: 3439942 - RNA, 21 nt, Human
cuaguaaguaauuaugcacua

SEQ ID NO: 3439943 - RNA, 15 nt, Human
cuaguaagugccuuc

SEQ ID NO: 3439944 - RNA, 17 nt, Human
cuaguaagugccuucca

SEQ ID NO: 3439945 - RNA, 19 nt, Human
cuaguacacuuuuaugagc

SEQ ID NO: 3439946 - RNA, 16 nt, Human
cuaguacuaacuccua

SEQ ID NO: 3439947 - RNA, 20 nt, Human
cuaguacuguguacuguaua

SEQ ID NO: 3439948 - RNA, 16 nt, Human
cuaguacuugaaaaag

SEQ ID NO: 3439949 - RNA, 14 nt, Human
cuaguaguuaaaaa

SEQ ID NO: 3439950 - RNA, 15 nt, Human
cuaguaguucucuug

SEQ ID NO: 3439951 - RNA, 15 nt, Human
cuaguaucaaaagaa

SEQ ID NO: 3439952 - RNA, 17 nt, Human
cuaguauugacaaaaug

SEQ ID NO: 3439953 - RNA, 20 nt, Human
cuaguauuucuaugaaauau

SEQ ID NO: 3439954 - RNA, 20 nt, Human
cuaguauuugaauuaaaacu

SEQ ID NO: 3439955 - RNA, 21 nt, Human
cuaguauuugaauuaaaacuu

SEQ ID NO: 3439956 - RNA, 20 nt, Human
cuagucaacaguacccuggu

SEQ ID NO: 3439957 - RNA, 14 nt, Human
cuagucaccagaga

SEQ ID NO: 3439958 - RNA, 17 nt, Human
cuagucacgcaugcagu

SEQ ID NO: 3439959 - RNA, 16 nt, Human
cuagucagagagagug

SEQ ID NO: 3439960 - RNA, 14 nt, Human
cuaguccagugacc

SEQ ID NO: 3439961 - RNA, 17 nt, Human
cuagucccuuccccucc

SEQ ID NO: 3439962 - RNA, 22 nt, Human
cuagucccuuccccucccuggc

SEQ ID NO: 3439963 - RNA, 23 nt, Human
cuagucccuuccccucccuggcu

SEQ ID NO: 3439964 - RNA, 17 nt, Human
cuaguccuagugaaccu

SEQ ID NO: 3439965 - RNA, 20 nt, Human
cuagucguggagaugucuuc

SEQ ID NO: 3439966 - RNA, 15 nt, Human
cuagucuccuuugca

SEQ ID NO: 3439967 - RNA, 20 nt, Human
cuagucucuaucauuaaagu

SEQ ID NO: 3439968 - RNA, 22 nt, Human
cuagucucuaucauuaaaguuc

SEQ ID NO: 3439969 - RNA, 16 nt, Human
cuagucucuccuguaa

SEQ ID NO: 3439970 - RNA, 16 nt, Human
cuagucucucuggggc

SEQ ID NO: 3439971 - RNA, 13 nt, Human
cuagucugugugc

SEQ ID NO: 3439972 - RNA, 17 nt, Human
cuagucuuuugcuuuug

SEQ ID NO: 3439973 - RNA, 18 nt, Human
cuagugaaagaggcagcu

SEQ ID NO: 3439974 - RNA, 14 nt, Human
cuagugaaugaauc

SEQ ID NO: 3439975 - RNA, 18 nt, Human
cuagugacccacaugcca

SEQ ID NO: 3439976 - RNA, 14 nt, Human
cuagugacccggag

SEQ ID NO: 3439977 - RNA, 19 nt, Human
cuagugacuugugucccau

SEQ ID NO: 3439978 - RNA, 20 nt, Human
cuagugacuugugucccaug

SEQ ID NO: 3439979 - RNA, 16 nt, Human
cuagugagcugggcau

SEQ ID NO: 3439980 - RNA, 19 nt, Human
cuagugauguuuuuaugau

SEQ ID NO: 3439981 - RNA, 23 nt, Human
cuagugcagcugauuuuaacaau

SEQ ID NO: 3439982 - RNA, 21 nt, Human
cuagugcugaagcuuauuaau

SEQ ID NO: 3439983 - RNA, 22 nt, Human
cuagugcugaagcuuauuaaug

SEQ ID NO: 3439984 - RNA, 13 nt, Human
cuagugcugugaa

SEQ ID NO: 3439985 - RNA, 21 nt, Human
cuaguggcucucaguuaaaau

SEQ ID NO: 3439986 - RNA, 14 nt, Human
cuaguggcugucca

SEQ ID NO: 3439987 - RNA, 15 nt, Human
cuaguggcuguccag

SEQ ID NO: 3439988 - RNA, 17 nt, Human
cuaguggcuguccagug

SEQ ID NO: 3439989 - RNA, 18 nt, Human
cuaguggcuguccagugc

SEQ ID NO: 3439990 - RNA, 22 nt, Human
cuaguggcuguccagugcccau

SEQ ID NO: 3439991 - RNA, 15 nt, Human
cuaguggcuuguccu

SEQ ID NO: 3439992 - RNA, 17 nt, Human
cuagugggacagcccag

SEQ ID NO: 3439993 - RNA, 17 nt, Human
cuaguggggucucccuc

SEQ ID NO: 3439994 - RNA, 19 nt, Human
cuaguggggucucccucuc

SEQ ID NO: 3439995 - RNA, 20 nt, Human
cuaguggggucucccucucc

SEQ ID NO: 3439996 - RNA, 21 nt, Human
cuaguggggucucccucuccu

SEQ ID NO: 3439997 - RNA, 23 nt, Human
cuaguggggucucccucuccugc

SEQ ID NO: 3439998 - RNA, 15 nt, Human
cuagugggguuuccu

SEQ ID NO: 3439999 - RNA, 18 nt, Human
cucaaggccucccacagu

SEQ ID NO: 3440000 - RNA, 15 nt, Human
cucaagggacaagga

SEQ ID NO: 3440001 - RNA, 22 nt, Human
cucaaggggccauccuguccca

SEQ ID NO: 3440002 - RNA, 22 nt, Human
cucaagguuuuagguucuaaag

SEQ ID NO: 3440003 - RNA, 20 nt, Human
cucaaguagcauuuacugug

SEQ ID NO: 3440004 - RNA, 19 nt, Human
cucaagucacucccaagcc

SEQ ID NO: 3440005 - RNA, 17 nt, Human
cucaagucuucccugau

SEQ ID NO: 3440006 - RNA, 21 nt, Human
cucaagugauucuccugccuc

SEQ ID NO: 3440007 - RNA, 9 nt, Human
cucaagugc

SEQ ID NO: 3440008 - RNA, 15 nt, Human
cucaagugcccucuc

SEQ ID NO: 3440009 - RNA, 22 nt, Human
cucaagugcccucuccgagcug

SEQ ID NO: 3440010 - RNA, 20 nt, Human
cucaaguguucacaaccugg

SEQ ID NO: 3440011 - RNA, 18 nt, Human
cucaaguucaaggaccaa

SEQ ID NO: 3440012 - RNA, 15 nt, Human
cucaaguucuaagau

SEQ ID NO: 3440013 - RNA, 20 nt, Human
cucaaguucuaagauucuaa

SEQ ID NO: 3440014 - RNA, 22 nt, Human
cucaaguugauuagaaagacca

SEQ ID NO: 3440015 - RNA, 15 nt, Human
cucaauaaaauuaua

SEQ ID NO: 3440016 - RNA, 20 nt, Human
cucaauaaagugcuuuaaaa

SEQ ID NO: 3440017 - RNA, 15 nt, Human
cucaauaagccuugu

SEQ ID NO: 3440018 - RNA, 15 nt, Human
cucaauaugcuuaca

SEQ ID NO: 3440019 - RNA, 17 nt, Human
cucaauauucaauaaag

SEQ ID NO: 3440020 - RNA, 18 nt, Human
cucaauauucaauaaagc

SEQ ID NO: 3440021 - RNA, 19 nt, Human
cucaauauuuuccaugaaa

SEQ ID NO: 3440022 - RNA, 15 nt, Human
cucaauccauguucu

SEQ ID NO: 3440023 - RNA, 18 nt, Human
cucaaucccagcuacuca

SEQ ID NO: 3440024 - RNA, 14 nt, Human
cucaauccuaauuu

SEQ ID NO: 3440025 - RNA, 20 nt, Human
cucaauccuaauuucuccuc

SEQ ID NO: 3440026 - RNA, 12 nt, Human
cucaaugaaaaa

SEQ ID NO: 3440027 - RNA, 16 nt, Human
cucaaugaagccagcu

SEQ ID NO: 3440028 - RNA, 13 nt, Human
cucaaugagcaug

SEQ ID NO: 3440029 - RNA, 16 nt, Human
cucaaugcagccagac

SEQ ID NO: 3440030 - RNA, 14 nt, Human
cucaaugcuguuug

SEQ ID NO: 3440031 - RNA, 15 nt, Human
cucaaugcuuuauuu

SEQ ID NO: 3440032 - RNA, 19 nt, Human
cucaaugcuuuauuuguaa

SEQ ID NO: 3440033 - RNA, 17 nt, Human
cucaauggacuggaagg

SEQ ID NO: 3440034 - RNA, 20 nt, Human
cucaauggacuggaagggga

SEQ ID NO: 3440035 - RNA, 20 nt, Human
cucaauggaguaugucugau

SEQ ID NO: 3440036 - RNA, 22 nt, Human
cucaauggccuaaaacuggccu

SEQ ID NO: 3440037 - RNA, 20 nt, Human
cucaaugugaaucagacccu

SEQ ID NO: 3440038 - RNA, 21 nt, Human
cucaaugugaaucagacccua

SEQ ID NO: 3440039 - RNA, 14 nt, Human
cucaaugugaccag

SEQ ID NO: 3440040 - RNA, 15 nt, Human
cucaaugugaccagg

SEQ ID NO: 3440041 - RNA, 23 nt, Human
cucaauuauuuugcauuuuuucu

SEQ ID NO: 3440042 - RNA, 18 nt, Human
cucaauucccccuggcca

SEQ ID NO: 3440043 - RNA, 15 nt, Human
cucaauuucucccca

SEQ ID NO: 3440044 - RNA, 15 nt, Human
cucaauuuucacugu

SEQ ID NO: 3440045 - RNA, 12 nt, Human
cucaauuuuugg

SEQ ID NO: 3440046 - RNA, 14 nt, Human
cucacaaaggaugc

SEQ ID NO: 3440047 - RNA, 23 nt, Human
cucacaacuuaguguaauauacc

SEQ ID NO: 3440048 - RNA, 15 nt, Human
cucacaagccagcca

SEQ ID NO: 3440049 - RNA, 13 nt, Human
cucacaaggcagc

SEQ ID NO: 3440050 - RNA, 15 nt, Human
cucacaaggcagcaa

SEQ ID NO: 3440051 - RNA, 17 nt, Human
cucacaaggcagcaagg

SEQ ID NO: 3440052 - RNA, 20 nt, Human
cucacaaguggguaccccca

SEQ ID NO: 3440053 - RNA, 15 nt, Human
cucacacacccugag

SEQ ID NO: 3440054 - RNA, 12 nt, Human
cucacacaggca

SEQ ID NO: 3440055 - RNA, 21 nt, Human
cucacacaugagcaucaggcc

SEQ ID NO: 3440056 - RNA, 24 nt, Human
cucacacaugagcaucaggccagg

SEQ ID NO: 3440057 - RNA, 13 nt, Human
cucacaccaaauu

SEQ ID NO: 3440058 - RNA, 15 nt, Human
cucacaccugaacug

SEQ ID NO: 3440059 - RNA, 23 nt, Human
cucacacggacacucaaaagcug

SEQ ID NO: 3440060 - RNA, 22 nt, Human
cucacacucaugcauuguccuc

SEQ ID NO: 3440061 - RNA, 10 nt, Human
cucacacucc

SEQ ID NO: 3440062 - RNA, 21 nt, Human
cucacacugguucucaaugaa

SEQ ID NO: 3440063 - RNA, 20 nt, Human
cucacacuuacuguaagaca

SEQ ID NO: 3440064 - RNA, 13 nt, Human
cucacagaaauga

SEQ ID NO: 3440065 - RNA, 15 nt, Human
cucacagacaggacc

SEQ ID NO: 3440066 - RNA, 16 nt, Human
cucacagacaggaccc

SEQ ID NO: 3440067 - RNA, 20 nt, Human
cucacagacaggaccccugc

SEQ ID NO: 3440068 - RNA, 16 nt, Human
cucacagagacacagg

SEQ ID NO: 3440069 - RNA, 13 nt, Human
cucacagagucaa

SEQ ID NO: 3440070 - RNA, 13 nt, Human
cucacagcacaga

SEQ ID NO: 3440071 - RNA, 15 nt, Human
cucacagcacagaga

SEQ ID NO: 3440072 - RNA, 15 nt, Human
cucacagcacaugcu

SEQ ID NO: 3440073 - RNA, 13 nt, Human
cucacagccucug

SEQ ID NO: 3440074 - RNA, 15 nt, Human
cucacagcugaguug

SEQ ID NO: 3440075 - RNA, 16 nt, Human
cucacagcuguaauaa

SEQ ID NO: 3440076 - RNA, 15 nt, Human
cucacaggucccaaa

SEQ ID NO: 3440077 - RNA, 16 nt, Human
cucacaggucccaaau

SEQ ID NO: 3440078 - RNA, 20 nt, Human
cucacaguaacccaaaccuc

SEQ ID NO: 3440079 - RNA, 13 nt, Human
cucacaguacagc

SEQ ID NO: 3440080 - RNA, 22 nt, Human
cucacaguauugcucacccagu

SEQ ID NO: 3440081 - RNA, 17 nt, Human
cucacagucccacugug

SEQ ID NO: 3440082 - RNA, 18 nt, Human
cucacagucccacugugc

SEQ ID NO: 3440083 - RNA, 20 nt, Human
cucacagucucuuuaaucuu

SEQ ID NO: 3440084 - RNA, 19 nt, Human
cucacagugggagccaggg

SEQ ID NO: 3440085 - RNA, 17 nt, Human
cucacaguguugcccag

SEQ ID NO: 3440086 - RNA, 21 nt, Human
cucacaguguugcccaggcug

SEQ ID NO: 3440087 - RNA, 16 nt, Human
cucacaguuauuacau

SEQ ID NO: 3440088 - RNA, 16 nt, Human
cucacaucagagugac

SEQ ID NO: 3440089 - RNA, 17 nt, Human
cucacaucuuuuucacu

SEQ ID NO: 3440090 - RNA, 18 nt, Human
cucacaugauuccagcca

SEQ ID NO: 3440091 - RNA, 13 nt, Human
cucacaugcugga

SEQ ID NO: 3440092 - RNA, 19 nt, Human
cucacauggaaugaggguu

SEQ ID NO: 3440093 - RNA, 16 nt, Human
cucacaugguuuacau

SEQ ID NO: 3440094 - RNA, 13 nt, Human
cucacauuuauau

SEQ ID NO: 3440095 - RNA, 12 nt, Human
cucacauuuaug

SEQ ID NO: 3440096 - RNA, 19 nt, Human
cucacauuuauucugcuca

SEQ ID NO: 3440097 - RNA, 13 nt, Human
cucaccaacuccu

SEQ ID NO: 3440098 - RNA, 16 nt, Human
cucaccacggaccaaa

SEQ ID NO: 3440099 - RNA, 20 nt, Human
cucaccacuacaucacuuga

SEQ ID NO: 3440100 - RNA, 14 nt, Human
cucaccagaauuau

SEQ ID NO: 3440101 - RNA, 20 nt, Human
cucaccagaauugugcaaau

SEQ ID NO: 3440102 - RNA, 13 nt, Human
cucaccagcccca

SEQ ID NO: 3440103 - RNA, 16 nt, Human
cucaccagccccacug

SEQ ID NO: 3440104 - RNA, 17 nt, Human
cucaccagccccacugc

SEQ ID NO: 3440105 - RNA, 18 nt, Human
cucaccagccccacugcc

SEQ ID NO: 3440106 - RNA, 19 nt, Human
cucaccagccccacugcca

SEQ ID NO: 3440107 - RNA, 21 nt, Human
cucaccagccccacugccagc

SEQ ID NO: 3440108 - RNA, 14 nt, Human
cucaccagccccag

SEQ ID NO: 3440109 - RNA, 15 nt, Human
cucaccagccccagu

SEQ ID NO: 3440110 - RNA, 21 nt, Human
cucaccagccccagugcccac

SEQ ID NO: 3440111 - RNA, 11 nt, Human
cucaccagcug

SEQ ID NO: 3440112 - RNA, 12 nt, Human
cucaccagcugc

SEQ ID NO: 3440113 - RNA, 14 nt, Human
cucaccagcugcaa

SEQ ID NO: 3440114 - RNA, 13 nt, Human
cucaccaggaagg

SEQ ID NO: 3440115 - RNA, 21 nt, Human
cucaccaggcagccucugggg

SEQ ID NO: 3440116 - RNA, 13 nt, Human
cucaccaggggca

SEQ ID NO: 3440117 - RNA, 14 nt, Human
cucaccauguaaaa

SEQ ID NO: 3440118 - RNA, 20 nt, Human
cucaccauuccaagucucca

SEQ ID NO: 3440119 - RNA, 16 nt, Human
cucaccauuuccccag

SEQ ID NO: 3440120 - RNA, 19 nt, Human
cucaccauuuccccagggc

SEQ ID NO: 3440121 - RNA, 13 nt, Human
cucacccacacca

SEQ ID NO: 3440122 - RNA, 15 nt, Human
cucacccaguccugc

SEQ ID NO: 3440123 - RNA, 14 nt, Human
cucacccagugccc

SEQ ID NO: 3440124 - RNA, 17 nt, Human
cucacccauccuagagg

SEQ ID NO: 3440125 - RNA, 22 nt, Human
cucacccaugcaagcagaggac

SEQ ID NO: 3440126 - RNA, 13 nt, Human
cucaccccauccc

SEQ ID NO: 3440127 - RNA, 15 nt, Human
cucauucaguauuaa

SEQ ID NO: 3440128 - RNA, 19 nt, Human
cucauucaguauuaaaggg

SEQ ID NO: 3440129 - RNA, 13 nt, Human
cucauucauuacu

SEQ ID NO: 3440130 - RNA, 17 nt, Human
cucauucauuacuaaaa

SEQ ID NO: 3440131 - RNA, 18 nt, Human
cucauuccaccuucccau

SEQ ID NO: 3440132 - RNA, 12 nt, Human
cucauuccagau

SEQ ID NO: 3440133 - RNA, 14 nt, Human
cucauuccagaucc

SEQ ID NO: 3440134 - RNA, 23 nt, Human
cucauuccccggggcguuucuuu

SEQ ID NO: 3440135 - RNA, 20 nt, Human
cucauucccucgucuuuccc

SEQ ID NO: 3440136 - RNA, 12 nt, Human
cucauuccugcc

SEQ ID NO: 3440137 - RNA, 13 nt, Human
cucauuccugccu

SEQ ID NO: 3440138 - RNA, 20 nt, Human
cucauucuaaugauggccca

SEQ ID NO: 3440139 - RNA, 18 nt, Human
cucauucugaauuaauua

SEQ ID NO: 3440140 - RNA, 14 nt, Human
cucauucuuguuuu

SEQ ID NO: 3440141 - RNA, 12 nt, Human
cucauugaaaug

SEQ ID NO: 3440142 - RNA, 14 nt, Human
cucauugaaauguc

SEQ ID NO: 3440143 - RNA, 16 nt, Human
cucauugaaaugucac

SEQ ID NO: 3440144 - RNA, 21 nt, Human
cucauugaccugaggcccuuc

SEQ ID NO: 3440145 - RNA, 15 nt, Human
cucaccccgaggccc

SEQ ID NO: 3440146 - RNA, 13 nt, Human
cucaccccggcag

SEQ ID NO: 3440147 - RNA, 16 nt, Human
cucaccccgucugggg

SEQ ID NO: 3440148 - RNA, 20 nt, Human
cucaccccugguucucaucu

SEQ ID NO: 3440149 - RNA, 19 nt, Human
cucaccccuguccucacug

SEQ ID NO: 3440150 - RNA, 22 nt, Human
cucaccccuguccucacugcuc

SEQ ID NO: 3440151 - RNA, 17 nt, Human
cucaccccuugccauaa

SEQ ID NO: 3440152 - RNA, 14 nt, Human
cucacccgaggcug

SEQ ID NO: 3440153 - RNA, 13 nt, Human
cucaccgcccauc

SEQ ID NO: 3440154 - RNA, 17 nt, Human
cucaccgcccaucaggg

SEQ ID NO: 3440155 - RNA, 12 nt, Human
cucaccgcuucc

SEQ ID NO: 3440156 - RNA, 19 nt, Human
cucaccuagagccagacca

SEQ ID NO: 3440157 - RNA, 23 nt, Human
cucaccucaugcccacccccugc

SEQ ID NO: 3440158 - RNA, 23 nt, Human
cucaccucuagguccccauacuc

SEQ ID NO: 3440159 - RNA, 16 nt, Human
cucaccucucccuugg

SEQ ID NO: 3440160 - RNA, 17 nt, Human
cucaccucucccuugga

SEQ ID NO: 3440161 - RNA, 13 nt, Human
cucaccucugccu

SEQ ID NO: 3440162 - RNA, 19 nt, Human
cucaccugagucacccuac

SEQ ID NO: 3440163 - RNA, 20 nt, Human
cucaccugcacuaacagagu

SEQ ID NO: 3440164 - RNA, 18 nt, Human
cucaccugccccucaacu

SEQ ID NO: 3440165 - RNA, 16 nt, Human
cucaccugcuggcccc

SEQ ID NO: 3440166 - RNA, 18 nt, Human
cucaccugcuggccccuc

SEQ ID NO: 3440167 - RNA, 13 nt, Human
cucaccuggacuu

SEQ ID NO: 3440168 - RNA, 17 nt, Human
cucaccuggcccugcuu

SEQ ID NO: 3440169 - RNA, 20 nt, Human
cucaccugggcaccugggga

SEQ ID NO: 3440170 - RNA, 21 nt, Human
cucaccugggcaccuggggag

SEQ ID NO: 3440171 - RNA, 11 nt, Human
cucaccugggg

SEQ ID NO: 3440172 - RNA, 12 nt, Human
cucaccuggggu

SEQ ID NO: 3440173 - RNA, 13 nt, Human
cucaccuguugcu

SEQ ID NO: 3440174 - RNA, 14 nt, Human
cucaccuucugagu

SEQ ID NO: 3440175 - RNA, 20 nt, Human
cucaccuugcaacacacaga

SEQ ID NO: 3440176 - RNA, 21 nt, Human
cucaccuugcaacacacagac

SEQ ID NO: 3440177 - RNA, 16 nt, Human
cucaccuugguuccug

SEQ ID NO: 3440178 - RNA, 16 nt, Human
cucaccuuuucccggg

SEQ ID NO: 3440179 - RNA, 18 nt, Human
cucacgagucauccagaa

SEQ ID NO: 3440180 - RNA, 13 nt, Human
cucacgccuguaa

SEQ ID NO: 3440181 - RNA, 18 nt, Human
cucacgccuguaauccca

SEQ ID NO: 3440182 - RNA, 20 nt, Human
cucacgccuguaaucccagc

SEQ ID NO: 3440183 - RNA, 23 nt, Human
cucacgccuguaaucccagcacu

SEQ ID NO: 3440184 - RNA, 23 nt, Human
cucacgccuguaaucccagcagu

SEQ ID NO: 3440185 - RNA, 23 nt, Human
cucacgcuuaccucaaccauccu

SEQ ID NO: 3440186 - RNA, 18 nt, Human
cucacggccacacagcug

SEQ ID NO: 3440187 - RNA, 19 nt, Human
cucacggccacacagcugc

SEQ ID NO: 3440188 - RNA, 14 nt, Human
cucacgucaaaugc

SEQ ID NO: 3440189 - RNA, 14 nt, Human
cucacuaaagcaug

SEQ ID NO: 3440190 - RNA, 19 nt, Human
cucacuaaagcaugaaaug

SEQ ID NO: 3440191 - RNA, 15 nt, Human
cucacuaauuuuugu

SEQ ID NO: 3440192 - RNA, 15 nt, Human
cucacuaccuccuca

SEQ ID NO: 3440193 - RNA, 23 nt, Human
cucacuaggcccccacuugccuc

SEQ ID NO: 3440194 - RNA, 16 nt, Human
cucacuaggcuucugg

SEQ ID NO: 3440195 - RNA, 20 nt, Human
cucacuaggcuucugguuga

SEQ ID NO: 3440196 - RNA, 20 nt, Human
cucacuaucccggcugcccu

SEQ ID NO: 3440197 - RNA, 22 nt, Human
cucacuaugaaucuauuauacu

SEQ ID NO: 3440198 - RNA, 18 nt, Human
cucacuauguugcccagg

SEQ ID NO: 3440199 - RNA, 17 nt, Human
cucacucaaguucaagg

SEQ ID NO: 3440200 - RNA, 13 nt, Human
cucacucagcacc

SEQ ID NO: 3440201 - RNA, 18 nt, Human
cucacucagcaccacuca

SEQ ID NO: 3440202 - RNA, 12 nt, Human
cucacuccacca

SEQ ID NO: 3440203 - RNA, 21 nt, Human
cucacuccaggaaggggcugg

SEQ ID NO: 3440204 - RNA, 14 nt, Human
cucacucccaccug

SEQ ID NO: 3440205 - RNA, 15 nt, Human
cucacucccagucca

SEQ ID NO: 3440206 - RNA, 19 nt, Human
cucacuccccaugccacgu

SEQ ID NO: 3440207 - RNA, 12 nt, Human
cucacuccccuc

SEQ ID NO: 3440208 - RNA, 22 nt, Human
cucacucccuucuaccugccac

SEQ ID NO: 3440209 - RNA, 17 nt, Human
cucacucccuucuccuu

SEQ ID NO: 3440210 - RNA, 12 nt, Human
cucacuccuguu

SEQ ID NO: 3440211 - RNA, 14 nt, Human
cucacuccuuuuaa

SEQ ID NO: 3440212 - RNA, 22 nt, Human
cucacucggguuucucuguggc

SEQ ID NO: 3440213 - RNA, 14 nt, Human
cucacucgucuccc

SEQ ID NO: 3440214 - RNA, 14 nt, Human
cucacucugccagg

SEQ ID NO: 3440215 - RNA, 15 nt, Human
cucacucugccaggg

SEQ ID NO: 3440216 - RNA, 11 nt, Human
cucacucugcu

SEQ ID NO: 3440217 - RNA, 14 nt, Human
cucacucuggccuc

SEQ ID NO: 3440218 - RNA, 12 nt, Human
cucacucugggc

SEQ ID NO: 3440219 - RNA, 21 nt, Human
cucacucugucgcccagucug

SEQ ID NO: 3440220 - RNA, 18 nt, Human
cucacugaaaacaucugg

SEQ ID NO: 3440221 - RNA, 15 nt, Human
cucacugauauauuu

SEQ ID NO: 3440222 - RNA, 17 nt, Human
cucacugcaaccuccgc

SEQ ID NO: 3440223 - RNA, 18 nt, Human
cucacugcaaccuucacc

SEQ ID NO: 3440224 - RNA, 14 nt, Human
cucacugcagccuc

SEQ ID NO: 3440225 - RNA, 15 nt, Human
cucacugcagccucg

SEQ ID NO: 3440226 - RNA, 11 nt, Human
cucacugccag

SEQ ID NO: 3440227 - RNA, 12 nt, Human
cucacugccagg

SEQ ID NO: 3440228 - RNA, 13 nt, Human
cucacugccaggc

SEQ ID NO: 3440229 - RNA, 14 nt, Human
cucacugccaggcc

SEQ ID NO: 3440230 - RNA, 22 nt, Human
cucacugcggagaaccuugugc

SEQ ID NO: 3440231 - RNA, 21 nt, Human
cucacugcucaagaagacaug

SEQ ID NO: 3440232 - RNA, 18 nt, Human
cucacugcuugaacuagg

SEQ ID NO: 3440233 - RNA, 14 nt, Human
cucacuggccaucc

SEQ ID NO: 3440234 - RNA, 17 nt, Human
cucacugggguccuggg

SEQ ID NO: 3440235 - RNA, 10 nt, Human
cucacuguga

SEQ ID NO: 3440236 - RNA, 20 nt, Human
cucacuguggugucuguguu

SEQ ID NO: 3440237 - RNA, 18 nt, Human
cucacuguucccucugcu

SEQ ID NO: 3440238 - RNA, 15 nt, Human
cucacuguugaauuu

SEQ ID NO: 3440239 - RNA, 21 nt, Human
cucacuguugaauuuucucua

SEQ ID NO: 3440240 - RNA, 18 nt, Human
cucacuguugcccaggcu

SEQ ID NO: 3440241 - RNA, 19 nt, Human
cucacuguugcccaggcug

SEQ ID NO: 3440242 - RNA, 21 nt, Human
cucacuguugcccaggcuggc

SEQ ID NO: 3440243 - RNA, 22 nt, Human
cucacuguugcccaggcuggcg

SEQ ID NO: 3440244 - RNA, 15 nt, Human
cucacuugcccacac

SEQ ID NO: 3440245 - RNA, 18 nt, Human
cucacuuggucugccagg

SEQ ID NO: 3440246 - RNA, 19 nt, Human
cucacuuggucugccaggc

SEQ ID NO: 3440247 - RNA, 18 nt, Human
cucacuuguuuuauuuaa

SEQ ID NO: 3440248 - RNA, 15 nt, Human
cucacuuuucccacu

SEQ ID NO: 3440249 - RNA, 15 nt, Human
cucacuuuucuccau

SEQ ID NO: 3440250 - RNA, 16 nt, Human
cucacuuuuucauuuc

SEQ ID NO: 3440251 - RNA, 20 nt, Human
cucagaaaauaucccuccug

SEQ ID NO: 3440252 - RNA, 19 nt, Human
cucagaaacacuggggcug

SEQ ID NO: 3440253 - RNA, 18 nt, Human
cucagaaacuccaugaug

SEQ ID NO: 3440254 - RNA, 22 nt, Human
cucagaaagugccugacacacu

SEQ ID NO: 3440255 - RNA, 23 nt, Human
cucagaaaguguauaauaagaaa

SEQ ID NO: 3440256 - RNA, 21 nt, Human
cucagaaauuuuuauuuuucu

SEQ ID NO: 3440257 - RNA, 16 nt, Human
cucagaacccagggcu

SEQ ID NO: 3440258 - RNA, 23 nt, Human
cucagaacccagggcucugcccc

SEQ ID NO: 3440259 - RNA, 15 nt, Human
cucagaagacacuga

SEQ ID NO: 3440260 - RNA, 23 nt, Human
cucagaagacacugaugggcaac

SEQ ID NO: 3440261 - RNA, 13 nt, Human
cucagaagcacag

SEQ ID NO: 3440262 - RNA, 22 nt, Human
cucagaagccugggggccuggc

SEQ ID NO: 3440263 - RNA, 23 nt, Human
cucagaagccugggggccuggcu

SEQ ID NO: 3440264 - RNA, 14 nt, Human
cucagaaggcucuu

SEQ ID NO: 3440265 - RNA, 15 nt, Human
cucagaaggcucuuc

SEQ ID NO: 3440266 - RNA, 20 nt, Human
cucagaaggcucuucugacu

SEQ ID NO: 3440267 - RNA, 22 nt, Human
cucagaagggagcuagccagag

SEQ ID NO: 3440268 - RNA, 13 nt, Human
cucagaagguauu

SEQ ID NO: 3440269 - RNA, 16 nt, Human
cucagaagguauuccu

SEQ ID NO: 3440270 - RNA, 13 nt, Human
cucagaaguaaag

SEQ ID NO: 3440271 - RNA, 16 nt, Human
cucagaagucuuucag

SEQ ID NO: 3440272 - RNA, 21 nt, Human
cucagaagugcaucuggagag

SEQ ID NO: 3440273 - RNA, 11 nt, Human
cucagaaucua

SEQ ID NO: 3440274 - RNA, 14 nt, Human
cucagaauuauuuu

SEQ ID NO: 3440275 - RNA, 17 nt, Human
cucagacauuggcaccu

SEQ ID NO: 3440276 - RNA, 14 nt, Human
cucagaccagagaa

SEQ ID NO: 3440277 - RNA, 15 nt, Human
cucagaccagagaag

SEQ ID NO: 3440278 - RNA, 14 nt, Human
cucagaccagcucu

SEQ ID NO: 3440279 - RNA, 15 nt, Human
cucagaccagcucuu

SEQ ID NO: 3440280 - RNA, 14 nt, Human
cucagacccuuucu

SEQ ID NO: 3440281 - RNA, 17 nt, Human
cucagaccgucuuccuc

SEQ ID NO: 3440282 - RNA, 21 nt, Human
cucagaccgucuuccuccaac

SEQ ID NO: 3440283 - RNA, 19 nt, Human
cucagacucuaagaaagaa

SEQ ID NO: 3440284 - RNA, 22 nt, Human
cucagacucuuuuuguaccugg

SEQ ID NO: 3440285 - RNA, 18 nt, Human
cucagacugcacccagga

SEQ ID NO: 3440286 - RNA, 20 nt, Human
cucagacugcacccaggagg

SEQ ID NO: 3440287 - RNA, 17 nt, Human
cucagacuuuggaaaau

SEQ ID NO: 3440288 - RNA, 16 nt, Human
ccaucugauaucuaua

SEQ ID NO: 3440289 - RNA, 23 nt, Human
ccaucugcaccccuucucuccuc

SEQ ID NO: 3440290 - RNA, 12 nt, Human
cucaucugucac

SEQ ID NO: 3440291 - RNA, 14 nt, Human
cucaucugucacca

SEQ ID NO: 3440292 - RNA, 17 nt, Human
cucaucugucccuccgg

SEQ ID NO: 3440293 - RNA, 13 nt, Human
cucaucugucugg

SEQ ID NO: 3440294 - RNA, 18 nt, Human
cucaucuuagugccugag

SEQ ID NO: 3440295 - RNA, 19 nt, Human
cucaucuugaagggcccag

SEQ ID NO: 3440296 - RNA, 21 nt, Human
cucaucuugacagagccugcc

SEQ ID NO: 3440297 - RNA, 14 nt, Human
cucaucuugugaaa

SEQ ID NO: 3440298 - RNA, 19 nt, Human
cucaucuuucccuccuugg

SEQ ID NO: 3440299 - RNA, 12 nt, Human
cucaucuuucuu

SEQ ID NO: 3440300 - RNA, 16 nt, Human
cucaucuuucuuccaa

SEQ ID NO: 3440301 - RNA, 15 nt, Human
cucaucuuucuugau

SEQ ID NO: 3440302 - RNA, 14 nt, Human
cucaucuuuuuacu

SEQ ID NO: 3440303 - RNA, 13 nt, Human
cucaugaauguaa

SEQ ID NO: 3440304 - RNA, 14 nt, Human
cucaugaauguaaa

SEQ ID NO: 3440305 - RNA, 15 nt, Human
cucaugaauguaaau

SEQ ID NO: 3440306 - RNA, 14 nt, Human
cucaugaggggaga

SEQ ID NO: 3440307 - RNA, 19 nt, Human
cucaugaucuugugacaua

SEQ ID NO: 3440308 - RNA, 16 nt, Human
cucaugcaaaucaauu

SEQ ID NO: 3440309 - RNA, 20 nt, Human
cucaugcaaaucaauuacug

SEQ ID NO: 3440310 - RNA, 14 nt, Human
cucaugcagccgug

SEQ ID NO: 3440311 - RNA, 18 nt, Human
cucaugcauagucccagc

SEQ ID NO: 3440312 - RNA, 19 nt, Human
cucaugcauagucccagcu

SEQ ID NO: 3440313 - RNA, 12 nt, Human
cucaugcaucuc

SEQ ID NO: 3440314 - RNA, 21 nt, Human
cucaugccaaccccgcccuag

SEQ ID NO: 3440315 - RNA, 16 nt, Human
cucaugcccacccccu

SEQ ID NO: 3440316 - RNA, 19 nt, Human
cucaugcccacccccugcc

SEQ ID NO: 3440317 - RNA, 23 nt, Human
cucaugcccacccccugcccugc

SEQ ID NO: 3440318 - RNA, 12 nt, Human
cucaugccucag

SEQ ID NO: 3440319 - RNA, 18 nt, Human
cucaugccucagccuccu

SEQ ID NO: 3440320 - RNA, 21 nt, Human
cucaugccuguaaucccagca

SEQ ID NO: 3440321 - RNA, 12 nt, Human
cucaugcugaaa

SEQ ID NO: 3440322 - RNA, 14 nt, Human
cucaugcugccaau

SEQ ID NO: 3440323 - RNA, 12 nt, Human
cucaugcugccc

SEQ ID NO: 3440324 - RNA, 18 nt, Human
cucaugcugccccugccu

SEQ ID NO: 3440325 - RNA, 20 nt, Human
cucauggagaagcagaaaua

SEQ ID NO: 3440326 - RNA, 21 nt, Human
cucauggagaagcagaaauac

SEQ ID NO: 3440327 - RNA, 14 nt, Human
cucauggccccucu

SEQ ID NO: 3440328 - RNA, 16 nt, Human
cucaugggguccaagu

SEQ ID NO: 3440329 - RNA, 23 nt, Human
cucauggguggcacucagucucu

SEQ ID NO: 3440330 - RNA, 23 nt, Human
cucauggugaggcuuaacaaugu

SEQ ID NO: 3440331 - RNA, 15 nt, Human
cucaugguggguuca

SEQ ID NO: 3440332 - RNA, 17 nt, Human
cucauguaucaucugga

SEQ ID NO: 3440333 - RNA, 19 nt, Human
cucauguaucaucuggaua

SEQ ID NO: 3440334 - RNA, 13 nt, Human
cucauguggcugg

SEQ ID NO: 3440335 - RNA, 14 nt, Human
cucauguggcugga

SEQ ID NO: 3440336 - RNA, 16 nt, Human
cucaugugugcaacag

SEQ ID NO: 3440337 - RNA, 18 nt, Human
cucaugugugcucuucuu

SEQ ID NO: 3440338 - RNA, 15 nt, Human
cucauguucugcuuu

SEQ ID NO: 3440339 - RNA, 18 nt, Human
cucauguucuuaauucuu

SEQ ID NO: 3440340 - RNA, 19 nt, Human
cucauguucuuaauucuua

SEQ ID NO: 3440341 - RNA, 15 nt, Human
cucauguuuaugaaa

SEQ ID NO: 3440342 - RNA, 17 nt, Human
cucauguuuaugaaaau

SEQ ID NO: 3440343 - RNA, 18 nt, Human
cucauguuuucaacugcc

SEQ ID NO: 3440344 - RNA, 18 nt, Human
cucccuuuuuccuugucc

SEQ ID NO: 3440345 - RNA, 21 nt, Human
cucccuuuuuccuugucccca

SEQ ID NO: 3440346 - RNA, 23 nt, Human
cucccuuuuuccuuguccccaca

SEQ ID NO: 3440347 - RNA, 16 nt, Human
cuccgaaaugcugucu

SEQ ID NO: 3440348 - RNA, 17 nt, Human
cuccgaaaugcugucuu

SEQ ID NO: 3440349 - RNA, 15 nt, Human
cuccgaccagacacc

SEQ ID NO: 3440350 - RNA, 16 nt, Human
cuccgacugcuaggga

SEQ ID NO: 3440351 - RNA, 14 nt, Human
cuccgagagggaga

SEQ ID NO: 3440352 - RNA, 13 nt, Human
cuccgagaggugg

SEQ ID NO: 3440353 - RNA, 22 nt, Human
cuccgagaggugggccagucug

SEQ ID NO: 3440354 - RNA, 18 nt, Human
cuccgaggugguuuuaaa

SEQ ID NO: 3440355 - RNA, 12 nt, Human
cuccgcaggacu

SEQ ID NO: 3440356 - RNA, 20 nt, Human
cuccgccagccuccucugga

SEQ ID NO: 3440357 - RNA, 16 nt, Human
cuccgcccccagguag

SEQ ID NO: 3440358 - RNA, 19 nt, Human
cuccgccccugagcccacu

SEQ ID NO: 3440359 - RNA, 13 nt, Human
cuccgcccugcca

SEQ ID NO: 3440360 - RNA, 16 nt, Human
cuccgcccugccacuc

SEQ ID NO: 3440361 - RNA, 15 nt, Human
cuccgccucugcugg

SEQ ID NO: 3440362 - RNA, 18 nt, Human
cuccgccuucacuccggu

SEQ ID NO: 3440363 - RNA, 22 nt, Human
cuccgcuuucuacccagcgagc

SEQ ID NO: 3440364 - RNA, 17 nt, Human
cuccggaggacucacca

SEQ ID NO: 3440365 - RNA, 23 nt, Human
cuccggaggacucaccacugccc

SEQ ID NO: 3440366 - RNA, 16 nt, Human
cuccggaucgaggccu

SEQ ID NO: 3440367 - RNA, 18 nt, Human
cuccggccaggugccucc

SEQ ID NO: 3440368 - RNA, 19 nt, Human
cuccggcccuccagagccc

SEQ ID NO: 3440369 - RNA, 15 nt, Human
cuccggccuccccuc

SEQ ID NO: 3440370 - RNA, 19 nt, Human
cuccggccucugccuuugc

SEQ ID NO: 3440371 - RNA, 17 nt, Human
cuccggcgucagccucc

SEQ ID NO: 3440372 - RNA, 22 nt, Human
cuccggcgucagccuccagccu

SEQ ID NO: 3440373 - RNA, 23 nt, Human
cuccggcgucagccuccagccuc

SEQ ID NO: 3440374 - RNA, 16 nt, Human
cuccggcucccagccu

SEQ ID NO: 3440375 - RNA, 16 nt, Human
cuccgggacccccagg

SEQ ID NO: 3440376 - RNA, 18 nt, Human
cuccggugugccugcagc

SEQ ID NO: 3440377 - RNA, 19 nt, Human
cuccggugugccugcagcc

SEQ ID NO: 3440378 - RNA, 23 nt, Human
cuccggugugccugcagccccgc

SEQ ID NO: 3440379 - RNA, 14 nt, Human
cuccgucacuaccu

SEQ ID NO: 3440380 - RNA, 15 nt, Human
cuccguccagccgcc

SEQ ID NO: 3440381 - RNA, 18 nt, Human
cuccguccaggagccugg

SEQ ID NO: 3440382 - RNA, 13 nt, Human
cuccguccauauc

SEQ ID NO: 3440383 - RNA, 13 nt, Human
cuccgugccucca

SEQ ID NO: 3440384 - RNA, 22 nt, Human
cuccgugccuccaccaccacug

SEQ ID NO: 3440385 - RNA, 12 nt, Human
cuccguggagga

SEQ ID NO: 3440386 - RNA, 18 nt, Human
cuccguggaggagguugg

SEQ ID NO: 3440387 - RNA, 22 nt, Human
cuccguggaggagguugggagg

SEQ ID NO: 3440388 - RNA, 15 nt, Human
cuccguuagcuccug

SEQ ID NO: 3440389 - RNA, 21 nt, Human
cuccguuagcuccuguggccc

SEQ ID NO: 3440390 - RNA, 12 nt, Human
cuccguuggcca

SEQ ID NO: 3440391 - RNA, 22 nt, Human
cuccguuuauuauaaacuguau

SEQ ID NO: 3440392 - RNA, 19 nt, Human
cuccuaaaaggcccagaga

SEQ ID NO: 3440393 - RNA, 17 nt, Human
cuccuaaaguacuggga

SEQ ID NO: 3440394 - RNA, 19 nt, Human
cuccuaaccucaagugauc

SEQ ID NO: 3440395 - RNA, 22 nt, Human
cuccuaagcaccuguaaugugc

SEQ ID NO: 3440396 - RNA, 19 nt, Human
cuccuacauaucccuucca

SEQ ID NO: 3440397 - RNA, 21 nt, Human
cuccuacauaucccuuccaga

SEQ ID NO: 3440398 - RNA, 20 nt, Human
cuccuacccaccgcccuugc

SEQ ID NO: 3440399 - RNA, 16 nt, Human
cuccuaccccucccag

SEQ ID NO: 3440400 - RNA, 17 nt, Human
cuccuaccccucccagc

SEQ ID NO: 3440401 - RNA, 18 nt, Human
cuccuacccugcgcccag

SEQ ID NO: 3440402 - RNA, 21 nt, Human
cuccuaccgaaaccuugccuu

SEQ ID NO: 3440403 - RNA, 16 nt, Human
cuccuaccucagccua

SEQ ID NO: 3440404 - RNA, 17 nt, Human
cuccuaccugcccugga

SEQ ID NO: 3440405 - RNA, 18 nt, Human
cuccuagagacagaagca

SEQ ID NO: 3440406 - RNA, 18 nt, Human
cuccuagagggaggggcc

SEQ ID NO: 3440407 - RNA, 19 nt, Human
cuccuagagggaggggccu

SEQ ID NO: 3440408 - RNA, 22 nt, Human
cuccuagccugugccucuggga

SEQ ID NO: 3440409 - RNA, 21 nt, Human
cuccuagcuguccuuuuuccu

SEQ ID NO: 3440410 - RNA, 20 nt, Human
cuccuaggacccgucuccag

SEQ ID NO: 3440411 - RNA, 22 nt, Human
cuccuaggacccgucuccagcu

SEQ ID NO: 3440412 - RNA, 15 nt, Human
cuccuaggcauucug

SEQ ID NO: 3440413 - RNA, 22 nt, Human
cuccuaguacuaacuccuagga

SEQ ID NO: 3440414 - RNA, 17 nt, Human
cuccuaguucuagaaaa

SEQ ID NO: 3440415 - RNA, 21 nt, Human
cuccuaguucuucaucccacu

SEQ ID NO: 3440416 - RNA, 16 nt, Human
cuccuauaaucuguca

SEQ ID NO: 3440417 - RNA, 23 nt, Human
cuccuauaaucugucaaaacacu

SEQ ID NO: 3440418 - RNA, 17 nt, Human
cuccuaucaccuccccu

SEQ ID NO: 3440419 - RNA, 18 nt, Human
cuccuaucaccuccccuc

SEQ ID NO: 3440420 - RNA, 14 nt, Human
cuccuauccugguu

SEQ ID NO: 3440421 - RNA, 19 nt, Human
cuccuaugaucugagucag

SEQ ID NO: 3440422 - RNA, 13 nt, Human
cuccuaugcuuua

SEQ ID NO: 3440423 - RNA, 18 nt, Human
cuccuaugcuuuagcuua

SEQ ID NO: 3440424 - RNA, 22 nt, Human
cuccuauucaguucccagaauc

SEQ ID NO: 3440425 - RNA, 22 nt, Human
cuccuauucucuuaauuuuucu

SEQ ID NO: 3440426 - RNA, 21 nt, Human
cuccucaauuuuugucucaga

SEQ ID NO: 3440427 - RNA, 21 nt, Human
cuccucacaacauggugucug

SEQ ID NO: 3440428 - RNA, 14 nt, Human
cuccucacccccag

SEQ ID NO: 3440429 - RNA, 15 nt, Human
cuccucacccccagc

SEQ ID NO: 3440430 - RNA, 17 nt, Human
cuccucacccccagcuu

SEQ ID NO: 3440431 - RNA, 20 nt, Human
cuccucacccccagcuuugc

SEQ ID NO: 3440432 - RNA, 21 nt, Human
cuccucacccccagcuuugcu

SEQ ID NO: 3440433 - RNA, 15 nt, Human
cuccucaccccgucu

SEQ ID NO: 3440434 - RNA, 15 nt, Human
cccacuguccugggc

SEQ ID NO: 3440435 - RNA, 16 nt, Human
cccacuguccugggcc

SEQ ID NO: 3440436 - RNA, 22 nt, Human
cccacuguccugggccugcaga

SEQ ID NO: 3440437 - RNA, 17 nt, Human
cccacuguccugggcgc

SEQ ID NO: 3440438 - RNA, 22 nt, Human
cccacuguuucucuugagcugg

SEQ ID NO: 3440439 - RNA, 15 nt, Human
cccacuuccccuccu

SEQ ID NO: 3440440 - RNA, 19 nt, Human
cccacuuccccuccuaccc

SEQ ID NO: 3440441 - RNA, 23 nt, Human
cccacuuccccuccuaccccucc

SEQ ID NO: 3440442 - RNA, 16 nt, Human
cccacuucccugacac

SEQ ID NO: 3440443 - RNA, 20 nt, Human
cccacuucccugacacugcg

SEQ ID NO: 3440444 - RNA, 14 nt, Human
cccacuucugcacu

SEQ ID NO: 3440445 - RNA, 14 nt, Human
cccacuugccucuu

SEQ ID NO: 3440446 - RNA, 15 nt, Human
cccacuugccucuuc

SEQ ID NO: 3440447 - RNA, 18 nt, Human
cccacuuguccuuagccu

SEQ ID NO: 3440448 - RNA, 18 nt, Human
cccagaacacacuccauc

SEQ ID NO: 3440449 - RNA, 19 nt, Human
cccagaaccuguccuugca

SEQ ID NO: 3440450 - RNA, 19 nt, Human
cccagaacuggacucagga

SEQ ID NO: 3440451 - RNA, 16 nt, Human
cccagaaugaggcugc

SEQ ID NO: 3440452 - RNA, 17 nt, Human
cccagaaugaggcugcu

SEQ ID NO: 3440453 - RNA, 18 nt, Human
cccagaaugccuccugca

SEQ ID NO: 3440454 - RNA, 11 nt, Human
cccagaauuca

SEQ ID NO: 3440455 - RNA, 17 nt, Human
cccagaauucccagcug

SEQ ID NO: 3440456 - RNA, 21 nt, Human
cccagaauucccagcugucug

SEQ ID NO: 3440457 - RNA, 11 nt, Human
cccagacacau

SEQ ID NO: 3440458 - RNA, 16 nt, Human
cccagacacugguuug

SEQ ID NO: 3440459 - RNA, 23 nt, Human
cccagacagacaucucugcaccc

SEQ ID NO: 3440460 - RNA, 15 nt, Human
cccagacgaugucuu

SEQ ID NO: 3440461 - RNA, 22 nt, Human
cccagacuacuauuuucuuuuu

SEQ ID NO: 3440462 - RNA, 13 nt, Human
cccagagaagcca

SEQ ID NO: 3440463 - RNA, 15 nt, Human
cccagagaagccccu

SEQ ID NO: 3440464 - RNA, 14 nt, Human
cccagagacaggaa

SEQ ID NO: 3440465 - RNA, 18 nt, Human
cccagagacauacuugaa

SEQ ID NO: 3440466 - RNA, 20 nt, Human
cccagagaccaggcuguguc

SEQ ID NO: 3440467 - RNA, 14 nt, Human
cccagagacccagc

SEQ ID NO: 3440468 - RNA, 15 nt, Human
cccagagacccagcg

SEQ ID NO: 3440469 - RNA, 11 nt, Human
cccagagacuu

SEQ ID NO: 3440470 - RNA, 22 nt, Human
cccagagagaagagccccacuc

SEQ ID NO: 3440471 - RNA, 15 nt, Human
cccagagagcccgag

SEQ ID NO: 3440472 - RNA, 19 nt, Human
cccagagaggaaucagacu

SEQ ID NO: 3440473 - RNA, 13 nt, Human
cccagagauguca

SEQ ID NO: 3440474 - RNA, 22 nt, Human
cccagagauugcuucucauccc

SEQ ID NO: 3440475 - RNA, 14 nt, Human
cccagagcaccugc

SEQ ID NO: 3440476 - RNA, 16 nt, Human
cccagagcaggaggcc

SEQ ID NO: 3440477 - RNA, 14 nt, Human
cccagagcagggug

SEQ ID NO: 3440478 - RNA, 22 nt, Human
cccagagcauuacgugagccag

SEQ ID NO: 3440479 - RNA, 19 nt, Human
cccagagccacacaugggc

SEQ ID NO: 3440480 - RNA, 16 nt, Human
cccagagcccagcucc

SEQ ID NO: 3440481 - RNA, 20 nt, Human
cccagagcugguggacccag

SEQ ID NO: 3440482 - RNA, 24 nt, Human
cccagaggaaggggccagaggcuc

SEQ ID NO: 3440483 - RNA, 20 nt, Human
cccagaggacagcacagacu

SEQ ID NO: 3440484 - RNA, 20 nt, Human
cccagaggagcugggagccg

SEQ ID NO: 3440485 - RNA, 16 nt, Human
cccagaggauugcugc

SEQ ID NO: 3440486 - RNA, 18 nt, Human
cccagaggcacagccggg

SEQ ID NO: 3440487 - RNA, 14 nt, Human
cccagaggccucuc

SEQ ID NO: 3440488 - RNA, 16 nt, Human
cccagaggcugcccca

SEQ ID NO: 3440489 - RNA, 15 nt, Human
cccagagggcccagg

SEQ ID NO: 3440490 - RNA, 23 nt, Human
cccagagggcccaggcaggccac

SEQ ID NO: 3440491 - RNA, 18 nt, Human
cccagagggccugcaagg

SEQ ID NO: 3440492 - RNA, 13 nt, Human
cccagaggggccu

SEQ ID NO: 3440493 - RNA, 15 nt, Human
cccagaggggccugc

SEQ ID NO: 3440494 - RNA, 17 nt, Human
cccagaggggccugcca

SEQ ID NO: 3440495 - RNA, 18 nt, Human
cccagaggggccugccac

SEQ ID NO: 3440496 - RNA, 13 nt, Human
cccagagguaaca

SEQ ID NO: 3440497 - RNA, 18 nt, Human
cccagagguaacagaaca

SEQ ID NO: 3440498 - RNA, 15 nt, Human
cccagagguccagcc

SEQ ID NO: 3440499 - RNA, 17 nt, Human
cccagagguccagccca

SEQ ID NO: 3440500 - RNA, 14 nt, Human
cccagaguuuuuau

SEQ ID NO: 3440501 - RNA, 16 nt, Human
cccagaucagcuccua

SEQ ID NO: 3440502 - RNA, 19 nt, Human
cccagaucagucagagccc

SEQ ID NO: 3440503 - RNA, 14 nt, Human
cccagaucccagaa

SEQ ID NO: 3440504 - RNA, 16 nt, Human
cccagaucccagaagg

SEQ ID NO: 3440505 - RNA, 18 nt, Human
cccagaucuggucccuug

SEQ ID NO: 3440506 - RNA, 19 nt, Human
cccagaucuggucccuugc

SEQ ID NO: 3440507 - RNA, 17 nt, Human
cccagauuccccugugu

SEQ ID NO: 3440508 - RNA, 15 nt, Human
cccagauuucagucu

SEQ ID NO: 3440509 - RNA, 21 nt, Human
cuccucggcuggcuguccacc

SEQ ID NO: 3440510 - RNA, 22 nt, Human
cuccucggcuggcuguccaccc

SEQ ID NO: 3440511 - RNA, 17 nt, Human
cuccucuaacaggggcu

SEQ ID NO: 3440512 - RNA, 22 nt, Human
cuccucuauccugggcuuuugu

SEQ ID NO: 3440513 - RNA, 15 nt, Human
cuccucucacucccc

SEQ ID NO: 3440514 - RNA, 14 nt, Human
cuccucucaguguu

SEQ ID NO: 3440515 - RNA, 14 nt, Human
cuccucuccaccau

SEQ ID NO: 3440516 - RNA, 15 nt, Human
cuccucuccaccauc

SEQ ID NO: 3440517 - RNA, 11 nt, Human
cuccucuccag

SEQ ID NO: 3440518 - RNA, 12 nt, Human
cuccucuccagg

SEQ ID NO: 3440519 - RNA, 18 nt, Human
cuccucuccccuaccacu

SEQ ID NO: 3440520 - RNA, 16 nt, Human
cuccucuccuggagga

SEQ ID NO: 3440521 - RNA, 19 nt, Human
cuccucucuaaccuccuuu

SEQ ID NO: 3440522 - RNA, 19 nt, Human
cuccucucugcccuaaugc

SEQ ID NO: 3440523 - RNA, 11 nt, Human
cuccucugaaa

SEQ ID NO: 3440524 - RNA, 12 nt, Human
cuccucugaaac

SEQ ID NO: 3440525 - RNA, 14 nt, Human
cuccucugaaacag

SEQ ID NO: 3440526 - RNA, 16 nt, Human
cuccucugaaacagcu

SEQ ID NO: 3440527 - RNA, 18 nt, Human
cuccucugaaacagcugc

SEQ ID NO: 3440528 - RNA, 12 nt, Human
cuccucugcacu

SEQ ID NO: 3440529 - RNA, 17 nt, Human
cuccucugcagugccuu

SEQ ID NO: 3440530 - RNA, 14 nt, Human
cuccucugccaccu

SEQ ID NO: 3440531 - RNA, 15 nt, Human
cuccucugccaccuc

SEQ ID NO: 3440532 - RNA, 16 nt, Human
cuccucugccaccucc

SEQ ID NO: 3440533 - RNA, 17 nt, Human
cuccucugccaccuccc

SEQ ID NO: 3440534 - RNA, 11 nt, Human
cuccucugcug

SEQ ID NO: 3440535 - RNA, 14 nt, Human
cuccucugcugacc

SEQ ID NO: 3440536 - RNA, 16 nt, Human
cuccucugcugaccug

SEQ ID NO: 3440537 - RNA, 19 nt, Human
cuccucugcugaccugcug

SEQ ID NO: 3440538 - RNA, 16 nt, Human
cuccucugcuugccau

SEQ ID NO: 3440539 - RNA, 17 nt, Human
cuccucugcuugccauc

SEQ ID NO: 3440540 - RNA, 21 nt, Human
cuccucugcuugccaucccuc

SEQ ID NO: 3440541 - RNA, 13 nt, Human
cuccucugggcag

SEQ ID NO: 3440542 - RNA, 23 nt, Human
cuccucugggcaggaccucagag

SEQ ID NO: 3440543 - RNA, 14 nt, Human
cuccucuguccagg

SEQ ID NO: 3440544 - RNA, 18 nt, Human
cuccucuguccugcuucu

SEQ ID NO: 3440545 - RNA, 20 nt, Human
cuccucuguccugcuucuga

SEQ ID NO: 3440546 - RNA, 13 nt, Human
cuccucugugacc

SEQ ID NO: 3440547 - RNA, 13 nt, Human
cuccucuguggug

SEQ ID NO: 3440548 - RNA, 19 nt, Human
cuccucuuaaaaaauaaaa

SEQ ID NO: 3440549 - RNA, 21 nt, Human
cuccucuuaaaaaauaaaaac

SEQ ID NO: 3440550 - RNA, 18 nt, Human
cuccucuucaccccggca

SEQ ID NO: 3440551 - RNA, 14 nt, Human
cuccucuuccaggc

SEQ ID NO: 3440552 - RNA, 16 nt, Human
cuccucuuccaugcug

SEQ ID NO: 3440553 - RNA, 15 nt, Human
cuccucuuccccaga

SEQ ID NO: 3440554 - RNA, 17 nt, Human
cuccucuucuacucacu

SEQ ID NO: 3440555 - RNA, 23 nt, Human
cuccucuucuuuuuuuucauuau

SEQ ID NO: 3440556 - RNA, 13 nt, Human
cuccucuuuaaaa

SEQ ID NO: 3440557 - RNA, 18 nt, Human
cuccucuuuaaaacaaaa

SEQ ID NO: 3440558 - RNA, 13 nt, Human
cuccucuuucucu

SEQ ID NO: 3440559 - RNA, 16 nt, Human
cuccucuuuguuuugu

SEQ ID NO: 3440560 - RNA, 19 nt, Human
cuccugacacaccugcagc

SEQ ID NO: 3440561 - RNA, 19 nt, Human
cuccugacaccccacuuag

SEQ ID NO: 3440562 - RNA, 20 nt, Human
cuccugacaccccacuuagc

SEQ ID NO: 3440563 - RNA, 16 nt, Human
cuccugaccaguugca

SEQ ID NO: 3440564 - RNA, 23 nt, Human
cuccugaccaguugcagucacuc

SEQ ID NO: 3440565 - RNA, 14 nt, Human
cuccugaccucagg

SEQ ID NO: 3440566 - RNA, 15 nt, Human
cuccugaccugaggc

SEQ ID NO: 3440567 - RNA, 14 nt, Human
cuccugaccuuagg

SEQ ID NO: 3440568 - RNA, 18 nt, Human
cuccugagaccccuggcc

SEQ ID NO: 3440569 - RNA, 19 nt, Human
cuccugagcccccagcuuc

SEQ ID NO: 3440570 - RNA, 23 nt, Human
cuccugagcccccagcuuccagc

SEQ ID NO: 3440571 - RNA, 13 nt, Human
cuccugagcuagg

SEQ ID NO: 3440572 - RNA, 19 nt, Human
cuccugaggacagcugucc

SEQ ID NO: 3440573 - RNA, 23 nt, Human
cuccugaggaucagaaaguaauu

SEQ ID NO: 3440574 - RNA, 17 nt, Human
cuccugaggcuuuggau

SEQ ID NO: 3440575 - RNA, 19 nt, Human
cuccugagggaggaccugg

SEQ ID NO: 3440576 - RNA, 23 nt, Human
cuccugagggaggaccuggggca

SEQ ID NO: 3440577 - RNA, 19 nt, Human
cuccugaggggcaucugcc

SEQ ID NO: 3440578 - RNA, 21 nt, Human
cuccugaguagcuggauuaca

SEQ ID NO: 3440579 - RNA, 17 nt, Human
cuccugaguagcuggga

SEQ ID NO: 3440580 - RNA, 16 nt, Human
cucucccugccagagg

SEQ ID NO: 3440581 - RNA, 14 nt, Human
cucucccugcugcu

SEQ ID NO: 3440582 - RNA, 12 nt, Human
cucucccuguug

SEQ ID NO: 3440583 - RNA, 15 nt, Human
cucucccuucccucc

SEQ ID NO: 3440584 - RNA, 14 nt, Human
cucucccuugggcu

SEQ ID NO: 3440585 - RNA, 21 nt, Human
cucucccuugggcucugauga

SEQ ID NO: 3440586 - RNA, 16 nt, Human
cucuccgaccagacac

SEQ ID NO: 3440587 - RNA, 19 nt, Human
cucuccuacucggcucugc

SEQ ID NO: 3440588 - RNA, 14 nt, Human
cucuccuagagaca

SEQ ID NO: 3440589 - RNA, 15 nt, Human
cucuccuagccccug

SEQ ID NO: 3440590 - RNA, 21 nt, Human
cucuccuaggcauucuggacc

SEQ ID NO: 3440591 - RNA, 13 nt, Human
cucuccucagacu

SEQ ID NO: 3440592 - RNA, 18 nt, Human
cucuccucagacugcuca

SEQ ID NO: 3440593 - RNA, 23 nt, Human
cucuccucaucucuaacagcuca

SEQ ID NO: 3440594 - RNA, 16 nt, Human
cucuccuccaagacac

SEQ ID NO: 3440595 - RNA, 13 nt, Human
cucuccuccagag

SEQ ID NO: 3440596 - RNA, 16 nt, Human
cucuccuccagaguca

SEQ ID NO: 3440597 - RNA, 11 nt, Human
cucuccucccc

SEQ ID NO: 3440598 - RNA, 15 nt, Human
cucuccuccccaaau

SEQ ID NO: 3440599 - RNA, 15 nt, Human
cucuccuccugccca

SEQ ID NO: 3440600 - RNA, 17 nt, Human
cucuccucuugccacug

SEQ ID NO: 3440601 - RNA, 12 nt, Human
cucuccuggccu

SEQ ID NO: 3440602 - RNA, 13 nt, Human
cucuccuggccua

SEQ ID NO: 3440603 - RNA, 21 nt, Human
cucuccuggccuauccgcugc

SEQ ID NO: 3440604 - RNA, 12 nt, Human
cucuccuggcuu

SEQ ID NO: 3440605 - RNA, 12 nt, Human
cucuccugggca

SEQ ID NO: 3440606 - RNA, 19 nt, Human
cucuccugggcagcugccu

SEQ ID NO: 3440607 - RNA, 19 nt, Human
cucuccugggccccucccu

SEQ ID NO: 3440608 - RNA, 20 nt, Human
cucuccugggccccucccua

SEQ ID NO: 3440609 - RNA, 21 nt, Human
cucuccugggccccucccuac

SEQ ID NO: 3440610 - RNA, 22 nt, Human
cucuccugggccccucccuacc

SEQ ID NO: 3440611 - RNA, 14 nt, Human
cucuccuguaccuc

SEQ ID NO: 3440612 - RNA, 17 nt, Human
cucuccuguaccucuug

SEQ ID NO: 3440613 - RNA, 18 nt, Human
cucuccuguacuuuuucc

SEQ ID NO: 3440614 - RNA, 20 nt, Human
cucuccuguuucccuucccu

SEQ ID NO: 3440615 - RNA, 12 nt, Human
cucuccuuccuu

SEQ ID NO: 3440616 - RNA, 13 nt, Human
cucucgcacaccu

SEQ ID NO: 3440617 - RNA, 17 nt, Human
cucucgcaccuuuccaa

SEQ ID NO: 3440618 - RNA, 23 nt, Human
cucucgcggccucuucucucaga

SEQ ID NO: 3440619 - RNA, 20 nt, Human
cucucggaacugcaugcugc

SEQ ID NO: 3440620 - RNA, 23 nt, Human
cucucggaacugcaugcugcugg

SEQ ID NO: 3440621 - RNA, 16 nt, Human
cucucggaaggcuggc

SEQ ID NO: 3440622 - RNA, 15 nt, Human
cucucggcuccccau

SEQ ID NO: 3440623 - RNA, 18 nt, Human
cucucggcuccccaugug

SEQ ID NO: 3440624 - RNA, 22 nt, Human
cucucuaagugggcauugccau

SEQ ID NO: 3440625 - RNA, 18 nt, Human
cucucuacagagaggaaa

SEQ ID NO: 3440626 - RNA, 13 nt, Human
cucucuacagugc

SEQ ID NO: 3440627 - RNA, 18 nt, Human
cucucuacccagcccauc

SEQ ID NO: 3440628 - RNA, 22 nt, Human
cucucuacuaaaacuacaaaaa

SEQ ID NO: 3440629 - RNA, 22 nt, Human
cucucuaggguacauggugcug

SEQ ID NO: 3440630 - RNA, 14 nt, Human
cucucuaugccucu

SEQ ID NO: 3440631 - RNA, 14 nt, Human
cucucucaaaagag

SEQ ID NO: 3440632 - RNA, 21 nt, Human
cucucucaauuuuugguugaa

SEQ ID NO: 3440633 - RNA, 12 nt, Human
cucucucacucc

SEQ ID NO: 3440634 - RNA, 16 nt, Human
cucucucacuccuuga

SEQ ID NO: 3440635 - RNA, 14 nt, Human
cucucuccagaugu

SEQ ID NO: 3440636 - RNA, 17 nt, Human
cucucuccagauguuuc

SEQ ID NO: 3440637 - RNA, 20 nt, Human
cucucuccagucuuccaccu

SEQ ID NO: 3440638 - RNA, 12 nt, Human
cucucuccauca

SEQ ID NO: 3440639 - RNA, 21 nt, Human
cucucuccaucagaggacacc

SEQ ID NO: 3440640 - RNA, 13 nt, Human
cucucucccaguc

SEQ ID NO: 3440641 - RNA, 14 nt, Human
cucucuccccucaa

SEQ ID NO: 3440642 - RNA, 13 nt, Human
cucucuccucccu

SEQ ID NO: 3440643 - RNA, 14 nt, Human
cucucuccugucca

SEQ ID NO: 3440644 - RNA, 15 nt, Human
cucucuccuguccaa

SEQ ID NO: 3440645 - RNA, 13 nt, Human
cucucucuguugu

SEQ ID NO: 3440646 - RNA, 21 nt, Human
cucucucuucugcuccacccu

SEQ ID NO: 3440647 - RNA, 20 nt, Human
cucucugaguccuggcccaa

SEQ ID NO: 3440648 - RNA, 16 nt, Human
cucucugcagccagcc

SEQ ID NO: 3440649 - RNA, 17 nt, Human
cucucugcaggucccua

SEQ ID NO: 3440650 - RNA, 12 nt, Human
cucucugccacu

SEQ ID NO: 3440651 - RNA, 11 nt, Human
cucucugcccu

SEQ ID NO: 3440652 - RNA, 21 nt, Human
cucucugcccuaaugcgcagg

SEQ ID NO: 3440653 - RNA, 18 nt, Human
cucucugccugugagcca

SEQ ID NO: 3440654 - RNA, 14 nt, Human
cucucugcucugac

SEQ ID NO: 3440655 - RNA, 20 nt, Human
cucucuggaagccccugggc

SEQ ID NO: 3440656 - RNA, 20 nt, Human
cucucuggaagcccuggaga

SEQ ID NO: 3440657 - RNA, 13 nt, Human
cucucuggccucc

SEQ ID NO: 3440658 - RNA, 17 nt, Human
cucucuggccucccacc

SEQ ID NO: 3440659 - RNA, 20 nt, Human
cucucuggccucccacccga

SEQ ID NO: 3440660 - RNA, 16 nt, Human
cucucuggccuucggc

SEQ ID NO: 3440661 - RNA, 19 nt, Human
cucucuggccuucggccuc

SEQ ID NO: 3440662 - RNA, 20 nt, Human
cucucugggccucagaggcc

SEQ ID NO: 3440663 - RNA, 18 nt, Human
cucucuguauaaacauua

SEQ ID NO: 3440664 - RNA, 18 nt, Human
cucucugucccuugcugu

SEQ ID NO: 3440665 - RNA, 18 nt, Human
cucucuuauagaauauuu

SEQ ID NO: 3440666 - RNA, 23 nt, Human
cucucuuauagaauauuuauuac

SEQ ID NO: 3440667 - RNA, 22 nt, Human
cucucuucagacucucagccca

SEQ ID NO: 3440668 - RNA, 13 nt, Human
cucucuucccuca

SEQ ID NO: 3440669 - RNA, 19 nt, Human
cucucuuccuaucccaucc

SEQ ID NO: 3440670 - RNA, 18 nt, Human
cucucuuccugccccucu

SEQ ID NO: 3440671 - RNA, 19 nt, Human
cucucuuccugccccucuu

SEQ ID NO: 3440672 - RNA, 20 nt, Human
cucucuuccugccccucuuu

SEQ ID NO: 3440673 - RNA, 15 nt, Human
cucucuucugcucca

SEQ ID NO: 3440674 - RNA, 16 nt, Human
cucucuucugcuccac

SEQ ID NO: 3440675 - RNA, 18 nt, Human
cucucuucugcuccaccc

SEQ ID NO: 3440676 - RNA, 13 nt, Human
cucucuugcaccc

SEQ ID NO: 3440677 - RNA, 15 nt, Human
cucucuugguuuccu

SEQ ID NO: 3440678 - RNA, 17 nt, Human
cucucuuuauacagcug

SEQ ID NO: 3440679 - RNA, 16 nt, Human
cucucuuugcauggau

SEQ ID NO: 3440680 - RNA, 18 nt, Human
cucucuuugcauggauuu

SEQ ID NO: 3440681 - RNA, 15 nt, Human
cucucuuugcccagu

SEQ ID NO: 3440682 - RNA, 23 nt, Human
cucucuuugcccaguuggagacu

SEQ ID NO: 3440683 - RNA, 15 nt, Human
cucucuuugggaaug

SEQ ID NO: 3440684 - RNA, 17 nt, Human
cucucuuugggaauguu

SEQ ID NO: 3440685 - RNA, 17 nt, Human
cucucuuuucuguacuu

SEQ ID NO: 3440686 - RNA, 18 nt, Human
cucucuuuucuguacuuc

SEQ ID NO: 3440687 - RNA, 20 nt, Human
cucucuuuuuggaggugcuu

SEQ ID NO: 3440688 - RNA, 17 nt, Human
cucugaaacagcugccu

SEQ ID NO: 3440689 - RNA, 20 nt, Human
cucugaaacagcugccuuag

SEQ ID NO: 3440690 - RNA, 15 nt, Human
cucugaaacccugga

SEQ ID NO: 3440691 - RNA, 21 nt, Human
cucugaaagagaaacacguau

SEQ ID NO: 3440692 - RNA, 19 nt, Human
cucugaaaguuguacauga

SEQ ID NO: 3440693 - RNA, 14 nt, Human
cucugaacacaggc

SEQ ID NO: 3440694 - RNA, 18 nt, Human
cucugaacacaggcagcu

SEQ ID NO: 3440695 - RNA, 13 nt, Human
cucugaacuuugg

SEQ ID NO: 3440696 - RNA, 21 nt, Human
cucugaagaguggguuucaca

SEQ ID NO: 3440697 - RNA, 23 nt, Human
cucugaagaguggguuucacaag

SEQ ID NO: 3440698 - RNA, 23 nt, Human
cucugaagcaaggcgguggacuu

SEQ ID NO: 3440699 - RNA, 14 nt, Human
cucugaagcauguu

SEQ ID NO: 3440700 - RNA, 17 nt, Human
cucugaagccacaaaua

SEQ ID NO: 3440701 - RNA, 15 nt, Human
cucugaagccucugg

SEQ ID NO: 3440702 - RNA, 17 nt, Human
cucugaagccucuggga

SEQ ID NO: 3440703 - RNA, 21 nt, Human
cucugaaggaggccaccuccu

SEQ ID NO: 3440704 - RNA, 14 nt, Human
cucugaagggaggu

SEQ ID NO: 3440705 - RNA, 17 nt, Human
cucugaagggcaucaug

SEQ ID NO: 3440706 - RNA, 19 nt, Human
cucugaagugaaacugcuu

SEQ ID NO: 3440707 - RNA, 23 nt, Human
cucugaagugaaacugcuuguuu

SEQ ID NO: 3440708 - RNA, 19 nt, Human
cucugaauaagcacuuuuu

SEQ ID NO: 3440709 - RNA, 21 nt, Human
cucugaauaagcacuuuuuaa

SEQ ID NO: 3440710 - RNA, 20 nt, Human
cucugaauuaguccuugcuu

SEQ ID NO: 3440711 - RNA, 18 nt, Human
cucugaauuccaaguaga

SEQ ID NO: 3440712 - RNA, 21 nt, Human
cucugaauuuacuuccuugca

SEQ ID NO: 3440713 - RNA, 14 nt, Human
cucugacaagggcu

SEQ ID NO: 3440714 - RNA, 16 nt, Human
cucugacaagggcuga

SEQ ID NO: 3440715 - RNA, 18 nt, Human
cucugacaagggcugacc

SEQ ID NO: 3440716 - RNA, 23 nt, Human
cuccggccaggugccuccugaca

SEQ ID NO: 3440717 - RNA, 20 nt, Human
cuccggccugaugacagagc

SEQ ID NO: 3440718 - RNA, 14 nt, Human
cuccggcgucagcc

SEQ ID NO: 3440719 - RNA, 16 nt, Human
cuccggcgucagccuc

SEQ ID NO: 3440720 - RNA, 18 nt, Human
cuccggcgucagccucca

SEQ ID NO: 3440721 - RNA, 21 nt, Human
cuccggcgucagccuccagcc

SEQ ID NO: 3440722 - RNA, 17 nt, Human
cuccggcugugcuggga

SEQ ID NO: 3440723 - RNA, 18 nt, Human
cuccggcuugaccuguuu

SEQ ID NO: 3440724 - RNA, 17 nt, Human
cuccgggacccccagga

SEQ ID NO: 3440725 - RNA, 15 nt, Human
cucugcgucuauccu

SEQ ID NO: 3440726 - RNA, 21 nt, Human
cucugcgucuauccuguguag

SEQ ID NO: 3440727 - RNA, 20 nt, Human
cucugcuaaauugauguuga

SEQ ID NO: 3440728 - RNA, 23 nt, Human
cucugcuauauauaaaacggugc

SEQ ID NO: 3440729 - RNA, 18 nt, Human
cucugcuauuaggccagc

SEQ ID NO: 3440730 - RNA, 16 nt, Human
cucugcucagccaagc

SEQ ID NO: 3440731 - RNA, 23 nt, Human
aaauaucaaauuaauugugugaa

SEQ ID NO: 3440732 - RNA, 14 nt, Human
aaauaucaaucauu

SEQ ID NO: 3440733 - RNA, 20 nt, Human
aaauaucaaucauuuuccuu

SEQ ID NO: 3440734 - RNA, 22 nt, Human
aaauaucacuugucaauaaaau

SEQ ID NO: 3440735 - RNA, 18 nt, Human
aaauaucaguuacucagc

SEQ ID NO: 3440736 - RNA, 15 nt, Human
aaauaucauucagca

SEQ ID NO: 3440737 - RNA, 17 nt, Human
aaauaucauucagcaac

SEQ ID NO: 3440738 - RNA, 20 nt, Human
aaauaucccuccuguuggga

SEQ ID NO: 3440739 - RNA, 14 nt, Human
aaauaucccuuccg

SEQ ID NO: 3440740 - RNA, 19 nt, Human
aaauaucuaguaauauauu

SEQ ID NO: 3440741 - RNA, 21 nt, Human
aaauaucuaguaauauauuua

SEQ ID NO: 3440742 - RNA, 17 nt, Human
aaauaucuauguuuuac

SEQ ID NO: 3440743 - RNA, 21 nt, Human
aaauaucugaaaauguaugug

SEQ ID NO: 3440744 - RNA, 12 nt, Human
aaauaucuguau

SEQ ID NO: 3440745 - RNA, 21 nt, Human
aaauaucugugaaauaucauc

SEQ ID NO: 3440746 - RNA, 20 nt, Human
aaauaucuuguguuguccuu

SEQ ID NO: 3440747 - RNA, 15 nt, Human
aaauaucuuuuaugu

SEQ ID NO: 3440748 - RNA, 21 nt, Human
aaauaucuuuuauguuugaau

SEQ ID NO: 3440749 - RNA, 21 nt, Human
aaauaugaacccuuuguuucu

SEQ ID NO: 3440750 - RNA, 12 nt, Human
aaauaugaagcu

SEQ ID NO: 3440751 - RNA, 15 nt, Human
aaauaugauguuaaa

SEQ ID NO: 3440752 - RNA, 15 nt, Human
aaauaugcaaagcac

SEQ ID NO: 3440753 - RNA, 17 nt, Human
aaauaugcaaagcacug

SEQ ID NO: 3440754 - RNA, 13 nt, Human
aaauaugcacuaa

SEQ ID NO: 3440755 - RNA, 18 nt, Human
aaauaugcagugauaugg

SEQ ID NO: 3440756 - RNA, 13 nt, Human
aaauaugcucuuu

SEQ ID NO: 3440757 - RNA, 18 nt, Human
aaauaugcucuuuuguuu

SEQ ID NO: 3440758 - RNA, 13 nt, Human
aaauauguauuua

SEQ ID NO: 3440759 - RNA, 19 nt, Human
aaauauguccauaucuaac

SEQ ID NO: 3440760 - RNA, 23 nt, Human
aaauaugugagauuuuuuauugc

SEQ ID NO: 3440761 - RNA, 16 nt, Human
aaauauguugaugaaa

SEQ ID NO: 3440762 - RNA, 13 nt, Human
aaauauguuuuua

SEQ ID NO: 3440763 - RNA, 22 nt, Human
aaauauuagaugugauuuaaua

SEQ ID NO: 3440764 - RNA, 19 nt, Human
aaauauuaguuaauggauu

SEQ ID NO: 3440765 - RNA, 15 nt, Human
aaauauuauaacuca

SEQ ID NO: 3440766 - RNA, 15 nt, Human
aaauauuauguguuu

SEQ ID NO: 3440767 - RNA, 21 nt, Human
aaauauuauuuguguuuccua

SEQ ID NO: 3440768 - RNA, 16 nt, Human
aaauauucacaucuuc

SEQ ID NO: 3440769 - RNA, 23 nt, Human
aaauauuccauccauauacuuug

SEQ ID NO: 3440770 - RNA, 13 nt, Human
aaauauucuauau

SEQ ID NO: 3440771 - RNA, 18 nt, Human
aaauauucuauuuucauu

SEQ ID NO: 3440772 - RNA, 15 nt, Human
aaauauugaggcuuu

SEQ ID NO: 3440773 - RNA, 23 nt, Human
aaauauugaggcuuuguguugua

SEQ ID NO: 3440774 - RNA, 15 nt, Human
aaauauugaugaaaa

SEQ ID NO: 3440775 - RNA, 21 nt, Human
aaauauugguugggaugacuu

SEQ ID NO: 3440776 - RNA, 21 nt, Human
aaauauuuaauguugaacaaa

SEQ ID NO: 3440777 - RNA, 15 nt, Human
aaauauuuacauaug

SEQ ID NO: 3440778 - RNA, 17 nt, Human
aaauauuuacauaugaa

SEQ ID NO: 3440779 - RNA, 21 nt, Human
aaauauuuacauaugaaauuu

SEQ ID NO: 3440780 - RNA, 22 nt, Human
aaauauuuagauguaauuuugu

SEQ ID NO: 3440781 - RNA, 10 nt, Human
aaauauuuau

SEQ ID NO: 3440782 - RNA, 19 nt, Human
aaauauuuauaaaacuucu

SEQ ID NO: 3440783 - RNA, 15 nt, Human
aaauauuuaugaaga

SEQ ID NO: 3440784 - RNA, 15 nt, Human
aaauauuuauguaaa

SEQ ID NO: 3440785 - RNA, 16 nt, Human
aaauauuucagugaau

SEQ ID NO: 3440786 - RNA, 12 nt, Human
aaauauuuccuu

SEQ ID NO: 3440787 - RNA, 16 nt, Human
aaauauuuuaaagaau

SEQ ID NO: 3440788 - RNA, 18 nt, Human
aaauauuuuaaagaauug

SEQ ID NO: 3440789 - RNA, 23 nt, Human
aaauauuuuaaagaauuguguca

SEQ ID NO: 3440790 - RNA, 14 nt, Human
aaauauuuuaugau

SEQ ID NO: 3440791 - RNA, 12 nt, Human
aaauauuuucua

SEQ ID NO: 3440792 - RNA, 13 nt, Human
aaauauuuucuau

SEQ ID NO: 3440793 - RNA, 17 nt, Human
aaauauuuucugugugu

SEQ ID NO: 3440794 - RNA, 22 nt, Human
aaauauuuucuguguguuccug

SEQ ID NO: 3440795 - RNA, 15 nt, Human
aaauauuuugaauca

SEQ ID NO: 3440796 - RNA, 20 nt, Human
aaauauuuugauaauaaauu

SEQ ID NO: 3440797 - RNA, 22 nt, Human
aaauauuuugaucuucaacaaa

SEQ ID NO: 3440798 - RNA, 23 nt, Human
aaauauuuugaucuucaacaaau

SEQ ID NO: 3440799 - RNA, 12 nt, Human
aaauauuuuguc

SEQ ID NO: 3440800 - RNA, 14 nt, Human
aaauauuuugucua

SEQ ID NO: 3440801 - RNA, 17 nt, Human
aaauauuuugucuaaaa

SEQ ID NO: 3440802 - RNA, 17 nt, Human
aaauauuuuuaaaagau

SEQ ID NO: 3440803 - RNA, 21 nt, Human
aaaucaaaacucacaagugcu

SEQ ID NO: 3440804 - RNA, 14 nt, Human
aaaucaaaaucucu

SEQ ID NO: 3440805 - RNA, 16 nt, Human
aaaucaaaaucucucc

SEQ ID NO: 3440806 - RNA, 20 nt, Human
aaaucaaaaucucuccacuu

SEQ ID NO: 3440807 - RNA, 19 nt, Human
aaaucaaauaugcaaagca

SEQ ID NO: 3440808 - RNA, 16 nt, Human
aaaucaaauguaaagu

SEQ ID NO: 3440809 - RNA, 21 nt, Human
aaaucaacaccuuaauaugcu

SEQ ID NO: 3440810 - RNA, 17 nt, Human
aaaucaacagaagcauu

SEQ ID NO: 3440811 - RNA, 19 nt, Human
aaaucaacagaagcauuug

SEQ ID NO: 3440812 - RNA, 18 nt, Human
aaaucaacuugcuuauca

SEQ ID NO: 3440813 - RNA, 17 nt, Human
aaaucaagcaagccucu

SEQ ID NO: 3440814 - RNA, 23 nt, Human
aaaucaaguauuauaaacaagaa

SEQ ID NO: 3440815 - RNA, 18 nt, Human
aaaucaaguauuugggaa

SEQ ID NO: 3440816 - RNA, 16 nt, Human
aaaucaaguauuuugu

SEQ ID NO: 3440817 - RNA, 16 nt, Human
aaaucaaguccuuuaa

SEQ ID NO: 3440818 - RNA, 14 nt, Human
aaaucaaguuucca

SEQ ID NO: 3440819 - RNA, 16 nt, Human
aaaucaaguuuccaag

SEQ ID NO: 3440820 - RNA, 20 nt, Human
aaaucaaguuuccaagcaaa

SEQ ID NO: 3440821 - RNA, 12 nt, Human
aaaucaaguuuu

SEQ ID NO: 3440822 - RNA, 17 nt, Human
aaaucaauaguugaauu

SEQ ID NO: 3440823 - RNA, 17 nt, Human
aaaucaauaugcagaau

SEQ ID NO: 3440824 - RNA, 19 nt, Human
aaaucaauuacugguccaa

SEQ ID NO: 3440825 - RNA, 17 nt, Human
aaaucaauuuuuaggaa

SEQ ID NO: 3440826 - RNA, 22 nt, Human
aaaucacaaaaauuugaacacu

SEQ ID NO: 3440827 - RNA, 14 nt, Human
aaaucacauccuua

SEQ ID NO: 3440828 - RNA, 18 nt, Human
aaaucacauccuuauccu

SEQ ID NO: 3440829 - RNA, 18 nt, Human
aaaucacuaacauuauau

SEQ ID NO: 3440830 - RNA, 15 nt, Human
aaaucacuuccauag

SEQ ID NO: 3440831 - RNA, 14 nt, Human
aaaucacuuucaua

SEQ ID NO: 3440832 - RNA, 21 nt, Human
aaaucagaagucaucuugcua

SEQ ID NO: 3440833 - RNA, 22 nt, Human
aaaucagauguugaauucuuuu

SEQ ID NO: 3440834 - RNA, 21 nt, Human
aaaucagccaaguuuuauaau

SEQ ID NO: 3440835 - RNA, 17 nt, Human
aaaucagccaauuaugu

SEQ ID NO: 3440836 - RNA, 18 nt, Human
aaaucagccaauuauguu

SEQ ID NO: 3440837 - RNA, 21 nt, Human
aaaucagccugcuccagcugu

SEQ ID NO: 3440838 - RNA, 23 nt, Human
aaaucagccugcuccagcuguuc

SEQ ID NO: 3440839 - RNA, 19 nt, Human
aaaucagcuauuuugugaa

SEQ ID NO: 3440840 - RNA, 16 nt, Human
aaaucagcugcuacua

SEQ ID NO: 3440841 - RNA, 22 nt, Human
aaaucaggcuuuuguuuccuuu

SEQ ID NO: 3440842 - RNA, 23 nt, Human
aaaucaggcuuuuguuuccuuuu

SEQ ID NO: 3440843 - RNA, 14 nt, Human
aaaucagguuuucu

SEQ ID NO: 3440844 - RNA, 22 nt, Human
aaaucagguuuucuuuuaagaa

SEQ ID NO: 3440845 - RNA, 15 nt, Human
aaaucaguaaacacu

SEQ ID NO: 3440846 - RNA, 11 nt, Human
aaaucaguaag

SEQ ID NO: 3440847 - RNA, 22 nt, Human
aaaucagucagugcaaauguca

SEQ ID NO: 3440848 - RNA, 22 nt, Human
aaaucauacuccuaugcuuuag

SEQ ID NO: 3440849 - RNA, 19 nt, Human
aaaucauaguuaaauguua

SEQ ID NO: 3440850 - RNA, 13 nt, Human
aaaucauauugau

SEQ ID NO: 3440851 - RNA, 13 nt, Human
aaaucaucaagaa

SEQ ID NO: 3440852 - RNA, 23 nt, Human
aaaucaucaagaagggcugcaug

SEQ ID NO: 3440853 - RNA, 15 nt, Human
aaaucaucagaaagg

SEQ ID NO: 3440854 - RNA, 22 nt, Human
aaaucaucagaaaggaaaaaca

SEQ ID NO: 3440855 - RNA, 17 nt, Human
aaaucaucgaaaauuca

SEQ ID NO: 3440856 - RNA, 21 nt, Human
aaaucaugaagauauuuuucc

SEQ ID NO: 3440857 - RNA, 18 nt, Human
aaaucaugccaguauuuu

SEQ ID NO: 3440858 - RNA, 16 nt, Human
aaaucauucauuuucu

SEQ ID NO: 3440859 - RNA, 19 nt, Human
aaaucauucuuacuaaaaa

SEQ ID NO: 3440860 - RNA, 21 nt, Human
aaaucauuucugcaucagcug

SEQ ID NO: 3440861 - RNA, 22 nt, Human
aaaucauuucugcaucagcugc

SEQ ID NO: 3440862 - RNA, 23 nt, Human
aaaucauuuggguuaauauggcu

SEQ ID NO: 3440863 - RNA, 19 nt, Human
aaaucauuuuaggaaagga

SEQ ID NO: 3440864 - RNA, 16 nt, Human
aaaucauuuuauaugu

SEQ ID NO: 3440865 - RNA, 14 nt, Human
aaaucauuuuaugu

SEQ ID NO: 3440866 - RNA, 15 nt, Human
aaaucauuuuauguc

SEQ ID NO: 3440867 - RNA, 14 nt, Human
aaaucauuuugcaa

SEQ ID NO: 3440868 - RNA, 15 nt, Human
aaauccaaauauugu

SEQ ID NO: 3440869 - RNA, 14 nt, Human
cucucaucugaggc

SEQ ID NO: 3440870 - RNA, 13 nt, Human
cucucaugaaccu

SEQ ID NO: 3440871 - RNA, 19 nt, Human
cucucaugcugccccugcc

SEQ ID NO: 3440872 - RNA, 14 nt, Human
cucucauuccccag

SEQ ID NO: 3440873 - RNA, 15 nt, Human
cucucauuccccagg

SEQ ID NO: 3440874 - RNA, 18 nt, Human
cucucauuuagccugucc

SEQ ID NO: 3440875 - RNA, 15 nt, Human
cucuccaaaaaugca

SEQ ID NO: 3440876 - RNA, 15 nt, Human
cucuccaaaccacuu

SEQ ID NO: 3440877 - RNA, 12 nt, Human
cucuccaagggc

SEQ ID NO: 3440878 - RNA, 22 nt, Human
cucuccaagggcuucugcaccc

SEQ ID NO: 3440879 - RNA, 15 nt, Human
cucuccaagugccag

SEQ ID NO: 3440880 - RNA, 16 nt, Human
cucuccaagugccaga

SEQ ID NO: 3440881 - RNA, 23 nt, Human
cucuccacacagugcucaaggcc

SEQ ID NO: 3440882 - RNA, 17 nt, Human
cucuccaccuaguggcu

SEQ ID NO: 3440883 - RNA, 20 nt, Human
cucuccaccuaguggcuguc

SEQ ID NO: 3440884 - RNA, 14 nt, Human
cucuccaccucagc

SEQ ID NO: 3440885 - RNA, 15 nt, Human
cucuccaccucagcc

SEQ ID NO: 3440886 - RNA, 16 nt, Human
cucuccaccucagccu

SEQ ID NO: 3440887 - RNA, 22 nt, Human
cucuccacucaugugacucuuu

SEQ ID NO: 3440888 - RNA, 13 nt, Human
cucuccacugugc

SEQ ID NO: 3440889 - RNA, 19 nt, Human
cucuccacugugcuuucag

SEQ ID NO: 3440890 - RNA, 14 nt, Human
cucuccacuuucag

SEQ ID NO: 3440891 - RNA, 21 nt, Human
cucuccacuuucagcugucuu

SEQ ID NO: 3440892 - RNA, 16 nt, Human
cucuccagcaggccca

SEQ ID NO: 3440893 - RNA, 13 nt, Human
cucuccagccuca

SEQ ID NO: 3440894 - RNA, 16 nt, Human
cucuccagccucagcc

SEQ ID NO: 3440895 - RNA, 14 nt, Human
cucuccagccugac

SEQ ID NO: 3440896 - RNA, 13 nt, Human
cucuccagcuaua

SEQ ID NO: 3440897 - RNA, 14 nt, Human
cucuccagcuccaa

SEQ ID NO: 3440898 - RNA, 14 nt, Human
cucuccagcugacu

SEQ ID NO: 3440899 - RNA, 16 nt, Human
cucuccagcugacuaa

SEQ ID NO: 3440900 - RNA, 18 nt, Human
cucuccagcugacuaaac

SEQ ID NO: 3440901 - RNA, 14 nt, Human
cucuccaggcacca

SEQ ID NO: 3440902 - RNA, 18 nt, Human
cucuccaggcacccuucu

SEQ ID NO: 3440903 - RNA, 16 nt, Human
cucuccagucuuccac

SEQ ID NO: 3440904 - RNA, 22 nt, Human
cucuccagucuuccaccuggaa

SEQ ID NO: 3440905 - RNA, 23 nt, Human
cucuccaguuugcaccugucccc

SEQ ID NO: 3440906 - RNA, 18 nt, Human
cucuccauaaccccaccc

SEQ ID NO: 3440907 - RNA, 17 nt, Human
cucuccauucugcuccu

SEQ ID NO: 3440908 - RNA, 19 nt, Human
cucuccauucugcuccuuc

SEQ ID NO: 3440909 - RNA, 13 nt, Human
cucuccauuuaau

SEQ ID NO: 3440910 - RNA, 22 nt, Human
cucuccauuuuggugucuuucu

SEQ ID NO: 3440911 - RNA, 15 nt, Human
cucucccaaguccac

SEQ ID NO: 3440912 - RNA, 21 nt, Human
cucucccacccucuuccuacu

SEQ ID NO: 3440913 - RNA, 21 nt, Human
cucucccacgggaccuggggc

SEQ ID NO: 3440914 - RNA, 12 nt, Human
cucucccaggcc

SEQ ID NO: 3440915 - RNA, 13 nt, Human
cucucccaggccc

SEQ ID NO: 3440916 - RNA, 22 nt, Human
cucucccagucuacccagagaa

SEQ ID NO: 3440917 - RNA, 12 nt, Human
cucucccauccc

SEQ ID NO: 3440918 - RNA, 13 nt, Human
cucucccaucccc

SEQ ID NO: 3440919 - RNA, 18 nt, Human
cucucccauggagcccca

SEQ ID NO: 3440920 - RNA, 21 nt, Human
cucucccauggagccccagcc

SEQ ID NO: 3440921 - RNA, 23 nt, Human
cucucccauggagccccagcccc

SEQ ID NO: 3440922 - RNA, 21 nt, Human
cucucccauugucccucugcc

SEQ ID NO: 3440923 - RNA, 20 nt, Human
cucuccccaacccccauucu

SEQ ID NO: 3440924 - RNA, 19 nt, Human
cucuccccacgagggcugg

SEQ ID NO: 3440925 - RNA, 22 nt, Human
cucuccccagcaagugagagcu

SEQ ID NO: 3440926 - RNA, 24 nt, Human
cucuccccagcaagugagagcugg

SEQ ID NO: 3440927 - RNA, 13 nt, Human
cucuccccagccc

SEQ ID NO: 3440928 - RNA, 17 nt, Human
cucuccccagcccagag

SEQ ID NO: 3440929 - RNA, 18 nt, Human
cucuccccagguccagcu

SEQ ID NO: 3440930 - RNA, 17 nt, Human
cucuccccccccccucc

SEQ ID NO: 3440931 - RNA, 18 nt, Human
ccccucugucuacaaaua

SEQ ID NO: 3440932 - RNA, 15 nt, Human
ccccucuuccucuug

SEQ ID NO: 3440933 - RNA, 14 nt, Human
ccccucuucugagc

SEQ ID NO: 3440934 - RNA, 14 nt, Human
ccccucuuggagaa

SEQ ID NO: 3440935 - RNA, 18 nt, Human
ccccucuugucuccccug

SEQ ID NO: 3440936 - RNA, 17 nt, Human
ccccucuuucucuuucu

SEQ ID NO: 3440937 - RNA, 13 nt, Human
ccccugaaacuua

SEQ ID NO: 3440938 - RNA, 15 nt, Human
ccccugacaacacuc

SEQ ID NO: 3440939 - RNA, 15 nt, Human
ccccugaccugugag

SEQ ID NO: 3440940 - RNA, 14 nt, Human
ccccugacucauca

SEQ ID NO: 3440941 - RNA, 19 nt, Human
ccccugagauccccugagc

SEQ ID NO: 3440942 - RNA, 19 nt, Human
ccccugagcaaugucugug

SEQ ID NO: 3440943 - RNA, 11 nt, Human
ccccugagccc

SEQ ID NO: 3440944 - RNA, 13 nt, Human
ccccugagcccac

SEQ ID NO: 3440945 - RNA, 20 nt, Human
ccccugcaaagcccagcuug

SEQ ID NO: 3440946 - RNA, 23 nt, Human
ccccugcacagcaggcugccagu

SEQ ID NO: 3440947 - RNA, 14 nt, Human
ccccugcacuguaa

SEQ ID NO: 3440948 - RNA, 16 nt, Human
ccccugcacuguaaaa

SEQ ID NO: 3440949 - RNA, 13 nt, Human
ccccugcagcacg

SEQ ID NO: 3440950 - RNA, 20 nt, Human
ccccugcagcacggacaaua

SEQ ID NO: 3440951 - RNA, 11 nt, Human
ccccugcagcu

SEQ ID NO: 3440952 - RNA, 22 nt, Human
ccccugcagcuuguagccagcc

SEQ ID NO: 3440953 - RNA, 23 nt, Human
ccccugcaggaaggagcugccug

SEQ ID NO: 3440954 - RNA, 15 nt, Human
ccccugccaccuccu

SEQ ID NO: 3440955 - RNA, 14 nt, Human
ccccugccagggca

SEQ ID NO: 3440956 - RNA, 23 nt, Human
ccccugcccagaucagccagaag

SEQ ID NO: 3440957 - RNA, 13 nt, Human
ccccugccccagc

SEQ ID NO: 3440958 - RNA, 14 nt, Human
ccccugccccagcc

SEQ ID NO: 3440959 - RNA, 17 nt, Human
ccccugcccccugcagg

SEQ ID NO: 3440960 - RNA, 13 nt, Human
ccccugccccucc

SEQ ID NO: 3440961 - RNA, 18 nt, Human
ccccugccccugcuacug

SEQ ID NO: 3440962 - RNA, 19 nt, Human
ccccugcccggcugcggaa

SEQ ID NO: 3440963 - RNA, 15 nt, Human
ccccugcccucgugg

SEQ ID NO: 3440964 - RNA, 21 nt, Human
ccccugcccucguggccagcc

SEQ ID NO: 3440965 - RNA, 22 nt, Human
ccccugcccucguggccagccc

SEQ ID NO: 3440966 - RNA, 17 nt, Human
ccccugccggccggggc

SEQ ID NO: 3440967 - RNA, 15 nt, Human
ccccugccuccaccc

SEQ ID NO: 3440968 - RNA, 15 nt, Human
ccccugccucucugc

SEQ ID NO: 3440969 - RNA, 11 nt, Human
ccccugccugc

SEQ ID NO: 3440970 - RNA, 15 nt, Human
ccccugccugccaug

SEQ ID NO: 3440971 - RNA, 13 nt, Human
ccccugccugccc

SEQ ID NO: 3440972 - RNA, 15 nt, Human
ccccugcuacugcca

SEQ ID NO: 3440973 - RNA, 12 nt, Human
ccccugcugccu

SEQ ID NO: 3440974 - RNA, 13 nt, Human
ccccugcugccuc

SEQ ID NO: 3440975 - RNA, 14 nt, Human
ccccugcugggugu

SEQ ID NO: 3440976 - RNA, 11 nt, Human
ccccugcuggu

SEQ ID NO: 3440977 - RNA, 20 nt, Human
ccccugcugguucaggguug

SEQ ID NO: 3440978 - RNA, 13 nt, Human
ccccugcuucagu

SEQ ID NO: 3440979 - RNA, 13 nt, Human
ccccugcuucucc

SEQ ID NO: 3440980 - RNA, 15 nt, Human
ccccugcuucuccag

SEQ ID NO: 3440981 - RNA, 18 nt, Human
ccccugcuucuccagccu

SEQ ID NO: 3440982 - RNA, 20 nt, Human
ccccuggaagagcccagucu

SEQ ID NO: 3440983 - RNA, 17 nt, Human
ccccuggaagcagugcc

SEQ ID NO: 3440984 - RNA, 11 nt, Human
ccccuggaccc

SEQ ID NO: 3440985 - RNA, 20 nt, Human
ccccuggaggcacugaagug

SEQ ID NO: 3440986 - RNA, 17 nt, Human
ccccuggaggcugccuc

SEQ ID NO: 3440987 - RNA, 20 nt, Human
ccccuggaggcugccuccca

SEQ ID NO: 3440988 - RNA, 14 nt, Human
ccccuggaugaagu

SEQ ID NO: 3440989 - RNA, 15 nt, Human
ccccuggaugcagcc

SEQ ID NO: 3440990 - RNA, 12 nt, Human
ccccuggcagag

SEQ ID NO: 3440991 - RNA, 11 nt, Human
ccccuggccca

SEQ ID NO: 3440992 - RNA, 14 nt, Human
ccccuggcccagcg

SEQ ID NO: 3440993 - RNA, 22 nt, Human
ccccuggcccagcggccccucc

SEQ ID NO: 3440994 - RNA, 19 nt, Human
ccccuggccucccccacuu

SEQ ID NO: 3440995 - RNA, 13 nt, Human
ccccuggccuccg

SEQ ID NO: 3440996 - RNA, 11 nt, Human
ccccuggccuu

SEQ ID NO: 3440997 - RNA, 20 nt, Human
ccccuggcuccaggccaggg

SEQ ID NO: 3440998 - RNA, 23 nt, Human
ccccuggcuuuucacugcuggcu

SEQ ID NO: 3440999 - RNA, 20 nt, Human
ccccugggcuuggccugcug

SEQ ID NO: 3441000 - RNA, 22 nt, Human
ccccugggcuuggccugcugug

SEQ ID NO: 3441001 - RNA, 12 nt, Human
ccccuggggccu

SEQ ID NO: 3441002 - RNA, 18 nt, Human
ccccuggggcuucuccug

SEQ ID NO: 3441003 - RNA, 22 nt, Human
ccccuggggucucugcugcauu

SEQ ID NO: 3441004 - RNA, 19 nt, Human
ccccugggguggccaccag

SEQ ID NO: 3441005 - RNA, 23 nt, Human
ccccugggugggugguggggagg

SEQ ID NO: 3441006 - RNA, 21 nt, Human
ccccugguccccuccuuccca

SEQ ID NO: 3441007 - RNA, 22 nt, Human
ccccugguggacaguccuggga

SEQ ID NO: 3441008 - RNA, 23 nt, Human
ccccugguggacaguccugggag

SEQ ID NO: 3441009 - RNA, 11 nt, Human
ccccuguacac

SEQ ID NO: 3441010 - RNA, 14 nt, Human
ccccuguacuccag

SEQ ID NO: 3441011 - RNA, 22 nt, Human
ccccugucccaugcaggcccuu

SEQ ID NO: 3441012 - RNA, 14 nt, Human
ccccuguccucacu

SEQ ID NO: 3441013 - RNA, 12 nt, Human
ccccuguccuga

SEQ ID NO: 3441014 - RNA, 23 nt, Human
ccccugucucucagggccaggcc

SEQ ID NO: 3441015 - RNA, 16 nt, Human
cugaauacagaggcaa

SEQ ID NO: 3441016 - RNA, 15 nt, Human
cugaauaccacucug

SEQ ID NO: 3441017 - RNA, 17 nt, Human
cugaauaccacucugua

SEQ ID NO: 3441018 - RNA, 22 nt, Human
cugaauaccacucuguaauugc

SEQ ID NO: 3441019 - RNA, 18 nt, Human
cugaauaccucuuugaaa

SEQ ID NO: 3441020 - RNA, 15 nt, Human
cugaauagauaugaa

SEQ ID NO: 3441021 - RNA, 11 nt, Human
cugaauagauu

SEQ ID NO: 3441022 - RNA, 21 nt, Human
cugaauaggcgaucacaacgu

SEQ ID NO: 3441023 - RNA, 19 nt, Human
cugaauaugaggcauuugg

SEQ ID NO: 3441024 - RNA, 21 nt, Human
cugaauauugccauuaugcuu

SEQ ID NO: 3441025 - RNA, 16 nt, Human
cugaauauuuauauuu

SEQ ID NO: 3441026 - RNA, 18 nt, Human
cugaaucaugagccugcu

SEQ ID NO: 3441027 - RNA, 22 nt, Human
cugaaucauucucgauuuaacu

SEQ ID NO: 3441028 - RNA, 19 nt, Human
cugaauccaaacuaaucca

SEQ ID NO: 3441029 - RNA, 19 nt, Human
cugaaucgagugagacaaa

SEQ ID NO: 3441030 - RNA, 18 nt, Human
cugaaugaaacccccaca

SEQ ID NO: 3441031 - RNA, 20 nt, Human
cugaaugaacaaccucggcu

SEQ ID NO: 3441032 - RNA, 14 nt, Human
cugaaugaagcagu

SEQ ID NO: 3441033 - RNA, 17 nt, Human
cugaaugcucugugcga

SEQ ID NO: 3441034 - RNA, 16 nt, Human
cugaaugcugcuacuu

SEQ ID NO: 3441035 - RNA, 19 nt, Human
cugaaugcuuauagguggc

SEQ ID NO: 3441036 - RNA, 21 nt, Human
cugaaugcuuauagguggccu

SEQ ID NO: 3441037 - RNA, 18 nt, Human
cugaaugcuucuaaguaa

SEQ ID NO: 3441038 - RNA, 23 nt, Human
cugaauggcuugcaguuguuccu

SEQ ID NO: 3441039 - RNA, 19 nt, Human
cugaaugggaucaugaaag

SEQ ID NO: 3441040 - RNA, 14 nt, Human
cugaaugguccagg

SEQ ID NO: 3441041 - RNA, 22 nt, Human
cugaaugguuccaugccugagg

SEQ ID NO: 3441042 - RNA, 16 nt, Human
cugaauguauguaaau

SEQ ID NO: 3441043 - RNA, 11 nt, Human
cugaauguauu

SEQ ID NO: 3441044 - RNA, 22 nt, Human
cugaaugucauugaaaaacuaa

SEQ ID NO: 3441045 - RNA, 23 nt, Human
cugaaugugguuucaaucuaauu

SEQ ID NO: 3441046 - RNA, 11 nt, Human
cugaauguucu

SEQ ID NO: 3441047 - RNA, 13 nt, Human
cugaauguucuga

SEQ ID NO: 3441048 - RNA, 18 nt, Human
cugaauguuuauuccuug

SEQ ID NO: 3441049 - RNA, 19 nt, Human
cugaauguuuauuccuuga

SEQ ID NO: 3441050 - RNA, 16 nt, Human
cugaauguuuuucuaa

SEQ ID NO: 3441051 - RNA, 20 nt, Human
cugaauuaaugacagagcca

SEQ ID NO: 3441052 - RNA, 21 nt, Human
cugaauuaaugacagagccag

SEQ ID NO: 3441053 - RNA, 24 nt, Human
cugaauuauaagaggcugauaauu

SEQ ID NO: 3441054 - RNA, 14 nt, Human
cugaauuaugaaac

SEQ ID NO: 3441055 - RNA, 20 nt, Human
cugaauucaccacagacuuu

SEQ ID NO: 3441056 - RNA, 23 nt, Human
cugaauugagccuaaaaauaaag

SEQ ID NO: 3441057 - RNA, 16 nt, Human
cugaauuguccccagu

SEQ ID NO: 3441058 - RNA, 14 nt, Human
cugaauuuaaauag

SEQ ID NO: 3441059 - RNA, 18 nt, Human
cugaauuuaucuuugaua

SEQ ID NO: 3441060 - RNA, 13 nt, Human
cugaauuucccuc

SEQ ID NO: 3441061 - RNA, 12 nt, Human
cugaauuugcaa

SEQ ID NO: 3441062 - RNA, 15 nt, Human
cugaauuugcaaagu

SEQ ID NO: 3441063 - RNA, 18 nt, Human
cugaauuugcaaaguacu

SEQ ID NO: 3441064 - RNA, 21 nt, Human
cugaauuugcaaaguacugua

SEQ ID NO: 3441065 - RNA, 22 nt, Human
cugaauuugcaaaguacuguaa

SEQ ID NO: 3441066 - RNA, 16 nt, Human
cugaauuugcccuggg

SEQ ID NO: 3441067 - RNA, 14 nt, Human
cugaauuuucacau

SEQ ID NO: 3441068 - RNA, 20 nt, Human
cugaauuuucacaugaacau

SEQ ID NO: 3441069 - RNA, 16 nt, Human
cugaauuuuggaggca

SEQ ID NO: 3441070 - RNA, 16 nt, Human
cugaauuuuuaugugu

SEQ ID NO: 3441071 - RNA, 20 nt, Human
cugaauuuuuaugugugauu

SEQ ID NO: 3441072 - RNA, 14 nt, Human
cugaauuuuuuugu

SEQ ID NO: 3441073 - RNA, 15 nt, Human
cugacaacagacuuc

SEQ ID NO: 3441074 - RNA, 18 nt, Human
cugacaacagacuucuga

SEQ ID NO: 3441075 - RNA, 20 nt, Human
cugacaaccaccgcucccca

SEQ ID NO: 3441076 - RNA, 21 nt, Human
cugacaaccaccgcuccccag

SEQ ID NO: 3441077 - RNA, 20 nt, Human
cugacaaccacuggucugua

SEQ ID NO: 3441078 - RNA, 19 nt, Human
cugacaaccauuaaaguca

SEQ ID NO: 3441079 - RNA, 22 nt, Human
cugacaaccauuaaagucagaa

SEQ ID NO: 3441080 - RNA, 22 nt, Human
cugacaaggcacuucauguaaa

SEQ ID NO: 3441081 - RNA, 12 nt, Human
cugacaagggcu

SEQ ID NO: 3441082 - RNA, 13 nt, Human
cugacaagggcug

SEQ ID NO: 3441083 - RNA, 19 nt, Human
cugacaagggcugaccugc

SEQ ID NO: 3441084 - RNA, 20 nt, Human
cugacaagggcugaccugcc

SEQ ID NO: 3441085 - RNA, 17 nt, Human
cugacaauacuguaugu

SEQ ID NO: 3441086 - RNA, 16 nt, Human
cugacacacagcucug

SEQ ID NO: 3441087 - RNA, 21 nt, Human
cugacacacagcucuguccug

SEQ ID NO: 3441088 - RNA, 23 nt, Human
cugacacacagcucuguccuggg

SEQ ID NO: 3441089 - RNA, 10 nt, Human
cugacacagg

SEQ ID NO: 3441090 - RNA, 13 nt, Human
cugacacaggaaa

SEQ ID NO: 3441091 - RNA, 14 nt, Human
cugacacccauguu

SEQ ID NO: 3441092 - RNA, 21 nt, Human
cugacacccauguuucucugg

SEQ ID NO: 3441093 - RNA, 19 nt, Human
cugacaccuaacucuucuu

SEQ ID NO: 3441094 - RNA, 19 nt, Human
cugacaccuuugcaggcau

SEQ ID NO: 3441095 - RNA, 14 nt, Human
cugacacucccacc

SEQ ID NO: 3441096 - RNA, 19 nt, Human
cugacacucccacccaguc

SEQ ID NO: 3441097 - RNA, 13 nt, Human
cugacacugcggg

SEQ ID NO: 3441098 - RNA, 23 nt, Human
cugacacugcggggcuuggcuga

SEQ ID NO: 3441099 - RNA, 13 nt, Human
cugacacugcugg

SEQ ID NO: 3441100 - RNA, 19 nt, Human
cugacacuucaaggugaca

SEQ ID NO: 3441101 - RNA, 19 nt, Human
cugacacuuuaauuaccaa

SEQ ID NO: 3441102 - RNA, 15 nt, Human
cucugaacuucagcu

SEQ ID NO: 3441103 - RNA, 15 nt, Human
cucugaacuugccuu

SEQ ID NO: 3441104 - RNA, 13 nt, Human
cucugaagagugg

SEQ ID NO: 3441105 - RNA, 22 nt, Human
cucugaagaguggguuucacaa

SEQ ID NO: 3441106 - RNA, 11 nt, Human
cucugaagcau

SEQ ID NO: 3441107 - RNA, 19 nt, Human
cucugaagccacaaauagg

SEQ ID NO: 3441108 - RNA, 15 nt, Human
cucugaaggacauug

SEQ ID NO: 3441109 - RNA, 22 nt, Human
cucugaaggacauugcggacag

SEQ ID NO: 3441110 - RNA, 15 nt, Human
cucugaaggaggcca

SEQ ID NO: 3441111 - RNA, 18 nt, Human
cucugaaggaggccaccu

SEQ ID NO: 3441112 - RNA, 19 nt, Human
cucugaagggcaucaugca

SEQ ID NO: 3441113 - RNA, 22 nt, Human
cucugaagggcaucaugcaucu

SEQ ID NO: 3441114 - RNA, 19 nt, Human
cucugaaggguaauuauau

SEQ ID NO: 3441115 - RNA, 23 nt, Human
cucugaagucacaucacaggaca

SEQ ID NO: 3441116 - RNA, 16 nt, Human
cucugaaguuggacag

SEQ ID NO: 3441117 - RNA, 18 nt, Human
cucugaaguuggacagca

SEQ ID NO: 3441118 - RNA, 17 nt, Human
cucugaaugguccaggg

SEQ ID NO: 3441119 - RNA, 21 nt, Human
cucugaauuaguccuugcuug

SEQ ID NO: 3441120 - RNA, 12 nt, Human
cucugaauucca

SEQ ID NO: 3441121 - RNA, 15 nt, Human
cucugaauuuaucuu

SEQ ID NO: 3441122 - RNA, 14 nt, Human
cucugaauuuuaaa

SEQ ID NO: 3441123 - RNA, 13 nt, Human
cucugacaaagcu

SEQ ID NO: 3441124 - RNA, 21 nt, Human
cucugacaacagacuucugaa

SEQ ID NO: 3441125 - RNA, 22 nt, Human
cucugacaacagacuucugaaa

SEQ ID NO: 3441126 - RNA, 17 nt, Human
cucugacaagggcugac

SEQ ID NO: 3441127 - RNA, 14 nt, Human
cucugacagcagca

SEQ ID NO: 3441128 - RNA, 18 nt, Human
cucugacagcagcaucuc

SEQ ID NO: 3441129 - RNA, 16 nt, Human
cucugaccaacaggcu

SEQ ID NO: 3441130 - RNA, 16 nt, Human
cucugacccagugaga

SEQ ID NO: 3441131 - RNA, 15 nt, Human
cucugaccccugccu

SEQ ID NO: 3441132 - RNA, 17 nt, Human
cucugaccgaaacagcg

SEQ ID NO: 3441133 - RNA, 15 nt, Human
cucugacucagggcu

SEQ ID NO: 3441134 - RNA, 17 nt, Human
cucugacucagggcucc

SEQ ID NO: 3441135 - RNA, 20 nt, Human
cucugacuuaagcaaaagaa

SEQ ID NO: 3441136 - RNA, 17 nt, Human
cucugacuucugccugg

SEQ ID NO: 3441137 - RNA, 18 nt, Human
cucugacuucugccugga

SEQ ID NO: 3441138 - RNA, 14 nt, Human
cucugacuugggga

SEQ ID NO: 3441139 - RNA, 10 nt, Human
cucugagaac

SEQ ID NO: 3441140 - RNA, 23 nt, Human
cucugagaaggggaggaccucug

SEQ ID NO: 3441141 - RNA, 14 nt, Human
cucugagacuccag

SEQ ID NO: 3441142 - RNA, 20 nt, Human
cucugagacucgcgacaaug

SEQ ID NO: 3441143 - RNA, 21 nt, Human
cucugagacucgcgacaaugc

SEQ ID NO: 3441144 - RNA, 23 nt, Human
cucugagagcaucaggccuagag

SEQ ID NO: 3441145 - RNA, 15 nt, Human
cucugagaggcccug

SEQ ID NO: 3441146 - RNA, 21 nt, Human
cucugagaucuaaggauguca

SEQ ID NO: 3441147 - RNA, 12 nt, Human
cucugagcccau

SEQ ID NO: 3441148 - RNA, 15 nt, Human
cucugagcugugcag

SEQ ID NO: 3441149 - RNA, 16 nt, Human
cucugagcugugcagg

SEQ ID NO: 3441150 - RNA, 12 nt, Human
cucugaggacaa

SEQ ID NO: 3441151 - RNA, 17 nt, Human
cucugaggacugcacca

SEQ ID NO: 3441152 - RNA, 14 nt, Human
cucugaggccagcc

SEQ ID NO: 3441153 - RNA, 15 nt, Human
cucugaggccagccu

SEQ ID NO: 3441154 - RNA, 20 nt, Human
cucugaggccagccuggccu

SEQ ID NO: 3441155 - RNA, 22 nt, Human
cucugaggcgccccaacccgug

SEQ ID NO: 3441156 - RNA, 23 nt, Human
cucugaggcgccccaacccgugg

SEQ ID NO: 3441157 - RNA, 14 nt, Human
cucugaggcugaaa

SEQ ID NO: 3441158 - RNA, 15 nt, Human
cucugaggcuuccag

SEQ ID NO: 3441159 - RNA, 18 nt, Human
cugaagaggcgggccagc

SEQ ID NO: 3441160 - RNA, 22 nt, Human
cugaagaggcgggccagccagg

SEQ ID NO: 3441161 - RNA, 21 nt, Human
cugaagauagaagaaaaaaga

SEQ ID NO: 3441162 - RNA, 22 nt, Human
cugaagaugcagcucacuaccc

SEQ ID NO: 3441163 - RNA, 15 nt, Human
cugaagaugggagcc

SEQ ID NO: 3441164 - RNA, 14 nt, Human
cugaagcagaugca

SEQ ID NO: 3441165 - RNA, 22 nt, Human
cugaagcagaugcaaagaggca

SEQ ID NO: 3441166 - RNA, 19 nt, Human
cugaagcagguucccaagc

SEQ ID NO: 3441167 - RNA, 15 nt, Human
cugaagcauguuuca

SEQ ID NO: 3441168 - RNA, 16 nt, Human
cugaagccaaagccaa

SEQ ID NO: 3441169 - RNA, 13 nt, Human
cugaagccagccu

SEQ ID NO: 3441170 - RNA, 17 nt, Human
cugaagccagccuucuu

SEQ ID NO: 3441171 - RNA, 17 nt, Human
cugaagccagcugcccu

SEQ ID NO: 3441172 - RNA, 13 nt, Human
cugaagccucugg

SEQ ID NO: 3441173 - RNA, 23 nt, Human
cugaagccuuugcauuuuggaga

SEQ ID NO: 3441174 - RNA, 17 nt, Human
cugaagcuuauuaaugc

SEQ ID NO: 3441175 - RNA, 18 nt, Human
cugaagcuuauuaaugcu

SEQ ID NO: 3441176 - RNA, 21 nt, Human
cugaagcuucacucacuguca

SEQ ID NO: 3441177 - RNA, 11 nt, Human
cugaaggaaaa

SEQ ID NO: 3441178 - RNA, 17 nt, Human
cugaaggacacuuccug

SEQ ID NO: 3441179 - RNA, 18 nt, Human
cugaaggacacuuccugc

SEQ ID NO: 3441180 - RNA, 21 nt, Human
cugaaggacacuuccugccua

SEQ ID NO: 3441181 - RNA, 21 nt, Human
cugaaggacauugcggacagc

SEQ ID NO: 3441182 - RNA, 18 nt, Human
cugaaggacccuucagag

SEQ ID NO: 3441183 - RNA, 15 nt, Human
cugaaggacugugac

SEQ ID NO: 3441184 - RNA, 12 nt, Human
cugaaggagaag

SEQ ID NO: 3441185 - RNA, 18 nt, Human
cugaaggagauuuuccuu

SEQ ID NO: 3441186 - RNA, 13 nt, Human
cugaaggaggcca

SEQ ID NO: 3441187 - RNA, 16 nt, Human
cugaaggaggccaccu

SEQ ID NO: 3441188 - RNA, 14 nt, Human
cugaaggccccgcc

SEQ ID NO: 3441189 - RNA, 17 nt, Human
cugaaggccccgcccag

SEQ ID NO: 3441190 - RNA, 13 nt, Human
cugaaggccugag

SEQ ID NO: 3441191 - RNA, 15 nt, Human
cugaaggccugaggu

SEQ ID NO: 3441192 - RNA, 22 nt, Human
cugaaggcuaaaaagcaacagg

SEQ ID NO: 3441193 - RNA, 17 nt, Human
cugaaggcuggguucug

SEQ ID NO: 3441194 - RNA, 18 nt, Human
cugaaggcuuucagggcc

SEQ ID NO: 3441195 - RNA, 12 nt, Human
cugaagggaggu

SEQ ID NO: 3441196 - RNA, 21 nt, Human
cugaagggauaugugaaacaa

SEQ ID NO: 3441197 - RNA, 23 nt, Human
cugaaggggccaugauggcaaca

SEQ ID NO: 3441198 - RNA, 20 nt, Human
cugaaggggcgucuguuccc

SEQ ID NO: 3441199 - RNA, 16 nt, Human
cugaagggggcggccu

SEQ ID NO: 3441200 - RNA, 17 nt, Human
cugaagggguucucaca

SEQ ID NO: 3441201 - RNA, 21 nt, Human
cugaagggguucucacagugg

SEQ ID NO: 3441202 - RNA, 15 nt, Human
cugaagguaaaauug

SEQ ID NO: 3441203 - RNA, 17 nt, Human
cugaagguaaaauugaa

SEQ ID NO: 3441204 - RNA, 16 nt, Human
cugaagguuguggccu

SEQ ID NO: 3441205 - RNA, 17 nt, Human
cugaaguacuaacacaa

SEQ ID NO: 3441206 - RNA, 17 nt, Human
cugaaguagugugcagu

SEQ ID NO: 3441207 - RNA, 14 nt, Human
cugaagucacacag

SEQ ID NO: 3441208 - RNA, 16 nt, Human
cugaagucacacagug

SEQ ID NO: 3441209 - RNA, 14 nt, Human
cugaagucacugca

SEQ ID NO: 3441210 - RNA, 16 nt, Human
cugaagucacugcaca

SEQ ID NO: 3441211 - RNA, 15 nt, Human
cugaagucugaaauu

SEQ ID NO: 3441212 - RNA, 20 nt, Human
cugaagucuuacuacagaaa

SEQ ID NO: 3441213 - RNA, 19 nt, Human
cugaagugaaacugcuugu

SEQ ID NO: 3441214 - RNA, 16 nt, Human
cugaagugcuuagugu

SEQ ID NO: 3441215 - RNA, 19 nt, Human
cugaaguucugccucugau

SEQ ID NO: 3441216 - RNA, 15 nt, Human
cugaaguuggacagc

SEQ ID NO: 3441217 - RNA, 17 nt, Human
cugaaguuucauuuaug

SEQ ID NO: 3441218 - RNA, 14 nt, Human
cugaauaaagcaau

SEQ ID NO: 3441219 - RNA, 15 nt, Human
cugaauaaauaccuc

SEQ ID NO: 3441220 - RNA, 13 nt, Human
cugaauaaauguc

SEQ ID NO: 3441221 - RNA, 15 nt, Human
cugaauaaaugucuu

SEQ ID NO: 3441222 - RNA, 22 nt, Human
cugaauaaauuguacagccggc

SEQ ID NO: 3441223 - RNA, 15 nt, Human
cugaauaacauuugu

SEQ ID NO: 3441224 - RNA, 16 nt, Human
cugaauaagcacuuuu

SEQ ID NO: 3441225 - RNA, 19 nt, Human
cugaauaagcacuuuuuaa

SEQ ID NO: 3441226 - RNA, 19 nt, Human
cugaauaccacucuguaau

SEQ ID NO: 3441227 - RNA, 21 nt, Human
cugaauaccacucuguaauug

SEQ ID NO: 3441228 - RNA, 15 nt, Human
cugaauagcagaagg

SEQ ID NO: 3441229 - RNA, 16 nt, Human
cugaauagcucccaga

SEQ ID NO: 3441230 - RNA, 18 nt, Human
cugaauaggcgaucacaa

SEQ ID NO: 3441231 - RNA, 17 nt, Human
cugaauauacagcaggu

SEQ ID NO: 3441232 - RNA, 20 nt, Human
cugaauccauuaaaaauggg

SEQ ID NO: 3441233 - RNA, 19 nt, Human
cugaaucccccuugccacc

SEQ ID NO: 3441234 - RNA, 22 nt, Human
cugaaucccccuugccacccca

SEQ ID NO: 3441235 - RNA, 15 nt, Human
cugaaucugcuacca

SEQ ID NO: 3441236 - RNA, 14 nt, Human
cugaaucuguacag

SEQ ID NO: 3441237 - RNA, 15 nt, Human
cugaaucuucugaaa

SEQ ID NO: 3441238 - RNA, 17 nt, Human
cugaaugaaacccccac

SEQ ID NO: 3441239 - RNA, 21 nt, Human
cugaaugaaacccccacacac

SEQ ID NO: 3441240 - RNA, 15 nt, Human
cugaaugccuccugu

SEQ ID NO: 3441241 - RNA, 14 nt, Human
cugaaugcucugua

SEQ ID NO: 3441242 - RNA, 14 nt, Human
cugaaugcugccac

SEQ ID NO: 3441243 - RNA, 22 nt, Human
cugaauggaagguuuguauauu

SEQ ID NO: 3441244 - RNA, 18 nt, Human
cugaauggacuuugcaca

SEQ ID NO: 3441245 - RNA, 18 nt, Human
cugaaugguuccaugccu

SEQ ID NO: 3441246 - RNA, 20 nt, Human
cugaaugguuuucaaaauaa

SEQ ID NO: 3441247 - RNA, 16 nt, Human
cugaauguaauuugug

SEQ ID NO: 3441248 - RNA, 16 nt, Human
cugaauguucugacau

SEQ ID NO: 3441249 - RNA, 17 nt, Human
cugaauguucugacauu

SEQ ID NO: 3441250 - RNA, 22 nt, Human
cugaauguucugacauuaacag

SEQ ID NO: 3441251 - RNA, 23 nt, Human
cugaauguucugacauuaacagu

SEQ ID NO: 3441252 - RNA, 16 nt, Human
cugaauguugggacug

SEQ ID NO: 3441253 - RNA, 19 nt, Human
cugaauguugggacugcua

SEQ ID NO: 3441254 - RNA, 14 nt, Human
cugaauguuuuucu

SEQ ID NO: 3441255 - RNA, 17 nt, Human
cugaauguuuuucuaaa

SEQ ID NO: 3441256 - RNA, 17 nt, Human
cugaauuaaucaucuau

SEQ ID NO: 3441257 - RNA, 19 nt, Human
cugaauuaguccuugcuug

SEQ ID NO: 3441258 - RNA, 22 nt, Human
cugaauuaguccuugcuuggcu

SEQ ID NO: 3441259 - RNA, 23 nt, Human
cugaauuaucuauacauaucuuu

SEQ ID NO: 3441260 - RNA, 13 nt, Human
cugaauuaugaaa

SEQ ID NO: 3441261 - RNA, 12 nt, Human
cugaauuauuuu

SEQ ID NO: 3441262 - RNA, 21 nt, Human
cugaauuggaaugcacucaga

SEQ ID NO: 3441263 - RNA, 23 nt, Human
cugaauuuaaauagcuuuuuucu

SEQ ID NO: 3441264 - RNA, 12 nt, Human
cugaauuucuuu

SEQ ID NO: 3441265 - RNA, 13 nt, Human
cugaauuugcaaa

SEQ ID NO: 3441266 - RNA, 20 nt, Human
cugaauuugcaaaguacugu

SEQ ID NO: 3441267 - RNA, 15 nt, Human
cugaauuugcccugg

SEQ ID NO: 3441268 - RNA, 19 nt, Human
cugaauuugcccugggaaa

SEQ ID NO: 3441269 - RNA, 21 nt, Human
cugaauuuggccugcacuaau

SEQ ID NO: 3441270 - RNA, 21 nt, Human
cugaauuuuggggauuuucaa

SEQ ID NO: 3441271 - RNA, 22 nt, Human
cugaauuuuuaaacaaguauuu

SEQ ID NO: 3441272 - RNA, 18 nt, Human
cugaauuuuuauguguga

SEQ ID NO: 3441273 - RNA, 15 nt, Human
cugaauuuuuuugua

SEQ ID NO: 3441274 - RNA, 17 nt, Human
cugaauuuuuuuguaau

SEQ ID NO: 3441275 - RNA, 18 nt, Human
cugacaaaaaguuuccau

SEQ ID NO: 3441276 - RNA, 16 nt, Human
cugacaaaauacuugu

SEQ ID NO: 3441277 - RNA, 16 nt, Human
cugacaaaucaaguuu

SEQ ID NO: 3441278 - RNA, 22 nt, Human
cugacaacacucauugaccuga

SEQ ID NO: 3441279 - RNA, 23 nt, Human
cugacaacacucauugaccugag

SEQ ID NO: 3441280 - RNA, 14 nt, Human
cugacaacauuucu

SEQ ID NO: 3441281 - RNA, 18 nt, Human
cugacaaccacuggucug

SEQ ID NO: 3441282 - RNA, 20 nt, Human
cugacaaccauuaaagucag

SEQ ID NO: 3441283 - RNA, 18 nt, Human
cugacaagcuccauuuaa

SEQ ID NO: 3441284 - RNA, 23 nt, Human
cugacaaggcacuucauguaaag

SEQ ID NO: 3441285 - RNA, 13 nt, Human
cugacaaucaacu

SEQ ID NO: 3441286 - RNA, 22 nt, Human
cugacaaugguguuauuugaaa

SEQ ID NO: 3441287 - RNA, 16 nt, Human
cugacacaaaccugcc

SEQ ID NO: 3441288 - RNA, 18 nt, Human
cugacacaaaccugccug

SEQ ID NO: 3441289 - RNA, 13 nt, Human
cugacacaaagga

SEQ ID NO: 3441290 - RNA, 14 nt, Human
cugacacaaaggaa

SEQ ID NO: 3441291 - RNA, 15 nt, Human
cugacacaaaggaag

SEQ ID NO: 3441292 - RNA, 18 nt, Human
cugacacacagcucuguc

SEQ ID NO: 3441293 - RNA, 17 nt, Human
cugacacaccaggcgcu

SEQ ID NO: 3441294 - RNA, 15 nt, Human
cugacacaccugcag

SEQ ID NO: 3441295 - RNA, 16 nt, Human
cugacacaccugcagc

SEQ ID NO: 3441296 - RNA, 20 nt, Human
cugacacacuaaccaagcug

SEQ ID NO: 3441297 - RNA, 22 nt, Human
cugacacacuaaccaagcugag

SEQ ID NO: 3441298 - RNA, 23 nt, Human
cugacacacuaaccaagcugagu

SEQ ID NO: 3441299 - RNA, 21 nt, Human
cugacacaggaaaccaacacc

SEQ ID NO: 3441300 - RNA, 14 nt, Human
cugacaccccacuu

SEQ ID NO: 3441301 - RNA, 16 nt, Human
cugacacccuucuccc

SEQ ID NO: 3441302 - RNA, 17 nt, Human
cugacacccuucuccca

SEQ ID NO: 3441303 - RNA, 16 nt, Human
cccugccccucaugcc

SEQ ID NO: 3441304 - RNA, 18 nt, Human
cccugccccucccuucaa

SEQ ID NO: 3441305 - RNA, 19 nt, Human
cccugccccucccuucaac

SEQ ID NO: 3441306 - RNA, 19 nt, Human
cccugccccugccccguca

SEQ ID NO: 3441307 - RNA, 18 nt, Human
cccugccccuucuacacu

SEQ ID NO: 3441308 - RNA, 23 nt, Human
cccugccccuucuacacucuccu

SEQ ID NO: 3441309 - RNA, 14 nt, Human
cccugcccuagcuc

SEQ ID NO: 3441310 - RNA, 14 nt, Human
cccugcccuccccu

SEQ ID NO: 3441311 - RNA, 15 nt, Human
cccugcccuccccuc

SEQ ID NO: 3441312 - RNA, 14 nt, Human
cccugcccucgugg

SEQ ID NO: 3441313 - RNA, 17 nt, Human
cccugcccucguggcca

SEQ ID NO: 3441314 - RNA, 17 nt, Human
cccugcccucuccuucc

SEQ ID NO: 3441315 - RNA, 13 nt, Human
cccugcccugcac

SEQ ID NO: 3441316 - RNA, 17 nt, Human
cccugcccugccaccug

SEQ ID NO: 3441317 - RNA, 13 nt, Human
cccugcccuggga

SEQ ID NO: 3441318 - RNA, 18 nt, Human
cccugcccugguccaggg

SEQ ID NO: 3441319 - RNA, 13 nt, Human
cccugcccugugg

SEQ ID NO: 3441320 - RNA, 20 nt, Human
cccugcccugugggccccca

SEQ ID NO: 3441321 - RNA, 15 nt, Human
cccugcccugugggg

SEQ ID NO: 3441322 - RNA, 14 nt, Human
cccugccgccucaa

SEQ ID NO: 3441323 - RNA, 16 nt, Human
cccugccucaggccuc

SEQ ID NO: 3441324 - RNA, 21 nt, Human
cccugccucaggccucugugc

SEQ ID NO: 3441325 - RNA, 20 nt, Human
cugaugaacuuauucuguag

SEQ ID NO: 3441326 - RNA, 15 nt, Human
cugaugaaucacugu

SEQ ID NO: 3441327 - RNA, 17 nt, Human
cugaugacaauaaagcu

SEQ ID NO: 3441328 - RNA, 18 nt, Human
cugaugacaauaaagcuu

SEQ ID NO: 3441329 - RNA, 20 nt, Human
cugaugacaauaaagcuugu

SEQ ID NO: 3441330 - RNA, 17 nt, Human
cugaugaccaauuuuaa

SEQ ID NO: 3441331 - RNA, 19 nt, Human
cugaugacccaggcugccu

SEQ ID NO: 3441332 - RNA, 23 nt, Human
cugaugacccaggcugccugagc

SEQ ID NO: 3441333 - RNA, 22 nt, Human
cugaugacccccccagcuucac

SEQ ID NO: 3441334 - RNA, 20 nt, Human
cugaugacucaagauuccca

SEQ ID NO: 3441335 - RNA, 23 nt, Human
cugaugacucaagauucccagga

SEQ ID NO: 3441336 - RNA, 14 nt, Human
cugaugacuugcuu

SEQ ID NO: 3441337 - RNA, 20 nt, Human
cugaugauuuguuuuuguau

SEQ ID NO: 3441338 - RNA, 16 nt, Human
cugaugcagcuuauac

SEQ ID NO: 3441339 - RNA, 17 nt, Human
cugaugcaucagaaagg

SEQ ID NO: 3441340 - RNA, 19 nt, Human
cugaugccaauacuaguca

SEQ ID NO: 3441341 - RNA, 20 nt, Human
cugaugccgugauccugagc

SEQ ID NO: 3441342 - RNA, 17 nt, Human
cugaugcucccuccccu

SEQ ID NO: 3441343 - RNA, 24 nt, Human
cugaugcucccuccccugcccugg

SEQ ID NO: 3441344 - RNA, 12 nt, Human
cugaugcugaca

SEQ ID NO: 3441345 - RNA, 13 nt, Human
cugaugcugggcu

SEQ ID NO: 3441346 - RNA, 18 nt, Human
cugaugcugggcugggug

SEQ ID NO: 3441347 - RNA, 16 nt, Human
cugaugcuguucucuu

SEQ ID NO: 3441348 - RNA, 22 nt, Human
cugaugcuuugcuucaaaucca

SEQ ID NO: 3441349 - RNA, 18 nt, Human
cugaugcuuuuagcucaa

SEQ ID NO: 3441350 - RNA, 19 nt, Human
cugaugcuuuugucuaauu

SEQ ID NO: 3441351 - RNA, 16 nt, Human
cugauggagaaggaag

SEQ ID NO: 3441352 - RNA, 17 nt, Human
cugauggcaggauggcc

SEQ ID NO: 3441353 - RNA, 19 nt, Human
cugauggcaggauggccug

SEQ ID NO: 3441354 - RNA, 14 nt, Human
cugauggccuuaau

SEQ ID NO: 3441355 - RNA, 21 nt, Human
cugaugggcaacccccagccu

SEQ ID NO: 3441356 - RNA, 23 nt, Human
cugaugggcaacccccagccugc

SEQ ID NO: 3441357 - RNA, 21 nt, Human
cugaugggcguacgcuggugc

SEQ ID NO: 3441358 - RNA, 22 nt, Human
cugaugggcguacgcuggugcu

SEQ ID NO: 3441359 - RNA, 17 nt, Human
cugauggggcaaacuca

SEQ ID NO: 3441360 - RNA, 17 nt, Human
cugauggugcaaugacc

SEQ ID NO: 3441361 - RNA, 21 nt, Human
cugauggugcaaugaccuuuc

SEQ ID NO: 3441362 - RNA, 15 nt, Human
cugauguaaaugaag

SEQ ID NO: 3441363 - RNA, 15 nt, Human
cugauguacucuaaa

SEQ ID NO: 3441364 - RNA, 16 nt, Human
cugauguacucuaaau

SEQ ID NO: 3441365 - RNA, 17 nt, Human
cugauguauuuugugag

SEQ ID NO: 3441366 - RNA, 19 nt, Human
cugaugucaauuucugugu

SEQ ID NO: 3441367 - RNA, 13 nt, Human
cugaugucuccua

SEQ ID NO: 3441368 - RNA, 21 nt, Human
cugaugucuccuaagcaccug

SEQ ID NO: 3441369 - RNA, 18 nt, Human
cugaugucucuaaagcac

SEQ ID NO: 3441370 - RNA, 12 nt, Human
cugaugugaaac

SEQ ID NO: 3441371 - RNA, 13 nt, Human
cugaugugaaacu

SEQ ID NO: 3441372 - RNA, 20 nt, Human
cugauguuacaucacagugu

SEQ ID NO: 3441373 - RNA, 18 nt, Human
cugauguuaggcugggcc

SEQ ID NO: 3441374 - RNA, 21 nt, Human
cugauguuaggcugggcccag

SEQ ID NO: 3441375 - RNA, 22 nt, Human
cugauguuaggcugggcccaga

SEQ ID NO: 3441376 - RNA, 16 nt, Human
cugauguucaguguaa

SEQ ID NO: 3441377 - RNA, 13 nt, Human
cugauguuccuag

SEQ ID NO: 3441378 - RNA, 18 nt, Human
cugauguuccuagugaaa

SEQ ID NO: 3441379 - RNA, 22 nt, Human
cugauguugagggaacagacag

SEQ ID NO: 3441380 - RNA, 16 nt, Human
cugauuaaaugacacu

SEQ ID NO: 3441381 - RNA, 19 nt, Human
cugauuaaugcuaaaugua

SEQ ID NO: 3441382 - RNA, 20 nt, Human
cugauuacugucaauaaaca

SEQ ID NO: 3441383 - RNA, 23 nt, Human
cugauuacugucaauaaacagcu

SEQ ID NO: 3441384 - RNA, 11 nt, Human
cugauuagaaa

SEQ ID NO: 3441385 - RNA, 16 nt, Human
cugauuagcuuugugu

SEQ ID NO: 3441386 - RNA, 14 nt, Human
cugauuaugucuuu

SEQ ID NO: 3441387 - RNA, 20 nt, Human
cugauuauugaguuccaguu

SEQ ID NO: 3441388 - RNA, 17 nt, Human
cugauuauuuucuucau

SEQ ID NO: 3441389 - RNA, 18 nt, Human
cugauucaacuaaaaaaa

SEQ ID NO: 3441390 - RNA, 16 nt, Human
cugauucaauuugaug

SEQ ID NO: 3441391 - RNA, 20 nt, Human
cugauucacugcauggcucc

SEQ ID NO: 3441392 - RNA, 22 nt, Human
cugauucauaauaaauaucugu

SEQ ID NO: 3441393 - RNA, 22 nt, Human
cugauucccaagcucugcuccu

SEQ ID NO: 3441394 - RNA, 16 nt, Human
cugauucccugauuua

SEQ ID NO: 3441395 - RNA, 16 nt, Human
cugauucggcugucuc

SEQ ID NO: 3441396 - RNA, 22 nt, Human
cugauucuggcuuuaagccuuc

SEQ ID NO: 3441397 - RNA, 16 nt, Human
cugauucugggaugcu

SEQ ID NO: 3441398 - RNA, 17 nt, Human
cugauuggcuuguagaa

SEQ ID NO: 3441399 - RNA, 16 nt, Human
cugauugguuucucuu

SEQ ID NO: 3441400 - RNA, 16 nt, Human
cugauuguaaacuuca

SEQ ID NO: 3441401 - RNA, 14 nt, Human
cugauuguaacguu

SEQ ID NO: 3441402 - RNA, 20 nt, Human
cugauuguaacguugcugug

SEQ ID NO: 3441403 - RNA, 17 nt, Human
cugauuguugucaggcc

SEQ ID NO: 3441404 - RNA, 16 nt, Human
cugauuuaauaugcaa

SEQ ID NO: 3441405 - RNA, 18 nt, Human
cugauuuaggagaagcca

SEQ ID NO: 3441406 - RNA, 14 nt, Human
cugauuuauuuugu

SEQ ID NO: 3441407 - RNA, 17 nt, Human
cugauuuauuuuguaug

SEQ ID NO: 3441408 - RNA, 13 nt, Human
cugauuucacaac

SEQ ID NO: 3441409 - RNA, 15 nt, Human
cugauuuccccuuuu

SEQ ID NO: 3441410 - RNA, 22 nt, Human
cugauuugacauagucuggcug

SEQ ID NO: 3441411 - RNA, 23 nt, Human
cugauuugaugauacauuucauu

SEQ ID NO: 3441412 - RNA, 17 nt, Human
cugauuugccacugaua

SEQ ID NO: 3441413 - RNA, 22 nt, Human
cugauuugccacugauauucag

SEQ ID NO: 3441414 - RNA, 11 nt, Human
cugauuugcug

SEQ ID NO: 3441415 - RNA, 17 nt, Human
cugauuugcugcucuuc

SEQ ID NO: 3441416 - RNA, 14 nt, Human
cugauuugguacuu

SEQ ID NO: 3441417 - RNA, 19 nt, Human
cugauuuguaacccacuga

SEQ ID NO: 3441418 - RNA, 13 nt, Human
cugauuuuaacaa

SEQ ID NO: 3441419 - RNA, 14 nt, Human
cugauuuuaaugga

SEQ ID NO: 3441420 - RNA, 21 nt, Human
cugauuuuuaugaugaugaaa

SEQ ID NO: 3441421 - RNA, 19 nt, Human
cugauuuuuuuuccuuuua

SEQ ID NO: 3441422 - RNA, 20 nt, Human
cugauuuuuuuuccuuuuaa

SEQ ID NO: 3441423 - RNA, 13 nt, Human
cugcaaaaaugga

SEQ ID NO: 3441424 - RNA, 19 nt, Human
cugcaaaaggccucuugua

SEQ ID NO: 3441425 - RNA, 19 nt, Human
cugcaaaaugaggaaugua

SEQ ID NO: 3441426 - RNA, 13 nt, Human
cugcaaaauuuua

SEQ ID NO: 3441427 - RNA, 18 nt, Human
cugcaaacaaacaccuuc

SEQ ID NO: 3441428 - RNA, 15 nt, Human
cugcaaacagaacag

SEQ ID NO: 3441429 - RNA, 23 nt, Human
cugcaaacaugggguuggcuggg

SEQ ID NO: 3441430 - RNA, 18 nt, Human
cugcaaaccugaccccug

SEQ ID NO: 3441431 - RNA, 16 nt, Human
cugcaaacucacugcu

SEQ ID NO: 3441432 - RNA, 20 nt, Human
cugcaaacucacugcucaag

SEQ ID NO: 3441433 - RNA, 12 nt, Human
cugcaaacuggg

SEQ ID NO: 3441434 - RNA, 21 nt, Human
cugcaaacugggaaccccuuu

SEQ ID NO: 3441435 - RNA, 22 nt, Human
cugcaaagaucuguccucagcc

SEQ ID NO: 3441436 - RNA, 13 nt, Human
cugcaaaggacug

SEQ ID NO: 3441437 - RNA, 23 nt, Human
cugcaaagguaauaauacagcca

SEQ ID NO: 3441438 - RNA, 22 nt, Human
cugcaaaguacagguacuuugu

SEQ ID NO: 3441439 - RNA, 20 nt, Human
cugcaaaguguuuuguacca

SEQ ID NO: 3441440 - RNA, 19 nt, Human
cugcaaauacuguauauuc

SEQ ID NO: 3441441 - RNA, 19 nt, Human
cugcaaauagaaaacagga

SEQ ID NO: 3441442 - RNA, 20 nt, Human
cugcaaauagaaaacaggaa

SEQ ID NO: 3441443 - RNA, 18 nt, Human
cugcaaaucaggcuuuug

SEQ ID NO: 3441444 - RNA, 19 nt, Human
cugcaaauccuugugggaa

SEQ ID NO: 3441445 - RNA, 19 nt, Human
cugcaaaucugauggccuu

SEQ ID NO: 3441446 - RNA, 15 nt, Human
cugcaacaaaaugua

SEQ ID NO: 3441447 - RNA, 14 nt, Human
cugauuuuaacaau

SEQ ID NO: 3441448 - RNA, 17 nt, Human
cugauuuuaacaauaac

SEQ ID NO: 3441449 - RNA, 22 nt, Human
cugauuuuaacaauaacuacug

SEQ ID NO: 3441450 - RNA, 12 nt, Human
cugauuuuaaug

SEQ ID NO: 3441451 - RNA, 12 nt, Human
cugauuuuauuc

SEQ ID NO: 3441452 - RNA, 19 nt, Human
cugauuuuuuuuuccuuca

SEQ ID NO: 3441453 - RNA, 20 nt, Human
cugauuuuuuuuuccuucag

SEQ ID NO: 3441454 - RNA, 13 nt, Human
cugcaaaaaauac

SEQ ID NO: 3441455 - RNA, 17 nt, Human
cugcaaaaauauuuaua

SEQ ID NO: 3441456 - RNA, 21 nt, Human
cugcaaaaauggauauuauua

SEQ ID NO: 3441457 - RNA, 18 nt, Human
cugcaaaaggagagacuc

SEQ ID NO: 3441458 - RNA, 15 nt, Human
cugcaaaaggccucu

SEQ ID NO: 3441459 - RNA, 11 nt, Human
cugcaaaauuu

SEQ ID NO: 3441460 - RNA, 14 nt, Human
cugcaaacagaaca

SEQ ID NO: 3441461 - RNA, 20 nt, Human
cugcaaacgcugccugccca

SEQ ID NO: 3441462 - RNA, 14 nt, Human
cugcaaacugggaa

SEQ ID NO: 3441463 - RNA, 12 nt, Human
cugcaaagaaag

SEQ ID NO: 3441464 - RNA, 23 nt, Human
cugcaaagaucuguccucagccu

SEQ ID NO: 3441465 - RNA, 13 nt, Human
cugcaaagcaugu

SEQ ID NO: 3441466 - RNA, 13 nt, Human
cugcaaagcccag

SEQ ID NO: 3441467 - RNA, 15 nt, Human
cugcaaagcccagcu

SEQ ID NO: 3441468 - RNA, 16 nt, Human
cugcaaaggacagauc

SEQ ID NO: 3441469 - RNA, 22 nt, Human
cugcaaaggguaucaggugcug

SEQ ID NO: 3441470 - RNA, 15 nt, Human
cugcaaaucaggcuu

SEQ ID NO: 3441471 - RNA, 20 nt, Human
cugcaaaucaggcuuuuguu

SEQ ID NO: 3441472 - RNA, 16 nt, Human
cugcaaauccuugugg

SEQ ID NO: 3441473 - RNA, 17 nt, Human
cugcaaccuccaccucc

SEQ ID NO: 3441474 - RNA, 17 nt, Human
cugcaaccuucgccacc

SEQ ID NO: 3441475 - RNA, 19 nt, Human
cugcaaccuucgccaccug

SEQ ID NO: 3441476 - RNA, 22 nt, Human
cugcaaccuucgccaccugggu

SEQ ID NO: 3441477 - RNA, 21 nt, Human
cugcaagaaaaugauguguac

SEQ ID NO: 3441478 - RNA, 20 nt, Human
cugcaagaauugaagcagga

SEQ ID NO: 3441479 - RNA, 15 nt, Human
cugcaagagccuugg

SEQ ID NO: 3441480 - RNA, 17 nt, Human
cugcaagagccuuggug

SEQ ID NO: 3441481 - RNA, 18 nt, Human
cugcaagagccuuggugu

SEQ ID NO: 3441482 - RNA, 23 nt, Human
cugcaagagccuugguguccacc

SEQ ID NO: 3441483 - RNA, 15 nt, Human
cugcaagaggcuccu

SEQ ID NO: 3441484 - RNA, 17 nt, Human
cugcaagcacagcccuu

SEQ ID NO: 3441485 - RNA, 20 nt, Human
cugcaagcacaucugcauuu

SEQ ID NO: 3441486 - RNA, 14 nt, Human
cugcaagcagggcu

SEQ ID NO: 3441487 - RNA, 19 nt, Human
cugcaagcagggcucugcc

SEQ ID NO: 3441488 - RNA, 12 nt, Human
cugcaagccugc

SEQ ID NO: 3441489 - RNA, 14 nt, Human
cugcaaggacauuc

SEQ ID NO: 3441490 - RNA, 18 nt, Human
cugcaaggcccacaggag

SEQ ID NO: 3441491 - RNA, 16 nt, Human
cugcaaggccuuucug

SEQ ID NO: 3441492 - RNA, 22 nt, Human
cugcaagggcagaacacuaacc

SEQ ID NO: 3441493 - RNA, 18 nt, Human
cugcaagguacucuggug

SEQ ID NO: 3441494 - RNA, 19 nt, Human
cugcaagguacucugguga

SEQ ID NO: 3441495 - RNA, 18 nt, Human
cugcaagucacaaaggaa

SEQ ID NO: 3441496 - RNA, 12 nt, Human
cugcaagucaga

SEQ ID NO: 3441497 - RNA, 14 nt, Human
cugcaagucagagg

SEQ ID NO: 3441498 - RNA, 19 nt, Human
cugcaagucagaggauggc

SEQ ID NO: 3441499 - RNA, 18 nt, Human
cugcaaguccuuuuguaa

SEQ ID NO: 3441500 - RNA, 18 nt, Human
cugcaaguuaugaaauau

SEQ ID NO: 3441501 - RNA, 15 nt, Human
cugcaauaacuucug

SEQ ID NO: 3441502 - RNA, 18 nt, Human
cugcaauaaggggagagu

SEQ ID NO: 3441503 - RNA, 20 nt, Human
cugcaauagagacuguagau

SEQ ID NO: 3441504 - RNA, 21 nt, Human
cugcaauagagacuguagauu

SEQ ID NO: 3441505 - RNA, 16 nt, Human
cugcaaucauauguga

SEQ ID NO: 3441506 - RNA, 17 nt, Human
cugcaaucauaugugau

SEQ ID NO: 3441507 - RNA, 15 nt, Human
cugcaauccugucuu

SEQ ID NO: 3441508 - RNA, 18 nt, Human
cugcaaugaagucucuga

SEQ ID NO: 3441509 - RNA, 17 nt, Human
cugcaaugggcacuggg

SEQ ID NO: 3441510 - RNA, 21 nt, Human
cugcaaugggcacugggauga

SEQ ID NO: 3441511 - RNA, 24 nt, Human
cugcaauucaaaaguuccaagagu

SEQ ID NO: 3441512 - RNA, 20 nt, Human
cugcaauuccccucugcugc

SEQ ID NO: 3441513 - RNA, 14 nt, Human
cugcaauucccugg

SEQ ID NO: 3441514 - RNA, 22 nt, Human
cugcaauuggcaccgaagccca

SEQ ID NO: 3441515 - RNA, 12 nt, Human
cugcaauuucua

SEQ ID NO: 3441516 - RNA, 15 nt, Human
cugcaauuucuacua

SEQ ID NO: 3441517 - RNA, 15 nt, Human
cugcacaagccaggg

SEQ ID NO: 3441518 - RNA, 22 nt, Human
cugcacaagccagggugugucu

SEQ ID NO: 3441519 - RNA, 15 nt, Human
cugcacaauaacucc

SEQ ID NO: 3441520 - RNA, 20 nt, Human
cugcacaauaacuccuccca

SEQ ID NO: 3441521 - RNA, 22 nt, Human
cugcacaauaacuccucccagg

SEQ ID NO: 3441522 - RNA, 14 nt, Human
cugcacacaaauau

SEQ ID NO: 3441523 - RNA, 15 nt, Human
cugcacacaccucag

SEQ ID NO: 3441524 - RNA, 13 nt, Human
cugcacacagcac

SEQ ID NO: 3441525 - RNA, 14 nt, Human
cugcacacagcacg

SEQ ID NO: 3441526 - RNA, 20 nt, Human
cugcacacccuccagagaca

SEQ ID NO: 3441527 - RNA, 22 nt, Human
cugcacacgcuccuuccucuga

SEQ ID NO: 3441528 - RNA, 13 nt, Human
cugcacagagcuc

SEQ ID NO: 3441529 - RNA, 18 nt, Human
cugcacagagcucuccag

SEQ ID NO: 3441530 - RNA, 13 nt, Human
cugcacagaugga

SEQ ID NO: 3441531 - RNA, 20 nt, Human
cugcacagauggauuugccu

SEQ ID NO: 3441532 - RNA, 22 nt, Human
cugcacagcaggcugccagugc

SEQ ID NO: 3441533 - RNA, 23 nt, Human
cccuuuuugaaguguaggcagac

SEQ ID NO: 3441534 - RNA, 14 nt, Human
cccuuuuuucugcc

SEQ ID NO: 3441535 - RNA, 19 nt, Human
cccuuuuuucugccuccuu

SEQ ID NO: 3441536 - RNA, 18 nt, Human
cccuuuuuuggcugcuga

SEQ ID NO: 3441537 - RNA, 19 nt, Human
cccuuuuuuggcugcugaa

SEQ ID NO: 3441538 - RNA, 21 nt, Human
cccuuuuuuggcugcugaagg

SEQ ID NO: 3441539 - RNA, 23 nt, Human
cccuuuuuuggcugcugaaggcu

SEQ ID NO: 3441540 - RNA, 17 nt, Human
ccgaaaaauccucuucc

SEQ ID NO: 3441541 - RNA, 19 nt, Human
ccgaaagaggcacccuucc

SEQ ID NO: 3441542 - RNA, 18 nt, Human
ccgaaaggucaccucacu

SEQ ID NO: 3441543 - RNA, 15 nt, Human
ccgaaaugcugucuu

SEQ ID NO: 3441544 - RNA, 23 nt, Human
ccgaacaucaccgacgcgucucc

SEQ ID NO: 3441545 - RNA, 13 nt, Human
ccgaaccuccucu

SEQ ID NO: 3441546 - RNA, 20 nt, Human
ccgaagaaggguccuucccu

SEQ ID NO: 3441547 - RNA, 16 nt, Human
ccgaagcccaggggcc

SEQ ID NO: 3441548 - RNA, 23 nt, Human
ccgaagcuaacagggaaggcagg

SEQ ID NO: 3441549 - RNA, 17 nt, Human
ccgaagcucuggcugaa

SEQ ID NO: 3441550 - RNA, 23 nt, Human
ccgaaggugcuggaggugggagc

SEQ ID NO: 3441551 - RNA, 21 nt, Human
ccgaagguuauggucaauccc

SEQ ID NO: 3441552 - RNA, 16 nt, Human
ccgaauagcugggacu

SEQ ID NO: 3441553 - RNA, 20 nt, Human
ccgaauagcugggacuacag

SEQ ID NO: 3441554 - RNA, 22 nt, Human
ccgaauauugagcaauauguca

SEQ ID NO: 3441555 - RNA, 16 nt, Human
ccgaauccccucccug

SEQ ID NO: 3441556 - RNA, 18 nt, Human
ccgaauccccucccuguc

SEQ ID NO: 3441557 - RNA, 19 nt, Human
ccgaauccccucccuguca

SEQ ID NO: 3441558 - RNA, 23 nt, Human
ccgaaucucuuuuugcuuucgaa

SEQ ID NO: 3441559 - RNA, 13 nt, Human
ccgaaugugcagg

SEQ ID NO: 3441560 - RNA, 20 nt, Human
ccgaauguugagguggacuc

SEQ ID NO: 3441561 - RNA, 22 nt, Human
ccgaauucgcuguuaccgccug

SEQ ID NO: 3441562 - RNA, 15 nt, Human
ccgaauugagcacaa

SEQ ID NO: 3441563 - RNA, 18 nt, Human
ccgacaaccgaugcucca

SEQ ID NO: 3441564 - RNA, 12 nt, Human
ccgacacuguuc

SEQ ID NO: 3441565 - RNA, 14 nt, Human
ccgacacuguucuc

SEQ ID NO: 3441566 - RNA, 13 nt, Human
ccgacagagggaa

SEQ ID NO: 3441567 - RNA, 18 nt, Human
ccgacagcccccucugcc

SEQ ID NO: 3441568 - RNA, 13 nt, Human
ccgacagccuggc

SEQ ID NO: 3441569 - RNA, 18 nt, Human
ccgaccagacaccuugac

SEQ ID NO: 3441570 - RNA, 13 nt, Human
ccgaccagagccc

SEQ ID NO: 3441571 - RNA, 21 nt, Human
ccgacccaggguucccgcggg

SEQ ID NO: 3441572 - RNA, 19 nt, Human
ccgacccucugggaaccuc

SEQ ID NO: 3441573 - RNA, 19 nt, Human
ccgaccgaggcuggagcug

SEQ ID NO: 3441574 - RNA, 19 nt, Human
ccgaccucguccucccccu

SEQ ID NO: 3441575 - RNA, 18 nt, Human
ccgacgccacagcccagc

SEQ ID NO: 3441576 - RNA, 23 nt, Human
ccgacggugggcauuugugaggc

SEQ ID NO: 3441577 - RNA, 16 nt, Human
ccgacuagacacacaa

SEQ ID NO: 3441578 - RNA, 23 nt, Human
ccgacucacaccacuagccucag

SEQ ID NO: 3441579 - RNA, 10 nt, Human
ccgacuccag

SEQ ID NO: 3441580 - RNA, 11 nt, Human
ccgacuccagc

SEQ ID NO: 3441581 - RNA, 15 nt, Human
ccgacuccagccagc

SEQ ID NO: 3441582 - RNA, 20 nt, Human
ccgacuccuggguugagcug

SEQ ID NO: 3441583 - RNA, 13 nt, Human
ccgacucuggccc

SEQ ID NO: 3441584 - RNA, 21 nt, Human
ccgacucuuucugagugccuu

SEQ ID NO: 3441585 - RNA, 17 nt, Human
ccgacugcuuuggaccu

SEQ ID NO: 3441586 - RNA, 22 nt, Human
ccgacuugaauuuucccacugc

SEQ ID NO: 3441587 - RNA, 20 nt, Human
ccgacuugugcacaggcaga

SEQ ID NO: 3441588 - RNA, 13 nt, Human
ccgagaagaacag

SEQ ID NO: 3441589 - RNA, 19 nt, Human
ccgagaagcaagaaagaaa

SEQ ID NO: 3441590 - RNA, 23 nt, Human
ccgagagagcaccccucucugca

SEQ ID NO: 3441591 - RNA, 21 nt, Human
cugcaccuccccccacugcag

SEQ ID NO: 3441592 - RNA, 16 nt, Human
cugcaccugccagccu

SEQ ID NO: 3441593 - RNA, 19 nt, Human
cugcaccugccagccuggc

SEQ ID NO: 3441594 - RNA, 17 nt, Human
cugcacggugaauggcu

SEQ ID NO: 3441595 - RNA, 20 nt, Human
cugcacggugaauggcuuug

SEQ ID NO: 3441596 - RNA, 17 nt, Human
cugcacguggcuucuga

SEQ ID NO: 3441597 - RNA, 16 nt, Human
cugcacuacuccucug

SEQ ID NO: 3441598 - RNA, 16 nt, Human
cugcacuauagccuag

SEQ ID NO: 3441599 - RNA, 14 nt, Human
cugcacuauaugca

SEQ ID NO: 3441600 - RNA, 17 nt, Human
cugcacucaaccuuaag

SEQ ID NO: 3441601 - RNA, 20 nt, Human
cugcacuccaaucuggguga

SEQ ID NO: 3441602 - RNA, 13 nt, Human
cugcacuccagcc

SEQ ID NO: 3441603 - RNA, 19 nt, Human
cugcacuccagccugggcg

SEQ ID NO: 3441604 - RNA, 18 nt, Human
cugcacuccagccugggu

SEQ ID NO: 3441605 - RNA, 20 nt, Human
cugcacuccaggcuggguga

SEQ ID NO: 3441606 - RNA, 20 nt, Human
cugcacuccagucuggguga

SEQ ID NO: 3441607 - RNA, 15 nt, Human
cugcacuccaugagu

SEQ ID NO: 3441608 - RNA, 18 nt, Human
cugcacucccaccugaca

SEQ ID NO: 3441609 - RNA, 21 nt, Human
cugcacuccccugcugggugu

SEQ ID NO: 3441610 - RNA, 20 nt, Human
cugcacuccggccugaugac

SEQ ID NO: 3441611 - RNA, 14 nt, Human
cugcacuccucagg

SEQ ID NO: 3441612 - RNA, 17 nt, Human
cugcacucugugcccau

SEQ ID NO: 3441613 - RNA, 18 nt, Human
cugcacucugugcccaug

SEQ ID NO: 3441614 - RNA, 19 nt, Human
cugcacugacccacagccu

SEQ ID NO: 3441615 - RNA, 14 nt, Human
cugcacugacucug

SEQ ID NO: 3441616 - RNA, 15 nt, Human
cugcacugacucugg

SEQ ID NO: 3441617 - RNA, 18 nt, Human
cugcacugaugcugcccc

SEQ ID NO: 3441618 - RNA, 22 nt, Human
cugcacuggggagcccgucuca

SEQ ID NO: 3441619 - RNA, 11 nt, Human
cugcacuguaa

SEQ ID NO: 3441620 - RNA, 13 nt, Human
cugcacuguaaaa

SEQ ID NO: 3441621 - RNA, 16 nt, Human
cugcacuguaaaaugu

SEQ ID NO: 3441622 - RNA, 20 nt, Human
cugcacuguaaaauguggga

SEQ ID NO: 3441623 - RNA, 13 nt, Human
cugcacuguccug

SEQ ID NO: 3441624 - RNA, 14 nt, Human
cugcacuguccugc

SEQ ID NO: 3441625 - RNA, 18 nt, Human
cugcacuguccugcucca

SEQ ID NO: 3441626 - RNA, 23 nt, Human
cugcacuguccugcuccacagug

SEQ ID NO: 3441627 - RNA, 19 nt, Human
cugcacuuauacccaugaa

SEQ ID NO: 3441628 - RNA, 14 nt, Human
cugcacuugcagac

SEQ ID NO: 3441629 - RNA, 16 nt, Human
cugcacuugcagacuc

SEQ ID NO: 3441630 - RNA, 18 nt, Human
cugcacuugcagacucua

SEQ ID NO: 3441631 - RNA, 19 nt, Human
cugcacuugggggcucagc

SEQ ID NO: 3441632 - RNA, 20 nt, Human
cugcacuugggggcucagca

SEQ ID NO: 3441633 - RNA, 24 nt, Human
cugcacuugggggcucagcaaggc

SEQ ID NO: 3441634 - RNA, 17 nt, Human
cugcacuuugaugucau

SEQ ID NO: 3441635 - RNA, 16 nt, Human
cugcagaaccggagag

SEQ ID NO: 3441636 - RNA, 22 nt, Human
cugcagaaccggagagccagcu

SEQ ID NO: 3441637 - RNA, 15 nt, Human
cugcagaaggaaaaa

SEQ ID NO: 3441638 - RNA, 21 nt, Human
cugcagaaggaaaaaugugua

SEQ ID NO: 3441639 - RNA, 16 nt, Human
cugcagaaggccaaga

SEQ ID NO: 3441640 - RNA, 19 nt, Human
cugcagaaggccaagaauc

SEQ ID NO: 3441641 - RNA, 13 nt, Human
cugcagacccugc

SEQ ID NO: 3441642 - RNA, 22 nt, Human
cugcagaccuguccuccuggug

SEQ ID NO: 3441643 - RNA, 15 nt, Human
cugcagacucacugu

SEQ ID NO: 3441644 - RNA, 15 nt, Human
cugcagacuucccag

SEQ ID NO: 3441645 - RNA, 16 nt, Human
cugcagacuucccagc

SEQ ID NO: 3441646 - RNA, 20 nt, Human
cugcagagcaggaaacauga

SEQ ID NO: 3441647 - RNA, 18 nt, Human
cugcagagcagugggccu

SEQ ID NO: 3441648 - RNA, 21 nt, Human
cugcagagcagugggccuggc

SEQ ID NO: 3441649 - RNA, 20 nt, Human
cugcagaggccagaggcccc

SEQ ID NO: 3441650 - RNA, 21 nt, Human
cugcagaggggcaggcccugc

SEQ ID NO: 3441651 - RNA, 19 nt, Human
cugcagaggucugugcuga

SEQ ID NO: 3441652 - RNA, 22 nt, Human
cugcagaggucugugcugaggc

SEQ ID NO: 3441653 - RNA, 17 nt, Human
cugcagaguuuccaaaa

SEQ ID NO: 3441654 - RNA, 16 nt, Human
cugcagaugccacccu

SEQ ID NO: 3441655 - RNA, 19 nt, Human
cugcagauuugggcuggaa

SEQ ID NO: 3441656 - RNA, 20 nt, Human
cugcagauuugggcuggaac

SEQ ID NO: 3441657 - RNA, 18 nt, Human
cugcagcaaacacuccac

SEQ ID NO: 3441658 - RNA, 20 nt, Human
cugcagcaaacacuccaccc

SEQ ID NO: 3441659 - RNA, 16 nt, Human
cugcagcaauaaagca

SEQ ID NO: 3441660 - RNA, 16 nt, Human
cugcagcaccgagggg

SEQ ID NO: 3441661 - RNA, 18 nt, Human
cugcagcaccgaggggcc

SEQ ID NO: 3441662 - RNA, 22 nt, Human
cugcagcaccgaggggccuuug

SEQ ID NO: 3441663 - RNA, 18 nt, Human
cugcagcaccuccaggcc

SEQ ID NO: 3441664 - RNA, 19 nt, Human
cugcagcacggacaauaaa

SEQ ID NO: 3441665 - RNA, 14 nt, Human
cugcagcagagccu

SEQ ID NO: 3441666 - RNA, 15 nt, Human
cugcagcagagccug

SEQ ID NO: 3441667 - RNA, 14 nt, Human
cugcagcagaggca

SEQ ID NO: 3441668 - RNA, 22 nt, Human
cugcagcaugaccugugaccag

SEQ ID NO: 3441669 - RNA, 23 nt, Human
cugcagcauggucccugccuuag

SEQ ID NO: 3441670 - RNA, 18 nt, Human
cugcagcauguugcugag

SEQ ID NO: 3441671 - RNA, 20 nt, Human
cugcagcauguugcugagga

SEQ ID NO: 3441672 - RNA, 12 nt, Human
cugcagccagcc

SEQ ID NO: 3441673 - RNA, 17 nt, Human
cugcagccagcccagcc

SEQ ID NO: 3441674 - RNA, 17 nt, Human
cugcagccaggccacug

SEQ ID NO: 3441675 - RNA, 15 nt, Human
cugcagcccuggccc

SEQ ID NO: 3441676 - RNA, 11 nt, Human
cugcagccuca

SEQ ID NO: 3441677 - RNA, 24 nt, Human
cugcagccucaaccuccugggcua

SEQ ID NO: 3441678 - RNA, 14 nt, Human
cugcagccucagag

SEQ ID NO: 3441679 - RNA, 11 nt, Human
cugcagccucc

SEQ ID NO: 3441680 - RNA, 20 nt, Human
cugcagccuccgcuucccug

SEQ ID NO: 3441681 - RNA, 16 nt, Human
cugcagccuccuccug

SEQ ID NO: 3441682 - RNA, 17 nt, Human
cugcagccuccuccuga

SEQ ID NO: 3441683 - RNA, 18 nt, Human
cugcagccuccuccugac

SEQ ID NO: 3441684 - RNA, 19 nt, Human
cugcagccucgaacuccug

SEQ ID NO: 3441685 - RNA, 20 nt, Human
cugcagccucgaacuccugg

SEQ ID NO: 3441686 - RNA, 19 nt, Human
cugcagccugcaggaccuc

SEQ ID NO: 3441687 - RNA, 11 nt, Human
cugcagccugg

SEQ ID NO: 3441688 - RNA, 14 nt, Human
cugcagccuggagg

SEQ ID NO: 3441689 - RNA, 20 nt, Human
cugcagccuggaggccgggu

SEQ ID NO: 3441690 - RNA, 21 nt, Human
cugcagccuugaacucugggc

SEQ ID NO: 3441691 - RNA, 16 nt, Human
cugcagcucccuggcu

SEQ ID NO: 3441692 - RNA, 17 nt, Human
cugcagcucccuggcuu

SEQ ID NO: 3441693 - RNA, 12 nt, Human
cugcagcugacc

SEQ ID NO: 3441694 - RNA, 21 nt, Human
cugcagcugaccucuguuguc

SEQ ID NO: 3441695 - RNA, 12 nt, Human
cugcagcugccg

SEQ ID NO: 3441696 - RNA, 13 nt, Human
cugcagcuggaca

SEQ ID NO: 3441697 - RNA, 13 nt, Human
ccggcaggcccug

SEQ ID NO: 3441698 - RNA, 23 nt, Human
ccggcaugagacucagugcagau

SEQ ID NO: 3441699 - RNA, 17 nt, Human
ccggccaauggaaaccu

SEQ ID NO: 3441700 - RNA, 15 nt, Human
ccggccagccauguc

SEQ ID NO: 3441701 - RNA, 14 nt, Human
ccggccagcuggga

SEQ ID NO: 3441702 - RNA, 20 nt, Human
ccggccaggugccuccugac

SEQ ID NO: 3441703 - RNA, 13 nt, Human
ccggccagguggg

SEQ ID NO: 3441704 - RNA, 12 nt, Human
ccggccccagcc

SEQ ID NO: 3441705 - RNA, 18 nt, Human
ccggccccagccagaguu

SEQ ID NO: 3441706 - RNA, 17 nt, Human
ccggcccccagagcgcc

SEQ ID NO: 3441707 - RNA, 19 nt, Human
ccggcccccuggucucugg

SEQ ID NO: 3441708 - RNA, 16 nt, Human
ccggccccggccccag

SEQ ID NO: 3441709 - RNA, 13 nt, Human
ccggccccugcug

SEQ ID NO: 3441710 - RNA, 14 nt, Human
ccggccccugcugg

SEQ ID NO: 3441711 - RNA, 15 nt, Human
ccggccccugcuggu

SEQ ID NO: 3441712 - RNA, 14 nt, Human
ccggcccuagccca

SEQ ID NO: 3441713 - RNA, 13 nt, Human
ccggcccuccaga

SEQ ID NO: 3441714 - RNA, 16 nt, Human
ccggcccuccagagcc

SEQ ID NO: 3441715 - RNA, 17 nt, Human
ccggcccuccagagccc

SEQ ID NO: 3441716 - RNA, 21 nt, Human
ccggcccuccuacccugcgcc

SEQ ID NO: 3441717 - RNA, 22 nt, Human
ccggcccugggcucggaggcug

SEQ ID NO: 3441718 - RNA, 13 nt, Human
ccggcccugugug

SEQ ID NO: 3441719 - RNA, 14 nt, Human
ccggccgauggaga

SEQ ID NO: 3441720 - RNA, 15 nt, Human
ccggccgcuccacca

SEQ ID NO: 3441721 - RNA, 16 nt, Human
ccggccggccacccag

SEQ ID NO: 3441722 - RNA, 23 nt, Human
ccggccucagcaccccugucucu

SEQ ID NO: 3441723 - RNA, 12 nt, Human
ccggccucucca

SEQ ID NO: 3441724 - RNA, 14 nt, Human
ccggccucuccagc

SEQ ID NO: 3441725 - RNA, 18 nt, Human
ccggccucuccagccuca

SEQ ID NO: 3441726 - RNA, 15 nt, Human
ccggccucucuggcc

SEQ ID NO: 3441727 - RNA, 18 nt, Human
ccggccucucuggccucc

SEQ ID NO: 3441728 - RNA, 20 nt, Human
ccggccucucuggccuccca

SEQ ID NO: 3441729 - RNA, 14 nt, Human
ccggccugccagga

SEQ ID NO: 3441730 - RNA, 20 nt, Human
ccggccugcucccagcagcc

SEQ ID NO: 3441731 - RNA, 15 nt, Human
ccggcgcccucuguc

SEQ ID NO: 3441732 - RNA, 18 nt, Human
ccggcgcccucuguccug

SEQ ID NO: 3441733 - RNA, 20 nt, Human
ccggcgccuggccuccaggc

SEQ ID NO: 3441734 - RNA, 21 nt, Human
ccggcgcuugccacuagggcu

SEQ ID NO: 3441735 - RNA, 19 nt, Human
ccggcggcccaagcccgac

SEQ ID NO: 3441736 - RNA, 15 nt, Human
cugcugucagucugc

SEQ ID NO: 3441737 - RNA, 16 nt, Human
cugcugucagucugcu

SEQ ID NO: 3441738 - RNA, 15 nt, Human
cugcugucauaacau

SEQ ID NO: 3441739 - RNA, 20 nt, Human
cugcugucauugcuucuucu

SEQ ID NO: 3441740 - RNA, 19 nt, Human
cugcuguccagacagccug

SEQ ID NO: 3441741 - RNA, 14 nt, Human
cugcuguccccucu

SEQ ID NO: 3441742 - RNA, 18 nt, Human
cugcuguccccucuugcc

SEQ ID NO: 3441743 - RNA, 21 nt, Human
cugcuguccccucuugcccca

SEQ ID NO: 3441744 - RNA, 23 nt, Human
cugcuguccccucuugccccaac

SEQ ID NO: 3441745 - RNA, 14 nt, Human
cugcugucucagcc

SEQ ID NO: 3441746 - RNA, 12 nt, Human
cugcugucuggg

SEQ ID NO: 3441747 - RNA, 14 nt, Human
cugcugucugggug

SEQ ID NO: 3441748 - RNA, 15 nt, Human
cugcugucugggugc

SEQ ID NO: 3441749 - RNA, 15 nt, Human
cugcugugaaagaag

SEQ ID NO: 3441750 - RNA, 22 nt, Human
cugcugugaacaagugaacaca

SEQ ID NO: 3441751 - RNA, 17 nt, Human
cugcugugaacccuggg

SEQ ID NO: 3441752 - RNA, 16 nt, Human
ccuagcuggagaggag

SEQ ID NO: 3441753 - RNA, 15 nt, Human
ccuagcuggcucugu

SEQ ID NO: 3441754 - RNA, 22 nt, Human
ccuagcuguccuuuuuccucuc

SEQ ID NO: 3441755 - RNA, 22 nt, Human
ccuagcugugugaauaccugcu

SEQ ID NO: 3441756 - RNA, 13 nt, Human
ccuagcugugugc

SEQ ID NO: 3441757 - RNA, 17 nt, Human
ccuagcugugugcaguc

SEQ ID NO: 3441758 - RNA, 20 nt, Human
ccuagcuugggaggcuuccc

SEQ ID NO: 3441759 - RNA, 23 nt, Human
ccuagcuuuagacccuggguggg

SEQ ID NO: 3441760 - RNA, 22 nt, Human
ccuaggaaacucacacuccccu

SEQ ID NO: 3441761 - RNA, 15 nt, Human
ccuaggaagccucag

SEQ ID NO: 3441762 - RNA, 17 nt, Human
ccuaggaagccucagau

SEQ ID NO: 3441763 - RNA, 14 nt, Human
ccuaggaagugauu

SEQ ID NO: 3441764 - RNA, 16 nt, Human
ccuaggaauucccagc

SEQ ID NO: 3441765 - RNA, 20 nt, Human
ccuaggaccacucagccccu

SEQ ID NO: 3441766 - RNA, 21 nt, Human
ccuaggaguauauuuccgcac

SEQ ID NO: 3441767 - RNA, 21 nt, Human
ccuaggauaaaaagccagggc

SEQ ID NO: 3441768 - RNA, 16 nt, Human
ccuaggauugugccug

SEQ ID NO: 3441769 - RNA, 22 nt, Human
ccuaggcaggacaugcugaagc

SEQ ID NO: 3441770 - RNA, 19 nt, Human
ccuaggcaguaggccggug

SEQ ID NO: 3441771 - RNA, 18 nt, Human
ccuaggccacuccuccaa

SEQ ID NO: 3441772 - RNA, 20 nt, Human
ccuaggccucagccagagaa

SEQ ID NO: 3441773 - RNA, 13 nt, Human
ccuaggccuggca

SEQ ID NO: 3441774 - RNA, 17 nt, Human
ccuaggcuccaccccau

SEQ ID NO: 3441775 - RNA, 17 nt, Human
ccuaggcugaccuugaa

SEQ ID NO: 3441776 - RNA, 16 nt, Human
ccuaggcuggaaggag

SEQ ID NO: 3441777 - RNA, 22 nt, Human
ccuaggcuggaaggaggaagaa

SEQ ID NO: 3441778 - RNA, 23 nt, Human
ccuagggaagggugguggagcca

SEQ ID NO: 3441779 - RNA, 17 nt, Human
ccuagggccacugaaga

SEQ ID NO: 3441780 - RNA, 20 nt, Human
ccuagggcccccacaguugc

SEQ ID NO: 3441781 - RNA, 14 nt, Human
ccuagggccugguc

SEQ ID NO: 3441782 - RNA, 13 nt, Human
ccuagggcugggu

SEQ ID NO: 3441783 - RNA, 16 nt, Human
ccuaggggaaugaggg

SEQ ID NO: 3441784 - RNA, 22 nt, Human
ccuaggggaaugagggggcuca

SEQ ID NO: 3441785 - RNA, 17 nt, Human
ccuaggggacacuuccc

SEQ ID NO: 3441786 - RNA, 15 nt, Human
ccuaggggucaggga

SEQ ID NO: 3441787 - RNA, 21 nt, Human
ccuagguagcccccucuuccc

SEQ ID NO: 3441788 - RNA, 17 nt, Human
ccuagguguuuuguuca

SEQ ID NO: 3441789 - RNA, 18 nt, Human
ccuagguucccggucccg

SEQ ID NO: 3441790 - RNA, 15 nt, Human
ccuaguaagugccuu

SEQ ID NO: 3441791 - RNA, 14 nt, Human
ccuaguagucauuu

SEQ ID NO: 3441792 - RNA, 14 nt, Human
ccuagucccuuccc

SEQ ID NO: 3441793 - RNA, 19 nt, Human
ccuagucccuuccccuccc

SEQ ID NO: 3441794 - RNA, 16 nt, Human
ccuagucucuaucauu

SEQ ID NO: 3441795 - RNA, 14 nt, Human
ccuagugaaacuuu

SEQ ID NO: 3441796 - RNA, 18 nt, Human
ccuagugaaggcuucucu

SEQ ID NO: 3441797 - RNA, 23 nt, Human
ccuagugaaggcuucucucugug

SEQ ID NO: 3441798 - RNA, 19 nt, Human
ccuagugacccggaggcca

SEQ ID NO: 3441799 - RNA, 20 nt, Human
ccuagugacccggaggccac

SEQ ID NO: 3441800 - RNA, 15 nt, Human
ccuaguggcugucca

SEQ ID NO: 3441801 - RNA, 16 nt, Human
ccuaguggcuguccag

SEQ ID NO: 3441802 - RNA, 21 nt, Human
ccuaguggcuguccagugccc

SEQ ID NO: 3441803 - RNA, 18 nt, Human
ccuaguggggucucccuc

SEQ ID NO: 3441804 - RNA, 23 nt, Human
ccuaguggggucucccucuccug

SEQ ID NO: 3441805 - RNA, 24 nt, Human
ccuaguggggucucccucuccugc

SEQ ID NO: 3441806 - RNA, 15 nt, Human
ccuaguuaaagaaag

SEQ ID NO: 3441807 - RNA, 19 nt, Human
ccuaguuaaagaaaggaaa

SEQ ID NO: 3441808 - RNA, 21 nt, Human
ccuaguucauccaauccucac

SEQ ID NO: 3441809 - RNA, 18 nt, Human
ccuaguucccucugcuca

SEQ ID NO: 3441810 - RNA, 16 nt, Human
ccuaguuggugagaaa

SEQ ID NO: 3441811 - RNA, 17 nt, Human
ccuaguuugaccucaca

SEQ ID NO: 3441812 - RNA, 12 nt, Human
ccuaguuuucca

SEQ ID NO: 3441813 - RNA, 18 nt, Human
ccuaguuuucuccuccca

SEQ ID NO: 3441814 - RNA, 16 nt, Human
ccuaguuuucuuuccu

SEQ ID NO: 3441815 - RNA, 22 nt, Human
ccuaguuuucuuuccuccuuuc

SEQ ID NO: 3441816 - RNA, 12 nt, Human
ccuauaaaacag

SEQ ID NO: 3441817 - RNA, 14 nt, Human
ccuauaaaucuaau

SEQ ID NO: 3441818 - RNA, 18 nt, Human
ccuauaaaucuaaugaca

SEQ ID NO: 3441819 - RNA, 18 nt, Human
ccuauaacuugaugcaug

SEQ ID NO: 3441820 - RNA, 16 nt, Human
ccuauaauguguguau

SEQ ID NO: 3441821 - RNA, 19 nt, Human
ccuauaauguguguaugug

SEQ ID NO: 3441822 - RNA, 21 nt, Human
ccuauaauguguguaugugua

SEQ ID NO: 3441823 - RNA, 22 nt, Human
ccuauacgcagcgugcuuuaaa

SEQ ID NO: 3441824 - RNA, 13 nt, Human
ccuauacugcuug

SEQ ID NO: 3441825 - RNA, 18 nt, Human
ccuauauaauaaagcuac

SEQ ID NO: 3441826 - RNA, 15 nt, Human
ccuauaugagaagaa

SEQ ID NO: 3441827 - RNA, 14 nt, Human
ccuauauguaguau

SEQ ID NO: 3441828 - RNA, 15 nt, Human
ccuauauuggcuaaa

SEQ ID NO: 3441829 - RNA, 16 nt, Human
ccuaucaaaaagauau

SEQ ID NO: 3441830 - RNA, 19 nt, Human
ccuaucaaaaagauaucaa

SEQ ID NO: 3441831 - RNA, 18 nt, Human
ccuaucaccuccccuccu

SEQ ID NO: 3441832 - RNA, 17 nt, Human
ccuaucagugugccccc

SEQ ID NO: 3441833 - RNA, 22 nt, Human
ccuaucagugugccccccaucc

SEQ ID NO: 3441834 - RNA, 17 nt, Human
ccuauccacugggcaca

SEQ ID NO: 3441835 - RNA, 13 nt, Human
ccuaucccauccc

SEQ ID NO: 3441836 - RNA, 15 nt, Human
ccuaucccaucccau

SEQ ID NO: 3441837 - RNA, 15 nt, Human
ccuauccucacugcc

SEQ ID NO: 3441838 - RNA, 14 nt, Human
ccuaucuccugaca

SEQ ID NO: 3441839 - RNA, 17 nt, Human
ccuaucucgugggagag

SEQ ID NO: 3441840 - RNA, 17 nt, Human
ccuaucugggcuuccug

SEQ ID NO: 3441841 - RNA, 18 nt, Human
ccuaucugggcuuccugg

SEQ ID NO: 3441842 - RNA, 21 nt, Human
ccuaugaaguaaagaacugca

SEQ ID NO: 3441843 - RNA, 16 nt, Human
ccuaugaaugcuuugc

SEQ ID NO: 3441844 - RNA, 22 nt, Human
ccuaugagcauccugagccccg

SEQ ID NO: 3441845 - RNA, 14 nt, Human
ccuaugaucccagc

SEQ ID NO: 3441846 - RNA, 12 nt, Human
ccuaugcaauaa

SEQ ID NO: 3441847 - RNA, 14 nt, Human
ccuaugcaugguuu

SEQ ID NO: 3441848 - RNA, 20 nt, Human
ccuaugcaugguuucagcac

SEQ ID NO: 3441849 - RNA, 22 nt, Human
ccuaugcuauugacaauaaaau

SEQ ID NO: 3441850 - RNA, 23 nt, Human
ccuaugcuauugacaauaaaaua

SEQ ID NO: 3441851 - RNA, 13 nt, Human
ccuauggagagcc

SEQ ID NO: 3441852 - RNA, 16 nt, Human
ccuauggagagcccug

SEQ ID NO: 3441853 - RNA, 17 nt, Human
ccuauggagagcccugg

SEQ ID NO: 3441854 - RNA, 11 nt, Human
ccuauggaugu

SEQ ID NO: 3441855 - RNA, 17 nt, Human
ccuaugggccugccggg

SEQ ID NO: 3441856 - RNA, 22 nt, Human
ccuauguaagaauucagaagac

SEQ ID NO: 3441857 - RNA, 16 nt, Human
ccuauguaguccgugc

SEQ ID NO: 3441858 - RNA, 15 nt, Human
ccuauguccuaagga

SEQ ID NO: 3441859 - RNA, 21 nt, Human
ccuauguccuaaggacacacu

SEQ ID NO: 3441860 - RNA, 11 nt, Human
ccuauguuugc

SEQ ID NO: 3441861 - RNA, 16 nt, Human
ccuauuaaccuagaga

SEQ ID NO: 3441862 - RNA, 16 nt, Human
ccuauuagagaagaga

SEQ ID NO: 3441863 - RNA, 16 nt, Human
ccuauuaguguuauau

SEQ ID NO: 3441864 - RNA, 12 nt, Human
ccuauuauccca

SEQ ID NO: 3441865 - RNA, 17 nt, Human
ccuauuaucccagcugc

SEQ ID NO: 3441866 - RNA, 17 nt, Human
ccuauuaucugucagcu

SEQ ID NO: 3441867 - RNA, 23 nt, Human
ccuauucaacacacacaugcuuc

SEQ ID NO: 3441868 - RNA, 17 nt, Human
ccuauuccaagcuucca

SEQ ID NO: 3441869 - RNA, 15 nt, Human
ccuauuccuccuggg

SEQ ID NO: 3441870 - RNA, 15 nt, Human
ccuauucuccucauc

SEQ ID NO: 3441871 - RNA, 16 nt, Human
ccuauuguaaauacaa

SEQ ID NO: 3441872 - RNA, 13 nt, Human
ccuauugucauua

SEQ ID NO: 3441873 - RNA, 21 nt, Human
ccuauugugauuugacuguuu

SEQ ID NO: 3441874 - RNA, 16 nt, Human
ccuauuucaaaaauuu

SEQ ID NO: 3441875 - RNA, 11 nt, Human
ccuauuucaga

SEQ ID NO: 3441876 - RNA, 20 nt, Human
ccuauuucaguacuucagca

SEQ ID NO: 3441877 - RNA, 12 nt, Human
ccuauuucucuu

SEQ ID NO: 3441878 - RNA, 13 nt, Human
ccuauuuucauug

SEQ ID NO: 3441879 - RNA, 19 nt, Human
ccuauuuugaaaaauuccu

SEQ ID NO: 3441880 - RNA, 21 nt, Human
ccuauuuugaaaaauuccuau

SEQ ID NO: 3441881 - RNA, 20 nt, Human
ccucagccccucuugccccc

SEQ ID NO: 3441882 - RNA, 23 nt, Human
ccucagccccucuugccccccac

SEQ ID NO: 3441883 - RNA, 15 nt, Human
ccucagcccugaccc

SEQ ID NO: 3441884 - RNA, 18 nt, Human
ccucagcccugacccugu

SEQ ID NO: 3441885 - RNA, 19 nt, Human
ccucagccuagacccuccu

SEQ ID NO: 3441886 - RNA, 20 nt, Human
ccucagccuagacccuccuc

SEQ ID NO: 3441887 - RNA, 19 nt, Human
ccucagccuggccagacac

SEQ ID NO: 3441888 - RNA, 22 nt, Human
ccucagccuggccagacacagg

SEQ ID NO: 3441889 - RNA, 12 nt, Human
ccucagccuggg

SEQ ID NO: 3441890 - RNA, 13 nt, Human
ccucagccugggc

SEQ ID NO: 3441891 - RNA, 16 nt, Human
ccucagccugggcgcu

SEQ ID NO: 3441892 - RNA, 17 nt, Human
ccucagccugggcgcug

SEQ ID NO: 3441893 - RNA, 11 nt, Human
ccucagccugu

SEQ ID NO: 3441894 - RNA, 12 nt, Human
ccucagccugug

SEQ ID NO: 3441895 - RNA, 22 nt, Human
ccucagccuuccccuugcccag

SEQ ID NO: 3441896 - RNA, 20 nt, Human
ccucagccuugccagagauc

SEQ ID NO: 3441897 - RNA, 23 nt, Human
ccucagccuuggauaaugcuguu

SEQ ID NO: 3441898 - RNA, 14 nt, Human
ccucagcgcggccc

SEQ ID NO: 3441899 - RNA, 15 nt, Human
ccucagcucccacaa

SEQ ID NO: 3441900 - RNA, 17 nt, Human
ccucagcucggcucagc

SEQ ID NO: 3441901 - RNA, 17 nt, Human
ccucagcucucaguugc

SEQ ID NO: 3441902 - RNA, 15 nt, Human
ccucagcucugggag

SEQ ID NO: 3441903 - RNA, 13 nt, Human
ccucagcugccuc

SEQ ID NO: 3441904 - RNA, 18 nt, Human
ccucagcugccucacuuc

SEQ ID NO: 3441905 - RNA, 12 nt, Human
ccucaggaaaga

SEQ ID NO: 3441906 - RNA, 13 nt, Human
ccucaggaaagaa

SEQ ID NO: 3441907 - RNA, 17 nt, Human
ccucaggaaugggcugu

SEQ ID NO: 3441908 - RNA, 18 nt, Human
ccucaggacaaugucuga

SEQ ID NO: 3441909 - RNA, 11 nt, Human
ccucaggacca

SEQ ID NO: 3441910 - RNA, 13 nt, Human
ccucaggacccuc

SEQ ID NO: 3441911 - RNA, 19 nt, Human
ccucaggacccucgcuggc

SEQ ID NO: 3441912 - RNA, 13 nt, Human
ccucaggacuggg

SEQ ID NO: 3441913 - RNA, 17 nt, Human
ccucaggacugggagcc

SEQ ID NO: 3441914 - RNA, 19 nt, Human
ccucaggagccgaagccca

SEQ ID NO: 3441915 - RNA, 20 nt, Human
ccucaggcaaggucuggccu

SEQ ID NO: 3441916 - RNA, 15 nt, Human
ccucaggcacuagcc

SEQ ID NO: 3441917 - RNA, 16 nt, Human
ccucaggcacuagccu

SEQ ID NO: 3441918 - RNA, 20 nt, Human
cuggaagcugggaggucagg

SEQ ID NO: 3441919 - RNA, 16 nt, Human
cuggaaguuauuuauu

SEQ ID NO: 3441920 - RNA, 17 nt, Human
cuggaaguuuugcauuu

SEQ ID NO: 3441921 - RNA, 20 nt, Human
cuggaaguuuugcauuuaug

SEQ ID NO: 3441922 - RNA, 14 nt, Human
cuggaauaaguuca

SEQ ID NO: 3441923 - RNA, 23 nt, Human
cuggaauaauccuaaacauauga

SEQ ID NO: 3441924 - RNA, 15 nt, Human
cuggaauacaugaaa

SEQ ID NO: 3441925 - RNA, 18 nt, Human
cuggaauauauaaccagu

SEQ ID NO: 3441926 - RNA, 23 nt, Human
cuggaaucaagaugucagacugg

SEQ ID NO: 3441927 - RNA, 23 nt, Human
cuggaaucaggaauauuuuccaa

SEQ ID NO: 3441928 - RNA, 18 nt, Human
cuggaaucuggagaccag

SEQ ID NO: 3441929 - RNA, 20 nt, Human
cuggaaucuggagagcuaga

SEQ ID NO: 3441930 - RNA, 19 nt, Human
cuggaaugaguugaggcca

SEQ ID NO: 3441931 - RNA, 24 nt, Human
cuggaaugaguugaggccacugug

SEQ ID NO: 3441932 - RNA, 15 nt, Human
cuggaauguaaucaa

SEQ ID NO: 3441933 - RNA, 22 nt, Human
cuggaauuagcuuggggccagg

SEQ ID NO: 3441934 - RNA, 23 nt, Human
cuggaauuugcaagucauggcug

SEQ ID NO: 3441935 - RNA, 20 nt, Human
cuggaauuuuuauuaugcau

SEQ ID NO: 3441936 - RNA, 20 nt, Human
cuggaauuuuuuauucuugu

SEQ ID NO: 3441937 - RNA, 21 nt, Human
cuggaauuuuuuauucuugug

SEQ ID NO: 3441938 - RNA, 15 nt, Human
cuggacaaagaauuc

SEQ ID NO: 3441939 - RNA, 11 nt, Human
cuggacaagcc

SEQ ID NO: 3441940 - RNA, 15 nt, Human
cuggacaagccaacu

SEQ ID NO: 3441941 - RNA, 21 nt, Human
cuggacaagccaacuuguaaa

SEQ ID NO: 3441942 - RNA, 15 nt, Human
cuggacacaggccug

SEQ ID NO: 3441943 - RNA, 17 nt, Human
cuggacaccgggccagu

SEQ ID NO: 3441944 - RNA, 22 nt, Human
cuggacaccgggccaguaucua

SEQ ID NO: 3441945 - RNA, 15 nt, Human
cuggacacucagacc

SEQ ID NO: 3441946 - RNA, 20 nt, Human
cuggacacuucacgcccuug

SEQ ID NO: 3441947 - RNA, 22 nt, Human
cuggacacuucacgcccuuggc

SEQ ID NO: 3441948 - RNA, 19 nt, Human
cuggacagaggggacucug

SEQ ID NO: 3441949 - RNA, 15 nt, Human
cuggacagcugugcc

SEQ ID NO: 3441950 - RNA, 19 nt, Human
cuggacagcugugccucgc

SEQ ID NO: 3441951 - RNA, 13 nt, Human
cuggacaggucug

SEQ ID NO: 3441952 - RNA, 16 nt, Human
cuggacaggucuggga

SEQ ID NO: 3441953 - RNA, 20 nt, Human
cuggacaguaucacugucuu

SEQ ID NO: 3441954 - RNA, 17 nt, Human
cuggacagucacugcca

SEQ ID NO: 3441955 - RNA, 17 nt, Human
cuggacauaacauuuuc

SEQ ID NO: 3441956 - RNA, 18 nt, Human
cuggacauccucuucugc

SEQ ID NO: 3441957 - RNA, 13 nt, Human
cuggaccaaagcu

SEQ ID NO: 3441958 - RNA, 23 nt, Human
cuggaccaacccuguuuccugag

SEQ ID NO: 3441959 - RNA, 13 nt, Human
cuggaccagaugc

SEQ ID NO: 3441960 - RNA, 15 nt, Human
cuggaccagaugcug

SEQ ID NO: 3441961 - RNA, 17 nt, Human
cuggacccagccagaac

SEQ ID NO: 3441962 - RNA, 20 nt, Human
cuggacccagccaggcccag

SEQ ID NO: 3441963 - RNA, 18 nt, Human
cuggaccccaucugugaa

SEQ ID NO: 3441964 - RNA, 19 nt, Human
cuggaccccaucugugaau

SEQ ID NO: 3441965 - RNA, 22 nt, Human
cuggaccccccuuucacaggca

SEQ ID NO: 3441966 - RNA, 12 nt, Human
cuggacccugac

SEQ ID NO: 3441967 - RNA, 15 nt, Human
cuggacccuguggau

SEQ ID NO: 3441968 - RNA, 15 nt, Human
cuggacccuguugcu

SEQ ID NO: 3441969 - RNA, 19 nt, Human
cuggaccuauguccuaagg

SEQ ID NO: 3441970 - RNA, 17 nt, Human
cuggaccucugacagca

SEQ ID NO: 3441971 - RNA, 19 nt, Human
cuggaccucugacagcagc

SEQ ID NO: 3441972 - RNA, 21 nt, Human
cuggaccucugacagcagcau

SEQ ID NO: 3441973 - RNA, 12 nt, Human
cuggaccugccc

SEQ ID NO: 3441974 - RNA, 19 nt, Human
cuggaccugcccccgcauc

SEQ ID NO: 3441975 - RNA, 12 nt, Human
cuggaccugccu

SEQ ID NO: 3441976 - RNA, 20 nt, Human
cuggaccugccuccugccug

SEQ ID NO: 3441977 - RNA, 16 nt, Human
cuggaccuguauauuu

SEQ ID NO: 3441978 - RNA, 17 nt, Human
cuggaccuugaacuggg

SEQ ID NO: 3441979 - RNA, 17 nt, Human
cuggacggaaguggugg

SEQ ID NO: 3441980 - RNA, 13 nt, Human
cuggacggcaggc

SEQ ID NO: 3441981 - RNA, 15 nt, Human
cuggacggcauuccu

SEQ ID NO: 3441982 - RNA, 17 nt, Human
cuggacggcauuccugc

SEQ ID NO: 3441983 - RNA, 15 nt, Human
cuggacggggacugg

SEQ ID NO: 3441984 - RNA, 16 nt, Human
cuggacgucuuucuuu

SEQ ID NO: 3441985 - RNA, 21 nt, Human
cuggacuagagggaccucucc

SEQ ID NO: 3441986 - RNA, 23 nt, Human
cuggacuagagggaccucuccca

SEQ ID NO: 3441987 - RNA, 19 nt, Human
cuggacucaggaugcccag

SEQ ID NO: 3441988 - RNA, 23 nt, Human
cuggacuccucuguccaggcacu

SEQ ID NO: 3441989 - RNA, 14 nt, Human
cuggacucuaaaga

SEQ ID NO: 3441990 - RNA, 18 nt, Human
cuggacucuaaagaccaa

SEQ ID NO: 3441991 - RNA, 19 nt, Human
cuggacucuaaagaccaaa

SEQ ID NO: 3441992 - RNA, 21 nt, Human
cuggacucuaaagaccaaacu

SEQ ID NO: 3441993 - RNA, 14 nt, Human
cuggacucucaguc

SEQ ID NO: 3441994 - RNA, 19 nt, Human
cuggacucucagucucuga

SEQ ID NO: 3441995 - RNA, 20 nt, Human
cuggacucucagucucugag

SEQ ID NO: 3441996 - RNA, 23 nt, Human
cuggacucucagucucugagcag

SEQ ID NO: 3441997 - RNA, 21 nt, Human
cuggacucuggacuuucucua

SEQ ID NO: 3441998 - RNA, 16 nt, Human
cuggacugaagccugc

SEQ ID NO: 3441999 - RNA, 19 nt, Human
cuggacugaagccugcagg

SEQ ID NO: 3442000 - RNA, 12 nt, Human
cuggacugacag

SEQ ID NO: 3442001 - RNA, 12 nt, Human
cuggacugaggc

SEQ ID NO: 3442002 - RNA, 13 nt, Human
cuggacugaggcc

SEQ ID NO: 3442003 - RNA, 16 nt, Human
cuggacugaggccuga

SEQ ID NO: 3442004 - RNA, 18 nt, Human
cuggacugagggggccug

SEQ ID NO: 3442005 - RNA, 20 nt, Human
cuggacugagggggccugga

SEQ ID NO: 3442006 - RNA, 13 nt, Human
cuggacugggagg

SEQ ID NO: 3442007 - RNA, 14 nt, Human
cuggacugggaggu

SEQ ID NO: 3442008 - RNA, 16 nt, Human
cuggacugggagguag

SEQ ID NO: 3442009 - RNA, 18 nt, Human
cuggacugucauagaaau

SEQ ID NO: 3442010 - RNA, 19 nt, Human
cuggacugucauagaaauu

SEQ ID NO: 3442011 - RNA, 22 nt, Human
cuggacugugugcucaggagcc

SEQ ID NO: 3442012 - RNA, 18 nt, Human
cuggacuuaagcaucugg

SEQ ID NO: 3442013 - RNA, 18 nt, Human
cuggacuucuaccugccc

SEQ ID NO: 3442014 - RNA, 20 nt, Human
cuggacuucuaccugcccuc

SEQ ID NO: 3442015 - RNA, 18 nt, Human
cuggacuugagcuuggca

SEQ ID NO: 3442016 - RNA, 20 nt, Human
cuggacuugagcuuggcagc

SEQ ID NO: 3442017 - RNA, 18 nt, Human
cuggacuuuccuguuguc

SEQ ID NO: 3442018 - RNA, 18 nt, Human
cuggacuuucucuaauaa

SEQ ID NO: 3442019 - RNA, 19 nt, Human
cuggacuuucucuaauaau

SEQ ID NO: 3442020 - RNA, 13 nt, Human
cuggagaaaaaua

SEQ ID NO: 3442021 - RNA, 14 nt, Human
cuggagaaaaugga

SEQ ID NO: 3442022 - RNA, 21 nt, Human
cuggagaaaauggacguguua

SEQ ID NO: 3442023 - RNA, 13 nt, Human
cuggagaaagggc

SEQ ID NO: 3442024 - RNA, 23 nt, Human
cuggagaaagggcccugggccug

SEQ ID NO: 3442025 - RNA, 22 nt, Human
cuggacucuucaaaaacuguuu

SEQ ID NO: 3442026 - RNA, 22 nt, Human
cuggacugaagccugcaggagu

SEQ ID NO: 3442027 - RNA, 14 nt, Human
cuggacugaccugg

SEQ ID NO: 3442028 - RNA, 15 nt, Human
cuggacugaggccug

SEQ ID NO: 3442029 - RNA, 21 nt, Human
cuggacugagggggccuggau

SEQ ID NO: 3442030 - RNA, 23 nt, Human
cuggacugagggggccuggaugc

SEQ ID NO: 3442031 - RNA, 22 nt, Human
cuggacugccuugaauaucccc

SEQ ID NO: 3442032 - RNA, 19 nt, Human
cuggacuggaggccccugg

SEQ ID NO: 3442033 - RNA, 16 nt, Human
cuggacuggcuguccu

SEQ ID NO: 3442034 - RNA, 20 nt, Human
cuggacugucuucucccugc

SEQ ID NO: 3442035 - RNA, 13 nt, Human
cuggacugugugc

SEQ ID NO: 3442036 - RNA, 23 nt, Human
cuggacugugugcucaggagccc

SEQ ID NO: 3442037 - RNA, 23 nt, Human
cuggacuuaagcaucuggcucua

SEQ ID NO: 3442038 - RNA, 19 nt, Human
cuggacuucuaccugcccu

SEQ ID NO: 3442039 - RNA, 13 nt, Human
cuggacuugagcu

SEQ ID NO: 3442040 - RNA, 15 nt, Human
cuggacuugccucug

SEQ ID NO: 3442041 - RNA, 16 nt, Human
cuggacuugccucugc

SEQ ID NO: 3442042 - RNA, 18 nt, Human
cuggacuuggccccugcc

SEQ ID NO: 3442043 - RNA, 13 nt, Human
cuggacuuucucu

SEQ ID NO: 3442044 - RNA, 21 nt, Human
cuggacuuucucuaauaauaa

SEQ ID NO: 3442045 - RNA, 22 nt, Human
cuggacuuucucuaauaauaaa

SEQ ID NO: 3442046 - RNA, 20 nt, Human
cuggagaacaagaaagggcc

SEQ ID NO: 3442047 - RNA, 23 nt, Human
cuggagaacuagaaccuggaggg

SEQ ID NO: 3442048 - RNA, 15 nt, Human
cuggagaacuagaga

SEQ ID NO: 3442049 - RNA, 19 nt, Human
cuggagaagacccuccccg

SEQ ID NO: 3442050 - RNA, 15 nt, Human
cuggagaagagagga

SEQ ID NO: 3442051 - RNA, 14 nt, Human
cuggagaagcagug

SEQ ID NO: 3442052 - RNA, 20 nt, Human
cuggagacagccccagagca

SEQ ID NO: 3442053 - RNA, 22 nt, Human
cuggagaccaccagggcaucuc

SEQ ID NO: 3442054 - RNA, 19 nt, Human
cuggagaccagggagccuu

SEQ ID NO: 3442055 - RNA, 20 nt, Human
cuggagaccaugcagagcgc

SEQ ID NO: 3442056 - RNA, 21 nt, Human
cuggagaccaugcagagcgcc

SEQ ID NO: 3442057 - RNA, 18 nt, Human
cuggagacgggugggcgg

SEQ ID NO: 3442058 - RNA, 20 nt, Human
cuggagacugugugugcccu

SEQ ID NO: 3442059 - RNA, 23 nt, Human
cuggagacugugugugcccucug

SEQ ID NO: 3442060 - RNA, 21 nt, Human
cuggagacuuagggcaccagg

SEQ ID NO: 3442061 - RNA, 22 nt, Human
cuggagagaaacaauaaagaga

SEQ ID NO: 3442062 - RNA, 16 nt, Human
cuggagagaaguggaa

SEQ ID NO: 3442063 - RNA, 20 nt, Human
cuggagagcauagggucugg

SEQ ID NO: 3442064 - RNA, 16 nt, Human
cuggagagcccagagu

SEQ ID NO: 3442065 - RNA, 22 nt, Human
cuggagagcuagaaccuggagg

SEQ ID NO: 3442066 - RNA, 17 nt, Human
cuggagaggagcccugc

SEQ ID NO: 3442067 - RNA, 12 nt, Human
cuggagaggccc

SEQ ID NO: 3442068 - RNA, 22 nt, Human
cuggagaggcccucuggagugg

SEQ ID NO: 3442069 - RNA, 23 nt, Human
cuggagagucucacuccccuccu

SEQ ID NO: 3442070 - RNA, 20 nt, Human
cuggagaguucaauggcugc

SEQ ID NO: 3442071 - RNA, 15 nt, Human
cuggagaucaccagu

SEQ ID NO: 3442072 - RNA, 15 nt, Human
cuggagauccuccug

SEQ ID NO: 3442073 - RNA, 17 nt, Human
cuggagauccuccugca

SEQ ID NO: 3442074 - RNA, 18 nt, Human
cuggagauccuccugcag

SEQ ID NO: 3442075 - RNA, 23 nt, Human
cuggagauccuccugcagaccac

SEQ ID NO: 3442076 - RNA, 19 nt, Human
cuggagaugaggccagacc

SEQ ID NO: 3442077 - RNA, 15 nt, Human
cuggagauggggaga

SEQ ID NO: 3442078 - RNA, 13 nt, Human
cuggagcacaaag

SEQ ID NO: 3442079 - RNA, 13 nt, Human
cuggagcaccagg

SEQ ID NO: 3442080 - RNA, 21 nt, Human
cuggagcacugggcucccggg

SEQ ID NO: 3442081 - RNA, 23 nt, Human
cuggagcacugggcucccgggcc

SEQ ID NO: 3442082 - RNA, 18 nt, Human
cuggagcagaccaccccg

SEQ ID NO: 3442083 - RNA, 23 nt, Human
cuggagcagauggagaccccuug

SEQ ID NO: 3442084 - RNA, 13 nt, Human
cuggagcagccac

SEQ ID NO: 3442085 - RNA, 14 nt, Human
cuggagcagccacc

SEQ ID NO: 3442086 - RNA, 12 nt, Human
cuggagcaggcc

SEQ ID NO: 3442087 - RNA, 22 nt, Human
cuggagcaucugacucacaaga

SEQ ID NO: 3442088 - RNA, 19 nt, Human
cuggagccaaguccagauu

SEQ ID NO: 3442089 - RNA, 20 nt, Human
cuggagccaccugucccacc

SEQ ID NO: 3442090 - RNA, 21 nt, Human
cuggagccaccugucccaccu

SEQ ID NO: 3442091 - RNA, 23 nt, Human
cuggagccaccugucccaccuca

SEQ ID NO: 3442092 - RNA, 16 nt, Human
cuggagccacuaacua

SEQ ID NO: 3442093 - RNA, 22 nt, Human
cuggagccagccgagcaggagg

SEQ ID NO: 3442094 - RNA, 15 nt, Human
cuggagccaugggca

SEQ ID NO: 3442095 - RNA, 16 nt, Human
cuggagcccacuguac

SEQ ID NO: 3442096 - RNA, 21 nt, Human
cuggagcccagaggagggcag

SEQ ID NO: 3442097 - RNA, 13 nt, Human
cuggagcccagga

SEQ ID NO: 3442098 - RNA, 16 nt, Human
cuggagccccacugcc

SEQ ID NO: 3442099 - RNA, 15 nt, Human
cuggagccccugggu

SEQ ID NO: 3442100 - RNA, 17 nt, Human
cuggagccccugggugg

SEQ ID NO: 3442101 - RNA, 17 nt, Human
cuggagcccgaggcacc

SEQ ID NO: 3442102 - RNA, 20 nt, Human
cuggagcccgaggcaccagu

SEQ ID NO: 3442103 - RNA, 22 nt, Human
cuggagcccuaaccccuuccag

SEQ ID NO: 3442104 - RNA, 20 nt, Human
cuggagcccuccgccuucac

SEQ ID NO: 3442105 - RNA, 15 nt, Human
cuggagcccuggaga

SEQ ID NO: 3442106 - RNA, 15 nt, Human
cuggagcccuugggu

SEQ ID NO: 3442107 - RNA, 16 nt, Human
cuggagccugagucag

SEQ ID NO: 3442108 - RNA, 22 nt, Human
cuggagccugagucagggccca

SEQ ID NO: 3442109 - RNA, 23 nt, Human
cuggagccugagucagggcccag

SEQ ID NO: 3442110 - RNA, 15 nt, Human
cuggagccuggugcc

SEQ ID NO: 3442111 - RNA, 11 nt, Human
cuggagccugu

SEQ ID NO: 3442112 - RNA, 19 nt, Human
cuggagccuguguaacagc

SEQ ID NO: 3442113 - RNA, 23 nt, Human
cuggagccuguguaacagcuccu

SEQ ID NO: 3442114 - RNA, 23 nt, Human
cuggagcugccucucucauccac

SEQ ID NO: 3442115 - RNA, 19 nt, Human
cuggagcuggcgucugucu

SEQ ID NO: 3442116 - RNA, 13 nt, Human
cuggagcuucucu

SEQ ID NO: 3442117 - RNA, 14 nt, Human
cuggagcuucucuu

SEQ ID NO: 3442118 - RNA, 18 nt, Human
cuggaggaaagggaggag

SEQ ID NO: 3442119 - RNA, 22 nt, Human
cuggaggaagggggguugcagu

SEQ ID NO: 3442120 - RNA, 17 nt, Human
cuggaggaccugagccu

SEQ ID NO: 3442121 - RNA, 19 nt, Human
ccuccuuuaguaaaacucc

SEQ ID NO: 3442122 - RNA, 15 nt, Human
ccuccuuucucuucu

SEQ ID NO: 3442123 - RNA, 15 nt, Human
ccuccuuucuggcuu

SEQ ID NO: 3442124 - RNA, 13 nt, Human
ccuccuuucugug

SEQ ID NO: 3442125 - RNA, 16 nt, Human
ccuccuuucugugccc

SEQ ID NO: 3442126 - RNA, 18 nt, Human
ccuccuuuugcuugaaac

SEQ ID NO: 3442127 - RNA, 16 nt, Human
ccucgaacccacacug

SEQ ID NO: 3442128 - RNA, 15 nt, Human
ccucgaacuccuggg

SEQ ID NO: 3442129 - RNA, 18 nt, Human
ccucgaagcgcgccacuc

SEQ ID NO: 3442130 - RNA, 18 nt, Human
ccucgaauuuuguuuucu

SEQ ID NO: 3442131 - RNA, 14 nt, Human
ccucgagggcaggg

SEQ ID NO: 3442132 - RNA, 16 nt, Human
ccucgagggcagggac

SEQ ID NO: 3442133 - RNA, 16 nt, Human
ccucgagguuucucaa

SEQ ID NO: 3442134 - RNA, 19 nt, Human
ccucgaguacugugggcaa

SEQ ID NO: 3442135 - RNA, 21 nt, Human
ccucgcaacuguccacgcgug

SEQ ID NO: 3442136 - RNA, 22 nt, Human
ccucgcagccucucagugcccu

SEQ ID NO: 3442137 - RNA, 21 nt, Human
ccucgcaggccucccugccag

SEQ ID NO: 3442138 - RNA, 19 nt, Human
ccucgcccaccgcaugccc

SEQ ID NO: 3442139 - RNA, 15 nt, Human
ccucgcccaguccca

SEQ ID NO: 3442140 - RNA, 15 nt, Human
ccucgccccuggcag

SEQ ID NO: 3442141 - RNA, 18 nt, Human
ccucgcccucuccuuugu

SEQ ID NO: 3442142 - RNA, 18 nt, Human
ccucgccggaucugaggg

SEQ ID NO: 3442143 - RNA, 14 nt, Human
ccucgccucuccca

SEQ ID NO: 3442144 - RNA, 13 nt, Human
ccucgccuggccu

SEQ ID NO: 3442145 - RNA, 16 nt, Human
ccucgccuggccugag

SEQ ID NO: 3442146 - RNA, 13 nt, Human
ccucgccugugga

SEQ ID NO: 3442147 - RNA, 22 nt, Human
ccucgccuguggagcucagccc

SEQ ID NO: 3442148 - RNA, 19 nt, Human
ccucgcuccccacucugcu

SEQ ID NO: 3442149 - RNA, 12 nt, Human
ccucgcucuguu

SEQ ID NO: 3442150 - RNA, 16 nt, Human
ccucgcuggcccccac

SEQ ID NO: 3442151 - RNA, 21 nt, Human
ccucgcuggggcagugcccuc

SEQ ID NO: 3442152 - RNA, 22 nt, Human
ccucggaccccacuccggcccu

SEQ ID NO: 3442153 - RNA, 20 nt, Human
ccucggacuuagcugggaga

SEQ ID NO: 3442154 - RNA, 14 nt, Human
ccucggagaagagc

SEQ ID NO: 3442155 - RNA, 16 nt, Human
ccucggauccccuucc

SEQ ID NO: 3442156 - RNA, 18 nt, Human
ccucggccccucccacac

SEQ ID NO: 3442157 - RNA, 15 nt, Human
ccucggcuccugcug

SEQ ID NO: 3442158 - RNA, 19 nt, Human
ccucggcuccugcugcacc

SEQ ID NO: 3442159 - RNA, 16 nt, Human
ccucggcuggcucccc

SEQ ID NO: 3442160 - RNA, 19 nt, Human
ccucggcuggcuccccugc

SEQ ID NO: 3442161 - RNA, 21 nt, Human
ccucggcuggcuccccugcag

SEQ ID NO: 3442162 - RNA, 22 nt, Human
ccucggcuggcuccccugcagc

SEQ ID NO: 3442163 - RNA, 17 nt, Human
ccucggcuggcugucca

SEQ ID NO: 3442164 - RNA, 23 nt, Human
ccucgggaaccucacucuugcca

SEQ ID NO: 3442165 - RNA, 20 nt, Human
ccucgggcccaccuggccac

SEQ ID NO: 3442166 - RNA, 18 nt, Human
ccucgggcccagccccca

SEQ ID NO: 3442167 - RNA, 19 nt, Human
ccucgggcgagucacugcc

SEQ ID NO: 3442168 - RNA, 23 nt, Human
ccucucugcagacuucccagcua

SEQ ID NO: 3442169 - RNA, 15 nt, Human
ccucucugcaggucc

SEQ ID NO: 3442170 - RNA, 16 nt, Human
ccucucugcaucugac

SEQ ID NO: 3442171 - RNA, 12 nt, Human
ccucucugcccu

SEQ ID NO: 3442172 - RNA, 15 nt, Human
ccucucugcucugcg

SEQ ID NO: 3442173 - RNA, 16 nt, Human
ccucucugcucugcgu

SEQ ID NO: 3442174 - RNA, 13 nt, Human
ccucucuggagaa

SEQ ID NO: 3442175 - RNA, 22 nt, Human
ccucucuggagaaagggcccug

SEQ ID NO: 3442176 - RNA, 23 nt, Human
ccucucuggagaaagggcccugg

SEQ ID NO: 3442177 - RNA, 17 nt, Human
ccucucugucccuugcu

SEQ ID NO: 3442178 - RNA, 23 nt, Human
ccucucuuccuaucccaucccau

SEQ ID NO: 3442179 - RNA, 15 nt, Human
ccucucuuuguucuc

SEQ ID NO: 3442180 - RNA, 18 nt, Human
ccucucuuuguucucagc

SEQ ID NO: 3442181 - RNA, 20 nt, Human
ccucucuuuguucucagcuc

SEQ ID NO: 3442182 - RNA, 22 nt, Human
ccucucuuuguucucagcuccc

SEQ ID NO: 3442183 - RNA, 23 nt, Human
ccucucuuuguucucagcucccc

SEQ ID NO: 3442184 - RNA, 21 nt, Human
ccucugaaacagcugccuuag

SEQ ID NO: 3442185 - RNA, 16 nt, Human
ccucugaaacccugga

SEQ ID NO: 3442186 - RNA, 17 nt, Human
ccucugaaaguuguaca

SEQ ID NO: 3442187 - RNA, 20 nt, Human
ccucugaaugaaccuucugg

SEQ ID NO: 3442188 - RNA, 22 nt, Human
ccucugaauuuacuuccuugca

SEQ ID NO: 3442189 - RNA, 15 nt, Human
ccucugacacacagc

SEQ ID NO: 3442190 - RNA, 12 nt, Human
ccucugacagca

SEQ ID NO: 3442191 - RNA, 13 nt, Human
ccucugacagcag

SEQ ID NO: 3442192 - RNA, 15 nt, Human
ccucugaccccuccu

SEQ ID NO: 3442193 - RNA, 16 nt, Human
ccucugaccccuccuc

SEQ ID NO: 3442194 - RNA, 17 nt, Human
ccucugaccccuccuca

SEQ ID NO: 3442195 - RNA, 18 nt, Human
ccucugaccccuccucac

SEQ ID NO: 3442196 - RNA, 19 nt, Human
ccucugaccccuccucacu

SEQ ID NO: 3442197 - RNA, 20 nt, Human
ccucugaccccuccucacug

SEQ ID NO: 3442198 - RNA, 16 nt, Human
ccucugaccugcacug

SEQ ID NO: 3442199 - RNA, 17 nt, Human
ccucugaccugcaggcc

SEQ ID NO: 3442200 - RNA, 19 nt, Human
ccucugacucagggcuccu

SEQ ID NO: 3442201 - RNA, 19 nt, Human
ccucugagccccugggacu

SEQ ID NO: 3442202 - RNA, 11 nt, Human
ccucugagccu

SEQ ID NO: 3442203 - RNA, 15 nt, Human
ccucugagcuuugca

SEQ ID NO: 3442204 - RNA, 17 nt, Human
ccucugagcuuugcaug

SEQ ID NO: 3442205 - RNA, 15 nt, Human
ccucugaggccagcc

SEQ ID NO: 3442206 - RNA, 16 nt, Human
ccucugaggccagccu

SEQ ID NO: 3442207 - RNA, 17 nt, Human
ccucugaggccagccug

SEQ ID NO: 3442208 - RNA, 20 nt, Human
ccucugaggccagccuggcc

SEQ ID NO: 3442209 - RNA, 18 nt, Human
ccucugaggcuggauccu

SEQ ID NO: 3442210 - RNA, 20 nt, Human
ccucugagggaaagcccaga

SEQ ID NO: 3442211 - RNA, 18 nt, Human
ccucugauacccagagca

SEQ ID NO: 3442212 - RNA, 20 nt, Human
ccucugauacccagagcauu

SEQ ID NO: 3442213 - RNA, 14 nt, Human
ccucugauaccuca

SEQ ID NO: 3442214 - RNA, 16 nt, Human
ccucugaucuccaugg

SEQ ID NO: 3442215 - RNA, 20 nt, Human
ccucugcacuacugacaugu

SEQ ID NO: 3442216 - RNA, 15 nt, Human
ccucugcacuccccu

SEQ ID NO: 3442217 - RNA, 16 nt, Human
ccucugcacuccccug

SEQ ID NO: 3442218 - RNA, 19 nt, Human
ccucugcacuccccugcug

SEQ ID NO: 3442219 - RNA, 20 nt, Human
ccucugcacuccccugcugg

SEQ ID NO: 3442220 - RNA, 23 nt, Human
ccucugcacuccccugcugggug

SEQ ID NO: 3442221 - RNA, 14 nt, Human
ccucugcagcaaua

SEQ ID NO: 3442222 - RNA, 18 nt, Human
ccucugcagcaauaaagc

SEQ ID NO: 3442223 - RNA, 19 nt, Human
ccucugcagcaauaaagca

SEQ ID NO: 3442224 - RNA, 22 nt, Human
ccucugcagcugaccucuguug

SEQ ID NO: 3442225 - RNA, 17 nt, Human
ccucugcauccucugga

SEQ ID NO: 3442226 - RNA, 20 nt, Human
ccucugccaaaggaugugau

SEQ ID NO: 3442227 - RNA, 22 nt, Human
ccucugccaaaggaugugauau

SEQ ID NO: 3442228 - RNA, 18 nt, Human
ccucugccacacucugac

SEQ ID NO: 3442229 - RNA, 11 nt, Human
ccucugccacc

SEQ ID NO: 3442230 - RNA, 13 nt, Human
ccucugccaccag

SEQ ID NO: 3442231 - RNA, 17 nt, Human
ccucugccaccagagac

SEQ ID NO: 3442232 - RNA, 19 nt, Human
ccucugccaccagagaccg

SEQ ID NO: 3442233 - RNA, 24 nt, Human
ccucugccaccagagaccguccuc

SEQ ID NO: 3442234 - RNA, 14 nt, Human
ccucugccaccucc

SEQ ID NO: 3442235 - RNA, 16 nt, Human
ccucugcccagcuugg

SEQ ID NO: 3442236 - RNA, 21 nt, Human
ccucugcccgggagcucagga

SEQ ID NO: 3442237 - RNA, 23 nt, Human
ccucugcccucauuacugggccu

SEQ ID NO: 3442238 - RNA, 15 nt, Human
ccucugcccuuccug

SEQ ID NO: 3442239 - RNA, 20 nt, Human
ccucugccucugacacacag

SEQ ID NO: 3442240 - RNA, 23 nt, Human
ccucugccucugacacacagcuc

SEQ ID NO: 3442241 - RNA, 13 nt, Human
ccucugccugccc

SEQ ID NO: 3442242 - RNA, 16 nt, Human
ccucugccugccccgc

SEQ ID NO: 3442243 - RNA, 21 nt, Human
ccucugccugccccgccccca

SEQ ID NO: 3442244 - RNA, 14 nt, Human
ccucugccuguccc

SEQ ID NO: 3442245 - RNA, 18 nt, Human
ccucugccugucccucuc

SEQ ID NO: 3442246 - RNA, 15 nt, Human
ccucugccugucucc

SEQ ID NO: 3442247 - RNA, 23 nt, Human
ccucugccuuugcaccacgggac

SEQ ID NO: 3442248 - RNA, 12 nt, Human
ccucugcuaaau

SEQ ID NO: 3442249 - RNA, 11 nt, Human
ccucugcuacg

SEQ ID NO: 3442250 - RNA, 15 nt, Human
ccucugcucaccgcc

SEQ ID NO: 3442251 - RNA, 14 nt, Human
ccucugcucagcca

SEQ ID NO: 3442252 - RNA, 17 nt, Human
ccucugcucagccaagc

SEQ ID NO: 3442253 - RNA, 14 nt, Human
ccucugcuccccag

SEQ ID NO: 3442254 - RNA, 19 nt, Human
ccucugcucccccuuuucc

SEQ ID NO: 3442255 - RNA, 14 nt, Human
ccucugcucugagg

SEQ ID NO: 3442256 - RNA, 16 nt, Human
ccucugcugcuggcug

SEQ ID NO: 3442257 - RNA, 14 nt, Human
ccucugcugcuguc

SEQ ID NO: 3442258 - RNA, 21 nt, Human
ccucugcuggccgggcacagc

SEQ ID NO: 3442259 - RNA, 22 nt, Human
ccucugcuggccgggcacagcu

SEQ ID NO: 3442260 - RNA, 23 nt, Human
ccucugcuggccgggcacagcug

SEQ ID NO: 3442261 - RNA, 14 nt, Human
ccucugcuucccag

SEQ ID NO: 3442262 - RNA, 13 nt, Human
ccucugcuugcca

SEQ ID NO: 3442263 - RNA, 14 nt, Human
ccucugcuuugaaa

SEQ ID NO: 3442264 - RNA, 15 nt, Human
ccucugcuuuuaucu

SEQ ID NO: 3442265 - RNA, 15 nt, Human
ccucuggacggcagg

SEQ ID NO: 3442266 - RNA, 16 nt, Human
ccucuggacggcaggc

SEQ ID NO: 3442267 - RNA, 21 nt, Human
ccucuggacggcaggcucacu

SEQ ID NO: 3442268 - RNA, 22 nt, Human
ccucuggacggcaggcucacug

SEQ ID NO: 3442269 - RNA, 15 nt, Human
ccucuggacuggcua

SEQ ID NO: 3442270 - RNA, 21 nt, Human
ccucuggaggccucugggccu

SEQ ID NO: 3442271 - RNA, 22 nt, Human
ccucuggaggccucugggccuc

SEQ ID NO: 3442272 - RNA, 17 nt, Human
ccucuggaggggugugg

SEQ ID NO: 3442273 - RNA, 20 nt, Human
ccucuggagggguguggcuc

SEQ ID NO: 3442274 - RNA, 16 nt, Human
ccucuggaguggccac

SEQ ID NO: 3442275 - RNA, 21 nt, Human
ccucuggaguggccacuaagc

SEQ ID NO: 3442276 - RNA, 23 nt, Human
ccucuggcauuagaauuauuuaa

SEQ ID NO: 3442277 - RNA, 20 nt, Human
ccucuggccgccuaggcuca

SEQ ID NO: 3442278 - RNA, 12 nt, Human
ccucuggcuaga

SEQ ID NO: 3442279 - RNA, 13 nt, Human
ccucuggcuagag

SEQ ID NO: 3442280 - RNA, 22 nt, Human
ccucuggcuagaggccagcccc

SEQ ID NO: 3442281 - RNA, 24 nt, Human
ccucuggcuagaggccagccccac

SEQ ID NO: 3442282 - RNA, 20 nt, Human
ccucuggcuuggccacagcc

SEQ ID NO: 3442283 - RNA, 21 nt, Human
ccucuggcuuggccacagcca

SEQ ID NO: 3442284 - RNA, 23 nt, Human
cuggcagccccuguucuggcaga

SEQ ID NO: 3442285 - RNA, 13 nt, Human
cuggcagcccgca

SEQ ID NO: 3442286 - RNA, 18 nt, Human
cuggcagcccgcaucagc

SEQ ID NO: 3442287 - RNA, 19 nt, Human
cuggcagcccgcaucagcu

SEQ ID NO: 3442288 - RNA, 13 nt, Human
cuggcagccgugc

SEQ ID NO: 3442289 - RNA, 20 nt, Human
cuggcagccgugccuucagc

SEQ ID NO: 3442290 - RNA, 15 nt, Human
cuggcagccucccau

SEQ ID NO: 3442291 - RNA, 23 nt, Human
cuggcagccucccauccagggcc

SEQ ID NO: 3442292 - RNA, 15 nt, Human
cuggcagcucagaga

SEQ ID NO: 3442293 - RNA, 15 nt, Human
cuggcagcucuccag

SEQ ID NO: 3442294 - RNA, 18 nt, Human
cuggcagcucuccaguca

SEQ ID NO: 3442295 - RNA, 20 nt, Human
cuggcagcucuggacagccc

SEQ ID NO: 3442296 - RNA, 18 nt, Human
cuggcaggaugacccugc

SEQ ID NO: 3442297 - RNA, 12 nt, Human
cuggcaggcagg

SEQ ID NO: 3442298 - RNA, 23 nt, Human
cuggcaggcaggggcccugcagc

SEQ ID NO: 3442299 - RNA, 21 nt, Human
cuggcagggaggucaggcccu

SEQ ID NO: 3442300 - RNA, 13 nt, Human
cuggcagggcugg

SEQ ID NO: 3442301 - RNA, 15 nt, Human
cuggcagggggcaug

SEQ ID NO: 3442302 - RNA, 22 nt, Human
cuggcaguuuauauuuaacucu

SEQ ID NO: 3442303 - RNA, 15 nt, Human
cuggcaguuuuccau

SEQ ID NO: 3442304 - RNA, 22 nt, Human
cuggcaguuuugacaucagcca

SEQ ID NO: 3442305 - RNA, 19 nt, Human
cuggcauacuauguggaug

SEQ ID NO: 3442306 - RNA, 22 nt, Human
cuggcaucaagaggugggaggg

SEQ ID NO: 3442307 - RNA, 23 nt, Human
cuggcaucaagaggugggagggc

SEQ ID NO: 3442308 - RNA, 17 nt, Human
cuggcaucugacacaaa

SEQ ID NO: 3442309 - RNA, 15 nt, Human
cuggcauggcaccug

SEQ ID NO: 3442310 - RNA, 21 nt, Human
cuggcauggugguugggaccc

SEQ ID NO: 3442311 - RNA, 16 nt, Human
cuggcauuacagcugg

SEQ ID NO: 3442312 - RNA, 16 nt, Human
cuguaauuuaguuauu

SEQ ID NO: 3442313 - RNA, 19 nt, Human
cuguaauuuaguuauugau

SEQ ID NO: 3442314 - RNA, 14 nt, Human
cuguaauuugugau

SEQ ID NO: 3442315 - RNA, 15 nt, Human
cuguaauuugugaua

SEQ ID NO: 3442316 - RNA, 23 nt, Human
cuguaauuuuuauuuucacccuc

SEQ ID NO: 3442317 - RNA, 20 nt, Human
cuguacaaaagggacaugaa

SEQ ID NO: 3442318 - RNA, 15 nt, Human
cuguacaaauauaag

SEQ ID NO: 3442319 - RNA, 17 nt, Human
cuguacaaauauaagaa

SEQ ID NO: 3442320 - RNA, 18 nt, Human
cuguacacguguccugua

SEQ ID NO: 3442321 - RNA, 19 nt, Human
cuguacacugaauauuuau

SEQ ID NO: 3442322 - RNA, 15 nt, Human
cuguacacugacuug

SEQ ID NO: 3442323 - RNA, 15 nt, Human
cuguacacugcacga

SEQ ID NO: 3442324 - RNA, 11 nt, Human
cuguacagggg

SEQ ID NO: 3442325 - RNA, 13 nt, Human
cuguacagucugu

SEQ ID NO: 3442326 - RNA, 19 nt, Human
cuguacagucugucuucug

SEQ ID NO: 3442327 - RNA, 16 nt, Human
cuguacagugucuuuu

SEQ ID NO: 3442328 - RNA, 21 nt, Human
cuguacagugucuuuuuuugu

SEQ ID NO: 3442329 - RNA, 16 nt, Human
cuguacauauguaaac

SEQ ID NO: 3442330 - RNA, 13 nt, Human
cuguacauuuaaa

SEQ ID NO: 3442331 - RNA, 21 nt, Human
cuguacauuuuguuguaaaaa

SEQ ID NO: 3442332 - RNA, 14 nt, Human
cuguaccucugccu

SEQ ID NO: 3442333 - RNA, 17 nt, Human
cuguacgacacgggugg

SEQ ID NO: 3442334 - RNA, 14 nt, Human
cuguacgucugaca

SEQ ID NO: 3442335 - RNA, 15 nt, Human
cuguacgucugacag

SEQ ID NO: 3442336 - RNA, 19 nt, Human
cuguacgucugacaggcaa

SEQ ID NO: 3442337 - RNA, 20 nt, Human
cuguacgucugacaggcaau

SEQ ID NO: 3442338 - RNA, 17 nt, Human
cuguacuagagaucugg

SEQ ID NO: 3442339 - RNA, 21 nt, Human
cuguacuagagaucugguuuu

SEQ ID NO: 3442340 - RNA, 15 nt, Human
cuguacuccucccag

SEQ ID NO: 3442341 - RNA, 18 nt, Human
cuguacucuggggugcug

SEQ ID NO: 3442342 - RNA, 20 nt, Human
cuguacugaaguaaaacaaa

SEQ ID NO: 3442343 - RNA, 16 nt, Human
cuguacugacuugagg

SEQ ID NO: 3442344 - RNA, 13 nt, Human
cuguacugauuca

SEQ ID NO: 3442345 - RNA, 12 nt, Human
aaauucccugga

SEQ ID NO: 3442346 - RNA, 20 nt, Human
aaauucccuggaccagaugc

SEQ ID NO: 3442347 - RNA, 15 nt, Human
aaauucccuggccuu

SEQ ID NO: 3442348 - RNA, 16 nt, Human
aaauucccuucaucug

SEQ ID NO: 3442349 - RNA, 23 nt, Human
aaauuccuauugugauuugacug

SEQ ID NO: 3442350 - RNA, 19 nt, Human
aaauuccucuuugcuuugc

SEQ ID NO: 3442351 - RNA, 19 nt, Human
aaauucgcccgagcuguuu

SEQ ID NO: 3442352 - RNA, 15 nt, Human
aaauucguguguuuu

SEQ ID NO: 3442353 - RNA, 22 nt, Human
aaauucuaaauaaaauauaauu

SEQ ID NO: 3442354 - RNA, 14 nt, Human
aaauucuaaaugua

SEQ ID NO: 3442355 - RNA, 14 nt, Human
aaauucuagauuac

SEQ ID NO: 3442356 - RNA, 13 nt, Human
aaauucugaauuu

SEQ ID NO: 3442357 - RNA, 19 nt, Human
aaauucugaauuugcaaag

SEQ ID NO: 3442358 - RNA, 22 nt, Human
aaauucugaauuugcaaaguac

SEQ ID NO: 3442359 - RNA, 15 nt, Human
aaauucugaauuuug

SEQ ID NO: 3442360 - RNA, 20 nt, Human
aaauucugagacauguguca

SEQ ID NO: 3442361 - RNA, 12 nt, Human
aaauucugauuu

SEQ ID NO: 3442362 - RNA, 17 nt, Human
aaauucugauuucuuuu

SEQ ID NO: 3442363 - RNA, 22 nt, Human
aaauucugauuucuuuucacca

SEQ ID NO: 3442364 - RNA, 22 nt, Human
aaauucugugccuuguuuuuug

SEQ ID NO: 3442365 - RNA, 23 nt, Human
aaauugaaaggcauucucugaag

SEQ ID NO: 3442366 - RNA, 19 nt, Human
aaauugaauacuuugaaug

SEQ ID NO: 3442367 - RNA, 20 nt, Human
aaauugaauacuuugaaugu

SEQ ID NO: 3442368 - RNA, 16 nt, Human
aaauugaauuuaacaa

SEQ ID NO: 3442369 - RNA, 18 nt, Human
aaauugaauuuaacaaug

SEQ ID NO: 3442370 - RNA, 22 nt, Human
aaauugacacuuaaaaaugguu

SEQ ID NO: 3442371 - RNA, 15 nt, Human
aaauugacauugcuu

SEQ ID NO: 3442372 - RNA, 19 nt, Human
aaauugaguugcacuuauu

SEQ ID NO: 3442373 - RNA, 14 nt, Human
aaauugauguguuu

SEQ ID NO: 3442374 - RNA, 15 nt, Human
aaauugauguugaug

SEQ ID NO: 3442375 - RNA, 13 nt, Human
aaauugcaaaucu

SEQ ID NO: 3442376 - RNA, 12 nt, Human
aaauugcacaau

SEQ ID NO: 3442377 - RNA, 15 nt, Human
aaauugcauacuuug

SEQ ID NO: 3442378 - RNA, 15 nt, Human
aaauugccauauugc

SEQ ID NO: 3442379 - RNA, 18 nt, Human
aaauugccauauugcaca

SEQ ID NO: 3442380 - RNA, 21 nt, Human
aaauugccauauugcacaugu

SEQ ID NO: 3442381 - RNA, 21 nt, Human
aaauugccauuggacaguugu

SEQ ID NO: 3442382 - RNA, 20 nt, Human
aaauugccuauccugcuguu

SEQ ID NO: 3442383 - RNA, 16 nt, Human
aaauugccuuucugug

SEQ ID NO: 3442384 - RNA, 21 nt, Human
aaauugccuuucuguguuuau

SEQ ID NO: 3442385 - RNA, 23 nt, Human
aaauugcucacaguuauuacaua

SEQ ID NO: 3442386 - RNA, 19 nt, Human
aaauugcugacuguagcuu

SEQ ID NO: 3442387 - RNA, 22 nt, Human
aaauugcugugccucccaaaau

SEQ ID NO: 3442388 - RNA, 23 nt, Human
aaauugcugugcuuuauggauag

SEQ ID NO: 3442389 - RNA, 16 nt, Human
aaauugcuugaaagaa

SEQ ID NO: 3442390 - RNA, 20 nt, Human
aaauuggcauggaaauuuaa

SEQ ID NO: 3442391 - RNA, 17 nt, Human
aaauuggcauuaaaacu

SEQ ID NO: 3442392 - RNA, 15 nt, Human
aaauugggaaaggag

SEQ ID NO: 3442393 - RNA, 19 nt, Human
aaauuggggaggagggggc

SEQ ID NO: 3442394 - RNA, 18 nt, Human
aaauugguaccuugcaca

SEQ ID NO: 3442395 - RNA, 20 nt, Human
aaauugguaccuugcacaca

SEQ ID NO: 3442396 - RNA, 20 nt, Human
aaauugguaucaagaaaguc

SEQ ID NO: 3442397 - RNA, 16 nt, Human
aaauugguucuuuauu

SEQ ID NO: 3442398 - RNA, 15 nt, Human
aaauuguaauuauau

SEQ ID NO: 3442399 - RNA, 14 nt, Human
aaauuguacagccg

SEQ ID NO: 3442400 - RNA, 15 nt, Human
aaauuguacagccgg

SEQ ID NO: 3442401 - RNA, 16 nt, Human
aaauuguauauucacu

SEQ ID NO: 3442402 - RNA, 17 nt, Human
aaauuguauauucacuu

SEQ ID NO: 3442403 - RNA, 19 nt, Human
aaauuguauauuguaauuu

SEQ ID NO: 3442404 - RNA, 13 nt, Human
aaauugucagcaa

SEQ ID NO: 3442405 - RNA, 22 nt, Human
aaauugucuuuaaaaacuguuu

SEQ ID NO: 3442406 - RNA, 18 nt, Human
aaauugucuuuugucaug

SEQ ID NO: 3442407 - RNA, 21 nt, Human
aaauugucuuuugucaugugg

SEQ ID NO: 3442408 - RNA, 19 nt, Human
aaauugugaacucauugcu

SEQ ID NO: 3442409 - RNA, 12 nt, Human
aaauugugaugu

SEQ ID NO: 3442410 - RNA, 16 nt, Human
aaauuguuaucaaaau

SEQ ID NO: 3442411 - RNA, 22 nt, Human
aaauuguuguccgguuuacuuu

SEQ ID NO: 3442412 - RNA, 15 nt, Human
aaauuguuuagugau

SEQ ID NO: 3442413 - RNA, 23 nt, Human
aaauuguuuagugauauuacauu

SEQ ID NO: 3442414 - RNA, 20 nt, Human
aaauuguuuugagcuuucca

SEQ ID NO: 3442415 - RNA, 19 nt, Human
aaauuuaaaaaauaaauaa

SEQ ID NO: 3442416 - RNA, 18 nt, Human
aaauuuaaaacaaacaac

SEQ ID NO: 3442417 - RNA, 13 nt, Human
aaauuuaaacauu

SEQ ID NO: 3442418 - RNA, 14 nt, Human
aaauuuaaacauua

SEQ ID NO: 3442419 - RNA, 13 nt, Human
aaauuuaaagaua

SEQ ID NO: 3442420 - RNA, 13 nt, Human
aaauuuaaagcag

SEQ ID NO: 3442421 - RNA, 21 nt, Human
aaauuuaaagcagguucuugu

SEQ ID NO: 3442422 - RNA, 23 nt, Human
aaauuuaaaggguguacuuauau

SEQ ID NO: 3442423 - RNA, 12 nt, Human
aaauuuaagcau

SEQ ID NO: 3442424 - RNA, 13 nt, Human
aaauuuaagcauu

SEQ ID NO: 3442425 - RNA, 14 nt, Human
aaauuuaagcauug

SEQ ID NO: 3442426 - RNA, 16 nt, Human
aaauuuaagcauuguu

SEQ ID NO: 3442427 - RNA, 23 nt, Human
aaauuuaaguaucuuuuuucaaa

SEQ ID NO: 3442428 - RNA, 21 nt, Human
aaauuuaauaccagauaccuu

SEQ ID NO: 3442429 - RNA, 13 nt, Human
aaauuuacuauau

SEQ ID NO: 3442430 - RNA, 15 nt, Human
aaauuuacuauauau

SEQ ID NO: 3442431 - RNA, 21 nt, Human
aaauuuacugucuaagauuaa

SEQ ID NO: 3442432 - RNA, 20 nt, Human
aaauuuaguauuuuguuuca

SEQ ID NO: 3442433 - RNA, 10 nt, Human
aaauuuauaa

SEQ ID NO: 3442434 - RNA, 19 nt, Human
aaauuuauaauuuuaagau

SEQ ID NO: 3442435 - RNA, 20 nt, Human
aaauuuauauguauccagua

SEQ ID NO: 3442436 - RNA, 23 nt, Human
aaauuuaucaaagcauagauguu

SEQ ID NO: 3442437 - RNA, 23 nt, Human
aaauuuaugguuuugguauuuuu

SEQ ID NO: 3442438 - RNA, 15 nt, Human
aaauuuauugaggaa

SEQ ID NO: 3442439 - RNA, 20 nt, Human
aaauuuauugaggaaaaaua

SEQ ID NO: 3442440 - RNA, 19 nt, Human
aaauuuauuuccaauguuu

SEQ ID NO: 3442441 - RNA, 13 nt, Human
aaauuucaaaaga

SEQ ID NO: 3442442 - RNA, 16 nt, Human
aaauuucaaaagacau

SEQ ID NO: 3442443 - RNA, 12 nt, Human
aaauuucagauu

SEQ ID NO: 3442444 - RNA, 17 nt, Human
aaauuucagcagcugca

SEQ ID NO: 3442445 - RNA, 19 nt, Human
aaauuuccagugagcuuau

SEQ ID NO: 3442446 - RNA, 22 nt, Human
aaauuuccccaacagugugaag

SEQ ID NO: 3442447 - RNA, 13 nt, Human
aaauuucuaaauc

SEQ ID NO: 3442448 - RNA, 22 nt, Human
aaauuucuagccugcacuuuga

SEQ ID NO: 3442449 - RNA, 23 nt, Human
aaauuucucaucacagggauuua

SEQ ID NO: 3442450 - RNA, 17 nt, Human
aaauuucucuacugucu

SEQ ID NO: 3442451 - RNA, 14 nt, Human
aaauuucuggaccu

SEQ ID NO: 3442452 - RNA, 11 nt, Human
aaauuucuuau

SEQ ID NO: 3442453 - RNA, 17 nt, Human
aaauuucuuaugugaca

SEQ ID NO: 3442454 - RNA, 20 nt, Human
aaauuugaaacauugcuuuu

SEQ ID NO: 3442455 - RNA, 23 nt, Human
aaauuugaaacauugcuuuuaaa

SEQ ID NO: 3442456 - RNA, 15 nt, Human
cugucccucaaauga

SEQ ID NO: 3442457 - RNA, 23 nt, Human
cugucccucaaaugacccaaaga

SEQ ID NO: 3442458 - RNA, 12 nt, Human
cugucccucaca

SEQ ID NO: 3442459 - RNA, 21 nt, Human
cugucccuccgggaccuggug

SEQ ID NO: 3442460 - RNA, 13 nt, Human
cugucccuccugg

SEQ ID NO: 3442461 - RNA, 16 nt, Human
cugucccucucaggca

SEQ ID NO: 3442462 - RNA, 11 nt, Human
cugucccugcg

SEQ ID NO: 3442463 - RNA, 13 nt, Human
cugucccugcgcc

SEQ ID NO: 3442464 - RNA, 18 nt, Human
cugucccuggccaucucu

SEQ ID NO: 3442465 - RNA, 12 nt, Human
cugucccuguca

SEQ ID NO: 3442466 - RNA, 15 nt, Human
cugucccugucacca

SEQ ID NO: 3442467 - RNA, 17 nt, Human
cugucccugucaccaag

SEQ ID NO: 3442468 - RNA, 18 nt, Human
cugucccuucugucccuc

SEQ ID NO: 3442469 - RNA, 19 nt, Human
cugucccuucugucccuca

SEQ ID NO: 3442470 - RNA, 20 nt, Human
cugucccuugccccccuggc

SEQ ID NO: 3442471 - RNA, 15 nt, Human
cugucccuugccuca

SEQ ID NO: 3442472 - RNA, 18 nt, Human
cugucccuugcuguaugc

SEQ ID NO: 3442473 - RNA, 17 nt, Human
cugucccuugcuugccu

SEQ ID NO: 3442474 - RNA, 18 nt, Human
cugucccuugcuugccug

SEQ ID NO: 3442475 - RNA, 14 nt, Human
cuguccgagcuuug

SEQ ID NO: 3442476 - RNA, 18 nt, Human
cuguccgagugugccaca

SEQ ID NO: 3442477 - RNA, 21 nt, Human
cuguccggaaugccacccaca

SEQ ID NO: 3442478 - RNA, 17 nt, Human
cuguccuaaggaaccuu

SEQ ID NO: 3442479 - RNA, 12 nt, Human
cuguccuaccuu

SEQ ID NO: 3442480 - RNA, 21 nt, Human
cuguccuacucugugucaggu

SEQ ID NO: 3442481 - RNA, 15 nt, Human
cuguccuaggccaca

SEQ ID NO: 3442482 - RNA, 15 nt, Human
cuguccuauuauauu

SEQ ID NO: 3442483 - RNA, 13 nt, Human
cuguccucacugc

SEQ ID NO: 3442484 - RNA, 14 nt, Human
cuguccucacugcu

SEQ ID NO: 3442485 - RNA, 21 nt, Human
cuguccucagccuugccagag

SEQ ID NO: 3442486 - RNA, 22 nt, Human
cuguccucagccuugccagaga

SEQ ID NO: 3442487 - RNA, 12 nt, Human
cuguccucaggu

SEQ ID NO: 3442488 - RNA, 17 nt, Human
cuguccucagguggcca

SEQ ID NO: 3442489 - RNA, 12 nt, Human
cuguccuccaag

SEQ ID NO: 3442490 - RNA, 15 nt, Human
cuguccuccaagcca

SEQ ID NO: 3442491 - RNA, 17 nt, Human
cuguccuccaagccagc

SEQ ID NO: 3442492 - RNA, 16 nt, Human
cuguccucccaucccc

SEQ ID NO: 3442493 - RNA, 21 nt, Human
cuguccucccgagcuccucuu

SEQ ID NO: 3442494 - RNA, 14 nt, Human
cuguccuccuggug

SEQ ID NO: 3442495 - RNA, 19 nt, Human
cuguccuccuggugggucc

SEQ ID NO: 3442496 - RNA, 21 nt, Human
cuguccuccugguggguccag

SEQ ID NO: 3442497 - RNA, 17 nt, Human
cuguccucuccccucca

SEQ ID NO: 3442498 - RNA, 21 nt, Human
cuguccucuccccuccagccu

SEQ ID NO: 3442499 - RNA, 16 nt, Human
cuguccucuuucagaa

SEQ ID NO: 3442500 - RNA, 18 nt, Human
cuguccucuuucagcucc

SEQ ID NO: 3442501 - RNA, 21 nt, Human
cuguccucuuucagcuccuga

SEQ ID NO: 3442502 - RNA, 22 nt, Human
cuguccucuuucagcuccugac

SEQ ID NO: 3442503 - RNA, 20 nt, Human
cuguccugacuucaggggcu

SEQ ID NO: 3442504 - RNA, 13 nt, Human
cuguccugcagca

SEQ ID NO: 3442505 - RNA, 17 nt, Human
cuguccugccacccagc

SEQ ID NO: 3442506 - RNA, 20 nt, Human
cuguccugccaugcaagaac

SEQ ID NO: 3442507 - RNA, 19 nt, Human
cuguccugcuccacagugu

SEQ ID NO: 3442508 - RNA, 13 nt, Human
cuguccugcuggu

SEQ ID NO: 3442509 - RNA, 14 nt, Human
cuguccugggagug

SEQ ID NO: 3442510 - RNA, 11 nt, Human
cuguccugggc

SEQ ID NO: 3442511 - RNA, 18 nt, Human
cuguccugggcgcccugg

SEQ ID NO: 3442512 - RNA, 21 nt, Human
cuguccugggcgcccuggaag

SEQ ID NO: 3442513 - RNA, 23 nt, Human
cuguccugggcgcccuggaagcc

SEQ ID NO: 3442514 - RNA, 12 nt, Human
ccugcccuggga

SEQ ID NO: 3442515 - RNA, 20 nt, Human
ccugcccugggaggcaguga

SEQ ID NO: 3442516 - RNA, 12 nt, Human
ccugcccugguc

SEQ ID NO: 3442517 - RNA, 15 nt, Human
ccugcccugguccag

SEQ ID NO: 3442518 - RNA, 19 nt, Human
ccugcccugguuuccugcc

SEQ ID NO: 3442519 - RNA, 23 nt, Human
ccugcccugguuuccugcccugg

SEQ ID NO: 3442520 - RNA, 15 nt, Human
ccugcccugugggcc

SEQ ID NO: 3442521 - RNA, 21 nt, Human
ccugcccuguuguguauagau

SEQ ID NO: 3442522 - RNA, 16 nt, Human
ccugcccuucagcauc

SEQ ID NO: 3442523 - RNA, 16 nt, Human
ccugcccuugucugag

SEQ ID NO: 3442524 - RNA, 16 nt, Human
ccugccgacuccuggg

SEQ ID NO: 3442525 - RNA, 22 nt, Human
ccugccgagcaaccguggcccu

SEQ ID NO: 3442526 - RNA, 16 nt, Human
ccugccgcagagcugg

SEQ ID NO: 3442527 - RNA, 21 nt, Human
ccugccgcccgagguggcugc

SEQ ID NO: 3442528 - RNA, 16 nt, Human
ccugccggagaggaag

SEQ ID NO: 3442529 - RNA, 21 nt, Human
ccugccggagaggaagagaca

SEQ ID NO: 3442530 - RNA, 19 nt, Human
ccugccggccccggccgcc

SEQ ID NO: 3442531 - RNA, 16 nt, Human
ccugccgucaccacca

SEQ ID NO: 3442532 - RNA, 23 nt, Human
ccugccguggacuuggggucaga

SEQ ID NO: 3442533 - RNA, 20 nt, Human
ccugccuagcacucacaugc

SEQ ID NO: 3442534 - RNA, 16 nt, Human
ccugccucaccacgga

SEQ ID NO: 3442535 - RNA, 12 nt, Human
ccugccucagcc

SEQ ID NO: 3442536 - RNA, 14 nt, Human
ccugccuccacccu

SEQ ID NO: 3442537 - RNA, 19 nt, Human
ccugccuccacccucugag

SEQ ID NO: 3442538 - RNA, 20 nt, Human
ccugccuccacccucugagc

SEQ ID NO: 3442539 - RNA, 17 nt, Human
ccugccuccuugauauu

SEQ ID NO: 3442540 - RNA, 23 nt, Human
ccugccuccuuugugaggaagcc

SEQ ID NO: 3442541 - RNA, 23 nt, Human
ccugccucgaacuggcugcaaag

SEQ ID NO: 3442542 - RNA, 12 nt, Human
ccugccucuacu

SEQ ID NO: 3442543 - RNA, 17 nt, Human
ccugccucucacacaca

SEQ ID NO: 3442544 - RNA, 20 nt, Human
ccugccucucaucaacugaa

SEQ ID NO: 3442545 - RNA, 15 nt, Human
ccugccucucccagg

SEQ ID NO: 3442546 - RNA, 21 nt, Human
ccugccucuccgccccugagc

SEQ ID NO: 3442547 - RNA, 20 nt, Human
ccugccucucugcagguccc

SEQ ID NO: 3442548 - RNA, 15 nt, Human
ccugccucuguuuga

SEQ ID NO: 3442549 - RNA, 19 nt, Human
ccugccugagggccccucu

SEQ ID NO: 3442550 - RNA, 16 nt, Human
ccugccugcccuggug

SEQ ID NO: 3442551 - RNA, 19 nt, Human
ccugccugcccugucagga

SEQ ID NO: 3442552 - RNA, 18 nt, Human
ccugccugcgucuuccgc

SEQ ID NO: 3442553 - RNA, 23 nt, Human
ccugccuggacuuggccccugcc

SEQ ID NO: 3442554 - RNA, 12 nt, Human
ccugccuggagc

SEQ ID NO: 3442555 - RNA, 14 nt, Human
ccugccuggaggac

SEQ ID NO: 3442556 - RNA, 21 nt, Human
ccugccuggaggaccugagcc

SEQ ID NO: 3442557 - RNA, 22 nt, Human
ccugccuggaggaccugagccu

SEQ ID NO: 3442558 - RNA, 23 nt, Human
ccugccuggaggaccugagccug

SEQ ID NO: 3442559 - RNA, 18 nt, Human
ccugccuggccaggcaga

SEQ ID NO: 3442560 - RNA, 23 nt, Human
ccugccuggccaggcagaucugu

SEQ ID NO: 3442561 - RNA, 15 nt, Human
ccugccuggccccuc

SEQ ID NO: 3442562 - RNA, 23 nt, Human
ccugccuguggcgccgucuccag

SEQ ID NO: 3442563 - RNA, 14 nt, Human
ccugccuguugggc

SEQ ID NO: 3442564 - RNA, 20 nt, Human
ccugccuguugggccaggag

SEQ ID NO: 3442565 - RNA, 22 nt, Human
ccugccuguugggccaggagcc

SEQ ID NO: 3442566 - RNA, 23 nt, Human
ccugccuguugggccaggagccu

SEQ ID NO: 3442567 - RNA, 19 nt, Human
ccugccuuagagccaggca

SEQ ID NO: 3442568 - RNA, 14 nt, Human
ccugccuucaugga

SEQ ID NO: 3442569 - RNA, 14 nt, Human
ccugccuuccuccu

SEQ ID NO: 3442570 - RNA, 17 nt, Human
ccugccuuccuccuggg

SEQ ID NO: 3442571 - RNA, 21 nt, Human
ccugccuucuguccugguguc

SEQ ID NO: 3442572 - RNA, 22 nt, Human
ccugccuucuucuuuuugcugu

SEQ ID NO: 3442573 - RNA, 13 nt, Human
ccugccuugaagc

SEQ ID NO: 3442574 - RNA, 19 nt, Human
ccugccuugaagccacuga

SEQ ID NO: 3442575 - RNA, 23 nt, Human
ccugccuugaagccacugaagcu

SEQ ID NO: 3442576 - RNA, 21 nt, Human
ccugccuugcccacuccugcu

SEQ ID NO: 3442577 - RNA, 22 nt, Human
ccugccuuggggaaggucuccc

SEQ ID NO: 3442578 - RNA, 11 nt, Human
ccugccuuugc

SEQ ID NO: 3442579 - RNA, 14 nt, Human
ccugccuuugccuc

SEQ ID NO: 3442580 - RNA, 22 nt, Human
ccugccuuuuaguuccugugca

SEQ ID NO: 3442581 - RNA, 19 nt, Human
ccugcgaaggggcccuggu

SEQ ID NO: 3442582 - RNA, 21 nt, Human
ccugcgacccugggggcacag

SEQ ID NO: 3442583 - RNA, 19 nt, Human
ccugcgagggcagcgggag

SEQ ID NO: 3442584 - RNA, 20 nt, Human
ccugcgcccaccccgcucug

SEQ ID NO: 3442585 - RNA, 20 nt, Human
ccugcgcgcaugugcgcaca

SEQ ID NO: 3442586 - RNA, 21 nt, Human
ccugcgcgggaccaucuggaa

SEQ ID NO: 3442587 - RNA, 17 nt, Human
ccugcgcucucuuugca

SEQ ID NO: 3442588 - RNA, 20 nt, Human
ccugcggagugaagaggggc

SEQ ID NO: 3442589 - RNA, 22 nt, Human
ccugcggagugaagaggggcag

SEQ ID NO: 3442590 - RNA, 16 nt, Human
ccugcggcugcugugu

SEQ ID NO: 3442591 - RNA, 12 nt, Human
ccugcgggcugc

SEQ ID NO: 3442592 - RNA, 22 nt, Human
ccugcgggucacaggagggagg

SEQ ID NO: 3442593 - RNA, 23 nt, Human
ccugcgggugaacaaagcagcca

SEQ ID NO: 3442594 - RNA, 20 nt, Human
ccugcggguggggcuugggg

SEQ ID NO: 3442595 - RNA, 23 nt, Human
ccugcgguagaugggagggaggc

SEQ ID NO: 3442596 - RNA, 14 nt, Human
ccugcggucaaggc

SEQ ID NO: 3442597 - RNA, 17 nt, Human
ccugcggucaaggccag

SEQ ID NO: 3442598 - RNA, 14 nt, Human
ccugcgucuuccgc

SEQ ID NO: 3442599 - RNA, 17 nt, Human
ccugcgucuuccgcccc

SEQ ID NO: 3442600 - RNA, 16 nt, Human
ccuggugaauggccuu

SEQ ID NO: 3442601 - RNA, 20 nt, Human
ccuggugaauggccuuccuu

SEQ ID NO: 3442602 - RNA, 21 nt, Human
ccuggugagagggccgggcag

SEQ ID NO: 3442603 - RNA, 10 nt, Human
ccuggugccc

SEQ ID NO: 3442604 - RNA, 22 nt, Human
ccuggugccccccaccccugga

SEQ ID NO: 3442605 - RNA, 18 nt, Human
ccuggugcccuggaugcc

SEQ ID NO: 3442606 - RNA, 22 nt, Human
ccuggugcccuggaugcccagg

SEQ ID NO: 3442607 - RNA, 13 nt, Human
ccuggugcucucu

SEQ ID NO: 3442608 - RNA, 16 nt, Human
ccuggugcucucugcc

SEQ ID NO: 3442609 - RNA, 15 nt, Human
ccuggugcugccaca

SEQ ID NO: 3442610 - RNA, 18 nt, Human
ccuggugcugccacacuu

SEQ ID NO: 3442611 - RNA, 21 nt, Human
ccuggugcugccacacuucag

SEQ ID NO: 3442612 - RNA, 18 nt, Human
ccugguggacaguccugg

SEQ ID NO: 3442613 - RNA, 19 nt, Human
ccugguggacaguccuggg

SEQ ID NO: 3442614 - RNA, 20 nt, Human
ccugguggacaguccuggga

SEQ ID NO: 3442615 - RNA, 12 nt, Human
ccugguggagaa

SEQ ID NO: 3442616 - RNA, 17 nt, Human
ccugguggcagcucacc

SEQ ID NO: 3442617 - RNA, 18 nt, Human
ccugguggcagcucaccu

SEQ ID NO: 3442618 - RNA, 21 nt, Human
ccugguggcagcucaccucuc

SEQ ID NO: 3442619 - RNA, 22 nt, Human
ccugguggcagcucaccucucc

SEQ ID NO: 3442620 - RNA, 18 nt, Human
ccugguggcagcugcggu

SEQ ID NO: 3442621 - RNA, 19 nt, Human
ccugguggcagugggagcu

SEQ ID NO: 3442622 - RNA, 20 nt, Human
ccugguggccaugcuccucu

SEQ ID NO: 3442623 - RNA, 12 nt, Human
ccugguggcccu

SEQ ID NO: 3442624 - RNA, 22 nt, Human
ccugguggcccucuccccugcc

SEQ ID NO: 3442625 - RNA, 17 nt, Human
ccugguggccucugccc

SEQ ID NO: 3442626 - RNA, 20 nt, Human
ccuggugggccuccucuguc

SEQ ID NO: 3442627 - RNA, 15 nt, Human
ccugguggggcagcu

SEQ ID NO: 3442628 - RNA, 18 nt, Human
ccugguggggcagcuccu

SEQ ID NO: 3442629 - RNA, 19 nt, Human
ccugguggggcagcuccuc

SEQ ID NO: 3442630 - RNA, 19 nt, Human
ccugguggguccaggggcc

SEQ ID NO: 3442631 - RNA, 16 nt, Human
ccuggugguauuuuca

SEQ ID NO: 3442632 - RNA, 18 nt, Human
ccuggugguauuuucaau

SEQ ID NO: 3442633 - RNA, 18 nt, Human
ccuggugguggcucggga

SEQ ID NO: 3442634 - RNA, 15 nt, Human
ccuggugguuucugu

SEQ ID NO: 3442635 - RNA, 16 nt, Human
ccuggugucaccccag

SEQ ID NO: 3442636 - RNA, 17 nt, Human
ccuggugucaccccaga

SEQ ID NO: 3442637 - RNA, 18 nt, Human
ccuggugucaccccagag

SEQ ID NO: 3442638 - RNA, 19 nt, Human
ccuggugucaccccagagc

SEQ ID NO: 3442639 - RNA, 21 nt, Human
ccugguguuucuagcacuggc

SEQ ID NO: 3442640 - RNA, 23 nt, Human
ccugguguuucuagcacuggccu

SEQ ID NO: 3442641 - RNA, 15 nt, Human
ccugguucugaugau

SEQ ID NO: 3442642 - RNA, 15 nt, Human
ccugguuggguggca

SEQ ID NO: 3442643 - RNA, 18 nt, Human
ccugguuucacuggccca

SEQ ID NO: 3442644 - RNA, 18 nt, Human
ccugguuuccugcccugg

SEQ ID NO: 3442645 - RNA, 14 nt, Human
ccuguaaaacuuua

SEQ ID NO: 3442646 - RNA, 19 nt, Human
ccuguaaacacucagcugu

SEQ ID NO: 3442647 - RNA, 12 nt, Human
ccuguaaaccug

SEQ ID NO: 3442648 - RNA, 12 nt, Human
ccuguaaauuau

SEQ ID NO: 3442649 - RNA, 18 nt, Human
ccuguaaauuauuuuaaa

SEQ ID NO: 3442650 - RNA, 20 nt, Human
ccuguaacacaagccacaga

SEQ ID NO: 3442651 - RNA, 21 nt, Human
ccuguaacacaagccacagaa

SEQ ID NO: 3442652 - RNA, 23 nt, Human
ccuguaacacaagccacagaagc

SEQ ID NO: 3442653 - RNA, 15 nt, Human
ccuguaagccaaaga

SEQ ID NO: 3442654 - RNA, 16 nt, Human
ccuguaagccugcaag

SEQ ID NO: 3442655 - RNA, 15 nt, Human
ccuguaaucacagcu

SEQ ID NO: 3442656 - RNA, 13 nt, Human
ccuguaaucccag

SEQ ID NO: 3442657 - RNA, 15 nt, Human
ccuguaaucccagca

SEQ ID NO: 3442658 - RNA, 21 nt, Human
ccuguaaucccagcacuuugg

SEQ ID NO: 3442659 - RNA, 23 nt, Human
ccuguaaucccagcacuuuggga

SEQ ID NO: 3442660 - RNA, 23 nt, Human
ccuguaaucccagcuacucagga

SEQ ID NO: 3442661 - RNA, 20 nt, Human
ccuguaauccuagcacuuug

SEQ ID NO: 3442662 - RNA, 23 nt, Human
ccuguaauuccuaccucccugca

SEQ ID NO: 3442663 - RNA, 14 nt, Human
ccuguacaguagau

SEQ ID NO: 3442664 - RNA, 12 nt, Human
ccuguacagucu

SEQ ID NO: 3442665 - RNA, 19 nt, Human
ccuguacagucugucuucu

SEQ ID NO: 3442666 - RNA, 16 nt, Human
ccuguacauuguggga

SEQ ID NO: 3442667 - RNA, 14 nt, Human
ccuguaccccagca

SEQ ID NO: 3442668 - RNA, 10 nt, Human
ccuguaccuc

SEQ ID NO: 3442669 - RNA, 22 nt, Human
ccuguaccuuuugaggagcccc

SEQ ID NO: 3442670 - RNA, 15 nt, Human
ccuguacucaggagg

SEQ ID NO: 3442671 - RNA, 13 nt, Human
ccuguacugccug

SEQ ID NO: 3442672 - RNA, 17 nt, Human
ccuguacugccugcuug

SEQ ID NO: 3442673 - RNA, 18 nt, Human
ccuguacuguucuguguc

SEQ ID NO: 3442674 - RNA, 22 nt, Human
ccuguagaacucaaccucuaca

SEQ ID NO: 3442675 - RNA, 22 nt, Human
ccuguagaccuagggaggaccu

SEQ ID NO: 3442676 - RNA, 14 nt, Human
ccuguagagcuaga

SEQ ID NO: 3442677 - RNA, 16 nt, Human
ccuguagaguugcuga

SEQ ID NO: 3442678 - RNA, 21 nt, Human
ccuguagauucagguaauaca

SEQ ID NO: 3442679 - RNA, 18 nt, Human
ccuguagcaucuucugga

SEQ ID NO: 3442680 - RNA, 21 nt, Human
ccuguagcaucuucuggaguc

SEQ ID NO: 3442681 - RNA, 20 nt, Human
ccuguaggaagguacuguau

SEQ ID NO: 3442682 - RNA, 13 nt, Human
ccuguagucccag

SEQ ID NO: 3442683 - RNA, 15 nt, Human
ccuguagucccagcu

SEQ ID NO: 3442684 - RNA, 16 nt, Human
ccuguagucccagcua

SEQ ID NO: 3442685 - RNA, 14 nt, Human
ccuguaguuaggaa

SEQ ID NO: 3442686 - RNA, 16 nt, Human
ccuguaguuaggaaau

SEQ ID NO: 3442687 - RNA, 19 nt, Human
ccuguaguuaggaaauaaa

SEQ ID NO: 3442688 - RNA, 22 nt, Human
ccuguauaaguggaggcacuuu

SEQ ID NO: 3442689 - RNA, 15 nt, Human
ccuguauacagugca

SEQ ID NO: 3442690 - RNA, 19 nt, Human
ccuguauaccuccuccagc

SEQ ID NO: 3442691 - RNA, 16 nt, Human
ccuguauauagcccag

SEQ ID NO: 3442692 - RNA, 21 nt, Human
ccuguauauagcccagccagg

SEQ ID NO: 3442693 - RNA, 19 nt, Human
ccuguauauuuguaaagcu

SEQ ID NO: 3442694 - RNA, 14 nt, Human
ccuguaucuuucua

SEQ ID NO: 3442695 - RNA, 21 nt, Human
ccuguaucuuucuaugcugcu

SEQ ID NO: 3442696 - RNA, 19 nt, Human
ccuguaugcaacaggcacu

SEQ ID NO: 3442697 - RNA, 23 nt, Human
ccuguauuccugaccuccgccau

SEQ ID NO: 3442698 - RNA, 23 nt, Human
ccuguauuuaaaaauagaaacau

SEQ ID NO: 3442699 - RNA, 16 nt, Human
ccuguauuuaagcaaa

SEQ ID NO: 3442700 - RNA, 17 nt, Human
ccuguauuuaagcaaau

SEQ ID NO: 3442701 - RNA, 20 nt, Human
ccuguauuuaagcaaauacu

SEQ ID NO: 3442702 - RNA, 16 nt, Human
ccuguauuuguuccca

SEQ ID NO: 3442703 - RNA, 21 nt, Human
ccuguauuuguucccaagagc

SEQ ID NO: 3442704 - RNA, 16 nt, Human
ccugucaaacauuagu

SEQ ID NO: 3442705 - RNA, 14 nt, Human
ccugucaccucuuc

SEQ ID NO: 3442706 - RNA, 16 nt, Human
ccugucaccucuuccg

SEQ ID NO: 3442707 - RNA, 19 nt, Human
ccugucagauccaggagcu

SEQ ID NO: 3442708 - RNA, 13 nt, Human
ccugucaggaggc

SEQ ID NO: 3442709 - RNA, 16 nt, Human
ccugucaggaggcaga

SEQ ID NO: 3442710 - RNA, 16 nt, Human
ccugucagugcagccc

SEQ ID NO: 3442711 - RNA, 15 nt, Human
ccugucagugccgcc

SEQ ID NO: 3442712 - RNA, 20 nt, Human
ccugucauccagcucacuca

SEQ ID NO: 3442713 - RNA, 12 nt, Human
ccuguccaaccu

SEQ ID NO: 3442714 - RNA, 19 nt, Human
ccuguccaaccuaaccccu

SEQ ID NO: 3442715 - RNA, 16 nt, Human
ccuguccacacccagc

SEQ ID NO: 3442716 - RNA, 14 nt, Human
ccuguccacaggcu

SEQ ID NO: 3442717 - RNA, 18 nt, Human
ccuguccacaggcuucug

SEQ ID NO: 3442718 - RNA, 21 nt, Human
ccuguccacaggcuucugagc

SEQ ID NO: 3442719 - RNA, 22 nt, Human
ccuguccagccugggcagccag

SEQ ID NO: 3442720 - RNA, 16 nt, Human
ccugucccacccccuu

SEQ ID NO: 3442721 - RNA, 16 nt, Human
ccugucccaugcaggc

SEQ ID NO: 3442722 - RNA, 19 nt, Human
ccugucccaugcaggcccu

SEQ ID NO: 3442723 - RNA, 23 nt, Human
ccugucccauggacacuccagug

SEQ ID NO: 3442724 - RNA, 17 nt, Human
ccuguccccacccucca

SEQ ID NO: 3442725 - RNA, 17 nt, Human
cugugauggggcccugc

SEQ ID NO: 3442726 - RNA, 16 nt, Human
cugugauugugccuac

SEQ ID NO: 3442727 - RNA, 16 nt, Human
cugugcaaaaaaauua

SEQ ID NO: 3442728 - RNA, 21 nt, Human
cugugcaaccucuuggccuga

SEQ ID NO: 3442729 - RNA, 17 nt, Human
cugugcaacgccguggg

SEQ ID NO: 3442730 - RNA, 18 nt, Human
cugugcaacggucuccug

SEQ ID NO: 3442731 - RNA, 16 nt, Human
cugugcaaggccuggu

SEQ ID NO: 3442732 - RNA, 19 nt, Human
cugugcacaaaacccagac

SEQ ID NO: 3442733 - RNA, 20 nt, Human
cugugcacaaaacccagacc

SEQ ID NO: 3442734 - RNA, 20 nt, Human
cugugcacacacacacacau

SEQ ID NO: 3442735 - RNA, 21 nt, Human
cugugcacacacacacacaug

SEQ ID NO: 3442736 - RNA, 17 nt, Human
cugugcacacccaccuu

SEQ ID NO: 3442737 - RNA, 21 nt, Human
cugugcacaucugugucuugu

SEQ ID NO: 3442738 - RNA, 14 nt, Human
cugugcaccaagca

SEQ ID NO: 3442739 - RNA, 19 nt, Human
cugugcacccagaagaaga

SEQ ID NO: 3442740 - RNA, 17 nt, Human
cugugcacggccagcug

SEQ ID NO: 3442741 - RNA, 14 nt, Human
cugugcacugccca

SEQ ID NO: 3442742 - RNA, 16 nt, Human
cugugcagccgcugag

SEQ ID NO: 3442743 - RNA, 23 nt, Human
cugugcagccuguccugggcugg

SEQ ID NO: 3442744 - RNA, 14 nt, Human
cuuaugaaaagaau

SEQ ID NO: 3442745 - RNA, 21 nt, Human
cuuaugaaaagaauuguuggg

SEQ ID NO: 3442746 - RNA, 18 nt, Human
cuuaugaaugauuugcau

SEQ ID NO: 3442747 - RNA, 20 nt, Human
cuuaugaaugauuugcauau

SEQ ID NO: 3442748 - RNA, 15 nt, Human
cuuaugaauguuucc

SEQ ID NO: 3442749 - RNA, 21 nt, Human
cuuaugauuaaacuuccuucu

SEQ ID NO: 3442750 - RNA, 14 nt, Human
cuuaugcaaaaugg

SEQ ID NO: 3442751 - RNA, 15 nt, Human
cuuaugccauuuguu

SEQ ID NO: 3442752 - RNA, 17 nt, Human
cuuaugcgguuaauuuu

SEQ ID NO: 3442753 - RNA, 12 nt, Human
cuuaugcucuua

SEQ ID NO: 3442754 - RNA, 22 nt, Human
cuuaugcucuuaauugccaccu

SEQ ID NO: 3442755 - RNA, 12 nt, Human
cuuaugcuucca

SEQ ID NO: 3442756 - RNA, 20 nt, Human
cuuauggaacacucugagac

SEQ ID NO: 3442757 - RNA, 21 nt, Human
cuuauggaacacucugagacu

SEQ ID NO: 3442758 - RNA, 17 nt, Human
cuuauggaauugauuug

SEQ ID NO: 3442759 - RNA, 20 nt, Human
cuuauggaauugauuugcau

SEQ ID NO: 3442760 - RNA, 18 nt, Human
cuuauggauguccccagc

SEQ ID NO: 3442761 - RNA, 22 nt, Human
cuuaugggcuggguucuaccca

SEQ ID NO: 3442762 - RNA, 15 nt, Human
cuuauguaccucuuu

SEQ ID NO: 3442763 - RNA, 17 nt, Human
cuuauguagauauuugg

SEQ ID NO: 3442764 - RNA, 13 nt, Human
cuuaugugacauu

SEQ ID NO: 3442765 - RNA, 20 nt, Human
cuuauguggguugccuggug

SEQ ID NO: 3442766 - RNA, 16 nt, Human
cuuauguugaaaaaau

SEQ ID NO: 3442767 - RNA, 17 nt, Human
cuuauguugaaaaaauu

SEQ ID NO: 3442768 - RNA, 13 nt, Human
cuuauuaaaguuc

SEQ ID NO: 3442769 - RNA, 16 nt, Human
cuuauuaaaguuucaa

SEQ ID NO: 3442770 - RNA, 17 nt, Human
cuuauuaaaguuucaaa

SEQ ID NO: 3442771 - RNA, 22 nt, Human
cuuauuaaaguuucaaaaaucu

SEQ ID NO: 3442772 - RNA, 14 nt, Human
cuuauuaaugcuaa

SEQ ID NO: 3442773 - RNA, 16 nt, Human
cuuauuacauuuuauu

SEQ ID NO: 3442774 - RNA, 20 nt, Human
cuuauuagagugucuuucca

SEQ ID NO: 3442775 - RNA, 17 nt, Human
cuuauuagggagaaaau

SEQ ID NO: 3442776 - RNA, 19 nt, Human
cuuauucagcaccaagcau

SEQ ID NO: 3442777 - RNA, 21 nt, Human
cuuauucaggaaaagccucug

SEQ ID NO: 3442778 - RNA, 14 nt, Human
cuuauucauuuucu

SEQ ID NO: 3442779 - RNA, 19 nt, Human
cuuauucauuuucucuaau

SEQ ID NO: 3442780 - RNA, 24 nt, Human
ccuucaguacccucucagcuccag

SEQ ID NO: 3442781 - RNA, 21 nt, Human
ccuucagucuugaauuucuaa

SEQ ID NO: 3442782 - RNA, 11 nt, Human
ccuucagugcc

SEQ ID NO: 3442783 - RNA, 16 nt, Human
ccuucagugcccacca

SEQ ID NO: 3442784 - RNA, 18 nt, Human
ccuucagugcccaccaac

SEQ ID NO: 3442785 - RNA, 14 nt, Human
ccuucagugccuua

SEQ ID NO: 3442786 - RNA, 20 nt, Human
ccuucagugccuuauggaac

SEQ ID NO: 3442787 - RNA, 18 nt, Human
ccuucaguuaugauuuuu

SEQ ID NO: 3442788 - RNA, 15 nt, Human
ccuucauacuugaac

SEQ ID NO: 3442789 - RNA, 19 nt, Human
ccuucauaucauccacaca

SEQ ID NO: 3442790 - RNA, 17 nt, Human
ccuucaucaugaguucu

SEQ ID NO: 3442791 - RNA, 17 nt, Human
ccuucaucuccagggag

SEQ ID NO: 3442792 - RNA, 14 nt, Human
ccuucaucuggaac

SEQ ID NO: 3442793 - RNA, 19 nt, Human
ccuucaucuuccugugucc

SEQ ID NO: 3442794 - RNA, 20 nt, Human
ccuucaucuuccuguguccu

SEQ ID NO: 3442795 - RNA, 12 nt, Human
ccuucaugcaug

SEQ ID NO: 3442796 - RNA, 15 nt, Human
ccuucaugcauggaa

SEQ ID NO: 3442797 - RNA, 19 nt, Human
ccuucauucugagaccaaa

SEQ ID NO: 3442798 - RNA, 20 nt, Human
ccuucauugauuuccugugu

SEQ ID NO: 3442799 - RNA, 23 nt, Human
ccuucauugccuuaacuggagcc

SEQ ID NO: 3442800 - RNA, 11 nt, Human
ccuucauuuaa

SEQ ID NO: 3442801 - RNA, 18 nt, Human
ccuucauuucaggaggga

SEQ ID NO: 3442802 - RNA, 12 nt, Human
ccuucauuuccu

SEQ ID NO: 3442803 - RNA, 13 nt, Human
ccuucauuuccuc

SEQ ID NO: 3442804 - RNA, 15 nt, Human
ccuucauuucugaua

SEQ ID NO: 3442805 - RNA, 22 nt, Human
ccuucauuucugauauagaauu

SEQ ID NO: 3442806 - RNA, 18 nt, Human
ccuuccaaaaauuauuau

SEQ ID NO: 3442807 - RNA, 19 nt, Human
ccuuccaacugcugcccca

SEQ ID NO: 3442808 - RNA, 16 nt, Human
ccuuccaagagccuga

SEQ ID NO: 3442809 - RNA, 14 nt, Human
ccuuccacccaggg

SEQ ID NO: 3442810 - RNA, 13 nt, Human
ccuuccacccagu

SEQ ID NO: 3442811 - RNA, 17 nt, Human
ccuuccacggacucaag

SEQ ID NO: 3442812 - RNA, 15 nt, Human
ccuuccacugccucu

SEQ ID NO: 3442813 - RNA, 13 nt, Human
ccuuccagacaua

SEQ ID NO: 3442814 - RNA, 13 nt, Human
ccuuccagaucac

SEQ ID NO: 3442815 - RNA, 12 nt, Human
ccuuccagaucc

SEQ ID NO: 3442816 - RNA, 15 nt, Human
ccuuccagaugguca

SEQ ID NO: 3442817 - RNA, 17 nt, Human
ccuuccagcacccugca

SEQ ID NO: 3442818 - RNA, 13 nt, Human
ccuuccagcugcu

SEQ ID NO: 3442819 - RNA, 16 nt, Human
ccuuccagcugcuguc

SEQ ID NO: 3442820 - RNA, 15 nt, Human
ccuuccaggccauca

SEQ ID NO: 3442821 - RNA, 13 nt, Human
ccuuccaggggug

SEQ ID NO: 3442822 - RNA, 16 nt, Human
ccuuccagggguggga

SEQ ID NO: 3442823 - RNA, 22 nt, Human
ccuuccaggggugggacacccu

SEQ ID NO: 3442824 - RNA, 16 nt, Human
ccuuccagucaggaug

SEQ ID NO: 3442825 - RNA, 14 nt, Human
ccuuccauacauuu

SEQ ID NO: 3442826 - RNA, 12 nt, Human
ccuuccaucccu

SEQ ID NO: 3442827 - RNA, 17 nt, Human
ccuuccaucucgccacc

SEQ ID NO: 3442828 - RNA, 23 nt, Human
ccuuccauggugugaucgucuga

SEQ ID NO: 3442829 - RNA, 20 nt, Human
ccuuccaugucgccucugca

SEQ ID NO: 3442830 - RNA, 16 nt, Human
ccuuccauguggagaa

SEQ ID NO: 3442831 - RNA, 17 nt, Human
ccuuccauuucugccuu

SEQ ID NO: 3442832 - RNA, 16 nt, Human
ccuucccaaaggacuc

SEQ ID NO: 3442833 - RNA, 17 nt, Human
ccuucccaaucagcacu

SEQ ID NO: 3442834 - RNA, 21 nt, Human
ccuucccaaucagcacugaaa

SEQ ID NO: 3442835 - RNA, 12 nt, Human
ccuucccaccuc

SEQ ID NO: 3442836 - RNA, 19 nt, Human
ccuucccaccucucucacu

SEQ ID NO: 3442837 - RNA, 18 nt, Human
ccuucccacucaccccgg

SEQ ID NO: 3442838 - RNA, 12 nt, Human
ccuucccagagg

SEQ ID NO: 3442839 - RNA, 19 nt, Human
ccuucccagaggggccugc

SEQ ID NO: 3442840 - RNA, 24 nt, Human
ccuucccagaggggccugccaccu

SEQ ID NO: 3442841 - RNA, 14 nt, Human
ccuucccagcucuc

SEQ ID NO: 3442842 - RNA, 18 nt, Human
ccuucccagcucucccuc

SEQ ID NO: 3442843 - RNA, 21 nt, Human
ccuucccagcucucccucugg

SEQ ID NO: 3442844 - RNA, 22 nt, Human
ccuucccagcucucccucuggc

SEQ ID NO: 3442845 - RNA, 18 nt, Human
ccuucccagcugccccuc

SEQ ID NO: 3442846 - RNA, 19 nt, Human
ccuucccaggaguggagga

SEQ ID NO: 3442847 - RNA, 18 nt, Human
ccuucccaugacccaggc

SEQ ID NO: 3442848 - RNA, 12 nt, Human
ccuuccccagca

SEQ ID NO: 3442849 - RNA, 15 nt, Human
ccuuccccagcgucc

SEQ ID NO: 3442850 - RNA, 14 nt, Human
ccuucccccagccc

SEQ ID NO: 3442851 - RNA, 22 nt, Human
ccuucccccucccccagccacu

SEQ ID NO: 3442852 - RNA, 16 nt, Human
ccuuccccuccuucuc

SEQ ID NO: 3442853 - RNA, 16 nt, Human
ccuuccccuuccuucu

SEQ ID NO: 3442854 - RNA, 17 nt, Human
ccuuccccuuccuucuu

SEQ ID NO: 3442855 - RNA, 22 nt, Human
ccuuccccuugcccagggcuca

SEQ ID NO: 3442856 - RNA, 12 nt, Human
ccuucccuagcu

SEQ ID NO: 3442857 - RNA, 15 nt, Human
ccuucccuagcuuua

SEQ ID NO: 3442858 - RNA, 13 nt, Human
ccuucccugcugu

SEQ ID NO: 3442859 - RNA, 11 nt, Human
ccuucccuggc

SEQ ID NO: 3442860 - RNA, 17 nt, Human
ccuucccugucccucua

SEQ ID NO: 3442861 - RNA, 22 nt, Human
ccuucccuguuuuccccccaag

SEQ ID NO: 3442862 - RNA, 20 nt, Human
ccuucccuuccacugccucu

SEQ ID NO: 3442863 - RNA, 17 nt, Human
ccuucccuucuccaucu

SEQ ID NO: 3442864 - RNA, 16 nt, Human
ccuucccuugagcccu

SEQ ID NO: 3442865 - RNA, 14 nt, Human
ccuucccuugccac

SEQ ID NO: 3442866 - RNA, 20 nt, Human
ccuucccuugccacuuugca

SEQ ID NO: 3442867 - RNA, 22 nt, Human
ccuuccgacccucugggaaccu

SEQ ID NO: 3442868 - RNA, 22 nt, Human
ccuuccgcaguguggccaggcu

SEQ ID NO: 3442869 - RNA, 18 nt, Human
ccuuccuaauuccacagc

SEQ ID NO: 3442870 - RNA, 19 nt, Human
ccuuccuaauuccacagcu

SEQ ID NO: 3442871 - RNA, 16 nt, Human
ccuuccuacagauagu

SEQ ID NO: 3442872 - RNA, 14 nt, Human
ccuuccuaccaccc

SEQ ID NO: 3442873 - RNA, 18 nt, Human
ccuuccuacccuccugca

SEQ ID NO: 3442874 - RNA, 21 nt, Human
ccuuccuauaacuugaugcau

SEQ ID NO: 3442875 - RNA, 21 nt, Human
ccuuccuauuccaagcuucca

SEQ ID NO: 3442876 - RNA, 19 nt, Human
ccuuccucauccaccccau

SEQ ID NO: 3442877 - RNA, 15 nt, Human
ccuuccucgcagaga

SEQ ID NO: 3442878 - RNA, 17 nt, Human
ccuuccucgcagagagg

SEQ ID NO: 3442879 - RNA, 17 nt, Human
ccuuccucuccacugcc

SEQ ID NO: 3442880 - RNA, 21 nt, Human
ccuuccucuccacugccuucg

SEQ ID NO: 3442881 - RNA, 12 nt, Human
ccuuccucugca

SEQ ID NO: 3442882 - RNA, 13 nt, Human
ccuuccucugcuc

SEQ ID NO: 3442883 - RNA, 14 nt, Human
ccuuccucuggggc

SEQ ID NO: 3442884 - RNA, 22 nt, Human
ccuuccucuggggcucuagggu

SEQ ID NO: 3442885 - RNA, 12 nt, Human
ccuuccucuucg

SEQ ID NO: 3442886 - RNA, 14 nt, Human
ccuuccucuucggc

SEQ ID NO: 3442887 - RNA, 20 nt, Human
ccuuccucuuuuccuuccca

SEQ ID NO: 3442888 - RNA, 11 nt, Human
ccuuccugccc

SEQ ID NO: 3442889 - RNA, 11 nt, Human
ccuuccugcug

SEQ ID NO: 3442890 - RNA, 16 nt, Human
cuuagaauuauuugca

SEQ ID NO: 3442891 - RNA, 11 nt, Human
cuuagacaguc

SEQ ID NO: 3442892 - RNA, 14 nt, Human
cuuagacagucccu

SEQ ID NO: 3442893 - RNA, 18 nt, Human
cuuagacagucccugcca

SEQ ID NO: 3442894 - RNA, 20 nt, Human
cuuagaccaccaagccuuga

SEQ ID NO: 3442895 - RNA, 20 nt, Human
cuuagacccucaugcugcca

SEQ ID NO: 3442896 - RNA, 23 nt, Human
cuuagacccucaugcugccaaua

SEQ ID NO: 3442897 - RNA, 16 nt, Human
cuuagaccuuccauaa

SEQ ID NO: 3442898 - RNA, 18 nt, Human
cuuagaccuuccauaaug

SEQ ID NO: 3442899 - RNA, 20 nt, Human
cuuagacuucgacucaggau

SEQ ID NO: 3442900 - RNA, 14 nt, Human
cuuagacuucugcu

SEQ ID NO: 3442901 - RNA, 22 nt, Human
cuuagacuuuuccaauauguga

SEQ ID NO: 3442902 - RNA, 20 nt, Human
cuuagagaauguucuccuaa

SEQ ID NO: 3442903 - RNA, 11 nt, Human
cuuagagcagu

SEQ ID NO: 3442904 - RNA, 17 nt, Human
cuuagagccucccucaa

SEQ ID NO: 3442905 - RNA, 21 nt, Human
cuuagaggcaugggcuugcug

SEQ ID NO: 3442906 - RNA, 22 nt, Human
cuuagaguuucuguuugauucu

SEQ ID NO: 3442907 - RNA, 23 nt, Human
cuuagaguuucuguuugauucuu

SEQ ID NO: 3442908 - RNA, 13 nt, Human
cuuagauaucuuu

SEQ ID NO: 3442909 - RNA, 14 nt, Human
cuuagauaucuuuu

SEQ ID NO: 3442910 - RNA, 17 nt, Human
cuuagauaucuuuuuau

SEQ ID NO: 3442911 - RNA, 16 nt, Human
cuuagaucauaguuuu

SEQ ID NO: 3442912 - RNA, 17 nt, Human
cuuagaucauaguuuua

SEQ ID NO: 3442913 - RNA, 19 nt, Human
cuuagaucauaguuuuauu

SEQ ID NO: 3442914 - RNA, 21 nt, Human
cuuagaucauaguuuuauuua

SEQ ID NO: 3442915 - RNA, 21 nt, Human
cuuagaucuggcauguuagcc

SEQ ID NO: 3442916 - RNA, 20 nt, Human
cuuagaugcaguucugaaga

SEQ ID NO: 3442917 - RNA, 11 nt, Human
cuuagauucuc

SEQ ID NO: 3442918 - RNA, 22 nt, Human
cuuagauucucugugucuaaga

SEQ ID NO: 3442919 - RNA, 14 nt, Human
cuuagauucuuaau

SEQ ID NO: 3442920 - RNA, 17 nt, Human
cuuagauugaaguaaac

SEQ ID NO: 3442921 - RNA, 13 nt, Human
cuuagauuucaua

SEQ ID NO: 3442922 - RNA, 12 nt, Human
cuuagauuuuac

SEQ ID NO: 3442923 - RNA, 15 nt, Human
cuuagauuuuacaug

SEQ ID NO: 3442924 - RNA, 16 nt, Human
cuuagauuuuacauga

SEQ ID NO: 3442925 - RNA, 12 nt, Human
cuuagcaacagc

SEQ ID NO: 3442926 - RNA, 21 nt, Human
cuuagcaggagaggagagcca

SEQ ID NO: 3442927 - RNA, 12 nt, Human
cuuagcaguccc

SEQ ID NO: 3442928 - RNA, 17 nt, Human
cuuagcaguccccuucc

SEQ ID NO: 3442929 - RNA, 22 nt, Human
cuuagcagugauuuuuauccaa

SEQ ID NO: 3442930 - RNA, 20 nt, Human
cuuagcauccuaagaaauau

SEQ ID NO: 3442931 - RNA, 16 nt, Human
cuuagcauguuugcug

SEQ ID NO: 3442932 - RNA, 15 nt, Human
cuuagccucccugaa

SEQ ID NO: 3442933 - RNA, 17 nt, Human
cuuagccuccugaccug

SEQ ID NO: 3442934 - RNA, 21 nt, Human
cuuagccuccugaccugaggc

SEQ ID NO: 3442935 - RNA, 22 nt, Human
cuuagccuccugaccugaggcu

SEQ ID NO: 3442936 - RNA, 13 nt, Human
cuuagccuggacc

SEQ ID NO: 3442937 - RNA, 17 nt, Human
cuuagccuggaccucug

SEQ ID NO: 3442938 - RNA, 20 nt, Human
cuuagccuggaccucugaca

SEQ ID NO: 3442939 - RNA, 14 nt, Human
cuuagccuuucuuu

SEQ ID NO: 3442940 - RNA, 14 nt, Human
cuuagcuccccucc

SEQ ID NO: 3442941 - RNA, 13 nt, Human
cuuagcucccucc

SEQ ID NO: 3442942 - RNA, 21 nt, Human
cuuagcucccucccgcacccc

SEQ ID NO: 3442943 - RNA, 11 nt, Human
cuuagcugagu

SEQ ID NO: 3442944 - RNA, 14 nt, Human
cuuagcuggagaug

SEQ ID NO: 3442945 - RNA, 16 nt, Human
ccuucucccaccccug

SEQ ID NO: 3442946 - RNA, 13 nt, Human
ccuucucccacuc

SEQ ID NO: 3442947 - RNA, 23 nt, Human
ccuucucccccccggggcugggu

SEQ ID NO: 3442948 - RNA, 15 nt, Human
ccuucuccccugcac

SEQ ID NO: 3442949 - RNA, 22 nt, Human
ccuucucccuagcuccuccccu

SEQ ID NO: 3442950 - RNA, 13 nt, Human
ccuucucccugga

SEQ ID NO: 3442951 - RNA, 15 nt, Human
ccuucuccuucaccu

SEQ ID NO: 3442952 - RNA, 21 nt, Human
ccuucuccuugauaacagcua

SEQ ID NO: 3442953 - RNA, 16 nt, Human
ccuucucuauaucaug

SEQ ID NO: 3442954 - RNA, 18 nt, Human
ccuucucucaccuccuaa

SEQ ID NO: 3442955 - RNA, 19 nt, Human
ccuucucucaccuccuaaa

SEQ ID NO: 3442956 - RNA, 17 nt, Human
ccuucucucaucucuua

SEQ ID NO: 3442957 - RNA, 15 nt, Human
ccuucucuccagccc

SEQ ID NO: 3442958 - RNA, 17 nt, Human
ccuucucuccagccccu

SEQ ID NO: 3442959 - RNA, 20 nt, Human
ccuucucuccagccccugga

SEQ ID NO: 3442960 - RNA, 21 nt, Human
ccuucucuccagccccuggau

SEQ ID NO: 3442961 - RNA, 15 nt, Human
ccuucucucccugcc

SEQ ID NO: 3442962 - RNA, 17 nt, Human
ccuucucuccuccccaa

SEQ ID NO: 3442963 - RNA, 14 nt, Human
ccuucucugcccau

SEQ ID NO: 3442964 - RNA, 13 nt, Human
ccuucucugcucc

SEQ ID NO: 3442965 - RNA, 19 nt, Human
ccuucucugucucaugugu

SEQ ID NO: 3442966 - RNA, 11 nt, Human
ccuucucugug

SEQ ID NO: 3442967 - RNA, 12 nt, Human
ccuucucuguga

SEQ ID NO: 3442968 - RNA, 21 nt, Human
ccuucucuguucauuuccuca

SEQ ID NO: 3442969 - RNA, 18 nt, Human
ccuucucuuccaggcagc

SEQ ID NO: 3442970 - RNA, 21 nt, Human
ccuucugacccaugcugcccu

SEQ ID NO: 3442971 - RNA, 23 nt, Human
ccuucugacccaugcugcccugu

SEQ ID NO: 3442972 - RNA, 15 nt, Human
ccuucugacggcccu

SEQ ID NO: 3442973 - RNA, 21 nt, Human
ccuucugacggcccugcaaug

SEQ ID NO: 3442974 - RNA, 14 nt, Human
ccuucugagcuccu

SEQ ID NO: 3442975 - RNA, 18 nt, Human
ccuucugaggacauucca

SEQ ID NO: 3442976 - RNA, 21 nt, Human
ccuucugaggacauuccaaga

SEQ ID NO: 3442977 - RNA, 13 nt, Human
ccuucugcuacug

SEQ ID NO: 3442978 - RNA, 11 nt, Human
ccuucugcugc

SEQ ID NO: 3442979 - RNA, 16 nt, Human
ccuucuggaaacugug

SEQ ID NO: 3442980 - RNA, 17 nt, Human
ccuucuggauucuuggc

SEQ ID NO: 3442981 - RNA, 19 nt, Human
ccuucuggauucuuggccc

SEQ ID NO: 3442982 - RNA, 17 nt, Human
ccuucuggccucccaca

SEQ ID NO: 3442983 - RNA, 20 nt, Human
ccuucuggccucccacagac

SEQ ID NO: 3442984 - RNA, 16 nt, Human
ccuucuggccuuguaa

SEQ ID NO: 3442985 - RNA, 18 nt, Human
ccuucugggcaucuguuc

SEQ ID NO: 3442986 - RNA, 22 nt, Human
ccuucuguaaagguuuuuggaa

SEQ ID NO: 3442987 - RNA, 18 nt, Human
ccuucugucccucacagc

SEQ ID NO: 3442988 - RNA, 21 nt, Human
ccuucuguccuacucuguguc

SEQ ID NO: 3442989 - RNA, 22 nt, Human
ccuucuguccuggugucacuua

SEQ ID NO: 3442990 - RNA, 21 nt, Human
ccuucugugcccagcucaguc

SEQ ID NO: 3442991 - RNA, 17 nt, Human
ccuucuguugaugcugu

SEQ ID NO: 3442992 - RNA, 19 nt, Human
ccuucuucacccagcuaau

SEQ ID NO: 3442993 - RNA, 23 nt, Human
ccuucuucacccagcuaaucugu

SEQ ID NO: 3442994 - RNA, 13 nt, Human
ccuucuucagggc

SEQ ID NO: 3442995 - RNA, 17 nt, Human
ccuucuucagggccugg

SEQ ID NO: 3442996 - RNA, 18 nt, Human
ccuucuucagggccuggu

SEQ ID NO: 3442997 - RNA, 22 nt, Human
ccuucuuccaucccaggacacc

SEQ ID NO: 3442998 - RNA, 16 nt, Human
ccuucuuccccuuccc

SEQ ID NO: 3442999 - RNA, 21 nt, Human
ccuucuucggggaacuccugg

SEQ ID NO: 3443000 - RNA, 18 nt, Human
ccuucuucuuuuugcugu

SEQ ID NO: 3443001 - RNA, 14 nt, Human
ccuucuugcugccc

SEQ ID NO: 3443002 - RNA, 13 nt, Human
ccuucuuggugcu

SEQ ID NO: 3443003 - RNA, 19 nt, Human
ccuucuuuccauuucucuc

SEQ ID NO: 3443004 - RNA, 16 nt, Human
ccuucuuuccucuucc

SEQ ID NO: 3443005 - RNA, 13 nt, Human
ccuucuuucuacc

SEQ ID NO: 3443006 - RNA, 13 nt, Human
ccuucuuugaaga

SEQ ID NO: 3443007 - RNA, 14 nt, Human
ccuucuuugaagaa

SEQ ID NO: 3443008 - RNA, 13 nt, Human
ccuucuuugauaa

SEQ ID NO: 3443009 - RNA, 19 nt, Human
ccuucuuugauaauguuaa

SEQ ID NO: 3443010 - RNA, 12 nt, Human
ccuucuuuugua

SEQ ID NO: 3443011 - RNA, 16 nt, Human
ccuucuuuuucuggac

SEQ ID NO: 3443012 - RNA, 14 nt, Human
ccuucuuuuucuuc

SEQ ID NO: 3443013 - RNA, 16 nt, Human
ccuucuuuuucuucuu

SEQ ID NO: 3443014 - RNA, 21 nt, Human
ccuugaaaacacuguucucug

SEQ ID NO: 3443015 - RNA, 15 nt, Human
ccuugaaaauauuuu

SEQ ID NO: 3443016 - RNA, 13 nt, Human
ccuugaacacugg

SEQ ID NO: 3443017 - RNA, 16 nt, Human
ccuugaacucugggcu

SEQ ID NO: 3443018 - RNA, 16 nt, Human
ccuugaacuggguacu

SEQ ID NO: 3443019 - RNA, 21 nt, Human
ccuugaagaacugcaggcccu

SEQ ID NO: 3443020 - RNA, 23 nt, Human
ccuugaagaacugcaggcccugg

SEQ ID NO: 3443021 - RNA, 19 nt, Human
ccuugaagccacugaagcu

SEQ ID NO: 3443022 - RNA, 21 nt, Human
ccuugaaggguaaagaaguuu

SEQ ID NO: 3443023 - RNA, 14 nt, Human
ccuugaagguauau

SEQ ID NO: 3443024 - RNA, 13 nt, Human
ccuugaauaauaa

SEQ ID NO: 3443025 - RNA, 12 nt, Human
ccuugaaugcug

SEQ ID NO: 3443026 - RNA, 21 nt, Human
ccuugacaaagucaagccaca

SEQ ID NO: 3443027 - RNA, 13 nt, Human
ccuugacagggca

SEQ ID NO: 3443028 - RNA, 21 nt, Human
ccuugacagggcacaccgggc

SEQ ID NO: 3443029 - RNA, 15 nt, Human
ccuugacaucaguuc

SEQ ID NO: 3443030 - RNA, 20 nt, Human
ccuugaccagcagaucccag

SEQ ID NO: 3443031 - RNA, 23 nt, Human
ccuugaccagcagaucccagcuc

SEQ ID NO: 3443032 - RNA, 16 nt, Human
ccuugaccaggccugg

SEQ ID NO: 3443033 - RNA, 15 nt, Human
ccuugaccuuuguac

SEQ ID NO: 3443034 - RNA, 13 nt, Human
ccuugacucuuuc

SEQ ID NO: 3443035 - RNA, 14 nt, Human
cuucuggggcaggc

SEQ ID NO: 3443036 - RNA, 15 nt, Human
cuucuggggcaggcu

SEQ ID NO: 3443037 - RNA, 21 nt, Human
cuucuggggcaggcugggcca

SEQ ID NO: 3443038 - RNA, 22 nt, Human
cuucuggggcaggcugggccau

SEQ ID NO: 3443039 - RNA, 17 nt, Human
cuucugggguccccagg

SEQ ID NO: 3443040 - RNA, 15 nt, Human
cuucugguacuuucu

SEQ ID NO: 3443041 - RNA, 21 nt, Human
cuucuggugaccuuccaagag

SEQ ID NO: 3443042 - RNA, 14 nt, Human
cuucugguugaugc

SEQ ID NO: 3443043 - RNA, 14 nt, Human
cuucuguaauauuu

SEQ ID NO: 3443044 - RNA, 18 nt, Human
cuucuguacgucugacag

SEQ ID NO: 3443045 - RNA, 18 nt, Human
cuucuguaggaauucuuu

SEQ ID NO: 3443046 - RNA, 21 nt, Human
cuucuguaguacuccuuaaga

SEQ ID NO: 3443047 - RNA, 17 nt, Human
cuucuguaguuuuauca

SEQ ID NO: 3443048 - RNA, 18 nt, Human
cuucuguauauaaauggg

SEQ ID NO: 3443049 - RNA, 20 nt, Human
cuucuguauauaaaugggaa

SEQ ID NO: 3443050 - RNA, 15 nt, Human
cuucuguauucacuu

SEQ ID NO: 3443051 - RNA, 19 nt, Human
cuucuguauucacuuauau

SEQ ID NO: 3443052 - RNA, 20 nt, Human
cuucuguauuuuuuuuucua

SEQ ID NO: 3443053 - RNA, 22 nt, Human
cuucuguauuuuuuuuucuaag

SEQ ID NO: 3443054 - RNA, 15 nt, Human
cuucugucccucaca

SEQ ID NO: 3443055 - RNA, 17 nt, Human
cuucuguccuacucugu

SEQ ID NO: 3443056 - RNA, 18 nt, Human
cuucuguccuacucugug

SEQ ID NO: 3443057 - RNA, 10 nt, Human
cuucugucuc

SEQ ID NO: 3443058 - RNA, 21 nt, Human
cuucugucuucacaacagauu

SEQ ID NO: 3443059 - RNA, 19 nt, Human
cuucugugagacccccaca

SEQ ID NO: 3443060 - RNA, 13 nt, Human
cuucugugcccag

SEQ ID NO: 3443061 - RNA, 14 nt, Human
cuucugugcccaga

SEQ ID NO: 3443062 - RNA, 21 nt, Human
cuucugugggugacccagguc

SEQ ID NO: 3443063 - RNA, 22 nt, Human
cuucuguguaucucuuucacau

SEQ ID NO: 3443064 - RNA, 14 nt, Human
cuucuguguuuaua

SEQ ID NO: 3443065 - RNA, 17 nt, Human
cuucuguugcugccuca

SEQ ID NO: 3443066 - RNA, 19 nt, Human
cuucuguugucaccuucac

SEQ ID NO: 3443067 - RNA, 15 nt, Human
cuucuguuuucuguu

SEQ ID NO: 3443068 - RNA, 14 nt, Human
cuucuuaaaguauu

SEQ ID NO: 3443069 - RNA, 19 nt, Human
cuucuuaaaguauucuucu

SEQ ID NO: 3443070 - RNA, 19 nt, Human
cuucuuaaauaucuuuuau

SEQ ID NO: 3443071 - RNA, 21 nt, Human
cuucuuaaaugagaaggaauu

SEQ ID NO: 3443072 - RNA, 18 nt, Human
cuucuuaauauaacugcc

SEQ ID NO: 3443073 - RNA, 20 nt, Human
cuucuuaauauaacugccuu

SEQ ID NO: 3443074 - RNA, 17 nt, Human
cuucuuaaucuuuucac

SEQ ID NO: 3443075 - RNA, 20 nt, Human
cuucuuaauguacauagugc

SEQ ID NO: 3443076 - RNA, 16 nt, Human
cuucuuaauuaauuug

SEQ ID NO: 3443077 - RNA, 18 nt, Human
cuucuuaauuaauuugau

SEQ ID NO: 3443078 - RNA, 13 nt, Human
cuucuuacaugca

SEQ ID NO: 3443079 - RNA, 22 nt, Human
cuucuuacuuggaacugaaggg

SEQ ID NO: 3443080 - RNA, 13 nt, Human
cuucuuauacauu

SEQ ID NO: 3443081 - RNA, 19 nt, Human
cuucuuauggaauugauuu

SEQ ID NO: 3443082 - RNA, 19 nt, Human
cuucuuauuauauauauaa

SEQ ID NO: 3443083 - RNA, 14 nt, Human
cuucuuauucucac

SEQ ID NO: 3443084 - RNA, 22 nt, Human
cuucuuauucucacuccaccac

SEQ ID NO: 3443085 - RNA, 13 nt, Human
cuucuucaccauu

SEQ ID NO: 3443086 - RNA, 22 nt, Human
cuucuucacccagcuaaucugu

SEQ ID NO: 3443087 - RNA, 13 nt, Human
cuucuucagagac

SEQ ID NO: 3443088 - RNA, 23 nt, Human
cuucuucagagacuccugcaggc

SEQ ID NO: 3443089 - RNA, 16 nt, Human
cuucuucagagcugac

SEQ ID NO: 3443090 - RNA, 14 nt, Human
cuucuucagggccu

SEQ ID NO: 3443091 - RNA, 19 nt, Human
cuucuuccaggugcccagc

SEQ ID NO: 3443092 - RNA, 19 nt, Human
cuucuuccuuucucuuucu

SEQ ID NO: 3443093 - RNA, 21 nt, Human
cuucuucggggaacuccugga

SEQ ID NO: 3443094 - RNA, 13 nt, Human
cuucuucucaggc

SEQ ID NO: 3443095 - RNA, 12 nt, Human
cuucuucucccc

SEQ ID NO: 3443096 - RNA, 12 nt, Human
cuucuucuccua

SEQ ID NO: 3443097 - RNA, 18 nt, Human
cuucuucuccuaugugua

SEQ ID NO: 3443098 - RNA, 19 nt, Human
cuucuucuccuauguguaa

SEQ ID NO: 3443099 - RNA, 18 nt, Human
cuucuucuguaauauuua

SEQ ID NO: 3443100 - RNA, 18 nt, Human
cuucuucuuuuugcuguu

SEQ ID NO: 3443101 - RNA, 22 nt, Human
cuucuugaaauuuuaaccuaug

SEQ ID NO: 3443102 - RNA, 19 nt, Human
cuucuugaacacucaugcu

SEQ ID NO: 3443103 - RNA, 16 nt, Human
cuucuugaauauaaaa

SEQ ID NO: 3443104 - RNA, 18 nt, Human
cuucuugcauccuuccua

SEQ ID NO: 3443105 - RNA, 15 nt, Human
cuucuugccucugug

SEQ ID NO: 3443106 - RNA, 18 nt, Human
cuucuugccucugugcug

SEQ ID NO: 3443107 - RNA, 14 nt, Human
cuucuugcugcccu

SEQ ID NO: 3443108 - RNA, 20 nt, Human
cuucuugcuucuuucuagaa

SEQ ID NO: 3443109 - RNA, 14 nt, Human
cuucuuggcuuugu

SEQ ID NO: 3443110 - RNA, 21 nt, Human
cuucuuggggcccagugcaug

SEQ ID NO: 3443111 - RNA, 22 nt, Human
cuucuuggggcccagugcaugg

SEQ ID NO: 3443112 - RNA, 24 nt, Human
cuucuuggggcccagugcauggug

SEQ ID NO: 3443113 - RNA, 16 nt, Human
cuucuuggucuuauuu

SEQ ID NO: 3443114 - RNA, 12 nt, Human
cuucuugugaag

SEQ ID NO: 3443115 - RNA, 23 nt, Human
cuucuugugaucuugcucuaucu

SEQ ID NO: 3443116 - RNA, 16 nt, Human
cuucuuguguguaugc

SEQ ID NO: 3443117 - RNA, 16 nt, Human
cuucuuguuuccuugu

SEQ ID NO: 3443118 - RNA, 17 nt, Human
cuucuuguuuccuuguu

SEQ ID NO: 3443119 - RNA, 16 nt, Human
cuucuuuaauuuugga

SEQ ID NO: 3443120 - RNA, 18 nt, Human
cuucuuuaauuuuggaau

SEQ ID NO: 3443121 - RNA, 19 nt, Human
cuucuuuaauuuuggaauu

SEQ ID NO: 3443122 - RNA, 14 nt, Human
cuucuuuagaacag

SEQ ID NO: 3443123 - RNA, 14 nt, Human
cuucuuuauacugu

SEQ ID NO: 3443124 - RNA, 19 nt, Human
cuucuuuccacagaagcuc

SEQ ID NO: 3443125 - RNA, 17 nt, Human
cuucuuucugucuuuaa

SEQ ID NO: 3443126 - RNA, 14 nt, Human
cuucuuugaagaag

SEQ ID NO: 3443127 - RNA, 13 nt, Human
cuucuuugcuugc

SEQ ID NO: 3443128 - RNA, 13 nt, Human
cuucuuuuacuca

SEQ ID NO: 3443129 - RNA, 14 nt, Human
cuucuuuucacauu

SEQ ID NO: 3443130 - RNA, 15 nt, Human
cuucuuuucuuugua

SEQ ID NO: 3443131 - RNA, 12 nt, Human
cuucuuuugagc

SEQ ID NO: 3443132 - RNA, 13 nt, Human
cuucuuuugugaa

SEQ ID NO: 3443133 - RNA, 15 nt, Human
cuucuuuuuauuuuc

SEQ ID NO: 3443134 - RNA, 13 nt, Human
cuucuuuuucugg

SEQ ID NO: 3443135 - RNA, 15 nt, Human
cuucuuuuucuggac

SEQ ID NO: 3443136 - RNA, 19 nt, Human
cuucuuuuucuggacucug

SEQ ID NO: 3443137 - RNA, 16 nt, Human
cuucuuuuugcuguug

SEQ ID NO: 3443138 - RNA, 19 nt, Human
cuucuuuuuucaaaagaaa

SEQ ID NO: 3443139 - RNA, 15 nt, Human
cuugaaaaagacauu

SEQ ID NO: 3443140 - RNA, 14 nt, Human
cuugaaaacacugu

SEQ ID NO: 3443141 - RNA, 18 nt, Human
cuugaaaagagacaggca

SEQ ID NO: 3443142 - RNA, 22 nt, Human
cuugaaaauaagaauagaaaua

SEQ ID NO: 3443143 - RNA, 13 nt, Human
cuugaaaauuaac

SEQ ID NO: 3443144 - RNA, 18 nt, Human
cuugaaaauuaacaugaa

SEQ ID NO: 3443145 - RNA, 14 nt, Human
cuugaaagaauuuu

SEQ ID NO: 3443146 - RNA, 17 nt, Human
cuugaaagucaugaaca

SEQ ID NO: 3443147 - RNA, 22 nt, Human
cuugaaauaccagugaaccaaa

SEQ ID NO: 3443148 - RNA, 20 nt, Human
cuugaaauuauaucuguggu

SEQ ID NO: 3443149 - RNA, 21 nt, Human
cuugaaauuauaucugugguc

SEQ ID NO: 3443150 - RNA, 20 nt, Human
cuugaaauuugaauuuugug

SEQ ID NO: 3443151 - RNA, 13 nt, Human
cuugaaauuuuaa

SEQ ID NO: 3443152 - RNA, 19 nt, Human
cuugaaauuuuaaacuaua

SEQ ID NO: 3443153 - RNA, 15 nt, Human
cuugaacaaaagggu

SEQ ID NO: 3443154 - RNA, 16 nt, Human
cuugaacacaguauuu

SEQ ID NO: 3443155 - RNA, 17 nt, Human
cuugaacacaguauuuu

SEQ ID NO: 3443156 - RNA, 20 nt, Human
cuugaacacaguauuuuccc

SEQ ID NO: 3443157 - RNA, 16 nt, Human
cuuccuacccugccuc

SEQ ID NO: 3443158 - RNA, 16 nt, Human
cuuccuacucuucucu

SEQ ID NO: 3443159 - RNA, 19 nt, Human
cuuccuacucuucucucug

SEQ ID NO: 3443160 - RNA, 23 nt, Human
cuuccuacucuucucucugcucu

SEQ ID NO: 3443161 - RNA, 22 nt, Human
cuuccuagaaguuacugaaugc

SEQ ID NO: 3443162 - RNA, 17 nt, Human
cuuccuagccuugcacu

SEQ ID NO: 3443163 - RNA, 20 nt, Human
cuuccuagcuggagaggagc

SEQ ID NO: 3443164 - RNA, 17 nt, Human
cuuccuaguuuucuccu

SEQ ID NO: 3443165 - RNA, 18 nt, Human
cuuccuauaauuuugaua

SEQ ID NO: 3443166 - RNA, 21 nt, Human
cuuccuauaauuuugauagug

SEQ ID NO: 3443167 - RNA, 12 nt, Human
cuuccuauccca

SEQ ID NO: 3443168 - RNA, 16 nt, Human
cuuccuauuucuaggg

SEQ ID NO: 3443169 - RNA, 17 nt, Human
cuuccuauuucuagggc

SEQ ID NO: 3443170 - RNA, 18 nt, Human
cuuccuauuucuagggcu

SEQ ID NO: 3443171 - RNA, 22 nt, Human
cuuccucaaaauaaagaaguau

SEQ ID NO: 3443172 - RNA, 21 nt, Human
cuuccucacagucccacugug

SEQ ID NO: 3443173 - RNA, 14 nt, Human
cuuccucagccagc

SEQ ID NO: 3443174 - RNA, 15 nt, Human
cuuccucagccagcc

SEQ ID NO: 3443175 - RNA, 17 nt, Human
cuuccucagccagccuc

SEQ ID NO: 3443176 - RNA, 17 nt, Human
cuuccucaguuacacaa

SEQ ID NO: 3443177 - RNA, 18 nt, Human
cuuccucaguuuaauccu

SEQ ID NO: 3443178 - RNA, 23 nt, Human
cuuccucauccaccccaucccuc

SEQ ID NO: 3443179 - RNA, 23 nt, Human
cuuccucauucccucgucuuucc

SEQ ID NO: 3443180 - RNA, 22 nt, Human
cuugaagaacugcaggcccugg

SEQ ID NO: 3443181 - RNA, 15 nt, Human
cuugaagccaaagaa

SEQ ID NO: 3443182 - RNA, 16 nt, Human
cuugaagccacugaag

SEQ ID NO: 3443183 - RNA, 17 nt, Human
cuugaagccacugaagc

SEQ ID NO: 3443184 - RNA, 13 nt, Human
cuugaaggaaaaa

SEQ ID NO: 3443185 - RNA, 16 nt, Human
cuugaaggacuaauag

SEQ ID NO: 3443186 - RNA, 19 nt, Human
cuugaaggaucuguuuuua

SEQ ID NO: 3443187 - RNA, 16 nt, Human
cuugaagggccagagc

SEQ ID NO: 3443188 - RNA, 18 nt, Human
cuugaagggccagagcca

SEQ ID NO: 3443189 - RNA, 19 nt, Human
cuugaagggccagagccag

SEQ ID NO: 3443190 - RNA, 20 nt, Human
cuugaagggccagagccagg

SEQ ID NO: 3443191 - RNA, 22 nt, Human
cuugaaggugcugacggccagg

SEQ ID NO: 3443192 - RNA, 13 nt, Human
cuugaaguccugg

SEQ ID NO: 3443193 - RNA, 19 nt, Human
cuugaaguccuggcuucag

SEQ ID NO: 3443194 - RNA, 20 nt, Human
cuugaaguccuggcuucagg

SEQ ID NO: 3443195 - RNA, 22 nt, Human
cuugaaguuguuacuaacuaaa

SEQ ID NO: 3443196 - RNA, 23 nt, Human
cuugaauaaacaccacuggauua

SEQ ID NO: 3443197 - RNA, 14 nt, Human
cuugaauaauaagc

SEQ ID NO: 3443198 - RNA, 15 nt, Human
cuugaauauaaaaaa

SEQ ID NO: 3443199 - RNA, 16 nt, Human
cuugaauauggguggc

SEQ ID NO: 3443200 - RNA, 18 nt, Human
cuugaauccuagggccug

SEQ ID NO: 3443201 - RNA, 14 nt, Human
cuugaauccuucca

SEQ ID NO: 3443202 - RNA, 20 nt, Human
cuugaauccuuccauuccac

SEQ ID NO: 3443203 - RNA, 21 nt, Human
cuugaauccuuccauuccaca

SEQ ID NO: 3443204 - RNA, 12 nt, Human
cuugaaugaaaa

SEQ ID NO: 3443205 - RNA, 20 nt, Human
cuugaauguagcagccccgg

SEQ ID NO: 3443206 - RNA, 13 nt, Human
cuugaaugucuuu

SEQ ID NO: 3443207 - RNA, 17 nt, Human
cuugaauguggucucag

SEQ ID NO: 3443208 - RNA, 20 nt, Human
cuugaauugcauuuuuuaaa

SEQ ID NO: 3443209 - RNA, 17 nt, Human
cuugaauuguaacuguu

SEQ ID NO: 3443210 - RNA, 18 nt, Human
cuugaauuguaaggaaug

SEQ ID NO: 3443211 - RNA, 20 nt, Human
cuugaauuucuaaaaaacag

SEQ ID NO: 3443212 - RNA, 18 nt, Human
cuugaauuuucccacugc

SEQ ID NO: 3443213 - RNA, 19 nt, Human
cuugaauuuucccacugca

SEQ ID NO: 3443214 - RNA, 20 nt, Human
cuugaauuuucccacugcac

SEQ ID NO: 3443215 - RNA, 21 nt, Human
cuugaauuuucccacugcacc

SEQ ID NO: 3443216 - RNA, 14 nt, Human
cuugacaacuggca

SEQ ID NO: 3443217 - RNA, 17 nt, Human
cuugacaauagaacauu

SEQ ID NO: 3443218 - RNA, 22 nt, Human
cuugacaccugcugagaaaaca

SEQ ID NO: 3443219 - RNA, 14 nt, Human
cuugacagaacacu

SEQ ID NO: 3443220 - RNA, 16 nt, Human
cuugacagaacacugu

SEQ ID NO: 3443221 - RNA, 13 nt, Human
cuugacagggcac

SEQ ID NO: 3443222 - RNA, 14 nt, Human
cuugacagggcaca

SEQ ID NO: 3443223 - RNA, 12 nt, Human
cuugaccaagca

SEQ ID NO: 3443224 - RNA, 17 nt, Human
cuugaccaagcaggaag

SEQ ID NO: 3443225 - RNA, 23 nt, Human
cuugaccaagcaggaagcucaga

SEQ ID NO: 3443226 - RNA, 19 nt, Human
cuugaccagcagaucccag

SEQ ID NO: 3443227 - RNA, 21 nt, Human
cuugaccagcagaucccagcu

SEQ ID NO: 3443228 - RNA, 22 nt, Human
cuugaccagcagaucccagcuc

SEQ ID NO: 3443229 - RNA, 15 nt, Human
cuugaccaggccugg

SEQ ID NO: 3443230 - RNA, 17 nt, Human
cuugaccaggccugggc

SEQ ID NO: 3443231 - RNA, 21 nt, Human
cuugaccaggcugccucccuu

SEQ ID NO: 3443232 - RNA, 22 nt, Human
cuugaccauucuccaccugcca

SEQ ID NO: 3443233 - RNA, 13 nt, Human
cuugacccugcac

SEQ ID NO: 3443234 - RNA, 22 nt, Human
cuugacccugcacccuccuagg

SEQ ID NO: 3443235 - RNA, 21 nt, Human
cuugaccgugaggccagagac

SEQ ID NO: 3443236 - RNA, 14 nt, Human
cuugaccugaggcu

SEQ ID NO: 3443237 - RNA, 18 nt, Human
cuugaccuuccucugggg

SEQ ID NO: 3443238 - RNA, 22 nt, Human
cuugaccuuccucuggggcucu

SEQ ID NO: 3443239 - RNA, 14 nt, Human
cuugaccuuuguac

SEQ ID NO: 3443240 - RNA, 16 nt, Human
cuugacucaggauuua

SEQ ID NO: 3443241 - RNA, 19 nt, Human
cuugacucuacugaucuga

SEQ ID NO: 3443242 - RNA, 19 nt, Human
cuugacuucaguuauuggu

SEQ ID NO: 3443243 - RNA, 17 nt, Human
cuugacuugauuagugc

SEQ ID NO: 3443244 - RNA, 16 nt, Human
cuugagaaaaaaagaa

SEQ ID NO: 3443245 - RNA, 21 nt, Human
cuugagaagauucuucccauu

SEQ ID NO: 3443246 - RNA, 13 nt, Human
cuugagacagcuu

SEQ ID NO: 3443247 - RNA, 15 nt, Human
cuugagaccucagcc

SEQ ID NO: 3443248 - RNA, 16 nt, Human
cuugagagaccaggca

SEQ ID NO: 3443249 - RNA, 22 nt, Human
cuugagaguaucaggucuccca

SEQ ID NO: 3443250 - RNA, 21 nt, Human
cuugagauguaugaaggcuuu

SEQ ID NO: 3443251 - RNA, 15 nt, Human
cuugagaugucuucu

SEQ ID NO: 3443252 - RNA, 13 nt, Human
cuugagcaguggc

SEQ ID NO: 3443253 - RNA, 16 nt, Human
cuugagccaguaauug

SEQ ID NO: 3443254 - RNA, 17 nt, Human
cuugagcccuccccagg

SEQ ID NO: 3443255 - RNA, 13 nt, Human
cuugagcccuggc

SEQ ID NO: 3443256 - RNA, 15 nt, Human
cuugagccuugaacu

SEQ ID NO: 3443257 - RNA, 19 nt, Human
cuugagccuugaacuuuga

SEQ ID NO: 3443258 - RNA, 13 nt, Human
cuugagcuggccu

SEQ ID NO: 3443259 - RNA, 16 nt, Human
cuugagcuggccucuc

SEQ ID NO: 3443260 - RNA, 12 nt, Human
cuugagcuuggc

SEQ ID NO: 3443261 - RNA, 18 nt, Human
cuugaggaaacaacagcu

SEQ ID NO: 3443262 - RNA, 21 nt, Human
cuugaggaaacaacagcuuua

SEQ ID NO: 3443263 - RNA, 13 nt, Human
cuugaggacacau

SEQ ID NO: 3443264 - RNA, 14 nt, Human
cuugaggacacaug

SEQ ID NO: 3443265 - RNA, 22 nt, Human
cuugaggaggggcagguaaacu

SEQ ID NO: 3443266 - RNA, 15 nt, Human
cuugaggccugaucu

SEQ ID NO: 3443267 - RNA, 21 nt, Human
cuugaggccugaucugcccau

SEQ ID NO: 3443268 - RNA, 16 nt, Human
cuugagggagcuuagc

SEQ ID NO: 3443269 - RNA, 19 nt, Human
cuugagggcccagagcagg

SEQ ID NO: 3443270 - RNA, 14 nt, Human
cuugagggcugcag

SEQ ID NO: 3443271 - RNA, 23 nt, Human
cuugagggcugcaguucuacuca

SEQ ID NO: 3443272 - RNA, 19 nt, Human
cuugaggggaccaggagug

SEQ ID NO: 3443273 - RNA, 21 nt, Human
cuugaggggaccaggaguggg

SEQ ID NO: 3443274 - RNA, 16 nt, Human
cuugaggucucagccc

SEQ ID NO: 3443275 - RNA, 14 nt, Human
cuugaguaaaauaa

SEQ ID NO: 3443276 - RNA, 22 nt, Human
cuugagugggguuaucucugug

SEQ ID NO: 3443277 - RNA, 22 nt, Human
cuugagugucaagcugaccuug

SEQ ID NO: 3443278 - RNA, 19 nt, Human
cuugaguugauucagcucu

SEQ ID NO: 3443279 - RNA, 21 nt, Human
cuugaguugauucagcucugc

SEQ ID NO: 3443280 - RNA, 18 nt, Human
cuugaguuguuuuuguau

SEQ ID NO: 3443281 - RNA, 13 nt, Human
cuugaguuugucg

SEQ ID NO: 3443282 - RNA, 14 nt, Human
cuugauaaagaaga

SEQ ID NO: 3443283 - RNA, 22 nt, Human
cuugauaaauggcuuccuggca

SEQ ID NO: 3443284 - RNA, 14 nt, Human
cuugauaacagcua

SEQ ID NO: 3443285 - RNA, 16 nt, Human
cuugauaauuuuccuu

SEQ ID NO: 3443286 - RNA, 20 nt, Human
cuugauacauucaaauuugu

SEQ ID NO: 3443287 - RNA, 22 nt, Human
cuugauacauucaaauuugucu

SEQ ID NO: 3443288 - RNA, 18 nt, Human
cuugauaccccccucugu

SEQ ID NO: 3443289 - RNA, 21 nt, Human
cuugauaccccccucugucuu

SEQ ID NO: 3443290 - RNA, 22 nt, Human
cuugauacuaaaaguucuucuc

SEQ ID NO: 3443291 - RNA, 18 nt, Human
cuugauacuuguuuucaa

SEQ ID NO: 3443292 - RNA, 13 nt, Human
cuugauauuugua

SEQ ID NO: 3443293 - RNA, 22 nt, Human
cuugaucaguaguuugcauuuc

SEQ ID NO: 3443294 - RNA, 18 nt, Human
cuugaucaguuaagaaau

SEQ ID NO: 3443295 - RNA, 17 nt, Human
cuugauccauuucuaau

SEQ ID NO: 3443296 - RNA, 20 nt, Human
cuugaucugcucagcccugg

SEQ ID NO: 3443297 - RNA, 21 nt, Human
cuugaucugcucagcccugga

SEQ ID NO: 3443298 - RNA, 23 nt, Human
cuugaucugcucagcccuggagg

SEQ ID NO: 3443299 - RNA, 21 nt, Human
cuugaugaaauaacacagcag

SEQ ID NO: 3443300 - RNA, 22 nt, Human
cuugaugaaauaacacagcagu

SEQ ID NO: 3443301 - RNA, 23 nt, Human
cuugaugaguguaacaagaaagg

SEQ ID NO: 3443302 - RNA, 21 nt, Human
cuugaugcaugcacuguuccc

SEQ ID NO: 3443303 - RNA, 13 nt, Human
cuugaugcaugug

SEQ ID NO: 3443304 - RNA, 23 nt, Human
cuugaugccauaugccuugggga

SEQ ID NO: 3443305 - RNA, 12 nt, Human
cuugaugccugg

SEQ ID NO: 3443306 - RNA, 18 nt, Human
cuugaugggauucuggac

SEQ ID NO: 3443307 - RNA, 15 nt, Human
cuugauguaaaaucu

SEQ ID NO: 3443308 - RNA, 17 nt, Human
cuugauguaaaaucuug

SEQ ID NO: 3443309 - RNA, 20 nt, Human
cuugauguaaaaucuuguca

SEQ ID NO: 3443310 - RNA, 21 nt, Human
cuugauguaaggaugggcaug

SEQ ID NO: 3443311 - RNA, 22 nt, Human
cuugaugugccauuuuaaaaaa

SEQ ID NO: 3443312 - RNA, 22 nt, Human
cuugauguggugaggcaggcuu

SEQ ID NO: 3443313 - RNA, 15 nt, Human
cuugauguguuaucu

SEQ ID NO: 3443314 - RNA, 22 nt, Human
cuucuaaguaaaaccacagcag

SEQ ID NO: 3443315 - RNA, 18 nt, Human
cuucuaaguaaauacaau

SEQ ID NO: 3443316 - RNA, 14 nt, Human
cuucuaauauauuu

SEQ ID NO: 3443317 - RNA, 15 nt, Human
cuucuaauauauuuu

SEQ ID NO: 3443318 - RNA, 20 nt, Human
cuucuaauauauuuuuauau

SEQ ID NO: 3443319 - RNA, 21 nt, Human
cuucuaaucugcuaugcuuga

SEQ ID NO: 3443320 - RNA, 22 nt, Human
cuucuaaucugcuaugcuugaa

SEQ ID NO: 3443321 - RNA, 15 nt, Human
cuucuaauugccaug

SEQ ID NO: 3443322 - RNA, 12 nt, Human
cuucuaccugcc

SEQ ID NO: 3443323 - RNA, 12 nt, Human
cuugccuccugu

SEQ ID NO: 3443324 - RNA, 18 nt, Human
cuugccucggcuccugcu

SEQ ID NO: 3443325 - RNA, 19 nt, Human
cuugccucggcuccugcug

SEQ ID NO: 3443326 - RNA, 22 nt, Human
cuugccucggcuccugcugcac

SEQ ID NO: 3443327 - RNA, 15 nt, Human
cuugccucugcacac

SEQ ID NO: 3443328 - RNA, 17 nt, Human
cuugccucuguccccuu

SEQ ID NO: 3443329 - RNA, 14 nt, Human
cuugccucugugcu

SEQ ID NO: 3443330 - RNA, 12 nt, Human
cuugccucuucc

SEQ ID NO: 3443331 - RNA, 13 nt, Human
cuugccugcaggg

SEQ ID NO: 3443332 - RNA, 17 nt, Human
cuugccugcagggccau

SEQ ID NO: 3443333 - RNA, 16 nt, Human
cuugccugccuuucca

SEQ ID NO: 3443334 - RNA, 16 nt, Human
cuugccugguacagua

SEQ ID NO: 3443335 - RNA, 14 nt, Human
cuugccugugccag

SEQ ID NO: 3443336 - RNA, 15 nt, Human
cuugccuuacacaaa

SEQ ID NO: 3443337 - RNA, 21 nt, Human
cuugccuuauuagagugucuu

SEQ ID NO: 3443338 - RNA, 15 nt, Human
cuugccuuccuaagc

SEQ ID NO: 3443339 - RNA, 20 nt, Human
cuugccuuccuaagccugug

SEQ ID NO: 3443340 - RNA, 22 nt, Human
cuugccuuccuaagccuguggc

SEQ ID NO: 3443341 - RNA, 15 nt, Human
cuugccuucuggugu

SEQ ID NO: 3443342 - RNA, 19 nt, Human
cuugccuucuucacccagc

SEQ ID NO: 3443343 - RNA, 23 nt, Human
cuugccuuuagccccucccaagc

SEQ ID NO: 3443344 - RNA, 19 nt, Human
cuugccuuucgaggccuga

SEQ ID NO: 3443345 - RNA, 12 nt, Human
cuugccuuucuc

SEQ ID NO: 3443346 - RNA, 14 nt, Human
cuugccuuuuucau

SEQ ID NO: 3443347 - RNA, 15 nt, Human
cuugccuuuuucauu

SEQ ID NO: 3443348 - RNA, 23 nt, Human
cuugcgaacuagagaugugcaau

SEQ ID NO: 3443349 - RNA, 19 nt, Human
cuugcuaaucagugucuca

SEQ ID NO: 3443350 - RNA, 17 nt, Human
cuugcuaccaguauuua

SEQ ID NO: 3443351 - RNA, 20 nt, Human
cuugcuagcuaugugaccuu

SEQ ID NO: 3443352 - RNA, 23 nt, Human
cuugcuagcuaugugaccuugag

SEQ ID NO: 3443353 - RNA, 22 nt, Human
cuugcuauauugcccaggcugg

SEQ ID NO: 3443354 - RNA, 23 nt, Human
cuugcuauauugcccaggcuggu

SEQ ID NO: 3443355 - RNA, 21 nt, Human
cuugcuaucggggaagccaga

SEQ ID NO: 3443356 - RNA, 13 nt, Human
cuugcuaugauga

SEQ ID NO: 3443357 - RNA, 23 nt, Human
cuugcuauucugucccuaggugu

SEQ ID NO: 3443358 - RNA, 14 nt, Human
cuugcucauuaauu

SEQ ID NO: 3443359 - RNA, 13 nt, Human
cuugcucccuuca

SEQ ID NO: 3443360 - RNA, 15 nt, Human
cuugcuccuccuucu

SEQ ID NO: 3443361 - RNA, 19 nt, Human
cuugcucuaucucacagca

SEQ ID NO: 3443362 - RNA, 20 nt, Human
cuugcucuaucucacagcac

SEQ ID NO: 3443363 - RNA, 20 nt, Human
cuugcucuccccugcccugc

SEQ ID NO: 3443364 - RNA, 15 nt, Human
cuugcucucuggccu

SEQ ID NO: 3443365 - RNA, 22 nt, Human
cuugcucucuggccuuuuccua

SEQ ID NO: 3443366 - RNA, 18 nt, Human
cuugcucucuuuuauucu

SEQ ID NO: 3443367 - RNA, 13 nt, Human
cuugcucugcuga

SEQ ID NO: 3443368 - RNA, 16 nt, Human
cuugcucugcugacag

SEQ ID NO: 3443369 - RNA, 17 nt, Human
cuugcucugcugacaga

SEQ ID NO: 3443370 - RNA, 22 nt, Human
cuugcucugcugacagacacag

SEQ ID NO: 3443371 - RNA, 22 nt, Human
cuuguauagguuuuaaagaccu

SEQ ID NO: 3443372 - RNA, 17 nt, Human
cuuguauaguguaaaau

SEQ ID NO: 3443373 - RNA, 11 nt, Human
cuuguauauuu

SEQ ID NO: 3443374 - RNA, 12 nt, Human
cuuguauauuug

SEQ ID NO: 3443375 - RNA, 14 nt, Human
cuuguauauuugua

SEQ ID NO: 3443376 - RNA, 16 nt, Human
cuuguauauuuguaca

SEQ ID NO: 3443377 - RNA, 17 nt, Human
cuuguauauuuguacaa

SEQ ID NO: 3443378 - RNA, 21 nt, Human
cuuguaugaaagauggcugug

SEQ ID NO: 3443379 - RNA, 15 nt, Human
cuuguauuaagaaug

SEQ ID NO: 3443380 - RNA, 22 nt, Human
cuuguauuaaguuguuaauaaa

SEQ ID NO: 3443381 - RNA, 23 nt, Human
cuuguauuaaguuguuaauaaaa

SEQ ID NO: 3443382 - RNA, 13 nt, Human
cuuguauuaugug

SEQ ID NO: 3443383 - RNA, 18 nt, Human
cuuguauuauguguguuu

SEQ ID NO: 3443384 - RNA, 12 nt, Human
cuuguauuuaaa

SEQ ID NO: 3443385 - RNA, 18 nt, Human
cuuguauuuaaauauuaa

SEQ ID NO: 3443386 - RNA, 20 nt, Human
cuuguauuuaaauauuaaau

SEQ ID NO: 3443387 - RNA, 14 nt, Human
cuuguauuuuguga

SEQ ID NO: 3443388 - RNA, 13 nt, Human
cuugucaaagaag

SEQ ID NO: 3443389 - RNA, 15 nt, Human
cuugucaaagaaggu

SEQ ID NO: 3443390 - RNA, 16 nt, Human
cuugucacaauaaaug

SEQ ID NO: 3443391 - RNA, 16 nt, Human
cuugucacgccagacu

SEQ ID NO: 3443392 - RNA, 17 nt, Human
cuugucacugacacaaa

SEQ ID NO: 3443393 - RNA, 22 nt, Human
cuugucacugguagaccaaaau

SEQ ID NO: 3443394 - RNA, 13 nt, Human
cuugucagagcug

SEQ ID NO: 3443395 - RNA, 14 nt, Human
cuugucagagcugg

SEQ ID NO: 3443396 - RNA, 17 nt, Human
cuugucaggagugugug

SEQ ID NO: 3443397 - RNA, 14 nt, Human
cuugucauguguau

SEQ ID NO: 3443398 - RNA, 17 nt, Human
cuugucauguguauaaa

SEQ ID NO: 3443399 - RNA, 18 nt, Human
cuugucauguguauaaaa

SEQ ID NO: 3443400 - RNA, 19 nt, Human
cuugucauguguauaaaaa

SEQ ID NO: 3443401 - RNA, 15 nt, Human
cuuguccacccaccu

SEQ ID NO: 3443402 - RNA, 14 nt, Human
cuuguccagcgccu

SEQ ID NO: 3443403 - RNA, 12 nt, Human
cuuguccagcug

SEQ ID NO: 3443404 - RNA, 21 nt, Human
cuugucccacgugucuuccac

SEQ ID NO: 3443405 - RNA, 14 nt, Human
cuuguccccaaauc

SEQ ID NO: 3443406 - RNA, 12 nt, Human
cuuguccccaca

SEQ ID NO: 3443407 - RNA, 14 nt, Human
cuuguccccacacu

SEQ ID NO: 3443408 - RNA, 20 nt, Human
cuuguccccuccucacuccc

SEQ ID NO: 3443409 - RNA, 21 nt, Human
cuuguccccugccugugccug

SEQ ID NO: 3443410 - RNA, 20 nt, Human
cuuguccuagcacagauggc

SEQ ID NO: 3443411 - RNA, 16 nt, Human
cuuguccucagccagu

SEQ ID NO: 3443412 - RNA, 22 nt, Human
cuuguccucaguccauuuauau

SEQ ID NO: 3443413 - RNA, 16 nt, Human
cuuguccuuagccugg

SEQ ID NO: 3443414 - RNA, 17 nt, Human
cuuguccuuagccugga

SEQ ID NO: 3443415 - RNA, 19 nt, Human
cuuguccuuagccuggacc

SEQ ID NO: 3443416 - RNA, 15 nt, Human
cuugucggccccacc

SEQ ID NO: 3443417 - RNA, 16 nt, Human
cuugucggcuccaguc

SEQ ID NO: 3443418 - RNA, 17 nt, Human
cuugucuauaaagcauu

SEQ ID NO: 3443419 - RNA, 17 nt, Human
cuugucuauuuuugucu

SEQ ID NO: 3443420 - RNA, 14 nt, Human
cuugucucaaugcu

SEQ ID NO: 3443421 - RNA, 19 nt, Human
cuugucucaaugcucauaa

SEQ ID NO: 3443422 - RNA, 15 nt, Human
cuugucucauuuuaa

SEQ ID NO: 3443423 - RNA, 19 nt, Human
cuugucuccuacuccugac

SEQ ID NO: 3443424 - RNA, 14 nt, Human
cuugucugauuucu

SEQ ID NO: 3443425 - RNA, 11 nt, Human
cuugucuuaaa

SEQ ID NO: 3443426 - RNA, 21 nt, Human
cuugucuuccuauuucagaag

SEQ ID NO: 3443427 - RNA, 18 nt, Human
cuugucuucugguacuuu

SEQ ID NO: 3443428 - RNA, 15 nt, Human
cuugucuuucugggg

SEQ ID NO: 3443429 - RNA, 13 nt, Human
cuugucuuuggac

SEQ ID NO: 3443430 - RNA, 21 nt, Human
cuugucuuuggacccugaggc

SEQ ID NO: 3443431 - RNA, 17 nt, Human
cuugucuuuucaaaaua

SEQ ID NO: 3443432 - RNA, 18 nt, Human
cuugugaaaauaauugac

SEQ ID NO: 3443433 - RNA, 14 nt, Human
cuugugaaaaugug

SEQ ID NO: 3443434 - RNA, 17 nt, Human
cuugugaaacacagcug

SEQ ID NO: 3443435 - RNA, 12 nt, Human
cuugugaacaga

SEQ ID NO: 3443436 - RNA, 21 nt, Human
cuugugaaggccaugauauuu

SEQ ID NO: 3443437 - RNA, 22 nt, Human
cuugugaauaaagagggugggu

SEQ ID NO: 3443438 - RNA, 17 nt, Human
cuugugaauauguacau

SEQ ID NO: 3443439 - RNA, 20 nt, Human
cuugugaaucaagggucagg

SEQ ID NO: 3443440 - RNA, 22 nt, Human
cuugugaaucaagggucaggcc

SEQ ID NO: 3443441 - RNA, 22 nt, Human
cuugugacagcucuuuuuguga

SEQ ID NO: 3443442 - RNA, 13 nt, Human
cuugugacccagc

SEQ ID NO: 3443443 - RNA, 16 nt, Human
cuugugacuagugcug

SEQ ID NO: 3443444 - RNA, 22 nt, Human
cuugugacuagugcugaagcuu

SEQ ID NO: 3443445 - RNA, 17 nt, Human
cuugugacuuuugcuuu

SEQ ID NO: 3443446 - RNA, 19 nt, Human
cuugugacuuuugcuuuaa

SEQ ID NO: 3443447 - RNA, 21 nt, Human
cuugugacuuuugcuuuaauu

SEQ ID NO: 3443448 - RNA, 24 nt, Human
cuugugaugucauacagagaaguc

SEQ ID NO: 3443449 - RNA, 15 nt, Human
cuugugauuauuuau

SEQ ID NO: 3443450 - RNA, 22 nt, Human
cuugugcacaggcagagcccag

SEQ ID NO: 3443451 - RNA, 23 nt, Human
cuugugcacccucuaucccaaua

SEQ ID NO: 3443452 - RNA, 19 nt, Human
cuugugccauagucacaug

SEQ ID NO: 3443453 - RNA, 14 nt, Human
cuugugccuggcuc

SEQ ID NO: 3443454 - RNA, 21 nt, Human
cuugugcuggauggagcccag

SEQ ID NO: 3443455 - RNA, 16 nt, Human
cuugugcuuugcucuu

SEQ ID NO: 3443456 - RNA, 18 nt, Human
cuuguggaauugggagcu

SEQ ID NO: 3443457 - RNA, 18 nt, Human
cuuguggacacagcucuu

SEQ ID NO: 3443458 - RNA, 21 nt, Human
cuuguggacacagcucuucuc

SEQ ID NO: 3443459 - RNA, 12 nt, Human
cuuguggagccc

SEQ ID NO: 3443460 - RNA, 14 nt, Human
cuuguggagcccca

SEQ ID NO: 3443461 - RNA, 16 nt, Human
cuuguggagccccaca

SEQ ID NO: 3443462 - RNA, 19 nt, Human
cuuguggagccccacacug

SEQ ID NO: 3443463 - RNA, 13 nt, Human
cuuguggcacauu

SEQ ID NO: 3443464 - RNA, 12 nt, Human
cuugugggccug

SEQ ID NO: 3443465 - RNA, 16 nt, Human
cuugugggccugggcu

SEQ ID NO: 3443466 - RNA, 19 nt, Human
cuugugggccugggcuccu

SEQ ID NO: 3443467 - RNA, 16 nt, Human
cuuguggggacccagg

SEQ ID NO: 3443468 - RNA, 14 nt, Human
cuuuaauucuguau

SEQ ID NO: 3443469 - RNA, 14 nt, Human
cuuuaauugugaau

SEQ ID NO: 3443470 - RNA, 22 nt, Human
cuuuaauugugaauugauaaua

SEQ ID NO: 3443471 - RNA, 12 nt, Human
cuuuaauuuaug

SEQ ID NO: 3443472 - RNA, 16 nt, Human
cuuuaauuuauuuuug

SEQ ID NO: 3443473 - RNA, 19 nt, Human
cuuuaauuuauuuuugcau

SEQ ID NO: 3443474 - RNA, 13 nt, Human
cuuuaauuuuagc

SEQ ID NO: 3443475 - RNA, 15 nt, Human
cuuuaauuuuggaau

SEQ ID NO: 3443476 - RNA, 16 nt, Human
cuuuaauuuuggaauu

SEQ ID NO: 3443477 - RNA, 12 nt, Human
cuuuacaaaaag

SEQ ID NO: 3443478 - RNA, 16 nt, Human
cuuuacaaaacaaacu

SEQ ID NO: 3443479 - RNA, 20 nt, Human
cuuuacaaaagaaauaccuu

SEQ ID NO: 3443480 - RNA, 19 nt, Human
cuuuacaauguucauccca

SEQ ID NO: 3443481 - RNA, 21 nt, Human
cuuuacacauucggcucccug

SEQ ID NO: 3443482 - RNA, 23 nt, Human
cuuuacacauucggcucccugga

SEQ ID NO: 3443483 - RNA, 23 nt, Human
cuuuacacggagcggauugcaaa

SEQ ID NO: 3443484 - RNA, 18 nt, Human
cuuuacauacuuuaucaa

SEQ ID NO: 3443485 - RNA, 17 nt, Human
cuuuacaugaggacucu

SEQ ID NO: 3443486 - RNA, 16 nt, Human
cuuuaccaauugaagu

SEQ ID NO: 3443487 - RNA, 18 nt, Human
cuuuaccaauugaaguaa

SEQ ID NO: 3443488 - RNA, 19 nt, Human
cuuuaccaauugaaguaaa

SEQ ID NO: 3443489 - RNA, 17 nt, Human
cuuuaccacccccacac

SEQ ID NO: 3443490 - RNA, 16 nt, Human
cuuuacccauuugggu

SEQ ID NO: 3443491 - RNA, 17 nt, Human
cuuuaccccaucccugu

SEQ ID NO: 3443492 - RNA, 14 nt, Human
cuuuacccucaucu

SEQ ID NO: 3443493 - RNA, 17 nt, Human
cuuuacccucaucuguc

SEQ ID NO: 3443494 - RNA, 17 nt, Human
cuuuacccucuuugcug

SEQ ID NO: 3443495 - RNA, 19 nt, Human
cuuuacccucuuugcugca

SEQ ID NO: 3443496 - RNA, 18 nt, Human
cuuuacccuugagcccuc

SEQ ID NO: 3443497 - RNA, 13 nt, Human
cuuuaccugagac

SEQ ID NO: 3443498 - RNA, 17 nt, Human
cuuuaccuuuuuuauac

SEQ ID NO: 3443499 - RNA, 14 nt, Human
cuuuacuccucaca

SEQ ID NO: 3443500 - RNA, 14 nt, Human
cuuuacugacccug

SEQ ID NO: 3443501 - RNA, 19 nt, Human
cuuuacugacccuggggcu

SEQ ID NO: 3443502 - RNA, 18 nt, Human
cuuuacugccugaauaaa

SEQ ID NO: 3443503 - RNA, 19 nt, Human
cuuuacugccugaauaaag

SEQ ID NO: 3443504 - RNA, 15 nt, Human
cuuuacugucaaaau

SEQ ID NO: 3443505 - RNA, 12 nt, Human
cuuuacuguuug

SEQ ID NO: 3443506 - RNA, 16 nt, Human
cuuuacuuaaaaauau

SEQ ID NO: 3443507 - RNA, 18 nt, Human
cuuuacuuagcuuaucaa

SEQ ID NO: 3443508 - RNA, 18 nt, Human
cuuuacuuuagaagcaca

SEQ ID NO: 3443509 - RNA, 16 nt, Human
cuuuacuuucccuugc

SEQ ID NO: 3443510 - RNA, 18 nt, Human
cuuuacuuucccuugcuu

SEQ ID NO: 3443511 - RNA, 15 nt, Human
cuuuagaaaaaauga

SEQ ID NO: 3443512 - RNA, 14 nt, Human
cuuuagaaaaggca

SEQ ID NO: 3443513 - RNA, 18 nt, Human
cuuuagaaacacauaauu

SEQ ID NO: 3443514 - RNA, 14 nt, Human
cuuuagaaacagug

SEQ ID NO: 3443515 - RNA, 19 nt, Human
cuuuagaaagcugacauug

SEQ ID NO: 3443516 - RNA, 23 nt, Human
cuuuagaaauaaaccuuaauauu

SEQ ID NO: 3443517 - RNA, 19 nt, Human
cuuuagaagugcauuucug

SEQ ID NO: 3443518 - RNA, 20 nt, Human
cuuuagaagugcauuucuga

SEQ ID NO: 3443519 - RNA, 20 nt, Human
cuuuagaaucccagcccccu

SEQ ID NO: 3443520 - RNA, 23 nt, Human
cuuuagaaucccagcccccugac

SEQ ID NO: 3443521 - RNA, 23 nt, Human
cuuuagacccugggugggcucug

SEQ ID NO: 3443522 - RNA, 17 nt, Human
cuuuagacuugaaaaga

SEQ ID NO: 3443523 - RNA, 13 nt, Human
cuuuagagaacug

SEQ ID NO: 3443524 - RNA, 19 nt, Human
cuuuagagaacugaaaaga

SEQ ID NO: 3443525 - RNA, 18 nt, Human
cuuuagagcauugccauu

SEQ ID NO: 3443526 - RNA, 23 nt, Human
cuuuagagcauugccauucccug

SEQ ID NO: 3443527 - RNA, 15 nt, Human
cuuuagauagcccug

SEQ ID NO: 3443528 - RNA, 21 nt, Human
cuuuagauagcccuguccugg

SEQ ID NO: 3443529 - RNA, 23 nt, Human
cuuuagcaaaaaaaacccaugug

SEQ ID NO: 3443530 - RNA, 23 nt, Human
cuuuagcacguuuaaaguucugu

SEQ ID NO: 3443531 - RNA, 18 nt, Human
cuuuagcagaaucaaaau

SEQ ID NO: 3443532 - RNA, 16 nt, Human
cuuuagccaaacccuu

SEQ ID NO: 3443533 - RNA, 18 nt, Human
cuuuagccccucccaagc

SEQ ID NO: 3443534 - RNA, 23 nt, Human
cuuuagccccucccaagcuggcu

SEQ ID NO: 3443535 - RNA, 15 nt, Human
cuuuagcgcccaguu

SEQ ID NO: 3443536 - RNA, 18 nt, Human
cuuuaggcagcagcuuuu

SEQ ID NO: 3443537 - RNA, 16 nt, Human
cuugggcccagcuggg

SEQ ID NO: 3443538 - RNA, 21 nt, Human
cuugggcccagcugggcucug

SEQ ID NO: 3443539 - RNA, 22 nt, Human
cuugggcgccgugcugggcagc

SEQ ID NO: 3443540 - RNA, 14 nt, Human
cuugggcggcugag

SEQ ID NO: 3443541 - RNA, 15 nt, Human
cuugggcggcugaga

SEQ ID NO: 3443542 - RNA, 13 nt, Human
cuugggcucugau

SEQ ID NO: 3443543 - RNA, 16 nt, Human
cuugggcucugaugaa

SEQ ID NO: 3443544 - RNA, 13 nt, Human
cuugggcucugcu

SEQ ID NO: 3443545 - RNA, 14 nt, Human
cuugggcucugcug

SEQ ID NO: 3443546 - RNA, 18 nt, Human
cuuggggaauuuccucua

SEQ ID NO: 3443547 - RNA, 15 nt, Human
cuuggggacaucucu

SEQ ID NO: 3443548 - RNA, 19 nt, Human
cuuggggaccagagcugcc

SEQ ID NO: 3443549 - RNA, 20 nt, Human
cuuggggaguuaagaccugg

SEQ ID NO: 3443550 - RNA, 20 nt, Human
cuuggggaguuuaggguggg

SEQ ID NO: 3443551 - RNA, 23 nt, Human
cuuggggcaacauuguucaccuu

SEQ ID NO: 3443552 - RNA, 15 nt, Human
cuuggggcaggcagu

SEQ ID NO: 3443553 - RNA, 22 nt, Human
cuuggggccaccaaagcugccc

SEQ ID NO: 3443554 - RNA, 16 nt, Human
cuuggggcuggagagg

SEQ ID NO: 3443555 - RNA, 20 nt, Human
cuuggggcuugacuuuugua

SEQ ID NO: 3443556 - RNA, 21 nt, Human
cuuggggcuugacuuuuguau

SEQ ID NO: 3443557 - RNA, 18 nt, Human
cuugggggacagggcugg

SEQ ID NO: 3443558 - RNA, 24 nt, Human
cuugggggaugacuagaggcaggg

SEQ ID NO: 3443559 - RNA, 21 nt, Human
cuugggggcucagcaaggcca

SEQ ID NO: 3443560 - RNA, 23 nt, Human
cuuggggggcugaggugggagga

SEQ ID NO: 3443561 - RNA, 14 nt, Human
cuuggggggguggc

SEQ ID NO: 3443562 - RNA, 16 nt, Human
cuuggggggguggccg

SEQ ID NO: 3443563 - RNA, 19 nt, Human
cuuggggggguggccgcug

SEQ ID NO: 3443564 - RNA, 24 nt, Human
cuuggggggugaugagggcagcag

SEQ ID NO: 3443565 - RNA, 18 nt, Human
cuuggggguucaggcccg

SEQ ID NO: 3443566 - RNA, 22 nt, Human
cuuggggucagguugacaggag

SEQ ID NO: 3443567 - RNA, 19 nt, Human
cuuggguagaguuuacagc

SEQ ID NO: 3443568 - RNA, 19 nt, Human
cuuggguggagaagccauu

SEQ ID NO: 3443569 - RNA, 23 nt, Human
cuuggguggagaagccauugucu

SEQ ID NO: 3443570 - RNA, 22 nt, Human
cuugguaaaguccuuuucuugc

SEQ ID NO: 3443571 - RNA, 19 nt, Human
cuugguacuugcugcuauu

SEQ ID NO: 3443572 - RNA, 18 nt, Human
cuugguccaacugcaacu

SEQ ID NO: 3443573 - RNA, 15 nt, Human
cuugguccugcugca

SEQ ID NO: 3443574 - RNA, 14 nt, Human
cuuggucucagugu

SEQ ID NO: 3443575 - RNA, 13 nt, Human
cuuggucugccag

SEQ ID NO: 3443576 - RNA, 17 nt, Human
cuuggucugccaggccc

SEQ ID NO: 3443577 - RNA, 20 nt, Human
cuuggucugccaggccccca

SEQ ID NO: 3443578 - RNA, 15 nt, Human
cuuggucuuauuuau

SEQ ID NO: 3443579 - RNA, 20 nt, Human
cuuggugaauuuuuuuuucc

SEQ ID NO: 3443580 - RNA, 19 nt, Human
cuuggugauuccgcaguga

SEQ ID NO: 3443581 - RNA, 17 nt, Human
cuuggugccucugcagu

SEQ ID NO: 3443582 - RNA, 14 nt, Human
cuuggugcugggaa

SEQ ID NO: 3443583 - RNA, 15 nt, Human
cuuggugcugggaac

SEQ ID NO: 3443584 - RNA, 16 nt, Human
cuugguguaauuugaa

SEQ ID NO: 3443585 - RNA, 19 nt, Human
cuugguguccaccuggccc

SEQ ID NO: 3443586 - RNA, 19 nt, Human
cuuggugucgggcaugaca

SEQ ID NO: 3443587 - RNA, 16 nt, Human
cuugguguuaaaacac

SEQ ID NO: 3443588 - RNA, 17 nt, Human
cuugguuauacaugaca

SEQ ID NO: 3443589 - RNA, 19 nt, Human
cuugguuauacaugacacu

SEQ ID NO: 3443590 - RNA, 22 nt, Human
cuugguucauaaaugaauuuua

SEQ ID NO: 3443591 - RNA, 17 nt, Human
cuugguucaucaguguu

SEQ ID NO: 3443592 - RNA, 16 nt, Human
cuugguucccauuugc

SEQ ID NO: 3443593 - RNA, 16 nt, Human
cuugguucccccacug

SEQ ID NO: 3443594 - RNA, 17 nt, Human
cuugguucccuugugug

SEQ ID NO: 3443595 - RNA, 15 nt, Human
cuugguuccuggggc

SEQ ID NO: 3443596 - RNA, 17 nt, Human
cuugguuccuggggcau

SEQ ID NO: 3443597 - RNA, 23 nt, Human
cuugguucuugaggggaccagga

SEQ ID NO: 3443598 - RNA, 16 nt, Human
cuugguuggcuggccu

SEQ ID NO: 3443599 - RNA, 14 nt, Human
cuugguugucucca

SEQ ID NO: 3443600 - RNA, 22 nt, Human
cuugguuucuucaacaggagaa

SEQ ID NO: 3443601 - RNA, 14 nt, Human
cuugguuuguaaau

SEQ ID NO: 3443602 - RNA, 20 nt, Human
cuugguuuuuacugcucuga

SEQ ID NO: 3443603 - RNA, 21 nt, Human
cuugguuuuuacugcucugag

SEQ ID NO: 3443604 - RNA, 12 nt, Human
cuuguaaagacu

SEQ ID NO: 3443605 - RNA, 14 nt, Human
cuuguaaagacugg

SEQ ID NO: 3443606 - RNA, 18 nt, Human
cuuguaaagacuguagaa

SEQ ID NO: 3443607 - RNA, 12 nt, Human
cuuguaaauaaa

SEQ ID NO: 3443608 - RNA, 15 nt, Human
cuuguaaauaaagcc

SEQ ID NO: 3443609 - RNA, 16 nt, Human
cuuguaaauaaagccc

SEQ ID NO: 3443610 - RNA, 14 nt, Human
cuuguaaauaccag

SEQ ID NO: 3443611 - RNA, 17 nt, Human
cuuguaaauagcucagg

SEQ ID NO: 3443612 - RNA, 23 nt, Human
cuuuauuuuuuaaguauuuauau

SEQ ID NO: 3443613 - RNA, 16 nt, Human
cuuucaaaccagcuuc

SEQ ID NO: 3443614 - RNA, 21 nt, Human
cuuucaaagaaggaauucuag

SEQ ID NO: 3443615 - RNA, 13 nt, Human
cuuucaaaucggu

SEQ ID NO: 3443616 - RNA, 21 nt, Human
cuuucaaauugagagaaugga

SEQ ID NO: 3443617 - RNA, 21 nt, Human
cuuucaaauuuagaaacuaau

SEQ ID NO: 3443618 - RNA, 14 nt, Human
cuuucaaauuucac

SEQ ID NO: 3443619 - RNA, 15 nt, Human
cuuucaaauuucaca

SEQ ID NO: 3443620 - RNA, 13 nt, Human
cuuucaagaacuu

SEQ ID NO: 3443621 - RNA, 16 nt, Human
cuuucaagaacuuguu

SEQ ID NO: 3443622 - RNA, 16 nt, Human
cuuucaagaucuaaau

SEQ ID NO: 3443623 - RNA, 17 nt, Human
cuuucaagaucuaaauc

SEQ ID NO: 3443624 - RNA, 19 nt, Human
cuuucaagcagucgugccu

SEQ ID NO: 3443625 - RNA, 19 nt, Human
cuuucaagggcuuuccugu

SEQ ID NO: 3443626 - RNA, 16 nt, Human
cuuucaauaacgaagu

SEQ ID NO: 3443627 - RNA, 23 nt, Human
cuuucaauaggaaaaacugauuu

SEQ ID NO: 3443628 - RNA, 20 nt, Human
cuuucaauugucacuuuuua

SEQ ID NO: 3443629 - RNA, 17 nt, Human
cuuucacaaaauuuuau

SEQ ID NO: 3443630 - RNA, 20 nt, Human
cuuucacaaaauuuuauucc

SEQ ID NO: 3443631 - RNA, 15 nt, Human
cuuucacacuuccac

SEQ ID NO: 3443632 - RNA, 16 nt, Human
cuuucacacuuccacc

SEQ ID NO: 3443633 - RNA, 20 nt, Human
cuuucacacuuccaccagcc

SEQ ID NO: 3443634 - RNA, 14 nt, Human
cuuucacaggcagc

SEQ ID NO: 3443635 - RNA, 15 nt, Human
cuuucacaggcagcc

SEQ ID NO: 3443636 - RNA, 17 nt, Human
cuuucacauagagauca

SEQ ID NO: 3443637 - RNA, 17 nt, Human
cuuucacccacagaaag

SEQ ID NO: 3443638 - RNA, 19 nt, Human
cuuucacccacagaaagag

SEQ ID NO: 3443639 - RNA, 15 nt, Human
cuuucaccccagggc

SEQ ID NO: 3443640 - RNA, 21 nt, Human
cuuucaccccagggccugagc

SEQ ID NO: 3443641 - RNA, 20 nt, Human
cuuucacccuuuucuguuug

SEQ ID NO: 3443642 - RNA, 20 nt, Human
cuuucacuauaaugugaaau

SEQ ID NO: 3443643 - RNA, 12 nt, Human
cuuucacuucuu

SEQ ID NO: 3443644 - RNA, 10 nt, Human
cuuucagaaa

SEQ ID NO: 3443645 - RNA, 18 nt, Human
cuuucagaaaacagaaaa

SEQ ID NO: 3443646 - RNA, 23 nt, Human
cuuucagaaauauaacacauuuu

SEQ ID NO: 3443647 - RNA, 21 nt, Human
cuuucagaauaugucagugcu

SEQ ID NO: 3443648 - RNA, 19 nt, Human
cuuucagacucucucuggg

SEQ ID NO: 3443649 - RNA, 22 nt, Human
cuuucagacucucucugggagg

SEQ ID NO: 3443650 - RNA, 12 nt, Human
cuuucagagccu

SEQ ID NO: 3443651 - RNA, 19 nt, Human
cuuucagauacaugguugu

SEQ ID NO: 3443652 - RNA, 15 nt, Human
cuuucagaugucuuc

SEQ ID NO: 3443653 - RNA, 17 nt, Human
cuuucagaugucuucug

SEQ ID NO: 3443654 - RNA, 21 nt, Human
cuuucagcaagauaaacauua

SEQ ID NO: 3443655 - RNA, 16 nt, Human
cuuucagcaggcagcc

SEQ ID NO: 3443656 - RNA, 18 nt, Human
cuuucagcaggcagccuu

SEQ ID NO: 3443657 - RNA, 20 nt, Human
cuuucagccaagaauucuua

SEQ ID NO: 3443658 - RNA, 23 nt, Human
cuuucagccaagaauucuuaaau

SEQ ID NO: 3443659 - RNA, 12 nt, Human
cuuucagcuccu

SEQ ID NO: 3443660 - RNA, 14 nt, Human
cuuucagcuccuga

SEQ ID NO: 3443661 - RNA, 21 nt, Human
cuuucagcuccugaccaguug

SEQ ID NO: 3443662 - RNA, 13 nt, Human
cuuucagcugucu

SEQ ID NO: 3443663 - RNA, 19 nt, Human
cuuucaggagcuccauaca

SEQ ID NO: 3443664 - RNA, 15 nt, Human
cuuucaggaucuauu

SEQ ID NO: 3443665 - RNA, 16 nt, Human
cuuucaggaucuauuu

SEQ ID NO: 3443666 - RNA, 15 nt, Human
cuuucagggccucca

SEQ ID NO: 3443667 - RNA, 21 nt, Human
cuuucaguacuuuuuuaaaua

SEQ ID NO: 3443668 - RNA, 17 nt, Human
cuuucauaaucuuugcu

SEQ ID NO: 3443669 - RNA, 18 nt, Human
cuuucauaaucuuugcuu

SEQ ID NO: 3443670 - RNA, 17 nt, Human
cuuucauacugaagaug

SEQ ID NO: 3443671 - RNA, 19 nt, Human
cuuucauauuuuaaacaga

SEQ ID NO: 3443672 - RNA, 23 nt, Human
cuuucauauuuuaaacagaggau

SEQ ID NO: 3443673 - RNA, 19 nt, Human
cuuucauccugacucugcc

SEQ ID NO: 3443674 - RNA, 20 nt, Human
cuuucauccugacucugccc

SEQ ID NO: 3443675 - RNA, 21 nt, Human
cuuucauccugacucugcccc

SEQ ID NO: 3443676 - RNA, 18 nt, Human
cuuucaugaguuuuuccc

SEQ ID NO: 3443677 - RNA, 22 nt, Human
cuuucauggcugcuguugcuua

SEQ ID NO: 3443678 - RNA, 19 nt, Human
cuuucauggggugaugcug

SEQ ID NO: 3443679 - RNA, 17 nt, Human
cuuucauguaaacugug

SEQ ID NO: 3443680 - RNA, 19 nt, Human
cuuucauguaaacugugca

SEQ ID NO: 3443681 - RNA, 20 nt, Human
cuuucauuaaagcauuuacu

SEQ ID NO: 3443682 - RNA, 15 nt, Human
cuuucauugccagug

SEQ ID NO: 3443683 - RNA, 15 nt, Human
cuuucauuucuucua

SEQ ID NO: 3443684 - RNA, 14 nt, Human
cuuucauuugcuuu

SEQ ID NO: 3443685 - RNA, 18 nt, Human
cuuucauuugcuuuggaa

SEQ ID NO: 3443686 - RNA, 10 nt, Human
cuuucauuuu

SEQ ID NO: 3443687 - RNA, 21 nt, Human
cuuucauuuucucucagguga

SEQ ID NO: 3443688 - RNA, 14 nt, Human
cuuucauuuucugu

SEQ ID NO: 3443689 - RNA, 19 nt, Human
cuuucauuuuuuuccaggc

SEQ ID NO: 3443690 - RNA, 17 nt, Human
cuuuccaaaauuuuuca

SEQ ID NO: 3443691 - RNA, 14 nt, Human
cgggagcaucucuu

SEQ ID NO: 3443692 - RNA, 17 nt, Human
cgggagccgcuggcaga

SEQ ID NO: 3443693 - RNA, 17 nt, Human
cgggagccuaggaccac

SEQ ID NO: 3443694 - RNA, 15 nt, Human
cgggagccucccugc

SEQ ID NO: 3443695 - RNA, 22 nt, Human
cgggagccucccugccucaggc

SEQ ID NO: 3443696 - RNA, 20 nt, Human
cgggagcgguggcccugucc

SEQ ID NO: 3443697 - RNA, 20 nt, Human
cgggaggauguucugggaca

SEQ ID NO: 3443698 - RNA, 20 nt, Human
cgggaggcagagguugcagu

SEQ ID NO: 3443699 - RNA, 22 nt, Human
cgggaggcggagcuugcaguga

SEQ ID NO: 3443700 - RNA, 18 nt, Human
cgggaggcugagacagga

SEQ ID NO: 3443701 - RNA, 16 nt, Human
cgggagggcggcacag

SEQ ID NO: 3443702 - RNA, 14 nt, Human
cgggaggggcccgc

SEQ ID NO: 3443703 - RNA, 18 nt, Human
cgggaggucgaggcagga

SEQ ID NO: 3443704 - RNA, 14 nt, Human
cgggaguggacagg

SEQ ID NO: 3443705 - RNA, 16 nt, Human
cgggaugguccugggg

SEQ ID NO: 3443706 - RNA, 17 nt, Human
cgggauuaguacacacu

SEQ ID NO: 3443707 - RNA, 14 nt, Human
cgggcacaauaaau

SEQ ID NO: 3443708 - RNA, 18 nt, Human
cgggcacagcugugguga

SEQ ID NO: 3443709 - RNA, 14 nt, Human
cgggcaccagccag

SEQ ID NO: 3443710 - RNA, 19 nt, Human
cgggcaccuauagucccag

SEQ ID NO: 3443711 - RNA, 12 nt, Human
cgggcagagcac

SEQ ID NO: 3443712 - RNA, 23 nt, Human
cgggcagagggcuggaggcccag

SEQ ID NO: 3443713 - RNA, 14 nt, Human
cgggcagccuggcu

SEQ ID NO: 3443714 - RNA, 18 nt, Human
cgggcagccuggcuccca

SEQ ID NO: 3443715 - RNA, 11 nt, Human
cgggcagggcc

SEQ ID NO: 3443716 - RNA, 17 nt, Human
cgggcagggcucccaca

SEQ ID NO: 3443717 - RNA, 17 nt, Human
cgggcaugggcacuccc

SEQ ID NO: 3443718 - RNA, 12 nt, Human
cgggccacagag

SEQ ID NO: 3443719 - RNA, 17 nt, Human
cgggccacagagaaagu

SEQ ID NO: 3443720 - RNA, 20 nt, Human
cgggccacuccuuccugccc

SEQ ID NO: 3443721 - RNA, 13 nt, Human
cgggccagccagg

SEQ ID NO: 3443722 - RNA, 15 nt, Human
cgggccagccaggcg

SEQ ID NO: 3443723 - RNA, 16 nt, Human
cgggcccaccuggcca

SEQ ID NO: 3443724 - RNA, 14 nt, Human
cgggcccagcacuu

SEQ ID NO: 3443725 - RNA, 12 nt, Human
cgggcccagccc

SEQ ID NO: 3443726 - RNA, 15 nt, Human
cgggcccagccccca

SEQ ID NO: 3443727 - RNA, 15 nt, Human
cgggcccaggccauc

SEQ ID NO: 3443728 - RNA, 21 nt, Human
cgggccccaccugcagcuccc

SEQ ID NO: 3443729 - RNA, 15 nt, Human
cgggccccugggcuu

SEQ ID NO: 3443730 - RNA, 23 nt, Human
cgggccccugggcuuggccugcu

SEQ ID NO: 3443731 - RNA, 18 nt, Human
cgggcccguugaggauga

SEQ ID NO: 3443732 - RNA, 20 nt, Human
cgggccuguacagucugucu

SEQ ID NO: 3443733 - RNA, 22 nt, Human
cgggccuguccacaggcuucug

SEQ ID NO: 3443734 - RNA, 16 nt, Human
cgggcgcggccagccc

SEQ ID NO: 3443735 - RNA, 16 nt, Human
cgggcgcgguggcuca

SEQ ID NO: 3443736 - RNA, 21 nt, Human
cgggcggucagggguucgaga

SEQ ID NO: 3443737 - RNA, 11 nt, Human
cgggcucagca

SEQ ID NO: 3443738 - RNA, 18 nt, Human
cgggcuccagccaucuca

SEQ ID NO: 3443739 - RNA, 17 nt, Human
cgggcuccugugcccuu

SEQ ID NO: 3443740 - RNA, 12 nt, Human
cgggcucugccu

SEQ ID NO: 3443741 - RNA, 16 nt, Human
cgggcucugccuccca

SEQ ID NO: 3443742 - RNA, 16 nt, Human
cgggcugccugggcug

SEQ ID NO: 3443743 - RNA, 17 nt, Human
cgggcuggccugugccu

SEQ ID NO: 3443744 - RNA, 14 nt, Human
cgggcugggcagcu

SEQ ID NO: 3443745 - RNA, 17 nt, Human
cgggcugggcagcuguu

SEQ ID NO: 3443746 - RNA, 20 nt, Human
cgggcuuugugugaaggcag

SEQ ID NO: 3443747 - RNA, 15 nt, Human
cgggcuuuuccccgg

SEQ ID NO: 3443748 - RNA, 15 nt, Human
cggggaacuggccaa

SEQ ID NO: 3443749 - RNA, 17 nt, Human
cggggaacuggccaagc

SEQ ID NO: 3443750 - RNA, 16 nt, Human
cggggacagaggccug

SEQ ID NO: 3443751 - RNA, 17 nt, Human
cggggacagaggccugc

SEQ ID NO: 3443752 - RNA, 13 nt, Human
cggggacagcucc

SEQ ID NO: 3443753 - RNA, 14 nt, Human
cggggacucagccc

SEQ ID NO: 3443754 - RNA, 18 nt, Human
cggggagcgcccgcgccc

SEQ ID NO: 3443755 - RNA, 23 nt, Human
cggggagcggcggaaagccugua

SEQ ID NO: 3443756 - RNA, 13 nt, Human
cggggaggccaag

SEQ ID NO: 3443757 - RNA, 18 nt, Human
cguuggacuuuucguuaa

SEQ ID NO: 3443758 - RNA, 23 nt, Human
cguugggagggggagaaaaggaa

SEQ ID NO: 3443759 - RNA, 15 nt, Human
cguugguccagagcg

SEQ ID NO: 3443760 - RNA, 17 nt, Human
cguuuaaaguucugugu

SEQ ID NO: 3443761 - RNA, 20 nt, Human
cguuuacuaugccugugucu

SEQ ID NO: 3443762 - RNA, 15 nt, Human
cguuuacucacagcc

SEQ ID NO: 3443763 - RNA, 16 nt, Human
cguuuagaccaaggaa

SEQ ID NO: 3443764 - RNA, 21 nt, Human
cguuuagaccaaggaacaaaa

SEQ ID NO: 3443765 - RNA, 16 nt, Human
cguuuagcugacaaaa

SEQ ID NO: 3443766 - RNA, 22 nt, Human
cguuucagugucaaauaaacac

SEQ ID NO: 3443767 - RNA, 22 nt, Human
cguuuccaucagguuccauccc

SEQ ID NO: 3443768 - RNA, 20 nt, Human
cguuucuaugacacaugcaa

SEQ ID NO: 3443769 - RNA, 21 nt, Human
cguuucuuuaaccuuguauaa

SEQ ID NO: 3443770 - RNA, 20 nt, Human
cguuugaagacauugcacca

SEQ ID NO: 3443771 - RNA, 16 nt, Human
cguuugagaagaaaac

SEQ ID NO: 3443772 - RNA, 17 nt, Human
cguuuggaagauccugu

SEQ ID NO: 3443773 - RNA, 22 nt, Human
cguuuggaagauccugugagga

SEQ ID NO: 3443774 - RNA, 11 nt, Human
cguuuguguuc

SEQ ID NO: 3443775 - RNA, 20 nt, Human
cguuuguuccccaagacauu

SEQ ID NO: 3443776 - RNA, 13 nt, Human
cguuuguuuguuu

SEQ ID NO: 3443777 - RNA, 16 nt, Human
cguuuuaaggacugac

SEQ ID NO: 3443778 - RNA, 12 nt, Human
cguuuuauugug

SEQ ID NO: 3443779 - RNA, 13 nt, Human
cguuuucaaaauu

SEQ ID NO: 3443780 - RNA, 19 nt, Human
cguuuuccaaacugacuca

SEQ ID NO: 3443781 - RNA, 20 nt, Human
cguuuucuaauugcuuauuu

SEQ ID NO: 3443782 - RNA, 16 nt, Human
cguuuugcaagguaaa

SEQ ID NO: 3443783 - RNA, 11 nt, Human
cguuuugucac

SEQ ID NO: 3443784 - RNA, 14 nt, Human
cguuuuguuugaaa

SEQ ID NO: 3443785 - RNA, 16 nt, Human
cguuuuguuuugugcc

SEQ ID NO: 3443786 - RNA, 18 nt, Human
cuaaaaaaaaaaaaguau

SEQ ID NO: 3443787 - RNA, 20 nt, Human
cuaaaaaaaaaaaaguauua

SEQ ID NO: 3443788 - RNA, 11 nt, Human
cuaaaaaacag

SEQ ID NO: 3443789 - RNA, 15 nt, Human
cuaaaaaagauauau

SEQ ID NO: 3443790 - RNA, 17 nt, Human
cuaaaaacaaacccuuu

SEQ ID NO: 3443791 - RNA, 15 nt, Human
cuaaaaauaaaccaa

SEQ ID NO: 3443792 - RNA, 13 nt, Human
cuaaaaauaaagc

SEQ ID NO: 3443793 - RNA, 18 nt, Human
cuaaaaauaguggccaga

SEQ ID NO: 3443794 - RNA, 12 nt, Human
cuaaaacaauaa

SEQ ID NO: 3443795 - RNA, 15 nt, Human
cuaaaaccugagcua

SEQ ID NO: 3443796 - RNA, 23 nt, Human
cuaaaaccuuccaugucaagauu

SEQ ID NO: 3443797 - RNA, 18 nt, Human
cuaaaacuggccugacuu

SEQ ID NO: 3443798 - RNA, 18 nt, Human
cuaaaacuguacuuugau

SEQ ID NO: 3443799 - RNA, 20 nt, Human
cuaaaacuguacuuugauuc

SEQ ID NO: 3443800 - RNA, 14 nt, Human
cuaaaagaaacuuu

SEQ ID NO: 3443801 - RNA, 18 nt, Human
cuaaaagagauuucaaga

SEQ ID NO: 3443802 - RNA, 17 nt, Human
cuaaaagauauaagugc

SEQ ID NO: 3443803 - RNA, 20 nt, Human
cuaaaagauauaagugcugu

SEQ ID NO: 3443804 - RNA, 21 nt, Human
cuaaaagauauaagugcugua

SEQ ID NO: 3443805 - RNA, 20 nt, Human
cuaaaagcaaaauaaaaacu

SEQ ID NO: 3443806 - RNA, 12 nt, Human
cuaaaagcacac

SEQ ID NO: 3443807 - RNA, 12 nt, Human
cuaaaaggccca

SEQ ID NO: 3443808 - RNA, 18 nt, Human
cuaaaaggcccagagaga

SEQ ID NO: 3443809 - RNA, 23 nt, Human
cuaaaaggcccagagagaagagc

SEQ ID NO: 3443810 - RNA, 16 nt, Human
cuaaaagguucaggga

SEQ ID NO: 3443811 - RNA, 16 nt, Human
cuaaaauaaagaaaua

SEQ ID NO: 3443812 - RNA, 14 nt, Human
cuaaaauaagaaua

SEQ ID NO: 3443813 - RNA, 11 nt, Human
cuaaaauauau

SEQ ID NO: 3443814 - RNA, 10 nt, Human
cuaaaauauu

SEQ ID NO: 3443815 - RNA, 15 nt, Human
cuaaaauauuuauga

SEQ ID NO: 3443816 - RNA, 16 nt, Human
cuaaaauauuuaugaa

SEQ ID NO: 3443817 - RNA, 14 nt, Human
cuaaaauauuuauu

SEQ ID NO: 3443818 - RNA, 15 nt, Human
cuaaaaucugcuugu

SEQ ID NO: 3443819 - RNA, 19 nt, Human
cuaaaaucuuauaguucua

SEQ ID NO: 3443820 - RNA, 14 nt, Human
cuaaaaugauuuua

SEQ ID NO: 3443821 - RNA, 13 nt, Human
cuaaaauguaucu

SEQ ID NO: 3443822 - RNA, 19 nt, Human
cuaaaaugugauguucuaa

SEQ ID NO: 3443823 - RNA, 13 nt, Human
cuaaaauguuuuc

SEQ ID NO: 3443824 - RNA, 21 nt, Human
cuaaaauuuguggguuuuuuu

SEQ ID NO: 3443825 - RNA, 14 nt, Human
cuaaacaagauuuu

SEQ ID NO: 3443826 - RNA, 18 nt, Human
cuaaacacgugacacaaa

SEQ ID NO: 3443827 - RNA, 20 nt, Human
cuaaaccaaggacugagcac

SEQ ID NO: 3443828 - RNA, 15 nt, Human
cuaaaccauugugca

SEQ ID NO: 3443829 - RNA, 16 nt, Human
cuaaacccaauccaaa

SEQ ID NO: 3443830 - RNA, 15 nt, Human
cuaaaccccuguccc

SEQ ID NO: 3443831 - RNA, 16 nt, Human
cuaaaccccuguccca

SEQ ID NO: 3443832 - RNA, 12 nt, Human
cuaaaccucagu

SEQ ID NO: 3443833 - RNA, 17 nt, Human
cuaaaccucaguuauua

SEQ ID NO: 3443834 - RNA, 17 nt, Human
cuaaaccuuaguacuga

SEQ ID NO: 3443835 - RNA, 15 nt, Human
cuaaacggauuccaa

SEQ ID NO: 3443836 - RNA, 15 nt, Human
cuaaacgguucaguu

SEQ ID NO: 3443837 - RNA, 18 nt, Human
cuaaacguguauguuuuu

SEQ ID NO: 3443838 - RNA, 17 nt, Human
cuaaacuaggcuccuuc

SEQ ID NO: 3443839 - RNA, 22 nt, Human
cuaaacucauuuauaaagcuaa

SEQ ID NO: 3443840 - RNA, 14 nt, Human
cuaaacuccuuccu

SEQ ID NO: 3443841 - RNA, 16 nt, Human
cuaaacuccuuccugg

SEQ ID NO: 3443842 - RNA, 23 nt, Human
cuaaacugcccccucugcccugc

SEQ ID NO: 3443843 - RNA, 15 nt, Human
cuaaacuggagacug

SEQ ID NO: 3443844 - RNA, 19 nt, Human
cuaaacuggagacugugug

SEQ ID NO: 3443845 - RNA, 17 nt, Human
cuaaacuuuaauaugua

SEQ ID NO: 3443846 - RNA, 14 nt, Human
cuaaacuuucacac

SEQ ID NO: 3443847 - RNA, 18 nt, Human
cuaaacuuuuuuucugua

SEQ ID NO: 3443848 - RNA, 21 nt, Human
cuaaacuuuuuuucuguacca

SEQ ID NO: 3443849 - RNA, 17 nt, Human
cuaaagaaaaacaaacu

SEQ ID NO: 3443850 - RNA, 18 nt, Human
cuaaagaaaaagucaucc

SEQ ID NO: 3443851 - RNA, 23 nt, Human
cuaaagaccaaacuucacucugg

SEQ ID NO: 3443852 - RNA, 21 nt, Human
cuaaagacccuaaaucugagg

SEQ ID NO: 3443853 - RNA, 18 nt, Human
cuaaagaggcugaaagag

SEQ ID NO: 3443854 - RNA, 21 nt, Human
cuaaagauggaguuucuaagg

SEQ ID NO: 3443855 - RNA, 12 nt, Human
cuaaagauucua

SEQ ID NO: 3443856 - RNA, 13 nt, Human
cuaaagauuuuga

SEQ ID NO: 3443857 - RNA, 17 nt, Human
cuaaagauuuugaucuc

SEQ ID NO: 3443858 - RNA, 16 nt, Human
cuaaagcaauagaaac

SEQ ID NO: 3443859 - RNA, 17 nt, Human
cuaaagcaauagaaaca

SEQ ID NO: 3443860 - RNA, 11 nt, Human
cuaaagcagug

SEQ ID NO: 3443861 - RNA, 11 nt, Human
cuaaagccaaa

SEQ ID NO: 3443862 - RNA, 14 nt, Human
cuaaagccagccug

SEQ ID NO: 3443863 - RNA, 15 nt, Human
cuaaagccagccuga

SEQ ID NO: 3443864 - RNA, 12 nt, Human
cuaaagccuuua

SEQ ID NO: 3443865 - RNA, 12 nt, Human
cuaaagcucuga

SEQ ID NO: 3443866 - RNA, 15 nt, Human
cuaaagcugccagcc

SEQ ID NO: 3443867 - RNA, 18 nt, Human
cuaaagcugguuuaaugu

SEQ ID NO: 3443868 - RNA, 13 nt, Human
cuaaaggccucuu

SEQ ID NO: 3443869 - RNA, 17 nt, Human
cuaaaggcuaccuuugu

SEQ ID NO: 3443870 - RNA, 19 nt, Human
cuaaaggcuaccuuuguau

SEQ ID NO: 3443871 - RNA, 20 nt, Human
cuaaagguccacaggucuag

SEQ ID NO: 3443872 - RNA, 21 nt, Human
cuaaagguccacaggucuaga

SEQ ID NO: 3443873 - RNA, 23 nt, Human
cuaaagguccacaggucuagacu

SEQ ID NO: 3443874 - RNA, 17 nt, Human
cuaaagguguauuuaaa

SEQ ID NO: 3443875 - RNA, 20 nt, Human
cuaaaguacugagcagugau

SEQ ID NO: 3443876 - RNA, 17 nt, Human
cuaaaguagacuucauu

SEQ ID NO: 3443877 - RNA, 15 nt, Human
cuaaagugagcucua

SEQ ID NO: 3443878 - RNA, 14 nt, Human
cuaaaguuauauuu

SEQ ID NO: 3443879 - RNA, 22 nt, Human
cuaaaguuauauuucagaugua

SEQ ID NO: 3443880 - RNA, 11 nt, Human
cuaaaguucua

SEQ ID NO: 3443881 - RNA, 12 nt, Human
cuaaaguucuaa

SEQ ID NO: 3443882 - RNA, 18 nt, Human
cuaaaguucuaagauucu

SEQ ID NO: 3443883 - RNA, 19 nt, Human
cuaaaguuuacaguaaaua

SEQ ID NO: 3443884 - RNA, 17 nt, Human
cuaaauaaaauauaauu

SEQ ID NO: 3443885 - RNA, 18 nt, Human
cuaaauaaaauauaauug

SEQ ID NO: 3443886 - RNA, 22 nt, Human
cuaaauaaaaugcuagguucua

SEQ ID NO: 3443887 - RNA, 24 nt, Human
cuaaauaccugcccugacaugcac

SEQ ID NO: 3443888 - RNA, 21 nt, Human
cuaaauacugagaaaaccugu

SEQ ID NO: 3443889 - RNA, 20 nt, Human
cuaaauagcauguauugugu

SEQ ID NO: 3443890 - RNA, 18 nt, Human
cuaaauauauuuuaagac

SEQ ID NO: 3443891 - RNA, 14 nt, Human
cuaaauauuuccuu

SEQ ID NO: 3443892 - RNA, 19 nt, Human
cuaaaucagagacaaaaua

SEQ ID NO: 3443893 - RNA, 17 nt, Human
cuaaauccauuuggaaa

SEQ ID NO: 3443894 - RNA, 21 nt, Human
cuaaauccuuuacuguuaguc

SEQ ID NO: 3443895 - RNA, 21 nt, Human
cuaaaucuccaaaauaaaacu

SEQ ID NO: 3443896 - RNA, 11 nt, Human
cuuuugcuaaa

SEQ ID NO: 3443897 - RNA, 19 nt, Human
cuuuuggaaccaugccuuc

SEQ ID NO: 3443898 - RNA, 21 nt, Human
cuuuuggauuggacaaaauga

SEQ ID NO: 3443899 - RNA, 15 nt, Human
cuuuuggcuuccaug

SEQ ID NO: 3443900 - RNA, 15 nt, Human
cuuuugggaaaugcu

SEQ ID NO: 3443901 - RNA, 14 nt, Human
cuuuuggucucccu

SEQ ID NO: 3443902 - RNA, 19 nt, Human
cuuuugguguguuggacag

SEQ ID NO: 3443903 - RNA, 23 nt, Human
cuuugguuuuuuucuucuguauu

SEQ ID NO: 3443904 - RNA, 13 nt, Human
cuuuguaaaaauc

SEQ ID NO: 3443905 - RNA, 19 nt, Human
cuuuguaagaguguagaag

SEQ ID NO: 3443906 - RNA, 15 nt, Human
cuaaaucucuaauau

SEQ ID NO: 3443907 - RNA, 13 nt, Human
cuaaaugaagugc

SEQ ID NO: 3443908 - RNA, 12 nt, Human
cuaaaugaaugu

SEQ ID NO: 3443909 - RNA, 15 nt, Human
cuaaaugaauguuua

SEQ ID NO: 3443910 - RNA, 21 nt, Human
cuaaaugcauauccugagcca

SEQ ID NO: 3443911 - RNA, 22 nt, Human
cuaaaugcauauccugagccau

SEQ ID NO: 3443912 - RNA, 18 nt, Human
cuaaaugccuaauaaaca

SEQ ID NO: 3443913 - RNA, 12 nt, Human
cuaaauggccuc

SEQ ID NO: 3443914 - RNA, 13 nt, Human
cuaaauggccuca

SEQ ID NO: 3443915 - RNA, 16 nt, Human
cuaaauggccucaugu

SEQ ID NO: 3443916 - RNA, 17 nt, Human
cuaaauggccucaugug

SEQ ID NO: 3443917 - RNA, 19 nt, Human
cuaaauguaacagucugau

SEQ ID NO: 3443918 - RNA, 15 nt, Human
cuaaauguuaaagau

SEQ ID NO: 3443919 - RNA, 19 nt, Human
cuaaauguuaaagauguag

SEQ ID NO: 3443920 - RNA, 19 nt, Human
cuaaauuacaauugucauu

SEQ ID NO: 3443921 - RNA, 19 nt, Human
cuaaauugacacuuaaaaa

SEQ ID NO: 3443922 - RNA, 15 nt, Human
cuaaauugauguuga

SEQ ID NO: 3443923 - RNA, 16 nt, Human
cuaaauugauguugau

SEQ ID NO: 3443924 - RNA, 14 nt, Human
cuaaauuuaaauuu

SEQ ID NO: 3443925 - RNA, 13 nt, Human
cuaaauuucacua

SEQ ID NO: 3443926 - RNA, 16 nt, Human
cuaaauuugaauguua

SEQ ID NO: 3443927 - RNA, 14 nt, Human
cuaaauuugauacu

SEQ ID NO: 3443928 - RNA, 17 nt, Human
cuaaauuugauacuuau

SEQ ID NO: 3443929 - RNA, 20 nt, Human
cuaaauuugauacuuauauu

SEQ ID NO: 3443930 - RNA, 23 nt, Human
cuaaauuugauacuuauauuuuc

SEQ ID NO: 3443931 - RNA, 13 nt, Human
cuaaauuugggga

SEQ ID NO: 3443932 - RNA, 18 nt, Human
cuaaauuuggggacagau

SEQ ID NO: 3443933 - RNA, 16 nt, Human
cuaaauuuuaaagcca

SEQ ID NO: 3443934 - RNA, 17 nt, Human
cuaaauuuuaaagccau

SEQ ID NO: 3443935 - RNA, 16 nt, Human
cuaaauuuuauaucuu

SEQ ID NO: 3443936 - RNA, 20 nt, Human
cuaacaaaagaugaaagcag

SEQ ID NO: 3443937 - RNA, 23 nt, Human
cuaacaaacagauucuuuuaugu

SEQ ID NO: 3443938 - RNA, 20 nt, Human
cuaacaaaguuuucaugugc

SEQ ID NO: 3443939 - RNA, 13 nt, Human
cuaacaaugacau

SEQ ID NO: 3443940 - RNA, 16 nt, Human
cuaacacagcaugugu

SEQ ID NO: 3443941 - RNA, 19 nt, Human
cuaacacuagucugugugc

SEQ ID NO: 3443942 - RNA, 15 nt, Human
cuaacacuauuuuau

SEQ ID NO: 3443943 - RNA, 16 nt, Human
cuaacacucagaagcc

SEQ ID NO: 3443944 - RNA, 16 nt, Human
cuaacacuuaccccau

SEQ ID NO: 3443945 - RNA, 24 nt, Human
cuaacagcauccccaaaacaaagu

SEQ ID NO: 3443946 - RNA, 14 nt, Human
cuaacagggaaggc

SEQ ID NO: 3443947 - RNA, 16 nt, Human
cuaacagggaaggcag

SEQ ID NO: 3443948 - RNA, 18 nt, Human
cuaacagggaaggcaggc

SEQ ID NO: 3443949 - RNA, 19 nt, Human
cuaacaggggcuggugggc

SEQ ID NO: 3443950 - RNA, 20 nt, Human
cuaacaggggcuggugggca

SEQ ID NO: 3443951 - RNA, 17 nt, Human
cuaacaguucacuugca

SEQ ID NO: 3443952 - RNA, 15 nt, Human
cuaacaugauuuggg

SEQ ID NO: 3443953 - RNA, 17 nt, Human
cuaacaugcccuguuca

SEQ ID NO: 3443954 - RNA, 16 nt, Human
cuaacaugguuuaaaa

SEQ ID NO: 3443955 - RNA, 17 nt, Human
cuaacauguccugccua

SEQ ID NO: 3443956 - RNA, 18 nt, Human
cuaacauuauauugcaau

SEQ ID NO: 3443957 - RNA, 21 nt, Human
cuaaccaagcugaguuuccua

SEQ ID NO: 3443958 - RNA, 12 nt, Human
cuaaccacgcug

SEQ ID NO: 3443959 - RNA, 14 nt, Human
cuaaccacgcugga

SEQ ID NO: 3443960 - RNA, 17 nt, Human
cuaaccagcagaaaugc

SEQ ID NO: 3443961 - RNA, 21 nt, Human
cuaaccagggaagcugucccu

SEQ ID NO: 3443962 - RNA, 17 nt, Human
cuaaccccaacgcacag

SEQ ID NO: 3443963 - RNA, 15 nt, Human
cuaaccccaggcccc

SEQ ID NO: 3443964 - RNA, 16 nt, Human
cuaaccccuuuccugc

SEQ ID NO: 3443965 - RNA, 21 nt, Human
cuaacccucagaaacacuggg

SEQ ID NO: 3443966 - RNA, 11 nt, Human
cuaaccugacc

SEQ ID NO: 3443967 - RNA, 19 nt, Human
cuaaccugccgagagucca

SEQ ID NO: 3443968 - RNA, 12 nt, Human
cuaaccugugac

SEQ ID NO: 3443969 - RNA, 13 nt, Human
cuaaccugugucu

SEQ ID NO: 3443970 - RNA, 15 nt, Human
cuaaccuuauccugc

SEQ ID NO: 3443971 - RNA, 18 nt, Human
cuaaccuugaaugcugcc

SEQ ID NO: 3443972 - RNA, 13 nt, Human
cuaaccuugccug

SEQ ID NO: 3443973 - RNA, 21 nt, Human
cuaaccuugccugguacagua

SEQ ID NO: 3443974 - RNA, 20 nt, Human
cuaacgaaauaucaaaguca

SEQ ID NO: 3443975 - RNA, 20 nt, Human
cuaacgaaguauccuucagc

SEQ ID NO: 3443976 - RNA, 20 nt, Human
cuaacgacuucagggcaggg

SEQ ID NO: 3443977 - RNA, 12 nt, Human
cuaacgccugag

SEQ ID NO: 3443978 - RNA, 14 nt, Human
cuaacgccugagcc

SEQ ID NO: 3443979 - RNA, 15 nt, Human
cuaacgccugagccc

SEQ ID NO: 3443980 - RNA, 19 nt, Human
cuaacgccugagcccaggg

SEQ ID NO: 3443981 - RNA, 21 nt, Human
cuaacgccugagcccagggag

SEQ ID NO: 3443982 - RNA, 22 nt, Human
cuaacguugagccccuggaggc

SEQ ID NO: 3443983 - RNA, 13 nt, Human
cuaacuaaaacaa

SEQ ID NO: 3443984 - RNA, 20 nt, Human
cuaacuaaaacaaagccacu

SEQ ID NO: 3443985 - RNA, 12 nt, Human
cuaacuaaacuc

SEQ ID NO: 3443986 - RNA, 22 nt, Human
cuaacuagacaccaaaguucua

SEQ ID NO: 3443987 - RNA, 14 nt, Human
cuaacucaaauaca

SEQ ID NO: 3443988 - RNA, 14 nt, Human
cuaacucaccagcc

SEQ ID NO: 3443989 - RNA, 15 nt, Human
cuaacugaagagaca

SEQ ID NO: 3443990 - RNA, 15 nt, Human
cuaacugcauacacu

SEQ ID NO: 3443991 - RNA, 13 nt, Human
cuaacuggaagca

SEQ ID NO: 3443992 - RNA, 10 nt, Human
cuaacuguau

SEQ ID NO: 3443993 - RNA, 12 nt, Human
cuaacuguauau

SEQ ID NO: 3443994 - RNA, 15 nt, Human
cuaacuguauauuug

SEQ ID NO: 3443995 - RNA, 19 nt, Human
cuaacuguauauuuguaug

SEQ ID NO: 3443996 - RNA, 12 nt, Human
cuaacuguaucu

SEQ ID NO: 3443997 - RNA, 19 nt, Human
cuaacuuauuuuauuucca

SEQ ID NO: 3443998 - RNA, 22 nt, Human
cuaacuuauuuuauuuccauca

SEQ ID NO: 3443999 - RNA, 13 nt, Human
cuaacuucuaaaa

SEQ ID NO: 3444000 - RNA, 16 nt, Human
cuaacuugcuuaaaug

SEQ ID NO: 3444001 - RNA, 20 nt, Human
cuaacuugcuuaaaugugaa

SEQ ID NO: 3444002 - RNA, 17 nt, Human
cuaacuuggagccccag

SEQ ID NO: 3444003 - RNA, 14 nt, Human
cuaacuuggagccg

SEQ ID NO: 3444004 - RNA, 15 nt, Human
cuaacuuggcucaca

SEQ ID NO: 3444005 - RNA, 22 nt, Human
cuaacuuuagaagugcauuucu

SEQ ID NO: 3444006 - RNA, 13 nt, Human
cuaacuuuugugu

SEQ ID NO: 3444007 - RNA, 17 nt, Human
cuaacuuuugugugaaa

SEQ ID NO: 3444008 - RNA, 23 nt, Human
cuaagaaaagauacgacuuuauu

SEQ ID NO: 3444009 - RNA, 21 nt, Human
cuaagaaaagauuuuaaucaa

SEQ ID NO: 3444010 - RNA, 12 nt, Human
cuaagaaaauag

SEQ ID NO: 3444011 - RNA, 13 nt, Human
cuaagaaaauaga

SEQ ID NO: 3444012 - RNA, 12 nt, Human
cuaagaaacauu

SEQ ID NO: 3444013 - RNA, 22 nt, Human
cuaagaaacauuuauauugaua

SEQ ID NO: 3444014 - RNA, 17 nt, Human
cuaagaaacccucuguc

SEQ ID NO: 3444015 - RNA, 20 nt, Human
cuaagaaacuuuuguaaaga

SEQ ID NO: 3444016 - RNA, 22 nt, Human
cuaagaaagcccuuaggaagaa

SEQ ID NO: 3444017 - RNA, 20 nt, Human
cuaagaaauaucugugaaau

SEQ ID NO: 3444018 - RNA, 15 nt, Human
cuaagaaauauguga

SEQ ID NO: 3444019 - RNA, 17 nt, Human
cuaagaaauaugugaga

SEQ ID NO: 3444020 - RNA, 15 nt, Human
cuaagaaauauucca

SEQ ID NO: 3444021 - RNA, 17 nt, Human
cuaagaacccauggaaa

SEQ ID NO: 3444022 - RNA, 16 nt, Human
cuaagaagcuucuaau

SEQ ID NO: 3444023 - RNA, 22 nt, Human
cuaagaagcuucuaauaaauua

SEQ ID NO: 3444024 - RNA, 23 nt, Human
cuaagaagcuucuaauaaauuau

SEQ ID NO: 3444025 - RNA, 22 nt, Human
cuaagaaguacauuguuaccuc

SEQ ID NO: 3444026 - RNA, 17 nt, Human
cuaagaauaaacauuug

SEQ ID NO: 3444027 - RNA, 18 nt, Human
cuaagaauaaacauuugu

SEQ ID NO: 3444028 - RNA, 18 nt, Human
cuaagaauaauaaaauca

SEQ ID NO: 3444029 - RNA, 16 nt, Human
cuaagaauacagcuuu

SEQ ID NO: 3444030 - RNA, 17 nt, Human
cuaagaauucaaacugg

SEQ ID NO: 3444031 - RNA, 21 nt, Human
cuaagacaccugaacccucca

SEQ ID NO: 3444032 - RNA, 13 nt, Human
cuaagacauguaa

SEQ ID NO: 3444033 - RNA, 13 nt, Human
cuaagacucaaau

SEQ ID NO: 3444034 - RNA, 22 nt, Human
cuaagacucaaauguucuaagu

SEQ ID NO: 3444035 - RNA, 23 nt, Human
cuaagacuccucggccuggcucc

SEQ ID NO: 3444036 - RNA, 13 nt, Human
cuaagagaaguag

SEQ ID NO: 3444037 - RNA, 19 nt, Human
cuaagagaaguuauuuucu

SEQ ID NO: 3444038 - RNA, 14 nt, Human
cuaagagagagaga

SEQ ID NO: 3444039 - RNA, 13 nt, Human
cuaagagcucccg

SEQ ID NO: 3444040 - RNA, 16 nt, Human
cuaagaggcugcccuc

SEQ ID NO: 3444041 - RNA, 22 nt, Human
cuaagagggagggagggcucca

SEQ ID NO: 3444042 - RNA, 18 nt, Human
cuaagaguugagcucucg

SEQ ID NO: 3444043 - RNA, 21 nt, Human
cuaagaguugagcucucggaa

SEQ ID NO: 3444044 - RNA, 17 nt, Human
cuaagaucgguuaacaa

SEQ ID NO: 3444045 - RNA, 21 nt, Human
cuaagaucgguuaacaaauaa

SEQ ID NO: 3444046 - RNA, 20 nt, Human
cuaagaucuuagauucucug

SEQ ID NO: 3444047 - RNA, 12 nt, Human
cuaagaugacau

SEQ ID NO: 3444048 - RNA, 19 nt, Human
cuaagaugacauugcuaag

SEQ ID NO: 3444049 - RNA, 14 nt, Human
gaaaacguuuuauu

SEQ ID NO: 3444050 - RNA, 16 nt, Human
gaaaacguuuuauugu

SEQ ID NO: 3444051 - RNA, 12 nt, Human
gaaaacuaaguu

SEQ ID NO: 3444052 - RNA, 14 nt, Human
gaaaacuacauuuu

SEQ ID NO: 3444053 - RNA, 20 nt, Human
gaaaacuagagcucuaagcc

SEQ ID NO: 3444054 - RNA, 13 nt, Human
gaaaacucuauuu

SEQ ID NO: 3444055 - RNA, 12 nt, Human
gaaaacuuaguu

SEQ ID NO: 3444056 - RNA, 10 nt, Human
gaaaacuuca

SEQ ID NO: 3444057 - RNA, 18 nt, Human
gaaaacuuguauuaugug

SEQ ID NO: 3444058 - RNA, 12 nt, Human
gaaaacuuuaaa

SEQ ID NO: 3444059 - RNA, 13 nt, Human
gaaaacuuuaaaa

SEQ ID NO: 3444060 - RNA, 19 nt, Human
gaaaacuuuaaaaaauauu

SEQ ID NO: 3444061 - RNA, 18 nt, Human
gaaaacuuuguuaggcca

SEQ ID NO: 3444062 - RNA, 15 nt, Human
gaaaacuuuucucag

SEQ ID NO: 3444063 - RNA, 17 nt, Human
gaaaacuuuucucagau

SEQ ID NO: 3444064 - RNA, 10 nt, Human
gaaaagaaaa

SEQ ID NO: 3444065 - RNA, 19 nt, Human
gaaaagaaaaaaaaagaaa

SEQ ID NO: 3444066 - RNA, 20 nt, Human
gaaaagaaaaaaaaagaaaa

SEQ ID NO: 3444067 - RNA, 18 nt, Human
gaaaagaaaaaugagccu

SEQ ID NO: 3444068 - RNA, 15 nt, Human
gaaaagaaagcuaca

SEQ ID NO: 3444069 - RNA, 14 nt, Human
gaaaagaaauaaua

SEQ ID NO: 3444070 - RNA, 21 nt, Human
gaaaagaaaucuauagaaagu

SEQ ID NO: 3444071 - RNA, 19 nt, Human
gaaaagaauacagaaagau

SEQ ID NO: 3444072 - RNA, 14 nt, Human
gaaaagacuccaaa

SEQ ID NO: 3444073 - RNA, 16 nt, Human
gaaaagacuccaaaga

SEQ ID NO: 3444074 - RNA, 17 nt, Human
gaaaagacuccaaagaa

SEQ ID NO: 3444075 - RNA, 20 nt, Human
gaaaagacuccaaagaaaug

SEQ ID NO: 3444076 - RNA, 19 nt, Human
gaaaagagaagaagaaaaa

SEQ ID NO: 3444077 - RNA, 17 nt, Human
gaaaagagacaggcagg

SEQ ID NO: 3444078 - RNA, 18 nt, Human
gaaaagagacaggcaggu

SEQ ID NO: 3444079 - RNA, 21 nt, Human
gaaaagagagcagagaauaua

SEQ ID NO: 3444080 - RNA, 19 nt, Human
gaaaagagauauuuuaaaa

SEQ ID NO: 3444081 - RNA, 14 nt, Human
gaaaagagauggcc

SEQ ID NO: 3444082 - RNA, 19 nt, Human
gaaaagaguugggaacuuc

SEQ ID NO: 3444083 - RNA, 20 nt, Human
gaaaagauaaagaccagaaa

SEQ ID NO: 3444084 - RNA, 22 nt, Human
gaaaagauaaagaccagaaauu

SEQ ID NO: 3444085 - RNA, 22 nt, Human
gaaaagaugcacuuugcuuuaa

SEQ ID NO: 3444086 - RNA, 21 nt, Human
gaaaagaugguaucauauauu

SEQ ID NO: 3444087 - RNA, 18 nt, Human
gaaaagauguugugucuu

SEQ ID NO: 3444088 - RNA, 14 nt, Human
gaaaagauuuaagc

SEQ ID NO: 3444089 - RNA, 23 nt, Human
gaaaagauuuuaaucaaguugaa

SEQ ID NO: 3444090 - RNA, 16 nt, Human
gaaaagcaacauucau

SEQ ID NO: 3444091 - RNA, 16 nt, Human
gaaaagcagacauuuu

SEQ ID NO: 3444092 - RNA, 19 nt, Human
gaaaagcagcccuuggcca

SEQ ID NO: 3444093 - RNA, 18 nt, Human
gaaaagcaucagaaagag

SEQ ID NO: 3444094 - RNA, 23 nt, Human
gaaaagcauggcuugaauaagga

SEQ ID NO: 3444095 - RNA, 15 nt, Human
gaaaagccucuguuu

SEQ ID NO: 3444096 - RNA, 13 nt, Human
gaaaagcuaagag

SEQ ID NO: 3444097 - RNA, 23 nt, Human
gaaaagcuagaauugaguguuua

SEQ ID NO: 3444098 - RNA, 22 nt, Human
gaaaagcuaguguaccuccucu

SEQ ID NO: 3444099 - RNA, 17 nt, Human
gaaaagcuauuagccag

SEQ ID NO: 3444100 - RNA, 22 nt, Human
gaaaagcuucuuaauuaauuug

SEQ ID NO: 3444101 - RNA, 22 nt, Human
gaaaagcuuuguuuguucuugu

SEQ ID NO: 3444102 - RNA, 15 nt, Human
gaaaaggaaaagaaa

SEQ ID NO: 3444103 - RNA, 13 nt, Human
gaaaaggaagacu

SEQ ID NO: 3444104 - RNA, 17 nt, Human
gaaaaggagaggaaacu

SEQ ID NO: 3444105 - RNA, 17 nt, Human
gaaaaggccuucuuccc

SEQ ID NO: 3444106 - RNA, 18 nt, Human
gaaaagggaacugaacau

SEQ ID NO: 3444107 - RNA, 21 nt, Human
gaaaagggucuugggaaauau

SEQ ID NO: 3444108 - RNA, 18 nt, Human
gaaauaacagaagaaaau

SEQ ID NO: 3444109 - RNA, 15 nt, Human
gaaauaagcuauuug

SEQ ID NO: 3444110 - RNA, 18 nt, Human
gaaauaagcuauuugaug

SEQ ID NO: 3444111 - RNA, 20 nt, Human
gaaauaagcuauuugaugua

SEQ ID NO: 3444112 - RNA, 13 nt, Human
gaaauaauaaaaa

SEQ ID NO: 3444113 - RNA, 19 nt, Human
gaaauaauaaaaaauuuca

SEQ ID NO: 3444114 - RNA, 17 nt, Human
gaaauaauaaaucuggu

SEQ ID NO: 3444115 - RNA, 16 nt, Human
gaaauaauagaaaugu

SEQ ID NO: 3444116 - RNA, 18 nt, Human
gaaauaauagaaugagca

SEQ ID NO: 3444117 - RNA, 14 nt, Human
gaaauaauaugcau

SEQ ID NO: 3444118 - RNA, 14 nt, Human
gaaauaaugcuaca

SEQ ID NO: 3444119 - RNA, 15 nt, Human
gaaauaauuguuguu

SEQ ID NO: 3444120 - RNA, 19 nt, Human
gaaauaauuguuguucugu

SEQ ID NO: 3444121 - RNA, 14 nt, Human
gaaauacaaaaaua

SEQ ID NO: 3444122 - RNA, 21 nt, Human
gaaauacaauucuacauuguc

SEQ ID NO: 3444123 - RNA, 17 nt, Human
gaaauacauauuuccaa

SEQ ID NO: 3444124 - RNA, 23 nt, Human
gaaauaccucauguuuaugaaaa

SEQ ID NO: 3444125 - RNA, 20 nt, Human
gaaauacgccagaacugcuu

SEQ ID NO: 3444126 - RNA, 16 nt, Human
gaaauacuacuccugu

SEQ ID NO: 3444127 - RNA, 18 nt, Human
gaaauacugcaagaaaau

SEQ ID NO: 3444128 - RNA, 13 nt, Human
gaaauagacaaaa

SEQ ID NO: 3444129 - RNA, 19 nt, Human
gaaauagacaguauauuua

SEQ ID NO: 3444130 - RNA, 15 nt, Human
gaaauagccaaucau

SEQ ID NO: 3444131 - RNA, 15 nt, Human
gaaauagcuuaugaa

SEQ ID NO: 3444132 - RNA, 21 nt, Human
gaaauagcuuaugaaaagaau

SEQ ID NO: 3444133 - RNA, 17 nt, Human
gaaauaguucugugacu

SEQ ID NO: 3444134 - RNA, 14 nt, Human
gaaauauaauaaaa

SEQ ID NO: 3444135 - RNA, 20 nt, Human
gaaauauaauaaaauguguu

SEQ ID NO: 3444136 - RNA, 17 nt, Human
gaaauauacacacagca

SEQ ID NO: 3444137 - RNA, 20 nt, Human
gaaauauauacgaacaaaac

SEQ ID NO: 3444138 - RNA, 22 nt, Human
gaaauauauacgaacaaaacac

SEQ ID NO: 3444139 - RNA, 11 nt, Human
gaaauauauau

SEQ ID NO: 3444140 - RNA, 14 nt, Human
gaaauauauauaca

SEQ ID NO: 3444141 - RNA, 21 nt, Human
gaaauauauauacauauguag

SEQ ID NO: 3444142 - RNA, 17 nt, Human
gaaauauauaugugugu

SEQ ID NO: 3444143 - RNA, 14 nt, Human
gaaauauauauuau

SEQ ID NO: 3444144 - RNA, 20 nt, Human
gaaauauauggucuaauguu

SEQ ID NO: 3444145 - RNA, 22 nt, Human
gaaauauauggucuaauguuua

SEQ ID NO: 3444146 - RNA, 20 nt, Human
gaaauauauuacuuaacugu

SEQ ID NO: 3444147 - RNA, 23 nt, Human
gaaauaucaaagucauuaaagac

SEQ ID NO: 3444148 - RNA, 15 nt, Human
gaaauaucaucacgu

SEQ ID NO: 3444149 - RNA, 12 nt, Human
gaaauaucauuu

SEQ ID NO: 3444150 - RNA, 14 nt, Human
gaaauaucauuuau

SEQ ID NO: 3444151 - RNA, 18 nt, Human
gaaauaucccgggggugg

SEQ ID NO: 3444152 - RNA, 20 nt, Human
gaaauaucccgggggugggg

SEQ ID NO: 3444153 - RNA, 18 nt, Human
gaaauaucugaaaaugua

SEQ ID NO: 3444154 - RNA, 20 nt, Human
gaaauaucugaaaauguaug

SEQ ID NO: 3444155 - RNA, 14 nt, Human
gaaauaucuguauu

SEQ ID NO: 3444156 - RNA, 18 nt, Human
gaaauaucugugaaauau

SEQ ID NO: 3444157 - RNA, 21 nt, Human
gaaauaucugugaaauaucau

SEQ ID NO: 3444158 - RNA, 20 nt, Human
gaaauaugaagaacugagga

SEQ ID NO: 3444159 - RNA, 17 nt, Human
gaaauaugcacaauagc

SEQ ID NO: 3444160 - RNA, 14 nt, Human
gaaauaugcucuuu

SEQ ID NO: 3444161 - RNA, 15 nt, Human
gaaauaugugagauu

SEQ ID NO: 3444162 - RNA, 19 nt, Human
gaaauauuaaacccuggau

SEQ ID NO: 3444163 - RNA, 22 nt, Human
gaaauauuaagcauguuuuguu

SEQ ID NO: 3444164 - RNA, 15 nt, Human
gaaauauuaugcaaa

SEQ ID NO: 3444165 - RNA, 18 nt, Human
gaaauauuaugcaaauuc

SEQ ID NO: 3444166 - RNA, 19 nt, Human
gaaauauuaugcaaauucc

SEQ ID NO: 3444167 - RNA, 22 nt, Human
gaaauauuaugcaaauucccag

SEQ ID NO: 3444168 - RNA, 23 nt, Human
gaaauauuaugcaaauucccaga

SEQ ID NO: 3444169 - RNA, 13 nt, Human
gaaauauuuauuu

SEQ ID NO: 3444170 - RNA, 17 nt, Human
gaaauauuuauuuuaau

SEQ ID NO: 3444171 - RNA, 22 nt, Human
gaaauauuuuaauuuuuaaaug

SEQ ID NO: 3444172 - RNA, 20 nt, Human
gaaauauuuugauaauaaau

SEQ ID NO: 3444173 - RNA, 12 nt, Human
gaaaucaaagug

SEQ ID NO: 3444174 - RNA, 16 nt, Human
gaaaucaaagugcuau

SEQ ID NO: 3444175 - RNA, 17 nt, Human
gaaaucaaagugcuauu

SEQ ID NO: 3444176 - RNA, 16 nt, Human
gaaaucaaauguaaag

SEQ ID NO: 3444177 - RNA, 23 nt, Human
gaaaucaagucaucuauaguuga

SEQ ID NO: 3444178 - RNA, 20 nt, Human
gaaaucagccaaguuuuaua

SEQ ID NO: 3444179 - RNA, 16 nt, Human
gaaaucaguaaacacu

SEQ ID NO: 3444180 - RNA, 19 nt, Human
gaaaucaguaaacacugug

SEQ ID NO: 3444181 - RNA, 20 nt, Human
gaaaucaguaauauuuauau

SEQ ID NO: 3444182 - RNA, 12 nt, Human
gaaaucauguua

SEQ ID NO: 3444183 - RNA, 21 nt, Human
gaaaucauguuaugauaaaaa

SEQ ID NO: 3444184 - RNA, 22 nt, Human
gaaaucccuguuuaauauuuaa

SEQ ID NO: 3444185 - RNA, 23 nt, Human
gaaaucccuguuuaauauuuaaa

SEQ ID NO: 3444186 - RNA, 13 nt, Human
gaaaucccuucau

SEQ ID NO: 3444187 - RNA, 17 nt, Human
gaaauccggagaagcug

SEQ ID NO: 3444188 - RNA, 23 nt, Human
gaaauccuaguuuccucuccuuc

SEQ ID NO: 3444189 - RNA, 15 nt, Human
gaaauccugguuccu

SEQ ID NO: 3444190 - RNA, 18 nt, Human
gaaaucuaggaaaauuau

SEQ ID NO: 3444191 - RNA, 20 nt, Human
gaaaucuaugauuccaggug

SEQ ID NO: 3444192 - RNA, 20 nt, Human
gaaaucuccuuuagccauca

SEQ ID NO: 3444193 - RNA, 19 nt, Human
gaacaaguuguuucauuga

SEQ ID NO: 3444194 - RNA, 17 nt, Human
gaacaauagguaaagcu

SEQ ID NO: 3444195 - RNA, 17 nt, Human
gaacaauugaaguaaac

SEQ ID NO: 3444196 - RNA, 15 nt, Human
gaacaauuuggcaau

SEQ ID NO: 3444197 - RNA, 19 nt, Human
gaacaauuuggcaauuuug

SEQ ID NO: 3444198 - RNA, 14 nt, Human
gaacacacuguguc

SEQ ID NO: 3444199 - RNA, 16 nt, Human
gaacacacuguguccu

SEQ ID NO: 3444200 - RNA, 13 nt, Human
gaacacaggcagc

SEQ ID NO: 3444201 - RNA, 16 nt, Human
gaacacaggcagcuuu

SEQ ID NO: 3444202 - RNA, 15 nt, Human
gaacacaguauuuuc

SEQ ID NO: 3444203 - RNA, 18 nt, Human
gaacaccaagacuugaag

SEQ ID NO: 3444204 - RNA, 21 nt, Human
gaacaccagagaccucaaauu

SEQ ID NO: 3444205 - RNA, 20 nt, Human
gaacaccauugaaggcuuaa

SEQ ID NO: 3444206 - RNA, 13 nt, Human
gaacacccuuaga

SEQ ID NO: 3444207 - RNA, 21 nt, Human
gaacaccuaugcaaagaugaa

SEQ ID NO: 3444208 - RNA, 16 nt, Human
gaacacgcguauuuac

SEQ ID NO: 3444209 - RNA, 14 nt, Human
gaacacggccacau

SEQ ID NO: 3444210 - RNA, 16 nt, Human
gaacacuaaccugacc

SEQ ID NO: 3444211 - RNA, 19 nt, Human
gaacacuaacucaccagcc

SEQ ID NO: 3444212 - RNA, 18 nt, Human
gaacacuaauucauaauc

SEQ ID NO: 3444213 - RNA, 15 nt, Human
gaacacuagacaagc

SEQ ID NO: 3444214 - RNA, 16 nt, Human
gaacacuauuuucaga

SEQ ID NO: 3444215 - RNA, 16 nt, Human
gaacacucaugcugaa

SEQ ID NO: 3444216 - RNA, 17 nt, Human
gaacacucaugcugaaa

SEQ ID NO: 3444217 - RNA, 20 nt, Human
gaacacuccaauuaaggauu

SEQ ID NO: 3444218 - RNA, 15 nt, Human
gaacacucuauaaca

SEQ ID NO: 3444219 - RNA, 23 nt, Human
gaacacugcacucuuaagcuucc

SEQ ID NO: 3444220 - RNA, 21 nt, Human
gaacacugcccucgcacggcc

SEQ ID NO: 3444221 - RNA, 23 nt, Human
gaacacuggggacuuggccucuc

SEQ ID NO: 3444222 - RNA, 14 nt, Human
gaacagaaaacaac

SEQ ID NO: 3444223 - RNA, 17 nt, Human
gaacagaaaacaacaaa

SEQ ID NO: 3444224 - RNA, 13 nt, Human
gaacagaaauacc

SEQ ID NO: 3444225 - RNA, 12 nt, Human
gaacagaaauug

SEQ ID NO: 3444226 - RNA, 23 nt, Human
gaacagaacauagacagaagaaa

SEQ ID NO: 3444227 - RNA, 22 nt, Human
gaacagaacucgguguccccac

SEQ ID NO: 3444228 - RNA, 14 nt, Human
gaacagaaggauga

SEQ ID NO: 3444229 - RNA, 17 nt, Human
gaacagacaggagaaau

SEQ ID NO: 3444230 - RNA, 18 nt, Human
gaacagauaaucccugua

SEQ ID NO: 3444231 - RNA, 20 nt, Human
gaacagaugaccccugccca

SEQ ID NO: 3444232 - RNA, 21 nt, Human
gaacagcagacucagcucuga

SEQ ID NO: 3444233 - RNA, 13 nt, Human
gaacagcaggccc

SEQ ID NO: 3444234 - RNA, 16 nt, Human
gaacagcauggcacuc

SEQ ID NO: 3444235 - RNA, 12 nt, Human
gaacagcuggug

SEQ ID NO: 3444236 - RNA, 20 nt, Human
gaacagcugguguagcuaca

SEQ ID NO: 3444237 - RNA, 15 nt, Human
gaacagcuguaaucu

SEQ ID NO: 3444238 - RNA, 17 nt, Human
gaacagcuguugacucu

SEQ ID NO: 3444239 - RNA, 22 nt, Human
gaacagcuguugacucuaguac

SEQ ID NO: 3444240 - RNA, 17 nt, Human
gaacagcuucagguuau

SEQ ID NO: 3444241 - RNA, 15 nt, Human
gaacaggaaaagaaa

SEQ ID NO: 3444242 - RNA, 15 nt, Human
gaacagguguuuuuc

SEQ ID NO: 3444243 - RNA, 12 nt, Human
gaacaguaaaca

SEQ ID NO: 3444244 - RNA, 22 nt, Human
gaacaguaacauagcugugauu

SEQ ID NO: 3444245 - RNA, 13 nt, Human
gaacagucucuug

SEQ ID NO: 3444246 - RNA, 20 nt, Human
gaacagugauuaccagggac

SEQ ID NO: 3444247 - RNA, 19 nt, Human
gaacagugauuuuuuuuua

SEQ ID NO: 3444248 - RNA, 21 nt, Human
gaacagugguggcaacauuca

SEQ ID NO: 3444249 - RNA, 14 nt, Human
gaacaguguuuccc

SEQ ID NO: 3444250 - RNA, 18 nt, Human
gaacaguguuucccauaa

SEQ ID NO: 3444251 - RNA, 17 nt, Human
gaacaguuuaugcagug

SEQ ID NO: 3444252 - RNA, 16 nt, Human
gaacauaaaaaggaca

SEQ ID NO: 3444253 - RNA, 22 nt, Human
gaacauaaaaaggacaucagca

SEQ ID NO: 3444254 - RNA, 15 nt, Human
gaacauaaagcaaau

SEQ ID NO: 3444255 - RNA, 22 nt, Human
gaacauaucuuagauggggagc

SEQ ID NO: 3444256 - RNA, 17 nt, Human
gaacaucacauuccucu

SEQ ID NO: 3444257 - RNA, 23 nt, Human
gaacaucaccgacgcgucuccug

SEQ ID NO: 3444258 - RNA, 20 nt, Human
gaacaucaucaaggcacugc

SEQ ID NO: 3444259 - RNA, 21 nt, Human
gaacaucaucaaggcacugcc

SEQ ID NO: 3444260 - RNA, 23 nt, Human
gaacauccaaggagaaacagaga

SEQ ID NO: 3444261 - RNA, 17 nt, Human
gaacaucccuuuuucaa

SEQ ID NO: 3444262 - RNA, 13 nt, Human
gaacauccuuccu

SEQ ID NO: 3444263 - RNA, 20 nt, Human
gaacaucuuugacacucugc

SEQ ID NO: 3444264 - RNA, 14 nt, Human
gaacaugaaucaaa

SEQ ID NO: 3444265 - RNA, 12 nt, Human
gaacaugcaguu

SEQ ID NO: 3444266 - RNA, 13 nt, Human
gaacaugcaguuu

SEQ ID NO: 3444267 - RNA, 14 nt, Human
gaacaugcccccug

SEQ ID NO: 3444268 - RNA, 22 nt, Human
gaacauggacuuguauauuugu

SEQ ID NO: 3444269 - RNA, 16 nt, Human
gaacauguacacuggu

SEQ ID NO: 3444270 - RNA, 19 nt, Human
gaacaugugagagguuuga

SEQ ID NO: 3444271 - RNA, 17 nt, Human
gaacauguggcuugaau

SEQ ID NO: 3444272 - RNA, 21 nt, Human
cuacucagaagccugaggcug

SEQ ID NO: 3444273 - RNA, 15 nt, Human
cuacucagcagcccu

SEQ ID NO: 3444274 - RNA, 17 nt, Human
cuacucagcagcccucc

SEQ ID NO: 3444275 - RNA, 19 nt, Human
cuacucagcagcccuccuc

SEQ ID NO: 3444276 - RNA, 21 nt, Human
cuacucagcagcccuccucac

SEQ ID NO: 3444277 - RNA, 13 nt, Human
cuacucaggaggc

SEQ ID NO: 3444278 - RNA, 15 nt, Human
cuacucccagacacc

SEQ ID NO: 3444279 - RNA, 23 nt, Human
cuacuccggaggcugaggcagga

SEQ ID NO: 3444280 - RNA, 18 nt, Human
cuacuccuaccucagccu

SEQ ID NO: 3444281 - RNA, 21 nt, Human
cuacuccuaccucagccuaga

SEQ ID NO: 3444282 - RNA, 15 nt, Human
cuacuccucugcagu

SEQ ID NO: 3444283 - RNA, 11 nt, Human
cuacuccugac

SEQ ID NO: 3444284 - RNA, 13 nt, Human
cuacuccugacuc

SEQ ID NO: 3444285 - RNA, 14 nt, Human
cuacuccugucuuc

SEQ ID NO: 3444286 - RNA, 21 nt, Human
cuacuccugucuucugcuuug

SEQ ID NO: 3444287 - RNA, 22 nt, Human
cuacuccugucuucugcuuugu

SEQ ID NO: 3444288 - RNA, 17 nt, Human
cuacucuccccacgagg

SEQ ID NO: 3444289 - RNA, 19 nt, Human
cuacucuccccacgagggc

SEQ ID NO: 3444290 - RNA, 20 nt, Human
cuacucuccccacgagggcu

SEQ ID NO: 3444291 - RNA, 19 nt, Human
cuacucuguuccuucacau

SEQ ID NO: 3444292 - RNA, 17 nt, Human
cuacucuuaagccaucu

SEQ ID NO: 3444293 - RNA, 18 nt, Human
cuacugaaacagauuuca

SEQ ID NO: 3444294 - RNA, 22 nt, Human
cuacugaaacagauuucauacc

SEQ ID NO: 3444295 - RNA, 15 nt, Human
cuacugaaugucauu

SEQ ID NO: 3444296 - RNA, 20 nt, Human
cuacugacauguggggccag

SEQ ID NO: 3444297 - RNA, 17 nt, Human
cuacugauaaagaaaga

SEQ ID NO: 3444298 - RNA, 16 nt, Human
cuacugauuguuucau

SEQ ID NO: 3444299 - RNA, 17 nt, Human
cuacugauuguuucauu

SEQ ID NO: 3444300 - RNA, 16 nt, Human
cuacugauuuuuguga

SEQ ID NO: 3444301 - RNA, 17 nt, Human
cuacugcacuccagccu

SEQ ID NO: 3444302 - RNA, 19 nt, Human
cuacugcacuccagccugg

SEQ ID NO: 3444303 - RNA, 18 nt, Human
cuacugcagcaccuccag

SEQ ID NO: 3444304 - RNA, 14 nt, Human
cuacugcagcuuua

SEQ ID NO: 3444305 - RNA, 15 nt, Human
cuacugcccaggcac

SEQ ID NO: 3444306 - RNA, 11 nt, Human
cuacugcugug

SEQ ID NO: 3444307 - RNA, 16 nt, Human
cuacuggauucuuauu

SEQ ID NO: 3444308 - RNA, 17 nt, Human
cuacuggcauaguuuca

SEQ ID NO: 3444309 - RNA, 18 nt, Human
cuacuggcauaguuucau

SEQ ID NO: 3444310 - RNA, 14 nt, Human
cuacugggaaggcu

SEQ ID NO: 3444311 - RNA, 14 nt, Human
cuacugggagccua

SEQ ID NO: 3444312 - RNA, 15 nt, Human
cuacugggagccuac

SEQ ID NO: 3444313 - RNA, 18 nt, Human
cuacugggagccuaccca

SEQ ID NO: 3444314 - RNA, 15 nt, Human
cuacuggggaaacug

SEQ ID NO: 3444315 - RNA, 17 nt, Human
cuacuggggaaacuggc

SEQ ID NO: 3444316 - RNA, 19 nt, Human
cuacuggggaaacuggcca

SEQ ID NO: 3444317 - RNA, 20 nt, Human
cuacuggggaaacuggccau

SEQ ID NO: 3444318 - RNA, 19 nt, Human
cuacugggugucauuucau

SEQ ID NO: 3444319 - RNA, 17 nt, Human
cuacuggucuuguggaa

SEQ ID NO: 3444320 - RNA, 21 nt, Human
cuacuguaagcaagaaaaaua

SEQ ID NO: 3444321 - RNA, 21 nt, Human
cuacuguaauuugugauacaa

SEQ ID NO: 3444322 - RNA, 17 nt, Human
cuacuguggaaaaauau

SEQ ID NO: 3444323 - RNA, 21 nt, Human
cuacuguggaaaaauauuuaa

SEQ ID NO: 3444324 - RNA, 14 nt, Human
cuacuguguuccug

SEQ ID NO: 3444325 - RNA, 22 nt, Human
cuacuguucagcuuuuauuccu

SEQ ID NO: 3444326 - RNA, 18 nt, Human
cuacuguuuaagugaauu

SEQ ID NO: 3444327 - RNA, 22 nt, Human
cuacuuaauuccuuucucaucc

SEQ ID NO: 3444328 - RNA, 19 nt, Human
cuacuuaccauaugugcuu

SEQ ID NO: 3444329 - RNA, 12 nt, Human
cuacuuagcauc

SEQ ID NO: 3444330 - RNA, 19 nt, Human
cuacuuagcauccuaagaa

SEQ ID NO: 3444331 - RNA, 23 nt, Human
cuacuuagcauccuaagaaauau

SEQ ID NO: 3444332 - RNA, 18 nt, Human
cuacuuaugaaaugugca

SEQ ID NO: 3444333 - RNA, 16 nt, Human
cuacuuccaaacuaau

SEQ ID NO: 3444334 - RNA, 22 nt, Human
cuacuuccccauggcccugagc

SEQ ID NO: 3444335 - RNA, 14 nt, Human
cuacuuccccuucc

SEQ ID NO: 3444336 - RNA, 17 nt, Human
cuacuuccuccucccca

SEQ ID NO: 3444337 - RNA, 23 nt, Human
gaagcccagccccuacugcugug

SEQ ID NO: 3444338 - RNA, 15 nt, Human
gaagcccaggaaagg

SEQ ID NO: 3444339 - RNA, 21 nt, Human
gaagcccauccugaccagcug

SEQ ID NO: 3444340 - RNA, 18 nt, Human
gaagccccacauguccag

SEQ ID NO: 3444341 - RNA, 23 nt, Human
gaagccccacauguccagcaccu

SEQ ID NO: 3444342 - RNA, 17 nt, Human
gaagcccccagcuaaga

SEQ ID NO: 3444343 - RNA, 21 nt, Human
gaagcccccagcuaagaaccu

SEQ ID NO: 3444344 - RNA, 18 nt, Human
gaagccccugggcccagu

SEQ ID NO: 3444345 - RNA, 17 nt, Human
gaagcccggcuccuggu

SEQ ID NO: 3444346 - RNA, 21 nt, Human
gaagcccggcuccuggucacc

SEQ ID NO: 3444347 - RNA, 13 nt, Human
gaagcccucccag

SEQ ID NO: 3444348 - RNA, 11 nt, Human
gaagcccuccu

SEQ ID NO: 3444349 - RNA, 12 nt, Human
gaagcccuccuu

SEQ ID NO: 3444350 - RNA, 11 nt, Human
gaagcccugga

SEQ ID NO: 3444351 - RNA, 19 nt, Human
gaagcccuggauuucagaa

SEQ ID NO: 3444352 - RNA, 14 nt, Human
gaagcccuguugug

SEQ ID NO: 3444353 - RNA, 15 nt, Human
gaagcccuucuaccu

SEQ ID NO: 3444354 - RNA, 14 nt, Human
gaagccgacucugg

SEQ ID NO: 3444355 - RNA, 17 nt, Human
gaagccgacucuggccc

SEQ ID NO: 3444356 - RNA, 19 nt, Human
gaagccgacucuggcccug

SEQ ID NO: 3444357 - RNA, 20 nt, Human
gaagccgccaguacuuguca

SEQ ID NO: 3444358 - RNA, 14 nt, Human
gaagccgcuggggc

SEQ ID NO: 3444359 - RNA, 21 nt, Human
gaagccgcuggggccaguugg

SEQ ID NO: 3444360 - RNA, 16 nt, Human
gaagccggaggguguu

SEQ ID NO: 3444361 - RNA, 22 nt, Human
gaagccguccuggcgccuggca

SEQ ID NO: 3444362 - RNA, 17 nt, Human
gaagccgugcccugccc

SEQ ID NO: 3444363 - RNA, 16 nt, Human
gaagccucagauuccu

SEQ ID NO: 3444364 - RNA, 20 nt, Human
gaagccucagauuccuuccc

SEQ ID NO: 3444365 - RNA, 19 nt, Human
gaagccuccuuagaaaaaa

SEQ ID NO: 3444366 - RNA, 17 nt, Human
gaagccucuggcuagag

SEQ ID NO: 3444367 - RNA, 13 nt, Human
gaagccugaggcu

SEQ ID NO: 3444368 - RNA, 15 nt, Human
gaagccugcuccuuc

SEQ ID NO: 3444369 - RNA, 19 nt, Human
gaagccugggggccuggcu

SEQ ID NO: 3444370 - RNA, 21 nt, Human
gaagccugggggccuggcugg

SEQ ID NO: 3444371 - RNA, 16 nt, Human
gaagccuucaagcucu

SEQ ID NO: 3444372 - RNA, 18 nt, Human
gaagccuucaagcucuga

SEQ ID NO: 3444373 - RNA, 16 nt, Human
gaagcgagcacugacc

SEQ ID NO: 3444374 - RNA, 15 nt, Human
gaagcuaacagggaa

SEQ ID NO: 3444375 - RNA, 17 nt, Human
gaagcuaacagggaagg

SEQ ID NO: 3444376 - RNA, 18 nt, Human
gaagcuaacagggaaggc

SEQ ID NO: 3444377 - RNA, 21 nt, Human
gaagcuaauuauuuuaauuag

SEQ ID NO: 3444378 - RNA, 22 nt, Human
gaagcuaauuauuuuaauuagg

SEQ ID NO: 3444379 - RNA, 15 nt, Human
gaagcuaauuugcau

SEQ ID NO: 3444380 - RNA, 17 nt, Human
gaagcuaauuugcauua

SEQ ID NO: 3444381 - RNA, 15 nt, Human
gaagcuacagguuac

SEQ ID NO: 3444382 - RNA, 22 nt, Human
gaagcuacugugugugugaaug

SEQ ID NO: 3444383 - RNA, 15 nt, Human
gaagcuacuuuguuu

SEQ ID NO: 3444384 - RNA, 21 nt, Human
gaagcuagacacaugaaggua

SEQ ID NO: 3444385 - RNA, 22 nt, Human
gaagcuagacacaugaagguaa

SEQ ID NO: 3444386 - RNA, 23 nt, Human
gaagcuagacacaugaagguaaa

SEQ ID NO: 3444387 - RNA, 14 nt, Human
gaagcuagucuuuu

SEQ ID NO: 3444388 - RNA, 20 nt, Human
gaagcuaucguaaaauuaag

SEQ ID NO: 3444389 - RNA, 22 nt, Human
gaagcucaccuguugcuuacaa

SEQ ID NO: 3444390 - RNA, 14 nt, Human
gaagcucagacugg

SEQ ID NO: 3444391 - RNA, 21 nt, Human
gaagcucagcugcauuccgca

SEQ ID NO: 3444392 - RNA, 16 nt, Human
gaagcucagggccugg

SEQ ID NO: 3444393 - RNA, 18 nt, Human
gaagcucagggccuggcu

SEQ ID NO: 3444394 - RNA, 20 nt, Human
gaagcucagggccuggcuca

SEQ ID NO: 3444395 - RNA, 13 nt, Human
gaagcuccacugu

SEQ ID NO: 3444396 - RNA, 16 nt, Human
gaagcuccacugucac

SEQ ID NO: 3444397 - RNA, 15 nt, Human
gaagcucccaggaac

SEQ ID NO: 3444398 - RNA, 15 nt, Human
gaagcucccccagca

SEQ ID NO: 3444399 - RNA, 19 nt, Human
gaagcuccgcuuucuaccc

SEQ ID NO: 3444400 - RNA, 20 nt, Human
gaagcuccucuccccagccc

SEQ ID NO: 3444401 - RNA, 23 nt, Human
gaagcuccucuccccagcccaga

SEQ ID NO: 3444402 - RNA, 19 nt, Human
gaagcucucgggcuaggaa

SEQ ID NO: 3444403 - RNA, 16 nt, Human
gaagcucugaagucac

SEQ ID NO: 3444404 - RNA, 20 nt, Human
gaagcucuuacucuuuccua

SEQ ID NO: 3444405 - RNA, 22 nt, Human
gaagcugaagugcauccaaagg

SEQ ID NO: 3444406 - RNA, 19 nt, Human
gaagcugagcaccagggga

SEQ ID NO: 3444407 - RNA, 15 nt, Human
gaagcugcagcuugg

SEQ ID NO: 3444408 - RNA, 22 nt, Human
gaagcugccaggugagaaacug

SEQ ID NO: 3444409 - RNA, 14 nt, Human
gaagcugccugcuu

SEQ ID NO: 3444410 - RNA, 14 nt, Human
gaagcugcuccagg

SEQ ID NO: 3444411 - RNA, 11 nt, Human
gaagcugcuga

SEQ ID NO: 3444412 - RNA, 12 nt, Human
gaagcugcugac

SEQ ID NO: 3444413 - RNA, 14 nt, Human
gaagcugcugacca

SEQ ID NO: 3444414 - RNA, 23 nt, Human
gaagcuggccgaggguccuggcu

SEQ ID NO: 3444415 - RNA, 15 nt, Human
gaagcuggccugaga

SEQ ID NO: 3444416 - RNA, 23 nt, Human
gaagcuguaguagcccuuucugu

SEQ ID NO: 3444417 - RNA, 12 nt, Human
gaagcugugucc

SEQ ID NO: 3444418 - RNA, 23 nt, Human
gaagcuguguccuugcaccugca

SEQ ID NO: 3444419 - RNA, 14 nt, Human
gaagcuuauuaaug

SEQ ID NO: 3444420 - RNA, 21 nt, Human
gaagcuuauuaaugcuaaggg

SEQ ID NO: 3444421 - RNA, 22 nt, Human
gaagcuuauuaaugcuaagggc

SEQ ID NO: 3444422 - RNA, 16 nt, Human
gaagcuuccaguccaa

SEQ ID NO: 3444423 - RNA, 13 nt, Human
gaagcuucuaaua

SEQ ID NO: 3444424 - RNA, 21 nt, Human
gaagcuuucucugcuucagcu

SEQ ID NO: 3444425 - RNA, 21 nt, Human
gaagcuuuguccccugcuuca

SEQ ID NO: 3444426 - RNA, 18 nt, Human
gaagcuuuuaugugaaac

SEQ ID NO: 3444427 - RNA, 18 nt, Human
gaaggaaaaggcagggag

SEQ ID NO: 3444428 - RNA, 20 nt, Human
gaaggaaaaggcagggagcg

SEQ ID NO: 3444429 - RNA, 14 nt, Human
gaaggaaaaugaua

SEQ ID NO: 3444430 - RNA, 17 nt, Human
gaaggaaacccagcucu

SEQ ID NO: 3444431 - RNA, 15 nt, Human
gaaggaaagaugcuc

SEQ ID NO: 3444432 - RNA, 15 nt, Human
gaaggaaaugaauuu

SEQ ID NO: 3444433 - RNA, 23 nt, Human
gaaggaaccaaagcgaauuuuaa

SEQ ID NO: 3444434 - RNA, 20 nt, Human
gaaggaacucuggcuuccag

SEQ ID NO: 3444435 - RNA, 23 nt, Human
gaaggaacucuggcuuccaggua

SEQ ID NO: 3444436 - RNA, 21 nt, Human
gaaggaacuugucucuucauc

SEQ ID NO: 3444437 - RNA, 22 nt, Human
gaaggaaggcuccaucuccagu

SEQ ID NO: 3444438 - RNA, 17 nt, Human
gaaggacagaaaggaga

SEQ ID NO: 3444439 - RNA, 16 nt, Human
gaaggaccacauuuua

SEQ ID NO: 3444440 - RNA, 20 nt, Human
gaaggacuaauagaaaagua

SEQ ID NO: 3444441 - RNA, 19 nt, Human
gaaggacugugacaggcag

SEQ ID NO: 3444442 - RNA, 17 nt, Human
gaaggagaaguaagagg

SEQ ID NO: 3444443 - RNA, 15 nt, Human
gaaggagacacagau

SEQ ID NO: 3444444 - RNA, 16 nt, Human
gaaggagacacagaug

SEQ ID NO: 3444445 - RNA, 18 nt, Human
gaaggagacagagcuggu

SEQ ID NO: 3444446 - RNA, 13 nt, Human
gaaggagagaaag

SEQ ID NO: 3444447 - RNA, 21 nt, Human
gaaggagagaaagugggugag

SEQ ID NO: 3444448 - RNA, 20 nt, Human
gaaggagagaaggggaggag

SEQ ID NO: 3444449 - RNA, 16 nt, Human
gaaggagagccugcug

SEQ ID NO: 3444450 - RNA, 18 nt, Human
gaaggagcugccuggacc

SEQ ID NO: 3444451 - RNA, 20 nt, Human
gaaggaggaaugcuggacug

SEQ ID NO: 3444452 - RNA, 13 nt, Human
gaaggaggaccca

SEQ ID NO: 3444453 - RNA, 16 nt, Human
gaaggaggacccagga

SEQ ID NO: 3444454 - RNA, 12 nt, Human
gaaggaggagag

SEQ ID NO: 3444455 - RNA, 20 nt, Human
gaaggaggcuccaggcagca

SEQ ID NO: 3444456 - RNA, 14 nt, Human
gaaggaggggaagc

SEQ ID NO: 3444457 - RNA, 20 nt, Human
gaaggaggggaagcugcagc

SEQ ID NO: 3444458 - RNA, 13 nt, Human
gaaggaggugagg

SEQ ID NO: 3444459 - RNA, 17 nt, Human
gaaggaggugagggaug

SEQ ID NO: 3444460 - RNA, 12 nt, Human
gaaggauacaaa

SEQ ID NO: 3444461 - RNA, 19 nt, Human
gaaggauacaaaagcaugu

SEQ ID NO: 3444462 - RNA, 14 nt, Human
gaaggaugagcauu

SEQ ID NO: 3444463 - RNA, 14 nt, Human
gaaggaugcugucu

SEQ ID NO: 3444464 - RNA, 21 nt, Human
gaaggauucugcuggccucug

SEQ ID NO: 3444465 - RNA, 19 nt, Human
gaaggauuuuuuaaaguuu

SEQ ID NO: 3444466 - RNA, 14 nt, Human
gaaggcaaaugacu

SEQ ID NO: 3444467 - RNA, 14 nt, Human
gaaggcaagagggg

SEQ ID NO: 3444468 - RNA, 16 nt, Human
gaaggcaagagggggu

SEQ ID NO: 3444469 - RNA, 11 nt, Human
gaaggcaagau

SEQ ID NO: 3444470 - RNA, 15 nt, Human
gaaggcagacagcag

SEQ ID NO: 3444471 - RNA, 16 nt, Human
gaaggcagacagcagg

SEQ ID NO: 3444472 - RNA, 17 nt, Human
gaaggcagagaaaggga

SEQ ID NO: 3444473 - RNA, 18 nt, Human
gaaggcagagaaaucuaa

SEQ ID NO: 3444474 - RNA, 17 nt, Human
gaaggcagcagguggca

SEQ ID NO: 3444475 - RNA, 16 nt, Human
gaaggcagccaccagc

SEQ ID NO: 3444476 - RNA, 15 nt, Human
gaaggcaggcagggc

SEQ ID NO: 3444477 - RNA, 21 nt, Human
gaacuuguaaaggaauuuaaa

SEQ ID NO: 3444478 - RNA, 18 nt, Human
gaacuuguagcuguaaaa

SEQ ID NO: 3444479 - RNA, 15 nt, Human
gaacuuguuuucugg

SEQ ID NO: 3444480 - RNA, 14 nt, Human
gaacuuuauuucca

SEQ ID NO: 3444481 - RNA, 12 nt, Human
gaacuuucauuu

SEQ ID NO: 3444482 - RNA, 22 nt, Human
gaagugagggcucacucagcca

SEQ ID NO: 3444483 - RNA, 23 nt, Human
gaagugcaucuggagagaacagg

SEQ ID NO: 3444484 - RNA, 15 nt, Human
gaagugcgugaaugu

SEQ ID NO: 3444485 - RNA, 16 nt, Human
gaagugcgugaaugua

SEQ ID NO: 3444486 - RNA, 21 nt, Human
gaagugcgugaauguauguaa

SEQ ID NO: 3444487 - RNA, 20 nt, Human
gaagugcuggcaaccacuaa

SEQ ID NO: 3444488 - RNA, 18 nt, Human
gaagugcuguuuauuaau

SEQ ID NO: 3444489 - RNA, 21 nt, Human
gaagugcuuaguguacuugga

SEQ ID NO: 3444490 - RNA, 16 nt, Human
gaaguggaccaggaca

SEQ ID NO: 3444491 - RNA, 17 nt, Human
gaagaguggguuucaca

SEQ ID NO: 3444492 - RNA, 18 nt, Human
gaagaguggguuucacaa

SEQ ID NO: 3444493 - RNA, 14 nt, Human
gaagaguguacugg

SEQ ID NO: 3444494 - RNA, 13 nt, Human
gaagagugugugu

SEQ ID NO: 3444495 - RNA, 22 nt, Human
gaagaguugccccgucucuguu

SEQ ID NO: 3444496 - RNA, 21 nt, Human
gaagaguugugcacgcagauu

SEQ ID NO: 3444497 - RNA, 21 nt, Human
gaagauaaguguauuuuucaa

SEQ ID NO: 3444498 - RNA, 20 nt, Human
gaagauaauauuaaggaaga

SEQ ID NO: 3444499 - RNA, 13 nt, Human
gaagauacuuugu

SEQ ID NO: 3444500 - RNA, 13 nt, Human
gaagauaggcucu

SEQ ID NO: 3444501 - RNA, 17 nt, Human
gaagauaggcucugcac

SEQ ID NO: 3444502 - RNA, 21 nt, Human
gaagauagucuuggaagcugu

SEQ ID NO: 3444503 - RNA, 21 nt, Human
gaagauauaacuauugcccag

SEQ ID NO: 3444504 - RNA, 16 nt, Human
gaagaucacgcucccc

SEQ ID NO: 3444505 - RNA, 19 nt, Human
gaagaucacuuugcucuga

SEQ ID NO: 3444506 - RNA, 19 nt, Human
gaagaucauuuugaaauug

SEQ ID NO: 3444507 - RNA, 21 nt, Human
gaagauccagcugccuauuga

SEQ ID NO: 3444508 - RNA, 18 nt, Human
gaagaucccccagaaaag

SEQ ID NO: 3444509 - RNA, 15 nt, Human
gaagauccccucagg

SEQ ID NO: 3444510 - RNA, 20 nt, Human
gaagauccccucaggacugc

SEQ ID NO: 3444511 - RNA, 14 nt, Human
gaagauccugcggg

SEQ ID NO: 3444512 - RNA, 20 nt, Human
gaagauccugugaggagccc

SEQ ID NO: 3444513 - RNA, 18 nt, Human
gaagaucguuaguaucua

SEQ ID NO: 3444514 - RNA, 21 nt, Human
gaagaucuaaauaaaaugcua

SEQ ID NO: 3444515 - RNA, 13 nt, Human
gaagaucuguaau

SEQ ID NO: 3444516 - RNA, 13 nt, Human
gaagaugaaagag

SEQ ID NO: 3444517 - RNA, 15 nt, Human
gaagaugaauggcgu

SEQ ID NO: 3444518 - RNA, 15 nt, Human
gaagaugacuuccca

SEQ ID NO: 3444519 - RNA, 13 nt, Human
gaagaugaucaga

SEQ ID NO: 3444520 - RNA, 21 nt, Human
gaagaugcagcaaaaugugaa

SEQ ID NO: 3444521 - RNA, 18 nt, Human
gaagaugcauuguaguuu

SEQ ID NO: 3444522 - RNA, 16 nt, Human
gaagauggcauccugu

SEQ ID NO: 3444523 - RNA, 21 nt, Human
gaagauguuuaacuuaaucaa

SEQ ID NO: 3444524 - RNA, 18 nt, Human
gaagauuauuuuuuauga

SEQ ID NO: 3444525 - RNA, 21 nt, Human
gaagauucuucccauucucca

SEQ ID NO: 3444526 - RNA, 14 nt, Human
gaagauucuuuccc

SEQ ID NO: 3444527 - RNA, 22 nt, Human
gaagauugagauguguucacaa

SEQ ID NO: 3444528 - RNA, 20 nt, Human
gaagauuugaugcuggagag

SEQ ID NO: 3444529 - RNA, 15 nt, Human
gaagauuuucagucu

SEQ ID NO: 3444530 - RNA, 23 nt, Human
gaagauuuugaaauuuuuauuaa

SEQ ID NO: 3444531 - RNA, 19 nt, Human
gaagcaaaaacgaaagcug

SEQ ID NO: 3444532 - RNA, 21 nt, Human
gaagcaaaaacgaaagcuggg

SEQ ID NO: 3444533 - RNA, 15 nt, Human
gaagcaaauaaauau

SEQ ID NO: 3444534 - RNA, 21 nt, Human
gaagcaaaugucaugcugccu

SEQ ID NO: 3444535 - RNA, 23 nt, Human
gaagcaaaugucaugcugccuua

SEQ ID NO: 3444536 - RNA, 14 nt, Human
gaagcaacauuuua

SEQ ID NO: 3444537 - RNA, 16 nt, Human
gaagcaagcuuaaugg

SEQ ID NO: 3444538 - RNA, 13 nt, Human
gaagcaaggaaga

SEQ ID NO: 3444539 - RNA, 14 nt, Human
gaagcaaggcggug

SEQ ID NO: 3444540 - RNA, 18 nt, Human
gaagcaauaaagaagagu

SEQ ID NO: 3444541 - RNA, 13 nt, Human
gaagcacagcuuc

SEQ ID NO: 3444542 - RNA, 17 nt, Human
gaagcacagugaucaag

SEQ ID NO: 3444543 - RNA, 14 nt, Human
gaagcacaugccuc

SEQ ID NO: 3444544 - RNA, 20 nt, Human
gaagcacaugccucucucag

SEQ ID NO: 3444545 - RNA, 22 nt, Human
gaagcacaugccucucucaggc

SEQ ID NO: 3444546 - RNA, 16 nt, Human
gaagcaccauaacuuu

SEQ ID NO: 3444547 - RNA, 16 nt, Human
gaagcaccccaugcca

SEQ ID NO: 3444548 - RNA, 14 nt, Human
gaagcagaauaaag

SEQ ID NO: 3444549 - RNA, 15 nt, Human
gaagcagaauaaagc

SEQ ID NO: 3444550 - RNA, 17 nt, Human
gaagcagaauaaagcaa

SEQ ID NO: 3444551 - RNA, 18 nt, Human
gaagcagaauaaagcaau

SEQ ID NO: 3444552 - RNA, 22 nt, Human
gaagcagaauaaagcaauuuuc

SEQ ID NO: 3444553 - RNA, 23 nt, Human
gaagcagaccauuggggcuccca

SEQ ID NO: 3444554 - RNA, 14 nt, Human
gaagcagagagaug

SEQ ID NO: 3444555 - RNA, 15 nt, Human
gaagcagagagaugc

SEQ ID NO: 3444556 - RNA, 15 nt, Human
gaagcagaggaagga

SEQ ID NO: 3444557 - RNA, 21 nt, Human
gaagcagaugcaaagaggcaa

SEQ ID NO: 3444558 - RNA, 23 nt, Human
gaagcagaugcaaagaggcaaga

SEQ ID NO: 3444559 - RNA, 18 nt, Human
gaagcagcaacuuguccu

SEQ ID NO: 3444560 - RNA, 13 nt, Human
gaagcagcagccu

SEQ ID NO: 3444561 - RNA, 12 nt, Human
gaagcagccucu

SEQ ID NO: 3444562 - RNA, 15 nt, Human
gaagcagguuaaaug

SEQ ID NO: 3444563 - RNA, 17 nt, Human
gaagcagguuaaauguu

SEQ ID NO: 3444564 - RNA, 23 nt, Human
gaagcagguugaggggcuccugg

SEQ ID NO: 3444565 - RNA, 18 nt, Human
gaagcagugccuuccaua

SEQ ID NO: 3444566 - RNA, 16 nt, Human
gaagcaugaaaaagca

SEQ ID NO: 3444567 - RNA, 17 nt, Human
gaagcauguaggagaau

SEQ ID NO: 3444568 - RNA, 14 nt, Human
gaagcauguuucau

SEQ ID NO: 3444569 - RNA, 20 nt, Human
gaagcauuaacuucucugga

SEQ ID NO: 3444570 - RNA, 16 nt, Human
gaagcauucucauugg

SEQ ID NO: 3444571 - RNA, 17 nt, Human
gaagcauucuccccagu

SEQ ID NO: 3444572 - RNA, 20 nt, Human
gaagcauuguaaaauaauuc

SEQ ID NO: 3444573 - RNA, 18 nt, Human
gaagcauuuacuuugugu

SEQ ID NO: 3444574 - RNA, 15 nt, Human
gaagcauuuguauuu

SEQ ID NO: 3444575 - RNA, 20 nt, Human
gaagcauuuguauuuugugu

SEQ ID NO: 3444576 - RNA, 13 nt, Human
gaagcauuuguuu

SEQ ID NO: 3444577 - RNA, 17 nt, Human
gaagcauuuuauaaauc

SEQ ID NO: 3444578 - RNA, 14 nt, Human
gaagccaaagaaaa

SEQ ID NO: 3444579 - RNA, 16 nt, Human
gaagccaaagaaaaau

SEQ ID NO: 3444580 - RNA, 15 nt, Human
gaagccaagggaaag

SEQ ID NO: 3444581 - RNA, 17 nt, Human
gaagccaagggaaaggg

SEQ ID NO: 3444582 - RNA, 20 nt, Human
gaagccaagggaaaggggug

SEQ ID NO: 3444583 - RNA, 13 nt, Human
gaagccaaguggg

SEQ ID NO: 3444584 - RNA, 23 nt, Human
gaagccaaguggggugcugggag

SEQ ID NO: 3444585 - RNA, 20 nt, Human
gaagccaauucagacaggca

SEQ ID NO: 3444586 - RNA, 15 nt, Human
gaagccacagcccag

SEQ ID NO: 3444587 - RNA, 15 nt, Human
gaagccacaggccug

SEQ ID NO: 3444588 - RNA, 17 nt, Human
gaagccacaggccugag

SEQ ID NO: 3444589 - RNA, 17 nt, Human
gaagccacccaaagcag

SEQ ID NO: 3444590 - RNA, 12 nt, Human
gaagccacccuc

SEQ ID NO: 3444591 - RNA, 19 nt, Human
gaagccacccucccagcuc

SEQ ID NO: 3444592 - RNA, 20 nt, Human
gaagccacccucccagcucu

SEQ ID NO: 3444593 - RNA, 18 nt, Human
gaagccacugaagcuggg

SEQ ID NO: 3444594 - RNA, 15 nt, Human
gaagccagcaggcuc

SEQ ID NO: 3444595 - RNA, 18 nt, Human
gaagccagcugccuagga

SEQ ID NO: 3444596 - RNA, 13 nt, Human
gaagccaggagca

SEQ ID NO: 3444597 - RNA, 19 nt, Human
gaagccaucuaaaguaaaa

SEQ ID NO: 3444598 - RNA, 14 nt, Human
gaagccauugucuu

SEQ ID NO: 3444599 - RNA, 16 nt, Human
gaagcccaagugaaau

SEQ ID NO: 3444600 - RNA, 18 nt, Human
gaagcccaauugcuggag

SEQ ID NO: 3444601 - RNA, 10 nt, Human
gaagcccaga

SEQ ID NO: 3444602 - RNA, 22 nt, Human
gaagcccagccccuacugcugu

SEQ ID NO: 3444603 - RNA, 13 nt, Human
gaagcccaggaaa

SEQ ID NO: 3444604 - RNA, 20 nt, Human
gaagcccaggaaaggcucca

SEQ ID NO: 3444605 - RNA, 21 nt, Human
gaagcccaggaaaggcuccag

SEQ ID NO: 3444606 - RNA, 14 nt, Human
gaagcccaggagcc

SEQ ID NO: 3444607 - RNA, 23 nt, Human
gaagcccaggccccuuuucacuc

SEQ ID NO: 3444608 - RNA, 16 nt, Human
gaagcccauccugacc

SEQ ID NO: 3444609 - RNA, 14 nt, Human
gaagccccugggcc

SEQ ID NO: 3444610 - RNA, 19 nt, Human
gaagccccuuccccauggg

SEQ ID NO: 3444611 - RNA, 16 nt, Human
gaagcccggcuccugg

SEQ ID NO: 3444612 - RNA, 18 nt, Human
gaagcccggcuccugguc

SEQ ID NO: 3444613 - RNA, 17 nt, Human
gaagcccuccaaaagca

SEQ ID NO: 3444614 - RNA, 15 nt, Human
gaagcccucccaggu

SEQ ID NO: 3444615 - RNA, 15 nt, Human
gaagcccuccuucca

SEQ ID NO: 3444616 - RNA, 16 nt, Human
gaagcccuccuuccac

SEQ ID NO: 3444617 - RNA, 19 nt, Human
gaagcccuccuuccacgga

SEQ ID NO: 3444618 - RNA, 18 nt, Human
gaagcccuggauuucaga

SEQ ID NO: 3444619 - RNA, 21 nt, Human
gaagcccuggauuucagaaag

SEQ ID NO: 3444620 - RNA, 22 nt, Human
gaagcccuggauuucagaaaga

SEQ ID NO: 3444621 - RNA, 23 nt, Human
gaagcccuguugugccacagagu

SEQ ID NO: 3444622 - RNA, 23 nt, Human
gaagccgccaggaccgccaaaga

SEQ ID NO: 3444623 - RNA, 20 nt, Human
gaagccgcuggggccaguug

SEQ ID NO: 3444624 - RNA, 15 nt, Human
gaagccggcggccca

SEQ ID NO: 3444625 - RNA, 19 nt, Human
gaagccgugcccugccccc

SEQ ID NO: 3444626 - RNA, 13 nt, Human
gacacaggcccuc

SEQ ID NO: 3444627 - RNA, 12 nt, Human
gacacaggccug

SEQ ID NO: 3444628 - RNA, 21 nt, Human
gacacaggccuguguagcugu

SEQ ID NO: 3444629 - RNA, 22 nt, Human
gacacaggggacacccagaaac

SEQ ID NO: 3444630 - RNA, 17 nt, Human
gacacaggucuuuccua

SEQ ID NO: 3444631 - RNA, 22 nt, Human
gacacaggucuuuccuaaggcu

SEQ ID NO: 3444632 - RNA, 17 nt, Human
gacacagugaccauacu

SEQ ID NO: 3444633 - RNA, 22 nt, Human
gacacaguucaauucucauuug

SEQ ID NO: 3444634 - RNA, 14 nt, Human
gacacaguuccugg

SEQ ID NO: 3444635 - RNA, 19 nt, Human
gacacauacucauuuuuca

SEQ ID NO: 3444636 - RNA, 20 nt, Human
gacacaugaagguaaauaaa

SEQ ID NO: 3444637 - RNA, 17 nt, Human
gacacaugccagggcca

SEQ ID NO: 3444638 - RNA, 23 nt, Human
gacacauguccaagaagcccagg

SEQ ID NO: 3444639 - RNA, 14 nt, Human
gacacauuuaagga

SEQ ID NO: 3444640 - RNA, 20 nt, Human
gacacauuuuuuaggaaaug

SEQ ID NO: 3444641 - RNA, 15 nt, Human
gacaccaaaguucua

SEQ ID NO: 3444642 - RNA, 15 nt, Human
gacaccacacccagc

SEQ ID NO: 3444643 - RNA, 17 nt, Human
gacaccacacccagccu

SEQ ID NO: 3444644 - RNA, 21 nt, Human
gacaccacacccagccucagu

SEQ ID NO: 3444645 - RNA, 19 nt, Human
gacaccagagcagaugcag

SEQ ID NO: 3444646 - RNA, 14 nt, Human
gacaccagccaggc

SEQ ID NO: 3444647 - RNA, 14 nt, Human
gacacccaggacuu

SEQ ID NO: 3444648 - RNA, 13 nt, Human
gacacccccucgc

SEQ ID NO: 3444649 - RNA, 20 nt, Human
gacaccccuuauccaggacu

SEQ ID NO: 3444650 - RNA, 10 nt, Human
gacacccggc

SEQ ID NO: 3444651 - RNA, 13 nt, Human
gacacccucaacc

SEQ ID NO: 3444652 - RNA, 13 nt, Human
gacacccuggcag

SEQ ID NO: 3444653 - RNA, 19 nt, Human
gacacccuucucccacucu

SEQ ID NO: 3444654 - RNA, 19 nt, Human
gacaccgggccaguaucua

SEQ ID NO: 3444655 - RNA, 22 nt, Human
gacaccgggccaguaucuauau

SEQ ID NO: 3444656 - RNA, 15 nt, Human
gacaccuaggcuagg

SEQ ID NO: 3444657 - RNA, 20 nt, Human
gacaccuaggcuaggguggg

SEQ ID NO: 3444658 - RNA, 11 nt, Human
gacaccucaga

SEQ ID NO: 3444659 - RNA, 17 nt, Human
gacaccugcaccucccc

SEQ ID NO: 3444660 - RNA, 22 nt, Human
gacaccugcaccuccccccacu

SEQ ID NO: 3444661 - RNA, 23 nt, Human
gacaccugcccugcccugccacc

SEQ ID NO: 3444662 - RNA, 12 nt, Human
gacaccugggag

SEQ ID NO: 3444663 - RNA, 16 nt, Human
gacaccuguacuggag

SEQ ID NO: 3444664 - RNA, 17 nt, Human
gacaccuguacuggaga

SEQ ID NO: 3444665 - RNA, 18 nt, Human
gacaccuguacuggagag

SEQ ID NO: 3444666 - RNA, 14 nt, Human
gacaccuuuagguu

SEQ ID NO: 3444667 - RNA, 14 nt, Human
gacacgcacggcag

SEQ ID NO: 3444668 - RNA, 20 nt, Human
gacacgcacggcagccacag

SEQ ID NO: 3444669 - RNA, 21 nt, Human
gacacgcacggcagccacagc

SEQ ID NO: 3444670 - RNA, 22 nt, Human
gacacgcacggcagccacagcu

SEQ ID NO: 3444671 - RNA, 22 nt, Human
gacacgcgccccccucccagag

SEQ ID NO: 3444672 - RNA, 23 nt, Human
gacacgcucuucuauuuuauucc

SEQ ID NO: 3444673 - RNA, 19 nt, Human
gacacggaucugagaaucu

SEQ ID NO: 3444674 - RNA, 17 nt, Human
gacacgggcagccuggc

SEQ ID NO: 3444675 - RNA, 15 nt, Human
gacacgggccugucc

SEQ ID NO: 3444676 - RNA, 20 nt, Human
gacacgggccuguccacagg

SEQ ID NO: 3444677 - RNA, 15 nt, Human
gacacggggcagugg

SEQ ID NO: 3444678 - RNA, 19 nt, Human
gacacgugggcuccccucu

SEQ ID NO: 3444679 - RNA, 17 nt, Human
gacacuaaccacgcugg

SEQ ID NO: 3444680 - RNA, 20 nt, Human
gacacuaauggggcggugag

SEQ ID NO: 3444681 - RNA, 14 nt, Human
gacacuacacccag

SEQ ID NO: 3444682 - RNA, 16 nt, Human
gacacuacacccagca

SEQ ID NO: 3444683 - RNA, 17 nt, Human
gacacuacacccagcaa

SEQ ID NO: 3444684 - RNA, 20 nt, Human
gacacuacacccagcaauag

SEQ ID NO: 3444685 - RNA, 12 nt, Human
gacacuauaucu

SEQ ID NO: 3444686 - RNA, 16 nt, Human
gacacuauucacuaaa

SEQ ID NO: 3444687 - RNA, 23 nt, Human
gacacucaagucccccaagaccu

SEQ ID NO: 3444688 - RNA, 16 nt, Human
gacacucauauaauua

SEQ ID NO: 3444689 - RNA, 21 nt, Human
gacacuccagggacacacagc

SEQ ID NO: 3444690 - RNA, 12 nt, Human
gacacuccagug

SEQ ID NO: 3444691 - RNA, 16 nt, Human
gacacuccagugccag

SEQ ID NO: 3444692 - RNA, 19 nt, Human
gacacuccagugccagcaa

SEQ ID NO: 3444693 - RNA, 21 nt, Human
gacacuccuagagaacgcagc

SEQ ID NO: 3444694 - RNA, 22 nt, Human
gacacuccuagagaacgcagcc

SEQ ID NO: 3444695 - RNA, 17 nt, Human
gacacucuccuugcagu

SEQ ID NO: 3444696 - RNA, 18 nt, Human
gacacucuccuugcaguu

SEQ ID NO: 3444697 - RNA, 14 nt, Human
cucaauuucucuau

SEQ ID NO: 3444698 - RNA, 16 nt, Human
cucaauuucugaacac

SEQ ID NO: 3444699 - RNA, 23 nt, Human
cucaauuuuaucccucaccugua

SEQ ID NO: 3444700 - RNA, 17 nt, Human
cucaauuuucacugugu

SEQ ID NO: 3444701 - RNA, 21 nt, Human
cucaauuuuugguugaauaaa

SEQ ID NO: 3444702 - RNA, 17 nt, Human
cucaauuuuugucucag

SEQ ID NO: 3444703 - RNA, 20 nt, Human
cucaauuuuugucucagaag

SEQ ID NO: 3444704 - RNA, 18 nt, Human
cucacaaaugaaaccuga

SEQ ID NO: 3444705 - RNA, 17 nt, Human
cucacaacagcugccug

SEQ ID NO: 3444706 - RNA, 19 nt, Human
cucacaacauggugucugg

SEQ ID NO: 3444707 - RNA, 16 nt, Human
cucacaaccugaaccu

SEQ ID NO: 3444708 - RNA, 17 nt, Human
cucacaagaagaccaga

SEQ ID NO: 3444709 - RNA, 19 nt, Human
cucacaagaagaccagacu

SEQ ID NO: 3444710 - RNA, 21 nt, Human
cucacaauagccgauaucaga

SEQ ID NO: 3444711 - RNA, 17 nt, Human
cucacacacccugaggu

SEQ ID NO: 3444712 - RNA, 12 nt, Human
cucacacagcca

SEQ ID NO: 3444713 - RNA, 14 nt, Human
cucacacagccagg

SEQ ID NO: 3444714 - RNA, 15 nt, Human
cucacacagccaggu

SEQ ID NO: 3444715 - RNA, 19 nt, Human
cucacacagccaggugccu

SEQ ID NO: 3444716 - RNA, 20 nt, Human
cucacacagccaggugccuu

SEQ ID NO: 3444717 - RNA, 21 nt, Human
cucacacaggacccccuuccc

SEQ ID NO: 3444718 - RNA, 13 nt, Human
cucacacaggcau

SEQ ID NO: 3444719 - RNA, 21 nt, Human
cucacacaggcauuuccuggg

SEQ ID NO: 3444720 - RNA, 23 nt, Human
cucacacaggcauuuccugggug

SEQ ID NO: 3444721 - RNA, 14 nt, Human
cucacacaugagca

SEQ ID NO: 3444722 - RNA, 20 nt, Human
cucacaccacuagccucagg

SEQ ID NO: 3444723 - RNA, 13 nt, Human
cucacacccaccg

SEQ ID NO: 3444724 - RNA, 22 nt, Human
cucacacccaccguccgcccug

SEQ ID NO: 3444725 - RNA, 19 nt, Human
cucacaccgcgucugguga

SEQ ID NO: 3444726 - RNA, 13 nt, Human
cucacacucaccc

SEQ ID NO: 3444727 - RNA, 13 nt, Human
cucacacugagaa

SEQ ID NO: 3444728 - RNA, 14 nt, Human
cucacacugagaau

SEQ ID NO: 3444729 - RNA, 17 nt, Human
cucacagaacccuugga

SEQ ID NO: 3444730 - RNA, 13 nt, Human
cucacagaagaau

SEQ ID NO: 3444731 - RNA, 12 nt, Human
cucacagacagg

SEQ ID NO: 3444732 - RNA, 18 nt, Human
cucacagacaggaccccu

SEQ ID NO: 3444733 - RNA, 20 nt, Human
cucacagaccuggagccccu

SEQ ID NO: 3444734 - RNA, 20 nt, Human
cucacagagucaaggccugc

SEQ ID NO: 3444735 - RNA, 19 nt, Human
cucacagcacaugcuggcc

SEQ ID NO: 3444736 - RNA, 12 nt, Human
cucacagccucu

SEQ ID NO: 3444737 - RNA, 21 nt, Human
cucacagccucugaccccucc

SEQ ID NO: 3444738 - RNA, 16 nt, Human
cucacagcuaugcaaa

SEQ ID NO: 3444739 - RNA, 13 nt, Human
cucacagcugagu

SEQ ID NO: 3444740 - RNA, 23 nt, Human
cucacagguuggaagagaaucac

SEQ ID NO: 3444741 - RNA, 19 nt, Human
cucacaguaacccaaaccu

SEQ ID NO: 3444742 - RNA, 23 nt, Human
cucacaguaacccaaaccucaag

SEQ ID NO: 3444743 - RNA, 17 nt, Human
cucacaguccuuaccag

SEQ ID NO: 3444744 - RNA, 19 nt, Human
cucacaguccuuaccagca

SEQ ID NO: 3444745 - RNA, 14 nt, Human
cucacagugacccu

SEQ ID NO: 3444746 - RNA, 18 nt, Human
cucacagugacccuuccc

SEQ ID NO: 3444747 - RNA, 20 nt, Human
cucacaguuccucgcccugg

SEQ ID NO: 3444748 - RNA, 21 nt, Human
cucacaguuccucgcccuggg

SEQ ID NO: 3444749 - RNA, 20 nt, Human
cucacauagcuuacaagcca

SEQ ID NO: 3444750 - RNA, 22 nt, Human
cucacaugauuccagccaucac

SEQ ID NO: 3444751 - RNA, 15 nt, Human
cucacaugcuggaca

SEQ ID NO: 3444752 - RNA, 22 nt, Human
cucacaugcuggacaggucugg

SEQ ID NO: 3444753 - RNA, 23 nt, Human
cucacaugcuggacaggucuggg

SEQ ID NO: 3444754 - RNA, 16 nt, Human
cucacauggaaugagg

SEQ ID NO: 3444755 - RNA, 18 nt, Human
cucacauggaaugagggu

SEQ ID NO: 3444756 - RNA, 20 nt, Human
cucacauggaaugaggguuu

SEQ ID NO: 3444757 - RNA, 19 nt, Human
cucacaugguuuacauccu

SEQ ID NO: 3444758 - RNA, 22 nt, Human
cucacaugucaguaccuucaaa

SEQ ID NO: 3444759 - RNA, 15 nt, Human
cucacauuuauucug

SEQ ID NO: 3444760 - RNA, 22 nt, Human
cucacauuuauucugcucacau

SEQ ID NO: 3444761 - RNA, 15 nt, Human
cucacauuuuuuucu

SEQ ID NO: 3444762 - RNA, 14 nt, Human
cucaccacccacuu

SEQ ID NO: 3444763 - RNA, 17 nt, Human
cucaccacugcccccug

SEQ ID NO: 3444764 - RNA, 22 nt, Human
cucaccagccccacugccagca

SEQ ID NO: 3444765 - RNA, 19 nt, Human
cucaccagccccagugccc

SEQ ID NO: 3444766 - RNA, 18 nt, Human
cucaccaggcagccucug

SEQ ID NO: 3444767 - RNA, 20 nt, Human
cucaccaguguccccuccac

SEQ ID NO: 3444768 - RNA, 23 nt, Human
cucaccaguguccccuccacugu

SEQ ID NO: 3444769 - RNA, 14 nt, Human
cucaccaucugugc

SEQ ID NO: 3444770 - RNA, 18 nt, Human
gaauugaccaucugcuuu

SEQ ID NO: 3444771 - RNA, 18 nt, Human
gaauugacuucgacugug

SEQ ID NO: 3444772 - RNA, 14 nt, Human
gaauugagcugcag

SEQ ID NO: 3444773 - RNA, 22 nt, Human
gaauugaggggauuaauaugaa

SEQ ID NO: 3444774 - RNA, 14 nt, Human
gaauugaguaaugg

SEQ ID NO: 3444775 - RNA, 16 nt, Human
gaauugaguaauggug

SEQ ID NO: 3444776 - RNA, 19 nt, Human
gaauugaguguuuaaaguu

SEQ ID NO: 3444777 - RNA, 22 nt, Human
gaauugauugggcacaucauuu

SEQ ID NO: 3444778 - RNA, 12 nt, Human
gaauugauuugc

SEQ ID NO: 3444779 - RNA, 18 nt, Human
gaauugauuugcauugaa

SEQ ID NO: 3444780 - RNA, 12 nt, Human
gaauugcauuga

SEQ ID NO: 3444781 - RNA, 13 nt, Human
gaauugcauugac

SEQ ID NO: 3444782 - RNA, 21 nt, Human
gaauugcauuuuuuaaaacaa

SEQ ID NO: 3444783 - RNA, 23 nt, Human
gaauugcauuuuuuaaaacaaga

SEQ ID NO: 3444784 - RNA, 15 nt, Human
gaauugccagucuuu

SEQ ID NO: 3444785 - RNA, 18 nt, Human
gaauugccagucuuuugu

SEQ ID NO: 3444786 - RNA, 22 nt, Human
gaauugccugcagagagaagcc

SEQ ID NO: 3444787 - RNA, 24 nt, Human
gaauugcuuguuugcuucaacugu

SEQ ID NO: 3444788 - RNA, 20 nt, Human
gaauugggcggcucugaagc

SEQ ID NO: 3444789 - RNA, 20 nt, Human
gaauuggguggggggcuuca

SEQ ID NO: 3444790 - RNA, 23 nt, Human
gaauuggguggggggcuucauac

SEQ ID NO: 3444791 - RNA, 23 nt, Human
gaauuguaaaagcaacaucagcu

SEQ ID NO: 3444792 - RNA, 22 nt, Human
gaauuguaaggaaugauuaauu

SEQ ID NO: 3444793 - RNA, 23 nt, Human
gaauuguccccaguuugcagaaa

SEQ ID NO: 3444794 - RNA, 18 nt, Human
gaauuguggcuauccuga

SEQ ID NO: 3444795 - RNA, 23 nt, Human
gaauuguguuuauaauuuuaaau

SEQ ID NO: 3444796 - RNA, 20 nt, Human
gaauuuaaagaaaaaaaugu

SEQ ID NO: 3444797 - RNA, 22 nt, Human
gaauuuaaauagcuuuuuucuc

SEQ ID NO: 3444798 - RNA, 13 nt, Human
gaauuuaaauaua

SEQ ID NO: 3444799 - RNA, 11 nt, Human
gaauuuaacaa

SEQ ID NO: 3444800 - RNA, 12 nt, Human
gaauuuaacaau

SEQ ID NO: 3444801 - RNA, 22 nt, Human
gaauuuaacaaugcgaauggua

SEQ ID NO: 3444802 - RNA, 16 nt, Human
gaauuuacuggacaua

SEQ ID NO: 3444803 - RNA, 13 nt, Human
gaauuuauaccuc

SEQ ID NO: 3444804 - RNA, 17 nt, Human
gaauuuauucaauuccu

SEQ ID NO: 3444805 - RNA, 12 nt, Human
gaauuucaccug

SEQ ID NO: 3444806 - RNA, 22 nt, Human
gaauuucccaaagcagugcaug

SEQ ID NO: 3444807 - RNA, 17 nt, Human
gaauuucccacauaccc

SEQ ID NO: 3444808 - RNA, 15 nt, Human
gaauuucccaggacc

SEQ ID NO: 3444809 - RNA, 22 nt, Human
gaauuucccaggacccugaagg

SEQ ID NO: 3444810 - RNA, 17 nt, Human
gaauuucuaaaaaacag

SEQ ID NO: 3444811 - RNA, 20 nt, Human
gaauuucuaggacugaauua

SEQ ID NO: 3444812 - RNA, 17 nt, Human
gaauuucuuaacuucuu

SEQ ID NO: 3444813 - RNA, 18 nt, Human
gaauuucuuaacuucuug

SEQ ID NO: 3444814 - RNA, 19 nt, Human
gaauuucuucacuguugaa

SEQ ID NO: 3444815 - RNA, 11 nt, Human
gaauuucuugu

SEQ ID NO: 3444816 - RNA, 17 nt, Human
gaauuugagugcucuga

SEQ ID NO: 3444817 - RNA, 13 nt, Human
gaauuugcaaagu

SEQ ID NO: 3444818 - RNA, 10 nt, Human
gaauuugcau

SEQ ID NO: 3444819 - RNA, 17 nt, Human
gaauuugcauacuuacc

SEQ ID NO: 3444820 - RNA, 18 nt, Human
gaauuugcauacuuaccu

SEQ ID NO: 3444821 - RNA, 19 nt, Human
gaauuuggagacucugugg

SEQ ID NO: 3444822 - RNA, 19 nt, Human
gaauuuggccugcacuaau

SEQ ID NO: 3444823 - RNA, 19 nt, Human
gaauuuggggcuuccaagu

SEQ ID NO: 3444824 - RNA, 17 nt, Human
gaauuuguaaccucagc

SEQ ID NO: 3444825 - RNA, 19 nt, Human
gaauuuguaaccucagcuc

SEQ ID NO: 3444826 - RNA, 22 nt, Human
gaauuuguaaguuuaugucuaa

SEQ ID NO: 3444827 - RNA, 15 nt, Human
gaauuuuaaaagaug

SEQ ID NO: 3444828 - RNA, 21 nt, Human
gaauuuuaaaagaugcaaugu

SEQ ID NO: 3444829 - RNA, 23 nt, Human
gaauuuuaaaagaugcaauguag

SEQ ID NO: 3444830 - RNA, 12 nt, Human
gaauuuuaaagu

SEQ ID NO: 3444831 - RNA, 15 nt, Human
gaauuuuaaaguaug

SEQ ID NO: 3444832 - RNA, 15 nt, Human
gaauuuuaagugcuu

SEQ ID NO: 3444833 - RNA, 19 nt, Human
gaauuuuauacuuucccua

SEQ ID NO: 3444834 - RNA, 14 nt, Human
gaauuuucauuuua

SEQ ID NO: 3444835 - RNA, 16 nt, Human
gaauuuucauuuuaca

SEQ ID NO: 3444836 - RNA, 20 nt, Human
gaauuuucauuuuacaguua

SEQ ID NO: 3444837 - RNA, 14 nt, Human
gaauuuucccacug

SEQ ID NO: 3444838 - RNA, 22 nt, Human
gaauuuuccugagacaaauuuu

SEQ ID NO: 3444839 - RNA, 16 nt, Human
gaauuuucuaaaagcu

SEQ ID NO: 3444840 - RNA, 13 nt, Human
gaauuuucugugu

SEQ ID NO: 3444841 - RNA, 19 nt, Human
gaauuuuggcugugucucc

SEQ ID NO: 3444842 - RNA, 21 nt, Human
gaauuuugugcccccauguaa

SEQ ID NO: 3444843 - RNA, 22 nt, Human
gaauuuuguguuagagauuuuu

SEQ ID NO: 3444844 - RNA, 17 nt, Human
gaauuuuguucucuggg

SEQ ID NO: 3444845 - RNA, 18 nt, Human
gaauuuuguucucuggga

SEQ ID NO: 3444846 - RNA, 15 nt, Human
gaauuuuguugcugu

SEQ ID NO: 3444847 - RNA, 18 nt, Human
gaauuuuuaugugugauu

SEQ ID NO: 3444848 - RNA, 17 nt, Human
gaauuuuuauuaugcau

SEQ ID NO: 3444849 - RNA, 15 nt, Human
gaauuuuuauuguug

SEQ ID NO: 3444850 - RNA, 22 nt, Human
gaauuuuuccuaugcuauugac

SEQ ID NO: 3444851 - RNA, 13 nt, Human
gaauuuuugcaau

SEQ ID NO: 3444852 - RNA, 14 nt, Human
gaauuuuugcaaua

SEQ ID NO: 3444853 - RNA, 17 nt, Human
gaauuuuuuauucuugu

SEQ ID NO: 3444854 - RNA, 19 nt, Human
gaauuuuuuauucuuguga

SEQ ID NO: 3444855 - RNA, 22 nt, Human
gaauuuuuuucaucuucucugg

SEQ ID NO: 3444856 - RNA, 17 nt, Human
gaauuuuuuugucuuua

SEQ ID NO: 3444857 - RNA, 22 nt, Human
gaauuuuuuuuguuguuucagu

SEQ ID NO: 3444858 - RNA, 18 nt, Human
gacaaaaaauguuuuaaa

SEQ ID NO: 3444859 - RNA, 16 nt, Human
gacaaaaacagccuca

SEQ ID NO: 3444860 - RNA, 17 nt, Human
gacacucugcucugccc

SEQ ID NO: 3444861 - RNA, 15 nt, Human
gacacucuggcuggu

SEQ ID NO: 3444862 - RNA, 23 nt, Human
gacacugaaauauacacacagca

SEQ ID NO: 3444863 - RNA, 22 nt, Human
gacacugaaaugccuuacuuug

SEQ ID NO: 3444864 - RNA, 23 nt, Human
gacacugcagaaacccugagcag

SEQ ID NO: 3444865 - RNA, 12 nt, Human
gacacugccugg

SEQ ID NO: 3444866 - RNA, 13 nt, Human
gacacugccuggg

SEQ ID NO: 3444867 - RNA, 14 nt, Human
gacacugccugggc

SEQ ID NO: 3444868 - RNA, 14 nt, Human
gacacugcucuaac

SEQ ID NO: 3444869 - RNA, 14 nt, Human
gacacuggccccuc

SEQ ID NO: 3444870 - RNA, 20 nt, Human
gacacugguauuccugccuc

SEQ ID NO: 3444871 - RNA, 16 nt, Human
gacacugugcccagcc

SEQ ID NO: 3444872 - RNA, 20 nt, Human
gacacugugcccagcccgga

SEQ ID NO: 3444873 - RNA, 22 nt, Human
gacacuguucucccuucggugg

SEQ ID NO: 3444874 - RNA, 22 nt, Human
gacacuguucuuagcucaauga

SEQ ID NO: 3444875 - RNA, 23 nt, Human
gacacuguucuuagcucaaugag

SEQ ID NO: 3444876 - RNA, 20 nt, Human
gacacuuaauacuaccuuga

SEQ ID NO: 3444877 - RNA, 19 nt, Human
gacacuuaauucuguucug

SEQ ID NO: 3444878 - RNA, 19 nt, Human
gacacuucaaggugacaga

SEQ ID NO: 3444879 - RNA, 15 nt, Human
gacacuucagagagc

SEQ ID NO: 3444880 - RNA, 19 nt, Human
gacacuucagagagcuggu

SEQ ID NO: 3444881 - RNA, 14 nt, Human
gacacuuccugccu

SEQ ID NO: 3444882 - RNA, 17 nt, Human
gacacuugauacuuguu

SEQ ID NO: 3444883 - RNA, 18 nt, Human
gacacuuugaaauguguu

SEQ ID NO: 3444884 - RNA, 21 nt, Human
gacacuuuucaugugugauuu

SEQ ID NO: 3444885 - RNA, 14 nt, Human
gacacuuuuucuuu

SEQ ID NO: 3444886 - RNA, 16 nt, Human
gacagaaaacauguuu

SEQ ID NO: 3444887 - RNA, 22 nt, Human
gacagaaaauauguauuaacac

SEQ ID NO: 3444888 - RNA, 13 nt, Human
gacagaacacugu

SEQ ID NO: 3444889 - RNA, 17 nt, Human
gacagaaccacagggcu

SEQ ID NO: 3444890 - RNA, 15 nt, Human
gacagaagcagcucu

SEQ ID NO: 3444891 - RNA, 15 nt, Human
gacagaaggaccagc

SEQ ID NO: 3444892 - RNA, 14 nt, Human
gacagaaggugcca

SEQ ID NO: 3444893 - RNA, 23 nt, Human
gacagaaggugccacuuuaccca

SEQ ID NO: 3444894 - RNA, 16 nt, Human
gacagaagucuccuca

SEQ ID NO: 3444895 - RNA, 20 nt, Human
gacagaaguuugcacuaucu

SEQ ID NO: 3444896 - RNA, 15 nt, Human
gacagaauguaucug

SEQ ID NO: 3444897 - RNA, 18 nt, Human
gacagaauguaucuguga

SEQ ID NO: 3444898 - RNA, 13 nt, Human
gacagaauuuuuu

SEQ ID NO: 3444899 - RNA, 23 nt, Human
gacagacaacacugggaaacaga

SEQ ID NO: 3444900 - RNA, 20 nt, Human
gacagacacaggcccggcuc

SEQ ID NO: 3444901 - RNA, 23 nt, Human
gacagacacuucuaaaugaagug

SEQ ID NO: 3444902 - RNA, 16 nt, Human
gacagacagcccucca

SEQ ID NO: 3444903 - RNA, 14 nt, Human
gacagacaggcucu

SEQ ID NO: 3444904 - RNA, 18 nt, Human
gacagaccacaucuuuau

SEQ ID NO: 3444905 - RNA, 22 nt, Human
gacagaccacaucuuuaucugu

SEQ ID NO: 3444906 - RNA, 23 nt, Human
gacagacucacaaccugaaccua

SEQ ID NO: 3444907 - RNA, 16 nt, Human
gacagacuccugagga

SEQ ID NO: 3444908 - RNA, 22 nt, Human
gacagacugcaagaggcuccug

SEQ ID NO: 3444909 - RNA, 15 nt, Human
gacagacuugagaac

SEQ ID NO: 3444910 - RNA, 17 nt, Human
gacagagaaggcagcag

SEQ ID NO: 3444911 - RNA, 12 nt, Human
gacagagaaggg

SEQ ID NO: 3444912 - RNA, 15 nt, Human
gacagagacaccugc

SEQ ID NO: 3444913 - RNA, 16 nt, Human
gacagagacaccugca

SEQ ID NO: 3444914 - RNA, 18 nt, Human
gacgcugugcugcccugc

SEQ ID NO: 3444915 - RNA, 21 nt, Human
gacgcugugcugcccugccca

SEQ ID NO: 3444916 - RNA, 13 nt, Human
gacgcuucugaau

SEQ ID NO: 3444917 - RNA, 13 nt, Human
gacgcuugcucug

SEQ ID NO: 3444918 - RNA, 18 nt, Human
gacggagucccaccuugg

SEQ ID NO: 3444919 - RNA, 21 nt, Human
gacggagucccaccuuggcug

SEQ ID NO: 3444920 - RNA, 20 nt, Human
cucaucauucucugucucau

SEQ ID NO: 3444921 - RNA, 23 nt, Human
cucaucauucucugucucaucca

SEQ ID NO: 3444922 - RNA, 18 nt, Human
cucauccacauacccuga

SEQ ID NO: 3444923 - RNA, 20 nt, Human
cucauccacauacccugacc

SEQ ID NO: 3444924 - RNA, 24 nt, Human
cucauccaccccaucccuccccag

SEQ ID NO: 3444925 - RNA, 15 nt, Human
cucauccagggcucu

SEQ ID NO: 3444926 - RNA, 14 nt, Human
cucaucccacgcac

SEQ ID NO: 3444927 - RNA, 10 nt, Human
cucaucccau

SEQ ID NO: 3444928 - RNA, 22 nt, Human
cucauccccaggggucccagcc

SEQ ID NO: 3444929 - RNA, 16 nt, Human
cucauccccaguccca

SEQ ID NO: 3444930 - RNA, 19 nt, Human
cucaucccguguucuccuu

SEQ ID NO: 3444931 - RNA, 14 nt, Human
cucauccgaggcag

SEQ ID NO: 3444932 - RNA, 16 nt, Human
cucauccucagaugcu

SEQ ID NO: 3444933 - RNA, 15 nt, Human
cucauccucauaccc

SEQ ID NO: 3444934 - RNA, 23 nt, Human
cucauccuccuggaaccuugcug

SEQ ID NO: 3444935 - RNA, 14 nt, Human
cucauccuccuucu

SEQ ID NO: 3444936 - RNA, 14 nt, Human
cucauccugcaggc

SEQ ID NO: 3444937 - RNA, 15 nt, Human
cucauccuuuucucc

SEQ ID NO: 3444938 - RNA, 16 nt, Human
cucaucgcguccuccu

SEQ ID NO: 3444939 - RNA, 15 nt, Human
cucaucucuguccca

SEQ ID NO: 3444940 - RNA, 19 nt, Human
cucaucucuuagcuccccu

SEQ ID NO: 3444941 - RNA, 12 nt, Human
cucaucugcugg

SEQ ID NO: 3444942 - RNA, 12 nt, Human
cucaucugggga

SEQ ID NO: 3444943 - RNA, 19 nt, Human
cucaucuggggagcaggca

SEQ ID NO: 3444944 - RNA, 13 nt, Human
cucaucugucccu

SEQ ID NO: 3444945 - RNA, 15 nt, Human
cucaucugucccucc

SEQ ID NO: 3444946 - RNA, 18 nt, Human
cucaucugucccuccggg

SEQ ID NO: 3444947 - RNA, 22 nt, Human
cucaucuugacagagccugccc

SEQ ID NO: 3444948 - RNA, 16 nt, Human
cucaucuugugaaaug

SEQ ID NO: 3444949 - RNA, 14 nt, Human
cucaucuuucccuc

SEQ ID NO: 3444950 - RNA, 16 nt, Human
cucaucuuucccuccu

SEQ ID NO: 3444951 - RNA, 20 nt, Human
cucaucuuucccuccuuggu

SEQ ID NO: 3444952 - RNA, 13 nt, Human
cucaucuuucuug

SEQ ID NO: 3444953 - RNA, 12 nt, Human
cucaugaaccuc

SEQ ID NO: 3444954 - RNA, 13 nt, Human
cucaugaaucugc

SEQ ID NO: 3444955 - RNA, 12 nt, Human
cucaugaaugua

SEQ ID NO: 3444956 - RNA, 22 nt, Human
cucaugaauguaaauuuguacu

SEQ ID NO: 3444957 - RNA, 15 nt, Human
cucaugaggggagag

SEQ ID NO: 3444958 - RNA, 19 nt, Human
cucaugcaaaucaauuacu

SEQ ID NO: 3444959 - RNA, 16 nt, Human
cucaugcaucuccacc

SEQ ID NO: 3444960 - RNA, 18 nt, Human
cucaugcaucuccaccug

SEQ ID NO: 3444961 - RNA, 15 nt, Human
cucaugcauugcuug

SEQ ID NO: 3444962 - RNA, 17 nt, Human
cucaugcccacccccug

SEQ ID NO: 3444963 - RNA, 22 nt, Human
cucaugcccccuuucagauguc

SEQ ID NO: 3444964 - RNA, 23 nt, Human
cucaugcccccuuucagaugucu

SEQ ID NO: 3444965 - RNA, 20 nt, Human
cucaugccucagccuccuga

SEQ ID NO: 3444966 - RNA, 15 nt, Human
cucaugcuaauauaa

SEQ ID NO: 3444967 - RNA, 14 nt, Human
cucaugcugaaagc

SEQ ID NO: 3444968 - RNA, 15 nt, Human
cucaugcugaaagcc

SEQ ID NO: 3444969 - RNA, 12 nt, Human
cucaugcugcca

SEQ ID NO: 3444970 - RNA, 19 nt, Human
cucaugcugccccugccuu

SEQ ID NO: 3444971 - RNA, 17 nt, Human
cucauggccccucugac

SEQ ID NO: 3444972 - RNA, 19 nt, Human
cucauggccccucugaccu

SEQ ID NO: 3444973 - RNA, 20 nt, Human
cucauggccccucugaccug

SEQ ID NO: 3444974 - RNA, 17 nt, Human
cucaugggccccucuga

SEQ ID NO: 3444975 - RNA, 15 nt, Human
cucauggguggcacu

SEQ ID NO: 3444976 - RNA, 19 nt, Human
cucauggguggcacucagu

SEQ ID NO: 3444977 - RNA, 14 nt, Human
cucaugugauuuac

SEQ ID NO: 3444978 - RNA, 15 nt, Human
cucauguggcuggaa

SEQ ID NO: 3444979 - RNA, 9 nt, Human
cucaugugu

SEQ ID NO: 3444980 - RNA, 19 nt, Human
cucaugugugcucuucuuc

SEQ ID NO: 3444981 - RNA, 18 nt, Human
cucauguuuaugaaaaua

SEQ ID NO: 3444982 - RNA, 16 nt, Human
cucauguuuucaacug

SEQ ID NO: 3444983 - RNA, 17 nt, Human
cucauguuuuccauugu

SEQ ID NO: 3444984 - RNA, 13 nt, Human
cucauuaaaaaaa

SEQ ID NO: 3444985 - RNA, 18 nt, Human
cucauuacggcuccucuc

SEQ ID NO: 3444986 - RNA, 13 nt, Human
cucauuagacugg

SEQ ID NO: 3444987 - RNA, 14 nt, Human
cucauuagacugga

SEQ ID NO: 3444988 - RNA, 17 nt, Human
cucauuaggauggcuag

SEQ ID NO: 3444989 - RNA, 18 nt, Human
cucauuaggauggcuagu

SEQ ID NO: 3444990 - RNA, 19 nt, Human
cucauucaaaaguugaaau

SEQ ID NO: 3444991 - RNA, 22 nt, Human
cucauucaggaaaacugacaga

SEQ ID NO: 3444992 - RNA, 15 nt, Human
cucauucauuuuaua

SEQ ID NO: 3444993 - RNA, 18 nt, Human
cucauuccaacagugagu

SEQ ID NO: 3444994 - RNA, 21 nt, Human
cucauuccaccuucccaugcc

SEQ ID NO: 3444995 - RNA, 17 nt, Human
cucauuccauaaauguc

SEQ ID NO: 3444996 - RNA, 18 nt, Human
cucauuccauaaaugucg

SEQ ID NO: 3444997 - RNA, 21 nt, Human
cucauuccuccaccugccgug

SEQ ID NO: 3444998 - RNA, 16 nt, Human
cucauuccugccuguc

SEQ ID NO: 3444999 - RNA, 17 nt, Human
cucauuccugccugucu

SEQ ID NO: 3445000 - RNA, 20 nt, Human
cucauuccugccugucuccu

SEQ ID NO: 3445001 - RNA, 22 nt, Human
cucauucuccuuguguuacuaa

SEQ ID NO: 3445002 - RNA, 17 nt, Human
cucauucugaaggagcc

SEQ ID NO: 3445003 - RNA, 19 nt, Human
cucauucugaaggagcccc

SEQ ID NO: 3445004 - RNA, 13 nt, Human
cucauucuucugu

SEQ ID NO: 3445005 - RNA, 17 nt, Human
cucauugacaagaacug

SEQ ID NO: 3445006 - RNA, 16 nt, Human
cucauugaccugaggc

SEQ ID NO: 3445007 - RNA, 20 nt, Human
cucauugcugagccucugcu

SEQ ID NO: 3445008 - RNA, 19 nt, Human
cucauugcuuacaagccua

SEQ ID NO: 3445009 - RNA, 20 nt, Human
cucauugcuuggaauucagc

SEQ ID NO: 3445010 - RNA, 19 nt, Human
cucauuggaaauuuagcau

SEQ ID NO: 3445011 - RNA, 17 nt, Human
cucauuggacccuucca

SEQ ID NO: 3445012 - RNA, 12 nt, Human
cucauugggguu

SEQ ID NO: 3445013 - RNA, 19 nt, Human
cucauugucuguguagagu

SEQ ID NO: 3445014 - RNA, 14 nt, Human
cucauuuaaaguau

SEQ ID NO: 3445015 - RNA, 19 nt, Human
cucauuuaaaguauuuuau

SEQ ID NO: 3445016 - RNA, 20 nt, Human
cucauuuaaaguauuuuauu

SEQ ID NO: 3445017 - RNA, 14 nt, Human
cucauuuaaauauc

SEQ ID NO: 3445018 - RNA, 16 nt, Human
cucauuuaagggaaaa

SEQ ID NO: 3445019 - RNA, 17 nt, Human
cucauuuaagggaaaaa

SEQ ID NO: 3445020 - RNA, 18 nt, Human
cucauuuaagggaaaaau

SEQ ID NO: 3445021 - RNA, 19 nt, Human
cucauuuaauccucccuuc

SEQ ID NO: 3445022 - RNA, 14 nt, Human
cucauuuagccugu

SEQ ID NO: 3445023 - RNA, 18 nt, Human
cucauuuagccuguccug

SEQ ID NO: 3445024 - RNA, 19 nt, Human
cucauuuagccuguccugu

SEQ ID NO: 3445025 - RNA, 23 nt, Human
cucauuucaccccucccuuucuc

SEQ ID NO: 3445026 - RNA, 13 nt, Human
cucauuucaggau

SEQ ID NO: 3445027 - RNA, 15 nt, Human
cucauuucaucucau

SEQ ID NO: 3445028 - RNA, 12 nt, Human
cucauuuccaag

SEQ ID NO: 3445029 - RNA, 14 nt, Human
cucauuuccaagca

SEQ ID NO: 3445030 - RNA, 16 nt, Human
cucauuucuaaaagaa

SEQ ID NO: 3445031 - RNA, 18 nt, Human
cucauuugucacacacuu

SEQ ID NO: 3445032 - RNA, 17 nt, Human
cucauuuguuaaaauua

SEQ ID NO: 3445033 - RNA, 18 nt, Human
cucauuuuaaugauuguu

SEQ ID NO: 3445034 - RNA, 20 nt, Human
cucauuuuuuuaauuuauua

SEQ ID NO: 3445035 - RNA, 19 nt, Human
cuccaaaaaucugccuggg

SEQ ID NO: 3445036 - RNA, 17 nt, Human
cuccaaaacccaugugg

SEQ ID NO: 3445037 - RNA, 20 nt, Human
cuccaaaacccaugugggaa

SEQ ID NO: 3445038 - RNA, 15 nt, Human
cuccaaaauaaaacu

SEQ ID NO: 3445039 - RNA, 18 nt, Human
cuccaaaauaaaacuuuu

SEQ ID NO: 3445040 - RNA, 16 nt, Human
cuccaaaccuucacac

SEQ ID NO: 3445041 - RNA, 23 nt, Human
cuccaaagaggugacugggcccu

SEQ ID NO: 3445042 - RNA, 22 nt, Human
cuccaaaguauuguacaaauaa

SEQ ID NO: 3445043 - RNA, 12 nt, Human
cuccaaagucau

SEQ ID NO: 3445044 - RNA, 19 nt, Human
cuccaaagucauaauugca

SEQ ID NO: 3445045 - RNA, 20 nt, Human
cuccaaagucauaauugcau

SEQ ID NO: 3445046 - RNA, 21 nt, Human
cuccaaagucauaauugcauu

SEQ ID NO: 3445047 - RNA, 16 nt, Human
cuccaaaguuauccag

SEQ ID NO: 3445048 - RNA, 21 nt, Human
cuccaaauggagaagcugcag

SEQ ID NO: 3445049 - RNA, 12 nt, Human
cuccaacaauaa

SEQ ID NO: 3445050 - RNA, 15 nt, Human
cuccaacaccaagca

SEQ ID NO: 3445051 - RNA, 22 nt, Human
cuccaacaccaagcacagcagc

SEQ ID NO: 3445052 - RNA, 14 nt, Human
cuccaaccccccag

SEQ ID NO: 3445053 - RNA, 17 nt, Human
cuccaaccccccagcac

SEQ ID NO: 3445054 - RNA, 19 nt, Human
cuccaaccccccagcacug

SEQ ID NO: 3445055 - RNA, 19 nt, Human
cuccaaccgggaugggagc

SEQ ID NO: 3445056 - RNA, 20 nt, Human
cuccaaccuaaccugugucu

SEQ ID NO: 3445057 - RNA, 18 nt, Human
cuccaacuccaacaucca

SEQ ID NO: 3445058 - RNA, 18 nt, Human
cuccaacuggauuauaaa

SEQ ID NO: 3445059 - RNA, 19 nt, Human
gaccuguugguuccaagcc

SEQ ID NO: 3445060 - RNA, 14 nt, Human
gaccuuaaaugcaa

SEQ ID NO: 3445061 - RNA, 18 nt, Human
gaccuuacgaucaggcac

SEQ ID NO: 3445062 - RNA, 22 nt, Human
gaccuuaguguuucugugcaug

SEQ ID NO: 3445063 - RNA, 23 nt, Human
gaccuuaguguuucugugcaugg

SEQ ID NO: 3445064 - RNA, 21 nt, Human
gaccuuaucugugcgugaaac

SEQ ID NO: 3445065 - RNA, 19 nt, Human
gaccuucacucuaagaugu

SEQ ID NO: 3445066 - RNA, 16 nt, Human
gaccuucauuucaugu

SEQ ID NO: 3445067 - RNA, 16 nt, Human
gaccuuccucgcagag

SEQ ID NO: 3445068 - RNA, 19 nt, Human
gaccuuccucgcagagagg

SEQ ID NO: 3445069 - RNA, 20 nt, Human
gaccuuccucgcagagaggc

SEQ ID NO: 3445070 - RNA, 22 nt, Human
gaccuuccucgcagagaggcca

SEQ ID NO: 3445071 - RNA, 14 nt, Human
gaccuuccugccac

SEQ ID NO: 3445072 - RNA, 16 nt, Human
gaccuuccugccacca

SEQ ID NO: 3445073 - RNA, 23 nt, Human
gaccuuccugccaccagucacug

SEQ ID NO: 3445074 - RNA, 19 nt, Human
gaccuucuagaauuauaag

SEQ ID NO: 3445075 - RNA, 15 nt, Human
gaccuucuaggaagc

SEQ ID NO: 3445076 - RNA, 15 nt, Human
gaccuucuccuucac

SEQ ID NO: 3445077 - RNA, 23 nt, Human
gaccuugaacuggguacuugugg

SEQ ID NO: 3445078 - RNA, 23 nt, Human
gaccuugcaacuucaugucaacu

SEQ ID NO: 3445079 - RNA, 16 nt, Human
gaccuuggagagacac

SEQ ID NO: 3445080 - RNA, 18 nt, Human
gaccuuggagagacacag

SEQ ID NO: 3445081 - RNA, 21 nt, Human
gaccuugggccaaauccgcuc

SEQ ID NO: 3445082 - RNA, 18 nt, Human
gaccuuguaauguaacug

SEQ ID NO: 3445083 - RNA, 20 nt, Human
gaccuuguuguuguuaaaua

SEQ ID NO: 3445084 - RNA, 18 nt, Human
cuccaagggcuucugcac

SEQ ID NO: 3445085 - RNA, 23 nt, Human
cuccaagggcuucugcacccucc

SEQ ID NO: 3445086 - RNA, 18 nt, Human
cuccaaggugauguugua

SEQ ID NO: 3445087 - RNA, 21 nt, Human
cuccaagucucaguggcuuca

SEQ ID NO: 3445088 - RNA, 18 nt, Human
cuccaagugccagaggug

SEQ ID NO: 3445089 - RNA, 19 nt, Human
cuccaauaucagugcucga

SEQ ID NO: 3445090 - RNA, 22 nt, Human
cuccaaucccaccaacccucag

SEQ ID NO: 3445091 - RNA, 16 nt, Human
cuccaauccugccccc

SEQ ID NO: 3445092 - RNA, 21 nt, Human
cuccaaugcuguuaucccugc

SEQ ID NO: 3445093 - RNA, 17 nt, Human
cuccaaugucugcugag

SEQ ID NO: 3445094 - RNA, 17 nt, Human
cuccaauuaaggauuuu

SEQ ID NO: 3445095 - RNA, 15 nt, Human
cuccaauuuuuuaag

SEQ ID NO: 3445096 - RNA, 14 nt, Human
cuccacacacacaa

SEQ ID NO: 3445097 - RNA, 20 nt, Human
cuccacacacauaauggcag

SEQ ID NO: 3445098 - RNA, 17 nt, Human
cuccacacccucuccca

SEQ ID NO: 3445099 - RNA, 16 nt, Human
cuccacaccugcggcc

SEQ ID NO: 3445100 - RNA, 16 nt, Human
cuccacagccauccca

SEQ ID NO: 3445101 - RNA, 14 nt, Human
cuccacagcgaggg

SEQ ID NO: 3445102 - RNA, 15 nt, Human
cuccacagcuaccuc

SEQ ID NO: 3445103 - RNA, 15 nt, Human
cuccacagcugccuc

SEQ ID NO: 3445104 - RNA, 13 nt, Human
cuccacaguguug

SEQ ID NO: 3445105 - RNA, 23 nt, Human
cuccacaguucaguggcagggcu

SEQ ID NO: 3445106 - RNA, 22 nt, Human
cuccacaguucgaccugcggcu

SEQ ID NO: 3445107 - RNA, 20 nt, Human
cuccacauauuucagugagg

SEQ ID NO: 3445108 - RNA, 14 nt, Human
cuccacauccuuuc

SEQ ID NO: 3445109 - RNA, 13 nt, Human
cuccacaucugcc

SEQ ID NO: 3445110 - RNA, 16 nt, Human
cuccacaucugccuua

SEQ ID NO: 3445111 - RNA, 17 nt, Human
cuccacaucugccuuaa

SEQ ID NO: 3445112 - RNA, 12 nt, Human
cuccaccaaccc

SEQ ID NO: 3445113 - RNA, 12 nt, Human
cuccaccaccac

SEQ ID NO: 3445114 - RNA, 15 nt, Human
cuccaccaccacugg

SEQ ID NO: 3445115 - RNA, 17 nt, Human
cuccaccaccacuggcc

SEQ ID NO: 3445116 - RNA, 19 nt, Human
cuccaccaccacuggccac

SEQ ID NO: 3445117 - RNA, 21 nt, Human
cuccaccaccacuggccacca

SEQ ID NO: 3445118 - RNA, 12 nt, Human
cuccaccaccca

SEQ ID NO: 3445119 - RNA, 16 nt, Human
cuccaccacccaaaag

SEQ ID NO: 3445120 - RNA, 22 nt, Human
cuccaccaccgcccgucugugu

SEQ ID NO: 3445121 - RNA, 23 nt, Human
cuccacccauccuaucagccugu

SEQ ID NO: 3445122 - RNA, 12 nt, Human
cuccaccccacu

SEQ ID NO: 3445123 - RNA, 15 nt, Human
cuccaccccacucac

SEQ ID NO: 3445124 - RNA, 20 nt, Human
cuccaccccacucacagaga

SEQ ID NO: 3445125 - RNA, 16 nt, Human
cuccaccccagccccc

SEQ ID NO: 3445126 - RNA, 14 nt, Human
cuccaccccaggac

SEQ ID NO: 3445127 - RNA, 14 nt, Human
cuccacccccagcu

SEQ ID NO: 3445128 - RNA, 19 nt, Human
cuccacccccagcugcuug

SEQ ID NO: 3445129 - RNA, 21 nt, Human
cuccaccccccagaaccuguc

SEQ ID NO: 3445130 - RNA, 14 nt, Human
cuccacccuccacc

SEQ ID NO: 3445131 - RNA, 16 nt, Human
cuccacccucugagcu

SEQ ID NO: 3445132 - RNA, 17 nt, Human
cuccacccucugagcuu

SEQ ID NO: 3445133 - RNA, 12 nt, Human
cuccacccugcu

SEQ ID NO: 3445134 - RNA, 15 nt, Human
cuccacccugcucuc

SEQ ID NO: 3445135 - RNA, 13 nt, Human
cuccacccugucc

SEQ ID NO: 3445136 - RNA, 17 nt, Human
cuccaccgcagaaggaa

SEQ ID NO: 3445137 - RNA, 18 nt, Human
cuccaccgcagaaggaag

SEQ ID NO: 3445138 - RNA, 15 nt, Human
cuccaccgcugccua

SEQ ID NO: 3445139 - RNA, 21 nt, Human
cuccaccuaguggcuguccag

SEQ ID NO: 3445140 - RNA, 23 nt, Human
cuccaccuaguggcuguccagug

SEQ ID NO: 3445141 - RNA, 14 nt, Human
cuccaccucagccu

SEQ ID NO: 3445142 - RNA, 15 nt, Human
cuccaccucagccuu

SEQ ID NO: 3445143 - RNA, 14 nt, Human
cuccaccucccugc

SEQ ID NO: 3445144 - RNA, 12 nt, Human
cuccaccuucca

SEQ ID NO: 3445145 - RNA, 14 nt, Human
cuccaccuucccac

SEQ ID NO: 3445146 - RNA, 20 nt, Human
cuccacgauccugccacccu

SEQ ID NO: 3445147 - RNA, 15 nt, Human
cuccacgcgcuucga

SEQ ID NO: 3445148 - RNA, 17 nt, Human
cuccacguucugcucau

SEQ ID NO: 3445149 - RNA, 14 nt, Human
cuccacucagcugu

SEQ ID NO: 3445150 - RNA, 19 nt, Human
cuccacuccuuccugccac

SEQ ID NO: 3445151 - RNA, 22 nt, Human
cuccacuccuuccugccaccug

SEQ ID NO: 3445152 - RNA, 13 nt, Human
cuccacucucccc

SEQ ID NO: 3445153 - RNA, 13 nt, Human
cuccacucugcuu

SEQ ID NO: 3445154 - RNA, 15 nt, Human
cuccacucugcuucu

SEQ ID NO: 3445155 - RNA, 17 nt, Human
cuccacucugcuucucu

SEQ ID NO: 3445156 - RNA, 15 nt, Human
cuccacugcccucug

SEQ ID NO: 3445157 - RNA, 16 nt, Human
cuccacugccucugga

SEQ ID NO: 3445158 - RNA, 13 nt, Human
cuccacugucaca

SEQ ID NO: 3445159 - RNA, 13 nt, Human
cuccacugugcac

SEQ ID NO: 3445160 - RNA, 16 nt, Human
cuccacugugcacacc

SEQ ID NO: 3445161 - RNA, 22 nt, Human
cuccacugugccuuugcaaauc

SEQ ID NO: 3445162 - RNA, 21 nt, Human
cuccacuucuuguuccccacu

SEQ ID NO: 3445163 - RNA, 17 nt, Human
cuccacuuggucuguga

SEQ ID NO: 3445164 - RNA, 22 nt, Human
cuccacuuggucugugagaugc

SEQ ID NO: 3445165 - RNA, 23 nt, Human
cuccacuuggucugugagaugcu

SEQ ID NO: 3445166 - RNA, 14 nt, Human
cuccacuuucagcu

SEQ ID NO: 3445167 - RNA, 15 nt, Human
cuccacuuucagcug

SEQ ID NO: 3445168 - RNA, 18 nt, Human
cuccacuuucagcugucu

SEQ ID NO: 3445169 - RNA, 19 nt, Human
cuccacuuucuagccagag

SEQ ID NO: 3445170 - RNA, 22 nt, Human
cuccacuuucuagccagaggag

SEQ ID NO: 3445171 - RNA, 22 nt, Human
cuccagaaaugucuaaaugcug

SEQ ID NO: 3445172 - RNA, 14 nt, Human
cuccagaacccauu

SEQ ID NO: 3445173 - RNA, 15 nt, Human
cuccagaagauagcu

SEQ ID NO: 3445174 - RNA, 20 nt, Human
cuccagaagcacugggauca

SEQ ID NO: 3445175 - RNA, 20 nt, Human
cuccagaagccucuggcuag

SEQ ID NO: 3445176 - RNA, 21 nt, Human
cuccagaagccucuggcuaga

SEQ ID NO: 3445177 - RNA, 18 nt, Human
cuccagaauuucccaaag

SEQ ID NO: 3445178 - RNA, 21 nt, Human
cuccagaauuucccaaagcag

SEQ ID NO: 3445179 - RNA, 22 nt, Human
cuccagaauuucccaaagcagu

SEQ ID NO: 3445180 - RNA, 18 nt, Human
cuccagaauuuggaaauc

SEQ ID NO: 3445181 - RNA, 22 nt, Human
cuccagaauuuggaaauccuag

SEQ ID NO: 3445182 - RNA, 16 nt, Human
cuccagacacaugucc

SEQ ID NO: 3445183 - RNA, 17 nt, Human
cuccagacccaccacac

SEQ ID NO: 3445184 - RNA, 21 nt, Human
cuccagacccccaccccuucc

SEQ ID NO: 3445185 - RNA, 22 nt, Human
cuccagacccccaccccuuccc

SEQ ID NO: 3445186 - RNA, 14 nt, Human
cuccagacccccag

SEQ ID NO: 3445187 - RNA, 21 nt, Human
cuccagaccccuggcuuuuca

SEQ ID NO: 3445188 - RNA, 11 nt, Human
cuccagaccug

SEQ ID NO: 3445189 - RNA, 19 nt, Human
cuccagacguaggggaggg

SEQ ID NO: 3445190 - RNA, 14 nt, Human
cuccagacucucug

SEQ ID NO: 3445191 - RNA, 16 nt, Human
cuccagagccccacag

SEQ ID NO: 3445192 - RNA, 21 nt, Human
cuccagauagcucauuucauu

SEQ ID NO: 3445193 - RNA, 17 nt, Human
cuccagauguuuccaga

SEQ ID NO: 3445194 - RNA, 19 nt, Human
cuccagauuagagccugua

SEQ ID NO: 3445195 - RNA, 22 nt, Human
cuccagauuagagccuguaaac

SEQ ID NO: 3445196 - RNA, 21 nt, Human
cuccagcaacacagccugggc

SEQ ID NO: 3445197 - RNA, 16 nt, Human
cuccagcacaaacaca

SEQ ID NO: 3445198 - RNA, 19 nt, Human
cuccagcacaaacacaagg

SEQ ID NO: 3445199 - RNA, 21 nt, Human
cuccagcacaaacacaagguc

SEQ ID NO: 3445200 - RNA, 13 nt, Human
cuccagccaaccc

SEQ ID NO: 3445201 - RNA, 13 nt, Human
cuccagccagcaa

SEQ ID NO: 3445202 - RNA, 24 nt, Human
cuccagccagcaaugauguccaga

SEQ ID NO: 3445203 - RNA, 20 nt, Human
gagacaggaaaauccucugg

SEQ ID NO: 3445204 - RNA, 21 nt, Human
gagacaggaaaauccucuggc

SEQ ID NO: 3445205 - RNA, 15 nt, Human
gagacaggagggcaa

SEQ ID NO: 3445206 - RNA, 12 nt, Human
gagacaggcaga

SEQ ID NO: 3445207 - RNA, 13 nt, Human
gagacaggguuug

SEQ ID NO: 3445208 - RNA, 22 nt, Human
gagacaggguuuugccauguug

SEQ ID NO: 3445209 - RNA, 16 nt, Human
gagacagugaauuugg

SEQ ID NO: 3445210 - RNA, 17 nt, Human
gagacagugaucuccau

SEQ ID NO: 3445211 - RNA, 14 nt, Human
gagacagugggaaa

SEQ ID NO: 3445212 - RNA, 15 nt, Human
gagacagugggaaau

SEQ ID NO: 3445213 - RNA, 22 nt, Human
gagacaguugggugagaacaac

SEQ ID NO: 3445214 - RNA, 18 nt, Human
gagacauacuugaagggc

SEQ ID NO: 3445215 - RNA, 20 nt, Human
gagacauacuugaagggcca

SEQ ID NO: 3445216 - RNA, 16 nt, Human
gagacauuaacucauu

SEQ ID NO: 3445217 - RNA, 18 nt, Human
gagacauuccugggcaca

SEQ ID NO: 3445218 - RNA, 22 nt, Human
gagaccaagacucugaaaucuc

SEQ ID NO: 3445219 - RNA, 18 nt, Human
gagaccaaggcgggagca

SEQ ID NO: 3445220 - RNA, 23 nt, Human
gagaccagccugggcaacaaagu

SEQ ID NO: 3445221 - RNA, 19 nt, Human
gagaccagccugggcagca

SEQ ID NO: 3445222 - RNA, 15 nt, Human
gagaccaggcccugg

SEQ ID NO: 3445223 - RNA, 23 nt, Human
gagaccaguugaauaaaagugca

SEQ ID NO: 3445224 - RNA, 12 nt, Human
gagaccaucccu

SEQ ID NO: 3445225 - RNA, 14 nt, Human
gagaccaucccuga

SEQ ID NO: 3445226 - RNA, 12 nt, Human
gagaccauccug

SEQ ID NO: 3445227 - RNA, 17 nt, Human
gagaccaugcagagcgc

SEQ ID NO: 3445228 - RNA, 15 nt, Human
gagaccccaggcugu

SEQ ID NO: 3445229 - RNA, 13 nt, Human
gagacccccacac

SEQ ID NO: 3445230 - RNA, 23 nt, Human
gagacccccacaccucaguuccc

SEQ ID NO: 3445231 - RNA, 14 nt, Human
gagaccccuggccu

SEQ ID NO: 3445232 - RNA, 15 nt, Human
gagaccccuggccuc

SEQ ID NO: 3445233 - RNA, 14 nt, Human
gagaccccugucuc

SEQ ID NO: 3445234 - RNA, 15 nt, Human
gagaccccugucucc

SEQ ID NO: 3445235 - RNA, 19 nt, Human
gagacccucguggccuucc

SEQ ID NO: 3445236 - RNA, 17 nt, Human
gagaccggccugccagg

SEQ ID NO: 3445237 - RNA, 13 nt, Human
gagaccguccuca

SEQ ID NO: 3445238 - RNA, 14 nt, Human
gagaccguccucac

SEQ ID NO: 3445239 - RNA, 17 nt, Human
gagaccuacaggcugac

SEQ ID NO: 3445240 - RNA, 16 nt, Human
gagaccuaccucaggu

SEQ ID NO: 3445241 - RNA, 15 nt, Human
gagaccucagccaug

SEQ ID NO: 3445242 - RNA, 11 nt, Human
gagaccucauc

SEQ ID NO: 3445243 - RNA, 12 nt, Human
gagaccucauca

SEQ ID NO: 3445244 - RNA, 18 nt, Human
gagaccucaucaggauga

SEQ ID NO: 3445245 - RNA, 13 nt, Human
gagaccuccugcc

SEQ ID NO: 3445246 - RNA, 18 nt, Human
gagaccugacaagcacug

SEQ ID NO: 3445247 - RNA, 12 nt, Human
gagaccugcccc

SEQ ID NO: 3445248 - RNA, 19 nt, Human
gagaccuggcacuggaugc

SEQ ID NO: 3445249 - RNA, 23 nt, Human
gagaccuguuuuaaaaaggaacu

SEQ ID NO: 3445250 - RNA, 19 nt, Human
gagacggagucccaccuug

SEQ ID NO: 3445251 - RNA, 16 nt, Human
gagacgggcccuggug

SEQ ID NO: 3445252 - RNA, 15 nt, Human
gagacggucgagcag

SEQ ID NO: 3445253 - RNA, 21 nt, Human
gagacguggaaccucugucuc

SEQ ID NO: 3445254 - RNA, 15 nt, Human
gagacguguacauag

SEQ ID NO: 3445255 - RNA, 16 nt, Human
gagacguguacauagu

SEQ ID NO: 3445256 - RNA, 23 nt, Human
gagacuaaccccaccacacccuc

SEQ ID NO: 3445257 - RNA, 18 nt, Human
gagacuaugcguuuuuau

SEQ ID NO: 3445258 - RNA, 21 nt, Human
gagacuauggagccuggcaca

SEQ ID NO: 3445259 - RNA, 19 nt, Human
gagacuauguaaaaauaac

SEQ ID NO: 3445260 - RNA, 13 nt, Human
gagacuauuuaaa

SEQ ID NO: 3445261 - RNA, 15 nt, Human
gagacucacaggaag

SEQ ID NO: 3445262 - RNA, 16 nt, Human
gagacucaccucugcc

SEQ ID NO: 3445263 - RNA, 18 nt, Human
gagacucaccucugccuc

SEQ ID NO: 3445264 - RNA, 23 nt, Human
gagacucaccucugccucaaugu

SEQ ID NO: 3445265 - RNA, 14 nt, Human
gagacucagccugc

SEQ ID NO: 3445266 - RNA, 13 nt, Human
gagacucagugca

SEQ ID NO: 3445267 - RNA, 17 nt, Human
gagacucccaugaagcc

SEQ ID NO: 3445268 - RNA, 20 nt, Human
gagacucccaugaagccuuu

SEQ ID NO: 3445269 - RNA, 13 nt, Human
gagacuccugcag

SEQ ID NO: 3445270 - RNA, 16 nt, Human
gagacuccugcaggca

SEQ ID NO: 3445271 - RNA, 19 nt, Human
gagacuccugcaggcagcc

SEQ ID NO: 3445272 - RNA, 21 nt, Human
gagacuccugcaggcagccag

SEQ ID NO: 3445273 - RNA, 14 nt, Human
gagacucgagaacu

SEQ ID NO: 3445274 - RNA, 17 nt, Human
gagacucgagaacuuuc

SEQ ID NO: 3445275 - RNA, 20 nt, Human
gagacucgcgacaaugcaaa

SEQ ID NO: 3445276 - RNA, 21 nt, Human
gagacucgcgacaaugcaaac

SEQ ID NO: 3445277 - RNA, 19 nt, Human
gagacucucuuaggagcag

SEQ ID NO: 3445278 - RNA, 12 nt, Human
gagacucuggcc

SEQ ID NO: 3445279 - RNA, 14 nt, Human
gagacucugucuca

SEQ ID NO: 3445280 - RNA, 19 nt, Human
gagacugcgggaugguccu

SEQ ID NO: 3445281 - RNA, 22 nt, Human
gagacugcgggaugguccuggg

SEQ ID NO: 3445282 - RNA, 17 nt, Human
gagacugcuccugagcc

SEQ ID NO: 3445283 - RNA, 20 nt, Human
gagacugcuucccauccuac

SEQ ID NO: 3445284 - RNA, 14 nt, Human
gagacugggcugag

SEQ ID NO: 3445285 - RNA, 15 nt, Human
gagacugggcugagg

SEQ ID NO: 3445286 - RNA, 17 nt, Human
gagacugggcugaggga

SEQ ID NO: 3445287 - RNA, 20 nt, Human
gagacugggcugagggagcc

SEQ ID NO: 3445288 - RNA, 16 nt, Human
gagacuggggggcuug

SEQ ID NO: 3445289 - RNA, 13 nt, Human
gagacuguagauu

SEQ ID NO: 3445290 - RNA, 23 nt, Human
gagacuguagauugcuucuguag

SEQ ID NO: 3445291 - RNA, 22 nt, Human
gagacugucccugaaaccuagu

SEQ ID NO: 3445292 - RNA, 23 nt, Human
gagacugucucaagagggcacug

SEQ ID NO: 3445293 - RNA, 14 nt, Human
cucccugccccucc

SEQ ID NO: 3445294 - RNA, 17 nt, Human
cucccugccccucccuu

SEQ ID NO: 3445295 - RNA, 20 nt, Human
cucccugccccucccuucaa

SEQ ID NO: 3445296 - RNA, 16 nt, Human
cucccugccgccucaa

SEQ ID NO: 3445297 - RNA, 14 nt, Human
cucccugccuccug

SEQ ID NO: 3445298 - RNA, 16 nt, Human
cucccugcugcuccua

SEQ ID NO: 3445299 - RNA, 17 nt, Human
cucccugcugcuccuag

SEQ ID NO: 3445300 - RNA, 11 nt, Human
cucccugcugu

SEQ ID NO: 3445301 - RNA, 14 nt, Human
cucccugcuguccc

SEQ ID NO: 3445302 - RNA, 12 nt, Human
cucccugcuuug

SEQ ID NO: 3445303 - RNA, 12 nt, Human
cucccuggaaug

SEQ ID NO: 3445304 - RNA, 23 nt, Human
cucccuggaaugaguugaggcca

SEQ ID NO: 3445305 - RNA, 23 nt, Human
cucccuggaguguggcugaggag

SEQ ID NO: 3445306 - RNA, 13 nt, Human
cucccuggauuuu

SEQ ID NO: 3445307 - RNA, 12 nt, Human
cucccuggcccu

SEQ ID NO: 3445308 - RNA, 15 nt, Human
cucccuggcccucaa

SEQ ID NO: 3445309 - RNA, 11 nt, Human
cucccuggcuc

SEQ ID NO: 3445310 - RNA, 14 nt, Human
cucccuggcuccca

SEQ ID NO: 3445311 - RNA, 15 nt, Human
cucccuggcucccuc

SEQ ID NO: 3445312 - RNA, 21 nt, Human
cucccuggcugcccuggcccu

SEQ ID NO: 3445313 - RNA, 22 nt, Human
cucccuggcugcccuggcccug

SEQ ID NO: 3445314 - RNA, 10 nt, Human
cucccugggg

SEQ ID NO: 3445315 - RNA, 14 nt, Human
cucccuggguucag

SEQ ID NO: 3445316 - RNA, 19 nt, Human
cucccuggugagagggccg

SEQ ID NO: 3445317 - RNA, 19 nt, Human
cucccuguaaccucuucag

SEQ ID NO: 3445318 - RNA, 15 nt, Human
cucccuguacagugu

SEQ ID NO: 3445319 - RNA, 11 nt, Human
cucccuguccu

SEQ ID NO: 3445320 - RNA, 13 nt, Human
cucccuguccucc

SEQ ID NO: 3445321 - RNA, 19 nt, Human
cucccugugcccccagggu

SEQ ID NO: 3445322 - RNA, 19 nt, Human
cucccuguuccccagagaa

SEQ ID NO: 3445323 - RNA, 21 nt, Human
cucccuguuugaagccugccc

SEQ ID NO: 3445324 - RNA, 23 nt, Human
cucccuguuugaagccugcccuu

SEQ ID NO: 3445325 - RNA, 22 nt, Human
cucccuucaaccauuccccaug

SEQ ID NO: 3445326 - RNA, 19 nt, Human
cucccuucaugcauggaaa

SEQ ID NO: 3445327 - RNA, 16 nt, Human
cucccuucccaccucu

SEQ ID NO: 3445328 - RNA, 17 nt, Human
cucccuucccaccucuc

SEQ ID NO: 3445329 - RNA, 14 nt, Human
cucccuuccgaccc

SEQ ID NO: 3445330 - RNA, 17 nt, Human
cucccuuccgacccucu

SEQ ID NO: 3445331 - RNA, 22 nt, Human
cucccuuccgacccucugggaa

SEQ ID NO: 3445332 - RNA, 14 nt, Human
cucccuuccucuuu

SEQ ID NO: 3445333 - RNA, 13 nt, Human
cucccuucggugg

SEQ ID NO: 3445334 - RNA, 22 nt, Human
cucccuucgguggaagagcuca

SEQ ID NO: 3445335 - RNA, 16 nt, Human
cucccuucuacagccu

SEQ ID NO: 3445336 - RNA, 18 nt, Human
cucccuucuaccugccac

SEQ ID NO: 3445337 - RNA, 21 nt, Human
cucccuucuaccugccacuca

SEQ ID NO: 3445338 - RNA, 14 nt, Human
cucccuucucccau

SEQ ID NO: 3445339 - RNA, 13 nt, Human
cucccuucucccu

SEQ ID NO: 3445340 - RNA, 15 nt, Human
cucccuucucccugg

SEQ ID NO: 3445341 - RNA, 15 nt, Human
cucccuucugcuacu

SEQ ID NO: 3445342 - RNA, 14 nt, Human
cucccuucuguuga

SEQ ID NO: 3445343 - RNA, 15 nt, Human
cucccuugaccugcu

SEQ ID NO: 3445344 - RNA, 23 nt, Human
cucccuugacuuugcuccucaca

SEQ ID NO: 3445345 - RNA, 14 nt, Human
cucccuugggcucc

SEQ ID NO: 3445346 - RNA, 17 nt, Human
cucccuugggcucugau

SEQ ID NO: 3445347 - RNA, 18 nt, Human
cucccuugggcucugaug

SEQ ID NO: 3445348 - RNA, 20 nt, Human
cucccuugguggcaagagcc

SEQ ID NO: 3445349 - RNA, 16 nt, Human
gagaugaauuaaauuu

SEQ ID NO: 3445350 - RNA, 17 nt, Human
gagaugagaggggagag

SEQ ID NO: 3445351 - RNA, 13 nt, Human
gagaugaggccag

SEQ ID NO: 3445352 - RNA, 14 nt, Human
gagaugaggccaga

SEQ ID NO: 3445353 - RNA, 21 nt, Human
gagaugagggaugggccuggc

SEQ ID NO: 3445354 - RNA, 20 nt, Human
gagaugaugaaaauauuuaa

SEQ ID NO: 3445355 - RNA, 18 nt, Human
gagaugauucagaagggg

SEQ ID NO: 3445356 - RNA, 14 nt, Human
gagaugcagaggua

SEQ ID NO: 3445357 - RNA, 13 nt, Human
gagaugcagcugg

SEQ ID NO: 3445358 - RNA, 16 nt, Human
gagaugcagugccagg

SEQ ID NO: 3445359 - RNA, 21 nt, Human
gagaugcguuguuacaggaag

SEQ ID NO: 3445360 - RNA, 16 nt, Human
gagaugcugagggugu

SEQ ID NO: 3445361 - RNA, 12 nt, Human
gagaugcuggcu

SEQ ID NO: 3445362 - RNA, 17 nt, Human
gagaugcuguaacuuaa

SEQ ID NO: 3445363 - RNA, 17 nt, Human
gagaugcugugccccug

SEQ ID NO: 3445364 - RNA, 22 nt, Human
gagauggacaguucacacccug

SEQ ID NO: 3445365 - RNA, 14 nt, Human
gagauggaggagga

SEQ ID NO: 3445366 - RNA, 16 nt, Human
gagauggaggaggagg

SEQ ID NO: 3445367 - RNA, 18 nt, Human
gagauggagucuugcucu

SEQ ID NO: 3445368 - RNA, 15 nt, Human
gagauggaucacaua

SEQ ID NO: 3445369 - RNA, 17 nt, Human
gagaugggacugggagg

SEQ ID NO: 3445370 - RNA, 18 nt, Human
gagauggggagaaaccua

SEQ ID NO: 3445371 - RNA, 16 nt, Human
gagauguaaaagguau

SEQ ID NO: 3445372 - RNA, 15 nt, Human
gagauguaagagcuu

SEQ ID NO: 3445373 - RNA, 15 nt, Human
gagauguagcaaaac

SEQ ID NO: 3445374 - RNA, 16 nt, Human
gagauguaugaaggcu

SEQ ID NO: 3445375 - RNA, 20 nt, Human
gagauguauguuuggcucug

SEQ ID NO: 3445376 - RNA, 15 nt, Human
gagaugucuuggaac

SEQ ID NO: 3445377 - RNA, 20 nt, Human
gagauguguaauuuuucugu

SEQ ID NO: 3445378 - RNA, 18 nt, Human
gagauguguguugauacu

SEQ ID NO: 3445379 - RNA, 15 nt, Human
gagauuaccuccuga

SEQ ID NO: 3445380 - RNA, 16 nt, Human
gagauuagagggaggu

SEQ ID NO: 3445381 - RNA, 23 nt, Human
gagauuauuuacaagaagaacuc

SEQ ID NO: 3445382 - RNA, 12 nt, Human
gagauucauuuu

SEQ ID NO: 3445383 - RNA, 16 nt, Human
gagauugaacuccaag

SEQ ID NO: 3445384 - RNA, 14 nt, Human
gagauugaauuuca

SEQ ID NO: 3445385 - RNA, 17 nt, Human
gagauugagaaggagag

SEQ ID NO: 3445386 - RNA, 18 nt, Human
gagauugcaccacugcac

SEQ ID NO: 3445387 - RNA, 13 nt, Human
gagauugcuaauu

SEQ ID NO: 3445388 - RNA, 14 nt, Human
gagauuggaaggaa

SEQ ID NO: 3445389 - RNA, 16 nt, Human
gagauuggaucaagua

SEQ ID NO: 3445390 - RNA, 21 nt, Human
gagauugugccacuucacucc

SEQ ID NO: 3445391 - RNA, 22 nt, Human
gagauuuaccagggauguagau

SEQ ID NO: 3445392 - RNA, 13 nt, Human
gagauuucaucug

SEQ ID NO: 3445393 - RNA, 22 nt, Human
gagauuucaucugcucuccuuc

SEQ ID NO: 3445394 - RNA, 12 nt, Human
gagauuugucua

SEQ ID NO: 3445395 - RNA, 19 nt, Human
gagauuuuuaaaaaauauu

SEQ ID NO: 3445396 - RNA, 22 nt, Human
gagcaaacugcaugcccagaga

SEQ ID NO: 3445397 - RNA, 23 nt, Human
gagcaaacugcaugcccagagac

SEQ ID NO: 3445398 - RNA, 17 nt, Human
gagcaaaguagaucaug

SEQ ID NO: 3445399 - RNA, 14 nt, Human
gagcaaagucuaaa

SEQ ID NO: 3445400 - RNA, 16 nt, Human
gagcaaagucuaaagu

SEQ ID NO: 3445401 - RNA, 19 nt, Human
gagcaaagucuaaaguuua

SEQ ID NO: 3445402 - RNA, 14 nt, Human
gagcaaagugaggg

SEQ ID NO: 3445403 - RNA, 13 nt, Human
gagcaacauuuua

SEQ ID NO: 3445404 - RNA, 15 nt, Human
gagcaaccguggccc

SEQ ID NO: 3445405 - RNA, 22 nt, Human
gagcaaccguggcccuuccugg

SEQ ID NO: 3445406 - RNA, 16 nt, Human
gagcaaccucucacuc

SEQ ID NO: 3445407 - RNA, 21 nt, Human
gagcaaccucucacuccccau

SEQ ID NO: 3445408 - RNA, 20 nt, Human
gagcaacgaccagggccgag

SEQ ID NO: 3445409 - RNA, 20 nt, Human
gagcaagaccccaucucaaa

SEQ ID NO: 3445410 - RNA, 18 nt, Human
gagcaagacgcugugcug

SEQ ID NO: 3445411 - RNA, 21 nt, Human
gagcaagacgcugugcugccc

SEQ ID NO: 3445412 - RNA, 23 nt, Human
gagcaagacgcugugcugcccug

SEQ ID NO: 3445413 - RNA, 12 nt, Human
gagcaagacucu

SEQ ID NO: 3445414 - RNA, 14 nt, Human
gagcaagagcuggc

SEQ ID NO: 3445415 - RNA, 13 nt, Human
gagcaagcuuuuu

SEQ ID NO: 3445416 - RNA, 21 nt, Human
gagcaaggaagguaaaaaguu

SEQ ID NO: 3445417 - RNA, 23 nt, Human
gagcaauauuuauggaugcaaca

SEQ ID NO: 3445418 - RNA, 16 nt, Human
gagcacacccagcccc

SEQ ID NO: 3445419 - RNA, 13 nt, Human
gagcacacuguag

SEQ ID NO: 3445420 - RNA, 12 nt, Human
gagcacagcccu

SEQ ID NO: 3445421 - RNA, 14 nt, Human
gagcacagcccucc

SEQ ID NO: 3445422 - RNA, 15 nt, Human
gagcacaggcagcug

SEQ ID NO: 3445423 - RNA, 16 nt, Human
gagcacaggucccacc

SEQ ID NO: 3445424 - RNA, 18 nt, Human
gagcacaggucccaccuc

SEQ ID NO: 3445425 - RNA, 16 nt, Human
gagcacccauuccaaa

SEQ ID NO: 3445426 - RNA, 19 nt, Human
gagcacccauuccaaagcu

SEQ ID NO: 3445427 - RNA, 17 nt, Human
gagcaccccucucugca

SEQ ID NO: 3445428 - RNA, 21 nt, Human
gagcaccccucucugcaucug

SEQ ID NO: 3445429 - RNA, 14 nt, Human
gagcacccucugga

SEQ ID NO: 3445430 - RNA, 13 nt, Human
gagcacccugagg

SEQ ID NO: 3445431 - RNA, 18 nt, Human
gagcaccgugucaagcug

SEQ ID NO: 3445432 - RNA, 21 nt, Human
gagcaccgugucaagcugcuc

SEQ ID NO: 3445433 - RNA, 22 nt, Human
gagcaccgugucaagcugcucu

SEQ ID NO: 3445434 - RNA, 19 nt, Human
gagcaccuccacauccucc

SEQ ID NO: 3445435 - RNA, 17 nt, Human
gagcaccuccagccuga

SEQ ID NO: 3445436 - RNA, 14 nt, Human
gagcaccugcuguc

SEQ ID NO: 3445437 - RNA, 23 nt, Human
gagcaccugcuucaugcucagcc

SEQ ID NO: 3445438 - RNA, 16 nt, Human
gagcaccuuccucacu

SEQ ID NO: 3445439 - RNA, 13 nt, Human
gagcacugccagg

SEQ ID NO: 3445440 - RNA, 14 nt, Human
gagcacuggagugc

SEQ ID NO: 3445441 - RNA, 20 nt, Human
gagcacuggagugcagggag

SEQ ID NO: 3445442 - RNA, 22 nt, Human
gagcacuggaguggcucgccag

SEQ ID NO: 3445443 - RNA, 22 nt, Human
gagcagaaaacccuugggccag

SEQ ID NO: 3445444 - RNA, 22 nt, Human
gagcagaaauuuaucuuucaaa

SEQ ID NO: 3445445 - RNA, 23 nt, Human
gagcagaacggagccccaggccu

SEQ ID NO: 3445446 - RNA, 16 nt, Human
gagcagaagcagcaac

SEQ ID NO: 3445447 - RNA, 17 nt, Human
gagcagaaggggagaug

SEQ ID NO: 3445448 - RNA, 23 nt, Human
gagcagacuggcggggggcccau

SEQ ID NO: 3445449 - RNA, 18 nt, Human
gagcagacuggugagcag

SEQ ID NO: 3445450 - RNA, 15 nt, Human
gagcagacugguggg

SEQ ID NO: 3445451 - RNA, 13 nt, Human
gagcagagacacu

SEQ ID NO: 3445452 - RNA, 21 nt, Human
gagcagagacacuaacgacuu

SEQ ID NO: 3445453 - RNA, 24 nt, Human
gagcagagacaugacucagccugu

SEQ ID NO: 3445454 - RNA, 21 nt, Human
gagcagagagcuuagccugga

SEQ ID NO: 3445455 - RNA, 15 nt, Human
gagcagagcaggcaa

SEQ ID NO: 3445456 - RNA, 13 nt, Human
gagcagaggcagc

SEQ ID NO: 3445457 - RNA, 15 nt, Human
gagcagaggggcuga

SEQ ID NO: 3445458 - RNA, 21 nt, Human
gagcagaugcagagagccauu

SEQ ID NO: 3445459 - RNA, 11 nt, Human
gagcagcaccu

SEQ ID NO: 3445460 - RNA, 21 nt, Human
gagcagcagguagccugcugg

SEQ ID NO: 3445461 - RNA, 16 nt, Human
gagcagcagugaaaac

SEQ ID NO: 3445462 - RNA, 20 nt, Human
gagcagccaccccaugcugg

SEQ ID NO: 3445463 - RNA, 16 nt, Human
gagcagcccuggaguc

SEQ ID NO: 3445464 - RNA, 15 nt, Human
gagcagccuggagcc

SEQ ID NO: 3445465 - RNA, 15 nt, Human
gagauaccagcgagg

SEQ ID NO: 3445466 - RNA, 13 nt, Human
gagauacucuggg

SEQ ID NO: 3445467 - RNA, 21 nt, Human
gagauacuuggucacagccag

SEQ ID NO: 3445468 - RNA, 23 nt, Human
gagauacuuggucacagccaggc

SEQ ID NO: 3445469 - RNA, 13 nt, Human
gagauacuuuuuc

SEQ ID NO: 3445470 - RNA, 15 nt, Human
gagauagcauuguga

SEQ ID NO: 3445471 - RNA, 16 nt, Human
gagauagcauugugaa

SEQ ID NO: 3445472 - RNA, 22 nt, Human
gagauagccaaggccaaaggaa

SEQ ID NO: 3445473 - RNA, 14 nt, Human
gagauagccugugg

SEQ ID NO: 3445474 - RNA, 17 nt, Human
gagauagccuguggccc

SEQ ID NO: 3445475 - RNA, 21 nt, Human
gagauagccuguggcccuguc

SEQ ID NO: 3445476 - RNA, 22 nt, Human
gagauaggaaggucauuuccau

SEQ ID NO: 3445477 - RNA, 16 nt, Human
gagauauggcagcgaa

SEQ ID NO: 3445478 - RNA, 17 nt, Human
gagauauggcagcgaaa

SEQ ID NO: 3445479 - RNA, 22 nt, Human
gagauauuuacaugaauugcau

SEQ ID NO: 3445480 - RNA, 14 nt, Human
gagauauuuuguaa

SEQ ID NO: 3445481 - RNA, 22 nt, Human
gagauauuuuguaaaauguauu

SEQ ID NO: 3445482 - RNA, 13 nt, Human
gagaucaaagaug

SEQ ID NO: 3445483 - RNA, 15 nt, Human
gagaucaaagaugaa

SEQ ID NO: 3445484 - RNA, 18 nt, Human
gagauccagggcaaggcc

SEQ ID NO: 3445485 - RNA, 18 nt, Human
gagaucccaacacugcca

SEQ ID NO: 3445486 - RNA, 15 nt, Human
gagauccccugagcc

SEQ ID NO: 3445487 - RNA, 17 nt, Human
gagaucccgccucuucu

SEQ ID NO: 3445488 - RNA, 15 nt, Human
gagauccuuaucgaa

SEQ ID NO: 3445489 - RNA, 18 nt, Human
gagauccuuguguuuauc

SEQ ID NO: 3445490 - RNA, 15 nt, Human
gagaucuaaaaauaa

SEQ ID NO: 3445491 - RNA, 19 nt, Human
gagaucuaagccuuuccau

SEQ ID NO: 3445492 - RNA, 23 nt, Human
gagaucuaaggaugucacagggc

SEQ ID NO: 3445493 - RNA, 22 nt, Human
gagaucuccuugcccuagauga

SEQ ID NO: 3445494 - RNA, 20 nt, Human
gaggaguaaccgcuccaggu

SEQ ID NO: 3445495 - RNA, 19 nt, Human
gaggagucugagguccuga

SEQ ID NO: 3445496 - RNA, 20 nt, Human
gaggagucugagguccugag

SEQ ID NO: 3445497 - RNA, 11 nt, Human
gaggaguucaa

SEQ ID NO: 3445498 - RNA, 14 nt, Human
gaggaguucaauga

SEQ ID NO: 3445499 - RNA, 13 nt, Human
gaggauacgacag

SEQ ID NO: 3445500 - RNA, 19 nt, Human
gaggaucacagugcugaga

SEQ ID NO: 3445501 - RNA, 13 nt, Human
gaggaucucuuga

SEQ ID NO: 3445502 - RNA, 16 nt, Human
gaggaucucuugagcc

SEQ ID NO: 3445503 - RNA, 14 nt, Human
gaggaugagagccc

SEQ ID NO: 3445504 - RNA, 18 nt, Human
gaggaugagagcccagag

SEQ ID NO: 3445505 - RNA, 22 nt, Human
gaggaugagcucuacccagggc

SEQ ID NO: 3445506 - RNA, 13 nt, Human
gaggaugagcugg

SEQ ID NO: 3445507 - RNA, 21 nt, Human
gaggaugcagagucagcagaa

SEQ ID NO: 3445508 - RNA, 14 nt, Human
gaggauggagagag

SEQ ID NO: 3445509 - RNA, 16 nt, Human
gaggauggccaguguc

SEQ ID NO: 3445510 - RNA, 19 nt, Human
gaggauggccagugucugu

SEQ ID NO: 3445511 - RNA, 14 nt, Human
gaggauggcccagg

SEQ ID NO: 3445512 - RNA, 15 nt, Human
gaggaugggaaggag

SEQ ID NO: 3445513 - RNA, 19 nt, Human
gaggaugggaaggagggag

SEQ ID NO: 3445514 - RNA, 18 nt, Human
gaggaugucccugggcca

SEQ ID NO: 3445515 - RNA, 19 nt, Human
gaggaugucccugggccag

SEQ ID NO: 3445516 - RNA, 15 nt, Human
gaggaugucugggcc

SEQ ID NO: 3445517 - RNA, 14 nt, Human
gaggaugugggcag

SEQ ID NO: 3445518 - RNA, 12 nt, Human
gaggauguucug

SEQ ID NO: 3445519 - RNA, 17 nt, Human
gaggauguucugggaca

SEQ ID NO: 3445520 - RNA, 15 nt, Human
gaggauugcuaucug

SEQ ID NO: 3445521 - RNA, 18 nt, Human
gaggauugcuugagccca

SEQ ID NO: 3445522 - RNA, 15 nt, Human
gaggauuucaagccu

SEQ ID NO: 3445523 - RNA, 16 nt, Human
gaggaauucuguauag

SEQ ID NO: 3445524 - RNA, 17 nt, Human
gaggaauucuguauaga

SEQ ID NO: 3445525 - RNA, 22 nt, Human
gaggaauuuucuuuguguagcu

SEQ ID NO: 3445526 - RNA, 13 nt, Human
gaggacaaaacuu

SEQ ID NO: 3445527 - RNA, 23 nt, Human
gaggacaaaacuucuugucagac

SEQ ID NO: 3445528 - RNA, 18 nt, Human
gaggacaagagaaaaaag

SEQ ID NO: 3445529 - RNA, 14 nt, Human
gaggacacaugucc

SEQ ID NO: 3445530 - RNA, 21 nt, Human
gaggacagaugccuccuuccu

SEQ ID NO: 3445531 - RNA, 14 nt, Human
gaggacagcugucc

SEQ ID NO: 3445532 - RNA, 14 nt, Human
gaggacaggcggga

SEQ ID NO: 3445533 - RNA, 13 nt, Human
gaggacagggagg

SEQ ID NO: 3445534 - RNA, 22 nt, Human
gaggaccacuccuguacacuga

SEQ ID NO: 3445535 - RNA, 13 nt, Human
gaggaccagggcc

SEQ ID NO: 3445536 - RNA, 13 nt, Human
gaggaccagggcu

SEQ ID NO: 3445537 - RNA, 14 nt, Human
gaggacccagaccc

SEQ ID NO: 3445538 - RNA, 11 nt, Human
gaggacccagg

SEQ ID NO: 3445539 - RNA, 12 nt, Human
gaggacccagga

SEQ ID NO: 3445540 - RNA, 20 nt, Human
gaggacccaggaaaggcagg

SEQ ID NO: 3445541 - RNA, 14 nt, Human
gaggacccagggcu

SEQ ID NO: 3445542 - RNA, 16 nt, Human
gaggacccagggcucu

SEQ ID NO: 3445543 - RNA, 15 nt, Human
gaggaccucugggcu

SEQ ID NO: 3445544 - RNA, 22 nt, Human
gaggaccugacccuacucccuu

SEQ ID NO: 3445545 - RNA, 13 nt, Human
gaggaccugagcc

SEQ ID NO: 3445546 - RNA, 14 nt, Human
gaggaccugagccu

SEQ ID NO: 3445547 - RNA, 21 nt, Human
gaggaccugagccugccgagc

SEQ ID NO: 3445548 - RNA, 22 nt, Human
gaggaccugagccugccgagca

SEQ ID NO: 3445549 - RNA, 13 nt, Human
gaggaccugcccg

SEQ ID NO: 3445550 - RNA, 17 nt, Human
gaggaccuggggcacag

SEQ ID NO: 3445551 - RNA, 18 nt, Human
gaggaccuggggcacagu

SEQ ID NO: 3445552 - RNA, 23 nt, Human
gaggaccuguauuuaagcaaaua

SEQ ID NO: 3445553 - RNA, 15 nt, Human
gaggacgcucucugg

SEQ ID NO: 3445554 - RNA, 20 nt, Human
gaggacgcucucuggccuuc

SEQ ID NO: 3445555 - RNA, 18 nt, Human
gaggacucacuugcccac

SEQ ID NO: 3445556 - RNA, 23 nt, Human
gaggacuccaggcagcagacaca

SEQ ID NO: 3445557 - RNA, 20 nt, Human
gaggacucccaacccuggcu

SEQ ID NO: 3445558 - RNA, 21 nt, Human
gaggacucccaacccuggcuu

SEQ ID NO: 3445559 - RNA, 20 nt, Human
gaggacucgcuuguaaauac

SEQ ID NO: 3445560 - RNA, 20 nt, Human
gaggacuguagggagggcgg

SEQ ID NO: 3445561 - RNA, 21 nt, Human
gaggacuguagggagggcggc

SEQ ID NO: 3445562 - RNA, 17 nt, Human
gaggacuugugucucug

SEQ ID NO: 3445563 - RNA, 18 nt, Human
gaggacuugugucucugu

SEQ ID NO: 3445564 - RNA, 9 nt, Human
gaggagaaa

SEQ ID NO: 3445565 - RNA, 14 nt, Human
gaggagaagaaaau

SEQ ID NO: 3445566 - RNA, 12 nt, Human
gaggagaagaau

SEQ ID NO: 3445567 - RNA, 20 nt, Human
gaggagaagaauuuucagac

SEQ ID NO: 3445568 - RNA, 16 nt, Human
gaggagagaaaauaua

SEQ ID NO: 3445569 - RNA, 15 nt, Human
gaggagagaagaaug

SEQ ID NO: 3445570 - RNA, 21 nt, Human
gaggagagaagaaugagccua

SEQ ID NO: 3445571 - RNA, 20 nt, Human
gaggagagagcagcuucugc

SEQ ID NO: 3445572 - RNA, 17 nt, Human
gaggagagaggcagaga

SEQ ID NO: 3445573 - RNA, 24 nt, Human
gaggagagauagccuguggcccug

SEQ ID NO: 3445574 - RNA, 17 nt, Human
gaggagagccagagaag

SEQ ID NO: 3445575 - RNA, 22 nt, Human
gaggagagccagagaagugaca

SEQ ID NO: 3445576 - RNA, 15 nt, Human
gaggagcagugcagg

SEQ ID NO: 3445577 - RNA, 13 nt, Human
gaggagccaggca

SEQ ID NO: 3445578 - RNA, 20 nt, Human
gaggagcccaggccaggacu

SEQ ID NO: 3445579 - RNA, 21 nt, Human
gaggagcccauacucagccug

SEQ ID NO: 3445580 - RNA, 17 nt, Human
gaggagccccaucuguc

SEQ ID NO: 3445581 - RNA, 20 nt, Human
gaggagcccccacccuguuc

SEQ ID NO: 3445582 - RNA, 13 nt, Human
gaggagcccugcc

SEQ ID NO: 3445583 - RNA, 15 nt, Human
gaggagcccugccuc

SEQ ID NO: 3445584 - RNA, 18 nt, Human
gaggagcucaggacacua

SEQ ID NO: 3445585 - RNA, 21 nt, Human
gaggagcuugggggaugacua

SEQ ID NO: 3445586 - RNA, 18 nt, Human
gaggaggaaaucccuuca

SEQ ID NO: 3445587 - RNA, 14 nt, Human
gaggaggaggaggu

SEQ ID NO: 3445588 - RNA, 21 nt, Human
gaggaggaugucccugggcca

SEQ ID NO: 3445589 - RNA, 12 nt, Human
gaggaggcagca

SEQ ID NO: 3445590 - RNA, 15 nt, Human
gaggaggccaccucu

SEQ ID NO: 3445591 - RNA, 18 nt, Human
gaggaggccaccucucca

SEQ ID NO: 3445592 - RNA, 20 nt, Human
gaggaggccaccucuccaag

SEQ ID NO: 3445593 - RNA, 13 nt, Human
gaggaggccucca

SEQ ID NO: 3445594 - RNA, 21 nt, Human
gaggaggccuugggcucugcu

SEQ ID NO: 3445595 - RNA, 13 nt, Human
gaggagggcaggc

SEQ ID NO: 3445596 - RNA, 15 nt, Human
gaggagggcaggcau

SEQ ID NO: 3445597 - RNA, 17 nt, Human
gaggaggggccgcugcc

SEQ ID NO: 3445598 - RNA, 21 nt, Human
gaggagggucuagaggccuga

SEQ ID NO: 3445599 - RNA, 15 nt, Human
gaggaggugccugga

SEQ ID NO: 3445600 - RNA, 21 nt, Human
gaggaggugugaggaggaggc

SEQ ID NO: 3445601 - RNA, 21 nt, Human
gaggaguaaaauucaguuuuu

SEQ ID NO: 3445602 - RNA, 11 nt, Human
gaggaguaaca

SEQ ID NO: 3445603 - RNA, 14 nt, Human
gaggagucugaggu

SEQ ID NO: 3445604 - RNA, 15 nt, Human
gaggagucugagguc

SEQ ID NO: 3445605 - RNA, 23 nt, Human
gaggagucugagguccugagcac

SEQ ID NO: 3445606 - RNA, 13 nt, Human
gaggagugaggaa

SEQ ID NO: 3445607 - RNA, 14 nt, Human
gaggaguggaggug

SEQ ID NO: 3445608 - RNA, 12 nt, Human
gaggaguucaau

SEQ ID NO: 3445609 - RNA, 18 nt, Human
gaggaguuuccuaaaagu

SEQ ID NO: 3445610 - RNA, 20 nt, Human
gaggaguuuccuaaaaguuc

SEQ ID NO: 3445611 - RNA, 18 nt, Human
gaggauauauuuucacuu

SEQ ID NO: 3445612 - RNA, 18 nt, Human
gaggaucacagugcugag

SEQ ID NO: 3445613 - RNA, 16 nt, Human
gaggaucacuggagcc

SEQ ID NO: 3445614 - RNA, 16 nt, Human
gaggaucagaaaguaa

SEQ ID NO: 3445615 - RNA, 19 nt, Human
gaggaucucuugagccugg

SEQ ID NO: 3445616 - RNA, 22 nt, Human
gaggaucucuugagccugggag

SEQ ID NO: 3445617 - RNA, 15 nt, Human
gaggaugagagccca

SEQ ID NO: 3445618 - RNA, 17 nt, Human
gaggaugagagcccaga

SEQ ID NO: 3445619 - RNA, 12 nt, Human
gaggauggagag

SEQ ID NO: 3445620 - RNA, 14 nt, Human
gaggauggccagug

SEQ ID NO: 3445621 - RNA, 20 nt, Human
gaggauggccagugucuguc

SEQ ID NO: 3445622 - RNA, 14 nt, Human
gaggaugggcucgc

SEQ ID NO: 3445623 - RNA, 21 nt, Human
gaggauguaaagaucaauaaa

SEQ ID NO: 3445624 - RNA, 20 nt, Human
gaggaugucacucagaugga

SEQ ID NO: 3445625 - RNA, 18 nt, Human
gaggaugucucaaacuuc

SEQ ID NO: 3445626 - RNA, 22 nt, Human
gaggauugcuugagcccaggag

SEQ ID NO: 3445627 - RNA, 16 nt, Human
gaggauugcuugagcu

SEQ ID NO: 3445628 - RNA, 20 nt, Human
gaggauugcuugagcucagg

SEQ ID NO: 3445629 - RNA, 22 nt, Human
gaggauuuaagggauggaaaag

SEQ ID NO: 3445630 - RNA, 12 nt, Human
gaggauuuagaa

SEQ ID NO: 3445631 - RNA, 17 nt, Human
gaggauuucaagccugc

SEQ ID NO: 3445632 - RNA, 17 nt, Human
gaggauuuuuuucugag

SEQ ID NO: 3445633 - RNA, 20 nt, Human
gaggcaaagcuggcucaccu

SEQ ID NO: 3445634 - RNA, 21 nt, Human
gaggcaauccuaccuugcuuu

SEQ ID NO: 3445635 - RNA, 21 nt, Human
gaggcaauuagacacuuugga

SEQ ID NO: 3445636 - RNA, 13 nt, Human
gaggcaccaggaa

SEQ ID NO: 3445637 - RNA, 21 nt, Human
gaggcaccauucaggaaccug

SEQ ID NO: 3445638 - RNA, 21 nt, Human
gaggcagaaagcagaggcugg

SEQ ID NO: 3445639 - RNA, 16 nt, Human
gaggcugcagcgagcu

SEQ ID NO: 3445640 - RNA, 23 nt, Human
gaggcugccccaccccuccccau

SEQ ID NO: 3445641 - RNA, 15 nt, Human
gaggcugccccucuc

SEQ ID NO: 3445642 - RNA, 14 nt, Human
gaggcugccuccca

SEQ ID NO: 3445643 - RNA, 15 nt, Human
gaggcugccucccaa

SEQ ID NO: 3445644 - RNA, 21 nt, Human
gaggcugcucggggugcacag

SEQ ID NO: 3445645 - RNA, 23 nt, Human
gaggcugcucggggugcacagga

SEQ ID NO: 3445646 - RNA, 15 nt, Human
gaggcuggaggcagg

SEQ ID NO: 3445647 - RNA, 19 nt, Human
gaggcuggaguuggggcag

SEQ ID NO: 3445648 - RNA, 13 nt, Human
gaggcuggcacag

SEQ ID NO: 3445649 - RNA, 15 nt, Human
gaggcuggccucaga

SEQ ID NO: 3445650 - RNA, 18 nt, Human
gaggcuggccucuacauc

SEQ ID NO: 3445651 - RNA, 16 nt, Human
gaggcuggcuggggcc

SEQ ID NO: 3445652 - RNA, 23 nt, Human
gaggcugggaauggaggggcaga

SEQ ID NO: 3445653 - RNA, 21 nt, Human
gaggcugggacgcucugcugu

SEQ ID NO: 3445654 - RNA, 15 nt, Human
gaggcugggccaagc

SEQ ID NO: 3445655 - RNA, 23 nt, Human
gaggcugggccaagccagggaug

SEQ ID NO: 3445656 - RNA, 17 nt, Human
gaggcugggggagagcc

SEQ ID NO: 3445657 - RNA, 13 nt, Human
gaggcugguuuug

SEQ ID NO: 3445658 - RNA, 23 nt, Human
gaggcuguaggacucgcagucag

SEQ ID NO: 3445659 - RNA, 20 nt, Human
gaggcugucuucucaggcuc

SEQ ID NO: 3445660 - RNA, 23 nt, Human
gaggcuguggucacagcggaggu

SEQ ID NO: 3445661 - RNA, 16 nt, Human
gaggcuuccagagagu

SEQ ID NO: 3445662 - RNA, 21 nt, Human
gaggcuuccagagaguccucu

SEQ ID NO: 3445663 - RNA, 22 nt, Human
gaggcuuccagagaguccucug

SEQ ID NO: 3445664 - RNA, 18 nt, Human
gaggcuucuccgccagcc

SEQ ID NO: 3445665 - RNA, 21 nt, Human
gaggcuucuccgccagccucc

SEQ ID NO: 3445666 - RNA, 23 nt, Human
gaggcuucuccgccagccuccuc

SEQ ID NO: 3445667 - RNA, 17 nt, Human
gaggcuugucagagcug

SEQ ID NO: 3445668 - RNA, 14 nt, Human
gaggcuuuccaugg

SEQ ID NO: 3445669 - RNA, 12 nt, Human
gagggaaaccuu

SEQ ID NO: 3445670 - RNA, 15 nt, Human
gagggaacagacagg

SEQ ID NO: 3445671 - RNA, 18 nt, Human
gagggaacagacaggaga

SEQ ID NO: 3445672 - RNA, 19 nt, Human
gagggaacagacaggagaa

SEQ ID NO: 3445673 - RNA, 17 nt, Human
gagggaaggauuuagga

SEQ ID NO: 3445674 - RNA, 19 nt, Human
gagggaagggagccaaggg

SEQ ID NO: 3445675 - RNA, 20 nt, Human
gagggaaggguuucucuauu

SEQ ID NO: 3445676 - RNA, 14 nt, Human
gagggaaugugaaa

SEQ ID NO: 3445677 - RNA, 18 nt, Human
gagggaauugaggucugc

SEQ ID NO: 3445678 - RNA, 18 nt, Human
gagggacaaaggagccug

SEQ ID NO: 3445679 - RNA, 19 nt, Human
gagggacaaaggagccugu

SEQ ID NO: 3445680 - RNA, 16 nt, Human
gagggaccagccaaga

SEQ ID NO: 3445681 - RNA, 14 nt, Human
gagggaccucuccc

SEQ ID NO: 3445682 - RNA, 16 nt, Human
gagggacgccuggggg

SEQ ID NO: 3445683 - RNA, 22 nt, Human
gagggacgcggcucccggggca

SEQ ID NO: 3445684 - RNA, 15 nt, Human
gagggacggccaaga

SEQ ID NO: 3445685 - RNA, 19 nt, Human
gagggacucugaagccucu

SEQ ID NO: 3445686 - RNA, 21 nt, Human
gagggacucugaagccucugg

SEQ ID NO: 3445687 - RNA, 14 nt, Human
gagggagaagcaug

SEQ ID NO: 3445688 - RNA, 20 nt, Human
gaggcugugugccuggggga

SEQ ID NO: 3445689 - RNA, 21 nt, Human
gaggcugugugccugggggag

SEQ ID NO: 3445690 - RNA, 17 nt, Human
gaggcuguucccaccag

SEQ ID NO: 3445691 - RNA, 20 nt, Human
gaggcuuccagagaguccuc

SEQ ID NO: 3445692 - RNA, 15 nt, Human
gaggcuuccugcguc

SEQ ID NO: 3445693 - RNA, 21 nt, Human
gaggcuuccugcguccuccuc

SEQ ID NO: 3445694 - RNA, 15 nt, Human
gaggcuucuccgcca

SEQ ID NO: 3445695 - RNA, 19 nt, Human
gaggcuucuccgccagccu

SEQ ID NO: 3445696 - RNA, 16 nt, Human
gaggcuucuucagauc

SEQ ID NO: 3445697 - RNA, 15 nt, Human
gaggcuugcugagag

SEQ ID NO: 3445698 - RNA, 22 nt, Human
gaggcuugggaccgccagaugg

SEQ ID NO: 3445699 - RNA, 14 nt, Human
gaggcuuggggcug

SEQ ID NO: 3445700 - RNA, 19 nt, Human
gaggcuuguuuaccuuucu

SEQ ID NO: 3445701 - RNA, 16 nt, Human
gaggcuuuguguugua

SEQ ID NO: 3445702 - RNA, 13 nt, Human
gagggaaaauguu

SEQ ID NO: 3445703 - RNA, 21 nt, Human
gagggaaagcccagaaaagga

SEQ ID NO: 3445704 - RNA, 16 nt, Human
gagggaaaggccagca

SEQ ID NO: 3445705 - RNA, 15 nt, Human
gagggaaagugcaua

SEQ ID NO: 3445706 - RNA, 20 nt, Human
gagggaagaguggaggugga

SEQ ID NO: 3445707 - RNA, 14 nt, Human
gagggaagggacgg

SEQ ID NO: 3445708 - RNA, 16 nt, Human
gagggaaugaaccugg

SEQ ID NO: 3445709 - RNA, 16 nt, Human
gagggacaaaggagcc

SEQ ID NO: 3445710 - RNA, 21 nt, Human
gagggacaaaggagccuguga

SEQ ID NO: 3445711 - RNA, 21 nt, Human
gagggacaaauuuaaaacaaa

SEQ ID NO: 3445712 - RNA, 17 nt, Human
gagggaccaacugggcc

SEQ ID NO: 3445713 - RNA, 16 nt, Human
gagggaccauguguca

SEQ ID NO: 3445714 - RNA, 23 nt, Human
gagggacgccugggggugccagg

SEQ ID NO: 3445715 - RNA, 14 nt, Human
gagggacucugaag

SEQ ID NO: 3445716 - RNA, 20 nt, Human
gagggacucugaagccucug

SEQ ID NO: 3445717 - RNA, 15 nt, Human
gagggacugccucug

SEQ ID NO: 3445718 - RNA, 18 nt, Human
gagggacugccucugcca

SEQ ID NO: 3445719 - RNA, 15 nt, Human
gagggacugucgcug

SEQ ID NO: 3445720 - RNA, 16 nt, Human
gagggagaacaagacc

SEQ ID NO: 3445721 - RNA, 13 nt, Human
gagggagaaggga

SEQ ID NO: 3445722 - RNA, 23 nt, Human
gagggagagguggagcaaaguga

SEQ ID NO: 3445723 - RNA, 12 nt, Human
gagggagaugga

SEQ ID NO: 3445724 - RNA, 17 nt, Human
gagggagcacaaccccc

SEQ ID NO: 3445725 - RNA, 23 nt, Human
gagggagcuccaacucagaaggg

SEQ ID NO: 3445726 - RNA, 15 nt, Human
gagggagcugagaag

SEQ ID NO: 3445727 - RNA, 16 nt, Human
gagggagcugagaaga

SEQ ID NO: 3445728 - RNA, 14 nt, Human
gagggaggaccugg

SEQ ID NO: 3445729 - RNA, 15 nt, Human
gagggaggaccuggg

SEQ ID NO: 3445730 - RNA, 13 nt, Human
gagggaggaggcc

SEQ ID NO: 3445731 - RNA, 17 nt, Human
gagggaggaggccaccu

SEQ ID NO: 3445732 - RNA, 11 nt, Human
gagggaggccc

SEQ ID NO: 3445733 - RNA, 12 nt, Human
gagggaggggaa

SEQ ID NO: 3445734 - RNA, 12 nt, Human
gagggaggggcc

SEQ ID NO: 3445735 - RNA, 14 nt, Human
gagggagguaagga

SEQ ID NO: 3445736 - RNA, 14 nt, Human
gagggagugacaga

SEQ ID NO: 3445737 - RNA, 18 nt, Human
gagggagugaguggcccu

SEQ ID NO: 3445738 - RNA, 14 nt, Human
gagggauggacuga

SEQ ID NO: 3445739 - RNA, 19 nt, Human
gagggauggcggguggggg

SEQ ID NO: 3445740 - RNA, 13 nt, Human
gagggaugggccu

SEQ ID NO: 3445741 - RNA, 18 nt, Human
gagggauucugguuccag

SEQ ID NO: 3445742 - RNA, 12 nt, Human
gagggcacacac

SEQ ID NO: 3445743 - RNA, 23 nt, Human
gagggcacauuccuugccugcac

SEQ ID NO: 3445744 - RNA, 15 nt, Human
gagggcacuggagcu

SEQ ID NO: 3445745 - RNA, 17 nt, Human
gagggcacugguggccc

SEQ ID NO: 3445746 - RNA, 17 nt, Human
gagggcagaaagguucu

SEQ ID NO: 3445747 - RNA, 23 nt, Human
gagggcagaaagguucugcccgg

SEQ ID NO: 3445748 - RNA, 17 nt, Human
gagggcagacuggggca

SEQ ID NO: 3445749 - RNA, 14 nt, Human
gagggcagagcugg

SEQ ID NO: 3445750 - RNA, 16 nt, Human
gagggcagagcuggug

SEQ ID NO: 3445751 - RNA, 17 nt, Human
gagggcagagcuggugc

SEQ ID NO: 3445752 - RNA, 15 nt, Human
gagggcagaggcugg

SEQ ID NO: 3445753 - RNA, 16 nt, Human
gagggcagaggcugga

SEQ ID NO: 3445754 - RNA, 15 nt, Human
gagggcagcagccag

SEQ ID NO: 3445755 - RNA, 15 nt, Human
gagggcagcagggcu

SEQ ID NO: 3445756 - RNA, 18 nt, Human
gagggcaguucgcagcca

SEQ ID NO: 3445757 - RNA, 13 nt, Human
gagggcccagagc

SEQ ID NO: 3445758 - RNA, 22 nt, Human
gagggcccagagcaggaagcau

SEQ ID NO: 3445759 - RNA, 17 nt, Human
gagggccccucugccca

SEQ ID NO: 3445760 - RNA, 18 nt, Human
gagggccccucugcccag

SEQ ID NO: 3445761 - RNA, 17 nt, Human
gagggcccugagcugag

SEQ ID NO: 3445762 - RNA, 16 nt, Human
gagggccgagugagag

SEQ ID NO: 3445763 - RNA, 14 nt, Human
gagggccugcaagg

SEQ ID NO: 3445764 - RNA, 21 nt, Human
gagggccugcuggaggccuca

SEQ ID NO: 3445765 - RNA, 19 nt, Human
gagggccugugggagccug

SEQ ID NO: 3445766 - RNA, 23 nt, Human
gagggcgaccccgucacagccuc

SEQ ID NO: 3445767 - RNA, 20 nt, Human
gagggcuagaaucuggagag

SEQ ID NO: 3445768 - RNA, 15 nt, Human
gagggcucugaggcg

SEQ ID NO: 3445769 - RNA, 13 nt, Human
gagggcugcccug

SEQ ID NO: 3445770 - RNA, 15 nt, Human
gagggcuggaaucug

SEQ ID NO: 3445771 - RNA, 17 nt, Human
gagggcuggaggcccag

SEQ ID NO: 3445772 - RNA, 13 nt, Human
gagggcuggcugg

SEQ ID NO: 3445773 - RNA, 16 nt, Human
gagggcuggcuggccu

SEQ ID NO: 3445774 - RNA, 19 nt, Human
gagggcuuccucuagaagc

SEQ ID NO: 3445775 - RNA, 21 nt, Human
gagggcuuccucuagaagcca

SEQ ID NO: 3445776 - RNA, 22 nt, Human
gagggcuuccucuagaagccaa

SEQ ID NO: 3445777 - RNA, 17 nt, Human
gaggggaaaaaaauguu

SEQ ID NO: 3445778 - RNA, 16 nt, Human
gaggggaagcuucugu

SEQ ID NO: 3445779 - RNA, 14 nt, Human
gaggggaagucccu

SEQ ID NO: 3445780 - RNA, 13 nt, Human
gaggggacagguc

SEQ ID NO: 3445781 - RNA, 14 nt, Human
gaggggaccaggag

SEQ ID NO: 3445782 - RNA, 21 nt, Human
gaggggacgcugguagagaug

SEQ ID NO: 3445783 - RNA, 15 nt, Human
gaggggacucugggc

SEQ ID NO: 3445784 - RNA, 18 nt, Human
gaguuguguuguucuuuu

SEQ ID NO: 3445785 - RNA, 16 nt, Human
gaguuguuguguacag

SEQ ID NO: 3445786 - RNA, 16 nt, Human
gaguuguuuucagacu

SEQ ID NO: 3445787 - RNA, 14 nt, Human
gaguuguuuuugua

SEQ ID NO: 3445788 - RNA, 18 nt, Human
gaguuguuuuuguauauu

SEQ ID NO: 3445789 - RNA, 20 nt, Human
gaguuuaaaaucaucagaaa

SEQ ID NO: 3445790 - RNA, 19 nt, Human
gaguuuaagaccagccugg

SEQ ID NO: 3445791 - RNA, 22 nt, Human
gaguuuaccauuuguaauaaag

SEQ ID NO: 3445792 - RNA, 23 nt, Human
gaguuuaccauuuguaauaaagu

SEQ ID NO: 3445793 - RNA, 18 nt, Human
gaguuuagcccugaacau

SEQ ID NO: 3445794 - RNA, 18 nt, Human
gaguuucacagugugauu

SEQ ID NO: 3445795 - RNA, 16 nt, Human
gaguuuccaaaaccag

SEQ ID NO: 3445796 - RNA, 20 nt, Human
gaguuuccucaggcugcugg

SEQ ID NO: 3445797 - RNA, 15 nt, Human
gaguuucgagguaga

SEQ ID NO: 3445798 - RNA, 13 nt, Human
gaguuucuguuug

SEQ ID NO: 3445799 - RNA, 14 nt, Human
gaguuucuguuuga

SEQ ID NO: 3445800 - RNA, 22 nt, Human
gaguuugaaggaggugagggau

SEQ ID NO: 3445801 - RNA, 23 nt, Human
gaguuugccccguucuguuugua

SEQ ID NO: 3445802 - RNA, 13 nt, Human
gaguuugcccugg

SEQ ID NO: 3445803 - RNA, 18 nt, Human
gaguuugcuauuagagca

SEQ ID NO: 3445804 - RNA, 14 nt, Human
gaguuuggccagaa

SEQ ID NO: 3445805 - RNA, 13 nt, Human
gaguuuggucugg

SEQ ID NO: 3445806 - RNA, 12 nt, Human
gaguuuguuucu

SEQ ID NO: 3445807 - RNA, 21 nt, Human
gaguuuuccauggcaggaagg

SEQ ID NO: 3445808 - RNA, 22 nt, Human
gaguuuuccucuauacaucucu

SEQ ID NO: 3445809 - RNA, 23 nt, Human
gaguuuuccucuauacaucucuc

SEQ ID NO: 3445810 - RNA, 21 nt, Human
gaguuuucucuuuguggggcu

SEQ ID NO: 3445811 - RNA, 16 nt, Human
gaguuuuggaugcagu

SEQ ID NO: 3445812 - RNA, 18 nt, Human
gaguuuuuauggggcuga

SEQ ID NO: 3445813 - RNA, 23 nt, Human
gauaaaaaauuuuguaauuuucu

SEQ ID NO: 3445814 - RNA, 21 nt, Human
gauaaaaagauguucagucau

SEQ ID NO: 3445815 - RNA, 18 nt, Human
gauaaaaagccagggcug

SEQ ID NO: 3445816 - RNA, 19 nt, Human
gauaaaaagccagggcugg

SEQ ID NO: 3445817 - RNA, 22 nt, Human
gauaaaacugggccuguagcuc

SEQ ID NO: 3445818 - RNA, 16 nt, Human
gauaaaagauggccau

SEQ ID NO: 3445819 - RNA, 18 nt, Human
gauaaaaugacuacuuag

SEQ ID NO: 3445820 - RNA, 22 nt, Human
gauaaaauuauagaugggaaug

SEQ ID NO: 3445821 - RNA, 13 nt, Human
gauaaacaguagu

SEQ ID NO: 3445822 - RNA, 15 nt, Human
gauaaacuuuuagaa

SEQ ID NO: 3445823 - RNA, 17 nt, Human
gauaaagaaaaaaauac

SEQ ID NO: 3445824 - RNA, 18 nt, Human
gauaaagaaaaaaauacu

SEQ ID NO: 3445825 - RNA, 14 nt, Human
gauaaagaaaagaa

SEQ ID NO: 3445826 - RNA, 18 nt, Human
gauaaagaccagaaauuc

SEQ ID NO: 3445827 - RNA, 13 nt, Human
gauaaagaugauc

SEQ ID NO: 3445828 - RNA, 22 nt, Human
gauaaagaugcaaggaccagga

SEQ ID NO: 3445829 - RNA, 13 nt, Human
gauaaagauuucu

SEQ ID NO: 3445830 - RNA, 15 nt, Human
gauaaagcacagcug

SEQ ID NO: 3445831 - RNA, 19 nt, Human
gauaaagccacugaaaauu

SEQ ID NO: 3445832 - RNA, 15 nt, Human
gauaaaguaguaaaa

SEQ ID NO: 3445833 - RNA, 16 nt, Human
gauaaaguuucucaga

SEQ ID NO: 3445834 - RNA, 22 nt, Human
gauaaauauuauauuauauaua

SEQ ID NO: 3445835 - RNA, 13 nt, Human
gauaaauauuuga

SEQ ID NO: 3445836 - RNA, 20 nt, Human
gauaaaucagucaagcuguu

SEQ ID NO: 3445837 - RNA, 17 nt, Human
gauaaaucauaaaguca

SEQ ID NO: 3445838 - RNA, 18 nt, Human
gauaaaucauaaagucag

SEQ ID NO: 3445839 - RNA, 15 nt, Human
gauaaaugauucaaa

SEQ ID NO: 3445840 - RNA, 22 nt, Human
gauaaauggcuuccuggcaaua

SEQ ID NO: 3445841 - RNA, 13 nt, Human
gauaaauuauaag

SEQ ID NO: 3445842 - RNA, 22 nt, Human
gauaaauuaugguaaaauuuug

SEQ ID NO: 3445843 - RNA, 13 nt, Human
gauaacaaagaua

SEQ ID NO: 3445844 - RNA, 18 nt, Human
gauaacaaagauaucuuu

SEQ ID NO: 3445845 - RNA, 17 nt, Human
gauaacaaccuggagac

SEQ ID NO: 3445846 - RNA, 15 nt, Human
gauaacaagaucuuu

SEQ ID NO: 3445847 - RNA, 19 nt, Human
gauaacaauguuuuaacaa

SEQ ID NO: 3445848 - RNA, 16 nt, Human
gauaacagcacugacu

SEQ ID NO: 3445849 - RNA, 20 nt, Human
gauaacagggauugauuuua

SEQ ID NO: 3445850 - RNA, 23 nt, Human
gauaacagggauugauuuuaaaa

SEQ ID NO: 3445851 - RNA, 15 nt, Human
gauaaccagcuguaa

SEQ ID NO: 3445852 - RNA, 23 nt, Human
gauaaccuauaugauuuauaguu

SEQ ID NO: 3445853 - RNA, 13 nt, Human
gauaacuagaugg

SEQ ID NO: 3445854 - RNA, 11 nt, Human
gauaacucucc

SEQ ID NO: 3445855 - RNA, 14 nt, Human
gauaacucuuugga

SEQ ID NO: 3445856 - RNA, 15 nt, Human
gauaacucuuuggau

SEQ ID NO: 3445857 - RNA, 21 nt, Human
gauaacugaaaauuauuuaaa

SEQ ID NO: 3445858 - RNA, 18 nt, Human
gauaacugcaauuuuaau

SEQ ID NO: 3445859 - RNA, 22 nt, Human
gauaagaaccuuuugagugccu

SEQ ID NO: 3445860 - RNA, 17 nt, Human
gauaagaaugcugguuu

SEQ ID NO: 3445861 - RNA, 17 nt, Human
gauaagaccaccaccuc

SEQ ID NO: 3445862 - RNA, 14 nt, Human
gauaagaucuuuua

SEQ ID NO: 3445863 - RNA, 20 nt, Human
gauaagaucuuuuauuuugc

SEQ ID NO: 3445864 - RNA, 23 nt, Human
gauaagccacucugucccuuccu

SEQ ID NO: 3445865 - RNA, 13 nt, Human
gauaaggaaauca

SEQ ID NO: 3445866 - RNA, 15 nt, Human
gauaaggaagaaaca

SEQ ID NO: 3445867 - RNA, 15 nt, Human
gauaaggccuguggg

SEQ ID NO: 3445868 - RNA, 17 nt, Human
gauaagguaaaaugcca

SEQ ID NO: 3445869 - RNA, 23 nt, Human
gauaagguaccuuucacauagag

SEQ ID NO: 3445870 - RNA, 12 nt, Human
gauaaguucaua

SEQ ID NO: 3445871 - RNA, 18 nt, Human
gauaaguuggaaacacua

SEQ ID NO: 3445872 - RNA, 22 nt, Human
gauaaguuggaaacacuaaaug

SEQ ID NO: 3445873 - RNA, 22 nt, Human
gauaauaaauugaaauugugaa

SEQ ID NO: 3445874 - RNA, 16 nt, Human
gauaauaauauauguu

SEQ ID NO: 3445875 - RNA, 19 nt, Human
gauaauaauauuguuuuuc

SEQ ID NO: 3445876 - RNA, 18 nt, Human
gauaauacaccacuacau

SEQ ID NO: 3445877 - RNA, 21 nt, Human
gauaauacaccacuacauucu

SEQ ID NO: 3445878 - RNA, 13 nt, Human
gauaauagauucu

SEQ ID NO: 3445879 - RNA, 18 nt, Human
gauaauauuguggugcca

SEQ ID NO: 3445880 - RNA, 21 nt, Human
gauaauauuuuacauacacug

SEQ ID NO: 3445881 - RNA, 17 nt, Human
gauaaucaacugggcug

SEQ ID NO: 3445882 - RNA, 13 nt, Human
gauaaugaacaga

SEQ ID NO: 3445883 - RNA, 20 nt, Human
gauaaugccggugagaauaa

SEQ ID NO: 3445884 - RNA, 21 nt, Human
gauaaugugauauuauacaua

SEQ ID NO: 3445885 - RNA, 21 nt, Human
gauaauguuaaauuuguaagu

SEQ ID NO: 3445886 - RNA, 14 nt, Human
gauaauuaaccaag

SEQ ID NO: 3445887 - RNA, 23 nt, Human
gauaauuaaccaagguagaauga

SEQ ID NO: 3445888 - RNA, 15 nt, Human
gauaauucuuauuuu

SEQ ID NO: 3445889 - RNA, 15 nt, Human
gauaauuucagggug

SEQ ID NO: 3445890 - RNA, 12 nt, Human
gauaauuuugca

SEQ ID NO: 3445891 - RNA, 17 nt, Human
gauacaaaagcauguga

SEQ ID NO: 3445892 - RNA, 20 nt, Human
gauacaacuucaagugcaug

SEQ ID NO: 3445893 - RNA, 11 nt, Human
gauacaauaaa

SEQ ID NO: 3445894 - RNA, 16 nt, Human
gauaauauauuguguu

SEQ ID NO: 3445895 - RNA, 23 nt, Human
gauaauauuacuguuuauuucug

SEQ ID NO: 3445896 - RNA, 15 nt, Human
gauaauauuguuugg

SEQ ID NO: 3445897 - RNA, 13 nt, Human
gauaaucagccuc

SEQ ID NO: 3445898 - RNA, 16 nt, Human
gauaaucagccucuua

SEQ ID NO: 3445899 - RNA, 21 nt, Human
gauaaucagugugucuaaauu

SEQ ID NO: 3445900 - RNA, 15 nt, Human
gauaaugcuguugcc

SEQ ID NO: 3445901 - RNA, 11 nt, Human
gauaauguuaa

SEQ ID NO: 3445902 - RNA, 12 nt, Human
gauaauguuaaa

SEQ ID NO: 3445903 - RNA, 21 nt, Human
gauaauguugugguuuguugc

SEQ ID NO: 3445904 - RNA, 17 nt, Human
gauaauuauugguaauu

SEQ ID NO: 3445905 - RNA, 14 nt, Human
gauaauugcuauuu

SEQ ID NO: 3445906 - RNA, 14 nt, Human
gauaauuguugaaa

SEQ ID NO: 3445907 - RNA, 14 nt, Human
gauacaaccucccu

SEQ ID NO: 3445908 - RNA, 16 nt, Human
gauacaagauuagaag

SEQ ID NO: 3445909 - RNA, 17 nt, Human
gauacaaucagcugcuu

SEQ ID NO: 3445910 - RNA, 13 nt, Human
gauacacacacac

SEQ ID NO: 3445911 - RNA, 19 nt, Human
gauacacccaaaguaucag

SEQ ID NO: 3445912 - RNA, 19 nt, Human
gauacaccgggccuggaga

SEQ ID NO: 3445913 - RNA, 18 nt, Human
gauacaggaaaagcugcu

SEQ ID NO: 3445914 - RNA, 21 nt, Human
gauacaggaaaagcugcugac

SEQ ID NO: 3445915 - RNA, 17 nt, Human
gauacagucaacaagcc

SEQ ID NO: 3445916 - RNA, 19 nt, Human
gauacagucaacaagccug

SEQ ID NO: 3445917 - RNA, 18 nt, Human
gauacagucccuaaagaa

SEQ ID NO: 3445918 - RNA, 13 nt, Human
gauacauaauaaa

SEQ ID NO: 3445919 - RNA, 14 nt, Human
gauacauaauaaaa

SEQ ID NO: 3445920 - RNA, 15 nt, Human
gauacauaauaaaaa

SEQ ID NO: 3445921 - RNA, 21 nt, Human
gauacauacaccagcauuccu

SEQ ID NO: 3445922 - RNA, 18 nt, Human
gauacauaugagugugga

SEQ ID NO: 3445923 - RNA, 17 nt, Human
gauacauccaaagcaga

SEQ ID NO: 3445924 - RNA, 21 nt, Human
gauacauccaaagcagacagc

SEQ ID NO: 3445925 - RNA, 12 nt, Human
gauacaugugcc

SEQ ID NO: 3445926 - RNA, 19 nt, Human
gauaccaagaugccaucug

SEQ ID NO: 3445927 - RNA, 14 nt, Human
gauaccagaaggga

SEQ ID NO: 3445928 - RNA, 12 nt, Human
gauaccagcccc

SEQ ID NO: 3445929 - RNA, 14 nt, Human
gauaugaauauaug

SEQ ID NO: 3445930 - RNA, 22 nt, Human
gauaugaguauacaauauauaa

SEQ ID NO: 3445931 - RNA, 21 nt, Human
gauaugaguuguuuucagacu

SEQ ID NO: 3445932 - RNA, 14 nt, Human
gauaugauucaaau

SEQ ID NO: 3445933 - RNA, 20 nt, Human
gauaugauuuaaaacaugua

SEQ ID NO: 3445934 - RNA, 14 nt, Human
gauaugcagaagga

SEQ ID NO: 3445935 - RNA, 22 nt, Human
gauaugcuuguaacuaaaauaa

SEQ ID NO: 3445936 - RNA, 13 nt, Human
gauauggagaauu

SEQ ID NO: 3445937 - RNA, 12 nt, Human
gauauggagccc

SEQ ID NO: 3445938 - RNA, 15 nt, Human
gauauggagcccugu

SEQ ID NO: 3445939 - RNA, 17 nt, Human
gauaugggacauuuuug

SEQ ID NO: 3445940 - RNA, 20 nt, Human
gauaugggacugagccuggc

SEQ ID NO: 3445941 - RNA, 21 nt, Human
gauaugguggguggacagggg

SEQ ID NO: 3445942 - RNA, 16 nt, Human
gauauguaaaacauuu

SEQ ID NO: 3445943 - RNA, 17 nt, Human
gauauguaaaacauuua

SEQ ID NO: 3445944 - RNA, 19 nt, Human
gauauguaaacauaauucu

SEQ ID NO: 3445945 - RNA, 20 nt, Human
gauauguaccuaacgaagua

SEQ ID NO: 3445946 - RNA, 17 nt, Human
gauauguauggguaggg

SEQ ID NO: 3445947 - RNA, 20 nt, Human
gauauguauucuuuucucag

SEQ ID NO: 3445948 - RNA, 17 nt, Human
gauaugugaaacaaugu

SEQ ID NO: 3445949 - RNA, 17 nt, Human
gauauuaaugcccagac

SEQ ID NO: 3445950 - RNA, 13 nt, Human
gauauuacuuuau

SEQ ID NO: 3445951 - RNA, 14 nt, Human
gauauuacuuuauc

SEQ ID NO: 3445952 - RNA, 15 nt, Human
gauauuacuuuauca

SEQ ID NO: 3445953 - RNA, 23 nt, Human
gauauuauuagaaauuagaaaaa

SEQ ID NO: 3445954 - RNA, 17 nt, Human
gauauucagaauuauga

SEQ ID NO: 3445955 - RNA, 14 nt, Human
gauauucagaugua

SEQ ID NO: 3445956 - RNA, 12 nt, Human
gauauucuaaga

SEQ ID NO: 3445957 - RNA, 21 nt, Human
gauauucuuuguuaauuugga

SEQ ID NO: 3445958 - RNA, 17 nt, Human
gauauugcugaagaauc

SEQ ID NO: 3445959 - RNA, 13 nt, Human
gauauuguacaua

SEQ ID NO: 3445960 - RNA, 16 nt, Human
gauauuguacauaaaa

SEQ ID NO: 3445961 - RNA, 18 nt, Human
gauauuguacauaaaaga

SEQ ID NO: 3445962 - RNA, 22 nt, Human
gauauugucagaguucugcucu

SEQ ID NO: 3445963 - RNA, 23 nt, Human
gauauuuauauuuuuauuuuauu

SEQ ID NO: 3445964 - RNA, 16 nt, Human
gauauuuccaucauua

SEQ ID NO: 3445965 - RNA, 18 nt, Human
gauauuugcaguuuuuca

SEQ ID NO: 3445966 - RNA, 20 nt, Human
gauauuugcaguuuuucauu

SEQ ID NO: 3445967 - RNA, 14 nt, Human
gauauuuggcuuaa

SEQ ID NO: 3445968 - RNA, 12 nt, Human
gauauuuucaaa

SEQ ID NO: 3445969 - RNA, 15 nt, Human
gauauuuucugugcc

SEQ ID NO: 3445970 - RNA, 15 nt, Human
gauauuuugcuuugu

SEQ ID NO: 3445971 - RNA, 16 nt, Human
gauauuuugcuuugug

SEQ ID NO: 3445972 - RNA, 17 nt, Human
gauauuuuguaaaaugu

SEQ ID NO: 3445973 - RNA, 20 nt, Human
gauauuuuguaaaauguauu

SEQ ID NO: 3445974 - RNA, 15 nt, Human
gauauuuuuuuaagu

SEQ ID NO: 3445975 - RNA, 16 nt, Human
gaucaaaaacuauuug

SEQ ID NO: 3445976 - RNA, 23 nt, Human
gaucaaaaaggcuuauaaaacag

SEQ ID NO: 3445977 - RNA, 23 nt, Human
gaucaaaagguuaauaaaguaau

SEQ ID NO: 3445978 - RNA, 17 nt, Human
gaucaaaauaaaaagug

SEQ ID NO: 3445979 - RNA, 22 nt, Human
gaucaaaccccgaccaccugcc

SEQ ID NO: 3445980 - RNA, 15 nt, Human
gaucaaagaugaaaa

SEQ ID NO: 3445981 - RNA, 18 nt, Human
gaucaaagaugaaaagua

SEQ ID NO: 3445982 - RNA, 14 nt, Human
gaucaaauacuuua

SEQ ID NO: 3445983 - RNA, 16 nt, Human
gaucaaauaguugcau

SEQ ID NO: 3445984 - RNA, 14 nt, Human
gaucaaauguuuaa

SEQ ID NO: 3445985 - RNA, 20 nt, Human
gaucaaauguuuaaucauau

SEQ ID NO: 3445986 - RNA, 18 nt, Human
gaucaaccagcuaagaaa

SEQ ID NO: 3445987 - RNA, 14 nt, Human
gaucaagcugugag

SEQ ID NO: 3445988 - RNA, 23 nt, Human
gaucaagucggaucuaguccagc

SEQ ID NO: 3445989 - RNA, 18 nt, Human
gaucaauaaaaugugauu

SEQ ID NO: 3445990 - RNA, 21 nt, Human
gaucaauaaaaugugauuuuu

SEQ ID NO: 3445991 - RNA, 13 nt, Human
gaucaaugaaaug

SEQ ID NO: 3445992 - RNA, 22 nt, Human
gaucaauggcgcagugccucug

SEQ ID NO: 3445993 - RNA, 16 nt, Human
gaucaauuaaauguag

SEQ ID NO: 3445994 - RNA, 16 nt, Human
gaucaauuauaguuuc

SEQ ID NO: 3445995 - RNA, 19 nt, Human
gaucaauuauaguuucuga

SEQ ID NO: 3445996 - RNA, 16 nt, Human
gaucacaaaugacuuu

SEQ ID NO: 3445997 - RNA, 21 nt, Human
gaucacaacgugcauugugcu

SEQ ID NO: 3445998 - RNA, 17 nt, Human
gaucacaagauggaauu

SEQ ID NO: 3445999 - RNA, 17 nt, Human
gaucacagagacauucc

SEQ ID NO: 3446000 - RNA, 13 nt, Human
gaucacagaggcu

SEQ ID NO: 3446001 - RNA, 20 nt, Human
gaucacagcugcuuucuguu

SEQ ID NO: 3446002 - RNA, 19 nt, Human
gaucacauaacagaaugca

SEQ ID NO: 3446003 - RNA, 14 nt, Human
gaucaccagcccgg

SEQ ID NO: 3446004 - RNA, 18 nt, Human
gaucaccagcccggccug

SEQ ID NO: 3446005 - RNA, 19 nt, Human
gaucaccauguauuuugua

SEQ ID NO: 3446006 - RNA, 16 nt, Human
gaucacgccacugcac

SEQ ID NO: 3446007 - RNA, 22 nt, Human
gaucacgcuccccgccuguucc

SEQ ID NO: 3446008 - RNA, 16 nt, Human
gaucacggcucacugc

SEQ ID NO: 3446009 - RNA, 12 nt, Human
gaucacuacugc

SEQ ID NO: 3446010 - RNA, 14 nt, Human
gaucacuacugcag

SEQ ID NO: 3446011 - RNA, 16 nt, Human
gaucacugaauuuaua

SEQ ID NO: 3446012 - RNA, 17 nt, Human
gaucacuggagcccagg

SEQ ID NO: 3446013 - RNA, 18 nt, Human
gaucacuggagcccagga

SEQ ID NO: 3446014 - RNA, 23 nt, Human
gaucacuuagcgaacccuuuauu

SEQ ID NO: 3446015 - RNA, 17 nt, Human
gaucacuuguuguuuua

SEQ ID NO: 3446016 - RNA, 22 nt, Human
gaucacuuucucaguuuucaua

SEQ ID NO: 3446017 - RNA, 20 nt, Human
gaucagaaaguaauuucuuc

SEQ ID NO: 3446018 - RNA, 20 nt, Human
gaucagaccaaacagugcug

SEQ ID NO: 3446019 - RNA, 15 nt, Human
gaucagagcaggacc

SEQ ID NO: 3446020 - RNA, 21 nt, Human
gaucagccccacccuggccua

SEQ ID NO: 3446021 - RNA, 13 nt, Human
gaucagcguggcc

SEQ ID NO: 3446022 - RNA, 17 nt, Human
gaucagcuguuugucau

SEQ ID NO: 3446023 - RNA, 13 nt, Human
gaucaggcacagg

SEQ ID NO: 3446024 - RNA, 14 nt, Human
gaucaggcucccag

SEQ ID NO: 3446025 - RNA, 11 nt, Human
gaucaggucau

SEQ ID NO: 3446026 - RNA, 22 nt, Human
gaucaguaguuugcauuucaga

SEQ ID NO: 3446027 - RNA, 19 nt, Human
gaucaguauuuaacuaauu

SEQ ID NO: 3446028 - RNA, 23 nt, Human
gaucagugggccuccaaggaggg

SEQ ID NO: 3446029 - RNA, 20 nt, Human
gaucaguguaccauuugccu

SEQ ID NO: 3446030 - RNA, 11 nt, Human
gaucaguguug

SEQ ID NO: 3446031 - RNA, 15 nt, Human
gaucauaaacugacu

SEQ ID NO: 3446032 - RNA, 19 nt, Human
gaucauaaaguuagaaucu

SEQ ID NO: 3446033 - RNA, 13 nt, Human
gaucauaaggcuu

SEQ ID NO: 3446034 - RNA, 22 nt, Human
gaucauagauuucugauuuuau

SEQ ID NO: 3446035 - RNA, 17 nt, Human
gaucauagguauuucaa

SEQ ID NO: 3446036 - RNA, 12 nt, Human
gaucauaguuuu

SEQ ID NO: 3446037 - RNA, 18 nt, Human
gaucauaguuuuauuuau

SEQ ID NO: 3446038 - RNA, 22 nt, Human
gaucauaguuuuauuuauauuu

SEQ ID NO: 3446039 - RNA, 19 nt, Human
gaucauauacgugaaaauu

SEQ ID NO: 3446040 - RNA, 21 nt, Human
gaucaucaacaagauuuccuu

SEQ ID NO: 3446041 - RNA, 13 nt, Human
gaucaucaugcag

SEQ ID NO: 3446042 - RNA, 21 nt, Human
gaucauccacugugccaugug

SEQ ID NO: 3446043 - RNA, 21 nt, Human
gaucauccuuuccagcaugag

SEQ ID NO: 3446044 - RNA, 14 nt, Human
gaucaucgccagag

SEQ ID NO: 3446045 - RNA, 23 nt, Human
gaucaucgucauuugcugugaac

SEQ ID NO: 3446046 - RNA, 19 nt, Human
gaucaugaaaguagacagu

SEQ ID NO: 3446047 - RNA, 12 nt, Human
gaucaugaauaa

SEQ ID NO: 3446048 - RNA, 10 nt, Human
gaucaugaga

SEQ ID NO: 3446049 - RNA, 20 nt, Human
gaucauggcucacugcagcc

SEQ ID NO: 3446050 - RNA, 18 nt, Human
gaucaugguguaauaaga

SEQ ID NO: 3446051 - RNA, 21 nt, Human
gaucaugguguaauaagacau

SEQ ID NO: 3446052 - RNA, 19 nt, Human
gaucauguacuuuuuagua

SEQ ID NO: 3446053 - RNA, 20 nt, Human
gaucauguacuuuuuaguaa

SEQ ID NO: 3446054 - RNA, 14 nt, Human
gaucauuaucagcc

SEQ ID NO: 3446055 - RNA, 15 nt, Human
gaucauuuucccccc

SEQ ID NO: 3446056 - RNA, 18 nt, Human
gaucauuuuccccccacu

SEQ ID NO: 3446057 - RNA, 23 nt, Human
gaucauuuucuuaucuucugcaa

SEQ ID NO: 3446058 - RNA, 20 nt, Human
gauccaaaagaagcccccag

SEQ ID NO: 3446059 - RNA, 22 nt, Human
gauccaaaagaagcccccagcu

SEQ ID NO: 3446060 - RNA, 16 nt, Human
cucuuuuauauuugua

SEQ ID NO: 3446061 - RNA, 23 nt, Human
cucuuuuauauuuguaggagaaa

SEQ ID NO: 3446062 - RNA, 17 nt, Human
cucuuuuaucuccugaa

SEQ ID NO: 3446063 - RNA, 16 nt, Human
cucuuuuccaaacaca

SEQ ID NO: 3446064 - RNA, 14 nt, Human
cucuuuucucugug

SEQ ID NO: 3446065 - RNA, 15 nt, Human
cucuuuucugcauca

SEQ ID NO: 3446066 - RNA, 20 nt, Human
cucuuuugaauccaugcuug

SEQ ID NO: 3446067 - RNA, 21 nt, Human
cucuuuugcuugccaaaguac

SEQ ID NO: 3446068 - RNA, 21 nt, Human
cucuuuugcuuuauuccagaa

SEQ ID NO: 3446069 - RNA, 14 nt, Human
cucuuuuguaaauu

SEQ ID NO: 3446070 - RNA, 19 nt, Human
cucuuuuguuaaauaauau

SEQ ID NO: 3446071 - RNA, 20 nt, Human
cucuuuuuagggccaggcag

SEQ ID NO: 3446072 - RNA, 21 nt, Human
cucuuuuuccaucauaauucu

SEQ ID NO: 3446073 - RNA, 15 nt, Human
gauucuguggaacaa

SEQ ID NO: 3446074 - RNA, 23 nt, Human
gauucuuauggacaaugacccag

SEQ ID NO: 3446075 - RNA, 23 nt, Human
gauucuuauguagcaggaaauaa

SEQ ID NO: 3446076 - RNA, 16 nt, Human
gauucuucaaaagcau

SEQ ID NO: 3446077 - RNA, 19 nt, Human
gauucuucccauucuccau

SEQ ID NO: 3446078 - RNA, 18 nt, Human
gauucuuccucccucccu

SEQ ID NO: 3446079 - RNA, 23 nt, Human
gauucuuggcccgcacagagcug

SEQ ID NO: 3446080 - RNA, 16 nt, Human
gauucuuguuuugcuu

SEQ ID NO: 3446081 - RNA, 15 nt, Human
gauucuuuagagaag

SEQ ID NO: 3446082 - RNA, 19 nt, Human
gauucuuuccauuaugauu

SEQ ID NO: 3446083 - RNA, 17 nt, Human
gauucuuuccauuugca

SEQ ID NO: 3446084 - RNA, 20 nt, Human
gauucuuucccaauucacau

SEQ ID NO: 3446085 - RNA, 16 nt, Human
gauucuuuccugaggc

SEQ ID NO: 3446086 - RNA, 19 nt, Human
gauucuuuccugaggcugg

SEQ ID NO: 3446087 - RNA, 20 nt, Human
gauucuuuuuaaaguguuuc

SEQ ID NO: 3446088 - RNA, 15 nt, Human
gauugaaaacuuuuc

SEQ ID NO: 3446089 - RNA, 14 nt, Human
gauugaaaaggaag

SEQ ID NO: 3446090 - RNA, 19 nt, Human
gauugaaaauguccaggaa

SEQ ID NO: 3446091 - RNA, 19 nt, Human
gauugacagcuuugcugcu

SEQ ID NO: 3446092 - RNA, 19 nt, Human
gauugacaguaacuugguu

SEQ ID NO: 3446093 - RNA, 15 nt, Human
gauugaccugcuccg

SEQ ID NO: 3446094 - RNA, 23 nt, Human
gauugacuaacucaaauacacau

SEQ ID NO: 3446095 - RNA, 19 nt, Human
gauugagaaggagagaaag

SEQ ID NO: 3446096 - RNA, 22 nt, Human
gauugaggccugcccucaggga

SEQ ID NO: 3446097 - RNA, 14 nt, Human
gauugagugagggc

SEQ ID NO: 3446098 - RNA, 19 nt, Human
gauugauaucuauaaaaua

SEQ ID NO: 3446099 - RNA, 17 nt, Human
gauugauuugaagaaca

SEQ ID NO: 3446100 - RNA, 20 nt, Human
gauugcaacaggcugggcuu

SEQ ID NO: 3446101 - RNA, 14 nt, Human
gauugcacauuguu

SEQ ID NO: 3446102 - RNA, 17 nt, Human
gauugcacguggccucu

SEQ ID NO: 3446103 - RNA, 20 nt, Human
gauugcacguggccucuuga

SEQ ID NO: 3446104 - RNA, 19 nt, Human
gauugcagaauuguuuaga

SEQ ID NO: 3446105 - RNA, 12 nt, Human
gauugcagcuuu

SEQ ID NO: 3446106 - RNA, 18 nt, Human
gauugcagcuuuauguuc

SEQ ID NO: 3446107 - RNA, 17 nt, Human
gauugcaugugacucug

SEQ ID NO: 3446108 - RNA, 22 nt, Human
gauugcauuagaaauagacagu

SEQ ID NO: 3446109 - RNA, 19 nt, Human
gauugccggucuugacagc

SEQ ID NO: 3446110 - RNA, 13 nt, Human
gauugccucugaa

SEQ ID NO: 3446111 - RNA, 21 nt, Human
gauugcgagagauguguguug

SEQ ID NO: 3446112 - RNA, 22 nt, Human
gauugcgagagauguguguuga

SEQ ID NO: 3446113 - RNA, 16 nt, Human
gauugcgcaaaacuga

SEQ ID NO: 3446114 - RNA, 14 nt, Human
gauugcuaaaugua

SEQ ID NO: 3446115 - RNA, 13 nt, Human
gauugcuaauugc

SEQ ID NO: 3446116 - RNA, 17 nt, Human
gauugcuaauugcuguu

SEQ ID NO: 3446117 - RNA, 21 nt, Human
gauugcuaauugcuguugaaa

SEQ ID NO: 3446118 - RNA, 18 nt, Human
gauugcugauaauaaauu

SEQ ID NO: 3446119 - RNA, 16 nt, Human
gauugcugccacuuuu

SEQ ID NO: 3446120 - RNA, 21 nt, Human
gauugcugccccaucagugcu

SEQ ID NO: 3446121 - RNA, 16 nt, Human
gauugcuugagcccag

SEQ ID NO: 3446122 - RNA, 18 nt, Human
gauugcuugagcucagga

SEQ ID NO: 3446123 - RNA, 18 nt, Human
gauugcuuuuaaaauuuu

SEQ ID NO: 3446124 - RNA, 20 nt, Human
gauuggaaggagacacagau

SEQ ID NO: 3446125 - RNA, 18 nt, Human
gaugugauuuaauagugu

SEQ ID NO: 3446126 - RNA, 24 nt, Human
gaugugauuuaauaguguuaauca

SEQ ID NO: 3446127 - RNA, 19 nt, Human
gaugugcaauugauuucuu

SEQ ID NO: 3446128 - RNA, 14 nt, Human
gaugugcacccaug

SEQ ID NO: 3446129 - RNA, 15 nt, Human
gaugugcagcagauu

SEQ ID NO: 3446130 - RNA, 23 nt, Human
gaugugcauuuuugugaaaugaa

SEQ ID NO: 3446131 - RNA, 12 nt, Human
gaugugccuaaa

SEQ ID NO: 3446132 - RNA, 13 nt, Human
gaugugcuuaaca

SEQ ID NO: 3446133 - RNA, 24 nt, Human
gauguggagcacaaaagccucuca

SEQ ID NO: 3446134 - RNA, 11 nt, Human
gauguggagcc

SEQ ID NO: 3446135 - RNA, 12 nt, Human
gauguggagcca

SEQ ID NO: 3446136 - RNA, 13 nt, Human
gauguggagccag

SEQ ID NO: 3446137 - RNA, 15 nt, Human
gauguggagccaggc

SEQ ID NO: 3446138 - RNA, 17 nt, Human
gauguggaguggggcag

SEQ ID NO: 3446139 - RNA, 12 nt, Human
gauguggcccug

SEQ ID NO: 3446140 - RNA, 23 nt, Human
gauguggcccuggcugccggcac

SEQ ID NO: 3446141 - RNA, 22 nt, Human
gaugugggagggagcagacagg

SEQ ID NO: 3446142 - RNA, 13 nt, Human
gaugugggcagcu

SEQ ID NO: 3446143 - RNA, 14 nt, Human
gaugugggcagcuu

SEQ ID NO: 3446144 - RNA, 19 nt, Human
gaugugggccaccauugca

SEQ ID NO: 3446145 - RNA, 16 nt, Human
gauguggguuccacag

SEQ ID NO: 3446146 - RNA, 18 nt, Human
gauguggguuccacagac

SEQ ID NO: 3446147 - RNA, 16 nt, Human
gauguggucacagcug

SEQ ID NO: 3446148 - RNA, 20 nt, Human
gauguggugccugaggucug

SEQ ID NO: 3446149 - RNA, 19 nt, Human
gauguguaauuuuucugua

SEQ ID NO: 3446150 - RNA, 13 nt, Human
gauguguccucag

SEQ ID NO: 3446151 - RNA, 11 nt, Human
gauguguccug

SEQ ID NO: 3446152 - RNA, 13 nt, Human
gauguguccugac

SEQ ID NO: 3446153 - RNA, 18 nt, Human
gauguguccugacacugc

SEQ ID NO: 3446154 - RNA, 21 nt, Human
gauguguccugauaagcugag

SEQ ID NO: 3446155 - RNA, 17 nt, Human
gaugugucuucaauuug

SEQ ID NO: 3446156 - RNA, 18 nt, Human
gauguguggacuguggca

SEQ ID NO: 3446157 - RNA, 22 nt, Human
gauguguguugauacuguugca

SEQ ID NO: 3446158 - RNA, 16 nt, Human
gauguguuugcuuucu

SEQ ID NO: 3446159 - RNA, 18 nt, Human
gauguguuugcuuucuga

SEQ ID NO: 3446160 - RNA, 11 nt, Human
gauguuaacac

SEQ ID NO: 3446161 - RNA, 14 nt, Human
gauguuaaccagaa

SEQ ID NO: 3446162 - RNA, 21 nt, Human
gauguuacaaguuuauauaua

SEQ ID NO: 3446163 - RNA, 20 nt, Human
gauguuacaucacaguguuu

SEQ ID NO: 3446164 - RNA, 17 nt, Human
gauguuacuccaaaacu

SEQ ID NO: 3446165 - RNA, 16 nt, Human
gauguuaggcugggcc

SEQ ID NO: 3446166 - RNA, 14 nt, Human
gauguuaguguuuu

SEQ ID NO: 3446167 - RNA, 16 nt, Human
gauguuaguuuuccuu

SEQ ID NO: 3446168 - RNA, 16 nt, Human
gauguuauauuuuucu

SEQ ID NO: 3446169 - RNA, 19 nt, Human
gauguucagcacugucccu

SEQ ID NO: 3446170 - RNA, 13 nt, Human
gauguucagugua

SEQ ID NO: 3446171 - RNA, 14 nt, Human
gauguucaguguaa

SEQ ID NO: 3446172 - RNA, 15 nt, Human
gauguucaguguaau

SEQ ID NO: 3446173 - RNA, 14 nt, Human
gauguucauuuaga

SEQ ID NO: 3446174 - RNA, 13 nt, Human
gauguucuaaggc

SEQ ID NO: 3446175 - RNA, 14 nt, Human
gauguucuaaggcu

SEQ ID NO: 3446176 - RNA, 23 nt, Human
gauguucuacuuuguucugcugu

SEQ ID NO: 3446177 - RNA, 15 nt, Human
gauguucucuaucau

SEQ ID NO: 3446178 - RNA, 21 nt, Human
gauguucucuaucauuuaaua

SEQ ID NO: 3446179 - RNA, 18 nt, Human
gauguucuggauaccauu

SEQ ID NO: 3446180 - RNA, 21 nt, Human
gauguucuuucacccuuuucu

SEQ ID NO: 3446181 - RNA, 21 nt, Human
gauguugaugcaauccuuaca

SEQ ID NO: 3446182 - RNA, 19 nt, Human
gauguugccauguguuuua

SEQ ID NO: 3446183 - RNA, 22 nt, Human
gauguuuaaaacaccuucuaua

SEQ ID NO: 3446184 - RNA, 18 nt, Human
gauguuuauucuucuaga

SEQ ID NO: 3446185 - RNA, 21 nt, Human
gauguuuauucuucuagaguu

SEQ ID NO: 3446186 - RNA, 20 nt, Human
gauguuucuuuuguauguaa

SEQ ID NO: 3446187 - RNA, 14 nt, Human
gauguuuguggccu

SEQ ID NO: 3446188 - RNA, 21 nt, Human
gauguuuuacgucugggagaa

SEQ ID NO: 3446189 - RNA, 13 nt, Human
gauguuuuuaaaa

SEQ ID NO: 3446190 - RNA, 22 nt, Human
gauguuuuuaaaaguuucaaug

SEQ ID NO: 3446191 - RNA, 15 nt, Human
gauguuuuuaaaauc

SEQ ID NO: 3446192 - RNA, 16 nt, Human
gauuaaacgugcagac

SEQ ID NO: 3446193 - RNA, 15 nt, Human
gauuaaacugaguga

SEQ ID NO: 3446194 - RNA, 15 nt, Human
gauuaaacuuaaucu

SEQ ID NO: 3446195 - RNA, 15 nt, Human
gauuaaacuuaugaa

SEQ ID NO: 3446196 - RNA, 20 nt, Human
gauuaaagaugagcuuuguc

SEQ ID NO: 3446197 - RNA, 18 nt, Human
gauuaaagcuaaggaccu

SEQ ID NO: 3446198 - RNA, 17 nt, Human
gauuaaauaagauucua

SEQ ID NO: 3446199 - RNA, 18 nt, Human
gauuaaauaagauucuaa

SEQ ID NO: 3446200 - RNA, 12 nt, Human
gauuaaauacau

SEQ ID NO: 3446201 - RNA, 13 nt, Human
gauuaaauacaua

SEQ ID NO: 3446202 - RNA, 23 nt, Human
gauuaaauauagauuagaaaaau

SEQ ID NO: 3446203 - RNA, 21 nt, Human
gauuaaaugacacucauauaa

SEQ ID NO: 3446204 - RNA, 12 nt, Human
gauuaaauucuu

SEQ ID NO: 3446205 - RNA, 16 nt, Human
gauuaacaaauaugcu

SEQ ID NO: 3446206 - RNA, 17 nt, Human
gauuaacuuauuuagag

SEQ ID NO: 3446207 - RNA, 22 nt, Human
gauuaagagauggguuugacaa

SEQ ID NO: 3446208 - RNA, 22 nt, Human
gauuaagaucucagugguuaag

SEQ ID NO: 3446209 - RNA, 12 nt, Human
gauuaagauuuu

SEQ ID NO: 3446210 - RNA, 18 nt, Human
gauuaagauuuuacaaaa

SEQ ID NO: 3446211 - RNA, 16 nt, Human
gauuaaggucucucuu

SEQ ID NO: 3446212 - RNA, 20 nt, Human
gauuaaggucucucuuugga

SEQ ID NO: 3446213 - RNA, 17 nt, Human
gauuaauagcauucgaa

SEQ ID NO: 3446214 - RNA, 15 nt, Human
gauuaauccagaaua

SEQ ID NO: 3446215 - RNA, 16 nt, Human
gauuacaaaucagaag

SEQ ID NO: 3446216 - RNA, 17 nt, Human
gauuacaaaucagaagu

SEQ ID NO: 3446217 - RNA, 23 nt, Human
gauuacaaaucagaagucaucuu

SEQ ID NO: 3446218 - RNA, 17 nt, Human
gcacagugguggcaggg

SEQ ID NO: 3446219 - RNA, 18 nt, Human
gcacagugguggcagggc

SEQ ID NO: 3446220 - RNA, 22 nt, Human
gcacagugguggcagggccuag

SEQ ID NO: 3446221 - RNA, 23 nt, Human
gcacagugucugggcugacuggg

SEQ ID NO: 3446222 - RNA, 17 nt, Human
gcacaguguuaaaugaa

SEQ ID NO: 3446223 - RNA, 15 nt, Human
gcacaguucaugguu

SEQ ID NO: 3446224 - RNA, 21 nt, Human
gcacaguugaagggaggggcu

SEQ ID NO: 3446225 - RNA, 12 nt, Human
gcacaguuugaa

SEQ ID NO: 3446226 - RNA, 14 nt, Human
gcacaguuugaaca

SEQ ID NO: 3446227 - RNA, 15 nt, Human
gcacaguuugaacaa

SEQ ID NO: 3446228 - RNA, 14 nt, Human
gcacaguuuucuga

SEQ ID NO: 3446229 - RNA, 17 nt, Human
gcacaguuuucugagaa

SEQ ID NO: 3446230 - RNA, 22 nt, Human
gcacaguuuucugagaaagacu

SEQ ID NO: 3446231 - RNA, 23 nt, Human
gcacauagaaaguaaauaaaagg

SEQ ID NO: 3446232 - RNA, 21 nt, Human
gcacauagcuaucaagugugc

SEQ ID NO: 3446233 - RNA, 14 nt, Human
gcacauauugagca

SEQ ID NO: 3446234 - RNA, 23 nt, Human
gcacaucagcacgauuucuguuu

SEQ ID NO: 3446235 - RNA, 21 nt, Human
gcacauccauucccaagaaau

SEQ ID NO: 3446236 - RNA, 17 nt, Human
gcacauccuaugcaaua

SEQ ID NO: 3446237 - RNA, 19 nt, Human
gcacaucucaacaggccuc

SEQ ID NO: 3446238 - RNA, 21 nt, Human
gcacaucucaacaggccucag

SEQ ID NO: 3446239 - RNA, 16 nt, Human
gcacaucucugcuuga

SEQ ID NO: 3446240 - RNA, 13 nt, Human
gcacaucugcauu

SEQ ID NO: 3446241 - RNA, 22 nt, Human
gcacaucuguaaaucuacacac

SEQ ID NO: 3446242 - RNA, 13 nt, Human
gcacaugaagaaa

SEQ ID NO: 3446243 - RNA, 15 nt, Human
gcacaugaagaaaua

SEQ ID NO: 3446244 - RNA, 13 nt, Human
gcacaugauuuca

SEQ ID NO: 3446245 - RNA, 19 nt, Human
gcacaugauuucacaaaua

SEQ ID NO: 3446246 - RNA, 17 nt, Human
gcacaugcaccuaccca

SEQ ID NO: 3446247 - RNA, 14 nt, Human
gcacaugccucucu

SEQ ID NO: 3446248 - RNA, 17 nt, Human
gcacaugccucucucag

SEQ ID NO: 3446249 - RNA, 23 nt, Human
gcacaugcugagucucccaaggc

SEQ ID NO: 3446250 - RNA, 16 nt, Human
gcacaugcuggccagc

SEQ ID NO: 3446251 - RNA, 15 nt, Human
gcacaugucuuaaug

SEQ ID NO: 3446252 - RNA, 20 nt, Human
gcacaugucuuguacaugug

SEQ ID NO: 3446253 - RNA, 14 nt, Human
gcacauuaaaugac

SEQ ID NO: 3446254 - RNA, 16 nt, Human
gcacauuaaaugacuc

SEQ ID NO: 3446255 - RNA, 21 nt, Human
gcacauuaaaugacucuuccc

SEQ ID NO: 3446256 - RNA, 17 nt, Human
gcacauuggaaagcaca

SEQ ID NO: 3446257 - RNA, 18 nt, Human
gcacauuguuguuuuuuu

SEQ ID NO: 3446258 - RNA, 19 nt, Human
gcacauuuccccagaccug

SEQ ID NO: 3446259 - RNA, 15 nt, Human
gcaccaaaagaagua

SEQ ID NO: 3446260 - RNA, 17 nt, Human
gcaccaaaauaagaaaa

SEQ ID NO: 3446261 - RNA, 19 nt, Human
gcaccaaaauaagaaaaga

SEQ ID NO: 3446262 - RNA, 20 nt, Human
gcaccaaaauaagaaaagau

SEQ ID NO: 3446263 - RNA, 19 nt, Human
gcaccaaagaugcagccgc

SEQ ID NO: 3446264 - RNA, 21 nt, Human
gcaccaaagaugcagccgccu

SEQ ID NO: 3446265 - RNA, 22 nt, Human
gcaccaaaucaaaaucucucca

SEQ ID NO: 3446266 - RNA, 14 nt, Human
gcaccaacccagcc

SEQ ID NO: 3446267 - RNA, 16 nt, Human
gcaccaagcccacagg

SEQ ID NO: 3446268 - RNA, 21 nt, Human
gcaccaaggaaaaagcagaga

SEQ ID NO: 3446269 - RNA, 15 nt, Human
gcaccacaaaauaua

SEQ ID NO: 3446270 - RNA, 13 nt, Human
gcaccaccaagcc

SEQ ID NO: 3446271 - RNA, 16 nt, Human
gcaccaccaggucucc

SEQ ID NO: 3446272 - RNA, 19 nt, Human
gcaccaccaugccaggcua

SEQ ID NO: 3446273 - RNA, 22 nt, Human
gcaccacccuagucccuucccc

SEQ ID NO: 3446274 - RNA, 22 nt, Human
gcaccaccgagagaggcuggga

SEQ ID NO: 3446275 - RNA, 15 nt, Human
gcaccacgggcccgg

SEQ ID NO: 3446276 - RNA, 18 nt, Human
gcaccacucaagaccaaa

SEQ ID NO: 3446277 - RNA, 16 nt, Human
gcaccagacacccagg

SEQ ID NO: 3446278 - RNA, 18 nt, Human
gcaccagacacccaggac

SEQ ID NO: 3446279 - RNA, 21 nt, Human
gcaccagaggcugcagaaggc

SEQ ID NO: 3446280 - RNA, 13 nt, Human
gcaccagccagcg

SEQ ID NO: 3446281 - RNA, 19 nt, Human
gcaccagccagcguagcag

SEQ ID NO: 3446282 - RNA, 17 nt, Human
gcaccagcgaagggagu

SEQ ID NO: 3446283 - RNA, 20 nt, Human
gcaccagcuucuccaggcuc

SEQ ID NO: 3446284 - RNA, 13 nt, Human
gcaccaggaagcc

SEQ ID NO: 3446285 - RNA, 14 nt, Human
gcaccaggaagccg

SEQ ID NO: 3446286 - RNA, 13 nt, Human
gcaccaggagaca

SEQ ID NO: 3446287 - RNA, 23 nt, Human
gcaccaggcacgaacccaccugc

SEQ ID NO: 3446288 - RNA, 18 nt, Human
gcaccaggcgcugcccac

SEQ ID NO: 3446289 - RNA, 20 nt, Human
gcaccagggacuaugaaugg

SEQ ID NO: 3446290 - RNA, 18 nt, Human
gcaccagggguuucucgc

SEQ ID NO: 3446291 - RNA, 13 nt, Human
gcaccauccccuc

SEQ ID NO: 3446292 - RNA, 14 nt, Human
gcaccauccccucc

SEQ ID NO: 3446293 - RNA, 21 nt, Human
gcaccaucccuuuuugaagug

SEQ ID NO: 3446294 - RNA, 13 nt, Human
gcaccauccgcca

SEQ ID NO: 3446295 - RNA, 18 nt, Human
gcaccauccgccagggcc

SEQ ID NO: 3446296 - RNA, 16 nt, Human
gcaccaugcugcuggg

SEQ ID NO: 3446297 - RNA, 23 nt, Human
gcaccaugcugcuggggaagaca

SEQ ID NO: 3446298 - RNA, 22 nt, Human
gcaccauucaggaaccuggacc

SEQ ID NO: 3446299 - RNA, 14 nt, Human
gcaccauugcugcu

SEQ ID NO: 3446300 - RNA, 22 nt, Human
gcaccauugcugcuccuuagcu

SEQ ID NO: 3446301 - RNA, 22 nt, Human
gcacccacccagcacccagcaa

SEQ ID NO: 3446302 - RNA, 13 nt, Human
gcacccacccugg

SEQ ID NO: 3446303 - RNA, 20 nt, Human
gcacccaccguggaggagga

SEQ ID NO: 3446304 - RNA, 20 nt, Human
gcacccaggaggggaacacu

SEQ ID NO: 3446305 - RNA, 17 nt, Human
gcacccagugagcacuc

SEQ ID NO: 3446306 - RNA, 16 nt, Human
gcacccauccuagaga

SEQ ID NO: 3446307 - RNA, 23 nt, Human
gcacccauuaugcgcuguggcca

SEQ ID NO: 3446308 - RNA, 13 nt, Human
gcacccccacccu

SEQ ID NO: 3446309 - RNA, 20 nt, Human
gcacccccagccugggccua

SEQ ID NO: 3446310 - RNA, 17 nt, Human
gcaccccccuguucuaa

SEQ ID NO: 3446311 - RNA, 21 nt, Human
gcaccccccuguucuaagggg

SEQ ID NO: 3446312 - RNA, 15 nt, Human
gcacccccuccugcu

SEQ ID NO: 3446313 - RNA, 17 nt, Human
gcacccccuccugcugc

SEQ ID NO: 3446314 - RNA, 19 nt, Human
gcacccccuccugcugcag

SEQ ID NO: 3446315 - RNA, 14 nt, Human
gcacccccuggaga

SEQ ID NO: 3446316 - RNA, 14 nt, Human
gcaccccgcugcgg

SEQ ID NO: 3446317 - RNA, 23 nt, Human
gcaccccuuccugggcacacgcu

SEQ ID NO: 3446318 - RNA, 13 nt, Human
gcaccccuucucu

SEQ ID NO: 3446319 - RNA, 19 nt, Human
gcaccccuucucuccuccc

SEQ ID NO: 3446320 - RNA, 22 nt, Human
gcaccccuucucuccuccccaa

SEQ ID NO: 3446321 - RNA, 13 nt, Human
gcacccgccucuc

SEQ ID NO: 3446322 - RNA, 18 nt, Human
gcacccggccccugcugg

SEQ ID NO: 3446323 - RNA, 16 nt, Human
gcacccgggcucaggg

SEQ ID NO: 3446324 - RNA, 13 nt, Human
gcacccuauaaau

SEQ ID NO: 3446325 - RNA, 15 nt, Human
gcacccucaggcagg

SEQ ID NO: 3446326 - RNA, 15 nt, Human
gcacccuccccuccc

SEQ ID NO: 3446327 - RNA, 11 nt, Human
gcacccugagg

SEQ ID NO: 3446328 - RNA, 17 nt, Human
gcacccuggggccugga

SEQ ID NO: 3446329 - RNA, 20 nt, Human
gcacccuggggccuggaccu

SEQ ID NO: 3446330 - RNA, 18 nt, Human
gcacccuucuuuccucuu

SEQ ID NO: 3446331 - RNA, 21 nt, Human
gcacccuucuuuccucuuccc

SEQ ID NO: 3446332 - RNA, 19 nt, Human
cugcacaagccagggugug

SEQ ID NO: 3446333 - RNA, 13 nt, Human
cugcacaagcugc

SEQ ID NO: 3446334 - RNA, 14 nt, Human
cugcacaagcugca

SEQ ID NO: 3446335 - RNA, 22 nt, Human
cugcacaagcugcacccucagg

SEQ ID NO: 3446336 - RNA, 21 nt, Human
cugcacaauaacuccucccag

SEQ ID NO: 3446337 - RNA, 23 nt, Human
cugcacaauaacuccucccaggg

SEQ ID NO: 3446338 - RNA, 11 nt, Human
cugcacacaag

SEQ ID NO: 3446339 - RNA, 22 nt, Human
cugcacacaagcccacagcaca

SEQ ID NO: 3446340 - RNA, 19 nt, Human
cugcacacaccucagaggc

SEQ ID NO: 3446341 - RNA, 20 nt, Human
cugcacacaccucagaggcu

SEQ ID NO: 3446342 - RNA, 18 nt, Human
cugcacacccuccagaga

SEQ ID NO: 3446343 - RNA, 20 nt, Human
cugcacacgcuccuuccucu

SEQ ID NO: 3446344 - RNA, 11 nt, Human
cugcacagagc

SEQ ID NO: 3446345 - RNA, 14 nt, Human
cugcacagagcucu

SEQ ID NO: 3446346 - RNA, 18 nt, Human
cugcacagggcagcuggg

SEQ ID NO: 3446347 - RNA, 20 nt, Human
cugcacagggcagcugggcc

SEQ ID NO: 3446348 - RNA, 22 nt, Human
cugcacagggcagcugggccca

SEQ ID NO: 3446349 - RNA, 16 nt, Human
cugcacagugacuucu

SEQ ID NO: 3446350 - RNA, 18 nt, Human
cugcacaguuuucuggcu

SEQ ID NO: 3446351 - RNA, 21 nt, Human
cugcacaguuuucuggcugga

SEQ ID NO: 3446352 - RNA, 22 nt, Human
cugcacaugaaucccacccaca

SEQ ID NO: 3446353 - RNA, 22 nt, Human
cugcacaugacucggggguggg

SEQ ID NO: 3446354 - RNA, 21 nt, Human
cugcacaugauuucacaaaua

SEQ ID NO: 3446355 - RNA, 20 nt, Human
cugcacaugcagcugcaccc

SEQ ID NO: 3446356 - RNA, 21 nt, Human
cugcacauuaaggagaaaucu

SEQ ID NO: 3446357 - RNA, 13 nt, Human
cugcaccaaccca

SEQ ID NO: 3446358 - RNA, 12 nt, Human
cugcaccagagc

SEQ ID NO: 3446359 - RNA, 13 nt, Human
cugcaccagagca

SEQ ID NO: 3446360 - RNA, 12 nt, Human
cugcacccagga

SEQ ID NO: 3446361 - RNA, 15 nt, Human
cugcacccaggaggg

SEQ ID NO: 3446362 - RNA, 15 nt, Human
gcaccuaauccaggc

SEQ ID NO: 3446363 - RNA, 18 nt, Human
gcaccuaauccaggcaga

SEQ ID NO: 3446364 - RNA, 23 nt, Human
gcaccuaauccaggcagauccag

SEQ ID NO: 3446365 - RNA, 18 nt, Human
gcaccuacaguguacagu

SEQ ID NO: 3446366 - RNA, 18 nt, Human
gcaccuaccaccacgccc

SEQ ID NO: 3446367 - RNA, 15 nt, Human
gcaccuaccaucagg

SEQ ID NO: 3446368 - RNA, 20 nt, Human
gcaccuaccaucagggacag

SEQ ID NO: 3446369 - RNA, 23 nt, Human
gcaccuacuacaucgcccuccac

SEQ ID NO: 3446370 - RNA, 14 nt, Human
gcaccuacuuacau

SEQ ID NO: 3446371 - RNA, 21 nt, Human
gcaccuauagucccagcuacu

SEQ ID NO: 3446372 - RNA, 15 nt, Human
gcaccuccagccuga

SEQ ID NO: 3446373 - RNA, 13 nt, Human
gcaccuccaggcc

SEQ ID NO: 3446374 - RNA, 15 nt, Human
gcaccuccaggccug

SEQ ID NO: 3446375 - RNA, 20 nt, Human
gcaccuccaggccuguugcu

SEQ ID NO: 3446376 - RNA, 12 nt, Human
gcaccucccagc

SEQ ID NO: 3446377 - RNA, 14 nt, Human
gcaccucccagccc

SEQ ID NO: 3446378 - RNA, 19 nt, Human
gcaccuccccccacugcag

SEQ ID NO: 3446379 - RNA, 15 nt, Human
gcaccuccucagccu

SEQ ID NO: 3446380 - RNA, 12 nt, Human
gcaccuccugcc

SEQ ID NO: 3446381 - RNA, 19 nt, Human
gcaccugcaaucccagcua

SEQ ID NO: 3446382 - RNA, 20 nt, Human
gcaccugcagguugggccau

SEQ ID NO: 3446383 - RNA, 21 nt, Human
gcaccugcagguugggccaua

SEQ ID NO: 3446384 - RNA, 22 nt, Human
gcaccugcauccguaguucccu

SEQ ID NO: 3446385 - RNA, 17 nt, Human
gcaccugccagccuggc

SEQ ID NO: 3446386 - RNA, 22 nt, Human
gcaccugccagccuggcuucug

SEQ ID NO: 3446387 - RNA, 22 nt, Human
gcaccugcccccugguggacag

SEQ ID NO: 3446388 - RNA, 19 nt, Human
gcaccugccgaccucgucc

SEQ ID NO: 3446389 - RNA, 13 nt, Human
gcaccugccucag

SEQ ID NO: 3446390 - RNA, 14 nt, Human
gcaccugccucagg

SEQ ID NO: 3446391 - RNA, 22 nt, Human
gcaccuggaauauauaaccagu

SEQ ID NO: 3446392 - RNA, 18 nt, Human
gcaccuggcaucgcacca

SEQ ID NO: 3446393 - RNA, 17 nt, Human
gcaccugggcccugggg

SEQ ID NO: 3446394 - RNA, 18 nt, Human
gcaccugggcccuggggc

SEQ ID NO: 3446395 - RNA, 22 nt, Human
gcaccugggcccuggggccugu

SEQ ID NO: 3446396 - RNA, 23 nt, Human
gcaccugggcccuggggccugua

SEQ ID NO: 3446397 - RNA, 17 nt, Human
gcaccuggggaguggga

SEQ ID NO: 3446398 - RNA, 22 nt, Human
gcaccugguggccaugcuccuc

SEQ ID NO: 3446399 - RNA, 18 nt, Human
gcaccuguaaugugcgag

SEQ ID NO: 3446400 - RNA, 20 nt, Human
gcaccuguccccacccucca

SEQ ID NO: 3446401 - RNA, 21 nt, Human
gcaccuguccccacccuccac

SEQ ID NO: 3446402 - RNA, 19 nt, Human
gcaccugucgcccagugcc

SEQ ID NO: 3446403 - RNA, 14 nt, Human
gcaccugucugcuc

SEQ ID NO: 3446404 - RNA, 14 nt, Human
gcaccuuagacagu

SEQ ID NO: 3446405 - RNA, 13 nt, Human
gcaccuuaguggc

SEQ ID NO: 3446406 - RNA, 14 nt, Human
gcaccuucccccuc

SEQ ID NO: 3446407 - RNA, 19 nt, Human
gcaccuugugccuggggug

SEQ ID NO: 3446408 - RNA, 20 nt, Human
gcaccuugugucuguacacg

SEQ ID NO: 3446409 - RNA, 22 nt, Human
gcaccuuuccuucaagccagca

SEQ ID NO: 3446410 - RNA, 19 nt, Human
gcaccuuugcacaggaugc

SEQ ID NO: 3446411 - RNA, 14 nt, Human
gcaccuuuuacugu

SEQ ID NO: 3446412 - RNA, 17 nt, Human
gcacgaacccaccugcu

SEQ ID NO: 3446413 - RNA, 23 nt, Human
gcacgaacccaccugcugagaga

SEQ ID NO: 3446414 - RNA, 13 nt, Human
gcacgacagugga

SEQ ID NO: 3446415 - RNA, 13 nt, Human
gcacgauuucugu

SEQ ID NO: 3446416 - RNA, 14 nt, Human
gcacgcacacacac

SEQ ID NO: 3446417 - RNA, 15 nt, Human
gcacgcacacacaca

SEQ ID NO: 3446418 - RNA, 16 nt, Human
gcacgcacacugucug

SEQ ID NO: 3446419 - RNA, 12 nt, Human
gcacggacaaua

SEQ ID NO: 3446420 - RNA, 17 nt, Human
gcacggacaauaaaccu

SEQ ID NO: 3446421 - RNA, 16 nt, Human
gcacggcagccacagc

SEQ ID NO: 3446422 - RNA, 20 nt, Human
gcacggcucuguccccagcc

SEQ ID NO: 3446423 - RNA, 12 nt, Human
gcacggcugcug

SEQ ID NO: 3446424 - RNA, 18 nt, Human
gcacguaaaguacuugua

SEQ ID NO: 3446425 - RNA, 16 nt, Human
gcacguaguaggguca

SEQ ID NO: 3446426 - RNA, 14 nt, Human
gcacguauuuuaau

SEQ ID NO: 3446427 - RNA, 13 nt, Human
gcacgucauggga

SEQ ID NO: 3446428 - RNA, 13 nt, Human
gcacgugcacaaa

SEQ ID NO: 3446429 - RNA, 20 nt, Human
gcacguggagagcuggugcc

SEQ ID NO: 3446430 - RNA, 14 nt, Human
gcacguggccucuu

SEQ ID NO: 3446431 - RNA, 14 nt, Human
gcacguguguuuuu

SEQ ID NO: 3446432 - RNA, 18 nt, Human
gcacguguguuuuucuau

SEQ ID NO: 3446433 - RNA, 19 nt, Human
gcacguguguuuuucuauu

SEQ ID NO: 3446434 - RNA, 15 nt, Human
gcacguuuaaaguuc

SEQ ID NO: 3446435 - RNA, 17 nt, Human
gcacuaaagccagccug

SEQ ID NO: 3446436 - RNA, 21 nt, Human
gcacuaaagccagccugaccu

SEQ ID NO: 3446437 - RNA, 23 nt, Human
gcacuaaagccagccugaccuuc

SEQ ID NO: 3446438 - RNA, 19 nt, Human
gcacuaaaguauguaaagu

SEQ ID NO: 3446439 - RNA, 19 nt, Human
gcacuaaggugugcucuga

SEQ ID NO: 3446440 - RNA, 20 nt, Human
gcacuaagucucuuuuuuac

SEQ ID NO: 3446441 - RNA, 17 nt, Human
gcacuacaccuugccuu

SEQ ID NO: 3446442 - RNA, 13 nt, Human
gcacuacaugugg

SEQ ID NO: 3446443 - RNA, 20 nt, Human
gcacuaccacuccugccaag

SEQ ID NO: 3446444 - RNA, 21 nt, Human
gcacuaccacuccugccaagg

SEQ ID NO: 3446445 - RNA, 13 nt, Human
gcacuacuccucu

SEQ ID NO: 3446446 - RNA, 17 nt, Human
gcacuacugggugucau

SEQ ID NO: 3446447 - RNA, 16 nt, Human
gcacuagagaaugcac

SEQ ID NO: 3446448 - RNA, 20 nt, Human
gcacuagagaaugcacagau

SEQ ID NO: 3446449 - RNA, 13 nt, Human
gcacuagccuuug

SEQ ID NO: 3446450 - RNA, 15 nt, Human
gcacuagccuuuggc

SEQ ID NO: 3446451 - RNA, 21 nt, Human
gcacuagccuuuggcucugga

SEQ ID NO: 3446452 - RNA, 21 nt, Human
gcacuaggggauauaggagag

SEQ ID NO: 3446453 - RNA, 14 nt, Human
gcacuauaauguaa

SEQ ID NO: 3446454 - RNA, 20 nt, Human
gcacuauaauguaagcucua

SEQ ID NO: 3446455 - RNA, 22 nt, Human
gcacuauagccuaggugacaga

SEQ ID NO: 3446456 - RNA, 18 nt, Human
gcacuauauacaucacgu

SEQ ID NO: 3446457 - RNA, 19 nt, Human
gcacuaucuuucagcucca

SEQ ID NO: 3446458 - RNA, 18 nt, Human
gcacuauuuauuuacaaa

SEQ ID NO: 3446459 - RNA, 21 nt, Human
gcacucaaaucuuaagaaaua

SEQ ID NO: 3446460 - RNA, 19 nt, Human
gcacucaaccuuaagaccu

SEQ ID NO: 3446461 - RNA, 23 nt, Human
gcacucacacaggacccccuucc

SEQ ID NO: 3446462 - RNA, 17 nt, Human
gcacucacagaccugga

SEQ ID NO: 3446463 - RNA, 19 nt, Human
gcacucacagaccuggagc

SEQ ID NO: 3446464 - RNA, 13 nt, Human
gcacucacaugcu

SEQ ID NO: 3446465 - RNA, 17 nt, Human
gcacucacccaugugcc

SEQ ID NO: 3446466 - RNA, 13 nt, Human
gcacucagaagac

SEQ ID NO: 3446467 - RNA, 23 nt, Human
gcacuccaaccuaaccugugucu

SEQ ID NO: 3446468 - RNA, 12 nt, Human
gcacuccagccu

SEQ ID NO: 3446469 - RNA, 14 nt, Human
gcacuccagccugg

SEQ ID NO: 3446470 - RNA, 17 nt, Human
gcacuccagccugggug

SEQ ID NO: 3446471 - RNA, 21 nt, Human
gcacuccaugcuuagucacug

SEQ ID NO: 3446472 - RNA, 15 nt, Human
gcacuccccugcugg

SEQ ID NO: 3446473 - RNA, 17 nt, Human
gcacuccccugcugggu

SEQ ID NO: 3446474 - RNA, 22 nt, Human
gcacuccccugcuggguguggc

SEQ ID NO: 3446475 - RNA, 16 nt, Human
gcacucccuccagcac

SEQ ID NO: 3446476 - RNA, 17 nt, Human
gcacuccggccugauga

SEQ ID NO: 3446477 - RNA, 20 nt, Human
gcacuccucgguacucccau

SEQ ID NO: 3446478 - RNA, 21 nt, Human
gcacucgugugcaacagacaa

SEQ ID NO: 3446479 - RNA, 22 nt, Human
gcacucuggaugauggauucca

SEQ ID NO: 3446480 - RNA, 12 nt, Human
gcacucugugcc

SEQ ID NO: 3446481 - RNA, 20 nt, Human
gcacucugugcccaugggca

SEQ ID NO: 3446482 - RNA, 15 nt, Human
gcacucuuaaagcaa

SEQ ID NO: 3446483 - RNA, 16 nt, Human
gcacucuuaagcuucc

SEQ ID NO: 3446484 - RNA, 17 nt, Human
gcacugaaaaaaaaucu

SEQ ID NO: 3446485 - RNA, 20 nt, Human
gcacugaaaauaccaucagg

SEQ ID NO: 3446486 - RNA, 9 nt, Human
gcacugaag

SEQ ID NO: 3446487 - RNA, 12 nt, Human
gcacugacagau

SEQ ID NO: 3446488 - RNA, 17 nt, Human
gcacugacccuuccaga

SEQ ID NO: 3446489 - RNA, 14 nt, Human
gcacugacucugga

SEQ ID NO: 3446490 - RNA, 16 nt, Human
gcacugacugggcaua

SEQ ID NO: 3446491 - RNA, 18 nt, Human
gcacugacuucuaaguaa

SEQ ID NO: 3446492 - RNA, 19 nt, Human
gcacugagagagcgcagcc

SEQ ID NO: 3446493 - RNA, 18 nt, Human
cugcagccuuugccuccc

SEQ ID NO: 3446494 - RNA, 20 nt, Human
cugcagcggccacacuguac

SEQ ID NO: 3446495 - RNA, 17 nt, Human
cugcagcucacccagcc

SEQ ID NO: 3446496 - RNA, 13 nt, Human
cugcagcucccuc

SEQ ID NO: 3446497 - RNA, 14 nt, Human
cugcagcucccuca

SEQ ID NO: 3446498 - RNA, 18 nt, Human
cugcagcucucaugcugc

SEQ ID NO: 3446499 - RNA, 13 nt, Human
cugcagcugaccu

SEQ ID NO: 3446500 - RNA, 15 nt, Human
cugcagcuggacaga

SEQ ID NO: 3446501 - RNA, 17 nt, Human
cugcagcuggacagagg

SEQ ID NO: 3446502 - RNA, 19 nt, Human
cugcagcuggacagagggg

SEQ ID NO: 3446503 - RNA, 13 nt, Human
cugcagcugggcu

SEQ ID NO: 3446504 - RNA, 14 nt, Human
cugcagcugggcug

SEQ ID NO: 3446505 - RNA, 11 nt, Human
cugcagcuucc

SEQ ID NO: 3446506 - RNA, 12 nt, Human
cugcagcuuccu

SEQ ID NO: 3446507 - RNA, 15 nt, Human
cugcccugcccaccu

SEQ ID NO: 3446508 - RNA, 17 nt, Human
cugcccugcccaccugg

SEQ ID NO: 3446509 - RNA, 18 nt, Human
cugcccugcccuagcucc

SEQ ID NO: 3446510 - RNA, 15 nt, Human
cugcccugccugagg

SEQ ID NO: 3446511 - RNA, 22 nt, Human
cugcccugcugagucccaggcu

SEQ ID NO: 3446512 - RNA, 21 nt, Human
cugcccugcugccgccuccca

SEQ ID NO: 3446513 - RNA, 22 nt, Human
cugcccuggaacauccuuugca

SEQ ID NO: 3446514 - RNA, 16 nt, Human
cugcccuggcccugag

SEQ ID NO: 3446515 - RNA, 17 nt, Human
cugcccuggcccugagg

SEQ ID NO: 3446516 - RNA, 22 nt, Human
cugcccuggcccugaggugugg

SEQ ID NO: 3446517 - RNA, 12 nt, Human
cugcccuggcug

SEQ ID NO: 3446518 - RNA, 17 nt, Human
cugcccuggcugcugcc

SEQ ID NO: 3446519 - RNA, 15 nt, Human
cugcccugggaggca

SEQ ID NO: 3446520 - RNA, 18 nt, Human
cugcccuggugcugccac

SEQ ID NO: 3446521 - RNA, 17 nt, Human
cugcccugguuuccugc

SEQ ID NO: 3446522 - RNA, 20 nt, Human
cugcccugguuuccugcccu

SEQ ID NO: 3446523 - RNA, 22 nt, Human
cugcccugguuuccugcccugg

SEQ ID NO: 3446524 - RNA, 12 nt, Human
cugcccugucua

SEQ ID NO: 3446525 - RNA, 12 nt, Human
cugcccugugag

SEQ ID NO: 3446526 - RNA, 20 nt, Human
cugcccugugggaccccagg

SEQ ID NO: 3446527 - RNA, 21 nt, Human
cugcccugugggaccccaggc

SEQ ID NO: 3446528 - RNA, 12 nt, Human
cugcccuuaccu

SEQ ID NO: 3446529 - RNA, 16 nt, Human
cugcccuuaccugcca

SEQ ID NO: 3446530 - RNA, 15 nt, Human
cugcccuuaggccac

SEQ ID NO: 3446531 - RNA, 22 nt, Human
cugcccuuccucaguuuaaucc

SEQ ID NO: 3446532 - RNA, 16 nt, Human
cugcccuugaucagcc

SEQ ID NO: 3446533 - RNA, 17 nt, Human
cugcccuugaucagccc

SEQ ID NO: 3446534 - RNA, 12 nt, Human
cugcccuugggc

SEQ ID NO: 3446535 - RNA, 15 nt, Human
cugcccuugucccac

SEQ ID NO: 3446536 - RNA, 16 nt, Human
cugcccuugucugaga

SEQ ID NO: 3446537 - RNA, 21 nt, Human
cugcccuuucugggcaccggg

SEQ ID NO: 3446538 - RNA, 23 nt, Human
cugcccuuuguccuccugcugcc

SEQ ID NO: 3446539 - RNA, 15 nt, Human
cugcccuuuuuucug

SEQ ID NO: 3446540 - RNA, 19 nt, Human
cugcccuuuuuucugccuc

SEQ ID NO: 3446541 - RNA, 20 nt, Human
cugcccuuuuuucugccucc

SEQ ID NO: 3446542 - RNA, 15 nt, Human
cugccgaccagagcc

SEQ ID NO: 3446543 - RNA, 19 nt, Human
cugccgacuccuggguuga

SEQ ID NO: 3446544 - RNA, 18 nt, Human
cugccgcaauacaggaac

SEQ ID NO: 3446545 - RNA, 17 nt, Human
cugccgcaccccagagu

SEQ ID NO: 3446546 - RNA, 14 nt, Human
cugccgcagagcug

SEQ ID NO: 3446547 - RNA, 16 nt, Human
cugccgcagagcuggc

SEQ ID NO: 3446548 - RNA, 20 nt, Human
cugccgcagcccugcagagg

SEQ ID NO: 3446549 - RNA, 15 nt, Human
cugccgccucccagc

SEQ ID NO: 3446550 - RNA, 14 nt, Human
gcagcaccugcccu

SEQ ID NO: 3446551 - RNA, 15 nt, Human
gcagcacggacaaua

SEQ ID NO: 3446552 - RNA, 19 nt, Human
gcagcacucacacaggacc

SEQ ID NO: 3446553 - RNA, 12 nt, Human
gcagcagaaggg

SEQ ID NO: 3446554 - RNA, 22 nt, Human
gcagcagaaggggguggugucu

SEQ ID NO: 3446555 - RNA, 13 nt, Human
gcagcagacacau

SEQ ID NO: 3446556 - RNA, 20 nt, Human
gcagcagauuggaaggagac

SEQ ID NO: 3446557 - RNA, 13 nt, Human
gcagcagcagccc

SEQ ID NO: 3446558 - RNA, 13 nt, Human
gcagcagccagcc

SEQ ID NO: 3446559 - RNA, 15 nt, Human
gcagcagccagcccu

SEQ ID NO: 3446560 - RNA, 16 nt, Human
gcagcagccagcccug

SEQ ID NO: 3446561 - RNA, 21 nt, Human
gcagcagccagcccugccugg

SEQ ID NO: 3446562 - RNA, 14 nt, Human
gcagcagcccaagc

SEQ ID NO: 3446563 - RNA, 20 nt, Human
gcagcagcccaagcuucccu

SEQ ID NO: 3446564 - RNA, 22 nt, Human
gcagcagccucgccccuggcag

SEQ ID NO: 3446565 - RNA, 12 nt, Human
gcagcagcuugc

SEQ ID NO: 3446566 - RNA, 16 nt, Human
gcagcaggaggccagg

SEQ ID NO: 3446567 - RNA, 14 nt, Human
gcagcaggaggggg

SEQ ID NO: 3446568 - RNA, 14 nt, Human
gcagcaggccuguu

SEQ ID NO: 3446569 - RNA, 15 nt, Human
gcagcagggaugccc

SEQ ID NO: 3446570 - RNA, 17 nt, Human
gcagcagggaugcccug

SEQ ID NO: 3446571 - RNA, 20 nt, Human
gcagcagggaugcccuggag

SEQ ID NO: 3446572 - RNA, 18 nt, Human
gcagcagguagccugcug

SEQ ID NO: 3446573 - RNA, 21 nt, Human
gcagcaggugauuggaccagg

SEQ ID NO: 3446574 - RNA, 12 nt, Human
gcagcaggugcu

SEQ ID NO: 3446575 - RNA, 13 nt, Human
gcagcaggugcug

SEQ ID NO: 3446576 - RNA, 14 nt, Human
gcagcagugaaaac

SEQ ID NO: 3446577 - RNA, 17 nt, Human
gcagcagugagucucuu

SEQ ID NO: 3446578 - RNA, 21 nt, Human
gcagcagugagucucuucaga

SEQ ID NO: 3446579 - RNA, 15 nt, Human
gcagcagugugaggc

SEQ ID NO: 3446580 - RNA, 20 nt, Human
gcagcagugugaggccaggg

SEQ ID NO: 3446581 - RNA, 15 nt, Human
gcagcauaaaggccu

SEQ ID NO: 3446582 - RNA, 14 nt, Human
gcagcauaugagga

SEQ ID NO: 3446583 - RNA, 23 nt, Human
gcagcaucggacaagacccccag

SEQ ID NO: 3446584 - RNA, 14 nt, Human
gcagcaucucuacc

SEQ ID NO: 3446585 - RNA, 19 nt, Human
gcagcaucuucacuucuaa

SEQ ID NO: 3446586 - RNA, 14 nt, Human
gcagcaucuucugg

SEQ ID NO: 3446587 - RNA, 20 nt, Human
gcagcauguugcugaggagu

SEQ ID NO: 3446588 - RNA, 15 nt, Human
gcagcauugacuggu

SEQ ID NO: 3446589 - RNA, 14 nt, Human
gcagcauuucacuu

SEQ ID NO: 3446590 - RNA, 11 nt, Human
gcagcauuuga

SEQ ID NO: 3446591 - RNA, 20 nt, Human
gcagccaaguagccucuccu

SEQ ID NO: 3446592 - RNA, 18 nt, Human
gcagccacacuucucagg

SEQ ID NO: 3446593 - RNA, 16 nt, Human
gcagccacauuccuga

SEQ ID NO: 3446594 - RNA, 18 nt, Human
gcagccacuuaggacaaa

SEQ ID NO: 3446595 - RNA, 23 nt, Human
gcagccagaccuauuccuccugg

SEQ ID NO: 3446596 - RNA, 21 nt, Human
gcagccagccaaacacacaga

SEQ ID NO: 3446597 - RNA, 21 nt, Human
gcagccagcccagcccagcug

SEQ ID NO: 3446598 - RNA, 23 nt, Human
gcagccagcccagcccagcuggu

SEQ ID NO: 3446599 - RNA, 20 nt, Human
gcagccagcccugccuggag

SEQ ID NO: 3446600 - RNA, 13 nt, Human
gcagccagccgug

SEQ ID NO: 3446601 - RNA, 22 nt, Human
gcagccagccgugagugcagac

SEQ ID NO: 3446602 - RNA, 13 nt, Human
gcagccagcucuc

SEQ ID NO: 3446603 - RNA, 17 nt, Human
gcagccagcucucagcc

SEQ ID NO: 3446604 - RNA, 15 nt, Human
gcagccagggagagc

SEQ ID NO: 3446605 - RNA, 19 nt, Human
gcagccagggagagcccag

SEQ ID NO: 3446606 - RNA, 13 nt, Human
gcagccaguucaa

SEQ ID NO: 3446607 - RNA, 17 nt, Human
gcagcccaagcuucccu

SEQ ID NO: 3446608 - RNA, 17 nt, Human
gcagcccacccugcugc

SEQ ID NO: 3446609 - RNA, 20 nt, Human
gcagcccacccugcugcugg

SEQ ID NO: 3446610 - RNA, 13 nt, Human
gcagcccagccag

SEQ ID NO: 3446611 - RNA, 14 nt, Human
gcagcccagccagc

SEQ ID NO: 3446612 - RNA, 14 nt, Human
gcagcccaggaagu

SEQ ID NO: 3446613 - RNA, 17 nt, Human
gcagcccaggccggggu

SEQ ID NO: 3446614 - RNA, 13 nt, Human
gcagcccaugccc

SEQ ID NO: 3446615 - RNA, 17 nt, Human
gcagcccaugcccaccu

SEQ ID NO: 3446616 - RNA, 19 nt, Human
gcagcccauuucuccagaa

SEQ ID NO: 3446617 - RNA, 22 nt, Human
gcagccccacaccagggccagc

SEQ ID NO: 3446618 - RNA, 14 nt, Human
gcagccccgggagg

SEQ ID NO: 3446619 - RNA, 20 nt, Human
gcagccccgugggguuccuc

SEQ ID NO: 3446620 - RNA, 20 nt, Human
gcagccccuguucuggcaga

SEQ ID NO: 3446621 - RNA, 19 nt, Human
gcagcccgcaucagcugcu

SEQ ID NO: 3446622 - RNA, 18 nt, Human
gcagcccgcuaggcucgc

SEQ ID NO: 3446623 - RNA, 24 nt, Human
gcagcccgggucaucuguaccucu

SEQ ID NO: 3446624 - RNA, 19 nt, Human
gcagcccguguggccccuu

SEQ ID NO: 3446625 - RNA, 20 nt, Human
gcagcccguguggccccuuc

SEQ ID NO: 3446626 - RNA, 21 nt, Human
gcagcccguguggccccuuca

SEQ ID NO: 3446627 - RNA, 22 nt, Human
gcagcccuaaggaucucucagg

SEQ ID NO: 3446628 - RNA, 13 nt, Human
gcagcccuagagc

SEQ ID NO: 3446629 - RNA, 17 nt, Human
gcagcccuagagccugc

SEQ ID NO: 3446630 - RNA, 22 nt, Human
gcagcccuagagccugccugga

SEQ ID NO: 3446631 - RNA, 13 nt, Human
gcagcccuccuca

SEQ ID NO: 3446632 - RNA, 19 nt, Human
gcagcccucggcgcuccgg

SEQ ID NO: 3446633 - RNA, 13 nt, Human
gcagcccugcaga

SEQ ID NO: 3446634 - RNA, 14 nt, Human
gcagcccugcagag

SEQ ID NO: 3446635 - RNA, 15 nt, Human
gcagcccugcagagg

SEQ ID NO: 3446636 - RNA, 17 nt, Human
gcagcccugcagagggc

SEQ ID NO: 3446637 - RNA, 16 nt, Human
gcagcccugccccaca

SEQ ID NO: 3446638 - RNA, 14 nt, Human
gcagcccuggccca

SEQ ID NO: 3446639 - RNA, 17 nt, Human
gcagcccuggcccauca

SEQ ID NO: 3446640 - RNA, 12 nt, Human
gcagcccuugcu

SEQ ID NO: 3446641 - RNA, 20 nt, Human
gcagccgccuuccuugaccu

SEQ ID NO: 3446642 - RNA, 17 nt, Human
gcagccgcugagcgagg

SEQ ID NO: 3446643 - RNA, 19 nt, Human
gcagccucaaccuccuggg

SEQ ID NO: 3446644 - RNA, 15 nt, Human
gcagccucacagucc

SEQ ID NO: 3446645 - RNA, 15 nt, Human
gcagccucagagaca

SEQ ID NO: 3446646 - RNA, 13 nt, Human
gcagccucaggac

SEQ ID NO: 3446647 - RNA, 15 nt, Human
gcagccucaggacug

SEQ ID NO: 3446648 - RNA, 19 nt, Human
gcagccucaggacugggag

SEQ ID NO: 3446649 - RNA, 18 nt, Human
gcagccucccauccaggg

SEQ ID NO: 3446650 - RNA, 15 nt, Human
gcagccuccuccuga

SEQ ID NO: 3446651 - RNA, 18 nt, Human
gcagccuccuccugacca

SEQ ID NO: 3446652 - RNA, 19 nt, Human
gcagccucgaacuccuggg

SEQ ID NO: 3446653 - RNA, 21 nt, Human
gcaguagacauuuuaacaaga

SEQ ID NO: 3446654 - RNA, 18 nt, Human
gcaguagagucaucucca

SEQ ID NO: 3446655 - RNA, 20 nt, Human
gcaguagagucaucuccauc

SEQ ID NO: 3446656 - RNA, 15 nt, Human
gcaguagauuuucuu

SEQ ID NO: 3446657 - RNA, 20 nt, Human
gcaguaggccggugugccug

SEQ ID NO: 3446658 - RNA, 13 nt, Human
gcaguaggggagg

SEQ ID NO: 3446659 - RNA, 12 nt, Human
gcaguagucucu

SEQ ID NO: 3446660 - RNA, 12 nt, Human
gcaguauauuuc

SEQ ID NO: 3446661 - RNA, 13 nt, Human
gcaguaugguaca

SEQ ID NO: 3446662 - RNA, 17 nt, Human
gcaguaugguacauuuu

SEQ ID NO: 3446663 - RNA, 21 nt, Human
gcagucacuucggccagagcu

SEQ ID NO: 3446664 - RNA, 22 nt, Human
gcagucaucuugaccaagcagg

SEQ ID NO: 3446665 - RNA, 19 nt, Human
gcagucauuauccagguaa

SEQ ID NO: 3446666 - RNA, 23 nt, Human
gcaguccacuucugacagccuca

SEQ ID NO: 3446667 - RNA, 12 nt, Human
gcaguccaugca

SEQ ID NO: 3446668 - RNA, 16 nt, Human
gcagucccaagcggug

SEQ ID NO: 3446669 - RNA, 23 nt, Human
gcagucccugagaccauuuaaca

SEQ ID NO: 3446670 - RNA, 17 nt, Human
gcaguccugccucagcc

SEQ ID NO: 3446671 - RNA, 18 nt, Human
gcaguccuggaagccagc

SEQ ID NO: 3446672 - RNA, 23 nt, Human
gcaguccuuuuacuacagcuaug

SEQ ID NO: 3446673 - RNA, 16 nt, Human
gcagucgggggcuggc

SEQ ID NO: 3446674 - RNA, 18 nt, Human
gcagucgggggcuggccu

SEQ ID NO: 3446675 - RNA, 18 nt, Human
gcagucgugccugugucc

SEQ ID NO: 3446676 - RNA, 19 nt, Human
gcagucgugccugugucca

SEQ ID NO: 3446677 - RNA, 18 nt, Human
gcagucuccucuuuaaaa

SEQ ID NO: 3446678 - RNA, 20 nt, Human
gcagucuccucuuuaaaaca

SEQ ID NO: 3446679 - RNA, 23 nt, Human
gcagucucuauaccaauaaagug

SEQ ID NO: 3446680 - RNA, 13 nt, Human
gcagucuggaggg

SEQ ID NO: 3446681 - RNA, 14 nt, Human
gcagucuucaguuu

SEQ ID NO: 3446682 - RNA, 22 nt, Human
gcagugagaaaaagcuccuguc

SEQ ID NO: 3446683 - RNA, 14 nt, Human
gcagugagagcaga

SEQ ID NO: 3446684 - RNA, 13 nt, Human
gcagugagcagaa

SEQ ID NO: 3446685 - RNA, 18 nt, Human
gcagugagucucuucaga

SEQ ID NO: 3446686 - RNA, 18 nt, Human
gcagugagugagccuggc

SEQ ID NO: 3446687 - RNA, 19 nt, Human
gcagugaguuacagcgaga

SEQ ID NO: 3446688 - RNA, 16 nt, Human
gcagugauauggcaga

SEQ ID NO: 3446689 - RNA, 19 nt, Human
gcagugauauggcagaaga

SEQ ID NO: 3446690 - RNA, 17 nt, Human
gcagugauauucuuugu

SEQ ID NO: 3446691 - RNA, 21 nt, Human
gcagugaugcuggaugcuccu

SEQ ID NO: 3446692 - RNA, 13 nt, Human
gcagugauuuuua

SEQ ID NO: 3446693 - RNA, 20 nt, Human
gcagugcaagagacucuggc

SEQ ID NO: 3446694 - RNA, 22 nt, Human
gcagugcagcaaccagagcacu

SEQ ID NO: 3446695 - RNA, 15 nt, Human
gcagugcaggcacag

SEQ ID NO: 3446696 - RNA, 23 nt, Human
gcagugccccuagcuuagagccu

SEQ ID NO: 3446697 - RNA, 15 nt, Human
gcagugccugauaag

SEQ ID NO: 3446698 - RNA, 15 nt, Human
gcagugccuuccaua

SEQ ID NO: 3446699 - RNA, 22 nt, Human
gcagugccuuccauaauuauga

SEQ ID NO: 3446700 - RNA, 14 nt, Human
gcagugcucaccca

SEQ ID NO: 3446701 - RNA, 18 nt, Human
gcagugcucgcuguugcu

SEQ ID NO: 3446702 - RNA, 18 nt, Human
gcagugcuuggcccagga

SEQ ID NO: 3446703 - RNA, 20 nt, Human
gcagugcuuggcccaggagu

SEQ ID NO: 3446704 - RNA, 15 nt, Human
gcaguggagagggac

SEQ ID NO: 3446705 - RNA, 18 nt, Human
gcaguggagguagaauga

SEQ ID NO: 3446706 - RNA, 20 nt, Human
gcaguggagguagaaugacu

SEQ ID NO: 3446707 - RNA, 14 nt, Human
gcaguggagguggg

SEQ ID NO: 3446708 - RNA, 22 nt, Human
gcaguggcaucaucucagcuca

SEQ ID NO: 3446709 - RNA, 19 nt, Human
gcaguggcgcauucuaggc

SEQ ID NO: 3446710 - RNA, 20 nt, Human
gcaguggcugguccagggcu

SEQ ID NO: 3446711 - RNA, 14 nt, Human
gcagugggaaaaau

SEQ ID NO: 3446712 - RNA, 19 nt, Human
gcagugggaaaaauguagg

SEQ ID NO: 3446713 - RNA, 21 nt, Human
gcagugggacagggcauggcc

SEQ ID NO: 3446714 - RNA, 14 nt, Human
gcagugggagcugc

SEQ ID NO: 3446715 - RNA, 15 nt, Human
gcagugggagcugcc

SEQ ID NO: 3446716 - RNA, 16 nt, Human
gcagugggagcugccu

SEQ ID NO: 3446717 - RNA, 17 nt, Human
gcagugggagcugccug

SEQ ID NO: 3446718 - RNA, 18 nt, Human
gcagugggagcugccugu

SEQ ID NO: 3446719 - RNA, 15 nt, Human
gcagugggccuggcc

SEQ ID NO: 3446720 - RNA, 21 nt, Human
gcagugggguuucgcagccug

SEQ ID NO: 3446721 - RNA, 18 nt, Human
gcaguggugcgaucuggg

SEQ ID NO: 3446722 - RNA, 19 nt, Human
gcaguggugcgaucugggu

SEQ ID NO: 3446723 - RNA, 23 nt, Human
gcaguggugguuuucuguucuuu

SEQ ID NO: 3446724 - RNA, 15 nt, Human
gcagcgagccugcua

SEQ ID NO: 3446725 - RNA, 13 nt, Human
gcagcgagggcgg

SEQ ID NO: 3446726 - RNA, 14 nt, Human
gcagcgagggcgga

SEQ ID NO: 3446727 - RNA, 21 nt, Human
gcagcgagggcggagccggcc

SEQ ID NO: 3446728 - RNA, 24 nt, Human
gcagcgaguuguggaaagccucug

SEQ ID NO: 3446729 - RNA, 14 nt, Human
gcagcgccaggcug

SEQ ID NO: 3446730 - RNA, 18 nt, Human
gcagcgcccuuccucucc

SEQ ID NO: 3446731 - RNA, 17 nt, Human
gcagcgcggggagcccg

SEQ ID NO: 3446732 - RNA, 14 nt, Human
gcagcucaaaggca

SEQ ID NO: 3446733 - RNA, 17 nt, Human
gcagcucaacuuucugu

SEQ ID NO: 3446734 - RNA, 14 nt, Human
gcagcucaccucuc

SEQ ID NO: 3446735 - RNA, 16 nt, Human
gcagcucaccucuccc

SEQ ID NO: 3446736 - RNA, 20 nt, Human
gcagcucaccucucccuugg

SEQ ID NO: 3446737 - RNA, 16 nt, Human
gcagcucacuacccua

SEQ ID NO: 3446738 - RNA, 15 nt, Human
gcagcucagcuuccc

SEQ ID NO: 3446739 - RNA, 15 nt, Human
gcagcucuccaguca

SEQ ID NO: 3446740 - RNA, 21 nt, Human
gcagcucuccagucaggaggc

SEQ ID NO: 3446741 - RNA, 12 nt, Human
gcagcucucccc

SEQ ID NO: 3446742 - RNA, 15 nt, Human
gcagcucuccccuuc

SEQ ID NO: 3446743 - RNA, 20 nt, Human
gcagcucuggacagccccac

SEQ ID NO: 3446744 - RNA, 14 nt, Human
gcagcucuugcccu

SEQ ID NO: 3446745 - RNA, 16 nt, Human
gcagcucuugcccuuc

SEQ ID NO: 3446746 - RNA, 18 nt, Human
gcagcucuugcccuuccc

SEQ ID NO: 3446747 - RNA, 20 nt, Human
gcagcucuugcccuucccug

SEQ ID NO: 3446748 - RNA, 19 nt, Human
gcagcugaaauaugcuggc

SEQ ID NO: 3446749 - RNA, 12 nt, Human
gcagcugaaauu

SEQ ID NO: 3446750 - RNA, 21 nt, Human
gcagcugauguuggaagagaa

SEQ ID NO: 3446751 - RNA, 14 nt, Human
gcagcugccagaga

SEQ ID NO: 3446752 - RNA, 15 nt, Human
gcagcugccagagaa

SEQ ID NO: 3446753 - RNA, 12 nt, Human
gcagcugccucc

SEQ ID NO: 3446754 - RNA, 13 nt, Human
gcagcugccuccc

SEQ ID NO: 3446755 - RNA, 17 nt, Human
gcagcugcgguccaccc

SEQ ID NO: 3446756 - RNA, 22 nt, Human
gcagcugcgguccacccaggag

SEQ ID NO: 3446757 - RNA, 12 nt, Human
gcagcuggacag

SEQ ID NO: 3446758 - RNA, 17 nt, Human
gcagcuggacagagggg

SEQ ID NO: 3446759 - RNA, 23 nt, Human
gcagcuggacagaggggacucug

SEQ ID NO: 3446760 - RNA, 15 nt, Human
gcagcuggacuaccc

SEQ ID NO: 3446761 - RNA, 16 nt, Human
gcagcuggacucugca

SEQ ID NO: 3446762 - RNA, 17 nt, Human
gcagcugggagaagggg

SEQ ID NO: 3446763 - RNA, 15 nt, Human
gcagcugggcccaac

SEQ ID NO: 3446764 - RNA, 21 nt, Human
gcagcugggcccaacccuguc

SEQ ID NO: 3446765 - RNA, 15 nt, Human
gcagcugucccuugc

SEQ ID NO: 3446766 - RNA, 10 nt, Human
gcagcuguug

SEQ ID NO: 3446767 - RNA, 16 nt, Human
gcagcuguugcaguga

SEQ ID NO: 3446768 - RNA, 17 nt, Human
gcagcuguuuuguugac

SEQ ID NO: 3446769 - RNA, 15 nt, Human
gcagcuuagggcccu

SEQ ID NO: 3446770 - RNA, 19 nt, Human
gcagcuuauaaugggcucu

SEQ ID NO: 3446771 - RNA, 12 nt, Human
gcagcuuccaga

SEQ ID NO: 3446772 - RNA, 22 nt, Human
gcagcuucugcccccugcagaa

SEQ ID NO: 3446773 - RNA, 14 nt, Human
gcagcuucuguccu

SEQ ID NO: 3446774 - RNA, 19 nt, Human
gcagcuugaggguugggcu

SEQ ID NO: 3446775 - RNA, 14 nt, Human
gcagcuugccccgg

SEQ ID NO: 3446776 - RNA, 15 nt, Human
gcagcuugcugcacc

SEQ ID NO: 3446777 - RNA, 20 nt, Human
gcagcuuguagccagccggg

SEQ ID NO: 3446778 - RNA, 21 nt, Human
gcagcuuguagccagccgggg

SEQ ID NO: 3446779 - RNA, 22 nt, Human
gcagcuuguagccagccggggc

SEQ ID NO: 3446780 - RNA, 21 nt, Human
gcagcuuuaaacucagggaca

SEQ ID NO: 3446781 - RNA, 22 nt, Human
gcagcuuuaaacucagggacag

SEQ ID NO: 3446782 - RNA, 22 nt, Human
gcagcuuuaaccauuaaaacug

SEQ ID NO: 3446783 - RNA, 19 nt, Human
gcagcuuuagaaucccagc

SEQ ID NO: 3446784 - RNA, 16 nt, Human
gcagcuuuuaaaagau

SEQ ID NO: 3446785 - RNA, 23 nt, Human
gcaggaaaugaaaaugucuugug

SEQ ID NO: 3446786 - RNA, 14 nt, Human
gcaggaacucccag

SEQ ID NO: 3446787 - RNA, 21 nt, Human
gcaggaagcauucagagagca

SEQ ID NO: 3446788 - RNA, 14 nt, Human
gcaggaagcucaga

SEQ ID NO: 3446789 - RNA, 17 nt, Human
gcaggaagcucagacug

SEQ ID NO: 3446790 - RNA, 15 nt, Human
gcaggaaggagagcc

SEQ ID NO: 3446791 - RNA, 13 nt, Human
gcaggaaggagcu

SEQ ID NO: 3446792 - RNA, 15 nt, Human
gcaggaaggagcugc

SEQ ID NO: 3446793 - RNA, 16 nt, Human
gcaggaaggagcugcc

SEQ ID NO: 3446794 - RNA, 17 nt, Human
gcaggaaggagcugccu

SEQ ID NO: 3446795 - RNA, 19 nt, Human
gcaggaaggagcugccugg

SEQ ID NO: 3446796 - RNA, 14 nt, Human
gcaggaaggccugg

SEQ ID NO: 3446797 - RNA, 20 nt, Human
gcaggaaggcugagaggaga

SEQ ID NO: 3446798 - RNA, 22 nt, Human
gccaauuaggggguaaggcccc

SEQ ID NO: 3446799 - RNA, 15 nt, Human
gccaauuauguuaaa

SEQ ID NO: 3446800 - RNA, 16 nt, Human
gccaauuauguuaaac

SEQ ID NO: 3446801 - RNA, 17 nt, Human
gccaauuauguuaaacu

SEQ ID NO: 3446802 - RNA, 15 nt, Human
gccaauucagacagg

SEQ ID NO: 3446803 - RNA, 17 nt, Human
gccaauucagacaggca

SEQ ID NO: 3446804 - RNA, 13 nt, Human
gccaauuccuaua

SEQ ID NO: 3446805 - RNA, 19 nt, Human
gccaauugaauaggaucaa

SEQ ID NO: 3446806 - RNA, 15 nt, Human
gccaauuuuucugca

SEQ ID NO: 3446807 - RNA, 16 nt, Human
gccaauuuuucugcac

SEQ ID NO: 3446808 - RNA, 22 nt, Human
gccacaaauucuuugacacuca

SEQ ID NO: 3446809 - RNA, 20 nt, Human
gccacaacuccuacaugaug

SEQ ID NO: 3446810 - RNA, 16 nt, Human
gccacaagaaauuuga

SEQ ID NO: 3446811 - RNA, 16 nt, Human
gccacaagacccuugu

SEQ ID NO: 3446812 - RNA, 17 nt, Human
gccacaaggaagaaauu

SEQ ID NO: 3446813 - RNA, 22 nt, Human
gccacaaggaagaaauuaacuu

SEQ ID NO: 3446814 - RNA, 21 nt, Human
gccacaaggacuuccugucca

SEQ ID NO: 3446815 - RNA, 15 nt, Human
gccacaagucuucca

SEQ ID NO: 3446816 - RNA, 16 nt, Human
gccacaagucuuccag

SEQ ID NO: 3446817 - RNA, 21 nt, Human
gccacaaugaacaucccuuuu

SEQ ID NO: 3446818 - RNA, 18 nt, Human
gccacacaaacguuuacu

SEQ ID NO: 3446819 - RNA, 20 nt, Human
gccacacacacagaaaauau

SEQ ID NO: 3446820 - RNA, 23 nt, Human
gccacacacacagaaaauauacu

SEQ ID NO: 3446821 - RNA, 20 nt, Human
gccacacagaccaccaucca

SEQ ID NO: 3446822 - RNA, 13 nt, Human
gccacacagcugc

SEQ ID NO: 3446823 - RNA, 15 nt, Human
gccacacaguauuuu

SEQ ID NO: 3446824 - RNA, 15 nt, Human
gccacaccaagcugu

SEQ ID NO: 3446825 - RNA, 20 nt, Human
gccacaccaagcugugccac

SEQ ID NO: 3446826 - RNA, 23 nt, Human
gccacaccaagcugugccacccu

SEQ ID NO: 3446827 - RNA, 19 nt, Human
gccacaccaucuccuuuca

SEQ ID NO: 3446828 - RNA, 16 nt, Human
gccacacccucccccg

SEQ ID NO: 3446829 - RNA, 17 nt, Human
gccacacgagaaccuga

SEQ ID NO: 3446830 - RNA, 13 nt, Human
gccacacucagca

SEQ ID NO: 3446831 - RNA, 16 nt, Human
gccacacucagcacaa

SEQ ID NO: 3446832 - RNA, 17 nt, Human
gccacacucuccaucac

SEQ ID NO: 3446833 - RNA, 23 nt, Human
gccacacuucaggcucuucuccu

SEQ ID NO: 3446834 - RNA, 22 nt, Human
gccacacuucucaggacacagg

SEQ ID NO: 3446835 - RNA, 14 nt, Human
gccacagagaaagu

SEQ ID NO: 3446836 - RNA, 19 nt, Human
gccacagcagcauuuuuau

SEQ ID NO: 3446837 - RNA, 14 nt, Human
gccacagccagaac

SEQ ID NO: 3446838 - RNA, 12 nt, Human
gccacagccagg

SEQ ID NO: 3446839 - RNA, 13 nt, Human
gccacagcccagc

SEQ ID NO: 3446840 - RNA, 20 nt, Human
gccacagcccuuuugucucu

SEQ ID NO: 3446841 - RNA, 15 nt, Human
gccacagcgccagcc

SEQ ID NO: 3446842 - RNA, 10 nt, Human
gccacagcuu

SEQ ID NO: 3446843 - RNA, 13 nt, Human
gccacagcuuuug

SEQ ID NO: 3446844 - RNA, 15 nt, Human
gccacagcuuuugca

SEQ ID NO: 3446845 - RNA, 16 nt, Human
gccacagcuuuugcaa

SEQ ID NO: 3446846 - RNA, 18 nt, Human
gccacaggacacagucag

SEQ ID NO: 3446847 - RNA, 12 nt, Human
gccacaggaccc

SEQ ID NO: 3446848 - RNA, 13 nt, Human
gccacaggccucc

SEQ ID NO: 3446849 - RNA, 12 nt, Human
gccacaggccug

SEQ ID NO: 3446850 - RNA, 20 nt, Human
gccacagugggaugaaccag

SEQ ID NO: 3446851 - RNA, 15 nt, Human
gccacaucaaaccuu

SEQ ID NO: 3446852 - RNA, 14 nt, Human
gccacaucccccaa

SEQ ID NO: 3446853 - RNA, 13 nt, Human
gccacaucccucu

SEQ ID NO: 3446854 - RNA, 16 nt, Human
gccacaucuuaaacuu

SEQ ID NO: 3446855 - RNA, 23 nt, Human
gccacaucuugaucugcucagcc

SEQ ID NO: 3446856 - RNA, 20 nt, Human
gccacaugagucccaguggg

SEQ ID NO: 3446857 - RNA, 20 nt, Human
gccacauggggcugggcagc

SEQ ID NO: 3446858 - RNA, 16 nt, Human
gccacauuagaacuuc

SEQ ID NO: 3446859 - RNA, 20 nt, Human
gccacauuccugaugcuucu

SEQ ID NO: 3446860 - RNA, 21 nt, Human
gccacauugaaaaauguccac

SEQ ID NO: 3446861 - RNA, 12 nt, Human
gccacauuuaau

SEQ ID NO: 3446862 - RNA, 15 nt, Human
gccaccaaagcugcc

SEQ ID NO: 3446863 - RNA, 19 nt, Human
gccaccaaagcugcccacu

SEQ ID NO: 3446864 - RNA, 20 nt, Human
gccaccaaagcugcccacug

SEQ ID NO: 3446865 - RNA, 16 nt, Human
gccaccaacagccacu

SEQ ID NO: 3446866 - RNA, 12 nt, Human
gccaccaacucu

SEQ ID NO: 3446867 - RNA, 16 nt, Human
gccaccaacuggcccu

SEQ ID NO: 3446868 - RNA, 19 nt, Human
gccaccaacuggcccucuu

SEQ ID NO: 3446869 - RNA, 18 nt, Human
gccaccaacuuacaaaaa

SEQ ID NO: 3446870 - RNA, 14 nt, Human
gccaccacgcccgg

SEQ ID NO: 3446871 - RNA, 17 nt, Human
gccaccacgccuagccu

SEQ ID NO: 3446872 - RNA, 15 nt, Human
gccaccacguccagc

SEQ ID NO: 3446873 - RNA, 12 nt, Human
gccaccagagac

SEQ ID NO: 3446874 - RNA, 15 nt, Human
gccaccagcucugcc

SEQ ID NO: 3446875 - RNA, 12 nt, Human
gccaccaggcca

SEQ ID NO: 3446876 - RNA, 20 nt, Human
gccaccaggccaccucccca

SEQ ID NO: 3446877 - RNA, 13 nt, Human
gccaccaggcugg

SEQ ID NO: 3446878 - RNA, 16 nt, Human
gccaccaggcuggcgc

SEQ ID NO: 3446879 - RNA, 19 nt, Human
gccaccaggcuggcgcagc

SEQ ID NO: 3446880 - RNA, 21 nt, Human
gccaccaggugccuuucaaau

SEQ ID NO: 3446881 - RNA, 11 nt, Human
gccaccaguuc

SEQ ID NO: 3446882 - RNA, 19 nt, Human
gccaccaguucucaugggu

SEQ ID NO: 3446883 - RNA, 22 nt, Human
gccaccaugcccagcucagagg

SEQ ID NO: 3446884 - RNA, 16 nt, Human
gccaccauggccagcc

SEQ ID NO: 3446885 - RNA, 22 nt, Human
gccaccauuccuggaaaccaca

SEQ ID NO: 3446886 - RNA, 21 nt, Human
gccacccaccucccugccucc

SEQ ID NO: 3446887 - RNA, 13 nt, Human
gccacccagguga

SEQ ID NO: 3446888 - RNA, 20 nt, Human
gccaccccacccucccugga

SEQ ID NO: 3446889 - RNA, 19 nt, Human
gccacccccgcuggaggau

SEQ ID NO: 3446890 - RNA, 16 nt, Human
gccaccccuccuuccu

SEQ ID NO: 3446891 - RNA, 18 nt, Human
gccacccguucugcuggc

SEQ ID NO: 3446892 - RNA, 18 nt, Human
gccacccuaccuguucag

SEQ ID NO: 3446893 - RNA, 22 nt, Human
gccacccuagccaaugucuccu

SEQ ID NO: 3446894 - RNA, 16 nt, Human
gccacccucccagcuc

SEQ ID NO: 3446895 - RNA, 18 nt, Human
gccacccucccagcucug

SEQ ID NO: 3446896 - RNA, 12 nt, Human
gccacccugggc

SEQ ID NO: 3446897 - RNA, 18 nt, Human
gccacccugggcucugug

SEQ ID NO: 3446898 - RNA, 21 nt, Human
gccacccugggcucugugggc

SEQ ID NO: 3446899 - RNA, 20 nt, Human
gccaccgccuugcccagccu

SEQ ID NO: 3446900 - RNA, 20 nt, Human
gccaccgcuuccggcuccug

SEQ ID NO: 3446901 - RNA, 22 nt, Human
gccaccgugccuggccacgccc

SEQ ID NO: 3446902 - RNA, 15 nt, Human
gccaccuaucucgug

SEQ ID NO: 3446903 - RNA, 21 nt, Human
gccaccuaucucgugggagag

SEQ ID NO: 3446904 - RNA, 17 nt, Human
gccaccuccccaggccg

SEQ ID NO: 3446905 - RNA, 12 nt, Human
gccaccuccccu

SEQ ID NO: 3446906 - RNA, 13 nt, Human
gccaccuccccua

SEQ ID NO: 3446907 - RNA, 15 nt, Human
gccaccuccccuauc

SEQ ID NO: 3446908 - RNA, 17 nt, Human
gccaccuccccuaucca

SEQ ID NO: 3446909 - RNA, 21 nt, Human
gccaccuccccuauccaccca

SEQ ID NO: 3446910 - RNA, 21 nt, Human
gccaccuccccuugccagcug

SEQ ID NO: 3446911 - RNA, 21 nt, Human
gccaccuccuaaaaggcccag

SEQ ID NO: 3446912 - RNA, 18 nt, Human
gccaccucuaacagcacc

SEQ ID NO: 3446913 - RNA, 14 nt, Human
gccaccucuccaag

SEQ ID NO: 3446914 - RNA, 22 nt, Human
gccaccucuccaagggcuucug

SEQ ID NO: 3446915 - RNA, 23 nt, Human
gccaccucuccaagggcuucugc

SEQ ID NO: 3446916 - RNA, 15 nt, Human
gccaccucucccuca

SEQ ID NO: 3446917 - RNA, 16 nt, Human
gccaccucucuccuuu

SEQ ID NO: 3446918 - RNA, 15 nt, Human
gccaccucuuccugg

SEQ ID NO: 3446919 - RNA, 18 nt, Human
gccaccucuuccuggccg

SEQ ID NO: 3446920 - RNA, 16 nt, Human
gccaccugaauaaaga

SEQ ID NO: 3446921 - RNA, 18 nt, Human
gccaccugaggugggccc

SEQ ID NO: 3446922 - RNA, 19 nt, Human
gccaccugaggugggccca

SEQ ID NO: 3446923 - RNA, 20 nt, Human
gccaccugaggugggcccag

SEQ ID NO: 3446924 - RNA, 23 nt, Human
gccaccugaggugggcccaggac

SEQ ID NO: 3446925 - RNA, 21 nt, Human
gccaccugaguuccugaggug

SEQ ID NO: 3446926 - RNA, 16 nt, Human
gccaccugcaggucac

SEQ ID NO: 3446927 - RNA, 13 nt, Human
gccaccugccccc

SEQ ID NO: 3446928 - RNA, 14 nt, Human
gccaccugccugcg

SEQ ID NO: 3446929 - RNA, 22 nt, Human
gccaccugccugcgucuuccgc

SEQ ID NO: 3446930 - RNA, 14 nt, Human
gccaccuggacccc

SEQ ID NO: 3446931 - RNA, 18 nt, Human
gccaccuggaccccugca

SEQ ID NO: 3446932 - RNA, 12 nt, Human
gccaccuggggc

SEQ ID NO: 3446933 - RNA, 17 nt, Human
gccaccuggggcaguca

SEQ ID NO: 3446934 - RNA, 18 nt, Human
gccaccugucccaccuca

SEQ ID NO: 3446935 - RNA, 12 nt, Human
gccaccugucug

SEQ ID NO: 3446936 - RNA, 13 nt, Human
cugcuucucugac

SEQ ID NO: 3446937 - RNA, 14 nt, Human
cugcuucucugacu

SEQ ID NO: 3446938 - RNA, 15 nt, Human
cugcuucucugacuu

SEQ ID NO: 3446939 - RNA, 22 nt, Human
cugcuucucugacuucugccug

SEQ ID NO: 3446940 - RNA, 15 nt, Human
cugcuucugaaugug

SEQ ID NO: 3446941 - RNA, 19 nt, Human
cugcuucugaaugugcuga

SEQ ID NO: 3446942 - RNA, 13 nt, Human
cugcuucugcacc

SEQ ID NO: 3446943 - RNA, 19 nt, Human
cuggccccaugucucucag

SEQ ID NO: 3446944 - RNA, 23 nt, Human
cuggcccccaaccucagggcucc

SEQ ID NO: 3446945 - RNA, 19 nt, Human
cuggcccccacuggcugug

SEQ ID NO: 3446946 - RNA, 21 nt, Human
cuggcccccacuggcuguggg

SEQ ID NO: 3446947 - RNA, 23 nt, Human
cuggcccccacuggcugugggcu

SEQ ID NO: 3446948 - RNA, 13 nt, Human
cuggccccccugg

SEQ ID NO: 3446949 - RNA, 19 nt, Human
cuggccccccugguccccu

SEQ ID NO: 3446950 - RNA, 13 nt, Human
cuggcccccuccc

SEQ ID NO: 3446951 - RNA, 19 nt, Human
cuggcccccucccuggaug

SEQ ID NO: 3446952 - RNA, 23 nt, Human
cuggccccgccgccugguacuca

SEQ ID NO: 3446953 - RNA, 19 nt, Human
cuggccccggaucagagca

SEQ ID NO: 3446954 - RNA, 23 nt, Human
cuggccccggaucagagcaggac

SEQ ID NO: 3446955 - RNA, 13 nt, Human
cuggccccucacc

SEQ ID NO: 3446956 - RNA, 15 nt, Human
cuggccccucaccug

SEQ ID NO: 3446957 - RNA, 13 nt, Human
cuggccccucagg

SEQ ID NO: 3446958 - RNA, 22 nt, Human
cuggccccucagggucccuggu

SEQ ID NO: 3446959 - RNA, 14 nt, Human
cuggccccucgccu

SEQ ID NO: 3446960 - RNA, 18 nt, Human
cuggccccugagaucucu

SEQ ID NO: 3446961 - RNA, 22 nt, Human
cuggccccugagaucucugcag

SEQ ID NO: 3446962 - RNA, 23 nt, Human
cuggccccugagaucucugcagg

SEQ ID NO: 3446963 - RNA, 21 nt, Human
cuggccccuuugggcccugca

SEQ ID NO: 3446964 - RNA, 22 nt, Human
cuggccccuuugggcccugcau

SEQ ID NO: 3446965 - RNA, 18 nt, Human
cuggcccgugacagacuc

SEQ ID NO: 3446966 - RNA, 19 nt, Human
cuggcccgugacagacucc

SEQ ID NO: 3446967 - RNA, 19 nt, Human
cuggcccuagacucggggu

SEQ ID NO: 3446968 - RNA, 23 nt, Human
cuggcccuaugcuuccggccucc

SEQ ID NO: 3446969 - RNA, 18 nt, Human
cuggcccucaaggccucc

SEQ ID NO: 3446970 - RNA, 23 nt, Human
cuggcccucaaggccucccacag

SEQ ID NO: 3446971 - RNA, 19 nt, Human
cuggcccucaccccugccc

SEQ ID NO: 3446972 - RNA, 22 nt, Human
cuggcccucucugaaggaggcc

SEQ ID NO: 3446973 - RNA, 16 nt, Human
cuggcccucuguguug

SEQ ID NO: 3446974 - RNA, 13 nt, Human
cuggcccugaggu

SEQ ID NO: 3446975 - RNA, 14 nt, Human
cuggcccugaggug

SEQ ID NO: 3446976 - RNA, 17 nt, Human
cuggcccugaggugugg

SEQ ID NO: 3446977 - RNA, 19 nt, Human
cuggcccugaggugugggg

SEQ ID NO: 3446978 - RNA, 20 nt, Human
cuggcccugagguguggggg

SEQ ID NO: 3446979 - RNA, 14 nt, Human
cuggcccugccuuc

SEQ ID NO: 3446980 - RNA, 17 nt, Human
cuggcccugcuuccugc

SEQ ID NO: 3446981 - RNA, 15 nt, Human
cuggcccuggggccu

SEQ ID NO: 3446982 - RNA, 20 nt, Human
cuggccgaggguccuggcuc

SEQ ID NO: 3446983 - RNA, 20 nt, Human
cuggccgaguccaagcuggg

SEQ ID NO: 3446984 - RNA, 13 nt, Human
cuggccgcccccu

SEQ ID NO: 3446985 - RNA, 14 nt, Human
cuggccgccucacc

SEQ ID NO: 3446986 - RNA, 16 nt, Human
cuggccgccucacccc

SEQ ID NO: 3446987 - RNA, 18 nt, Human
cuggccgccucacccccu

SEQ ID NO: 3446988 - RNA, 17 nt, Human
cuggccgccugggucca

SEQ ID NO: 3446989 - RNA, 18 nt, Human
cuggccgcgccaaauaau

SEQ ID NO: 3446990 - RNA, 23 nt, Human
cuggccggagucagugccagguc

SEQ ID NO: 3446991 - RNA, 13 nt, Human
cuggccggccagc

SEQ ID NO: 3446992 - RNA, 21 nt, Human
cuggccggccagccagccacu

SEQ ID NO: 3446993 - RNA, 22 nt, Human
cuggccggccagccagccacuc

SEQ ID NO: 3446994 - RNA, 23 nt, Human
cuggccggccagccagccacucu

SEQ ID NO: 3446995 - RNA, 22 nt, Human
cuggccgggaccccgagccugg

SEQ ID NO: 3446996 - RNA, 18 nt, Human
gcccaccuccccacgccc

SEQ ID NO: 3446997 - RNA, 14 nt, Human
gcccaccugccggc

SEQ ID NO: 3446998 - RNA, 22 nt, Human
gcccaccugccuggccggccag

SEQ ID NO: 3446999 - RNA, 14 nt, Human
gcccaccuggccac

SEQ ID NO: 3447000 - RNA, 15 nt, Human
gcccaccuggccucu

SEQ ID NO: 3447001 - RNA, 17 nt, Human
gcccaccuggccucugc

SEQ ID NO: 3447002 - RNA, 20 nt, Human
gcccaccuggccucugcacu

SEQ ID NO: 3447003 - RNA, 15 nt, Human
gcccaccuuggcuca

SEQ ID NO: 3447004 - RNA, 18 nt, Human
gcccaccuuggcucaagu

SEQ ID NO: 3447005 - RNA, 17 nt, Human
gcccacgcucacccccu

SEQ ID NO: 3447006 - RNA, 18 nt, Human
gcccacgcugacuacagg

SEQ ID NO: 3447007 - RNA, 19 nt, Human
gcccacgcugacuacaggg

SEQ ID NO: 3447008 - RNA, 22 nt, Human
gcccacgcugacuacagggccg

SEQ ID NO: 3447009 - RNA, 16 nt, Human
gcccacgcuggagugc

SEQ ID NO: 3447010 - RNA, 22 nt, Human
gcccacgcuggagugcagugag

SEQ ID NO: 3447011 - RNA, 16 nt, Human
gcccacguagggcggc

SEQ ID NO: 3447012 - RNA, 16 nt, Human
gcccacguccugucag

SEQ ID NO: 3447013 - RNA, 23 nt, Human
gcccacguccugucagugccgcc

SEQ ID NO: 3447014 - RNA, 18 nt, Human
gcccacguucucucugcc

SEQ ID NO: 3447015 - RNA, 21 nt, Human
gcccacguucucucugccugu

SEQ ID NO: 3447016 - RNA, 13 nt, Human
gcccacucccugc

SEQ ID NO: 3447017 - RNA, 15 nt, Human
gcccacucccugcaa

SEQ ID NO: 3447018 - RNA, 15 nt, Human
gcccacuccugcucu

SEQ ID NO: 3447019 - RNA, 19 nt, Human
gcccacuccugcucugcuc

SEQ ID NO: 3447020 - RNA, 16 nt, Human
gcccacugcccacccc

SEQ ID NO: 3447021 - RNA, 18 nt, Human
gcccacuguccugggccu

SEQ ID NO: 3447022 - RNA, 23 nt, Human
gcccacugugccucagagaccag

SEQ ID NO: 3447023 - RNA, 11 nt, Human
gcccacuuccc

SEQ ID NO: 3447024 - RNA, 16 nt, Human
gcccacuucccugggu

SEQ ID NO: 3447025 - RNA, 23 nt, Human
gcccacuuguauccucugguucu

SEQ ID NO: 3447026 - RNA, 22 nt, Human
gcccacuugucccacuaucugg

SEQ ID NO: 3447027 - RNA, 13 nt, Human
gcccagaauacug

SEQ ID NO: 3447028 - RNA, 21 nt, Human
gcccagacacagaagaggcug

SEQ ID NO: 3447029 - RNA, 14 nt, Human
gcccagagaacagc

SEQ ID NO: 3447030 - RNA, 15 nt, Human
gcccagagaagccaa

SEQ ID NO: 3447031 - RNA, 16 nt, Human
gcccagagacccagcg

SEQ ID NO: 3447032 - RNA, 19 nt, Human
gcccagagagaagagcccc

SEQ ID NO: 3447033 - RNA, 19 nt, Human
gcccagagaugccuccacc

SEQ ID NO: 3447034 - RNA, 15 nt, Human
gcccagagcaggaag

SEQ ID NO: 3447035 - RNA, 15 nt, Human
gcccagagcccagcu

SEQ ID NO: 3447036 - RNA, 12 nt, Human
gcccagagcugg

SEQ ID NO: 3447037 - RNA, 16 nt, Human
gcccagaggacuccca

SEQ ID NO: 3447038 - RNA, 22 nt, Human
gcccagaggagcugggagccgg

SEQ ID NO: 3447039 - RNA, 21 nt, Human
gcccagaggccaacacugugg

SEQ ID NO: 3447040 - RNA, 15 nt, Human
gcccagagggccugc

SEQ ID NO: 3447041 - RNA, 21 nt, Human
gcccagagggccugcaaggga

SEQ ID NO: 3447042 - RNA, 19 nt, Human
gcccagagggucugggggc

SEQ ID NO: 3447043 - RNA, 16 nt, Human
gcccagagucccccca

SEQ ID NO: 3447044 - RNA, 16 nt, Human
gcccagaucagccaga

SEQ ID NO: 3447045 - RNA, 18 nt, Human
gcccagaucagccagaag

SEQ ID NO: 3447046 - RNA, 21 nt, Human
gcccagauguuuuacgucugg

SEQ ID NO: 3447047 - RNA, 18 nt, Human
gcccagcauugcugguuc

SEQ ID NO: 3447048 - RNA, 19 nt, Human
gcccagcauugcugguucu

SEQ ID NO: 3447049 - RNA, 20 nt, Human
gcccagccaaacccugucug

SEQ ID NO: 3447050 - RNA, 18 nt, Human
gcccagccacggacgcug

SEQ ID NO: 3447051 - RNA, 22 nt, Human
gcccagccagcgucggucugug

SEQ ID NO: 3447052 - RNA, 21 nt, Human
gcccagccauuaccauggaga

SEQ ID NO: 3447053 - RNA, 9 nt, Human
gcccagccc

SEQ ID NO: 3447054 - RNA, 16 nt, Human
gcccagcccauggaga

SEQ ID NO: 3447055 - RNA, 15 nt, Human
gcccagcccccacag

SEQ ID NO: 3447056 - RNA, 23 nt, Human
gcccagcccccacagugcugucu

SEQ ID NO: 3447057 - RNA, 18 nt, Human
gcccagccccuacugcug

SEQ ID NO: 3447058 - RNA, 18 nt, Human
gcccagcccggaccuugg

SEQ ID NO: 3447059 - RNA, 16 nt, Human
gcccagcccuaaacau

SEQ ID NO: 3447060 - RNA, 21 nt, Human
gcccagcccugcuggccgccu

SEQ ID NO: 3447061 - RNA, 13 nt, Human
gcccagccggccu

SEQ ID NO: 3447062 - RNA, 15 nt, Human
gcccagccggccucu

SEQ ID NO: 3447063 - RNA, 15 nt, Human
gcccagccucuuucc

SEQ ID NO: 3447064 - RNA, 16 nt, Human
gcccagccuggaugcc

SEQ ID NO: 3447065 - RNA, 20 nt, Human
gcccagcggacaguggcagg

SEQ ID NO: 3447066 - RNA, 19 nt, Human
gcccagcggccccucccac

SEQ ID NO: 3447067 - RNA, 19 nt, Human
gcccagcuauaccugugcc

SEQ ID NO: 3447068 - RNA, 20 nt, Human
gcccagcuauaccugugccu

SEQ ID NO: 3447069 - RNA, 12 nt, Human
gcccagcuccag

SEQ ID NO: 3447070 - RNA, 17 nt, Human
gcccagcucccccggga

SEQ ID NO: 3447071 - RNA, 19 nt, Human
gcccagcucccccgggagg

SEQ ID NO: 3447072 - RNA, 23 nt, Human
gcccagcuccugacacugcugga

SEQ ID NO: 3447073 - RNA, 19 nt, Human
gcccagcugcucugcccag

SEQ ID NO: 3447074 - RNA, 23 nt, Human
gcccagcugcucugcccagagcu

SEQ ID NO: 3447075 - RNA, 14 nt, Human
gcccagcugggcuc

SEQ ID NO: 3447076 - RNA, 15 nt, Human
gcccagcugggucag

SEQ ID NO: 3447077 - RNA, 19 nt, Human
gcccagcugggucaggcag

SEQ ID NO: 3447078 - RNA, 17 nt, Human
gcccagcuggugggaag

SEQ ID NO: 3447079 - RNA, 21 nt, Human
gcccagcuugaaaccuucacu

SEQ ID NO: 3447080 - RNA, 14 nt, Human
gcccagcuugggcc

SEQ ID NO: 3447081 - RNA, 21 nt, Human
gcccagcuugggcccagcugg

SEQ ID NO: 3447082 - RNA, 23 nt, Human
gcccagcuuuucauugcugugac

SEQ ID NO: 3447083 - RNA, 22 nt, Human
gcccaggaaaggcuccaggagc

SEQ ID NO: 3447084 - RNA, 14 nt, Human
gcccaggaccagcu

SEQ ID NO: 3447085 - RNA, 18 nt, Human
gcccaggaccaucauccu

SEQ ID NO: 3447086 - RNA, 20 nt, Human
gccaugaggaguugcuguuu

SEQ ID NO: 3447087 - RNA, 19 nt, Human
gccaugaggccucagugga

SEQ ID NO: 3447088 - RNA, 20 nt, Human
gccaugaguuccagaaagua

SEQ ID NO: 3447089 - RNA, 13 nt, Human
gccaugaugccuc

SEQ ID NO: 3447090 - RNA, 17 nt, Human
gccaugauggcaacaga

SEQ ID NO: 3447091 - RNA, 21 nt, Human
gccaugauggcaacagaucug

SEQ ID NO: 3447092 - RNA, 22 nt, Human
gccaugauguggaguggggcag

SEQ ID NO: 3447093 - RNA, 15 nt, Human
gccaugcagaaagca

SEQ ID NO: 3447094 - RNA, 13 nt, Human
gccaugccagcug

SEQ ID NO: 3447095 - RNA, 14 nt, Human
gccaugccagcugg

SEQ ID NO: 3447096 - RNA, 15 nt, Human
gccaugccagcuggc

SEQ ID NO: 3447097 - RNA, 17 nt, Human
gccaugccucagcccug

SEQ ID NO: 3447098 - RNA, 21 nt, Human
gccaugccucagcccugaccc

SEQ ID NO: 3447099 - RNA, 18 nt, Human
gccaugcuccucuucccc

SEQ ID NO: 3447100 - RNA, 20 nt, Human
gccaugcuccucuuccccag

SEQ ID NO: 3447101 - RNA, 14 nt, Human
gccaugcuccuggc

SEQ ID NO: 3447102 - RNA, 14 nt, Human
gccaugcugaaggg

SEQ ID NO: 3447103 - RNA, 17 nt, Human
gccaugcugaggccugg

SEQ ID NO: 3447104 - RNA, 17 nt, Human
gccauggaacuguuucc

SEQ ID NO: 3447105 - RNA, 22 nt, Human
gccauggacucuacacugugaa

SEQ ID NO: 3447106 - RNA, 19 nt, Human
gccauggacucuguccuga

SEQ ID NO: 3447107 - RNA, 17 nt, Human
gccauggagaaagcuga

SEQ ID NO: 3447108 - RNA, 21 nt, Human
gccauggagaaagcugacuug

SEQ ID NO: 3447109 - RNA, 15 nt, Human
gccauggagagcugg

SEQ ID NO: 3447110 - RNA, 18 nt, Human
gccauggaggcacacagc

SEQ ID NO: 3447111 - RNA, 19 nt, Human
gccauggaguugugaucau

SEQ ID NO: 3447112 - RNA, 18 nt, Human
gccauggccugcaaacug

SEQ ID NO: 3447113 - RNA, 21 nt, Human
gccauggccugcaaacuggga

SEQ ID NO: 3447114 - RNA, 16 nt, Human
gccauggcgugucccu

SEQ ID NO: 3447115 - RNA, 17 nt, Human
gccauggcgugucccuc

SEQ ID NO: 3447116 - RNA, 17 nt, Human
gccauggcucagggugg

SEQ ID NO: 3447117 - RNA, 19 nt, Human
gccaugggacagggaggac

SEQ ID NO: 3447118 - RNA, 22 nt, Human
gccaugggacagggaggacgcu

SEQ ID NO: 3447119 - RNA, 12 nt, Human
gccaugggaggc

SEQ ID NO: 3447120 - RNA, 21 nt, Human
gccaugggcacaaagggccca

SEQ ID NO: 3447121 - RNA, 19 nt, Human
gccaugggcacugugggua

SEQ ID NO: 3447122 - RNA, 17 nt, Human
gccauguaccuccccug

SEQ ID NO: 3447123 - RNA, 20 nt, Human
gccauguaccuccccugccu

SEQ ID NO: 3447124 - RNA, 18 nt, Human
gccauguagaagcugcau

SEQ ID NO: 3447125 - RNA, 17 nt, Human
gccaugucaaacaaaua

SEQ ID NO: 3447126 - RNA, 14 nt, Human
gccauguccaaaga

SEQ ID NO: 3447127 - RNA, 22 nt, Human
gccaugucugggaacagggacg

SEQ ID NO: 3447128 - RNA, 21 nt, Human
gccaugucuucucccuggaau

SEQ ID NO: 3447129 - RNA, 22 nt, Human
gccaugucuucucccuggaaug

SEQ ID NO: 3447130 - RNA, 17 nt, Human
gccaugugaagagggag

SEQ ID NO: 3447131 - RNA, 14 nt, Human
gccaugugacucug

SEQ ID NO: 3447132 - RNA, 15 nt, Human
gccaugugacucugg

SEQ ID NO: 3447133 - RNA, 17 nt, Human
gccaugugcaccuuggg

SEQ ID NO: 3447134 - RNA, 20 nt, Human
gccaugugcauaguuucuuu

SEQ ID NO: 3447135 - RNA, 23 nt, Human
gccauguuaauguaaucugaugg

SEQ ID NO: 3447136 - RNA, 17 nt, Human
gccauguuggccaggcu

SEQ ID NO: 3447137 - RNA, 19 nt, Human
gccauguuggccaggcugg

SEQ ID NO: 3447138 - RNA, 20 nt, Human
gccauguuggccaggcuggu

SEQ ID NO: 3447139 - RNA, 21 nt, Human
gccauguugugccucccuggu

SEQ ID NO: 3447140 - RNA, 15 nt, Human
gccauguuuaagauu

SEQ ID NO: 3447141 - RNA, 21 nt, Human
gccauguuuaagauuuaauuu

SEQ ID NO: 3447142 - RNA, 13 nt, Human
gccauguuuauua

SEQ ID NO: 3447143 - RNA, 14 nt, Human
gccauguuuauuac

SEQ ID NO: 3447144 - RNA, 23 nt, Human
gccauuaaaugaauauuuugaua

SEQ ID NO: 3447145 - RNA, 16 nt, Human
gccauuauuuucuguc

SEQ ID NO: 3447146 - RNA, 17 nt, Human
gccauuauuuucuguca

SEQ ID NO: 3447147 - RNA, 18 nt, Human
gccauuauuuucugucag

SEQ ID NO: 3447148 - RNA, 22 nt, Human
gccauuauuuucugucagauga

SEQ ID NO: 3447149 - RNA, 18 nt, Human
gccauuccccgucucugg

SEQ ID NO: 3447150 - RNA, 17 nt, Human
gccauucuccacagcaa

SEQ ID NO: 3447151 - RNA, 12 nt, Human
gccauucuuucc

SEQ ID NO: 3447152 - RNA, 17 nt, Human
gccauugacuucuuccc

SEQ ID NO: 3447153 - RNA, 18 nt, Human
gccauugccaccaggaga

SEQ ID NO: 3447154 - RNA, 19 nt, Human
gccauugccaccaggagaa

SEQ ID NO: 3447155 - RNA, 20 nt, Human
gccauuggcuauuuaaaacu

SEQ ID NO: 3447156 - RNA, 12 nt, Human
gccauugucuuu

SEQ ID NO: 3447157 - RNA, 13 nt, Human
gccauugucuuua

SEQ ID NO: 3447158 - RNA, 19 nt, Human
gccauugugaaccaaugca

SEQ ID NO: 3447159 - RNA, 21 nt, Human
gccauuuagccaccaucuuug

SEQ ID NO: 3447160 - RNA, 14 nt, Human
gccauuucaugucc

SEQ ID NO: 3447161 - RNA, 22 nt, Human
gccauuucuuccacaagagccc

SEQ ID NO: 3447162 - RNA, 20 nt, Human
gccauuugcaauaacagcug

SEQ ID NO: 3447163 - RNA, 22 nt, Human
gccauuugcaauaacagcugca

SEQ ID NO: 3447164 - RNA, 20 nt, Human
gccauuugcacccuccgccu

SEQ ID NO: 3447165 - RNA, 24 nt, Human
gccccaggaccagcucaggacaga

SEQ ID NO: 3447166 - RNA, 20 nt, Human
gccccaggaccuggcugcca

SEQ ID NO: 3447167 - RNA, 21 nt, Human
gccccaggaccuggcugccau

SEQ ID NO: 3447168 - RNA, 19 nt, Human
gccccaggcaggcugugcg

SEQ ID NO: 3447169 - RNA, 21 nt, Human
gccccaggcagggccaacccu

SEQ ID NO: 3447170 - RNA, 13 nt, Human
gccccagggcacc

SEQ ID NO: 3447171 - RNA, 15 nt, Human
gccccagggcacccu

SEQ ID NO: 3447172 - RNA, 16 nt, Human
gccccagggcuacccu

SEQ ID NO: 3447173 - RNA, 18 nt, Human
gccccagggcuacccucc

SEQ ID NO: 3447174 - RNA, 16 nt, Human
gccccagggucuuccc

SEQ ID NO: 3447175 - RNA, 17 nt, Human
gccccagggucuucccu

SEQ ID NO: 3447176 - RNA, 23 nt, Human
gccccagggucuucccuaccuca

SEQ ID NO: 3447177 - RNA, 17 nt, Human
gccccagucagccucuc

SEQ ID NO: 3447178 - RNA, 21 nt, Human
gccccagugcccacaggauca

SEQ ID NO: 3447179 - RNA, 19 nt, Human
gccccaguggcuguucugg

SEQ ID NO: 3447180 - RNA, 18 nt, Human
gccccaguucaaucuccc

SEQ ID NO: 3447181 - RNA, 22 nt, Human
gccccaguuccuguggcucccu

SEQ ID NO: 3447182 - RNA, 19 nt, Human
gccccaguuguauuuauuu

SEQ ID NO: 3447183 - RNA, 21 nt, Human
gccccauaauuuuuuuuuucc

SEQ ID NO: 3447184 - RNA, 22 nt, Human
gccccaucacugcgccacugcu

SEQ ID NO: 3447185 - RNA, 17 nt, Human
gccccauccuccagcag

SEQ ID NO: 3447186 - RNA, 14 nt, Human
gccccauccucugu

SEQ ID NO: 3447187 - RNA, 22 nt, Human
gccccauccucuguacagagcc

SEQ ID NO: 3447188 - RNA, 23 nt, Human
gccccauccucuguacagagccc

SEQ ID NO: 3447189 - RNA, 18 nt, Human
gccccaucuccccucagc

SEQ ID NO: 3447190 - RNA, 20 nt, Human
gccccaucuccccucagcuc

SEQ ID NO: 3447191 - RNA, 21 nt, Human
gccccaucuccccucagcucg

SEQ ID NO: 3447192 - RNA, 15 nt, Human
gccccaucugugcau

SEQ ID NO: 3447193 - RNA, 17 nt, Human
gccccaugaccuccagc

SEQ ID NO: 3447194 - RNA, 12 nt, Human
gccccaugcugg

SEQ ID NO: 3447195 - RNA, 15 nt, Human
gccccaugcuggagc

SEQ ID NO: 3447196 - RNA, 18 nt, Human
gccccaugcuggagccug

SEQ ID NO: 3447197 - RNA, 15 nt, Human
gccccaugucucuca

SEQ ID NO: 3447198 - RNA, 16 nt, Human
gccccaugucucucag

SEQ ID NO: 3447199 - RNA, 14 nt, Human
gccccauucugccu

SEQ ID NO: 3447200 - RNA, 17 nt, Human
gccccauucugccugcc

SEQ ID NO: 3447201 - RNA, 20 nt, Human
gccccauucugccugcccag

SEQ ID NO: 3447202 - RNA, 21 nt, Human
gccccauucugccugcccagg

SEQ ID NO: 3447203 - RNA, 23 nt, Human
gccccauucugccugcccaggcc

SEQ ID NO: 3447204 - RNA, 16 nt, Human
gcccccaaacccccau

SEQ ID NO: 3447205 - RNA, 22 nt, Human
gcccccaaccauuuccucagac

SEQ ID NO: 3447206 - RNA, 23 nt, Human
gcccccaaccucagggcucccag

SEQ ID NO: 3447207 - RNA, 14 nt, Human
gcccccaagccugc

SEQ ID NO: 3447208 - RNA, 23 nt, Human
gcccccacaauggucccaaacag

SEQ ID NO: 3447209 - RNA, 17 nt, Human
gcccccacaccuggccc

SEQ ID NO: 3447210 - RNA, 19 nt, Human
gcccccacaccuggcccug

SEQ ID NO: 3447211 - RNA, 23 nt, Human
gcccccacaccuggcccuggggc

SEQ ID NO: 3447212 - RNA, 21 nt, Human
gcccccacauuugugccgaca

SEQ ID NO: 3447213 - RNA, 15 nt, Human
gcccccaccacacau

SEQ ID NO: 3447214 - RNA, 21 nt, Human
gcccccaccacacaucccagc

SEQ ID NO: 3447215 - RNA, 22 nt, Human
gcccccaccccggggacccugu

SEQ ID NO: 3447216 - RNA, 12 nt, Human
gcccccacccug

SEQ ID NO: 3447217 - RNA, 22 nt, Human
gcccccacccuguuccugcugc

SEQ ID NO: 3447218 - RNA, 22 nt, Human
gcccccaccgugggcagggagc

SEQ ID NO: 3447219 - RNA, 14 nt, Human
gcccccaccuccac

SEQ ID NO: 3447220 - RNA, 15 nt, Human
gcccccaccuccacc

SEQ ID NO: 3447221 - RNA, 21 nt, Human
gcccccacuggcugugggcuc

SEQ ID NO: 3447222 - RNA, 21 nt, Human
gcccccacuugccucuuccuu

SEQ ID NO: 3447223 - RNA, 12 nt, Human
gcccccagacgc

SEQ ID NO: 3447224 - RNA, 15 nt, Human
gcccccagagccaca

SEQ ID NO: 3447225 - RNA, 16 nt, Human
gcccccagagccacag

SEQ ID NO: 3447226 - RNA, 15 nt, Human
gcccccagcccccuc

SEQ ID NO: 3447227 - RNA, 21 nt, Human
gcccccagccccggggugagu

SEQ ID NO: 3447228 - RNA, 14 nt, Human
gcccccagccuguc

SEQ ID NO: 3447229 - RNA, 18 nt, Human
cugguaggaccaagcauc

SEQ ID NO: 3447230 - RNA, 13 nt, Human
cugguagggcagu

SEQ ID NO: 3447231 - RNA, 17 nt, Human
cugguagguugggacac

SEQ ID NO: 3447232 - RNA, 22 nt, Human
cugguagguugggacaccaggg

SEQ ID NO: 3447233 - RNA, 19 nt, Human
cugguaguuaguagcaugu

SEQ ID NO: 3447234 - RNA, 20 nt, Human
cugguauauccaaaagcuuu

SEQ ID NO: 3447235 - RNA, 19 nt, Human
cugguaucuaauucuuuaa

SEQ ID NO: 3447236 - RNA, 22 nt, Human
cugguaugaacuugaggacaca

SEQ ID NO: 3447237 - RNA, 11 nt, Human
cugguauuaaa

SEQ ID NO: 3447238 - RNA, 17 nt, Human
cugguauuccugccucc

SEQ ID NO: 3447239 - RNA, 20 nt, Human
cugguauucuguucuggagg

SEQ ID NO: 3447240 - RNA, 15 nt, Human
cugguauuguucuca

SEQ ID NO: 3447241 - RNA, 15 nt, Human
cuggucaaccuccug

SEQ ID NO: 3447242 - RNA, 19 nt, Human
cuggucaacuugagcaugu

SEQ ID NO: 3447243 - RNA, 16 nt, Human
cuggucacacacaggu

SEQ ID NO: 3447244 - RNA, 18 nt, Human
cuggucacagccuccucu

SEQ ID NO: 3447245 - RNA, 19 nt, Human
cuggucacaggacucugcc

SEQ ID NO: 3447246 - RNA, 17 nt, Human
cuggucaccuaggaagc

SEQ ID NO: 3447247 - RNA, 18 nt, Human
cuggucaccuaggaagcc

SEQ ID NO: 3447248 - RNA, 19 nt, Human
cuggucaccuaggaagccu

SEQ ID NO: 3447249 - RNA, 22 nt, Human
cuggucaccuaggaagccucag

SEQ ID NO: 3447250 - RNA, 16 nt, Human
cuggucacuucuucug

SEQ ID NO: 3447251 - RNA, 13 nt, Human
cugguccacaggg

SEQ ID NO: 3447252 - RNA, 15 nt, Human
cugguccagggaagc

SEQ ID NO: 3447253 - RNA, 21 nt, Human
cugguccauagagagcaagac

SEQ ID NO: 3447254 - RNA, 18 nt, Human
cugguccaugcagggggc

SEQ ID NO: 3447255 - RNA, 21 nt, Human
cugguccggacacuccuagag

SEQ ID NO: 3447256 - RNA, 22 nt, Human
cugguccuacccauccccgcag

SEQ ID NO: 3447257 - RNA, 14 nt, Human
cugguccugugugc

SEQ ID NO: 3447258 - RNA, 17 nt, Human
cugguccuuccaggccc

SEQ ID NO: 3447259 - RNA, 16 nt, Human
cugguccuuucuuccg

SEQ ID NO: 3447260 - RNA, 15 nt, Human
cuggucgccuuccac

SEQ ID NO: 3447261 - RNA, 23 nt, Human
cuggucgcuccugcccacggagu

SEQ ID NO: 3447262 - RNA, 22 nt, Human
cuggucguaaacaucucagaga

SEQ ID NO: 3447263 - RNA, 19 nt, Human
cuggucucaaacuccugac

SEQ ID NO: 3447264 - RNA, 21 nt, Human
cuggucucaaacuccugggcu

SEQ ID NO: 3447265 - RNA, 18 nt, Human
cuggucucacccuggagg

SEQ ID NO: 3447266 - RNA, 14 nt, Human
cuggucucagcagc

SEQ ID NO: 3447267 - RNA, 16 nt, Human
cuggucuccucagccu

SEQ ID NO: 3447268 - RNA, 22 nt, Human
cuggucuccucuuuguuuuguu

SEQ ID NO: 3447269 - RNA, 22 nt, Human
cuggucuccugcccccacaccu

SEQ ID NO: 3447270 - RNA, 21 nt, Human
cuggucucgaacuccugaccu

SEQ ID NO: 3447271 - RNA, 14 nt, Human
cuggucucuaggcu

SEQ ID NO: 3447272 - RNA, 17 nt, Human
cuggucucucuaugccu

SEQ ID NO: 3447273 - RNA, 21 nt, Human
cuggucucucuaugccucucu

SEQ ID NO: 3447274 - RNA, 24 nt, Human
cuggucucucuaugccucucuaca

SEQ ID NO: 3447275 - RNA, 12 nt, Human
cuggucugaggg

SEQ ID NO: 3447276 - RNA, 19 nt, Human
cuggucugcuguuccagug

SEQ ID NO: 3447277 - RNA, 14 nt, Human
cuggucuguaggga

SEQ ID NO: 3447278 - RNA, 16 nt, Human
cuggucuuauuuguaa

SEQ ID NO: 3447279 - RNA, 12 nt, Human
cuggucuuccuu

SEQ ID NO: 3447280 - RNA, 16 nt, Human
cuggucuucuuugggu

SEQ ID NO: 3447281 - RNA, 18 nt, Human
cuggucuugaacuccugg

SEQ ID NO: 3447282 - RNA, 16 nt, Human
cuggucuugaaguccu

SEQ ID NO: 3447283 - RNA, 18 nt, Human
cuggucuugaaguccugg

SEQ ID NO: 3447284 - RNA, 20 nt, Human
cuggucuuguggaauuggga

SEQ ID NO: 3447285 - RNA, 19 nt, Human
cuggucuuguuagaaaaca

SEQ ID NO: 3447286 - RNA, 12 nt, Human
cuggucuuugag

SEQ ID NO: 3447287 - RNA, 19 nt, Human
cuggucuuugagcucccac

SEQ ID NO: 3447288 - RNA, 14 nt, Human
cuggugaauauuuu

SEQ ID NO: 3447289 - RNA, 14 nt, Human
cuggugacaccagc

SEQ ID NO: 3447290 - RNA, 17 nt, Human
cuggugacaccagccuu

SEQ ID NO: 3447291 - RNA, 20 nt, Human
cuggugacaucagguuuuuc

SEQ ID NO: 3447292 - RNA, 23 nt, Human
cuggugaccuuccaagagccuga

SEQ ID NO: 3447293 - RNA, 13 nt, Human
cuggugacugauu

SEQ ID NO: 3447294 - RNA, 14 nt, Human
cuggugacugauuc

SEQ ID NO: 3447295 - RNA, 17 nt, Human
cuggugacugauucuuc

SEQ ID NO: 3447296 - RNA, 20 nt, Human
cuggugacuuuccucuuugg

SEQ ID NO: 3447297 - RNA, 21 nt, Human
cuggugagagggccgggcaga

SEQ ID NO: 3447298 - RNA, 14 nt, Human
cuggugagccaagc

SEQ ID NO: 3447299 - RNA, 13 nt, Human
cuggugaggaagc

SEQ ID NO: 3447300 - RNA, 15 nt, Human
cuggugaggccuugc

SEQ ID NO: 3447301 - RNA, 21 nt, Human
cuggugagucuuggcggcagc

SEQ ID NO: 3447302 - RNA, 16 nt, Human
cuggugauaaggacau

SEQ ID NO: 3447303 - RNA, 21 nt, Human
cuggugaugcgcaguugcugu

SEQ ID NO: 3447304 - RNA, 21 nt, Human
cuggugauggagguuucauac

SEQ ID NO: 3447305 - RNA, 23 nt, Human
cuggugcaaguugaggacuucuu

SEQ ID NO: 3447306 - RNA, 16 nt, Human
cuggugcacuuuguaa

SEQ ID NO: 3447307 - RNA, 18 nt, Human
cuggugcacuuuguaaau

SEQ ID NO: 3447308 - RNA, 13 nt, Human
cuggugcagggcc

SEQ ID NO: 3447309 - RNA, 14 nt, Human
cuggugcauuacag

SEQ ID NO: 3447310 - RNA, 17 nt, Human
cuggugcauuacagaga

SEQ ID NO: 3447311 - RNA, 21 nt, Human
cuggugccagccuuccucugc

SEQ ID NO: 3447312 - RNA, 20 nt, Human
cuggugcccuaaccucugag

SEQ ID NO: 3447313 - RNA, 11 nt, Human
cuggugcccug

SEQ ID NO: 3447314 - RNA, 15 nt, Human
cuggugcccugcuuu

SEQ ID NO: 3447315 - RNA, 16 nt, Human
cuggugcccugcuuuc

SEQ ID NO: 3447316 - RNA, 17 nt, Human
cuggugcccuggaugcc

SEQ ID NO: 3447317 - RNA, 21 nt, Human
cuggugccucaccccuugcca

SEQ ID NO: 3447318 - RNA, 15 nt, Human
cuggugccuccagag

SEQ ID NO: 3447319 - RNA, 18 nt, Human
cuggugcggcuggccaug

SEQ ID NO: 3447320 - RNA, 20 nt, Human
cuggugcuauaggcuggaga

SEQ ID NO: 3447321 - RNA, 23 nt, Human
cuggugcuauaggcuggagaagc

SEQ ID NO: 3447322 - RNA, 14 nt, Human
cuggugcucucugc

SEQ ID NO: 3447323 - RNA, 19 nt, Human
cuggugcugccucuaccug

SEQ ID NO: 3447324 - RNA, 12 nt, Human
cuggugcugugg

SEQ ID NO: 3447325 - RNA, 17 nt, Human
cuggugcuguggccagg

SEQ ID NO: 3447326 - RNA, 17 nt, Human
cuggugcuuccaaauau

SEQ ID NO: 3447327 - RNA, 17 nt, Human
cugguggacaguccugg

SEQ ID NO: 3447328 - RNA, 22 nt, Human
cugguggagaaagcacugaccu

SEQ ID NO: 3447329 - RNA, 17 nt, Human
cugguggcagcucaccu

SEQ ID NO: 3447330 - RNA, 15 nt, Human
cugguggcagcugcg

SEQ ID NO: 3447331 - RNA, 22 nt, Human
cugguggcaggggcuucuagcu

SEQ ID NO: 3447332 - RNA, 13 nt, Human
cugguggcccagg

SEQ ID NO: 3447333 - RNA, 22 nt, Human
cugguggccccguuucuggugg

SEQ ID NO: 3447334 - RNA, 16 nt, Human
cugguggccccugccu

SEQ ID NO: 3447335 - RNA, 22 nt, Human
cugguggcccgacagccuggca

SEQ ID NO: 3447336 - RNA, 17 nt, Human
cugguggcccucucccc

SEQ ID NO: 3447337 - RNA, 14 nt, Human
cugguggccucugc

SEQ ID NO: 3447338 - RNA, 15 nt, Human
cugguggccucugcc

SEQ ID NO: 3447339 - RNA, 15 nt, Human
cugguggcucccgga

SEQ ID NO: 3447340 - RNA, 23 nt, Human
cuggugggaggggcgcccaccuc

SEQ ID NO: 3447341 - RNA, 24 nt, Human
cuggugggaucugugcccagagau

SEQ ID NO: 3447342 - RNA, 12 nt, Human
cuggugggccuc

SEQ ID NO: 3447343 - RNA, 14 nt, Human
cugguggggcagcu

SEQ ID NO: 3447344 - RNA, 17 nt, Human
cugguggggcagcuccu

SEQ ID NO: 3447345 - RNA, 22 nt, Human
cuggugggguguguuccaacug

SEQ ID NO: 3447346 - RNA, 16 nt, Human
cugguggguccagggg

SEQ ID NO: 3447347 - RNA, 21 nt, Human
cuggugggugccuaggccugg

SEQ ID NO: 3447348 - RNA, 16 nt, Human
cuggugguauuuucaa

SEQ ID NO: 3447349 - RNA, 20 nt, Human
cuggugguucacucuuggag

SEQ ID NO: 3447350 - RNA, 21 nt, Human
cuggugguucacucuuggagc

SEQ ID NO: 3447351 - RNA, 21 nt, Human
cuggugguuucacggugccag

SEQ ID NO: 3447352 - RNA, 17 nt, Human
cugguguagcuacagag

SEQ ID NO: 3447353 - RNA, 19 nt, Human
cugguguagcuacagagaa

SEQ ID NO: 3447354 - RNA, 21 nt, Human
cugguguagcuacagagaaac

SEQ ID NO: 3447355 - RNA, 17 nt, Human
cuggugucaccccagag

SEQ ID NO: 3447356 - RNA, 18 nt, Human
cuggugucaccccagagc

SEQ ID NO: 3447357 - RNA, 19 nt, Human
cuggugucaccccagagcc

SEQ ID NO: 3447358 - RNA, 20 nt, Human
cuggugucaccccagagcca

SEQ ID NO: 3447359 - RNA, 15 nt, Human
cuggugucacuuacu

SEQ ID NO: 3447360 - RNA, 14 nt, Human
cugguguccugacc

SEQ ID NO: 3447361 - RNA, 16 nt, Human
cugguguccugaccac

SEQ ID NO: 3447362 - RNA, 17 nt, Human
cugguguccugaccacc

SEQ ID NO: 3447363 - RNA, 17 nt, Human
cuggugugaacuaaacu

SEQ ID NO: 3447364 - RNA, 14 nt, Human
cuggugugguacag

SEQ ID NO: 3447365 - RNA, 20 nt, Human
cuggugugguacagagaagc

SEQ ID NO: 3447366 - RNA, 21 nt, Human
cuggugugguacagagaagcc

SEQ ID NO: 3447367 - RNA, 22 nt, Human
cuggugugguacagagaagcca

SEQ ID NO: 3447368 - RNA, 12 nt, Human
cugguguuaaca

SEQ ID NO: 3447369 - RNA, 16 nt, Human
cugguguuaacagaag

SEQ ID NO: 3447370 - RNA, 22 nt, Human
cugguguuuaggugaauuaauu

SEQ ID NO: 3447371 - RNA, 14 nt, Human
cugguguuucuuga

SEQ ID NO: 3447372 - RNA, 20 nt, Human
cugguuagcucagccccagc

SEQ ID NO: 3447373 - RNA, 20 nt, Human
cuguacuugguccaacugca

SEQ ID NO: 3447374 - RNA, 21 nt, Human
cuguacuugguccaacugcaa

SEQ ID NO: 3447375 - RNA, 17 nt, Human
cuguacuuucuauuuua

SEQ ID NO: 3447376 - RNA, 18 nt, Human
cuguacuuuucauucucu

SEQ ID NO: 3447377 - RNA, 20 nt, Human
cuguagaaaugguuguauua

SEQ ID NO: 3447378 - RNA, 21 nt, Human
cuguagaauagccuguggccu

SEQ ID NO: 3447379 - RNA, 14 nt, Human
cuguagaaucaauu

SEQ ID NO: 3447380 - RNA, 16 nt, Human
cuguagaaucaauuua

SEQ ID NO: 3447381 - RNA, 18 nt, Human
cuguagagccuucugaug

SEQ ID NO: 3447382 - RNA, 15 nt, Human
cuguagagugggagc

SEQ ID NO: 3447383 - RNA, 13 nt, Human
cuguagaguugcu

SEQ ID NO: 3447384 - RNA, 18 nt, Human
cuguagauggaaaaacuu

SEQ ID NO: 3447385 - RNA, 15 nt, Human
cuguagauucugugg

SEQ ID NO: 3447386 - RNA, 19 nt, Human
cuguagcaucuucuggagu

SEQ ID NO: 3447387 - RNA, 20 nt, Human
cuguagcaucuucuggaguc

SEQ ID NO: 3447388 - RNA, 21 nt, Human
cuguagcccacucugcucgcc

SEQ ID NO: 3447389 - RNA, 18 nt, Human
cuguagccccagugacag

SEQ ID NO: 3447390 - RNA, 13 nt, Human
cuguagccuucug

SEQ ID NO: 3447391 - RNA, 22 nt, Human
gccgugugagugugacagggcc

SEQ ID NO: 3447392 - RNA, 22 nt, Human
gccgugugugugcguccugucg

SEQ ID NO: 3447393 - RNA, 18 nt, Human
gccguguguugcaugcag

SEQ ID NO: 3447394 - RNA, 18 nt, Human
gccguugaagaggaaggg

SEQ ID NO: 3447395 - RNA, 18 nt, Human
gccguugcugacuuagaa

SEQ ID NO: 3447396 - RNA, 23 nt, Human
gccguuugagaagaaaacaucua

SEQ ID NO: 3447397 - RNA, 15 nt, Human
gccuaaaaauaaagc

SEQ ID NO: 3447398 - RNA, 14 nt, Human
gccuaaaaaugcaa

SEQ ID NO: 3447399 - RNA, 15 nt, Human
gccuaaaaguaaaca

SEQ ID NO: 3447400 - RNA, 22 nt, Human
gccuaaaagugggcuugauucu

SEQ ID NO: 3447401 - RNA, 20 nt, Human
gccuaaaaucuuggaaguac

SEQ ID NO: 3447402 - RNA, 23 nt, Human
gccuaaauccauuuggaaaucuu

SEQ ID NO: 3447403 - RNA, 16 nt, Human
gccuaacaccagcguu

SEQ ID NO: 3447404 - RNA, 15 nt, Human
gccuaagacauguaa

SEQ ID NO: 3447405 - RNA, 12 nt, Human
gccuaagaggcu

SEQ ID NO: 3447406 - RNA, 12 nt, Human
gccuaaggacuu

SEQ ID NO: 3447407 - RNA, 17 nt, Human
gccuaaguggcugcuga

SEQ ID NO: 3447408 - RNA, 21 nt, Human
gccuaauaaaacugaugugaa

SEQ ID NO: 3447409 - RNA, 14 nt, Human
gccuaaucccuggg

SEQ ID NO: 3447410 - RNA, 22 nt, Human
gccuaaucccugggcauugcuu

SEQ ID NO: 3447411 - RNA, 22 nt, Human
gccuaaucucauaccucugacc

SEQ ID NO: 3447412 - RNA, 14 nt, Human
gccuacagaugaac

SEQ ID NO: 3447413 - RNA, 16 nt, Human
gccuacaggagugagc

SEQ ID NO: 3447414 - RNA, 16 nt, Human
gccuacccacccccag

SEQ ID NO: 3447415 - RNA, 14 nt, Human
gccuaccccgcaga

SEQ ID NO: 3447416 - RNA, 17 nt, Human
gccuaccccgcagacac

SEQ ID NO: 3447417 - RNA, 14 nt, Human
gccuaccugcucuc

SEQ ID NO: 3447418 - RNA, 22 nt, Human
gccuacuccugucuucugcuuu

SEQ ID NO: 3447419 - RNA, 19 nt, Human
gccuacucgcuugcuagaa

SEQ ID NO: 3447420 - RNA, 13 nt, Human
gccuagaagcugg

SEQ ID NO: 3447421 - RNA, 14 nt, Human
gccuagaccagcag

SEQ ID NO: 3447422 - RNA, 16 nt, Human
gccuagaccagcagac

SEQ ID NO: 3447423 - RNA, 13 nt, Human
gccuagaggccug

SEQ ID NO: 3447424 - RNA, 17 nt, Human
gccuagauccacacaca

SEQ ID NO: 3447425 - RNA, 17 nt, Human
gccuagcaagcuggccu

SEQ ID NO: 3447426 - RNA, 12 nt, Human
gccuagcacagc

SEQ ID NO: 3447427 - RNA, 16 nt, Human
gccuagcacagcagcu

SEQ ID NO: 3447428 - RNA, 20 nt, Human
gccuagcauacguacacauu

SEQ ID NO: 3447429 - RNA, 23 nt, Human
gccuagcauacguacacauuuua

SEQ ID NO: 3447430 - RNA, 14 nt, Human
gccuagcccacccu

SEQ ID NO: 3447431 - RNA, 16 nt, Human
gccuagcccacccugc

SEQ ID NO: 3447432 - RNA, 18 nt, Human
gccuagccucacgcuccu

SEQ ID NO: 3447433 - RNA, 17 nt, Human
gccuagcugcuacaaag

SEQ ID NO: 3447434 - RNA, 23 nt, Human
gccuagcugcuacaaagaagaca

SEQ ID NO: 3447435 - RNA, 13 nt, Human
gccuagcugcugu

SEQ ID NO: 3447436 - RNA, 15 nt, Human
gccuaggaccacuca

SEQ ID NO: 3447437 - RNA, 23 nt, Human
gccuaggaccacucagccccuag

SEQ ID NO: 3447438 - RNA, 16 nt, Human
gccuaggaggguccuc

SEQ ID NO: 3447439 - RNA, 22 nt, Human
gccuaggauucacaccccaccu

SEQ ID NO: 3447440 - RNA, 23 nt, Human
gccuaggauucacaccccaccug

SEQ ID NO: 3447441 - RNA, 20 nt, Human
gccuaggccucagccagaga

SEQ ID NO: 3447442 - RNA, 12 nt, Human
gccuaggccugg

SEQ ID NO: 3447443 - RNA, 14 nt, Human
gccuaggcugcauu

SEQ ID NO: 3447444 - RNA, 20 nt, Human
gccuaggugacagagugaga

SEQ ID NO: 3447445 - RNA, 15 nt, Human
gccuagucagccaca

SEQ ID NO: 3447446 - RNA, 22 nt, Human
gccuagucagccacaugggaaa

SEQ ID NO: 3447447 - RNA, 14 nt, Human
gccuagucccuucc

SEQ ID NO: 3447448 - RNA, 19 nt, Human
gccuaguggggucucccuc

SEQ ID NO: 3447449 - RNA, 23 nt, Human
gccuaguggggucucccucuccu

SEQ ID NO: 3447450 - RNA, 22 nt, Human
gccuauaagccaaaauuaaggu

SEQ ID NO: 3447451 - RNA, 21 nt, Human
gccuauaaugaagcuuuauac

SEQ ID NO: 3447452 - RNA, 23 nt, Human
gccuaucaaagaccuugugugua

SEQ ID NO: 3447453 - RNA, 13 nt, Human
gccuaucagugug

SEQ ID NO: 3447454 - RNA, 15 nt, Human
gccuaucagugugcc

SEQ ID NO: 3447455 - RNA, 13 nt, Human
gccuauccgcugc

SEQ ID NO: 3447456 - RNA, 18 nt, Human
gccuauccgcugccagcc

SEQ ID NO: 3447457 - RNA, 21 nt, Human
gccuaucuccuagggcuaugg

SEQ ID NO: 3447458 - RNA, 18 nt, Human
gccuaugacuugggcacc

SEQ ID NO: 3447459 - RNA, 22 nt, Human
gccuaugagcauccugagcccc

SEQ ID NO: 3447460 - RNA, 18 nt, Human
gccuaugaucccagcacu

SEQ ID NO: 3447461 - RNA, 13 nt, Human
gccuauggagagc

SEQ ID NO: 3447462 - RNA, 16 nt, Human
gccuauggagagcccu

SEQ ID NO: 3447463 - RNA, 22 nt, Human
gccuaugugcaugcagcaucua

SEQ ID NO: 3447464 - RNA, 22 nt, Human
gccuauuaguaguuaauucugu

SEQ ID NO: 3447465 - RNA, 23 nt, Human
gccuauugcuagagcuccucccu

SEQ ID NO: 3447466 - RNA, 23 nt, Human
gccuauuuuuuuagauugagaaa

SEQ ID NO: 3447467 - RNA, 13 nt, Human
gccucaaaaugug

SEQ ID NO: 3447468 - RNA, 15 nt, Human
gccucaaaggcccgc

SEQ ID NO: 3447469 - RNA, 17 nt, Human
gccucaaaggcccgcuc

SEQ ID NO: 3447470 - RNA, 20 nt, Human
gccucaaauaaaaagugcuu

SEQ ID NO: 3447471 - RNA, 14 nt, Human
gccucaaauccagg

SEQ ID NO: 3447472 - RNA, 18 nt, Human
gccucaaauccaggaccc

SEQ ID NO: 3447473 - RNA, 17 nt, Human
gccucaacccucccuca

SEQ ID NO: 3447474 - RNA, 19 nt, Human
gccucaacccucccucagc

SEQ ID NO: 3447475 - RNA, 21 nt, Human
gccucaacccucccucagccc

SEQ ID NO: 3447476 - RNA, 23 nt, Human
gccucaacccucccucagccccu

SEQ ID NO: 3447477 - RNA, 15 nt, Human
gccucaaccucccaa

SEQ ID NO: 3447478 - RNA, 15 nt, Human
gccucaacuccuccc

SEQ ID NO: 3447479 - RNA, 22 nt, Human
gccucaacucugcugagggucc

SEQ ID NO: 3447480 - RNA, 13 nt, Human
gccucaaggacuu

SEQ ID NO: 3447481 - RNA, 14 nt, Human
gccucaaugccagu

SEQ ID NO: 3447482 - RNA, 21 nt, Human
gccucaaugugaaucagaccc

SEQ ID NO: 3447483 - RNA, 23 nt, Human
gccucacacgguuugaagccugg

SEQ ID NO: 3447484 - RNA, 15 nt, Human
gccucacagaagaau

SEQ ID NO: 3447485 - RNA, 19 nt, Human
gccucaccagcccuggcaa

SEQ ID NO: 3447486 - RNA, 15 nt, Human
gccucacccaccccu

SEQ ID NO: 3447487 - RNA, 19 nt, Human
gccucacccaccccugcac

SEQ ID NO: 3447488 - RNA, 23 nt, Human
gccucacccccucgggucuccuc

SEQ ID NO: 3447489 - RNA, 16 nt, Human
gccucaccucuaccca

SEQ ID NO: 3447490 - RNA, 12 nt, Human
gccucacugaaa

SEQ ID NO: 3447491 - RNA, 17 nt, Human
gccucacuggggcagac

SEQ ID NO: 3447492 - RNA, 20 nt, Human
gccucacuugaaugugucac

SEQ ID NO: 3447493 - RNA, 23 nt, Human
gccucacuuuuaaugaacaaaug

SEQ ID NO: 3447494 - RNA, 16 nt, Human
gccucagacucauaca

SEQ ID NO: 3447495 - RNA, 15 nt, Human
gccucagacugcacc

SEQ ID NO: 3447496 - RNA, 19 nt, Human
gccucagacugcacccagg

SEQ ID NO: 3447497 - RNA, 20 nt, Human
gccucagacugcacccagga

SEQ ID NO: 3447498 - RNA, 21 nt, Human
gccucagacugcacccaggag

SEQ ID NO: 3447499 - RNA, 18 nt, Human
gccucagagaccagggcu

SEQ ID NO: 3447500 - RNA, 15 nt, Human
gccucagcauccugg

SEQ ID NO: 3447501 - RNA, 21 nt, Human
gccucagcauccuggcacccg

SEQ ID NO: 3447502 - RNA, 15 nt, Human
gccucagccauucac

SEQ ID NO: 3447503 - RNA, 17 nt, Human
gccucagccauucacug

SEQ ID NO: 3447504 - RNA, 22 nt, Human
gccucagcccugacccugugga

SEQ ID NO: 3447505 - RNA, 14 nt, Human
gccucagccuccca

SEQ ID NO: 3447506 - RNA, 16 nt, Human
gccucagcgcggcccu

SEQ ID NO: 3447507 - RNA, 20 nt, Human
gccucagcuacccacuaucc

SEQ ID NO: 3447508 - RNA, 15 nt, Human
gccucagcucccaca

SEQ ID NO: 3447509 - RNA, 21 nt, Human
gccucagcucccacaagccuc

SEQ ID NO: 3447510 - RNA, 16 nt, Human
gccucagcuuccccag

SEQ ID NO: 3447511 - RNA, 17 nt, Human
gccucaggacugggagc

SEQ ID NO: 3447512 - RNA, 23 nt, Human
gccucagggcagccugccuggag

SEQ ID NO: 3447513 - RNA, 16 nt, Human
gccucaggggucugag

SEQ ID NO: 3447514 - RNA, 12 nt, Human
gccucaggugcu

SEQ ID NO: 3447515 - RNA, 16 nt, Human
gccucaggugggccgc

SEQ ID NO: 3447516 - RNA, 13 nt, Human
gccucagguuccu

SEQ ID NO: 3447517 - RNA, 16 nt, Human
gccucacuugaaugug

SEQ ID NO: 3447518 - RNA, 18 nt, Human
gccucacuugaauguguc

SEQ ID NO: 3447519 - RNA, 23 nt, Human
gccucagaauugaucauuuuccc

SEQ ID NO: 3447520 - RNA, 12 nt, Human
gccucagagacc

SEQ ID NO: 3447521 - RNA, 18 nt, Human
gccucagauuccuuccca

SEQ ID NO: 3447522 - RNA, 22 nt, Human
gccucagauuccuucccaugga

SEQ ID NO: 3447523 - RNA, 13 nt, Human
gccucagccagag

SEQ ID NO: 3447524 - RNA, 15 nt, Human
gccucagccagagaa

SEQ ID NO: 3447525 - RNA, 17 nt, Human
gccucagcccugacccu

SEQ ID NO: 3447526 - RNA, 16 nt, Human
gccucagccuccugag

SEQ ID NO: 3447527 - RNA, 14 nt, Human
gccucagcugccuc

SEQ ID NO: 3447528 - RNA, 19 nt, Human
gccucagcugccucacuuc

SEQ ID NO: 3447529 - RNA, 17 nt, Human
gccucagcuuccccagu

SEQ ID NO: 3447530 - RNA, 16 nt, Human
gccucaggacugggag

SEQ ID NO: 3447531 - RNA, 23 nt, Human
gccucaggacugggagcccccag

SEQ ID NO: 3447532 - RNA, 12 nt, Human
gccucaggcugc

SEQ ID NO: 3447533 - RNA, 18 nt, Human
gccucagggcagccugcc

SEQ ID NO: 3447534 - RNA, 20 nt, Human
gccucaguaagacgacaagg

SEQ ID NO: 3447535 - RNA, 21 nt, Human
gccucaguauauuuaaacuca

SEQ ID NO: 3447536 - RNA, 16 nt, Human
gccucaguccuccccu

SEQ ID NO: 3447537 - RNA, 15 nt, Human
gccucagucucccuc

SEQ ID NO: 3447538 - RNA, 21 nt, Human
gccucagucucccuucuccca

SEQ ID NO: 3447539 - RNA, 11 nt, Human
gccucagugga

SEQ ID NO: 3447540 - RNA, 22 nt, Human
gccucaguggacuuuccacccc

SEQ ID NO: 3447541 - RNA, 13 nt, Human
gccucauauuuaa

SEQ ID NO: 3447542 - RNA, 16 nt, Human
gccucauccgaggcag

SEQ ID NO: 3447543 - RNA, 17 nt, Human
gccucauccgaggcagg

SEQ ID NO: 3447544 - RNA, 22 nt, Human
gccucauccgaggcagggucag

SEQ ID NO: 3447545 - RNA, 19 nt, Human
gccucaugcuaagacucag

SEQ ID NO: 3447546 - RNA, 22 nt, Human
gccucauguccacugguucuuc

SEQ ID NO: 3447547 - RNA, 15 nt, Human
gccucauguggcugg

SEQ ID NO: 3447548 - RNA, 17 nt, Human
gccucauguggcuggaa

SEQ ID NO: 3447549 - RNA, 18 nt, Human
gccucauguggcuggaag

SEQ ID NO: 3447550 - RNA, 15 nt, Human
gccucauuuuuuucc

SEQ ID NO: 3447551 - RNA, 17 nt, Human
gccuccaaccccucgcc

SEQ ID NO: 3447552 - RNA, 17 nt, Human
gccuccaagcuccaucu

SEQ ID NO: 3447553 - RNA, 23 nt, Human
gccuccaaggaggggcuguaaaa

SEQ ID NO: 3447554 - RNA, 12 nt, Human
gccuccaccacc

SEQ ID NO: 3447555 - RNA, 15 nt, Human
gccuccaccaccacu

SEQ ID NO: 3447556 - RNA, 16 nt, Human
gccuccaccaccacug

SEQ ID NO: 3447557 - RNA, 15 nt, Human
gccuccacccucuga

SEQ ID NO: 3447558 - RNA, 17 nt, Human
gccuccacccucugagc

SEQ ID NO: 3447559 - RNA, 18 nt, Human
gccuccacccucugagcu

SEQ ID NO: 3447560 - RNA, 12 nt, Human
gccuccaccgcu

SEQ ID NO: 3447561 - RNA, 22 nt, Human
gccuccacucccacuucccuga

SEQ ID NO: 3447562 - RNA, 19 nt, Human
gccuccagaacucacuggg

SEQ ID NO: 3447563 - RNA, 21 nt, Human
gccuccagcccucucacugug

SEQ ID NO: 3447564 - RNA, 11 nt, Human
gccuccagccu

SEQ ID NO: 3447565 - RNA, 12 nt, Human
gccuccagccuc

SEQ ID NO: 3447566 - RNA, 15 nt, Human
gccuccagccucugu

SEQ ID NO: 3447567 - RNA, 12 nt, Human
gccuccagcuca

SEQ ID NO: 3447568 - RNA, 13 nt, Human
gccuccagcucag

SEQ ID NO: 3447569 - RNA, 19 nt, Human
gccuccaggaaccacacca

SEQ ID NO: 3447570 - RNA, 21 nt, Human
gccuccaggcccgucugucca

SEQ ID NO: 3447571 - RNA, 12 nt, Human
gccuccagggcu

SEQ ID NO: 3447572 - RNA, 20 nt, Human
gccuccagggcuggacugag

SEQ ID NO: 3447573 - RNA, 18 nt, Human
gccuccaggugcagaggu

SEQ ID NO: 3447574 - RNA, 12 nt, Human
gccuccaggugu

SEQ ID NO: 3447575 - RNA, 15 nt, Human
gccuccaucagcuaa

SEQ ID NO: 3447576 - RNA, 15 nt, Human
gccuccauccaaggc

SEQ ID NO: 3447577 - RNA, 21 nt, Human
gccuccauuccuggagcccga

SEQ ID NO: 3447578 - RNA, 17 nt, Human
gccuccauucugaccau

SEQ ID NO: 3447579 - RNA, 13 nt, Human
gccucccaaagug

SEQ ID NO: 3447580 - RNA, 19 nt, Human
gccucccaaagugcuggga

SEQ ID NO: 3447581 - RNA, 13 nt, Human
gccucccaacuca

SEQ ID NO: 3447582 - RNA, 16 nt, Human
gccucccaacucaccc

SEQ ID NO: 3447583 - RNA, 21 nt, Human
gccucccaaggagaacaaaua

SEQ ID NO: 3447584 - RNA, 12 nt, Human
gccucccacagu

SEQ ID NO: 3447585 - RNA, 23 nt, Human
gccucccacagugacucgggcuc

SEQ ID NO: 3447586 - RNA, 12 nt, Human
gccucccacccc

SEQ ID NO: 3447587 - RNA, 17 nt, Human
gccucccacccccaucu

SEQ ID NO: 3447588 - RNA, 21 nt, Human
gccucccacccgaugcugcuu

SEQ ID NO: 3447589 - RNA, 13 nt, Human
gccucccacuggg

SEQ ID NO: 3447590 - RNA, 14 nt, Human
gccucccacugggg

SEQ ID NO: 3447591 - RNA, 14 nt, Human
gccucccagccugg

SEQ ID NO: 3447592 - RNA, 22 nt, Human
gccucccauccagggcccccau

SEQ ID NO: 3447593 - RNA, 16 nt, Human
gccuccccaccuccag

SEQ ID NO: 3447594 - RNA, 21 nt, Human
gccuccccacggccgcuccag

SEQ ID NO: 3447595 - RNA, 17 nt, Human
gccuccccagcucaccc

SEQ ID NO: 3447596 - RNA, 16 nt, Human
gccuccccauuuccca

SEQ ID NO: 3447597 - RNA, 20 nt, Human
gccuccccauuucccaucug

SEQ ID NO: 3447598 - RNA, 21 nt, Human
gccuccccauuucccaucugc

SEQ ID NO: 3447599 - RNA, 18 nt, Human
gccuccccgaaacaggcu

SEQ ID NO: 3447600 - RNA, 22 nt, Human
gccuccccuccucugcuugcca

SEQ ID NO: 3447601 - RNA, 14 nt, Human
gccuccccugccag

SEQ ID NO: 3447602 - RNA, 15 nt, Human
gccuccccugccagg

SEQ ID NO: 3447603 - RNA, 17 nt, Human
gccuccccugccagggc

SEQ ID NO: 3447604 - RNA, 18 nt, Human
gccuccccugccagggca

SEQ ID NO: 3447605 - RNA, 18 nt, Human
gccucccgaauagcuggg

SEQ ID NO: 3447606 - RNA, 16 nt, Human
gccucccgaguagcug

SEQ ID NO: 3447607 - RNA, 23 nt, Human
gccucccgaguagcugggacuac

SEQ ID NO: 3447608 - RNA, 14 nt, Human
gccucccucaaccc

SEQ ID NO: 3447609 - RNA, 21 nt, Human
gccucccuccaccccaggacg

SEQ ID NO: 3447610 - RNA, 18 nt, Human
gccucccuccccugcccu

SEQ ID NO: 3447611 - RNA, 19 nt, Human
gccucccuccccugcccuc

SEQ ID NO: 3447612 - RNA, 21 nt, Human
gccucccucucucuucugcuc

SEQ ID NO: 3447613 - RNA, 12 nt, Human
gccucccucuga

SEQ ID NO: 3447614 - RNA, 11 nt, Human
gccucccugaa

SEQ ID NO: 3447615 - RNA, 14 nt, Human
gccucccugccagu

SEQ ID NO: 3447616 - RNA, 14 nt, Human
gccucccugccuca

SEQ ID NO: 3447617 - RNA, 21 nt, Human
gccucccuguugaagcucugg

SEQ ID NO: 3447618 - RNA, 14 nt, Human
gccucccuuguggc

SEQ ID NO: 3447619 - RNA, 12 nt, Human
gccuccggccuc

SEQ ID NO: 3447620 - RNA, 16 nt, Human
gccuccggccuccccu

SEQ ID NO: 3447621 - RNA, 19 nt, Human
gccuccggcgucagccucc

SEQ ID NO: 3447622 - RNA, 16 nt, Human
gccuccgggaccccca

SEQ ID NO: 3447623 - RNA, 20 nt, Human
gccuccgggacccccaggac

SEQ ID NO: 3447624 - RNA, 16 nt, Human
gccuccguauuucaga

SEQ ID NO: 3447625 - RNA, 19 nt, Human
gccuccgucacuaccuggc

SEQ ID NO: 3447626 - RNA, 18 nt, Human
gccuccguccccugccca

SEQ ID NO: 3447627 - RNA, 14 nt, Human
gccuccucaccccc

SEQ ID NO: 3447628 - RNA, 17 nt, Human
gccuccucacccccagc

SEQ ID NO: 3447629 - RNA, 12 nt, Human
gccuccucagga

SEQ ID NO: 3447630 - RNA, 15 nt, Human
gccuccucaggagcc

SEQ ID NO: 3447631 - RNA, 17 nt, Human
gccuccucaucccgugu

SEQ ID NO: 3447632 - RNA, 22 nt, Human
gccuccucaucccguguucucc

SEQ ID NO: 3447633 - RNA, 13 nt, Human
gccuccuccagcc

SEQ ID NO: 3447634 - RNA, 13 nt, Human
gccuccucccucc

SEQ ID NO: 3447635 - RNA, 14 nt, Human
gccuccucccuccc

SEQ ID NO: 3447636 - RNA, 19 nt, Human
gccuccucccucccucucc

SEQ ID NO: 3447637 - RNA, 21 nt, Human
gccuccucccucccucuccga

SEQ ID NO: 3447638 - RNA, 15 nt, Human
gccuccuccugacca

SEQ ID NO: 3447639 - RNA, 22 nt, Human
gccuccucuaacaggggcuggu

SEQ ID NO: 3447640 - RNA, 21 nt, Human
gccuccucucauaaaagagac

SEQ ID NO: 3447641 - RNA, 23 nt, Human
gccuccucucucaguuuuuauau

SEQ ID NO: 3447642 - RNA, 17 nt, Human
gccuccucuggacggca

SEQ ID NO: 3447643 - RNA, 20 nt, Human
gccuccucuggacggcaggc

SEQ ID NO: 3447644 - RNA, 16 nt, Human
gccuccucuguccagg

SEQ ID NO: 3447645 - RNA, 17 nt, Human
gccuccucugucugccc

SEQ ID NO: 3447646 - RNA, 20 nt, Human
gccuccucuucaccccggca

SEQ ID NO: 3447647 - RNA, 20 nt, Human
gccuccugacacaccugcag

SEQ ID NO: 3447648 - RNA, 23 nt, Human
gccuccugacacaccugcagccu

SEQ ID NO: 3447649 - RNA, 17 nt, Human
gccuccugaccugaggc

SEQ ID NO: 3447650 - RNA, 15 nt, Human
gccuccuggcccagg

SEQ ID NO: 3447651 - RNA, 19 nt, Human
gccuccuggcccaggugag

SEQ ID NO: 3447652 - RNA, 13 nt, Human
gccuccugugggg

SEQ ID NO: 3447653 - RNA, 14 nt, Human
gccuccugugggga

SEQ ID NO: 3447654 - RNA, 13 nt, Human
gccuccugugugu

SEQ ID NO: 3447655 - RNA, 17 nt, Human
gccuccuuccaccuccc

SEQ ID NO: 3447656 - RNA, 18 nt, Human
gccuccuuccaccucccu

SEQ ID NO: 3447657 - RNA, 13 nt, Human
gccuccuuccucu

SEQ ID NO: 3447658 - RNA, 21 nt, Human
gccucgaacuccugggcucaa

SEQ ID NO: 3447659 - RNA, 17 nt, Human
gccucgaacuggcugca

SEQ ID NO: 3447660 - RNA, 15 nt, Human
gccucgacacguggg

SEQ ID NO: 3447661 - RNA, 22 nt, Human
gccucgacacgugggcuccccu

SEQ ID NO: 3447662 - RNA, 15 nt, Human
gccucgaggugccuu

SEQ ID NO: 3447663 - RNA, 15 nt, Human
gcgaccccaucugcc

SEQ ID NO: 3447664 - RNA, 13 nt, Human
gcgacccuggggg

SEQ ID NO: 3447665 - RNA, 19 nt, Human
gcgacccugggggcacagg

SEQ ID NO: 3447666 - RNA, 13 nt, Human
gcgaccgcccccu

SEQ ID NO: 3447667 - RNA, 10 nt, Human
gcgaccuccu

SEQ ID NO: 3447668 - RNA, 23 nt, Human
gcgaccuuccucauccaccccau

SEQ ID NO: 3447669 - RNA, 21 nt, Human
gcgacguuagucgugagcucu

SEQ ID NO: 3447670 - RNA, 22 nt, Human
gcgacguuagucgugagcucuu

SEQ ID NO: 3447671 - RNA, 21 nt, Human
gcgacucuauagacucuagga

SEQ ID NO: 3447672 - RNA, 14 nt, Human
gcgagacuccgucu

SEQ ID NO: 3447673 - RNA, 18 nt, Human
gcgagacuccgucucaaa

SEQ ID NO: 3447674 - RNA, 14 nt, Human
gcgagagaggagcc

SEQ ID NO: 3447675 - RNA, 16 nt, Human
gcgagagaggagccag

SEQ ID NO: 3447676 - RNA, 19 nt, Human
gcgagagaucaaagaugaa

SEQ ID NO: 3447677 - RNA, 16 nt, Human
gcgagaggcagagaaa

SEQ ID NO: 3447678 - RNA, 17 nt, Human
gcgagcccugguggcag

SEQ ID NO: 3447679 - RNA, 12 nt, Human
gcgagccugcua

SEQ ID NO: 3447680 - RNA, 19 nt, Human
gcgaggagaugcuccuugg

SEQ ID NO: 3447681 - RNA, 16 nt, Human
gcgaggcagaggacag

SEQ ID NO: 3447682 - RNA, 15 nt, Human
gcgagggcagcugcu

SEQ ID NO: 3447683 - RNA, 16 nt, Human
gcgaggucaacagaga

SEQ ID NO: 3447684 - RNA, 22 nt, Human
gcgagugaaugccagugugcug

SEQ ID NO: 3447685 - RNA, 15 nt, Human
gcgagugccaggacu

SEQ ID NO: 3447686 - RNA, 22 nt, Human
gcgagugccaggacuccccagg

SEQ ID NO: 3447687 - RNA, 20 nt, Human
gcgagugugugcaugugugu

SEQ ID NO: 3447688 - RNA, 13 nt, Human
gcgauauacagau

SEQ ID NO: 3447689 - RNA, 19 nt, Human
gcgauauacagaugaaaau

SEQ ID NO: 3447690 - RNA, 20 nt, Human
gcgaucauggcucacugcag

SEQ ID NO: 3447691 - RNA, 22 nt, Human
gcgaucauggcucacugcagcc

SEQ ID NO: 3447692 - RNA, 14 nt, Human
gcgaucucagcuca

SEQ ID NO: 3447693 - RNA, 18 nt, Human
gcgaucucuccacugugc

SEQ ID NO: 3447694 - RNA, 22 nt, Human
gcgauguggaacugcugccacu

SEQ ID NO: 3447695 - RNA, 18 nt, Human
gcgauucccucucccagg

SEQ ID NO: 3447696 - RNA, 19 nt, Human
gcgauucccucucccaggc

SEQ ID NO: 3447697 - RNA, 22 nt, Human
gcgauucccucucccaggcccc

SEQ ID NO: 3447698 - RNA, 20 nt, Human
gcgauucuggauaaagccac

SEQ ID NO: 3447699 - RNA, 17 nt, Human
gcgauucuucugcuuca

SEQ ID NO: 3447700 - RNA, 23 nt, Human
gcgauucuucugcuucagccucc

SEQ ID NO: 3447701 - RNA, 12 nt, Human
gcgcaagccugu

SEQ ID NO: 3447702 - RNA, 21 nt, Human
gcgcaagccuguaaucccagc

SEQ ID NO: 3447703 - RNA, 22 nt, Human
gcgcaagccuguaaucccagcu

SEQ ID NO: 3447704 - RNA, 23 nt, Human
gcgcaagccuguaaucccagcua

SEQ ID NO: 3447705 - RNA, 18 nt, Human
gcgcacaaggcugaccaa

SEQ ID NO: 3447706 - RNA, 16 nt, Human
gcgcacacacacacau

SEQ ID NO: 3447707 - RNA, 18 nt, Human
gcgcacacacacacauac

SEQ ID NO: 3447708 - RNA, 12 nt, Human
gcgcaccugccc

SEQ ID NO: 3447709 - RNA, 21 nt, Human
gcgcacuuuccuccuggcaga

SEQ ID NO: 3447710 - RNA, 20 nt, Human
gcgcagcauauucaggaagc

SEQ ID NO: 3447711 - RNA, 18 nt, Human
gcgcagcuggacucugca

SEQ ID NO: 3447712 - RNA, 14 nt, Human
gcgcaggcuggccc

SEQ ID NO: 3447713 - RNA, 15 nt, Human
gcgcaggcuggcccu

SEQ ID NO: 3447714 - RNA, 21 nt, Human
gcgcagugccucuggucuggg

SEQ ID NO: 3447715 - RNA, 14 nt, Human
gcgcagugccuugc

SEQ ID NO: 3447716 - RNA, 16 nt, Human
gcgcaguugcugucag

SEQ ID NO: 3447717 - RNA, 13 nt, Human
gcgcaucagacug

SEQ ID NO: 3447718 - RNA, 22 nt, Human
gcgcaucuugccuccaggugca

SEQ ID NO: 3447719 - RNA, 13 nt, Human
gcgccaauaaacc

SEQ ID NO: 3447720 - RNA, 22 nt, Human
gcgccacugugcuccagccugg

SEQ ID NO: 3447721 - RNA, 17 nt, Human
gcgccagcacagaaaca

SEQ ID NO: 3447722 - RNA, 14 nt, Human
gcgccaguccugcu

SEQ ID NO: 3447723 - RNA, 16 nt, Human
gcgccauugcacucca

SEQ ID NO: 3447724 - RNA, 20 nt, Human
gcgccauugcacuccagccu

SEQ ID NO: 3447725 - RNA, 13 nt, Human
gcgcccagggcug

SEQ ID NO: 3447726 - RNA, 19 nt, Human
gcgcccagggcugggagga

SEQ ID NO: 3447727 - RNA, 19 nt, Human
gcgcccaguccuuccaccu

SEQ ID NO: 3447728 - RNA, 18 nt, Human
gcgccccaacccguggag

SEQ ID NO: 3447729 - RNA, 21 nt, Human
gcgccccaacccguggaggcu

SEQ ID NO: 3447730 - RNA, 22 nt, Human
gcgcccccuccgcccugccacu

SEQ ID NO: 3447731 - RNA, 12 nt, Human
gcgccccuagcc

SEQ ID NO: 3447732 - RNA, 22 nt, Human
gcgcccgccccugcagcacgga

SEQ ID NO: 3447733 - RNA, 13 nt, Human
gcgcccgcgcccg

SEQ ID NO: 3447734 - RNA, 12 nt, Human
gcgcccugcaga

SEQ ID NO: 3447735 - RNA, 13 nt, Human
gcgcccugcagac

SEQ ID NO: 3447736 - RNA, 12 nt, Human
gcgcccuggccc

SEQ ID NO: 3447737 - RNA, 19 nt, Human
gcgccgcaaaccacacugg

SEQ ID NO: 3447738 - RNA, 15 nt, Human
gcgccgucuccaggg

SEQ ID NO: 3447739 - RNA, 20 nt, Human
gcgccgugaguucucagggc

SEQ ID NO: 3447740 - RNA, 22 nt, Human
gcgccgugaguucucagggcuc

SEQ ID NO: 3447741 - RNA, 22 nt, Human
gcgccucaacucugcugagggu

SEQ ID NO: 3447742 - RNA, 20 nt, Human
gcgccucaggcugcuggggc

SEQ ID NO: 3447743 - RNA, 12 nt, Human
gcgccucccucc

SEQ ID NO: 3447744 - RNA, 14 nt, Human
gcgccucccuccac

SEQ ID NO: 3447745 - RNA, 19 nt, Human
gcgccucccuccaccccag

SEQ ID NO: 3447746 - RNA, 22 nt, Human
gcgccucccuccaccccaggac

SEQ ID NO: 3447747 - RNA, 22 nt, Human
gcgccuccuuccuugcuguccu

SEQ ID NO: 3447748 - RNA, 21 nt, Human
gcgccucgccggaucugaggg

SEQ ID NO: 3447749 - RNA, 17 nt, Human
gcgccugccccucccag

SEQ ID NO: 3447750 - RNA, 16 nt, Human
gcgccugcugcaugcc

SEQ ID NO: 3447751 - RNA, 15 nt, Human
gcgccugugguucug

SEQ ID NO: 3447752 - RNA, 13 nt, Human
gcgcgcacacaca

SEQ ID NO: 3447753 - RNA, 20 nt, Human
gcgcgcccucccuuggcgug

SEQ ID NO: 3447754 - RNA, 21 nt, Human
gcgcggacauccccugcuggc

SEQ ID NO: 3447755 - RNA, 17 nt, Human
gcgcggggagcccgucg

SEQ ID NO: 3447756 - RNA, 20 nt, Human
gcgcgguggcgggcaccugu

SEQ ID NO: 3447757 - RNA, 20 nt, Human
gcgcgguggcucacgccugu

SEQ ID NO: 3447758 - RNA, 14 nt, Human
gcgcgugaggcccg

SEQ ID NO: 3447759 - RNA, 22 nt, Human
gcgcuaacuugcuuaaauguga

SEQ ID NO: 3447760 - RNA, 20 nt, Human
gcgcuaucucccugccuccu

SEQ ID NO: 3447761 - RNA, 14 nt, Human
gcgcuaucuucaca

SEQ ID NO: 3447762 - RNA, 16 nt, Human
gcgcucagggccaugc

SEQ ID NO: 3447763 - RNA, 16 nt, Human
gccucuuaugggcugg

SEQ ID NO: 3447764 - RNA, 22 nt, Human
gccucuucccccugcuuccacc

SEQ ID NO: 3447765 - RNA, 22 nt, Human
gccucuuccucccucauuccac

SEQ ID NO: 3447766 - RNA, 23 nt, Human
gccucuucucuacucuagggaaa

SEQ ID NO: 3447767 - RNA, 16 nt, Human
gccucuucucucagac

SEQ ID NO: 3447768 - RNA, 15 nt, Human
gccucuucugggagg

SEQ ID NO: 3447769 - RNA, 18 nt, Human
gccucuucugggagggca

SEQ ID NO: 3447770 - RNA, 15 nt, Human
gccucuucuucuuca

SEQ ID NO: 3447771 - RNA, 16 nt, Human
gccucuucuucuucag

SEQ ID NO: 3447772 - RNA, 20 nt, Human
gccucuucuucuucagaaga

SEQ ID NO: 3447773 - RNA, 21 nt, Human
gccucuucuucuucagaagac

SEQ ID NO: 3447774 - RNA, 15 nt, Human
gccucuugaccaggc

SEQ ID NO: 3447775 - RNA, 18 nt, Human
gccucuugagcaguggcu

SEQ ID NO: 3447776 - RNA, 18 nt, Human
gccucuuggaaaaaguga

SEQ ID NO: 3447777 - RNA, 16 nt, Human
gccucuugucuuccua

SEQ ID NO: 3447778 - RNA, 16 nt, Human
gccucuuucauccacu

SEQ ID NO: 3447779 - RNA, 20 nt, Human
gccucuuuuaccugcugcuu

SEQ ID NO: 3447780 - RNA, 15 nt, Human
gccugaacagaagcu

SEQ ID NO: 3447781 - RNA, 14 nt, Human
gccugaacccaaga

SEQ ID NO: 3447782 - RNA, 14 nt, Human
gccugaaccuucca

SEQ ID NO: 3447783 - RNA, 18 nt, Human
gccugaaggggcgucugu

SEQ ID NO: 3447784 - RNA, 22 nt, Human
gccugaaggggcgucuguuccc

SEQ ID NO: 3447785 - RNA, 22 nt, Human
gccugacacacuaaccaagcug

SEQ ID NO: 3447786 - RNA, 15 nt, Human
gccugacagaaacca

SEQ ID NO: 3447787 - RNA, 16 nt, Human
gccugacagccagaac

SEQ ID NO: 3447788 - RNA, 22 nt, Human
gccugacauuuggaguguuccc

SEQ ID NO: 3447789 - RNA, 19 nt, Human
gccugaccucccccuccuu

SEQ ID NO: 3447790 - RNA, 22 nt, Human
gccugaccucccccuccuuccc

SEQ ID NO: 3447791 - RNA, 23 nt, Human
gccugacucccccaguccccuuc

SEQ ID NO: 3447792 - RNA, 13 nt, Human
gccugacugcuca

SEQ ID NO: 3447793 - RNA, 15 nt, Human
gccugacugcucaga

SEQ ID NO: 3447794 - RNA, 16 nt, Human
gccugacuucugcugg

SEQ ID NO: 3447795 - RNA, 19 nt, Human
gccugacuucugcuggcau

SEQ ID NO: 3447796 - RNA, 22 nt, Human
gccugagaagagagaucaaaug

SEQ ID NO: 3447797 - RNA, 12 nt, Human
gccugagaccca

SEQ ID NO: 3447798 - RNA, 16 nt, Human
gccugagacccaggac

SEQ ID NO: 3447799 - RNA, 17 nt, Human
gccugagacccaggacu

SEQ ID NO: 3447800 - RNA, 14 nt, Human
gccugagaggcagg

SEQ ID NO: 3447801 - RNA, 18 nt, Human
gccugagaggcaggcaua

SEQ ID NO: 3447802 - RNA, 20 nt, Human
gccugagaggcaggcauaga

SEQ ID NO: 3447803 - RNA, 13 nt, Human
gccugagaugccu

SEQ ID NO: 3447804 - RNA, 14 nt, Human
gccugagaugccug

SEQ ID NO: 3447805 - RNA, 16 nt, Human
gccugagauuucaucu

SEQ ID NO: 3447806 - RNA, 16 nt, Human
gccugagcaguccuug

SEQ ID NO: 3447807 - RNA, 23 nt, Human
gccuuuuuuccccagacuuguug

SEQ ID NO: 3447808 - RNA, 15 nt, Human
gccuuuuuucuguau

SEQ ID NO: 3447809 - RNA, 17 nt, Human
gcgaacccuuuauuuga

SEQ ID NO: 3447810 - RNA, 19 nt, Human
gcgaagacccucuugccca

SEQ ID NO: 3447811 - RNA, 22 nt, Human
gcgaagacccucuugcccaucc

SEQ ID NO: 3447812 - RNA, 16 nt, Human
gcgaaguagcuugcuc

SEQ ID NO: 3447813 - RNA, 20 nt, Human
gcgaaguauauaaauuggcu

SEQ ID NO: 3447814 - RNA, 12 nt, Human
gcgaauauuuug

SEQ ID NO: 3447815 - RNA, 15 nt, Human
gcgaauccaagcucc

SEQ ID NO: 3447816 - RNA, 22 nt, Human
gcgaauccaagcucccugcccc

SEQ ID NO: 3447817 - RNA, 16 nt, Human
gcgaaucuuuuuuagc

SEQ ID NO: 3447818 - RNA, 22 nt, Human
gcgaaugguagucuaaccaaau

SEQ ID NO: 3447819 - RNA, 16 nt, Human
gcgaauuuuaaaagau

SEQ ID NO: 3447820 - RNA, 18 nt, Human
gcgacacugggaggccag

SEQ ID NO: 3447821 - RNA, 18 nt, Human
gcucagggaccauggcuu

SEQ ID NO: 3447822 - RNA, 20 nt, Human
gcucagggccaugcugaggc

SEQ ID NO: 3447823 - RNA, 15 nt, Human
gcucaggggcagcuc

SEQ ID NO: 3447824 - RNA, 15 nt, Human
gcucaggucccuggg

SEQ ID NO: 3447825 - RNA, 14 nt, Human
gcucaggugucccu

SEQ ID NO: 3447826 - RNA, 17 nt, Human
gcucaggugucccugca

SEQ ID NO: 3447827 - RNA, 12 nt, Human
gcucaguaaacg

SEQ ID NO: 3447828 - RNA, 16 nt, Human
gcucaguaauuugagg

SEQ ID NO: 3447829 - RNA, 14 nt, Human
gcucagucucagga

SEQ ID NO: 3447830 - RNA, 17 nt, Human
gcucagucucaggagca

SEQ ID NO: 3447831 - RNA, 21 nt, Human
gcucagucucaggagcauggg

SEQ ID NO: 3447832 - RNA, 14 nt, Human
gcucagucucccuu

SEQ ID NO: 3447833 - RNA, 16 nt, Human
gcucagucucccuuuc

SEQ ID NO: 3447834 - RNA, 23 nt, Human
gcucagucuucccuagggcuggg

SEQ ID NO: 3447835 - RNA, 17 nt, Human
gcucagugaaguugcug

SEQ ID NO: 3447836 - RNA, 17 nt, Human
gcucagugcaaccucug

SEQ ID NO: 3447837 - RNA, 16 nt, Human
gcucaguucagaauca

SEQ ID NO: 3447838 - RNA, 12 nt, Human
gcucaguuguag

SEQ ID NO: 3447839 - RNA, 17 nt, Human
gcucaguuguagaaugu

SEQ ID NO: 3447840 - RNA, 23 nt, Human
gcucaguuguagaauguauugua

SEQ ID NO: 3447841 - RNA, 20 nt, Human
gcucauacaggaaugaagcc

SEQ ID NO: 3447842 - RNA, 15 nt, Human
gcucauauuucccau

SEQ ID NO: 3447843 - RNA, 15 nt, Human
gcucaucagaaacaa

SEQ ID NO: 3447844 - RNA, 19 nt, Human
gcucaucauucucugucuc

SEQ ID NO: 3447845 - RNA, 14 nt, Human
gcucaucugcuggu

SEQ ID NO: 3447846 - RNA, 17 nt, Human
gcucaugcauaguccca

SEQ ID NO: 3447847 - RNA, 18 nt, Human
gcucauggacuucugcca

SEQ ID NO: 3447848 - RNA, 14 nt, Human
gcucauuaaacuuu

SEQ ID NO: 3447849 - RNA, 18 nt, Human
gcuccaaacccucgaggc

SEQ ID NO: 3447850 - RNA, 20 nt, Human
gcuccaaagucauaauugca

SEQ ID NO: 3447851 - RNA, 17 nt, Human
gcuccaaaugcagcuuu

SEQ ID NO: 3447852 - RNA, 20 nt, Human
gcuccaaccgggaugggagc

SEQ ID NO: 3447853 - RNA, 15 nt, Human
gcuccaaccugcaaa

SEQ ID NO: 3447854 - RNA, 14 nt, Human
gcuccaagaccuag

SEQ ID NO: 3447855 - RNA, 14 nt, Human
gcuccaagauucua

SEQ ID NO: 3447856 - RNA, 15 nt, Human
gcuccaagcucccag

SEQ ID NO: 3447857 - RNA, 16 nt, Human
gcuccacacacacaaa

SEQ ID NO: 3447858 - RNA, 17 nt, Human
gcuccacacacacaaaa

SEQ ID NO: 3447859 - RNA, 22 nt, Human
gcuccacacccucucccaggac

SEQ ID NO: 3447860 - RNA, 19 nt, Human
gcuccaccaagaaagcagg

SEQ ID NO: 3447861 - RNA, 12 nt, Human
gcuccaccacau

SEQ ID NO: 3447862 - RNA, 20 nt, Human
gcuccaccagcaucaccugc

SEQ ID NO: 3447863 - RNA, 16 nt, Human
gcuccaccccacucac

SEQ ID NO: 3447864 - RNA, 19 nt, Human
gcuccacccuggccgaguc

SEQ ID NO: 3447865 - RNA, 14 nt, Human
gcuccacccuuggc

SEQ ID NO: 3447866 - RNA, 17 nt, Human
gcuccacccuuggccug

SEQ ID NO: 3447867 - RNA, 19 nt, Human
gcuccaccuugcagcucuc

SEQ ID NO: 3447868 - RNA, 21 nt, Human
gcuccacucugacuggcacag

SEQ ID NO: 3447869 - RNA, 16 nt, Human
gcuccacucugcuucu

SEQ ID NO: 3447870 - RNA, 17 nt, Human
gcuccacucugcuucuc

SEQ ID NO: 3447871 - RNA, 23 nt, Human
gcuccacucugcuucucugacuu

SEQ ID NO: 3447872 - RNA, 18 nt, Human
gcuccacuuggucuguga

SEQ ID NO: 3447873 - RNA, 21 nt, Human
gcuccagaauuuggaaauccu

SEQ ID NO: 3447874 - RNA, 15 nt, Human
gcuccagacccccag

SEQ ID NO: 3447875 - RNA, 17 nt, Human
gcuccagacccccagca

SEQ ID NO: 3447876 - RNA, 13 nt, Human
gcuccagaccuga

SEQ ID NO: 3447877 - RNA, 22 nt, Human
gcuccagaccugauccuggagg

SEQ ID NO: 3447878 - RNA, 12 nt, Human
gcuccagagggc

SEQ ID NO: 3447879 - RNA, 18 nt, Human
gcuccagaugcagggcag

SEQ ID NO: 3447880 - RNA, 23 nt, Human
gcuccagcaacacagccugggcc

SEQ ID NO: 3447881 - RNA, 22 nt, Human
gcuccagccaaccccuguggag

SEQ ID NO: 3447882 - RNA, 14 nt, Human
gcuccagccaucuc

SEQ ID NO: 3447883 - RNA, 13 nt, Human
gcuccagcucacc

SEQ ID NO: 3447884 - RNA, 17 nt, Human
gcuccagcucaccagcc

SEQ ID NO: 3447885 - RNA, 18 nt, Human
gcuccagcucaccagccc

SEQ ID NO: 3447886 - RNA, 13 nt, Human
gcuccagcugccc

SEQ ID NO: 3447887 - RNA, 16 nt, Human
gcuccagcugccccgg

SEQ ID NO: 3447888 - RNA, 17 nt, Human
gcuccagcuggccggga

SEQ ID NO: 3447889 - RNA, 20 nt, Human
gcuccagcuggccgggagcc

SEQ ID NO: 3447890 - RNA, 17 nt, Human
gcuccagcuuucugcca

SEQ ID NO: 3447891 - RNA, 15 nt, Human
gcuccaggcacccag

SEQ ID NO: 3447892 - RNA, 15 nt, Human
gcuccaggcagcacc

SEQ ID NO: 3447893 - RNA, 20 nt, Human
gcuccaggcagcacccaggu

SEQ ID NO: 3447894 - RNA, 15 nt, Human
gcuccaggccugcag

SEQ ID NO: 3447895 - RNA, 19 nt, Human
gcuccaggccugcagcagg

SEQ ID NO: 3447896 - RNA, 12 nt, Human
gcuccaggcucc

SEQ ID NO: 3447897 - RNA, 13 nt, Human
gcuccaggcuccu

SEQ ID NO: 3447898 - RNA, 20 nt, Human
gcuccagggaauccaagccu

SEQ ID NO: 3447899 - RNA, 19 nt, Human
gcuccagggaugauucaag

SEQ ID NO: 3447900 - RNA, 14 nt, Human
gcuccaguccugcu

SEQ ID NO: 3447901 - RNA, 17 nt, Human
gcuccagucugcugccc

SEQ ID NO: 3447902 - RNA, 19 nt, Human
gcuccaguguccugagcuc

SEQ ID NO: 3447903 - RNA, 23 nt, Human
gcuccaguguccugagcucagcg

SEQ ID NO: 3447904 - RNA, 20 nt, Human
gcuccauacacacgcugccu

SEQ ID NO: 3447905 - RNA, 17 nt, Human
gcuccauccuccuggga

SEQ ID NO: 3447906 - RNA, 22 nt, Human
gcuccauuuucuuauugcgcug

SEQ ID NO: 3447907 - RNA, 23 nt, Human
gcucccaacacaaggugggcagg

SEQ ID NO: 3447908 - RNA, 12 nt, Human
gcucccaaggga

SEQ ID NO: 3447909 - RNA, 16 nt, Human
gcucccaaggggccug

SEQ ID NO: 3447910 - RNA, 15 nt, Human
gcucccacaagccuc

SEQ ID NO: 3447911 - RNA, 16 nt, Human
gcucccacaagccuga

SEQ ID NO: 3447912 - RNA, 13 nt, Human
gcucccacagaac

SEQ ID NO: 3447913 - RNA, 14 nt, Human
gcucccacaggcag

SEQ ID NO: 3447914 - RNA, 17 nt, Human
gcucccacaggcagcuu

SEQ ID NO: 3447915 - RNA, 18 nt, Human
gcucccacaggcagcuuu

SEQ ID NO: 3447916 - RNA, 16 nt, Human
gcucccacaggcccuu

SEQ ID NO: 3447917 - RNA, 21 nt, Human
gcucccacaggcccuuccucu

SEQ ID NO: 3447918 - RNA, 16 nt, Human
gcucccacauucugau

SEQ ID NO: 3447919 - RNA, 19 nt, Human
gcucccagcagcccuaagg

SEQ ID NO: 3447920 - RNA, 16 nt, Human
gcucccagccaggccc

SEQ ID NO: 3447921 - RNA, 16 nt, Human
gcucccaggaccacag

SEQ ID NO: 3447922 - RNA, 12 nt, Human
gcucccaggccg

SEQ ID NO: 3447923 - RNA, 22 nt, Human
gcucccagggacaccugggaga

SEQ ID NO: 3447924 - RNA, 22 nt, Human
gcucccagggccaugaacuuug

SEQ ID NO: 3447925 - RNA, 18 nt, Human
gcucccaggggucucccu

SEQ ID NO: 3447926 - RNA, 19 nt, Human
gcucccaggggucucccug

SEQ ID NO: 3447927 - RNA, 19 nt, Human
gcucccaggugcagccaga

SEQ ID NO: 3447928 - RNA, 18 nt, Human
gcucccagugucuuccug

SEQ ID NO: 3447929 - RNA, 23 nt, Human
gcucccagugucuuccugugggg

SEQ ID NO: 3447930 - RNA, 17 nt, Human
gcucccauuucuacucu

SEQ ID NO: 3447931 - RNA, 18 nt, Human
gcucccauuucuacucuc

SEQ ID NO: 3447932 - RNA, 22 nt, Human
gcuccccacagcgucccuggcg

SEQ ID NO: 3447933 - RNA, 17 nt, Human
gcuccccacucugcucu

SEQ ID NO: 3447934 - RNA, 18 nt, Human
gcuccccacucugcucug

SEQ ID NO: 3447935 - RNA, 19 nt, Human
gcuccccacucugcucuga

SEQ ID NO: 3447936 - RNA, 19 nt, Human
gcuccccacugccuacugc

SEQ ID NO: 3447937 - RNA, 16 nt, Human
gcuccccagcccaggg

SEQ ID NO: 3447938 - RNA, 16 nt, Human
gcuccccagcccuggc

SEQ ID NO: 3447939 - RNA, 18 nt, Human
gcuccccagcccuggcuc

SEQ ID NO: 3447940 - RNA, 21 nt, Human
gcuccccagcccuggcucugc

SEQ ID NO: 3447941 - RNA, 13 nt, Human
gcuccccagugaa

SEQ ID NO: 3447942 - RNA, 20 nt, Human
gcucccccacccccucccca

SEQ ID NO: 3447943 - RNA, 22 nt, Human
gcucccccagcaaagcccccag

SEQ ID NO: 3447944 - RNA, 18 nt, Human
gcucccccauccuccccu

SEQ ID NO: 3447945 - RNA, 21 nt, Human
gcuccccucuauuuagcauga

SEQ ID NO: 3447946 - RNA, 13 nt, Human
gcuccccugagga

SEQ ID NO: 3447947 - RNA, 16 nt, Human
gcuccccugcagcccu

SEQ ID NO: 3447948 - RNA, 17 nt, Human
gcuccccugcagcccug

SEQ ID NO: 3447949 - RNA, 19 nt, Human
gcuccccugcagcccuggc

SEQ ID NO: 3447950 - RNA, 13 nt, Human
gcuccccuucccc

SEQ ID NO: 3447951 - RNA, 20 nt, Human
gcuccccuuccccuuccuuc

SEQ ID NO: 3447952 - RNA, 14 nt, Human
gcgcuauuacaaau

SEQ ID NO: 3447953 - RNA, 14 nt, Human
gcgcucaguaaacg

SEQ ID NO: 3447954 - RNA, 22 nt, Human
gcgcuccgggacguggcaccuc

SEQ ID NO: 3447955 - RNA, 18 nt, Human
gcgcuccuggcccagccu

SEQ ID NO: 3447956 - RNA, 20 nt, Human
gcgcuccuggcccagccuuu

SEQ ID NO: 3447957 - RNA, 23 nt, Human
gcgcucuguggaugccagggccg

SEQ ID NO: 3447958 - RNA, 23 nt, Human
gcgcugacaaccaccgcucccca

SEQ ID NO: 3447959 - RNA, 10 nt, Human
gcgcuggccc

SEQ ID NO: 3447960 - RNA, 13 nt, Human
gcgcuggcccagc

SEQ ID NO: 3447961 - RNA, 14 nt, Human
gcgcuggcccagcc

SEQ ID NO: 3447962 - RNA, 15 nt, Human
gcgcuggcccagccg

SEQ ID NO: 3447963 - RNA, 16 nt, Human
gcgcuggcccagccgg

SEQ ID NO: 3447964 - RNA, 19 nt, Human
gcgcuggcccagccggccu

SEQ ID NO: 3447965 - RNA, 15 nt, Human
gcgcugggcacuucc

SEQ ID NO: 3447966 - RNA, 23 nt, Human
gcgcugucaggauugcgagagau

SEQ ID NO: 3447967 - RNA, 21 nt, Human
gcgcuucacuuggguccaggc

SEQ ID NO: 3447968 - RNA, 13 nt, Human
gcgcuugcuggcc

SEQ ID NO: 3447969 - RNA, 15 nt, Human
gcgcuugcuggccag

SEQ ID NO: 3447970 - RNA, 13 nt, Human
gcgcuugggcgcc

SEQ ID NO: 3447971 - RNA, 23 nt, Human
gcgcuugggcgccgugcugggca

SEQ ID NO: 3447972 - RNA, 14 nt, Human
gcgcuuugggaggc

SEQ ID NO: 3447973 - RNA, 17 nt, Human
gcgcuuuugcuggucac

SEQ ID NO: 3447974 - RNA, 11 nt, Human
gcggacagcca

SEQ ID NO: 3447975 - RNA, 13 nt, Human
gcggacagccacg

SEQ ID NO: 3447976 - RNA, 16 nt, Human
gcggacaguggcagga

SEQ ID NO: 3447977 - RNA, 14 nt, Human
gcggacgggcuguc

SEQ ID NO: 3447978 - RNA, 22 nt, Human
gcggagagaggccuugucccag

SEQ ID NO: 3447979 - RNA, 15 nt, Human
gcggagaguacagug

SEQ ID NO: 3447980 - RNA, 16 nt, Human
gcggagaguacaguga

SEQ ID NO: 3447981 - RNA, 22 nt, Human
gcggagaguacagugagccaag

SEQ ID NO: 3447982 - RNA, 18 nt, Human
gcggagcaagaggaggcc

SEQ ID NO: 3447983 - RNA, 13 nt, Human
gcucccucucccc

SEQ ID NO: 3447984 - RNA, 15 nt, Human
gcucccucucccccu

SEQ ID NO: 3447985 - RNA, 13 nt, Human
gcucccucugccu

SEQ ID NO: 3447986 - RNA, 23 nt, Human
gcucccucugccugaaccuucca

SEQ ID NO: 3447987 - RNA, 19 nt, Human
gcucccucuuggucuuccc

SEQ ID NO: 3447988 - RNA, 13 nt, Human
gcucccugaagcc

SEQ ID NO: 3447989 - RNA, 15 nt, Human
gcucccugaagccag

SEQ ID NO: 3447990 - RNA, 18 nt, Human
gcucccugaagccagccu

SEQ ID NO: 3447991 - RNA, 18 nt, Human
gcucccugacugggaguu

SEQ ID NO: 3447992 - RNA, 15 nt, Human
gcucccugccccaaa

SEQ ID NO: 3447993 - RNA, 13 nt, Human
gcucccuggagcc

SEQ ID NO: 3447994 - RNA, 23 nt, Human
gcucccuguaggguccaaccaga

SEQ ID NO: 3447995 - RNA, 22 nt, Human
gcucccugugacaaaauuuuau

SEQ ID NO: 3447996 - RNA, 16 nt, Human
gcucccugugccccca

SEQ ID NO: 3447997 - RNA, 15 nt, Human
gcucccuucagcccc

SEQ ID NO: 3447998 - RNA, 19 nt, Human
gcucccuucagcccccagc

SEQ ID NO: 3447999 - RNA, 20 nt, Human
gcucccuucccaccucucuc

SEQ ID NO: 3448000 - RNA, 23 nt, Human
gcuccgacuugugcacaggcaga

SEQ ID NO: 3448001 - RNA, 17 nt, Human
gcuccgcaggacuuccc

SEQ ID NO: 3448002 - RNA, 14 nt, Human
gcuccgccucugcu

SEQ ID NO: 3448003 - RNA, 17 nt, Human
gcuccgccucugcuggc

SEQ ID NO: 3448004 - RNA, 18 nt, Human
gcuccgcuuucuacccag

SEQ ID NO: 3448005 - RNA, 22 nt, Human
gcuccggcguguguucaguguu

SEQ ID NO: 3448006 - RNA, 23 nt, Human
gcuccggcguguguucaguguua

SEQ ID NO: 3448007 - RNA, 22 nt, Human
gcuccgggacguggcaccuccu

SEQ ID NO: 3448008 - RNA, 15 nt, Human
gcuccgggcuccgac

SEQ ID NO: 3448009 - RNA, 22 nt, Human
gcuccguccaggagccugugcc

SEQ ID NO: 3448010 - RNA, 13 nt, Human
gcuccgugccucc

SEQ ID NO: 3448011 - RNA, 13 nt, Human
gcuccguggagga

SEQ ID NO: 3448012 - RNA, 15 nt, Human
gcuccuagagggagg

SEQ ID NO: 3448013 - RNA, 16 nt, Human
gcuccuagagggaggg

SEQ ID NO: 3448014 - RNA, 14 nt, Human
gcuccuagcagaga

SEQ ID NO: 3448015 - RNA, 14 nt, Human
gcuccuaucugugu

SEQ ID NO: 3448016 - RNA, 22 nt, Human
gcuccucaaccccuccccucca

SEQ ID NO: 3448017 - RNA, 14 nt, Human
gcuccucacauagc

SEQ ID NO: 3448018 - RNA, 16 nt, Human
gcuccucacugcccgc

SEQ ID NO: 3448019 - RNA, 18 nt, Human
gcuccucacugcccgcac

SEQ ID NO: 3448020 - RNA, 18 nt, Human
gcuccuccagggccacgu

SEQ ID NO: 3448021 - RNA, 23 nt, Human
gcuccuccagggccacgugccag

SEQ ID NO: 3448022 - RNA, 11 nt, Human
gcuccucccac

SEQ ID NO: 3448023 - RNA, 12 nt, Human
gcuccucccagc

SEQ ID NO: 3448024 - RNA, 21 nt, Human
gcuccucccucccucugccgg

SEQ ID NO: 3448025 - RNA, 21 nt, Human
gcuccucccucugaggcugua

SEQ ID NO: 3448026 - RNA, 22 nt, Human
gcuccucccucugaggcuguag

SEQ ID NO: 3448027 - RNA, 14 nt, Human
gcuccucccuggcu

SEQ ID NO: 3448028 - RNA, 23 nt, Human
gcuccucccuggcugcccuggcc

SEQ ID NO: 3448029 - RNA, 20 nt, Human
gcuccuccgugcuuccucag

SEQ ID NO: 3448030 - RNA, 17 nt, Human
gcuccuccuucugcugc

SEQ ID NO: 3448031 - RNA, 15 nt, Human
gcuccucgagggcag

SEQ ID NO: 3448032 - RNA, 18 nt, Human
gcuccucucacuucccag

SEQ ID NO: 3448033 - RNA, 14 nt, Human
gcuccucuccaggc

SEQ ID NO: 3448034 - RNA, 17 nt, Human
gcuccucuccagucuga

SEQ ID NO: 3448035 - RNA, 15 nt, Human
gcuccucuccuggag

SEQ ID NO: 3448036 - RNA, 16 nt, Human
gcuccucugggcagga

SEQ ID NO: 3448037 - RNA, 13 nt, Human
gcuccucugucuc

SEQ ID NO: 3448038 - RNA, 17 nt, Human
gcuccucugucucgagc

SEQ ID NO: 3448039 - RNA, 14 nt, Human
gcuccucuguggug

SEQ ID NO: 3448040 - RNA, 21 nt, Human
gcuccugaccaguugcaguca

SEQ ID NO: 3448041 - RNA, 16 nt, Human
gcuccugagcccccag

SEQ ID NO: 3448042 - RNA, 22 nt, Human
gcuccugaggggcaucugcccc

SEQ ID NO: 3448043 - RNA, 11 nt, Human
gcuccugcagc

SEQ ID NO: 3448044 - RNA, 15 nt, Human
gcuccugcagcaugg

SEQ ID NO: 3448045 - RNA, 11 nt, Human
gcuccugccca

SEQ ID NO: 3448046 - RNA, 21 nt, Human
gcuccuggaaaggcucagucu

SEQ ID NO: 3448047 - RNA, 22 nt, Human
gcuccuggaaaggcucagucuc

SEQ ID NO: 3448048 - RNA, 18 nt, Human
gcuccuggcagaagggag

SEQ ID NO: 3448049 - RNA, 22 nt, Human
gcuccuggcagaagggagcagc

SEQ ID NO: 3448050 - RNA, 19 nt, Human
gcuccuggcccacugcauc

SEQ ID NO: 3448051 - RNA, 20 nt, Human
gcuccuggcccacugcaucg

SEQ ID NO: 3448052 - RNA, 17 nt, Human
gcuccuggccuugcuga

SEQ ID NO: 3448053 - RNA, 22 nt, Human
gcuccugguauggguuucuccc

SEQ ID NO: 3448054 - RNA, 17 nt, Human
gcuccuguccccugcua

SEQ ID NO: 3448055 - RNA, 19 nt, Human
gcuccuguccccugcuaca

SEQ ID NO: 3448056 - RNA, 15 nt, Human
gcuccuguccuccca

SEQ ID NO: 3448057 - RNA, 22 nt, Human
gcuccuguccucccauccccug

SEQ ID NO: 3448058 - RNA, 16 nt, Human
gcuccugucugccagc

SEQ ID NO: 3448059 - RNA, 17 nt, Human
gcuccugucugccagcc

SEQ ID NO: 3448060 - RNA, 18 nt, Human
gcuccugucugccagcca

SEQ ID NO: 3448061 - RNA, 15 nt, Human
gcuccugugcccuua

SEQ ID NO: 3448062 - RNA, 21 nt, Human
gcuccugugcuacuuugccuu

SEQ ID NO: 3448063 - RNA, 22 nt, Human
gcuccugugcuuucccugaacu

SEQ ID NO: 3448064 - RNA, 17 nt, Human
gcuccuuaaggcucuuu

SEQ ID NO: 3448065 - RNA, 21 nt, Human
gcuccuuaaggcucuuuugua

SEQ ID NO: 3448066 - RNA, 13 nt, Human
gcuccuuagcugc

SEQ ID NO: 3448067 - RNA, 19 nt, Human
gcuccuuagcugccaagcc

SEQ ID NO: 3448068 - RNA, 21 nt, Human
gcuccuucaacaaggcuugcu

SEQ ID NO: 3448069 - RNA, 22 nt, Human
gcuccuucaacaaggcuugcug

SEQ ID NO: 3448070 - RNA, 23 nt, Human
gcuccuucccaggaguggaggag

SEQ ID NO: 3448071 - RNA, 13 nt, Human
gcuccuucccauc

SEQ ID NO: 3448072 - RNA, 18 nt, Human
gcuccuuccucugaggcu

SEQ ID NO: 3448073 - RNA, 22 nt, Human
gcuccuuccucugaggcugaaa

SEQ ID NO: 3448074 - RNA, 23 nt, Human
gcuccuuccuggagacugcccag

SEQ ID NO: 3448075 - RNA, 15 nt, Human
gcuccuuccuucacc

SEQ ID NO: 3448076 - RNA, 15 nt, Human
gcuccuucuguccua

SEQ ID NO: 3448077 - RNA, 19 nt, Human
gcuccuuggcuuaccugac

SEQ ID NO: 3448078 - RNA, 21 nt, Human
gcuccuugggaggaagcagaa

SEQ ID NO: 3448079 - RNA, 17 nt, Human
gcuccuugggcccuuug

SEQ ID NO: 3448080 - RNA, 17 nt, Human
gcuccuugugggccugg

SEQ ID NO: 3448081 - RNA, 20 nt, Human
gcuccuugugggccugggcu

SEQ ID NO: 3448082 - RNA, 21 nt, Human
gcuccuugugggccugggcuc

SEQ ID NO: 3448083 - RNA, 17 nt, Human
gcuccuuuagcgcccag

SEQ ID NO: 3448084 - RNA, 20 nt, Human
gcuccuuuguguguguguca

SEQ ID NO: 3448085 - RNA, 14 nt, Human
gcuccuuuuucucc

SEQ ID NO: 3448086 - RNA, 15 nt, Human
gcucgaaucucugug

SEQ ID NO: 3448087 - RNA, 16 nt, Human
gcucgagcaugccugg

SEQ ID NO: 3448088 - RNA, 17 nt, Human
gcucgagcaugccugga

SEQ ID NO: 3448089 - RNA, 21 nt, Human
gcucgagcaugccuggauggg

SEQ ID NO: 3448090 - RNA, 21 nt, Human
gcucgauccaaauugugcuuc

SEQ ID NO: 3448091 - RNA, 15 nt, Human
gcucgccuucccucc

SEQ ID NO: 3448092 - RNA, 15 nt, Human
gcucggaggaagccc

SEQ ID NO: 3448093 - RNA, 14 nt, Human
gcucggaggcccca

SEQ ID NO: 3448094 - RNA, 15 nt, Human
gcucggaggcugccc

SEQ ID NO: 3448095 - RNA, 16 nt, Human
gcucggaggcugcccc

SEQ ID NO: 3448096 - RNA, 15 nt, Human
gcucacgugugugac

SEQ ID NO: 3448097 - RNA, 17 nt, Human
gcucacgugugugacuc

SEQ ID NO: 3448098 - RNA, 23 nt, Human
gcucacucaucaauggggccagu

SEQ ID NO: 3448099 - RNA, 13 nt, Human
gcucacugcagcc

SEQ ID NO: 3448100 - RNA, 16 nt, Human
gcucacugcagccuca

SEQ ID NO: 3448101 - RNA, 12 nt, Human
gcucacugccag

SEQ ID NO: 3448102 - RNA, 23 nt, Human
gcucacugccaggccagccuccg

SEQ ID NO: 3448103 - RNA, 23 nt, Human
gcucacuucugggcuucaucugg

SEQ ID NO: 3448104 - RNA, 17 nt, Human
gcucagaaaauaucccu

SEQ ID NO: 3448105 - RNA, 17 nt, Human
gcucagaacaguaucuu

SEQ ID NO: 3448106 - RNA, 21 nt, Human
gcucagaaggcucuucugacu

SEQ ID NO: 3448107 - RNA, 18 nt, Human
gcucagaaguuucuucuu

SEQ ID NO: 3448108 - RNA, 16 nt, Human
gcucagaccagcucuu

SEQ ID NO: 3448109 - RNA, 15 nt, Human
gcucagacccccacu

SEQ ID NO: 3448110 - RNA, 19 nt, Human
gcucagacccccacucuca

SEQ ID NO: 3448111 - RNA, 13 nt, Human
gcucagagagggu

SEQ ID NO: 3448112 - RNA, 15 nt, Human
gcucagagagggugg

SEQ ID NO: 3448113 - RNA, 20 nt, Human
gcucagaggcgcacugugac

SEQ ID NO: 3448114 - RNA, 19 nt, Human
gcucagagggggacugcug

SEQ ID NO: 3448115 - RNA, 20 nt, Human
gcucagagggggacugcugc

SEQ ID NO: 3448116 - RNA, 21 nt, Human
gcucagaggguguccugcacc

SEQ ID NO: 3448117 - RNA, 15 nt, Human
gcucagcaaggccac

SEQ ID NO: 3448118 - RNA, 11 nt, Human
gcucagcccac

SEQ ID NO: 3448119 - RNA, 14 nt, Human
gcucagcccacccc

SEQ ID NO: 3448120 - RNA, 17 nt, Human
gcucagcccaccccccu

SEQ ID NO: 3448121 - RNA, 15 nt, Human
gcucagccccacccc

SEQ ID NO: 3448122 - RNA, 20 nt, Human
gcucagccccaccccagggc

SEQ ID NO: 3448123 - RNA, 18 nt, Human
gcucagcccucccugccc

SEQ ID NO: 3448124 - RNA, 15 nt, Human
gcucagcccugagga

SEQ ID NO: 3448125 - RNA, 12 nt, Human
gcucagcccugc

SEQ ID NO: 3448126 - RNA, 13 nt, Human
gcucagcccugga

SEQ ID NO: 3448127 - RNA, 16 nt, Human
gcucagcccuggaggu

SEQ ID NO: 3448128 - RNA, 20 nt, Human
gcucagcccuggaggugcca

SEQ ID NO: 3448129 - RNA, 21 nt, Human
gcucagcggggacagcuccuu

SEQ ID NO: 3448130 - RNA, 22 nt, Human
gcucagcggggacagcuccuuc

SEQ ID NO: 3448131 - RNA, 23 nt, Human
gcucagcggggacagcuccuucu

SEQ ID NO: 3448132 - RNA, 20 nt, Human
gcucagcuacugauuuuugu

SEQ ID NO: 3448133 - RNA, 19 nt, Human
gcucagcucggggagccuu

SEQ ID NO: 3448134 - RNA, 15 nt, Human
gcucagcucuggcuc

SEQ ID NO: 3448135 - RNA, 21 nt, Human
gcucagcuuuuugucuuuucu

SEQ ID NO: 3448136 - RNA, 13 nt, Human
gcucaggaaaacg

SEQ ID NO: 3448137 - RNA, 17 nt, Human
gcucaggacagaugcca

SEQ ID NO: 3448138 - RNA, 20 nt, Human
gcucaggacagaugccacac

SEQ ID NO: 3448139 - RNA, 17 nt, Human
gcucaggacucagaagc

SEQ ID NO: 3448140 - RNA, 14 nt, Human
gcucaggagcccug

SEQ ID NO: 3448141 - RNA, 21 nt, Human
gcucaggagcccugggaggcu

SEQ ID NO: 3448142 - RNA, 13 nt, Human
gcucaggaggcuu

SEQ ID NO: 3448143 - RNA, 12 nt, Human
gcucaggcaggg

SEQ ID NO: 3448144 - RNA, 16 nt, Human
gcucaggcaggggccu

SEQ ID NO: 3448145 - RNA, 22 nt, Human
gcucaggcuacuauagguccag

SEQ ID NO: 3448146 - RNA, 22 nt, Human
gcucaggcugcagcuggacaga

SEQ ID NO: 3448147 - RNA, 17 nt, Human
gcucagggaaaggccag

SEQ ID NO: 3448148 - RNA, 17 nt, Human
gcucagggaccacagca

SEQ ID NO: 3448149 - RNA, 19 nt, Human
gcucagggccaugcugagg

SEQ ID NO: 3448150 - RNA, 12 nt, Human
gcucagggccug

SEQ ID NO: 3448151 - RNA, 13 nt, Human
gcucagggccugg

SEQ ID NO: 3448152 - RNA, 17 nt, Human
gcucagggccuggcuca

SEQ ID NO: 3448153 - RNA, 18 nt, Human
gcucagggccuggcucag

SEQ ID NO: 3448154 - RNA, 18 nt, Human
gcucaggggcccuggagc

SEQ ID NO: 3448155 - RNA, 17 nt, Human
gcucagggggcgccugu

SEQ ID NO: 3448156 - RNA, 21 nt, Human
gcucaggucacauaaaacuuu

SEQ ID NO: 3448157 - RNA, 21 nt, Human
gcucaggugcuggggccuggu

SEQ ID NO: 3448158 - RNA, 21 nt, Human
gcucagguggggucacucugg

SEQ ID NO: 3448159 - RNA, 22 nt, Human
gcucagguggggucacucuggc

SEQ ID NO: 3448160 - RNA, 19 nt, Human
gcucagucucccuuucccu

SEQ ID NO: 3448161 - RNA, 18 nt, Human
gcucagugcaaccucugc

SEQ ID NO: 3448162 - RNA, 17 nt, Human
gcucaguggggcagagg

SEQ ID NO: 3448163 - RNA, 17 nt, Human
gcucaguucagaaucac

SEQ ID NO: 3448164 - RNA, 16 nt, Human
gcucaguucuagucuc

SEQ ID NO: 3448165 - RNA, 20 nt, Human
gcucauauuccugcagccug

SEQ ID NO: 3448166 - RNA, 21 nt, Human
gcucauccccaccugucuuca

SEQ ID NO: 3448167 - RNA, 13 nt, Human
gcucaucugcugg

SEQ ID NO: 3448168 - RNA, 15 nt, Human
gcucaucugcugguc

SEQ ID NO: 3448169 - RNA, 16 nt, Human
gcucaucugcuggucc

SEQ ID NO: 3448170 - RNA, 23 nt, Human
gcucaucugcugguccgugggac

SEQ ID NO: 3448171 - RNA, 13 nt, Human
gcucaucuguugu

SEQ ID NO: 3448172 - RNA, 16 nt, Human
gcucaugggccccucu

SEQ ID NO: 3448173 - RNA, 22 nt, Human
gcucaugggccccucugacucc

SEQ ID NO: 3448174 - RNA, 22 nt, Human
gcucaugugugcaacaggguau

SEQ ID NO: 3448175 - RNA, 17 nt, Human
gcucauuaaacuuuuuu

SEQ ID NO: 3448176 - RNA, 21 nt, Human
gcucauuauaaugucauuaaa

SEQ ID NO: 3448177 - RNA, 22 nt, Human
gcucauucagcaucugaccucu

SEQ ID NO: 3448178 - RNA, 15 nt, Human
gcucauucauuuuau

SEQ ID NO: 3448179 - RNA, 17 nt, Human
gcucauucauuuuauau

SEQ ID NO: 3448180 - RNA, 18 nt, Human
gcucauucauuuuauauu

SEQ ID NO: 3448181 - RNA, 23 nt, Human
gcucauucauuuuauauugaaaa

SEQ ID NO: 3448182 - RNA, 18 nt, Human
gcucauucuaaugauggc

SEQ ID NO: 3448183 - RNA, 12 nt, Human
gcucauuuaagu

SEQ ID NO: 3448184 - RNA, 12 nt, Human
gcucauuuacug

SEQ ID NO: 3448185 - RNA, 14 nt, Human
gcucauuucaggau

SEQ ID NO: 3448186 - RNA, 12 nt, Human
gcucauuucaug

SEQ ID NO: 3448187 - RNA, 14 nt, Human
gcucauuuuggacu

SEQ ID NO: 3448188 - RNA, 16 nt, Human
cuucauuagagcaggc

SEQ ID NO: 3448189 - RNA, 14 nt, Human
cuucauuauucucu

SEQ ID NO: 3448190 - RNA, 18 nt, Human
cuucauuauuuuaaaaau

SEQ ID NO: 3448191 - RNA, 22 nt, Human
cuucauucaagucuaugaugcu

SEQ ID NO: 3448192 - RNA, 19 nt, Human
cuucauucaauauugacau

SEQ ID NO: 3448193 - RNA, 22 nt, Human
cuucauucaauauugacauuug

SEQ ID NO: 3448194 - RNA, 13 nt, Human
cuucauucuauca

SEQ ID NO: 3448195 - RNA, 14 nt, Human
cuucauucucguga

SEQ ID NO: 3448196 - RNA, 18 nt, Human
cuucauucugagaccaaa

SEQ ID NO: 3448197 - RNA, 20 nt, Human
cuucauucuugaaagcugug

SEQ ID NO: 3448198 - RNA, 21 nt, Human
cuucauucuugaaagcugugg

SEQ ID NO: 3448199 - RNA, 14 nt, Human
cuucauugagaguu

SEQ ID NO: 3448200 - RNA, 23 nt, Human
cuucauugagaguuuugucuuga

SEQ ID NO: 3448201 - RNA, 15 nt, Human
cuucauuucauugua

SEQ ID NO: 3448202 - RNA, 18 nt, Human
cuucauuucauuguauga

SEQ ID NO: 3448203 - RNA, 18 nt, Human
cuucauuuccugugucuu

SEQ ID NO: 3448204 - RNA, 19 nt, Human
cuucauuucugauauagaa

SEQ ID NO: 3448205 - RNA, 20 nt, Human
cuucauuucugauauagaau

SEQ ID NO: 3448206 - RNA, 13 nt, Human
cuucauuuguguc

SEQ ID NO: 3448207 - RNA, 21 nt, Human
cuucauuuuauuaauauuuuu

SEQ ID NO: 3448208 - RNA, 14 nt, Human
cuuccaaaaauuac

SEQ ID NO: 3448209 - RNA, 16 nt, Human
cuuccaaaaauuauua

SEQ ID NO: 3448210 - RNA, 17 nt, Human
cuuccaaaaauuauuau

SEQ ID NO: 3448211 - RNA, 12 nt, Human
cuuccaaagaaa

SEQ ID NO: 3448212 - RNA, 17 nt, Human
cuuccaaagaauucuua

SEQ ID NO: 3448213 - RNA, 21 nt, Human
cuuccaaagcagagagcauua

SEQ ID NO: 3448214 - RNA, 17 nt, Human
cuuccaaauaauaaagu

SEQ ID NO: 3448215 - RNA, 19 nt, Human
cuuccaaauaauaaagucu

SEQ ID NO: 3448216 - RNA, 19 nt, Human
cuuccaaccauuuaucuug

SEQ ID NO: 3448217 - RNA, 14 nt, Human
cuuccaacugcugc

SEQ ID NO: 3448218 - RNA, 18 nt, Human
cuuccaagaccugacuca

SEQ ID NO: 3448219 - RNA, 13 nt, Human
cuuccacaagagc

SEQ ID NO: 3448220 - RNA, 15 nt, Human
cuuccacaagagccc

SEQ ID NO: 3448221 - RNA, 17 nt, Human
cuuccacaagagcccag

SEQ ID NO: 3448222 - RNA, 18 nt, Human
cuuccacaagagcccagg

SEQ ID NO: 3448223 - RNA, 19 nt, Human
cuuccacaagagcccaggc

SEQ ID NO: 3448224 - RNA, 23 nt, Human
cuuccacaagagcccaggccucc

SEQ ID NO: 3448225 - RNA, 23 nt, Human
cuuccacacccccaccccuugcu

SEQ ID NO: 3448226 - RNA, 18 nt, Human
cuuccacagggucccaca

SEQ ID NO: 3448227 - RNA, 23 nt, Human
cuuccaccaaguuggaacauccu

SEQ ID NO: 3448228 - RNA, 14 nt, Human
cuuccaccagccug

SEQ ID NO: 3448229 - RNA, 16 nt, Human
cuuccaccucacccca

SEQ ID NO: 3448230 - RNA, 16 nt, Human
cuuccacgcugucucc

SEQ ID NO: 3448231 - RNA, 18 nt, Human
cuuccacgcugucuccag

SEQ ID NO: 3448232 - RNA, 21 nt, Human
cuuccacgcugucuccagacc

SEQ ID NO: 3448233 - RNA, 20 nt, Human
cuuccacguacugcagccuc

SEQ ID NO: 3448234 - RNA, 21 nt, Human
cuuccacuuuuuuuuguaugu

SEQ ID NO: 3448235 - RNA, 17 nt, Human
cuuccagaaucccaaga

SEQ ID NO: 3448236 - RNA, 12 nt, Human
cuuccagacaua

SEQ ID NO: 3448237 - RNA, 18 nt, Human
cuuccagagaguccucug

SEQ ID NO: 3448238 - RNA, 20 nt, Human
cuuccagagaguccucugga

SEQ ID NO: 3448239 - RNA, 21 nt, Human
cuuccagagaguccucuggau

SEQ ID NO: 3448240 - RNA, 19 nt, Human
gcuccagagcaacgaccag

SEQ ID NO: 3448241 - RNA, 17 nt, Human
gcuccagaugcagggca

SEQ ID NO: 3448242 - RNA, 21 nt, Human
gcuccagaugcagggcaguca

SEQ ID NO: 3448243 - RNA, 22 nt, Human
gcuccagaugcagggcagucau

SEQ ID NO: 3448244 - RNA, 22 nt, Human
gcuccagcaacacagccugggc

SEQ ID NO: 3448245 - RNA, 19 nt, Human
gcuccagcaccauccgcca

SEQ ID NO: 3448246 - RNA, 16 nt, Human
gcuccagccaaccccu

SEQ ID NO: 3448247 - RNA, 18 nt, Human
gcuccagccccuuuccaa

SEQ ID NO: 3448248 - RNA, 12 nt, Human
gcuccagccuga

SEQ ID NO: 3448249 - RNA, 13 nt, Human
gcuccagccugac

SEQ ID NO: 3448250 - RNA, 21 nt, Human
gcuccagcgaucucuccacug

SEQ ID NO: 3448251 - RNA, 12 nt, Human
gcuccagcugcc

SEQ ID NO: 3448252 - RNA, 21 nt, Human
gcuccagcugcucugucuucu

SEQ ID NO: 3448253 - RNA, 11 nt, Human
gcuccagcugu

SEQ ID NO: 3448254 - RNA, 11 nt, Human
gcuccaggagc

SEQ ID NO: 3448255 - RNA, 15 nt, Human
gcuccaggagcagcc

SEQ ID NO: 3448256 - RNA, 18 nt, Human
gcuccaggagcagccaca

SEQ ID NO: 3448257 - RNA, 12 nt, Human
gcuccaggcagc

SEQ ID NO: 3448258 - RNA, 18 nt, Human
gcuccaggccagggggcc

SEQ ID NO: 3448259 - RNA, 23 nt, Human
gcuccaggcuccuuuagcgccca

SEQ ID NO: 3448260 - RNA, 24 nt, Human
gcuccaggcuccuuuagcgcccag

SEQ ID NO: 3448261 - RNA, 21 nt, Human
gcuccagggaauccaagccuc

SEQ ID NO: 3448262 - RNA, 22 nt, Human
gcuccagggaauccaagccucc

SEQ ID NO: 3448263 - RNA, 23 nt, Human
gcuccagggaauccaagccucca

SEQ ID NO: 3448264 - RNA, 18 nt, Human
gcuccagggagauuuuga

SEQ ID NO: 3448265 - RNA, 13 nt, Human
gcuccagggccag

SEQ ID NO: 3448266 - RNA, 18 nt, Human
gcuccagguggcucugag

SEQ ID NO: 3448267 - RNA, 21 nt, Human
gcuccagguggcucugaggug

SEQ ID NO: 3448268 - RNA, 17 nt, Human
gcuccaguccugcucuc

SEQ ID NO: 3448269 - RNA, 21 nt, Human
gcuccaguccugcucucuacc

SEQ ID NO: 3448270 - RNA, 18 nt, Human
gcuccagucugcugcccu

SEQ ID NO: 3448271 - RNA, 21 nt, Human
gcuccagucugcugcccucca

SEQ ID NO: 3448272 - RNA, 12 nt, Human
gcuccaguggaa

SEQ ID NO: 3448273 - RNA, 22 nt, Human
gcuccaguguccugagcucagc

SEQ ID NO: 3448274 - RNA, 21 nt, Human
gcuccauacacacgcugccuu

SEQ ID NO: 3448275 - RNA, 22 nt, Human
gcuccaucccaaccaggcaccu

SEQ ID NO: 3448276 - RNA, 14 nt, Human
gcuccaucuuauuu

SEQ ID NO: 3448277 - RNA, 17 nt, Human
gcuccaugugccucuuu

SEQ ID NO: 3448278 - RNA, 19 nt, Human
gcuccauuuaaacagaugu

SEQ ID NO: 3448279 - RNA, 23 nt, Human
gcuccauuuaaacagauguccau

SEQ ID NO: 3448280 - RNA, 15 nt, Human
gcucccaaggggccu

SEQ ID NO: 3448281 - RNA, 17 nt, Human
gcucccaaggggccuga

SEQ ID NO: 3448282 - RNA, 19 nt, Human
gcucccacaagccugaggg

SEQ ID NO: 3448283 - RNA, 19 nt, Human
gcucccacagaacacagca

SEQ ID NO: 3448284 - RNA, 20 nt, Human
gcucccacaggcccuuccuc

SEQ ID NO: 3448285 - RNA, 22 nt, Human
gcucccacaggcccuuccucuc

SEQ ID NO: 3448286 - RNA, 22 nt, Human
gcucccaccuccugacacccuu

SEQ ID NO: 3448287 - RNA, 18 nt, Human
gcucccacuucugccaga

SEQ ID NO: 3448288 - RNA, 17 nt, Human
gcucccagccaggcccu

SEQ ID NO: 3448289 - RNA, 14 nt, Human
gcucccagccucag

SEQ ID NO: 3448290 - RNA, 13 nt, Human
gcucccaggagcc

SEQ ID NO: 3448291 - RNA, 21 nt, Human
gcucccaggcauuccccagga

SEQ ID NO: 3448292 - RNA, 19 nt, Human
gcucccaggggcucccucc

SEQ ID NO: 3448293 - RNA, 16 nt, Human
gcucccaggggucucc

SEQ ID NO: 3448294 - RNA, 14 nt, Human
gcucccaggugcag

SEQ ID NO: 3448295 - RNA, 13 nt, Human
gcucccagugucu

SEQ ID NO: 3448296 - RNA, 17 nt, Human
gcucccauccugugugu

SEQ ID NO: 3448297 - RNA, 20 nt, Human
gcucccauucacucuuccag

SEQ ID NO: 3448298 - RNA, 15 nt, Human
gcucccauuucuacu

SEQ ID NO: 3448299 - RNA, 19 nt, Human
gcuccccacagcgucccug

SEQ ID NO: 3448300 - RNA, 14 nt, Human
gcuccccacucugc

SEQ ID NO: 3448301 - RNA, 20 nt, Human
gcuccccacucugcucugau

SEQ ID NO: 3448302 - RNA, 13 nt, Human
gcuccccagccca

SEQ ID NO: 3448303 - RNA, 14 nt, Human
gcuccccagcccag

SEQ ID NO: 3448304 - RNA, 14 nt, Human
gcuccccagcccca

SEQ ID NO: 3448305 - RNA, 20 nt, Human
gcucccccagcuccccccac

SEQ ID NO: 3448306 - RNA, 16 nt, Human
gcucccccauccuccc

SEQ ID NO: 3448307 - RNA, 11 nt, Human
gcuccccccag

SEQ ID NO: 3448308 - RNA, 21 nt, Human
gcuccccccagcccccuaaga

SEQ ID NO: 3448309 - RNA, 17 nt, Human
gcucccccgggaggggc

SEQ ID NO: 3448310 - RNA, 17 nt, Human
gcucccccuccaccugc

SEQ ID NO: 3448311 - RNA, 12 nt, Human
gcucccccuguc

SEQ ID NO: 3448312 - RNA, 14 nt, Human
gcucccccuguccc

SEQ ID NO: 3448313 - RNA, 12 nt, Human
gcuccccuccaa

SEQ ID NO: 3448314 - RNA, 21 nt, Human
gcuccccuccccaacugacca

SEQ ID NO: 3448315 - RNA, 15 nt, Human
gcuccccucggagaa

SEQ ID NO: 3448316 - RNA, 21 nt, Human
gcuccccucggagaagagcug

SEQ ID NO: 3448317 - RNA, 19 nt, Human
gcuccccucuauuuagcau

SEQ ID NO: 3448318 - RNA, 12 nt, Human
gcuccccucuuc

SEQ ID NO: 3448319 - RNA, 19 nt, Human
gcucccggggcagggcagc

SEQ ID NO: 3448320 - RNA, 22 nt, Human
gcucccggguccuuggcccccu

SEQ ID NO: 3448321 - RNA, 19 nt, Human
gcucccuaagccagccugg

SEQ ID NO: 3448322 - RNA, 14 nt, Human
gcucccucccagga

SEQ ID NO: 3448323 - RNA, 18 nt, Human
gcucccucccccugcccc

SEQ ID NO: 3448324 - RNA, 17 nt, Human
gcucccuccccugcccu

SEQ ID NO: 3448325 - RNA, 23 nt, Human
gcucccuccccugcccuggucca

SEQ ID NO: 3448326 - RNA, 13 nt, Human
gcucccucccgca

SEQ ID NO: 3448327 - RNA, 16 nt, Human
gcucccuccgccccca

SEQ ID NO: 3448328 - RNA, 16 nt, Human
gcucccuccuccaggc

SEQ ID NO: 3448329 - RNA, 14 nt, Human
gcucccugaagcca

SEQ ID NO: 3448330 - RNA, 24 nt, Human
gcucccugaagccagccuucuucc

SEQ ID NO: 3448331 - RNA, 16 nt, Human
gcucccugacugggag

SEQ ID NO: 3448332 - RNA, 14 nt, Human
gcucccugccccaa

SEQ ID NO: 3448333 - RNA, 12 nt, Human
gcucccuggggg

SEQ ID NO: 3448334 - RNA, 21 nt, Human
gcucccuguaaccucuucaga

SEQ ID NO: 3448335 - RNA, 20 nt, Human
gcucccuucagcccccagcc

SEQ ID NO: 3448336 - RNA, 18 nt, Human
gcucccuugaccugcuga

SEQ ID NO: 3448337 - RNA, 22 nt, Human
gcuccgacuugugcacaggcag

SEQ ID NO: 3448338 - RNA, 15 nt, Human
gcuccgaggacccag

SEQ ID NO: 3448339 - RNA, 16 nt, Human
gcuccgaggacccagg

SEQ ID NO: 3448340 - RNA, 16 nt, Human
gcuccgcaggacuucc

SEQ ID NO: 3448341 - RNA, 12 nt, Human
gcuccgcccuua

SEQ ID NO: 3448342 - RNA, 20 nt, Human
gcuccgcccuuaguccccca

SEQ ID NO: 3448343 - RNA, 15 nt, Human
gcuccgccuggccug

SEQ ID NO: 3448344 - RNA, 15 nt, Human
gcuccgcugccgugc

SEQ ID NO: 3448345 - RNA, 12 nt, Human
gcuccgcugcuc

SEQ ID NO: 3448346 - RNA, 19 nt, Human
gcuccgcugcuccuuggcu

SEQ ID NO: 3448347 - RNA, 13 nt, Human
gcuccgcugugug

SEQ ID NO: 3448348 - RNA, 21 nt, Human
gcuccgcuuucuacccagcga

SEQ ID NO: 3448349 - RNA, 21 nt, Human
gcuccggccucugccuuugca

SEQ ID NO: 3448350 - RNA, 16 nt, Human
gcuccgucuccugcgg

SEQ ID NO: 3448351 - RNA, 12 nt, Human
gcuccgucugac

SEQ ID NO: 3448352 - RNA, 17 nt, Human
gcuccgugccuccacca

SEQ ID NO: 3448353 - RNA, 23 nt, Human
gcuccuaacccuuaucaccagcu

SEQ ID NO: 3448354 - RNA, 16 nt, Human
cuucccccauagccac

SEQ ID NO: 3448355 - RNA, 18 nt, Human
cuucccccauagccaccc

SEQ ID NO: 3448356 - RNA, 13 nt, Human
cuucccccucccc

SEQ ID NO: 3448357 - RNA, 18 nt, Human
cuucccccucucccaguu

SEQ ID NO: 3448358 - RNA, 13 nt, Human
cuucccccuucca

SEQ ID NO: 3448359 - RNA, 18 nt, Human
cuucccccuuuuuugucc

SEQ ID NO: 3448360 - RNA, 22 nt, Human
cuuccccgagggaugaugccac

SEQ ID NO: 3448361 - RNA, 18 nt, Human
cuuccccggagggcugcg

SEQ ID NO: 3448362 - RNA, 12 nt, Human
cuuccccucacu

SEQ ID NO: 3448363 - RNA, 19 nt, Human
cuuccccucuaaugcucac

SEQ ID NO: 3448364 - RNA, 21 nt, Human
cuuccccucuaaugcucacgc

SEQ ID NO: 3448365 - RNA, 21 nt, Human
cuuccccuuauccucccugua

SEQ ID NO: 3448366 - RNA, 14 nt, Human
cuuccccuuccuuc

SEQ ID NO: 3448367 - RNA, 16 nt, Human
cuuccccuugcccagg

SEQ ID NO: 3448368 - RNA, 17 nt, Human
cuuccccuugcccuugc

SEQ ID NO: 3448369 - RNA, 15 nt, Human
cuucccgccagaggg

SEQ ID NO: 3448370 - RNA, 23 nt, Human
cuucccgcucagcccucccugcc

SEQ ID NO: 3448371 - RNA, 19 nt, Human
cuucccgggccagggcugc

SEQ ID NO: 3448372 - RNA, 21 nt, Human
cuucccgucccauauccugcc

SEQ ID NO: 3448373 - RNA, 23 nt, Human
cuucccgucccauauccugccuc

SEQ ID NO: 3448374 - RNA, 12 nt, Human
cuucccuaaucu

SEQ ID NO: 3448375 - RNA, 20 nt, Human
cuucccuagaggguuccugu

SEQ ID NO: 3448376 - RNA, 22 nt, Human
cuucccuagcuuuagacccugg

SEQ ID NO: 3448377 - RNA, 23 nt, Human
cuucccuagcuuuagacccuggg

SEQ ID NO: 3448378 - RNA, 16 nt, Human
cuucccuaucuuugcc

SEQ ID NO: 3448379 - RNA, 18 nt, Human
cuucccuaucuuugccac

SEQ ID NO: 3448380 - RNA, 15 nt, Human
cuucccucacaccgc

SEQ ID NO: 3448381 - RNA, 13 nt, Human
cuucccucccugc

SEQ ID NO: 3448382 - RNA, 14 nt, Human
cuucccucccugcu

SEQ ID NO: 3448383 - RNA, 13 nt, Human
cuucccuccuccc

SEQ ID NO: 3448384 - RNA, 18 nt, Human
cuucccuccucccauguc

SEQ ID NO: 3448385 - RNA, 16 nt, Human
gcugaggcgggagaau

SEQ ID NO: 3448386 - RNA, 16 nt, Human
gcugaggcuggcacag

SEQ ID NO: 3448387 - RNA, 15 nt, Human
gcugaggcuggggga

SEQ ID NO: 3448388 - RNA, 22 nt, Human
gcugaggcugggggagagccgu

SEQ ID NO: 3448389 - RNA, 14 nt, Human
gcugagggagccug

SEQ ID NO: 3448390 - RNA, 16 nt, Human
gcugagggcagacugg

SEQ ID NO: 3448391 - RNA, 13 nt, Human
gcugagggcagcu

SEQ ID NO: 3448392 - RNA, 20 nt, Human
gcugagggcaguucgcagcc

SEQ ID NO: 3448393 - RNA, 13 nt, Human
gcugagggccugc

SEQ ID NO: 3448394 - RNA, 23 nt, Human
gcugagggugagugggugaauaa

SEQ ID NO: 3448395 - RNA, 19 nt, Human
gcugaggguguuucuuccu

SEQ ID NO: 3448396 - RNA, 15 nt, Human
gcugaggugcccagg

SEQ ID NO: 3448397 - RNA, 20 nt, Human
gcugaggugcccaggagaag

SEQ ID NO: 3448398 - RNA, 13 nt, Human
gcugagguuccuc

SEQ ID NO: 3448399 - RNA, 17 nt, Human
gcugagguuccucugcc

SEQ ID NO: 3448400 - RNA, 15 nt, Human
gcugaguagcucugc

SEQ ID NO: 3448401 - RNA, 17 nt, Human
gcugaguaggaggccuc

SEQ ID NO: 3448402 - RNA, 13 nt, Human
gcugagucuccca

SEQ ID NO: 3448403 - RNA, 16 nt, Human
gcugagucucccaagg

SEQ ID NO: 3448404 - RNA, 22 nt, Human
gcugagugaaaaaucuguggaa

SEQ ID NO: 3448405 - RNA, 15 nt, Human
gcugagugagcugaa

SEQ ID NO: 3448406 - RNA, 21 nt, Human
gcugaguggcaggggacagga

SEQ ID NO: 3448407 - RNA, 17 nt, Human
gcugagugggagaaggc

SEQ ID NO: 3448408 - RNA, 21 nt, Human
gcugauaaaagauacauuugu

SEQ ID NO: 3448409 - RNA, 19 nt, Human
gcugauaauuuuaaauucu

SEQ ID NO: 3448410 - RNA, 20 nt, Human
cuucuggagucuccaguggu

SEQ ID NO: 3448411 - RNA, 18 nt, Human
cuucuggauggauuuuau

SEQ ID NO: 3448412 - RNA, 18 nt, Human
cuucuggcagauucaaau

SEQ ID NO: 3448413 - RNA, 15 nt, Human
cuucuggccucccac

SEQ ID NO: 3448414 - RNA, 13 nt, Human
cuucuggccuugu

SEQ ID NO: 3448415 - RNA, 14 nt, Human
cuucuggcuuccuu

SEQ ID NO: 3448416 - RNA, 19 nt, Human
cuucugggagggcagcagg

SEQ ID NO: 3448417 - RNA, 16 nt, Human
cuucuggggcaggcug

SEQ ID NO: 3448418 - RNA, 11 nt, Human
cuucugggguc

SEQ ID NO: 3448419 - RNA, 15 nt, Human
cuucuggguggggca

SEQ ID NO: 3448420 - RNA, 17 nt, Human
cuucuggguuccuuccu

SEQ ID NO: 3448421 - RNA, 17 nt, Human
cuucugguacucuccua

SEQ ID NO: 3448422 - RNA, 18 nt, Human
cuucuggugaccuuccaa

SEQ ID NO: 3448423 - RNA, 20 nt, Human
cuucuggugaccuuccaaga

SEQ ID NO: 3448424 - RNA, 19 nt, Human
cuucugguuuaaacuuguu

SEQ ID NO: 3448425 - RNA, 14 nt, Human
cuucuguacgucug

SEQ ID NO: 3448426 - RNA, 20 nt, Human
cuucuguacgucugacaggc

SEQ ID NO: 3448427 - RNA, 21 nt, Human
cuucuguacgucugacaggca

SEQ ID NO: 3448428 - RNA, 11 nt, Human
cuucuguaguu

SEQ ID NO: 3448429 - RNA, 12 nt, Human
cuucuguauaua

SEQ ID NO: 3448430 - RNA, 17 nt, Human
cuucuguauauaaaugg

SEQ ID NO: 3448431 - RNA, 17 nt, Human
cuucuguccugguguca

SEQ ID NO: 3448432 - RNA, 14 nt, Human
cuucugucuccagc

SEQ ID NO: 3448433 - RNA, 18 nt, Human
cuucugucuucacaacag

SEQ ID NO: 3448434 - RNA, 20 nt, Human
cuucugugagacccccacac

SEQ ID NO: 3448435 - RNA, 21 nt, Human
cuucugugagacccccacacc

SEQ ID NO: 3448436 - RNA, 14 nt, Human
cuucugugaugagc

SEQ ID NO: 3448437 - RNA, 17 nt, Human
cuucugugaugagcuga

SEQ ID NO: 3448438 - RNA, 17 nt, Human
cuucugugcaccugggc

SEQ ID NO: 3448439 - RNA, 21 nt, Human
cuucugugcaccugggcucuc

SEQ ID NO: 3448440 - RNA, 23 nt, Human
cuucugugcccagaauacugaug

SEQ ID NO: 3448441 - RNA, 14 nt, Human
cuucugugcccagc

SEQ ID NO: 3448442 - RNA, 16 nt, Human
cuucugugcccagcuc

SEQ ID NO: 3448443 - RNA, 17 nt, Human
cuucugugcccagcuca

SEQ ID NO: 3448444 - RNA, 18 nt, Human
cuucugugcccagcucag

SEQ ID NO: 3448445 - RNA, 15 nt, Human
cuucuguggcucaca

SEQ ID NO: 3448446 - RNA, 19 nt, Human
cuucuguggggacuccggc

SEQ ID NO: 3448447 - RNA, 16 nt, Human
cuucuguggggccccu

SEQ ID NO: 3448448 - RNA, 20 nt, Human
cuucuguggggccccucacc

SEQ ID NO: 3448449 - RNA, 13 nt, Human
cuucuguggguuu

SEQ ID NO: 3448450 - RNA, 13 nt, Human
cuucuguguaucu

SEQ ID NO: 3448451 - RNA, 11 nt, Human
cuucuguguuu

SEQ ID NO: 3448452 - RNA, 14 nt, Human
cuucuguucugcag

SEQ ID NO: 3448453 - RNA, 21 nt, Human
cuucuguugcugccucaugcu

SEQ ID NO: 3448454 - RNA, 20 nt, Human
cuucuguugucaccuucacc

SEQ ID NO: 3448455 - RNA, 21 nt, Human
cuucuguugucaccuucaccu

SEQ ID NO: 3448456 - RNA, 13 nt, Human
cuucuguuucuag

SEQ ID NO: 3448457 - RNA, 16 nt, Human
cuucuguuucuaguug

SEQ ID NO: 3448458 - RNA, 17 nt, Human
cuucuguuuucuguuuc

SEQ ID NO: 3448459 - RNA, 21 nt, Human
cuucuuaaccccaguaagcca

SEQ ID NO: 3448460 - RNA, 12 nt, Human
cuucuuaauuaa

SEQ ID NO: 3448461 - RNA, 14 nt, Human
cuucuuaauuaauu

SEQ ID NO: 3448462 - RNA, 21 nt, Human
cuucuuacuuggaacugaagg

SEQ ID NO: 3448463 - RNA, 22 nt, Human
cuucuuagcuaucauugcuucc

SEQ ID NO: 3448464 - RNA, 16 nt, Human
cuucuuauacauuuga

SEQ ID NO: 3448465 - RNA, 22 nt, Human
cuucuuauggaauugauuugca

SEQ ID NO: 3448466 - RNA, 16 nt, Human
cuucuuauuauauaua

SEQ ID NO: 3448467 - RNA, 14 nt, Human
cuucuucacccagc

SEQ ID NO: 3448468 - RNA, 23 nt, Human
cuucuucacccagcuaaucugua

SEQ ID NO: 3448469 - RNA, 20 nt, Human
cuucuucagaagacacugca

SEQ ID NO: 3448470 - RNA, 14 nt, Human
cuucuucagagacu

SEQ ID NO: 3448471 - RNA, 22 nt, Human
cuucuucagagacuccugcagg

SEQ ID NO: 3448472 - RNA, 14 nt, Human
cuucuucagagcug

SEQ ID NO: 3448473 - RNA, 18 nt, Human
cuucuucagaucagugcu

SEQ ID NO: 3448474 - RNA, 14 nt, Human
cuucuucagggacu

SEQ ID NO: 3448475 - RNA, 12 nt, Human
cuucuucagggc

SEQ ID NO: 3448476 - RNA, 14 nt, Human
cuucuuccauccca

SEQ ID NO: 3448477 - RNA, 15 nt, Human
cuucuuccaucccag

SEQ ID NO: 3448478 - RNA, 20 nt, Human
cuucuuccaucccaggacac

SEQ ID NO: 3448479 - RNA, 15 nt, Human
cuucuuccuuucucu

SEQ ID NO: 3448480 - RNA, 17 nt, Human
cuucuucggggaacucc

SEQ ID NO: 3448481 - RNA, 20 nt, Human
cuucuucggggaacuccugg

SEQ ID NO: 3448482 - RNA, 12 nt, Human
cuucuucuguaa

SEQ ID NO: 3448483 - RNA, 15 nt, Human
cuucuucuguaauau

SEQ ID NO: 3448484 - RNA, 22 nt, Human
cuucuucuguaauauuuacaau

SEQ ID NO: 3448485 - RNA, 19 nt, Human
cuucuucuguccaagcaga

SEQ ID NO: 3448486 - RNA, 21 nt, Human
cuucuucuuuugagcaacuuu

SEQ ID NO: 3448487 - RNA, 17 nt, Human
cuucuucuuuuugcugu

SEQ ID NO: 3448488 - RNA, 13 nt, Human
cuucuugaaaucc

SEQ ID NO: 3448489 - RNA, 20 nt, Human
cuucuugaacacucaugcug

SEQ ID NO: 3448490 - RNA, 21 nt, Human
cuucuugaacacucaugcuga

SEQ ID NO: 3448491 - RNA, 22 nt, Human
cuucuugaacacucaugcugaa

SEQ ID NO: 3448492 - RNA, 19 nt, Human
cuucuugaauauaaaaaau

SEQ ID NO: 3448493 - RNA, 22 nt, Human
cuucuugaauggcaauguuuug

SEQ ID NO: 3448494 - RNA, 22 nt, Human
cuucuugcauccuuccuauaac

SEQ ID NO: 3448495 - RNA, 15 nt, Human
cuucuugcugcccug

SEQ ID NO: 3448496 - RNA, 20 nt, Human
cuucuugcugcccugcccca

SEQ ID NO: 3448497 - RNA, 19 nt, Human
cuucuuggggcccagugca

SEQ ID NO: 3448498 - RNA, 21 nt, Human
cuucuuggggguaagcugauu

SEQ ID NO: 3448499 - RNA, 20 nt, Human
cuucuuggucuuauuuauua

SEQ ID NO: 3448500 - RNA, 13 nt, Human
cuucuugucagac

SEQ ID NO: 3448501 - RNA, 14 nt, Human
cuucuugucagaca

SEQ ID NO: 3448502 - RNA, 20 nt, Human
cuucuugucagacauaaagc

SEQ ID NO: 3448503 - RNA, 17 nt, Human
cuucuuuaauugaucua

SEQ ID NO: 3448504 - RNA, 22 nt, Human
cuucuuuauaauucuacuuuga

SEQ ID NO: 3448505 - RNA, 14 nt, Human
cuucuuucauuuuc

SEQ ID NO: 3448506 - RNA, 23 nt, Human
cuucuuucccuuccuccauccuc

SEQ ID NO: 3448507 - RNA, 11 nt, Human
cuucuuuccuc

SEQ ID NO: 3448508 - RNA, 14 nt, Human
cuucuuuccucuuc

SEQ ID NO: 3448509 - RNA, 16 nt, Human
cuucuuuccucuuccc

SEQ ID NO: 3448510 - RNA, 16 nt, Human
cuucuuucugucuuua

SEQ ID NO: 3448511 - RNA, 21 nt, Human
cuucuuucuuugggaauauuu

SEQ ID NO: 3448512 - RNA, 12 nt, Human
cuucuuugaaga

SEQ ID NO: 3448513 - RNA, 13 nt, Human
cuucuuugaagaa

SEQ ID NO: 3448514 - RNA, 12 nt, Human
cuucuuugcccu

SEQ ID NO: 3448515 - RNA, 18 nt, Human
cuucuuuggguaaacgug

SEQ ID NO: 3448516 - RNA, 17 nt, Human
cuucuuuucacauucuu

SEQ ID NO: 3448517 - RNA, 14 nt, Human
cuucuuuucucaug

SEQ ID NO: 3448518 - RNA, 16 nt, Human
cuucuuuucuuuguau

SEQ ID NO: 3448519 - RNA, 14 nt, Human
cuucuuuugauuau

SEQ ID NO: 3448520 - RNA, 14 nt, Human
cuucuuuugcucuu

SEQ ID NO: 3448521 - RNA, 20 nt, Human
cuucuuuuuauuuucuuuug

SEQ ID NO: 3448522 - RNA, 23 nt, Human
cuucuuuuuauuuucuuuuguaa

SEQ ID NO: 3448523 - RNA, 16 nt, Human
cuucuuuuucuggacu

SEQ ID NO: 3448524 - RNA, 20 nt, Human
cuucuuuuuucaaaagaaag

SEQ ID NO: 3448525 - RNA, 17 nt, Human
cuucuuuuuuugugaug

SEQ ID NO: 3448526 - RNA, 14 nt, Human
cuugaaaaaaaaca

SEQ ID NO: 3448527 - RNA, 20 nt, Human
cuugaaaaaaaacaguggau

SEQ ID NO: 3448528 - RNA, 12 nt, Human
cuugaaaaaugc

SEQ ID NO: 3448529 - RNA, 18 nt, Human
cuugaaaaaugcauguug

SEQ ID NO: 3448530 - RNA, 19 nt, Human
ggaagcagugccuuccaua

SEQ ID NO: 3448531 - RNA, 20 nt, Human
ggaagcauguaggagaaucc

SEQ ID NO: 3448532 - RNA, 21 nt, Human
ggaagcauguaggagaaucca

SEQ ID NO: 3448533 - RNA, 22 nt, Human
ggaagccaaaauguaggcuuag

SEQ ID NO: 3448534 - RNA, 22 nt, Human
ggaagccacccucccagcucug

SEQ ID NO: 3448535 - RNA, 13 nt, Human
ggaagccagcagg

SEQ ID NO: 3448536 - RNA, 15 nt, Human
ggaagccagcaggcu

SEQ ID NO: 3448537 - RNA, 16 nt, Human
ggaagccagcaggcuc

SEQ ID NO: 3448538 - RNA, 21 nt, Human
ggaagccagcaggcucucagg

SEQ ID NO: 3448539 - RNA, 23 nt, Human
ggaagccagcaggcucucaggcc

SEQ ID NO: 3448540 - RNA, 14 nt, Human
ggaagcccagcucc

SEQ ID NO: 3448541 - RNA, 14 nt, Human
ggaagcccauccug

SEQ ID NO: 3448542 - RNA, 15 nt, Human
ggaagccccugggcc

SEQ ID NO: 3448543 - RNA, 23 nt, Human
ggaagcccuggauuucagaaaga

SEQ ID NO: 3448544 - RNA, 21 nt, Human
ggaagccgagcuccagagcaa

SEQ ID NO: 3448545 - RNA, 16 nt, Human
ggaagccgugcccugc

SEQ ID NO: 3448546 - RNA, 14 nt, Human
ggaagccugcaguc

SEQ ID NO: 3448547 - RNA, 16 nt, Human
ggaagcuaauuugcau

SEQ ID NO: 3448548 - RNA, 23 nt, Human
ggaagcuacagguuacaacagau

SEQ ID NO: 3448549 - RNA, 17 nt, Human
ggaagcuagucuuuugc

SEQ ID NO: 3448550 - RNA, 19 nt, Human
ggaagcuagucuuuugcuu

SEQ ID NO: 3448551 - RNA, 23 nt, Human
ggaagcuagucuuuugcuuuugc

SEQ ID NO: 3448552 - RNA, 22 nt, Human
ggaagcucagggccuggcucag

SEQ ID NO: 3448553 - RNA, 14 nt, Human
ggaagcuccacugu

SEQ ID NO: 3448554 - RNA, 23 nt, Human
ggaagcuccacugucacccucca

SEQ ID NO: 3448555 - RNA, 13 nt, Human
ggaagcuccuggu

SEQ ID NO: 3448556 - RNA, 12 nt, Human
ggaagcugcagc

SEQ ID NO: 3448557 - RNA, 15 nt, Human
ggaagcugcagcuug

SEQ ID NO: 3448558 - RNA, 13 nt, Human
ggaagcuuccagu

SEQ ID NO: 3448559 - RNA, 22 nt, Human
ggaagcuuucucugcuucagcu

SEQ ID NO: 3448560 - RNA, 19 nt, Human
ggaagcuuuguccccugcu

SEQ ID NO: 3448561 - RNA, 19 nt, Human
ggaaggaaagaaagaagga

SEQ ID NO: 3448562 - RNA, 16 nt, Human
ggaaggaacucuggcu

SEQ ID NO: 3448563 - RNA, 13 nt, Human
ggaaggacccuga

SEQ ID NO: 3448564 - RNA, 19 nt, Human
ggaaggagacacagauguu

SEQ ID NO: 3448565 - RNA, 20 nt, Human
ggaaggagacacagauguuc

SEQ ID NO: 3448566 - RNA, 15 nt, Human
ggaaggagacucacc

SEQ ID NO: 3448567 - RNA, 16 nt, Human
ggaaggagagccugcu

SEQ ID NO: 3448568 - RNA, 14 nt, Human
ggaaggagcugccu

SEQ ID NO: 3448569 - RNA, 15 nt, Human
ggaaggagcugccug

SEQ ID NO: 3448570 - RNA, 20 nt, Human
ggaaggagcugccuggaccc

SEQ ID NO: 3448571 - RNA, 22 nt, Human
ggaaggagcugccuggacccgu

SEQ ID NO: 3448572 - RNA, 16 nt, Human
ggaaggaggacccagg

SEQ ID NO: 3448573 - RNA, 17 nt, Human
ggaaggaggagccuguc

SEQ ID NO: 3448574 - RNA, 22 nt, Human
ggaaggauucugcuggccucug

SEQ ID NO: 3448575 - RNA, 21 nt, Human
gcugauacauaacuaaauuug

SEQ ID NO: 3448576 - RNA, 15 nt, Human
gcugauauaaauucu

SEQ ID NO: 3448577 - RNA, 16 nt, Human
gcugaucgugcuaaau

SEQ ID NO: 3448578 - RNA, 12 nt, Human
gcugaucucagg

SEQ ID NO: 3448579 - RNA, 16 nt, Human
gcugaucucagggaag

SEQ ID NO: 3448580 - RNA, 17 nt, Human
gcugaucucagggaagc

SEQ ID NO: 3448581 - RNA, 21 nt, Human
gcugaucucagggaagcccag

SEQ ID NO: 3448582 - RNA, 17 nt, Human
gcugaugaaucacuguu

SEQ ID NO: 3448583 - RNA, 17 nt, Human
gcugauggagccuuccc

SEQ ID NO: 3448584 - RNA, 15 nt, Human
gcugauggugcaaug

SEQ ID NO: 3448585 - RNA, 21 nt, Human
gcugauggugcaaugaccuuu

SEQ ID NO: 3448586 - RNA, 20 nt, Human
gcugauguagcaugcuuguu

SEQ ID NO: 3448587 - RNA, 17 nt, Human
gcugauguucaguguaa

SEQ ID NO: 3448588 - RNA, 20 nt, Human
gcugauguucaguguaauuu

SEQ ID NO: 3448589 - RNA, 21 nt, Human
gcugauucucagggucucugc

SEQ ID NO: 3448590 - RNA, 14 nt, Human
gcugauuguauuua

SEQ ID NO: 3448591 - RNA, 17 nt, Human
gcugauuuggugaccaa

SEQ ID NO: 3448592 - RNA, 14 nt, Human
gcugauuuuaacaa

SEQ ID NO: 3448593 - RNA, 17 nt, Human
gcugauuuuauucuuga

SEQ ID NO: 3448594 - RNA, 11 nt, Human
gcugauuuuuu

SEQ ID NO: 3448595 - RNA, 13 nt, Human
gcugcaaaggaca

SEQ ID NO: 3448596 - RNA, 15 nt, Human
gcugcaaaggacaga

SEQ ID NO: 3448597 - RNA, 11 nt, Human
gcugcaaagug

SEQ ID NO: 3448598 - RNA, 13 nt, Human
gcugcaaaguguu

SEQ ID NO: 3448599 - RNA, 14 nt, Human
gcugcaacaaaaug

SEQ ID NO: 3448600 - RNA, 14 nt, Human
gcugcaaggccuuu

SEQ ID NO: 3448601 - RNA, 12 nt, Human
gcugcaagguac

SEQ ID NO: 3448602 - RNA, 12 nt, Human
gcugcaagguuu

SEQ ID NO: 3448603 - RNA, 19 nt, Human
gcugcaagguuuaggcugg

SEQ ID NO: 3448604 - RNA, 18 nt, Human
gcugcacagggcagcugg

SEQ ID NO: 3448605 - RNA, 13 nt, Human
gcugcaccaaccc

SEQ ID NO: 3448606 - RNA, 18 nt, Human
gcugcaccaacccagccg

SEQ ID NO: 3448607 - RNA, 19 nt, Human
gcugcaccaacccagccgc

SEQ ID NO: 3448608 - RNA, 20 nt, Human
gcugcaccaacccagccgcu

SEQ ID NO: 3448609 - RNA, 23 nt, Human
gcugcaccaacccagccgcugcc

SEQ ID NO: 3448610 - RNA, 13 nt, Human
gcugcaccagagc

SEQ ID NO: 3448611 - RNA, 17 nt, Human
gcugcaccagagcaacc

SEQ ID NO: 3448612 - RNA, 19 nt, Human
gcugcaccccuuccugggc

SEQ ID NO: 3448613 - RNA, 21 nt, Human
gcugcaccccuuccugggcac

SEQ ID NO: 3448614 - RNA, 15 nt, Human
gcugcacccucaggc

SEQ ID NO: 3448615 - RNA, 18 nt, Human
gcugcacccucaggcagg

SEQ ID NO: 3448616 - RNA, 22 nt, Human
gcugcaccggcuggccuggccc

SEQ ID NO: 3448617 - RNA, 14 nt, Human
gcugcacucugugc

SEQ ID NO: 3448618 - RNA, 22 nt, Human
gcugcacucugugcccaugggc

SEQ ID NO: 3448619 - RNA, 16 nt, Human
gcugcagaaggccaag

SEQ ID NO: 3448620 - RNA, 21 nt, Human
gcugcagagcagugggccugg

SEQ ID NO: 3448621 - RNA, 18 nt, Human
gcugcagaggccagaggc

SEQ ID NO: 3448622 - RNA, 22 nt, Human
gcugcagaggccagaggccccc

SEQ ID NO: 3448623 - RNA, 15 nt, Human
gcugcagaggggcag

SEQ ID NO: 3448624 - RNA, 19 nt, Human
gcugcagaggggcaggccc

SEQ ID NO: 3448625 - RNA, 15 nt, Human
gcugcagagucacaa

SEQ ID NO: 3448626 - RNA, 18 nt, Human
gcugcagauuugggcugg

SEQ ID NO: 3448627 - RNA, 23 nt, Human
gcugcagcaccgaggggccuuug

SEQ ID NO: 3448628 - RNA, 21 nt, Human
gcugcagcagcgguggccucu

SEQ ID NO: 3448629 - RNA, 14 nt, Human
gcugcagccucagg

SEQ ID NO: 3448630 - RNA, 18 nt, Human
gcugcagccucaggacug

SEQ ID NO: 3448631 - RNA, 19 nt, Human
gcugcagccucaggacugg

SEQ ID NO: 3448632 - RNA, 21 nt, Human
gcugcagccucaggacuggga

SEQ ID NO: 3448633 - RNA, 16 nt, Human
gcugcagccugcgcca

SEQ ID NO: 3448634 - RNA, 13 nt, Human
gcugcagcuggac

SEQ ID NO: 3448635 - RNA, 17 nt, Human
gcugcagcuggacagag

SEQ ID NO: 3448636 - RNA, 15 nt, Human
gcugcagcugggcug

SEQ ID NO: 3448637 - RNA, 10 nt, Human
gcugcagcuu

SEQ ID NO: 3448638 - RNA, 13 nt, Human
gcugcagcuuggg

SEQ ID NO: 3448639 - RNA, 15 nt, Human
gcugcaggaaucaaa

SEQ ID NO: 3448640 - RNA, 17 nt, Human
gcugcaggacuugagaa

SEQ ID NO: 3448641 - RNA, 19 nt, Human
gcugcagggcuuuaaaauu

SEQ ID NO: 3448642 - RNA, 20 nt, Human
gcugcaggggcucuggagag

SEQ ID NO: 3448643 - RNA, 17 nt, Human
gcugcaguucgacucug

SEQ ID NO: 3448644 - RNA, 17 nt, Human
gcugcaguugccaguca

SEQ ID NO: 3448645 - RNA, 17 nt, Human
gcugcaguuuugcuauc

SEQ ID NO: 3448646 - RNA, 14 nt, Human
gcugcauccagagg

SEQ ID NO: 3448647 - RNA, 22 nt, Human
gcugcaucccccccaccucucc

SEQ ID NO: 3448648 - RNA, 20 nt, Human
gcugcaucggaggccaggac

SEQ ID NO: 3448649 - RNA, 15 nt, Human
gcugcaucuacucag

SEQ ID NO: 3448650 - RNA, 13 nt, Human
gcugcaucuuaua

SEQ ID NO: 3448651 - RNA, 17 nt, Human
gcugcaucuuauagcac

SEQ ID NO: 3448652 - RNA, 16 nt, Human
gcugcaugcccucuca

SEQ ID NO: 3448653 - RNA, 17 nt, Human
gcugcaugcccucucag

SEQ ID NO: 3448654 - RNA, 19 nt, Human
gcugcaugcccucucaggc

SEQ ID NO: 3448655 - RNA, 20 nt, Human
gcugcaugcccucucaggcc

SEQ ID NO: 3448656 - RNA, 18 nt, Human
gcugcaugccuggucuuu

SEQ ID NO: 3448657 - RNA, 22 nt, Human
gcugcauggcagggggcugcug

SEQ ID NO: 3448658 - RNA, 22 nt, Human
gcugcauggggugggguagggc

SEQ ID NO: 3448659 - RNA, 18 nt, Human
gcugcauuuaaaagauac

SEQ ID NO: 3448660 - RNA, 19 nt, Human
gcugcauuuaaaagauaca

SEQ ID NO: 3448661 - RNA, 23 nt, Human
gcugcauuuuaauuuuaaccaaa

SEQ ID NO: 3448662 - RNA, 17 nt, Human
gcugccaaauuuuggcc

SEQ ID NO: 3448663 - RNA, 15 nt, Human
gcugccaagccccau

SEQ ID NO: 3448664 - RNA, 17 nt, Human
gcugccaauauccuaau

SEQ ID NO: 3448665 - RNA, 20 nt, Human
gcugccaaugggagcucaug

SEQ ID NO: 3448666 - RNA, 23 nt, Human
gcugccacaccagucacaugacc

SEQ ID NO: 3448667 - RNA, 17 nt, Human
gcugccacacuucaggc

SEQ ID NO: 3448668 - RNA, 21 nt, Human
gcugccacacuucaggcucuu

SEQ ID NO: 3448669 - RNA, 20 nt, Human
gcugccacccaccucccugc

SEQ ID NO: 3448670 - RNA, 22 nt, Human
gcugccacccaccucccugccu

SEQ ID NO: 3448671 - RNA, 23 nt, Human
gcugccacccaccucccugccuc

SEQ ID NO: 3448672 - RNA, 12 nt, Human
gcugccacugag

SEQ ID NO: 3448673 - RNA, 14 nt, Human
gcugccacuuuuua

SEQ ID NO: 3448674 - RNA, 14 nt, Human
gcuguuuuuguugu

SEQ ID NO: 3448675 - RNA, 13 nt, Human
gcuguuuuuuugu

SEQ ID NO: 3448676 - RNA, 17 nt, Human
gcuuaaaaaaaacucuu

SEQ ID NO: 3448677 - RNA, 15 nt, Human
gcuuaaaaaucauug

SEQ ID NO: 3448678 - RNA, 13 nt, Human
gcuuaaaacuuug

SEQ ID NO: 3448679 - RNA, 14 nt, Human
gcuuaaaauacaag

SEQ ID NO: 3448680 - RNA, 22 nt, Human
gcuuaaauauaguuccuaagaa

SEQ ID NO: 3448681 - RNA, 17 nt, Human
gcuuaaaugugaauuac

SEQ ID NO: 3448682 - RNA, 13 nt, Human
gcuuaaauuucuu

SEQ ID NO: 3448683 - RNA, 14 nt, Human
gcuuaacuucacau

SEQ ID NO: 3448684 - RNA, 16 nt, Human
gcuuaacuucacauau

SEQ ID NO: 3448685 - RNA, 12 nt, Human
gcuuaagaaaaa

SEQ ID NO: 3448686 - RNA, 20 nt, Human
gcuuaagaaaucuaguauuu

SEQ ID NO: 3448687 - RNA, 16 nt, Human
gcuuaagggaguuuaa

SEQ ID NO: 3448688 - RNA, 13 nt, Human
gcuuaaguuccag

SEQ ID NO: 3448689 - RNA, 17 nt, Human
gcuuaauaaaaaugaca

SEQ ID NO: 3448690 - RNA, 21 nt, Human
gcuuaauaaaaaugacagacu

SEQ ID NO: 3448691 - RNA, 15 nt, Human
gcuuaaucauuuuca

SEQ ID NO: 3448692 - RNA, 15 nt, Human
gcuuaaucuuugaaa

SEQ ID NO: 3448693 - RNA, 14 nt, Human
gcuuaaugcuucuu

SEQ ID NO: 3448694 - RNA, 20 nt, Human
gcuuaauggcugauaauuuu

SEQ ID NO: 3448695 - RNA, 22 nt, Human
gcuuacaagccagcuggagaaa

SEQ ID NO: 3448696 - RNA, 23 nt, Human
gcuuacaauuuuuuuaauuuugu

SEQ ID NO: 3448697 - RNA, 18 nt, Human
gcuuacacaucucagacc

SEQ ID NO: 3448698 - RNA, 11 nt, Human
gcuuacauuuu

SEQ ID NO: 3448699 - RNA, 12 nt, Human
gcuuaccugaca

SEQ ID NO: 3448700 - RNA, 16 nt, Human
gcuuaccugacacaag

SEQ ID NO: 3448701 - RNA, 21 nt, Human
gcuuaccugaccucuugcugu

SEQ ID NO: 3448702 - RNA, 16 nt, Human
gcuuacggcccuggcc

SEQ ID NO: 3448703 - RNA, 17 nt, Human
gcuuacggcccuggccu

SEQ ID NO: 3448704 - RNA, 14 nt, Human
gcuuacguaguucu

SEQ ID NO: 3448705 - RNA, 17 nt, Human
gcuuacuaagcuuugcc

SEQ ID NO: 3448706 - RNA, 21 nt, Human
gcuuacuacaugugggagcuu

SEQ ID NO: 3448707 - RNA, 13 nt, Human
gcuuacuauuucu

SEQ ID NO: 3448708 - RNA, 16 nt, Human
gcuuagaccucagccu

SEQ ID NO: 3448709 - RNA, 18 nt, Human
gcuuagaccucagccugu

SEQ ID NO: 3448710 - RNA, 21 nt, Human
gcuuagacuucgacucaggau

SEQ ID NO: 3448711 - RNA, 23 nt, Human
gcuuagacuucgacucaggaucc

SEQ ID NO: 3448712 - RNA, 16 nt, Human
gcuuagagaauguucu

SEQ ID NO: 3448713 - RNA, 13 nt, Human
gcuuagagacagu

SEQ ID NO: 3448714 - RNA, 12 nt, Human
gcuuagagcagu

SEQ ID NO: 3448715 - RNA, 11 nt, Human
gcuuagcagga

SEQ ID NO: 3448716 - RNA, 16 nt, Human
gcuuagcaggagagga

SEQ ID NO: 3448717 - RNA, 21 nt, Human
gcuuagcaggagaggagagcc

SEQ ID NO: 3448718 - RNA, 17 nt, Human
gcuuagcuuugcucugc

SEQ ID NO: 3448719 - RNA, 18 nt, Human
gcuuaggcagggcucucu

SEQ ID NO: 3448720 - RNA, 22 nt, Human
gcuuagggacaggaccccagcu

SEQ ID NO: 3448721 - RNA, 18 nt, Human
gcuuagggcccuggaggc

SEQ ID NO: 3448722 - RNA, 15 nt, Human
gcuuagggucucagg

SEQ ID NO: 3448723 - RNA, 16 nt, Human
gcuuaguaaaauuuau

SEQ ID NO: 3448724 - RNA, 23 nt, Human
gcuuaguaaugcuacgugugauu

SEQ ID NO: 3448725 - RNA, 14 nt, Human
gcuuaguaucucau

SEQ ID NO: 3448726 - RNA, 20 nt, Human
gcuuagucacugagacagcc

SEQ ID NO: 3448727 - RNA, 18 nt, Human
gcuuagucacugccugca

SEQ ID NO: 3448728 - RNA, 12 nt, Human
gcuuaguuugug

SEQ ID NO: 3448729 - RNA, 14 nt, Human
gcuuaguuugugug

SEQ ID NO: 3448730 - RNA, 12 nt, Human
gcuuauaaaaca

SEQ ID NO: 3448731 - RNA, 13 nt, Human
gcuuauaaaacag

SEQ ID NO: 3448732 - RNA, 19 nt, Human
gcuuauacgaaauaauugu

SEQ ID NO: 3448733 - RNA, 23 nt, Human
gcuuauacgaaauaauuguuguu

SEQ ID NO: 3448734 - RNA, 17 nt, Human
gcuuauaucuggccucu

SEQ ID NO: 3448735 - RNA, 20 nt, Human
gcuuauaucuggccucugcu

SEQ ID NO: 3448736 - RNA, 20 nt, Human
gcuuaucaauuugucauuuu

SEQ ID NO: 3448737 - RNA, 15 nt, Human
gcuuauccauaaaaa

SEQ ID NO: 3448738 - RNA, 23 nt, Human
gcuuaugauagcaaauggccuca

SEQ ID NO: 3448739 - RNA, 15 nt, Human
gcuuauuaaugcuaa

SEQ ID NO: 3448740 - RNA, 16 nt, Human
gcuuauuaaugcuaag

SEQ ID NO: 3448741 - RNA, 19 nt, Human
gcuuauuaaugcuaagggc

SEQ ID NO: 3448742 - RNA, 14 nt, Human
gcuuauuauugaag

SEQ ID NO: 3448743 - RNA, 17 nt, Human
gcuuauuccaugacugc

SEQ ID NO: 3448744 - RNA, 18 nt, Human
gcuuauuccaugacugcu

SEQ ID NO: 3448745 - RNA, 17 nt, Human
gcuuauuguuccaagac

SEQ ID NO: 3448746 - RNA, 18 nt, Human
gcuuauuuaauuaaaaaa

SEQ ID NO: 3448747 - RNA, 22 nt, Human
gcuuauuuaauuaaaaaauuuc

SEQ ID NO: 3448748 - RNA, 16 nt, Human
gcuuauuuauuaacag

SEQ ID NO: 3448749 - RNA, 12 nt, Human
gcuuauuuuaau

SEQ ID NO: 3448750 - RNA, 18 nt, Human
gcuuauuuuaaugugaug

SEQ ID NO: 3448751 - RNA, 21 nt, Human
gcuuauuuuaaugugaugaug

SEQ ID NO: 3448752 - RNA, 22 nt, Human
gcuucaacauucuuugcaagau

SEQ ID NO: 3448753 - RNA, 14 nt, Human
gcuucaaggauccu

SEQ ID NO: 3448754 - RNA, 22 nt, Human
gcuucaagucugugccuggagc

SEQ ID NO: 3448755 - RNA, 23 nt, Human
gcuucaagucugugccuggagcu

SEQ ID NO: 3448756 - RNA, 22 nt, Human
gcuucaauacccaaauccucuc

SEQ ID NO: 3448757 - RNA, 15 nt, Human
gcuucaauuuauacc

SEQ ID NO: 3448758 - RNA, 20 nt, Human
gcuucaauuuauugcacaaa

SEQ ID NO: 3448759 - RNA, 18 nt, Human
gcuucacaguagagccag

SEQ ID NO: 3448760 - RNA, 20 nt, Human
gcuucacaguagagccagcu

SEQ ID NO: 3448761 - RNA, 21 nt, Human
gcuucacaguagagccagcuu

SEQ ID NO: 3448762 - RNA, 22 nt, Human
gcuucacaguagagccagcuug

SEQ ID NO: 3448763 - RNA, 20 nt, Human
gcuucaccauggccuuauga

SEQ ID NO: 3448764 - RNA, 20 nt, Human
gcuucaccccaaucccagcu

SEQ ID NO: 3448765 - RNA, 22 nt, Human
gcuucacccugaaugguuccau

SEQ ID NO: 3448766 - RNA, 15 nt, Human
gcuucacggaagagc

SEQ ID NO: 3448767 - RNA, 20 nt, Human
gcuucacggaagagccuugc

SEQ ID NO: 3448768 - RNA, 17 nt, Human
gcuucacuccugcugua

SEQ ID NO: 3448769 - RNA, 14 nt, Human
gcuucacuguauaa

SEQ ID NO: 3448770 - RNA, 15 nt, Human
gcuucacuguauaaa

SEQ ID NO: 3448771 - RNA, 19 nt, Human
gcuucagauguggagccag

SEQ ID NO: 3448772 - RNA, 16 nt, Human
gcuucagccacaguuu

SEQ ID NO: 3448773 - RNA, 15 nt, Human
gcuucagcuccagcc

SEQ ID NO: 3448774 - RNA, 23 nt, Human
gcuucaggcccccgccuuggccu

SEQ ID NO: 3448775 - RNA, 23 nt, Human
gcuucagggcgcacagcaugaga

SEQ ID NO: 3448776 - RNA, 15 nt, Human
gcuucagguccaggc

SEQ ID NO: 3448777 - RNA, 12 nt, Human
gcuucagguuau

SEQ ID NO: 3448778 - RNA, 17 nt, Human
gcuucagguuaucgaaa

SEQ ID NO: 3448779 - RNA, 21 nt, Human
gcuucagguuaucgaaauaac

SEQ ID NO: 3448780 - RNA, 17 nt, Human
cuugugacccagcacug

SEQ ID NO: 3448781 - RNA, 14 nt, Human
cuugugacuagugc

SEQ ID NO: 3448782 - RNA, 20 nt, Human
cuugugacuagugcugaagc

SEQ ID NO: 3448783 - RNA, 17 nt, Human
cuugugaggaaagucau

SEQ ID NO: 3448784 - RNA, 23 nt, Human
cuugugaggaaagucauuggcuu

SEQ ID NO: 3448785 - RNA, 20 nt, Human
cuugugaugucauacagaga

SEQ ID NO: 3448786 - RNA, 22 nt, Human
cuugugaugucauacagagaag

SEQ ID NO: 3448787 - RNA, 21 nt, Human
cuugugauuucuuuaaaagaa

SEQ ID NO: 3448788 - RNA, 21 nt, Human
cuugugcaaaauauuugacua

SEQ ID NO: 3448789 - RNA, 18 nt, Human
cuugugcacaggcagagc

SEQ ID NO: 3448790 - RNA, 17 nt, Human
cuugugcagaaaacauu

SEQ ID NO: 3448791 - RNA, 18 nt, Human
cuugugcagaaaacauug

SEQ ID NO: 3448792 - RNA, 19 nt, Human
cuugugcagaaaacauugu

SEQ ID NO: 3448793 - RNA, 20 nt, Human
cuugugcagaaaacauuguu

SEQ ID NO: 3448794 - RNA, 17 nt, Human
cuugugccacacccucc

SEQ ID NO: 3448795 - RNA, 16 nt, Human
cuugugccuggcucag

SEQ ID NO: 3448796 - RNA, 15 nt, Human
cuugugccugggagu

SEQ ID NO: 3448797 - RNA, 22 nt, Human
cuugugcuggauggagcccagg

SEQ ID NO: 3448798 - RNA, 23 nt, Human
cuugugcuggauggagcccaggc

SEQ ID NO: 3448799 - RNA, 17 nt, Human
cuugugcuuugcucuug

SEQ ID NO: 3448800 - RNA, 23 nt, Human
cuugugcuuugcucuugucccac

SEQ ID NO: 3448801 - RNA, 20 nt, Human
cuugugcuuuuccuauuugu

SEQ ID NO: 3448802 - RNA, 15 nt, Human
cuuguggacacagcu

SEQ ID NO: 3448803 - RNA, 16 nt, Human
cuuguggacacagcuc

SEQ ID NO: 3448804 - RNA, 15 nt, Human
cuuguggacuaaaag

SEQ ID NO: 3448805 - RNA, 18 nt, Human
cuuguggacuaaaagaua

SEQ ID NO: 3448806 - RNA, 13 nt, Human
cuuguggagcccc

SEQ ID NO: 3448807 - RNA, 16 nt, Human
cuuguggauguuuuaa

SEQ ID NO: 3448808 - RNA, 16 nt, Human
cuuguggcagcaacgg

SEQ ID NO: 3448809 - RNA, 15 nt, Human
cuugugggccugggc

SEQ ID NO: 3448810 - RNA, 22 nt, Human
cuugugggccugggcuccugga

SEQ ID NO: 3448811 - RNA, 16 nt, Human
cuuguggggccuggga

SEQ ID NO: 3448812 - RNA, 16 nt, Human
cuuguggguccaugcu

SEQ ID NO: 3448813 - RNA, 24 nt, Human
cuuguggguccaugcuaacaaaga

SEQ ID NO: 3448814 - RNA, 15 nt, Human
cuugugguccaaaua

SEQ ID NO: 3448815 - RNA, 16 nt, Human
cuuguggucccacccc

SEQ ID NO: 3448816 - RNA, 20 nt, Human
cuugugguuuucaaauugga

SEQ ID NO: 3448817 - RNA, 16 nt, Human
cuuguguaauuuaugu

SEQ ID NO: 3448818 - RNA, 15 nt, Human
ggagcacuggagugc

SEQ ID NO: 3448819 - RNA, 18 nt, Human
ggagcacuggagugcagg

SEQ ID NO: 3448820 - RNA, 13 nt, Human
ggagcacugggcu

SEQ ID NO: 3448821 - RNA, 20 nt, Human
ggagcacugggcucccgggc

SEQ ID NO: 3448822 - RNA, 23 nt, Human
ggagcagaaaacccuugggccag

SEQ ID NO: 3448823 - RNA, 16 nt, Human
ggagcagaacugaacc

SEQ ID NO: 3448824 - RNA, 13 nt, Human
ggagcagaaucag

SEQ ID NO: 3448825 - RNA, 23 nt, Human
ggagcagaaucaguauugggagc

SEQ ID NO: 3448826 - RNA, 20 nt, Human
ggagcagacaggaggaauca

SEQ ID NO: 3448827 - RNA, 14 nt, Human
ggagcagagaaggc

SEQ ID NO: 3448828 - RNA, 19 nt, Human
ggagcagagcugauggaga

SEQ ID NO: 3448829 - RNA, 12 nt, Human
ggagcagagggg

SEQ ID NO: 3448830 - RNA, 19 nt, Human
ggagcagaggggcagaggc

SEQ ID NO: 3448831 - RNA, 21 nt, Human
ggagcaggagauugagaagga

SEQ ID NO: 3448832 - RNA, 23 nt, Human
ggagcaggagauugagaaggaga

SEQ ID NO: 3448833 - RNA, 18 nt, Human
ggagcaggcgguggggag

SEQ ID NO: 3448834 - RNA, 13 nt, Human
ggagcagggaagg

SEQ ID NO: 3448835 - RNA, 17 nt, Human
ggagcaguccaugcaug

SEQ ID NO: 3448836 - RNA, 18 nt, Human
ggagcaguccaugcauga

SEQ ID NO: 3448837 - RNA, 14 nt, Human
ggagcagugcaggc

SEQ ID NO: 3448838 - RNA, 18 nt, Human
ggagcagugucuuccaua

SEQ ID NO: 3448839 - RNA, 17 nt, Human
ggagcauccaccuccuu

SEQ ID NO: 3448840 - RNA, 22 nt, Human
ggagcauccaccuccuucucug

SEQ ID NO: 3448841 - RNA, 14 nt, Human
ggagcaugggccug

SEQ ID NO: 3448842 - RNA, 16 nt, Human
ggagcaugggccuggc

SEQ ID NO: 3448843 - RNA, 15 nt, Human
ggagcauggggauaa

SEQ ID NO: 3448844 - RNA, 20 nt, Human
ggagcauguuuuguauacaa

SEQ ID NO: 3448845 - RNA, 17 nt, Human
ggagccaaauguggcau

SEQ ID NO: 3448846 - RNA, 15 nt, Human
ggagccaacugcugc

SEQ ID NO: 3448847 - RNA, 16 nt, Human
ggagccaacugcugcu

SEQ ID NO: 3448848 - RNA, 15 nt, Human
ggagccaccaguucu

SEQ ID NO: 3448849 - RNA, 16 nt, Human
ggagccacuccucuga

SEQ ID NO: 3448850 - RNA, 19 nt, Human
ggagccacuccucugacuc

SEQ ID NO: 3448851 - RNA, 15 nt, Human
ggagccacucuguuc

SEQ ID NO: 3448852 - RNA, 12 nt, Human
ggagccagcucu

SEQ ID NO: 3448853 - RNA, 13 nt, Human
ggagccagggcug

SEQ ID NO: 3448854 - RNA, 22 nt, Human
ggagccaugcgcccccuccgcc

SEQ ID NO: 3448855 - RNA, 21 nt, Human
ggagcccacgacacugcagcc

SEQ ID NO: 3448856 - RNA, 23 nt, Human
ggagcccacggcuaagaggcugc

SEQ ID NO: 3448857 - RNA, 14 nt, Human
ggagcccacugucc

SEQ ID NO: 3448858 - RNA, 17 nt, Human
ggagcccacuguccugg

SEQ ID NO: 3448859 - RNA, 18 nt, Human
ggagcccaggagucccac

SEQ ID NO: 3448860 - RNA, 19 nt, Human
ggagcccaggcgggagcgg

SEQ ID NO: 3448861 - RNA, 22 nt, Human
ggagcccaggcgggagcggugg

SEQ ID NO: 3448862 - RNA, 12 nt, Human
ggagcccagggc

SEQ ID NO: 3448863 - RNA, 19 nt, Human
ggagcccauacucagccug

SEQ ID NO: 3448864 - RNA, 20 nt, Human
ggagcccauacucagccugc

SEQ ID NO: 3448865 - RNA, 21 nt, Human
ggagcccauacucagccugcu

SEQ ID NO: 3448866 - RNA, 18 nt, Human
ggagcccauuuggagggc

SEQ ID NO: 3448867 - RNA, 21 nt, Human
ggagcccauuuggagggccug

SEQ ID NO: 3448868 - RNA, 23 nt, Human
ggagcccauuuggagggccuggg

SEQ ID NO: 3448869 - RNA, 14 nt, Human
ggagccccacugcc

SEQ ID NO: 3448870 - RNA, 15 nt, Human
ggagccccagccccc

SEQ ID NO: 3448871 - RNA, 16 nt, Human
ggagccccagcccccu

SEQ ID NO: 3448872 - RNA, 17 nt, Human
ggagccccagcuacccu

SEQ ID NO: 3448873 - RNA, 18 nt, Human
ggagccccagcuacccuu

SEQ ID NO: 3448874 - RNA, 22 nt, Human
ggagccccaggccucugugucc

SEQ ID NO: 3448875 - RNA, 20 nt, Human
ggagccccagggucuucccu

SEQ ID NO: 3448876 - RNA, 17 nt, Human
ggagccccauuccuggg

SEQ ID NO: 3448877 - RNA, 16 nt, Human
ggagcccccagccugu

SEQ ID NO: 3448878 - RNA, 13 nt, Human
ggagcccccgccc

SEQ ID NO: 3448879 - RNA, 13 nt, Human
ggagccccugggu

SEQ ID NO: 3448880 - RNA, 21 nt, Human
ggagccccuucugcucagcuc

SEQ ID NO: 3448881 - RNA, 18 nt, Human
ggagcccgcacccccacc

SEQ ID NO: 3448882 - RNA, 20 nt, Human
ggagcccgcacccccacccu

SEQ ID NO: 3448883 - RNA, 13 nt, Human
ggagcccucaucu

SEQ ID NO: 3448884 - RNA, 19 nt, Human
ggagcccugggaggcucug

SEQ ID NO: 3448885 - RNA, 15 nt, Human
ggagccgaagcccag

SEQ ID NO: 3448886 - RNA, 17 nt, Human
ggagccgaagcccaggg

SEQ ID NO: 3448887 - RNA, 21 nt, Human
ggagccgaggccuaccccgca

SEQ ID NO: 3448888 - RNA, 21 nt, Human
ggagccgggaaagaagagccg

SEQ ID NO: 3448889 - RNA, 21 nt, Human
ggagccgggcaaacuggccgc

SEQ ID NO: 3448890 - RNA, 18 nt, Human
ggagccgggucugccucu

SEQ ID NO: 3448891 - RNA, 19 nt, Human
ggagccgguaacuguccug

SEQ ID NO: 3448892 - RNA, 16 nt, Human
ggagccgguggcggug

SEQ ID NO: 3448893 - RNA, 16 nt, Human
ggagccuacccacccc

SEQ ID NO: 3448894 - RNA, 21 nt, Human
ggagccuaggaccacucagcc

SEQ ID NO: 3448895 - RNA, 17 nt, Human
ggagccuaggccaggug

SEQ ID NO: 3448896 - RNA, 18 nt, Human
ggagccuaggccaggugc

SEQ ID NO: 3448897 - RNA, 19 nt, Human
ggagccucauccgaggcag

SEQ ID NO: 3448898 - RNA, 16 nt, Human
ggagccucccugccuc

SEQ ID NO: 3448899 - RNA, 18 nt, Human
ggagccucccugccucag

SEQ ID NO: 3448900 - RNA, 11 nt, Human
ggagccuccug

SEQ ID NO: 3448901 - RNA, 22 nt, Human
ggagccucgcaacccgugccaa

SEQ ID NO: 3448902 - RNA, 20 nt, Human
ggagccugagucagggccca

SEQ ID NO: 3448903 - RNA, 10 nt, Human
ggagccuguc

SEQ ID NO: 3448904 - RNA, 11 nt, Human
ggagccugucc

SEQ ID NO: 3448905 - RNA, 14 nt, Human
ggagccuguccugc

SEQ ID NO: 3448906 - RNA, 17 nt, Human
ggagccugugaacccag

SEQ ID NO: 3448907 - RNA, 18 nt, Human
ggagccugugaacccagg

SEQ ID NO: 3448908 - RNA, 19 nt, Human
ggagccugugaacccagga

SEQ ID NO: 3448909 - RNA, 20 nt, Human
ggagccugugaacccaggac

SEQ ID NO: 3448910 - RNA, 19 nt, Human
ggagccuguguaacagcuc

SEQ ID NO: 3448911 - RNA, 21 nt, Human
ggagccuguguaacagcuccu

SEQ ID NO: 3448912 - RNA, 22 nt, Human
ggagccuguguaacagcuccuu

SEQ ID NO: 3448913 - RNA, 13 nt, Human
ggagccuucccaa

SEQ ID NO: 3448914 - RNA, 20 nt, Human
ggagccuuugguucuggcca

SEQ ID NO: 3448915 - RNA, 22 nt, Human
ggagcgagcaugucguggacac

SEQ ID NO: 3448916 - RNA, 15 nt, Human
ggagcggaaagcagc

SEQ ID NO: 3448917 - RNA, 16 nt, Human
ggagcggaaagcagcu

SEQ ID NO: 3448918 - RNA, 19 nt, Human
ggagcggagguugcaguga

SEQ ID NO: 3448919 - RNA, 13 nt, Human
ggagcgggaccug

SEQ ID NO: 3448920 - RNA, 20 nt, Human
ggagcgggucugcucccaag

SEQ ID NO: 3448921 - RNA, 16 nt, Human
ggagcgucaggguugg

SEQ ID NO: 3448922 - RNA, 16 nt, Human
ggagcuaacacuggcc

SEQ ID NO: 3448923 - RNA, 19 nt, Human
ggagcuaacacuggccccu

SEQ ID NO: 3448924 - RNA, 20 nt, Human
ggagcuaaggcucuaugagu

SEQ ID NO: 3448925 - RNA, 22 nt, Human
ggagcuaccuguguggacagga

SEQ ID NO: 3448926 - RNA, 14 nt, Human
ggagcuagaauuug

SEQ ID NO: 3448927 - RNA, 22 nt, Human
ggagcuaucaggaacagcuaug

SEQ ID NO: 3448928 - RNA, 17 nt, Human
ggagcucagagagggca

SEQ ID NO: 3448929 - RNA, 20 nt, Human
ggagcucagagagggcaggc

SEQ ID NO: 3448930 - RNA, 12 nt, Human
ggagcucagccc

SEQ ID NO: 3448931 - RNA, 21 nt, Human
ggagcucaggaaccgaggcag

SEQ ID NO: 3448932 - RNA, 21 nt, Human
ggagcucaggaaggggugugc

SEQ ID NO: 3448933 - RNA, 20 nt, Human
ggagcuccaacucagaaggg

SEQ ID NO: 3448934 - RNA, 16 nt, Human
ggagcuccagccugac

SEQ ID NO: 3448935 - RNA, 19 nt, Human
ggagcuccaguguccugag

SEQ ID NO: 3448936 - RNA, 17 nt, Human
ggagcuccccuccccaa

SEQ ID NO: 3448937 - RNA, 13 nt, Human
ggagcuccucucc

SEQ ID NO: 3448938 - RNA, 14 nt, Human
ggagcuccugggaa

SEQ ID NO: 3448939 - RNA, 22 nt, Human
ggagcugagcagguguucuuca

SEQ ID NO: 3448940 - RNA, 20 nt, Human
ggagcugcaggggcauggga

SEQ ID NO: 3448941 - RNA, 22 nt, Human
ggagcugccccucucugggccu

SEQ ID NO: 3448942 - RNA, 11 nt, Human
ggagcugccug

SEQ ID NO: 3448943 - RNA, 15 nt, Human
gcuugagccaggagg

SEQ ID NO: 3448944 - RNA, 16 nt, Human
gcuugagcccaggagu

SEQ ID NO: 3448945 - RNA, 12 nt, Human
gcuugagccggg

SEQ ID NO: 3448946 - RNA, 23 nt, Human
gcuugcaaguauguuuuagcaug

SEQ ID NO: 3448947 - RNA, 22 nt, Human
gcuugcacuuuguaacauguuu

SEQ ID NO: 3448948 - RNA, 19 nt, Human
gcuugcagugagccgagau

SEQ ID NO: 3448949 - RNA, 22 nt, Human
gcuugccaaaguacagaauuug

SEQ ID NO: 3448950 - RNA, 20 nt, Human
gcuugccaaggcagaggccu

SEQ ID NO: 3448951 - RNA, 16 nt, Human
gcuugccacagagcgg

SEQ ID NO: 3448952 - RNA, 16 nt, Human
gcuugccaucccuccc

SEQ ID NO: 3448953 - RNA, 21 nt, Human
gcuugccaucccucccuccac

SEQ ID NO: 3448954 - RNA, 17 nt, Human
gcuugccauuuuucaaa

SEQ ID NO: 3448955 - RNA, 23 nt, Human
gcuugcccuaagcagaaagugcc

SEQ ID NO: 3448956 - RNA, 18 nt, Human
gcuugcccuguuaaaaga

SEQ ID NO: 3448957 - RNA, 18 nt, Human
gcuugccgaaacuggaag

SEQ ID NO: 3448958 - RNA, 14 nt, Human
gcuugccucggcuc

SEQ ID NO: 3448959 - RNA, 18 nt, Human
gcuugccucggcuccugc

SEQ ID NO: 3448960 - RNA, 13 nt, Human
gcuugccugcagg

SEQ ID NO: 3448961 - RNA, 14 nt, Human
gcuugccugcaggg

SEQ ID NO: 3448962 - RNA, 13 nt, Human
ggcacccccugca

SEQ ID NO: 3448963 - RNA, 14 nt, Human
ggcacccccuggag

SEQ ID NO: 3448964 - RNA, 15 nt, Human
ggcacccccuggaga

SEQ ID NO: 3448965 - RNA, 16 nt, Human
ggcacccccuggagag

SEQ ID NO: 3448966 - RNA, 19 nt, Human
ggcacccccuggagagaag

SEQ ID NO: 3448967 - RNA, 17 nt, Human
ggcacccggccccugcu

SEQ ID NO: 3448968 - RNA, 19 nt, Human
ggcacccuguggcccuggc

SEQ ID NO: 3448969 - RNA, 12 nt, Human
ggcacccuucuu

SEQ ID NO: 3448970 - RNA, 20 nt, Human
ggcacccuucuuuccucuuc

SEQ ID NO: 3448971 - RNA, 17 nt, Human
ggcaccuaauccaggca

SEQ ID NO: 3448972 - RNA, 22 nt, Human
ggcaccuaauccaggcagaucc

SEQ ID NO: 3448973 - RNA, 15 nt, Human
ggcaccucacaggcc

SEQ ID NO: 3448974 - RNA, 16 nt, Human
ggcaccucacaggccc

SEQ ID NO: 3448975 - RNA, 19 nt, Human
ggcaccucacaggccccag

SEQ ID NO: 3448976 - RNA, 23 nt, Human
ggcaccuccuacgucaaacauga

SEQ ID NO: 3448977 - RNA, 20 nt, Human
ggcaccugcagguugggcca

SEQ ID NO: 3448978 - RNA, 22 nt, Human
ggcaccugccacccugggccug

SEQ ID NO: 3448979 - RNA, 20 nt, Human
ggcaccuguagucccagcua

SEQ ID NO: 3448980 - RNA, 17 nt, Human
ggcaccuuaguggcuuu

SEQ ID NO: 3448981 - RNA, 15 nt, Human
ggcacgggugguccc

SEQ ID NO: 3448982 - RNA, 14 nt, Human
ggcacuagccuuug

SEQ ID NO: 3448983 - RNA, 20 nt, Human
ggcacuagccuuuggcucug

SEQ ID NO: 3448984 - RNA, 15 nt, Human
ggcacuauuuauuua

SEQ ID NO: 3448985 - RNA, 21 nt, Human
ggcacucacagaccuggagcc

SEQ ID NO: 3448986 - RNA, 22 nt, Human
ggcacuccaaccuaaccugugu

SEQ ID NO: 3448987 - RNA, 22 nt, Human
ggcacucuguuauuuagacuca

SEQ ID NO: 3448988 - RNA, 13 nt, Human
ggcacugagcccc

SEQ ID NO: 3448989 - RNA, 20 nt, Human
ggcacugcccugguggcccu

SEQ ID NO: 3448990 - RNA, 14 nt, Human
ggcacugcugggug

SEQ ID NO: 3448991 - RNA, 15 nt, Human
ggcacugcugggugg

SEQ ID NO: 3448992 - RNA, 16 nt, Human
ggcacugcuggguggc

SEQ ID NO: 3448993 - RNA, 19 nt, Human
ggcacugcuggguggccca

SEQ ID NO: 3448994 - RNA, 23 nt, Human
ggcacuggcaaacagggccucug

SEQ ID NO: 3448995 - RNA, 14 nt, Human
ggcacuggcccagg

SEQ ID NO: 3448996 - RNA, 19 nt, Human
ggcacugggaugagccgcu

SEQ ID NO: 3448997 - RNA, 19 nt, Human
ggaaggaggggaagcugca

SEQ ID NO: 3448998 - RNA, 20 nt, Human
ggaaggaggggaagcugcag

SEQ ID NO: 3448999 - RNA, 20 nt, Human
ggaaggaggguuagggaggg

SEQ ID NO: 3449000 - RNA, 13 nt, Human
ggaaggagugaga

SEQ ID NO: 3449001 - RNA, 13 nt, Human
ggaaggauuguaa

SEQ ID NO: 3449002 - RNA, 23 nt, Human
ggaaggauuguaaaaaaaaaugc

SEQ ID NO: 3449003 - RNA, 18 nt, Human
ggaaggcacuucugccug

SEQ ID NO: 3449004 - RNA, 14 nt, Human
ggaaggcagacagc

SEQ ID NO: 3449005 - RNA, 18 nt, Human
ggaaggcagacagcaggc

SEQ ID NO: 3449006 - RNA, 11 nt, Human
ggaaggcaggc

SEQ ID NO: 3449007 - RNA, 12 nt, Human
ggaaggcaggca

SEQ ID NO: 3449008 - RNA, 15 nt, Human
ggaaggcaggcaggg

SEQ ID NO: 3449009 - RNA, 18 nt, Human
ggaaggcaggcagggcuc

SEQ ID NO: 3449010 - RNA, 19 nt, Human
ggaaggcaggcagggcucu

SEQ ID NO: 3449011 - RNA, 21 nt, Human
ggaaggcaggcagggcucucc

SEQ ID NO: 3449012 - RNA, 21 nt, Human
ggaaggcagggaggaggcaga

SEQ ID NO: 3449013 - RNA, 14 nt, Human
ggaaggcccagcac

SEQ ID NO: 3449014 - RNA, 20 nt, Human
ggaaggcuacuucggggcug

SEQ ID NO: 3449015 - RNA, 17 nt, Human
ggaaggcugagaggaga

SEQ ID NO: 3449016 - RNA, 14 nt, Human
ggaaggcuggcugg

SEQ ID NO: 3449017 - RNA, 17 nt, Human
ggaaggcuggcugggca

SEQ ID NO: 3449018 - RNA, 21 nt, Human
ggaaggcuuguugugcuuuua

SEQ ID NO: 3449019 - RNA, 15 nt, Human
ggaagggaaaguuuu

SEQ ID NO: 3449020 - RNA, 21 nt, Human
ggaagggagccaagggaugga

SEQ ID NO: 3449021 - RNA, 17 nt, Human
ggaagggcauccuucug

SEQ ID NO: 3449022 - RNA, 21 nt, Human
ggaagggccagucugggcugc

SEQ ID NO: 3449023 - RNA, 16 nt, Human
ggaaggggacccccgc

SEQ ID NO: 3449024 - RNA, 22 nt, Human
ggaaggggacccccgcccccug

SEQ ID NO: 3449025 - RNA, 14 nt, Human
ggaaggguaaacaa

SEQ ID NO: 3449026 - RNA, 19 nt, Human
ggaagguacuguaugauca

SEQ ID NO: 3449027 - RNA, 20 nt, Human
ggaagguaguucaagaaaug

SEQ ID NO: 3449028 - RNA, 21 nt, Human
ggaagguaguucaagaaauga

SEQ ID NO: 3449029 - RNA, 19 nt, Human
ggaaggucccuuguuucca

SEQ ID NO: 3449030 - RNA, 11 nt, Human
ggaaggugggg

SEQ ID NO: 3449031 - RNA, 19 nt, Human
ggaagguuuggugugugga

SEQ ID NO: 3449032 - RNA, 16 nt, Human
ggaaguacuggagaaa

SEQ ID NO: 3449033 - RNA, 14 nt, Human
ggaaguagaaacaa

SEQ ID NO: 3449034 - RNA, 14 nt, Human
ggaaguagcacagg

SEQ ID NO: 3449035 - RNA, 18 nt, Human
ggaaguaguccuuggcau

SEQ ID NO: 3449036 - RNA, 13 nt, Human
ggaagucaaagca

SEQ ID NO: 3449037 - RNA, 18 nt, Human
ggaagucauccugccaac

SEQ ID NO: 3449038 - RNA, 15 nt, Human
ggaaguccaaugugg

SEQ ID NO: 3449039 - RNA, 16 nt, Human
ggaaguccaauguggc

SEQ ID NO: 3449040 - RNA, 17 nt, Human
ggaaguccaauguggca

SEQ ID NO: 3449041 - RNA, 21 nt, Human
ggaaguccccaggccccagga

SEQ ID NO: 3449042 - RNA, 14 nt, Human
ggaaguccucuggg

SEQ ID NO: 3449043 - RNA, 17 nt, Human
ggaagucuaggagcugg

SEQ ID NO: 3449044 - RNA, 18 nt, Human
ggaagugacauuguguca

SEQ ID NO: 3449045 - RNA, 14 nt, Human
ggaagugaggaagc

SEQ ID NO: 3449046 - RNA, 21 nt, Human
ggaagugagggucagagagga

SEQ ID NO: 3449047 - RNA, 18 nt, Human
ggaaguggggcgggcuuc

SEQ ID NO: 3449048 - RNA, 16 nt, Human
ggaaguguaacagcug

SEQ ID NO: 3449049 - RNA, 17 nt, Human
ggaaguguaacagcuga

SEQ ID NO: 3449050 - RNA, 21 nt, Human
ggaagugugggucugugugug

SEQ ID NO: 3449051 - RNA, 19 nt, Human
ggaaguguguguggcagca

SEQ ID NO: 3449052 - RNA, 17 nt, Human
ggaaguuaaagugaggc

SEQ ID NO: 3449053 - RNA, 13 nt, Human
ggaaguuuagaga

SEQ ID NO: 3449054 - RNA, 18 nt, Human
ggaaguuuagcucugaga

SEQ ID NO: 3449055 - RNA, 14 nt, Human
ggaaguuuucugua

SEQ ID NO: 3449056 - RNA, 14 nt, Human
ggaauaaaaggcuu

SEQ ID NO: 3449057 - RNA, 17 nt, Human
ggaauaaaaggcuugaa

SEQ ID NO: 3449058 - RNA, 22 nt, Human
ggaauaaaaggcuugaagcugu

SEQ ID NO: 3449059 - RNA, 22 nt, Human
ggaauaaauaugccucuccuuu

SEQ ID NO: 3449060 - RNA, 17 nt, Human
ggaauaagaagcaaaua

SEQ ID NO: 3449061 - RNA, 17 nt, Human
ggaauaagacagagacc

SEQ ID NO: 3449062 - RNA, 18 nt, Human
ggaauaagcucccagggc

SEQ ID NO: 3449063 - RNA, 20 nt, Human
ggaauaaggccuuaauaugu

SEQ ID NO: 3449064 - RNA, 19 nt, Human
ggaauaagguacaagaagc

SEQ ID NO: 3449065 - RNA, 22 nt, Human
ggaauaaugggcuuagagcagu

SEQ ID NO: 3449066 - RNA, 16 nt, Human
ggaauaccuguccccc

SEQ ID NO: 3449067 - RNA, 19 nt, Human
ggaauaccugucccccuga

SEQ ID NO: 3449068 - RNA, 19 nt, Human
ggaauacucuuauaucuau

SEQ ID NO: 3449069 - RNA, 19 nt, Human
ggaauacugaacaucugag

SEQ ID NO: 3449070 - RNA, 14 nt, Human
ggaauagcauguca

SEQ ID NO: 3449071 - RNA, 17 nt, Human
ggaauagcaugucacua

SEQ ID NO: 3449072 - RNA, 13 nt, Human
ggaauaguuuuuu

SEQ ID NO: 3449073 - RNA, 14 nt, Human
ggaauaucaauaua

SEQ ID NO: 3449074 - RNA, 13 nt, Human
ggaauaugagcuu

SEQ ID NO: 3449075 - RNA, 19 nt, Human
ggaauauuauauuuggaug

SEQ ID NO: 3449076 - RNA, 13 nt, Human
ggaauauuugaau

SEQ ID NO: 3449077 - RNA, 20 nt, Human
ggaauauuugaaucuugucu

SEQ ID NO: 3449078 - RNA, 17 nt, Human
ggaaucaacagggcagc

SEQ ID NO: 3449079 - RNA, 22 nt, Human
ggaaucaagaugucagacuggc

SEQ ID NO: 3449080 - RNA, 18 nt, Human
ggaaucacaucuuuuaag

SEQ ID NO: 3449081 - RNA, 23 nt, Human
ggaaucagacuucacacugcaag

SEQ ID NO: 3449082 - RNA, 14 nt, Human
ggaauccacuccca

SEQ ID NO: 3449083 - RNA, 20 nt, Human
ggaauccacucccaggcagc

SEQ ID NO: 3449084 - RNA, 16 nt, Human
ggaauccuccuccagg

SEQ ID NO: 3449085 - RNA, 19 nt, Human
ggaauccuccuccagggug

SEQ ID NO: 3449086 - RNA, 12 nt, Human
ggaauccuggca

SEQ ID NO: 3449087 - RNA, 21 nt, Human
ggaaucgaggaaccagagcca

SEQ ID NO: 3449088 - RNA, 16 nt, Human
ggaaucuagaagaaau

SEQ ID NO: 3449089 - RNA, 13 nt, Human
ggaaucuggagag

SEQ ID NO: 3449090 - RNA, 19 nt, Human
ggaaucuggagagcuagaa

SEQ ID NO: 3449091 - RNA, 18 nt, Human
ggaaugaagauaccauca

SEQ ID NO: 3449092 - RNA, 19 nt, Human
ggaaugaagauacugaaau

SEQ ID NO: 3449093 - RNA, 15 nt, Human
ggaaugaagcuugug

SEQ ID NO: 3449094 - RNA, 20 nt, Human
ggaaugagcccagagaacag

SEQ ID NO: 3449095 - RNA, 21 nt, Human
ggaaugaggcuugcugagagg

SEQ ID NO: 3449096 - RNA, 12 nt, Human
ggaaugaggggg

SEQ ID NO: 3449097 - RNA, 23 nt, Human
ggaaugcauuauuuauugcugug

SEQ ID NO: 3449098 - RNA, 19 nt, Human
ggaaugcccuucacuguca

SEQ ID NO: 3449099 - RNA, 19 nt, Human
ggaaugccugagugccugg

SEQ ID NO: 3449100 - RNA, 15 nt, Human
ggaauggcacagccc

SEQ ID NO: 3449101 - RNA, 14 nt, Human
ggaauggcagcagg

SEQ ID NO: 3449102 - RNA, 16 nt, Human
ggaauggcagcagggg

SEQ ID NO: 3449103 - RNA, 16 nt, Human
ggaauguauaguauuu

SEQ ID NO: 3449104 - RNA, 21 nt, Human
ggaauguauaguauuugaaaa

SEQ ID NO: 3449105 - RNA, 16 nt, Human
ggaauguuaaagucag

SEQ ID NO: 3449106 - RNA, 19 nt, Human
ggaauguuugggcagaagg

SEQ ID NO: 3449107 - RNA, 16 nt, Human
ggcagccugcguggcu

SEQ ID NO: 3449108 - RNA, 14 nt, Human
ggcagccuggcucc

SEQ ID NO: 3449109 - RNA, 15 nt, Human
ggcagcgccaagcaa

SEQ ID NO: 3449110 - RNA, 19 nt, Human
ggcagcgcccuuccucucc

SEQ ID NO: 3449111 - RNA, 20 nt, Human
ggcagcgcccuuccucucca

SEQ ID NO: 3449112 - RNA, 14 nt, Human
ggcagcucaccucu

SEQ ID NO: 3449113 - RNA, 16 nt, Human
ggcagcucaccucucc

SEQ ID NO: 3449114 - RNA, 11 nt, Human
ggcagcucucc

SEQ ID NO: 3449115 - RNA, 15 nt, Human
ggcagcucuggacag

SEQ ID NO: 3449116 - RNA, 12 nt, Human
ggcagcugccuc

SEQ ID NO: 3449117 - RNA, 13 nt, Human
ggcagcugccucc

SEQ ID NO: 3449118 - RNA, 16 nt, Human
ggcagcugccuccccu

SEQ ID NO: 3449119 - RNA, 18 nt, Human
ggcagcugccuccccucc

SEQ ID NO: 3449120 - RNA, 19 nt, Human
ggcagcugcgguccaccca

SEQ ID NO: 3449121 - RNA, 13 nt, Human
ggcagcugcuuuu

SEQ ID NO: 3449122 - RNA, 22 nt, Human
ggcagcugggcccaacccuguc

SEQ ID NO: 3449123 - RNA, 16 nt, Human
ggcagcuucugccccc

SEQ ID NO: 3449124 - RNA, 17 nt, Human
ggcagcuucugcccccu

SEQ ID NO: 3449125 - RNA, 22 nt, Human
ggcagcuucugcccccugcaga

SEQ ID NO: 3449126 - RNA, 17 nt, Human
ggcagcuugaggguugg

SEQ ID NO: 3449127 - RNA, 21 nt, Human
ggcagcuugaggguugggcug

SEQ ID NO: 3449128 - RNA, 18 nt, Human
ggcagcuugccccggccc

SEQ ID NO: 3449129 - RNA, 14 nt, Human
ggcagcuuugcuca

SEQ ID NO: 3449130 - RNA, 15 nt, Human
ggcagcuuugcucau

SEQ ID NO: 3449131 - RNA, 14 nt, Human
ggcagcuuuuaaaa

SEQ ID NO: 3449132 - RNA, 15 nt, Human
ggcagcuuuuaaaag

SEQ ID NO: 3449133 - RNA, 11 nt, Human
ggcaggaaaag

SEQ ID NO: 3449134 - RNA, 15 nt, Human
ggcaggaacaaacag

SEQ ID NO: 3449135 - RNA, 23 nt, Human
ggcaggaagcccaauugcuggag

SEQ ID NO: 3449136 - RNA, 16 nt, Human
ggcaggaaggagagcc

SEQ ID NO: 3449137 - RNA, 20 nt, Human
ggcaggacaacgaggaagcc

SEQ ID NO: 3449138 - RNA, 13 nt, Human
ggcaggaccagcc

SEQ ID NO: 3449139 - RNA, 14 nt, Human
ggcaggaccagccc

SEQ ID NO: 3449140 - RNA, 15 nt, Human
ggcaggaccagccca

SEQ ID NO: 3449141 - RNA, 16 nt, Human
ggcaggaccagcccac

SEQ ID NO: 3449142 - RNA, 18 nt, Human
ggcaggacgugggcuggg

SEQ ID NO: 3449143 - RNA, 24 nt, Human
ggcaggaggauugcuugagcccag

SEQ ID NO: 3449144 - RNA, 14 nt, Human
ggcaggaguagcug

SEQ ID NO: 3449145 - RNA, 15 nt, Human
ggcaggauggccugg

SEQ ID NO: 3449146 - RNA, 16 nt, Human
ggcaggauggccuggc

SEQ ID NO: 3449147 - RNA, 13 nt, Human
ggcaggcacagca

SEQ ID NO: 3449148 - RNA, 16 nt, Human
ggcaggcacagcacag

SEQ ID NO: 3449149 - RNA, 13 nt, Human
ggcaggcagcgcc

SEQ ID NO: 3449150 - RNA, 13 nt, Human
ggcaggcagggcu

SEQ ID NO: 3449151 - RNA, 15 nt, Human
ggcaggcagggcucu

SEQ ID NO: 3449152 - RNA, 19 nt, Human
ggcaggcagggcucuccug

SEQ ID NO: 3449153 - RNA, 22 nt, Human
ggcaggcagggcucuccuggcu

SEQ ID NO: 3449154 - RNA, 19 nt, Human
ggcaggccaccuggcucuc

SEQ ID NO: 3449155 - RNA, 15 nt, Human
ggcaggccagcugug

SEQ ID NO: 3449156 - RNA, 14 nt, Human
ggcaggcccugcac

SEQ ID NO: 3449157 - RNA, 15 nt, Human
ggcaggcccugcacu

SEQ ID NO: 3449158 - RNA, 13 nt, Human
ggacacaggccug

SEQ ID NO: 3449159 - RNA, 16 nt, Human
ggacacaguuccuggg

SEQ ID NO: 3449160 - RNA, 17 nt, Human
ggacacaguuccuggga

SEQ ID NO: 3449161 - RNA, 13 nt, Human
ggacacaugucca

SEQ ID NO: 3449162 - RNA, 19 nt, Human
ggacaccacacccagccuc

SEQ ID NO: 3449163 - RNA, 16 nt, Human
ggacaccagccaggcu

SEQ ID NO: 3449164 - RNA, 18 nt, Human
ggacaccagccaggcucu

SEQ ID NO: 3449165 - RNA, 16 nt, Human
ggacaccccgacuuuu

SEQ ID NO: 3449166 - RNA, 19 nt, Human
ggacaccccuuauccagga

SEQ ID NO: 3449167 - RNA, 15 nt, Human
ggacaccgggccagu

SEQ ID NO: 3449168 - RNA, 10 nt, Human
ggacaccugc

SEQ ID NO: 3449169 - RNA, 17 nt, Human
ggacaccugcccugccc

SEQ ID NO: 3449170 - RNA, 19 nt, Human
ggacaccuguacuggagag

SEQ ID NO: 3449171 - RNA, 21 nt, Human
ggacacgcgccccccucccag

SEQ ID NO: 3449172 - RNA, 17 nt, Human
ggacacuaaccacgcug

SEQ ID NO: 3449173 - RNA, 15 nt, Human
ggacacuacacccag

SEQ ID NO: 3449174 - RNA, 17 nt, Human
ggacacuacacccagca

SEQ ID NO: 3449175 - RNA, 18 nt, Human
ggacacuacacccagcaa

SEQ ID NO: 3449176 - RNA, 19 nt, Human
ggacacuacacccagcaau

SEQ ID NO: 3449177 - RNA, 17 nt, Human
ggacacucaaaagcugg

SEQ ID NO: 3449178 - RNA, 14 nt, Human
ggacacucagaccu

SEQ ID NO: 3449179 - RNA, 14 nt, Human
ggacacuccaggga

SEQ ID NO: 3449180 - RNA, 18 nt, Human
ggacacuccagggacaca

SEQ ID NO: 3449181 - RNA, 16 nt, Human
ggacacuccagugcca

SEQ ID NO: 3449182 - RNA, 15 nt, Human
ggacacuccuagaga

SEQ ID NO: 3449183 - RNA, 22 nt, Human
ggacacuuauccacgagagcgc

SEQ ID NO: 3449184 - RNA, 21 nt, Human
ggacacuucccucuguuucuc

SEQ ID NO: 3449185 - RNA, 14 nt, Human
ggacagaaagagac

SEQ ID NO: 3449186 - RNA, 15 nt, Human
ggacagaagcagcuc

SEQ ID NO: 3449187 - RNA, 20 nt, Human
ggacagaaggcuccugcccc

SEQ ID NO: 3449188 - RNA, 17 nt, Human
ggacagagacaccugca

SEQ ID NO: 3449189 - RNA, 18 nt, Human
ggacagagacaccugcac

SEQ ID NO: 3449190 - RNA, 21 nt, Human
ggacagagacaccugcaccuc

SEQ ID NO: 3449191 - RNA, 14 nt, Human
ggacagaggcccca

SEQ ID NO: 3449192 - RNA, 15 nt, Human
ggacagaggccccag

SEQ ID NO: 3449193 - RNA, 16 nt, Human
ggacagaggccccagc

SEQ ID NO: 3449194 - RNA, 13 nt, Human
ggacagaggggac

SEQ ID NO: 3449195 - RNA, 16 nt, Human
ggacagaggggacucu

SEQ ID NO: 3449196 - RNA, 18 nt, Human
ggacagaggggacucugg

SEQ ID NO: 3449197 - RNA, 20 nt, Human
ggacagaggggacucugggc

SEQ ID NO: 3449198 - RNA, 15 nt, Human
ggacagaucaauggc

SEQ ID NO: 3449199 - RNA, 23 nt, Human
ggacagaucaauggcgcagugcc

SEQ ID NO: 3449200 - RNA, 18 nt, Human
ggacagauucagucuugc

SEQ ID NO: 3449201 - RNA, 21 nt, Human
ggacagauugccuguuucuga

SEQ ID NO: 3449202 - RNA, 21 nt, Human
ggacagccacggccaggccag

SEQ ID NO: 3449203 - RNA, 22 nt, Human
ggacagccacggccaggccaga

SEQ ID NO: 3449204 - RNA, 14 nt, Human
ggacagcccagagc

SEQ ID NO: 3449205 - RNA, 17 nt, Human
ggacagcccagagccug

SEQ ID NO: 3449206 - RNA, 18 nt, Human
ggacagcccagagccugg

SEQ ID NO: 3449207 - RNA, 21 nt, Human
ggacagcccagagccuggcug

SEQ ID NO: 3449208 - RNA, 16 nt, Human
ggacagccccuccucc

SEQ ID NO: 3449209 - RNA, 16 nt, Human
ggacagccgccuggag

SEQ ID NO: 3449210 - RNA, 20 nt, Human
ggacagccugagucaccugc

SEQ ID NO: 3449211 - RNA, 22 nt, Human
ggacagccuguggcggugccug

SEQ ID NO: 3449212 - RNA, 11 nt, Human
ggacagcuccu

SEQ ID NO: 3449213 - RNA, 20 nt, Human
ggacagcugugccucgcucc

SEQ ID NO: 3449214 - RNA, 12 nt, Human
ggacagcugugu

SEQ ID NO: 3449215 - RNA, 14 nt, Human
ggacaggaccccag

SEQ ID NO: 3449216 - RNA, 17 nt, Human
ggacaggaccccagcuc

SEQ ID NO: 3449217 - RNA, 20 nt, Human
ggacaggaccccagcucugc

SEQ ID NO: 3449218 - RNA, 21 nt, Human
ggacaggaccccagcucugcg

SEQ ID NO: 3449219 - RNA, 20 nt, Human
ggacaggauguguuugcuuu

SEQ ID NO: 3449220 - RNA, 13 nt, Human
ggacaggcucugc

SEQ ID NO: 3449221 - RNA, 15 nt, Human
ggacagggcuggccc

SEQ ID NO: 3449222 - RNA, 16 nt, Human
ggacagggcuggccca

SEQ ID NO: 3449223 - RNA, 23 nt, Human
ggacagggcuggcccagcccugc

SEQ ID NO: 3449224 - RNA, 20 nt, Human
ggacagguccucaguguccu

SEQ ID NO: 3449225 - RNA, 15 nt, Human
ggacaggucugggag

SEQ ID NO: 3449226 - RNA, 15 nt, Human
ggacagucagcucuu

SEQ ID NO: 3449227 - RNA, 14 nt, Human
ggacagugcugcag

SEQ ID NO: 3449228 - RNA, 14 nt, Human
ggacagugcuucag

SEQ ID NO: 3449229 - RNA, 19 nt, Human
ggacagugcuucagccuga

SEQ ID NO: 3449230 - RNA, 21 nt, Human
ggacagugcuucagccugagg

SEQ ID NO: 3449231 - RNA, 22 nt, Human
ggacagugcuucagccugaggc

SEQ ID NO: 3449232 - RNA, 22 nt, Human
ggacaguggagugcaaaaggcu

SEQ ID NO: 3449233 - RNA, 14 nt, Human
ggacaguggcagga

SEQ ID NO: 3449234 - RNA, 18 nt, Human
ggacaguucacacccugc

SEQ ID NO: 3449235 - RNA, 19 nt, Human
ggacaguucacacccugca

SEQ ID NO: 3449236 - RNA, 20 nt, Human
ggacaguucacacccugcaa

SEQ ID NO: 3449237 - RNA, 23 nt, Human
ggacaguuuaccaguugccuuuu

SEQ ID NO: 3449238 - RNA, 12 nt, Human
ggacaucagcaa

SEQ ID NO: 3449239 - RNA, 14 nt, Human
ggacaucagcuggu

SEQ ID NO: 3449240 - RNA, 20 nt, Human
ggacauccccccgccaaaag

SEQ ID NO: 3449241 - RNA, 16 nt, Human
ggacauccuccuccca

SEQ ID NO: 3449242 - RNA, 21 nt, Human
ggacauccugucaucugagaa

SEQ ID NO: 3449243 - RNA, 21 nt, Human
ggacaugcgguagccagcaca

SEQ ID NO: 3449244 - RNA, 13 nt, Human
ggacauggacaag

SEQ ID NO: 3449245 - RNA, 14 nt, Human
ggacauggacaagg

SEQ ID NO: 3449246 - RNA, 21 nt, Human
ggacauggcuucugaaccugu

SEQ ID NO: 3449247 - RNA, 20 nt, Human
ggacaugggucgcccaugag

SEQ ID NO: 3449248 - RNA, 20 nt, Human
ggacauugcggacagccacg

SEQ ID NO: 3449249 - RNA, 14 nt, Human
ggacauuucucuaa

SEQ ID NO: 3449250 - RNA, 16 nt, Human
ggacauuugcucaugg

SEQ ID NO: 3449251 - RNA, 20 nt, Human
ggacauuugcucauggaauu

SEQ ID NO: 3449252 - RNA, 15 nt, Human
ggacauuuuaugucu

SEQ ID NO: 3449253 - RNA, 20 nt, Human
ggaggccagcacggugguga

SEQ ID NO: 3449254 - RNA, 16 nt, Human
ggaggccagccaguga

SEQ ID NO: 3449255 - RNA, 17 nt, Human
ggaggccaucuggagag

SEQ ID NO: 3449256 - RNA, 14 nt, Human
ggaggcccaaccuc

SEQ ID NO: 3449257 - RNA, 22 nt, Human
ggaggcccagcgcggacauccc

SEQ ID NO: 3449258 - RNA, 13 nt, Human
ggaggcccaguuc

SEQ ID NO: 3449259 - RNA, 15 nt, Human
ggaggccccuggagc

SEQ ID NO: 3449260 - RNA, 18 nt, Human
ggaggccccuggagccag

SEQ ID NO: 3449261 - RNA, 18 nt, Human
ggaggccccuggcccagc

SEQ ID NO: 3449262 - RNA, 19 nt, Human
ggaggccccuggcccagcg

SEQ ID NO: 3449263 - RNA, 17 nt, Human
ggaggcccgcagagcgc

SEQ ID NO: 3449264 - RNA, 15 nt, Human
ggaggccucaggugc

SEQ ID NO: 3449265 - RNA, 19 nt, Human
ggaggccucaggugcuguc

SEQ ID NO: 3449266 - RNA, 14 nt, Human
ggaggccugggggc

SEQ ID NO: 3449267 - RNA, 18 nt, Human
ggaggccuuccagcugcu

SEQ ID NO: 3449268 - RNA, 19 nt, Human
ggaggccuuccagcugcug

SEQ ID NO: 3449269 - RNA, 20 nt, Human
ggaggccuuccagcugcugu

SEQ ID NO: 3449270 - RNA, 23 nt, Human
ggaggccuuucccuaagccagcu

SEQ ID NO: 3449271 - RNA, 19 nt, Human
ggaggcggacguuccagcc

SEQ ID NO: 3449272 - RNA, 20 nt, Human
ggaggcggagaguacaguga

SEQ ID NO: 3449273 - RNA, 20 nt, Human
ggaggcggauguugaaguga

SEQ ID NO: 3449274 - RNA, 16 nt, Human
ggaggcggugggccug

SEQ ID NO: 3449275 - RNA, 22 nt, Human
ggaggcuaugcucaggggcccu

SEQ ID NO: 3449276 - RNA, 16 nt, Human
ggaggcuauguggagu

SEQ ID NO: 3449277 - RNA, 21 nt, Human
ggaggcucacccccuucucca

SEQ ID NO: 3449278 - RNA, 15 nt, Human
ggaggcucagguccc

SEQ ID NO: 3449279 - RNA, 15 nt, Human
ggaggcuccagaggg

SEQ ID NO: 3449280 - RNA, 18 nt, Human
ggaggcuccagagggcac

SEQ ID NO: 3449281 - RNA, 15 nt, Human
ggaggcucuggagcc

SEQ ID NO: 3449282 - RNA, 17 nt, Human
ggaggcucuggagccca

SEQ ID NO: 3449283 - RNA, 20 nt, Human
ggaggcucuggagcccacug

SEQ ID NO: 3449284 - RNA, 17 nt, Human
ggaggcugaggcaggag

SEQ ID NO: 3449285 - RNA, 13 nt, Human
ggaggcugaggcg

SEQ ID NO: 3449286 - RNA, 19 nt, Human
ggaggcugaggugggcaga

SEQ ID NO: 3449287 - RNA, 10 nt, Human
ggaggcugcc

SEQ ID NO: 3449288 - RNA, 22 nt, Human
ggaggcugcccccggcccccug

SEQ ID NO: 3449289 - RNA, 15 nt, Human
ggaggcugccuccca

SEQ ID NO: 3449290 - RNA, 12 nt, Human
ggaggcugcucg

SEQ ID NO: 3449291 - RNA, 23 nt, Human
ggaggcugcucggggugcacagg

SEQ ID NO: 3449292 - RNA, 20 nt, Human
ggaggcuggaggaagggggg

SEQ ID NO: 3449293 - RNA, 15 nt, Human
ggaggcuggcugggg

SEQ ID NO: 3449294 - RNA, 13 nt, Human
ggaggcugguccu

SEQ ID NO: 3449295 - RNA, 17 nt, Human
ggaggcuugucagagcu

SEQ ID NO: 3449296 - RNA, 16 nt, Human
ggagggaagcucuugg

SEQ ID NO: 3449297 - RNA, 15 nt, Human
ggagggaagggagcc

SEQ ID NO: 3449298 - RNA, 18 nt, Human
ggagggaagggagccaag

SEQ ID NO: 3449299 - RNA, 23 nt, Human
ggagggaagggagccaagggaug

SEQ ID NO: 3449300 - RNA, 19 nt, Human
ggagggacaaaggagccug

SEQ ID NO: 3449301 - RNA, 20 nt, Human
ggagggacaaaggagccugu

SEQ ID NO: 3449302 - RNA, 22 nt, Human
ggagggacaaguggacucaggg

SEQ ID NO: 3449303 - RNA, 15 nt, Human
ggagggaggcucagg

SEQ ID NO: 3449304 - RNA, 16 nt, Human
ggagggagggcuccag

SEQ ID NO: 3449305 - RNA, 21 nt, Human
ggagggaugcugccugaguca

SEQ ID NO: 3449306 - RNA, 12 nt, Human
ggagggauuugg

SEQ ID NO: 3449307 - RNA, 21 nt, Human
ggagggcaagggccaugcuga

SEQ ID NO: 3449308 - RNA, 19 nt, Human
ggagggcagagcuggugcg

SEQ ID NO: 3449309 - RNA, 16 nt, Human
ggagggcagcagaagg

SEQ ID NO: 3449310 - RNA, 13 nt, Human
ggagggcagcagg

SEQ ID NO: 3449311 - RNA, 15 nt, Human
ggagggcagcagggc

SEQ ID NO: 3449312 - RNA, 17 nt, Human
ggagggcagcagggcua

SEQ ID NO: 3449313 - RNA, 13 nt, Human
ggagggcaggcau

SEQ ID NO: 3449314 - RNA, 14 nt, Human
ggagggcaggcauc

SEQ ID NO: 3449315 - RNA, 20 nt, Human
ggagggccguaccccacccu

SEQ ID NO: 3449316 - RNA, 17 nt, Human
ggagggcgugacucacc

SEQ ID NO: 3449317 - RNA, 15 nt, Human
ggagggcgugggagc

SEQ ID NO: 3449318 - RNA, 22 nt, Human
ggagggcguucuuaggcugcug

SEQ ID NO: 3449319 - RNA, 20 nt, Human
ggagggcuagaaccuagaag

SEQ ID NO: 3449320 - RNA, 21 nt, Human
ggagggcuagaaccuggaagg

SEQ ID NO: 3449321 - RNA, 20 nt, Human
ggagggcuagaaucuggaga

SEQ ID NO: 3449322 - RNA, 13 nt, Human
ggagggcucugag

SEQ ID NO: 3449323 - RNA, 18 nt, Human
ggagggcucugaggcgcc

SEQ ID NO: 3449324 - RNA, 20 nt, Human
ggagggcuggaaucuggaga

SEQ ID NO: 3449325 - RNA, 13 nt, Human
ggaggggaagcug

SEQ ID NO: 3449326 - RNA, 20 nt, Human
ggaggggacuauuuaugaag

SEQ ID NO: 3449327 - RNA, 14 nt, Human
ggaggggagcucug

SEQ ID NO: 3449328 - RNA, 14 nt, Human
ggaggggaggguaa

SEQ ID NO: 3449329 - RNA, 13 nt, Human
ggaggggccuagg

SEQ ID NO: 3449330 - RNA, 15 nt, Human
ggaggggccuaggcc

SEQ ID NO: 3449331 - RNA, 18 nt, Human
ggaggggccuggcagccg

SEQ ID NO: 3449332 - RNA, 22 nt, Human
ggaggggcgcccaccuccccac

SEQ ID NO: 3449333 - RNA, 20 nt, Human
ggaggggcgcuggcccagcc

SEQ ID NO: 3449334 - RNA, 17 nt, Human
ggaggggcggcaggagg

SEQ ID NO: 3449335 - RNA, 14 nt, Human
ggagggggagaggg

SEQ ID NO: 3449336 - RNA, 13 nt, Human
ggaggggggaggu

SEQ ID NO: 3449337 - RNA, 16 nt, Human
ggaggggggagguggg

SEQ ID NO: 3449338 - RNA, 16 nt, Human
ggaggggguuacaaac

SEQ ID NO: 3449339 - RNA, 23 nt, Human
ggagggguaacuugcaccucuga

SEQ ID NO: 3449340 - RNA, 14 nt, Human
ggagggguugccac

SEQ ID NO: 3449341 - RNA, 13 nt, Human
ggaggguaaauaa

SEQ ID NO: 3449342 - RNA, 15 nt, Human
ggagggucaggaagg

SEQ ID NO: 3449343 - RNA, 20 nt, Human
ggagggucccaagcugggcc

SEQ ID NO: 3449344 - RNA, 19 nt, Human
ggagggugacgggggugaa

SEQ ID NO: 3449345 - RNA, 15 nt, Human
ggaggguggcaggug

SEQ ID NO: 3449346 - RNA, 22 nt, Human
ggagggugggggccaccugccu

SEQ ID NO: 3449347 - RNA, 20 nt, Human
ggaggguuggccugaguuag

SEQ ID NO: 3449348 - RNA, 22 nt, Human
ggagguaaggaauaccuguccc

SEQ ID NO: 3449349 - RNA, 20 nt, Human
ggagguagagguugugguga

SEQ ID NO: 3449350 - RNA, 19 nt, Human
ggaggucacauucaggaag

SEQ ID NO: 3449351 - RNA, 16 nt, Human
ggaggucaggcccugg

SEQ ID NO: 3449352 - RNA, 22 nt, Human
ggaggucgaccccaaagccccu

SEQ ID NO: 3449353 - RNA, 18 nt, Human
ggaggucgaggcaggagg

SEQ ID NO: 3449354 - RNA, 17 nt, Human
ggaggucguguauuugg

SEQ ID NO: 3449355 - RNA, 23 nt, Human
ggaggugaacaagcaaacccaga

SEQ ID NO: 3449356 - RNA, 17 nt, Human
ggaggugauuccaguga

SEQ ID NO: 3449357 - RNA, 14 nt, Human
ggagguggcauccc

SEQ ID NO: 3449358 - RNA, 18 nt, Human
ggagguggcuauggccac

SEQ ID NO: 3449359 - RNA, 15 nt, Human
ggaggugggccgugg

SEQ ID NO: 3449360 - RNA, 14 nt, Human
ggaggugucaggcu

SEQ ID NO: 3449361 - RNA, 18 nt, Human
ggaggugucucaggcugc

SEQ ID NO: 3449362 - RNA, 23 nt, Human
ggagguucuaaggccuaggauuc

SEQ ID NO: 3449363 - RNA, 14 nt, Human
ggagguugaagcca

SEQ ID NO: 3449364 - RNA, 15 nt, Human
ggccgggagccugau

SEQ ID NO: 3449365 - RNA, 14 nt, Human
ggccgggcacagcu

SEQ ID NO: 3449366 - RNA, 12 nt, Human
ggccgggcagag

SEQ ID NO: 3449367 - RNA, 20 nt, Human
ggccggggaacuggccaagc

SEQ ID NO: 3449368 - RNA, 17 nt, Human
ggccggucugcaaguca

SEQ ID NO: 3449369 - RNA, 23 nt, Human
ggccggucugcaagucagaggau

SEQ ID NO: 3449370 - RNA, 17 nt, Human
ggccguaccccacccuc

SEQ ID NO: 3449371 - RNA, 18 nt, Human
ggccguaucuccggcucc

SEQ ID NO: 3449372 - RNA, 15 nt, Human
ggccguccucccggg

SEQ ID NO: 3449373 - RNA, 18 nt, Human
ggccguccucccgggccc

SEQ ID NO: 3449374 - RNA, 20 nt, Human
ggccgucuucacucgccccc

SEQ ID NO: 3449375 - RNA, 13 nt, Human
ggccgugcccagg

SEQ ID NO: 3449376 - RNA, 16 nt, Human
ggccguggcugcccac

SEQ ID NO: 3449377 - RNA, 15 nt, Human
ggccguggcugcugu

SEQ ID NO: 3449378 - RNA, 18 nt, Human
ggccuaaaacuggccuga

SEQ ID NO: 3449379 - RNA, 20 nt, Human
ggccuaaaacuggccugacu

SEQ ID NO: 3449380 - RNA, 16 nt, Human
ggccuaaccugccgag

SEQ ID NO: 3449381 - RNA, 18 nt, Human
ggccuaagaggcugcccu

SEQ ID NO: 3449382 - RNA, 20 nt, Human
ggccuaagaggcugcccucc

SEQ ID NO: 3449383 - RNA, 17 nt, Human
ggccuacaugcuuugug

SEQ ID NO: 3449384 - RNA, 23 nt, Human
ggccuaccccgcagacaccuugg

SEQ ID NO: 3449385 - RNA, 15 nt, Human
ggccuacuccugucu

SEQ ID NO: 3449386 - RNA, 17 nt, Human
ggccuagcccacccugc

SEQ ID NO: 3449387 - RNA, 18 nt, Human
ggccuagcccacccugcu

SEQ ID NO: 3449388 - RNA, 19 nt, Human
ggccuagcugcuacaaaga

SEQ ID NO: 3449389 - RNA, 21 nt, Human
ggccuagcugcuacaaagaag

SEQ ID NO: 3449390 - RNA, 19 nt, Human
ggccuaggaggguccucug

SEQ ID NO: 3449391 - RNA, 15 nt, Human
ggccuaggauucuaa

SEQ ID NO: 3449392 - RNA, 13 nt, Human
ggccuaggcugca

SEQ ID NO: 3449393 - RNA, 15 nt, Human
ggccuagucagccac

SEQ ID NO: 3449394 - RNA, 13 nt, Human
ggccuaucuccua

SEQ ID NO: 3449395 - RNA, 18 nt, Human
ggccuaucuccuagggcu

SEQ ID NO: 3449396 - RNA, 19 nt, Human
ggccuauggagagcccugg

SEQ ID NO: 3449397 - RNA, 19 nt, Human
ggccuauuauauuaaaaua

SEQ ID NO: 3449398 - RNA, 15 nt, Human
ggccuggcuggcuga

SEQ ID NO: 3449399 - RNA, 15 nt, Human
ggccuggcuucuccu

SEQ ID NO: 3449400 - RNA, 17 nt, Human
ggccugggacuuccaug

SEQ ID NO: 3449401 - RNA, 13 nt, Human
ggccugggcagga

SEQ ID NO: 3449402 - RNA, 18 nt, Human
ggccugggcaguggaugg

SEQ ID NO: 3449403 - RNA, 15 nt, Human
ggccugggccgcugc

SEQ ID NO: 3449404 - RNA, 21 nt, Human
ggccugggccguaucuccggc

SEQ ID NO: 3449405 - RNA, 13 nt, Human
ggccugggcuagg

SEQ ID NO: 3449406 - RNA, 16 nt, Human
ggccugggcuccugga

SEQ ID NO: 3449407 - RNA, 14 nt, Human
ggccuggggccuga

SEQ ID NO: 3449408 - RNA, 17 nt, Human
ggccuggggccugagag

SEQ ID NO: 3449409 - RNA, 18 nt, Human
ggccuggggccugagaga

SEQ ID NO: 3449410 - RNA, 18 nt, Human
ggccuggggcuccuuucu

SEQ ID NO: 3449411 - RNA, 23 nt, Human
ggccuggggcuccuuucuccagc

SEQ ID NO: 3449412 - RNA, 20 nt, Human
ggccugggggcugggcagag

SEQ ID NO: 3449413 - RNA, 23 nt, Human
ggccugggggcugggcagaggaa

SEQ ID NO: 3449414 - RNA, 18 nt, Human
ggccugggguaccaagag

SEQ ID NO: 3449415 - RNA, 23 nt, Human
ggccuggguggaucggccuccuc

SEQ ID NO: 3449416 - RNA, 11 nt, Human
ggccugguccc

SEQ ID NO: 3449417 - RNA, 14 nt, Human
ggccuggucccugu

SEQ ID NO: 3449418 - RNA, 19 nt, Human
ggccuggucucacccugga

SEQ ID NO: 3449419 - RNA, 23 nt, Human
ggccuggucucacccuggaggca

SEQ ID NO: 3449420 - RNA, 21 nt, Human
ggccugguuaaauaaggcagg

SEQ ID NO: 3449421 - RNA, 17 nt, Human
ggccugguugaagaaga

SEQ ID NO: 3449422 - RNA, 18 nt, Human
ggccuguacagucugucu

SEQ ID NO: 3449423 - RNA, 15 nt, Human
ggccuguacugccug

SEQ ID NO: 3449424 - RNA, 18 nt, Human
ggccuguccaacacaucu

SEQ ID NO: 3449425 - RNA, 17 nt, Human
ggccugucccuggccau

SEQ ID NO: 3449426 - RNA, 23 nt, Human
ggccugucucauccccagggguc

SEQ ID NO: 3449427 - RNA, 14 nt, Human
ggccugucugugac

SEQ ID NO: 3449428 - RNA, 20 nt, Human
ggccuguggccuguguccca

SEQ ID NO: 3449429 - RNA, 20 nt, Human
ggccuguguagcugugaccu

SEQ ID NO: 3449430 - RNA, 21 nt, Human
ggccuguguagcugugaccug

SEQ ID NO: 3449431 - RNA, 21 nt, Human
ggccuguguucuuccuggccg

SEQ ID NO: 3449432 - RNA, 15 nt, Human
ggccuguugcccuuu

SEQ ID NO: 3449433 - RNA, 24 nt, Human
ggccuguugcuauagagccuaccu

SEQ ID NO: 3449434 - RNA, 17 nt, Human
ggccuuaauuuccuuuu

SEQ ID NO: 3449435 - RNA, 18 nt, Human
ggccuuacaccucguuag

SEQ ID NO: 3449436 - RNA, 15 nt, Human
ggccuuaccccugcc

SEQ ID NO: 3449437 - RNA, 21 nt, Human
ggccuuagugggccagggcug

SEQ ID NO: 3449438 - RNA, 17 nt, Human
ggccuuauugcauccca

SEQ ID NO: 3449439 - RNA, 14 nt, Human
ggccuucauaaugg

SEQ ID NO: 3449440 - RNA, 15 nt, Human
ggccuuccagcugcu

SEQ ID NO: 3449441 - RNA, 16 nt, Human
ggccuuccagcugcug

SEQ ID NO: 3449442 - RNA, 14 nt, Human
ggccuuccccagca

SEQ ID NO: 3449443 - RNA, 17 nt, Human
ggccuuccccagccucu

SEQ ID NO: 3449444 - RNA, 14 nt, Human
ggccuuccccuggc

SEQ ID NO: 3449445 - RNA, 20 nt, Human
ggccuuccccuggcacuggc

SEQ ID NO: 3449446 - RNA, 13 nt, Human
ggccuucggccuc

SEQ ID NO: 3449447 - RNA, 18 nt, Human
ggccuucggccuccaucc

SEQ ID NO: 3449448 - RNA, 23 nt, Human
ggccuucggccuccauccugagg

SEQ ID NO: 3449449 - RNA, 15 nt, Human
ggccuucucugaagg

SEQ ID NO: 3449450 - RNA, 14 nt, Human
ggccuugcccagag

SEQ ID NO: 3449451 - RNA, 15 nt, Human
ggccuugcccagaga

SEQ ID NO: 3449452 - RNA, 12 nt, Human
ggccuuggaaau

SEQ ID NO: 3449453 - RNA, 14 nt, Human
ggccuuggccugga

SEQ ID NO: 3449454 - RNA, 15 nt, Human
ggccuuggccuggag

SEQ ID NO: 3449455 - RNA, 17 nt, Human
ggccuuggccuggagca

SEQ ID NO: 3449456 - RNA, 20 nt, Human
ggccuuggcuuuucuagccu

SEQ ID NO: 3449457 - RNA, 19 nt, Human
ggccuuguccucagccagu

SEQ ID NO: 3449458 - RNA, 16 nt, Human
ggccuuguucugucac

SEQ ID NO: 3449459 - RNA, 14 nt, Human
ggccuuuaaaauuu

SEQ ID NO: 3449460 - RNA, 12 nt, Human
ggccuuuccucu

SEQ ID NO: 3449461 - RNA, 14 nt, Human
ggccuuuccucucu

SEQ ID NO: 3449462 - RNA, 23 nt, Human
ggccuuugcuuaugaauauuuau

SEQ ID NO: 3449463 - RNA, 17 nt, Human
ggccuuuuaacauuuug

SEQ ID NO: 3449464 - RNA, 17 nt, Human
ggccuuuucuggcaccg

SEQ ID NO: 3449465 - RNA, 21 nt, Human
ggcgaccaccgccccuggccg

SEQ ID NO: 3449466 - RNA, 11 nt, Human
ggcgaccuccu

SEQ ID NO: 3449467 - RNA, 16 nt, Human
ggcgagagaggagcca

SEQ ID NO: 3449468 - RNA, 14 nt, Human
ggcgagaggagggg

SEQ ID NO: 3449469 - RNA, 15 nt, Human
ggcgagaggaggggc

SEQ ID NO: 3449470 - RNA, 13 nt, Human
ggcgaggcagagg

SEQ ID NO: 3449471 - RNA, 16 nt, Human
ggcgagucacugccuc

SEQ ID NO: 3449472 - RNA, 23 nt, Human
ggcgagugaaugccagugugcug

SEQ ID NO: 3449473 - RNA, 16 nt, Human
ggcgagugccaggacu

SEQ ID NO: 3449474 - RNA, 20 nt, Human
ggcgaucacaacgugcauug

SEQ ID NO: 3449475 - RNA, 17 nt, Human
ggcgauccaccugucuc

SEQ ID NO: 3449476 - RNA, 21 nt, Human
ggcgaucgcggcggagcuggc

SEQ ID NO: 3449477 - RNA, 16 nt, Human
ggcgcacccuccccuc

SEQ ID NO: 3449478 - RNA, 24 nt, Human
ggcgcagcauauucaggaagcuca

SEQ ID NO: 3449479 - RNA, 16 nt, Human
ggcgcagugccucugg

SEQ ID NO: 3449480 - RNA, 14 nt, Human
ggcgcccaccuccc

SEQ ID NO: 3449481 - RNA, 15 nt, Human
ggcgcccaccucccc

SEQ ID NO: 3449482 - RNA, 24 nt, Human
ggcgcccaccuccccacgcccucc

SEQ ID NO: 3449483 - RNA, 23 nt, Human
ggcgccccaacccguggaggcug

SEQ ID NO: 3449484 - RNA, 22 nt, Human
ggcgccccugccaccucccuga

SEQ ID NO: 3449485 - RNA, 13 nt, Human
ggcgcccucuguc

SEQ ID NO: 3449486 - RNA, 14 nt, Human
ggcgcccucugucc

SEQ ID NO: 3449487 - RNA, 22 nt, Human
ggcgccgcaaaccacacuggac

SEQ ID NO: 3449488 - RNA, 19 nt, Human
ggcgccggcgggcgggccg

SEQ ID NO: 3449489 - RNA, 20 nt, Human
ggcgccgucuccaggggcug

SEQ ID NO: 3449490 - RNA, 21 nt, Human
ggcgccgugcugggcagcccg

SEQ ID NO: 3449491 - RNA, 23 nt, Human
ggcgccucaacucugcugagggu

SEQ ID NO: 3449492 - RNA, 11 nt, Human
ggcgccuggag

SEQ ID NO: 3449493 - RNA, 12 nt, Human
ggcgccuggccu

SEQ ID NO: 3449494 - RNA, 16 nt, Human
ggcgccuggccuccag

SEQ ID NO: 3449495 - RNA, 20 nt, Human
ggcgccuguagucccagcca

SEQ ID NO: 3449496 - RNA, 16 nt, Human
ggcgccugugguucug

SEQ ID NO: 3449497 - RNA, 15 nt, Human
ggcgcggagugaacc

SEQ ID NO: 3449498 - RNA, 16 nt, Human
ggcgcggccagccccg

SEQ ID NO: 3449499 - RNA, 15 nt, Human
ggcgcgguggcucac

SEQ ID NO: 3449500 - RNA, 18 nt, Human
ggcgcgugaggcccgugg

SEQ ID NO: 3449501 - RNA, 22 nt, Human
ggcgcuagcacagcucccuucu

SEQ ID NO: 3449502 - RNA, 21 nt, Human
ggcgcugcccaccugccggcc

SEQ ID NO: 3449503 - RNA, 11 nt, Human
ggcgcugcccc

SEQ ID NO: 3449504 - RNA, 23 nt, Human
ggcgcugccccaucuccccucag

SEQ ID NO: 3449505 - RNA, 19 nt, Human
ggcgcugccccuggcagcc

SEQ ID NO: 3449506 - RNA, 21 nt, Human
ggcgcugccccuggcagcccc

SEQ ID NO: 3449507 - RNA, 20 nt, Human
ggcgcuggguauuggaaaug

SEQ ID NO: 3449508 - RNA, 18 nt, Human
ggcggcccaagcccgacu

SEQ ID NO: 3449509 - RNA, 18 nt, Human
ggcggccccaacucgggc

SEQ ID NO: 3449510 - RNA, 17 nt, Human
ggcggccccucccgccc

SEQ ID NO: 3449511 - RNA, 21 nt, Human
ggcggcuacucagcagcccuc

SEQ ID NO: 3449512 - RNA, 14 nt, Human
ggcggcugagagcc

SEQ ID NO: 3449513 - RNA, 23 nt, Human
ggcggcugagagccccagcugac

SEQ ID NO: 3449514 - RNA, 24 nt, Human
ggcggcuggggucccagcagcugc

SEQ ID NO: 3449515 - RNA, 16 nt, Human
ggcgggacccaggcac

SEQ ID NO: 3449516 - RNA, 13 nt, Human
ggcgggccagcca

SEQ ID NO: 3449517 - RNA, 23 nt, Human
ggcggugcccacaccggggacag

SEQ ID NO: 3449518 - RNA, 15 nt, Human
ggcguaaguacagag

SEQ ID NO: 3449519 - RNA, 18 nt, Human
ggcguaaguacagagaag

SEQ ID NO: 3449520 - RNA, 19 nt, Human
ggcguaaguacagagaagc

SEQ ID NO: 3449521 - RNA, 19 nt, Human
ggcguagagggugcugccc

SEQ ID NO: 3449522 - RNA, 13 nt, Human
ggcgucagccucc

SEQ ID NO: 3449523 - RNA, 14 nt, Human
ggcgucagccucca

SEQ ID NO: 3449524 - RNA, 20 nt, Human
ggcgucagccuccagccucu

SEQ ID NO: 3449525 - RNA, 17 nt, Human
ggcguccaggccgcgcc

SEQ ID NO: 3449526 - RNA, 21 nt, Human
ggcguccgcgcgccagcacag

SEQ ID NO: 3449527 - RNA, 21 nt, Human
ggcgucuguucccccuucaca

SEQ ID NO: 3449528 - RNA, 17 nt, Human
ggcgugagaccugcccc

SEQ ID NO: 3449529 - RNA, 21 nt, Human
aacgcuuaaaggugucuuccu

SEQ ID NO: 3449530 - RNA, 21 nt, Human
aacggacgagauaaugugaac

SEQ ID NO: 3449531 - RNA, 19 nt, Human
aacggagagcgccugcccc

SEQ ID NO: 3449532 - RNA, 19 nt, Human
aacggaggccugcgacccu

SEQ ID NO: 3449533 - RNA, 22 nt, Human
aacggauuauuuuuucagaccg

SEQ ID NO: 3449534 - RNA, 15 nt, Human
aacggccccagcuuc

SEQ ID NO: 3449535 - RNA, 15 nt, Human
aacgggcugcccugc

SEQ ID NO: 3449536 - RNA, 16 nt, Human
aacggggcucuucuca

SEQ ID NO: 3449537 - RNA, 13 nt, Human
aacggugcucagg

SEQ ID NO: 3449538 - RNA, 19 nt, Human
aacguccucuuuaguuuuu

SEQ ID NO: 3449539 - RNA, 15 nt, Human
aacgucuuaaauauu

SEQ ID NO: 3449540 - RNA, 14 nt, Human
aacgugauacauuu

SEQ ID NO: 3449541 - RNA, 16 nt, Human
aacgugauacauuugg

SEQ ID NO: 3449542 - RNA, 23 nt, Human
gaaagacuauucaaacagucuca

SEQ ID NO: 3449543 - RNA, 17 nt, Human
gaaagacuguacaaagu

SEQ ID NO: 3449544 - RNA, 13 nt, Human
gaaagagaaacac

SEQ ID NO: 3449545 - RNA, 13 nt, Human
gaaagagagaaaa

SEQ ID NO: 3449546 - RNA, 14 nt, Human
gaaagagagaaaau

SEQ ID NO: 3449547 - RNA, 16 nt, Human
gaaagagagaaaauaa

SEQ ID NO: 3449548 - RNA, 20 nt, Human
gaaagagagaaaauaaaaag

SEQ ID NO: 3449549 - RNA, 23 nt, Human
gaaagagagaaaauaaaaaguua

SEQ ID NO: 3449550 - RNA, 16 nt, Human
gaaagagagcacugac

SEQ ID NO: 3449551 - RNA, 13 nt, Human
gaaagagauuuaa

SEQ ID NO: 3449552 - RNA, 16 nt, Human
gaaagagauuuaaacu

SEQ ID NO: 3449553 - RNA, 15 nt, Human
gaaagaggaaaagaa

SEQ ID NO: 3449554 - RNA, 17 nt, Human
gaaagaggagugcuugu

SEQ ID NO: 3449555 - RNA, 19 nt, Human
gaaagaggugaccccaggg

SEQ ID NO: 3449556 - RNA, 23 nt, Human
gaaagaggugaccccagggcaca

SEQ ID NO: 3449557 - RNA, 15 nt, Human
gaaagaguaaaggaa

SEQ ID NO: 3449558 - RNA, 16 nt, Human
gaaagaguaggaagac

SEQ ID NO: 3449559 - RNA, 17 nt, Human
gaaagaguuaagaaugu

SEQ ID NO: 3449560 - RNA, 18 nt, Human
gaaagaguuaagaauguc

SEQ ID NO: 3449561 - RNA, 16 nt, Human
gaaagaucaaaagguu

SEQ ID NO: 3449562 - RNA, 17 nt, Human
gaaagaugagcuuuucu

SEQ ID NO: 3449563 - RNA, 17 nt, Human
gaaagaugauuugcaau

SEQ ID NO: 3449564 - RNA, 16 nt, Human
gaaagcaaaaaugcua

SEQ ID NO: 3449565 - RNA, 18 nt, Human
gaaagcaaagcacagaga

SEQ ID NO: 3449566 - RNA, 14 nt, Human
gaaagcaaagggcu

SEQ ID NO: 3449567 - RNA, 14 nt, Human
gaaagcaauaaaug

SEQ ID NO: 3449568 - RNA, 23 nt, Human
gaaagcacaggugggcuucccag

SEQ ID NO: 3449569 - RNA, 21 nt, Human
gaaagcacugcaugaauaaaa

SEQ ID NO: 3449570 - RNA, 14 nt, Human
gaaagcagaacagu

SEQ ID NO: 3449571 - RNA, 19 nt, Human
gaaagcagaggcuggccuc

SEQ ID NO: 3449572 - RNA, 22 nt, Human
gaaagcagaguuuucauuaaau

SEQ ID NO: 3449573 - RNA, 14 nt, Human
gaaagcagcugaac

SEQ ID NO: 3449574 - RNA, 22 nt, Human
gaaagcagggacuugaacccau

SEQ ID NO: 3449575 - RNA, 12 nt, Human
gaaagcaggggc

SEQ ID NO: 3449576 - RNA, 14 nt, Human
gaaagcaggggcua

SEQ ID NO: 3449577 - RNA, 22 nt, Human
gaaagcauaaagcucaaaugaa

SEQ ID NO: 3449578 - RNA, 23 nt, Human
gaaagcauauggguuagauguug

SEQ ID NO: 3449579 - RNA, 18 nt, Human
gaaagcauuugaaugcau

SEQ ID NO: 3449580 - RNA, 13 nt, Human
gaaagccaccucu

SEQ ID NO: 3449581 - RNA, 11 nt, Human
gaaagccaggc

SEQ ID NO: 3449582 - RNA, 23 nt, Human
gaaagccaggcagguagccaggg

SEQ ID NO: 3449583 - RNA, 15 nt, Human
gaaagccagucuuaa

SEQ ID NO: 3449584 - RNA, 21 nt, Human
gaaagcccagaaaaggacaga

SEQ ID NO: 3449585 - RNA, 18 nt, Human
gaaagccccagcacuaac

SEQ ID NO: 3449586 - RNA, 14 nt, Human
gggaaugagcccag

SEQ ID NO: 3449587 - RNA, 17 nt, Human
gggaaugagcccagaga

SEQ ID NO: 3449588 - RNA, 21 nt, Human
gggaaugagcccagagaacag

SEQ ID NO: 3449589 - RNA, 22 nt, Human
gggaaugagcccagagaacagc

SEQ ID NO: 3449590 - RNA, 14 nt, Human
gggaaugaggcuug

SEQ ID NO: 3449591 - RNA, 12 nt, Human
gggaaugagggg

SEQ ID NO: 3449592 - RNA, 15 nt, Human
gggaaugauaugcau

SEQ ID NO: 3449593 - RNA, 21 nt, Human
gggaaugccugagugccuggc

SEQ ID NO: 3449594 - RNA, 11 nt, Human
gggaauguuug

SEQ ID NO: 3449595 - RNA, 22 nt, Human
gggaauguuugggcagaaggga

SEQ ID NO: 3449596 - RNA, 12 nt, Human
gggaauuuccuc

SEQ ID NO: 3449597 - RNA, 22 nt, Human
gggacaaagaggccuuuaacca

SEQ ID NO: 3449598 - RNA, 15 nt, Human
gggacaaaggagccu

SEQ ID NO: 3449599 - RNA, 19 nt, Human
gggacaaauuuaaaacaaa

SEQ ID NO: 3449600 - RNA, 20 nt, Human
gggacaaccuuggcuuggcc

SEQ ID NO: 3449601 - RNA, 19 nt, Human
gggacaacugcucccaccu

SEQ ID NO: 3449602 - RNA, 23 nt, Human
gggacaaggacuaggguccuggg

SEQ ID NO: 3449603 - RNA, 13 nt, Human
gggacaagggauu

SEQ ID NO: 3449604 - RNA, 22 nt, Human
gggacaaguggacucagggcag

SEQ ID NO: 3449605 - RNA, 13 nt, Human
gggacacacagcc

SEQ ID NO: 3449606 - RNA, 14 nt, Human
gggacaccagccag

SEQ ID NO: 3449607 - RNA, 17 nt, Human
gggacaccugcccugcc

SEQ ID NO: 3449608 - RNA, 17 nt, Human
gggacagaggccccagc

SEQ ID NO: 3449609 - RNA, 18 nt, Human
gggacagaggccccagcc

SEQ ID NO: 3449610 - RNA, 13 nt, Human
gggacagaggggg

SEQ ID NO: 3449611 - RNA, 22 nt, Human
gggacagaggggguggccuccc

SEQ ID NO: 3449612 - RNA, 19 nt, Human
gggacagcccagagccugg

SEQ ID NO: 3449613 - RNA, 12 nt, Human
gggacagcuccu

SEQ ID NO: 3449614 - RNA, 21 nt, Human
gggacaggaccccagcucugc

SEQ ID NO: 3449615 - RNA, 22 nt, Human
gggacaggaccccagcucugcg

SEQ ID NO: 3449616 - RNA, 12 nt, Human
gggacagggcug

SEQ ID NO: 3449617 - RNA, 17 nt, Human
gggacagguccucagug

SEQ ID NO: 3449618 - RNA, 22 nt, Human
gggacaguaauaagaauggaaa

SEQ ID NO: 3449619 - RNA, 20 nt, Human
gggacagucaccucauggaa

SEQ ID NO: 3449620 - RNA, 21 nt, Human
gggacagucaccucauggaau

SEQ ID NO: 3449621 - RNA, 12 nt, Human
gggacagucuca

SEQ ID NO: 3449622 - RNA, 18 nt, Human
gggacaugggucgcccau

SEQ ID NO: 3449623 - RNA, 13 nt, Human
gggacauguggaa

SEQ ID NO: 3449624 - RNA, 22 nt, Human
gggaccacagcaaggcaccugc

SEQ ID NO: 3449625 - RNA, 17 nt, Human
gggaccacccugagccg

SEQ ID NO: 3449626 - RNA, 14 nt, Human
gggaccagagcugc

SEQ ID NO: 3449627 - RNA, 20 nt, Human
gggaccagagcugccaccug

SEQ ID NO: 3449628 - RNA, 20 nt, Human
gggaccagcagccccacacc

SEQ ID NO: 3449629 - RNA, 12 nt, Human
gggacccaggcu

SEQ ID NO: 3449630 - RNA, 22 nt, Human
gggacccaggcuccgcccuuag

SEQ ID NO: 3449631 - RNA, 20 nt, Human
gggacccaguggcagggcac

SEQ ID NO: 3449632 - RNA, 21 nt, Human
gggaccccaggcccacucagg

SEQ ID NO: 3449633 - RNA, 17 nt, Human
gggacccccgcccccug

SEQ ID NO: 3449634 - RNA, 19 nt, Human
gggacccccgcccccugcc

SEQ ID NO: 3449635 - RNA, 16 nt, Human
gggaccccgagccugg

SEQ ID NO: 3449636 - RNA, 14 nt, Human
gggaccccugagcu

SEQ ID NO: 3449637 - RNA, 20 nt, Human
gggacccuaagacuccucgg

SEQ ID NO: 3449638 - RNA, 20 nt, Human
gggacccuccaaggccaggc

SEQ ID NO: 3449639 - RNA, 23 nt, Human
gggacccugugacauggugccug

SEQ ID NO: 3449640 - RNA, 20 nt, Human
gggaccggcggaccccagcc

SEQ ID NO: 3449641 - RNA, 13 nt, Human
gggaccucaggcc

SEQ ID NO: 3449642 - RNA, 22 nt, Human
gggaccuccccugaggcucagg

SEQ ID NO: 3449643 - RNA, 19 nt, Human
gggaccugccaggcagggg

SEQ ID NO: 3449644 - RNA, 19 nt, Human
gggacgaagaagagccaca

SEQ ID NO: 3449645 - RNA, 21 nt, Human
gggacgaagaagagccacagu

SEQ ID NO: 3449646 - RNA, 21 nt, Human
gggacggggggccccagucag

SEQ ID NO: 3449647 - RNA, 16 nt, Human
gggacgucccugccca

SEQ ID NO: 3449648 - RNA, 18 nt, Human
gggacguggcucagccag

SEQ ID NO: 3449649 - RNA, 19 nt, Human
gggacguggcucagccagc

SEQ ID NO: 3449650 - RNA, 20 nt, Human
gggacguggcucagccagca

SEQ ID NO: 3449651 - RNA, 22 nt, Human
gggacguggcucagccagcacu

SEQ ID NO: 3449652 - RNA, 15 nt, Human
gggacuaugaauggg

SEQ ID NO: 3449653 - RNA, 18 nt, Human
gggacuauuacauccaca

SEQ ID NO: 3449654 - RNA, 16 nt, Human
gggacucaaugcacug

SEQ ID NO: 3449655 - RNA, 20 nt, Human
gggacucaauuucuccccag

SEQ ID NO: 3449656 - RNA, 19 nt, Human
gggacucugaagccucugg

SEQ ID NO: 3449657 - RNA, 19 nt, Human
gggacugaaaaccucuccu

SEQ ID NO: 3449658 - RNA, 15 nt, Human
gggacugaccagcag

SEQ ID NO: 3449659 - RNA, 14 nt, Human
gggacugagccagu

SEQ ID NO: 3449660 - RNA, 17 nt, Human
gggacugagccaguccc

SEQ ID NO: 3449661 - RNA, 16 nt, Human
gggacugccaccuccc

SEQ ID NO: 3449662 - RNA, 14 nt, Human
gggacugccucugc

SEQ ID NO: 3449663 - RNA, 22 nt, Human
gggacugcugcugccuggccac

SEQ ID NO: 3449664 - RNA, 15 nt, Human
gggacugggagggcc

SEQ ID NO: 3449665 - RNA, 13 nt, Human
gggacuguaaguu

SEQ ID NO: 3449666 - RNA, 13 nt, Human
gggacuugaaguu

SEQ ID NO: 3449667 - RNA, 13 nt, Human
gggacuugugucu

SEQ ID NO: 3449668 - RNA, 14 nt, Human
gggagaaccucagg

SEQ ID NO: 3449669 - RNA, 15 nt, Human
gggagaaccucaggc

SEQ ID NO: 3449670 - RNA, 22 nt, Human
gggagaaugucaguauguggaa

SEQ ID NO: 3449671 - RNA, 19 nt, Human
gggagacacuggccccuca

SEQ ID NO: 3449672 - RNA, 13 nt, Human
gggagacagagca

SEQ ID NO: 3449673 - RNA, 12 nt, Human
gggagacagcau

SEQ ID NO: 3449674 - RNA, 17 nt, Human
gggagaccggccugcca

SEQ ID NO: 3449675 - RNA, 22 nt, Human
gggagaccggccugccaggagg

SEQ ID NO: 3449676 - RNA, 19 nt, Human
gggagaccucagaaguaaa

SEQ ID NO: 3449677 - RNA, 22 nt, Human
gggagacgguuuccagggaggg

SEQ ID NO: 3449678 - RNA, 14 nt, Human
gggagacuuugaug

SEQ ID NO: 3449679 - RNA, 12 nt, Human
gggagagaccuc

SEQ ID NO: 3449680 - RNA, 14 nt, Human
gggagagagagaga

SEQ ID NO: 3449681 - RNA, 22 nt, Human
gggagagagagagagagaggac

SEQ ID NO: 3449682 - RNA, 16 nt, Human
gggagagcaggcuggc

SEQ ID NO: 3449683 - RNA, 23 nt, Human
gggagagcaggcuggcagcucuc

SEQ ID NO: 3449684 - RNA, 12 nt, Human
gggagagccagc

SEQ ID NO: 3449685 - RNA, 14 nt, Human
gggagagccagcuc

SEQ ID NO: 3449686 - RNA, 13 nt, Human
gggagagcccagg

SEQ ID NO: 3449687 - RNA, 15 nt, Human
gggauucccaccaag

SEQ ID NO: 3449688 - RNA, 16 nt, Human
gggauuccugacccag

SEQ ID NO: 3449689 - RNA, 21 nt, Human
gggauucuacuuuaagcacua

SEQ ID NO: 3449690 - RNA, 17 nt, Human
gggauugaaggaugcug

SEQ ID NO: 3449691 - RNA, 17 nt, Human
gggauugcugccacuuu

SEQ ID NO: 3449692 - RNA, 13 nt, Human
gggauuggcugug

SEQ ID NO: 3449693 - RNA, 15 nt, Human
gggauugggccccug

SEQ ID NO: 3449694 - RNA, 16 nt, Human
gggauugggggcuggu

SEQ ID NO: 3449695 - RNA, 17 nt, Human
gggauuguaaaauggug

SEQ ID NO: 3449696 - RNA, 15 nt, Human
gggauuuaauuucca

SEQ ID NO: 3449697 - RNA, 17 nt, Human
gggauuucucccagcuc

SEQ ID NO: 3449698 - RNA, 16 nt, Human
gggcaaagccaggucc

SEQ ID NO: 3449699 - RNA, 14 nt, Human
gggcaaagccuagu

SEQ ID NO: 3449700 - RNA, 17 nt, Human
gggcaaaugccagggcc

SEQ ID NO: 3449701 - RNA, 21 nt, Human
gggcaacauuguucaccuuug

SEQ ID NO: 3449702 - RNA, 20 nt, Human
gggcaacccccagccugcua

SEQ ID NO: 3449703 - RNA, 20 nt, Human
gggcaagaagaucacgcucc

SEQ ID NO: 3449704 - RNA, 20 nt, Human
gggcaagcuccgcaggacuu

SEQ ID NO: 3449705 - RNA, 16 nt, Human
gggcaauauucucugu

SEQ ID NO: 3449706 - RNA, 21 nt, Human
gggcaauuaauuccuucagca

SEQ ID NO: 3449707 - RNA, 17 nt, Human
gggcaauuggaacaaag

SEQ ID NO: 3449708 - RNA, 14 nt, Human
gggcaauugucuga

SEQ ID NO: 3449709 - RNA, 14 nt, Human
gggcaauuuagaaa

SEQ ID NO: 3449710 - RNA, 15 nt, Human
gggcacaaagggccc

SEQ ID NO: 3449711 - RNA, 21 nt, Human
gggcacaacugcaauaacuuc

SEQ ID NO: 3449712 - RNA, 13 nt, Human
gggcacacacugu

SEQ ID NO: 3449713 - RNA, 15 nt, Human
gggcacacgccuccc

SEQ ID NO: 3449714 - RNA, 18 nt, Human
gggcacagaaaauggaag

SEQ ID NO: 3449715 - RNA, 12 nt, Human
gggcacaggagc

SEQ ID NO: 3449716 - RNA, 18 nt, Human
gggcacaggagcuaccug

SEQ ID NO: 3449717 - RNA, 13 nt, Human
gggcacaggaggc

SEQ ID NO: 3449718 - RNA, 13 nt, Human
gggcacagggccu

SEQ ID NO: 3449719 - RNA, 20 nt, Human
gggcacagggccuggcccau

SEQ ID NO: 3449720 - RNA, 13 nt, Human
gggcacagggucu

SEQ ID NO: 3449721 - RNA, 16 nt, Human
gggcacagggucucua

SEQ ID NO: 3449722 - RNA, 15 nt, Human
gggcacaggucaggc

SEQ ID NO: 3449723 - RNA, 20 nt, Human
gggcacaugcugagucuccc

SEQ ID NO: 3449724 - RNA, 22 nt, Human
gggcacaugcugagucucccaa

SEQ ID NO: 3449725 - RNA, 17 nt, Human
gggcaccacaaaauaua

SEQ ID NO: 3449726 - RNA, 12 nt, Human
gggcacccaccc

SEQ ID NO: 3449727 - RNA, 21 nt, Human
gggcacccccagccugggccu

SEQ ID NO: 3449728 - RNA, 20 nt, Human
gggcacccuguggcccuggc

SEQ ID NO: 3449729 - RNA, 19 nt, Human
gggcaccuauagucccagc

SEQ ID NO: 3449730 - RNA, 12 nt, Human
gggcaccugcca

SEQ ID NO: 3449731 - RNA, 16 nt, Human
gggcacugcucucacc

SEQ ID NO: 3449732 - RNA, 14 nt, Human
gggcacugcugggu

SEQ ID NO: 3449733 - RNA, 20 nt, Human
gggcacugcuggguggccca

SEQ ID NO: 3449734 - RNA, 14 nt, Human
gggcacuggagcug

SEQ ID NO: 3449735 - RNA, 13 nt, Human
gggcacuggccca

SEQ ID NO: 3449736 - RNA, 20 nt, Human
gggcacuuuaaaugaagcua

SEQ ID NO: 3449737 - RNA, 15 nt, Human
gggcagaaaguggcc

SEQ ID NO: 3449738 - RNA, 18 nt, Human
gggcagaagggagaagga

SEQ ID NO: 3449739 - RNA, 19 nt, Human
gggcagaagggagaaggau

SEQ ID NO: 3449740 - RNA, 14 nt, Human
gggcagagcacagc

SEQ ID NO: 3449741 - RNA, 12 nt, Human
gggcagagcaga

SEQ ID NO: 3449742 - RNA, 16 nt, Human
gggcagagcagagacc

SEQ ID NO: 3449743 - RNA, 17 nt, Human
gggcagagcagagacca

SEQ ID NO: 3449744 - RNA, 13 nt, Human
gggcagagccggg

SEQ ID NO: 3449745 - RNA, 11 nt, Human
gggcagagcug

SEQ ID NO: 3449746 - RNA, 16 nt, Human
gggcagagcuggcucu

SEQ ID NO: 3449747 - RNA, 19 nt, Human
gggcagagcuggcucugag

SEQ ID NO: 3449748 - RNA, 14 nt, Human
gggcagaggcugga

SEQ ID NO: 3449749 - RNA, 15 nt, Human
gggcagaggcuggag

SEQ ID NO: 3449750 - RNA, 16 nt, Human
gggcagaggcuggagg

SEQ ID NO: 3449751 - RNA, 21 nt, Human
gggcagaggcuggaggcaggg

SEQ ID NO: 3449752 - RNA, 23 nt, Human
gaaagccccugccccuccucucc

SEQ ID NO: 3449753 - RNA, 17 nt, Human
gaaagcccugagcuuuc

SEQ ID NO: 3449754 - RNA, 15 nt, Human
gaaagccucugcugc

SEQ ID NO: 3449755 - RNA, 12 nt, Human
gaaagccugagu

SEQ ID NO: 3449756 - RNA, 24 nt, Human
gaaagccuguuccccucacuggau

SEQ ID NO: 3449757 - RNA, 19 nt, Human
gaaagccuuaagcugcagg

SEQ ID NO: 3449758 - RNA, 16 nt, Human
gaaagccuuagggaag

SEQ ID NO: 3449759 - RNA, 14 nt, Human
gaaagccuuucauu

SEQ ID NO: 3449760 - RNA, 17 nt, Human
gaaagccuuucauuuug

SEQ ID NO: 3449761 - RNA, 21 nt, Human
gaaagccuuucauuuugcuuu

SEQ ID NO: 3449762 - RNA, 22 nt, Human
gaaagccuuucauuuugcuuua

SEQ ID NO: 3449763 - RNA, 19 nt, Human
gaaagcuauauaagacaag

SEQ ID NO: 3449764 - RNA, 12 nt, Human
gaaagcucuaga

SEQ ID NO: 3449765 - RNA, 18 nt, Human
gaaagcucuguugcaauu

SEQ ID NO: 3449766 - RNA, 15 nt, Human
gaaagcugacuuggc

SEQ ID NO: 3449767 - RNA, 18 nt, Human
gaaagcugacuuggcugg

SEQ ID NO: 3449768 - RNA, 19 nt, Human
gaaagcugacuuggcuggu

SEQ ID NO: 3449769 - RNA, 17 nt, Human
gaaagcugagaacuccu

SEQ ID NO: 3449770 - RNA, 19 nt, Human
gaaagcugagaacuccuga

SEQ ID NO: 3449771 - RNA, 24 nt, Human
gaaagcugugaacaggcugggcug

SEQ ID NO: 3449772 - RNA, 15 nt, Human
gaaagcuguguuuau

SEQ ID NO: 3449773 - RNA, 17 nt, Human
gaaagcuucaaacugca

SEQ ID NO: 3449774 - RNA, 16 nt, Human
gaaagcuucagugcug

SEQ ID NO: 3449775 - RNA, 22 nt, Human
gaaagcuuuauuuugagaugua

SEQ ID NO: 3449776 - RNA, 20 nt, Human
gaaagcuuuguugaaagaaa

SEQ ID NO: 3449777 - RNA, 14 nt, Human
gaaaggaaaccuuu

SEQ ID NO: 3449778 - RNA, 15 nt, Human
gaaaggaaaccuuuu

SEQ ID NO: 3449779 - RNA, 16 nt, Human
gaaaggaaagaggcuc

SEQ ID NO: 3449780 - RNA, 21 nt, Human
gaaaggaagcauuguaaaaua

SEQ ID NO: 3449781 - RNA, 23 nt, Human
gaaaggaagcauuguaaaauaau

SEQ ID NO: 3449782 - RNA, 14 nt, Human
gaaaggagaggaaa

SEQ ID NO: 3449783 - RNA, 17 nt, Human
gaaaggagaggaaagaa

SEQ ID NO: 3449784 - RNA, 19 nt, Human
gaaaggagccuaggccagg

SEQ ID NO: 3449785 - RNA, 22 nt, Human
gaaaggagccuaggccaggugc

SEQ ID NO: 3449786 - RNA, 18 nt, Human
gaaaggaggcaugccucu

SEQ ID NO: 3449787 - RNA, 16 nt, Human
gaaaggauauuuaaga

SEQ ID NO: 3449788 - RNA, 22 nt, Human
gaaaggauguaaacagugccug

SEQ ID NO: 3449789 - RNA, 13 nt, Human
gaaaggcaaggga

SEQ ID NO: 3449790 - RNA, 14 nt, Human
gaaaggccagcacu

SEQ ID NO: 3449791 - RNA, 12 nt, Human
gaaaggccagcu

SEQ ID NO: 3449792 - RNA, 14 nt, Human
gaaaggccagcugg

SEQ ID NO: 3449793 - RNA, 14 nt, Human
gaaaggccugcaca

SEQ ID NO: 3449794 - RNA, 15 nt, Human
gaaaggccuuuaaaa

SEQ ID NO: 3449795 - RNA, 21 nt, Human
gaaaggcuccaggagcagcca

SEQ ID NO: 3449796 - RNA, 15 nt, Human
gaaaggcucugaaag

SEQ ID NO: 3449797 - RNA, 16 nt, Human
gaaagggaacagaaag

SEQ ID NO: 3449798 - RNA, 20 nt, Human
gaaagggacgcuacccggga

SEQ ID NO: 3449799 - RNA, 16 nt, Human
gaaagggagggcucug

SEQ ID NO: 3449800 - RNA, 18 nt, Human
gaaagggagggcucugag

SEQ ID NO: 3449801 - RNA, 12 nt, Human
gaaagggauuuu

SEQ ID NO: 3449802 - RNA, 20 nt, Human
gaaagggcaacaauaaaaua

SEQ ID NO: 3449803 - RNA, 20 nt, Human
gaaagggcccuccuuccuaa

SEQ ID NO: 3449804 - RNA, 20 nt, Human
gaaagggccuugacaucagu

SEQ ID NO: 3449805 - RNA, 18 nt, Human
gaaaggggagagccugcu

SEQ ID NO: 3449806 - RNA, 16 nt, Human
gaaaggggagcccacu

SEQ ID NO: 3449807 - RNA, 20 nt, Human
gaaaggggcaggagcucaga

SEQ ID NO: 3449808 - RNA, 17 nt, Human
gaaaggggggagcuggg

SEQ ID NO: 3449809 - RNA, 21 nt, Human
gaaagggguuggggugacagu

SEQ ID NO: 3449810 - RNA, 12 nt, Human
gaaagggucucc

SEQ ID NO: 3449811 - RNA, 18 nt, Human
gaaaggucaccucacuca

SEQ ID NO: 3449812 - RNA, 23 nt, Human
gaaaggugaguuugagcugccuu

SEQ ID NO: 3449813 - RNA, 22 nt, Human
gaaaggugguguuucuguaaga

SEQ ID NO: 3449814 - RNA, 13 nt, Human
gaaagguuuugag

SEQ ID NO: 3449815 - RNA, 14 nt, Human
gaaaguaauuucuu

SEQ ID NO: 3449816 - RNA, 20 nt, Human
gaaaguacacucugcuguuu

SEQ ID NO: 3449817 - RNA, 22 nt, Human
gaaaguacacucugcuguuuga

SEQ ID NO: 3449818 - RNA, 22 nt, Human
gaaaguacuucuccacccugcu

SEQ ID NO: 3449819 - RNA, 17 nt, Human
gaaagucaugaacacau

SEQ ID NO: 3449820 - RNA, 18 nt, Human
gaaagucauuggcuuuau

SEQ ID NO: 3449821 - RNA, 22 nt, Human
gaaagucgaauuaauagcuuuu

SEQ ID NO: 3449822 - RNA, 13 nt, Human
gaaagucuguccu

SEQ ID NO: 3449823 - RNA, 23 nt, Human
gaaagucuguccuugaaggacua

SEQ ID NO: 3449824 - RNA, 17 nt, Human
gaaagugaauaaacuuc

SEQ ID NO: 3449825 - RNA, 22 nt, Human
gaaagugaauaaacuucagcac

SEQ ID NO: 3449826 - RNA, 14 nt, Human
gaaagugaugacau

SEQ ID NO: 3449827 - RNA, 22 nt, Human
gaaagugauuucuagaaagccu

SEQ ID NO: 3449828 - RNA, 13 nt, Human
gaaagugccugac

SEQ ID NO: 3449829 - RNA, 15 nt, Human
gaaagugccuuugca

SEQ ID NO: 3449830 - RNA, 18 nt, Human
gaaagugccuuugcagcu

SEQ ID NO: 3449831 - RNA, 20 nt, Human
gaaagugccuuugcagcuca

SEQ ID NO: 3449832 - RNA, 19 nt, Human
ggcuacucugugccagagc

SEQ ID NO: 3449833 - RNA, 23 nt, Human
ggcuacucugugccagagccugg

SEQ ID NO: 3449834 - RNA, 18 nt, Human
ggcuacuucggggcuggg

SEQ ID NO: 3449835 - RNA, 21 nt, Human
ggcuagaaccaagaagggcua

SEQ ID NO: 3449836 - RNA, 21 nt, Human
ggcuagaaccuagaagggcua

SEQ ID NO: 3449837 - RNA, 14 nt, Human
ggcuagaaccuggc

SEQ ID NO: 3449838 - RNA, 18 nt, Human
ggcuagaauauccuacuu

SEQ ID NO: 3449839 - RNA, 17 nt, Human
ggcuagacuagucucaa

SEQ ID NO: 3449840 - RNA, 17 nt, Human
ggcuagagguucaaaga

SEQ ID NO: 3449841 - RNA, 19 nt, Human
ggcuagaguccucacuccc

SEQ ID NO: 3449842 - RNA, 15 nt, Human
ggcuagcuaagccaa

SEQ ID NO: 3449843 - RNA, 14 nt, Human
ggcuagcuggagcc

SEQ ID NO: 3449844 - RNA, 17 nt, Human
ggcuagcuggagccugg

SEQ ID NO: 3449845 - RNA, 23 nt, Human
ggcuagucaagcuccuccucccu

SEQ ID NO: 3449846 - RNA, 13 nt, Human
ggcuagucagaga

SEQ ID NO: 3449847 - RNA, 23 nt, Human
ggcuagugacuugugucccauga

SEQ ID NO: 3449848 - RNA, 15 nt, Human
ggcuaguugggcuuc

SEQ ID NO: 3449849 - RNA, 18 nt, Human
ggcuauagaugucuuuuc

SEQ ID NO: 3449850 - RNA, 19 nt, Human
ggcuauagcuacaggaagc

SEQ ID NO: 3449851 - RNA, 20 nt, Human
ggcuauagcuacaggaagca

SEQ ID NO: 3449852 - RNA, 22 nt, Human
ggcuauggauuuucuaaggaag

SEQ ID NO: 3449853 - RNA, 13 nt, Human
ggcuauucacaac

SEQ ID NO: 3449854 - RNA, 18 nt, Human
ggcuauuuucuaaagacu

SEQ ID NO: 3449855 - RNA, 20 nt, Human
ggcuauuuucuaaagacuug

SEQ ID NO: 3449856 - RNA, 12 nt, Human
ggcucaaauuuu

SEQ ID NO: 3449857 - RNA, 17 nt, Human
ggcucaagcccaggagg

SEQ ID NO: 3449858 - RNA, 18 nt, Human
ggcucacacaccuguagc

SEQ ID NO: 3449859 - RNA, 13 nt, Human
ggcucacaccugu

SEQ ID NO: 3449860 - RNA, 21 nt, Human
ggcucacacuuggcucugagg

SEQ ID NO: 3449861 - RNA, 13 nt, Human
ggcucaccagaau

SEQ ID NO: 3449862 - RNA, 19 nt, Human
ggcucacccaagcaaggcc

SEQ ID NO: 3449863 - RNA, 13 nt, Human
ggcucacccaguc

SEQ ID NO: 3449864 - RNA, 18 nt, Human
ggcucaccuugugcuggg

SEQ ID NO: 3449865 - RNA, 20 nt, Human
ggcucacgccuaugauccca

SEQ ID NO: 3449866 - RNA, 13 nt, Human
ggcucacgccugu

SEQ ID NO: 3449867 - RNA, 17 nt, Human
ggcucacuauggugcca

SEQ ID NO: 3449868 - RNA, 16 nt, Human
ggcucacucagcacuu

SEQ ID NO: 3449869 - RNA, 23 nt, Human
ggcucacugcaaccuccaccucc

SEQ ID NO: 3449870 - RNA, 18 nt, Human
ggcucacugcagccucga

SEQ ID NO: 3449871 - RNA, 16 nt, Human
ggcucacugcauccuc

SEQ ID NO: 3449872 - RNA, 19 nt, Human
ggcucacugcauccuccgc

SEQ ID NO: 3449873 - RNA, 22 nt, Human
ggcucacugccaggccagccuc

SEQ ID NO: 3449874 - RNA, 17 nt, Human
ggcucagcaaggccacc

SEQ ID NO: 3449875 - RNA, 21 nt, Human
ggcucagcaaggccaccucuu

SEQ ID NO: 3449876 - RNA, 22 nt, Human
ggcucagcaaggccaccucuuc

SEQ ID NO: 3449877 - RNA, 11 nt, Human
ggcucagccug

SEQ ID NO: 3449878 - RNA, 12 nt, Human
ggcucagccugg

SEQ ID NO: 3449879 - RNA, 20 nt, Human
ggcucagcggggacagcucc

SEQ ID NO: 3449880 - RNA, 21 nt, Human
ggcucagcggggacagcuccu

SEQ ID NO: 3449881 - RNA, 22 nt, Human
ggcucagcggggacagcuccuu

SEQ ID NO: 3449882 - RNA, 23 nt, Human
ggcucagcggggacagcuccuuc

SEQ ID NO: 3449883 - RNA, 21 nt, Human
ggcucagcucggggagccuua

SEQ ID NO: 3449884 - RNA, 22 nt, Human
ggcucaggauuucgugggucug

SEQ ID NO: 3449885 - RNA, 15 nt, Human
ggcucaggcaggggc

SEQ ID NO: 3449886 - RNA, 21 nt, Human
ggcucaggcaggggccuccau

SEQ ID NO: 3449887 - RNA, 14 nt, Human
ggcucagggaccac

SEQ ID NO: 3449888 - RNA, 15 nt, Human
ggcucagucucagga

SEQ ID NO: 3449889 - RNA, 21 nt, Human
ggcucagugaaguugcugcuu

SEQ ID NO: 3449890 - RNA, 20 nt, Human
ggcucauagggaagaccugc

SEQ ID NO: 3449891 - RNA, 17 nt, Human
ggcucauauuccugcag

SEQ ID NO: 3449892 - RNA, 19 nt, Human
ggcuccaacacugcugcuc

SEQ ID NO: 3449893 - RNA, 19 nt, Human
ggcuccagacacaugucca

SEQ ID NO: 3449894 - RNA, 16 nt, Human
ggcuccagagggcacu

SEQ ID NO: 3449895 - RNA, 18 nt, Human
ggcuccagaugcagggca

SEQ ID NO: 3449896 - RNA, 19 nt, Human
ggcuccagaugcagggcag

SEQ ID NO: 3449897 - RNA, 18 nt, Human
ggcuccagccaucucaug

SEQ ID NO: 3449898 - RNA, 22 nt, Human
ggcuccagccccucuuggagaa

SEQ ID NO: 3449899 - RNA, 12 nt, Human
ggcuccagcugg

SEQ ID NO: 3449900 - RNA, 12 nt, Human
ggcuccaggagc

SEQ ID NO: 3449901 - RNA, 18 nt, Human
ggcuccaggagcagccac

SEQ ID NO: 3449902 - RNA, 14 nt, Human
ggcuccaggccagg

SEQ ID NO: 3449903 - RNA, 16 nt, Human
ggcuccaggccagggg

SEQ ID NO: 3449904 - RNA, 12 nt, Human
ggcuccaggcuc

SEQ ID NO: 3449905 - RNA, 16 nt, Human
ggcuccaggcuccuuu

SEQ ID NO: 3449906 - RNA, 18 nt, Human
ggcuccagucugcugccc

SEQ ID NO: 3449907 - RNA, 14 nt, Human
ggcuccauauauau

SEQ ID NO: 3449908 - RNA, 14 nt, Human
ggcucccacaggcc

SEQ ID NO: 3449909 - RNA, 17 nt, Human
ggcucccacaggcccuu

SEQ ID NO: 3449910 - RNA, 15 nt, Human
ggcucccagccaggc

SEQ ID NO: 3449911 - RNA, 17 nt, Human
ggcucccagccucagcg

SEQ ID NO: 3449912 - RNA, 13 nt, Human
ggcucccaggaca

SEQ ID NO: 3449913 - RNA, 21 nt, Human
ggcucccaggagccugcccag

SEQ ID NO: 3449914 - RNA, 12 nt, Human
ggcucccagggg

SEQ ID NO: 3449915 - RNA, 23 nt, Human
ggcucccaggggcucccuccgcc

SEQ ID NO: 3449916 - RNA, 21 nt, Human
ggcucccaggggucucccugg

SEQ ID NO: 3449917 - RNA, 15 nt, Human
ggcucccauucacuc

SEQ ID NO: 3449918 - RNA, 18 nt, Human
ggcucccauucacucuuc

SEQ ID NO: 3449919 - RNA, 16 nt, Human
ggcuccccaguacacc

SEQ ID NO: 3449920 - RNA, 22 nt, Human
ggcuccccauguguccugguuc

SEQ ID NO: 3449921 - RNA, 16 nt, Human
ggcucccccaggggcu

SEQ ID NO: 3449922 - RNA, 11 nt, Human
ggcuccccucu

SEQ ID NO: 3449923 - RNA, 18 nt, Human
ggcuccccucuuccucuu

SEQ ID NO: 3449924 - RNA, 19 nt, Human
ggcuccccucuuccucuug

SEQ ID NO: 3449925 - RNA, 11 nt, Human
ggcuccccugg

SEQ ID NO: 3449926 - RNA, 20 nt, Human
ggcuccccuuuuucuuccuc

SEQ ID NO: 3449927 - RNA, 17 nt, Human
ggcucccgccuccaacc

SEQ ID NO: 3449928 - RNA, 20 nt, Human
ggcucccgccuccaaccccu

SEQ ID NO: 3449929 - RNA, 17 nt, Human
ggcucccucacucucag

SEQ ID NO: 3449930 - RNA, 13 nt, Human
ggcucccuccgcc

SEQ ID NO: 3449931 - RNA, 13 nt, Human
ggcucccuuccuc

SEQ ID NO: 3449932 - RNA, 15 nt, Human
ggcuccgcugugugg

SEQ ID NO: 3449933 - RNA, 14 nt, Human
ggcuccggccucug

SEQ ID NO: 3449934 - RNA, 15 nt, Human
ggcuccggccucugc

SEQ ID NO: 3449935 - RNA, 18 nt, Human
ggcuccgucaguaucagg

SEQ ID NO: 3449936 - RNA, 20 nt, Human
ggcuccuaucuguguuuuga

SEQ ID NO: 3449937 - RNA, 20 nt, Human
ggcuccucgagaucccaaca

SEQ ID NO: 3449938 - RNA, 12 nt, Human
ggcuccucucag

SEQ ID NO: 3449939 - RNA, 21 nt, Human
ggcuccucucuaaccuccuuu

SEQ ID NO: 3449940 - RNA, 12 nt, Human
ggcuccugaggg

SEQ ID NO: 3449941 - RNA, 9 nt, Human
ggcuccugc

SEQ ID NO: 3449942 - RNA, 13 nt, Human
ggcuccugccacc

SEQ ID NO: 3449943 - RNA, 12 nt, Human
ggcuccugccca

SEQ ID NO: 3449944 - RNA, 15 nt, Human
ggcuccugcccccau

SEQ ID NO: 3449945 - RNA, 17 nt, Human
ggcuccugccuucuguc

SEQ ID NO: 3449946 - RNA, 11 nt, Human
ggcuccugcug

SEQ ID NO: 3449947 - RNA, 16 nt, Human
ggcuccugcugcacca

SEQ ID NO: 3449948 - RNA, 11 nt, Human
ggcuccugucc

SEQ ID NO: 3449949 - RNA, 13 nt, Human
ggcuccugugccc

SEQ ID NO: 3449950 - RNA, 14 nt, Human
ggcuccugugcccu

SEQ ID NO: 3449951 - RNA, 13 nt, Human
ggcuccugugcua

SEQ ID NO: 3449952 - RNA, 18 nt, Human
ggcuccuguuagcuccuc

SEQ ID NO: 3449953 - RNA, 15 nt, Human
ggcuccuguuuugca

SEQ ID NO: 3449954 - RNA, 20 nt, Human
ggcuccuucccaucgcuguc

SEQ ID NO: 3449955 - RNA, 20 nt, Human
ggcuccuugugggccugggc

SEQ ID NO: 3449956 - RNA, 22 nt, Human
ggcuccuugugggccugggcuc

SEQ ID NO: 3449957 - RNA, 19 nt, Human
ggcuccuuuagcgcccagu

SEQ ID NO: 3449958 - RNA, 16 nt, Human
ggggaccucaggccug

SEQ ID NO: 3449959 - RNA, 16 nt, Human
ggggacgcuccgcugc

SEQ ID NO: 3449960 - RNA, 18 nt, Human
ggggacggggggccccag

SEQ ID NO: 3449961 - RNA, 21 nt, Human
ggggacuagccccuguggaga

SEQ ID NO: 3449962 - RNA, 16 nt, Human
ggggacucugggcuau

SEQ ID NO: 3449963 - RNA, 14 nt, Human
ggggacugccaccu

SEQ ID NO: 3449964 - RNA, 17 nt, Human
ggggacugccaccuccc

SEQ ID NO: 3449965 - RNA, 14 nt, Human
ggggacugucuuuc

SEQ ID NO: 3449966 - RNA, 16 nt, Human
ggggaggcggcacucc

SEQ ID NO: 3449967 - RNA, 18 nt, Human
ggggagggaagggagcca

SEQ ID NO: 3449968 - RNA, 20 nt, Human
ggggagggaagggagccaag

SEQ ID NO: 3449969 - RNA, 21 nt, Human
ggggagggccguaccccaccc

SEQ ID NO: 3449970 - RNA, 13 nt, Human
ggggaggggaagu

SEQ ID NO: 3449971 - RNA, 13 nt, Human
ggggaggggcgcu

SEQ ID NO: 3449972 - RNA, 16 nt, Human
ggggaggggcgcuggc

SEQ ID NO: 3449973 - RNA, 22 nt, Human
ggggaguaaagaauuauuuugu

SEQ ID NO: 3449974 - RNA, 14 nt, Human
ggggaguagagaag

SEQ ID NO: 3449975 - RNA, 14 nt, Human
ggggaguaugcaaa

SEQ ID NO: 3449976 - RNA, 17 nt, Human
ggggagucugaagcaga

SEQ ID NO: 3449977 - RNA, 18 nt, Human
ggggaguuuagggugggg

SEQ ID NO: 3449978 - RNA, 13 nt, Human
gggugaaagaaau

SEQ ID NO: 3449979 - RNA, 20 nt, Human
gggugaacaaagcagccacg

SEQ ID NO: 3449980 - RNA, 12 nt, Human
gggugaaggcug

SEQ ID NO: 3449981 - RNA, 14 nt, Human
gggugaagggagag

SEQ ID NO: 3449982 - RNA, 23 nt, Human
gggugaauaauaaaaguauauau

SEQ ID NO: 3449983 - RNA, 20 nt, Human
gggugacagucaucaucagg

SEQ ID NO: 3449984 - RNA, 22 nt, Human
gggugacagucaucaucagggc

SEQ ID NO: 3449985 - RNA, 20 nt, Human
gggugagaugcuggagaaga

SEQ ID NO: 3449986 - RNA, 14 nt, Human
gggugaggagcugg

SEQ ID NO: 3449987 - RNA, 23 nt, Human
gggugaguuggcuuaccuggccc

SEQ ID NO: 3449988 - RNA, 23 nt, Human
gggugaugagggcagcagccagc

SEQ ID NO: 3449989 - RNA, 15 nt, Human
gggugauggggaggg

SEQ ID NO: 3449990 - RNA, 13 nt, Human
gggugauuccuaa

SEQ ID NO: 3449991 - RNA, 23 nt, Human
gggugauuuuaugaucaguguug

SEQ ID NO: 3449992 - RNA, 16 nt, Human
gggugcacaggagggg

SEQ ID NO: 3449993 - RNA, 15 nt, Human
gggugcagaggcugu

SEQ ID NO: 3449994 - RNA, 16 nt, Human
gggugcagaggcugug

SEQ ID NO: 3449995 - RNA, 14 nt, Human
gggugcagcaguga

SEQ ID NO: 3449996 - RNA, 13 nt, Human
gggugcagcccaa

SEQ ID NO: 3449997 - RNA, 15 nt, Human
gggugcagcugagaa

SEQ ID NO: 3449998 - RNA, 21 nt, Human
gggugccccccuugccagaca

SEQ ID NO: 3449999 - RNA, 12 nt, Human
gggugccgccug

SEQ ID NO: 3450000 - RNA, 19 nt, Human
gggugcgaccccaucugcc

SEQ ID NO: 3450001 - RNA, 15 nt, Human
gggugcuacugggga

SEQ ID NO: 3450002 - RNA, 18 nt, Human
gggugcuaguggugggca

SEQ ID NO: 3450003 - RNA, 21 nt, Human
gggugcucagaauaaggcagg

SEQ ID NO: 3450004 - RNA, 21 nt, Human
gggugcugccccaugaagcca

SEQ ID NO: 3450005 - RNA, 18 nt, Human
gggugcugggaggaggga

SEQ ID NO: 3450006 - RNA, 16 nt, Human
gggugcuguuuugcca

SEQ ID NO: 3450007 - RNA, 12 nt, Human
ggguggaagcuu

SEQ ID NO: 3450008 - RNA, 21 nt, Human
ggguggacaaacuggagucug

SEQ ID NO: 3450009 - RNA, 15 nt, Human
ggguggagaagccau

SEQ ID NO: 3450010 - RNA, 23 nt, Human
ggguggagacugcuucccauccu

SEQ ID NO: 3450011 - RNA, 14 nt, Human
ggguggauauaaau

SEQ ID NO: 3450012 - RNA, 23 nt, Human
ggguggauuuggguuggaaguga

SEQ ID NO: 3450013 - RNA, 15 nt, Human
ggguggcaccagcag

SEQ ID NO: 3450014 - RNA, 20 nt, Human
ggguggcaucauuccaggcc

SEQ ID NO: 3450015 - RNA, 20 nt, Human
ggguggccacagcgccagcc

SEQ ID NO: 3450016 - RNA, 11 nt, Human
ggguggccugu

SEQ ID NO: 3450017 - RNA, 20 nt, Human
ggguggcuacucugugccag

SEQ ID NO: 3450018 - RNA, 13 nt, Human
ggguggcugcagc

SEQ ID NO: 3450019 - RNA, 15 nt, Human
gggugggacacccug

SEQ ID NO: 3450020 - RNA, 19 nt, Human
gggugggacacccugugau

SEQ ID NO: 3450021 - RNA, 13 nt, Human
gggugggccaggc

SEQ ID NO: 3450022 - RNA, 13 nt, Human
ggguggggaaagg

SEQ ID NO: 3450023 - RNA, 18 nt, Human
ggguggggggggugcugg

SEQ ID NO: 3450024 - RNA, 17 nt, Human
ggguggggucaugcccu

SEQ ID NO: 3450025 - RNA, 20 nt, Human
gggugggucagaacccugcc

SEQ ID NO: 3450026 - RNA, 14 nt, Human
gggugggugcucag

SEQ ID NO: 3450027 - RNA, 21 nt, Human
gggugguaagagaauguuaua

SEQ ID NO: 3450028 - RNA, 13 nt, Human
gggugguccugac

SEQ ID NO: 3450029 - RNA, 14 nt, Human
ggguggugcuggga

SEQ ID NO: 3450030 - RNA, 18 nt, Human
ggguggugcugggacuga

SEQ ID NO: 3450031 - RNA, 18 nt, Human
ggguguaaaaccuggaga

SEQ ID NO: 3450032 - RNA, 17 nt, Human
gggugucccagaccccg

SEQ ID NO: 3450033 - RNA, 20 nt, Human
ggguguccccaacagcgccc

SEQ ID NO: 3450034 - RNA, 23 nt, Human
ggguguccugcaccggggccugg

SEQ ID NO: 3450035 - RNA, 17 nt, Human
ggguguccugccugucu

SEQ ID NO: 3450036 - RNA, 19 nt, Human
ggguguccugccugucugc

SEQ ID NO: 3450037 - RNA, 22 nt, Human
ggguguccugccugucugcccc

SEQ ID NO: 3450038 - RNA, 23 nt, Human
gggugucuugggcagagcuggcu

SEQ ID NO: 3450039 - RNA, 17 nt, Human
gggugugcacaucucug

SEQ ID NO: 3450040 - RNA, 16 nt, Human
ggguguggcccugcca

SEQ ID NO: 3450041 - RNA, 14 nt, Human
gggugugggaaagc

SEQ ID NO: 3450042 - RNA, 16 nt, Human
gggugugggaggcccg

SEQ ID NO: 3450043 - RNA, 14 nt, Human
ggguguguguuugu

SEQ ID NO: 3450044 - RNA, 22 nt, Human
ggguguguguuugugugagaga

SEQ ID NO: 3450045 - RNA, 15 nt, Human
ggguguuaauuuaug

SEQ ID NO: 3450046 - RNA, 15 nt, Human
ggguuaaggccugaa

SEQ ID NO: 3450047 - RNA, 18 nt, Human
ggguuagacugccagcuc

SEQ ID NO: 3450048 - RNA, 18 nt, Human
ggguuagauguugccaug

SEQ ID NO: 3450049 - RNA, 20 nt, Human
ggguuauguguaugugccau

SEQ ID NO: 3450050 - RNA, 16 nt, Human
ggguucaaaaugucug

SEQ ID NO: 3450051 - RNA, 16 nt, Human
ggguucagccccuccu

SEQ ID NO: 3450052 - RNA, 19 nt, Human
ggguucagccccuccucug

SEQ ID NO: 3450053 - RNA, 19 nt, Human
ggguucauaggucacuggc

SEQ ID NO: 3450054 - RNA, 21 nt, Human
ggguucauaggucacuggcuc

SEQ ID NO: 3450055 - RNA, 15 nt, Human
ggguucaugaugcag

SEQ ID NO: 3450056 - RNA, 17 nt, Human
ggguucauuauuggaau

SEQ ID NO: 3450057 - RNA, 13 nt, Human
ggguucauuugug

SEQ ID NO: 3450058 - RNA, 14 nt, Human
ggguucauuugugu

SEQ ID NO: 3450059 - RNA, 14 nt, Human
ggguucccccagcc

SEQ ID NO: 3450060 - RNA, 15 nt, Human
ggguucccccagccc

SEQ ID NO: 3450061 - RNA, 17 nt, Human
ggguuccucaaauuuuu

SEQ ID NO: 3450062 - RNA, 21 nt, Human
ggguuccuuccucugagccuu

SEQ ID NO: 3450063 - RNA, 17 nt, Human
ggguucuacccaggugc

SEQ ID NO: 3450064 - RNA, 22 nt, Human
ggguucuaggcaucucuguacu

SEQ ID NO: 3450065 - RNA, 22 nt, Human
ggguucuguaaaauggaaaacu

SEQ ID NO: 3450066 - RNA, 16 nt, Human
ggguucuuuggaagga

SEQ ID NO: 3450067 - RNA, 12 nt, Human
ggguugaaaauu

SEQ ID NO: 3450068 - RNA, 21 nt, Human
ggguugagcagggauccuggu

SEQ ID NO: 3450069 - RNA, 16 nt, Human
ggguuggccccugccc

SEQ ID NO: 3450070 - RNA, 22 nt, Human
ggguuggcgcacccuccccucc

SEQ ID NO: 3450071 - RNA, 12 nt, Human
ggguugggccca

SEQ ID NO: 3450072 - RNA, 22 nt, Human
ggguugggcccagaucuggucc

SEQ ID NO: 3450073 - RNA, 15 nt, Human
ggguugggcuggugu

SEQ ID NO: 3450074 - RNA, 21 nt, Human
ggguuggguucaucugagcaa

SEQ ID NO: 3450075 - RNA, 18 nt, Human
ggguugguccucuugccu

SEQ ID NO: 3450076 - RNA, 14 nt, Human
ggguuggugugcug

SEQ ID NO: 3450077 - RNA, 21 nt, Human
ggguugugaggccuggccagg

SEQ ID NO: 3450078 - RNA, 23 nt, Human
ggguuuaauccccaguaaaauug

SEQ ID NO: 3450079 - RNA, 20 nt, Human
ggguuucaccauguuagcca

SEQ ID NO: 3450080 - RNA, 17 nt, Human
ggguuucgagaagcugc

SEQ ID NO: 3450081 - RNA, 16 nt, Human
ggguuucucuguggcu

SEQ ID NO: 3450082 - RNA, 19 nt, Human
ggguuucugcccugcccac

SEQ ID NO: 3450083 - RNA, 21 nt, Human
ggguuugagagagcagccagg

SEQ ID NO: 3450084 - RNA, 20 nt, Human
ggguuuggaccccagcuggg

SEQ ID NO: 3450085 - RNA, 21 nt, Human
ggguuuggcugugucuaaacu

SEQ ID NO: 3450086 - RNA, 16 nt, Human
ggguuuuaacuuuguu

SEQ ID NO: 3450087 - RNA, 13 nt, Human
ggguuuuaaugua

SEQ ID NO: 3450088 - RNA, 12 nt, Human
ggguuuucuuaa

SEQ ID NO: 3450089 - RNA, 13 nt, Human
ggguuuuguaaug

SEQ ID NO: 3450090 - RNA, 23 nt, Human
ggguuuuuauuuccuaugaugua

SEQ ID NO: 3450091 - RNA, 10 nt, Human
ggguuuuucu

SEQ ID NO: 3450092 - RNA, 20 nt, Human
gguaaaaugaagaauuuaaa

SEQ ID NO: 3450093 - RNA, 15 nt, Human
gguaaaauguauuuu

SEQ ID NO: 3450094 - RNA, 16 nt, Human
gguaaagacuggcuuu

SEQ ID NO: 3450095 - RNA, 19 nt, Human
gguaaauaaaaagaaaggc

SEQ ID NO: 3450096 - RNA, 20 nt, Human
gguaaauaaaccacugugcg

SEQ ID NO: 3450097 - RNA, 15 nt, Human
gguaaauuaagacau

SEQ ID NO: 3450098 - RNA, 11 nt, Human
gguaaauuauu

SEQ ID NO: 3450099 - RNA, 20 nt, Human
gguaaauuuccccaacagug

SEQ ID NO: 3450100 - RNA, 13 nt, Human
gguaaauuucugu

SEQ ID NO: 3450101 - RNA, 15 nt, Human
gguaacagaacagcu

SEQ ID NO: 3450102 - RNA, 16 nt, Human
gguaacagaacagcuu

SEQ ID NO: 3450103 - RNA, 20 nt, Human
gguaacaggcagauacagga

SEQ ID NO: 3450104 - RNA, 18 nt, Human
gguaacuagggaagauaa

SEQ ID NO: 3450105 - RNA, 18 nt, Human
gguaacugcuuucuguuc

SEQ ID NO: 3450106 - RNA, 12 nt, Human
gguaacuguccu

SEQ ID NO: 3450107 - RNA, 14 nt, Human
gguaacuguccugu

SEQ ID NO: 3450108 - RNA, 16 nt, Human
gguaacuugcaccucu

SEQ ID NO: 3450109 - RNA, 12 nt, Human
gguaagaaaaag

SEQ ID NO: 3450110 - RNA, 21 nt, Human
gguaagaaaaagcaaaaggca

SEQ ID NO: 3450111 - RNA, 19 nt, Human
gguaagaauaguagaugug

SEQ ID NO: 3450112 - RNA, 16 nt, Human
gguaagcaacauggcu

SEQ ID NO: 3450113 - RNA, 20 nt, Human
gguaagcacuuaaugaauga

SEQ ID NO: 3450114 - RNA, 15 nt, Human
gguaauaaacuuaga

SEQ ID NO: 3450115 - RNA, 14 nt, Human
gguaauaagggaaa

SEQ ID NO: 3450116 - RNA, 17 nt, Human
gguaaucgaccugccuc

SEQ ID NO: 3450117 - RNA, 18 nt, Human
gguaauguguuuuagagu

SEQ ID NO: 3450118 - RNA, 23 nt, Human
gguaauuauuuugguacuuuuau

SEQ ID NO: 3450119 - RNA, 24 nt, Human
gguacaaccuguucugcuuuccuc

SEQ ID NO: 3450120 - RNA, 21 nt, Human
gguacaaccuuuauucuuuuc

SEQ ID NO: 3450121 - RNA, 14 nt, Human
gguacaacggaggc

SEQ ID NO: 3450122 - RNA, 16 nt, Human
gguacaacggaggccu

SEQ ID NO: 3450123 - RNA, 22 nt, Human
gguggucugcucgggcccaggc

SEQ ID NO: 3450124 - RNA, 15 nt, Human
gguggugaccucugc

SEQ ID NO: 3450125 - RNA, 20 nt, Human
gguggugcugggacugagcc

SEQ ID NO: 3450126 - RNA, 14 nt, Human
ggugguggaucugu

SEQ ID NO: 3450127 - RNA, 14 nt, Human
ggugguggccuggu

SEQ ID NO: 3450128 - RNA, 13 nt, Human
ggugguggggagg

SEQ ID NO: 3450129 - RNA, 23 nt, Human
gguggugucagacccuggaggcc

SEQ ID NO: 3450130 - RNA, 17 nt, Human
ggugguuucagaaaugu

SEQ ID NO: 3450131 - RNA, 18 nt, Human
ggugguuuucuguucuuu

SEQ ID NO: 3450132 - RNA, 17 nt, Human
gguguagcccucccacu

SEQ ID NO: 3450133 - RNA, 20 nt, Human
gguguagcccucccacuuug

SEQ ID NO: 3450134 - RNA, 23 nt, Human
gguguagcucuuagaggaaggag

SEQ ID NO: 3450135 - RNA, 16 nt, Human
gguguaugugugaagu

SEQ ID NO: 3450136 - RNA, 23 nt, Human
gguguauuuauuuuccuccccag

SEQ ID NO: 3450137 - RNA, 14 nt, Human
ggugucaccccaga

SEQ ID NO: 3450138 - RNA, 15 nt, Human
ggugucaccccagag

SEQ ID NO: 3450139 - RNA, 21 nt, Human
ggugucaccccagagccacac

SEQ ID NO: 3450140 - RNA, 13 nt, Human
ggugucacugucc

SEQ ID NO: 3450141 - RNA, 21 nt, Human
ggugucacugucccuccuggu

SEQ ID NO: 3450142 - RNA, 23 nt, Human
ggugucacuuacuguuucuguca

SEQ ID NO: 3450143 - RNA, 23 nt, Human
ggugucagacccuggaggcccca

SEQ ID NO: 3450144 - RNA, 18 nt, Human
gguguccccaccaucugc

SEQ ID NO: 3450145 - RNA, 16 nt, Human
gguguccccagcccac

SEQ ID NO: 3450146 - RNA, 13 nt, Human
gguguccugacca

SEQ ID NO: 3450147 - RNA, 19 nt, Human
gguguccugccugucugcc

SEQ ID NO: 3450148 - RNA, 17 nt, Human
ggugucgcgccuucucc

SEQ ID NO: 3450149 - RNA, 20 nt, Human
ggugucgcgccuucuccccc

SEQ ID NO: 3450150 - RNA, 21 nt, Human
ggugucgcgccuucucccccc

SEQ ID NO: 3450151 - RNA, 13 nt, Human
ggugucgggcaug

SEQ ID NO: 3450152 - RNA, 23 nt, Human
ggugucuccaaccccccagcacu

SEQ ID NO: 3450153 - RNA, 14 nt, Human
ggugucuuucucuu

SEQ ID NO: 3450154 - RNA, 15 nt, Human
ggugugaacccggga

SEQ ID NO: 3450155 - RNA, 16 nt, Human
ggugugaacccgggag

SEQ ID NO: 3450156 - RNA, 15 nt, Human
ggugugaccugaggg

SEQ ID NO: 3450157 - RNA, 13 nt, Human
ggugugagcagca

SEQ ID NO: 3450158 - RNA, 15 nt, Human
ggugugaucgucuga

SEQ ID NO: 3450159 - RNA, 16 nt, Human
ggugugcaccaggguu

SEQ ID NO: 3450160 - RNA, 14 nt, Human
ggugugccugcagc

SEQ ID NO: 3450161 - RNA, 18 nt, Human
ggugugccuuccagaucc

SEQ ID NO: 3450162 - RNA, 21 nt, Human
ggugugcggccuuuggcuuca

SEQ ID NO: 3450163 - RNA, 13 nt, Human
ggugugcucugau

SEQ ID NO: 3450164 - RNA, 14 nt, Human
gguguggagaagcg

SEQ ID NO: 3450165 - RNA, 23 nt, Human
gguguggagaagcggcuggcagc

SEQ ID NO: 3450166 - RNA, 18 nt, Human
gguguggcccauggcugu

SEQ ID NO: 3450167 - RNA, 19 nt, Human
gguguggcccugccaucuu

SEQ ID NO: 3450168 - RNA, 23 nt, Human
ggugugggggccccgucucaggu

SEQ ID NO: 3450169 - RNA, 15 nt, Human
gguguggguguccug

SEQ ID NO: 3450170 - RNA, 22 nt, Human
gguguggguguccugccugucu

SEQ ID NO: 3450171 - RNA, 14 nt, Human
ggugugguacagag

SEQ ID NO: 3450172 - RNA, 16 nt, Human
ggugugguacagagaa

SEQ ID NO: 3450173 - RNA, 21 nt, Human
ggugugguacagagaagccag

SEQ ID NO: 3450174 - RNA, 23 nt, Human
ggugugucccccucuguccaggc

SEQ ID NO: 3450175 - RNA, 18 nt, Human
gguguguuccaacugccc

SEQ ID NO: 3450176 - RNA, 13 nt, Human
gguguguuuuugg

SEQ ID NO: 3450177 - RNA, 14 nt, Human
gguguguuuuuggg

SEQ ID NO: 3450178 - RNA, 13 nt, Human
gguguuaacagaa

SEQ ID NO: 3450179 - RNA, 12 nt, Human
gguguuauuugg

SEQ ID NO: 3450180 - RNA, 18 nt, Human
gguguuucuagcacuggc

SEQ ID NO: 3450181 - RNA, 20 nt, Human
gguguuugaaaauaguuuau

SEQ ID NO: 3450182 - RNA, 17 nt, Human
gguguuuuaaaaaaucu

SEQ ID NO: 3450183 - RNA, 22 nt, Human
gguguuuuucuuguaaaugugu

SEQ ID NO: 3450184 - RNA, 21 nt, Human
gaauaaaauguugaaaaguca

SEQ ID NO: 3450185 - RNA, 23 nt, Human
gaauaaaauguugaaaagucaaa

SEQ ID NO: 3450186 - RNA, 17 nt, Human
gaauaaaauuauuuugg

SEQ ID NO: 3450187 - RNA, 14 nt, Human
gaauaaacaccacu

SEQ ID NO: 3450188 - RNA, 11 nt, Human
gaauaaacuuc

SEQ ID NO: 3450189 - RNA, 16 nt, Human
gaauaaacuucagcac

SEQ ID NO: 3450190 - RNA, 18 nt, Human
gaauaaagaauacuugaa

SEQ ID NO: 3450191 - RNA, 17 nt, Human
gaauaaaggcaguuuuc

SEQ ID NO: 3450192 - RNA, 20 nt, Human
gaauaaaggcaguuuucuaa

SEQ ID NO: 3450193 - RNA, 16 nt, Human
gaauaaaguugaagcu

SEQ ID NO: 3450194 - RNA, 22 nt, Human
gaauaaauaaauguaucuuauu

SEQ ID NO: 3450195 - RNA, 11 nt, Human
gaauaaauaug

SEQ ID NO: 3450196 - RNA, 12 nt, Human
gaauaaauaugc

SEQ ID NO: 3450197 - RNA, 16 nt, Human
gaauaaauaugccucu

SEQ ID NO: 3450198 - RNA, 15 nt, Human
gaauaaaugucacuu

SEQ ID NO: 3450199 - RNA, 18 nt, Human
gaauaaaugucacuuuuu

SEQ ID NO: 3450200 - RNA, 20 nt, Human
gaauaaauucccaacuucuc

SEQ ID NO: 3450201 - RNA, 16 nt, Human
gaauaaauugauuuuu

SEQ ID NO: 3450202 - RNA, 15 nt, Human
gaauaaauugcuccu

SEQ ID NO: 3450203 - RNA, 23 nt, Human
gaauaaccacuuaaaaaaugucc

SEQ ID NO: 3450204 - RNA, 15 nt, Human
gaauaacuagcacca

SEQ ID NO: 3450205 - RNA, 11 nt, Human
gaauaagaaaa

SEQ ID NO: 3450206 - RNA, 17 nt, Human
gaauaagaaaguuucac

SEQ ID NO: 3450207 - RNA, 15 nt, Human
gaauaagaauuugca

SEQ ID NO: 3450208 - RNA, 17 nt, Human
gaauaagaauuugcaua

SEQ ID NO: 3450209 - RNA, 17 nt, Human
gaauaagcacuuuuuaa

SEQ ID NO: 3450210 - RNA, 17 nt, Human
gaauaagguacaagaag

SEQ ID NO: 3450211 - RNA, 20 nt, Human
gaauaagugccaggauggaa

SEQ ID NO: 3450212 - RNA, 12 nt, Human
gaauaaguuauu

SEQ ID NO: 3450213 - RNA, 14 nt, Human
gaauaaguuauugc

SEQ ID NO: 3450214 - RNA, 19 nt, Human
gaauaauaaaaguauauau

SEQ ID NO: 3450215 - RNA, 21 nt, Human
gaauaauaaaaguauauauau

SEQ ID NO: 3450216 - RNA, 16 nt, Human
gaauaauaaauauuua

SEQ ID NO: 3450217 - RNA, 22 nt, Human
gaauaauaauuagguuaacauu

SEQ ID NO: 3450218 - RNA, 17 nt, Human
gaauaauacaguaucuc

SEQ ID NO: 3450219 - RNA, 16 nt, Human
gaauaauacauugaau

SEQ ID NO: 3450220 - RNA, 15 nt, Human
gaauaauagaagaac

SEQ ID NO: 3450221 - RNA, 19 nt, Human
gaauaauaugcugccaaau

SEQ ID NO: 3450222 - RNA, 18 nt, Human
gaauaaucacgcuuuccu

SEQ ID NO: 3450223 - RNA, 20 nt, Human
gaauaauccuaaacauauga

SEQ ID NO: 3450224 - RNA, 15 nt, Human
gaauaaucuuugggu

SEQ ID NO: 3450225 - RNA, 22 nt, Human
gaauaaucuuuggguaacuuca

SEQ ID NO: 3450226 - RNA, 17 nt, Human
gaauaaugccuuuguaa

SEQ ID NO: 3450227 - RNA, 14 nt, Human
gaauaauuacagug

SEQ ID NO: 3450228 - RNA, 13 nt, Human
gaauaauuauuua

SEQ ID NO: 3450229 - RNA, 20 nt, Human
gaauaauuauuuauuuaaua

SEQ ID NO: 3450230 - RNA, 16 nt, Human
gaauaauucuuugauu

SEQ ID NO: 3450231 - RNA, 19 nt, Human
gaauaauuuauaguaauga

SEQ ID NO: 3450232 - RNA, 21 nt, Human
gaauaauuuauaguaaugagu

SEQ ID NO: 3450233 - RNA, 21 nt, Human
gaauaauuucccaauuaggaa

SEQ ID NO: 3450234 - RNA, 16 nt, Human
gaauacaaacauauuu

SEQ ID NO: 3450235 - RNA, 12 nt, Human
gaauacagcagc

SEQ ID NO: 3450236 - RNA, 20 nt, Human
gaauacagcagcaagaaaaa

SEQ ID NO: 3450237 - RNA, 13 nt, Human
gaauacaguguua

SEQ ID NO: 3450238 - RNA, 21 nt, Human
gaauaccacucuguaauugca

SEQ ID NO: 3450239 - RNA, 21 nt, Human
gaauaccccaagacucccaug

SEQ ID NO: 3450240 - RNA, 19 nt, Human
gaauaccucuuugaaagaa

SEQ ID NO: 3450241 - RNA, 13 nt, Human
gaauaccuguccc

SEQ ID NO: 3450242 - RNA, 17 nt, Human
gaauaccuuagugcagu

SEQ ID NO: 3450243 - RNA, 20 nt, Human
gaauaccuuagugcaguuau

SEQ ID NO: 3450244 - RNA, 19 nt, Human
gaauacucagggaaagcau

SEQ ID NO: 3450245 - RNA, 20 nt, Human
gaauacucuuauaucuauau

SEQ ID NO: 3450246 - RNA, 22 nt, Human
gaauacugaacaucugaguccu

SEQ ID NO: 3450247 - RNA, 16 nt, Human
gaauacugauggaauu

SEQ ID NO: 3450248 - RNA, 14 nt, Human
gaauacugcuugaa

SEQ ID NO: 3450249 - RNA, 12 nt, Human
gaauacuugaac

SEQ ID NO: 3450250 - RNA, 15 nt, Human
gaauacuugaacuug

SEQ ID NO: 3450251 - RNA, 20 nt, Human
gaauacuuugaauguguuuc

SEQ ID NO: 3450252 - RNA, 24 nt, Human
gaauacuuugcagcacagcugaga

SEQ ID NO: 3450253 - RNA, 23 nt, Human
gaauagaaauaaaggaugugauu

SEQ ID NO: 3450254 - RNA, 18 nt, Human
gaauagaagcuaagguuu

SEQ ID NO: 3450255 - RNA, 20 nt, Human
gaauagaaggaaacuagcuu

SEQ ID NO: 3450256 - RNA, 19 nt, Human
gaauagcaaggugcucaca

SEQ ID NO: 3450257 - RNA, 20 nt, Human
gaauagcaucuguacaaagg

SEQ ID NO: 3450258 - RNA, 23 nt, Human
gaauagccacauuuggaauacuu

SEQ ID NO: 3450259 - RNA, 17 nt, Human
gaauagccuagauauga

SEQ ID NO: 3450260 - RNA, 18 nt, Human
gaauaggacuuguuuuug

SEQ ID NO: 3450261 - RNA, 20 nt, Human
gaauaggcauuaacacaaag

SEQ ID NO: 3450262 - RNA, 23 nt, Human
gaauaggcgaucacaacgugcau

SEQ ID NO: 3450263 - RNA, 19 nt, Human
gaauagggcuaggaauaua

SEQ ID NO: 3450264 - RNA, 17 nt, Human
gaauaguauccuccagg

SEQ ID NO: 3450265 - RNA, 23 nt, Human
gaauagucuagauggcuccucuc

SEQ ID NO: 3450266 - RNA, 13 nt, Human
gaauauaaacacu

SEQ ID NO: 3450267 - RNA, 23 nt, Human
gggcaguucgcagccacccugag

SEQ ID NO: 3450268 - RNA, 14 nt, Human
gggcauaaauuauu

SEQ ID NO: 3450269 - RNA, 19 nt, Human
gggcauccauaccagcucg

SEQ ID NO: 3450270 - RNA, 14 nt, Human
gggcauccaugggg

SEQ ID NO: 3450271 - RNA, 14 nt, Human
gggcaucuccagga

SEQ ID NO: 3450272 - RNA, 16 nt, Human
gggcaucuugcuggcu

SEQ ID NO: 3450273 - RNA, 22 nt, Human
gggcaugagggguuccuccccu

SEQ ID NO: 3450274 - RNA, 16 nt, Human
gggcaugccccggcca

SEQ ID NO: 3450275 - RNA, 22 nt, Human
gggcaugccccggccaccucug

SEQ ID NO: 3450276 - RNA, 23 nt, Human
gggcaugccccggccaccucugc

SEQ ID NO: 3450277 - RNA, 14 nt, Human
gggcaugccuugug

SEQ ID NO: 3450278 - RNA, 17 nt, Human
gggcaugcuggggcaag

SEQ ID NO: 3450279 - RNA, 16 nt, Human
gggcauggccagcagc

SEQ ID NO: 3450280 - RNA, 20 nt, Human
gggcauggccagguggccac

SEQ ID NO: 3450281 - RNA, 15 nt, Human
gggcauggggugggc

SEQ ID NO: 3450282 - RNA, 17 nt, Human
gggcauggggugggccu

SEQ ID NO: 3450283 - RNA, 19 nt, Human
gggcaugguguucuccugc

SEQ ID NO: 3450284 - RNA, 20 nt, Human
gggcauguauuggccuggag

SEQ ID NO: 3450285 - RNA, 13 nt, Human
gggcauucucucu

SEQ ID NO: 3450286 - RNA, 18 nt, Human
gggcauugauggggaagg

SEQ ID NO: 3450287 - RNA, 14 nt, Human
gggcauugcuuucc

SEQ ID NO: 3450288 - RNA, 21 nt, Human
gggcauuucuugcgagccucg

SEQ ID NO: 3450289 - RNA, 14 nt, Human
gggccaaagaaaca

SEQ ID NO: 3450290 - RNA, 21 nt, Human
gggccaaauccgcucucuucc

SEQ ID NO: 3450291 - RNA, 23 nt, Human
gggccaaauccgcucucuuccug

SEQ ID NO: 3450292 - RNA, 11 nt, Human
gggccaacacc

SEQ ID NO: 3450293 - RNA, 23 nt, Human
gggccaacuugagggcccagagc

SEQ ID NO: 3450294 - RNA, 13 nt, Human
gggccaagaaaga

SEQ ID NO: 3450295 - RNA, 19 nt, Human
gggccacagggcgagacuc

SEQ ID NO: 3450296 - RNA, 19 nt, Human
gggccacauagaugcugau

SEQ ID NO: 3450297 - RNA, 19 nt, Human
gggccaccgccuugcccag

SEQ ID NO: 3450298 - RNA, 13 nt, Human
gggccaccugccu

SEQ ID NO: 3450299 - RNA, 14 nt, Human
gggccaccugccug

SEQ ID NO: 3450300 - RNA, 15 nt, Human
gggccaccugccugc

SEQ ID NO: 3450301 - RNA, 12 nt, Human
gggccacuccuu

SEQ ID NO: 3450302 - RNA, 19 nt, Human
gggccacuccuuccugccc

SEQ ID NO: 3450303 - RNA, 16 nt, Human
gggccacucugccucu

SEQ ID NO: 3450304 - RNA, 22 nt, Human
gggccacugguccccaacaaug

SEQ ID NO: 3450305 - RNA, 20 nt, Human
gggccacugugguggcagug

SEQ ID NO: 3450306 - RNA, 16 nt, Human
gggccagacaugccac

SEQ ID NO: 3450307 - RNA, 13 nt, Human
gggccagagccag

SEQ ID NO: 3450308 - RNA, 12 nt, Human
gggccagaggcu

SEQ ID NO: 3450309 - RNA, 13 nt, Human
gggccagccaggc

SEQ ID NO: 3450310 - RNA, 17 nt, Human
gggccagccaggcgggc

SEQ ID NO: 3450311 - RNA, 22 nt, Human
gggccagccaggcgggcucaag

SEQ ID NO: 3450312 - RNA, 17 nt, Human
gggccagccccucccac

SEQ ID NO: 3450313 - RNA, 12 nt, Human
gggccagccucu

SEQ ID NO: 3450314 - RNA, 11 nt, Human
gggccagcucc

SEQ ID NO: 3450315 - RNA, 17 nt, Human
gggccaggacugagccc

SEQ ID NO: 3450316 - RNA, 11 nt, Human
gggccaggcag

SEQ ID NO: 3450317 - RNA, 23 nt, Human
gggccaggccgggccuguacagu

SEQ ID NO: 3450318 - RNA, 15 nt, Human
gggccaggcuggguc

SEQ ID NO: 3450319 - RNA, 13 nt, Human
gggccagggcccu

SEQ ID NO: 3450320 - RNA, 18 nt, Human
gggccagggcccugcaga

SEQ ID NO: 3450321 - RNA, 13 nt, Human
gggccagggcugc

SEQ ID NO: 3450322 - RNA, 16 nt, Human
gggccagggcugcccc

SEQ ID NO: 3450323 - RNA, 22 nt, Human
gggccaguccugccuggccagg

SEQ ID NO: 3450324 - RNA, 16 nt, Human
gggccagucugggcug

SEQ ID NO: 3450325 - RNA, 20 nt, Human
gggccagucugggcugccgg

SEQ ID NO: 3450326 - RNA, 22 nt, Human
gggccagucuguggaucagaga

SEQ ID NO: 3450327 - RNA, 14 nt, Human
gggccagugcucca

SEQ ID NO: 3450328 - RNA, 18 nt, Human
gggccagugcuccagcca

SEQ ID NO: 3450329 - RNA, 17 nt, Human
gggccaguggggccugu

SEQ ID NO: 3450330 - RNA, 20 nt, Human
gggccaguggggccugugga

SEQ ID NO: 3450331 - RNA, 14 nt, Human
gggccaguuggucc

SEQ ID NO: 3450332 - RNA, 18 nt, Human
gggccaguuggucccccu

SEQ ID NO: 3450333 - RNA, 16 nt, Human
gggccauacuggccuc

SEQ ID NO: 3450334 - RNA, 17 nt, Human
gggccauccugucccac

SEQ ID NO: 3450335 - RNA, 18 nt, Human
gggccaugagcuccagac

SEQ ID NO: 3450336 - RNA, 23 nt, Human
gggccaugauggcaacagaucug

SEQ ID NO: 3450337 - RNA, 20 nt, Human
gggccaugcugaggccuggg

SEQ ID NO: 3450338 - RNA, 19 nt, Human
gggccauggcucagggugg

SEQ ID NO: 3450339 - RNA, 14 nt, Human
gggccauguccaaa

SEQ ID NO: 3450340 - RNA, 16 nt, Human
gggccauucuccacag

SEQ ID NO: 3450341 - RNA, 13 nt, Human
gggcccaaaggcc

SEQ ID NO: 3450342 - RNA, 19 nt, Human
gggcccaagacagaugccc

SEQ ID NO: 3450343 - RNA, 19 nt, Human
gggcccaaggcggccccuc

SEQ ID NO: 3450344 - RNA, 22 nt, Human
gguuucuaaagcugccagccga

SEQ ID NO: 3450345 - RNA, 12 nt, Human
gguuucuagcau

SEQ ID NO: 3450346 - RNA, 20 nt, Human
gguuucucucuacagugcca

SEQ ID NO: 3450347 - RNA, 14 nt, Human
gguuucugauucuu

SEQ ID NO: 3450348 - RNA, 14 nt, Human
gguuucugcccugc

SEQ ID NO: 3450349 - RNA, 15 nt, Human
gguuucugcccugcc

SEQ ID NO: 3450350 - RNA, 15 nt, Human
gguuucuuucagauu

SEQ ID NO: 3450351 - RNA, 15 nt, Human
gguuucuuuuuaagu

SEQ ID NO: 3450352 - RNA, 15 nt, Human
gguuugaauauaaac

SEQ ID NO: 3450353 - RNA, 22 nt, Human
gguuugacuccgcuggaggugg

SEQ ID NO: 3450354 - RNA, 12 nt, Human
gguuugagaaau

SEQ ID NO: 3450355 - RNA, 18 nt, Human
gguuugcagaugacaaaa

SEQ ID NO: 3450356 - RNA, 21 nt, Human
gguuugccgguggugcaggua

SEQ ID NO: 3450357 - RNA, 16 nt, Human
gguuugccugagggcg

SEQ ID NO: 3450358 - RNA, 12 nt, Human
gguuuggacccc

SEQ ID NO: 3450359 - RNA, 17 nt, Human
gguuuggcgggccaagg

SEQ ID NO: 3450360 - RNA, 19 nt, Human
gguuugguuuuguuuuuug

SEQ ID NO: 3450361 - RNA, 13 nt, Human
gguuuguauauug

SEQ ID NO: 3450362 - RNA, 14 nt, Human
gguuuguguucuuc

SEQ ID NO: 3450363 - RNA, 19 nt, Human
gguuuguguuugaguuuua

SEQ ID NO: 3450364 - RNA, 16 nt, Human
gguuuuaaagugauua

SEQ ID NO: 3450365 - RNA, 15 nt, Human
gguuuuaacuuuguu

SEQ ID NO: 3450366 - RNA, 15 nt, Human
gguuuuagguucuaa

SEQ ID NO: 3450367 - RNA, 15 nt, Human
gguuuuauauuuuua

SEQ ID NO: 3450368 - RNA, 11 nt, Human
gguuuuaugau

SEQ ID NO: 3450369 - RNA, 19 nt, Human
gguuuuauuguuuaaaauc

SEQ ID NO: 3450370 - RNA, 21 nt, Human
gguuuuccaaucauuugacua

SEQ ID NO: 3450371 - RNA, 10 nt, Human
gguuuuccug

SEQ ID NO: 3450372 - RNA, 14 nt, Human
gguuuucuggaugg

SEQ ID NO: 3450373 - RNA, 12 nt, Human
gguuuucuguuu

SEQ ID NO: 3450374 - RNA, 14 nt, Human
gguuuucuucccau

SEQ ID NO: 3450375 - RNA, 19 nt, Human
gguuuugcuauuagacugu

SEQ ID NO: 3450376 - RNA, 20 nt, Human
gguuuuguaauuuguuugaa

SEQ ID NO: 3450377 - RNA, 13 nt, Human
gguuuugugccau

SEQ ID NO: 3450378 - RNA, 14 nt, Human
gguuuuguuccccu

SEQ ID NO: 3450379 - RNA, 18 nt, Human
gguuuuuaaauuuuguaa

SEQ ID NO: 3450380 - RNA, 17 nt, Human
gguuuuuacuuaacugu

SEQ ID NO: 3450381 - RNA, 15 nt, Human
gguuuuuauuaguac

SEQ ID NO: 3450382 - RNA, 14 nt, Human
gguuuuuauuuccu

SEQ ID NO: 3450383 - RNA, 18 nt, Human
gguuuuuauuucuccuuu

SEQ ID NO: 3450384 - RNA, 13 nt, Human
gguuuuucaauua

SEQ ID NO: 3450385 - RNA, 14 nt, Human
gguuuuucaauuaa

SEQ ID NO: 3450386 - RNA, 18 nt, Human
gguuuuucaauuaaacgg

SEQ ID NO: 3450387 - RNA, 12 nt, Human
gguuuuucccug

SEQ ID NO: 3450388 - RNA, 20 nt, Human
gguuuuuggacuucuggggu

SEQ ID NO: 3450389 - RNA, 14 nt, Human
gguuuuuuaguuga

SEQ ID NO: 3450390 - RNA, 22 nt, Human
guaaaaaaaaaaaaaagcaaca

SEQ ID NO: 3450391 - RNA, 18 nt, Human
guaaaaaaaaaaaaguua

SEQ ID NO: 3450392 - RNA, 19 nt, Human
guaaaaaaaaaaacaauua

SEQ ID NO: 3450393 - RNA, 13 nt, Human
guaaaaaaaaaug

SEQ ID NO: 3450394 - RNA, 16 nt, Human
guaaaaaaugguguuu

SEQ ID NO: 3450395 - RNA, 22 nt, Human
guaaaaacacugaaaaauuaua

SEQ ID NO: 3450396 - RNA, 12 nt, Human
guaaaaagaaaa

SEQ ID NO: 3450397 - RNA, 18 nt, Human
guaaaaauaaccuugcag

SEQ ID NO: 3450398 - RNA, 15 nt, Human
guaaaaaugauuuca

SEQ ID NO: 3450399 - RNA, 19 nt, Human
guaaaaauuaaaaguuaug

SEQ ID NO: 3450400 - RNA, 19 nt, Human
guaaaacaaacaauaccug

SEQ ID NO: 3450401 - RNA, 13 nt, Human
guaaaacacagag

SEQ ID NO: 3450402 - RNA, 14 nt, Human
guaaaacacagagg

SEQ ID NO: 3450403 - RNA, 18 nt, Human
guaaaaccacagcaguug

SEQ ID NO: 3450404 - RNA, 23 nt, Human
guaaaaccacagcaguugaaaag

SEQ ID NO: 3450405 - RNA, 21 nt, Human
guaaaacuacacaucccuaau

SEQ ID NO: 3450406 - RNA, 15 nt, Human
guaaaacugaggcac

SEQ ID NO: 3450407 - RNA, 15 nt, Human
guaaaacuuuauuuu

SEQ ID NO: 3450408 - RNA, 19 nt, Human
guaaaagcagcauaaagaa

SEQ ID NO: 3450409 - RNA, 17 nt, Human
guaaaagguauuaaauu

SEQ ID NO: 3450410 - RNA, 19 nt, Human
guaaaauaaauauugucuu

SEQ ID NO: 3450411 - RNA, 21 nt, Human
guaaaauauagcuguacaaau

SEQ ID NO: 3450412 - RNA, 18 nt, Human
guaaaauauuuugaauca

SEQ ID NO: 3450413 - RNA, 22 nt, Human
gacacagcucuucuccaggcug

SEQ ID NO: 3450414 - RNA, 22 nt, Human
gacacagcuuuaucaccagaga

SEQ ID NO: 3450415 - RNA, 23 nt, Human
gacacagcuuuaucaccagagag

SEQ ID NO: 3450416 - RNA, 18 nt, Human
gacacaggaaaccaacac

SEQ ID NO: 3450417 - RNA, 16 nt, Human
gacacaggaugaagca

SEQ ID NO: 3450418 - RNA, 17 nt, Human
gacacaggcccggcucc

SEQ ID NO: 3450419 - RNA, 13 nt, Human
gacacaggccugu

SEQ ID NO: 3450420 - RNA, 16 nt, Human
gacacaggccugugua

SEQ ID NO: 3450421 - RNA, 19 nt, Human
gacacagggacuugaaguu

SEQ ID NO: 3450422 - RNA, 21 nt, Human
gacacagggacuugaaguugu

SEQ ID NO: 3450423 - RNA, 15 nt, Human
gacacaguuccuggg

SEQ ID NO: 3450424 - RNA, 16 nt, Human
gacacaguuccuggga

SEQ ID NO: 3450425 - RNA, 15 nt, Human
gacacauaugagggg

SEQ ID NO: 3450426 - RNA, 16 nt, Human
gacacauaugaggggg

SEQ ID NO: 3450427 - RNA, 22 nt, Human
gacacauaugcaccuugugucu

SEQ ID NO: 3450428 - RNA, 21 nt, Human
gacacaugaagguaaauaaaa

SEQ ID NO: 3450429 - RNA, 20 nt, Human
gacacauguccaagaagccc

SEQ ID NO: 3450430 - RNA, 15 nt, Human
gacacauuuaaggau

SEQ ID NO: 3450431 - RNA, 23 nt, Human
gacacauuuaagguguaguauua

SEQ ID NO: 3450432 - RNA, 19 nt, Human
gacacauuuuuuaggaaau

SEQ ID NO: 3450433 - RNA, 23 nt, Human
gacaccaaccgacaggcccuggc

SEQ ID NO: 3450434 - RNA, 16 nt, Human
gacaccacacccagcc

SEQ ID NO: 3450435 - RNA, 19 nt, Human
gacaccacacccagccuca

SEQ ID NO: 3450436 - RNA, 12 nt, Human
gacaccagagca

SEQ ID NO: 3450437 - RNA, 15 nt, Human
gacaccagagcagau

SEQ ID NO: 3450438 - RNA, 19 nt, Human
gacaccagccaggcucugu

SEQ ID NO: 3450439 - RNA, 20 nt, Human
gacaccagccuuucucccag

SEQ ID NO: 3450440 - RNA, 23 nt, Human
gacaccauuaccaaaauaauaaa

SEQ ID NO: 3450441 - RNA, 18 nt, Human
gacaccauuggaccccac

SEQ ID NO: 3450442 - RNA, 14 nt, Human
gacacccaaagggu

SEQ ID NO: 3450443 - RNA, 13 nt, Human
gacacccaggacu

SEQ ID NO: 3450444 - RNA, 15 nt, Human
gacacccauuuucac

SEQ ID NO: 3450445 - RNA, 11 nt, Human
gacaccccacu

SEQ ID NO: 3450446 - RNA, 19 nt, Human
gacacccgugagcgccugu

SEQ ID NO: 3450447 - RNA, 23 nt, Human
gacacccugugauggggcccugc

SEQ ID NO: 3450448 - RNA, 15 nt, Human
gacacccuucuccca

SEQ ID NO: 3450449 - RNA, 19 nt, Human
gacaccggcuggcagggcu

SEQ ID NO: 3450450 - RNA, 17 nt, Human
gacaccuacugaguggc

SEQ ID NO: 3450451 - RNA, 13 nt, Human
gacaccucagagc

SEQ ID NO: 3450452 - RNA, 9 nt, Human
gacaccugc

SEQ ID NO: 3450453 - RNA, 16 nt, Human
gacaccugcaccuccc

SEQ ID NO: 3450454 - RNA, 19 nt, Human
gacaccugcaccucccccc

SEQ ID NO: 3450455 - RNA, 15 nt, Human
gacaccugcccugcc

SEQ ID NO: 3450456 - RNA, 18 nt, Human
gacaccugggagaaaucu

SEQ ID NO: 3450457 - RNA, 20 nt, Human
gacaccuguacuggagagca

SEQ ID NO: 3450458 - RNA, 15 nt, Human
gacaccuugacaggg

SEQ ID NO: 3450459 - RNA, 14 nt, Human
gacaccuuggacau

SEQ ID NO: 3450460 - RNA, 15 nt, Human
gacacgaauauugcu

SEQ ID NO: 3450461 - RNA, 18 nt, Human
gacacgaauauugcugau

SEQ ID NO: 3450462 - RNA, 20 nt, Human
gacacggaucugagaaucuu

SEQ ID NO: 3450463 - RNA, 20 nt, Human
gacacgggcagccuggcucc

SEQ ID NO: 3450464 - RNA, 19 nt, Human
gacacgggccuguccacag

SEQ ID NO: 3450465 - RNA, 22 nt, Human
gacacggucggggcaucuggcc

SEQ ID NO: 3450466 - RNA, 21 nt, Human
gacacguguggcgggcagugg

SEQ ID NO: 3450467 - RNA, 16 nt, Human
gacacuaaccacgcug

SEQ ID NO: 3450468 - RNA, 15 nt, Human
gacacuaacgacuuc

SEQ ID NO: 3450469 - RNA, 17 nt, Human
gacacuaaguuauagua

SEQ ID NO: 3450470 - RNA, 18 nt, Human
gacacuacacccagcaau

SEQ ID NO: 3450471 - RNA, 14 nt, Human
gacacuagaaaacu

SEQ ID NO: 3450472 - RNA, 20 nt, Human
gacacuauaguuuaaaacac

SEQ ID NO: 3450473 - RNA, 23 nt, Human
gacacuauaguuuaaaacacauu

SEQ ID NO: 3450474 - RNA, 15 nt, Human
gacacucagaccuga

SEQ ID NO: 3450475 - RNA, 21 nt, Human
gacacuccccgaagucuuuug

SEQ ID NO: 3450476 - RNA, 15 nt, Human
gacacucccuugggc

SEQ ID NO: 3450477 - RNA, 21 nt, Human
gacacucuauaagauuccaaa

SEQ ID NO: 3450478 - RNA, 14 nt, Human
gacacucuccuugc

SEQ ID NO: 3450479 - RNA, 17 nt, Human
gacacucucuggaagcc

SEQ ID NO: 3450480 - RNA, 15 nt, Human
gacacucugcucugc

SEQ ID NO: 3450481 - RNA, 19 nt, Human
gacacugaaaguuuuguaa

SEQ ID NO: 3450482 - RNA, 16 nt, Human
gacacugccacacagg

SEQ ID NO: 3450483 - RNA, 19 nt, Human
gacacugcggggcuuggcu

SEQ ID NO: 3450484 - RNA, 22 nt, Human
gacacugcggggcuuggcugag

SEQ ID NO: 3450485 - RNA, 13 nt, Human
gacacugcuggag

SEQ ID NO: 3450486 - RNA, 12 nt, Human
gacacuggcaug

SEQ ID NO: 3450487 - RNA, 13 nt, Human
gacacuggccccu

SEQ ID NO: 3450488 - RNA, 15 nt, Human
gacacuggccccuca

SEQ ID NO: 3450489 - RNA, 23 nt, Human
gacacuggcucauauuccugcag

SEQ ID NO: 3450490 - RNA, 17 nt, Human
gacacuggcugccagcu

SEQ ID NO: 3450491 - RNA, 22 nt, Human
gacacuggcugccagcuauuuu

SEQ ID NO: 3450492 - RNA, 23 nt, Human
gacacugggaggccagugagcca

SEQ ID NO: 3450493 - RNA, 19 nt, Human
gacacugguauuccugccu

SEQ ID NO: 3450494 - RNA, 23 nt, Human
gacacugguuuacacuuuaugcc

SEQ ID NO: 3450495 - RNA, 18 nt, Human
gacacuguucuuagcuca

SEQ ID NO: 3450496 - RNA, 18 nt, Human
gacacuguugauaaaaac

SEQ ID NO: 3450497 - RNA, 22 nt, Human
gacacuguuuacaagaaaaaau

SEQ ID NO: 3450498 - RNA, 19 nt, Human
gacacuucacgcccuuggc

SEQ ID NO: 3450499 - RNA, 18 nt, Human
gacacuucagagagcugg

SEQ ID NO: 3450500 - RNA, 17 nt, Human
gacacuucccucuguuu

SEQ ID NO: 3450501 - RNA, 18 nt, Human
gacacuucccucuguuuc

SEQ ID NO: 3450502 - RNA, 20 nt, Human
gacacuucccucuguuucuc

SEQ ID NO: 3450503 - RNA, 20 nt, Human
gacacuuccgucacauccca

SEQ ID NO: 3450504 - RNA, 22 nt, Human
gacacuugccuucuucacccag

SEQ ID NO: 3450505 - RNA, 23 nt, Human
gacacuugccuucuucacccagc

SEQ ID NO: 3450506 - RNA, 23 nt, Human
gacacuuuaauuaccaaccuguu

SEQ ID NO: 3450507 - RNA, 15 nt, Human
gacacuuugaaaugu

SEQ ID NO: 3450508 - RNA, 22 nt, Human
gacacuuugaaauguguuucug

SEQ ID NO: 3450509 - RNA, 21 nt, Human
gacacuuuucauaucauuucu

SEQ ID NO: 3450510 - RNA, 13 nt, Human
gacagaaaauaug

SEQ ID NO: 3450511 - RNA, 17 nt, Human
gacagaaaauauguauu

SEQ ID NO: 3450512 - RNA, 14 nt, Human
gacagaaagcagaa

SEQ ID NO: 3450513 - RNA, 22 nt, Human
gacagaaaggagaguggccauu

SEQ ID NO: 3450514 - RNA, 15 nt, Human
gacagaacacugucu

SEQ ID NO: 3450515 - RNA, 20 nt, Human
gacagaaccccuacaugaaa

SEQ ID NO: 3450516 - RNA, 18 nt, Human
gacagaacuugaaugugu

SEQ ID NO: 3450517 - RNA, 16 nt, Human
gacagaagcagcucuu

SEQ ID NO: 3450518 - RNA, 15 nt, Human
gacagaagcaggcug

SEQ ID NO: 3450519 - RNA, 16 nt, Human
gacagaagcaggcugg

SEQ ID NO: 3450520 - RNA, 17 nt, Human
gacagaagcaggcugga

SEQ ID NO: 3450521 - RNA, 16 nt, Human
gacagaauauguuuca

SEQ ID NO: 3450522 - RNA, 20 nt, Human
gacagaauguaucugugaag

SEQ ID NO: 3450523 - RNA, 13 nt, Human
gacagacacacac

SEQ ID NO: 3450524 - RNA, 16 nt, Human
gacagagaccuccugc

SEQ ID NO: 3450525 - RNA, 21 nt, Human
gacagagagagauacucuggg

SEQ ID NO: 3450526 - RNA, 19 nt, Human
gacagagaggacgugggcg

SEQ ID NO: 3450527 - RNA, 15 nt, Human
gacagagaggacugu

SEQ ID NO: 3450528 - RNA, 19 nt, Human
gacagagaggacuguaggg

SEQ ID NO: 3450529 - RNA, 19 nt, Human
gacagagccccacccucag

SEQ ID NO: 3450530 - RNA, 16 nt, Human
gacagagcccugugag

SEQ ID NO: 3450531 - RNA, 13 nt, Human
gacagagccugcc

SEQ ID NO: 3450532 - RNA, 23 nt, Human
gacagagcgugagcugagcaggc

SEQ ID NO: 3450533 - RNA, 20 nt, Human
gacagagcuacacaggggaa

SEQ ID NO: 3450534 - RNA, 14 nt, Human
gacagaggcagccc

SEQ ID NO: 3450535 - RNA, 23 nt, Human
gacagaggcagccccauucugcc

SEQ ID NO: 3450536 - RNA, 13 nt, Human
gacagaggcccca

SEQ ID NO: 3450537 - RNA, 20 nt, Human
gacagagggaaacacagcag

SEQ ID NO: 3450538 - RNA, 19 nt, Human
gacagaggggacucugggc

SEQ ID NO: 3450539 - RNA, 13 nt, Human
gacagagggggug

SEQ ID NO: 3450540 - RNA, 18 nt, Human
gacagaggggguggccuc

SEQ ID NO: 3450541 - RNA, 22 nt, Human
gacagaggggguggccucccaa

SEQ ID NO: 3450542 - RNA, 14 nt, Human
gacagagucucacu

SEQ ID NO: 3450543 - RNA, 15 nt, Human
gacagauaccuccaa

SEQ ID NO: 3450544 - RNA, 21 nt, Human
gacagauaccuccaacccugc

SEQ ID NO: 3450545 - RNA, 23 nt, Human
gacagauaccuccaacccugccg

SEQ ID NO: 3450546 - RNA, 16 nt, Human
gacagaucaagcugug

SEQ ID NO: 3450547 - RNA, 23 nt, Human
gacagaucaagcugugagacagu

SEQ ID NO: 3450548 - RNA, 18 nt, Human
gacagaucaauggcgcag

SEQ ID NO: 3450549 - RNA, 19 nt, Human
gacagaucucugcuuugga

SEQ ID NO: 3450550 - RNA, 20 nt, Human
gacagaugaaugccguggau

SEQ ID NO: 3450551 - RNA, 16 nt, Human
gacagaugaggcuuuc

SEQ ID NO: 3450552 - RNA, 14 nt, Human
gacagaugccccag

SEQ ID NO: 3450553 - RNA, 20 nt, Human
gacagaugccccagagcugu

SEQ ID NO: 3450554 - RNA, 18 nt, Human
gguagaaugaccuuguaa

SEQ ID NO: 3450555 - RNA, 19 nt, Human
gguagaauguaaagcuugu

SEQ ID NO: 3450556 - RNA, 14 nt, Human
guagccagcaccug

SEQ ID NO: 3450557 - RNA, 21 nt, Human
guagccagccggggcgagugg

SEQ ID NO: 3450558 - RNA, 22 nt, Human
guagccagggggacuagccccu

SEQ ID NO: 3450559 - RNA, 22 nt, Human
guagccaggucccccugcagcu

SEQ ID NO: 3450560 - RNA, 14 nt, Human
guagccaugggacc

SEQ ID NO: 3450561 - RNA, 15 nt, Human
guagccaugggacca

SEQ ID NO: 3450562 - RNA, 21 nt, Human
guagcccacacuugagaggau

SEQ ID NO: 3450563 - RNA, 16 nt, Human
guagcccacucugcuc

SEQ ID NO: 3450564 - RNA, 20 nt, Human
guagcccacucugcucgccu

SEQ ID NO: 3450565 - RNA, 14 nt, Human
guagcccaggcugg

SEQ ID NO: 3450566 - RNA, 15 nt, Human
guagcccaggcugga

SEQ ID NO: 3450567 - RNA, 17 nt, Human
guagcccauccuucccu

SEQ ID NO: 3450568 - RNA, 15 nt, Human
guagcccccucuucc

SEQ ID NO: 3450569 - RNA, 16 nt, Human
ggucccacaucccugg

SEQ ID NO: 3450570 - RNA, 17 nt, Human
ggucccacaucccuggg

SEQ ID NO: 3450571 - RNA, 20 nt, Human
ggucccacaucccugggccu

SEQ ID NO: 3450572 - RNA, 17 nt, Human
ggucccaccccacacac

SEQ ID NO: 3450573 - RNA, 12 nt, Human
ggucccacuucc

SEQ ID NO: 3450574 - RNA, 13 nt, Human
ggucccacuuccc

SEQ ID NO: 3450575 - RNA, 17 nt, Human
ggucccacuuccccucc

SEQ ID NO: 3450576 - RNA, 14 nt, Human
ggucccagcagcug

SEQ ID NO: 3450577 - RNA, 15 nt, Human
ggucccagcucccug

SEQ ID NO: 3450578 - RNA, 20 nt, Human
ggucccagcucccuggcucc

SEQ ID NO: 3450579 - RNA, 22 nt, Human
ggucccagugggaggggcaggc

SEQ ID NO: 3450580 - RNA, 12 nt, Human
ggucccauccag

SEQ ID NO: 3450581 - RNA, 13 nt, Human
ggucccauccagg

SEQ ID NO: 3450582 - RNA, 16 nt, Human
gguccccaccugggac

SEQ ID NO: 3450583 - RNA, 22 nt, Human
ggucccccacucuaaagcaaau

SEQ ID NO: 3450584 - RNA, 13 nt, Human
ggucccccucagc

SEQ ID NO: 3450585 - RNA, 13 nt, Human
ggucccccugcag

SEQ ID NO: 3450586 - RNA, 15 nt, Human
ggucccccugcagcu

SEQ ID NO: 3450587 - RNA, 13 nt, Human
ggucccccuucca

SEQ ID NO: 3450588 - RNA, 21 nt, Human
ggucccgugcagcuucugucc

SEQ ID NO: 3450589 - RNA, 12 nt, Human
ggucccuaauaa

SEQ ID NO: 3450590 - RNA, 16 nt, Human
ggucccuaauaaagcu

SEQ ID NO: 3450591 - RNA, 20 nt, Human
ggucccuccagaaccacccc

SEQ ID NO: 3450592 - RNA, 23 nt, Human
ggucccugauaacaaccuggaga

SEQ ID NO: 3450593 - RNA, 13 nt, Human
ggucccugccuua

SEQ ID NO: 3450594 - RNA, 18 nt, Human
ggucccugguggcagcuc

SEQ ID NO: 3450595 - RNA, 22 nt, Human
ggucccugguggcagcucaccu

SEQ ID NO: 3450596 - RNA, 19 nt, Human
ggucccuugagaccucagc

SEQ ID NO: 3450597 - RNA, 22 nt, Human
gguccgaguguguuucauccuu

SEQ ID NO: 3450598 - RNA, 18 nt, Human
gguccggcagcuucugcc

SEQ ID NO: 3450599 - RNA, 17 nt, Human
gguccgugcuaaggacu

SEQ ID NO: 3450600 - RNA, 18 nt, Human
gguccuaaaagcaaaaua

SEQ ID NO: 3450601 - RNA, 22 nt, Human
gguccuaccaauagauucccca

SEQ ID NO: 3450602 - RNA, 22 nt, Human
gguccuagaggcccuuugcugu

SEQ ID NO: 3450603 - RNA, 16 nt, Human
gguccuaggcuggaag

SEQ ID NO: 3450604 - RNA, 16 nt, Human
gguccuccccucucuu

SEQ ID NO: 3450605 - RNA, 17 nt, Human
gguccuccccucucuug

SEQ ID NO: 3450606 - RNA, 19 nt, Human
gguccuccuccagggacag

SEQ ID NO: 3450607 - RNA, 19 nt, Human
gguccucuucugggccuga

SEQ ID NO: 3450608 - RNA, 15 nt, Human
gguccucuugccucc

SEQ ID NO: 3450609 - RNA, 13 nt, Human
gguccugagaccu

SEQ ID NO: 3450610 - RNA, 15 nt, Human
gguccugagcacugc

SEQ ID NO: 3450611 - RNA, 16 nt, Human
gguccugagcacugcc

SEQ ID NO: 3450612 - RNA, 18 nt, Human
gguccugagcacugccag

SEQ ID NO: 3450613 - RNA, 20 nt, Human
gguccugagcacugccagga

SEQ ID NO: 3450614 - RNA, 17 nt, Human
gguccugagggucccca

SEQ ID NO: 3450615 - RNA, 19 nt, Human
gguccugcagucuggcuga

SEQ ID NO: 3450616 - RNA, 12 nt, Human
gguccugcugca

SEQ ID NO: 3450617 - RNA, 14 nt, Human
gguccugcugcagu

SEQ ID NO: 3450618 - RNA, 12 nt, Human
gguccuggccau

SEQ ID NO: 3450619 - RNA, 14 nt, Human
gguccuggccaucc

SEQ ID NO: 3450620 - RNA, 12 nt, Human
gguccuggcucc

SEQ ID NO: 3450621 - RNA, 14 nt, Human
gguccuggcuccug

SEQ ID NO: 3450622 - RNA, 12 nt, Human
gguccuggggcc

SEQ ID NO: 3450623 - RNA, 12 nt, Human
gguccuggggcu

SEQ ID NO: 3450624 - RNA, 12 nt, Human
gguccuggugcc

SEQ ID NO: 3450625 - RNA, 21 nt, Human
gguccugguggggcagcuccu

SEQ ID NO: 3450626 - RNA, 15 nt, Human
gguccuguccccgca

SEQ ID NO: 3450627 - RNA, 17 nt, Human
gguccugucuccccucu

SEQ ID NO: 3450628 - RNA, 12 nt, Human
gguccuguggca

SEQ ID NO: 3450629 - RNA, 18 nt, Human
gguccuguggcaggcagc

SEQ ID NO: 3450630 - RNA, 21 nt, Human
gguccuguggcaggcagcgcc

SEQ ID NO: 3450631 - RNA, 10 nt, Human
gguccuucaa

SEQ ID NO: 3450632 - RNA, 15 nt, Human
gguccuucccucucc

SEQ ID NO: 3450633 - RNA, 14 nt, Human
gguccuucuccaca

SEQ ID NO: 3450634 - RNA, 16 nt, Human
gguccuuggcccccuu

SEQ ID NO: 3450635 - RNA, 20 nt, Human
gguccuuggugugacccucu

SEQ ID NO: 3450636 - RNA, 13 nt, Human
gguccuuuagaaa

SEQ ID NO: 3450637 - RNA, 22 nt, Human
ggucgaggaguaacaauacaaa

SEQ ID NO: 3450638 - RNA, 12 nt, Human
ggucgcccagga

SEQ ID NO: 3450639 - RNA, 13 nt, Human
ggucgcccaggag

SEQ ID NO: 3450640 - RNA, 18 nt, Human
ggucgcuugggaauuuua

SEQ ID NO: 3450641 - RNA, 13 nt, Human
ggucggaccagcu

SEQ ID NO: 3450642 - RNA, 14 nt, Human
ggucggaccagcuu

SEQ ID NO: 3450643 - RNA, 16 nt, Human
ggucggaggcuuggga

SEQ ID NO: 3450644 - RNA, 15 nt, Human
ggucuaaaaauaaac

SEQ ID NO: 3450645 - RNA, 13 nt, Human
ggucuaacuuuug

SEQ ID NO: 3450646 - RNA, 17 nt, Human
ggucuacacugugcuga

SEQ ID NO: 3450647 - RNA, 21 nt, Human
ggucuagaggccugaaauccu

SEQ ID NO: 3450648 - RNA, 12 nt, Human
ggucuauuucua

SEQ ID NO: 3450649 - RNA, 21 nt, Human
ggucucaaacuccugggcuca

SEQ ID NO: 3450650 - RNA, 23 nt, Human
ggucucaaacuccugggcucagg

SEQ ID NO: 3450651 - RNA, 21 nt, Human
ggucucacccuggaggcaccu

SEQ ID NO: 3450652 - RNA, 19 nt, Human
ggucucaccggcucucacc

SEQ ID NO: 3450653 - RNA, 21 nt, Human
ggucucaccggcucucaccug

SEQ ID NO: 3450654 - RNA, 22 nt, Human
ggucucacuauguugcccaggc

SEQ ID NO: 3450655 - RNA, 22 nt, Human
ggucucacucugucgcccaguc

SEQ ID NO: 3450656 - RNA, 20 nt, Human
ggucucagcagcgaccaccc

SEQ ID NO: 3450657 - RNA, 21 nt, Human
ggucucaggauauccuuauca

SEQ ID NO: 3450658 - RNA, 16 nt, Human
ggucucccacguggga

SEQ ID NO: 3450659 - RNA, 14 nt, Human
ggucucccucuccu

SEQ ID NO: 3450660 - RNA, 15 nt, Human
ggucucccucuccug

SEQ ID NO: 3450661 - RNA, 19 nt, Human
ggucucccucuccugccua

SEQ ID NO: 3450662 - RNA, 22 nt, Human
ggucucccucuccugccuacuc

SEQ ID NO: 3450663 - RNA, 20 nt, Human
ggucucccuucucuacacuc

SEQ ID NO: 3450664 - RNA, 19 nt, Human
ggucuccgaaaugcugucu

SEQ ID NO: 3450665 - RNA, 19 nt, Human
ggucuccucaggaccaggg

SEQ ID NO: 3450666 - RNA, 14 nt, Human
ggucuccuccaccg

SEQ ID NO: 3450667 - RNA, 15 nt, Human
ggucuccugccccca

SEQ ID NO: 3450668 - RNA, 16 nt, Human
ggucuccuuggaaauc

SEQ ID NO: 3450669 - RNA, 20 nt, Human
ggucucgaacuccugaccuu

SEQ ID NO: 3450670 - RNA, 23 nt, Human
ggucucgcugaugcugggcuggg

SEQ ID NO: 3450671 - RNA, 21 nt, Human
ggucucgcuuuguugcccagg

SEQ ID NO: 3450672 - RNA, 19 nt, Human
ggucucggaucaggcuccc

SEQ ID NO: 3450673 - RNA, 17 nt, Human
ggucucgucuuccgucu

SEQ ID NO: 3450674 - RNA, 20 nt, Human
ggucucgucuuccgucuccc

SEQ ID NO: 3450675 - RNA, 17 nt, Human
ggucucuaggcugggga

SEQ ID NO: 3450676 - RNA, 16 nt, Human
ggucucuagugcugug

SEQ ID NO: 3450677 - RNA, 21 nt, Human
ggucucucacagacaggaccc

SEQ ID NO: 3450678 - RNA, 12 nt, Human
ggucucucuuug

SEQ ID NO: 3450679 - RNA, 15 nt, Human
ggucucucuuuggac

SEQ ID NO: 3450680 - RNA, 21 nt, Human
ggucucugccaugaacuggag

SEQ ID NO: 3450681 - RNA, 23 nt, Human
ggucucugccaugaacuggaggc

SEQ ID NO: 3450682 - RNA, 14 nt, Human
ggucucuucuccca

SEQ ID NO: 3450683 - RNA, 21 nt, Human
ggucucuucugaauaaagcaa

SEQ ID NO: 3450684 - RNA, 22 nt, Human
ggucucuucugaauaaagcaau

SEQ ID NO: 3450685 - RNA, 21 nt, Human
ggucucuucuuggggcccagu

SEQ ID NO: 3450686 - RNA, 15 nt, Human
ggucugacccacugc

SEQ ID NO: 3450687 - RNA, 22 nt, Human
ggucugagccacagcagcauuu

SEQ ID NO: 3450688 - RNA, 23 nt, Human
ggucugagccacagcagcauuuu

SEQ ID NO: 3450689 - RNA, 22 nt, Human
ggucugaggggcaacugagucu

SEQ ID NO: 3450690 - RNA, 15 nt, Human
ggucugcaagucaga

SEQ ID NO: 3450691 - RNA, 20 nt, Human
ggucugcaagucagaggaug

SEQ ID NO: 3450692 - RNA, 14 nt, Human
ggucugcucccaag

SEQ ID NO: 3450693 - RNA, 23 nt, Human
ggucugcucccaaggggccugag

SEQ ID NO: 3450694 - RNA, 22 nt, Human
ggucugcucgggcccaggccau

SEQ ID NO: 3450695 - RNA, 19 nt, Human
ggucugcucuuucucugcc

SEQ ID NO: 3450696 - RNA, 22 nt, Human
ggucuggagaagcagugagccg

SEQ ID NO: 3450697 - RNA, 15 nt, Human
ggucuggcagccucc

SEQ ID NO: 3450698 - RNA, 20 nt, Human
ggucuggcugguguuaacag

SEQ ID NO: 3450699 - RNA, 21 nt, Human
ggucugggaggaauggacaga

SEQ ID NO: 3450700 - RNA, 20 nt, Human
ggucugggggcacaagacug

SEQ ID NO: 3450701 - RNA, 17 nt, Human
ggugcuaucucccccag

SEQ ID NO: 3450702 - RNA, 19 nt, Human
ggugcuaucucccccagcc

SEQ ID NO: 3450703 - RNA, 21 nt, Human
ggugcuaucucccccagcccc

SEQ ID NO: 3450704 - RNA, 20 nt, Human
ggugcucaccaugcuuccag

SEQ ID NO: 3450705 - RNA, 16 nt, Human
ggugcucagggcugac

SEQ ID NO: 3450706 - RNA, 15 nt, Human
ggugcuccaggcagg

SEQ ID NO: 3450707 - RNA, 20 nt, Human
ggugcucggagaagagcgca

SEQ ID NO: 3450708 - RNA, 21 nt, Human
ggugcucggagaagagcgcag

SEQ ID NO: 3450709 - RNA, 14 nt, Human
ggugcucucugcca

SEQ ID NO: 3450710 - RNA, 16 nt, Human
ggugcucucuuucugu

SEQ ID NO: 3450711 - RNA, 12 nt, Human
ggugcucugucu

SEQ ID NO: 3450712 - RNA, 20 nt, Human
ggugcugacggccagggaga

SEQ ID NO: 3450713 - RNA, 22 nt, Human
ggugcugaguagaugcgcagcc

SEQ ID NO: 3450714 - RNA, 17 nt, Human
ggugcugccucuaccug

SEQ ID NO: 3450715 - RNA, 16 nt, Human
ggugcugccugaaucc

SEQ ID NO: 3450716 - RNA, 17 nt, Human
ggugcugcuacccuccc

SEQ ID NO: 3450717 - RNA, 14 nt, Human
ggugcugcuucccu

SEQ ID NO: 3450718 - RNA, 22 nt, Human
ggugcuggagcacugggcuccc

SEQ ID NO: 3450719 - RNA, 22 nt, Human
ggugcuggaggugggagcagga

SEQ ID NO: 3450720 - RNA, 16 nt, Human
ggugcuggauauuuuc

SEQ ID NO: 3450721 - RNA, 24 nt, Human
ggugcugggacugagccaguccca

SEQ ID NO: 3450722 - RNA, 19 nt, Human
ggugcugggagaggcagcc

SEQ ID NO: 3450723 - RNA, 11 nt, Human
ggugcugggcc

SEQ ID NO: 3450724 - RNA, 19 nt, Human
gacauccauaaagaagcaa

SEQ ID NO: 3450725 - RNA, 23 nt, Human
gacauccauguuccgagaagaac

SEQ ID NO: 3450726 - RNA, 23 nt, Human
gacauccccccgccaaaagcugc

SEQ ID NO: 3450727 - RNA, 13 nt, Human
gacauccucuucu

SEQ ID NO: 3450728 - RNA, 14 nt, Human
gacauccuguauaa

SEQ ID NO: 3450729 - RNA, 21 nt, Human
gacauccugucaucugagaau

SEQ ID NO: 3450730 - RNA, 15 nt, Human
gacaucggaaaaaua

SEQ ID NO: 3450731 - RNA, 15 nt, Human
gacaucucaggggcc

SEQ ID NO: 3450732 - RNA, 17 nt, Human
gacaucucaggggccag

SEQ ID NO: 3450733 - RNA, 13 nt, Human
gacaucucugcac

SEQ ID NO: 3450734 - RNA, 16 nt, Human
gacaucucuuugaauu

SEQ ID NO: 3450735 - RNA, 18 nt, Human
gacaucuggaaucuggag

SEQ ID NO: 3450736 - RNA, 21 nt, Human
gacaucuucaaagcuugaaga

SEQ ID NO: 3450737 - RNA, 13 nt, Human
gacaucuuucucu

SEQ ID NO: 3450738 - RNA, 23 nt, Human
gacaugaaaauagcaauauucuu

SEQ ID NO: 3450739 - RNA, 13 nt, Human
gacaugaagccac

SEQ ID NO: 3450740 - RNA, 12 nt, Human
gacaugaauaug

SEQ ID NO: 3450741 - RNA, 16 nt, Human
gacaugaaugcacacu

SEQ ID NO: 3450742 - RNA, 14 nt, Human
gacaugaucuucuu

SEQ ID NO: 3450743 - RNA, 13 nt, Human
gacaugaugcuuu

SEQ ID NO: 3450744 - RNA, 19 nt, Human
gacaugaugcuuuuacuga

SEQ ID NO: 3450745 - RNA, 16 nt, Human
gacaugauuuccuuga

SEQ ID NO: 3450746 - RNA, 22 nt, Human
gacaugauuuccuugaaugugg

SEQ ID NO: 3450747 - RNA, 15 nt, Human
gacaugcaauaaaau

SEQ ID NO: 3450748 - RNA, 17 nt, Human
gacaugcaauaaaauuu

SEQ ID NO: 3450749 - RNA, 12 nt, Human
gacaugcacuga

SEQ ID NO: 3450750 - RNA, 19 nt, Human
gacaugcccucccuucucc

SEQ ID NO: 3450751 - RNA, 15 nt, Human
gacaugcgggcuggg

SEQ ID NO: 3450752 - RNA, 17 nt, Human
gacaugcgguagccagc

SEQ ID NO: 3450753 - RNA, 19 nt, Human
gacaugcgguagccagcac

SEQ ID NO: 3450754 - RNA, 22 nt, Human
gacaugcgguagccagcacaca

SEQ ID NO: 3450755 - RNA, 14 nt, Human
gacaugcugaagcc

SEQ ID NO: 3450756 - RNA, 15 nt, Human
gacaugcugaagcca

SEQ ID NO: 3450757 - RNA, 15 nt, Human
gacaugcugacuguc

SEQ ID NO: 3450758 - RNA, 15 nt, Human
gacauggaaaugaag

SEQ ID NO: 3450759 - RNA, 20 nt, Human
gacauggagacuccugcccu

SEQ ID NO: 3450760 - RNA, 22 nt, Human
gacauggagacuccugcccugu

SEQ ID NO: 3450761 - RNA, 16 nt, Human
gacauggagguucuaa

SEQ ID NO: 3450762 - RNA, 19 nt, Human
gacauggagguucuaaggc

SEQ ID NO: 3450763 - RNA, 20 nt, Human
gacauggagguucuaaggcc

SEQ ID NO: 3450764 - RNA, 14 nt, Human
gacauggcuguuca

SEQ ID NO: 3450765 - RNA, 21 nt, Human
gacauggcuugccacagcucu

SEQ ID NO: 3450766 - RNA, 15 nt, Human
gacauggggaggaag

SEQ ID NO: 3450767 - RNA, 20 nt, Human
gacaugggugaacuuacuug

SEQ ID NO: 3450768 - RNA, 23 nt, Human
gacauggugccugagaggcaggc

SEQ ID NO: 3450769 - RNA, 12 nt, Human
gacauguacaga

SEQ ID NO: 3450770 - RNA, 14 nt, Human
gacaugugaaaccu

SEQ ID NO: 3450771 - RNA, 19 nt, Human
gacauguggaaagugaauu

SEQ ID NO: 3450772 - RNA, 18 nt, Human
gacauguuauauauuuuu

SEQ ID NO: 3450773 - RNA, 15 nt, Human
gacauguuguaaauu

SEQ ID NO: 3450774 - RNA, 17 nt, Human
gacauguuuuccgugaa

SEQ ID NO: 3450775 - RNA, 20 nt, Human
gacauguuuugauaaaguag

SEQ ID NO: 3450776 - RNA, 17 nt, Human
gacauuaacaguuuucc

SEQ ID NO: 3450777 - RNA, 19 nt, Human
gacauuaacaguuuuccau

SEQ ID NO: 3450778 - RNA, 23 nt, Human
gacauuaacaguuuuccaugaaa

SEQ ID NO: 3450779 - RNA, 20 nt, Human
gacauuaguaacauaauaaa

SEQ ID NO: 3450780 - RNA, 15 nt, Human
gacauuauagacauu

SEQ ID NO: 3450781 - RNA, 13 nt, Human
gacauuaugugug

SEQ ID NO: 3450782 - RNA, 16 nt, Human
gacauuaugugugcau

SEQ ID NO: 3450783 - RNA, 21 nt, Human
gacauucaccugccccaacuc

SEQ ID NO: 3450784 - RNA, 16 nt, Human
gacauucaugccuggc

SEQ ID NO: 3450785 - RNA, 16 nt, Human
gacauuccaagacagu

SEQ ID NO: 3450786 - RNA, 12 nt, Human
gacauucccugc

SEQ ID NO: 3450787 - RNA, 22 nt, Human
gacauuccuaaacuaucuuuuu

SEQ ID NO: 3450788 - RNA, 17 nt, Human
gacauuccugggcacag

SEQ ID NO: 3450789 - RNA, 23 nt, Human
gacauuccugggcacaguuuggu

SEQ ID NO: 3450790 - RNA, 16 nt, Human
gacauuccuugcugaa

SEQ ID NO: 3450791 - RNA, 20 nt, Human
gacauucucgcuucccugaa

SEQ ID NO: 3450792 - RNA, 15 nt, Human
gacauucugaaugcu

SEQ ID NO: 3450793 - RNA, 19 nt, Human
gacauucugaaugcuucua

SEQ ID NO: 3450794 - RNA, 13 nt, Human
gacauucugauuc

SEQ ID NO: 3450795 - RNA, 23 nt, Human
gacauucugauucgaaugacacu

SEQ ID NO: 3450796 - RNA, 22 nt, Human
gacauucugccaggcccccaag

SEQ ID NO: 3450797 - RNA, 23 nt, Human
gacauugaccuauuuccagaaau

SEQ ID NO: 3450798 - RNA, 14 nt, Human
gacauugacuauuu

SEQ ID NO: 3450799 - RNA, 14 nt, Human
gacauugcggacag

SEQ ID NO: 3450800 - RNA, 15 nt, Human
gacauugcggacagc

SEQ ID NO: 3450801 - RNA, 17 nt, Human
gacauugcggacagcca

SEQ ID NO: 3450802 - RNA, 12 nt, Human
gacauugcuaag

SEQ ID NO: 3450803 - RNA, 23 nt, Human
gacauugcuuuacugucaaaaua

SEQ ID NO: 3450804 - RNA, 13 nt, Human
gacauuggagaug

SEQ ID NO: 3450805 - RNA, 15 nt, Human
gacauugucaauaaa

SEQ ID NO: 3450806 - RNA, 18 nt, Human
gacauuguuaaaauaaag

SEQ ID NO: 3450807 - RNA, 13 nt, Human
gacauuguuuugc

SEQ ID NO: 3450808 - RNA, 20 nt, Human
gacauuguuuugccaacauu

SEQ ID NO: 3450809 - RNA, 21 nt, Human
gacauuguuuugccaacauug

SEQ ID NO: 3450810 - RNA, 14 nt, Human
gacauuuagaagaa

SEQ ID NO: 3450811 - RNA, 13 nt, Human
gacauuucucuaa

SEQ ID NO: 3450812 - RNA, 16 nt, Human
gacauuucucuaagag

SEQ ID NO: 3450813 - RNA, 21 nt, Human
gacauuucucuuacugcaaau

SEQ ID NO: 3450814 - RNA, 17 nt, Human
gacauuucuuuucuuuu

SEQ ID NO: 3450815 - RNA, 17 nt, Human
gacauuugcucauggaa

SEQ ID NO: 3450816 - RNA, 19 nt, Human
gacauuuuaacaagaagau

SEQ ID NO: 3450817 - RNA, 16 nt, Human
gacauuuuaugucuuu

SEQ ID NO: 3450818 - RNA, 15 nt, Human
gacauuuucuucaga

SEQ ID NO: 3450819 - RNA, 15 nt, Human
gacauuuugccaaaa

SEQ ID NO: 3450820 - RNA, 23 nt, Human
gacauuuuuccguuugcuuuugu

SEQ ID NO: 3450821 - RNA, 20 nt, Human
gacauuuuuucagucauaua

SEQ ID NO: 3450822 - RNA, 20 nt, Human
gaccaaaaaccaguauugua

SEQ ID NO: 3450823 - RNA, 13 nt, Human
gaccaaaaucccc

SEQ ID NO: 3450824 - RNA, 21 nt, Human
gaccaaaaugacaaugaugau

SEQ ID NO: 3450825 - RNA, 16 nt, Human
gaccaaagggagucug

SEQ ID NO: 3450826 - RNA, 22 nt, Human
gaccaaauuccuuggcaugccu

SEQ ID NO: 3450827 - RNA, 22 nt, Human
gaccaacauggagaaacccugu

SEQ ID NO: 3450828 - RNA, 16 nt, Human
gaccaacccuguuucc

SEQ ID NO: 3450829 - RNA, 21 nt, Human
gaccaacguuacucagggcuc

SEQ ID NO: 3450830 - RNA, 19 nt, Human
gaccaacuagacauucugu

SEQ ID NO: 3450831 - RNA, 14 nt, Human
gaccaacugggccc

SEQ ID NO: 3450832 - RNA, 19 nt, Human
gaccaacuguguuguauua

SEQ ID NO: 3450833 - RNA, 22 nt, Human
gaccaacuguguuguauuaaca

SEQ ID NO: 3450834 - RNA, 20 nt, Human
gaccaagauggcccauccug

SEQ ID NO: 3450835 - RNA, 16 nt, Human
gaccaagcaggaagcu

SEQ ID NO: 3450836 - RNA, 17 nt, Human
gaccaagcaggaagcuc

SEQ ID NO: 3450837 - RNA, 15 nt, Human
gaccaaggaacaaaa

SEQ ID NO: 3450838 - RNA, 16 nt, Human
gaccaaggaacaaaaa

SEQ ID NO: 3450839 - RNA, 17 nt, Human
gaccaaggaccccucac

SEQ ID NO: 3450840 - RNA, 20 nt, Human
gaccaauaaaauuucuaaga

SEQ ID NO: 3450841 - RNA, 21 nt, Human
gaccaauaaaauuucuaagag

SEQ ID NO: 3450842 - RNA, 18 nt, Human
gaccaauauuguacaguu

SEQ ID NO: 3450843 - RNA, 19 nt, Human
gaccaauauuguacaguuu

SEQ ID NO: 3450844 - RNA, 12 nt, Human
gaccacaccucc

SEQ ID NO: 3450845 - RNA, 16 nt, Human
guaaucuguguacaaa

SEQ ID NO: 3450846 - RNA, 17 nt, Human
guaaucuuuaccuguau

SEQ ID NO: 3450847 - RNA, 13 nt, Human
guaaugaaguaaa

SEQ ID NO: 3450848 - RNA, 14 nt, Human
guaaugaauaccuu

SEQ ID NO: 3450849 - RNA, 15 nt, Human
guaaugagggacugg

SEQ ID NO: 3450850 - RNA, 19 nt, Human
guaaugcgauuuuauuacu

SEQ ID NO: 3450851 - RNA, 16 nt, Human
guaaugcgccaauaaa

SEQ ID NO: 3450852 - RNA, 18 nt, Human
guaaugcuacgugugauu

SEQ ID NO: 3450853 - RNA, 20 nt, Human
guaaugcuacgugugauuuu

SEQ ID NO: 3450854 - RNA, 12 nt, Human
guaaugcugcac

SEQ ID NO: 3450855 - RNA, 17 nt, Human
guaaugcugcacuuccu

SEQ ID NO: 3450856 - RNA, 15 nt, Human
guaaugguguagaac

SEQ ID NO: 3450857 - RNA, 12 nt, Human
guaauguaacug

SEQ ID NO: 3450858 - RNA, 19 nt, Human
guaauguaacugcucuugg

SEQ ID NO: 3450859 - RNA, 20 nt, Human
guaauguagcguguuuacau

SEQ ID NO: 3450860 - RNA, 17 nt, Human
guaaugucuugagcucu

SEQ ID NO: 3450861 - RNA, 14 nt, Human
guaaugugaauaaa

SEQ ID NO: 3450862 - RNA, 18 nt, Human
guaaugugugguggccuc

SEQ ID NO: 3450863 - RNA, 17 nt, Human
guaauguguuuuagagu

SEQ ID NO: 3450864 - RNA, 17 nt, Human
guaauguuaauauugau

SEQ ID NO: 3450865 - RNA, 20 nt, Human
guaauguuaauguuauauca

SEQ ID NO: 3450866 - RNA, 17 nt, Human
guaauguuacugaucau

SEQ ID NO: 3450867 - RNA, 20 nt, Human
guaauguuacugaucaugca

SEQ ID NO: 3450868 - RNA, 22 nt, Human
guaauguuacugaucaugcauu

SEQ ID NO: 3450869 - RNA, 23 nt, Human
guaauguuacugaucaugcauug

SEQ ID NO: 3450870 - RNA, 15 nt, Human
guaauguuauuuucu

SEQ ID NO: 3450871 - RNA, 19 nt, Human
guaauguuuucuuugcaaa

SEQ ID NO: 3450872 - RNA, 19 nt, Human
guaauuaaaagaauuuucc

SEQ ID NO: 3450873 - RNA, 19 nt, Human
guaauuaaaagcaaaucau

SEQ ID NO: 3450874 - RNA, 21 nt, Human
guaauuaaaagcaaaucauuu

SEQ ID NO: 3450875 - RNA, 22 nt, Human
guaauuaaacuguuaacuuauu

SEQ ID NO: 3450876 - RNA, 21 nt, Human
guaauuaaguacuauguauca

SEQ ID NO: 3450877 - RNA, 23 nt, Human
guaauuaguaacauguguuaagu

SEQ ID NO: 3450878 - RNA, 20 nt, Human
guaauuagugccacuuaaug

SEQ ID NO: 3450879 - RNA, 21 nt, Human
guaauuagugccacuuaaugu

SEQ ID NO: 3450880 - RNA, 20 nt, Human
guaauuaucgggaacagugu

SEQ ID NO: 3450881 - RNA, 21 nt, Human
guaauuaucgggaacaguguu

SEQ ID NO: 3450882 - RNA, 12 nt, Human
guaauuauugug

SEQ ID NO: 3450883 - RNA, 19 nt, Human
guaauuauuuauguauggu

SEQ ID NO: 3450884 - RNA, 15 nt, Human
guaauuauuugaaug

SEQ ID NO: 3450885 - RNA, 13 nt, Human
guaauucaagaaa

SEQ ID NO: 3450886 - RNA, 12 nt, Human
guaauucuaaau

SEQ ID NO: 3450887 - RNA, 18 nt, Human
guaauucuaaaugaaugu

SEQ ID NO: 3450888 - RNA, 22 nt, Human
guaauucuaaaugaauguuuac

SEQ ID NO: 3450889 - RNA, 23 nt, Human
guaauucuaccaaggucuucuua

SEQ ID NO: 3450890 - RNA, 22 nt, Human
guaauucuuauuccauauuaga

SEQ ID NO: 3450891 - RNA, 15 nt, Human
guaauucuuauucuu

SEQ ID NO: 3450892 - RNA, 16 nt, Human
guaauugaauaaaguu

SEQ ID NO: 3450893 - RNA, 16 nt, Human
guaauugcuuacauuu

SEQ ID NO: 3450894 - RNA, 22 nt, Human
guaauugcuuacauuuuuacaa

SEQ ID NO: 3450895 - RNA, 15 nt, Human
guaauuguaauuuug

SEQ ID NO: 3450896 - RNA, 18 nt, Human
guaauuguacuaaagcca

SEQ ID NO: 3450897 - RNA, 13 nt, Human
guaauugugaaaa

SEQ ID NO: 3450898 - RNA, 14 nt, Human
guaauugugaaaaa

SEQ ID NO: 3450899 - RNA, 21 nt, Human
guaauuguguggauucuuuaa

SEQ ID NO: 3450900 - RNA, 13 nt, Human
guaauuguguuua

SEQ ID NO: 3450901 - RNA, 15 nt, Human
guaauuguguuuaca

SEQ ID NO: 3450902 - RNA, 18 nt, Human
guaauuguguuuacauuu

SEQ ID NO: 3450903 - RNA, 17 nt, Human
guaauuguuguuuguau

SEQ ID NO: 3450904 - RNA, 19 nt, Human
guaauuuaaacaggcccag

SEQ ID NO: 3450905 - RNA, 23 nt, Human
guaauuuaaaugaaagaaaauug

SEQ ID NO: 3450906 - RNA, 18 nt, Human
guaauuuagaaaucauuu

SEQ ID NO: 3450907 - RNA, 18 nt, Human
guaauuuagauuguaaac

SEQ ID NO: 3450908 - RNA, 20 nt, Human
guaauuuauaguuuauacag

SEQ ID NO: 3450909 - RNA, 11 nt, Human
guaauuuauuu

SEQ ID NO: 3450910 - RNA, 13 nt, Human
guaauuucuuugc

SEQ ID NO: 3450911 - RNA, 21 nt, Human
guaauuucuuuuuuuccuuuu

SEQ ID NO: 3450912 - RNA, 13 nt, Human
guaauuugaagau

SEQ ID NO: 3450913 - RNA, 16 nt, Human
guaauuugaggacaac

SEQ ID NO: 3450914 - RNA, 18 nt, Human
guaauuugguuuaaaaau

SEQ ID NO: 3450915 - RNA, 15 nt, Human
guaauuuguaaaaug

SEQ ID NO: 3450916 - RNA, 13 nt, Human
guaauuuguaaag

SEQ ID NO: 3450917 - RNA, 13 nt, Human
guaauuuguaucu

SEQ ID NO: 3450918 - RNA, 21 nt, Human
guaauuuguaucugaaggaga

SEQ ID NO: 3450919 - RNA, 17 nt, Human
guaauuugugauacaau

SEQ ID NO: 3450920 - RNA, 20 nt, Human
guaauuugugauacaaugcu

SEQ ID NO: 3450921 - RNA, 20 nt, Human
guaauuuuacacgcuuuugu

SEQ ID NO: 3450922 - RNA, 22 nt, Human
guaauuuuacacgcuuuuguga

SEQ ID NO: 3450923 - RNA, 18 nt, Human
guaauuuucuugaugacu

SEQ ID NO: 3450924 - RNA, 17 nt, Human
guaauuuuggauuuugc

SEQ ID NO: 3450925 - RNA, 16 nt, Human
guaauuuuguguaaga

SEQ ID NO: 3450926 - RNA, 22 nt, Human
guaauuuuuacccuaaugucuu

SEQ ID NO: 3450927 - RNA, 21 nt, Human
guaauuuuuuuaauuuacaaa

SEQ ID NO: 3450928 - RNA, 18 nt, Human
guacaaaaauaaauuuau

SEQ ID NO: 3450929 - RNA, 14 nt, Human
guacaaaauaaaca

SEQ ID NO: 3450930 - RNA, 23 nt, Human
gaccugcuccgcugcuccuuggc

SEQ ID NO: 3450931 - RNA, 10 nt, Human
gaccugcuga

SEQ ID NO: 3450932 - RNA, 13 nt, Human
gaccugcugaagu

SEQ ID NO: 3450933 - RNA, 18 nt, Human
gaccugcugaccugugca

SEQ ID NO: 3450934 - RNA, 19 nt, Human
gaccugcugaccugugcac

SEQ ID NO: 3450935 - RNA, 13 nt, Human
gaccugcugagcu

SEQ ID NO: 3450936 - RNA, 16 nt, Human
gaccugcugagcucug

SEQ ID NO: 3450937 - RNA, 18 nt, Human
gaccugcugagcucugag

SEQ ID NO: 3450938 - RNA, 21 nt, Human
gaccugcugagggaccagcca

SEQ ID NO: 3450939 - RNA, 13 nt, Human
gaccugcuuuuug

SEQ ID NO: 3450940 - RNA, 14 nt, Human
gaccugcuuuuuga

SEQ ID NO: 3450941 - RNA, 16 nt, Human
gaccugcuuuuugaaa

SEQ ID NO: 3450942 - RNA, 20 nt, Human
gaccugcuuuuugaaaugaa

SEQ ID NO: 3450943 - RNA, 12 nt, Human
gaccuggagccc

SEQ ID NO: 3450944 - RNA, 14 nt, Human
gaccuggagccccu

SEQ ID NO: 3450945 - RNA, 20 nt, Human
gaccuggagccccugggugg

SEQ ID NO: 3450946 - RNA, 16 nt, Human
gaccuggcaaggacac

SEQ ID NO: 3450947 - RNA, 22 nt, Human
gaccuggcacuggaugcagaaa

SEQ ID NO: 3450948 - RNA, 15 nt, Human
gaccuggcagcucug

SEQ ID NO: 3450949 - RNA, 22 nt, Human
gaccugggaauuuucaacaugg

SEQ ID NO: 3450950 - RNA, 14 nt, Human
gaccuggggcacag

SEQ ID NO: 3450951 - RNA, 15 nt, Human
gaccuggggcacagu

SEQ ID NO: 3450952 - RNA, 22 nt, Human
gaccuggggcacaguccaggaa

SEQ ID NO: 3450953 - RNA, 23 nt, Human
gaccugguacccuccuggcucuu

SEQ ID NO: 3450954 - RNA, 19 nt, Human
gaccuguauuuaagcaaau

SEQ ID NO: 3450955 - RNA, 20 nt, Human
gaccugucaugccccccuca

SEQ ID NO: 3450956 - RNA, 14 nt, Human
gaccuguccuccug

SEQ ID NO: 3450957 - RNA, 16 nt, Human
gaccugucuccuggcg

SEQ ID NO: 3450958 - RNA, 17 nt, Human
gaccugugaccagcacu

SEQ ID NO: 3450959 - RNA, 16 nt, Human
gaccugugagcccagc

SEQ ID NO: 3450960 - RNA, 19 nt, Human
gaccugugagcccagcugg

SEQ ID NO: 3450961 - RNA, 14 nt, Human
gaccugugcacacc

SEQ ID NO: 3450962 - RNA, 20 nt, Human
gaccuguggggauuucuccc

SEQ ID NO: 3450963 - RNA, 21 nt, Human
gaccuguggggauuucuccca

SEQ ID NO: 3450964 - RNA, 19 nt, Human
gaccugugucacuacguga

SEQ ID NO: 3450965 - RNA, 17 nt, Human
gaccuguuagcagacag

SEQ ID NO: 3450966 - RNA, 17 nt, Human
gaccuguuuaugagaug

SEQ ID NO: 3450967 - RNA, 22 nt, Human
gaccuuaccccuggcuguuugg

SEQ ID NO: 3450968 - RNA, 16 nt, Human
gaccuuaguguuucug

SEQ ID NO: 3450969 - RNA, 12 nt, Human
gaccuuaucugu

SEQ ID NO: 3450970 - RNA, 14 nt, Human
gaccuuaucugugc

SEQ ID NO: 3450971 - RNA, 19 nt, Human
gaccuucaccaaacauacu

SEQ ID NO: 3450972 - RNA, 20 nt, Human
gaccuucacucuaagauguu

SEQ ID NO: 3450973 - RNA, 18 nt, Human
gaccuuccaagagccuga

SEQ ID NO: 3450974 - RNA, 22 nt, Human
gaccuuccauaaugcuacuguc

SEQ ID NO: 3450975 - RNA, 12 nt, Human
gaccuuccucau

SEQ ID NO: 3450976 - RNA, 22 nt, Human
gaccuuccucauccaccccauc

SEQ ID NO: 3450977 - RNA, 17 nt, Human
gaccuuccucgcagaga

SEQ ID NO: 3450978 - RNA, 21 nt, Human
gaccuuccucgcagagaggcc

SEQ ID NO: 3450979 - RNA, 12 nt, Human
gaccuuccucug

SEQ ID NO: 3450980 - RNA, 21 nt, Human
gaccuuccucuggggcucuag

SEQ ID NO: 3450981 - RNA, 16 nt, Human
gaccuucgggcugugc

SEQ ID NO: 3450982 - RNA, 18 nt, Human
gaccuucgggcugugccc

SEQ ID NO: 3450983 - RNA, 19 nt, Human
gaccuucgggcugugcccg

SEQ ID NO: 3450984 - RNA, 23 nt, Human
gaccuucuaggacgccacccagc

SEQ ID NO: 3450985 - RNA, 20 nt, Human
gaccuucuccuucaccuuug

SEQ ID NO: 3450986 - RNA, 14 nt, Human
gaccuugaacuggg

SEQ ID NO: 3450987 - RNA, 14 nt, Human
gaccuugaugagcu

SEQ ID NO: 3450988 - RNA, 16 nt, Human
gaccuuguaauguaac

SEQ ID NO: 3450989 - RNA, 23 nt, Human
gacuauuuaaacuuauaaaucau

SEQ ID NO: 3450990 - RNA, 16 nt, Human
gacuauuuaacuugag

SEQ ID NO: 3450991 - RNA, 17 nt, Human
gacuauuuuuguuuuua

SEQ ID NO: 3450992 - RNA, 16 nt, Human
gacucaaauguucuaa

SEQ ID NO: 3450993 - RNA, 17 nt, Human
gacucaaauguucuaag

SEQ ID NO: 3450994 - RNA, 22 nt, Human
gacucaacauguuacugaccag

SEQ ID NO: 3450995 - RNA, 16 nt, Human
gacucaagauucccag

SEQ ID NO: 3450996 - RNA, 18 nt, Human
gacucaagauucccagga

SEQ ID NO: 3450997 - RNA, 14 nt, Human
gacucaagccccgg

SEQ ID NO: 3450998 - RNA, 15 nt, Human
gacucaagccccgga

SEQ ID NO: 3450999 - RNA, 18 nt, Human
gacucacaaccugaaccu

SEQ ID NO: 3451000 - RNA, 15 nt, Human
gacucacaagaagac

SEQ ID NO: 3451001 - RNA, 14 nt, Human
gacucacuggcagc

SEQ ID NO: 3451002 - RNA, 16 nt, Human
gacucacuggcagccc

SEQ ID NO: 3451003 - RNA, 13 nt, Human
gacucagaagccu

SEQ ID NO: 3451004 - RNA, 16 nt, Human
gacucagaagccucug

SEQ ID NO: 3451005 - RNA, 19 nt, Human
gacucagaagccucugggu

SEQ ID NO: 3451006 - RNA, 16 nt, Human
gacucagacuccauuu

SEQ ID NO: 3451007 - RNA, 13 nt, Human
gacucagcccuga

SEQ ID NO: 3451008 - RNA, 14 nt, Human
gacucagcucccca

SEQ ID NO: 3451009 - RNA, 20 nt, Human
gacucagcuccccagagucc

SEQ ID NO: 3451010 - RNA, 12 nt, Human
gacucagcucug

SEQ ID NO: 3451011 - RNA, 19 nt, Human
gacucaggaugcccagggc

SEQ ID NO: 3451012 - RNA, 23 nt, Human
gacucaggauuuaaaaacuggaa

SEQ ID NO: 3451013 - RNA, 22 nt, Human
gacucaggcccccaccuggcuc

SEQ ID NO: 3451014 - RNA, 13 nt, Human
gacucagggcagc

SEQ ID NO: 3451015 - RNA, 16 nt, Human
gacucagggcagcgcc

SEQ ID NO: 3451016 - RNA, 12 nt, Human
gacucagggcuc

SEQ ID NO: 3451017 - RNA, 14 nt, Human
gacucagggcuccu

SEQ ID NO: 3451018 - RNA, 16 nt, Human
gacucagggcuccugg

SEQ ID NO: 3451019 - RNA, 19 nt, Human
gacucagggcuccuggguu

SEQ ID NO: 3451020 - RNA, 19 nt, Human
gacucagguggcccuacug

SEQ ID NO: 3451021 - RNA, 20 nt, Human
gacucaggugggcccucuga

SEQ ID NO: 3451022 - RNA, 21 nt, Human
gacucagguuguaguaaagaa

SEQ ID NO: 3451023 - RNA, 23 nt, Human
gacucagguuguaguaaagaaau

SEQ ID NO: 3451024 - RNA, 20 nt, Human
gacucagugcagauggagag

SEQ ID NO: 3451025 - RNA, 22 nt, Human
gacucaucaaucaaauaaguau

SEQ ID NO: 3451026 - RNA, 15 nt, Human
gacucauccugaaca

SEQ ID NO: 3451027 - RNA, 17 nt, Human
gacucauccugaacagc

SEQ ID NO: 3451028 - RNA, 19 nt, Human
gacucauccugaacagcau

SEQ ID NO: 3451029 - RNA, 16 nt, Human
gacucaucuuauaugg

SEQ ID NO: 3451030 - RNA, 15 nt, Human
gacucaucuuucccu

SEQ ID NO: 3451031 - RNA, 17 nt, Human
gacucaucuuucccucc

SEQ ID NO: 3451032 - RNA, 18 nt, Human
gacucaucuuucccuccu

SEQ ID NO: 3451033 - RNA, 22 nt, Human
gacucaugaggaggggcccccc

SEQ ID NO: 3451034 - RNA, 16 nt, Human
gacucauucugaagga

SEQ ID NO: 3451035 - RNA, 21 nt, Human
gacucauugcuucacaaccca

SEQ ID NO: 3451036 - RNA, 21 nt, Human
gacucauuuuaaaaaauggaa

SEQ ID NO: 3451037 - RNA, 12 nt, Human
gacuccaaagaa

SEQ ID NO: 3451038 - RNA, 16 nt, Human
gacuccaaagaaaugu

SEQ ID NO: 3451039 - RNA, 18 nt, Human
gacuccagaucugcaccg

SEQ ID NO: 3451040 - RNA, 15 nt, Human
gacuccagccagcgc

SEQ ID NO: 3451041 - RNA, 23 nt, Human
gacuccagccagcgccucccucc

SEQ ID NO: 3451042 - RNA, 20 nt, Human
gacuccagccugccuggcag

SEQ ID NO: 3451043 - RNA, 21 nt, Human
gacuccaggcagcagacacau

SEQ ID NO: 3451044 - RNA, 12 nt, Human
gacuccaucucu

SEQ ID NO: 3451045 - RNA, 17 nt, Human
gacuccaucucucaucc

SEQ ID NO: 3451046 - RNA, 15 nt, Human
gacucccaacccugg

SEQ ID NO: 3451047 - RNA, 21 nt, Human
gacucccaaguuuccauagca

SEQ ID NO: 3451048 - RNA, 13 nt, Human
gacucccaugaag

SEQ ID NO: 3451049 - RNA, 13 nt, Human
gacucccauuccu

SEQ ID NO: 3451050 - RNA, 23 nt, Human
gacucccauuccugaagaaccag

SEQ ID NO: 3451051 - RNA, 22 nt, Human
gacucccccaguccccuucccg

SEQ ID NO: 3451052 - RNA, 14 nt, Human
gacucccuccucac

SEQ ID NO: 3451053 - RNA, 20 nt, Human
gacucccuccucaccucugg

SEQ ID NO: 3451054 - RNA, 24 nt, Human
gacucccuccucaccucuggacug

SEQ ID NO: 3451055 - RNA, 18 nt, Human
gacuccggcugugcuggg

SEQ ID NO: 3451056 - RNA, 17 nt, Human
gacuccuaggcaggaca

SEQ ID NO: 3451057 - RNA, 21 nt, Human
gacuccuccccacccuccugg

SEQ ID NO: 3451058 - RNA, 20 nt, Human
gacuccucggccuggcuccu

SEQ ID NO: 3451059 - RNA, 14 nt, Human
gacuccucugucca

SEQ ID NO: 3451060 - RNA, 19 nt, Human
gacuccugaggacagcugu

SEQ ID NO: 3451061 - RNA, 20 nt, Human
gacuccugaggacagcuguc

SEQ ID NO: 3451062 - RNA, 21 nt, Human
gacuccugaggacagcugucc

SEQ ID NO: 3451063 - RNA, 23 nt, Human
gacuccugcacacgcuccuuccu

SEQ ID NO: 3451064 - RNA, 12 nt, Human
gacuccugcagg

SEQ ID NO: 3451065 - RNA, 15 nt, Human
gacuccugcaggcag

SEQ ID NO: 3451066 - RNA, 18 nt, Human
gacuccugcaggcagcca

SEQ ID NO: 3451067 - RNA, 11 nt, Human
gacuccugggu

SEQ ID NO: 3451068 - RNA, 13 nt, Human
gacuccugguccu

SEQ ID NO: 3451069 - RNA, 16 nt, Human
gacuccugugcaacuu

SEQ ID NO: 3451070 - RNA, 22 nt, Human
gacuccuugagagaccaggcaa

SEQ ID NO: 3451071 - RNA, 13 nt, Human
gacucgacucugu

SEQ ID NO: 3451072 - RNA, 19 nt, Human
gacucgagaacuuucauuu

SEQ ID NO: 3451073 - RNA, 13 nt, Human
gacucgcgacaau

SEQ ID NO: 3451074 - RNA, 19 nt, Human
gacucgcgacaaugcaaac

SEQ ID NO: 3451075 - RNA, 13 nt, Human
gacucgcuuguaa

SEQ ID NO: 3451076 - RNA, 17 nt, Human
gacucgggcuccugugc

SEQ ID NO: 3451077 - RNA, 19 nt, Human
gacucgggcuccugugccc

SEQ ID NO: 3451078 - RNA, 19 nt, Human
gacucgguuucuccaaacu

SEQ ID NO: 3451079 - RNA, 15 nt, Human
gacucuaagaaagaa

SEQ ID NO: 3451080 - RNA, 21 nt, Human
gacucuaagguuaucuacuuu

SEQ ID NO: 3451081 - RNA, 23 nt, Human
gacucuaccucauaucaguuugc

SEQ ID NO: 3451082 - RNA, 19 nt, Human
gacucuagaguccaagguu

SEQ ID NO: 3451083 - RNA, 19 nt, Human
gacucuaggugcccuugga

SEQ ID NO: 3451084 - RNA, 23 nt, Human
gacucuaguacugugaauccagu

SEQ ID NO: 3451085 - RNA, 18 nt, Human
gacucuauucuuuaacuc

SEQ ID NO: 3451086 - RNA, 16 nt, Human
gacucucagcccagaa

SEQ ID NO: 3451087 - RNA, 19 nt, Human
gacucucagcccagaagaa

SEQ ID NO: 3451088 - RNA, 12 nt, Human
gacucucuguga

SEQ ID NO: 3451089 - RNA, 13 nt, Human
gacucucugugac

SEQ ID NO: 3451090 - RNA, 16 nt, Human
gacucugaagccucug

SEQ ID NO: 3451091 - RNA, 20 nt, Human
gacucugaaucuuuuucaga

SEQ ID NO: 3451092 - RNA, 22 nt, Human
gacucugaggcucuuucugggc

SEQ ID NO: 3451093 - RNA, 14 nt, Human
gacucugcacauga

SEQ ID NO: 3451094 - RNA, 14 nt, Human
gucagucgccuuuc

SEQ ID NO: 3451095 - RNA, 23 nt, Human
gucagucgccuuucagcaggcag

SEQ ID NO: 3451096 - RNA, 17 nt, Human
gucagucuuuuucuguu

SEQ ID NO: 3451097 - RNA, 22 nt, Human
gucagugccgccgccucgccca

SEQ ID NO: 3451098 - RNA, 13 nt, Human
gucagugcugccu

SEQ ID NO: 3451099 - RNA, 22 nt, Human
gucagugggaacgugacugccc

SEQ ID NO: 3451100 - RNA, 23 nt, Human
gucaguguccaaagcagggucug

SEQ ID NO: 3451101 - RNA, 16 nt, Human
gucaguuguuauuuau

SEQ ID NO: 3451102 - RNA, 17 nt, Human
gucaguuguuauuuauu

SEQ ID NO: 3451103 - RNA, 21 nt, Human
gucaguuguuauuuauugaaa

SEQ ID NO: 3451104 - RNA, 18 nt, Human
gucauaacuaaauaaagc

SEQ ID NO: 3451105 - RNA, 13 nt, Human
gucauaacuagaa

SEQ ID NO: 3451106 - RNA, 16 nt, Human
gucauaauugcauuga

SEQ ID NO: 3451107 - RNA, 12 nt, Human
gucauacagaga

SEQ ID NO: 3451108 - RNA, 16 nt, Human
gucauaccaaugaaaa

SEQ ID NO: 3451109 - RNA, 20 nt, Human
gucauacuaucuacucuccu

SEQ ID NO: 3451110 - RNA, 16 nt, Human
gucauaggaaguuagc

SEQ ID NO: 3451111 - RNA, 22 nt, Human
gucauauacugccauguacuag

SEQ ID NO: 3451112 - RNA, 17 nt, Human
gucaucaauguauuugu

SEQ ID NO: 3451113 - RNA, 13 nt, Human
gucaucauacaug

SEQ ID NO: 3451114 - RNA, 16 nt, Human
gucaucaucagggccu

SEQ ID NO: 3451115 - RNA, 18 nt, Human
gucaucaucagggccugg

SEQ ID NO: 3451116 - RNA, 21 nt, Human
gucaucaucagggccuggggc

SEQ ID NO: 3451117 - RNA, 23 nt, Human
gucaucaucagggccuggggccu

SEQ ID NO: 3451118 - RNA, 18 nt, Human
gucaucaucauggccagc

SEQ ID NO: 3451119 - RNA, 18 nt, Human
gucauccucacagugaac

SEQ ID NO: 3451120 - RNA, 17 nt, Human
gucaucggcguggccca

SEQ ID NO: 3451121 - RNA, 19 nt, Human
gucaucguaggugauuuga

SEQ ID NO: 3451122 - RNA, 23 nt, Human
gucaucuagcgcaauugaaggau

SEQ ID NO: 3451123 - RNA, 19 nt, Human
gucaucuccaucagcugua

SEQ ID NO: 3451124 - RNA, 19 nt, Human
gucaucugagaaugaacaa

SEQ ID NO: 3451125 - RNA, 16 nt, Human
gucaucugguagauuu

SEQ ID NO: 3451126 - RNA, 17 nt, Human
gucaucuguuagggccu

SEQ ID NO: 3451127 - RNA, 12 nt, Human
gucaucuugcua

SEQ ID NO: 3451128 - RNA, 18 nt, Human
gucaucuuuuucucuaaa

SEQ ID NO: 3451129 - RNA, 18 nt, Human
gucaugaacauguuccug

SEQ ID NO: 3451130 - RNA, 20 nt, Human
gucaugaggagauucugccu

SEQ ID NO: 3451131 - RNA, 15 nt, Human
gucaugaucucccug

SEQ ID NO: 3451132 - RNA, 14 nt, Human
gucaugaugaauca

SEQ ID NO: 3451133 - RNA, 13 nt, Human
gagacaccugcac

SEQ ID NO: 3451134 - RNA, 15 nt, Human
gagacaccugcaccu

SEQ ID NO: 3451135 - RNA, 19 nt, Human
gagacaccugcaccucccc

SEQ ID NO: 3451136 - RNA, 20 nt, Human
gagacaccugcaccuccccc

SEQ ID NO: 3451137 - RNA, 16 nt, Human
gagacacggagcccag

SEQ ID NO: 3451138 - RNA, 14 nt, Human
gagacacugguggg

SEQ ID NO: 3451139 - RNA, 16 nt, Human
gagacacuguugauaa

SEQ ID NO: 3451140 - RNA, 17 nt, Human
gagacacuugccuucuu

SEQ ID NO: 3451141 - RNA, 15 nt, Human
gagacagaagcaggc

SEQ ID NO: 3451142 - RNA, 16 nt, Human
gagacagaauguaucu

SEQ ID NO: 3451143 - RNA, 21 nt, Human
gagacagaauguaucugugaa

SEQ ID NO: 3451144 - RNA, 20 nt, Human
gagacagauaccuccaaccc

SEQ ID NO: 3451145 - RNA, 22 nt, Human
gagacagauaccuccaacccug

SEQ ID NO: 3451146 - RNA, 18 nt, Human
gagacagccccagagcag

SEQ ID NO: 3451147 - RNA, 19 nt, Human
gagacagccccagagcagg

SEQ ID NO: 3451148 - RNA, 17 nt, Human
gagacagcccgggcucu

SEQ ID NO: 3451149 - RNA, 20 nt, Human
gagacagcccgggcucugcc

SEQ ID NO: 3451150 - RNA, 22 nt, Human
gagacagcccgggcucugccuc

SEQ ID NO: 3451151 - RNA, 14 nt, Human
guaucugaaggaga

SEQ ID NO: 3451152 - RNA, 12 nt, Human
guaucugagcag

SEQ ID NO: 3451153 - RNA, 17 nt, Human
guaucugaguugccaag

SEQ ID NO: 3451154 - RNA, 21 nt, Human
guaucuggauucaaauuuauu

SEQ ID NO: 3451155 - RNA, 12 nt, Human
guaucuggugac

SEQ ID NO: 3451156 - RNA, 23 nt, Human
guaucugucuuuccacucuggau

SEQ ID NO: 3451157 - RNA, 20 nt, Human
guaucugugaaguaguucug

SEQ ID NO: 3451158 - RNA, 13 nt, Human
guaucuuaaauuu

SEQ ID NO: 3451159 - RNA, 20 nt, Human
guaucuuccauauuuggaag

SEQ ID NO: 3451160 - RNA, 22 nt, Human
guaucuugcaguaucggcacug

SEQ ID NO: 3451161 - RNA, 21 nt, Human
guaucuugggggacagggcug

SEQ ID NO: 3451162 - RNA, 19 nt, Human
guaucuuucuaugcugcuu

SEQ ID NO: 3451163 - RNA, 16 nt, Human
guaucuuuuuucaaaa

SEQ ID NO: 3451164 - RNA, 16 nt, Human
guaugaaauauaugug

SEQ ID NO: 3451165 - RNA, 20 nt, Human
guaugaaauauaugugaaag

SEQ ID NO: 3451166 - RNA, 19 nt, Human
guaugaacuuuaucuaaag

SEQ ID NO: 3451167 - RNA, 16 nt, Human
guaugaagaguguuau

SEQ ID NO: 3451168 - RNA, 13 nt, Human
guaugaaggcuuu

SEQ ID NO: 3451169 - RNA, 20 nt, Human
guaugaauacagcagcaaga

SEQ ID NO: 3451170 - RNA, 20 nt, Human
guaugaaucuaugccaaaga

SEQ ID NO: 3451171 - RNA, 16 nt, Human
guaugacgcugauaca

SEQ ID NO: 3451172 - RNA, 12 nt, Human
guaugagcugag

SEQ ID NO: 3451173 - RNA, 14 nt, Human
guaugagcugaggg

SEQ ID NO: 3451174 - RNA, 17 nt, Human
guaugaggcauuuguuu

SEQ ID NO: 3451175 - RNA, 21 nt, Human
guaugagucaaugugcagugu

SEQ ID NO: 3451176 - RNA, 13 nt, Human
guaugaucaaaug

SEQ ID NO: 3451177 - RNA, 16 nt, Human
guaugaucaaauguuu

SEQ ID NO: 3451178 - RNA, 17 nt, Human
guaugauguguugugau

SEQ ID NO: 3451179 - RNA, 23 nt, Human
guaugauuuauaaacagacaaua

SEQ ID NO: 3451180 - RNA, 23 nt, Human
guaugcaagcaguuucaauaaag

SEQ ID NO: 3451181 - RNA, 15 nt, Human
guaugcacaauucca

SEQ ID NO: 3451182 - RNA, 16 nt, Human
guaugcacaauuccau

SEQ ID NO: 3451183 - RNA, 19 nt, Human
guaugcacaugaacuuaga

SEQ ID NO: 3451184 - RNA, 15 nt, Human
guaugcagggagcug

SEQ ID NO: 3451185 - RNA, 18 nt, Human
guaugcaugugaagaaag

SEQ ID NO: 3451186 - RNA, 13 nt, Human
guaugcugaucau

SEQ ID NO: 3451187 - RNA, 21 nt, Human
guaugcugaucaucgccagag

SEQ ID NO: 3451188 - RNA, 12 nt, Human
guaugcuucaua

SEQ ID NO: 3451189 - RNA, 14 nt, Human
guaugcuucauaca

SEQ ID NO: 3451190 - RNA, 15 nt, Human
guaugcuucauacag

SEQ ID NO: 3451191 - RNA, 16 nt, Human
guaugcuuugaaugua

SEQ ID NO: 3451192 - RNA, 21 nt, Human
guauggaaaaaccauuugaag

SEQ ID NO: 3451193 - RNA, 16 nt, Human
guauggaaguuuuccu

SEQ ID NO: 3451194 - RNA, 17 nt, Human
guauggaaguuuuccua

SEQ ID NO: 3451195 - RNA, 19 nt, Human
guauggaauacaauguaau

SEQ ID NO: 3451196 - RNA, 17 nt, Human
guauggaauacaguguu

SEQ ID NO: 3451197 - RNA, 21 nt, Human
guauggagcagccuggagacc

SEQ ID NO: 3451198 - RNA, 18 nt, Human
guauggagcucagagagg

SEQ ID NO: 3451199 - RNA, 14 nt, Human
guauggccuguguc

SEQ ID NO: 3451200 - RNA, 15 nt, Human
guauggccuguguca

SEQ ID NO: 3451201 - RNA, 21 nt, Human
guauggcguaaguacagagaa

SEQ ID NO: 3451202 - RNA, 23 nt, Human
guauggcguaaguacagagaagc

SEQ ID NO: 3451203 - RNA, 21 nt, Human
guauggcuuuauuuuuuugaa

SEQ ID NO: 3451204 - RNA, 16 nt, Human
guaugggacuggccuc

SEQ ID NO: 3451205 - RNA, 14 nt, Human
guaugggagagaag

SEQ ID NO: 3451206 - RNA, 14 nt, Human
guaugggcaaaaaa

SEQ ID NO: 3451207 - RNA, 19 nt, Human
guauggguaggguaaauca

SEQ ID NO: 3451208 - RNA, 15 nt, Human
guauggguguguguu

SEQ ID NO: 3451209 - RNA, 14 nt, Human
guaugguaaucuuu

SEQ ID NO: 3451210 - RNA, 15 nt, Human
guauggugcaaugug

SEQ ID NO: 3451211 - RNA, 15 nt, Human
guaugguggcugggu

SEQ ID NO: 3451212 - RNA, 15 nt, Human
guaugguugacacua

SEQ ID NO: 3451213 - RNA, 11 nt, Human
guauguaaaaa

SEQ ID NO: 3451214 - RNA, 11 nt, Human
guauguaaaug

SEQ ID NO: 3451215 - RNA, 15 nt, Human
guauguaaauguaua

SEQ ID NO: 3451216 - RNA, 22 nt, Human
guauguaaugugugguggccuc

SEQ ID NO: 3451217 - RNA, 23 nt, Human
guauguaaugugugguggccuca

SEQ ID NO: 3451218 - RNA, 11 nt, Human
guauguauaau

SEQ ID NO: 3451219 - RNA, 13 nt, Human
guauguaucuauu

SEQ ID NO: 3451220 - RNA, 13 nt, Human
guaugucaaagcu

SEQ ID NO: 3451221 - RNA, 11 nt, Human
guaugucugcc

SEQ ID NO: 3451222 - RNA, 13 nt, Human
guaugucugccau

SEQ ID NO: 3451223 - RNA, 18 nt, Human
guauguggaagugugggu

SEQ ID NO: 3451224 - RNA, 19 nt, Human
guaugugggggucugugug

SEQ ID NO: 3451225 - RNA, 21 nt, Human
guauguguacgugugugugcg

SEQ ID NO: 3451226 - RNA, 19 nt, Human
guauguguaucucacacuc

SEQ ID NO: 3451227 - RNA, 17 nt, Human
guaugugugaagugagu

SEQ ID NO: 3451228 - RNA, 21 nt, Human
guaugugugaagugagugagu

SEQ ID NO: 3451229 - RNA, 13 nt, Human
guauguguguaga

SEQ ID NO: 3451230 - RNA, 14 nt, Human
guauguguguaugg

SEQ ID NO: 3451231 - RNA, 12 nt, Human
guaugugugugu

SEQ ID NO: 3451232 - RNA, 16 nt, Human
guauguguguguaugc

SEQ ID NO: 3451233 - RNA, 18 nt, Human
guauguguuuagaauuga

SEQ ID NO: 3451234 - RNA, 17 nt, Human
guauguguuugugugug

SEQ ID NO: 3451235 - RNA, 17 nt, Human
guauguuagugcaaauu

SEQ ID NO: 3451236 - RNA, 14 nt, Human
guauguuauacaac

SEQ ID NO: 3451237 - RNA, 17 nt, Human
guauguugaagccuuug

SEQ ID NO: 3451238 - RNA, 11 nt, Human
guauguugucc

SEQ ID NO: 3451239 - RNA, 17 nt, Human
guauguuuacacuguca

SEQ ID NO: 3451240 - RNA, 17 nt, Human
guauguuucucuuugau

SEQ ID NO: 3451241 - RNA, 16 nt, Human
guauguuuuagcaugu

SEQ ID NO: 3451242 - RNA, 18 nt, Human
guauguuuuucaguucaa

SEQ ID NO: 3451243 - RNA, 19 nt, Human
guauguuuuuguguauuug

SEQ ID NO: 3451244 - RNA, 15 nt, Human
guauuaaaaaaaaca

SEQ ID NO: 3451245 - RNA, 15 nt, Human
guauuaaaacauugg

SEQ ID NO: 3451246 - RNA, 20 nt, Human
guauuaaaacauuggauuau

SEQ ID NO: 3451247 - RNA, 14 nt, Human
guauuaaaauguau

SEQ ID NO: 3451248 - RNA, 17 nt, Human
guauuaaaauguaugca

SEQ ID NO: 3451249 - RNA, 13 nt, Human
guauuaaagacag

SEQ ID NO: 3451250 - RNA, 14 nt, Human
guauuaaagggggg

SEQ ID NO: 3451251 - RNA, 18 nt, Human
guauuaaauuacauuugu

SEQ ID NO: 3451252 - RNA, 21 nt, Human
guauuaaauuacauuuguaau

SEQ ID NO: 3451253 - RNA, 12 nt, Human
guauuaagaaag

SEQ ID NO: 3451254 - RNA, 14 nt, Human
guauuaagaaagga

SEQ ID NO: 3451255 - RNA, 16 nt, Human
guauuaagauuauaau

SEQ ID NO: 3451256 - RNA, 23 nt, Human
guauuaagauuauaauuguugca

SEQ ID NO: 3451257 - RNA, 17 nt, Human
guauuaagcauauauuu

SEQ ID NO: 3451258 - RNA, 15 nt, Human
guauuaagggauuua

SEQ ID NO: 3451259 - RNA, 18 nt, Human
guauuaauaaauagagca

SEQ ID NO: 3451260 - RNA, 15 nt, Human
guauuaauacuaaaa

SEQ ID NO: 3451261 - RNA, 19 nt, Human
guauuaauacuaaaauaug

SEQ ID NO: 3451262 - RNA, 15 nt, Human
guauuaauucucuuu

SEQ ID NO: 3451263 - RNA, 18 nt, Human
guauuaauuuugauauaa

SEQ ID NO: 3451264 - RNA, 20 nt, Human
guauuacaguggggaaugaa

SEQ ID NO: 3451265 - RNA, 21 nt, Human
guauuagaguuucaaccauga

SEQ ID NO: 3451266 - RNA, 13 nt, Human
guauuagauguuc

SEQ ID NO: 3451267 - RNA, 15 nt, Human
guauuagauguucuc

SEQ ID NO: 3451268 - RNA, 22 nt, Human
guauuagggguaauauauugcu

SEQ ID NO: 3451269 - RNA, 18 nt, Human
guauuauaaauuauguuu

SEQ ID NO: 3451270 - RNA, 19 nt, Human
guauuauaaauuauguuua

SEQ ID NO: 3451271 - RNA, 13 nt, Human
guauuauauguac

SEQ ID NO: 3451272 - RNA, 16 nt, Human
guauuaucaaagggau

SEQ ID NO: 3451273 - RNA, 15 nt, Human
guauuauucugcagc

SEQ ID NO: 3451274 - RNA, 13 nt, Human
guauucaagaaag

SEQ ID NO: 3451275 - RNA, 22 nt, Human
guauucaauuaaagaaauaauu

SEQ ID NO: 3451276 - RNA, 14 nt, Human
guauucauauuugu

SEQ ID NO: 3451277 - RNA, 19 nt, Human
guauuccaccuuaaauuaa

SEQ ID NO: 3451278 - RNA, 23 nt, Human
guauuccuuuuguguacagugug

SEQ ID NO: 3451279 - RNA, 17 nt, Human
gagagaccgaggaggga

SEQ ID NO: 3451280 - RNA, 18 nt, Human
gagagaccucaucaggau

SEQ ID NO: 3451281 - RNA, 13 nt, Human
gagagacgggccc

SEQ ID NO: 3451282 - RNA, 16 nt, Human
gagagacguguacaua

SEQ ID NO: 3451283 - RNA, 17 nt, Human
gagagacguguacauag

SEQ ID NO: 3451284 - RNA, 15 nt, Human
gagagagaaagccag

SEQ ID NO: 3451285 - RNA, 23 nt, Human
gagagagaagugccccugcugcc

SEQ ID NO: 3451286 - RNA, 13 nt, Human
gagagagagagaa

SEQ ID NO: 3451287 - RNA, 13 nt, Human
gagagagagagga

SEQ ID NO: 3451288 - RNA, 15 nt, Human
gagagagaggcagaa

SEQ ID NO: 3451289 - RNA, 20 nt, Human
gagagagcugagugagcuga

SEQ ID NO: 3451290 - RNA, 19 nt, Human
gagagagcuucuguugcug

SEQ ID NO: 3451291 - RNA, 22 nt, Human
gagagagcuucuguugcugccu

SEQ ID NO: 3451292 - RNA, 13 nt, Human
gagagaggacagc

SEQ ID NO: 3451293 - RNA, 15 nt, Human
gagagaggcagagag

SEQ ID NO: 3451294 - RNA, 17 nt, Human
gagagaggcagagagcg

SEQ ID NO: 3451295 - RNA, 21 nt, Human
gagagaggccauucuuuccca

SEQ ID NO: 3451296 - RNA, 18 nt, Human
gagagaggcuaaaauguu

SEQ ID NO: 3451297 - RNA, 19 nt, Human
gagagaggcuaaaauguuu

SEQ ID NO: 3451298 - RNA, 12 nt, Human
gagagaggggaa

SEQ ID NO: 3451299 - RNA, 14 nt, Human
gagagauauaucug

SEQ ID NO: 3451300 - RNA, 15 nt, Human
gagagaucaugagaa

SEQ ID NO: 3451301 - RNA, 19 nt, Human
gagagauguguaauuuuuc

SEQ ID NO: 3451302 - RNA, 22 nt, Human
gagagcaagggaagugguucuu

SEQ ID NO: 3451303 - RNA, 14 nt, Human
gagagcagagaaua

SEQ ID NO: 3451304 - RNA, 16 nt, Human
gagagcagcuucugcc

SEQ ID NO: 3451305 - RNA, 15 nt, Human
gagagcaucggccua

SEQ ID NO: 3451306 - RNA, 16 nt, Human
gagagccagaaccugg

SEQ ID NO: 3451307 - RNA, 12 nt, Human
gagagccagccc

SEQ ID NO: 3451308 - RNA, 22 nt, Human
gagagccagcuaaggggugggg

SEQ ID NO: 3451309 - RNA, 16 nt, Human
gagagccauacauaaa

SEQ ID NO: 3451310 - RNA, 14 nt, Human
gagagcccagaggu

SEQ ID NO: 3451311 - RNA, 23 nt, Human
gagagcccagagguaacagaaca

SEQ ID NO: 3451312 - RNA, 19 nt, Human
gagagcccagagucccccc

SEQ ID NO: 3451313 - RNA, 15 nt, Human
gagagcccaggagcu

SEQ ID NO: 3451314 - RNA, 20 nt, Human
gagagcccaggagcuccccu

SEQ ID NO: 3451315 - RNA, 15 nt, Human
gagagccccuggggc

SEQ ID NO: 3451316 - RNA, 20 nt, Human
gagagcccggcgccccugcc

SEQ ID NO: 3451317 - RNA, 14 nt, Human
gagagcccugaggc

SEQ ID NO: 3451318 - RNA, 15 nt, Human
gagagcccugggacc

SEQ ID NO: 3451319 - RNA, 19 nt, Human
gagagccguggucccugag

SEQ ID NO: 3451320 - RNA, 20 nt, Human
gucuucaaauugucuuuugu

SEQ ID NO: 3451321 - RNA, 16 nt, Human
gucuucaacagcuccc

SEQ ID NO: 3451322 - RNA, 22 nt, Human
gucuucaaccagggauuguuuc

SEQ ID NO: 3451323 - RNA, 14 nt, Human
gucuucaagggcuu

SEQ ID NO: 3451324 - RNA, 13 nt, Human
gucuucacaacag

SEQ ID NO: 3451325 - RNA, 20 nt, Human
gucuucaccugauucaacua

SEQ ID NO: 3451326 - RNA, 16 nt, Human
gucuucacucuuaggc

SEQ ID NO: 3451327 - RNA, 22 nt, Human
gucuucagagauaggccugugg

SEQ ID NO: 3451328 - RNA, 18 nt, Human
gucuucauccccucagaa

SEQ ID NO: 3451329 - RNA, 17 nt, Human
gucuucauuucauugua

SEQ ID NO: 3451330 - RNA, 16 nt, Human
gucuuccacaaagaaa

SEQ ID NO: 3451331 - RNA, 13 nt, Human
gucuuccauaaug

SEQ ID NO: 3451332 - RNA, 12 nt, Human
gucuucccaggg

SEQ ID NO: 3451333 - RNA, 13 nt, Human
gucuucccagggu

SEQ ID NO: 3451334 - RNA, 16 nt, Human
gucuucccuaccucag

SEQ ID NO: 3451335 - RNA, 19 nt, Human
gucuucccuagggcugggu

SEQ ID NO: 3451336 - RNA, 20 nt, Human
gucuucccuagggcugggug

SEQ ID NO: 3451337 - RNA, 19 nt, Human
gucuucccucuucccucag

SEQ ID NO: 3451338 - RNA, 19 nt, Human
gucuuccgccccugccugc

SEQ ID NO: 3451339 - RNA, 14 nt, Human
gucuuccgucuccc

SEQ ID NO: 3451340 - RNA, 14 nt, Human
gucuuccuacucuu

SEQ ID NO: 3451341 - RNA, 16 nt, Human
gucuuccuauuucaga

SEQ ID NO: 3451342 - RNA, 18 nt, Human
gucuuccuauuucagaag

SEQ ID NO: 3451343 - RNA, 15 nt, Human
gucuuccuccaaccc

SEQ ID NO: 3451344 - RNA, 13 nt, Human
gucuuccucccaa

SEQ ID NO: 3451345 - RNA, 14 nt, Human
gucuuccucccaag

SEQ ID NO: 3451346 - RNA, 12 nt, Human
gucuuccugagu

SEQ ID NO: 3451347 - RNA, 14 nt, Human
gucuucguacaguu

SEQ ID NO: 3451348 - RNA, 23 nt, Human
gucuucuaauuucaaaaauauaa

SEQ ID NO: 3451349 - RNA, 14 nt, Human
gucuucuauuuauu

SEQ ID NO: 3451350 - RNA, 17 nt, Human
gucuucuauuuauuuau

SEQ ID NO: 3451351 - RNA, 16 nt, Human
gucuucucauagcauu

SEQ ID NO: 3451352 - RNA, 17 nt, Human
gucuucucauagcauua

SEQ ID NO: 3451353 - RNA, 13 nt, Human
gucuucuccccag

SEQ ID NO: 3451354 - RNA, 13 nt, Human
gucuucucugucu

SEQ ID NO: 3451355 - RNA, 18 nt, Human
gucuucugacaaacugug

SEQ ID NO: 3451356 - RNA, 13 nt, Human
gucuucugccugu

SEQ ID NO: 3451357 - RNA, 14 nt, Human
gucuucugcuuugu

SEQ ID NO: 3451358 - RNA, 17 nt, Human
gucuucuuacuuggaac

SEQ ID NO: 3451359 - RNA, 16 nt, Human
gucuugaacuccuggc

SEQ ID NO: 3451360 - RNA, 18 nt, Human
gucuugaacuccuggccu

SEQ ID NO: 3451361 - RNA, 16 nt, Human
gucuugaaguccuggc

SEQ ID NO: 3451362 - RNA, 15 nt, Human
gucuugaaugucuuu

SEQ ID NO: 3451363 - RNA, 14 nt, Human
gucuugagcucuau

SEQ ID NO: 3451364 - RNA, 16 nt, Human
gucuugcaauggcagc

SEQ ID NO: 3451365 - RNA, 16 nt, Human
gucuugccccaucacu

SEQ ID NO: 3451366 - RNA, 15 nt, Human
gucuugccuauauuu

SEQ ID NO: 3451367 - RNA, 20 nt, Human
gucuugccuuuuucauuauu

SEQ ID NO: 3451368 - RNA, 21 nt, Human
gucuugcuauauugcccaggc

SEQ ID NO: 3451369 - RNA, 19 nt, Human
gucuugcuguugacauauu

SEQ ID NO: 3451370 - RNA, 17 nt, Human
gucuuggaacuugccug

SEQ ID NO: 3451371 - RNA, 21 nt, Human
gucuuggaagcuguuuggaaa

SEQ ID NO: 3451372 - RNA, 14 nt, Human
gucuuggacacugu

SEQ ID NO: 3451373 - RNA, 15 nt, Human
gucuuggauauauag

SEQ ID NO: 3451374 - RNA, 23 nt, Human
gucuuggcggcagcagccaucau

SEQ ID NO: 3451375 - RNA, 16 nt, Human
gucuugggaaauauga

SEQ ID NO: 3451376 - RNA, 21 nt, Human
gucuuguaagagcuauacagu

SEQ ID NO: 3451377 - RNA, 23 nt, Human
gucuugucucagauuuuauuaug

SEQ ID NO: 3451378 - RNA, 13 nt, Human
gucuugugacuag

SEQ ID NO: 3451379 - RNA, 13 nt, Human
gucuuguucuguc

SEQ ID NO: 3451380 - RNA, 16 nt, Human
gucuuguucugucacu

SEQ ID NO: 3451381 - RNA, 16 nt, Human
gucuuuaaaggcccag

SEQ ID NO: 3451382 - RNA, 20 nt, Human
gucuuuaaaggcccagcccc

SEQ ID NO: 3451383 - RNA, 22 nt, Human
gucuuuaaaggcccagccccua

SEQ ID NO: 3451384 - RNA, 22 nt, Human
gucuuuagauagcccuguccug

SEQ ID NO: 3451385 - RNA, 11 nt, Human
gucuuucagua

SEQ ID NO: 3451386 - RNA, 21 nt, Human
gucuuuccaaauuauuucuua

SEQ ID NO: 3451387 - RNA, 20 nt, Human
gucuuuccauuggaucucau

SEQ ID NO: 3451388 - RNA, 19 nt, Human
gucuuucccauggggaggg

SEQ ID NO: 3451389 - RNA, 23 nt, Human
gucuuucucaaagaaauauuaag

SEQ ID NO: 3451390 - RNA, 13 nt, Human
gucuuucuggaga

SEQ ID NO: 3451391 - RNA, 12 nt, Human
gucuuucugggg

SEQ ID NO: 3451392 - RNA, 16 nt, Human
gucuuucuugcucccu

SEQ ID NO: 3451393 - RNA, 19 nt, Human
gucuuucuuuggugccuuu

SEQ ID NO: 3451394 - RNA, 17 nt, Human
gucuuucuuuuuggaca

SEQ ID NO: 3451395 - RNA, 19 nt, Human
gucuuuggaaaaauguuug

SEQ ID NO: 3451396 - RNA, 17 nt, Human
gucuuuggacccugagg

SEQ ID NO: 3451397 - RNA, 18 nt, Human
gucuuuggacccugaggc

SEQ ID NO: 3451398 - RNA, 22 nt, Human
gucuuuggagaaaugcuuagaa

SEQ ID NO: 3451399 - RNA, 16 nt, Human
gucuuuggugaacauu

SEQ ID NO: 3451400 - RNA, 11 nt, Human
gucuuuguaag

SEQ ID NO: 3451401 - RNA, 12 nt, Human
gucuuuguaaga

SEQ ID NO: 3451402 - RNA, 23 nt, Human
gucuuuguaaguaaacugcccug

SEQ ID NO: 3451403 - RNA, 23 nt, Human
gucuuuguaagucaguguugaga

SEQ ID NO: 3451404 - RNA, 21 nt, Human
gucuuuguaaugucaccaccu

SEQ ID NO: 3451405 - RNA, 15 nt, Human
gucuuuguacagaca

SEQ ID NO: 3451406 - RNA, 16 nt, Human
gucuuuguacagacaa

SEQ ID NO: 3451407 - RNA, 10 nt, Human
gucuuuuaaa

SEQ ID NO: 3451408 - RNA, 19 nt, Human
gucuuuuaaaaaguauugc

SEQ ID NO: 3451409 - RNA, 17 nt, Human
gucuuuuaaugcuucau

SEQ ID NO: 3451410 - RNA, 18 nt, Human
gucuuuuauauuuguauc

SEQ ID NO: 3451411 - RNA, 20 nt, Human
gucuuuucuuugccaucucu

SEQ ID NO: 3451412 - RNA, 12 nt, Human
gucuuuugcaug

SEQ ID NO: 3451413 - RNA, 13 nt, Human
gucuuuugcuuuu

SEQ ID NO: 3451414 - RNA, 15 nt, Human
gucuuuuguucgcau

SEQ ID NO: 3451415 - RNA, 16 nt, Human
gucuuuuuagaugccc

SEQ ID NO: 3451416 - RNA, 20 nt, Human
gucuuuuucuguuguaacuu

SEQ ID NO: 3451417 - RNA, 15 nt, Human
gucuuuuuuuguaua

SEQ ID NO: 3451418 - RNA, 17 nt, Human
gucuuuuuuuguauuau

SEQ ID NO: 3451419 - RNA, 16 nt, Human
gucuuuuuuuuaaugu

SEQ ID NO: 3451420 - RNA, 23 nt, Human
gucuuuuuuuuuuaagugaaauu

SEQ ID NO: 3451421 - RNA, 14 nt, Human
gugaaaaaaaaaau

SEQ ID NO: 3451422 - RNA, 15 nt, Human
gugaaaacaagugcu

SEQ ID NO: 3451423 - RNA, 23 nt, Human
gugaaaagaaaaaugagccuggc

SEQ ID NO: 3451424 - RNA, 19 nt, Human
gugaaaauagguauacagu

SEQ ID NO: 3451425 - RNA, 21 nt, Human
gugcccacaccggggacaggc

SEQ ID NO: 3451426 - RNA, 21 nt, Human
gugcccacaggccgcccugcg

SEQ ID NO: 3451427 - RNA, 22 nt, Human
gugcccacagugucaggcacug

SEQ ID NO: 3451428 - RNA, 23 nt, Human
gugcccaccaacaucccauugcc

SEQ ID NO: 3451429 - RNA, 22 nt, Human
gugcccagaacuggacucagga

SEQ ID NO: 3451430 - RNA, 18 nt, Human
gugcccagcccggaccuu

SEQ ID NO: 3451431 - RNA, 11 nt, Human
gugcccagcuu

SEQ ID NO: 3451432 - RNA, 12 nt, Human
gugcccaggaga

SEQ ID NO: 3451433 - RNA, 13 nt, Human
gugcccaggagaa

SEQ ID NO: 3451434 - RNA, 16 nt, Human
gugcccaguuaaucuu

SEQ ID NO: 3451435 - RNA, 17 nt, Human
gugcccaucccuggaag

SEQ ID NO: 3451436 - RNA, 16 nt, Human
gugcccauuccucacc

SEQ ID NO: 3451437 - RNA, 19 nt, Human
gugccccaggaccagcuca

SEQ ID NO: 3451438 - RNA, 21 nt, Human
gugccccaugccuguccagcc

SEQ ID NO: 3451439 - RNA, 22 nt, Human
gugcccccaaccauuuccucag

SEQ ID NO: 3451440 - RNA, 18 nt, Human
gugcccccacugaccaga

SEQ ID NO: 3451441 - RNA, 19 nt, Human
gugcccccacugaccagaa

SEQ ID NO: 3451442 - RNA, 21 nt, Human
gugccccccaccccuggaaga

SEQ ID NO: 3451443 - RNA, 13 nt, Human
gugcccccuccuc

SEQ ID NO: 3451444 - RNA, 14 nt, Human
gugcccccuccucu

SEQ ID NO: 3451445 - RNA, 18 nt, Human
gugcccccuccucuccca

SEQ ID NO: 3451446 - RNA, 14 nt, Human
gugcccccucuacc

SEQ ID NO: 3451447 - RNA, 16 nt, Human
gugccccgccuccccg

SEQ ID NO: 3451448 - RNA, 17 nt, Human
gugccccgccuccccga

SEQ ID NO: 3451449 - RNA, 13 nt, Human
gugccccuagcuu

SEQ ID NO: 3451450 - RNA, 20 nt, Human
gugccccugcugccucccca

SEQ ID NO: 3451451 - RNA, 20 nt, Human
gugccccuuccgccacuggg

SEQ ID NO: 3451452 - RNA, 15 nt, Human
gugcccggggcagca

SEQ ID NO: 3451453 - RNA, 23 nt, Human
gugcccggggcagcagcagcccu

SEQ ID NO: 3451454 - RNA, 20 nt, Human
gugcccuacucauugggguu

SEQ ID NO: 3451455 - RNA, 15 nt, Human
gugcccuccacugcc

SEQ ID NO: 3451456 - RNA, 23 nt, Human
gugcccuccugagggaggaccug

SEQ ID NO: 3451457 - RNA, 19 nt, Human
gugcccucucccacccucu

SEQ ID NO: 3451458 - RNA, 13 nt, Human
gugcccucugggc

SEQ ID NO: 3451459 - RNA, 15 nt, Human
gugcccugagccagg

SEQ ID NO: 3451460 - RNA, 17 nt, Human
gugcccugagccagggu

SEQ ID NO: 3451461 - RNA, 15 nt, Human
gugccgacagaagga

SEQ ID NO: 3451462 - RNA, 18 nt, Human
gugccgccgccucgccca

SEQ ID NO: 3451463 - RNA, 20 nt, Human
gugccgccgccucgcccacc

SEQ ID NO: 3451464 - RNA, 23 nt, Human
gugccgccgccucgcccaccgca

SEQ ID NO: 3451465 - RNA, 23 nt, Human
gugccguguccccugacagggcc

SEQ ID NO: 3451466 - RNA, 20 nt, Human
gugccguguguugcaugcag

SEQ ID NO: 3451467 - RNA, 12 nt, Human
gugccuaaaaua

SEQ ID NO: 3451468 - RNA, 15 nt, Human
gugccuaggccuggg

SEQ ID NO: 3451469 - RNA, 13 nt, Human
gugccucagagac

SEQ ID NO: 3451470 - RNA, 21 nt, Human
gugccuccaccaccacuggcc

SEQ ID NO: 3451471 - RNA, 23 nt, Human
gugccuccaccaccacuggccac

SEQ ID NO: 3451472 - RNA, 23 nt, Human
gugccuccagaggggcucagguc

SEQ ID NO: 3451473 - RNA, 12 nt, Human
gugccucccugg

SEQ ID NO: 3451474 - RNA, 13 nt, Human
gugccucccuggu

SEQ ID NO: 3451475 - RNA, 21 nt, Human
gugccuccucccucccucucc

SEQ ID NO: 3451476 - RNA, 22 nt, Human
gugccuccuuccaccucccucc

SEQ ID NO: 3451477 - RNA, 22 nt, Human
gugccucggcuuuucucagcug

SEQ ID NO: 3451478 - RNA, 14 nt, Human
gugccucuagcuga

SEQ ID NO: 3451479 - RNA, 16 nt, Human
gugccucuagcugaau

SEQ ID NO: 3451480 - RNA, 13 nt, Human
gugccucugccug

SEQ ID NO: 3451481 - RNA, 21 nt, Human
gugccucuggaggccucuggg

SEQ ID NO: 3451482 - RNA, 14 nt, Human
gugccucugggacu

SEQ ID NO: 3451483 - RNA, 15 nt, Human
gugccugagaggcag

SEQ ID NO: 3451484 - RNA, 18 nt, Human
gugccugagaggcaggca

SEQ ID NO: 3451485 - RNA, 21 nt, Human
gugccugauucggcugucuca

SEQ ID NO: 3451486 - RNA, 21 nt, Human
gugccugcaccaggagacaga

SEQ ID NO: 3451487 - RNA, 12 nt, Human
gugccugcuuca

SEQ ID NO: 3451488 - RNA, 13 nt, Human
gugccugcuucag

SEQ ID NO: 3451489 - RNA, 18 nt, Human
gugccuggagcuccuggg

SEQ ID NO: 3451490 - RNA, 16 nt, Human
gugccuggccacgccc

SEQ ID NO: 3451491 - RNA, 19 nt, Human
gugccuggccuggcacaca

SEQ ID NO: 3451492 - RNA, 15 nt, Human
gugccugggaaugua

SEQ ID NO: 3451493 - RNA, 20 nt, Human
gugccuggguggggcugcuc

SEQ ID NO: 3451494 - RNA, 21 nt, Human
gugccuggguggggcugcucc

SEQ ID NO: 3451495 - RNA, 23 nt, Human
gugccuggguggggcugcuccuc

SEQ ID NO: 3451496 - RNA, 19 nt, Human
gugccuguaugcaacaggc

SEQ ID NO: 3451497 - RNA, 15 nt, Human
gugccugucccaccc

SEQ ID NO: 3451498 - RNA, 20 nt, Human
gugccugucuguuacacugg

SEQ ID NO: 3451499 - RNA, 16 nt, Human
gugccugugaggcagg

SEQ ID NO: 3451500 - RNA, 22 nt, Human
gugccuguguccaugcgcucag

SEQ ID NO: 3451501 - RNA, 14 nt, Human
gugccugugugcgu

SEQ ID NO: 3451502 - RNA, 21 nt, Human
gugccuuaccuccugcccagg

SEQ ID NO: 3451503 - RNA, 21 nt, Human
gugccuuauggaacacucuga

SEQ ID NO: 3451504 - RNA, 14 nt, Human
gugccuucauuugg

SEQ ID NO: 3451505 - RNA, 14 nt, Human
gugccuucuguggg

SEQ ID NO: 3451506 - RNA, 21 nt, Human
gugccuucuucagggccuggu

SEQ ID NO: 3451507 - RNA, 19 nt, Human
gugccuuggggaauuuccu

SEQ ID NO: 3451508 - RNA, 16 nt, Human
gugccuuuauuuccac

SEQ ID NO: 3451509 - RNA, 12 nt, Human
gugccuuucaaa

SEQ ID NO: 3451510 - RNA, 18 nt, Human
gugccuuucaaauuuaga

SEQ ID NO: 3451511 - RNA, 16 nt, Human
gugccuuucaggaucu

SEQ ID NO: 3451512 - RNA, 11 nt, Human
gugccuuuccu

SEQ ID NO: 3451513 - RNA, 20 nt, Human
gugccuuuccuguucagcau

SEQ ID NO: 3451514 - RNA, 21 nt, Human
gugccuuuccuguucagcauu

SEQ ID NO: 3451515 - RNA, 17 nt, Human
gugccuuugcaaaucag

SEQ ID NO: 3451516 - RNA, 18 nt, Human
gugccuuuugcaccccuc

SEQ ID NO: 3451517 - RNA, 19 nt, Human
gugccuuuugcaccccucc

SEQ ID NO: 3451518 - RNA, 21 nt, Human
gugccuuuugcaccccuccca

SEQ ID NO: 3451519 - RNA, 21 nt, Human
gugccuuuugcagaagagggu

SEQ ID NO: 3451520 - RNA, 23 nt, Human
gugccuuuugcagaagagggugu

SEQ ID NO: 3451521 - RNA, 16 nt, Human
gugcgaccccaucugc

SEQ ID NO: 3451522 - RNA, 18 nt, Human
gugcgaccccaucugccc

SEQ ID NO: 3451523 - RNA, 23 nt, Human
gugcgaucauggcucacugcagc

SEQ ID NO: 3451524 - RNA, 20 nt, Human
guccugccuggccaggcaga

SEQ ID NO: 3451525 - RNA, 11 nt, Human
guccugccugu

SEQ ID NO: 3451526 - RNA, 16 nt, Human
guccugccugucugcc

SEQ ID NO: 3451527 - RNA, 21 nt, Human
guccugccugucugccccagc

SEQ ID NO: 3451528 - RNA, 13 nt, Human
guccugccugugg

SEQ ID NO: 3451529 - RNA, 14 nt, Human
guccugccuguggc

SEQ ID NO: 3451530 - RNA, 19 nt, Human
guccugcgucgaagcuuug

SEQ ID NO: 3451531 - RNA, 15 nt, Human
guccugcucagcagu

SEQ ID NO: 3451532 - RNA, 14 nt, Human
guccugcuccacag

SEQ ID NO: 3451533 - RNA, 23 nt, Human
guccugcucucuacccagcccau

SEQ ID NO: 3451534 - RNA, 17 nt, Human
guccugcugcaguugcc

SEQ ID NO: 3451535 - RNA, 20 nt, Human
guccuggaggggcuggggac

SEQ ID NO: 3451536 - RNA, 18 nt, Human
guccuggagguuccccag

SEQ ID NO: 3451537 - RNA, 17 nt, Human
guccuggaugauacuaa

SEQ ID NO: 3451538 - RNA, 21 nt, Human
guccuggccagauggcccgga

SEQ ID NO: 3451539 - RNA, 16 nt, Human
guccuggccaucccac

SEQ ID NO: 3451540 - RNA, 17 nt, Human
guccuggcuccugaggg

SEQ ID NO: 3451541 - RNA, 19 nt, Human
guccuggcuccugaggggc

SEQ ID NO: 3451542 - RNA, 15 nt, Human
guccuggcuucaggc

SEQ ID NO: 3451543 - RNA, 20 nt, Human
guccugggagaaccucaggc

SEQ ID NO: 3451544 - RNA, 16 nt, Human
guccugggagugagcu

SEQ ID NO: 3451545 - RNA, 18 nt, Human
guccugggagugagcugg

SEQ ID NO: 3451546 - RNA, 16 nt, Human
guccugggcgcccugg

SEQ ID NO: 3451547 - RNA, 19 nt, Human
guccugggcgcccuggaag

SEQ ID NO: 3451548 - RNA, 11 nt, Human
guccugggggc

SEQ ID NO: 3451549 - RNA, 15 nt, Human
guccugggggccuga

SEQ ID NO: 3451550 - RNA, 17 nt, Human
guccugggggccugacc

SEQ ID NO: 3451551 - RNA, 11 nt, Human
guccuggugcc

SEQ ID NO: 3451552 - RNA, 23 nt, Human
guccuggugcccuggaugcccag

SEQ ID NO: 3451553 - RNA, 11 nt, Human
guccuggugcu

SEQ ID NO: 3451554 - RNA, 14 nt, Human
guccuggugcucuc

SEQ ID NO: 3451555 - RNA, 15 nt, Human
guccuggugcucucu

SEQ ID NO: 3451556 - RNA, 17 nt, Human
guccuggugcucucugc

SEQ ID NO: 3451557 - RNA, 19 nt, Human
guccuggugcucucugcca

SEQ ID NO: 3451558 - RNA, 17 nt, Human
guccugguggggcagcu

SEQ ID NO: 3451559 - RNA, 18 nt, Human
guccugguggggcagcuc

SEQ ID NO: 3451560 - RNA, 23 nt, Human
guccuggugguauuuucaauagc

SEQ ID NO: 3451561 - RNA, 14 nt, Human
guccuguaaacacu

SEQ ID NO: 3451562 - RNA, 18 nt, Human
guccuguaggaguucuau

SEQ ID NO: 3451563 - RNA, 21 nt, Human
guccuguaguugcguggacuc

SEQ ID NO: 3451564 - RNA, 20 nt, Human
guccuguaguuuuauuuuau

SEQ ID NO: 3451565 - RNA, 18 nt, Human
guccuguaugucugucau

SEQ ID NO: 3451566 - RNA, 13 nt, Human
guccugucagugc

SEQ ID NO: 3451567 - RNA, 15 nt, Human
guccugucagugccg

SEQ ID NO: 3451568 - RNA, 21 nt, Human
guccugucagugccgccgccu

SEQ ID NO: 3451569 - RNA, 19 nt, Human
guggacuuagaaagcaggg

SEQ ID NO: 3451570 - RNA, 20 nt, Human
guggacuuagaaagcagggg

SEQ ID NO: 3451571 - RNA, 22 nt, Human
guggacuuagaaagcaggggcu

SEQ ID NO: 3451572 - RNA, 15 nt, Human
guggacuugaacuuu

SEQ ID NO: 3451573 - RNA, 21 nt, Human
guggagaaacuguagucucag

SEQ ID NO: 3451574 - RNA, 22 nt, Human
guggagaaauaaaaauaccucu

SEQ ID NO: 3451575 - RNA, 23 nt, Human
guggagaaauaaaaauaccucuu

SEQ ID NO: 3451576 - RNA, 22 nt, Human
guggagaaauuccuugauucac

SEQ ID NO: 3451577 - RNA, 14 nt, Human
guggagaagccauu

SEQ ID NO: 3451578 - RNA, 17 nt, Human
guggagaaucacaggcu

SEQ ID NO: 3451579 - RNA, 19 nt, Human
guggagaaucacaggcugg

SEQ ID NO: 3451580 - RNA, 20 nt, Human
guggagaaucacaggcuggg

SEQ ID NO: 3451581 - RNA, 21 nt, Human
guggagaaucacaggcugggc

SEQ ID NO: 3451582 - RNA, 16 nt, Human
guggagacugcuuccc

SEQ ID NO: 3451583 - RNA, 20 nt, Human
guggagacuggggggcuuga

SEQ ID NO: 3451584 - RNA, 17 nt, Human
guggagagcuggugccc

SEQ ID NO: 3451585 - RNA, 18 nt, Human
guggagagggaaugugaa

SEQ ID NO: 3451586 - RNA, 22 nt, Human
guggagagggacagcccacuga

SEQ ID NO: 3451587 - RNA, 17 nt, Human
guggagaugucuucgua

SEQ ID NO: 3451588 - RNA, 19 nt, Human
guggagaugucuucguaca

SEQ ID NO: 3451589 - RNA, 18 nt, Human
guggagcaaagugagggc

SEQ ID NO: 3451590 - RNA, 19 nt, Human
guggagcaaagugagggcc

SEQ ID NO: 3451591 - RNA, 23 nt, Human
guggagcagccaacaagcagggg

SEQ ID NO: 3451592 - RNA, 18 nt, Human
guggagccccacacuggg

SEQ ID NO: 3451593 - RNA, 22 nt, Human
guggagccugacagccagaacu

SEQ ID NO: 3451594 - RNA, 23 nt, Human
guggagccugacagccagaacuc

SEQ ID NO: 3451595 - RNA, 15 nt, Human
guggaggaaggauug

SEQ ID NO: 3451596 - RNA, 19 nt, Human
guggaggaaggauuguaaa

SEQ ID NO: 3451597 - RNA, 20 nt, Human
guggaggaaggauuguaaaa

SEQ ID NO: 3451598 - RNA, 16 nt, Human
guggaggaaugcuccc

SEQ ID NO: 3451599 - RNA, 17 nt, Human
guggaggaaugcucccc

SEQ ID NO: 3451600 - RNA, 12 nt, Human
guggaggagcag

SEQ ID NO: 3451601 - RNA, 16 nt, Human
guggaggagguuggga

SEQ ID NO: 3451602 - RNA, 13 nt, Human
guggaggcacuuu

SEQ ID NO: 3451603 - RNA, 15 nt, Human
guggaggcagccagg

SEQ ID NO: 3451604 - RNA, 11 nt, Human
guggaggcagu

SEQ ID NO: 3451605 - RNA, 16 nt, Human
guggaggcugcaguga

SEQ ID NO: 3451606 - RNA, 14 nt, Human
guggaggcuuccug

SEQ ID NO: 3451607 - RNA, 12 nt, Human
guggaggggugu

SEQ ID NO: 3451608 - RNA, 23 nt, Human
guggagggguguggcagugguuu

SEQ ID NO: 3451609 - RNA, 22 nt, Human
guggagguuaaggcugaggaaa

SEQ ID NO: 3451610 - RNA, 22 nt, Human
guggagguugcagugagccaag

SEQ ID NO: 3451611 - RNA, 16 nt, Human
guggagucugccaccc

SEQ ID NO: 3451612 - RNA, 14 nt, Human
guggauagaugccc

SEQ ID NO: 3451613 - RNA, 23 nt, Human
guggaucacaaaguggaacgaaa

SEQ ID NO: 3451614 - RNA, 13 nt, Human
guggaucacagag

SEQ ID NO: 3451615 - RNA, 13 nt, Human
guggaucaccuga

SEQ ID NO: 3451616 - RNA, 17 nt, Human
guggaucuccaaggacc

SEQ ID NO: 3451617 - RNA, 23 nt, Human
guggaugauccccacgccacagc

SEQ ID NO: 3451618 - RNA, 16 nt, Human
guggaugccugguggc

SEQ ID NO: 3451619 - RNA, 23 nt, Human
guggauggguuuuaugagaugga

SEQ ID NO: 3451620 - RNA, 13 nt, Human
guggaugucuucc

SEQ ID NO: 3451621 - RNA, 16 nt, Human
guggaugucuuccuug

SEQ ID NO: 3451622 - RNA, 12 nt, Human
guggauguuacu

SEQ ID NO: 3451623 - RNA, 18 nt, Human
guggauuccgagugguga

SEQ ID NO: 3451624 - RNA, 18 nt, Human
guggauucuuguuuugcu

SEQ ID NO: 3451625 - RNA, 13 nt, Human
guggauucuuuaa

SEQ ID NO: 3451626 - RNA, 17 nt, Human
guggauugccucugaaa

SEQ ID NO: 3451627 - RNA, 14 nt, Human
guggauugcucauc

SEQ ID NO: 3451628 - RNA, 13 nt, Human
guggauuucaguu

SEQ ID NO: 3451629 - RNA, 18 nt, Human
guggauuuuguuuaaaaa

SEQ ID NO: 3451630 - RNA, 22 nt, Human
guggcaaagccuucauugccuu

SEQ ID NO: 3451631 - RNA, 15 nt, Human
guggcaaggcugugc

SEQ ID NO: 3451632 - RNA, 19 nt, Human
guggcaagugaauuugccu

SEQ ID NO: 3451633 - RNA, 22 nt, Human
guggcacacaccuguaguccca

SEQ ID NO: 3451634 - RNA, 12 nt, Human
guggcacaggcc

SEQ ID NO: 3451635 - RNA, 19 nt, Human
guggcacgucaucuaguuu

SEQ ID NO: 3451636 - RNA, 16 nt, Human
guggcacucaacauga

SEQ ID NO: 3451637 - RNA, 14 nt, Human
guggcacugagccc

SEQ ID NO: 3451638 - RNA, 13 nt, Human
guggcacuugggg

SEQ ID NO: 3451639 - RNA, 9 nt, Human
guggcagag

SEQ ID NO: 3451640 - RNA, 15 nt, Human
guggcagagcuugga

SEQ ID NO: 3451641 - RNA, 19 nt, Human
guggcagagcuuggacugg

SEQ ID NO: 3451642 - RNA, 11 nt, Human
guggcagagga

SEQ ID NO: 3451643 - RNA, 14 nt, Human
guggcagcucaccu

SEQ ID NO: 3451644 - RNA, 20 nt, Human
guggcagcucaccucucccu

SEQ ID NO: 3451645 - RNA, 21 nt, Human
guggcagcugcgguccaccca

SEQ ID NO: 3451646 - RNA, 22 nt, Human
guggcagcugcgguccacccag

SEQ ID NO: 3451647 - RNA, 13 nt, Human
guggcagcugcuu

SEQ ID NO: 3451648 - RNA, 17 nt, Human
guggcaggacacugcag

SEQ ID NO: 3451649 - RNA, 19 nt, Human
guggcaggcagcgccaagc

SEQ ID NO: 3451650 - RNA, 14 nt, Human
guggcagggcacag

SEQ ID NO: 3451651 - RNA, 15 nt, Human
guggcagggcacagg

SEQ ID NO: 3451652 - RNA, 12 nt, Human
guggcagggcuc

SEQ ID NO: 3451653 - RNA, 13 nt, Human
guggcagggcuca

SEQ ID NO: 3451654 - RNA, 16 nt, Human
guggcaggggacagga

SEQ ID NO: 3451655 - RNA, 21 nt, Human
guggcaggugaccuucuggga

SEQ ID NO: 3451656 - RNA, 20 nt, Human
guggcaguaaagagaaacuu

SEQ ID NO: 3451657 - RNA, 18 nt, Human
guggcaguggaggugggg

SEQ ID NO: 3451658 - RNA, 17 nt, Human
guggcauagcccagaca

SEQ ID NO: 3451659 - RNA, 20 nt, Human
guggcaucaccuuaggcagg

SEQ ID NO: 3451660 - RNA, 22 nt, Human
guggcaucaccuuaggcaggga

SEQ ID NO: 3451661 - RNA, 16 nt, Human
guggcaucccaguggc

SEQ ID NO: 3451662 - RNA, 18 nt, Human
guggcaucuuugccuugg

SEQ ID NO: 3451663 - RNA, 21 nt, Human
guggcaucuuugccuugggcu

SEQ ID NO: 3451664 - RNA, 19 nt, Human
guggccaaaagcuagacag

SEQ ID NO: 3451665 - RNA, 22 nt, Human
guggccaagaagcaguggccuu

SEQ ID NO: 3451666 - RNA, 23 nt, Human
guggccaagaagcaguggccuua

SEQ ID NO: 3451667 - RNA, 18 nt, Human
guggccaaggagcugcua

SEQ ID NO: 3451668 - RNA, 14 nt, Human
guggccacucagcu

SEQ ID NO: 3451669 - RNA, 16 nt, Human
guggccacuuuaagag

SEQ ID NO: 3451670 - RNA, 15 nt, Human
guggccagaccagag

SEQ ID NO: 3451671 - RNA, 17 nt, Human
guggccagagcugggag

SEQ ID NO: 3451672 - RNA, 13 nt, Human
guggccagcccgg

SEQ ID NO: 3451673 - RNA, 23 nt, Human
guggccaggccgggaaaaagccc

SEQ ID NO: 3451674 - RNA, 16 nt, Human
guggccaucauuucug

SEQ ID NO: 3451675 - RNA, 18 nt, Human
guggccaugacccugccu

SEQ ID NO: 3451676 - RNA, 19 nt, Human
guggccaugcuccucuucc

SEQ ID NO: 3451677 - RNA, 19 nt, Human
guggcccaaggcuggcagg

SEQ ID NO: 3451678 - RNA, 13 nt, Human
guggcccaggacc

SEQ ID NO: 3451679 - RNA, 20 nt, Human
guggcccauccccccucacc

SEQ ID NO: 3451680 - RNA, 15 nt, Human
guggccccacccugg

SEQ ID NO: 3451681 - RNA, 20 nt, Human
guggccccacccugggcccu

SEQ ID NO: 3451682 - RNA, 14 nt, Human
guggccccacccuu

SEQ ID NO: 3451683 - RNA, 13 nt, Human
guggccccaccug

SEQ ID NO: 3451684 - RNA, 13 nt, Human
guggccccagccu

SEQ ID NO: 3451685 - RNA, 21 nt, Human
guggccccagccuggcccagc

SEQ ID NO: 3451686 - RNA, 22 nt, Human
guggccccagccuggcccagcu

SEQ ID NO: 3451687 - RNA, 18 nt, Human
guggcccucuccccugcc

SEQ ID NO: 3451688 - RNA, 13 nt, Human
guggcccugccau

SEQ ID NO: 3451689 - RNA, 19 nt, Human
gagcucuucaggccucccu

SEQ ID NO: 3451690 - RNA, 12 nt, Human
gagcucuuccua

SEQ ID NO: 3451691 - RNA, 17 nt, Human
gagcucuugugaggaaa

SEQ ID NO: 3451692 - RNA, 21 nt, Human
gagcucuugugaggaaaguca

SEQ ID NO: 3451693 - RNA, 14 nt, Human
gagcucuuugcacu

SEQ ID NO: 3451694 - RNA, 22 nt, Human
gagcugaaaaaucacauccugg

SEQ ID NO: 3451695 - RNA, 21 nt, Human
gagcugaaagcugguggcaga

SEQ ID NO: 3451696 - RNA, 17 nt, Human
gagcugacaaaauuuug

SEQ ID NO: 3451697 - RNA, 22 nt, Human
gagcugacacaaaccugccugg

SEQ ID NO: 3451698 - RNA, 17 nt, Human
gagcugacacaggauga

SEQ ID NO: 3451699 - RNA, 20 nt, Human
gagcugagaauagaaggaaa

SEQ ID NO: 3451700 - RNA, 13 nt, Human
gagcugagaugga

SEQ ID NO: 3451701 - RNA, 13 nt, Human
gagcugagcaggg

SEQ ID NO: 3451702 - RNA, 22 nt, Human
gagcugagccaggcuagcugga

SEQ ID NO: 3451703 - RNA, 23 nt, Human
gagcugagccaggcuagcuggag

SEQ ID NO: 3451704 - RNA, 16 nt, Human
gagcugaggcagcagu

SEQ ID NO: 3451705 - RNA, 17 nt, Human
gagcugaggccacacuc

SEQ ID NO: 3451706 - RNA, 14 nt, Human
gagcugagguuuca

SEQ ID NO: 3451707 - RNA, 19 nt, Human
gagcugauauaaauucugu

SEQ ID NO: 3451708 - RNA, 15 nt, Human
gagcugauccagagc

SEQ ID NO: 3451709 - RNA, 21 nt, Human
gagcugaucgcuucuccccca

SEQ ID NO: 3451710 - RNA, 13 nt, Human
gagcugccaccug

SEQ ID NO: 3451711 - RNA, 11 nt, Human
gagcugccagu

SEQ ID NO: 3451712 - RNA, 21 nt, Human
gagcugcccagaguugcuggg

SEQ ID NO: 3451713 - RNA, 13 nt, Human
guguuacauguau

SEQ ID NO: 3451714 - RNA, 23 nt, Human
guguuacccaguaacucaucugu

SEQ ID NO: 3451715 - RNA, 12 nt, Human
guguuaccugua

SEQ ID NO: 3451716 - RNA, 12 nt, Human
guguuacuaagu

SEQ ID NO: 3451717 - RNA, 21 nt, Human
guguuacugcaguugaaaggg

SEQ ID NO: 3451718 - RNA, 15 nt, Human
guguuacuguaauuc

SEQ ID NO: 3451719 - RNA, 21 nt, Human
guguuaggccuggcacagugu

SEQ ID NO: 3451720 - RNA, 21 nt, Human
guguuaguggcaccgccuccc

SEQ ID NO: 3451721 - RNA, 17 nt, Human
guguuagugguuaccca

SEQ ID NO: 3451722 - RNA, 16 nt, Human
guguuaucaccuagcu

SEQ ID NO: 3451723 - RNA, 16 nt, Human
guguuauuuaaagaag

SEQ ID NO: 3451724 - RNA, 17 nt, Human
guguuauuuaaagaaga

SEQ ID NO: 3451725 - RNA, 20 nt, Human
guguuauuuuaaucucagaa

SEQ ID NO: 3451726 - RNA, 16 nt, Human
guguucacugaagacg

SEQ ID NO: 3451727 - RNA, 23 nt, Human
guguucaguguuagcaguggguc

SEQ ID NO: 3451728 - RNA, 12 nt, Human
guguucauacau

SEQ ID NO: 3451729 - RNA, 15 nt, Human
guguuccaacaacca

SEQ ID NO: 3451730 - RNA, 17 nt, Human
guguuccaaguuuccaa

SEQ ID NO: 3451731 - RNA, 20 nt, Human
guguuccccucuugucuccc

SEQ ID NO: 3451732 - RNA, 15 nt, Human
guguucccuuugucu

SEQ ID NO: 3451733 - RNA, 21 nt, Human
guguucccuuugucuuucaaa

SEQ ID NO: 3451734 - RNA, 14 nt, Human
guguucgcuuggcu

SEQ ID NO: 3451735 - RNA, 22 nt, Human
guguucuaagaugugauauucu

SEQ ID NO: 3451736 - RNA, 22 nt, Human
guguucuccugcugcucccuca

SEQ ID NO: 3451737 - RNA, 11 nt, Human
guguucuccuu

SEQ ID NO: 3451738 - RNA, 16 nt, Human
guguucuccuuuuccu

SEQ ID NO: 3451739 - RNA, 14 nt, Human
guguucucucuuau

SEQ ID NO: 3451740 - RNA, 14 nt, Human
guguucuguuacaa

SEQ ID NO: 3451741 - RNA, 15 nt, Human
guguucuguuuuguu

SEQ ID NO: 3451742 - RNA, 17 nt, Human
guguugaaaauguucag

SEQ ID NO: 3451743 - RNA, 21 nt, Human
guguugaagagcagcuccuuc

SEQ ID NO: 3451744 - RNA, 20 nt, Human
guguugccaaauauguccug

SEQ ID NO: 3451745 - RNA, 17 nt, Human
guguugccacaggacac

SEQ ID NO: 3451746 - RNA, 17 nt, Human
guguugccacuuuccaa

SEQ ID NO: 3451747 - RNA, 21 nt, Human
gugacuagugcugaagcuuau

SEQ ID NO: 3451748 - RNA, 15 nt, Human
gugacuauauagaga

SEQ ID NO: 3451749 - RNA, 20 nt, Human
gugacuauauagagauguuu

SEQ ID NO: 3451750 - RNA, 15 nt, Human
gugacucacccaagc

SEQ ID NO: 3451751 - RNA, 20 nt, Human
gugacucgagucacacucaa

SEQ ID NO: 3451752 - RNA, 12 nt, Human
gugacucuuucc

SEQ ID NO: 3451753 - RNA, 18 nt, Human
gugacucuuuuuagggcc

SEQ ID NO: 3451754 - RNA, 16 nt, Human
gugacugaauuucuuu

SEQ ID NO: 3451755 - RNA, 18 nt, Human
gugacugaauuucuuuug

SEQ ID NO: 3451756 - RNA, 21 nt, Human
gugacugauguuaggcugggc

SEQ ID NO: 3451757 - RNA, 23 nt, Human
gugacugccccaacuccuggaag

SEQ ID NO: 3451758 - RNA, 16 nt, Human
gugacugucuggggag

SEQ ID NO: 3451759 - RNA, 17 nt, Human
gugagaaaaagcuccug

SEQ ID NO: 3451760 - RNA, 23 nt, Human
gugagaaaccuguaucuuucuau

SEQ ID NO: 3451761 - RNA, 15 nt, Human
gugagaacuacucag

SEQ ID NO: 3451762 - RNA, 15 nt, Human
gugagaagaauauug

SEQ ID NO: 3451763 - RNA, 21 nt, Human
gugagaagugaaugcugggac

SEQ ID NO: 3451764 - RNA, 20 nt, Human
gugagaccaccucucaauau

SEQ ID NO: 3451765 - RNA, 14 nt, Human
gugagacccccaca

SEQ ID NO: 3451766 - RNA, 17 nt, Human
gugagacccccacaccu

SEQ ID NO: 3451767 - RNA, 16 nt, Human
gugagacccugucucu

SEQ ID NO: 3451768 - RNA, 18 nt, Human
gugagagcgaggcugagc

SEQ ID NO: 3451769 - RNA, 12 nt, Human
gugagagcuggg

SEQ ID NO: 3451770 - RNA, 13 nt, Human
gugagagcugggu

SEQ ID NO: 3451771 - RNA, 23 nt, Human
gugagagggcaugcgcacaaggc

SEQ ID NO: 3451772 - RNA, 12 nt, Human
gugagaugaggg

SEQ ID NO: 3451773 - RNA, 15 nt, Human
gugagaugcagcugg

SEQ ID NO: 3451774 - RNA, 18 nt, Human
gugagaugcagcuggaaa

SEQ ID NO: 3451775 - RNA, 21 nt, Human
gugagaugcuagaacucccuu

SEQ ID NO: 3451776 - RNA, 18 nt, Human
gugagaugcuggagaaga

SEQ ID NO: 3451777 - RNA, 19 nt, Human
gugagaugcuggagaagag

SEQ ID NO: 3451778 - RNA, 15 nt, Human
gugagauguaauugu

SEQ ID NO: 3451779 - RNA, 12 nt, Human
gugagauuuuuu

SEQ ID NO: 3451780 - RNA, 13 nt, Human
gugagauuuuuua

SEQ ID NO: 3451781 - RNA, 21 nt, Human
gugagauuuuuuauugcuagu

SEQ ID NO: 3451782 - RNA, 17 nt, Human
gugagcaaaccugcccc

SEQ ID NO: 3451783 - RNA, 14 nt, Human
gugagcacagccua

SEQ ID NO: 3451784 - RNA, 21 nt, Human
gugagcacggccaacaaagcu

SEQ ID NO: 3451785 - RNA, 21 nt, Human
gugagcagccuggagcccugg

SEQ ID NO: 3451786 - RNA, 15 nt, Human
gugagcaggcuguga

SEQ ID NO: 3451787 - RNA, 20 nt, Human
gugagcauggaacacuucga

SEQ ID NO: 3451788 - RNA, 15 nt, Human
gugagccaccgugcc

SEQ ID NO: 3451789 - RNA, 17 nt, Human
gugagccaccgugccug

SEQ ID NO: 3451790 - RNA, 21 nt, Human
gugagccaccgugccuggcca

SEQ ID NO: 3451791 - RNA, 20 nt, Human
gugagccacugcaccgggcc

SEQ ID NO: 3451792 - RNA, 17 nt, Human
gugagccccugguccug

SEQ ID NO: 3451793 - RNA, 19 nt, Human
gugagccgagaucacgcca

SEQ ID NO: 3451794 - RNA, 12 nt, Human
gugagccgcauc

SEQ ID NO: 3451795 - RNA, 13 nt, Human
gugagccuggcuc

SEQ ID NO: 3451796 - RNA, 14 nt, Human
gugagccuuggcug

SEQ ID NO: 3451797 - RNA, 19 nt, Human
gugagcgccugugcacaca

SEQ ID NO: 3451798 - RNA, 20 nt, Human
gugagcgccugugcacacac

SEQ ID NO: 3451799 - RNA, 13 nt, Human
gugagcugagcag

SEQ ID NO: 3451800 - RNA, 16 nt, Human
gugagcugagcaggcc

SEQ ID NO: 3451801 - RNA, 13 nt, Human
gugagcugcacca

SEQ ID NO: 3451802 - RNA, 19 nt, Human
gugagcugcugccaugaac

SEQ ID NO: 3451803 - RNA, 15 nt, Human
gugagcuuugcugcu

SEQ ID NO: 3451804 - RNA, 19 nt, Human
gugaggaagccgcuggggc

SEQ ID NO: 3451805 - RNA, 18 nt, Human
gugaggaaggcaggaaga

SEQ ID NO: 3451806 - RNA, 22 nt, Human
gugaggagaaugaaauguaugu

SEQ ID NO: 3451807 - RNA, 11 nt, Human
gugaggagcug

SEQ ID NO: 3451808 - RNA, 18 nt, Human
gugaggagcuugaaaccc

SEQ ID NO: 3451809 - RNA, 21 nt, Human
gugaggauaacacaaguaaaa

SEQ ID NO: 3451810 - RNA, 17 nt, Human
gugaggaugaaaaaaua

SEQ ID NO: 3451811 - RNA, 21 nt, Human
gugaggauggccucugcuaag

SEQ ID NO: 3451812 - RNA, 15 nt, Human
gugaggcaggcuuug

SEQ ID NO: 3451813 - RNA, 23 nt, Human
gugaggcagugggucccacuucc

SEQ ID NO: 3451814 - RNA, 23 nt, Human
gugaggccacugaagaggaggag

SEQ ID NO: 3451815 - RNA, 11 nt, Human
gugaggccugg

SEQ ID NO: 3451816 - RNA, 15 nt, Human
gugaggccugucugu

SEQ ID NO: 3451817 - RNA, 12 nt, Human
gugaggcucugc

SEQ ID NO: 3451818 - RNA, 14 nt, Human
gugaggcuguccug

SEQ ID NO: 3451819 - RNA, 18 nt, Human
gugaggguaaguauuuuc

SEQ ID NO: 3451820 - RNA, 18 nt, Human
gugagggucagagaggag

SEQ ID NO: 3451821 - RNA, 15 nt, Human
gugagggucccaugu

SEQ ID NO: 3451822 - RNA, 19 nt, Human
gugagguccugggggccug

SEQ ID NO: 3451823 - RNA, 21 nt, Human
gugaggugcagagugcccaga

SEQ ID NO: 3451824 - RNA, 21 nt, Human
gugagguggaauuauuuuaaa

SEQ ID NO: 3451825 - RNA, 20 nt, Human
gugagguggguuuucuuccc

SEQ ID NO: 3451826 - RNA, 14 nt, Human
gugagguuucccaa

SEQ ID NO: 3451827 - RNA, 17 nt, Human
gugagguuucccaaugg

SEQ ID NO: 3451828 - RNA, 23 nt, Human
gugaguacuacaguccucccauc

SEQ ID NO: 3451829 - RNA, 16 nt, Human
gugaguaucagaauug

SEQ ID NO: 3451830 - RNA, 22 nt, Human
gugagucauuuaaauguguaca

SEQ ID NO: 3451831 - RNA, 16 nt, Human
gugaguccuccagaac

SEQ ID NO: 3451832 - RNA, 18 nt, Human
gugaguccuccagaacuc

SEQ ID NO: 3451833 - RNA, 15 nt, Human
gugagucgaggacag

SEQ ID NO: 3451834 - RNA, 22 nt, Human
gugagucgaggacagggaggug

SEQ ID NO: 3451835 - RNA, 22 nt, Human
gugagucucucugggccuuagg

SEQ ID NO: 3451836 - RNA, 13 nt, Human
gugagugagccug

SEQ ID NO: 3451837 - RNA, 12 nt, Human
gugagugccuuu

SEQ ID NO: 3451838 - RNA, 17 nt, Human
gugagugugacagggcc

SEQ ID NO: 3451839 - RNA, 18 nt, Human
gugagugugacagggcca

SEQ ID NO: 3451840 - RNA, 20 nt, Human
gugagugugacagggccagu

SEQ ID NO: 3451841 - RNA, 23 nt, Human
gugaguguguccaagugugugug

SEQ ID NO: 3451842 - RNA, 20 nt, Human
gugaguguguguuugugcug

SEQ ID NO: 3451843 - RNA, 16 nt, Human
gugaguguuucuauga

SEQ ID NO: 3451844 - RNA, 20 nt, Human
gugaguucucagggcuccug

SEQ ID NO: 3451845 - RNA, 17 nt, Human
gugaguugauagcacag

SEQ ID NO: 3451846 - RNA, 12 nt, Human
gugaguuggcuu

SEQ ID NO: 3451847 - RNA, 15 nt, Human
gugaguuugagcugc

SEQ ID NO: 3451848 - RNA, 17 nt, Human
gugaguuugagcugccu

SEQ ID NO: 3451849 - RNA, 16 nt, Human
gugaguuuggucugga

SEQ ID NO: 3451850 - RNA, 19 nt, Human
gugaguuuggucuggacug

SEQ ID NO: 3451851 - RNA, 15 nt, Human
gugaguuuguuucuu

SEQ ID NO: 3451852 - RNA, 17 nt, Human
gugaguuuguuucuuug

SEQ ID NO: 3451853 - RNA, 21 nt, Human
gugauaagggaaaagauaaag

SEQ ID NO: 3451854 - RNA, 15 nt, Human
gugauaauuuaagag

SEQ ID NO: 3451855 - RNA, 17 nt, Human
gugauacaaugcugugc

SEQ ID NO: 3451856 - RNA, 14 nt, Human
gugauagcacuuuc

SEQ ID NO: 3451857 - RNA, 19 nt, Human
gugauauaaguguguguuu

SEQ ID NO: 3451858 - RNA, 16 nt, Human
guuaagcauuaccacu

SEQ ID NO: 3451859 - RNA, 13 nt, Human
guuaagccuuugg

SEQ ID NO: 3451860 - RNA, 12 nt, Human
guuaagcucugc

SEQ ID NO: 3451861 - RNA, 14 nt, Human
guuaagcuuugaca

SEQ ID NO: 3451862 - RNA, 16 nt, Human
guuaagcuuugacacu

SEQ ID NO: 3451863 - RNA, 16 nt, Human
guuaaggaaacucuua

SEQ ID NO: 3451864 - RNA, 22 nt, Human
guuaaggaccguggcccugccc

SEQ ID NO: 3451865 - RNA, 12 nt, Human
guuaaggccuga

SEQ ID NO: 3451866 - RNA, 16 nt, Human
guuaaggccugaauca

SEQ ID NO: 3451867 - RNA, 16 nt, Human
guuaaggcugaggaaa

SEQ ID NO: 3451868 - RNA, 14 nt, Human
guuaagggaaggaa

SEQ ID NO: 3451869 - RNA, 18 nt, Human
guuaagucuaucugguau

SEQ ID NO: 3451870 - RNA, 15 nt, Human
guuaagucuguuuua

SEQ ID NO: 3451871 - RNA, 14 nt, Human
guuaagugguuuca

SEQ ID NO: 3451872 - RNA, 22 nt, Human
guuaaguugauggugaugaaau

SEQ ID NO: 3451873 - RNA, 15 nt, Human
guuaauacaagguau

SEQ ID NO: 3451874 - RNA, 18 nt, Human
guuaauacgcaggcaucu

SEQ ID NO: 3451875 - RNA, 18 nt, Human
guuaauauugauuuauua

SEQ ID NO: 3451876 - RNA, 14 nt, Human
guuaaucaauuuaa

SEQ ID NO: 3451877 - RNA, 18 nt, Human
guuaaucucuguuaugua

SEQ ID NO: 3451878 - RNA, 14 nt, Human
guuaaucuuaaugu

SEQ ID NO: 3451879 - RNA, 19 nt, Human
guuaaugcuuaagagggaa

SEQ ID NO: 3451880 - RNA, 20 nt, Human
guuaauguauuuguucaugu

SEQ ID NO: 3451881 - RNA, 23 nt, Human
guuaauguuauaucauauguaua

SEQ ID NO: 3451882 - RNA, 14 nt, Human
guuaauuagcauuc

SEQ ID NO: 3451883 - RNA, 12 nt, Human
guuaauuuaaag

SEQ ID NO: 3451884 - RNA, 18 nt, Human
guuaauuuuauucaagaa

SEQ ID NO: 3451885 - RNA, 17 nt, Human
guuaauuuugaagugcu

SEQ ID NO: 3451886 - RNA, 15 nt, Human
guuaauuuuuacaug

SEQ ID NO: 3451887 - RNA, 14 nt, Human
guuaauuuuuccaa

SEQ ID NO: 3451888 - RNA, 20 nt, Human
guuaauuuuuugguacaaaa

SEQ ID NO: 3451889 - RNA, 16 nt, Human
guuacaaacuacagac

SEQ ID NO: 3451890 - RNA, 14 nt, Human
guuacaaacugcaa

SEQ ID NO: 3451891 - RNA, 16 nt, Human
guuacaaacugcaaua

SEQ ID NO: 3451892 - RNA, 19 nt, Human
guuacaaacugcaauagag

SEQ ID NO: 3451893 - RNA, 21 nt, Human
guuacaacagauuugugaacu

SEQ ID NO: 3451894 - RNA, 17 nt, Human
guuacacaaaggaccuc

SEQ ID NO: 3451895 - RNA, 12 nt, Human
guuacacccuuu

SEQ ID NO: 3451896 - RNA, 22 nt, Human
guuacacccuuucuugacaaaa

SEQ ID NO: 3451897 - RNA, 20 nt, Human
guuacacuguuagaacacua

SEQ ID NO: 3451898 - RNA, 12 nt, Human
guuacagaaagu

SEQ ID NO: 3451899 - RNA, 19 nt, Human
guuacagaaaguggugcuc

SEQ ID NO: 3451900 - RNA, 15 nt, Human
guuacagacaaagcg

SEQ ID NO: 3451901 - RNA, 13 nt, Human
guuacagagaccu

SEQ ID NO: 3451902 - RNA, 13 nt, Human
guuacagcucccc

SEQ ID NO: 3451903 - RNA, 22 nt, Human
guuacaguaaugucauaaagug

SEQ ID NO: 3451904 - RNA, 18 nt, Human
guuacaguaugcuugcuc

SEQ ID NO: 3451905 - RNA, 13 nt, Human
guuacaguucugu

SEQ ID NO: 3451906 - RNA, 19 nt, Human
guuacauaagauaaaugug

SEQ ID NO: 3451907 - RNA, 21 nt, Human
guuacaugcauacuucaaaag

SEQ ID NO: 3451908 - RNA, 19 nt, Human
gugauguucuaaggcucug

SEQ ID NO: 3451909 - RNA, 16 nt, Human
gugauguuuuuaugau

SEQ ID NO: 3451910 - RNA, 19 nt, Human
gugauuaaacgugcagacu

SEQ ID NO: 3451911 - RNA, 13 nt, Human
gugauuaaggucu

SEQ ID NO: 3451912 - RNA, 17 nt, Human
gugauuaccagggacug

SEQ ID NO: 3451913 - RNA, 22 nt, Human
gugauuagagggaggagaauga

SEQ ID NO: 3451914 - RNA, 16 nt, Human
gugauuauuucacuuu

SEQ ID NO: 3451915 - RNA, 21 nt, Human
gugauucaaucuguaaacugu

SEQ ID NO: 3451916 - RNA, 23 nt, Human
gugauucaaucuguaaacugugu

SEQ ID NO: 3451917 - RNA, 22 nt, Human
gugauucaauucaacacucccu

SEQ ID NO: 3451918 - RNA, 21 nt, Human
gugauuccuuugaagaggaaa

SEQ ID NO: 3451919 - RNA, 22 nt, Human
gugauucuccugccucagccuc

SEQ ID NO: 3451920 - RNA, 22 nt, Human
gugauugacagcuuugcugcug

SEQ ID NO: 3451921 - RNA, 23 nt, Human
gugauugacagcuuugcugcuga

SEQ ID NO: 3451922 - RNA, 12 nt, Human
gugauugcagcu

SEQ ID NO: 3451923 - RNA, 24 nt, Human
gugauuggccuguagaguugcuga

SEQ ID NO: 3451924 - RNA, 19 nt, Human
gugauuuaagacacuuuuu

SEQ ID NO: 3451925 - RNA, 22 nt, Human
gugauuuaagggcccaggucag

SEQ ID NO: 3451926 - RNA, 16 nt, Human
gugauuuaauaguguu

SEQ ID NO: 3451927 - RNA, 18 nt, Human
gugauuucccguggcccc

SEQ ID NO: 3451928 - RNA, 21 nt, Human
gugauuucccguggccccagc

SEQ ID NO: 3451929 - RNA, 22 nt, Human
gugauuucccguggccccagcc

SEQ ID NO: 3451930 - RNA, 23 nt, Human
gugauuucccguggccccagccu

SEQ ID NO: 3451931 - RNA, 17 nt, Human
gugauuugaaaaauaua

SEQ ID NO: 3451932 - RNA, 13 nt, Human
gugauuugacugu

SEQ ID NO: 3451933 - RNA, 14 nt, Human
gugauuugacuguu

SEQ ID NO: 3451934 - RNA, 14 nt, Human
gugauuuuaacucu

SEQ ID NO: 3451935 - RNA, 17 nt, Human
gugauuuuaacucuguc

SEQ ID NO: 3451936 - RNA, 21 nt, Human
gugauuuuaugaucaguguug

SEQ ID NO: 3451937 - RNA, 22 nt, Human
gugauuuuuauccaaucuuguu

SEQ ID NO: 3451938 - RNA, 20 nt, Human
gugauuuuuaugccaccuga

SEQ ID NO: 3451939 - RNA, 14 nt, Human
gugauuuuuuuguc

SEQ ID NO: 3451940 - RNA, 19 nt, Human
gugcaaaaauuuuuggauu

SEQ ID NO: 3451941 - RNA, 19 nt, Human
gugcaaaauauuugacuau

SEQ ID NO: 3451942 - RNA, 13 nt, Human
gugcaacacuggu

SEQ ID NO: 3451943 - RNA, 13 nt, Human
gugcaacagacaa

SEQ ID NO: 3451944 - RNA, 14 nt, Human
gugcaacagacaag

SEQ ID NO: 3451945 - RNA, 15 nt, Human
gugcaacagacaagu

SEQ ID NO: 3451946 - RNA, 12 nt, Human
gugcaacagcac

SEQ ID NO: 3451947 - RNA, 13 nt, Human
gugcaacccaagg

SEQ ID NO: 3451948 - RNA, 14 nt, Human
gugcaacccuuacc

SEQ ID NO: 3451949 - RNA, 23 nt, Human
gugcaaccucuuggccugaucag

SEQ ID NO: 3451950 - RNA, 16 nt, Human
gugcaacgccgugggc

SEQ ID NO: 3451951 - RNA, 20 nt, Human
gugcaagagacucuggccuc

SEQ ID NO: 3451952 - RNA, 15 nt, Human
gugcaaggcagccgu

SEQ ID NO: 3451953 - RNA, 22 nt, Human
gugcaaguguaugcacgugugc

SEQ ID NO: 3451954 - RNA, 17 nt, Human
gugcaagugucugugug

SEQ ID NO: 3451955 - RNA, 18 nt, Human
gugcaagugucugugugc

SEQ ID NO: 3451956 - RNA, 22 nt, Human
gugcaagugugugcacaugugu

SEQ ID NO: 3451957 - RNA, 19 nt, Human
gugcaauaaaucugaccca

SEQ ID NO: 3451958 - RNA, 16 nt, Human
gugcaauauauuuugu

SEQ ID NO: 3451959 - RNA, 23 nt, Human
gugcaauauauuuuguaugcaag

SEQ ID NO: 3451960 - RNA, 20 nt, Human
gugcaauuucaagguucuaa

SEQ ID NO: 3451961 - RNA, 15 nt, Human
gugcacaaauauuua

SEQ ID NO: 3451962 - RNA, 20 nt, Human
gugcacaaauauuuauuuuc

SEQ ID NO: 3451963 - RNA, 13 nt, Human
gugcacaagcucc

SEQ ID NO: 3451964 - RNA, 21 nt, Human
gugcacaagcuccaagcuccc

SEQ ID NO: 3451965 - RNA, 11 nt, Human
gugcacacaga

SEQ ID NO: 3451966 - RNA, 20 nt, Human
gugcacaccccacucccaca

SEQ ID NO: 3451967 - RNA, 19 nt, Human
gugcacagcacaaauuagu

SEQ ID NO: 3451968 - RNA, 13 nt, Human
gugcacagccacu

SEQ ID NO: 3451969 - RNA, 13 nt, Human
gugcacagcuguc

SEQ ID NO: 3451970 - RNA, 14 nt, Human
gugcacaggagggg

SEQ ID NO: 3451971 - RNA, 12 nt, Human
gugcacaggcag

SEQ ID NO: 3451972 - RNA, 13 nt, Human
gugcacaggcaga

SEQ ID NO: 3451973 - RNA, 13 nt, Human
gugcacagugauu

SEQ ID NO: 3451974 - RNA, 21 nt, Human
gugcacauccgcgugugccug

SEQ ID NO: 3451975 - RNA, 15 nt, Human
gugcacccagaagaa

SEQ ID NO: 3451976 - RNA, 23 nt, Human
gugcacccaugggcucugacaga

SEQ ID NO: 3451977 - RNA, 21 nt, Human
gugcaccuuaccaacuuucug

SEQ ID NO: 3451978 - RNA, 15 nt, Human
gugcacggccagcug

SEQ ID NO: 3451979 - RNA, 18 nt, Human
gugcacguugcuucaggc

SEQ ID NO: 3451980 - RNA, 15 nt, Human
gugcacugcccaugg

SEQ ID NO: 3451981 - RNA, 15 nt, Human
gugcacugggaggcu

SEQ ID NO: 3451982 - RNA, 20 nt, Human
gugcacugggaggcuccccu

SEQ ID NO: 3451983 - RNA, 21 nt, Human
gugcacugggaggcuccccuu

SEQ ID NO: 3451984 - RNA, 15 nt, Human
gugcagacuggaggg

SEQ ID NO: 3451985 - RNA, 23 nt, Human
gugcagaggaaguggaaggcauc

SEQ ID NO: 3451986 - RNA, 12 nt, Human
gugcagaggcug

SEQ ID NO: 3451987 - RNA, 22 nt, Human
gugcagaggcuguggcugguga

SEQ ID NO: 3451988 - RNA, 16 nt, Human
gugcagagugcccaga

SEQ ID NO: 3451989 - RNA, 18 nt, Human
gugcagagugcccagaac

SEQ ID NO: 3451990 - RNA, 21 nt, Human
gugcagcagauuggaaggaga

SEQ ID NO: 3451991 - RNA, 14 nt, Human
gugcagcagggcag

SEQ ID NO: 3451992 - RNA, 22 nt, Human
gugcagccccgccuccaggcca

SEQ ID NO: 3451993 - RNA, 19 nt, Human
gugcagcccguguggcccc

SEQ ID NO: 3451994 - RNA, 18 nt, Human
gugcagccgcugagcgag

SEQ ID NO: 3451995 - RNA, 23 nt, Human
gugcagcucaaggaaaggccuga

SEQ ID NO: 3451996 - RNA, 14 nt, Human
gugcagcugauuuu

SEQ ID NO: 3451997 - RNA, 18 nt, Human
gugcagcugauuuuaaca

SEQ ID NO: 3451998 - RNA, 17 nt, Human
gugcaggagcgcucccu

SEQ ID NO: 3451999 - RNA, 18 nt, Human
gugcaggccugcucaggg

SEQ ID NO: 3452000 - RNA, 15 nt, Human
gugcaggcuggcacc

SEQ ID NO: 3452001 - RNA, 13 nt, Human
gugcaggcuggcc

SEQ ID NO: 3452002 - RNA, 14 nt, Human
gugcaggcuggcca

SEQ ID NO: 3452003 - RNA, 16 nt, Human
guggcuacucugugcc

SEQ ID NO: 3452004 - RNA, 17 nt, Human
guggcuacucugugcca

SEQ ID NO: 3452005 - RNA, 20 nt, Human
guggcuagucaagcuccucc

SEQ ID NO: 3452006 - RNA, 17 nt, Human
guggcuagucagagaga

SEQ ID NO: 3452007 - RNA, 20 nt, Human
guggcuauuaaaacucuuuu

SEQ ID NO: 3452008 - RNA, 22 nt, Human
guggcucacgccuguaauccca

SEQ ID NO: 3452009 - RNA, 14 nt, Human
guggcucaugccug

SEQ ID NO: 3452010 - RNA, 12 nt, Human
guggcuccccuc

SEQ ID NO: 3452011 - RNA, 22 nt, Human
guggcuccccucuauuuagcau

SEQ ID NO: 3452012 - RNA, 21 nt, Human
guggcucuacaacugaguccu

SEQ ID NO: 3452013 - RNA, 16 nt, Human
guggcucugagaaggg

SEQ ID NO: 3452014 - RNA, 15 nt, Human
guggcucugcuggcc

SEQ ID NO: 3452015 - RNA, 15 nt, Human
guggcugacccaguc

SEQ ID NO: 3452016 - RNA, 15 nt, Human
guggcugaccccccu

SEQ ID NO: 3452017 - RNA, 14 nt, Human
guggcugcagccuc

SEQ ID NO: 3452018 - RNA, 19 nt, Human
guggcugcgugccccugcu

SEQ ID NO: 3452019 - RNA, 20 nt, Human
guggcugcgugccccugcug

SEQ ID NO: 3452020 - RNA, 17 nt, Human
guggcugcuagcacuug

SEQ ID NO: 3452021 - RNA, 24 nt, Human
guggcuggaaccacauugaagaau

SEQ ID NO: 3452022 - RNA, 12 nt, Human
guggcuggaaga

SEQ ID NO: 3452023 - RNA, 21 nt, Human
guggcuggguccaggggaugg

SEQ ID NO: 3452024 - RNA, 19 nt, Human
guggcuggguuggagggug

SEQ ID NO: 3452025 - RNA, 22 nt, Human
guggcugucaaugggaccugug

SEQ ID NO: 3452026 - RNA, 17 nt, Human
guggcuguccagugccc

SEQ ID NO: 3452027 - RNA, 18 nt, Human
guggcuguccagugccca

SEQ ID NO: 3452028 - RNA, 22 nt, Human
guggcuuaaaacaacacucaca

SEQ ID NO: 3452029 - RNA, 17 nt, Human
guggcuucacuccugcu

SEQ ID NO: 3452030 - RNA, 15 nt, Human
guggcuucagcucca

SEQ ID NO: 3452031 - RNA, 23 nt, Human
guggcuucccuuuucuuuguuca

SEQ ID NO: 3452032 - RNA, 16 nt, Human
guggcuuucagccucu

SEQ ID NO: 3452033 - RNA, 20 nt, Human
guggcuuuccuuguggcaga

SEQ ID NO: 3452034 - RNA, 16 nt, Human
guggcuuugcauuuua

SEQ ID NO: 3452035 - RNA, 18 nt, Human
guggcuuugcauuuuaaa

SEQ ID NO: 3452036 - RNA, 23 nt, Human
guggcuuugcauuuuaaaaauga

SEQ ID NO: 3452037 - RNA, 17 nt, Human
gugggaacgacugggca

SEQ ID NO: 3452038 - RNA, 18 nt, Human
gugggaacgagaggggaa

SEQ ID NO: 3452039 - RNA, 20 nt, Human
gugggaagcccauccugacc

SEQ ID NO: 3452040 - RNA, 21 nt, Human
gugggaagcccauccugacca

SEQ ID NO: 3452041 - RNA, 13 nt, Human
gugggaagggaga

SEQ ID NO: 3452042 - RNA, 22 nt, Human
gugggacacccugugauggggc

SEQ ID NO: 3452043 - RNA, 20 nt, Human
gugggacgggaugguucugg

SEQ ID NO: 3452044 - RNA, 20 nt, Human
gugggacggugcccaagcca

SEQ ID NO: 3452045 - RNA, 14 nt, Human
gugggacuguacac

SEQ ID NO: 3452046 - RNA, 15 nt, Human
gugggacuguacaca

SEQ ID NO: 3452047 - RNA, 21 nt, Human
gugggagaccggccugccagg

SEQ ID NO: 3452048 - RNA, 15 nt, Human
gugggagagcccagc

SEQ ID NO: 3452049 - RNA, 13 nt, Human
gugggagaggucu

SEQ ID NO: 3452050 - RNA, 12 nt, Human
gugggagcugag

SEQ ID NO: 3452051 - RNA, 14 nt, Human
gugggagcugccug

SEQ ID NO: 3452052 - RNA, 14 nt, Human
gugggagggagcag

SEQ ID NO: 3452053 - RNA, 15 nt, Human
gugggagggagcaga

SEQ ID NO: 3452054 - RNA, 15 nt, Human
gugggaggggcaggc

SEQ ID NO: 3452055 - RNA, 15 nt, Human
gugggaggguaccag

SEQ ID NO: 3452056 - RNA, 16 nt, Human
gugggaggguaccagc

SEQ ID NO: 3452057 - RNA, 13 nt, Human
gugggaggucagg

SEQ ID NO: 3452058 - RNA, 21 nt, Human
gugggaguaguuggagcauug

SEQ ID NO: 3452059 - RNA, 15 nt, Human
gugggagucaucuca

SEQ ID NO: 3452060 - RNA, 13 nt, Human
gugggagugugua

SEQ ID NO: 3452061 - RNA, 13 nt, Human
gugggauccucca

SEQ ID NO: 3452062 - RNA, 18 nt, Human
gugggaucugccccuccc

SEQ ID NO: 3452063 - RNA, 17 nt, Human
gugggaugaaccagccg

SEQ ID NO: 3452064 - RNA, 17 nt, Human
gugggauggaggagaag

SEQ ID NO: 3452065 - RNA, 15 nt, Human
gugggcaauuuagaa

SEQ ID NO: 3452066 - RNA, 20 nt, Human
gugggcacccacccugggac

SEQ ID NO: 3452067 - RNA, 14 nt, Human
gugggcaggaaaag

SEQ ID NO: 3452068 - RNA, 12 nt, Human
gugggcaggugg

SEQ ID NO: 3452069 - RNA, 17 nt, Human
gugggcauucucucucc

SEQ ID NO: 3452070 - RNA, 20 nt, Human
gugggcauuucuugcgagcc

SEQ ID NO: 3452071 - RNA, 12 nt, Human
gugggccagccc

SEQ ID NO: 3452072 - RNA, 14 nt, Human
gugggccaggacag

SEQ ID NO: 3452073 - RNA, 18 nt, Human
gugggccaggacaggccc

SEQ ID NO: 3452074 - RNA, 13 nt, Human
gugggccagggcu

SEQ ID NO: 3452075 - RNA, 19 nt, Human
gugggccagggcugcccug

SEQ ID NO: 3452076 - RNA, 16 nt, Human
gugggccagucugugg

SEQ ID NO: 3452077 - RNA, 15 nt, Human
gugggccauggcaau

SEQ ID NO: 3452078 - RNA, 22 nt, Human
gugggcccaggaccagcugggg

SEQ ID NO: 3452079 - RNA, 13 nt, Human
gugggccuggcca

SEQ ID NO: 3452080 - RNA, 19 nt, Human
gugggccuucagggaguga

SEQ ID NO: 3452081 - RNA, 17 nt, Human
gugggccuugcugggga

SEQ ID NO: 3452082 - RNA, 19 nt, Human
gugggcggcacagccuucu

SEQ ID NO: 3452083 - RNA, 13 nt, Human
gugggcggcagag

SEQ ID NO: 3452084 - RNA, 16 nt, Human
gugggcggcagagagg

SEQ ID NO: 3452085 - RNA, 23 nt, Human
gugggcgggcaggggagggucag

SEQ ID NO: 3452086 - RNA, 21 nt, Human
gugggcgugagaccugccccu

SEQ ID NO: 3452087 - RNA, 14 nt, Human
gugggcuaauuaaa

SEQ ID NO: 3452088 - RNA, 22 nt, Human
gugggcuccccucuuccucuug

SEQ ID NO: 3452089 - RNA, 18 nt, Human
gugggcucugugcaguca

SEQ ID NO: 3452090 - RNA, 16 nt, Human
gugggcugagcccugg

SEQ ID NO: 3452091 - RNA, 19 nt, Human
gugggcugcacucugugcc

SEQ ID NO: 3452092 - RNA, 21 nt, Human
gugggcugcacucugugccca

SEQ ID NO: 3452093 - RNA, 17 nt, Human
gugggcuggacuucuac

SEQ ID NO: 3452094 - RNA, 20 nt, Human
gugggcugggcccucucuuc

SEQ ID NO: 3452095 - RNA, 22 nt, Human
gugggcuggugacccagucaga

SEQ ID NO: 3452096 - RNA, 14 nt, Human
gugggcugugagug

SEQ ID NO: 3452097 - RNA, 15 nt, Human
gugggcuucagggca

SEQ ID NO: 3452098 - RNA, 22 nt, Human
gugggcuucccaguggcugcug

SEQ ID NO: 3452099 - RNA, 23 nt, Human
gugggcuucccaguggcugcugc

SEQ ID NO: 3452100 - RNA, 22 nt, Human
gugggcuuguggggccugggag

SEQ ID NO: 3452101 - RNA, 11 nt, Human
guggggacagg

SEQ ID NO: 3452102 - RNA, 13 nt, Human
guggggacccagg

SEQ ID NO: 3452103 - RNA, 16 nt, Human
guggggacccaggcuc

SEQ ID NO: 3452104 - RNA, 19 nt, Human
guggggagacaccucagag

SEQ ID NO: 3452105 - RNA, 20 nt, Human
guggggagacaccucagagc

SEQ ID NO: 3452106 - RNA, 13 nt, Human
guggggaggggcu

SEQ ID NO: 3452107 - RNA, 18 nt, Human
guggggaucucaggggcu

SEQ ID NO: 3452108 - RNA, 16 nt, Human
guggggauuucuccca

SEQ ID NO: 3452109 - RNA, 18 nt, Human
guggggcaagauuuuccu

SEQ ID NO: 3452110 - RNA, 15 nt, Human
guggggcagagccuc

SEQ ID NO: 3452111 - RNA, 13 nt, Human
guggggcagcuug

SEQ ID NO: 3452112 - RNA, 17 nt, Human
guggggcagcuugaggg

SEQ ID NO: 3452113 - RNA, 14 nt, Human
guggggcagggagc

SEQ ID NO: 3452114 - RNA, 12 nt, Human
guggggccccuc

SEQ ID NO: 3452115 - RNA, 17 nt, Human
guggggccgccgccucu

SEQ ID NO: 3452116 - RNA, 22 nt, Human
guggggccggggcuucugugca

SEQ ID NO: 3452117 - RNA, 14 nt, Human
guggggcgaggcag

SEQ ID NO: 3452118 - RNA, 17 nt, Human
guggggcugcuccucca

SEQ ID NO: 3452119 - RNA, 14 nt, Human
gugggggagggagg

SEQ ID NO: 3452120 - RNA, 14 nt, Human
gugggggcagaggg

SEQ ID NO: 3452121 - RNA, 18 nt, Human
gugggggcagagggcaga

SEQ ID NO: 3452122 - RNA, 14 nt, Human
gugggggggcagag

SEQ ID NO: 3452123 - RNA, 19 nt, Human
guggggguagggggcugga

SEQ ID NO: 3452124 - RNA, 22 nt, Human
guggggguagggggcuggagga

SEQ ID NO: 3452125 - RNA, 14 nt, Human
gugggggucugugu

SEQ ID NO: 3452126 - RNA, 15 nt, Human
gugggggucugugug

SEQ ID NO: 3452127 - RNA, 15 nt, Human
guggggguggaggcu

SEQ ID NO: 3452128 - RNA, 18 nt, Human
guggggguugcuguauaa

SEQ ID NO: 3452129 - RNA, 19 nt, Human
gugggguagguugggagaa

SEQ ID NO: 3452130 - RNA, 15 nt, Human
guggggucacucugg

SEQ ID NO: 3452131 - RNA, 21 nt, Human
guggggucaugcccuccucuc

SEQ ID NO: 3452132 - RNA, 22 nt, Human
gugggguccugccggagaggaa

SEQ ID NO: 3452133 - RNA, 19 nt, Human
guggggucucccucuccug

SEQ ID NO: 3452134 - RNA, 16 nt, Human
guggggugugcuggga

SEQ ID NO: 3452135 - RNA, 15 nt, Human
gugggguucuaggca

SEQ ID NO: 3452136 - RNA, 17 nt, Human
gugggguucugcuggga

SEQ ID NO: 3452137 - RNA, 16 nt, Human
gugggguuuccuggca

SEQ ID NO: 3452138 - RNA, 14 nt, Human
guggguacgggagg

SEQ ID NO: 3452139 - RNA, 15 nt, Human
guggguauaaaagau

SEQ ID NO: 3452140 - RNA, 9 nt, Human
gugggucag

SEQ ID NO: 3452141 - RNA, 20 nt, Human
gugggucccacuuccccucc

SEQ ID NO: 3452142 - RNA, 16 nt, Human
gugggucugugugugu

SEQ ID NO: 3452143 - RNA, 21 nt, Human
gugggucuucagggggccagg

SEQ ID NO: 3452144 - RNA, 16 nt, Human
gugggugacaagagcc

SEQ ID NO: 3452145 - RNA, 20 nt, Human
gugggugagaugcuggagaa

SEQ ID NO: 3452146 - RNA, 14 nt, Human
gugggugcucagaa

SEQ ID NO: 3452147 - RNA, 15 nt, Human
gugggugcucagaau

SEQ ID NO: 3452148 - RNA, 12 nt, Human
guuauauuucag

SEQ ID NO: 3452149 - RNA, 20 nt, Human
guuauauuuuacuacugugg

SEQ ID NO: 3452150 - RNA, 21 nt, Human
guuauauuuuucuuaaaaagu

SEQ ID NO: 3452151 - RNA, 23 nt, Human
guuauauuuuucuuaaaaaguaa

SEQ ID NO: 3452152 - RNA, 20 nt, Human
guuaucaccgugggcucccu

SEQ ID NO: 3452153 - RNA, 22 nt, Human
guuaucaccgugggcucccuga

SEQ ID NO: 3452154 - RNA, 14 nt, Human
guuaucacugugca

SEQ ID NO: 3452155 - RNA, 16 nt, Human
guuaucagugcuuccc

SEQ ID NO: 3452156 - RNA, 14 nt, Human
guuaucaugaauuu

SEQ ID NO: 3452157 - RNA, 18 nt, Human
guuaucaugaauuuuaaa

SEQ ID NO: 3452158 - RNA, 11 nt, Human
guuaucauguu

SEQ ID NO: 3452159 - RNA, 12 nt, Human
guuaucauguua

SEQ ID NO: 3452160 - RNA, 19 nt, Human
guuauccauuuaaaaaugg

SEQ ID NO: 3452161 - RNA, 18 nt, Human
guuaucgaaauaacaaug

SEQ ID NO: 3452162 - RNA, 15 nt, Human
guuaucuaaguuaau

SEQ ID NO: 3452163 - RNA, 18 nt, Human
guuaucuaaguuaauuua

SEQ ID NO: 3452164 - RNA, 21 nt, Human
guuaucuaaguuaauuuaaag

SEQ ID NO: 3452165 - RNA, 23 nt, Human
guuaucuuauacuguacaauaaa

SEQ ID NO: 3452166 - RNA, 19 nt, Human
guuaucuucucaaguucua

SEQ ID NO: 3452167 - RNA, 15 nt, Human
guuaugaaauaaaga

SEQ ID NO: 3452168 - RNA, 18 nt, Human
guuaugaacacuuaaauu

SEQ ID NO: 3452169 - RNA, 13 nt, Human
guuaugaaucagu

SEQ ID NO: 3452170 - RNA, 15 nt, Human
guuaugacuauguaa

SEQ ID NO: 3452171 - RNA, 21 nt, Human
guuaugacuccagaauuuccc

SEQ ID NO: 3452172 - RNA, 22 nt, Human
guuaugauaaaaaauuuuguaa

SEQ ID NO: 3452173 - RNA, 19 nt, Human
guuaugcggucuagggaau

SEQ ID NO: 3452174 - RNA, 23 nt, Human
guuauggaaacuguugccagaga

SEQ ID NO: 3452175 - RNA, 15 nt, Human
guuaugguagaaaaa

SEQ ID NO: 3452176 - RNA, 16 nt, Human
guuaugguagaaaaau

SEQ ID NO: 3452177 - RNA, 15 nt, Human
guuauguaaauaauu

SEQ ID NO: 3452178 - RNA, 19 nt, Human
guuauguaauaaccaaaug

SEQ ID NO: 3452179 - RNA, 22 nt, Human
guuauguaccauaugaucuguu

SEQ ID NO: 3452180 - RNA, 22 nt, Human
guuauguacuaguguucuguuu

SEQ ID NO: 3452181 - RNA, 17 nt, Human
guuauguacuguacuaa

SEQ ID NO: 3452182 - RNA, 15 nt, Human
guuaugucuguuuaa

SEQ ID NO: 3452183 - RNA, 16 nt, Human
guuaugucuguuuaag

SEQ ID NO: 3452184 - RNA, 14 nt, Human
guuauguguguaua

SEQ ID NO: 3452185 - RNA, 20 nt, Human
gauggggagaucggggccag

SEQ ID NO: 3452186 - RNA, 12 nt, Human
gauggggagggg

SEQ ID NO: 3452187 - RNA, 21 nt, Human
gauggggauaaaaugacuacu

SEQ ID NO: 3452188 - RNA, 23 nt, Human
gauggggauaaaaugacuacuua

SEQ ID NO: 3452189 - RNA, 23 nt, Human
gauggggcaggccaccuggcucu

SEQ ID NO: 3452190 - RNA, 21 nt, Human
gauggggcccuaauucagcca

SEQ ID NO: 3452191 - RNA, 22 nt, Human
gauggggcccugccuccuuugu

SEQ ID NO: 3452192 - RNA, 24 nt, Human
gauggggcccugccuccuuuguga

SEQ ID NO: 3452193 - RNA, 16 nt, Human
gaugggggaacucaga

SEQ ID NO: 3452194 - RNA, 21 nt, Human
gaugggggagucugaagcaga

SEQ ID NO: 3452195 - RNA, 23 nt, Human
gauggggggggauguggaucagg

SEQ ID NO: 3452196 - RNA, 18 nt, Human
gauggggguuucaccaua

SEQ ID NO: 3452197 - RNA, 17 nt, Human
gaugggguuucaccaug

SEQ ID NO: 3452198 - RNA, 21 nt, Human
gaugggugaaggcuggcauga

SEQ ID NO: 3452199 - RNA, 23 nt, Human
gauggguucuaauuuuggaugga

SEQ ID NO: 3452200 - RNA, 15 nt, Human
gaugguaagagaaaa

SEQ ID NO: 3452201 - RNA, 22 nt, Human
gaugguaagagaaaagagagaa

SEQ ID NO: 3452202 - RNA, 16 nt, Human
gaugguacgugacccu

SEQ ID NO: 3452203 - RNA, 15 nt, Human
gaugguaucauauau

SEQ ID NO: 3452204 - RNA, 19 nt, Human
gaugguaugcacaauucca

SEQ ID NO: 3452205 - RNA, 15 nt, Human
gauggucacuuaaaa

SEQ ID NO: 3452206 - RNA, 13 nt, Human
gaugguccugggg

SEQ ID NO: 3452207 - RNA, 21 nt, Human
gaugguccuggggcucugugc

SEQ ID NO: 3452208 - RNA, 13 nt, Human
gauggucuggucu

SEQ ID NO: 3452209 - RNA, 17 nt, Human
gauggucuggucuaugu

SEQ ID NO: 3452210 - RNA, 16 nt, Human
gauggucuuacagcag

SEQ ID NO: 3452211 - RNA, 12 nt, Human
gauggugcugag

SEQ ID NO: 3452212 - RNA, 17 nt, Human
gauggugcugagaagcu

SEQ ID NO: 3452213 - RNA, 15 nt, Human
gaugguggagggcca

SEQ ID NO: 3452214 - RNA, 20 nt, Human
gaugguggguggggcugcag

SEQ ID NO: 3452215 - RNA, 16 nt, Human
gaugguguggccugug

SEQ ID NO: 3452216 - RNA, 18 nt, Human
gaugguguggguguccug

SEQ ID NO: 3452217 - RNA, 24 nt, Human
gaugguguucaaaaaacuuguaaa

SEQ ID NO: 3452218 - RNA, 17 nt, Human
gaugguguuuuggggau

SEQ ID NO: 3452219 - RNA, 13 nt, Human
gaugguuccccug

SEQ ID NO: 3452220 - RNA, 21 nt, Human
gaugguuccccuguucacucu

SEQ ID NO: 3452221 - RNA, 22 nt, Human
gaugguucccuugaugaagaag

SEQ ID NO: 3452222 - RNA, 17 nt, Human
gaugguucguucuguuu

SEQ ID NO: 3452223 - RNA, 18 nt, Human
gaugguucuucaccuccu

SEQ ID NO: 3452224 - RNA, 13 nt, Human
gauguaaaaucuu

SEQ ID NO: 3452225 - RNA, 14 nt, Human
gauguaaaaucuug

SEQ ID NO: 3452226 - RNA, 16 nt, Human
gauguaaacagugccu

SEQ ID NO: 3452227 - RNA, 12 nt, Human
gauguaaagaug

SEQ ID NO: 3452228 - RNA, 13 nt, Human
gauguaaagaugu

SEQ ID NO: 3452229 - RNA, 15 nt, Human
gauguaauacuucuu

SEQ ID NO: 3452230 - RNA, 20 nt, Human
gauguaaucucucugcagcu

SEQ ID NO: 3452231 - RNA, 13 nt, Human
gauguaauguuuu

SEQ ID NO: 3452232 - RNA, 22 nt, Human
gauguaauuuaggguacuaaau

SEQ ID NO: 3452233 - RNA, 16 nt, Human
gauguacagucuguca

SEQ ID NO: 3452234 - RNA, 23 nt, Human
gauguacaguugggaaaauaugu

SEQ ID NO: 3452235 - RNA, 18 nt, Human
gauguagccaugaccuua

SEQ ID NO: 3452236 - RNA, 14 nt, Human
gauguaggagggac

SEQ ID NO: 3452237 - RNA, 16 nt, Human
gauguaggagggacug

SEQ ID NO: 3452238 - RNA, 18 nt, Human
gauguauccaugggggca

SEQ ID NO: 3452239 - RNA, 19 nt, Human
gauguaucugaguugccaa

SEQ ID NO: 3452240 - RNA, 20 nt, Human
gauguaugcacacacauaua

SEQ ID NO: 3452241 - RNA, 20 nt, Human
gauguauguugaagccuuug

SEQ ID NO: 3452242 - RNA, 21 nt, Human
gauguauguugaagccuuugu

SEQ ID NO: 3452243 - RNA, 21 nt, Human
gauguauuuugugaguuuguu

SEQ ID NO: 3452244 - RNA, 17 nt, Human
gaugucagcaguugcug

SEQ ID NO: 3452245 - RNA, 19 nt, Human
gaugucagcaguugcuggu

SEQ ID NO: 3452246 - RNA, 15 nt, Human
gaugucauacagaga

SEQ ID NO: 3452247 - RNA, 19 nt, Human
gaugucaucccauugucuu

SEQ ID NO: 3452248 - RNA, 18 nt, Human
gaugucccaacuuguaaa

SEQ ID NO: 3452249 - RNA, 11 nt, Human
gauguccccag

SEQ ID NO: 3452250 - RNA, 19 nt, Human
gaugucccuugaugcacag

SEQ ID NO: 3452251 - RNA, 21 nt, Human
gaugucccuuucuuggccagu

SEQ ID NO: 3452252 - RNA, 21 nt, Human
gauguccucaccacaugcgga

SEQ ID NO: 3452253 - RNA, 19 nt, Human
gaugucuccuaagcaccug

SEQ ID NO: 3452254 - RNA, 21 nt, Human
gaugucugaacuuugggaagc

SEQ ID NO: 3452255 - RNA, 18 nt, Human
gaugucuuauuuuuagau

SEQ ID NO: 3452256 - RNA, 14 nt, Human
gaugucuucauacc

SEQ ID NO: 3452257 - RNA, 22 nt, Human
gaugucuuccuuggagggggga

SEQ ID NO: 3452258 - RNA, 21 nt, Human
gaugucuucguacaguucuuc

SEQ ID NO: 3452259 - RNA, 13 nt, Human
gaugucuucugcc

SEQ ID NO: 3452260 - RNA, 14 nt, Human
gaugucuucugccu

SEQ ID NO: 3452261 - RNA, 21 nt, Human
gaugucuuggaacauuggaau

SEQ ID NO: 3452262 - RNA, 23 nt, Human
gaugucuuuuuauuaaaauauuu

SEQ ID NO: 3452263 - RNA, 16 nt, Human
gaugugaacacaucag

SEQ ID NO: 3452264 - RNA, 14 nt, Human
gaugugaagccaau

SEQ ID NO: 3452265 - RNA, 21 nt, Human
gaugugaauugccugcagaga

SEQ ID NO: 3452266 - RNA, 17 nt, Human
gaugugacauuugucau

SEQ ID NO: 3452267 - RNA, 14 nt, Human
gaugugacuguaua

SEQ ID NO: 3452268 - RNA, 22 nt, Human
gaugugagaaaaccccuuccca

SEQ ID NO: 3452269 - RNA, 11 nt, Human
gaugugauaua

SEQ ID NO: 3452270 - RNA, 18 nt, Human
gaugugauauauaagugu

SEQ ID NO: 3452271 - RNA, 15 nt, Human
gaugugauauucuaa

SEQ ID NO: 3452272 - RNA, 20 nt, Human
gaugugauucaaaagaugcc

SEQ ID NO: 3452273 - RNA, 18 nt, Human
gaugugauuguggaaugg

SEQ ID NO: 3452274 - RNA, 22 nt, Human
gaugugcaaaaauuuuuggauu

SEQ ID NO: 3452275 - RNA, 14 nt, Human
gaugugcaauugau

SEQ ID NO: 3452276 - RNA, 19 nt, Human
gaugugcacguaaaguacu

SEQ ID NO: 3452277 - RNA, 19 nt, Human
gaugugcagcauuucacuu

SEQ ID NO: 3452278 - RNA, 20 nt, Human
gaugugccauuuuaaaaaaa

SEQ ID NO: 3452279 - RNA, 13 nt, Human
gaugugccugggu

SEQ ID NO: 3452280 - RNA, 19 nt, Human
gaugugcuauaaucuguuu

SEQ ID NO: 3452281 - RNA, 21 nt, Human
gaugugcuuugcauuccuaca

SEQ ID NO: 3452282 - RNA, 18 nt, Human
gauguggaacugcugcca

SEQ ID NO: 3452283 - RNA, 21 nt, Human
gauguggcccuggccugcugg

SEQ ID NO: 3452284 - RNA, 12 nt, Human
gaugugggcagc

SEQ ID NO: 3452285 - RNA, 20 nt, Human
gaugugggggaagaccuggc

SEQ ID NO: 3452286 - RNA, 17 nt, Human
gaugugggucaaggaau

SEQ ID NO: 3452287 - RNA, 15 nt, Human
gauguggugaggcag

SEQ ID NO: 3452288 - RNA, 16 nt, Human
gaugugguuuucuuaa

SEQ ID NO: 3452289 - RNA, 20 nt, Human
gauguguaauuuuucuguau

SEQ ID NO: 3452290 - RNA, 12 nt, Human
gauguguacauc

SEQ ID NO: 3452291 - RNA, 18 nt, Human
gauguguccucagggagc

SEQ ID NO: 3452292 - RNA, 22 nt, Human
uaaaaaucuaagcagcuuauug

SEQ ID NO: 3452293 - RNA, 19 nt, Human
uaaaaaucuaccuucugua

SEQ ID NO: 3452294 - RNA, 17 nt, Human
uaaaaaucucaaauuuc

SEQ ID NO: 3452295 - RNA, 23 nt, Human
uaaaaaucucaaauuucuaaauc

SEQ ID NO: 3452296 - RNA, 16 nt, Human
uaaaaaucucucauuu

SEQ ID NO: 3452297 - RNA, 18 nt, Human
uaaaaaucuuuugaagca

SEQ ID NO: 3452298 - RNA, 14 nt, Human
uaaaaaugagaaca

SEQ ID NO: 3452299 - RNA, 18 nt, Human
uaaaaaugagaacauguu

SEQ ID NO: 3452300 - RNA, 22 nt, Human
uaaaaaugagguacucuccugg

SEQ ID NO: 3452301 - RNA, 19 nt, Human
uaaaaaugauuucaguagc

SEQ ID NO: 3452302 - RNA, 18 nt, Human
uaaaaaugggacuucuuu

SEQ ID NO: 3452303 - RNA, 23 nt, Human
uaaaaaugggacuucuuuucaca

SEQ ID NO: 3452304 - RNA, 15 nt, Human
uaaaaaugguuuaaa

SEQ ID NO: 3452305 - RNA, 22 nt, Human
uaaaaaugucuugcuguugaca

SEQ ID NO: 3452306 - RNA, 22 nt, Human
uaaaaauguuaaaauguauucu

SEQ ID NO: 3452307 - RNA, 21 nt, Human
uaaaaauguucuauuuuaauu

SEQ ID NO: 3452308 - RNA, 18 nt, Human
uaaaaauuagccuaagau

SEQ ID NO: 3452309 - RNA, 15 nt, Human
uaaaaauucugaaug

SEQ ID NO: 3452310 - RNA, 17 nt, Human
uaaaaauucugaaugua

SEQ ID NO: 3452311 - RNA, 18 nt, Human
uaaaaauugucuucaugu

SEQ ID NO: 3452312 - RNA, 22 nt, Human
uaaaaauuguuaauuuuuccua

SEQ ID NO: 3452313 - RNA, 17 nt, Human
uaaaacaaaaaacaaua

SEQ ID NO: 3452314 - RNA, 11 nt, Human
uaaaacaaaac

SEQ ID NO: 3452315 - RNA, 21 nt, Human
uaaaacaaaacaaaacaacau

SEQ ID NO: 3452316 - RNA, 14 nt, Human
uaaaacaaaauuug

SEQ ID NO: 3452317 - RNA, 17 nt, Human
uaaaacaaaauuugacu

SEQ ID NO: 3452318 - RNA, 22 nt, Human
uaaaacaacagcucgauccaaa

SEQ ID NO: 3452319 - RNA, 22 nt, Human
uaaaacaagcacuaaacaaaga

SEQ ID NO: 3452320 - RNA, 14 nt, Human
uaaaacaauauugu

SEQ ID NO: 3452321 - RNA, 17 nt, Human
uaaaacacaacaucuuu

SEQ ID NO: 3452322 - RNA, 22 nt, Human
uaaaacacaacaucuuuuucua

SEQ ID NO: 3452323 - RNA, 19 nt, Human
uaaaacaccucugcuuucu

SEQ ID NO: 3452324 - RNA, 19 nt, Human
uaaaacacuuccauaaucu

SEQ ID NO: 3452325 - RNA, 13 nt, Human
uaaaacagaaaaa

SEQ ID NO: 3452326 - RNA, 13 nt, Human
uaaaacagacacu

SEQ ID NO: 3452327 - RNA, 14 nt, Human
uaaaacaguauuua

SEQ ID NO: 3452328 - RNA, 13 nt, Human
uaaaacauagcaa

SEQ ID NO: 3452329 - RNA, 15 nt, Human
uaaaacaucauuccu

SEQ ID NO: 3452330 - RNA, 19 nt, Human
uaaaacaucuuugaaauua

SEQ ID NO: 3452331 - RNA, 12 nt, Human
uaaaacauuaaa

SEQ ID NO: 3452332 - RNA, 17 nt, Human
uaaaacauuaagaaaau

SEQ ID NO: 3452333 - RNA, 19 nt, Human
uaaaacauuggauuauccu

SEQ ID NO: 3452334 - RNA, 21 nt, Human
uaaaacauuggauuauccuga

SEQ ID NO: 3452335 - RNA, 22 nt, Human
uaaaacauuggauuauccugag

SEQ ID NO: 3452336 - RNA, 11 nt, Human
uaaaaccaaag

SEQ ID NO: 3452337 - RNA, 19 nt, Human
uaaaacccauuuaaauuuu

SEQ ID NO: 3452338 - RNA, 19 nt, Human
uaaaaccccaucucuacua

SEQ ID NO: 3452339 - RNA, 21 nt, Human
uaaaaccgaaggugaaaaaaa

SEQ ID NO: 3452340 - RNA, 16 nt, Human
uaaaaccugucaauga

SEQ ID NO: 3452341 - RNA, 22 nt, Human
uaaaaccuuccaugucaagauu

SEQ ID NO: 3452342 - RNA, 16 nt, Human
uaaaaccuuucaaauu

SEQ ID NO: 3452343 - RNA, 21 nt, Human
uaaaaccuuucaaauuucaca

SEQ ID NO: 3452344 - RNA, 16 nt, Human
guuccaaguuuccaaa

SEQ ID NO: 3452345 - RNA, 17 nt, Human
guuccaaguuuccaaac

SEQ ID NO: 3452346 - RNA, 23 nt, Human
guuccaauccuggcucuguggcu

SEQ ID NO: 3452347 - RNA, 11 nt, Human
guuccacagac

SEQ ID NO: 3452348 - RNA, 12 nt, Human
guuccacagacg

SEQ ID NO: 3452349 - RNA, 12 nt, Human
guuccacagagu

SEQ ID NO: 3452350 - RNA, 16 nt, Human
guuccacaguugccac

SEQ ID NO: 3452351 - RNA, 17 nt, Human
guuccaccaucaagcca

SEQ ID NO: 3452352 - RNA, 15 nt, Human
guuccaccccaagag

SEQ ID NO: 3452353 - RNA, 13 nt, Human
guuccacugagcu

SEQ ID NO: 3452354 - RNA, 16 nt, Human
guuccacugagcucca

SEQ ID NO: 3452355 - RNA, 18 nt, Human
guuccacuuauagccucu

SEQ ID NO: 3452356 - RNA, 20 nt, Human
guuccagcaauucuccugcc

SEQ ID NO: 3452357 - RNA, 21 nt, Human
guuccagcaauucuccugccu

SEQ ID NO: 3452358 - RNA, 17 nt, Human
guuccagggucccucug

SEQ ID NO: 3452359 - RNA, 19 nt, Human
guuccagggucccucugug

SEQ ID NO: 3452360 - RNA, 17 nt, Human
guuccaggguucucuug

SEQ ID NO: 3452361 - RNA, 15 nt, Human
guuccaguuucagag

SEQ ID NO: 3452362 - RNA, 23 nt, Human
guuccaugaagaccacauccaca

SEQ ID NO: 3452363 - RNA, 20 nt, Human
guuccaugaguuaucaugaa

SEQ ID NO: 3452364 - RNA, 14 nt, Human
guuccaugccugag

SEQ ID NO: 3452365 - RNA, 15 nt, Human
guuccaugccugagg

SEQ ID NO: 3452366 - RNA, 20 nt, Human
guuccauggccucuucagau

SEQ ID NO: 3452367 - RNA, 16 nt, Human
guuccaugggauacaa

SEQ ID NO: 3452368 - RNA, 19 nt, Human
guuccauuguuuggagaca

SEQ ID NO: 3452369 - RNA, 22 nt, Human
guucccaagaaaggaaaccuuu

SEQ ID NO: 3452370 - RNA, 17 nt, Human
guucccacauuaaagaa

SEQ ID NO: 3452371 - RNA, 14 nt, Human
guucccacuuggag

SEQ ID NO: 3452372 - RNA, 22 nt, Human
guucccagucuucugacaaacu

SEQ ID NO: 3452373 - RNA, 17 nt, Human
guucccauguagccccc

SEQ ID NO: 3452374 - RNA, 18 nt, Human
guucccauguagcccccu

SEQ ID NO: 3452375 - RNA, 19 nt, Human
guucccauguagcccccug

SEQ ID NO: 3452376 - RNA, 15 nt, Human
guuccccaaauacaa

SEQ ID NO: 3452377 - RNA, 13 nt, Human
guuccccacugga

SEQ ID NO: 3452378 - RNA, 14 nt, Human
guuccccacuggag

SEQ ID NO: 3452379 - RNA, 13 nt, Human
guuccccagagaa

SEQ ID NO: 3452380 - RNA, 14 nt, Human
guuccccaugcaga

SEQ ID NO: 3452381 - RNA, 14 nt, Human
guucccccagcccu

SEQ ID NO: 3452382 - RNA, 15 nt, Human
guucccccagcccug

SEQ ID NO: 3452383 - RNA, 18 nt, Human
guucccccuguuucagag

SEQ ID NO: 3452384 - RNA, 20 nt, Human
guuccccuaguaagugccuu

SEQ ID NO: 3452385 - RNA, 13 nt, Human
guuccccucacug

SEQ ID NO: 3452386 - RNA, 14 nt, Human
guuccccucucccu

SEQ ID NO: 3452387 - RNA, 20 nt, Human
guuccccucucccuucccuc

SEQ ID NO: 3452388 - RNA, 22 nt, Human
guuccccucucccuucccuccu

SEQ ID NO: 3452389 - RNA, 22 nt, Human
guuccccucuugucuccccugu

SEQ ID NO: 3452390 - RNA, 12 nt, Human
guuccccuggaa

SEQ ID NO: 3452391 - RNA, 24 nt, Human
guuccccuggaagcagugcccagg

SEQ ID NO: 3452392 - RNA, 15 nt, Human
guuccccuguucacu

SEQ ID NO: 3452393 - RNA, 17 nt, Human
guuccccuguucacucu

SEQ ID NO: 3452394 - RNA, 18 nt, Human
guuccccuguucacucua

SEQ ID NO: 3452395 - RNA, 17 nt, Human
guuccccuguuuauuca

SEQ ID NO: 3452396 - RNA, 19 nt, Human
guuccccuguuuauucaua

SEQ ID NO: 3452397 - RNA, 13 nt, Human
guuccccuuccac

SEQ ID NO: 3452398 - RNA, 20 nt, Human
guucccuacuuccugugacu

SEQ ID NO: 3452399 - RNA, 19 nt, Human
guucccuauuuuucucucc

SEQ ID NO: 3452400 - RNA, 17 nt, Human
guucccucucccuguug

SEQ ID NO: 3452401 - RNA, 14 nt, Human
guucccucugcuca

SEQ ID NO: 3452402 - RNA, 18 nt, Human
guucccucugcucagcca

SEQ ID NO: 3452403 - RNA, 20 nt, Human
guucccugaaaacccagaga

SEQ ID NO: 3452404 - RNA, 16 nt, Human
guucccugucuugucc

SEQ ID NO: 3452405 - RNA, 13 nt, Human
guucccuucuccu

SEQ ID NO: 3452406 - RNA, 21 nt, Human
guucccuugaaacuuugggaa

SEQ ID NO: 3452407 - RNA, 22 nt, Human
guucccuugaaacuuugggaaa

SEQ ID NO: 3452408 - RNA, 15 nt, Human
guucccuuggccuca

SEQ ID NO: 3452409 - RNA, 18 nt, Human
guucccuuggccucagaa

SEQ ID NO: 3452410 - RNA, 22 nt, Human
guucccuuugacgccaucccag

SEQ ID NO: 3452411 - RNA, 13 nt, Human
guucccuuugcuc

SEQ ID NO: 3452412 - RNA, 16 nt, Human
guucccuuugucuuuc

SEQ ID NO: 3452413 - RNA, 18 nt, Human
guuccgcacuuuccacuu

SEQ ID NO: 3452414 - RNA, 19 nt, Human
guuccggauuggcuugugu

SEQ ID NO: 3452415 - RNA, 15 nt, Human
guuccggcauggaca

SEQ ID NO: 3452416 - RNA, 17 nt, Human
guuccuaagaagcuucu

SEQ ID NO: 3452417 - RNA, 19 nt, Human
guuccuaagaagcuucuaa

SEQ ID NO: 3452418 - RNA, 14 nt, Human
guuccuaauccucu

SEQ ID NO: 3452419 - RNA, 22 nt, Human
guuccuauggcuggccacugca

SEQ ID NO: 3452420 - RNA, 14 nt, Human
guuccuauugucau

SEQ ID NO: 3452421 - RNA, 18 nt, Human
guuccuauugucauuaaa

SEQ ID NO: 3452422 - RNA, 16 nt, Human
guuccuccccuccagc

SEQ ID NO: 3452423 - RNA, 14 nt, Human
guuccucguucucc

SEQ ID NO: 3452424 - RNA, 16 nt, Human
guuccucugccugccc

SEQ ID NO: 3452425 - RNA, 13 nt, Human
guuccucugcuca

SEQ ID NO: 3452426 - RNA, 13 nt, Human
guuccucuuugca

SEQ ID NO: 3452427 - RNA, 17 nt, Human
guuccugacaucacagc

SEQ ID NO: 3452428 - RNA, 16 nt, Human
guuccugaugacccag

SEQ ID NO: 3452429 - RNA, 19 nt, Human
guuccugaugacccaggcu

SEQ ID NO: 3452430 - RNA, 15 nt, Human
guuccugcaaugaag

SEQ ID NO: 3452431 - RNA, 19 nt, Human
guuccugcggagugaagag

SEQ ID NO: 3452432 - RNA, 20 nt, Human
guuccugcggagugaagagg

SEQ ID NO: 3452433 - RNA, 17 nt, Human
guuccugcugcugucug

SEQ ID NO: 3452434 - RNA, 19 nt, Human
guuccuggggugcccucca

SEQ ID NO: 3452435 - RNA, 14 nt, Human
guuccugucccugc

SEQ ID NO: 3452436 - RNA, 16 nt, Human
guuccuguggcucccu

SEQ ID NO: 3452437 - RNA, 20 nt, Human
guuuaggauguugaaaaagu

SEQ ID NO: 3452438 - RNA, 15 nt, Human
guuuaggcuauuugu

SEQ ID NO: 3452439 - RNA, 17 nt, Human
guuuagggaacaauuug

SEQ ID NO: 3452440 - RNA, 16 nt, Human
guuuaguaaggcugug

SEQ ID NO: 3452441 - RNA, 13 nt, Human
guuuaguaaguuu

SEQ ID NO: 3452442 - RNA, 15 nt, Human
guuuaguuaaaugag

SEQ ID NO: 3452443 - RNA, 13 nt, Human
guuuauaaaauau

SEQ ID NO: 3452444 - RNA, 18 nt, Human
guuuauaaaauauaaaca

SEQ ID NO: 3452445 - RNA, 15 nt, Human
guuuauaauaaaaau

SEQ ID NO: 3452446 - RNA, 17 nt, Human
guuuauaauuuucugaa

SEQ ID NO: 3452447 - RNA, 19 nt, Human
guuuauacaguuuuaaaga

SEQ ID NO: 3452448 - RNA, 20 nt, Human
guuuauacaguuuuaaagaa

SEQ ID NO: 3452449 - RNA, 23 nt, Human
guuuauagagaaugaugauaaca

SEQ ID NO: 3452450 - RNA, 20 nt, Human
guuuauagagggccaagacu

SEQ ID NO: 3452451 - RNA, 17 nt, Human
guuuauaguuaaucuau

SEQ ID NO: 3452452 - RNA, 18 nt, Human
guuuauaguuaaucuaua

SEQ ID NO: 3452453 - RNA, 12 nt, Human
guuuauauaaau

SEQ ID NO: 3452454 - RNA, 20 nt, Human
guuuauauaagcuuguauuc

SEQ ID NO: 3452455 - RNA, 19 nt, Human
guuuauauggaagaaagua

SEQ ID NO: 3452456 - RNA, 14 nt, Human
guuuauauguguug

SEQ ID NO: 3452457 - RNA, 14 nt, Human
guuuauauuuucaa

SEQ ID NO: 3452458 - RNA, 18 nt, Human
guuuaucaacucaagaau

SEQ ID NO: 3452459 - RNA, 23 nt, Human
guuuaucagauacaucacugcuu

SEQ ID NO: 3452460 - RNA, 14 nt, Human
guuuaucaguaaau

SEQ ID NO: 3452461 - RNA, 14 nt, Human
guuuaucaugaagc

SEQ ID NO: 3452462 - RNA, 20 nt, Human
guuuaucauucaaguguaaa

SEQ ID NO: 3452463 - RNA, 16 nt, Human
guuuaucccuuaagaa

SEQ ID NO: 3452464 - RNA, 22 nt, Human
guuuaucccuuaagaaugaguu

SEQ ID NO: 3452465 - RNA, 18 nt, Human
guuuaucuagauguaaau

SEQ ID NO: 3452466 - RNA, 18 nt, Human
guuuaugaaaaagaagaa

SEQ ID NO: 3452467 - RNA, 15 nt, Human
guuuaugacaguaau

SEQ ID NO: 3452468 - RNA, 16 nt, Human
guuuaugagaaacugg

SEQ ID NO: 3452469 - RNA, 17 nt, Human
guuuaugcaaggaagga

SEQ ID NO: 3452470 - RNA, 17 nt, Human
guuuaugcagugcugcu

SEQ ID NO: 3452471 - RNA, 22 nt, Human
guuuauggccucagcugccuca

SEQ ID NO: 3452472 - RNA, 22 nt, Human
guuuaugugcuauuaauauuug

SEQ ID NO: 3452473 - RNA, 21 nt, Human
guuuauguuccauuaaacgau

SEQ ID NO: 3452474 - RNA, 22 nt, Human
guuuauuaaaauucugaauuuu

SEQ ID NO: 3452475 - RNA, 23 nt, Human
guuuauuaacaaauuauguuaca

SEQ ID NO: 3452476 - RNA, 20 nt, Human
guuuauuaaucuuaguguau

SEQ ID NO: 3452477 - RNA, 23 nt, Human
guuuauuacguaugucugguucu

SEQ ID NO: 3452478 - RNA, 16 nt, Human
guuuauuacuuauuug

SEQ ID NO: 3452479 - RNA, 17 nt, Human
guuuauuacuuccauga

SEQ ID NO: 3452480 - RNA, 14 nt, Human
guuuauuagaugaa

SEQ ID NO: 3452481 - RNA, 18 nt, Human
guuuauuauaaacuguau

SEQ ID NO: 3452482 - RNA, 14 nt, Human
guuuauucaaacug

SEQ ID NO: 3452483 - RNA, 16 nt, Human
guuuauucauaugcau

SEQ ID NO: 3452484 - RNA, 15 nt, Human
guuuauuccagagcu

SEQ ID NO: 3452485 - RNA, 16 nt, Human
guuuauucuucuagag

SEQ ID NO: 3452486 - RNA, 19 nt, Human
guuuauucuucuagaguuc

SEQ ID NO: 3452487 - RNA, 22 nt, Human
guuuauugaguuuguagguaaa

SEQ ID NO: 3452488 - RNA, 21 nt, Human
guuuauuggugaguuaggaac

SEQ ID NO: 3452489 - RNA, 16 nt, Human
guuuauuuaucaguga

SEQ ID NO: 3452490 - RNA, 19 nt, Human
guuuauuuaucagugacag

SEQ ID NO: 3452491 - RNA, 12 nt, Human
guuuauuucauu

SEQ ID NO: 3452492 - RNA, 21 nt, Human
guuuauuuccaaauaaaauga

SEQ ID NO: 3452493 - RNA, 19 nt, Human
guuuauuucuguuucucau

SEQ ID NO: 3452494 - RNA, 22 nt, Human
guuuauuuggaaaggaaugcaa

SEQ ID NO: 3452495 - RNA, 15 nt, Human
guuuauuuuaaaaca

SEQ ID NO: 3452496 - RNA, 18 nt, Human
guuuauuuuucauauugu

SEQ ID NO: 3452497 - RNA, 17 nt, Human
guuuauuuuucuguuac

SEQ ID NO: 3452498 - RNA, 14 nt, Human
guuucaaaaaucug

SEQ ID NO: 3452499 - RNA, 15 nt, Human
guuucaaaauaaaaa

SEQ ID NO: 3452500 - RNA, 19 nt, Human
guuucaaaauaaaaaccaa

SEQ ID NO: 3452501 - RNA, 18 nt, Human
guuucaaacacaaaugca

SEQ ID NO: 3452502 - RNA, 14 nt, Human
guuucaaacuguaa

SEQ ID NO: 3452503 - RNA, 12 nt, Human
guuucaaacuuu

SEQ ID NO: 3452504 - RNA, 19 nt, Human
guuucaaagaugcugugag

SEQ ID NO: 3452505 - RNA, 20 nt, Human
guuucaaagaugcugugagu

SEQ ID NO: 3452506 - RNA, 18 nt, Human
guuucaacggaaagugcu

SEQ ID NO: 3452507 - RNA, 20 nt, Human
guuucaagaggagcccccac

SEQ ID NO: 3452508 - RNA, 18 nt, Human
guuucaaggcacucuaga

SEQ ID NO: 3452509 - RNA, 17 nt, Human
guuucaaguuuuaaagu

SEQ ID NO: 3452510 - RNA, 16 nt, Human
guuucaauaaaguuug

SEQ ID NO: 3452511 - RNA, 15 nt, Human
guuucaaucacuguc

SEQ ID NO: 3452512 - RNA, 21 nt, Human
guuucaaugugauucuaaugu

SEQ ID NO: 3452513 - RNA, 17 nt, Human
guuucaauugcaucucc

SEQ ID NO: 3452514 - RNA, 22 nt, Human
guuucaauugcaucucccagau

SEQ ID NO: 3452515 - RNA, 19 nt, Human
guuucacggugccagguuu

SEQ ID NO: 3452516 - RNA, 13 nt, Human
guuucagaaaugu

SEQ ID NO: 3452517 - RNA, 14 nt, Human
guuucagaaaugug

SEQ ID NO: 3452518 - RNA, 17 nt, Human
guuucagauauauauca

SEQ ID NO: 3452519 - RNA, 20 nt, Human
guuucaggugacaugugaaa

SEQ ID NO: 3452520 - RNA, 16 nt, Human
guuucaguaauaaaac

SEQ ID NO: 3452521 - RNA, 17 nt, Human
guuucaguaauaaaaca

SEQ ID NO: 3452522 - RNA, 18 nt, Human
guuucaguaauaaaacau

SEQ ID NO: 3452523 - RNA, 22 nt, Human
guuucaguaauaaaacaucuuu

SEQ ID NO: 3452524 - RNA, 22 nt, Human
guuucauauucaugcaaguauu

SEQ ID NO: 3452525 - RNA, 13 nt, Human
guuucauauuucu

SEQ ID NO: 3452526 - RNA, 14 nt, Human
guuucauccuuccc

SEQ ID NO: 3452527 - RNA, 17 nt, Human
guuucauccuucccacu

SEQ ID NO: 3452528 - RNA, 18 nt, Human
guuucauguuuugugacu

SEQ ID NO: 3452529 - RNA, 16 nt, Human
guuucauucuccugcc

SEQ ID NO: 3452530 - RNA, 19 nt, Human
guuucauuuagucauguga

SEQ ID NO: 3452531 - RNA, 14 nt, Human
guuuccaaggagcu

SEQ ID NO: 3452532 - RNA, 21 nt, Human
guuuccaauuauuugacuuua

SEQ ID NO: 3452533 - RNA, 13 nt, Human
guuuccacaugcu

SEQ ID NO: 3452534 - RNA, 19 nt, Human
guuuccagacuuccuugag

SEQ ID NO: 3452535 - RNA, 20 nt, Human
guuuccagacuuccuugaga

SEQ ID NO: 3452536 - RNA, 14 nt, Human
guuuccagggaggg

SEQ ID NO: 3452537 - RNA, 23 nt, Human
guuuccaguacaccuuucagcca

SEQ ID NO: 3452538 - RNA, 21 nt, Human
guuucccaucccacugcuccc

SEQ ID NO: 3452539 - RNA, 21 nt, Human
guuucccccaacauauaaaau

SEQ ID NO: 3452540 - RNA, 14 nt, Human
guuuccucaggcug

SEQ ID NO: 3452541 - RNA, 18 nt, Human
guuuccucaggcugcugg

SEQ ID NO: 3452542 - RNA, 20 nt, Human
guuuccuccauuugagaaaa

SEQ ID NO: 3452543 - RNA, 22 nt, Human
guuuccucuguucaaagcugcc

SEQ ID NO: 3452544 - RNA, 17 nt, Human
guuuccugacauugucu

SEQ ID NO: 3452545 - RNA, 14 nt, Human
guuuccuggcacug

SEQ ID NO: 3452546 - RNA, 20 nt, Human
guuuccuggcacugcuucca

SEQ ID NO: 3452547 - RNA, 21 nt, Human
guuuccuggcacugcuuccag

SEQ ID NO: 3452548 - RNA, 22 nt, Human
guuuccuggcacugcuuccagu

SEQ ID NO: 3452549 - RNA, 23 nt, Human
guuuccuuguuuaucagauacau

SEQ ID NO: 3452550 - RNA, 21 nt, Human
gcaaaguauuguaaauuauau

SEQ ID NO: 3452551 - RNA, 21 nt, Human
gcaaagucaugcaaaggcugg

SEQ ID NO: 3452552 - RNA, 15 nt, Human
gcaaagucuaaaguu

SEQ ID NO: 3452553 - RNA, 16 nt, Human
gcaaagucuaaaguuu

SEQ ID NO: 3452554 - RNA, 17 nt, Human
gcaaagugagggccgag

SEQ ID NO: 3452555 - RNA, 18 nt, Human
gcaaaguguuuuguacca

SEQ ID NO: 3452556 - RNA, 16 nt, Human
gcaaaguucuguguuu

SEQ ID NO: 3452557 - RNA, 21 nt, Human
gcaaauaaguguauuuugaaa

SEQ ID NO: 3452558 - RNA, 20 nt, Human
gcaaauaaugaucgaaaaaa

SEQ ID NO: 3452559 - RNA, 18 nt, Human
gcaaauacuuagcaaaaa

SEQ ID NO: 3452560 - RNA, 21 nt, Human
gcaaauagaaaacaggaaaaa

SEQ ID NO: 3452561 - RNA, 11 nt, Human
gcaaauauaaa

SEQ ID NO: 3452562 - RNA, 20 nt, Human
gcaaauaucauacuguucaa

SEQ ID NO: 3452563 - RNA, 12 nt, Human
gcaaaucaaugc

SEQ ID NO: 3452564 - RNA, 13 nt, Human
gcaaaucagaaac

SEQ ID NO: 3452565 - RNA, 15 nt, Human
gcaaaucagaaacuu

SEQ ID NO: 3452566 - RNA, 17 nt, Human
gcaaaucaggcuuuugu

SEQ ID NO: 3452567 - RNA, 18 nt, Human
gcaaaucauuuguuuaaa

SEQ ID NO: 3452568 - RNA, 15 nt, Human
gcaaauccuauguga

SEQ ID NO: 3452569 - RNA, 13 nt, Human
gcaaaugacuuug

SEQ ID NO: 3452570 - RNA, 18 nt, Human
gcaaaugccagggcccgc

SEQ ID NO: 3452571 - RNA, 16 nt, Human
gcaaaugugaccugug

SEQ ID NO: 3452572 - RNA, 14 nt, Human
gcaaauguggcucc

SEQ ID NO: 3452573 - RNA, 15 nt, Human
gcaaauguggcuccu

SEQ ID NO: 3452574 - RNA, 23 nt, Human
gcaaauguuaaaaguuuuauaug

SEQ ID NO: 3452575 - RNA, 12 nt, Human
gcaaauguuaca

SEQ ID NO: 3452576 - RNA, 20 nt, Human
gcaaauguuuauuuaaaaga

SEQ ID NO: 3452577 - RNA, 12 nt, Human
gcaaauucucaa

SEQ ID NO: 3452578 - RNA, 12 nt, Human
gcaaauucuuuu

SEQ ID NO: 3452579 - RNA, 13 nt, Human
gcaaauuuauaau

SEQ ID NO: 3452580 - RNA, 21 nt, Human
gcaaauuuauaauuuuaagau

SEQ ID NO: 3452581 - RNA, 15 nt, Human
uaaaugaacaagaga

SEQ ID NO: 3452582 - RNA, 12 nt, Human
uaaaugaagaaa

SEQ ID NO: 3452583 - RNA, 14 nt, Human
uaaaugaauauuuu

SEQ ID NO: 3452584 - RNA, 15 nt, Human
uaaaugaauauuuug

SEQ ID NO: 3452585 - RNA, 21 nt, Human
uaaaugaauauuuugauaaua

SEQ ID NO: 3452586 - RNA, 16 nt, Human
uaaaugagcuauguau

SEQ ID NO: 3452587 - RNA, 20 nt, Human
uaaaugauucaaaaagucac

SEQ ID NO: 3452588 - RNA, 17 nt, Human
uaaaugauucuuaguga

SEQ ID NO: 3452589 - RNA, 15 nt, Human
uaaaugauuuaaauu

SEQ ID NO: 3452590 - RNA, 18 nt, Human
uaaaugcaauauguauua

SEQ ID NO: 3452591 - RNA, 19 nt, Human
uaaaugcagcccauuucuc

SEQ ID NO: 3452592 - RNA, 21 nt, Human
uaaaugcagcccauuucucca

SEQ ID NO: 3452593 - RNA, 19 nt, Human
uaaaugcaguuacaaauua

SEQ ID NO: 3452594 - RNA, 20 nt, Human
uaaaugcauauccugagcca

SEQ ID NO: 3452595 - RNA, 21 nt, Human
uaaaugcauauccugagccau

SEQ ID NO: 3452596 - RNA, 15 nt, Human
uaaaugccauagaaa

SEQ ID NO: 3452597 - RNA, 23 nt, Human
uaaaugccaucaauaaaaaauua

SEQ ID NO: 3452598 - RNA, 17 nt, Human
uaaaugcccagccccuu

SEQ ID NO: 3452599 - RNA, 15 nt, Human
uaaaugcccucuucu

SEQ ID NO: 3452600 - RNA, 13 nt, Human
uaaaugcccugcu

SEQ ID NO: 3452601 - RNA, 11 nt, Human
uaaaugcugcu

SEQ ID NO: 3452602 - RNA, 12 nt, Human
uaaauggccuca

SEQ ID NO: 3452603 - RNA, 22 nt, Human
uaaauggccucauguggcugga

SEQ ID NO: 3452604 - RNA, 22 nt, Human
uaaaugggacuggagucccugu

SEQ ID NO: 3452605 - RNA, 14 nt, Human
uaaaugggggugca

SEQ ID NO: 3452606 - RNA, 17 nt, Human
uaaaugggggugcauuu

SEQ ID NO: 3452607 - RNA, 14 nt, Human
uaaaugguauagca

SEQ ID NO: 3452608 - RNA, 15 nt, Human
uaaaugguguacaua

SEQ ID NO: 3452609 - RNA, 16 nt, Human
uaaaugguguacauaa

SEQ ID NO: 3452610 - RNA, 14 nt, Human
uaaaugguuaaaag

SEQ ID NO: 3452611 - RNA, 14 nt, Human
uaaauguaacaguc

SEQ ID NO: 3452612 - RNA, 18 nt, Human
uaaauguacagacauauu

SEQ ID NO: 3452613 - RNA, 21 nt, Human
uaaauguacagacauauuuaa

SEQ ID NO: 3452614 - RNA, 21 nt, Human
uaaauguaccuucagaauaag

SEQ ID NO: 3452615 - RNA, 15 nt, Human
uaaauguagaaagug

SEQ ID NO: 3452616 - RNA, 18 nt, Human
uaaauguaguucauacuu

SEQ ID NO: 3452617 - RNA, 15 nt, Human
uaaauguauaaauau

SEQ ID NO: 3452618 - RNA, 19 nt, Human
uaaauguauaaauauacag

SEQ ID NO: 3452619 - RNA, 12 nt, Human
uaaauguauacu

SEQ ID NO: 3452620 - RNA, 15 nt, Human
uaaauguauacuaua

SEQ ID NO: 3452621 - RNA, 20 nt, Human
uaaauguauacuauaguacc

SEQ ID NO: 3452622 - RNA, 12 nt, Human
uaaauguauaua

SEQ ID NO: 3452623 - RNA, 13 nt, Human
uaaauguauauac

SEQ ID NO: 3452624 - RNA, 14 nt, Human
uaaauguauauaca

SEQ ID NO: 3452625 - RNA, 18 nt, Human
uaaauguauauacacaua

SEQ ID NO: 3452626 - RNA, 21 nt, Human
uaaaugucacuuuuugaggca

SEQ ID NO: 3452627 - RNA, 22 nt, Human
uaaaugucacuuuuugaggcaa

SEQ ID NO: 3452628 - RNA, 20 nt, Human
uaaaugucuaguuguaacac

SEQ ID NO: 3452629 - RNA, 22 nt, Human
uaaaugucucuuuaaugucaca

SEQ ID NO: 3452630 - RNA, 13 nt, Human
uaaaugucuuaua

SEQ ID NO: 3452631 - RNA, 15 nt, Human
uaaaugucuuuguaa

SEQ ID NO: 3452632 - RNA, 11 nt, Human
uaaaugugaau

SEQ ID NO: 3452633 - RNA, 13 nt, Human
uaaaugugaauua

SEQ ID NO: 3452634 - RNA, 16 nt, Human
uaaaugugcauucuuu

SEQ ID NO: 3452635 - RNA, 13 nt, Human
uaaauguguguau

SEQ ID NO: 3452636 - RNA, 15 nt, Human
uaaauguguguaugu

SEQ ID NO: 3452637 - RNA, 11 nt, Human
uaaauguguug

SEQ ID NO: 3452638 - RNA, 20 nt, Human
uaaauguguuggacaaaugu

SEQ ID NO: 3452639 - RNA, 15 nt, Human
uaaauguguuuuguu

SEQ ID NO: 3452640 - RNA, 21 nt, Human
uaaauguguuuuguuuauuaa

SEQ ID NO: 3452641 - RNA, 14 nt, Human
uaaauguuaaagau

SEQ ID NO: 3452642 - RNA, 21 nt, Human
uaaauguuaaagauguagcaa

SEQ ID NO: 3452643 - RNA, 22 nt, Human
uaaauguuaaagauguagcaaa

SEQ ID NO: 3452644 - RNA, 16 nt, Human
uaaauguuaagaaaaa

SEQ ID NO: 3452645 - RNA, 17 nt, Human
uaaauguuaccucugaa

SEQ ID NO: 3452646 - RNA, 22 nt, Human
uaaauguuaugacuauguaaac

SEQ ID NO: 3452647 - RNA, 13 nt, Human
uaaauguuauuau

SEQ ID NO: 3452648 - RNA, 23 nt, Human
uaaauguuccuuuccuuuguagu

SEQ ID NO: 3452649 - RNA, 10 nt, Human
uaaauguuug

SEQ ID NO: 3452650 - RNA, 11 nt, Human
uaaauguuuga

SEQ ID NO: 3452651 - RNA, 22 nt, Human
uaaauguuuuauaaguucacaa

SEQ ID NO: 3452652 - RNA, 12 nt, Human
uaaauguuuugu

SEQ ID NO: 3452653 - RNA, 18 nt, Human
uaaauguuuuguaaacuu

SEQ ID NO: 3452654 - RNA, 22 nt, Human
uaaauguuuuguaaacuuugaa

SEQ ID NO: 3452655 - RNA, 18 nt, Human
uaaauguuuuucuaugua

SEQ ID NO: 3452656 - RNA, 16 nt, Human
uaaauuaaacaauuua

SEQ ID NO: 3452657 - RNA, 16 nt, Human
uaaauuaaauaaaaua

SEQ ID NO: 3452658 - RNA, 13 nt, Human
uaaauuaaauaua

SEQ ID NO: 3452659 - RNA, 21 nt, Human
uaaauuaaauauauguaugua

SEQ ID NO: 3452660 - RNA, 14 nt, Human
uaaauuaacuuuua

SEQ ID NO: 3452661 - RNA, 15 nt, Human
uaaauuaacuuuuau

SEQ ID NO: 3452662 - RNA, 19 nt, Human
uaaauuaacuuuuauaaac

SEQ ID NO: 3452663 - RNA, 21 nt, Human
uaaauuaacuuuuauaaacuu

SEQ ID NO: 3452664 - RNA, 22 nt, Human
uaaauuaacuuuuauaaacuuu

SEQ ID NO: 3452665 - RNA, 14 nt, Human
uaaauuacaauuuu

SEQ ID NO: 3452666 - RNA, 16 nt, Human
uaaauuacaauuuuau

SEQ ID NO: 3452667 - RNA, 17 nt, Human
uaaauuacaauuuuauc

SEQ ID NO: 3452668 - RNA, 23 nt, Human
uaaauuacuauagcaaaguagua

SEQ ID NO: 3452669 - RNA, 12 nt, Human
uaaauuagaaaa

SEQ ID NO: 3452670 - RNA, 20 nt, Human
uaaauuagaaaauauucucu

SEQ ID NO: 3452671 - RNA, 14 nt, Human
uaaauuaggaauaa

SEQ ID NO: 3452672 - RNA, 16 nt, Human
uaaauuaggaauaaau

SEQ ID NO: 3452673 - RNA, 17 nt, Human
uaaauuaggaauaaaua

SEQ ID NO: 3452674 - RNA, 22 nt, Human
uaaauuaggaggcucaacaaua

SEQ ID NO: 3452675 - RNA, 18 nt, Human
uaaauuaguacagcacuu

SEQ ID NO: 3452676 - RNA, 17 nt, Human
uaaauuauaacuuaaaa

SEQ ID NO: 3452677 - RNA, 19 nt, Human
uaaauuauaaggacugcau

SEQ ID NO: 3452678 - RNA, 21 nt, Human
uaaauuauaaggacugcaugg

SEQ ID NO: 3452679 - RNA, 16 nt, Human
uaaauuauguaaauua

SEQ ID NO: 3452680 - RNA, 14 nt, Human
uaaauuauguuuau

SEQ ID NO: 3452681 - RNA, 17 nt, Human
uaaauuauguuuauaua

SEQ ID NO: 3452682 - RNA, 19 nt, Human
uaaauuauuaguuuacauc

SEQ ID NO: 3452683 - RNA, 18 nt, Human
uaaauuauuguuuuucuu

SEQ ID NO: 3452684 - RNA, 16 nt, Human
uaaauuauuuauuauu

SEQ ID NO: 3452685 - RNA, 16 nt, Human
uaaauucaacuuugua

SEQ ID NO: 3452686 - RNA, 17 nt, Human
uaaauucacaauagaaa

SEQ ID NO: 3452687 - RNA, 20 nt, Human
uaaauucagauauauuuuuc

SEQ ID NO: 3452688 - RNA, 13 nt, Human
uaaauuccacugg

SEQ ID NO: 3452689 - RNA, 14 nt, Human
uaaauuccacugga

SEQ ID NO: 3452690 - RNA, 19 nt, Human
uaaauuccucaacaguguu

SEQ ID NO: 3452691 - RNA, 17 nt, Human
uaaauuccucuuugcuu

SEQ ID NO: 3452692 - RNA, 19 nt, Human
uaaauucugagacaugugu

SEQ ID NO: 3452693 - RNA, 11 nt, Human
uaaauucugau

SEQ ID NO: 3452694 - RNA, 12 nt, Human
uaaauucugauu

SEQ ID NO: 3452695 - RNA, 16 nt, Human
uaaauucugauuucuu

SEQ ID NO: 3452696 - RNA, 17 nt, Human
uaaauucuugcaaagua

SEQ ID NO: 3452697 - RNA, 13 nt, Human
uaaauucuuuauu

SEQ ID NO: 3452698 - RNA, 13 nt, Human
uaaauucuuucau

SEQ ID NO: 3452699 - RNA, 15 nt, Human
uaaauucuuuuuuaa

SEQ ID NO: 3452700 - RNA, 13 nt, Human
uaaauugaaauug

SEQ ID NO: 3452701 - RNA, 18 nt, Human
uaaauugacacuuaaaaa

SEQ ID NO: 3452702 - RNA, 13 nt, Human
uaaauugauguug

SEQ ID NO: 3452703 - RNA, 18 nt, Human
uaaauugcauaaagcaua

SEQ ID NO: 3452704 - RNA, 12 nt, Human
uaaauugcauca

SEQ ID NO: 3452705 - RNA, 18 nt, Human
uaaauugcaucacuguau

SEQ ID NO: 3452706 - RNA, 15 nt, Human
uaaauugcaugcugc

SEQ ID NO: 3452707 - RNA, 19 nt, Human
uaaauugcaugcugcuuua

SEQ ID NO: 3452708 - RNA, 19 nt, Human
uaaauugcucacaguuauu

SEQ ID NO: 3452709 - RNA, 17 nt, Human
uaaauuggcauggaaau

SEQ ID NO: 3452710 - RNA, 21 nt, Human
uaaauuggccugguauggcug

SEQ ID NO: 3452711 - RNA, 17 nt, Human
uaaauuguacagccggc

SEQ ID NO: 3452712 - RNA, 14 nt, Human
uaaauuguauauuc

SEQ ID NO: 3452713 - RNA, 19 nt, Human
uaaauuguauauucacuuu

SEQ ID NO: 3452714 - RNA, 14 nt, Human
uaaauugucuuaau

SEQ ID NO: 3452715 - RNA, 16 nt, Human
uaaauugucuuuaaaa

SEQ ID NO: 3452716 - RNA, 22 nt, Human
uaaauugucuuuaaaaacuguu

SEQ ID NO: 3452717 - RNA, 23 nt, Human
uaaauugucuuuaaaaacuguuu

SEQ ID NO: 3452718 - RNA, 20 nt, Human
gcaaggcccgagcagcugag

SEQ ID NO: 3452719 - RNA, 22 nt, Human
gcaaggcccgagcagcugagca

SEQ ID NO: 3452720 - RNA, 16 nt, Human
gcaaggcccugcugcc

SEQ ID NO: 3452721 - RNA, 13 nt, Human
gcaaggcugugcu

SEQ ID NO: 3452722 - RNA, 16 nt, Human
gcaagggcagggacag

SEQ ID NO: 3452723 - RNA, 19 nt, Human
gcaagggcggccuuuccca

SEQ ID NO: 3452724 - RNA, 14 nt, Human
gcaagggcucccca

SEQ ID NO: 3452725 - RNA, 18 nt, Human
gcaaggggugccugggaa

SEQ ID NO: 3452726 - RNA, 14 nt, Human
gcaagguaaaauuu

SEQ ID NO: 3452727 - RNA, 22 nt, Human
uaagcaaauacuuagcaaaaag

SEQ ID NO: 3452728 - RNA, 16 nt, Human
uaagcaaauuucaaaa

SEQ ID NO: 3452729 - RNA, 21 nt, Human
uaagcaaauuucaaaagacau

SEQ ID NO: 3452730 - RNA, 23 nt, Human
uaagcaaauuucaaaagacaugu

SEQ ID NO: 3452731 - RNA, 23 nt, Human
uaagcaacaucuagcaaauguua

SEQ ID NO: 3452732 - RNA, 13 nt, Human
uaagcaagagaga

SEQ ID NO: 3452733 - RNA, 22 nt, Human
uaagcaccuguaaugugcgagg

SEQ ID NO: 3452734 - RNA, 18 nt, Human
uaagcacucuuaaagcaa

SEQ ID NO: 3452735 - RNA, 16 nt, Human
uaagcacugugcuaau

SEQ ID NO: 3452736 - RNA, 13 nt, Human
uaagcagaaagug

SEQ ID NO: 3452737 - RNA, 20 nt, Human
uaagcagaccacugauaaaa

SEQ ID NO: 3452738 - RNA, 15 nt, Human
uaagcagaggagggg

SEQ ID NO: 3452739 - RNA, 16 nt, Human
uaagcagaggaggggc

SEQ ID NO: 3452740 - RNA, 16 nt, Human
uaagcagcuaaauuuu

SEQ ID NO: 3452741 - RNA, 17 nt, Human
uaagcagcuuauuguuu

SEQ ID NO: 3452742 - RNA, 18 nt, Human
uaagcaggcgcaagggag

SEQ ID NO: 3452743 - RNA, 12 nt, Human
uaagcagucccu

SEQ ID NO: 3452744 - RNA, 18 nt, Human
uaagcagugucuguguuu

SEQ ID NO: 3452745 - RNA, 18 nt, Human
uaagcauacuuuguaaau

SEQ ID NO: 3452746 - RNA, 19 nt, Human
uaagcauauauuuuuauau

SEQ ID NO: 3452747 - RNA, 21 nt, Human
uaagcauauauuuuuauauuu

SEQ ID NO: 3452748 - RNA, 21 nt, Human
uaagcaucauuauuuauguau

SEQ ID NO: 3452749 - RNA, 18 nt, Human
uaagcauuaccacucagg

SEQ ID NO: 3452750 - RNA, 17 nt, Human
uaagcauuacucuugua

SEQ ID NO: 3452751 - RNA, 14 nt, Human
uaagcauugccugg

SEQ ID NO: 3452752 - RNA, 15 nt, Human
uaagcauugugagua

SEQ ID NO: 3452753 - RNA, 12 nt, Human
uaagcauuguuu

SEQ ID NO: 3452754 - RNA, 15 nt, Human
uaagcauuguuugcu

SEQ ID NO: 3452755 - RNA, 17 nt, Human
uaagcauuguuugcuua

SEQ ID NO: 3452756 - RNA, 15 nt, Human
uaagccaaaacugag

SEQ ID NO: 3452757 - RNA, 18 nt, Human
uaagccaaaacugagcau

SEQ ID NO: 3452758 - RNA, 12 nt, Human
uaagccaaagaa

SEQ ID NO: 3452759 - RNA, 23 nt, Human
uaagccaaagaaaugaacauucc

SEQ ID NO: 3452760 - RNA, 14 nt, Human
uaagccaagggccu

SEQ ID NO: 3452761 - RNA, 15 nt, Human
uaagccaauuuuucu

SEQ ID NO: 3452762 - RNA, 18 nt, Human
uaagccaauuuuucugca

SEQ ID NO: 3452763 - RNA, 20 nt, Human
uaagccagacaucaacagau

SEQ ID NO: 3452764 - RNA, 17 nt, Human
uaagccagcaccggacc

SEQ ID NO: 3452765 - RNA, 13 nt, Human
uaagccagccugg

SEQ ID NO: 3452766 - RNA, 14 nt, Human
uaagccagccuggu

SEQ ID NO: 3452767 - RNA, 24 nt, Human
uaagccagccugguccaugcaggg

SEQ ID NO: 3452768 - RNA, 18 nt, Human
uaagcccacaguauauuu

SEQ ID NO: 3452769 - RNA, 17 nt, Human
uaagccccagcaagcaa

SEQ ID NO: 3452770 - RNA, 13 nt, Human
uaagcccccgcug

SEQ ID NO: 3452771 - RNA, 20 nt, Human
uaagcccugucgagacacuu

SEQ ID NO: 3452772 - RNA, 17 nt, Human
uaagccuaccugcucuc

SEQ ID NO: 3452773 - RNA, 19 nt, Human
uaagccucaucaucagagc

SEQ ID NO: 3452774 - RNA, 12 nt, Human
uaagccuguggc

SEQ ID NO: 3452775 - RNA, 22 nt, Human
uaaacuguuagcacuguugaug

SEQ ID NO: 3452776 - RNA, 13 nt, Human
uaaacuguugcuc

SEQ ID NO: 3452777 - RNA, 13 nt, Human
uaaacuuaaucua

SEQ ID NO: 3452778 - RNA, 18 nt, Human
uaaacuuaaucuaaaugg

SEQ ID NO: 3452779 - RNA, 19 nt, Human
uaaacuuaaucuaaaugga

SEQ ID NO: 3452780 - RNA, 15 nt, Human
uaaacuuagaauaaa

SEQ ID NO: 3452781 - RNA, 19 nt, Human
uaaacuuagaauaaaauug

SEQ ID NO: 3452782 - RNA, 21 nt, Human
uaaacuuagaauaaaauugua

SEQ ID NO: 3452783 - RNA, 15 nt, Human
uaaacuuauaaauca

SEQ ID NO: 3452784 - RNA, 16 nt, Human
uaaacuuauaacccac

SEQ ID NO: 3452785 - RNA, 13 nt, Human
uaaacuuaugaau

SEQ ID NO: 3452786 - RNA, 15 nt, Human
uaaacuuaugaaugu

SEQ ID NO: 3452787 - RNA, 12 nt, Human
uaaacuucagca

SEQ ID NO: 3452788 - RNA, 14 nt, Human
uaaacuucagcacc

SEQ ID NO: 3452789 - RNA, 20 nt, Human
uaaacuucauggucaugggu

SEQ ID NO: 3452790 - RNA, 15 nt, Human
uaaacuuccaaagaa

SEQ ID NO: 3452791 - RNA, 18 nt, Human
uaaacuuccccaucuucu

SEQ ID NO: 3452792 - RNA, 14 nt, Human
uaaacuucucugaa

SEQ ID NO: 3452793 - RNA, 17 nt, Human
uaaacuucucugaaggg

SEQ ID NO: 3452794 - RNA, 22 nt, Human
uaaacuucugcaacaagcaugc

SEQ ID NO: 3452795 - RNA, 23 nt, Human
uaaacuucugcaacaagcaugca

SEQ ID NO: 3452796 - RNA, 22 nt, Human
uaaacuuguuugcugugaacaa

SEQ ID NO: 3452797 - RNA, 12 nt, Human
uaaacuuuaaua

SEQ ID NO: 3452798 - RNA, 16 nt, Human
uaaacuuuaccuuuuu

SEQ ID NO: 3452799 - RNA, 13 nt, Human
uaaacuuucacac

SEQ ID NO: 3452800 - RNA, 11 nt, Human
uaaacuuugaa

SEQ ID NO: 3452801 - RNA, 15 nt, Human
uaaacuuuuaauuca

SEQ ID NO: 3452802 - RNA, 13 nt, Human
uaaacuuuucuga

SEQ ID NO: 3452803 - RNA, 14 nt, Human
uaaacuuuucugau

SEQ ID NO: 3452804 - RNA, 20 nt, Human
uaaacuuuuuucuuacuguc

SEQ ID NO: 3452805 - RNA, 15 nt, Human
uaaacuuuuuuucaa

SEQ ID NO: 3452806 - RNA, 18 nt, Human
uaaacuuuuuuucuguac

SEQ ID NO: 3452807 - RNA, 17 nt, Human
uaaacuuuuuuuugaga

SEQ ID NO: 3452808 - RNA, 18 nt, Human
uaaacuuuuuuuugagaa

SEQ ID NO: 3452809 - RNA, 9 nt, Human
uaaagaaaa

SEQ ID NO: 3452810 - RNA, 11 nt, Human
uaaagaaaaaa

SEQ ID NO: 3452811 - RNA, 12 nt, Human
uaaagaaaaaaa

SEQ ID NO: 3452812 - RNA, 14 nt, Human
uaaagaaaaaaaua

SEQ ID NO: 3452813 - RNA, 16 nt, Human
uaaagaaaaaaauguc

SEQ ID NO: 3452814 - RNA, 22 nt, Human
uaaagaaaaaaaugucaaaagu

SEQ ID NO: 3452815 - RNA, 20 nt, Human
uaaagaaaaaaauugaaaug

SEQ ID NO: 3452816 - RNA, 22 nt, Human
uaaagaaaaaaauugaaaugua

SEQ ID NO: 3452817 - RNA, 17 nt, Human
uaaagaaaaauauuuaa

SEQ ID NO: 3452818 - RNA, 15 nt, Human
uaaagaaaagaugca

SEQ ID NO: 3452819 - RNA, 13 nt, Human
uaaagaaaauaaa

SEQ ID NO: 3452820 - RNA, 14 nt, Human
uaaagaaaauaaaa

SEQ ID NO: 3452821 - RNA, 19 nt, Human
uaaagaaacagcuuucaag

SEQ ID NO: 3452822 - RNA, 14 nt, Human
uaaagaaacauggu

SEQ ID NO: 3452823 - RNA, 13 nt, Human
uaaagaaagagag

SEQ ID NO: 3452824 - RNA, 14 nt, Human
uaaagaaagagaga

SEQ ID NO: 3452825 - RNA, 15 nt, Human
uaaagaaagagagaa

SEQ ID NO: 3452826 - RNA, 19 nt, Human
uaaagaaagagagaaaaua

SEQ ID NO: 3452827 - RNA, 22 nt, Human
uaaagaaagagagaaaauaaaa

SEQ ID NO: 3452828 - RNA, 16 nt, Human
uaaagaaagcaacuuu

SEQ ID NO: 3452829 - RNA, 13 nt, Human
uaaagaaaggaaa

SEQ ID NO: 3452830 - RNA, 15 nt, Human
uaaagaaaggaaaag

SEQ ID NO: 3452831 - RNA, 22 nt, Human
uaaagaaaggaaaagaaaacaa

SEQ ID NO: 3452832 - RNA, 11 nt, Human
uaaagaaaguc

SEQ ID NO: 3452833 - RNA, 17 nt, Human
uaaagaaagucgaauua

SEQ ID NO: 3452834 - RNA, 16 nt, Human
uaaagaaaguguauuu

SEQ ID NO: 3452835 - RNA, 24 nt, Human
uaaagaaaguguauuuggaaauaa

SEQ ID NO: 3452836 - RNA, 16 nt, Human
uaaagaaauagaacaa

SEQ ID NO: 3452837 - RNA, 17 nt, Human
uaaagaaaugucuuaau

SEQ ID NO: 3452838 - RNA, 16 nt, Human
uaaagaaauugcaaua

SEQ ID NO: 3452839 - RNA, 15 nt, Human
uaaagaaauuuacua

SEQ ID NO: 3452840 - RNA, 16 nt, Human
uaaagaaauuuacuau

SEQ ID NO: 3452841 - RNA, 17 nt, Human
uaaagaaauuuacuaua

SEQ ID NO: 3452842 - RNA, 19 nt, Human
uaaagaaauuuacuauaua

SEQ ID NO: 3452843 - RNA, 19 nt, Human
uaaagaacacccuauauuu

SEQ ID NO: 3452844 - RNA, 14 nt, Human
uaaagaacugcaca

SEQ ID NO: 3452845 - RNA, 20 nt, Human
uaaagaacugcacaugaaga

SEQ ID NO: 3452846 - RNA, 13 nt, Human
uaaagaagauguu

SEQ ID NO: 3452847 - RNA, 13 nt, Human
uaaagaagcaaua

SEQ ID NO: 3452848 - RNA, 16 nt, Human
uaaagaaggaugaugu

SEQ ID NO: 3452849 - RNA, 17 nt, Human
uaaagaaguauuuuuag

SEQ ID NO: 3452850 - RNA, 15 nt, Human
uaaagaauaauaugc

SEQ ID NO: 3452851 - RNA, 18 nt, Human
uaaagaauacuugaacuu

SEQ ID NO: 3452852 - RNA, 15 nt, Human
uaaagaauaggacuu

SEQ ID NO: 3452853 - RNA, 14 nt, Human
uaaagaauauauau

SEQ ID NO: 3452854 - RNA, 15 nt, Human
uaaagaaucauuauu

SEQ ID NO: 3452855 - RNA, 13 nt, Human
uaaagaauuauuu

SEQ ID NO: 3452856 - RNA, 16 nt, Human
uaaagaauuauuuugu

SEQ ID NO: 3452857 - RNA, 15 nt, Human
uaaagaauucaaauu

SEQ ID NO: 3452858 - RNA, 19 nt, Human
uaaagacaaagacaaauuc

SEQ ID NO: 3452859 - RNA, 20 nt, Human
uaaagacaaagacaaauucu

SEQ ID NO: 3452860 - RNA, 21 nt, Human
uaaagacaaccauauuuagca

SEQ ID NO: 3452861 - RNA, 15 nt, Human
uaaagacaccuacug

SEQ ID NO: 3452862 - RNA, 21 nt, Human
uaaagacagggaagagcagaa

SEQ ID NO: 3452863 - RNA, 11 nt, Human
uaaagaccaaa

SEQ ID NO: 3452864 - RNA, 19 nt, Human
uaaagacccagggggagaa

SEQ ID NO: 3452865 - RNA, 19 nt, Human
uaaagacccuccuauucua

SEQ ID NO: 3452866 - RNA, 17 nt, Human
uaaagacgauuugucag

SEQ ID NO: 3452867 - RNA, 23 nt, Human
uaaagacguuuuauaagcaucau

SEQ ID NO: 3452868 - RNA, 20 nt, Human
uaaagacuggcuuuuauuaa

SEQ ID NO: 3452869 - RNA, 13 nt, Human
uaaagacugguuu

SEQ ID NO: 3452870 - RNA, 22 nt, Human
uaaagacugguuuucugccaau

SEQ ID NO: 3452871 - RNA, 16 nt, Human
uaaagacuuuuaugau

SEQ ID NO: 3452872 - RNA, 14 nt, Human
uaaagagaaaauug

SEQ ID NO: 3452873 - RNA, 15 nt, Human
uaaagagaaacuuug

SEQ ID NO: 3452874 - RNA, 12 nt, Human
uaaagagaauga

SEQ ID NO: 3452875 - RNA, 22 nt, Human
uaaagagacagugauauuggaa

SEQ ID NO: 3452876 - RNA, 22 nt, Human
uaaagagaccuaccucagguug

SEQ ID NO: 3452877 - RNA, 13 nt, Human
uaaagagacgaau

SEQ ID NO: 3452878 - RNA, 19 nt, Human
uaaagagagaacaggacua

SEQ ID NO: 3452879 - RNA, 16 nt, Human
uaaagagcccuugccu

SEQ ID NO: 3452880 - RNA, 13 nt, Human
uaaagagucuaga

SEQ ID NO: 3452881 - RNA, 19 nt, Human
uaaagagucuagauucaaa

SEQ ID NO: 3452882 - RNA, 21 nt, Human
uaaagagucuagauucaaagg

SEQ ID NO: 3452883 - RNA, 18 nt, Human
uaaagaguuaguuugagu

SEQ ID NO: 3452884 - RNA, 21 nt, Human
uaaagaguuguguuguucuuu

SEQ ID NO: 3452885 - RNA, 17 nt, Human
uaaagauaaagccagaa

SEQ ID NO: 3452886 - RNA, 15 nt, Human
uaaagauauuauuca

SEQ ID NO: 3452887 - RNA, 16 nt, Human
uaaagauauuauucac

SEQ ID NO: 3452888 - RNA, 16 nt, Human
uaaagaucuacaugaa

SEQ ID NO: 3452889 - RNA, 22 nt, Human
uaaagaugcaaggaccaggacu

SEQ ID NO: 3452890 - RNA, 13 nt, Human
uaaagauggaaaa

SEQ ID NO: 3452891 - RNA, 19 nt, Human
uaaagauggaguuucuaag

SEQ ID NO: 3452892 - RNA, 15 nt, Human
uaaagauguuaaaaa

SEQ ID NO: 3452893 - RNA, 20 nt, Human
uaaagauucuauaguucuag

SEQ ID NO: 3452894 - RNA, 17 nt, Human
uaaagauuuaggccaau

SEQ ID NO: 3452895 - RNA, 15 nt, Human
uaaagauuuaucaaa

SEQ ID NO: 3452896 - RNA, 22 nt, Human
uaaagauuuaucaaaucaguca

SEQ ID NO: 3452897 - RNA, 15 nt, Human
uaaagauuucuguuc

SEQ ID NO: 3452898 - RNA, 13 nt, Human
uaaagauuugcuu

SEQ ID NO: 3452899 - RNA, 19 nt, Human
uaaagauuuugaucucaca

SEQ ID NO: 3452900 - RNA, 12 nt, Human
uaaagauuuuuu

SEQ ID NO: 3452901 - RNA, 21 nt, Human
uaaagauuuuuuaauaauuua

SEQ ID NO: 3452902 - RNA, 22 nt, Human
uaaagauuuuuuaauaauuuag

SEQ ID NO: 3452903 - RNA, 21 nt, Human
uaaagcaaaaaaugaaugucu

SEQ ID NO: 3452904 - RNA, 19 nt, Human
uaaagcaaccaaaaagaaa

SEQ ID NO: 3452905 - RNA, 21 nt, Human
uaaagcaaccaaaaagaaaaa

SEQ ID NO: 3452906 - RNA, 22 nt, Human
uaaagcaacugucuauuucugc

SEQ ID NO: 3452907 - RNA, 20 nt, Human
uaaagcaacuguuaugaaau

SEQ ID NO: 3452908 - RNA, 15 nt, Human
uaaagcaauagaaac

SEQ ID NO: 3452909 - RNA, 13 nt, Human
uaaagcaauuuuc

SEQ ID NO: 3452910 - RNA, 19 nt, Human
uaaagcaauuuuccuugaa

SEQ ID NO: 3452911 - RNA, 21 nt, Human
uaaagcaauuuuccuugaagc

SEQ ID NO: 3452912 - RNA, 23 nt, Human
uaaagcaauuuuccuugaagccg

SEQ ID NO: 3452913 - RNA, 22 nt, Human
uaaagcacagucugaugacaca

SEQ ID NO: 3452914 - RNA, 13 nt, Human
uaaagcagccagc

SEQ ID NO: 3452915 - RNA, 17 nt, Human
uaaagcagguucuuguu

SEQ ID NO: 3452916 - RNA, 13 nt, Human
uaaagcaguggac

SEQ ID NO: 3452917 - RNA, 21 nt, Human
uaaagcauaaguauacaguuc

SEQ ID NO: 3452918 - RNA, 17 nt, Human
uaaagcaugaaauguga

SEQ ID NO: 3452919 - RNA, 19 nt, Human
uaaagcaugaaaugugaau

SEQ ID NO: 3452920 - RNA, 21 nt, Human
uaaagcaugaaaugugaauuu

SEQ ID NO: 3452921 - RNA, 13 nt, Human
uaaagcauuccaa

SEQ ID NO: 3452922 - RNA, 16 nt, Human
uaaagcauuccaacaa

SEQ ID NO: 3452923 - RNA, 12 nt, Human
uaaagcauuuau

SEQ ID NO: 3452924 - RNA, 14 nt, Human
uaaagccagccuga

SEQ ID NO: 3452925 - RNA, 21 nt, Human
uaaagccucaagguuuuaggu

SEQ ID NO: 3452926 - RNA, 17 nt, Human
gcaccauucugacucgg

SEQ ID NO: 3452927 - RNA, 20 nt, Human
gcaccauuuaaaaacaggca

SEQ ID NO: 3452928 - RNA, 14 nt, Human
gcacccacccuggg

SEQ ID NO: 3452929 - RNA, 18 nt, Human
gcacccaccguggaggag

SEQ ID NO: 3452930 - RNA, 19 nt, Human
gcacccaccguggaggagg

SEQ ID NO: 3452931 - RNA, 12 nt, Human
gcacccagaaca

SEQ ID NO: 3452932 - RNA, 11 nt, Human
gcacccagccc

SEQ ID NO: 3452933 - RNA, 14 nt, Human
gcacccagcccaga

SEQ ID NO: 3452934 - RNA, 12 nt, Human
gcacccagcccu

SEQ ID NO: 3452935 - RNA, 14 nt, Human
gcacccagcccugg

SEQ ID NO: 3452936 - RNA, 15 nt, Human
gcacccagcccuggu

SEQ ID NO: 3452937 - RNA, 15 nt, Human
gcacccauccuagag

SEQ ID NO: 3452938 - RNA, 17 nt, Human
gcaccccaaagcuuucc

SEQ ID NO: 3452939 - RNA, 20 nt, Human
gcaccccaaagcuuuccugc

SEQ ID NO: 3452940 - RNA, 22 nt, Human
gcaccccagcuggggccaggcu

SEQ ID NO: 3452941 - RNA, 14 nt, Human
gcacccccacccuu

SEQ ID NO: 3452942 - RNA, 15 nt, Human
gcacccccacccuuu

SEQ ID NO: 3452943 - RNA, 18 nt, Human
gcacccccacccuuuggg

SEQ ID NO: 3452944 - RNA, 13 nt, Human
gcacccccagccu

SEQ ID NO: 3452945 - RNA, 15 nt, Human
gcacccccagccugg

SEQ ID NO: 3452946 - RNA, 17 nt, Human
gcacccccagccugggc

SEQ ID NO: 3452947 - RNA, 18 nt, Human
gcacccccagccugggcc

SEQ ID NO: 3452948 - RNA, 23 nt, Human
gcacccccagccugggccuaugg

SEQ ID NO: 3452949 - RNA, 13 nt, Human
gcaccccccuggg

SEQ ID NO: 3452950 - RNA, 14 nt, Human
gcaccccccugggc

SEQ ID NO: 3452951 - RNA, 21 nt, Human
gcaccccccugggcugagaga

SEQ ID NO: 3452952 - RNA, 19 nt, Human
gcaccccccuguucuaagg

SEQ ID NO: 3452953 - RNA, 20 nt, Human
gcaccccccuguucuaaggg

SEQ ID NO: 3452954 - RNA, 14 nt, Human
gcacccccugcagc

SEQ ID NO: 3452955 - RNA, 15 nt, Human
gcacccccugcagcu

SEQ ID NO: 3452956 - RNA, 19 nt, Human
gcacccccugcagcuugua

SEQ ID NO: 3452957 - RNA, 16 nt, Human
gcaccccuuccaugug

SEQ ID NO: 3452958 - RNA, 15 nt, Human
gcaccccuuccuggg

SEQ ID NO: 3452959 - RNA, 17 nt, Human
gcaccccuucucuccuc

SEQ ID NO: 3452960 - RNA, 20 nt, Human
gcaccccuucucuccucccc

SEQ ID NO: 3452961 - RNA, 16 nt, Human
gcacccgccucucccg

SEQ ID NO: 3452962 - RNA, 15 nt, Human
gcacccggccccugc

SEQ ID NO: 3452963 - RNA, 17 nt, Human
gcacccggccccugcug

SEQ ID NO: 3452964 - RNA, 23 nt, Human
gcacccgggcucagggaccacag

SEQ ID NO: 3452965 - RNA, 14 nt, Human
gcacccuauaaauc

SEQ ID NO: 3452966 - RNA, 16 nt, Human
gcacccucaggcaggu

SEQ ID NO: 3452967 - RNA, 19 nt, Human
gcacccucaggcagguggg

SEQ ID NO: 3452968 - RNA, 20 nt, Human
gcacccucauacacagaaac

SEQ ID NO: 3452969 - RNA, 14 nt, Human
gcacccuccacccu

SEQ ID NO: 3452970 - RNA, 19 nt, Human
gcacccuccacccuguccc

SEQ ID NO: 3452971 - RNA, 22 nt, Human
gcacccuccacccuguccccca

SEQ ID NO: 3452972 - RNA, 14 nt, Human
gcacccuccccucc

SEQ ID NO: 3452973 - RNA, 17 nt, Human
gcacccucuccagauga

SEQ ID NO: 3452974 - RNA, 12 nt, Human
gcacccucuggc

SEQ ID NO: 3452975 - RNA, 13 nt, Human
gcacccugagggc

SEQ ID NO: 3452976 - RNA, 15 nt, Human
gcacccugagggcgg

SEQ ID NO: 3452977 - RNA, 19 nt, Human
gcacccuguggcccuggcu

SEQ ID NO: 3452978 - RNA, 12 nt, Human
gcacccuucuuu

SEQ ID NO: 3452979 - RNA, 15 nt, Human
gcacccuucuuuucu

SEQ ID NO: 3452980 - RNA, 14 nt, Human
gcaccgaagcccag

SEQ ID NO: 3452981 - RNA, 15 nt, Human
gcaccggcuggccug

SEQ ID NO: 3452982 - RNA, 19 nt, Human
gcaccggcuggccuggccc

SEQ ID NO: 3452983 - RNA, 23 nt, Human
gcaccggcuggccuggccccuca

SEQ ID NO: 3452984 - RNA, 14 nt, Human
gcaccgggccacag

SEQ ID NO: 3452985 - RNA, 16 nt, Human
gcaccggggccugggc

SEQ ID NO: 3452986 - RNA, 19 nt, Human
gcaccggggccugggcagg

SEQ ID NO: 3452987 - RNA, 20 nt, Human
gcaccgugucaagcugcucu

SEQ ID NO: 3452988 - RNA, 14 nt, Human
gcaccuaaagcagc

SEQ ID NO: 3452989 - RNA, 17 nt, Human
gcaccuaaagcagccag

SEQ ID NO: 3452990 - RNA, 21 nt, Human
gcaccuacaguguacagucuu

SEQ ID NO: 3452991 - RNA, 17 nt, Human
gcaccuaccaccacgcc

SEQ ID NO: 3452992 - RNA, 23 nt, Human
gcaccuaccaucagggacaggau

SEQ ID NO: 3452993 - RNA, 17 nt, Human
gcaccuauagucccagc

SEQ ID NO: 3452994 - RNA, 16 nt, Human
gcaccucagccugcac

SEQ ID NO: 3452995 - RNA, 18 nt, Human
gcaccucagccugcacag

SEQ ID NO: 3452996 - RNA, 16 nt, Human
gcaccuccaggccugu

SEQ ID NO: 3452997 - RNA, 17 nt, Human
gcaccucccagccccug

SEQ ID NO: 3452998 - RNA, 14 nt, Human
gcaccucccauccu

SEQ ID NO: 3452999 - RNA, 17 nt, Human
gcaccucccauccuaau

SEQ ID NO: 3453000 - RNA, 13 nt, Human
gcaccucccccca

SEQ ID NO: 3453001 - RNA, 21 nt, Human
gcaccuccccccacugcaggc

SEQ ID NO: 3453002 - RNA, 12 nt, Human
gcaccuccucag

SEQ ID NO: 3453003 - RNA, 17 nt, Human
gcaccuccucagccuga

SEQ ID NO: 3453004 - RNA, 11 nt, Human
gcaccuccucg

SEQ ID NO: 3453005 - RNA, 20 nt, Human
gcaccuccucggcuggcugu

SEQ ID NO: 3453006 - RNA, 15 nt, Human
gcaccuccugccucg

SEQ ID NO: 3453007 - RNA, 16 nt, Human
gcaccugccagccugg

SEQ ID NO: 3453008 - RNA, 17 nt, Human
gcaccugcccccuggug

SEQ ID NO: 3453009 - RNA, 12 nt, Human
gcaccugccuca

SEQ ID NO: 3453010 - RNA, 15 nt, Human
gcaccugccucagga

SEQ ID NO: 3453011 - RNA, 16 nt, Human
gcaccugccucaggac

SEQ ID NO: 3453012 - RNA, 15 nt, Human
gcaccugcucucuug

SEQ ID NO: 3453013 - RNA, 12 nt, Human
gcaccugcuguc

SEQ ID NO: 3453014 - RNA, 15 nt, Human
gcaccugcugucugg

SEQ ID NO: 3453015 - RNA, 20 nt, Human
gcaccugcuucaugcucagc

SEQ ID NO: 3453016 - RNA, 21 nt, Human
gcaccuggaauauauaaccag

SEQ ID NO: 3453017 - RNA, 20 nt, Human
gcaccuggcugagccuggcu

SEQ ID NO: 3453018 - RNA, 20 nt, Human
gcaccugggcccuggggccu

SEQ ID NO: 3453019 - RNA, 18 nt, Human
gcacuguccugcuccaca

SEQ ID NO: 3453020 - RNA, 20 nt, Human
gcacuguccugcuccacagu

SEQ ID NO: 3453021 - RNA, 21 nt, Human
gcacuguccugcuccacagug

SEQ ID NO: 3453022 - RNA, 22 nt, Human
gcacuguccugcuccacagugu

SEQ ID NO: 3453023 - RNA, 17 nt, Human
gcacugugaaggacccu

SEQ ID NO: 3453024 - RNA, 11 nt, Human
gcacugugcua

SEQ ID NO: 3453025 - RNA, 16 nt, Human
gcacuguuccagccug

SEQ ID NO: 3453026 - RNA, 18 nt, Human
gcacuguucccccugugc

SEQ ID NO: 3453027 - RNA, 17 nt, Human
gcacuguugauguaucu

SEQ ID NO: 3453028 - RNA, 19 nt, Human
gcacuguuuucuaguguau

SEQ ID NO: 3453029 - RNA, 22 nt, Human
gcacuguuuucuaguguaucaa

SEQ ID NO: 3453030 - RNA, 13 nt, Human
gcacuuaaagaag

SEQ ID NO: 3453031 - RNA, 18 nt, Human
gcacuuaaagcuuucaga

SEQ ID NO: 3453032 - RNA, 22 nt, Human
gcacuuaacaagcucccaggcc

SEQ ID NO: 3453033 - RNA, 19 nt, Human
gcacuuaaggcacucuguu

SEQ ID NO: 3453034 - RNA, 22 nt, Human
gcacuuacagauaggccuucuu

SEQ ID NO: 3453035 - RNA, 23 nt, Human
gcacuuauugaccauuuuuuaau

SEQ ID NO: 3453036 - RNA, 15 nt, Human
gcacuucacagagug

SEQ ID NO: 3453037 - RNA, 21 nt, Human
gcacuucagaauuccauaucu

SEQ ID NO: 3453038 - RNA, 14 nt, Human
gcacuucaggaggc

SEQ ID NO: 3453039 - RNA, 19 nt, Human
gcacuucagggcagauuuu

SEQ ID NO: 3453040 - RNA, 18 nt, Human
gcacuucaucuggcugcc

SEQ ID NO: 3453041 - RNA, 15 nt, Human
gcacuucauguaaag

SEQ ID NO: 3453042 - RNA, 18 nt, Human
gcacuucauguaaagugu

SEQ ID NO: 3453043 - RNA, 12 nt, Human
gcacuuccaaaa

SEQ ID NO: 3453044 - RNA, 14 nt, Human
gcacuucccugcug

SEQ ID NO: 3453045 - RNA, 21 nt, Human
gcacuuccuuuuaccugccca

SEQ ID NO: 3453046 - RNA, 21 nt, Human
gcacuucugccugaggggcag

SEQ ID NO: 3453047 - RNA, 14 nt, Human
gcacuugcagacuc

SEQ ID NO: 3453048 - RNA, 14 nt, Human
gcacuugcaucugu

SEQ ID NO: 3453049 - RNA, 14 nt, Human
gcacuugccugggu

SEQ ID NO: 3453050 - RNA, 22 nt, Human
gcacuuggagccaaggguucag

SEQ ID NO: 3453051 - RNA, 13 nt, Human
gcacuuggcccuu

SEQ ID NO: 3453052 - RNA, 22 nt, Human
gcacuugggggcucagcaaggc

SEQ ID NO: 3453053 - RNA, 12 nt, Human
gcacuuguauau

SEQ ID NO: 3453054 - RNA, 23 nt, Human
gcacuugucucauuuuaauguaa

SEQ ID NO: 3453055 - RNA, 23 nt, Human
gcacuugugauuauuuauuauuu

SEQ ID NO: 3453056 - RNA, 19 nt, Human
gcacuuuagaauaugccuu

SEQ ID NO: 3453057 - RNA, 16 nt, Human
gcacuuuccuccuggc

SEQ ID NO: 3453058 - RNA, 17 nt, Human
gcacuuuccuccuggca

SEQ ID NO: 3453059 - RNA, 21 nt, Human
gcacuuucuacaaugugaacu

SEQ ID NO: 3453060 - RNA, 20 nt, Human
gcacuuucuauccucuguaa

SEQ ID NO: 3453061 - RNA, 13 nt, Human
gcacuuugaaaua

SEQ ID NO: 3453062 - RNA, 17 nt, Human
gcacuuugaaauaccuc

SEQ ID NO: 3453063 - RNA, 21 nt, Human
gcacuuugaugucauguguuc

SEQ ID NO: 3453064 - RNA, 17 nt, Human
gcacuuugcuuuaauau

SEQ ID NO: 3453065 - RNA, 16 nt, Human
gcacuuuggcuuauaa

SEQ ID NO: 3453066 - RNA, 20 nt, Human
gcacuuugggaggcugaggc

SEQ ID NO: 3453067 - RNA, 19 nt, Human
gcagaaaaaggcugugcug

SEQ ID NO: 3453068 - RNA, 13 nt, Human
gcagaaaacauug

SEQ ID NO: 3453069 - RNA, 16 nt, Human
gcagaaaacccuuggg

SEQ ID NO: 3453070 - RNA, 17 nt, Human
gcagaaaagcaccugcc

SEQ ID NO: 3453071 - RNA, 21 nt, Human
gcagaaaagcaccugccgacc

SEQ ID NO: 3453072 - RNA, 16 nt, Human
gcagaaaauugccuaa

SEQ ID NO: 3453073 - RNA, 11 nt, Human
gcagaaacaga

SEQ ID NO: 3453074 - RNA, 23 nt, Human
gcagaaacgaagccaucuuucuu

SEQ ID NO: 3453075 - RNA, 20 nt, Human
gcagaaagcaaaauuauguu

SEQ ID NO: 3453076 - RNA, 23 nt, Human
gcagaaagcaaaugugaccugug

SEQ ID NO: 3453077 - RNA, 13 nt, Human
gcagaaagcagag

SEQ ID NO: 3453078 - RNA, 17 nt, Human
gcagaaagcagaggcug

SEQ ID NO: 3453079 - RNA, 19 nt, Human
gcagaaagcaucccucacc

SEQ ID NO: 3453080 - RNA, 23 nt, Human
gcagaaaggaaaaccugaagacu

SEQ ID NO: 3453081 - RNA, 21 nt, Human
gcagaaagguucugcccggga

SEQ ID NO: 3453082 - RNA, 23 nt, Human
gcagaaagugccuuucaggaucu

SEQ ID NO: 3453083 - RNA, 19 nt, Human
gcagaaauccugcaaugaa

SEQ ID NO: 3453084 - RNA, 15 nt, Human
gcagaaaucuagaag

SEQ ID NO: 3453085 - RNA, 16 nt, Human
gcagaaaucugaggaa

SEQ ID NO: 3453086 - RNA, 16 nt, Human
gcagaaauucuguuuu

SEQ ID NO: 3453087 - RNA, 12 nt, Human
gcagaacaguga

SEQ ID NO: 3453088 - RNA, 18 nt, Human
gcagaacagugauuacca

SEQ ID NO: 3453089 - RNA, 15 nt, Human
gcagaaccauuuuug

SEQ ID NO: 3453090 - RNA, 16 nt, Human
gcagaacccuggugag

SEQ ID NO: 3453091 - RNA, 16 nt, Human
gcagaacugagcuccu

SEQ ID NO: 3453092 - RNA, 19 nt, Human
gcagaacugcagucacugc

SEQ ID NO: 3453093 - RNA, 12 nt, Human
gcagaacugcca

SEQ ID NO: 3453094 - RNA, 14 nt, Human
gcagaagaaaggaa

SEQ ID NO: 3453095 - RNA, 22 nt, Human
gcagaagaaugggaauauuuua

SEQ ID NO: 3453096 - RNA, 16 nt, Human
gcagaagacaccagag

SEQ ID NO: 3453097 - RNA, 21 nt, Human
gcagaagacaccagagcagau

SEQ ID NO: 3453098 - RNA, 18 nt, Human
uaaauaccagacugcagg

SEQ ID NO: 3453099 - RNA, 17 nt, Human
uaaauacugcaaaucag

SEQ ID NO: 3453100 - RNA, 16 nt, Human
uaaauagaauguaaau

SEQ ID NO: 3453101 - RNA, 11 nt, Human
uaaauagagca

SEQ ID NO: 3453102 - RNA, 18 nt, Human
uaaauagaguuugcuauu

SEQ ID NO: 3453103 - RNA, 14 nt, Human
uaaauagaugacau

SEQ ID NO: 3453104 - RNA, 12 nt, Human
uaaauagcaugu

SEQ ID NO: 3453105 - RNA, 14 nt, Human
uaaauagcauguau

SEQ ID NO: 3453106 - RNA, 15 nt, Human
uaaauagcauguauu

SEQ ID NO: 3453107 - RNA, 19 nt, Human
uaaauagcauguauugugu

SEQ ID NO: 3453108 - RNA, 18 nt, Human
uaaauagcuagacuggug

SEQ ID NO: 3453109 - RNA, 15 nt, Human
uaaauagcuauaucc

SEQ ID NO: 3453110 - RNA, 19 nt, Human
uaaauagcuauauccaugu

SEQ ID NO: 3453111 - RNA, 21 nt, Human
uaaauaggaaucauucagaaa

SEQ ID NO: 3453112 - RNA, 23 nt, Human
uaaauaggaaucauucagaaaug

SEQ ID NO: 3453113 - RNA, 19 nt, Human
uaaauaguaaaaauaaaau

SEQ ID NO: 3453114 - RNA, 18 nt, Human
uaaauaguauuugagagu

SEQ ID NO: 3453115 - RNA, 12 nt, Human
uaaauauaaaga

SEQ ID NO: 3453116 - RNA, 17 nt, Human
uaaauauaaagacguuu

SEQ ID NO: 3453117 - RNA, 15 nt, Human
uaaauauaauucugu

SEQ ID NO: 3453118 - RNA, 16 nt, Human
uaaauauaauucugua

SEQ ID NO: 3453119 - RNA, 17 nt, Human
uaaauauagauuagaaa

SEQ ID NO: 3453120 - RNA, 20 nt, Human
uaaauauagauuagaaaaau

SEQ ID NO: 3453121 - RNA, 20 nt, Human
uaaauauaguuccuaagaag

SEQ ID NO: 3453122 - RNA, 17 nt, Human
uaaauauauauaaaccu

SEQ ID NO: 3453123 - RNA, 20 nt, Human
uaaauauauauaaagaauau

SEQ ID NO: 3453124 - RNA, 17 nt, Human
uaaauauauauaaauau

SEQ ID NO: 3453125 - RNA, 18 nt, Human
uaaauauauauaaauaua

SEQ ID NO: 3453126 - RNA, 21 nt, Human
uaaauauauauaaauauauau

SEQ ID NO: 3453127 - RNA, 18 nt, Human
uaaauauaucuaccccag

SEQ ID NO: 3453128 - RNA, 21 nt, Human
uaaauauaucuauauuauugu

SEQ ID NO: 3453129 - RNA, 20 nt, Human
uaaauauauguauguaaaaa

SEQ ID NO: 3453130 - RNA, 18 nt, Human
uaaauauauuauuacuug

SEQ ID NO: 3453131 - RNA, 20 nt, Human
uaaauauauuauuacuugua

SEQ ID NO: 3453132 - RNA, 21 nt, Human
uaaauauauuauuacuuguaa

SEQ ID NO: 3453133 - RNA, 17 nt, Human
uaaauauauuuaagaua

SEQ ID NO: 3453134 - RNA, 22 nt, Human
uaaauauauuuaagauaauuau

SEQ ID NO: 3453135 - RNA, 22 nt, Human
uaaauaucccuuggacauuuua

SEQ ID NO: 3453136 - RNA, 14 nt, Human
uaaauaucuuuuau

SEQ ID NO: 3453137 - RNA, 17 nt, Human
uaaauaucuuuuauguu

SEQ ID NO: 3453138 - RNA, 20 nt, Human
uaaauaucuuuuauguuuga

SEQ ID NO: 3453139 - RNA, 22 nt, Human
uaaauaucuuuuauguuugaau

SEQ ID NO: 3453140 - RNA, 19 nt, Human
uaaauaugaagcucaccug

SEQ ID NO: 3453141 - RNA, 19 nt, Human
uaaauaugccucuccuuug

SEQ ID NO: 3453142 - RNA, 21 nt, Human
uaaauaugccucuccuuugua

SEQ ID NO: 3453143 - RNA, 20 nt, Human
uaaauauguacaauuguggg

SEQ ID NO: 3453144 - RNA, 21 nt, Human
uaaauauguuagcaaagaguu

SEQ ID NO: 3453145 - RNA, 17 nt, Human
uaaauauguuucacaca

SEQ ID NO: 3453146 - RNA, 20 nt, Human
uaaauauuaguuaauggauu

SEQ ID NO: 3453147 - RNA, 14 nt, Human
uaaauauucacacu

SEQ ID NO: 3453148 - RNA, 13 nt, Human
uaaauauucuaua

SEQ ID NO: 3453149 - RNA, 15 nt, Human
uaaauauucuauaug

SEQ ID NO: 3453150 - RNA, 19 nt, Human
uaaauauucuauaugaauu

SEQ ID NO: 3453151 - RNA, 11 nt, Human
uaaauauuuac

SEQ ID NO: 3453152 - RNA, 19 nt, Human
uaaauauuuacauaugaaa

SEQ ID NO: 3453153 - RNA, 12 nt, Human
uaaauauuucaa

SEQ ID NO: 3453154 - RNA, 13 nt, Human
uaaauauuucaag

SEQ ID NO: 3453155 - RNA, 12 nt, Human
uaaauauuuccu

SEQ ID NO: 3453156 - RNA, 18 nt, Human
uaaauauuugacuugcau

SEQ ID NO: 3453157 - RNA, 22 nt, Human
uaaauauuuggucucuauuuca

SEQ ID NO: 3453158 - RNA, 17 nt, Human
uaaauauuuuaaagaau

SEQ ID NO: 3453159 - RNA, 16 nt, Human
uaaauauuuucuauuu

SEQ ID NO: 3453160 - RNA, 21 nt, Human
uaaaucacgcuuuuugaaaaa

SEQ ID NO: 3453161 - RNA, 16 nt, Human
uaaaucagauguugaa

SEQ ID NO: 3453162 - RNA, 22 nt, Human
uaaaucauacuccuaugcuuua

SEQ ID NO: 3453163 - RNA, 23 nt, Human
uaacuuauaucaucagcauaccu

SEQ ID NO: 3453164 - RNA, 14 nt, Human
uaacuuauauugaa

SEQ ID NO: 3453165 - RNA, 15 nt, Human
uaacuuauguagaua

SEQ ID NO: 3453166 - RNA, 22 nt, Human
uaacuuauguagauauuuggcu

SEQ ID NO: 3453167 - RNA, 14 nt, Human
uaacuuauugcuga

SEQ ID NO: 3453168 - RNA, 22 nt, Human
uaacuuauugcugauuuuaaug

SEQ ID NO: 3453169 - RNA, 21 nt, Human
uaacuuauuuauguuaaaaga

SEQ ID NO: 3453170 - RNA, 22 nt, Human
uaacuucacauuaaaaaaugaa

SEQ ID NO: 3453171 - RNA, 13 nt, Human
uaacuucaguccu

SEQ ID NO: 3453172 - RNA, 20 nt, Human
uaacuuccacagggucccac

SEQ ID NO: 3453173 - RNA, 23 nt, Human
uaacuuccacagggucccacagc

SEQ ID NO: 3453174 - RNA, 21 nt, Human
uaacuucccugaaaaaucuaa

SEQ ID NO: 3453175 - RNA, 18 nt, Human
uaacuucuaaaacuguac

SEQ ID NO: 3453176 - RNA, 20 nt, Human
uaacuucuaaaacuguacuu

SEQ ID NO: 3453177 - RNA, 13 nt, Human
uaacuucugccug

SEQ ID NO: 3453178 - RNA, 17 nt, Human
uaacuucuuauggaauu

SEQ ID NO: 3453179 - RNA, 12 nt, Human
uaacuucuugcu

SEQ ID NO: 3453180 - RNA, 13 nt, Human
uaacuucuugcuu

SEQ ID NO: 3453181 - RNA, 19 nt, Human
uaacuucuugcuucuuucu

SEQ ID NO: 3453182 - RNA, 20 nt, Human
uaacuucuugcuucuuucua

SEQ ID NO: 3453183 - RNA, 13 nt, Human
uaacuucuuucua

SEQ ID NO: 3453184 - RNA, 22 nt, Human
uaacuugaggguaauaaacuua

SEQ ID NO: 3453185 - RNA, 19 nt, Human
uaacuugauccauuucuaa

SEQ ID NO: 3453186 - RNA, 20 nt, Human
uaacuugauccauuucuaau

SEQ ID NO: 3453187 - RNA, 15 nt, Human
uaacuugcgcagaaa

SEQ ID NO: 3453188 - RNA, 15 nt, Human
uaacuugcuuaaaug

SEQ ID NO: 3453189 - RNA, 17 nt, Human
uaacuugcuuaaaugug

SEQ ID NO: 3453190 - RNA, 20 nt, Human
uaacuugcuuaaaugugaau

SEQ ID NO: 3453191 - RNA, 16 nt, Human
uaacuuggagccccag

SEQ ID NO: 3453192 - RNA, 23 nt, Human
uaacuuggaugaguuuugggaag

SEQ ID NO: 3453193 - RNA, 17 nt, Human
uaacuuggccgcuguau

SEQ ID NO: 3453194 - RNA, 15 nt, Human
uaacuuggcuuucau

SEQ ID NO: 3453195 - RNA, 12 nt, Human
uaacuugggagu

SEQ ID NO: 3453196 - RNA, 16 nt, Human
uaacuugucuaaauaa

SEQ ID NO: 3453197 - RNA, 13 nt, Human
uaacuugucuuaa

SEQ ID NO: 3453198 - RNA, 17 nt, Human
uaacuugucuuaaauaa

SEQ ID NO: 3453199 - RNA, 12 nt, Human
uaacuuuaaguu

SEQ ID NO: 3453200 - RNA, 16 nt, Human
uaacuuuaaguuucag

SEQ ID NO: 3453201 - RNA, 22 nt, Human
uaacuuuaauucucuuucaaag

SEQ ID NO: 3453202 - RNA, 14 nt, Human
uaacuuuacagaaa

SEQ ID NO: 3453203 - RNA, 21 nt, Human
uaacuuuagaaauaaaccuua

SEQ ID NO: 3453204 - RNA, 17 nt, Human
uaacuuuaucacauuau

SEQ ID NO: 3453205 - RNA, 15 nt, Human
uaacuuuauucuuga

SEQ ID NO: 3453206 - RNA, 23 nt, Human
uaacuuucagaagagaugggcuu

SEQ ID NO: 3453207 - RNA, 23 nt, Human
uaacuuucauuaaagcauuuacu

SEQ ID NO: 3453208 - RNA, 16 nt, Human
uaacuuucugaaauaa

SEQ ID NO: 3453209 - RNA, 13 nt, Human
uaacuuucugggu

SEQ ID NO: 3453210 - RNA, 22 nt, Human
uaacuuugcuugcaguagauuu

SEQ ID NO: 3453211 - RNA, 15 nt, Human
uaacuuuuauaaacu

SEQ ID NO: 3453212 - RNA, 17 nt, Human
uaacuuuuauaaacuuu

SEQ ID NO: 3453213 - RNA, 16 nt, Human
uaacuuuugugaauua

SEQ ID NO: 3453214 - RNA, 14 nt, Human
uaacuuuuuauauu

SEQ ID NO: 3453215 - RNA, 16 nt, Human
uaacuuuuuuuuuucu

SEQ ID NO: 3453216 - RNA, 15 nt, Human
uaagaaaaaaauaau

SEQ ID NO: 3453217 - RNA, 22 nt, Human
uaagaaaaaaauaauuuuauga

SEQ ID NO: 3453218 - RNA, 13 nt, Human
uaagaaaaacuuu

SEQ ID NO: 3453219 - RNA, 19 nt, Human
uaagaaaaaggaugcacag

SEQ ID NO: 3453220 - RNA, 23 nt, Human
uaagaaaaaggaugcacagaguu

SEQ ID NO: 3453221 - RNA, 21 nt, Human
uaagaaaagauacgacuuuau

SEQ ID NO: 3453222 - RNA, 14 nt, Human
uaagaaaaguauuu

SEQ ID NO: 3453223 - RNA, 19 nt, Human
uaagaaaaguauuuugaag

SEQ ID NO: 3453224 - RNA, 17 nt, Human
uaagaaaauacaauaaa

SEQ ID NO: 3453225 - RNA, 18 nt, Human
uaagaaaauacaauaaac

SEQ ID NO: 3453226 - RNA, 21 nt, Human
uaagaaaauauauucuuucaa

SEQ ID NO: 3453227 - RNA, 21 nt, Human
uaagaaaauauuuugucuaaa

SEQ ID NO: 3453228 - RNA, 22 nt, Human
uaagaaaauauuuugucuaaaa

SEQ ID NO: 3453229 - RNA, 23 nt, Human
uaagaaaauauuuugucuaaaau

SEQ ID NO: 3453230 - RNA, 21 nt, Human
uaagaaacaacucuuugagaa

SEQ ID NO: 3453231 - RNA, 12 nt, Human
uaagaaacagag

SEQ ID NO: 3453232 - RNA, 15 nt, Human
uaagaaacauuggaa

SEQ ID NO: 3453233 - RNA, 21 nt, Human
uaagaaacauuggaagcaggu

SEQ ID NO: 3453234 - RNA, 18 nt, Human
uaagaaacccagacugaa

SEQ ID NO: 3453235 - RNA, 23 nt, Human
uaagaaaccuacugcccaggcac

SEQ ID NO: 3453236 - RNA, 19 nt, Human
uaagaaacuuuuguaaaga

SEQ ID NO: 3453237 - RNA, 20 nt, Human
uaagaaacuuuuuuauuuaa

SEQ ID NO: 3453238 - RNA, 12 nt, Human
uaagaaagacau

SEQ ID NO: 3453239 - RNA, 13 nt, Human
uaagaaagccuga

SEQ ID NO: 3453240 - RNA, 14 nt, Human
uaagaaagccugag

SEQ ID NO: 3453241 - RNA, 15 nt, Human
uaagaaagccugagu

SEQ ID NO: 3453242 - RNA, 15 nt, Human
uaagaaaggaagcau

SEQ ID NO: 3453243 - RNA, 22 nt, Human
uaagaaagugaagcaaaucaga

SEQ ID NO: 3453244 - RNA, 22 nt, Human
uaagaaauaaaacuguuaaagu

SEQ ID NO: 3453245 - RNA, 13 nt, Human
uaagaaauaaauc

SEQ ID NO: 3453246 - RNA, 18 nt, Human
uaagaaauacuguacaau

SEQ ID NO: 3453247 - RNA, 20 nt, Human
uaagaaauaugugagauuuu

SEQ ID NO: 3453248 - RNA, 14 nt, Human
uaagaaaucaagua

SEQ ID NO: 3453249 - RNA, 21 nt, Human
uaagaaaucucccaugugcau

SEQ ID NO: 3453250 - RNA, 18 nt, Human
uaagaaaugguggaacug

SEQ ID NO: 3453251 - RNA, 16 nt, Human
uaagaaauguauaaac

SEQ ID NO: 3453252 - RNA, 14 nt, Human
uaagaaauugaaua

SEQ ID NO: 3453253 - RNA, 14 nt, Human
uaagaaauuucaca

SEQ ID NO: 3453254 - RNA, 16 nt, Human
uaagaacaacuaccug

SEQ ID NO: 3453255 - RNA, 18 nt, Human
uaagaaccauugauuuaa

SEQ ID NO: 3453256 - RNA, 22 nt, Human
uaagaaccuuuugagugccuua

SEQ ID NO: 3453257 - RNA, 19 nt, Human
uaagaacugcuuucuuucg

SEQ ID NO: 3453258 - RNA, 22 nt, Human
uaagaagaaguucauguccaaa

SEQ ID NO: 3453259 - RNA, 14 nt, Human
uaagaagacaugaa

SEQ ID NO: 3453260 - RNA, 12 nt, Human
uaagaagagacu

SEQ ID NO: 3453261 - RNA, 14 nt, Human
uaagaagaugacuu

SEQ ID NO: 3453262 - RNA, 14 nt, Human
uaagaagcaaauaa

SEQ ID NO: 3453263 - RNA, 13 nt, Human
uaagaagcuguug

SEQ ID NO: 3453264 - RNA, 22 nt, Human
uaagaagcuguuguacauuuau

SEQ ID NO: 3453265 - RNA, 13 nt, Human
uaagaaggcaaaa

SEQ ID NO: 3453266 - RNA, 17 nt, Human
uaagaaggcaaaaaugu

SEQ ID NO: 3453267 - RNA, 20 nt, Human
uaagaaggcaauauuaaccu

SEQ ID NO: 3453268 - RNA, 15 nt, Human
uaagaaguuuuaaaa

SEQ ID NO: 3453269 - RNA, 21 nt, Human
uaagaaguuuuaaaaagccag

SEQ ID NO: 3453270 - RNA, 15 nt, Human
uaagaauaaaauguu

SEQ ID NO: 3453271 - RNA, 21 nt, Human
uaagaauaaaauguugaaaag

SEQ ID NO: 3453272 - RNA, 13 nt, Human
uaagaauaauaaa

SEQ ID NO: 3453273 - RNA, 13 nt, Human
uaagaauaauuua

SEQ ID NO: 3453274 - RNA, 14 nt, Human
uaagaauacagcuu

SEQ ID NO: 3453275 - RNA, 18 nt, Human
uaagaauaccacaucaaa

SEQ ID NO: 3453276 - RNA, 22 nt, Human
uaagaauaccacaucaaauaag

SEQ ID NO: 3453277 - RNA, 18 nt, Human
uaagaauaguagaugugg

SEQ ID NO: 3453278 - RNA, 13 nt, Human
uaagaauauuuga

SEQ ID NO: 3453279 - RNA, 14 nt, Human
uaagaauauuugaa

SEQ ID NO: 3453280 - RNA, 18 nt, Human
uaagaauauuugaaugua

SEQ ID NO: 3453281 - RNA, 19 nt, Human
uaagaaucagaguagaaau

SEQ ID NO: 3453282 - RNA, 17 nt, Human
uaagaaucuagcaagaa

SEQ ID NO: 3453283 - RNA, 17 nt, Human
uaagaaugguugccuua

SEQ ID NO: 3453284 - RNA, 21 nt, Human
uaagaauguugguuuacuuuc

SEQ ID NO: 3453285 - RNA, 17 nt, Human
uaagaauuauuuugaug

SEQ ID NO: 3453286 - RNA, 14 nt, Human
uaagaauucaaacu

SEQ ID NO: 3453287 - RNA, 22 nt, Human
uaagaauucaaacuggggccuc

SEQ ID NO: 3453288 - RNA, 16 nt, Human
uaagaauucagacauc

SEQ ID NO: 3453289 - RNA, 19 nt, Human
uaagaauucugauugauuu

SEQ ID NO: 3453290 - RNA, 16 nt, Human
uaagaauugaguaaug

SEQ ID NO: 3453291 - RNA, 18 nt, Human
uaagaauuugcauacuua

SEQ ID NO: 3453292 - RNA, 19 nt, Human
uaagacaaauauuccuuug

SEQ ID NO: 3453293 - RNA, 20 nt, Human
uaagacacugaaaaaucuaa

SEQ ID NO: 3453294 - RNA, 13 nt, Human
uaagacagagacc

SEQ ID NO: 3453295 - RNA, 16 nt, Human
uaagacauaacguuuu

SEQ ID NO: 3453296 - RNA, 22 nt, Human
uaagacauaacguuuuuccuuu

SEQ ID NO: 3453297 - RNA, 20 nt, Human
uaagacaugauuuccuugaa

SEQ ID NO: 3453298 - RNA, 21 nt, Human
uaagacaugcacuaugaggaa

SEQ ID NO: 3453299 - RNA, 22 nt, Human
uaagacauugggucuauuccag

SEQ ID NO: 3453300 - RNA, 17 nt, Human
uaagaccaccaccucag

SEQ ID NO: 3453301 - RNA, 14 nt, Human
uaagaccagccugg

SEQ ID NO: 3453302 - RNA, 19 nt, Human
uaagaccauaacagccaac

SEQ ID NO: 3453303 - RNA, 21 nt, Human
uacacgaauagacaucaaacu

SEQ ID NO: 3453304 - RNA, 13 nt, Human
uacacgggacuga

SEQ ID NO: 3453305 - RNA, 23 nt, Human
uacacguauuugaauggccuuca

SEQ ID NO: 3453306 - RNA, 13 nt, Human
uacacguguccug

SEQ ID NO: 3453307 - RNA, 18 nt, Human
uacauguguagccugugc

SEQ ID NO: 3453308 - RNA, 16 nt, Human
uacauguguguauaua

SEQ ID NO: 3453309 - RNA, 21 nt, Human
uacauguguguauauaugugu

SEQ ID NO: 3453310 - RNA, 13 nt, Human
uacauguuuauaa

SEQ ID NO: 3453311 - RNA, 15 nt, Human
uacauguuuauaaau

SEQ ID NO: 3453312 - RNA, 17 nt, Human
uacauguuuauaaaucu

SEQ ID NO: 3453313 - RNA, 15 nt, Human
uacauguuuauguaa

SEQ ID NO: 3453314 - RNA, 19 nt, Human
uacauguuuauguaaacaa

SEQ ID NO: 3453315 - RNA, 13 nt, Human
uacauguuugcac

SEQ ID NO: 3453316 - RNA, 14 nt, Human
uacauuaaacauga

SEQ ID NO: 3453317 - RNA, 20 nt, Human
uacauuaaacaugacuccau

SEQ ID NO: 3453318 - RNA, 12 nt, Human
uacauuaauguu

SEQ ID NO: 3453319 - RNA, 20 nt, Human
uacauuagcaguuugcuuug

SEQ ID NO: 3453320 - RNA, 16 nt, Human
uacauuagguugugaa

SEQ ID NO: 3453321 - RNA, 14 nt, Human
uacauucaaauuug

SEQ ID NO: 3453322 - RNA, 21 nt, Human
uacauucaaauuugucugguu

SEQ ID NO: 3453323 - RNA, 22 nt, Human
uacauuccuugauaauguugug

SEQ ID NO: 3453324 - RNA, 19 nt, Human
uaagccuccauuuaguucu

SEQ ID NO: 3453325 - RNA, 13 nt, Human
uaagccuguggcu

SEQ ID NO: 3453326 - RNA, 18 nt, Human
uaagccuguggcugugga

SEQ ID NO: 3453327 - RNA, 21 nt, Human
uaagcuaaagaggcugaaaga

SEQ ID NO: 3453328 - RNA, 15 nt, Human
uaagcuacugccauc

SEQ ID NO: 3453329 - RNA, 17 nt, Human
uaagcuagaagaaguga

SEQ ID NO: 3453330 - RNA, 13 nt, Human
uaagcuaggaaaa

SEQ ID NO: 3453331 - RNA, 17 nt, Human
uaagcuaggaaaagaaa

SEQ ID NO: 3453332 - RNA, 16 nt, Human
uaagcuaguugaauac

SEQ ID NO: 3453333 - RNA, 21 nt, Human
uaagcuaguugaauacuugaa

SEQ ID NO: 3453334 - RNA, 18 nt, Human
uaagcuauuugauguaau

SEQ ID NO: 3453335 - RNA, 21 nt, Human
uaagcuauuuuucuaacuaca

SEQ ID NO: 3453336 - RNA, 20 nt, Human
uaagcucaaggcgugaggau

SEQ ID NO: 3453337 - RNA, 19 nt, Human
uaagcucacguccugagaa

SEQ ID NO: 3453338 - RNA, 12 nt, Human
uaagcucagaau

SEQ ID NO: 3453339 - RNA, 14 nt, Human
uaagcucuuugaaa

SEQ ID NO: 3453340 - RNA, 21 nt, Human
uaagcucuuugaaacaacuuu

SEQ ID NO: 3453341 - RNA, 14 nt, Human
uaagcugcagcuuc

SEQ ID NO: 3453342 - RNA, 18 nt, Human
uaagcugcagcuuccugu

SEQ ID NO: 3453343 - RNA, 13 nt, Human
uaagcuguaaaaa

SEQ ID NO: 3453344 - RNA, 22 nt, Human
uaagcugugucugcccaaugaa

SEQ ID NO: 3453345 - RNA, 22 nt, Human
uaagcuguuacugucuucagua

SEQ ID NO: 3453346 - RNA, 13 nt, Human
uaagcuguuuauu

SEQ ID NO: 3453347 - RNA, 16 nt, Human
uaagcuguuuccauag

SEQ ID NO: 3453348 - RNA, 17 nt, Human
uaagcuuaaaaaaaacu

SEQ ID NO: 3453349 - RNA, 17 nt, Human
uaagcuucaguugcuug

SEQ ID NO: 3453350 - RNA, 16 nt, Human
uaagcuuccaggaaaa

SEQ ID NO: 3453351 - RNA, 16 nt, Human
uaagcuuccauuuuaa

SEQ ID NO: 3453352 - RNA, 16 nt, Human
uaagcuuguauuccuu

SEQ ID NO: 3453353 - RNA, 21 nt, Human
uaagcuuugccagcugcugcu

SEQ ID NO: 3453354 - RNA, 20 nt, Human
uaagcuuuucuuuucuuugu

SEQ ID NO: 3453355 - RNA, 15 nt, Human
uaagcuuuuuggaau

SEQ ID NO: 3453356 - RNA, 17 nt, Human
uaaggaaaaguuuaaua

SEQ ID NO: 3453357 - RNA, 12 nt, Human
uaaggaaacugg

SEQ ID NO: 3453358 - RNA, 15 nt, Human
uaaggaagauaucua

SEQ ID NO: 3453359 - RNA, 21 nt, Human
uaaggaaugauauugcugaag

SEQ ID NO: 3453360 - RNA, 15 nt, Human
uaaggacaaagugcc

SEQ ID NO: 3453361 - RNA, 21 nt, Human
uaaggacaaagugccaaagaa

SEQ ID NO: 3453362 - RNA, 15 nt, Human
uaaggacacacuaau

SEQ ID NO: 3453363 - RNA, 19 nt, Human
uaaggacaugaugcuuuua

SEQ ID NO: 3453364 - RNA, 18 nt, Human
uaaggacauuucccaggg

SEQ ID NO: 3453365 - RNA, 21 nt, Human
uaaggaccugaaauuccaaag

SEQ ID NO: 3453366 - RNA, 22 nt, Human
uaaggaccugaaauuccaaagu

SEQ ID NO: 3453367 - RNA, 12 nt, Human
uaaggacugcau

SEQ ID NO: 3453368 - RNA, 13 nt, Human
uaaggacuuccug

SEQ ID NO: 3453369 - RNA, 14 nt, Human
uaaggacuucuuua

SEQ ID NO: 3453370 - RNA, 22 nt, Human
uaaggacuucuuuaauuuugga

SEQ ID NO: 3453371 - RNA, 16 nt, Human
uaaggacuuguuagau

SEQ ID NO: 3453372 - RNA, 19 nt, Human
uaaggacuuguuagaucua

SEQ ID NO: 3453373 - RNA, 14 nt, Human
uaaggagaauggcc

SEQ ID NO: 3453374 - RNA, 20 nt, Human
uaaggaguaaucuguguaca

SEQ ID NO: 3453375 - RNA, 15 nt, Human
uaaggauaaaucaua

SEQ ID NO: 3453376 - RNA, 17 nt, Human
uaaggauacuuuacaug

SEQ ID NO: 3453377 - RNA, 18 nt, Human
uaaggaugcuuguacaua

SEQ ID NO: 3453378 - RNA, 19 nt, Human
uaaggaugcuuguacauaa

SEQ ID NO: 3453379 - RNA, 19 nt, Human
uaaggauggagccagcucu

SEQ ID NO: 3453380 - RNA, 20 nt, Human
uaaggauggagccagcucug

SEQ ID NO: 3453381 - RNA, 16 nt, Human
uaaggaugggaaggag

SEQ ID NO: 3453382 - RNA, 15 nt, Human
uaaggauugugauau

SEQ ID NO: 3453383 - RNA, 13 nt, Human
uaaggauuuuaug

SEQ ID NO: 3453384 - RNA, 21 nt, Human
uaaggcagauuuuacagagcg

SEQ ID NO: 3453385 - RNA, 13 nt, Human
uaaggcaugaagg

SEQ ID NO: 3453386 - RNA, 15 nt, Human
uaaggcaugaaggau

SEQ ID NO: 3453387 - RNA, 19 nt, Human
uaaggccauuauuguacuu

SEQ ID NO: 3453388 - RNA, 23 nt, Human
uaaggcccccucucaggagccau

SEQ ID NO: 3453389 - RNA, 16 nt, Human
uaaggccgaagaaggg

SEQ ID NO: 3453390 - RNA, 16 nt, Human
uaaggccuaggauucu

SEQ ID NO: 3453391 - RNA, 21 nt, Human
uaaggccuaggauucuaaaau

SEQ ID NO: 3453392 - RNA, 22 nt, Human
uaaggcucugagagucuagauu

SEQ ID NO: 3453393 - RNA, 21 nt, Human
uaaggcugcaagguuuaggcu

SEQ ID NO: 3453394 - RNA, 16 nt, Human
uaaggcuguguaagau

SEQ ID NO: 3453395 - RNA, 22 nt, Human
uaaggcuguguaagauuuguuu

SEQ ID NO: 3453396 - RNA, 22 nt, Human
uaaggcuuugauuaguuuucuu

SEQ ID NO: 3453397 - RNA, 12 nt, Human
uaagggaaaaau

SEQ ID NO: 3453398 - RNA, 20 nt, Human
uaagggaaaaaucaaguauu

SEQ ID NO: 3453399 - RNA, 23 nt, Human
uaagggaacaaguugagcuauga

SEQ ID NO: 3453400 - RNA, 13 nt, Human
uaagggaagaauu

SEQ ID NO: 3453401 - RNA, 19 nt, Human
uaagggaaguaguuaucau

SEQ ID NO: 3453402 - RNA, 16 nt, Human
uaagggacugauguuu

SEQ ID NO: 3453403 - RNA, 22 nt, Human
uaagggacugauguuugugcag

SEQ ID NO: 3453404 - RNA, 16 nt, Human
uaagggaggaggagcu

SEQ ID NO: 3453405 - RNA, 19 nt, Human
uaagggccagaaauaucuu

SEQ ID NO: 3453406 - RNA, 18 nt, Human
uaaggggaauuaacaauu

SEQ ID NO: 3453407 - RNA, 13 nt, Human
uaaggggcagcuu

SEQ ID NO: 3453408 - RNA, 16 nt, Human
uaaggggcccggccag

SEQ ID NO: 3453409 - RNA, 17 nt, Human
uaaggguaucuggugac

SEQ ID NO: 3453410 - RNA, 24 nt, Human
uaagggucauauguuugcuuguau

SEQ ID NO: 3453411 - RNA, 19 nt, Human
uaagggugggugcucagaa

SEQ ID NO: 3453412 - RNA, 18 nt, Human
uaagguacaagaagcauu

SEQ ID NO: 3453413 - RNA, 18 nt, Human
uaagguagaaccucaccu

SEQ ID NO: 3453414 - RNA, 21 nt, Human
uaagguauaucauucuaaaga

SEQ ID NO: 3453415 - RNA, 18 nt, Human
uaaggucauuaccacagg

SEQ ID NO: 3453416 - RNA, 20 nt, Human
uaagguccgguguucuaaga

SEQ ID NO: 3453417 - RNA, 13 nt, Human
uaagguccuaagg

SEQ ID NO: 3453418 - RNA, 17 nt, Human
uaaggugaggccugucu

SEQ ID NO: 3453419 - RNA, 22 nt, Human
uaaggugaggccugucugugac

SEQ ID NO: 3453420 - RNA, 20 nt, Human
uaaggugauauauuuaaaaa

SEQ ID NO: 3453421 - RNA, 15 nt, Human
uaaggugcuaaaucu

SEQ ID NO: 3453422 - RNA, 21 nt, Human
uaaggugcucucuuucugucu

SEQ ID NO: 3453423 - RNA, 20 nt, Human
uaagguggguacgggagggu

SEQ ID NO: 3453424 - RNA, 15 nt, Human
uaaggugugcucuga

SEQ ID NO: 3453425 - RNA, 12 nt, Human
uaagguguuuga

SEQ ID NO: 3453426 - RNA, 15 nt, Human
uaagguguuugaaaa

SEQ ID NO: 3453427 - RNA, 20 nt, Human
uaagguguuugaaaauaguu

SEQ ID NO: 3453428 - RNA, 19 nt, Human
uaagguguuuucuguguaa

SEQ ID NO: 3453429 - RNA, 15 nt, Human
uaagguucuaaggcc

SEQ ID NO: 3453430 - RNA, 16 nt, Human
uaagguucucauagga

SEQ ID NO: 3453431 - RNA, 19 nt, Human
uaagguuucguuucuguau

SEQ ID NO: 3453432 - RNA, 20 nt, Human
uaagguuucguuucuguaua

SEQ ID NO: 3453433 - RNA, 17 nt, Human
uaagguuuuaauuuagu

SEQ ID NO: 3453434 - RNA, 18 nt, Human
uaagguuuuaauuuagua

SEQ ID NO: 3453435 - RNA, 18 nt, Human
uaaguaaaaccacagcag

SEQ ID NO: 3453436 - RNA, 14 nt, Human
uaaguaaauacaau

SEQ ID NO: 3453437 - RNA, 13 nt, Human
uaaguaaaugcua

SEQ ID NO: 3453438 - RNA, 14 nt, Human
uaaguaaaugucug

SEQ ID NO: 3453439 - RNA, 21 nt, Human
uaaguaacuuauuuaugaaag

SEQ ID NO: 3453440 - RNA, 14 nt, Human
uaaguaagaaaaua

SEQ ID NO: 3453441 - RNA, 19 nt, Human
uaaguaagaaaauauuuug

SEQ ID NO: 3453442 - RNA, 19 nt, Human
uaaguaagcaacagcauaa

SEQ ID NO: 3453443 - RNA, 23 nt, Human
uaaguaauuaucgggaacagugu

SEQ ID NO: 3453444 - RNA, 16 nt, Human
uaaguaauucaagaaa

SEQ ID NO: 3453445 - RNA, 12 nt, Human
uaaguacagaga

SEQ ID NO: 3453446 - RNA, 16 nt, Human
uaaguacagagaagcc

SEQ ID NO: 3453447 - RNA, 17 nt, Human
uaaguaccacucaggcc

SEQ ID NO: 3453448 - RNA, 18 nt, Human
uaaguaccacucaggcca

SEQ ID NO: 3453449 - RNA, 13 nt, Human
uaaguacuaugua

SEQ ID NO: 3453450 - RNA, 16 nt, Human
uaaguacuauguauca

SEQ ID NO: 3453451 - RNA, 17 nt, Human
uaaguacuauguaucaa

SEQ ID NO: 3453452 - RNA, 15 nt, Human
uaauggauuucagaa

SEQ ID NO: 3453453 - RNA, 22 nt, Human
uaauggcugauaauuuuaaauu

SEQ ID NO: 3453454 - RNA, 18 nt, Human
uaaugggcuuagagcagu

SEQ ID NO: 3453455 - RNA, 15 nt, Human
uaauggggcggugag

SEQ ID NO: 3453456 - RNA, 17 nt, Human
uaauggggguagcagcu

SEQ ID NO: 3453457 - RNA, 15 nt, Human
uaaugggguccuggc

SEQ ID NO: 3453458 - RNA, 18 nt, Human
uaaugguaccagauaaaa

SEQ ID NO: 3453459 - RNA, 23 nt, Human
uaaugguacugacuuugcuugcu

SEQ ID NO: 3453460 - RNA, 18 nt, Human
uaaugguaguuuuacagu

SEQ ID NO: 3453461 - RNA, 18 nt, Human
uaauggucccauccaggc

SEQ ID NO: 3453462 - RNA, 17 nt, Human
uaauggucuaaaaauaa

SEQ ID NO: 3453463 - RNA, 18 nt, Human
uaauggugccuucauuug

SEQ ID NO: 3453464 - RNA, 13 nt, Human
uaaugguguagaa

SEQ ID NO: 3453465 - RNA, 14 nt, Human
uaaugguguuuuaa

SEQ ID NO: 3453466 - RNA, 13 nt, Human
uaauguaaaauga

SEQ ID NO: 3453467 - RNA, 14 nt, Human
uaauguaaaaugau

SEQ ID NO: 3453468 - RNA, 22 nt, Human
uaauguaacugcucuugggcaa

SEQ ID NO: 3453469 - RNA, 16 nt, Human
uaauguaagcucuacu

SEQ ID NO: 3453470 - RNA, 17 nt, Human
uaauguaagcucuacug

SEQ ID NO: 3453471 - RNA, 13 nt, Human
uaauguacauagu

SEQ ID NO: 3453472 - RNA, 19 nt, Human
uaauguacugauuucagua

SEQ ID NO: 3453473 - RNA, 16 nt, Human
uaauguagccauggga

SEQ ID NO: 3453474 - RNA, 20 nt, Human
uaauguagcguguuuacaug

SEQ ID NO: 3453475 - RNA, 22 nt, Human
uaauguagcguguuuacaugug

SEQ ID NO: 3453476 - RNA, 14 nt, Human
uaauguauauaaaa

SEQ ID NO: 3453477 - RNA, 15 nt, Human
uaauguauauaaaaa

SEQ ID NO: 3453478 - RNA, 16 nt, Human
uaauguauauaaaaau

SEQ ID NO: 3453479 - RNA, 22 nt, Human
uaauguauaugaacuuaacaug

SEQ ID NO: 3453480 - RNA, 19 nt, Human
uaauguaucaaauacauuu

SEQ ID NO: 3453481 - RNA, 17 nt, Human
uaauguauucauauuug

SEQ ID NO: 3453482 - RNA, 18 nt, Human
uaauguauucauauuugu

SEQ ID NO: 3453483 - RNA, 20 nt, Human
uaauguauucauauuuguac

SEQ ID NO: 3453484 - RNA, 18 nt, Human
uaaugucaaacuugaguc

SEQ ID NO: 3453485 - RNA, 18 nt, Human
uaaugucacaggcagguc

SEQ ID NO: 3453486 - RNA, 17 nt, Human
uaaugucaguauuucaa

SEQ ID NO: 3453487 - RNA, 17 nt, Human
uaaugucauaaagugag

SEQ ID NO: 3453488 - RNA, 18 nt, Human
uaaugucccuuucagaga

SEQ ID NO: 3453489 - RNA, 15 nt, Human
uaaugucuucauaaa

SEQ ID NO: 3453490 - RNA, 21 nt, Human
uaaugugaaaaugguccagga

SEQ ID NO: 3453491 - RNA, 12 nt, Human
uaaugugaaacu

SEQ ID NO: 3453492 - RNA, 23 nt, Human
uaaugugaaacuggauuaaacuu

SEQ ID NO: 3453493 - RNA, 19 nt, Human
uaaugugaacuagcuggaa

SEQ ID NO: 3453494 - RNA, 16 nt, Human
uaaugugaccuagcaa

SEQ ID NO: 3453495 - RNA, 19 nt, Human
uaaugugaugauguaauug

SEQ ID NO: 3453496 - RNA, 17 nt, Human
uaaugugccuaguucuu

SEQ ID NO: 3453497 - RNA, 15 nt, Human
uaaugugcuguguaa

SEQ ID NO: 3453498 - RNA, 17 nt, Human
uaaugugcuguguaaag

SEQ ID NO: 3453499 - RNA, 17 nt, Human
uaauguggaagaaaaug

SEQ ID NO: 3453500 - RNA, 22 nt, Human
uaauguggaagaaaaugguuua

SEQ ID NO: 3453501 - RNA, 18 nt, Human
uaaugugggaagaaacaa

SEQ ID NO: 3453502 - RNA, 22 nt, Human
uaaugugggaagaaacaaaccc

SEQ ID NO: 3453503 - RNA, 17 nt, Human
uaauguguaguucaugu

SEQ ID NO: 3453504 - RNA, 19 nt, Human
uaauguguaguucauguaa

SEQ ID NO: 3453505 - RNA, 22 nt, Human
uaauguguaguucauguaaaua

SEQ ID NO: 3453506 - RNA, 18 nt, Human
uaauguuaaauuuguaag

SEQ ID NO: 3453507 - RNA, 17 nt, Human
uaauguuaaccaaggaa

SEQ ID NO: 3453508 - RNA, 16 nt, Human
uaauguuaauauugau

SEQ ID NO: 3453509 - RNA, 11 nt, Human
uaauguuacug

SEQ ID NO: 3453510 - RNA, 15 nt, Human
uaauguuacugauca

SEQ ID NO: 3453511 - RNA, 23 nt, Human
uaauguuacugaucaugcauugu

SEQ ID NO: 3453512 - RNA, 22 nt, Human
uaauguucuuaugcaaaaugga

SEQ ID NO: 3453513 - RNA, 17 nt, Human
uaauguugaacaaaaua

SEQ ID NO: 3453514 - RNA, 22 nt, Human
uaauguugaacaaaauaaauug

SEQ ID NO: 3453515 - RNA, 14 nt, Human
uaauguugauuucu

SEQ ID NO: 3453516 - RNA, 20 nt, Human
uaauguuguaugucuuguuu

SEQ ID NO: 3453517 - RNA, 21 nt, Human
uaauguuguaugucuuguuua

SEQ ID NO: 3453518 - RNA, 13 nt, Human
uaauguugugaau

SEQ ID NO: 3453519 - RNA, 13 nt, Human
uacucacacaggc

SEQ ID NO: 3453520 - RNA, 14 nt, Human
uacucacagccagc

SEQ ID NO: 3453521 - RNA, 16 nt, Human
uacucagaauucucua

SEQ ID NO: 3453522 - RNA, 19 nt, Human
uacucagcagcccuccuca

SEQ ID NO: 3453523 - RNA, 20 nt, Human
uacucagcagcccuccucac

SEQ ID NO: 3453524 - RNA, 12 nt, Human
uacucagcccug

SEQ ID NO: 3453525 - RNA, 13 nt, Human
uacucagcccugg

SEQ ID NO: 3453526 - RNA, 15 nt, Human
uacucagcccugggc

SEQ ID NO: 3453527 - RNA, 12 nt, Human
uacucagccugc

SEQ ID NO: 3453528 - RNA, 14 nt, Human
uacucaggaagaac

SEQ ID NO: 3453529 - RNA, 12 nt, Human
uacucaggaggc

SEQ ID NO: 3453530 - RNA, 15 nt, Human
uacucagggaaagca

SEQ ID NO: 3453531 - RNA, 15 nt, Human
uacucagggcuccuc

SEQ ID NO: 3453532 - RNA, 19 nt, Human
uacucagggcuccucccag

SEQ ID NO: 3453533 - RNA, 15 nt, Human
uacucauaaguaaaa

SEQ ID NO: 3453534 - RNA, 20 nt, Human
uacucauaaugugaaguguu

SEQ ID NO: 3453535 - RNA, 21 nt, Human
uacucauaaugugaaguguua

SEQ ID NO: 3453536 - RNA, 19 nt, Human
uacucauauauaucuaucu

SEQ ID NO: 3453537 - RNA, 14 nt, Human
uacucauguguaug

SEQ ID NO: 3453538 - RNA, 22 nt, Human
uacucauguguaugggcaaaaa

SEQ ID NO: 3453539 - RNA, 15 nt, Human
uacucauuucuaaaa

SEQ ID NO: 3453540 - RNA, 19 nt, Human
uacuccaguggugaagaaa

SEQ ID NO: 3453541 - RNA, 15 nt, Human
uacuccauaaacaga

SEQ ID NO: 3453542 - RNA, 22 nt, Human
uacucccacucccggccuguca

SEQ ID NO: 3453543 - RNA, 13 nt, Human
uacucccaggcac

SEQ ID NO: 3453544 - RNA, 20 nt, Human
uacucccaggcacugucuua

SEQ ID NO: 3453545 - RNA, 17 nt, Human
uacucccaucugugaaa

SEQ ID NO: 3453546 - RNA, 16 nt, Human
uacuccccuugagcug

SEQ ID NO: 3453547 - RNA, 14 nt, Human
uacucccucucagg

SEQ ID NO: 3453548 - RNA, 17 nt, Human
uacuccuaugaucugag

SEQ ID NO: 3453549 - RNA, 18 nt, Human
uacuccuauuuuuguaaa

SEQ ID NO: 3453550 - RNA, 21 nt, Human
uacuccucacacuuacuguaa

SEQ ID NO: 3453551 - RNA, 15 nt, Human
uacuccuccucuuuc

SEQ ID NO: 3453552 - RNA, 19 nt, Human
uacuccuccucuuucucuc

SEQ ID NO: 3453553 - RNA, 22 nt, Human
uacuccuccucuuucucucccc

SEQ ID NO: 3453554 - RNA, 23 nt, Human
uacuccuccucuuucucucccca

SEQ ID NO: 3453555 - RNA, 13 nt, Human
uacuccucugcag

SEQ ID NO: 3453556 - RNA, 22 nt, Human
uacuccucugcagugccuuggg

SEQ ID NO: 3453557 - RNA, 12 nt, Human
uacuccugcaaa

SEQ ID NO: 3453558 - RNA, 17 nt, Human
uacuccugcaaaauuuu

SEQ ID NO: 3453559 - RNA, 22 nt, Human
uacuccuguaauuccuaccucc

SEQ ID NO: 3453560 - RNA, 17 nt, Human
uacuccugugggagccu

SEQ ID NO: 3453561 - RNA, 20 nt, Human
uacuccugugggagccucgc

SEQ ID NO: 3453562 - RNA, 21 nt, Human
uacuccugugggagccucgca

SEQ ID NO: 3453563 - RNA, 21 nt, Human
uacucuaagaucuuagauucu

SEQ ID NO: 3453564 - RNA, 13 nt, Human
uacucuaauucua

SEQ ID NO: 3453565 - RNA, 14 nt, Human
uacucuagagaagu

SEQ ID NO: 3453566 - RNA, 14 nt, Human
uacucuagauaccu

SEQ ID NO: 3453567 - RNA, 21 nt, Human
uacucuagauaccuaaaacau

SEQ ID NO: 3453568 - RNA, 16 nt, Human
uacucuccaaccugga

SEQ ID NO: 3453569 - RNA, 15 nt, Human
uacucuccccacgag

SEQ ID NO: 3453570 - RNA, 20 nt, Human
uacucuccccacgagggcug

SEQ ID NO: 3453571 - RNA, 22 nt, Human
uacucuccccacgagggcuggc

SEQ ID NO: 3453572 - RNA, 14 nt, Human
uacucuccucaucu

SEQ ID NO: 3453573 - RNA, 16 nt, Human
uacucuccucaucucu

SEQ ID NO: 3453574 - RNA, 20 nt, Human
uacucuccucggcccccucc

SEQ ID NO: 3453575 - RNA, 16 nt, Human
uacucucuucuucuca

SEQ ID NO: 3453576 - RNA, 21 nt, Human
uacucugaaauuguaacuaaa

SEQ ID NO: 3453577 - RNA, 12 nt, Human
uacucugaaggg

SEQ ID NO: 3453578 - RNA, 14 nt, Human
uacucugcccucua

SEQ ID NO: 3453579 - RNA, 21 nt, Human
uacucugcuuuuuuucuacug

SEQ ID NO: 3453580 - RNA, 12 nt, Human
uacucuggccuc

SEQ ID NO: 3453581 - RNA, 23 nt, Human
uacucuggggugcugccugaauc

SEQ ID NO: 3453582 - RNA, 17 nt, Human
uacucugguucuuuguu

SEQ ID NO: 3453583 - RNA, 14 nt, Human
uacucugugccaga

SEQ ID NO: 3453584 - RNA, 16 nt, Human
uacucugugccagagc

SEQ ID NO: 3453585 - RNA, 23 nt, Human
uacucugugccagagccuggggc

SEQ ID NO: 3453586 - RNA, 19 nt, Human
uacucuguuccuucacauc

SEQ ID NO: 3453587 - RNA, 14 nt, Human
uacucuuaagccau

SEQ ID NO: 3453588 - RNA, 21 nt, Human
uacucuuaagccaucuuggua

SEQ ID NO: 3453589 - RNA, 18 nt, Human
uacucuuaggaagagaaa

SEQ ID NO: 3453590 - RNA, 20 nt, Human
uacucuuauaucuauauuuu

SEQ ID NO: 3453591 - RNA, 22 nt, Human
uacucuuauaucuauauuuuac

SEQ ID NO: 3453592 - RNA, 22 nt, Human
uacucuucaguuaagccuuugg

SEQ ID NO: 3453593 - RNA, 13 nt, Human
uacucuucucucu

SEQ ID NO: 3453594 - RNA, 14 nt, Human
uacucuugggacau

SEQ ID NO: 3453595 - RNA, 21 nt, Human
uacucuuuacccuugagcccu

SEQ ID NO: 3453596 - RNA, 13 nt, Human
uacuuaagagaaa

SEQ ID NO: 3453597 - RNA, 18 nt, Human
uacuuaagagaaauggca

SEQ ID NO: 3453598 - RNA, 19 nt, Human
uacuuaagagaaauggcaa

SEQ ID NO: 3453599 - RNA, 19 nt, Human
uacuuacccaggugggucc

SEQ ID NO: 3453600 - RNA, 18 nt, Human
uacuuaccuagugaaacu

SEQ ID NO: 3453601 - RNA, 15 nt, Human
uacuuacuaaaauau

SEQ ID NO: 3453602 - RNA, 16 nt, Human
uacuuagaggaaauaa

SEQ ID NO: 3453603 - RNA, 18 nt, Human
uacuuagaguuucuguuu

SEQ ID NO: 3453604 - RNA, 21 nt, Human
uacuuagcacuuggccugaga

SEQ ID NO: 3453605 - RNA, 14 nt, Human
uacuuagcauccua

SEQ ID NO: 3453606 - RNA, 22 nt, Human
uacuuagcauccuaagaaauau

SEQ ID NO: 3453607 - RNA, 16 nt, Human
uacuuagcuuaucaau

SEQ ID NO: 3453608 - RNA, 19 nt, Human
uacuuagcuuaucaauuug

SEQ ID NO: 3453609 - RNA, 17 nt, Human
uacuuaguagauuaaaa

SEQ ID NO: 3453610 - RNA, 20 nt, Human
uacuuaguauugcaaaguca

SEQ ID NO: 3453611 - RNA, 14 nt, Human
uacuuauaaagaag

SEQ ID NO: 3453612 - RNA, 17 nt, Human
uacuuauauaauugcca

SEQ ID NO: 3453613 - RNA, 21 nt, Human
uacuuauauuucccuaaaaua

SEQ ID NO: 3453614 - RNA, 14 nt, Human
uacuuauauuuucg

SEQ ID NO: 3453615 - RNA, 23 nt, Human
uacuuauauuuucguaugaaaau

SEQ ID NO: 3453616 - RNA, 14 nt, Human
uacuuauuacugcu

SEQ ID NO: 3453617 - RNA, 15 nt, Human
uacuuauuacugcua

SEQ ID NO: 3453618 - RNA, 12 nt, Human
uacuuauucauu

SEQ ID NO: 3453619 - RNA, 14 nt, Human
uacuuauucauugu

SEQ ID NO: 3453620 - RNA, 21 nt, Human
uacuuauuuaaauagaugaca

SEQ ID NO: 3453621 - RNA, 20 nt, Human
uacuuauuuuugacaguguu

SEQ ID NO: 3453622 - RNA, 23 nt, Human
uacuucaaaaguauuuuccugua

SEQ ID NO: 3453623 - RNA, 17 nt, Human
uacuucaaaaguuuguu

SEQ ID NO: 3453624 - RNA, 21 nt, Human
uacuucaaauccuugaagauu

SEQ ID NO: 3453625 - RNA, 15 nt, Human
uacuucacuuuaauu

SEQ ID NO: 3453626 - RNA, 16 nt, Human
uacuucacuuuaauuc

SEQ ID NO: 3453627 - RNA, 18 nt, Human
uacuucauguaauccaaa

SEQ ID NO: 3453628 - RNA, 17 nt, Human
uacuuccccauggcccu

SEQ ID NO: 3453629 - RNA, 15 nt, Human
uacuuccccuuccua

SEQ ID NO: 3453630 - RNA, 18 nt, Human
uacuuccccuuccuaauu

SEQ ID NO: 3453631 - RNA, 20 nt, Human
uacuuccccuuccuaauucc

SEQ ID NO: 3453632 - RNA, 20 nt, Human
uacuucccgggccagggcug

SEQ ID NO: 3453633 - RNA, 19 nt, Human
uacuuccuaucaagccagu

SEQ ID NO: 3453634 - RNA, 20 nt, Human
uacuucggggcugggaaguc

SEQ ID NO: 3453635 - RNA, 17 nt, Human
uacuucgucuucuaauu

SEQ ID NO: 3453636 - RNA, 14 nt, Human
uacuucuccagccu

SEQ ID NO: 3453637 - RNA, 16 nt, Human
uacuucucuaauucuu

SEQ ID NO: 3453638 - RNA, 18 nt, Human
uacuucucuauaaaaaau

SEQ ID NO: 3453639 - RNA, 22 nt, Human
uacuucucuauaaaaaauaugu

SEQ ID NO: 3453640 - RNA, 17 nt, Human
uacuucuguaauugugu

SEQ ID NO: 3453641 - RNA, 19 nt, Human
uacuucuuaggguuaugau

SEQ ID NO: 3453642 - RNA, 16 nt, Human
uacuucuuauacauuu

SEQ ID NO: 3453643 - RNA, 14 nt, Human
uacuucuucuguaa

SEQ ID NO: 3453644 - RNA, 14 nt, Human
uacuucuugaaggu

SEQ ID NO: 3453645 - RNA, 16 nt, Human
uacuucuuugcuuugc

SEQ ID NO: 3453646 - RNA, 15 nt, Human
uacuugaaaauuaac

SEQ ID NO: 3453647 - RNA, 20 nt, Human
uacuugaaaucuaggauuau

SEQ ID NO: 3453648 - RNA, 19 nt, Human
uacuugaacaaaaggguca

SEQ ID NO: 3453649 - RNA, 21 nt, Human
uacuugaacaaaagggucaga

SEQ ID NO: 3453650 - RNA, 12 nt, Human
uacuugaaccau

SEQ ID NO: 3453651 - RNA, 21 nt, Human
uacuugaaccauaaaaugucc

SEQ ID NO: 3453652 - RNA, 19 nt, Human
uacuugaacguuuucuaau

SEQ ID NO: 3453653 - RNA, 21 nt, Human
uacuugaacuugccucuuuua

SEQ ID NO: 3453654 - RNA, 13 nt, Human
uacuugaacuugu

SEQ ID NO: 3453655 - RNA, 11 nt, Human
uacuugaaggg

SEQ ID NO: 3453656 - RNA, 14 nt, Human
uacuugaagggcca

SEQ ID NO: 3453657 - RNA, 15 nt, Human
uacuugaagggccag

SEQ ID NO: 3453658 - RNA, 22 nt, Human
uacuugaagucuaaaagcagaa

SEQ ID NO: 3453659 - RNA, 20 nt, Human
uacuugaauaaccaucugaa

SEQ ID NO: 3453660 - RNA, 14 nt, Human
uacuugaauaguau

SEQ ID NO: 3453661 - RNA, 16 nt, Human
uacuugauaagggacu

SEQ ID NO: 3453662 - RNA, 20 nt, Human
uacuugcagcucccauucua

SEQ ID NO: 3453663 - RNA, 14 nt, Human
uacuugccagaagu

SEQ ID NO: 3453664 - RNA, 16 nt, Human
uacuugcucagguacu

SEQ ID NO: 3453665 - RNA, 15 nt, Human
uacuugcucuggacc

SEQ ID NO: 3453666 - RNA, 17 nt, Human
uacuugcucuggaccug

SEQ ID NO: 3453667 - RNA, 18 nt, Human
uacuugcucuggaccugc

SEQ ID NO: 3453668 - RNA, 22 nt, Human
uacuugcucuggaccugccccc

SEQ ID NO: 3453669 - RNA, 18 nt, Human
uacuugcuggcucucaga

SEQ ID NO: 3453670 - RNA, 21 nt, Human
uacuuggaaauauuaaaagaa

SEQ ID NO: 3453671 - RNA, 17 nt, Human
uacuugguccaacugca

SEQ ID NO: 3453672 - RNA, 16 nt, Human
uacuuguaaauauaaa

SEQ ID NO: 3453673 - RNA, 19 nt, Human
uacuuguaaauauaaagac

SEQ ID NO: 3453674 - RNA, 13 nt, Human
uacuuguaauuau

SEQ ID NO: 3453675 - RNA, 14 nt, Human
uacuugucaaagaa

SEQ ID NO: 3453676 - RNA, 15 nt, Human
uacuugucaaagaag

SEQ ID NO: 3453677 - RNA, 16 nt, Human
uacuugucaaagaagg

SEQ ID NO: 3453678 - RNA, 13 nt, Human
uacuugucuguuu

SEQ ID NO: 3453679 - RNA, 15 nt, Human
uacuugucuguuuua

SEQ ID NO: 3453680 - RNA, 20 nt, Human
uacuugucuguuuuaaaaac

SEQ ID NO: 3453681 - RNA, 14 nt, Human
uacuugucuuucug

SEQ ID NO: 3453682 - RNA, 21 nt, Human
uacuugugaaacacagcuguu

SEQ ID NO: 3453683 - RNA, 14 nt, Human
uacuuguggacaca

SEQ ID NO: 3453684 - RNA, 19 nt, Human
uacuuguggacuaaaagau

SEQ ID NO: 3453685 - RNA, 22 nt, Human
uacuuguggacuaaaagauaua

SEQ ID NO: 3453686 - RNA, 18 nt, Human
uacuugugguuuucaaau

SEQ ID NO: 3453687 - RNA, 17 nt, Human
uacuuguuguuuaaugu

SEQ ID NO: 3453688 - RNA, 15 nt, Human
uacuuguuucagagu

SEQ ID NO: 3453689 - RNA, 16 nt, Human
uacuuguuucucuguu

SEQ ID NO: 3453690 - RNA, 21 nt, Human
uacuuuaaaggaaaaaauguu

SEQ ID NO: 3453691 - RNA, 23 nt, Human
uacuuuacauaugcuuuaagaau

SEQ ID NO: 3453692 - RNA, 16 nt, Human
uacuuuaccucucugu

SEQ ID NO: 3453693 - RNA, 17 nt, Human
uacuuuaccucucuguc

SEQ ID NO: 3453694 - RNA, 19 nt, Human
uacuuuaccucucugucau

SEQ ID NO: 3453695 - RNA, 16 nt, Human
uacuuuacucauuuuu

SEQ ID NO: 3453696 - RNA, 14 nt, Human
uacuuuagaagcac

SEQ ID NO: 3453697 - RNA, 16 nt, Human
uacuuuauagaagaau

SEQ ID NO: 3453698 - RNA, 22 nt, Human
uacuuuaucaugaaugcuuuua

SEQ ID NO: 3453699 - RNA, 22 nt, Human
uacuuuccacuugauuuugcaa

SEQ ID NO: 3453700 - RNA, 21 nt, Human
uacuuucccuacccucuagag

SEQ ID NO: 3453701 - RNA, 20 nt, Human
uacuuuccuuuccccagccc

SEQ ID NO: 3453702 - RNA, 22 nt, Human
uacuuugaauguguuucacagu

SEQ ID NO: 3453703 - RNA, 23 nt, Human
uacuuugauucacauguuuucaa

SEQ ID NO: 3453704 - RNA, 18 nt, Human
uacuuugcauugucuguc

SEQ ID NO: 3453705 - RNA, 21 nt, Human
uacuuugccuuuccauaauca

SEQ ID NO: 3453706 - RNA, 22 nt, Human
uacuuugguggccacauaagcc

SEQ ID NO: 3453707 - RNA, 17 nt, Human
uacuuuguaaauucuga

SEQ ID NO: 3453708 - RNA, 16 nt, Human
uacuuuguauacaagu

SEQ ID NO: 3453709 - RNA, 16 nt, Human
uacuuuguaugauauu

SEQ ID NO: 3453710 - RNA, 19 nt, Human
uacuuugucuaagaaacau

SEQ ID NO: 3453711 - RNA, 19 nt, Human
uacuuuguuaggauuuuca

SEQ ID NO: 3453712 - RNA, 23 nt, Human
uacuuuguugcaaguacugcugu

SEQ ID NO: 3453713 - RNA, 18 nt, Human
uacuuuuaaaaacauaac

SEQ ID NO: 3453714 - RNA, 14 nt, Human
uacuuuuaaacugu

SEQ ID NO: 3453715 - RNA, 15 nt, Human
uacuuuuaaacugug

SEQ ID NO: 3453716 - RNA, 22 nt, Human
uacuuuuauaauaaaaggaaaa

SEQ ID NO: 3453717 - RNA, 19 nt, Human
uacuuuucauauuugcacu

SEQ ID NO: 3453718 - RNA, 16 nt, Human
uacuuuuccuuaccuu

SEQ ID NO: 3453719 - RNA, 17 nt, Human
uacuuuuccuucccuca

SEQ ID NO: 3453720 - RNA, 15 nt, Human
uacuuuuccuugcau

SEQ ID NO: 3453721 - RNA, 17 nt, Human
uacuuuugcaugaaaau

SEQ ID NO: 3453722 - RNA, 20 nt, Human
uacuuuuuaaaagguauuuu

SEQ ID NO: 3453723 - RNA, 20 nt, Human
uacuuuuuaaaaucuuuucu

SEQ ID NO: 3453724 - RNA, 14 nt, Human
uacuuuuuaaaugu

SEQ ID NO: 3453725 - RNA, 13 nt, Human
uacuuuuuauaua

SEQ ID NO: 3453726 - RNA, 16 nt, Human
uacuuuuucauucuuu

SEQ ID NO: 3453727 - RNA, 13 nt, Human
uacuuuuuccugg

SEQ ID NO: 3453728 - RNA, 12 nt, Human
uacuuuuucuaa

SEQ ID NO: 3453729 - RNA, 17 nt, Human
uacuuuuucuuuuguaa

SEQ ID NO: 3453730 - RNA, 21 nt, Human
uacuuuuuuaaauauuuucua

SEQ ID NO: 3453731 - RNA, 12 nt, Human
uacuuuuuucca

SEQ ID NO: 3453732 - RNA, 14 nt, Human
uacuuuuuucuuau

SEQ ID NO: 3453733 - RNA, 15 nt, Human
uacuuuuuugaaauc

SEQ ID NO: 3453734 - RNA, 15 nt, Human
uagaaaaaaaauuau

SEQ ID NO: 3453735 - RNA, 15 nt, Human
uagaaaaaaauuacu

SEQ ID NO: 3453736 - RNA, 18 nt, Human
uagaaaaaaguuuacaac

SEQ ID NO: 3453737 - RNA, 14 nt, Human
uagaaaaacaaauc

SEQ ID NO: 3453738 - RNA, 15 nt, Human
uagaaaaacaggcac

SEQ ID NO: 3453739 - RNA, 22 nt, Human
uagaaaaacccugcccccaaau

SEQ ID NO: 3453740 - RNA, 23 nt, Human
uagaaaaaggagcuuaccuccca

SEQ ID NO: 3453741 - RNA, 15 nt, Human
uacauuaaagcaguc

SEQ ID NO: 3453742 - RNA, 20 nt, Human
uacauuaauguuaauucagc

SEQ ID NO: 3453743 - RNA, 15 nt, Human
uacauuaauuaucua

SEQ ID NO: 3453744 - RNA, 22 nt, Human
uacauuaauuauuauugcuguu

SEQ ID NO: 3453745 - RNA, 19 nt, Human
uacauuagcaguuugcuuu

SEQ ID NO: 3453746 - RNA, 17 nt, Human
uacauuagguugugaau

SEQ ID NO: 3453747 - RNA, 12 nt, Human
uacauuaguaaa

SEQ ID NO: 3453748 - RNA, 13 nt, Human
uacauuaguaaau

SEQ ID NO: 3453749 - RNA, 17 nt, Human
uacauuaguaaaugucu

SEQ ID NO: 3453750 - RNA, 15 nt, Human
uacauucaauguuua

SEQ ID NO: 3453751 - RNA, 13 nt, Human
uacauucauuuag

SEQ ID NO: 3453752 - RNA, 15 nt, Human
uacauucucaguuuu

SEQ ID NO: 3453753 - RNA, 21 nt, Human
uacauucucaguuuuucuuaa

SEQ ID NO: 3453754 - RNA, 20 nt, Human
uacauucuucaagaucccau

SEQ ID NO: 3453755 - RNA, 15 nt, Human
uacauucuuuuugcu

SEQ ID NO: 3453756 - RNA, 16 nt, Human
uacauucuuuuugcuc

SEQ ID NO: 3453757 - RNA, 19 nt, Human
uacauugcuggucuuguaa

SEQ ID NO: 3453758 - RNA, 19 nt, Human
uacauuggcugguaacagu

SEQ ID NO: 3453759 - RNA, 23 nt, Human
uacauuguacgaagaguauuuuu

SEQ ID NO: 3453760 - RNA, 19 nt, Human
uacauugucucuaaauugu

SEQ ID NO: 3453761 - RNA, 14 nt, Human
uacauuguucaauu

SEQ ID NO: 3453762 - RNA, 15 nt, Human
uacauuguucaauua

SEQ ID NO: 3453763 - RNA, 16 nt, Human
uacauuuaaaacauua

SEQ ID NO: 3453764 - RNA, 19 nt, Human
uacauuuaaaacauuaaaa

SEQ ID NO: 3453765 - RNA, 22 nt, Human
uacauuuaaagcauugcuguua

SEQ ID NO: 3453766 - RNA, 16 nt, Human
uacauuuaauugagaa

SEQ ID NO: 3453767 - RNA, 16 nt, Human
uacauuuacaaacuga

SEQ ID NO: 3453768 - RNA, 17 nt, Human
uacauuuacaaacugaa

SEQ ID NO: 3453769 - RNA, 16 nt, Human
uacauuuauaauugca

SEQ ID NO: 3453770 - RNA, 18 nt, Human
uacauuuaugauuuaaua

SEQ ID NO: 3453771 - RNA, 20 nt, Human
uacauuuaugauuuaauaaa

SEQ ID NO: 3453772 - RNA, 14 nt, Human
uacauuuauuuauc

SEQ ID NO: 3453773 - RNA, 15 nt, Human
uacauuuccaaauga

SEQ ID NO: 3453774 - RNA, 21 nt, Human
uacauuuccaaauucacaagu

SEQ ID NO: 3453775 - RNA, 16 nt, Human
uacauuucccugugcu

SEQ ID NO: 3453776 - RNA, 19 nt, Human
uacauuucuaagucaaaca

SEQ ID NO: 3453777 - RNA, 22 nt, Human
uacauuucuccuuugauaaaau

SEQ ID NO: 3453778 - RNA, 14 nt, Human
uacauuuggaacua

SEQ ID NO: 3453779 - RNA, 23 nt, Human
uacauuuggagacacaacuauuu

SEQ ID NO: 3453780 - RNA, 18 nt, Human
uacauuuggauaaacaac

SEQ ID NO: 3453781 - RNA, 17 nt, Human
uacauuuguaauuuaag

SEQ ID NO: 3453782 - RNA, 19 nt, Human
uacauuuguaauuuaaggu

SEQ ID NO: 3453783 - RNA, 18 nt, Human
uacauuuguauuuuucca

SEQ ID NO: 3453784 - RNA, 16 nt, Human
uacauuuuaacaugga

SEQ ID NO: 3453785 - RNA, 15 nt, Human
uacauuuuacacacu

SEQ ID NO: 3453786 - RNA, 16 nt, Human
uacauuuuagacagua

SEQ ID NO: 3453787 - RNA, 13 nt, Human
uacauuuuguugu

SEQ ID NO: 3453788 - RNA, 17 nt, Human
uacauuuuguuguaaaa

SEQ ID NO: 3453789 - RNA, 20 nt, Human
uacauuuuguuguaaaaaga

SEQ ID NO: 3453790 - RNA, 23 nt, Human
uacauuuuguuguaaaaagaaaa

SEQ ID NO: 3453791 - RNA, 19 nt, Human
uacauuuuuaagugcugca

SEQ ID NO: 3453792 - RNA, 22 nt, Human
uacauuuuuaagugcugcauuu

SEQ ID NO: 3453793 - RNA, 15 nt, Human
uacauuuuuacaaua

SEQ ID NO: 3453794 - RNA, 16 nt, Human
uacauuuuuacaauaa

SEQ ID NO: 3453795 - RNA, 17 nt, Human
uacauuuuuacaauaaa

SEQ ID NO: 3453796 - RNA, 21 nt, Human
uacauuuuuacaauaaauaau

SEQ ID NO: 3453797 - RNA, 20 nt, Human
uacauuuuuagccuguguca

SEQ ID NO: 3453798 - RNA, 14 nt, Human
uacauuuuuauuua

SEQ ID NO: 3453799 - RNA, 19 nt, Human
uacauuuuuauuuaugaag

SEQ ID NO: 3453800 - RNA, 20 nt, Human
uacauuuuucaacuuugaau

SEQ ID NO: 3453801 - RNA, 16 nt, Human
uacauuuuuugaaaug

SEQ ID NO: 3453802 - RNA, 22 nt, Human
uacauuuuuugaaaugcugaaa

SEQ ID NO: 3453803 - RNA, 11 nt, Human
uaccaaaauaa

SEQ ID NO: 3453804 - RNA, 18 nt, Human
uaccaaaauuauuucaga

SEQ ID NO: 3453805 - RNA, 23 nt, Human
uaccaaaauuauuucagaaaugu

SEQ ID NO: 3453806 - RNA, 14 nt, Human
uaccaaaauuuuaa

SEQ ID NO: 3453807 - RNA, 13 nt, Human
uaccaaaggauag

SEQ ID NO: 3453808 - RNA, 18 nt, Human
uaccaaaguuuuaucaag

SEQ ID NO: 3453809 - RNA, 17 nt, Human
uaccaaaugcuuuaaaa

SEQ ID NO: 3453810 - RNA, 20 nt, Human
uaccaacuguuuagggcccu

SEQ ID NO: 3453811 - RNA, 15 nt, Human
uaccaacuuucaaga

SEQ ID NO: 3453812 - RNA, 21 nt, Human
uaccaacuuucaagaacuugu

SEQ ID NO: 3453813 - RNA, 14 nt, Human
uaccaacuuucugu

SEQ ID NO: 3453814 - RNA, 19 nt, Human
uaccaacuuucuguaaacu

SEQ ID NO: 3453815 - RNA, 21 nt, Human
uaccaagaaaggaaccuguca

SEQ ID NO: 3453816 - RNA, 21 nt, Human
uaccaagaugccaucuguguc

SEQ ID NO: 3453817 - RNA, 18 nt, Human
uaccaaguuauauaaaga

SEQ ID NO: 3453818 - RNA, 13 nt, Human
uaccaauaaagug

SEQ ID NO: 3453819 - RNA, 15 nt, Human
uaccaaugaaaaaau

SEQ ID NO: 3453820 - RNA, 17 nt, Human
uaccaaugaaaaaaugu

SEQ ID NO: 3453821 - RNA, 13 nt, Human
uaccaaugcaugc

SEQ ID NO: 3453822 - RNA, 21 nt, Human
uaccaaugccaagauaauuca

SEQ ID NO: 3453823 - RNA, 13 nt, Human
uaccaaugcugca

SEQ ID NO: 3453824 - RNA, 19 nt, Human
uaccaaugcuuuuaucaaa

SEQ ID NO: 3453825 - RNA, 13 nt, Human
uaccacagugucu

SEQ ID NO: 3453826 - RNA, 18 nt, Human
uaccaccagcugugucca

SEQ ID NO: 3453827 - RNA, 14 nt, Human
uaccacccccacac

SEQ ID NO: 3453828 - RNA, 18 nt, Human
uaccacccgguccccacu

SEQ ID NO: 3453829 - RNA, 23 nt, Human
uaccaccucacuuuuucauuucc

SEQ ID NO: 3453830 - RNA, 10 nt, Human
uaccaccucc

SEQ ID NO: 3453831 - RNA, 19 nt, Human
uaccacggccuccuuuccg

SEQ ID NO: 3453832 - RNA, 15 nt, Human
uaccacuaacuccug

SEQ ID NO: 3453833 - RNA, 14 nt, Human
uaccacucuguaau

SEQ ID NO: 3453834 - RNA, 16 nt, Human
uaccacucuguaauug

SEQ ID NO: 3453835 - RNA, 17 nt, Human
uaccacucuguaauugc

SEQ ID NO: 3453836 - RNA, 19 nt, Human
uaccacugaaucuguacag

SEQ ID NO: 3453837 - RNA, 17 nt, Human
uaccacugcugauauuu

SEQ ID NO: 3453838 - RNA, 15 nt, Human
uaccacuuuagauga

SEQ ID NO: 3453839 - RNA, 17 nt, Human
uaccacuuuugcaaaua

SEQ ID NO: 3453840 - RNA, 17 nt, Human
uaccacuuuuguucuug

SEQ ID NO: 3453841 - RNA, 14 nt, Human
uaccagacugcagg

SEQ ID NO: 3453842 - RNA, 19 nt, Human
uaccagaguuguucugucu

SEQ ID NO: 3453843 - RNA, 12 nt, Human
uaccagcagagc

SEQ ID NO: 3453844 - RNA, 22 nt, Human
uaccagcagagcaccuuagaca

SEQ ID NO: 3453845 - RNA, 17 nt, Human
uaccagcccuggggcug

SEQ ID NO: 3453846 - RNA, 21 nt, Human
uaccagcccuggggcugggcc

SEQ ID NO: 3453847 - RNA, 21 nt, Human
uaccagcugcgcuugcuuuuc

SEQ ID NO: 3453848 - RNA, 22 nt, Human
uaccagcugcgcuugcuuuucu

SEQ ID NO: 3453849 - RNA, 13 nt, Human
uaccagcuuuuaa

SEQ ID NO: 3453850 - RNA, 16 nt, Human
uaccagggauguagau

SEQ ID NO: 3453851 - RNA, 17 nt, Human
uaccagggauguagauu

SEQ ID NO: 3453852 - RNA, 18 nt, Human
uaccaguauuuaacuucu

SEQ ID NO: 3453853 - RNA, 21 nt, Human
uaccagucuuuaaaggcccag

SEQ ID NO: 3453854 - RNA, 15 nt, Human
uaccagugaaccaaa

SEQ ID NO: 3453855 - RNA, 19 nt, Human
uaccagugaauuuuugcaa

SEQ ID NO: 3453856 - RNA, 22 nt, Human
uaccagugaauuuuugcaauaa

SEQ ID NO: 3453857 - RNA, 18 nt, Human
uaccagugcaggcuggcc

SEQ ID NO: 3453858 - RNA, 22 nt, Human
uaccagugcaggcuggccagcc

SEQ ID NO: 3453859 - RNA, 19 nt, Human
uaccaguuaauuuuuccaa

SEQ ID NO: 3453860 - RNA, 14 nt, Human
uaccaguugccuuu

SEQ ID NO: 3453861 - RNA, 16 nt, Human
uaccaguugccuuuua

SEQ ID NO: 3453862 - RNA, 15 nt, Human
uaccauaauguauuu

SEQ ID NO: 3453863 - RNA, 22 nt, Human
uaccauacucauuucuaaaaga

SEQ ID NO: 3453864 - RNA, 22 nt, Human
uaccauauuuauccauuuguaa

SEQ ID NO: 3453865 - RNA, 20 nt, Human
uaccaugaacagaaaacauu

SEQ ID NO: 3453866 - RNA, 18 nt, Human
uaccauguaauggcaguu

SEQ ID NO: 3453867 - RNA, 12 nt, Human
uaccauguacau

SEQ ID NO: 3453868 - RNA, 16 nt, Human
uaccaugucacugugg

SEQ ID NO: 3453869 - RNA, 14 nt, Human
uaccaugucuuucu

SEQ ID NO: 3453870 - RNA, 15 nt, Human
uaccaugugccugau

SEQ ID NO: 3453871 - RNA, 17 nt, Human
uaccaugugcuacaggg

SEQ ID NO: 3453872 - RNA, 16 nt, Human
uaccauuaaaacugcu

SEQ ID NO: 3453873 - RNA, 17 nt, Human
uaccauuaaaacugcuu

SEQ ID NO: 3453874 - RNA, 21 nt, Human
uaccauuaaaauaugcacuaa

SEQ ID NO: 3453875 - RNA, 16 nt, Human
uaccauuaaaccaucu

SEQ ID NO: 3453876 - RNA, 13 nt, Human
uaccauucagauc

SEQ ID NO: 3453877 - RNA, 22 nt, Human
uaccauucagaucacugaauuu

SEQ ID NO: 3453878 - RNA, 23 nt, Human
uaccauucagugauuacugucaa

SEQ ID NO: 3453879 - RNA, 13 nt, Human
uaccauuggaaau

SEQ ID NO: 3453880 - RNA, 17 nt, Human
uaccauuggaaauuuca

SEQ ID NO: 3453881 - RNA, 20 nt, Human
uaccauuggaaauuucacgu

SEQ ID NO: 3453882 - RNA, 13 nt, Human
uaccauuuacaug

SEQ ID NO: 3453883 - RNA, 17 nt, Human
uaccauuuacauguuuu

SEQ ID NO: 3453884 - RNA, 14 nt, Human
uaccauuuauacaa

SEQ ID NO: 3453885 - RNA, 15 nt, Human
uaccauuucagagag

SEQ ID NO: 3453886 - RNA, 22 nt, Human
uagcucaggaccugggaccucc

SEQ ID NO: 3453887 - RNA, 16 nt, Human
uagcucaggugucccu

SEQ ID NO: 3453888 - RNA, 12 nt, Human
uagcucauucuc

SEQ ID NO: 3453889 - RNA, 22 nt, Human
uagcucauucuccuuguguuac

SEQ ID NO: 3453890 - RNA, 14 nt, Human
uagcuccccuccaa

SEQ ID NO: 3453891 - RNA, 14 nt, Human
uagcucccuguucu

SEQ ID NO: 3453892 - RNA, 16 nt, Human
uagcuccucacugugg

SEQ ID NO: 3453893 - RNA, 15 nt, Human
uagcuccuccccugg

SEQ ID NO: 3453894 - RNA, 20 nt, Human
uaccauuuccguaauucuua

SEQ ID NO: 3453895 - RNA, 23 nt, Human
uaccauuuccucagcuuaucucu

SEQ ID NO: 3453896 - RNA, 18 nt, Human
uaccauuuguaauaaagu

SEQ ID NO: 3453897 - RNA, 20 nt, Human
uaccauuuguaauaaaguau

SEQ ID NO: 3453898 - RNA, 23 nt, Human
uaccauuuguaauaaaguauaua

SEQ ID NO: 3453899 - RNA, 23 nt, Human
uaccauuuugggguacccacugc

SEQ ID NO: 3453900 - RNA, 20 nt, Human
uaccauuuuuuaaggaaaca

SEQ ID NO: 3453901 - RNA, 15 nt, Human
uacccaaaagagaaa

SEQ ID NO: 3453902 - RNA, 16 nt, Human
uacccaaacccuaggu

SEQ ID NO: 3453903 - RNA, 14 nt, Human
uacccaaacugcuu

SEQ ID NO: 3453904 - RNA, 22 nt, Human
uacccaaaggauacuguaacac

SEQ ID NO: 3453905 - RNA, 15 nt, Human
uacccaaauuaagag

SEQ ID NO: 3453906 - RNA, 23 nt, Human
uacccaacggcccugcagccagc

SEQ ID NO: 3453907 - RNA, 12 nt, Human
uacccaagcaaa

SEQ ID NO: 3453908 - RNA, 15 nt, Human
uacccaauagcugcc

SEQ ID NO: 3453909 - RNA, 12 nt, Human
uacccaccccca

SEQ ID NO: 3453910 - RNA, 17 nt, Human
uacccacccccacccaa

SEQ ID NO: 3453911 - RNA, 19 nt, Human
uacccacccccacccaagg

SEQ ID NO: 3453912 - RNA, 20 nt, Human
uacccaccgggccacuccuu

SEQ ID NO: 3453913 - RNA, 12 nt, Human
uacccaccuaga

SEQ ID NO: 3453914 - RNA, 23 nt, Human
uacccaccugagcuuuggacaca

SEQ ID NO: 3453915 - RNA, 18 nt, Human
uacccagaaugucagauu

SEQ ID NO: 3453916 - RNA, 16 nt, Human
uacccagagaagcccc

SEQ ID NO: 3453917 - RNA, 15 nt, Human
uacccagagaauaua

SEQ ID NO: 3453918 - RNA, 20 nt, Human
uacccagagaauauauacau

SEQ ID NO: 3453919 - RNA, 14 nt, Human
uacccagccaucug

SEQ ID NO: 3453920 - RNA, 16 nt, Human
uacccagccaucugcc

SEQ ID NO: 3453921 - RNA, 19 nt, Human
uacccagccaucugcccag

SEQ ID NO: 3453922 - RNA, 16 nt, Human
uacccagcccaucuug

SEQ ID NO: 3453923 - RNA, 22 nt, Human
uacccagcccaucuugccucca

SEQ ID NO: 3453924 - RNA, 16 nt, Human
uacccagggccugcag

SEQ ID NO: 3453925 - RNA, 22 nt, Human
uacccaggugcuaggaacacuc

SEQ ID NO: 3453926 - RNA, 23 nt, Human
uacccaguuucuaaacuggagac

SEQ ID NO: 3453927 - RNA, 24 nt, Human
uacccaguuucuaaacuggagacu

SEQ ID NO: 3453928 - RNA, 12 nt, Human
uacccauauccc

SEQ ID NO: 3453929 - RNA, 22 nt, Human
uacccaucccauaugccugggc

SEQ ID NO: 3453930 - RNA, 18 nt, Human
uacccaucgguguccauu

SEQ ID NO: 3453931 - RNA, 15 nt, Human
uacccaucuuaaaaa

SEQ ID NO: 3453932 - RNA, 21 nt, Human
uacccauucguggugaucaau

SEQ ID NO: 3453933 - RNA, 15 nt, Human
uacccauuuguucau

SEQ ID NO: 3453934 - RNA, 19 nt, Human
uaccccaagcgcccuggcc

SEQ ID NO: 3453935 - RNA, 14 nt, Human
uaccccacccucag

SEQ ID NO: 3453936 - RNA, 22 nt, Human
uaccccacccucagcaccccuu

SEQ ID NO: 3453937 - RNA, 23 nt, Human
uaccccacccucagcaccccuuc

SEQ ID NO: 3453938 - RNA, 22 nt, Human
uaccccagacuagauguaguau

SEQ ID NO: 3453939 - RNA, 16 nt, Human
uaccccagcucugcuu

SEQ ID NO: 3453940 - RNA, 12 nt, Human
uacccccaaccu

SEQ ID NO: 3453941 - RNA, 16 nt, Human
uacccccagcugugcu

SEQ ID NO: 3453942 - RNA, 15 nt, Human
uaccccccucugucu

SEQ ID NO: 3453943 - RNA, 20 nt, Human
uacccccgcccaggcuggcc

SEQ ID NO: 3453944 - RNA, 17 nt, Human
uacccccuccucucugc

SEQ ID NO: 3453945 - RNA, 19 nt, Human
uacccccugcaaagcccag

SEQ ID NO: 3453946 - RNA, 13 nt, Human
uacccccuucugg

SEQ ID NO: 3453947 - RNA, 23 nt, Human
uacccccuucugggcaucuguuc

SEQ ID NO: 3453948 - RNA, 15 nt, Human
uaccccucccagcug

SEQ ID NO: 3453949 - RNA, 21 nt, Human
uaccccucccggcccugccug

SEQ ID NO: 3453950 - RNA, 22 nt, Human
uaccccucccggcccugccugc

SEQ ID NO: 3453951 - RNA, 23 nt, Human
uaccccucccggcccugccugcu

SEQ ID NO: 3453952 - RNA, 22 nt, Human
uaccccugccuuugggagcagg

SEQ ID NO: 3453953 - RNA, 13 nt, Human
uaccccuggcugu

SEQ ID NO: 3453954 - RNA, 17 nt, Human
uaccccuggcuguacug

SEQ ID NO: 3453955 - RNA, 13 nt, Human
uacccuaaugucu

SEQ ID NO: 3453956 - RNA, 16 nt, Human
uacccuaaugucuuca

SEQ ID NO: 3453957 - RNA, 19 nt, Human
uacccuaaugucuucauaa

SEQ ID NO: 3453958 - RNA, 15 nt, Human
uacccuagccauucc

SEQ ID NO: 3453959 - RNA, 16 nt, Human
uacccuauaucuauaa

SEQ ID NO: 3453960 - RNA, 21 nt, Human
uacccucaggcauaggccugg

SEQ ID NO: 3453961 - RNA, 14 nt, Human
uacccucccugcug

SEQ ID NO: 3453962 - RNA, 12 nt, Human
uacccuccucca

SEQ ID NO: 3453963 - RNA, 18 nt, Human
uacccuccugcacuguuu

SEQ ID NO: 3453964 - RNA, 21 nt, Human
uacccucgggcccaccuggcc

SEQ ID NO: 3453965 - RNA, 23 nt, Human
uacccucgggcccaccuggccac

SEQ ID NO: 3453966 - RNA, 13 nt, Human
uacccucugaaau

SEQ ID NO: 3453967 - RNA, 14 nt, Human
uacccucugaaaua

SEQ ID NO: 3453968 - RNA, 14 nt, Human
uacccugaccuggc

SEQ ID NO: 3453969 - RNA, 22 nt, Human
uacccugaccuggcccccucag

SEQ ID NO: 3453970 - RNA, 17 nt, Human
uacccugagcugaggca

SEQ ID NO: 3453971 - RNA, 14 nt, Human
uacccuggccccuc

SEQ ID NO: 3453972 - RNA, 18 nt, Human
uacccuggccgcccccug

SEQ ID NO: 3453973 - RNA, 12 nt, Human
uacccugggugu

SEQ ID NO: 3453974 - RNA, 21 nt, Human
uacccuggguguccccgcugc

SEQ ID NO: 3453975 - RNA, 15 nt, Human
uacccuucccugcac

SEQ ID NO: 3453976 - RNA, 19 nt, Human
uacccuucugugcccagcu

SEQ ID NO: 3453977 - RNA, 22 nt, Human
uacccuuuccuccuuuaucaca

SEQ ID NO: 3453978 - RNA, 18 nt, Human
uacccuuuuucuccagcu

SEQ ID NO: 3453979 - RNA, 14 nt, Human
uaccgaaugugucu

SEQ ID NO: 3453980 - RNA, 16 nt, Human
uaccgaaugugucuuu

SEQ ID NO: 3453981 - RNA, 17 nt, Human
uaccgagucucuucucc

SEQ ID NO: 3453982 - RNA, 22 nt, Human
uaccgagucucuucuccacugg

SEQ ID NO: 3453983 - RNA, 15 nt, Human
uaccgccugucucuu

SEQ ID NO: 3453984 - RNA, 17 nt, Human
uaccgccugucucuuua

SEQ ID NO: 3453985 - RNA, 23 nt, Human
uaccgcguaaugcgccaauaaac

SEQ ID NO: 3453986 - RNA, 15 nt, Human
uaccgcguuguaaaa

SEQ ID NO: 3453987 - RNA, 13 nt, Human
uaccgucuacauu

SEQ ID NO: 3453988 - RNA, 17 nt, Human
uaccgucuacauuucac

SEQ ID NO: 3453989 - RNA, 19 nt, Human
uaccgugagcgacaaagau

SEQ ID NO: 3453990 - RNA, 14 nt, Human
uaccguuucuuccc

SEQ ID NO: 3453991 - RNA, 23 nt, Human
uaccuaaaaggaaaucucacccc

SEQ ID NO: 3453992 - RNA, 14 nt, Human
uaccuaaacagaua

SEQ ID NO: 3453993 - RNA, 15 nt, Human
uaccuaaacagauau

SEQ ID NO: 3453994 - RNA, 22 nt, Human
uaccuaaacagauauaaauggc

SEQ ID NO: 3453995 - RNA, 20 nt, Human
uaccuaaaguauuuuuauaa

SEQ ID NO: 3453996 - RNA, 16 nt, Human
uaccuaaguacuguaa

SEQ ID NO: 3453997 - RNA, 19 nt, Human
uaccuaagugacauuugua

SEQ ID NO: 3453998 - RNA, 23 nt, Human
uaccuacauguauuuguuugcau

SEQ ID NO: 3453999 - RNA, 20 nt, Human
uaccuaccacagugucugua

SEQ ID NO: 3454000 - RNA, 16 nt, Human
uaccuacuuucuucag

SEQ ID NO: 3454001 - RNA, 14 nt, Human
uaccuacuuugacu

SEQ ID NO: 3454002 - RNA, 13 nt, Human
uaccuagaagaag

SEQ ID NO: 3454003 - RNA, 22 nt, Human
uaccuagcgggauggggcuccc

SEQ ID NO: 3454004 - RNA, 16 nt, Human
uaccuagugaaacuuu

SEQ ID NO: 3454005 - RNA, 18 nt, Human
uaccuagugaaacuuuuc

SEQ ID NO: 3454006 - RNA, 19 nt, Human
uaccuauaaaguaaagcua

SEQ ID NO: 3454007 - RNA, 17 nt, Human
uaccuauaaugugugua

SEQ ID NO: 3454008 - RNA, 18 nt, Human
uaccuauaauguguguau

SEQ ID NO: 3454009 - RNA, 23 nt, Human
uaccuauauaauaaagcuacuga

SEQ ID NO: 3454010 - RNA, 13 nt, Human
uaccuauguaaca

SEQ ID NO: 3454011 - RNA, 12 nt, Human
uaccuauuugac

SEQ ID NO: 3454012 - RNA, 18 nt, Human
uaccucaacaagaagaau

SEQ ID NO: 3454013 - RNA, 19 nt, Human
uaccucaaccuguaaauua

SEQ ID NO: 3454014 - RNA, 14 nt, Human
uaccucaauguuug

SEQ ID NO: 3454015 - RNA, 18 nt, Human
uaccucaauuuucacugu

SEQ ID NO: 3454016 - RNA, 15 nt, Human
uaccucagccugggc

SEQ ID NO: 3454017 - RNA, 21 nt, Human
uaccucagccugggcgcuggu

SEQ ID NO: 3454018 - RNA, 14 nt, Human
uaccucaggcagcu

SEQ ID NO: 3454019 - RNA, 12 nt, Human
uaccucagguug

SEQ ID NO: 3454020 - RNA, 13 nt, Human
uaccucauguuua

SEQ ID NO: 3454021 - RNA, 18 nt, Human
uaccucauguuuaugaaa

SEQ ID NO: 3454022 - RNA, 22 nt, Human
uaccuccaacagaacuaaaugu

SEQ ID NO: 3454023 - RNA, 16 nt, Human
uaccuccaacccugcc

SEQ ID NO: 3454024 - RNA, 17 nt, Human
uaccuccaacccugccg

SEQ ID NO: 3454025 - RNA, 15 nt, Human
uaccucccacacucc

SEQ ID NO: 3454026 - RNA, 20 nt, Human
uaccucccacacucccaagg

SEQ ID NO: 3454027 - RNA, 13 nt, Human
uaccucccaccuu

SEQ ID NO: 3454028 - RNA, 16 nt, Human
uaccucccaccuuugg

SEQ ID NO: 3454029 - RNA, 17 nt, Human
uaccuccccugccuugc

SEQ ID NO: 3454030 - RNA, 18 nt, Human
uaggguacuaaauuuaaa

SEQ ID NO: 3454031 - RNA, 22 nt, Human
uagggugaaccacuucauucug

SEQ ID NO: 3454032 - RNA, 16 nt, Human
uaggguggagagccac

SEQ ID NO: 3454033 - RNA, 15 nt, Human
uaggguucugccucu

SEQ ID NO: 3454034 - RNA, 19 nt, Human
uaggguuuaauccccagua

SEQ ID NO: 3454035 - RNA, 21 nt, Human
uaggguuuaauccccaguaaa

SEQ ID NO: 3454036 - RNA, 19 nt, Human
uaggguuucccuacugaag

SEQ ID NO: 3454037 - RNA, 13 nt, Human
uaggguuucugau

SEQ ID NO: 3454038 - RNA, 15 nt, Human
uagguaaaauguauu

SEQ ID NO: 3454039 - RNA, 16 nt, Human
uagguaaauuacaguu

SEQ ID NO: 3454040 - RNA, 14 nt, Human
uagguagaaaaagg

SEQ ID NO: 3454041 - RNA, 18 nt, Human
uagguagaaaaaggguca

SEQ ID NO: 3454042 - RNA, 20 nt, Human
uagguagaagugagcaaaaa

SEQ ID NO: 3454043 - RNA, 15 nt, Human
uagguagagucugag

SEQ ID NO: 3454044 - RNA, 14 nt, Human
uagguaggaaaugu

SEQ ID NO: 3454045 - RNA, 14 nt, Human
uagguaggguuuaa

SEQ ID NO: 3454046 - RNA, 20 nt, Human
uagguauaucucccagugcu

SEQ ID NO: 3454047 - RNA, 16 nt, Human
uaggucaagaagaaga

SEQ ID NO: 3454048 - RNA, 15 nt, Human
uaggucacuccuggg

SEQ ID NO: 3454049 - RNA, 24 nt, Human
uaggucacuggcucuccaagugcc

SEQ ID NO: 3454050 - RNA, 22 nt, Human
uaggucaguacccaccugagcu

SEQ ID NO: 3454051 - RNA, 15 nt, Human
uagguccucagaaag

SEQ ID NO: 3454052 - RNA, 19 nt, Human
uaggucucggacuaagccu

SEQ ID NO: 3454053 - RNA, 14 nt, Human
uaggucucuucccc

SEQ ID NO: 3454054 - RNA, 17 nt, Human
uaggucucuucucccag

SEQ ID NO: 3454055 - RNA, 18 nt, Human
uaggucugaaauuuuucu

SEQ ID NO: 3454056 - RNA, 17 nt, Human
uaggucugauauucaaa

SEQ ID NO: 3454057 - RNA, 16 nt, Human
uaggugacagagugag

SEQ ID NO: 3454058 - RNA, 17 nt, Human
uaccucugauaccucaa

SEQ ID NO: 3454059 - RNA, 14 nt, Human
uaccucugugugcu

SEQ ID NO: 3454060 - RNA, 14 nt, Human
uaccucuuauugca

SEQ ID NO: 3454061 - RNA, 17 nt, Human
uaccucuuauugcaaaa

SEQ ID NO: 3454062 - RNA, 23 nt, Human
uaccucuugagccuugaacuuug

SEQ ID NO: 3454063 - RNA, 14 nt, Human
uaccucuuuggaaa

SEQ ID NO: 3454064 - RNA, 23 nt, Human
uaccucuuuuagucauuuugcuu

SEQ ID NO: 3454065 - RNA, 20 nt, Human
uaccugaaaacacugugcac

SEQ ID NO: 3454066 - RNA, 21 nt, Human
uaccugaaaacacugugcaca

SEQ ID NO: 3454067 - RNA, 18 nt, Human
uaccugaagggguuuucu

SEQ ID NO: 3454068 - RNA, 19 nt, Human
uaccugaagggguuuucuu

SEQ ID NO: 3454069 - RNA, 16 nt, Human
uaccugaagucuuugu

SEQ ID NO: 3454070 - RNA, 12 nt, Human
uaccugagacca

SEQ ID NO: 3454071 - RNA, 15 nt, Human
uaccugagggucugu

SEQ ID NO: 3454072 - RNA, 16 nt, Human
uaccugaguugaagag

SEQ ID NO: 3454073 - RNA, 19 nt, Human
uaccugaucaaugacagag

SEQ ID NO: 3454074 - RNA, 15 nt, Human
uaccugaucccacuc

SEQ ID NO: 3454075 - RNA, 21 nt, Human
uaccugauuucuucagggcug

SEQ ID NO: 3454076 - RNA, 18 nt, Human
uaccugcaggcugagcca

SEQ ID NO: 3454077 - RNA, 16 nt, Human
uaccugccaggaagcc

SEQ ID NO: 3454078 - RNA, 18 nt, Human
uaccugccaggaagccag

SEQ ID NO: 3454079 - RNA, 20 nt, Human
uaccugccccacuuguccuu

SEQ ID NO: 3454080 - RNA, 16 nt, Human
uaccugcccugacaug

SEQ ID NO: 3454081 - RNA, 16 nt, Human
uaccugcccuggaaca

SEQ ID NO: 3454082 - RNA, 17 nt, Human
uaccugcucagcccugc

SEQ ID NO: 3454083 - RNA, 11 nt, Human
uaccugcugcu

SEQ ID NO: 3454084 - RNA, 19 nt, Human
uaccuggauguucuuuuua

SEQ ID NO: 3454085 - RNA, 20 nt, Human
uaccuggguccccagcccuu

SEQ ID NO: 3454086 - RNA, 19 nt, Human
uaccuguagauucagguaa

SEQ ID NO: 3454087 - RNA, 20 nt, Human
uaccuguauacagugcagag

SEQ ID NO: 3454088 - RNA, 15 nt, Human
uaccuguauucccag

SEQ ID NO: 3454089 - RNA, 21 nt, Human
uaccuguauuuaaaaauagaa

SEQ ID NO: 3454090 - RNA, 17 nt, Human
uaccugucacauugcau

SEQ ID NO: 3454091 - RNA, 14 nt, Human
uaccugucccccug

SEQ ID NO: 3454092 - RNA, 16 nt, Human
uaccugucccccugac

SEQ ID NO: 3454093 - RNA, 16 nt, Human
uaccuguguggacagg

SEQ ID NO: 3454094 - RNA, 13 nt, Human
uaccuguugagca

SEQ ID NO: 3454095 - RNA, 21 nt, Human
uaccuuaaaauuugaaacauu

SEQ ID NO: 3454096 - RNA, 22 nt, Human
uaccuuaaaauuugaaacauug

SEQ ID NO: 3454097 - RNA, 21 nt, Human
uaccuuaaauuaguacagcac

SEQ ID NO: 3454098 - RNA, 22 nt, Human
uaccuuacuguggaggaaggau

SEQ ID NO: 3454099 - RNA, 17 nt, Human
uaccuuauaguuacugu

SEQ ID NO: 3454100 - RNA, 23 nt, Human
uaccuuaucuuacaauauugauu

SEQ ID NO: 3454101 - RNA, 15 nt, Human
uaccuucaaagcuga

SEQ ID NO: 3454102 - RNA, 17 nt, Human
uaccuucaauaaaguau

SEQ ID NO: 3454103 - RNA, 18 nt, Human
uaccuucagauccuaccc

SEQ ID NO: 3454104 - RNA, 16 nt, Human
uaccuuccuucccugg

SEQ ID NO: 3454105 - RNA, 13 nt, Human
uaccuucucccca

SEQ ID NO: 3454106 - RNA, 15 nt, Human
uaccuucuucaggcu

SEQ ID NO: 3454107 - RNA, 22 nt, Human
uaccuugaaaauaagaauagaa

SEQ ID NO: 3454108 - RNA, 18 nt, Human
uaccuugaccuuuguaca

SEQ ID NO: 3454109 - RNA, 21 nt, Human
uaccuugcacacaucaucugu

SEQ ID NO: 3454110 - RNA, 16 nt, Human
uaccuugccccaaccc

SEQ ID NO: 3454111 - RNA, 16 nt, Human
uaccuugcuuuugcuu

SEQ ID NO: 3454112 - RNA, 18 nt, Human
uaccuugcuuuugcuucu

SEQ ID NO: 3454113 - RNA, 21 nt, Human
uaccuugcuuuugcuucuaga

SEQ ID NO: 3454114 - RNA, 22 nt, Human
uaccuugguucccccacugauc

SEQ ID NO: 3454115 - RNA, 14 nt, Human
uaccuuguauacug

SEQ ID NO: 3454116 - RNA, 22 nt, Human
uaccuuguguuuuguuuugauu

SEQ ID NO: 3454117 - RNA, 22 nt, Human
uaccuuguuauuuaacccauuu

SEQ ID NO: 3454118 - RNA, 15 nt, Human
uaccuuucaaagcuu

SEQ ID NO: 3454119 - RNA, 19 nt, Human
uaccuuugacaaagguaaa

SEQ ID NO: 3454120 - RNA, 16 nt, Human
uaccuuugcucuugca

SEQ ID NO: 3454121 - RNA, 20 nt, Human
uaccuuuguauucucuccug

SEQ ID NO: 3454122 - RNA, 23 nt, Human
uaccuuuguucccaaauuucaua

SEQ ID NO: 3454123 - RNA, 17 nt, Human
uaccuuuucagggcugg

SEQ ID NO: 3454124 - RNA, 14 nt, Human
uaccuuuucucuuc

SEQ ID NO: 3454125 - RNA, 21 nt, Human
uaccuuuugaggagccccagc

SEQ ID NO: 3454126 - RNA, 22 nt, Human
uaccuuuuuuagaguugauacu

SEQ ID NO: 3454127 - RNA, 19 nt, Human
uaccuuuuuuauacauaaa

SEQ ID NO: 3454128 - RNA, 20 nt, Human
uaccuuuuuuauacauaaac

SEQ ID NO: 3454129 - RNA, 23 nt, Human
uacgaaaaaaugguagcauuuua

SEQ ID NO: 3454130 - RNA, 17 nt, Human
uacgaaauaauuguugu

SEQ ID NO: 3454131 - RNA, 22 nt, Human
uacgaaccuacaguuuuaacug

SEQ ID NO: 3454132 - RNA, 20 nt, Human
uacgaagaguauuuuugaca

SEQ ID NO: 3454133 - RNA, 17 nt, Human
uacgaaguucaagauca

SEQ ID NO: 3454134 - RNA, 14 nt, Human
uacgaauacuuuug

SEQ ID NO: 3454135 - RNA, 23 nt, Human
uacgacaguacacugucagcagg

SEQ ID NO: 3454136 - RNA, 21 nt, Human
uacgacucuuuuccaaacaca

SEQ ID NO: 3454137 - RNA, 14 nt, Human
uacgauaaggaaga

SEQ ID NO: 3454138 - RNA, 16 nt, Human
uacgauaaggaagaaa

SEQ ID NO: 3454139 - RNA, 23 nt, Human
uacgauacgcuacuauaaagaga

SEQ ID NO: 3454140 - RNA, 13 nt, Human
uacgaugcuucaa

SEQ ID NO: 3454141 - RNA, 16 nt, Human
uacgauggcacccagu

SEQ ID NO: 3454142 - RNA, 20 nt, Human
uacgauuuaagguauuuaaa

SEQ ID NO: 3454143 - RNA, 13 nt, Human
uacgcuaguuauc

SEQ ID NO: 3454144 - RNA, 14 nt, Human
uacgcuggugcuga

SEQ ID NO: 3454145 - RNA, 14 nt, Human
uacgcuuugauuca

SEQ ID NO: 3454146 - RNA, 15 nt, Human
uacgcuuugauucau

SEQ ID NO: 3454147 - RNA, 17 nt, Human
uacgcuuuuaaugaaaa

SEQ ID NO: 3454148 - RNA, 19 nt, Human
uacggaucaucaacaagau

SEQ ID NO: 3454149 - RNA, 23 nt, Human
uacggauccugcacugacucugg

SEQ ID NO: 3454150 - RNA, 15 nt, Human
uacggauuuucaguu

SEQ ID NO: 3454151 - RNA, 12 nt, Human
uacggugggggu

SEQ ID NO: 3454152 - RNA, 16 nt, Human
uacguaauaagguuuu

SEQ ID NO: 3454153 - RNA, 19 nt, Human
uacguaauaagguuuuaau

SEQ ID NO: 3454154 - RNA, 12 nt, Human
uacguacacauu

SEQ ID NO: 3454155 - RNA, 13 nt, Human
uacguaugagacg

SEQ ID NO: 3454156 - RNA, 22 nt, Human
uacguaugucugguucucaauu

SEQ ID NO: 3454157 - RNA, 16 nt, Human
uacgucugacaggcaa

SEQ ID NO: 3454158 - RNA, 17 nt, Human
uacgugacccucugcug

SEQ ID NO: 3454159 - RNA, 18 nt, Human
uacgugcucugugggucu

SEQ ID NO: 3454160 - RNA, 19 nt, Human
uacgugggcauugucuuuu

SEQ ID NO: 3454161 - RNA, 14 nt, Human
uacgugugcaugug

SEQ ID NO: 3454162 - RNA, 15 nt, Human
uacguuauuguugac

SEQ ID NO: 3454163 - RNA, 13 nt, Human
uacguugugcauu

SEQ ID NO: 3454164 - RNA, 16 nt, Human
uacguugugcauuugg

SEQ ID NO: 3454165 - RNA, 16 nt, Human
uacguuugaagacauu

SEQ ID NO: 3454166 - RNA, 22 nt, Human
uacguuugaagacauugcacca

SEQ ID NO: 3454167 - RNA, 16 nt, Human
uacuaaaaagaaggaa

SEQ ID NO: 3454168 - RNA, 16 nt, Human
uacuaaaaaguauaaa

SEQ ID NO: 3454169 - RNA, 21 nt, Human
uacuaaaaaguauaaaauagu

SEQ ID NO: 3454170 - RNA, 18 nt, Human
uacuaaaaauacaaaaaa

SEQ ID NO: 3454171 - RNA, 15 nt, Human
uacuaaaauggacug

SEQ ID NO: 3454172 - RNA, 17 nt, Human
uacuaaaauggacugug

SEQ ID NO: 3454173 - RNA, 23 nt, Human
uacuaaaauggacuguggugacu

SEQ ID NO: 3454174 - RNA, 16 nt, Human
gcccagcucccccggg

SEQ ID NO: 3454175 - RNA, 24 nt, Human
gcccagcugcaccugccagccugg

SEQ ID NO: 3454176 - RNA, 14 nt, Human
gcccagcugcucug

SEQ ID NO: 3454177 - RNA, 15 nt, Human
gcccagcugggcucu

SEQ ID NO: 3454178 - RNA, 19 nt, Human
gcccagcugggcucugcca

SEQ ID NO: 3454179 - RNA, 21 nt, Human
gcccagcugggcucugccacc

SEQ ID NO: 3454180 - RNA, 23 nt, Human
gcccagcugggcucugccacccu

SEQ ID NO: 3454181 - RNA, 19 nt, Human
gcccagcuugggcccagcu

SEQ ID NO: 3454182 - RNA, 20 nt, Human
gcccagcuugggcccagcug

SEQ ID NO: 3454183 - RNA, 22 nt, Human
gcccagcuugggcccagcuggg

SEQ ID NO: 3454184 - RNA, 15 nt, Human
gcccaggaaaggcuc

SEQ ID NO: 3454185 - RNA, 20 nt, Human
gcccaggaaaggcuccagga

SEQ ID NO: 3454186 - RNA, 20 nt, Human
gcccaggaauuugaagcugc

SEQ ID NO: 3454187 - RNA, 15 nt, Human
gcccaggaccagcug

SEQ ID NO: 3454188 - RNA, 16 nt, Human
gcccaggaccagcugg

SEQ ID NO: 3454189 - RNA, 22 nt, Human
gcccaggaccaucuucccgaga

SEQ ID NO: 3454190 - RNA, 21 nt, Human
gcccaggaccccauggcagug

SEQ ID NO: 3454191 - RNA, 20 nt, Human
gcccaggacggggccggcca

SEQ ID NO: 3454192 - RNA, 12 nt, Human
gcccaggagaga

SEQ ID NO: 3454193 - RNA, 17 nt, Human
gcccaggagagagaaag

SEQ ID NO: 3454194 - RNA, 15 nt, Human
gcccaggagcccauu

SEQ ID NO: 3454195 - RNA, 15 nt, Human
gcccaggagcucccc

SEQ ID NO: 3454196 - RNA, 21 nt, Human
gcccaggagcuccccucccca

SEQ ID NO: 3454197 - RNA, 22 nt, Human
gcccaggaguuugaggcugcag

SEQ ID NO: 3454198 - RNA, 17 nt, Human
gcccaggaguuuggcca

SEQ ID NO: 3454199 - RNA, 18 nt, Human
gcccaggaguuuggccag

SEQ ID NO: 3454200 - RNA, 15 nt, Human
gcccaggauacuggc

SEQ ID NO: 3454201 - RNA, 20 nt, Human
gcccaggauacuggcacaga

SEQ ID NO: 3454202 - RNA, 16 nt, Human
gcccaggauauauuuu

SEQ ID NO: 3454203 - RNA, 18 nt, Human
gcccaggauauauuuuau

SEQ ID NO: 3454204 - RNA, 15 nt, Human
gcccaggcacugcaa

SEQ ID NO: 3454205 - RNA, 16 nt, Human
gcccaggcacugcaaa

SEQ ID NO: 3454206 - RNA, 14 nt, Human
gcccaggcaggucu

SEQ ID NO: 3454207 - RNA, 11 nt, Human
gcccaggccag

SEQ ID NO: 3454208 - RNA, 19 nt, Human
gcccaggccaucuuccagg

SEQ ID NO: 3454209 - RNA, 15 nt, Human
gcccaggccccugcc

SEQ ID NO: 3454210 - RNA, 20 nt, Human
gcccaggccccugccacccu

SEQ ID NO: 3454211 - RNA, 21 nt, Human
gcccaggccccugccacccug

SEQ ID NO: 3454212 - RNA, 22 nt, Human
gcccaggccccugccacccugg

SEQ ID NO: 3454213 - RNA, 14 nt, Human
gcccaggccggcca

SEQ ID NO: 3454214 - RNA, 15 nt, Human
gcccaggccggccag

SEQ ID NO: 3454215 - RNA, 16 nt, Human
gcccaggccggccagc

SEQ ID NO: 3454216 - RNA, 19 nt, Human
gcccaggccggccagccuc

SEQ ID NO: 3454217 - RNA, 21 nt, Human
gcccaggccgggguggagcau

SEQ ID NO: 3454218 - RNA, 21 nt, Human
gcccaggccuccagcucagca

SEQ ID NO: 3454219 - RNA, 22 nt, Human
gcccaggcgggagcgguggccc

SEQ ID NO: 3454220 - RNA, 18 nt, Human
gcccaggcucggccugcc

SEQ ID NO: 3454221 - RNA, 20 nt, Human
gcccaggcucggccugcccc

SEQ ID NO: 3454222 - RNA, 11 nt, Human
gcccaggcugg

SEQ ID NO: 3454223 - RNA, 12 nt, Human
gcccaggcuggc

SEQ ID NO: 3454224 - RNA, 22 nt, Human
gcccaggcuggcgugcaguggu

SEQ ID NO: 3454225 - RNA, 12 nt, Human
gcccaggcuggu

SEQ ID NO: 3454226 - RNA, 21 nt, Human
gcccagggacaccagccaggc

SEQ ID NO: 3454227 - RNA, 24 nt, Human
gcccagggacaccagccaggcucu

SEQ ID NO: 3454228 - RNA, 18 nt, Human
gcccagggagaggccaug

SEQ ID NO: 3454229 - RNA, 12 nt, Human
gcccagggaggc

SEQ ID NO: 3454230 - RNA, 16 nt, Human
gcccagggcaagcucc

SEQ ID NO: 3454231 - RNA, 23 nt, Human
gcccagggcaagcuccgcaggac

SEQ ID NO: 3454232 - RNA, 20 nt, Human
gcccagggcaucuugcuggc

SEQ ID NO: 3454233 - RNA, 21 nt, Human
gcccagggcaucuugcuggcu

SEQ ID NO: 3454234 - RNA, 20 nt, Human
gcccagggccacucugccuc

SEQ ID NO: 3454235 - RNA, 15 nt, Human
gcccagggcccagag

SEQ ID NO: 3454236 - RNA, 17 nt, Human
gcccagggcccagagcc

SEQ ID NO: 3454237 - RNA, 12 nt, Human
gcccagggcuca

SEQ ID NO: 3454238 - RNA, 15 nt, Human
gcccagggcucagcc

SEQ ID NO: 3454239 - RNA, 16 nt, Human
gcccagggcucagccu

SEQ ID NO: 3454240 - RNA, 17 nt, Human
gcccagggcucagccug

SEQ ID NO: 3454241 - RNA, 18 nt, Human
gcccagggcuccugcacu

SEQ ID NO: 3454242 - RNA, 20 nt, Human
gcccagggcugggaggaagg

SEQ ID NO: 3454243 - RNA, 15 nt, Human
gcccaggggagcccu

SEQ ID NO: 3454244 - RNA, 17 nt, Human
gcccaggggugcccccu

SEQ ID NO: 3454245 - RNA, 18 nt, Human
gcccaggggugcccccuc

SEQ ID NO: 3454246 - RNA, 22 nt, Human
gcccaggggugcccccuccucu

SEQ ID NO: 3454247 - RNA, 15 nt, Human
gcccaggguggccac

SEQ ID NO: 3454248 - RNA, 20 nt, Human
gcccaggguggccacaccuc

SEQ ID NO: 3454249 - RNA, 17 nt, Human
gcccagguuucuggucu

SEQ ID NO: 3454250 - RNA, 23 nt, Human
gcccagguuucuggucucuaggc

SEQ ID NO: 3454251 - RNA, 22 nt, Human
gcccaguacauuuaaauuuuuu

SEQ ID NO: 3454252 - RNA, 22 nt, Human
gcccaguaccuagcuggcucug

SEQ ID NO: 3454253 - RNA, 15 nt, Human
gcccaguagaccuug

SEQ ID NO: 3454254 - RNA, 12 nt, Human
gcccagucccag

SEQ ID NO: 3454255 - RNA, 15 nt, Human
gcccagucccagcag

SEQ ID NO: 3454256 - RNA, 19 nt, Human
gcccagucccagcagccag

SEQ ID NO: 3454257 - RNA, 14 nt, Human
gcccagucccccaa

SEQ ID NO: 3454258 - RNA, 23 nt, Human
gcccaguccucucccaaguccac

SEQ ID NO: 3454259 - RNA, 18 nt, Human
gcccaguccuuccaccuc

SEQ ID NO: 3454260 - RNA, 22 nt, Human
gcccagucuggaaugcaguggu

SEQ ID NO: 3454261 - RNA, 14 nt, Human
gcccagugcauggu

SEQ ID NO: 3454262 - RNA, 22 nt, Human
gcccagugucaaguugugcuug

SEQ ID NO: 3454263 - RNA, 20 nt, Human
uagacaaauagaaaaugguc

SEQ ID NO: 3454264 - RNA, 14 nt, Human
uagacaagauauug

SEQ ID NO: 3454265 - RNA, 21 nt, Human
uagacaagauauuguacauaa

SEQ ID NO: 3454266 - RNA, 15 nt, Human
uagacaagccagaac

SEQ ID NO: 3454267 - RNA, 19 nt, Human
uagacaagccagaacuuga

SEQ ID NO: 3454268 - RNA, 20 nt, Human
uagacaaucauuguuuugaa

SEQ ID NO: 3454269 - RNA, 16 nt, Human
uagacaauuuauuaug

SEQ ID NO: 3454270 - RNA, 15 nt, Human
uagacacacaaagca

SEQ ID NO: 3454271 - RNA, 16 nt, Human
uagacacacaaagcag

SEQ ID NO: 3454272 - RNA, 20 nt, Human
uagacacaggauagauaacu

SEQ ID NO: 3454273 - RNA, 19 nt, Human
uagacacaugaagguaaau

SEQ ID NO: 3454274 - RNA, 21 nt, Human
uagacacaugaagguaaauaa

SEQ ID NO: 3454275 - RNA, 17 nt, Human
uagacaccaaaguucua

SEQ ID NO: 3454276 - RNA, 17 nt, Human
uagacacuggcugccag

SEQ ID NO: 3454277 - RNA, 15 nt, Human
uagacacuuuggaag

SEQ ID NO: 3454278 - RNA, 15 nt, Human
uagacagaggcccuc

SEQ ID NO: 3454279 - RNA, 21 nt, Human
uagacagagucucacuguugc

SEQ ID NO: 3454280 - RNA, 20 nt, Human
uagacagccaaaggcuggcg

SEQ ID NO: 3454281 - RNA, 19 nt, Human
uagacagcuuuucucaacu

SEQ ID NO: 3454282 - RNA, 15 nt, Human
uagacaggagaagaa

SEQ ID NO: 3454283 - RNA, 14 nt, Human
uagacagucccugc

SEQ ID NO: 3454284 - RNA, 16 nt, Human
uagacaguuuugagaa

SEQ ID NO: 3454285 - RNA, 13 nt, Human
uagacauaacaaa

SEQ ID NO: 3454286 - RNA, 12 nt, Human
uagacaugaaag

SEQ ID NO: 3454287 - RNA, 19 nt, Human
uagacauggagguucuaag

SEQ ID NO: 3454288 - RNA, 23 nt, Human
uagacauggagguucuaaggccu

SEQ ID NO: 3454289 - RNA, 15 nt, Human
uagacauugaggacc

SEQ ID NO: 3454290 - RNA, 18 nt, Human
uagacauuucucuuacug

SEQ ID NO: 3454291 - RNA, 16 nt, Human
uagacauuuuaacaag

SEQ ID NO: 3454292 - RNA, 17 nt, Human
uagacauuuuaacaaga

SEQ ID NO: 3454293 - RNA, 13 nt, Human
uagaccaaaauaa

SEQ ID NO: 3454294 - RNA, 14 nt, Human
uagaccaaaauaaa

SEQ ID NO: 3454295 - RNA, 13 nt, Human
uagaccaaggaac

SEQ ID NO: 3454296 - RNA, 14 nt, Human
uagaccaaggaaca

SEQ ID NO: 3454297 - RNA, 15 nt, Human
uagaccaaggaacaa

SEQ ID NO: 3454298 - RNA, 22 nt, Human
uagaccacaaauagugcucgcu

SEQ ID NO: 3454299 - RNA, 16 nt, Human
uagaccaccaagccuu

SEQ ID NO: 3454300 - RNA, 19 nt, Human
uagaccaccaagccuugau

SEQ ID NO: 3454301 - RNA, 20 nt, Human
uagacccacuggacucaccu

SEQ ID NO: 3454302 - RNA, 23 nt, Human
uagacccucaugcugccaauauc

SEQ ID NO: 3454303 - RNA, 13 nt, Human
uagaccuacaggg

SEQ ID NO: 3454304 - RNA, 13 nt, Human
uagaccucagccu

SEQ ID NO: 3454305 - RNA, 20 nt, Human
uagaccucagccugugcugc

SEQ ID NO: 3454306 - RNA, 14 nt, Human
uagaccugucuccu

SEQ ID NO: 3454307 - RNA, 17 nt, Human
uagaccuuguuacuucu

SEQ ID NO: 3454308 - RNA, 23 nt, Human
uagacgagcaggcuucuuccccc

SEQ ID NO: 3454309 - RNA, 22 nt, Human
uagacuauaaauguugcuaugu

SEQ ID NO: 3454310 - RNA, 13 nt, Human
uagacuauauaca

SEQ ID NO: 3454311 - RNA, 12 nt, Human
uagacucuucac

SEQ ID NO: 3454312 - RNA, 21 nt, Human
uagacucuuuuccuucccuuu

SEQ ID NO: 3454313 - RNA, 20 nt, Human
uagacugccacaaggaagaa

SEQ ID NO: 3454314 - RNA, 22 nt, Human
uagacugccacaaggaagaaau

SEQ ID NO: 3454315 - RNA, 23 nt, Human
uagacugccacaaggaagaaauu

SEQ ID NO: 3454316 - RNA, 17 nt, Human
uagacugccgugcauua

SEQ ID NO: 3454317 - RNA, 20 nt, Human
uagacuggccugaaccacag

SEQ ID NO: 3454318 - RNA, 16 nt, Human
uagauccacacacaga

SEQ ID NO: 3454319 - RNA, 20 nt, Human
uagauccauuaauuuaaaug

SEQ ID NO: 3454320 - RNA, 22 nt, Human
uagaucgaugauaugaccagaa

SEQ ID NO: 3454321 - RNA, 12 nt, Human
uagaucuccagc

SEQ ID NO: 3454322 - RNA, 14 nt, Human
uagaucuucugaaa

SEQ ID NO: 3454323 - RNA, 15 nt, Human
uagaucuucugaaau

SEQ ID NO: 3454324 - RNA, 13 nt, Human
uagaugaaaaagc

SEQ ID NO: 3454325 - RNA, 20 nt, Human
uagaugaaaaagcauguaca

SEQ ID NO: 3454326 - RNA, 17 nt, Human
uagaugagcugggccgg

SEQ ID NO: 3454327 - RNA, 20 nt, Human
uagaugauuaaauaagauuc

SEQ ID NO: 3454328 - RNA, 16 nt, Human
uagaugcaguucugaa

SEQ ID NO: 3454329 - RNA, 21 nt, Human
uagaugcaguucugaagaaga

SEQ ID NO: 3454330 - RNA, 20 nt, Human
uagaugcugaugauuuguuu

SEQ ID NO: 3454331 - RNA, 17 nt, Human
uagauggaaaaacuugu

SEQ ID NO: 3454332 - RNA, 18 nt, Human
uagauggccucuuacuaa

SEQ ID NO: 3454333 - RNA, 18 nt, Human
uagaugggaaugaagcuu

SEQ ID NO: 3454334 - RNA, 19 nt, Human
uagaugggaaugaagcuug

SEQ ID NO: 3454335 - RNA, 22 nt, Human
uagaugggaaugaagcuugugu

SEQ ID NO: 3454336 - RNA, 20 nt, Human
uagaugggcauggggugggc

SEQ ID NO: 3454337 - RNA, 15 nt, Human
uagauggugcugaga

SEQ ID NO: 3454338 - RNA, 19 nt, Human
uagauggugcugagaagcu

SEQ ID NO: 3454339 - RNA, 14 nt, Human
uagaugguuacacu

SEQ ID NO: 3454340 - RNA, 21 nt, Human
uagaugguuacacuguuagaa

SEQ ID NO: 3454341 - RNA, 14 nt, Human
uagauguaaauuuu

SEQ ID NO: 3454342 - RNA, 16 nt, Human
uagauguaauuuugug

SEQ ID NO: 3454343 - RNA, 20 nt, Human
uagauguagauaaacucaga

SEQ ID NO: 3454344 - RNA, 16 nt, Human
uagauguauaacuagg

SEQ ID NO: 3454345 - RNA, 20 nt, Human
uagaugucuuuucccauuua

SEQ ID NO: 3454346 - RNA, 15 nt, Human
uagaugugagaaaac

SEQ ID NO: 3454347 - RNA, 15 nt, Human
uagaugugauuuaau

SEQ ID NO: 3454348 - RNA, 23 nt, Human
uagaugugauuuaauaguguuaa

SEQ ID NO: 3454349 - RNA, 17 nt, Human
uagauguucagauugcu

SEQ ID NO: 3454350 - RNA, 14 nt, Human
uagauguucucuau

SEQ ID NO: 3454351 - RNA, 18 nt, Human
uagauguucucuaucauu

SEQ ID NO: 3454352 - RNA, 14 nt, Human
uagauguugccaug

SEQ ID NO: 3454353 - RNA, 15 nt, Human
uagauguugccaugu

SEQ ID NO: 3454354 - RNA, 13 nt, Human
uagauguuucaca

SEQ ID NO: 3454355 - RNA, 13 nt, Human
uagauuaaauaua

SEQ ID NO: 3454356 - RNA, 22 nt, Human
uagauuaaauauagauuagaaa

SEQ ID NO: 3454357 - RNA, 16 nt, Human
uagauuagaaaaauuc

SEQ ID NO: 3454358 - RNA, 14 nt, Human
uagauuagaauucu

SEQ ID NO: 3454359 - RNA, 20 nt, Human
uagauuagaucuuuuaagcc

SEQ ID NO: 3454360 - RNA, 14 nt, Human
uagauuauaucaaa

SEQ ID NO: 3454361 - RNA, 17 nt, Human
uagauuauaucaaagua

SEQ ID NO: 3454362 - RNA, 15 nt, Human
uagauucaaagguuc

SEQ ID NO: 3454363 - RNA, 12 nt, Human
uagauucaccug

SEQ ID NO: 3454364 - RNA, 16 nt, Human
uagauucaccuguaaa

SEQ ID NO: 3454365 - RNA, 22 nt, Human
uagauucucuggcuguaaggcu

SEQ ID NO: 3454366 - RNA, 19 nt, Human
uagauucucugugucuaag

SEQ ID NO: 3454367 - RNA, 20 nt, Human
uagauucucugugucuaaga

SEQ ID NO: 3454368 - RNA, 21 nt, Human
uagauucucugugucuaagau

SEQ ID NO: 3454369 - RNA, 18 nt, Human
uagauugaaaacuuuucu

SEQ ID NO: 3454370 - RNA, 20 nt, Human
uagauugaaaacuuuucuca

SEQ ID NO: 3454371 - RNA, 22 nt, Human
uagauugacuaacucaaauaca

SEQ ID NO: 3454372 - RNA, 12 nt, Human
uagauuguaaac

SEQ ID NO: 3454373 - RNA, 15 nt, Human
uagauuuauuucauc

SEQ ID NO: 3454374 - RNA, 18 nt, Human
uagauuucugauuuuaug

SEQ ID NO: 3454375 - RNA, 13 nt, Human
uagauuuggaaua

SEQ ID NO: 3454376 - RNA, 13 nt, Human
uagauuugggaga

SEQ ID NO: 3454377 - RNA, 19 nt, Human
uagauuuguuuuguguugu

SEQ ID NO: 3454378 - RNA, 16 nt, Human
uagauuuuaaucaaau

SEQ ID NO: 3454379 - RNA, 17 nt, Human
uagauuuuaaucaaauu

SEQ ID NO: 3454380 - RNA, 16 nt, Human
uagauuuuauuuuacu

SEQ ID NO: 3454381 - RNA, 17 nt, Human
uagauuuucauguucuu

SEQ ID NO: 3454382 - RNA, 23 nt, Human
uagauuuuguguuuauucuugau

SEQ ID NO: 3454383 - RNA, 17 nt, Human
uagauuuuguuuugcuu

SEQ ID NO: 3454384 - RNA, 13 nt, Human
uagcaaaaaaagu

SEQ ID NO: 3454385 - RNA, 14 nt, Human
uagcaaaaaaaguu

SEQ ID NO: 3454386 - RNA, 18 nt, Human
uagcaaaaaaaguuguau

SEQ ID NO: 3454387 - RNA, 21 nt, Human
uagcaaaaaaaguuguaugau

SEQ ID NO: 3454388 - RNA, 14 nt, Human
uagcaaaaacaugu

SEQ ID NO: 3454389 - RNA, 21 nt, Human
uagcaaaauaaaacauagcaa

SEQ ID NO: 3454390 - RNA, 22 nt, Human
uagcaaacccugucaaacauua

SEQ ID NO: 3454391 - RNA, 21 nt, Human
uagcaaauguuuugacaugaa

SEQ ID NO: 3454392 - RNA, 21 nt, Human
uagcaacuacagucuaaagcu

SEQ ID NO: 3454393 - RNA, 22 nt, Human
uagcaacuacagucuaaagcug

SEQ ID NO: 3454394 - RNA, 18 nt, Human
uagcaagacacaucccua

SEQ ID NO: 3454395 - RNA, 13 nt, Human
uagcaagcuggcc

SEQ ID NO: 3454396 - RNA, 22 nt, Human
uagcaagugaauuuuucucuaa

SEQ ID NO: 3454397 - RNA, 18 nt, Human
uagcaaguucuagagaag

SEQ ID NO: 3454398 - RNA, 19 nt, Human
uagcaaguucuagagaaga

SEQ ID NO: 3454399 - RNA, 21 nt, Human
uagcaaguucuagagaagagg

SEQ ID NO: 3454400 - RNA, 21 nt, Human
uagcaauccauguuaguuuuu

SEQ ID NO: 3454401 - RNA, 16 nt, Human
uagcaauuccaucacc

SEQ ID NO: 3454402 - RNA, 13 nt, Human
uagcacaaaaaaa

SEQ ID NO: 3454403 - RNA, 21 nt, Human
uagcacagacccugcccugug

SEQ ID NO: 3454404 - RNA, 24 nt, Human
uagcacagacccugcccugugggc

SEQ ID NO: 3454405 - RNA, 17 nt, Human
uagcacagauggccagc

SEQ ID NO: 3454406 - RNA, 19 nt, Human
uagcacagauuuuaauugu

SEQ ID NO: 3454407 - RNA, 12 nt, Human
uagcacagcagc

SEQ ID NO: 3454408 - RNA, 12 nt, Human
uagcacaggcug

SEQ ID NO: 3454409 - RNA, 13 nt, Human
uagcacaggcuga

SEQ ID NO: 3454410 - RNA, 17 nt, Human
uagcacauaaacuuugg

SEQ ID NO: 3454411 - RNA, 16 nt, Human
uagcacaugcuucaau

SEQ ID NO: 3454412 - RNA, 14 nt, Human
uagcacucacaugc

SEQ ID NO: 3454413 - RNA, 15 nt, Human
uagcacucacaugcu

SEQ ID NO: 3454414 - RNA, 16 nt, Human
uagcacuguugaugua

SEQ ID NO: 3454415 - RNA, 17 nt, Human
uagcacuguugauguau

SEQ ID NO: 3454416 - RNA, 19 nt, Human
uagcacuguugauguaucu

SEQ ID NO: 3454417 - RNA, 23 nt, Human
uagcacuguugauguaucugagu

SEQ ID NO: 3454418 - RNA, 20 nt, Human
uagcacuuucauugccagug

SEQ ID NO: 3454419 - RNA, 14 nt, Human
uagcacuuugaaau

SEQ ID NO: 3454420 - RNA, 15 nt, Human
uagcacuuugaaaua

SEQ ID NO: 3454421 - RNA, 16 nt, Human
uagcacuuugggaggc

SEQ ID NO: 3454422 - RNA, 16 nt, Human
uagcagaagaaaggaa

SEQ ID NO: 3454423 - RNA, 19 nt, Human
gcccaguguuguuuguaaa

SEQ ID NO: 3454424 - RNA, 15 nt, Human
gcccaguugggugga

SEQ ID NO: 3454425 - RNA, 19 nt, Human
gcccaguuggguggaugcc

SEQ ID NO: 3454426 - RNA, 21 nt, Human
gcccaguuggguggaugccug

SEQ ID NO: 3454427 - RNA, 16 nt, Human
gcccaguuucagggcu

SEQ ID NO: 3454428 - RNA, 17 nt, Human
gcccaguuucagggcua

SEQ ID NO: 3454429 - RNA, 15 nt, Human
gcccaguuucugccu

SEQ ID NO: 3454430 - RNA, 14 nt, Human
gcccauacucagcc

SEQ ID NO: 3454431 - RNA, 17 nt, Human
gcccauacucagccugc

SEQ ID NO: 3454432 - RNA, 20 nt, Human
gcccauaugcuaccaccagc

SEQ ID NO: 3454433 - RNA, 21 nt, Human
gcccauaugcuaccaccagcu

SEQ ID NO: 3454434 - RNA, 17 nt, Human
gcccaucacaggguugg

SEQ ID NO: 3454435 - RNA, 22 nt, Human
gcccaucacaggguugggccca

SEQ ID NO: 3454436 - RNA, 20 nt, Human
gcccauccauuaggccagca

SEQ ID NO: 3454437 - RNA, 22 nt, Human
gcccauccauuaggccagcaac

SEQ ID NO: 3454438 - RNA, 15 nt, Human
gcccauccccccuca

SEQ ID NO: 3454439 - RNA, 16 nt, Human
gcccauccccccucac

SEQ ID NO: 3454440 - RNA, 17 nt, Human
gcccauccccccucacc

SEQ ID NO: 3454441 - RNA, 18 nt, Human
gcccauccccccucacca

SEQ ID NO: 3454442 - RNA, 16 nt, Human
gcccaucccugccugg

SEQ ID NO: 3454443 - RNA, 21 nt, Human
gcccaucccuggaaggugcug

SEQ ID NO: 3454444 - RNA, 16 nt, Human
gcccauccugaccagc

SEQ ID NO: 3454445 - RNA, 15 nt, Human
gcccauccugacuga

SEQ ID NO: 3454446 - RNA, 18 nt, Human
gcccauccugucuguuca

SEQ ID NO: 3454447 - RNA, 22 nt, Human
gcccaucuaugucccuugcugu

SEQ ID NO: 3454448 - RNA, 14 nt, Human
gcccaucucccugc

SEQ ID NO: 3454449 - RNA, 23 nt, Human
gcccaucucggagcaucccggag

SEQ ID NO: 3454450 - RNA, 21 nt, Human
gcccaucuugccuccauggug

SEQ ID NO: 3454451 - RNA, 18 nt, Human
gcccaugauauaacuuua

SEQ ID NO: 3454452 - RNA, 17 nt, Human
gcccaugcacuggggac

SEQ ID NO: 3454453 - RNA, 20 nt, Human
gcccauggacaggcuggcuc

SEQ ID NO: 3454454 - RNA, 22 nt, Human
gcccauggagauugaccuggau

SEQ ID NO: 3454455 - RNA, 14 nt, Human
gcccaugggaggga

SEQ ID NO: 3454456 - RNA, 15 nt, Human
gcccaugggagggag

SEQ ID NO: 3454457 - RNA, 16 nt, Human
gcccaugggcacugcu

SEQ ID NO: 3454458 - RNA, 17 nt, Human
gcccaugggcacugcug

SEQ ID NO: 3454459 - RNA, 19 nt, Human
gcccaugggcacugcuggg

SEQ ID NO: 3454460 - RNA, 17 nt, Human
gcccauguauggccagg

SEQ ID NO: 3454461 - RNA, 19 nt, Human
gcccauguggagucagccu

SEQ ID NO: 3454462 - RNA, 19 nt, Human
uaguauuuuuuguauaauu

SEQ ID NO: 3454463 - RNA, 18 nt, Human
uagucaaaccauaaacuu

SEQ ID NO: 3454464 - RNA, 16 nt, Human
uagucaaauuauguau

SEQ ID NO: 3454465 - RNA, 18 nt, Human
uagucaaauugugugaaa

SEQ ID NO: 3454466 - RNA, 23 nt, Human
uagucaacaguacccugguugug

SEQ ID NO: 3454467 - RNA, 13 nt, Human
uagucaagcuccu

SEQ ID NO: 3454468 - RNA, 15 nt, Human
uagucaaucaagucu

SEQ ID NO: 3454469 - RNA, 19 nt, Human
uagucaaucaagucuguuu

SEQ ID NO: 3454470 - RNA, 18 nt, Human
uagucaauggcuuguuca

SEQ ID NO: 3454471 - RNA, 20 nt, Human
uagucaccuuuuaaauccug

SEQ ID NO: 3454472 - RNA, 20 nt, Human
uagucacugagacagcccgg

SEQ ID NO: 3454473 - RNA, 20 nt, Human
uaugcauggaaaccugaaaa

SEQ ID NO: 3454474 - RNA, 23 nt, Human
uaugcauggugccccaggaccag

SEQ ID NO: 3454475 - RNA, 17 nt, Human
uaugcaugguuucagca

SEQ ID NO: 3454476 - RNA, 18 nt, Human
uaugcaugguuucagcac

SEQ ID NO: 3454477 - RNA, 19 nt, Human
uaugcaugguuucagcacu

SEQ ID NO: 3454478 - RNA, 20 nt, Human
uaugcaugguuucagcacua

SEQ ID NO: 3454479 - RNA, 15 nt, Human
uaugcaugugaagaa

SEQ ID NO: 3454480 - RNA, 22 nt, Human
uaugcauguugucuaagaaauu

SEQ ID NO: 3454481 - RNA, 14 nt, Human
uaugcauuauauca

SEQ ID NO: 3454482 - RNA, 17 nt, Human
uaugcauuauuaaauug

SEQ ID NO: 3454483 - RNA, 12 nt, Human
uaugcauucaca

SEQ ID NO: 3454484 - RNA, 23 nt, Human
uaugcauuugaaaauuuugaugu

SEQ ID NO: 3454485 - RNA, 17 nt, Human
uaugccaaagaucacuu

SEQ ID NO: 3454486 - RNA, 19 nt, Human
uaugccacccccgcuggag

SEQ ID NO: 3454487 - RNA, 20 nt, Human
uaugccaccugaauaaagaa

SEQ ID NO: 3454488 - RNA, 22 nt, Human
uaugccacgggaaguuuagaga

SEQ ID NO: 3454489 - RNA, 22 nt, Human
uaugccauagcaagauugcuua

SEQ ID NO: 3454490 - RNA, 17 nt, Human
uaugccauauaauucac

SEQ ID NO: 3454491 - RNA, 14 nt, Human
uaugccaugaugga

SEQ ID NO: 3454492 - RNA, 19 nt, Human
uaugccauugggguaguug

SEQ ID NO: 3454493 - RNA, 23 nt, Human
uaugccauuuguuuauuuuuaua

SEQ ID NO: 3454494 - RNA, 18 nt, Human
uaugcccaguuucugccu

SEQ ID NO: 3454495 - RNA, 19 nt, Human
uaugccccaccaaggcuga

SEQ ID NO: 3454496 - RNA, 15 nt, Human
uaugccccauucaac

SEQ ID NO: 3454497 - RNA, 16 nt, Human
uaugccggaugugcuu

SEQ ID NO: 3454498 - RNA, 22 nt, Human
uaugccguuacuuuucauauuu

SEQ ID NO: 3454499 - RNA, 14 nt, Human
uaugccucuccuuu

SEQ ID NO: 3454500 - RNA, 18 nt, Human
uaugccugcuauuugaag

SEQ ID NO: 3454501 - RNA, 16 nt, Human
uaugccugcucuuugg

SEQ ID NO: 3454502 - RNA, 16 nt, Human
uaugccuuuaaaucug

SEQ ID NO: 3454503 - RNA, 16 nt, Human
uaugcuaagaauuuuu

SEQ ID NO: 3454504 - RNA, 15 nt, Human
uaugcuaccaccagc

SEQ ID NO: 3454505 - RNA, 18 nt, Human
uaugcuaccaccagcugu

SEQ ID NO: 3454506 - RNA, 16 nt, Human
uaugcuacuacaaaaa

SEQ ID NO: 3454507 - RNA, 14 nt, Human
uaugcuauuucuau

SEQ ID NO: 3454508 - RNA, 19 nt, Human
uaugcucucgcaccuuucc

SEQ ID NO: 3454509 - RNA, 18 nt, Human
uaugcucugcauguuaca

SEQ ID NO: 3454510 - RNA, 16 nt, Human
uaugcucuuaauugcc

SEQ ID NO: 3454511 - RNA, 17 nt, Human
uaugcucuuaauugcca

SEQ ID NO: 3454512 - RNA, 18 nt, Human
uaugcucuuaauugccac

SEQ ID NO: 3454513 - RNA, 20 nt, Human
uaugcugccaaauuuuggcc

SEQ ID NO: 3454514 - RNA, 22 nt, Human
uaugcugccaaauuuuggccaa

SEQ ID NO: 3454515 - RNA, 22 nt, Human
uaugcuggaagucucaaauaau

SEQ ID NO: 3454516 - RNA, 15 nt, Human
uaugcuuacugauau

SEQ ID NO: 3454517 - RNA, 16 nt, Human
uaugcuuacugauaua

SEQ ID NO: 3454518 - RNA, 22 nt, Human
uaugcuuauacacuuacacuuu

SEQ ID NO: 3454519 - RNA, 20 nt, Human
uaugcuuauauuguucacuu

SEQ ID NO: 3454520 - RNA, 16 nt, Human
uaugcuugcaaaaacu

SEQ ID NO: 3454521 - RNA, 19 nt, Human
uaugcuugcauauauuuca

SEQ ID NO: 3454522 - RNA, 18 nt, Human
uaugcuuguaacuaaaau

SEQ ID NO: 3454523 - RNA, 14 nt, Human
uaugcuuuccuucu

SEQ ID NO: 3454524 - RNA, 12 nt, Human
uaugcuuugaau

SEQ ID NO: 3454525 - RNA, 14 nt, Human
uaugcuuuucucaa

SEQ ID NO: 3454526 - RNA, 15 nt, Human
uauggaaaacugugu

SEQ ID NO: 3454527 - RNA, 14 nt, Human
uauggaaacccgag

SEQ ID NO: 3454528 - RNA, 21 nt, Human
uauggaaacuguugccagaga

SEQ ID NO: 3454529 - RNA, 16 nt, Human
uauggaaauaaaugua

SEQ ID NO: 3454530 - RNA, 13 nt, Human
uauggaaauauau

SEQ ID NO: 3454531 - RNA, 16 nt, Human
uauggaaaugcaaacu

SEQ ID NO: 3454532 - RNA, 15 nt, Human
uauggaacuucuaau

SEQ ID NO: 3454533 - RNA, 20 nt, Human
uauggaacuucuaauauauu

SEQ ID NO: 3454534 - RNA, 13 nt, Human
uauggaagaaagu

SEQ ID NO: 3454535 - RNA, 16 nt, Human
uauggaagcacccauu

SEQ ID NO: 3454536 - RNA, 16 nt, Human
uauggaagguggagcg

SEQ ID NO: 3454537 - RNA, 19 nt, Human
uauggaagguggagcguuc

SEQ ID NO: 3454538 - RNA, 24 nt, Human
uauggaauacaguguuauuuucuu

SEQ ID NO: 3454539 - RNA, 15 nt, Human
uauggaauuuugcaa

SEQ ID NO: 3454540 - RNA, 21 nt, Human
uauggacggugcuccaggcag

SEQ ID NO: 3454541 - RNA, 15 nt, Human
uauggacucugcaca

SEQ ID NO: 3454542 - RNA, 18 nt, Human
uauggagaauugcugaag

SEQ ID NO: 3454543 - RNA, 16 nt, Human
uauggagagcccuggg

SEQ ID NO: 3454544 - RNA, 18 nt, Human
uauggagcccuguaauuu

SEQ ID NO: 3454545 - RNA, 18 nt, Human
uauggagcucagagaggg

SEQ ID NO: 3454546 - RNA, 16 nt, Human
uauggagucauuuuua

SEQ ID NO: 3454547 - RNA, 22 nt, Human
uauggagucauuuuuacaaugu

SEQ ID NO: 3454548 - RNA, 18 nt, Human
uauggaugauuuaagugu

SEQ ID NO: 3454549 - RNA, 11 nt, Human
uauggaugugg

SEQ ID NO: 3454550 - RNA, 15 nt, Human
uauggauguuacucu

SEQ ID NO: 3454551 - RNA, 23 nt, Human
uauggauugggggggccaaaagg

SEQ ID NO: 3454552 - RNA, 15 nt, Human
uauggauuuucuaag

SEQ ID NO: 3454553 - RNA, 21 nt, Human
uauggauuuucuauuguuacu

SEQ ID NO: 3454554 - RNA, 20 nt, Human
uauggcaaccauuauaaccu

SEQ ID NO: 3454555 - RNA, 22 nt, Human
uauggcagaaaaaaugucugua

SEQ ID NO: 3454556 - RNA, 12 nt, Human
uauggcagaaga

SEQ ID NO: 3454557 - RNA, 13 nt, Human
uauggcagaagac

SEQ ID NO: 3454558 - RNA, 19 nt, Human
uauggcagaguuguaaaua

SEQ ID NO: 3454559 - RNA, 23 nt, Human
uauggccaggaaguagcacaggc

SEQ ID NO: 3454560 - RNA, 16 nt, Human
uauggccgggcagggu

SEQ ID NO: 3454561 - RNA, 22 nt, Human
uauggccugugagcuaggaauu

SEQ ID NO: 3454562 - RNA, 18 nt, Human
uauggcguaaguacagag

SEQ ID NO: 3454563 - RNA, 17 nt, Human
uauggcuagaauauccu

SEQ ID NO: 3454564 - RNA, 16 nt, Human
uauggcuauaggugcu

SEQ ID NO: 3454565 - RNA, 16 nt, Human
uauggcugcaguccuc

SEQ ID NO: 3454566 - RNA, 17 nt, Human
uauggcuggccacugca

SEQ ID NO: 3454567 - RNA, 16 nt, Human
uaugggaaucaagauu

SEQ ID NO: 3454568 - RNA, 10 nt, Human
uaugggagag

SEQ ID NO: 3454569 - RNA, 17 nt, Human
uaugggcauuguaguua

SEQ ID NO: 3454570 - RNA, 23 nt, Human
uaugggcuuuuggggagccagaa

SEQ ID NO: 3454571 - RNA, 18 nt, Human
uauggggauagaugugug

SEQ ID NO: 3454572 - RNA, 19 nt, Human
uauggggauagaugugugg

SEQ ID NO: 3454573 - RNA, 17 nt, Human
uauggggaugguaguuu

SEQ ID NO: 3454574 - RNA, 20 nt, Human
uauggggcugaacggggaga

SEQ ID NO: 3454575 - RNA, 19 nt, Human
uauggggggccaacaccag

SEQ ID NO: 3454576 - RNA, 23 nt, Human
uauggggggccaacaccagggau

SEQ ID NO: 3454577 - RNA, 13 nt, Human
uaugggucacagg

SEQ ID NO: 3454578 - RNA, 14 nt, Human
uaugggucacagga

SEQ ID NO: 3454579 - RNA, 15 nt, Human
uaugggucacaggaa

SEQ ID NO: 3454580 - RNA, 19 nt, Human
uaugguaacugcuuucugu

SEQ ID NO: 3454581 - RNA, 16 nt, Human
uaugguaaucauauua

SEQ ID NO: 3454582 - RNA, 17 nt, Human
uaugguaccagaugcag

SEQ ID NO: 3454583 - RNA, 18 nt, Human
uaugguagaaaaauuuca

SEQ ID NO: 3454584 - RNA, 19 nt, Human
uaugguagaaaaauuucac

SEQ ID NO: 3454585 - RNA, 21 nt, Human
uaugguauuuauuuuuucuuu

SEQ ID NO: 3454586 - RNA, 21 nt, Human
uauggucaaucccaaaaguca

SEQ ID NO: 3454587 - RNA, 20 nt, Human
uauggugagaugcagcugga

SEQ ID NO: 3454588 - RNA, 18 nt, Human
uauggugccuaguauuga

SEQ ID NO: 3454589 - RNA, 23 nt, Human
uauggugcucugucuacuugcuc

SEQ ID NO: 3454590 - RNA, 20 nt, Human
uaugguugauaguuuaccug

SEQ ID NO: 3454591 - RNA, 15 nt, Human
uauguaaaacauuua

SEQ ID NO: 3454592 - RNA, 22 nt, Human
uauguaaaaggccaaaccucug

SEQ ID NO: 3454593 - RNA, 15 nt, Human
uauguaaaauguuuu

SEQ ID NO: 3454594 - RNA, 16 nt, Human
uauguaaacaaaucuu

SEQ ID NO: 3454595 - RNA, 17 nt, Human
uauguaaacaaaucuuu

SEQ ID NO: 3454596 - RNA, 23 nt, Human
uauguaaacaaaucuuuccauau

SEQ ID NO: 3454597 - RNA, 23 nt, Human
uauguaaacugcauuagaaauua

SEQ ID NO: 3454598 - RNA, 14 nt, Human
uauguaaaguaugu

SEQ ID NO: 3454599 - RNA, 18 nt, Human
uauguaaaguauguaaac

SEQ ID NO: 3454600 - RNA, 19 nt, Human
uauguaaaguauguaaaca

SEQ ID NO: 3454601 - RNA, 13 nt, Human
uauguaaauaauu

SEQ ID NO: 3454602 - RNA, 14 nt, Human
uauguaaauaauuc

SEQ ID NO: 3454603 - RNA, 17 nt, Human
uauguaaauaauucuuu

SEQ ID NO: 3454604 - RNA, 21 nt, Human
uauguaaaucccauuauucaa

SEQ ID NO: 3454605 - RNA, 13 nt, Human
uauguaaauguau

SEQ ID NO: 3454606 - RNA, 14 nt, Human
uauuaaaaauauaa

SEQ ID NO: 3454607 - RNA, 15 nt, Human
uauuaaaaauauaaa

SEQ ID NO: 3454608 - RNA, 12 nt, Human
uauuaaaaaugg

SEQ ID NO: 3454609 - RNA, 14 nt, Human
uauuaaaaauggua

SEQ ID NO: 3454610 - RNA, 15 nt, Human
uauuaaaaaugguaa

SEQ ID NO: 3454611 - RNA, 20 nt, Human
uauuaaaaaugguaaaauug

SEQ ID NO: 3454612 - RNA, 14 nt, Human
uauuaaaacuaaau

SEQ ID NO: 3454613 - RNA, 12 nt, Human
uauuaaaacuca

SEQ ID NO: 3454614 - RNA, 15 nt, Human
uauuaaaacucuuuu

SEQ ID NO: 3454615 - RNA, 14 nt, Human
uauuaaaagacuca

SEQ ID NO: 3454616 - RNA, 22 nt, Human
uauuaaaauauggcuauaaaua

SEQ ID NO: 3454617 - RNA, 10 nt, Human
uauuaaaauc

SEQ ID NO: 3454618 - RNA, 18 nt, Human
uauuaaaaugauuguaaa

SEQ ID NO: 3454619 - RNA, 12 nt, Human
uauuaaaaugua

SEQ ID NO: 3454620 - RNA, 16 nt, Human
uauuaaaauguaugca

SEQ ID NO: 3454621 - RNA, 20 nt, Human
uauuaaaccauaagauggca

SEQ ID NO: 3454622 - RNA, 21 nt, Human
uauuaaacguaugcaugugaa

SEQ ID NO: 3454623 - RNA, 21 nt, Human
uauuaaagaaaaaaauguauu

SEQ ID NO: 3454624 - RNA, 13 nt, Human
uauuaaagccaug

SEQ ID NO: 3454625 - RNA, 14 nt, Human
uauuaaagugcuaa

SEQ ID NO: 3454626 - RNA, 18 nt, Human
uauuaaagugcuaagguu

SEQ ID NO: 3454627 - RNA, 24 nt, Human
uauuaaagugcuaagguucuaagg

SEQ ID NO: 3454628 - RNA, 14 nt, Human
uauuaaauaaaauc

SEQ ID NO: 3454629 - RNA, 18 nt, Human
uauuaaauacaaaacuuc

SEQ ID NO: 3454630 - RNA, 12 nt, Human
uauuaaaugcca

SEQ ID NO: 3454631 - RNA, 15 nt, Human
uauuaaaugcccagc

SEQ ID NO: 3454632 - RNA, 17 nt, Human
uauuaaaugcccagccc

SEQ ID NO: 3454633 - RNA, 23 nt, Human
uauuaaaugcuucauuuguaugu

SEQ ID NO: 3454634 - RNA, 14 nt, Human
uauuaaauuacauu

SEQ ID NO: 3454635 - RNA, 22 nt, Human
uauuaaauuacauuuguaauuu

SEQ ID NO: 3454636 - RNA, 16 nt, Human
uauuaacaaauuaugu

SEQ ID NO: 3454637 - RNA, 18 nt, Human
uauuaacaaauuauguua

SEQ ID NO: 3454638 - RNA, 20 nt, Human
uaguucccucugcucagcca

SEQ ID NO: 3454639 - RNA, 19 nt, Human
uaguuccuaagaagcuucu

SEQ ID NO: 3454640 - RNA, 21 nt, Human
uaguuccuaagaagcuucuaa

SEQ ID NO: 3454641 - RNA, 12 nt, Human
uaguuccugcua

SEQ ID NO: 3454642 - RNA, 16 nt, Human
uaguuccugcuacaac

SEQ ID NO: 3454643 - RNA, 17 nt, Human
uaguuccugugcacagc

SEQ ID NO: 3454644 - RNA, 15 nt, Human
uaguucuaagacuca

SEQ ID NO: 3454645 - RNA, 13 nt, Human
uaguucuagaaaa

SEQ ID NO: 3454646 - RNA, 23 nt, Human
uaguucuagacauggagguucua

SEQ ID NO: 3454647 - RNA, 23 nt, Human
uaguucuagugcagcugaaauug

SEQ ID NO: 3454648 - RNA, 19 nt, Human
uaguucucagcucuucuga

SEQ ID NO: 3454649 - RNA, 13 nt, Human
uaguucugccagg

SEQ ID NO: 3454650 - RNA, 13 nt, Human
uaguucuguagaa

SEQ ID NO: 3454651 - RNA, 14 nt, Human
uaguucuguauuug

SEQ ID NO: 3454652 - RNA, 16 nt, Human
uaguucuguauuugaa

SEQ ID NO: 3454653 - RNA, 19 nt, Human
uaguucuguauuugaaagu

SEQ ID NO: 3454654 - RNA, 15 nt, Human
uaguucuuuaaacug

SEQ ID NO: 3454655 - RNA, 20 nt, Human
uaguucuuuaaacugucgug

SEQ ID NO: 3454656 - RNA, 17 nt, Human
uaguugaaaauaaagug

SEQ ID NO: 3454657 - RNA, 17 nt, Human
uaguugaaccuauuucu

SEQ ID NO: 3454658 - RNA, 14 nt, Human
uaguugaacugaua

SEQ ID NO: 3454659 - RNA, 18 nt, Human
uaguugaacugauaguua

SEQ ID NO: 3454660 - RNA, 22 nt, Human
uaguugaauuuuuuuuaacauu

SEQ ID NO: 3454661 - RNA, 23 nt, Human
uaguugaauuuuuuuuaacauuc

SEQ ID NO: 3454662 - RNA, 16 nt, Human
uaguugagccagcaga

SEQ ID NO: 3454663 - RNA, 19 nt, Human
uaguugagccagcagacau

SEQ ID NO: 3454664 - RNA, 16 nt, Human
uaguugcaauugaauu

SEQ ID NO: 3454665 - RNA, 23 nt, Human
uaguugcagacucaguuugucag

SEQ ID NO: 3454666 - RNA, 21 nt, Human
uaguugccaaaucuggcuccu

SEQ ID NO: 3454667 - RNA, 17 nt, Human
uaguugcguuacacccu

SEQ ID NO: 3454668 - RNA, 13 nt, Human
uaguugcuugccu

SEQ ID NO: 3454669 - RNA, 17 nt, Human
uaguugcuuuugaagga

SEQ ID NO: 3454670 - RNA, 21 nt, Human
uaguugcuuuugaaggaauac

SEQ ID NO: 3454671 - RNA, 18 nt, Human
uaguuggcagaaauacag

SEQ ID NO: 3454672 - RNA, 15 nt, Human
uaguuggugagaaac

SEQ ID NO: 3454673 - RNA, 20 nt, Human
uaguuguagacaaaguacau

SEQ ID NO: 3454674 - RNA, 17 nt, Human
uaguugucuuuccuggc

SEQ ID NO: 3454675 - RNA, 22 nt, Human
uaguugugaccuuaguguuucu

SEQ ID NO: 3454676 - RNA, 17 nt, Human
uaguugugggugggaga

SEQ ID NO: 3454677 - RNA, 17 nt, Human
uaguuguuguagagaaa

SEQ ID NO: 3454678 - RNA, 17 nt, Human
uaguuuaccucuuuaaa

SEQ ID NO: 3454679 - RNA, 22 nt, Human
uaguuuaccugaauaaauggua

SEQ ID NO: 3454680 - RNA, 22 nt, Human
uaguuuagugugguuuucuguu

SEQ ID NO: 3454681 - RNA, 17 nt, Human
uaguuuauuuuaaaaca

SEQ ID NO: 3454682 - RNA, 21 nt, Human
uaguuucaguagauugcagaa

SEQ ID NO: 3454683 - RNA, 20 nt, Human
uaguuucauauaaaguauca

SEQ ID NO: 3454684 - RNA, 14 nt, Human
uaguuucugugguu

SEQ ID NO: 3454685 - RNA, 17 nt, Human
uaguuucuguucugugg

SEQ ID NO: 3454686 - RNA, 20 nt, Human
uaguuucuguucuguggaaa

SEQ ID NO: 3454687 - RNA, 13 nt, Human
uaguuugaggaaa

SEQ ID NO: 3454688 - RNA, 15 nt, Human
uaguuugauuaaauu

SEQ ID NO: 3454689 - RNA, 11 nt, Human
uaguuugcauu

SEQ ID NO: 3454690 - RNA, 15 nt, Human
uaguuugcauuuaag

SEQ ID NO: 3454691 - RNA, 13 nt, Human
uaguuugcauuuc

SEQ ID NO: 3454692 - RNA, 16 nt, Human
uaguuugcauuucaga

SEQ ID NO: 3454693 - RNA, 13 nt, Human
uaguuugguucac

SEQ ID NO: 3454694 - RNA, 17 nt, Human
uaguuuguauaacuucu

SEQ ID NO: 3454695 - RNA, 18 nt, Human
uaguuugucuauuuuaaa

SEQ ID NO: 3454696 - RNA, 22 nt, Human
uaguuugucuauuuuaaaauaa

SEQ ID NO: 3454697 - RNA, 13 nt, Human
uaguuugugagaa

SEQ ID NO: 3454698 - RNA, 19 nt, Human
uaguuuguguguugucucu

SEQ ID NO: 3454699 - RNA, 16 nt, Human
uaguuuuaaacucauu

SEQ ID NO: 3454700 - RNA, 19 nt, Human
uaguuuuacccuauaucua

SEQ ID NO: 3454701 - RNA, 20 nt, Human
uaguuuuacuuuuaaacugu

SEQ ID NO: 3454702 - RNA, 22 nt, Human
uaguuuuacuuuuaaacugugu

SEQ ID NO: 3454703 - RNA, 14 nt, Human
uaguuuuaguugca

SEQ ID NO: 3454704 - RNA, 16 nt, Human
uaguuuuaguugcaga

SEQ ID NO: 3454705 - RNA, 20 nt, Human
uaguuuuaucacauguaugu

SEQ ID NO: 3454706 - RNA, 13 nt, Human
uaguuuuauucuu

SEQ ID NO: 3454707 - RNA, 21 nt, Human
uaguuuuauuuauauuuauug

SEQ ID NO: 3454708 - RNA, 22 nt, Human
uaguuuuauuuauauuuauuga

SEQ ID NO: 3454709 - RNA, 15 nt, Human
uaguuuuauuuucua

SEQ ID NO: 3454710 - RNA, 19 nt, Human
uaguuuuauuuucuaaagu

SEQ ID NO: 3454711 - RNA, 19 nt, Human
uaguuuucuuguugcuuug

SEQ ID NO: 3454712 - RNA, 12 nt, Human
uaguuuugcaua

SEQ ID NO: 3454713 - RNA, 13 nt, Human
uaguuuugcuuuu

SEQ ID NO: 3454714 - RNA, 13 nt, Human
uaguuuugucaaa

SEQ ID NO: 3454715 - RNA, 18 nt, Human
uaguuuugucacaauuau

SEQ ID NO: 3454716 - RNA, 21 nt, Human
uaguuuuuaaaauaucuuuug

SEQ ID NO: 3454717 - RNA, 22 nt, Human
uaguuuuuaaaauaucuuuuga

SEQ ID NO: 3454718 - RNA, 21 nt, Human
uaguuuuuccuaucauguuaa

SEQ ID NO: 3454719 - RNA, 13 nt, Human
uaguuuuuguucu

SEQ ID NO: 3454720 - RNA, 13 nt, Human
uaguuuuuucauc

SEQ ID NO: 3454721 - RNA, 14 nt, Human
uaguuuuuucaucu

SEQ ID NO: 3454722 - RNA, 15 nt, Human
uaguuuuuucaucuu

SEQ ID NO: 3454723 - RNA, 20 nt, Human
uaguuuuuucuuccuuuuca

SEQ ID NO: 3454724 - RNA, 15 nt, Human
uauaaaaaaaaugaa

SEQ ID NO: 3454725 - RNA, 16 nt, Human
uauaaaaaaaaugaaa

SEQ ID NO: 3454726 - RNA, 15 nt, Human
uauaaaaaauaugua

SEQ ID NO: 3454727 - RNA, 13 nt, Human
uauaaaaacaaaa

SEQ ID NO: 3454728 - RNA, 21 nt, Human
uauaaaaagaaaagauaaaga

SEQ ID NO: 3454729 - RNA, 14 nt, Human
uauaaaaagauaau

SEQ ID NO: 3454730 - RNA, 12 nt, Human
uauaaaaagcca

SEQ ID NO: 3454731 - RNA, 14 nt, Human
uauaaaaagccacu

SEQ ID NO: 3454732 - RNA, 22 nt, Human
uauaaaaauaaaaaagauccca

SEQ ID NO: 3454733 - RNA, 13 nt, Human
uauaaaaauauau

SEQ ID NO: 3454734 - RNA, 14 nt, Human
uauaaaaauggcuu

SEQ ID NO: 3454735 - RNA, 10 nt, Human
uauaaaacaa

SEQ ID NO: 3454736 - RNA, 21 nt, Human
uauaaaagauggggucuguaa

SEQ ID NO: 3454737 - RNA, 15 nt, Human
uauaaaagcuuucug

SEQ ID NO: 3454738 - RNA, 19 nt, Human
uauaaaaggcaaaugugua

SEQ ID NO: 3454739 - RNA, 13 nt, Human
uauaaaagugauu

SEQ ID NO: 3454740 - RNA, 15 nt, Human
uauaaaauaaauaua

SEQ ID NO: 3454741 - RNA, 16 nt, Human
uauaaaauaaauauau

SEQ ID NO: 3454742 - RNA, 17 nt, Human
uauaaaauaaauauaua

SEQ ID NO: 3454743 - RNA, 22 nt, Human
uauaaaauaaauauauauaaac

SEQ ID NO: 3454744 - RNA, 12 nt, Human
uauaaaauaacu

SEQ ID NO: 3454745 - RNA, 12 nt, Human
uauaaaauaaug

SEQ ID NO: 3454746 - RNA, 22 nt, Human
uauaaaauaauuuuuauauuug

SEQ ID NO: 3454747 - RNA, 19 nt, Human
uauaaaauagacaaauaga

SEQ ID NO: 3454748 - RNA, 19 nt, Human
uauaaaauauaaacaaaga

SEQ ID NO: 3454749 - RNA, 17 nt, Human
uauaaaaucagccaauu

SEQ ID NO: 3454750 - RNA, 19 nt, Human
uauaaaaucagccaauuau

SEQ ID NO: 3454751 - RNA, 21 nt, Human
uauaaaauccugugcaauaga

SEQ ID NO: 3454752 - RNA, 12 nt, Human
gccgucucugga

SEQ ID NO: 3454753 - RNA, 15 nt, Human
gccgugaacugugca

SEQ ID NO: 3454754 - RNA, 20 nt, Human
gccgugaguucucagggcuc

SEQ ID NO: 3454755 - RNA, 21 nt, Human
gccgugaguucucagggcucc

SEQ ID NO: 3454756 - RNA, 12 nt, Human
gccgugcccagg

SEQ ID NO: 3454757 - RNA, 14 nt, Human
gccgugcccagggg

SEQ ID NO: 3454758 - RNA, 19 nt, Human
gccgugccuucagcucuac

SEQ ID NO: 3454759 - RNA, 17 nt, Human
gccgugcucgccccagc

SEQ ID NO: 3454760 - RNA, 20 nt, Human
gccgugcucgccccagcagg

SEQ ID NO: 3454761 - RNA, 15 nt, Human
gccgugcugggcagc

SEQ ID NO: 3454762 - RNA, 16 nt, Human
gccgugcugggcagcc

SEQ ID NO: 3454763 - RNA, 17 nt, Human
gccgugcugggcagccc

SEQ ID NO: 3454764 - RNA, 13 nt, Human
gccguggauggcc

SEQ ID NO: 3454765 - RNA, 14 nt, Human
gccguggcugcggc

SEQ ID NO: 3454766 - RNA, 15 nt, Human
gccguggcugcggca

SEQ ID NO: 3454767 - RNA, 16 nt, Human
gccguggcugcugugg

SEQ ID NO: 3454768 - RNA, 13 nt, Human
gccguggcuuccc

SEQ ID NO: 3454769 - RNA, 19 nt, Human
gccguggcuucccgcucag

SEQ ID NO: 3454770 - RNA, 21 nt, Human
gccguggcuucccgcucagcc

SEQ ID NO: 3454771 - RNA, 17 nt, Human
gccgugggccccacccu

SEQ ID NO: 3454772 - RNA, 23 nt, Human
gccgugggccccacccucgggga

SEQ ID NO: 3454773 - RNA, 15 nt, Human
gccgugggccugggg

SEQ ID NO: 3454774 - RNA, 16 nt, Human
gccgugguccuuuggg

SEQ ID NO: 3454775 - RNA, 20 nt, Human
gccguguaaccauggaccca

SEQ ID NO: 3454776 - RNA, 23 nt, Human
gccgugugagugugacagggcca

SEQ ID NO: 3454777 - RNA, 14 nt, Human
gccguuacucucca

SEQ ID NO: 3454778 - RNA, 15 nt, Human
gccguuacucuccaa

SEQ ID NO: 3454779 - RNA, 17 nt, Human
gccguugauguuggcug

SEQ ID NO: 3454780 - RNA, 20 nt, Human
gccguugauguuggcuggga

SEQ ID NO: 3454781 - RNA, 18 nt, Human
gccguugccgcugauguu

SEQ ID NO: 3454782 - RNA, 17 nt, Human
gccguugcugacuuaga

SEQ ID NO: 3454783 - RNA, 19 nt, Human
gccguugcugacuuagaau

SEQ ID NO: 3454784 - RNA, 14 nt, Human
gccguuggccacgu

SEQ ID NO: 3454785 - RNA, 16 nt, Human
gccuaaaaguaaacau

SEQ ID NO: 3454786 - RNA, 12 nt, Human
gccuaaaaucuu

SEQ ID NO: 3454787 - RNA, 13 nt, Human
gccuaaaaucuug

SEQ ID NO: 3454788 - RNA, 11 nt, Human
gccuaaaucca

SEQ ID NO: 3454789 - RNA, 12 nt, Human
gccuaaauccau

SEQ ID NO: 3454790 - RNA, 19 nt, Human
gccuaaauccauuuggaaa

SEQ ID NO: 3454791 - RNA, 21 nt, Human
gccuaaauccauuuggaaauc

SEQ ID NO: 3454792 - RNA, 19 nt, Human
gccuaaauuuaaugcugcc

SEQ ID NO: 3454793 - RNA, 17 nt, Human
gccuaaccugccgagag

SEQ ID NO: 3454794 - RNA, 18 nt, Human
gccuaacuacuaguuuuu

SEQ ID NO: 3454795 - RNA, 18 nt, Human
gccuaagaauaaacauuu

SEQ ID NO: 3454796 - RNA, 21 nt, Human
gccuaagaggcugcccuccug

SEQ ID NO: 3454797 - RNA, 21 nt, Human
gccuaagauauacuuguuuuu

SEQ ID NO: 3454798 - RNA, 21 nt, Human
gccuaagcauugccuggccuu

SEQ ID NO: 3454799 - RNA, 14 nt, Human
gccuaaguauuaaa

SEQ ID NO: 3454800 - RNA, 18 nt, Human
gccuaaguauuaaaacau

SEQ ID NO: 3454801 - RNA, 17 nt, Human
gccuaagugcagccccg

SEQ ID NO: 3454802 - RNA, 12 nt, Human
gccuaauaaaac

SEQ ID NO: 3454803 - RNA, 13 nt, Human
gccuaauaaaacu

SEQ ID NO: 3454804 - RNA, 16 nt, Human
gccuaauaaaacugau

SEQ ID NO: 3454805 - RNA, 17 nt, Human
gccuaauaaaacugaug

SEQ ID NO: 3454806 - RNA, 19 nt, Human
gccuaauaaaacugaugug

SEQ ID NO: 3454807 - RNA, 23 nt, Human
gccuaauaaaacugaugugaaac

SEQ ID NO: 3454808 - RNA, 17 nt, Human
gccuaauacauuaaagc

SEQ ID NO: 3454809 - RNA, 18 nt, Human
gccuaauacauuaaagca

SEQ ID NO: 3454810 - RNA, 18 nt, Human
gccuaauaugaugacugu

SEQ ID NO: 3454811 - RNA, 16 nt, Human
gccuacaaaucaguaa

SEQ ID NO: 3454812 - RNA, 17 nt, Human
gccuacaaaucaguaau

SEQ ID NO: 3454813 - RNA, 21 nt, Human
gccuacagaacuucagaaaga

SEQ ID NO: 3454814 - RNA, 14 nt, Human
gccuacauuaucua

SEQ ID NO: 3454815 - RNA, 22 nt, Human
gccuaccggcaauuuccggcca

SEQ ID NO: 3454816 - RNA, 13 nt, Human
gccuacuccuguc

SEQ ID NO: 3454817 - RNA, 15 nt, Human
gccuacuccugucuu

SEQ ID NO: 3454818 - RNA, 16 nt, Human
gccuacuccugucuuc

SEQ ID NO: 3454819 - RNA, 18 nt, Human
gccuagaaacaacacugu

SEQ ID NO: 3454820 - RNA, 17 nt, Human
gccuagaagcugguggc

SEQ ID NO: 3454821 - RNA, 23 nt, Human
gccuagauccacacacagaggaa

SEQ ID NO: 3454822 - RNA, 15 nt, Human
gccuagcaagcuggc

SEQ ID NO: 3454823 - RNA, 19 nt, Human
gccuagcaagcuggccucu

SEQ ID NO: 3454824 - RNA, 17 nt, Human
gccuagcacucacaugc

SEQ ID NO: 3454825 - RNA, 22 nt, Human
gccuagcccacccugcugccuu

SEQ ID NO: 3454826 - RNA, 18 nt, Human
gccuagccgaccucagcc

SEQ ID NO: 3454827 - RNA, 14 nt, Human
gccuagcugcuaca

SEQ ID NO: 3454828 - RNA, 15 nt, Human
gccuagcugcuacaa

SEQ ID NO: 3454829 - RNA, 19 nt, Human
gccuagcugcuacaaagaa

SEQ ID NO: 3454830 - RNA, 17 nt, Human
gccuaggaauucccagc

SEQ ID NO: 3454831 - RNA, 11 nt, Human
gccuaggagau

SEQ ID NO: 3454832 - RNA, 18 nt, Human
gccuaggauucacacccc

SEQ ID NO: 3454833 - RNA, 21 nt, Human
gccuaggauucacaccccacc

SEQ ID NO: 3454834 - RNA, 12 nt, Human
gccuaggauucu

SEQ ID NO: 3454835 - RNA, 14 nt, Human
gccuaggauucuaa

SEQ ID NO: 3454836 - RNA, 16 nt, Human
gccuaggauucuaaaa

SEQ ID NO: 3454837 - RNA, 14 nt, Human
gccuaggccaggug

SEQ ID NO: 3454838 - RNA, 18 nt, Human
gccuaggccucagccaga

SEQ ID NO: 3454839 - RNA, 16 nt, Human
gccuaggccugggcag

SEQ ID NO: 3454840 - RNA, 17 nt, Human
gccuaggccugggcagu

SEQ ID NO: 3454841 - RNA, 17 nt, Human
gccuagggcccccacag

SEQ ID NO: 3454842 - RNA, 17 nt, Human
gccuagggccuggucca

SEQ ID NO: 3454843 - RNA, 13 nt, Human
uauuucuauuauu

SEQ ID NO: 3454844 - RNA, 11 nt, Human
uauuucuauug

SEQ ID NO: 3454845 - RNA, 19 nt, Human
uauuucucaacaaagcaca

SEQ ID NO: 3454846 - RNA, 12 nt, Human
uauuucuccuuu

SEQ ID NO: 3454847 - RNA, 15 nt, Human
uauuucucuaguagu

SEQ ID NO: 3454848 - RNA, 13 nt, Human
uauuucucuuucu

SEQ ID NO: 3454849 - RNA, 15 nt, Human
uauuucucuuucuuu

SEQ ID NO: 3454850 - RNA, 16 nt, Human
uauuucucuuucuuua

SEQ ID NO: 3454851 - RNA, 14 nt, Human
uauuucugaaggua

SEQ ID NO: 3454852 - RNA, 14 nt, Human
uauuucugccuccc

SEQ ID NO: 3454853 - RNA, 13 nt, Human
uauuucugcugaa

SEQ ID NO: 3454854 - RNA, 22 nt, Human
uauuucugcugaauuuucacau

SEQ ID NO: 3454855 - RNA, 22 nt, Human
uauuucuguaauuauaucuaaa

SEQ ID NO: 3454856 - RNA, 16 nt, Human
uauuucuguuucucau

SEQ ID NO: 3454857 - RNA, 13 nt, Human
uauuucuuaaaca

SEQ ID NO: 3454858 - RNA, 23 nt, Human
uauuucuuaauuauuauaaaaau

SEQ ID NO: 3454859 - RNA, 22 nt, Human
uauuucuucaaauccuuccaaa

SEQ ID NO: 3454860 - RNA, 22 nt, Human
uauuugaaaacagaaauuggua

SEQ ID NO: 3454861 - RNA, 20 nt, Human
uauuugaaaacauguuuauu

SEQ ID NO: 3454862 - RNA, 20 nt, Human
uauuugaaagugccuuugca

SEQ ID NO: 3454863 - RNA, 15 nt, Human
uauuugaacaagugg

SEQ ID NO: 3454864 - RNA, 19 nt, Human
uauuugaagguuuuaagug

SEQ ID NO: 3454865 - RNA, 14 nt, Human
uauuugaaucuugu

SEQ ID NO: 3454866 - RNA, 21 nt, Human
uauuugaauguaugcuucaua

SEQ ID NO: 3454867 - RNA, 22 nt, Human
uauuugaauguaugcuucauac

SEQ ID NO: 3454868 - RNA, 15 nt, Human
uauuugaauuaaaac

SEQ ID NO: 3454869 - RNA, 17 nt, Human
uauuugaauuaaaacuu

SEQ ID NO: 3454870 - RNA, 19 nt, Human
uauuugacuugcaugaaga

SEQ ID NO: 3454871 - RNA, 22 nt, Human
uauuugacuugcaugaagagaa

SEQ ID NO: 3454872 - RNA, 14 nt, Human
uauuugagacauuc

SEQ ID NO: 3454873 - RNA, 16 nt, Human
uauuugagacuaguuu

SEQ ID NO: 3454874 - RNA, 23 nt, Human
uauuugaguggaguuacugaaca

SEQ ID NO: 3454875 - RNA, 14 nt, Human
uauuugauguaaua

SEQ ID NO: 3454876 - RNA, 19 nt, Human
uauuugauguaauacuucu

SEQ ID NO: 3454877 - RNA, 13 nt, Human
uauuugauuauuu

SEQ ID NO: 3454878 - RNA, 15 nt, Human
uauuugauucaaaau

SEQ ID NO: 3454879 - RNA, 16 nt, Human
uauuugauucaaaaua

SEQ ID NO: 3454880 - RNA, 23 nt, Human
uauuugauuuauuaacuuaauaa

SEQ ID NO: 3454881 - RNA, 11 nt, Human
uauuugcaguc

SEQ ID NO: 3454882 - RNA, 18 nt, Human
uauuugcaguucaccugc

SEQ ID NO: 3454883 - RNA, 15 nt, Human
uauuugcauguuacc

SEQ ID NO: 3454884 - RNA, 16 nt, Human
uauuugcauguuaugu

SEQ ID NO: 3454885 - RNA, 17 nt, Human
uauuugccaugggcuuc

SEQ ID NO: 3454886 - RNA, 23 nt, Human
uauuugcuaauuaaaaaguuaau

SEQ ID NO: 3454887 - RNA, 18 nt, Human
uauuugcugacaaccauu

SEQ ID NO: 3454888 - RNA, 15 nt, Human
uauuugcuucauugu

SEQ ID NO: 3454889 - RNA, 19 nt, Human
uauuuggaaauaaagucag

SEQ ID NO: 3454890 - RNA, 16 nt, Human
uauuuggaauuagaac

SEQ ID NO: 3454891 - RNA, 14 nt, Human
uauuuggaauuuau

SEQ ID NO: 3454892 - RNA, 16 nt, Human
uauuugggaaacuugu

SEQ ID NO: 3454893 - RNA, 15 nt, Human
uauuugggaagugaa

SEQ ID NO: 3454894 - RNA, 23 nt, Human
uauuugggccugcuccagaccug

SEQ ID NO: 3454895 - RNA, 17 nt, Human
uauuugguacuguauuu

SEQ ID NO: 3454896 - RNA, 17 nt, Human
uauuuggugauuacauu

SEQ ID NO: 3454897 - RNA, 14 nt, Human
uauuuguaaagcua

SEQ ID NO: 3454898 - RNA, 18 nt, Human
gccucaaccuccugggcu

SEQ ID NO: 3454899 - RNA, 19 nt, Human
gccucaaccuccugggcua

SEQ ID NO: 3454900 - RNA, 18 nt, Human
gccucaacuccucccaua

SEQ ID NO: 3454901 - RNA, 20 nt, Human
gccucaacucugcugagggu

SEQ ID NO: 3454902 - RNA, 23 nt, Human
gccucaacucugcugagggucca

SEQ ID NO: 3454903 - RNA, 18 nt, Human
gccucaagaggaaugaaa

SEQ ID NO: 3454904 - RNA, 22 nt, Human
gccucaagguuuuagguucuaa

SEQ ID NO: 3454905 - RNA, 18 nt, Human
gccucaagucacucccaa

SEQ ID NO: 3454906 - RNA, 22 nt, Human
gccucaagugauucuccugccu

SEQ ID NO: 3454907 - RNA, 24 nt, Human
gccucaagugauucuccugccuca

SEQ ID NO: 3454908 - RNA, 18 nt, Human
gccucaauaagccuuguc

SEQ ID NO: 3454909 - RNA, 22 nt, Human
gccucaaugugaaucagacccu

SEQ ID NO: 3454910 - RNA, 17 nt, Human
gccucaaugugaccagg

SEQ ID NO: 3454911 - RNA, 17 nt, Human
gccucacaguccuuacc

SEQ ID NO: 3454912 - RNA, 21 nt, Human
gccucacaguccuuaccagca

SEQ ID NO: 3454913 - RNA, 15 nt, Human
gccucacccccucgg

SEQ ID NO: 3454914 - RNA, 17 nt, Human
gccucaccucuacccaa

SEQ ID NO: 3454915 - RNA, 13 nt, Human
gccucacuccagg

SEQ ID NO: 3454916 - RNA, 14 nt, Human
gccucacuggggca

SEQ ID NO: 3454917 - RNA, 19 nt, Human
gccucacuuggucugccag

SEQ ID NO: 3454918 - RNA, 20 nt, Human
gccucacuuggucugccagg

SEQ ID NO: 3454919 - RNA, 17 nt, Human
gccucagacugcaccca

SEQ ID NO: 3454920 - RNA, 18 nt, Human
gccucagacugcacccag

SEQ ID NO: 3454921 - RNA, 12 nt, Human
gccucagacugg

SEQ ID NO: 3454922 - RNA, 21 nt, Human
gccucagacuggagggcaagg

SEQ ID NO: 3454923 - RNA, 15 nt, Human
gccucagagaccagg

SEQ ID NO: 3454924 - RNA, 17 nt, Human
gccucagagaccagggc

SEQ ID NO: 3454925 - RNA, 17 nt, Human
gccucagcauccuggca

SEQ ID NO: 3454926 - RNA, 18 nt, Human
gccucagcauccuggcac

SEQ ID NO: 3454927 - RNA, 16 nt, Human
gccucagccagagaag

SEQ ID NO: 3454928 - RNA, 16 nt, Human
gccucagccauucacu

SEQ ID NO: 3454929 - RNA, 12 nt, Human
gccucagccucc

SEQ ID NO: 3454930 - RNA, 16 nt, Human
gccucagccucccaag

SEQ ID NO: 3454931 - RNA, 16 nt, Human
gccucagccucccgag

SEQ ID NO: 3454932 - RNA, 18 nt, Human
gccucagcgcggcccucc

SEQ ID NO: 3454933 - RNA, 23 nt, Human
gccucagcuacccacuauccuuc

SEQ ID NO: 3454934 - RNA, 17 nt, Human
gccucagcucccacaag

SEQ ID NO: 3454935 - RNA, 15 nt, Human
gccucagcugccuca

SEQ ID NO: 3454936 - RNA, 15 nt, Human
gccucaggacuggga

SEQ ID NO: 3454937 - RNA, 18 nt, Human
gccucaggacugggagcc

SEQ ID NO: 3454938 - RNA, 14 nt, Human
gccucagggcuccu

SEQ ID NO: 3454939 - RNA, 15 nt, Human
gccucaggugcuguc

SEQ ID NO: 3454940 - RNA, 17 nt, Human
gccucaggugcugucca

SEQ ID NO: 3454941 - RNA, 20 nt, Human
gccucaggugcuguccaugg

SEQ ID NO: 3454942 - RNA, 16 nt, Human
gccucaguauauuuaa

SEQ ID NO: 3454943 - RNA, 17 nt, Human
gccucagugacccuggc

SEQ ID NO: 3454944 - RNA, 20 nt, Human
gccucagugacccuggcucc

SEQ ID NO: 3454945 - RNA, 14 nt, Human
gccucagugccacu

SEQ ID NO: 3454946 - RNA, 21 nt, Human
gccucaguggacuuuccaccc

SEQ ID NO: 3454947 - RNA, 15 nt, Human
gccucauauuuaaag

SEQ ID NO: 3454948 - RNA, 18 nt, Human
gccucauccgaggcaggg

SEQ ID NO: 3454949 - RNA, 19 nt, Human
gccucaugucaaauauuua

SEQ ID NO: 3454950 - RNA, 14 nt, Human
gccucauguggcug

SEQ ID NO: 3454951 - RNA, 17 nt, Human
gccuccaaaugccaacu

SEQ ID NO: 3454952 - RNA, 20 nt, Human
gccuccaaccccucgcccag

SEQ ID NO: 3454953 - RNA, 22 nt, Human
gccuccaaccccucgcccaguc

SEQ ID NO: 3454954 - RNA, 16 nt, Human
gccuccaacccuagca

SEQ ID NO: 3454955 - RNA, 22 nt, Human
gccuccaauuuuuuaagugaaa

SEQ ID NO: 3454956 - RNA, 15 nt, Human
gccuccacagcgagg

SEQ ID NO: 3454957 - RNA, 20 nt, Human
gccuccacagcgagggcagc

SEQ ID NO: 3454958 - RNA, 14 nt, Human
gccuccaccaccac

SEQ ID NO: 3454959 - RNA, 23 nt, Human
gccuccaccaccacuggccacca

SEQ ID NO: 3454960 - RNA, 12 nt, Human
gccuccacccuc

SEQ ID NO: 3454961 - RNA, 14 nt, Human
gccuccacccucug

SEQ ID NO: 3454962 - RNA, 17 nt, Human
gccuccagaacucacug

SEQ ID NO: 3454963 - RNA, 14 nt, Human
gccuccagcccucu

SEQ ID NO: 3454964 - RNA, 16 nt, Human
gccuccagcucagcag

SEQ ID NO: 3454965 - RNA, 18 nt, Human
gccuccagcugccccggg

SEQ ID NO: 3454966 - RNA, 12 nt, Human
gccuccaggcca

SEQ ID NO: 3454967 - RNA, 20 nt, Human
gccuccaggcccgucugucc

SEQ ID NO: 3454968 - RNA, 17 nt, Human
gccuccagggcuggacu

SEQ ID NO: 3454969 - RNA, 18 nt, Human
gccuccagggcuggacug

SEQ ID NO: 3454970 - RNA, 21 nt, Human
gccuccagggcuggacugagg

SEQ ID NO: 3454971 - RNA, 13 nt, Human
gccuccaggugug

SEQ ID NO: 3454972 - RNA, 16 nt, Human
gccuccaggugugcac

SEQ ID NO: 3454973 - RNA, 16 nt, Human
gccuccauccaaggcc

SEQ ID NO: 3454974 - RNA, 14 nt, Human
gccuccauccuagu

SEQ ID NO: 3454975 - RNA, 20 nt, Human
gccuccauccugaggcucca

SEQ ID NO: 3454976 - RNA, 11 nt, Human
gccuccaugcu

SEQ ID NO: 3454977 - RNA, 15 nt, Human
gccuccaugggcccc

SEQ ID NO: 3454978 - RNA, 19 nt, Human
gccuccaugggccccaggg

SEQ ID NO: 3454979 - RNA, 17 nt, Human
gccuccauggugccucu

SEQ ID NO: 3454980 - RNA, 23 nt, Human
gccuccauuccuggagcccgagg

SEQ ID NO: 3454981 - RNA, 17 nt, Human
gccuccauuuaguucuu

SEQ ID NO: 3454982 - RNA, 16 nt, Human
gccucccaaagugcug

SEQ ID NO: 3454983 - RNA, 15 nt, Human
gccucccaaaugagc

SEQ ID NO: 3454984 - RNA, 22 nt, Human
gccucccaacucaccccagccc

SEQ ID NO: 3454985 - RNA, 13 nt, Human
gccucccacagac

SEQ ID NO: 3454986 - RNA, 13 nt, Human
gccucccacagug

SEQ ID NO: 3454987 - RNA, 16 nt, Human
gccucccacagugacu

SEQ ID NO: 3454988 - RNA, 19 nt, Human
gccucccacccgaugcugc

SEQ ID NO: 3454989 - RNA, 14 nt, Human
gccucccacgacug

SEQ ID NO: 3454990 - RNA, 21 nt, Human
gccucccacgacugcccggca

SEQ ID NO: 3454991 - RNA, 12 nt, Human
gccucccacugg

SEQ ID NO: 3454992 - RNA, 13 nt, Human
gccucccagccug

SEQ ID NO: 3454993 - RNA, 14 nt, Human
gccucccagguuca

SEQ ID NO: 3454994 - RNA, 17 nt, Human
gccuccccaacccugcc

SEQ ID NO: 3454995 - RNA, 19 nt, Human
gccuccccaacccugcccc

SEQ ID NO: 3454996 - RNA, 21 nt, Human
gccuccccaacccugccccug

SEQ ID NO: 3454997 - RNA, 12 nt, Human
gccuccccaccu

SEQ ID NO: 3454998 - RNA, 13 nt, Human
gccuccccauuuc

SEQ ID NO: 3454999 - RNA, 19 nt, Human
gccuccccauuucccaucu

SEQ ID NO: 3455000 - RNA, 17 nt, Human
gccuccccuccucugcu

SEQ ID NO: 3455001 - RNA, 18 nt, Human
gccuccccucuccuuccu

SEQ ID NO: 3455002 - RNA, 21 nt, Human
gccuccccucuccuuccugug

SEQ ID NO: 3455003 - RNA, 15 nt, Human
gccuccccugccacc

SEQ ID NO: 3455004 - RNA, 20 nt, Human
gccuccccugcugaaggugg

SEQ ID NO: 3455005 - RNA, 21 nt, Human
gccucccgaauagcugggacu

SEQ ID NO: 3455006 - RNA, 23 nt, Human
gccucccgaauagcugggacuac

SEQ ID NO: 3455007 - RNA, 15 nt, Human
gccucccgaguagcu

SEQ ID NO: 3455008 - RNA, 17 nt, Human
gccucccgaguagcugg

SEQ ID NO: 3455009 - RNA, 18 nt, Human
gccucccgaguagcuggg

SEQ ID NO: 3455010 - RNA, 20 nt, Human
gccucccgaguagcugggac

SEQ ID NO: 3455011 - RNA, 16 nt, Human
gccucccuagccagca

SEQ ID NO: 3455012 - RNA, 14 nt, Human
gccucccuccaccc

SEQ ID NO: 3455013 - RNA, 19 nt, Human
gccucccuccaccccagga

SEQ ID NO: 3455014 - RNA, 16 nt, Human
gccucccuccccugcc

SEQ ID NO: 3455015 - RNA, 14 nt, Human
ucaaacaaugacaa

SEQ ID NO: 3455016 - RNA, 20 nt, Human
ucaaacaaugacaaagcaga

SEQ ID NO: 3455017 - RNA, 16 nt, Human
ucaaacacaaaugcag

SEQ ID NO: 3455018 - RNA, 17 nt, Human
ucaaacacaguuacacu

SEQ ID NO: 3455019 - RNA, 12 nt, Human
ucaaacacugca

SEQ ID NO: 3455020 - RNA, 18 nt, Human
ucaaacacuugugacuuu

SEQ ID NO: 3455021 - RNA, 16 nt, Human
ucaaacagaauuuuaa

SEQ ID NO: 3455022 - RNA, 16 nt, Human
ucaaacaucuggaaaa

SEQ ID NO: 3455023 - RNA, 16 nt, Human
ucaaacauuaguacuu

SEQ ID NO: 3455024 - RNA, 18 nt, Human
ucaaacauuaguacuuua

SEQ ID NO: 3455025 - RNA, 20 nt, Human
ucaaaccaaaucacugaacu

SEQ ID NO: 3455026 - RNA, 18 nt, Human
ucaaaccauaaacuucau

SEQ ID NO: 3455027 - RNA, 21 nt, Human
ucaaaccauaaacuucauggu

SEQ ID NO: 3455028 - RNA, 20 nt, Human
ucaaaccccgaccaccugcc

SEQ ID NO: 3455029 - RNA, 14 nt, Human
ucaaaccccugacc

SEQ ID NO: 3455030 - RNA, 16 nt, Human
ucaaacccuagccuug

SEQ ID NO: 3455031 - RNA, 18 nt, Human
ucaaaccuguuuaaauau

SEQ ID NO: 3455032 - RNA, 15 nt, Human
ucaaacgugaaaaug

SEQ ID NO: 3455033 - RNA, 18 nt, Human
ucaaacuacauauuguaa

SEQ ID NO: 3455034 - RNA, 16 nt, Human
ucaaacuacuuugcug

SEQ ID NO: 3455035 - RNA, 16 nt, Human
ucaaacucaaugcuuu

SEQ ID NO: 3455036 - RNA, 18 nt, Human
ucaaacuccugaccucag

SEQ ID NO: 3455037 - RNA, 21 nt, Human
ucaaacugaaaagcugagacc

SEQ ID NO: 3455038 - RNA, 15 nt, Human
ucaaacugaggaauu

SEQ ID NO: 3455039 - RNA, 19 nt, Human
ucaaacugaggaauuucac

SEQ ID NO: 3455040 - RNA, 23 nt, Human
ucaaacuggggccuccagaacuc

SEQ ID NO: 3455041 - RNA, 19 nt, Human
ucaaacuggggccucccug

SEQ ID NO: 3455042 - RNA, 12 nt, Human
ucaaacuguaaa

SEQ ID NO: 3455043 - RNA, 19 nt, Human
uauuauucaccauguaaaa

SEQ ID NO: 3455044 - RNA, 15 nt, Human
uauuauucugcagca

SEQ ID NO: 3455045 - RNA, 15 nt, Human
uauuauuguguguua

SEQ ID NO: 3455046 - RNA, 22 nt, Human
uauuauuuauuuuuuuuaauug

SEQ ID NO: 3455047 - RNA, 16 nt, Human
uauuauuucaauguga

SEQ ID NO: 3455048 - RNA, 14 nt, Human
uauuauuucuauua

SEQ ID NO: 3455049 - RNA, 12 nt, Human
uauuauuugcag

SEQ ID NO: 3455050 - RNA, 14 nt, Human
uauuauuuguguuu

SEQ ID NO: 3455051 - RNA, 12 nt, Human
uauuauuuucca

SEQ ID NO: 3455052 - RNA, 14 nt, Human
uauuauuuuccaaa

SEQ ID NO: 3455053 - RNA, 21 nt, Human
uauuauuuuggggucucuuuu

SEQ ID NO: 3455054 - RNA, 15 nt, Human
uauucaaacagucuc

SEQ ID NO: 3455055 - RNA, 16 nt, Human
uauucaaagagaaaac

SEQ ID NO: 3455056 - RNA, 22 nt, Human
uauucaaaguugccuaaaucca

SEQ ID NO: 3455057 - RNA, 14 nt, Human
uauucaaccaugga

SEQ ID NO: 3455058 - RNA, 16 nt, Human
uauucaaccauggacu

SEQ ID NO: 3455059 - RNA, 14 nt, Human
uauucaauaaagcu

SEQ ID NO: 3455060 - RNA, 15 nt, Human
uauucaauaaaguau

SEQ ID NO: 3455061 - RNA, 17 nt, Human
uauucaauaaaguauuu

SEQ ID NO: 3455062 - RNA, 21 nt, Human
uauucaauaaaguauuuaauu

SEQ ID NO: 3455063 - RNA, 14 nt, Human
uauucaauuccucu

SEQ ID NO: 3455064 - RNA, 15 nt, Human
uauucaauuccucug

SEQ ID NO: 3455065 - RNA, 20 nt, Human
ucacaggcgaggccuggagu

SEQ ID NO: 3455066 - RNA, 18 nt, Human
ucacaggcugggcugggc

SEQ ID NO: 3455067 - RNA, 15 nt, Human
ucacagggcagagcc

SEQ ID NO: 3455068 - RNA, 16 nt, Human
ucacagggcaguaccu

SEQ ID NO: 3455069 - RNA, 16 nt, Human
ucacagggugggccuc

SEQ ID NO: 3455070 - RNA, 19 nt, Human
ucacagggugggccucggc

SEQ ID NO: 3455071 - RNA, 24 nt, Human
ucacaggguugggcccagaucugg

SEQ ID NO: 3455072 - RNA, 15 nt, Human
ucacaggucccaaau

SEQ ID NO: 3455073 - RNA, 22 nt, Human
ucacagguuggaagagaaucac

SEQ ID NO: 3455074 - RNA, 20 nt, Human
ucacaguacagcaugugccu

SEQ ID NO: 3455075 - RNA, 15 nt, Human
ucacaguagagccag

SEQ ID NO: 3455076 - RNA, 17 nt, Human
ucacaguagagccagcu

SEQ ID NO: 3455077 - RNA, 14 nt, Human
ucacaguauugcuc

SEQ ID NO: 3455078 - RNA, 18 nt, Human
ucacagucccacugugca

SEQ ID NO: 3455079 - RNA, 15 nt, Human
ucacagucuaauuuu

SEQ ID NO: 3455080 - RNA, 13 nt, Human
ucacagucucaca

SEQ ID NO: 3455081 - RNA, 16 nt, Human
ucacagugacccuucc

SEQ ID NO: 3455082 - RNA, 18 nt, Human
ucacagugacccuuccca

SEQ ID NO: 3455083 - RNA, 18 nt, Human
ucacagugcucuuuucuc

SEQ ID NO: 3455084 - RNA, 18 nt, Human
ucacagugcuuuuaagug

SEQ ID NO: 3455085 - RNA, 14 nt, Human
ucacaguguuugca

SEQ ID NO: 3455086 - RNA, 14 nt, Human
ucacaguuccucgc

SEQ ID NO: 3455087 - RNA, 16 nt, Human
ucacaguuccucgccc

SEQ ID NO: 3455088 - RNA, 19 nt, Human
ucacaguuccucgcccugg

SEQ ID NO: 3455089 - RNA, 20 nt, Human
ucacaguucuuugggccaga

SEQ ID NO: 3455090 - RNA, 17 nt, Human
ucacaguuuuuccugga

SEQ ID NO: 3455091 - RNA, 17 nt, Human
ucacauaaaugcagccc

SEQ ID NO: 3455092 - RNA, 19 nt, Human
ucacauaagcucagaaucc

SEQ ID NO: 3455093 - RNA, 18 nt, Human
ucacauagagaucauccu

SEQ ID NO: 3455094 - RNA, 15 nt, Human
ucacauagauguccc

SEQ ID NO: 3455095 - RNA, 17 nt, Human
ucacauagcuacccaaa

SEQ ID NO: 3455096 - RNA, 21 nt, Human
ucacauagcuacccaaaagag

SEQ ID NO: 3455097 - RNA, 14 nt, Human
ucacauagugaaag

SEQ ID NO: 3455098 - RNA, 17 nt, Human
ucacauaucuaguauga

SEQ ID NO: 3455099 - RNA, 22 nt, Human
ucacauaucuaguaugaaauua

SEQ ID NO: 3455100 - RNA, 13 nt, Human
ucacaucagauaa

SEQ ID NO: 3455101 - RNA, 11 nt, Human
ucacauccugg

SEQ ID NO: 3455102 - RNA, 17 nt, Human
ucacauccuguguuucu

SEQ ID NO: 3455103 - RNA, 19 nt, Human
ucacaucuuuuaagacaaa

SEQ ID NO: 3455104 - RNA, 21 nt, Human
ucacaugaacauacuggcugg

SEQ ID NO: 3455105 - RNA, 18 nt, Human
ucacaugaauuauuacag

SEQ ID NO: 3455106 - RNA, 22 nt, Human
ucacaugaauuauuacaguguu

SEQ ID NO: 3455107 - RNA, 20 nt, Human
ucacaugaccacauagcaug

SEQ ID NO: 3455108 - RNA, 20 nt, Human
ucacaugaccugaucacuag

SEQ ID NO: 3455109 - RNA, 21 nt, Human
ucacaugaucuguuuuucacc

SEQ ID NO: 3455110 - RNA, 20 nt, Human
ucacaugauuccagccauca

SEQ ID NO: 3455111 - RNA, 18 nt, Human
ucacauggugccccuagc

SEQ ID NO: 3455112 - RNA, 21 nt, Human
ucacauggugcuacgccugca

SEQ ID NO: 3455113 - RNA, 21 nt, Human
ucacaugucaguaccuucaaa

SEQ ID NO: 3455114 - RNA, 23 nt, Human
ucacauguggggagguuaaucua

SEQ ID NO: 3455115 - RNA, 14 nt, Human
ucacauuagaagac

SEQ ID NO: 3455116 - RNA, 16 nt, Human
ucacauuauuugcaug

SEQ ID NO: 3455117 - RNA, 22 nt, Human
ucacauuccucugcccuuccug

SEQ ID NO: 3455118 - RNA, 19 nt, Human
ucacauuccugaacaggau

SEQ ID NO: 3455119 - RNA, 19 nt, Human
ucacauucuuauaaauaug

SEQ ID NO: 3455120 - RNA, 14 nt, Human
ucacauucuuggcu

SEQ ID NO: 3455121 - RNA, 17 nt, Human
ucacauugcauucuauu

SEQ ID NO: 3455122 - RNA, 14 nt, Human
ucacauuggaaaca

SEQ ID NO: 3455123 - RNA, 23 nt, Human
ucacauuguaacugaacuucagg

SEQ ID NO: 3455124 - RNA, 16 nt, Human
ucacauuguuaagaaa

SEQ ID NO: 3455125 - RNA, 19 nt, Human
ucacauuguuugcugcuau

SEQ ID NO: 3455126 - RNA, 14 nt, Human
ucacauuuauucug

SEQ ID NO: 3455127 - RNA, 17 nt, Human
ucacauuuauucugcuc

SEQ ID NO: 3455128 - RNA, 20 nt, Human
ucacauuuuuauaccuguuu

SEQ ID NO: 3455129 - RNA, 17 nt, Human
ucaccaacgucugugcc

SEQ ID NO: 3455130 - RNA, 18 nt, Human
ucaccaacgucugugcca

SEQ ID NO: 3455131 - RNA, 14 nt, Human
ucaccaagcccagu

SEQ ID NO: 3455132 - RNA, 12 nt, Human
ucaccaagcuca

SEQ ID NO: 3455133 - RNA, 20 nt, Human
ucaccaagcucacaguuccu

SEQ ID NO: 3455134 - RNA, 22 nt, Human
ucaccaagcucacaguuccucg

SEQ ID NO: 3455135 - RNA, 14 nt, Human
ucaccaaggcugau

SEQ ID NO: 3455136 - RNA, 22 nt, Human
ucaccacaaacuguaauacaau

SEQ ID NO: 3455137 - RNA, 10 nt, Human
ucaccaccac

SEQ ID NO: 3455138 - RNA, 15 nt, Human
ucaccaccuucccag

SEQ ID NO: 3455139 - RNA, 18 nt, Human
ucaccacgacuggccagg

SEQ ID NO: 3455140 - RNA, 20 nt, Human
ucaccacucaaaggccagac

SEQ ID NO: 3455141 - RNA, 16 nt, Human
ucaccagagagggacu

SEQ ID NO: 3455142 - RNA, 19 nt, Human
ucaccagcaccaacaccac

SEQ ID NO: 3455143 - RNA, 15 nt, Human
ucaccagccccacug

SEQ ID NO: 3455144 - RNA, 23 nt, Human
ucaccagccccacugccagcagc

SEQ ID NO: 3455145 - RNA, 19 nt, Human
ucaccagcccggccugcuc

SEQ ID NO: 3455146 - RNA, 18 nt, Human
ucaccagcugcaaagugu

SEQ ID NO: 3455147 - RNA, 17 nt, Human
ucaccaggcagccucug

SEQ ID NO: 3455148 - RNA, 19 nt, Human
ucaccaggcagccucuggg

SEQ ID NO: 3455149 - RNA, 20 nt, Human
ucaccaggcagccucugggg

SEQ ID NO: 3455150 - RNA, 22 nt, Human
ucaccaggcagccucugggggg

SEQ ID NO: 3455151 - RNA, 18 nt, Human
ucaccaggggcaggcaca

SEQ ID NO: 3455152 - RNA, 15 nt, Human
ucaccaguacauucu

SEQ ID NO: 3455153 - RNA, 17 nt, Human
ucaccaguacauucuca

SEQ ID NO: 3455154 - RNA, 19 nt, Human
ucaccagugcgauucugga

SEQ ID NO: 3455155 - RNA, 18 nt, Human
ucaccaguguguggcuuu

SEQ ID NO: 3455156 - RNA, 19 nt, Human
ucaccaucaauccugauuc

SEQ ID NO: 3455157 - RNA, 17 nt, Human
ucaccaucucaggccac

SEQ ID NO: 3455158 - RNA, 21 nt, Human
ucaccaucucaggccaccugc

SEQ ID NO: 3455159 - RNA, 23 nt, Human
ucaccaucucaggccaccugccc

SEQ ID NO: 3455160 - RNA, 15 nt, Human
ucaccaucuuggcca

SEQ ID NO: 3455161 - RNA, 16 nt, Human
ucaccaugaucacuua

SEQ ID NO: 3455162 - RNA, 16 nt, Human
ucaccaugcuuccagc

SEQ ID NO: 3455163 - RNA, 16 nt, Human
ucaccauguaaaacaa

SEQ ID NO: 3455164 - RNA, 17 nt, Human
ucaccauguuggccagg

SEQ ID NO: 3455165 - RNA, 16 nt, Human
ucaccauuuccccagg

SEQ ID NO: 3455166 - RNA, 16 nt, Human
ucaccauuuggauccu

SEQ ID NO: 3455167 - RNA, 15 nt, Human
ucacccacagggcua

SEQ ID NO: 3455168 - RNA, 13 nt, Human
ucacccaccccug

SEQ ID NO: 3455169 - RNA, 14 nt, Human
ucacccaccccugc

SEQ ID NO: 3455170 - RNA, 17 nt, Human
ucacccagacagcuccc

SEQ ID NO: 3455171 - RNA, 15 nt, Human
ucacccagacauaaa

SEQ ID NO: 3455172 - RNA, 16 nt, Human
ucacccagccccaggg

SEQ ID NO: 3455173 - RNA, 17 nt, Human
ucacccaggccuauguu

SEQ ID NO: 3455174 - RNA, 19 nt, Human
ucacccagguuggagugca

SEQ ID NO: 3455175 - RNA, 19 nt, Human
ucacccaugcaagcagagg

SEQ ID NO: 3455176 - RNA, 22 nt, Human
ucaccccaaguagucugcucac

SEQ ID NO: 3455177 - RNA, 23 nt, Human
ucaccccaaguagucugcucaca

SEQ ID NO: 3455178 - RNA, 13 nt, Human
ucaccccagagcc

SEQ ID NO: 3455179 - RNA, 18 nt, Human
ucaccccagagccacaca

SEQ ID NO: 3455180 - RNA, 19 nt, Human
ucaccccagagccacacau

SEQ ID NO: 3455181 - RNA, 12 nt, Human
ucaccccauccc

SEQ ID NO: 3455182 - RNA, 19 nt, Human
ucacccccaaggggcaguc

SEQ ID NO: 3455183 - RNA, 13 nt, Human
ucaccccccacuc

SEQ ID NO: 3455184 - RNA, 18 nt, Human
ucaccccccacucaccag

SEQ ID NO: 3455185 - RNA, 15 nt, Human
ucacccccucccacc

SEQ ID NO: 3455186 - RNA, 15 nt, Human
ucacccccuccuuca

SEQ ID NO: 3455187 - RNA, 14 nt, Human
ucacccccugagau

SEQ ID NO: 3455188 - RNA, 13 nt, Human
uauuguuucugca

SEQ ID NO: 3455189 - RNA, 17 nt, Human
uauuguuucuuuaucac

SEQ ID NO: 3455190 - RNA, 17 nt, Human
uauuguuugguaaaugu

SEQ ID NO: 3455191 - RNA, 15 nt, Human
uauuguuuuacaaua

SEQ ID NO: 3455192 - RNA, 12 nt, Human
uauuguuuucag

SEQ ID NO: 3455193 - RNA, 18 nt, Human
uauuguuuucaguguaca

SEQ ID NO: 3455194 - RNA, 16 nt, Human
uauuuaaaaaacuaaa

SEQ ID NO: 3455195 - RNA, 18 nt, Human
uauuuaaaaauauuuuug

SEQ ID NO: 3455196 - RNA, 12 nt, Human
uauuuaaaaaug

SEQ ID NO: 3455197 - RNA, 15 nt, Human
uauuuaaaaaugucu

SEQ ID NO: 3455198 - RNA, 16 nt, Human
uauuuaaaaaugucuu

SEQ ID NO: 3455199 - RNA, 12 nt, Human
uauuuaaaacuu

SEQ ID NO: 3455200 - RNA, 21 nt, Human
uauuuaaaauagcaaaagaag

SEQ ID NO: 3455201 - RNA, 13 nt, Human
uauuuaaaaugua

SEQ ID NO: 3455202 - RNA, 19 nt, Human
uauuuaaaauuuauugcuu

SEQ ID NO: 3455203 - RNA, 14 nt, Human
uauuuaaacauggu

SEQ ID NO: 3455204 - RNA, 19 nt, Human
uauuuaaaccgcuaaaaga

SEQ ID NO: 3455205 - RNA, 20 nt, Human
uauuuaaacuuauaaaucau

SEQ ID NO: 3455206 - RNA, 13 nt, Human
uauuuaaagaaau

SEQ ID NO: 3455207 - RNA, 19 nt, Human
uauuuaaagaaauauguau

SEQ ID NO: 3455208 - RNA, 13 nt, Human
uauuuaaagacaa

SEQ ID NO: 3455209 - RNA, 22 nt, Human
uauuuaaagacagggaagagca

SEQ ID NO: 3455210 - RNA, 22 nt, Human
uauuuaaauauuaaauauguua

SEQ ID NO: 3455211 - RNA, 16 nt, Human
uauuuaaaugggaaua

SEQ ID NO: 3455212 - RNA, 20 nt, Human
uauuuaaaugucuaauguau

SEQ ID NO: 3455213 - RNA, 16 nt, Human
uauuuaaauucuuuuu

SEQ ID NO: 3455214 - RNA, 14 nt, Human
uauuuaacagaaau

SEQ ID NO: 3455215 - RNA, 21 nt, Human
uauuuaacagcugaauuaucu

SEQ ID NO: 3455216 - RNA, 16 nt, Human
uauuuaacucucuuua

SEQ ID NO: 3455217 - RNA, 23 nt, Human
uauuuaacucucuuuaugucugu

SEQ ID NO: 3455218 - RNA, 15 nt, Human
uauuuaacuggugca

SEQ ID NO: 3455219 - RNA, 16 nt, Human
uauuuaacuggugcac

SEQ ID NO: 3455220 - RNA, 23 nt, Human
uauuuaacuggugcacuuuguaa

SEQ ID NO: 3455221 - RNA, 13 nt, Human
uauuuaacuugag

SEQ ID NO: 3455222 - RNA, 21 nt, Human
uauuuaacuugaggguaauaa

SEQ ID NO: 3455223 - RNA, 13 nt, Human
uauuuaagaaaau

SEQ ID NO: 3455224 - RNA, 20 nt, Human
uauuuaagauaauuauaaua

SEQ ID NO: 3455225 - RNA, 20 nt, Human
uauuuaagauaguuuugcca

SEQ ID NO: 3455226 - RNA, 12 nt, Human
uauuuaagcaaa

SEQ ID NO: 3455227 - RNA, 14 nt, Human
uauuuaagcaaaua

SEQ ID NO: 3455228 - RNA, 18 nt, Human
uauuuaagcaacaucuuu

SEQ ID NO: 3455229 - RNA, 20 nt, Human
uauuuaagcaacaucuuuuu

SEQ ID NO: 3455230 - RNA, 21 nt, Human
uauuuaagcaacaucuuuuua

SEQ ID NO: 3455231 - RNA, 17 nt, Human
uauuuaagccuaaagau

SEQ ID NO: 3455232 - RNA, 22 nt, Human
uauuuaagccuaaagauuuuga

SEQ ID NO: 3455233 - RNA, 24 nt, Human
uauuuaagccuaaagauuuugauc

SEQ ID NO: 3455234 - RNA, 20 nt, Human
uauuuaagccucauauuuaa

SEQ ID NO: 3455235 - RNA, 21 nt, Human
ucacucuaagucauguauguu

SEQ ID NO: 3455236 - RNA, 21 nt, Human
ucacucuaauuaauuguaauc

SEQ ID NO: 3455237 - RNA, 19 nt, Human
ucacucuacuuagcauguc

SEQ ID NO: 3455238 - RNA, 17 nt, Human
ucacucugaguguuuua

SEQ ID NO: 3455239 - RNA, 22 nt, Human
ucacucugcuaccuugccccaa

SEQ ID NO: 3455240 - RNA, 22 nt, Human
ucacucuggcagcucagagagg

SEQ ID NO: 3455241 - RNA, 14 nt, Human
ucacucuggccuca

SEQ ID NO: 3455242 - RNA, 22 nt, Human
ucacucugggcacacucugcca

SEQ ID NO: 3455243 - RNA, 16 nt, Human
ucacucugucgcccag

SEQ ID NO: 3455244 - RNA, 19 nt, Human
ucacucugucgcccagucu

SEQ ID NO: 3455245 - RNA, 20 nt, Human
ucacucuguucauuccucca

SEQ ID NO: 3455246 - RNA, 22 nt, Human
ucacucuguucauuccuccagg

SEQ ID NO: 3455247 - RNA, 15 nt, Human
ucacucuuaugcugu

SEQ ID NO: 3455248 - RNA, 17 nt, Human
ucacucuuauugcccac

SEQ ID NO: 3455249 - RNA, 21 nt, Human
ucacucuuauugcccacgcug

SEQ ID NO: 3455250 - RNA, 15 nt, Human
ucacucuuccagaau

SEQ ID NO: 3455251 - RNA, 18 nt, Human
ucacucuucucagccacu

SEQ ID NO: 3455252 - RNA, 16 nt, Human
ucacucuugccaaccu

SEQ ID NO: 3455253 - RNA, 14 nt, Human
ucacucuuggagcc

SEQ ID NO: 3455254 - RNA, 16 nt, Human
ucacucuuggagccug

SEQ ID NO: 3455255 - RNA, 20 nt, Human
ucacucuuguggauguuuua

SEQ ID NO: 3455256 - RNA, 21 nt, Human
ucacugaaaccuuuaagaaaa

SEQ ID NO: 3455257 - RNA, 23 nt, Human
ucacugaacaaacuaaaggugca

SEQ ID NO: 3455258 - RNA, 14 nt, Human
ucacugaagacgcc

SEQ ID NO: 3455259 - RNA, 14 nt, Human
ucacugaagccugc

SEQ ID NO: 3455260 - RNA, 16 nt, Human
ucacugaagcuuuuua

SEQ ID NO: 3455261 - RNA, 16 nt, Human
ucacugaaggccuggc

SEQ ID NO: 3455262 - RNA, 14 nt, Human
ucacugaauuuaua

SEQ ID NO: 3455263 - RNA, 12 nt, Human
ucacugacacaa

SEQ ID NO: 3455264 - RNA, 17 nt, Human
ucacugacacaaaggaa

SEQ ID NO: 3455265 - RNA, 13 nt, Human
ucacugagacagc

SEQ ID NO: 3455266 - RNA, 14 nt, Human
ucacugagacagcc

SEQ ID NO: 3455267 - RNA, 16 nt, Human
ucacugagacagcccg

SEQ ID NO: 3455268 - RNA, 23 nt, Human
ucacugagacagcccgggcucug

SEQ ID NO: 3455269 - RNA, 19 nt, Human
ucacugagcacuguuuucu

SEQ ID NO: 3455270 - RNA, 23 nt, Human
ucacugaggccugagacccagga

SEQ ID NO: 3455271 - RNA, 20 nt, Human
ucacugcaacaugaugaggu

SEQ ID NO: 3455272 - RNA, 18 nt, Human
ucacugcaagcuccgccu

SEQ ID NO: 3455273 - RNA, 14 nt, Human
ucacugcagccuca

SEQ ID NO: 3455274 - RNA, 21 nt, Human
ucacugcaggcacucaaugca

SEQ ID NO: 3455275 - RNA, 17 nt, Human
ucacugcauuauucucu

SEQ ID NO: 3455276 - RNA, 20 nt, Human
ucacugccacacucuccauc

SEQ ID NO: 3455277 - RNA, 15 nt, Human
ucacugccacuuugc

SEQ ID NO: 3455278 - RNA, 17 nt, Human
ucacugccacuuugcac

SEQ ID NO: 3455279 - RNA, 20 nt, Human
ucacugccagagauaaacua

SEQ ID NO: 3455280 - RNA, 14 nt, Human
ucacugccaggcca

SEQ ID NO: 3455281 - RNA, 13 nt, Human
ucacugccauaua

SEQ ID NO: 3455282 - RNA, 18 nt, Human
ucacugccaucaaacugu

SEQ ID NO: 3455283 - RNA, 18 nt, Human
ucacugccaugccagcuu

SEQ ID NO: 3455284 - RNA, 12 nt, Human
ucacugcccgca

SEQ ID NO: 3455285 - RNA, 22 nt, Human
ucacugcccgcacacccucacu

SEQ ID NO: 3455286 - RNA, 12 nt, Human
ucacugccucuc

SEQ ID NO: 3455287 - RNA, 19 nt, Human
ucacugccucucccuggcc

SEQ ID NO: 3455288 - RNA, 21 nt, Human
ucacugccucucccuggcccu

SEQ ID NO: 3455289 - RNA, 22 nt, Human
ucacugccugcagaggucugug

SEQ ID NO: 3455290 - RNA, 18 nt, Human
ucacugcgaagacccucu

SEQ ID NO: 3455291 - RNA, 19 nt, Human
ucacugcuaagaauauuug

SEQ ID NO: 3455292 - RNA, 23 nt, Human
ucacugcucccugaagccagccu

SEQ ID NO: 3455293 - RNA, 22 nt, Human
ucacugcugcaaggccuuucug

SEQ ID NO: 3455294 - RNA, 15 nt, Human
ucacugcuggcugcc

SEQ ID NO: 3455295 - RNA, 17 nt, Human
ucacugcuggcugccuu

SEQ ID NO: 3455296 - RNA, 13 nt, Human
ucacugcugucau

SEQ ID NO: 3455297 - RNA, 15 nt, Human
ucacugcugucauca

SEQ ID NO: 3455298 - RNA, 14 nt, Human
ucacugcuuaacuu

SEQ ID NO: 3455299 - RNA, 11 nt, Human
ucacugcuuca

SEQ ID NO: 3455300 - RNA, 16 nt, Human
ucacugcuuuuggccu

SEQ ID NO: 3455301 - RNA, 23 nt, Human
ucacugcuuuuggccuggaguuu

SEQ ID NO: 3455302 - RNA, 18 nt, Human
ucacuggaaaggggagag

SEQ ID NO: 3455303 - RNA, 14 nt, Human
ucacuggaacucag

SEQ ID NO: 3455304 - RNA, 13 nt, Human
ucacuggagcaca

SEQ ID NO: 3455305 - RNA, 22 nt, Human
ucacuggagcaccaggcacgaa

SEQ ID NO: 3455306 - RNA, 12 nt, Human
ucacuggagccc

SEQ ID NO: 3455307 - RNA, 13 nt, Human
ucacuggagccca

SEQ ID NO: 3455308 - RNA, 17 nt, Human
ucacuggagcccaggag

SEQ ID NO: 3455309 - RNA, 15 nt, Human
ucacuggcagcccca

SEQ ID NO: 3455310 - RNA, 16 nt, Human
ucacuggcaucuuugc

SEQ ID NO: 3455311 - RNA, 20 nt, Human
ucacuggcgacacguagcag

SEQ ID NO: 3455312 - RNA, 17 nt, Human
ucacuggcucuccaagu

SEQ ID NO: 3455313 - RNA, 19 nt, Human
ucacuggcucuccaagugc

SEQ ID NO: 3455314 - RNA, 17 nt, Human
ucacuggcucuccuggc

SEQ ID NO: 3455315 - RNA, 20 nt, Human
ucacuggcugccuccacucc

SEQ ID NO: 3455316 - RNA, 14 nt, Human
ucacuggggcagac

SEQ ID NO: 3455317 - RNA, 17 nt, Human
ucacuggggccuacagc

SEQ ID NO: 3455318 - RNA, 19 nt, Human
ucacugggguccuggggcc

SEQ ID NO: 3455319 - RNA, 20 nt, Human
ucacugggguccuggggccu

SEQ ID NO: 3455320 - RNA, 11 nt, Human
ucacugggugg

SEQ ID NO: 3455321 - RNA, 23 nt, Human
ucacuguaagacucauucccuag

SEQ ID NO: 3455322 - RNA, 21 nt, Human
ucacuguagaaugauuucaug

SEQ ID NO: 3455323 - RNA, 24 nt, Human
ucacuguauaaauaggagaggaug

SEQ ID NO: 3455324 - RNA, 18 nt, Human
ucacugucccucaaauga

SEQ ID NO: 3455325 - RNA, 14 nt, Human
ucacugucccuccu

SEQ ID NO: 3455326 - RNA, 20 nt, Human
ucacugucuuuaauucugua

SEQ ID NO: 3455327 - RNA, 14 nt, Human
ucacugucuuuccu

SEQ ID NO: 3455328 - RNA, 16 nt, Human
ucacugucuuuccuag

SEQ ID NO: 3455329 - RNA, 19 nt, Human
ucacugugcuguuguuaug

SEQ ID NO: 3455330 - RNA, 21 nt, Human
ucacugugggaaggccagcug

SEQ ID NO: 3455331 - RNA, 22 nt, Human
ucacugugguaaaugccacaca

SEQ ID NO: 3455332 - RNA, 19 nt, Human
gcggcuggggucccagcag

SEQ ID NO: 3455333 - RNA, 21 nt, Human
gcggcuggggucccagcagcu

SEQ ID NO: 3455334 - RNA, 17 nt, Human
gcgggaaagccagugac

SEQ ID NO: 3455335 - RNA, 19 nt, Human
gcgggaauggcagcugcca

SEQ ID NO: 3455336 - RNA, 14 nt, Human
gcgggacccaggca

SEQ ID NO: 3455337 - RNA, 20 nt, Human
gcgggaccgguacagaaagg

SEQ ID NO: 3455338 - RNA, 21 nt, Human
gcgggagccaugcgcccccuc

SEQ ID NO: 3455339 - RNA, 16 nt, Human
gcgggaugguccuggg

SEQ ID NO: 3455340 - RNA, 17 nt, Human
gcgggaugguccugggg

SEQ ID NO: 3455341 - RNA, 19 nt, Human
gcgggcacaccuccuccca

SEQ ID NO: 3455342 - RNA, 22 nt, Human
gcgggcacaccuccucccacug

SEQ ID NO: 3455343 - RNA, 20 nt, Human
gcgggcaccuauagucccag

SEQ ID NO: 3455344 - RNA, 17 nt, Human
gcgggcaccuguagucc

SEQ ID NO: 3455345 - RNA, 16 nt, Human
gcgggcagagggcugg

SEQ ID NO: 3455346 - RNA, 18 nt, Human
gcgggcaggggaggguca

SEQ ID NO: 3455347 - RNA, 20 nt, Human
gcgggccaaggacugccgac

SEQ ID NO: 3455348 - RNA, 21 nt, Human
gcgggccagccaggcgggcuc

SEQ ID NO: 3455349 - RNA, 17 nt, Human
gcgggcgcacugccucu

SEQ ID NO: 3455350 - RNA, 22 nt, Human
gcgggcgcacugccucucacag

SEQ ID NO: 3455351 - RNA, 16 nt, Human
gcgggcugggcagcug

SEQ ID NO: 3455352 - RNA, 12 nt, Human
gcggggacagcu

SEQ ID NO: 3455353 - RNA, 13 nt, Human
gcggggacagcuc

SEQ ID NO: 3455354 - RNA, 16 nt, Human
gcggggaguacaaggc

SEQ ID NO: 3455355 - RNA, 17 nt, Human
gcggggcgaagcccagg

SEQ ID NO: 3455356 - RNA, 18 nt, Human
gcggggcgaagcccaggc

SEQ ID NO: 3455357 - RNA, 18 nt, Human
gcggggcugucggcgcug

SEQ ID NO: 3455358 - RNA, 21 nt, Human
gcggggcuugccuucuggugu

SEQ ID NO: 3455359 - RNA, 20 nt, Human
gcgggucacaggagggaggg

SEQ ID NO: 3455360 - RNA, 19 nt, Human
gcggguggaucacgagguc

SEQ ID NO: 3455361 - RNA, 19 nt, Human
gcggguuauaaugaaugac

SEQ ID NO: 3455362 - RNA, 16 nt, Human
gcgguacaaaggaaaa

SEQ ID NO: 3455363 - RNA, 13 nt, Human
gcgguccacccag

SEQ ID NO: 3455364 - RNA, 13 nt, Human
gcggucccagcuc

SEQ ID NO: 3455365 - RNA, 22 nt, Human
gcggucccagcucccuggcucc

SEQ ID NO: 3455366 - RNA, 19 nt, Human
gcgguccccuccgccaggc

SEQ ID NO: 3455367 - RNA, 22 nt, Human
gcggucucaggcuggugggagg

SEQ ID NO: 3455368 - RNA, 17 nt, Human
gcggugcuugauagaaa

SEQ ID NO: 3455369 - RNA, 14 nt, Human
gcggugggccuggu

SEQ ID NO: 3455370 - RNA, 16 nt, Human
gcgguggggagagaug

SEQ ID NO: 3455371 - RNA, 20 nt, Human
gcgguuuacucacugcugca

SEQ ID NO: 3455372 - RNA, 15 nt, Human
gcguaaguacagaga

SEQ ID NO: 3455373 - RNA, 18 nt, Human
gcguaaguacagagaagc

SEQ ID NO: 3455374 - RNA, 21 nt, Human
gcguaaguacagagaagccau

SEQ ID NO: 3455375 - RNA, 18 nt, Human
gcguagagggugcugccc

SEQ ID NO: 3455376 - RNA, 16 nt, Human
gcguagcagaguuaaa

SEQ ID NO: 3455377 - RNA, 13 nt, Human
gcguaugucuguu

SEQ ID NO: 3455378 - RNA, 12 nt, Human
gcgucagccucc

SEQ ID NO: 3455379 - RNA, 18 nt, Human
gcgucagucuuuuucugu

SEQ ID NO: 3455380 - RNA, 16 nt, Human
gcgucauuacagggca

SEQ ID NO: 3455381 - RNA, 19 nt, Human
gcgucccuagcagugaacu

SEQ ID NO: 3455382 - RNA, 12 nt, Human
gcgucccuggcg

SEQ ID NO: 3455383 - RNA, 18 nt, Human
gcgucccuggcgcaggug

SEQ ID NO: 3455384 - RNA, 16 nt, Human
gcguccgcgcgccagc

SEQ ID NO: 3455385 - RNA, 20 nt, Human
gcguccgcgcgccagcacag

SEQ ID NO: 3455386 - RNA, 18 nt, Human
gcguccguggguugcuaa

SEQ ID NO: 3455387 - RNA, 20 nt, Human
gcguccuccucaccucaugc

SEQ ID NO: 3455388 - RNA, 17 nt, Human
gcguccugacggcgccc

SEQ ID NO: 3455389 - RNA, 19 nt, Human
gcguccuguccacacccag

SEQ ID NO: 3455390 - RNA, 21 nt, Human
gcguccuguccacacccagcu

SEQ ID NO: 3455391 - RNA, 14 nt, Human
gcgucuacccuggg

SEQ ID NO: 3455392 - RNA, 15 nt, Human
gcgucuacccuggga

SEQ ID NO: 3455393 - RNA, 16 nt, Human
gcgucuacccugggau

SEQ ID NO: 3455394 - RNA, 15 nt, Human
gcgucuauccugugu

SEQ ID NO: 3455395 - RNA, 18 nt, Human
gcgucucccaucuuaacu

SEQ ID NO: 3455396 - RNA, 11 nt, Human
gcgucuccugu

SEQ ID NO: 3455397 - RNA, 21 nt, Human
gcgucuccuguuuuucugggu

SEQ ID NO: 3455398 - RNA, 20 nt, Human
gcgucuggaggggccccugc

SEQ ID NO: 3455399 - RNA, 23 nt, Human
gcgucuggaggggccccugcuuc

SEQ ID NO: 3455400 - RNA, 18 nt, Human
gcgucuuccgccccugcc

SEQ ID NO: 3455401 - RNA, 23 nt, Human
gcgugaacccgggaggcggagcu

SEQ ID NO: 3455402 - RNA, 19 nt, Human
gcgugacacucuccuugca

SEQ ID NO: 3455403 - RNA, 19 nt, Human
gcgugacccgaccuggccg

SEQ ID NO: 3455404 - RNA, 13 nt, Human
gcgugacucaccc

SEQ ID NO: 3455405 - RNA, 14 nt, Human
gcgugagccacugc

SEQ ID NO: 3455406 - RNA, 15 nt, Human
gcgugagccacugca

SEQ ID NO: 3455407 - RNA, 16 nt, Human
gcgugagccacugcac

SEQ ID NO: 3455408 - RNA, 18 nt, Human
gcgugaggaugggaagga

SEQ ID NO: 3455409 - RNA, 19 nt, Human
gcgugaucaaagccacacu

SEQ ID NO: 3455410 - RNA, 16 nt, Human
gcgugaucucagcuca

SEQ ID NO: 3455411 - RNA, 19 nt, Human
gcgugcacacaccagagcc

SEQ ID NO: 3455412 - RNA, 23 nt, Human
gcgugcacacaccagagcccacc

SEQ ID NO: 3455413 - RNA, 23 nt, Human
gcgugccagucaagaagaaaaag

SEQ ID NO: 3455414 - RNA, 16 nt, Human
gcgugccccugcugcu

SEQ ID NO: 3455415 - RNA, 15 nt, Human
gcgugccguggcacc

SEQ ID NO: 3455416 - RNA, 14 nt, Human
gcgugccgugugag

SEQ ID NO: 3455417 - RNA, 22 nt, Human
gcgugccgugugagugugacag

SEQ ID NO: 3455418 - RNA, 24 nt, Human
gcgugccgugugagugugacaggg

SEQ ID NO: 3455419 - RNA, 22 nt, Human
gcgugcgcaucuugccuccagg

SEQ ID NO: 3455420 - RNA, 21 nt, Human
gcgugcucaguucagaaucac

SEQ ID NO: 3455421 - RNA, 17 nt, Human
gcguggacucugcacau

SEQ ID NO: 3455422 - RNA, 18 nt, Human
gcguggacucugcacaug

SEQ ID NO: 3455423 - RNA, 14 nt, Human
gcguggagcaggcg

SEQ ID NO: 3455424 - RNA, 15 nt, Human
gcguggagcugccug

SEQ ID NO: 3455425 - RNA, 22 nt, Human
gcguggagggaggccccagggg

SEQ ID NO: 3455426 - RNA, 16 nt, Human
gcguggagggcguggg

SEQ ID NO: 3455427 - RNA, 20 nt, Human
gcguggauuaaacuuaugaa

SEQ ID NO: 3455428 - RNA, 22 nt, Human
gcguggcccaccaggccccccu

SEQ ID NO: 3455429 - RNA, 21 nt, Human
gcguggccuuguucugucacc

SEQ ID NO: 3455430 - RNA, 13 nt, Human
gcguggggagggc

SEQ ID NO: 3455431 - RNA, 13 nt, Human
gcguggggcuccc

SEQ ID NO: 3455432 - RNA, 18 nt, Human
gcguggggcucccgccuc

SEQ ID NO: 3455433 - RNA, 16 nt, Human
gcguggucacugcugu

SEQ ID NO: 3455434 - RNA, 17 nt, Human
gcguggucacugcuguc

SEQ ID NO: 3455435 - RNA, 21 nt, Human
gcgugguggaagaggggacag

SEQ ID NO: 3455436 - RNA, 16 nt, Human
gcgugguggucccugg

SEQ ID NO: 3455437 - RNA, 17 nt, Human
gcgugucaccugugcuu

SEQ ID NO: 3455438 - RNA, 20 nt, Human
gcguguccccggggcccagg

SEQ ID NO: 3455439 - RNA, 16 nt, Human
gcgugugccugugugc

SEQ ID NO: 3455440 - RNA, 22 nt, Human
ucaaccagggauuguuucuguu

SEQ ID NO: 3455441 - RNA, 17 nt, Human
ucaaccauggacuuuau

SEQ ID NO: 3455442 - RNA, 20 nt, Human
ucaaccccaccauaugaauu

SEQ ID NO: 3455443 - RNA, 18 nt, Human
ucaaccccagacacuggu

SEQ ID NO: 3455444 - RNA, 14 nt, Human
ucaacccucccuca

SEQ ID NO: 3455445 - RNA, 15 nt, Human
ucaacccucccucag

SEQ ID NO: 3455446 - RNA, 18 nt, Human
ucaacccucccucagccc

SEQ ID NO: 3455447 - RNA, 19 nt, Human
ucaacccucccucagcccc

SEQ ID NO: 3455448 - RNA, 21 nt, Human
ucaacccucccucagccccuc

SEQ ID NO: 3455449 - RNA, 23 nt, Human
ucaacccucccucagccccucuu

SEQ ID NO: 3455450 - RNA, 18 nt, Human
ucaacccucucaggugac

SEQ ID NO: 3455451 - RNA, 15 nt, Human
ucaaccuaccacccc

SEQ ID NO: 3455452 - RNA, 12 nt, Human
ucaaccuccugg

SEQ ID NO: 3455453 - RNA, 13 nt, Human
ucaaccuccuggg

SEQ ID NO: 3455454 - RNA, 18 nt, Human
ucaaccucgcgcuugcug

SEQ ID NO: 3455455 - RNA, 16 nt, Human
ucaaccuguaaauuau

SEQ ID NO: 3455456 - RNA, 14 nt, Human
ucaacgcagcccug

SEQ ID NO: 3455457 - RNA, 15 nt, Human
ucaacgcagcccugc

SEQ ID NO: 3455458 - RNA, 23 nt, Human
ucaacgccucacugaaacauggc

SEQ ID NO: 3455459 - RNA, 21 nt, Human
ucaacggaaagugcugucuua

SEQ ID NO: 3455460 - RNA, 14 nt, Human
ucaacguuguacug

SEQ ID NO: 3455461 - RNA, 20 nt, Human
ucaacuaaaaaaaaaaaagu

SEQ ID NO: 3455462 - RNA, 20 nt, Human
ucaacuaaaguuguacuuua

SEQ ID NO: 3455463 - RNA, 22 nt, Human
ucaacuagugggguuuccuggc

SEQ ID NO: 3455464 - RNA, 19 nt, Human
ucaacucaccuaauguuua

SEQ ID NO: 3455465 - RNA, 19 nt, Human
ucaacuccaaacugacucu

SEQ ID NO: 3455466 - RNA, 15 nt, Human
ucaacucccugcccc

SEQ ID NO: 3455467 - RNA, 22 nt, Human
ucaacucccugccccccagccc

SEQ ID NO: 3455468 - RNA, 24 nt, Human
ucaacucucuuauugccucacuuc

SEQ ID NO: 3455469 - RNA, 18 nt, Human
ucaacucugcugaggguc

SEQ ID NO: 3455470 - RNA, 16 nt, Human
ucaacucuucgaagcc

SEQ ID NO: 3455471 - RNA, 19 nt, Human
ucaacucuugaguuuuuca

SEQ ID NO: 3455472 - RNA, 23 nt, Human
ucaacugaaaagacucaguguuc

SEQ ID NO: 3455473 - RNA, 24 nt, Human
ucaacugaccagccuccaugcugc

SEQ ID NO: 3455474 - RNA, 20 nt, Human
ucaacugcaucaagauguga

SEQ ID NO: 3455475 - RNA, 22 nt, Human
ucaaguggcaaagcuguucuuc

SEQ ID NO: 3455476 - RNA, 18 nt, Human
ucaagugggaucugucac

SEQ ID NO: 3455477 - RNA, 15 nt, Human
ucaagugucauaugu

SEQ ID NO: 3455478 - RNA, 16 nt, Human
ucaagugucucagucc

SEQ ID NO: 3455479 - RNA, 13 nt, Human
ucaaguuauugua

SEQ ID NO: 3455480 - RNA, 13 nt, Human
ucaaguucaagga

SEQ ID NO: 3455481 - RNA, 13 nt, Human
ucaaguucuaaga

SEQ ID NO: 3455482 - RNA, 17 nt, Human
ucaaguucuaagauucu

SEQ ID NO: 3455483 - RNA, 17 nt, Human
ucaaguugaggggcuuc

SEQ ID NO: 3455484 - RNA, 16 nt, Human
ucaaguugauuagaaa

SEQ ID NO: 3455485 - RNA, 13 nt, Human
ucaaguugugcca

SEQ ID NO: 3455486 - RNA, 22 nt, Human
ucaaguugugcuuguuuacagc

SEQ ID NO: 3455487 - RNA, 21 nt, Human
ucaaguuuuaagugaaaguga

SEQ ID NO: 3455488 - RNA, 21 nt, Human
ucaaguuuuggguauguuuaa

SEQ ID NO: 3455489 - RNA, 19 nt, Human
ucaauaaaaaaaagaaaug

SEQ ID NO: 3455490 - RNA, 18 nt, Human
ucaauaaaaucauguaca

SEQ ID NO: 3455491 - RNA, 13 nt, Human
ucaauaaaaugug

SEQ ID NO: 3455492 - RNA, 15 nt, Human
ucaauaaaaugugau

SEQ ID NO: 3455493 - RNA, 18 nt, Human
ucaauaaaaugugauuuu

SEQ ID NO: 3455494 - RNA, 15 nt, Human
ucaauaaaauuauag

SEQ ID NO: 3455495 - RNA, 19 nt, Human
ucaauaaaauuauagcucu

SEQ ID NO: 3455496 - RNA, 12 nt, Human
ucaauaaacagc

SEQ ID NO: 3455497 - RNA, 14 nt, Human
ucaauaaacagcuu

SEQ ID NO: 3455498 - RNA, 18 nt, Human
ucaauaaacgauuuaauu

SEQ ID NO: 3455499 - RNA, 23 nt, Human
ucaauaaacgauuuaauucucuu

SEQ ID NO: 3455500 - RNA, 14 nt, Human
ucaauaaagaaaac

SEQ ID NO: 3455501 - RNA, 18 nt, Human
ucaauaaagcacugagca

SEQ ID NO: 3455502 - RNA, 12 nt, Human
ucaauaaagcau

SEQ ID NO: 3455503 - RNA, 15 nt, Human
ucaauaaagcauuua

SEQ ID NO: 3455504 - RNA, 19 nt, Human
ucaauaaagcauuuauaaa

SEQ ID NO: 3455505 - RNA, 15 nt, Human
ucaauaaaguauuua

SEQ ID NO: 3455506 - RNA, 17 nt, Human
ucaauaaaguauuuaau

SEQ ID NO: 3455507 - RNA, 18 nt, Human
ucaauaaaguauuuaauu

SEQ ID NO: 3455508 - RNA, 20 nt, Human
ucaauaaaguauuuaauuag

SEQ ID NO: 3455509 - RNA, 24 nt, Human
ucaauaacagccgcuccagaguca

SEQ ID NO: 3455510 - RNA, 13 nt, Human
ucaauaagaaggu

SEQ ID NO: 3455511 - RNA, 22 nt, Human
ucaauaagaagguagaaugagu

SEQ ID NO: 3455512 - RNA, 12 nt, Human
ucaauaauaaaa

SEQ ID NO: 3455513 - RNA, 18 nt, Human
ucaauaauauauuuucug

SEQ ID NO: 3455514 - RNA, 19 nt, Human
ucaauaauauauuuucugu

SEQ ID NO: 3455515 - RNA, 19 nt, Human
ucaauacagauauauuuuc

SEQ ID NO: 3455516 - RNA, 18 nt, Human
ucaauacaguacaggcag

SEQ ID NO: 3455517 - RNA, 19 nt, Human
ucaauacaguacaggcagc

SEQ ID NO: 3455518 - RNA, 23 nt, Human
ucaauagccacuaaccuugccug

SEQ ID NO: 3455519 - RNA, 19 nt, Human
ucaauaggaaaaacugauu

SEQ ID NO: 3455520 - RNA, 19 nt, Human
ucaauaguaaaagauaaca

SEQ ID NO: 3455521 - RNA, 14 nt, Human
ucaauagucaagaa

SEQ ID NO: 3455522 - RNA, 20 nt, Human
ucaauaguguccuaugcaau

SEQ ID NO: 3455523 - RNA, 17 nt, Human
ucaauaguucaaggaac

SEQ ID NO: 3455524 - RNA, 12 nt, Human
ucaauaguugaa

SEQ ID NO: 3455525 - RNA, 13 nt, Human
ucaauaguugaau

SEQ ID NO: 3455526 - RNA, 15 nt, Human
ucaauauauuuguau

SEQ ID NO: 3455527 - RNA, 13 nt, Human
ucaauaugcuuac

SEQ ID NO: 3455528 - RNA, 15 nt, Human
ucaauauuaaauaca

SEQ ID NO: 3455529 - RNA, 12 nt, Human
ucaauauugaau

SEQ ID NO: 3455530 - RNA, 19 nt, Human
ucaauauugaauuuuuccu

SEQ ID NO: 3455531 - RNA, 13 nt, Human
ucaauauugacau

SEQ ID NO: 3455532 - RNA, 17 nt, Human
ucaauauugacauuugu

SEQ ID NO: 3455533 - RNA, 18 nt, Human
ucaauauugucauuccug

SEQ ID NO: 3455534 - RNA, 11 nt, Human
ucaauauuuau

SEQ ID NO: 3455535 - RNA, 21 nt, Human
ucaaucaaauaaguauuuaua

SEQ ID NO: 3455536 - RNA, 12 nt, Human
ucaaucacuguc

SEQ ID NO: 3455537 - RNA, 22 nt, Human
ucaaucagucucagaaugucau

SEQ ID NO: 3455538 - RNA, 15 nt, Human
ucaaucaucugugug

SEQ ID NO: 3455539 - RNA, 16 nt, Human
ucaaucaucuguguga

SEQ ID NO: 3455540 - RNA, 19 nt, Human
ucaaucaucugugugaaaa

SEQ ID NO: 3455541 - RNA, 14 nt, Human
ucaaucauuguaca

SEQ ID NO: 3455542 - RNA, 16 nt, Human
ucaaucauuguacagu

SEQ ID NO: 3455543 - RNA, 13 nt, Human
ucaaucauuucuc

SEQ ID NO: 3455544 - RNA, 19 nt, Human
ucaaucauuucucacugug

SEQ ID NO: 3455545 - RNA, 16 nt, Human
ucaaucccaaaaguca

SEQ ID NO: 3455546 - RNA, 21 nt, Human
ucaauccuaauuucuccuccc

SEQ ID NO: 3455547 - RNA, 20 nt, Human
ucaauccugauuccucucua

SEQ ID NO: 3455548 - RNA, 17 nt, Human
ucaaucucguauagaag

SEQ ID NO: 3455549 - RNA, 19 nt, Human
ucaaucucugggggcugag

SEQ ID NO: 3455550 - RNA, 21 nt, Human
ucaaucugaagauacaugucu

SEQ ID NO: 3455551 - RNA, 16 nt, Human
ucaaucuguaaacugu

SEQ ID NO: 3455552 - RNA, 20 nt, Human
ucaaucuugcauguaacgca

SEQ ID NO: 3455553 - RNA, 18 nt, Human
ucaaucuuuaaaccaauu

SEQ ID NO: 3455554 - RNA, 22 nt, Human
ucaaugaaaaauagugucuuug

SEQ ID NO: 3455555 - RNA, 16 nt, Human
ucaaugaaccauaaau

SEQ ID NO: 3455556 - RNA, 17 nt, Human
ucaaugaaccauaaauu

SEQ ID NO: 3455557 - RNA, 16 nt, Human
ucaaugaagccagcuc

SEQ ID NO: 3455558 - RNA, 21 nt, Human
ucaaugaauuuuauaaucugc

SEQ ID NO: 3455559 - RNA, 15 nt, Human
ucaaugacaugaauu

SEQ ID NO: 3455560 - RNA, 21 nt, Human
ucaaugacaugaauuuuagcu

SEQ ID NO: 3455561 - RNA, 23 nt, Human
ucaaugacaugaauuuuagcuuu

SEQ ID NO: 3455562 - RNA, 14 nt, Human
ucaaugagagcaua

SEQ ID NO: 3455563 - RNA, 13 nt, Human
ucaaugagcaugu

SEQ ID NO: 3455564 - RNA, 14 nt, Human
ucaaugagcauguu

SEQ ID NO: 3455565 - RNA, 17 nt, Human
ucaaugagcauguuuag

SEQ ID NO: 3455566 - RNA, 19 nt, Human
ucaaugagcauguuuagac

SEQ ID NO: 3455567 - RNA, 21 nt, Human
ucaaugagcauguuuagacuu

SEQ ID NO: 3455568 - RNA, 10 nt, Human
ucaaugaucu

SEQ ID NO: 3455569 - RNA, 19 nt, Human
ucaaugaucuagguuuaac

SEQ ID NO: 3455570 - RNA, 22 nt, Human
ucaaugaucuagguuuaacuca

SEQ ID NO: 3455571 - RNA, 16 nt, Human
ucaaugauuauuuuca

SEQ ID NO: 3455572 - RNA, 18 nt, Human
ucaaugcaguugucucug

SEQ ID NO: 3455573 - RNA, 19 nt, Human
ucaaugcaguugucucugu

SEQ ID NO: 3455574 - RNA, 20 nt, Human
ucaaugccccugaauuuaaa

SEQ ID NO: 3455575 - RNA, 14 nt, Human
ucaaugcucauaac

SEQ ID NO: 3455576 - RNA, 17 nt, Human
ucaaugcuggagaaaaa

SEQ ID NO: 3455577 - RNA, 15 nt, Human
ucaaugcuguuuggg

SEQ ID NO: 3455578 - RNA, 22 nt, Human
ucaaugcuguuuggguuuccaa

SEQ ID NO: 3455579 - RNA, 21 nt, Human
ucaauggaguaugucugaugg

SEQ ID NO: 3455580 - RNA, 23 nt, Human
ucaauguacuaggauacugcugc

SEQ ID NO: 3455581 - RNA, 15 nt, Human
ucaaugugaaucaga

SEQ ID NO: 3455582 - RNA, 21 nt, Human
ucaaugugauauaaacagcuu

SEQ ID NO: 3455583 - RNA, 17 nt, Human
ucaaugugauucuaaug

SEQ ID NO: 3455584 - RNA, 21 nt, Human
ucaaugugauucuaaugucuu

SEQ ID NO: 3455585 - RNA, 14 nt, Human
ucaauguguauaaa

SEQ ID NO: 3455586 - RNA, 17 nt, Human
ucaaugugucuuucuaa

SEQ ID NO: 3455587 - RNA, 20 nt, Human
ucaaugugucuuucuaagaa

SEQ ID NO: 3455588 - RNA, 15 nt, Human
ucaauguuuucaguu

SEQ ID NO: 3455589 - RNA, 21 nt, Human
ucaauuaaacggauuauuuuu

SEQ ID NO: 3455590 - RNA, 13 nt, Human
ucaauuaaaugua

SEQ ID NO: 3455591 - RNA, 20 nt, Human
ucaauuacaggaaguacugg

SEQ ID NO: 3455592 - RNA, 13 nt, Human
ucaauuaccacac

SEQ ID NO: 3455593 - RNA, 15 nt, Human
ucaauuacucuauaa

SEQ ID NO: 3455594 - RNA, 19 nt, Human
ucaauuagaauaguguucu

SEQ ID NO: 3455595 - RNA, 22 nt, Human
ucaauucaaagcuguguguuug

SEQ ID NO: 3455596 - RNA, 17 nt, Human
ucaauucauaucuauuu

SEQ ID NO: 3455597 - RNA, 22 nt, Human
ucaauuccguagccagcugcuc

SEQ ID NO: 3455598 - RNA, 17 nt, Human
ucaauuccugggcccca

SEQ ID NO: 3455599 - RNA, 23 nt, Human
ucaauucuguagguuaaaaaaau

SEQ ID NO: 3455600 - RNA, 23 nt, Human
ucaauucuucccuaucuuugcca

SEQ ID NO: 3455601 - RNA, 15 nt, Human
ucaauucuugccaaa

SEQ ID NO: 3455602 - RNA, 16 nt, Human
ucaauugcaucuccca

SEQ ID NO: 3455603 - RNA, 17 nt, Human
ucaauugcaucucccag

SEQ ID NO: 3455604 - RNA, 18 nt, Human
ucaguaaaauuauacugu

SEQ ID NO: 3455605 - RNA, 21 nt, Human
ucaguaaaauuauacugugug

SEQ ID NO: 3455606 - RNA, 16 nt, Human
ucaguaaaccugucug

SEQ ID NO: 3455607 - RNA, 17 nt, Human
ucaguaaaccugucuga

SEQ ID NO: 3455608 - RNA, 22 nt, Human
ucaguaaauaacaggcauuugu

SEQ ID NO: 3455609 - RNA, 15 nt, Human
ucaguaacugucagg

SEQ ID NO: 3455610 - RNA, 21 nt, Human
ucaguaacuuacccuuaggga

SEQ ID NO: 3455611 - RNA, 21 nt, Human
ucaguaagacgacaaggaaag

SEQ ID NO: 3455612 - RNA, 22 nt, Human
ucaguaagacgacaaggaaagg

SEQ ID NO: 3455613 - RNA, 14 nt, Human
ucaguaaguuaucu

SEQ ID NO: 3455614 - RNA, 19 nt, Human
ucaguaauaaacuguguuu

SEQ ID NO: 3455615 - RNA, 14 nt, Human
ucaguaauuugagg

SEQ ID NO: 3455616 - RNA, 18 nt, Human
ucaguaauuugaggacaa

SEQ ID NO: 3455617 - RNA, 13 nt, Human
ucaguacccaccu

SEQ ID NO: 3455618 - RNA, 15 nt, Human
ucaguacccaccuga

SEQ ID NO: 3455619 - RNA, 17 nt, Human
ucaguacccucucagcu

SEQ ID NO: 3455620 - RNA, 18 nt, Human
gcucccagccaggcccuu

SEQ ID NO: 3455621 - RNA, 15 nt, Human
gcucccagccucagc

SEQ ID NO: 3455622 - RNA, 17 nt, Human
gcucccagccucagcgc

SEQ ID NO: 3455623 - RNA, 12 nt, Human
gcucccaggaac

SEQ ID NO: 3455624 - RNA, 12 nt, Human
gcucccaggaca

SEQ ID NO: 3455625 - RNA, 20 nt, Human
gcucccaggagccugcccag

SEQ ID NO: 3455626 - RNA, 20 nt, Human
gcucccaggcauuccccagg

SEQ ID NO: 3455627 - RNA, 22 nt, Human
gcucccaggccgagaagccagu

SEQ ID NO: 3455628 - RNA, 23 nt, Human
gcucccaggccgagaagccagug

SEQ ID NO: 3455629 - RNA, 12 nt, Human
gcucccagggca

SEQ ID NO: 3455630 - RNA, 20 nt, Human
gcucccaggggcucccuccg

SEQ ID NO: 3455631 - RNA, 21 nt, Human
gcucccaggggcucccuccgc

SEQ ID NO: 3455632 - RNA, 21 nt, Human
gcucccaggggucucccuggc

SEQ ID NO: 3455633 - RNA, 22 nt, Human
gcucccaggggucucccuggcu

SEQ ID NO: 3455634 - RNA, 22 nt, Human
gcucccaggugcagccagaggc

SEQ ID NO: 3455635 - RNA, 19 nt, Human
gcucccagugucuuccugu

SEQ ID NO: 3455636 - RNA, 21 nt, Human
gcucccauucacucuuccaga

SEQ ID NO: 3455637 - RNA, 20 nt, Human
gcuccccacagcgucccugg

SEQ ID NO: 3455638 - RNA, 21 nt, Human
gcuccccacagcgucccuggc

SEQ ID NO: 3455639 - RNA, 16 nt, Human
gcuccccacucugcuc

SEQ ID NO: 3455640 - RNA, 22 nt, Human
gcuccccacucugcucugaugc

SEQ ID NO: 3455641 - RNA, 20 nt, Human
gcuccccacugccuacugca

SEQ ID NO: 3455642 - RNA, 15 nt, Human
gcuccccagcccagg

SEQ ID NO: 3455643 - RNA, 14 nt, Human
gcuccccagcccug

SEQ ID NO: 3455644 - RNA, 15 nt, Human
gcuccccagcccugg

SEQ ID NO: 3455645 - RNA, 19 nt, Human
gcuccccagcccuggcucu

SEQ ID NO: 3455646 - RNA, 20 nt, Human
gcuccccagcccuggcucug

SEQ ID NO: 3455647 - RNA, 12 nt, Human
gcuccccaugug

SEQ ID NO: 3455648 - RNA, 14 nt, Human
gcucccccaccccc

SEQ ID NO: 3455649 - RNA, 13 nt, Human
gcucccccagcuc

SEQ ID NO: 3455650 - RNA, 17 nt, Human
gcucccccauccucccc

SEQ ID NO: 3455651 - RNA, 20 nt, Human
gcucccccauccuccccuuc

SEQ ID NO: 3455652 - RNA, 15 nt, Human
gcucccccgggaggg

SEQ ID NO: 3455653 - RNA, 18 nt, Human
gcucccccuccaccugcu

SEQ ID NO: 3455654 - RNA, 13 nt, Human
gcucccccugucc

SEQ ID NO: 3455655 - RNA, 13 nt, Human
gcucccccuuuuc

SEQ ID NO: 3455656 - RNA, 16 nt, Human
gcuccccgccuguucc

SEQ ID NO: 3455657 - RNA, 17 nt, Human
gcuccccgccuguuccc

SEQ ID NO: 3455658 - RNA, 20 nt, Human
gcuccccgccuguucccccg

SEQ ID NO: 3455659 - RNA, 14 nt, Human
gcuccccuccccaa

SEQ ID NO: 3455660 - RNA, 15 nt, Human
gcuccccucccuccu

SEQ ID NO: 3455661 - RNA, 18 nt, Human
gcuccccuccucuccccu

SEQ ID NO: 3455662 - RNA, 15 nt, Human
gcuccccucuuccuc

SEQ ID NO: 3455663 - RNA, 16 nt, Human
gcuccccucuuccucu

SEQ ID NO: 3455664 - RNA, 16 nt, Human
gcuccccuuccccuuc

SEQ ID NO: 3455665 - RNA, 12 nt, Human
gcucccgcccgu

SEQ ID NO: 3455666 - RNA, 14 nt, Human
gcucccucacucuc

SEQ ID NO: 3455667 - RNA, 19 nt, Human
ucacugacacaaaggaagu

SEQ ID NO: 3455668 - RNA, 22 nt, Human
ucacugagacagcccgggcucu

SEQ ID NO: 3455669 - RNA, 22 nt, Human
ucacugaggccugagacccagg

SEQ ID NO: 3455670 - RNA, 21 nt, Human
ucacugaguuuuccauggcag

SEQ ID NO: 3455671 - RNA, 23 nt, Human
ucacugaguuuuccauggcagga

SEQ ID NO: 3455672 - RNA, 20 nt, Human
ucacugauauuuuuuauaca

SEQ ID NO: 3455673 - RNA, 16 nt, Human
ucacugaugggaaaac

SEQ ID NO: 3455674 - RNA, 18 nt, Human
ucacugaugggaaaacug

SEQ ID NO: 3455675 - RNA, 14 nt, Human
ucacugauguacaa

SEQ ID NO: 3455676 - RNA, 18 nt, Human
ucacugcaaccuccgccu

SEQ ID NO: 3455677 - RNA, 18 nt, Human
ucacugcaaccucugccu

SEQ ID NO: 3455678 - RNA, 16 nt, Human
ucacugcaaccuucac

SEQ ID NO: 3455679 - RNA, 17 nt, Human
ucacugcaacuucugcc

SEQ ID NO: 3455680 - RNA, 18 nt, Human
ucacugcaacuucugccu

SEQ ID NO: 3455681 - RNA, 15 nt, Human
ucacugcagccucaa

SEQ ID NO: 3455682 - RNA, 22 nt, Human
ucacugcagccuccuucuccug

SEQ ID NO: 3455683 - RNA, 13 nt, Human
ucacugcaggcac

SEQ ID NO: 3455684 - RNA, 19 nt, Human
ucacugccacacucuccau

SEQ ID NO: 3455685 - RNA, 16 nt, Human
ucacugccacuuugca

SEQ ID NO: 3455686 - RNA, 22 nt, Human
ucacugccacuuugcacauuuu

SEQ ID NO: 3455687 - RNA, 23 nt, Human
ucacugccacuuugcacauuuug

SEQ ID NO: 3455688 - RNA, 16 nt, Human
ucacugccaggccagc

SEQ ID NO: 3455689 - RNA, 19 nt, Human
ucacugcccgcacacccuc

SEQ ID NO: 3455690 - RNA, 20 nt, Human
ucacugcccgcacacccuca

SEQ ID NO: 3455691 - RNA, 11 nt, Human
ucacugccucu

SEQ ID NO: 3455692 - RNA, 14 nt, Human
ucacugccuuugcu

SEQ ID NO: 3455693 - RNA, 19 nt, Human
ucacugcucccugaagcca

SEQ ID NO: 3455694 - RNA, 21 nt, Human
ucacugcucccugaagccagc

SEQ ID NO: 3455695 - RNA, 18 nt, Human
ucacugcugcaaggccuu

SEQ ID NO: 3455696 - RNA, 16 nt, Human
ucacugcuggcugccu

SEQ ID NO: 3455697 - RNA, 11 nt, Human
ucacugcuguc

SEQ ID NO: 3455698 - RNA, 23 nt, Human
ucacugcuguuauauuucaucau

SEQ ID NO: 3455699 - RNA, 18 nt, Human
ucacugcuuaacuucaca

SEQ ID NO: 3455700 - RNA, 20 nt, Human
ucacugcuuaacuucacaua

SEQ ID NO: 3455701 - RNA, 15 nt, Human
ucacugcuugaugaa

SEQ ID NO: 3455702 - RNA, 21 nt, Human
ucacuggaaaggggagagccu

SEQ ID NO: 3455703 - RNA, 18 nt, Human
ucacuggaccacugggca

SEQ ID NO: 3455704 - RNA, 15 nt, Human
ucacuggagcacaau

SEQ ID NO: 3455705 - RNA, 18 nt, Human
ucacuggagcaccaggca

SEQ ID NO: 3455706 - RNA, 11 nt, Human
ucacuggagcc

SEQ ID NO: 3455707 - RNA, 22 nt, Human
ucacuggaguuacauuaauguu

SEQ ID NO: 3455708 - RNA, 13 nt, Human
ucacuggaugaaa

SEQ ID NO: 3455709 - RNA, 14 nt, Human
ucacuggaugaaga

SEQ ID NO: 3455710 - RNA, 19 nt, Human
ucacuggaugaagauucuc

SEQ ID NO: 3455711 - RNA, 16 nt, Human
ucacuggcaaugaaaa

SEQ ID NO: 3455712 - RNA, 18 nt, Human
ucacuggcagccccagca

SEQ ID NO: 3455713 - RNA, 19 nt, Human
ucacuggcagccccagcac

SEQ ID NO: 3455714 - RNA, 15 nt, Human
ucacuggcaucuuug

SEQ ID NO: 3455715 - RNA, 13 nt, Human
ucacuggcauggu

SEQ ID NO: 3455716 - RNA, 22 nt, Human
ucacuggcgacacguagcagcu

SEQ ID NO: 3455717 - RNA, 12 nt, Human
ucacuggcucuc

SEQ ID NO: 3455718 - RNA, 14 nt, Human
ucacuggcucucca

SEQ ID NO: 3455719 - RNA, 17 nt, Human
ucacuggcugccuccac

SEQ ID NO: 3455720 - RNA, 13 nt, Human
ucacuggggcaga

SEQ ID NO: 3455721 - RNA, 16 nt, Human
ucacugggguccuggg

SEQ ID NO: 3455722 - RNA, 18 nt, Human
ucacuggguggggugagg

SEQ ID NO: 3455723 - RNA, 20 nt, Human
ucacuggguggggugaggac

SEQ ID NO: 3455724 - RNA, 19 nt, Human
ucacugguagaccaaaaua

SEQ ID NO: 3455725 - RNA, 20 nt, Human
ucacugguagaccaaaauaa

SEQ ID NO: 3455726 - RNA, 23 nt, Human
ucacuguauaaauaggagaggau

SEQ ID NO: 3455727 - RNA, 23 nt, Human
ucacugucaaugauuauuuucau

SEQ ID NO: 3455728 - RNA, 19 nt, Human
ucacuguccuccaagccag

SEQ ID NO: 3455729 - RNA, 19 nt, Human
ucacugucuuuaauucugu

SEQ ID NO: 3455730 - RNA, 17 nt, Human
ucacugucuuuccuaga

SEQ ID NO: 3455731 - RNA, 16 nt, Human
ucacugugagcuccca

SEQ ID NO: 3455732 - RNA, 20 nt, Human
ucacugugcuguuguuauga

SEQ ID NO: 3455733 - RNA, 23 nt, Human
ucacugugcuguuguuaugaugu

SEQ ID NO: 3455734 - RNA, 18 nt, Human
ucacugugggaaggccag

SEQ ID NO: 3455735 - RNA, 15 nt, Human
ucacuguguauauuu

SEQ ID NO: 3455736 - RNA, 19 nt, Human
ucacuguguauauuugauu

SEQ ID NO: 3455737 - RNA, 17 nt, Human
ucacugugucacccagg

SEQ ID NO: 3455738 - RNA, 22 nt, Human
ucacuguuagcuuuuuaaaaca

SEQ ID NO: 3455739 - RNA, 18 nt, Human
ucacuguucccucugcuc

SEQ ID NO: 3455740 - RNA, 19 nt, Human
ucacuguucccucugcucc

SEQ ID NO: 3455741 - RNA, 20 nt, Human
ucacuguugaaaauuauuuu

SEQ ID NO: 3455742 - RNA, 16 nt, Human
ucacuguugcccaggc

SEQ ID NO: 3455743 - RNA, 20 nt, Human
ucacuguuuagaacacacac

SEQ ID NO: 3455744 - RNA, 18 nt, Human
ucacuguuucucugcugu

SEQ ID NO: 3455745 - RNA, 17 nt, Human
ucacuguuuuuagacac

SEQ ID NO: 3455746 - RNA, 21 nt, Human
ucacuguuuuuagacaccuuc

SEQ ID NO: 3455747 - RNA, 15 nt, Human
ucacuuaacaaacaa

SEQ ID NO: 3455748 - RNA, 20 nt, Human
ucacuuaacauuccuaaaau

SEQ ID NO: 3455749 - RNA, 22 nt, Human
ucacuuaacauuccuaaaaugc

SEQ ID NO: 3455750 - RNA, 16 nt, Human
ucacuuaauugcuaca

SEQ ID NO: 3455751 - RNA, 16 nt, Human
ucacuuacuguuucug

SEQ ID NO: 3455752 - RNA, 13 nt, Human
ucacuuauaccug

SEQ ID NO: 3455753 - RNA, 17 nt, Human
ucacuuauauguucuaa

SEQ ID NO: 3455754 - RNA, 13 nt, Human
ucacuuaucaguu

SEQ ID NO: 3455755 - RNA, 22 nt, Human
ucacuuaugaaugauuugcaua

SEQ ID NO: 3455756 - RNA, 15 nt, Human
ucacuucacccugga

SEQ ID NO: 3455757 - RNA, 21 nt, Human
ucacuucacugugcuguuguu

SEQ ID NO: 3455758 - RNA, 21 nt, Human
ucacuucagguauaccucacu

SEQ ID NO: 3455759 - RNA, 14 nt, Human
ucacuucaucuucu

SEQ ID NO: 3455760 - RNA, 18 nt, Human
ucacuucggccagagcug

SEQ ID NO: 3455761 - RNA, 17 nt, Human
ucacuucugagaacuca

SEQ ID NO: 3455762 - RNA, 13 nt, Human
ucacuugaaugug

SEQ ID NO: 3455763 - RNA, 14 nt, Human
ucacuugagacaaa

SEQ ID NO: 3455764 - RNA, 12 nt, Human
uccacaguugcc

SEQ ID NO: 3455765 - RNA, 21 nt, Human
uccacaguugccaccaccucu

SEQ ID NO: 3455766 - RNA, 16 nt, Human
uccacauagguuuaga

SEQ ID NO: 3455767 - RNA, 14 nt, Human
uccacaucugccuu

SEQ ID NO: 3455768 - RNA, 18 nt, Human
uccacaucugccuuaaaa

SEQ ID NO: 3455769 - RNA, 13 nt, Human
uccacaugcucug

SEQ ID NO: 3455770 - RNA, 13 nt, Human
uccacauuucuaa

SEQ ID NO: 3455771 - RNA, 16 nt, Human
uccaccaacccaucag

SEQ ID NO: 3455772 - RNA, 23 nt, Human
uccaccaagccuggucagcccaa

SEQ ID NO: 3455773 - RNA, 13 nt, Human
uccaccaccacug

SEQ ID NO: 3455774 - RNA, 17 nt, Human
uccaccacccaaaaguc

SEQ ID NO: 3455775 - RNA, 14 nt, Human
uccaccaccucccu

SEQ ID NO: 3455776 - RNA, 19 nt, Human
uccaccagcaucaccugcc

SEQ ID NO: 3455777 - RNA, 21 nt, Human
uccaccaggaaccucuucaga

SEQ ID NO: 3455778 - RNA, 15 nt, Human
uccaccagucauuuu

SEQ ID NO: 3455779 - RNA, 18 nt, Human
uccaccagucauuuuuca

SEQ ID NO: 3455780 - RNA, 24 nt, Human
uccaccauggcuaaggcaccagcc

SEQ ID NO: 3455781 - RNA, 13 nt, Human
uccacccaccuca

SEQ ID NO: 3455782 - RNA, 17 nt, Human
uccacccaccucagccu

SEQ ID NO: 3455783 - RNA, 18 nt, Human
uccacccaccucagccuc

SEQ ID NO: 3455784 - RNA, 12 nt, Human
uccacccagccc

SEQ ID NO: 3455785 - RNA, 14 nt, Human
uccacccagcccau

SEQ ID NO: 3455786 - RNA, 17 nt, Human
uccacccaggagccccg

SEQ ID NO: 3455787 - RNA, 20 nt, Human
uccacccaggagccccgagg

SEQ ID NO: 3455788 - RNA, 22 nt, Human
uccacccaggggcagccccagg

SEQ ID NO: 3455789 - RNA, 12 nt, Human
uccaccccagga

SEQ ID NO: 3455790 - RNA, 23 nt, Human
uccaccccagugcacccacucug

SEQ ID NO: 3455791 - RNA, 23 nt, Human
uccacccccgccucccuccccug

SEQ ID NO: 3455792 - RNA, 18 nt, Human
uccacccccucccuggcc

SEQ ID NO: 3455793 - RNA, 12 nt, Human
uccacccucuga

SEQ ID NO: 3455794 - RNA, 12 nt, Human
uccacccugcuc

SEQ ID NO: 3455795 - RNA, 13 nt, Human
uccacccugcucu

SEQ ID NO: 3455796 - RNA, 18 nt, Human
uccacccugucccccagc

SEQ ID NO: 3455797 - RNA, 20 nt, Human
uccacccuuggccugucuca

SEQ ID NO: 3455798 - RNA, 16 nt, Human
uccaccgcagaaggaa

SEQ ID NO: 3455799 - RNA, 15 nt, Human
uccaccgcugcucca

SEQ ID NO: 3455800 - RNA, 14 nt, Human
uccaccguccccuc

SEQ ID NO: 3455801 - RNA, 12 nt, Human
uccaccucagcc

SEQ ID NO: 3455802 - RNA, 16 nt, Human
uccaccucagccuugg

SEQ ID NO: 3455803 - RNA, 13 nt, Human
uccaccucccucc

SEQ ID NO: 3455804 - RNA, 13 nt, Human
uccaccucccugc

SEQ ID NO: 3455805 - RNA, 12 nt, Human
uccaccuccuuc

SEQ ID NO: 3455806 - RNA, 16 nt, Human
uccaccuccuucucug

SEQ ID NO: 3455807 - RNA, 13 nt, Human
uccaccucuggga

SEQ ID NO: 3455808 - RNA, 17 nt, Human
uccaccugccagggaca

SEQ ID NO: 3455809 - RNA, 20 nt, Human
uccaccugucucagccuccc

SEQ ID NO: 3455810 - RNA, 17 nt, Human
uccaccuuaaauuaaac

SEQ ID NO: 3455811 - RNA, 23 nt, Human
uccaccuuccauuuucccccacu

SEQ ID NO: 3455812 - RNA, 12 nt, Human
uccaccuucuca

SEQ ID NO: 3455813 - RNA, 14 nt, Human
uccaccuucucaca

SEQ ID NO: 3455814 - RNA, 15 nt, Human
uccaccuucucacau

SEQ ID NO: 3455815 - RNA, 18 nt, Human
uccaccuuucagcccacg

SEQ ID NO: 3455816 - RNA, 14 nt, Human
uccaccuuucccaa

SEQ ID NO: 3455817 - RNA, 17 nt, Human
uccacgagagcgcagca

SEQ ID NO: 3455818 - RNA, 22 nt, Human
uccacgagcuguuuacuaggga

SEQ ID NO: 3455819 - RNA, 19 nt, Human
uccacgcugucuccagacc

SEQ ID NO: 3455820 - RNA, 20 nt, Human
uccacgcugucuccagaccc

SEQ ID NO: 3455821 - RNA, 15 nt, Human
uccacggagccacuc

SEQ ID NO: 3455822 - RNA, 16 nt, Human
uccacggucuguucuu

SEQ ID NO: 3455823 - RNA, 18 nt, Human
uccacggucuguucuuga

SEQ ID NO: 3455824 - RNA, 15 nt, Human
uccacguacugcagc

SEQ ID NO: 3455825 - RNA, 20 nt, Human
uccacguauuccccuuccca

SEQ ID NO: 3455826 - RNA, 18 nt, Human
uccacgucccccuggggc

SEQ ID NO: 3455827 - RNA, 20 nt, Human
uccacguucugcucaucauu

SEQ ID NO: 3455828 - RNA, 21 nt, Human
uccacguucugcucaucauuc

SEQ ID NO: 3455829 - RNA, 14 nt, Human
uccacuaaaaauau

SEQ ID NO: 3455830 - RNA, 16 nt, Human
uccacuaaccccgggc

SEQ ID NO: 3455831 - RNA, 17 nt, Human
uccacuacaccuggcug

SEQ ID NO: 3455832 - RNA, 18 nt, Human
uccacuacaccuggcuga

SEQ ID NO: 3455833 - RNA, 20 nt, Human
ucagaaacccucauuguguu

SEQ ID NO: 3455834 - RNA, 21 nt, Human
ucagaaacccucauuguguuu

SEQ ID NO: 3455835 - RNA, 12 nt, Human
ucagaaacuguu

SEQ ID NO: 3455836 - RNA, 12 nt, Human
ucagaaagaagu

SEQ ID NO: 3455837 - RNA, 14 nt, Human
ucagaaagagcaag

SEQ ID NO: 3455838 - RNA, 23 nt, Human
ucagaaagagcaagucuggaucu

SEQ ID NO: 3455839 - RNA, 17 nt, Human
ucagaaaggaaaaacaa

SEQ ID NO: 3455840 - RNA, 20 nt, Human
ucagaaaggaaaaacaaacu

SEQ ID NO: 3455841 - RNA, 18 nt, Human
ucagaaagggagggcucu

SEQ ID NO: 3455842 - RNA, 22 nt, Human
ucagaaauaauaaaaaauuuca

SEQ ID NO: 3455843 - RNA, 22 nt, Human
ucagaaauacagauaaaugauu

SEQ ID NO: 3455844 - RNA, 20 nt, Human
ucagaaauauaacacauuuu

SEQ ID NO: 3455845 - RNA, 17 nt, Human
ucagaaaugacuuuuug

SEQ ID NO: 3455846 - RNA, 21 nt, Human
ucagaaaugucuggagaauaa

SEQ ID NO: 3455847 - RNA, 17 nt, Human
ucagaaauuuuuaucag

SEQ ID NO: 3455848 - RNA, 19 nt, Human
ucagaaauuuuuaucaguu

SEQ ID NO: 3455849 - RNA, 14 nt, Human
ucagaacaaauuca

SEQ ID NO: 3455850 - RNA, 19 nt, Human
ucagaacaccaagacuuga

SEQ ID NO: 3455851 - RNA, 16 nt, Human
ucagaacagagccuuu

SEQ ID NO: 3455852 - RNA, 16 nt, Human
ucagaacagcuguuga

SEQ ID NO: 3455853 - RNA, 15 nt, Human
ucagaacaguaucuu

SEQ ID NO: 3455854 - RNA, 22 nt, Human
ucagaaccauccauaguaguau

SEQ ID NO: 3455855 - RNA, 16 nt, Human
ucagaacccagggcuc

SEQ ID NO: 3455856 - RNA, 20 nt, Human
ucagaaccucuuccccagaa

SEQ ID NO: 3455857 - RNA, 15 nt, Human
ucagaacugugccac

SEQ ID NO: 3455858 - RNA, 17 nt, Human
ucagaagaaaaagaagc

SEQ ID NO: 3455859 - RNA, 18 nt, Human
ucagaagaaaaagaagca

SEQ ID NO: 3455860 - RNA, 12 nt, Human
ucagaagaaaga

SEQ ID NO: 3455861 - RNA, 16 nt, Human
ucagaagaaauaaaua

SEQ ID NO: 3455862 - RNA, 17 nt, Human
ucagaagagaggggaag

SEQ ID NO: 3455863 - RNA, 20 nt, Human
ucagaagcacagaauauuuu

SEQ ID NO: 3455864 - RNA, 16 nt, Human
ucagaagccucugggu

SEQ ID NO: 3455865 - RNA, 15 nt, Human
ucagaagccugaggc

SEQ ID NO: 3455866 - RNA, 20 nt, Human
ucagaagccugaggcuggga

SEQ ID NO: 3455867 - RNA, 15 nt, Human
ucagaagccuggggg

SEQ ID NO: 3455868 - RNA, 20 nt, Human
ucagaagccugggggccugg

SEQ ID NO: 3455869 - RNA, 21 nt, Human
ucagaagccugggggccuggc

SEQ ID NO: 3455870 - RNA, 12 nt, Human
ucagaaggagaa

SEQ ID NO: 3455871 - RNA, 16 nt, Human
ucagaaggagaaggaa

SEQ ID NO: 3455872 - RNA, 18 nt, Human
ucagaaggagaaggaagg

SEQ ID NO: 3455873 - RNA, 19 nt, Human
ucagaaggagaaggaagga

SEQ ID NO: 3455874 - RNA, 23 nt, Human
ucagaaggagaaggaaggagacu

SEQ ID NO: 3455875 - RNA, 18 nt, Human
ucagaaggcaaaugacuu

SEQ ID NO: 3455876 - RNA, 14 nt, Human
ucagaaggcuucau

SEQ ID NO: 3455877 - RNA, 21 nt, Human
ucagaagggagcuagccagag

SEQ ID NO: 3455878 - RNA, 16 nt, Human
ucagaagggaggcugg

SEQ ID NO: 3455879 - RNA, 15 nt, Human
ucagaaguccagagu

SEQ ID NO: 3455880 - RNA, 19 nt, Human
ucagaagugagcuuugcug

SEQ ID NO: 3455881 - RNA, 17 nt, Human
ucagaaguuuaaauauu

SEQ ID NO: 3455882 - RNA, 23 nt, Human
ucagaaguuuaaauauuaagcau

SEQ ID NO: 3455883 - RNA, 22 nt, Human
ucagaaguuucugccgcagccc

SEQ ID NO: 3455884 - RNA, 17 nt, Human
ucagaaucugaauguaa

SEQ ID NO: 3455885 - RNA, 14 nt, Human
ucagaaucuuuccu

SEQ ID NO: 3455886 - RNA, 21 nt, Human
ucagaaucuuuccuuccucuc

SEQ ID NO: 3455887 - RNA, 16 nt, Human
ucagaaucuuuguuaa

SEQ ID NO: 3455888 - RNA, 17 nt, Human
ucagaaucuuuguuaag

SEQ ID NO: 3455889 - RNA, 14 nt, Human
ucagaaugucauuu

SEQ ID NO: 3455890 - RNA, 16 nt, Human
ucagaauuauuuuuaa

SEQ ID NO: 3455891 - RNA, 10 nt, Human
ucagaauucu

SEQ ID NO: 3455892 - RNA, 14 nt, Human
ucagaauuuagugu

SEQ ID NO: 3455893 - RNA, 13 nt, Human
ucagacacaaaca

SEQ ID NO: 3455894 - RNA, 13 nt, Human
ucagacacagauu

SEQ ID NO: 3455895 - RNA, 16 nt, Human
ucagacagaacuugaa

SEQ ID NO: 3455896 - RNA, 18 nt, Human
ucagacagcugccuggga

SEQ ID NO: 3455897 - RNA, 16 nt, Human
ucagacauaaagccau

SEQ ID NO: 3455898 - RNA, 19 nt, Human
ucagacauagaauuaacac

SEQ ID NO: 3455899 - RNA, 22 nt, Human
ucagacauccauguuuguaaaa

SEQ ID NO: 3455900 - RNA, 22 nt, Human
ucagacaucugagguuuuauuu

SEQ ID NO: 3455901 - RNA, 14 nt, Human
ucagaccacggcuc

SEQ ID NO: 3455902 - RNA, 14 nt, Human
ucagaccagcucuu

SEQ ID NO: 3455903 - RNA, 23 nt, Human
ucagaccauaauguuacauuauu

SEQ ID NO: 3455904 - RNA, 13 nt, Human
ucagaccccagcg

SEQ ID NO: 3455905 - RNA, 13 nt, Human
ucagacccuaccc

SEQ ID NO: 3455906 - RNA, 20 nt, Human
ucagaccuuggaucagauga

SEQ ID NO: 3455907 - RNA, 21 nt, Human
ucagacuaagaaauauuccaa

SEQ ID NO: 3455908 - RNA, 14 nt, Human
ucagacuagugaca

SEQ ID NO: 3455909 - RNA, 17 nt, Human
ucagacucuaagaaaga

SEQ ID NO: 3455910 - RNA, 17 nt, Human
ucaggcuggugggaggg

SEQ ID NO: 3455911 - RNA, 23 nt, Human
ucaggcugucaguguuuggugca

SEQ ID NO: 3455912 - RNA, 14 nt, Human
ucaggcuuccuugg

SEQ ID NO: 3455913 - RNA, 15 nt, Human
ucaggcuuccuuggc

SEQ ID NO: 3455914 - RNA, 21 nt, Human
ucaggcuuucacuauuuccuu

SEQ ID NO: 3455915 - RNA, 19 nt, Human
ucagggaaacuaagauucu

SEQ ID NO: 3455916 - RNA, 16 nt, Human
ucagggaagauaaguu

SEQ ID NO: 3455917 - RNA, 17 nt, Human
ucagggaaggaggagcc

SEQ ID NO: 3455918 - RNA, 21 nt, Human
ucagggaaggaggagccuguc

SEQ ID NO: 3455919 - RNA, 15 nt, Human
ucagggaccaaggac

SEQ ID NO: 3455920 - RNA, 12 nt, Human
ucagggaccccu

SEQ ID NO: 3455921 - RNA, 17 nt, Human
ucagggaccccugcccu

SEQ ID NO: 3455922 - RNA, 15 nt, Human
ucagggaggcccugu

SEQ ID NO: 3455923 - RNA, 22 nt, Human
ucagggaggcccugugccccuu

SEQ ID NO: 3455924 - RNA, 13 nt, Human
ucagggagugcug

SEQ ID NO: 3455925 - RNA, 23 nt, Human
ucagggauagcacugagcaaagc

SEQ ID NO: 3455926 - RNA, 21 nt, Human
ucagggcaaagccaggucccu

SEQ ID NO: 3455927 - RNA, 22 nt, Human
ucagggcaaagccaggucccuc

SEQ ID NO: 3455928 - RNA, 18 nt, Human
ucagggcagauuuuaguu

SEQ ID NO: 3455929 - RNA, 15 nt, Human
ucagggcagcgccag

SEQ ID NO: 3455930 - RNA, 14 nt, Human
ucagggcagguggg

SEQ ID NO: 3455931 - RNA, 17 nt, Human
ucagggccaugcugagg

SEQ ID NO: 3455932 - RNA, 19 nt, Human
ucagggccaugcugaggcc

SEQ ID NO: 3455933 - RNA, 21 nt, Human
ucagggccaugcugaggccug

SEQ ID NO: 3455934 - RNA, 14 nt, Human
ucagggcccaaguc

SEQ ID NO: 3455935 - RNA, 18 nt, Human
ucagggcccagaggcuga

SEQ ID NO: 3455936 - RNA, 14 nt, Human
ucagggccuggcuc

SEQ ID NO: 3455937 - RNA, 21 nt, Human
ucagggccuggggccugagag

SEQ ID NO: 3455938 - RNA, 23 nt, Human
ucagggcgcacagcaugagaggc

SEQ ID NO: 3455939 - RNA, 13 nt, Human
ucagggcuccucc

SEQ ID NO: 3455940 - RNA, 15 nt, Human
ucagggcuccuccca

SEQ ID NO: 3455941 - RNA, 16 nt, Human
ucagggcuccucccag

SEQ ID NO: 3455942 - RNA, 17 nt, Human
ucagggcuccucccagc

SEQ ID NO: 3455943 - RNA, 18 nt, Human
ucagggcuccucccagcu

SEQ ID NO: 3455944 - RNA, 13 nt, Human
ucagggcuccugc

SEQ ID NO: 3455945 - RNA, 15 nt, Human
ucagggcuccugccu

SEQ ID NO: 3455946 - RNA, 23 nt, Human
ucagggcuccugccuucuguccu

SEQ ID NO: 3455947 - RNA, 23 nt, Human
ucagggcuccuugugggccuggg

SEQ ID NO: 3455948 - RNA, 14 nt, Human
ucaggggagaaaaa

SEQ ID NO: 3455949 - RNA, 20 nt, Human
ucaggggagucccgucagga

SEQ ID NO: 3455950 - RNA, 12 nt, Human
ucaggggccaga

SEQ ID NO: 3455951 - RNA, 16 nt, Human
ucaggggccagaggaa

SEQ ID NO: 3455952 - RNA, 20 nt, Human
ucaggggcccuggagcagcc

SEQ ID NO: 3455953 - RNA, 16 nt, Human
ucaggggcugcccgcu

SEQ ID NO: 3455954 - RNA, 16 nt, Human
ucagggggaagaagca

SEQ ID NO: 3455955 - RNA, 17 nt, Human
ucagggggaagaagcag

SEQ ID NO: 3455956 - RNA, 19 nt, Human
ucagggggaagaagcagag

SEQ ID NO: 3455957 - RNA, 22 nt, Human
ucagggggaagaagcagagaga

SEQ ID NO: 3455958 - RNA, 20 nt, Human
ucaggggucugagcuccagc

SEQ ID NO: 3455959 - RNA, 15 nt, Human
ucaggggugacacag

SEQ ID NO: 3455960 - RNA, 16 nt, Human
ucaggggugacacaga

SEQ ID NO: 3455961 - RNA, 20 nt, Human
ucaggggugacacagacuca

SEQ ID NO: 3455962 - RNA, 22 nt, Human
ucagggguucgagaccagucug

SEQ ID NO: 3455963 - RNA, 17 nt, Human
ucaggguaaauaggaau

SEQ ID NO: 3455964 - RNA, 14 nt, Human
ucaggguauugcuu

SEQ ID NO: 3455965 - RNA, 14 nt, Human
ucagggucccuggu

SEQ ID NO: 3455966 - RNA, 18 nt, Human
ucagggucucugcugccg

SEQ ID NO: 3455967 - RNA, 16 nt, Human
ucagggugaugccagg

SEQ ID NO: 3455968 - RNA, 21 nt, Human
ucaggguucuccucuccccuc

SEQ ID NO: 3455969 - RNA, 17 nt, Human
ucaggguuggccccugc

SEQ ID NO: 3455970 - RNA, 19 nt, Human
ucaggguuggccccugccc

SEQ ID NO: 3455971 - RNA, 21 nt, Human
ucagguaacaggcagauacag

SEQ ID NO: 3455972 - RNA, 22 nt, Human
ucagguaacaggcagauacagg

SEQ ID NO: 3455973 - RNA, 19 nt, Human
ucagguacagagaaggaau

SEQ ID NO: 3455974 - RNA, 16 nt, Human
ucagguaggggggaaa

SEQ ID NO: 3455975 - RNA, 23 nt, Human
ucaggucacauaaaacuuuguau

SEQ ID NO: 3455976 - RNA, 12 nt, Human
ucaggucccugc

SEQ ID NO: 3455977 - RNA, 14 nt, Human
ucaggugaaaaugu

SEQ ID NO: 3455978 - RNA, 21 nt, Human
ucaggugaaacuccagaugcc

SEQ ID NO: 3455979 - RNA, 16 nt, Human
ucaggugaaaggaaau

SEQ ID NO: 3455980 - RNA, 15 nt, Human
ucaggugacauguga

SEQ ID NO: 3455981 - RNA, 15 nt, Human
ucaggugagaagcag

SEQ ID NO: 3455982 - RNA, 21 nt, Human
ucaggugagaagcagaggaag

SEQ ID NO: 3455983 - RNA, 21 nt, Human
ucaggugcccaucccuggaag

SEQ ID NO: 3455984 - RNA, 20 nt, Human
ucaggugcugccauccaggu

SEQ ID NO: 3455985 - RNA, 16 nt, Human
ucaggugcuguccaug

SEQ ID NO: 3455986 - RNA, 11 nt, Human
ucagguggcca

SEQ ID NO: 3455987 - RNA, 15 nt, Human
ucagguggggcagcu

SEQ ID NO: 3455988 - RNA, 20 nt, Human
ucagguggggcagcuugagg

SEQ ID NO: 3455989 - RNA, 20 nt, Human
ucagguggggucacucuggc

SEQ ID NO: 3455990 - RNA, 23 nt, Human
ucagguggggucacucuggcagc

SEQ ID NO: 3455991 - RNA, 17 nt, Human
ucaggugucccugcacu

SEQ ID NO: 3455992 - RNA, 14 nt, Human
ucagguguugccaa

SEQ ID NO: 3455993 - RNA, 19 nt, Human
ucagguuaggcaguauaaa

SEQ ID NO: 3455994 - RNA, 20 nt, Human
ucagguuauuuauuuuauaa

SEQ ID NO: 3455995 - RNA, 18 nt, Human
ucagguucuuagugucac

SEQ ID NO: 3455996 - RNA, 21 nt, Human
ucagguugcugguugcugugu

SEQ ID NO: 3455997 - RNA, 17 nt, Human
ucagguuguaguaaaga

SEQ ID NO: 3455998 - RNA, 22 nt, Human
ucagguugucugaagucacugc

SEQ ID NO: 3455999 - RNA, 14 nt, Human
ucagguuguuggug

SEQ ID NO: 3456000 - RNA, 17 nt, Human
ucagguuuaacauuugc

SEQ ID NO: 3456001 - RNA, 13 nt, Human
ucagguuuggggu

SEQ ID NO: 3456002 - RNA, 19 nt, Human
ucagguuugucaucagaug

SEQ ID NO: 3456003 - RNA, 15 nt, Human
ucagguuuguuuugu

SEQ ID NO: 3456004 - RNA, 23 nt, Human
ucagguuuucuuuuaagaaucaa

SEQ ID NO: 3456005 - RNA, 14 nt, Human
ucagguuuuguaaa

SEQ ID NO: 3456006 - RNA, 14 nt, Human
ucaguaaacacugu

SEQ ID NO: 3456007 - RNA, 15 nt, Human
ucaguaacagggccu

SEQ ID NO: 3456008 - RNA, 22 nt, Human
ucaguaacccccuuaaauuuaa

SEQ ID NO: 3456009 - RNA, 23 nt, Human
ucaguaacccccuuaaauuuaau

SEQ ID NO: 3456010 - RNA, 13 nt, Human
ucaguaagacgac

SEQ ID NO: 3456011 - RNA, 18 nt, Human
ucaguaauuuagaaauca

SEQ ID NO: 3456012 - RNA, 22 nt, Human
ucaguacccaccugagcuuugg

SEQ ID NO: 3456013 - RNA, 16 nt, Human
ucaguacccucucagc

SEQ ID NO: 3456014 - RNA, 17 nt, Human
ucaguacuucagcaaga

SEQ ID NO: 3456015 - RNA, 21 nt, Human
ucaguacuucagcaagagaga

SEQ ID NO: 3456016 - RNA, 22 nt, Human
ucaguacuugugaaacacagcu

SEQ ID NO: 3456017 - RNA, 14 nt, Human
ucaguagccagcau

SEQ ID NO: 3456018 - RNA, 18 nt, Human
ucaguaggacuccuuauu

SEQ ID NO: 3456019 - RNA, 23 nt, Human
ucaguaggugcccagaauaaguu

SEQ ID NO: 3456020 - RNA, 14 nt, Human
ucaguaguuugcau

SEQ ID NO: 3456021 - RNA, 20 nt, Human
ucaguauaauucuguacuga

SEQ ID NO: 3456022 - RNA, 18 nt, Human
ucaguaucuguaucucuc

SEQ ID NO: 3456023 - RNA, 24 nt, Human
ucaguaucuguaucucucucucuu

SEQ ID NO: 3456024 - RNA, 23 nt, Human
ucaguaugcugccccugucuugc

SEQ ID NO: 3456025 - RNA, 15 nt, Human
ucaguauguugucaa

SEQ ID NO: 3456026 - RNA, 16 nt, Human
ucaguauguugucaaa

SEQ ID NO: 3456027 - RNA, 17 nt, Human
ucaguauguugucaaag

SEQ ID NO: 3456028 - RNA, 17 nt, Human
ucaguauguuuuacacu

SEQ ID NO: 3456029 - RNA, 16 nt, Human
ucaguauuaauacuaa

SEQ ID NO: 3456030 - RNA, 17 nt, Human
ucaguauuauguaguug

SEQ ID NO: 3456031 - RNA, 19 nt, Human
ucaguauugaagcauuuua

SEQ ID NO: 3456032 - RNA, 14 nt, Human
ucaguauuguuuug

SEQ ID NO: 3456033 - RNA, 15 nt, Human
ucaguauuuaacuaa

SEQ ID NO: 3456034 - RNA, 15 nt, Human
ucaguauuucagugu

SEQ ID NO: 3456035 - RNA, 20 nt, Human
ucaguauuuuggagaaauua

SEQ ID NO: 3456036 - RNA, 13 nt, Human
ucagucaaaacuu

SEQ ID NO: 3456037 - RNA, 16 nt, Human
ucagucaauauuuuua

SEQ ID NO: 3456038 - RNA, 14 nt, Human
ucagucacagccac

SEQ ID NO: 3456039 - RNA, 20 nt, Human
ucagucacuaaaaggaagac

SEQ ID NO: 3456040 - RNA, 20 nt, Human
ucagucagaaaacuuuaaaa

SEQ ID NO: 3456041 - RNA, 23 nt, Human
ucaguccaagggguccccuccag

SEQ ID NO: 3456042 - RNA, 16 nt, Human
aagaaacucaccccca

SEQ ID NO: 3456043 - RNA, 21 nt, Human
aagaaacucuauggucuuaua

SEQ ID NO: 3456044 - RNA, 16 nt, Human
aagaaacugaggaauu

SEQ ID NO: 3456045 - RNA, 19 nt, Human
aagaaacugaggaauuuuc

SEQ ID NO: 3456046 - RNA, 11 nt, Human
aagaaacuuuc

SEQ ID NO: 3456047 - RNA, 16 nt, Human
aagaaacuuuuguaaa

SEQ ID NO: 3456048 - RNA, 14 nt, Human
aagaaagaacggaa

SEQ ID NO: 3456049 - RNA, 16 nt, Human
aagaaagaacggaaga

SEQ ID NO: 3456050 - RNA, 13 nt, Human
aagaaagaaggaa

SEQ ID NO: 3456051 - RNA, 14 nt, Human
aagaaagaaggaag

SEQ ID NO: 3456052 - RNA, 16 nt, Human
aagaaagacucuauuc

SEQ ID NO: 3456053 - RNA, 22 nt, Human
aagaaagacucuauucucaaag

SEQ ID NO: 3456054 - RNA, 16 nt, Human
gcugcugauuuaaaca

SEQ ID NO: 3456055 - RNA, 12 nt, Human
gcugcugcccag

SEQ ID NO: 3456056 - RNA, 18 nt, Human
gcugcugcccauguuuca

SEQ ID NO: 3456057 - RNA, 18 nt, Human
ucccacugcacccccucc

SEQ ID NO: 3456058 - RNA, 13 nt, Human
ucccacugcccac

SEQ ID NO: 3456059 - RNA, 14 nt, Human
ucccacugccucag

SEQ ID NO: 3456060 - RNA, 20 nt, Human
ucccacugccucagguuccu

SEQ ID NO: 3456061 - RNA, 23 nt, Human
ucccacugccucagguuccuaug

SEQ ID NO: 3456062 - RNA, 13 nt, Human
ucccacuguauga

SEQ ID NO: 3456063 - RNA, 18 nt, Human
ucccacuguaugauuuau

SEQ ID NO: 3456064 - RNA, 17 nt, Human
ucccacuucccugacac

SEQ ID NO: 3456065 - RNA, 16 nt, Human
ucccacuucugccaga

SEQ ID NO: 3456066 - RNA, 21 nt, Human
ucccacuuggcaucagcuggc

SEQ ID NO: 3456067 - RNA, 14 nt, Human
ucccacuuggccaa

SEQ ID NO: 3456068 - RNA, 12 nt, Human
ucccagaaauua

SEQ ID NO: 3456069 - RNA, 17 nt, Human
ucccagaacacacucca

SEQ ID NO: 3456070 - RNA, 20 nt, Human
ucccagaagaugacugaggg

SEQ ID NO: 3456071 - RNA, 14 nt, Human
ucccagaaucccag

SEQ ID NO: 3456072 - RNA, 16 nt, Human
ucccagacuacuauuu

SEQ ID NO: 3456073 - RNA, 23 nt, Human
ucccagacuacuauuuucuuuuu

SEQ ID NO: 3456074 - RNA, 16 nt, Human
ucccagagacaggaaa

SEQ ID NO: 3456075 - RNA, 18 nt, Human
ucccagagacaggaaaau

SEQ ID NO: 3456076 - RNA, 20 nt, Human
ucccagagacaggaaaaucc

SEQ ID NO: 3456077 - RNA, 17 nt, Human
ucccagagcaggaggcc

SEQ ID NO: 3456078 - RNA, 18 nt, Human
ucccagagcaggaggccc

SEQ ID NO: 3456079 - RNA, 16 nt, Human
ucccagaggagccacc

SEQ ID NO: 3456080 - RNA, 21 nt, Human
ucccagaggagccaccaguuc

SEQ ID NO: 3456081 - RNA, 23 nt, Human
ucccagaggagccaccaguucuc

SEQ ID NO: 3456082 - RNA, 16 nt, Human
ucccagaggggccugc

SEQ ID NO: 3456083 - RNA, 14 nt, Human
ucccagagguccag

SEQ ID NO: 3456084 - RNA, 15 nt, Human
ucccagaguccucug

SEQ ID NO: 3456085 - RNA, 23 nt, Human
ucccagcacaugaaaccuuauuu

SEQ ID NO: 3456086 - RNA, 12 nt, Human
ucccagcaccug

SEQ ID NO: 3456087 - RNA, 21 nt, Human
ucccagcacuuugggaggccg

SEQ ID NO: 3456088 - RNA, 22 nt, Human
ucccagcacuuugggaggccua

SEQ ID NO: 3456089 - RNA, 22 nt, Human
ucccagcacuuugggaggcuga

SEQ ID NO: 3456090 - RNA, 13 nt, Human
ucccagcagccag

SEQ ID NO: 3456091 - RNA, 18 nt, Human
ucccagcagggccacucc

SEQ ID NO: 3456092 - RNA, 14 nt, Human
ucccagccaccccg

SEQ ID NO: 3456093 - RNA, 20 nt, Human
ucccagccaccccgggcucu

SEQ ID NO: 3456094 - RNA, 24 nt, Human
ucccagccaccccgggcucucugc

SEQ ID NO: 3456095 - RNA, 14 nt, Human
ucccagccaggccc

SEQ ID NO: 3456096 - RNA, 11 nt, Human
ucccagcccaa

SEQ ID NO: 3456097 - RNA, 17 nt, Human
ucccagcccccugacca

SEQ ID NO: 3456098 - RNA, 13 nt, Human
ucccagccccugc

SEQ ID NO: 3456099 - RNA, 19 nt, Human
ucccagccccugccccuca

SEQ ID NO: 3456100 - RNA, 15 nt, Human
ucccagcccuaugga

SEQ ID NO: 3456101 - RNA, 22 nt, Human
ucccagcccuuugggaggcuga

SEQ ID NO: 3456102 - RNA, 13 nt, Human
ucccagccggcca

SEQ ID NO: 3456103 - RNA, 19 nt, Human
ucccagccggccaauggaa

SEQ ID NO: 3456104 - RNA, 22 nt, Human
ucccagccggccaauggaaacc

SEQ ID NO: 3456105 - RNA, 23 nt, Human
ucccagccggccaauggaaaccu

SEQ ID NO: 3456106 - RNA, 10 nt, Human
ucccagccug

SEQ ID NO: 3456107 - RNA, 18 nt, Human
ucccagcggcuggugcag

SEQ ID NO: 3456108 - RNA, 23 nt, Human
ucccagcggcuggugcagggccu

SEQ ID NO: 3456109 - RNA, 16 nt, Human
ucccagcuacaccuuu

SEQ ID NO: 3456110 - RNA, 22 nt, Human
ucccagcuacucaagaggcuga

SEQ ID NO: 3456111 - RNA, 23 nt, Human
ucccagcuacucagaagccugag

SEQ ID NO: 3456112 - RNA, 22 nt, Human
ucccagcuacucgggaggcuga

SEQ ID NO: 3456113 - RNA, 16 nt, Human
ucccagcuacuuggga

SEQ ID NO: 3456114 - RNA, 23 nt, Human
ucccagcuaggaagagcaggacu

SEQ ID NO: 3456115 - RNA, 16 nt, Human
ucccagcucacgucac

SEQ ID NO: 3456116 - RNA, 19 nt, Human
ucccagcucucccucuggc

SEQ ID NO: 3456117 - RNA, 21 nt, Human
ucccagcucucccucuggccc

SEQ ID NO: 3456118 - RNA, 24 nt, Human
ucccagcugacaguccucuccacc

SEQ ID NO: 3456119 - RNA, 22 nt, Human
ucccagcugugcucuggacagg

SEQ ID NO: 3456120 - RNA, 19 nt, Human
ucccagcuucggcauuuga

SEQ ID NO: 3456121 - RNA, 19 nt, Human
ucccagcuuguaggagcug

SEQ ID NO: 3456122 - RNA, 16 nt, Human
ucccaggaagcccagg

SEQ ID NO: 3456123 - RNA, 11 nt, Human
ucccaggacac

SEQ ID NO: 3456124 - RNA, 18 nt, Human
ucccaggacaccacaccc

SEQ ID NO: 3456125 - RNA, 17 nt, Human
ucccaggaccacaggcu

SEQ ID NO: 3456126 - RNA, 15 nt, Human
ucccaggagacaguu

SEQ ID NO: 3456127 - RNA, 16 nt, Human
ucccaggagacaguuc

SEQ ID NO: 3456128 - RNA, 17 nt, Human
ucccaggagcugcccag

SEQ ID NO: 3456129 - RNA, 18 nt, Human
ucccaggagcugcccaga

SEQ ID NO: 3456130 - RNA, 23 nt, Human
ucccaggagcugcccagaguugc

SEQ ID NO: 3456131 - RNA, 15 nt, Human
ucccaggcaaauaaa

SEQ ID NO: 3456132 - RNA, 20 nt, Human
ucccaggcaaauaaaauucc

SEQ ID NO: 3456133 - RNA, 13 nt, Human
ucccaggcaaggc

SEQ ID NO: 3456134 - RNA, 15 nt, Human
ucccaggcaaggcug

SEQ ID NO: 3456135 - RNA, 16 nt, Human
ucccaggcaaggcugu

SEQ ID NO: 3456136 - RNA, 18 nt, Human
ucccaggcacuguacuaa

SEQ ID NO: 3456137 - RNA, 23 nt, Human
ucccaggcauuccccaggaggcc

SEQ ID NO: 3456138 - RNA, 21 nt, Human
ucccaggccaggcuccuuccu

SEQ ID NO: 3456139 - RNA, 20 nt, Human
ucccaggcccacugugccuc

SEQ ID NO: 3456140 - RNA, 21 nt, Human
ucccaggccccuggaggcugc

SEQ ID NO: 3456141 - RNA, 22 nt, Human
ucccaggccccuggaggcugcc

SEQ ID NO: 3456142 - RNA, 15 nt, Human
ucccaggcugagccu

SEQ ID NO: 3456143 - RNA, 16 nt, Human
ucccagggacaccugg

SEQ ID NO: 3456144 - RNA, 16 nt, Human
ucccagggagcaaggg

SEQ ID NO: 3456145 - RNA, 21 nt, Human
ucccagggccagggcccugca

SEQ ID NO: 3456146 - RNA, 18 nt, Human
ucccaggggucucccugg

SEQ ID NO: 3456147 - RNA, 18 nt, Human
ucccaggguagcccgccu

SEQ ID NO: 3456148 - RNA, 21 nt, Human
ucccaggguagcccgccugcc

SEQ ID NO: 3456149 - RNA, 19 nt, Human
ucccagguaagcaggagga

SEQ ID NO: 3456150 - RNA, 17 nt, Human
ucccagguaccagcugc

SEQ ID NO: 3456151 - RNA, 18 nt, Human
ucccagguaccagcugcg

SEQ ID NO: 3456152 - RNA, 21 nt, Human
ucccagguaccagcugcgcuu

SEQ ID NO: 3456153 - RNA, 21 nt, Human
ucccagguagcugggauuaca

SEQ ID NO: 3456154 - RNA, 22 nt, Human
ucccagguguuaacauuccaag

SEQ ID NO: 3456155 - RNA, 15 nt, Human
ucccagguuggcucu

SEQ ID NO: 3456156 - RNA, 20 nt, Human
ucccagguuggcucugccag

SEQ ID NO: 3456157 - RNA, 23 nt, Human
ucccaguaccuccugucucuggc

SEQ ID NO: 3456158 - RNA, 23 nt, Human
ucccaguccaccugaggaacugu

SEQ ID NO: 3456159 - RNA, 17 nt, Human
ucccagucuacccagag

SEQ ID NO: 3456160 - RNA, 18 nt, Human
ucccagucuacccagaga

SEQ ID NO: 3456161 - RNA, 22 nt, Human
ucccagucuacccagagaagcc

SEQ ID NO: 3456162 - RNA, 22 nt, Human
ucccagugacacuucagagagc

SEQ ID NO: 3456163 - RNA, 19 nt, Human
ucccagugagucucugggg

SEQ ID NO: 3456164 - RNA, 19 nt, Human
ucccagugccgagaaggaa

SEQ ID NO: 3456165 - RNA, 22 nt, Human
ucccagugccgagaaggaagcc

SEQ ID NO: 3456166 - RNA, 14 nt, Human
ucccaguggccuca

SEQ ID NO: 3456167 - RNA, 19 nt, Human
ucccaguggccucaacccu

SEQ ID NO: 3456168 - RNA, 21 nt, Human
ucccaguggcugcugcccagg

SEQ ID NO: 3456169 - RNA, 10 nt, Human
ucccaguggg

SEQ ID NO: 3456170 - RNA, 20 nt, Human
ucccagugggaggggcaggc

SEQ ID NO: 3456171 - RNA, 22 nt, Human
ucccagugggaggggcaggcug

SEQ ID NO: 3456172 - RNA, 15 nt, Human
ucccaguucaggagu

SEQ ID NO: 3456173 - RNA, 17 nt, Human
ucccaguucucuaggga

SEQ ID NO: 3456174 - RNA, 21 nt, Human
ucccaguuggagcuccagccu

SEQ ID NO: 3456175 - RNA, 15 nt, Human
ucccauaagcuauag

SEQ ID NO: 3456176 - RNA, 17 nt, Human
ucccauagccaggaaac

SEQ ID NO: 3456177 - RNA, 14 nt, Human
ucccaucacuggag

SEQ ID NO: 3456178 - RNA, 22 nt, Human
ucccaucacuggagcaccaggc

SEQ ID NO: 3456179 - RNA, 13 nt, Human
ucccauccaggca

SEQ ID NO: 3456180 - RNA, 15 nt, Human
ucccauccaggcagu

SEQ ID NO: 3456181 - RNA, 13 nt, Human
ucccauccagggc

SEQ ID NO: 3456182 - RNA, 14 nt, Human
ucccaucccauccc

SEQ ID NO: 3456183 - RNA, 16 nt, Human
ucccaucccaucccau

SEQ ID NO: 3456184 - RNA, 20 nt, Human
ucccaucccaucccauccca

SEQ ID NO: 3456185 - RNA, 13 nt, Human
ucccaucccccug

SEQ ID NO: 3456186 - RNA, 20 nt, Human
ucccauccuacccucgggcc

SEQ ID NO: 3456187 - RNA, 14 nt, Human
ucccauccugugug

SEQ ID NO: 3456188 - RNA, 22 nt, Human
ucccaucgucucggccuucaca

SEQ ID NO: 3456189 - RNA, 19 nt, Human
ucccaucuaagcugcagcu

SEQ ID NO: 3456190 - RNA, 22 nt, Human
ucccaucuaagcugcagcuucc

SEQ ID NO: 3456191 - RNA, 13 nt, Human
ucccaucucacac

SEQ ID NO: 3456192 - RNA, 14 nt, Human
ucccaucucacaca

SEQ ID NO: 3456193 - RNA, 16 nt, Human
ucccaucuccacuguu

SEQ ID NO: 3456194 - RNA, 13 nt, Human
ucccaucugggag

SEQ ID NO: 3456195 - RNA, 17 nt, Human
ucccaucugggaguccc

SEQ ID NO: 3456196 - RNA, 17 nt, Human
ucccaugaacacacugu

SEQ ID NO: 3456197 - RNA, 18 nt, Human
uccaaugagcuuucugaa

SEQ ID NO: 3456198 - RNA, 19 nt, Human
uccaaugagcuuucugaac

SEQ ID NO: 3456199 - RNA, 21 nt, Human
uccaaugagcuuucugaacag

SEQ ID NO: 3456200 - RNA, 17 nt, Human
uccaaugccucuugucu

SEQ ID NO: 3456201 - RNA, 18 nt, Human
uccaaugucuggagacca

SEQ ID NO: 3456202 - RNA, 20 nt, Human
uccaauguuagagacuuuuu

SEQ ID NO: 3456203 - RNA, 17 nt, Human
uccaauuaaggauuuua

SEQ ID NO: 3456204 - RNA, 20 nt, Human
uccaauuagcuuauguuaac

SEQ ID NO: 3456205 - RNA, 15 nt, Human
uccaauuaguuuccu

SEQ ID NO: 3456206 - RNA, 21 nt, Human
uccaauuguugacaguucuga

SEQ ID NO: 3456207 - RNA, 22 nt, Human
uccaauuguugacaguucugaa

SEQ ID NO: 3456208 - RNA, 18 nt, Human
uccaauuuaguuguugua

SEQ ID NO: 3456209 - RNA, 22 nt, Human
uccaauuuguaaaaacagcauu

SEQ ID NO: 3456210 - RNA, 15 nt, Human
uccaauuuuaauuua

SEQ ID NO: 3456211 - RNA, 13 nt, Human
uccaauuuuccuu

SEQ ID NO: 3456212 - RNA, 12 nt, Human
uccacaaaauaa

SEQ ID NO: 3456213 - RNA, 20 nt, Human
uccacaaagaaaauuccuau

SEQ ID NO: 3456214 - RNA, 21 nt, Human
uccacaaagaaaauuccuaua

SEQ ID NO: 3456215 - RNA, 20 nt, Human
uccacaaauuauuaaugaaa

SEQ ID NO: 3456216 - RNA, 22 nt, Human
uccacaaccucuuccccccaaa

SEQ ID NO: 3456217 - RNA, 17 nt, Human
uccacaagagcccaggc

SEQ ID NO: 3456218 - RNA, 18 nt, Human
uccacaagagcccaggcc

SEQ ID NO: 3456219 - RNA, 18 nt, Human
uccacaagauucccagag

SEQ ID NO: 3456220 - RNA, 20 nt, Human
uccacaagauucccagagac

SEQ ID NO: 3456221 - RNA, 21 nt, Human
uccacaagauucccagagaca

SEQ ID NO: 3456222 - RNA, 23 nt, Human
uccacaagauucccagagacagg

SEQ ID NO: 3456223 - RNA, 23 nt, Human
uccacacaagggaaggacagaaa

SEQ ID NO: 3456224 - RNA, 14 nt, Human
uccacacacagagg

SEQ ID NO: 3456225 - RNA, 21 nt, Human
uccacacacagcugggcugug

SEQ ID NO: 3456226 - RNA, 19 nt, Human
uccacacacgcaggaacuc

SEQ ID NO: 3456227 - RNA, 18 nt, Human
uccacacccaauuccacu

SEQ ID NO: 3456228 - RNA, 22 nt, Human
uccacacccaggcauagccugg

SEQ ID NO: 3456229 - RNA, 12 nt, Human
uccacaccccca

SEQ ID NO: 3456230 - RNA, 15 nt, Human
uccacacccccaccc

SEQ ID NO: 3456231 - RNA, 13 nt, Human
uccacaccugcgg

SEQ ID NO: 3456232 - RNA, 15 nt, Human
uccacaccugcggcc

SEQ ID NO: 3456233 - RNA, 21 nt, Human
uccacaccuuuuauugacaca

SEQ ID NO: 3456234 - RNA, 13 nt, Human
uccacacugcaca

SEQ ID NO: 3456235 - RNA, 19 nt, Human
uccacagaagcuccaggua

SEQ ID NO: 3456236 - RNA, 15 nt, Human
uccacagaggacaca

SEQ ID NO: 3456237 - RNA, 17 nt, Human
uccacagaggacacaga

SEQ ID NO: 3456238 - RNA, 17 nt, Human
uccacagcaaccccagg

SEQ ID NO: 3456239 - RNA, 19 nt, Human
uccacagcaaccccaggcu

SEQ ID NO: 3456240 - RNA, 17 nt, Human
uccacagccgcagccuc

SEQ ID NO: 3456241 - RNA, 18 nt, Human
uccacagccgcagccucc

SEQ ID NO: 3456242 - RNA, 18 nt, Human
uccacagccugcaaguca

SEQ ID NO: 3456243 - RNA, 17 nt, Human
uccacagcgagggcagc

SEQ ID NO: 3456244 - RNA, 18 nt, Human
uccacagcgagggcagcu

SEQ ID NO: 3456245 - RNA, 20 nt, Human
uccacagcgagggcagcugc

SEQ ID NO: 3456246 - RNA, 15 nt, Human
uccacagcuuccugu

SEQ ID NO: 3456247 - RNA, 17 nt, Human
uccacagggucccacag

SEQ ID NO: 3456248 - RNA, 14 nt, Human
uccacagugacucc

SEQ ID NO: 3456249 - RNA, 16 nt, Human
uccacaguggaaccag

SEQ ID NO: 3456250 - RNA, 15 nt, Human
uccacaguucagugg

SEQ ID NO: 3456251 - RNA, 16 nt, Human
uccacaguucaguggc

SEQ ID NO: 3456252 - RNA, 22 nt, Human
uccacaguucgaccugcggcug

SEQ ID NO: 3456253 - RNA, 14 nt, Human
uccacaguugccac

SEQ ID NO: 3456254 - RNA, 22 nt, Human
gcugguucaggguuggccccug

SEQ ID NO: 3456255 - RNA, 16 nt, Human
gcugguuggagagcua

SEQ ID NO: 3456256 - RNA, 24 nt, Human
gcugguugucauuuuugcaguaga

SEQ ID NO: 3456257 - RNA, 21 nt, Human
gcugguuuuggcaucucuguc

SEQ ID NO: 3456258 - RNA, 20 nt, Human
gcugguuuuguaagaugcug

SEQ ID NO: 3456259 - RNA, 14 nt, Human
gcugguuuuucagu

SEQ ID NO: 3456260 - RNA, 20 nt, Human
gcuguaaaagcaaguccugc

SEQ ID NO: 3456261 - RNA, 14 nt, Human
gcuguaaauaaaug

SEQ ID NO: 3456262 - RNA, 15 nt, Human
gcuguaaauaaaugc

SEQ ID NO: 3456263 - RNA, 18 nt, Human
gcuguaaauuuggcuucu

SEQ ID NO: 3456264 - RNA, 16 nt, Human
gcuguaaggcucuaga

SEQ ID NO: 3456265 - RNA, 23 nt, Human
gcuguaaggcucuagaucauaag

SEQ ID NO: 3456266 - RNA, 15 nt, Human
gcuguacauacuuuu

SEQ ID NO: 3456267 - RNA, 16 nt, Human
gcuguacauacuuuuu

SEQ ID NO: 3456268 - RNA, 22 nt, Human
gcuguacauacuuuuuggguuu

SEQ ID NO: 3456269 - RNA, 22 nt, Human
gcuguacaucuauuuuggauug

SEQ ID NO: 3456270 - RNA, 20 nt, Human
gcuguacugaaguaaaacaa

SEQ ID NO: 3456271 - RNA, 18 nt, Human
gcuguacuucuugaauau

SEQ ID NO: 3456272 - RNA, 20 nt, Human
gcuguagacauuugcuauga

SEQ ID NO: 3456273 - RNA, 20 nt, Human
gcuguaguagcccuuucugu

SEQ ID NO: 3456274 - RNA, 21 nt, Human
gcuguaguagcccuuucugug

SEQ ID NO: 3456275 - RNA, 23 nt, Human
gcuguaguaggcauuuuuaccau

SEQ ID NO: 3456276 - RNA, 14 nt, Human
gcuguauaaaauca

SEQ ID NO: 3456277 - RNA, 20 nt, Human
gcuguaucccaugagccuca

SEQ ID NO: 3456278 - RNA, 19 nt, Human
gcuguauuagucacagaga

SEQ ID NO: 3456279 - RNA, 18 nt, Human
gcuguauugaaucaugua

SEQ ID NO: 3456280 - RNA, 12 nt, Human
gcuguauugucu

SEQ ID NO: 3456281 - RNA, 21 nt, Human
gcugucaagccauuuuuacau

SEQ ID NO: 3456282 - RNA, 14 nt, Human
gcugucaaggcuca

SEQ ID NO: 3456283 - RNA, 17 nt, Human
gcugucaccaaggaaac

SEQ ID NO: 3456284 - RNA, 13 nt, Human
gcugucaccucuc

SEQ ID NO: 3456285 - RNA, 21 nt, Human
gcugucaccucucccacggga

SEQ ID NO: 3456286 - RNA, 18 nt, Human
gcugucaggauugcgaga

SEQ ID NO: 3456287 - RNA, 15 nt, Human
gcugucaguguuugg

SEQ ID NO: 3456288 - RNA, 14 nt, Human
gcugucaucugugc

SEQ ID NO: 3456289 - RNA, 22 nt, Human
gcugucaucugugcacugccca

SEQ ID NO: 3456290 - RNA, 13 nt, Human
gcuguccagacag

SEQ ID NO: 3456291 - RNA, 14 nt, Human
gcuguccagacagc

SEQ ID NO: 3456292 - RNA, 22 nt, Human
gcuguccagacagccuguaucu

SEQ ID NO: 3456293 - RNA, 15 nt, Human
gcuguccagugccca

SEQ ID NO: 3456294 - RNA, 23 nt, Human
gcuguccagugcccauuccucac

SEQ ID NO: 3456295 - RNA, 16 nt, Human
gcuguccaugcuucuc

SEQ ID NO: 3456296 - RNA, 12 nt, Human
gcuguccccucu

SEQ ID NO: 3456297 - RNA, 16 nt, Human
gcuguccccucuugcc

SEQ ID NO: 3456298 - RNA, 23 nt, Human
gcuguccccuuggcagguccugg

SEQ ID NO: 3456299 - RNA, 18 nt, Human
gcugucccugucaccaag

SEQ ID NO: 3456300 - RNA, 23 nt, Human
gcugucccuuacgugaguccugg

SEQ ID NO: 3456301 - RNA, 20 nt, Human
gcugucccuuggaacucuug

SEQ ID NO: 3456302 - RNA, 13 nt, Human
gcuguccuaggcc

SEQ ID NO: 3456303 - RNA, 18 nt, Human
gcuguccucagguggcca

SEQ ID NO: 3456304 - RNA, 16 nt, Human
gcuguccuggaggggc

SEQ ID NO: 3456305 - RNA, 23 nt, Human
gcuguccuggaggggcuggggac

SEQ ID NO: 3456306 - RNA, 14 nt, Human
gcuguccuuuuucc

SEQ ID NO: 3456307 - RNA, 15 nt, Human
gcugucggcgcugcc

SEQ ID NO: 3456308 - RNA, 22 nt, Human
gcugucuccagacccccacccc

SEQ ID NO: 3456309 - RNA, 12 nt, Human
gcugucucugcu

SEQ ID NO: 3456310 - RNA, 13 nt, Human
gcugucucugcuc

SEQ ID NO: 3456311 - RNA, 12 nt, Human
gcugucugcagc

SEQ ID NO: 3456312 - RNA, 20 nt, Human
gcugucugggugcuacuggg

SEQ ID NO: 3456313 - RNA, 22 nt, Human
gcugucugggugcuacugggga

SEQ ID NO: 3456314 - RNA, 21 nt, Human
gcugucuuuucuuugccaucu

SEQ ID NO: 3456315 - RNA, 22 nt, Human
gcugucuuuucuuugccaucuc

SEQ ID NO: 3456316 - RNA, 13 nt, Human
gcugugaacaggc

SEQ ID NO: 3456317 - RNA, 23 nt, Human
gcugugaacccuggggccugacu

SEQ ID NO: 3456318 - RNA, 12 nt, Human
gcugugaccugc

SEQ ID NO: 3456319 - RNA, 19 nt, Human
gcugugaccugcugagcuc

SEQ ID NO: 3456320 - RNA, 17 nt, Human
gcugugacuucuccagg

SEQ ID NO: 3456321 - RNA, 12 nt, Human
gcugugagcccc

SEQ ID NO: 3456322 - RNA, 16 nt, Human
gcugugaggccccugg

SEQ ID NO: 3456323 - RNA, 13 nt, Human
gcugugagggagg

SEQ ID NO: 3456324 - RNA, 20 nt, Human
gcugugagucuuugguucua

SEQ ID NO: 3456325 - RNA, 18 nt, Human
gcugugaguucucccugu

SEQ ID NO: 3456326 - RNA, 22 nt, Human
gcugugauuuuuguugauuaaa

SEQ ID NO: 3456327 - RNA, 19 nt, Human
gcugugcaacgccgugggc

SEQ ID NO: 3456328 - RNA, 23 nt, Human
gcugugcaacgccgugggcugcg

SEQ ID NO: 3456329 - RNA, 21 nt, Human
gcugugcacccagaagaagau

SEQ ID NO: 3456330 - RNA, 14 nt, Human
gcugugccacaggc

SEQ ID NO: 3456331 - RNA, 13 nt, Human
gcugugccacccu

SEQ ID NO: 3456332 - RNA, 17 nt, Human
gcugugccacccugggc

SEQ ID NO: 3456333 - RNA, 21 nt, Human
gcugugccacccugggcucug

SEQ ID NO: 3456334 - RNA, 14 nt, Human
gcugugccucugcc

SEQ ID NO: 3456335 - RNA, 15 nt, Human
gcugugccucugccu

SEQ ID NO: 3456336 - RNA, 16 nt, Human
gcugugccucugccug

SEQ ID NO: 3456337 - RNA, 14 nt, Human
gcugugcucagaga

SEQ ID NO: 3456338 - RNA, 16 nt, Human
gcugugcucuggacag

SEQ ID NO: 3456339 - RNA, 13 nt, Human
gcugugcugcccu

SEQ ID NO: 3456340 - RNA, 14 nt, Human
gcugugcugcccug

SEQ ID NO: 3456341 - RNA, 22 nt, Human
gcuuaggaugugugcaugugug

SEQ ID NO: 3456342 - RNA, 12 nt, Human
gcuuaggauguu

SEQ ID NO: 3456343 - RNA, 12 nt, Human
gcuuagggcccu

SEQ ID NO: 3456344 - RNA, 15 nt, Human
gcuuagggcccugga

SEQ ID NO: 3456345 - RNA, 16 nt, Human
gcuuagggcccuggag

SEQ ID NO: 3456346 - RNA, 15 nt, Human
gcuuaguaaaauuua

SEQ ID NO: 3456347 - RNA, 23 nt, Human
gcuuaguaucucaucaacaaaga

SEQ ID NO: 3456348 - RNA, 15 nt, Human
gcuuagucacugccu

SEQ ID NO: 3456349 - RNA, 16 nt, Human
gcuuaguuuguguguu

SEQ ID NO: 3456350 - RNA, 20 nt, Human
gcuuaguuuguguguugucu

SEQ ID NO: 3456351 - RNA, 21 nt, Human
gcuuaguuuguguguugucuc

SEQ ID NO: 3456352 - RNA, 18 nt, Human
gcuuauaaccuaguuaaa

SEQ ID NO: 3456353 - RNA, 17 nt, Human
gcuuauaauaaaggacu

SEQ ID NO: 3456354 - RNA, 16 nt, Human
gcuuauaauucuuuca

SEQ ID NO: 3456355 - RNA, 12 nt, Human
gcuuauacacuu

SEQ ID NO: 3456356 - RNA, 20 nt, Human
gcuuauacacuuacacuuua

SEQ ID NO: 3456357 - RNA, 18 nt, Human
gcuuauacgaaauaauug

SEQ ID NO: 3456358 - RNA, 15 nt, Human
gcuuauagguggccu

SEQ ID NO: 3456359 - RNA, 13 nt, Human
gcuuauauucaac

SEQ ID NO: 3456360 - RNA, 23 nt, Human
gcuuauauucaaccauggacuuu

SEQ ID NO: 3456361 - RNA, 15 nt, Human
gcuuauauuugugua

SEQ ID NO: 3456362 - RNA, 17 nt, Human
gcuuaucaauaaaccug

SEQ ID NO: 3456363 - RNA, 13 nt, Human
gcuuaucaauuug

SEQ ID NO: 3456364 - RNA, 15 nt, Human
gcuuaucucuuuuau

SEQ ID NO: 3456365 - RNA, 17 nt, Human
gcuuaugaauauauuua

SEQ ID NO: 3456366 - RNA, 16 nt, Human
gcuuaugaauauuuau

SEQ ID NO: 3456367 - RNA, 22 nt, Human
gcuuaugacaucacuuguacaa

SEQ ID NO: 3456368 - RNA, 15 nt, Human
gcuuaugcucuuaau

SEQ ID NO: 3456369 - RNA, 18 nt, Human
gcuuaugcuuaaauucaa

SEQ ID NO: 3456370 - RNA, 15 nt, Human
gcuuaugguaccaga

SEQ ID NO: 3456371 - RNA, 16 nt, Human
gcuuaugguaccagau

SEQ ID NO: 3456372 - RNA, 12 nt, Human
gcuuauguuaac

SEQ ID NO: 3456373 - RNA, 15 nt, Human
gcuuauuacauuuua

SEQ ID NO: 3456374 - RNA, 20 nt, Human
gcuuauucaucuguuuuucu

SEQ ID NO: 3456375 - RNA, 19 nt, Human
gcuuauuccaugacugcuu

SEQ ID NO: 3456376 - RNA, 17 nt, Human
gcuuauugcuuaguaaa

SEQ ID NO: 3456377 - RNA, 14 nt, Human
gcuuauuguuccaa

SEQ ID NO: 3456378 - RNA, 15 nt, Human
gcuuauuguuccaag

SEQ ID NO: 3456379 - RNA, 16 nt, Human
gcuuauuguuucucug

SEQ ID NO: 3456380 - RNA, 14 nt, Human
gcuuauuuaauaaa

SEQ ID NO: 3456381 - RNA, 15 nt, Human
gcuuauuuauuguau

SEQ ID NO: 3456382 - RNA, 17 nt, Human
gcuuauuuauuguauuc

SEQ ID NO: 3456383 - RNA, 12 nt, Human
gcuuauuuuaaa

SEQ ID NO: 3456384 - RNA, 15 nt, Human
gcuuauuuuaaugug

SEQ ID NO: 3456385 - RNA, 22 nt, Human
gcuuauuuuaaugugaugaugu

SEQ ID NO: 3456386 - RNA, 18 nt, Human
gcuucaaggauccugagc

SEQ ID NO: 3456387 - RNA, 16 nt, Human
gcuucaauaaaucuuu

SEQ ID NO: 3456388 - RNA, 19 nt, Human
gcuucaauaguucaaggaa

SEQ ID NO: 3456389 - RNA, 15 nt, Human
gcuucaauuaauaaa

SEQ ID NO: 3456390 - RNA, 15 nt, Human
gcuucaccagagcau

SEQ ID NO: 3456391 - RNA, 19 nt, Human
gcuucaccccaaucccagc

SEQ ID NO: 3456392 - RNA, 19 nt, Human
gcuucacggaagagccuug

SEQ ID NO: 3456393 - RNA, 16 nt, Human
gcuucacuccugcugu

SEQ ID NO: 3456394 - RNA, 17 nt, Human
gcuucacuguauaaaua

SEQ ID NO: 3456395 - RNA, 12 nt, Human
gcuucacuucug

SEQ ID NO: 3456396 - RNA, 18 nt, Human
gcuucagauguggagcca

SEQ ID NO: 3456397 - RNA, 17 nt, Human
gcuucagcauauuuaua

SEQ ID NO: 3456398 - RNA, 15 nt, Human
gcuucagccaggagc

SEQ ID NO: 3456399 - RNA, 19 nt, Human
gcuucagccaggagcuggg

SEQ ID NO: 3456400 - RNA, 12 nt, Human
gcuucagccucc

SEQ ID NO: 3456401 - RNA, 14 nt, Human
gcuucagccuccca

SEQ ID NO: 3456402 - RNA, 14 nt, Human
gcuucagccugagg

SEQ ID NO: 3456403 - RNA, 20 nt, Human
gcuucagccugaggcugaga

SEQ ID NO: 3456404 - RNA, 12 nt, Human
gcuucagcucca

SEQ ID NO: 3456405 - RNA, 13 nt, Human
gcuucagcuccag

SEQ ID NO: 3456406 - RNA, 15 nt, Human
gcuucagcugccagu

SEQ ID NO: 3456407 - RNA, 20 nt, Human
gcuucagguuaucgaaauaa

SEQ ID NO: 3456408 - RNA, 15 nt, Human
gcuucaguggcagcu

SEQ ID NO: 3456409 - RNA, 23 nt, Human
gcuucauacuucaugaaauccug

SEQ ID NO: 3456410 - RNA, 17 nt, Human
gcuucaucauucccucu

SEQ ID NO: 3456411 - RNA, 13 nt, Human
gcuucaucuguca

SEQ ID NO: 3456412 - RNA, 20 nt, Human
gcuucaugaaaauccuacca

SEQ ID NO: 3456413 - RNA, 14 nt, Human
gcuucaugccagcu

SEQ ID NO: 3456414 - RNA, 17 nt, Human
gcuucaugugucccaga

SEQ ID NO: 3456415 - RNA, 22 nt, Human
gcuucauucaagucagcucuuc

SEQ ID NO: 3456416 - RNA, 22 nt, Human
gcuucauucaauauugacauuu

SEQ ID NO: 3456417 - RNA, 17 nt, Human
gcuucauucuuugcagg

SEQ ID NO: 3456418 - RNA, 16 nt, Human
gcuucauuuccugugu

SEQ ID NO: 3456419 - RNA, 15 nt, Human
ucccuucccuccucc

SEQ ID NO: 3456420 - RNA, 20 nt, Human
ucccuuccgacccucuggga

SEQ ID NO: 3456421 - RNA, 22 nt, Human
ucccuuccgacccucugggaac

SEQ ID NO: 3456422 - RNA, 13 nt, Human
ucccuuccuccau

SEQ ID NO: 3456423 - RNA, 17 nt, Human
ucccuuccucuucggcc

SEQ ID NO: 3456424 - RNA, 16 nt, Human
ucccuuccucuuucca

SEQ ID NO: 3456425 - RNA, 17 nt, Human
ucccuuccuuuucccug

SEQ ID NO: 3456426 - RNA, 20 nt, Human
ucccuucgguggaagagcuc

SEQ ID NO: 3456427 - RNA, 15 nt, Human
ucccuucuaccugcc

SEQ ID NO: 3456428 - RNA, 19 nt, Human
ucccuucuacugcuucuac

SEQ ID NO: 3456429 - RNA, 21 nt, Human
ucccuucuccaucucucuggc

SEQ ID NO: 3456430 - RNA, 22 nt, Human
ucccuucuccaucucucuggcc

SEQ ID NO: 3456431 - RNA, 14 nt, Human
ucccuucucccugg

SEQ ID NO: 3456432 - RNA, 15 nt, Human
ucccuucucccugga

SEQ ID NO: 3456433 - RNA, 20 nt, Human
ucccuucuccuugauaacag

SEQ ID NO: 3456434 - RNA, 16 nt, Human
ucccuucucuuccagg

SEQ ID NO: 3456435 - RNA, 20 nt, Human
ucccuucucuuccaggcagc

SEQ ID NO: 3456436 - RNA, 16 nt, Human
ucccuucugucccuca

SEQ ID NO: 3456437 - RNA, 22 nt, Human
ucccuucugucccucacagcac

SEQ ID NO: 3456438 - RNA, 16 nt, Human
ucccuucuugcauccu

SEQ ID NO: 3456439 - RNA, 14 nt, Human
ucccuugaccuuaa

SEQ ID NO: 3456440 - RNA, 13 nt, Human
ucccuugagaccu

SEQ ID NO: 3456441 - RNA, 18 nt, Human
ucccuugagaccucagcc

SEQ ID NO: 3456442 - RNA, 19 nt, Human
ucccuugagaccucagcca

SEQ ID NO: 3456443 - RNA, 14 nt, Human
ucccuugagcccuc

SEQ ID NO: 3456444 - RNA, 15 nt, Human
ucccuugagggcugc

SEQ ID NO: 3456445 - RNA, 16 nt, Human
ucccuugaugaagaag

SEQ ID NO: 3456446 - RNA, 18 nt, Human
ucccuugccccccuggcc

SEQ ID NO: 3456447 - RNA, 12 nt, Human
ucccuugccuca

SEQ ID NO: 3456448 - RNA, 21 nt, Human
ucccuugccuuucgaggccug

SEQ ID NO: 3456449 - RNA, 16 nt, Human
ucccuugcuggcccca

SEQ ID NO: 3456450 - RNA, 21 nt, Human
ucccuugcuggccccagcccu

SEQ ID NO: 3456451 - RNA, 18 nt, Human
ucccuugcuuuucccucu

SEQ ID NO: 3456452 - RNA, 19 nt, Human
ucccuugcuuuucccucuu

SEQ ID NO: 3456453 - RNA, 20 nt, Human
ucccuuggaaaccugcccug

SEQ ID NO: 3456454 - RNA, 16 nt, Human
ucccuuggacauuuua

SEQ ID NO: 3456455 - RNA, 13 nt, Human
ucccuugggcucu

SEQ ID NO: 3456456 - RNA, 14 nt, Human
ucccuugggcucug

SEQ ID NO: 3456457 - RNA, 16 nt, Human
ucccuugggcucugau

SEQ ID NO: 3456458 - RNA, 21 nt, Human
ucccuugggcucugaugaaaa

SEQ ID NO: 3456459 - RNA, 19 nt, Human
ucccuugguggcaagagcc

SEQ ID NO: 3456460 - RNA, 15 nt, Human
ucccuuguagcuccu

SEQ ID NO: 3456461 - RNA, 16 nt, Human
ucccuuguauccccug

SEQ ID NO: 3456462 - RNA, 21 nt, Human
ucccuuguauccccugcaggc

SEQ ID NO: 3456463 - RNA, 13 nt, Human
ucccuugugugug

SEQ ID NO: 3456464 - RNA, 20 nt, Human
ucccuuuagcacguuuaaag

SEQ ID NO: 3456465 - RNA, 17 nt, Human
ucccuuuagcuguguua

SEQ ID NO: 3456466 - RNA, 21 nt, Human
ucccuuucacaaaauuuuauu

SEQ ID NO: 3456467 - RNA, 15 nt, Human
ucccuuucccuuggu

SEQ ID NO: 3456468 - RNA, 18 nt, Human
ucccuuuccuuccauccc

SEQ ID NO: 3456469 - RNA, 23 nt, Human
ucccuuuccuuccaucccuaccc

SEQ ID NO: 3456470 - RNA, 14 nt, Human
ucccuuucuccccu

SEQ ID NO: 3456471 - RNA, 16 nt, Human
ucccuuucuccccugc

SEQ ID NO: 3456472 - RNA, 21 nt, Human
ucccuuucuuggccaguuauc

SEQ ID NO: 3456473 - RNA, 16 nt, Human
ucccuuugacgccauc

SEQ ID NO: 3456474 - RNA, 11 nt, Human
ucccuuugcuc

SEQ ID NO: 3456475 - RNA, 16 nt, Human
ucccuuugcuccaccc

SEQ ID NO: 3456476 - RNA, 19 nt, Human
ucccuuugcuccaccccac

SEQ ID NO: 3456477 - RNA, 14 nt, Human
ucccuuugucuuuc

SEQ ID NO: 3456478 - RNA, 16 nt, Human
ucccuuugucuuucaa

SEQ ID NO: 3456479 - RNA, 18 nt, Human
ucccuuuuaauccuggcu

SEQ ID NO: 3456480 - RNA, 14 nt, Human
ucccuuuuccauga

SEQ ID NO: 3456481 - RNA, 14 nt, Human
ucccuuuucuguuc

SEQ ID NO: 3456482 - RNA, 20 nt, Human
ucccuuuuuauaucccauuu

SEQ ID NO: 3456483 - RNA, 16 nt, Human
ucccuuuuuccuuguc

SEQ ID NO: 3456484 - RNA, 20 nt, Human
ucccuuuuuuggcugcugaa

SEQ ID NO: 3456485 - RNA, 21 nt, Human
ucccuuuuuuuaaguaaggaa

SEQ ID NO: 3456486 - RNA, 22 nt, Human
uccgaaaaauccucuuccucug

SEQ ID NO: 3456487 - RNA, 13 nt, Human
ggaaagcaaagca

SEQ ID NO: 3456488 - RNA, 17 nt, Human
ggaaagcaaagcacaga

SEQ ID NO: 3456489 - RNA, 20 nt, Human
ggaaagcaaagcacagagag

SEQ ID NO: 3456490 - RNA, 21 nt, Human
ggaaagcaaagcacagagagu

SEQ ID NO: 3456491 - RNA, 14 nt, Human
ggaaagcagcucaa

SEQ ID NO: 3456492 - RNA, 18 nt, Human
ggaaagccaccucucccu

SEQ ID NO: 3456493 - RNA, 23 nt, Human
ggaaagccaccucucccucaaca

SEQ ID NO: 3456494 - RNA, 18 nt, Human
ggaaagccagugacucca

SEQ ID NO: 3456495 - RNA, 21 nt, Human
ggaaagccagugacuccagga

SEQ ID NO: 3456496 - RNA, 20 nt, Human
ggaaagcccauaugcuacca

SEQ ID NO: 3456497 - RNA, 23 nt, Human
ggaaagcgccuccaacccuagca

SEQ ID NO: 3456498 - RNA, 19 nt, Human
ggaaaggagccuaggccag

SEQ ID NO: 3456499 - RNA, 21 nt, Human
ggaaaggaugaucaaaaauaa

SEQ ID NO: 3456500 - RNA, 15 nt, Human
ggaaaggccagcugg

SEQ ID NO: 3456501 - RNA, 19 nt, Human
ggaaaggcucagucucagg

SEQ ID NO: 3456502 - RNA, 20 nt, Human
ggaaaggcucagucucagga

SEQ ID NO: 3456503 - RNA, 12 nt, Human
ggaaaggcucca

SEQ ID NO: 3456504 - RNA, 13 nt, Human
ggaaaggcuccag

SEQ ID NO: 3456505 - RNA, 14 nt, Human
ggaaaggcuccagg

SEQ ID NO: 3456506 - RNA, 19 nt, Human
ggaaaggcuccaggagcag

SEQ ID NO: 3456507 - RNA, 20 nt, Human
ggaaagggcccuccuuccua

SEQ ID NO: 3456508 - RNA, 22 nt, Human
ggaaagggcccuccuuccuaaa

SEQ ID NO: 3456509 - RNA, 18 nt, Human
ggaaaggggagagccugc

SEQ ID NO: 3456510 - RNA, 21 nt, Human
ggaaaggggagagccugcugg

SEQ ID NO: 3456511 - RNA, 18 nt, Human
ggaaaggggggagcuggg

SEQ ID NO: 3456512 - RNA, 15 nt, Human
ggaaagggugcugcu

SEQ ID NO: 3456513 - RNA, 23 nt, Human
ggaaaguaagggaagcagaagga

SEQ ID NO: 3456514 - RNA, 19 nt, Human
ggaaaguacacucugcugu

SEQ ID NO: 3456515 - RNA, 23 nt, Human
ggaaaguauucucuuuucaagaa

SEQ ID NO: 3456516 - RNA, 11 nt, Human
ggaaagucaga

SEQ ID NO: 3456517 - RNA, 18 nt, Human
ggaaagucagaaucagaa

SEQ ID NO: 3456518 - RNA, 14 nt, Human
ggaaagugaauuug

SEQ ID NO: 3456519 - RNA, 22 nt, Human
ggaaagugaauuugaaugaaaa

SEQ ID NO: 3456520 - RNA, 19 nt, Human
ggaaagugcugucuuaaac

SEQ ID NO: 3456521 - RNA, 20 nt, Human
ggaaaguggcaccugucugc

SEQ ID NO: 3456522 - RNA, 14 nt, Human
ggaaaguguaaagc

SEQ ID NO: 3456523 - RNA, 17 nt, Human
ggaaaguguaaagcauu

SEQ ID NO: 3456524 - RNA, 18 nt, Human
ggaaaguguaaagcauuc

SEQ ID NO: 3456525 - RNA, 15 nt, Human
ggaaauaaaaccuuu

SEQ ID NO: 3456526 - RNA, 18 nt, Human
ggaaauaaaaccuuucaa

SEQ ID NO: 3456527 - RNA, 20 nt, Human
ggaaauaaaaccuuucaaau

SEQ ID NO: 3456528 - RNA, 17 nt, Human
ggaaauaagaaaaauca

SEQ ID NO: 3456529 - RNA, 18 nt, Human
ggaaauacccuucuuuua

SEQ ID NO: 3456530 - RNA, 18 nt, Human
ggaaauacuguaugguuu

SEQ ID NO: 3456531 - RNA, 14 nt, Human
ggaaauagcuaaua

SEQ ID NO: 3456532 - RNA, 23 nt, Human
ggaaauauauauuauacuuguaa

SEQ ID NO: 3456533 - RNA, 16 nt, Human
ggaaauaucaguuacu

SEQ ID NO: 3456534 - RNA, 22 nt, Human
ggaaauaucaguuacucagccc

SEQ ID NO: 3456535 - RNA, 14 nt, Human
ggaaauauuaugca

SEQ ID NO: 3456536 - RNA, 17 nt, Human
ggaaauauugcuggggu

SEQ ID NO: 3456537 - RNA, 17 nt, Human
ggaaauauuuauuuuaa

SEQ ID NO: 3456538 - RNA, 22 nt, Human
ggaaaucaaaagggccaaagaa

SEQ ID NO: 3456539 - RNA, 17 nt, Human
ggaaaucaaagugcuau

SEQ ID NO: 3456540 - RNA, 21 nt, Human
ggaaaucaccgaaaacguggc

SEQ ID NO: 3456541 - RNA, 23 nt, Human
ggaaaucaccgaaaacguggcug

SEQ ID NO: 3456542 - RNA, 15 nt, Human
ggaaaugaagcaggg

SEQ ID NO: 3456543 - RNA, 17 nt, Human
ggaaaugaauuucucua

SEQ ID NO: 3456544 - RNA, 14 nt, Human
ggaaaugagcaggg

SEQ ID NO: 3456545 - RNA, 15 nt, Human
ggaaauggaauacug

SEQ ID NO: 3456546 - RNA, 22 nt, Human
ggaaaugggcagagcagagacc

SEQ ID NO: 3456547 - RNA, 19 nt, Human
ggaaaugguaugagcugag

SEQ ID NO: 3456548 - RNA, 14 nt, Human
ggaaauuaagaaga

SEQ ID NO: 3456549 - RNA, 23 nt, Human
ggaaauugagauuagagggaggu

SEQ ID NO: 3456550 - RNA, 21 nt, Human
ggaaauuuaaagcagguucuu

SEQ ID NO: 3456551 - RNA, 17 nt, Human
ggaaauuuagcauugua

SEQ ID NO: 3456552 - RNA, 17 nt, Human
ggaacaaaaaaaccaca

SEQ ID NO: 3456553 - RNA, 21 nt, Human
ggaacaaaaaaaccacaaagg

SEQ ID NO: 3456554 - RNA, 23 nt, Human
ggaacaaguugagcuaugacuua

SEQ ID NO: 3456555 - RNA, 19 nt, Human
ggaacaauugaaguaaacu

SEQ ID NO: 3456556 - RNA, 21 nt, Human
ggaacacuagacaagccagaa

SEQ ID NO: 3456557 - RNA, 12 nt, Human
ggaacacucuga

SEQ ID NO: 3456558 - RNA, 12 nt, Human
ggaacacugccc

SEQ ID NO: 3456559 - RNA, 14 nt, Human
ggaacacuggcaga

SEQ ID NO: 3456560 - RNA, 15 nt, Human
ggaacacuggcagac

SEQ ID NO: 3456561 - RNA, 12 nt, Human
ggaacagaagga

SEQ ID NO: 3456562 - RNA, 18 nt, Human
ggaacagacaacagaagu

SEQ ID NO: 3456563 - RNA, 20 nt, Human
ggaacagacaacagaaguca

SEQ ID NO: 3456564 - RNA, 19 nt, Human
ggaacagacuggaagcaca

SEQ ID NO: 3456565 - RNA, 20 nt, Human
ggaacagacuggaagcacag

SEQ ID NO: 3456566 - RNA, 19 nt, Human
ggaacagcuaugggagccc

SEQ ID NO: 3456567 - RNA, 16 nt, Human
ggaacaggaaacugau

SEQ ID NO: 3456568 - RNA, 23 nt, Human
ggaacaguguuucccauaauuuu

SEQ ID NO: 3456569 - RNA, 14 nt, Human
ggaacauacuguuc

SEQ ID NO: 3456570 - RNA, 15 nt, Human
ggaacauccuuugca

SEQ ID NO: 3456571 - RNA, 21 nt, Human
ggaacauccuuugcagggcag

SEQ ID NO: 3456572 - RNA, 16 nt, Human
ggaacauuuauuuuau

SEQ ID NO: 3456573 - RNA, 15 nt, Human
ggaaccaagcaggag

SEQ ID NO: 3456574 - RNA, 11 nt, Human
ggaaccagacu

SEQ ID NO: 3456575 - RNA, 13 nt, Human
ggaaccagacucu

SEQ ID NO: 3456576 - RNA, 12 nt, Human
ggaaccagagcc

SEQ ID NO: 3456577 - RNA, 19 nt, Human
ggaaccagagccauggacu

SEQ ID NO: 3456578 - RNA, 22 nt, Human
ggaaccccccucccacccaccg

SEQ ID NO: 3456579 - RNA, 21 nt, Human
ggaaccccggggugcccacag

SEQ ID NO: 3456580 - RNA, 19 nt, Human
ggaaccccuuucccacccc

SEQ ID NO: 3456581 - RNA, 24 nt, Human
ggaacccuuacaguaggagcccag

SEQ ID NO: 3456582 - RNA, 20 nt, Human
ggaaccgaggcagggaagga

SEQ ID NO: 3456583 - RNA, 15 nt, Human
ggaaccgcaggaagc

SEQ ID NO: 3456584 - RNA, 17 nt, Human
ggaaccgcaggaagcug

SEQ ID NO: 3456585 - RNA, 14 nt, Human
ggaaccgcucaccu

SEQ ID NO: 3456586 - RNA, 20 nt, Human
ggaaccgcucaccuagagcc

SEQ ID NO: 3456587 - RNA, 18 nt, Human
ggaaccucacucuugcca

SEQ ID NO: 3456588 - RNA, 15 nt, Human
ggaaccucagccugg

SEQ ID NO: 3456589 - RNA, 16 nt, Human
ggaaccucagccuggc

SEQ ID NO: 3456590 - RNA, 23 nt, Human
ggaaccucagccuggccagacac

SEQ ID NO: 3456591 - RNA, 18 nt, Human
ggaaccuccccagccugc

SEQ ID NO: 3456592 - RNA, 19 nt, Human
ggaaccuccccagccugcg

SEQ ID NO: 3456593 - RNA, 14 nt, Human
ggaaccucugucuc

SEQ ID NO: 3456594 - RNA, 15 nt, Human
ggaaccucugucuca

SEQ ID NO: 3456595 - RNA, 16 nt, Human
ggaaccugcaaaaaau

SEQ ID NO: 3456596 - RNA, 13 nt, Human
ggaaccugccaug

SEQ ID NO: 3456597 - RNA, 18 nt, Human
ggaaccuggaccaaagcu

SEQ ID NO: 3456598 - RNA, 16 nt, Human
ggaaccuuccuuccug

SEQ ID NO: 3456599 - RNA, 21 nt, Human
ggaaccuuccuuccugcuuga

SEQ ID NO: 3456600 - RNA, 14 nt, Human
ggaacgagagggga

SEQ ID NO: 3456601 - RNA, 16 nt, Human
ggaacgugacugcccc

SEQ ID NO: 3456602 - RNA, 15 nt, Human
ggaacguuggacuuu

SEQ ID NO: 3456603 - RNA, 20 nt, Human
ggaacuagacugccuggguu

SEQ ID NO: 3456604 - RNA, 22 nt, Human
ggaacuagagggauacacugaa

SEQ ID NO: 3456605 - RNA, 13 nt, Human
ggaacucagaucc

SEQ ID NO: 3456606 - RNA, 17 nt, Human
ggaacucagauccaggg

SEQ ID NO: 3456607 - RNA, 19 nt, Human
ggaacucagauccagggac

SEQ ID NO: 3456608 - RNA, 21 nt, Human
ggaacucauuccugccugucu

SEQ ID NO: 3456609 - RNA, 21 nt, Human
ggaacuccuaaaccuuugccc

SEQ ID NO: 3456610 - RNA, 15 nt, Human
ggaacuccuggaaau

SEQ ID NO: 3456611 - RNA, 15 nt, Human
ggaacuccuuggccu

SEQ ID NO: 3456612 - RNA, 16 nt, Human
ggaacuccuuggccua

SEQ ID NO: 3456613 - RNA, 23 nt, Human
ggaacucuaucugggccugggcu

SEQ ID NO: 3456614 - RNA, 19 nt, Human
ggaacucugacaagggcug

SEQ ID NO: 3456615 - RNA, 17 nt, Human
ggaacugaacauuccag

SEQ ID NO: 3456616 - RNA, 20 nt, Human
ggaacugaagggggcggccu

SEQ ID NO: 3456617 - RNA, 13 nt, Human
ggaacugcagacc

SEQ ID NO: 3456618 - RNA, 17 nt, Human
ggaacugcagaccuguc

SEQ ID NO: 3456619 - RNA, 17 nt, Human
ggaacuggaauccuuuc

SEQ ID NO: 3456620 - RNA, 15 nt, Human
ggaacuggaggcagg

SEQ ID NO: 3456621 - RNA, 17 nt, Human
ggaacuggccaagcuga

SEQ ID NO: 3456622 - RNA, 17 nt, Human
ggaacuguccagagagc

SEQ ID NO: 3456623 - RNA, 21 nt, Human
ucccaagugagucucucuggg

SEQ ID NO: 3456624 - RNA, 17 nt, Human
ucccaagugccagucuu

SEQ ID NO: 3456625 - RNA, 22 nt, Human
ucccaaguuuccauagcaacag

SEQ ID NO: 3456626 - RNA, 18 nt, Human
ucccaaguuuuaggacaa

SEQ ID NO: 3456627 - RNA, 22 nt, Human
ucccaauagcaacguagcuucu

SEQ ID NO: 3456628 - RNA, 14 nt, Human
ucccaaucagcacu

SEQ ID NO: 3456629 - RNA, 17 nt, Human
ucccaaucagcacugaa

SEQ ID NO: 3456630 - RNA, 19 nt, Human
ucccaaucagcacugaaaa

SEQ ID NO: 3456631 - RNA, 14 nt, Human
uccccacacuccua

SEQ ID NO: 3456632 - RNA, 15 nt, Human
uccccaccagaugcu

SEQ ID NO: 3456633 - RNA, 19 nt, Human
uccccaccccuaccccugg

SEQ ID NO: 3456634 - RNA, 15 nt, Human
uccccaccccugccc

SEQ ID NO: 3456635 - RNA, 22 nt, Human
uccccaccccugcccccagccc

SEQ ID NO: 3456636 - RNA, 14 nt, Human
uccccacccuccac

SEQ ID NO: 3456637 - RNA, 12 nt, Human
uccccacccuga

SEQ ID NO: 3456638 - RNA, 16 nt, Human
ggaacuguccuuuccu

SEQ ID NO: 3456639 - RNA, 15 nt, Human
ggaacuucuaauaua

SEQ ID NO: 3456640 - RNA, 16 nt, Human
ggaacuugaacugauu

SEQ ID NO: 3456641 - RNA, 21 nt, Human
ggaacuugagcgugaaucugu

SEQ ID NO: 3456642 - RNA, 15 nt, Human
ggaagaaagaagaca

SEQ ID NO: 3456643 - RNA, 16 nt, Human
ggaagaaagagaagga

SEQ ID NO: 3456644 - RNA, 19 nt, Human
ggaagaaagagaaggagcc

SEQ ID NO: 3456645 - RNA, 19 nt, Human
ggaagaaauuccuguagca

SEQ ID NO: 3456646 - RNA, 21 nt, Human
ggaagaagagaucaggaagag

SEQ ID NO: 3456647 - RNA, 16 nt, Human
ggaagaagagggagag

SEQ ID NO: 3456648 - RNA, 16 nt, Human
ggaagaagcagagaga

SEQ ID NO: 3456649 - RNA, 14 nt, Human
ggaagaaggaggaa

SEQ ID NO: 3456650 - RNA, 11 nt, Human
ggaagaaugaa

SEQ ID NO: 3456651 - RNA, 14 nt, Human
ggaagaauuuuaaa

SEQ ID NO: 3456652 - RNA, 13 nt, Human
ggaagacauuucu

SEQ ID NO: 3456653 - RNA, 23 nt, Human
ggaagacauuucuuuucuuuuua

SEQ ID NO: 3456654 - RNA, 21 nt, Human
ggaagaccagcuuugcaguga

SEQ ID NO: 3456655 - RNA, 18 nt, Human
ggaagacccaacacaugg

SEQ ID NO: 3456656 - RNA, 14 nt, Human
ggaagaccuggcaa

SEQ ID NO: 3456657 - RNA, 17 nt, Human
ggaagacuucaucccuc

SEQ ID NO: 3456658 - RNA, 20 nt, Human
ggaagacuucaucccucugg

SEQ ID NO: 3456659 - RNA, 13 nt, Human
ggaagacuuugga

SEQ ID NO: 3456660 - RNA, 12 nt, Human
ggaagagaaaca

SEQ ID NO: 3456661 - RNA, 13 nt, Human
ggaagagaaacca

SEQ ID NO: 3456662 - RNA, 12 nt, Human
ggaagagaaauc

SEQ ID NO: 3456663 - RNA, 12 nt, Human
ggaagagaagga

SEQ ID NO: 3456664 - RNA, 16 nt, Human
ggaagagacagcccag

SEQ ID NO: 3456665 - RNA, 21 nt, Human
ggaagagaggaguucaaugau

SEQ ID NO: 3456666 - RNA, 23 nt, Human
ggaagagaggaguucaaugaucu

SEQ ID NO: 3456667 - RNA, 14 nt, Human
ggaagagauccaaa

SEQ ID NO: 3456668 - RNA, 16 nt, Human
ggaagagauccaaaga

SEQ ID NO: 3456669 - RNA, 20 nt, Human
ggaagagauccaaagacucu

SEQ ID NO: 3456670 - RNA, 16 nt, Human
ggaagagcacagcccu

SEQ ID NO: 3456671 - RNA, 14 nt, Human
ggaagagcaggcac

SEQ ID NO: 3456672 - RNA, 15 nt, Human
ggaagagcaggcaca

SEQ ID NO: 3456673 - RNA, 17 nt, Human
ggaagagccuuccaccc

SEQ ID NO: 3456674 - RNA, 19 nt, Human
ggaagagccuuccacccag

SEQ ID NO: 3456675 - RNA, 22 nt, Human
ggaagagcucaagggacaagga

SEQ ID NO: 3456676 - RNA, 15 nt, Human
ggaagagggacagau

SEQ ID NO: 3456677 - RNA, 20 nt, Human
ggaagaggggacaggucccu

SEQ ID NO: 3456678 - RNA, 14 nt, Human
ggaagauauacaug

SEQ ID NO: 3456679 - RNA, 15 nt, Human
ggaagaucauuuuga

SEQ ID NO: 3456680 - RNA, 18 nt, Human
ggaagaucccccagaaaa

SEQ ID NO: 3456681 - RNA, 12 nt, Human
ggaagauccugc

SEQ ID NO: 3456682 - RNA, 20 nt, Human
ggaagaucucugcagggccg

SEQ ID NO: 3456683 - RNA, 23 nt, Human
ggaagaucuuaaauuuugugaua

SEQ ID NO: 3456684 - RNA, 22 nt, Human
ggaagaugggggcaagaagauc

SEQ ID NO: 3456685 - RNA, 17 nt, Human
ggaagauuuggaagcuc

SEQ ID NO: 3456686 - RNA, 17 nt, Human
ggaagcacaugccucuc

SEQ ID NO: 3456687 - RNA, 15 nt, Human
ggaagcaccccaugc

SEQ ID NO: 3456688 - RNA, 16 nt, Human
ggaagcagaauaaagc

SEQ ID NO: 3456689 - RNA, 17 nt, Human
ggaagcagaauaaagca

SEQ ID NO: 3456690 - RNA, 19 nt, Human
ggaagcagaauaaagcaau

SEQ ID NO: 3456691 - RNA, 20 nt, Human
ggaagcagaauaaagcaauu

SEQ ID NO: 3456692 - RNA, 14 nt, Human
ggaagcagcagccu

SEQ ID NO: 3456693 - RNA, 15 nt, Human
ggaagcagcagccuc

SEQ ID NO: 3456694 - RNA, 12 nt, Human
ggaagcagcuuu

SEQ ID NO: 3456695 - RNA, 16 nt, Human
ggaagcagugcccagg

SEQ ID NO: 3456696 - RNA, 18 nt, Human
ggaagcagugcccaggug

SEQ ID NO: 3456697 - RNA, 20 nt, Human
ggaagcauauuguuauuaua

SEQ ID NO: 3456698 - RNA, 17 nt, Human
ggaagcauguaggagaa

SEQ ID NO: 3456699 - RNA, 20 nt, Human
ggaagcauucagagagcagc

SEQ ID NO: 3456700 - RNA, 22 nt, Human
ggaagcauuguaaaauaauucu

SEQ ID NO: 3456701 - RNA, 18 nt, Human
ggaagccagcaggcucuc

SEQ ID NO: 3456702 - RNA, 14 nt, Human
ggaagcccaggagc

SEQ ID NO: 3456703 - RNA, 18 nt, Human
ggaagcccauccugacca

SEQ ID NO: 3456704 - RNA, 13 nt, Human
ggaagccccuggg

SEQ ID NO: 3456705 - RNA, 14 nt, Human
ggaagccccugggc

SEQ ID NO: 3456706 - RNA, 17 nt, Human
ggaagcccuccuuccac

SEQ ID NO: 3456707 - RNA, 11 nt, Human
ggaagcccugg

SEQ ID NO: 3456708 - RNA, 15 nt, Human
ggaagcccuggauuu

SEQ ID NO: 3456709 - RNA, 15 nt, Human
ggaagccguccuggc

SEQ ID NO: 3456710 - RNA, 13 nt, Human
ggaagccucagau

SEQ ID NO: 3456711 - RNA, 15 nt, Human
ggaagccugauuaaa

SEQ ID NO: 3456712 - RNA, 23 nt, Human
ggaagcgaugaauuuggagacuc

SEQ ID NO: 3456713 - RNA, 16 nt, Human
ggaagcgcucagaaca

SEQ ID NO: 3456714 - RNA, 20 nt, Human
ggaagcggagguugcaggga

SEQ ID NO: 3456715 - RNA, 21 nt, Human
ggaagcggcccuaagggagug

SEQ ID NO: 3456716 - RNA, 22 nt, Human
ggaagcuacagguuacaacaga

SEQ ID NO: 3456717 - RNA, 18 nt, Human
ggaagcuagacacaugaa

SEQ ID NO: 3456718 - RNA, 19 nt, Human
ggaagcuagacacaugaag

SEQ ID NO: 3456719 - RNA, 16 nt, Human
ggaagcuagcuccccu

SEQ ID NO: 3456720 - RNA, 17 nt, Human
ggaagcuagcuccccuc

SEQ ID NO: 3456721 - RNA, 19 nt, Human
ggaagcuagcuccccuccu

SEQ ID NO: 3456722 - RNA, 20 nt, Human
ggaagcuagcuccccuccuc

SEQ ID NO: 3456723 - RNA, 15 nt, Human
ggaagcuagucuuuu

SEQ ID NO: 3456724 - RNA, 16 nt, Human
ggaagcucagggccug

SEQ ID NO: 3456725 - RNA, 21 nt, Human
ggaagcucagggccuggcuca

SEQ ID NO: 3456726 - RNA, 20 nt, Human
ggaagcuccaguccugcucu

SEQ ID NO: 3456727 - RNA, 11 nt, Human
ggaagcuccgc

SEQ ID NO: 3456728 - RNA, 13 nt, Human
ggaagcucuucuu

SEQ ID NO: 3456729 - RNA, 10 nt, Human
ggaagcugca

SEQ ID NO: 3456730 - RNA, 13 nt, Human
ggaagcugcagcu

SEQ ID NO: 3456731 - RNA, 18 nt, Human
ggaagcugcagcuuggga

SEQ ID NO: 3456732 - RNA, 20 nt, Human
ggaagcugugcgugugugug

SEQ ID NO: 3456733 - RNA, 13 nt, Human
ggaagcuucuguc

SEQ ID NO: 3456734 - RNA, 19 nt, Human
ggaagcuucuuaaaugaga

SEQ ID NO: 3456735 - RNA, 14 nt, Human
ggaagcuuggggaa

SEQ ID NO: 3456736 - RNA, 20 nt, Human
ggaagcuuuggugagaaccu

SEQ ID NO: 3456737 - RNA, 19 nt, Human
ggaaggaccuauguuugcu

SEQ ID NO: 3456738 - RNA, 16 nt, Human
ggaaggagaaguaaga

SEQ ID NO: 3456739 - RNA, 16 nt, Human
ggaaggagacacagau

SEQ ID NO: 3456740 - RNA, 21 nt, Human
ggaaggagacucaccucugcc

SEQ ID NO: 3456741 - RNA, 13 nt, Human
ggaaggagccagu

SEQ ID NO: 3456742 - RNA, 21 nt, Human
ggaaggagccaguuugccgga

SEQ ID NO: 3456743 - RNA, 17 nt, Human
ggaaggagcugccugga

SEQ ID NO: 3456744 - RNA, 13 nt, Human
ggaaggaggaaga

SEQ ID NO: 3456745 - RNA, 19 nt, Human
ggaaggaggacccaggaca

SEQ ID NO: 3456746 - RNA, 16 nt, Human
ggaaggaggagccugu

SEQ ID NO: 3456747 - RNA, 13 nt, Human
ggaaggagggagg

SEQ ID NO: 3456748 - RNA, 16 nt, Human
ggaaggauucugcugg

SEQ ID NO: 3456749 - RNA, 19 nt, Human
ggaaggauucugcuggccu

SEQ ID NO: 3456750 - RNA, 20 nt, Human
ggaaggauucugcuggccuc

SEQ ID NO: 3456751 - RNA, 13 nt, Human
ggaaggcagacag

SEQ ID NO: 3456752 - RNA, 15 nt, Human
ggaaggcagagaaau

SEQ ID NO: 3456753 - RNA, 16 nt, Human
ggaaggcaggaagaga

SEQ ID NO: 3456754 - RNA, 16 nt, Human
ggaaggcaggcagggc

SEQ ID NO: 3456755 - RNA, 14 nt, Human
ggaaggcagggagg

SEQ ID NO: 3456756 - RNA, 19 nt, Human
ggaaggcaugccuggacaa

SEQ ID NO: 3456757 - RNA, 18 nt, Human
ggaaggccaccugcaggu

SEQ ID NO: 3456758 - RNA, 23 nt, Human
ggaaggccaccugcaggucacug

SEQ ID NO: 3456759 - RNA, 22 nt, Human
ggaaggccucuuggagaccuua

SEQ ID NO: 3456760 - RNA, 12 nt, Human
ggaaggccuggg

SEQ ID NO: 3456761 - RNA, 13 nt, Human
ggaaggccugggu

SEQ ID NO: 3456762 - RNA, 19 nt, Human
ggaaggcggggcuucaacc

SEQ ID NO: 3456763 - RNA, 23 nt, Human
ggaaggcuacuucggggcuggga

SEQ ID NO: 3456764 - RNA, 17 nt, Human
ggaagggaaaguuuuuu

SEQ ID NO: 3456765 - RNA, 23 nt, Human
ggaagggacaccaagccuuggcu

SEQ ID NO: 3456766 - RNA, 20 nt, Human
ggaagggaccaaggcaaggc

SEQ ID NO: 3456767 - RNA, 22 nt, Human
ggaagggaccaaggcaaggcag

SEQ ID NO: 3456768 - RNA, 11 nt, Human
ggaagggagcc

SEQ ID NO: 3456769 - RNA, 13 nt, Human
ggaagggagccaa

SEQ ID NO: 3456770 - RNA, 12 nt, Human
ggaagggcagga

SEQ ID NO: 3456771 - RNA, 12 nt, Human
ggaagggccagu

SEQ ID NO: 3456772 - RNA, 23 nt, Human
ggaaggggagauaaggguaucug

SEQ ID NO: 3456773 - RNA, 15 nt, Human
ggaaggggccagagg

SEQ ID NO: 3456774 - RNA, 17 nt, Human
ggaaggggcuggacugg

SEQ ID NO: 3456775 - RNA, 19 nt, Human
ggaagggggggcuacauua

SEQ ID NO: 3456776 - RNA, 20 nt, Human
ggaagggggggcuacauuau

SEQ ID NO: 3456777 - RNA, 11 nt, Human
ggagaggagac

SEQ ID NO: 3456778 - RNA, 14 nt, Human
ggagaggagagagg

SEQ ID NO: 3456779 - RNA, 15 nt, Human
ggagaggagagaggc

SEQ ID NO: 3456780 - RNA, 14 nt, Human
ggagaggagagcca

SEQ ID NO: 3456781 - RNA, 12 nt, Human
ggagaggagccc

SEQ ID NO: 3456782 - RNA, 13 nt, Human
ggagaggaugaga

SEQ ID NO: 3456783 - RNA, 20 nt, Human
ggagaggaugagagcccaga

SEQ ID NO: 3456784 - RNA, 22 nt, Human
ggagaggcccucuggaguggcc

SEQ ID NO: 3456785 - RNA, 14 nt, Human
ggagagggaaugug

SEQ ID NO: 3456786 - RNA, 22 nt, Human
ggagagggacagcccacugaga

SEQ ID NO: 3456787 - RNA, 13 nt, Human
ggagagggagguc

SEQ ID NO: 3456788 - RNA, 17 nt, Human
ggagagggaggucacug

SEQ ID NO: 3456789 - RNA, 21 nt, Human
ggagagggaugaggugcuggg

SEQ ID NO: 3456790 - RNA, 22 nt, Human
ggagaggggaagggccagucug

SEQ ID NO: 3456791 - RNA, 14 nt, Human
ggagaggggcagaa

SEQ ID NO: 3456792 - RNA, 14 nt, Human
ggagagggucugga

SEQ ID NO: 3456793 - RNA, 11 nt, Human
ggagaggucuu

SEQ ID NO: 3456794 - RNA, 16 nt, Human
ggagaggugccagcaa

SEQ ID NO: 3456795 - RNA, 17 nt, Human
ggagaguacagugagcc

SEQ ID NO: 3456796 - RNA, 20 nt, Human
ggagaguacagugagccaag

SEQ ID NO: 3456797 - RNA, 18 nt, Human
ggagaguggccauucuuu

SEQ ID NO: 3456798 - RNA, 19 nt, Human
ggagagugucaaccagaca

SEQ ID NO: 3456799 - RNA, 20 nt, Human
ggagagugucaaccagacag

SEQ ID NO: 3456800 - RNA, 23 nt, Human
ggagaguucaauggcugcugaag

SEQ ID NO: 3456801 - RNA, 18 nt, Human
ggagaguuuccugaaaca

SEQ ID NO: 3456802 - RNA, 22 nt, Human
ggagauaucugagggaggaggc

SEQ ID NO: 3456803 - RNA, 23 nt, Human
ggagauauuuauggggggagaac

SEQ ID NO: 3456804 - RNA, 21 nt, Human
ggagaucagaaaaauggagca

SEQ ID NO: 3456805 - RNA, 13 nt, Human
ggagauccuccug

SEQ ID NO: 3456806 - RNA, 17 nt, Human
ggagaucggggccagag

SEQ ID NO: 3456807 - RNA, 23 nt, Human
ggagaugaaaucuuacagcuggg

SEQ ID NO: 3456808 - RNA, 16 nt, Human
ggagaugaggccagac

SEQ ID NO: 3456809 - RNA, 17 nt, Human
ggagaugccauccucuu

SEQ ID NO: 3456810 - RNA, 15 nt, Human
ggagaugcuccuugg

SEQ ID NO: 3456811 - RNA, 19 nt, Human
ggagauggaggaaagugau

SEQ ID NO: 3456812 - RNA, 13 nt, Human
ggagauggaguuc

SEQ ID NO: 3456813 - RNA, 16 nt, Human
ggagauggggagaaac

SEQ ID NO: 3456814 - RNA, 22 nt, Human
ggagaugucuucguacaguucu

SEQ ID NO: 3456815 - RNA, 14 nt, Human
ggagauucagacug

SEQ ID NO: 3456816 - RNA, 13 nt, Human
ggagauucugccu

SEQ ID NO: 3456817 - RNA, 20 nt, Human
ggagauuuacaacuggggga

SEQ ID NO: 3456818 - RNA, 16 nt, Human
ggagauuuuagguguu

SEQ ID NO: 3456819 - RNA, 16 nt, Human
ggagauuuuccuuccu

SEQ ID NO: 3456820 - RNA, 20 nt, Human
ggagcaaaaucgaugcagug

SEQ ID NO: 3456821 - RNA, 23 nt, Human
ggagcaaacugcaugcccagaga

SEQ ID NO: 3456822 - RNA, 22 nt, Human
ggagcaaagccuguucauggca

SEQ ID NO: 3456823 - RNA, 23 nt, Human
ggagcaaagccuguucauggcag

SEQ ID NO: 3456824 - RNA, 15 nt, Human
ggagcaaagugaggg

SEQ ID NO: 3456825 - RNA, 16 nt, Human
ggagcaaauguuucug

SEQ ID NO: 3456826 - RNA, 18 nt, Human
ggagcaaauguuucugca

SEQ ID NO: 3456827 - RNA, 22 nt, Human
ggagcaacuuguucguggguca

SEQ ID NO: 3456828 - RNA, 18 nt, Human
ggagcacaaaagccucuc

SEQ ID NO: 3456829 - RNA, 18 nt, Human
ggagcacaaagacccugg

SEQ ID NO: 3456830 - RNA, 20 nt, Human
ggagcacaaagacccuggcu

SEQ ID NO: 3456831 - RNA, 22 nt, Human
ggagcacaaagacccuggcuuu

SEQ ID NO: 3456832 - RNA, 14 nt, Human
ggagcacacccagc

SEQ ID NO: 3456833 - RNA, 14 nt, Human
ggagcacaggcagc

SEQ ID NO: 3456834 - RNA, 12 nt, Human
ggagcagagaag

SEQ ID NO: 3456835 - RNA, 21 nt, Human
ggagcagaggggcagaggccc

SEQ ID NO: 3456836 - RNA, 18 nt, Human
ggagcagccuggagaccc

SEQ ID NO: 3456837 - RNA, 13 nt, Human
ggagcaggcagcc

SEQ ID NO: 3456838 - RNA, 21 nt, Human
ggagcaggcggugggcaccca

SEQ ID NO: 3456839 - RNA, 19 nt, Human
ggagcauccaccuccuucu

SEQ ID NO: 3456840 - RNA, 14 nt, Human
ggagcaucugacuc

SEQ ID NO: 3456841 - RNA, 16 nt, Human
ggagcaucugacucac

SEQ ID NO: 3456842 - RNA, 18 nt, Human
ggagcaugagaggaggca

SEQ ID NO: 3456843 - RNA, 20 nt, Human
ucccuggguuagacugccag

SEQ ID NO: 3456844 - RNA, 21 nt, Human
ucccuggguuagacugccagc

SEQ ID NO: 3456845 - RNA, 23 nt, Human
ucccuggguuagacugccagcuc

SEQ ID NO: 3456846 - RNA, 21 nt, Human
ucccugguaauaaguacugug

SEQ ID NO: 3456847 - RNA, 21 nt, Human
ucccuggugagagggccgggc

SEQ ID NO: 3456848 - RNA, 11 nt, Human
ucccuggugcu

SEQ ID NO: 3456849 - RNA, 15 nt, Human
ucccugguggcagcu

SEQ ID NO: 3456850 - RNA, 16 nt, Human
ucccugguggcagcuc

SEQ ID NO: 3456851 - RNA, 23 nt, Human
ucccugguggcagcucaccucuc

SEQ ID NO: 3456852 - RNA, 16 nt, Human
ucccugguucugauga

SEQ ID NO: 3456853 - RNA, 18 nt, Human
ucccuguaaccucuucag

SEQ ID NO: 3456854 - RNA, 20 nt, Human
ucccuguaauuguuguuugu

SEQ ID NO: 3456855 - RNA, 13 nt, Human
ucccugucaccuc

SEQ ID NO: 3456856 - RNA, 14 nt, Human
ucccugucaccucu

SEQ ID NO: 3456857 - RNA, 14 nt, Human
ucccuguccacccc

SEQ ID NO: 3456858 - RNA, 23 nt, Human
ucccugucuuuacuccucacacu

SEQ ID NO: 3456859 - RNA, 14 nt, Human
ucccugugccuccu

SEQ ID NO: 3456860 - RNA, 20 nt, Human
ucccugugcugacggaagcc

SEQ ID NO: 3456861 - RNA, 17 nt, Human
ucccugugucauuucaa

SEQ ID NO: 3456862 - RNA, 20 nt, Human
ucccuguguuaauuuaaguu

SEQ ID NO: 3456863 - RNA, 16 nt, Human
ucccuguuauuuucaa

SEQ ID NO: 3456864 - RNA, 12 nt, Human
ucccuguucauu

SEQ ID NO: 3456865 - RNA, 15 nt, Human
ucccuguuccccaga

SEQ ID NO: 3456866 - RNA, 17 nt, Human
ucccuguucuuccucca

SEQ ID NO: 3456867 - RNA, 14 nt, Human
ucccuguugaagcu

SEQ ID NO: 3456868 - RNA, 20 nt, Human
ucccuguugacgaagucucu

SEQ ID NO: 3456869 - RNA, 22 nt, Human
ucccuguuucuuccacagugcc

SEQ ID NO: 3456870 - RNA, 21 nt, Human
ucccuguuuucugagcccggg

SEQ ID NO: 3456871 - RNA, 22 nt, Human
ucccuguuuucugagcccgggc

SEQ ID NO: 3456872 - RNA, 23 nt, Human
ucccuguuuucugagcccgggcu

SEQ ID NO: 3456873 - RNA, 15 nt, Human
ucccuuaaacaaaaa

SEQ ID NO: 3456874 - RNA, 22 nt, Human
ucccuuaaacaaaaauuaaaau

SEQ ID NO: 3456875 - RNA, 22 nt, Human
ucccuuaacaguuguauuuaac

SEQ ID NO: 3456876 - RNA, 18 nt, Human
ucccuuacgugaguccug

SEQ ID NO: 3456877 - RNA, 20 nt, Human
ucccuucacaaacccagugu

SEQ ID NO: 3456878 - RNA, 18 nt, Human
ucccuucagcccccagcc

SEQ ID NO: 3456879 - RNA, 21 nt, Human
ucccuucagcccccagccccu

SEQ ID NO: 3456880 - RNA, 18 nt, Human
ucccuucaguacccucuc

SEQ ID NO: 3456881 - RNA, 20 nt, Human
ucccuucaguacccucucag

SEQ ID NO: 3456882 - RNA, 18 nt, Human
ucccuuccacacccccac

SEQ ID NO: 3456883 - RNA, 17 nt, Human
ucccuuccaccugcucu

SEQ ID NO: 3456884 - RNA, 19 nt, Human
ucccuuccaccugcucugc

SEQ ID NO: 3456885 - RNA, 13 nt, Human
ucccuuccacugc

SEQ ID NO: 3456886 - RNA, 23 nt, Human
ucccuuccaguuuauuccagagc

SEQ ID NO: 3456887 - RNA, 14 nt, Human
ucccuucccaccuc

SEQ ID NO: 3456888 - RNA, 11 nt, Human
ucccuucccuc

SEQ ID NO: 3456889 - RNA, 15 nt, Human
ucccuuccucuuucc

SEQ ID NO: 3456890 - RNA, 22 nt, Human
ucccuucgguggaagagcucaa

SEQ ID NO: 3456891 - RNA, 17 nt, Human
ucccuucuacugcuucu

SEQ ID NO: 3456892 - RNA, 22 nt, Human
ucccuucuaggguuauugcauu

SEQ ID NO: 3456893 - RNA, 15 nt, Human
ucccuucucacagca

SEQ ID NO: 3456894 - RNA, 16 nt, Human
ucccuucuccaucucu

SEQ ID NO: 3456895 - RNA, 16 nt, Human
ucccuucucccuggau

SEQ ID NO: 3456896 - RNA, 21 nt, Human
ucccuucuccuugauaacagc

SEQ ID NO: 3456897 - RNA, 21 nt, Human
ucccuucucuuccaggcagcc

SEQ ID NO: 3456898 - RNA, 14 nt, Human
ucccuucugcuacu

SEQ ID NO: 3456899 - RNA, 17 nt, Human
ucccuucugucccucac

SEQ ID NO: 3456900 - RNA, 17 nt, Human
ucccuugaaauuuuaaa

SEQ ID NO: 3456901 - RNA, 17 nt, Human
ucccuugaccaggccug

SEQ ID NO: 3456902 - RNA, 16 nt, Human
ucccuugagaccucag

SEQ ID NO: 3456903 - RNA, 17 nt, Human
ucccuugagaccucagc

SEQ ID NO: 3456904 - RNA, 17 nt, Human
ucccuugagggcugcag

SEQ ID NO: 3456905 - RNA, 19 nt, Human
ucccuugagggcugcaguu

SEQ ID NO: 3456906 - RNA, 16 nt, Human
ucccuugaugcacaga

SEQ ID NO: 3456907 - RNA, 17 nt, Human
ucccuugccacuuugca

SEQ ID NO: 3456908 - RNA, 14 nt, Human
ucccuugccccccu

SEQ ID NO: 3456909 - RNA, 19 nt, Human
ucccuugcuggccccagcc

SEQ ID NO: 3456910 - RNA, 15 nt, Human
ucccuugcuuuuccc

SEQ ID NO: 3456911 - RNA, 23 nt, Human
ucccuugcuuuucccucuuuucu

SEQ ID NO: 3456912 - RNA, 18 nt, Human
ucccuuggaaaccugccc

SEQ ID NO: 3456913 - RNA, 12 nt, Human
ucccuuggagcu

SEQ ID NO: 3456914 - RNA, 20 nt, Human
ucccuuggauuguccccgac

SEQ ID NO: 3456915 - RNA, 17 nt, Human
ucccuuggguucugaua

SEQ ID NO: 3456916 - RNA, 15 nt, Human
ucccuugugugugug

SEQ ID NO: 3456917 - RNA, 14 nt, Human
ucccuuguucucua

SEQ ID NO: 3456918 - RNA, 17 nt, Human
ucccuuucauuugcuau

SEQ ID NO: 3456919 - RNA, 22 nt, Human
ucccuuuccaaaugcccagcuu

SEQ ID NO: 3456920 - RNA, 13 nt, Human
ucccuuucccuuc

SEQ ID NO: 3456921 - RNA, 15 nt, Human
uccuaaaugcaguga

SEQ ID NO: 3456922 - RNA, 18 nt, Human
uccuaaauuuuccugucc

SEQ ID NO: 3456923 - RNA, 18 nt, Human
uccuaacugaagagacag

SEQ ID NO: 3456924 - RNA, 14 nt, Human
uccuaacuuuucaa

SEQ ID NO: 3456925 - RNA, 13 nt, Human
uccuaagaaauau

SEQ ID NO: 3456926 - RNA, 19 nt, Human
uccuaagaaauaugugaga

SEQ ID NO: 3456927 - RNA, 13 nt, Human
uccuaagaagcuu

SEQ ID NO: 3456928 - RNA, 16 nt, Human
uccuaagaccuggggu

SEQ ID NO: 3456929 - RNA, 21 nt, Human
uccuaagcaacuaggccuuca

SEQ ID NO: 3456930 - RNA, 14 nt, Human
uccuaagcaucuaa

SEQ ID NO: 3456931 - RNA, 14 nt, Human
uccuaagccugugg

SEQ ID NO: 3456932 - RNA, 13 nt, Human
uccuaaggaaccu

SEQ ID NO: 3456933 - RNA, 21 nt, Human
uccuaaggcacccacaaauaa

SEQ ID NO: 3456934 - RNA, 18 nt, Human
uccuaagggucgaaagcu

SEQ ID NO: 3456935 - RNA, 20 nt, Human
uccuaaguucuuagauaucu

SEQ ID NO: 3456936 - RNA, 14 nt, Human
uccuaauaaaaagg

SEQ ID NO: 3456937 - RNA, 17 nt, Human
uccuaauaaaaagguga

SEQ ID NO: 3456938 - RNA, 22 nt, Human
uccuaauaauaucccacuggga

SEQ ID NO: 3456939 - RNA, 14 nt, Human
uccuaauaucaaau

SEQ ID NO: 3456940 - RNA, 15 nt, Human
uccuaaucacucaga

SEQ ID NO: 3456941 - RNA, 16 nt, Human
uccuaaucacucagag

SEQ ID NO: 3456942 - RNA, 14 nt, Human
uccuaaucauccaa

SEQ ID NO: 3456943 - RNA, 15 nt, Human
uccuaaucauccaau

SEQ ID NO: 3456944 - RNA, 22 nt, Human
uccuaaugaaugcauaaaaugu

SEQ ID NO: 3456945 - RNA, 15 nt, Human
uccuacaagacacag

SEQ ID NO: 3456946 - RNA, 19 nt, Human
uccuacaagagcagccugu

SEQ ID NO: 3456947 - RNA, 19 nt, Human
uccuacaagauuuagaaaa

SEQ ID NO: 3456948 - RNA, 21 nt, Human
uccuacaagauuuagaaaaaa

SEQ ID NO: 3456949 - RNA, 16 nt, Human
uccuacacaggacagg

SEQ ID NO: 3456950 - RNA, 19 nt, Human
uccuacacuugagagaaaa

SEQ ID NO: 3456951 - RNA, 15 nt, Human
uccuacagaaaaacc

SEQ ID NO: 3456952 - RNA, 15 nt, Human
uccuacagcacuacu

SEQ ID NO: 3456953 - RNA, 22 nt, Human
uccuacaggcagucucucucuu

SEQ ID NO: 3456954 - RNA, 21 nt, Human
uccuacaguuggaaauccauc

SEQ ID NO: 3456955 - RNA, 20 nt, Human
uccuacauaucccuuccaga

SEQ ID NO: 3456956 - RNA, 14 nt, Human
uccuaccaaccucu

SEQ ID NO: 3456957 - RNA, 16 nt, Human
uccuacccacaccucu

SEQ ID NO: 3456958 - RNA, 22 nt, Human
uccuacccacaccucugccaga

SEQ ID NO: 3456959 - RNA, 19 nt, Human
uccuaccccaauuccuugu

SEQ ID NO: 3456960 - RNA, 15 nt, Human
uccuacccccugugc

SEQ ID NO: 3456961 - RNA, 15 nt, Human
uccuacccugcgccc

SEQ ID NO: 3456962 - RNA, 20 nt, Human
uccuaccgaaaccuugccuu

SEQ ID NO: 3456963 - RNA, 16 nt, Human
uccuaccucagccuag

SEQ ID NO: 3456964 - RNA, 14 nt, Human
uccuaccuugcuuu

SEQ ID NO: 3456965 - RNA, 23 nt, Human
uccuacgaguaauugcauuugcu

SEQ ID NO: 3456966 - RNA, 13 nt, Human
uccuacuccugac

SEQ ID NO: 3456967 - RNA, 16 nt, Human
uccuacucuucucucu

SEQ ID NO: 3456968 - RNA, 20 nt, Human
uccuacucuucucucugcuc

SEQ ID NO: 3456969 - RNA, 17 nt, Human
uccuacuggucucucua

SEQ ID NO: 3456970 - RNA, 18 nt, Human
uccuacuuauaaaguaga

SEQ ID NO: 3456971 - RNA, 16 nt, Human
uccuagaaauucccca

SEQ ID NO: 3456972 - RNA, 18 nt, Human
uccuagacagguguuuau

SEQ ID NO: 3456973 - RNA, 17 nt, Human
uccuagagaacgcagcc

SEQ ID NO: 3456974 - RNA, 14 nt, Human
uccuagagaacugu

SEQ ID NO: 3456975 - RNA, 18 nt, Human
uccuagagaagacaggcu

SEQ ID NO: 3456976 - RNA, 19 nt, Human
uccuagagaagacaggcug

SEQ ID NO: 3456977 - RNA, 20 nt, Human
uccuagagaagacaggcugg

SEQ ID NO: 3456978 - RNA, 19 nt, Human
uccuagaggcccuuugcug

SEQ ID NO: 3456979 - RNA, 21 nt, Human
uccuagaggcccuuugcuguc

SEQ ID NO: 3456980 - RNA, 15 nt, Human
uccuagauaaaaaga

SEQ ID NO: 3456981 - RNA, 17 nt, Human
uccuagauaaaaagaug

SEQ ID NO: 3456982 - RNA, 14 nt, Human
uccuagauccuaag

SEQ ID NO: 3456983 - RNA, 23 nt, Human
uccuagauccuaagggucgaaag

SEQ ID NO: 3456984 - RNA, 13 nt, Human
uccuagaugcucu

SEQ ID NO: 3456985 - RNA, 18 nt, Human
uccuagauggcagucacu

SEQ ID NO: 3456986 - RNA, 16 nt, Human
uccuagcacagauggc

SEQ ID NO: 3456987 - RNA, 19 nt, Human
uccuagcacaugcuucaau

SEQ ID NO: 3456988 - RNA, 14 nt, Human
uccuagcagagaga

SEQ ID NO: 3456989 - RNA, 21 nt, Human
uccuagccaccgccuccuaca

SEQ ID NO: 3456990 - RNA, 14 nt, Human
uccuagccuguuuc

SEQ ID NO: 3456991 - RNA, 15 nt, Human
uccuagccuguuucu

SEQ ID NO: 3456992 - RNA, 18 nt, Human
uccuagccuuauccucug

SEQ ID NO: 3456993 - RNA, 22 nt, Human
uccuagccuuauccucugaucu

SEQ ID NO: 3456994 - RNA, 22 nt, Human
uccuagcuggagaggagcccug

SEQ ID NO: 3456995 - RNA, 24 nt, Human
uccuagcuggagaggagcccugcc

SEQ ID NO: 3456996 - RNA, 15 nt, Human
uccuagcuguccuuu

SEQ ID NO: 3456997 - RNA, 22 nt, Human
uccuagcuugggaggcuucccc

SEQ ID NO: 3456998 - RNA, 14 nt, Human
uccuaggaaaauac

SEQ ID NO: 3456999 - RNA, 18 nt, Human
uccuaggaguauccucau

SEQ ID NO: 3457000 - RNA, 14 nt, Human
uccuaggcauuugc

SEQ ID NO: 3457001 - RNA, 17 nt, Human
uccuaggccucaacucc

SEQ ID NO: 3457002 - RNA, 22 nt, Human
uccuaggcuccaccccauccag

SEQ ID NO: 3457003 - RNA, 18 nt, Human
uccuagguaggguuuaau

SEQ ID NO: 3457004 - RNA, 13 nt, Human
uccuaguaagaag

SEQ ID NO: 3457005 - RNA, 13 nt, Human
uccuagugaaccu

SEQ ID NO: 3457006 - RNA, 20 nt, Human
uccuagugaaccucaccccg

SEQ ID NO: 3457007 - RNA, 20 nt, Human
ucuaagguccgguguucuaa

SEQ ID NO: 3457008 - RNA, 19 nt, Human
ucuaaguaaaaccacagca

SEQ ID NO: 3457009 - RNA, 23 nt, Human
ucuaaguaaaaccacagcaguug

SEQ ID NO: 3457010 - RNA, 20 nt, Human
ucuaaguaaauacaauuuuu

SEQ ID NO: 3457011 - RNA, 16 nt, Human
ucuaaguauuugaaac

SEQ ID NO: 3457012 - RNA, 23 nt, Human
ucuaagucaaacacuugugacuu

SEQ ID NO: 3457013 - RNA, 21 nt, Human
ucuaagucaguacccaccacc

SEQ ID NO: 3457014 - RNA, 18 nt, Human
ucuaagucauguauguuu

SEQ ID NO: 3457015 - RNA, 14 nt, Human
ucuaagucuuucca

SEQ ID NO: 3457016 - RNA, 13 nt, Human
ucuaagugauaua

SEQ ID NO: 3457017 - RNA, 21 nt, Human
ucuaagugggcauugccaugu

SEQ ID NO: 3457018 - RNA, 18 nt, Human
ucuaaguguuucauaaau

SEQ ID NO: 3457019 - RNA, 16 nt, Human
ucuaaguuaauuuaaa

SEQ ID NO: 3457020 - RNA, 20 nt, Human
ucuaaguuaauuuaaaguug

SEQ ID NO: 3457021 - RNA, 17 nt, Human
ucuaaguuauaagacuc

SEQ ID NO: 3457022 - RNA, 15 nt, Human
ucuaaguuucuaaga

SEQ ID NO: 3457023 - RNA, 17 nt, Human
ucuaaguuucuaagauu

SEQ ID NO: 3457024 - RNA, 22 nt, Human
ucuaauaaaacagcugucucua

SEQ ID NO: 3457025 - RNA, 11 nt, Human
ucuaauaauaa

SEQ ID NO: 3457026 - RNA, 20 nt, Human
ucuaauagcgaggcucuaac

SEQ ID NO: 3457027 - RNA, 22 nt, Human
ucuaauagcgaggcucuaacca

SEQ ID NO: 3457028 - RNA, 12 nt, Human
ucuaauaguaua

SEQ ID NO: 3457029 - RNA, 12 nt, Human
ucuaauagucuu

SEQ ID NO: 3457030 - RNA, 15 nt, Human
ucuaauauauaugaa

SEQ ID NO: 3457031 - RNA, 19 nt, Human
ucuaauauauaugaauaaa

SEQ ID NO: 3457032 - RNA, 15 nt, Human
ucuaauauauuuuua

SEQ ID NO: 3457033 - RNA, 14 nt, Human
ucuaauauguaaca

SEQ ID NO: 3457034 - RNA, 18 nt, Human
ucuaauauuaaaaauaug

SEQ ID NO: 3457035 - RNA, 17 nt, Human
ucuaaugacauucaaua

SEQ ID NO: 3457036 - RNA, 18 nt, Human
ucuaaugacauucaauaa

SEQ ID NO: 3457037 - RNA, 24 nt, Human
ucuaaugaggagagaaaauauaug

SEQ ID NO: 3457038 - RNA, 22 nt, Human
ucuaaugauggcccauucuacu

SEQ ID NO: 3457039 - RNA, 23 nt, Human
ucuaaugauggcccauucuacuu

SEQ ID NO: 3457040 - RNA, 21 nt, Human
ucuaauggauuauaaucagaa

SEQ ID NO: 3457041 - RNA, 20 nt, Human
ucuaauggcacuuaucauua

SEQ ID NO: 3457042 - RNA, 15 nt, Human
ucuaauguauuuuau

SEQ ID NO: 3457043 - RNA, 24 nt, Human
ucuaauguauuuuauuguaacaga

SEQ ID NO: 3457044 - RNA, 14 nt, Human
ucuaaugucuucau

SEQ ID NO: 3457045 - RNA, 11 nt, Human
ucuaauguggu

SEQ ID NO: 3457046 - RNA, 19 nt, Human
ucuaaugugguuauuucuc

SEQ ID NO: 3457047 - RNA, 11 nt, Human
ucuaauguuua

SEQ ID NO: 3457048 - RNA, 18 nt, Human
ucuaauguuuaagcagaa

SEQ ID NO: 3457049 - RNA, 13 nt, Human
ucuaauguuugca

SEQ ID NO: 3457050 - RNA, 18 nt, Human
ucuaauguuugcauauaa

SEQ ID NO: 3457051 - RNA, 15 nt, Human
ucuaauuaauuguaa

SEQ ID NO: 3457052 - RNA, 17 nt, Human
ucuaauuaauuguaauc

SEQ ID NO: 3457053 - RNA, 19 nt, Human
ucuaauucccauuuugcaa

SEQ ID NO: 3457054 - RNA, 11 nt, Human
ucuaauucuaa

SEQ ID NO: 3457055 - RNA, 20 nt, Human
ucuaauucuaaggaauauga

SEQ ID NO: 3457056 - RNA, 16 nt, Human
ucuaauugcugugugu

SEQ ID NO: 3457057 - RNA, 20 nt, Human
ucuaauuggaagaaauuccu

SEQ ID NO: 3457058 - RNA, 19 nt, Human
ucuaauuucaaaaauauaa

SEQ ID NO: 3457059 - RNA, 15 nt, Human
ucuaauuuuggaugg

SEQ ID NO: 3457060 - RNA, 18 nt, Human
ucuacaaaacauuaaacu

SEQ ID NO: 3457061 - RNA, 17 nt, Human
ucuacaaauuuuucugu

SEQ ID NO: 3457062 - RNA, 21 nt, Human
ucuacaacucauacacucgua

SEQ ID NO: 3457063 - RNA, 14 nt, Human
ucuacaaucucuuu

SEQ ID NO: 3457064 - RNA, 19 nt, Human
ucuacaaucucuuuuuguu

SEQ ID NO: 3457065 - RNA, 15 nt, Human
ggaugcccuggaggu

SEQ ID NO: 3457066 - RNA, 18 nt, Human
ggaugcccuggagguggc

SEQ ID NO: 3457067 - RNA, 11 nt, Human
ggaugccuccu

SEQ ID NO: 3457068 - RNA, 21 nt, Human
ggaugccugguggcagcugcg

SEQ ID NO: 3457069 - RNA, 14 nt, Human
ggaugcgcagugcc

SEQ ID NO: 3457070 - RNA, 16 nt, Human
ggaugcuaacaucuaa

SEQ ID NO: 3457071 - RNA, 17 nt, Human
ggaugcugcugccccug

SEQ ID NO: 3457072 - RNA, 21 nt, Human
ggaugcuugccuagggccugg

SEQ ID NO: 3457073 - RNA, 17 nt, Human
ggauggaaugauggguc

SEQ ID NO: 3457074 - RNA, 14 nt, Human
ggauggacaucuug

SEQ ID NO: 3457075 - RNA, 21 nt, Human
ggauggagcccaggcgggagc

SEQ ID NO: 3457076 - RNA, 18 nt, Human
ggauggaggaagaacuga

SEQ ID NO: 3457077 - RNA, 18 nt, Human
ggauggauuuccagccaa

SEQ ID NO: 3457078 - RNA, 12 nt, Human
ggauggcaagau

SEQ ID NO: 3457079 - RNA, 15 nt, Human
ggauggcaccagagg

SEQ ID NO: 3457080 - RNA, 21 nt, Human
ggauggcaggacgugggcugg

SEQ ID NO: 3457081 - RNA, 15 nt, Human
ggauggcccagggug

SEQ ID NO: 3457082 - RNA, 15 nt, Human
ggauggcccuuccuc

SEQ ID NO: 3457083 - RNA, 15 nt, Human
ggauggcgggugggg

SEQ ID NO: 3457084 - RNA, 15 nt, Human
ggaugggagugagac

SEQ ID NO: 3457085 - RNA, 15 nt, Human
ggaugggggaacuca

SEQ ID NO: 3457086 - RNA, 14 nt, Human
ggauggguuuuaug

SEQ ID NO: 3457087 - RNA, 23 nt, Human
ggaugguacuagggggaagugac

SEQ ID NO: 3457088 - RNA, 14 nt, Human
ggaugguccugggg

SEQ ID NO: 3457089 - RNA, 17 nt, Human
ggauggugggcuucagg

SEQ ID NO: 3457090 - RNA, 12 nt, Human
ggauggugucuc

SEQ ID NO: 3457091 - RNA, 15 nt, Human
ggaugguguucaaaa

SEQ ID NO: 3457092 - RNA, 22 nt, Human
ggaugguucccuugaugaagaa

SEQ ID NO: 3457093 - RNA, 23 nt, Human
ggaugguucccuugaugaagaag

SEQ ID NO: 3457094 - RNA, 16 nt, Human
ggauguaaacagugcc

SEQ ID NO: 3457095 - RNA, 16 nt, Human
ggauguacauuuccaa

SEQ ID NO: 3457096 - RNA, 23 nt, Human
ggauguauccaugggggcagggc

SEQ ID NO: 3457097 - RNA, 18 nt, Human
ggauguccacagaugccu

SEQ ID NO: 3457098 - RNA, 14 nt, Human
ggauguccccagca

SEQ ID NO: 3457099 - RNA, 14 nt, Human
ggaugucccugggc

SEQ ID NO: 3457100 - RNA, 19 nt, Human
ggaugucccugggccaggg

SEQ ID NO: 3457101 - RNA, 23 nt, Human
ggaugucccugggccagggucug

SEQ ID NO: 3457102 - RNA, 13 nt, Human
ggaugucuuccuu

SEQ ID NO: 3457103 - RNA, 16 nt, Human
ggaugugcugcagugc

SEQ ID NO: 3457104 - RNA, 14 nt, Human
ggaugugggcagcu

SEQ ID NO: 3457105 - RNA, 16 nt, Human
ggaugugguggcagug

SEQ ID NO: 3457106 - RNA, 18 nt, Human
ggaugugguuuucuuaag

SEQ ID NO: 3457107 - RNA, 14 nt, Human
ggauguguccugac

SEQ ID NO: 3457108 - RNA, 23 nt, Human
ggauguucagcacugucccuugc

SEQ ID NO: 3457109 - RNA, 23 nt, Human
ggauguuggccaccaggugccuu

SEQ ID NO: 3457110 - RNA, 16 nt, Human
ggauuaaccucugcac

SEQ ID NO: 3457111 - RNA, 16 nt, Human
ggauuaauaugaaaac

SEQ ID NO: 3457112 - RNA, 22 nt, Human
ggauuaaugguccugugaugcu

SEQ ID NO: 3457113 - RNA, 19 nt, Human
ggauuacaggcuccugcca

SEQ ID NO: 3457114 - RNA, 21 nt, Human
ggauuacagggaugagccacc

SEQ ID NO: 3457115 - RNA, 14 nt, Human
ggauuaguuuagaa

SEQ ID NO: 3457116 - RNA, 22 nt, Human
ggauuauucauuuaaaaugauu

SEQ ID NO: 3457117 - RNA, 16 nt, Human
ggauuauuuuuucaga

SEQ ID NO: 3457118 - RNA, 17 nt, Human
ggauuauuuuuucagac

SEQ ID NO: 3457119 - RNA, 20 nt, Human
ggauuauuuuuucagaccga

SEQ ID NO: 3457120 - RNA, 17 nt, Human
ggauucacaccccaccu

SEQ ID NO: 3457121 - RNA, 13 nt, Human
ggauucagccuuc

SEQ ID NO: 3457122 - RNA, 16 nt, Human
ggauucagccuucuuu

SEQ ID NO: 3457123 - RNA, 13 nt, Human
ggauucaggcugc

SEQ ID NO: 3457124 - RNA, 14 nt, Human
ggauucauuuccug

SEQ ID NO: 3457125 - RNA, 12 nt, Human
ggauuccaugcu

SEQ ID NO: 3457126 - RNA, 23 nt, Human
ggauucccaccaaggucuucagc

SEQ ID NO: 3457127 - RNA, 14 nt, Human
ggauuccugaccca

SEQ ID NO: 3457128 - RNA, 20 nt, Human
ggauuccugacccaggccgc

SEQ ID NO: 3457129 - RNA, 15 nt, Human
ggauucgcuugaguu

SEQ ID NO: 3457130 - RNA, 19 nt, Human
ggauucuaaauacaugcca

SEQ ID NO: 3457131 - RNA, 20 nt, Human
ggauucugaggcccugccca

SEQ ID NO: 3457132 - RNA, 18 nt, Human
ggauucugcuggccucug

SEQ ID NO: 3457133 - RNA, 19 nt, Human
ggauucugggaggaagcag

SEQ ID NO: 3457134 - RNA, 13 nt, Human
ggauucuuggccc

SEQ ID NO: 3457135 - RNA, 18 nt, Human
ggauucuuguuuugcuuc

SEQ ID NO: 3457136 - RNA, 16 nt, Human
ggauugaagcccucca

SEQ ID NO: 3457137 - RNA, 22 nt, Human
ggauugaucuucagggcuguuu

SEQ ID NO: 3457138 - RNA, 18 nt, Human
ggauugauuuuaaaaugu

SEQ ID NO: 3457139 - RNA, 19 nt, Human
ggauugcaauaucugaagc

SEQ ID NO: 3457140 - RNA, 14 nt, Human
ggauuggacaaaau

SEQ ID NO: 3457141 - RNA, 16 nt, Human
ggauuggauuauuuaa

SEQ ID NO: 3457142 - RNA, 18 nt, Human
ggauuggauuauuuaaua

SEQ ID NO: 3457143 - RNA, 18 nt, Human
ggauugggccccugccag

SEQ ID NO: 3457144 - RNA, 18 nt, Human
ggauuggggaagacugug

SEQ ID NO: 3457145 - RNA, 16 nt, Human
ggauuggggucccucu

SEQ ID NO: 3457146 - RNA, 14 nt, Human
ggauuguaguccca

SEQ ID NO: 3457147 - RNA, 20 nt, Human
ggauuguaucaaguggcaug

SEQ ID NO: 3457148 - RNA, 13 nt, Human
ggauuguccccga

SEQ ID NO: 3457149 - RNA, 15 nt, Human
ggauuguuccuguca

SEQ ID NO: 3457150 - RNA, 13 nt, Human
ggauuguuuauac

SEQ ID NO: 3457151 - RNA, 16 nt, Human
ggauuuaauuugauau

SEQ ID NO: 3457152 - RNA, 16 nt, Human
ggauuuauaaaugcua

SEQ ID NO: 3457153 - RNA, 18 nt, Human
ggauuuauaaaugcuauu

SEQ ID NO: 3457154 - RNA, 20 nt, Human
ggauuucaugauuucauuuc

SEQ ID NO: 3457155 - RNA, 14 nt, Human
ggauuucguggguc

SEQ ID NO: 3457156 - RNA, 13 nt, Human
ggauuucuuaggg

SEQ ID NO: 3457157 - RNA, 19 nt, Human
ggauuuggguuggaaguga

SEQ ID NO: 3457158 - RNA, 15 nt, Human
ggauuuguucucugu

SEQ ID NO: 3457159 - RNA, 15 nt, Human
ggauuuuaaacuaga

SEQ ID NO: 3457160 - RNA, 23 nt, Human
ggauuuuaaacuagaugaccuca

SEQ ID NO: 3457161 - RNA, 22 nt, Human
ggauuuuaacaaaagcaagacu

SEQ ID NO: 3457162 - RNA, 16 nt, Human
ggauuuuauguugaca

SEQ ID NO: 3457163 - RNA, 12 nt, Human
ggauuuuuacca

SEQ ID NO: 3457164 - RNA, 13 nt, Human
ggauuuuugaguc

SEQ ID NO: 3457165 - RNA, 14 nt, Human
ggauuuuugucuug

SEQ ID NO: 3457166 - RNA, 16 nt, Human
ggauuuuugucuugug

SEQ ID NO: 3457167 - RNA, 12 nt, Human
ggcaaaacucua

SEQ ID NO: 3457168 - RNA, 11 nt, Human
ggcaaaagcuu

SEQ ID NO: 3457169 - RNA, 23 nt, Human
ggcaaaaggaucuuuguggccaa

SEQ ID NO: 3457170 - RNA, 16 nt, Human
ggcaaaauccuugcuu

SEQ ID NO: 3457171 - RNA, 23 nt, Human
ggcaaaaugagagggcaguguuu

SEQ ID NO: 3457172 - RNA, 13 nt, Human
ggcaaaauugcaa

SEQ ID NO: 3457173 - RNA, 16 nt, Human
ggcaaaggaaggugga

SEQ ID NO: 3457174 - RNA, 17 nt, Human
ggcaaaggaagguggau

SEQ ID NO: 3457175 - RNA, 21 nt, Human
ggcaaagggagcagaacugaa

SEQ ID NO: 3457176 - RNA, 16 nt, Human
ggcaaaucaguuacua

SEQ ID NO: 3457177 - RNA, 11 nt, Human
ggcaaaucugc

SEQ ID NO: 3457178 - RNA, 21 nt, Human
ggcaaaugacaugcacugacc

SEQ ID NO: 3457179 - RNA, 13 nt, Human
ggcaaaugacuuu

SEQ ID NO: 3457180 - RNA, 17 nt, Human
ggcaaaugccagggccc

SEQ ID NO: 3457181 - RNA, 18 nt, Human
ggcaaauucuuuugaauu

SEQ ID NO: 3457182 - RNA, 20 nt, Human
ggcaacaaagugagacucca

SEQ ID NO: 3457183 - RNA, 20 nt, Human
ggcaacacagcgagacuccg

SEQ ID NO: 3457184 - RNA, 19 nt, Human
ggcaacagaucuggaaccu

SEQ ID NO: 3457185 - RNA, 20 nt, Human
ggcaaccacaggcagcauuu

SEQ ID NO: 3457186 - RNA, 22 nt, Human
ggcaaccccaguucugcuccuc

SEQ ID NO: 3457187 - RNA, 15 nt, Human
ggcaaccuugucucu

SEQ ID NO: 3457188 - RNA, 17 nt, Human
ggcaacgaagaaaaaaa

SEQ ID NO: 3457189 - RNA, 18 nt, Human
ggcaacuaagcagucccu

SEQ ID NO: 3457190 - RNA, 19 nt, Human
ggcaacuaagcagucccug

SEQ ID NO: 3457191 - RNA, 13 nt, Human
ggcaacugaggca

SEQ ID NO: 3457192 - RNA, 15 nt, Human
ggcaacugaggcaga

SEQ ID NO: 3457193 - RNA, 20 nt, Human
ggcaacugaggcagacagca

SEQ ID NO: 3457194 - RNA, 18 nt, Human
ggcaacugcauuggcuuu

SEQ ID NO: 3457195 - RNA, 19 nt, Human
ggcaacugcauuggcuuug

SEQ ID NO: 3457196 - RNA, 13 nt, Human
ggcaacugcugau

SEQ ID NO: 3457197 - RNA, 21 nt, Human
ggcaacuucaguccugggaga

SEQ ID NO: 3457198 - RNA, 19 nt, Human
ggcaagaaaagaguuaagg

SEQ ID NO: 3457199 - RNA, 17 nt, Human
ggcaagacuuuucuuug

SEQ ID NO: 3457200 - RNA, 23 nt, Human
ggcaagagaaucgcuugaaccca

SEQ ID NO: 3457201 - RNA, 12 nt, Human
ggcaagauuuuc

SEQ ID NO: 3457202 - RNA, 19 nt, Human
ggcaagauuuuccuuuuuu

SEQ ID NO: 3457203 - RNA, 12 nt, Human
ggcaaggaaaaa

SEQ ID NO: 3457204 - RNA, 12 nt, Human
ggcaaggcaggu

SEQ ID NO: 3457205 - RNA, 15 nt, Human
ggcaaggggugccug

SEQ ID NO: 3457206 - RNA, 23 nt, Human
ggcaagucccugacucucuguga

SEQ ID NO: 3457207 - RNA, 13 nt, Human
ggcaagugauuga

SEQ ID NO: 3457208 - RNA, 13 nt, Human
ggcaagugugggc

SEQ ID NO: 3457209 - RNA, 17 nt, Human
ggcaauaaaagcccagg

SEQ ID NO: 3457210 - RNA, 19 nt, Human
ucuccaccugccagggaca

SEQ ID NO: 3457211 - RNA, 19 nt, Human
ggcagacagcagcucaggc

SEQ ID NO: 3457212 - RNA, 18 nt, Human
ggcagacucuuuaugcuu

SEQ ID NO: 3457213 - RNA, 20 nt, Human
ggcagacucuuuaugcuugc

SEQ ID NO: 3457214 - RNA, 22 nt, Human
ggcagacucuuuaugcuugcaa

SEQ ID NO: 3457215 - RNA, 19 nt, Human
ggcagagagcggucucagg

SEQ ID NO: 3457216 - RNA, 13 nt, Human
ggcagagcacagc

SEQ ID NO: 3457217 - RNA, 12 nt, Human
ggcagagcagag

SEQ ID NO: 3457218 - RNA, 15 nt, Human
ggcagagcagagacc

SEQ ID NO: 3457219 - RNA, 13 nt, Human
ggcagagccagga

SEQ ID NO: 3457220 - RNA, 16 nt, Human
ggcagagcccaaggga

SEQ ID NO: 3457221 - RNA, 11 nt, Human
ggcagagcugg

SEQ ID NO: 3457222 - RNA, 13 nt, Human
ggcagagcuggug

SEQ ID NO: 3457223 - RNA, 18 nt, Human
ggcagagcuggugcggcu

SEQ ID NO: 3457224 - RNA, 15 nt, Human
ggcagaggacagauc

SEQ ID NO: 3457225 - RNA, 15 nt, Human
ggcagaggcaguacc

SEQ ID NO: 3457226 - RNA, 14 nt, Human
ucuccugacuuuua

SEQ ID NO: 3457227 - RNA, 15 nt, Human
ucuccugauuauuua

SEQ ID NO: 3457228 - RNA, 13 nt, Human
ucuccugcaugca

SEQ ID NO: 3457229 - RNA, 18 nt, Human
ucuccugccucagccucc

SEQ ID NO: 3457230 - RNA, 22 nt, Human
ucuccugccucagccucccaaa

SEQ ID NO: 3457231 - RNA, 20 nt, Human
ucuccugccuguagcaguga

SEQ ID NO: 3457232 - RNA, 22 nt, Human
ucuccugccuguagcagugaga

SEQ ID NO: 3457233 - RNA, 18 nt, Human
ucuccugccuuccuccug

SEQ ID NO: 3457234 - RNA, 21 nt, Human
ucuccugcguguucucagagg

SEQ ID NO: 3457235 - RNA, 20 nt, Human
ucuccugcugcucccucaga

SEQ ID NO: 3457236 - RNA, 13 nt, Human
ucuccuggcuucc

SEQ ID NO: 3457237 - RNA, 14 nt, Human
ucuccugggcagcu

SEQ ID NO: 3457238 - RNA, 18 nt, Human
ucuccugggcagcugccu

SEQ ID NO: 3457239 - RNA, 21 nt, Human
ucuccugggcagcugccuccc

SEQ ID NO: 3457240 - RNA, 13 nt, Human
ucuccugggcccc

SEQ ID NO: 3457241 - RNA, 23 nt, Human
ucuccugggccccucccuaccuc

SEQ ID NO: 3457242 - RNA, 19 nt, Human
ucuccuguaagccaaagaa

SEQ ID NO: 3457243 - RNA, 13 nt, Human
ucuccuguaccuc

SEQ ID NO: 3457244 - RNA, 17 nt, Human
ucuccuguaccucuuga

SEQ ID NO: 3457245 - RNA, 15 nt, Human
ucuccuguccucccu

SEQ ID NO: 3457246 - RNA, 18 nt, Human
ucuccugugcccacaucc

SEQ ID NO: 3457247 - RNA, 17 nt, Human
ucuccuguuuuucuggg

SEQ ID NO: 3457248 - RNA, 19 nt, Human
ucuccuguuuuucugggug

SEQ ID NO: 3457249 - RNA, 22 nt, Human
ucuccuuaagcugcagagauuu

SEQ ID NO: 3457250 - RNA, 21 nt, Human
ucuccuuagaaguggaaguag

SEQ ID NO: 3457251 - RNA, 17 nt, Human
ucuccuuagucuucuca

SEQ ID NO: 3457252 - RNA, 15 nt, Human
ucuccuucaccuuug

SEQ ID NO: 3457253 - RNA, 16 nt, Human
ucuccuucaccuuugu

SEQ ID NO: 3457254 - RNA, 18 nt, Human
ucuccuucaccuuugucc

SEQ ID NO: 3457255 - RNA, 22 nt, Human
ucuccuuccaacugcugcccca

SEQ ID NO: 3457256 - RNA, 22 nt, Human
ucuccuuccaguauaaccagcu

SEQ ID NO: 3457257 - RNA, 13 nt, Human
ucuccuuccugug

SEQ ID NO: 3457258 - RNA, 16 nt, Human
ucuccuugaguguaug

SEQ ID NO: 3457259 - RNA, 18 nt, Human
ucuccuugauaacagcua

SEQ ID NO: 3457260 - RNA, 17 nt, Human
ucuccuugguuauauuu

SEQ ID NO: 3457261 - RNA, 14 nt, Human
ucuccuuguggccu

SEQ ID NO: 3457262 - RNA, 17 nt, Human
ucuccuuuaauuguaaa

SEQ ID NO: 3457263 - RNA, 15 nt, Human
ucuccuuucuuucua

SEQ ID NO: 3457264 - RNA, 17 nt, Human
ucuccuuugauaaaaua

SEQ ID NO: 3457265 - RNA, 16 nt, Human
ucuccuuugcacugag

SEQ ID NO: 3457266 - RNA, 22 nt, Human
ucuccuuugcugaggccuccag

SEQ ID NO: 3457267 - RNA, 15 nt, Human
ucuccuuuguauucu

SEQ ID NO: 3457268 - RNA, 17 nt, Human
ucuccuuuuccucucuc

SEQ ID NO: 3457269 - RNA, 12 nt, Human
ucuccuuuucuu

SEQ ID NO: 3457270 - RNA, 14 nt, Human
ucuccuuuucuuuu

SEQ ID NO: 3457271 - RNA, 19 nt, Human
ucuccuuuucuuuuguuac

SEQ ID NO: 3457272 - RNA, 14 nt, Human
ucucgagcgcccug

SEQ ID NO: 3457273 - RNA, 17 nt, Human
ucucgagcgcccugcag

SEQ ID NO: 3457274 - RNA, 19 nt, Human
ucucgagcgcccugcagac

SEQ ID NO: 3457275 - RNA, 18 nt, Human
ucucgcugaugcugggcu

SEQ ID NO: 3457276 - RNA, 19 nt, Human
ucucgcugaugcugggcug

SEQ ID NO: 3457277 - RNA, 20 nt, Human
ucucgcugaugcugggcugg

SEQ ID NO: 3457278 - RNA, 22 nt, Human
ucucgcugaugcugggcugggu

SEQ ID NO: 3457279 - RNA, 20 nt, Human
ucucggaucaggcucccagg

SEQ ID NO: 3457280 - RNA, 18 nt, Human
ucucggccuucacaaucu

SEQ ID NO: 3457281 - RNA, 16 nt, Human
ucucggcucagugcaa

SEQ ID NO: 3457282 - RNA, 17 nt, Human
ucucgguuccacguccc

SEQ ID NO: 3457283 - RNA, 14 nt, Human
ucucguauagaagu

SEQ ID NO: 3457284 - RNA, 23 nt, Human
ucucguguuauuuuaaucucaga

SEQ ID NO: 3457285 - RNA, 14 nt, Human
ucucguuugugauu

SEQ ID NO: 3457286 - RNA, 19 nt, Human
ucucuaaagaguuuauuuu

SEQ ID NO: 3457287 - RNA, 14 nt, Human
ucucuaaccuccuu

SEQ ID NO: 3457288 - RNA, 15 nt, Human
ucucuaagugggcau

SEQ ID NO: 3457289 - RNA, 18 nt, Human
ucucuaaguuccacugag

SEQ ID NO: 3457290 - RNA, 14 nt, Human
ucucuaauaauaaa

SEQ ID NO: 3457291 - RNA, 17 nt, Human
ucucuaauaauaaauag

SEQ ID NO: 3457292 - RNA, 15 nt, Human
ucucuaauucuauua

SEQ ID NO: 3457293 - RNA, 18 nt, Human
ucucuaauucuuccuuug

SEQ ID NO: 3457294 - RNA, 15 nt, Human
ucucuacaaaaagca

SEQ ID NO: 3457295 - RNA, 20 nt, Human
ucucuacagacuucuccaga

SEQ ID NO: 3457296 - RNA, 19 nt, Human
ucucuacagaugucccauu

SEQ ID NO: 3457297 - RNA, 12 nt, Human
ucucuacccagc

SEQ ID NO: 3457298 - RNA, 19 nt, Human
ucucuacccaucuuaaaaa

SEQ ID NO: 3457299 - RNA, 16 nt, Human
ucucuaccuucucccc

SEQ ID NO: 3457300 - RNA, 18 nt, Human
ucucuaccuucuccccag

SEQ ID NO: 3457301 - RNA, 19 nt, Human
ucucuaccuucuccccagc

SEQ ID NO: 3457302 - RNA, 20 nt, Human
ucucuacuccuaccucagcc

SEQ ID NO: 3457303 - RNA, 21 nt, Human
ucucuacuccuaccucagccu

SEQ ID NO: 3457304 - RNA, 24 nt, Human
ucucuagcuggugguuucacggug

SEQ ID NO: 3457305 - RNA, 22 nt, Human
ucucuaggaccaugguuaagag

SEQ ID NO: 3457306 - RNA, 14 nt, Human
ucucuaggcugggg

SEQ ID NO: 3457307 - RNA, 19 nt, Human
ucucuagggaaggccaccu

SEQ ID NO: 3457308 - RNA, 20 nt, Human
ucucuagggaaggccaccug

SEQ ID NO: 3457309 - RNA, 15 nt, Human
ucucuaguaguuaaa

SEQ ID NO: 3457310 - RNA, 16 nt, Human
ucucuauaaaaaauau

SEQ ID NO: 3457311 - RNA, 16 nt, Human
ucucuauagcaccagg

SEQ ID NO: 3457312 - RNA, 15 nt, Human
ucucuaucauuaaag

SEQ ID NO: 3457313 - RNA, 13 nt, Human
ucucuaucauuua

SEQ ID NO: 3457314 - RNA, 15 nt, Human
ucucuauguaucaaa

SEQ ID NO: 3457315 - RNA, 14 nt, Human
ucucuauuccccac

SEQ ID NO: 3457316 - RNA, 14 nt, Human
ucucuauuuaaauu

SEQ ID NO: 3457317 - RNA, 15 nt, Human
ucucuauuuaaauuc

SEQ ID NO: 3457318 - RNA, 13 nt, Human
ucucucaacacca

SEQ ID NO: 3457319 - RNA, 20 nt, Human
ucucucaauaugcuuacaaa

SEQ ID NO: 3457320 - RNA, 17 nt, Human
ucucucacagacaggac

SEQ ID NO: 3457321 - RNA, 13 nt, Human
ucucucacuccuu

SEQ ID NO: 3457322 - RNA, 22 nt, Human
ucucucacuuguuuuauuuaac

SEQ ID NO: 3457323 - RNA, 20 nt, Human
ucucucagaagggaggcugg

SEQ ID NO: 3457324 - RNA, 14 nt, Human
ucucucaucucuua

SEQ ID NO: 3457325 - RNA, 22 nt, Human
ucucucaucucuuagcuccccu

SEQ ID NO: 3457326 - RNA, 14 nt, Human
ucucucauuugugu

SEQ ID NO: 3457327 - RNA, 18 nt, Human
ucucuccaaggugugccc

SEQ ID NO: 3457328 - RNA, 17 nt, Human
ucucuccacuuucagcu

SEQ ID NO: 3457329 - RNA, 13 nt, Human
ucucuccagcccc

SEQ ID NO: 3457330 - RNA, 15 nt, Human
ucucuccagccccug

SEQ ID NO: 3457331 - RNA, 19 nt, Human
ucucuccagccccuggaug

SEQ ID NO: 3457332 - RNA, 15 nt, Human
ucucuccagcugacu

SEQ ID NO: 3457333 - RNA, 11 nt, Human
ucucuccagga

SEQ ID NO: 3457334 - RNA, 13 nt, Human
ucucuccaggauc

SEQ ID NO: 3457335 - RNA, 20 nt, Human
ucucuccaucagaggacacc

SEQ ID NO: 3457336 - RNA, 22 nt, Human
ucucucccaggggcuggcuuca

SEQ ID NO: 3457337 - RNA, 21 nt, Human
ucucucccauggagccccagc

SEQ ID NO: 3457338 - RNA, 20 nt, Human
ucucuccccucaaagucugc

SEQ ID NO: 3457339 - RNA, 21 nt, Human
ucucuccccucaaagucugca

SEQ ID NO: 3457340 - RNA, 21 nt, Human
ucucucccuccccugccauuu

SEQ ID NO: 3457341 - RNA, 20 nt, Human
ucucucccucccuuugaaau

SEQ ID NO: 3457342 - RNA, 14 nt, Human
ucucuccucagacu

SEQ ID NO: 3457343 - RNA, 16 nt, Human
ucucuccuguaccucu

SEQ ID NO: 3457344 - RNA, 20 nt, Human
ucucuccuguaccucuugag

SEQ ID NO: 3457345 - RNA, 13 nt, Human
ucucuccugucca

SEQ ID NO: 3457346 - RNA, 14 nt, Human
ucucuccuguccuc

SEQ ID NO: 3457347 - RNA, 15 nt, Human
ucucuccuguccucc

SEQ ID NO: 3457348 - RNA, 13 nt, Human
ucucuccuuuucu

SEQ ID NO: 3457349 - RNA, 15 nt, Human
ucucucggcucccca

SEQ ID NO: 3457350 - RNA, 20 nt, Human
ucucucuacuccuaccucag

SEQ ID NO: 3457351 - RNA, 22 nt, Human
ucucucuacuccuaccucagcc

SEQ ID NO: 3457352 - RNA, 13 nt, Human
ucucucuaugccu

SEQ ID NO: 3457353 - RNA, 14 nt, Human
ucucucuauuacca

SEQ ID NO: 3457354 - RNA, 22 nt, Human
ucucucucacucccucccuuuc

SEQ ID NO: 3457355 - RNA, 14 nt, Human
ucucucuccagucu

SEQ ID NO: 3457356 - RNA, 14 nt, Human
ucuagaugauuuuu

SEQ ID NO: 3457357 - RNA, 21 nt, Human
ucuagauguuuauucuucuag

SEQ ID NO: 3457358 - RNA, 23 nt, Human
ucuagauguuuauucuucuagag

SEQ ID NO: 3457359 - RNA, 16 nt, Human
ucuagauuaauacucu

SEQ ID NO: 3457360 - RNA, 17 nt, Human
ucuagauuaccaugaag

SEQ ID NO: 3457361 - RNA, 13 nt, Human
ucuagauucaaag

SEQ ID NO: 3457362 - RNA, 18 nt, Human
ucuagauucaaagguucu

SEQ ID NO: 3457363 - RNA, 23 nt, Human
ucuagauucaaagguucuagguu

SEQ ID NO: 3457364 - RNA, 11 nt, Human
ucuagauucuc

SEQ ID NO: 3457365 - RNA, 21 nt, Human
ucuagauucucuggcuguaag

SEQ ID NO: 3457366 - RNA, 15 nt, Human
ucuagauugagagaa

SEQ ID NO: 3457367 - RNA, 19 nt, Human
ucuagauuuuguuuugcuu

SEQ ID NO: 3457368 - RNA, 18 nt, Human
ucuagcacucauuuucua

SEQ ID NO: 3457369 - RNA, 15 nt, Human
ucuagcacuggccug

SEQ ID NO: 3457370 - RNA, 18 nt, Human
ucuagcacuuccuugcca

SEQ ID NO: 3457371 - RNA, 16 nt, Human
ucuagcagcaccuccu

SEQ ID NO: 3457372 - RNA, 12 nt, Human
ucuagcaugaag

SEQ ID NO: 3457373 - RNA, 20 nt, Human
ucuagcaugccaacaagaau

SEQ ID NO: 3457374 - RNA, 22 nt, Human
ucuagcaugccaacaagaaugc

SEQ ID NO: 3457375 - RNA, 19 nt, Human
ucuagcauuagguauaucu

SEQ ID NO: 3457376 - RNA, 16 nt, Human
ucuagccaaaugguuu

SEQ ID NO: 3457377 - RNA, 13 nt, Human
ucuagcccaugga

SEQ ID NO: 3457378 - RNA, 23 nt, Human
ucuagcgcaguuuuuuuuuucuu

SEQ ID NO: 3457379 - RNA, 11 nt, Human
ucuagcuguug

SEQ ID NO: 3457380 - RNA, 18 nt, Human
ucuagcuguugagcuguu

SEQ ID NO: 3457381 - RNA, 14 nt, Human
ucuagcuuaucuac

SEQ ID NO: 3457382 - RNA, 22 nt, Human
ucuagcuuuuuaauuaagcaaa

SEQ ID NO: 3457383 - RNA, 22 nt, Human
ucuaggaaauauacuuuuacaa

SEQ ID NO: 3457384 - RNA, 23 nt, Human
ucuaggaagaauuuuaaaaauga

SEQ ID NO: 3457385 - RNA, 16 nt, Human
ucuaggaagacuuugg

SEQ ID NO: 3457386 - RNA, 19 nt, Human
ucuaggaagacuuuggaaa

SEQ ID NO: 3457387 - RNA, 21 nt, Human
ucuaggaagacuuuggaaaga

SEQ ID NO: 3457388 - RNA, 21 nt, Human
ucuaggacacaguuccuggga

SEQ ID NO: 3457389 - RNA, 23 nt, Human
ucuaggacugaauuaugaaacuu

SEQ ID NO: 3457390 - RNA, 23 nt, Human
ucuaggauagcuaacuguaaauc

SEQ ID NO: 3457391 - RNA, 21 nt, Human
ucuaggcacuguaguucuaag

SEQ ID NO: 3457392 - RNA, 24 nt, Human
ucuaggcacuguaguucuaagacu

SEQ ID NO: 3457393 - RNA, 20 nt, Human
ucuaggccuccuggcccagg

SEQ ID NO: 3457394 - RNA, 14 nt, Human
ucuaggccucucca

SEQ ID NO: 3457395 - RNA, 17 nt, Human
ucuaggcucugccuucg

SEQ ID NO: 3457396 - RNA, 13 nt, Human
ucuagggaaauga

SEQ ID NO: 3457397 - RNA, 22 nt, Human
ucuagggaaggccaccugcagg

SEQ ID NO: 3457398 - RNA, 16 nt, Human
ucuagggaccccuccu

SEQ ID NO: 3457399 - RNA, 23 nt, Human
ucuagggauagucaccuuuuaaa

SEQ ID NO: 3457400 - RNA, 23 nt, Human
ucuaggguacauggugcugggag

SEQ ID NO: 3457401 - RNA, 18 nt, Human
ucuaggguugcuggagcc

SEQ ID NO: 3457402 - RNA, 15 nt, Human
ucuagguaaauuaca

SEQ ID NO: 3457403 - RNA, 20 nt, Human
ucuaggucaaggccuguccc

SEQ ID NO: 3457404 - RNA, 23 nt, Human
ucuaggugcccuuggaggccagc

SEQ ID NO: 3457405 - RNA, 17 nt, Human
ucuagguggaguugaaa

SEQ ID NO: 3457406 - RNA, 20 nt, Human
ucuagguggcaaggcugugc

SEQ ID NO: 3457407 - RNA, 23 nt, Human
ucuagguucuaaaaauugugauc

SEQ ID NO: 3457408 - RNA, 15 nt, Human
ucuagguuucaaaga

SEQ ID NO: 3457409 - RNA, 17 nt, Human
ucuagguuucaaagaug

SEQ ID NO: 3457410 - RNA, 20 nt, Human
ucuagguuucaaagaugcug

SEQ ID NO: 3457411 - RNA, 17 nt, Human
ucuagguuuuacagauu

SEQ ID NO: 3457412 - RNA, 19 nt, Human
ucuaguaauaaagacucua

SEQ ID NO: 3457413 - RNA, 21 nt, Human
ucuaguaauauauuuaaaggg

SEQ ID NO: 3457414 - RNA, 16 nt, Human
ucuaguagcugaaaug

SEQ ID NO: 3457415 - RNA, 19 nt, Human
ucuaguagcugaaaugcaa

SEQ ID NO: 3457416 - RNA, 15 nt, Human
ucuaguaguuaaaaa

SEQ ID NO: 3457417 - RNA, 19 nt, Human
ucuaguaguuguucugaaa

SEQ ID NO: 3457418 - RNA, 17 nt, Human
ucuaguaugaaauuaua

SEQ ID NO: 3457419 - RNA, 14 nt, Human
ucuagucaaugaca

SEQ ID NO: 3457420 - RNA, 22 nt, Human
ucuagucuccuuugcacugagg

SEQ ID NO: 3457421 - RNA, 18 nt, Human
ucuagucucucuggggcc

SEQ ID NO: 3457422 - RNA, 14 nt, Human
ucuagucuuggcca

SEQ ID NO: 3457423 - RNA, 11 nt, Human
ucuagugaaug

SEQ ID NO: 3457424 - RNA, 14 nt, Human
ucuagugcagcuga

SEQ ID NO: 3457425 - RNA, 18 nt, Human
ucuagugccuucuaaagg

SEQ ID NO: 3457426 - RNA, 13 nt, Human
ucuagugcugcug

SEQ ID NO: 3457427 - RNA, 22 nt, Human
ucuaguggucuuuguaagagug

SEQ ID NO: 3457428 - RNA, 13 nt, Human
ucuaguguaucaa

SEQ ID NO: 3457429 - RNA, 14 nt, Human
ucuaguguuuucaa

SEQ ID NO: 3457430 - RNA, 18 nt, Human
ucuaguguuuucaauuuu

SEQ ID NO: 3457431 - RNA, 14 nt, Human
ucuaguuauuuauu

SEQ ID NO: 3457432 - RNA, 21 nt, Human
ucuaguuccugaugacccagg

SEQ ID NO: 3457433 - RNA, 14 nt, Human
ucuaguucugccag

SEQ ID NO: 3457434 - RNA, 18 nt, Human
ucuaguugcuuguaaaau

SEQ ID NO: 3457435 - RNA, 23 nt, Human
ucuaguuguuugauucagacagc

SEQ ID NO: 3457436 - RNA, 23 nt, Human
ggccauccggcccccagagcgcc

SEQ ID NO: 3457437 - RNA, 15 nt, Human
ggccauccuguccca

SEQ ID NO: 3457438 - RNA, 17 nt, Human
ggccaucgguccugucu

SEQ ID NO: 3457439 - RNA, 19 nt, Human
ggccaucucuggaugccug

SEQ ID NO: 3457440 - RNA, 13 nt, Human
ggccaucugcucc

SEQ ID NO: 3457441 - RNA, 17 nt, Human
ggccaucugcuccugga

SEQ ID NO: 3457442 - RNA, 16 nt, Human
ggccaucuggagagcc

SEQ ID NO: 3457443 - RNA, 22 nt, Human
ggccaucugggcuccuccaggg

SEQ ID NO: 3457444 - RNA, 17 nt, Human
ggccaugaacuuugucc

SEQ ID NO: 3457445 - RNA, 16 nt, Human
ggccaugacccugccu

SEQ ID NO: 3457446 - RNA, 22 nt, Human
ggccaugagcuccagaccccca

SEQ ID NO: 3457447 - RNA, 14 nt, Human
ggccaugccucagc

SEQ ID NO: 3457448 - RNA, 13 nt, Human
ggccaugcuccuc

SEQ ID NO: 3457449 - RNA, 17 nt, Human
ggccaugcuccucuucc

SEQ ID NO: 3457450 - RNA, 21 nt, Human
ggccaugcuccucuuccccag

SEQ ID NO: 3457451 - RNA, 13 nt, Human
ggccaugcugagg

SEQ ID NO: 3457452 - RNA, 22 nt, Human
ggccaugcugaggccugggccg

SEQ ID NO: 3457453 - RNA, 21 nt, Human
ggccauggagaaagcugacuu

SEQ ID NO: 3457454 - RNA, 17 nt, Human
ggccauggagagcugga

SEQ ID NO: 3457455 - RNA, 21 nt, Human
ggccauggagagcuggagccu

SEQ ID NO: 3457456 - RNA, 13 nt, Human
ggccauggcagaa

SEQ ID NO: 3457457 - RNA, 14 nt, Human
ggccauggccugca

SEQ ID NO: 3457458 - RNA, 22 nt, Human
ggccaugggacagggaggacgc

SEQ ID NO: 3457459 - RNA, 22 nt, Human
ggccaugggaggccuuucccua

SEQ ID NO: 3457460 - RNA, 13 nt, Human
ggccauguccaaa

SEQ ID NO: 3457461 - RNA, 16 nt, Human
ggccauguccaaagag

SEQ ID NO: 3457462 - RNA, 13 nt, Human
ggccauguccuua

SEQ ID NO: 3457463 - RNA, 23 nt, Human
ggccaugugcauaguuucuuuau

SEQ ID NO: 3457464 - RNA, 13 nt, Human
ggccauguuccaa

SEQ ID NO: 3457465 - RNA, 16 nt, Human
ggccauguugugccuc

SEQ ID NO: 3457466 - RNA, 21 nt, Human
ggccauguugugccucccugg

SEQ ID NO: 3457467 - RNA, 22 nt, Human
ggccauguugugccucccuggu

SEQ ID NO: 3457468 - RNA, 20 nt, Human
ggccauucugccgcccccuc

SEQ ID NO: 3457469 - RNA, 20 nt, Human
ggccauucuuucccaacacc

SEQ ID NO: 3457470 - RNA, 20 nt, Human
ggccauuugcaauaacagcu

SEQ ID NO: 3457471 - RNA, 21 nt, Human
ggcccaaaggccuuggacaac

SEQ ID NO: 3457472 - RNA, 23 nt, Human
ggcccaacacaauucuucuucca

SEQ ID NO: 3457473 - RNA, 20 nt, Human
ggcccaaccaccagaugaga

SEQ ID NO: 3457474 - RNA, 17 nt, Human
ggcccaacccugucugu

SEQ ID NO: 3457475 - RNA, 13 nt, Human
ggcccaaggcggc

SEQ ID NO: 3457476 - RNA, 21 nt, Human
ggcccaauccaagguggggug

SEQ ID NO: 3457477 - RNA, 13 nt, Human
ggcccacacacag

SEQ ID NO: 3457478 - RNA, 14 nt, Human
ggcccacagcuccc

SEQ ID NO: 3457479 - RNA, 15 nt, Human
ggcccacagcuccca

SEQ ID NO: 3457480 - RNA, 19 nt, Human
ggcccacagcucccacccc

SEQ ID NO: 3457481 - RNA, 20 nt, Human
ggcccacagcucccacccca

SEQ ID NO: 3457482 - RNA, 23 nt, Human
ggcccacaggaggcaagcaagcu

SEQ ID NO: 3457483 - RNA, 14 nt, Human
ggcccaccaggguc

SEQ ID NO: 3457484 - RNA, 20 nt, Human
ggcccacccaagcaggaggc

SEQ ID NO: 3457485 - RNA, 18 nt, Human
ggcccaccccacccacuu

SEQ ID NO: 3457486 - RNA, 21 nt, Human
ggcccacccugcuuggcccag

SEQ ID NO: 3457487 - RNA, 23 nt, Human
ggcccacccugcuuggcccaggg

SEQ ID NO: 3457488 - RNA, 12 nt, Human
ggcccaccuggc

SEQ ID NO: 3457489 - RNA, 15 nt, Human
ggcccaccuggccac

SEQ ID NO: 3457490 - RNA, 22 nt, Human
ggcccacgccuguaaucccagc

SEQ ID NO: 3457491 - RNA, 22 nt, Human
ggcccacguagggcggcacuca

SEQ ID NO: 3457492 - RNA, 23 nt, Human
ggcccacugugccucagagacca

SEQ ID NO: 3457493 - RNA, 11 nt, Human
ggcccagagag

SEQ ID NO: 3457494 - RNA, 22 nt, Human
ggcccagagagaagagccccac

SEQ ID NO: 3457495 - RNA, 16 nt, Human
ggcccagagcccagcu

SEQ ID NO: 3457496 - RNA, 18 nt, Human
ggcccagagcccagcucc

SEQ ID NO: 3457497 - RNA, 22 nt, Human
ggcccagaggagcugggagccg

SEQ ID NO: 3457498 - RNA, 19 nt, Human
ggcccagagggccugcaag

SEQ ID NO: 3457499 - RNA, 20 nt, Human
ucuggacugaagccugcagg

SEQ ID NO: 3457500 - RNA, 14 nt, Human
ucuggacugacagc

SEQ ID NO: 3457501 - RNA, 14 nt, Human
ucuggacuggcuag

SEQ ID NO: 3457502 - RNA, 15 nt, Human
ucuggacuggcuaga

SEQ ID NO: 3457503 - RNA, 22 nt, Human
ucuggacuguggguuugugggg

SEQ ID NO: 3457504 - RNA, 22 nt, Human
ucuggacuuucucuaauaauaa

SEQ ID NO: 3457505 - RNA, 22 nt, Human
ucuggagaagcagugagccgca

SEQ ID NO: 3457506 - RNA, 19 nt, Human
ucuggagaagcucccagga

SEQ ID NO: 3457507 - RNA, 20 nt, Human
ucuggagaagcucccaggaa

SEQ ID NO: 3457508 - RNA, 12 nt, Human
ucuggagacagc

SEQ ID NO: 3457509 - RNA, 16 nt, Human
ucuggagacagcccca

SEQ ID NO: 3457510 - RNA, 18 nt, Human
ucuggagacagccccaga

SEQ ID NO: 3457511 - RNA, 24 nt, Human
ucuggagacagccccagagcaggg

SEQ ID NO: 3457512 - RNA, 20 nt, Human
ucuggagaccagggagccuu

SEQ ID NO: 3457513 - RNA, 14 nt, Human
ucuggagagaacag

SEQ ID NO: 3457514 - RNA, 14 nt, Human
ucuggagagcuaga

SEQ ID NO: 3457515 - RNA, 22 nt, Human
ucuggagagcuagaaccuggag

SEQ ID NO: 3457516 - RNA, 20 nt, Human
ucuggagagguuauagguca

SEQ ID NO: 3457517 - RNA, 12 nt, Human
ucuggagcccuu

SEQ ID NO: 3457518 - RNA, 13 nt, Human
ucuggagcccuug

SEQ ID NO: 3457519 - RNA, 14 nt, Human
ucuggagcuguccg

SEQ ID NO: 3457520 - RNA, 17 nt, Human
ucuggaggaccugcccg

SEQ ID NO: 3457521 - RNA, 16 nt, Human
ucuggaggccucuggg

SEQ ID NO: 3457522 - RNA, 17 nt, Human
ucuggaggccucugggc

SEQ ID NO: 3457523 - RNA, 21 nt, Human
ucuggaggccuuccagcugcu

SEQ ID NO: 3457524 - RNA, 22 nt, Human
ucuggaggccuuccagcugcug

SEQ ID NO: 3457525 - RNA, 16 nt, Human
ucuggagggaaacacc

SEQ ID NO: 3457526 - RNA, 19 nt, Human
ucuggagucuccagugguu

SEQ ID NO: 3457527 - RNA, 23 nt, Human
ucuggauaacuuccacagggucc

SEQ ID NO: 3457528 - RNA, 21 nt, Human
ucuggauaggagccugcuggu

SEQ ID NO: 3457529 - RNA, 18 nt, Human
ucuggaugcauuucucug

SEQ ID NO: 3457530 - RNA, 18 nt, Human
ucuggauggcaccagagg

SEQ ID NO: 3457531 - RNA, 19 nt, Human
ucuggauggcaccagaggc

SEQ ID NO: 3457532 - RNA, 18 nt, Human
ucuggauggugugccuuc

SEQ ID NO: 3457533 - RNA, 22 nt, Human
ucuggauggugugccuuccaga

SEQ ID NO: 3457534 - RNA, 12 nt, Human
ucuggauuauau

SEQ ID NO: 3457535 - RNA, 13 nt, Human
ucuggauucaaau

SEQ ID NO: 3457536 - RNA, 21 nt, Human
ucuggauucccaggaugagca

SEQ ID NO: 3457537 - RNA, 21 nt, Human
ucuggauucugaaucucaaga

SEQ ID NO: 3457538 - RNA, 21 nt, Human
ucuggcaaagcuuuuagaaau

SEQ ID NO: 3457539 - RNA, 16 nt, Human
ucuggcaacaucuuua

SEQ ID NO: 3457540 - RNA, 12 nt, Human
ucuggcaaggac

SEQ ID NO: 3457541 - RNA, 16 nt, Human
ucuggcaaugccacag

SEQ ID NO: 3457542 - RNA, 23 nt, Human
ucuggcaaugccacagcccuguc

SEQ ID NO: 3457543 - RNA, 17 nt, Human
ucuggcacagccugcac

SEQ ID NO: 3457544 - RNA, 13 nt, Human
ucuggcagccaca

SEQ ID NO: 3457545 - RNA, 16 nt, Human
ucuggcagcucagaga

SEQ ID NO: 3457546 - RNA, 19 nt, Human
ucuggcagggugggaugga

SEQ ID NO: 3457547 - RNA, 18 nt, Human
ucuggcauuagaauuauu

SEQ ID NO: 3457548 - RNA, 19 nt, Human
ucuggccaggauggagggg

SEQ ID NO: 3457549 - RNA, 21 nt, Human
ucuggccaguguuuaaaacuu

SEQ ID NO: 3457550 - RNA, 21 nt, Human
ucuggccauauuuacuaccuu

SEQ ID NO: 3457551 - RNA, 22 nt, Human
ucuggccccccugguccccucc

SEQ ID NO: 3457552 - RNA, 11 nt, Human
ucuggcccuau

SEQ ID NO: 3457553 - RNA, 19 nt, Human
ucuggcccucaccccugcc

SEQ ID NO: 3457554 - RNA, 23 nt, Human
ucuggcccucaccccugcccugg

SEQ ID NO: 3457555 - RNA, 21 nt, Human
ucuggcccucuaccccugauc

SEQ ID NO: 3457556 - RNA, 23 nt, Human
ucuggcccuugcuuaccucucag

SEQ ID NO: 3457557 - RNA, 13 nt, Human
ucuggccucaggu

SEQ ID NO: 3457558 - RNA, 23 nt, Human
ucuggccucccacccgaugcugc

SEQ ID NO: 3457559 - RNA, 17 nt, Human
ucuggccuggccagugc

SEQ ID NO: 3457560 - RNA, 14 nt, Human
ucuggccuggccug

SEQ ID NO: 3457561 - RNA, 19 nt, Human
ucuggccuggccuggcccu

SEQ ID NO: 3457562 - RNA, 21 nt, Human
ucuggccuggccuggcccugc

SEQ ID NO: 3457563 - RNA, 22 nt, Human
ucuggccuggccuggcccugcc

SEQ ID NO: 3457564 - RNA, 23 nt, Human
ucuggccuggccuggcccugccc

SEQ ID NO: 3457565 - RNA, 18 nt, Human
ucuggccuucggccucca

SEQ ID NO: 3457566 - RNA, 17 nt, Human
ucuggcuagaggccagc

SEQ ID NO: 3457567 - RNA, 14 nt, Human
ucuggcuaugcauu

SEQ ID NO: 3457568 - RNA, 19 nt, Human
ucuggcuaugcauuugaaa

SEQ ID NO: 3457569 - RNA, 12 nt, Human
ucuggcucuaau

SEQ ID NO: 3457570 - RNA, 20 nt, Human
ucuggcucuaauucacagug

SEQ ID NO: 3457571 - RNA, 15 nt, Human
ucuggcucuccccaa

SEQ ID NO: 3457572 - RNA, 16 nt, Human
ucuggcugaacccugu

SEQ ID NO: 3457573 - RNA, 18 nt, Human
ucuggcugaacccugugc

SEQ ID NO: 3457574 - RNA, 19 nt, Human
ucuggcugaacccugugcu

SEQ ID NO: 3457575 - RNA, 22 nt, Human
ucuggcugacuaaauuugggga

SEQ ID NO: 3457576 - RNA, 23 nt, Human
ucuggcugauaaaagauacauuu

SEQ ID NO: 3457577 - RNA, 15 nt, Human
ucuggcugcagagca

SEQ ID NO: 3457578 - RNA, 18 nt, Human
ucuggcugguguuaacag

SEQ ID NO: 3457579 - RNA, 18 nt, Human
ucuggcuguaaggcucua

SEQ ID NO: 3457580 - RNA, 16 nt, Human
ucuggcuuauuuuaau

SEQ ID NO: 3457581 - RNA, 22 nt, Human
ucuggcuuccagguaucuccag

SEQ ID NO: 3457582 - RNA, 15 nt, Human
ucuggcuucuggcca

SEQ ID NO: 3457583 - RNA, 18 nt, Human
ucuggcuucuggccagga

SEQ ID NO: 3457584 - RNA, 20 nt, Human
ucuggcuucuggccaggaag

SEQ ID NO: 3457585 - RNA, 22 nt, Human
ucuggcuugggcagggucuguu

SEQ ID NO: 3457586 - RNA, 17 nt, Human
ucuggcuuuaagccuuc

SEQ ID NO: 3457587 - RNA, 18 nt, Human
ucugggaacugugccuuu

SEQ ID NO: 3457588 - RNA, 12 nt, Human
ucugggacacag

SEQ ID NO: 3457589 - RNA, 14 nt, Human
ucugggacacaguu

SEQ ID NO: 3457590 - RNA, 13 nt, Human
ucugggaccucag

SEQ ID NO: 3457591 - RNA, 21 nt, Human
ucugggaccugccaggcaggg

SEQ ID NO: 3457592 - RNA, 13 nt, Human
ucugggacuuccu

SEQ ID NO: 3457593 - RNA, 13 nt, Human
ucugggagaggau

SEQ ID NO: 3457594 - RNA, 15 nt, Human
ucugggagaggauuu

SEQ ID NO: 3457595 - RNA, 16 nt, Human
ucugggagaggauuuu

SEQ ID NO: 3457596 - RNA, 23 nt, Human
ucugggaggaauggacagacaga

SEQ ID NO: 3457597 - RNA, 16 nt, Human
ucugggagucacacag

SEQ ID NO: 3457598 - RNA, 14 nt, Human
ggccccucccuacc

SEQ ID NO: 3457599 - RNA, 16 nt, Human
ggccccucccuaccuc

SEQ ID NO: 3457600 - RNA, 14 nt, Human
ggccccucucagcc

SEQ ID NO: 3457601 - RNA, 15 nt, Human
ggccccucucagccc

SEQ ID NO: 3457602 - RNA, 12 nt, Human
ggccccucuccc

SEQ ID NO: 3457603 - RNA, 24 nt, Human
ggccccucugacucccaaagagcu

SEQ ID NO: 3457604 - RNA, 14 nt, Human
ggccccucugccca

SEQ ID NO: 3457605 - RNA, 15 nt, Human
ggccccucugcccag

SEQ ID NO: 3457606 - RNA, 19 nt, Human
ggccccucugcccagcuug

SEQ ID NO: 3457607 - RNA, 21 nt, Human
ggccccugagaucucugcagg

SEQ ID NO: 3457608 - RNA, 17 nt, Human
ggccccugcauccccuu

SEQ ID NO: 3457609 - RNA, 12 nt, Human
ggccccugccac

SEQ ID NO: 3457610 - RNA, 17 nt, Human
ggccccugccacccugg

SEQ ID NO: 3457611 - RNA, 20 nt, Human
ggccccugccaccuccugcc

SEQ ID NO: 3457612 - RNA, 16 nt, Human
ggccccugccucucug

SEQ ID NO: 3457613 - RNA, 19 nt, Human
ggccccugccucucugcag

SEQ ID NO: 3457614 - RNA, 21 nt, Human
ggccccugccucucugcaggu

SEQ ID NO: 3457615 - RNA, 20 nt, Human
ggccccugcuucuccagccu

SEQ ID NO: 3457616 - RNA, 14 nt, Human
ggccccuggcccag

SEQ ID NO: 3457617 - RNA, 20 nt, Human
ggccccuggcccagcggccc

SEQ ID NO: 3457618 - RNA, 20 nt, Human
ggccccugggcuuggccugc

SEQ ID NO: 3457619 - RNA, 23 nt, Human
ggccccugggcuuggccugcugu

SEQ ID NO: 3457620 - RNA, 20 nt, Human
ggccccuuugggcccugcau

SEQ ID NO: 3457621 - RNA, 16 nt, Human
ggccccuuuucacucc

SEQ ID NO: 3457622 - RNA, 19 nt, Human
ggccccuuuuuacuccccu

SEQ ID NO: 3457623 - RNA, 14 nt, Human
ggcccgagcagcug

SEQ ID NO: 3457624 - RNA, 15 nt, Human
ggcccgagcagcuga

SEQ ID NO: 3457625 - RNA, 18 nt, Human
ggcccgagcagcugagca

SEQ ID NO: 3457626 - RNA, 20 nt, Human
ggcccgagcagcugagcagg

SEQ ID NO: 3457627 - RNA, 23 nt, Human
ggcccgagcagcugagcagggcc

SEQ ID NO: 3457628 - RNA, 19 nt, Human
ggcccgccucuccucgguu

SEQ ID NO: 3457629 - RNA, 21 nt, Human
ggcccgcuugccucggcuccu

SEQ ID NO: 3457630 - RNA, 15 nt, Human
ggcccggaugcugcu

SEQ ID NO: 3457631 - RNA, 14 nt, Human
ggcccggcagggcg

SEQ ID NO: 3457632 - RNA, 18 nt, Human
ggcccggcagggcgggca

SEQ ID NO: 3457633 - RNA, 13 nt, Human
ggcccggcuccag

SEQ ID NO: 3457634 - RNA, 22 nt, Human
ggcccggggcuggcggcuacuc

SEQ ID NO: 3457635 - RNA, 13 nt, Human
ggcccgugacaga

SEQ ID NO: 3457636 - RNA, 17 nt, Human
ggcccguugucucccug

SEQ ID NO: 3457637 - RNA, 21 nt, Human
ggcccuaauucagccauguac

SEQ ID NO: 3457638 - RNA, 21 nt, Human
ggcccuaggggucacuguacu

SEQ ID NO: 3457639 - RNA, 20 nt, Human
ggcccucaaggccucccaca

SEQ ID NO: 3457640 - RNA, 15 nt, Human
ggcccucaccccugc

SEQ ID NO: 3457641 - RNA, 12 nt, Human
ggcccucagcau

SEQ ID NO: 3457642 - RNA, 20 nt, Human
ggcccucagcauauuuguau

SEQ ID NO: 3457643 - RNA, 15 nt, Human
ggcuaacuggaagca

SEQ ID NO: 3457644 - RNA, 15 nt, Human
ggcuaacuuggguua

SEQ ID NO: 3457645 - RNA, 15 nt, Human
ggcuaagacuuccua

SEQ ID NO: 3457646 - RNA, 20 nt, Human
ggcuaagagcuagcgcugcc

SEQ ID NO: 3457647 - RNA, 14 nt, Human
ggcuaagaggcugc

SEQ ID NO: 3457648 - RNA, 16 nt, Human
ggcuaaggcaccagcc

SEQ ID NO: 3457649 - RNA, 22 nt, Human
ucuuauggaauugauuugcauu

SEQ ID NO: 3457650 - RNA, 18 nt, Human
ucuuauggauguccccag

SEQ ID NO: 3457651 - RNA, 18 nt, Human
ucuuauguaugugaaagu

SEQ ID NO: 3457652 - RNA, 12 nt, Human
ucuuaugugaca

SEQ ID NO: 3457653 - RNA, 19 nt, Human
ucuuaugugacauuaacaa

SEQ ID NO: 3457654 - RNA, 15 nt, Human
ucuuauuaaaguuuc

SEQ ID NO: 3457655 - RNA, 16 nt, Human
ucuuauuaaaguuuca

SEQ ID NO: 3457656 - RNA, 15 nt, Human
ucuuauuauauauau

SEQ ID NO: 3457657 - RNA, 15 nt, Human
ucuuauucauuuucu

SEQ ID NO: 3457658 - RNA, 16 nt, Human
ucuuauuucauuucuu

SEQ ID NO: 3457659 - RNA, 17 nt, Human
ucuuauuuuuuaaaaag

SEQ ID NO: 3457660 - RNA, 15 nt, Human
ucuucaaaaacuguu

SEQ ID NO: 3457661 - RNA, 20 nt, Human
ucuucaaaaguaaugccucu

SEQ ID NO: 3457662 - RNA, 16 nt, Human
ucuucaaaauaucaag

SEQ ID NO: 3457663 - RNA, 17 nt, Human
ucuucaaaaugagcccu

SEQ ID NO: 3457664 - RNA, 20 nt, Human
ucuucaaaauguauauauuu

SEQ ID NO: 3457665 - RNA, 14 nt, Human
ucuucaaagccuuc

SEQ ID NO: 3457666 - RNA, 17 nt, Human
ucuucaaagccuucucc

SEQ ID NO: 3457667 - RNA, 17 nt, Human
ucuucaaauccuuccaa

SEQ ID NO: 3457668 - RNA, 16 nt, Human
ucuucaaauuagaaga

SEQ ID NO: 3457669 - RNA, 18 nt, Human
ucuucaacaggagaauuu

SEQ ID NO: 3457670 - RNA, 22 nt, Human
ucuucaacauaacccacuuguc

SEQ ID NO: 3457671 - RNA, 20 nt, Human
ucuucaacaucaauguucau

SEQ ID NO: 3457672 - RNA, 21 nt, Human
ucuucaacaucaauguucauu

SEQ ID NO: 3457673 - RNA, 15 nt, Human
ucuucaacucccugc

SEQ ID NO: 3457674 - RNA, 19 nt, Human
ucuucaacugaccagccuc

SEQ ID NO: 3457675 - RNA, 14 nt, Human
ucuucaagaaaucu

SEQ ID NO: 3457676 - RNA, 11 nt, Human
ucuucaagaga

SEQ ID NO: 3457677 - RNA, 18 nt, Human
ucuucaagggcugcuuca

SEQ ID NO: 3457678 - RNA, 18 nt, Human
ucuucaauuuguauaaaa

SEQ ID NO: 3457679 - RNA, 13 nt, Human
ucuucacaaaauc

SEQ ID NO: 3457680 - RNA, 15 nt, Human
ucuucacaacagauu

SEQ ID NO: 3457681 - RNA, 18 nt, Human
ucuucacagcucuguguu

SEQ ID NO: 3457682 - RNA, 23 nt, Human
ucuucaccugauucaacuaaaaa

SEQ ID NO: 3457683 - RNA, 14 nt, Human
ucuucacucccccu

SEQ ID NO: 3457684 - RNA, 21 nt, Human
ucuucacucuuaggcacuuug

SEQ ID NO: 3457685 - RNA, 23 nt, Human
ucuucagaaagugugcuuuaugc

SEQ ID NO: 3457686 - RNA, 18 nt, Human
ucuucagaagacacugca

SEQ ID NO: 3457687 - RNA, 18 nt, Human
ucuucagacucucagccc

SEQ ID NO: 3457688 - RNA, 23 nt, Human
ucuucagacucucagcccagaag

SEQ ID NO: 3457689 - RNA, 13 nt, Human
ucuucagagcuga

SEQ ID NO: 3457690 - RNA, 14 nt, Human
ucuucagaggcccu

SEQ ID NO: 3457691 - RNA, 12 nt, Human
ucuucagccuag

SEQ ID NO: 3457692 - RNA, 22 nt, Human
ucuucagccuagccgaccucag

SEQ ID NO: 3457693 - RNA, 16 nt, Human
ucuucagcguaaaaug

SEQ ID NO: 3457694 - RNA, 13 nt, Human
ucuucagcuucuu

SEQ ID NO: 3457695 - RNA, 15 nt, Human
ucuucaggccucccu

SEQ ID NO: 3457696 - RNA, 18 nt, Human
ucuucaggccucccucuc

SEQ ID NO: 3457697 - RNA, 15 nt, Human
ucuucagggcacugc

SEQ ID NO: 3457698 - RNA, 22 nt, Human
ucuucagggccugguugaagaa

SEQ ID NO: 3457699 - RNA, 21 nt, Human
ucuucaggguccugagauuua

SEQ ID NO: 3457700 - RNA, 23 nt, Human
ucuucagguggaaaaacaucuga

SEQ ID NO: 3457701 - RNA, 14 nt, Human
ucuucagguucuua

SEQ ID NO: 3457702 - RNA, 15 nt, Human
ucuucaguaagccgu

SEQ ID NO: 3457703 - RNA, 16 nt, Human
ucuucagucagaaaac

SEQ ID NO: 3457704 - RNA, 19 nt, Human
ucuucagugggagaaaaca

SEQ ID NO: 3457705 - RNA, 20 nt, Human
ucuucaguuaagccuuugga

SEQ ID NO: 3457706 - RNA, 22 nt, Human
ucuucaguuaagccuuuggaaa

SEQ ID NO: 3457707 - RNA, 20 nt, Human
ucuucaguugguguguuuuu

SEQ ID NO: 3457708 - RNA, 16 nt, Human
ucuucaguugucucug

SEQ ID NO: 3457709 - RNA, 15 nt, Human
ucuucauaauucuaa

SEQ ID NO: 3457710 - RNA, 15 nt, Human
ucuucauacuuuuuu

SEQ ID NO: 3457711 - RNA, 23 nt, Human
ucuucauaucaucacaacauuau

SEQ ID NO: 3457712 - RNA, 21 nt, Human
ucuucauauucuaaaaccauu

SEQ ID NO: 3457713 - RNA, 15 nt, Human
ucuucaucccacucc

SEQ ID NO: 3457714 - RNA, 17 nt, Human
ucuucaucccauuccag

SEQ ID NO: 3457715 - RNA, 18 nt, Human
ucuucauccggcagccug

SEQ ID NO: 3457716 - RNA, 19 nt, Human
ucuucauccggcagccugg

SEQ ID NO: 3457717 - RNA, 20 nt, Human
ucuucauccggcagccugga

SEQ ID NO: 3457718 - RNA, 16 nt, Human
ucuucauccuuagcaa

SEQ ID NO: 3457719 - RNA, 18 nt, Human
ucuucaucuucaccagag

SEQ ID NO: 3457720 - RNA, 23 nt, Human
ucuucauguaaauugacuguacu

SEQ ID NO: 3457721 - RNA, 16 nt, Human
ucuucauguuucagga

SEQ ID NO: 3457722 - RNA, 21 nt, Human
ucuucauuucauuguaugaug

SEQ ID NO: 3457723 - RNA, 22 nt, Human
ucuucauuucauuguaugaugu

SEQ ID NO: 3457724 - RNA, 20 nt, Human
ucuucauuugaaugucuucu

SEQ ID NO: 3457725 - RNA, 14 nt, Human
ucuuccaaagcaca

SEQ ID NO: 3457726 - RNA, 18 nt, Human
ucuuccaagcaaagguga

SEQ ID NO: 3457727 - RNA, 13 nt, Human
ucuuccacacaug

SEQ ID NO: 3457728 - RNA, 14 nt, Human
ucuuccaccuggaa

SEQ ID NO: 3457729 - RNA, 11 nt, Human
ucuuccagaag

SEQ ID NO: 3457730 - RNA, 17 nt, Human
ucuuccagaagugugau

SEQ ID NO: 3457731 - RNA, 20 nt, Human
ucuuccagaagugugauugg

SEQ ID NO: 3457732 - RNA, 16 nt, Human
ucuuccagaugugaug

SEQ ID NO: 3457733 - RNA, 15 nt, Human
ucuuccaggcuggga

SEQ ID NO: 3457734 - RNA, 20 nt, Human
ucuuccaggcugggagagcc

SEQ ID NO: 3457735 - RNA, 21 nt, Human
ucuuccaggcugggagagccu

SEQ ID NO: 3457736 - RNA, 21 nt, Human
ucuuccagucuuccugacacu

SEQ ID NO: 3457737 - RNA, 20 nt, Human
ucuuccaguuugcuuugccc

SEQ ID NO: 3457738 - RNA, 12 nt, Human
ucuuccauaaug

SEQ ID NO: 3457739 - RNA, 18 nt, Human
ucuuccaucauggauuca

SEQ ID NO: 3457740 - RNA, 16 nt, Human
ucuuccaucccaggac

SEQ ID NO: 3457741 - RNA, 14 nt, Human
ucuuccaugauuuu

SEQ ID NO: 3457742 - RNA, 21 nt, Human
ucuucccaacuugccuuugaa

SEQ ID NO: 3457743 - RNA, 14 nt, Human
ucuucccaggguag

SEQ ID NO: 3457744 - RNA, 16 nt, Human
ucuucccaucacugga

SEQ ID NO: 3457745 - RNA, 17 nt, Human
ucuucccaucacuggag

SEQ ID NO: 3457746 - RNA, 13 nt, Human
ucuuccccagacg

SEQ ID NO: 3457747 - RNA, 21 nt, Human
ucuuccccagacgccuggcug

SEQ ID NO: 3457748 - RNA, 17 nt, Human
ucuucccccucucccag

SEQ ID NO: 3457749 - RNA, 21 nt, Human
ucuucccccucucccaguugu

SEQ ID NO: 3457750 - RNA, 16 nt, Human
ucuuccccuugcccuu

SEQ ID NO: 3457751 - RNA, 17 nt, Human
ucuucccgaaccccaag

SEQ ID NO: 3457752 - RNA, 22 nt, Human
ucuucccuacaguugaaaaaca

SEQ ID NO: 3457753 - RNA, 13 nt, Human
ucuucccuaccuc

SEQ ID NO: 3457754 - RNA, 20 nt, Human
ucuucccuagaggguuccug

SEQ ID NO: 3457755 - RNA, 16 nt, Human
ucuucccucucugcag

SEQ ID NO: 3457756 - RNA, 21 nt, Human
ucuucccuuuuacauacugcu

SEQ ID NO: 3457757 - RNA, 17 nt, Human
ucuuccgccccugccug

SEQ ID NO: 3457758 - RNA, 19 nt, Human
ucuuccgccccugccugcc

SEQ ID NO: 3457759 - RNA, 15 nt, Human
ucuuccggagaugua

SEQ ID NO: 3457760 - RNA, 19 nt, Human
ucuuccggagauguagcaa

SEQ ID NO: 3457761 - RNA, 21 nt, Human
ucuuccuaccaagucaaacuu

SEQ ID NO: 3457762 - RNA, 18 nt, Human
ucuuccuacccugccucc

SEQ ID NO: 3457763 - RNA, 17 nt, Human
ucuuccuaccuauccca

SEQ ID NO: 3457764 - RNA, 22 nt, Human
ucuuccuacucuucucucugcu

SEQ ID NO: 3457765 - RNA, 21 nt, Human
ucuuccuaguuuucuccuccc

SEQ ID NO: 3457766 - RNA, 15 nt, Human
ucuuccuaucccauc

SEQ ID NO: 3457767 - RNA, 17 nt, Human
ucuuccuaucccucucc

SEQ ID NO: 3457768 - RNA, 20 nt, Human
ucuuccuauuucagaaguuu

SEQ ID NO: 3457769 - RNA, 22 nt, Human
ucuuccucacagucccacugug

SEQ ID NO: 3457770 - RNA, 16 nt, Human
ucuuccucagccagcc

SEQ ID NO: 3457771 - RNA, 17 nt, Human
ucuuccucagccagccu

SEQ ID NO: 3457772 - RNA, 16 nt, Human
ucuuccuccaaggaca

SEQ ID NO: 3457773 - RNA, 14 nt, Human
ucuuccuccagcug

SEQ ID NO: 3457774 - RNA, 19 nt, Human
ucuuccuccagcugcacca

SEQ ID NO: 3457775 - RNA, 14 nt, Human
ucuuccucccaagu

SEQ ID NO: 3457776 - RNA, 14 nt, Human
ucuuccucccuccc

SEQ ID NO: 3457777 - RNA, 14 nt, Human
ucuuccuccugaca

SEQ ID NO: 3457778 - RNA, 19 nt, Human
ucuuccucugcuaaauuga

SEQ ID NO: 3457779 - RNA, 15 nt, Human
ucuuccucuugaccc

SEQ ID NO: 3457780 - RNA, 20 nt, Human
ucuuccucuugacccugcac

SEQ ID NO: 3457781 - RNA, 13 nt, Human
ucuuccugacacu

SEQ ID NO: 3457782 - RNA, 14 nt, Human
ucuuccugaguggu

SEQ ID NO: 3457783 - RNA, 18 nt, Human
ucuuccugcaaggacuac

SEQ ID NO: 3457784 - RNA, 11 nt, Human
ucuuccugccc

SEQ ID NO: 3457785 - RNA, 18 nt, Human
ucuuccugccccucuuuc

SEQ ID NO: 3457786 - RNA, 21 nt, Human
ucuuccugccccucuuucucu

SEQ ID NO: 3457787 - RNA, 20 nt, Human
ucuuccuggucgaaaguuag

SEQ ID NO: 3457788 - RNA, 20 nt, Human
ggcuccuuucuccagccagc

SEQ ID NO: 3457789 - RNA, 21 nt, Human
ggcuccuuucuccagccagca

SEQ ID NO: 3457790 - RNA, 13 nt, Human
ggcucgaaucucu

SEQ ID NO: 3457791 - RNA, 18 nt, Human
ggcucgagcaugccugga

SEQ ID NO: 3457792 - RNA, 14 nt, Human
ggcucgccuucccu

SEQ ID NO: 3457793 - RNA, 19 nt, Human
ggcucguggacugaguggg

SEQ ID NO: 3457794 - RNA, 18 nt, Human
ggcucuaacgccugagcc

SEQ ID NO: 3457795 - RNA, 13 nt, Human
ggcucuaauuucc

SEQ ID NO: 3457796 - RNA, 17 nt, Human
ggcucuacuuccccaug

SEQ ID NO: 3457797 - RNA, 19 nt, Human
ggcucuaggguugcuggag

SEQ ID NO: 3457798 - RNA, 22 nt, Human
ggcucuaggguugcuggagccu

SEQ ID NO: 3457799 - RNA, 23 nt, Human
ggcucuaugagucuagauguuua

SEQ ID NO: 3457800 - RNA, 14 nt, Human
ggcucucaggccag

SEQ ID NO: 3457801 - RNA, 15 nt, Human
ggcucucaggccagc

SEQ ID NO: 3457802 - RNA, 16 nt, Human
ggcucucaggccagcu

SEQ ID NO: 3457803 - RNA, 20 nt, Human
ggcucucaggccagcugcuu

SEQ ID NO: 3457804 - RNA, 23 nt, Human
ggcucucauguuuucaacugcca

SEQ ID NO: 3457805 - RNA, 13 nt, Human
ggcucuccaccuc

SEQ ID NO: 3457806 - RNA, 19 nt, Human
ggcucuccaccucagccuu

SEQ ID NO: 3457807 - RNA, 20 nt, Human
ggcucuccaccucagccuug

SEQ ID NO: 3457808 - RNA, 21 nt, Human
ggcucuccaccucagccuugg

SEQ ID NO: 3457809 - RNA, 17 nt, Human
ggcucuccuggcuuccc

SEQ ID NO: 3457810 - RNA, 22 nt, Human
ggcucucuauagcaccagggcu

SEQ ID NO: 3457811 - RNA, 13 nt, Human
ggcucucuccagg

SEQ ID NO: 3457812 - RNA, 20 nt, Human
ggcucucugaguccuggccc

SEQ ID NO: 3457813 - RNA, 16 nt, Human
ggcucucugggcugac

SEQ ID NO: 3457814 - RNA, 14 nt, Human
ggcucugaaagcca

SEQ ID NO: 3457815 - RNA, 14 nt, Human
ucuugcucuuucua

SEQ ID NO: 3457816 - RNA, 19 nt, Human
ucuugcucuuucuacucug

SEQ ID NO: 3457817 - RNA, 21 nt, Human
ucuugcucuuucuacucugaa

SEQ ID NO: 3457818 - RNA, 18 nt, Human
ucuugcugcccugcccca

SEQ ID NO: 3457819 - RNA, 14 nt, Human
ucuugcugcuagaa

SEQ ID NO: 3457820 - RNA, 15 nt, Human
ucuugcugcuagaac

SEQ ID NO: 3457821 - RNA, 22 nt, Human
ucuugcugguugucauuuuugc

SEQ ID NO: 3457822 - RNA, 14 nt, Human
ucuugcugucucug

SEQ ID NO: 3457823 - RNA, 17 nt, Human
ucuugcugucucugcuc

SEQ ID NO: 3457824 - RNA, 15 nt, Human
ucuugcuguugacau

SEQ ID NO: 3457825 - RNA, 16 nt, Human
ucuugcuucuuucuag

SEQ ID NO: 3457826 - RNA, 18 nt, Human
ucuugcuucuuucuagaa

SEQ ID NO: 3457827 - RNA, 15 nt, Human
ucuugcuuguaccuc

SEQ ID NO: 3457828 - RNA, 14 nt, Human
ucuugcuuucuuug

SEQ ID NO: 3457829 - RNA, 21 nt, Human
ucuuggaacauuggaauguuc

SEQ ID NO: 3457830 - RNA, 17 nt, Human
ucuuggaauccugggga

SEQ ID NO: 3457831 - RNA, 14 nt, Human
ucuuggaccucugc

SEQ ID NO: 3457832 - RNA, 18 nt, Human
ucuuggaccucugcucug

SEQ ID NO: 3457833 - RNA, 23 nt, Human
ucuuggaccucugcucugaggcu

SEQ ID NO: 3457834 - RNA, 17 nt, Human
ucuuggagaccuuaccc

SEQ ID NO: 3457835 - RNA, 15 nt, Human
ucuuggagccugcag

SEQ ID NO: 3457836 - RNA, 19 nt, Human
ucuuggagccugcagagcu

SEQ ID NO: 3457837 - RNA, 16 nt, Human
ucuuggagcugagccu

SEQ ID NO: 3457838 - RNA, 21 nt, Human
ucuuggagcugagccucucac

SEQ ID NO: 3457839 - RNA, 23 nt, Human
ucuuggagcugugaguucucccu

SEQ ID NO: 3457840 - RNA, 14 nt, Human
ucuuggagucuucc

SEQ ID NO: 3457841 - RNA, 16 nt, Human
ucuuggcaauaaauuu

SEQ ID NO: 3457842 - RNA, 22 nt, Human
ucuuggcacauuuaagagacag

SEQ ID NO: 3457843 - RNA, 18 nt, Human
ucuuggcagcaccugucu

SEQ ID NO: 3457844 - RNA, 14 nt, Human
ucuuggccagccaa

SEQ ID NO: 3457845 - RNA, 16 nt, Human
ucuuggccuuacugua

SEQ ID NO: 3457846 - RNA, 15 nt, Human
ucuuggcggcagcag

SEQ ID NO: 3457847 - RNA, 17 nt, Human
ucuuggcuggacccagc

SEQ ID NO: 3457848 - RNA, 18 nt, Human
ucuuggcuggacccagcc

SEQ ID NO: 3457849 - RNA, 20 nt, Human
ucuuggcuggacccagccag

SEQ ID NO: 3457850 - RNA, 16 nt, Human
ucuuggcuggcuuccu

SEQ ID NO: 3457851 - RNA, 18 nt, Human
ucuuggcuuaaucauuuu

SEQ ID NO: 3457852 - RNA, 16 nt, Human
ucuuggcuuucauguu

SEQ ID NO: 3457853 - RNA, 18 nt, Human
ucuuggcuuuguuuuguu

SEQ ID NO: 3457854 - RNA, 16 nt, Human
ucuugggacuggguuu

SEQ ID NO: 3457855 - RNA, 24 nt, Human
ucuugggcaauauucucuguacau

SEQ ID NO: 3457856 - RNA, 22 nt, Human
ucuuggggaguuuagggugggg

SEQ ID NO: 3457857 - RNA, 18 nt, Human
ucuuggggcccagugcau

SEQ ID NO: 3457858 - RNA, 20 nt, Human
ucuugggggacagggcuggc

SEQ ID NO: 3457859 - RNA, 19 nt, Human
ucuuggggggguggccgcu

SEQ ID NO: 3457860 - RNA, 14 nt, Human
ucuugguaagaagc

SEQ ID NO: 3457861 - RNA, 15 nt, Human
ucuugguagagauuc

SEQ ID NO: 3457862 - RNA, 14 nt, Human
ucuugguauucuua

SEQ ID NO: 3457863 - RNA, 14 nt, Human
ucuugguauuugga

SEQ ID NO: 3457864 - RNA, 22 nt, Human
ucuugguauuuggauaucuguu

SEQ ID NO: 3457865 - RNA, 19 nt, Human
ucuugguccugcugcaguu

SEQ ID NO: 3457866 - RNA, 17 nt, Human
ucuugguuccagccugc

SEQ ID NO: 3457867 - RNA, 15 nt, Human
ucuugguugaggaaa

SEQ ID NO: 3457868 - RNA, 14 nt, Human
ucuugguuuccaaa

SEQ ID NO: 3457869 - RNA, 13 nt, Human
ucuuguaaauaaa

SEQ ID NO: 3457870 - RNA, 17 nt, Human
ucuuguaaauguguugg

SEQ ID NO: 3457871 - RNA, 20 nt, Human
ucuuguaagagcuauacagu

SEQ ID NO: 3457872 - RNA, 19 nt, Human
ucuuguaagauuuugaaaa

SEQ ID NO: 3457873 - RNA, 11 nt, Human
ucuuguaauuu

SEQ ID NO: 3457874 - RNA, 14 nt, Human
ucuuguaauuucca

SEQ ID NO: 3457875 - RNA, 21 nt, Human
ucuuguaauuuccagcuuucu

SEQ ID NO: 3457876 - RNA, 14 nt, Human
ucuuguacaugugu

SEQ ID NO: 3457877 - RNA, 20 nt, Human
ucuuguauaagauccuagau

SEQ ID NO: 3457878 - RNA, 20 nt, Human
ucuuguaucuggauucaaau

SEQ ID NO: 3457879 - RNA, 15 nt, Human
ucuuguauuuauugg

SEQ ID NO: 3457880 - RNA, 15 nt, Human
ucuugucacaauaaa

SEQ ID NO: 3457881 - RNA, 13 nt, Human
ucuugucagacau

SEQ ID NO: 3457882 - RNA, 18 nt, Human
ucuugucagacauaaagc

SEQ ID NO: 3457883 - RNA, 17 nt, Human
ucuugucauguguauaa

SEQ ID NO: 3457884 - RNA, 20 nt, Human
ucuugucccacgugucuucc

SEQ ID NO: 3457885 - RNA, 17 nt, Human
ucuuguccucaguccau

SEQ ID NO: 3457886 - RNA, 19 nt, Human
ucuuguccucaguccauuu

SEQ ID NO: 3457887 - RNA, 13 nt, Human
ucuugucuauaaa

SEQ ID NO: 3457888 - RNA, 20 nt, Human
ucuugucucaaugcucauaa

SEQ ID NO: 3457889 - RNA, 21 nt, Human
ucuugucucaaugcucauaac

SEQ ID NO: 3457890 - RNA, 14 nt, Human
ucuugucucagauu

SEQ ID NO: 3457891 - RNA, 19 nt, Human
ucuugucucagauuuuauu

SEQ ID NO: 3457892 - RNA, 11 nt, Human
ucuugucuccc

SEQ ID NO: 3457893 - RNA, 13 nt, Human
ucuugucuccccu

SEQ ID NO: 3457894 - RNA, 14 nt, Human
ucuugucucugggc

SEQ ID NO: 3457895 - RNA, 12 nt, Human
ucuugucuuuau

SEQ ID NO: 3457896 - RNA, 22 nt, Human
ucuugugaauauguacauaggc

SEQ ID NO: 3457897 - RNA, 21 nt, Human
ucuugugacauauuaugucuu

SEQ ID NO: 3457898 - RNA, 11 nt, Human
ucuugugacua

SEQ ID NO: 3457899 - RNA, 23 nt, Human
ucuugugacuagugcugaagcuu

SEQ ID NO: 3457900 - RNA, 13 nt, Human
ucuugugaggaaa

SEQ ID NO: 3457901 - RNA, 14 nt, Human
ucuugugcacuggc

SEQ ID NO: 3457902 - RNA, 19 nt, Human
ucuugugcuagaauacuuu

SEQ ID NO: 3457903 - RNA, 23 nt, Human
ucuugugcuagaauacuuuuuaa

SEQ ID NO: 3457904 - RNA, 23 nt, Human
ucuuguggaagugcaucuacuug

SEQ ID NO: 3457905 - RNA, 17 nt, Human
ucuuguguauuucaguu

SEQ ID NO: 3457906 - RNA, 13 nt, Human
ucuuguguguuua

SEQ ID NO: 3457907 - RNA, 21 nt, Human
ucuuguguguuuauugucaaa

SEQ ID NO: 3457908 - RNA, 15 nt, Human
ucuuguguuguccuu

SEQ ID NO: 3457909 - RNA, 13 nt, Human
ucuuguuaauauu

SEQ ID NO: 3457910 - RNA, 17 nt, Human
ucuuguuaauauucuuu

SEQ ID NO: 3457911 - RNA, 13 nt, Human
ucuuguucuguuu

SEQ ID NO: 3457912 - RNA, 16 nt, Human
ucuuguucuguuuugu

SEQ ID NO: 3457913 - RNA, 14 nt, Human
ucuuguugauaaaa

SEQ ID NO: 3457914 - RNA, 18 nt, Human
ucuuguugcuguacaaaa

SEQ ID NO: 3457915 - RNA, 11 nt, Human
ucuuguugguu

SEQ ID NO: 3457916 - RNA, 21 nt, Human
ucuuguuucuccagauuuuua

SEQ ID NO: 3457917 - RNA, 16 nt, Human
ucuuguuuugaaaaua

SEQ ID NO: 3457918 - RNA, 13 nt, Human
ucuuguuuugcuu

SEQ ID NO: 3457919 - RNA, 14 nt, Human
ucuuguuuuguuug

SEQ ID NO: 3457920 - RNA, 23 nt, Human
ucuuguuuuguuugucucuccuu

SEQ ID NO: 3457921 - RNA, 23 nt, Human
ucuuguuuuuaaguuugcacuca

SEQ ID NO: 3457922 - RNA, 20 nt, Human
ucuuguuuuuccacuacugc

SEQ ID NO: 3457923 - RNA, 21 nt, Human
ucuuguuuuuccacuacugcu

SEQ ID NO: 3457924 - RNA, 22 nt, Human
ucuuguuuuuccacuacugcua

SEQ ID NO: 3457925 - RNA, 21 nt, Human
ucuuguuuuuuuuuuccacuu

SEQ ID NO: 3457926 - RNA, 14 nt, Human
ucuuuaaaaacugu

SEQ ID NO: 3457927 - RNA, 12 nt, Human
ucuuuaaaacaa

SEQ ID NO: 3457928 - RNA, 13 nt, Human
ucuuuaaaacaaa

SEQ ID NO: 3457929 - RNA, 15 nt, Human
ucuuuaaaacaaaac

SEQ ID NO: 3457930 - RNA, 17 nt, Human
ucuuuaaaagagagaga

SEQ ID NO: 3457931 - RNA, 15 nt, Human
ucuuuaaaauuacaa

SEQ ID NO: 3457932 - RNA, 23 nt, Human
ucuuuaaaggcccagccccuaga

SEQ ID NO: 3457933 - RNA, 23 nt, Human
ugaaauaagccagacaucaacag

SEQ ID NO: 3457934 - RNA, 22 nt, Human
ugaaauaagcuauuugauguaa

SEQ ID NO: 3457935 - RNA, 14 nt, Human
ugaaauaaggaaug

SEQ ID NO: 3457936 - RNA, 18 nt, Human
ugaaauaaggaaugauau

SEQ ID NO: 3457937 - RNA, 14 nt, Human
ugaaauaaugugua

SEQ ID NO: 3457938 - RNA, 16 nt, Human
ugaaauaauguguagu

SEQ ID NO: 3457939 - RNA, 23 nt, Human
ugaaauaccagugaaccaaagag

SEQ ID NO: 3457940 - RNA, 16 nt, Human
ugaaauaccagugugg

SEQ ID NO: 3457941 - RNA, 14 nt, Human
ugaaauacuguuug

SEQ ID NO: 3457942 - RNA, 15 nt, Human
ugaaauaggaaacaa

SEQ ID NO: 3457943 - RNA, 22 nt, Human
ugaaauaggagggaaaccuuug

SEQ ID NO: 3457944 - RNA, 13 nt, Human
ugaaauagucugu

SEQ ID NO: 3457945 - RNA, 15 nt, Human
ugaaauauacacaca

SEQ ID NO: 3457946 - RNA, 17 nt, Human
ugaaauauacacacagc

SEQ ID NO: 3457947 - RNA, 17 nt, Human
ugaaauauaugugaaag

SEQ ID NO: 3457948 - RNA, 14 nt, Human
ugaaauauauuuaa

SEQ ID NO: 3457949 - RNA, 17 nt, Human
ugaaauauugcuguaua

SEQ ID NO: 3457950 - RNA, 11 nt, Human
ugaaauauuuu

SEQ ID NO: 3457951 - RNA, 22 nt, Human
ugaaaucaaugcaagagugauu

SEQ ID NO: 3457952 - RNA, 19 nt, Human
ugaaaucaguaaacacugu

SEQ ID NO: 3457953 - RNA, 17 nt, Human
ugaaaucaguuacucuu

SEQ ID NO: 3457954 - RNA, 15 nt, Human
ugaaaucauucauuu

SEQ ID NO: 3457955 - RNA, 16 nt, Human
ugaaauccugguuccu

SEQ ID NO: 3457956 - RNA, 18 nt, Human
ugaaauccuugacuggac

SEQ ID NO: 3457957 - RNA, 20 nt, Human
ugaaauccuugacuggaccu

SEQ ID NO: 3457958 - RNA, 15 nt, Human
ugaaaucugucaaga

SEQ ID NO: 3457959 - RNA, 18 nt, Human
ugaaaucuucccaugcau

SEQ ID NO: 3457960 - RNA, 19 nt, Human
ugaaaucuucccaugcauu

SEQ ID NO: 3457961 - RNA, 22 nt, Human
ugaaaucuucccaugcauucug

SEQ ID NO: 3457962 - RNA, 17 nt, Human
ugaaaucuuuuugcuuu

SEQ ID NO: 3457963 - RNA, 22 nt, Human
ugaaaucuuuuuuguucaaaga

SEQ ID NO: 3457964 - RNA, 20 nt, Human
ugaaaugaaaacauguaaua

SEQ ID NO: 3457965 - RNA, 13 nt, Human
ugaaaugaacaca

SEQ ID NO: 3457966 - RNA, 16 nt, Human
ugaaaugaauauuuaa

SEQ ID NO: 3457967 - RNA, 23 nt, Human
ugaaaugaggucuguuuaaagug

SEQ ID NO: 3457968 - RNA, 24 nt, Human
ugaaaugccuuacuuuguaugaua

SEQ ID NO: 3457969 - RNA, 20 nt, Human
ugaaaugcuaugucauuuca

SEQ ID NO: 3457970 - RNA, 21 nt, Human
ugaaaugcuaugucauuucau

SEQ ID NO: 3457971 - RNA, 16 nt, Human
ugaaaugcucuccuuu

SEQ ID NO: 3457972 - RNA, 15 nt, Human
ugaaaugcugcauuu

SEQ ID NO: 3457973 - RNA, 17 nt, Human
ugaaauggauacuuaua

SEQ ID NO: 3457974 - RNA, 12 nt, Human
ugaaauguaagg

SEQ ID NO: 3457975 - RNA, 13 nt, Human
ugaaaugucaacc

SEQ ID NO: 3457976 - RNA, 21 nt, Human
ugaaaugugugugaugugaca

SEQ ID NO: 3457977 - RNA, 24 nt, Human
ugaaaugugugugaugugacauuu

SEQ ID NO: 3457978 - RNA, 15 nt, Human
ugaaauguuaacaau

SEQ ID NO: 3457979 - RNA, 13 nt, Human
ugaaauguuacaa

SEQ ID NO: 3457980 - RNA, 22 nt, Human
ugaaauguuacaaaaauaaacu

SEQ ID NO: 3457981 - RNA, 14 nt, Human
ugaaauuaaccucu

SEQ ID NO: 3457982 - RNA, 20 nt, Human
ugaaauuacggguaccugaa

SEQ ID NO: 3457983 - RNA, 15 nt, Human
ugaaauuauguaaau

SEQ ID NO: 3457984 - RNA, 23 nt, Human
ugaaauuauguauguuuacauau

SEQ ID NO: 3457985 - RNA, 22 nt, Human
ugaaauuaugugacauuuuaca

SEQ ID NO: 3457986 - RNA, 12 nt, Human
ugaaauuccaaa

SEQ ID NO: 3457987 - RNA, 15 nt, Human
ugaaauucuccugga

SEQ ID NO: 3457988 - RNA, 18 nt, Human
ugaaauucugaauuugca

SEQ ID NO: 3457989 - RNA, 22 nt, Human
ugaaauucugaauuugcaaagu

SEQ ID NO: 3457990 - RNA, 13 nt, Human
ugaaauugaaccu

SEQ ID NO: 3457991 - RNA, 17 nt, Human
ugaaauugaaccuuugu

SEQ ID NO: 3457992 - RNA, 16 nt, Human
ugaaauuguaauuaua

SEQ ID NO: 3457993 - RNA, 19 nt, Human
ugaaauuguaauuauaucu

SEQ ID NO: 3457994 - RNA, 20 nt, Human
ugaaauuguaauuauaucug

SEQ ID NO: 3457995 - RNA, 14 nt, Human
ugaaauuguacaua

SEQ ID NO: 3457996 - RNA, 15 nt, Human
ugaaauuguauuaca

SEQ ID NO: 3457997 - RNA, 20 nt, Human
ugaaauuuauuaguuaauau

SEQ ID NO: 3457998 - RNA, 21 nt, Human
ugaaauuuauuaguuaauaua

SEQ ID NO: 3457999 - RNA, 22 nt, Human
ugaaauuuauuaguuaauauau

SEQ ID NO: 3458000 - RNA, 22 nt, Human
ugaaauuuauugaggaaaaaua

SEQ ID NO: 3458001 - RNA, 14 nt, Human
ugaaauuucuagcc

SEQ ID NO: 3458002 - RNA, 15 nt, Human
ugaaauuugaauuuu

SEQ ID NO: 3458003 - RNA, 17 nt, Human
ugaaauuuuaaacuaua

SEQ ID NO: 3458004 - RNA, 20 nt, Human
ugaaauuuuaaccuaugaua

SEQ ID NO: 3458005 - RNA, 22 nt, Human
ugaaauuuuaaccuaugauauu

SEQ ID NO: 3458006 - RNA, 19 nt, Human
ugaaauuuuaccaaguuau

SEQ ID NO: 3458007 - RNA, 14 nt, Human
ugaaauuuuagaaa

SEQ ID NO: 3458008 - RNA, 16 nt, Human
ugaaauuuuagaaaua

SEQ ID NO: 3458009 - RNA, 22 nt, Human
ugaaauuuuauaugcuuacuga

SEQ ID NO: 3458010 - RNA, 19 nt, Human
ugaaauuuuccaaugucug

SEQ ID NO: 3458011 - RNA, 18 nt, Human
ugaaauuuucuagacuuu

SEQ ID NO: 3458012 - RNA, 19 nt, Human
ugaaauuuucuagacuuuc

SEQ ID NO: 3458013 - RNA, 16 nt, Human
ugaaauuuugcaaaua

SEQ ID NO: 3458014 - RNA, 22 nt, Human
ugaaauuuugcaaauauaaaca

SEQ ID NO: 3458015 - RNA, 15 nt, Human
ugaaauuuuuauuaa

SEQ ID NO: 3458016 - RNA, 12 nt, Human
ugaaauuuuuca

SEQ ID NO: 3458017 - RNA, 16 nt, Human
ugaaauuuuucauauu

SEQ ID NO: 3458018 - RNA, 17 nt, Human
ugaaauuuuucauauuu

SEQ ID NO: 3458019 - RNA, 18 nt, Human
ugaaauuuuucauauuuu

SEQ ID NO: 3458020 - RNA, 20 nt, Human
ugaaauuuuugguuauaaau

SEQ ID NO: 3458021 - RNA, 15 nt, Human
ugaaauuuuuguaaa

SEQ ID NO: 3458022 - RNA, 18 nt, Human
ugaaauuuuuguaaauca

SEQ ID NO: 3458023 - RNA, 13 nt, Human
ucuggcugguguu

SEQ ID NO: 3458024 - RNA, 17 nt, Human
ucuggcugguguuaaca

SEQ ID NO: 3458025 - RNA, 22 nt, Human
ucuggcugguuuggaaugcuuc

SEQ ID NO: 3458026 - RNA, 21 nt, Human
ucuggcuguaaggcucuagau

SEQ ID NO: 3458027 - RNA, 22 nt, Human
ucuggcuguaaggcucuagauc

SEQ ID NO: 3458028 - RNA, 17 nt, Human
ucuggcuuauuuuaaug

SEQ ID NO: 3458029 - RNA, 20 nt, Human
ucuggcuuauuuuaauguga

SEQ ID NO: 3458030 - RNA, 21 nt, Human
ucuggcuuauuuuaaugugau

SEQ ID NO: 3458031 - RNA, 15 nt, Human
ucuggcuuccaggua

SEQ ID NO: 3458032 - RNA, 24 nt, Human
ucuggcuuccagguaucuccagga

SEQ ID NO: 3458033 - RNA, 21 nt, Human
ucuggcuuggccacagccagg

SEQ ID NO: 3458034 - RNA, 14 nt, Human
ucuggcuuggccua

SEQ ID NO: 3458035 - RNA, 14 nt, Human
ucuggcuuuaagcc

SEQ ID NO: 3458036 - RNA, 16 nt, Human
ucugggaaccucccag

SEQ ID NO: 3458037 - RNA, 17 nt, Human
ucugggaaccucccaga

SEQ ID NO: 3458038 - RNA, 20 nt, Human
ucugggaaccucccagaggu

SEQ ID NO: 3458039 - RNA, 22 nt, Human
ucugggaaccucccagaggucc

SEQ ID NO: 3458040 - RNA, 14 nt, Human
ucugggaagggaag

SEQ ID NO: 3458041 - RNA, 14 nt, Human
ucugggaauguaua

SEQ ID NO: 3458042 - RNA, 13 nt, Human
ucugggacacagu

SEQ ID NO: 3458043 - RNA, 19 nt, Human
ucugggacccuuuccuucc

SEQ ID NO: 3458044 - RNA, 20 nt, Human
ucugggaccugccaggcagg

SEQ ID NO: 3458045 - RNA, 21 nt, Human
ucugggacuuccuugcucucc

SEQ ID NO: 3458046 - RNA, 13 nt, Human
ucugggagaaaau

SEQ ID NO: 3458047 - RNA, 20 nt, Human
ucugggagaaaaucaucaag

SEQ ID NO: 3458048 - RNA, 16 nt, Human
ucugggaguccccuuu

SEQ ID NO: 3458049 - RNA, 18 nt, Human
ucugggauaaguaaguuu

SEQ ID NO: 3458050 - RNA, 19 nt, Human
ucugggauucuacuuuaag

SEQ ID NO: 3458051 - RNA, 20 nt, Human
ucugggcacacucugccagc

SEQ ID NO: 3458052 - RNA, 21 nt, Human
ucugggcacugguaaucccaa

SEQ ID NO: 3458053 - RNA, 18 nt, Human
ucugggcaucuguucugg

SEQ ID NO: 3458054 - RNA, 18 nt, Human
ucugggccaagucaaaga

SEQ ID NO: 3458055 - RNA, 23 nt, Human
ucugggccaaguuccucuagugc

SEQ ID NO: 3458056 - RNA, 19 nt, Human
ucugggccaccaggaucag

SEQ ID NO: 3458057 - RNA, 14 nt, Human
ucugggccagaauu

SEQ ID NO: 3458058 - RNA, 18 nt, Human
ucugggcccccuccuccc

SEQ ID NO: 3458059 - RNA, 12 nt, Human
ucugggccugac

SEQ ID NO: 3458060 - RNA, 13 nt, Human
ucugggccugggc

SEQ ID NO: 3458061 - RNA, 18 nt, Human
ucugggccugggcuaggg

SEQ ID NO: 3458062 - RNA, 15 nt, Human
ucugggccuuggccu

SEQ ID NO: 3458063 - RNA, 21 nt, Human
ucugggccuuggccuggagca

SEQ ID NO: 3458064 - RNA, 22 nt, Human
ucugggccuuggccuggagcac

SEQ ID NO: 3458065 - RNA, 20 nt, Human
ucugggcggcgggcggcugg

SEQ ID NO: 3458066 - RNA, 20 nt, Human
ucugggcuagguagaaaaag

SEQ ID NO: 3458067 - RNA, 13 nt, Human
ucugggcuccaga

SEQ ID NO: 3458068 - RNA, 11 nt, Human
ucugggcugga

SEQ ID NO: 3458069 - RNA, 21 nt, Human
ucugggcuguaacguggcacu

SEQ ID NO: 3458070 - RNA, 17 nt, Human
ucugggcuuccuggagc

SEQ ID NO: 3458071 - RNA, 18 nt, Human
ucugggcuuccuggagca

SEQ ID NO: 3458072 - RNA, 19 nt, Human
ucugggcuuccuggagcag

SEQ ID NO: 3458073 - RNA, 21 nt, Human
ucugggcuuggggcuuccuaa

SEQ ID NO: 3458074 - RNA, 17 nt, Human
ucuggggcaggcugggc

SEQ ID NO: 3458075 - RNA, 18 nt, Human
ucuggggcaggcugggcc

SEQ ID NO: 3458076 - RNA, 19 nt, Human
ucuggggcaggcugggcca

SEQ ID NO: 3458077 - RNA, 22 nt, Human
ugaagaggaaaaugaauaauac

SEQ ID NO: 3458078 - RNA, 13 nt, Human
ugaagaggaaggg

SEQ ID NO: 3458079 - RNA, 15 nt, Human
ugaagaggaggagga

SEQ ID NO: 3458080 - RNA, 18 nt, Human
ugaagaggaggaggaggg

SEQ ID NO: 3458081 - RNA, 15 nt, Human
ugaagaggcgggcca

SEQ ID NO: 3458082 - RNA, 18 nt, Human
ugaagaggcgggccagcc

SEQ ID NO: 3458083 - RNA, 17 nt, Human
ugaagagggagaaggga

SEQ ID NO: 3458084 - RNA, 12 nt, Human
ugaagaggggca

SEQ ID NO: 3458085 - RNA, 14 nt, Human
ugaagaggggcagc

SEQ ID NO: 3458086 - RNA, 23 nt, Human
ugaagaguaagucaaccugccug

SEQ ID NO: 3458087 - RNA, 17 nt, Human
ugaagaguccucugaau

SEQ ID NO: 3458088 - RNA, 19 nt, Human
ugaagaguggguuucacaa

SEQ ID NO: 3458089 - RNA, 21 nt, Human
ugaagauaaguguauuuuuca

SEQ ID NO: 3458090 - RNA, 23 nt, Human
ugaagauaccaucagcaaagaau

SEQ ID NO: 3458091 - RNA, 17 nt, Human
ugaagauacuuuguauu

SEQ ID NO: 3458092 - RNA, 16 nt, Human
ugaagauagaagaaaa

SEQ ID NO: 3458093 - RNA, 16 nt, Human
ugaagauaucuugaaa

SEQ ID NO: 3458094 - RNA, 15 nt, Human
ugaagauauuuuucc

SEQ ID NO: 3458095 - RNA, 14 nt, Human
ugaagaucuaaaua

SEQ ID NO: 3458096 - RNA, 22 nt, Human
ugaagaucuaaauaaaaugcua

SEQ ID NO: 3458097 - RNA, 13 nt, Human
ugaagaugaucau

SEQ ID NO: 3458098 - RNA, 21 nt, Human
ugaagauggcauccugugaag

SEQ ID NO: 3458099 - RNA, 22 nt, Human
ugaagauggcauccugugaagu

SEQ ID NO: 3458100 - RNA, 18 nt, Human
ugaagauguagaggagaa

SEQ ID NO: 3458101 - RNA, 21 nt, Human
ugaagauucuauguuaauauu

SEQ ID NO: 3458102 - RNA, 22 nt, Human
ugaagcagaugcaaagaggcaa

SEQ ID NO: 3458103 - RNA, 17 nt, Human
ugaagcaggguuucuuu

SEQ ID NO: 3458104 - RNA, 15 nt, Human
ugaagcauccaggca

SEQ ID NO: 3458105 - RNA, 19 nt, Human
ugaagcauguuucauguuu

SEQ ID NO: 3458106 - RNA, 20 nt, Human
ugaagcauguuucauguuuu

SEQ ID NO: 3458107 - RNA, 16 nt, Human
ugaagcauuuuauaaa

SEQ ID NO: 3458108 - RNA, 17 nt, Human
ugaagcauuuuauaaau

SEQ ID NO: 3458109 - RNA, 11 nt, Human
ugaagccaaag

SEQ ID NO: 3458110 - RNA, 12 nt, Human
ugaagccaaaga

SEQ ID NO: 3458111 - RNA, 15 nt, Human
ugaagccaaagccaa

SEQ ID NO: 3458112 - RNA, 23 nt, Human
ugaagccaaguggggugcuggga

SEQ ID NO: 3458113 - RNA, 19 nt, Human
ugaagccacagcccaggcc

SEQ ID NO: 3458114 - RNA, 19 nt, Human
ugaagccacugaagcuggg

SEQ ID NO: 3458115 - RNA, 12 nt, Human
ugaagccagccu

SEQ ID NO: 3458116 - RNA, 13 nt, Human
ugaagccagccuu

SEQ ID NO: 3458117 - RNA, 23 nt, Human
ugaagccagcucacagugcugug

SEQ ID NO: 3458118 - RNA, 16 nt, Human
ugaagcccaagugaaa

SEQ ID NO: 3458119 - RNA, 17 nt, Human
ugaagcccauuucuccg

SEQ ID NO: 3458120 - RNA, 16 nt, Human
ugaagcccuccaaaag

SEQ ID NO: 3458121 - RNA, 17 nt, Human
ugaagccugcuccuucc

SEQ ID NO: 3458122 - RNA, 13 nt, Human
ugaagccuuucuu

SEQ ID NO: 3458123 - RNA, 12 nt, Human
ugaagccuuugu

SEQ ID NO: 3458124 - RNA, 15 nt, Human
ugaagccuuuugaaa

SEQ ID NO: 3458125 - RNA, 17 nt, Human
ugaagcgugauuuuaaa

SEQ ID NO: 3458126 - RNA, 14 nt, Human
ugaagcuaauuauu

SEQ ID NO: 3458127 - RNA, 14 nt, Human
ugaagcuacugugu

SEQ ID NO: 3458128 - RNA, 22 nt, Human
ugaagcuacugugugugugaau

SEQ ID NO: 3458129 - RNA, 23 nt, Human
ugaagcucaccuguugcuuacaa

SEQ ID NO: 3458130 - RNA, 18 nt, Human
ugaagcugcccuaauaaa

SEQ ID NO: 3458131 - RNA, 15 nt, Human
ugaagcuguugugug

SEQ ID NO: 3458132 - RNA, 18 nt, Human
ugaagcuugacucccaag

SEQ ID NO: 3458133 - RNA, 14 nt, Human
ugaagcuuguguau

SEQ ID NO: 3458134 - RNA, 23 nt, Human
ugaagcuuguguauccauuauca

SEQ ID NO: 3458135 - RNA, 13 nt, Human
ugaagcuuuacca

SEQ ID NO: 3458136 - RNA, 13 nt, Human
ugaaggaaaaauu

SEQ ID NO: 3458137 - RNA, 14 nt, Human
ugaaggaaacaguu

SEQ ID NO: 3458138 - RNA, 23 nt, Human
ugaaggaagccaaauuuaucaaa

SEQ ID NO: 3458139 - RNA, 14 nt, Human
ugaaggaauauaug

SEQ ID NO: 3458140 - RNA, 20 nt, Human
ugaaggaauauauggcagag

SEQ ID NO: 3458141 - RNA, 21 nt, Human
ugaaggaauauauggcagagu

SEQ ID NO: 3458142 - RNA, 23 nt, Human
ugaaggaauauauggcagaguug

SEQ ID NO: 3458143 - RNA, 19 nt, Human
ugaaggacauugcggacag

SEQ ID NO: 3458144 - RNA, 20 nt, Human
ugaaggacuaauagaaaagu

SEQ ID NO: 3458145 - RNA, 16 nt, Human
ugaaggagagcccuuc

SEQ ID NO: 3458146 - RNA, 22 nt, Human
ugaaggagccccauuccuggga

SEQ ID NO: 3458147 - RNA, 14 nt, Human
ugaaggaggccacc

SEQ ID NO: 3458148 - RNA, 16 nt, Human
ugaaggaggccaccuc

SEQ ID NO: 3458149 - RNA, 20 nt, Human
ugaaggaggccaccuccuaa

SEQ ID NO: 3458150 - RNA, 19 nt, Human
ugaaggaggcuccaggcag

SEQ ID NO: 3458151 - RNA, 21 nt, Human
ugaaggaggcuccaggcagca

SEQ ID NO: 3458152 - RNA, 14 nt, Human
ugaaggcaaaauug

SEQ ID NO: 3458153 - RNA, 14 nt, Human
ugaaggcaaugcca

SEQ ID NO: 3458154 - RNA, 16 nt, Human
ugaaggccacuugagu

SEQ ID NO: 3458155 - RNA, 14 nt, Human
ugaaggccccgccc

SEQ ID NO: 3458156 - RNA, 16 nt, Human
ugaaggccucgcagga

SEQ ID NO: 3458157 - RNA, 18 nt, Human
ugaaggccuggcccacag

SEQ ID NO: 3458158 - RNA, 17 nt, Human
ugaaggcuaaaaagcaa

SEQ ID NO: 3458159 - RNA, 13 nt, Human
ugaaggcuggcau

SEQ ID NO: 3458160 - RNA, 16 nt, Human
ugaaggcuggcaugau

SEQ ID NO: 3458161 - RNA, 20 nt, Human
ugaaggcuggcaugauccaa

SEQ ID NO: 3458162 - RNA, 20 nt, Human
ugaaggcuggguucugaucc

SEQ ID NO: 3458163 - RNA, 21 nt, Human
ugaaggcuggguucugauccu

SEQ ID NO: 3458164 - RNA, 15 nt, Human
ugaaggcuucucucu

SEQ ID NO: 3458165 - RNA, 21 nt, Human
ugaagggaaaggauauuuucu

SEQ ID NO: 3458166 - RNA, 22 nt, Human
ugaagggaaaggauauuuucuu

SEQ ID NO: 3458167 - RNA, 15 nt, Human
ugaagggaagagaca

SEQ ID NO: 3458168 - RNA, 14 nt, Human
ugaagggagagcca

SEQ ID NO: 3458169 - RNA, 16 nt, Human
ugaagggagagccagc

SEQ ID NO: 3458170 - RNA, 14 nt, Human
ugaagggcccgaga

SEQ ID NO: 3458171 - RNA, 22 nt, Human
ugaaggggccaaggagggugag

SEQ ID NO: 3458172 - RNA, 22 nt, Human
ugaaggguaauuauauaguuac

SEQ ID NO: 3458173 - RNA, 23 nt, Human
ugaagguagcauucuuuggaguu

SEQ ID NO: 3458174 - RNA, 15 nt, Human
ugaagguauaucuag

SEQ ID NO: 3458175 - RNA, 16 nt, Human
ugaaggucuugauuug

SEQ ID NO: 3458176 - RNA, 15 nt, Human
ugaaggugacagcag

SEQ ID NO: 3458177 - RNA, 19 nt, Human
ugaaggugcugacggccag

SEQ ID NO: 3458178 - RNA, 18 nt, Human
ugaagguggaaauaaacu

SEQ ID NO: 3458179 - RNA, 15 nt, Human
ugaagguuguggccu

SEQ ID NO: 3458180 - RNA, 18 nt, Human
ugaagguuguggccuuug

SEQ ID NO: 3458181 - RNA, 21 nt, Human
ugaagguuuacaauuuacaaa

SEQ ID NO: 3458182 - RNA, 22 nt, Human
ugaagguuuacaauuuacaaag

SEQ ID NO: 3458183 - RNA, 23 nt, Human
ugaagguuuacaauuuacaaagu

SEQ ID NO: 3458184 - RNA, 13 nt, Human
ugaagguuuuuga

SEQ ID NO: 3458185 - RNA, 18 nt, Human
ugaagguuuuugauagca

SEQ ID NO: 3458186 - RNA, 19 nt, Human
ugaagguuuuugauagcau

SEQ ID NO: 3458187 - RNA, 16 nt, Human
ugaagguuuuuguaaa

SEQ ID NO: 3458188 - RNA, 18 nt, Human
ugaaguaacuugucuuaa

SEQ ID NO: 3458189 - RNA, 13 nt, Human
ugaaguaagcaaa

SEQ ID NO: 3458190 - RNA, 15 nt, Human
ugaaguaauaugcac

SEQ ID NO: 3458191 - RNA, 20 nt, Human
ugaaguaaugaauuuuuaug

SEQ ID NO: 3458192 - RNA, 17 nt, Human
ugaaguacucauacaug

SEQ ID NO: 3458193 - RNA, 17 nt, Human
ucuguuaacugaauacc

SEQ ID NO: 3458194 - RNA, 20 nt, Human
ucuguuaacugaauaccacu

SEQ ID NO: 3458195 - RNA, 19 nt, Human
ucuguuacaaaauguaacu

SEQ ID NO: 3458196 - RNA, 20 nt, Human
ucuguuacaaaauguaacug

SEQ ID NO: 3458197 - RNA, 20 nt, Human
ucuguuacacaaagaaccac

SEQ ID NO: 3458198 - RNA, 19 nt, Human
ucuguuaccaugucacugu

SEQ ID NO: 3458199 - RNA, 23 nt, Human
ucuguuauagguccuuuagaaac

SEQ ID NO: 3458200 - RNA, 18 nt, Human
ucuguuauauaaaugguu

SEQ ID NO: 3458201 - RNA, 15 nt, Human
ucuguuauguacugu

SEQ ID NO: 3458202 - RNA, 18 nt, Human
ucuguuauguacuguacu

SEQ ID NO: 3458203 - RNA, 22 nt, Human
ucuguuauguacuguacuaauu

SEQ ID NO: 3458204 - RNA, 15 nt, Human
ucuguuauuaacaaa

SEQ ID NO: 3458205 - RNA, 20 nt, Human
ucuguucaaagcugccuguc

SEQ ID NO: 3458206 - RNA, 21 nt, Human
ucuguucacuuuuccucccuc

SEQ ID NO: 3458207 - RNA, 14 nt, Human
ucuguucaggaagu

SEQ ID NO: 3458208 - RNA, 12 nt, Human
ucuguucagugu

SEQ ID NO: 3458209 - RNA, 16 nt, Human
ucuguucauuccucca

SEQ ID NO: 3458210 - RNA, 18 nt, Human
ucuguucauuuccucaaa

SEQ ID NO: 3458211 - RNA, 13 nt, Human
ucuguuccaaaug

SEQ ID NO: 3458212 - RNA, 23 nt, Human
ucuguuccaaauucaguuucaua

SEQ ID NO: 3458213 - RNA, 12 nt, Human
ucuguuccacau

SEQ ID NO: 3458214 - RNA, 17 nt, Human
ucuguuccauaguuaaa

SEQ ID NO: 3458215 - RNA, 24 nt, Human
ucuguuccauaguuaaagaagaca

SEQ ID NO: 3458216 - RNA, 13 nt, Human
ucuguuccuggcu

SEQ ID NO: 3458217 - RNA, 15 nt, Human
ucuguuccuucacau

SEQ ID NO: 3458218 - RNA, 15 nt, Human
ucuguucuaacaugu

SEQ ID NO: 3458219 - RNA, 13 nt, Human
ucuguucuaguuu

SEQ ID NO: 3458220 - RNA, 20 nt, Human
ucuguucuaguuuuuuacuu

SEQ ID NO: 3458221 - RNA, 20 nt, Human
ggggcaggaguagcugagcu

SEQ ID NO: 3458222 - RNA, 13 nt, Human
ggggcaggcccug

SEQ ID NO: 3458223 - RNA, 15 nt, Human
ggggcaggcccugca

SEQ ID NO: 3458224 - RNA, 16 nt, Human
ggggcaggcccugcac

SEQ ID NO: 3458225 - RNA, 18 nt, Human
ggggcaggcccugcacug

SEQ ID NO: 3458226 - RNA, 12 nt, Human
ggggcaggcuga

SEQ ID NO: 3458227 - RNA, 15 nt, Human
ggggcaggcugggcc

SEQ ID NO: 3458228 - RNA, 12 nt, Human
ggggcagggcug

SEQ ID NO: 3458229 - RNA, 19 nt, Human
ggggcaggggaggccaucu

SEQ ID NO: 3458230 - RNA, 15 nt, Human
ggggcagucugagag

SEQ ID NO: 3458231 - RNA, 20 nt, Human
ggggcaucugccccuccccc

SEQ ID NO: 3458232 - RNA, 18 nt, Human
ggggcauguauuggccug

SEQ ID NO: 3458233 - RNA, 16 nt, Human
ggggccaaaaggaaaa

SEQ ID NO: 3458234 - RNA, 21 nt, Human
ggggccacagccagaaccccg

SEQ ID NO: 3458235 - RNA, 13 nt, Human
ggggccagaggcu

SEQ ID NO: 3458236 - RNA, 17 nt, Human
ggggccaguuggucccc

SEQ ID NO: 3458237 - RNA, 18 nt, Human
ggggccauauucuuccug

SEQ ID NO: 3458238 - RNA, 16 nt, Human
ggggccaugaggccuc

SEQ ID NO: 3458239 - RNA, 19 nt, Human
ggggcccagggcaagcucc

SEQ ID NO: 3458240 - RNA, 12 nt, Human
ggggcccagggg

SEQ ID NO: 3458241 - RNA, 17 nt, Human
ggggcccaggggaggcg

SEQ ID NO: 3458242 - RNA, 14 nt, Human
ggggcccagugcau

SEQ ID NO: 3458243 - RNA, 18 nt, Human
ggggccccagucagccuc

SEQ ID NO: 3458244 - RNA, 15 nt, Human
ggggccccucucagc

SEQ ID NO: 3458245 - RNA, 21 nt, Human
ggggccccuuuuuacuccccu

SEQ ID NO: 3458246 - RNA, 15 nt, Human
ggggcccgcuugccu

SEQ ID NO: 3458247 - RNA, 13 nt, Human
ggggcccggccag

SEQ ID NO: 3458248 - RNA, 19 nt, Human
ggggcccguugucucccug

SEQ ID NO: 3458249 - RNA, 16 nt, Human
ucuugcaauggcagcc

SEQ ID NO: 3458250 - RNA, 17 nt, Human
ucuugcaauggcagccu

SEQ ID NO: 3458251 - RNA, 22 nt, Human
ucuugcaccaaauuaucuugau

SEQ ID NO: 3458252 - RNA, 22 nt, Human
ucuugcaccccaaagcuuuccu

SEQ ID NO: 3458253 - RNA, 14 nt, Human
ucuugcacccgccu

SEQ ID NO: 3458254 - RNA, 15 nt, Human
ucuugcacccgccuc

SEQ ID NO: 3458255 - RNA, 19 nt, Human
ucuugcacccgccucuccc

SEQ ID NO: 3458256 - RNA, 18 nt, Human
ucuugcagagaagccuug

SEQ ID NO: 3458257 - RNA, 20 nt, Human
ucuugcaggucucaacccuu

SEQ ID NO: 3458258 - RNA, 20 nt, Human
ucuugcaguaucggcacugu

SEQ ID NO: 3458259 - RNA, 17 nt, Human
ucuugcauauuuuguaa

SEQ ID NO: 3458260 - RNA, 18 nt, Human
ucuugcauccuuccuaua

SEQ ID NO: 3458261 - RNA, 21 nt, Human
ucuugcauccuuccuauaacu

SEQ ID NO: 3458262 - RNA, 22 nt, Human
ucuugcauccuuccuauaacuu

SEQ ID NO: 3458263 - RNA, 15 nt, Human
ucuugcaugaggcua

SEQ ID NO: 3458264 - RNA, 23 nt, Human
ucuugcauggcaaggacugcagg

SEQ ID NO: 3458265 - RNA, 12 nt, Human
ucuugcauguaa

SEQ ID NO: 3458266 - RNA, 15 nt, Human
ucuugcccauccuga

SEQ ID NO: 3458267 - RNA, 18 nt, Human
ucuugccccaacccccag

SEQ ID NO: 3458268 - RNA, 22 nt, Human
ucuugccccaacccccagcacc

SEQ ID NO: 3458269 - RNA, 21 nt, Human
ucuugccccaucacugcgcca

SEQ ID NO: 3458270 - RNA, 12 nt, Human
ucuugcccccca

SEQ ID NO: 3458271 - RNA, 21 nt, Human
ucuugccccccaccccagccu

SEQ ID NO: 3458272 - RNA, 14 nt, Human
ucuugcccugggga

SEQ ID NO: 3458273 - RNA, 18 nt, Human
ucuugcccuucccugucc

SEQ ID NO: 3458274 - RNA, 21 nt, Human
ucuugcccuucccugucccuc

SEQ ID NO: 3458275 - RNA, 12 nt, Human
ucuugccucugu

SEQ ID NO: 3458276 - RNA, 22 nt, Human
ucuugccucuguccccuucucu

SEQ ID NO: 3458277 - RNA, 16 nt, Human
ucuugccuguuuccca

SEQ ID NO: 3458278 - RNA, 23 nt, Human
ucuugccuguuucccaggcccac

SEQ ID NO: 3458279 - RNA, 15 nt, Human
ucuugccuuuuucau

SEQ ID NO: 3458280 - RNA, 19 nt, Human
ucuugccuuuuucauuauu

SEQ ID NO: 3458281 - RNA, 19 nt, Human
ucuugcuauauugcccagg

SEQ ID NO: 3458282 - RNA, 18 nt, Human
ucuugcucccuucagccc

SEQ ID NO: 3458283 - RNA, 18 nt, Human
ucuugcucuaucucucaa

SEQ ID NO: 3458284 - RNA, 12 nt, Human
ucuugcucuccu

SEQ ID NO: 3458285 - RNA, 14 nt, Human
ucuugcugcccugc

SEQ ID NO: 3458286 - RNA, 15 nt, Human
ucuugcugcccugcc

SEQ ID NO: 3458287 - RNA, 10 nt, Human
ucuugcugcu

SEQ ID NO: 3458288 - RNA, 22 nt, Human
ucuugcugcuagaacuuuuuua

SEQ ID NO: 3458289 - RNA, 11 nt, Human
ucuugcuggcu

SEQ ID NO: 3458290 - RNA, 23 nt, Human
ucuugcuggcuacgccucuucug

SEQ ID NO: 3458291 - RNA, 13 nt, Human
ucuugcugucucu

SEQ ID NO: 3458292 - RNA, 19 nt, Human
ucuugcugucucugcucgc

SEQ ID NO: 3458293 - RNA, 13 nt, Human
ucuugcugugguc

SEQ ID NO: 3458294 - RNA, 18 nt, Human
ucuugcuucccuaaucua

SEQ ID NO: 3458295 - RNA, 23 nt, Human
ucuugcuucccuaaucuaugguc

SEQ ID NO: 3458296 - RNA, 17 nt, Human
ucuugcuucuuucuaga

SEQ ID NO: 3458297 - RNA, 13 nt, Human
ucuugcuugggaa

SEQ ID NO: 3458298 - RNA, 20 nt, Human
ucuugcuuggggaacuugug

SEQ ID NO: 3458299 - RNA, 18 nt, Human
ucuugcuuguaccucugg

SEQ ID NO: 3458300 - RNA, 16 nt, Human
ucuuggaacuugccug

SEQ ID NO: 3458301 - RNA, 16 nt, Human
ucuuggaccucugcuc

SEQ ID NO: 3458302 - RNA, 21 nt, Human
ucuuggaccucugcucugagg

SEQ ID NO: 3458303 - RNA, 16 nt, Human
ucuuggagaagucuca

SEQ ID NO: 3458304 - RNA, 17 nt, Human
ucuuggagaagucucag

SEQ ID NO: 3458305 - RNA, 14 nt, Human
ucuuggagcuguga

SEQ ID NO: 3458306 - RNA, 15 nt, Human
ucuuggagcugugag

SEQ ID NO: 3458307 - RNA, 17 nt, Human
ucuuggcaaaagccuug

SEQ ID NO: 3458308 - RNA, 20 nt, Human
ucuuggcaaaagccuugugu

SEQ ID NO: 3458309 - RNA, 17 nt, Human
ucuuggcaauaaauuuu

SEQ ID NO: 3458310 - RNA, 22 nt, Human
ucuuggcaauaaauuuugaaaa

SEQ ID NO: 3458311 - RNA, 24 nt, Human
ucuuggcaauaaauuuugaaaagu

SEQ ID NO: 3458312 - RNA, 21 nt, Human
ucuuggcacauuuaagagaca

SEQ ID NO: 3458313 - RNA, 19 nt, Human
ucuuggcagcaccugucuc

SEQ ID NO: 3458314 - RNA, 21 nt, Human
ucuuggcccgcacagagcugg

SEQ ID NO: 3458315 - RNA, 19 nt, Human
ucuuggcuggacccagcca

SEQ ID NO: 3458316 - RNA, 15 nt, Human
ucuuggcuuaaucau

SEQ ID NO: 3458317 - RNA, 21 nt, Human
ucuuggcuuaaucauuuucau

SEQ ID NO: 3458318 - RNA, 17 nt, Human
ucuuggcuuggugagga

SEQ ID NO: 3458319 - RNA, 13 nt, Human
ucuuggcuuuguu

SEQ ID NO: 3458320 - RNA, 13 nt, Human
ucuugggaacuga

SEQ ID NO: 3458321 - RNA, 14 nt, Human
ucuugggaacugaa

SEQ ID NO: 3458322 - RNA, 17 nt, Human
ucuugggcaauauucuc

SEQ ID NO: 3458323 - RNA, 21 nt, Human
ucuugggcaauauucucugua

SEQ ID NO: 3458324 - RNA, 22 nt, Human
ucuugggcaauauucucuguac

SEQ ID NO: 3458325 - RNA, 20 nt, Human
ucuugggcagagcuggcucu

SEQ ID NO: 3458326 - RNA, 21 nt, Human
ucuugggcagagcuggcucug

SEQ ID NO: 3458327 - RNA, 13 nt, Human
ucuugggcccucc

SEQ ID NO: 3458328 - RNA, 21 nt, Human
ucuuggggacaucucuuugaa

SEQ ID NO: 3458329 - RNA, 23 nt, Human
ucuuggggaguuuaggguggggg

SEQ ID NO: 3458330 - RNA, 13 nt, Human
ucuuggggcccag

SEQ ID NO: 3458331 - RNA, 24 nt, Human
ucuugggggacagggcuggcccag

SEQ ID NO: 3458332 - RNA, 16 nt, Human
ucuuggguaggcggga

SEQ ID NO: 3458333 - RNA, 16 nt, Human
ucuugggucuaugccu

SEQ ID NO: 3458334 - RNA, 14 nt, Human
ucuugguagagauu

SEQ ID NO: 3458335 - RNA, 15 nt, Human
ucuuggucuucccag

SEQ ID NO: 3458336 - RNA, 13 nt, Human
ucuugguugagga

SEQ ID NO: 3458337 - RNA, 14 nt, Human
ucuugguuuguaaa

SEQ ID NO: 3458338 - RNA, 13 nt, Human
ucuuguaaagacu

SEQ ID NO: 3458339 - RNA, 17 nt, Human
ucuuguaaauaaagccc

SEQ ID NO: 3458340 - RNA, 16 nt, Human
ucuuguaagauuuuga

SEQ ID NO: 3458341 - RNA, 17 nt, Human
ucuuguaagauuuugaa

SEQ ID NO: 3458342 - RNA, 18 nt, Human
ucuuguaagauuuugaaa

SEQ ID NO: 3458343 - RNA, 16 nt, Human
ucuuguaauuuggauc

SEQ ID NO: 3458344 - RNA, 13 nt, Human
ucuuguaauuuua

SEQ ID NO: 3458345 - RNA, 15 nt, Human
ucuuguaauuuuaca

SEQ ID NO: 3458346 - RNA, 24 nt, Human
ucuuguacauguguagccugugca

SEQ ID NO: 3458347 - RNA, 17 nt, Human
ucuuguagcccaggcug

SEQ ID NO: 3458348 - RNA, 23 nt, Human
ucuuguagcggaugauucuucaa

SEQ ID NO: 3458349 - RNA, 16 nt, Human
ucuuguauuaaacucu

SEQ ID NO: 3458350 - RNA, 14 nt, Human
ucuuguauuaagaa

SEQ ID NO: 3458351 - RNA, 22 nt, Human
ucuuguauuaagaaugaaauac

SEQ ID NO: 3458352 - RNA, 22 nt, Human
ucuuguauuaaguuguuaauaa

SEQ ID NO: 3458353 - RNA, 22 nt, Human
ucuuguauuuauugguuuugca

SEQ ID NO: 3458354 - RNA, 21 nt, Human
ucuugucagacauaaagccau

SEQ ID NO: 3458355 - RNA, 23 nt, Human
ucuugucagacauaaagccaugu

SEQ ID NO: 3458356 - RNA, 11 nt, Human
ucuugucaugu

SEQ ID NO: 3458357 - RNA, 13 nt, Human
ucuugucaugugu

SEQ ID NO: 3458358 - RNA, 23 nt, Human
ucuugucccacgugucuuccacu

SEQ ID NO: 3458359 - RNA, 23 nt, Human
ucuuguccccucuugacccaucu

SEQ ID NO: 3458360 - RNA, 20 nt, Human
ucuuguccucauucuugccu

SEQ ID NO: 3458361 - RNA, 15 nt, Human
ucuugucucaaugcu

SEQ ID NO: 3458362 - RNA, 17 nt, Human
ucuugucucaaugcuca

SEQ ID NO: 3458363 - RNA, 12 nt, Human
ucuugucucaga

SEQ ID NO: 3458364 - RNA, 17 nt, Human
ucuugucucagauuuua

SEQ ID NO: 3458365 - RNA, 15 nt, Human
ucuugucuccccugu

SEQ ID NO: 3458366 - RNA, 17 nt, Human
ugagaaaacuucuuuua

SEQ ID NO: 3458367 - RNA, 19 nt, Human
ugagaaaagcuuugaaccc

SEQ ID NO: 3458368 - RNA, 22 nt, Human
ugagaaaccuguaucuuucuau

SEQ ID NO: 3458369 - RNA, 24 nt, Human
ugagaaaccuguaucuuucuaugc

SEQ ID NO: 3458370 - RNA, 21 nt, Human
ugagaaacuggcaaagcagaa

SEQ ID NO: 3458371 - RNA, 18 nt, Human
ugagaaacuuaaauguua

SEQ ID NO: 3458372 - RNA, 15 nt, Human
ugagaaagacuauuc

SEQ ID NO: 3458373 - RNA, 16 nt, Human
ugagaaagacuauuca

SEQ ID NO: 3458374 - RNA, 14 nt, Human
ugagaaagagcacu

SEQ ID NO: 3458375 - RNA, 13 nt, Human
ugagaaagcccug

SEQ ID NO: 3458376 - RNA, 14 nt, Human
ugagaaagccuucu

SEQ ID NO: 3458377 - RNA, 21 nt, Human
ugagaaagucagauucuugca

SEQ ID NO: 3458378 - RNA, 21 nt, Human
ugagaaauauggacacuuaau

SEQ ID NO: 3458379 - RNA, 13 nt, Human
ugagaaauuuaaa

SEQ ID NO: 3458380 - RNA, 14 nt, Human
ugagaaauuuaaac

SEQ ID NO: 3458381 - RNA, 15 nt, Human
ugagaaauuuaaacu

SEQ ID NO: 3458382 - RNA, 17 nt, Human
ugagaaauuuauaaacu

SEQ ID NO: 3458383 - RNA, 16 nt, Human
ugagaaauuucuguga

SEQ ID NO: 3458384 - RNA, 20 nt, Human
ugagaacaaagcuguuaaac

SEQ ID NO: 3458385 - RNA, 22 nt, Human
ugagaacaaagcuguuaaacug

SEQ ID NO: 3458386 - RNA, 19 nt, Human
ugagaacaaccaaaaucuu

SEQ ID NO: 3458387 - RNA, 12 nt, Human
ugagaacacugu

SEQ ID NO: 3458388 - RNA, 16 nt, Human
ugagaacacugugaaa

SEQ ID NO: 3458389 - RNA, 16 nt, Human
ugagaacccugcgugg

SEQ ID NO: 3458390 - RNA, 21 nt, Human
ugagaacccugcguggggaca

SEQ ID NO: 3458391 - RNA, 21 nt, Human
ugagaacguaaagaacuuuuu

SEQ ID NO: 3458392 - RNA, 13 nt, Human
ugagaacuccuga

SEQ ID NO: 3458393 - RNA, 20 nt, Human
ugagaacugcauauguuucg

SEQ ID NO: 3458394 - RNA, 18 nt, Human
ugagaacuuaaguggcua

SEQ ID NO: 3458395 - RNA, 17 nt, Human
ugagaacuuuauuucca

SEQ ID NO: 3458396 - RNA, 14 nt, Human
ugagaagaaaacau

SEQ ID NO: 3458397 - RNA, 20 nt, Human
ugagaagaaaauggaaccag

SEQ ID NO: 3458398 - RNA, 22 nt, Human
ugagaagaaaauggaaccaggc

SEQ ID NO: 3458399 - RNA, 14 nt, Human
ugagaagaauauug

SEQ ID NO: 3458400 - RNA, 20 nt, Human
ugagaagagggccuguggga

SEQ ID NO: 3458401 - RNA, 23 nt, Human
ugagaagauucuucccauucucc

SEQ ID NO: 3458402 - RNA, 15 nt, Human
ugagaagccuucagc

SEQ ID NO: 3458403 - RNA, 19 nt, Human
ugagaagccuucagcucca

SEQ ID NO: 3458404 - RNA, 14 nt, Human
ugagaagcugcuca

SEQ ID NO: 3458405 - RNA, 16 nt, Human
ugagaagcugcucaac

SEQ ID NO: 3458406 - RNA, 20 nt, Human
ugagaagcugcuccaggccu

SEQ ID NO: 3458407 - RNA, 20 nt, Human
ggggcccguugucucccugg

SEQ ID NO: 3458408 - RNA, 14 nt, Human
ggggcccugcccug

SEQ ID NO: 3458409 - RNA, 16 nt, Human
ggggcccuggagcagc

SEQ ID NO: 3458410 - RNA, 21 nt, Human
ggggccgaugcccagagacac

SEQ ID NO: 3458411 - RNA, 18 nt, Human
ggggccguggggguugag

SEQ ID NO: 3458412 - RNA, 23 nt, Human
ggggccuaauaaaacugauguga

SEQ ID NO: 3458413 - RNA, 21 nt, Human
ggggccuagcgaucucuccug

SEQ ID NO: 3458414 - RNA, 19 nt, Human
ggggccuaucagugugccc

SEQ ID NO: 3458415 - RNA, 23 nt, Human
ggggccuaucagugugcccccca

SEQ ID NO: 3458416 - RNA, 12 nt, Human
ggggccucccug

SEQ ID NO: 3458417 - RNA, 21 nt, Human
ggggccugaccucccccuccu

SEQ ID NO: 3458418 - RNA, 12 nt, Human
ggggccugagag

SEQ ID NO: 3458419 - RNA, 15 nt, Human
ggggccugagagaau

SEQ ID NO: 3458420 - RNA, 23 nt, Human
ggggccugagcaguccuuggccu

SEQ ID NO: 3458421 - RNA, 12 nt, Human
ggggccugccac

SEQ ID NO: 3458422 - RNA, 16 nt, Human
ggggccuggaccugcc

SEQ ID NO: 3458423 - RNA, 12 nt, Human
ggggccuggaug

SEQ ID NO: 3458424 - RNA, 13 nt, Human
ggggccuggcagg

SEQ ID NO: 3458425 - RNA, 18 nt, Human
ggggccuguacugccugc

SEQ ID NO: 3458426 - RNA, 19 nt, Human
ggggccuguacugccugcu

SEQ ID NO: 3458427 - RNA, 23 nt, Human
ggggccuuagggcacugggcugu

SEQ ID NO: 3458428 - RNA, 20 nt, Human
ggggccuuugggugcuguuu

SEQ ID NO: 3458429 - RNA, 14 nt, Human
ggggcgaggcaggc

SEQ ID NO: 3458430 - RNA, 14 nt, Human
ggggcgcccaccuc

SEQ ID NO: 3458431 - RNA, 19 nt, Human
ggggcgcccaccuccccac

SEQ ID NO: 3458432 - RNA, 18 nt, Human
ggggcgcuggcccagccg

SEQ ID NO: 3458433 - RNA, 23 nt, Human
ggggcgcuggcccagccggccuc

SEQ ID NO: 3458434 - RNA, 14 nt, Human
ggggcuacaagagg

SEQ ID NO: 3458435 - RNA, 15 nt, Human
ggggcuacaagaggg

SEQ ID NO: 3458436 - RNA, 17 nt, Human
ggggcuacaagagggaa

SEQ ID NO: 3458437 - RNA, 21 nt, Human
ggggcuagaaccuagagaagc

SEQ ID NO: 3458438 - RNA, 20 nt, Human
ggggcucagcaaggccaccu

SEQ ID NO: 3458439 - RNA, 12 nt, Human
ggggcucccagc

SEQ ID NO: 3458440 - RNA, 13 nt, Human
ggggcucccagcc

SEQ ID NO: 3458441 - RNA, 20 nt, Human
ggggcucccagccaggcccu

SEQ ID NO: 3458442 - RNA, 20 nt, Human
ggggcucccgccuccaaccc

SEQ ID NO: 3458443 - RNA, 19 nt, Human
ggggcucccuccgccccca

SEQ ID NO: 3458444 - RNA, 21 nt, Human
ggggcucuaacgccugagccc

SEQ ID NO: 3458445 - RNA, 22 nt, Human
ggggcucuaacgccugagccca

SEQ ID NO: 3458446 - RNA, 14 nt, Human
ggggcucuggagag

SEQ ID NO: 3458447 - RNA, 17 nt, Human
ggggcucuggagagaaa

SEQ ID NO: 3458448 - RNA, 18 nt, Human
ggggcucuggagagaaac

SEQ ID NO: 3458449 - RNA, 12 nt, Human
ggggcucuggga

SEQ ID NO: 3458450 - RNA, 14 nt, Human
ggggcugaggggca

SEQ ID NO: 3458451 - RNA, 20 nt, Human
ggggcugaucucagggaagc

SEQ ID NO: 3458452 - RNA, 23 nt, Human
ggggcugcaccggcuggccuggc

SEQ ID NO: 3458453 - RNA, 13 nt, Human
ggggcugcagcau

SEQ ID NO: 3458454 - RNA, 15 nt, Human
ggggcugcccgcucc

SEQ ID NO: 3458455 - RNA, 12 nt, Human
ggggcugcugcu

SEQ ID NO: 3458456 - RNA, 21 nt, Human
ggggcuggaggagcccaggcc

SEQ ID NO: 3458457 - RNA, 16 nt, Human
ggggcugggcagagga

SEQ ID NO: 3458458 - RNA, 22 nt, Human
ggggcuggguuggcgcacccuc

SEQ ID NO: 3458459 - RNA, 18 nt, Human
ggggcuguugaagucacc

SEQ ID NO: 3458460 - RNA, 12 nt, Human
ggggcuuauuuu

SEQ ID NO: 3458461 - RNA, 11 nt, Human
ggggcuuccug

SEQ ID NO: 3458462 - RNA, 19 nt, Human
ggggcuucugugcaccugg

SEQ ID NO: 3458463 - RNA, 19 nt, Human
ggggcuuggcguggagcag

SEQ ID NO: 3458464 - RNA, 21 nt, Human
ggggcuuucguccacagcuuc

SEQ ID NO: 3458465 - RNA, 15 nt, Human
ggggcuuucuggaga

SEQ ID NO: 3458466 - RNA, 21 nt, Human
gggggaaacagguugggaugg

SEQ ID NO: 3458467 - RNA, 12 nt, Human
gggggaaagcac

SEQ ID NO: 3458468 - RNA, 17 nt, Human
gggggaacgaugugucu

SEQ ID NO: 3458469 - RNA, 22 nt, Human
gggggacagggcuggcccagcc

SEQ ID NO: 3458470 - RNA, 20 nt, Human
gggggacucugagcgggagg

SEQ ID NO: 3458471 - RNA, 19 nt, Human
gggggacugcugcugccug

SEQ ID NO: 3458472 - RNA, 18 nt, Human
gggggagcacccugaggg

SEQ ID NO: 3458473 - RNA, 17 nt, Human
gggggagucugaagcag

SEQ ID NO: 3458474 - RNA, 22 nt, Human
gggggaugccacuccucccucc

SEQ ID NO: 3458475 - RNA, 23 nt, Human
gggggcaagaagaucacgcuccc

SEQ ID NO: 3458476 - RNA, 15 nt, Human
gggggcacaagacug

SEQ ID NO: 3458477 - RNA, 15 nt, Human
gggggcacaggaggc

SEQ ID NO: 3458478 - RNA, 13 nt, Human
gggggcagagggc

SEQ ID NO: 3458479 - RNA, 14 nt, Human
gggggcagggcaug

SEQ ID NO: 3458480 - RNA, 14 nt, Human
gggggcaggugcug

SEQ ID NO: 3458481 - RNA, 14 nt, Human
gggggccaaaagga

SEQ ID NO: 3458482 - RNA, 17 nt, Human
gggggccaccuccccag

SEQ ID NO: 3458483 - RNA, 14 nt, Human
gggggccaggugca

SEQ ID NO: 3458484 - RNA, 21 nt, Human
gggggccucagggcagccugc

SEQ ID NO: 3458485 - RNA, 12 nt, Human
gggggccucagu

SEQ ID NO: 3458486 - RNA, 15 nt, Human
gggggccucagugcc

SEQ ID NO: 3458487 - RNA, 15 nt, Human
gggggccuggaugcc

SEQ ID NO: 3458488 - RNA, 12 nt, Human
gggggccuggcu

SEQ ID NO: 3458489 - RNA, 15 nt, Human
gggggccuggcuggc

SEQ ID NO: 3458490 - RNA, 17 nt, Human
gggggccuggcuggcug

SEQ ID NO: 3458491 - RNA, 22 nt, Human
gggggcuauagcuacaggaagc

SEQ ID NO: 3458492 - RNA, 20 nt, Human
gggggcucaguucuggacug

SEQ ID NO: 3458493 - RNA, 19 nt, Human
gggggcucccguggccugu

SEQ ID NO: 3458494 - RNA, 16 nt, Human
gggggcuggaggagcc

SEQ ID NO: 3458495 - RNA, 13 nt, Human
gggggcuggggca

SEQ ID NO: 3458496 - RNA, 13 nt, Human
gggggcuggugcc

SEQ ID NO: 3458497 - RNA, 21 nt, Human
gggggcuggugccagccuucc

SEQ ID NO: 3458498 - RNA, 10 nt, Human
ggggggaggc

SEQ ID NO: 3458499 - RNA, 15 nt, Human
ggggguagagcugau

SEQ ID NO: 3458500 - RNA, 19 nt, Human
ggggguccuccuccaggga

SEQ ID NO: 3458501 - RNA, 20 nt, Human
ggggguccuccuccagggac

SEQ ID NO: 3458502 - RNA, 17 nt, Human
gggggucuggcuggugu

SEQ ID NO: 3458503 - RNA, 20 nt, Human
gggggugaugagggcagcag

SEQ ID NO: 3458504 - RNA, 13 nt, Human
ggggguggccagg

SEQ ID NO: 3458505 - RNA, 13 nt, Human
ggggguggccucc

SEQ ID NO: 3458506 - RNA, 19 nt, Human
ggggguugcaguggagagg

SEQ ID NO: 3458507 - RNA, 18 nt, Human
ggggguugcggggggagg

SEQ ID NO: 3458508 - RNA, 20 nt, Human
gggguauuucaauuaccuuc

SEQ ID NO: 3458509 - RNA, 18 nt, Human
gggguauuuuaggcaggg

SEQ ID NO: 3458510 - RNA, 17 nt, Human
ggggucaaagcaaggau

SEQ ID NO: 3458511 - RNA, 15 nt, Human
ugaacauugcaauag

SEQ ID NO: 3458512 - RNA, 18 nt, Human
ugaacauugcaauagaaa

SEQ ID NO: 3458513 - RNA, 20 nt, Human
ugaacauugguucuuucauu

SEQ ID NO: 3458514 - RNA, 15 nt, Human
ugaacauuuacuaca

SEQ ID NO: 3458515 - RNA, 19 nt, Human
ugaacauuuggguaaauca

SEQ ID NO: 3458516 - RNA, 22 nt, Human
ugaacauuuggguuacuauuuc

SEQ ID NO: 3458517 - RNA, 17 nt, Human
ugaaccaaaacauuccg

SEQ ID NO: 3458518 - RNA, 18 nt, Human
ugaaccaagaucuauaaa

SEQ ID NO: 3458519 - RNA, 15 nt, Human
ugaaccaaucuggau

SEQ ID NO: 3458520 - RNA, 19 nt, Human
ugaaccacaucuugcucug

SEQ ID NO: 3458521 - RNA, 23 nt, Human
ugaaccacaucuugcucugcuga

SEQ ID NO: 3458522 - RNA, 15 nt, Human
ugaaccacuucauuc

SEQ ID NO: 3458523 - RNA, 14 nt, Human
ugaaccacuucccu

SEQ ID NO: 3458524 - RNA, 23 nt, Human
ugaaccacuucccucaucucucc

SEQ ID NO: 3458525 - RNA, 14 nt, Human
ugaaccacuuguag

SEQ ID NO: 3458526 - RNA, 21 nt, Human
ugaaccacuuguagauuugau

SEQ ID NO: 3458527 - RNA, 22 nt, Human
ugaaccauaaauucaacuuugu

SEQ ID NO: 3458528 - RNA, 18 nt, Human
ugaaccauaguuacugua

SEQ ID NO: 3458529 - RNA, 13 nt, Human
ugaacccaggaca

SEQ ID NO: 3458530 - RNA, 21 nt, Human
ugaacccaggacgcuucugaa

SEQ ID NO: 3458531 - RNA, 22 nt, Human
ugaacccaggacgcuucugaau

SEQ ID NO: 3458532 - RNA, 14 nt, Human
ugaacccaggaggu

SEQ ID NO: 3458533 - RNA, 19 nt, Human
ugaacccaggagguggagg

SEQ ID NO: 3458534 - RNA, 15 nt, Human
ugaacccuggggccu

SEQ ID NO: 3458535 - RNA, 15 nt, Human
ugaacccugugcugg

SEQ ID NO: 3458536 - RNA, 14 nt, Human
ugaaccgcacagcu

SEQ ID NO: 3458537 - RNA, 16 nt, Human
ugaaccgcugaauaug

SEQ ID NO: 3458538 - RNA, 20 nt, Human
ugaaccuaccuucauuucag

SEQ ID NO: 3458539 - RNA, 17 nt, Human
ugaaccuaugaagcaau

SEQ ID NO: 3458540 - RNA, 14 nt, Human
ugaaccugggaggu

SEQ ID NO: 3458541 - RNA, 13 nt, Human
ugaaccugugagu

SEQ ID NO: 3458542 - RNA, 19 nt, Human
ugaaccugugaguaaauau

SEQ ID NO: 3458543 - RNA, 23 nt, Human
ugaaccugugaguaaauauugag

SEQ ID NO: 3458544 - RNA, 17 nt, Human
ugaaccuuugugcccua

SEQ ID NO: 3458545 - RNA, 18 nt, Human
ugaaccuuugugcccuau

SEQ ID NO: 3458546 - RNA, 13 nt, Human
ugaacggggagaa

SEQ ID NO: 3458547 - RNA, 16 nt, Human
ugaacggggagaaaag

SEQ ID NO: 3458548 - RNA, 17 nt, Human
ugaacguuugguucaaa

SEQ ID NO: 3458549 - RNA, 20 nt, Human
ugaacguuugguucaaaugu

SEQ ID NO: 3458550 - RNA, 21 nt, Human
ugaacuaaagugcugcacuca

SEQ ID NO: 3458551 - RNA, 20 nt, Human
ugaacuaccuugguuccccc

SEQ ID NO: 3458552 - RNA, 23 nt, Human
ugaacuagaguuuagcuggaaaa

SEQ ID NO: 3458553 - RNA, 18 nt, Human
ugaacucaaacugaggaa

SEQ ID NO: 3458554 - RNA, 17 nt, Human
ugaacucaacuuugaca

SEQ ID NO: 3458555 - RNA, 18 nt, Human
ugaacucacuuuccuccu

SEQ ID NO: 3458556 - RNA, 22 nt, Human
ugaacucagaucugucugauag

SEQ ID NO: 3458557 - RNA, 22 nt, Human
ugaacucagccaagcacagugg

SEQ ID NO: 3458558 - RNA, 14 nt, Human
ugaacuccuggccu

SEQ ID NO: 3458559 - RNA, 16 nt, Human
ugaacucugacaacag

SEQ ID NO: 3458560 - RNA, 14 nt, Human
ugaacucugagaga

SEQ ID NO: 3458561 - RNA, 15 nt, Human
ugaacucuuaaucaa

SEQ ID NO: 3458562 - RNA, 12 nt, Human
ugaacucuuaga

SEQ ID NO: 3458563 - RNA, 18 nt, Human
ugaacucuucaaucucuu

SEQ ID NO: 3458564 - RNA, 15 nt, Human
ugaacucuucacucu

SEQ ID NO: 3458565 - RNA, 14 nt, Human
ugaacucuucucau

SEQ ID NO: 3458566 - RNA, 18 nt, Human
ugaacucuucucauuacu

SEQ ID NO: 3458567 - RNA, 17 nt, Human
ugaacucuuugaaugac

SEQ ID NO: 3458568 - RNA, 19 nt, Human
ugaacucuuugaaugacaa

SEQ ID NO: 3458569 - RNA, 14 nt, Human
ugaacugaacacca

SEQ ID NO: 3458570 - RNA, 15 nt, Human
ugaacugaaguuuca

SEQ ID NO: 3458571 - RNA, 17 nt, Human
ugaacugaaguuucaca

SEQ ID NO: 3458572 - RNA, 21 nt, Human
ugaacugacaggcagccugga

SEQ ID NO: 3458573 - RNA, 21 nt, Human
ugaacugauucacaucucauu

SEQ ID NO: 3458574 - RNA, 18 nt, Human
ugaacuggacccuguugc

SEQ ID NO: 3458575 - RNA, 20 nt, Human
ugaacuggacccuguugcua

SEQ ID NO: 3458576 - RNA, 19 nt, Human
ugaacuggguacuugugga

SEQ ID NO: 3458577 - RNA, 17 nt, Human
ugaacuggucuuccuuu

SEQ ID NO: 3458578 - RNA, 13 nt, Human
ugaacuguuagaa

SEQ ID NO: 3458579 - RNA, 16 nt, Human
ugaacuguuagaaugu

SEQ ID NO: 3458580 - RNA, 17 nt, Human
ugaacuguuagaaugua

SEQ ID NO: 3458581 - RNA, 17 nt, Human
ugaacuuaaauaaaugu

SEQ ID NO: 3458582 - RNA, 22 nt, Human
ugaacuuaaauaaaugucauua

SEQ ID NO: 3458583 - RNA, 19 nt, Human
ugaacuuagauuuuacaug

SEQ ID NO: 3458584 - RNA, 16 nt, Human
ugaacuuauucuguag

SEQ ID NO: 3458585 - RNA, 18 nt, Human
ugaacuucagcuagagcu

SEQ ID NO: 3458586 - RNA, 15 nt, Human
ugaacuucucucaga

SEQ ID NO: 3458587 - RNA, 18 nt, Human
ugaacuucucucagacuu

SEQ ID NO: 3458588 - RNA, 22 nt, Human
ugaacuucucucagacuuacuu

SEQ ID NO: 3458589 - RNA, 13 nt, Human
ugaacuugaaauu

SEQ ID NO: 3458590 - RNA, 18 nt, Human
ugaacuugaaauuugaau

SEQ ID NO: 3458591 - RNA, 17 nt, Human
ugaacuugaggacacau

SEQ ID NO: 3458592 - RNA, 18 nt, Human
ugaacuugaggacacaug

SEQ ID NO: 3458593 - RNA, 17 nt, Human
ugaacuugcauugugau

SEQ ID NO: 3458594 - RNA, 16 nt, Human
ugaacuugccucuuuu

SEQ ID NO: 3458595 - RNA, 16 nt, Human
ugaacuuggaagcaca

SEQ ID NO: 3458596 - RNA, 22 nt, Human
ugaacuuguaaaggaauuuaaa

SEQ ID NO: 3458597 - RNA, 13 nt, Human
ugaacuuugaaga

SEQ ID NO: 3458598 - RNA, 11 nt, Human
ugaacuuugac

SEQ ID NO: 3458599 - RNA, 16 nt, Human
ugaacuuugaccucug

SEQ ID NO: 3458600 - RNA, 15 nt, Human
ugaacuuugcugagc

SEQ ID NO: 3458601 - RNA, 16 nt, Human
ugaacuuugcugagcc

SEQ ID NO: 3458602 - RNA, 14 nt, Human
ugaacuuuggagag

SEQ ID NO: 3458603 - RNA, 17 nt, Human
ugaacuuuuuauugauu

SEQ ID NO: 3458604 - RNA, 15 nt, Human
ugaagaaaaaauaca

SEQ ID NO: 3458605 - RNA, 15 nt, Human
ugaagaaaagugggc

SEQ ID NO: 3458606 - RNA, 14 nt, Human
ugaagaaaauacuu

SEQ ID NO: 3458607 - RNA, 16 nt, Human
ugaagaaaauacuuaa

SEQ ID NO: 3458608 - RNA, 18 nt, Human
ugaagaaaauacuuaaau

SEQ ID NO: 3458609 - RNA, 20 nt, Human
ugaagaaaauacuuaaaugu

SEQ ID NO: 3458610 - RNA, 18 nt, Human
ugaagaaacagauaccau

SEQ ID NO: 3458611 - RNA, 16 nt, Human
ugaagaaacagcuaug

SEQ ID NO: 3458612 - RNA, 20 nt, Human
ugaggcuuaacaaugucuug

SEQ ID NO: 3458613 - RNA, 13 nt, Human
ugaggcuugcuga

SEQ ID NO: 3458614 - RNA, 14 nt, Human
ugaggcuugcugag

SEQ ID NO: 3458615 - RNA, 16 nt, Human
ugaggcuugcugagag

SEQ ID NO: 3458616 - RNA, 17 nt, Human
ugaggcuugcugagagg

SEQ ID NO: 3458617 - RNA, 19 nt, Human
ugaggcuuuccaugggacc

SEQ ID NO: 3458618 - RNA, 13 nt, Human
ugaggcuuuggau

SEQ ID NO: 3458619 - RNA, 18 nt, Human
ugaggcuuuggauuugac

SEQ ID NO: 3458620 - RNA, 23 nt, Human
ugaggcuuuggauuugacauugc

SEQ ID NO: 3458621 - RNA, 17 nt, Human
ugaggcuuuguguugua

SEQ ID NO: 3458622 - RNA, 16 nt, Human
ugagggaaauguuuug

SEQ ID NO: 3458623 - RNA, 16 nt, Human
ugagggaacagacagg

SEQ ID NO: 3458624 - RNA, 17 nt, Human
ugagggaacagagaggu

SEQ ID NO: 3458625 - RNA, 22 nt, Human
ugagggacaaauuuaaaacaaa

SEQ ID NO: 3458626 - RNA, 18 nt, Human
ugagggaccagccaagag

SEQ ID NO: 3458627 - RNA, 13 nt, Human
ugagggacucuga

SEQ ID NO: 3458628 - RNA, 20 nt, Human
ugagggaggaccuggggcac

SEQ ID NO: 3458629 - RNA, 18 nt, Human
ugagggaggaggccaccu

SEQ ID NO: 3458630 - RNA, 20 nt, Human
ugagggaggaggccaccucu

SEQ ID NO: 3458631 - RNA, 14 nt, Human
ugagggaggggaaa

SEQ ID NO: 3458632 - RNA, 18 nt, Human
ugagggaucacagggccc

SEQ ID NO: 3458633 - RNA, 17 nt, Human
ugagggaugggccuggc

SEQ ID NO: 3458634 - RNA, 12 nt, Human
ugagggcaaauc

SEQ ID NO: 3458635 - RNA, 18 nt, Human
ugagggcagacuggggca

SEQ ID NO: 3458636 - RNA, 12 nt, Human
ugagggcagcag

SEQ ID NO: 3458637 - RNA, 13 nt, Human
ugagggcagcagc

SEQ ID NO: 3458638 - RNA, 14 nt, Human
ugagggcagcagcc

SEQ ID NO: 3458639 - RNA, 21 nt, Human
ugagggcaguucgcagccacc

SEQ ID NO: 3458640 - RNA, 21 nt, Human
ugagggcaucuugguccagga

SEQ ID NO: 3458641 - RNA, 16 nt, Human
ugagggcccagagcag

SEQ ID NO: 3458642 - RNA, 15 nt, Human
ugagggccugcugga

SEQ ID NO: 3458643 - RNA, 20 nt, Human
ugagggccugcuggaggccu

SEQ ID NO: 3458644 - RNA, 16 nt, Human
ugagggcggggugucu

SEQ ID NO: 3458645 - RNA, 18 nt, Human
ugaggggaagcuagucuu

SEQ ID NO: 3458646 - RNA, 16 nt, Human
ugaggggaccaggagu

SEQ ID NO: 3458647 - RNA, 22 nt, Human
ugaggggaccaggagugggugg

SEQ ID NO: 3458648 - RNA, 16 nt, Human
ugaggggagaggagac

SEQ ID NO: 3458649 - RNA, 15 nt, Human
ugaggggagccagga

SEQ ID NO: 3458650 - RNA, 18 nt, Human
ugaggggagccaggaggg

SEQ ID NO: 3458651 - RNA, 21 nt, Human
ugaggggaggaaacucaccug

SEQ ID NO: 3458652 - RNA, 22 nt, Human
ugaggggaggaucacuggagcc

SEQ ID NO: 3458653 - RNA, 15 nt, Human
ugaggggaggggggc

SEQ ID NO: 3458654 - RNA, 18 nt, Human
ugaggggcagccugccuu

SEQ ID NO: 3458655 - RNA, 17 nt, Human
ugaggggcaucugcccc

SEQ ID NO: 3458656 - RNA, 21 nt, Human
ugaagagacagagacaaguaa

SEQ ID NO: 3458657 - RNA, 21 nt, Human
ugaagagagauauaucugaaa

SEQ ID NO: 3458658 - RNA, 16 nt, Human
ugaagagauccuucug

SEQ ID NO: 3458659 - RNA, 22 nt, Human
ugaagagccagaagugaagagu

SEQ ID NO: 3458660 - RNA, 15 nt, Human
ugaagagcuagagaa

SEQ ID NO: 3458661 - RNA, 17 nt, Human
ugaagagcuggggagaa

SEQ ID NO: 3458662 - RNA, 18 nt, Human
ugaagagcuggggagaau

SEQ ID NO: 3458663 - RNA, 15 nt, Human
ugaagagcuugcuuu

SEQ ID NO: 3458664 - RNA, 18 nt, Human
ugaagagcuugcuuugau

SEQ ID NO: 3458665 - RNA, 12 nt, Human
ugaagaggaaaa

SEQ ID NO: 3458666 - RNA, 23 nt, Human
ugaagaggaggggaagaggccug

SEQ ID NO: 3458667 - RNA, 17 nt, Human
ugaagaggcgggccagc

SEQ ID NO: 3458668 - RNA, 20 nt, Human
ugaagaggcgggccagccag

SEQ ID NO: 3458669 - RNA, 21 nt, Human
ugaagaggcgggccagccagg

SEQ ID NO: 3458670 - RNA, 21 nt, Human
ugaagagggagaagcaugaaa

SEQ ID NO: 3458671 - RNA, 15 nt, Human
ugaagaggggcagcc

SEQ ID NO: 3458672 - RNA, 16 nt, Human
ugaagaggggcagccc

SEQ ID NO: 3458673 - RNA, 17 nt, Human
ugaagaggggcagcccu

SEQ ID NO: 3458674 - RNA, 19 nt, Human
ugaagaggggcagcccuug

SEQ ID NO: 3458675 - RNA, 23 nt, Human
ugaagaguaaucaaucuacucaa

SEQ ID NO: 3458676 - RNA, 23 nt, Human
ugaagaguccucugaaugaaccu

SEQ ID NO: 3458677 - RNA, 18 nt, Human
ugaagagucgauuauuuc

SEQ ID NO: 3458678 - RNA, 16 nt, Human
ugaagagugagagggc

SEQ ID NO: 3458679 - RNA, 17 nt, Human
ugaagagugagagggca

SEQ ID NO: 3458680 - RNA, 23 nt, Human
ugaagaguguuauuuucauucaa

SEQ ID NO: 3458681 - RNA, 14 nt, Human
ugaagauacugaaa

SEQ ID NO: 3458682 - RNA, 15 nt, Human
ugaagauacuuugua

SEQ ID NO: 3458683 - RNA, 19 nt, Human
ugaagauacuuuguauugu

SEQ ID NO: 3458684 - RNA, 15 nt, Human
ugaagauagaagaaa

SEQ ID NO: 3458685 - RNA, 22 nt, Human
ugaagauaucuugaaaugaaag

SEQ ID NO: 3458686 - RNA, 16 nt, Human
ugaagauccagcugcc

SEQ ID NO: 3458687 - RNA, 20 nt, Human
ugaagaucuaaauaaaaugc

SEQ ID NO: 3458688 - RNA, 12 nt, Human
ugaagaugaaca

SEQ ID NO: 3458689 - RNA, 19 nt, Human
ugaagaugcauuguaguuu

SEQ ID NO: 3458690 - RNA, 22 nt, Human
ugaagaugggggccucuuucag

SEQ ID NO: 3458691 - RNA, 17 nt, Human
ugaagauguagaggaga

SEQ ID NO: 3458692 - RNA, 16 nt, Human
ugaagaugucuaauag

SEQ ID NO: 3458693 - RNA, 16 nt, Human
ugaagauguugagaaa

SEQ ID NO: 3458694 - RNA, 19 nt, Human
ugaagauuauuuuuuauga

SEQ ID NO: 3458695 - RNA, 19 nt, Human
ugaagauucuccugugcua

SEQ ID NO: 3458696 - RNA, 16 nt, Human
ugaagauucuuuccca

SEQ ID NO: 3458697 - RNA, 21 nt, Human
ugaagauucuuucccaauuca

SEQ ID NO: 3458698 - RNA, 13 nt, Human
ugaagauuguuua

SEQ ID NO: 3458699 - RNA, 19 nt, Human
ugaagauuuaauauuacag

SEQ ID NO: 3458700 - RNA, 20 nt, Human
ugaagauuuaccacuugugu

SEQ ID NO: 3458701 - RNA, 13 nt, Human
ugaagcaaacaca

SEQ ID NO: 3458702 - RNA, 17 nt, Human
ugaagcaaagcaccagc

SEQ ID NO: 3458703 - RNA, 18 nt, Human
ugaagcaaaucagaaacu

SEQ ID NO: 3458704 - RNA, 22 nt, Human
ugaagcaaaugucaugcugccu

SEQ ID NO: 3458705 - RNA, 14 nt, Human
ugaagcaaggaaga

SEQ ID NO: 3458706 - RNA, 20 nt, Human
ugaagcaaggaagauauaca

SEQ ID NO: 3458707 - RNA, 16 nt, Human
ugaagcagaguggcag

SEQ ID NO: 3458708 - RNA, 19 nt, Human
ugaagcaggagaaucacuu

SEQ ID NO: 3458709 - RNA, 15 nt, Human
ugaagcaguauuuug

SEQ ID NO: 3458710 - RNA, 14 nt, Human
ugaagcauguuuca

SEQ ID NO: 3458711 - RNA, 16 nt, Human
ugaagcauguuucaug

SEQ ID NO: 3458712 - RNA, 14 nt, Human
ugaagcauuuuaua

SEQ ID NO: 3458713 - RNA, 18 nt, Human
ugaagcauuuuauaaauc

SEQ ID NO: 3458714 - RNA, 21 nt, Human
ugaagccaaguggggugcugg

SEQ ID NO: 3458715 - RNA, 19 nt, Human
ugaagccaauucagacagg

SEQ ID NO: 3458716 - RNA, 21 nt, Human
ugaagccaugaguuccagaaa

SEQ ID NO: 3458717 - RNA, 15 nt, Human
ugaagcccaauaaac

SEQ ID NO: 3458718 - RNA, 19 nt, Human
ugaagcccaauaaaccucu

SEQ ID NO: 3458719 - RNA, 22 nt, Human
ugaagcccuccaaaagcacuua

SEQ ID NO: 3458720 - RNA, 16 nt, Human
ugaagccgacucuggc

SEQ ID NO: 3458721 - RNA, 17 nt, Human
ugaagccgacucuggcc

SEQ ID NO: 3458722 - RNA, 19 nt, Human
ugaagccgacucuggcccu

SEQ ID NO: 3458723 - RNA, 13 nt, Human
ugaagccucuggg

SEQ ID NO: 3458724 - RNA, 14 nt, Human
ugaagccucuggga

SEQ ID NO: 3458725 - RNA, 18 nt, Human
ugaagccugaacccaaga

SEQ ID NO: 3458726 - RNA, 23 nt, Human
ugaagccugcguugguccagagc

SEQ ID NO: 3458727 - RNA, 15 nt, Human
ugaagccugcuccuu

SEQ ID NO: 3458728 - RNA, 18 nt, Human
ugaagccugcuccuuccc

SEQ ID NO: 3458729 - RNA, 13 nt, Human
ugaagccugugga

SEQ ID NO: 3458730 - RNA, 15 nt, Human
ugaagccuuagccag

SEQ ID NO: 3458731 - RNA, 18 nt, Human
ugaagccuuucuuuugga

SEQ ID NO: 3458732 - RNA, 20 nt, Human
ugaagcuaauuauuuuaauu

SEQ ID NO: 3458733 - RNA, 19 nt, Human
ugaagcucaccuguugcuu

SEQ ID NO: 3458734 - RNA, 22 nt, Human
ugaagcucuggugacaccagcc

SEQ ID NO: 3458735 - RNA, 14 nt, Human
ugaagcugcaguga

SEQ ID NO: 3458736 - RNA, 16 nt, Human
ugaagcuguuguguga

SEQ ID NO: 3458737 - RNA, 17 nt, Human
ugaagcuuauuaaugcu

SEQ ID NO: 3458738 - RNA, 19 nt, Human
ugaagcuuauuaaugcuaa

SEQ ID NO: 3458739 - RNA, 23 nt, Human
ugaagcuuauuaaugcuaagggc

SEQ ID NO: 3458740 - RNA, 22 nt, Human
ugaagcuucacucacugucaau

SEQ ID NO: 3458741 - RNA, 13 nt, Human
ugaagcuucaugc

SEQ ID NO: 3458742 - RNA, 14 nt, Human
ugaagcuugacucc

SEQ ID NO: 3458743 - RNA, 15 nt, Human
ugaagcuugacuccc

SEQ ID NO: 3458744 - RNA, 23 nt, Human
ugaagcuuuauacguguagcuau

SEQ ID NO: 3458745 - RNA, 16 nt, Human
ugaagcuuuuauguga

SEQ ID NO: 3458746 - RNA, 16 nt, Human
ugaaggaaagauuugu

SEQ ID NO: 3458747 - RNA, 19 nt, Human
ugaaggaacauuccuuagu

SEQ ID NO: 3458748 - RNA, 16 nt, Human
ugaaggaaccaaagcg

SEQ ID NO: 3458749 - RNA, 15 nt, Human
ugaaggaacuugucu

SEQ ID NO: 3458750 - RNA, 20 nt, Human
ugaaggaagccaaauuuauc

SEQ ID NO: 3458751 - RNA, 13 nt, Human
ugaaggaauauau

SEQ ID NO: 3458752 - RNA, 18 nt, Human
ugaaggacacuuccugcc

SEQ ID NO: 3458753 - RNA, 20 nt, Human
ugaaggacauugcggacagc

SEQ ID NO: 3458754 - RNA, 20 nt, Human
ugaaggagauuuuccuuccu

SEQ ID NO: 3458755 - RNA, 23 nt, Human
ugaaggagccccauuccugggaa

SEQ ID NO: 3458756 - RNA, 17 nt, Human
ugaaggaggccaccucc

SEQ ID NO: 3458757 - RNA, 15 nt, Human
ugaaggaugccaaga

SEQ ID NO: 3458758 - RNA, 18 nt, Human
ugaaggcaaaauugcaaa

SEQ ID NO: 3458759 - RNA, 18 nt, Human
ugaaggccccgcccaggc

SEQ ID NO: 3458760 - RNA, 20 nt, Human
ugaaggccuucaacccgaga

SEQ ID NO: 3458761 - RNA, 11 nt, Human
ugaaggcuggc

SEQ ID NO: 3458762 - RNA, 14 nt, Human
ugaaggcuguacac

SEQ ID NO: 3458763 - RNA, 20 nt, Human
ugaaggcuucucuguucuac

SEQ ID NO: 3458764 - RNA, 20 nt, Human
ugaaggcuuuuggucucccu

SEQ ID NO: 3458765 - RNA, 23 nt, Human
ugaagggaaggaagaggaagagu

SEQ ID NO: 3458766 - RNA, 17 nt, Human
ugaagggacccuuuggg

SEQ ID NO: 3458767 - RNA, 20 nt, Human
ugaagggaccuugaagggua

SEQ ID NO: 3458768 - RNA, 11 nt, Human
ugaagggaggu

SEQ ID NO: 3458769 - RNA, 16 nt, Human
ugaagggaggugggga

SEQ ID NO: 3458770 - RNA, 24 nt, Human
ugaagggauuuuagucacacgugg

SEQ ID NO: 3458771 - RNA, 15 nt, Human
ugaagggcaggugcu

SEQ ID NO: 3458772 - RNA, 19 nt, Human
ugaagggcaggugcuucag

SEQ ID NO: 3458773 - RNA, 15 nt, Human
ugaagggccagagcc

SEQ ID NO: 3458774 - RNA, 18 nt, Human
ugaagggccagagccagg

SEQ ID NO: 3458775 - RNA, 14 nt, Human
ugaagggcccagga

SEQ ID NO: 3458776 - RNA, 21 nt, Human
ugauagccccucuccccgcag

SEQ ID NO: 3458777 - RNA, 18 nt, Human
ugauagcuaacauuuuaa

SEQ ID NO: 3458778 - RNA, 13 nt, Human
ugauagcuuuauu

SEQ ID NO: 3458779 - RNA, 22 nt, Human
ugauagguuauuuugauguaaa

SEQ ID NO: 3458780 - RNA, 16 nt, Human
ugauagucuuuugcuu

SEQ ID NO: 3458781 - RNA, 12 nt, Human
ugauaguuacug

SEQ ID NO: 3458782 - RNA, 21 nt, Human
ugauaguuacuguugugaccu

SEQ ID NO: 3458783 - RNA, 17 nt, Human
ugauaguugaauguugc

SEQ ID NO: 3458784 - RNA, 15 nt, Human
ugauauaaacagcuu

SEQ ID NO: 3458785 - RNA, 12 nt, Human
ugauauaaauuc

SEQ ID NO: 3458786 - RNA, 15 nt, Human
ugauauaaauucugu

SEQ ID NO: 3458787 - RNA, 17 nt, Human
ugauauaaauucugugg

SEQ ID NO: 3458788 - RNA, 17 nt, Human
ugauauaacuuuagaaa

SEQ ID NO: 3458789 - RNA, 23 nt, Human
ugauauaaguguguguuuuucau

SEQ ID NO: 3458790 - RNA, 16 nt, Human
ugauauaaucuuucaa

SEQ ID NO: 3458791 - RNA, 14 nt, Human
ugauauagaauuag

SEQ ID NO: 3458792 - RNA, 22 nt, Human
ugauauagaauuagcuuuuuca

SEQ ID NO: 3458793 - RNA, 18 nt, Human
ugauauauaaguguacau

SEQ ID NO: 3458794 - RNA, 16 nt, Human
ugauauaucucaaauu

SEQ ID NO: 3458795 - RNA, 14 nt, Human
ugauauauuuaaaa

SEQ ID NO: 3458796 - RNA, 19 nt, Human
ugauauauuuaaaaauauu

SEQ ID NO: 3458797 - RNA, 18 nt, Human
ugauaucccugauccuaa

SEQ ID NO: 3458798 - RNA, 16 nt, Human
ugauaucuauaaaaua

SEQ ID NO: 3458799 - RNA, 18 nt, Human
ugauaucuauaaaauaga

SEQ ID NO: 3458800 - RNA, 23 nt, Human
ugcacaggcagagcccagacccu

SEQ ID NO: 3458801 - RNA, 16 nt, Human
ugcacagggagacgua

SEQ ID NO: 3458802 - RNA, 18 nt, Human
ugcacagggcagcugggc

SEQ ID NO: 3458803 - RNA, 19 nt, Human
ugcacagggcagcugggcc

SEQ ID NO: 3458804 - RNA, 19 nt, Human
ugcacaguauuuguaauua

SEQ ID NO: 3458805 - RNA, 17 nt, Human
ugcacagucacugcucu

SEQ ID NO: 3458806 - RNA, 17 nt, Human
ugcacagugacuucuga

SEQ ID NO: 3458807 - RNA, 19 nt, Human
ugcacagugacuucugaga

SEQ ID NO: 3458808 - RNA, 21 nt, Human
ugcacagugacuucugagauc

SEQ ID NO: 3458809 - RNA, 18 nt, Human
ugcacagugcaucucagc

SEQ ID NO: 3458810 - RNA, 21 nt, Human
ugcacauaagcuuccauuuua

SEQ ID NO: 3458811 - RNA, 21 nt, Human
ugcacauacgcaccacaucuc

SEQ ID NO: 3458812 - RNA, 15 nt, Human
ugcacauacuugaga

SEQ ID NO: 3458813 - RNA, 20 nt, Human
ugcacauccgcgugugccug

SEQ ID NO: 3458814 - RNA, 22 nt, Human
ugcacauccgcgugugccugug

SEQ ID NO: 3458815 - RNA, 15 nt, Human
ugcacaugaagaaau

SEQ ID NO: 3458816 - RNA, 23 nt, Human
ugcacaugaagaaauacugcacu

SEQ ID NO: 3458817 - RNA, 12 nt, Human
ugcacaugauuu

SEQ ID NO: 3458818 - RNA, 20 nt, Human
ugcacaugauuucacaaaua

SEQ ID NO: 3458819 - RNA, 21 nt, Human
ugcacaugauuucacaaauau

SEQ ID NO: 3458820 - RNA, 17 nt, Human
ugcacauggauucaguu

SEQ ID NO: 3458821 - RNA, 19 nt, Human
ugcacaugucuuguacaug

SEQ ID NO: 3458822 - RNA, 23 nt, Human
ugcacaugucuuguacaugugua

SEQ ID NO: 3458823 - RNA, 13 nt, Human
ugcacauguuucc

SEQ ID NO: 3458824 - RNA, 15 nt, Human
ugcacauuaaaugac

SEQ ID NO: 3458825 - RNA, 13 nt, Human
ugcacauuuauuu

SEQ ID NO: 3458826 - RNA, 15 nt, Human
ugcaccaacccagcc

SEQ ID NO: 3458827 - RNA, 16 nt, Human
ugcaccaacccagccg

SEQ ID NO: 3458828 - RNA, 19 nt, Human
ugcaccaacccagccgcug

SEQ ID NO: 3458829 - RNA, 15 nt, Human
gguuucucucuacag

SEQ ID NO: 3458830 - RNA, 15 nt, Human
gguuucucuguggcu

SEQ ID NO: 3458831 - RNA, 17 nt, Human
gguuucugaguuccugc

SEQ ID NO: 3458832 - RNA, 18 nt, Human
gguuucugcccugcccac

SEQ ID NO: 3458833 - RNA, 15 nt, Human
gguuucuggucucua

SEQ ID NO: 3458834 - RNA, 22 nt, Human
gguuucuucaacaggagaauuu

SEQ ID NO: 3458835 - RNA, 17 nt, Human
gguuugaagccuggaac

SEQ ID NO: 3458836 - RNA, 13 nt, Human
gguuugagggugg

SEQ ID NO: 3458837 - RNA, 15 nt, Human
gguuugaucauuucu

SEQ ID NO: 3458838 - RNA, 15 nt, Human
gguuuggaaugcuuc

SEQ ID NO: 3458839 - RNA, 17 nt, Human
gguuuggcuccugccca

SEQ ID NO: 3458840 - RNA, 14 nt, Human
gguuuggugcuuuu

SEQ ID NO: 3458841 - RNA, 22 nt, Human
gguuugguuugcagcgacuggc

SEQ ID NO: 3458842 - RNA, 16 nt, Human
gguuuguggggggagg

SEQ ID NO: 3458843 - RNA, 12 nt, Human
gguuuuaaaaua

SEQ ID NO: 3458844 - RNA, 20 nt, Human
gguuuuaaaauacuguagau

SEQ ID NO: 3458845 - RNA, 12 nt, Human
gguuuuaaugua

SEQ ID NO: 3458846 - RNA, 21 nt, Human
gguuuuaggucucuuccccuc

SEQ ID NO: 3458847 - RNA, 17 nt, Human
gguuuuauuuauuucuu

SEQ ID NO: 3458848 - RNA, 22 nt, Human
gguuuucacauaaaugcagccc

SEQ ID NO: 3458849 - RNA, 20 nt, Human
gguuuucacauuggaaacaa

SEQ ID NO: 3458850 - RNA, 13 nt, Human
gguuuuccccucc

SEQ ID NO: 3458851 - RNA, 15 nt, Human
gguuuucuggguguc

SEQ ID NO: 3458852 - RNA, 15 nt, Human
gguuuucuguuacuu

SEQ ID NO: 3458853 - RNA, 17 nt, Human
gguuuucuuaaccaucu

SEQ ID NO: 3458854 - RNA, 21 nt, Human
gguuuugcacucuuguuucuc

SEQ ID NO: 3458855 - RNA, 23 nt, Human
gguuuugccauguuggccaggcu

SEQ ID NO: 3458856 - RNA, 11 nt, Human
gguuuuguaca

SEQ ID NO: 3458857 - RNA, 17 nt, Human
gguuuuguauucucuga

SEQ ID NO: 3458858 - RNA, 18 nt, Human
gguuuuguauucucugag

SEQ ID NO: 3458859 - RNA, 19 nt, Human
gguuuuguauucucugagc

SEQ ID NO: 3458860 - RNA, 20 nt, Human
gguuuuuaccugucacauug

SEQ ID NO: 3458861 - RNA, 19 nt, Human
gguuuuuacuuaacuguuu

SEQ ID NO: 3458862 - RNA, 19 nt, Human
gguuuuuauuucuccuuuu

SEQ ID NO: 3458863 - RNA, 12 nt, Human
gguuuuucaauu

SEQ ID NO: 3458864 - RNA, 19 nt, Human
gguuuuucaauuaaacgga

SEQ ID NO: 3458865 - RNA, 23 nt, Human
gguuuuuguuuguuuccuuuguu

SEQ ID NO: 3458866 - RNA, 22 nt, Human
gguuuuuuuucaguuguucuuu

SEQ ID NO: 3458867 - RNA, 23 nt, Human
gguuuuuuuuuuuaaaaaaagaa

SEQ ID NO: 3458868 - RNA, 19 nt, Human
guaaaaaaaaaugccuuug

SEQ ID NO: 3458869 - RNA, 20 nt, Human
guaaaaaaaaaugccuuuga

SEQ ID NO: 3458870 - RNA, 18 nt, Human
guaaaaaaugguguuuua

SEQ ID NO: 3458871 - RNA, 20 nt, Human
guaaaaacaaagaaauuaug

SEQ ID NO: 3458872 - RNA, 21 nt, Human
guaaaaacagcauugcuuucu

SEQ ID NO: 3458873 - RNA, 23 nt, Human
guaaaaacagcauugcuuucuga

SEQ ID NO: 3458874 - RNA, 13 nt, Human
guaaaaacugaag

SEQ ID NO: 3458875 - RNA, 14 nt, Human
guaaaaagaaaaca

SEQ ID NO: 3458876 - RNA, 13 nt, Human
guaaaaaugagaa

SEQ ID NO: 3458877 - RNA, 14 nt, Human
guaaaacaaaauuu

SEQ ID NO: 3458878 - RNA, 15 nt, Human
guaaaaccacagcag

SEQ ID NO: 3458879 - RNA, 16 nt, Human
guaaaaccacagcagu

SEQ ID NO: 3458880 - RNA, 20 nt, Human
guaaaaccuggagauggugg

SEQ ID NO: 3458881 - RNA, 12 nt, Human
guaaaagaaaaa

SEQ ID NO: 3458882 - RNA, 14 nt, Human
guaaaagaaaucau

SEQ ID NO: 3458883 - RNA, 15 nt, Human
guaaaagacuuuuuu

SEQ ID NO: 3458884 - RNA, 17 nt, Human
guaaaagauaacaagau

SEQ ID NO: 3458885 - RNA, 17 nt, Human
guaaaagcaacaucagc

SEQ ID NO: 3458886 - RNA, 20 nt, Human
guaaaagcaacaucagcuug

SEQ ID NO: 3458887 - RNA, 16 nt, Human
guaaaagcauuuugua

SEQ ID NO: 3458888 - RNA, 15 nt, Human
guaaaagugugagca

SEQ ID NO: 3458889 - RNA, 16 nt, Human
guaaaauaaaaggucg

SEQ ID NO: 3458890 - RNA, 12 nt, Human
guaaaauacuuu

SEQ ID NO: 3458891 - RNA, 13 nt, Human
guaaaauacuuuu

SEQ ID NO: 3458892 - RNA, 19 nt, Human
guaaaauauuuugaaucaa

SEQ ID NO: 3458893 - RNA, 12 nt, Human
guaaaaucuugu

SEQ ID NO: 3458894 - RNA, 15 nt, Human
guaaaaucuugucau

SEQ ID NO: 3458895 - RNA, 22 nt, Human
guaaaaugacaaucaugugugu

SEQ ID NO: 3458896 - RNA, 17 nt, Human
guaaaauguauuuuucu

SEQ ID NO: 3458897 - RNA, 18 nt, Human
guaaaaugugggauuaug

SEQ ID NO: 3458898 - RNA, 16 nt, Human
guaaaauguugaauaa

SEQ ID NO: 3458899 - RNA, 14 nt, Human
guaaaauucuaaau

SEQ ID NO: 3458900 - RNA, 12 nt, Human
guaaaauugcau

SEQ ID NO: 3458901 - RNA, 13 nt, Human
guaaaauuuuagg

SEQ ID NO: 3458902 - RNA, 11 nt, Human
guaaacaauau

SEQ ID NO: 3458903 - RNA, 11 nt, Human
guaaacacugu

SEQ ID NO: 3458904 - RNA, 19 nt, Human
guaaacagauggcacuuug

SEQ ID NO: 3458905 - RNA, 14 nt, Human
guaaacagugccug

SEQ ID NO: 3458906 - RNA, 20 nt, Human
guaaacagugccugcugaau

SEQ ID NO: 3458907 - RNA, 16 nt, Human
guaaacauaccaacau

SEQ ID NO: 3458908 - RNA, 14 nt, Human
guaaacauguguuu

SEQ ID NO: 3458909 - RNA, 21 nt, Human
guaaacauuaguucuauuucu

SEQ ID NO: 3458910 - RNA, 13 nt, Human
guaaaccaaagcc

SEQ ID NO: 3458911 - RNA, 19 nt, Human
guaaaccaauuuuuuguuc

SEQ ID NO: 3458912 - RNA, 16 nt, Human
guaaaccacugaaaaa

SEQ ID NO: 3458913 - RNA, 16 nt, Human
guaaacgcugucccua

SEQ ID NO: 3458914 - RNA, 21 nt, Human
guaaacucaaaacuuaacaua

SEQ ID NO: 3458915 - RNA, 16 nt, Human
guaaacucaaaauauu

SEQ ID NO: 3458916 - RNA, 23 nt, Human
guaaacucaaaauauuuguacau

SEQ ID NO: 3458917 - RNA, 19 nt, Human
guaaacucaucugaaaugu

SEQ ID NO: 3458918 - RNA, 12 nt, Human
guaaacuccugu

SEQ ID NO: 3458919 - RNA, 11 nt, Human
guaaacugcca

SEQ ID NO: 3458920 - RNA, 13 nt, Human
guaaacugcccug

SEQ ID NO: 3458921 - RNA, 18 nt, Human
guaaacuggaauuaaaag

SEQ ID NO: 3458922 - RNA, 24 nt, Human
guaaacugugcaccaagcaggaaa

SEQ ID NO: 3458923 - RNA, 15 nt, Human
guaaacuguuucuuu

SEQ ID NO: 3458924 - RNA, 16 nt, Human
guaaacuucugcaaca

SEQ ID NO: 3458925 - RNA, 14 nt, Human
guaaacuuugaaau

SEQ ID NO: 3458926 - RNA, 21 nt, Human
guaaagaaaaauauuuaaugu

SEQ ID NO: 3458927 - RNA, 18 nt, Human
guaaagaaagagagaaaa

SEQ ID NO: 3458928 - RNA, 21 nt, Human
guaaagaaagagagaaaauaa

SEQ ID NO: 3458929 - RNA, 22 nt, Human
guaaagaaagagagaaaauaaa

SEQ ID NO: 3458930 - RNA, 21 nt, Human
guaaagaaauuuaaaagacac

SEQ ID NO: 3458931 - RNA, 15 nt, Human
guaaagaaauuuacu

SEQ ID NO: 3458932 - RNA, 19 nt, Human
guaaagaaauuuacuauau

SEQ ID NO: 3458933 - RNA, 15 nt, Human
guaaagaauuauuuu

SEQ ID NO: 3458934 - RNA, 14 nt, Human
guaaagacugguuu

SEQ ID NO: 3458935 - RNA, 20 nt, Human
guaaagagaaacuuugugcu

SEQ ID NO: 3458936 - RNA, 14 nt, Human
guaaagauauuauu

SEQ ID NO: 3458937 - RNA, 18 nt, Human
guaaagaucuacaugaau

SEQ ID NO: 3458938 - RNA, 21 nt, Human
guaaagauguuuauuucaggc

SEQ ID NO: 3458939 - RNA, 20 nt, Human
guaaagcaaccaaaaagaaa

SEQ ID NO: 3458940 - RNA, 15 nt, Human
guaaagccauuaaau

SEQ ID NO: 3458941 - RNA, 15 nt, Human
guaaagcuaaaauaa

SEQ ID NO: 3458942 - RNA, 16 nt, Human
guaaagcuagaaauga

SEQ ID NO: 3458943 - RNA, 18 nt, Human
guaaagggcaaauaauga

SEQ ID NO: 3458944 - RNA, 17 nt, Human
guaaaguacuuguaguu

SEQ ID NO: 3458945 - RNA, 18 nt, Human
ugaccugcugagcucuga

SEQ ID NO: 3458946 - RNA, 20 nt, Human
ugaccugcugagcucugaga

SEQ ID NO: 3458947 - RNA, 20 nt, Human
ugaccuggaaggcccagcac

SEQ ID NO: 3458948 - RNA, 22 nt, Human
ugaccuggauggggcaggccac

SEQ ID NO: 3458949 - RNA, 22 nt, Human
ugaccuggcaucuaauucugau

SEQ ID NO: 3458950 - RNA, 20 nt, Human
ugaccugguuaaacaaacca

SEQ ID NO: 3458951 - RNA, 15 nt, Human
ugaccugucaugccc

SEQ ID NO: 3458952 - RNA, 20 nt, Human
ugaccugucaugccccccuc

SEQ ID NO: 3458953 - RNA, 15 nt, Human
ugaccugugaccagc

SEQ ID NO: 3458954 - RNA, 23 nt, Human
ugaccuguggggauuucucccag

SEQ ID NO: 3458955 - RNA, 14 nt, Human
ugaccuguggugca

SEQ ID NO: 3458956 - RNA, 14 nt, Human
ugaccuuaaaugca

SEQ ID NO: 3458957 - RNA, 13 nt, Human
ugaccuuacauuu

SEQ ID NO: 3458958 - RNA, 16 nt, Human
ugaccuuaguguuucu

SEQ ID NO: 3458959 - RNA, 22 nt, Human
ugaccuuaguguuucugugcau

SEQ ID NO: 3458960 - RNA, 22 nt, Human
ugaccuuaugagaaacugcaug

SEQ ID NO: 3458961 - RNA, 12 nt, Human
ugaccuucagcu

SEQ ID NO: 3458962 - RNA, 11 nt, Human
ugaccuuccuc

SEQ ID NO: 3458963 - RNA, 23 nt, Human
ugaccuuccucgcagagaggcca

SEQ ID NO: 3458964 - RNA, 15 nt, Human
ugaccuuccucuggg

SEQ ID NO: 3458965 - RNA, 18 nt, Human
ugaccuuccucuggggcu

SEQ ID NO: 3458966 - RNA, 19 nt, Human
ugaccuuccucuggggcuc

SEQ ID NO: 3458967 - RNA, 23 nt, Human
ugaccuuccucuggggcucuagg

SEQ ID NO: 3458968 - RNA, 13 nt, Human
ugaccuucuggga

SEQ ID NO: 3458969 - RNA, 17 nt, Human
ugaccuugaacuccugg

SEQ ID NO: 3458970 - RNA, 18 nt, Human
ugaccuugaacuccuggg

SEQ ID NO: 3458971 - RNA, 20 nt, Human
ugaccuugaggagucuugug

SEQ ID NO: 3458972 - RNA, 17 nt, Human
ugaccuuggagagacac

SEQ ID NO: 3458973 - RNA, 13 nt, Human
ugaccuuucaaua

SEQ ID NO: 3458974 - RNA, 16 nt, Human
ugaccuuucaauagga

SEQ ID NO: 3458975 - RNA, 15 nt, Human
ugaccuuuguacagc

SEQ ID NO: 3458976 - RNA, 19 nt, Human
ugaccuuuguacagcccag

SEQ ID NO: 3458977 - RNA, 20 nt, Human
ugaccuuuguacagcccaga

SEQ ID NO: 3458978 - RNA, 21 nt, Human
ugaccuuuguacagcccagag

SEQ ID NO: 3458979 - RNA, 18 nt, Human
ugacgaaacuggccccgg

SEQ ID NO: 3458980 - RNA, 15 nt, Human
ugacgacaagugcug

SEQ ID NO: 3458981 - RNA, 14 nt, Human
ugacgaugauguac

SEQ ID NO: 3458982 - RNA, 16 nt, Human
ugacgauuccuucucu

SEQ ID NO: 3458983 - RNA, 21 nt, Human
ugacgauuccuucucugaaca

SEQ ID NO: 3458984 - RNA, 14 nt, Human
ugacgcaaugaaaa

SEQ ID NO: 3458985 - RNA, 19 nt, Human
ugacgccugcccuccccag

SEQ ID NO: 3458986 - RNA, 15 nt, Human
ugacgcugaauaaau

SEQ ID NO: 3458987 - RNA, 20 nt, Human
ugacgcugaauaaaugucuu

SEQ ID NO: 3458988 - RNA, 22 nt, Human
ugacggaaggaccuauguuugc

SEQ ID NO: 3458989 - RNA, 14 nt, Human
ugacggcccucauc

SEQ ID NO: 3458990 - RNA, 19 nt, Human
ugacgggacucaggcggga

SEQ ID NO: 3458991 - RNA, 19 nt, Human
ugacgguauuaugcuucuu

SEQ ID NO: 3458992 - RNA, 19 nt, Human
ugacggucccacacuggug

SEQ ID NO: 3458993 - RNA, 21 nt, Human
ugacggucccacacuggugac

SEQ ID NO: 3458994 - RNA, 17 nt, Human
ugacggugcagucuggg

SEQ ID NO: 3458995 - RNA, 18 nt, Human
ugacggugcagucugggu

SEQ ID NO: 3458996 - RNA, 12 nt, Human
ugacgguuccua

SEQ ID NO: 3458997 - RNA, 18 nt, Human
ugacgguuccuacacagg

SEQ ID NO: 3458998 - RNA, 18 nt, Human
ugacguacaaguaguucu

SEQ ID NO: 3458999 - RNA, 18 nt, Human
ugacgugcaccuguacuc

SEQ ID NO: 3459000 - RNA, 23 nt, Human
ugacgugcaccuguacucaggag

SEQ ID NO: 3459001 - RNA, 18 nt, Human
ugacgugccuuuugcacc

SEQ ID NO: 3459002 - RNA, 17 nt, Human
ugacgugucaggaaaac

SEQ ID NO: 3459003 - RNA, 19 nt, Human
ugacuaaaccauugugcau

SEQ ID NO: 3459004 - RNA, 17 nt, Human
ugacuaacaggccaaag

SEQ ID NO: 3459005 - RNA, 15 nt, Human
ugacuaacucaaaua

SEQ ID NO: 3459006 - RNA, 21 nt, Human
ugacuaacucaaauacacauu

SEQ ID NO: 3459007 - RNA, 14 nt, Human
ugacuaauggcaug

SEQ ID NO: 3459008 - RNA, 21 nt, Human
ugacuaauuaggguacauuua

SEQ ID NO: 3459009 - RNA, 22 nt, Human
ugacuaauuaggguacauuuau

SEQ ID NO: 3459010 - RNA, 23 nt, Human
ugacuaauuaggguacauuuaua

SEQ ID NO: 3459011 - RNA, 15 nt, Human
ugacuaauucuugca

SEQ ID NO: 3459012 - RNA, 13 nt, Human
ugacuaauuguau

SEQ ID NO: 3459013 - RNA, 18 nt, Human
ugacuaauuguauaacag

SEQ ID NO: 3459014 - RNA, 21 nt, Human
ugacuaauuguauaacagguu

SEQ ID NO: 3459015 - RNA, 20 nt, Human
ugacuacagacauuaaauaa

SEQ ID NO: 3459016 - RNA, 16 nt, Human
ugacuagaaagugaau

SEQ ID NO: 3459017 - RNA, 21 nt, Human
ugacuagaagggccaguccug

SEQ ID NO: 3459018 - RNA, 21 nt, Human
ugacuagaggcagggagggga

SEQ ID NO: 3459019 - RNA, 18 nt, Human
ugacuagggauucaggcu

SEQ ID NO: 3459020 - RNA, 20 nt, Human
ugacuagggauucaggcugc

SEQ ID NO: 3459021 - RNA, 15 nt, Human
ugacuaguacaaauu

SEQ ID NO: 3459022 - RNA, 17 nt, Human
ugacuaguacaaauuau

SEQ ID NO: 3459023 - RNA, 14 nt, Human
ugacuagugcugaa

SEQ ID NO: 3459024 - RNA, 15 nt, Human
ugacuagugcugaag

SEQ ID NO: 3459025 - RNA, 23 nt, Human
ugacuauauaauuuauuuccacu

SEQ ID NO: 3459026 - RNA, 16 nt, Human
ugacuaucaaacugaa

SEQ ID NO: 3459027 - RNA, 23 nt, Human
ugacuaucccaacagucauguuu

SEQ ID NO: 3459028 - RNA, 20 nt, Human
ugacuauuauauuuccaaga

SEQ ID NO: 3459029 - RNA, 21 nt, Human
ugacuauucugagaugacuau

SEQ ID NO: 3459030 - RNA, 13 nt, Human
ugacuauucugua

SEQ ID NO: 3459031 - RNA, 18 nt, Human
ugacuauucuguaucuuu

SEQ ID NO: 3459032 - RNA, 19 nt, Human
ugacuauucuugauguaaa

SEQ ID NO: 3459033 - RNA, 14 nt, Human
ugacucaaagucug

SEQ ID NO: 3459034 - RNA, 14 nt, Human
ugacucaagaagug

SEQ ID NO: 3459035 - RNA, 18 nt, Human
ugacucaagauucccagg

SEQ ID NO: 3459036 - RNA, 19 nt, Human
ugacucaagauucccagga

SEQ ID NO: 3459037 - RNA, 20 nt, Human
ugacucaagauucccaggag

SEQ ID NO: 3459038 - RNA, 20 nt, Human
ugacucaagugucucagucc

SEQ ID NO: 3459039 - RNA, 19 nt, Human
ugacucacaccugaacuga

SEQ ID NO: 3459040 - RNA, 16 nt, Human
ugacucagaugucucu

SEQ ID NO: 3459041 - RNA, 14 nt, Human
ugacucaggagccu

SEQ ID NO: 3459042 - RNA, 21 nt, Human
ugacucaggagccugugacau

SEQ ID NO: 3459043 - RNA, 23 nt, Human
ugacucaggauuuaaaaacugga

SEQ ID NO: 3459044 - RNA, 15 nt, Human
ugacucagggcuccu

SEQ ID NO: 3459045 - RNA, 15 nt, Human
ugacuccaaccauuc

SEQ ID NO: 3459046 - RNA, 22 nt, Human
ugacuccaaccauucaaaaauu

SEQ ID NO: 3459047 - RNA, 19 nt, Human
ugacuccaagaacaauugu

SEQ ID NO: 3459048 - RNA, 20 nt, Human
ugacuccagaauuucccaaa

SEQ ID NO: 3459049 - RNA, 23 nt, Human
ugacuccaguggggcaagauuuu

SEQ ID NO: 3459050 - RNA, 19 nt, Human
ugacucccccaguccccuu

SEQ ID NO: 3459051 - RNA, 22 nt, Human
ugacucccccaguccccuuccc

SEQ ID NO: 3459052 - RNA, 22 nt, Human
ugacucccuuaaaauagaaaua

SEQ ID NO: 3459053 - RNA, 17 nt, Human
ugacuccuaccugcccu

SEQ ID NO: 3459054 - RNA, 12 nt, Human
ugacuccugguc

SEQ ID NO: 3459055 - RNA, 17 nt, Human
ugacucgggggugggga

SEQ ID NO: 3459056 - RNA, 18 nt, Human
ugacucgguuucuccaaa

SEQ ID NO: 3459057 - RNA, 21 nt, Human
ugacucguauaugucucaggu

SEQ ID NO: 3459058 - RNA, 20 nt, Human
ugacucgucugacugugugu

SEQ ID NO: 3459059 - RNA, 14 nt, Human
ugacucucaaaucu

SEQ ID NO: 3459060 - RNA, 16 nt, Human
ugacucugaaaucuga

SEQ ID NO: 3459061 - RNA, 22 nt, Human
ugacucuggcaaagcuuuuaga

SEQ ID NO: 3459062 - RNA, 11 nt, Human
ugacucugggu

SEQ ID NO: 3459063 - RNA, 17 nt, Human
ugacucuggguccuucc

SEQ ID NO: 3459064 - RNA, 13 nt, Human
ugacucuuaagaa

SEQ ID NO: 3459065 - RNA, 21 nt, Human
ugacucuugaguuguuuuugu

SEQ ID NO: 3459066 - RNA, 23 nt, Human
ugacucuugaguuguuuuuguau

SEQ ID NO: 3459067 - RNA, 16 nt, Human
ugacucuuuauugucu

SEQ ID NO: 3459068 - RNA, 18 nt, Human
ugacucuuuauugucugu

SEQ ID NO: 3459069 - RNA, 21 nt, Human
ugacucuuuauugucuguaaa

SEQ ID NO: 3459070 - RNA, 15 nt, Human
ugacugagcagacug

SEQ ID NO: 3459071 - RNA, 13 nt, Human
ugacugaggcagu

SEQ ID NO: 3459072 - RNA, 18 nt, Human
ugacugaggcaguuugag

SEQ ID NO: 3459073 - RNA, 19 nt, Human
ugacugaggcaguuugagg

SEQ ID NO: 3459074 - RNA, 20 nt, Human
ugacugagggugaguuggcu

SEQ ID NO: 3459075 - RNA, 16 nt, Human
ugacugauucuucagc

SEQ ID NO: 3459076 - RNA, 14 nt, Human
ugacugccaagacu

SEQ ID NO: 3459077 - RNA, 22 nt, Human
ugacugccaagacugcuguggc

SEQ ID NO: 3459078 - RNA, 16 nt, Human
ugacugccaagccaug

SEQ ID NO: 3459079 - RNA, 21 nt, Human
ugacugcccagcauuugggua

SEQ ID NO: 3459080 - RNA, 15 nt, Human
ugacugccccaacuc

SEQ ID NO: 3459081 - RNA, 19 nt, Human
ugacugccccaacuccugg

SEQ ID NO: 3459082 - RNA, 20 nt, Human
ugacugccccaacuccugga

SEQ ID NO: 3459083 - RNA, 21 nt, Human
ugacugcccggcacagaugcu

SEQ ID NO: 3459084 - RNA, 20 nt, Human
ugacugcuccccagcccugg

SEQ ID NO: 3459085 - RNA, 21 nt, Human
ugacugcuccccagcccuggc

SEQ ID NO: 3459086 - RNA, 16 nt, Human
ugacugcuugcccuaa

SEQ ID NO: 3459087 - RNA, 21 nt, Human
ugacuggcauuuuauagacac

SEQ ID NO: 3459088 - RNA, 15 nt, Human
ugccagugucuuucu

SEQ ID NO: 3459089 - RNA, 16 nt, Human
ugccagugucuuucuu

SEQ ID NO: 3459090 - RNA, 22 nt, Human
ugccaguuguccuccuuccggg

SEQ ID NO: 3459091 - RNA, 23 nt, Human
ugccaguuuaaucauugccuggu

SEQ ID NO: 3459092 - RNA, 19 nt, Human
ugccaguuuuguuuccuuu

SEQ ID NO: 3459093 - RNA, 12 nt, Human
ugccauaaaaca

SEQ ID NO: 3459094 - RNA, 16 nt, Human
ugccauaaaacauuaa

SEQ ID NO: 3459095 - RNA, 20 nt, Human
ugccauaaaacauuaagaaa

SEQ ID NO: 3459096 - RNA, 14 nt, Human
ugccauaauacaaa

SEQ ID NO: 3459097 - RNA, 18 nt, Human
ugccauacuguaugcagu

SEQ ID NO: 3459098 - RNA, 15 nt, Human
ugccauacuuugucu

SEQ ID NO: 3459099 - RNA, 17 nt, Human
ugccauacuuugucuga

SEQ ID NO: 3459100 - RNA, 22 nt, Human
ugccauacuuugucugaaaaau

SEQ ID NO: 3459101 - RNA, 14 nt, Human
ugccauagaguaca

SEQ ID NO: 3459102 - RNA, 18 nt, Human
ugccauagaguacacugc

SEQ ID NO: 3459103 - RNA, 17 nt, Human
ugccauagucaaagaga

SEQ ID NO: 3459104 - RNA, 18 nt, Human
ugccauagucaaagagag

SEQ ID NO: 3459105 - RNA, 17 nt, Human
ugccauagucacauggc

SEQ ID NO: 3459106 - RNA, 16 nt, Human
ugccauauucuguugg

SEQ ID NO: 3459107 - RNA, 17 nt, Human
ugccauauucuguuggc

SEQ ID NO: 3459108 - RNA, 20 nt, Human
ugccauauugcacaugucuu

SEQ ID NO: 3459109 - RNA, 21 nt, Human
ugccauauugcacaugucuua

SEQ ID NO: 3459110 - RNA, 15 nt, Human
ugccaucaaaugaau

SEQ ID NO: 3459111 - RNA, 14 nt, Human
ugccaucaauaaaa

SEQ ID NO: 3459112 - RNA, 15 nt, Human
ugccaucagugaaaa

SEQ ID NO: 3459113 - RNA, 16 nt, Human
ugccaucauugcuguc

SEQ ID NO: 3459114 - RNA, 22 nt, Human
ugccaucauugcugucugcagc

SEQ ID NO: 3459115 - RNA, 15 nt, Human
ugccauccagguuca

SEQ ID NO: 3459116 - RNA, 20 nt, Human
ugccauccagguucagcuug

SEQ ID NO: 3459117 - RNA, 14 nt, Human
ugccaucccucccu

SEQ ID NO: 3459118 - RNA, 21 nt, Human
ugccauccuaaaagccacccc

SEQ ID NO: 3459119 - RNA, 11 nt, Human
ugccauccuca

SEQ ID NO: 3459120 - RNA, 13 nt, Human
ugccauccuggcc

SEQ ID NO: 3459121 - RNA, 14 nt, Human
ugccaucgcuguga

SEQ ID NO: 3459122 - RNA, 16 nt, Human
ugccaucuagccagcc

SEQ ID NO: 3459123 - RNA, 17 nt, Human
ugccaucuagccagccc

SEQ ID NO: 3459124 - RNA, 16 nt, Human
ugccaucucugcucca

SEQ ID NO: 3459125 - RNA, 22 nt, Human
ugccaucugcgugacaauaaaa

SEQ ID NO: 3459126 - RNA, 18 nt, Human
ugccaucugugggcacgc

SEQ ID NO: 3459127 - RNA, 20 nt, Human
ugccaucuguguccugguua

SEQ ID NO: 3459128 - RNA, 14 nt, Human
ugccaucuucccag

SEQ ID NO: 3459129 - RNA, 15 nt, Human
ugccaucuucccagc

SEQ ID NO: 3459130 - RNA, 16 nt, Human
ugccaucuucccagca

SEQ ID NO: 3459131 - RNA, 22 nt, Human
ugccaugaacuggaggccagga

SEQ ID NO: 3459132 - RNA, 19 nt, Human
ugccaugagccgcccaagg

SEQ ID NO: 3459133 - RNA, 21 nt, Human
ugccaugagccgcccaaggcc

SEQ ID NO: 3459134 - RNA, 19 nt, Human
ugccaugaugccucugucu

SEQ ID NO: 3459135 - RNA, 21 nt, Human
ugccaugaugccucugucuuc

SEQ ID NO: 3459136 - RNA, 16 nt, Human
ugccaugcagggccuc

SEQ ID NO: 3459137 - RNA, 20 nt, Human
ugccauggaacuguuuccuu

SEQ ID NO: 3459138 - RNA, 18 nt, Human
ugccauggaggcacacag

SEQ ID NO: 3459139 - RNA, 18 nt, Human
ugccaugggcuucacugu

SEQ ID NO: 3459140 - RNA, 18 nt, Human
ugccauguaccuccccug

SEQ ID NO: 3459141 - RNA, 21 nt, Human
ugccauguaccuccccugccu

SEQ ID NO: 3459142 - RNA, 20 nt, Human
ugccauguaggguucccuua

SEQ ID NO: 3459143 - RNA, 20 nt, Human
ugccaugucagcgcucuggu

SEQ ID NO: 3459144 - RNA, 22 nt, Human
ugccaugucugcagugugcccc

SEQ ID NO: 3459145 - RNA, 19 nt, Human
ugccaugugacucuggcuu

SEQ ID NO: 3459146 - RNA, 21 nt, Human
ugccaugugacucuggcuugg

SEQ ID NO: 3459147 - RNA, 14 nt, Human
ugccaugugccagg

SEQ ID NO: 3459148 - RNA, 12 nt, Human
ugccauguuggc

SEQ ID NO: 3459149 - RNA, 20 nt, Human
ugccauguuggccaggcugg

SEQ ID NO: 3459150 - RNA, 16 nt, Human
ugccauuagccaagga

SEQ ID NO: 3459151 - RNA, 16 nt, Human
ugccauucauagagag

SEQ ID NO: 3459152 - RNA, 18 nt, Human
ugccauucccugccuggg

SEQ ID NO: 3459153 - RNA, 19 nt, Human
ugccauugggguaguugug

SEQ ID NO: 3459154 - RNA, 16 nt, Human
ugccauugucuuuaua

SEQ ID NO: 3459155 - RNA, 22 nt, Human
ugccauuuaaagcuuauuaaaa

SEQ ID NO: 3459156 - RNA, 12 nt, Human
ugccauuuauuu

SEQ ID NO: 3459157 - RNA, 14 nt, Human
ugccauuugauacc

SEQ ID NO: 3459158 - RNA, 16 nt, Human
ugccauuugcacccuc

SEQ ID NO: 3459159 - RNA, 19 nt, Human
ugccauuugcacccuccgc

SEQ ID NO: 3459160 - RNA, 22 nt, Human
ugccauuugcacccuccgccuu

SEQ ID NO: 3459161 - RNA, 23 nt, Human
ugccauuuguacugaccccauca

SEQ ID NO: 3459162 - RNA, 17 nt, Human
ugcccaaagaugcagcc

SEQ ID NO: 3459163 - RNA, 18 nt, Human
ugcccaaagucuguguga

SEQ ID NO: 3459164 - RNA, 19 nt, Human
ugcccaaaguuuuauuuuu

SEQ ID NO: 3459165 - RNA, 15 nt, Human
ugcccaaaucugccu

SEQ ID NO: 3459166 - RNA, 14 nt, Human
ugcccaacaccagc

SEQ ID NO: 3459167 - RNA, 17 nt, Human
ugcccaacaccagcccc

SEQ ID NO: 3459168 - RNA, 21 nt, Human
ugcccaacaccagccccugcc

SEQ ID NO: 3459169 - RNA, 13 nt, Human
ugcccaaccucag

SEQ ID NO: 3459170 - RNA, 18 nt, Human
ugcccaaccucagcaacc

SEQ ID NO: 3459171 - RNA, 19 nt, Human
ugcccaaccucagcaaccu

SEQ ID NO: 3459172 - RNA, 18 nt, Human
ugcccaaccugcucuccu

SEQ ID NO: 3459173 - RNA, 14 nt, Human
ugcccaacuguuau

SEQ ID NO: 3459174 - RNA, 14 nt, Human
ugcccaagccagag

SEQ ID NO: 3459175 - RNA, 20 nt, Human
ugcccaagccagaggcuggg

SEQ ID NO: 3459176 - RNA, 23 nt, Human
ugcccaagccagaggcuggguuc

SEQ ID NO: 3459177 - RNA, 18 nt, Human
ugcccaagcccaggccac

SEQ ID NO: 3459178 - RNA, 21 nt, Human
ugcccaagcccaggccacccu

SEQ ID NO: 3459179 - RNA, 18 nt, Human
ugcccaagcccugagagu

SEQ ID NO: 3459180 - RNA, 22 nt, Human
ugcccaauaugcaguucugcag

SEQ ID NO: 3459181 - RNA, 15 nt, Human
ugcccaaugaauaau

SEQ ID NO: 3459182 - RNA, 16 nt, Human
ugcccacacaccccaa

SEQ ID NO: 3459183 - RNA, 11 nt, Human
ugcccacagcc

SEQ ID NO: 3459184 - RNA, 12 nt, Human
ugcccacaggcc

SEQ ID NO: 3459185 - RNA, 16 nt, Human
ugcccacauuuagucu

SEQ ID NO: 3459186 - RNA, 23 nt, Human
ugcccaccaacaucccauugccc

SEQ ID NO: 3459187 - RNA, 13 nt, Human
ugcccacccccuc

SEQ ID NO: 3459188 - RNA, 15 nt, Human
ugcccacccccucaa

SEQ ID NO: 3459189 - RNA, 16 nt, Human
ugcccacccccugccc

SEQ ID NO: 3459190 - RNA, 20 nt, Human
ugcccacccccugcccugca

SEQ ID NO: 3459191 - RNA, 15 nt, Human
ugcccaccugcccau

SEQ ID NO: 3459192 - RNA, 15 nt, Human
ugcccaccugccugg

SEQ ID NO: 3459193 - RNA, 20 nt, Human
ugcccaccugccuggccggc

SEQ ID NO: 3459194 - RNA, 23 nt, Human
ugcccaccugccuggccggccag

SEQ ID NO: 3459195 - RNA, 14 nt, Human
ugcccaccuggccu

SEQ ID NO: 3459196 - RNA, 15 nt, Human
ugcccaccuggccuc

SEQ ID NO: 3459197 - RNA, 19 nt, Human
ugcccaccuggccucugca

SEQ ID NO: 3459198 - RNA, 14 nt, Human
ugcccacucccugc

SEQ ID NO: 3459199 - RNA, 21 nt, Human
ugcccacuguuucucuugagc

SEQ ID NO: 3459200 - RNA, 11 nt, Human
ugcccagaacu

SEQ ID NO: 3459201 - RNA, 21 nt, Human
ugcccagaacuggacucagga

SEQ ID NO: 3459202 - RNA, 16 nt, Human
ugcccagaacuucccu

SEQ ID NO: 3459203 - RNA, 14 nt, Human
ugcccagaauacug

SEQ ID NO: 3459204 - RNA, 19 nt, Human
ugcccagaauacugaugga

SEQ ID NO: 3459205 - RNA, 17 nt, Human
ugcccagaaugaggcug

SEQ ID NO: 3459206 - RNA, 15 nt, Human
ugcccagaccacacg

SEQ ID NO: 3459207 - RNA, 18 nt, Human
ugcccagagacccagcgg

SEQ ID NO: 3459208 - RNA, 15 nt, Human
ugaggagucugaggu

SEQ ID NO: 3459209 - RNA, 15 nt, Human
ugaggagucuugugu

SEQ ID NO: 3459210 - RNA, 16 nt, Human
ugaggaucagaaagua

SEQ ID NO: 3459211 - RNA, 15 nt, Human
ugaggaugagcugga

SEQ ID NO: 3459212 - RNA, 18 nt, Human
ugaggaugggucagagcu

SEQ ID NO: 3459213 - RNA, 13 nt, Human
ugaggauuucaag

SEQ ID NO: 3459214 - RNA, 16 nt, Human
ugaggauuucaagccu

SEQ ID NO: 3459215 - RNA, 12 nt, Human
ugaggcaaaaga

SEQ ID NO: 3459216 - RNA, 14 nt, Human
ugaggcaagagaau

SEQ ID NO: 3459217 - RNA, 22 nt, Human
ugaggcacaagaaucacuugaa

SEQ ID NO: 3459218 - RNA, 17 nt, Human
ugaggcacaugucagca

SEQ ID NO: 3459219 - RNA, 15 nt, Human
ugaggcacuggcgag

SEQ ID NO: 3459220 - RNA, 12 nt, Human
ugaggcagacag

SEQ ID NO: 3459221 - RNA, 20 nt, Human
ugaggcagacagcagcucag

SEQ ID NO: 3459222 - RNA, 14 nt, Human
ugaggcaggagaau

SEQ ID NO: 3459223 - RNA, 15 nt, Human
ugaggcaggcuuugu

SEQ ID NO: 3459224 - RNA, 13 nt, Human
ugaggcagggcaa

SEQ ID NO: 3459225 - RNA, 18 nt, Human
ugaggcagggcaaaugac

SEQ ID NO: 3459226 - RNA, 13 nt, Human
ugaggcagguccc

SEQ ID NO: 3459227 - RNA, 14 nt, Human
ugaggcaggucccc

SEQ ID NO: 3459228 - RNA, 16 nt, Human
ugaggcagguccccag

SEQ ID NO: 3459229 - RNA, 18 nt, Human
ugaggcaggugacaguga

SEQ ID NO: 3459230 - RNA, 23 nt, Human
ugaggcagugggucccacuuccc

SEQ ID NO: 3459231 - RNA, 14 nt, Human
ugaggcaguuugag

SEQ ID NO: 3459232 - RNA, 22 nt, Human
ugaggcaugaguuacugugcau

SEQ ID NO: 3459233 - RNA, 15 nt, Human
guauuaugcuucuug

SEQ ID NO: 3459234 - RNA, 12 nt, Human
guauuauugcug

SEQ ID NO: 3459235 - RNA, 12 nt, Human
guauuauuuaua

SEQ ID NO: 3459236 - RNA, 14 nt, Human
guauucaagaaagc

SEQ ID NO: 3459237 - RNA, 17 nt, Human
guauucaagaaagccag

SEQ ID NO: 3459238 - RNA, 18 nt, Human
guauucaauauccuuugc

SEQ ID NO: 3459239 - RNA, 23 nt, Human
guauucagcaaggcgcuaacuug

SEQ ID NO: 3459240 - RNA, 22 nt, Human
guauucagugagggucuucuua

SEQ ID NO: 3459241 - RNA, 21 nt, Human
guauucauccaaguuaaaugu

SEQ ID NO: 3459242 - RNA, 14 nt, Human
guauuccaccuuaa

SEQ ID NO: 3459243 - RNA, 22 nt, Human
guauuccaccuuaaauuaaaca

SEQ ID NO: 3459244 - RNA, 18 nt, Human
guauuccuuaaauaaacu

SEQ ID NO: 3459245 - RNA, 20 nt, Human
guauuccuuuuguguacagu

SEQ ID NO: 3459246 - RNA, 18 nt, Human
guauucuaguuuugucaa

SEQ ID NO: 3459247 - RNA, 18 nt, Human
guauucucuccuguaccu

SEQ ID NO: 3459248 - RNA, 13 nt, Human
guauucucugagc

SEQ ID NO: 3459249 - RNA, 19 nt, Human
guauucugccuuugcagaa

SEQ ID NO: 3459250 - RNA, 21 nt, Human
guauucugccuuugcagaaac

SEQ ID NO: 3459251 - RNA, 15 nt, Human
guauucugucuucau

SEQ ID NO: 3459252 - RNA, 15 nt, Human
guauucuuauuuaau

SEQ ID NO: 3459253 - RNA, 16 nt, Human
guauucuucucuuccu

SEQ ID NO: 3459254 - RNA, 11 nt, Human
guauucuuuuu

SEQ ID NO: 3459255 - RNA, 17 nt, Human
guauugaagcauuuuau

SEQ ID NO: 3459256 - RNA, 23 nt, Human
guauugaauauuguguuccuuuu

SEQ ID NO: 3459257 - RNA, 14 nt, Human
guauugaaucaugu

SEQ ID NO: 3459258 - RNA, 18 nt, Human
guauugacaaaauguuau

SEQ ID NO: 3459259 - RNA, 23 nt, Human
guauugagauacuuuuucuuuug

SEQ ID NO: 3459260 - RNA, 21 nt, Human
guauugcacauuguaaaaagu

SEQ ID NO: 3459261 - RNA, 15 nt, Human
guauugccaaacauu

SEQ ID NO: 3459262 - RNA, 17 nt, Human
guauugccaaacauuaa

SEQ ID NO: 3459263 - RNA, 23 nt, Human
guauugccaaacauuaauguuga

SEQ ID NO: 3459264 - RNA, 14 nt, Human
guauugcuugccac

SEQ ID NO: 3459265 - RNA, 20 nt, Human
guauugggguuauuuucugg

SEQ ID NO: 3459266 - RNA, 22 nt, Human
guauuguacaaaguauuaagca

SEQ ID NO: 3459267 - RNA, 17 nt, Human
guauuguaggugguguu

SEQ ID NO: 3459268 - RNA, 12 nt, Human
guauuguauuua

SEQ ID NO: 3459269 - RNA, 15 nt, Human
guauuguauuuauuc

SEQ ID NO: 3459270 - RNA, 16 nt, Human
guauugugauuaucaa

SEQ ID NO: 3459271 - RNA, 17 nt, Human
guauugugcaaugugua

SEQ ID NO: 3459272 - RNA, 17 nt, Human
guauugugucuuuugca

SEQ ID NO: 3459273 - RNA, 21 nt, Human
guauugugucuuuugcaugau

SEQ ID NO: 3459274 - RNA, 11 nt, Human
guauuguuccc

SEQ ID NO: 3459275 - RNA, 16 nt, Human
guauuguugaaaaagu

SEQ ID NO: 3459276 - RNA, 13 nt, Human
guauuguuguccu

SEQ ID NO: 3459277 - RNA, 15 nt, Human
guauuguuguccuuu

SEQ ID NO: 3459278 - RNA, 18 nt, Human
guauuguuguccuuuuca

SEQ ID NO: 3459279 - RNA, 19 nt, Human
guauuguuguccuuuucau

SEQ ID NO: 3459280 - RNA, 20 nt, Human
guauuuaaaaauagaaacau

SEQ ID NO: 3459281 - RNA, 21 nt, Human
guauuuaacagaaauuguaua

SEQ ID NO: 3459282 - RNA, 17 nt, Human
guauuuaagccuaaaga

SEQ ID NO: 3459283 - RNA, 19 nt, Human
guauuuaagccuaaagauu

SEQ ID NO: 3459284 - RNA, 20 nt, Human
guauuuaauuguaaacugua

SEQ ID NO: 3459285 - RNA, 21 nt, Human
guauuuaauuguaaacuguac

SEQ ID NO: 3459286 - RNA, 13 nt, Human
guauuuauaaaua

SEQ ID NO: 3459287 - RNA, 21 nt, Human
guauuuauaagaaaaauguga

SEQ ID NO: 3459288 - RNA, 13 nt, Human
guauuuauauauu

SEQ ID NO: 3459289 - RNA, 16 nt, Human
guauuuauauauuuau

SEQ ID NO: 3459290 - RNA, 17 nt, Human
guauuuauauauuuaua

SEQ ID NO: 3459291 - RNA, 19 nt, Human
guauuuaucuauuguaaga

SEQ ID NO: 3459292 - RNA, 22 nt, Human
guauuuauguaaugaaguaaag

SEQ ID NO: 3459293 - RNA, 13 nt, Human
guauuuauucaau

SEQ ID NO: 3459294 - RNA, 16 nt, Human
guauuuauucaauaaa

SEQ ID NO: 3459295 - RNA, 18 nt, Human
guauuuauugaagaaaca

SEQ ID NO: 3459296 - RNA, 13 nt, Human
guauuuauuuugu

SEQ ID NO: 3459297 - RNA, 15 nt, Human
guauuuauuuuguaa

SEQ ID NO: 3459298 - RNA, 11 nt, Human
guauuucagac

SEQ ID NO: 3459299 - RNA, 16 nt, Human
guauuucagaugcuuu

SEQ ID NO: 3459300 - RNA, 16 nt, Human
guauuugaaaaauauu

SEQ ID NO: 3459301 - RNA, 19 nt, Human
guauuugaaaacagaaauu

SEQ ID NO: 3459302 - RNA, 17 nt, Human
guauuugagacauucca

SEQ ID NO: 3459303 - RNA, 19 nt, Human
guauuugagaguucuaaau

SEQ ID NO: 3459304 - RNA, 18 nt, Human
guauuugauucaaaauau

SEQ ID NO: 3459305 - RNA, 11 nt, Human
guauuugcuaa

SEQ ID NO: 3459306 - RNA, 20 nt, Human
guauuuggaaauaaagucag

SEQ ID NO: 3459307 - RNA, 21 nt, Human
guauuuggaaauaaagucaga

SEQ ID NO: 3459308 - RNA, 22 nt, Human
guauuugggaaacuugucacuu

SEQ ID NO: 3459309 - RNA, 13 nt, Human
guauuuguaauua

SEQ ID NO: 3459310 - RNA, 11 nt, Human
guauuugugac

SEQ ID NO: 3459311 - RNA, 18 nt, Human
guauuugugacuaauugu

SEQ ID NO: 3459312 - RNA, 21 nt, Human
guauuugugacuaauuguaua

SEQ ID NO: 3459313 - RNA, 18 nt, Human
guauuuguuaauuuagaa

SEQ ID NO: 3459314 - RNA, 16 nt, Human
guauuuguucauguuu

SEQ ID NO: 3459315 - RNA, 17 nt, Human
guauuuguucauguuug

SEQ ID NO: 3459316 - RNA, 16 nt, Human
guauuuguucccaaga

SEQ ID NO: 3459317 - RNA, 16 nt, Human
guauuuuaaaagaaug

SEQ ID NO: 3459318 - RNA, 18 nt, Human
guauuuuaaaauagcguu

SEQ ID NO: 3459319 - RNA, 21 nt, Human
guauuuuaguaagagauuccu

SEQ ID NO: 3459320 - RNA, 21 nt, Human
guauuuuauaaaauuaaagaa

SEQ ID NO: 3459321 - RNA, 13 nt, Human
guauuuuauugua

SEQ ID NO: 3459322 - RNA, 17 nt, Human
guauuuucaauagccac

SEQ ID NO: 3459323 - RNA, 12 nt, Human
guauuuucaguc

SEQ ID NO: 3459324 - RNA, 22 nt, Human
guauuuucccccuuuucugcau

SEQ ID NO: 3459325 - RNA, 20 nt, Human
guauuuucuucaccucugcu

SEQ ID NO: 3459326 - RNA, 14 nt, Human
guauuuugaaguuu

SEQ ID NO: 3459327 - RNA, 11 nt, Human
guauuuugaau

SEQ ID NO: 3459328 - RNA, 15 nt, Human
guauuuugaauacca

SEQ ID NO: 3459329 - RNA, 14 nt, Human
guauuuuggagaaa

SEQ ID NO: 3459330 - RNA, 24 nt, Human
guauuuuguguccuccaggagcuu

SEQ ID NO: 3459331 - RNA, 12 nt, Human
guauuuugugug

SEQ ID NO: 3459332 - RNA, 19 nt, Human
guauuuuguuuuugucuua

SEQ ID NO: 3459333 - RNA, 22 nt, Human
guauuuuguuuuugucuuaaaa

SEQ ID NO: 3459334 - RNA, 13 nt, Human
guauuuuuaaagg

SEQ ID NO: 3459335 - RNA, 14 nt, Human
guauuuuuaauggg

SEQ ID NO: 3459336 - RNA, 19 nt, Human
guauuuuuaauuaacuuug

SEQ ID NO: 3459337 - RNA, 16 nt, Human
guauuuuugacagaau

SEQ ID NO: 3459338 - RNA, 17 nt, Human
guauuuuugcugcuucu

SEQ ID NO: 3459339 - RNA, 17 nt, Human
guauuuuuguauucaau

SEQ ID NO: 3459340 - RNA, 21 nt, Human
guauuuuuucaaguuguaaau

SEQ ID NO: 3459341 - RNA, 19 nt, Human
guauuuuuucuugcauuga

SEQ ID NO: 3459342 - RNA, 16 nt, Human
guauuuuuuuuucuaa

SEQ ID NO: 3459343 - RNA, 20 nt, Human
gucaaaaaguuugguucugu

SEQ ID NO: 3459344 - RNA, 13 nt, Human
gucaaaacacugu

SEQ ID NO: 3459345 - RNA, 15 nt, Human
gucaaaacacugugg

SEQ ID NO: 3459346 - RNA, 16 nt, Human
gucaaaacacugugga

SEQ ID NO: 3459347 - RNA, 15 nt, Human
gucaaaacagauugu

SEQ ID NO: 3459348 - RNA, 20 nt, Human
gucaaaacagauuguuugca

SEQ ID NO: 3459349 - RNA, 15 nt, Human
gucaaaagcuggauu

SEQ ID NO: 3459350 - RNA, 18 nt, Human
gucaaaauauuuuuaaaa

SEQ ID NO: 3459351 - RNA, 13 nt, Human
gucaaaauuugcu

SEQ ID NO: 3459352 - RNA, 22 nt, Human
gucaaaccgcacucacccaugu

SEQ ID NO: 3459353 - RNA, 16 nt, Human
gucaaagaaaugcuga

SEQ ID NO: 3459354 - RNA, 11 nt, Human
gucaaagaagg

SEQ ID NO: 3459355 - RNA, 23 nt, Human
gucaaagcaggggaguaugcaaa

SEQ ID NO: 3459356 - RNA, 13 nt, Human
gucaaauaaacac

SEQ ID NO: 3459357 - RNA, 17 nt, Human
gucaaauaaacacugug

SEQ ID NO: 3459358 - RNA, 16 nt, Human
gucaaaugcuagaaaa

SEQ ID NO: 3459359 - RNA, 15 nt, Human
gucaaauuauguauu

SEQ ID NO: 3459360 - RNA, 17 nt, Human
gucaacacuaacaugau

SEQ ID NO: 3459361 - RNA, 22 nt, Human
gucaacacuuaaggguuuuaga

SEQ ID NO: 3459362 - RNA, 22 nt, Human
gucaacagagaaggcaggaaug

SEQ ID NO: 3459363 - RNA, 12 nt, Human
gucaacagugaa

SEQ ID NO: 3459364 - RNA, 22 nt, Human
gucaacaguuuuccuaugcuuu

SEQ ID NO: 3459365 - RNA, 16 nt, Human
gucaacaugaaacacc

SEQ ID NO: 3459366 - RNA, 13 nt, Human
gucaaccagacag

SEQ ID NO: 3459367 - RNA, 15 nt, Human
gucaacccuucugga

SEQ ID NO: 3459368 - RNA, 17 nt, Human
gucaacccuucuggaaa

SEQ ID NO: 3459369 - RNA, 13 nt, Human
gucaaccuccugg

SEQ ID NO: 3459370 - RNA, 15 nt, Human
gucaaccuccuggac

SEQ ID NO: 3459371 - RNA, 16 nt, Human
gucaaccuccuggaca

SEQ ID NO: 3459372 - RNA, 21 nt, Human
gucaaccucgcgcuugcuggc

SEQ ID NO: 3459373 - RNA, 19 nt, Human
gucaaccugggcaaagccu

SEQ ID NO: 3459374 - RNA, 16 nt, Human
gucaacguuguacugu

SEQ ID NO: 3459375 - RNA, 11 nt, Human
ugcccagagau

SEQ ID NO: 3459376 - RNA, 16 nt, Human
ugcccagagaugccuc

SEQ ID NO: 3459377 - RNA, 19 nt, Human
ugcccagagaugccuccac

SEQ ID NO: 3459378 - RNA, 11 nt, Human
ugcccagagcu

SEQ ID NO: 3459379 - RNA, 16 nt, Human
ugauuugaaaaauaua

SEQ ID NO: 3459380 - RNA, 23 nt, Human
ugauuugacauagucuggcugua

SEQ ID NO: 3459381 - RNA, 23 nt, Human
ugauuugcaaugggauguaugaa

SEQ ID NO: 3459382 - RNA, 13 nt, Human
ugauuugcauuga

SEQ ID NO: 3459383 - RNA, 14 nt, Human
ugauuugcauugaa

SEQ ID NO: 3459384 - RNA, 17 nt, Human
ugauuugcugcucuuca

SEQ ID NO: 3459385 - RNA, 18 nt, Human
ugauuuggggauucagau

SEQ ID NO: 3459386 - RNA, 21 nt, Human
ugauuuggggauucagauuuc

SEQ ID NO: 3459387 - RNA, 18 nt, Human
ugauuuggguuggggaag

SEQ ID NO: 3459388 - RNA, 23 nt, Human
ugauuuguacagauucuuuauua

SEQ ID NO: 3459389 - RNA, 15 nt, Human
ugauuuguacugaaa

SEQ ID NO: 3459390 - RNA, 18 nt, Human
ugauuuguacugaaaaau

SEQ ID NO: 3459391 - RNA, 18 nt, Human
ugauuuguaguggaaaca

SEQ ID NO: 3459392 - RNA, 15 nt, Human
ugauuugucacugcu

SEQ ID NO: 3459393 - RNA, 19 nt, Human
ugauuuguuuuccucuuaa

SEQ ID NO: 3459394 - RNA, 13 nt, Human
ugauuuuaaaaug

SEQ ID NO: 3459395 - RNA, 17 nt, Human
ugauuuuaaaauguaca

SEQ ID NO: 3459396 - RNA, 13 nt, Human
ugauuuuaaaugu

SEQ ID NO: 3459397 - RNA, 14 nt, Human
ugauuuuaacaaua

SEQ ID NO: 3459398 - RNA, 16 nt, Human
ugauuuuaacaauaac

SEQ ID NO: 3459399 - RNA, 19 nt, Human
ugauuuuaacaauaacuac

SEQ ID NO: 3459400 - RNA, 12 nt, Human
ugauuuuaaugg

SEQ ID NO: 3459401 - RNA, 20 nt, Human
ugauuuuaggagcuaaggcu

SEQ ID NO: 3459402 - RNA, 15 nt, Human
ugauuuuauucuuga

SEQ ID NO: 3459403 - RNA, 16 nt, Human
ugauuuuauucuugau

SEQ ID NO: 3459404 - RNA, 15 nt, Human
ugauuuucauaacuu

SEQ ID NO: 3459405 - RNA, 13 nt, Human
ugauuuucauugc

SEQ ID NO: 3459406 - RNA, 22 nt, Human
ugauuuuccaucuaaaaauaua

SEQ ID NO: 3459407 - RNA, 11 nt, Human
ugauuuugaac

SEQ ID NO: 3459408 - RNA, 17 nt, Human
ugauuuugcuguagaag

SEQ ID NO: 3459409 - RNA, 13 nt, Human
ugauuuuuaucca

SEQ ID NO: 3459410 - RNA, 13 nt, Human
ugauuuuucugga

SEQ ID NO: 3459411 - RNA, 21 nt, Human
ugauuuuugccucuuccaguc

SEQ ID NO: 3459412 - RNA, 17 nt, Human
ugauuuuuuaaaagaaa

SEQ ID NO: 3459413 - RNA, 14 nt, Human
ugauuuuuugaaag

SEQ ID NO: 3459414 - RNA, 18 nt, Human
ugauuuuuugaaaguuaa

SEQ ID NO: 3459415 - RNA, 17 nt, Human
ugauuuuuuuuaauuac

SEQ ID NO: 3459416 - RNA, 22 nt, Human
ugauuuuuuuuuagaacagaaa

SEQ ID NO: 3459417 - RNA, 20 nt, Human
ugauuuuuuuuuccuucagu

SEQ ID NO: 3459418 - RNA, 23 nt, Human
ugauuuuuuuuuccuucagugcc

SEQ ID NO: 3459419 - RNA, 16 nt, Human
ugauuuuuuuuuuuca

SEQ ID NO: 3459420 - RNA, 18 nt, Human
ugcaaaaaaauuaaaaug

SEQ ID NO: 3459421 - RNA, 14 nt, Human
ugcaaaaaaucuua

SEQ ID NO: 3459422 - RNA, 19 nt, Human
ugcaaaaaaucuuaauacu

SEQ ID NO: 3459423 - RNA, 19 nt, Human
ugcaaaaacuacaaccaau

SEQ ID NO: 3459424 - RNA, 15 nt, Human
ugcaaaaagaaauga

SEQ ID NO: 3459425 - RNA, 17 nt, Human
ugcaaaaauaaucauga

SEQ ID NO: 3459426 - RNA, 18 nt, Human
ugcaaaaauauuuauaaa

SEQ ID NO: 3459427 - RNA, 12 nt, Human
ugcaaaaaugua

SEQ ID NO: 3459428 - RNA, 19 nt, Human
ugcaaaacagcguuuaaga

SEQ ID NO: 3459429 - RNA, 13 nt, Human
ugcaaaacauuuc

SEQ ID NO: 3459430 - RNA, 12 nt, Human
ugcaaaauggaa

SEQ ID NO: 3459431 - RNA, 13 nt, Human
ugccuugguuuuu

SEQ ID NO: 3459432 - RNA, 16 nt, Human
ugccuuguauaauauu

SEQ ID NO: 3459433 - RNA, 19 nt, Human
ugccuuguguacaguuauu

SEQ ID NO: 3459434 - RNA, 14 nt, Human
ugccuuguuuggau

SEQ ID NO: 3459435 - RNA, 16 nt, Human
ugccuuguuuuuuguu

SEQ ID NO: 3459436 - RNA, 17 nt, Human
ugccuuuaaaguaugaa

SEQ ID NO: 3459437 - RNA, 18 nt, Human
ugccuuuaaaguaugaau

SEQ ID NO: 3459438 - RNA, 19 nt, Human
ugccuuuaaaucugugaug

SEQ ID NO: 3459439 - RNA, 15 nt, Human
ugccuuuagaaaaua

SEQ ID NO: 3459440 - RNA, 14 nt, Human
ugccuuuauugugu

SEQ ID NO: 3459441 - RNA, 12 nt, Human
ugccuuucaaau

SEQ ID NO: 3459442 - RNA, 13 nt, Human
ugccuuucaaauu

SEQ ID NO: 3459443 - RNA, 19 nt, Human
ugccuuuccuguucagcau

SEQ ID NO: 3459444 - RNA, 11 nt, Human
ugccuuucucg

SEQ ID NO: 3459445 - RNA, 15 nt, Human
ugccuuucugcaguu

SEQ ID NO: 3459446 - RNA, 20 nt, Human
ugccuuucugcaguuuuuca

SEQ ID NO: 3459447 - RNA, 22 nt, Human
ugccuuucugcaguuuuucagg

SEQ ID NO: 3459448 - RNA, 12 nt, Human
ugccuuugaaug

SEQ ID NO: 3459449 - RNA, 23 nt, Human
ugccuuugaccugccucccuuca

SEQ ID NO: 3459450 - RNA, 12 nt, Human
ugccuuugagac

SEQ ID NO: 3459451 - RNA, 15 nt, Human
ugccuuugagacagu

SEQ ID NO: 3459452 - RNA, 15 nt, Human
ugccuuuguaaguua

SEQ ID NO: 3459453 - RNA, 14 nt, Human
ugccuuuuauccca

SEQ ID NO: 3459454 - RNA, 19 nt, Human
ugccuuuucccaacuccag

SEQ ID NO: 3459455 - RNA, 13 nt, Human
ugccuuuuuauuu

SEQ ID NO: 3459456 - RNA, 15 nt, Human
ugccuuuuuauuuau

SEQ ID NO: 3459457 - RNA, 22 nt, Human
ugccuuuuuauuuuuguuuuua

SEQ ID NO: 3459458 - RNA, 16 nt, Human
ugccuuuuucauuauu

SEQ ID NO: 3459459 - RNA, 17 nt, Human
ugccuuuuucauuauuu

SEQ ID NO: 3459460 - RNA, 21 nt, Human
ugccuuuuucauuuuccaaua

SEQ ID NO: 3459461 - RNA, 20 nt, Human
ugccuuuuuucacggaaguu

SEQ ID NO: 3459462 - RNA, 21 nt, Human
ugccuuuuuucacggaaguuu

SEQ ID NO: 3459463 - RNA, 20 nt, Human
ugccuuuuuucuguauaaau

SEQ ID NO: 3459464 - RNA, 22 nt, Human
ugccuuuuuucuguauaaaugu

SEQ ID NO: 3459465 - RNA, 23 nt, Human
ugccuuuuuucuguauaaauguc

SEQ ID NO: 3459466 - RNA, 14 nt, Human
ugccuuuuuugauc

SEQ ID NO: 3459467 - RNA, 19 nt, Human
ugcgaacuagagaugugca

SEQ ID NO: 3459468 - RNA, 16 nt, Human
ugcgaaggggcccugg

SEQ ID NO: 3459469 - RNA, 12 nt, Human
ugcgaaguccua

SEQ ID NO: 3459470 - RNA, 18 nt, Human
ugcgaaguccuauggaaa

SEQ ID NO: 3459471 - RNA, 23 nt, Human
ugcgaaugguagucuaaccaaau

SEQ ID NO: 3459472 - RNA, 22 nt, Human
ugcgaaugguuccauucucucu

SEQ ID NO: 3459473 - RNA, 19 nt, Human
ugcgacacugggaggccag

SEQ ID NO: 3459474 - RNA, 15 nt, Human
ugcgaccccaucugc

SEQ ID NO: 3459475 - RNA, 20 nt, Human
ugcgaccccaucugcccagg

SEQ ID NO: 3459476 - RNA, 13 nt, Human
ugcgacccugggg

SEQ ID NO: 3459477 - RNA, 16 nt, Human
ugcgacggagagaaaa

SEQ ID NO: 3459478 - RNA, 15 nt, Human
ugcgacuuucugccu

SEQ ID NO: 3459479 - RNA, 13 nt, Human
ugcgagagaugug

SEQ ID NO: 3459480 - RNA, 15 nt, Human
ugcgaggcuaugagu

SEQ ID NO: 3459481 - RNA, 22 nt, Human
ugcgagugugugcaugugugug

SEQ ID NO: 3459482 - RNA, 12 nt, Human
ugcgauaagaug

SEQ ID NO: 3459483 - RNA, 15 nt, Human
ugcgaucauggcuca

SEQ ID NO: 3459484 - RNA, 15 nt, Human
ugcgaucuggguuca

SEQ ID NO: 3459485 - RNA, 21 nt, Human
ugcgaucuggguucacugcaa

SEQ ID NO: 3459486 - RNA, 16 nt, Human
ugcgaucuucagagca

SEQ ID NO: 3459487 - RNA, 15 nt, Human
ugcgauucuggauaa

SEQ ID NO: 3459488 - RNA, 16 nt, Human
ugcgauuuuauuacug

SEQ ID NO: 3459489 - RNA, 16 nt, Human
ugcgcagaaaacaaga

SEQ ID NO: 3459490 - RNA, 15 nt, Human
ugcgcagccccaucu

SEQ ID NO: 3459491 - RNA, 20 nt, Human
ugcgcagccccaucugugca

SEQ ID NO: 3459492 - RNA, 21 nt, Human
ugcgcaggcuggcccugcccu

SEQ ID NO: 3459493 - RNA, 22 nt, Human
ugcgcaggcuggcccugcccug

SEQ ID NO: 3459494 - RNA, 15 nt, Human
ugcgcauaggccugc

SEQ ID NO: 3459495 - RNA, 20 nt, Human
ugcgcauaggccugcuuugu

SEQ ID NO: 3459496 - RNA, 21 nt, Human
ugcgcauucuaaccuggaggu

SEQ ID NO: 3459497 - RNA, 17 nt, Human
ugcgccaccgcccagag

SEQ ID NO: 3459498 - RNA, 20 nt, Human
ugcgcccaccccgcucugca

SEQ ID NO: 3459499 - RNA, 18 nt, Human
ugcgcccagggcugggag

SEQ ID NO: 3459500 - RNA, 19 nt, Human
ugcgcccagggcugggagg

SEQ ID NO: 3459501 - RNA, 17 nt, Human
ugcgccgagucugucuc

SEQ ID NO: 3459502 - RNA, 17 nt, Human
ugcgccucaggcugcug

SEQ ID NO: 3459503 - RNA, 19 nt, Human
ugcgccugugaugcugggc

SEQ ID NO: 3459504 - RNA, 20 nt, Human
ugcgcuaaacuuuucugaua

SEQ ID NO: 3459505 - RNA, 21 nt, Human
ugcgcuaaacuuuucugauag

SEQ ID NO: 3459506 - RNA, 14 nt, Human
ugcgcucagggcca

SEQ ID NO: 3459507 - RNA, 23 nt, Human
ugcgcucagggccaugcugaggc

SEQ ID NO: 3459508 - RNA, 17 nt, Human
ugcgcuccuggcccagc

SEQ ID NO: 3459509 - RNA, 14 nt, Human
ugcgcuucacuugg

SEQ ID NO: 3459510 - RNA, 16 nt, Human
ugcgcuucacuugggu

SEQ ID NO: 3459511 - RNA, 22 nt, Human
ugcgcuucacuuggguccaggc

SEQ ID NO: 3459512 - RNA, 19 nt, Human
ugcgcuuguuuuaaagugg

SEQ ID NO: 3459513 - RNA, 18 nt, Human
ugcgcuuuugcuggucac

SEQ ID NO: 3459514 - RNA, 14 nt, Human
ugcggaaagguauu

SEQ ID NO: 3459515 - RNA, 15 nt, Human
ugcggaaagguauuu

SEQ ID NO: 3459516 - RNA, 15 nt, Human
ugcggacaaguuuua

SEQ ID NO: 3459517 - RNA, 20 nt, Human
ugcggacagccacggccagg

SEQ ID NO: 3459518 - RNA, 21 nt, Human
ugcggacagccacggccaggc

SEQ ID NO: 3459519 - RNA, 23 nt, Human
ugcggaggaaggaggacccagga

SEQ ID NO: 3459520 - RNA, 15 nt, Human
ugcggagugaagagg

SEQ ID NO: 3459521 - RNA, 15 nt, Human
ugcggaucucagcuu

SEQ ID NO: 3459522 - RNA, 17 nt, Human
ugcggccuuuggcuuca

SEQ ID NO: 3459523 - RNA, 13 nt, Human
ugcggcgguccca

SEQ ID NO: 3459524 - RNA, 17 nt, Human
ugcaagcagggcucugc

SEQ ID NO: 3459525 - RNA, 15 nt, Human
ugcaagccagauuuu

SEQ ID NO: 3459526 - RNA, 19 nt, Human
ugcaagccccucuuucugu

SEQ ID NO: 3459527 - RNA, 13 nt, Human
ugcaagcuuuucc

SEQ ID NO: 3459528 - RNA, 12 nt, Human
ugcaaggaagga

SEQ ID NO: 3459529 - RNA, 18 nt, Human
ugcaaggacauucuugua

SEQ ID NO: 3459530 - RNA, 11 nt, Human
ugcaaggcacu

SEQ ID NO: 3459531 - RNA, 14 nt, Human
ugcaaggcagccgu

SEQ ID NO: 3459532 - RNA, 24 nt, Human
ugcaaggccgcuguucacccacag

SEQ ID NO: 3459533 - RNA, 11 nt, Human
ugcaagggaaa

SEQ ID NO: 3459534 - RNA, 21 nt, Human
ugcaagggacuguguguugcc

SEQ ID NO: 3459535 - RNA, 21 nt, Human
ugcaagguauuacacucugua

SEQ ID NO: 3459536 - RNA, 15 nt, Human
ugcaaggucauuuuu

SEQ ID NO: 3459537 - RNA, 17 nt, Human
ugcaagguuccacagag

SEQ ID NO: 3459538 - RNA, 17 nt, Human
ugcaagucacaaaggaa

SEQ ID NO: 3459539 - RNA, 21 nt, Human
ugcaagucagaggauggccag

SEQ ID NO: 3459540 - RNA, 14 nt, Human
ugcaagucauggcu

SEQ ID NO: 3459541 - RNA, 17 nt, Human
ugcaaguccuuuuguaa

SEQ ID NO: 3459542 - RNA, 22 nt, Human
ugcaagugagcaaaccugcccc

SEQ ID NO: 3459543 - RNA, 12 nt, Human
ugcaagugcugg

SEQ ID NO: 3459544 - RNA, 15 nt, Human
ugcaagugcuggagu

SEQ ID NO: 3459545 - RNA, 21 nt, Human
ugcaagugguagcaagaagug

SEQ ID NO: 3459546 - RNA, 16 nt, Human
ugcaagugucugugug

SEQ ID NO: 3459547 - RNA, 17 nt, Human
ugcaagugucugugugc

SEQ ID NO: 3459548 - RNA, 23 nt, Human
ugcaagugugugcaugugugcga

SEQ ID NO: 3459549 - RNA, 17 nt, Human
ugcaaguuaugaaauau

SEQ ID NO: 3459550 - RNA, 14 nt, Human
ugcaauaaaauuua

SEQ ID NO: 3459551 - RNA, 15 nt, Human
ugcaauaaaauuuaa

SEQ ID NO: 3459552 - RNA, 15 nt, Human
ugcaauaaaguauaa

SEQ ID NO: 3459553 - RNA, 20 nt, Human
ugcaauaaaucugacccagu

SEQ ID NO: 3459554 - RNA, 14 nt, Human
ugcaauaacagcug

SEQ ID NO: 3459555 - RNA, 15 nt, Human
ugcaauaacagcugc

SEQ ID NO: 3459556 - RNA, 16 nt, Human
ugcaauaacagcugca

SEQ ID NO: 3459557 - RNA, 14 nt, Human
ugcaauaaccuggg

SEQ ID NO: 3459558 - RNA, 15 nt, Human
ugcaauaaugcagua

SEQ ID NO: 3459559 - RNA, 16 nt, Human
ugcaauaaugcaguau

SEQ ID NO: 3459560 - RNA, 16 nt, Human
ugcaauacaaguuuca

SEQ ID NO: 3459561 - RNA, 23 nt, Human
ugcaauacaaguuucauccagaa

SEQ ID NO: 3459562 - RNA, 20 nt, Human
ugcaauagaacagagaaaga

SEQ ID NO: 3459563 - RNA, 14 nt, Human
ugcaauagagacug

SEQ ID NO: 3459564 - RNA, 16 nt, Human
ugcaauagagacugua

SEQ ID NO: 3459565 - RNA, 16 nt, Human
ugcaauauacuggaaa

SEQ ID NO: 3459566 - RNA, 18 nt, Human
ugcaauauaucuaaauug

SEQ ID NO: 3459567 - RNA, 20 nt, Human
ugcaauauaucuaaauugaa

SEQ ID NO: 3459568 - RNA, 21 nt, Human
ugcaauauaucuaaauugaau

SEQ ID NO: 3459569 - RNA, 23 nt, Human
ugcaauauaucuaaauugaauaa

SEQ ID NO: 3459570 - RNA, 20 nt, Human
ugcaauauauuuuguaugca

SEQ ID NO: 3459571 - RNA, 14 nt, Human
ugcaauaucugaag

SEQ ID NO: 3459572 - RNA, 21 nt, Human
ugcaauaucuucguuaguaau

SEQ ID NO: 3459573 - RNA, 14 nt, Human
ugcaauauuccuuu

SEQ ID NO: 3459574 - RNA, 19 nt, Human
ugcaauauuuccucaugug

SEQ ID NO: 3459575 - RNA, 13 nt, Human
ugcaauauuugua

SEQ ID NO: 3459576 - RNA, 12 nt, Human
ugcaauccuuac

SEQ ID NO: 3459577 - RNA, 22 nt, Human
ugcaaucguaauguacagaugg

SEQ ID NO: 3459578 - RNA, 21 nt, Human
ugcaaugaaagguacuauauu

SEQ ID NO: 3459579 - RNA, 15 nt, Human
ugcaaugaaggaaau

SEQ ID NO: 3459580 - RNA, 15 nt, Human
ugcaaugaagucucu

SEQ ID NO: 3459581 - RNA, 16 nt, Human
ugcaaugacaucuuca

SEQ ID NO: 3459582 - RNA, 16 nt, Human
ugcaaugaccuuucaa

SEQ ID NO: 3459583 - RNA, 13 nt, Human
ugcaauggauuuu

SEQ ID NO: 3459584 - RNA, 15 nt, Human
ugcaauggcagccuu

SEQ ID NO: 3459585 - RNA, 17 nt, Human
ugcaaugggauguauga

SEQ ID NO: 3459586 - RNA, 22 nt, Human
ugcaaugggauguaugaauaca

SEQ ID NO: 3459587 - RNA, 22 nt, Human
ugcaauguaaauauuuuaaaga

SEQ ID NO: 3459588 - RNA, 17 nt, Human
ugcaaugugaaaaaucu

SEQ ID NO: 3459589 - RNA, 14 nt, Human
ugcaauguguauaa

SEQ ID NO: 3459590 - RNA, 20 nt, Human
ugcaauguguauaaacaaga

SEQ ID NO: 3459591 - RNA, 20 nt, Human
ugcaauuaaacuuccaaaga

SEQ ID NO: 3459592 - RNA, 17 nt, Human
gucccacuuccccuccu

SEQ ID NO: 3459593 - RNA, 19 nt, Human
gucccacuuggcaucagcu

SEQ ID NO: 3459594 - RNA, 21 nt, Human
gucccagaaugccuccugcag

SEQ ID NO: 3459595 - RNA, 12 nt, Human
gucccagagcag

SEQ ID NO: 3459596 - RNA, 19 nt, Human
gucccagagcaggaggccc

SEQ ID NO: 3459597 - RNA, 22 nt, Human
gucccagauuggcucacacuga

SEQ ID NO: 3459598 - RNA, 15 nt, Human
gucccagcagccagc

SEQ ID NO: 3459599 - RNA, 12 nt, Human
gucccagcagcu

SEQ ID NO: 3459600 - RNA, 14 nt, Human
gucccagcagcugc

SEQ ID NO: 3459601 - RNA, 15 nt, Human
gucccagcagcugcc

SEQ ID NO: 3459602 - RNA, 17 nt, Human
gucccagcagcugccag

SEQ ID NO: 3459603 - RNA, 22 nt, Human
gucccagcagcugccaggagca

SEQ ID NO: 3459604 - RNA, 18 nt, Human
gucccagccaccccgggc

SEQ ID NO: 3459605 - RNA, 21 nt, Human
gucccagccaccccgggcucu

SEQ ID NO: 3459606 - RNA, 22 nt, Human
gucccagcuacucagaagccug

SEQ ID NO: 3459607 - RNA, 15 nt, Human
gucccagcucccugg

SEQ ID NO: 3459608 - RNA, 19 nt, Human
gucccaggaaucaguuuaa

SEQ ID NO: 3459609 - RNA, 17 nt, Human
gucccaggcugagccuc

SEQ ID NO: 3459610 - RNA, 21 nt, Human
gucccaggcugagccucaguc

SEQ ID NO: 3459611 - RNA, 17 nt, Human
gucccagguuaucuggg

SEQ ID NO: 3459612 - RNA, 16 nt, Human
gucccagguuggcucu

SEQ ID NO: 3459613 - RNA, 21 nt, Human
gucccagguuggcucugccag

SEQ ID NO: 3459614 - RNA, 17 nt, Human
gucccagucucuggcag

SEQ ID NO: 3459615 - RNA, 20 nt, Human
gucccagugggaggggcagg

SEQ ID NO: 3459616 - RNA, 15 nt, Human
gucccaguuuuguug

SEQ ID NO: 3459617 - RNA, 23 nt, Human
gucccaguuuuguugccccagaa

SEQ ID NO: 3459618 - RNA, 18 nt, Human
gucccauaggcccaguga

SEQ ID NO: 3459619 - RNA, 18 nt, Human
gucccauauccugccuca

SEQ ID NO: 3459620 - RNA, 21 nt, Human
gucccaucacguguacuggcu

SEQ ID NO: 3459621 - RNA, 17 nt, Human
gucccauccaggcaguc

SEQ ID NO: 3459622 - RNA, 15 nt, Human
gucccaucccugcgu

SEQ ID NO: 3459623 - RNA, 16 nt, Human
gucccaugacccaccc

SEQ ID NO: 3459624 - RNA, 22 nt, Human
gucccauggacacuccagugcc

SEQ ID NO: 3459625 - RNA, 22 nt, Human
gucccaugugagcugcugccau

SEQ ID NO: 3459626 - RNA, 21 nt, Human
gucccauuuuagccaagcuua

SEQ ID NO: 3459627 - RNA, 12 nt, Human
guccccacacuc

SEQ ID NO: 3459628 - RNA, 13 nt, Human
guccccaccaucu

SEQ ID NO: 3459629 - RNA, 20 nt, Human
guccccaccaucugcugucu

SEQ ID NO: 3459630 - RNA, 17 nt, Human
guccccaccccugcccc

SEQ ID NO: 3459631 - RNA, 17 nt, Human
guccccacccuccacuc

SEQ ID NO: 3459632 - RNA, 23 nt, Human
guccccagaacucugccugcccu

SEQ ID NO: 3459633 - RNA, 12 nt, Human
guccccagagaa

SEQ ID NO: 3459634 - RNA, 13 nt, Human
guccccagcccac

SEQ ID NO: 3459635 - RNA, 14 nt, Human
guccccagcccuuc

SEQ ID NO: 3459636 - RNA, 21 nt, Human
guccccaggccccaggaagcc

SEQ ID NO: 3459637 - RNA, 12 nt, Human
guccccaucugu

SEQ ID NO: 3459638 - RNA, 19 nt, Human
guccccauggcacccugcu

SEQ ID NO: 3459639 - RNA, 19 nt, Human
gucccccaacucugagccc

SEQ ID NO: 3459640 - RNA, 12 nt, Human
gucccccagcuc

SEQ ID NO: 3459641 - RNA, 13 nt, Human
gucccccagcucu

SEQ ID NO: 3459642 - RNA, 15 nt, Human
gucccccagcucugg

SEQ ID NO: 3459643 - RNA, 13 nt, Human
guccccccacccu

SEQ ID NO: 3459644 - RNA, 14 nt, Human
guccccccacuccc

SEQ ID NO: 3459645 - RNA, 12 nt, Human
gucccccucugg

SEQ ID NO: 3459646 - RNA, 13 nt, Human
gucccccucuguc

SEQ ID NO: 3459647 - RNA, 13 nt, Human
gucccccugacaa

SEQ ID NO: 3459648 - RNA, 12 nt, Human
gucccccugcag

SEQ ID NO: 3459649 - RNA, 14 nt, Human
gucccccugcagcu

SEQ ID NO: 3459650 - RNA, 14 nt, Human
gucccccuuccaug

SEQ ID NO: 3459651 - RNA, 15 nt, Human
guccccgcacugggc

SEQ ID NO: 3459652 - RNA, 15 nt, Human
guccccgcugcugug

SEQ ID NO: 3459653 - RNA, 16 nt, Human
guccccggggcccagg

SEQ ID NO: 3459654 - RNA, 18 nt, Human
guccccguggccaucccu

SEQ ID NO: 3459655 - RNA, 17 nt, Human
guccccuagagucccag

SEQ ID NO: 3459656 - RNA, 12 nt, Human
guccccucaccu

SEQ ID NO: 3459657 - RNA, 14 nt, Human
guccccucagcucc

SEQ ID NO: 3459658 - RNA, 15 nt, Human
guccccucagcucca

SEQ ID NO: 3459659 - RNA, 16 nt, Human
guccccucccagggag

SEQ ID NO: 3459660 - RNA, 12 nt, Human
guccccuccccc

SEQ ID NO: 3459661 - RNA, 17 nt, Human
guccccuccuucccaag

SEQ ID NO: 3459662 - RNA, 16 nt, Human
guccccucuugcccca

SEQ ID NO: 3459663 - RNA, 23 nt, Human
guccccucuugccccaaccccca

SEQ ID NO: 3459664 - RNA, 18 nt, Human
guccccugcuacaccuau

SEQ ID NO: 3459665 - RNA, 18 nt, Human
guccccuguuuguuucug

SEQ ID NO: 3459666 - RNA, 12 nt, Human
guccccuucccg

SEQ ID NO: 3459667 - RNA, 12 nt, Human
guccccuucucu

SEQ ID NO: 3459668 - RNA, 13 nt, Human
guccccuucucuc

SEQ ID NO: 3459669 - RNA, 14 nt, Human
guccccuucucuca

SEQ ID NO: 3459670 - RNA, 15 nt, Human
uggaaaggaaugcaa

SEQ ID NO: 3459671 - RNA, 22 nt, Human
uggaaaggaaugcaaagaugaa

SEQ ID NO: 3459672 - RNA, 22 nt, Human
uggaaaggagccuaggccaggu

SEQ ID NO: 3459673 - RNA, 20 nt, Human
uggaaaggcucagucucagg

SEQ ID NO: 3459674 - RNA, 13 nt, Human
uggaaaggggaga

SEQ ID NO: 3459675 - RNA, 22 nt, Human
uggaaaggggagagccugcugg

SEQ ID NO: 3459676 - RNA, 17 nt, Human
uggaaaggggggagcug

SEQ ID NO: 3459677 - RNA, 13 nt, Human
uggaaagucagaa

SEQ ID NO: 3459678 - RNA, 14 nt, Human
uggaaagugaauuu

SEQ ID NO: 3459679 - RNA, 23 nt, Human
uggaaagugaauuugaaugaaaa

SEQ ID NO: 3459680 - RNA, 13 nt, Human
uggaaaguguaaa

SEQ ID NO: 3459681 - RNA, 14 nt, Human
uggaaaguguaaag

SEQ ID NO: 3459682 - RNA, 21 nt, Human
uggaaaguguaaagcauucca

SEQ ID NO: 3459683 - RNA, 13 nt, Human
uggaaauaaaugu

SEQ ID NO: 3459684 - RNA, 23 nt, Human
uggaaauaaauguaucauagaaa

SEQ ID NO: 3459685 - RNA, 21 nt, Human
uggaaauagaaauuuccagag

SEQ ID NO: 3459686 - RNA, 13 nt, Human
uggaaauauauau

SEQ ID NO: 3459687 - RNA, 16 nt, Human
uggaaauauuaaaaga

SEQ ID NO: 3459688 - RNA, 15 nt, Human
uggaaauauuaugca

SEQ ID NO: 3459689 - RNA, 14 nt, Human
uggaaauauuuuga

SEQ ID NO: 3459690 - RNA, 17 nt, Human
uggaaauauuuugauaa

SEQ ID NO: 3459691 - RNA, 17 nt, Human
uggaaaucaaauguaaa

SEQ ID NO: 3459692 - RNA, 18 nt, Human
uggaaaucagccaaguuu

SEQ ID NO: 3459693 - RNA, 20 nt, Human
uggaaaucagccaaguuuua

SEQ ID NO: 3459694 - RNA, 20 nt, Human
uggaaaugcugggcugacgg

SEQ ID NO: 3459695 - RNA, 18 nt, Human
uggaaaugggcagagcag

SEQ ID NO: 3459696 - RNA, 19 nt, Human
uggaaauuagguugaaaca

SEQ ID NO: 3459697 - RNA, 21 nt, Human
uggaaauuagguugaaacaua

SEQ ID NO: 3459698 - RNA, 18 nt, Human
uggaaauucccuucaucu

SEQ ID NO: 3459699 - RNA, 17 nt, Human
uggaaauugauuuugaa

SEQ ID NO: 3459700 - RNA, 18 nt, Human
uggaaauuuagcauugua

SEQ ID NO: 3459701 - RNA, 13 nt, Human
uggaaauuucacg

SEQ ID NO: 3459702 - RNA, 20 nt, Human
uggaacaaagugaaggacau

SEQ ID NO: 3459703 - RNA, 20 nt, Human
uggaacacaaacacauuguu

SEQ ID NO: 3459704 - RNA, 14 nt, Human
uggaacaccaggcu

SEQ ID NO: 3459705 - RNA, 15 nt, Human
uggaacaccaggcug

SEQ ID NO: 3459706 - RNA, 12 nt, Human
uggaacacucug

SEQ ID NO: 3459707 - RNA, 18 nt, Human
uggaacauaaaaaggaca

SEQ ID NO: 3459708 - RNA, 20 nt, Human
uggaacauaaaaaggacauc

SEQ ID NO: 3459709 - RNA, 14 nt, Human
uggaacauacuguu

SEQ ID NO: 3459710 - RNA, 21 nt, Human
uggaacaucaucaaggcacug

SEQ ID NO: 3459711 - RNA, 14 nt, Human
uggaacauccuugg

SEQ ID NO: 3459712 - RNA, 20 nt, Human
uggaacauuggaauguucuc

SEQ ID NO: 3459713 - RNA, 13 nt, Human
uggaaccagacuc

SEQ ID NO: 3459714 - RNA, 13 nt, Human
uggaaccaggcuu

SEQ ID NO: 3459715 - RNA, 15 nt, Human
uggaaccaggcuugg

SEQ ID NO: 3459716 - RNA, 14 nt, Human
uggaacccagacuc

SEQ ID NO: 3459717 - RNA, 19 nt, Human
uggaacccuaaauaauaaa

SEQ ID NO: 3459718 - RNA, 15 nt, Human
uggaaccucagccug

SEQ ID NO: 3459719 - RNA, 17 nt, Human
uggaaccucagccuggc

SEQ ID NO: 3459720 - RNA, 16 nt, Human
uggaaccucugucuca

SEQ ID NO: 3459721 - RNA, 16 nt, Human
uggaaccugcaaaaaa

SEQ ID NO: 3459722 - RNA, 19 nt, Human
uggaaccugcaaaaaauac

SEQ ID NO: 3459723 - RNA, 16 nt, Human
uggaaccuugcugucc

SEQ ID NO: 3459724 - RNA, 22 nt, Human
uggaaccuugcuguccugaucu

SEQ ID NO: 3459725 - RNA, 13 nt, Human
uggaaccuuguuu

SEQ ID NO: 3459726 - RNA, 14 nt, Human
uggaacgcguugaa

SEQ ID NO: 3459727 - RNA, 21 nt, Human
uggaacguuuuuccuguucuu

SEQ ID NO: 3459728 - RNA, 17 nt, Human
uggaacuacauuacugu

SEQ ID NO: 3459729 - RNA, 20 nt, Human
uggaacuagguuuuaauaau

SEQ ID NO: 3459730 - RNA, 21 nt, Human
uggaacucauuccugccuguc

SEQ ID NO: 3459731 - RNA, 15 nt, Human
uggaacucuaucugg

SEQ ID NO: 3459732 - RNA, 21 nt, Human
uggaacucuaucugggccugg

SEQ ID NO: 3459733 - RNA, 15 nt, Human
uggaacugaaggggg

SEQ ID NO: 3459734 - RNA, 22 nt, Human
uggaacugaagggggcggccua

SEQ ID NO: 3459735 - RNA, 15 nt, Human
uggaacugcugccac

SEQ ID NO: 3459736 - RNA, 14 nt, Human
uggaacuuagccau

SEQ ID NO: 3459737 - RNA, 16 nt, Human
uggaacuucuaauaua

SEQ ID NO: 3459738 - RNA, 18 nt, Human
uggaacuucuaauauauu

SEQ ID NO: 3459739 - RNA, 21 nt, Human
uggaacuucuaauauauuuuu

SEQ ID NO: 3459740 - RNA, 15 nt, Human
uggaacuugaacuga

SEQ ID NO: 3459741 - RNA, 15 nt, Human
uggaacuugccugcc

SEQ ID NO: 3459742 - RNA, 21 nt, Human
uggaacuugccugccuuucca

SEQ ID NO: 3459743 - RNA, 21 nt, Human
uggaacuuuuauuagauaaca

SEQ ID NO: 3459744 - RNA, 15 nt, Human
uggaagaaaaugguu

SEQ ID NO: 3459745 - RNA, 14 nt, Human
uggaagaaaguaag

SEQ ID NO: 3459746 - RNA, 17 nt, Human
uggaagaaauuccugua

SEQ ID NO: 3459747 - RNA, 11 nt, Human
uggaagacagc

SEQ ID NO: 3459748 - RNA, 16 nt, Human
uggaagacagcucuua

SEQ ID NO: 3459749 - RNA, 21 nt, Human
uggaagacaggaaaguucaga

SEQ ID NO: 3459750 - RNA, 13 nt, Human
uggaagaccccac

SEQ ID NO: 3459751 - RNA, 15 nt, Human
uggaagaccccaccc

SEQ ID NO: 3459752 - RNA, 23 nt, Human
uggaagacgcaagggccugaugg

SEQ ID NO: 3459753 - RNA, 19 nt, Human
uggaagagagaaagcauau

SEQ ID NO: 3459754 - RNA, 20 nt, Human
uggaagagcagcaccuccuc

SEQ ID NO: 3459755 - RNA, 21 nt, Human
uggaagagcccagucuguuga

SEQ ID NO: 3459756 - RNA, 15 nt, Human
uggaagagccugcag

SEQ ID NO: 3459757 - RNA, 23 nt, Human
uggaagagccugcaggugcugcu

SEQ ID NO: 3459758 - RNA, 18 nt, Human
uggaagagcuaggcaggg

SEQ ID NO: 3459759 - RNA, 15 nt, Human
uggaagaggggacag

SEQ ID NO: 3459760 - RNA, 19 nt, Human
uggaagauaguuuucuccu

SEQ ID NO: 3459761 - RNA, 18 nt, Human
uggaagauauuccugagu

SEQ ID NO: 3459762 - RNA, 17 nt, Human
uggaagaucauuuugaa

SEQ ID NO: 3459763 - RNA, 14 nt, Human
uggaagauuuuaaa

SEQ ID NO: 3459764 - RNA, 22 nt, Human
uggaagcacagaaaacuagaau

SEQ ID NO: 3459765 - RNA, 18 nt, Human
uggaagcagguuaaaugu

SEQ ID NO: 3459766 - RNA, 20 nt, Human
uggaagcagguuaaauguuu

SEQ ID NO: 3459767 - RNA, 14 nt, Human
uggaagcagugccc

SEQ ID NO: 3459768 - RNA, 16 nt, Human
uggaagccccugggcc

SEQ ID NO: 3459769 - RNA, 16 nt, Human
uggaagcccuggagac

SEQ ID NO: 3459770 - RNA, 17 nt, Human
uggaagccggcggccca

SEQ ID NO: 3459771 - RNA, 17 nt, Human
uggaagcuaauuugcau

SEQ ID NO: 3459772 - RNA, 18 nt, Human
uggaagcuaauuugcauu

SEQ ID NO: 3459773 - RNA, 23 nt, Human
uggaagcuagacacaugaaggua

SEQ ID NO: 3459774 - RNA, 12 nt, Human
uggaagcuagcu

SEQ ID NO: 3459775 - RNA, 17 nt, Human
uggaagcugcccugccc

SEQ ID NO: 3459776 - RNA, 17 nt, Human
uggaagcuuuguccccu

SEQ ID NO: 3459777 - RNA, 19 nt, Human
uggaagcuuuguccccugc

SEQ ID NO: 3459778 - RNA, 11 nt, Human
uggaaggaaag

SEQ ID NO: 3459779 - RNA, 21 nt, Human
uggaaggagacacagauguuc

SEQ ID NO: 3459780 - RNA, 13 nt, Human
uggaaggagcaga

SEQ ID NO: 3459781 - RNA, 14 nt, Human
uggaaggaggcgca

SEQ ID NO: 3459782 - RNA, 16 nt, Human
uggaaggcagagaaau

SEQ ID NO: 3459783 - RNA, 17 nt, Human
uggaaggcagagaaauc

SEQ ID NO: 3459784 - RNA, 18 nt, Human
uggaaggcagagaaaucu

SEQ ID NO: 3459785 - RNA, 11 nt, Human
uggaaggcaug

SEQ ID NO: 3459786 - RNA, 21 nt, Human
uggaaggcccagcaccacccu

SEQ ID NO: 3459787 - RNA, 17 nt, Human
uggaagggaagaaaagg

SEQ ID NO: 3459788 - RNA, 19 nt, Human
uggaagggauggggugcca

SEQ ID NO: 3459789 - RNA, 16 nt, Human
uggaagggccaagguc

SEQ ID NO: 3459790 - RNA, 23 nt, Human
uggaaggggacacgugacagccg

SEQ ID NO: 3459791 - RNA, 18 nt, Human
uggaaggguucuggcugc

SEQ ID NO: 3459792 - RNA, 15 nt, Human
uggaaggugcuguua

SEQ ID NO: 3459793 - RNA, 21 nt, Human
uggaaggugcuguuauccaug

SEQ ID NO: 3459794 - RNA, 20 nt, Human
uggaagguuuggugugugga

SEQ ID NO: 3459795 - RNA, 21 nt, Human
uggaagguuuguauauuguca

SEQ ID NO: 3459796 - RNA, 20 nt, Human
uggaaguaaccauuugcacu

SEQ ID NO: 3459797 - RNA, 18 nt, Human
uggaaguacuauaauuua

SEQ ID NO: 3459798 - RNA, 20 nt, Human
uggaaguacuauaauuuacc

SEQ ID NO: 3459799 - RNA, 22 nt, Human
uggaaguauguauauuaaaaaa

SEQ ID NO: 3459800 - RNA, 16 nt, Human
uggaagugaggcauug

SEQ ID NO: 3459801 - RNA, 18 nt, Human
uggaagugagggucagag

SEQ ID NO: 3459802 - RNA, 19 nt, Human
uggaagugagggucagaga

SEQ ID NO: 3459803 - RNA, 21 nt, Human
uggaagugagggucagagagg

SEQ ID NO: 3459804 - RNA, 14 nt, Human
uggaagugcuaauu

SEQ ID NO: 3459805 - RNA, 22 nt, Human
ugcaguggccccuuaggccagu

SEQ ID NO: 3459806 - RNA, 21 nt, Human
ugcagugggguuucgcagccu

SEQ ID NO: 3459807 - RNA, 23 nt, Human
ugcagugggguuucgcagccuga

SEQ ID NO: 3459808 - RNA, 23 nt, Human
ugcaguggugcgaucucggcuca

SEQ ID NO: 3459809 - RNA, 14 nt, Human
ugcaguguagauuu

SEQ ID NO: 3459810 - RNA, 14 nt, Human
ugcagugugaaaag

SEQ ID NO: 3459811 - RNA, 21 nt, Human
ugcaguuacacuaaaagguga

SEQ ID NO: 3459812 - RNA, 15 nt, Human
ugcaguucagcacca

SEQ ID NO: 3459813 - RNA, 18 nt, Human
ugcaguucagcaccaccc

SEQ ID NO: 3459814 - RNA, 22 nt, Human
uggaccuaauccaagcaucccu

SEQ ID NO: 3459815 - RNA, 20 nt, Human
uggaccucuacuuuccaggc

SEQ ID NO: 3459816 - RNA, 16 nt, Human
uggaccucugacagca

SEQ ID NO: 3459817 - RNA, 18 nt, Human
uggaccucugacagcagc

SEQ ID NO: 3459818 - RNA, 22 nt, Human
uggaccucugacagcagcaucu

SEQ ID NO: 3459819 - RNA, 16 nt, Human
ugcaugugacucugaa

SEQ ID NO: 3459820 - RNA, 15 nt, Human
ugcauguggcuuuuu

SEQ ID NO: 3459821 - RNA, 22 nt, Human
ugcaugugguuugguuccucuc

SEQ ID NO: 3459822 - RNA, 14 nt, Human
ugcauguguguaua

SEQ ID NO: 3459823 - RNA, 19 nt, Human
ugcauguuacauaagauaa

SEQ ID NO: 3459824 - RNA, 14 nt, Human
ugcauguuaccauc

SEQ ID NO: 3459825 - RNA, 22 nt, Human
ugcauguuaggaaaauuucaca

SEQ ID NO: 3459826 - RNA, 13 nt, Human
ugcauguuauguu

SEQ ID NO: 3459827 - RNA, 16 nt, Human
ugcauguuauguuuaa

SEQ ID NO: 3459828 - RNA, 18 nt, Human
ugcauguugucuaagaaa

SEQ ID NO: 3459829 - RNA, 16 nt, Human
ugcauguuugaaauga

SEQ ID NO: 3459830 - RNA, 23 nt, Human
ugcauguuuguuguauacuuccu

SEQ ID NO: 3459831 - RNA, 17 nt, Human
ugcauuaaaagaaaaua

SEQ ID NO: 3459832 - RNA, 19 nt, Human
ugcauuaaaagaaaauaaa

SEQ ID NO: 3459833 - RNA, 15 nt, Human
ugcauuaaaccuguc

SEQ ID NO: 3459834 - RNA, 21 nt, Human
ugcauuaaaccugucuccacu

SEQ ID NO: 3459835 - RNA, 20 nt, Human
ugcauuaaauucacaaacuu

SEQ ID NO: 3459836 - RNA, 15 nt, Human
ugcauuacagagagg

SEQ ID NO: 3459837 - RNA, 23 nt, Human
ugcauuacagagaggagaaacac

SEQ ID NO: 3459838 - RNA, 19 nt, Human
ugcauuaccgcguuguaaa

SEQ ID NO: 3459839 - RNA, 23 nt, Human
ugcauuaccgcguuguaaaauau

SEQ ID NO: 3459840 - RNA, 23 nt, Human
ugcauuagaaauuagcuguguga

SEQ ID NO: 3459841 - RNA, 21 nt, Human
ugcauuagagcccauuucaau

SEQ ID NO: 3459842 - RNA, 23 nt, Human
ugcauuagcacagauuuuaauug

SEQ ID NO: 3459843 - RNA, 22 nt, Human
ugcauuauaucaaaucuaccac

SEQ ID NO: 3459844 - RNA, 20 nt, Human
ugcauuauauuuauuacugu

SEQ ID NO: 3459845 - RNA, 21 nt, Human
ugcauuauauuuauuacugua

SEQ ID NO: 3459846 - RNA, 12 nt, Human
ugcauuaucuag

SEQ ID NO: 3459847 - RNA, 20 nt, Human
ugcauuaucuagauacugua

SEQ ID NO: 3459848 - RNA, 22 nt, Human
ugcauuaucuagauacuguauc

SEQ ID NO: 3459849 - RNA, 23 nt, Human
ugcauuauucauuuagugaguua

SEQ ID NO: 3459850 - RNA, 15 nt, Human
ugcauuauucucuuu

SEQ ID NO: 3459851 - RNA, 18 nt, Human
ugcauucauuuuuauagc

SEQ ID NO: 3459852 - RNA, 20 nt, Human
ugcauucauuuuuauagcaa

SEQ ID NO: 3459853 - RNA, 14 nt, Human
ugcauucccagcuc

SEQ ID NO: 3459854 - RNA, 16 nt, Human
ugcauuccuuugucuu

SEQ ID NO: 3459855 - RNA, 14 nt, Human
ugcauucuauugcc

SEQ ID NO: 3459856 - RNA, 17 nt, Human
ugcauucuauugccuuc

SEQ ID NO: 3459857 - RNA, 20 nt, Human
ugcauucuauugccuucuuu

SEQ ID NO: 3459858 - RNA, 11 nt, Human
ugcauucuccc

SEQ ID NO: 3459859 - RNA, 15 nt, Human
ugcauucugccucuc

SEQ ID NO: 3459860 - RNA, 15 nt, Human
ugcauucuucucugu

SEQ ID NO: 3459861 - RNA, 13 nt, Human
ugcauugaacaca

SEQ ID NO: 3459862 - RNA, 15 nt, Human
ugcauugaacacaaa

SEQ ID NO: 3459863 - RNA, 18 nt, Human
ugcauugaacacaaacug

SEQ ID NO: 3459864 - RNA, 14 nt, Human
ugcauugaauauau

SEQ ID NO: 3459865 - RNA, 16 nt, Human
ugcauugaauauauua

SEQ ID NO: 3459866 - RNA, 14 nt, Human
ugcauugacauuau

SEQ ID NO: 3459867 - RNA, 22 nt, Human
ugcauugaccgcgacuaauuuc

SEQ ID NO: 3459868 - RNA, 20 nt, Human
ugcauugcccagucuuucau

SEQ ID NO: 3459869 - RNA, 19 nt, Human
ugcauugcugugaauuagc

SEQ ID NO: 3459870 - RNA, 18 nt, Human
ugcauuggaacuggaggc

SEQ ID NO: 3459871 - RNA, 21 nt, Human
ugcauuggaacuggaggcagg

SEQ ID NO: 3459872 - RNA, 12 nt, Human
ugcauuguaaau

SEQ ID NO: 3459873 - RNA, 19 nt, Human
ugcauugugauuggccugu

SEQ ID NO: 3459874 - RNA, 15 nt, Human
ugcauugugcuucuu

SEQ ID NO: 3459875 - RNA, 13 nt, Human
ugcauuguuucug

SEQ ID NO: 3459876 - RNA, 18 nt, Human
ugcauuguuucugugggc

SEQ ID NO: 3459877 - RNA, 19 nt, Human
ugcauuuaaaacagacacu

SEQ ID NO: 3459878 - RNA, 16 nt, Human
ugcauuuaaaagauac

SEQ ID NO: 3459879 - RNA, 22 nt, Human
ugcauuuaaauacagucuucca

SEQ ID NO: 3459880 - RNA, 24 nt, Human
ugcauuuaaauacagucuuccauu

SEQ ID NO: 3459881 - RNA, 19 nt, Human
ugcauuuagggaguauucu

SEQ ID NO: 3459882 - RNA, 20 nt, Human
ugcauuuaugagcucuucau

SEQ ID NO: 3459883 - RNA, 17 nt, Human
ugcauuucagaaagccu

SEQ ID NO: 3459884 - RNA, 20 nt, Human
ugcauuuccucgcagccucu

SEQ ID NO: 3459885 - RNA, 14 nt, Human
ugcauuucucuggg

SEQ ID NO: 3459886 - RNA, 23 nt, Human
ugcauuugaaaauuuugauguuu

SEQ ID NO: 3459887 - RNA, 21 nt, Human
ugcauuugaggucuguucuuu

SEQ ID NO: 3459888 - RNA, 16 nt, Human
ugcauuugauacauuu

SEQ ID NO: 3459889 - RNA, 14 nt, Human
ugcauuugcuuuug

SEQ ID NO: 3459890 - RNA, 21 nt, Human
ugcauuuggaauuuuugcuug

SEQ ID NO: 3459891 - RNA, 16 nt, Human
ugcauuuggguccagg

SEQ ID NO: 3459892 - RNA, 19 nt, Human
ugcauuuggguccaggagg

SEQ ID NO: 3459893 - RNA, 16 nt, Human
ugcauuuguaaaugcu

SEQ ID NO: 3459894 - RNA, 15 nt, Human
ugcauuuguauauuu

SEQ ID NO: 3459895 - RNA, 19 nt, Human
ugcauuugucuauucucca

SEQ ID NO: 3459896 - RNA, 13 nt, Human
ugcauuuguuuau

SEQ ID NO: 3459897 - RNA, 16 nt, Human
ugcauuuuaaaaauga

SEQ ID NO: 3459898 - RNA, 21 nt, Human
ugcauuuuaaaguuaaacauu

SEQ ID NO: 3459899 - RNA, 17 nt, Human
ugcauuuuaauuuuaac

SEQ ID NO: 3459900 - RNA, 19 nt, Human
ugcauuuuaauuuuaacca

SEQ ID NO: 3459901 - RNA, 16 nt, Human
ugcauuuucuggguuc

SEQ ID NO: 3459902 - RNA, 23 nt, Human
ugcauuuucuggguucugggugg

SEQ ID NO: 3459903 - RNA, 18 nt, Human
ugcauuuugcagcaguga

SEQ ID NO: 3459904 - RNA, 17 nt, Human
ugcauuuugcuauugua

SEQ ID NO: 3459905 - RNA, 20 nt, Human
ugcauuuugcuauuguaaau

SEQ ID NO: 3459906 - RNA, 18 nt, Human
ugcauuuuguuugguauu

SEQ ID NO: 3459907 - RNA, 16 nt, Human
ugcauuuuugugaaau

SEQ ID NO: 3459908 - RNA, 17 nt, Human
ugcauuuuugugaaaug

SEQ ID NO: 3459909 - RNA, 20 nt, Human
ugccaaaaaggauacauaau

SEQ ID NO: 3459910 - RNA, 16 nt, Human
ugccaaaacccagcug

SEQ ID NO: 3459911 - RNA, 18 nt, Human
ugccaaaacccagcugca

SEQ ID NO: 3459912 - RNA, 18 nt, Human
ugccaaaauaaugucuug

SEQ ID NO: 3459913 - RNA, 21 nt, Human
ugccaaaauaaugucuuguua

SEQ ID NO: 3459914 - RNA, 19 nt, Human
ugccaaaauucauuucuaa

SEQ ID NO: 3459915 - RNA, 14 nt, Human
ugccaaagggaaau

SEQ ID NO: 3459916 - RNA, 18 nt, Human
ugccaaagggaaauauca

SEQ ID NO: 3459917 - RNA, 19 nt, Human
ugccaaaguacagaauuug

SEQ ID NO: 3459918 - RNA, 17 nt, Human
ugccaaagucucccuuc

SEQ ID NO: 3459919 - RNA, 20 nt, Human
ugccaaauaaaguuaaaagu

SEQ ID NO: 3459920 - RNA, 16 nt, Human
ugccaaauaauaaaaa

SEQ ID NO: 3459921 - RNA, 17 nt, Human
ugccaaauauaaauaaa

SEQ ID NO: 3459922 - RNA, 18 nt, Human
ugccaaauauguccuggg

SEQ ID NO: 3459923 - RNA, 13 nt, Human
ugccaaauuaaaa

SEQ ID NO: 3459924 - RNA, 15 nt, Human
ugccaacaagaaugc

SEQ ID NO: 3459925 - RNA, 16 nt, Human
ugccaacaagaaugca

SEQ ID NO: 3459926 - RNA, 20 nt, Human
ugccaacaagaaugcauuga

SEQ ID NO: 3459927 - RNA, 20 nt, Human
ugccaacaauccuagugcuu

SEQ ID NO: 3459928 - RNA, 21 nt, Human
ugccaacaccacagaaauggg

SEQ ID NO: 3459929 - RNA, 12 nt, Human
ugccaacauugc

SEQ ID NO: 3459930 - RNA, 14 nt, Human
ugccaacauugccu

SEQ ID NO: 3459931 - RNA, 16 nt, Human
ugccaaccuaaaacuc

SEQ ID NO: 3459932 - RNA, 15 nt, Human
ugccaaccucgcucc

SEQ ID NO: 3459933 - RNA, 19 nt, Human
ugccaaccucgcuccaacu

SEQ ID NO: 3459934 - RNA, 21 nt, Human
ugccaaccucgcuccaacucc

SEQ ID NO: 3459935 - RNA, 16 nt, Human
ugccaaccucuggagc

SEQ ID NO: 3459936 - RNA, 22 nt, Human
ugccaaccuguaauaaauauga

SEQ ID NO: 3459937 - RNA, 13 nt, Human
ugccaacuccuca

SEQ ID NO: 3459938 - RNA, 18 nt, Human
ugccaacugaucuguuau

SEQ ID NO: 3459939 - RNA, 14 nt, Human
ugccaacuguggcu

SEQ ID NO: 3459940 - RNA, 21 nt, Human
ugccaagaaaagggcugacau

SEQ ID NO: 3459941 - RNA, 16 nt, Human
ugccaagaacugaaaa

SEQ ID NO: 3459942 - RNA, 19 nt, Human
ugccaagaacugaaaacau

SEQ ID NO: 3459943 - RNA, 14 nt, Human
ugccaagacaaauc

SEQ ID NO: 3459944 - RNA, 17 nt, Human
ugccaagacaaaucaac

SEQ ID NO: 3459945 - RNA, 19 nt, Human
ugccaagacaaaucaacag

SEQ ID NO: 3459946 - RNA, 14 nt, Human
ugccaagacaugau

SEQ ID NO: 3459947 - RNA, 14 nt, Human
ugccaagacugcug

SEQ ID NO: 3459948 - RNA, 12 nt, Human
ugccaagagagg

SEQ ID NO: 3459949 - RNA, 20 nt, Human
ugccaagcaaggaaaacuua

SEQ ID NO: 3459950 - RNA, 23 nt, Human
ugccaagcaaggaaaacuuauuu

SEQ ID NO: 3459951 - RNA, 15 nt, Human
ugccaagcuccaagc

SEQ ID NO: 3459952 - RNA, 18 nt, Human
ugccaaggcagaggccug

SEQ ID NO: 3459953 - RNA, 22 nt, Human
ugccaaggcagaggccugggcu

SEQ ID NO: 3459954 - RNA, 16 nt, Human
ugccaaggccagagug

SEQ ID NO: 3459955 - RNA, 22 nt, Human
ugccaaggccagaguggccugg

SEQ ID NO: 3459956 - RNA, 17 nt, Human
ugccaaggcugaugcag

SEQ ID NO: 3459957 - RNA, 15 nt, Human
ugccaaguccagguc

SEQ ID NO: 3459958 - RNA, 20 nt, Human
uggccauucuuuuuuucuug

SEQ ID NO: 3459959 - RNA, 20 nt, Human
uggcccaacaggggcuccau

SEQ ID NO: 3459960 - RNA, 12 nt, Human
uggcccaaggcu

SEQ ID NO: 3459961 - RNA, 23 nt, Human
uggcccaaggcuggcaggucaac

SEQ ID NO: 3459962 - RNA, 19 nt, Human
uggcccacagcaggugcug

SEQ ID NO: 3459963 - RNA, 22 nt, Human
uggcccaccccacccacuucug

SEQ ID NO: 3459964 - RNA, 13 nt, Human
uggcccacgcacu

SEQ ID NO: 3459965 - RNA, 19 nt, Human
uggcccacgcacuucggga

SEQ ID NO: 3459966 - RNA, 14 nt, Human
uggcccacugcauc

SEQ ID NO: 3459967 - RNA, 12 nt, Human
uggcccagcccu

SEQ ID NO: 3459968 - RNA, 11 nt, Human
uggcccagccg

SEQ ID NO: 3459969 - RNA, 19 nt, Human
uggcccagcggccccuccc

SEQ ID NO: 3459970 - RNA, 22 nt, Human
uggcccagcucccccgggaggg

SEQ ID NO: 3459971 - RNA, 12 nt, Human
uggcccaggagu

SEQ ID NO: 3459972 - RNA, 14 nt, Human
uggcccaggaguuu

SEQ ID NO: 3459973 - RNA, 19 nt, Human
uggcccagggcaucuggga

SEQ ID NO: 3459974 - RNA, 14 nt, Human
uggcccagggccca

SEQ ID NO: 3459975 - RNA, 16 nt, Human
uggcccagggcccaga

SEQ ID NO: 3459976 - RNA, 21 nt, Human
uggcccagggggcuuccugag

SEQ ID NO: 3459977 - RNA, 12 nt, Human
uggcccaguguc

SEQ ID NO: 3459978 - RNA, 24 nt, Human
uggcccauagaaacaugacacuga

SEQ ID NO: 3459979 - RNA, 12 nt, Human
uggcccaucccc

SEQ ID NO: 3459980 - RNA, 15 nt, Human
uggcccauccccccu

SEQ ID NO: 3459981 - RNA, 16 nt, Human
uggcccauccccccuc

SEQ ID NO: 3459982 - RNA, 19 nt, Human
uggcccauccccccucacc

SEQ ID NO: 3459983 - RNA, 18 nt, Human
uggcccauguauggccag

SEQ ID NO: 3459984 - RNA, 17 nt, Human
uggcccauucuacuugc

SEQ ID NO: 3459985 - RNA, 20 nt, Human
uggcccauucuacuugcucu

SEQ ID NO: 3459986 - RNA, 15 nt, Human
uggccccacccuggg

SEQ ID NO: 3459987 - RNA, 22 nt, Human
uggccccacccugggcccuggg

SEQ ID NO: 3459988 - RNA, 13 nt, Human
uggccccaccugg

SEQ ID NO: 3459989 - RNA, 17 nt, Human
uggccccaccuggcccu

SEQ ID NO: 3459990 - RNA, 13 nt, Human
uggccccagcaca

SEQ ID NO: 3459991 - RNA, 17 nt, Human
uggccccagcacagcuu

SEQ ID NO: 3459992 - RNA, 16 nt, Human
uggccccagcccugcu

SEQ ID NO: 3459993 - RNA, 22 nt, Human
uggccccagccuggcccagcuc

SEQ ID NO: 3459994 - RNA, 20 nt, Human
uggccccaggaccuggcugc

SEQ ID NO: 3459995 - RNA, 14 nt, Human
uggcccccgagcug

SEQ ID NO: 3459996 - RNA, 13 nt, Human
uggccccgccgcc

SEQ ID NO: 3459997 - RNA, 16 nt, Human
uggccccguuucuggu

SEQ ID NO: 3459998 - RNA, 15 nt, Human
uggccccuacuuugu

SEQ ID NO: 3459999 - RNA, 23 nt, Human
uggccccuacuuuguggcaaucu

SEQ ID NO: 3460000 - RNA, 13 nt, Human
uggccccucaccu

SEQ ID NO: 3460001 - RNA, 21 nt, Human
uggccccucagggucccuggu

SEQ ID NO: 3460002 - RNA, 10 nt, Human
uggccccucu

SEQ ID NO: 3460003 - RNA, 15 nt, Human
uggccccucucccuu

SEQ ID NO: 3460004 - RNA, 16 nt, Human
uggccccugcccggcu

SEQ ID NO: 3460005 - RNA, 16 nt, Human
uggccccuucacuucu

SEQ ID NO: 3460006 - RNA, 15 nt, Human
uggcccgacagccug

SEQ ID NO: 3460007 - RNA, 18 nt, Human
uggcccgacagccuggca

SEQ ID NO: 3460008 - RNA, 14 nt, Human
uggcccggaugcug

SEQ ID NO: 3460009 - RNA, 15 nt, Human
uggcccgugacagac

SEQ ID NO: 3460010 - RNA, 13 nt, Human
uggcccuagacuc

SEQ ID NO: 3460011 - RNA, 21 nt, Human
uggcccucaaggccucccaca

SEQ ID NO: 3460012 - RNA, 22 nt, Human
uggcccucaaggccucccacag

SEQ ID NO: 3460013 - RNA, 18 nt, Human
uggcccucaccccugccc

SEQ ID NO: 3460014 - RNA, 20 nt, Human
uggcccucaccccugcccug

SEQ ID NO: 3460015 - RNA, 18 nt, Human
uggcccucuccccugccc

SEQ ID NO: 3460016 - RNA, 21 nt, Human
uggcccucuccccugcccccu

SEQ ID NO: 3460017 - RNA, 12 nt, Human
uggcccucuggu

SEQ ID NO: 3460018 - RNA, 15 nt, Human
uggcccucuguguug

SEQ ID NO: 3460019 - RNA, 18 nt, Human
uggcccugcccucuccuu

SEQ ID NO: 3460020 - RNA, 14 nt, Human
uggcccugcuuccu

SEQ ID NO: 3460021 - RNA, 17 nt, Human
uggcccugcuuccugcu

SEQ ID NO: 3460022 - RNA, 13 nt, Human
uggcccuggccug

SEQ ID NO: 3460023 - RNA, 22 nt, Human
ugcccaguguuguuuguaaaua

SEQ ID NO: 3460024 - RNA, 16 nt, Human
ugcccaguuucugccu

SEQ ID NO: 3460025 - RNA, 19 nt, Human
ugcccaguuucugccucug

SEQ ID NO: 3460026 - RNA, 23 nt, Human
ugcccaucacaggguugggccca

SEQ ID NO: 3460027 - RNA, 18 nt, Human
ugcccaucauguggcccc

SEQ ID NO: 3460028 - RNA, 22 nt, Human
ugcccaucauguggccccaccc

SEQ ID NO: 3460029 - RNA, 15 nt, Human
ugcccaugccaccgc

SEQ ID NO: 3460030 - RNA, 24 nt, Human
ugcccauggacaggcuggcuccag

SEQ ID NO: 3460031 - RNA, 16 nt, Human
ugcccaugggcacugc

SEQ ID NO: 3460032 - RNA, 21 nt, Human
ugcccaugucgcgcucagcau

SEQ ID NO: 3460033 - RNA, 19 nt, Human
ugcccauucaccaaaauua

SEQ ID NO: 3460034 - RNA, 19 nt, Human
ugcccauuguuuuucugau

SEQ ID NO: 3460035 - RNA, 14 nt, Human
ugccccaaacaaau

SEQ ID NO: 3460036 - RNA, 20 nt, Human
ugccccaaauaacuucaguc

SEQ ID NO: 3460037 - RNA, 15 nt, Human
ugccccaacccccag

SEQ ID NO: 3460038 - RNA, 20 nt, Human
ugccccaacccccagcaccc

SEQ ID NO: 3460039 - RNA, 16 nt, Human
ugccccaacccuucuu

SEQ ID NO: 3460040 - RNA, 16 nt, Human
ugccccaacuccuucc

SEQ ID NO: 3460041 - RNA, 18 nt, Human
ugccccaacuccuuccag

SEQ ID NO: 3460042 - RNA, 22 nt, Human
ugccccaacuccuuccagcuag

SEQ ID NO: 3460043 - RNA, 22 nt, Human
ugccccaaguuuugugaaauuu

SEQ ID NO: 3460044 - RNA, 14 nt, Human
ugccccaccugcca

SEQ ID NO: 3460045 - RNA, 21 nt, Human
ugccccaccuuuauuaaaauc

SEQ ID NO: 3460046 - RNA, 13 nt, Human
ugccccagaggcc

SEQ ID NO: 3460047 - RNA, 13 nt, Human
ugccccagcccaa

SEQ ID NO: 3460048 - RNA, 14 nt, Human
ugccccagcccaga

SEQ ID NO: 3460049 - RNA, 14 nt, Human
ugccccaggaccag

SEQ ID NO: 3460050 - RNA, 21 nt, Human
ugccccaucagugcucccuca

SEQ ID NO: 3460051 - RNA, 20 nt, Human
ugccccauccuccagcaggg

SEQ ID NO: 3460052 - RNA, 21 nt, Human
ugccccaucuccccucagcuc

SEQ ID NO: 3460053 - RNA, 23 nt, Human
ugccccaugccuguccagccugg

SEQ ID NO: 3460054 - RNA, 12 nt, Human
ugccccauucuu

SEQ ID NO: 3460055 - RNA, 21 nt, Human
ugcccccaaccauuuccucag

SEQ ID NO: 3460056 - RNA, 19 nt, Human
ugcccccacaccuggcccu

SEQ ID NO: 3460057 - RNA, 12 nt, Human
ugcccccacccc

SEQ ID NO: 3460058 - RNA, 22 nt, Human
ugcccccaccccauucccgcag

SEQ ID NO: 3460059 - RNA, 23 nt, Human
ugcccccaccccggggacccugu

SEQ ID NO: 3460060 - RNA, 17 nt, Human
ugcccccacugaccaga

SEQ ID NO: 3460061 - RNA, 14 nt, Human
ugcccccagagcca

SEQ ID NO: 3460062 - RNA, 16 nt, Human
ugcccccagcuggccc

SEQ ID NO: 3460063 - RNA, 15 nt, Human
ugcccccaggacugg

SEQ ID NO: 3460064 - RNA, 16 nt, Human
ugccccccaccccagc

SEQ ID NO: 3460065 - RNA, 18 nt, Human
ugccccccaccccagccu

SEQ ID NO: 3460066 - RNA, 13 nt, Human
ugccccccauccu

SEQ ID NO: 3460067 - RNA, 23 nt, Human
ugccccccaugaggaaggaacag

SEQ ID NO: 3460068 - RNA, 23 nt, Human
ugccccccucaaaccuccucuuc

SEQ ID NO: 3460069 - RNA, 18 nt, Human
ugcccccgcauccccugc

SEQ ID NO: 3460070 - RNA, 21 nt, Human
ugcccccgcauccccugccuc

SEQ ID NO: 3460071 - RNA, 22 nt, Human
ugcccccgcauccccugccucc

SEQ ID NO: 3460072 - RNA, 15 nt, Human
ugcccccggcccccu

SEQ ID NO: 3460073 - RNA, 20 nt, Human
ugcccccuccucucccaucc

SEQ ID NO: 3460074 - RNA, 15 nt, Human
ugcccccucgugcca

SEQ ID NO: 3460075 - RNA, 16 nt, Human
ugcccccucgugccag

SEQ ID NO: 3460076 - RNA, 18 nt, Human
ugcccccugaaacuuauu

SEQ ID NO: 3460077 - RNA, 16 nt, Human
ugcccccugcaggaag

SEQ ID NO: 3460078 - RNA, 17 nt, Human
ugcccccugcaggaagg

SEQ ID NO: 3460079 - RNA, 16 nt, Human
ugcccccugcuggcuc

SEQ ID NO: 3460080 - RNA, 22 nt, Human
ugcccccugcuggcucuucugc

SEQ ID NO: 3460081 - RNA, 13 nt, Human
ugcccccuggugg

SEQ ID NO: 3460082 - RNA, 19 nt, Human
ugcccccuguggaugcugc

SEQ ID NO: 3460083 - RNA, 15 nt, Human
ugcccccuucuccca

SEQ ID NO: 3460084 - RNA, 17 nt, Human
ugcccccuucucccaca

SEQ ID NO: 3460085 - RNA, 20 nt, Human
ugcccccuucucccacacug

SEQ ID NO: 3460086 - RNA, 17 nt, Human
ugccccgcuuugcggac

SEQ ID NO: 3460087 - RNA, 13 nt, Human
ugccccggccacc

SEQ ID NO: 3460088 - RNA, 15 nt, Human
ugccccggccaccuc

SEQ ID NO: 3460089 - RNA, 16 nt, Human
ugccccggccaccucu

SEQ ID NO: 3460090 - RNA, 23 nt, Human
ugccccggccaccucugcggacc

SEQ ID NO: 3460091 - RNA, 19 nt, Human
ugccccggggaggggcgcu

SEQ ID NO: 3460092 - RNA, 18 nt, Human
ugccccgucaccaucuca

SEQ ID NO: 3460093 - RNA, 21 nt, Human
ugccccgucaccaucucaggc

SEQ ID NO: 3460094 - RNA, 17 nt, Human
ugccccuaaucucugua

SEQ ID NO: 3460095 - RNA, 18 nt, Human
ugccccuaaucucuguag

SEQ ID NO: 3460096 - RNA, 19 nt, Human
ugccccucaacucuccucc

SEQ ID NO: 3460097 - RNA, 22 nt, Human
ugccccucaacucuccuccaga

SEQ ID NO: 3460098 - RNA, 23 nt, Human
ugccccucccccaacccccaccc

SEQ ID NO: 3460099 - RNA, 14 nt, Human
ugccccucccccag

SEQ ID NO: 3460100 - RNA, 16 nt, Human
ugccccucccuucaac

SEQ ID NO: 3460101 - RNA, 19 nt, Human
ugccccuccucucugcccu

SEQ ID NO: 3460102 - RNA, 17 nt, Human
gugccuuuccuguucag

SEQ ID NO: 3460103 - RNA, 18 nt, Human
gugccuuuccuguucagc

SEQ ID NO: 3460104 - RNA, 17 nt, Human
gugccuuuugcaccccu

SEQ ID NO: 3460105 - RNA, 18 nt, Human
gugccuuuugcagaagag

SEQ ID NO: 3460106 - RNA, 18 nt, Human
gugccuuuuuucacggaa

SEQ ID NO: 3460107 - RNA, 23 nt, Human
gugcgagugugugcaugugugug

SEQ ID NO: 3460108 - RNA, 15 nt, Human
gugcgauucuggaua

SEQ ID NO: 3460109 - RNA, 12 nt, Human
gugcgcccaggg

SEQ ID NO: 3460110 - RNA, 15 nt, Human
gugcgcccagggcug

SEQ ID NO: 3460111 - RNA, 16 nt, Human
gugcgcccagggcugg

SEQ ID NO: 3460112 - RNA, 17 nt, Human
gugcgcuaaacuuuucu

SEQ ID NO: 3460113 - RNA, 22 nt, Human
gugcgcugacaaccaccgcucc

SEQ ID NO: 3460114 - RNA, 19 nt, Human
gugcgcugggcacuucccu

SEQ ID NO: 3460115 - RNA, 21 nt, Human
gugcgcugggcacuucccugc

SEQ ID NO: 3460116 - RNA, 16 nt, Human
gugcggcagggaagag

SEQ ID NO: 3460117 - RNA, 18 nt, Human
gugcggcggucccagcuc

SEQ ID NO: 3460118 - RNA, 22 nt, Human
gugcggcggucccagcucccug

SEQ ID NO: 3460119 - RNA, 14 nt, Human
gugcggcugugcag

SEQ ID NO: 3460120 - RNA, 13 nt, Human
gugcgggguacac

SEQ ID NO: 3460121 - RNA, 14 nt, Human
gugcgugaaacaca

SEQ ID NO: 3460122 - RNA, 15 nt, Human
gugcgugaaacacac

SEQ ID NO: 3460123 - RNA, 15 nt, Human
gugcguguguagagu

SEQ ID NO: 3460124 - RNA, 17 nt, Human
gugcguguguagaguua

SEQ ID NO: 3460125 - RNA, 14 nt, Human
gugcuaaaaauggg

SEQ ID NO: 3460126 - RNA, 17 nt, Human
gugcuaaacguguaugu

SEQ ID NO: 3460127 - RNA, 13 nt, Human
gugcuaaauuuuc

SEQ ID NO: 3460128 - RNA, 23 nt, Human
gugcuaaccacgucugucuucac

SEQ ID NO: 3460129 - RNA, 15 nt, Human
gugcuaagguucuaa

SEQ ID NO: 3460130 - RNA, 17 nt, Human
gugcuaagguucuaagg

SEQ ID NO: 3460131 - RNA, 20 nt, Human
gugcuaagugugaacuggac

SEQ ID NO: 3460132 - RNA, 21 nt, Human
gugcuaauaacagugcauauu

SEQ ID NO: 3460133 - RNA, 16 nt, Human
gugcuaauuaauaaag

SEQ ID NO: 3460134 - RNA, 13 nt, Human
gugcuaauuuuga

SEQ ID NO: 3460135 - RNA, 11 nt, Human
gugcuacagaa

SEQ ID NO: 3460136 - RNA, 16 nt, Human
gugcuaccuggguccu

SEQ ID NO: 3460137 - RNA, 20 nt, Human
gugcuacguacaugugaggc

SEQ ID NO: 3460138 - RNA, 11 nt, Human
gugcuacuggg

SEQ ID NO: 3460139 - RNA, 13 nt, Human
gugcuacugggga

SEQ ID NO: 3460140 - RNA, 15 nt, Human
gugcuacugucuuug

SEQ ID NO: 3460141 - RNA, 19 nt, Human
gugcuagaauacuuuuuaa

SEQ ID NO: 3460142 - RNA, 21 nt, Human
gugcuagaggauuaguaagau

SEQ ID NO: 3460143 - RNA, 16 nt, Human
gugcuaggaacacucc

SEQ ID NO: 3460144 - RNA, 18 nt, Human
gugcuaggaacacuccuu

SEQ ID NO: 3460145 - RNA, 14 nt, Human
gugcuaggaagagg

SEQ ID NO: 3460146 - RNA, 14 nt, Human
gugcuagugagcug

SEQ ID NO: 3460147 - RNA, 22 nt, Human
gugcuauaaucuguuuuuacgu

SEQ ID NO: 3460148 - RNA, 13 nt, Human
gugcuauaguauu

SEQ ID NO: 3460149 - RNA, 14 nt, Human
gugcuauaguauuu

SEQ ID NO: 3460150 - RNA, 13 nt, Human
gugcuauauauau

SEQ ID NO: 3460151 - RNA, 18 nt, Human
gugcuaucucccccagcc

SEQ ID NO: 3460152 - RNA, 19 nt, Human
gugcuaucucccccagccc

SEQ ID NO: 3460153 - RNA, 21 nt, Human
gugcuaucucccccagcccca

SEQ ID NO: 3460154 - RNA, 13 nt, Human
gugcuaugaauuu

SEQ ID NO: 3460155 - RNA, 14 nt, Human
gugcuauggugcuc

SEQ ID NO: 3460156 - RNA, 13 nt, Human
gugcuauuaauau

SEQ ID NO: 3460157 - RNA, 14 nt, Human
gugcuauuaauauu

SEQ ID NO: 3460158 - RNA, 16 nt, Human
gugcucaaaaugcaaa

SEQ ID NO: 3460159 - RNA, 22 nt, Human
gugcucacguuaccuugacaca

SEQ ID NO: 3460160 - RNA, 23 nt, Human
gugcucacguuaccuugacacau

SEQ ID NO: 3460161 - RNA, 19 nt, Human
gugcucagaauaaggcagg

SEQ ID NO: 3460162 - RNA, 20 nt, Human
gugcucagagaccugaagug

SEQ ID NO: 3460163 - RNA, 13 nt, Human
gugcucagggcug

SEQ ID NO: 3460164 - RNA, 15 nt, Human
gugcucaucagaaac

SEQ ID NO: 3460165 - RNA, 16 nt, Human
gugcucauuucaggau

SEQ ID NO: 3460166 - RNA, 16 nt, Human
gugcuccagccuggcu

SEQ ID NO: 3460167 - RNA, 18 nt, Human
gugcucccuaccaccucc

SEQ ID NO: 3460168 - RNA, 21 nt, Human
gugcucgagacacagugaagc

SEQ ID NO: 3460169 - RNA, 14 nt, Human
gugcucgccccagc

SEQ ID NO: 3460170 - RNA, 16 nt, Human
gugcucgccccagcag

SEQ ID NO: 3460171 - RNA, 18 nt, Human
gugcucgcuguugcugaa

SEQ ID NO: 3460172 - RNA, 19 nt, Human
gugcucgcuguugcugaau

SEQ ID NO: 3460173 - RNA, 21 nt, Human
gugcucggagaagagcgcagu

SEQ ID NO: 3460174 - RNA, 13 nt, Human
gugcucuccauuc

SEQ ID NO: 3460175 - RNA, 22 nt, Human
gugcucuccauucugcuccuuc

SEQ ID NO: 3460176 - RNA, 13 nt, Human
gugcucucugcca

SEQ ID NO: 3460177 - RNA, 13 nt, Human
gugcucuggacag

SEQ ID NO: 3460178 - RNA, 16 nt, Human
gugcucuuuucuccuc

SEQ ID NO: 3460179 - RNA, 20 nt, Human
gugcucuuuucuccucacug

SEQ ID NO: 3460180 - RNA, 15 nt, Human
gugcugaagcuuauu

SEQ ID NO: 3460181 - RNA, 20 nt, Human
gugcugaaugguuuucaaaa

SEQ ID NO: 3460182 - RNA, 19 nt, Human
gugcugaauguugggacug

SEQ ID NO: 3460183 - RNA, 15 nt, Human
gugcugacggccagg

SEQ ID NO: 3460184 - RNA, 21 nt, Human
gugcugacggccagggagaag

SEQ ID NO: 3460185 - RNA, 22 nt, Human
gugcugacgggacccacaugcu

SEQ ID NO: 3460186 - RNA, 13 nt, Human
gugcugagaagcu

SEQ ID NO: 3460187 - RNA, 14 nt, Human
gugcugagaagcuu

SEQ ID NO: 3460188 - RNA, 16 nt, Human
gugcugagucugaagg

SEQ ID NO: 3460189 - RNA, 17 nt, Human
uggcccuggcucugcug

SEQ ID NO: 3460190 - RNA, 23 nt, Human
uggcccugggagaaucgcuccug

SEQ ID NO: 3460191 - RNA, 12 nt, Human
uggcccuggggc

SEQ ID NO: 3460192 - RNA, 15 nt, Human
uggcccuggggccug

SEQ ID NO: 3460193 - RNA, 21 nt, Human
uggcccugggucccaggaccc

SEQ ID NO: 3460194 - RNA, 17 nt, Human
uggcccugucccuccca

SEQ ID NO: 3460195 - RNA, 21 nt, Human
uggcccuuaugacugccaaga

SEQ ID NO: 3460196 - RNA, 23 nt, Human
uggcccuugcaguucagcaccac

SEQ ID NO: 3460197 - RNA, 19 nt, Human
uggcccuugcuuaccucuc

SEQ ID NO: 3460198 - RNA, 13 nt, Human
uggcccuuuuaua

SEQ ID NO: 3460199 - RNA, 19 nt, Human
uggccgaggguccuggcuc

SEQ ID NO: 3460200 - RNA, 21 nt, Human
uggccgcaccuaaagcagcca

SEQ ID NO: 3460201 - RNA, 23 nt, Human
uggccgcaccuaaagcagccagc

SEQ ID NO: 3460202 - RNA, 21 nt, Human
uggccgcccccugccccccag

SEQ ID NO: 3460203 - RNA, 18 nt, Human
uggccgccucacccccuc

SEQ ID NO: 3460204 - RNA, 15 nt, Human
uggccgccugggucc

SEQ ID NO: 3460205 - RNA, 16 nt, Human
uggccgcgcuccgggc

SEQ ID NO: 3460206 - RNA, 17 nt, Human
uggccgcggagccugca

SEQ ID NO: 3460207 - RNA, 20 nt, Human
uggccggccagccagccacu

SEQ ID NO: 3460208 - RNA, 21 nt, Human
uggccggccagccagccacuc

SEQ ID NO: 3460209 - RNA, 13 nt, Human
uggccggcugugc

SEQ ID NO: 3460210 - RNA, 15 nt, Human
uggccggcugugcuc

SEQ ID NO: 3460211 - RNA, 17 nt, Human
uggccggcugugcucag

SEQ ID NO: 3460212 - RNA, 20 nt, Human
uggccggcugugcucagaga

SEQ ID NO: 3460213 - RNA, 15 nt, Human
uggccgggaccccga

SEQ ID NO: 3460214 - RNA, 15 nt, Human
uggccgggcacagcu

SEQ ID NO: 3460215 - RNA, 19 nt, Human
uggccgggcacagcugugg

SEQ ID NO: 3460216 - RNA, 18 nt, Human
uggccggucugcaaguca

SEQ ID NO: 3460217 - RNA, 20 nt, Human
uggccggucugcaagucaga

SEQ ID NO: 3460218 - RNA, 15 nt, Human
uggccuaaaaucuug

SEQ ID NO: 3460219 - RNA, 17 nt, Human
uggccuaaaaucuugga

SEQ ID NO: 3460220 - RNA, 16 nt, Human
uggccuaaccugccga

SEQ ID NO: 3460221 - RNA, 19 nt, Human
uggccuacaaaucaguaau

SEQ ID NO: 3460222 - RNA, 20 nt, Human
uggccuagcauacguacaca

SEQ ID NO: 3460223 - RNA, 14 nt, Human
uggccuagcccacc

SEQ ID NO: 3460224 - RNA, 16 nt, Human
uggccuauccgcugcc

SEQ ID NO: 3460225 - RNA, 17 nt, Human
uggccuaucuccuaggg

SEQ ID NO: 3460226 - RNA, 17 nt, Human
uggccuaugcacauaug

SEQ ID NO: 3460227 - RNA, 16 nt, Human
uggccuauguggucua

SEQ ID NO: 3460228 - RNA, 14 nt, Human
uggccucaacccuc

SEQ ID NO: 3460229 - RNA, 16 nt, Human
uggccucaacccuccc

SEQ ID NO: 3460230 - RNA, 13 nt, Human
uggccucaagauc

SEQ ID NO: 3460231 - RNA, 19 nt, Human
uggccucagacugcaccca

SEQ ID NO: 3460232 - RNA, 19 nt, Human
uggccucagcucccacaag

SEQ ID NO: 3460233 - RNA, 18 nt, Human
uggccucagcugaaugcc

SEQ ID NO: 3460234 - RNA, 13 nt, Human
uggccucaugugg

SEQ ID NO: 3460235 - RNA, 15 nt, Human
uggccucauguggcu

SEQ ID NO: 3460236 - RNA, 21 nt, Human
uggccuccaggcccgucuguc

SEQ ID NO: 3460237 - RNA, 19 nt, Human
uggccuccggcgucagccu

SEQ ID NO: 3460238 - RNA, 18 nt, Human
uggccuccucccuuagcu

SEQ ID NO: 3460239 - RNA, 19 nt, Human
uggccuccucccuuagcuc

SEQ ID NO: 3460240 - RNA, 21 nt, Human
uggccuccugccucuacuggg

SEQ ID NO: 3460241 - RNA, 15 nt, Human
uggccuccuugcuug

SEQ ID NO: 3460242 - RNA, 13 nt, Human
uggccucucuagc

SEQ ID NO: 3460243 - RNA, 14 nt, Human
uggccucucuaucc

SEQ ID NO: 3460244 - RNA, 22 nt, Human
uggccucucucuaggguacaug

SEQ ID NO: 3460245 - RNA, 14 nt, Human
uggccucugcacuc

SEQ ID NO: 3460246 - RNA, 12 nt, Human
uggccucugcuu

SEQ ID NO: 3460247 - RNA, 23 nt, Human
uggccucuguggagccccagcau

SEQ ID NO: 3460248 - RNA, 20 nt, Human
guggcucugggauccugggg

SEQ ID NO: 3460249 - RNA, 14 nt, Human
guggcugacccagu

SEQ ID NO: 3460250 - RNA, 17 nt, Human
guggcugacccaguccc

SEQ ID NO: 3460251 - RNA, 16 nt, Human
guggcugaccccccuc

SEQ ID NO: 3460252 - RNA, 22 nt, Human
guggcugaugguguggccugug

SEQ ID NO: 3460253 - RNA, 13 nt, Human
guggcugcagccu

SEQ ID NO: 3460254 - RNA, 18 nt, Human
guggcugcggcacccuug

SEQ ID NO: 3460255 - RNA, 12 nt, Human
guggcugcuuca

SEQ ID NO: 3460256 - RNA, 14 nt, Human
guggcugcuucaag

SEQ ID NO: 3460257 - RNA, 15 nt, Human
guggcugcuucaagg

SEQ ID NO: 3460258 - RNA, 19 nt, Human
guggcugcuucaaggaucc

SEQ ID NO: 3460259 - RNA, 11 nt, Human
guggcuggggg

SEQ ID NO: 3460260 - RNA, 17 nt, Human
guggcugguccagggcu

SEQ ID NO: 3460261 - RNA, 16 nt, Human
guggcuggugagccgg

SEQ ID NO: 3460262 - RNA, 14 nt, Human
guggcugucagcag

SEQ ID NO: 3460263 - RNA, 23 nt, Human
guggcuucacuccugcuguaaau

SEQ ID NO: 3460264 - RNA, 19 nt, Human
guggcuucagcuccagccc

SEQ ID NO: 3460265 - RNA, 18 nt, Human
guggcuucccaugucuuu

SEQ ID NO: 3460266 - RNA, 19 nt, Human
guggcuucccgcucagccc

SEQ ID NO: 3460267 - RNA, 20 nt, Human
guggcuucccgcucagcccu

SEQ ID NO: 3460268 - RNA, 21 nt, Human
guggcuucccgcucagcccuc

SEQ ID NO: 3460269 - RNA, 22 nt, Human
guggcuugagaaauauggacac

SEQ ID NO: 3460270 - RNA, 21 nt, Human
guggcuuggacucuuucccau

SEQ ID NO: 3460271 - RNA, 18 nt, Human
guggcuuucagccucugg

SEQ ID NO: 3460272 - RNA, 23 nt, Human
guggcuuuccuuguggcagagga

SEQ ID NO: 3460273 - RNA, 23 nt, Human
gugggaacgacugggcacugcca

SEQ ID NO: 3460274 - RNA, 23 nt, Human
gugggaaggacuuggcgcgcccu

SEQ ID NO: 3460275 - RNA, 14 nt, Human
gugggaaggccagc

SEQ ID NO: 3460276 - RNA, 15 nt, Human
gugggacacccugug

SEQ ID NO: 3460277 - RNA, 15 nt, Human
gugggacagagucug

SEQ ID NO: 3460278 - RNA, 13 nt, Human
gugggacagccca

SEQ ID NO: 3460279 - RNA, 22 nt, Human
gugggacccauagaucuucuga

SEQ ID NO: 3460280 - RNA, 15 nt, Human
gugggaccccaggcc

SEQ ID NO: 3460281 - RNA, 15 nt, Human
gugggagaaggcagu

SEQ ID NO: 3460282 - RNA, 23 nt, Human
gugggagaccggccugccaggag

SEQ ID NO: 3460283 - RNA, 19 nt, Human
gugggagcaaacugcaugc

SEQ ID NO: 3460284 - RNA, 19 nt, Human
gugggagcagcgguuuggg

SEQ ID NO: 3460285 - RNA, 22 nt, Human
gugggagcaggagauugagaag

SEQ ID NO: 3460286 - RNA, 12 nt, Human
gugggagccucg

SEQ ID NO: 3460287 - RNA, 13 nt, Human
gugggagccucgc

SEQ ID NO: 3460288 - RNA, 14 nt, Human
gugggagccucgca

SEQ ID NO: 3460289 - RNA, 15 nt, Human
gugggagcugccugu

SEQ ID NO: 3460290 - RNA, 23 nt, Human
gugggaggcuccuguuagcuccu

SEQ ID NO: 3460291 - RNA, 13 nt, Human
gugggagggagca

SEQ ID NO: 3460292 - RNA, 12 nt, Human
gugggaggggca

SEQ ID NO: 3460293 - RNA, 14 nt, Human
gugggaggggcagg

SEQ ID NO: 3460294 - RNA, 16 nt, Human
gugggaggggcaggcu

SEQ ID NO: 3460295 - RNA, 14 nt, Human
gugggagugugugc

SEQ ID NO: 3460296 - RNA, 14 nt, Human
gugggcaaaagagu

SEQ ID NO: 3460297 - RNA, 16 nt, Human
gugggcaaaagagugu

SEQ ID NO: 3460298 - RNA, 17 nt, Human
gugggcaaacaggcagu

SEQ ID NO: 3460299 - RNA, 17 nt, Human
gugggcaccaagagcca

SEQ ID NO: 3460300 - RNA, 20 nt, Human
gugggcacgcugugggcagg

SEQ ID NO: 3460301 - RNA, 21 nt, Human
gugggcacgcugugggcaggu

SEQ ID NO: 3460302 - RNA, 21 nt, Human
gugggcagagcccccaggaag

SEQ ID NO: 3460303 - RNA, 23 nt, Human
gugggcagcuuagggcccuggag

SEQ ID NO: 3460304 - RNA, 17 nt, Human
gugggcaggugguggca

SEQ ID NO: 3460305 - RNA, 12 nt, Human
gugggcccaccc

SEQ ID NO: 3460306 - RNA, 11 nt, Human
gugggcccagg

SEQ ID NO: 3460307 - RNA, 20 nt, Human
gugggcccaggaccagcugg

SEQ ID NO: 3460308 - RNA, 21 nt, Human
gugggcccaggaccagcuggg

SEQ ID NO: 3460309 - RNA, 18 nt, Human
gugggcccuccgacagcc

SEQ ID NO: 3460310 - RNA, 20 nt, Human
gugggccuccucuguccagg

SEQ ID NO: 3460311 - RNA, 14 nt, Human
gugggccucggccc

SEQ ID NO: 3460312 - RNA, 11 nt, Human
gugggccucug

SEQ ID NO: 3460313 - RNA, 22 nt, Human
gugggccucugguuuggggcga

SEQ ID NO: 3460314 - RNA, 23 nt, Human
gugggccucugguuuggggcgag

SEQ ID NO: 3460315 - RNA, 18 nt, Human
gugggcgggcagcacagc

SEQ ID NO: 3460316 - RNA, 17 nt, Human
gugggcguggucacugc

SEQ ID NO: 3460317 - RNA, 16 nt, Human
gugggcuacaugcugg

SEQ ID NO: 3460318 - RNA, 15 nt, Human
gugggcuccccucuu

SEQ ID NO: 3460319 - RNA, 20 nt, Human
gugggcuccccucuuccucu

SEQ ID NO: 3460320 - RNA, 13 nt, Human
gugggcucccuga

SEQ ID NO: 3460321 - RNA, 14 nt, Human
gugggcugagcccu

SEQ ID NO: 3460322 - RNA, 15 nt, Human
gugggcugggcccuc

SEQ ID NO: 3460323 - RNA, 13 nt, Human
gugggcugugagu

SEQ ID NO: 3460324 - RNA, 18 nt, Human
guggggagacaccucaga

SEQ ID NO: 3460325 - RNA, 13 nt, Human
guggggaggggcg

SEQ ID NO: 3460326 - RNA, 13 nt, Human
guggggagguguc

SEQ ID NO: 3460327 - RNA, 19 nt, Human
guggggaucucaggggcug

SEQ ID NO: 3460328 - RNA, 13 nt, Human
guggggcagaggc

SEQ ID NO: 3460329 - RNA, 12 nt, Human
guggggcagcac

SEQ ID NO: 3460330 - RNA, 17 nt, Human
guggggcagcuccucug

SEQ ID NO: 3460331 - RNA, 15 nt, Human
guggggcagggagcu

SEQ ID NO: 3460332 - RNA, 23 nt, Human
guggggcagugcuuggcccagga

SEQ ID NO: 3460333 - RNA, 21 nt, Human
guggggccaugccuccucagg

SEQ ID NO: 3460334 - RNA, 18 nt, Human
guggggcugcuccuccag

SEQ ID NO: 3460335 - RNA, 11 nt, Human
guggggcuggg

SEQ ID NO: 3460336 - RNA, 12 nt, Human
guggggcugggg

SEQ ID NO: 3460337 - RNA, 12 nt, Human
guggggcuuggg

SEQ ID NO: 3460338 - RNA, 19 nt, Human
gugggggaagagcacagcc

SEQ ID NO: 3460339 - RNA, 20 nt, Human
gugggggagagcaggcuggc

SEQ ID NO: 3460340 - RNA, 22 nt, Human
gugggggcagagggcagaggcu

SEQ ID NO: 3460341 - RNA, 19 nt, Human
gugggggccccgucucagg

SEQ ID NO: 3460342 - RNA, 20 nt, Human
gugggggccccgucucaggu

SEQ ID NO: 3460343 - RNA, 15 nt, Human
gugggggggcagagc

SEQ ID NO: 3460344 - RNA, 19 nt, Human
guggggggucccaaagagu

SEQ ID NO: 3460345 - RNA, 12 nt, Human
gugggggugggu

SEQ ID NO: 3460346 - RNA, 15 nt, Human
gugggggugggucag

SEQ ID NO: 3460347 - RNA, 17 nt, Human
guggggucacucuggca

SEQ ID NO: 3460348 - RNA, 20 nt, Human
guggggucacucuggcagcu

SEQ ID NO: 3460349 - RNA, 19 nt, Human
guggggucaugcccuccuc

SEQ ID NO: 3460350 - RNA, 14 nt, Human
guggggucucccuc

SEQ ID NO: 3460351 - RNA, 21 nt, Human
guggggucucccucuccugcc

SEQ ID NO: 3460352 - RNA, 18 nt, Human
guggggugacgggacuca

SEQ ID NO: 3460353 - RNA, 18 nt, Human
gugggguggcugcagccu

SEQ ID NO: 3460354 - RNA, 16 nt, Human
gugggguggugucaga

SEQ ID NO: 3460355 - RNA, 13 nt, Human
guggggugugcug

SEQ ID NO: 3460356 - RNA, 19 nt, Human
guggggugugcugggagcu

SEQ ID NO: 3460357 - RNA, 14 nt, Human
gugggguuuccugg

SEQ ID NO: 3460358 - RNA, 18 nt, Human
gugggguuucgcagccug

SEQ ID NO: 3460359 - RNA, 22 nt, Human
gugggguuucgcagccugaguc

SEQ ID NO: 3460360 - RNA, 13 nt, Human
guggguaaaauua

SEQ ID NO: 3460361 - RNA, 22 nt, Human
guggguaagacuaaaucuguaa

SEQ ID NO: 3460362 - RNA, 15 nt, Human
guggguacagagagg

SEQ ID NO: 3460363 - RNA, 17 nt, Human
guggguacuauucugau

SEQ ID NO: 3460364 - RNA, 20 nt, Human
guggguagaucacgagauca

SEQ ID NO: 3460365 - RNA, 16 nt, Human
guggguauaaaagaug

SEQ ID NO: 3460366 - RNA, 18 nt, Human
guggguccaugggcagag

SEQ ID NO: 3460367 - RNA, 22 nt, Human
guggguccaugggcagagccca

SEQ ID NO: 3460368 - RNA, 13 nt, Human
gugggucugggag

SEQ ID NO: 3460369 - RNA, 13 nt, Human
gugggugaaagaa

SEQ ID NO: 3460370 - RNA, 20 nt, Human
gugggugaaagaaaucaugu

SEQ ID NO: 3460371 - RNA, 21 nt, Human
gugggugaaagaaaucauguu

SEQ ID NO: 3460372 - RNA, 13 nt, Human
gugggugccuagg

SEQ ID NO: 3460373 - RNA, 18 nt, Human
guggguggauauaaauau

SEQ ID NO: 3460374 - RNA, 12 nt, Human
guggguggugga

SEQ ID NO: 3460375 - RNA, 15 nt, Human
gugggugugagcagc

SEQ ID NO: 3460376 - RNA, 16 nt, Human
guggguuauucuggag

SEQ ID NO: 3460377 - RNA, 14 nt, Human
guggguuccacaga

SEQ ID NO: 3460378 - RNA, 18 nt, Human
guggguuuuuuaguugaa

SEQ ID NO: 3460379 - RNA, 22 nt, Human
gugguaaaugccacacaccuuu

SEQ ID NO: 3460380 - RNA, 12 nt, Human
gugguaacccug

SEQ ID NO: 3460381 - RNA, 16 nt, Human
gugguacagagaagcc

SEQ ID NO: 3460382 - RNA, 22 nt, Human
gugguacagagaagccagcuug

SEQ ID NO: 3460383 - RNA, 23 nt, Human
gugguacagagaagccagcuugu

SEQ ID NO: 3460384 - RNA, 12 nt, Human
gugguagaaaca

SEQ ID NO: 3460385 - RNA, 17 nt, Human
gugguagagugugccug

SEQ ID NO: 3460386 - RNA, 22 nt, Human
gugguaggccuuuuaacauuuu

SEQ ID NO: 3460387 - RNA, 23 nt, Human
gugguaggccuuuuaacauuuug

SEQ ID NO: 3460388 - RNA, 23 nt, Human
gugguagguacuuuuugugaaga

SEQ ID NO: 3460389 - RNA, 19 nt, Human
gugguaguaaaacacagag

SEQ ID NO: 3460390 - RNA, 12 nt, Human
gugguaugugug

SEQ ID NO: 3460391 - RNA, 15 nt, Human
gugguaugugugugu

SEQ ID NO: 3460392 - RNA, 16 nt, Human
guggucacagcggagg

SEQ ID NO: 3460393 - RNA, 16 nt, Human
guuacaguaugcuugc

SEQ ID NO: 3460394 - RNA, 17 nt, Human
guuacaguaugcuugcu

SEQ ID NO: 3460395 - RNA, 14 nt, Human
guuacaguucugug

SEQ ID NO: 3460396 - RNA, 20 nt, Human
guuacauauuauauguucua

SEQ ID NO: 3460397 - RNA, 23 nt, Human
guuacaugcauacuucaaaagua

SEQ ID NO: 3460398 - RNA, 16 nt, Human
guuacauguuugcacc

SEQ ID NO: 3460399 - RNA, 14 nt, Human
guuacauuaauguu

SEQ ID NO: 3460400 - RNA, 21 nt, Human
guuacauuuuuaagugcugca

SEQ ID NO: 3460401 - RNA, 23 nt, Human
guuaccacacaucuaugauauaa

SEQ ID NO: 3460402 - RNA, 21 nt, Human
guuaccauauuuauccauuug

SEQ ID NO: 3460403 - RNA, 18 nt, Human
guuaccaugucacugugg

SEQ ID NO: 3460404 - RNA, 16 nt, Human
guuaccauuaaaccau

SEQ ID NO: 3460405 - RNA, 23 nt, Human
guuaccauuuugggguacccacu

SEQ ID NO: 3460406 - RNA, 13 nt, Human
guuacccagagaa

SEQ ID NO: 3460407 - RNA, 16 nt, Human
guuaccuaaaguauuu

SEQ ID NO: 3460408 - RNA, 19 nt, Human
guuaccuaauuagagcaga

SEQ ID NO: 3460409 - RNA, 13 nt, Human
guuaccuacuuug

SEQ ID NO: 3460410 - RNA, 16 nt, Human
guuaccuacuuugacu

SEQ ID NO: 3460411 - RNA, 23 nt, Human
guuaccucugccucagaaaacaa

SEQ ID NO: 3460412 - RNA, 22 nt, Human
guuaccugaaaacacugugcac

SEQ ID NO: 3460413 - RNA, 15 nt, Human
guuaccuuauaguua

SEQ ID NO: 3460414 - RNA, 18 nt, Human
guuaccuuauaguuacug

SEQ ID NO: 3460415 - RNA, 22 nt, Human
guuaccuuauaguuacugugua

SEQ ID NO: 3460416 - RNA, 16 nt, Human
guuacuaacuaaacuc

SEQ ID NO: 3460417 - RNA, 14 nt, Human
guuacuaagaagaa

SEQ ID NO: 3460418 - RNA, 20 nt, Human
guuacuagguaacuucauau

SEQ ID NO: 3460419 - RNA, 13 nt, Human
guuacuauaugcc

SEQ ID NO: 3460420 - RNA, 15 nt, Human
guuacuauccuggcu

SEQ ID NO: 3460421 - RNA, 14 nt, Human
guuacuaucugcuu

SEQ ID NO: 3460422 - RNA, 12 nt, Human
guuacuauuuuc

SEQ ID NO: 3460423 - RNA, 14 nt, Human
guuacucagcccug

SEQ ID NO: 3460424 - RNA, 17 nt, Human
guuacucagcccugggc

SEQ ID NO: 3460425 - RNA, 18 nt, Human
guuacucagcccugggcc

SEQ ID NO: 3460426 - RNA, 16 nt, Human
guuacuccagugccaa

SEQ ID NO: 3460427 - RNA, 22 nt, Human
guuacuccagugccaacaaucc

SEQ ID NO: 3460428 - RNA, 14 nt, Human
guuacucuccaacc

SEQ ID NO: 3460429 - RNA, 21 nt, Human
guuacucucuuccacauguua

SEQ ID NO: 3460430 - RNA, 11 nt, Human
guuacucugaa

SEQ ID NO: 3460431 - RNA, 23 nt, Human
guuacucuucaguuaagccuuug

SEQ ID NO: 3460432 - RNA, 19 nt, Human
guuacugaucaugcauugu

SEQ ID NO: 3460433 - RNA, 21 nt, Human
guuacugccuuaauaaaaaau

SEQ ID NO: 3460434 - RNA, 19 nt, Human
guuacuggauaaauuguuu

SEQ ID NO: 3460435 - RNA, 14 nt, Human
guuacugggcccug

SEQ ID NO: 3460436 - RNA, 17 nt, Human
guuacugggcccugagu

SEQ ID NO: 3460437 - RNA, 14 nt, Human
guuacuguaaaaug

SEQ ID NO: 3460438 - RNA, 17 nt, Human
guuacuguguaaacuca

SEQ ID NO: 3460439 - RNA, 18 nt, Human
guuacuguguaaacucau

SEQ ID NO: 3460440 - RNA, 18 nt, Human
guuacuguuaaccauuua

SEQ ID NO: 3460441 - RNA, 16 nt, Human
guuacuguuauagagg

SEQ ID NO: 3460442 - RNA, 10 nt, Human
guuacuguuc

SEQ ID NO: 3460443 - RNA, 17 nt, Human
guuacuguucuugcugc

SEQ ID NO: 3460444 - RNA, 21 nt, Human
guuacuguucuugcugcuaga

SEQ ID NO: 3460445 - RNA, 23 nt, Human
guuacuguucuugcugcuagaac

SEQ ID NO: 3460446 - RNA, 16 nt, Human
guuacuguugugaccu

SEQ ID NO: 3460447 - RNA, 16 nt, Human
guuacuucacuuuaau

SEQ ID NO: 3460448 - RNA, 13 nt, Human
guuacuuccuauc

SEQ ID NO: 3460449 - RNA, 18 nt, Human
guuacuuuucauauuugc

SEQ ID NO: 3460450 - RNA, 19 nt, Human
guuagaaaugcagaauccu

SEQ ID NO: 3460451 - RNA, 21 nt, Human
guuagaacacuauuuucagaa

SEQ ID NO: 3460452 - RNA, 22 nt, Human
guuagaacacuauuuucagaau

SEQ ID NO: 3460453 - RNA, 12 nt, Human
guuagaauuccu

SEQ ID NO: 3460454 - RNA, 20 nt, Human
guuagaauuccuucagggug

SEQ ID NO: 3460455 - RNA, 14 nt, Human
guuagaccuacagg

SEQ ID NO: 3460456 - RNA, 18 nt, Human
guuagacucuuacuuuuu

SEQ ID NO: 3460457 - RNA, 21 nt, Human
guuagagagggaccauguguc

SEQ ID NO: 3460458 - RNA, 23 nt, Human
guuagagagggaccaugugucac

SEQ ID NO: 3460459 - RNA, 13 nt, Human
guuagagaugccu

SEQ ID NO: 3460460 - RNA, 10 nt, Human
guuagagcac

SEQ ID NO: 3460461 - RNA, 22 nt, Human
guuagagguuuuaaagugauua

SEQ ID NO: 3460462 - RNA, 21 nt, Human
guuagauauagagucauugua

SEQ ID NO: 3460463 - RNA, 14 nt, Human
ugguguccugacca

SEQ ID NO: 3460464 - RNA, 18 nt, Human
uggugucgcgccuucucc

SEQ ID NO: 3460465 - RNA, 17 nt, Human
uggugucucuucuuuag

SEQ ID NO: 3460466 - RNA, 16 nt, Human
uggugugaacccggga

SEQ ID NO: 3460467 - RNA, 23 nt, Human
uggugugaacuaaacuuucacac

SEQ ID NO: 3460468 - RNA, 12 nt, Human
uggugugaaggu

SEQ ID NO: 3460469 - RNA, 23 nt, Human
uggugugaccacugcagaagaca

SEQ ID NO: 3460470 - RNA, 17 nt, Human
uggugugaccugagggc

SEQ ID NO: 3460471 - RNA, 17 nt, Human
uggugugaguaucagaa

SEQ ID NO: 3460472 - RNA, 19 nt, Human
uggugugaguaucagaauu

SEQ ID NO: 3460473 - RNA, 16 nt, Human
uggugugaucgucuga

SEQ ID NO: 3460474 - RNA, 12 nt, Human
uggugugaucuu

SEQ ID NO: 3460475 - RNA, 14 nt, Human
uggugugcugaggu

SEQ ID NO: 3460476 - RNA, 15 nt, Human
ugguguggguguccu

SEQ ID NO: 3460477 - RNA, 17 nt, Human
ugguguggguguccugc

SEQ ID NO: 3460478 - RNA, 16 nt, Human
uggugugguacagaga

SEQ ID NO: 3460479 - RNA, 19 nt, Human
uggugugguacagagaagc

SEQ ID NO: 3460480 - RNA, 23 nt, Human
uggugugguacagagaagccagc

SEQ ID NO: 3460481 - RNA, 21 nt, Human
ugguguguuggacagagaagg

SEQ ID NO: 3460482 - RNA, 22 nt, Human
ugguguucuccugcugcucccu

SEQ ID NO: 3460483 - RNA, 23 nt, Human
ugguguucuccugcugcucccuc

SEQ ID NO: 3460484 - RNA, 22 nt, Human
ugguguugccaguuguccuccu

SEQ ID NO: 3460485 - RNA, 20 nt, Human
ugguguuggacaagcuucug

SEQ ID NO: 3460486 - RNA, 16 nt, Human
ugguguuguaugccuu

SEQ ID NO: 3460487 - RNA, 18 nt, Human
ugguguuucuagcacugg

SEQ ID NO: 3460488 - RNA, 18 nt, Human
ugguguuuuggauuugga

SEQ ID NO: 3460489 - RNA, 20 nt, Human
ugguuaaaaaaaagaauaaa

SEQ ID NO: 3460490 - RNA, 19 nt, Human
ugguuaaauaaggcagggu

SEQ ID NO: 3460491 - RNA, 16 nt, Human
ugguuaagaguccaag

SEQ ID NO: 3460492 - RNA, 18 nt, Human
ugguuaagucuguuuuau

SEQ ID NO: 3460493 - RNA, 21 nt, Human
ugguuaaguuggcuucuguuu

SEQ ID NO: 3460494 - RNA, 17 nt, Human
ugguuaaucuuuccuga

SEQ ID NO: 3460495 - RNA, 14 nt, Human
ugguuacacuguua

SEQ ID NO: 3460496 - RNA, 23 nt, Human
ugguuacacuguuagaacacuau

SEQ ID NO: 3460497 - RNA, 21 nt, Human
ugguuacuucuucucuuagau

SEQ ID NO: 3460498 - RNA, 12 nt, Human
ugguuaggaugg

SEQ ID NO: 3460499 - RNA, 16 nt, Human
ugguuauaacuuaaug

SEQ ID NO: 3460500 - RNA, 21 nt, Human
ugguuauacaugacacugaaa

SEQ ID NO: 3460501 - RNA, 18 nt, Human
ugguuauagugcaauaua

SEQ ID NO: 3460502 - RNA, 19 nt, Human
ugguuauagugcaauauau

SEQ ID NO: 3460503 - RNA, 20 nt, Human
ugguuauagugcaauauauu

SEQ ID NO: 3460504 - RNA, 21 nt, Human
ugguuauagugcaauauauuu

SEQ ID NO: 3460505 - RNA, 14 nt, Human
ugguuaucacacca

SEQ ID NO: 3460506 - RNA, 13 nt, Human
ugguuauuucucu

SEQ ID NO: 3460507 - RNA, 18 nt, Human
ugguuauuuuacuuuuug

SEQ ID NO: 3460508 - RNA, 17 nt, Human
ugguuauuuuuauacag

SEQ ID NO: 3460509 - RNA, 18 nt, Human
ugguuauuuuuauacagu

SEQ ID NO: 3460510 - RNA, 15 nt, Human
ugguucacacugacc

SEQ ID NO: 3460511 - RNA, 17 nt, Human
ugguucacucuuggagc

SEQ ID NO: 3460512 - RNA, 22 nt, Human
ugguucacucuuggagccugca

SEQ ID NO: 3460513 - RNA, 20 nt, Human
ugguucagaauuaaacuuuu

SEQ ID NO: 3460514 - RNA, 16 nt, Human
ugguucagcuaagcua

SEQ ID NO: 3460515 - RNA, 22 nt, Human
ugguucaggguuggccccugcc

SEQ ID NO: 3460516 - RNA, 16 nt, Human
ugguucauuaauucua

SEQ ID NO: 3460517 - RNA, 17 nt, Human
ugguuccaagcccugga

SEQ ID NO: 3460518 - RNA, 15 nt, Human
ugguuccagccugcc

SEQ ID NO: 3460519 - RNA, 12 nt, Human
ugguuccagggu

SEQ ID NO: 3460520 - RNA, 22 nt, Human
ugguuccagggucccucugugu

SEQ ID NO: 3460521 - RNA, 15 nt, Human
ugguuccaugccuga

SEQ ID NO: 3460522 - RNA, 22 nt, Human
ugguuccaugccugagggugga

SEQ ID NO: 3460523 - RNA, 16 nt, Human
ugguuccccaguagag

SEQ ID NO: 3460524 - RNA, 20 nt, Human
ugguuccccuguucacucua

SEQ ID NO: 3460525 - RNA, 16 nt, Human
ugguucccuugaugaa

SEQ ID NO: 3460526 - RNA, 20 nt, Human
ugguucccuugaugaagaag

SEQ ID NO: 3460527 - RNA, 18 nt, Human
ugguuccuccccuccucc

SEQ ID NO: 3460528 - RNA, 15 nt, Human
ugguuccucucuggu

SEQ ID NO: 3460529 - RNA, 13 nt, Human
ugguuccucugcu

SEQ ID NO: 3460530 - RNA, 23 nt, Human
ugguuccuggggugcccuccacu

SEQ ID NO: 3460531 - RNA, 17 nt, Human
ugguuccuuucucagcc

SEQ ID NO: 3460532 - RNA, 14 nt, Human
ugguucuacaaucu

SEQ ID NO: 3460533 - RNA, 16 nt, Human
ugguucuauuuaaugg

SEQ ID NO: 3460534 - RNA, 14 nt, Human
ugguucucaaugaa

SEQ ID NO: 3460535 - RNA, 11 nt, Human
ugguucucauc

SEQ ID NO: 3460536 - RNA, 13 nt, Human
ugguucucaucuu

SEQ ID NO: 3460537 - RNA, 20 nt, Human
uggacccugaggcccagagg

SEQ ID NO: 3460538 - RNA, 23 nt, Human
uggacccuguggaugauaaaaca

SEQ ID NO: 3460539 - RNA, 16 nt, Human
uggacccuuauaaaau

SEQ ID NO: 3460540 - RNA, 13 nt, Human
uggacccuuccau

SEQ ID NO: 3460541 - RNA, 18 nt, Human
uggaccggagaguggggg

SEQ ID NO: 3460542 - RNA, 21 nt, Human
uggaccuaaauggccucaugu

SEQ ID NO: 3460543 - RNA, 13 nt, Human
uggaccuaacauu

SEQ ID NO: 3460544 - RNA, 13 nt, Human
uggaccucugcuc

SEQ ID NO: 3460545 - RNA, 16 nt, Human
uggaccugccuccugc

SEQ ID NO: 3460546 - RNA, 23 nt, Human
uggaccuguauauuuguaaagcu

SEQ ID NO: 3460547 - RNA, 16 nt, Human
uggaccuuaggccuuc

SEQ ID NO: 3460548 - RNA, 12 nt, Human
uggaccuuccug

SEQ ID NO: 3460549 - RNA, 20 nt, Human
uggaccuugaacuggguacu

SEQ ID NO: 3460550 - RNA, 16 nt, Human
uggaccuugagaccac

SEQ ID NO: 3460551 - RNA, 13 nt, Human
uggaccuuuuaaa

SEQ ID NO: 3460552 - RNA, 13 nt, Human
uggacggcaggcu

SEQ ID NO: 3460553 - RNA, 16 nt, Human
uggacggggacugggg

SEQ ID NO: 3460554 - RNA, 16 nt, Human
uggacggugcuccagg

SEQ ID NO: 3460555 - RNA, 14 nt, Human
uggacgucuuucuu

SEQ ID NO: 3460556 - RNA, 23 nt, Human
uggacguguuaugacuccagaau

SEQ ID NO: 3460557 - RNA, 17 nt, Human
uggacguucggggcaug

SEQ ID NO: 3460558 - RNA, 15 nt, Human
uggacuaaaagauau

SEQ ID NO: 3460559 - RNA, 14 nt, Human
uggacuaaaugccu

SEQ ID NO: 3460560 - RNA, 21 nt, Human
uggacuaaccccaacgcacag

SEQ ID NO: 3460561 - RNA, 21 nt, Human
uggacuagagggaccucuccc

SEQ ID NO: 3460562 - RNA, 15 nt, Human
uggacuaucugucug

SEQ ID NO: 3460563 - RNA, 22 nt, Human
uggacuauggagugcaccaaag

SEQ ID NO: 3460564 - RNA, 19 nt, Human
uggacucaaucccuagggc

SEQ ID NO: 3460565 - RNA, 17 nt, Human
uggacucaccuccccca

SEQ ID NO: 3460566 - RNA, 18 nt, Human
uggacucagggcagcgcc

SEQ ID NO: 3460567 - RNA, 19 nt, Human
uggacuccagacucucugu

SEQ ID NO: 3460568 - RNA, 23 nt, Human
uggacuccagccugccuggcagg

SEQ ID NO: 3460569 - RNA, 14 nt, Human
uggacuccggcccu

SEQ ID NO: 3460570 - RNA, 13 nt, Human
uggacuccucugu

SEQ ID NO: 3460571 - RNA, 14 nt, Human
uggacuccucuguc

SEQ ID NO: 3460572 - RNA, 15 nt, Human
uggacuccucugucc

SEQ ID NO: 3460573 - RNA, 21 nt, Human
uggacucuaaagaccaaacuu

SEQ ID NO: 3460574 - RNA, 20 nt, Human
uggacucucagucucugagc

SEQ ID NO: 3460575 - RNA, 22 nt, Human
uggacucucagucucugagcag

SEQ ID NO: 3460576 - RNA, 16 nt, Human
uggacucuccccucuu

SEQ ID NO: 3460577 - RNA, 13 nt, Human
uggacucugcaca

SEQ ID NO: 3460578 - RNA, 18 nt, Human
uggacucugcacaugucu

SEQ ID NO: 3460579 - RNA, 22 nt, Human
uggacucugcacaugucuugua

SEQ ID NO: 3460580 - RNA, 16 nt, Human
uggacucugcauccca

SEQ ID NO: 3460581 - RNA, 13 nt, Human
uggacucuguccu

SEQ ID NO: 3460582 - RNA, 17 nt, Human
uggacucuguccugaag

SEQ ID NO: 3460583 - RNA, 22 nt, Human
uggacucuguccugaaggccug

SEQ ID NO: 3460584 - RNA, 20 nt, Human
uggacucuucaaaaacuguu

SEQ ID NO: 3460585 - RNA, 12 nt, Human
uggacucuugcu

SEQ ID NO: 3460586 - RNA, 14 nt, Human
uggacucuugcucu

SEQ ID NO: 3460587 - RNA, 15 nt, Human
uggacucuugcucuu

SEQ ID NO: 3460588 - RNA, 19 nt, Human
uggacugaagccugcagga

SEQ ID NO: 3460589 - RNA, 14 nt, Human
uggacugacagcau

SEQ ID NO: 3460590 - RNA, 22 nt, Human
uggacugacagcaugugcccuc

SEQ ID NO: 3460591 - RNA, 23 nt, Human
uggacugacagcaugugcccucc

SEQ ID NO: 3460592 - RNA, 20 nt, Human
uggacugagggggccuggau

SEQ ID NO: 3460593 - RNA, 23 nt, Human
uggacugagggggccuggaugcc

SEQ ID NO: 3460594 - RNA, 13 nt, Human
uggacugcagaag

SEQ ID NO: 3460595 - RNA, 23 nt, Human
uggacugcuaccuuucaaagcuu

SEQ ID NO: 3460596 - RNA, 16 nt, Human
uggacuggaguggagc

SEQ ID NO: 3460597 - RNA, 22 nt, Human
uggacuggcuagaguccucacu

SEQ ID NO: 3460598 - RNA, 19 nt, Human
uggacuguggugacuuugg

SEQ ID NO: 3460599 - RNA, 22 nt, Human
uggacuguggugacuuuggaua

SEQ ID NO: 3460600 - RNA, 15 nt, Human
uggacugugugcuca

SEQ ID NO: 3460601 - RNA, 17 nt, Human
uggacuguucccugagg

SEQ ID NO: 3460602 - RNA, 20 nt, Human
uggacuguuuucucucggcu

SEQ ID NO: 3460603 - RNA, 22 nt, Human
uggacuguuuucucucggcucc

SEQ ID NO: 3460604 - RNA, 18 nt, Human
uggacuuagaaagcaggg

SEQ ID NO: 3460605 - RNA, 20 nt, Human
uggacuuagaaagcaggggc

SEQ ID NO: 3460606 - RNA, 13 nt, Human
uggacuuaggaag

SEQ ID NO: 3460607 - RNA, 17 nt, Human
uggacuuauuucuucaa

SEQ ID NO: 3460608 - RNA, 19 nt, Human
uggacuucaaagcaagcug

SEQ ID NO: 3460609 - RNA, 22 nt, Human
uggacuucacauaagcucagaa

SEQ ID NO: 3460610 - RNA, 19 nt, Human
uggacuucuggaugcccau

SEQ ID NO: 3460611 - RNA, 18 nt, Human
uggacuugaggauuuuga

SEQ ID NO: 3460612 - RNA, 14 nt, Human
uggacuuguauauu

SEQ ID NO: 3460613 - RNA, 18 nt, Human
uggacuuguauauuugua

SEQ ID NO: 3460614 - RNA, 21 nt, Human
uggacuuguauauuuguacaa

SEQ ID NO: 3460615 - RNA, 20 nt, Human
uggacuuguccucagcagcu

SEQ ID NO: 3460616 - RNA, 16 nt, Human
uggacuuucaaaauua

SEQ ID NO: 3460617 - RNA, 13 nt, Human
uggacuuuccugc

SEQ ID NO: 3460618 - RNA, 18 nt, Human
uggacuuuccugcaacuc

SEQ ID NO: 3460619 - RNA, 23 nt, Human
uggacuuucucuaauaauaaaua

SEQ ID NO: 3460620 - RNA, 15 nt, Human
uggacuuuggaagca

SEQ ID NO: 3460621 - RNA, 14 nt, Human
uggacuuuguuaca

SEQ ID NO: 3460622 - RNA, 19 nt, Human
uggacuuuucguuaacauu

SEQ ID NO: 3460623 - RNA, 20 nt, Human
uggacuuuucguuaacauug

SEQ ID NO: 3460624 - RNA, 17 nt, Human
uggagaaacccuugaaa

SEQ ID NO: 3460625 - RNA, 14 nt, Human
uggagaaagcacug

SEQ ID NO: 3460626 - RNA, 23 nt, Human
uggagaaagcugacuuggcuggu

SEQ ID NO: 3460627 - RNA, 23 nt, Human
uggagaaauaaaaauaccucuuu

SEQ ID NO: 3460628 - RNA, 13 nt, Human
uguaaaacaggua

SEQ ID NO: 3460629 - RNA, 22 nt, Human
uguaaaacagguagaauuaucu

SEQ ID NO: 3460630 - RNA, 12 nt, Human
uguaaaacgcug

SEQ ID NO: 3460631 - RNA, 13 nt, Human
uguaaaacuuuau

SEQ ID NO: 3460632 - RNA, 14 nt, Human
uguaaaacuuuauu

SEQ ID NO: 3460633 - RNA, 22 nt, Human
uguaaaaggccaaaccucuguu

SEQ ID NO: 3460634 - RNA, 17 nt, Human
uguaaaauagcuuguau

SEQ ID NO: 3460635 - RNA, 19 nt, Human
uguaaaauauagcuguaca

SEQ ID NO: 3460636 - RNA, 20 nt, Human
uguaaaauauuuugaaucaa

SEQ ID NO: 3460637 - RNA, 12 nt, Human
uguaaaaucuug

SEQ ID NO: 3460638 - RNA, 18 nt, Human
uguaaaaucuugucaugu

SEQ ID NO: 3460639 - RNA, 14 nt, Human
uguaaaaucuuucu

SEQ ID NO: 3460640 - RNA, 22 nt, Human
uguaaaaucuuucuuucuuaga

SEQ ID NO: 3460641 - RNA, 13 nt, Human
uguaaaaugcaaa

SEQ ID NO: 3460642 - RNA, 21 nt, Human
uguaaaaugcaaaaaaucuua

SEQ ID NO: 3460643 - RNA, 12 nt, Human
uguaaaauggug

SEQ ID NO: 3460644 - RNA, 14 nt, Human
uguaaaauguaaug

SEQ ID NO: 3460645 - RNA, 13 nt, Human
uguaaaauguauu

SEQ ID NO: 3460646 - RNA, 20 nt, Human
uguaaaaugugaagugaaug

SEQ ID NO: 3460647 - RNA, 17 nt, Human
uguaaaauuucacuuaa

SEQ ID NO: 3460648 - RNA, 14 nt, Human
uguaaacaaaucuu

SEQ ID NO: 3460649 - RNA, 19 nt, Human
uguaaacaaaucuuuccau

SEQ ID NO: 3460650 - RNA, 11 nt, Human
uguaaacacag

SEQ ID NO: 3460651 - RNA, 18 nt, Human
uguaaacacagucaaaau

SEQ ID NO: 3460652 - RNA, 20 nt, Human
uguaaacacaucuaguaguu

SEQ ID NO: 3460653 - RNA, 17 nt, Human
uguaaacacucagcugu

SEQ ID NO: 3460654 - RNA, 20 nt, Human
uguaaacaggagacaggaag

SEQ ID NO: 3460655 - RNA, 14 nt, Human
uguaaacagugccu

SEQ ID NO: 3460656 - RNA, 19 nt, Human
uguaaacagugccugcuga

SEQ ID NO: 3460657 - RNA, 12 nt, Human
uguaaaccaaag

SEQ ID NO: 3460658 - RNA, 13 nt, Human
uguaaaccaaagc

SEQ ID NO: 3460659 - RNA, 14 nt, Human
uguaaaccaaagcc

SEQ ID NO: 3460660 - RNA, 14 nt, Human
uguaaaccaauuuu

SEQ ID NO: 3460661 - RNA, 22 nt, Human
uguaaaccacaaggcuguugca

SEQ ID NO: 3460662 - RNA, 19 nt, Human
uguaaaccgcuuuggccug

SEQ ID NO: 3460663 - RNA, 19 nt, Human
uguaaaccugagucguaca

SEQ ID NO: 3460664 - RNA, 19 nt, Human
uguaaacgacaagaauaau

SEQ ID NO: 3460665 - RNA, 22 nt, Human
uguaaacucaaaacuuaacaua

SEQ ID NO: 3460666 - RNA, 20 nt, Human
uguaaacucaaaauauuugu

SEQ ID NO: 3460667 - RNA, 14 nt, Human
uguaaacugccaua

SEQ ID NO: 3460668 - RNA, 22 nt, Human
uguaaacugccauauauaacag

SEQ ID NO: 3460669 - RNA, 18 nt, Human
uguaaacuguacuagucu

SEQ ID NO: 3460670 - RNA, 22 nt, Human
uguaaacuguacuagucugugu

SEQ ID NO: 3460671 - RNA, 19 nt, Human
uguaaacuguuucuuuaaa

SEQ ID NO: 3460672 - RNA, 22 nt, Human
uguaaacuguuucuuuaaaauu

SEQ ID NO: 3460673 - RNA, 12 nt, Human
uguaaacuuuga

SEQ ID NO: 3460674 - RNA, 13 nt, Human
uguaaacuuugaa

SEQ ID NO: 3460675 - RNA, 15 nt, Human
uguaaacuuugaaau

SEQ ID NO: 3460676 - RNA, 16 nt, Human
uguaaacuuugaaaua

SEQ ID NO: 3460677 - RNA, 13 nt, Human
uguaaacuuuuug

SEQ ID NO: 3460678 - RNA, 13 nt, Human
uguaaagaaaaau

SEQ ID NO: 3460679 - RNA, 15 nt, Human
uguaaagaaaaauau

SEQ ID NO: 3460680 - RNA, 14 nt, Human
uguaaagaaagaga

SEQ ID NO: 3460681 - RNA, 18 nt, Human
uguaaagaaagagagaaa

SEQ ID NO: 3460682 - RNA, 20 nt, Human
guuuaagccaaaacaauguu

SEQ ID NO: 3460683 - RNA, 14 nt, Human
guuuaauauuaaag

SEQ ID NO: 3460684 - RNA, 15 nt, Human
guuuaauauugagaa

SEQ ID NO: 3460685 - RNA, 18 nt, Human
uggcagccgugccuucag

SEQ ID NO: 3460686 - RNA, 21 nt, Human
uggcagccgugccuucagcuc

SEQ ID NO: 3460687 - RNA, 19 nt, Human
uggcagccucccauccagg

SEQ ID NO: 3460688 - RNA, 13 nt, Human
uggcagccuuggc

SEQ ID NO: 3460689 - RNA, 17 nt, Human
uggcagccuuggcaaac

SEQ ID NO: 3460690 - RNA, 21 nt, Human
uggcagcucaccucucccuug

SEQ ID NO: 3460691 - RNA, 15 nt, Human
uggcagcucagagag

SEQ ID NO: 3460692 - RNA, 16 nt, Human
uggcagcucagagagg

SEQ ID NO: 3460693 - RNA, 18 nt, Human
uggcagcucagagagggu

SEQ ID NO: 3460694 - RNA, 16 nt, Human
uggcagcugccacgcc

SEQ ID NO: 3460695 - RNA, 17 nt, Human
uggcagcugccacgccg

SEQ ID NO: 3460696 - RNA, 17 nt, Human
uggcagcugcgguccac

SEQ ID NO: 3460697 - RNA, 23 nt, Human
uggcagcugcgguccacccagga

SEQ ID NO: 3460698 - RNA, 14 nt, Human
uggcagcugucuca

SEQ ID NO: 3460699 - RNA, 15 nt, Human
uggcaggaaggcuug

SEQ ID NO: 3460700 - RNA, 16 nt, Human
uggcaggaccaggacu

SEQ ID NO: 3460701 - RNA, 21 nt, Human
uggcaggcagaggcccaggcu

SEQ ID NO: 3460702 - RNA, 20 nt, Human
uggcaggcaggcucccaggg

SEQ ID NO: 3460703 - RNA, 21 nt, Human
uggcaggcaggggcccugcag

SEQ ID NO: 3460704 - RNA, 12 nt, Human
uggcaggcuggc

SEQ ID NO: 3460705 - RNA, 13 nt, Human
uggcaggcuggcc

SEQ ID NO: 3460706 - RNA, 14 nt, Human
uggcaggcuggcca

SEQ ID NO: 3460707 - RNA, 20 nt, Human
uggcagggaggucaggcccu

SEQ ID NO: 3460708 - RNA, 13 nt, Human
uggcagggcacag

SEQ ID NO: 3460709 - RNA, 19 nt, Human
uggcagggcacagggccug

SEQ ID NO: 3460710 - RNA, 15 nt, Human
uggcagggccuagcu

SEQ ID NO: 3460711 - RNA, 19 nt, Human
uggcagggccuagcugcua

SEQ ID NO: 3460712 - RNA, 18 nt, Human
uggcaggggacaggaguc

SEQ ID NO: 3460713 - RNA, 15 nt, Human
uggcagggggcugcu

SEQ ID NO: 3460714 - RNA, 21 nt, Human
uggcagggguggaggagagcc

SEQ ID NO: 3460715 - RNA, 23 nt, Human
uggcagggguggcugccucauuu

SEQ ID NO: 3460716 - RNA, 17 nt, Human
uggcagguaggaauauu

SEQ ID NO: 3460717 - RNA, 14 nt, Human
uggcaggugagcaa

SEQ ID NO: 3460718 - RNA, 19 nt, Human
uggcagguuggguaacccu

SEQ ID NO: 3460719 - RNA, 17 nt, Human
uggcagucacugaauuc

SEQ ID NO: 3460720 - RNA, 19 nt, Human
uggcagucuauauguuugu

SEQ ID NO: 3460721 - RNA, 19 nt, Human
uggcagugagugagccugg

SEQ ID NO: 3460722 - RNA, 21 nt, Human
uggcagugagugagccuggcu

SEQ ID NO: 3460723 - RNA, 14 nt, Human
uggcagugaugaau

SEQ ID NO: 3460724 - RNA, 23 nt, Human
uggcaguggacucagaaagccaa

SEQ ID NO: 3460725 - RNA, 22 nt, Human
uggcagugggaaaaauguagga

SEQ ID NO: 3460726 - RNA, 13 nt, Human
uggcagugggagc

SEQ ID NO: 3460727 - RNA, 12 nt, Human
uggcagugguuu

SEQ ID NO: 3460728 - RNA, 18 nt, Human
uggcaguguuuugagaac

SEQ ID NO: 3460729 - RNA, 13 nt, Human
uggcaguuauauu

SEQ ID NO: 3460730 - RNA, 16 nt, Human
uggcaguuuauauuua

SEQ ID NO: 3460731 - RNA, 15 nt, Human
uggcauaacauaaau

SEQ ID NO: 3460732 - RNA, 17 nt, Human
uggcauaacauaaaucu

SEQ ID NO: 3460733 - RNA, 22 nt, Human
uggcauaacauaaaucugugaa

SEQ ID NO: 3460734 - RNA, 14 nt, Human
uggcauaguuucau

SEQ ID NO: 3460735 - RNA, 16 nt, Human
uggcauauuuuucaca

SEQ ID NO: 3460736 - RNA, 17 nt, Human
uggcauauuuuucacau

SEQ ID NO: 3460737 - RNA, 20 nt, Human
uggcaucacagggcagagcc

SEQ ID NO: 3460738 - RNA, 22 nt, Human
uggcauccagagucccugccug

SEQ ID NO: 3460739 - RNA, 14 nt, Human
uggcaucccugggc

SEQ ID NO: 3460740 - RNA, 16 nt, Human
uggcauccugugaagu

SEQ ID NO: 3460741 - RNA, 21 nt, Human
uggcaucgcaccauucugacu

SEQ ID NO: 3460742 - RNA, 22 nt, Human
uggcaucgcaccauucugacuc

SEQ ID NO: 3460743 - RNA, 15 nt, Human
uggcaucugacacaa

SEQ ID NO: 3460744 - RNA, 18 nt, Human
uggcaucuuaaaagcuau

SEQ ID NO: 3460745 - RNA, 21 nt, Human
uggcaucuuugccuugggcug

SEQ ID NO: 3460746 - RNA, 21 nt, Human
uggcaugagaaauacaaaaau

SEQ ID NO: 3460747 - RNA, 18 nt, Human
uggcaugcuuaaauuuua

SEQ ID NO: 3460748 - RNA, 16 nt, Human
uggcauggcaccuguc

SEQ ID NO: 3460749 - RNA, 16 nt, Human
uggcauggcuccaguc

SEQ ID NO: 3460750 - RNA, 17 nt, Human
uggcauggcuccagucu

SEQ ID NO: 3460751 - RNA, 22 nt, Human
uggcaugggaaugaaugucagu

SEQ ID NO: 3460752 - RNA, 17 nt, Human
uggcauguaaauguaaa

SEQ ID NO: 3460753 - RNA, 19 nt, Human
uggcauguaaauguaaacu

SEQ ID NO: 3460754 - RNA, 20 nt, Human
uggcaugugcugugaccauu

SEQ ID NO: 3460755 - RNA, 14 nt, Human
uggcauguggccug

SEQ ID NO: 3460756 - RNA, 16 nt, Human
uggcauguggccugug

SEQ ID NO: 3460757 - RNA, 15 nt, Human
uggcauuaaaacuua

SEQ ID NO: 3460758 - RNA, 18 nt, Human
uggcauuauguccacugu

SEQ ID NO: 3460759 - RNA, 20 nt, Human
uggcauuggcagcaggugcu

SEQ ID NO: 3460760 - RNA, 21 nt, Human
uggcauuggcagcaggugcug

SEQ ID NO: 3460761 - RNA, 16 nt, Human
uggcauugucccugug

SEQ ID NO: 3460762 - RNA, 17 nt, Human
uggcauuugcagauuuu

SEQ ID NO: 3460763 - RNA, 14 nt, Human
uggccaaaguguua

SEQ ID NO: 3460764 - RNA, 22 nt, Human
uggccaacaucgugaaacccug

SEQ ID NO: 3460765 - RNA, 18 nt, Human
uggccaagagaaacuucc

SEQ ID NO: 3460766 - RNA, 16 nt, Human
uggccaaggagcugcu

SEQ ID NO: 3460767 - RNA, 16 nt, Human
uggccaaguuccucua

SEQ ID NO: 3460768 - RNA, 19 nt, Human
uggccacaaauucuuugac

SEQ ID NO: 3460769 - RNA, 12 nt, Human
uggccacacugu

SEQ ID NO: 3460770 - RNA, 14 nt, Human
uggccacacuguga

SEQ ID NO: 3460771 - RNA, 18 nt, Human
uggccacacugugacaca

SEQ ID NO: 3460772 - RNA, 18 nt, Human
uggccacagccaggggag

SEQ ID NO: 3460773 - RNA, 20 nt, Human
uggccacagcgccagccuca

SEQ ID NO: 3460774 - RNA, 21 nt, Human
uggccacauuuucagccaaag

SEQ ID NO: 3460775 - RNA, 12 nt, Human
uggccaccaggc

SEQ ID NO: 3460776 - RNA, 13 nt, Human
uggccaccaggcu

SEQ ID NO: 3460777 - RNA, 15 nt, Human
uggccaccaggcugg

SEQ ID NO: 3460778 - RNA, 23 nt, Human
uggccaccaggcuggcgcagcca

SEQ ID NO: 3460779 - RNA, 19 nt, Human
uggccacccguucugcugg

SEQ ID NO: 3460780 - RNA, 20 nt, Human
uggccaccugaggugggccc

SEQ ID NO: 3460781 - RNA, 17 nt, Human
uggccaccuuuucagcg

SEQ ID NO: 3460782 - RNA, 15 nt, Human
uggccacgcagccag

SEQ ID NO: 3460783 - RNA, 12 nt, Human
uggccacuaagc

SEQ ID NO: 3460784 - RNA, 19 nt, Human
uggccacuaagcagaggag

SEQ ID NO: 3460785 - RNA, 22 nt, Human
uggccacucagcuuccuaccca

SEQ ID NO: 3460786 - RNA, 20 nt, Human
uggccacuccagaccccugg

SEQ ID NO: 3460787 - RNA, 23 nt, Human
uggccacuccgagaggugggcca

SEQ ID NO: 3460788 - RNA, 14 nt, Human
uggccacugcacag

SEQ ID NO: 3460789 - RNA, 17 nt, Human
uggccacugcacagagc

SEQ ID NO: 3460790 - RNA, 19 nt, Human
uggccacugcacagagcuc

SEQ ID NO: 3460791 - RNA, 20 nt, Human
uggccacugcacagagcucu

SEQ ID NO: 3460792 - RNA, 16 nt, Human
uggccacugcucccua

SEQ ID NO: 3460793 - RNA, 16 nt, Human
uggccacuuuaagaga

SEQ ID NO: 3460794 - RNA, 17 nt, Human
uggccagaagucaaggc

SEQ ID NO: 3460795 - RNA, 18 nt, Human
uggccagacacaggcccu

SEQ ID NO: 3460796 - RNA, 20 nt, Human
uggccagaccagagcucugg

SEQ ID NO: 3460797 - RNA, 15 nt, Human
uggccagacucgaug

SEQ ID NO: 3460798 - RNA, 15 nt, Human
uggccagagcuggga

SEQ ID NO: 3460799 - RNA, 20 nt, Human
uggccagagcugggaggcau

SEQ ID NO: 3460800 - RNA, 23 nt, Human
uggccagagcugggaggcauggc

SEQ ID NO: 3460801 - RNA, 18 nt, Human
uggccagaggugucaccc

SEQ ID NO: 3460802 - RNA, 19 nt, Human
uggccagaugcaccagccc

SEQ ID NO: 3460803 - RNA, 16 nt, Human
uggccagcagcaccug

SEQ ID NO: 3460804 - RNA, 15 nt, Human
uggccagccccacag

SEQ ID NO: 3460805 - RNA, 22 nt, Human
uggccagccccuuagacagagg

SEQ ID NO: 3460806 - RNA, 12 nt, Human
uggccagcccgg

SEQ ID NO: 3460807 - RNA, 13 nt, Human
uggccagcccggc

SEQ ID NO: 3460808 - RNA, 15 nt, Human
uggccagcccggcug

SEQ ID NO: 3460809 - RNA, 17 nt, Human
uggccagcccggcuggu

SEQ ID NO: 3460810 - RNA, 12 nt, Human
uggccagccgcu

SEQ ID NO: 3460811 - RNA, 20 nt, Human
uggccagccgcucuccugcc

SEQ ID NO: 3460812 - RNA, 23 nt, Human
uggccagccgcucuccugccaca

SEQ ID NO: 3460813 - RNA, 13 nt, Human
uggccagccuaca

SEQ ID NO: 3460814 - RNA, 19 nt, Human
uggccagccuggggccugg

SEQ ID NO: 3460815 - RNA, 23 nt, Human
uggccagccuggggccuggcagg

SEQ ID NO: 3460816 - RNA, 20 nt, Human
uggccaggaaguagcacagg

SEQ ID NO: 3460817 - RNA, 22 nt, Human
uggccaggaaguagcacaggcu

SEQ ID NO: 3460818 - RNA, 14 nt, Human
uggccaggagcucu

SEQ ID NO: 3460819 - RNA, 15 nt, Human
uggccaggagcucuu

SEQ ID NO: 3460820 - RNA, 16 nt, Human
uggccaggagcucuuc

SEQ ID NO: 3460821 - RNA, 20 nt, Human
uggccaggagcucuucaggc

SEQ ID NO: 3460822 - RNA, 11 nt, Human
uggccaggagg

SEQ ID NO: 3460823 - RNA, 12 nt, Human
uggccaggaggu

SEQ ID NO: 3460824 - RNA, 12 nt, Human
uggccaggaugg

SEQ ID NO: 3460825 - RNA, 17 nt, Human
uggccaggcagaucugu

SEQ ID NO: 3460826 - RNA, 20 nt, Human
uggccaggcagaucugugcc

SEQ ID NO: 3460827 - RNA, 21 nt, Human
guuuccuaaauccaaccauuu

SEQ ID NO: 3460828 - RNA, 22 nt, Human
guuuccucaggcugcuggagga

SEQ ID NO: 3460829 - RNA, 13 nt, Human
guuuccucuguuc

SEQ ID NO: 3460830 - RNA, 23 nt, Human
guuuccucuguucaaagcugccu

SEQ ID NO: 3460831 - RNA, 22 nt, Human
guuuccugaaacaacuuggaaa

SEQ ID NO: 3460832 - RNA, 15 nt, Human
guuuccugacauugu

SEQ ID NO: 3460833 - RNA, 14 nt, Human
guuuccugcaggcc

SEQ ID NO: 3460834 - RNA, 17 nt, Human
guuuccuuccagcccag

SEQ ID NO: 3460835 - RNA, 21 nt, Human
guuuccuugaggggagccagg

SEQ ID NO: 3460836 - RNA, 19 nt, Human
guuuccuugggaguuguca

SEQ ID NO: 3460837 - RNA, 20 nt, Human
guuuccuuucauuuacugug

SEQ ID NO: 3460838 - RNA, 14 nt, Human
guuuccuuuuauga

SEQ ID NO: 3460839 - RNA, 18 nt, Human
guuucgaaguugaugcaa

SEQ ID NO: 3460840 - RNA, 13 nt, Human
guuucgagaagcu

SEQ ID NO: 3460841 - RNA, 16 nt, Human
guuucgcagccugagu

SEQ ID NO: 3460842 - RNA, 18 nt, Human
guuucgcagccugagucc

SEQ ID NO: 3460843 - RNA, 16 nt, Human
guuucuaaagcugcca

SEQ ID NO: 3460844 - RNA, 20 nt, Human
guuucuaaagcugccagccg

SEQ ID NO: 3460845 - RNA, 22 nt, Human
guuucuaaaggcuaccuuugua

SEQ ID NO: 3460846 - RNA, 15 nt, Human
guuucuaagauucua

SEQ ID NO: 3460847 - RNA, 23 nt, Human
guuucuaccggagagagaaugua

SEQ ID NO: 3460848 - RNA, 16 nt, Human
guuucuagacuauaaa

SEQ ID NO: 3460849 - RNA, 18 nt, Human
guuucuagggaaaugaaa

SEQ ID NO: 3460850 - RNA, 12 nt, Human
uguauguguuua

SEQ ID NO: 3460851 - RNA, 14 nt, Human
uguauguguuuaga

SEQ ID NO: 3460852 - RNA, 20 nt, Human
uguauguguuuagaauugaa

SEQ ID NO: 3460853 - RNA, 15 nt, Human
uguauguuaaagaga

SEQ ID NO: 3460854 - RNA, 21 nt, Human
uguauguuauuauauuccgua

SEQ ID NO: 3460855 - RNA, 20 nt, Human
uguauguuuacacugucaaa

SEQ ID NO: 3460856 - RNA, 16 nt, Human
uguauguuuacauauc

SEQ ID NO: 3460857 - RNA, 14 nt, Human
uguauguuugcaca

SEQ ID NO: 3460858 - RNA, 16 nt, Human
uguauguuugcacacu

SEQ ID NO: 3460859 - RNA, 13 nt, Human
uguauguuuuuca

SEQ ID NO: 3460860 - RNA, 16 nt, Human
uguauguuuuucaguu

SEQ ID NO: 3460861 - RNA, 17 nt, Human
uguauuaaaaaaaacaa

SEQ ID NO: 3460862 - RNA, 23 nt, Human
uguauuaaauuacauuuguaauu

SEQ ID NO: 3460863 - RNA, 12 nt, Human
uguauuaagagu

SEQ ID NO: 3460864 - RNA, 17 nt, Human
uguauuaagagugaaaa

SEQ ID NO: 3460865 - RNA, 14 nt, Human
uguauuaagccacu

SEQ ID NO: 3460866 - RNA, 16 nt, Human
uguauuaauaaauaga

SEQ ID NO: 3460867 - RNA, 14 nt, Human
uguauuacagaugc

SEQ ID NO: 3460868 - RNA, 21 nt, Human
uguauuacauaaauaaauuaa

SEQ ID NO: 3460869 - RNA, 19 nt, Human
uguauuacuagaagaugaa

SEQ ID NO: 3460870 - RNA, 19 nt, Human
uguauuagauguucucuau

SEQ ID NO: 3460871 - RNA, 19 nt, Human
uguauuaggacuggcuuug

SEQ ID NO: 3460872 - RNA, 18 nt, Human
uguauuagugauauuucu

SEQ ID NO: 3460873 - RNA, 22 nt, Human
uguauuagugauauuucucuag

SEQ ID NO: 3460874 - RNA, 14 nt, Human
uguauuauaacagu

SEQ ID NO: 3460875 - RNA, 20 nt, Human
uguauuauguccugugagau

SEQ ID NO: 3460876 - RNA, 11 nt, Human
uguauuaugug

SEQ ID NO: 3460877 - RNA, 16 nt, Human
uguauuauucugcagc

SEQ ID NO: 3460878 - RNA, 14 nt, Human
uguauuauugcugu

SEQ ID NO: 3460879 - RNA, 18 nt, Human
uguauuauugcuguugcu

SEQ ID NO: 3460880 - RNA, 18 nt, Human
uguauuauuuacauuuaa

SEQ ID NO: 3460881 - RNA, 15 nt, Human
uguauuauuuauaau

SEQ ID NO: 3460882 - RNA, 20 nt, Human
uguauuauuucauuauguaa

SEQ ID NO: 3460883 - RNA, 17 nt, Human
uguauucaauuaaagaa

SEQ ID NO: 3460884 - RNA, 21 nt, Human
uguauucacccguccagaccu

SEQ ID NO: 3460885 - RNA, 14 nt, Human
uguauucagcuuua

SEQ ID NO: 3460886 - RNA, 16 nt, Human
uguauucauauuugua

SEQ ID NO: 3460887 - RNA, 17 nt, Human
uguauucauauuuguac

SEQ ID NO: 3460888 - RNA, 20 nt, Human
uguauuccaagacaugucug

SEQ ID NO: 3460889 - RNA, 21 nt, Human
uguauuccaagacaugucugu

SEQ ID NO: 3460890 - RNA, 19 nt, Human
uguauucucuccuguaccu

SEQ ID NO: 3460891 - RNA, 20 nt, Human
uguauucucuccuguaccuc

SEQ ID NO: 3460892 - RNA, 19 nt, Human
uguauucucugagcugugc

SEQ ID NO: 3460893 - RNA, 13 nt, Human
uguauucuguaaa

SEQ ID NO: 3460894 - RNA, 13 nt, Human
uguauucugucuu

SEQ ID NO: 3460895 - RNA, 14 nt, Human
uguauucuuaaaau

SEQ ID NO: 3460896 - RNA, 21 nt, Human
uguauucuuaaauucauuuua

SEQ ID NO: 3460897 - RNA, 21 nt, Human
uguauucuuugauguuaacac

SEQ ID NO: 3460898 - RNA, 16 nt, Human
uguauucuuuucucag

SEQ ID NO: 3460899 - RNA, 16 nt, Human
uguauugaaucaugua

SEQ ID NO: 3460900 - RNA, 20 nt, Human
uguauugagauuucuuaaau

SEQ ID NO: 3460901 - RNA, 19 nt, Human
uguauugcacauuguaaaa

SEQ ID NO: 3460902 - RNA, 12 nt, Human
uguauugcuguc

SEQ ID NO: 3460903 - RNA, 15 nt, Human
uguauuguaaacaug

SEQ ID NO: 3460904 - RNA, 19 nt, Human
uguauugugcaauguguau

SEQ ID NO: 3460905 - RNA, 16 nt, Human
uguauuguuagauguu

SEQ ID NO: 3460906 - RNA, 12 nt, Human
uguauuguuccc

SEQ ID NO: 3460907 - RNA, 20 nt, Human
uguauuuaaaaauagaaaca

SEQ ID NO: 3460908 - RNA, 14 nt, Human
uguauuuaacagaa

SEQ ID NO: 3460909 - RNA, 12 nt, Human
uguauuuaagca

SEQ ID NO: 3460910 - RNA, 22 nt, Human
uguauuuaauuguaaacuguac

SEQ ID NO: 3460911 - RNA, 21 nt, Human
uguauuuauaaauauauuuaa

SEQ ID NO: 3460912 - RNA, 15 nt, Human
uguauuuauucuuuu

SEQ ID NO: 3460913 - RNA, 20 nt, Human
uguauuuauuuuccucccca

SEQ ID NO: 3460914 - RNA, 12 nt, Human
uguauuugaaag

SEQ ID NO: 3460915 - RNA, 14 nt, Human
uguauuugcuuuuu

SEQ ID NO: 3460916 - RNA, 13 nt, Human
uguauuuggaaau

SEQ ID NO: 3460917 - RNA, 18 nt, Human
uguauuugugacuaauug

SEQ ID NO: 3460918 - RNA, 20 nt, Human
uguauuugugacuaauugua

SEQ ID NO: 3460919 - RNA, 14 nt, Human
uguauuuguucaug

SEQ ID NO: 3460920 - RNA, 17 nt, Human
uguauuuguucauguuu

SEQ ID NO: 3460921 - RNA, 19 nt, Human
uguauuuuauaaaauuaaa

SEQ ID NO: 3460922 - RNA, 18 nt, Human
uguauuuuauguauguuu

SEQ ID NO: 3460923 - RNA, 11 nt, Human
uguauuuuauu

SEQ ID NO: 3460924 - RNA, 18 nt, Human
uguauuuuauuuagacaa

SEQ ID NO: 3460925 - RNA, 22 nt, Human
uguauuuuauuuagacaagaga

SEQ ID NO: 3460926 - RNA, 21 nt, Human
uguauuuuccaagugugcaua

SEQ ID NO: 3460927 - RNA, 16 nt, Human
uguauuuucuuucucu

SEQ ID NO: 3460928 - RNA, 19 nt, Human
uguauuuuguaaauaauaa

SEQ ID NO: 3460929 - RNA, 16 nt, Human
uguauuuugugugacc

SEQ ID NO: 3460930 - RNA, 14 nt, Human
uguauuuuuaaugg

SEQ ID NO: 3460931 - RNA, 17 nt, Human
uguauuuuuaccuuuuu

SEQ ID NO: 3460932 - RNA, 16 nt, Human
uguauuuuuauauaau

SEQ ID NO: 3460933 - RNA, 19 nt, Human
uguauuuuucaauaaagca

SEQ ID NO: 3460934 - RNA, 16 nt, Human
uguauuuuuuaaagcu

SEQ ID NO: 3460935 - RNA, 20 nt, Human
uguauuuuuuugcaagugaa

SEQ ID NO: 3460936 - RNA, 21 nt, Human
uguauuuuuuuuucuaagaga

SEQ ID NO: 3460937 - RNA, 16 nt, Human
ugucaaaaaucaauau

SEQ ID NO: 3460938 - RNA, 15 nt, Human
ugucaaaacacugug

SEQ ID NO: 3460939 - RNA, 21 nt, Human
ugucaaacaaauagucuauca

SEQ ID NO: 3460940 - RNA, 18 nt, Human
ugucaaacuguagaaaug

SEQ ID NO: 3460941 - RNA, 13 nt, Human
ugucaaagcuuug

SEQ ID NO: 3460942 - RNA, 19 nt, Human
ugucaaaguggugagaggc

SEQ ID NO: 3460943 - RNA, 15 nt, Human
ugucaaauaaacacu

SEQ ID NO: 3460944 - RNA, 19 nt, Human
ugucaaauauuuagaugua

SEQ ID NO: 3460945 - RNA, 18 nt, Human
ugucaaaugaugugcaaa

SEQ ID NO: 3460946 - RNA, 19 nt, Human
ugucaaaugaugugcaaaa

SEQ ID NO: 3460947 - RNA, 15 nt, Human
ugucaacauugugau

SEQ ID NO: 3460948 - RNA, 17 nt, Human
ugucaacauuuggaggc

SEQ ID NO: 3460949 - RNA, 17 nt, Human
ugucaaccagacagagg

SEQ ID NO: 3460950 - RNA, 15 nt, Human
ugucaacucuuuguu

SEQ ID NO: 3460951 - RNA, 15 nt, Human
ugucaacugaccuaa

SEQ ID NO: 3460952 - RNA, 14 nt, Human
ugucaacuucuggc

SEQ ID NO: 3460953 - RNA, 15 nt, Human
ugucaacuucuggcu

SEQ ID NO: 3460954 - RNA, 14 nt, Human
ugucaagaaagagc

SEQ ID NO: 3460955 - RNA, 17 nt, Human
ugucaagaguaguuaua

SEQ ID NO: 3460956 - RNA, 15 nt, Human
ugucaagauucagcu

SEQ ID NO: 3460957 - RNA, 15 nt, Human
ugucaagccauaauu

SEQ ID NO: 3460958 - RNA, 20 nt, Human
ugucaagccauuuuuacauc

SEQ ID NO: 3460959 - RNA, 23 nt, Human
ugucaagccauuuuuacaucuaa

SEQ ID NO: 3460960 - RNA, 19 nt, Human
ugucaagcugcucugagcc

SEQ ID NO: 3460961 - RNA, 18 nt, Human
ugucaaggcugcuuagaa

SEQ ID NO: 3460962 - RNA, 22 nt, Human
ugucaagggcagcuuugcucau

SEQ ID NO: 3460963 - RNA, 16 nt, Human
ugucaaggugcuguug

SEQ ID NO: 3460964 - RNA, 17 nt, Human
ugucaaguggcaaagcu

SEQ ID NO: 3460965 - RNA, 19 nt, Human
ugucaagugggaucuguca

SEQ ID NO: 3460966 - RNA, 18 nt, Human
ugucaaguuccuuugggu

SEQ ID NO: 3460967 - RNA, 17 nt, Human
ugucaaguugugcuugu

SEQ ID NO: 3460968 - RNA, 12 nt, Human
ugucaauaaaca

SEQ ID NO: 3460969 - RNA, 16 nt, Human
ugucaauaaacagcuu

SEQ ID NO: 3460970 - RNA, 23 nt, Human
ugucaauauuaaauacagacacu

SEQ ID NO: 3460971 - RNA, 17 nt, Human
ugucaauauuuaaacau

SEQ ID NO: 3460972 - RNA, 20 nt, Human
ugugaguguaagugugagua

SEQ ID NO: 3460973 - RNA, 13 nt, Human
ugugagugugaca

SEQ ID NO: 3460974 - RNA, 16 nt, Human
ugugagugugacaggg

SEQ ID NO: 3460975 - RNA, 17 nt, Human
ugugagugugacagggc

SEQ ID NO: 3460976 - RNA, 18 nt, Human
ugugagugugacagggcc

SEQ ID NO: 3460977 - RNA, 20 nt, Human
ugugaguguguccaagugug

SEQ ID NO: 3460978 - RNA, 22 nt, Human
ugugaguguguguuugugcuga

SEQ ID NO: 3460979 - RNA, 21 nt, Human
ugugaguuuggucuggacuga

SEQ ID NO: 3460980 - RNA, 15 nt, Human
ugugauagcacuuuc

SEQ ID NO: 3460981 - RNA, 17 nt, Human
ugugauauaaacagcuu

SEQ ID NO: 3460982 - RNA, 16 nt, Human
ugugauauauguauua

SEQ ID NO: 3460983 - RNA, 21 nt, Human
ugugauaugcacaauguagau

SEQ ID NO: 3460984 - RNA, 22 nt, Human
ugugauauuucagaaauacaga

SEQ ID NO: 3460985 - RNA, 18 nt, Human
ugugaucauguguggaag

SEQ ID NO: 3460986 - RNA, 20 nt, Human
ugugaucuaucaauagucaa

SEQ ID NO: 3460987 - RNA, 20 nt, Human
ugugaucugucuuguaauau

SEQ ID NO: 3460988 - RNA, 17 nt, Human
ugugaucuuauuuuucu

SEQ ID NO: 3460989 - RNA, 15 nt, Human
ugugaugaacuuucu

SEQ ID NO: 3460990 - RNA, 14 nt, Human
ugugaugaauacug

SEQ ID NO: 3460991 - RNA, 18 nt, Human
ugugaugacaacuggaau

SEQ ID NO: 3460992 - RNA, 18 nt, Human
ugugaugacauucccugc

SEQ ID NO: 3460993 - RNA, 16 nt, Human
ugugaugaggggaggg

SEQ ID NO: 3460994 - RNA, 14 nt, Human
ugugaugauguaau

SEQ ID NO: 3460995 - RNA, 17 nt, Human
ugugaugccacacagag

SEQ ID NO: 3460996 - RNA, 16 nt, Human
ugugaugcccugcccu

SEQ ID NO: 3460997 - RNA, 17 nt, Human
ugugauggagugcuguu

SEQ ID NO: 3460998 - RNA, 20 nt, Human
ugugauggggcccugccucc

SEQ ID NO: 3460999 - RNA, 15 nt, Human
ugugaugugacauuu

SEQ ID NO: 3461000 - RNA, 18 nt, Human
ugugaugugacauuuguc

SEQ ID NO: 3461001 - RNA, 14 nt, Human
ugugauguucuaag

SEQ ID NO: 3461002 - RNA, 17 nt, Human
ugugauguucuaaggcu

SEQ ID NO: 3461003 - RNA, 14 nt, Human
ugugauuaacuuau

SEQ ID NO: 3461004 - RNA, 16 nt, Human
ugugauucaaugccuc

SEQ ID NO: 3461005 - RNA, 20 nt, Human
ugugauucagaaaauguucu

SEQ ID NO: 3461006 - RNA, 23 nt, Human
ugugauucagaaaauguucuguu

SEQ ID NO: 3461007 - RNA, 21 nt, Human
ugugauuccuuugaagaggaa

SEQ ID NO: 3461008 - RNA, 17 nt, Human
ugugauucuaaugucuu

SEQ ID NO: 3461009 - RNA, 21 nt, Human
ugugauucuuccagaugugau

SEQ ID NO: 3461010 - RNA, 13 nt, Human
ugugauugaaucu

SEQ ID NO: 3461011 - RNA, 15 nt, Human
ugugauugaaucuga

SEQ ID NO: 3461012 - RNA, 23 nt, Human
ugugauugacagcuuugcugcug

SEQ ID NO: 3461013 - RNA, 14 nt, Human
ugugauugugccua

SEQ ID NO: 3461014 - RNA, 15 nt, Human
ugugauuuaauagug

SEQ ID NO: 3461015 - RNA, 16 nt, Human
ugugauuuaauagugu

SEQ ID NO: 3461016 - RNA, 20 nt, Human
ugugauuuaauaguguuaau

SEQ ID NO: 3461017 - RNA, 22 nt, Human
ugugauuuaauaguguuaauca

SEQ ID NO: 3461018 - RNA, 19 nt, Human
ugugauuucccguggcccc

SEQ ID NO: 3461019 - RNA, 22 nt, Human
ugugauuucccguggccccagc

SEQ ID NO: 3461020 - RNA, 19 nt, Human
ugugauuucuuuaaaagaa

SEQ ID NO: 3461021 - RNA, 13 nt, Human
ugugauuugacug

SEQ ID NO: 3461022 - RNA, 14 nt, Human
ugugauuugacugu

SEQ ID NO: 3461023 - RNA, 14 nt, Human
ugugauuuuaacuc

SEQ ID NO: 3461024 - RNA, 17 nt, Human
ugugauuuuaacucugu

SEQ ID NO: 3461025 - RNA, 20 nt, Human
ugugauuuuaacucugucuu

SEQ ID NO: 3461026 - RNA, 20 nt, Human
ugugcaaaaaaauuaaaaug

SEQ ID NO: 3461027 - RNA, 23 nt, Human
ugugcaaaaaaauuaaaauggau

SEQ ID NO: 3461028 - RNA, 13 nt, Human
ugugcaaaaauuu

SEQ ID NO: 3461029 - RNA, 21 nt, Human
ugugcaacggucuccugacug

SEQ ID NO: 3461030 - RNA, 14 nt, Human
ugugcaagagaggg

SEQ ID NO: 3461031 - RNA, 23 nt, Human
ugugcaagcgacgacagaugcua

SEQ ID NO: 3461032 - RNA, 17 nt, Human
ugugcaaggcagccgug

SEQ ID NO: 3461033 - RNA, 21 nt, Human
ugugcaaggcagccgugggcc

SEQ ID NO: 3461034 - RNA, 21 nt, Human
ugugcaagugugugcaugugu

SEQ ID NO: 3461035 - RNA, 16 nt, Human
ugugcaauagaaggug

SEQ ID NO: 3461036 - RNA, 20 nt, Human
ugugcaauagacacauacau

SEQ ID NO: 3461037 - RNA, 11 nt, Human
ugugcaaugug

SEQ ID NO: 3461038 - RNA, 14 nt, Human
ugugcacaaagugg

SEQ ID NO: 3461039 - RNA, 20 nt, Human
ugugcacaauucuguuuuag

SEQ ID NO: 3461040 - RNA, 12 nt, Human
ugugcacaggca

SEQ ID NO: 3461041 - RNA, 13 nt, Human
ugugcacaggcag

SEQ ID NO: 3461042 - RNA, 14 nt, Human
ugugcacaggcaga

SEQ ID NO: 3461043 - RNA, 10 nt, Human
ugugcacauc

SEQ ID NO: 3461044 - RNA, 21 nt, Human
ugugcacauccgcgugugccu

SEQ ID NO: 3461045 - RNA, 19 nt, Human
ugugcaccaccacacccgg

SEQ ID NO: 3461046 - RNA, 18 nt, Human
ugugcacccucuauccca

SEQ ID NO: 3461047 - RNA, 17 nt, Human
ugugcaccuaaaacuua

SEQ ID NO: 3461048 - RNA, 15 nt, Human
ugugcaccugggcuc

SEQ ID NO: 3461049 - RNA, 22 nt, Human
ugugcacguaaaguacuuguag

SEQ ID NO: 3461050 - RNA, 14 nt, Human
ugugcacguacaca

SEQ ID NO: 3461051 - RNA, 13 nt, Human
ugugcacugccca

SEQ ID NO: 3461052 - RNA, 17 nt, Human
ugugcacugucacuuug

SEQ ID NO: 3461053 - RNA, 20 nt, Human
ugugcacuuuuuuucuauau

SEQ ID NO: 3461054 - RNA, 14 nt, Human
ugugcagaaaacau

SEQ ID NO: 3461055 - RNA, 15 nt, Human
ugugcagcagauugg

SEQ ID NO: 3461056 - RNA, 19 nt, Human
ugugcagccgcugagcgag

SEQ ID NO: 3461057 - RNA, 14 nt, Human
ugugcagguuccca

SEQ ID NO: 3461058 - RNA, 16 nt, Human
ugugcaguaucuguga

SEQ ID NO: 3461059 - RNA, 17 nt, Human
ugugcaguccugggaug

SEQ ID NO: 3461060 - RNA, 20 nt, Human
ugugcagugaagguugcuga

SEQ ID NO: 3461061 - RNA, 19 nt, Human
ugugcaguucuaguuugca

SEQ ID NO: 3461062 - RNA, 22 nt, Human
ugugcaguucuaguuugcauuc

SEQ ID NO: 3461063 - RNA, 19 nt, Human
ugugcaguugcuguuuacu

SEQ ID NO: 3461064 - RNA, 15 nt, Human
ugugcauaguuucuu

SEQ ID NO: 3461065 - RNA, 16 nt, Human
ugugcauaguuucuuu

SEQ ID NO: 3461066 - RNA, 13 nt, Human
ugugcauauugua

SEQ ID NO: 3461067 - RNA, 13 nt, Human
ugugcaucaggcu

SEQ ID NO: 3461068 - RNA, 16 nt, Human
ugugcauggaggcccu

SEQ ID NO: 3461069 - RNA, 19 nt, Human
ugugcauggaggcccuccu

SEQ ID NO: 3461070 - RNA, 22 nt, Human
ugugcauggaggcccuccugug

SEQ ID NO: 3461071 - RNA, 13 nt, Human
ugugcauggguga

SEQ ID NO: 3461072 - RNA, 20 nt, Human
ugugcauguaugucuuggac

SEQ ID NO: 3461073 - RNA, 18 nt, Human
ugugcaugugucuuuaua

SEQ ID NO: 3461074 - RNA, 14 nt, Human
ugugcaugugugua

SEQ ID NO: 3461075 - RNA, 22 nt, Human
ugugcauguguguaagugugug

SEQ ID NO: 3461076 - RNA, 18 nt, Human
ugugcauguguguauaag

SEQ ID NO: 3461077 - RNA, 15 nt, Human
ugugcaugugugugu

SEQ ID NO: 3461078 - RNA, 20 nt, Human
ugugcauuaucuagauacug

SEQ ID NO: 3461079 - RNA, 21 nt, Human
ugugcauuaucuagauacugu

SEQ ID NO: 3461080 - RNA, 21 nt, Human
ugugcauucuuuuaaaagaca

SEQ ID NO: 3461081 - RNA, 14 nt, Human
ugugcauuuguaaa

SEQ ID NO: 3461082 - RNA, 21 nt, Human
ugugcauuuucuaaacagaga

SEQ ID NO: 3461083 - RNA, 21 nt, Human
ugugcauuuuugugaaaugaa

SEQ ID NO: 3461084 - RNA, 19 nt, Human
ugugccaaacaaaaugaga

SEQ ID NO: 3461085 - RNA, 23 nt, Human
ugugccaaucaauagcaccccua

SEQ ID NO: 3461086 - RNA, 17 nt, Human
ugugccaccaugccuca

SEQ ID NO: 3461087 - RNA, 20 nt, Human
ugugccacccaccagggcga

SEQ ID NO: 3461088 - RNA, 14 nt, Human
ugugccacccuggg

SEQ ID NO: 3461089 - RNA, 16 nt, Human
ugugccacccugggcu

SEQ ID NO: 3461090 - RNA, 18 nt, Human
ugugccagagccuggggc

SEQ ID NO: 3461091 - RNA, 21 nt, Human
ugugccagaggaauccuggca

SEQ ID NO: 3461092 - RNA, 18 nt, Human
ugugccagggcaaugaug

SEQ ID NO: 3461093 - RNA, 18 nt, Human
ugugccauagaguuuaac

SEQ ID NO: 3461094 - RNA, 21 nt, Human
ugugccauagucacauggccu

SEQ ID NO: 3461095 - RNA, 13 nt, Human
ugugccaucugua

SEQ ID NO: 3461096 - RNA, 12 nt, Human
ugugccaugugc

SEQ ID NO: 3461097 - RNA, 16 nt, Human
ugugccaugugccagg

SEQ ID NO: 3461098 - RNA, 16 nt, Human
ugugccauuuugcauu

SEQ ID NO: 3461099 - RNA, 18 nt, Human
ugugcccagaauacugau

SEQ ID NO: 3461100 - RNA, 19 nt, Human
ugugcccagcccggaccuu

SEQ ID NO: 3461101 - RNA, 20 nt, Human
ugugcccaugggcacugcug

SEQ ID NO: 3461102 - RNA, 21 nt, Human
ugugcccaugggcacugcugg

SEQ ID NO: 3461103 - RNA, 19 nt, Human
ugugccccaugccugucca

SEQ ID NO: 3461104 - RNA, 18 nt, Human
ugugcccccaaccauuuc

SEQ ID NO: 3461105 - RNA, 18 nt, Human
ugugccccuuccgccacu

SEQ ID NO: 3461106 - RNA, 20 nt, Human
ugugccccuuccgccacugg

SEQ ID NO: 3461107 - RNA, 21 nt, Human
ugugccccuuccgccacuggg

SEQ ID NO: 3461108 - RNA, 13 nt, Human
ugugcccuaucac

SEQ ID NO: 3461109 - RNA, 13 nt, Human
ugugcccucuggg

SEQ ID NO: 3461110 - RNA, 14 nt, Human
ugugcccucuugau

SEQ ID NO: 3461111 - RNA, 13 nt, Human
ugugcccuggugg

SEQ ID NO: 3461112 - RNA, 14 nt, Human
ugugccgagcccuu

SEQ ID NO: 3461113 - RNA, 16 nt, Human
ugugccucagagacca

SEQ ID NO: 3461114 - RNA, 14 nt, Human
ugugccucccaaaa

SEQ ID NO: 3461115 - RNA, 14 nt, Human
ugugccucccuggu

SEQ ID NO: 3461116 - RNA, 14 nt, Human
ugugccuccucacc

SEQ ID NO: 3461117 - RNA, 19 nt, Human
uguggccccacccugggcc

SEQ ID NO: 3461118 - RNA, 22 nt, Human
uguggccccugaacaagaauug

SEQ ID NO: 3461119 - RNA, 14 nt, Human
uguggcccugccau

SEQ ID NO: 3461120 - RNA, 21 nt, Human
uguggcccugccaucuuccca

SEQ ID NO: 3461121 - RNA, 22 nt, Human
uguggcccugccaucuucccag

SEQ ID NO: 3461122 - RNA, 15 nt, Human
uguggccgaggacuu

SEQ ID NO: 3461123 - RNA, 16 nt, Human
uguggccgaggacuuu

SEQ ID NO: 3461124 - RNA, 19 nt, Human
uguggccuaagaggcugcc

SEQ ID NO: 3461125 - RNA, 10 nt, Human
uguggccuca

SEQ ID NO: 3461126 - RNA, 18 nt, Human
uguggccucuucugagcu

SEQ ID NO: 3461127 - RNA, 15 nt, Human
uguggccuguggccu

SEQ ID NO: 3461128 - RNA, 17 nt, Human
uguggcuacugacauau

SEQ ID NO: 3461129 - RNA, 16 nt, Human
uguggcuagugacaaa

SEQ ID NO: 3461130 - RNA, 16 nt, Human
uguggcucacgugugu

SEQ ID NO: 3461131 - RNA, 20 nt, Human
uguggcuccacacacacaaa

SEQ ID NO: 3461132 - RNA, 14 nt, Human
uguggcuccaggcc

SEQ ID NO: 3461133 - RNA, 20 nt, Human
uguggcuccucccagcccau

SEQ ID NO: 3461134 - RNA, 16 nt, Human
uguggcugaggaggcc

SEQ ID NO: 3461135 - RNA, 16 nt, Human
uguggcugcagcagcg

SEQ ID NO: 3461136 - RNA, 15 nt, Human
uguggcugggggcag

SEQ ID NO: 3461137 - RNA, 18 nt, Human
uguggcugggggcaggag

SEQ ID NO: 3461138 - RNA, 21 nt, Human
uguggcugggggcaggagggc

SEQ ID NO: 3461139 - RNA, 20 nt, Human
uguggcuguagaucccaaga

SEQ ID NO: 3461140 - RNA, 15 nt, Human
uguggcugucagcag

SEQ ID NO: 3461141 - RNA, 19 nt, Human
uguggcugucagcaggaag

SEQ ID NO: 3461142 - RNA, 22 nt, Human
uguggcuucuuaaucuuuucac

SEQ ID NO: 3461143 - RNA, 17 nt, Human
uguggcuuucagccucu

SEQ ID NO: 3461144 - RNA, 18 nt, Human
uguggcuuuuuuaaaaaa

SEQ ID NO: 3461145 - RNA, 19 nt, Human
ugugggaagaaacaaaccc

SEQ ID NO: 3461146 - RNA, 15 nt, Human
ugugggaagggagag

SEQ ID NO: 3461147 - RNA, 15 nt, Human
ugugggaauuuaaga

SEQ ID NO: 3461148 - RNA, 12 nt, Human
ugugggacccca

SEQ ID NO: 3461149 - RNA, 18 nt, Human
ugugggaccccaggccca

SEQ ID NO: 3461150 - RNA, 15 nt, Human
ugugggacuguacac

SEQ ID NO: 3461151 - RNA, 14 nt, Human
ugugggagugugua

SEQ ID NO: 3461152 - RNA, 22 nt, Human
ugugggauguucagcacugucc

SEQ ID NO: 3461153 - RNA, 23 nt, Human
ugugggcacuggcccagguucau

SEQ ID NO: 3461154 - RNA, 13 nt, Human
ugugggccugggc

SEQ ID NO: 3461155 - RNA, 17 nt, Human
ugugggccugggcuccu

SEQ ID NO: 3461156 - RNA, 19 nt, Human
ugugggccugggcuccugg

SEQ ID NO: 3461157 - RNA, 17 nt, Human
ugugggcgggcccagca

SEQ ID NO: 3461158 - RNA, 13 nt, Human
ugugggcucccuu

SEQ ID NO: 3461159 - RNA, 14 nt, Human
ugugggcucccuuc

SEQ ID NO: 3461160 - RNA, 20 nt, Human
uguggggaucucaggggcug

SEQ ID NO: 3461161 - RNA, 16 nt, Human
uguggggauuucuccc

SEQ ID NO: 3461162 - RNA, 16 nt, Human
uguggggauuuucacu

SEQ ID NO: 3461163 - RNA, 21 nt, Human
ugugggggccccgucucaggu

SEQ ID NO: 3461164 - RNA, 13 nt, Human
ugugggggcugca

SEQ ID NO: 3461165 - RNA, 22 nt, Human
uguggggugugcacaucucugc

SEQ ID NO: 3461166 - RNA, 15 nt, Human
uguggguaccuguau

SEQ ID NO: 3461167 - RNA, 14 nt, Human
ugugggucugugug

SEQ ID NO: 3461168 - RNA, 17 nt, Human
uguggguggauauaaau

SEQ ID NO: 3461169 - RNA, 15 nt, Human
uguggguguagccag

SEQ ID NO: 3461170 - RNA, 14 nt, Human
uguggguguuaauu

SEQ ID NO: 3461171 - RNA, 22 nt, Human
uguggguguuaauuuuugauac

SEQ ID NO: 3461172 - RNA, 23 nt, Human
uguggguuucuaaagcugccagc

SEQ ID NO: 3461173 - RNA, 20 nt, Human
ugugguaagcaacauggcuu

SEQ ID NO: 3461174 - RNA, 21 nt, Human
ugugguacaagcauucugucu

SEQ ID NO: 3461175 - RNA, 20 nt, Human
ugugguacagagaagccagc

SEQ ID NO: 3461176 - RNA, 19 nt, Human
ugugguacaugguguuugu

SEQ ID NO: 3461177 - RNA, 20 nt, Human
ugugguagcuuaucuuagaa

SEQ ID NO: 3461178 - RNA, 22 nt, Human
ugugguaggccuuuuaacauuu

SEQ ID NO: 3461179 - RNA, 20 nt, Human
uguggucacaggaaguagag

SEQ ID NO: 3461180 - RNA, 13 nt, Human
uguggucccaccc

SEQ ID NO: 3461181 - RNA, 15 nt, Human
uguggucccacccca

SEQ ID NO: 3461182 - RNA, 13 nt, Human
uguggucucagga

SEQ ID NO: 3461183 - RNA, 16 nt, Human
uguggugacuuuggau

SEQ ID NO: 3461184 - RNA, 16 nt, Human
uguggugagggaagac

SEQ ID NO: 3461185 - RNA, 19 nt, Human
uguggugagguugggcagc

SEQ ID NO: 3461186 - RNA, 15 nt, Human
uguggugaugaugug

SEQ ID NO: 3461187 - RNA, 16 nt, Human
uguggugcugacaaag

SEQ ID NO: 3461188 - RNA, 14 nt, Human
ugugguguaauuua

SEQ ID NO: 3461189 - RNA, 16 nt, Human
ugugguguuuccuggc

SEQ ID NO: 3461190 - RNA, 15 nt, Human
ugugguuaaugccau

SEQ ID NO: 3461191 - RNA, 23 nt, Human
ugugguuauaacuuaaugaaaac

SEQ ID NO: 3461192 - RNA, 18 nt, Human
ugugguuauuuuuauaca

SEQ ID NO: 3461193 - RNA, 19 nt, Human
ugugguuauuuuuauacag

SEQ ID NO: 3461194 - RNA, 13 nt, Human
ugugguuccucug

SEQ ID NO: 3461195 - RNA, 22 nt, Human
ugugguuugguuccucucuggu

SEQ ID NO: 3461196 - RNA, 17 nt, Human
ugugguuuuauggagac

SEQ ID NO: 3461197 - RNA, 18 nt, Human
ugugguuuuccccucccu

SEQ ID NO: 3461198 - RNA, 22 nt, Human
ugugguuuuccccucccugggu

SEQ ID NO: 3461199 - RNA, 18 nt, Human
ugugguuuucgagauuau

SEQ ID NO: 3461200 - RNA, 20 nt, Human
ugugguuuucuuuugccaug

SEQ ID NO: 3461201 - RNA, 15 nt, Human
uguguaaaaagagag

SEQ ID NO: 3461202 - RNA, 21 nt, Human
uguguaaacacagucaaaaua

SEQ ID NO: 3461203 - RNA, 20 nt, Human
uguguaaagaucuacaugaa

SEQ ID NO: 3461204 - RNA, 21 nt, Human
uguguaaaguguaaauccuuu

SEQ ID NO: 3461205 - RNA, 15 nt, Human
uguguaacagcuccu

SEQ ID NO: 3461206 - RNA, 17 nt, Human
uguguaagaaauacaga

SEQ ID NO: 3461207 - RNA, 18 nt, Human
uguguaagagaauguuga

SEQ ID NO: 3461208 - RNA, 13 nt, Human
uguguaagauuug

SEQ ID NO: 3461209 - RNA, 21 nt, Human
uguguaauaaaguguuuucag

SEQ ID NO: 3461210 - RNA, 16 nt, Human
uguguaauagaaaacu

SEQ ID NO: 3461211 - RNA, 23 nt, Human
uguguaauauuacuuuaacaugc

SEQ ID NO: 3461212 - RNA, 21 nt, Human
uguguaaucauuucuugggcc

SEQ ID NO: 3461213 - RNA, 18 nt, Human
uguguaauuuaaaauugu

SEQ ID NO: 3461214 - RNA, 12 nt, Human
uguguaauuuuu

SEQ ID NO: 3461215 - RNA, 15 nt, Human
uguguaauuuuucug

SEQ ID NO: 3461216 - RNA, 13 nt, Human
uguguacacaugg

SEQ ID NO: 3461217 - RNA, 22 nt, Human
uguguacacgggacugacgcaa

SEQ ID NO: 3461218 - RNA, 10 nt, Human
uguguacagg

SEQ ID NO: 3461219 - RNA, 15 nt, Human
uguguacucuggccu

SEQ ID NO: 3461220 - RNA, 21 nt, Human
uguguacuguauagacaguuu

SEQ ID NO: 3461221 - RNA, 15 nt, Human
uguguagauaguaug

SEQ ID NO: 3461222 - RNA, 14 nt, Human
uguguagccuaugu

SEQ ID NO: 3461223 - RNA, 13 nt, Human
uguguagccuuuu

SEQ ID NO: 3461224 - RNA, 13 nt, Human
uaaaagaauuuuu

SEQ ID NO: 3461225 - RNA, 20 nt, Human
uaaaagacaaaucaaagcag

SEQ ID NO: 3461226 - RNA, 23 nt, Human
uaaaagacacuguuuacaagaaa

SEQ ID NO: 3461227 - RNA, 20 nt, Human
uaaaagacagugaaagaaaa

SEQ ID NO: 3461228 - RNA, 18 nt, Human
uaaaagacaguguaugua

SEQ ID NO: 3461229 - RNA, 22 nt, Human
uaaaagacugucuuaauuugca

SEQ ID NO: 3461230 - RNA, 21 nt, Human
uaaaagacuucccuaacacuu

SEQ ID NO: 3461231 - RNA, 17 nt, Human
uaaaagagauuucaaga

SEQ ID NO: 3461232 - RNA, 20 nt, Human
uaaaagagauuucaagagau

SEQ ID NO: 3461233 - RNA, 19 nt, Human
uaaaagagguuuuucuuaa

SEQ ID NO: 3461234 - RNA, 21 nt, Human
uaaaagagguuuuucuuaaau

SEQ ID NO: 3461235 - RNA, 23 nt, Human
uaaaagauaacaagaucuuucag

SEQ ID NO: 3461236 - RNA, 17 nt, Human
uaaaagauacaguuacu

SEQ ID NO: 3461237 - RNA, 16 nt, Human
uaaaagaucuugcaga

SEQ ID NO: 3461238 - RNA, 13 nt, Human
uaaaagaugaaag

SEQ ID NO: 3461239 - RNA, 14 nt, Human
uaaaagaugcuuuu

SEQ ID NO: 3461240 - RNA, 18 nt, Human
uaaaagauggggucugua

SEQ ID NO: 3461241 - RNA, 19 nt, Human
uaaaagauggggucuguaa

SEQ ID NO: 3461242 - RNA, 17 nt, Human
uaaaagcaaaaaagaaa

SEQ ID NO: 3461243 - RNA, 19 nt, Human
uaaaagcaaaaaagaaaac

SEQ ID NO: 3461244 - RNA, 15 nt, Human
uaaaagcaaaauaaa

SEQ ID NO: 3461245 - RNA, 13 nt, Human
uaaaagcaaauca

SEQ ID NO: 3461246 - RNA, 15 nt, Human
uaaaagcaaaucauu

SEQ ID NO: 3461247 - RNA, 20 nt, Human
uaaaagcaacaucagcuuga

SEQ ID NO: 3461248 - RNA, 17 nt, Human
uaaaagcaauuccaacc

SEQ ID NO: 3461249 - RNA, 19 nt, Human
uaaaagcacaaaggaauga

SEQ ID NO: 3461250 - RNA, 13 nt, Human
uaaaagcacgaca

SEQ ID NO: 3461251 - RNA, 17 nt, Human
uaaaagcauaaaugcaa

SEQ ID NO: 3461252 - RNA, 16 nt, Human
uaaaagcauuuuguaa

SEQ ID NO: 3461253 - RNA, 15 nt, Human
uaaaagccaucaugu

SEQ ID NO: 3461254 - RNA, 12 nt, Human
uaaaagcccagg

SEQ ID NO: 3461255 - RNA, 14 nt, Human
uaaaagcccaggag

SEQ ID NO: 3461256 - RNA, 15 nt, Human
uaaaagcccaggagc

SEQ ID NO: 3461257 - RNA, 17 nt, Human
uaaaagcccaggagccc

SEQ ID NO: 3461258 - RNA, 18 nt, Human
uaaaagcccaggagccca

SEQ ID NO: 3461259 - RNA, 12 nt, Human
uaaaagccuugg

SEQ ID NO: 3461260 - RNA, 20 nt, Human
uaaaagcguuggauguagca

SEQ ID NO: 3461261 - RNA, 16 nt, Human
uaaaagcuuucauguc

SEQ ID NO: 3461262 - RNA, 18 nt, Human
ugggccuccucuguccag

SEQ ID NO: 3461263 - RNA, 20 nt, Human
ugggccuccucuguccaggg

SEQ ID NO: 3461264 - RNA, 16 nt, Human
ugggccucugguuugg

SEQ ID NO: 3461265 - RNA, 21 nt, Human
ugggccucugguuuggggcga

SEQ ID NO: 3461266 - RNA, 21 nt, Human
ugggccucuuggaaaaaguga

SEQ ID NO: 3461267 - RNA, 13 nt, Human
ugggccugcagaa

SEQ ID NO: 3461268 - RNA, 14 nt, Human
ugggccugcuccag

SEQ ID NO: 3461269 - RNA, 12 nt, Human
ugggccugcugc

SEQ ID NO: 3461270 - RNA, 13 nt, Human
ugggccugcugcu

SEQ ID NO: 3461271 - RNA, 14 nt, Human
ugggccugcugcug

SEQ ID NO: 3461272 - RNA, 15 nt, Human
ugggccugcugcuga

SEQ ID NO: 3461273 - RNA, 23 nt, Human
ugggccugcugcugagaaccugg

SEQ ID NO: 3461274 - RNA, 14 nt, Human
ugggccugcuuccu

SEQ ID NO: 3461275 - RNA, 21 nt, Human
ugggccuggcucccucacucu

SEQ ID NO: 3461276 - RNA, 18 nt, Human
ugggccugggcuagggga

SEQ ID NO: 3461277 - RNA, 18 nt, Human
ugggccugggcuccugga

SEQ ID NO: 3461278 - RNA, 19 nt, Human
ugggccugggcuccuggac

SEQ ID NO: 3461279 - RNA, 20 nt, Human
ugggccugggcuccuggacc

SEQ ID NO: 3461280 - RNA, 16 nt, Human
ugggccuuagugggcc

SEQ ID NO: 3461281 - RNA, 12 nt, Human
ugggccuugcug

SEQ ID NO: 3461282 - RNA, 15 nt, Human
ugggcgcccuggaag

SEQ ID NO: 3461283 - RNA, 19 nt, Human
ugggcgccgugcugggcag

SEQ ID NO: 3461284 - RNA, 23 nt, Human
ugggcgccgugcugggcagcccg

SEQ ID NO: 3461285 - RNA, 14 nt, Human
ugggcgcugguccu

SEQ ID NO: 3461286 - RNA, 16 nt, Human
ugggcggcucugaagc

SEQ ID NO: 3461287 - RNA, 21 nt, Human
ugggcggcugagagccccagc

SEQ ID NO: 3461288 - RNA, 14 nt, Human
ugggcggcugugcu

SEQ ID NO: 3461289 - RNA, 13 nt, Human
ugggcgggcagca

SEQ ID NO: 3461290 - RNA, 16 nt, Human
ugggcgggcccagcac

SEQ ID NO: 3461291 - RNA, 17 nt, Human
ugggcguacgcuggugc

SEQ ID NO: 3461292 - RNA, 18 nt, Human
ugggcguacgcuggugcu

SEQ ID NO: 3461293 - RNA, 17 nt, Human
ugggcuaauuaaauaaa

SEQ ID NO: 3461294 - RNA, 18 nt, Human
ugggcuauggacacaggg

SEQ ID NO: 3461295 - RNA, 21 nt, Human
ugggcuauggacacaggguga

SEQ ID NO: 3461296 - RNA, 23 nt, Human
ugggcucaagcaauccuccugag

SEQ ID NO: 3461297 - RNA, 16 nt, Human
ugggcuccccucuucc

SEQ ID NO: 3461298 - RNA, 19 nt, Human
ugggcucccugacugggag

SEQ ID NO: 3461299 - RNA, 18 nt, Human
ugggcucccuucccaccu

SEQ ID NO: 3461300 - RNA, 19 nt, Human
ugggcucccuucccaccuc

SEQ ID NO: 3461301 - RNA, 18 nt, Human
ugggcuccgugugggaga

SEQ ID NO: 3461302 - RNA, 13 nt, Human
ugggcuccuccag

SEQ ID NO: 3461303 - RNA, 14 nt, Human
ugggcucgcccacc

SEQ ID NO: 3461304 - RNA, 17 nt, Human
ugggcucggaggcugcc

SEQ ID NO: 3461305 - RNA, 17 nt, Human
ugggcucgucuuugcag

SEQ ID NO: 3461306 - RNA, 14 nt, Human
ugggcucuccaccu

SEQ ID NO: 3461307 - RNA, 17 nt, Human
ugggcucuccaccucag

SEQ ID NO: 3461308 - RNA, 13 nt, Human
ugggcucuccggg

SEQ ID NO: 3461309 - RNA, 19 nt, Human
ugggcucugacagaaagca

SEQ ID NO: 3461310 - RNA, 15 nt, Human
ugggcucugaugaaa

SEQ ID NO: 3461311 - RNA, 20 nt, Human
ugggcucugcaauuccccuc

SEQ ID NO: 3461312 - RNA, 18 nt, Human
ugggcucugccacccuac

SEQ ID NO: 3461313 - RNA, 15 nt, Human
ugggcucugccccag

SEQ ID NO: 3461314 - RNA, 17 nt, Human
ugggcucugccccagcu

SEQ ID NO: 3461315 - RNA, 20 nt, Human
ugggcucugccccagcucug

SEQ ID NO: 3461316 - RNA, 23 nt, Human
ugggcucugccccagcucuggcu

SEQ ID NO: 3461317 - RNA, 18 nt, Human
ugggcucugugcagucac

SEQ ID NO: 3461318 - RNA, 15 nt, Human
ugggcugagacugga

SEQ ID NO: 3461319 - RNA, 14 nt, Human
ugggcugagccccu

SEQ ID NO: 3461320 - RNA, 17 nt, Human
ugggcugagccccuacc

SEQ ID NO: 3461321 - RNA, 18 nt, Human
ugggcugagccccuaccc

SEQ ID NO: 3461322 - RNA, 17 nt, Human
ugggcugagcccuggca

SEQ ID NO: 3461323 - RNA, 16 nt, Human
ugggcugagggagccu

SEQ ID NO: 3461324 - RNA, 17 nt, Human
ugggcugcacucugugc

SEQ ID NO: 3461325 - RNA, 21 nt, Human
ugggcugcagcagaggcacug

SEQ ID NO: 3461326 - RNA, 13 nt, Human
ugggcugcccugg

SEQ ID NO: 3461327 - RNA, 14 nt, Human
ugggcugcccuggu

SEQ ID NO: 3461328 - RNA, 16 nt, Human
ugggcugcccuggugc

SEQ ID NO: 3461329 - RNA, 21 nt, Human
ugggcugcccuggugcugcca

SEQ ID NO: 3461330 - RNA, 23 nt, Human
ugggcuggacuucuaccugcccu

SEQ ID NO: 3461331 - RNA, 15 nt, Human
ugggcuggaugagcu

SEQ ID NO: 3461332 - RNA, 12 nt, Human
ugggcugggcac

SEQ ID NO: 3461333 - RNA, 14 nt, Human
ugggcugggcccuc

SEQ ID NO: 3461334 - RNA, 22 nt, Human
ugggcugggcccucucuucuca

SEQ ID NO: 3461335 - RNA, 20 nt, Human
ugggcugggugcgaccccau

SEQ ID NO: 3461336 - RNA, 18 nt, Human
ugggcuggguucuaccca

SEQ ID NO: 3461337 - RNA, 18 nt, Human
ugggcugguaucucagaa

SEQ ID NO: 3461338 - RNA, 21 nt, Human
ugggcugguaucucagaaagu

SEQ ID NO: 3461339 - RNA, 17 nt, Human
ugggcuggugucaccug

SEQ ID NO: 3461340 - RNA, 12 nt, Human
ugggcugugagu

SEQ ID NO: 3461341 - RNA, 15 nt, Human
ugggcugugagugua

SEQ ID NO: 3461342 - RNA, 19 nt, Human
ugggcuguuggcacucaca

SEQ ID NO: 3461343 - RNA, 23 nt, Human
ugggcuguuggcacucacagacc

SEQ ID NO: 3461344 - RNA, 16 nt, Human
ugggcuucacuguaua

SEQ ID NO: 3461345 - RNA, 11 nt, Human
ugggcuucagc

SEQ ID NO: 3461346 - RNA, 18 nt, Human
ugggcuucagggcaggug

SEQ ID NO: 3461347 - RNA, 20 nt, Human
ugggcuucaguggcagcugc

SEQ ID NO: 3461348 - RNA, 19 nt, Human
ugggcuuccauuugugugu

SEQ ID NO: 3461349 - RNA, 23 nt, Human
ugggcuucccaguggcugcugcc

SEQ ID NO: 3461350 - RNA, 14 nt, Human
ugggcuuccuggag

SEQ ID NO: 3461351 - RNA, 17 nt, Human
ugggcuuccuggagcag

SEQ ID NO: 3461352 - RNA, 20 nt, Human
ugggcuuccuggagcagaag

SEQ ID NO: 3461353 - RNA, 12 nt, Human
ugggcuucugug

SEQ ID NO: 3461354 - RNA, 14 nt, Human
ugggcuugaccagg

SEQ ID NO: 3461355 - RNA, 17 nt, Human
ugggcuugcuauucugu

SEQ ID NO: 3461356 - RNA, 19 nt, Human
ugggcuuggccugcuguga

SEQ ID NO: 3461357 - RNA, 19 nt, Human
ugggcuugggccuaggcug

SEQ ID NO: 3461358 - RNA, 19 nt, Human
ugggcuuggggaccagagc

SEQ ID NO: 3461359 - RNA, 17 nt, Human
ugggcuuugauuccauc

SEQ ID NO: 3461360 - RNA, 23 nt, Human
ugggcuuugauuccaucuccuug

SEQ ID NO: 3461361 - RNA, 18 nt, Human
uggggaaacagcaucucc

SEQ ID NO: 3461362 - RNA, 16 nt, Human
uggggaaacuggccau

SEQ ID NO: 3461363 - RNA, 18 nt, Human
uggggaaacuggccaugg

SEQ ID NO: 3461364 - RNA, 19 nt, Human
uggggaacaaggguggcau

SEQ ID NO: 3461365 - RNA, 18 nt, Human
uggggaacauuucuguaa

SEQ ID NO: 3461366 - RNA, 18 nt, Human
uggggaagacaguggccc

SEQ ID NO: 3461367 - RNA, 14 nt, Human
uggggaagacugug

SEQ ID NO: 3461368 - RNA, 17 nt, Human
uggggaagagagccugc

SEQ ID NO: 3461369 - RNA, 22 nt, Human
uggggaagagagccugcaggau

SEQ ID NO: 3461370 - RNA, 15 nt, Human
uggggaaggagccag

SEQ ID NO: 3461371 - RNA, 16 nt, Human
uggggaagggccugcc

SEQ ID NO: 3461372 - RNA, 16 nt, Human
uggggaagugaggaag

SEQ ID NO: 3461373 - RNA, 14 nt, Human
uggggaaugaagau

SEQ ID NO: 3461374 - RNA, 14 nt, Human
uggggaauuuccuc

SEQ ID NO: 3461375 - RNA, 16 nt, Human
uggggaauuuccucua

SEQ ID NO: 3461376 - RNA, 17 nt, Human
uggggacagagcagaac

SEQ ID NO: 3461377 - RNA, 19 nt, Human
uggggacagauucagucuu

SEQ ID NO: 3461378 - RNA, 13 nt, Human
uggggacagggcu

SEQ ID NO: 3461379 - RNA, 16 nt, Human
uguguagcugugaccu

SEQ ID NO: 3461380 - RNA, 14 nt, Human
uguguagcuuugcu

SEQ ID NO: 3461381 - RNA, 12 nt, Human
uguguagggcgg

SEQ ID NO: 3461382 - RNA, 17 nt, Human
uguguaguucauguaaa

SEQ ID NO: 3461383 - RNA, 21 nt, Human
uguguauaaacaagaaaaaua

SEQ ID NO: 3461384 - RNA, 17 nt, Human
uguguauaagugcacac

SEQ ID NO: 3461385 - RNA, 16 nt, Human
uguguauacagcccug

SEQ ID NO: 3461386 - RNA, 15 nt, Human
uguguauacaugcca

SEQ ID NO: 3461387 - RNA, 14 nt, Human
uguguauauauaca

SEQ ID NO: 3461388 - RNA, 19 nt, Human
uguguauauauuuugugug

SEQ ID NO: 3461389 - RNA, 18 nt, Human
uguguauauuauuuggca

SEQ ID NO: 3461390 - RNA, 19 nt, Human
uguguauccauuaucaugu

SEQ ID NO: 3461391 - RNA, 24 nt, Human
uguguauccauuaucauguguaau

SEQ ID NO: 3461392 - RNA, 17 nt, Human
uguguaucucuuucaca

SEQ ID NO: 3461393 - RNA, 15 nt, Human
uguguaugcugcuuu

SEQ ID NO: 3461394 - RNA, 14 nt, Human
uguguaugggcaaa

SEQ ID NO: 3461395 - RNA, 11 nt, Human
uguguaugugg

SEQ ID NO: 3461396 - RNA, 14 nt, Human
uguguauguggggg

SEQ ID NO: 3461397 - RNA, 12 nt, Human
uguguaugugua

SEQ ID NO: 3461398 - RNA, 13 nt, Human
uguguaugugugu

SEQ ID NO: 3461399 - RNA, 14 nt, Human
uguguauuaaaaaa

SEQ ID NO: 3461400 - RNA, 14 nt, Human
uguguauucuuaaa

SEQ ID NO: 3461401 - RNA, 14 nt, Human
uguguauuguuccc

SEQ ID NO: 3461402 - RNA, 20 nt, Human
uguguauuguuguaaaaugu

SEQ ID NO: 3461403 - RNA, 13 nt, Human
uguguauuuaaca

SEQ ID NO: 3461404 - RNA, 16 nt, Human
uguguauuucuuauac

SEQ ID NO: 3461405 - RNA, 16 nt, Human
ugugucaaugggcaau

SEQ ID NO: 3461406 - RNA, 18 nt, Human
ugugucacuggcugccuc

SEQ ID NO: 3461407 - RNA, 23 nt, Human
ugugucacuggcugccuccacuc

SEQ ID NO: 3461408 - RNA, 22 nt, Human
ugguggcccucuccccugcccc

SEQ ID NO: 3461409 - RNA, 23 nt, Human
ugguggcccucuccccugccccc

SEQ ID NO: 3461410 - RNA, 17 nt, Human
ugguggcgcaagccugu

SEQ ID NO: 3461411 - RNA, 23 nt, Human
uggugggcuugucauagccagug

SEQ ID NO: 3461412 - RNA, 16 nt, Human
uggugggggccucggu

SEQ ID NO: 3461413 - RNA, 17 nt, Human
ugguggggguagagcug

SEQ ID NO: 3461414 - RNA, 21 nt, Human
ugguggggguagagcugaucc

SEQ ID NO: 3461415 - RNA, 16 nt, Human
ugguggguccaugggc

SEQ ID NO: 3461416 - RNA, 21 nt, Human
uggugggugaaagaaaucaug

SEQ ID NO: 3461417 - RNA, 15 nt, Human
uggugguaucugagu

SEQ ID NO: 3461418 - RNA, 20 nt, Human
uggugguugggacccagugg

SEQ ID NO: 3461419 - RNA, 13 nt, Human
ugguguaauaaga

SEQ ID NO: 3461420 - RNA, 14 nt, Human
ugguguaauaagac

SEQ ID NO: 3461421 - RNA, 16 nt, Human
ugguguaauaagacau

SEQ ID NO: 3461422 - RNA, 19 nt, Human
ugguguaauaagacauaac

SEQ ID NO: 3461423 - RNA, 15 nt, Human
ugguguaauuugaag

SEQ ID NO: 3461424 - RNA, 18 nt, Human
ugguguagcccucccacu

SEQ ID NO: 3461425 - RNA, 19 nt, Human
uggugucaacaugaaacac

SEQ ID NO: 3461426 - RNA, 19 nt, Human
uggugucaccccagagcca

SEQ ID NO: 3461427 - RNA, 12 nt, Human
uggugucacugu

SEQ ID NO: 3461428 - RNA, 14 nt, Human
uggugucacugucc

SEQ ID NO: 3461429 - RNA, 22 nt, Human
uggugucacugucccuccuggu

SEQ ID NO: 3461430 - RNA, 15 nt, Human
ugguguccaccuggc

SEQ ID NO: 3461431 - RNA, 13 nt, Human
ugguguccagcug

SEQ ID NO: 3461432 - RNA, 15 nt, Human
ugguguccugaccac

SEQ ID NO: 3461433 - RNA, 19 nt, Human
ugguguccugaccacccuc

SEQ ID NO: 3461434 - RNA, 19 nt, Human
ugguguccuuucccuccac

SEQ ID NO: 3461435 - RNA, 15 nt, Human
uggugucgggcauga

SEQ ID NO: 3461436 - RNA, 19 nt, Human
uggugucuccaacccccca

SEQ ID NO: 3461437 - RNA, 23 nt, Human
uggugucucuucuuuagaacagg

SEQ ID NO: 3461438 - RNA, 14 nt, Human
uggugucugccugu

SEQ ID NO: 3461439 - RNA, 17 nt, Human
uggugugaacccgggag

SEQ ID NO: 3461440 - RNA, 11 nt, Human
uggugugaagg

SEQ ID NO: 3461441 - RNA, 18 nt, Human
uggugugacccucugaau

SEQ ID NO: 3461442 - RNA, 18 nt, Human
uggugugaucgucugacu

SEQ ID NO: 3461443 - RNA, 22 nt, Human
uggugugaucuuaauauauuug

SEQ ID NO: 3461444 - RNA, 14 nt, Human
ugguguggccugug

SEQ ID NO: 3461445 - RNA, 14 nt, Human
uggugugguacaga

SEQ ID NO: 3461446 - RNA, 15 nt, Human
uggugugguacagag

SEQ ID NO: 3461447 - RNA, 22 nt, Human
uggugugucccauugguguugu

SEQ ID NO: 3461448 - RNA, 15 nt, Human
ugguguguguaugcg

SEQ ID NO: 3461449 - RNA, 11 nt, Human
ugguguuaaca

SEQ ID NO: 3461450 - RNA, 20 nt, Human
ugguguuaacagaagggagg

SEQ ID NO: 3461451 - RNA, 17 nt, Human
ugguguuacugcaguug

SEQ ID NO: 3461452 - RNA, 19 nt, Human
ugguguuauuugaaacuuu

SEQ ID NO: 3461453 - RNA, 22 nt, Human
ugguguucaaaaaacuuguaaa

SEQ ID NO: 3461454 - RNA, 13 nt, Human
ugguguugcagaa

SEQ ID NO: 3461455 - RNA, 17 nt, Human
ugguguugcagaagguu

SEQ ID NO: 3461456 - RNA, 21 nt, Human
ugguguuucuagcacuggccu

SEQ ID NO: 3461457 - RNA, 16 nt, Human
ugguguuucucccucu

SEQ ID NO: 3461458 - RNA, 17 nt, Human
ugguguuuuaaagagaa

SEQ ID NO: 3461459 - RNA, 20 nt, Human
ugguguuuuggggaugagag

SEQ ID NO: 3461460 - RNA, 18 nt, Human
ugguguuuuucuuguaaa

SEQ ID NO: 3461461 - RNA, 22 nt, Human
ugguguuuuuuucuaugggugu

SEQ ID NO: 3461462 - RNA, 17 nt, Human
ugguuaaaaaaaagaau

SEQ ID NO: 3461463 - RNA, 22 nt, Human
ugguuaaaacuguacauuuaaa

SEQ ID NO: 3461464 - RNA, 13 nt, Human
ugguuacacuguu

SEQ ID NO: 3461465 - RNA, 21 nt, Human
ugguuacacuguuagaacacu

SEQ ID NO: 3461466 - RNA, 22 nt, Human
ugguuacacuguuagaacacua

SEQ ID NO: 3461467 - RNA, 15 nt, Human
ugguuaccaugucuu

SEQ ID NO: 3461468 - RNA, 15 nt, Human
ugguuacuucuucuc

SEQ ID NO: 3461469 - RNA, 18 nt, Human
ugguuacuucuucucuua

SEQ ID NO: 3461470 - RNA, 13 nt, Human
ugguuagaaaaca

SEQ ID NO: 3461471 - RNA, 13 nt, Human
ugguuagcucagc

SEQ ID NO: 3461472 - RNA, 16 nt, Human
ugguuagcucagcccc

SEQ ID NO: 3461473 - RNA, 19 nt, Human
ugguuagcucagccccagc

SEQ ID NO: 3461474 - RNA, 20 nt, Human
ugguuagcucagccccagcc

SEQ ID NO: 3461475 - RNA, 22 nt, Human
ugguuagcucagccccagccca

SEQ ID NO: 3461476 - RNA, 16 nt, Human
ugguuauaaaagugau

SEQ ID NO: 3461477 - RNA, 13 nt, Human
ugguuauacauga

SEQ ID NO: 3461478 - RNA, 17 nt, Human
ugguuauacaugacacu

SEQ ID NO: 3461479 - RNA, 13 nt, Human
ugguuaugaaaga

SEQ ID NO: 3461480 - RNA, 13 nt, Human
ugguuauguuuuu

SEQ ID NO: 3461481 - RNA, 19 nt, Human
ugguuauguuuuucugugu

SEQ ID NO: 3461482 - RNA, 15 nt, Human
ugguuauuucucuga

SEQ ID NO: 3461483 - RNA, 15 nt, Human
ugguuauuuuacuuu

SEQ ID NO: 3461484 - RNA, 20 nt, Human
ugguucacucuuggagccug

SEQ ID NO: 3461485 - RNA, 21 nt, Human
ugguucagaauuaaacuuuua

SEQ ID NO: 3461486 - RNA, 20 nt, Human
ugguucaggguuggccccug

SEQ ID NO: 3461487 - RNA, 16 nt, Human
ugguucaucaguguua

SEQ ID NO: 3461488 - RNA, 19 nt, Human
ugguuccaugccugagggu

SEQ ID NO: 3461489 - RNA, 17 nt, Human
ugguucccuugaugaag

SEQ ID NO: 3461490 - RNA, 12 nt, Human
ugguuccucccc

SEQ ID NO: 3461491 - RNA, 12 nt, Human
ugguuccucugc

SEQ ID NO: 3461492 - RNA, 12 nt, Human
ugguuccugggg

SEQ ID NO: 3461493 - RNA, 14 nt, Human
ugguuccuggggca

SEQ ID NO: 3461494 - RNA, 15 nt, Human
ugguucucaaugaaa

SEQ ID NO: 3461495 - RNA, 18 nt, Human
ugguucucaauuccaaca

SEQ ID NO: 3461496 - RNA, 23 nt, Human
ugguucucaauuccaacaguuua

SEQ ID NO: 3461497 - RNA, 14 nt, Human
ugguucucaucuuu

SEQ ID NO: 3461498 - RNA, 15 nt, Human
ugguucucaucuuuc

SEQ ID NO: 3461499 - RNA, 12 nt, Human
ugguucuggggc

SEQ ID NO: 3461500 - RNA, 12 nt, Human
ugguucuucuca

SEQ ID NO: 3461501 - RNA, 19 nt, Human
ugguucuucucaaaagaac

SEQ ID NO: 3461502 - RNA, 21 nt, Human
ugguucuugguagagauucau

SEQ ID NO: 3461503 - RNA, 18 nt, Human
ugguucuuguauuaagaa

SEQ ID NO: 3461504 - RNA, 23 nt, Human
ugguugaacucugguggcacagg

SEQ ID NO: 3461505 - RNA, 12 nt, Human
ugguugaauaaa

SEQ ID NO: 3461506 - RNA, 12 nt, Human
ugguugaggaaa

SEQ ID NO: 3461507 - RNA, 13 nt, Human
ugguugcauccua

SEQ ID NO: 3461508 - RNA, 11 nt, Human
ugguugcaugg

SEQ ID NO: 3461509 - RNA, 17 nt, Human
ugguugccuuaaagaaa

SEQ ID NO: 3461510 - RNA, 13 nt, Human
ugguugcugugug

SEQ ID NO: 3461511 - RNA, 19 nt, Human
ugguugcuguuuuccuccc

SEQ ID NO: 3461512 - RNA, 18 nt, Human
ugguugcuuuaauaucau

SEQ ID NO: 3461513 - RNA, 14 nt, Human
ugguugggacccag

SEQ ID NO: 3461514 - RNA, 15 nt, Human
ugguuggguccucac

SEQ ID NO: 3461515 - RNA, 17 nt, Human
ugguugguuuucuucuu

SEQ ID NO: 3461516 - RNA, 20 nt, Human
ugguuguacauauaagugau

SEQ ID NO: 3461517 - RNA, 11 nt, Human
ugguuguauuc

SEQ ID NO: 3461518 - RNA, 17 nt, Human
ugguuguauucuuugau

SEQ ID NO: 3461519 - RNA, 15 nt, Human
ugguugucaauauua

SEQ ID NO: 3461520 - RNA, 21 nt, Human
ugguuguuaguuauagauguc

SEQ ID NO: 3461521 - RNA, 15 nt, Human
ugguuuaaaagaaaa

SEQ ID NO: 3461522 - RNA, 19 nt, Human
ugguuuaaagaaaguguau

SEQ ID NO: 3461523 - RNA, 23 nt, Human
ugguuuaaugcaauagaagugcu

SEQ ID NO: 3461524 - RNA, 15 nt, Human
ugguuuacaggcccu

SEQ ID NO: 3461525 - RNA, 22 nt, Human
ugguuuacaggcccugcuccug

SEQ ID NO: 3461526 - RNA, 23 nt, Human
ugguuuacauuuaaagcauugcu

SEQ ID NO: 3461527 - RNA, 21 nt, Human
ugguuuaguguaaaaaugaga

SEQ ID NO: 3461528 - RNA, 18 nt, Human
ugguuuaucagcaaaaaa

SEQ ID NO: 3461529 - RNA, 12 nt, Human
ugguuuauguca

SEQ ID NO: 3461530 - RNA, 22 nt, Human
ugguuuauuuuguauuguggua

SEQ ID NO: 3461531 - RNA, 18 nt, Human
ugguuucacuggcccaag

SEQ ID NO: 3461532 - RNA, 14 nt, Human
ugguuucagaaaug

SEQ ID NO: 3461533 - RNA, 15 nt, Human
ugguuucagaaaugu

SEQ ID NO: 3461534 - RNA, 13 nt, Human
ugguuucagcaau

SEQ ID NO: 3461535 - RNA, 23 nt, Human
ugguuucagcacuagccaaaccu

SEQ ID NO: 3461536 - RNA, 22 nt, Human
ugguuuccaaggagcugagaau

SEQ ID NO: 3461537 - RNA, 21 nt, Human
ugguuuccacgaugaaaaacu

SEQ ID NO: 3461538 - RNA, 13 nt, Human
ugguuuccugccc

SEQ ID NO: 3461539 - RNA, 15 nt, Human
ugguuucgaacuccu

SEQ ID NO: 3461540 - RNA, 12 nt, Human
ugguuucuccag

SEQ ID NO: 3461541 - RNA, 15 nt, Human
ugguuucuuuuugaa

SEQ ID NO: 3461542 - RNA, 23 nt, Human
ugguuugaaaauauuuucauuau

SEQ ID NO: 3461543 - RNA, 23 nt, Human
ugguuugagcuuagugaaauuac

SEQ ID NO: 3461544 - RNA, 15 nt, Human
ugguuugcaaggaag

SEQ ID NO: 3461545 - RNA, 17 nt, Human
ugguuugcaaggaagcc

SEQ ID NO: 3461546 - RNA, 14 nt, Human
ugguuugcagauga

SEQ ID NO: 3461547 - RNA, 17 nt, Human
ugguuugcagaugacaa

SEQ ID NO: 3461548 - RNA, 19 nt, Human
ugguuugcagcgacuggca

SEQ ID NO: 3461549 - RNA, 15 nt, Human
ugguuugcagguggc

SEQ ID NO: 3461550 - RNA, 16 nt, Human
ugguuugccuuccaga

SEQ ID NO: 3461551 - RNA, 17 nt, Human
ugguuugccuuccagaa

SEQ ID NO: 3461552 - RNA, 14 nt, Human
ugguuugcuacuuc

SEQ ID NO: 3461553 - RNA, 16 nt, Human
ugguuuggaaugcuuc

SEQ ID NO: 3461554 - RNA, 18 nt, Human
uguaacuacuuuauaacu

SEQ ID NO: 3461555 - RNA, 21 nt, Human
uguaacuaggcucagagaugu

SEQ ID NO: 3461556 - RNA, 19 nt, Human
uguaacuauaguccagcuu

SEQ ID NO: 3461557 - RNA, 17 nt, Human
uguaacuauguuuuauc

SEQ ID NO: 3461558 - RNA, 12 nt, Human
uguaacuccacc

SEQ ID NO: 3461559 - RNA, 12 nt, Human
uguaacucuaaa

SEQ ID NO: 3461560 - RNA, 17 nt, Human
uguaacucuaaaagauc

SEQ ID NO: 3461561 - RNA, 23 nt, Human
uguaacugcauugagaacugcau

SEQ ID NO: 3461562 - RNA, 18 nt, Human
uguaacugcccaaagcag

SEQ ID NO: 3461563 - RNA, 22 nt, Human
uguaacugcucuugggcaauau

SEQ ID NO: 3461564 - RNA, 21 nt, Human
uguaacuguuaccauuggaaa

SEQ ID NO: 3461565 - RNA, 13 nt, Human
uguaacuuaugua

SEQ ID NO: 3461566 - RNA, 20 nt, Human
uguaacuuauguagauauuu

SEQ ID NO: 3461567 - RNA, 21 nt, Human
uguaacuuccaaauaaauaau

SEQ ID NO: 3461568 - RNA, 24 nt, Human
uguaacuugaaccuaugaagcaau

SEQ ID NO: 3461569 - RNA, 23 nt, Human
uguaacuugauccauuucuaauu

SEQ ID NO: 3461570 - RNA, 18 nt, Human
uguaacuuucucuaugaa

SEQ ID NO: 3461571 - RNA, 22 nt, Human
uguaagaaacacacugaggcag

SEQ ID NO: 3461572 - RNA, 18 nt, Human
uguaagaaaccaaucaag

SEQ ID NO: 3461573 - RNA, 15 nt, Human
uguaagaacuaaaga

SEQ ID NO: 3461574 - RNA, 22 nt, Human
uguaagaacuaaagaagaucug

SEQ ID NO: 3461575 - RNA, 16 nt, Human
uguaagaauaauuuau

SEQ ID NO: 3461576 - RNA, 20 nt, Human
uguaagacaaagguuuuccu

SEQ ID NO: 3461577 - RNA, 21 nt, Human
uguaagacaaagguuuuccuc

SEQ ID NO: 3461578 - RNA, 12 nt, Human
uguaagaugcug

SEQ ID NO: 3461579 - RNA, 13 nt, Human
uguaagaugucug

SEQ ID NO: 3461580 - RNA, 19 nt, Human
uguaagauuauagauucua

SEQ ID NO: 3461581 - RNA, 23 nt, Human
uguaagauuauagauucuaaaga

SEQ ID NO: 3461582 - RNA, 14 nt, Human
uguaagauuuugaa

SEQ ID NO: 3461583 - RNA, 15 nt, Human
uguaagauuuugaaa

SEQ ID NO: 3461584 - RNA, 16 nt, Human
uguaagauuuugaaaa

SEQ ID NO: 3461585 - RNA, 18 nt, Human
uguaagccaaagaaauga

SEQ ID NO: 3461586 - RNA, 22 nt, Human
uguaagccaaagaaaugaacau

SEQ ID NO: 3461587 - RNA, 14 nt, Human
uguaagccugcaag

SEQ ID NO: 3461588 - RNA, 21 nt, Human
uguaagcguauggcuuuauuu

SEQ ID NO: 3461589 - RNA, 14 nt, Human
uguaagcugaaaau

SEQ ID NO: 3461590 - RNA, 13 nt, Human
uguaagcugaagu

SEQ ID NO: 3461591 - RNA, 23 nt, Human
uguaagcuguuugguuuuaaaau

SEQ ID NO: 3461592 - RNA, 14 nt, Human
uguaaggaaugauu

SEQ ID NO: 3461593 - RNA, 19 nt, Human
uguaaggaaugcuuggaau

SEQ ID NO: 3461594 - RNA, 15 nt, Human
uguaaggcaaucaug

SEQ ID NO: 3461595 - RNA, 18 nt, Human
uguaagggaaacugccag

SEQ ID NO: 3461596 - RNA, 18 nt, Human
uguaagggccagaaauau

SEQ ID NO: 3461597 - RNA, 19 nt, Human
uguaagucaguguugagau

SEQ ID NO: 3461598 - RNA, 18 nt, Human
uguaagugagagagacaa

SEQ ID NO: 3461599 - RNA, 17 nt, Human
uguaagugugaguaaga

SEQ ID NO: 3461600 - RNA, 16 nt, Human
uguaaguuauuucuug

SEQ ID NO: 3461601 - RNA, 22 nt, Human
uguaaguuauuucuuguuuguu

SEQ ID NO: 3461602 - RNA, 14 nt, Human
uguaaguucacaac

SEQ ID NO: 3461603 - RNA, 19 nt, Human
uguaaguugggcuugcuau

SEQ ID NO: 3461604 - RNA, 21 nt, Human
uguaaguugggcuugcuauuc

SEQ ID NO: 3461605 - RNA, 20 nt, Human
uguaaguuuaccuauguaac

SEQ ID NO: 3461606 - RNA, 13 nt, Human
uguaaguuucagg

SEQ ID NO: 3461607 - RNA, 14 nt, Human
uguuuguguauuua

SEQ ID NO: 3461608 - RNA, 11 nt, Human
uguuugugugu

SEQ ID NO: 3461609 - RNA, 17 nt, Human
uguuuguugcuggcuug

SEQ ID NO: 3461610 - RNA, 17 nt, Human
uguuuguugucagcuga

SEQ ID NO: 3461611 - RNA, 13 nt, Human
uguuuguuuaauu

SEQ ID NO: 3461612 - RNA, 12 nt, Human
uguuuguuuagu

SEQ ID NO: 3461613 - RNA, 17 nt, Human
uguuuguuuccuuuguu

SEQ ID NO: 3461614 - RNA, 13 nt, Human
uguuuguuucuuu

SEQ ID NO: 3461615 - RNA, 17 nt, Human
uguuuuaaaaaccuguu

SEQ ID NO: 3461616 - RNA, 12 nt, Human
uguuuuaaaaag

SEQ ID NO: 3461617 - RNA, 21 nt, Human
uguuuuaaaaaggaacugcag

SEQ ID NO: 3461618 - RNA, 23 nt, Human
uguuuuaaaaaggaacugcagca

SEQ ID NO: 3461619 - RNA, 20 nt, Human
uguuuuaaacauagaaaguu

SEQ ID NO: 3461620 - RNA, 22 nt, Human
uguuuuaaauacgcacuacaug

SEQ ID NO: 3461621 - RNA, 14 nt, Human
uguuuuaacaaaaa

SEQ ID NO: 3461622 - RNA, 23 nt, Human
uguuuuaagaaauguaguugaug

SEQ ID NO: 3461623 - RNA, 23 nt, Human
uguuuuaaggaugcuuguacaua

SEQ ID NO: 3461624 - RNA, 22 nt, Human
uguuuuaauuuauacuggcaug

SEQ ID NO: 3461625 - RNA, 13 nt, Human
uguuuuacaauag

SEQ ID NO: 3461626 - RNA, 13 nt, Human
uguuuuacaaugu

SEQ ID NO: 3461627 - RNA, 15 nt, Human
uguuuuacacuguac

SEQ ID NO: 3461628 - RNA, 16 nt, Human
uguuuuacugcuuuua

SEQ ID NO: 3461629 - RNA, 19 nt, Human
uguuuuagaaugaugcaca

SEQ ID NO: 3461630 - RNA, 19 nt, Human
uguuuuagacaaauacuca

SEQ ID NO: 3461631 - RNA, 19 nt, Human
uguuuuagaguuaacaaug

SEQ ID NO: 3461632 - RNA, 23 nt, Human
uguuuuagguuaaaaaaaggcau

SEQ ID NO: 3461633 - RNA, 15 nt, Human
uguuuuauaaguuca

SEQ ID NO: 3461634 - RNA, 13 nt, Human
uguuuuauaauuu

SEQ ID NO: 3461635 - RNA, 14 nt, Human
uguuuuaugagaaa

SEQ ID NO: 3461636 - RNA, 18 nt, Human
uguuuuauuuuuuauugu

SEQ ID NO: 3461637 - RNA, 23 nt, Human
uguuuucaaaccaguauacaaga

SEQ ID NO: 3461638 - RNA, 14 nt, Human
uguuuucaaaugga

SEQ ID NO: 3461639 - RNA, 18 nt, Human
uguuuucaauuuuaaaca

SEQ ID NO: 3461640 - RNA, 15 nt, Human
uguuuucauaauaaa

SEQ ID NO: 3461641 - RNA, 20 nt, Human
uguuuucauggugaaaaugu

SEQ ID NO: 3461642 - RNA, 19 nt, Human
uguuuucauguaaauaaau

SEQ ID NO: 3461643 - RNA, 15 nt, Human
uguuuuccagcuccu

SEQ ID NO: 3461644 - RNA, 23 nt, Human
uguuuucccgagcaaagucuaaa

SEQ ID NO: 3461645 - RNA, 19 nt, Human
uguuuuccgugaaaacgga

SEQ ID NO: 3461646 - RNA, 14 nt, Human
uguuuuccucccuu

SEQ ID NO: 3461647 - RNA, 23 nt, Human
uguuuuccucccuucugcuacug

SEQ ID NO: 3461648 - RNA, 19 nt, Human
uguuuucuaguguaucaaa

SEQ ID NO: 3461649 - RNA, 16 nt, Human
uguuuucugacuaauu

SEQ ID NO: 3461650 - RNA, 14 nt, Human
uguuuucuguguaa

SEQ ID NO: 3461651 - RNA, 15 nt, Human
uguuuucuguguaac

SEQ ID NO: 3461652 - RNA, 11 nt, Human
uguuuucuucu

SEQ ID NO: 3461653 - RNA, 21 nt, Human
uguuuucuuuaaagauguaau

SEQ ID NO: 3461654 - RNA, 20 nt, Human
uguuuucuuucuuuaaaugu

SEQ ID NO: 3461655 - RNA, 21 nt, Human
uguuuucuuucuuuaaauguu

SEQ ID NO: 3461656 - RNA, 17 nt, Human
uguuuugaaaucaaugc

SEQ ID NO: 3461657 - RNA, 16 nt, Human
uguuuugagcuuucca

SEQ ID NO: 3461658 - RNA, 11 nt, Human
uguuuugcaag

SEQ ID NO: 3461659 - RNA, 12 nt, Human
uguuuugcacuu

SEQ ID NO: 3461660 - RNA, 13 nt, Human
uguuuugcacuuu

SEQ ID NO: 3461661 - RNA, 16 nt, Human
uguuuugccaacauug

SEQ ID NO: 3461662 - RNA, 22 nt, Human
uguuuugccaauuugcacauua

SEQ ID NO: 3461663 - RNA, 14 nt, Human
uguuuugcuaaagg

SEQ ID NO: 3461664 - RNA, 21 nt, Human
uguuuuggauuuggagagaaa

SEQ ID NO: 3461665 - RNA, 20 nt, Human
uguuuuggggaugagagggu

SEQ ID NO: 3461666 - RNA, 19 nt, Human
uguuuuggguagcugccac

SEQ ID NO: 3461667 - RNA, 22 nt, Human
uguuuugguaucuguucuuuaa

SEQ ID NO: 3461668 - RNA, 22 nt, Human
uguuuuguaaacuuugaaauau

SEQ ID NO: 3461669 - RNA, 12 nt, Human
uguuuuguaaag

SEQ ID NO: 3461670 - RNA, 13 nt, Human
uguuuuguaccag

SEQ ID NO: 3461671 - RNA, 14 nt, Human
uguuuuguaccagu

SEQ ID NO: 3461672 - RNA, 17 nt, Human
uguuuugugaauuuucu

SEQ ID NO: 3461673 - RNA, 15 nt, Human
uguuuugugcauuug

SEQ ID NO: 3461674 - RNA, 19 nt, Human
uguuuugugguuuggaaua

SEQ ID NO: 3461675 - RNA, 12 nt, Human
uguuuuguugac

SEQ ID NO: 3461676 - RNA, 22 nt, Human
uguuuuguugcacugaaguuug

SEQ ID NO: 3461677 - RNA, 14 nt, Human
uguuuuguuuauua

SEQ ID NO: 3461678 - RNA, 16 nt, Human
uguuuuguuugucucu

SEQ ID NO: 3461679 - RNA, 16 nt, Human
uguuuuguuuuuacaa

SEQ ID NO: 3461680 - RNA, 16 nt, Human
uguuuuuaaaaaucau

SEQ ID NO: 3461681 - RNA, 19 nt, Human
uguuuuuaaaaguuucaau

SEQ ID NO: 3461682 - RNA, 23 nt, Human
uguuuuuaaacuguacagugucu

SEQ ID NO: 3461683 - RNA, 15 nt, Human
uguuuuuaagcuguu

SEQ ID NO: 3461684 - RNA, 17 nt, Human
uguuuuuaagcuguuuc

SEQ ID NO: 3461685 - RNA, 13 nt, Human
uguuuuuaaugcu

SEQ ID NO: 3461686 - RNA, 20 nt, Human
uguuuuuaaugcuuugauau

SEQ ID NO: 3461687 - RNA, 18 nt, Human
uguuuuuacaaauguuaa

SEQ ID NO: 3461688 - RNA, 18 nt, Human
uguuuuuauuauuaacaa

SEQ ID NO: 3461689 - RNA, 17 nt, Human
uguuuuuauuguuuucu

SEQ ID NO: 3461690 - RNA, 13 nt, Human
uguuuuucaguuc

SEQ ID NO: 3461691 - RNA, 15 nt, Human
uguuuuucaguucaa

SEQ ID NO: 3461692 - RNA, 13 nt, Human
uguuuuucaugaa

SEQ ID NO: 3461693 - RNA, 17 nt, Human
uguuuuucgucauucca

SEQ ID NO: 3461694 - RNA, 13 nt, Human
uguuuuucuauua

SEQ ID NO: 3461695 - RNA, 21 nt, Human
uguuuuucuauuaaaagacuc

SEQ ID NO: 3461696 - RNA, 12 nt, Human
uguuuuucucca

SEQ ID NO: 3461697 - RNA, 14 nt, Human
uguuuuucugcuuu

SEQ ID NO: 3461698 - RNA, 16 nt, Human
uguuuuugaaggcaga

SEQ ID NO: 3461699 - RNA, 15 nt, Human
uguauggccaggaag

SEQ ID NO: 3461700 - RNA, 15 nt, Human
uguaugggcaaaaaa

SEQ ID NO: 3461701 - RNA, 12 nt, Human
uguauguauaau

SEQ ID NO: 3461702 - RNA, 22 nt, Human
uguaugucaauaaacaacagcu

SEQ ID NO: 3461703 - RNA, 14 nt, Human
uguaugugagagau

SEQ ID NO: 3461704 - RNA, 18 nt, Human
uguaugugagagauucug

SEQ ID NO: 3461705 - RNA, 11 nt, Human
uguaugugcac

SEQ ID NO: 3461706 - RNA, 17 nt, Human
uguaugugcacugucac

SEQ ID NO: 3461707 - RNA, 21 nt, Human
uguaugugggggucugugugu

SEQ ID NO: 3461708 - RNA, 13 nt, Human
uguaugugugaag

SEQ ID NO: 3461709 - RNA, 15 nt, Human
uguauguguuuagaa

SEQ ID NO: 3461710 - RNA, 19 nt, Human
uguauguucagaagaaauu

SEQ ID NO: 3461711 - RNA, 19 nt, Human
uguauguugugaagauguu

SEQ ID NO: 3461712 - RNA, 23 nt, Human
uguauguugugaagauguuugca

SEQ ID NO: 3461713 - RNA, 11 nt, Human
uguauguuuac

SEQ ID NO: 3461714 - RNA, 17 nt, Human
uguauguuuacacuguc

SEQ ID NO: 3461715 - RNA, 13 nt, Human
uguauguuucucu

SEQ ID NO: 3461716 - RNA, 22 nt, Human
uguauguuugcacacuugugug

SEQ ID NO: 3461717 - RNA, 19 nt, Human
uguauguuuugguaucugu

SEQ ID NO: 3461718 - RNA, 15 nt, Human
uguauguuuuucagu

SEQ ID NO: 3461719 - RNA, 20 nt, Human
uguauguuuuucaguucaaa

SEQ ID NO: 3461720 - RNA, 21 nt, Human
uguauguuuuucaguucaaag

SEQ ID NO: 3461721 - RNA, 17 nt, Human
uguauguuuuuuuucug

SEQ ID NO: 3461722 - RNA, 19 nt, Human
uguauuaaaaaaaacaaaa

SEQ ID NO: 3461723 - RNA, 20 nt, Human
uguauuaaaaaaaacaaaaa

SEQ ID NO: 3461724 - RNA, 21 nt, Human
uguauuaaaaaaaacaaaaag

SEQ ID NO: 3461725 - RNA, 22 nt, Human
uguauuaaaaaaaacaaaaaga

SEQ ID NO: 3461726 - RNA, 21 nt, Human
uguauuaaauuacauuuguaa

SEQ ID NO: 3461727 - RNA, 13 nt, Human
uguauuaacaaaa

SEQ ID NO: 3461728 - RNA, 15 nt, Human
uguauuaacaaaagu

SEQ ID NO: 3461729 - RNA, 20 nt, Human
uguauuaagaaaggaagcau

SEQ ID NO: 3461730 - RNA, 12 nt, Human
uguauuaagaau

SEQ ID NO: 3461731 - RNA, 16 nt, Human
uguauuaagagugaaa

SEQ ID NO: 3461732 - RNA, 17 nt, Human
uguauuaauaaauagag

SEQ ID NO: 3461733 - RNA, 20 nt, Human
uguauuaauaaauagagcaa

SEQ ID NO: 3461734 - RNA, 16 nt, Human
uguauuacuagaagau

SEQ ID NO: 3461735 - RNA, 23 nt, Human
uguauuacuagaagaugaauaca

SEQ ID NO: 3461736 - RNA, 23 nt, Human
uguauuaggacuggcuuuguccc

SEQ ID NO: 3461737 - RNA, 21 nt, Human
uguauuaggugucauuuccau

SEQ ID NO: 3461738 - RNA, 20 nt, Human
uguauuagugauauuucucu

SEQ ID NO: 3461739 - RNA, 15 nt, Human
uguauuauaacagug

SEQ ID NO: 3461740 - RNA, 17 nt, Human
uguauuauauguaacua

SEQ ID NO: 3461741 - RNA, 15 nt, Human
uguauuauugcuguu

SEQ ID NO: 3461742 - RNA, 14 nt, Human
uguauucagacaga

SEQ ID NO: 3461743 - RNA, 17 nt, Human
uguauucagugaggguc

SEQ ID NO: 3461744 - RNA, 13 nt, Human
uguauuccaagac

SEQ ID NO: 3461745 - RNA, 15 nt, Human
uguauuccaagacau

SEQ ID NO: 3461746 - RNA, 18 nt, Human
uguauuccaagcauauaa

SEQ ID NO: 3461747 - RNA, 18 nt, Human
uguauucccaccccugga

SEQ ID NO: 3461748 - RNA, 22 nt, Human
uguauucuagcuaauguaauaa

SEQ ID NO: 3461749 - RNA, 13 nt, Human
uguauucucugag

SEQ ID NO: 3461750 - RNA, 14 nt, Human
uguauucucugagc

SEQ ID NO: 3461751 - RNA, 14 nt, Human
uguauucuguaaaa

SEQ ID NO: 3461752 - RNA, 16 nt, Human
uguauucugucuucau

SEQ ID NO: 3461753 - RNA, 22 nt, Human
uguauucuuaaaaugcaauauu

SEQ ID NO: 3461754 - RNA, 16 nt, Human
uguauucuuaaauuca

SEQ ID NO: 3461755 - RNA, 19 nt, Human
uguauucuuugauguuaac

SEQ ID NO: 3461756 - RNA, 19 nt, Human
uguauucuuuucucagugu

SEQ ID NO: 3461757 - RNA, 22 nt, Human
uguauugaacuuggaaagaaau

SEQ ID NO: 3461758 - RNA, 15 nt, Human
uguauugaaucaugu

SEQ ID NO: 3461759 - RNA, 19 nt, Human
uguauugcauauauacaua

SEQ ID NO: 3461760 - RNA, 16 nt, Human
uguauuguauauuaca

SEQ ID NO: 3461761 - RNA, 21 nt, Human
uguauuguauauuacaaugau

SEQ ID NO: 3461762 - RNA, 20 nt, Human
uguauugugcaauguguaua

SEQ ID NO: 3461763 - RNA, 21 nt, Human
uguauugugcgcuaaacuuuu

SEQ ID NO: 3461764 - RNA, 13 nt, Human
uguauugugguau

SEQ ID NO: 3461765 - RNA, 19 nt, Human
uguauugugucuuuugcau

SEQ ID NO: 3461766 - RNA, 19 nt, Human
uguauuguuagauguuugu

SEQ ID NO: 3461767 - RNA, 23 nt, Human
uguauuguugaaaaaguuuguuu

SEQ ID NO: 3461768 - RNA, 18 nt, Human
uguauuguuguaaaaugu

SEQ ID NO: 3461769 - RNA, 19 nt, Human
uguauuguuuucugacagu

SEQ ID NO: 3461770 - RNA, 21 nt, Human
uguauuuaacaaaaagugcuu

SEQ ID NO: 3461771 - RNA, 13 nt, Human
uguauuuaagcaa

SEQ ID NO: 3461772 - RNA, 19 nt, Human
uguauuuaagcaaauacuu

SEQ ID NO: 3461773 - RNA, 17 nt, Human
uguauuuaauuguaaac

SEQ ID NO: 3461774 - RNA, 23 nt, Human
uguauuuaauuguaaacuguacu

SEQ ID NO: 3461775 - RNA, 15 nt, Human
uguauuuaauuuuga

SEQ ID NO: 3461776 - RNA, 13 nt, Human
uguauuuaccaaa

SEQ ID NO: 3461777 - RNA, 13 nt, Human
uguauuuauguaa

SEQ ID NO: 3461778 - RNA, 17 nt, Human
uguauuuauucaauaaa

SEQ ID NO: 3461779 - RNA, 14 nt, Human
uguauuuauuccau

SEQ ID NO: 3461780 - RNA, 23 nt, Human
uguauuuauugaagaaacagaua

SEQ ID NO: 3461781 - RNA, 15 nt, Human
uguauuuauuuaaaa

SEQ ID NO: 3461782 - RNA, 18 nt, Human
uguauuuauuuaaaagau

SEQ ID NO: 3461783 - RNA, 19 nt, Human
uguauuuauuuuccucccc

SEQ ID NO: 3461784 - RNA, 13 nt, Human
uguauuucuuaua

SEQ ID NO: 3461785 - RNA, 13 nt, Human
uguauuugaaagu

SEQ ID NO: 3461786 - RNA, 17 nt, Human
uguauuugaaauaagaa

SEQ ID NO: 3461787 - RNA, 12 nt, Human
uguauuugcuaa

SEQ ID NO: 3461788 - RNA, 17 nt, Human
uguauuugcuaauuuuu

SEQ ID NO: 3461789 - RNA, 12 nt, Human
uguauuuggaaa

SEQ ID NO: 3461790 - RNA, 14 nt, Human
uguauuuguagugu

SEQ ID NO: 3461791 - RNA, 15 nt, Human
uguauuuguuugcau

SEQ ID NO: 3461792 - RNA, 18 nt, Human
uguauuuuaaaagaauga

SEQ ID NO: 3461793 - RNA, 19 nt, Human
uguauuuuacuaauaaaau

SEQ ID NO: 3461794 - RNA, 16 nt, Human
uguauuuuagcagaga

SEQ ID NO: 3461795 - RNA, 14 nt, Human
uguauuuuauguau

SEQ ID NO: 3461796 - RNA, 16 nt, Human
uguauuuuauguaugu

SEQ ID NO: 3461797 - RNA, 17 nt, Human
uguauuuuauguuauau

SEQ ID NO: 3461798 - RNA, 13 nt, Human
uguauuuuauugu

SEQ ID NO: 3461799 - RNA, 14 nt, Human
uguauuuuauugua

SEQ ID NO: 3461800 - RNA, 21 nt, Human
uguauuuuauuguaacagaca

SEQ ID NO: 3461801 - RNA, 15 nt, Human
uguauuuuauuuuuu

SEQ ID NO: 3461802 - RNA, 14 nt, Human
uguauuuucagagc

SEQ ID NO: 3461803 - RNA, 23 nt, Human
uguauuuuccaagugugcauauu

SEQ ID NO: 3461804 - RNA, 14 nt, Human
uguauuuucuuuuu

SEQ ID NO: 3461805 - RNA, 14 nt, Human
uguauuuugauuau

SEQ ID NO: 3461806 - RNA, 22 nt, Human
uguauuuuguaaauaauaaaau

SEQ ID NO: 3461807 - RNA, 14 nt, Human
uguauuuuguauug

SEQ ID NO: 3461808 - RNA, 22 nt, Human
uguauuuugugaguuuguuucu

SEQ ID NO: 3461809 - RNA, 13 nt, Human
uuaagggaaaaau

SEQ ID NO: 3461810 - RNA, 18 nt, Human
uuaagggaagaauuccag

SEQ ID NO: 3461811 - RNA, 13 nt, Human
uuaaggguaugau

SEQ ID NO: 3461812 - RNA, 15 nt, Human
uuaaggguuaagaaa

SEQ ID NO: 3461813 - RNA, 20 nt, Human
uuaaggugagcauaaaucaa

SEQ ID NO: 3461814 - RNA, 22 nt, Human
uuaagguuauuuauuuaaaugu

SEQ ID NO: 3461815 - RNA, 19 nt, Human
uuaaguaaacuaaugaguu

SEQ ID NO: 3461816 - RNA, 18 nt, Human
uuaaguaaggaauuuuau

SEQ ID NO: 3461817 - RNA, 17 nt, Human
uuaaguauaucauguaa

SEQ ID NO: 3461818 - RNA, 17 nt, Human
uuaaguaucugacaucu

SEQ ID NO: 3461819 - RNA, 14 nt, Human
uuaaguauguguaa

SEQ ID NO: 3461820 - RNA, 17 nt, Human
uuaaguauuuauauauu

SEQ ID NO: 3461821 - RNA, 20 nt, Human
uuaaguccuacuuuuaaaga

SEQ ID NO: 3461822 - RNA, 17 nt, Human
uuaagucuaucugguau

SEQ ID NO: 3461823 - RNA, 15 nt, Human
uuaagucuguuuuau

SEQ ID NO: 3461824 - RNA, 13 nt, Human
uuaagugaauguc

SEQ ID NO: 3461825 - RNA, 16 nt, Human
uuaagugaggaaauca

SEQ ID NO: 3461826 - RNA, 17 nt, Human
uuaagugaggaaaucaa

SEQ ID NO: 3461827 - RNA, 19 nt, Human
uuaagugaggaaaucaaag

SEQ ID NO: 3461828 - RNA, 20 nt, Human
uuaagugaggaaaucaaagu

SEQ ID NO: 3461829 - RNA, 19 nt, Human
uuaagugcguguguagagu

SEQ ID NO: 3461830 - RNA, 21 nt, Human
uuaagugcguguguagaguua

SEQ ID NO: 3461831 - RNA, 12 nt, Human
uuaaguucuuau

SEQ ID NO: 3461832 - RNA, 23 nt, Human
uuaaguugagauaguuuucaucc

SEQ ID NO: 3461833 - RNA, 15 nt, Human
uuaaguuucaaacuu

SEQ ID NO: 3461834 - RNA, 15 nt, Human
uuaaguuucaggaua

SEQ ID NO: 3461835 - RNA, 15 nt, Human
uuaaguuucucagcu

SEQ ID NO: 3461836 - RNA, 20 nt, Human
uuaauaaaaaaacaaucauu

SEQ ID NO: 3461837 - RNA, 21 nt, Human
uuaauaaaaacuuacacucuu

SEQ ID NO: 3461838 - RNA, 21 nt, Human
uuaauaaaaagcuuuuuccuc

SEQ ID NO: 3461839 - RNA, 15 nt, Human
uuaauaaaaaggcac

SEQ ID NO: 3461840 - RNA, 11 nt, Human
uuaauaaaaga

SEQ ID NO: 3461841 - RNA, 14 nt, Human
uuaauaaaagaaaa

SEQ ID NO: 3461842 - RNA, 17 nt, Human
uuaauaaaagaaaauua

SEQ ID NO: 3461843 - RNA, 20 nt, Human
uuaauaaaauaauucuaaag

SEQ ID NO: 3461844 - RNA, 20 nt, Human
uuaauuaauuuggagcacaa

SEQ ID NO: 3461845 - RNA, 13 nt, Human
uuaauuacaccau

SEQ ID NO: 3461846 - RNA, 16 nt, Human
uuaauuaccaaccugu

SEQ ID NO: 3461847 - RNA, 18 nt, Human
uuaauuagcauucuggca

SEQ ID NO: 3461848 - RNA, 14 nt, Human
uuaauuagugcuaa

SEQ ID NO: 3461849 - RNA, 14 nt, Human
uuaauuauuauucu

SEQ ID NO: 3461850 - RNA, 21 nt, Human
uuaauuauuauuuguguuuua

SEQ ID NO: 3461851 - RNA, 14 nt, Human
uuaauuauuguaca

SEQ ID NO: 3461852 - RNA, 13 nt, Human
uuaauuauuguuu

SEQ ID NO: 3461853 - RNA, 14 nt, Human
uuaauucauguuuc

SEQ ID NO: 3461854 - RNA, 17 nt, Human
uuaauuccaauuauaug

SEQ ID NO: 3461855 - RNA, 14 nt, Human
uuaauucucuugaa

SEQ ID NO: 3461856 - RNA, 22 nt, Human
uuaauucuucagcguaaaaugg

SEQ ID NO: 3461857 - RNA, 23 nt, Human
uuaauugaaaagaaguagugucu

SEQ ID NO: 3461858 - RNA, 16 nt, Human
uuaauugaaagaaugu

SEQ ID NO: 3461859 - RNA, 14 nt, Human
uuaauugaaggaaa

SEQ ID NO: 3461860 - RNA, 12 nt, Human
uuaauugcuuug

SEQ ID NO: 3461861 - RNA, 13 nt, Human
uuaauugcuuuga

SEQ ID NO: 3461862 - RNA, 16 nt, Human
uuaauuggcagcagau

SEQ ID NO: 3461863 - RNA, 18 nt, Human
uuaauugggcacuauuua

SEQ ID NO: 3461864 - RNA, 21 nt, Human
uuaauugggccagcuuuucaa

SEQ ID NO: 3461865 - RNA, 14 nt, Human
uuaauuguaaacug

SEQ ID NO: 3461866 - RNA, 14 nt, Human
uuaauuguaaagua

SEQ ID NO: 3461867 - RNA, 18 nt, Human
uuaauuguuuugcacuuu

SEQ ID NO: 3461868 - RNA, 14 nt, Human
uuaauuuaaagcca

SEQ ID NO: 3461869 - RNA, 16 nt, Human
uuaauuuaaaugauuu

SEQ ID NO: 3461870 - RNA, 15 nt, Human
uuaauuuaaguuuug

SEQ ID NO: 3461871 - RNA, 23 nt, Human
uuaauuuacaaaaauauaaaaua

SEQ ID NO: 3461872 - RNA, 17 nt, Human
uuaauuuaguaaauguu

SEQ ID NO: 3461873 - RNA, 13 nt, Human
uuaauuuaucaga

SEQ ID NO: 3461874 - RNA, 14 nt, Human
uuaauuucaagcuu

SEQ ID NO: 3461875 - RNA, 17 nt, Human
uuaauuucaguccugua

SEQ ID NO: 3461876 - RNA, 11 nt, Human
uuaauuuccag

SEQ ID NO: 3461877 - RNA, 12 nt, Human
uuaauuuccuuu

SEQ ID NO: 3461878 - RNA, 20 nt, Human
uuaauuuccuuuuugacacu

SEQ ID NO: 3461879 - RNA, 17 nt, Human
uuaauuucuucaaaaug

SEQ ID NO: 3461880 - RNA, 23 nt, Human
uuaauuucuucaaaauguauaua

SEQ ID NO: 3461881 - RNA, 18 nt, Human
uuaauuugcaucugaaau

SEQ ID NO: 3461882 - RNA, 18 nt, Human
uuaauuugccaaaauaau

SEQ ID NO: 3461883 - RNA, 20 nt, Human
uuaauuugccaaaauaaugu

SEQ ID NO: 3461884 - RNA, 14 nt, Human
uuaauuuggaaacu

SEQ ID NO: 3461885 - RNA, 13 nt, Human
uuaauuuggacca

SEQ ID NO: 3461886 - RNA, 16 nt, Human
uuaauuuuaaagugca

SEQ ID NO: 3461887 - RNA, 17 nt, Human
uuaauuuuacuccauaa

SEQ ID NO: 3461888 - RNA, 15 nt, Human
uuaauuuuaguuuuu

SEQ ID NO: 3461889 - RNA, 23 nt, Human
uuaauuuuauuuuuuauaaaaua

SEQ ID NO: 3461890 - RNA, 12 nt, Human
uuaauuuucacu

SEQ ID NO: 3461891 - RNA, 19 nt, Human
uuaauuuugaagugcuguu

SEQ ID NO: 3461892 - RNA, 19 nt, Human
uuaauuuugacacugaaau

SEQ ID NO: 3461893 - RNA, 13 nt, Human
uuaauuuuggaau

SEQ ID NO: 3461894 - RNA, 14 nt, Human
uuaauuuuggaauu

SEQ ID NO: 3461895 - RNA, 17 nt, Human
uuaauuuugguuguauu

SEQ ID NO: 3461896 - RNA, 14 nt, Human
uuaauuuuguauuu

SEQ ID NO: 3461897 - RNA, 16 nt, Human
uuaauuuuguauuuuc

SEQ ID NO: 3461898 - RNA, 18 nt, Human
uuaauuuuguauuuucca

SEQ ID NO: 3461899 - RNA, 15 nt, Human
uuaauuuuuaaaugc

SEQ ID NO: 3461900 - RNA, 16 nt, Human
uuaauuuuuaaaugca

SEQ ID NO: 3461901 - RNA, 13 nt, Human
uuaauuuuuccaa

SEQ ID NO: 3461902 - RNA, 22 nt, Human
uuaauuuuugcuuuuagaaaag

SEQ ID NO: 3461903 - RNA, 17 nt, Human
uuaauuuuuugguacaa

SEQ ID NO: 3461904 - RNA, 15 nt, Human
uuaauuuuuuuauug

SEQ ID NO: 3461905 - RNA, 17 nt, Human
uuaauuuuuuuauuguu

SEQ ID NO: 3461906 - RNA, 22 nt, Human
uuacaaaaacaaaauaaaauaa

SEQ ID NO: 3461907 - RNA, 20 nt, Human
uuacaaaacuacaugagaac

SEQ ID NO: 3461908 - RNA, 15 nt, Human
uuacaaaauguaacu

SEQ ID NO: 3461909 - RNA, 14 nt, Human
uuacaaacuacaga

SEQ ID NO: 3461910 - RNA, 16 nt, Human
uuacaaacugaagagu

SEQ ID NO: 3461911 - RNA, 13 nt, Human
uuacaaagugugu

SEQ ID NO: 3461912 - RNA, 14 nt, Human
uuacaaagugugua

SEQ ID NO: 3461913 - RNA, 18 nt, Human
uuacaaaguguguauuaa

SEQ ID NO: 3461914 - RNA, 17 nt, Human
uuacaaaugauugcuuu

SEQ ID NO: 3461915 - RNA, 19 nt, Human
uuacaaauguuaaaaugug

SEQ ID NO: 3461916 - RNA, 21 nt, Human
uuacaaauguuaaaauguguu

SEQ ID NO: 3461917 - RNA, 21 nt, Human
uuacaaauuauaauguauuca

SEQ ID NO: 3461918 - RNA, 14 nt, Human
uuacaaauuggagc

SEQ ID NO: 3461919 - RNA, 13 nt, Human
uuacaacagauuu

SEQ ID NO: 3461920 - RNA, 15 nt, Human
uuacaacagauuugu

SEQ ID NO: 3461921 - RNA, 13 nt, Human
uuacaaccuagaa

SEQ ID NO: 3461922 - RNA, 23 nt, Human
uuacaacugccucgaaacacaga

SEQ ID NO: 3461923 - RNA, 17 nt, Human
uuacaagaaaaaaugaa

SEQ ID NO: 3461924 - RNA, 13 nt, Human
uuacaagaagaac

SEQ ID NO: 3461925 - RNA, 13 nt, Human
uuacaagaaguuu

SEQ ID NO: 3461926 - RNA, 18 nt, Human
uuacaagaaguuuauucu

SEQ ID NO: 3461927 - RNA, 16 nt, Human
uuacaagggaagauuu

SEQ ID NO: 3461928 - RNA, 20 nt, Human
uuacaagggcauaaaguaaa

SEQ ID NO: 3461929 - RNA, 17 nt, Human
uuacaaguuuauauaua

SEQ ID NO: 3461930 - RNA, 21 nt, Human
uuacaauaaaacuuugcugcc

SEQ ID NO: 3461931 - RNA, 17 nt, Human
uuacaauaggaguggug

SEQ ID NO: 3461932 - RNA, 15 nt, Human
uuacaauaguucugu

SEQ ID NO: 3461933 - RNA, 21 nt, Human
uuacaauauugauugggaaaa

SEQ ID NO: 3461934 - RNA, 13 nt, Human
uuacaauauuugu

SEQ ID NO: 3461935 - RNA, 16 nt, Human
uuacaauauuugugug

SEQ ID NO: 3461936 - RNA, 14 nt, Human
uuacaauguuuuau

SEQ ID NO: 3461937 - RNA, 13 nt, Human
uuacaauugucau

SEQ ID NO: 3461938 - RNA, 12 nt, Human
uuacaauuuaca

SEQ ID NO: 3461939 - RNA, 19 nt, Human
uuacaauuuacaaagugug

SEQ ID NO: 3461940 - RNA, 18 nt, Human
uuacaauuuuaucuguuu

SEQ ID NO: 3461941 - RNA, 18 nt, Human
uuacaauuuuuuaucaug

SEQ ID NO: 3461942 - RNA, 23 nt, Human
uuacaauuuuuuuaauuuuguau

SEQ ID NO: 3461943 - RNA, 20 nt, Human
uuacacaaaggggaucauaa

SEQ ID NO: 3461944 - RNA, 19 nt, Human
uuacacaaauacuuauuca

SEQ ID NO: 3461945 - RNA, 20 nt, Human
uuacacaauucuuacccugu

SEQ ID NO: 3461946 - RNA, 23 nt, Human
uuacacacgugcaauuuguuugu

SEQ ID NO: 3461947 - RNA, 13 nt, Human
uuacacagaaaca

SEQ ID NO: 3461948 - RNA, 19 nt, Human
uuacacagaaacacugccu

SEQ ID NO: 3461949 - RNA, 23 nt, Human
uuacacagaaaugcugcuggcca

SEQ ID NO: 3461950 - RNA, 14 nt, Human
uuacacauacaguu

SEQ ID NO: 3461951 - RNA, 14 nt, Human
uuacacauuaagua

SEQ ID NO: 3461952 - RNA, 17 nt, Human
uuacacauuuguacaga

SEQ ID NO: 3461953 - RNA, 20 nt, Human
uuacacccuuucuugacaaa

SEQ ID NO: 3461954 - RNA, 18 nt, Human
uuacaccgacuagccagg

SEQ ID NO: 3461955 - RNA, 17 nt, Human
uuacacgcuuuugugau

SEQ ID NO: 3461956 - RNA, 18 nt, Human
uuacacugccuguauacu

SEQ ID NO: 3461957 - RNA, 22 nt, Human
uuacacugccuguauacuuuag

SEQ ID NO: 3461958 - RNA, 23 nt, Human
uuacacuggcaaugguaguuucu

SEQ ID NO: 3461959 - RNA, 20 nt, Human
uuacacuguaccauauagca

SEQ ID NO: 3461960 - RNA, 23 nt, Human
uuacacuguuauuuucagcauga

SEQ ID NO: 3461961 - RNA, 14 nt, Human
uuacacuuacuguu

SEQ ID NO: 3461962 - RNA, 15 nt, Human
uuacacuuacuguug

SEQ ID NO: 3461963 - RNA, 23 nt, Human
uuacacuuuaugccggaugugcu

SEQ ID NO: 3461964 - RNA, 16 nt, Human
uuacacuuuuuggaag

SEQ ID NO: 3461965 - RNA, 22 nt, Human
uuacagaaaguggugcucaguu

SEQ ID NO: 3461966 - RNA, 12 nt, Human
uuacagaagccc

SEQ ID NO: 3461967 - RNA, 19 nt, Human
uuacagaaucuaacuggug

SEQ ID NO: 3461968 - RNA, 20 nt, Human
uuacagaaucuuccuuuuau

SEQ ID NO: 3461969 - RNA, 21 nt, Human
uuacagagguauuaaaacuaa

SEQ ID NO: 3461970 - RNA, 19 nt, Human
uuacagauuuauuccuuug

SEQ ID NO: 3461971 - RNA, 20 nt, Human
uuacagauuuauuccuuugu

SEQ ID NO: 3461972 - RNA, 15 nt, Human
uuacagcacaaaaug

SEQ ID NO: 3461973 - RNA, 11 nt, Human
uuacagcugug

SEQ ID NO: 3461974 - RNA, 14 nt, Human
uuacaggaaguacu

SEQ ID NO: 3461975 - RNA, 18 nt, Human
ugucaucagagcuccucu

SEQ ID NO: 3461976 - RNA, 14 nt, Human
ugucaucagaugga

SEQ ID NO: 3461977 - RNA, 21 nt, Human
ugucaucagccaccauccuau

SEQ ID NO: 3461978 - RNA, 17 nt, Human
ugucaucaucauggcca

SEQ ID NO: 3461979 - RNA, 19 nt, Human
ugucaucaucauggccagc

SEQ ID NO: 3461980 - RNA, 16 nt, Human
ugucaucccauugucu

SEQ ID NO: 3461981 - RNA, 17 nt, Human
ugucaucccauugucuu

SEQ ID NO: 3461982 - RNA, 20 nt, Human
ugucaucuaccuuuucucuu

SEQ ID NO: 3461983 - RNA, 15 nt, Human
ugucaucucagugcu

SEQ ID NO: 3461984 - RNA, 19 nt, Human
ugucaucugagaaugaaca

SEQ ID NO: 3461985 - RNA, 23 nt, Human
ugucaucuuucuucuauuuuauu

SEQ ID NO: 3461986 - RNA, 16 nt, Human
ugucaugaauucuuau

SEQ ID NO: 3461987 - RNA, 19 nt, Human
ugucaugaauucuuaugcu

SEQ ID NO: 3461988 - RNA, 17 nt, Human
ugucaugguuacaaacu

SEQ ID NO: 3461989 - RNA, 19 nt, Human
ugucauguuguaaacauuu

SEQ ID NO: 3461990 - RNA, 18 nt, Human
uuagugugguuuucuguu

SEQ ID NO: 3461991 - RNA, 15 nt, Human
uuaguguuauaugaa

SEQ ID NO: 3461992 - RNA, 17 nt, Human
uuaguguuuuaagaaau

SEQ ID NO: 3461993 - RNA, 19 nt, Human
uuaguuaccuuauaguuac

SEQ ID NO: 3461994 - RNA, 22 nt, Human
uuaguuacuaccuccucuccug

SEQ ID NO: 3461995 - RNA, 12 nt, Human
uuaguucccaac

SEQ ID NO: 3461996 - RNA, 13 nt, Human
uuaguucccuguc

SEQ ID NO: 3461997 - RNA, 19 nt, Human
uuaguucccugucucuuga

SEQ ID NO: 3461998 - RNA, 18 nt, Human
uuaguuccugugcacagc

SEQ ID NO: 3461999 - RNA, 20 nt, Human
uuaguugcaacuuuguauaa

SEQ ID NO: 3462000 - RNA, 13 nt, Human
uuaguugcuguau

SEQ ID NO: 3462001 - RNA, 20 nt, Human
uuaguuguaucucuuuugaa

SEQ ID NO: 3462002 - RNA, 11 nt, Human
uuaguuuccuu

SEQ ID NO: 3462003 - RNA, 13 nt, Human
uuaguuucugagu

SEQ ID NO: 3462004 - RNA, 21 nt, Human
uuaguuucuguucuguggaaa

SEQ ID NO: 3462005 - RNA, 14 nt, Human
uuaguuugcauuua

SEQ ID NO: 3462006 - RNA, 18 nt, Human
uuaguuuggauucuuaug

SEQ ID NO: 3462007 - RNA, 22 nt, Human
uuaguuuguaugccaagugaga

SEQ ID NO: 3462008 - RNA, 16 nt, Human
uuaguuuguguguugu

SEQ ID NO: 3462009 - RNA, 15 nt, Human
uuaguuuuaguugca

SEQ ID NO: 3462010 - RNA, 13 nt, Human
uuaguuuucuugu

SEQ ID NO: 3462011 - RNA, 13 nt, Human
uuaguuuugcaua

SEQ ID NO: 3462012 - RNA, 14 nt, Human
uuaguuuugcuuuu

SEQ ID NO: 3462013 - RNA, 18 nt, Human
uuaguuuugcuuuuaguu

SEQ ID NO: 3462014 - RNA, 15 nt, Human
uuaguuuuucugucc

SEQ ID NO: 3462015 - RNA, 23 nt, Human
uuaguuuuugguugggaaugagg

SEQ ID NO: 3462016 - RNA, 17 nt, Human
uuaguuuuuguaauuua

SEQ ID NO: 3462017 - RNA, 20 nt, Human
uuauaaaaaauggugccuga

SEQ ID NO: 3462018 - RNA, 17 nt, Human
uuauaaaaaaugguuca

SEQ ID NO: 3462019 - RNA, 12 nt, Human
uuauaaaaagau

SEQ ID NO: 3462020 - RNA, 19 nt, Human
uuauaaaaagguguuuuga

SEQ ID NO: 3462021 - RNA, 22 nt, Human
uuauaaaaauaaaaaacacugg

SEQ ID NO: 3462022 - RNA, 17 nt, Human
uuauaaaaauaaauaga

SEQ ID NO: 3462023 - RNA, 19 nt, Human
uuauaaaacagaguaaucu

SEQ ID NO: 3462024 - RNA, 12 nt, Human
uuauaaaacuuc

SEQ ID NO: 3462025 - RNA, 13 nt, Human
uuauaaaauauaa

SEQ ID NO: 3462026 - RNA, 20 nt, Human
uuauaaaauauaaacaaaga

SEQ ID NO: 3462027 - RNA, 15 nt, Human
uuauaaaauuuacug

SEQ ID NO: 3462028 - RNA, 13 nt, Human
uuauaaacaagaa

SEQ ID NO: 3462029 - RNA, 13 nt, Human
uuauaaacagaaa

SEQ ID NO: 3462030 - RNA, 17 nt, Human
uuauaaacagaaaugga

SEQ ID NO: 3462031 - RNA, 18 nt, Human
uuauaaacuuuaccuuuu

SEQ ID NO: 3462032 - RNA, 19 nt, Human
ugugacuucagcucuguuu

SEQ ID NO: 3462033 - RNA, 13 nt, Human
ugugacuuugaaa

SEQ ID NO: 3462034 - RNA, 14 nt, Human
ugugagaaaacguu

SEQ ID NO: 3462035 - RNA, 13 nt, Human
ugugagaagccag

SEQ ID NO: 3462036 - RNA, 21 nt, Human
ugugagaagguuuauuguuaa

SEQ ID NO: 3462037 - RNA, 18 nt, Human
ugugagacagugggaaau

SEQ ID NO: 3462038 - RNA, 19 nt, Human
ugugagacagugggaaaua

SEQ ID NO: 3462039 - RNA, 13 nt, Human
ugugagaccccca

SEQ ID NO: 3462040 - RNA, 16 nt, Human
ugugagacccccacac

SEQ ID NO: 3462041 - RNA, 18 nt, Human
ugugagacccccacaccu

SEQ ID NO: 3462042 - RNA, 15 nt, Human
ugugagacuacuaag

SEQ ID NO: 3462043 - RNA, 19 nt, Human
ugugagaugcuagaacucc

SEQ ID NO: 3462044 - RNA, 18 nt, Human
ugugagauuuuuuauugc

SEQ ID NO: 3462045 - RNA, 19 nt, Human
ugugagcacaaagguagcu

SEQ ID NO: 3462046 - RNA, 22 nt, Human
ugugagccccugguccugaggg

SEQ ID NO: 3462047 - RNA, 15 nt, Human
ugugagcucuuccua

SEQ ID NO: 3462048 - RNA, 12 nt, Human
ugugagcugcac

SEQ ID NO: 3462049 - RNA, 15 nt, Human
ugugagcugcaccag

SEQ ID NO: 3462050 - RNA, 16 nt, Human
ugugaggaaagucauu

SEQ ID NO: 3462051 - RNA, 20 nt, Human
ugugaggaagccgcuggggc

SEQ ID NO: 3462052 - RNA, 14 nt, Human
ugugaggagcugcu

SEQ ID NO: 3462053 - RNA, 20 nt, Human
ugugaggagcugcuggcuug

SEQ ID NO: 3462054 - RNA, 20 nt, Human
ugugaggagguggagagaca

SEQ ID NO: 3462055 - RNA, 16 nt, Human
ugugaggccagggcag

SEQ ID NO: 3462056 - RNA, 17 nt, Human
ugugaggccagggcaga

SEQ ID NO: 3462057 - RNA, 13 nt, Human
ugugaggccccug

SEQ ID NO: 3462058 - RNA, 14 nt, Human
ugugaggccuggcc

SEQ ID NO: 3462059 - RNA, 18 nt, Human
ugugaggccuggccaggc

SEQ ID NO: 3462060 - RNA, 22 nt, Human
ugugagggaaagagcuuuccua

SEQ ID NO: 3462061 - RNA, 15 nt, Human
ugugagggcagugca

SEQ ID NO: 3462062 - RNA, 16 nt, Human
ugugagguuucccaau

SEQ ID NO: 3462063 - RNA, 22 nt, Human
ugugagguuucccaaugguguu

SEQ ID NO: 3462064 - RNA, 19 nt, Human
ugugaguaagagcuggugu

SEQ ID NO: 3462065 - RNA, 15 nt, Human
ugugaguauucucau

SEQ ID NO: 3462066 - RNA, 22 nt, Human
ugugagucuuugguucuaagga

SEQ ID NO: 3462067 - RNA, 17 nt, Human
ugugagugccuuuugca

SEQ ID NO: 3462068 - RNA, 14 nt, Human
ugugagugguugaa

SEQ ID NO: 3462069 - RNA, 16 nt, Human
ugugaguguaagugug

SEQ ID NO: 3462070 - RNA, 22 nt, Human
ugugaguguuuuuaucuuuuua

SEQ ID NO: 3462071 - RNA, 21 nt, Human
ugugaguuuaccuuguauacu

SEQ ID NO: 3462072 - RNA, 23 nt, Human
ugugaguuuaccuuguauacugu

SEQ ID NO: 3462073 - RNA, 21 nt, Human
ugugaguuuguuucuuugaau

SEQ ID NO: 3462074 - RNA, 16 nt, Human
ugugauaaaucaguca

SEQ ID NO: 3462075 - RNA, 13 nt, Human
ugugauaaggaaa

SEQ ID NO: 3462076 - RNA, 13 nt, Human
ugugauaauuuaa

SEQ ID NO: 3462077 - RNA, 21 nt, Human
ugugauacaaugcugugcccu

SEQ ID NO: 3462078 - RNA, 22 nt, Human
ugugauacauuuuuuaagcuuc

SEQ ID NO: 3462079 - RNA, 14 nt, Human
ugugauagcacuuu

SEQ ID NO: 3462080 - RNA, 17 nt, Human
ugugauagcacuuucua

SEQ ID NO: 3462081 - RNA, 16 nt, Human
ugugauauaagugugu

SEQ ID NO: 3462082 - RNA, 15 nt, Human
ugugauauauaagug

SEQ ID NO: 3462083 - RNA, 15 nt, Human
ugugauauucuaaga

SEQ ID NO: 3462084 - RNA, 14 nt, Human
ugugauauuucaga

SEQ ID NO: 3462085 - RNA, 16 nt, Human
ugugauauuucagaaa

SEQ ID NO: 3462086 - RNA, 15 nt, Human
ugugaucagaccaua

SEQ ID NO: 3462087 - RNA, 22 nt, Human
ugugaucagcuuucaaagcauu

SEQ ID NO: 3462088 - RNA, 20 nt, Human
ugugaucaggcuauguaugg

SEQ ID NO: 3462089 - RNA, 18 nt, Human
ugugaucccaagugccag

SEQ ID NO: 3462090 - RNA, 23 nt, Human
ugugaucccaagugccagucuug

SEQ ID NO: 3462091 - RNA, 13 nt, Human
ugugaucgucuga

SEQ ID NO: 3462092 - RNA, 15 nt, Human
ugugaucucauuguu

SEQ ID NO: 3462093 - RNA, 16 nt, Human
ugugaucucauuguuc

SEQ ID NO: 3462094 - RNA, 13 nt, Human
ugugaucugucuu

SEQ ID NO: 3462095 - RNA, 14 nt, Human
ugugaucugucuug

SEQ ID NO: 3462096 - RNA, 16 nt, Human
ugugaucugucuugua

SEQ ID NO: 3462097 - RNA, 19 nt, Human
ugugaucugucuuguaaua

SEQ ID NO: 3462098 - RNA, 16 nt, Human
ugugaucuuuuaaagu

SEQ ID NO: 3462099 - RNA, 16 nt, Human
ugugaugaauacugua

SEQ ID NO: 3462100 - RNA, 19 nt, Human
ugugaugagaggaaaucac

SEQ ID NO: 3462101 - RNA, 22 nt, Human
ugugaugaugaaaugaggucag

SEQ ID NO: 3462102 - RNA, 16 nt, Human
ugugaugauguaauug

SEQ ID NO: 3462103 - RNA, 15 nt, Human
ugugaugccacacag

SEQ ID NO: 3462104 - RNA, 18 nt, Human
ugugauggacacuccagg

SEQ ID NO: 3462105 - RNA, 16 nt, Human
ugugauggggcccugc

SEQ ID NO: 3462106 - RNA, 22 nt, Human
ugugaugguucguucuguuuac

SEQ ID NO: 3462107 - RNA, 22 nt, Human
ugugaugucauacagagaaguc

SEQ ID NO: 3462108 - RNA, 23 nt, Human
ugugaugucauacagagaaguca

SEQ ID NO: 3462109 - RNA, 16 nt, Human
ugugaugugacauuug

SEQ ID NO: 3462110 - RNA, 11 nt, Human
ugugauguguc

SEQ ID NO: 3462111 - RNA, 15 nt, Human
ugugauguucuaagg

SEQ ID NO: 3462112 - RNA, 18 nt, Human
ugugauuauuucacuuua

SEQ ID NO: 3462113 - RNA, 15 nt, Human
ugugauucaaaagau

SEQ ID NO: 3462114 - RNA, 22 nt, Human
ugugauucaaucuguaaacugu

SEQ ID NO: 3462115 - RNA, 14 nt, Human
ugugauucaaugcc

SEQ ID NO: 3462116 - RNA, 21 nt, Human
ugugauucuaaugucuucauu

SEQ ID NO: 3462117 - RNA, 22 nt, Human
ugugauugacagcuuugcugcu

SEQ ID NO: 3462118 - RNA, 14 nt, Human
ugugauuggccugu

SEQ ID NO: 3462119 - RNA, 15 nt, Human
ugugauuggccugua

SEQ ID NO: 3462120 - RNA, 17 nt, Human
ugugauuggccuguaga

SEQ ID NO: 3462121 - RNA, 15 nt, Human
ugugauugggaauaa

SEQ ID NO: 3462122 - RNA, 17 nt, Human
ugugauuguggaaugga

SEQ ID NO: 3462123 - RNA, 17 nt, Human
ugugauuuagaacugua

SEQ ID NO: 3462124 - RNA, 14 nt, Human
ugugauuucuuuaa

SEQ ID NO: 3462125 - RNA, 22 nt, Human
ugugauuucuuuaaaagaauga

SEQ ID NO: 3462126 - RNA, 15 nt, Human
ugugauuugacuguu

SEQ ID NO: 3462127 - RNA, 17 nt, Human
ugugauuugacuguuuu

SEQ ID NO: 3462128 - RNA, 23 nt, Human
ugugauuugacuguuuuuaccca

SEQ ID NO: 3462129 - RNA, 22 nt, Human
ugugauuuggaagggaaacuuu

SEQ ID NO: 3462130 - RNA, 18 nt, Human
ugugauuuuaacucuguc

SEQ ID NO: 3462131 - RNA, 17 nt, Human
ugugcaaaaaaauuaaa

SEQ ID NO: 3462132 - RNA, 18 nt, Human
ugugcaaaaauuuuugga

SEQ ID NO: 3462133 - RNA, 12 nt, Human
ugugcaaauccu

SEQ ID NO: 3462134 - RNA, 15 nt, Human
ugugcaaauuaacag

SEQ ID NO: 3462135 - RNA, 14 nt, Human
ugugcaacagacaa

SEQ ID NO: 3462136 - RNA, 16 nt, Human
ugugcucaucagaaac

SEQ ID NO: 3462137 - RNA, 16 nt, Human
ugugcuccgugccucc

SEQ ID NO: 3462138 - RNA, 20 nt, Human
ugugcuccgugccuccacca

SEQ ID NO: 3462139 - RNA, 14 nt, Human
ugugcucuccaagc

SEQ ID NO: 3462140 - RNA, 21 nt, Human
ugugcucuccauucugcuccu

SEQ ID NO: 3462141 - RNA, 13 nt, Human
ugugcugaaugug

SEQ ID NO: 3462142 - RNA, 23 nt, Human
ugugcugccauuugauuuuucua

SEQ ID NO: 3462143 - RNA, 20 nt, Human
ugugcugcccgucuucagcc

SEQ ID NO: 3462144 - RNA, 13 nt, Human
ugugcugcuucuc

SEQ ID NO: 3462145 - RNA, 18 nt, Human
ugugcuggaauucuaaca

SEQ ID NO: 3462146 - RNA, 14 nt, Human
ugugcuggagccac

SEQ ID NO: 3462147 - RNA, 15 nt, Human
ugugcuggagccacu

SEQ ID NO: 3462148 - RNA, 15 nt, Human
ugugcuggaggacug

SEQ ID NO: 3462149 - RNA, 17 nt, Human
ugugcugggagcuccac

SEQ ID NO: 3462150 - RNA, 21 nt, Human
ugugcugggagcuccacucug

SEQ ID NO: 3462151 - RNA, 20 nt, Human
ugugcugguguaugugugaa

SEQ ID NO: 3462152 - RNA, 23 nt, Human
ugugcugguguccugaccacccu

SEQ ID NO: 3462153 - RNA, 12 nt, Human
ugugcugugacu

SEQ ID NO: 3462154 - RNA, 14 nt, Human
ugugcuguguaaag

SEQ ID NO: 3462155 - RNA, 15 nt, Human
ugugcugugugugac

SEQ ID NO: 3462156 - RNA, 19 nt, Human
ugugcuguguuugcucccc

SEQ ID NO: 3462157 - RNA, 14 nt, Human
ugugcuguuucaaa

SEQ ID NO: 3462158 - RNA, 15 nt, Human
ugugcuuaacaggga

SEQ ID NO: 3462159 - RNA, 19 nt, Human
ugugcuuaugguaccagau

SEQ ID NO: 3462160 - RNA, 22 nt, Human
ugugcuuauguaugagguacaa

SEQ ID NO: 3462161 - RNA, 13 nt, Human
ugugcuuauguuu

SEQ ID NO: 3462162 - RNA, 23 nt, Human
ugugcuucacaguagagccagcu

SEQ ID NO: 3462163 - RNA, 23 nt, Human
ugugcuucuaauauuuauugcuu

SEQ ID NO: 3462164 - RNA, 22 nt, Human
ugugcuugaaggcccugcugag

SEQ ID NO: 3462165 - RNA, 19 nt, Human
ugugcuugagccaggaggc

SEQ ID NO: 3462166 - RNA, 15 nt, Human
ugugcuuggucuguu

SEQ ID NO: 3462167 - RNA, 13 nt, Human
ugugcuuucaaga

SEQ ID NO: 3462168 - RNA, 14 nt, Human
ugugcuuucaagau

SEQ ID NO: 3462169 - RNA, 15 nt, Human
ugugcuuuccagcuc

SEQ ID NO: 3462170 - RNA, 16 nt, Human
ugugcuuucccugaac

SEQ ID NO: 3462171 - RNA, 15 nt, Human
ugugcuuucuauugu

SEQ ID NO: 3462172 - RNA, 13 nt, Human
ugugcuuugcucu

SEQ ID NO: 3462173 - RNA, 22 nt, Human
ugugcuuugcucuugucccacg

SEQ ID NO: 3462174 - RNA, 23 nt, Human
ugugcuuugcucuugucccacgu

SEQ ID NO: 3462175 - RNA, 16 nt, Human
ugugcuuuuccuauuu

SEQ ID NO: 3462176 - RNA, 16 nt, Human
ugugcuuuuuuugugu

SEQ ID NO: 3462177 - RNA, 14 nt, Human
uguggaaaaauauu

SEQ ID NO: 3462178 - RNA, 16 nt, Human
uguggaaaaaugagag

SEQ ID NO: 3462179 - RNA, 19 nt, Human
uguggaaaagccaagaggc

SEQ ID NO: 3462180 - RNA, 23 nt, Human
uguggaaaagccaagaggcugca

SEQ ID NO: 3462181 - RNA, 17 nt, Human
uguggaaaaugaaaauu

SEQ ID NO: 3462182 - RNA, 12 nt, Human
uguggaaagccu

SEQ ID NO: 3462183 - RNA, 15 nt, Human
uguggaaagccucug

SEQ ID NO: 3462184 - RNA, 15 nt, Human
uguggaaaguguaaa

SEQ ID NO: 3462185 - RNA, 16 nt, Human
uguggaacauaaaaag

SEQ ID NO: 3462186 - RNA, 22 nt, Human
uguggaacuaauaaauacauac

SEQ ID NO: 3462187 - RNA, 23 nt, Human
uguggaacuaauaaauacauacg

SEQ ID NO: 3462188 - RNA, 14 nt, Human
uguggaagggacua

SEQ ID NO: 3462189 - RNA, 15 nt, Human
uguggaagugugggu

SEQ ID NO: 3462190 - RNA, 13 nt, Human
uguggaaugagug

SEQ ID NO: 3462191 - RNA, 16 nt, Human
uguggaaugagugugc

SEQ ID NO: 3462192 - RNA, 14 nt, Human
uguggacacagcuc

SEQ ID NO: 3462193 - RNA, 18 nt, Human
uguggacacagcucuucu

SEQ ID NO: 3462194 - RNA, 19 nt, Human
uguggacacagcucuucuc

SEQ ID NO: 3462195 - RNA, 17 nt, Human
uguggaccaauuauuga

SEQ ID NO: 3462196 - RNA, 14 nt, Human
uguggacugugaug

SEQ ID NO: 3462197 - RNA, 15 nt, Human
uguggacugugaugc

SEQ ID NO: 3462198 - RNA, 15 nt, Human
uguggacuuaggaag

SEQ ID NO: 3462199 - RNA, 16 nt, Human
uaauguggaagaaaau

SEQ ID NO: 3462200 - RNA, 13 nt, Human
uaauguggcuucu

SEQ ID NO: 3462201 - RNA, 18 nt, Human
uaauguguaguucaugua

SEQ ID NO: 3462202 - RNA, 20 nt, Human
uaauguguaguucauguaaa

SEQ ID NO: 3462203 - RNA, 23 nt, Human
uaauguguggauugccucugaaa

SEQ ID NO: 3462204 - RNA, 13 nt, Human
uaauguguguaug

SEQ ID NO: 3462205 - RNA, 16 nt, Human
uaauguguguaugugu

SEQ ID NO: 3462206 - RNA, 18 nt, Human
uaauguguguauguguau

SEQ ID NO: 3462207 - RNA, 19 nt, Human
uaauguguguauguguauu

SEQ ID NO: 3462208 - RNA, 17 nt, Human
uaauguguuuuagagua

SEQ ID NO: 3462209 - RNA, 17 nt, Human
uaauguuaaauuuguaa

SEQ ID NO: 3462210 - RNA, 14 nt, Human
uaauguuaaccaag

SEQ ID NO: 3462211 - RNA, 12 nt, Human
uaauguuacuga

SEQ ID NO: 3462212 - RNA, 18 nt, Human
uaauguuauaucauaugu

SEQ ID NO: 3462213 - RNA, 13 nt, Human
uaauguugaacaa

SEQ ID NO: 3462214 - RNA, 21 nt, Human
uaauguuggguagaaagagau

SEQ ID NO: 3462215 - RNA, 18 nt, Human
uaauguugugaauaauua

SEQ ID NO: 3462216 - RNA, 18 nt, Human
uaauguuguuauuuaaag

SEQ ID NO: 3462217 - RNA, 22 nt, Human
uaauguuuaugagccagacaaa

SEQ ID NO: 3462218 - RNA, 15 nt, Human
uaauguuuauuaaau

SEQ ID NO: 3462219 - RNA, 14 nt, Human
uaauguuucaaaca

SEQ ID NO: 3462220 - RNA, 22 nt, Human
uaauguuucuggauuucauacu

SEQ ID NO: 3462221 - RNA, 12 nt, Human
uaauguuugcua

SEQ ID NO: 3462222 - RNA, 18 nt, Human
uaauguuuguuaccucca

SEQ ID NO: 3462223 - RNA, 15 nt, Human
uaauguuuuaaaugu

SEQ ID NO: 3462224 - RNA, 22 nt, Human
uaauguuuucuuugcaaaguau

SEQ ID NO: 3462225 - RNA, 22 nt, Human
uaauguuuuuugccacagcuuu

SEQ ID NO: 3462226 - RNA, 20 nt, Human
uaauuaaaaacuaguaguuc

SEQ ID NO: 3462227 - RNA, 22 nt, Human
uaauuaaaaacuaguaguucuc

SEQ ID NO: 3462228 - RNA, 17 nt, Human
uaauuaaaacacaacau

SEQ ID NO: 3462229 - RNA, 16 nt, Human
uaauuaaaguguccau

SEQ ID NO: 3462230 - RNA, 15 nt, Human
uaauuaaauagcuuu

SEQ ID NO: 3462231 - RNA, 12 nt, Human
uaauuaacaugu

SEQ ID NO: 3462232 - RNA, 15 nt, Human
uaauuaacauguuaa

SEQ ID NO: 3462233 - RNA, 20 nt, Human
uaauuaacauguuaaaccau

SEQ ID NO: 3462234 - RNA, 16 nt, Human
uaauuaacugaaacau

SEQ ID NO: 3462235 - RNA, 19 nt, Human
uaauuaaugaaauaucugu

SEQ ID NO: 3462236 - RNA, 14 nt, Human
uaauuaauuguaau

SEQ ID NO: 3462237 - RNA, 13 nt, Human
uaauuaauuucag

SEQ ID NO: 3462238 - RNA, 16 nt, Human
uaauuaauuugauuaa

SEQ ID NO: 3462239 - RNA, 22 nt, Human
uaauuaauuugauuaacaaaua

SEQ ID NO: 3462240 - RNA, 15 nt, Human
uaauuaauuuggagc

SEQ ID NO: 3462241 - RNA, 16 nt, Human
uaauuacaauauuucu

SEQ ID NO: 3462242 - RNA, 19 nt, Human
uaauuacaauauuucugau

SEQ ID NO: 3462243 - RNA, 16 nt, Human
uaauuaccaaccuguu

SEQ ID NO: 3462244 - RNA, 12 nt, Human
uaauuagagcag

SEQ ID NO: 3462245 - RNA, 13 nt, Human
uaauuagcugugc

SEQ ID NO: 3462246 - RNA, 16 nt, Human
uaauuaggaaaaaaac

SEQ ID NO: 3462247 - RNA, 17 nt, Human
uaauuagggguugcuaa

SEQ ID NO: 3462248 - RNA, 18 nt, Human
uaauuagggguugcuaag

SEQ ID NO: 3462249 - RNA, 22 nt, Human
uaauuaggguacauuuauaauu

SEQ ID NO: 3462250 - RNA, 16 nt, Human
uaauuagguuaacauu

SEQ ID NO: 3462251 - RNA, 16 nt, Human
uaauuagugcuaagug

SEQ ID NO: 3462252 - RNA, 16 nt, Human
uaauuauaucuaaaau

SEQ ID NO: 3462253 - RNA, 23 nt, Human
uaauuauaucugaggaauucugu

SEQ ID NO: 3462254 - RNA, 14 nt, Human
uaauuauaugcuau

SEQ ID NO: 3462255 - RNA, 18 nt, Human
uaauuauaugcuauuucu

SEQ ID NO: 3462256 - RNA, 19 nt, Human
uaauuauaugcuauuucua

SEQ ID NO: 3462257 - RNA, 20 nt, Human
uaauuauaugcuauuucuau

SEQ ID NO: 3462258 - RNA, 16 nt, Human
uaauuauauguuguaa

SEQ ID NO: 3462259 - RNA, 19 nt, Human
uaauuaucggaagcagugc

SEQ ID NO: 3462260 - RNA, 23 nt, Human
uaauuaucgggaacaguguuucc

SEQ ID NO: 3462261 - RNA, 13 nt, Human
uaauuaugacagu

SEQ ID NO: 3462262 - RNA, 18 nt, Human
uaauuauuauaaaaauau

SEQ ID NO: 3462263 - RNA, 13 nt, Human
uaauuauuauuua

SEQ ID NO: 3462264 - RNA, 14 nt, Human
uaauuauuauuuau

SEQ ID NO: 3462265 - RNA, 17 nt, Human
uaauuauuauuuauaua

SEQ ID NO: 3462266 - RNA, 17 nt, Human
uaauuauuauuuguguu

SEQ ID NO: 3462267 - RNA, 14 nt, Human
uaauuauuuaugua

SEQ ID NO: 3462268 - RNA, 13 nt, Human
uaauuauuugaau

SEQ ID NO: 3462269 - RNA, 16 nt, Human
uaauuauuugucucag

SEQ ID NO: 3462270 - RNA, 20 nt, Human
uaauuauuuuaauuagguua

SEQ ID NO: 3462271 - RNA, 13 nt, Human
uaauucaagaaaa

SEQ ID NO: 3462272 - RNA, 18 nt, Human
uaauucaaggaauuucuu

SEQ ID NO: 3462273 - RNA, 19 nt, Human
uaauucaauucaaagcugu

SEQ ID NO: 3462274 - RNA, 16 nt, Human
uaauucaccaaaguau

SEQ ID NO: 3462275 - RNA, 17 nt, Human
uaauucaccaaaguauu

SEQ ID NO: 3462276 - RNA, 12 nt, Human
uaauucacucaa

SEQ ID NO: 3462277 - RNA, 22 nt, Human
uaauucagcacugauuucacaa

SEQ ID NO: 3462278 - RNA, 19 nt, Human
uaauucaggcauauuuuaa

SEQ ID NO: 3462279 - RNA, 16 nt, Human
uaauucagguuuuucc

SEQ ID NO: 3462280 - RNA, 17 nt, Human
uaauucagguuuuuccu

SEQ ID NO: 3462281 - RNA, 19 nt, Human
uaauucagguuuuuccuuu

SEQ ID NO: 3462282 - RNA, 18 nt, Human
uacacugaauauuuauau

SEQ ID NO: 3462283 - RNA, 18 nt, Human
uacacugaauuuuuaugu

SEQ ID NO: 3462284 - RNA, 20 nt, Human
uacacugaauuuuuaugugu

SEQ ID NO: 3462285 - RNA, 23 nt, Human
uacacugaauuuuuaugugugau

SEQ ID NO: 3462286 - RNA, 16 nt, Human
uacacugacaccuuug

SEQ ID NO: 3462287 - RNA, 15 nt, Human
uacacugacuugaga

SEQ ID NO: 3462288 - RNA, 18 nt, Human
uacacuggcaaugguagu

SEQ ID NO: 3462289 - RNA, 22 nt, Human
uacacuggcaaugguaguuucu

SEQ ID NO: 3462290 - RNA, 22 nt, Human
uacacuguauuacauaaauaaa

SEQ ID NO: 3462291 - RNA, 20 nt, Human
uacacugucagcagggacug

SEQ ID NO: 3462292 - RNA, 12 nt, Human
uacacugugaac

SEQ ID NO: 3462293 - RNA, 20 nt, Human
uacacuguuucaaacuuuac

SEQ ID NO: 3462294 - RNA, 18 nt, Human
uacacuuuguugcaagau

SEQ ID NO: 3462295 - RNA, 22 nt, Human
uacacuuuguugcaagauguga

SEQ ID NO: 3462296 - RNA, 18 nt, Human
uacacuuuuuuggggaua

SEQ ID NO: 3462297 - RNA, 15 nt, Human
uacagaaaaaccuug

SEQ ID NO: 3462298 - RNA, 19 nt, Human
uacagaaauacuauaacau

SEQ ID NO: 3462299 - RNA, 23 nt, Human
uacagaaauauaauaaaaugugu

SEQ ID NO: 3462300 - RNA, 18 nt, Human
uacagaaauuagccgggc

SEQ ID NO: 3462301 - RNA, 20 nt, Human
uacagaaauuuaauucagaa

SEQ ID NO: 3462302 - RNA, 11 nt, Human
uacagaacuac

SEQ ID NO: 3462303 - RNA, 17 nt, Human
uacagaacucuuucaaa

SEQ ID NO: 3462304 - RNA, 19 nt, Human
uacagaacucuuucaaaac

SEQ ID NO: 3462305 - RNA, 17 nt, Human
uacagaaucauugcuua

SEQ ID NO: 3462306 - RNA, 18 nt, Human
uacagaaucauugcuuau

SEQ ID NO: 3462307 - RNA, 18 nt, Human
uacagaaucuaacuggug

SEQ ID NO: 3462308 - RNA, 18 nt, Human
uacagaauucugcuaccu

SEQ ID NO: 3462309 - RNA, 18 nt, Human
uacagaauugugucugca

SEQ ID NO: 3462310 - RNA, 19 nt, Human
uacagaauugugucugcag

SEQ ID NO: 3462311 - RNA, 13 nt, Human
uacagaauuuuau

SEQ ID NO: 3462312 - RNA, 19 nt, Human
uacagacaaagcguggugg

SEQ ID NO: 3462313 - RNA, 19 nt, Human
uacagacacuaaguuauag

SEQ ID NO: 3462314 - RNA, 18 nt, Human
uacagaccugcuuuuuga

SEQ ID NO: 3462315 - RNA, 20 nt, Human
uacagaccugcuuuuugaaa

SEQ ID NO: 3462316 - RNA, 17 nt, Human
uacagacguaugcuuau

SEQ ID NO: 3462317 - RNA, 18 nt, Human
uacagacguaugcuuauu

SEQ ID NO: 3462318 - RNA, 14 nt, Human
uacagacuucucca

SEQ ID NO: 3462319 - RNA, 15 nt, Human
uacagacuucuccag

SEQ ID NO: 3462320 - RNA, 22 nt, Human
uacagacuuguugugacuuuga

SEQ ID NO: 3462321 - RNA, 15 nt, Human
uacagagaaaccagc

SEQ ID NO: 3462322 - RNA, 18 nt, Human
uacagagaaaccagcuuc

SEQ ID NO: 3462323 - RNA, 19 nt, Human
uacagagaaaccagcuucc

SEQ ID NO: 3462324 - RNA, 16 nt, Human
uacagagaaagaaauu

SEQ ID NO: 3462325 - RNA, 12 nt, Human
uacagagaagcc

SEQ ID NO: 3462326 - RNA, 19 nt, Human
uacagagaagccagcuugu

SEQ ID NO: 3462327 - RNA, 20 nt, Human
uacagagaagccagcuuguu

SEQ ID NO: 3462328 - RNA, 15 nt, Human
uacagagaagccuuc

SEQ ID NO: 3462329 - RNA, 23 nt, Human
uacagagaagccuucaagcucug

SEQ ID NO: 3462330 - RNA, 24 nt, Human
uacagagaagccuucaagcucuga

SEQ ID NO: 3462331 - RNA, 23 nt, Human
uacagagaagugaauaacugcaa

SEQ ID NO: 3462332 - RNA, 16 nt, Human
uacagagaggagaaac

SEQ ID NO: 3462333 - RNA, 20 nt, Human
uacagagaggagaaacacau

SEQ ID NO: 3462334 - RNA, 21 nt, Human
uacagagaggagaaacacauc

SEQ ID NO: 3462335 - RNA, 22 nt, Human
uacagagaggagaaacacaucu

SEQ ID NO: 3462336 - RNA, 16 nt, Human
uacagagaugucucuu

SEQ ID NO: 3462337 - RNA, 16 nt, Human
uacagagcccacgccc

SEQ ID NO: 3462338 - RNA, 19 nt, Human
uacagagcccacgccccca

SEQ ID NO: 3462339 - RNA, 22 nt, Human
uacagagcccacgcccccacug

SEQ ID NO: 3462340 - RNA, 19 nt, Human
uacagagccguaaaaacug

SEQ ID NO: 3462341 - RNA, 16 nt, Human
uacagagcuucccuga

SEQ ID NO: 3462342 - RNA, 15 nt, Human
uacagaggaaaucug

SEQ ID NO: 3462343 - RNA, 18 nt, Human
uacagaggacaguauuug

SEQ ID NO: 3462344 - RNA, 20 nt, Human
uacagaggucucugccggcu

SEQ ID NO: 3462345 - RNA, 23 nt, Human
uacagaggucucugccggcucuu

SEQ ID NO: 3462346 - RNA, 16 nt, Human
uacagagugauagccu

SEQ ID NO: 3462347 - RNA, 20 nt, Human
uacagaguggaauaagacag

SEQ ID NO: 3462348 - RNA, 19 nt, Human
uacagaguguggacucugg

SEQ ID NO: 3462349 - RNA, 13 nt, Human
uacagauaaauga

SEQ ID NO: 3462350 - RNA, 12 nt, Human
uacagauaacau

SEQ ID NO: 3462351 - RNA, 15 nt, Human
uacagauaacauuag

SEQ ID NO: 3462352 - RNA, 19 nt, Human
uacagauaggccuucuugu

SEQ ID NO: 3462353 - RNA, 19 nt, Human
uacagauagucaaaccaua

SEQ ID NO: 3462354 - RNA, 21 nt, Human
uacagauauauuuucuuucuc

SEQ ID NO: 3462355 - RNA, 18 nt, Human
uacagaugaauguauuua

SEQ ID NO: 3462356 - RNA, 22 nt, Human
uacagaugaauguauuuauuug

SEQ ID NO: 3462357 - RNA, 19 nt, Human
uacagaugucccauuuuca

SEQ ID NO: 3462358 - RNA, 13 nt, Human
uacagauuuaaua

SEQ ID NO: 3462359 - RNA, 16 nt, Human
uacagcacccuguggu

SEQ ID NO: 3462360 - RNA, 18 nt, Human
uacagcacuacugggugu

SEQ ID NO: 3462361 - RNA, 19 nt, Human
uacagcacuacuggguguc

SEQ ID NO: 3462362 - RNA, 13 nt, Human
uacagcagcaaga

SEQ ID NO: 3462363 - RNA, 20 nt, Human
uacagcaguagacauuuuaa

SEQ ID NO: 3462364 - RNA, 21 nt, Human
uacagcauuacaaauugcuua

SEQ ID NO: 3462365 - RNA, 18 nt, Human
uacagccaaagauaaucu

SEQ ID NO: 3462366 - RNA, 20 nt, Human
uacagccaggcccagagcaa

SEQ ID NO: 3462367 - RNA, 15 nt, Human
uacagccucagaaac

SEQ ID NO: 3462368 - RNA, 16 nt, Human
uacagcgagaggcaga

SEQ ID NO: 3462369 - RNA, 19 nt, Human
uacagcgagaggcagagaa

SEQ ID NO: 3462370 - RNA, 16 nt, Human
uacagcuaaucagcau

SEQ ID NO: 3462371 - RNA, 14 nt, Human
uacagcugccugca

SEQ ID NO: 3462372 - RNA, 13 nt, Human
uacagcuggcucu

SEQ ID NO: 3462373 - RNA, 20 nt, Human
uacagcugggcuggggagga

SEQ ID NO: 3462374 - RNA, 19 nt, Human
uacagcuguauugucugaa

SEQ ID NO: 3462375 - RNA, 14 nt, Human
uacagcuguuuaag

SEQ ID NO: 3462376 - RNA, 12 nt, Human
uacagcuuucug

SEQ ID NO: 3462377 - RNA, 19 nt, Human
uacagcuuugaucccugac

SEQ ID NO: 3462378 - RNA, 13 nt, Human
uacaggaacuuca

SEQ ID NO: 3462379 - RNA, 12 nt, Human
uacaggcaccca

SEQ ID NO: 3462380 - RNA, 15 nt, Human
uacaggcagcacaga

SEQ ID NO: 3462381 - RNA, 14 nt, Human
uacaggcccugcuc

SEQ ID NO: 3462382 - RNA, 16 nt, Human
uacaggcccugcuccu

SEQ ID NO: 3462383 - RNA, 20 nt, Human
uacaggcugacguuccgggc

SEQ ID NO: 3462384 - RNA, 22 nt, Human
uacaggcugacguuccgggcaa

SEQ ID NO: 3462385 - RNA, 20 nt, Human
uacagggaaugccugagugc

SEQ ID NO: 3462386 - RNA, 16 nt, Human
uacagggagccuccug

SEQ ID NO: 3462387 - RNA, 18 nt, Human
uacagggagccuccugcc

SEQ ID NO: 3462388 - RNA, 22 nt, Human
uacagggccaaacgcugagcca

SEQ ID NO: 3462389 - RNA, 15 nt, Human
uacaggggccagaag

SEQ ID NO: 3462390 - RNA, 17 nt, Human
uacagggggucuggcug

SEQ ID NO: 3462391 - RNA, 18 nt, Human
uacagggggucuggcugg

SEQ ID NO: 3462392 - RNA, 19 nt, Human
uacaggguaacugugcuga

SEQ ID NO: 3462393 - RNA, 18 nt, Human
uacaggguagcagguacc

SEQ ID NO: 3462394 - RNA, 15 nt, Human
uacaggguuuuuacc

SEQ ID NO: 3462395 - RNA, 17 nt, Human
uacaggguuuuuaccug

SEQ ID NO: 3462396 - RNA, 23 nt, Human
uacaggguuuuuaccugucacau

SEQ ID NO: 3462397 - RNA, 15 nt, Human
uacaguaaauaaauu

SEQ ID NO: 3462398 - RNA, 16 nt, Human
uacaguaaauaaauug

SEQ ID NO: 3462399 - RNA, 21 nt, Human
uacaguaaauaaauuguuuga

SEQ ID NO: 3462400 - RNA, 18 nt, Human
uacaguaacuuuaugugu

SEQ ID NO: 3462401 - RNA, 14 nt, Human
uacaguaagcugcu

SEQ ID NO: 3462402 - RNA, 18 nt, Human
uacaguaagcugcucuau

SEQ ID NO: 3462403 - RNA, 15 nt, Human
uacaguaaugucaua

SEQ ID NO: 3462404 - RNA, 17 nt, Human
uacaguagauuuuccaa

SEQ ID NO: 3462405 - RNA, 21 nt, Human
uguucggaagggguuccucaa

SEQ ID NO: 3462406 - RNA, 19 nt, Human
uguucgggccaaggaccug

SEQ ID NO: 3462407 - RNA, 22 nt, Human
uguucgggccaaggaccugaga

SEQ ID NO: 3462408 - RNA, 15 nt, Human
uguucgggugugggu

SEQ ID NO: 3462409 - RNA, 19 nt, Human
uguucuaaagcucugacau

SEQ ID NO: 3462410 - RNA, 16 nt, Human
uguucuaaccuuuaca

SEQ ID NO: 3462411 - RNA, 16 nt, Human
uguucuaagaugugau

SEQ ID NO: 3462412 - RNA, 22 nt, Human
uguucuaagaugugauauucua

SEQ ID NO: 3462413 - RNA, 14 nt, Human
uguucuaaggcucu

SEQ ID NO: 3462414 - RNA, 19 nt, Human
uguucuaaggcucugagag

SEQ ID NO: 3462415 - RNA, 21 nt, Human
uguucuaguuuuuuacuuuug

SEQ ID NO: 3462416 - RNA, 14 nt, Human
uguucuauccaaac

SEQ ID NO: 3462417 - RNA, 18 nt, Human
uguucuauccaaacaugu

SEQ ID NO: 3462418 - RNA, 19 nt, Human
uguucuauccaaacaugua

SEQ ID NO: 3462419 - RNA, 17 nt, Human
uguucuaugguuaugaa

SEQ ID NO: 3462420 - RNA, 23 nt, Human
uguucucacacuggucugcuguc

SEQ ID NO: 3462421 - RNA, 22 nt, Human
uguucucagaaucccuuaacag

SEQ ID NO: 3462422 - RNA, 15 nt, Human
uguucucagcucccc

SEQ ID NO: 3462423 - RNA, 21 nt, Human
uguucuccagucauuauguua

SEQ ID NO: 3462424 - RNA, 16 nt, Human
uguucuccgucccugc

SEQ ID NO: 3462425 - RNA, 14 nt, Human
uacagucuaaagcu

SEQ ID NO: 3462426 - RNA, 15 nt, Human
uacagucucgucucu

SEQ ID NO: 3462427 - RNA, 17 nt, Human
uacagucucgucucuuu

SEQ ID NO: 3462428 - RNA, 16 nt, Human
uacagucugucaugaa

SEQ ID NO: 3462429 - RNA, 17 nt, Human
uacagucugucuucugu

SEQ ID NO: 3462430 - RNA, 18 nt, Human
uacagucugucuucugua

SEQ ID NO: 3462431 - RNA, 22 nt, Human
uacagucugucuucuguauaua

SEQ ID NO: 3462432 - RNA, 22 nt, Human
uacagucuuccauuugcaaggg

SEQ ID NO: 3462433 - RNA, 17 nt, Human
uacagucuugcagcagg

SEQ ID NO: 3462434 - RNA, 20 nt, Human
uacagugaaaauguaagcug

SEQ ID NO: 3462435 - RNA, 22 nt, Human
uacagugaaaauguaagcuguu

SEQ ID NO: 3462436 - RNA, 12 nt, Human
uacagugagcca

SEQ ID NO: 3462437 - RNA, 22 nt, Human
uacagugcagagccuucucaga

SEQ ID NO: 3462438 - RNA, 16 nt, Human
uacagugccuaaaaua

SEQ ID NO: 3462439 - RNA, 22 nt, Human
uacaguggauugcucaucucag

SEQ ID NO: 3462440 - RNA, 20 nt, Human
uacaguggggaaugaagaua

SEQ ID NO: 3462441 - RNA, 18 nt, Human
uacaguggugccaucauu

SEQ ID NO: 3462442 - RNA, 22 nt, Human
uacaguggugccaucauugcug

SEQ ID NO: 3462443 - RNA, 13 nt, Human
uacagugguucua

SEQ ID NO: 3462444 - RNA, 22 nt, Human
uacagugguuuuauacugaagg

SEQ ID NO: 3462445 - RNA, 15 nt, Human
uacaguguacagucu

SEQ ID NO: 3462446 - RNA, 21 nt, Human
uacagugucuuuuuuuguaua

SEQ ID NO: 3462447 - RNA, 12 nt, Human
uacaguguuacc

SEQ ID NO: 3462448 - RNA, 16 nt, Human
uacaguguuauuuucu

SEQ ID NO: 3462449 - RNA, 12 nt, Human
uacaguguuccg

SEQ ID NO: 3462450 - RNA, 14 nt, Human
uacaguguucuguu

SEQ ID NO: 3462451 - RNA, 15 nt, Human
uacaguguucuguuu

SEQ ID NO: 3462452 - RNA, 18 nt, Human
uacaguuaaggaauauaa

SEQ ID NO: 3462453 - RNA, 13 nt, Human
uacaguuaaguuu

SEQ ID NO: 3462454 - RNA, 14 nt, Human
uacaguuacuuuuc

SEQ ID NO: 3462455 - RNA, 16 nt, Human
uacaguuacuuuuccu

SEQ ID NO: 3462456 - RNA, 21 nt, Human
uacaguuagggcuccuauuca

SEQ ID NO: 3462457 - RNA, 14 nt, Human
uacaguuauaaaau

SEQ ID NO: 3462458 - RNA, 19 nt, Human
uacaguuaucuaaguuaau

SEQ ID NO: 3462459 - RNA, 18 nt, Human
uacaguuccuagguauaa

SEQ ID NO: 3462460 - RNA, 13 nt, Human
uacaguucugcuc

SEQ ID NO: 3462461 - RNA, 19 nt, Human
uacaguugaaauaacugga

SEQ ID NO: 3462462 - RNA, 21 nt, Human
uacaguugggaaaauaugucc

SEQ ID NO: 3462463 - RNA, 20 nt, Human
uacaguuguuuuuugaaaac

SEQ ID NO: 3462464 - RNA, 18 nt, Human
uacaguuuguuaguauga

SEQ ID NO: 3462465 - RNA, 19 nt, Human
uacaguuuguuaguaugag

SEQ ID NO: 3462466 - RNA, 16 nt, Human
uacaguuuuaaagaau

SEQ ID NO: 3462467 - RNA, 19 nt, Human
uacaguuuuaacuguggau

SEQ ID NO: 3462468 - RNA, 18 nt, Human
uacaguuuuaugcucuuu

SEQ ID NO: 3462469 - RNA, 19 nt, Human
uacaguuuuaugcucuuuu

SEQ ID NO: 3462470 - RNA, 19 nt, Human
uacaguuuuccuaaaugua

SEQ ID NO: 3462471 - RNA, 18 nt, Human
uacaguuuugaguagagu

SEQ ID NO: 3462472 - RNA, 16 nt, Human
uacauaaacaaguccu

SEQ ID NO: 3462473 - RNA, 13 nt, Human
uacauaaaggugg

SEQ ID NO: 3462474 - RNA, 12 nt, Human
uacauaaauugg

SEQ ID NO: 3462475 - RNA, 13 nt, Human
uacauaacaagaa

SEQ ID NO: 3462476 - RNA, 18 nt, Human
uacauaacaagaaaauca

SEQ ID NO: 3462477 - RNA, 19 nt, Human
uacauaacaggguaaauua

SEQ ID NO: 3462478 - RNA, 18 nt, Human
uacauaacuaaauuugau

SEQ ID NO: 3462479 - RNA, 13 nt, Human
uacauaacugaaa

SEQ ID NO: 3462480 - RNA, 14 nt, Human
uacauaacugccuu

SEQ ID NO: 3462481 - RNA, 19 nt, Human
uacauaagauaaaugugcu

SEQ ID NO: 3462482 - RNA, 22 nt, Human
uacauaagauaaaugugcugaa

SEQ ID NO: 3462483 - RNA, 22 nt, Human
uacauaagcggcguaaguuuaa

SEQ ID NO: 3462484 - RNA, 22 nt, Human
uacauaauacacuugcccugcu

SEQ ID NO: 3462485 - RNA, 23 nt, Human
uacauaauacugaaccacuugua

SEQ ID NO: 3462486 - RNA, 15 nt, Human
uacauaaucuguaca

SEQ ID NO: 3462487 - RNA, 20 nt, Human
uacauaaucuguacaaugaa

SEQ ID NO: 3462488 - RNA, 13 nt, Human
uacauaaugcuua

SEQ ID NO: 3462489 - RNA, 20 nt, Human
uacauaaugcuuaauuucua

SEQ ID NO: 3462490 - RNA, 21 nt, Human
uacauaaugcuuaauuucuaa

SEQ ID NO: 3462491 - RNA, 19 nt, Human
uacauaaugggccacugaa

SEQ ID NO: 3462492 - RNA, 19 nt, Human
uacauacuaugaaauaugu

SEQ ID NO: 3462493 - RNA, 15 nt, Human
uacauacuuuaucaa

SEQ ID NO: 3462494 - RNA, 23 nt, Human
uacauacuuuaucaaugugucuu

SEQ ID NO: 3462495 - RNA, 12 nt, Human
uacauacuuuuu

SEQ ID NO: 3462496 - RNA, 15 nt, Human
uacauacuuuuuggg

SEQ ID NO: 3462497 - RNA, 21 nt, Human
uacauagauuuauuuuucagu

SEQ ID NO: 3462498 - RNA, 22 nt, Human
uacauagugcugcugugugcuu

SEQ ID NO: 3462499 - RNA, 12 nt, Human
uacauaguguaa

SEQ ID NO: 3462500 - RNA, 17 nt, Human
uacauaguguaggcuuu

SEQ ID NO: 3462501 - RNA, 23 nt, Human
uacauaguguaggcuuuacuuag

SEQ ID NO: 3462502 - RNA, 19 nt, Human
uacauauaagugauugcug

SEQ ID NO: 3462503 - RNA, 23 nt, Human
uacauaucgcugacuucauggaa

SEQ ID NO: 3462504 - RNA, 13 nt, Human
uacauaugaaauu

SEQ ID NO: 3462505 - RNA, 22 nt, Human
uacauaugaguguggaagccgg

SEQ ID NO: 3462506 - RNA, 21 nt, Human
uacauaugcuuuaagaaucga

SEQ ID NO: 3462507 - RNA, 17 nt, Human
uacauauggauguuacu

SEQ ID NO: 3462508 - RNA, 17 nt, Human
uacauauguaaaauaaa

SEQ ID NO: 3462509 - RNA, 20 nt, Human
uacauauguaaaauaaaauu

SEQ ID NO: 3462510 - RNA, 13 nt, Human
uacauauguaaac

SEQ ID NO: 3462511 - RNA, 14 nt, Human
uacauauguaaaca

SEQ ID NO: 3462512 - RNA, 17 nt, Human
uacauauguaaacauaa

SEQ ID NO: 3462513 - RNA, 19 nt, Human
uacauauguagacuauaua

SEQ ID NO: 3462514 - RNA, 20 nt, Human
uacauauguagacuauauac

SEQ ID NO: 3462515 - RNA, 23 nt, Human
uacauauguagacuauauacaug

SEQ ID NO: 3462516 - RNA, 21 nt, Human
uacauauuagcgacaacagau

SEQ ID NO: 3462517 - RNA, 18 nt, Human
uacauauuaggaaaauau

SEQ ID NO: 3462518 - RNA, 23 nt, Human
uacauauuaggaaaauauggguu

SEQ ID NO: 3462519 - RNA, 21 nt, Human
uacauauuugcauauguauga

SEQ ID NO: 3462520 - RNA, 18 nt, Human
uacauauuuuuguagcac

SEQ ID NO: 3462521 - RNA, 16 nt, Human
uacaucacguuaaagu

SEQ ID NO: 3462522 - RNA, 23 nt, Human
uacaucacugcuugaugaagcaa

SEQ ID NO: 3462523 - RNA, 16 nt, Human
uacaucacuugagaca

SEQ ID NO: 3462524 - RNA, 23 nt, Human
uacaucaguuauucauucuguga

SEQ ID NO: 3462525 - RNA, 13 nt, Human
uacaucauuucuu

SEQ ID NO: 3462526 - RNA, 14 nt, Human
uacaucauuucuuu

SEQ ID NO: 3462527 - RNA, 23 nt, Human
uacauccaaagcagacagcucca

SEQ ID NO: 3462528 - RNA, 20 nt, Human
uacaucccauguaacagaaa

SEQ ID NO: 3462529 - RNA, 21 nt, Human
uacaucccauguaacagaaag

SEQ ID NO: 3462530 - RNA, 15 nt, Human
uacauccucaugcag

SEQ ID NO: 3462531 - RNA, 21 nt, Human
uacauccuuguggcacauuuu

SEQ ID NO: 3462532 - RNA, 15 nt, Human
uacaucgcccuccac

SEQ ID NO: 3462533 - RNA, 13 nt, Human
uacaucuggcuua

SEQ ID NO: 3462534 - RNA, 15 nt, Human
uacaucuggcuuauu

SEQ ID NO: 3462535 - RNA, 21 nt, Human
uacaucuggcuuauuuuaaug

SEQ ID NO: 3462536 - RNA, 15 nt, Human
uacaucuuucacauu

SEQ ID NO: 3462537 - RNA, 20 nt, Human
uacaucuuucacauuggcua

SEQ ID NO: 3462538 - RNA, 20 nt, Human
uacaucuuuucaacaaguaa

SEQ ID NO: 3462539 - RNA, 16 nt, Human
uacaugaaaacacauu

SEQ ID NO: 3462540 - RNA, 21 nt, Human
uacaugaaaauuuuaaaaaua

SEQ ID NO: 3462541 - RNA, 21 nt, Human
uacaugaaacagaaacaaaaa

SEQ ID NO: 3462542 - RNA, 20 nt, Human
uacaugaagaauagaaacaa

SEQ ID NO: 3462543 - RNA, 15 nt, Human
uacaugaaguauuuu

SEQ ID NO: 3462544 - RNA, 21 nt, Human
uacaugaaguauuuuuucagu

SEQ ID NO: 3462545 - RNA, 22 nt, Human
uacaugaaguauuuuuucagua

SEQ ID NO: 3462546 - RNA, 15 nt, Human
uacaugacacugaaa

SEQ ID NO: 3462547 - RNA, 17 nt, Human
uacaugacacugaaaug

SEQ ID NO: 3462548 - RNA, 17 nt, Human
uacaugagaacaaacag

SEQ ID NO: 3462549 - RNA, 16 nt, Human
uacaugagaaggaacu

SEQ ID NO: 3462550 - RNA, 19 nt, Human
uacaugaggaacuguagau

SEQ ID NO: 3462551 - RNA, 20 nt, Human
uacaugaggaacuguagaug

SEQ ID NO: 3462552 - RNA, 22 nt, Human
uacaugaugauuucagaaacaa

SEQ ID NO: 3462553 - RNA, 18 nt, Human
uacaugcaaaaagaaaug

SEQ ID NO: 3462554 - RNA, 21 nt, Human
uacaugcacuuggcugcauaa

SEQ ID NO: 3462555 - RNA, 14 nt, Human
uacaugcagcccau

SEQ ID NO: 3462556 - RNA, 11 nt, Human
uacaugcauac

SEQ ID NO: 3462557 - RNA, 20 nt, Human
uacaugcauacacucucaaa

SEQ ID NO: 3462558 - RNA, 17 nt, Human
uacaugcauacuucaaa

SEQ ID NO: 3462559 - RNA, 20 nt, Human
uacaugcauauaaugaauaa

SEQ ID NO: 3462560 - RNA, 19 nt, Human
uacaugccuaccaauauuu

SEQ ID NO: 3462561 - RNA, 16 nt, Human
uacaugcuuauuccau

SEQ ID NO: 3462562 - RNA, 20 nt, Human
uacaugcuuauuccaugacu

SEQ ID NO: 3462563 - RNA, 21 nt, Human
uacaugcuuauuccaugacug

SEQ ID NO: 3462564 - RNA, 22 nt, Human
uacauggacaauacccccaggc

SEQ ID NO: 3462565 - RNA, 16 nt, Human
uacauggacagaauuu

SEQ ID NO: 3462566 - RNA, 16 nt, Human
uacauggcagaguuug

SEQ ID NO: 3462567 - RNA, 19 nt, Human
uacauggcagaguuugugu

SEQ ID NO: 3462568 - RNA, 13 nt, Human
uuaaauagaugac

SEQ ID NO: 3462569 - RNA, 18 nt, Human
uuaaauaguaaaaauaaa

SEQ ID NO: 3462570 - RNA, 13 nt, Human
uuaaauauaauuc

SEQ ID NO: 3462571 - RNA, 19 nt, Human
uuaaauauaauucuguaaa

SEQ ID NO: 3462572 - RNA, 20 nt, Human
uuaaauauaauucuguaaau

SEQ ID NO: 3462573 - RNA, 13 nt, Human
uuaaauauagaau

SEQ ID NO: 3462574 - RNA, 14 nt, Human
uuaaauauagauua

SEQ ID NO: 3462575 - RNA, 18 nt, Human
uuaaauauagauuagaaa

SEQ ID NO: 3462576 - RNA, 16 nt, Human
uuaaauauauguaugu

SEQ ID NO: 3462577 - RNA, 17 nt, Human
uuaaauauauguaugua

SEQ ID NO: 3462578 - RNA, 19 nt, Human
uuaaauauauguauguaaa

SEQ ID NO: 3462579 - RNA, 22 nt, Human
uuaaauauauguauguaaaaau

SEQ ID NO: 3462580 - RNA, 22 nt, Human
uuaaauauauuuucaaaguaca

SEQ ID NO: 3462581 - RNA, 16 nt, Human
uuaaauaucaaucauu

SEQ ID NO: 3462582 - RNA, 17 nt, Human
uuaaauaucaaucauuu

SEQ ID NO: 3462583 - RNA, 17 nt, Human
uuaaauaucugaacauu

SEQ ID NO: 3462584 - RNA, 16 nt, Human
uuaaauaucuuuuaug

SEQ ID NO: 3462585 - RNA, 18 nt, Human
uuaaauauuuacauauga

SEQ ID NO: 3462586 - RNA, 13 nt, Human
uuaaauauuuagu

SEQ ID NO: 3462587 - RNA, 14 nt, Human
uuaaaucaaagaua

SEQ ID NO: 3462588 - RNA, 20 nt, Human
uuaaaucauuuuaggaaagg

SEQ ID NO: 3462589 - RNA, 20 nt, Human
uuaaaucccauucauaacuu

SEQ ID NO: 3462590 - RNA, 16 nt, Human
uuaaauccuguugaaa

SEQ ID NO: 3462591 - RNA, 13 nt, Human
uuaaauccuuuua

SEQ ID NO: 3462592 - RNA, 19 nt, Human
uuaaauccuuuuaccuuuu

SEQ ID NO: 3462593 - RNA, 16 nt, Human
uuaaaucugugaugau

SEQ ID NO: 3462594 - RNA, 12 nt, Human
uuaaaugaaaga

SEQ ID NO: 3462595 - RNA, 14 nt, Human
uuaaaugaaauugu

SEQ ID NO: 3462596 - RNA, 14 nt, Human
uuaaaugaacaaga

SEQ ID NO: 3462597 - RNA, 18 nt, Human
uuaaaugaacaagagaag

SEQ ID NO: 3462598 - RNA, 11 nt, Human
uuaaaugacuc

SEQ ID NO: 3462599 - RNA, 18 nt, Human
uuaaaugacucuucccuc

SEQ ID NO: 3462600 - RNA, 17 nt, Human
uuaaaugcaccuggaau

SEQ ID NO: 3462601 - RNA, 18 nt, Human
uuaaaugcaccuggaaua

SEQ ID NO: 3462602 - RNA, 15 nt, Human
uuaaaugcccagccc

SEQ ID NO: 3462603 - RNA, 16 nt, Human
uuaaaugcccagcccc

SEQ ID NO: 3462604 - RNA, 23 nt, Human
uuaaaugggcuacuuuguccuuu

SEQ ID NO: 3462605 - RNA, 21 nt, Human
uuaaauggguagagaaacacu

SEQ ID NO: 3462606 - RNA, 22 nt, Human
uuaaaugguaauaagcacugua

SEQ ID NO: 3462607 - RNA, 19 nt, Human
uuaaauguacagacauauu

SEQ ID NO: 3462608 - RNA, 14 nt, Human
uuaaauguauacua

SEQ ID NO: 3462609 - RNA, 22 nt, Human
uuaaaugucuaauguauuuuau

SEQ ID NO: 3462610 - RNA, 12 nt, Human
uuaaaugugaau

SEQ ID NO: 3462611 - RNA, 16 nt, Human
uuaaaugugaauuacu

SEQ ID NO: 3462612 - RNA, 16 nt, Human
uuaaauguuaugacua

SEQ ID NO: 3462613 - RNA, 16 nt, Human
uuaaauguuauguaua

SEQ ID NO: 3462614 - RNA, 11 nt, Human
uuaaauguuug

SEQ ID NO: 3462615 - RNA, 12 nt, Human
uuaaauguuuga

SEQ ID NO: 3462616 - RNA, 19 nt, Human
uuaaauguuuuguaaacuu

SEQ ID NO: 3462617 - RNA, 23 nt, Human
uuaaauguuuuuuuuuaaagacu

SEQ ID NO: 3462618 - RNA, 16 nt, Human
uuaaauuacaauuuua

SEQ ID NO: 3462619 - RNA, 18 nt, Human
uuaaauuacaauuuuauc

SEQ ID NO: 3462620 - RNA, 13 nt, Human
uuaaauuacagaa

SEQ ID NO: 3462621 - RNA, 14 nt, Human
uuaaauuagaaaau

SEQ ID NO: 3462622 - RNA, 17 nt, Human
uuaaauuagaaaauauu

SEQ ID NO: 3462623 - RNA, 21 nt, Human
uuaaauuauaacuuaaaauau

SEQ ID NO: 3462624 - RNA, 18 nt, Human
uuaaauuauaaggacugc

SEQ ID NO: 3462625 - RNA, 22 nt, Human
uuaaauucacaauagaaacuca

SEQ ID NO: 3462626 - RNA, 22 nt, Human
uuaaauucccguuuugucacuu

SEQ ID NO: 3462627 - RNA, 20 nt, Human
uucccagcucucccucuggc

SEQ ID NO: 3462628 - RNA, 23 nt, Human
uucccagcucucccucuggcccu

SEQ ID NO: 3462629 - RNA, 13 nt, Human
uucccaggacccu

SEQ ID NO: 3462630 - RNA, 19 nt, Human
uucccaggaguucugcuca

SEQ ID NO: 3462631 - RNA, 20 nt, Human
uucccaggaugagcauccca

SEQ ID NO: 3462632 - RNA, 14 nt, Human
uucccagggaagug

SEQ ID NO: 3462633 - RNA, 22 nt, Human
uucccagggaagugcucugaua

SEQ ID NO: 3462634 - RNA, 10 nt, Human
uucccagggu

SEQ ID NO: 3462635 - RNA, 23 nt, Human
uucccaggguagcccgccugcca

SEQ ID NO: 3462636 - RNA, 17 nt, Human
uucccagugaauucuug

SEQ ID NO: 3462637 - RNA, 14 nt, Human
uucccaguggcugc

SEQ ID NO: 3462638 - RNA, 21 nt, Human
uucccaguggcugcugcccag

SEQ ID NO: 3462639 - RNA, 15 nt, Human
uucccauaauuuucu

SEQ ID NO: 3462640 - RNA, 14 nt, Human
uucccauccccagc

SEQ ID NO: 3462641 - RNA, 14 nt, Human
uucccauccuaccc

SEQ ID NO: 3462642 - RNA, 21 nt, Human
uucccaucuccuuucucuggu

SEQ ID NO: 3462643 - RNA, 23 nt, Human
uucccauggggagggauucuggu

SEQ ID NO: 3462644 - RNA, 13 nt, Human
uucccauguuaaa

SEQ ID NO: 3462645 - RNA, 11 nt, Human
uucccauucca

SEQ ID NO: 3462646 - RNA, 14 nt, Human
uucccauucuugca

SEQ ID NO: 3462647 - RNA, 17 nt, Human
uucccauugaaaaugua

SEQ ID NO: 3462648 - RNA, 13 nt, Human
uucccauuuagaa

SEQ ID NO: 3462649 - RNA, 14 nt, Human
uucccauuucagcu

SEQ ID NO: 3462650 - RNA, 16 nt, Human
uucccauuugcuccuu

SEQ ID NO: 3462651 - RNA, 20 nt, Human
uucccauuugugccagagga

SEQ ID NO: 3462652 - RNA, 19 nt, Human
uuccccaacagugugaagu

SEQ ID NO: 3462653 - RNA, 23 nt, Human
uuccccaacagugugaaguuaga

SEQ ID NO: 3462654 - RNA, 14 nt, Human
uuccccaagacauu

SEQ ID NO: 3462655 - RNA, 13 nt, Human
uuccccaauuaau

SEQ ID NO: 3462656 - RNA, 15 nt, Human
uuccccaccagaugc

SEQ ID NO: 3462657 - RNA, 21 nt, Human
uuccccaccagugaaugaaag

SEQ ID NO: 3462658 - RNA, 21 nt, Human
uuccccacccuccccuuccca

SEQ ID NO: 3462659 - RNA, 22 nt, Human
uuccccacccuccccuucccag

SEQ ID NO: 3462660 - RNA, 22 nt, Human
uuccccagcaugcaccacgggc

SEQ ID NO: 3462661 - RNA, 14 nt, Human
uuccccagcccagg

SEQ ID NO: 3462662 - RNA, 21 nt, Human
uuccccaggaggccagccuug

SEQ ID NO: 3462663 - RNA, 16 nt, Human
uuccccauacucuguc

SEQ ID NO: 3462664 - RNA, 18 nt, Human
uuccccaucuucuaaacc

SEQ ID NO: 3462665 - RNA, 12 nt, Human
uuccccaugaca

SEQ ID NO: 3462666 - RNA, 21 nt, Human
uuccccaugcuuccuugccug

SEQ ID NO: 3462667 - RNA, 19 nt, Human
uuccccaugucucgacuca

SEQ ID NO: 3462668 - RNA, 23 nt, Human
uucccccaaauuuaaagaaguau

SEQ ID NO: 3462669 - RNA, 22 nt, Human
uucccccaccgguccagcuggc

SEQ ID NO: 3462670 - RNA, 23 nt, Human
uucccccaccgguccagcuggcc

SEQ ID NO: 3462671 - RNA, 17 nt, Human
uucccccacuacugcag

SEQ ID NO: 3462672 - RNA, 18 nt, Human
uucccccacuacugcagc

SEQ ID NO: 3462673 - RNA, 14 nt, Human
uucccccagcccug

SEQ ID NO: 3462674 - RNA, 15 nt, Human
uucccccauagccac

SEQ ID NO: 3462675 - RNA, 17 nt, Human
uucccccauagccaccc

SEQ ID NO: 3462676 - RNA, 18 nt, Human
uuccccccacucucccca

SEQ ID NO: 3462677 - RNA, 19 nt, Human
uuccccccacucuccccac

SEQ ID NO: 3462678 - RNA, 13 nt, Human
uucccccgccgcu

SEQ ID NO: 3462679 - RNA, 18 nt, Human
uucccccucucccaguug

SEQ ID NO: 3462680 - RNA, 22 nt, Human
uucccccuguuucagaggcuca

SEQ ID NO: 3462681 - RNA, 17 nt, Human
uucccccuuccaaauaa

SEQ ID NO: 3462682 - RNA, 21 nt, Human
uucccccuuccaaauaauaaa

SEQ ID NO: 3462683 - RNA, 19 nt, Human
uucccccuuuucugcauuu

SEQ ID NO: 3462684 - RNA, 16 nt, Human
uuccccgagggaugau

SEQ ID NO: 3462685 - RNA, 21 nt, Human
uuccccuacccccuccucucu

SEQ ID NO: 3462686 - RNA, 17 nt, Human
uuccccucccuggcucc

SEQ ID NO: 3462687 - RNA, 20 nt, Human
uuccccuccuaccccuccca

SEQ ID NO: 3462688 - RNA, 15 nt, Human
uuccccuccuccacu

SEQ ID NO: 3462689 - RNA, 17 nt, Human
uuccccucuugucuccc

SEQ ID NO: 3462690 - RNA, 18 nt, Human
uuccccucuugucucccc

SEQ ID NO: 3462691 - RNA, 19 nt, Human
uuccccucuugucuccccu

SEQ ID NO: 3462692 - RNA, 13 nt, Human
uuccccuguccug

SEQ ID NO: 3462693 - RNA, 11 nt, Human
uuccccugugu

SEQ ID NO: 3462694 - RNA, 14 nt, Human
uuccccuguucacu

SEQ ID NO: 3462695 - RNA, 17 nt, Human
uuccccuguucacucua

SEQ ID NO: 3462696 - RNA, 19 nt, Human
uuccccuuauccucccugu

SEQ ID NO: 3462697 - RNA, 20 nt, Human
uuccccuuauccucccugua

SEQ ID NO: 3462698 - RNA, 20 nt, Human
uuccccuugcccuugcccug

SEQ ID NO: 3462699 - RNA, 19 nt, Human
uuccccuuuccugucccac

SEQ ID NO: 3462700 - RNA, 22 nt, Human
uucccgagcaaagucuaaaguu

SEQ ID NO: 3462701 - RNA, 19 nt, Human
uucccgccgcccagcccac

SEQ ID NO: 3462702 - RNA, 15 nt, Human
uucccgcucagcccu

SEQ ID NO: 3462703 - RNA, 21 nt, Human
uucccggacugcaagcagggc

SEQ ID NO: 3462704 - RNA, 15 nt, Human
uucccggucccgagu

SEQ ID NO: 3462705 - RNA, 23 nt, Human
uucccguggaacguuuuuccugu

SEQ ID NO: 3462706 - RNA, 16 nt, Human
uucccguggccccagc

SEQ ID NO: 3462707 - RNA, 12 nt, Human
uucccuaagcca

SEQ ID NO: 3462708 - RNA, 17 nt, Human
uucccuacugaagcccu

SEQ ID NO: 3462709 - RNA, 14 nt, Human
uucccuacuuccug

SEQ ID NO: 3462710 - RNA, 22 nt, Human
uucccuagaaacuuccaaaucc

SEQ ID NO: 3462711 - RNA, 19 nt, Human
uucccuagucuauucauua

SEQ ID NO: 3462712 - RNA, 15 nt, Human
uucccuauuagagaa

SEQ ID NO: 3462713 - RNA, 22 nt, Human
uuccuucuuugauaauguuaaa

SEQ ID NO: 3462714 - RNA, 21 nt, Human
uuccuugaccugcauuguaaa

SEQ ID NO: 3462715 - RNA, 17 nt, Human
uuccuugagaaaaacaa

SEQ ID NO: 3462716 - RNA, 24 nt, Human
uuccuugagacacggagcccagcc

SEQ ID NO: 3462717 - RNA, 16 nt, Human
uuccuugaucauuuug

SEQ ID NO: 3462718 - RNA, 13 nt, Human
uuccuugcauaca

SEQ ID NO: 3462719 - RNA, 16 nt, Human
uuccuugcucugcacc

SEQ ID NO: 3462720 - RNA, 18 nt, Human
uuccuuggcaugccuucc

SEQ ID NO: 3462721 - RNA, 21 nt, Human
uuccuuggcaugccuuccagc

SEQ ID NO: 3462722 - RNA, 21 nt, Human
uuccuuggcucccauucacuc

SEQ ID NO: 3462723 - RNA, 20 nt, Human
uuccuuguagccuuuugacu

SEQ ID NO: 3462724 - RNA, 21 nt, Human
uuccuuguccccacacuccua

SEQ ID NO: 3462725 - RNA, 13 nt, Human
uuccuugugcaaa

SEQ ID NO: 3462726 - RNA, 19 nt, Human
uuccuuguuacccaugaaa

SEQ ID NO: 3462727 - RNA, 20 nt, Human
uuccuuguuacccaugaaaa

SEQ ID NO: 3462728 - RNA, 17 nt, Human
uuccuuuaacaacaugu

SEQ ID NO: 3462729 - RNA, 19 nt, Human
uuccuuuaacaacauguuu

SEQ ID NO: 3462730 - RNA, 22 nt, Human
uuccuuuacuuucccuugcuuu

SEQ ID NO: 3462731 - RNA, 22 nt, Human
uuccuuuccaacguuuggaaga

SEQ ID NO: 3462732 - RNA, 16 nt, Human
uuccuuuccccagccc

SEQ ID NO: 3462733 - RNA, 13 nt, Human
uuccuuucccuuc

SEQ ID NO: 3462734 - RNA, 15 nt, Human
uuccuuucccuuccu

SEQ ID NO: 3462735 - RNA, 17 nt, Human
uuccuuucccuuccucu

SEQ ID NO: 3462736 - RNA, 14 nt, Human
uuccuuucuccagg

SEQ ID NO: 3462737 - RNA, 13 nt, Human
uuccuuucucuuu

SEQ ID NO: 3462738 - RNA, 20 nt, Human
uuccuuucuugguucauaaa

SEQ ID NO: 3462739 - RNA, 14 nt, Human
uuccuuugcauauu

SEQ ID NO: 3462740 - RNA, 15 nt, Human
uuccuuuggagcuuu

SEQ ID NO: 3462741 - RNA, 17 nt, Human
uuccuuugggccucugc

SEQ ID NO: 3462742 - RNA, 16 nt, Human
uuccuuugucuucaaa

SEQ ID NO: 3462743 - RNA, 17 nt, Human
uuccuuugucuucaaac

SEQ ID NO: 3462744 - RNA, 13 nt, Human
uuccuuugugugu

SEQ ID NO: 3462745 - RNA, 20 nt, Human
uuccuuuuaaaacacuucca

SEQ ID NO: 3462746 - RNA, 22 nt, Human
uuccuuuuaaaacacuuccaua

SEQ ID NO: 3462747 - RNA, 20 nt, Human
uuccuuuuagccuaguucau

SEQ ID NO: 3462748 - RNA, 12 nt, Human
uuccuuuuauca

SEQ ID NO: 3462749 - RNA, 20 nt, Human
uuccuuuucuauuccuucug

SEQ ID NO: 3462750 - RNA, 14 nt, Human
uuccuuuucuuguu

SEQ ID NO: 3462751 - RNA, 15 nt, Human
uuccuuuugaaagaa

SEQ ID NO: 3462752 - RNA, 20 nt, Human
uuccuuuuuaauaugcuuaa

SEQ ID NO: 3462753 - RNA, 14 nt, Human
uuccuuuuucagau

SEQ ID NO: 3462754 - RNA, 15 nt, Human
uuccuuuuucugauu

SEQ ID NO: 3462755 - RNA, 17 nt, Human
uuccuuuuugacacuga

SEQ ID NO: 3462756 - RNA, 21 nt, Human
uuccuuuuuuaaaaaugcaaa

SEQ ID NO: 3462757 - RNA, 15 nt, Human
uuccuuuuuucccau

SEQ ID NO: 3462758 - RNA, 19 nt, Human
uuccuuuuuucccauaaga

SEQ ID NO: 3462759 - RNA, 13 nt, Human
uucgaagucauua

SEQ ID NO: 3462760 - RNA, 14 nt, Human
uucgaagucauuaa

SEQ ID NO: 3462761 - RNA, 15 nt, Human
uucgacacuguucuu

SEQ ID NO: 3462762 - RNA, 16 nt, Human
uucgacagcauuuucc

SEQ ID NO: 3462763 - RNA, 15 nt, Human
uucgacauauuuccu

SEQ ID NO: 3462764 - RNA, 17 nt, Human
uucgacuugcauuuuug

SEQ ID NO: 3462765 - RNA, 20 nt, Human
uucgagaagcugcucuggaa

SEQ ID NO: 3462766 - RNA, 16 nt, Human
uucgagaccagccugg

SEQ ID NO: 3462767 - RNA, 19 nt, Human
uucgagaccagccuggcca

SEQ ID NO: 3462768 - RNA, 23 nt, Human
uucgagauuaucguuuucuuaaa

SEQ ID NO: 3462769 - RNA, 12 nt, Human
uucgaggccuga

SEQ ID NO: 3462770 - RNA, 18 nt, Human
uucgaucucauucaguau

SEQ ID NO: 3462771 - RNA, 16 nt, Human
uucgaugaaggcugcc

SEQ ID NO: 3462772 - RNA, 18 nt, Human
uucgaugguacgugaccc

SEQ ID NO: 3462773 - RNA, 23 nt, Human
uucgaugguacgugacccucugc

SEQ ID NO: 3462774 - RNA, 14 nt, Human
uucgcacagcaguu

SEQ ID NO: 3462775 - RNA, 20 nt, Human
uucgcagagcuuuucagauu

SEQ ID NO: 3462776 - RNA, 13 nt, Human
uucgcagccaccc

SEQ ID NO: 3462777 - RNA, 18 nt, Human
uucgcagccacccugagg

SEQ ID NO: 3462778 - RNA, 16 nt, Human
uucgcauggucacaca

SEQ ID NO: 3462779 - RNA, 13 nt, Human
uucgccuuuccuc

SEQ ID NO: 3462780 - RNA, 22 nt, Human
uucgcgauggacagacucacaa

SEQ ID NO: 3462781 - RNA, 18 nt, Human
uucggaaaccuuggugua

SEQ ID NO: 3462782 - RNA, 19 nt, Human
uucggaacuguccuuuccu

SEQ ID NO: 3462783 - RNA, 20 nt, Human
uucggacaguuuauuuguug

SEQ ID NO: 3462784 - RNA, 15 nt, Human
uucggaguugggggu

SEQ ID NO: 3462785 - RNA, 18 nt, Human
uucggccccauguaucuc

SEQ ID NO: 3462786 - RNA, 15 nt, Human
uucggccuccauccu

SEQ ID NO: 3462787 - RNA, 18 nt, Human
uucggccuccauccugag

SEQ ID NO: 3462788 - RNA, 20 nt, Human
uucgggaggucgaggcagga

SEQ ID NO: 3462789 - RNA, 20 nt, Human
uucgggccaaggaccugaga

SEQ ID NO: 3462790 - RNA, 14 nt, Human
uucgggcccugccu

SEQ ID NO: 3462791 - RNA, 18 nt, Human
uucgggcgucugugugcg

SEQ ID NO: 3462792 - RNA, 15 nt, Human
uuaagauacaaauua

SEQ ID NO: 3462793 - RNA, 18 nt, Human
uuaagaucacagugaacu

SEQ ID NO: 3462794 - RNA, 11 nt, Human
uuaagauguga

SEQ ID NO: 3462795 - RNA, 14 nt, Human
uuaagaugugaaaa

SEQ ID NO: 3462796 - RNA, 17 nt, Human
uuaagaugugaaaauua

SEQ ID NO: 3462797 - RNA, 21 nt, Human
uuaagaugugucuucaauuug

SEQ ID NO: 3462798 - RNA, 14 nt, Human
uuaagauuauaauu

SEQ ID NO: 3462799 - RNA, 19 nt, Human
uuaagauuccuuuucuugu

SEQ ID NO: 3462800 - RNA, 11 nt, Human
uuaagauuuaa

SEQ ID NO: 3462801 - RNA, 19 nt, Human
uuaagauuuaauuugccaa

SEQ ID NO: 3462802 - RNA, 18 nt, Human
uuaagauuuuacaaaaga

SEQ ID NO: 3462803 - RNA, 14 nt, Human
uuaagauuuuucuc

SEQ ID NO: 3462804 - RNA, 17 nt, Human
uuaagauuuuucucaaa

SEQ ID NO: 3462805 - RNA, 20 nt, Human
uuaagauuuuucucaaaguu

SEQ ID NO: 3462806 - RNA, 19 nt, Human
uuaagcaaaagaaaaagau

SEQ ID NO: 3462807 - RNA, 23 nt, Human
uuaagcaaaggggacagcugugu

SEQ ID NO: 3462808 - RNA, 15 nt, Human
uuaagcaaauacuua

SEQ ID NO: 3462809 - RNA, 20 nt, Human
uuaagcacuacauaaacuga

SEQ ID NO: 3462810 - RNA, 17 nt, Human
uuaagcagaauuggaaa

SEQ ID NO: 3462811 - RNA, 22 nt, Human
uuaagcagaauuggaaaagacu

SEQ ID NO: 3462812 - RNA, 18 nt, Human
uuaagcagcucuugcuaa

SEQ ID NO: 3462813 - RNA, 18 nt, Human
uuaagcaguaaaaacugu

SEQ ID NO: 3462814 - RNA, 14 nt, Human
uuaagcaucacaaa

SEQ ID NO: 3462815 - RNA, 17 nt, Human
uuaagcaugacagaaaa

SEQ ID NO: 3462816 - RNA, 13 nt, Human
uuaagcauuacca

SEQ ID NO: 3462817 - RNA, 14 nt, Human
uuaagcauuacucu

SEQ ID NO: 3462818 - RNA, 21 nt, Human
uuaagcauuacucuuguaaga

SEQ ID NO: 3462819 - RNA, 14 nt, Human
uuaagcauuguuug

SEQ ID NO: 3462820 - RNA, 15 nt, Human
uuaagccacugccuc

SEQ ID NO: 3462821 - RNA, 21 nt, Human
uuaagccacuuaaaauguuca

SEQ ID NO: 3462822 - RNA, 19 nt, Human
uuaagccucaaauuugaac

SEQ ID NO: 3462823 - RNA, 19 nt, Human
uuaagccucauauuuaaag

SEQ ID NO: 3462824 - RNA, 21 nt, Human
uuaagccucauauuuaaagac

SEQ ID NO: 3462825 - RNA, 16 nt, Human
uuaagccuuuggaaac

SEQ ID NO: 3462826 - RNA, 19 nt, Human
uuaagcuaggaaaagaaau

SEQ ID NO: 3462827 - RNA, 22 nt, Human
uuaagcuaggaaaagaaaucua

SEQ ID NO: 3462828 - RNA, 19 nt, Human
uuaagcugcaaaucugaug

SEQ ID NO: 3462829 - RNA, 19 nt, Human
uuaagcugcagagauuucu

SEQ ID NO: 3462830 - RNA, 21 nt, Human
uuaagcuguuccuguucagua

SEQ ID NO: 3462831 - RNA, 13 nt, Human
uuaagcuuuuugg

SEQ ID NO: 3462832 - RNA, 19 nt, Human
uuaaggacaaaaaugaacu

SEQ ID NO: 3462833 - RNA, 16 nt, Human
uuaaggacugacugag

SEQ ID NO: 3462834 - RNA, 18 nt, Human
uuaaggacugacugaggc

SEQ ID NO: 3462835 - RNA, 22 nt, Human
uuaaggauaaaucauaaaguca

SEQ ID NO: 3462836 - RNA, 18 nt, Human
uuaaggaugggguuauga

SEQ ID NO: 3462837 - RNA, 15 nt, Human
uuaaggcaacugaac

SEQ ID NO: 3462838 - RNA, 20 nt, Human
uuaaggcaacugaacaaaaa

SEQ ID NO: 3462839 - RNA, 18 nt, Human
uuaaggcccaacauuaaa

SEQ ID NO: 3462840 - RNA, 15 nt, Human
uuaagggaaaaauau

SEQ ID NO: 3462841 - RNA, 21 nt, Human
uuaagggauggaaaaggaaga

SEQ ID NO: 3462842 - RNA, 24 nt, Human
uuaaggggaggaaccagagugcug

SEQ ID NO: 3462843 - RNA, 18 nt, Human
uuaagggguaucauguau

SEQ ID NO: 3462844 - RNA, 16 nt, Human
uuaaggucuuucagua

SEQ ID NO: 3462845 - RNA, 21 nt, Human
uuaaggugaggccugucugug

SEQ ID NO: 3462846 - RNA, 17 nt, Human
uuaagguguagccacac

SEQ ID NO: 3462847 - RNA, 14 nt, Human
uuaagguguuugaa

SEQ ID NO: 3462848 - RNA, 22 nt, Human
uuaagguguuugaaaauaguuu

SEQ ID NO: 3462849 - RNA, 14 nt, Human
uuaagguuauuuau

SEQ ID NO: 3462850 - RNA, 12 nt, Human
uuaaguaaguuu

SEQ ID NO: 3462851 - RNA, 18 nt, Human
uuaaguaaugauaacugg

SEQ ID NO: 3462852 - RNA, 15 nt, Human
uuaaguaauguggaa

SEQ ID NO: 3462853 - RNA, 14 nt, Human
uuaaguauaucaug

SEQ ID NO: 3462854 - RNA, 15 nt, Human
uuaaguauucaagaa

SEQ ID NO: 3462855 - RNA, 23 nt, Human
uuaaguauugauucugcuugaga

SEQ ID NO: 3462856 - RNA, 13 nt, Human
uuaaguauugcau

SEQ ID NO: 3462857 - RNA, 20 nt, Human
uuaaguauugcaucuguaua

SEQ ID NO: 3462858 - RNA, 14 nt, Human
uuagaaaaagaaca

SEQ ID NO: 3462859 - RNA, 17 nt, Human
uuagaaaaauuccuaag

SEQ ID NO: 3462860 - RNA, 21 nt, Human
uuagaaaacauaaucuucugc

SEQ ID NO: 3462861 - RNA, 16 nt, Human
uuagaaaacuuuaaag

SEQ ID NO: 3462862 - RNA, 14 nt, Human
uuagaaaacuuugu

SEQ ID NO: 3462863 - RNA, 20 nt, Human
uuagaaaagcaaagggugcu

SEQ ID NO: 3462864 - RNA, 13 nt, Human
uuagaaaagugaa

SEQ ID NO: 3462865 - RNA, 19 nt, Human
uuagaaaauguuauuuaac

SEQ ID NO: 3462866 - RNA, 18 nt, Human
uuagaaaccuuaauaugu

SEQ ID NO: 3462867 - RNA, 19 nt, Human
uuagaaacuuaucuuacaa

SEQ ID NO: 3462868 - RNA, 18 nt, Human
uuagaaagcauuugaaug

SEQ ID NO: 3462869 - RNA, 19 nt, Human
uuagaaagcauuugaaugc

SEQ ID NO: 3462870 - RNA, 21 nt, Human
uuagaaaguagccacguaugg

SEQ ID NO: 3462871 - RNA, 22 nt, Human
uuagaaauaaagcaucucauuu

SEQ ID NO: 3462872 - RNA, 19 nt, Human
uuagaaauaaauguaccug

SEQ ID NO: 3462873 - RNA, 13 nt, Human
uuagaaauagaca

SEQ ID NO: 3462874 - RNA, 11 nt, Human
uuagaaauaua

SEQ ID NO: 3462875 - RNA, 12 nt, Human
uuagaaauauaa

SEQ ID NO: 3462876 - RNA, 13 nt, Human
uuagaaauauuca

SEQ ID NO: 3462877 - RNA, 15 nt, Human
uuagaaauauucaca

SEQ ID NO: 3462878 - RNA, 13 nt, Human
uuagaaauauuuu

SEQ ID NO: 3462879 - RNA, 17 nt, Human
uuagaaaugaccaauau

SEQ ID NO: 3462880 - RNA, 13 nt, Human
uuagaaaugcaaa

SEQ ID NO: 3462881 - RNA, 19 nt, Human
uuagaaauuaccuguggau

SEQ ID NO: 3462882 - RNA, 23 nt, Human
uuagaaauuaccuguggauauuu

SEQ ID NO: 3462883 - RNA, 17 nt, Human
uuagaaauugcauuucc

SEQ ID NO: 3462884 - RNA, 18 nt, Human
uuagaacaauuuucuugu

SEQ ID NO: 3462885 - RNA, 12 nt, Human
uuagaacacuau

SEQ ID NO: 3462886 - RNA, 19 nt, Human
uuagaacacuauuuucaga

SEQ ID NO: 3462887 - RNA, 17 nt, Human
uuagaacagaaaacaac

SEQ ID NO: 3462888 - RNA, 22 nt, Human
uuagaacagaaaacaacaaaaa

SEQ ID NO: 3462889 - RNA, 14 nt, Human
uuagaagaagugug

SEQ ID NO: 3462890 - RNA, 17 nt, Human
uuagaagacaauugaca

SEQ ID NO: 3462891 - RNA, 18 nt, Human
uuagaagauagaugcacu

SEQ ID NO: 3462892 - RNA, 23 nt, Human
uuagaagauauuagucuuggggc

SEQ ID NO: 3462893 - RNA, 23 nt, Human
uuagaagcacuacaccuugccuu

SEQ ID NO: 3462894 - RNA, 23 nt, Human
uuagaagccugcauaauguuucu

SEQ ID NO: 3462895 - RNA, 13 nt, Human
uuagaagguauua

SEQ ID NO: 3462896 - RNA, 18 nt, Human
uuagaagguauuaagauu

SEQ ID NO: 3462897 - RNA, 18 nt, Human
uuagaagguucucuccuc

SEQ ID NO: 3462898 - RNA, 13 nt, Human
uuagaagugucau

SEQ ID NO: 3462899 - RNA, 14 nt, Human
uuagaagugucaug

SEQ ID NO: 3462900 - RNA, 13 nt, Human
uuagaaguguuaa

SEQ ID NO: 3462901 - RNA, 15 nt, Human
uuagaauaaaauugu

SEQ ID NO: 3462902 - RNA, 16 nt, Human
uuagaauaagaauuug

SEQ ID NO: 3462903 - RNA, 18 nt, Human
uuagaauaagaauuugca

SEQ ID NO: 3462904 - RNA, 19 nt, Human
uuagaauaauaaauauuua

SEQ ID NO: 3462905 - RNA, 17 nt, Human
uuagaaucaaacauuuu

SEQ ID NO: 3462906 - RNA, 20 nt, Human
uuagaaucaaacauuuugaa

SEQ ID NO: 3462907 - RNA, 20 nt, Human
uuagaaucauuaccuuuuac

SEQ ID NO: 3462908 - RNA, 21 nt, Human
uuagaauccacguauuccccu

SEQ ID NO: 3462909 - RNA, 14 nt, Human
uuagaaucuauuuu

SEQ ID NO: 3462910 - RNA, 18 nt, Human
uuagaauggugauuuuaa

SEQ ID NO: 3462911 - RNA, 19 nt, Human
uuagaauggugauuuuaaa

SEQ ID NO: 3462912 - RNA, 21 nt, Human
uuagaauggugauuuuaaaug

SEQ ID NO: 3462913 - RNA, 16 nt, Human
uuagaauguuuuccuu

SEQ ID NO: 3462914 - RNA, 17 nt, Human
uuagaauuaaaaaagca

SEQ ID NO: 3462915 - RNA, 16 nt, Human
uuagaauuaaaaguug

SEQ ID NO: 3462916 - RNA, 13 nt, Human
uuagaauugaagg

SEQ ID NO: 3462917 - RNA, 14 nt, Human
uuagaauugaaggu

SEQ ID NO: 3462918 - RNA, 16 nt, Human
uuagaauugaagguuu

SEQ ID NO: 3462919 - RNA, 15 nt, Human
uuagacaaauacuca

SEQ ID NO: 3462920 - RNA, 18 nt, Human
uuagacaaauacucaugu

SEQ ID NO: 3462921 - RNA, 22 nt, Human
uuagacaaauacucauguguau

SEQ ID NO: 3462922 - RNA, 23 nt, Human
uuagacaaauacucauguguaug

SEQ ID NO: 3462923 - RNA, 22 nt, Human
uuagacaaaucuaagggaaaaa

SEQ ID NO: 3462924 - RNA, 23 nt, Human
uuagacacuggcugccagcuauu

SEQ ID NO: 3462925 - RNA, 14 nt, Human
uuagacagaacacc

SEQ ID NO: 3462926 - RNA, 13 nt, Human
uuagacagucccu

SEQ ID NO: 3462927 - RNA, 17 nt, Human
uuagacagucccugcca

SEQ ID NO: 3462928 - RNA, 19 nt, Human
uuagaccagaggucuagau

SEQ ID NO: 3462929 - RNA, 20 nt, Human
uuagacccucaugcugccaa

SEQ ID NO: 3462930 - RNA, 18 nt, Human
uuagaccgcucucuuuuc

SEQ ID NO: 3462931 - RNA, 13 nt, Human
uuagaccuacagg

SEQ ID NO: 3462932 - RNA, 14 nt, Human
uuagaccucagccu

SEQ ID NO: 3462933 - RNA, 15 nt, Human
uuagaccucagccug

SEQ ID NO: 3462934 - RNA, 18 nt, Human
uuagacuacauuuagaga

SEQ ID NO: 3462935 - RNA, 22 nt, Human
uuagacucaugguguguuacac

SEQ ID NO: 3462936 - RNA, 13 nt, Human
uuagacugccagc

SEQ ID NO: 3462937 - RNA, 16 nt, Human
uuagacuggaacuuga

SEQ ID NO: 3462938 - RNA, 22 nt, Human
uuagacuggaacuugaacugau

SEQ ID NO: 3462939 - RNA, 17 nt, Human
uuagacuggacagcuug

SEQ ID NO: 3462940 - RNA, 19 nt, Human
uuagacuggacagcuugug

SEQ ID NO: 3462941 - RNA, 14 nt, Human
uuagacuguagccu

SEQ ID NO: 3462942 - RNA, 20 nt, Human
uuagacuguuggggugggua

SEQ ID NO: 3462943 - RNA, 21 nt, Human
uuagacuucgacucaggaucc

SEQ ID NO: 3462944 - RNA, 12 nt, Human
uuagacuugaaa

SEQ ID NO: 3462945 - RNA, 15 nt, Human
uuagacuuuaacaua

SEQ ID NO: 3462946 - RNA, 16 nt, Human
uuagacuuuaacauaa

SEQ ID NO: 3462947 - RNA, 21 nt, Human
uuagacuuuaacauaagcuau

SEQ ID NO: 3462948 - RNA, 21 nt, Human
uuagacuuuuccaauauguga

SEQ ID NO: 3462949 - RNA, 21 nt, Human
uuagagaacugaaaagagagc

SEQ ID NO: 3462950 - RNA, 21 nt, Human
uuagagaaguauacauaaguu

SEQ ID NO: 3462951 - RNA, 16 nt, Human
uuagagaaugagaaau

SEQ ID NO: 3462952 - RNA, 12 nt, Human
uuagagauuuuu

SEQ ID NO: 3462953 - RNA, 13 nt, Human
uuagagccucccu

SEQ ID NO: 3462954 - RNA, 21 nt, Human
uuagagcuuccgagaauagcu

SEQ ID NO: 3462955 - RNA, 17 nt, Human
uuagaggaaaaaaauga

SEQ ID NO: 3462956 - RNA, 22 nt, Human
uuagaggaaauaagaaaaauca

SEQ ID NO: 3462957 - RNA, 23 nt, Human
uuagaggaaauaagaaaaaucau

SEQ ID NO: 3462958 - RNA, 19 nt, Human
uuagagguuuuaaagugau

SEQ ID NO: 3462959 - RNA, 19 nt, Human
uuagaguaagaaauuucag

SEQ ID NO: 3462960 - RNA, 14 nt, Human
uuagaguagcauga

SEQ ID NO: 3462961 - RNA, 14 nt, Human
uuagagucagccuu

SEQ ID NO: 3462962 - RNA, 17 nt, Human
uuagaguuagacuguug

SEQ ID NO: 3462963 - RNA, 14 nt, Human
uuagaguugauacu

SEQ ID NO: 3462964 - RNA, 15 nt, Human
uuagaguuucuguuu

SEQ ID NO: 3462965 - RNA, 22 nt, Human
uuagauaauacaccacuacauu

SEQ ID NO: 3462966 - RNA, 17 nt, Human
uuagauagcccuguccu

SEQ ID NO: 3462967 - RNA, 17 nt, Human
uuagauagcugcaugug

SEQ ID NO: 3462968 - RNA, 13 nt, Human
uuagauaucuuuu

SEQ ID NO: 3462969 - RNA, 16 nt, Human
uuagauaucuuuuuau

SEQ ID NO: 3462970 - RNA, 23 nt, Human
uuagaucaaauacuuuaaaggaa

SEQ ID NO: 3462971 - RNA, 17 nt, Human
uuagaucauaguuuuau

SEQ ID NO: 3462972 - RNA, 14 nt, Human
uuagauccauuaau

SEQ ID NO: 3462973 - RNA, 14 nt, Human
uuagaucuaguuca

SEQ ID NO: 3462974 - RNA, 22 nt, Human
uuagaugcaguucugaagaaga

SEQ ID NO: 3462975 - RNA, 17 nt, Human
uuagaugcuacuaagaa

SEQ ID NO: 3462976 - RNA, 17 nt, Human
uuagauggauucuccac

SEQ ID NO: 3462977 - RNA, 13 nt, Human
uuagaugguuaca

SEQ ID NO: 3462978 - RNA, 18 nt, Human
uuagaugguuacacuguu

SEQ ID NO: 3462979 - RNA, 16 nt, Human
uuagauguaauuuugu

SEQ ID NO: 3462980 - RNA, 18 nt, Human
uuagaugugcugcuuuga

SEQ ID NO: 3462981 - RNA, 21 nt, Human
uuagauguuccaguaaucuaa

SEQ ID NO: 3462982 - RNA, 13 nt, Human
uuagauguucuaa

SEQ ID NO: 3462983 - RNA, 20 nt, Human
uuagauguucuaagucuuuc

SEQ ID NO: 3462984 - RNA, 19 nt, Human
uuagauguucucuaucauu

SEQ ID NO: 3462985 - RNA, 22 nt, Human
uuagauguugccauguguuuua

SEQ ID NO: 3462986 - RNA, 15 nt, Human
uuagauguuucacac

SEQ ID NO: 3462987 - RNA, 15 nt, Human
uuagauuaagaaaua

SEQ ID NO: 3462988 - RNA, 16 nt, Human
uuagauuagcucugga

SEQ ID NO: 3462989 - RNA, 14 nt, Human
uuagauuauauuga

SEQ ID NO: 3462990 - RNA, 20 nt, Human
uuagauucuuaauucaugag

SEQ ID NO: 3462991 - RNA, 15 nt, Human
uuagauugagaaaug

SEQ ID NO: 3462992 - RNA, 14 nt, Human
uuagauuucauagu

SEQ ID NO: 3462993 - RNA, 19 nt, Human
uucugcauucauuuuuaua

SEQ ID NO: 3462994 - RNA, 18 nt, Human
uucugcauuuugcuauug

SEQ ID NO: 3462995 - RNA, 21 nt, Human
uucugcauuuugcuauuguaa

SEQ ID NO: 3462996 - RNA, 17 nt, Human
uucugccaccccuaaac

SEQ ID NO: 3462997 - RNA, 13 nt, Human
uucugccaggaga

SEQ ID NO: 3462998 - RNA, 15 nt, Human
uucugccauauucug

SEQ ID NO: 3462999 - RNA, 21 nt, Human
uucugccaucuagccagcccc

SEQ ID NO: 3463000 - RNA, 19 nt, Human
uucugcccaauuggaggaa

SEQ ID NO: 3463001 - RNA, 19 nt, Human
uucugcccacauuggaccc

SEQ ID NO: 3463002 - RNA, 14 nt, Human
uucugcccccagcc

SEQ ID NO: 3463003 - RNA, 17 nt, Human
uuaguauucauucugca

SEQ ID NO: 3463004 - RNA, 13 nt, Human
uuaguauugcaaa

SEQ ID NO: 3463005 - RNA, 18 nt, Human
uuaguauuguuguccuuu

SEQ ID NO: 3463006 - RNA, 22 nt, Human
uuaguauuguuguccuuuucau

SEQ ID NO: 3463007 - RNA, 13 nt, Human
uuaguauuugcau

SEQ ID NO: 3463008 - RNA, 16 nt, Human
uucuguucauuuguua

SEQ ID NO: 3463009 - RNA, 17 nt, Human
uucuguuccaaauucag

SEQ ID NO: 3463010 - RNA, 14 nt, Human
uucuguucuaguuu

SEQ ID NO: 3463011 - RNA, 13 nt, Human
uucuguucugaua

SEQ ID NO: 3463012 - RNA, 15 nt, Human
uucuguucuggagga

SEQ ID NO: 3463013 - RNA, 22 nt, Human
uucuguuguaacuuauguagau

SEQ ID NO: 3463014 - RNA, 14 nt, Human
uucuguuuaauuuu

SEQ ID NO: 3463015 - RNA, 23 nt, Human
uucuguuucaaggcacucuagau

SEQ ID NO: 3463016 - RNA, 18 nt, Human
uucuguuuccuguaccag

SEQ ID NO: 3463017 - RNA, 14 nt, Human
uucuguuucuaguu

SEQ ID NO: 3463018 - RNA, 15 nt, Human
uucuguuucuaguug

SEQ ID NO: 3463019 - RNA, 13 nt, Human
uucuguuugcugu

SEQ ID NO: 3463020 - RNA, 13 nt, Human
uucuguuuuuaau

SEQ ID NO: 3463021 - RNA, 21 nt, Human
uucuuaaaauauauuucagau

SEQ ID NO: 3463022 - RNA, 23 nt, Human
uucuuaaaaugcaauauuuguaa

SEQ ID NO: 3463023 - RNA, 20 nt, Human
uucuuaaagugccaguauuu

SEQ ID NO: 3463024 - RNA, 19 nt, Human
uucuuaaauaucuuuuaug

SEQ ID NO: 3463025 - RNA, 13 nt, Human
uucuuaacaaccg

SEQ ID NO: 3463026 - RNA, 14 nt, Human
uucuuaacaaccga

SEQ ID NO: 3463027 - RNA, 23 nt, Human
uucuuaaccagaucauugugaaa

SEQ ID NO: 3463028 - RNA, 18 nt, Human
uucuuaagacauguauca

SEQ ID NO: 3463029 - RNA, 22 nt, Human
uucuuaagaccaccucaaauuu

SEQ ID NO: 3463030 - RNA, 20 nt, Human
uucuuaaucuuuucacaaau

SEQ ID NO: 3463031 - RNA, 22 nt, Human
uucuuaaucuuuucacaaauaa

SEQ ID NO: 3463032 - RNA, 23 nt, Human
uucuuaaucuuuucacaaauaaa

SEQ ID NO: 3463033 - RNA, 14 nt, Human
uucuuaauguacau

SEQ ID NO: 3463034 - RNA, 14 nt, Human
uucuuaauuaauuu

SEQ ID NO: 3463035 - RNA, 21 nt, Human
uucuuaauuauuauaaaaaua

SEQ ID NO: 3463036 - RNA, 15 nt, Human
uucuuacaaacaugu

SEQ ID NO: 3463037 - RNA, 12 nt, Human
uucuuacaagga

SEQ ID NO: 3463038 - RNA, 18 nt, Human
uucuuacacugccuguau

SEQ ID NO: 3463039 - RNA, 13 nt, Human
uucuuacauguuu

SEQ ID NO: 3463040 - RNA, 14 nt, Human
uucuuacauguuuu

SEQ ID NO: 3463041 - RNA, 15 nt, Human
uucuuaccuguaugu

SEQ ID NO: 3463042 - RNA, 15 nt, Human
uucuuacuaaaaagu

SEQ ID NO: 3463043 - RNA, 18 nt, Human
uucuuacuaaaaaguaua

SEQ ID NO: 3463044 - RNA, 15 nt, Human
uucuuacuaaacauu

SEQ ID NO: 3463045 - RNA, 15 nt, Human
uucuuacuccuccuc

SEQ ID NO: 3463046 - RNA, 17 nt, Human
uucuuacuccuccucuu

SEQ ID NO: 3463047 - RNA, 20 nt, Human
uucuuacugauaauuuugcu

SEQ ID NO: 3463048 - RNA, 14 nt, Human
uucuuacugcuugg

SEQ ID NO: 3463049 - RNA, 20 nt, Human
uucuuagaacaguggaaacu

SEQ ID NO: 3463050 - RNA, 21 nt, Human
uucuuagacuacauuuagaga

SEQ ID NO: 3463051 - RNA, 23 nt, Human
uucuuagccuguggcaguaaaga

SEQ ID NO: 3463052 - RNA, 17 nt, Human
uucuuagggaaggauac

SEQ ID NO: 3463053 - RNA, 19 nt, Human
uucuuaggguuaugauuaa

SEQ ID NO: 3463054 - RNA, 15 nt, Human
uucuuaguugcugua

SEQ ID NO: 3463055 - RNA, 23 nt, Human
uucuuaguugcuguaugucucgu

SEQ ID NO: 3463056 - RNA, 14 nt, Human
uucuuauaaauaug

SEQ ID NO: 3463057 - RNA, 15 nt, Human
uucuuauaaauauga

SEQ ID NO: 3463058 - RNA, 22 nt, Human
uucuuauaaauaugaagcucac

SEQ ID NO: 3463059 - RNA, 17 nt, Human
uucuuauaauacucugu

SEQ ID NO: 3463060 - RNA, 14 nt, Human
uucuuauacacauu

SEQ ID NO: 3463061 - RNA, 17 nt, Human
uucuuauacagauaaaa

SEQ ID NO: 3463062 - RNA, 21 nt, Human
uucuuauacagauaaaacaug

SEQ ID NO: 3463063 - RNA, 21 nt, Human
uucuuauacauuugauaaagu

SEQ ID NO: 3463064 - RNA, 16 nt, Human
uucuuauacgcuuuuc

SEQ ID NO: 3463065 - RNA, 17 nt, Human
uucuuauacgcuuuucu

SEQ ID NO: 3463066 - RNA, 20 nt, Human
uucuuauacgcuuuucuuug

SEQ ID NO: 3463067 - RNA, 16 nt, Human
uucuuaucuucugcaa

SEQ ID NO: 3463068 - RNA, 22 nt, Human
uucuuauggaauugauuugcau

SEQ ID NO: 3463069 - RNA, 21 nt, Human
uucuuauguaugugaaaguua

SEQ ID NO: 3463070 - RNA, 19 nt, Human
uucuuaugugacauuaaca

SEQ ID NO: 3463071 - RNA, 17 nt, Human
uucuuauguugcccagu

SEQ ID NO: 3463072 - RNA, 17 nt, Human
uucuuauuccauauuag

SEQ ID NO: 3463073 - RNA, 18 nt, Human
uucuuauuuaaucuuuuc

SEQ ID NO: 3463074 - RNA, 23 nt, Human
uucuuauuuaaugaaagacugua

SEQ ID NO: 3463075 - RNA, 16 nt, Human
uucuuauuucaugaaa

SEQ ID NO: 3463076 - RNA, 17 nt, Human
uucuuauuuuuguacuu

SEQ ID NO: 3463077 - RNA, 14 nt, Human
uucuucaaaaugua

SEQ ID NO: 3463078 - RNA, 19 nt, Human
uucuucaaaauguauauau

SEQ ID NO: 3463079 - RNA, 20 nt, Human
uucuucaaaauguauauauu

SEQ ID NO: 3463080 - RNA, 23 nt, Human
uucuucaaaauguauauauuuag

SEQ ID NO: 3463081 - RNA, 19 nt, Human
uucuucaaauccuuccaaa

SEQ ID NO: 3463082 - RNA, 19 nt, Human
uucuucaacaggagaauuu

SEQ ID NO: 3463083 - RNA, 14 nt, Human
uucuucaacucccu

SEQ ID NO: 3463084 - RNA, 18 nt, Human
uucuucaagaucccauuu

SEQ ID NO: 3463085 - RNA, 21 nt, Human
uucuucacccagcuaaucugu

SEQ ID NO: 3463086 - RNA, 22 nt, Human
uucuucaccuaagucucuguga

SEQ ID NO: 3463087 - RNA, 18 nt, Human
uucuucacucaaauuuug

SEQ ID NO: 3463088 - RNA, 22 nt, Human
uucuucacuguccuccaagcca

SEQ ID NO: 3463089 - RNA, 17 nt, Human
uucuucagaagacacug

SEQ ID NO: 3463090 - RNA, 11 nt, Human
uucuucagaga

SEQ ID NO: 3463091 - RNA, 14 nt, Human
uucuucagagauca

SEQ ID NO: 3463092 - RNA, 18 nt, Human
uucuucagcguaaaaugg

SEQ ID NO: 3463093 - RNA, 19 nt, Human
uucuucagcguaaaauggu

SEQ ID NO: 3463094 - RNA, 14 nt, Human
uucuucaugcaaug

SEQ ID NO: 3463095 - RNA, 18 nt, Human
uucuucaugcaaugacau

SEQ ID NO: 3463096 - RNA, 20 nt, Human
uucuucauucaauacaagug

SEQ ID NO: 3463097 - RNA, 21 nt, Human
uucuucauucaauacaagugu

SEQ ID NO: 3463098 - RNA, 22 nt, Human
uucuucauucuaucaagcccag

SEQ ID NO: 3463099 - RNA, 19 nt, Human
uucuuccaggugcccagcu

SEQ ID NO: 3463100 - RNA, 12 nt, Human
uucuuccaguua

SEQ ID NO: 3463101 - RNA, 16 nt, Human
uucuuccaucccagga

SEQ ID NO: 3463102 - RNA, 17 nt, Human
uucuuccaucccaggac

SEQ ID NO: 3463103 - RNA, 13 nt, Human
uucuuccaucuga

SEQ ID NO: 3463104 - RNA, 21 nt, Human
uucuucccacccccuugcccu

SEQ ID NO: 3463105 - RNA, 13 nt, Human
uucuucccauucu

SEQ ID NO: 3463106 - RNA, 21 nt, Human
uucuuccuauuugccaugggc

SEQ ID NO: 3463107 - RNA, 23 nt, Human
uucuuccucccucccucuuuccc

SEQ ID NO: 3463108 - RNA, 11 nt, Human
uucuuccuggu

SEQ ID NO: 3463109 - RNA, 18 nt, Human
uucuuccuuuacuuuccc

SEQ ID NO: 3463110 - RNA, 13 nt, Human
uucuuccuuucuc

SEQ ID NO: 3463111 - RNA, 21 nt, Human
uucuuccuuuucacugcuguu

SEQ ID NO: 3463112 - RNA, 15 nt, Human
uucuucgggaagaga

SEQ ID NO: 3463113 - RNA, 20 nt, Human
uucuucggggaacuccugga

SEQ ID NO: 3463114 - RNA, 18 nt, Human
uucuucguucuuuuuaag

SEQ ID NO: 3463115 - RNA, 22 nt, Human
uucuucuacaacucauacacuc

SEQ ID NO: 3463116 - RNA, 18 nt, Human
uucuucuauugccucuga

SEQ ID NO: 3463117 - RNA, 18 nt, Human
uucuucuccuauguguaa

SEQ ID NO: 3463118 - RNA, 22 nt, Human
uucuucucugugagaagguuua

SEQ ID NO: 3463119 - RNA, 19 nt, Human
uucuugaaagaauuuuccu

SEQ ID NO: 3463120 - RNA, 16 nt, Human
uucuugaauauaaaaa

SEQ ID NO: 3463121 - RNA, 20 nt, Human
uucuugacaaaaccuaacuu

SEQ ID NO: 3463122 - RNA, 20 nt, Human
uucuugaggggaccaggagu

SEQ ID NO: 3463123 - RNA, 20 nt, Human
uucuugaucaguaguuugca

SEQ ID NO: 3463124 - RNA, 22 nt, Human
uucuugaucaguaguuugcauu

SEQ ID NO: 3463125 - RNA, 19 nt, Human
uucuugauguaaaaucuug

SEQ ID NO: 3463126 - RNA, 15 nt, Human
uucuugcaagcaugc

SEQ ID NO: 3463127 - RNA, 18 nt, Human
uucuugcagucaucagaa

SEQ ID NO: 3463128 - RNA, 19 nt, Human
uucuugcagucaucagaag

SEQ ID NO: 3463129 - RNA, 17 nt, Human
uucuugcauauuuugua

SEQ ID NO: 3463130 - RNA, 12 nt, Human
uucuugcauuga

SEQ ID NO: 3463131 - RNA, 16 nt, Human
uucuugccaaugaggu

SEQ ID NO: 3463132 - RNA, 21 nt, Human
uucuugccuacuaugccagau

SEQ ID NO: 3463133 - RNA, 15 nt, Human
uucuugccucugugc

SEQ ID NO: 3463134 - RNA, 17 nt, Human
uucuugccucugugcug

SEQ ID NO: 3463135 - RNA, 12 nt, Human
uucuugccuuca

SEQ ID NO: 3463136 - RNA, 14 nt, Human
uucuugcugcuaga

SEQ ID NO: 3463137 - RNA, 18 nt, Human
uucuugcugcuagaacuu

SEQ ID NO: 3463138 - RNA, 14 nt, Human
uucuugcugguugu

SEQ ID NO: 3463139 - RNA, 20 nt, Human
uucuugcuuaccuugacugu

SEQ ID NO: 3463140 - RNA, 21 nt, Human
uucuuggacacuuaauucugu

SEQ ID NO: 3463141 - RNA, 22 nt, Human
uucuuggcaaaagccuugugua

SEQ ID NO: 3463142 - RNA, 22 nt, Human
uucuuggcaauaaauuuugaaa

SEQ ID NO: 3463143 - RNA, 14 nt, Human
uucuuggcuuuguu

SEQ ID NO: 3463144 - RNA, 19 nt, Human
uucuuggggcccagugcau

SEQ ID NO: 3463145 - RNA, 20 nt, Human
uucuuggggcccuacaccuu

SEQ ID NO: 3463146 - RNA, 18 nt, Human
uucuugguuuguaaauua

SEQ ID NO: 3463147 - RNA, 21 nt, Human
uugauuaaauucuugcaaagu

SEQ ID NO: 3463148 - RNA, 16 nt, Human
uugauuaacaaauaug

SEQ ID NO: 3463149 - RNA, 17 nt, Human
uugauuaagauuuuaca

SEQ ID NO: 3463150 - RNA, 18 nt, Human
uugauuaagauuuuacaa

SEQ ID NO: 3463151 - RNA, 14 nt, Human
uugauuauuugcau

SEQ ID NO: 3463152 - RNA, 15 nt, Human
uugauuauuugcaug

SEQ ID NO: 3463153 - RNA, 16 nt, Human
uugauuauuugcaugu

SEQ ID NO: 3463154 - RNA, 19 nt, Human
uugauucacauguuuucaa

SEQ ID NO: 3463155 - RNA, 20 nt, Human
uugauucaccuccuaaaaca

SEQ ID NO: 3463156 - RNA, 22 nt, Human
uugauucaccuccuaaaacaac

SEQ ID NO: 3463157 - RNA, 13 nt, Human
uugauucauaaug

SEQ ID NO: 3463158 - RNA, 17 nt, Human
uugauucauaaugacuu

SEQ ID NO: 3463159 - RNA, 12 nt, Human
uugauucuccuu

SEQ ID NO: 3463160 - RNA, 20 nt, Human
uugauucuccuucagcccuc

SEQ ID NO: 3463161 - RNA, 19 nt, Human
uugauugacugcccauuca

SEQ ID NO: 3463162 - RNA, 12 nt, Human
uugauugcuaaa

SEQ ID NO: 3463163 - RNA, 13 nt, Human
uugauugcugugu

SEQ ID NO: 3463164 - RNA, 17 nt, Human
uugauugggaaaacauu

SEQ ID NO: 3463165 - RNA, 16 nt, Human
uugauugggcacauca

SEQ ID NO: 3463166 - RNA, 21 nt, Human
uugauuggggaauuaaaaguc

SEQ ID NO: 3463167 - RNA, 20 nt, Human
uugauuguucgggugugcaa

SEQ ID NO: 3463168 - RNA, 22 nt, Human
uugauuuacagcaaguagauaa

SEQ ID NO: 3463169 - RNA, 20 nt, Human
uugauuuauuaacuuaauaa

SEQ ID NO: 3463170 - RNA, 21 nt, Human
uugauuuauuaacuuaauaau

SEQ ID NO: 3463171 - RNA, 18 nt, Human
uugauuuccguuaaaaua

SEQ ID NO: 3463172 - RNA, 16 nt, Human
uugauuuccuguguca

SEQ ID NO: 3463173 - RNA, 14 nt, Human
uugauuugaagaac

SEQ ID NO: 3463174 - RNA, 13 nt, Human
uugauuugagauu

SEQ ID NO: 3463175 - RNA, 17 nt, Human
uugauuugcauugaaca

SEQ ID NO: 3463176 - RNA, 18 nt, Human
uugauuuuaaaauguaca

SEQ ID NO: 3463177 - RNA, 20 nt, Human
uugauuuuagccuucucugu

SEQ ID NO: 3463178 - RNA, 18 nt, Human
uugauuuuccaucuaaaa

SEQ ID NO: 3463179 - RNA, 22 nt, Human
uugauuuuccaucuaaaaauau

SEQ ID NO: 3463180 - RNA, 16 nt, Human
uugauuuucuguugua

SEQ ID NO: 3463181 - RNA, 16 nt, Human
uugauuuuuacugugu

SEQ ID NO: 3463182 - RNA, 17 nt, Human
uugauuuuuacuguguu

SEQ ID NO: 3463183 - RNA, 21 nt, Human
uugcaaaauuuccaguaccuu

SEQ ID NO: 3463184 - RNA, 14 nt, Human
uugcaaaguacugu

SEQ ID NO: 3463185 - RNA, 21 nt, Human
uugcaaaguaucccuacugua

SEQ ID NO: 3463186 - RNA, 18 nt, Human
uugcaaaguauuguaaau

SEQ ID NO: 3463187 - RNA, 20 nt, Human
uugcaaaguauuguaaauua

SEQ ID NO: 3463188 - RNA, 12 nt, Human
uugcaaauauaa

SEQ ID NO: 3463189 - RNA, 23 nt, Human
uugcaaaugcccuuacacuuacu

SEQ ID NO: 3463190 - RNA, 12 nt, Human
uugcaacaaaau

SEQ ID NO: 3463191 - RNA, 17 nt, Human
uugcaacaaaauacauu

SEQ ID NO: 3463192 - RNA, 11 nt, Human
uugcaacaaca

SEQ ID NO: 3463193 - RNA, 15 nt, Human
uugcaacacacagac

SEQ ID NO: 3463194 - RNA, 14 nt, Human
uugcaaccucgcug

SEQ ID NO: 3463195 - RNA, 22 nt, Human
uugcaacuucaugucaacuucu

SEQ ID NO: 3463196 - RNA, 16 nt, Human
uugcaacuuuguauaa

SEQ ID NO: 3463197 - RNA, 15 nt, Human
uugcaagaugugaau

SEQ ID NO: 3463198 - RNA, 21 nt, Human
uugcaagaugugaauuauuga

SEQ ID NO: 3463199 - RNA, 19 nt, Human
uugcaagcaugcuugugaa

SEQ ID NO: 3463200 - RNA, 16 nt, Human
uugcaaggcaaauguu

SEQ ID NO: 3463201 - RNA, 13 nt, Human
uugcaagggaaaa

SEQ ID NO: 3463202 - RNA, 21 nt, Human
uugcaagggcggccuuuccca

SEQ ID NO: 3463203 - RNA, 22 nt, Human
uugcaaguauguuuuagcaugu

SEQ ID NO: 3463204 - RNA, 15 nt, Human
uugcaauaaugcagu

SEQ ID NO: 3463205 - RNA, 16 nt, Human
uugcaauaaugcagua

SEQ ID NO: 3463206 - RNA, 21 nt, Human
uugcaauaaugcaguauggua

SEQ ID NO: 3463207 - RNA, 15 nt, Human
uugcaauagaaaucc

SEQ ID NO: 3463208 - RNA, 18 nt, Human
uugcaaucccuuaauauc

SEQ ID NO: 3463209 - RNA, 16 nt, Human
uugcaaucuauaauau

SEQ ID NO: 3463210 - RNA, 13 nt, Human
uugcaaugaagga

SEQ ID NO: 3463211 - RNA, 17 nt, Human
uugcaauggcagccuug

SEQ ID NO: 3463212 - RNA, 17 nt, Human
uuauuguuccaagacau

SEQ ID NO: 3463213 - RNA, 18 nt, Human
uuauuguuccaagacauu

SEQ ID NO: 3463214 - RNA, 22 nt, Human
uuauuguuccaagacauuguca

SEQ ID NO: 3463215 - RNA, 23 nt, Human
uuauuguuccaagacauugucaa

SEQ ID NO: 3463216 - RNA, 22 nt, Human
uuauuguuuaaagcaacugucu

SEQ ID NO: 3463217 - RNA, 18 nt, Human
uuauuuaaaagauucauu

SEQ ID NO: 3463218 - RNA, 16 nt, Human
uuauuuaaaauagcaa

SEQ ID NO: 3463219 - RNA, 21 nt, Human
uuauuuaaaauagcaaaagaa

SEQ ID NO: 3463220 - RNA, 14 nt, Human
uuauuuaaaucugu

SEQ ID NO: 3463221 - RNA, 12 nt, Human
uuauuuaaauga

SEQ ID NO: 3463222 - RNA, 13 nt, Human
uuauuuaauaaca

SEQ ID NO: 3463223 - RNA, 14 nt, Human
uuauuuaauaacau

SEQ ID NO: 3463224 - RNA, 15 nt, Human
uuauuuaaugugagu

SEQ ID NO: 3463225 - RNA, 13 nt, Human
uuauuuacauuua

SEQ ID NO: 3463226 - RNA, 17 nt, Human
uuauuuaccccuccccu

SEQ ID NO: 3463227 - RNA, 17 nt, Human
uuauuuacugagcuucu

SEQ ID NO: 3463228 - RNA, 21 nt, Human
uuauuuacugagcuucucugu

SEQ ID NO: 3463229 - RNA, 14 nt, Human
uuauuuagacaaga

SEQ ID NO: 3463230 - RNA, 18 nt, Human
uuauuuagacaagagaug

SEQ ID NO: 3463231 - RNA, 18 nt, Human
uuauuuagacucaucuua

SEQ ID NO: 3463232 - RNA, 17 nt, Human
uuauuuagcaccaggga

SEQ ID NO: 3463233 - RNA, 16 nt, Human
uuauuuaggcuuugua

SEQ ID NO: 3463234 - RNA, 17 nt, Human
uuauuuagggaacugcu

SEQ ID NO: 3463235 - RNA, 21 nt, Human
uuauuuauauggggaauauau

SEQ ID NO: 3463236 - RNA, 14 nt, Human
uuauuuauauguau

SEQ ID NO: 3463237 - RNA, 15 nt, Human
uuauuuauauguaug

SEQ ID NO: 3463238 - RNA, 18 nt, Human
uuauuuaucagugacaga

SEQ ID NO: 3463239 - RNA, 23 nt, Human
uuauuuauccagaaaacugugau

SEQ ID NO: 3463240 - RNA, 14 nt, Human
uuauuuaugccucu

SEQ ID NO: 3463241 - RNA, 15 nt, Human
uuauuuauguauugu

SEQ ID NO: 3463242 - RNA, 15 nt, Human
uuauuuauuaagaug

SEQ ID NO: 3463243 - RNA, 22 nt, Human
uuauuuauucagcuucauuugu

SEQ ID NO: 3463244 - RNA, 12 nt, Human
uuauuuauucug

SEQ ID NO: 3463245 - RNA, 11 nt, Human
uuauuuauuga

SEQ ID NO: 3463246 - RNA, 12 nt, Human
uuauuucaaugu

SEQ ID NO: 3463247 - RNA, 15 nt, Human
uuauuucaauguaau

SEQ ID NO: 3463248 - RNA, 18 nt, Human
uuauuucacaaauaauag

SEQ ID NO: 3463249 - RNA, 14 nt, Human
uuauuucacuugau

SEQ ID NO: 3463250 - RNA, 17 nt, Human
uuauuucagaaauguac

SEQ ID NO: 3463251 - RNA, 19 nt, Human
uuauuucccuacauuaaac

SEQ ID NO: 3463252 - RNA, 17 nt, Human
uuauuuccuaugaugua

SEQ ID NO: 3463253 - RNA, 22 nt, Human
uuauuuccuaugauguauacug

SEQ ID NO: 3463254 - RNA, 19 nt, Human
uuauuucuaggaagaauuu

SEQ ID NO: 3463255 - RNA, 12 nt, Human
uuauuucuccuu

SEQ ID NO: 3463256 - RNA, 21 nt, Human
uuauuucucucaucuguuaca

SEQ ID NO: 3463257 - RNA, 14 nt, Human
uuauuucucugauu

SEQ ID NO: 3463258 - RNA, 12 nt, Human
uuauuucugcau

SEQ ID NO: 3463259 - RNA, 22 nt, Human
uuauuucugcauauguugaaua

SEQ ID NO: 3463260 - RNA, 20 nt, Human
uuauuugaacaaugaaguug

SEQ ID NO: 3463261 - RNA, 18 nt, Human
uuauuugagaagcugcuc

SEQ ID NO: 3463262 - RNA, 19 nt, Human
uuauuugauuauuuaagac

SEQ ID NO: 3463263 - RNA, 20 nt, Human
uuauuugauuauuuaagacu

SEQ ID NO: 3463264 - RNA, 13 nt, Human
uuauuugcaugug

SEQ ID NO: 3463265 - RNA, 14 nt, Human
uuauuugcauguua

SEQ ID NO: 3463266 - RNA, 16 nt, Human
uuauuugcauguuaug

SEQ ID NO: 3463267 - RNA, 18 nt, Human
uuauuuggaaccuuguuu

SEQ ID NO: 3463268 - RNA, 23 nt, Human
uuauuuggaaccuuguuuuggac

SEQ ID NO: 3463269 - RNA, 21 nt, Human
uuauuugggguugcaucagaa

SEQ ID NO: 3463270 - RNA, 12 nt, Human
uuauuuguaaua

SEQ ID NO: 3463271 - RNA, 18 nt, Human
uuauuuguaauagauguu

SEQ ID NO: 3463272 - RNA, 13 nt, Human
uuauuuguacagu

SEQ ID NO: 3463273 - RNA, 18 nt, Human
uuauuuguuauuuucagu

SEQ ID NO: 3463274 - RNA, 19 nt, Human
uuauuuguuuuucauucau

SEQ ID NO: 3463275 - RNA, 13 nt, Human
uuauuuuaaaaga

SEQ ID NO: 3463276 - RNA, 16 nt, Human
uuauuuuaaaauuuca

SEQ ID NO: 3463277 - RNA, 16 nt, Human
uuauuuuaaacaaaau

SEQ ID NO: 3463278 - RNA, 23 nt, Human
uuauuuuaaauuauaaggacugc

SEQ ID NO: 3463279 - RNA, 20 nt, Human
uuauuuuaagcauugugagu

SEQ ID NO: 3463280 - RNA, 16 nt, Human
uuauuuuaaugugaug

SEQ ID NO: 3463281 - RNA, 16 nt, Human
uuauuuuacacagaaa

SEQ ID NO: 3463282 - RNA, 20 nt, Human
uuauuuuacagcucauuaaa

SEQ ID NO: 3463283 - RNA, 12 nt, Human
uuauuuuaugag

SEQ ID NO: 3463284 - RNA, 14 nt, Human
uuauuuuaugagaa

SEQ ID NO: 3463285 - RNA, 16 nt, Human
uuauuuuaugagaaau

SEQ ID NO: 3463286 - RNA, 20 nt, Human
uuauuuuaugagaaauguaa

SEQ ID NO: 3463287 - RNA, 14 nt, Human
uuauuuuauguuua

SEQ ID NO: 3463288 - RNA, 18 nt, Human
uuauuuuauuaugcauga

SEQ ID NO: 3463289 - RNA, 13 nt, Human
uuauuuuauuugu

SEQ ID NO: 3463290 - RNA, 15 nt, Human
uuauuuucacccucu

SEQ ID NO: 3463291 - RNA, 14 nt, Human
uuauuuucauuaca

SEQ ID NO: 3463292 - RNA, 22 nt, Human
uuauuuuccccuaucauuuauu

SEQ ID NO: 3463293 - RNA, 20 nt, Human
uucaagucugugccuggagc

SEQ ID NO: 3463294 - RNA, 21 nt, Human
uucaagucugugccuggagcu

SEQ ID NO: 3463295 - RNA, 17 nt, Human
uucaagugauucucaug

SEQ ID NO: 3463296 - RNA, 22 nt, Human
uucaagugauucucaugccuca

SEQ ID NO: 3463297 - RNA, 13 nt, Human
uucaaguuaaagu

SEQ ID NO: 3463298 - RNA, 17 nt, Human
uucaaguuauuguacag

SEQ ID NO: 3463299 - RNA, 18 nt, Human
uucaaguuuuaaaguuca

SEQ ID NO: 3463300 - RNA, 20 nt, Human
uucaaguuuuggguauguuu

SEQ ID NO: 3463301 - RNA, 22 nt, Human
uucaaguuuuggguauguuuaa

SEQ ID NO: 3463302 - RNA, 21 nt, Human
uucaauaaaaaaaagaaauga

SEQ ID NO: 3463303 - RNA, 13 nt, Human
uucaauaaagcug

SEQ ID NO: 3463304 - RNA, 14 nt, Human
uucaauaaaguauu

SEQ ID NO: 3463305 - RNA, 19 nt, Human
uucaauaaaguuugaucuu

SEQ ID NO: 3463306 - RNA, 19 nt, Human
uucaauaaaucuuuggaaa

SEQ ID NO: 3463307 - RNA, 15 nt, Human
uucaauaagagauua

SEQ ID NO: 3463308 - RNA, 20 nt, Human
uucaauaagcaucaaacucu

SEQ ID NO: 3463309 - RNA, 16 nt, Human
uucaauacagauauau

SEQ ID NO: 3463310 - RNA, 17 nt, Human
uucaauacagauauauu

SEQ ID NO: 3463311 - RNA, 13 nt, Human
uucaauaggaaaa

SEQ ID NO: 3463312 - RNA, 15 nt, Human
uucaauaggaaaaac

SEQ ID NO: 3463313 - RNA, 20 nt, Human
uucaauaggaaaaacugauu

SEQ ID NO: 3463314 - RNA, 18 nt, Human
uucaauaguucaaggaac

SEQ ID NO: 3463315 - RNA, 16 nt, Human
uucaauauugaauuuu

SEQ ID NO: 3463316 - RNA, 19 nt, Human
uucaauauugaauuuuucc

SEQ ID NO: 3463317 - RNA, 15 nt, Human
uucaauauugacauu

SEQ ID NO: 3463318 - RNA, 17 nt, Human
uucaauauugacauuug

SEQ ID NO: 3463319 - RNA, 23 nt, Human
uucaaucucguauagaagucuuc

SEQ ID NO: 3463320 - RNA, 20 nt, Human
uucaaucuggauucauauuu

SEQ ID NO: 3463321 - RNA, 23 nt, Human
uucaaucuggauucauauuuaau

SEQ ID NO: 3463322 - RNA, 16 nt, Human
uucaaucuguaaacug

SEQ ID NO: 3463323 - RNA, 20 nt, Human
uucaaucuucaauccuugaa

SEQ ID NO: 3463324 - RNA, 12 nt, Human
uucaaugaucua

SEQ ID NO: 3463325 - RNA, 19 nt, Human
uucaaugccccugaauuua

SEQ ID NO: 3463326 - RNA, 22 nt, Human
uucaaugugauauaaacagcuu

SEQ ID NO: 3463327 - RNA, 19 nt, Human
uucaauguguauaaauugu

SEQ ID NO: 3463328 - RNA, 15 nt, Human
uucaauguuagccuc

SEQ ID NO: 3463329 - RNA, 14 nt, Human
uucaauuaaacgga

SEQ ID NO: 3463330 - RNA, 19 nt, Human
uucaauuaaacggauuauu

SEQ ID NO: 3463331 - RNA, 15 nt, Human
uucaauuaaagaaau

SEQ ID NO: 3463332 - RNA, 16 nt, Human
uucaauuccucuggga

SEQ ID NO: 3463333 - RNA, 13 nt, Human
uucaauuccuggg

SEQ ID NO: 3463334 - RNA, 16 nt, Human
uucaauuccugggccc

SEQ ID NO: 3463335 - RNA, 19 nt, Human
uucaauugcaucucccaga

SEQ ID NO: 3463336 - RNA, 14 nt, Human
uucaauugucacuu

SEQ ID NO: 3463337 - RNA, 19 nt, Human
uucaauuuauucaagaaaa

SEQ ID NO: 3463338 - RNA, 17 nt, Human
uucaauuuauugcacaa

SEQ ID NO: 3463339 - RNA, 19 nt, Human
uucaauuuccaagagcuga

SEQ ID NO: 3463340 - RNA, 16 nt, Human
uucaauuugauguggu

SEQ ID NO: 3463341 - RNA, 19 nt, Human
uucaauuuguucagucuuu

SEQ ID NO: 3463342 - RNA, 17 nt, Human
uucaauuuuaaacauau

SEQ ID NO: 3463343 - RNA, 15 nt, Human
uucaauuuuaaagac

SEQ ID NO: 3463344 - RNA, 16 nt, Human
uucacaaacuuuuaua

SEQ ID NO: 3463345 - RNA, 17 nt, Human
uucacaaacuuuuauac

SEQ ID NO: 3463346 - RNA, 22 nt, Human
uucacaaacuuuuauacucuuu

SEQ ID NO: 3463347 - RNA, 11 nt, Human
uucacaaauaa

SEQ ID NO: 3463348 - RNA, 18 nt, Human
uucacaagcugccucccu

SEQ ID NO: 3463349 - RNA, 19 nt, Human
uucacaagcugccucccug

SEQ ID NO: 3463350 - RNA, 20 nt, Human
uucacaaugaaaugcucucc

SEQ ID NO: 3463351 - RNA, 16 nt, Human
uucacaaugucaguau

SEQ ID NO: 3463352 - RNA, 16 nt, Human
uucacaauuauuccaa

SEQ ID NO: 3463353 - RNA, 21 nt, Human
uucacacacaggcaacugagg

SEQ ID NO: 3463354 - RNA, 14 nt, Human
uucacaccugacuc

SEQ ID NO: 3463355 - RNA, 21 nt, Human
uucacaccugacucugaaauc

SEQ ID NO: 3463356 - RNA, 20 nt, Human
uucacagaugggugcuugga

SEQ ID NO: 3463357 - RNA, 19 nt, Human
uucacagccuauaaccaga

SEQ ID NO: 3463358 - RNA, 15 nt, Human
uucacagcuccuccc

SEQ ID NO: 3463359 - RNA, 13 nt, Human
uucacaggcagcc

SEQ ID NO: 3463360 - RNA, 17 nt, Human
uucacaguagagccagc

SEQ ID NO: 3463361 - RNA, 15 nt, Human
uucacagugcucuuu

SEQ ID NO: 3463362 - RNA, 22 nt, Human
uucacaguguuucgacagcuga

SEQ ID NO: 3463363 - RNA, 20 nt, Human
uucacaguucuuugggccag

SEQ ID NO: 3463364 - RNA, 14 nt, Human
uucacaguuugaaa

SEQ ID NO: 3463365 - RNA, 17 nt, Human
uucacaguuugaaauaa

SEQ ID NO: 3463366 - RNA, 20 nt, Human
uucacauaagcucagaaucc

SEQ ID NO: 3463367 - RNA, 17 nt, Human
uucacauagagaucauc

SEQ ID NO: 3463368 - RNA, 17 nt, Human
uucacauagaugucccu

SEQ ID NO: 3463369 - RNA, 20 nt, Human
uucacauaucuaguaugaaa

SEQ ID NO: 3463370 - RNA, 18 nt, Human
uucacaucuaaccucauc

SEQ ID NO: 3463371 - RNA, 13 nt, Human
uucacaugaacau

SEQ ID NO: 3463372 - RNA, 18 nt, Human
uucacauguuuucaaaug

SEQ ID NO: 3463373 - RNA, 19 nt, Human
uucacauguuuucaaaugg

SEQ ID NO: 3463374 - RNA, 17 nt, Human
uucacauuaaaaaauga

SEQ ID NO: 3463375 - RNA, 22 nt, Human
uucacauuaauauuugcugaca

SEQ ID NO: 3463376 - RNA, 16 nt, Human
uucacauuagaagaca

SEQ ID NO: 3463377 - RNA, 16 nt, Human
uucacauucuuauaaa

SEQ ID NO: 3463378 - RNA, 22 nt, Human
uaggagaauugcuugaaccugg

SEQ ID NO: 3463379 - RNA, 19 nt, Human
uaggagacacauccagcaa

SEQ ID NO: 3463380 - RNA, 14 nt, Human
uaggagaccaaggc

SEQ ID NO: 3463381 - RNA, 21 nt, Human
uaggagaccaaggcgggagca

SEQ ID NO: 3463382 - RNA, 23 nt, Human
uaggagacuugccagagccgggc

SEQ ID NO: 3463383 - RNA, 16 nt, Human
uaggagauaccagguu

SEQ ID NO: 3463384 - RNA, 14 nt, Human
uaggagcagagcuc

SEQ ID NO: 3463385 - RNA, 13 nt, Human
uaggagcuaaggc

SEQ ID NO: 3463386 - RNA, 17 nt, Human
uaggagcuaaggcucua

SEQ ID NO: 3463387 - RNA, 16 nt, Human
uaggagggaaaccuuu

SEQ ID NO: 3463388 - RNA, 12 nt, Human
uaggagggacug

SEQ ID NO: 3463389 - RNA, 23 nt, Human
uaggagggacugucgcugcuucg

SEQ ID NO: 3463390 - RNA, 14 nt, Human
uaggagggagacac

SEQ ID NO: 3463391 - RNA, 18 nt, Human
uaggagggaguuaucuaa

SEQ ID NO: 3463392 - RNA, 18 nt, Human
uaggagugugugacauuc

SEQ ID NO: 3463393 - RNA, 23 nt, Human
uaggaguucacuucaucuucuca

SEQ ID NO: 3463394 - RNA, 17 nt, Human
uaggaguucgagaccag

SEQ ID NO: 3463395 - RNA, 23 nt, Human
uaggaguuuagggaacaauuugg

SEQ ID NO: 3463396 - RNA, 20 nt, Human
uaggauaaaaagccagggcu

SEQ ID NO: 3463397 - RNA, 22 nt, Human
uaggauaaaaagccagggcugg

SEQ ID NO: 3463398 - RNA, 21 nt, Human
uaggauagcuaacuguaaauc

SEQ ID NO: 3463399 - RNA, 17 nt, Human
uaggauaugccugcucu

SEQ ID NO: 3463400 - RNA, 19 nt, Human
uaggaucagcccucauuuu

SEQ ID NO: 3463401 - RNA, 18 nt, Human
uaggaugaaaagauucuu

SEQ ID NO: 3463402 - RNA, 17 nt, Human
uaggaugggcuucugug

SEQ ID NO: 3463403 - RNA, 22 nt, Human
uaggauucacaccccaccugcg

SEQ ID NO: 3463404 - RNA, 12 nt, Human
uaggauuuaaca

SEQ ID NO: 3463405 - RNA, 17 nt, Human
uaggauuuauuuaaaau

SEQ ID NO: 3463406 - RNA, 22 nt, Human
uaggauuuauuuaaaauagcaa

SEQ ID NO: 3463407 - RNA, 22 nt, Human
uaggauuuucacauucuuggcu

SEQ ID NO: 3463408 - RNA, 13 nt, Human
uaggauuuuuaga

SEQ ID NO: 3463409 - RNA, 21 nt, Human
uaggauuuuuuuuaauguuua

SEQ ID NO: 3463410 - RNA, 18 nt, Human
uaggcaaccuuuauuuuu

SEQ ID NO: 3463411 - RNA, 17 nt, Human
uaggcaagauggcacag

SEQ ID NO: 3463412 - RNA, 17 nt, Human
uaggcaaguuuucccug

SEQ ID NO: 3463413 - RNA, 21 nt, Human
uaggcaccuaccaccacgccc

SEQ ID NO: 3463414 - RNA, 17 nt, Human
uaggcaccuuuuacugu

SEQ ID NO: 3463415 - RNA, 18 nt, Human
uaggcaccuuuuacugug

SEQ ID NO: 3463416 - RNA, 12 nt, Human
uaggcagacaca

SEQ ID NO: 3463417 - RNA, 16 nt, Human
uaggcaggacaugcug

SEQ ID NO: 3463418 - RNA, 19 nt, Human
uaggcagggauuugaggag

SEQ ID NO: 3463419 - RNA, 17 nt, Human
uaggcagggugucugcc

SEQ ID NO: 3463420 - RNA, 20 nt, Human
uaggcagggugucugccccc

SEQ ID NO: 3463421 - RNA, 19 nt, Human
uaggcaguauaaagaauag

SEQ ID NO: 3463422 - RNA, 18 nt, Human
uaggcaguuagagaugcc

SEQ ID NO: 3463423 - RNA, 22 nt, Human
uaggcaguuagagaugccuccc

SEQ ID NO: 3463424 - RNA, 14 nt, Human
uaggcaucccaggg

SEQ ID NO: 3463425 - RNA, 14 nt, Human
uaggcauuguggga

SEQ ID NO: 3463426 - RNA, 20 nt, Human
uaggcauuugcugaauacag

SEQ ID NO: 3463427 - RNA, 12 nt, Human
uaggcauuugua

SEQ ID NO: 3463428 - RNA, 18 nt, Human
uaggccaagguguccuac

SEQ ID NO: 3463429 - RNA, 18 nt, Human
uaggccaaucagaagcua

SEQ ID NO: 3463430 - RNA, 23 nt, Human
uaggccagcaagcggggaugucc

SEQ ID NO: 3463431 - RNA, 13 nt, Human
uaggccaugggac

SEQ ID NO: 3463432 - RNA, 15 nt, Human
uaggcccacacacag

SEQ ID NO: 3463433 - RNA, 14 nt, Human
uaggcccuuucagu

SEQ ID NO: 3463434 - RNA, 15 nt, Human
uaggcccuuucagug

SEQ ID NO: 3463435 - RNA, 20 nt, Human
uaggccucaacuccucccau

SEQ ID NO: 3463436 - RNA, 19 nt, Human
uaggccucaggugaaacuc

SEQ ID NO: 3463437 - RNA, 22 nt, Human
uucauauugugccaauauguau

SEQ ID NO: 3463438 - RNA, 23 nt, Human
uucauauuguugcauugcuuuuu

SEQ ID NO: 3463439 - RNA, 13 nt, Human
uucauauuuaauu

SEQ ID NO: 3463440 - RNA, 21 nt, Human
uucauauuuacuucuuauaca

SEQ ID NO: 3463441 - RNA, 14 nt, Human
uucauauuugcacu

SEQ ID NO: 3463442 - RNA, 14 nt, Human
uucaucaagacugg

SEQ ID NO: 3463443 - RNA, 16 nt, Human
uucaucaguguuaaaa

SEQ ID NO: 3463444 - RNA, 19 nt, Human
uucaucauauuauacagac

SEQ ID NO: 3463445 - RNA, 19 nt, Human
uucaucauucacuucacug

SEQ ID NO: 3463446 - RNA, 23 nt, Human
uucaucauuguuucugcaugaau

SEQ ID NO: 3463447 - RNA, 20 nt, Human
uucauccaacuuauguuuuu

SEQ ID NO: 3463448 - RNA, 17 nt, Human
uucauccaaguuaaaug

SEQ ID NO: 3463449 - RNA, 20 nt, Human
uucauccaaguuaaauguag

SEQ ID NO: 3463450 - RNA, 16 nt, Human
uucauccaauccucac

SEQ ID NO: 3463451 - RNA, 23 nt, Human
uucauccacucugccugcuuaca

SEQ ID NO: 3463452 - RNA, 21 nt, Human
uucauccaggcccaacuguga

SEQ ID NO: 3463453 - RNA, 17 nt, Human
uucauccauaacugaac

SEQ ID NO: 3463454 - RNA, 21 nt, Human
uucaucccaugauguagugcc

SEQ ID NO: 3463455 - RNA, 14 nt, Human
uucaucccauucca

SEQ ID NO: 3463456 - RNA, 15 nt, Human
uucaucccauuccag

SEQ ID NO: 3463457 - RNA, 21 nt, Human
uucaucccucuggggcuguuc

SEQ ID NO: 3463458 - RNA, 19 nt, Human
uucauccuccucagaucuu

SEQ ID NO: 3463459 - RNA, 15 nt, Human
uucauccuuucacuu

SEQ ID NO: 3463460 - RNA, 16 nt, Human
uucaucuauuucugag

SEQ ID NO: 3463461 - RNA, 13 nt, Human
uucaucucauuua

SEQ ID NO: 3463462 - RNA, 23 nt, Human
uucaucucuagggaccagaacca

SEQ ID NO: 3463463 - RNA, 17 nt, Human
uucaucugacuaugaca

SEQ ID NO: 3463464 - RNA, 20 nt, Human
uucaucugacuaugacauaa

SEQ ID NO: 3463465 - RNA, 20 nt, Human
uucaucugagagaggcuaaa

SEQ ID NO: 3463466 - RNA, 13 nt, Human
uucaucugcucuc

SEQ ID NO: 3463467 - RNA, 19 nt, Human
uucaucuguaacucuaaaa

SEQ ID NO: 3463468 - RNA, 23 nt, Human
uucaucuguaacucuaaaagauc

SEQ ID NO: 3463469 - RNA, 14 nt, Human
uucaucuuccugug

SEQ ID NO: 3463470 - RNA, 17 nt, Human
uucaucuuccugugucc

SEQ ID NO: 3463471 - RNA, 20 nt, Human
uucaucuuccuguguccuga

SEQ ID NO: 3463472 - RNA, 11 nt, Human
uucaucuugaa

SEQ ID NO: 3463473 - RNA, 21 nt, Human
uucaucuugaauuguaaggaa

SEQ ID NO: 3463474 - RNA, 22 nt, Human
uucaucuuggucacauacaauu

SEQ ID NO: 3463475 - RNA, 15 nt, Human
uucaugaaaauacca

SEQ ID NO: 3463476 - RNA, 17 nt, Human
uucaugaaaauaccauu

SEQ ID NO: 3463477 - RNA, 20 nt, Human
uucaugaaaugcuaugucau

SEQ ID NO: 3463478 - RNA, 22 nt, Human
uucaugaacuucgcaucaaaag

SEQ ID NO: 3463479 - RNA, 13 nt, Human
uucaugaugcagu

SEQ ID NO: 3463480 - RNA, 15 nt, Human
uucaugauuagaaau

SEQ ID NO: 3463481 - RNA, 20 nt, Human
uucaugcaaggggaaaaucu

SEQ ID NO: 3463482 - RNA, 14 nt, Human
uucaugcaaugaca

SEQ ID NO: 3463483 - RNA, 15 nt, Human
uucaugcaaugacau

SEQ ID NO: 3463484 - RNA, 21 nt, Human
uucaugcaaugacaucuucaa

SEQ ID NO: 3463485 - RNA, 17 nt, Human
uucaugcacuuaaagaa

SEQ ID NO: 3463486 - RNA, 15 nt, Human
uucaugcagcugugg

SEQ ID NO: 3463487 - RNA, 19 nt, Human
uucaugccaccauggccag

SEQ ID NO: 3463488 - RNA, 22 nt, Human
uucaugccaccauggccagcca

SEQ ID NO: 3463489 - RNA, 21 nt, Human
uucaugccagcuacuuccucc

SEQ ID NO: 3463490 - RNA, 15 nt, Human
uucaugccuuuguaa

SEQ ID NO: 3463491 - RNA, 17 nt, Human
uucaugcucagcccuga

SEQ ID NO: 3463492 - RNA, 22 nt, Human
uucaugcuguucaugaaagauu

SEQ ID NO: 3463493 - RNA, 20 nt, Human
uucauggaauggacauccug

SEQ ID NO: 3463494 - RNA, 22 nt, Human
uucauggaauggacauccugua

SEQ ID NO: 3463495 - RNA, 19 nt, Human
uucauggcugcuguugcuu

SEQ ID NO: 3463496 - RNA, 19 nt, Human
uucauggugaaaauguacu

SEQ ID NO: 3463497 - RNA, 19 nt, Human
uucauguaaacaaaauuua

SEQ ID NO: 3463498 - RNA, 13 nt, Human
uucauguaauuuu

SEQ ID NO: 3463499 - RNA, 22 nt, Human
uucaugucaacuucuggcuccu

SEQ ID NO: 3463500 - RNA, 16 nt, Human
uucaugucccagaacu

SEQ ID NO: 3463501 - RNA, 17 nt, Human
uucauguccugugucag

SEQ ID NO: 3463502 - RNA, 23 nt, Human
uucauguccugugucaguuuaug

SEQ ID NO: 3463503 - RNA, 20 nt, Human
uucaugugggaucccaucuu

SEQ ID NO: 3463504 - RNA, 18 nt, Human
uucauguuaguuaccuua

SEQ ID NO: 3463505 - RNA, 22 nt, Human
uucauguugcacacccacucag

SEQ ID NO: 3463506 - RNA, 14 nt, Human
uucauguuugcuuc

SEQ ID NO: 3463507 - RNA, 18 nt, Human
uucauguuuuaacaaaaa

SEQ ID NO: 3463508 - RNA, 13 nt, Human
uucauuaaagcau

SEQ ID NO: 3463509 - RNA, 20 nt, Human
uucauuagaaauauuuuaaa

SEQ ID NO: 3463510 - RNA, 13 nt, Human
uucauuagagcag

SEQ ID NO: 3463511 - RNA, 22 nt, Human
uucauuagcaaaaaaaguugua

SEQ ID NO: 3463512 - RNA, 19 nt, Human
uucauuaguuuugaagauu

SEQ ID NO: 3463513 - RNA, 18 nt, Human
uucauuauuggaauuaac

SEQ ID NO: 3463514 - RNA, 21 nt, Human
uucauucaauauugacauuug

SEQ ID NO: 3463515 - RNA, 9 nt, Human
uucauucag

SEQ ID NO: 3463516 - RNA, 17 nt, Human
uucauucauacuuaaaa

SEQ ID NO: 3463517 - RNA, 14 nt, Human
uucauucauauuac

SEQ ID NO: 3463518 - RNA, 23 nt, Human
uucauucauggaccacuguuucu

SEQ ID NO: 3463519 - RNA, 15 nt, Human
uucauuccauugccu

SEQ ID NO: 3463520 - RNA, 18 nt, Human
uucauuccuaacacagca

SEQ ID NO: 3463521 - RNA, 12 nt, Human
uucauuccucca

SEQ ID NO: 3463522 - RNA, 18 nt, Human
uucauucucauaauuccu

SEQ ID NO: 3463523 - RNA, 15 nt, Human
uucauucuccugccu

SEQ ID NO: 3463524 - RNA, 14 nt, Human
uucauucugcauug

SEQ ID NO: 3463525 - RNA, 19 nt, Human
uucauucuuuuugaaaugu

SEQ ID NO: 3463526 - RNA, 16 nt, Human
uucauugacuaucaaa

SEQ ID NO: 3463527 - RNA, 16 nt, Human
uucauugcaauuaaac

SEQ ID NO: 3463528 - RNA, 15 nt, Human
uucauugccaguguc

SEQ ID NO: 3463529 - RNA, 22 nt, Human
uucauuggucuaauuuauucaa

SEQ ID NO: 3463530 - RNA, 17 nt, Human
uucauugguuaauuuuu

SEQ ID NO: 3463531 - RNA, 18 nt, Human
uucauuguaauguuacug

SEQ ID NO: 3463532 - RNA, 20 nt, Human
uucauuguaauguuacugau

SEQ ID NO: 3463533 - RNA, 13 nt, Human
uucauuguauaaa

SEQ ID NO: 3463534 - RNA, 17 nt, Human
uucauuguauaaaaaua

SEQ ID NO: 3463535 - RNA, 12 nt, Human
uucauugucucu

SEQ ID NO: 3463536 - RNA, 17 nt, Human
uucauugugguuauuuu

SEQ ID NO: 3463537 - RNA, 24 nt, Human
uucauugugguuauuuuuauacag

SEQ ID NO: 3463538 - RNA, 21 nt, Human
uucauuguuuuuaacuuugcu

SEQ ID NO: 3463539 - RNA, 17 nt, Human
uucauuuaaaaugauua

SEQ ID NO: 3463540 - RNA, 13 nt, Human
uucauuuacugug

SEQ ID NO: 3463541 - RNA, 16 nt, Human
uucauuucauccuuuc

SEQ ID NO: 3463542 - RNA, 16 nt, Human
uucauuuccucaaaaa

SEQ ID NO: 3463543 - RNA, 16 nt, Human
uucauuuccuccguca

SEQ ID NO: 3463544 - RNA, 15 nt, Human
uucauuuccuguguc

SEQ ID NO: 3463545 - RNA, 15 nt, Human
uucauuucuaauuaa

SEQ ID NO: 3463546 - RNA, 19 nt, Human
uucauuucugauauagaau

SEQ ID NO: 3463547 - RNA, 20 nt, Human
uucauuugaguuauuuuaau

SEQ ID NO: 3463548 - RNA, 16 nt, Human
uucauuugaugcuaaa

SEQ ID NO: 3463549 - RNA, 13 nt, Human
uucauuugcuauc

SEQ ID NO: 3463550 - RNA, 17 nt, Human
uucauuuguaugucaaa

SEQ ID NO: 3463551 - RNA, 23 nt, Human
uucauuuguggugauauagaauu

SEQ ID NO: 3463552 - RNA, 16 nt, Human
uucauuuguuauucuu

SEQ ID NO: 3463553 - RNA, 19 nt, Human
uucauuuuacaguuacuuu

SEQ ID NO: 3463554 - RNA, 22 nt, Human
uucauuuuauauugaaaaaaau

SEQ ID NO: 3463555 - RNA, 15 nt, Human
uucauuuuaugaaga

SEQ ID NO: 3463556 - RNA, 14 nt, Human
uucauuuuccaaua

SEQ ID NO: 3463557 - RNA, 19 nt, Human
uucauuuucuagauacaau

SEQ ID NO: 3463558 - RNA, 21 nt, Human
uucauuuucuagauacaauaa

SEQ ID NO: 3463559 - RNA, 13 nt, Human
uucauuuucucua

SEQ ID NO: 3463560 - RNA, 14 nt, Human
uucauuuucugcaa

SEQ ID NO: 3463561 - RNA, 18 nt, Human
uucauuuucugcaagccu

SEQ ID NO: 3463562 - RNA, 17 nt, Human
uucauuuugaaaaacac

SEQ ID NO: 3463563 - RNA, 15 nt, Human
uucauuuugcuuuaa

SEQ ID NO: 3463564 - RNA, 22 nt, Human
uucauuuuugaaacugcauuug

SEQ ID NO: 3463565 - RNA, 23 nt, Human
uucauuuuugauagcugucccau

SEQ ID NO: 3463566 - RNA, 14 nt, Human
uucauuuuuuucca

SEQ ID NO: 3463567 - RNA, 15 nt, Human
uuccaaaaaaauacu

SEQ ID NO: 3463568 - RNA, 21 nt, Human
uuccaaaaagauuuucagaaa

SEQ ID NO: 3463569 - RNA, 15 nt, Human
uuccaaaaauuauua

SEQ ID NO: 3463570 - RNA, 15 nt, Human
uuccaaaagccaaug

SEQ ID NO: 3463571 - RNA, 16 nt, Human
uuccaaaaguggccuc

SEQ ID NO: 3463572 - RNA, 21 nt, Human
uuccaaaaguggccucuuugu

SEQ ID NO: 3463573 - RNA, 12 nt, Human
uuccaaaauaau

SEQ ID NO: 3463574 - RNA, 13 nt, Human
uuccaaaauaauu

SEQ ID NO: 3463575 - RNA, 20 nt, Human
uuccaaacucuucccucucu

SEQ ID NO: 3463576 - RNA, 12 nt, Human
uuccaaagaaag

SEQ ID NO: 3463577 - RNA, 21 nt, Human
uaguuuguuuaaugugaacuu

SEQ ID NO: 3463578 - RNA, 23 nt, Human
uaguuuuaaaaaaauaaaacauu

SEQ ID NO: 3463579 - RNA, 14 nt, Human
uaguuuuaguuuuc

SEQ ID NO: 3463580 - RNA, 14 nt, Human
uaguuuuauuuaua

SEQ ID NO: 3463581 - RNA, 15 nt, Human
uuccagugcaacacu

SEQ ID NO: 3463582 - RNA, 19 nt, Human
uuccagugcaacacugaag

SEQ ID NO: 3463583 - RNA, 18 nt, Human
uuccaguggaucauaaga

SEQ ID NO: 3463584 - RNA, 18 nt, Human
uuccaguguccuuagaac

SEQ ID NO: 3463585 - RNA, 22 nt, Human
uuccagugucuauaaaagaaac

SEQ ID NO: 3463586 - RNA, 13 nt, Human
uuccaguguucua

SEQ ID NO: 3463587 - RNA, 17 nt, Human
uuccaguuacuuuccaa

SEQ ID NO: 3463588 - RNA, 15 nt, Human
uuccauaaacaccca

SEQ ID NO: 3463589 - RNA, 22 nt, Human
uuccauaaagaagauguuuaac

SEQ ID NO: 3463590 - RNA, 23 nt, Human
uuccauaaucuggacuccucugu

SEQ ID NO: 3463591 - RNA, 19 nt, Human
uuccauaauguauaaagaa

SEQ ID NO: 3463592 - RNA, 17 nt, Human
uugucauuagccugagu

SEQ ID NO: 3463593 - RNA, 13 nt, Human
uugucauuuugaa

SEQ ID NO: 3463594 - RNA, 15 nt, Human
uugucauuuugaagc

SEQ ID NO: 3463595 - RNA, 14 nt, Human
uugucauuuugguc

SEQ ID NO: 3463596 - RNA, 21 nt, Human
uuguccaaaguuaccuggaau

SEQ ID NO: 3463597 - RNA, 21 nt, Human
uuguccaacccgaggcccgca

SEQ ID NO: 3463598 - RNA, 21 nt, Human
uuguccaauuguauaacuuug

SEQ ID NO: 3463599 - RNA, 22 nt, Human
uuguccaauuguugacaguucu

SEQ ID NO: 3463600 - RNA, 16 nt, Human
uuguccagagcugcuu

SEQ ID NO: 3463601 - RNA, 18 nt, Human
uuguccagagcugcuucc

SEQ ID NO: 3463602 - RNA, 15 nt, Human
uuguccauuuguaaa

SEQ ID NO: 3463603 - RNA, 19 nt, Human
uugucccacuaucugggug

SEQ ID NO: 3463604 - RNA, 12 nt, Human
uuguccccacac

SEQ ID NO: 3463605 - RNA, 18 nt, Human
uuguccccaccgcagaca

SEQ ID NO: 3463606 - RNA, 20 nt, Human
uuguccccaccgcagacagg

SEQ ID NO: 3463607 - RNA, 15 nt, Human
uuguccccgacccuu

SEQ ID NO: 3463608 - RNA, 14 nt, Human
uuguccccucuuga

SEQ ID NO: 3463609 - RNA, 21 nt, Human
uuguccccugccugugccugc

SEQ ID NO: 3463610 - RNA, 18 nt, Human
uugucccgauuguaacuc

SEQ ID NO: 3463611 - RNA, 16 nt, Human
uugucccucugcuacg

SEQ ID NO: 3463612 - RNA, 18 nt, Human
uugucccugaagagaagg

SEQ ID NO: 3463613 - RNA, 18 nt, Human
uugucccuggcuuccuua

SEQ ID NO: 3463614 - RNA, 19 nt, Human
uugucccuggcuuccuuac

SEQ ID NO: 3463615 - RNA, 21 nt, Human
uuguccgguggaaggccuucu

SEQ ID NO: 3463616 - RNA, 15 nt, Human
uuguccgguuuacuu

SEQ ID NO: 3463617 - RNA, 15 nt, Human
uuguccuagcacaga

SEQ ID NO: 3463618 - RNA, 23 nt, Human
uuguccuagcacagauggccagc

SEQ ID NO: 3463619 - RNA, 17 nt, Human
uuguccuauuaguguua

SEQ ID NO: 3463620 - RNA, 15 nt, Human
uuguccucauuucuc

SEQ ID NO: 3463621 - RNA, 13 nt, Human
uuguccuccccuu

SEQ ID NO: 3463622 - RNA, 15 nt, Human
uuguccuccugcugc

SEQ ID NO: 3463623 - RNA, 19 nt, Human
uuguccuccugcugccagu

SEQ ID NO: 3463624 - RNA, 19 nt, Human
uuguccugaugcuuuuguc

SEQ ID NO: 3463625 - RNA, 20 nt, Human
uuguccugccugcaauauuu

SEQ ID NO: 3463626 - RNA, 17 nt, Human
uuguccuuucccuucag

SEQ ID NO: 3463627 - RNA, 16 nt, Human
uuguccuuuugucuuc

SEQ ID NO: 3463628 - RNA, 17 nt, Human
uuguccuuuugucuucu

SEQ ID NO: 3463629 - RNA, 18 nt, Human
uuguccuuuuucaggaga

SEQ ID NO: 3463630 - RNA, 22 nt, Human
uugucgaaaagagucuuccaau

SEQ ID NO: 3463631 - RNA, 17 nt, Human
uugucuaagaaacauug

SEQ ID NO: 3463632 - RNA, 20 nt, Human
uugucuaagaaacauuggaa

SEQ ID NO: 3463633 - RNA, 15 nt, Human
uugucuauaaagcau

SEQ ID NO: 3463634 - RNA, 14 nt, Human
uugucuaugggacu

SEQ ID NO: 3463635 - RNA, 11 nt, Human
uugucuauuuu

SEQ ID NO: 3463636 - RNA, 17 nt, Human
uugucuauuuuugucuu

SEQ ID NO: 3463637 - RNA, 11 nt, Human
uugucucagaa

SEQ ID NO: 3463638 - RNA, 13 nt, Human
uugucucagagca

SEQ ID NO: 3463639 - RNA, 11 nt, Human
uugucucagau

SEQ ID NO: 3463640 - RNA, 13 nt, Human
uugucucagauuu

SEQ ID NO: 3463641 - RNA, 20 nt, Human
uugucucagauuuuauuaug

SEQ ID NO: 3463642 - RNA, 15 nt, Human
uugucucaguuggaa

SEQ ID NO: 3463643 - RNA, 12 nt, Human
uugucucccugg

SEQ ID NO: 3463644 - RNA, 17 nt, Human
uugucuccuacuccuga

SEQ ID NO: 3463645 - RNA, 18 nt, Human
uugucuccuacuccugac

SEQ ID NO: 3463646 - RNA, 16 nt, Human
uugucucuccuuuucu

SEQ ID NO: 3463647 - RNA, 14 nt, Human
uugucucugaugca

SEQ ID NO: 3463648 - RNA, 21 nt, Human
uugucucugaugcagcuuaua

SEQ ID NO: 3463649 - RNA, 15 nt, Human
uugucucuucuccuu

SEQ ID NO: 3463650 - RNA, 18 nt, Human
uugucugaagucacugca

SEQ ID NO: 3463651 - RNA, 15 nt, Human
uugucuggaagaaag

SEQ ID NO: 3463652 - RNA, 13 nt, Human
uugucuguaaauc

SEQ ID NO: 3463653 - RNA, 19 nt, Human
uugucugugcauccggggg

SEQ ID NO: 3463654 - RNA, 13 nt, Human
uugucuuaaauaa

SEQ ID NO: 3463655 - RNA, 17 nt, Human
uugucuuaauauugugg

SEQ ID NO: 3463656 - RNA, 17 nt, Human
uugucuuaauggaugaa

SEQ ID NO: 3463657 - RNA, 19 nt, Human
uugucuuaauggaugaaau

SEQ ID NO: 3463658 - RNA, 13 nt, Human
uugucuuauauau

SEQ ID NO: 3463659 - RNA, 19 nt, Human
uugucuuuauaugaacaua

SEQ ID NO: 3463660 - RNA, 13 nt, Human
uugucuuucagga

SEQ ID NO: 3463661 - RNA, 15 nt, Human
uugucuuuggacccu

SEQ ID NO: 3463662 - RNA, 24 nt, Human
uugucuuuggacccugaggcccag

SEQ ID NO: 3463663 - RNA, 23 nt, Human
uugucuuuguaaugucaccaccu

SEQ ID NO: 3463664 - RNA, 20 nt, Human
uugucuuuguucuucuacca

SEQ ID NO: 3463665 - RNA, 19 nt, Human
uugucuuuuaaugcuucau

SEQ ID NO: 3463666 - RNA, 19 nt, Human
uugucuuuuuagaugccca

SEQ ID NO: 3463667 - RNA, 20 nt, Human
uugugaaaaaauuuacuuua

SEQ ID NO: 3463668 - RNA, 16 nt, Human
uugugaaacacagcug

SEQ ID NO: 3463669 - RNA, 19 nt, Human
uugugaaagaggucccaag

SEQ ID NO: 3463670 - RNA, 20 nt, Human
uugugaaaguuuugaguaga

SEQ ID NO: 3463671 - RNA, 14 nt, Human
uugugaaaugaugg

SEQ ID NO: 3463672 - RNA, 23 nt, Human
uugugaaccauggugaagugcuu

SEQ ID NO: 3463673 - RNA, 22 nt, Human
uugugaacucagccaagcacag

SEQ ID NO: 3463674 - RNA, 17 nt, Human
uugugaacuuuuuguag

SEQ ID NO: 3463675 - RNA, 19 nt, Human
uugugaagaaaaauaaagu

SEQ ID NO: 3463676 - RNA, 18 nt, Human
uugugaagcaaaauuuuu

SEQ ID NO: 3463677 - RNA, 13 nt, Human
uugugaagcccug

SEQ ID NO: 3463678 - RNA, 14 nt, Human
uugugaagcccugu

SEQ ID NO: 3463679 - RNA, 16 nt, Human
uugugaauaaugauuu

SEQ ID NO: 3463680 - RNA, 20 nt, Human
uugugaaucaagggucaggc

SEQ ID NO: 3463681 - RNA, 15 nt, Human
uugugaaugcuucuc

SEQ ID NO: 3463682 - RNA, 13 nt, Human
uugugaauggauu

SEQ ID NO: 3463683 - RNA, 21 nt, Human
uugugaauguauuuuucuguu

SEQ ID NO: 3463684 - RNA, 18 nt, Human
uugugaauuaggcuguaa

SEQ ID NO: 3463685 - RNA, 16 nt, Human
uugugacauuccuucu

SEQ ID NO: 3463686 - RNA, 17 nt, Human
uugugaccuuaguguuu

SEQ ID NO: 3463687 - RNA, 21 nt, Human
uugugacuauauagagauguu

SEQ ID NO: 3463688 - RNA, 23 nt, Human
uugugacuguauauaaaggaaaa

SEQ ID NO: 3463689 - RNA, 17 nt, Human
uugugacuuuugcuuua

SEQ ID NO: 3463690 - RNA, 21 nt, Human
uugugagaaacaucucaauaa

SEQ ID NO: 3463691 - RNA, 11 nt, Human
uugugagagcg

SEQ ID NO: 3463692 - RNA, 20 nt, Human
uugugaggcccaugguugag

SEQ ID NO: 3463693 - RNA, 20 nt, Human
uugugaguaaaucagauguu

SEQ ID NO: 3463694 - RNA, 22 nt, Human
uugugaguuuaccuuguauacu

SEQ ID NO: 3463695 - RNA, 14 nt, Human
uugugaguuuguuu

SEQ ID NO: 3463696 - RNA, 16 nt, Human
uugugaguuuguuucu

SEQ ID NO: 3463697 - RNA, 20 nt, Human
uugugauacaaugcugugcc

SEQ ID NO: 3463698 - RNA, 16 nt, Human
uugugauagcacuuuc

SEQ ID NO: 3463699 - RNA, 19 nt, Human
uugugauagcacuuucuac

SEQ ID NO: 3463700 - RNA, 21 nt, Human
uugugauagcacuuucuacaa

SEQ ID NO: 3463701 - RNA, 20 nt, Human
uugugauagcuaacauuuua

SEQ ID NO: 3463702 - RNA, 16 nt, Human
uugugauaugcacaau

SEQ ID NO: 3463703 - RNA, 18 nt, Human
uugugaugugaguugcac

SEQ ID NO: 3463704 - RNA, 18 nt, Human
uugugauuagacagaaca

SEQ ID NO: 3463705 - RNA, 17 nt, Human
uugugauuauuucacuu

SEQ ID NO: 3463706 - RNA, 17 nt, Human
uugugauuuuuguaauu

SEQ ID NO: 3463707 - RNA, 18 nt, Human
uugugcaauguaaauauu

SEQ ID NO: 3463708 - RNA, 19 nt, Human
uugugcaauguguauaaac

SEQ ID NO: 3463709 - RNA, 15 nt, Human
uugugcacaggcaga

SEQ ID NO: 3463710 - RNA, 18 nt, Human
uugugcagaaaacauugu

SEQ ID NO: 3463711 - RNA, 19 nt, Human
uugugcagaaaacauuguu

SEQ ID NO: 3463712 - RNA, 11 nt, Human
uugugcagaga

SEQ ID NO: 3463713 - RNA, 17 nt, Human
uugugcagcuuuugguc

SEQ ID NO: 3463714 - RNA, 17 nt, Human
uugugcaguaacuuggg

SEQ ID NO: 3463715 - RNA, 17 nt, Human
uugugcauuaucuagau

SEQ ID NO: 3463716 - RNA, 22 nt, Human
uugugcauuaucuagauacugu

SEQ ID NO: 3463717 - RNA, 23 nt, Human
uugugcauuggauaacaccacca

SEQ ID NO: 3463718 - RNA, 18 nt, Human
uugugccaaacaaaauga

SEQ ID NO: 3463719 - RNA, 13 nt, Human
uugugccagagga

SEQ ID NO: 3463720 - RNA, 12 nt, Human
uugugccaucug

SEQ ID NO: 3463721 - RNA, 13 nt, Human
uugugccaucugu

SEQ ID NO: 3463722 - RNA, 18 nt, Human
uugugccuaauguguuug

SEQ ID NO: 3463723 - RNA, 17 nt, Human
uugugccuuaaagacaa

SEQ ID NO: 3463724 - RNA, 13 nt, Human
uugugcuauaaag

SEQ ID NO: 3463725 - RNA, 14 nt, Human
uugugcugccauuu

SEQ ID NO: 3463726 - RNA, 18 nt, Human
uuccccaaccacuucauu

SEQ ID NO: 3463727 - RNA, 18 nt, Human
uuccccaacgaaaagcac

SEQ ID NO: 3463728 - RNA, 23 nt, Human
uuccccacccaccaacccucagg

SEQ ID NO: 3463729 - RNA, 21 nt, Human
uuccccacugacagccuccca

SEQ ID NO: 3463730 - RNA, 23 nt, Human
uuccccacugacagccucccacc

SEQ ID NO: 3463731 - RNA, 14 nt, Human
uuccccacugccug

SEQ ID NO: 3463732 - RNA, 18 nt, Human
uuccccacugccugccca

SEQ ID NO: 3463733 - RNA, 11 nt, Human
uuccccagaga

SEQ ID NO: 3463734 - RNA, 13 nt, Human
uuccccagcccag

SEQ ID NO: 3463735 - RNA, 15 nt, Human
uuccccagcccaggg

SEQ ID NO: 3463736 - RNA, 14 nt, Human
uuccccagccccac

SEQ ID NO: 3463737 - RNA, 15 nt, Human
uuccccagccccacu

SEQ ID NO: 3463738 - RNA, 20 nt, Human
uuccccaggaggccagccuu

SEQ ID NO: 3463739 - RNA, 18 nt, Human
uuccccauacaaauaagc

SEQ ID NO: 3463740 - RNA, 19 nt, Human
uuccccauggcccugagcg

SEQ ID NO: 3463741 - RNA, 12 nt, Human
uuccccauggga

SEQ ID NO: 3463742 - RNA, 23 nt, Human
uuccccaugggaagacgaggccc

SEQ ID NO: 3463743 - RNA, 23 nt, Human
uuccccaugguuuuaaucuguau

SEQ ID NO: 3463744 - RNA, 18 nt, Human
uuccccauuccuacccac

SEQ ID NO: 3463745 - RNA, 17 nt, Human
uucccccaaccucagac

SEQ ID NO: 3463746 - RNA, 21 nt, Human
uucccccaccccauuucucuc

SEQ ID NO: 3463747 - RNA, 20 nt, Human
uucccccagcccuguggaag

SEQ ID NO: 3463748 - RNA, 12 nt, Human
uuccccccacuc

SEQ ID NO: 3463749 - RNA, 20 nt, Human
uucccccuggccaccacccc

SEQ ID NO: 3463750 - RNA, 17 nt, Human
uucccccuucacaaagc

SEQ ID NO: 3463751 - RNA, 16 nt, Human
uucccccuuucuuccu

SEQ ID NO: 3463752 - RNA, 18 nt, Human
uugugggccugggcuccu

SEQ ID NO: 3463753 - RNA, 20 nt, Human
uugugggccugggcuccugg

SEQ ID NO: 3463754 - RNA, 23 nt, Human
uugugggccugggcuccuggacc

SEQ ID NO: 3463755 - RNA, 17 nt, Human
uuguggggaugaugaaa

SEQ ID NO: 3463756 - RNA, 14 nt, Human
uuguggggccuggg

SEQ ID NO: 3463757 - RNA, 17 nt, Human
uuguggggccugggagg

SEQ ID NO: 3463758 - RNA, 22 nt, Human
uuguggugugaguaucagaauu

SEQ ID NO: 3463759 - RNA, 13 nt, Human
uugugguuaaucu

SEQ ID NO: 3463760 - RNA, 15 nt, Human
uugugguuuuaugga

SEQ ID NO: 3463761 - RNA, 12 nt, Human
uuguguaaaaaa

SEQ ID NO: 3463762 - RNA, 22 nt, Human
uuguguaauaaaguguuuucag

SEQ ID NO: 3463763 - RNA, 18 nt, Human
uuguguaauauuacuuua

SEQ ID NO: 3463764 - RNA, 18 nt, Human
uuguguacucuggccucu

SEQ ID NO: 3463765 - RNA, 15 nt, Human
uuguguauauuugua

SEQ ID NO: 3463766 - RNA, 20 nt, Human
uuguguaucguaaccagcca

SEQ ID NO: 3463767 - RNA, 14 nt, Human
uuguguauuuaaca

SEQ ID NO: 3463768 - RNA, 19 nt, Human
uugugucauguuuaagaaa

SEQ ID NO: 3463769 - RNA, 22 nt, Human
uugugucccauucccccagugc

SEQ ID NO: 3463770 - RNA, 13 nt, Human
uugugucuguaca

SEQ ID NO: 3463771 - RNA, 18 nt, Human
uugugucuuuugcaugau

SEQ ID NO: 3463772 - RNA, 14 nt, Human
uugugugaaauugc

SEQ ID NO: 3463773 - RNA, 15 nt, Human
uugugugaaauugca

SEQ ID NO: 3463774 - RNA, 13 nt, Human
uugugugaacuug

SEQ ID NO: 3463775 - RNA, 19 nt, Human
uugugugauauuucagaaa

SEQ ID NO: 3463776 - RNA, 23 nt, Human
uugugugccucuagcugaauuga

SEQ ID NO: 3463777 - RNA, 14 nt, Human
uugugugcucucca

SEQ ID NO: 3463778 - RNA, 16 nt, Human
uuguguggauucuuua

SEQ ID NO: 3463779 - RNA, 13 nt, Human
uuguguguacuca

SEQ ID NO: 3463780 - RNA, 13 nt, Human
uuguguguaugca

SEQ ID NO: 3463781 - RNA, 14 nt, Human
uuguguguaugcac

SEQ ID NO: 3463782 - RNA, 13 nt, Human
uugugugugggag

SEQ ID NO: 3463783 - RNA, 15 nt, Human
uuguguguuauuuaa

SEQ ID NO: 3463784 - RNA, 21 nt, Human
uuguguguuauuuaaaugagu

SEQ ID NO: 3463785 - RNA, 13 nt, Human
uuguguguuucac

SEQ ID NO: 3463786 - RNA, 20 nt, Human
uuguguuaaguauguguaaa

SEQ ID NO: 3463787 - RNA, 20 nt, Human
uuguguuccuacagacacuu

SEQ ID NO: 3463788 - RNA, 20 nt, Human
uuguguucuguuuguuaaaa

SEQ ID NO: 3463789 - RNA, 22 nt, Human
uuguguucuguuuguuaaaacu

SEQ ID NO: 3463790 - RNA, 19 nt, Human
uuguguucuucuucauauu

SEQ ID NO: 3463791 - RNA, 18 nt, Human
uuguguugaagagcagcu

SEQ ID NO: 3463792 - RNA, 13 nt, Human
uuguguugacauu

SEQ ID NO: 3463793 - RNA, 16 nt, Human
uuguguugacauuaag

SEQ ID NO: 3463794 - RNA, 22 nt, Human
uuguguugacuuuauaaauuuc

SEQ ID NO: 3463795 - RNA, 13 nt, Human
uuguguuguaauu

SEQ ID NO: 3463796 - RNA, 11 nt, Human
uuguguuguca

SEQ ID NO: 3463797 - RNA, 12 nt, Human
uuguguuuacau

SEQ ID NO: 3463798 - RNA, 13 nt, Human
uuguguuuacauu

SEQ ID NO: 3463799 - RNA, 22 nt, Human
uuguguuuacauuuuauggugc

SEQ ID NO: 3463800 - RNA, 21 nt, Human
uuguguuuauauauaagccaa

SEQ ID NO: 3463801 - RNA, 18 nt, Human
uuguguuuauucuugaug

SEQ ID NO: 3463802 - RNA, 16 nt, Human
uuguguuugguuuaca

SEQ ID NO: 3463803 - RNA, 17 nt, Human
uuguguuuguguauuua

SEQ ID NO: 3463804 - RNA, 18 nt, Human
uuguguuuugcaagccag

SEQ ID NO: 3463805 - RNA, 17 nt, Human
uuguguuuuuaauuuau

SEQ ID NO: 3463806 - RNA, 18 nt, Human
uuguguuuuuaauuuauu

SEQ ID NO: 3463807 - RNA, 15 nt, Human
uuguguuuuuuaaga

SEQ ID NO: 3463808 - RNA, 17 nt, Human
uuguguuuuuuaagaua

SEQ ID NO: 3463809 - RNA, 15 nt, Human
uuguuaaaaauguca

SEQ ID NO: 3463810 - RNA, 16 nt, Human
uuguuaaaauuaugaa

SEQ ID NO: 3463811 - RNA, 17 nt, Human
uuguuaagauaugaugu

SEQ ID NO: 3463812 - RNA, 21 nt, Human
uuguuaauaaaaguacauguu

SEQ ID NO: 3463813 - RNA, 17 nt, Human
uuguuaauauucauuuu

SEQ ID NO: 3463814 - RNA, 14 nt, Human
uuguuaauauucuu

SEQ ID NO: 3463815 - RNA, 15 nt, Human
uuguuaauauucuuu

SEQ ID NO: 3463816 - RNA, 17 nt, Human
uuguuaaugaaaauguc

SEQ ID NO: 3463817 - RNA, 19 nt, Human
uuguuaaugguuugaauau

SEQ ID NO: 3463818 - RNA, 19 nt, Human
uuguuaauuuagaaaacuu

SEQ ID NO: 3463819 - RNA, 15 nt, Human
uuguuacaggaaguc

SEQ ID NO: 3463820 - RNA, 14 nt, Human
uuguuacauuuuua

SEQ ID NO: 3463821 - RNA, 12 nt, Human
uuguuacccaug

SEQ ID NO: 3463822 - RNA, 12 nt, Human
uuguuaccuuua

SEQ ID NO: 3463823 - RNA, 16 nt, Human
uuguuacguagccuaa

SEQ ID NO: 3463824 - RNA, 18 nt, Human
uuguuacuaacuaaacuc

SEQ ID NO: 3463825 - RNA, 17 nt, Human
uuguuacucugguucuu

SEQ ID NO: 3463826 - RNA, 12 nt, Human
uuguuacuguuc

SEQ ID NO: 3463827 - RNA, 14 nt, Human
uuguuacuguucuu

SEQ ID NO: 3463828 - RNA, 17 nt, Human
uuguuacuguucuugcu

SEQ ID NO: 3463829 - RNA, 18 nt, Human
uuguuacuguucuugcug

SEQ ID NO: 3463830 - RNA, 21 nt, Human
uuguuacuguucuugcugcua

SEQ ID NO: 3463831 - RNA, 16 nt, Human
uuguuacuucucuaau

SEQ ID NO: 3463832 - RNA, 20 nt, Human
uuguuacuucucuaauucuu

SEQ ID NO: 3463833 - RNA, 22 nt, Human
uuguuagcauuuucaaugugau

SEQ ID NO: 3463834 - RNA, 20 nt, Human
uuguuagcuuccuuaaguau

SEQ ID NO: 3463835 - RNA, 21 nt, Human
uuguuaguaugaggcauuugu

SEQ ID NO: 3463836 - RNA, 22 nt, Human
uuguuaguaugaggcauuuguu

SEQ ID NO: 3463837 - RNA, 12 nt, Human
uuguuaucaaaa

SEQ ID NO: 3463838 - RNA, 13 nt, Human
uuguuaucuguuu

SEQ ID NO: 3463839 - RNA, 18 nt, Human
uuguuaugaugugcuuaa

SEQ ID NO: 3463840 - RNA, 14 nt, Human
uuguuauggcuuaa

SEQ ID NO: 3463841 - RNA, 15 nt, Human
uuguuauuaaacaaa

SEQ ID NO: 3463842 - RNA, 14 nt, Human
uuguuauuauauaa

SEQ ID NO: 3463843 - RNA, 23 nt, Human
uuguuauugggcaagugauugaa

SEQ ID NO: 3463844 - RNA, 11 nt, Human
uuguuauugug

SEQ ID NO: 3463845 - RNA, 12 nt, Human
uuguuauuguga

SEQ ID NO: 3463846 - RNA, 13 nt, Human
uuguuauugugaa

SEQ ID NO: 3463847 - RNA, 19 nt, Human
uuguucaauaauaaauauu

SEQ ID NO: 3463848 - RNA, 22 nt, Human
uuguucaauaauaaauauuuuu

SEQ ID NO: 3463849 - RNA, 13 nt, Human
uuguucacacucu

SEQ ID NO: 3463850 - RNA, 15 nt, Human
uuguucagcaugcaa

SEQ ID NO: 3463851 - RNA, 23 nt, Human
uuguucaggaaaagguugaauaa

SEQ ID NO: 3463852 - RNA, 18 nt, Human
uuguucauacauauuuuu

SEQ ID NO: 3463853 - RNA, 15 nt, Human
uuguucauagcccag

SEQ ID NO: 3463854 - RNA, 17 nt, Human
uuguucauauuaagaau

SEQ ID NO: 3463855 - RNA, 19 nt, Human
uuguucauauuaagaauga

SEQ ID NO: 3463856 - RNA, 17 nt, Human
uuguucaucauccagau

SEQ ID NO: 3463857 - RNA, 17 nt, Human
uuguucauuuugagcug

SEQ ID NO: 3463858 - RNA, 17 nt, Human
uuguuccaagacauugu

SEQ ID NO: 3463859 - RNA, 12 nt, Human
uuguuccagcuc

SEQ ID NO: 3463860 - RNA, 16 nt, Human
uuguuccccacuggag

SEQ ID NO: 3463861 - RNA, 13 nt, Human
uuguuccccuccu

SEQ ID NO: 3463862 - RNA, 23 nt, Human
uuguuccccuccuccacucuccc

SEQ ID NO: 3463863 - RNA, 22 nt, Human
uuguucccugugucauuucaaa

SEQ ID NO: 3463864 - RNA, 17 nt, Human
uuguucgggugugcaau

SEQ ID NO: 3463865 - RNA, 15 nt, Human
uuguucuaguuuuca

SEQ ID NO: 3463866 - RNA, 16 nt, Human
uuguucuaguuuucag

SEQ ID NO: 3463867 - RNA, 13 nt, Human
uuguucucuggga

SEQ ID NO: 3463868 - RNA, 19 nt, Human
uuguucugcuguucucuag

SEQ ID NO: 3463869 - RNA, 20 nt, Human
uuguucuggcucuuccaggc

SEQ ID NO: 3463870 - RNA, 22 nt, Human
uuguucuggcucuuccaggcug

SEQ ID NO: 3463871 - RNA, 14 nt, Human
uuguucugucacca

SEQ ID NO: 3463872 - RNA, 21 nt, Human
uucucagaagcacagaauauu

SEQ ID NO: 3463873 - RNA, 19 nt, Human
uucucagaaggcaaaugac

SEQ ID NO: 3463874 - RNA, 23 nt, Human
uucucagaaucuacccaaaggau

SEQ ID NO: 3463875 - RNA, 13 nt, Human
uucucagaaucuc

SEQ ID NO: 3463876 - RNA, 19 nt, Human
uucucagagugguggggga

SEQ ID NO: 3463877 - RNA, 20 nt, Human
uucucagauuucugaggaaa

SEQ ID NO: 3463878 - RNA, 13 nt, Human
uucucagcagagu

SEQ ID NO: 3463879 - RNA, 12 nt, Human
uucucagcuccc

SEQ ID NO: 3463880 - RNA, 13 nt, Human
uucucagcucccc

SEQ ID NO: 3463881 - RNA, 14 nt, Human
uucucagcuccccc

SEQ ID NO: 3463882 - RNA, 15 nt, Human
uucucagcucccccu

SEQ ID NO: 3463883 - RNA, 16 nt, Human
uucucaggacacaggc

SEQ ID NO: 3463884 - RNA, 18 nt, Human
uucucagggcuccugccu

SEQ ID NO: 3463885 - RNA, 16 nt, Human
uucucagggucucugc

SEQ ID NO: 3463886 - RNA, 21 nt, Human
uucucagggucucugcugccg

SEQ ID NO: 3463887 - RNA, 22 nt, Human
uucucagucaguaauugccaaa

SEQ ID NO: 3463888 - RNA, 19 nt, Human
uucucagugccaacugugg

SEQ ID NO: 3463889 - RNA, 14 nt, Human
uucucaguuuuucu

SEQ ID NO: 3463890 - RNA, 15 nt, Human
uucucaguuuuucuu

SEQ ID NO: 3463891 - RNA, 16 nt, Human
uucucaguuuuucuua

SEQ ID NO: 3463892 - RNA, 16 nt, Human
uucucauaauuccuac

SEQ ID NO: 3463893 - RNA, 20 nt, Human
uucucauaauuccuacagca

SEQ ID NO: 3463894 - RNA, 23 nt, Human
uucucauaauuccuacagcacua

SEQ ID NO: 3463895 - RNA, 17 nt, Human
uucucauagcauuaacu

SEQ ID NO: 3463896 - RNA, 22 nt, Human
uucucauagcauuaacuaaucu

SEQ ID NO: 3463897 - RNA, 17 nt, Human
uucucauagccccggug

SEQ ID NO: 3463898 - RNA, 12 nt, Human
uucucauauuug

SEQ ID NO: 3463899 - RNA, 15 nt, Human
uucucaucacucccc

SEQ ID NO: 3463900 - RNA, 17 nt, Human
uucucaucugcacccuu

SEQ ID NO: 3463901 - RNA, 15 nt, Human
uucucaucuuucuug

SEQ ID NO: 3463902 - RNA, 22 nt, Human
uucucauguugaaacuuuaaga

SEQ ID NO: 3463903 - RNA, 15 nt, Human
uucucauuaaaagaa

SEQ ID NO: 3463904 - RNA, 23 nt, Human
uucucauugaauuauaaaagcca

SEQ ID NO: 3463905 - RNA, 16 nt, Human
uucucauuucaccccu

SEQ ID NO: 3463906 - RNA, 19 nt, Human
uucucauuuguuuuucuca

SEQ ID NO: 3463907 - RNA, 20 nt, Human
uucuccaaacugaagcagcc

SEQ ID NO: 3463908 - RNA, 16 nt, Human
uucuccaagagcuaca

SEQ ID NO: 3463909 - RNA, 21 nt, Human
uucuccaauaucagugcucga

SEQ ID NO: 3463910 - RNA, 14 nt, Human
uucuccaccccagc

SEQ ID NO: 3463911 - RNA, 21 nt, Human
uucuccaccuagacuguaaac

SEQ ID NO: 3463912 - RNA, 16 nt, Human
uucuccaccugccagg

SEQ ID NO: 3463913 - RNA, 14 nt, Human
uucuccacucaguu

SEQ ID NO: 3463914 - RNA, 17 nt, Human
uucuccacucaguugca

SEQ ID NO: 3463915 - RNA, 18 nt, Human
uucuccacugugcacacc

SEQ ID NO: 3463916 - RNA, 14 nt, Human
uucuccagccagca

SEQ ID NO: 3463917 - RNA, 19 nt, Human
uucuccagccucagccucc

SEQ ID NO: 3463918 - RNA, 11 nt, Human
uucuccaggcu

SEQ ID NO: 3463919 - RNA, 19 nt, Human
uucuccagucauuauguua

SEQ ID NO: 3463920 - RNA, 21 nt, Human
uucuccauccuuucugccucu

SEQ ID NO: 3463921 - RNA, 14 nt, Human
uucuccauuguaaa

SEQ ID NO: 3463922 - RNA, 16 nt, Human
uucucccacucuccua

SEQ ID NO: 3463923 - RNA, 17 nt, Human
uucucccacuuggccaa

SEQ ID NO: 3463924 - RNA, 13 nt, Human
uucucccaggaag

SEQ ID NO: 3463925 - RNA, 14 nt, Human
uucucccaggaagc

SEQ ID NO: 3463926 - RNA, 15 nt, Human
uucucccaggaagcu

SEQ ID NO: 3463927 - RNA, 23 nt, Human
uucucccaggccaggcuccuucc

SEQ ID NO: 3463928 - RNA, 18 nt, Human
uucuccccagcucccagg

SEQ ID NO: 3463929 - RNA, 20 nt, Human
uucucccccccggggcuggg

SEQ ID NO: 3463930 - RNA, 15 nt, Human
uucuccccugcacug

SEQ ID NO: 3463931 - RNA, 18 nt, Human
uucuccccugcacuguaa

SEQ ID NO: 3463932 - RNA, 21 nt, Human
uucuccccugcacuguaaaau

SEQ ID NO: 3463933 - RNA, 16 nt, Human
uucuccccugccccca

SEQ ID NO: 3463934 - RNA, 17 nt, Human
uucuccccugcccccag

SEQ ID NO: 3463935 - RNA, 18 nt, Human
uucuccccugcccccagg

SEQ ID NO: 3463936 - RNA, 21 nt, Human
uucucccguucacguugccua

SEQ ID NO: 3463937 - RNA, 13 nt, Human
uucucccucugga

SEQ ID NO: 3463938 - RNA, 18 nt, Human
uucucccugcacaagcca

SEQ ID NO: 3463939 - RNA, 21 nt, Human
uucucccuucgguggaagagc

SEQ ID NO: 3463940 - RNA, 23 nt, Human
uucuccgacugcuagggaguggu

SEQ ID NO: 3463941 - RNA, 16 nt, Human
uucuccgccagccucc

SEQ ID NO: 3463942 - RNA, 20 nt, Human
uucuccguuagcuccugugg

SEQ ID NO: 3463943 - RNA, 14 nt, Human
uucuccuauguuug

SEQ ID NO: 3463944 - RNA, 23 nt, Human
uucuccuccaugggagaaaauag

SEQ ID NO: 3463945 - RNA, 22 nt, Human
uucuccucuuguaaauaaagcc

SEQ ID NO: 3463946 - RNA, 21 nt, Human
uucuccugaggauguguccca

SEQ ID NO: 3463947 - RNA, 14 nt, Human
uucuccugccucag

SEQ ID NO: 3463948 - RNA, 21 nt, Human
uucuccugccugugcugugac

SEQ ID NO: 3463949 - RNA, 22 nt, Human
uucuccugccuuugccuccaga

SEQ ID NO: 3463950 - RNA, 16 nt, Human
uucuccugcugcuccc

SEQ ID NO: 3463951 - RNA, 20 nt, Human
uucuccugcugcucccucag

SEQ ID NO: 3463952 - RNA, 21 nt, Human
uucuccugcugcucccucaga

SEQ ID NO: 3463953 - RNA, 14 nt, Human
uucuccuggaugcu

SEQ ID NO: 3463954 - RNA, 12 nt, Human
uucuccugugcu

SEQ ID NO: 3463955 - RNA, 17 nt, Human
uucuccuugauaacagc

SEQ ID NO: 3463956 - RNA, 18 nt, Human
uucuccuugauaacagcu

SEQ ID NO: 3463957 - RNA, 23 nt, Human
uucuccuugauaacagcuaccau

SEQ ID NO: 3463958 - RNA, 17 nt, Human
uauccccaucucccugc

SEQ ID NO: 3463959 - RNA, 16 nt, Human
uauccccauuucuuuu

SEQ ID NO: 3463960 - RNA, 19 nt, Human
uauccccccccuguauagu

SEQ ID NO: 3463961 - RNA, 15 nt, Human
uauccccucccaguc

SEQ ID NO: 3463962 - RNA, 16 nt, Human
uauccccucccaguca

SEQ ID NO: 3463963 - RNA, 19 nt, Human
uaucccgagucugggacac

SEQ ID NO: 3463964 - RNA, 15 nt, Human
uaucccggcugcccu

SEQ ID NO: 3463965 - RNA, 19 nt, Human
uaucccuacuguaauuugu

SEQ ID NO: 3463966 - RNA, 19 nt, Human
uaucccuccuguugggaga

SEQ ID NO: 3463967 - RNA, 19 nt, Human
uauccuacaacaagaguuu

SEQ ID NO: 3463968 - RNA, 14 nt, Human
uauccuacuucccc

SEQ ID NO: 3463969 - RNA, 17 nt, Human
uauccuacuuccccuuc

SEQ ID NO: 3463970 - RNA, 20 nt, Human
uauccuagcacaugcuucaa

SEQ ID NO: 3463971 - RNA, 16 nt, Human
uauccuaucucuccaa

SEQ ID NO: 3463972 - RNA, 15 nt, Human
uauccuccagguuuu

SEQ ID NO: 3463973 - RNA, 12 nt, Human
uauccucuguaa

SEQ ID NO: 3463974 - RNA, 12 nt, Human
uauccugaauaa

SEQ ID NO: 3463975 - RNA, 11 nt, Human
uauccugccuc

SEQ ID NO: 3463976 - RNA, 15 nt, Human
uauccugccucagcc

SEQ ID NO: 3463977 - RNA, 21 nt, Human
uauccuggaacaauauuuuau

SEQ ID NO: 3463978 - RNA, 17 nt, Human
uauccuggcuuugccca

SEQ ID NO: 3463979 - RNA, 21 nt, Human
uauccuggcuuugcccaaccu

SEQ ID NO: 3463980 - RNA, 18 nt, Human
uauccugggcuuuuguuu

SEQ ID NO: 3463981 - RNA, 10 nt, Human
uauccugggg

SEQ ID NO: 3463982 - RNA, 22 nt, Human
uauccuggggcucccuucaucu

SEQ ID NO: 3463983 - RNA, 11 nt, Human
uauccuggugc

SEQ ID NO: 3463984 - RNA, 14 nt, Human
uauccugugacugu

SEQ ID NO: 3463985 - RNA, 13 nt, Human
uauccuucaucuu

SEQ ID NO: 3463986 - RNA, 16 nt, Human
uauccuuccucuccuu

SEQ ID NO: 3463987 - RNA, 15 nt, Human
uauccuuuucugugu

SEQ ID NO: 3463988 - RNA, 20 nt, Human
uaucgaaauaacaauguuaa

SEQ ID NO: 3463989 - RNA, 23 nt, Human
uaucgacuuguuuuugcacaugu

SEQ ID NO: 3463990 - RNA, 22 nt, Human
uaucgauguuuuauuauuucua

SEQ ID NO: 3463991 - RNA, 20 nt, Human
uaucgcaccacuguguauuu

SEQ ID NO: 3463992 - RNA, 19 nt, Human
uaucgcccuggcaggcagg

SEQ ID NO: 3463993 - RNA, 17 nt, Human
uaucgcugggaaaugag

SEQ ID NO: 3463994 - RNA, 13 nt, Human
uaucggcacugua

SEQ ID NO: 3463995 - RNA, 17 nt, Human
uaucggcucacaaagag

SEQ ID NO: 3463996 - RNA, 16 nt, Human
uaucgggggcuggggc

SEQ ID NO: 3463997 - RNA, 19 nt, Human
uaucgucacugcuuaacuu

SEQ ID NO: 3463998 - RNA, 18 nt, Human
uaucguuaucacugugca

SEQ ID NO: 3463999 - RNA, 23 nt, Human
uaucuaaacuggauucacagcuc

SEQ ID NO: 3464000 - RNA, 18 nt, Human
uaucuaaaguuauauuuc

SEQ ID NO: 3464001 - RNA, 12 nt, Human
uaucuaaaguuu

SEQ ID NO: 3464002 - RNA, 22 nt, Human
uaucuaaauauggacugcucag

SEQ ID NO: 3464003 - RNA, 14 nt, Human
uaucuaaauugaau

SEQ ID NO: 3464004 - RNA, 20 nt, Human
uaucuaaauugaauaauggu

SEQ ID NO: 3464005 - RNA, 19 nt, Human
uaucuaaccagugauucga

SEQ ID NO: 3464006 - RNA, 19 nt, Human
uaucuaaguuaauuuaaag

SEQ ID NO: 3464007 - RNA, 23 nt, Human
uaucuaaguuaauuuaaaguugu

SEQ ID NO: 3464008 - RNA, 20 nt, Human
uaucuaauaccucugugugc

SEQ ID NO: 3464009 - RNA, 21 nt, Human
uaucuaauauauaugaauaaa

SEQ ID NO: 3464010 - RNA, 15 nt, Human
uaucuaauucuuuaa

SEQ ID NO: 3464011 - RNA, 16 nt, Human
uaucuaauucuuuaau

SEQ ID NO: 3464012 - RNA, 16 nt, Human
uaucuaccaacuuuca

SEQ ID NO: 3464013 - RNA, 17 nt, Human
uaucuaccaacuuucaa

SEQ ID NO: 3464014 - RNA, 20 nt, Human
uaucuaccaacuuucaagaa

SEQ ID NO: 3464015 - RNA, 22 nt, Human
uaucuacuuccaaacuaauuuu

SEQ ID NO: 3464016 - RNA, 23 nt, Human
uuuauacagaugccauauagugu

SEQ ID NO: 3464017 - RNA, 12 nt, Human
uuuauacagcug

SEQ ID NO: 3464018 - RNA, 14 nt, Human
uuuauacagcugua

SEQ ID NO: 3464019 - RNA, 18 nt, Human
uuuauacagcuguauugu

SEQ ID NO: 3464020 - RNA, 22 nt, Human
uuuauacagcuguauugucuga

SEQ ID NO: 3464021 - RNA, 22 nt, Human
uuuauacaguagugagaagaau

SEQ ID NO: 3464022 - RNA, 16 nt, Human
uuuauacauuaguaaa

SEQ ID NO: 3464023 - RNA, 10 nt, Human
uuuauaccuc

SEQ ID NO: 3464024 - RNA, 17 nt, Human
uuuauaccuguuuaaau

SEQ ID NO: 3464025 - RNA, 15 nt, Human
uuuauacgagaacag

SEQ ID NO: 3464026 - RNA, 16 nt, Human
uuuauacguguagcua

SEQ ID NO: 3464027 - RNA, 20 nt, Human
uuuauacuuucccuacccuc

SEQ ID NO: 3464028 - RNA, 20 nt, Human
uuuauagcuauuacugucug

SEQ ID NO: 3464029 - RNA, 16 nt, Human
uuuauagcucaguuua

SEQ ID NO: 3464030 - RNA, 14 nt, Human
uuuauagcuuuauu

SEQ ID NO: 3464031 - RNA, 17 nt, Human
uuuauaguuuguacaug

SEQ ID NO: 3464032 - RNA, 17 nt, Human
uuuauauaaaguauucu

SEQ ID NO: 3464033 - RNA, 14 nt, Human
uuuauauaaaugua

SEQ ID NO: 3464034 - RNA, 12 nt, Human
uuuauauaauaa

SEQ ID NO: 3464035 - RNA, 20 nt, Human
uuuauauacaauaauggaaa

SEQ ID NO: 3464036 - RNA, 18 nt, Human
uuuauauagcaagacauu

SEQ ID NO: 3464037 - RNA, 16 nt, Human
uuuauauagcuugaaa

SEQ ID NO: 3464038 - RNA, 13 nt, Human
uuuauauauauau

SEQ ID NO: 3464039 - RNA, 16 nt, Human
uuuauauaugaaaacu

SEQ ID NO: 3464040 - RNA, 17 nt, Human
uuuauauaugaaaacua

SEQ ID NO: 3464041 - RNA, 15 nt, Human
uuuauauauggacau

SEQ ID NO: 3464042 - RNA, 18 nt, Human
uuuauauauuauauggaa

SEQ ID NO: 3464043 - RNA, 22 nt, Human
uuuauauauuuaacuacaauuu

SEQ ID NO: 3464044 - RNA, 17 nt, Human
uuuauaucccauuuuua

SEQ ID NO: 3464045 - RNA, 21 nt, Human
uuuauaucuuggcagguagga

SEQ ID NO: 3464046 - RNA, 21 nt, Human
uuuauaugcuucuguuuuaua

SEQ ID NO: 3464047 - RNA, 17 nt, Human
uuuauauguacaugaga

SEQ ID NO: 3464048 - RNA, 21 nt, Human
uuuauauguaccguaggcuuu

SEQ ID NO: 3464049 - RNA, 21 nt, Human
uuuauauguauguguuuagaa

SEQ ID NO: 3464050 - RNA, 21 nt, Human
uuuauauguguugaaaaccaa

SEQ ID NO: 3464051 - RNA, 18 nt, Human
uuuauauuacugacauuu

SEQ ID NO: 3464052 - RNA, 14 nt, Human
uuuauauuuaguua

SEQ ID NO: 3464053 - RNA, 16 nt, Human
uuuauauuuauccacu

SEQ ID NO: 3464054 - RNA, 18 nt, Human
uuuauauuucaaguacac

SEQ ID NO: 3464055 - RNA, 20 nt, Human
uuuauauuucaaguacacug

SEQ ID NO: 3464056 - RNA, 17 nt, Human
uuuauauuuccuuuaug

SEQ ID NO: 3464057 - RNA, 18 nt, Human
uuuauauuuccuuuaugu

SEQ ID NO: 3464058 - RNA, 19 nt, Human
uuuauauuuccuuuaugug

SEQ ID NO: 3464059 - RNA, 21 nt, Human
uuuauauuuccuuuaugugaa

SEQ ID NO: 3464060 - RNA, 14 nt, Human
uuuauauuuucaau

SEQ ID NO: 3464061 - RNA, 22 nt, Human
uuuauauuuucaauucaaaaau

SEQ ID NO: 3464062 - RNA, 21 nt, Human
uuuaucaaacccuagccuugc

SEQ ID NO: 3464063 - RNA, 14 nt, Human
uuuaucaaagcaua

SEQ ID NO: 3464064 - RNA, 22 nt, Human
uuuaucaaagcauagauguuuu

SEQ ID NO: 3464065 - RNA, 21 nt, Human
uuuaucaaagggugaaaauua

SEQ ID NO: 3464066 - RNA, 14 nt, Human
uuuaucaaaucagu

SEQ ID NO: 3464067 - RNA, 18 nt, Human
uuuaucaaucaguauaau

SEQ ID NO: 3464068 - RNA, 19 nt, Human
uuuaucaaugugucuuucu

SEQ ID NO: 3464069 - RNA, 15 nt, Human
uuuaucacacuucug

SEQ ID NO: 3464070 - RNA, 18 nt, Human
uuuaucacacuucuguga

SEQ ID NO: 3464071 - RNA, 14 nt, Human
uuuaucacauguau

SEQ ID NO: 3464072 - RNA, 19 nt, Human
uuuaucacuuuuugaacua

SEQ ID NO: 3464073 - RNA, 22 nt, Human
uuuaucacuuuuugaacuaaga

SEQ ID NO: 3464074 - RNA, 17 nt, Human
uuuaucagaacuauguu

SEQ ID NO: 3464075 - RNA, 18 nt, Human
uuuaucagaacuauguuu

SEQ ID NO: 3464076 - RNA, 14 nt, Human
uuuaucagaauucu

SEQ ID NO: 3464077 - RNA, 13 nt, Human
uuuaucagauaca

SEQ ID NO: 3464078 - RNA, 21 nt, Human
uuuaucagauacaucacugcu

SEQ ID NO: 3464079 - RNA, 14 nt, Human
uuuaucagcaaaaa

SEQ ID NO: 3464080 - RNA, 16 nt, Human
uuuaucagcaguuguu

SEQ ID NO: 3464081 - RNA, 14 nt, Human
uuuaucaugacaug

SEQ ID NO: 3464082 - RNA, 15 nt, Human
uuuaucaugacaugu

SEQ ID NO: 3464083 - RNA, 23 nt, Human
uuuaucaugcauguccuguaaag

SEQ ID NO: 3464084 - RNA, 18 nt, Human
uuuauccaaaauguguau

SEQ ID NO: 3464085 - RNA, 15 nt, Human
uuuauccaaucuugu

SEQ ID NO: 3464086 - RNA, 16 nt, Human
uuuauccaaucuuguu

SEQ ID NO: 3464087 - RNA, 18 nt, Human
uuuauccagaaaacugug

SEQ ID NO: 3464088 - RNA, 17 nt, Human
uuuaucccacggaaaau

SEQ ID NO: 3464089 - RNA, 18 nt, Human
uuuauccucuuuagaguu

SEQ ID NO: 3464090 - RNA, 19 nt, Human
uuuaucgcugggaaaugag

SEQ ID NO: 3464091 - RNA, 21 nt, Human
uuuaucuaccaacuuucaaga

SEQ ID NO: 3464092 - RNA, 14 nt, Human
uuuaucuauaauuu

SEQ ID NO: 3464093 - RNA, 19 nt, Human
uuuaucuauaauuuaccua

SEQ ID NO: 3464094 - RNA, 15 nt, Human
uuuaucuauauaaaa

SEQ ID NO: 3464095 - RNA, 14 nt, Human
uuuaucuauuguaa

SEQ ID NO: 3464096 - RNA, 17 nt, Human
uuuaucuauuguaagau

SEQ ID NO: 3464097 - RNA, 16 nt, Human
uuuaucucagauguua

SEQ ID NO: 3464098 - RNA, 14 nt, Human
uuuaucucuauuua

SEQ ID NO: 3464099 - RNA, 17 nt, Human
uuuaucucuauuuaaua

SEQ ID NO: 3464100 - RNA, 13 nt, Human
uuuaucugauuaa

SEQ ID NO: 3464101 - RNA, 19 nt, Human
uuuaucuguaguaaacuau

SEQ ID NO: 3464102 - RNA, 14 nt, Human
uuuaucuguuuccu

SEQ ID NO: 3464103 - RNA, 17 nt, Human
uuuaucuugaaggaaaa

SEQ ID NO: 3464104 - RNA, 21 nt, Human
uuuaucuugaaggaaaaauuc

SEQ ID NO: 3464105 - RNA, 15 nt, Human
uuuaucuugggacug

SEQ ID NO: 3464106 - RNA, 12 nt, Human
uuuaucuuuaua

SEQ ID NO: 3464107 - RNA, 16 nt, Human
uuuaucuuugauaaca

SEQ ID NO: 3464108 - RNA, 19 nt, Human
uuuaucuuugauucuccuu

SEQ ID NO: 3464109 - RNA, 15 nt, Human
uuuaucuuuucuaca

SEQ ID NO: 3464110 - RNA, 21 nt, Human
uuuaucuuuucuacagcaaau

SEQ ID NO: 3464111 - RNA, 19 nt, Human
uuuaugaaaaagaagaauc

SEQ ID NO: 3464112 - RNA, 19 nt, Human
uuuaugaaaauaaauagcu

SEQ ID NO: 3464113 - RNA, 18 nt, Human
uuuaugaaagguuuacau

SEQ ID NO: 3464114 - RNA, 22 nt, Human
uuuaugaaaugguuaagaauuu

SEQ ID NO: 3464115 - RNA, 18 nt, Human
uuuaugaagaaaaaauac

SEQ ID NO: 3464116 - RNA, 18 nt, Human
uuuaugaagaaaauacuu

SEQ ID NO: 3464117 - RNA, 23 nt, Human
uuuaugaaguuuaaaacaguauu

SEQ ID NO: 3464118 - RNA, 14 nt, Human
uuuaugaaugggug

SEQ ID NO: 3464119 - RNA, 15 nt, Human
uuuaugacaguaauu

SEQ ID NO: 3464120 - RNA, 20 nt, Human
uuuaugacuucauuaauaau

SEQ ID NO: 3464121 - RNA, 22 nt, Human
uuuaugagaaacuggcaaagca

SEQ ID NO: 3464122 - RNA, 14 nt, Human
uuuaugagaaacuu

SEQ ID NO: 3464123 - RNA, 14 nt, Human
uaucuucacauagu

SEQ ID NO: 3464124 - RNA, 13 nt, Human
uaucuuccaaaug

SEQ ID NO: 3464125 - RNA, 17 nt, Human
uaucuuccauauuugga

SEQ ID NO: 3464126 - RNA, 15 nt, Human
uaucuucguucuugu

SEQ ID NO: 3464127 - RNA, 20 nt, Human
uaucuucucaaguucuaaga

SEQ ID NO: 3464128 - RNA, 14 nt, Human
uaucuucugauuug

SEQ ID NO: 3464129 - RNA, 21 nt, Human
uaucuucuggacuauagcugu

SEQ ID NO: 3464130 - RNA, 22 nt, Human
uaucuugaggugguaguaaaac

SEQ ID NO: 3464131 - RNA, 19 nt, Human
uaucuugauacauucaaau

SEQ ID NO: 3464132 - RNA, 22 nt, Human
uaucuugcaguaucggcacugu

SEQ ID NO: 3464133 - RNA, 17 nt, Human
uaucuugcucuguaauc

SEQ ID NO: 3464134 - RNA, 19 nt, Human
uaucuuggacaaaucacau

SEQ ID NO: 3464135 - RNA, 23 nt, Human
uaucuuggugaauuuuuuuuucc

SEQ ID NO: 3464136 - RNA, 21 nt, Human
uaucuugguguguuaagaguu

SEQ ID NO: 3464137 - RNA, 17 nt, Human
uaucuuguucaggaaaa

SEQ ID NO: 3464138 - RNA, 15 nt, Human
uaucuuuaagaaaaa

SEQ ID NO: 3464139 - RNA, 14 nt, Human
uaucuuuauuaauc

SEQ ID NO: 3464140 - RNA, 12 nt, Human
uaucuuucuaca

SEQ ID NO: 3464141 - RNA, 17 nt, Human
uaucuuuuauguuugaa

SEQ ID NO: 3464142 - RNA, 15 nt, Human
uaucuuuucuuuaga

SEQ ID NO: 3464143 - RNA, 13 nt, Human
uaucuuuugaccu

SEQ ID NO: 3464144 - RNA, 19 nt, Human
uaucuuuugaccuguggug

SEQ ID NO: 3464145 - RNA, 14 nt, Human
uaucuuuugagaac

SEQ ID NO: 3464146 - RNA, 15 nt, Human
uaucuuuuuauugau

SEQ ID NO: 3464147 - RNA, 22 nt, Human
uaucuuuuugcuuacaguuuua

SEQ ID NO: 3464148 - RNA, 14 nt, Human
uaugaaaaagaaga

SEQ ID NO: 3464149 - RNA, 14 nt, Human
uaugaaaaauauga

SEQ ID NO: 3464150 - RNA, 21 nt, Human
uaugaaaacauggaacagugu

SEQ ID NO: 3464151 - RNA, 17 nt, Human
uaugaaacuuaggaagg

SEQ ID NO: 3464152 - RNA, 14 nt, Human
uaugaaagaauaua

SEQ ID NO: 3464153 - RNA, 19 nt, Human
uaugaaagaauauauuuau

SEQ ID NO: 3464154 - RNA, 14 nt, Human
uaugaaauaaagaa

SEQ ID NO: 3464155 - RNA, 19 nt, Human
uaugaaauaaagaaauugc

SEQ ID NO: 3464156 - RNA, 15 nt, Human
uaugaaauauaugug

SEQ ID NO: 3464157 - RNA, 16 nt, Human
uaugaaauauauguga

SEQ ID NO: 3464158 - RNA, 20 nt, Human
uaugaaauauguauaacuuu

SEQ ID NO: 3464159 - RNA, 22 nt, Human
uaugaaauuuaauauagcuauu

SEQ ID NO: 3464160 - RNA, 21 nt, Human
uaugaacauagacuagagaaa

SEQ ID NO: 3464161 - RNA, 21 nt, Human
uauuauacaugugauacauuu

SEQ ID NO: 3464162 - RNA, 13 nt, Human
uauuauaccuuuu

SEQ ID NO: 3464163 - RNA, 18 nt, Human
uauuauacuuguaauuau

SEQ ID NO: 3464164 - RNA, 16 nt, Human
uauuauagagcagaaa

SEQ ID NO: 3464165 - RNA, 20 nt, Human
uauuauagagcagaaauucu

SEQ ID NO: 3464166 - RNA, 20 nt, Human
uauuauagguaaucaaugaa

SEQ ID NO: 3464167 - RNA, 13 nt, Human
uauuauauauaua

SEQ ID NO: 3464168 - RNA, 13 nt, Human
uauuauauggaaa

SEQ ID NO: 3464169 - RNA, 21 nt, Human
uauuauauguacccucugaaa

SEQ ID NO: 3464170 - RNA, 15 nt, Human
uauuauauuuggaug

SEQ ID NO: 3464171 - RNA, 16 nt, Human
uauuaucaugcaaaug

SEQ ID NO: 3464172 - RNA, 13 nt, Human
uauuauccauuca

SEQ ID NO: 3464173 - RNA, 15 nt, Human
uauuaucccagcugc

SEQ ID NO: 3464174 - RNA, 16 nt, Human
uauuauccccauuucu

SEQ ID NO: 3464175 - RNA, 14 nt, Human
uauuaucugggcuu

SEQ ID NO: 3464176 - RNA, 14 nt, Human
uauuaucugucagc

SEQ ID NO: 3464177 - RNA, 20 nt, Human
uauuaugaaacuuguguaaa

SEQ ID NO: 3464178 - RNA, 15 nt, Human
uauuaugagaugcug

SEQ ID NO: 3464179 - RNA, 14 nt, Human
uuucccuccuuggu

SEQ ID NO: 3464180 - RNA, 12 nt, Human
uuucccucuuuu

SEQ ID NO: 3464181 - RNA, 22 nt, Human
uuucccucuuuucuuacuccuc

SEQ ID NO: 3464182 - RNA, 13 nt, Human
uuucccugugcug

SEQ ID NO: 3464183 - RNA, 12 nt, Human
uuucccuuccuc

SEQ ID NO: 3464184 - RNA, 15 nt, Human
uuucccuucuucugu

SEQ ID NO: 3464185 - RNA, 19 nt, Human
uuucccuugcuuuucccuc

SEQ ID NO: 3464186 - RNA, 17 nt, Human
uuucccuuguagcuccu

SEQ ID NO: 3464187 - RNA, 18 nt, Human
uuucccuuguagcuccuc

SEQ ID NO: 3464188 - RNA, 16 nt, Human
uuuccguggcacugca

SEQ ID NO: 3464189 - RNA, 17 nt, Human
uuuccguuaaaauacca

SEQ ID NO: 3464190 - RNA, 14 nt, Human
uuuccuaaaaguuc

SEQ ID NO: 3464191 - RNA, 18 nt, Human
uuuccuaacaggauuaga

SEQ ID NO: 3464192 - RNA, 22 nt, Human
uuuccuaacaggauuagacagu

SEQ ID NO: 3464193 - RNA, 15 nt, Human
uuuccuaaggcugca

SEQ ID NO: 3464194 - RNA, 15 nt, Human
uuuccuaauaucaaa

SEQ ID NO: 3464195 - RNA, 13 nt, Human
uuuccuaauuuau

SEQ ID NO: 3464196 - RNA, 21 nt, Human
uuuccuacaggcagucucucu

SEQ ID NO: 3464197 - RNA, 24 nt, Human
uuuccuacucucaggaucaagaaa

SEQ ID NO: 3464198 - RNA, 15 nt, Human
uuuccuacuuuuccu

SEQ ID NO: 3464199 - RNA, 15 nt, Human
uuuccuagccuguuu

SEQ ID NO: 3464200 - RNA, 16 nt, Human
uuuccuauaccauuuc

SEQ ID NO: 3464201 - RNA, 16 nt, Human
uuuccuauaugaugau

SEQ ID NO: 3464202 - RNA, 15 nt, Human
uuuccuaugggaaca

SEQ ID NO: 3464203 - RNA, 17 nt, Human
uuuccuaugggaacaau

SEQ ID NO: 3464204 - RNA, 22 nt, Human
uuuccucaaaacuucagacaua

SEQ ID NO: 3464205 - RNA, 18 nt, Human
uuuccucauuuuuauaau

SEQ ID NO: 3464206 - RNA, 12 nt, Human
uuuccuccccag

SEQ ID NO: 3464207 - RNA, 16 nt, Human
uuuccuccccagcagg

SEQ ID NO: 3464208 - RNA, 20 nt, Human
uuuccucccucugccccucc

SEQ ID NO: 3464209 - RNA, 11 nt, Human
uuuccucccuu

SEQ ID NO: 3464210 - RNA, 20 nt, Human
uuuccucccuucugcuacug

SEQ ID NO: 3464211 - RNA, 16 nt, Human
uuuccuccuuuaucac

SEQ ID NO: 3464212 - RNA, 18 nt, Human
uuuccucuauacaucucu

SEQ ID NO: 3464213 - RNA, 19 nt, Human
uuuccucuauugauguaca

SEQ ID NO: 3464214 - RNA, 22 nt, Human
uuuccucucuuuguucucagcu

SEQ ID NO: 3464215 - RNA, 22 nt, Human
uuuccucuuagucgagccaagu

SEQ ID NO: 3464216 - RNA, 21 nt, Human
uuuccucuucuauuuuguaaa

SEQ ID NO: 3464217 - RNA, 22 nt, Human
uuuccucuucuauuuuguaaac

SEQ ID NO: 3464218 - RNA, 12 nt, Human
uuuccucuugug

SEQ ID NO: 3464219 - RNA, 20 nt, Human
uuuccugauagcauaugaca

SEQ ID NO: 3464220 - RNA, 16 nt, Human
uuuccugccuucuucu

SEQ ID NO: 3464221 - RNA, 22 nt, Human
uuuccugccuuuuaguuccugu

SEQ ID NO: 3464222 - RNA, 22 nt, Human
uuuccuggguggcuacucugug

SEQ ID NO: 3464223 - RNA, 14 nt, Human
uuuccuggugccaa

SEQ ID NO: 3464224 - RNA, 19 nt, Human
uuuccuguagccuucugua

SEQ ID NO: 3464225 - RNA, 22 nt, Human
uuuccuguggcauaaauugcau

SEQ ID NO: 3464226 - RNA, 22 nt, Human
uuuccugugucagcgccuggcc

SEQ ID NO: 3464227 - RNA, 15 nt, Human
uuuccuguucagcau

SEQ ID NO: 3464228 - RNA, 18 nt, Human
uuuccuguucagcauucu

SEQ ID NO: 3464229 - RNA, 17 nt, Human
uuuccuguuucugaaaa

SEQ ID NO: 3464230 - RNA, 21 nt, Human
uuuccuguuuuuguuaacuuu

SEQ ID NO: 3464231 - RNA, 19 nt, Human
uuuccuuaaauuaucuaaa

SEQ ID NO: 3464232 - RNA, 23 nt, Human
uuuccuuaaauuaucuaaaaucu

SEQ ID NO: 3464233 - RNA, 13 nt, Human
uuuccuuaccuuu

SEQ ID NO: 3464234 - RNA, 18 nt, Human
uuuccuucaaaguuuaau

SEQ ID NO: 3464235 - RNA, 13 nt, Human
uuuccuucagugc

SEQ ID NO: 3464236 - RNA, 15 nt, Human
uuuccuucagugccu

SEQ ID NO: 3464237 - RNA, 15 nt, Human
uuuccuuccagccca

SEQ ID NO: 3464238 - RNA, 14 nt, Human
uuuccuuccauccc

SEQ ID NO: 3464239 - RNA, 15 nt, Human
uuuccuuccaucccu

SEQ ID NO: 3464240 - RNA, 14 nt, Human
uuuccuucccuuuu

SEQ ID NO: 3464241 - RNA, 18 nt, Human
uuuccuucccuuuucugu

SEQ ID NO: 3464242 - RNA, 12 nt, Human
uuuccuuccuaa

SEQ ID NO: 3464243 - RNA, 18 nt, Human
uuuccuucucaucuguga

SEQ ID NO: 3464244 - RNA, 13 nt, Human
uuuccuugaagcc

SEQ ID NO: 3464245 - RNA, 19 nt, Human
uuuccuugcauacaaacaa

SEQ ID NO: 3464246 - RNA, 12 nt, Human
uuuccuugcuca

SEQ ID NO: 3464247 - RNA, 18 nt, Human
uuuccuuguggcagagga

SEQ ID NO: 3464248 - RNA, 21 nt, Human
uuuccuuguggcagaggaugu

SEQ ID NO: 3464249 - RNA, 19 nt, Human
uuuccuuguuuaucagaua

SEQ ID NO: 3464250 - RNA, 17 nt, Human
uuuccuuuaauaugaaa

SEQ ID NO: 3464251 - RNA, 13 nt, Human
uuuccuuuaugug

SEQ ID NO: 3464252 - RNA, 14 nt, Human
uuuccuuuauguga

SEQ ID NO: 3464253 - RNA, 19 nt, Human
uuuccuuucauuuacugug

SEQ ID NO: 3464254 - RNA, 16 nt, Human
uuuccuuugucaucau

SEQ ID NO: 3464255 - RNA, 14 nt, Human
uuuccuuuguccuu

SEQ ID NO: 3464256 - RNA, 21 nt, Human
uuuccuuuuuaaggucuuuca

SEQ ID NO: 3464257 - RNA, 13 nt, Human
uuuccuuuuuaau

SEQ ID NO: 3464258 - RNA, 22 nt, Human
uuuccuuuuuaauaugcuuaaa

SEQ ID NO: 3464259 - RNA, 21 nt, Human
uuuccuuuuuuaaaaaugcaa

SEQ ID NO: 3464260 - RNA, 22 nt, Human
uuuccuuuuuuauacacauaau

SEQ ID NO: 3464261 - RNA, 16 nt, Human
uuuccuuuuuuguuau

SEQ ID NO: 3464262 - RNA, 14 nt, Human
uuucgaaaaucaaa

SEQ ID NO: 3464263 - RNA, 16 nt, Human
uuucgaagucauuaaa

SEQ ID NO: 3464264 - RNA, 19 nt, Human
uuucgacuugcauuuuugc

SEQ ID NO: 3464265 - RNA, 15 nt, Human
uuucgagaagcugcu

SEQ ID NO: 3464266 - RNA, 20 nt, Human
uuucgauaaacaacaaggug

SEQ ID NO: 3464267 - RNA, 19 nt, Human
uuucgccguugaagaggaa

SEQ ID NO: 3464268 - RNA, 18 nt, Human
uuucggacaguuuauuug

SEQ ID NO: 3464269 - RNA, 16 nt, Human
uuucguaacacagcau

SEQ ID NO: 3464270 - RNA, 13 nt, Human
uuucguaugaaaa

SEQ ID NO: 3464271 - RNA, 15 nt, Human
uuucgugagccccau

SEQ ID NO: 3464272 - RNA, 18 nt, Human
uuucgugagccccaucuu

SEQ ID NO: 3464273 - RNA, 13 nt, Human
uuucguggcuuca

SEQ ID NO: 3464274 - RNA, 12 nt, Human
uuucguuuguuu

SEQ ID NO: 3464275 - RNA, 15 nt, Human
uuucuaaaaagauua

SEQ ID NO: 3464276 - RNA, 15 nt, Human
uuucuaaaaagucag

SEQ ID NO: 3464277 - RNA, 17 nt, Human
uuucuaaaaagucagau

SEQ ID NO: 3464278 - RNA, 19 nt, Human
uuucuaaaacuaaauagca

SEQ ID NO: 3464279 - RNA, 15 nt, Human
uuucuaaaagaauau

SEQ ID NO: 3464280 - RNA, 13 nt, Human
uuucuaaaagacu

SEQ ID NO: 3464281 - RNA, 13 nt, Human
uuucuaaacaaga

SEQ ID NO: 3464282 - RNA, 17 nt, Human
uuucuaaacaagauuuu

SEQ ID NO: 3464283 - RNA, 15 nt, Human
uuucuaaacuggaga

SEQ ID NO: 3464284 - RNA, 12 nt, Human
uuucuaaagacu

SEQ ID NO: 3464285 - RNA, 12 nt, Human
uuucuaaaguaa

SEQ ID NO: 3464286 - RNA, 14 nt, Human
uuucuaaaguacug

SEQ ID NO: 3464287 - RNA, 13 nt, Human
uuucuaaauguuu

SEQ ID NO: 3464288 - RNA, 21 nt, Human
uuucuaacaaaaaaauauauu

SEQ ID NO: 3464289 - RNA, 22 nt, Human
uuucuaacacuagucugugugc

SEQ ID NO: 3464290 - RNA, 15 nt, Human
uuucuaaccuugaau

SEQ ID NO: 3464291 - RNA, 23 nt, Human
uuucuaaccuugaaugcugccag

SEQ ID NO: 3464292 - RNA, 13 nt, Human
uuucuaagauucu

SEQ ID NO: 3464293 - RNA, 18 nt, Human
uuucuaagauucuaaagg

SEQ ID NO: 3464294 - RNA, 20 nt, Human
uuucuaagcauaaaagauga

SEQ ID NO: 3464295 - RNA, 19 nt, Human
uuucuaauuggcuuuacua

SEQ ID NO: 3464296 - RNA, 14 nt, Human
uuucuaauuugcug

SEQ ID NO: 3464297 - RNA, 17 nt, Human
uuucuaauuugcugcug

SEQ ID NO: 3464298 - RNA, 23 nt, Human
uuucuacaaagcacuagagaaug

SEQ ID NO: 3464299 - RNA, 18 nt, Human
uuucuacaaugugaacuu

SEQ ID NO: 3464300 - RNA, 15 nt, Human
uuucuacagcaaauu

SEQ ID NO: 3464301 - RNA, 17 nt, Human
uuucuaccuuaaaggga

SEQ ID NO: 3464302 - RNA, 16 nt, Human
uuucuaccuugagguc

SEQ ID NO: 3464303 - RNA, 19 nt, Human
uuucuacuuguuauaaacu

SEQ ID NO: 3464304 - RNA, 17 nt, Human
uuucuagaaagaauaaa

SEQ ID NO: 3464305 - RNA, 13 nt, Human
uuucuagaaagag

SEQ ID NO: 3464306 - RNA, 20 nt, Human
uuucuagaaguuucccuucc

SEQ ID NO: 3464307 - RNA, 12 nt, Human
uauucucuuugg

SEQ ID NO: 3464308 - RNA, 13 nt, Human
uauucucuuuuca

SEQ ID NO: 3464309 - RNA, 17 nt, Human
uauucugagaaaacaag

SEQ ID NO: 3464310 - RNA, 15 nt, Human
uauucugagaugacu

SEQ ID NO: 3464311 - RNA, 23 nt, Human
uauucugagcauacucaacaaaa

SEQ ID NO: 3464312 - RNA, 19 nt, Human
uauucugggaauguauagu

SEQ ID NO: 3464313 - RNA, 23 nt, Human
uauucugggaauguauaguauuu

SEQ ID NO: 3464314 - RNA, 19 nt, Human
uauucugggggcugcaguu

SEQ ID NO: 3464315 - RNA, 18 nt, Human
uauucugggguauggcgu

SEQ ID NO: 3464316 - RNA, 11 nt, Human
uauucuguccc

SEQ ID NO: 3464317 - RNA, 12 nt, Human
uauucugucccu

SEQ ID NO: 3464318 - RNA, 17 nt, Human
uauucuuaaaaugcaau

SEQ ID NO: 3464319 - RNA, 21 nt, Human
uauucuuaaaaugcaauauuu

SEQ ID NO: 3464320 - RNA, 14 nt, Human
uauucuuauucaaa

SEQ ID NO: 3464321 - RNA, 17 nt, Human
uauucuucuagaguuca

SEQ ID NO: 3464322 - RNA, 14 nt, Human
uauucuugaaagaa

SEQ ID NO: 3464323 - RNA, 19 nt, Human
uauucuugaucaguaguuu

SEQ ID NO: 3464324 - RNA, 18 nt, Human
uauucuuugauguuaaca

SEQ ID NO: 3464325 - RNA, 14 nt, Human
uauucuuugcacuu

SEQ ID NO: 3464326 - RNA, 13 nt, Human
uauucuuuucuca

SEQ ID NO: 3464327 - RNA, 15 nt, Human
uauugaaaaaaauug

SEQ ID NO: 3464328 - RNA, 19 nt, Human
uauugaaaauugaaaagua

SEQ ID NO: 3464329 - RNA, 21 nt, Human
uauugaaauauuauagagagu

SEQ ID NO: 3464330 - RNA, 16 nt, Human
uauugaaaugauuuca

SEQ ID NO: 3464331 - RNA, 18 nt, Human
uauugaacuuggaaagaa

SEQ ID NO: 3464332 - RNA, 19 nt, Human
uauugaacuuuuguacuga

SEQ ID NO: 3464333 - RNA, 21 nt, Human
uauugaagacaauuugauaca

SEQ ID NO: 3464334 - RNA, 20 nt, Human
uauugaagcagaguggcagu

SEQ ID NO: 3464335 - RNA, 12 nt, Human
uauugaagcauu

SEQ ID NO: 3464336 - RNA, 15 nt, Human
uauugaagcauuuua

SEQ ID NO: 3464337 - RNA, 20 nt, Human
uauugaaggaagccaaauuu

SEQ ID NO: 3464338 - RNA, 20 nt, Human
uauugaauacuuacauucuc

SEQ ID NO: 3464339 - RNA, 21 nt, Human
uauugaauauaauauauuugu

SEQ ID NO: 3464340 - RNA, 15 nt, Human
uauugaauauugugu

SEQ ID NO: 3464341 - RNA, 18 nt, Human
uauugaauauuuuauauu

SEQ ID NO: 3464342 - RNA, 18 nt, Human
uauugaaucauguaguau

SEQ ID NO: 3464343 - RNA, 11 nt, Human
uauugaaucua

SEQ ID NO: 3464344 - RNA, 18 nt, Human
uauugaauucauuucacu

SEQ ID NO: 3464345 - RNA, 13 nt, Human
uugagaccagccu

SEQ ID NO: 3464346 - RNA, 22 nt, Human
uugagaccgugaagauacuuug

SEQ ID NO: 3464347 - RNA, 18 nt, Human
uugagaccuacaggcuga

SEQ ID NO: 3464348 - RNA, 15 nt, Human
uugagaccucagcca

SEQ ID NO: 3464349 - RNA, 14 nt, Human
uugagacuaguuuu

SEQ ID NO: 3464350 - RNA, 16 nt, Human
uugagacuauuuaaac

SEQ ID NO: 3464351 - RNA, 23 nt, Human
uugagacuauuuaaacuuauaaa

SEQ ID NO: 3464352 - RNA, 23 nt, Human
uugagacuuuuugguggauguaa

SEQ ID NO: 3464353 - RNA, 18 nt, Human
uugagagagauguguaau

SEQ ID NO: 3464354 - RNA, 21 nt, Human
uugagagagauguguaauuuu

SEQ ID NO: 3464355 - RNA, 12 nt, Human
uugagagagcaa

SEQ ID NO: 3464356 - RNA, 19 nt, Human
uugagaggcccugggguuc

SEQ ID NO: 3464357 - RNA, 18 nt, Human
uugagauacuuuuucuuu

SEQ ID NO: 3464358 - RNA, 23 nt, Human
uugagauacuuuuucuuuuguaa

SEQ ID NO: 3464359 - RNA, 22 nt, Human
uugagauaguuuucauccauaa

SEQ ID NO: 3464360 - RNA, 22 nt, Human
uugagauggggauaaaaugacu

SEQ ID NO: 3464361 - RNA, 17 nt, Human
uugagauguauuucaac

SEQ ID NO: 3464362 - RNA, 20 nt, Human
uugagauugccccaggucug

SEQ ID NO: 3464363 - RNA, 18 nt, Human
uugagcaacuuucuuaca

SEQ ID NO: 3464364 - RNA, 22 nt, Human
uugagcacuuuucaaacaauca

SEQ ID NO: 3464365 - RNA, 22 nt, Human
uugagcaguggccuacaaauca

SEQ ID NO: 3464366 - RNA, 16 nt, Human
uugagcaucacagaau

SEQ ID NO: 3464367 - RNA, 13 nt, Human
uugagccagcaga

SEQ ID NO: 3464368 - RNA, 17 nt, Human
uugagccagcagacauu

SEQ ID NO: 3464369 - RNA, 18 nt, Human
uugagccagcagacauug

SEQ ID NO: 3464370 - RNA, 13 nt, Human
uugagcccaggag

SEQ ID NO: 3464371 - RNA, 14 nt, Human
uugagccccaaguc

SEQ ID NO: 3464372 - RNA, 14 nt, Human
uugagcccuggcug

SEQ ID NO: 3464373 - RNA, 19 nt, Human
uugagccgggccccugggc

SEQ ID NO: 3464374 - RNA, 14 nt, Human
uugagccuaaaaau

SEQ ID NO: 3464375 - RNA, 17 nt, Human
uugagccuaaaaauaaa

SEQ ID NO: 3464376 - RNA, 19 nt, Human
uugagccuugaacuuugac

SEQ ID NO: 3464377 - RNA, 20 nt, Human
uugagcuacuggauucuuau

SEQ ID NO: 3464378 - RNA, 11 nt, Human
uugagcuauga

SEQ ID NO: 3464379 - RNA, 16 nt, Human
uugagcuaugacuuaa

SEQ ID NO: 3464380 - RNA, 23 nt, Human
uugagcucagacccccacucuca

SEQ ID NO: 3464381 - RNA, 14 nt, Human
uugagcugaaaugc

SEQ ID NO: 3464382 - RNA, 16 nt, Human
uugagcugauauaaau

SEQ ID NO: 3464383 - RNA, 16 nt, Human
uugagcugccuucccu

SEQ ID NO: 3464384 - RNA, 18 nt, Human
uugagcugcuuuuuuuga

SEQ ID NO: 3464385 - RNA, 12 nt, Human
uugagcuggccu

SEQ ID NO: 3464386 - RNA, 18 nt, Human
uugagcuuggcagcugaa

SEQ ID NO: 3464387 - RNA, 21 nt, Human
uugagcuuuccauguugcugc

SEQ ID NO: 3464388 - RNA, 15 nt, Human
uugaggaaaaauaug

SEQ ID NO: 3464389 - RNA, 17 nt, Human
uugaggaaaaauaugug

SEQ ID NO: 3464390 - RNA, 21 nt, Human
uugaggaaaaauaugugaagg

SEQ ID NO: 3464391 - RNA, 13 nt, Human
uugaggaaaacaa

SEQ ID NO: 3464392 - RNA, 15 nt, Human
uugaggaaagcaaga

SEQ ID NO: 3464393 - RNA, 17 nt, Human
uugaggaaauuugcagc

SEQ ID NO: 3464394 - RNA, 13 nt, Human
uugaggacacaug

SEQ ID NO: 3464395 - RNA, 15 nt, Human
uugaggacacauguc

SEQ ID NO: 3464396 - RNA, 16 nt, Human
uugaggacacaugucc

SEQ ID NO: 3464397 - RNA, 16 nt, Human
uugaggagcacugaaa

SEQ ID NO: 3464398 - RNA, 19 nt, Human
uugaggagcagcuucaguu

SEQ ID NO: 3464399 - RNA, 23 nt, Human
uugaggagcauguuuuguauaca

SEQ ID NO: 3464400 - RNA, 12 nt, Human
uugaggagcccc

SEQ ID NO: 3464401 - RNA, 13 nt, Human
uugaggcaagugu

SEQ ID NO: 3464402 - RNA, 13 nt, Human
uugaggccaggag

SEQ ID NO: 3464403 - RNA, 14 nt, Human
uugaggcuuugugu

SEQ ID NO: 3464404 - RNA, 17 nt, Human
uugaggcuuuguguugu

SEQ ID NO: 3464405 - RNA, 20 nt, Human
uugagggacgcuuugucugu

SEQ ID NO: 3464406 - RNA, 21 nt, Human
uugagggacgcuuugucuguc

SEQ ID NO: 3464407 - RNA, 18 nt, Human
uugagggacugccucugc

SEQ ID NO: 3464408 - RNA, 15 nt, Human
uugagggcccagagc

SEQ ID NO: 3464409 - RNA, 16 nt, Human
uugagggcccagagca

SEQ ID NO: 3464410 - RNA, 15 nt, Human
uugagggcugcaguu

SEQ ID NO: 3464411 - RNA, 19 nt, Human
uugaggggagagggaacgg

SEQ ID NO: 3464412 - RNA, 15 nt, Human
uugaggggauuaaua

SEQ ID NO: 3464413 - RNA, 22 nt, Human
uugaggggauuaauaugaaaac

SEQ ID NO: 3464414 - RNA, 22 nt, Human
uugaggggcuggccuuccugcc

SEQ ID NO: 3464415 - RNA, 18 nt, Human
uugaggguaauaaacuua

SEQ ID NO: 3464416 - RNA, 13 nt, Human
uugaggguugggc

SEQ ID NO: 3464417 - RNA, 18 nt, Human
uugaggucuuuugacaug

SEQ ID NO: 3464418 - RNA, 19 nt, Human
uugagguggaagcccuccu

SEQ ID NO: 3464419 - RNA, 14 nt, Human
uugaguaaaauaaa

SEQ ID NO: 3464420 - RNA, 20 nt, Human
uugaguagauauuacuuuau

SEQ ID NO: 3464421 - RNA, 18 nt, Human
uugaguauauuauaauag

SEQ ID NO: 3464422 - RNA, 20 nt, Human
uugaguauuguuuaaaaugu

SEQ ID NO: 3464423 - RNA, 22 nt, Human
uugagucauuauccuugcuaug

SEQ ID NO: 3464424 - RNA, 17 nt, Human
uugagucuguacuaaac

SEQ ID NO: 3464425 - RNA, 14 nt, Human
uugagucugugcca

SEQ ID NO: 3464426 - RNA, 15 nt, Human
uugagucuguuuugu

SEQ ID NO: 3464427 - RNA, 22 nt, Human
uugagucuguuuuuuuauaguu

SEQ ID NO: 3464428 - RNA, 14 nt, Human
uugagugacucgag

SEQ ID NO: 3464429 - RNA, 20 nt, Human
uugagugacucgaggguugg

SEQ ID NO: 3464430 - RNA, 15 nt, Human
uugagugcucugauc

SEQ ID NO: 3464431 - RNA, 13 nt, Human
uugaguguuuaaa

SEQ ID NO: 3464432 - RNA, 18 nt, Human
uugaguucuuccuguaau

SEQ ID NO: 3464433 - RNA, 18 nt, Human
uugaguuguuuuuguaua

SEQ ID NO: 3464434 - RNA, 20 nt, Human
uugaguuuguagguaaaaug

SEQ ID NO: 3464435 - RNA, 23 nt, Human
uugaguuugucgcucaugugugc

SEQ ID NO: 3464436 - RNA, 18 nt, Human
uugaguuuucuucuguga

SEQ ID NO: 3464437 - RNA, 19 nt, Human
uugaguuuucuucugugau

SEQ ID NO: 3464438 - RNA, 21 nt, Human
uugaguuuuguuuuaaaauua

SEQ ID NO: 3464439 - RNA, 20 nt, Human
uugauaaaguaguaaaaauu

SEQ ID NO: 3464440 - RNA, 12 nt, Human
uugauaaaguuu

SEQ ID NO: 3464441 - RNA, 22 nt, Human
uugauaaauaguguuauugaga

SEQ ID NO: 3464442 - RNA, 18 nt, Human
uugauaaaucauuuuaug

SEQ ID NO: 3464443 - RNA, 21 nt, Human
uugauaaaucauuuuauguca

SEQ ID NO: 3464444 - RNA, 18 nt, Human
uugauaaauuccacugga

SEQ ID NO: 3464445 - RNA, 13 nt, Human
uugauaacagcua

SEQ ID NO: 3464446 - RNA, 22 nt, Human
uugauaacagggauugauuuua

SEQ ID NO: 3464447 - RNA, 22 nt, Human
uugauaagagggcacacacugu

SEQ ID NO: 3464448 - RNA, 16 nt, Human
uugauaagaucuuuua

SEQ ID NO: 3464449 - RNA, 16 nt, Human
uugauaaguucauaca

SEQ ID NO: 3464450 - RNA, 17 nt, Human
uugauaauaaauugaaa

SEQ ID NO: 3464451 - RNA, 19 nt, Human
uugauaauaaauugaaauu

SEQ ID NO: 3464452 - RNA, 15 nt, Human
uugcuuuuucugacu

SEQ ID NO: 3464453 - RNA, 15 nt, Human
uugcuuuuuuccaaa

SEQ ID NO: 3464454 - RNA, 17 nt, Human
uugcuuuuuuuuccuuc

SEQ ID NO: 3464455 - RNA, 15 nt, Human
uuggaaacacuaaau

SEQ ID NO: 3464456 - RNA, 16 nt, Human
uuggaaacacuaaaug

SEQ ID NO: 3464457 - RNA, 19 nt, Human
uuggaaacacuaaauguua

SEQ ID NO: 3464458 - RNA, 15 nt, Human
uuggaaaccugcccu

SEQ ID NO: 3464459 - RNA, 16 nt, Human
uuggaaacuaauaaaa

SEQ ID NO: 3464460 - RNA, 19 nt, Human
uuggaaacuaauaaaauau

SEQ ID NO: 3464461 - RNA, 18 nt, Human
uuggaaagaguaggaaga

SEQ ID NO: 3464462 - RNA, 17 nt, Human
uuggaaaguacacucug

SEQ ID NO: 3464463 - RNA, 14 nt, Human
uuggaaauauuaaa

SEQ ID NO: 3464464 - RNA, 17 nt, Human
uuggaaauauuaaaaga

SEQ ID NO: 3464465 - RNA, 13 nt, Human
uuggaaauauuca

SEQ ID NO: 3464466 - RNA, 21 nt, Human
uuggaaaucaaauguaaaguu

SEQ ID NO: 3464467 - RNA, 15 nt, Human
uuggaaaucuuuaaa

SEQ ID NO: 3464468 - RNA, 18 nt, Human
uuggaaauuuagcauugu

SEQ ID NO: 3464469 - RNA, 13 nt, Human
uuggaaauuucac

SEQ ID NO: 3464470 - RNA, 15 nt, Human
uuggaaauuuguuau

SEQ ID NO: 3464471 - RNA, 16 nt, Human
uuggaacaaagugaag

SEQ ID NO: 3464472 - RNA, 19 nt, Human
uuggaacaguaaucaguuu

SEQ ID NO: 3464473 - RNA, 20 nt, Human
uuggaacaguaaucaguuug

SEQ ID NO: 3464474 - RNA, 14 nt, Human
uuggaaccagacuc

SEQ ID NO: 3464475 - RNA, 16 nt, Human
uuggaacuggaggcag

SEQ ID NO: 3464476 - RNA, 22 nt, Human
uuggaagaaaaaaaucuucucc

SEQ ID NO: 3464477 - RNA, 20 nt, Human
uuggaagaccccacccaagc

SEQ ID NO: 3464478 - RNA, 13 nt, Human
uuggaagagaauc

SEQ ID NO: 3464479 - RNA, 17 nt, Human
uuggaagagcagcaccu

SEQ ID NO: 3464480 - RNA, 21 nt, Human
uuggaagagcagcaccuccuc

SEQ ID NO: 3464481 - RNA, 18 nt, Human
uuggaagcagguuaaaug

SEQ ID NO: 3464482 - RNA, 20 nt, Human
uuggaagcagguuaaauguu

SEQ ID NO: 3464483 - RNA, 21 nt, Human
uuggaagcagguuaaauguuu

SEQ ID NO: 3464484 - RNA, 21 nt, Human
uuggaagcuagcuccccuccu

SEQ ID NO: 3464485 - RNA, 23 nt, Human
uuggaagcuagcuccccuccucu

SEQ ID NO: 3464486 - RNA, 17 nt, Human
uuggaagcucugaaguc

SEQ ID NO: 3464487 - RNA, 21 nt, Human
uuggaagcuguuuggaaaaga

SEQ ID NO: 3464488 - RNA, 19 nt, Human
uuggaaggagacacagaug

SEQ ID NO: 3464489 - RNA, 20 nt, Human
uuggaagggcuuuucaaaau

SEQ ID NO: 3464490 - RNA, 20 nt, Human
uuggaagugaaaacuuugua

SEQ ID NO: 3464491 - RNA, 19 nt, Human
uuggaaguuuagcucugag

SEQ ID NO: 3464492 - RNA, 20 nt, Human
uuggaaguuuagcucugaga

SEQ ID NO: 3464493 - RNA, 16 nt, Human
uuggaaguuuucagga

SEQ ID NO: 3464494 - RNA, 15 nt, Human
uuggaauaggaauaa

SEQ ID NO: 3464495 - RNA, 17 nt, Human
uuggaauauuaaaaaac

SEQ ID NO: 3464496 - RNA, 23 nt, Human
uuggaauauuaaaaaacuucaug

SEQ ID NO: 3464497 - RNA, 23 nt, Human
uuggaaucuagaagaaaugaaau

SEQ ID NO: 3464498 - RNA, 16 nt, Human
uuggaaugcuucuucu

SEQ ID NO: 3464499 - RNA, 17 nt, Human
uuggaauguucucagau

SEQ ID NO: 3464500 - RNA, 15 nt, Human
uuggaauuaaaacaa

SEQ ID NO: 3464501 - RNA, 18 nt, Human
uuggaauuaaaacaaugu

SEQ ID NO: 3464502 - RNA, 18 nt, Human
uuggaauuaaccuggugc

SEQ ID NO: 3464503 - RNA, 20 nt, Human
uuggaauuaaccuggugcug

SEQ ID NO: 3464504 - RNA, 17 nt, Human
uuggaauucgcuuucua

SEQ ID NO: 3464505 - RNA, 13 nt, Human
uuggacaaaauga

SEQ ID NO: 3464506 - RNA, 17 nt, Human
uuggacaaccucauuuu

SEQ ID NO: 3464507 - RNA, 16 nt, Human
uuggacaacugcaugg

SEQ ID NO: 3464508 - RNA, 16 nt, Human
uuggacacacacagcu

SEQ ID NO: 3464509 - RNA, 17 nt, Human
uuggacacacacagcuu

SEQ ID NO: 3464510 - RNA, 22 nt, Human
uuggacagcaaaaccauugcuu

SEQ ID NO: 3464511 - RNA, 15 nt, Human
uuggacaguuuacca

SEQ ID NO: 3464512 - RNA, 22 nt, Human
uuggacauaacugacuuaguuc

SEQ ID NO: 3464513 - RNA, 14 nt, Human
uuggacauccuccu

SEQ ID NO: 3464514 - RNA, 17 nt, Human
uuggacauuuuaugucu

SEQ ID NO: 3464515 - RNA, 18 nt, Human
uuggacauuuuaugucuu

SEQ ID NO: 3464516 - RNA, 14 nt, Human
uuggaccagaucua

SEQ ID NO: 3464517 - RNA, 15 nt, Human
uuggacccaaggaaa

SEQ ID NO: 3464518 - RNA, 14 nt, Human
uuggaccccagaga

SEQ ID NO: 3464519 - RNA, 15 nt, Human
uuggaccccagcugg

SEQ ID NO: 3464520 - RNA, 16 nt, Human
uuggaccccagcuggg

SEQ ID NO: 3464521 - RNA, 17 nt, Human
uuggaccccagcuggga

SEQ ID NO: 3464522 - RNA, 19 nt, Human
uuggaccccagcugggagg

SEQ ID NO: 3464523 - RNA, 22 nt, Human
uuggaccccagcugggaggcaa

SEQ ID NO: 3464524 - RNA, 17 nt, Human
uuggacccgcucuggac

SEQ ID NO: 3464525 - RNA, 19 nt, Human
uuggacccugaggcccaga

SEQ ID NO: 3464526 - RNA, 14 nt, Human
uuggacccuuccau

SEQ ID NO: 3464527 - RNA, 23 nt, Human
uuggaccuaaauggccucaugug

SEQ ID NO: 3464528 - RNA, 13 nt, Human
uuggaccucugcu

SEQ ID NO: 3464529 - RNA, 14 nt, Human
uuggaccucugcuc

SEQ ID NO: 3464530 - RNA, 17 nt, Human
uuggacgcacacagcuu

SEQ ID NO: 3464531 - RNA, 17 nt, Human
uuggacggcugggcaca

SEQ ID NO: 3464532 - RNA, 20 nt, Human
uuggacuucaaagcaagcug

SEQ ID NO: 3464533 - RNA, 16 nt, Human
uuggacuugucccggg

SEQ ID NO: 3464534 - RNA, 14 nt, Human
uuggacuuucaaaa

SEQ ID NO: 3464535 - RNA, 22 nt, Human
uuggacuuuucguuaacauuga

SEQ ID NO: 3464536 - RNA, 16 nt, Human
uuggagaagucucagc

SEQ ID NO: 3464537 - RNA, 18 nt, Human
uuggagacacaacuauuu

SEQ ID NO: 3464538 - RNA, 20 nt, Human
uuggagacacaacuauuuuu

SEQ ID NO: 3464539 - RNA, 22 nt, Human
uuggagacccugcaaacagaac

SEQ ID NO: 3464540 - RNA, 23 nt, Human
uuggagacccugcaaacagaaca

SEQ ID NO: 3464541 - RNA, 15 nt, Human
uuggagacucugugg

SEQ ID NO: 3464542 - RNA, 22 nt, Human
uuggagacugucuggccccccu

SEQ ID NO: 3464543 - RNA, 22 nt, Human
uuggagagcuagaaccuggaga

SEQ ID NO: 3464544 - RNA, 13 nt, Human
uuggagaguaaaa

SEQ ID NO: 3464545 - RNA, 17 nt, Human
uuggagaguaaaaacug

SEQ ID NO: 3464546 - RNA, 16 nt, Human
uuggagaguuuccuga

SEQ ID NO: 3464547 - RNA, 15 nt, Human
uuggagcacaaaauu

SEQ ID NO: 3464548 - RNA, 13 nt, Human
uuggagccugcag

SEQ ID NO: 3464549 - RNA, 18 nt, Human
uuggagccugcagagcug

SEQ ID NO: 3464550 - RNA, 22 nt, Human
uuugucaucagauggaaauauu

SEQ ID NO: 3464551 - RNA, 22 nt, Human
uuugucaugcugggauuuccaa

SEQ ID NO: 3464552 - RNA, 23 nt, Human
uuugucauuagccugaguagaaa

SEQ ID NO: 3464553 - RNA, 12 nt, Human
uuugucauucag

SEQ ID NO: 3464554 - RNA, 13 nt, Human
uuugucauucaga

SEQ ID NO: 3464555 - RNA, 15 nt, Human
uuugucauuuucauu

SEQ ID NO: 3464556 - RNA, 19 nt, Human
uuugucauuuugaagcuaa

SEQ ID NO: 3464557 - RNA, 15 nt, Human
uuuguccauuuguaa

SEQ ID NO: 3464558 - RNA, 16 nt, Human
uuugucccaagugcca

SEQ ID NO: 3464559 - RNA, 12 nt, Human
uuugucccaggu

SEQ ID NO: 3464560 - RNA, 16 nt, Human
uuugucccccaacuug

SEQ ID NO: 3464561 - RNA, 18 nt, Human
uuugucccccaacuugag

SEQ ID NO: 3464562 - RNA, 13 nt, Human
uuugucuaagaaa

SEQ ID NO: 3464563 - RNA, 20 nt, Human
uuugucuaagaaacauugga

SEQ ID NO: 3464564 - RNA, 22 nt, Human
uuugucucagaagugaaaaucu

SEQ ID NO: 3464565 - RNA, 13 nt, Human
uuugucucuccuu

SEQ ID NO: 3464566 - RNA, 22 nt, Human
uuugucucuccuuuucuuuugu

SEQ ID NO: 3464567 - RNA, 14 nt, Human
uuugucucuucugg

SEQ ID NO: 3464568 - RNA, 14 nt, Human
uuugucuuaaaaag

SEQ ID NO: 3464569 - RNA, 23 nt, Human
uuugucuuaaaaaguggaaaaau

SEQ ID NO: 3464570 - RNA, 14 nt, Human
uuugucuuauauau

SEQ ID NO: 3464571 - RNA, 19 nt, Human
uuugucuuauauauauuuc

SEQ ID NO: 3464572 - RNA, 20 nt, Human
uuugucuuauauauauuucu

SEQ ID NO: 3464573 - RNA, 17 nt, Human
uuugucuuuuaaugcuu

SEQ ID NO: 3464574 - RNA, 18 nt, Human
uuugugaaacagacuugu

SEQ ID NO: 3464575 - RNA, 22 nt, Human
uuugugaaaugauggugaaagu

SEQ ID NO: 3464576 - RNA, 20 nt, Human
uuugugaaauuuuucauauu

SEQ ID NO: 3464577 - RNA, 21 nt, Human
uuugugaaauuuuucauauuu

SEQ ID NO: 3464578 - RNA, 20 nt, Human
uuugugaacucagccaagca

SEQ ID NO: 3464579 - RNA, 17 nt, Human
uuugugaagcccuguug

SEQ ID NO: 3464580 - RNA, 18 nt, Human
uuugugaaggugauuuau

SEQ ID NO: 3464581 - RNA, 23 nt, Human
uuugugaagugaaggauuugugu

SEQ ID NO: 3464582 - RNA, 16 nt, Human
uuugugaaucuuugug

SEQ ID NO: 3464583 - RNA, 19 nt, Human
uuugugaauggauuggauu

SEQ ID NO: 3464584 - RNA, 22 nt, Human
uuugugacuaauuguauaacag

SEQ ID NO: 3464585 - RNA, 18 nt, Human
uuugugauggagugcugu

SEQ ID NO: 3464586 - RNA, 19 nt, Human
uuugugauggagugcuguu

SEQ ID NO: 3464587 - RNA, 16 nt, Human
uuugugauguacugua

SEQ ID NO: 3464588 - RNA, 15 nt, Human
uuugugauucaaucu

SEQ ID NO: 3464589 - RNA, 21 nt, Human
uuugugauucuuccagaugug

SEQ ID NO: 3464590 - RNA, 22 nt, Human
uuugugcauuaucuagauacug

SEQ ID NO: 3464591 - RNA, 13 nt, Human
uuugugcauucug

SEQ ID NO: 3464592 - RNA, 14 nt, Human
uuugugcucauuua

SEQ ID NO: 3464593 - RNA, 21 nt, Human
uuugugcucauuuaaguuuca

SEQ ID NO: 3464594 - RNA, 22 nt, Human
uuugugcugaauguugggacug

SEQ ID NO: 3464595 - RNA, 20 nt, Human
uuuguggaaagucacagguc

SEQ ID NO: 3464596 - RNA, 19 nt, Human
uuuuaaagugauuaaacgu

SEQ ID NO: 3464597 - RNA, 13 nt, Human
uuuuaaagugcaa

SEQ ID NO: 3464598 - RNA, 18 nt, Human
uuuuaaaguguuucagcu

SEQ ID NO: 3464599 - RNA, 18 nt, Human
uuuuaaaguucauugcaa

SEQ ID NO: 3464600 - RNA, 11 nt, Human
uuuuaaauaaa

SEQ ID NO: 3464601 - RNA, 21 nt, Human
uuuuaaauaaaaauuacugug

SEQ ID NO: 3464602 - RNA, 15 nt, Human
uuuuaaauaaaagca

SEQ ID NO: 3464603 - RNA, 22 nt, Human
uuuuaaauaaacuuuuuuucaa

SEQ ID NO: 3464604 - RNA, 17 nt, Human
uuuuaaauauuuucuau

SEQ ID NO: 3464605 - RNA, 14 nt, Human
uuuuaaaucuaaau

SEQ ID NO: 3464606 - RNA, 11 nt, Human
uuuuaaaugca

SEQ ID NO: 3464607 - RNA, 21 nt, Human
uuuuaaaugcaccuggaauau

SEQ ID NO: 3464608 - RNA, 14 nt, Human
uuuuaaaugcaguu

SEQ ID NO: 3464609 - RNA, 20 nt, Human
uuuuaaaugcaguuacaaau

SEQ ID NO: 3464610 - RNA, 19 nt, Human
uuuuaaaugcauaaaugca

SEQ ID NO: 3464611 - RNA, 19 nt, Human
uuuuaaauggguagagaaa

SEQ ID NO: 3464612 - RNA, 16 nt, Human
uuuuaaauguauacua

SEQ ID NO: 3464613 - RNA, 22 nt, Human
uuuuaaaugugugagugcaugu

SEQ ID NO: 3464614 - RNA, 21 nt, Human
uuuuaaauuauaacuuaaaau

SEQ ID NO: 3464615 - RNA, 23 nt, Human
uuuuaaauuauaaggacugcaug

SEQ ID NO: 3464616 - RNA, 20 nt, Human
uuuuaaauucccguuuuguc

SEQ ID NO: 3464617 - RNA, 20 nt, Human
uuuuaaauucugagacaugu

SEQ ID NO: 3464618 - RNA, 24 nt, Human
uuuuaaauucugagacauguguca

SEQ ID NO: 3464619 - RNA, 12 nt, Human
uuuuaaauuguu

SEQ ID NO: 3464620 - RNA, 13 nt, Human
uuuuaaauuuuau

SEQ ID NO: 3464621 - RNA, 20 nt, Human
uuuuaaauuuucuucaguug

SEQ ID NO: 3464622 - RNA, 15 nt, Human
uuuuaaauuuuguaa

SEQ ID NO: 3464623 - RNA, 21 nt, Human
uuuuaacaagaagaugaaugg

SEQ ID NO: 3464624 - RNA, 22 nt, Human
uuuuaacaauaacuacuguguu

SEQ ID NO: 3464625 - RNA, 17 nt, Human
uuuuaacaccugaugug

SEQ ID NO: 3464626 - RNA, 14 nt, Human
uuuuaacauuuugu

SEQ ID NO: 3464627 - RNA, 19 nt, Human
uuuuaacauuuuguucuua

SEQ ID NO: 3464628 - RNA, 12 nt, Human
uuuuaaccaaag

SEQ ID NO: 3464629 - RNA, 20 nt, Human
uuuuaaccccgucaacaaau

SEQ ID NO: 3464630 - RNA, 24 nt, Human
uuuuaacuaaauuuuaaagccauu

SEQ ID NO: 3464631 - RNA, 16 nt, Human
uuuuaacuagaauuua

SEQ ID NO: 3464632 - RNA, 19 nt, Human
uuuuaacuccccuguuuca

SEQ ID NO: 3464633 - RNA, 18 nt, Human
uuuuaacuuagagcuuuu

SEQ ID NO: 3464634 - RNA, 16 nt, Human
uuuuaacuuuaaguuu

SEQ ID NO: 3464635 - RNA, 19 nt, Human
uuuuaacuuuaaguuucag

SEQ ID NO: 3464636 - RNA, 14 nt, Human
uuuuaacuuuguuu

SEQ ID NO: 3464637 - RNA, 15 nt, Human
uuuuaacuuuguuuu

SEQ ID NO: 3464638 - RNA, 13 nt, Human
uuuuaagaaaugu

SEQ ID NO: 3464639 - RNA, 19 nt, Human
uuuuaagaauugaguaaug

SEQ ID NO: 3464640 - RNA, 19 nt, Human
uuuuaagacguguuugugu

SEQ ID NO: 3464641 - RNA, 15 nt, Human
uuuuaagauagugua

SEQ ID NO: 3464642 - RNA, 18 nt, Human
uuuuaagauuccuuuucu

SEQ ID NO: 3464643 - RNA, 21 nt, Human
uuuuaagauuccuuuucuugu

SEQ ID NO: 3464644 - RNA, 17 nt, Human
uuuuaagauuuuucuca

SEQ ID NO: 3464645 - RNA, 15 nt, Human
uuuuaagcaaaauau

SEQ ID NO: 3464646 - RNA, 16 nt, Human
uuuuaagcauuacucu

SEQ ID NO: 3464647 - RNA, 22 nt, Human
uuuuaagcuguaaaaagagaga

SEQ ID NO: 3464648 - RNA, 22 nt, Human
uuuuaagggcccuuuuucaaua

SEQ ID NO: 3464649 - RNA, 17 nt, Human
uuuuaaggucuuucagu

SEQ ID NO: 3464650 - RNA, 16 nt, Human
uuuuaaguaaggaauu

SEQ ID NO: 3464651 - RNA, 14 nt, Human
uuuuaaguaaugug

SEQ ID NO: 3464652 - RNA, 21 nt, Human
uuuuaaguauugcaucuguau

SEQ ID NO: 3464653 - RNA, 15 nt, Human
uuuuaagugaaauuu

SEQ ID NO: 3464654 - RNA, 21 nt, Human
uuuuaagugcugcauuuaaaa

SEQ ID NO: 3464655 - RNA, 17 nt, Human
uuuuaagugcuuuguaa

SEQ ID NO: 3464656 - RNA, 15 nt, Human
uuuuaagugguuuga

SEQ ID NO: 3464657 - RNA, 20 nt, Human
uuuuaaguuucucugcagaa

SEQ ID NO: 3464658 - RNA, 13 nt, Human
uuuuaaguuugca

SEQ ID NO: 3464659 - RNA, 19 nt, Human
uuuuaauaaacuacucuuu

SEQ ID NO: 3464660 - RNA, 12 nt, Human
uuuuaauaaauu

SEQ ID NO: 3464661 - RNA, 13 nt, Human
uuuuaauaauguu

SEQ ID NO: 3464662 - RNA, 12 nt, Human
uuuuaauacagg

SEQ ID NO: 3464663 - RNA, 12 nt, Human
uuuuaauagaac

SEQ ID NO: 3464664 - RNA, 18 nt, Human
uuuuaauagaauaaaaua

SEQ ID NO: 3464665 - RNA, 21 nt, Human
uuuuaauagucauuccaaaua

SEQ ID NO: 3464666 - RNA, 13 nt, Human
uuuuaauauguaa

SEQ ID NO: 3464667 - RNA, 20 nt, Human
uuuuaaucaugaaauuacuu

SEQ ID NO: 3464668 - RNA, 22 nt, Human
uuuuaaugaaaaggaaucacgu

SEQ ID NO: 3464669 - RNA, 15 nt, Human
uuuuaaugaugacaa

SEQ ID NO: 3464670 - RNA, 20 nt, Human
uuuuaaugcuauuugaacaa

SEQ ID NO: 3464671 - RNA, 20 nt, Human
uuuuaauggggguagcagcu

SEQ ID NO: 3464672 - RNA, 12 nt, Human
uuuuaauguaaa

SEQ ID NO: 3464673 - RNA, 11 nt, Human
uuuuaaugugc

SEQ ID NO: 3464674 - RNA, 15 nt, Human
uuuuaaugugcugug

SEQ ID NO: 3464675 - RNA, 19 nt, Human
uuuuaaugugcuguguaaa

SEQ ID NO: 3464676 - RNA, 13 nt, Human
uuuuaauuaaaug

SEQ ID NO: 3464677 - RNA, 22 nt, Human
uuuuaauuaaugaaauaucugu

SEQ ID NO: 3464678 - RNA, 16 nt, Human
uuuuaauuauuauucu

SEQ ID NO: 3464679 - RNA, 19 nt, Human
uuuuaauuccaauaugaug

SEQ ID NO: 3464680 - RNA, 22 nt, Human
uuuuaauuccaauaugaugacu

SEQ ID NO: 3464681 - RNA, 21 nt, Human
uuuuaauuccaugaaucgcuu

SEQ ID NO: 3464682 - RNA, 19 nt, Human
uuuuaauugaaaagaagua

SEQ ID NO: 3464683 - RNA, 13 nt, Human
uuuuaauugucau

SEQ ID NO: 3464684 - RNA, 15 nt, Human
uuuuaauugucaugg

SEQ ID NO: 3464685 - RNA, 15 nt, Human
uuuuaauuuaaagcu

SEQ ID NO: 3464686 - RNA, 16 nt, Human
uuuuaauuuaaagcuu

SEQ ID NO: 3464687 - RNA, 17 nt, Human
uuuuaauuuaaagcuua

SEQ ID NO: 3464688 - RNA, 17 nt, Human
uuuuaauuuaacaugaa

SEQ ID NO: 3464689 - RNA, 17 nt, Human
uuuuaauuuacaaaaau

SEQ ID NO: 3464690 - RNA, 18 nt, Human
uuuuaauuuaguaaaugu

SEQ ID NO: 3464691 - RNA, 23 nt, Human
uuuuaauuuaugaguuuuugaua

SEQ ID NO: 3464692 - RNA, 22 nt, Human
uuuuaauuuauuuauuaagaug

SEQ ID NO: 3464693 - RNA, 21 nt, Human
uuuuaauuugaugaaagcuga

SEQ ID NO: 3464694 - RNA, 17 nt, Human
uuuuaauuugguuuuca

SEQ ID NO: 3464695 - RNA, 22 nt, Human
uuuuaauuuuguaaaggugaaa

SEQ ID NO: 3464696 - RNA, 15 nt, Human
uuuuaauuuuguauu

SEQ ID NO: 3464697 - RNA, 16 nt, Human
uuuuaauuuuguauuu

SEQ ID NO: 3464698 - RNA, 10 nt, Human
uuuuacaaaa

SEQ ID NO: 3464699 - RNA, 19 nt, Human
uuuuacaaaaaagaaaaga

SEQ ID NO: 3464700 - RNA, 12 nt, Human
uuuuacaaagcc

SEQ ID NO: 3464701 - RNA, 11 nt, Human
uuuuacaaagg

SEQ ID NO: 3464702 - RNA, 18 nt, Human
uuuuacaaaggcuguauu

SEQ ID NO: 3464703 - RNA, 23 nt, Human
uuuuacaaauuggagcagggaca

SEQ ID NO: 3464704 - RNA, 15 nt, Human
uuuuacaagauguau

SEQ ID NO: 3464705 - RNA, 17 nt, Human
uuuuacaaguaacaaaa

SEQ ID NO: 3464706 - RNA, 23 nt, Human
uuuuacaauguaauuauuuaugu

SEQ ID NO: 3464707 - RNA, 14 nt, Human
uuuuacaauugaaa

SEQ ID NO: 3464708 - RNA, 18 nt, Human
uuuuacauaacugccuug

SEQ ID NO: 3464709 - RNA, 16 nt, Human
uuuuacauacugcugu

SEQ ID NO: 3464710 - RNA, 18 nt, Human
uuuuacaugaaguauuuu

SEQ ID NO: 3464711 - RNA, 17 nt, Human
uuuuaccaaguuauaua

SEQ ID NO: 3464712 - RNA, 13 nt, Human
uuuuaccagcuuu

SEQ ID NO: 3464713 - RNA, 18 nt, Human
uuuuacccauauccccuc

SEQ ID NO: 3464714 - RNA, 22 nt, Human
uuuuacccuaaugucuucauaa

SEQ ID NO: 3464715 - RNA, 18 nt, Human
uuuuaccguuucuucccu

SEQ ID NO: 3464716 - RNA, 17 nt, Human
uugggaggaagcagaau

SEQ ID NO: 3464717 - RNA, 19 nt, Human
uugggaggaagcagaauaa

SEQ ID NO: 3464718 - RNA, 21 nt, Human
uugggaggaagcagaauaaag

SEQ ID NO: 3464719 - RNA, 15 nt, Human
uugggaggcugaggc

SEQ ID NO: 3464720 - RNA, 14 nt, Human
uugggaguccaggc

SEQ ID NO: 3464721 - RNA, 17 nt, Human
uugggaguccaggcaca

SEQ ID NO: 3464722 - RNA, 20 nt, Human
uugggaguccaggcacagga

SEQ ID NO: 3464723 - RNA, 16 nt, Human
uugggauacugcaggg

SEQ ID NO: 3464724 - RNA, 22 nt, Human
uugggaucgcauugcauaccuu

SEQ ID NO: 3464725 - RNA, 18 nt, Human
uugggaugaugccucaug

SEQ ID NO: 3464726 - RNA, 23 nt, Human
uugggaugucuuauuuuuagaug

SEQ ID NO: 3464727 - RNA, 16 nt, Human
uugggauuccugaccc

SEQ ID NO: 3464728 - RNA, 18 nt, Human
uugggauuccugacccag

SEQ ID NO: 3464729 - RNA, 14 nt, Human
uugggcaauauaac

SEQ ID NO: 3464730 - RNA, 20 nt, Human
uugggcacaucauuucaaga

SEQ ID NO: 3464731 - RNA, 20 nt, Human
uugggcacccccagccuggg

SEQ ID NO: 3464732 - RNA, 22 nt, Human
uugggcacccccagccugggcc

SEQ ID NO: 3464733 - RNA, 23 nt, Human
uugggcacuauuuauuuacaaau

SEQ ID NO: 3464734 - RNA, 20 nt, Human
uugggcagaagggagaagga

SEQ ID NO: 3464735 - RNA, 15 nt, Human
uugggcagagaggcu

SEQ ID NO: 3464736 - RNA, 12 nt, Human
uugggcagagcu

SEQ ID NO: 3464737 - RNA, 21 nt, Human
uugggcagagcuggcucugag

SEQ ID NO: 3464738 - RNA, 23 nt, Human
uugggcagccagaccagcaggcu

SEQ ID NO: 3464739 - RNA, 18 nt, Human
uugggcagcgcccuuccu

SEQ ID NO: 3464740 - RNA, 21 nt, Human
uuguggauguuuuaauuccau

SEQ ID NO: 3464741 - RNA, 16 nt, Human
uuguggcaagugaauu

SEQ ID NO: 3464742 - RNA, 18 nt, Human
uuguggcaagugaauuug

SEQ ID NO: 3464743 - RNA, 19 nt, Human
uuguggcagaaguguuuca

SEQ ID NO: 3464744 - RNA, 11 nt, Human
uuguggcagag

SEQ ID NO: 3464745 - RNA, 19 nt, Human
uuguggccaaggagcugcu

SEQ ID NO: 3464746 - RNA, 17 nt, Human
uuguggccuaagaggcu

SEQ ID NO: 3464747 - RNA, 18 nt, Human
uuguggcuccuaucugug

SEQ ID NO: 3464748 - RNA, 20 nt, Human
uuguggcugucagcaggaag

SEQ ID NO: 3464749 - RNA, 18 nt, Human
uugugggcauaaacuguu

SEQ ID NO: 3464750 - RNA, 13 nt, Human
uugugggccuggg

SEQ ID NO: 3464751 - RNA, 20 nt, Human
uuguggggacccaggcuccg

SEQ ID NO: 3464752 - RNA, 19 nt, Human
uugugggggacuguaaguu

SEQ ID NO: 3464753 - RNA, 18 nt, Human
uuguggguuuuuauuucc

SEQ ID NO: 3464754 - RNA, 20 nt, Human
uuguggguuuuuauuuccua

SEQ ID NO: 3464755 - RNA, 11 nt, Human
uugugguccaa

SEQ ID NO: 3464756 - RNA, 14 nt, Human
uugugguccaaaua

SEQ ID NO: 3464757 - RNA, 15 nt, Human
uugugguccaaauag

SEQ ID NO: 3464758 - RNA, 14 nt, Human
uugugguuuauguc

SEQ ID NO: 3464759 - RNA, 13 nt, Human
uugugguuuguug

SEQ ID NO: 3464760 - RNA, 17 nt, Human
uugugguuuucaaauug

SEQ ID NO: 3464761 - RNA, 19 nt, Human
uuguguaaauacaauuuug

SEQ ID NO: 3464762 - RNA, 18 nt, Human
uuguguaagaaauacaga

SEQ ID NO: 3464763 - RNA, 16 nt, Human
uuguguaauaaagugu

SEQ ID NO: 3464764 - RNA, 21 nt, Human
uuguguaauaaaguguuuuca

SEQ ID NO: 3464765 - RNA, 14 nt, Human
uuguguaauauuac

SEQ ID NO: 3464766 - RNA, 23 nt, Human
uuguguaauauuacuuuaacaug

SEQ ID NO: 3464767 - RNA, 23 nt, Human
uuguguacagacuuguugugacu

SEQ ID NO: 3464768 - RNA, 15 nt, Human
uuuugccuuuugcaa

SEQ ID NO: 3464769 - RNA, 13 nt, Human
uuuugcucuaaaa

SEQ ID NO: 3464770 - RNA, 16 nt, Human
uuuugcucuaaaauau

SEQ ID NO: 3464771 - RNA, 13 nt, Human
uuuugcuguauau

SEQ ID NO: 3464772 - RNA, 10 nt, Human
uuuugcuguu

SEQ ID NO: 3464773 - RNA, 18 nt, Human
uuuugcuguuuccuuuua

SEQ ID NO: 3464774 - RNA, 19 nt, Human
uuuugcuuuaauuccauga

SEQ ID NO: 3464775 - RNA, 20 nt, Human
uuuugcuuuuucugacucca

SEQ ID NO: 3464776 - RNA, 20 nt, Human
uuuuggaagauuuucagucu

SEQ ID NO: 3464777 - RNA, 20 nt, Human
uuuuggagaagguuaucaaa

SEQ ID NO: 3464778 - RNA, 18 nt, Human
uuuuggagauuauaauaa

SEQ ID NO: 3464779 - RNA, 13 nt, Human
uuuuggaggugcu

SEQ ID NO: 3464780 - RNA, 15 nt, Human
uuuuggaggugcuua

SEQ ID NO: 3464781 - RNA, 17 nt, Human
uuuuggaguguuaugua

SEQ ID NO: 3464782 - RNA, 16 nt, Human
uuuuggaugcagugcu

SEQ ID NO: 3464783 - RNA, 11 nt, Human
uuuuggaugcc

SEQ ID NO: 3464784 - RNA, 19 nt, Human
uuuuggauugacaguaacu

SEQ ID NO: 3464785 - RNA, 20 nt, Human
uuuuggauuuggagagaaau

SEQ ID NO: 3464786 - RNA, 21 nt, Human
uuuuggcauaacauaaaucug

SEQ ID NO: 3464787 - RNA, 15 nt, Human
uuuuggccaaagugu

SEQ ID NO: 3464788 - RNA, 16 nt, Human
uuuuggccaaaguguu

SEQ ID NO: 3464789 - RNA, 19 nt, Human
uuuuggcccccgagcuggg

SEQ ID NO: 3464790 - RNA, 22 nt, Human
uuuugggcuccuuuuucucccu

SEQ ID NO: 3464791 - RNA, 18 nt, Human
uuuuggggaagugaggaa

SEQ ID NO: 3464792 - RNA, 15 nt, Human
uuuuggggagccaga

SEQ ID NO: 3464793 - RNA, 18 nt, Human
uuuuggggauaugcuuag

SEQ ID NO: 3464794 - RNA, 23 nt, Human
uuuuggggauuuucaaaagauaa

SEQ ID NO: 3464795 - RNA, 18 nt, Human
uuuuggggugugaccuca

SEQ ID NO: 3464796 - RNA, 13 nt, Human
uuuuggguagcug

SEQ ID NO: 3464797 - RNA, 18 nt, Human
uuuuggguuuauuuggaa

SEQ ID NO: 3464798 - RNA, 19 nt, Human
uuuugguaaagacuggcuu

SEQ ID NO: 3464799 - RNA, 14 nt, Human
uuuugguagagaug

SEQ ID NO: 3464800 - RNA, 21 nt, Human
uuuugguccaaguugugcuua

SEQ ID NO: 3464801 - RNA, 20 nt, Human
uuuugguccacuuuuccagu

SEQ ID NO: 3464802 - RNA, 21 nt, Human
uuuugguccacuuuuccagua

SEQ ID NO: 3464803 - RNA, 14 nt, Human
uuuuggucuuuuug

SEQ ID NO: 3464804 - RNA, 17 nt, Human
uuuuggugauucaaaug

SEQ ID NO: 3464805 - RNA, 19 nt, Human
uuuugguuaagcuuugaca

SEQ ID NO: 3464806 - RNA, 16 nt, Human
uuuugguucuuaguuc

SEQ ID NO: 3464807 - RNA, 15 nt, Human
uuuugguugaauaaa

SEQ ID NO: 3464808 - RNA, 15 nt, Human
uuuugguugcuuuaa

SEQ ID NO: 3464809 - RNA, 14 nt, Human
uuuugguuuuguuc

SEQ ID NO: 3464810 - RNA, 15 nt, Human
uuuuguaaaagaaau

SEQ ID NO: 3464811 - RNA, 14 nt, Human
uuuuguaaacuuug

SEQ ID NO: 3464812 - RNA, 17 nt, Human
uuuuguaaacuuugaaa

SEQ ID NO: 3464813 - RNA, 19 nt, Human
uuuuguaaacuuugaaaua

SEQ ID NO: 3464814 - RNA, 16 nt, Human
uuuuguaaagaaaaau

SEQ ID NO: 3464815 - RNA, 19 nt, Human
uuuuguaaagaaauuuacu

SEQ ID NO: 3464816 - RNA, 13 nt, Human
uuuuguaaagauu

SEQ ID NO: 3464817 - RNA, 16 nt, Human
uuuuguaaagauuucu

SEQ ID NO: 3464818 - RNA, 21 nt, Human
uuuuguaaaucacauccuuau

SEQ ID NO: 3464819 - RNA, 15 nt, Human
uuuuguaacaaauga

SEQ ID NO: 3464820 - RNA, 18 nt, Human
uuuuguaacuuccaugug

SEQ ID NO: 3464821 - RNA, 13 nt, Human
uuuuguaaugaau

SEQ ID NO: 3464822 - RNA, 14 nt, Human
uuuuguaauuuucu

SEQ ID NO: 3464823 - RNA, 11 nt, Human
uuuuguaccaa

SEQ ID NO: 3464824 - RNA, 13 nt, Human
uuuuguacuguaa

SEQ ID NO: 3464825 - RNA, 16 nt, Human
uuuuguacuguaaaga

SEQ ID NO: 3464826 - RNA, 19 nt, Human
uuuuguagcacugacagau

SEQ ID NO: 3464827 - RNA, 21 nt, Human
uuuuguagcuggggcuuugau

SEQ ID NO: 3464828 - RNA, 22 nt, Human
uuuuguaggggucaaagaaaug

SEQ ID NO: 3464829 - RNA, 19 nt, Human
uuuuguagguacuuuugga

SEQ ID NO: 3464830 - RNA, 24 nt, Human
uuuuguauaauuggauuuccuaau

SEQ ID NO: 3464831 - RNA, 16 nt, Human
uuuuguauaauuguau

SEQ ID NO: 3464832 - RNA, 13 nt, Human
uuuuguauacaaa

SEQ ID NO: 3464833 - RNA, 13 nt, Human
uuuuguauauauc

SEQ ID NO: 3464834 - RNA, 14 nt, Human
uuuuguauauuggu

SEQ ID NO: 3464835 - RNA, 19 nt, Human
uuuuguaucuacaucuuuu

SEQ ID NO: 3464836 - RNA, 13 nt, Human
uuuuguaucuuaa

SEQ ID NO: 3464837 - RNA, 13 nt, Human
uuuuguaugcaag

SEQ ID NO: 3464838 - RNA, 20 nt, Human
uuuuguauguaaaugugcau

SEQ ID NO: 3464839 - RNA, 19 nt, Human
uuuuguauuuuccaagugu

SEQ ID NO: 3464840 - RNA, 18 nt, Human
uuuuguauuuuuaauggg

SEQ ID NO: 3464841 - RNA, 18 nt, Human
uuuugucauuuucuccau

SEQ ID NO: 3464842 - RNA, 16 nt, Human
uuuugucccccaacuu

SEQ ID NO: 3464843 - RNA, 10 nt, Human
uuuugucucu

SEQ ID NO: 3464844 - RNA, 17 nt, Human
uuuugugaaauuuuuca

SEQ ID NO: 3464845 - RNA, 17 nt, Human
uuuugugaagcccuguu

SEQ ID NO: 3464846 - RNA, 21 nt, Human
uuuugugaaguuuaauugacu

SEQ ID NO: 3464847 - RNA, 23 nt, Human
uuuugugaauggauuggauuauu

SEQ ID NO: 3464848 - RNA, 23 nt, Human
uuuugugacuauauagagauguu

SEQ ID NO: 3464849 - RNA, 23 nt, Human
uuuugugaguuuguuucuuugaa

SEQ ID NO: 3464850 - RNA, 20 nt, Human
uuuugugaugcaaauaaaua

SEQ ID NO: 3464851 - RNA, 21 nt, Human
uuuugugcaaaagcuucaaau

SEQ ID NO: 3464852 - RNA, 20 nt, Human
uuuugugcauuaucuagaua

SEQ ID NO: 3464853 - RNA, 22 nt, Human
uuuugugcauuuguaaaugcug

SEQ ID NO: 3464854 - RNA, 15 nt, Human
uuuugugcugcuucu

SEQ ID NO: 3464855 - RNA, 22 nt, Human
uuuugugcuuaguuaaaucuuu

SEQ ID NO: 3464856 - RNA, 16 nt, Human
uuuugugguuuggaau

SEQ ID NO: 3464857 - RNA, 11 nt, Human
uuuuguguccu

SEQ ID NO: 3464858 - RNA, 15 nt, Human
uuuugugugaaauug

SEQ ID NO: 3464859 - RNA, 20 nt, Human
uuuuguguguauuugcuaau

SEQ ID NO: 3464860 - RNA, 15 nt, Human
uuuuguuaacugauu

SEQ ID NO: 3464861 - RNA, 21 nt, Human
uuuuguuacuguucuugcugc

SEQ ID NO: 3464862 - RNA, 22 nt, Human
uuuuguuacuguucuugcugcu

SEQ ID NO: 3464863 - RNA, 16 nt, Human
uuuuguucaaagccag

SEQ ID NO: 3464864 - RNA, 14 nt, Human
uuuuguucauacau

SEQ ID NO: 3464865 - RNA, 19 nt, Human
uuuuguuccccuccuccac

SEQ ID NO: 3464866 - RNA, 13 nt, Human
uuuuguucccuau

SEQ ID NO: 3464867 - RNA, 14 nt, Human
uuuuguucucuggg

SEQ ID NO: 3464868 - RNA, 17 nt, Human
uuuuguucucugggaga

SEQ ID NO: 3464869 - RNA, 15 nt, Human
uuuuguugauuaaaa

SEQ ID NO: 3464870 - RNA, 16 nt, Human
uuuuguugccccagaa

SEQ ID NO: 3464871 - RNA, 15 nt, Human
uuuuguuguaaaaag

SEQ ID NO: 3464872 - RNA, 19 nt, Human
uuuuguuguaaaaagaaaa

SEQ ID NO: 3464873 - RNA, 13 nt, Human
uuuuguuguuucu

SEQ ID NO: 3464874 - RNA, 18 nt, Human
uuuuguuguuuguuuagu

SEQ ID NO: 3464875 - RNA, 16 nt, Human
uuuuguuuaccagaga

SEQ ID NO: 3464876 - RNA, 16 nt, Human
uuuuguuuauuucauu

SEQ ID NO: 3464877 - RNA, 13 nt, Human
uuuuguuuccuuu

SEQ ID NO: 3464878 - RNA, 22 nt, Human
uuuuguuuccuuuuuucccaua

SEQ ID NO: 3464879 - RNA, 14 nt, Human
uuuuguuugaugca

SEQ ID NO: 3464880 - RNA, 15 nt, Human
uuuuguuugccagga

SEQ ID NO: 3464881 - RNA, 22 nt, Human
uuuuguuuggaccaaaaaccag

SEQ ID NO: 3464882 - RNA, 23 nt, Human
uuuuguuuggaccaaaaaccagu

SEQ ID NO: 3464883 - RNA, 14 nt, Human
uuuuguuugguauu

SEQ ID NO: 3464884 - RNA, 16 nt, Human
uuuuguuugguuauau

SEQ ID NO: 3464885 - RNA, 20 nt, Human
uuuaaaaguuacuccuuuua

SEQ ID NO: 3464886 - RNA, 17 nt, Human
uuuaaaauaaaaugaaa

SEQ ID NO: 3464887 - RNA, 18 nt, Human
uuuaaaauaaaaugaaaa

SEQ ID NO: 3464888 - RNA, 16 nt, Human
uuuaaaauaagucuga

SEQ ID NO: 3464889 - RNA, 19 nt, Human
uuuaaaauacacacucaaa

SEQ ID NO: 3464890 - RNA, 15 nt, Human
uuuaaaauacuguag

SEQ ID NO: 3464891 - RNA, 18 nt, Human
uuuaaaauacuguagaua

SEQ ID NO: 3464892 - RNA, 11 nt, Human
uuuaaaauaua

SEQ ID NO: 3464893 - RNA, 16 nt, Human
uuuaaaauauuuaucu

SEQ ID NO: 3464894 - RNA, 20 nt, Human
uuuaaaaucacuaacauuau

SEQ ID NO: 3464895 - RNA, 22 nt, Human
uuuaaaaucagcuauuuuguga

SEQ ID NO: 3464896 - RNA, 16 nt, Human
uuuaaaaucauuucug

SEQ ID NO: 3464897 - RNA, 18 nt, Human
uuuaaaaucuccuaaaug

SEQ ID NO: 3464898 - RNA, 15 nt, Human
uuuaaaaucugucac

SEQ ID NO: 3464899 - RNA, 20 nt, Human
uuuaaaaugguuuguccuga

SEQ ID NO: 3464900 - RNA, 11 nt, Human
uuuaaaaugua

SEQ ID NO: 3464901 - RNA, 12 nt, Human
uuuaaaauguaa

SEQ ID NO: 3464902 - RNA, 20 nt, Human
uuuaaaauguaaagccaugc

SEQ ID NO: 3464903 - RNA, 22 nt, Human
uuuaaaauguaauuuaaaugaa

SEQ ID NO: 3464904 - RNA, 21 nt, Human
uuuaaaauguacauguauuaa

SEQ ID NO: 3464905 - RNA, 18 nt, Human
uuuaaaauguauaaguug

SEQ ID NO: 3464906 - RNA, 20 nt, Human
uuuaaaauuuauauuguaaa

SEQ ID NO: 3464907 - RNA, 19 nt, Human
uuuaaaauuucuuagaaaa

SEQ ID NO: 3464908 - RNA, 14 nt, Human
uuuaaaauuuuaag

SEQ ID NO: 3464909 - RNA, 12 nt, Human
uuuaaacaaauu

SEQ ID NO: 3464910 - RNA, 23 nt, Human
uuuaaacacacagauacacacac

SEQ ID NO: 3464911 - RNA, 14 nt, Human
uuuaaacacauuaa

SEQ ID NO: 3464912 - RNA, 16 nt, Human
uuuaaacauagaaagu

SEQ ID NO: 3464913 - RNA, 22 nt, Human
uuuaaacauauccaaguuugaa

SEQ ID NO: 3464914 - RNA, 19 nt, Human
uuuaaacauuaaaaaugga

SEQ ID NO: 3464915 - RNA, 17 nt, Human
uuuaaacccauuuuagu

SEQ ID NO: 3464916 - RNA, 17 nt, Human
uuuaaaccgcuaaaaga

SEQ ID NO: 3464917 - RNA, 21 nt, Human
uuuaaaccgcuaaaagaaacu

SEQ ID NO: 3464918 - RNA, 11 nt, Human
uuuaaaccuuu

SEQ ID NO: 3464919 - RNA, 18 nt, Human
uuuaaaccuuuuauuaua

SEQ ID NO: 3464920 - RNA, 16 nt, Human
uuuaaacuacagguag

SEQ ID NO: 3464921 - RNA, 12 nt, Human
uuuaaacuagau

SEQ ID NO: 3464922 - RNA, 19 nt, Human
uuuaaacuagaugaccuca

SEQ ID NO: 3464923 - RNA, 20 nt, Human
uuuaaacugaaugaacaacc

SEQ ID NO: 3464924 - RNA, 13 nt, Human
uuuaaacuguaca

SEQ ID NO: 3464925 - RNA, 15 nt, Human
uuuaaacuguguaca

SEQ ID NO: 3464926 - RNA, 19 nt, Human
uuuaaacuguguacauaac

SEQ ID NO: 3464927 - RNA, 22 nt, Human
uuuaaacuguguacauaacuga

SEQ ID NO: 3464928 - RNA, 14 nt, Human
uuuaaacuuauaaa

SEQ ID NO: 3464929 - RNA, 18 nt, Human
uuuaaagaaaaaaauguc

SEQ ID NO: 3464930 - RNA, 15 nt, Human
uuuaaagaaaaguuu

SEQ ID NO: 3464931 - RNA, 12 nt, Human
uuuaaagaaagu

SEQ ID NO: 3464932 - RNA, 23 nt, Human
uuuaaagaaucauuauuuauuaa

SEQ ID NO: 3464933 - RNA, 18 nt, Human
uuuaaagacaauguuaaa

SEQ ID NO: 3464934 - RNA, 16 nt, Human
ucacaccugcccuaaa

SEQ ID NO: 3464935 - RNA, 13 nt, Human
ucacacucugggu

SEQ ID NO: 3464936 - RNA, 11 nt, Human
ucacacugaga

SEQ ID NO: 3464937 - RNA, 12 nt, Human
ucacacugagaa

SEQ ID NO: 3464938 - RNA, 18 nt, Human
ucacacugcaagagccuu

SEQ ID NO: 3464939 - RNA, 21 nt, Human
ucacacugcaagagccuuggu

SEQ ID NO: 3464940 - RNA, 16 nt, Human
ucacacuggcuaucaa

SEQ ID NO: 3464941 - RNA, 11 nt, Human
ucacacuggga

SEQ ID NO: 3464942 - RNA, 17 nt, Human
ucacacuggucugcugu

SEQ ID NO: 3464943 - RNA, 19 nt, Human
ucacacugguucucaauga

SEQ ID NO: 3464944 - RNA, 21 nt, Human
ucacacugguucucaaugaaa

SEQ ID NO: 3464945 - RNA, 20 nt, Human
ucacacuuccaccagccugc

SEQ ID NO: 3464946 - RNA, 12 nt, Human
ucacagaaauga

SEQ ID NO: 3464947 - RNA, 11 nt, Human
ucacagaagaa

SEQ ID NO: 3464948 - RNA, 20 nt, Human
ucacagacaggaccccugca

SEQ ID NO: 3464949 - RNA, 18 nt, Human
ucacagaccuggagcccc

SEQ ID NO: 3464950 - RNA, 14 nt, Human
ucacagacuggaga

SEQ ID NO: 3464951 - RNA, 22 nt, Human
ucacagagacacagggcaucca

SEQ ID NO: 3464952 - RNA, 22 nt, Human
ucacagagacauuccuccgagc

SEQ ID NO: 3464953 - RNA, 17 nt, Human
ucacagagucaaggccu

SEQ ID NO: 3464954 - RNA, 20 nt, Human
ucacagaugggugcuuggag

SEQ ID NO: 3464955 - RNA, 21 nt, Human
ucacagaugugugauucacag

SEQ ID NO: 3464956 - RNA, 16 nt, Human
ucacagcacacucagc

SEQ ID NO: 3464957 - RNA, 17 nt, Human
ucacagcacagagaaga

SEQ ID NO: 3464958 - RNA, 15 nt, Human
ucacagcagcuucua

SEQ ID NO: 3464959 - RNA, 18 nt, Human
ucacagcagugagacugg

SEQ ID NO: 3464960 - RNA, 23 nt, Human
ucacagccagacuggcacaguuu

SEQ ID NO: 3464961 - RNA, 20 nt, Human
ucacagccagcgaacugaca

SEQ ID NO: 3464962 - RNA, 22 nt, Human
ucacagccaggcgcuagcacag

SEQ ID NO: 3464963 - RNA, 20 nt, Human
ucacagccucaagucacucc

SEQ ID NO: 3464964 - RNA, 14 nt, Human
ucacagccuccucu

SEQ ID NO: 3464965 - RNA, 15 nt, Human
ucacagccuccucug

SEQ ID NO: 3464966 - RNA, 22 nt, Human
ucacagccuccucugucugccc

SEQ ID NO: 3464967 - RNA, 16 nt, Human
ucacagccucugaccc

SEQ ID NO: 3464968 - RNA, 13 nt, Human
ucacagcggaggu

SEQ ID NO: 3464969 - RNA, 14 nt, Human
ucacagcuccuccc

SEQ ID NO: 3464970 - RNA, 23 nt, Human
ucacaggacagcccuucuuucca

SEQ ID NO: 3464971 - RNA, 23 nt, Human
ucacaggacucugccuccucuuc

SEQ ID NO: 3464972 - RNA, 23 nt, Human
ucacaggcagccagugcccugag

SEQ ID NO: 3464973 - RNA, 17 nt, Human
ucacaggcagguccagg

SEQ ID NO: 3464974 - RNA, 19 nt, Human
ucacaggcagguccagggu

SEQ ID NO: 3464975 - RNA, 14 nt, Human
ucacaggcugggcu

SEQ ID NO: 3464976 - RNA, 20 nt, Human
ucacagggcaugccccggcc

SEQ ID NO: 3464977 - RNA, 17 nt, Human
ucacagggugggccucg

SEQ ID NO: 3464978 - RNA, 14 nt, Human
ucacaggguugggc

SEQ ID NO: 3464979 - RNA, 23 nt, Human
ucacagguagacaguauauaacu

SEQ ID NO: 3464980 - RNA, 21 nt, Human
ucacagguuggaagagaauca

SEQ ID NO: 3464981 - RNA, 18 nt, Human
ucacaguacagcaugugc

SEQ ID NO: 3464982 - RNA, 19 nt, Human
ucacaguagagccagcuug

SEQ ID NO: 3464983 - RNA, 15 nt, Human
ucacaguauugcuca

SEQ ID NO: 3464984 - RNA, 23 nt, Human
ucacaguccuuaccagcagagca

SEQ ID NO: 3464985 - RNA, 21 nt, Human
ucacagucuaauuuuuauuca

SEQ ID NO: 3464986 - RNA, 18 nt, Human
ucacagucucuuuaaucu

SEQ ID NO: 3464987 - RNA, 17 nt, Human
ucacagugcugugugcc

SEQ ID NO: 3464988 - RNA, 18 nt, Human
ucacagugggagccaggg

SEQ ID NO: 3464989 - RNA, 17 nt, Human
ucacaguguugcccagg

SEQ ID NO: 3464990 - RNA, 16 nt, Human
ucacaguguuuacacu

SEQ ID NO: 3464991 - RNA, 22 nt, Human
ucacaguguuugcaaugguguu

SEQ ID NO: 3464992 - RNA, 17 nt, Human
ucacaguuauuacauac

SEQ ID NO: 3464993 - RNA, 18 nt, Human
ucacaguuccucgcccug

SEQ ID NO: 3464994 - RNA, 15 nt, Human
ucacaguucucuccu

SEQ ID NO: 3464995 - RNA, 17 nt, Human
ucacaguuggccuucag

SEQ ID NO: 3464996 - RNA, 16 nt, Human
ucacaguuugaaauaa

SEQ ID NO: 3464997 - RNA, 17 nt, Human
ucacaguuugaaauaag

SEQ ID NO: 3464998 - RNA, 15 nt, Human
ucacaguuuuuccug

SEQ ID NO: 3464999 - RNA, 17 nt, Human
ucacauaaaaccucauu

SEQ ID NO: 3465000 - RNA, 18 nt, Human
ucacauaaaauagauuuu

SEQ ID NO: 3465001 - RNA, 19 nt, Human
ucacauaaaugcagcccau

SEQ ID NO: 3465002 - RNA, 16 nt, Human
ucacauaacagaaugc

SEQ ID NO: 3465003 - RNA, 16 nt, Human
ucacauacccuccccc

SEQ ID NO: 3465004 - RNA, 16 nt, Human
ucacauagaugucccu

SEQ ID NO: 3465005 - RNA, 19 nt, Human
ucacauagcccacuuacau

SEQ ID NO: 3465006 - RNA, 20 nt, Human
ucacauauugauuuccguua

SEQ ID NO: 3465007 - RNA, 23 nt, Human
ucacauauuuuauuaagaacuca

SEQ ID NO: 3465008 - RNA, 13 nt, Human
ucacaucacagga

SEQ ID NO: 3465009 - RNA, 16 nt, Human
ucacaucagauaagac

SEQ ID NO: 3465010 - RNA, 17 nt, Human
ucacaucagauaagaca

SEQ ID NO: 3465011 - RNA, 16 nt, Human
ucacauccuugacuuu

SEQ ID NO: 3465012 - RNA, 19 nt, Human
ucacauccuugacuuuuua

SEQ ID NO: 3465013 - RNA, 21 nt, Human
ucacaucgcuucuguguaucu

SEQ ID NO: 3465014 - RNA, 14 nt, Human
ucacaucuuaugcu

SEQ ID NO: 3465015 - RNA, 22 nt, Human
ucacaucuuucacacuuccacc

SEQ ID NO: 3465016 - RNA, 16 nt, Human
ucacaucuuuuucacu

SEQ ID NO: 3465017 - RNA, 16 nt, Human
ucacaugaauuauuac

SEQ ID NO: 3465018 - RNA, 14 nt, Human
ucacaugaccacau

SEQ ID NO: 3465019 - RNA, 13 nt, Human
ucacaugaccuga

SEQ ID NO: 3465020 - RNA, 21 nt, Human
ucacaugaugcacuucaaauu

SEQ ID NO: 3465021 - RNA, 17 nt, Human
ucacaugauuccagcca

SEQ ID NO: 3465022 - RNA, 19 nt, Human
ucacaugauuccagccauc

SEQ ID NO: 3465023 - RNA, 13 nt, Human
ucacaugcuggac

SEQ ID NO: 3465024 - RNA, 14 nt, Human
ucacaugcuggaca

SEQ ID NO: 3465025 - RNA, 23 nt, Human
ucacaugcuggacaggucuggga

SEQ ID NO: 3465026 - RNA, 18 nt, Human
ucacauggaaugaggguu

SEQ ID NO: 3465027 - RNA, 15 nt, Human
ucacaugggacaaag

SEQ ID NO: 3465028 - RNA, 23 nt, Human
ucacauguauguuuugguaucug

SEQ ID NO: 3465029 - RNA, 18 nt, Human
ucacuucugaccacacuu

SEQ ID NO: 3465030 - RNA, 15 nt, Human
ucacuucuucugucc

SEQ ID NO: 3465031 - RNA, 21 nt, Human
ucacuucuucuguccaagcag

SEQ ID NO: 3465032 - RNA, 20 nt, Human
ucacuucuuucccuuccucc

SEQ ID NO: 3465033 - RNA, 21 nt, Human
ucacuugaauccuagggccug

SEQ ID NO: 3465034 - RNA, 12 nt, Human
ucacuugagacc

SEQ ID NO: 3465035 - RNA, 14 nt, Human
ucacuugagcccag

SEQ ID NO: 3465036 - RNA, 22 nt, Human
ucacuugaggucaggaguuccu

SEQ ID NO: 3465037 - RNA, 14 nt, Human
ucacuugaugauac

SEQ ID NO: 3465038 - RNA, 15 nt, Human
ucacuugauucauaa

SEQ ID NO: 3465039 - RNA, 11 nt, Human
ucacuugcagu

SEQ ID NO: 3465040 - RNA, 17 nt, Human
ucacuugugcaguguug

SEQ ID NO: 3465041 - RNA, 19 nt, Human
ucacuugugccaacacuca

SEQ ID NO: 3465042 - RNA, 21 nt, Human
ucacuugugccaacacucaag

SEQ ID NO: 3465043 - RNA, 16 nt, Human
ucacuugugcuuugcu

SEQ ID NO: 3465044 - RNA, 23 nt, Human
ucacuuguuguuuuacuaaagaa

SEQ ID NO: 3465045 - RNA, 20 nt, Human
ucacuuguuuuauuuaaccu

SEQ ID NO: 3465046 - RNA, 18 nt, Human
ucacuuuaauucucaugu

SEQ ID NO: 3465047 - RNA, 20 nt, Human
ucacuuuaauucucauguga

SEQ ID NO: 3465048 - RNA, 21 nt, Human
ucacuuuacacaauagaauua

SEQ ID NO: 3465049 - RNA, 14 nt, Human
ucacuuuagaugcu

SEQ ID NO: 3465050 - RNA, 13 nt, Human
ucacuuucauuuu

SEQ ID NO: 3465051 - RNA, 17 nt, Human
ucacuuugcucugggug

SEQ ID NO: 3465052 - RNA, 13 nt, Human
ucacuuugucuaa

SEQ ID NO: 3465053 - RNA, 22 nt, Human
ucacuuuuagggagagucauau

SEQ ID NO: 3465054 - RNA, 22 nt, Human
ucacuuuuauuuagcaccaggg

SEQ ID NO: 3465055 - RNA, 14 nt, Human
ucacuuuucccacu

SEQ ID NO: 3465056 - RNA, 12 nt, Human
ucacuuuuccuc

SEQ ID NO: 3465057 - RNA, 13 nt, Human
ucacuuuuccucc

SEQ ID NO: 3465058 - RNA, 18 nt, Human
ucacuuuuccucccucag

SEQ ID NO: 3465059 - RNA, 13 nt, Human
ucacuuuucugua

SEQ ID NO: 3465060 - RNA, 21 nt, Human
ucacuuuugcuccgaagcuac

SEQ ID NO: 3465061 - RNA, 17 nt, Human
ucacuuuuugaacuaag

SEQ ID NO: 3465062 - RNA, 16 nt, Human
ucacuuuuugaggcaa

SEQ ID NO: 3465063 - RNA, 10 nt, Human
ucagaaaaaa

SEQ ID NO: 3465064 - RNA, 17 nt, Human
ucagaaaacagaaaaaa

SEQ ID NO: 3465065 - RNA, 19 nt, Human
ucagaaaauauuauguguu

SEQ ID NO: 3465066 - RNA, 23 nt, Human
ucagaaaauguucuguuugcugu

SEQ ID NO: 3465067 - RNA, 16 nt, Human
ucagaaacaauuucug

SEQ ID NO: 3465068 - RNA, 16 nt, Human
ucagaaacuaaaacaa

SEQ ID NO: 3465069 - RNA, 16 nt, Human
ucagaaacuugugaag

SEQ ID NO: 3465070 - RNA, 16 nt, Human
ucagaaagcuuuauuu

SEQ ID NO: 3465071 - RNA, 12 nt, Human
ucagaaaggaau

SEQ ID NO: 3465072 - RNA, 21 nt, Human
ucagaaagggagggcucugag

SEQ ID NO: 3465073 - RNA, 22 nt, Human
ucagaaagggagggcucugagg

SEQ ID NO: 3465074 - RNA, 15 nt, Human
ucagaaagugccuga

SEQ ID NO: 3465075 - RNA, 18 nt, Human
ucagaaaguguauaauaa

SEQ ID NO: 3465076 - RNA, 13 nt, Human
ucagaaauacaga

SEQ ID NO: 3465077 - RNA, 16 nt, Human
ucagaaauacagauuu

SEQ ID NO: 3465078 - RNA, 19 nt, Human
ucagaaauauaacacauuu

SEQ ID NO: 3465079 - RNA, 16 nt, Human
ucagaaaugcugccug

SEQ ID NO: 3465080 - RNA, 17 nt, Human
ucagaaaugcugccugc

SEQ ID NO: 3465081 - RNA, 21 nt, Human
ucagaaaugcugccugccugu

SEQ ID NO: 3465082 - RNA, 15 nt, Human
ucagaaauguguuau

SEQ ID NO: 3465083 - RNA, 21 nt, Human
ucagaaauuggaacagaaugu

SEQ ID NO: 3465084 - RNA, 16 nt, Human
ucagaacaaauucagg

SEQ ID NO: 3465085 - RNA, 14 nt, Human
ucagaacagcagac

SEQ ID NO: 3465086 - RNA, 12 nt, Human
ucagaacagcug

SEQ ID NO: 3465087 - RNA, 20 nt, Human
ucagaacccagggcucugcc

SEQ ID NO: 3465088 - RNA, 13 nt, Human
ucagaacccugcc

SEQ ID NO: 3465089 - RNA, 21 nt, Human
ucagaacccugccauggaacu

SEQ ID NO: 3465090 - RNA, 15 nt, Human
ucagaacccuuggcu

SEQ ID NO: 3465091 - RNA, 16 nt, Human
ucagaacccuuggcuu

SEQ ID NO: 3465092 - RNA, 15 nt, Human
ucagaaccucuuccc

SEQ ID NO: 3465093 - RNA, 17 nt, Human
ucagaaccucuucccca

SEQ ID NO: 3465094 - RNA, 18 nt, Human
ucagaaccucuuccccag

SEQ ID NO: 3465095 - RNA, 16 nt, Human
ucagaacuauguuuuu

SEQ ID NO: 3465096 - RNA, 21 nt, Human
ucagaacucaaauggggccag

SEQ ID NO: 3465097 - RNA, 20 nt, Human
ucagaacugucggaggaaag

SEQ ID NO: 3465098 - RNA, 13 nt, Human
ucagaacuugcug

SEQ ID NO: 3465099 - RNA, 12 nt, Human
ucagaagauaac

SEQ ID NO: 3465100 - RNA, 14 nt, Human
ucagaagauaacuu

SEQ ID NO: 3465101 - RNA, 20 nt, Human
ucagaagauagucuuggaag

SEQ ID NO: 3465102 - RNA, 18 nt, Human
ucagaagcacagaauauu

SEQ ID NO: 3465103 - RNA, 22 nt, Human
ucagaagccuauuguaaauaca

SEQ ID NO: 3465104 - RNA, 23 nt, Human
ucagaagccugggggccuggcug

SEQ ID NO: 3465105 - RNA, 14 nt, Human
ucagaagccuuugg

SEQ ID NO: 3465106 - RNA, 13 nt, Human
ucagaaggagaag

SEQ ID NO: 3465107 - RNA, 14 nt, Human
ucagaaggagaagg

SEQ ID NO: 3465108 - RNA, 12 nt, Human
ucagaaggcucu

SEQ ID NO: 3465109 - RNA, 13 nt, Human
ucagaagggcuau

SEQ ID NO: 3465110 - RNA, 15 nt, Human
ucagaaggggagggg

SEQ ID NO: 3465111 - RNA, 20 nt, Human
ucagaaggggaggggagaca

SEQ ID NO: 3465112 - RNA, 15 nt, Human
ucagaagucaucuug

SEQ ID NO: 3465113 - RNA, 18 nt, Human
ucagaagucuuucagcaa

SEQ ID NO: 3465114 - RNA, 19 nt, Human
ucagaaguuucucagcucc

SEQ ID NO: 3465115 - RNA, 23 nt, Human
ucagaaguuucugccgcagcccu

SEQ ID NO: 3465116 - RNA, 20 nt, Human
ucagaauaaggcaggcauug

SEQ ID NO: 3465117 - RNA, 21 nt, Human
ucagaauaaggcaggcauuga

SEQ ID NO: 3465118 - RNA, 23 nt, Human
ucagaauagccacauuuggaaua

SEQ ID NO: 3465119 - RNA, 18 nt, Human
ucagaaucccuuaacagu

SEQ ID NO: 3465120 - RNA, 14 nt, Human
ucagaaucuaccca

SEQ ID NO: 3465121 - RNA, 19 nt, Human
ucagaaucucaaauaacua

SEQ ID NO: 3465122 - RNA, 18 nt, Human
ucagaaucugaauguaau

SEQ ID NO: 3465123 - RNA, 22 nt, Human
ucagaaucugaauguaauuugu

SEQ ID NO: 3465124 - RNA, 15 nt, Human
ucagaaucuuuccuu

SEQ ID NO: 3465125 - RNA, 14 nt, Human
ucagaauguaaaag

SEQ ID NO: 3465126 - RNA, 16 nt, Human
ucagaauuaaacuuuu

SEQ ID NO: 3465127 - RNA, 18 nt, Human
ucagaauuaaacuuuuaa

SEQ ID NO: 3465128 - RNA, 18 nt, Human
ucagaauuagcugcuucu

SEQ ID NO: 3465129 - RNA, 14 nt, Human
aaguaucaugcauu

SEQ ID NO: 3465130 - RNA, 15 nt, Human
aaguaucaugcauuc

SEQ ID NO: 3465131 - RNA, 16 nt, Human
aaguaucauggaaaua

SEQ ID NO: 3465132 - RNA, 17 nt, Human
aaguaucauggaaauau

SEQ ID NO: 3465133 - RNA, 23 nt, Human
aaguaucccuacuguaauuugug

SEQ ID NO: 3465134 - RNA, 21 nt, Human
aaguauccugagagcccagaa

SEQ ID NO: 3465135 - RNA, 15 nt, Human
aauaacaaaauggac

SEQ ID NO: 3465136 - RNA, 22 nt, Human
aauaacaaaugccaaauuaaaa

SEQ ID NO: 3465137 - RNA, 16 nt, Human
aauaacaagucgauga

SEQ ID NO: 3465138 - RNA, 13 nt, Human
aauaacaaugugc

SEQ ID NO: 3465139 - RNA, 20 nt, Human
aauaacacacauauaaacau

SEQ ID NO: 3465140 - RNA, 22 nt, Human
aauaacagaagaaaauagaauu

SEQ ID NO: 3465141 - RNA, 14 nt, Human
aauaacagauuucu

SEQ ID NO: 3465142 - RNA, 13 nt, Human
aauaacagcugca

SEQ ID NO: 3465143 - RNA, 21 nt, Human
aauaacaggcauuuguucacu

SEQ ID NO: 3465144 - RNA, 17 nt, Human
aauaacauaacaaauaa

SEQ ID NO: 3465145 - RNA, 22 nt, Human
aauaacauguaauuaaguacua

SEQ ID NO: 3465146 - RNA, 14 nt, Human
aauaacauuaccuu

SEQ ID NO: 3465147 - RNA, 20 nt, Human
aauaaccaaaugcaauguga

SEQ ID NO: 3465148 - RNA, 23 nt, Human
aauaaccaacccuucccugaaaa

SEQ ID NO: 3465149 - RNA, 17 nt, Human
aauaaccaaucuacaau

SEQ ID NO: 3465150 - RNA, 14 nt, Human
aauaaccacuuaaa

SEQ ID NO: 3465151 - RNA, 21 nt, Human
aauaaccacuuaaaaaauguc

SEQ ID NO: 3465152 - RNA, 18 nt, Human
aauaaccucaaagugacu

SEQ ID NO: 3465153 - RNA, 15 nt, Human
aauaacuacuguguu

SEQ ID NO: 3465154 - RNA, 16 nt, Human
aauaacuacuguguuc

SEQ ID NO: 3465155 - RNA, 17 nt, Human
aauaacuacuguguucc

SEQ ID NO: 3465156 - RNA, 18 nt, Human
aauaacuacuguguuccu

SEQ ID NO: 3465157 - RNA, 15 nt, Human
aauaacuagaacaaa

SEQ ID NO: 3465158 - RNA, 19 nt, Human
aauaacuaguguugcuugg

SEQ ID NO: 3465159 - RNA, 19 nt, Human
aauaacuccucauuguaaa

SEQ ID NO: 3465160 - RNA, 14 nt, Human
aauaacuccuccca

SEQ ID NO: 3465161 - RNA, 22 nt, Human
aauaacuccucccaggguuuua

SEQ ID NO: 3465162 - RNA, 16 nt, Human
aauaacugaauuugga

SEQ ID NO: 3465163 - RNA, 18 nt, Human
aauaacuggaaaacagaa

SEQ ID NO: 3465164 - RNA, 20 nt, Human
aauaacuggaacaaauuauu

SEQ ID NO: 3465165 - RNA, 15 nt, Human
aauaacuguaauuau

SEQ ID NO: 3465166 - RNA, 22 nt, Human
aauaacuguaauuauuugaaug

SEQ ID NO: 3465167 - RNA, 13 nt, Human
aauaacugugaag

SEQ ID NO: 3465168 - RNA, 14 nt, Human
aauaacugugaagu

SEQ ID NO: 3465169 - RNA, 12 nt, Human
aauaacugugua

SEQ ID NO: 3465170 - RNA, 13 nt, Human
aaguuugaacauu

SEQ ID NO: 3465171 - RNA, 18 nt, Human
aaguuugaauguuaaaua

SEQ ID NO: 3465172 - RNA, 12 nt, Human
aaguuugauaaa

SEQ ID NO: 3465173 - RNA, 20 nt, Human
aaguuugauaaauaguguua

SEQ ID NO: 3465174 - RNA, 12 nt, Human
aaguuugaucuu

SEQ ID NO: 3465175 - RNA, 15 nt, Human
aaguuugauuucauu

SEQ ID NO: 3465176 - RNA, 11 nt, Human
aaguuugcacu

SEQ ID NO: 3465177 - RNA, 20 nt, Human
aaguuugcacucaaaucuua

SEQ ID NO: 3465178 - RNA, 14 nt, Human
aaguuugcacugua

SEQ ID NO: 3465179 - RNA, 21 nt, Human
aaguuugcacuguaugcugga

SEQ ID NO: 3465180 - RNA, 15 nt, Human
aaguuugcuuagaaa

SEQ ID NO: 3465181 - RNA, 19 nt, Human
aaguuuggcaauaguuugc

SEQ ID NO: 3465182 - RNA, 20 nt, Human
aaguuuguccauuuguaaaa

SEQ ID NO: 3465183 - RNA, 21 nt, Human
aaguuuguguucuguuuguua

SEQ ID NO: 3465184 - RNA, 13 nt, Human
aaguuuuauauau

SEQ ID NO: 3465185 - RNA, 14 nt, Human
aaguuuuauauauu

SEQ ID NO: 3465186 - RNA, 16 nt, Human
aaguuuuauauauuau

SEQ ID NO: 3465187 - RNA, 21 nt, Human
aaguuuucccuugaggaaaca

SEQ ID NO: 3465188 - RNA, 13 nt, Human
aaguuuuccugag

SEQ ID NO: 3465189 - RNA, 13 nt, Human
aaguuuucuguag

SEQ ID NO: 3465190 - RNA, 22 nt, Human
aaguuuucuguagucauuuacu

SEQ ID NO: 3465191 - RNA, 12 nt, Human
aaguuuugaaaa

SEQ ID NO: 3465192 - RNA, 13 nt, Human
aaguuuugaaaag

SEQ ID NO: 3465193 - RNA, 18 nt, Human
aaguuuugaaaagcuauu

SEQ ID NO: 3465194 - RNA, 20 nt, Human
aaguuuugacaagcuggcuu

SEQ ID NO: 3465195 - RNA, 23 nt, Human
aaguuuugaguagauauuacuuu

SEQ ID NO: 3465196 - RNA, 16 nt, Human
aaguuuuguaaaagaa

SEQ ID NO: 3465197 - RNA, 11 nt, Human
aaguuuuguga

SEQ ID NO: 3465198 - RNA, 12 nt, Human
aaguuuuguugu

SEQ ID NO: 3465199 - RNA, 13 nt, Human
aaguuuuguugua

SEQ ID NO: 3465200 - RNA, 20 nt, Human
aaguuuuuauggcuuuugug

SEQ ID NO: 3465201 - RNA, 12 nt, Human
aaguuuuuguac

SEQ ID NO: 3465202 - RNA, 14 nt, Human
aaguuuuuguauua

SEQ ID NO: 3465203 - RNA, 23 nt, Human
aaguuuuuuugcugcugccucuu

SEQ ID NO: 3465204 - RNA, 14 nt, Human
aauaaaaaaaagaa

SEQ ID NO: 3465205 - RNA, 17 nt, Human
aauaaaaaaaagaaaaa

SEQ ID NO: 3465206 - RNA, 18 nt, Human
aauaaaaaaaagaaauga

SEQ ID NO: 3465207 - RNA, 17 nt, Human
aauaaaaaaagaaaaaa

SEQ ID NO: 3465208 - RNA, 17 nt, Human
aauaaaaaaugaaaaga

SEQ ID NO: 3465209 - RNA, 19 nt, Human
aauaaaaaauuaugacaau

SEQ ID NO: 3465210 - RNA, 21 nt, Human
aauaaaaaauuaugacaaugu

SEQ ID NO: 3465211 - RNA, 12 nt, Human
aauaaaaacaaa

SEQ ID NO: 3465212 - RNA, 14 nt, Human
aauaaaaaccaaga

SEQ ID NO: 3465213 - RNA, 19 nt, Human
aauaaaaacuauucgaaug

SEQ ID NO: 3465214 - RNA, 20 nt, Human
aauaguauuugagaguucua

SEQ ID NO: 3465215 - RNA, 23 nt, Human
aauaguauuugagaguucuaaau

SEQ ID NO: 3465216 - RNA, 17 nt, Human
aauagucaagaaaaauu

SEQ ID NO: 3465217 - RNA, 18 nt, Human
aauagucauuccaaauau

SEQ ID NO: 3465218 - RNA, 14 nt, Human
aauagucuagaugg

SEQ ID NO: 3465219 - RNA, 21 nt, Human
aauagucuagauggcuccucu

SEQ ID NO: 3465220 - RNA, 15 nt, Human
aauagucugugugaa

SEQ ID NO: 3465221 - RNA, 21 nt, Human
aauagugccgcaauaaacaua

SEQ ID NO: 3465222 - RNA, 22 nt, Human
aauagugcucgcuuucuaugua

SEQ ID NO: 3465223 - RNA, 21 nt, Human
aauagugguucuuggaaaaau

SEQ ID NO: 3465224 - RNA, 14 nt, Human
aauaguguccuaug

SEQ ID NO: 3465225 - RNA, 15 nt, Human
aauagugugaaauau

SEQ ID NO: 3465226 - RNA, 17 nt, Human
aauagugugaaauauau

SEQ ID NO: 3465227 - RNA, 13 nt, Human
aauaguguguucu

SEQ ID NO: 3465228 - RNA, 14 nt, Human
aauauuguuuuucu

SEQ ID NO: 3465229 - RNA, 14 nt, Human
aauauuuaaaaaug

SEQ ID NO: 3465230 - RNA, 15 nt, Human
aauauuuaaaaaugu

SEQ ID NO: 3465231 - RNA, 17 nt, Human
aauauuuaaaaaugucu

SEQ ID NO: 3465232 - RNA, 15 nt, Human
aauauuuaaacaugg

SEQ ID NO: 3465233 - RNA, 12 nt, Human
aauauuuaagac

SEQ ID NO: 3465234 - RNA, 22 nt, Human
aauauuuaaggagauguaagag

SEQ ID NO: 3465235 - RNA, 13 nt, Human
aauauuuaaucuu

SEQ ID NO: 3465236 - RNA, 17 nt, Human
aauauuuacaauguauu

SEQ ID NO: 3465237 - RNA, 19 nt, Human
aauauuuacaauguauuaa

SEQ ID NO: 3465238 - RNA, 14 nt, Human
aauauuuagcaaau

SEQ ID NO: 3465239 - RNA, 20 nt, Human
aauauuuagcaaauaauuuc

SEQ ID NO: 3465240 - RNA, 12 nt, Human
aauauuuagugu

SEQ ID NO: 3465241 - RNA, 13 nt, Human
aauauuuauaaaa

SEQ ID NO: 3465242 - RNA, 19 nt, Human
aauauuuauaaaacuucuc

SEQ ID NO: 3465243 - RNA, 22 nt, Human
aauauuuauaaagaauguuucu

SEQ ID NO: 3465244 - RNA, 12 nt, Human
aauauuuauaac

SEQ ID NO: 3465245 - RNA, 15 nt, Human
aauauuuauagguca

SEQ ID NO: 3465246 - RNA, 18 nt, Human
aauauuuauauuucacua

SEQ ID NO: 3465247 - RNA, 12 nt, Human
aauauuuaugga

SEQ ID NO: 3465248 - RNA, 11 nt, Human
aauauuuauua

SEQ ID NO: 3465249 - RNA, 12 nt, Human
aauauuuauuaa

SEQ ID NO: 3465250 - RNA, 12 nt, Human
aauauuuauuac

SEQ ID NO: 3465251 - RNA, 14 nt, Human
aauauuuauuaccu

SEQ ID NO: 3465252 - RNA, 17 nt, Human
aauauuuauuaccucug

SEQ ID NO: 3465253 - RNA, 18 nt, Human
aauauuuauuaccucuga

SEQ ID NO: 3465254 - RNA, 19 nt, Human
aauauuuauuauuuucacc

SEQ ID NO: 3465255 - RNA, 20 nt, Human
aauauuuauucauuauuugu

SEQ ID NO: 3465256 - RNA, 22 nt, Human
aauauuuauucauuauuuguca

SEQ ID NO: 3465257 - RNA, 13 nt, Human
aauauuuauugcu

SEQ ID NO: 3465258 - RNA, 16 nt, Human
aauauuuauugcuuua

SEQ ID NO: 3465259 - RNA, 14 nt, Human
aauauuuauuguau

SEQ ID NO: 3465260 - RNA, 19 nt, Human
aauauuuauuuuaauaaug

SEQ ID NO: 3465261 - RNA, 13 nt, Human
aauauuuccauau

SEQ ID NO: 3465262 - RNA, 21 nt, Human
aauauuuccuuaaacugugug

SEQ ID NO: 3465263 - RNA, 14 nt, Human
aauauuucuauuga

SEQ ID NO: 3465264 - RNA, 14 nt, Human
aauauuugaaucuu

SEQ ID NO: 3465265 - RNA, 16 nt, Human
aauauuugaaucuugu

SEQ ID NO: 3465266 - RNA, 14 nt, Human
aauauuugaaugua

SEQ ID NO: 3465267 - RNA, 23 nt, Human
aauauuugaauguaugcuucaua

SEQ ID NO: 3465268 - RNA, 16 nt, Human
aauauuugacuugcau

SEQ ID NO: 3465269 - RNA, 22 nt, Human
aauauuugacuugcaugaagag

SEQ ID NO: 3465270 - RNA, 12 nt, Human
aauauuugcuga

SEQ ID NO: 3465271 - RNA, 12 nt, Human
aauauuuggaau

SEQ ID NO: 3465272 - RNA, 12 nt, Human
aauauuuguaca

SEQ ID NO: 3465273 - RNA, 19 nt, Human
aauauuugucgauauuucc

SEQ ID NO: 3465274 - RNA, 20 nt, Human
aauauuugucgauauuucca

SEQ ID NO: 3465275 - RNA, 16 nt, Human
aauauuuuaaaaucag

SEQ ID NO: 3465276 - RNA, 13 nt, Human
aauauuuuaagua

SEQ ID NO: 3465277 - RNA, 17 nt, Human
aauauuuuaucuuuccu

SEQ ID NO: 3465278 - RNA, 20 nt, Human
aauauuuuauucaagguaaa

SEQ ID NO: 3465279 - RNA, 12 nt, Human
aauauuuucaac

SEQ ID NO: 3465280 - RNA, 14 nt, Human
aauauuuucaguaa

SEQ ID NO: 3465281 - RNA, 19 nt, Human
aauauuuucucuguacuuu

SEQ ID NO: 3465282 - RNA, 14 nt, Human
aauauuuucugugu

SEQ ID NO: 3465283 - RNA, 20 nt, Human
aauauuuucuguguguuccu

SEQ ID NO: 3465284 - RNA, 21 nt, Human
aauauuuucuuuaaugcuuuu

SEQ ID NO: 3465285 - RNA, 15 nt, Human
aauauuuugaaucaa

SEQ ID NO: 3465286 - RNA, 15 nt, Human
aauauuuugauaaua

SEQ ID NO: 3465287 - RNA, 20 nt, Human
aauauuuugauaauaaauug

SEQ ID NO: 3465288 - RNA, 18 nt, Human
aauauuuugauaauaaua

SEQ ID NO: 3465289 - RNA, 20 nt, Human
aauauuuugaucuucaacaa

SEQ ID NO: 3465290 - RNA, 12 nt, Human
aauauuuuguau

SEQ ID NO: 3465291 - RNA, 19 nt, Human
aauauuuuguauuauugcu

SEQ ID NO: 3465292 - RNA, 15 nt, Human
aauauuuuuaaaaga

SEQ ID NO: 3465293 - RNA, 14 nt, Human
aauauuuuuagaua

SEQ ID NO: 3465294 - RNA, 22 nt, Human
aauauuuuuauagauuugaccu

SEQ ID NO: 3465295 - RNA, 20 nt, Human
aauauuuuuauauuuccuuu

SEQ ID NO: 3465296 - RNA, 22 nt, Human
aauauuuuuauauuuccuuuau

SEQ ID NO: 3465297 - RNA, 13 nt, Human
aauauuuuucuua

SEQ ID NO: 3465298 - RNA, 17 nt, Human
aauauuuuuuauauaua

SEQ ID NO: 3465299 - RNA, 17 nt, Human
aaucaaaaauugaagag

SEQ ID NO: 3465300 - RNA, 14 nt, Human
aaucaaaacaagug

SEQ ID NO: 3465301 - RNA, 19 nt, Human
aaucaaaagggccaaagaa

SEQ ID NO: 3465302 - RNA, 20 nt, Human
aaucaaaagggccaaagaac

SEQ ID NO: 3465303 - RNA, 23 nt, Human
aaucaaaagggccaaagaaccaa

SEQ ID NO: 3465304 - RNA, 13 nt, Human
aaucaaaauaugu

SEQ ID NO: 3465305 - RNA, 12 nt, Human
aaucaaaaucuc

SEQ ID NO: 3465306 - RNA, 16 nt, Human
aaucaaagacauggaa

SEQ ID NO: 3465307 - RNA, 13 nt, Human
aaucaaauaauac

SEQ ID NO: 3465308 - RNA, 13 nt, Human
aaucaaauguaaa

SEQ ID NO: 3465309 - RNA, 12 nt, Human
aaucaacagaag

SEQ ID NO: 3465310 - RNA, 14 nt, Human
aaucaacagaagca

SEQ ID NO: 3465311 - RNA, 15 nt, Human
aaucaacagaagcau

SEQ ID NO: 3465312 - RNA, 16 nt, Human
aaucaacagaagcauu

SEQ ID NO: 3465313 - RNA, 21 nt, Human
aaucaacauggcuacuugcuu

SEQ ID NO: 3465314 - RNA, 16 nt, Human
aaucaacuaguauuug

SEQ ID NO: 3465315 - RNA, 14 nt, Human
aaucaacugaaagu

SEQ ID NO: 3465316 - RNA, 17 nt, Human
aaucaacuugcuuauca

SEQ ID NO: 3465317 - RNA, 18 nt, Human
aaucaacuugcuuaucaa

SEQ ID NO: 3465318 - RNA, 21 nt, Human
aaucaacuugcuuaucaacuu

SEQ ID NO: 3465319 - RNA, 17 nt, Human
aaucaagagcugcccuc

SEQ ID NO: 3465320 - RNA, 17 nt, Human
aaucaagauaaaggaca

SEQ ID NO: 3465321 - RNA, 18 nt, Human
aaucaagguuauaauuuu

SEQ ID NO: 3465322 - RNA, 21 nt, Human
aaucaagucuguuuacugcaa

SEQ ID NO: 3465323 - RNA, 23 nt, Human
aaucaaguuggcuucuaaucaaa

SEQ ID NO: 3465324 - RNA, 15 nt, Human
aaucaaguuguaacu

SEQ ID NO: 3465325 - RNA, 23 nt, Human
aaucaaguuuuaagugaaaguga

SEQ ID NO: 3465326 - RNA, 12 nt, Human
aaucaauaauau

SEQ ID NO: 3465327 - RNA, 22 nt, Human
aaucaauccagcgguucucaaa

SEQ ID NO: 3465328 - RNA, 20 nt, Human
aaucaaucuugcauguaacg

SEQ ID NO: 3465329 - RNA, 16 nt, Human
aaucaaugaauauuga

SEQ ID NO: 3465330 - RNA, 19 nt, Human
aaucaaugaauauugaagu

SEQ ID NO: 3465331 - RNA, 22 nt, Human
aaucaaugaauauugaaguuuc

SEQ ID NO: 3465332 - RNA, 22 nt, Human
aaucaaugcuauaacuauguug

SEQ ID NO: 3465333 - RNA, 17 nt, Human
aaucaaugucacuuaaa

SEQ ID NO: 3465334 - RNA, 23 nt, Human
aaucaauguucacgcaacuugaa

SEQ ID NO: 3465335 - RNA, 22 nt, Human
aaucaauuuaaacccauuuuag

SEQ ID NO: 3465336 - RNA, 15 nt, Human
aaucacaauuuuuaa

SEQ ID NO: 3465337 - RNA, 19 nt, Human
aaucacacugucuucugau

SEQ ID NO: 3465338 - RNA, 13 nt, Human
aaucacagaauca

SEQ ID NO: 3465339 - RNA, 11 nt, Human
aaucacauccu

SEQ ID NO: 3465340 - RNA, 16 nt, Human
aaucacauccuggccu

SEQ ID NO: 3465341 - RNA, 19 nt, Human
aaucacauucgaguguuuc

SEQ ID NO: 3465342 - RNA, 14 nt, Human
aaucaccauguaag

SEQ ID NO: 3465343 - RNA, 17 nt, Human
aaucacgaggucaggag

SEQ ID NO: 3465344 - RNA, 16 nt, Human
aaucacgcuuuccuga

SEQ ID NO: 3465345 - RNA, 14 nt, Human
aaucacgcuuuuug

SEQ ID NO: 3465346 - RNA, 17 nt, Human
aaucacgcuuuuugaaa

SEQ ID NO: 3465347 - RNA, 21 nt, Human
aaucacguaaagcuagaaaug

SEQ ID NO: 3465348 - RNA, 17 nt, Human
aaucacuaaaaaugauc

SEQ ID NO: 3465349 - RNA, 16 nt, Human
aaucacucagagcagu

SEQ ID NO: 3465350 - RNA, 20 nt, Human
aaucacucuaauuaauugua

SEQ ID NO: 3465351 - RNA, 18 nt, Human
aaucacucuguccuugga

SEQ ID NO: 3465352 - RNA, 21 nt, Human
aaucacuguguauauuugauu

SEQ ID NO: 3465353 - RNA, 16 nt, Human
aaucacuguuuuuaga

SEQ ID NO: 3465354 - RNA, 18 nt, Human
aaucacuuaacauuccua

SEQ ID NO: 3465355 - RNA, 14 nt, Human
aaucacuugaaccc

SEQ ID NO: 3465356 - RNA, 11 nt, Human
aaucagaacuc

SEQ ID NO: 3465357 - RNA, 23 nt, Human
aaucagaacucaaauggggccag

SEQ ID NO: 3465358 - RNA, 20 nt, Human
aaucagagaccuuccagaaa

SEQ ID NO: 3465359 - RNA, 16 nt, Human
aaucagauagauauuc

SEQ ID NO: 3465360 - RNA, 14 nt, Human
aaucagaucauuuc

SEQ ID NO: 3465361 - RNA, 15 nt, Human
aaucagauuuuccug

SEQ ID NO: 3465362 - RNA, 18 nt, Human
aaucagauuuuccugugg

SEQ ID NO: 3465363 - RNA, 20 nt, Human
aaucagcacagauaaaaagu

SEQ ID NO: 3465364 - RNA, 15 nt, Human
aaucagcacugaaaa

SEQ ID NO: 3465365 - RNA, 17 nt, Human
aaucagcacugaaaaua

SEQ ID NO: 3465366 - RNA, 12 nt, Human
aaucagcauucu

SEQ ID NO: 3465367 - RNA, 19 nt, Human
aaucagcauucucacuccu

SEQ ID NO: 3465368 - RNA, 15 nt, Human
aaucagccaaguuuu

SEQ ID NO: 3465369 - RNA, 14 nt, Human
aaucagccaauuau

SEQ ID NO: 3465370 - RNA, 12 nt, Human
aaucagccucuu

SEQ ID NO: 3465371 - RNA, 13 nt, Human
aaucagccugcuc

SEQ ID NO: 3465372 - RNA, 18 nt, Human
aaucagccugcuccagcu

SEQ ID NO: 3465373 - RNA, 19 nt, Human
aaucagccugcuccagcug

SEQ ID NO: 3465374 - RNA, 15 nt, Human
aaucagcuauuuugu

SEQ ID NO: 3465375 - RNA, 11 nt, Human
aaucagcugcu

SEQ ID NO: 3465376 - RNA, 19 nt, Human
aaucagggaggucauuuug

SEQ ID NO: 3465377 - RNA, 18 nt, Human
aaucagguuuucuuuuaa

SEQ ID NO: 3465378 - RNA, 15 nt, Human
aaucaguauaaacaa

SEQ ID NO: 3465379 - RNA, 17 nt, Human
aaucaguauaaacaaag

SEQ ID NO: 3465380 - RNA, 13 nt, Human
aaucaguccccuc

SEQ ID NO: 3465381 - RNA, 19 nt, Human
aaucagugggcaggauaaa

SEQ ID NO: 3465382 - RNA, 21 nt, Human
aaucaguguagccccaagaag

SEQ ID NO: 3465383 - RNA, 18 nt, Human
aaucagugugucuaaauu

SEQ ID NO: 3465384 - RNA, 22 nt, Human
aaucagugugucuaaauuugaa

SEQ ID NO: 3465385 - RNA, 19 nt, Human
aaucaguguuugauugccc

SEQ ID NO: 3465386 - RNA, 19 nt, Human
aaucaguucauuagaaaua

SEQ ID NO: 3465387 - RNA, 14 nt, Human
aaucaguuuuccuc

SEQ ID NO: 3465388 - RNA, 17 nt, Human
aaucauaaacugugugc

SEQ ID NO: 3465389 - RNA, 20 nt, Human
aaucauaagauauuuuucau

SEQ ID NO: 3465390 - RNA, 12 nt, Human
aaucauaaguau

SEQ ID NO: 3465391 - RNA, 15 nt, Human
aaucauaaguauuug

SEQ ID NO: 3465392 - RNA, 20 nt, Human
aaucauacuccuaugcuuua

SEQ ID NO: 3465393 - RNA, 20 nt, Human
aaucauagcugguucacacu

SEQ ID NO: 3465394 - RNA, 19 nt, Human
aaucauaguacucuuugua

SEQ ID NO: 3465395 - RNA, 22 nt, Human
aaucauaguacucuuuguagca

SEQ ID NO: 3465396 - RNA, 12 nt, Human
aaucauauaaau

SEQ ID NO: 3465397 - RNA, 17 nt, Human
aaucauauaaauagaau

SEQ ID NO: 3465398 - RNA, 21 nt, Human
aaucauauaauaaauguacau

SEQ ID NO: 3465399 - RNA, 15 nt, Human
aaucauaugauucug

SEQ ID NO: 3465400 - RNA, 17 nt, Human
aaucauaugugaucugu

SEQ ID NO: 3465401 - RNA, 16 nt, Human
aaucauauugaugaaa

SEQ ID NO: 3465402 - RNA, 15 nt, Human
aaucaucaagagaau

SEQ ID NO: 3465403 - RNA, 23 nt, Human
aaucaucaagagaauuuggggcu

SEQ ID NO: 3465404 - RNA, 12 nt, Human
aaucaucaagua

SEQ ID NO: 3465405 - RNA, 15 nt, Human
aaucaucaagucuuu

SEQ ID NO: 3465406 - RNA, 17 nt, Human
aaucaucgaaaauucau

SEQ ID NO: 3465407 - RNA, 14 nt, Human
aaucaucuaaguca

SEQ ID NO: 3465408 - RNA, 20 nt, Human
aaucaucuauuuugaugcag

SEQ ID NO: 3465409 - RNA, 15 nt, Human
aaucaucugugugaa

SEQ ID NO: 3465410 - RNA, 15 nt, Human
aaucaucuuugugaa

SEQ ID NO: 3465411 - RNA, 16 nt, Human
aaucaugaaauuacuu

SEQ ID NO: 3465412 - RNA, 22 nt, Human
aaucaugaauguguaacacagu

SEQ ID NO: 3465413 - RNA, 12 nt, Human
aaucaugaauua

SEQ ID NO: 3465414 - RNA, 17 nt, Human
aaucaugaauuaguuuu

SEQ ID NO: 3465415 - RNA, 23 nt, Human
aaucaugaauuaguuuuauaugc

SEQ ID NO: 3465416 - RNA, 13 nt, Human
aaucaugagccug

SEQ ID NO: 3465417 - RNA, 17 nt, Human
aaucaugccaguauuuu

SEQ ID NO: 3465418 - RNA, 18 nt, Human
aaucauggaaugguuaua

SEQ ID NO: 3465419 - RNA, 16 nt, Human
aaucauguacauuucu

SEQ ID NO: 3465420 - RNA, 13 nt, Human
aaucauguaguau

SEQ ID NO: 3465421 - RNA, 18 nt, Human
aaucauguaguaucaaau

SEQ ID NO: 3465422 - RNA, 23 nt, Human
aaucauguaguaucaaauauuag

SEQ ID NO: 3465423 - RNA, 22 nt, Human
aaucaugucagucugcuuagaa

SEQ ID NO: 3465424 - RNA, 17 nt, Human
aaucauguccauacacu

SEQ ID NO: 3465425 - RNA, 13 nt, Human
accagggccuuuu

SEQ ID NO: 3465426 - RNA, 23 nt, Human
accagggcgaacgacaauagcuu

SEQ ID NO: 3465427 - RNA, 17 nt, Human
accagggguuucucgca

SEQ ID NO: 3465428 - RNA, 21 nt, Human
accaggguugaccccagagga

SEQ ID NO: 3465429 - RNA, 15 nt, Human
accaggguuuaucuu

SEQ ID NO: 3465430 - RNA, 17 nt, Human
accaguaaaguguaaca

SEQ ID NO: 3465431 - RNA, 15 nt, Human
accaguauuguacaa

SEQ ID NO: 3465432 - RNA, 22 nt, Human
accaguauuguacaaaguauua

SEQ ID NO: 3465433 - RNA, 17 nt, Human
accaguccccccacccu

SEQ ID NO: 3465434 - RNA, 12 nt, Human
accagucccugu

SEQ ID NO: 3465435 - RNA, 13 nt, Human
accagucccuguc

SEQ ID NO: 3465436 - RNA, 23 nt, Human
accagucugaaguuucauuuaug

SEQ ID NO: 3465437 - RNA, 19 nt, Human
acccucggggauguguccu

SEQ ID NO: 3465438 - RNA, 15 nt, Human
acccucguggacacc

SEQ ID NO: 3465439 - RNA, 18 nt, Human
acccucguggacaccugc

SEQ ID NO: 3465440 - RNA, 20 nt, Human
acccucguggccuuccccag

SEQ ID NO: 3465441 - RNA, 14 nt, Human
acccucucaaacua

SEQ ID NO: 3465442 - RNA, 16 nt, Human
acccucucagcuccag

SEQ ID NO: 3465443 - RNA, 16 nt, Human
acccucuccaccccau

SEQ ID NO: 3465444 - RNA, 15 nt, Human
acccucucccaggac

SEQ ID NO: 3465445 - RNA, 21 nt, Human
acccucugaaugguccagggu

SEQ ID NO: 3465446 - RNA, 15 nt, Human
acccucugacccuag

SEQ ID NO: 3465447 - RNA, 13 nt, Human
acccucugccacc

SEQ ID NO: 3465448 - RNA, 19 nt, Human
acccucugccaccagagac

SEQ ID NO: 3465449 - RNA, 16 nt, Human
acccucugcugaagac

SEQ ID NO: 3465450 - RNA, 12 nt, Human
acccucugggaa

SEQ ID NO: 3465451 - RNA, 13 nt, Human
acccucugggaac

SEQ ID NO: 3465452 - RNA, 14 nt, Human
acccucuguuccuu

SEQ ID NO: 3465453 - RNA, 15 nt, Human
acccucuuccuguga

SEQ ID NO: 3465454 - RNA, 17 nt, Human
acccucuuccugugauc

SEQ ID NO: 3465455 - RNA, 20 nt, Human
acccucuuccugugauccac

SEQ ID NO: 3465456 - RNA, 22 nt, Human
acccucuugcccauccugacug

SEQ ID NO: 3465457 - RNA, 20 nt, Human
acccucuuugcugcagagaa

SEQ ID NO: 3465458 - RNA, 18 nt, Human
acccugaaggggccauga

SEQ ID NO: 3465459 - RNA, 12 nt, Human
acccugagccgg

SEQ ID NO: 3465460 - RNA, 17 nt, Human
acccugagcugaggcag

SEQ ID NO: 3465461 - RNA, 22 nt, Human
acccugagcugaggcagcagug

SEQ ID NO: 3465462 - RNA, 23 nt, Human
acccugagcugaggcagcagugu

SEQ ID NO: 3465463 - RNA, 19 nt, Human
acccugaggagucugaggu

SEQ ID NO: 3465464 - RNA, 22 nt, Human
acccugaggagucugagguccu

SEQ ID NO: 3465465 - RNA, 23 nt, Human
acccugaggagucugagguccug

SEQ ID NO: 3465466 - RNA, 11 nt, Human
acccugaggcc

SEQ ID NO: 3465467 - RNA, 14 nt, Human
acccugaggcccag

SEQ ID NO: 3465468 - RNA, 16 nt, Human
acccugaggcccagag

SEQ ID NO: 3465469 - RNA, 19 nt, Human
acccugaggcccagagggc

SEQ ID NO: 3465470 - RNA, 18 nt, Human
acccugaggccucuggaa

SEQ ID NO: 3465471 - RNA, 14 nt, Human
acccugaggucagg

SEQ ID NO: 3465472 - RNA, 19 nt, Human
acccugaguugcuuuucag

SEQ ID NO: 3465473 - RNA, 20 nt, Human
aaucuagaagaaaugaaauu

SEQ ID NO: 3465474 - RNA, 13 nt, Human
aaucuagaagagu

SEQ ID NO: 3465475 - RNA, 14 nt, Human
aaucuagaggaaaa

SEQ ID NO: 3465476 - RNA, 22 nt, Human
aaucuagauaucgacuuguuuu

SEQ ID NO: 3465477 - RNA, 15 nt, Human
aaucuaggaaaauua

SEQ ID NO: 3465478 - RNA, 23 nt, Human
aaucuaggcaugaagagcaaaaa

SEQ ID NO: 3465479 - RNA, 18 nt, Human
aaucuaguuuacagaaaa

SEQ ID NO: 3465480 - RNA, 16 nt, Human
aaucuauagaaagugu

SEQ ID NO: 3465481 - RNA, 17 nt, Human
aaucuauagaaaguguu

SEQ ID NO: 3465482 - RNA, 23 nt, Human
aaucuauagaaaguguucuguua

SEQ ID NO: 3465483 - RNA, 17 nt, Human
aaucuaugaaguauaua

SEQ ID NO: 3465484 - RNA, 19 nt, Human
aaucuaugaaguauauaau

SEQ ID NO: 3465485 - RNA, 16 nt, Human
aaucuauuauacugua

SEQ ID NO: 3465486 - RNA, 19 nt, Human
aaucuauucagacaagcaa

SEQ ID NO: 3465487 - RNA, 16 nt, Human
aaucuauucuguguug

SEQ ID NO: 3465488 - RNA, 21 nt, Human
aaucuauugggauuuucuaca

SEQ ID NO: 3465489 - RNA, 16 nt, Human
aaucuauuggguucau

SEQ ID NO: 3465490 - RNA, 20 nt, Human
aaucuauuuauuaauauuua

SEQ ID NO: 3465491 - RNA, 23 nt, Human
aaucuauuuauuggacaugucca

SEQ ID NO: 3465492 - RNA, 17 nt, Human
aaucuauuucacuuauu

SEQ ID NO: 3465493 - RNA, 12 nt, Human
aaucuauuucua

SEQ ID NO: 3465494 - RNA, 17 nt, Human
aaucuauuuuguaacuu

SEQ ID NO: 3465495 - RNA, 13 nt, Human
aaucuauuuuucc

SEQ ID NO: 3465496 - RNA, 12 nt, Human
aaucucaaaauu

SEQ ID NO: 3465497 - RNA, 14 nt, Human
aaucucaaaauuag

SEQ ID NO: 3465498 - RNA, 15 nt, Human
aaucucaaauaacua

SEQ ID NO: 3465499 - RNA, 22 nt, Human
aaucucaacaugucuccuacug

SEQ ID NO: 3465500 - RNA, 19 nt, Human
aaucucaaugaagccagcu

SEQ ID NO: 3465501 - RNA, 13 nt, Human
aaucucaccccau

SEQ ID NO: 3465502 - RNA, 15 nt, Human
aaucucagugcuuuc

SEQ ID NO: 3465503 - RNA, 17 nt, Human
aaucucaucucagugaa

SEQ ID NO: 3465504 - RNA, 13 nt, Human
aaucuccaaaaua

SEQ ID NO: 3465505 - RNA, 15 nt, Human
aaucuccaguauucu

SEQ ID NO: 3465506 - RNA, 16 nt, Human
aaucucccaugugcau

SEQ ID NO: 3465507 - RNA, 21 nt, Human
aaucuccuauuuuuuuaaaau

SEQ ID NO: 3465508 - RNA, 18 nt, Human
aaucuccucuuuuaucuu

SEQ ID NO: 3465509 - RNA, 16 nt, Human
aaucucguuucaaaaa

SEQ ID NO: 3465510 - RNA, 18 nt, Human
aaucucguuucaaaaaca

SEQ ID NO: 3465511 - RNA, 15 nt, Human
aaucucuacaaaccc

SEQ ID NO: 3465512 - RNA, 16 nt, Human
aaucucuccacuuuca

SEQ ID NO: 3465513 - RNA, 18 nt, Human
aaucucucccuccucagu

SEQ ID NO: 3465514 - RNA, 20 nt, Human
aaucucucgguuccacgucc

SEQ ID NO: 3465515 - RNA, 16 nt, Human
aaucucucugcagcug

SEQ ID NO: 3465516 - RNA, 17 nt, Human
aaucucucugcagcugc

SEQ ID NO: 3465517 - RNA, 18 nt, Human
aaucucucugcagcugcc

SEQ ID NO: 3465518 - RNA, 13 nt, Human
aaucucugggggc

SEQ ID NO: 3465519 - RNA, 13 nt, Human
aaucucuguaaag

SEQ ID NO: 3465520 - RNA, 21 nt, Human
aaucucuguuauguacuguac

SEQ ID NO: 3465521 - RNA, 15 nt, Human
aaucucuucauuauu

SEQ ID NO: 3465522 - RNA, 18 nt, Human
aaucucuucauuauucuc

SEQ ID NO: 3465523 - RNA, 16 nt, Human
aaucucuucuguguuu

SEQ ID NO: 3465524 - RNA, 17 nt, Human
aaucucuuuuuguuugc

SEQ ID NO: 3465525 - RNA, 18 nt, Human
aaucucuuuuuguuugcc

SEQ ID NO: 3465526 - RNA, 15 nt, Human
aaucugaagauuguu

SEQ ID NO: 3465527 - RNA, 14 nt, Human
aaucugaauguaau

SEQ ID NO: 3465528 - RNA, 16 nt, Human
aaucugaauguaauuu

SEQ ID NO: 3465529 - RNA, 12 nt, Human
aaucugacccag

SEQ ID NO: 3465530 - RNA, 13 nt, Human
aaucugacccagu

SEQ ID NO: 3465531 - RNA, 14 nt, Human
aaucugacccagug

SEQ ID NO: 3465532 - RNA, 18 nt, Human
aaucugagggaaauguuu

SEQ ID NO: 3465533 - RNA, 22 nt, Human
aaucugauggccuuaauuuccu

SEQ ID NO: 3465534 - RNA, 17 nt, Human
aaucugauggcuucucc

SEQ ID NO: 3465535 - RNA, 22 nt, Human
aaucugauuuguuuuccucuua

SEQ ID NO: 3465536 - RNA, 13 nt, Human
aaucugauuuuua

SEQ ID NO: 3465537 - RNA, 16 nt, Human
aaucugcaaagcaugu

SEQ ID NO: 3465538 - RNA, 21 nt, Human
aaucugcaaagcauguuuugc

SEQ ID NO: 3465539 - RNA, 15 nt, Human
aaucugcaauucaaa

SEQ ID NO: 3465540 - RNA, 19 nt, Human
aaucugcaauucaaaaguu

SEQ ID NO: 3465541 - RNA, 14 nt, Human
aaucugcagaagga

SEQ ID NO: 3465542 - RNA, 17 nt, Human
aaucugcauuauuggaa

SEQ ID NO: 3465543 - RNA, 20 nt, Human
aaucugcauuuagcacaaaa

SEQ ID NO: 3465544 - RNA, 19 nt, Human
aaucugcuaccaaaacagu

SEQ ID NO: 3465545 - RNA, 24 nt, Human
aaucuggaccccaucugugaauaa

SEQ ID NO: 3465546 - RNA, 15 nt, Human
aaucuggacuccucu

SEQ ID NO: 3465547 - RNA, 14 nt, Human
aaucuggagaccag

SEQ ID NO: 3465548 - RNA, 19 nt, Human
aaucuggagagcuagaacc

SEQ ID NO: 3465549 - RNA, 21 nt, Human
aaucuggaugccucauuaugu

SEQ ID NO: 3465550 - RNA, 17 nt, Human
aaucuggauucauauuu

SEQ ID NO: 3465551 - RNA, 19 nt, Human
aaucuggauucauauuuaa

SEQ ID NO: 3465552 - RNA, 19 nt, Human
aaucuggucuuguuagaaa

SEQ ID NO: 3465553 - RNA, 19 nt, Human
aaucauguccauacacuuu

SEQ ID NO: 3465554 - RNA, 15 nt, Human
aaucaugugaacccg

SEQ ID NO: 3465555 - RNA, 16 nt, Human
aaucaugugaacccgg

SEQ ID NO: 3465556 - RNA, 22 nt, Human
aaucauguuaugauaaaaaauu

SEQ ID NO: 3465557 - RNA, 23 nt, Human
aaucauguuaugauaaaaaauuu

SEQ ID NO: 3465558 - RNA, 15 nt, Human
aaucauuagguguga

SEQ ID NO: 3465559 - RNA, 17 nt, Human
aaucauuaggugugacu

SEQ ID NO: 3465560 - RNA, 23 nt, Human
aaucauuaggugugacugaauuu

SEQ ID NO: 3465561 - RNA, 14 nt, Human
aaucauucagaaau

SEQ ID NO: 3465562 - RNA, 15 nt, Human
aaucauucagaaaug

SEQ ID NO: 3465563 - RNA, 19 nt, Human
aaucauucagaaauguuga

SEQ ID NO: 3465564 - RNA, 16 nt, Human
aaucauugaaguauuu

SEQ ID NO: 3465565 - RNA, 20 nt, Human
aaucauugcugaaaauggua

SEQ ID NO: 3465566 - RNA, 12 nt, Human
aaucauuguaca

SEQ ID NO: 3465567 - RNA, 17 nt, Human
aaucauuguccagagcu

SEQ ID NO: 3465568 - RNA, 12 nt, Human
aaucauuguugc

SEQ ID NO: 3465569 - RNA, 22 nt, Human
aaucauuguuuugaauauuacu

SEQ ID NO: 3465570 - RNA, 12 nt, Human
aaucauuucuau

SEQ ID NO: 3465571 - RNA, 19 nt, Human
aaucauuucuauuucuccu

SEQ ID NO: 3465572 - RNA, 16 nt, Human
aaucauuucucacugu

SEQ ID NO: 3465573 - RNA, 21 nt, Human
aaucauuucuugggcccuccu

SEQ ID NO: 3465574 - RNA, 22 nt, Human
aaucauuucuugggcccuccug

SEQ ID NO: 3465575 - RNA, 14 nt, Human
aaucauuugcuuuu

SEQ ID NO: 3465576 - RNA, 22 nt, Human
aaucauuuggguuaauauggcu

SEQ ID NO: 3465577 - RNA, 17 nt, Human
aaucauuuguuuaaaaa

SEQ ID NO: 3465578 - RNA, 22 nt, Human
aaucauuuguuuacauuugaug

SEQ ID NO: 3465579 - RNA, 19 nt, Human
aaucauuuuaauuauuauu

SEQ ID NO: 3465580 - RNA, 19 nt, Human
aaucauuuuaggaaaggau

SEQ ID NO: 3465581 - RNA, 13 nt, Human
aaucauuuucauu

SEQ ID NO: 3465582 - RNA, 22 nt, Human
aaucauuuuuuauauauaugca

SEQ ID NO: 3465583 - RNA, 24 nt, Human
aaucauuuuuuauauauaugcaua

SEQ ID NO: 3465584 - RNA, 15 nt, Human
aauccaaaagaaaaa

SEQ ID NO: 3465585 - RNA, 21 nt, Human
aauccaaauauuguuaaggga

SEQ ID NO: 3465586 - RNA, 13 nt, Human
aauccaaauggcg

SEQ ID NO: 3465587 - RNA, 17 nt, Human
aauccaacccaugauga

SEQ ID NO: 3465588 - RNA, 18 nt, Human
aauccaagccuccacagc

SEQ ID NO: 3465589 - RNA, 23 nt, Human
aauccaagccuccacagcgaggg

SEQ ID NO: 3465590 - RNA, 13 nt, Human
aauccaagcuccc

SEQ ID NO: 3465591 - RNA, 17 nt, Human
aauccaagcucccugcc

SEQ ID NO: 3465592 - RNA, 22 nt, Human
aauccaagcucccugccccaaa

SEQ ID NO: 3465593 - RNA, 23 nt, Human
aauccaaguagauaggaagaaag

SEQ ID NO: 3465594 - RNA, 23 nt, Human
aauccaaucagagaccaggcccu

SEQ ID NO: 3465595 - RNA, 15 nt, Human
aauccacauuucuaa

SEQ ID NO: 3465596 - RNA, 12 nt, Human
aauccacccauc

SEQ ID NO: 3465597 - RNA, 19 nt, Human
aauccaccugccucggccu

SEQ ID NO: 3465598 - RNA, 19 nt, Human
aauccagacccggcugcgu

SEQ ID NO: 3465599 - RNA, 21 nt, Human
aauccagauggugggaugugg

SEQ ID NO: 3465600 - RNA, 13 nt, Human
aauccagccugcu

SEQ ID NO: 3465601 - RNA, 16 nt, Human
aauccagcgguucuca

SEQ ID NO: 3465602 - RNA, 23 nt, Human
aauccaggacccugccaggcaca

SEQ ID NO: 3465603 - RNA, 17 nt, Human
aauccaggcacagcuga

SEQ ID NO: 3465604 - RNA, 18 nt, Human
aauccaggcacagcugag

SEQ ID NO: 3465605 - RNA, 18 nt, Human
aauccaggcagauccagg

SEQ ID NO: 3465606 - RNA, 18 nt, Human
aauccaggguggugguga

SEQ ID NO: 3465607 - RNA, 20 nt, Human
aauccagguacgcacagaca

SEQ ID NO: 3465608 - RNA, 13 nt, Human
aauccauaucuua

SEQ ID NO: 3465609 - RNA, 22 nt, Human
aauccaucuaaauaccugcccu

SEQ ID NO: 3465610 - RNA, 12 nt, Human
aauccauguaag

SEQ ID NO: 3465611 - RNA, 17 nt, Human
aauccauguuaguuuuu

SEQ ID NO: 3465612 - RNA, 14 nt, Human
aauccauuuggaaa

SEQ ID NO: 3465613 - RNA, 17 nt, Human
aauccauuuggaaaucu

SEQ ID NO: 3465614 - RNA, 11 nt, Human
aaucccaaauu

SEQ ID NO: 3465615 - RNA, 18 nt, Human
aaucccaaauuugauuga

SEQ ID NO: 3465616 - RNA, 14 nt, Human
aaucccagcaauuu

SEQ ID NO: 3465617 - RNA, 15 nt, Human
aaucccagcacuuug

SEQ ID NO: 3465618 - RNA, 13 nt, Human
aaucccagcgcac

SEQ ID NO: 3465619 - RNA, 16 nt, Human
aaucccauuauucaaa

SEQ ID NO: 3465620 - RNA, 13 nt, Human
aaucccccaggag

SEQ ID NO: 3465621 - RNA, 15 nt, Human
aaucccccuugccac

SEQ ID NO: 3465622 - RNA, 11 nt, Human
aauccccuccu

SEQ ID NO: 3465623 - RNA, 12 nt, Human
aauccccuccuu

SEQ ID NO: 3465624 - RNA, 14 nt, Human
aauccccuucuccc

SEQ ID NO: 3465625 - RNA, 16 nt, Human
aauccccuucuccccu

SEQ ID NO: 3465626 - RNA, 16 nt, Human
aaucccgauucacccu

SEQ ID NO: 3465627 - RNA, 23 nt, Human
aaucccuagggcuggcagaaagg

SEQ ID NO: 3465628 - RNA, 19 nt, Human
aaucccugggcauugcuuu

SEQ ID NO: 3465629 - RNA, 21 nt, Human
aaucccugggcauugcuuucc

SEQ ID NO: 3465630 - RNA, 17 nt, Human
aaucccuguuuaauauu

SEQ ID NO: 3465631 - RNA, 23 nt, Human
aaucccuguuuaauauuuaaaca

SEQ ID NO: 3465632 - RNA, 12 nt, Human
aaucccuucaua

SEQ ID NO: 3465633 - RNA, 23 nt, Human
aaucccuuuauuacccccuccuu

SEQ ID NO: 3465634 - RNA, 14 nt, Human
aauccgcucucuuc

SEQ ID NO: 3465635 - RNA, 19 nt, Human
aauccgcucucuuccugcc

SEQ ID NO: 3465636 - RNA, 20 nt, Human
aauccgcucucuuccugccc

SEQ ID NO: 3465637 - RNA, 18 nt, Human
aauccguaguuauuuugc

SEQ ID NO: 3465638 - RNA, 14 nt, Human
aauccuaagacaca

SEQ ID NO: 3465639 - RNA, 17 nt, Human
aauccuaccuugcuuuu

SEQ ID NO: 3465640 - RNA, 16 nt, Human
aaugcuucagauauua

SEQ ID NO: 3465641 - RNA, 16 nt, Human
aaugcuucaucccuuu

SEQ ID NO: 3465642 - RNA, 13 nt, Human
aaugcuucauuca

SEQ ID NO: 3465643 - RNA, 20 nt, Human
aaugcuucauucaauauuga

SEQ ID NO: 3465644 - RNA, 21 nt, Human
aaugcuucauucaauauugac

SEQ ID NO: 3465645 - RNA, 23 nt, Human
aaugcuuccuagaaguuacugaa

SEQ ID NO: 3465646 - RNA, 18 nt, Human
aaugcuucuaaguaaaua

SEQ ID NO: 3465647 - RNA, 16 nt, Human
aaugcuugaaaaaugu

SEQ ID NO: 3465648 - RNA, 18 nt, Human
aaugcuugcugcugauuu

SEQ ID NO: 3465649 - RNA, 19 nt, Human
aaugcuuggaauaucugcu

SEQ ID NO: 3465650 - RNA, 20 nt, Human
aaugcuuguggauugagggu

SEQ ID NO: 3465651 - RNA, 22 nt, Human
aaugcuuuaaaaacuauuuaac

SEQ ID NO: 3465652 - RNA, 18 nt, Human
aaugcuuuauuuguaaau

SEQ ID NO: 3465653 - RNA, 21 nt, Human
aaugcuuuauuuguaaauuua

SEQ ID NO: 3465654 - RNA, 22 nt, Human
aaugcuuuauuuguaaauuuag

SEQ ID NO: 3465655 - RNA, 15 nt, Human
aaugcuuuccaaaac

SEQ ID NO: 3465656 - RNA, 17 nt, Human
aaugcuuucugaagcuu

SEQ ID NO: 3465657 - RNA, 18 nt, Human
aaugcuuugauauuucaa

SEQ ID NO: 3465658 - RNA, 19 nt, Human
aaugcuuugugugauugaa

SEQ ID NO: 3465659 - RNA, 20 nt, Human
aaugcuuuuuauuucugcau

SEQ ID NO: 3465660 - RNA, 14 nt, Human
aaugcuuuuugaau

SEQ ID NO: 3465661 - RNA, 17 nt, Human
aaugcuuuuugaauguu

SEQ ID NO: 3465662 - RNA, 17 nt, Human
aauggaaaacuuaguuu

SEQ ID NO: 3465663 - RNA, 22 nt, Human
aauggaaaacuuaguuugugaa

SEQ ID NO: 3465664 - RNA, 20 nt, Human
aauggaaaaugccaugaauu

SEQ ID NO: 3465665 - RNA, 18 nt, Human
aauggaaacagaggacca

SEQ ID NO: 3465666 - RNA, 17 nt, Human
aauggaaaccacaacuu

SEQ ID NO: 3465667 - RNA, 13 nt, Human
aauggaaacugaa

SEQ ID NO: 3465668 - RNA, 15 nt, Human
aauggaaaggagagg

SEQ ID NO: 3465669 - RNA, 19 nt, Human
aauggaaaguaacucauuu

SEQ ID NO: 3465670 - RNA, 22 nt, Human
aauggaaaucaucgaaaauuca

SEQ ID NO: 3465671 - RNA, 21 nt, Human
aauggaaaugggcagagcaga

SEQ ID NO: 3465672 - RNA, 14 nt, Human
aauggaagacacau

SEQ ID NO: 3465673 - RNA, 18 nt, Human
aauggaagacagcucuua

SEQ ID NO: 3465674 - RNA, 15 nt, Human
aauggaagagaaauc

SEQ ID NO: 3465675 - RNA, 18 nt, Human
aauggaagagaaaucuca

SEQ ID NO: 3465676 - RNA, 21 nt, Human
aauggaagauuugcccauuua

SEQ ID NO: 3465677 - RNA, 21 nt, Human
aauggaaugugauguucaugg

SEQ ID NO: 3465678 - RNA, 20 nt, Human
aauggacuaacuugucuuug

SEQ ID NO: 3465679 - RNA, 19 nt, Human
aauggacugguuugagauu

SEQ ID NO: 3465680 - RNA, 20 nt, Human
aauggacuguggugacuuug

SEQ ID NO: 3465681 - RNA, 23 nt, Human
aauggacuuugcacacuuuggcc

SEQ ID NO: 3465682 - RNA, 17 nt, Human
aauggacuuuggaagca

SEQ ID NO: 3465683 - RNA, 15 nt, Human
aaugcaucagguccu

SEQ ID NO: 3465684 - RNA, 16 nt, Human
aaugcaucuguccuca

SEQ ID NO: 3465685 - RNA, 13 nt, Human
aaugcaugaguaa

SEQ ID NO: 3465686 - RNA, 17 nt, Human
aaugcaugauuuuguaa

SEQ ID NO: 3465687 - RNA, 13 nt, Human
aaugcaugcuuuc

SEQ ID NO: 3465688 - RNA, 16 nt, Human
aaugcaugcuuuccau

SEQ ID NO: 3465689 - RNA, 18 nt, Human
aaugcauuaaaccugucu

SEQ ID NO: 3465690 - RNA, 23 nt, Human
aaugcauuauaggaucauuuguu

SEQ ID NO: 3465691 - RNA, 19 nt, Human
aaugcauucuucucuguug

SEQ ID NO: 3465692 - RNA, 21 nt, Human
aaugcauuguaucgauguuau

SEQ ID NO: 3465693 - RNA, 20 nt, Human
aaugcauuuuguuugguauu

SEQ ID NO: 3465694 - RNA, 21 nt, Human
aaugcauuuuguuugguauug

SEQ ID NO: 3465695 - RNA, 22 nt, Human
aaugccaaauuaaaaaagauaa

SEQ ID NO: 3465696 - RNA, 14 nt, Human
aaugccaagcacuu

SEQ ID NO: 3465697 - RNA, 18 nt, Human
aaugccacagcccuguca

SEQ ID NO: 3465698 - RNA, 22 nt, Human
aaugccacagcccugucagcau

SEQ ID NO: 3465699 - RNA, 22 nt, Human
aaugccagagacggaagccuuu

SEQ ID NO: 3465700 - RNA, 13 nt, Human
aaugccagugugc

SEQ ID NO: 3465701 - RNA, 15 nt, Human
aaugccaucaaauga

SEQ ID NO: 3465702 - RNA, 17 nt, Human
aaugccauccucaaaca

SEQ ID NO: 3465703 - RNA, 13 nt, Human
aaugccaugaauu

SEQ ID NO: 3465704 - RNA, 16 nt, Human
aaugccauuaucccug

SEQ ID NO: 3465705 - RNA, 19 nt, Human
aaugccauuuauuuauuga

SEQ ID NO: 3465706 - RNA, 18 nt, Human
aaugccauuuuaaggaaa

SEQ ID NO: 3465707 - RNA, 22 nt, Human
aaugccauuuuaaggaaaacua

SEQ ID NO: 3465708 - RNA, 12 nt, Human
aaugcccagaca

SEQ ID NO: 3465709 - RNA, 15 nt, Human
aaugcccagccccuu

SEQ ID NO: 3465710 - RNA, 22 nt, Human
aaugcccagccccuucugaccc

SEQ ID NO: 3465711 - RNA, 24 nt, Human
aaugcccagccccuucugacccau

SEQ ID NO: 3465712 - RNA, 17 nt, Human
aaugcccccagcuggcc

SEQ ID NO: 3465713 - RNA, 18 nt, Human
aaugccgcgaugggucag

SEQ ID NO: 3465714 - RNA, 23 nt, Human
aaugccgcgaugggucagguagg

SEQ ID NO: 3465715 - RNA, 15 nt, Human
aaugccuaagaagau

SEQ ID NO: 3465716 - RNA, 17 nt, Human
aaugccuauuguaauau

SEQ ID NO: 3465717 - RNA, 15 nt, Human
aaugccucaguguau

SEQ ID NO: 3465718 - RNA, 15 nt, Human
aaugccuccuguggg

SEQ ID NO: 3465719 - RNA, 19 nt, Human
aaugccugagugccuggcc

SEQ ID NO: 3465720 - RNA, 13 nt, Human
aaugccugcuuuu

SEQ ID NO: 3465721 - RNA, 20 nt, Human
aaugccugcuuuuuggaaag

SEQ ID NO: 3465722 - RNA, 17 nt, Human
aaugccuuaaaauggaa

SEQ ID NO: 3465723 - RNA, 16 nt, Human
aaugccuuacuuugua

SEQ ID NO: 3465724 - RNA, 18 nt, Human
aaugccuuacuuuguaug

SEQ ID NO: 3465725 - RNA, 12 nt, Human
aaugccuuuaaa

SEQ ID NO: 3465726 - RNA, 18 nt, Human
aaugccuuugagacaguu

SEQ ID NO: 3465727 - RNA, 23 nt, Human
aaugccuuuguaaccacaacuuu

SEQ ID NO: 3465728 - RNA, 20 nt, Human
aaugcgaaugguagucuaac

SEQ ID NO: 3465729 - RNA, 16 nt, Human
aaugcgauuuuauuac

SEQ ID NO: 3465730 - RNA, 15 nt, Human
aaugcgcaggcuggc

SEQ ID NO: 3465731 - RNA, 17 nt, Human
aaugcgcaggcuggccc

SEQ ID NO: 3465732 - RNA, 22 nt, Human
aaugcgcaggcuggcccugccc

SEQ ID NO: 3465733 - RNA, 16 nt, Human
aaugcggccuuuucau

SEQ ID NO: 3465734 - RNA, 18 nt, Human
aaugcgugcauaccacuu

SEQ ID NO: 3465735 - RNA, 21 nt, Human
aaugcgugcauaccacuuuug

SEQ ID NO: 3465736 - RNA, 23 nt, Human
aaugcgugcauaccacuuuuguu

SEQ ID NO: 3465737 - RNA, 20 nt, Human
aaugcuaacaguucacuugc

SEQ ID NO: 3465738 - RNA, 16 nt, Human
aaugcuacgugugauu

SEQ ID NO: 3465739 - RNA, 19 nt, Human
aaugcuacgugugauuuuu

SEQ ID NO: 3465740 - RNA, 13 nt, Human
aaugcuagguucu

SEQ ID NO: 3465741 - RNA, 15 nt, Human
aaugcuagguucuac

SEQ ID NO: 3465742 - RNA, 17 nt, Human
aaugcuagguucuaccu

SEQ ID NO: 3465743 - RNA, 15 nt, Human
aaugcuaugucauuu

SEQ ID NO: 3465744 - RNA, 18 nt, Human
aaugcuaugucauuucau

SEQ ID NO: 3465745 - RNA, 16 nt, Human
aaugcuauugaaaaug

SEQ ID NO: 3465746 - RNA, 19 nt, Human
aaugcuauuuuuguuuuua

SEQ ID NO: 3465747 - RNA, 12 nt, Human
aaugcucaucug

SEQ ID NO: 3465748 - RNA, 16 nt, Human
aaugcuccccacagcg

SEQ ID NO: 3465749 - RNA, 22 nt, Human
aaugcucccccauccuccccuu

SEQ ID NO: 3465750 - RNA, 14 nt, Human
aaugcucuccuuuc

SEQ ID NO: 3465751 - RNA, 19 nt, Human
aaugcucucucaaauuguc

SEQ ID NO: 3465752 - RNA, 20 nt, Human
aaugcucuggggucuuuuua

SEQ ID NO: 3465753 - RNA, 15 nt, Human
aaugcugacccaugg

SEQ ID NO: 3465754 - RNA, 17 nt, Human
aaugcugacccaugggc

SEQ ID NO: 3465755 - RNA, 22 nt, Human
aaugcugacccaugggcaggag

SEQ ID NO: 3465756 - RNA, 13 nt, Human
aaugcugauuuaa

SEQ ID NO: 3465757 - RNA, 17 nt, Human
aaugcugcaaacuuaau

SEQ ID NO: 3465758 - RNA, 11 nt, Human
aaugcugccag

SEQ ID NO: 3465759 - RNA, 23 nt, Human
aaugcugcccaugccaccgcuuc

SEQ ID NO: 3465760 - RNA, 12 nt, Human
aaugcugccugc

SEQ ID NO: 3465761 - RNA, 15 nt, Human
aaugcugccugccug

SEQ ID NO: 3465762 - RNA, 18 nt, Human
aaugcugccugccugucu

SEQ ID NO: 3465763 - RNA, 22 nt, Human
aaugcuggcuauagaugucuuu

SEQ ID NO: 3465764 - RNA, 23 nt, Human
aaugcuggcuggccuuguggucc

SEQ ID NO: 3465765 - RNA, 21 nt, Human
aaugcuggcuguuggcugggg

SEQ ID NO: 3465766 - RNA, 22 nt, Human
aaugcugguuuuccuaaaugca

SEQ ID NO: 3465767 - RNA, 18 nt, Human
aaugcugguuuuucaguu

SEQ ID NO: 3465768 - RNA, 12 nt, Human
aaugcuguacau

SEQ ID NO: 3465769 - RNA, 13 nt, Human
aaugcuguacauc

SEQ ID NO: 3465770 - RNA, 15 nt, Human
aaugcuguacaucua

SEQ ID NO: 3465771 - RNA, 17 nt, Human
aaugcuguacaucuauu

SEQ ID NO: 3465772 - RNA, 21 nt, Human
aaugcugugcccuaaagugua

SEQ ID NO: 3465773 - RNA, 12 nt, Human
aaugcuguguua

SEQ ID NO: 3465774 - RNA, 13 nt, Human
aaugcuguguuaa

SEQ ID NO: 3465775 - RNA, 19 nt, Human
aaugcuuaaagaauucaaa

SEQ ID NO: 3465776 - RNA, 21 nt, Human
aaugcuuaaagaauucaaauu

SEQ ID NO: 3465777 - RNA, 22 nt, Human
aaugcuuaaagaauucaaauuu

SEQ ID NO: 3465778 - RNA, 15 nt, Human
aaugcuuaauuucua

SEQ ID NO: 3465779 - RNA, 17 nt, Human
aaugcuuaauuucuaaa

SEQ ID NO: 3465780 - RNA, 18 nt, Human
aaugcuucacuguacgua

SEQ ID NO: 3465781 - RNA, 17 nt, Human
aauguaaggcuguguaa

SEQ ID NO: 3465782 - RNA, 18 nt, Human
aauguaaggcuguguaag

SEQ ID NO: 3465783 - RNA, 15 nt, Human
aauguaagugggccc

SEQ ID NO: 3465784 - RNA, 21 nt, Human
aauguaaugaucauaagucua

SEQ ID NO: 3465785 - RNA, 19 nt, Human
aauguaauuaaacuguuaa

SEQ ID NO: 3465786 - RNA, 13 nt, Human
aauguaauuuaaa

SEQ ID NO: 3465787 - RNA, 23 nt, Human
aauguaauuuguguaauaaagug

SEQ ID NO: 3465788 - RNA, 13 nt, Human
aauguacaaaaua

SEQ ID NO: 3465789 - RNA, 17 nt, Human
aauguacaaaauaaagu

SEQ ID NO: 3465790 - RNA, 21 nt, Human
aauguacauagugcuaacaug

SEQ ID NO: 3465791 - RNA, 20 nt, Human
aauguacauguauuaaauua

SEQ ID NO: 3465792 - RNA, 14 nt, Human
aauguacccaguau

SEQ ID NO: 3465793 - RNA, 18 nt, Human
aauguacgaugagaaauu

SEQ ID NO: 3465794 - RNA, 18 nt, Human
aauguacguccagccugc

SEQ ID NO: 3465795 - RNA, 17 nt, Human
aauguacugauuucagu

SEQ ID NO: 3465796 - RNA, 12 nt, Human
aauguacugcau

SEQ ID NO: 3465797 - RNA, 19 nt, Human
aauguagaauauucagaca

SEQ ID NO: 3465798 - RNA, 18 nt, Human
aauguagauaaguguucu

SEQ ID NO: 3465799 - RNA, 23 nt, Human
aauguagcgacugucaacagcgu

SEQ ID NO: 3465800 - RNA, 18 nt, Human
aauguagcguguuuacau

SEQ ID NO: 3465801 - RNA, 21 nt, Human
aauguagcguguuuacaugug

SEQ ID NO: 3465802 - RNA, 14 nt, Human
aauguagcugguuu

SEQ ID NO: 3465803 - RNA, 17 nt, Human
aauguagcugguuuccu

SEQ ID NO: 3465804 - RNA, 21 nt, Human
aauguagcugguuuccucauu

SEQ ID NO: 3465805 - RNA, 22 nt, Human
aauguagcuucagucauuaaau

SEQ ID NO: 3465806 - RNA, 22 nt, Human
aauguaggagacuguuuggaaa

SEQ ID NO: 3465807 - RNA, 20 nt, Human
aauguagguaugaauaaguu

SEQ ID NO: 3465808 - RNA, 18 nt, Human
aauguagguccucagaaa

SEQ ID NO: 3465809 - RNA, 18 nt, Human
aauguaguuugaggaaau

SEQ ID NO: 3465810 - RNA, 20 nt, Human
aauguaguuugaggaaauuu

SEQ ID NO: 3465811 - RNA, 21 nt, Human
aauguauaaacuuuagaguag

SEQ ID NO: 3465812 - RNA, 13 nt, Human
aauguauaaauau

SEQ ID NO: 3465813 - RNA, 17 nt, Human
aauguauaccuguaacu

SEQ ID NO: 3465814 - RNA, 16 nt, Human
aauguauaguauuuga

SEQ ID NO: 3465815 - RNA, 18 nt, Human
aauguauaguauuugaaa

SEQ ID NO: 3465816 - RNA, 19 nt, Human
aauguauaguauuugaaaa

SEQ ID NO: 3465817 - RNA, 22 nt, Human
aauguauaguauuugaaaacag

SEQ ID NO: 3465818 - RNA, 12 nt, Human
aauguauauaaa

SEQ ID NO: 3465819 - RNA, 12 nt, Human
aauuguauauuc

SEQ ID NO: 3465820 - RNA, 16 nt, Human
aauuguauauucacuu

SEQ ID NO: 3465821 - RNA, 17 nt, Human
aauuguaucagaggccu

SEQ ID NO: 3465822 - RNA, 22 nt, Human
aauuguauguuaaguuacuuca

SEQ ID NO: 3465823 - RNA, 14 nt, Human
aauuguauuuuugu

SEQ ID NO: 3465824 - RNA, 19 nt, Human
aauugucacuuuuuaugcu

SEQ ID NO: 3465825 - RNA, 11 nt, Human
aauugucccuu

SEQ ID NO: 3465826 - RNA, 23 nt, Human
aauugucgaaaagagucuuccaa

SEQ ID NO: 3465827 - RNA, 17 nt, Human
aauugucuauuuaucuu

SEQ ID NO: 3465828 - RNA, 12 nt, Human
aauugucugaaa

SEQ ID NO: 3465829 - RNA, 18 nt, Human
aauugucuuuaauuucug

SEQ ID NO: 3465830 - RNA, 19 nt, Human
aauugucuuuaauuucugu

SEQ ID NO: 3465831 - RNA, 20 nt, Human
aauugugaauugauaauaaa

SEQ ID NO: 3465832 - RNA, 21 nt, Human
aauugugaauugauaauaaac

SEQ ID NO: 3465833 - RNA, 14 nt, Human
aauugugauguguc

SEQ ID NO: 3465834 - RNA, 12 nt, Human
aauugugcugcc

SEQ ID NO: 3465835 - RNA, 13 nt, Human
aauugugcuucuc

SEQ ID NO: 3465836 - RNA, 11 nt, Human
aauuguggcua

SEQ ID NO: 3465837 - RNA, 19 nt, Human
aauuguggcuauccugauu

SEQ ID NO: 3465838 - RNA, 18 nt, Human
aauugugggcauaaacug

SEQ ID NO: 3465839 - RNA, 20 nt, Human
aauugugggcauaaacuguu

SEQ ID NO: 3465840 - RNA, 23 nt, Human
aauugugggcauaaacuguuuca

SEQ ID NO: 3465841 - RNA, 16 nt, Human
aauugugguuuauaua

SEQ ID NO: 3465842 - RNA, 17 nt, Human
aauugugguuuauauau

SEQ ID NO: 3465843 - RNA, 16 nt, Human
aauuguguagccuuuu

SEQ ID NO: 3465844 - RNA, 17 nt, Human
aauuguguagccuuuuu

SEQ ID NO: 3465845 - RNA, 23 nt, Human
aauugugugaaagguacuucaaa

SEQ ID NO: 3465846 - RNA, 22 nt, Human
aauugugugauauuucagaaau

SEQ ID NO: 3465847 - RNA, 13 nt, Human
aauugugugguca

SEQ ID NO: 3465848 - RNA, 21 nt, Human
aauuguguggucaguggcucu

SEQ ID NO: 3465849 - RNA, 21 nt, Human
aauuguguuuacauuuuaugg

SEQ ID NO: 3465850 - RNA, 22 nt, Human
aauuguguuuacauuuuauggu

SEQ ID NO: 3465851 - RNA, 21 nt, Human
aauuguguuuauaauuuuaaa

SEQ ID NO: 3465852 - RNA, 20 nt, Human
aauuguguuuuaauuguaaa

SEQ ID NO: 3465853 - RNA, 20 nt, Human
aauuguugaaauuuugcaaa

SEQ ID NO: 3465854 - RNA, 23 nt, Human
aauuguugaaauuuugcaaauau

SEQ ID NO: 3465855 - RNA, 13 nt, Human
aauuguugacagu

SEQ ID NO: 3465856 - RNA, 18 nt, Human
aauuguugacaguucuga

SEQ ID NO: 3465857 - RNA, 23 nt, Human
aauuguugcuaaucuucuuaugc

SEQ ID NO: 3465858 - RNA, 14 nt, Human
aauuguuguucugu

SEQ ID NO: 3465859 - RNA, 19 nt, Human
aauuguuguuucuuucuag

SEQ ID NO: 3465860 - RNA, 14 nt, Human
aauuguuguuugua

SEQ ID NO: 3465861 - RNA, 21 nt, Human
aauuguuguuuguauguauaa

SEQ ID NO: 3465862 - RNA, 23 nt, Human
aauuguuguuuguauguauaauu

SEQ ID NO: 3465863 - RNA, 21 nt, Human
aauuguuuggcuuccuccuga

SEQ ID NO: 3465864 - RNA, 22 nt, Human
aauuguuuggggaugagaaagg

SEQ ID NO: 3465865 - RNA, 19 nt, Human
aauuguuuuaucugaauuu

SEQ ID NO: 3465866 - RNA, 20 nt, Human
aauuguuuuuauuguuuucu

SEQ ID NO: 3465867 - RNA, 17 nt, Human
aauuguuuuuuaucuuu

SEQ ID NO: 3465868 - RNA, 18 nt, Human
aauuguuuuuuaucuuuu

SEQ ID NO: 3465869 - RNA, 17 nt, Human
aauuuaaaaaaauacag

SEQ ID NO: 3465870 - RNA, 13 nt, Human
aauuuaaaacaaa

SEQ ID NO: 3465871 - RNA, 15 nt, Human
aauuuaaaacaaaca

SEQ ID NO: 3465872 - RNA, 13 nt, Human
aauuuaaaauaua

SEQ ID NO: 3465873 - RNA, 18 nt, Human
aauuuaaacccauuuuag

SEQ ID NO: 3465874 - RNA, 13 nt, Human
aauuuaaagauau

SEQ ID NO: 3465875 - RNA, 11 nt, Human
aauuuaaagca

SEQ ID NO: 3465876 - RNA, 20 nt, Human
aauuuaaagcagguucuugu

SEQ ID NO: 3465877 - RNA, 20 nt, Human
aauuuaaauauaauucugua

SEQ ID NO: 3465878 - RNA, 16 nt, Human
aauuuaaaugaaagaa

SEQ ID NO: 3465879 - RNA, 18 nt, Human
aauuuaaaugauuuaaau

SEQ ID NO: 3465880 - RNA, 11 nt, Human
aauuuaaaugu

SEQ ID NO: 3465881 - RNA, 11 nt, Human
aauuuaaauuu

SEQ ID NO: 3465882 - RNA, 15 nt, Human
aauuuaaauuuaaag

SEQ ID NO: 3465883 - RNA, 23 nt, Human
aauuuaagagcaguccauuucua

SEQ ID NO: 3465884 - RNA, 21 nt, Human
aauuuaagcauuguuugcuua

SEQ ID NO: 3465885 - RNA, 15 nt, Human
aauuuaaguuuugac

SEQ ID NO: 3465886 - RNA, 21 nt, Human
aauuuaauuagggguugcuaa

SEQ ID NO: 3465887 - RNA, 18 nt, Human
aauuuacaaaaauauaaa

SEQ ID NO: 3465888 - RNA, 16 nt, Human
aauuuacaaagugugu

SEQ ID NO: 3465889 - RNA, 18 nt, Human
aauuuacaaaguguguau

SEQ ID NO: 3465890 - RNA, 19 nt, Human
aauuuacaaaguguguauu

SEQ ID NO: 3465891 - RNA, 21 nt, Human
aauuuacaaaguguguauuaa

SEQ ID NO: 3465892 - RNA, 19 nt, Human
aauuuacauacucugcuua

SEQ ID NO: 3465893 - RNA, 14 nt, Human
aauuuacauggcaa

SEQ ID NO: 3465894 - RNA, 19 nt, Human
aauuuacccucuugaauau

SEQ ID NO: 3465895 - RNA, 14 nt, Human
aauuuaccuaagau

SEQ ID NO: 3465896 - RNA, 15 nt, Human
aauuuaccugaaguc

SEQ ID NO: 3465897 - RNA, 17 nt, Human
aauuuacuacaauaugu

SEQ ID NO: 3465898 - RNA, 15 nt, Human
aauuuacuauauaua

SEQ ID NO: 3465899 - RNA, 13 nt, Human
aauuuacuuguuu

SEQ ID NO: 3465900 - RNA, 15 nt, Human
aauuuacuuuaaacu

SEQ ID NO: 3465901 - RNA, 15 nt, Human
aauuuacuuuacaca

SEQ ID NO: 3465902 - RNA, 17 nt, Human
aauuuagaaaaagaaca

SEQ ID NO: 3465903 - RNA, 15 nt, Human
aauuuagaaaacuuu

SEQ ID NO: 3465904 - RNA, 19 nt, Human
aauuuagaaacuaauugac

SEQ ID NO: 3465905 - RNA, 22 nt, Human
aauuuagaaacuaauugacuuu

SEQ ID NO: 3465906 - RNA, 14 nt, Human
aauuuagaaaucau

SEQ ID NO: 3465907 - RNA, 20 nt, Human
aauuuagaaaucauuuugca

SEQ ID NO: 3465908 - RNA, 15 nt, Human
aauuuagauuguaaa

SEQ ID NO: 3465909 - RNA, 14 nt, Human
aauuuagcauugua

SEQ ID NO: 3465910 - RNA, 18 nt, Human
aauuuagguuuuuauuag

SEQ ID NO: 3465911 - RNA, 14 nt, Human
aauuuaguaaaugu

SEQ ID NO: 3465912 - RNA, 23 nt, Human
aauuuagugaucuuagcauagcu

SEQ ID NO: 3465913 - RNA, 17 nt, Human
aauuuaguguauccaua

SEQ ID NO: 3465914 - RNA, 22 nt, Human
aauuuaguguuuuuuuauuucu

SEQ ID NO: 3465915 - RNA, 23 nt, Human
aauuuaguguuuuuuuauuucua

SEQ ID NO: 3465916 - RNA, 13 nt, Human
aauuuaguuguuu

SEQ ID NO: 3465917 - RNA, 12 nt, Human
aauuuaguuuca

SEQ ID NO: 3465918 - RNA, 22 nt, Human
aauuuaguuucauauaaaguau

SEQ ID NO: 3465919 - RNA, 16 nt, Human
aauuuaguuuuuguuc

SEQ ID NO: 3465920 - RNA, 17 nt, Human
aauuuaguuuuuguucu

SEQ ID NO: 3465921 - RNA, 15 nt, Human
aauuuauaaaauuag

SEQ ID NO: 3465922 - RNA, 16 nt, Human
aauuuauaaaauuaga

SEQ ID NO: 3465923 - RNA, 15 nt, Human
aauuuauaaaguacc

SEQ ID NO: 3465924 - RNA, 23 nt, Human
aauuuauaacguguucaauauuu

SEQ ID NO: 3465925 - RNA, 17 nt, Human
aauuuauacaauaucau

SEQ ID NO: 3465926 - RNA, 16 nt, Human
aauuuauacaggucau

SEQ ID NO: 3465927 - RNA, 18 nt, Human
aauuuauaccucaauuuu

SEQ ID NO: 3465928 - RNA, 15 nt, Human
aauuuaucaaagcau

SEQ ID NO: 3465929 - RNA, 22 nt, Human
aauuuaucaaagcauagauguu

SEQ ID NO: 3465930 - RNA, 22 nt, Human
aauuuaucagauugcuuuugug

SEQ ID NO: 3465931 - RNA, 17 nt, Human
aauuuaucaguaccuaa

SEQ ID NO: 3465932 - RNA, 19 nt, Human
aauuuauccugaaauuuca

SEQ ID NO: 3465933 - RNA, 15 nt, Human
aauuuaucuuugaua

SEQ ID NO: 3465934 - RNA, 21 nt, Human
aauuuaugaauugaauuaucu

SEQ ID NO: 3465935 - RNA, 16 nt, Human
aauuuaugaguuuuug

SEQ ID NO: 3465936 - RNA, 14 nt, Human
aauuuaugugaugg

SEQ ID NO: 3465937 - RNA, 15 nt, Human
aauuuauuaaaauga

SEQ ID NO: 3465938 - RNA, 20 nt, Human
aauuuauuagcccugcauuu

SEQ ID NO: 3465939 - RNA, 17 nt, Human
aauuuauuaguuaauau

SEQ ID NO: 3465940 - RNA, 13 nt, Human
aauuuauuauggc

SEQ ID NO: 3465941 - RNA, 17 nt, Human
aauuuauuauugaaauu

SEQ ID NO: 3465942 - RNA, 18 nt, Human
aauuuauuauugaaauug

SEQ ID NO: 3465943 - RNA, 21 nt, Human
aauuuauucaauuccucuggg

SEQ ID NO: 3465944 - RNA, 15 nt, Human
aauuuauugcacaaa

SEQ ID NO: 3465945 - RNA, 18 nt, Human
aauuuauugcacauuguu

SEQ ID NO: 3465946 - RNA, 19 nt, Human
aauuuauugcacauuguuc

SEQ ID NO: 3465947 - RNA, 19 nt, Human
aauuuauuggcuuuucuga

SEQ ID NO: 3465948 - RNA, 21 nt, Human
aauuuauuggcuuuucugauc

SEQ ID NO: 3465949 - RNA, 17 nt, Human
aauuuauuuauacuauu

SEQ ID NO: 3465950 - RNA, 17 nt, Human
aauuuauuuauuaagau

SEQ ID NO: 3465951 - RNA, 21 nt, Human
aauuuauuuccacuaaaaaua

SEQ ID NO: 3465952 - RNA, 19 nt, Human
aauuuauuuccuaguucug

SEQ ID NO: 3465953 - RNA, 13 nt, Human
aauuuauuuucuu

SEQ ID NO: 3465954 - RNA, 12 nt, Human
aauuuauuuugu

SEQ ID NO: 3465955 - RNA, 17 nt, Human
acauuguuugcugcuau

SEQ ID NO: 3465956 - RNA, 18 nt, Human
acauuguuugcugcuauu

SEQ ID NO: 3465957 - RNA, 15 nt, Human
acauuguuuuaaaaa

SEQ ID NO: 3465958 - RNA, 18 nt, Human
acauuguuuuaaaaagaa

SEQ ID NO: 3465959 - RNA, 21 nt, Human
acauuguuuugccaacauugc

SEQ ID NO: 3465960 - RNA, 14 nt, Human
acauuuaaaacuua

SEQ ID NO: 3465961 - RNA, 12 nt, Human
acauuuaaaauu

SEQ ID NO: 3465962 - RNA, 13 nt, Human
acauuuaaagcau

SEQ ID NO: 3465963 - RNA, 20 nt, Human
acauuuaaagcauugcuguu

SEQ ID NO: 3465964 - RNA, 22 nt, Human
acauuuaacuuguuuccaaugu

SEQ ID NO: 3465965 - RNA, 17 nt, Human
acauuuaauacagcagu

SEQ ID NO: 3465966 - RNA, 15 nt, Human
acauuuaauugagaa

SEQ ID NO: 3465967 - RNA, 19 nt, Human
acauuuaauuuagugaucu

SEQ ID NO: 3465968 - RNA, 21 nt, Human
acauuuacaaacugaagagua

SEQ ID NO: 3465969 - RNA, 16 nt, Human
acauuuacauguauua

SEQ ID NO: 3465970 - RNA, 14 nt, Human
acauuuaccagcaa

SEQ ID NO: 3465971 - RNA, 16 nt, Human
acauuuaccuuuuuga

SEQ ID NO: 3465972 - RNA, 13 nt, Human
acauuuagaaaag

SEQ ID NO: 3465973 - RNA, 22 nt, Human
acauuuagaaaagugaauugaa

SEQ ID NO: 3465974 - RNA, 16 nt, Human
acauuuagaagaaaga

SEQ ID NO: 3465975 - RNA, 23 nt, Human
acauuuagauccugguuucauaa

SEQ ID NO: 3465976 - RNA, 20 nt, Human
acauuuagcugugcucagaa

SEQ ID NO: 3465977 - RNA, 13 nt, Human
acauuuauaauug

SEQ ID NO: 3465978 - RNA, 14 nt, Human
acauuuauaauugc

SEQ ID NO: 3465979 - RNA, 23 nt, Human
acauuuaucaaucaguauaauuc

SEQ ID NO: 3465980 - RNA, 17 nt, Human
acauuuaugauuuaaua

SEQ ID NO: 3465981 - RNA, 16 nt, Human
acauuuauuuuaugag

SEQ ID NO: 3465982 - RNA, 16 nt, Human
acauuuauuuugacau

SEQ ID NO: 3465983 - RNA, 15 nt, Human
acauuuauuuuuaua

SEQ ID NO: 3465984 - RNA, 21 nt, Human
acauuucacaggcuaauggga

SEQ ID NO: 3465985 - RNA, 20 nt, Human
acauuucaccuacuuuguaa

SEQ ID NO: 3465986 - RNA, 16 nt, Human
acauuucacugucugu

SEQ ID NO: 3465987 - RNA, 16 nt, Human
acauuucauguauucc

SEQ ID NO: 3465988 - RNA, 12 nt, Human
acauuucccugu

SEQ ID NO: 3465989 - RNA, 13 nt, Human
acauuucuaaaau

SEQ ID NO: 3465990 - RNA, 22 nt, Human
acauuucuaacucugauguaaa

SEQ ID NO: 3465991 - RNA, 23 nt, Human
acauuucuaagucaaacacuugu

SEQ ID NO: 3465992 - RNA, 15 nt, Human
acauuucuauaaaua

SEQ ID NO: 3465993 - RNA, 12 nt, Human
acauuucucuga

SEQ ID NO: 3465994 - RNA, 15 nt, Human
acauuucuguaaaua

SEQ ID NO: 3465995 - RNA, 18 nt, Human
acauuucuguaaauacca

SEQ ID NO: 3465996 - RNA, 19 nt, Human
acauuucuucuagugauga

SEQ ID NO: 3465997 - RNA, 19 nt, Human
acauuucuuugugcuuugg

SEQ ID NO: 3465998 - RNA, 14 nt, Human
acauuucuuuucuu

SEQ ID NO: 3465999 - RNA, 14 nt, Human
acauuugaaaucua

SEQ ID NO: 3466000 - RNA, 17 nt, Human
acauuugccuugcagaa

SEQ ID NO: 3466001 - RNA, 20 nt, Human
acauuugccuugcagaacug

SEQ ID NO: 3466002 - RNA, 23 nt, Human
acauuugccuugcagaacugcca

SEQ ID NO: 3466003 - RNA, 14 nt, Human
acauuugccuugcu

SEQ ID NO: 3466004 - RNA, 19 nt, Human
acauuugcuuuuugugaua

SEQ ID NO: 3466005 - RNA, 20 nt, Human
acauuuggaacuaacacgug

SEQ ID NO: 3466006 - RNA, 12 nt, Human
acauuuggaaua

SEQ ID NO: 3466007 - RNA, 20 nt, Human
acauuuggaguguuccccuu

SEQ ID NO: 3466008 - RNA, 19 nt, Human
acauuuggauaaacaacau

SEQ ID NO: 3466009 - RNA, 17 nt, Human
acauuugggagacaugu

SEQ ID NO: 3466010 - RNA, 21 nt, Human
acauuugggaguuuuuaugag

SEQ ID NO: 3466011 - RNA, 14 nt, Human
acauuuggguaaau

SEQ ID NO: 3466012 - RNA, 13 nt, Human
aauuuuauuuugu

SEQ ID NO: 3466013 - RNA, 19 nt, Human
aauuuucaagcaucuccug

SEQ ID NO: 3466014 - RNA, 16 nt, Human
aauuuucacaugaaca

SEQ ID NO: 3466015 - RNA, 21 nt, Human
aauuuucacaugaacauacug

SEQ ID NO: 3466016 - RNA, 17 nt, Human
aauuuucagauuugcac

SEQ ID NO: 3466017 - RNA, 20 nt, Human
aauuuucagauuugcacaaa

SEQ ID NO: 3466018 - RNA, 20 nt, Human
aauuuucaguauaauuuaac

SEQ ID NO: 3466019 - RNA, 16 nt, Human
aauuuucauuuuacag

SEQ ID NO: 3466020 - RNA, 22 nt, Human
aauuuuccuguccucuuucagc

SEQ ID NO: 3466021 - RNA, 21 nt, Human
aauuuucuaaaagcuuucaug

SEQ ID NO: 3466022 - RNA, 11 nt, Human
aauuuucuaag

SEQ ID NO: 3466023 - RNA, 12 nt, Human
aauuuucuagac

SEQ ID NO: 3466024 - RNA, 15 nt, Human
aauuuucuagacuuu

SEQ ID NO: 3466025 - RNA, 18 nt, Human
aauuuucuagacuuucug

SEQ ID NO: 3466026 - RNA, 20 nt, Human
aauuuucuagacuuucuguu

SEQ ID NO: 3466027 - RNA, 17 nt, Human
aauuuucucaaaagcau

SEQ ID NO: 3466028 - RNA, 18 nt, Human
aauuuucucccaggaagc

SEQ ID NO: 3466029 - RNA, 22 nt, Human
aauuuucuggaauacaugaaau

SEQ ID NO: 3466030 - RNA, 14 nt, Human
aauuuucuucaguu

SEQ ID NO: 3466031 - RNA, 13 nt, Human
aauuuucuugaug

SEQ ID NO: 3466032 - RNA, 23 nt, Human
aauuuucuuuaaccagucugaag

SEQ ID NO: 3466033 - RNA, 14 nt, Human
aauuuugaagugcu

SEQ ID NO: 3466034 - RNA, 16 nt, Human
aauuuugacacuauau

SEQ ID NO: 3466035 - RNA, 20 nt, Human
aauuuugaguucuacauaag

SEQ ID NO: 3466036 - RNA, 20 nt, Human
aauuuugauauaaucuuuca

SEQ ID NO: 3466037 - RNA, 12 nt, Human
aauuuugauuca

SEQ ID NO: 3466038 - RNA, 15 nt, Human
aauuuugcaaauaua

SEQ ID NO: 3466039 - RNA, 19 nt, Human
aauuuugcaaauauaaaca

SEQ ID NO: 3466040 - RNA, 20 nt, Human
aauuuugcaaauauaaacau

SEQ ID NO: 3466041 - RNA, 16 nt, Human
aauuuugcuuuuaauu

SEQ ID NO: 3466042 - RNA, 22 nt, Human
aauuuuggccaaaguguuaauc

SEQ ID NO: 3466043 - RNA, 18 nt, Human
aauuuuggggauuuucaa

SEQ ID NO: 3466044 - RNA, 16 nt, Human
aauuuugguuguauuc

SEQ ID NO: 3466045 - RNA, 19 nt, Human
aauuuugguuguauucuuu

SEQ ID NO: 3466046 - RNA, 22 nt, Human
aauuuugguuguauucuuugau

SEQ ID NO: 3466047 - RNA, 23 nt, Human
aauuuugguuguauucuuugaug

SEQ ID NO: 3466048 - RNA, 12 nt, Human
aauuuuguaaga

SEQ ID NO: 3466049 - RNA, 13 nt, Human
aauuuuguaauga

SEQ ID NO: 3466050 - RNA, 16 nt, Human
aauuuuguaauuuucu

SEQ ID NO: 3466051 - RNA, 12 nt, Human
aauuuuguauuu

SEQ ID NO: 3466052 - RNA, 21 nt, Human
aauuuugucugccccaaguuu

SEQ ID NO: 3466053 - RNA, 23 nt, Human
aauuuugugaaacagacuuguau

SEQ ID NO: 3466054 - RNA, 16 nt, Human
aauuuugugcccccau

SEQ ID NO: 3466055 - RNA, 15 nt, Human
aauuuuguguaagaa

SEQ ID NO: 3466056 - RNA, 17 nt, Human
aauuuuguguaagaaau

SEQ ID NO: 3466057 - RNA, 18 nt, Human
aauuuuguguaagaaaua

SEQ ID NO: 3466058 - RNA, 19 nt, Human
aauuuuguucuaguuuuca

SEQ ID NO: 3466059 - RNA, 16 nt, Human
aauuuuguucucuggg

SEQ ID NO: 3466060 - RNA, 13 nt, Human
aauuuuguugcug

SEQ ID NO: 3466061 - RNA, 19 nt, Human
aauuuuguuuauaagaaau

SEQ ID NO: 3466062 - RNA, 19 nt, Human
aauuuuuaaaaauacacuu

SEQ ID NO: 3466063 - RNA, 13 nt, Human
aauuuuuaaacaa

SEQ ID NO: 3466064 - RNA, 20 nt, Human
aauuuuuaaauguaaaacau

SEQ ID NO: 3466065 - RNA, 13 nt, Human
aauuuuuaagcaa

SEQ ID NO: 3466066 - RNA, 22 nt, Human
aauuuuuaaucuuuaauuuuac

SEQ ID NO: 3466067 - RNA, 13 nt, Human
aauuuuuaauguu

SEQ ID NO: 3466068 - RNA, 16 nt, Human
aauuuuuacagaauug

SEQ ID NO: 3466069 - RNA, 22 nt, Human
aauuuuuaccauaguuuucuca

SEQ ID NO: 3466070 - RNA, 22 nt, Human
aauuuuuauauuuaauuauuaa

SEQ ID NO: 3466071 - RNA, 14 nt, Human
aauuuuuaugugug

SEQ ID NO: 3466072 - RNA, 17 nt, Human
aauuuuuauuaaauuau

SEQ ID NO: 3466073 - RNA, 17 nt, Human
aauuuuuauuaugcaua

SEQ ID NO: 3466074 - RNA, 16 nt, Human
aauuuuuauuauuugu

SEQ ID NO: 3466075 - RNA, 12 nt, Human
aauuuuuauugu

SEQ ID NO: 3466076 - RNA, 22 nt, Human
aauuuuuauuuuugcugagacu

SEQ ID NO: 3466077 - RNA, 23 nt, Human
aauuuuucagcucucuguauaaa

SEQ ID NO: 3466078 - RNA, 20 nt, Human
aauuuuucucaguuuguaua

SEQ ID NO: 3466079 - RNA, 20 nt, Human
aauuuuucucuaacucagaa

SEQ ID NO: 3466080 - RNA, 18 nt, Human
aauuuuucuguauagaca

SEQ ID NO: 3466081 - RNA, 11 nt, Human
aauuuuugcaa

SEQ ID NO: 3466082 - RNA, 12 nt, Human
aauuuuugcaau

SEQ ID NO: 3466083 - RNA, 14 nt, Human
aauuuuugcaauaa

SEQ ID NO: 3466084 - RNA, 17 nt, Human
aauuuuugcaauaaugc

SEQ ID NO: 3466085 - RNA, 19 nt, Human
aauuuuugcaauaaugcag

SEQ ID NO: 3466086 - RNA, 21 nt, Human
aauuuuugcaauaaugcagua

SEQ ID NO: 3466087 - RNA, 20 nt, Human
aauuuuugcuuuuagaaaag

SEQ ID NO: 3466088 - RNA, 22 nt, Human
aauuuuuggauugacaguaacu

SEQ ID NO: 3466089 - RNA, 23 nt, Human
aauuuuuggugggugaaaggaau

SEQ ID NO: 3466090 - RNA, 14 nt, Human
aauuuuugguugaa

SEQ ID NO: 3466091 - RNA, 14 nt, Human
aauuuuuguaaauc

SEQ ID NO: 3466092 - RNA, 14 nt, Human
aauuuuuguauuuu

SEQ ID NO: 3466093 - RNA, 17 nt, Human
aauuuuuuaaaagagac

SEQ ID NO: 3466094 - RNA, 18 nt, Human
aauuuuuuauucuuguga

SEQ ID NO: 3466095 - RNA, 23 nt, Human
aauuuuuuauucuugugaauaug

SEQ ID NO: 3466096 - RNA, 19 nt, Human
aauuuuuucucuaggaaau

SEQ ID NO: 3466097 - RNA, 22 nt, Human
aauuuuuucucuaggaaauauu

SEQ ID NO: 3466098 - RNA, 22 nt, Human
aauuuuuuguugacauuagucu

SEQ ID NO: 3466099 - RNA, 19 nt, Human
aauuuuuuuaauuuacaaa

SEQ ID NO: 3466100 - RNA, 18 nt, Human
aauuuuuuuagaaagcau

SEQ ID NO: 3466101 - RNA, 15 nt, Human
aauuuuuuucaauau

SEQ ID NO: 3466102 - RNA, 13 nt, Human
aauuuuuuucacc

SEQ ID NO: 3466103 - RNA, 21 nt, Human
aauuuuuuucaucuucucugg

SEQ ID NO: 3466104 - RNA, 20 nt, Human
aauuuuuuuccuuaccuuuu

SEQ ID NO: 3466105 - RNA, 16 nt, Human
aauuuuuuucugcaac

SEQ ID NO: 3466106 - RNA, 14 nt, Human
aauuuuuuuguaug

SEQ ID NO: 3466107 - RNA, 15 nt, Human
aauuuuuuuguauga

SEQ ID NO: 3466108 - RNA, 19 nt, Human
aauuuuuuuguaugaaaac

SEQ ID NO: 3466109 - RNA, 16 nt, Human
aauuuuuuugucuuua

SEQ ID NO: 3466110 - RNA, 14 nt, Human
aauuuuuuuuaaca

SEQ ID NO: 3466111 - RNA, 20 nt, Human
aauuuuuuuuauuaguauug

SEQ ID NO: 3466112 - RNA, 20 nt, Human
aauuuuuuuuucauagagau

SEQ ID NO: 3466113 - RNA, 23 nt, Human
acaaaaaaaaaaaaagaagaccg

SEQ ID NO: 3466114 - RNA, 21 nt, Human
acaaaaaaaaaguuuuauuuu

SEQ ID NO: 3466115 - RNA, 16 nt, Human
acaaaaaaaucugcag

SEQ ID NO: 3466116 - RNA, 19 nt, Human
acaaaaaaaucugcagaag

SEQ ID NO: 3466117 - RNA, 13 nt, Human
acaaaaacacagc

SEQ ID NO: 3466118 - RNA, 14 nt, Human
acaaaaacacagca

SEQ ID NO: 3466119 - RNA, 13 nt, Human
acaaaaacaggua

SEQ ID NO: 3466120 - RNA, 20 nt, Human
acaaaaacagguauauacuu

SEQ ID NO: 3466121 - RNA, 18 nt, Human
acaaaaaccaaauguuua

SEQ ID NO: 3466122 - RNA, 18 nt, Human
acaaaaagaaaagaaaau

SEQ ID NO: 3466123 - RNA, 16 nt, Human
acaaaaagacacuuga

SEQ ID NO: 3466124 - RNA, 16 nt, Human
acaaaaagaugucuca

SEQ ID NO: 3466125 - RNA, 16 nt, Human
acaaaaagcauaaaaa

SEQ ID NO: 3466126 - RNA, 15 nt, Human
acaaaaagcuucccc

SEQ ID NO: 3466127 - RNA, 22 nt, Human
acaaaaagguaaaacuuuuuau

SEQ ID NO: 3466128 - RNA, 18 nt, Human
acaaaaaguuuccauaug

SEQ ID NO: 3466129 - RNA, 12 nt, Human
acaaaaauacuc

SEQ ID NO: 3466130 - RNA, 20 nt, Human
acaaaaauacucuaauucua

SEQ ID NO: 3466131 - RNA, 13 nt, Human
acaaaaauauaaa

SEQ ID NO: 3466132 - RNA, 19 nt, Human
acaaaaaugaacugaaguu

SEQ ID NO: 3466133 - RNA, 14 nt, Human
acaaaaauuaaaau

SEQ ID NO: 3466134 - RNA, 14 nt, Human
acaaaaauuaggua

SEQ ID NO: 3466135 - RNA, 11 nt, Human
acaaaaauuau

SEQ ID NO: 3466136 - RNA, 17 nt, Human
acaaaaauucacaagcu

SEQ ID NO: 3466137 - RNA, 15 nt, Human
acaaaaauugacuca

SEQ ID NO: 3466138 - RNA, 14 nt, Human
acaaaacaaaacaa

SEQ ID NO: 3466139 - RNA, 15 nt, Human
acaaaacaaaacuau

SEQ ID NO: 3466140 - RNA, 19 nt, Human
acaaaacaaagcaauucuu

SEQ ID NO: 3466141 - RNA, 12 nt, Human
acaaaacaaauc

SEQ ID NO: 3466142 - RNA, 17 nt, Human
acaaaacaacccuagag

SEQ ID NO: 3466143 - RNA, 21 nt, Human
acaaaaccuaacuugcgcaga

SEQ ID NO: 3466144 - RNA, 17 nt, Human
acaaaacgcgcagaugu

SEQ ID NO: 3466145 - RNA, 15 nt, Human
acaaaacuacaugag

SEQ ID NO: 3466146 - RNA, 17 nt, Human
acaaaacuacaugagaa

SEQ ID NO: 3466147 - RNA, 17 nt, Human
acaaaacuauacuugaa

SEQ ID NO: 3466148 - RNA, 21 nt, Human
acaaaacuauacuugaacaaa

SEQ ID NO: 3466149 - RNA, 14 nt, Human
acaaaacugcauuu

SEQ ID NO: 3466150 - RNA, 16 nt, Human
acaaaacugcauuuca

SEQ ID NO: 3466151 - RNA, 12 nt, Human
acaaaacuucuu

SEQ ID NO: 3466152 - RNA, 20 nt, Human
acaaaacuucuugucagaca

SEQ ID NO: 3466153 - RNA, 20 nt, Human
acaaaagaagcccggcuccu

SEQ ID NO: 3466154 - RNA, 23 nt, Human
acaaaagcaagacuguugcucaa

SEQ ID NO: 3466155 - RNA, 11 nt, Human
acaaaagcaau

SEQ ID NO: 3466156 - RNA, 21 nt, Human
acaaaagcauucggagggagg

SEQ ID NO: 3466157 - RNA, 14 nt, Human
acaaaagggucaga

SEQ ID NO: 3466158 - RNA, 15 nt, Human
acaaaagucugucuu

SEQ ID NO: 3466159 - RNA, 12 nt, Human
acaaaauaaaca

SEQ ID NO: 3466160 - RNA, 12 nt, Human
acaaaauagaag

SEQ ID NO: 3466161 - RNA, 22 nt, Human
acaaaauauaaagcaucuaaac

SEQ ID NO: 3466162 - RNA, 13 nt, Human
acagaagcagcuc

SEQ ID NO: 3466163 - RNA, 14 nt, Human
acagaagcagcucu

SEQ ID NO: 3466164 - RNA, 15 nt, Human
acagaagcagcucuu

SEQ ID NO: 3466165 - RNA, 14 nt, Human
acagaagcauuugu

SEQ ID NO: 3466166 - RNA, 20 nt, Human
acagaagcauuuguauuuug

SEQ ID NO: 3466167 - RNA, 21 nt, Human
acagaagcauuuguauuuugu

SEQ ID NO: 3466168 - RNA, 23 nt, Human
acagaagcauuuguauuuugugu

SEQ ID NO: 3466169 - RNA, 21 nt, Human
acagaagccaggagcaaaugu

SEQ ID NO: 3466170 - RNA, 22 nt, Human
acagaagcucuuacucuuuccu

SEQ ID NO: 3466171 - RNA, 13 nt, Human
acagaagcuucca

SEQ ID NO: 3466172 - RNA, 16 nt, Human
acagaaggcuccugcc

SEQ ID NO: 3466173 - RNA, 18 nt, Human
acagaaggcuccugcccc

SEQ ID NO: 3466174 - RNA, 17 nt, Human
acagaaggggacugcca

SEQ ID NO: 3466175 - RNA, 16 nt, Human
acagaagucaugaagc

SEQ ID NO: 3466176 - RNA, 17 nt, Human
acagaaguuugcacuau

SEQ ID NO: 3466177 - RNA, 17 nt, Human
acagaauauguuucaaa

SEQ ID NO: 3466178 - RNA, 19 nt, Human
acagaauauguuucaaacu

SEQ ID NO: 3466179 - RNA, 12 nt, Human
acagaauauuuc

SEQ ID NO: 3466180 - RNA, 21 nt, Human
acagaauauuucuauugaauu

SEQ ID NO: 3466181 - RNA, 22 nt, Human
acagaauauuuuuauauuuccu

SEQ ID NO: 3466182 - RNA, 23 nt, Human
acagaauauuuuuauauuuccuu

SEQ ID NO: 3466183 - RNA, 22 nt, Human
acagaaucauaugauucugcuu

SEQ ID NO: 3466184 - RNA, 19 nt, Human
acagaaucuuguuuugaaa

SEQ ID NO: 3466185 - RNA, 16 nt, Human
acagaaugaaaaauga

SEQ ID NO: 3466186 - RNA, 20 nt, Human
acagaaugaaaaaugaaaga

SEQ ID NO: 3466187 - RNA, 22 nt, Human
acagaaugaaaaaugaaagaug

SEQ ID NO: 3466188 - RNA, 13 nt, Human
acagaauguaucu

SEQ ID NO: 3466189 - RNA, 14 nt, Human
acagaauguaucug

SEQ ID NO: 3466190 - RNA, 18 nt, Human
acagaauguaucugugaa

SEQ ID NO: 3466191 - RNA, 18 nt, Human
acagaaugugauaaggaa

SEQ ID NO: 3466192 - RNA, 18 nt, Human
acagaauugugucugcag

SEQ ID NO: 3466193 - RNA, 21 nt, Human
acagacaagguagcccuggcc

SEQ ID NO: 3466194 - RNA, 14 nt, Human
acagacacacgcac

SEQ ID NO: 3466195 - RNA, 18 nt, Human
acagacacaggcccggcu

SEQ ID NO: 3466196 - RNA, 20 nt, Human
acagacacgagccaccucac

SEQ ID NO: 3466197 - RNA, 13 nt, Human
acagacaggaccc

SEQ ID NO: 3466198 - RNA, 18 nt, Human
acagacaggaccccugca

SEQ ID NO: 3466199 - RNA, 13 nt, Human
acagacaggagaa

SEQ ID NO: 3466200 - RNA, 15 nt, Human
acagacaggagaaau

SEQ ID NO: 3466201 - RNA, 21 nt, Human
acagacaggagaaaugcaucc

SEQ ID NO: 3466202 - RNA, 17 nt, Human
acagacauucugccagg

SEQ ID NO: 3466203 - RNA, 16 nt, Human
acagacauuguuuugc

SEQ ID NO: 3466204 - RNA, 21 nt, Human
acagaccacaucuuuaucugu

SEQ ID NO: 3466205 - RNA, 17 nt, Human
acagacccugcccugug

SEQ ID NO: 3466206 - RNA, 18 nt, Human
acagacccugcccugugg

SEQ ID NO: 3466207 - RNA, 19 nt, Human
acagaccgaacuguuguau

SEQ ID NO: 3466208 - RNA, 16 nt, Human
acagaccuaaugcucc

SEQ ID NO: 3466209 - RNA, 14 nt, Human
acagaccuuugaac

SEQ ID NO: 3466210 - RNA, 20 nt, Human
acagacguaugcuuauuuua

SEQ ID NO: 3466211 - RNA, 20 nt, Human
acagacucacaaccugaacc

SEQ ID NO: 3466212 - RNA, 18 nt, Human
acagacucauccugaaca

SEQ ID NO: 3466213 - RNA, 17 nt, Human
acagacuccugaggaca

SEQ ID NO: 3466214 - RNA, 23 nt, Human
acagacuccugaggacagcuguc

SEQ ID NO: 3466215 - RNA, 19 nt, Human
acagacugaccuugaugag

SEQ ID NO: 3466216 - RNA, 23 nt, Human
acagacugcaagaggcuccuguc

SEQ ID NO: 3466217 - RNA, 23 nt, Human
acagacugcgauuugucccaggu

SEQ ID NO: 3466218 - RNA, 14 nt, Human
acagacuggaagca

SEQ ID NO: 3466219 - RNA, 18 nt, Human
acagacuggagacaaugc

SEQ ID NO: 3466220 - RNA, 20 nt, Human
acagacuggauguaccacca

SEQ ID NO: 3466221 - RNA, 15 nt, Human
acagacuguuaauua

SEQ ID NO: 3466222 - RNA, 16 nt, Human
acagacuucuccagac

SEQ ID NO: 3466223 - RNA, 13 nt, Human
acagacuucugaa

SEQ ID NO: 3466224 - RNA, 15 nt, Human
acagacuugagaacu

SEQ ID NO: 3466225 - RNA, 17 nt, Human
acagacuugagaacuug

SEQ ID NO: 3466226 - RNA, 18 nt, Human
acagacuugagaacuuga

SEQ ID NO: 3466227 - RNA, 20 nt, Human
acagacuuuagcuuucugag

SEQ ID NO: 3466228 - RNA, 15 nt, Human
acagagaaaccagcu

SEQ ID NO: 3466229 - RNA, 17 nt, Human
acagagaaaccagcuuc

SEQ ID NO: 3466230 - RNA, 19 nt, Human
acagagaaaccagcuuccu

SEQ ID NO: 3466231 - RNA, 23 nt, Human
acagagaaaccagcuuccuucag

SEQ ID NO: 3466232 - RNA, 17 nt, Human
acagagaaagagagaga

SEQ ID NO: 3466233 - RNA, 10 nt, Human
acagagaagc

SEQ ID NO: 3466234 - RNA, 14 nt, Human
acagagaagccagc

SEQ ID NO: 3466235 - RNA, 15 nt, Human
acagagaagccuuca

SEQ ID NO: 3466236 - RNA, 20 nt, Human
acagagaagccuucaagcuc

SEQ ID NO: 3466237 - RNA, 17 nt, Human
acagagaagcuggggag

SEQ ID NO: 3466238 - RNA, 21 nt, Human
acagagaaggaaugucuuugg

SEQ ID NO: 3466239 - RNA, 16 nt, Human
acagagaaggcagcag

SEQ ID NO: 3466240 - RNA, 15 nt, Human
acagagaaggcagga

SEQ ID NO: 3466241 - RNA, 18 nt, Human
acagagaagucacagggc

SEQ ID NO: 3466242 - RNA, 19 nt, Human
acagagaagucacagggca

SEQ ID NO: 3466243 - RNA, 18 nt, Human
acagagacaaguaauuuc

SEQ ID NO: 3466244 - RNA, 15 nt, Human
acagagacaggccca

SEQ ID NO: 3466245 - RNA, 21 nt, Human
acagagacaggcccaagagau

SEQ ID NO: 3466246 - RNA, 17 nt, Human
acagagacauuccuccg

SEQ ID NO: 3466247 - RNA, 13 nt, Human
acagagaccaaga

SEQ ID NO: 3466248 - RNA, 15 nt, Human
acagagaggacgugg

SEQ ID NO: 3466249 - RNA, 14 nt, Human
acagagaggagaaa

SEQ ID NO: 3466250 - RNA, 21 nt, Human
acagagagggggccaccuccc

SEQ ID NO: 3466251 - RNA, 22 nt, Human
acagagagucccacugccucag

SEQ ID NO: 3466252 - RNA, 13 nt, Human
acagagaugucuc

SEQ ID NO: 3466253 - RNA, 15 nt, Human
acagagaugucucuu

SEQ ID NO: 3466254 - RNA, 16 nt, Human
acagagauucugaacu

SEQ ID NO: 3466255 - RNA, 17 nt, Human
acagagauugaacucca

SEQ ID NO: 3466256 - RNA, 20 nt, Human
acagagauugaacuccaaga

SEQ ID NO: 3466257 - RNA, 20 nt, Human
acagagcaaccccuggaccc

SEQ ID NO: 3466258 - RNA, 22 nt, Human
acagagcaaccccuggacccca

SEQ ID NO: 3466259 - RNA, 22 nt, Human
acagagcacuagguucaauucc

SEQ ID NO: 3466260 - RNA, 14 nt, Human
acagagcaggacug

SEQ ID NO: 3466261 - RNA, 11 nt, Human
acagagccagg

SEQ ID NO: 3466262 - RNA, 17 nt, Human
acagagccaggagaagc

SEQ ID NO: 3466263 - RNA, 14 nt, Human
acagagcccacgcc

SEQ ID NO: 3466264 - RNA, 19 nt, Human
acagagcccacgcccccac

SEQ ID NO: 3466265 - RNA, 20 nt, Human
acagagcccacgcccccacu

SEQ ID NO: 3466266 - RNA, 12 nt, Human
acagagccugcc

SEQ ID NO: 3466267 - RNA, 21 nt, Human
acagagcgagagucugucuca

SEQ ID NO: 3466268 - RNA, 22 nt, Human
acagagcguggcugugcucuca

SEQ ID NO: 3466269 - RNA, 18 nt, Human
acagagcucuccagcucc

SEQ ID NO: 3466270 - RNA, 21 nt, Human
acagagcugguugggaagaca

SEQ ID NO: 3466271 - RNA, 22 nt, Human
acagagcugucacuuuugcucc

SEQ ID NO: 3466272 - RNA, 12 nt, Human
acagagcugugg

SEQ ID NO: 3466273 - RNA, 14 nt, Human
acagagcuucccug

SEQ ID NO: 3466274 - RNA, 19 nt, Human
acagaggaaacaauauuua

SEQ ID NO: 3466275 - RNA, 23 nt, Human
acagaggaaacaauauuuauaaa

SEQ ID NO: 3466276 - RNA, 16 nt, Human
acagaggacacagaga

SEQ ID NO: 3466277 - RNA, 12 nt, Human
acagaggaccag

SEQ ID NO: 3466278 - RNA, 15 nt, Human
acagaggaccagcac

SEQ ID NO: 3466279 - RNA, 17 nt, Human
acagaggagagucccag

SEQ ID NO: 3466280 - RNA, 15 nt, Human
acagaggcagcccca

SEQ ID NO: 3466281 - RNA, 23 nt, Human
acagaggcagccccauucugccu

SEQ ID NO: 3466282 - RNA, 17 nt, Human
acagaggccccagccuc

SEQ ID NO: 3466283 - RNA, 17 nt, Human
acagaggcuauuguccc

SEQ ID NO: 3466284 - RNA, 20 nt, Human
acagaggggacucugggcua

SEQ ID NO: 3466285 - RNA, 22 nt, Human
acagaggggguggccucccaac

SEQ ID NO: 3466286 - RNA, 19 nt, Human
acagagggucacaguguuu

SEQ ID NO: 3466287 - RNA, 13 nt, Human
acagaguaagaca

SEQ ID NO: 3466288 - RNA, 15 nt, Human
acagaguaaucuugu

SEQ ID NO: 3466289 - RNA, 18 nt, Human
acagagucaaggccugcu

SEQ ID NO: 3466290 - RNA, 12 nt, Human
acagagucucac

SEQ ID NO: 3466291 - RNA, 14 nt, Human
acagagucuuccuc

SEQ ID NO: 3466292 - RNA, 16 nt, Human
acagagugcuuuucug

SEQ ID NO: 3466293 - RNA, 22 nt, Human
acagaguggacuguucccugag

SEQ ID NO: 3466294 - RNA, 14 nt, Human
acagaguggccguc

SEQ ID NO: 3466295 - RNA, 13 nt, Human
acagaguguagcc

SEQ ID NO: 3466296 - RNA, 13 nt, Human
acagaguugauuu

SEQ ID NO: 3466297 - RNA, 15 nt, Human
acagaguuguuacau

SEQ ID NO: 3466298 - RNA, 20 nt, Human
acagaguuguuacauuuuua

SEQ ID NO: 3466299 - RNA, 22 nt, Human
acagaguuguuacauuuuuaag

SEQ ID NO: 3466300 - RNA, 20 nt, Human
acagaguuuucacucuuauu

SEQ ID NO: 3466301 - RNA, 13 nt, Human
acagauaaaaugu

SEQ ID NO: 3466302 - RNA, 14 nt, Human
acagauaaaugauu

SEQ ID NO: 3466303 - RNA, 22 nt, Human
acagauaacauuagguuguccu

SEQ ID NO: 3466304 - RNA, 14 nt, Human
acagauaacugaaa

SEQ ID NO: 3466305 - RNA, 18 nt, Human
acagauaacugaaaauua

SEQ ID NO: 3466306 - RNA, 22 nt, Human
acaugcacuuggcugcauaaau

SEQ ID NO: 3466307 - RNA, 11 nt, Human
acaugcaguuu

SEQ ID NO: 3466308 - RNA, 12 nt, Human
acaugcaguuug

SEQ ID NO: 3466309 - RNA, 22 nt, Human
acaugcaguuugaaauucugaa

SEQ ID NO: 3466310 - RNA, 17 nt, Human
acaugcauacacacaca

SEQ ID NO: 3466311 - RNA, 13 nt, Human
acaugcauauaau

SEQ ID NO: 3466312 - RNA, 16 nt, Human
acaugcauauaaugaa

SEQ ID NO: 3466313 - RNA, 23 nt, Human
acaugcauauaaugaauaaauca

SEQ ID NO: 3466314 - RNA, 16 nt, Human
acaugcauuacugcau

SEQ ID NO: 3466315 - RNA, 20 nt, Human
acaugcauuacugcaugcac

SEQ ID NO: 3466316 - RNA, 21 nt, Human
acaugcauuugaggucaagua

SEQ ID NO: 3466317 - RNA, 16 nt, Human
acaugccucucucagg

SEQ ID NO: 3466318 - RNA, 19 nt, Human
acaugccucucucaggcca

SEQ ID NO: 3466319 - RNA, 20 nt, Human
acaugccucucucaggccaa

SEQ ID NO: 3466320 - RNA, 22 nt, Human
acaugccugccccaaacaaaua

SEQ ID NO: 3466321 - RNA, 21 nt, Human
acaugcgggcugggcagcugu

SEQ ID NO: 3466322 - RNA, 22 nt, Human
acaugcgguagccagcacacag

SEQ ID NO: 3466323 - RNA, 23 nt, Human
acaugcgguagccagcacacagg

SEQ ID NO: 3466324 - RNA, 15 nt, Human
acaugcuacacacug

SEQ ID NO: 3466325 - RNA, 21 nt, Human
acaugcuacacacugcauguu

SEQ ID NO: 3466326 - RNA, 18 nt, Human
acaugcuaggaugcggaa

SEQ ID NO: 3466327 - RNA, 16 nt, Human
acaugcuccagauuag

SEQ ID NO: 3466328 - RNA, 21 nt, Human
acaugcugaacaucacagcuu

SEQ ID NO: 3466329 - RNA, 17 nt, Human
acaugcugaagccaaag

SEQ ID NO: 3466330 - RNA, 19 nt, Human
acaugcuggccagccuggg

SEQ ID NO: 3466331 - RNA, 15 nt, Human
acaugcuuauuccau

SEQ ID NO: 3466332 - RNA, 17 nt, Human
acaugcuuauuccauga

SEQ ID NO: 3466333 - RNA, 23 nt, Human
acaugcuucaugaaaauccuacc

SEQ ID NO: 3466334 - RNA, 20 nt, Human
acaugcuuguguuucuuagu

SEQ ID NO: 3466335 - RNA, 13 nt, Human
acaugcuuuguga

SEQ ID NO: 3466336 - RNA, 21 nt, Human
acauggaaacccauaggccca

SEQ ID NO: 3466337 - RNA, 14 nt, Human
acauggaagggaag

SEQ ID NO: 3466338 - RNA, 18 nt, Human
acauggaauaacauguaa

SEQ ID NO: 3466339 - RNA, 20 nt, Human
acauggaauauauuuuaaua

SEQ ID NO: 3466340 - RNA, 19 nt, Human
acauggaaugaggguuuga

SEQ ID NO: 3466341 - RNA, 19 nt, Human
acauggacccggagcuaac

SEQ ID NO: 3466342 - RNA, 15 nt, Human
acauggacucagaga

SEQ ID NO: 3466343 - RNA, 17 nt, Human
acauggacuuguauauu

SEQ ID NO: 3466344 - RNA, 23 nt, Human
acauggacuuguauauuuguaca

SEQ ID NO: 3466345 - RNA, 15 nt, Human
acauggagacuccug

SEQ ID NO: 3466346 - RNA, 15 nt, Human
acauggagguucuaa

SEQ ID NO: 3466347 - RNA, 19 nt, Human
acauggagguucuaaggcc

SEQ ID NO: 3466348 - RNA, 19 nt, Human
acauggauucaguuucuaa

SEQ ID NO: 3466349 - RNA, 22 nt, Human
acauggcucuggacucuaaaga

SEQ ID NO: 3466350 - RNA, 13 nt, Human
acauggcuuccuc

SEQ ID NO: 3466351 - RNA, 22 nt, Human
acaugggaaacuuccaagaccu

SEQ ID NO: 3466352 - RNA, 15 nt, Human
acaugggacauuugc

SEQ ID NO: 3466353 - RNA, 20 nt, Human
acaugggagccgggucugcc

SEQ ID NO: 3466354 - RNA, 11 nt, Human
acauggggagg

SEQ ID NO: 3466355 - RNA, 18 nt, Human
acauggggcugggcagcu

SEQ ID NO: 3466356 - RNA, 17 nt, Human
acaugggguuggcuggg

SEQ ID NO: 3466357 - RNA, 16 nt, Human
acauggguagcuucug

SEQ ID NO: 3466358 - RNA, 16 nt, Human
acaugggucgcccaug

SEQ ID NO: 3466359 - RNA, 23 nt, Human
acaugguacucuuguugaguucu

SEQ ID NO: 3466360 - RNA, 22 nt, Human
acaugguagccaguugaauuua

SEQ ID NO: 3466361 - RNA, 18 nt, Human
acauggugccccuagcuu

SEQ ID NO: 3466362 - RNA, 19 nt, Human
acauggugccccuagcuuu

SEQ ID NO: 3466363 - RNA, 18 nt, Human
acauggugccugagaggc

SEQ ID NO: 3466364 - RNA, 19 nt, Human
acauggugcuacgccugca

SEQ ID NO: 3466365 - RNA, 23 nt, Human
acaugguggggucuccucaggac

SEQ ID NO: 3466366 - RNA, 18 nt, Human
acaugguggguccauggg

SEQ ID NO: 3466367 - RNA, 19 nt, Human
acaugguggguccaugggc

SEQ ID NO: 3466368 - RNA, 23 nt, Human
acaugguuacaaucauugcugaa

SEQ ID NO: 3466369 - RNA, 19 nt, Human
acaugguuaccaugucuuu

SEQ ID NO: 3466370 - RNA, 20 nt, Human
acaugguugugaccugagga

SEQ ID NO: 3466371 - RNA, 14 nt, Human
acaugguuuaaaag

SEQ ID NO: 3466372 - RNA, 21 nt, Human
acaugguuuaaaagaaaaaau

SEQ ID NO: 3466373 - RNA, 15 nt, Human
acauguaauuaagua

SEQ ID NO: 3466374 - RNA, 11 nt, Human
acauguacaga

SEQ ID NO: 3466375 - RNA, 17 nt, Human
acauguaggaaguagga

SEQ ID NO: 3466376 - RNA, 18 nt, Human
acauguaucuaugcauuu

SEQ ID NO: 3466377 - RNA, 15 nt, Human
acauguauuauuuca

SEQ ID NO: 3466378 - RNA, 13 nt, Human
acauguauuuaug

SEQ ID NO: 3466379 - RNA, 15 nt, Human
acauguauuuaugua

SEQ ID NO: 3466380 - RNA, 16 nt, Human
acauguauuuguuugc

SEQ ID NO: 3466381 - RNA, 15 nt, Human
acaugucaaucuguc

SEQ ID NO: 3466382 - RNA, 23 nt, Human
acaugucaccguggaccuuccug

SEQ ID NO: 3466383 - RNA, 18 nt, Human
acaugucaguaccuucaa

SEQ ID NO: 3466384 - RNA, 19 nt, Human
acaugucaguaccuucaaa

SEQ ID NO: 3466385 - RNA, 21 nt, Human
acaugucaguaccuucaaacu

SEQ ID NO: 3466386 - RNA, 14 nt, Human
agaaugaguuucuu

SEQ ID NO: 3466387 - RNA, 15 nt, Human
agaaugaguuucuua

SEQ ID NO: 3466388 - RNA, 16 nt, Human
agaaugaucugauuga

SEQ ID NO: 3466389 - RNA, 13 nt, Human
agaaugaugcuca

SEQ ID NO: 3466390 - RNA, 21 nt, Human
agaaugaugguuuccaauuuc

SEQ ID NO: 3466391 - RNA, 16 nt, Human
agaaugauuuuuagau

SEQ ID NO: 3466392 - RNA, 20 nt, Human
agaaugcacaagaauggauc

SEQ ID NO: 3466393 - RNA, 16 nt, Human
agaaugcaugcuuucc

SEQ ID NO: 3466394 - RNA, 23 nt, Human
agaaugcaugcuuuccauauuuu

SEQ ID NO: 3466395 - RNA, 17 nt, Human
agaaugcugaaaccaag

SEQ ID NO: 3466396 - RNA, 14 nt, Human
agaaugcuguacau

SEQ ID NO: 3466397 - RNA, 20 nt, Human
agaaugcuuaaucagauaga

SEQ ID NO: 3466398 - RNA, 23 nt, Human
agaauggaaaccacaacuuuuaa

SEQ ID NO: 3466399 - RNA, 15 nt, Human
agaauggagaggaac

SEQ ID NO: 3466400 - RNA, 18 nt, Human
agaauggauaaaauaaug

SEQ ID NO: 3466401 - RNA, 16 nt, Human
agaauggcagaaaagu

SEQ ID NO: 3466402 - RNA, 18 nt, Human
agaauggcuuuggucucu

SEQ ID NO: 3466403 - RNA, 23 nt, Human
agaauggcuuuggucucuugcuu

SEQ ID NO: 3466404 - RNA, 16 nt, Human
agaaugggcaguuaca

SEQ ID NO: 3466405 - RNA, 19 nt, Human
agaaugggcaguuacaugc

SEQ ID NO: 3466406 - RNA, 21 nt, Human
agaaugguccgugcuaaggac

SEQ ID NO: 3466407 - RNA, 14 nt, Human
agaauggugauuuu

SEQ ID NO: 3466408 - RNA, 21 nt, Human
agaauggugauuuuaaaugug

SEQ ID NO: 3466409 - RNA, 23 nt, Human
agaauggugugggagagggauga

SEQ ID NO: 3466410 - RNA, 21 nt, Human
agaaugguugccuuaaagaaa

SEQ ID NO: 3466411 - RNA, 16 nt, Human
agaauguaaaagaacu

SEQ ID NO: 3466412 - RNA, 12 nt, Human
agaauguaaagc

SEQ ID NO: 3466413 - RNA, 14 nt, Human
agaauguaaauguc

SEQ ID NO: 3466414 - RNA, 19 nt, Human
agaauguaaaugucucacu

SEQ ID NO: 3466415 - RNA, 15 nt, Human
agaauguaagaacua

SEQ ID NO: 3466416 - RNA, 16 nt, Human
agaauguaagaacuac

SEQ ID NO: 3466417 - RNA, 21 nt, Human
agaauguaagguauaucauuc

SEQ ID NO: 3466418 - RNA, 14 nt, Human
agaauguaguuuga

SEQ ID NO: 3466419 - RNA, 18 nt, Human
agaauguaguuugaggaa

SEQ ID NO: 3466420 - RNA, 17 nt, Human
agaauguaucugugaag

SEQ ID NO: 3466421 - RNA, 17 nt, Human
agaaugucagaaaaaca

SEQ ID NO: 3466422 - RNA, 17 nt, Human
agaaugucaguaugugg

SEQ ID NO: 3466423 - RNA, 23 nt, Human
agaaugucauuuugguacuuugg

SEQ ID NO: 3466424 - RNA, 18 nt, Human
agaauguguuucaaacug

SEQ ID NO: 3466425 - RNA, 18 nt, Human
agaauguguuuucugaau

SEQ ID NO: 3466426 - RNA, 15 nt, Human
agaauguuagagcac

SEQ ID NO: 3466427 - RNA, 15 nt, Human
agaauguuagaguaa

SEQ ID NO: 3466428 - RNA, 19 nt, Human
agaauguugaauacuuaua

SEQ ID NO: 3466429 - RNA, 18 nt, Human
agaauguuguauucagug

SEQ ID NO: 3466430 - RNA, 15 nt, Human
agaauguuucauuug

SEQ ID NO: 3466431 - RNA, 18 nt, Human
agaauuaaacuuuuaauu

SEQ ID NO: 3466432 - RNA, 20 nt, Human
agaauuaaacuuuuaauuca

SEQ ID NO: 3466433 - RNA, 21 nt, Human
agaauuaaacuuuuaauucau

SEQ ID NO: 3466434 - RNA, 17 nt, Human
agaauuaacagagauug

SEQ ID NO: 3466435 - RNA, 20 nt, Human
agaauuagauuucuauagga

SEQ ID NO: 3466436 - RNA, 16 nt, Human
agaauuagcuuuuuca

SEQ ID NO: 3466437 - RNA, 22 nt, Human
agaauuagcuuuuucauccccu

SEQ ID NO: 3466438 - RNA, 14 nt, Human
agaauuaucuaauu

SEQ ID NO: 3466439 - RNA, 15 nt, Human
agaauuaucuaauuu

SEQ ID NO: 3466440 - RNA, 18 nt, Human
agaauuaucuaauuuaua

SEQ ID NO: 3466441 - RNA, 21 nt, Human
agaauuauuucacaaauaaua

SEQ ID NO: 3466442 - RNA, 23 nt, Human
agaauuauuuuuaaaaagaaauc

SEQ ID NO: 3466443 - RNA, 20 nt, Human
agaauucaaacuggggccuc

SEQ ID NO: 3466444 - RNA, 18 nt, Human
agaauucauucauacuua

SEQ ID NO: 3466445 - RNA, 15 nt, Human
agaauucccagcugu

SEQ ID NO: 3466446 - RNA, 19 nt, Human
agaauucccucucucugac

SEQ ID NO: 3466447 - RNA, 14 nt, Human
agaauucucuaguu

SEQ ID NO: 3466448 - RNA, 18 nt, Human
agaauucucuaguuugau

SEQ ID NO: 3466449 - RNA, 18 nt, Human
agaauucugauugauuug

SEQ ID NO: 3466450 - RNA, 23 nt, Human
agaauucugauugauuugauugg

SEQ ID NO: 3466451 - RNA, 13 nt, Human
agaauucugcuac

SEQ ID NO: 3466452 - RNA, 22 nt, Human
agaauucugcuaccucacuggg

SEQ ID NO: 3466453 - RNA, 17 nt, Human
agaauucuuacauguuu

SEQ ID NO: 3466454 - RNA, 19 nt, Human
agaauucuuacauguuuuc

SEQ ID NO: 3466455 - RNA, 13 nt, Human
agaauucuuucaa

SEQ ID NO: 3466456 - RNA, 14 nt, Human
agaauucuuucaag

SEQ ID NO: 3466457 - RNA, 18 nt, Human
agaauugaacccaggagg

SEQ ID NO: 3466458 - RNA, 22 nt, Human
agaauugaacccaggaggugga

SEQ ID NO: 3466459 - RNA, 14 nt, Human
agaauugaagguuu

SEQ ID NO: 3466460 - RNA, 20 nt, Human
agaauugaagguuuuugaua

SEQ ID NO: 3466461 - RNA, 21 nt, Human
agaauugaagguuuuugauag

SEQ ID NO: 3466462 - RNA, 17 nt, Human
agaauugaguguuuaaa

SEQ ID NO: 3466463 - RNA, 22 nt, Human
agaauugaucauuuucccccca

SEQ ID NO: 3466464 - RNA, 16 nt, Human
agaauugauugggcac

SEQ ID NO: 3466465 - RNA, 15 nt, Human
agaauugcaaucuau

SEQ ID NO: 3466466 - RNA, 22 nt, Human
agaauugcugauucuugaguuu

SEQ ID NO: 3466467 - RNA, 12 nt, Human
agaauuggaaaa

SEQ ID NO: 3466468 - RNA, 13 nt, Human
agaauuggcucaa

SEQ ID NO: 3466469 - RNA, 15 nt, Human
agaauuguaucauuu

SEQ ID NO: 3466470 - RNA, 11 nt, Human
agaauuguuau

SEQ ID NO: 3466471 - RNA, 15 nt, Human
agaauuguuuagauu

SEQ ID NO: 3466472 - RNA, 14 nt, Human
agaauuuagggaga

SEQ ID NO: 3466473 - RNA, 19 nt, Human
agaauuuagggagaaaugu

SEQ ID NO: 3466474 - RNA, 15 nt, Human
agaauuuagguuuuu

SEQ ID NO: 3466475 - RNA, 19 nt, Human
agaauuuaguauuaucaaa

SEQ ID NO: 3466476 - RNA, 18 nt, Human
agaauuucccaaagcagu

SEQ ID NO: 3466477 - RNA, 23 nt, Human
agaauuucccaaagcagugcaug

SEQ ID NO: 3466478 - RNA, 21 nt, Human
agaauuucuugguaagaagcc

SEQ ID NO: 3466479 - RNA, 22 nt, Human
agaauuugaagacuucaaaaua

SEQ ID NO: 3466480 - RNA, 18 nt, Human
agaauuugauaugugaac

SEQ ID NO: 3466481 - RNA, 17 nt, Human
agaauuugcauacuuac

SEQ ID NO: 3466482 - RNA, 16 nt, Human
agaauuuggaaauccu

SEQ ID NO: 3466483 - RNA, 22 nt, Human
agaauuuggaaauccuaguuuc

SEQ ID NO: 3466484 - RNA, 15 nt, Human
agaauuuguguugaa

SEQ ID NO: 3466485 - RNA, 18 nt, Human
agaauuuuaaaaaugaau

SEQ ID NO: 3466486 - RNA, 20 nt, Human
agaauuuuaaaaaugaaucc

SEQ ID NO: 3466487 - RNA, 18 nt, Human
agaauuuuaaauuauaac

SEQ ID NO: 3466488 - RNA, 16 nt, Human
agaauuuuaagccuuu

SEQ ID NO: 3466489 - RNA, 22 nt, Human
agaauuuuaggaacuucagaga

SEQ ID NO: 3466490 - RNA, 22 nt, Human
agaauuuuauacuuucccuacc

SEQ ID NO: 3466491 - RNA, 20 nt, Human
agaauuuucagaccccagcg

SEQ ID NO: 3466492 - RNA, 22 nt, Human
agaauuuuccugagacaaauuu

SEQ ID NO: 3466493 - RNA, 20 nt, Human
agaauuuuuuuuguuguuuc

SEQ ID NO: 3466494 - RNA, 16 nt, Human
agacaaaaacagccuc

SEQ ID NO: 3466495 - RNA, 18 nt, Human
agacaaaaagacaaacau

SEQ ID NO: 3466496 - RNA, 19 nt, Human
agacaaaaaguauauuaaa

SEQ ID NO: 3466497 - RNA, 23 nt, Human
agacaaaaaguauauuaaacaaa

SEQ ID NO: 3466498 - RNA, 17 nt, Human
agacaaaagucugucuu

SEQ ID NO: 3466499 - RNA, 22 nt, Human
agacaaaagucugucuuuccug

SEQ ID NO: 3466500 - RNA, 16 nt, Human
agacaaaauggauaca

SEQ ID NO: 3466501 - RNA, 16 nt, Human
agacaaaccagaagca

SEQ ID NO: 3466502 - RNA, 21 nt, Human
agacaaacuuugcaucucagu

SEQ ID NO: 3466503 - RNA, 13 nt, Human
agacaaauacuca

SEQ ID NO: 3466504 - RNA, 14 nt, Human
agacaaauacucau

SEQ ID NO: 3466505 - RNA, 12 nt, Human
agacaaauagua

SEQ ID NO: 3466506 - RNA, 15 nt, Human
agacaaauauuugga

SEQ ID NO: 3466507 - RNA, 17 nt, Human
agacaaaucaacagaag

SEQ ID NO: 3466508 - RNA, 14 nt, Human
agacaaauggagga

SEQ ID NO: 3466509 - RNA, 14 nt, Human
agacaacagaaguc

SEQ ID NO: 3466510 - RNA, 21 nt, Human
agacaacgugcucuuuguuuu

SEQ ID NO: 3466511 - RNA, 23 nt, Human
agacaacgugcucuuuguuuugu

SEQ ID NO: 3466512 - RNA, 15 nt, Human
agacaagaagcaaau

SEQ ID NO: 3466513 - RNA, 15 nt, Human
agacaagacuucagu

SEQ ID NO: 3466514 - RNA, 19 nt, Human
agacaagacuucaguaugu

SEQ ID NO: 3466515 - RNA, 16 nt, Human
agacaagauauuguac

SEQ ID NO: 3466516 - RNA, 18 nt, Human
agacaagauauuguacau

SEQ ID NO: 3466517 - RNA, 19 nt, Human
agacaagauauuguacaua

SEQ ID NO: 3466518 - RNA, 20 nt, Human
agacaagauuuuuuaauugu

SEQ ID NO: 3466519 - RNA, 22 nt, Human
agacaagauuuuuuaauuguuu

SEQ ID NO: 3466520 - RNA, 17 nt, Human
agacaagccagaacuug

SEQ ID NO: 3466521 - RNA, 17 nt, Human
agacaagccuggccuac

SEQ ID NO: 3466522 - RNA, 13 nt, Human
agacaaggaaaua

SEQ ID NO: 3466523 - RNA, 15 nt, Human
agacaaguaauuuca

SEQ ID NO: 3466524 - RNA, 22 nt, Human
agacaaguaauuucaguguaaa

SEQ ID NO: 3466525 - RNA, 23 nt, Human
agacaagugacuguaucugugua

SEQ ID NO: 3466526 - RNA, 18 nt, Human
agacaauagcauuagaaa

SEQ ID NO: 3466527 - RNA, 15 nt, Human
agacaaucauuguuu

SEQ ID NO: 3466528 - RNA, 15 nt, Human
agacaaucuucuguu

SEQ ID NO: 3466529 - RNA, 21 nt, Human
agacaaugacuuacuguacau

SEQ ID NO: 3466530 - RNA, 14 nt, Human
agacaauucuuuau

SEQ ID NO: 3466531 - RNA, 18 nt, Human
agacaauucuuuauacaa

SEQ ID NO: 3466532 - RNA, 16 nt, Human
agacaauugacaacag

SEQ ID NO: 3466533 - RNA, 14 nt, Human
agacaauuuauuau

SEQ ID NO: 3466534 - RNA, 15 nt, Human
agacaauuuauuaug

SEQ ID NO: 3466535 - RNA, 15 nt, Human
agacugcacccagga

SEQ ID NO: 3466536 - RNA, 18 nt, Human
agacugcacccaggaggg

SEQ ID NO: 3466537 - RNA, 18 nt, Human
agacugcagguuggaccc

SEQ ID NO: 3466538 - RNA, 12 nt, Human
agacugccagcu

SEQ ID NO: 3466539 - RNA, 20 nt, Human
agacugcuccugagccccca

SEQ ID NO: 3466540 - RNA, 21 nt, Human
agacugcuccugagcccccag

SEQ ID NO: 3466541 - RNA, 23 nt, Human
agacugcuccugagcccccagcu

SEQ ID NO: 3466542 - RNA, 20 nt, Human
agacugcugggacuggccag

SEQ ID NO: 3466543 - RNA, 19 nt, Human
agacugcuguggccaggag

SEQ ID NO: 3466544 - RNA, 20 nt, Human
agacugcuguggccaggagg

SEQ ID NO: 3466545 - RNA, 20 nt, Human
agacugcuguguuugagcuc

SEQ ID NO: 3466546 - RNA, 16 nt, Human
agacugcuucccaucc

SEQ ID NO: 3466547 - RNA, 17 nt, Human
agacugcuucccauccu

SEQ ID NO: 3466548 - RNA, 14 nt, Human
agacuggaaaaaau

SEQ ID NO: 3466549 - RNA, 17 nt, Human
agacuggaacuugaacu

SEQ ID NO: 3466550 - RNA, 20 nt, Human
agacuggaagcuaauuugca

SEQ ID NO: 3466551 - RNA, 11 nt, Human
agacuggacag

SEQ ID NO: 3466552 - RNA, 15 nt, Human
agacuggacagcuug

SEQ ID NO: 3466553 - RNA, 23 nt, Human
agacuggaggggacgcugguaga

SEQ ID NO: 3466554 - RNA, 15 nt, Human
agacuggauacugcc

SEQ ID NO: 3466555 - RNA, 20 nt, Human
agacuggauaguccgucucu

SEQ ID NO: 3466556 - RNA, 18 nt, Human
agacuggcacaguuuucu

SEQ ID NO: 3466557 - RNA, 20 nt, Human
agacuggcacaguuuucuga

SEQ ID NO: 3466558 - RNA, 11 nt, Human
agacuggccug

SEQ ID NO: 3466559 - RNA, 17 nt, Human
agacuggcgugaaccca

SEQ ID NO: 3466560 - RNA, 14 nt, Human
agacuggcuggcug

SEQ ID NO: 3466561 - RNA, 20 nt, Human
agacuggcuggcugcaguga

SEQ ID NO: 3466562 - RNA, 20 nt, Human
agacugggcugagggagccu

SEQ ID NO: 3466563 - RNA, 18 nt, Human
agacuggguaggaaagag

SEQ ID NO: 3466564 - RNA, 18 nt, Human
agacugguccugugugca

SEQ ID NO: 3466565 - RNA, 18 nt, Human
agacuggugagcagacug

SEQ ID NO: 3466566 - RNA, 22 nt, Human
agacugguuuauccacccacaa

SEQ ID NO: 3466567 - RNA, 14 nt, Human
agacugguuuucug

SEQ ID NO: 3466568 - RNA, 21 nt, Human
agacuguaacuuccaaauaaa

SEQ ID NO: 3466569 - RNA, 16 nt, Human
agacuguagaagaaag

SEQ ID NO: 3466570 - RNA, 20 nt, Human
agacuguaggaagaguagca

SEQ ID NO: 3466571 - RNA, 22 nt, Human
agacuguaggaagaguagcauu

SEQ ID NO: 3466572 - RNA, 14 nt, Human
agacugucucaaga

SEQ ID NO: 3466573 - RNA, 18 nt, Human
agacugugacaacugucu

SEQ ID NO: 3466574 - RNA, 14 nt, Human
agacuguggcugcu

SEQ ID NO: 3466575 - RNA, 11 nt, Human
agacuguguau

SEQ ID NO: 3466576 - RNA, 23 nt, Human
agacugugugugcccucugggcu

SEQ ID NO: 3466577 - RNA, 17 nt, Human
agacuguguuugguccu

SEQ ID NO: 3466578 - RNA, 23 nt, Human
agacuguguuugguccuguagga

SEQ ID NO: 3466579 - RNA, 23 nt, Human
agacuguugcucaaaucuauuca

SEQ ID NO: 3466580 - RNA, 11 nt, Human
agacuguuggg

SEQ ID NO: 3466581 - RNA, 19 nt, Human
agacuguugucccugcacu

SEQ ID NO: 3466582 - RNA, 21 nt, Human
agacuuaaagggcccaaugaa

SEQ ID NO: 3466583 - RNA, 15 nt, Human
agacuuacucuaaga

SEQ ID NO: 3466584 - RNA, 20 nt, Human
agacuuacuuuacucauuuu

SEQ ID NO: 3466585 - RNA, 17 nt, Human
agacuuagggcaccagg

SEQ ID NO: 3466586 - RNA, 17 nt, Human
agacuucaaaauauuga

SEQ ID NO: 3466587 - RNA, 20 nt, Human
agacuucaaaauauugagca

SEQ ID NO: 3466588 - RNA, 15 nt, Human
agacuucacacugca

SEQ ID NO: 3466589 - RNA, 21 nt, Human
agacuucaguauguugucaaa

SEQ ID NO: 3466590 - RNA, 15 nt, Human
agacuuccaaagaau

SEQ ID NO: 3466591 - RNA, 15 nt, Human
agacuuccagagccu

SEQ ID NO: 3466592 - RNA, 14 nt, Human
agacuucccagcua

SEQ ID NO: 3466593 - RNA, 16 nt, Human
agacuucccuaacacu

SEQ ID NO: 3466594 - RNA, 16 nt, Human
agacuuccuugagaca

SEQ ID NO: 3466595 - RNA, 16 nt, Human
agacuucucuuugccu

SEQ ID NO: 3466596 - RNA, 19 nt, Human
agacuucucuuugccucaa

SEQ ID NO: 3466597 - RNA, 20 nt, Human
agacuucucuuugccucaaa

SEQ ID NO: 3466598 - RNA, 18 nt, Human
agacuucugcuuuccaca

SEQ ID NO: 3466599 - RNA, 17 nt, Human
agacuugaaaagagaca

SEQ ID NO: 3466600 - RNA, 19 nt, Human
agacuugaaaagagacagg

SEQ ID NO: 3466601 - RNA, 21 nt, Human
agacuugaaaagagacaggca

SEQ ID NO: 3466602 - RNA, 17 nt, Human
agacuugaaagaaaggg

SEQ ID NO: 3466603 - RNA, 14 nt, Human
agacuugaaauacu

SEQ ID NO: 3466604 - RNA, 14 nt, Human
agacuugacagugg

SEQ ID NO: 3466605 - RNA, 20 nt, Human
agacuugcugaaucggaauc

SEQ ID NO: 3466606 - RNA, 21 nt, Human
agacuuggauucuuuccauuu

SEQ ID NO: 3466607 - RNA, 17 nt, Human
agacuuggcaacagaag

SEQ ID NO: 3466608 - RNA, 22 nt, Human
agacuugguguccuuucccucc

SEQ ID NO: 3466609 - RNA, 16 nt, Human
agacuuguauauucua

SEQ ID NO: 3466610 - RNA, 18 nt, Human
agacuuguaugaaagaug

SEQ ID NO: 3466611 - RNA, 16 nt, Human
agacuuguuggcguag

SEQ ID NO: 3466612 - RNA, 21 nt, Human
agacuuguuggcguaggcuac

SEQ ID NO: 3466613 - RNA, 14 nt, Human
agacuuuaaaagca

SEQ ID NO: 3466614 - RNA, 14 nt, Human
agacuuuaaagaau

SEQ ID NO: 3466615 - RNA, 19 nt, Human
agacuuuacaugacacagc

SEQ ID NO: 3466616 - RNA, 20 nt, Human
agacuuuacaugacacagcu

SEQ ID NO: 3466617 - RNA, 12 nt, Human
agacuuuagaaa

SEQ ID NO: 3466618 - RNA, 22 nt, Human
agacuuuaggcuuucagcuuac

SEQ ID NO: 3466619 - RNA, 21 nt, Human
agacuuucuuuaaauuauguu

SEQ ID NO: 3466620 - RNA, 22 nt, Human
agacuuugcuaaagacaugaag

SEQ ID NO: 3466621 - RNA, 12 nt, Human
agacuuuggaaa

SEQ ID NO: 3466622 - RNA, 14 nt, Human
agacuuuggaaaau

SEQ ID NO: 3466623 - RNA, 22 nt, Human
agacuuuggaaaaugcauugua

SEQ ID NO: 3466624 - RNA, 14 nt, Human
agacuuuggaaaga

SEQ ID NO: 3466625 - RNA, 17 nt, Human
agacuuuggaaagacuu

SEQ ID NO: 3466626 - RNA, 15 nt, Human
agacuuuggaaagag

SEQ ID NO: 3466627 - RNA, 19 nt, Human
agacuuuggaaagaguagg

SEQ ID NO: 3466628 - RNA, 18 nt, Human
agacuuuuaaucagacaa

SEQ ID NO: 3466629 - RNA, 15 nt, Human
agacuuuuccaaccc

SEQ ID NO: 3466630 - RNA, 19 nt, Human
agacuuuuccaauauguga

SEQ ID NO: 3466631 - RNA, 13 nt, Human
agacuuuucuuug

SEQ ID NO: 3466632 - RNA, 22 nt, Human
agacuuuuguacaucuggcuua

SEQ ID NO: 3466633 - RNA, 12 nt, Human
agacuuuuuggu

SEQ ID NO: 3466634 - RNA, 23 nt, Human
agacuuuuugguggauguaaaua

SEQ ID NO: 3466635 - RNA, 16 nt, Human
agagaaaaaaaaaaua

SEQ ID NO: 3466636 - RNA, 18 nt, Human
agagaaaaaaaaaauagu

SEQ ID NO: 3466637 - RNA, 13 nt, Human
agagaaaaacaaa

SEQ ID NO: 3466638 - RNA, 16 nt, Human
agagaaaacuaaagaa

SEQ ID NO: 3466639 - RNA, 18 nt, Human
agagaaaacuuauuugag

SEQ ID NO: 3466640 - RNA, 10 nt, Human
agagaaaaga

SEQ ID NO: 3466641 - RNA, 11 nt, Human
agagaaaagaa

SEQ ID NO: 3466642 - RNA, 12 nt, Human
agagaaaauaaa

SEQ ID NO: 3466643 - RNA, 17 nt, Human
agagaaaauaaaaaguu

SEQ ID NO: 3466644 - RNA, 18 nt, Human
agagaaaauaaaaaguua

SEQ ID NO: 3466645 - RNA, 16 nt, Human
agagaaaauauaugua

SEQ ID NO: 3466646 - RNA, 13 nt, Human
agagaaaauugaa

SEQ ID NO: 3466647 - RNA, 22 nt, Human
agagaaacacugaaaagaagga

SEQ ID NO: 3466648 - RNA, 12 nt, Human
agagaaaccagc

SEQ ID NO: 3466649 - RNA, 15 nt, Human
agagaaaccagcuuc

SEQ ID NO: 3466650 - RNA, 22 nt, Human
agagaaaccagcuuccuucaga

SEQ ID NO: 3466651 - RNA, 13 nt, Human
agagaaacuuuau

SEQ ID NO: 3466652 - RNA, 13 nt, Human
agagaaagccagg

SEQ ID NO: 3466653 - RNA, 22 nt, Human
agagaaagccaggcagguagcc

SEQ ID NO: 3466654 - RNA, 19 nt, Human
agagaaaggccugcacaca

SEQ ID NO: 3466655 - RNA, 18 nt, Human
agagaaaggggagcccac

SEQ ID NO: 3466656 - RNA, 19 nt, Human
agagaaaggggagcccacu

SEQ ID NO: 3466657 - RNA, 19 nt, Human
agagaaagugauuucuaga

SEQ ID NO: 3466658 - RNA, 14 nt, Human
agagaaauauuuua

SEQ ID NO: 3466659 - RNA, 12 nt, Human
agagaaaugaaa

SEQ ID NO: 3466660 - RNA, 14 nt, Human
agagaacccagccc

SEQ ID NO: 3466661 - RNA, 15 nt, Human
agagaaccgagcaaa

SEQ ID NO: 3466662 - RNA, 20 nt, Human
agagaaccucacgcaccucc

SEQ ID NO: 3466663 - RNA, 16 nt, Human
agagaacuaacacuau

SEQ ID NO: 3466664 - RNA, 14 nt, Human
agagaacuguggcc

SEQ ID NO: 3466665 - RNA, 13 nt, Human
agagaagaaagaa

SEQ ID NO: 3466666 - RNA, 16 nt, Human
agagaagaagaaaaaa

SEQ ID NO: 3466667 - RNA, 11 nt, Human
agagaagacaa

SEQ ID NO: 3466668 - RNA, 16 nt, Human
agagaagacaggcugg

SEQ ID NO: 3466669 - RNA, 16 nt, Human
agagaagacccuucuc

SEQ ID NO: 3466670 - RNA, 10 nt, Human
agagaagaga

SEQ ID NO: 3466671 - RNA, 21 nt, Human
agagaagagauugugguuuca

SEQ ID NO: 3466672 - RNA, 14 nt, Human
agagaagagcccca

SEQ ID NO: 3466673 - RNA, 15 nt, Human
agagaagagccccac

SEQ ID NO: 3466674 - RNA, 21 nt, Human
agagaagagccccacucucag

SEQ ID NO: 3466675 - RNA, 12 nt, Human
agagaagaggcu

SEQ ID NO: 3466676 - RNA, 13 nt, Human
agagaagcaauuu

SEQ ID NO: 3466677 - RNA, 13 nt, Human
agagaagccauca

SEQ ID NO: 3466678 - RNA, 22 nt, Human
agagaagccaucaccucagaug

SEQ ID NO: 3466679 - RNA, 13 nt, Human
agagaagccccuu

SEQ ID NO: 3466680 - RNA, 12 nt, Human
agagaagccuuc

SEQ ID NO: 3466681 - RNA, 17 nt, Human
agagaagccuucaagcu

SEQ ID NO: 3466682 - RNA, 23 nt, Human
agagaagccuucaagcucugagg

SEQ ID NO: 3466683 - RNA, 17 nt, Human
agagaagcggauuucca

SEQ ID NO: 3466684 - RNA, 20 nt, Human
agagaagcuaaaaccugagc

SEQ ID NO: 3466685 - RNA, 12 nt, Human
agagaagcugcu

SEQ ID NO: 3466686 - RNA, 13 nt, Human
agagaagcugcug

SEQ ID NO: 3466687 - RNA, 13 nt, Human
agagaaggaaugu

SEQ ID NO: 3466688 - RNA, 13 nt, Human
agagaaggagcag

SEQ ID NO: 3466689 - RNA, 12 nt, Human
agagaaggcagg

SEQ ID NO: 3466690 - RNA, 20 nt, Human
agagaaggcaggaaugugug

SEQ ID NO: 3466691 - RNA, 22 nt, Human
agagaaggggaagcacucgugu

SEQ ID NO: 3466692 - RNA, 18 nt, Human
agagaaggggugugcaug

SEQ ID NO: 3466693 - RNA, 18 nt, Human
agagaaguauacauaagu

SEQ ID NO: 3466694 - RNA, 15 nt, Human
agagaagucacaggg

SEQ ID NO: 3466695 - RNA, 18 nt, Human
agagaagugacgguuccu

SEQ ID NO: 3466696 - RNA, 22 nt, Human
agagaaguggacuggaggagcu

SEQ ID NO: 3466697 - RNA, 23 nt, Human
agagaauauaacaugaaaugaua

SEQ ID NO: 3466698 - RNA, 22 nt, Human
agagaauaugucugcuccuuuc

SEQ ID NO: 3466699 - RNA, 22 nt, Human
agagaauauuagcuuuacuguu

SEQ ID NO: 3466700 - RNA, 14 nt, Human
agagaaugagaaau

SEQ ID NO: 3466701 - RNA, 18 nt, Human
agagaaugaguccuugau

SEQ ID NO: 3466702 - RNA, 16 nt, Human
agagaaugaugcucaa

SEQ ID NO: 3466703 - RNA, 20 nt, Human
agagaaugcacagauauacu

SEQ ID NO: 3466704 - RNA, 21 nt, Human
agagaaugcccuucuccuuau

SEQ ID NO: 3466705 - RNA, 17 nt, Human
agagaauguagauauug

SEQ ID NO: 3466706 - RNA, 15 nt, Human
agagaauuaaacgaa

SEQ ID NO: 3466707 - RNA, 16 nt, Human
agagaauuagauuaua

SEQ ID NO: 3466708 - RNA, 15 nt, Human
agagaauuggcucaa

SEQ ID NO: 3466709 - RNA, 19 nt, Human
agagacaaacaccucccag

SEQ ID NO: 3466710 - RNA, 21 nt, Human
agagacaaacaccucccagga

SEQ ID NO: 3466711 - RNA, 18 nt, Human
agagacaaacuguaaaaa

SEQ ID NO: 3466712 - RNA, 15 nt, Human
agagacacaagccuu

SEQ ID NO: 3466713 - RNA, 16 nt, Human
agagacacacugaaga

SEQ ID NO: 3466714 - RNA, 20 nt, Human
agagacacacugaagaagca

SEQ ID NO: 3466715 - RNA, 16 nt, Human
agagacacuggugggg

SEQ ID NO: 3466716 - RNA, 20 nt, Human
agagacacuguugauaaaaa

SEQ ID NO: 3466717 - RNA, 14 nt, Human
agagacagaaagca

SEQ ID NO: 3466718 - RNA, 12 nt, Human
agagacagaaug

SEQ ID NO: 3466719 - RNA, 17 nt, Human
agagacagacuugagaa

SEQ ID NO: 3466720 - RNA, 18 nt, Human
agagacagauaccuccaa

SEQ ID NO: 3466721 - RNA, 15 nt, Human
agagacaggagggca

SEQ ID NO: 3466722 - RNA, 15 nt, Human
agagacaugcagaga

SEQ ID NO: 3466723 - RNA, 15 nt, Human
agagacauggcuuuc

SEQ ID NO: 3466724 - RNA, 14 nt, Human
agagacauuccucc

SEQ ID NO: 3466725 - RNA, 19 nt, Human
agagaccaggcaaagcaag

SEQ ID NO: 3466726 - RNA, 16 nt, Human
agagaccaggcccugg

SEQ ID NO: 3466727 - RNA, 13 nt, Human
agagaccaucccu

SEQ ID NO: 3466728 - RNA, 15 nt, Human
agagaccaucccuga

SEQ ID NO: 3466729 - RNA, 19 nt, Human
agagaccaucccugaaggc

SEQ ID NO: 3466730 - RNA, 22 nt, Human
agagaccaucccugaaggcccc

SEQ ID NO: 3466731 - RNA, 14 nt, Human
agagacccaaggag

SEQ ID NO: 3466732 - RNA, 23 nt, Human
agagacccucugccaccagagac

SEQ ID NO: 3466733 - RNA, 22 nt, Human
agagaccuguuuuaaaaaggaa

SEQ ID NO: 3466734 - RNA, 22 nt, Human
agagacuauggagccuggcaca

SEQ ID NO: 3466735 - RNA, 19 nt, Human
agagacucagggccccagc

SEQ ID NO: 3466736 - RNA, 17 nt, Human
agagacucccaugaagc

SEQ ID NO: 3466737 - RNA, 21 nt, Human
agagacucccaugaagccuuu

SEQ ID NO: 3466738 - RNA, 19 nt, Human
agagacuccugcaggcagc

SEQ ID NO: 3466739 - RNA, 15 nt, Human
agagacugcguucug

SEQ ID NO: 3466740 - RNA, 17 nt, Human
agagacugcguucugca

SEQ ID NO: 3466741 - RNA, 18 nt, Human
agagacugcguucugcaa

SEQ ID NO: 3466742 - RNA, 14 nt, Human
agagacuggagcau

SEQ ID NO: 3466743 - RNA, 22 nt, Human
agagacuguagauugcuucugu

SEQ ID NO: 3466744 - RNA, 20 nt, Human
agagacuugggacauugccu

SEQ ID NO: 3466745 - RNA, 19 nt, Human
agagacuuuuaaucagaca

SEQ ID NO: 3466746 - RNA, 14 nt, Human
agagagaaaaacaa

SEQ ID NO: 3466747 - RNA, 10 nt, Human
agaggagaga

SEQ ID NO: 3466748 - RNA, 15 nt, Human
agaggagagaggacc

SEQ ID NO: 3466749 - RNA, 13 nt, Human
agaggagagaggc

SEQ ID NO: 3466750 - RNA, 15 nt, Human
agaggagagaggcag

SEQ ID NO: 3466751 - RNA, 15 nt, Human
agaggagcccucauc

SEQ ID NO: 3466752 - RNA, 14 nt, Human
agaggagcccugcc

SEQ ID NO: 3466753 - RNA, 23 nt, Human
agaggagcccugccucuccgccc

SEQ ID NO: 3466754 - RNA, 11 nt, Human
agaggagccuu

SEQ ID NO: 3466755 - RNA, 21 nt, Human
agaggagcgggaccuguggcu

SEQ ID NO: 3466756 - RNA, 18 nt, Human
agaggaguucaaugaucu

SEQ ID NO: 3466757 - RNA, 19 nt, Human
agaggaguucaaugaucua

SEQ ID NO: 3466758 - RNA, 14 nt, Human
agaggaugagagcc

SEQ ID NO: 3466759 - RNA, 17 nt, Human
agaggaugagagcccag

SEQ ID NO: 3466760 - RNA, 14 nt, Human
agaggauggccagu

SEQ ID NO: 3466761 - RNA, 18 nt, Human
agaggauggccagugucu

SEQ ID NO: 3466762 - RNA, 19 nt, Human
agaggauggcccaggguga

SEQ ID NO: 3466763 - RNA, 22 nt, Human
agaggauuuugcgucagagaaa

SEQ ID NO: 3466764 - RNA, 18 nt, Human
agaggcaacugcauuggc

SEQ ID NO: 3466765 - RNA, 16 nt, Human
agaggcagaacccugg

SEQ ID NO: 3466766 - RNA, 13 nt, Human
agaggcagaagaa

SEQ ID NO: 3466767 - RNA, 17 nt, Human
agaggcagaagaacccu

SEQ ID NO: 3466768 - RNA, 20 nt, Human
agaggcagagaaagaagaga

SEQ ID NO: 3466769 - RNA, 13 nt, Human
agaggcagagagc

SEQ ID NO: 3466770 - RNA, 13 nt, Human
agaggcagagccu

SEQ ID NO: 3466771 - RNA, 14 nt, Human
agaggcagagugcc

SEQ ID NO: 3466772 - RNA, 19 nt, Human
agaggcagagugccccacc

SEQ ID NO: 3466773 - RNA, 21 nt, Human
agaggcagagugccccaccug

SEQ ID NO: 3466774 - RNA, 22 nt, Human
agaggcagagugccccaccugc

SEQ ID NO: 3466775 - RNA, 13 nt, Human
agaggcagggagg

SEQ ID NO: 3466776 - RNA, 21 nt, Human
agaggcagggucucacucugu

SEQ ID NO: 3466777 - RNA, 13 nt, Human
agaggcaguaccu

SEQ ID NO: 3466778 - RNA, 13 nt, Human
agaggcauuuccc

SEQ ID NO: 3466779 - RNA, 13 nt, Human
agaggccagaggc

SEQ ID NO: 3466780 - RNA, 16 nt, Human
agaggccagccccacc

SEQ ID NO: 3466781 - RNA, 19 nt, Human
agaggccaugauucgccca

SEQ ID NO: 3466782 - RNA, 23 nt, Human
agaggccauggcagaauaaucuu

SEQ ID NO: 3466783 - RNA, 21 nt, Human
agaggccauucuuucccaaca

SEQ ID NO: 3466784 - RNA, 19 nt, Human
agaggcccaggcugccguc

SEQ ID NO: 3466785 - RNA, 21 nt, Human
agaggccccaauaccccaugg

SEQ ID NO: 3466786 - RNA, 14 nt, Human
agaggccccagccu

SEQ ID NO: 3466787 - RNA, 20 nt, Human
agaggcccccagcccagggc

SEQ ID NO: 3466788 - RNA, 14 nt, Human
agaggcccucugga

SEQ ID NO: 3466789 - RNA, 21 nt, Human
agaggcccucuggaguggcca

SEQ ID NO: 3466790 - RNA, 15 nt, Human
agaggcccuggauca

SEQ ID NO: 3466791 - RNA, 17 nt, Human
agaggcccuggaucagc

SEQ ID NO: 3466792 - RNA, 20 nt, Human
agaggcccuggaucagcgug

SEQ ID NO: 3466793 - RNA, 18 nt, Human
agaggccgagagcuaugg

SEQ ID NO: 3466794 - RNA, 15 nt, Human
agaggccguggcugc

SEQ ID NO: 3466795 - RNA, 22 nt, Human
agaggccguggcugcuguggga

SEQ ID NO: 3466796 - RNA, 23 nt, Human
agaggccuccuguggccugccag

SEQ ID NO: 3466797 - RNA, 12 nt, Human
agaggccugccc

SEQ ID NO: 3466798 - RNA, 14 nt, Human
agaggccugggcug

SEQ ID NO: 3466799 - RNA, 21 nt, Human
agaggccuuuaaccauggugc

SEQ ID NO: 3466800 - RNA, 13 nt, Human
agaggcgggccag

SEQ ID NO: 3466801 - RNA, 20 nt, Human
agaggcgggccagccaggcg

SEQ ID NO: 3466802 - RNA, 16 nt, Human
agaggcgucuguauau

SEQ ID NO: 3466803 - RNA, 16 nt, Human
agaggcuaaaauguuu

SEQ ID NO: 3466804 - RNA, 18 nt, Human
agaggcucagauuguaau

SEQ ID NO: 3466805 - RNA, 22 nt, Human
agaggcucguugacuggcugug

SEQ ID NO: 3466806 - RNA, 13 nt, Human
agaggcugaaaga

SEQ ID NO: 3466807 - RNA, 13 nt, Human
agaggcugaggac

SEQ ID NO: 3466808 - RNA, 18 nt, Human
agaggcugccccucucac

SEQ ID NO: 3466809 - RNA, 20 nt, Human
agaggcugccccucucacca

SEQ ID NO: 3466810 - RNA, 15 nt, Human
agaggcugcccuccu

SEQ ID NO: 3466811 - RNA, 16 nt, Human
agaggcuggaggcagg

SEQ ID NO: 3466812 - RNA, 20 nt, Human
agaggcuggaggcagggccu

SEQ ID NO: 3466813 - RNA, 14 nt, Human
agaggcugguuuug

SEQ ID NO: 3466814 - RNA, 20 nt, Human
agaggcuuccuucauuuccu

SEQ ID NO: 3466815 - RNA, 16 nt, Human
agaggcuucuccgcca

SEQ ID NO: 3466816 - RNA, 21 nt, Human
agaggcuucuucagaucagug

SEQ ID NO: 3466817 - RNA, 19 nt, Human
agaggcuuguuuaccuuuc

SEQ ID NO: 3466818 - RNA, 19 nt, Human
agagggaacagggcggaga

SEQ ID NO: 3466819 - RNA, 17 nt, Human
agagggaagagugcauu

SEQ ID NO: 3466820 - RNA, 14 nt, Human
agagggaccaugug

SEQ ID NO: 3466821 - RNA, 21 nt, Human
agagggacgccugggggugcc

SEQ ID NO: 3466822 - RNA, 21 nt, Human
agagggacggccaagaaugua

SEQ ID NO: 3466823 - RNA, 22 nt, Human
agagggacuguucuuuuguccc

SEQ ID NO: 3466824 - RNA, 13 nt, Human
agagggagaagaa

SEQ ID NO: 3466825 - RNA, 19 nt, Human
agagggagaagggauggag

SEQ ID NO: 3466826 - RNA, 12 nt, Human
agagggagagag

SEQ ID NO: 3466827 - RNA, 24 nt, Human
agagggaggagaaugagccucggc

SEQ ID NO: 3466828 - RNA, 18 nt, Human
agagggaggggccuaggc

SEQ ID NO: 3466829 - RNA, 23 nt, Human
agagggauaagguaccuuucaca

SEQ ID NO: 3466830 - RNA, 12 nt, Human
agagggcacaga

SEQ ID NO: 3466831 - RNA, 17 nt, Human
agagggcccaggcaggc

SEQ ID NO: 3466832 - RNA, 13 nt, Human
agagggcccuggu

SEQ ID NO: 3466833 - RNA, 13 nt, Human
agagggccugcaa

SEQ ID NO: 3466834 - RNA, 16 nt, Human
agagggccugcaaggg

SEQ ID NO: 3466835 - RNA, 15 nt, Human
agagggccuguggga

SEQ ID NO: 3466836 - RNA, 20 nt, Human
agagggcucgaggggugggc

SEQ ID NO: 3466837 - RNA, 17 nt, Human
agagggcuuuaauuuuu

SEQ ID NO: 3466838 - RNA, 18 nt, Human
agaggggaaaagagauga

SEQ ID NO: 3466839 - RNA, 19 nt, Human
agaggggaaaagcugaaca

SEQ ID NO: 3466840 - RNA, 16 nt, Human
agaggggaagagacuu

SEQ ID NO: 3466841 - RNA, 20 nt, Human
agaggggaauaauagaagaa

SEQ ID NO: 3466842 - RNA, 20 nt, Human
agaggggacaaaacccaccu

SEQ ID NO: 3466843 - RNA, 15 nt, Human
agaggggacucuggg

SEQ ID NO: 3466844 - RNA, 15 nt, Human
agaggggaggccaag

SEQ ID NO: 3466845 - RNA, 15 nt, Human
agaggggcagaacag

SEQ ID NO: 3466846 - RNA, 16 nt, Human
agaggggcagaacagc

SEQ ID NO: 3466847 - RNA, 20 nt, Human
agaggggccugccaccugga

SEQ ID NO: 3466848 - RNA, 16 nt, Human
agagggggcugguggg

SEQ ID NO: 3466849 - RNA, 22 nt, Human
agaggggggaagaucaggucau

SEQ ID NO: 3466850 - RNA, 12 nt, Human
agagggggugga

SEQ ID NO: 3466851 - RNA, 19 nt, Human
agaggggguggccucccaa

SEQ ID NO: 3466852 - RNA, 23 nt, Human
agaggggguggccucccaacuca

SEQ ID NO: 3466853 - RNA, 18 nt, Human
agaggggugcagaggcug

SEQ ID NO: 3466854 - RNA, 16 nt, Human
agagggguggagacug

SEQ ID NO: 3466855 - RNA, 19 nt, Human
agagggguggagacugcuu

SEQ ID NO: 3466856 - RNA, 20 nt, Human
agagggucugaggaauccag

SEQ ID NO: 3466857 - RNA, 23 nt, Human
agagggugcugccccaugaagcc

SEQ ID NO: 3466858 - RNA, 23 nt, Human
agaggguuuuagguagaaaaaca

SEQ ID NO: 3466859 - RNA, 23 nt, Human
agagguaaaagugugagcaguga

SEQ ID NO: 3466860 - RNA, 16 nt, Human
agagguacacuuguga

SEQ ID NO: 3466861 - RNA, 18 nt, Human
agagguacacuugugaau

SEQ ID NO: 3466862 - RNA, 19 nt, Human
agagguacaggguuuuuac

SEQ ID NO: 3466863 - RNA, 14 nt, Human
agagguacccuggg

SEQ ID NO: 3466864 - RNA, 15 nt, Human
agagguacccugggu

SEQ ID NO: 3466865 - RNA, 18 nt, Human
agagguacuagaaugcuu

SEQ ID NO: 3466866 - RNA, 16 nt, Human
agagguagggcugcca

SEQ ID NO: 3466867 - RNA, 18 nt, Human
agaggucaagcccaggag

SEQ ID NO: 3466868 - RNA, 17 nt, Human
agagguccucuggagcc

SEQ ID NO: 3466869 - RNA, 14 nt, Human
agaggucugugcug

SEQ ID NO: 3466870 - RNA, 19 nt, Human
agaggucugugcugaggcc

SEQ ID NO: 3466871 - RNA, 16 nt, Human
agaggucuuuuuuaaa

SEQ ID NO: 3466872 - RNA, 15 nt, Human
agaggugaccccagg

SEQ ID NO: 3466873 - RNA, 16 nt, Human
agaggugaccccaggg

SEQ ID NO: 3466874 - RNA, 24 nt, Human
agaggugaccccagggcacaggag

SEQ ID NO: 3466875 - RNA, 12 nt, Human
agaggugccagc

SEQ ID NO: 3466876 - RNA, 20 nt, Human
agaggugccagcaacugaau

SEQ ID NO: 3466877 - RNA, 22 nt, Human
agaggugccagcaacugaauaa

SEQ ID NO: 3466878 - RNA, 13 nt, Human
agaggugcuucac

SEQ ID NO: 3466879 - RNA, 17 nt, Human
agaggugggagggcccu

SEQ ID NO: 3466880 - RNA, 24 nt, Human
agaggugggccagucuguggauca

SEQ ID NO: 3466881 - RNA, 16 nt, Human
agagguucaaagauau

SEQ ID NO: 3466882 - RNA, 17 nt, Human
agagguucauuucaaau

SEQ ID NO: 3466883 - RNA, 19 nt, Human
agagguucuaaaaucauga

SEQ ID NO: 3466884 - RNA, 15 nt, Human
agagguugcagugag

SEQ ID NO: 3466885 - RNA, 19 nt, Human
agagguuguagugagccca

SEQ ID NO: 3466886 - RNA, 17 nt, Human
agagguuugcaguccca

SEQ ID NO: 3466887 - RNA, 20 nt, Human
agagguuugcagucccaagc

SEQ ID NO: 3466888 - RNA, 12 nt, Human
agagguuuuaaa

SEQ ID NO: 3466889 - RNA, 22 nt, Human
agagguuuuucuuaaauaauaa

SEQ ID NO: 3466890 - RNA, 20 nt, Human
agaguaagaaauuucagguu

SEQ ID NO: 3466891 - RNA, 13 nt, Human
agaguaagacauu

SEQ ID NO: 3466892 - RNA, 16 nt, Human
agaguaagcugcuuuu

SEQ ID NO: 3466893 - RNA, 13 nt, Human
agaguacacugcc

SEQ ID NO: 3466894 - RNA, 15 nt, Human
agaguacacugccug

SEQ ID NO: 3466895 - RNA, 19 nt, Human
agaguacacugccugccuu

SEQ ID NO: 3466896 - RNA, 13 nt, Human
agaguagaaauaa

SEQ ID NO: 3466897 - RNA, 18 nt, Human
agaguagaauugcauuga

SEQ ID NO: 3466898 - RNA, 22 nt, Human
agaguagcaaguucuagagaag

SEQ ID NO: 3466899 - RNA, 14 nt, Human
agaguagcauuuca

SEQ ID NO: 3466900 - RNA, 17 nt, Human
agaguagccgagagccu

SEQ ID NO: 3466901 - RNA, 22 nt, Human
agaguagccgagagccugcucc

SEQ ID NO: 3466902 - RNA, 21 nt, Human
agaguaggcuauuccugagag

SEQ ID NO: 3466903 - RNA, 14 nt, Human
agaguaguuauaua

SEQ ID NO: 3466904 - RNA, 15 nt, Human
agagucaaggccugc

SEQ ID NO: 3466905 - RNA, 20 nt, Human
agagucacacgggggcagcu

SEQ ID NO: 3466906 - RNA, 14 nt, Human
agagucagccagga

SEQ ID NO: 3466907 - RNA, 17 nt, Human
agagucagcucucugcc

SEQ ID NO: 3466908 - RNA, 19 nt, Human
agagucagcucucugcccu

SEQ ID NO: 3466909 - RNA, 18 nt, Human
agagucauauuuugauua

SEQ ID NO: 3466910 - RNA, 18 nt, Human
agagucaucuccaucagc

SEQ ID NO: 3466911 - RNA, 19 nt, Human
agaguccaagguuuaaaga

SEQ ID NO: 3466912 - RNA, 14 nt, Human
agaguccaggcccc

SEQ ID NO: 3466913 - RNA, 13 nt, Human
agagucccacugc

SEQ ID NO: 3466914 - RNA, 18 nt, Human
agagucccacugccucag

SEQ ID NO: 3466915 - RNA, 22 nt, Human
agagucccacugccucagguuc

SEQ ID NO: 3466916 - RNA, 19 nt, Human
agagucccagguuggcucu

SEQ ID NO: 3466917 - RNA, 14 nt, Human
agaguccccccacu

SEQ ID NO: 3466918 - RNA, 18 nt, Human
agaguccccccacuccca

SEQ ID NO: 3466919 - RNA, 15 nt, Human
agagucgcugugcca

SEQ ID NO: 3466920 - RNA, 19 nt, Human
agagucgcugugccacagg

SEQ ID NO: 3466921 - RNA, 22 nt, Human
agauaccuuaaaauuugaaaca

SEQ ID NO: 3466922 - RNA, 16 nt, Human
agauacgacuuuauuu

SEQ ID NO: 3466923 - RNA, 20 nt, Human
agauacgacuuuauuuucug

SEQ ID NO: 3466924 - RNA, 18 nt, Human
agauacuaaggacguugu

SEQ ID NO: 3466925 - RNA, 21 nt, Human
agauacuacugaccagacaag

SEQ ID NO: 3466926 - RNA, 23 nt, Human
agauacuacugaccagacaagcu

SEQ ID NO: 3466927 - RNA, 15 nt, Human
agauacucucuucuu

SEQ ID NO: 3466928 - RNA, 18 nt, Human
agauacucucuucuucuc

SEQ ID NO: 3466929 - RNA, 12 nt, Human
agauacugaaau

SEQ ID NO: 3466930 - RNA, 14 nt, Human
agauacuggauugu

SEQ ID NO: 3466931 - RNA, 14 nt, Human
agauacugguggaa

SEQ ID NO: 3466932 - RNA, 11 nt, Human
agauacuguau

SEQ ID NO: 3466933 - RNA, 21 nt, Human
agauacuuggaccgaguagag

SEQ ID NO: 3466934 - RNA, 19 nt, Human
agauacuuugcauugucug

SEQ ID NO: 3466935 - RNA, 17 nt, Human
agauacuuugcuagccg

SEQ ID NO: 3466936 - RNA, 17 nt, Human
agcccacgcccccacug

SEQ ID NO: 3466937 - RNA, 18 nt, Human
agcccacgcccccacugg

SEQ ID NO: 3466938 - RNA, 15 nt, Human
agcccacguccuguc

SEQ ID NO: 3466939 - RNA, 17 nt, Human
agcccacguccugucag

SEQ ID NO: 3466940 - RNA, 22 nt, Human
agcccacguccugucagugccg

SEQ ID NO: 3466941 - RNA, 13 nt, Human
agcccacucugcu

SEQ ID NO: 3466942 - RNA, 15 nt, Human
agcccacucugcucg

SEQ ID NO: 3466943 - RNA, 19 nt, Human
agcccacugcccacccccu

SEQ ID NO: 3466944 - RNA, 17 nt, Human
agcccacuguccugggc

SEQ ID NO: 3466945 - RNA, 22 nt, Human
agcccacuguccugggccugca

SEQ ID NO: 3466946 - RNA, 23 nt, Human
agcccacuguccugggccugcag

SEQ ID NO: 3466947 - RNA, 13 nt, Human
agcccacuucugc

SEQ ID NO: 3466948 - RNA, 15 nt, Human
agcccacuucugcca

SEQ ID NO: 3466949 - RNA, 16 nt, Human
agcccagaagugcaga

SEQ ID NO: 3466950 - RNA, 11 nt, Human
agcccagagac

SEQ ID NO: 3466951 - RNA, 14 nt, Human
agcccagaggaggg

SEQ ID NO: 3466952 - RNA, 16 nt, Human
agcccagaggagggca

SEQ ID NO: 3466953 - RNA, 15 nt, Human
agcccagagggucug

SEQ ID NO: 3466954 - RNA, 17 nt, Human
agcccagagguaacaga

SEQ ID NO: 3466955 - RNA, 18 nt, Human
agcccagagguaacagaa

SEQ ID NO: 3466956 - RNA, 21 nt, Human
agcccagagguaacagaacag

SEQ ID NO: 3466957 - RNA, 18 nt, Human
agcccagauuccccugug

SEQ ID NO: 3466958 - RNA, 20 nt, Human
agcccagauugugccacugc

SEQ ID NO: 3466959 - RNA, 21 nt, Human
agcccagccauuaccauggag

SEQ ID NO: 3466960 - RNA, 11 nt, Human
agcccagccca

SEQ ID NO: 3466961 - RNA, 18 nt, Human
agcccagcccagcugcuc

SEQ ID NO: 3466962 - RNA, 19 nt, Human
agcccagccccuacugcug

SEQ ID NO: 3466963 - RNA, 20 nt, Human
agcccagccccuacugcugu

SEQ ID NO: 3466964 - RNA, 14 nt, Human
agcccagcgcucug

SEQ ID NO: 3466965 - RNA, 17 nt, Human
agcccagcgcucugccu

SEQ ID NO: 3466966 - RNA, 15 nt, Human
agcccagcuccaggg

SEQ ID NO: 3466967 - RNA, 14 nt, Human
agcccagcucugaa

SEQ ID NO: 3466968 - RNA, 12 nt, Human
agcccagcugcu

SEQ ID NO: 3466969 - RNA, 15 nt, Human
agcccagcugcucug

SEQ ID NO: 3466970 - RNA, 23 nt, Human
agcccagcugcucugcccagagc

SEQ ID NO: 3466971 - RNA, 16 nt, Human
agccaagcuuuaaauu

SEQ ID NO: 3466972 - RNA, 20 nt, Human
agccaagcuuuaaauuaugu

SEQ ID NO: 3466973 - RNA, 21 nt, Human
agccaaggagucacugagacc

SEQ ID NO: 3466974 - RNA, 22 nt, Human
agccaaggccaaaggaagcaca

SEQ ID NO: 3466975 - RNA, 23 nt, Human
agccaaggccaaaggaagcacau

SEQ ID NO: 3466976 - RNA, 22 nt, Human
agccaaggccgaagcucuggcu

SEQ ID NO: 3466977 - RNA, 17 nt, Human
agccaagggaaccugug

SEQ ID NO: 3466978 - RNA, 21 nt, Human
agccaagggaaccuguguccg

SEQ ID NO: 3466979 - RNA, 18 nt, Human
agccaagggauggacauc

SEQ ID NO: 3466980 - RNA, 22 nt, Human
agccaagggauggacaucuugu

SEQ ID NO: 3466981 - RNA, 16 nt, Human
agccaaggggcuucag

SEQ ID NO: 3466982 - RNA, 17 nt, Human
agccaaggguauccaag

SEQ ID NO: 3466983 - RNA, 22 nt, Human
agccaaggugggcugagcccug

SEQ ID NO: 3466984 - RNA, 13 nt, Human
agccaaguggggu

SEQ ID NO: 3466985 - RNA, 16 nt, Human
agccaaguggggugcu

SEQ ID NO: 3466986 - RNA, 20 nt, Human
agccaaguggggugcuggga

SEQ ID NO: 3466987 - RNA, 15 nt, Human
agccaaguuuuauaa

SEQ ID NO: 3466988 - RNA, 12 nt, Human
agccaauauaac

SEQ ID NO: 3466989 - RNA, 13 nt, Human
agccaauccccuc

SEQ ID NO: 3466990 - RNA, 16 nt, Human
agccaauccccuccuu

SEQ ID NO: 3466991 - RNA, 21 nt, Human
agccaauccccuccuugggca

SEQ ID NO: 3466992 - RNA, 22 nt, Human
agccaauccccuccuugggcac

SEQ ID NO: 3466993 - RNA, 16 nt, Human
agccaaugucuccucc

SEQ ID NO: 3466994 - RNA, 16 nt, Human
agccaauuauguuaaa

SEQ ID NO: 3466995 - RNA, 17 nt, Human
agccaauuauguuaaac

SEQ ID NO: 3466996 - RNA, 20 nt, Human
agccaauuauguuaaacuag

SEQ ID NO: 3466997 - RNA, 13 nt, Human
agccaauuuuucu

SEQ ID NO: 3466998 - RNA, 15 nt, Human
agccaauuuuucugc

SEQ ID NO: 3466999 - RNA, 16 nt, Human
agccaauuuuucugca

SEQ ID NO: 3467000 - RNA, 15 nt, Human
agccacacacacaga

SEQ ID NO: 3467001 - RNA, 16 nt, Human
agccacacacacagaa

SEQ ID NO: 3467002 - RNA, 19 nt, Human
agccacacacacagaaaau

SEQ ID NO: 3467003 - RNA, 20 nt, Human
agccacacacacagaaaaua

SEQ ID NO: 3467004 - RNA, 13 nt, Human
agccacaccagga

SEQ ID NO: 3467005 - RNA, 15 nt, Human
agccacacccaggca

SEQ ID NO: 3467006 - RNA, 17 nt, Human
agccacacuucucagga

SEQ ID NO: 3467007 - RNA, 19 nt, Human
agccacacuucucaggaca

SEQ ID NO: 3467008 - RNA, 16 nt, Human
agccacagcagcauuu

SEQ ID NO: 3467009 - RNA, 18 nt, Human
agccacagcagcauuuuu

SEQ ID NO: 3467010 - RNA, 21 nt, Human
agccacagcccaggccuccag

SEQ ID NO: 3467011 - RNA, 20 nt, Human
agccacagugagggagaucc

SEQ ID NO: 3467012 - RNA, 11 nt, Human
agccacauccc

SEQ ID NO: 3467013 - RNA, 15 nt, Human
agccacauuuggaau

SEQ ID NO: 3467014 - RNA, 20 nt, Human
agccacauuuggaauacuuu

SEQ ID NO: 3467015 - RNA, 19 nt, Human
agccaccaacauacuccca

SEQ ID NO: 3467016 - RNA, 16 nt, Human
agccaccaacucuugc

SEQ ID NO: 3467017 - RNA, 15 nt, Human
agccaccacgcccgg

SEQ ID NO: 3467018 - RNA, 17 nt, Human
agccaccacguccagcu

SEQ ID NO: 3467019 - RNA, 14 nt, Human
agccaccagaugug

SEQ ID NO: 3467020 - RNA, 14 nt, Human
agccacccucccag

SEQ ID NO: 3467021 - RNA, 17 nt, Human
agccacccucccagcuc

SEQ ID NO: 3467022 - RNA, 18 nt, Human
agccacccucccagcucu

SEQ ID NO: 3467023 - RNA, 19 nt, Human
agccacccucccagcucug

SEQ ID NO: 3467024 - RNA, 20 nt, Human
agccacccucccagcucuga

SEQ ID NO: 3467025 - RNA, 13 nt, Human
agccacccugagg

SEQ ID NO: 3467026 - RNA, 19 nt, Human
agccacccugaggagucug

SEQ ID NO: 3467027 - RNA, 21 nt, Human
agccacccugaggagucugag

SEQ ID NO: 3467028 - RNA, 12 nt, Human
agccaccucucc

SEQ ID NO: 3467029 - RNA, 14 nt, Human
agccaccucucccu

SEQ ID NO: 3467030 - RNA, 16 nt, Human
agccaccucucccuca

SEQ ID NO: 3467031 - RNA, 22 nt, Human
agccaccucucccucaacaagg

SEQ ID NO: 3467032 - RNA, 14 nt, Human
agccaccucucuuu

SEQ ID NO: 3467033 - RNA, 23 nt, Human
agccaccucugucauuuguugug

SEQ ID NO: 3467034 - RNA, 16 nt, Human
agccaccugaguuccu

SEQ ID NO: 3467035 - RNA, 17 nt, Human
agccacguuccuuacug

SEQ ID NO: 3467036 - RNA, 20 nt, Human
agccacguuccuuacugcag

SEQ ID NO: 3467037 - RNA, 14 nt, Human
agccacuaacuaga

SEQ ID NO: 3467038 - RNA, 15 nt, Human
agccacucaggaggc

SEQ ID NO: 3467039 - RNA, 19 nt, Human
agccacuccccuccacucu

SEQ ID NO: 3467040 - RNA, 22 nt, Human
agccacuccucugacucagggc

SEQ ID NO: 3467041 - RNA, 13 nt, Human
agccacugaagcu

SEQ ID NO: 3467042 - RNA, 16 nt, Human
agccacugaagcuggg

SEQ ID NO: 3467043 - RNA, 19 nt, Human
agccacugcaccgggccac

SEQ ID NO: 3467044 - RNA, 16 nt, Human
agccacugccucuccc

SEQ ID NO: 3467045 - RNA, 18 nt, Human
agccacugccucucccuc

SEQ ID NO: 3467046 - RNA, 20 nt, Human
agccacugccucucccucug

SEQ ID NO: 3467047 - RNA, 21 nt, Human
agccacugccucucccucugg

SEQ ID NO: 3467048 - RNA, 20 nt, Human
agccacuggcugcuaacaag

SEQ ID NO: 3467049 - RNA, 15 nt, Human
agccacuuaccuuca

SEQ ID NO: 3467050 - RNA, 17 nt, Human
agccacuuaccuucaau

SEQ ID NO: 3467051 - RNA, 14 nt, Human
agccacuuaggaca

SEQ ID NO: 3467052 - RNA, 22 nt, Human
agccacuucggccaggucacac

SEQ ID NO: 3467053 - RNA, 19 nt, Human
agccagaaauaaaguuggu

SEQ ID NO: 3467054 - RNA, 16 nt, Human
agccagaaccccgagc

SEQ ID NO: 3467055 - RNA, 22 nt, Human
agccagaacuugacccugagcu

SEQ ID NO: 3467056 - RNA, 12 nt, Human
agccagaagcug

SEQ ID NO: 3467057 - RNA, 21 nt, Human
agccagaaucagcacagauaa

SEQ ID NO: 3467058 - RNA, 16 nt, Human
agccagacacucugcu

SEQ ID NO: 3467059 - RNA, 15 nt, Human
agccagaccagauua

SEQ ID NO: 3467060 - RNA, 23 nt, Human
agccagacgccauuuaaaagucu

SEQ ID NO: 3467061 - RNA, 16 nt, Human
agccagagaagugaca

SEQ ID NO: 3467062 - RNA, 17 nt, Human
agccagagaagugacag

SEQ ID NO: 3467063 - RNA, 21 nt, Human
agccagagaagugacagggaa

SEQ ID NO: 3467064 - RNA, 13 nt, Human
agccagaggacug

SEQ ID NO: 3467065 - RNA, 15 nt, Human
agccagaggagagag

SEQ ID NO: 3467066 - RNA, 17 nt, Human
agccagaggagagagga

SEQ ID NO: 3467067 - RNA, 11 nt, Human
agccagaggcu

SEQ ID NO: 3467068 - RNA, 16 nt, Human
agccagauccucuugg

SEQ ID NO: 3467069 - RNA, 23 nt, Human
agacaugccacaaggacuuccug

SEQ ID NO: 3467070 - RNA, 16 nt, Human
agacauggcuugccac

SEQ ID NO: 3467071 - RNA, 18 nt, Human
agacauguaauuugugua

SEQ ID NO: 3467072 - RNA, 16 nt, Human
agacauguagguguuu

SEQ ID NO: 3467073 - RNA, 14 nt, Human
agacaugugacauu

SEQ ID NO: 3467074 - RNA, 16 nt, Human
agacaugugacauuua

SEQ ID NO: 3467075 - RNA, 17 nt, Human
agacaugugacauuuau

SEQ ID NO: 3467076 - RNA, 17 nt, Human
agacauguggugggaca

SEQ ID NO: 3467077 - RNA, 17 nt, Human
agacauguuguaaauua

SEQ ID NO: 3467078 - RNA, 14 nt, Human
agacauuaaauaau

SEQ ID NO: 3467079 - RNA, 20 nt, Human
agacauuaacucauuagacu

SEQ ID NO: 3467080 - RNA, 13 nt, Human
agacauugucagc

SEQ ID NO: 3467081 - RNA, 19 nt, Human
agacauuguuuugccaaca

SEQ ID NO: 3467082 - RNA, 23 nt, Human
agacauuguuuugccaacauugc

SEQ ID NO: 3467083 - RNA, 15 nt, Human
agacauuuauacucu

SEQ ID NO: 3467084 - RNA, 17 nt, Human
agacauuuauacucuuu

SEQ ID NO: 3467085 - RNA, 21 nt, Human
agacauuuauacucuuuuuuc

SEQ ID NO: 3467086 - RNA, 19 nt, Human
agaucugccuaaggacuuc

SEQ ID NO: 3467087 - RNA, 15 nt, Human
agaucuggaaccuca

SEQ ID NO: 3467088 - RNA, 17 nt, Human
agaucuggaaccucagc

SEQ ID NO: 3467089 - RNA, 20 nt, Human
agaucuggaaccucagccug

SEQ ID NO: 3467090 - RNA, 17 nt, Human
agaucuggacuuggcaa

SEQ ID NO: 3467091 - RNA, 20 nt, Human
agccucugaaguuggacagc

SEQ ID NO: 3467092 - RNA, 17 nt, Human
agccucugaccccuccu

SEQ ID NO: 3467093 - RNA, 21 nt, Human
agccucugaccccuccucacu

SEQ ID NO: 3467094 - RNA, 22 nt, Human
agccucugaccccuccucacug

SEQ ID NO: 3467095 - RNA, 12 nt, Human
agccucugcugc

SEQ ID NO: 3467096 - RNA, 15 nt, Human
agccucuggcuagag

SEQ ID NO: 3467097 - RNA, 13 nt, Human
agccucuggguca

SEQ ID NO: 3467098 - RNA, 16 nt, Human
agccucugucaggccu

SEQ ID NO: 3467099 - RNA, 14 nt, Human
agccucugugucac

SEQ ID NO: 3467100 - RNA, 19 nt, Human
agccucugugucacuggcu

SEQ ID NO: 3467101 - RNA, 20 nt, Human
agccucugugucacuggcug

SEQ ID NO: 3467102 - RNA, 20 nt, Human
cagccaccccaugcuggccu

SEQ ID NO: 3467103 - RNA, 11 nt, Human
cagccaccccg

SEQ ID NO: 3467104 - RNA, 20 nt, Human
cagccaccccgggcucucug

SEQ ID NO: 3467105 - RNA, 12 nt, Human
cagccacccuga

SEQ ID NO: 3467106 - RNA, 15 nt, Human
cagccacccugagga

SEQ ID NO: 3467107 - RNA, 16 nt, Human
cagccacccugaggag

SEQ ID NO: 3467108 - RNA, 14 nt, Human
cagccacccugagu

SEQ ID NO: 3467109 - RNA, 18 nt, Human
cagccacggccaggccag

SEQ ID NO: 3467110 - RNA, 21 nt, Human
cagccacggggacucagcccu

SEQ ID NO: 3467111 - RNA, 15 nt, Human
cagccacuaagaacc

SEQ ID NO: 3467112 - RNA, 16 nt, Human
cagccacuccccagcc

SEQ ID NO: 3467113 - RNA, 17 nt, Human
cagccacuccccagcca

SEQ ID NO: 3467114 - RNA, 14 nt, Human
cagccacucgggag

SEQ ID NO: 3467115 - RNA, 17 nt, Human
cagccagaacguggcuc

SEQ ID NO: 3467116 - RNA, 22 nt, Human
cagccagaacguggcucugcug

SEQ ID NO: 3467117 - RNA, 16 nt, Human
cagccagaacucugug

SEQ ID NO: 3467118 - RNA, 23 nt, Human
cagccagaccagauuaaacuuca

SEQ ID NO: 3467119 - RNA, 22 nt, Human
cagccagaccuauuccuccugg

SEQ ID NO: 3467120 - RNA, 13 nt, Human
cagccagaggcac

SEQ ID NO: 3467121 - RNA, 19 nt, Human
cagccagaggcaucugagg

SEQ ID NO: 3467122 - RNA, 17 nt, Human
cagccagcagcagccca

SEQ ID NO: 3467123 - RNA, 17 nt, Human
cagccagcagccagcuc

SEQ ID NO: 3467124 - RNA, 18 nt, Human
cagccagcagccagcucu

SEQ ID NO: 3467125 - RNA, 14 nt, Human
cagccagcaguuca

SEQ ID NO: 3467126 - RNA, 21 nt, Human
cagccagcaguucagagcugc

SEQ ID NO: 3467127 - RNA, 16 nt, Human
cagccagcaucugggc

SEQ ID NO: 3467128 - RNA, 16 nt, Human
cagccagccacucuac

SEQ ID NO: 3467129 - RNA, 12 nt, Human
cagccagcccag

SEQ ID NO: 3467130 - RNA, 13 nt, Human
cagccagcccagc

SEQ ID NO: 3467131 - RNA, 17 nt, Human
cagccagcccagcccag

SEQ ID NO: 3467132 - RNA, 19 nt, Human
cagccagcccagcccagcu

SEQ ID NO: 3467133 - RNA, 20 nt, Human
cagccagcccagcccagcug

SEQ ID NO: 3467134 - RNA, 12 nt, Human
cagccagcccug

SEQ ID NO: 3467135 - RNA, 16 nt, Human
cagccagcccugccug

SEQ ID NO: 3467136 - RNA, 14 nt, Human
cagccagccucgcc

SEQ ID NO: 3467137 - RNA, 19 nt, Human
cagccagccucgcccaucc

SEQ ID NO: 3467138 - RNA, 16 nt, Human
cagccagccuggcugg

SEQ ID NO: 3467139 - RNA, 19 nt, Human
cagccagcgucggucugug

SEQ ID NO: 3467140 - RNA, 15 nt, Human
cagccagcucucagc

SEQ ID NO: 3467141 - RNA, 18 nt, Human
cagccagcucucagccaa

SEQ ID NO: 3467142 - RNA, 21 nt, Human
cagccagcucucagccaacga

SEQ ID NO: 3467143 - RNA, 23 nt, Human
cagccaggagagcuuagggucuc

SEQ ID NO: 3467144 - RNA, 15 nt, Human
cagccaggagcuggg

SEQ ID NO: 3467145 - RNA, 16 nt, Human
cagccaggagcugggc

SEQ ID NO: 3467146 - RNA, 13 nt, Human
cagccaggccaca

SEQ ID NO: 3467147 - RNA, 12 nt, Human
cagccaggcccu

SEQ ID NO: 3467148 - RNA, 12 nt, Human
cagccaggcggg

SEQ ID NO: 3467149 - RNA, 14 nt, Human
cagccaggcgggcu

SEQ ID NO: 3467150 - RNA, 16 nt, Human
cagccaggcgggcuca

SEQ ID NO: 3467151 - RNA, 18 nt, Human
cagccaggcgggcucaag

SEQ ID NO: 3467152 - RNA, 20 nt, Human
cagccaggcgggcucaagga

SEQ ID NO: 3467153 - RNA, 15 nt, Human
cagccaggcucugug

SEQ ID NO: 3467154 - RNA, 17 nt, Human
cagccaggcucugugcu

SEQ ID NO: 3467155 - RNA, 13 nt, Human
cagccaggcugcc

SEQ ID NO: 3467156 - RNA, 16 nt, Human
cagccaggcugccaag

SEQ ID NO: 3467157 - RNA, 22 nt, Human
cagccaggcugccaaggccaga

SEQ ID NO: 3467158 - RNA, 15 nt, Human
cagccagggagagcc

SEQ ID NO: 3467159 - RNA, 17 nt, Human
cagccagggagagccca

SEQ ID NO: 3467160 - RNA, 23 nt, Human
cagccagggccugcgagggcagc

SEQ ID NO: 3467161 - RNA, 12 nt, Human
cagccagggcug

SEQ ID NO: 3467162 - RNA, 23 nt, Human
cagccagggcugcuagacggagg

SEQ ID NO: 3467163 - RNA, 15 nt, Human
cagccaggggagcag

SEQ ID NO: 3467164 - RNA, 17 nt, Human
cagccaggggagcagag

SEQ ID NO: 3467165 - RNA, 16 nt, Human
cagccagugaccugag

SEQ ID NO: 3467166 - RNA, 20 nt, Human
cagccagugaccugaggaag

SEQ ID NO: 3467167 - RNA, 22 nt, Human
cagccagugaccugaggaagcg

SEQ ID NO: 3467168 - RNA, 19 nt, Human
cagccagugcccugagcca

SEQ ID NO: 3467169 - RNA, 20 nt, Human
cagccauacuuaucucucug

SEQ ID NO: 3467170 - RNA, 13 nt, Human
cagccaucaaaau

SEQ ID NO: 3467171 - RNA, 21 nt, Human
cagccaucaagagacugaguc

SEQ ID NO: 3467172 - RNA, 19 nt, Human
cagccaucauaggaaggga

SEQ ID NO: 3467173 - RNA, 16 nt, Human
cagccaucugcccagg

SEQ ID NO: 3467174 - RNA, 17 nt, Human
cagccaugccagcuggc

SEQ ID NO: 3467175 - RNA, 13 nt, Human
cagccaugugcug

SEQ ID NO: 3467176 - RNA, 20 nt, Human
cagccauuggcuauuuaaaa

SEQ ID NO: 3467177 - RNA, 16 nt, Human
cagcccaaaccaccag

SEQ ID NO: 3467178 - RNA, 20 nt, Human
cagcccaaaccaccagaagc

SEQ ID NO: 3467179 - RNA, 21 nt, Human
cagcccaaaccaccagaagcc

SEQ ID NO: 3467180 - RNA, 23 nt, Human
cagcccaaaggggacaggccuca

SEQ ID NO: 3467181 - RNA, 17 nt, Human
cagcccaauccagguac

SEQ ID NO: 3467182 - RNA, 17 nt, Human
cagcccaaucccugauc

SEQ ID NO: 3467183 - RNA, 24 nt, Human
cagcccacauuggauucaucagca

SEQ ID NO: 3467184 - RNA, 16 nt, Human
cagcccacccccggca

SEQ ID NO: 3467185 - RNA, 20 nt, Human
cagcccacccccggcagcag

SEQ ID NO: 3467186 - RNA, 13 nt, Human
cagcccacccucc

SEQ ID NO: 3467187 - RNA, 16 nt, Human
cagcccacccuccugu

SEQ ID NO: 3467188 - RNA, 14 nt, Human
cagcccacccugcu

SEQ ID NO: 3467189 - RNA, 16 nt, Human
cagcccacccugcugc

SEQ ID NO: 3467190 - RNA, 18 nt, Human
cagcccacccugcugcug

SEQ ID NO: 3467191 - RNA, 16 nt, Human
cagcccaccuggcuuu

SEQ ID NO: 3467192 - RNA, 16 nt, Human
cagcccacguccuguc

SEQ ID NO: 3467193 - RNA, 19 nt, Human
cagcccacguccugucagu

SEQ ID NO: 3467194 - RNA, 14 nt, Human
cagcccacugagaa

SEQ ID NO: 3467195 - RNA, 20 nt, Human
cagcccacuggaucagaaag

SEQ ID NO: 3467196 - RNA, 23 nt, Human
cagcccagaagugcagaacugca

SEQ ID NO: 3467197 - RNA, 20 nt, Human
cagcccagaggccaacacug

SEQ ID NO: 3467198 - RNA, 12 nt, Human
cagcccagccag

SEQ ID NO: 3467199 - RNA, 13 nt, Human
cagcccagccagc

SEQ ID NO: 3467200 - RNA, 14 nt, Human
cagcccagccagcg

SEQ ID NO: 3467201 - RNA, 15 nt, Human
cagcccagcccagcu

SEQ ID NO: 3467202 - RNA, 18 nt, Human
cagcccagcccagcugcu

SEQ ID NO: 3467203 - RNA, 16 nt, Human
cagcccagccccacuc

SEQ ID NO: 3467204 - RNA, 20 nt, Human
cagcccagcccgcccacugg

SEQ ID NO: 3467205 - RNA, 16 nt, Human
cagcccagcugcucug

SEQ ID NO: 3467206 - RNA, 18 nt, Human
cagcccagcugcucugcc

SEQ ID NO: 3467207 - RNA, 20 nt, Human
cagcccagcugcucugccca

SEQ ID NO: 3467208 - RNA, 21 nt, Human
cagcccagcugcucugcccag

SEQ ID NO: 3467209 - RNA, 23 nt, Human
cagcccagcuuggcccuuuccuu

SEQ ID NO: 3467210 - RNA, 12 nt, Human
cagcccaggccu

SEQ ID NO: 3467211 - RNA, 19 nt, Human
cagcccagggcuccugcac

SEQ ID NO: 3467212 - RNA, 23 nt, Human
cagcccauccauaguaacugaca

SEQ ID NO: 3467213 - RNA, 21 nt, Human
cagcccauccauuaggccagc

SEQ ID NO: 3467214 - RNA, 22 nt, Human
cagcccauccauuaggccagca

SEQ ID NO: 3467215 - RNA, 16 nt, Human
cagcccaucucggagc

SEQ ID NO: 3467216 - RNA, 14 nt, Human
cagcccaucuugcc

SEQ ID NO: 3467217 - RNA, 18 nt, Human
cagcccaucuugccucca

SEQ ID NO: 3467218 - RNA, 16 nt, Human
cagcccaugcccaccu

SEQ ID NO: 3467219 - RNA, 17 nt, Human
cagcccaugcccaccug

SEQ ID NO: 3467220 - RNA, 24 nt, Human
cagcccaugcccaccugcccauca

SEQ ID NO: 3467221 - RNA, 13 nt, Human
cagcccauggaga

SEQ ID NO: 3467222 - RNA, 21 nt, Human
cagcccauggagauugaccug

SEQ ID NO: 3467223 - RNA, 16 nt, Human
cagcccauggcccugu

SEQ ID NO: 3467224 - RNA, 17 nt, Human
cagcccauggcccugug

SEQ ID NO: 3467225 - RNA, 21 nt, Human
cagcccauucucucuccuguc

SEQ ID NO: 3467226 - RNA, 23 nt, Human
cagcccauucucucuccugucca

SEQ ID NO: 3467227 - RNA, 13 nt, Human
cagcccauuucuc

SEQ ID NO: 3467228 - RNA, 14 nt, Human
cagccccacacagc

SEQ ID NO: 3467229 - RNA, 15 nt, Human
cagccccacacagcu

SEQ ID NO: 3467230 - RNA, 16 nt, Human
cagccccacacagcua

SEQ ID NO: 3467231 - RNA, 13 nt, Human
cagccccacacca

SEQ ID NO: 3467232 - RNA, 13 nt, Human
cagccccacagcc

SEQ ID NO: 3467233 - RNA, 12 nt, Human
cagccccaccca

SEQ ID NO: 3467234 - RNA, 13 nt, Human
cagccccacccag

SEQ ID NO: 3467235 - RNA, 22 nt, Human
cagccccacccaggagggaggg

SEQ ID NO: 3467236 - RNA, 17 nt, Human
cagccccacccuguuuu

SEQ ID NO: 3467237 - RNA, 16 nt, Human
cagccccacugccagc

SEQ ID NO: 3467238 - RNA, 20 nt, Human
cagccccacugccagcagca

SEQ ID NO: 3467239 - RNA, 22 nt, Human
cagccccacugccagcagcagc

SEQ ID NO: 3467240 - RNA, 15 nt, Human
cagccccagccaggg

SEQ ID NO: 3467241 - RNA, 21 nt, Human
cagccccagcccagcccagcu

SEQ ID NO: 3467242 - RNA, 13 nt, Human
cagccccagccug

SEQ ID NO: 3467243 - RNA, 14 nt, Human
cagccccagccugc

SEQ ID NO: 3467244 - RNA, 16 nt, Human
cagccccagugcccac

SEQ ID NO: 3467245 - RNA, 17 nt, Human
cagccccagugcccaca

SEQ ID NO: 3467246 - RNA, 11 nt, Human
cagccccaucc

SEQ ID NO: 3467247 - RNA, 19 nt, Human
cagcucaccucucccuugg

SEQ ID NO: 3467248 - RNA, 20 nt, Human
cagcucaccucucccuugga

SEQ ID NO: 3467249 - RNA, 17 nt, Human
cagcucacgcuucacag

SEQ ID NO: 3467250 - RNA, 14 nt, Human
cagcucacugcaac

SEQ ID NO: 3467251 - RNA, 21 nt, Human
cagcucacugcaaccuucgcc

SEQ ID NO: 3467252 - RNA, 13 nt, Human
cagcucagaacca

SEQ ID NO: 3467253 - RNA, 17 nt, Human
cagcucagaaccacagc

SEQ ID NO: 3467254 - RNA, 18 nt, Human
cagcucagaacccagggc

SEQ ID NO: 3467255 - RNA, 22 nt, Human
cagcucagaaguuucuucuuua

SEQ ID NO: 3467256 - RNA, 13 nt, Human
cagcucagagagg

SEQ ID NO: 3467257 - RNA, 12 nt, Human
cagcucagcacu

SEQ ID NO: 3467258 - RNA, 21 nt, Human
cagcucagcacugccugcucc

SEQ ID NO: 3467259 - RNA, 11 nt, Human
cagcucagcgc

SEQ ID NO: 3467260 - RNA, 17 nt, Human
cagcucagcgccagccu

SEQ ID NO: 3467261 - RNA, 13 nt, Human
cagcucagcuucc

SEQ ID NO: 3467262 - RNA, 19 nt, Human
cagcucaggacagaugcca

SEQ ID NO: 3467263 - RNA, 22 nt, Human
cagcucaggacagaugccacac

SEQ ID NO: 3467264 - RNA, 11 nt, Human
cagcucaggau

SEQ ID NO: 3467265 - RNA, 16 nt, Human
cagcucagucuucccu

SEQ ID NO: 3467266 - RNA, 23 nt, Human
cagcucaguucuagucucucugg

SEQ ID NO: 3467267 - RNA, 16 nt, Human
cagcucauaagagcca

SEQ ID NO: 3467268 - RNA, 21 nt, Human
cagcucauccaugccucagaa

SEQ ID NO: 3467269 - RNA, 13 nt, Human
cagcucauucauu

SEQ ID NO: 3467270 - RNA, 19 nt, Human
cagcucauucauuuuauau

SEQ ID NO: 3467271 - RNA, 16 nt, Human
cagcuccaagaauuuc

SEQ ID NO: 3467272 - RNA, 19 nt, Human
cagcuccaagaauuucuag

SEQ ID NO: 3467273 - RNA, 13 nt, Human
cagcuccacccug

SEQ ID NO: 3467274 - RNA, 19 nt, Human
cagcuccacucugacuggc

SEQ ID NO: 3467275 - RNA, 21 nt, Human
cagcuccagggaauccaagcc

SEQ ID NO: 3467276 - RNA, 22 nt, Human
cagcuccagggaauccaagccu

SEQ ID NO: 3467277 - RNA, 17 nt, Human
cagcucccacaagccuc

SEQ ID NO: 3467278 - RNA, 15 nt, Human
cagcucccaccccac

SEQ ID NO: 3467279 - RNA, 20 nt, Human
cagcucccaccccacccccu

SEQ ID NO: 3467280 - RNA, 21 nt, Human
cagcucccaccuccccuuggg

SEQ ID NO: 3467281 - RNA, 24 nt, Human
cagcucccaggaccacaggcucag

SEQ ID NO: 3467282 - RNA, 17 nt, Human
cagcucccauuucuacu

SEQ ID NO: 3467283 - RNA, 13 nt, Human
cagcuccccaaga

SEQ ID NO: 3467284 - RNA, 18 nt, Human
cagcucccccucccuccc

SEQ ID NO: 3467285 - RNA, 21 nt, Human
cagcucccccuguccccucag

SEQ ID NO: 3467286 - RNA, 21 nt, Human
cagcuccccucggagaagagc

SEQ ID NO: 3467287 - RNA, 15 nt, Human
cagcucccuaggaga

SEQ ID NO: 3467288 - RNA, 18 nt, Human
cagcucccuaggagacca

SEQ ID NO: 3467289 - RNA, 19 nt, Human
cagcucccuaggagaccaa

SEQ ID NO: 3467290 - RNA, 16 nt, Human
cagcucccuggcuucu

SEQ ID NO: 3467291 - RNA, 18 nt, Human
cagcucccugugccccca

SEQ ID NO: 3467292 - RNA, 22 nt, Human
cagcucccugugcccccagggu

SEQ ID NO: 3467293 - RNA, 12 nt, Human
cagcucccuucu

SEQ ID NO: 3467294 - RNA, 13 nt, Human
cagcucccuucug

SEQ ID NO: 3467295 - RNA, 15 nt, Human
cagcucccuucuguu

SEQ ID NO: 3467296 - RNA, 19 nt, Human
cagcuccuaacccuuauca

SEQ ID NO: 3467297 - RNA, 19 nt, Human
cagcuccucauccagggcu

SEQ ID NO: 3467298 - RNA, 12 nt, Human
cagcuccucugu

SEQ ID NO: 3467299 - RNA, 14 nt, Human
cagcuccuuccugg

SEQ ID NO: 3467300 - RNA, 16 nt, Human
cagcuccuucuguccu

SEQ ID NO: 3467301 - RNA, 18 nt, Human
cagcuccuugggaggaag

SEQ ID NO: 3467302 - RNA, 22 nt, Human
cagcuccuugggaggaagcaga

SEQ ID NO: 3467303 - RNA, 23 nt, Human
cagcuccuugggaggaagcagaa

SEQ ID NO: 3467304 - RNA, 13 nt, Human
cagcuccuuuucc

SEQ ID NO: 3467305 - RNA, 22 nt, Human
cagcucgcaccccccuguucua

SEQ ID NO: 3467306 - RNA, 22 nt, Human
cagcucgcuggauggcggaagc

SEQ ID NO: 3467307 - RNA, 16 nt, Human
cagcucuaauaaaaca

SEQ ID NO: 3467308 - RNA, 19 nt, Human
cagcucuacccugcauggc

SEQ ID NO: 3467309 - RNA, 15 nt, Human
cagcucuacuggucu

SEQ ID NO: 3467310 - RNA, 21 nt, Human
cagcucuagacaacccugcaa

SEQ ID NO: 3467311 - RNA, 13 nt, Human
cagcucucagcca

SEQ ID NO: 3467312 - RNA, 12 nt, Human
cagcucuccagu

SEQ ID NO: 3467313 - RNA, 14 nt, Human
cagcucucccucug

SEQ ID NO: 3467314 - RNA, 19 nt, Human
cagcucucccucuggcccu

SEQ ID NO: 3467315 - RNA, 17 nt, Human
cagcucucugcccugug

SEQ ID NO: 3467316 - RNA, 18 nt, Human
cagcucugaaaccagugu

SEQ ID NO: 3467317 - RNA, 16 nt, Human
cagcucugaaagagaa

SEQ ID NO: 3467318 - RNA, 21 nt, Human
cagcucugacauucugauucg

SEQ ID NO: 3467319 - RNA, 20 nt, Human
cagcucugcauacucauuag

SEQ ID NO: 3467320 - RNA, 20 nt, Human
cagcucugccgucucuggag

SEQ ID NO: 3467321 - RNA, 12 nt, Human
cagcucugcuug

SEQ ID NO: 3467322 - RNA, 13 nt, Human
cagcucugcuugc

SEQ ID NO: 3467323 - RNA, 17 nt, Human
cagcucuggacagcccc

SEQ ID NO: 3467324 - RNA, 21 nt, Human
cagcucuggacagccccaccc

SEQ ID NO: 3467325 - RNA, 11 nt, Human
cagcucuggag

SEQ ID NO: 3467326 - RNA, 17 nt, Human
cagcucuggcucacaga

SEQ ID NO: 3467327 - RNA, 12 nt, Human
cagcucuggcuu

SEQ ID NO: 3467328 - RNA, 14 nt, Human
cagcucugggagag

SEQ ID NO: 3467329 - RNA, 19 nt, Human
cagcucugggccauucucc

SEQ ID NO: 3467330 - RNA, 17 nt, Human
cagcucuguccugggag

SEQ ID NO: 3467331 - RNA, 23 nt, Human
cagcucuguccugggagugagcu

SEQ ID NO: 3467332 - RNA, 16 nt, Human
cagcucuguucuuccu

SEQ ID NO: 3467333 - RNA, 20 nt, Human
cagcucuguucuuccucagc

SEQ ID NO: 3467334 - RNA, 21 nt, Human
cagcucuguucuuccucagcc

SEQ ID NO: 3467335 - RNA, 13 nt, Human
cagcucuuccuag

SEQ ID NO: 3467336 - RNA, 19 nt, Human
cagcucuuccuagcuggag

SEQ ID NO: 3467337 - RNA, 13 nt, Human
cagcucuucucca

SEQ ID NO: 3467338 - RNA, 15 nt, Human
cagcucuucuccagg

SEQ ID NO: 3467339 - RNA, 19 nt, Human
cagcucuucuccaggcugu

SEQ ID NO: 3467340 - RNA, 18 nt, Human
cagcucuucuccccaggu

SEQ ID NO: 3467341 - RNA, 15 nt, Human
cagcucuugcccuuc

SEQ ID NO: 3467342 - RNA, 21 nt, Human
cagcucuugcuaaucaguguc

SEQ ID NO: 3467343 - RNA, 22 nt, Human
cagcucuugcuaaucagugucu

SEQ ID NO: 3467344 - RNA, 19 nt, Human
cagcucuuuccuccuucca

SEQ ID NO: 3467345 - RNA, 22 nt, Human
cagcucuuuccuccuuccaugg

SEQ ID NO: 3467346 - RNA, 18 nt, Human
cagcucuuuuugugaagu

SEQ ID NO: 3467347 - RNA, 16 nt, Human
cagcugaaauugaaaa

SEQ ID NO: 3467348 - RNA, 20 nt, Human
cagcugaaauugaaaaguua

SEQ ID NO: 3467349 - RNA, 15 nt, Human
cagcugaacagccaa

SEQ ID NO: 3467350 - RNA, 22 nt, Human
cagcugaacaguguuggcuuuc

SEQ ID NO: 3467351 - RNA, 23 nt, Human
cagcugaaguugcagauguuaga

SEQ ID NO: 3467352 - RNA, 14 nt, Human
cagcugacaguccu

SEQ ID NO: 3467353 - RNA, 13 nt, Human
cagcugaccucug

SEQ ID NO: 3467354 - RNA, 18 nt, Human
cagcugacuaaacuuuuu

SEQ ID NO: 3467355 - RNA, 17 nt, Human
cagcugagagaaaauaa

SEQ ID NO: 3467356 - RNA, 16 nt, Human
cagcugagcagggccg

SEQ ID NO: 3467357 - RNA, 20 nt, Human
cagcugagcagggccgggga

SEQ ID NO: 3467358 - RNA, 15 nt, Human
cagcugagccuucug

SEQ ID NO: 3467359 - RNA, 16 nt, Human
cagcugagccuucuga

SEQ ID NO: 3467360 - RNA, 17 nt, Human
cagcugagccuucugag

SEQ ID NO: 3467361 - RNA, 19 nt, Human
cagcugagggugagugggu

SEQ ID NO: 3467362 - RNA, 19 nt, Human
cagcugaggucucuugagg

SEQ ID NO: 3467363 - RNA, 14 nt, Human
cagcugaguuauga

SEQ ID NO: 3467364 - RNA, 12 nt, Human
cagcugaguugu

SEQ ID NO: 3467365 - RNA, 14 nt, Human
cagcugaugaguua

SEQ ID NO: 3467366 - RNA, 20 nt, Human
cagcugaugaguuacagccu

SEQ ID NO: 3467367 - RNA, 15 nt, Human
cagcugauuuuaaca

SEQ ID NO: 3467368 - RNA, 20 nt, Human
cagcugauuuuaacaauaac

SEQ ID NO: 3467369 - RNA, 11 nt, Human
cagcugcaaag

SEQ ID NO: 3467370 - RNA, 16 nt, Human
cagcugcaaaguguuu

SEQ ID NO: 3467371 - RNA, 20 nt, Human
cagcugcaccccuuccuggg

SEQ ID NO: 3467372 - RNA, 20 nt, Human
cagcugcaccugccagccug

SEQ ID NO: 3467373 - RNA, 21 nt, Human
cagcugcaccugccagccugg

SEQ ID NO: 3467374 - RNA, 15 nt, Human
cagcugcagagacag

SEQ ID NO: 3467375 - RNA, 16 nt, Human
cagcugcagagacaga

SEQ ID NO: 3467376 - RNA, 16 nt, Human
cagcugcagcugggcu

SEQ ID NO: 3467377 - RNA, 15 nt, Human
cagcugcaggaauca

SEQ ID NO: 3467378 - RNA, 16 nt, Human
cagcugcaucuacuca

SEQ ID NO: 3467379 - RNA, 16 nt, Human
cagcugcauuccgcag

SEQ ID NO: 3467380 - RNA, 16 nt, Human
cagcugccagagaagc

SEQ ID NO: 3467381 - RNA, 11 nt, Human
cagcugccagu

SEQ ID NO: 3467382 - RNA, 15 nt, Human
cagcugccccagcca

SEQ ID NO: 3467383 - RNA, 22 nt, Human
cagcugcccccagagccacagu

SEQ ID NO: 3467384 - RNA, 15 nt, Human
cagcugcccccgcuc

SEQ ID NO: 3467385 - RNA, 13 nt, Human
cagcugccccggg

SEQ ID NO: 3467386 - RNA, 16 nt, Human
cagcugccccucccug

SEQ ID NO: 3467387 - RNA, 19 nt, Human
cagcugccccucccugcca

SEQ ID NO: 3467388 - RNA, 18 nt, Human
cagcugcccuaugggccu

SEQ ID NO: 3467389 - RNA, 20 nt, Human
cagcugcccuaugggccugc

SEQ ID NO: 3467390 - RNA, 15 nt, Human
cagcugcccuuccgc

SEQ ID NO: 3467391 - RNA, 19 nt, Human
cagcugccgaccagagccc

SEQ ID NO: 3467392 - RNA, 13 nt, Human
cagucccacugug

SEQ ID NO: 3467393 - RNA, 14 nt, Human
cagucccacugugc

SEQ ID NO: 3467394 - RNA, 14 nt, Human
cagucccagagcag

SEQ ID NO: 3467395 - RNA, 14 nt, Human
cagucccagcagcc

SEQ ID NO: 3467396 - RNA, 15 nt, Human
cagucccagcagcca

SEQ ID NO: 3467397 - RNA, 15 nt, Human
caguccccaccccug

SEQ ID NO: 3467398 - RNA, 16 nt, Human
caguccccaccccugc

SEQ ID NO: 3467399 - RNA, 22 nt, Human
cagucccccuauccuuggcacc

SEQ ID NO: 3467400 - RNA, 13 nt, Human
caguccccuccca

SEQ ID NO: 3467401 - RNA, 14 nt, Human
caguccccucccau

SEQ ID NO: 3467402 - RNA, 19 nt, Human
caguccccucccaucuggg

SEQ ID NO: 3467403 - RNA, 13 nt, Human
caguccccuuccc

SEQ ID NO: 3467404 - RNA, 14 nt, Human
caguccccuucccg

SEQ ID NO: 3467405 - RNA, 22 nt, Human
caguccccuucccgugaccugg

SEQ ID NO: 3467406 - RNA, 19 nt, Human
caguccccuucccuccaag

SEQ ID NO: 3467407 - RNA, 15 nt, Human
cagucccuauguauu

SEQ ID NO: 3467408 - RNA, 14 nt, Human
cagucccugccaau

SEQ ID NO: 3467409 - RNA, 15 nt, Human
cagucccugccaaug

SEQ ID NO: 3467410 - RNA, 22 nt, Human
cagucccugggggaagcccugg

SEQ ID NO: 3467411 - RNA, 19 nt, Human
caguccguguggauccaau

SEQ ID NO: 3467412 - RNA, 20 nt, Human
caguccuacucaagcgggug

SEQ ID NO: 3467413 - RNA, 17 nt, Human
caguccuagcugcacag

SEQ ID NO: 3467414 - RNA, 15 nt, Human
caguccuaucugggc

SEQ ID NO: 3467415 - RNA, 16 nt, Human
caguccuaucugggcu

SEQ ID NO: 3467416 - RNA, 12 nt, Human
caguccucccau

SEQ ID NO: 3467417 - RNA, 13 nt, Human
caguccucccauc

SEQ ID NO: 3467418 - RNA, 16 nt, Human
caguccucccaucuca

SEQ ID NO: 3467419 - RNA, 12 nt, Human
caguccuccccu

SEQ ID NO: 3467420 - RNA, 15 nt, Human
caguccuccccucac

SEQ ID NO: 3467421 - RNA, 19 nt, Human
caguccuccccucacagcc

SEQ ID NO: 3467422 - RNA, 20 nt, Human
caguccucuccaccuagugg

SEQ ID NO: 3467423 - RNA, 22 nt, Human
caguccucuccaccuaguggcu

SEQ ID NO: 3467424 - RNA, 13 nt, Human
caguccucuuuca

SEQ ID NO: 3467425 - RNA, 22 nt, Human
caguccugaucagagccguggu

SEQ ID NO: 3467426 - RNA, 14 nt, Human
caguccugcccgcc

SEQ ID NO: 3467427 - RNA, 17 nt, Human
caguccugccucagccu

SEQ ID NO: 3467428 - RNA, 19 nt, Human
caguccugccucagccucc

SEQ ID NO: 3467429 - RNA, 13 nt, Human
caguccugccugg

SEQ ID NO: 3467430 - RNA, 16 nt, Human
caguccugccuggcca

SEQ ID NO: 3467431 - RNA, 18 nt, Human
caguccugccuggccagg

SEQ ID NO: 3467432 - RNA, 21 nt, Human
caguccugccuggccaggcag

SEQ ID NO: 3467433 - RNA, 13 nt, Human
caguccugcucca

SEQ ID NO: 3467434 - RNA, 15 nt, Human
caguccugcuccaga

SEQ ID NO: 3467435 - RNA, 16 nt, Human
caguccugcuccagaa

SEQ ID NO: 3467436 - RNA, 22 nt, Human
caguccugcucucuacccagcc

SEQ ID NO: 3467437 - RNA, 17 nt, Human
caguccuggaagccagc

SEQ ID NO: 3467438 - RNA, 22 nt, Human
caguccuggaagccagcuuucc

SEQ ID NO: 3467439 - RNA, 23 nt, Human
caguccuggagcaaucacagaug

SEQ ID NO: 3467440 - RNA, 15 nt, Human
caguccuuggccugc

SEQ ID NO: 3467441 - RNA, 15 nt, Human
cagucgauagagcug

SEQ ID NO: 3467442 - RNA, 16 nt, Human
cagucgauagagcugu

SEQ ID NO: 3467443 - RNA, 15 nt, Human
cagucgcgcugccug

SEQ ID NO: 3467444 - RNA, 16 nt, Human
cagucgcgcugccugu

SEQ ID NO: 3467445 - RNA, 20 nt, Human
cagucgcgcugccugugugg

SEQ ID NO: 3467446 - RNA, 17 nt, Human
cagucgggggcuggccu

SEQ ID NO: 3467447 - RNA, 15 nt, Human
cagucguuagaauau

SEQ ID NO: 3467448 - RNA, 16 nt, Human
cagucguucccagugu

SEQ ID NO: 3467449 - RNA, 22 nt, Human
cagucuaaagcugguuuaaugu

SEQ ID NO: 3467450 - RNA, 14 nt, Human
cagucuacccagag

SEQ ID NO: 3467451 - RNA, 15 nt, Human
cagucuacccagaga

SEQ ID NO: 3467452 - RNA, 13 nt, Human
cagucuaguuccu

SEQ ID NO: 3467453 - RNA, 15 nt, Human
cagucuaucauuguu

SEQ ID NO: 3467454 - RNA, 23 nt, Human
cagucuauccacagagaguccca

SEQ ID NO: 3467455 - RNA, 16 nt, Human
cagucuauuugagacu

SEQ ID NO: 3467456 - RNA, 10 nt, Human
cagucucaca

SEQ ID NO: 3467457 - RNA, 22 nt, Human
cagucucacaugauuccagcca

SEQ ID NO: 3467458 - RNA, 19 nt, Human
cagucucacugugggaagg

SEQ ID NO: 3467459 - RNA, 13 nt, Human
cagucucaggagc

SEQ ID NO: 3467460 - RNA, 17 nt, Human
cagucuccaccaggaac

SEQ ID NO: 3467461 - RNA, 19 nt, Human
cagucucccccacccuugu

SEQ ID NO: 3467462 - RNA, 14 nt, Human
cagucucccucccu

SEQ ID NO: 3467463 - RNA, 11 nt, Human
cagucucccuu

SEQ ID NO: 3467464 - RNA, 17 nt, Human
cagucucccuucuccca

SEQ ID NO: 3467465 - RNA, 22 nt, Human
cagucucccuucucccaugagg

SEQ ID NO: 3467466 - RNA, 18 nt, Human
cagucucccuuucccuuc

SEQ ID NO: 3467467 - RNA, 22 nt, Human
cagucucccuuucccuucuugg

SEQ ID NO: 3467468 - RNA, 17 nt, Human
cagucuccggccucucc

SEQ ID NO: 3467469 - RNA, 22 nt, Human
cagucuccggccucuccagccu

SEQ ID NO: 3467470 - RNA, 12 nt, Human
cagucuccucuu

SEQ ID NO: 3467471 - RNA, 20 nt, Human
cagucuccucuuuaaaacaa

SEQ ID NO: 3467472 - RNA, 17 nt, Human
cagucucuauaccaaua

SEQ ID NO: 3467473 - RNA, 19 nt, Human
cagucucuauaccaauaaa

SEQ ID NO: 3467474 - RNA, 22 nt, Human
cagucucuauaccaauaaagug

SEQ ID NO: 3467475 - RNA, 23 nt, Human
cagucucuauaccaauaaaguga

SEQ ID NO: 3467476 - RNA, 14 nt, Human
cagucucucuuaaa

SEQ ID NO: 3467477 - RNA, 22 nt, Human
cagucucucuuacccuucugug

SEQ ID NO: 3467478 - RNA, 14 nt, Human
cagucucucuucuc

SEQ ID NO: 3467479 - RNA, 12 nt, Human
cagucucugagc

SEQ ID NO: 3467480 - RNA, 14 nt, Human
cagucucugagcag

SEQ ID NO: 3467481 - RNA, 13 nt, Human
cagucucugccuu

SEQ ID NO: 3467482 - RNA, 14 nt, Human
cagucucugccuug

SEQ ID NO: 3467483 - RNA, 15 nt, Human
cagucucuuuaaucu

SEQ ID NO: 3467484 - RNA, 16 nt, Human
cagucugaaugcugcc

SEQ ID NO: 3467485 - RNA, 18 nt, Human
cagucugagagaggccau

SEQ ID NO: 3467486 - RNA, 21 nt, Human
cagucugauucccaagcucug

SEQ ID NO: 3467487 - RNA, 12 nt, Human
cagucugcugcc

SEQ ID NO: 3467488 - RNA, 16 nt, Human
cagucugcuuagaaau

SEQ ID NO: 3467489 - RNA, 17 nt, Human
cagucugcuuagaaaua

SEQ ID NO: 3467490 - RNA, 17 nt, Human
cagucuggaaugcagug

SEQ ID NO: 3467491 - RNA, 16 nt, Human
cagucuggaggggcau

SEQ ID NO: 3467492 - RNA, 21 nt, Human
cagucuggaggggcauggcca

SEQ ID NO: 3467493 - RNA, 24 nt, Human
cagucugucaugaacauguuccug

SEQ ID NO: 3467494 - RNA, 11 nt, Human
cagucugucuu

SEQ ID NO: 3467495 - RNA, 23 nt, Human
cagucugucuucuguauauaaau

SEQ ID NO: 3467496 - RNA, 15 nt, Human
cagucuguggaucag

SEQ ID NO: 3467497 - RNA, 22 nt, Human
cagucuuagaucauaguuuuau

SEQ ID NO: 3467498 - RNA, 19 nt, Human
cagucuuaugcuuccagaa

SEQ ID NO: 3467499 - RNA, 19 nt, Human
cagucuuccacaaagaaaa

SEQ ID NO: 3467500 - RNA, 16 nt, Human
cagucuuccaccugga

SEQ ID NO: 3467501 - RNA, 19 nt, Human
cagucuuccaccuggaagc

SEQ ID NO: 3467502 - RNA, 15 nt, Human
cagucuuccauuugc

SEQ ID NO: 3467503 - RNA, 23 nt, Human
cagucuucccuagggcugggugu

SEQ ID NO: 3467504 - RNA, 18 nt, Human
cagucuuccugacacuuu

SEQ ID NO: 3467505 - RNA, 15 nt, Human
cagucuugcagcagg

SEQ ID NO: 3467506 - RNA, 17 nt, Human
cagucuuuaaaggccca

SEQ ID NO: 3467507 - RNA, 20 nt, Human
cagucuuuaaaggcccagcc

SEQ ID NO: 3467508 - RNA, 20 nt, Human
cagucuuucaacucauugca

SEQ ID NO: 3467509 - RNA, 12 nt, Human
cagucuuuuguc

SEQ ID NO: 3467510 - RNA, 16 nt, Human
cagucuuuuucuguug

SEQ ID NO: 3467511 - RNA, 22 nt, Human
cagugaaaauaagccaugagaa

SEQ ID NO: 3467512 - RNA, 23 nt, Human
cagugaaaauaagccaugagaau

SEQ ID NO: 3467513 - RNA, 13 nt, Human
cagugaaagaaaa

SEQ ID NO: 3467514 - RNA, 15 nt, Human
cagugaagacagaag

SEQ ID NO: 3467515 - RNA, 16 nt, Human
cagugaagacagaagu

SEQ ID NO: 3467516 - RNA, 14 nt, Human
cagugaaguugcug

SEQ ID NO: 3467517 - RNA, 20 nt, Human
cagugaauuguguaggagag

SEQ ID NO: 3467518 - RNA, 18 nt, Human
cagugacacuucagagag

SEQ ID NO: 3467519 - RNA, 19 nt, Human
cagugacacuucagagagc

SEQ ID NO: 3467520 - RNA, 22 nt, Human
cagugacacuucagagagcugg

SEQ ID NO: 3467521 - RNA, 23 nt, Human
cagugacacuucagagagcuggu

SEQ ID NO: 3467522 - RNA, 15 nt, Human
cagugacagacaggc

SEQ ID NO: 3467523 - RNA, 18 nt, Human
cagugacagacaggcucu

SEQ ID NO: 3467524 - RNA, 22 nt, Human
cagugacgugcaccuguacuca

SEQ ID NO: 3467525 - RNA, 13 nt, Human
cagugacuccagg

SEQ ID NO: 3467526 - RNA, 14 nt, Human
cagugacuccagga

SEQ ID NO: 3467527 - RNA, 15 nt, Human
cagugacuccaggag

SEQ ID NO: 3467528 - RNA, 19 nt, Human
cagugacucgggcuccugu

SEQ ID NO: 3467529 - RNA, 23 nt, Human
cagugacucgggcuccugugccc

SEQ ID NO: 3467530 - RNA, 13 nt, Human
cagugacuucuga

SEQ ID NO: 3467531 - RNA, 15 nt, Human
cagugacuucugaga

SEQ ID NO: 3467532 - RNA, 20 nt, Human
cagugagaaaaagcuccugu

SEQ ID NO: 3467533 - RNA, 22 nt, Human
cagugagaaaaagcuccugucc

SEQ ID NO: 3467534 - RNA, 15 nt, Human
cagugagacagcucu

SEQ ID NO: 3467535 - RNA, 21 nt, Human
cagugagagaguggcuggggc

SEQ ID NO: 3467536 - RNA, 15 nt, Human
cagugagagcagaug

SEQ ID NO: 3467537 - RNA, 20 nt, Human
caguuuucuggcuggagccu

SEQ ID NO: 3467538 - RNA, 20 nt, Human
caguuuugacaucagccagc

SEQ ID NO: 3467539 - RNA, 18 nt, Human
caguuuugguugcuuuaa

SEQ ID NO: 3467540 - RNA, 16 nt, Human
caguuuuuuaugcuaa

SEQ ID NO: 3467541 - RNA, 20 nt, Human
caguuuuuuuuuucuugucu

SEQ ID NO: 3467542 - RNA, 23 nt, Human
caguuuuuuuuuucuugucuaua

SEQ ID NO: 3467543 - RNA, 21 nt, Human
cauaaaaacaacuuuauaccc

SEQ ID NO: 3467544 - RNA, 23 nt, Human
cauaaaaagcaaaacaaaaauua

SEQ ID NO: 3467545 - RNA, 20 nt, Human
cauaaaaaggacaucagcaa

SEQ ID NO: 3467546 - RNA, 22 nt, Human
cauaaaaaguuaaaaaaaauaa

SEQ ID NO: 3467547 - RNA, 12 nt, Human
cauaaaacaggu

SEQ ID NO: 3467548 - RNA, 16 nt, Human
cauaaaacauuaagaa

SEQ ID NO: 3467549 - RNA, 17 nt, Human
cauaaaacauuaagaaa

SEQ ID NO: 3467550 - RNA, 18 nt, Human
cauaaaacauuaagaaaa

SEQ ID NO: 3467551 - RNA, 14 nt, Human
cauaaaagaauuuu

SEQ ID NO: 3467552 - RNA, 22 nt, Human
cauaaaauguccaguaagauca

SEQ ID NO: 3467553 - RNA, 22 nt, Human
cauaaacaagaccacguuucua

SEQ ID NO: 3467554 - RNA, 11 nt, Human
cauaaacauca

SEQ ID NO: 3467555 - RNA, 22 nt, Human
cauaaacaucagguuaggcagu

SEQ ID NO: 3467556 - RNA, 15 nt, Human
cauaaacauucuuuu

SEQ ID NO: 3467557 - RNA, 21 nt, Human
cauaaacccaguugccaucug

SEQ ID NO: 3467558 - RNA, 17 nt, Human
cauaaacugacuuuauc

SEQ ID NO: 3467559 - RNA, 14 nt, Human
cauaaacugugugc

SEQ ID NO: 3467560 - RNA, 15 nt, Human
cauaaacugugugca

SEQ ID NO: 3467561 - RNA, 11 nt, Human
cauaaagaagc

SEQ ID NO: 3467562 - RNA, 22 nt, Human
cauaaagaauuugucacaggaa

SEQ ID NO: 3467563 - RNA, 22 nt, Human
cauaaagaggcguugcuuucac

SEQ ID NO: 3467564 - RNA, 19 nt, Human
cauaaaggaaaagacacau

SEQ ID NO: 3467565 - RNA, 18 nt, Human
cauaaaggauaaacuuuu

SEQ ID NO: 3467566 - RNA, 16 nt, Human
cauaaagguaaaacaa

SEQ ID NO: 3467567 - RNA, 15 nt, Human
cauaaaguaaauaca

SEQ ID NO: 3467568 - RNA, 11 nt, Human
cauaaagucag

SEQ ID NO: 3467569 - RNA, 14 nt, Human
cauaaagugagaaa

SEQ ID NO: 3467570 - RNA, 17 nt, Human
cauaaagugagaaaacu

SEQ ID NO: 3467571 - RNA, 18 nt, Human
cauaaaguuagaaucuau

SEQ ID NO: 3467572 - RNA, 12 nt, Human
cauaaauaugca

SEQ ID NO: 3467573 - RNA, 15 nt, Human
cauaaauaugcagug

SEQ ID NO: 3467574 - RNA, 13 nt, Human
cauaaaugaagca

SEQ ID NO: 3467575 - RNA, 14 nt, Human
cauaaaugaagcag

SEQ ID NO: 3467576 - RNA, 21 nt, Human
cauaaaugcagcccauuucuc

SEQ ID NO: 3467577 - RNA, 11 nt, Human
cauaaauuauu

SEQ ID NO: 3467578 - RNA, 12 nt, Human
cauaaauuauug

SEQ ID NO: 3467579 - RNA, 17 nt, Human
cauaaauuauuugauua

SEQ ID NO: 3467580 - RNA, 19 nt, Human
cauaaauuuaguauuuugu

SEQ ID NO: 3467581 - RNA, 12 nt, Human
cauaaauuuuuu

SEQ ID NO: 3467582 - RNA, 13 nt, Human
cauaacagaaugc

SEQ ID NO: 3467583 - RNA, 13 nt, Human
cauaacagugcag

SEQ ID NO: 3467584 - RNA, 16 nt, Human
cauaacagugcagggc

SEQ ID NO: 3467585 - RNA, 16 nt, Human
cauaacagugccauug

SEQ ID NO: 3467586 - RNA, 13 nt, Human
cauaaccccaccc

SEQ ID NO: 3467587 - RNA, 20 nt, Human
cauaaccccacccuugccca

SEQ ID NO: 3467588 - RNA, 18 nt, Human
cauaaccuuaccagauuu

SEQ ID NO: 3467589 - RNA, 15 nt, Human
cauaacguuuuuccu

SEQ ID NO: 3467590 - RNA, 20 nt, Human
cauaacguuuuuccuuuaaa

SEQ ID NO: 3467591 - RNA, 13 nt, Human
cauaacuaaauuu

SEQ ID NO: 3467592 - RNA, 11 nt, Human
cauaacugaaa

SEQ ID NO: 3467593 - RNA, 14 nt, Human
cauaacugaaaaug

SEQ ID NO: 3467594 - RNA, 14 nt, Human
cauaacugaacauc

SEQ ID NO: 3467595 - RNA, 13 nt, Human
cauaacugacaaa

SEQ ID NO: 3467596 - RNA, 16 nt, Human
cauaacugacaaauca

SEQ ID NO: 3467597 - RNA, 19 nt, Human
cauaacugacaaaucaagu

SEQ ID NO: 3467598 - RNA, 20 nt, Human
cauaacugacaaaucaaguu

SEQ ID NO: 3467599 - RNA, 22 nt, Human
cauaacugacaaaucaaguuuc

SEQ ID NO: 3467600 - RNA, 19 nt, Human
cauaacugacuuaguucuu

SEQ ID NO: 3467601 - RNA, 14 nt, Human
cauaacugccuuga

SEQ ID NO: 3467602 - RNA, 21 nt, Human
cauaacuuauugcugauuuua

SEQ ID NO: 3467603 - RNA, 22 nt, Human
cauaacuuauugcugauuuuaa

SEQ ID NO: 3467604 - RNA, 14 nt, Human
cauaacuuccugua

SEQ ID NO: 3467605 - RNA, 12 nt, Human
cauaagaaugaa

SEQ ID NO: 3467606 - RNA, 11 nt, Human
cauaagaccau

SEQ ID NO: 3467607 - RNA, 16 nt, Human
cauaagacccuaagcc

SEQ ID NO: 3467608 - RNA, 16 nt, Human
cauaagcuacugccau

SEQ ID NO: 3467609 - RNA, 16 nt, Human
cauaagcuauuuuucu

SEQ ID NO: 3467610 - RNA, 17 nt, Human
cauaagcuauuuuucua

SEQ ID NO: 3467611 - RNA, 18 nt, Human
cauaagcuauuuuucuaa

SEQ ID NO: 3467612 - RNA, 16 nt, Human
cauaagcucagaaucc

SEQ ID NO: 3467613 - RNA, 18 nt, Human
cauaagcuuaugcuuaaa

SEQ ID NO: 3467614 - RNA, 19 nt, Human
cauaagcuuccauuuuaau

SEQ ID NO: 3467615 - RNA, 22 nt, Human
cauaagguuucguuucuguaua

SEQ ID NO: 3467616 - RNA, 22 nt, Human
cauaaguaauucaagaaaacaa

SEQ ID NO: 3467617 - RNA, 16 nt, Human
cauaaguauacaguuc

SEQ ID NO: 3467618 - RNA, 12 nt, Human
cauaaguuucug

SEQ ID NO: 3467619 - RNA, 18 nt, Human
cauaauaaaaggcuuuga

SEQ ID NO: 3467620 - RNA, 20 nt, Human
cauaauacacuugcccugcu

SEQ ID NO: 3467621 - RNA, 21 nt, Human
cauaauacacuugcccugcuc

SEQ ID NO: 3467622 - RNA, 21 nt, Human
cauaaucuaguuuacagaaaa

SEQ ID NO: 3467623 - RNA, 22 nt, Human
cauaaucuaguuuacagaaaaa

SEQ ID NO: 3467624 - RNA, 19 nt, Human
cauaaucuggacuccucug

SEQ ID NO: 3467625 - RNA, 20 nt, Human
cauaaucuggacuccucugu

SEQ ID NO: 3467626 - RNA, 22 nt, Human
cauaaucuggacuccucugucc

SEQ ID NO: 3467627 - RNA, 15 nt, Human
cauaaucuucugccu

SEQ ID NO: 3467628 - RNA, 21 nt, Human
cauaaugcauucuucucuguu

SEQ ID NO: 3467629 - RNA, 14 nt, Human
cauaaugcgugcau

SEQ ID NO: 3467630 - RNA, 17 nt, Human
cauaaugcgugcauacc

SEQ ID NO: 3467631 - RNA, 21 nt, Human
cauaaugcgugcauaccacuu

SEQ ID NO: 3467632 - RNA, 23 nt, Human
cauaaugcgugcauaccacuuuu

SEQ ID NO: 3467633 - RNA, 21 nt, Human
cauaaugcuaauuuaaagaga

SEQ ID NO: 3467634 - RNA, 18 nt, Human
cauaaugcuuaauuucua

SEQ ID NO: 3467635 - RNA, 22 nt, Human
cauaaugggccacugaaaucug

SEQ ID NO: 3467636 - RNA, 20 nt, Human
cauaauguacugauuucagu

SEQ ID NO: 3467637 - RNA, 14 nt, Human
cauaauguauuguu

SEQ ID NO: 3467638 - RNA, 13 nt, Human
cauaaugugaagu

SEQ ID NO: 3467639 - RNA, 15 nt, Human
cauaauguucugcua

SEQ ID NO: 3467640 - RNA, 15 nt, Human
cauaauuaaaguguc

SEQ ID NO: 3467641 - RNA, 21 nt, Human
cauaauuauccaggaagggaa

SEQ ID NO: 3467642 - RNA, 18 nt, Human
cauaauucugaaguuaua

SEQ ID NO: 3467643 - RNA, 16 nt, Human
cauaauucuuguauau

SEQ ID NO: 3467644 - RNA, 18 nt, Human
cauaauucuuguauauua

SEQ ID NO: 3467645 - RNA, 20 nt, Human
cauaauuuauacaggucaua

SEQ ID NO: 3467646 - RNA, 21 nt, Human
cauacaaacaagcauauaaaa

SEQ ID NO: 3467647 - RNA, 18 nt, Human
cauacaaagcgugcacaa

SEQ ID NO: 3467648 - RNA, 15 nt, Human
cauacaacacaaaga

SEQ ID NO: 3467649 - RNA, 13 nt, Human
cauacaaggccca

SEQ ID NO: 3467650 - RNA, 19 nt, Human
cauacacacgcugccuucg

SEQ ID NO: 3467651 - RNA, 13 nt, Human
cauacaccagcau

SEQ ID NO: 3467652 - RNA, 13 nt, Human
cauacacgaaaga

SEQ ID NO: 3467653 - RNA, 15 nt, Human
cauacacuuccuucu

SEQ ID NO: 3467654 - RNA, 13 nt, Human
cauacagagaagu

SEQ ID NO: 3467655 - RNA, 22 nt, Human
cauacagagaagucacagggca

SEQ ID NO: 3467656 - RNA, 18 nt, Human
cauacagcauuacaaauu

SEQ ID NO: 3467657 - RNA, 21 nt, Human
cauacaggauuugaacucaga

SEQ ID NO: 3467658 - RNA, 19 nt, Human
cauacagggaugguguuca

SEQ ID NO: 3467659 - RNA, 18 nt, Human
cauacauaaaagaaauaa

SEQ ID NO: 3467660 - RNA, 19 nt, Human
cauacauauuuuuguagca

SEQ ID NO: 3467661 - RNA, 21 nt, Human
cauacauucuucaagauccca

SEQ ID NO: 3467662 - RNA, 15 nt, Human
cauacauuguacgaa

SEQ ID NO: 3467663 - RNA, 17 nt, Human
cauacauuuauaauguu

SEQ ID NO: 3467664 - RNA, 14 nt, Human
cauacauuuucuaa

SEQ ID NO: 3467665 - RNA, 17 nt, Human
cauacauuuuguaccaa

SEQ ID NO: 3467666 - RNA, 20 nt, Human
cauaccaacucaacuuuuuu

SEQ ID NO: 3467667 - RNA, 18 nt, Human
cauaccacuuuuguucuu

SEQ ID NO: 3467668 - RNA, 14 nt, Human
cauacccaccccca

SEQ ID NO: 3467669 - RNA, 17 nt, Human
cauacccacccccaccc

SEQ ID NO: 3467670 - RNA, 20 nt, Human
cauaccccuuacaaaugaaa

SEQ ID NO: 3467671 - RNA, 22 nt, Human
cauacccgccuagcugcuguca

SEQ ID NO: 3467672 - RNA, 13 nt, Human
cauacccuccccc

SEQ ID NO: 3467673 - RNA, 14 nt, Human
cauacccugaccug

SEQ ID NO: 3467674 - RNA, 16 nt, Human
cauacccugaccuggc

SEQ ID NO: 3467675 - RNA, 18 nt, Human
cauacccugaccuggccc

SEQ ID NO: 3467676 - RNA, 18 nt, Human
cauaccuaaguacuguaa

SEQ ID NO: 3467677 - RNA, 16 nt, Human
cauaccuuccuucccu

SEQ ID NO: 3467678 - RNA, 14 nt, Human
cauacgauuuaagg

SEQ ID NO: 3467679 - RNA, 19 nt, Human
cauacggucagguuuaaca

SEQ ID NO: 3467680 - RNA, 16 nt, Human
cauacguacacauuuu

SEQ ID NO: 3467681 - RNA, 20 nt, Human
cauacuaauuauacccccug

SEQ ID NO: 3467682 - RNA, 19 nt, Human
cauguuccaauaaacagga

SEQ ID NO: 3467683 - RNA, 16 nt, Human
cauguucccuucuccu

SEQ ID NO: 3467684 - RNA, 13 nt, Human
cauguuccuucaa

SEQ ID NO: 3467685 - RNA, 20 nt, Human
cauguugaccaugucuauga

SEQ ID NO: 3467686 - RNA, 19 nt, Human
cauguugagccaggccugg

SEQ ID NO: 3467687 - RNA, 23 nt, Human
cauguugcacacccacucagcuc

SEQ ID NO: 3467688 - RNA, 17 nt, Human
cauguugccaaaauggu

SEQ ID NO: 3467689 - RNA, 15 nt, Human
cauguugcugaggag

SEQ ID NO: 3467690 - RNA, 18 nt, Human
cauguuggccaggcuggu

SEQ ID NO: 3467691 - RNA, 20 nt, Human
cauguuggccaggcuggucu

SEQ ID NO: 3467692 - RNA, 21 nt, Human
cauguuggccaggcuggucua

SEQ ID NO: 3467693 - RNA, 21 nt, Human
cauguuggccaggcuggucuu

SEQ ID NO: 3467694 - RNA, 20 nt, Human
cauguugguauuuaucuauu

SEQ ID NO: 3467695 - RNA, 18 nt, Human
cauguuggucaggcuggu

SEQ ID NO: 3467696 - RNA, 20 nt, Human
cauguugguugcacuuugua

SEQ ID NO: 3467697 - RNA, 16 nt, Human
cauguuguaaugcugc

SEQ ID NO: 3467698 - RNA, 17 nt, Human
cauguuguaaugcugca

SEQ ID NO: 3467699 - RNA, 18 nt, Human
cauguugugccucccugg

SEQ ID NO: 3467700 - RNA, 13 nt, Human
cauguuuaagauu

SEQ ID NO: 3467701 - RNA, 19 nt, Human
cauguuuaagauuuaauuu

SEQ ID NO: 3467702 - RNA, 19 nt, Human
cauguuuagacuuuaacau

SEQ ID NO: 3467703 - RNA, 23 nt, Human
cauguuuauaaaucuuaugcucu

SEQ ID NO: 3467704 - RNA, 20 nt, Human
cauguuuaugaaaauaaaua

SEQ ID NO: 3467705 - RNA, 14 nt, Human
cauguuuauguaaa

SEQ ID NO: 3467706 - RNA, 18 nt, Human
cauguuuauuacaguaua

SEQ ID NO: 3467707 - RNA, 19 nt, Human
cauguuuauuacaguauaa

SEQ ID NO: 3467708 - RNA, 15 nt, Human
cauguuuauuuuucu

SEQ ID NO: 3467709 - RNA, 14 nt, Human
cauguuuccagcag

SEQ ID NO: 3467710 - RNA, 21 nt, Human
cauguuuccucuaguucuuug

SEQ ID NO: 3467711 - RNA, 21 nt, Human
cauguuucucuggccccaagg

SEQ ID NO: 3467712 - RNA, 10 nt, Human
cauguuucuu

SEQ ID NO: 3467713 - RNA, 22 nt, Human
cauguuucuuugaucaugaaua

SEQ ID NO: 3467714 - RNA, 21 nt, Human
cauguuucuuuguaaugaaaa

SEQ ID NO: 3467715 - RNA, 22 nt, Human
cauguuucuuuguaaugaaaac

SEQ ID NO: 3467716 - RNA, 16 nt, Human
cauguuugagcucaga

SEQ ID NO: 3467717 - RNA, 23 nt, Human
cauguuugauguaucugagcagg

SEQ ID NO: 3467718 - RNA, 22 nt, Human
cauguuugcaccuuucuaguug

SEQ ID NO: 3467719 - RNA, 16 nt, Human
cauguuugcugaacac

SEQ ID NO: 3467720 - RNA, 14 nt, Human
cauguuugcuucau

SEQ ID NO: 3467721 - RNA, 21 nt, Human
cauguuuggugcauagaacug

SEQ ID NO: 3467722 - RNA, 15 nt, Human
cauguuugugauuga

SEQ ID NO: 3467723 - RNA, 18 nt, Human
cauguuuuaaagcuugcu

SEQ ID NO: 3467724 - RNA, 12 nt, Human
cauguuuuaaca

SEQ ID NO: 3467725 - RNA, 16 nt, Human
cauguuuuaacaaaaa

SEQ ID NO: 3467726 - RNA, 13 nt, Human
cauguuuucaaau

SEQ ID NO: 3467727 - RNA, 16 nt, Human
cauguuuucaaaugga

SEQ ID NO: 3467728 - RNA, 22 nt, Human
cauguuuucaaauggaguugga

SEQ ID NO: 3467729 - RNA, 18 nt, Human
cauguuuuccagcuccuc

SEQ ID NO: 3467730 - RNA, 21 nt, Human
cauguuuucugaaaauauaac

SEQ ID NO: 3467731 - RNA, 13 nt, Human
cauguuuugauaa

SEQ ID NO: 3467732 - RNA, 18 nt, Human
cauguuuugauaaaguag

SEQ ID NO: 3467733 - RNA, 14 nt, Human
cauguuuuguauac

SEQ ID NO: 3467734 - RNA, 22 nt, Human
cauguuuuguauacaaauauau

SEQ ID NO: 3467735 - RNA, 21 nt, Human
cauguuuugugcauuuguaaa

SEQ ID NO: 3467736 - RNA, 15 nt, Human
cauguuuuguuuacg

SEQ ID NO: 3467737 - RNA, 13 nt, Human
cauuaaaaaauga

SEQ ID NO: 3467738 - RNA, 22 nt, Human
cauuaaaaaaugaaauauuuuu
